United States Patent Application Publication US 2005/0244851 A1 - sequence listing, part 114

SEQ ID NO: 4446660 - DNA, 25 bp, Homo sapien
tgtcggttggtatccgtagtactct

SEQ ID NO: 4446661 - DNA, 25 bp, Homo sapien
aaattgccattggtaatatgcagag

SEQ ID NO: 4446662 - DNA, 25 bp, Homo sapien
tggctcggtgccaggtctctatctt

SEQ ID NO: 4446663 - DNA, 25 bp, Homo sapien
cttttatggctcttttagcatctca

SEQ ID NO: 4446664 - DNA, 25 bp, Homo sapien
ccggcattgtaagggctgattatct

SEQ ID NO: 4446665 - DNA, 25 bp, Homo sapien
gctgattatctgatcctcttactaa

SEQ ID NO: 4446666 - DNA, 25 bp, Homo sapien
gatcctcttactaatttattggttg

SEQ ID NO: 4446667 - DNA, 25 bp, Homo sapien
cttactcgcctatctccttgcttct

SEQ ID NO: 4446668 - DNA, 25 bp, Homo sapien
ttactcgcctatctccttgcttctt

SEQ ID NO: 4446669 - DNA, 25 bp, Homo sapien
gaaagaatggatggcaggtcgtcat

SEQ ID NO: 4446670 - DNA, 25 bp, Homo sapien
cttagtgtcagcgtagggagagtga

SEQ ID NO: 4446671 - DNA, 25 bp, Homo sapien
gatgcgagggcggtattcgtgaccc

SEQ ID NO: 4446672 - DNA, 25 bp, Homo sapien
aaggtggaagggatctgcgccagga

SEQ ID NO: 4446673 - DNA, 25 bp, Homo sapien
ctgattggtggaaccgcaaagaagt

SEQ ID NO: 4446674 - DNA, 25 bp, Homo sapien
aagaagtcgcgctttgattgggccg

SEQ ID NO: 4446675 - DNA, 25 bp, Homo sapien
cgcgctttgattgggccgctgtcag

SEQ ID NO: 4446676 - DNA, 25 bp, Homo sapien
tcaggtgtcgctgcctgcaggttcg

SEQ ID NO: 4446677 - DNA, 25 bp, Homo sapien
tcctccgcgcagaagcgccggccaa

SEQ ID NO: 4446678 - DNA, 25 bp, Homo sapien
gggtcacgctcctccgcgcagaagc

SEQ ID NO: 4446679 - DNA, 25 bp, Homo sapien
agaagcgccggccaacgcagcctga

SEQ ID NO: 4446680 - DNA, 25 bp, Homo sapien
ggccaacgcagcctgactctgttac

SEQ ID NO: 4446681 - DNA, 25 bp, Homo sapien
ctctctccgtagttcctagttcctg

SEQ ID NO: 4446682 - DNA, 25 bp, Homo sapien
tggcttctctctccgtagttcctag

SEQ ID NO: 4446683 - DNA, 25 bp, Homo sapien
tgggcagggaatcgttagtttcctc

SEQ ID NO: 4446684 - DNA, 25 bp, Homo sapien
gcttctctctccgtagttcctagtt

SEQ ID NO: 4446685 - DNA, 25 bp, Homo sapien
tcttttacttctctgcgtcttttcc

SEQ ID NO: 4446686 - DNA, 25 bp, Homo sapien
tgcgttttctcggcaagcttgccca

SEQ ID NO: 4446687 - DNA, 25 bp, Homo sapien
gcgttttctcggcaagcttgcccac

SEQ ID NO: 4446688 - DNA, 25 bp, Homo sapien
tctgcgttttctcggcaagcttgcc

SEQ ID NO: 4446689 - DNA, 25 bp, Homo sapien
ggtttaagctgaaactcgatccgtc

SEQ ID NO: 4446690 - DNA, 25 bp, Homo sapien
ccctcggtttaagctgaaactcgat

SEQ ID NO: 4446691 - DNA, 25 bp, Homo sapien
tcggtttaagctgaaactcgatccg

SEQ ID NO: 4446692 - DNA, 25 bp, Homo sapien
gactagctgaacccaacacccttcc

SEQ ID NO: 4446693 - DNA, 25 bp, Homo sapien
aatgggggtcggattggaggctgga

SEQ ID NO: 4446694 - DNA, 25 bp, Homo sapien
ccggaatgggagccggtgccaatca

SEQ ID NO: 4446695 - DNA, 25 bp, Homo sapien
attggaggctggagccggaatggga

SEQ ID NO: 4446696 - DNA, 25 bp, Homo sapien
ctgcagccgaaatgggggtcggatt

SEQ ID NO: 4446697 - DNA, 25 bp, Homo sapien
ggaggatgcaaccggatagaccgag

SEQ ID NO: 4446698 - DNA, 25 bp, Homo sapien
cgcaagataagatccggaacaggga

SEQ ID NO: 4446699 - DNA, 25 bp, Homo sapien
tggcgcaagataagatccggaacag

SEQ ID NO: 4446700 - DNA, 25 bp, Homo sapien
ctggcgcaagataagatccggaaca

SEQ ID NO: 4446701 - DNA, 25 bp, Homo sapien
ggcgcaagataagatccggaacagg

SEQ ID NO: 4446702 - DNA, 25 bp, Homo sapien
tggctacgggatcctggagtaggcg

SEQ ID NO: 4446703 - DNA, 25 bp, Homo sapien
gcttgaggtctggctacgggatcct

SEQ ID NO: 4446704 - DNA, 25 bp, Homo sapien
gtctggctacgggatcctggagtag

SEQ ID NO: 4446705 - DNA, 25 bp, Homo sapien
cttgaggtctggctacgggatcctg

SEQ ID NO: 4446706 - DNA, 25 bp, Homo sapien
tacaggttccggtcggagcagaaac

SEQ ID NO: 4446707 - DNA, 25 bp, Homo sapien
agcagaaacccagcggctagagacc

SEQ ID NO: 4446708 - DNA, 25 bp, Homo sapien
tggcagctcgtacaggttccggtcg

SEQ ID NO: 4446709 - DNA, 25 bp, Homo sapien
ctccgtcgttcactggcagctcgta

SEQ ID NO: 4446710 - DNA, 25 bp, Homo sapien
gactttcagagtctatgctttccta

SEQ ID NO: 4446711 - DNA, 25 bp, Homo sapien
gacacaacactacggatggaggagg

SEQ ID NO: 4446712 - DNA, 25 bp, Homo sapien
atgtctggctttgctccgcgggagg

SEQ ID NO: 4446713 - DNA, 25 bp, Homo sapien
gtttcttcagatctgctcagttctt

SEQ ID NO: 4446714 - DNA, 25 bp, Homo sapien
ccagtaaccatggagggagggcaca

SEQ ID NO: 4446715 - DNA, 25 bp, Homo sapien
acccagtaaccatggagggagggca

SEQ ID NO: 4446716 - DNA, 25 bp, Homo sapien
cccagtaaccatggagggagggcac

SEQ ID NO: 4446717 - DNA, 25 bp, Homo sapien
gatacactgatctagcgtccaacca

SEQ ID NO: 4446718 - DNA, 25 bp, Homo sapien
aaccagtgggtgtggtcttgtcgca

SEQ ID NO: 4446719 - DNA, 25 bp, Homo sapien
cgcagagccgtgcatagactgctgg

SEQ ID NO: 4446720 - DNA, 25 bp, Homo sapien
ctttcggaggtctgggtactcagcg

SEQ ID NO: 4446721 - DNA, 25 bp, Homo sapien
gagatggttaaggagagggaatccc

SEQ ID NO: 4446722 - DNA, 25 bp, Homo sapien
agatggttaaggagagggaatccct

SEQ ID NO: 4446723 - DNA, 25 bp, Homo sapien
gatggttaaggagagggaatccctc

SEQ ID NO: 4446724 - DNA, 25 bp, Homo sapien
cattgtgtcgctcttggatcacagg

SEQ ID NO: 4446725 - DNA, 25 bp, Homo sapien
tgtgtcgctcttggatcacagggtc

SEQ ID NO: 4446726 - DNA, 25 bp, Homo sapien
tatccattgtgtcgctcttggatca

SEQ ID NO: 4446727 - DNA, 25 bp, Homo sapien
tcatatccattgtgtcgctcttgga

SEQ ID NO: 4446728 - DNA, 25 bp, Homo sapien
actggcatctagatccgtggtgtgc

SEQ ID NO: 4446729 - DNA, 25 bp, Homo sapien
tggcatctagatccgtggtgtgctt

SEQ ID NO: 4446730 - DNA, 25 bp, Homo sapien
agatccgtggtgtgcttcattgtcc

SEQ ID NO: 4446731 - DNA, 25 bp, Homo sapien
tagatccgtggtgtgcttcattgtc

SEQ ID NO: 4446732 - DNA, 25 bp, Homo sapien
ctctcatcaaagtagccagaacgga

SEQ ID NO: 4446733 - DNA, 25 bp, Homo sapien
tctcatcaaagtagccagaacggat

SEQ ID NO: 4446734 - DNA, 25 bp, Homo sapien
cctcggatgcttcggccagttctga

SEQ ID NO: 4446735 - DNA, 25 bp, Homo sapien
tctgctcgagtgcaagctggaggca

SEQ ID NO: 4446736 - DNA, 25 bp, Homo sapien
ctatagtaacgtccagccaggtcac

SEQ ID NO: 4446737 - DNA, 25 bp, Homo sapien
gcagactgagtcctcggatgcttcg

SEQ ID NO: 4446738 - DNA, 25 bp, Homo sapien
aataagctgctgctgttcagcctct

SEQ ID NO: 4446739 - DNA, 25 bp, Homo sapien
atcaataagctgctgctgttcagcc

SEQ ID NO: 4446740 - DNA, 25 bp, Homo sapien
ctgctgctgttcagcctctgtcatc

SEQ ID NO: 4446741 - DNA, 25 bp, Homo sapien
agctgctgctgttcagcctctgtca

SEQ ID NO: 4446742 - DNA, 25 bp, Homo sapien
caaccagcaccctcttaaggccctc

SEQ ID NO: 4446743 - DNA, 25 bp, Homo sapien
aaccagcaccctcttaaggccctca

SEQ ID NO: 4446744 - DNA, 25 bp, Homo sapien
accagcaccctcttaaggccctcac

SEQ ID NO: 4446745 - DNA, 25 bp, Homo sapien
gcagtcagcaacggggacacaggct

SEQ ID NO: 4446746 - DNA, 25 bp, Homo sapien
agcaacggggacacaggcttatcaa

SEQ ID NO: 4446747 - DNA, 25 bp, Homo sapien
gcaacggggacacaggcttatcaaa

SEQ ID NO: 4446748 - DNA, 25 bp, Homo sapien
gtcagcaacggggacacaggcttat

SEQ ID NO: 4446749 - DNA, 25 bp, Homo sapien
caaattccacgagcatctggccagt

SEQ ID NO: 4446750 - DNA, 25 bp, Homo sapien
catctggccagtctcgagccattcc

SEQ ID NO: 4446751 - DNA, 25 bp, Homo sapien
tctggccagtctcgagccattcctg

SEQ ID NO: 4446752 - DNA, 25 bp, Homo sapien
atctggccagtctcgagccattcct

SEQ ID NO: 4446753 - DNA, 25 bp, Homo sapien
cttctccatggagatcacccgtgta

SEQ ID NO: 4446754 - DNA, 25 bp, Homo sapien
ttgaggcctcggcagaatctttcaa

SEQ ID NO: 4446755 - DNA, 25 bp, Homo sapien
acccgtgtatgatcctcctcattca

SEQ ID NO: 4446756 - DNA, 25 bp, Homo sapien
ctctttgaggcctcggcagaatctt

SEQ ID NO: 4446757 - DNA, 25 bp, Homo sapien
gcctagacccgatactttaacaaga

SEQ ID NO: 4446758 - DNA, 25 bp, Homo sapien
tcttagtgtgaccacatgtcctggt

SEQ ID NO: 4446759 - DNA, 25 bp, Homo sapien
tccgaactctcaacttaaagcctag

SEQ ID NO: 4446760 - DNA, 25 bp, Homo sapien
aaggcctaccttgtctcagaactgg

SEQ ID NO: 4446761 - DNA, 25 bp, Homo sapien
taggggatatcttacatgctgaaca

SEQ ID NO: 4446762 - DNA, 25 bp, Homo sapien
tgatggtcacaaagaccacaaccca

SEQ ID NO: 4446763 - DNA, 25 bp, Homo sapien
caggaagaggtaagataacattctg

SEQ ID NO: 4446764 - DNA, 25 bp, Homo sapien
ttggcttcacttaaccatgtagtca

SEQ ID NO: 4446765 - DNA, 25 bp, Homo sapien
gatggacaggtcaagatgtatccca

SEQ ID NO: 4446766 - DNA, 25 bp, Homo sapien
agtccagtgcccaggttagatggac

SEQ ID NO: 4446767 - DNA, 25 bp, Homo sapien
ggggcagtttgatgtgcactcctgc

SEQ ID NO: 4446768 - DNA, 25 bp, Homo sapien
gtatcccaaacgctcattccacatg

SEQ ID NO: 4446769 - DNA, 25 bp, Homo sapien
tcctacctgaaagagccctgaacct

SEQ ID NO: 4446770 - DNA, 25 bp, Homo sapien
agagactagtcctacctgaaagagc

SEQ ID NO: 4446771 - DNA, 25 bp, Homo sapien
tgctcagagctctgtctcctgaact

SEQ ID NO: 4446772 - DNA, 25 bp, Homo sapien
tgaaagagccctgaacctgctcaga

SEQ ID NO: 4446773 - DNA, 25 bp, Homo sapien
gcctagtcggtccaaattagaaata

SEQ ID NO: 4446774 - DNA, 25 bp, Homo sapien
ctctgatttgcctagtcggtccaaa

SEQ ID NO: 4446775 - DNA, 25 bp, Homo sapien
tagtcggtccaaattagaaatatca

SEQ ID NO: 4446776 - DNA, 25 bp, Homo sapien
gatttgcctagtcggtccaaattag

SEQ ID NO: 4446777 - DNA, 25 bp, Homo sapien
ttaatgcttggtgtggatgacaggt

SEQ ID NO: 4446778 - DNA, 25 bp, Homo sapien
aatagtttactccatcgatgaccag

SEQ ID NO: 4446779 - DNA, 25 bp, Homo sapien
gggatgcggatatcctggcctctct

SEQ ID NO: 4446780 - DNA, 25 bp, Homo sapien
gccgttcacaatcaatcaaatagtt

SEQ ID NO: 4446781 - DNA, 25 bp, Homo sapien
aggagtctttactaggatggaggca

SEQ ID NO: 4446782 - DNA, 25 bp, Homo sapien
gtagaatgggccatcattagaatga

SEQ ID NO: 4446783 - DNA, 25 bp, Homo sapien
caggtccagagcaagtagaatgggc

SEQ ID NO: 4446784 - DNA, 25 bp, Homo sapien
aaggagtctttactaggatggaggc

SEQ ID NO: 4446785 - DNA, 25 bp, Homo sapien
tcctgggttgccatatctggagtct

SEQ ID NO: 4446786 - DNA, 25 bp, Homo sapien
gggttgccatatctggagtctcttt

SEQ ID NO: 4446787 - DNA, 25 bp, Homo sapien
cctgggttgccatatctggagtctc

SEQ ID NO: 4446788 - DNA, 25 bp, Homo sapien
ctgggttgccatatctggagtctct

SEQ ID NO: 4446789 - DNA, 25 bp, Homo sapien
cctctacatcctgggttcaaacgat

SEQ ID NO: 4446790 - DNA, 25 bp, Homo sapien
ggtagagatggggtttcactatgtt

SEQ ID NO: 4446791 - DNA, 25 bp, Homo sapien
tggtagagatggggtttcactatgt

SEQ ID NO: 4446792 - DNA, 25 bp, Homo sapien
ctctacatcctgggttcaaacgatc

SEQ ID NO: 4446793 - DNA, 25 bp, Homo sapien
tcattccaattttttggggtatgtg

SEQ ID NO: 4446794 - DNA, 25 bp, Homo sapien
ttatccttgcacaggcgccatgcaa

SEQ ID NO: 4446795 - DNA, 25 bp, Homo sapien
gggtatgtgctgctgaactgagcat

SEQ ID NO: 4446796 - DNA, 25 bp, Homo sapien
tatccttgcacaggcgccatgcaaa

SEQ ID NO: 4446797 - DNA, 25 bp, Homo sapien
gaagtgctggagaccttaggccctt

SEQ ID NO: 4446798 - DNA, 25 bp, Homo sapien
tccaaaggagactccagtctcaggg

SEQ ID NO: 4446799 - DNA, 25 bp, Homo sapien
tccaggctccaaaggagactccagt

SEQ ID NO: 4446800 - DNA, 25 bp, Homo sapien
ggaagtgctggagaccttaggccct

SEQ ID NO: 4446801 - DNA, 25 bp, Homo sapien
tgcaccttctgctaccaggcctcag

SEQ ID NO: 4446802 - DNA, 25 bp, Homo sapien
ttagctatccctggaggaactctgc

SEQ ID NO: 4446803 - DNA, 25 bp, Homo sapien
gaggaactctgctccttgcaccttc

SEQ ID NO: 4446804 - DNA, 25 bp, Homo sapien
gctccttgcaccttctgctaccagg

SEQ ID NO: 4446805 - DNA, 25 bp, Homo sapien
gtgccaacatcgtagcaaggtttga

SEQ ID NO: 4446806 - DNA, 25 bp, Homo sapien
agaggcacatctcacgcctgagtgt

SEQ ID NO: 4446807 - DNA, 25 bp, Homo sapien
atctcacgcctgagtgtgaaaaccc

SEQ ID NO: 4446808 - DNA, 25 bp, Homo sapien
ccaacatcgtagcaaggtttgagag

SEQ ID NO: 4446809 - DNA, 25 bp, Homo sapien
gacacagagaataggagaaggcgat

SEQ ID NO: 4446810 - DNA, 25 bp, Homo sapien
tagtaggttgactagtggcacccga

SEQ ID NO: 4446811 - DNA, 25 bp, Homo sapien
gaagcactgacgtcaagccatagca

SEQ ID NO: 4446812 - DNA, 25 bp, Homo sapien
cagatatgattctagaccccaagtg

SEQ ID NO: 4446813 - DNA, 25 bp, Homo sapien
caacatcaatgccaacaagagcatc

SEQ ID NO: 4446814 - DNA, 25 bp, Homo sapien
ggagcaaagtagactaactacaaca

SEQ ID NO: 4446815 - DNA, 25 bp, Homo sapien
gccaacaagagcatctgccggttac

SEQ ID NO: 4446816 - DNA, 25 bp, Homo sapien
tgttggtattaggagcaaagtagac

SEQ ID NO: 4446817 - DNA, 25 bp, Homo sapien
tctcgaagttgtcgtccgtgagttc

SEQ ID NO: 4446818 - DNA, 25 bp, Homo sapien
ctctcgaagttgtcgtccgtgagtt

SEQ ID NO: 4446819 - DNA, 25 bp, Homo sapien
gacctaggttcagcaaaagttttgc

SEQ ID NO: 4446820 - DNA, 25 bp, Homo sapien
tggctcggtgccaggtctctatctt

SEQ ID NO: 4446821 - DNA, 25 bp, Homo sapien
tgtcggttggtatccgtagtactct

SEQ ID NO: 4446822 - DNA, 25 bp, Homo sapien
aaattgccattggtaatatgcagag

SEQ ID NO: 4446823 - DNA, 25 bp, Homo sapien
ccggcattgtaagggctgattatct

SEQ ID NO: 4446824 - DNA, 25 bp, Homo sapien
gctgattatctgatcctcttactaa

SEQ ID NO: 4446825 - DNA, 25 bp, Homo sapien
cttttatggctcttttagcatctca

SEQ ID NO: 4446826 - DNA, 25 bp, Homo sapien
gatcctcttactaatttattggttg

SEQ ID NO: 4446827 - DNA, 25 bp, Homo sapien
ttactcgcctatctccttgcttctt

SEQ ID NO: 4446828 - DNA, 25 bp, Homo sapien
cttactcgcctatctccttgcttct

SEQ ID NO: 4446829 - DNA, 25 bp, Homo sapien
gaaagaatggatggcaggtcgtcat

SEQ ID NO: 4446830 - DNA, 25 bp, Homo sapien
cttagtgtcagcgtagggagagtga

SEQ ID NO: 4446831 - DNA, 25 bp, Homo sapien
gatgcgagggcggtattcgtgaccc

SEQ ID NO: 4446832 - DNA, 25 bp, Homo sapien
aaggtggaagggatctgcgccagga

SEQ ID NO: 4446833 - DNA, 25 bp, Homo sapien
ctgattggtggaaccgcaaagaagt

SEQ ID NO: 4446834 - DNA, 25 bp, Homo sapien
aagaagtcgcgctttgattgggccg

SEQ ID NO: 4446835 - DNA, 25 bp, Homo sapien
cgcgctttgattgggccgctgtcag

SEQ ID NO: 4446836 - DNA, 25 bp, Homo sapien
tcaggtgtcgctgcctgcaggttcg

SEQ ID NO: 4446837 - DNA, 25 bp, Homo sapien
tcctccgcgcagaagcgccggccaa

SEQ ID NO: 4446838 - DNA, 25 bp, Homo sapien
gggtcacgctcctccgcgcagaagc

SEQ ID NO: 4446839 - DNA, 25 bp, Homo sapien
agaagcgccggccaacgcagcctga

SEQ ID NO: 4446840 - DNA, 25 bp, Homo sapien
ggccaacgcagcctgactctgttac

SEQ ID NO: 4446841 - DNA, 25 bp, Homo sapien
ctctctccgtagttcctagttcctg

SEQ ID NO: 4446842 - DNA, 25 bp, Homo sapien
tggcttctctctccgtagttcctag

SEQ ID NO: 4446843 - DNA, 25 bp, Homo sapien
tgggcagggaatcgttagtttcctc

SEQ ID NO: 4446844 - DNA, 25 bp, Homo sapien
gcttctctctccgtagttcctagtt

SEQ ID NO: 4446845 - DNA, 25 bp, Homo sapien
tgcgttttctcggcaagcttgccca

SEQ ID NO: 4446846 - DNA, 25 bp, Homo sapien
gcgttttctcggcaagcttgcccac

SEQ ID NO: 4446847 - DNA, 25 bp, Homo sapien
tcttttacttctctgcgtcttttcc

SEQ ID NO: 4446848 - DNA, 25 bp, Homo sapien
tctgcgttttctcggcaagcttgcc

SEQ ID NO: 4446849 - DNA, 25 bp, Homo sapien
tgagactcgcgcgtctaaagccggg

SEQ ID NO: 4446850 - DNA, 25 bp, Homo sapien
gccaggtaattagcgggacctgaga

SEQ ID NO: 4446851 - DNA, 25 bp, Homo sapien
gcagcacccgccaggtaattagcgg

SEQ ID NO: 4446852 - DNA, 25 bp, Homo sapien
agcacccacgtggactagctgaacc

SEQ ID NO: 4446853 - DNA, 25 bp, Homo sapien
aatgggggtcggattggaggctgga

SEQ ID NO: 4446854 - DNA, 25 bp, Homo sapien
ccggaatgggagccggtgccaatca

SEQ ID NO: 4446855 - DNA, 25 bp, Homo sapien
attggaggctggagccggaatggga

SEQ ID NO: 4446856 - DNA, 25 bp, Homo sapien
ctgcagccgaaatgggggtcggatt

SEQ ID NO: 4446857 - DNA, 25 bp, Homo sapien
cgcaagataagatccggaacaggga

SEQ ID NO: 4446858 - DNA, 25 bp, Homo sapien
ctggcgcaagataagatccggaaca

SEQ ID NO: 4446859 - DNA, 25 bp, Homo sapien
atgcaaccggatagaccgagggccg

SEQ ID NO: 4446860 - DNA, 25 bp, Homo sapien
gagggaggatgcaaccggatagacc

SEQ ID NO: 4446861 - DNA, 25 bp, Homo sapien
tggctacgggatcctggagtaggcg

SEQ ID NO: 4446862 - DNA, 25 bp, Homo sapien
gcttgaggtctggctacgggatcct

SEQ ID NO: 4446863 - DNA, 25 bp, Homo sapien
gtctggctacgggatcctggagtag

SEQ ID NO: 4446864 - DNA, 25 bp, Homo sapien
cttgaggtctggctacgggatcctg

SEQ ID NO: 4446865 - DNA, 25 bp, Homo sapien
tacaggttccggtcggagcagaaac

SEQ ID NO: 4446866 - DNA, 25 bp, Homo sapien
agcagaaacccagcggctagagacc

SEQ ID NO: 4446867 - DNA, 25 bp, Homo sapien
ctccgtcgttcactggcagctcgta

SEQ ID NO: 4446868 - DNA, 25 bp, Homo sapien
tggcagctcgtacaggttccggtcg

SEQ ID NO: 4446869 - DNA, 25 bp, Homo sapien
gtttcttcagatctgctcagttctt

SEQ ID NO: 4446870 - DNA, 25 bp, Homo sapien
atgtctggctttgctccgcgggagg

SEQ ID NO: 4446871 - DNA, 25 bp, Homo sapien
gacacaacactacggatggaggagg

SEQ ID NO: 4446872 - DNA, 25 bp, Homo sapien
gactttcagagtctatgctttccta

SEQ ID NO: 4446873 - DNA, 25 bp, Homo sapien
ccagtaaccatggagggagggcaca

SEQ ID NO: 4446874 - DNA, 25 bp, Homo sapien
cccagtaaccatggagggagggcac

SEQ ID NO: 4446875 - DNA, 25 bp, Homo sapien
acccagtaaccatggagggagggca

SEQ ID NO: 4446876 - DNA, 25 bp, Homo sapien
gatacactgatctagcgtccaacca

SEQ ID NO: 4446877 - DNA, 25 bp, Homo sapien
aaccagtgggtgtggtcttgtcgca

SEQ ID NO: 4446878 - DNA, 25 bp, Homo sapien
cgcagagccgtgcatagactgctgg

SEQ ID NO: 4446879 - DNA, 25 bp, Homo sapien
ctttcggaggtctgggtactcagcg

SEQ ID NO: 4446880 - DNA, 25 bp, Homo sapien
gagatggttaaggagagggaatccc

SEQ ID NO: 4446881 - DNA, 25 bp, Homo sapien
agatggttaaggagagggaatccct

SEQ ID NO: 4446882 - DNA, 25 bp, Homo sapien
gatggttaaggagagggaatccctc

SEQ ID NO: 4446883 - DNA, 25 bp, Homo sapien
cattgtgtcgctcttggatcacagg

SEQ ID NO: 4446884 - DNA, 25 bp, Homo sapien
tatccattgtgtcgctcttggatca

SEQ ID NO: 4446885 - DNA, 25 bp, Homo sapien
tgtgtcgctcttggatcacagggtc

SEQ ID NO: 4446886 - DNA, 25 bp, Homo sapien
tcatatccattgtgtcgctcttgga

SEQ ID NO: 4446887 - DNA, 25 bp, Homo sapien
actggcatctagatccgtggtgtgc

SEQ ID NO: 4446888 - DNA, 25 bp, Homo sapien
agatccgtggtgtgcttcattgtcc

SEQ ID NO: 4446889 - DNA, 25 bp, Homo sapien
tagatccgtggtgtgcttcattgtc

SEQ ID NO: 4446890 - DNA, 25 bp, Homo sapien
tggcatctagatccgtggtgtgctt

SEQ ID NO: 4446891 - DNA, 25 bp, Homo sapien
ctctcatcaaagtagccagaacgga

SEQ ID NO: 4446892 - DNA, 25 bp, Homo sapien
tctcatcaaagtagccagaacggat

SEQ ID NO: 4446893 - DNA, 25 bp, Homo sapien
gcagactgagtcctcggatgcttcg

SEQ ID NO: 4446894 - DNA, 25 bp, Homo sapien
ctatagtaacgtccagccaggtcac

SEQ ID NO: 4446895 - DNA, 25 bp, Homo sapien
tctgctcgagtgcaagctggaggca

SEQ ID NO: 4446896 - DNA, 25 bp, Homo sapien
cctcggatgcttcggccagttctga

SEQ ID NO: 4446897 - DNA, 25 bp, Homo sapien
aataagctgctgctgttcagcctct

SEQ ID NO: 4446898 - DNA, 25 bp, Homo sapien
atcaataagctgctgctgttcagcc

SEQ ID NO: 4446899 - DNA, 25 bp, Homo sapien
agctgctgctgttcagcctctgtca

SEQ ID NO: 4446900 - DNA, 25 bp, Homo sapien
ctgctgctgttcagcctctgtcatc

SEQ ID NO: 4446901 - DNA, 25 bp, Homo sapien
caaccagcaccctcttaaggccctc

SEQ ID NO: 4446902 - DNA, 25 bp, Homo sapien
aaccagcaccctcttaaggccctca

SEQ ID NO: 4446903 - DNA, 25 bp, Homo sapien
accagcaccctcttaaggccctcac

SEQ ID NO: 4446904 - DNA, 25 bp, Homo sapien
gcagtcagcaacggggacacaggct

SEQ ID NO: 4446905 - DNA, 25 bp, Homo sapien
agcaacggggacacaggcttatcaa

SEQ ID NO: 4446906 - DNA, 25 bp, Homo sapien
gcaacggggacacaggcttatcaaa

SEQ ID NO: 4446907 - DNA, 25 bp, Homo sapien
gtcagcaacggggacacaggcttat

SEQ ID NO: 4446908 - DNA, 25 bp, Homo sapien
tctggccagtctcgagccattcctg

SEQ ID NO: 4446909 - DNA, 25 bp, Homo sapien
atctggccagtctcgagccattcct

SEQ ID NO: 4446910 - DNA, 25 bp, Homo sapien
catctggccagtctcgagccattcc

SEQ ID NO: 4446911 - DNA, 25 bp, Homo sapien
caaattccacgagcatctggccagt

SEQ ID NO: 4446912 - DNA, 25 bp, Homo sapien
cttctccatggagatcacccgtgta

SEQ ID NO: 4446913 - DNA, 25 bp, Homo sapien
ttgaggcctcggcagaatctttcaa

SEQ ID NO: 4446914 - DNA, 25 bp, Homo sapien
ctctttgaggcctcggcagaatctt

SEQ ID NO: 4446915 - DNA, 25 bp, Homo sapien
acccgtgtatgatcctcctcattca

SEQ ID NO: 4446916 - DNA, 25 bp, Homo sapien
tcctaggtagtcctttttaccatca

SEQ ID NO: 4446917 - DNA, 25 bp, Homo sapien
tttaccatcagacatgtcttgggtt

SEQ ID NO: 4446918 - DNA, 25 bp, Homo sapien
gtagtcctttttaccatcagacatg

SEQ ID NO: 4446919 - DNA, 25 bp, Homo sapien
cagacatgtcttgggttggttgata

SEQ ID NO: 4446920 - DNA, 25 bp, Homo sapien
ggcattttgcttccattaaccatgt

SEQ ID NO: 4446921 - DNA, 25 bp, Homo sapien
ccagggatatcttatgtgctgaaca

SEQ ID NO: 4446922 - DNA, 25 bp, Homo sapien
gagataacgttctattagctgtgaa

SEQ ID NO: 4446923 - DNA, 25 bp, Homo sapien
gaaccatgccaccagggatatctta

SEQ ID NO: 4446924 - DNA, 25 bp, Homo sapien
agtccagtgcccaggttagatggac

SEQ ID NO: 4446925 - DNA, 25 bp, Homo sapien
gatggacaggtcaagatgtatccca

SEQ ID NO: 4446926 - DNA, 25 bp, Homo sapien
gtatcccaaacgctcattccacatg

SEQ ID NO: 4446927 - DNA, 25 bp, Homo sapien
ggggcagtttgatgtgcactcctgc

SEQ ID NO: 4446928 - DNA, 25 bp, Homo sapien
tcctacctgaaagagccctgaacct

SEQ ID NO: 4446929 - DNA, 25 bp, Homo sapien
agagactagtcctacctgaaagagc

SEQ ID NO: 4446930 - DNA, 25 bp, Homo sapien
gactagtcctacctgaaagagccct

SEQ ID NO: 4446931 - DNA, 25 bp, Homo sapien
tgaaagagccctgaacctgctcaga

SEQ ID NO: 4446932 - DNA, 25 bp, Homo sapien
gcctagtcggtccaaattagaaata

SEQ ID NO: 4446933 - DNA, 25 bp, Homo sapien
gatttgcctagtcggtccaaattag

SEQ ID NO: 4446934 - DNA, 25 bp, Homo sapien
ctctgatttgcctagtcggtccaaa

SEQ ID NO: 4446935 - DNA, 25 bp, Homo sapien
tagtcggtccaaattagaaatatca

SEQ ID NO: 4446936 - DNA, 25 bp, Homo sapien
ccacagacctatacctctcctcatc

SEQ ID NO: 4446937 - DNA, 25 bp, Homo sapien
cctctcctcatcctaatcccttagg

SEQ ID NO: 4446938 - DNA, 25 bp, Homo sapien
tgccatatttcagcccccacagacc

SEQ ID NO: 4446939 - DNA, 25 bp, Homo sapien
catatttcagcccccacagacctat

SEQ ID NO: 4446940 - DNA, 25 bp, Homo sapien
aaggacactaatctttgatctctgc

SEQ ID NO: 4446941 - DNA, 25 bp, Homo sapien
gaaggacactaatctttgatctctg

SEQ ID NO: 4446942 - DNA, 25 bp, Homo sapien
ctgaaggacactaatctttgatctc

SEQ ID NO: 4446943 - DNA, 25 bp, Homo sapien
tgaaggacactaatctttgatctct

SEQ ID NO: 4446944 - DNA, 25 bp, Homo sapien
ttaatgcttggtgtggatgacaggt

SEQ ID NO: 4446945 - DNA, 25 bp, Homo sapien
aatagtttactccatcgatgaccag

SEQ ID NO: 4446946 - DNA, 25 bp, Homo sapien
gggatgcggatatcctggcctctct

SEQ ID NO: 4446947 - DNA, 25 bp, Homo sapien
gccgttcacaatcaatcaaatagtt

SEQ ID NO: 4446948 - DNA, 25 bp, Homo sapien
aggagtctttactaggatggaggca

SEQ ID NO: 4446949 - DNA, 25 bp, Homo sapien
gtagaatgggccatcattagaatga

SEQ ID NO: 4446950 - DNA, 25 bp, Homo sapien
caggtccagagcaagtagaatgggc

SEQ ID NO: 4446951 - DNA, 25 bp, Homo sapien
aaggagtctttactaggatggaggc

SEQ ID NO: 4446952 - DNA, 25 bp, Homo sapien
gggttgccatatctggagtctcttt

SEQ ID NO: 4446953 - DNA, 25 bp, Homo sapien
ctgggttgccatatctggagtctct

SEQ ID NO: 4446954 - DNA, 25 bp, Homo sapien
cctgggttgccatatctggagtctc

SEQ ID NO: 4446955 - DNA, 25 bp, Homo sapien
tcctgggttgccatatctggagtct

SEQ ID NO: 4446956 - DNA, 25 bp, Homo sapien
tgacagcgctgggttatactctctg

SEQ ID NO: 4446957 - DNA, 25 bp, Homo sapien
tggacttcgttcatctgacagcgct

SEQ ID NO: 4446958 - DNA, 25 bp, Homo sapien
ggtctccagtttcctacggcagagt

SEQ ID NO: 4446959 - DNA, 25 bp, Homo sapien
gacccagccctatagatcatctaaa

SEQ ID NO: 4446960 - DNA, 25 bp, Homo sapien
ggaacagtgccaatgctggattacc

SEQ ID NO: 4446961 - DNA, 25 bp, Homo sapien
ttaccatgctagactgacttaataa

SEQ ID NO: 4446962 - DNA, 25 bp, Homo sapien
tgctggattaccatgctagactgac

SEQ ID NO: 4446963 - DNA, 25 bp, Homo sapien
gaacagtgccaatgctggattacca

SEQ ID NO: 4446964 - DNA, 25 bp, Homo sapien
aaaaataatggcatacttcatgaat

SEQ ID NO: 4446965 - DNA, 25 bp, Homo sapien
gtgtgttatccttgcgcaggcgcca

SEQ ID NO: 4446966 - DNA, 25 bp, Homo sapien
atttgtgtgttatccttgcgcaggc

SEQ ID NO: 4446967 - DNA, 25 bp, Homo sapien
aaataatggcatacttcatgaattt

SEQ ID NO: 4446968 - DNA, 25 bp, Homo sapien
tatcacaatcatcaagggaacagat

SEQ ID NO: 4446969 - DNA, 25 bp, Homo sapien
catatcacaatcatcaagggaacag

SEQ ID NO: 4446970 - DNA, 25 bp, Homo sapien
tcacaatcatcaagggaacagattt

SEQ ID NO: 4446971 - DNA, 25 bp, Homo sapien
cacaatcatcaagggaacagatttt

SEQ ID NO: 4446972 - DNA, 25 bp, Homo sapien
ggaagtgctggagaccttaggccct

SEQ ID NO: 4446973 - DNA, 25 bp, Homo sapien
gaagtgctggagaccttaggccctt

SEQ ID NO: 4446974 - DNA, 25 bp, Homo sapien
tccaaaggagactccagtctcaggg

SEQ ID NO: 4446975 - DNA, 25 bp, Homo sapien
tccaggctccaaaggagactccagt

SEQ ID NO: 4446976 - DNA, 25 bp, Homo sapien
ggcagagagggcactacaaaacctg

SEQ ID NO: 4446977 - DNA, 25 bp, Homo sapien
caagcttgatggtgggaattggccc

SEQ ID NO: 4446978 - DNA, 25 bp, Homo sapien
ggcccagctccacttgaatgatatt

SEQ ID NO: 4446979 - DNA, 25 bp, Homo sapien
tccagttgatggacagactatccaa

SEQ ID NO: 4446980 - DNA, 25 bp, Homo sapien
gtatagcacgtacaaacaagaaggg

SEQ ID NO: 4446981 - DNA, 25 bp, Homo sapien
ggccaggtcttgttgtaggatcaaa

SEQ ID NO: 4446982 - DNA, 25 bp, Homo sapien
gaattgggagtgagagacctcaaca

SEQ ID NO: 4446983 - DNA, 25 bp, Homo sapien
gaagggacctcttcacaagcagagg

SEQ ID NO: 4446984 - DNA, 25 bp, Homo sapien
ttagctatccctggaggaactctgc

SEQ ID NO: 4446985 - DNA, 25 bp, Homo sapien
tgcaccttctgctaccaggcctcag

SEQ ID NO: 4446986 - DNA, 25 bp, Homo sapien
gaggaactctgctccttgcaccttc

SEQ ID NO: 4446987 - DNA, 25 bp, Homo sapien
gctccttgcaccttctgctaccagg

SEQ ID NO: 4446988 - DNA, 25 bp, Homo sapien
gtgccaacatcgtagcaaggtttga

SEQ ID NO: 4446989 - DNA, 25 bp, Homo sapien
agaggcacatctcacgcctgagtgt

SEQ ID NO: 4446990 - DNA, 25 bp, Homo sapien
atctcacgcctgagtgtgaaaaccc

SEQ ID NO: 4446991 - DNA, 25 bp, Homo sapien
ccaacatcgtagcaaggtttgagag

SEQ ID NO: 4446992 - DNA, 25 bp, Homo sapien
ctaaaactaaacatcaatcattgca

SEQ ID NO: 4446993 - DNA, 25 bp, Homo sapien
taaaactaaacatcaatcattgcag

SEQ ID NO: 4446994 - DNA, 25 bp, Homo sapien
caaactatggccattgaagctgacc

SEQ ID NO: 4446995 - DNA, 25 bp, Homo sapien
cacaggttgaagcaacagtgttaag

SEQ ID NO: 4446996 - DNA, 25 bp, Homo sapien
tcttaactcttaacacagtgtgaag

SEQ ID NO: 4446997 - DNA, 25 bp, Homo sapien
catcattcggtttccagcttcctta

SEQ ID NO: 4446998 - DNA, 25 bp, Homo sapien
taagagaagggcgtagttatgaagc

SEQ ID NO: 4446999 - DNA, 25 bp, Homo sapien
gttcagaactctgcctctagctcca

SEQ ID NO: 4447000 - DNA, 25 bp, Homo sapien
tccagtgccggtagccagttcagaa

SEQ ID NO: 4447001 - DNA, 25 bp, Homo sapien
tttcctcaacagaagtgtccagtgc

SEQ ID NO: 4447002 - DNA, 25 bp, Homo sapien
cacttggtttctcttgcgtgggcag

SEQ ID NO: 4447003 - DNA, 25 bp, Homo sapien
tgtggctgctccttttttattgagt

SEQ ID NO: 4447004 - DNA, 25 bp, Homo sapien
gtggacacacttgggacgggaccca

SEQ ID NO: 4447005 - DNA, 25 bp, Homo sapien
agctagcccccgaaggagtgttgga

SEQ ID NO: 4447006 - DNA, 25 bp, Homo sapien
gcgaccactaacccgctgcttgcgc

SEQ ID NO: 4447007 - DNA, 25 bp, Homo sapien
ccgctgcttgcgctcgcgcgtctgg

SEQ ID NO: 4447008 - DNA, 25 bp, Homo sapien
gctgcttgcgctcgcgcgtctggcc

SEQ ID NO: 4447009 - DNA, 25 bp, Homo sapien
actaacccgctgcttgcgctcgcgc

SEQ ID NO: 4447010 - DNA, 25 bp, Homo sapien
gggaacagcgctaggcggcggaggc

SEQ ID NO: 4447011 - DNA, 25 bp, Homo sapien
cgccacacccgggaacagcgctagg

SEQ ID NO: 4447012 - DNA, 25 bp, Homo sapien
ggccgcggcaagaagcagcgccaca

SEQ ID NO: 4447013 - DNA, 25 bp, Homo sapien
gcgaggcgggccgcggcaagaagca

SEQ ID NO: 4447014 - DNA, 25 bp, Homo sapien
tctcgaagttgtcgtccgtgagttc

SEQ ID NO: 4447015 - DNA, 25 bp, Homo sapien
ctctcgaagttgtcgtccgtgagtt

SEQ ID NO: 4447016 - DNA, 25 bp, Homo sapien
tgaggccctgcgtgagcgcagcctt

SEQ ID NO: 4447017 - DNA, 25 bp, Homo sapien
caagagcaccgagataaggatgagg

SEQ ID NO: 4447018 - DNA, 25 bp, Homo sapien
tgcaaataggaagtgccacaagagc

SEQ ID NO: 4447019 - DNA, 25 bp, Homo sapien
agatatagctacatattggactggg

SEQ ID NO: 4447020 - DNA, 25 bp, Homo sapien
tcagtgaccttggctagaaaccaat

SEQ ID NO: 4447021 - DNA, 25 bp, Homo sapien
agtgaccttggctagaaaccaatgg

SEQ ID NO: 4447022 - DNA, 25 bp, Homo sapien
cagtgaccttggctagaaaccaatg

SEQ ID NO: 4447023 - DNA, 25 bp, Homo sapien
caagtactttttgataagtgcctta

SEQ ID NO: 4447024 - DNA, 25 bp, Homo sapien
tggcagttgataatgaattccaaca

SEQ ID NO: 4447025 - DNA, 25 bp, Homo sapien
taatcatcacttcatcatgtgtgcc

SEQ ID NO: 4447026 - DNA, 25 bp, Homo sapien
catcatgtgtgccatgcgtcaagta

SEQ ID NO: 4447027 - DNA, 25 bp, Homo sapien
tgcaaggctgggactaaaatccact

SEQ ID NO: 4447028 - DNA, 25 bp, Homo sapien
tccataaggtcatcaaatccacaaa

SEQ ID NO: 4447029 - DNA, 25 bp, Homo sapien
gaatgagaatctccagaaatctggg

SEQ ID NO: 4447030 - DNA, 25 bp, Homo sapien
ctgccttaaactttggcaatatcca

SEQ ID NO: 4447031 - DNA, 25 bp, Homo sapien
agagggccaccagaagcaccggctc

SEQ ID NO: 4447032 - DNA, 25 bp, Homo sapien
taatcagtgtatatacagctagcac

SEQ ID NO: 4447033 - DNA, 25 bp, Homo sapien
tatatacagctagcaccagctgtac

SEQ ID NO: 4447034 - DNA, 25 bp, Homo sapien
cccagaaaatcctaatcagtgtata

SEQ ID NO: 4447035 - DNA, 25 bp, Homo sapien
tataatactacctttgagctagtag

SEQ ID NO: 4447036 - DNA, 25 bp, Homo sapien
tgttgtctcactaggaagaatctca

SEQ ID NO: 4447037 - DNA, 25 bp, Homo sapien
aagccaaattctcagtttagtccta

SEQ ID NO: 4447038 - DNA, 25 bp, Homo sapien
cagtttagtcctatgaatttgttaa

SEQ ID NO: 4447039 - DNA, 25 bp, Homo sapien
ctttgctaatgggactattcctttt

SEQ ID NO: 4447040 - DNA, 25 bp, Homo sapien
taaaatacttcacgtcctttagtga

SEQ ID NO: 4447041 - DNA, 25 bp, Homo sapien
tcctttagtgaagaatccacctgta

SEQ ID NO: 4447042 - DNA, 25 bp, Homo sapien
catgtaacaaagctgagacaacaaa

SEQ ID NO: 4447043 - DNA, 25 bp, Homo sapien
tagtgaagaatccacctgtacttac

SEQ ID NO: 4447044 - DNA, 25 bp, Homo sapien
tatttgcccagaaactagtattcgc

SEQ ID NO: 4447045 - DNA, 25 bp, Homo sapien
tcttcttagcagaataagagtagag

SEQ ID NO: 4447046 - DNA, 25 bp, Homo sapien
ttttgaaactacaagtcagttgtgt

SEQ ID NO: 4447047 - DNA, 25 bp, Homo sapien
ctagtagtgtgcagtgtctagtcac

SEQ ID NO: 4447048 - DNA, 25 bp, Homo sapien
tgtacttctgctttccatctttaat

SEQ ID NO: 4447049 - DNA, 25 bp, Homo sapien
ctgtacttctgctttccatctttaa

SEQ ID NO: 4447050 - DNA, 25 bp, Homo sapien
ctctaccacacaggttcaagccatt

SEQ ID NO: 4447051 - DNA, 25 bp, Homo sapien
aacctctaccacacaggttcaagcc

SEQ ID NO: 4447052 - DNA, 25 bp, Homo sapien
attgcaggcaccggccaccacacct

SEQ ID NO: 4447053 - DNA, 25 bp, Homo sapien
ggattgcaggcaccggccaccacac

SEQ ID NO: 4447054 - DNA, 25 bp, Homo sapien
gcagtcctaggtccatcataagcac

SEQ ID NO: 4447055 - DNA, 25 bp, Homo sapien
ttacaggtgttagtgttggcagtgc

SEQ ID NO: 4447056 - DNA, 25 bp, Homo sapien
tcagggttggatatccactgactcc

SEQ ID NO: 4447057 - DNA, 25 bp, Homo sapien
ggtgttagtgttggcagtgcaatca

SEQ ID NO: 4447058 - DNA, 25 bp, Homo sapien
tgtgctcaagacagtctctcacctc

SEQ ID NO: 4447059 - DNA, 25 bp, Homo sapien
ctactatagaggcatctttatcact

SEQ ID NO: 4447060 - DNA, 25 bp, Homo sapien
ctatagaggcatctttatcactaat

SEQ ID NO: 4447061 - DNA, 25 bp, Homo sapien
tactatagaggcatctttatcacta

SEQ ID NO: 4447062 - DNA, 25 bp, Homo sapien
actatagaggcatctttatcactaa

SEQ ID NO: 4447063 - DNA, 25 bp, Homo sapien
tgagccaggcgaaagtcagttttat

SEQ ID NO: 4447064 - DNA, 25 bp, Homo sapien
caggcgaaagtcagttttattacag

SEQ ID NO: 4447065 - DNA, 25 bp, Homo sapien
gccaggcgaaagtcagttttattac

SEQ ID NO: 4447066 - DNA, 25 bp, Homo sapien
ccactgagccaggcgaaagtcagtt

SEQ ID NO: 4447067 - DNA, 25 bp, Homo sapien
ccctcaagttgctggctgcttttag

SEQ ID NO: 4447068 - DNA, 25 bp, Homo sapien
tatcatcatactcgttcaccagaga

SEQ ID NO: 4447069 - DNA, 25 bp, Homo sapien
tcaccagagactcaacattcgtatg

SEQ ID NO: 4447070 - DNA, 25 bp, Homo sapien
cgtatgtgcaaatcggtagttatcc

SEQ ID NO: 4447071 - DNA, 25 bp, Homo sapien
tagtgagatgtgaaggacgaaataa

SEQ ID NO: 4447072 - DNA, 25 bp, Homo sapien
aacttgttagtgagatgtgaaggac

SEQ ID NO: 4447073 - DNA, 25 bp, Homo sapien
gatgtgaaggacgaaataagatgat

SEQ ID NO: 4447074 - DNA, 25 bp, Homo sapien
gtgaaggacgaaataagatgatacc

SEQ ID NO: 4447075 - DNA, 25 bp, Homo sapien
tcttttcatagtccacatcatagta

SEQ ID NO: 4447076 - DNA, 25 bp, Homo sapien
catcatagtaagcaataagtaagtc

SEQ ID NO: 4447077 - DNA, 25 bp, Homo sapien
ttctgtcatgtgagggcagatacca

SEQ ID NO: 4447078 - DNA, 25 bp, Homo sapien
gtccttgccctgtatcaaatcttta

SEQ ID NO: 4447079 - DNA, 25 bp, Homo sapien
gatacccaatcaactggtgcattcc

SEQ ID NO: 4447080 - DNA, 25 bp, Homo sapien
ggtgcattcctgctaaatcttgctg

SEQ ID NO: 4447081 - DNA, 25 bp, Homo sapien
taaatcttgctgtaatatataactg

SEQ ID NO: 4447082 - DNA, 25 bp, Homo sapien
gaacttcactggcaaattggtgata

SEQ ID NO: 4447083 - DNA, 25 bp, Homo sapien
atcagaaagttcatggctaaaggtt

SEQ ID NO: 4447084 - DNA, 25 bp, Homo sapien
gttctgatagcaacaacaggaatct

SEQ ID NO: 4447085 - DNA, 25 bp, Homo sapien
tctgatagcaacaacaggaatctct

SEQ ID NO: 4447086 - DNA, 25 bp, Homo sapien
ttgcggctagctacagcaaagttga

SEQ ID NO: 4447087 - DNA, 25 bp, Homo sapien
gattaaaagacctatcttcacattc

SEQ ID NO: 4447088 - DNA, 25 bp, Homo sapien
cacattccagggttattgttcttta

SEQ ID NO: 4447089 - DNA, 25 bp, Homo sapien
aatgacagtcataggtcttgattaa

SEQ ID NO: 4447090 - DNA, 25 bp, Homo sapien
accacgcctggtctaaagtacctat

SEQ ID NO: 4447091 - DNA, 25 bp, Homo sapien
ttcaggtatctcttcagattgccat

SEQ ID NO: 4447092 - DNA, 25 bp, Homo sapien
tcagattgccatcaaagtaatcctg

SEQ ID NO: 4447093 - DNA, 25 bp, Homo sapien
catcaaagtaatcctgcaggaacct

SEQ ID NO: 4447094 - DNA, 25 bp, Homo sapien
ctgggataggttcagacttcaggta

SEQ ID NO: 4447095 - DNA, 25 bp, Homo sapien
aagttctttatacttgggctccagg

SEQ ID NO: 4447096 - DNA, 25 bp, Homo sapien
gttcttacagtgaccacaccaaggg

SEQ ID NO: 4447097 - DNA, 25 bp, Homo sapien
ggcataaaattcaatcagcacatct

SEQ ID NO: 4447098 - DNA, 25 bp, Homo sapien
ccaaggggcataaaattcaatcagc

SEQ ID NO: 4447099 - DNA, 25 bp, Homo sapien
tatggagaaggcacatcattggctg

SEQ ID NO: 4447100 - DNA, 25 bp, Homo sapien
atatggagaaggcacatcattggct

SEQ ID NO: 4447101 - DNA, 25 bp, Homo sapien
catatggagaaggcacatcattggc

SEQ ID NO: 4447102 - DNA, 25 bp, Homo sapien
tatgtgggcccatactgcagaactc

SEQ ID NO: 4447103 - DNA, 25 bp, Homo sapien
gatttcctggtggttacaagcttta

SEQ ID NO: 4447104 - DNA, 25 bp, Homo sapien
ctcttaagccaagaaggaatcagtg

SEQ ID NO: 4447105 - DNA, 25 bp, Homo sapien
gctttattcctatctattgcctaga

SEQ ID NO: 4447106 - DNA, 25 bp, Homo sapien
ggctggagagaagtatatggtagga

SEQ ID NO: 4447107 - DNA, 25 bp, Homo sapien
tggctggagagaagtatatggtagg

SEQ ID NO: 4447108 - DNA, 25 bp, Homo sapien
ttggctggagagaagtatatggtag

SEQ ID NO: 4447109 - DNA, 25 bp, Homo sapien
ttgttggctggagagaagtatatgg

SEQ ID NO: 4447110 - DNA, 25 bp, Homo sapien
ttgtagatagctaataaaatcactt

SEQ ID NO: 4447111 - DNA, 25 bp, Homo sapien
tgtagatagctaataaaatcactta

SEQ ID NO: 4447112 - DNA, 25 bp, Homo sapien
taataattcccatatgggtcctagt

SEQ ID NO: 4447113 - DNA, 25 bp, Homo sapien
gtaataattcccatatgggtcctag

SEQ ID NO: 4447114 - DNA, 25 bp, Homo sapien
atttaacaggattcagattatatcc

SEQ ID NO: 4447115 - DNA, 25 bp, Homo sapien
taaactggtcctggtatttccataa

SEQ ID NO: 4447116 - DNA, 25 bp, Homo sapien
tgttctaatcaccagggtaggcctg

SEQ ID NO: 4447117 - DNA, 25 bp, Homo sapien
tatggacccagtcagtctacagctg

SEQ ID NO: 4447118 - DNA, 25 bp, Homo sapien
gagcctctgcttagtgaaacacaaa

SEQ ID NO: 4447119 - DNA, 25 bp, Homo sapien
gatgaaactgcgtgatgccacaccc

SEQ ID NO: 4447120 - DNA, 25 bp, Homo sapien
ttggggggacagtctagctccgtct

SEQ ID NO: 4447121 - DNA, 25 bp, Homo sapien
gtctagctccgtctctcaagctgga

SEQ ID NO: 4447122 - DNA, 25 bp, Homo sapien
gggacagtctagctccgtctctcaa

SEQ ID NO: 4447123 - DNA, 25 bp, Homo sapien
gacagtctagctccgtctctcaagc

SEQ ID NO: 4447124 - DNA, 25 bp, Homo sapien
aaagcacttttagtcaagctaaaat

SEQ ID NO: 4447125 - DNA, 25 bp, Homo sapien
tttagaaattggaagctcgttatat

SEQ ID NO: 4447126 - DNA, 25 bp, Homo sapien
gaaattggaagctcgttatatggga

SEQ ID NO: 4447127 - DNA, 25 bp, Homo sapien
gaagctcgttatatgggaggaattt

SEQ ID NO: 4447128 - DNA, 25 bp, Homo sapien
ggcaagcaaccaaggacagtcactc

SEQ ID NO: 4447129 - DNA, 25 bp, Homo sapien
ggatcctcaagggagcacatggcac

SEQ ID NO: 4447130 - DNA, 25 bp, Homo sapien
caggatcctcaagggagcacatggc

SEQ ID NO: 4447131 - DNA, 25 bp, Homo sapien
tggcaagcaaccaaggacagtcact

SEQ ID NO: 4447132 - DNA, 25 bp, Homo sapien
cgatagcccaaagcgattcatgcgg

SEQ ID NO: 4447133 - DNA, 25 bp, Homo sapien
gaaatcggtttcagagcggtggaac

SEQ ID NO: 4447134 - DNA, 25 bp, Homo sapien
gtgccaaccaaaccctgaacagagg

SEQ ID NO: 4447135 - DNA, 25 bp, Homo sapien
catgcggatcctagaagaaagcgcc

SEQ ID NO: 4447136 - DNA, 25 bp, Homo sapien
tgtttaggaaacaggacaacatcgg

SEQ ID NO: 4447137 - DNA, 25 bp, Homo sapien
cactctgacgcgtgtttaggccacg

SEQ ID NO: 4447138 - DNA, 25 bp, Homo sapien
gatctggccctctggaatgcctggc

SEQ ID NO: 4447139 - DNA, 25 bp, Homo sapien
tgagacctaggactgggttctggct

SEQ ID NO: 4447140 - DNA, 25 bp, Homo sapien
gccagtaccagtgatttgttgccta

SEQ ID NO: 4447141 - DNA, 25 bp, Homo sapien
gatgtatcttcaacacttgtaatgt

SEQ ID NO: 4447142 - DNA, 25 bp, Homo sapien
gtaataacattgcagttactgccag

SEQ ID NO: 4447143 - DNA, 25 bp, Homo sapien
gatctaacagcaagtctaatatcaa

SEQ ID NO: 4447144 - DNA, 25 bp, Homo sapien
caggaattcaaagttgtagtgagtc

SEQ ID NO: 4447145 - DNA, 25 bp, Homo sapien
agtgagtcgtgatctcgccaccgta

SEQ ID NO: 4447146 - DNA, 25 bp, Homo sapien
tagtgagtcgtgatctcgccaccgt

SEQ ID NO: 4447147 - DNA, 25 bp, Homo sapien
gagtcgtgatctcgccaccgtactc

SEQ ID NO: 4447148 - DNA, 25 bp, Homo sapien
tggaggactccaaaagtcacagact

SEQ ID NO: 4447149 - DNA, 25 bp, Homo sapien
tttcttactgtaccatcgccaccag

SEQ ID NO: 4447150 - DNA, 25 bp, Homo sapien
cacatattcgcttttcccctctgga

SEQ ID NO: 4447151 - DNA, 25 bp, Homo sapien
taaatgtgaacatgcagcttggaag

SEQ ID NO: 4447152 - DNA, 25 bp, Homo sapien
cagccagttctgtgttacgagtact

SEQ ID NO: 4447153 - DNA, 25 bp, Homo sapien
gtgcttacttaggaccacctctcag

SEQ ID NO: 4447154 - DNA, 25 bp, Homo sapien
gtactctactactaaacttgtgctt

SEQ ID NO: 4447155 - DNA, 25 bp, Homo sapien
aagaacgcccgtagacaagagggcg

SEQ ID NO: 4447156 - DNA, 25 bp, Homo sapien
cagtttggggtactgacaaagtcgc

SEQ ID NO: 4447157 - DNA, 25 bp, Homo sapien
accgtgcagagtgacctcatgcggg

SEQ ID NO: 4447158 - DNA, 25 bp, Homo sapien
gctcgagcacgtgaccgtgcagagt

SEQ ID NO: 4447159 - DNA, 25 bp, Homo sapien
cgatgtggcgctcccgcgggctcga

SEQ ID NO: 4447160 - DNA, 25 bp, Homo sapien
ggagccggctcccattggacaagaa

SEQ ID NO: 4447161 - DNA, 25 bp, Homo sapien
gcaacgtagcacagtcgttcctttc

SEQ ID NO: 4447162 - DNA, 25 bp, Homo sapien
ttctgtcggacgttgcaggtcccgc

SEQ ID NO: 4447163 - DNA, 25 bp, Homo sapien
gaaaaagcacgtggatccacgggtc

SEQ ID NO: 4447164 - DNA, 25 bp, Homo sapien
gcgcccagagaaacgccttgctagg

SEQ ID NO: 4447165 - DNA, 25 bp, Homo sapien
agggtggtcccgtgaagtagccgtg

SEQ ID NO: 4447166 - DNA, 25 bp, Homo sapien
gaagctacggaaggtcaaagccggc

SEQ ID NO: 4447167 - DNA, 25 bp, Homo sapien
aagggctcgatttccgggcaccgag

SEQ ID NO: 4447168 - DNA, 25 bp, Homo sapien
gcggaagatccgggagggcctatgc

SEQ ID NO: 4447169 - DNA, 25 bp, Homo sapien
agatccgggagggcctatgcctaac

SEQ ID NO: 4447170 - DNA, 25 bp, Homo sapien
ggaagatccgggagggcctatgcct

SEQ ID NO: 4447171 - DNA, 25 bp, Homo sapien
gaagatccgggagggcctatgccta

SEQ ID NO: 4447172 - DNA, 25 bp, Homo sapien
gctctgggcctatcacaggggcgct

SEQ ID NO: 4447173 - DNA, 25 bp, Homo sapien
gcaggatccaacaccacttcaatct

SEQ ID NO: 4447174 - DNA, 25 bp, Homo sapien
ctgccacgggccaggtcaaaatacg

SEQ ID NO: 4447175 - DNA, 25 bp, Homo sapien
caaaatacggactagagaagggagg

SEQ ID NO: 4447176 - DNA, 25 bp, Homo sapien
ttcatattcttctggcgggcgagct

SEQ ID NO: 4447177 - DNA, 25 bp, Homo sapien
atattcttctggcgggcgagctcac

SEQ ID NO: 4447178 - DNA, 25 bp, Homo sapien
catattcttctggcgggcgagctca

SEQ ID NO: 4447179 - DNA, 25 bp, Homo sapien
tcatattcttctggcgggcgagctc

SEQ ID NO: 4447180 - DNA, 25 bp, Homo sapien
ctgcttgcgggcggcagcagaaagc

SEQ ID NO: 4447181 - DNA, 25 bp, Homo sapien
tgcttgcgggcggcagcagaaagcc

SEQ ID NO: 4447182 - DNA, 25 bp, Homo sapien
cccagggacgctcagaaatcagact

SEQ ID NO: 4447183 - DNA, 25 bp, Homo sapien
tttgaaatgtgaagctccctgccct

SEQ ID NO: 4447184 - DNA, 25 bp, Homo sapien
tattctgtattgaggaccacaccca

SEQ ID NO: 4447185 - DNA, 25 bp, Homo sapien
ggccaaaagtactgggctgccgtaa

SEQ ID NO: 4447186 - DNA, 25 bp, Homo sapien
tgaagggcacaaaggataagatgga

SEQ ID NO: 4447187 - DNA, 25 bp, Homo sapien
atggaagtggatgggactaagttca

SEQ ID NO: 4447188 - DNA, 25 bp, Homo sapien
ctaagttcagcgtttggctgctgta

SEQ ID NO: 4447189 - DNA, 25 bp, Homo sapien
ggatgaagggcacaaaggataagat

SEQ ID NO: 4447190 - DNA, 25 bp, Homo sapien
tgggttcctccttcttctcgtttgc

SEQ ID NO: 4447191 - DNA, 25 bp, Homo sapien
cttctgctgcatgatctccgagtcc

SEQ ID NO: 4447192 - DNA, 25 bp, Homo sapien
ccttcttctcgtttgcctttttctg

SEQ ID NO: 4447193 - DNA, 25 bp, Homo sapien
ctgcttctgctgcatgatctccgag

SEQ ID NO: 4447194 - DNA, 25 bp, Homo sapien
gaaacgcgagcgtggtgggactggc

SEQ ID NO: 4447195 - DNA, 25 bp, Homo sapien
cacacaggcgaagggcaagagggtt

SEQ ID NO: 4447196 - DNA, 25 bp, Homo sapien
ctgtgagcactacaggaggaaacgc

SEQ ID NO: 4447197 - DNA, 25 bp, Homo sapien
gcaagagggttggacacgaagccac

SEQ ID NO: 4447198 - DNA, 25 bp, Homo sapien
aagggaatgccatcggtgctgggac

SEQ ID NO: 4447199 - DNA, 25 bp, Homo sapien
ggacccgctgcagactcagggcaaa

SEQ ID NO: 4447200 - DNA, 25 bp, Homo sapien
agggcaaagggaatgccatcggtgc

SEQ ID NO: 4447201 - DNA, 25 bp, Homo sapien
aaggaagcacaaaagggacccgctg

SEQ ID NO: 4447202 - DNA, 25 bp, Homo sapien
gagtggcccagggggagagaggcta

SEQ ID NO: 4447203 - DNA, 25 bp, Homo sapien
ccgggagtggcccagggggagagag

SEQ ID NO: 4447204 - DNA, 25 bp, Homo sapien
agtggcccagggggagagaggctac

SEQ ID NO: 4447205 - DNA, 25 bp, Homo sapien
gggagtggcccagggggagagaggc

SEQ ID NO: 4447206 - DNA, 25 bp, Homo sapien
cacaggaataaaaaacactgggaag

SEQ ID NO: 4447207 - DNA, 25 bp, Homo sapien
agggcagtcattcttccaaccccat

SEQ ID NO: 4447208 - DNA, 25 bp, Homo sapien
gaaagggcagtcattcttccaaccc

SEQ ID NO: 4447209 - DNA, 25 bp, Homo sapien
aagggcagtcattcttccaacccca

SEQ ID NO: 4447210 - DNA, 25 bp, Homo sapien
ggaaagggcagtcattcttccaacc

SEQ ID NO: 4447211 - DNA, 25 bp, Homo sapien
aataaggagttcagccctgggcaca

SEQ ID NO: 4447212 - DNA, 25 bp, Homo sapien
tctgtggagtgccataagaaccctc

SEQ ID NO: 4447213 - DNA, 25 bp, Homo sapien
tacacagctatgagggagcagaact

SEQ ID NO: 4447214 - DNA, 25 bp, Homo sapien
ttcatcaagggtagctgggccacct

SEQ ID NO: 4447215 - DNA, 25 bp, Homo sapien
gtacccacaatgtgctaggcaactg

SEQ ID NO: 4447216 - DNA, 25 bp, Homo sapien
attgagtacccacaatgtgctaggc

SEQ ID NO: 4447217 - DNA, 25 bp, Homo sapien
agtacccacaatgtgctaggcaact

SEQ ID NO: 4447218 - DNA, 25 bp, Homo sapien
gagtacccacaatgtgctaggcaac

SEQ ID NO: 4447219 - DNA, 25 bp, Homo sapien
caagactagagtgagaaaagctccc

SEQ ID NO: 4447220 - DNA, 25 bp, Homo sapien
gaccttagggctctcacatgaatag

SEQ ID NO: 4447221 - DNA, 25 bp, Homo sapien
gcctggcctgagtaaaatggaaccc

SEQ ID NO: 4447222 - DNA, 25 bp, Homo sapien
gctgaggtatttggacccctgtgga

SEQ ID NO: 4447223 - DNA, 25 bp, Homo sapien
gcctcagtgggtacatgtcctacag

SEQ ID NO: 4447224 - DNA, 25 bp, Homo sapien
catgtcctacagcattccaggtttt

SEQ ID NO: 4447225 - DNA, 25 bp, Homo sapien
ctccttgcatccgcctcagtgggta

SEQ ID NO: 4447226 - DNA, 25 bp, Homo sapien
tccttcctctccatcgctccttgca

SEQ ID NO: 4447227 - DNA, 25 bp, Homo sapien
tagtcacaccagtcttctgagagca

SEQ ID NO: 4447228 - DNA, 25 bp, Homo sapien
cacactcttggcaggagtaggctaa

SEQ ID NO: 4447229 - DNA, 25 bp, Homo sapien
ctaggattctacagcatggcaggtg

SEQ ID NO: 4447230 - DNA, 25 bp, Homo sapien
aatgtgatgactgcgtgggccaagt

SEQ ID NO: 4447231 - DNA, 25 bp, Homo sapien
tttaagtccctgcttctcgtgtact

SEQ ID NO: 4447232 - DNA, 25 bp, Homo sapien
gattggttcctccttagttgtctcg

SEQ ID NO: 4447233 - DNA, 25 bp, Homo sapien
gaataaggtgcagtaggcctgtccc

SEQ ID NO: 4447234 - DNA, 25 bp, Homo sapien
tgtgtaaccttgagccagactttgt

SEQ ID NO: 4447235 - DNA, 25 bp, Homo sapien
aggaaattccgggatgaagtaatag

SEQ ID NO: 4447236 - DNA, 25 bp, Homo sapien
tagacataggctgggtaaaggaaat

SEQ ID NO: 4447237 - DNA, 25 bp, Homo sapien
cagaggagggaaagtagacataggc

SEQ ID NO: 4447238 - DNA, 25 bp, Homo sapien
gaaattccgggatgaagtaatagca

SEQ ID NO: 4447239 - DNA, 25 bp, Homo sapien
tgtaccgagtatgtgcaggaaccgc

SEQ ID NO: 4447240 - DNA, 25 bp, Homo sapien
agtatgtgcaggaaccgccaccttc

SEQ ID NO: 4447241 - DNA, 25 bp, Homo sapien
aggctgtgttgctggtccacctcca

SEQ ID NO: 4447242 - DNA, 25 bp, Homo sapien
gctgtgtaccgagtatgtgcaggaa

SEQ ID NO: 4447243 - DNA, 25 bp, Homo sapien
agatccagatgccctcggggttgtg

SEQ ID NO: 4447244 - DNA, 25 bp, Homo sapien
acaaatgagtggtcatacccgtgac

SEQ ID NO: 4447245 - DNA, 25 bp, Homo sapien
gtcaaggacagtagtggaaagggtg

SEQ ID NO: 4447246 - DNA, 25 bp, Homo sapien
gtcgggttgtcaggtgggaagagat

SEQ ID NO: 4447247 - DNA, 25 bp, Homo sapien
tgacaagtaggtacctttccatgca

SEQ ID NO: 4447248 - DNA, 25 bp, Homo sapien
cagccccaggtgtttaggtcgagag

SEQ ID NO: 4447249 - DNA, 25 bp, Homo sapien
cctactaagttgtcagtgggcggca

SEQ ID NO: 4447250 - DNA, 25 bp, Homo sapien
taatgtcgttctggttcgttgcccc

SEQ ID NO: 4447251 - DNA, 25 bp, Homo sapien
tggtggacctaagcctaatccctgg

SEQ ID NO: 4447252 - DNA, 25 bp, Homo sapien
caacctgaatgacgtctaatcctaa

SEQ ID NO: 4447253 - DNA, 25 bp, Homo sapien
ggaatagtcccctcaacacataaac

SEQ ID NO: 4447254 - DNA, 25 bp, Homo sapien
tacagtgttttgtgcgaggccttct

SEQ ID NO: 4447255 - DNA, 25 bp, Homo sapien
caataaagaatgctaatccacaggg

SEQ ID NO: 4447256 - DNA, 25 bp, Homo sapien
gaaggcggttcgtctctcagacttc

SEQ ID NO: 4447257 - DNA, 25 bp, Homo sapien
cttcagggaggaaggcggttcgtct

SEQ ID NO: 4447258 - DNA, 25 bp, Homo sapien
agggaggaaggcggttcgtctctca

SEQ ID NO: 4447259 - DNA, 25 bp, Homo sapien
aggaaggcggttcgtctctcagact

SEQ ID NO: 4447260 - DNA, 25 bp, Homo sapien
gacacagcttccgcccggggaggag

SEQ ID NO: 4447261 - DNA, 25 bp, Homo sapien
aagccccacctcacgccgacttccg

SEQ ID NO: 4447262 - DNA, 25 bp, Homo sapien
cacctcacgccgacttccggcaact

SEQ ID NO: 4447263 - DNA, 25 bp, Homo sapien
gccgacttccggcaactgacacagc

SEQ ID NO: 4447264 - DNA, 25 bp, Homo sapien
ccgcaccgctgtcatgtttccgtgg

SEQ ID NO: 4447265 - DNA, 25 bp, Homo sapien
caaaacaagcggttcatgcatggat

SEQ ID NO: 4447266 - DNA, 25 bp, Homo sapien
atcagaaccccgtcttggagcgctg

SEQ ID NO: 4447267 - DNA, 25 bp, Homo sapien
gattcacgatgacaagtgttaccag

SEQ ID NO: 4447268 - DNA, 25 bp, Homo sapien
ggtctagttactgcaccgctaccca

SEQ ID NO: 4447269 - DNA, 25 bp, Homo sapien
tctgctcccgggaccttctgtctcc

SEQ ID NO: 4447270 - DNA, 25 bp, Homo sapien
ttctgtctccaatcacagacatggc

SEQ ID NO: 4447271 - DNA, 25 bp, Homo sapien
ttggctttctgctcccgggaccttc

SEQ ID NO: 4447272 - DNA, 25 bp, Homo sapien
cgggaccttctgtctccaatcacag

SEQ ID NO: 4447273 - DNA, 25 bp, Homo sapien
tgtggcgcctagatctgcaggaatt

SEQ ID NO: 4447274 - DNA, 25 bp, Homo sapien
taacaagagtaaagttgtggcgcct

SEQ ID NO: 4447275 - DNA, 25 bp, Homo sapien
caggaagggtcattcccagaagtgc

SEQ ID NO: 4447276 - DNA, 25 bp, Homo sapien
aactgttaaagttggctgcccctga

SEQ ID NO: 4447277 - DNA, 25 bp, Homo sapien
ttccttcttgatagtgacttttgcc

SEQ ID NO: 4447278 - DNA, 25 bp, Homo sapien
ccttcttgatagtgacttttgccag

SEQ ID NO: 4447279 - DNA, 25 bp, Homo sapien
tcttccttcttgatagtgacttttg

SEQ ID NO: 4447280 - DNA, 25 bp, Homo sapien
gatcttccttcttgatagtgacttt

SEQ ID NO: 4447281 - DNA, 25 bp, Homo sapien
tgtgccaccaaatatactgactccg

SEQ ID NO: 4447282 - DNA, 25 bp, Homo sapien
actgactccgcttgtttcaggaaac

SEQ ID NO: 4447283 - DNA, 25 bp, Homo sapien
cctccgcatacactagttaggcact

SEQ ID NO: 4447284 - DNA, 25 bp, Homo sapien
aatcatgttacataggttcccaggc

SEQ ID NO: 4447285 - DNA, 25 bp, Homo sapien
catgtgttcccgcaaactgcgttct

SEQ ID NO: 4447286 - DNA, 25 bp, Homo sapien
gttcccgcaaactgcgttctgctgc

SEQ ID NO: 4447287 - DNA, 25 bp, Homo sapien
tgtgttcccgcaaactgcgttctgc

SEQ ID NO: 4447288 - DNA, 25 bp, Homo sapien
tgttcccgcaaactgcgttctgctg

SEQ ID NO: 4447289 - DNA, 25 bp, Homo sapien
ttaatccagtaggtatatttgagaa

SEQ ID NO: 4447290 - DNA, 25 bp, Homo sapien
attaatccagtaggtatatttgaga

SEQ ID NO: 4447291 - DNA, 25 bp, Homo sapien
caaggtggcctatgaactgggttca

SEQ ID NO: 4447292 - DNA, 25 bp, Homo sapien
tatatatagtggctcctaggcaggt

SEQ ID NO: 4447293 - DNA, 25 bp, Homo sapien
gatgaatgagactggcctgccacct

SEQ ID NO: 4447294 - DNA, 25 bp, Homo sapien
gctgagactccagatgtaccttgaa

SEQ ID NO: 4447295 - DNA, 25 bp, Homo sapien
tgggtagcccagactttgaaggtgc

SEQ ID NO: 4447296 - DNA, 25 bp, Homo sapien
tatacccggaaatctaagctcatgg

SEQ ID NO: 4447297 - DNA, 25 bp, Homo sapien
tttccagcccttagcttgggttaga

SEQ ID NO: 4447298 - DNA, 25 bp, Homo sapien
gttttatcactgctatggtttccca

SEQ ID NO: 4447299 - DNA, 25 bp, Homo sapien
tctttgctgtctaggcagttctcaa

SEQ ID NO: 4447300 - DNA, 25 bp, Homo sapien
tcctactgcttagaggccagcaggt

SEQ ID NO: 4447301 - DNA, 25 bp, Homo sapien
tcctttcctgatggctagaaatcct

SEQ ID NO: 4447302 - DNA, 25 bp, Homo sapien
taaactcaacgagcaaattcctatt

SEQ ID NO: 4447303 - DNA, 25 bp, Homo sapien
tagaagtctgcttatgctgcccagg

SEQ ID NO: 4447304 - DNA, 25 bp, Homo sapien
gcattgtgcgggatacagtccctct

SEQ ID NO: 4447305 - DNA, 25 bp, Homo sapien
gatgccgccgtatctagtctcaaca

SEQ ID NO: 4447306 - DNA, 25 bp, Homo sapien
tgcatccgatcttgttcctgtggcc

SEQ ID NO: 4447307 - DNA, 25 bp, Homo sapien
gccaatgagcatgcgcagaaaccga

SEQ ID NO: 4447308 - DNA, 25 bp, Homo sapien
gggccgtcccagttcgcaatgagaa

SEQ ID NO: 4447309 - DNA, 25 bp, Homo sapien
gactcgacttcctagctgtgggcgc

SEQ ID NO: 4447310 - DNA, 25 bp, Homo sapien
aattctgcgacgtagaggacatgcg

SEQ ID NO: 4447311 - DNA, 25 bp, Homo sapien
ctttcggcttcttagcggccggcgc

SEQ ID NO: 4447312 - DNA, 25 bp, Homo sapien
gccttcccgccaagattgcggcggg

SEQ ID NO: 4447313 - DNA, 25 bp, Homo sapien
ggcgccttcccgccaagattgcggc

SEQ ID NO: 4447314 - DNA, 25 bp, Homo sapien
cttcccgccaagattgcggcgggag

SEQ ID NO: 4447315 - DNA, 25 bp, Homo sapien
gggtcgctgtctggagtccgccttc

SEQ ID NO: 4447316 - DNA, 25 bp, Homo sapien
gctgtctggagtccgccttctcagc

SEQ ID NO: 4447317 - DNA, 25 bp, Homo sapien
catctggggtcgctgtctggagtcc

SEQ ID NO: 4447318 - DNA, 25 bp, Homo sapien
tcgctgtctggagtccgccttctca

SEQ ID NO: 4447319 - DNA, 25 bp, Homo sapien
ccggtgccaggtgccctcgacctcc

SEQ ID NO: 4447320 - DNA, 25 bp, Homo sapien
ccccggtgccaggtgccctcgacct

SEQ ID NO: 4447321 - DNA, 25 bp, Homo sapien
ccctcacaaaaaccgaggcaggagc

SEQ ID NO: 4447322 - DNA, 25 bp, Homo sapien
gcctgtgtcccgcataaccctcaca

SEQ ID NO: 4447323 - DNA, 25 bp, Homo sapien
cacataagcgatgttttgattttct

SEQ ID NO: 4447324 - DNA, 25 bp, Homo sapien
gtgctggtctcagagacacataagc

SEQ ID NO: 4447325 - DNA, 25 bp, Homo sapien
cagagacacataagcgatgttttga

SEQ ID NO: 4447326 - DNA, 25 bp, Homo sapien
gggcaagatagaccttagctgtttt

SEQ ID NO: 4447327 - DNA, 25 bp, Homo sapien
catctgccgttctcttgggttgtag

SEQ ID NO: 4447328 - DNA, 25 bp, Homo sapien
ctttcagtatgaacagctgaggatg

SEQ ID NO: 4447329 - DNA, 25 bp, Homo sapien
tctttggaggtataatccttctgca

SEQ ID NO: 4447330 - DNA, 25 bp, Homo sapien
gaattttgcagcgtggattctgcct

SEQ ID NO: 4447331 - DNA, 25 bp, Homo sapien
tccatcctgactactttccacatca

SEQ ID NO: 4447332 - DNA, 25 bp, Homo sapien
cagggatggtgtggtatcttcatca

SEQ ID NO: 4447333 - DNA, 25 bp, Homo sapien
ccatcctgactactttccacatcaa

SEQ ID NO: 4447334 - DNA, 25 bp, Homo sapien
gggatggtgtggtatcttcatcact

SEQ ID NO: 4447335 - DNA, 25 bp, Homo sapien
tacatcaaactaaaatctgctttat

SEQ ID NO: 4447336 - DNA, 25 bp, Homo sapien
gagccaccgagcctgacttcttcag

SEQ ID NO: 4447337 - DNA, 25 bp, Homo sapien
tctgctttatatttaccttgtattc

SEQ ID NO: 4447338 - DNA, 25 bp, Homo sapien
ccaccgagcctgacttcttcagaat

SEQ ID NO: 4447339 - DNA, 25 bp, Homo sapien
gcaaaaaagtctgcgttttctgata

SEQ ID NO: 4447340 - DNA, 25 bp, Homo sapien
tctcttcctttcgtagggtgacaat

SEQ ID NO: 4447341 - DNA, 25 bp, Homo sapien
tcctttcgtagggtgacaatcccga

SEQ ID NO: 4447342 - DNA, 25 bp, Homo sapien
aagtctgcgttttctgatatgttct

SEQ ID NO: 4447343 - DNA, 25 bp, Homo sapien
tcttctctatcatttcacggagtct

SEQ ID NO: 4447344 - DNA, 25 bp, Homo sapien
gatttaggaggctgtctcttctcta

SEQ ID NO: 4447345 - DNA, 25 bp, Homo sapien
cttttggatttaggaggctgtctct

SEQ ID NO: 4447346 - DNA, 25 bp, Homo sapien
tgtctcttctctatcatttcacgga

SEQ ID NO: 4447347 - DNA, 25 bp, Homo sapien
aatattaccacaaaattcagcatag

SEQ ID NO: 4447348 - DNA, 25 bp, Homo sapien
agggaggggtatatatgggccttca

SEQ ID NO: 4447349 - DNA, 25 bp, Homo sapien
ttcagcatagtggttgtatcgggag

SEQ ID NO: 4447350 - DNA, 25 bp, Homo sapien
tattcgtaatttctattaacctgga

SEQ ID NO: 4447351 - DNA, 25 bp, Homo sapien
aatgaaactcccgaaggatcaactt

SEQ ID NO: 4447352 - DNA, 25 bp, Homo sapien
taatcgcattgaccttctacatcca

SEQ ID NO: 4447353 - DNA, 25 bp, Homo sapien
tgctactaatgtcggcggtgttgga

SEQ ID NO: 4447354 - DNA, 25 bp, Homo sapien
ggatcaacttttagtaatcgcattg

SEQ ID NO: 4447355 - DNA, 25 bp, Homo sapien
ctttaaatcgttcattgttgtcttc

SEQ ID NO: 4447356 - DNA, 25 bp, Homo sapien
aaatcctttaaatcgttcattgttg

SEQ ID NO: 4447357 - DNA, 25 bp, Homo sapien
tcctttaaatcgttcattgttgtct

SEQ ID NO: 4447358 - DNA, 25 bp, Homo sapien
aatcctttaaatcgttcattgttgt

SEQ ID NO: 4447359 - DNA, 25 bp, Homo sapien
ttaatgctagataatcccttctcag

SEQ ID NO: 4447360 - DNA, 25 bp, Homo sapien
cttttaatgctagataatcccttct

SEQ ID NO: 4447361 - DNA, 25 bp, Homo sapien
atgctagataatcccttctcagtgt

SEQ ID NO: 4447362 - DNA, 25 bp, Homo sapien
gctagataatcccttctcagtgttc

SEQ ID NO: 4447363 - DNA, 25 bp, Homo sapien
gaactattcaatctcctggtaacca

SEQ ID NO: 4447364 - DNA, 25 bp, Homo sapien
cctttgagcaacaattcggcaatgt

SEQ ID NO: 4447365 - DNA, 25 bp, Homo sapien
taaagactctagtaacatgcaaccg

SEQ ID NO: 4447366 - DNA, 25 bp, Homo sapien
taacaccaaaagctggtaggctgca

SEQ ID NO: 4447367 - DNA, 25 bp, Homo sapien
ttgtaaacggtatcttcactaatga

SEQ ID NO: 4447368 - DNA, 25 bp, Homo sapien
gagagccatagagaatattgggcct

SEQ ID NO: 4447369 - DNA, 25 bp, Homo sapien
caaatttggccccaactgctaccaa

SEQ ID NO: 4447370 - DNA, 25 bp, Homo sapien
gctaccaaagttctagtttctgatg

SEQ ID NO: 4447371 - DNA, 25 bp, Homo sapien
ggctggatggcacagtgtcgactca

SEQ ID NO: 4447372 - DNA, 25 bp, Homo sapien
gaccagatggttaatgatattcaag

SEQ ID NO: 4447373 - DNA, 25 bp, Homo sapien
agcccaaaattgtaagtctcacgca

SEQ ID NO: 4447374 - DNA, 25 bp, Homo sapien
gaatcataaagcatcataaagccca

SEQ ID NO: 4447375 - DNA, 25 bp, Homo sapien
tgtcaaagctattctctcaactcac

SEQ ID NO: 4447376 - DNA, 25 bp, Homo sapien
ccttgaaactcatctcttggcttcc

SEQ ID NO: 4447377 - DNA, 25 bp, Homo sapien
tctgcaaaaggctctgtcaacctcc

SEQ ID NO: 4447378 - DNA, 25 bp, Homo sapien
cactacatggtaccctattttcaaa

SEQ ID NO: 4447379 - DNA, 25 bp, Homo sapien
gtggtgttttgctcttgtttcccag

SEQ ID NO: 4447380 - DNA, 25 bp, Homo sapien
ggtgttttgctcttgtttcccaggc

SEQ ID NO: 4447381 - DNA, 25 bp, Homo sapien
tggtgttttgctcttgtttcccagg

SEQ ID NO: 4447382 - DNA, 25 bp, Homo sapien
tgttttgctcttgtttcccaggctg

SEQ ID NO: 4447383 - DNA, 25 bp, Homo sapien
aactccatcttctttaggttgctgg

SEQ ID NO: 4447384 - DNA, 25 bp, Homo sapien
actggctgactatggggatgaaaaa

SEQ ID NO: 4447385 - DNA, 25 bp, Homo sapien
gactatggggatgaaaaacataaac

SEQ ID NO: 4447386 - DNA, 25 bp, Homo sapien
actccatcttctttaggttgctggg

SEQ ID NO: 4447387 - DNA, 25 bp, Homo sapien
tcatagctcagtgacagtatgtggg

SEQ ID NO: 4447388 - DNA, 25 bp, Homo sapien
gattggcgggtgagaagtaaagaca

SEQ ID NO: 4447389 - DNA, 25 bp, Homo sapien
tatgtgggccggattggcgggtgag

SEQ ID NO: 4447390 - DNA, 25 bp, Homo sapien
gaaaaatccccacagcgtaacgtgc

SEQ ID NO: 4447391 - DNA, 25 bp, Homo sapien
tcaatccggcagtgataaaatactg

SEQ ID NO: 4447392 - DNA, 25 bp, Homo sapien
aaatactgtctatgcactgggtgga

SEQ ID NO: 4447393 - DNA, 25 bp, Homo sapien
gaagttccaggtgtccgtctatcca

SEQ ID NO: 4447394 - DNA, 25 bp, Homo sapien
tattaaagtggaggcatcttctgcc

SEQ ID NO: 4447395 - DNA, 25 bp, Homo sapien
tcaagtctcaatcagtatagaaagg

SEQ ID NO: 4447396 - DNA, 25 bp, Homo sapien
cttctcataagaggcgaatgcatat

SEQ ID NO: 4447397 - DNA, 25 bp, Homo sapien
ggcgaatgcatataatgccaaggaa

SEQ ID NO: 4447398 - DNA, 25 bp, Homo sapien
gccaacaagttataggtcacatgta

SEQ ID NO: 4447399 - DNA, 25 bp, Homo sapien
gctatactgaagaacatttaagaca

SEQ ID NO: 4447400 - DNA, 25 bp, Homo sapien
ctatactgaagaacatttaagacag

SEQ ID NO: 4447401 - DNA, 25 bp, Homo sapien
tttaagacagaactctcagccaggt

SEQ ID NO: 4447402 - DNA, 25 bp, Homo sapien
taagaggtgaaaaataggcggaagc

SEQ ID NO: 4447403 - DNA, 25 bp, Homo sapien
tacaatcagcacatgtggtcaccac

SEQ ID NO: 4447404 - DNA, 25 bp, Homo sapien
tgacttctcctggaattcaatcgcc

SEQ ID NO: 4447405 - DNA, 25 bp, Homo sapien
gtcaccactctgttaccagtaagag

SEQ ID NO: 4447406 - DNA, 25 bp, Homo sapien
gaatcttagaagatatacagctgct

SEQ ID NO: 4447407 - DNA, 25 bp, Homo sapien
gtgaggagcggaatcttagaagata

SEQ ID NO: 4447408 - DNA, 25 bp, Homo sapien
atggtggtgaggagcggaatcttag

SEQ ID NO: 4447409 - DNA, 25 bp, Homo sapien
ggagcggaatcttagaagatataca

SEQ ID NO: 4447410 - DNA, 25 bp, Homo sapien
ggaagatttctacccgtcgtggatg

SEQ ID NO: 4447411 - DNA, 25 bp, Homo sapien
aaatataccgagttgggtgcatggc

SEQ ID NO: 4447412 - DNA, 25 bp, Homo sapien
tgcatggcattgatggaacacacag

SEQ ID NO: 4447413 - DNA, 25 bp, Homo sapien
cagccatcgcccagtgaaagtgttg

SEQ ID NO: 4447414 - DNA, 25 bp, Homo sapien
acatgtatcttcccgctggaattac

SEQ ID NO: 4447415 - DNA, 25 bp, Homo sapien
aaacatgtatcttcccgctggaatt

SEQ ID NO: 4447416 - DNA, 25 bp, Homo sapien
aacatgtatcttcccgctggaatta

SEQ ID NO: 4447417 - DNA, 25 bp, Homo sapien
aaaacatgtatcttcccgctggaat

SEQ ID NO: 4447418 - DNA, 25 bp, Homo sapien
aaaaaagtcctgacggcacctcagc

SEQ ID NO: 4447419 - DNA, 25 bp, Homo sapien
taaggcacgccgattactaggctcc

SEQ ID NO: 4447420 - DNA, 25 bp, Homo sapien
actaggctccttagacagtggtcaa

SEQ ID NO: 4447421 - DNA, 25 bp, Homo sapien
tcttgattacaagttctgatggcca

SEQ ID NO: 4447422 - DNA, 25 bp, Homo sapien
cactgagttacattacctttccggg

SEQ ID NO: 4447423 - DNA, 25 bp, Homo sapien
tccgggtccccttccagtgtatgag

SEQ ID NO: 4447424 - DNA, 25 bp, Homo sapien
cgtaagacttaacctacaggcaggg

SEQ ID NO: 4447425 - DNA, 25 bp, Homo sapien
gagtaaaggcaaagtacagacagac

SEQ ID NO: 4447426 - DNA, 25 bp, Homo sapien
tagtaactgatttggcagctcccct

SEQ ID NO: 4447427 - DNA, 25 bp, Homo sapien
gatttcatgtgaagagcaaaaaccc

SEQ ID NO: 4447428 - DNA, 25 bp, Homo sapien
taaagatcgggacaggtaagcctgg

SEQ ID NO: 4447429 - DNA, 25 bp, Homo sapien
tcttatactggaatgccgggaccag

SEQ ID NO: 4447430 - DNA, 25 bp, Homo sapien
aacatttattgacgagcccaggcaa

SEQ ID NO: 4447431 - DNA, 25 bp, Homo sapien
gagcccaggcaattactgccaagta

SEQ ID NO: 4447432 - DNA, 25 bp, Homo sapien
gacgagcccaggcaattactgccaa

SEQ ID NO: 4447433 - DNA, 25 bp, Homo sapien
tattgacgagcccaggcaattactg

SEQ ID NO: 4447434 - DNA, 25 bp, Homo sapien
cagtggtaccagagatagatagttc

SEQ ID NO: 4447435 - DNA, 25 bp, Homo sapien
atctgaagggaccaccgctacagca

SEQ ID NO: 4447436 - DNA, 25 bp, Homo sapien
tctagagcctagtgggcatcaccat

SEQ ID NO: 4447437 - DNA, 25 bp, Homo sapien
taagtctgtccccttagtctagagc

SEQ ID NO: 4447438 - DNA, 25 bp, Homo sapien
gtagtcccagctactcaggaggctg

SEQ ID NO: 4447439 - DNA, 25 bp, Homo sapien
ctgtctctacaaaaaatacgaaaat

SEQ ID NO: 4447440 - DNA, 25 bp, Homo sapien
tagctaggcgtggtggcacatgcct

SEQ ID NO: 4447441 - DNA, 25 bp, Homo sapien
tgtaatcccagcacaaaaacctgtc

SEQ ID NO: 4447442 - DNA, 25 bp, Homo sapien
tctggaaccagtcgatcatatgaag

SEQ ID NO: 4447443 - DNA, 25 bp, Homo sapien
gaggctgccagtattggtccaggca

SEQ ID NO: 4447444 - DNA, 25 bp, Homo sapien
catatgaagccaaggatagtcccac

SEQ ID NO: 4447445 - DNA, 25 bp, Homo sapien
taggatttgccaaccagcctttgcc

SEQ ID NO: 4447446 - DNA, 25 bp, Homo sapien
tgctaagatcaaacgggagccaccg

SEQ ID NO: 4447447 - DNA, 25 bp, Homo sapien
tggctccagtggctaccaaaaagtc

SEQ ID NO: 4447448 - DNA, 25 bp, Homo sapien
caaacagttgtagctcagatcccag

SEQ ID NO: 4447449 - DNA, 25 bp, Homo sapien
cagtggccgagttgcaaaggaagtc

SEQ ID NO: 4447450 - DNA, 25 bp, Homo sapien
ggcacagtatgaccctagaggccta

SEQ ID NO: 4447451 - DNA, 25 bp, Homo sapien
gaattagtttgagtcatggcccaga

SEQ ID NO: 4447452 - DNA, 25 bp, Homo sapien
tgaactttgctggtgttgactgaca

SEQ ID NO: 4447453 - DNA, 25 bp, Homo sapien
tagaggcctaacaaccaagaatgct

SEQ ID NO: 4447454 - DNA, 25 bp, Homo sapien
tgttgccacccagtcacttatgtca

SEQ ID NO: 4447455 - DNA, 25 bp, Homo sapien
cagtcacttatgtcatgccatctca

SEQ ID NO: 4447456 - DNA, 25 bp, Homo sapien
gtcatgccatctcaatcccatagca

SEQ ID NO: 4447457 - DNA, 25 bp, Homo sapien
ggcactgttgccacccagtcactta

SEQ ID NO: 4447458 - DNA, 25 bp, Homo sapien
gtctcagcctcgtcttgggtgagtt

SEQ ID NO: 4447459 - DNA, 25 bp, Homo sapien
ggtttccaacccaaatacacatgca

SEQ ID NO: 4447460 - DNA, 25 bp, Homo sapien
tccatcattggacgcagagaggctg

SEQ ID NO: 4447461 - DNA, 25 bp, Homo sapien
cgttgcccacgggattctggaagct

SEQ ID NO: 4447462 - DNA, 25 bp, Homo sapien
tagagcggggaaagggattctccac

SEQ ID NO: 4447463 - DNA, 25 bp, Homo sapien
tcctgtccctgttgctttgacactc

SEQ ID NO: 4447464 - DNA, 25 bp, Homo sapien
gagagggtccagtatcaccagtaaa

SEQ ID NO: 4447465 - DNA, 25 bp, Homo sapien
tctctctttccattactggagaggg

SEQ ID NO: 4447466 - DNA, 25 bp, Homo sapien
gtccctgttgctttgacactcctgg

SEQ ID NO: 4447467 - DNA, 25 bp, Homo sapien
cactgaagccaaacctgtatctgta

SEQ ID NO: 4447468 - DNA, 25 bp, Homo sapien
tagaaacgagcaacgtgcagtcctg

SEQ ID NO: 4447469 - DNA, 25 bp, Homo sapien
gagatgttgacttcacaagctgccc

SEQ ID NO: 4447470 - DNA, 25 bp, Homo sapien
gcctgatggttattctgccactggg

SEQ ID NO: 4447471 - DNA, 25 bp, Homo sapien
tccatccgatgtcagtccttgctct

SEQ ID NO: 4447472 - DNA, 25 bp, Homo sapien
atccgatgtcagtccttgctctgca

SEQ ID NO: 4447473 - DNA, 25 bp, Homo sapien
atccatccgatgtcagtccttgctc

SEQ ID NO: 4447474 - DNA, 25 bp, Homo sapien
gtccttgctctgcaggagcctccat

SEQ ID NO: 4447475 - DNA, 25 bp, Homo sapien
gagccttacaagtgcatctgaactc

SEQ ID NO: 4447476 - DNA, 25 bp, Homo sapien
aagtgcatctgaactcgcagcccat

SEQ ID NO: 4447477 - DNA, 25 bp, Homo sapien
ctaagagccttacaagtgcatctga

SEQ ID NO: 4447478 - DNA, 25 bp, Homo sapien
tacaagtgcatctgaactcgcagcc

SEQ ID NO: 4447479 - DNA, 25 bp, Homo sapien
cgttggcttgtagggagcccatcat

SEQ ID NO: 4447480 - DNA, 25 bp, Homo sapien
ccctggacttaggactgggagacca

SEQ ID NO: 4447481 - DNA, 25 bp, Homo sapien
aaatcttgcccctgccgttggcttg

SEQ ID NO: 4447482 - DNA, 25 bp, Homo sapien
gacgcagctggcatcaggaagtgca

SEQ ID NO: 4447483 - DNA, 25 bp, Homo sapien
gcaggcaaagggaagggaagacggc

SEQ ID NO: 4447484 - DNA, 25 bp, Homo sapien
ctgcaggcaaagggaagggaagacg

SEQ ID NO: 4447485 - DNA, 25 bp, Homo sapien
agggaagggaagacggctttgccat

SEQ ID NO: 4447486 - DNA, 25 bp, Homo sapien
caggcaaagggaagggaagacggct

SEQ ID NO: 4447487 - DNA, 25 bp, Homo sapien
ttcaacgcacagtttagccacagtg

SEQ ID NO: 4447488 - DNA, 25 bp, Homo sapien
gcacagtttagccacagtgccaggg

SEQ ID NO: 4447489 - DNA, 25 bp, Homo sapien
ccggtataatcaatggcacaacatt

SEQ ID NO: 4447490 - DNA, 25 bp, Homo sapien
tggcacaacattcaacgcacagttt

SEQ ID NO: 4447491 - DNA, 25 bp, Homo sapien
cacttgcttgtgaggtgcttgtgtg

SEQ ID NO: 4447492 - DNA, 25 bp, Homo sapien
cctaatgagtggagctttctgcatc

SEQ ID NO: 4447493 - DNA, 25 bp, Homo sapien
aagcaggattgaataaagtggagcc

SEQ ID NO: 4447494 - DNA, 25 bp, Homo sapien
tagactctacttcgtttgcacttgc

SEQ ID NO: 4447495 - DNA, 25 bp, Homo sapien
ccaggagccacatggttacgtggcc

SEQ ID NO: 4447496 - DNA, 25 bp, Homo sapien
gcctcctggcattgtagtctagata

SEQ ID NO: 4447497 - DNA, 25 bp, Homo sapien
acatggttacgtggccccacagcag

SEQ ID NO: 4447498 - DNA, 25 bp, Homo sapien
cattgtagtctagataccagagcct

SEQ ID NO: 4447499 - DNA, 25 bp, Homo sapien
tctgttccttgagtgcattgactca

SEQ ID NO: 4447500 - DNA, 25 bp, Homo sapien
cagggaggacaggcttctgttcctt

SEQ ID NO: 4447501 - DNA, 25 bp, Homo sapien
agtgcattgactcattgctgaggcc

SEQ ID NO: 4447502 - DNA, 25 bp, Homo sapien
gctgaggccttgtgcattcaagtcc

SEQ ID NO: 4447503 - DNA, 25 bp, Homo sapien
tcaaggagcgtagatgtagggagga

SEQ ID NO: 4447504 - DNA, 25 bp, Homo sapien
gcctcctagacaagagagcccaaag

SEQ ID NO: 4447505 - DNA, 25 bp, Homo sapien
caaaggccaggataggacatgttct

SEQ ID NO: 4447506 - DNA, 25 bp, Homo sapien
tctttccccggattgagtttgatga

SEQ ID NO: 4447507 - DNA, 25 bp, Homo sapien
gatgcaaccattcatccccttgccc

SEQ ID NO: 4447508 - DNA, 25 bp, Homo sapien
cttcattcttctttttgtttctcat

SEQ ID NO: 4447509 - DNA, 25 bp, Homo sapien
atccccttgccctctccgtctttct

SEQ ID NO: 4447510 - DNA, 25 bp, Homo sapien
ttcttcattcttctttttgtttctc

SEQ ID NO: 4447511 - DNA, 25 bp, Homo sapien
gtctccctgggtgtggcattcctcc

SEQ ID NO: 4447512 - DNA, 25 bp, Homo sapien
tctccctgggtgtggcattcctccc

SEQ ID NO: 4447513 - DNA, 25 bp, Homo sapien
ctccctgggtgtggcattcctccct

SEQ ID NO: 4447514 - DNA, 25 bp, Homo sapien
cctcaaggagccaaacaaataattt

SEQ ID NO: 4447515 - DNA, 25 bp, Homo sapien
agcagcctctgacaaaagctgcgtg

SEQ ID NO: 4447516 - DNA, 25 bp, Homo sapien
gacaaaagctgcgtgctgaccgcat

SEQ ID NO: 4447517 - DNA, 25 bp, Homo sapien
ggtggattattccagagttccagca

SEQ ID NO: 4447518 - DNA, 25 bp, Homo sapien
tccttcactggacattggggtagag

SEQ ID NO: 4447519 - DNA, 25 bp, Homo sapien
ctaaagcggaattaccagtagagaa

SEQ ID NO: 4447520 - DNA, 25 bp, Homo sapien
ggcagctcaaggctcctatcacatc

SEQ ID NO: 4447521 - DNA, 25 bp, Homo sapien
gctcttggatttcatagcccctggg

SEQ ID NO: 4447522 - DNA, 25 bp, Homo sapien
gaggagtgccctgtgtttagctttt

SEQ ID NO: 4447523 - DNA, 25 bp, Homo sapien
ggtgaggagtgccctgtgtttagct

SEQ ID NO: 4447524 - DNA, 25 bp, Homo sapien
tttccaagggtgaggagtgccctgt

SEQ ID NO: 4447525 - DNA, 25 bp, Homo sapien
agatgtctctttgggtaccatgttg

SEQ ID NO: 4447526 - DNA, 25 bp, Homo sapien
cccacctgtgagtgagaacgtctgg

SEQ ID NO: 4447527 - DNA, 25 bp, Homo sapien
cacctgtgagtgagaacgtctggtg

SEQ ID NO: 4447528 - DNA, 25 bp, Homo sapien
cctgtgagtgagaacgtctggtgtt

SEQ ID NO: 4447529 - DNA, 25 bp, Homo sapien
ccacctgtgagtgagaacgtctggt

SEQ ID NO: 4447530 - DNA, 25 bp, Homo sapien
cttctcctttttggggattgtaatg

SEQ ID NO: 4447531 - DNA, 25 bp, Homo sapien
ttttggggattgtaatgggatccat

SEQ ID NO: 4447532 - DNA, 25 bp, Homo sapien
tttttggggattgtaatgggatcca

SEQ ID NO: 4447533 - DNA, 25 bp, Homo sapien
tcctttccacgtaacttcaagtgtg

SEQ ID NO: 4447534 - DNA, 25 bp, Homo sapien
tgagggtgacagaaagactgcagat

SEQ ID NO: 4447535 - DNA, 25 bp, Homo sapien
aagactgcagattttgtggagacag

SEQ ID NO: 4447536 - DNA, 25 bp, Homo sapien
ggagacagagtcaaaccatgccaaa

SEQ ID NO: 4447537 - DNA, 25 bp, Homo sapien
attctactatagacacatgttgctg

SEQ ID NO: 4447538 - DNA, 25 bp, Homo sapien
ctactatagacacatgttgctgggc

SEQ ID NO: 4447539 - DNA, 25 bp, Homo sapien
catttgaccaccaatcccattaata

SEQ ID NO: 4447540 - DNA, 25 bp, Homo sapien
gaccaccaatcccattaataggtat

SEQ ID NO: 4447541 - DNA, 25 bp, Homo sapien
aagtcggtgcccttcagatggggtc

SEQ ID NO: 4447542 - DNA, 25 bp, Homo sapien
gagtggcacctgccagttgccagcg

SEQ ID NO: 4447543 - DNA, 25 bp, Homo sapien
tggcacctgccagttgccagcgaga

SEQ ID NO: 4447544 - DNA, 25 bp, Homo sapien
gtcggtgcccttcagatggggtctc

SEQ ID NO: 4447545 - DNA, 25 bp, Homo sapien
tcccaggtcccttctgtagtttgtg

SEQ ID NO: 4447546 - DNA, 25 bp, Homo sapien
ttgaataatccgctcactcccaggt

SEQ ID NO: 4447547 - DNA, 25 bp, Homo sapien
ttcacaccaaatgtgtcatcttgca

SEQ ID NO: 4447548 - DNA, 25 bp, Homo sapien
gctagttgagggttcttcacaccaa

SEQ ID NO: 4447549 - DNA, 25 bp, Homo sapien
ccagtgcagctctttagcacttttg

SEQ ID NO: 4447550 - DNA, 25 bp, Homo sapien
caaatagccagtgcagctctttagc

SEQ ID NO: 4447551 - DNA, 25 bp, Homo sapien
gtcttctcctttgtgtcgtacacat

SEQ ID NO: 4447552 - DNA, 25 bp, Homo sapien
cctttgtgtcgtacacattgtcagc

SEQ ID NO: 4447553 - DNA, 25 bp, Homo sapien
caggtgaccagtacaactaaattca

SEQ ID NO: 4447554 - DNA, 25 bp, Homo sapien
ggtgaccaggtgaccagtacaacta

SEQ ID NO: 4447555 - DNA, 25 bp, Homo sapien
gaccaggtgaccagtacaactaaat

SEQ ID NO: 4447556 - DNA, 25 bp, Homo sapien
cctggtgaccaggtgaccagtacaa

SEQ ID NO: 4447557 - DNA, 25 bp, Homo sapien
aacaaagggatcattgatggcaaca

SEQ ID NO: 4447558 - DNA, 25 bp, Homo sapien
ggtcaacaaagggatcattgatggc

SEQ ID NO: 4447559 - DNA, 25 bp, Homo sapien
tagttgaggtcaacaaagggatcat

SEQ ID NO: 4447560 - DNA, 25 bp, Homo sapien
tgtagttgaggtcaacaaagggatc

SEQ ID NO: 4447561 - DNA, 25 bp, Homo sapien
agatgcaagcatgatgttctggaaa

SEQ ID NO: 4447562 - DNA, 25 bp, Homo sapien
gaactgagcaattggtggtacagga

SEQ ID NO: 4447563 - DNA, 25 bp, Homo sapien
tgatgtaattagtgccagcatcacc

SEQ ID NO: 4447564 - DNA, 25 bp, Homo sapien
cattgtgccatagtttcccagaggg

SEQ ID NO: 4447565 - DNA, 25 bp, Homo sapien
ctgttcagctcagggatgaccttac

SEQ ID NO: 4447566 - DNA, 25 bp, Homo sapien
cttcctgttcagctcagggatgacc

SEQ ID NO: 4447567 - DNA, 25 bp, Homo sapien
tcctgttcagctcagggatgacctt

SEQ ID NO: 4447568 - DNA, 25 bp, Homo sapien
cctgttcagctcagggatgacctta

SEQ ID NO: 4447569 - DNA, 25 bp, Homo sapien
cagatccatgactgacagacacagt

SEQ ID NO: 4447570 - DNA, 25 bp, Homo sapien
tccatgactgacagacacagtggtg

SEQ ID NO: 4447571 - DNA, 25 bp, Homo sapien
gatccatgactgacagacacagtgg

SEQ ID NO: 4447572 - DNA, 25 bp, Homo sapien
catgactgacagacacagtggtggt

SEQ ID NO: 4447573 - DNA, 25 bp, Homo sapien
ggcatccattagagagtgacccttg

SEQ ID NO: 4447574 - DNA, 25 bp, Homo sapien
taggcatccattagagagtgaccct

SEQ ID NO: 4447575 - DNA, 25 bp, Homo sapien
ctaggcatccattagagagtgaccc

SEQ ID NO: 4447576 - DNA, 25 bp, Homo sapien
catccattagagagtgacccttgtg

SEQ ID NO: 4447577 - DNA, 25 bp, Homo sapien
ggaaaggcactgtaatggctgctca

SEQ ID NO: 4447578 - DNA, 25 bp, Homo sapien
gtgcttaggttattagtactagacc

SEQ ID NO: 4447579 - DNA, 25 bp, Homo sapien
gtcacttgtgctaagagctggcctg

SEQ ID NO: 4447580 - DNA, 25 bp, Homo sapien
tagcttcaccttatagctcagaggg

SEQ ID NO: 4447581 - DNA, 25 bp, Homo sapien
tcataccctgtttgtgagggagaat

SEQ ID NO: 4447582 - DNA, 25 bp, Homo sapien
ggcatagagcttgtcaagaggtgtt

SEQ ID NO: 4447583 - DNA, 25 bp, Homo sapien
ggatatagtcataccctgtttgtga

SEQ ID NO: 4447584 - DNA, 25 bp, Homo sapien
gagaatcctgcaagtttggtaccct

SEQ ID NO: 4447585 - DNA, 25 bp, Homo sapien
gcccgtgcagtcacactttaataaa

SEQ ID NO: 4447586 - DNA, 25 bp, Homo sapien
aaggttacatgaagtttctttgagg

SEQ ID NO: 4447587 - DNA, 25 bp, Homo sapien
cccaagggaggaatgatgcagacag

SEQ ID NO: 4447588 - DNA, 25 bp, Homo sapien
tgcagacagaaaagattggtaacca

SEQ ID NO: 4447589 - DNA, 25 bp, Homo sapien
tgcacagggtaatagatgtgataat

SEQ ID NO: 4447590 - DNA, 25 bp, Homo sapien
atgtgataatggtgacgagtgttag

SEQ ID NO: 4447591 - DNA, 25 bp, Homo sapien
cagggtaatagatgtgataatggtg

SEQ ID NO: 4447592 - DNA, 25 bp, Homo sapien
cttgcacagggtaatagatgtgata

SEQ ID NO: 4447593 - DNA, 25 bp, Homo sapien
taatccccaaattgcagccatgggc

SEQ ID NO: 4447594 - DNA, 25 bp, Homo sapien
tttgaattcagaattgagtcagtgg

SEQ ID NO: 4447595 - DNA, 25 bp, Homo sapien
gcgtttacagtgtttctaatcccca

SEQ ID NO: 4447596 - DNA, 25 bp, Homo sapien
cagtggtttggcgtttacagtgttt

SEQ ID NO: 4447597 - DNA, 25 bp, Homo sapien
ctagagttcctgatatgattccgat

SEQ ID NO: 4447598 - DNA, 25 bp, Homo sapien
agttcctgatatgattccgattcca

SEQ ID NO: 4447599 - DNA, 25 bp, Homo sapien
ctctagagttcctgatatgattccg

SEQ ID NO: 4447600 - DNA, 25 bp, Homo sapien
gatatgattccgattccattaatca

SEQ ID NO: 4447601 - DNA, 25 bp, Homo sapien
taaagtctcccatcatgactagttg

SEQ ID NO: 4447602 - DNA, 25 bp, Homo sapien
gatcagacttactgttgtgttcaga

SEQ ID NO: 4447603 - DNA, 25 bp, Homo sapien
cattgcttcatatgcatttgagagc

SEQ ID NO: 4447604 - DNA, 25 bp, Homo sapien
ttagtctgtgagtttctggtaacac

SEQ ID NO: 4447605 - DNA, 25 bp, Homo sapien
aaactatgctttacagttctgtccc

SEQ ID NO: 4447606 - DNA, 25 bp, Homo sapien
tggatttggttctaaaccactgaaa

SEQ ID NO: 4447607 - DNA, 25 bp, Homo sapien
caggtatttacaggtacacctttga

SEQ ID NO: 4447608 - DNA, 25 bp, Homo sapien
tacatccttatacattgtgtgtgcc

SEQ ID NO: 4447609 - DNA, 25 bp, Homo sapien
tttcatctcctgaattgtactcttt

SEQ ID NO: 4447610 - DNA, 25 bp, Homo sapien
tcatctcctgaattgtactctttca

SEQ ID NO: 4447611 - DNA, 25 bp, Homo sapien
ttcatctcctgaattgtactctttc

SEQ ID NO: 4447612 - DNA, 25 bp, Homo sapien
catctcctgaattgtactctttcat

SEQ ID NO: 4447613 - DNA, 25 bp, Homo sapien
ccaaatcattaggaaccctcatagt

SEQ ID NO: 4447614 - DNA, 25 bp, Homo sapien
cactttcagtgaacttgtagcagga

SEQ ID NO: 4447615 - DNA, 25 bp, Homo sapien
gaaccctcatagtctggtactccat

SEQ ID NO: 4447616 - DNA, 25 bp, Homo sapien
tagggcacactcaaatgtctggcca

SEQ ID NO: 4447617 - DNA, 25 bp, Homo sapien
gccaatgctaataggttattttgct

SEQ ID NO: 4447618 - DNA, 25 bp, Homo sapien
tcagtgttcggcagaatgccaatgc

SEQ ID NO: 4447619 - DNA, 25 bp, Homo sapien
gaaagcactgttcggcatttgggca

SEQ ID NO: 4447620 - DNA, 25 bp, Homo sapien
gggatgggaacctccaagaaagcac

SEQ ID NO: 4447621 - DNA, 25 bp, Homo sapien
cttccgtgccatgctcatgaaggca

SEQ ID NO: 4447622 - DNA, 25 bp, Homo sapien
ttgggaggcaggaacttgtaaagac

SEQ ID NO: 4447623 - DNA, 25 bp, Homo sapien
aggcttttgcctgctaccgttagac

SEQ ID NO: 4447624 - DNA, 25 bp, Homo sapien
ttctctaaagagatccttccgtgcc

SEQ ID NO: 4447625 - DNA, 25 bp, Homo sapien
gcttttcggtctgccactcggttcc

SEQ ID NO: 4447626 - DNA, 25 bp, Homo sapien
gctgctccggcttgactaggtccga

SEQ ID NO: 4447627 - DNA, 25 bp, Homo sapien
tgtgattgcttctttatcccgccca

SEQ ID NO: 4447628 - DNA, 25 bp, Homo sapien
gaaacagcatccataggaaccacgg

SEQ ID NO: 4447629 - DNA, 25 bp, Homo sapien
gacgggccaacttagggtacagcac

SEQ ID NO: 4447630 - DNA, 25 bp, Homo sapien
gaggtatccgcattctgcaggtgca

SEQ ID NO: 4447631 - DNA, 25 bp, Homo sapien
tggcttcggaaacgcagatcaagtg

SEQ ID NO: 4447632 - DNA, 25 bp, Homo sapien
tatttcaggcggcagacatcaatcc

SEQ ID NO: 4447633 - DNA, 25 bp, Homo sapien
gctgaaggagcagtctccttttgtc

SEQ ID NO: 4447634 - DNA, 25 bp, Homo sapien
cagctgaaggagcagtctccttttg

SEQ ID NO: 4447635 - DNA, 25 bp, Homo sapien
tgaaggagcagtctccttttgtctt

SEQ ID NO: 4447636 - DNA, 25 bp, Homo sapien
ctgaaggagcagtctccttttgtct

SEQ ID NO: 4447637 - DNA, 25 bp, Homo sapien
tatctaactggtctttcggtgaggt

SEQ ID NO: 4447638 - DNA, 25 bp, Homo sapien
tggatattacacctaagcatgaatg

SEQ ID NO: 4447639 - DNA, 25 bp, Homo sapien
caaagtgttttgtatcagagaagaa

SEQ ID NO: 4447640 - DNA, 25 bp, Homo sapien
ggagacatacatctagattcttgct

SEQ ID NO: 4447641 - DNA, 25 bp, Homo sapien
gtcaaggtcatacccttgggcatgc

SEQ ID NO: 4447642 - DNA, 25 bp, Homo sapien
tcctccagaagagtaaatatttcca

SEQ ID NO: 4447643 - DNA, 25 bp, Homo sapien
cctccagaagagtaaatatttccat

SEQ ID NO: 4447644 - DNA, 25 bp, Homo sapien
cagaggtcaaggtcatacccttggg

SEQ ID NO: 4447645 - DNA, 25 bp, Homo sapien
cttgacccacgtgtaaagactgaat

SEQ ID NO: 4447646 - DNA, 25 bp, Homo sapien
gatgttgactattgtgttctgatat

SEQ ID NO: 4447647 - DNA, 25 bp, Homo sapien
ttgactattgtgttctgatatgaca

SEQ ID NO: 4447648 - DNA, 25 bp, Homo sapien
cgtgtaaagactgaataattcaacc

SEQ ID NO: 4447649 - DNA, 25 bp, Homo sapien
tttatgtctcttaatcacagtggac

SEQ ID NO: 4447650 - DNA, 25 bp, Homo sapien
cacgataaccagaagatcagctctt

SEQ ID NO: 4447651 - DNA, 25 bp, Homo sapien
actggccaatgggagtgtttatgtc

SEQ ID NO: 4447652 - DNA, 25 bp, Homo sapien
tggagccaggtgcacgataaccaga

SEQ ID NO: 4447653 - DNA, 25 bp, Homo sapien
taaaacgtttgttactggtgacatc

SEQ ID NO: 4447654 - DNA, 25 bp, Homo sapien
ctggtgacatctttaggatcctgag

SEQ ID NO: 4447655 - DNA, 25 bp, Homo sapien
cacatatctactggaataaaacgtt

SEQ ID NO: 4447656 - DNA, 25 bp, Homo sapien
ggatcctgagagaatgacccttctc

SEQ ID NO: 4447657 - DNA, 25 bp, Homo sapien
tgtgattccaggtttcactaagtcc

SEQ ID NO: 4447658 - DNA, 25 bp, Homo sapien
aagtgacctcaggtctgtgattcca

SEQ ID NO: 4447659 - DNA, 25 bp, Homo sapien
tcactaagtccagagcaaataataa

SEQ ID NO: 4447660 - DNA, 25 bp, Homo sapien
tcttctctagtggtccctgaagatc

SEQ ID NO: 4447661 - DNA, 25 bp, Homo sapien
ttgaaggtagggatcttttcttaca

SEQ ID NO: 4447662 - DNA, 25 bp, Homo sapien
agggatcttttcttacaccttcttg

SEQ ID NO: 4447663 - DNA, 25 bp, Homo sapien
gatcttttcttacaccttcttgtag

SEQ ID NO: 4447664 - DNA, 25 bp, Homo sapien
ttcttacaccttcttgtagcttcag

SEQ ID NO: 4447665 - DNA, 25 bp, Homo sapien
aaaggcagtccgctattttctgtgc

SEQ ID NO: 4447666 - DNA, 25 bp, Homo sapien
tcagtgactccatagctgctgtcag

SEQ ID NO: 4447667 - DNA, 25 bp, Homo sapien
gacaaagtgggtgtgcaaaaaggca

SEQ ID NO: 4447668 - DNA, 25 bp, Homo sapien
caagagtgaatagtctgtcagccta

SEQ ID NO: 4447669 - DNA, 25 bp, Homo sapien
caggaaactccgtccaagggcacta

SEQ ID NO: 4447670 - DNA, 25 bp, Homo sapien
aaactccgtccaagggcactaattg

SEQ ID NO: 4447671 - DNA, 25 bp, Homo sapien
aagggcactaattgtgcatgtgttc

SEQ ID NO: 4447672 - DNA, 25 bp, Homo sapien
gcactaattgtgcatgtgttctttt

SEQ ID NO: 4447673 - DNA, 25 bp, Homo sapien
agcatcccgcccaacacattgccgt

SEQ ID NO: 4447674 - DNA, 25 bp, Homo sapien
ggagccgcctgctggagcatcccgc

SEQ ID NO: 4447675 - DNA, 25 bp, Homo sapien
cccgcccaacacattgccgtgtgaa

SEQ ID NO: 4447676 - DNA, 25 bp, Homo sapien
gctgctactgactccggatgactgg

SEQ ID NO: 4447677 - DNA, 25 bp, Homo sapien
tctctaaacctgctcatccaagagg

SEQ ID NO: 4447678 - DNA, 25 bp, Homo sapien
tctaaacctgctcatccaagaggca

SEQ ID NO: 4447679 - DNA, 25 bp, Homo sapien
taaacctgctcatccaagaggcagt

SEQ ID NO: 4447680 - DNA, 25 bp, Homo sapien
acctgctcatccaagaggcagttac

SEQ ID NO: 4447681 - DNA, 25 bp, Homo sapien
gaatttattactcttgacttgtgca

SEQ ID NO: 4447682 - DNA, 25 bp, Homo sapien
gcttggccaatgcaagtcttttcaa

SEQ ID NO: 4447683 - DNA, 25 bp, Homo sapien
gacttgtgcacaagtcatggccttt

SEQ ID NO: 4447684 - DNA, 25 bp, Homo sapien
cagtttgcaaacaccaagcatgagc

SEQ ID NO: 4447685 - DNA, 25 bp, Homo sapien
tgctgggggcattccctgaaacagg

SEQ ID NO: 4447686 - DNA, 25 bp, Homo sapien
gagctgatgagcttacaagtcgttt

SEQ ID NO: 4447687 - DNA, 25 bp, Homo sapien
caagtcgtttctataaggcagaagg

SEQ ID NO: 4447688 - DNA, 25 bp, Homo sapien
ttagagtccaagaaacatcccagaa

SEQ ID NO: 4447689 - DNA, 25 bp, Homo sapien
taggttactgctttcacgaaccgaa

SEQ ID NO: 4447690 - DNA, 25 bp, Homo sapien
gagctccaatttttaaacgcactgc

SEQ ID NO: 4447691 - DNA, 25 bp, Homo sapien
cagaagctgccctcgatgaatcgta

SEQ ID NO: 4447692 - DNA, 25 bp, Homo sapien
gaatttcagaatgtggcgagctcca

SEQ ID NO: 4447693 - DNA, 25 bp, Homo sapien
aggaggcgggcttaccggtcggctg

SEQ ID NO: 4447694 - DNA, 25 bp, Homo sapien
cggaggctttgaacccgaccctgca

SEQ ID NO: 4447695 - DNA, 25 bp, Homo sapien
caagggaaccgggagaacccagctg

SEQ ID NO: 4447696 - DNA, 25 bp, Homo sapien
aatcaggccaaaacgcgttccggag

SEQ ID NO: 4447697 - DNA, 25 bp, Homo sapien
ttgaaggcgaggacgacgatcacca

SEQ ID NO: 4447698 - DNA, 25 bp, Homo sapien
gcgggaggagatgctccagtagttg

SEQ ID NO: 4447699 - DNA, 25 bp, Homo sapien
gtagttgaaggcgaggacgacgatc

SEQ ID NO: 4447700 - DNA, 25 bp, Homo sapien
aggcgaggacgacgatcaccaccag

SEQ ID NO: 4447701 - DNA, 25 bp, Homo sapien
gtgcgcaccaccatacccgactaat

SEQ ID NO: 4447702 - DNA, 25 bp, Homo sapien
ggtgcgcaccaccatacccgactaa

SEQ ID NO: 4447703 - DNA, 25 bp, Homo sapien
agggctgggaccagatcttgggcag

SEQ ID NO: 4447704 - DNA, 25 bp, Homo sapien
tgggcaggaacacagacagagtccc

SEQ ID NO: 4447705 - DNA, 25 bp, Homo sapien
ctagggctgggaccagatcttgggc

SEQ ID NO: 4447706 - DNA, 25 bp, Homo sapien
gatcttgggcaggaacacagacaga

SEQ ID NO: 4447707 - DNA, 25 bp, Homo sapien
agttatctagtcaatttgggaggcc

SEQ ID NO: 4447708 - DNA, 25 bp, Homo sapien
cagtgaaccatactgccacacagta

SEQ ID NO: 4447709 - DNA, 25 bp, Homo sapien
tcaagctttgtatgggacaggcctc

SEQ ID NO: 4447710 - DNA, 25 bp, Homo sapien
gctataccaatgcacccatgaaaga

SEQ ID NO: 4447711 - DNA, 25 bp, Homo sapien
tatcatgtgggctgaacacggtggc

SEQ ID NO: 4447712 - DNA, 25 bp, Homo sapien
tctactgcttgaccttctgtgaagg

SEQ ID NO: 4447713 - DNA, 25 bp, Homo sapien
tatttcgctcttgacttcctgagga

SEQ ID NO: 4447714 - DNA, 25 bp, Homo sapien
tggccccaaatagctttaactcaga

SEQ ID NO: 4447715 - DNA, 25 bp, Homo sapien
aatcattctagcaggtgtgagatag

SEQ ID NO: 4447716 - DNA, 25 bp, Homo sapien
tttattaagggatatttgacaatta

SEQ ID NO: 4447717 - DNA, 25 bp, Homo sapien
tgatgatttgatatgcttatataca

SEQ ID NO: 4447718 - DNA, 25 bp, Homo sapien
aacttctgaggaaactacatactgt

SEQ ID NO: 4447719 - DNA, 25 bp, Homo sapien
aattgaaacaaaatctcagctggat

SEQ ID NO: 4447720 - DNA, 25 bp, Homo sapien
gaatacatagggctgctagaaagga

SEQ ID NO: 4447721 - DNA, 25 bp, Homo sapien
agagggtaatggcaagaaactaaat

SEQ ID NO: 4447722 - DNA, 25 bp, Homo sapien
gcatgtaaaagagagggtaatggca

SEQ ID NO: 4447723 - DNA, 25 bp, Homo sapien
agatgaccactcctggctaaatttt

SEQ ID NO: 4447724 - DNA, 25 bp, Homo sapien
ccagtctggtcttttagctcttttt

SEQ ID NO: 4447725 - DNA, 25 bp, Homo sapien
ggcacagatgaccactcctggctaa

SEQ ID NO: 4447726 - DNA, 25 bp, Homo sapien
cacagatgaccactcctggctaaat

SEQ ID NO: 4447727 - DNA, 25 bp, Homo sapien
tctacagacatgatgggcgaactta

SEQ ID NO: 4447728 - DNA, 25 bp, Homo sapien
aatgctatcattcggttctacagac

SEQ ID NO: 4447729 - DNA, 25 bp, Homo sapien
ttataaacaattcccagtagctgca

SEQ ID NO: 4447730 - DNA, 25 bp, Homo sapien
ggcattcaaggcacgtgtcaaaact

SEQ ID NO: 4447731 - DNA, 25 bp, Homo sapien
tataggcccggatacttgagaggct

SEQ ID NO: 4447732 - DNA, 25 bp, Homo sapien
tagaccatggtgatagttgctcaac

SEQ ID NO: 4447733 - DNA, 25 bp, Homo sapien
actgattgagccctaaaggttgagg

SEQ ID NO: 4447734 - DNA, 25 bp, Homo sapien
acggcactcctaccctaggtggcag

SEQ ID NO: 4447735 - DNA, 25 bp, Homo sapien
atgggtgcatcttatgtaactacag

SEQ ID NO: 4447736 - DNA, 25 bp, Homo sapien
agagaggtcccaggtaaccttcaca

SEQ ID NO: 4447737 - DNA, 25 bp, Homo sapien
gcccaagtctatcctcctatctcag

SEQ ID NO: 4447738 - DNA, 25 bp, Homo sapien
ggtatgtatcataatacccagttaa

SEQ ID NO: 4447739 - DNA, 25 bp, Homo sapien
cctttaaatgatgtatgtctgccat

SEQ ID NO: 4447740 - DNA, 25 bp, Homo sapien
tctgatacgatatgttgttctgtag

SEQ ID NO: 4447741 - DNA, 25 bp, Homo sapien
tgatgtatgtctgccatctgatacg

SEQ ID NO: 4447742 - DNA, 25 bp, Homo sapien
gtctgccatctgatacgatatgttg

SEQ ID NO: 4447743 - DNA, 25 bp, Homo sapien
tgtaatgcttcctattcagaagcta

SEQ ID NO: 4447744 - DNA, 25 bp, Homo sapien
taacacattcatggtcaataaaatt

SEQ ID NO: 4447745 - DNA, 25 bp, Homo sapien
ttttgtaacacattcatggtcaata

SEQ ID NO: 4447746 - DNA, 25 bp, Homo sapien
taatgcttcctattcagaagctatg

SEQ ID NO: 4447747 - DNA, 25 bp, Homo sapien
caaggtaagaaccaaaggaatcaag

SEQ ID NO: 4447748 - DNA, 25 bp, Homo sapien
tcctgacgaagctcagcaagttgct

SEQ ID NO: 4447749 - DNA, 25 bp, Homo sapien
acatatgttgcatgtaacatcttac

SEQ ID NO: 4447750 - DNA, 25 bp, Homo sapien
ataaacatatgttgcatgtaacatc

SEQ ID NO: 4447751 - DNA, 25 bp, Homo sapien
tagattcataaacatatgttgcatg

SEQ ID NO: 4447752 - DNA, 25 bp, Homo sapien
ttttagattcataaacatatgttgc

SEQ ID NO: 4447753 - DNA, 25 bp, Homo sapien
ctgtacatacgttaaatctttaatc

SEQ ID NO: 4447754 - DNA, 25 bp, Homo sapien
gactttctgctagccaagtagtcaa

SEQ ID NO: 4447755 - DNA, 25 bp, Homo sapien
gaagatagactggtgccatcaggag

SEQ ID NO: 4447756 - DNA, 25 bp, Homo sapien
ggatacacatacaccaatcatgcaa

SEQ ID NO: 4447757 - DNA, 25 bp, Homo sapien
cagataaagatggtgactttctgct

SEQ ID NO: 4447758 - DNA, 25 bp, Homo sapien
tcctctaaaaactggtctgctaact

SEQ ID NO: 4447759 - DNA, 25 bp, Homo sapien
cttcatctgctgtccacactgaaaa

SEQ ID NO: 4447760 - DNA, 25 bp, Homo sapien
tcatgctgtgctctcaattccttca

SEQ ID NO: 4447761 - DNA, 25 bp, Homo sapien
ctctaaaaactggtctgctaacttt

SEQ ID NO: 4447762 - DNA, 25 bp, Homo sapien
tccatcatttgattgaatcttttgg

SEQ ID NO: 4447763 - DNA, 25 bp, Homo sapien
ttgattgaatcttttgggtctcttg

SEQ ID NO: 4447764 - DNA, 25 bp, Homo sapien
atttgattgaatcttttgggtctct

SEQ ID NO: 4447765 - DNA, 25 bp, Homo sapien
ttatatccaattcctttccatcatt

SEQ ID NO: 4447766 - DNA, 25 bp, Homo sapien
tgcaacattctcagctacttttgga

SEQ ID NO: 4447767 - DNA, 25 bp, Homo sapien
tctgcaacattctcagctacttttg

SEQ ID NO: 4447768 - DNA, 25 bp, Homo sapien
caacattctcagctacttttggaat

SEQ ID NO: 4447769 - DNA, 25 bp, Homo sapien
atctgcaacattctcagctactttt

SEQ ID NO: 4447770 - DNA, 25 bp, Homo sapien
tgcatcaccacctcttttgatttgt

SEQ ID NO: 4447771 - DNA, 25 bp, Homo sapien
ctgcatcaccacctcttttgatttg

SEQ ID NO: 4447772 - DNA, 25 bp, Homo sapien
gcatcaccacctcttttgatttgtt

SEQ ID NO: 4447773 - DNA, 25 bp, Homo sapien
tgctaggtcattctcttctattcca

SEQ ID NO: 4447774 - DNA, 25 bp, Homo sapien
ggtcattctcttctattccaggcat

SEQ ID NO: 4447775 - DNA, 25 bp, Homo sapien
aagatcatcaacttttgctaggtca

SEQ ID NO: 4447776 - DNA, 25 bp, Homo sapien
taggtcattctcttctattccaggc

SEQ ID NO: 4447777 - DNA, 25 bp, Homo sapien
aaatgtattatcatcactttagtcg

SEQ ID NO: 4447778 - DNA, 25 bp, Homo sapien
gagaatggggtcacatgaaatgtat

SEQ ID NO: 4447779 - DNA, 25 bp, Homo sapien
cactttagtcgaattctctaacaat

SEQ ID NO: 4447780 - DNA, 25 bp, Homo sapien
tatcatcactttagtcgaattctct

SEQ ID NO: 4447781 - DNA, 25 bp, Homo sapien
catttatttgatctaaacattcagc

SEQ ID NO: 4447782 - DNA, 25 bp, Homo sapien
cagaagtaattactgagactgagaa

SEQ ID NO: 4447783 - DNA, 25 bp, Homo sapien
cagtcatgtacaactagctataatc

SEQ ID NO: 4447784 - DNA, 25 bp, Homo sapien
tcactatgaattggaaacccataag

SEQ ID NO: 4447785 - DNA, 25 bp, Homo sapien
ctaataggacaccacatatacacca

SEQ ID NO: 4447786 - DNA, 25 bp, Homo sapien
cattaagaattttggcatactctac

SEQ ID NO: 4447787 - DNA, 25 bp, Homo sapien
tgacattaagaattttggcatactc

SEQ ID NO: 4447788 - DNA, 25 bp, Homo sapien
gacaccacatatacaccagaactta

SEQ ID NO: 4447789 - DNA, 25 bp, Homo sapien
ccggcctcagaggtatatttaaaga

SEQ ID NO: 4447790 - DNA, 25 bp, Homo sapien
gtatggtcctagctatcttaaacaa

SEQ ID NO: 4447791 - DNA, 25 bp, Homo sapien
gtttcccattgctctaccataattt

SEQ ID NO: 4447792 - DNA, 25 bp, Homo sapien
tttctagtatggtcctagctatctt

SEQ ID NO: 4447793 - DNA, 25 bp, Homo sapien
gccaagatcacgctactatacttca

SEQ ID NO: 4447794 - DNA, 25 bp, Homo sapien
aagatcacgctactatacttcagcc

SEQ ID NO: 4447795 - DNA, 25 bp, Homo sapien
tcacgctactatacttcagcctgga

SEQ ID NO: 4447796 - DNA, 25 bp, Homo sapien
cacgctactatacttcagcctggac

SEQ ID NO: 4447797 - DNA, 25 bp, Homo sapien
tccaacacagttgcctttagccaca

SEQ ID NO: 4447798 - DNA, 25 bp, Homo sapien
gtttcaatctagagcagtactgtcc

SEQ ID NO: 4447799 - DNA, 25 bp, Homo sapien
tacataatgtaatcacctagtgacc

SEQ ID NO: 4447800 - DNA, 25 bp, Homo sapien
taaaggtttttctgccttagctaca

SEQ ID NO: 4447801 - DNA, 25 bp, Homo sapien
gaggccagggtatcgacagtgttca

SEQ ID NO: 4447802 - DNA, 25 bp, Homo sapien
gtaggtccagaactaccatccagga

SEQ ID NO: 4447803 - DNA, 25 bp, Homo sapien
agtttggcaccaaaacagagtctca

SEQ ID NO: 4447804 - DNA, 25 bp, Homo sapien
cccttctagcatagtgtaggtccag

SEQ ID NO: 4447805 - DNA, 25 bp, Homo sapien
gcatgtaccactgtggcaccaccat

SEQ ID NO: 4447806 - DNA, 25 bp, Homo sapien
gtaccactgtggcaccaccattaga

SEQ ID NO: 4447807 - DNA, 25 bp, Homo sapien
cactgtggcaccaccattagaactg

SEQ ID NO: 4447808 - DNA, 25 bp, Homo sapien
taccactgtggcaccaccattagaa

SEQ ID NO: 4447809 - DNA, 25 bp, Homo sapien
tggtctatagtgtagatgaagtctg

SEQ ID NO: 4447810 - DNA, 25 bp, Homo sapien
taatctcttcatcgacccactagtg

SEQ ID NO: 4447811 - DNA, 25 bp, Homo sapien
gacccactagtgactcaggagcata

SEQ ID NO: 4447812 - DNA, 25 bp, Homo sapien
ttggtggtctaacatatggcctcta

SEQ ID NO: 4447813 - DNA, 25 bp, Homo sapien
gatacgacataccacattaattgag

SEQ ID NO: 4447814 - DNA, 25 bp, Homo sapien
tgagtcatgtatactgaagcatcct

SEQ ID NO: 4447815 - DNA, 25 bp, Homo sapien
ttaactggtgttggtatcaggctat

SEQ ID NO: 4447816 - DNA, 25 bp, Homo sapien
ggataaaacccacttgttcaatgat

SEQ ID NO: 4447817 - DNA, 25 bp, Homo sapien
ccagtactaggttaaatagcagtgc

SEQ ID NO: 4447818 - DNA, 25 bp, Homo sapien
ggttaaatagcagtgcttaaagtgg

SEQ ID NO: 4447819 - DNA, 25 bp, Homo sapien
tgcttaaagtgggaatcctttcacc

SEQ ID NO: 4447820 - DNA, 25 bp, Homo sapien
aatagcagtgcttaaagtgggaatc

SEQ ID NO: 4447821 - DNA, 25 bp, Homo sapien
gatgtatgaactgtttctaggttct

SEQ ID NO: 4447822 - DNA, 25 bp, Homo sapien
tcaggtcttagatttgagtcgtaaa

SEQ ID NO: 4447823 - DNA, 25 bp, Homo sapien
gacagggagctagtttcgatcttct

SEQ ID NO: 4447824 - DNA, 25 bp, Homo sapien
tgtgtatggatattcagcttcccca

SEQ ID NO: 4447825 - DNA, 25 bp, Homo sapien
gtgtgtggttgctgtctcattttat

SEQ ID NO: 4447826 - DNA, 25 bp, Homo sapien
gagtagacattatgtgattaatatt

SEQ ID NO: 4447827 - DNA, 25 bp, Homo sapien
ttgtgtgtggttgctgtctcatttt

SEQ ID NO: 4447828 - DNA, 25 bp, Homo sapien
tgagagtagacattatgtgattaat

SEQ ID NO: 4447829 - DNA, 25 bp, Homo sapien
tgctgctgcatggctgctgctgcat

SEQ ID NO: 4447830 - DNA, 25 bp, Homo sapien
tgctgcatggctgctgctgcatggc

SEQ ID NO: 4447831 - DNA, 25 bp, Homo sapien
gctgctgcatggctgctgctgcatg

SEQ ID NO: 4447832 - DNA, 25 bp, Homo sapien
tgcatggctgctgctgcatggctgc

SEQ ID NO: 4447833 - DNA, 25 bp, Homo sapien
cttcaatttcaccaactgtctcagg

SEQ ID NO: 4447834 - DNA, 25 bp, Homo sapien
caatttcaccaactgtctcagggac

SEQ ID NO: 4447835 - DNA, 25 bp, Homo sapien
atttcaccaactgtctcagggacat

SEQ ID NO: 4447836 - DNA, 25 bp, Homo sapien
tcaatttcaccaactgtctcaggga

SEQ ID NO: 4447837 - DNA, 25 bp, Homo sapien
tgctgtggagcttgccactggtgga

SEQ ID NO: 4447838 - DNA, 25 bp, Homo sapien
ccactgatgacaaacttgtgattct

SEQ ID NO: 4447839 - DNA, 25 bp, Homo sapien
gtggagcttgccactggtggaatca

SEQ ID NO: 4447840 - DNA, 25 bp, Homo sapien
ttccactgatgacaaacttgtgatt

SEQ ID NO: 4447841 - DNA, 25 bp, Homo sapien
tcctctaagtgtgccccagccatat

SEQ ID NO: 4447842 - DNA, 25 bp, Homo sapien
gaggttgctttcgtacttctcatgg

SEQ ID NO: 4447843 - DNA, 25 bp, Homo sapien
gatgatcttggtcagagaatgctaa

SEQ ID NO: 4447844 - DNA, 25 bp, Homo sapien
caatgctgatgattgtgaggttgct

SEQ ID NO: 4447845 - DNA, 25 bp, Homo sapien
gagtgtcaccgttaaagtcacaggg

SEQ ID NO: 4447846 - DNA, 25 bp, Homo sapien
gatatggcatgaaaactgtggtgga

SEQ ID NO: 4447847 - DNA, 25 bp, Homo sapien
tagtccggagggctgttattccttg

SEQ ID NO: 4447848 - DNA, 25 bp, Homo sapien
tctcactagggctggtagtccggag

SEQ ID NO: 4447849 - DNA, 25 bp, Homo sapien
tctaatattaagtctcgaggtcgag

SEQ ID NO: 4447850 - DNA, 25 bp, Homo sapien
gaggtcgagtagcatcagtcgtcca

SEQ ID NO: 4447851 - DNA, 25 bp, Homo sapien
ggagggtataacgtctatgtctaga

SEQ ID NO: 4447852 - DNA, 25 bp, Homo sapien
tctttcatggatcgctactttggtg

SEQ ID NO: 4447853 - DNA, 25 bp, Homo sapien
tggcttatcgagtttctcccgagag

SEQ ID NO: 4447854 - DNA, 25 bp, Homo sapien
gcttatcgagtttctcccgagagat

SEQ ID NO: 4447855 - DNA, 25 bp, Homo sapien
tctggcttatcgagtttctcccgag

SEQ ID NO: 4447856 - DNA, 25 bp, Homo sapien
ttatcgagtttctcccgagagatcc

SEQ ID NO: 4447857 - DNA, 25 bp, Homo sapien
acagggtcgcgttctgttgaccaag

SEQ ID NO: 4447858 - DNA, 25 bp, Homo sapien
catcactgtaattacttctctttaa

SEQ ID NO: 4447859 - DNA, 25 bp, Homo sapien
tacgggtagcatgattatagtgaac

SEQ ID NO: 4447860 - DNA, 25 bp, Homo sapien
tgcccagaatggagtacgggtagca

SEQ ID NO: 4447861 - DNA, 25 bp, Homo sapien
tgctaaatgaatgccctcaacgtat

SEQ ID NO: 4447862 - DNA, 25 bp, Homo sapien
gccctcaacgtatcagcccagattt

SEQ ID NO: 4447863 - DNA, 25 bp, Homo sapien
gccccgccggaactgcatcttttaa

SEQ ID NO: 4447864 - DNA, 25 bp, Homo sapien
gcccagatttctatatctggcaaaa

SEQ ID NO: 4447865 - DNA, 25 bp, Homo sapien
gaaataacagaggtcatggagcacc

SEQ ID NO: 4447866 - DNA, 25 bp, Homo sapien
caaggccatagtttaagagtaggga

SEQ ID NO: 4447867 - DNA, 25 bp, Homo sapien
tcagatgagttgctacaaggccata

SEQ ID NO: 4447868 - DNA, 25 bp, Homo sapien
gagtagggaccacgctcttagagtt

SEQ ID NO: 4447869 - DNA, 25 bp, Homo sapien
gaaactgaaataggaggcttcctta

SEQ ID NO: 4447870 - DNA, 25 bp, Homo sapien
gttgagaaactgaaataggaggctt

SEQ ID NO: 4447871 - DNA, 25 bp, Homo sapien
ttggaagatgggagattgcttgatg

SEQ ID NO: 4447872 - DNA, 25 bp, Homo sapien
actgaaataggaggcttccttaaag

SEQ ID NO: 4447873 - DNA, 25 bp, Homo sapien
tcatctcccttaagcaggtctcttc

SEQ ID NO: 4447874 - DNA, 25 bp, Homo sapien
catcatctcccttaagcaggtctct

SEQ ID NO: 4447875 - DNA, 25 bp, Homo sapien
catctcccttaagcaggtctcttca

SEQ ID NO: 4447876 - DNA, 25 bp, Homo sapien
ttccatcatctcccttaagcaggtc

SEQ ID NO: 4447877 - DNA, 25 bp, Homo sapien
tttccattgtggtttatgtgtgaat

SEQ ID NO: 4447878 - DNA, 25 bp, Homo sapien
cggggtttccattgtggtttatgtg

SEQ ID NO: 4447879 - DNA, 25 bp, Homo sapien
gggtttccattgtggtttatgtgtg

SEQ ID NO: 4447880 - DNA, 25 bp, Homo sapien
ggtttccattgtggtttatgtgtga

SEQ ID NO: 4447881 - DNA, 25 bp, Homo sapien
gaaatcactgactctgtccttggta

SEQ ID NO: 4447882 - DNA, 25 bp, Homo sapien
aatcactgactctgtccttggtagc

SEQ ID NO: 4447883 - DNA, 25 bp, Homo sapien
ggaaatcactgactctgtccttggt

SEQ ID NO: 4447884 - DNA, 25 bp, Homo sapien
atcactgactctgtccttggtagcc

SEQ ID NO: 4447885 - DNA, 25 bp, Homo sapien
cagttgctgccatagacagaagcca

SEQ ID NO: 4447886 - DNA, 25 bp, Homo sapien
taaggaagctgatctaagggacact

SEQ ID NO: 4447887 - DNA, 25 bp, Homo sapien
tcagaattgaaggtaagaagatgcc

SEQ ID NO: 4447888 - DNA, 25 bp, Homo sapien
gacttgatcttactcctggtgactg

SEQ ID NO: 4447889 - DNA, 25 bp, Homo sapien
tgctcttactgtacacctcttcttg

SEQ ID NO: 4447890 - DNA, 25 bp, Homo sapien
ttgttgagatgtaagttttcaggcc

SEQ ID NO: 4447891 - DNA, 25 bp, Homo sapien
tttggtcaagatacacagatatgct

SEQ ID NO: 4447892 - DNA, 25 bp, Homo sapien
gatgtaagttttcaggccaatcccc

SEQ ID NO: 4447893 - DNA, 25 bp, Homo sapien
caggggtttaccacaacacccatgt

SEQ ID NO: 4447894 - DNA, 25 bp, Homo sapien
acaggggtttaccacaacacccatg

SEQ ID NO: 4447895 - DNA, 25 bp, Homo sapien
cctcattgtaagccagctcagcctg

SEQ ID NO: 4447896 - DNA, 25 bp, Homo sapien
tgctgcggatcaacaggggattcat

SEQ ID NO: 4447897 - DNA, 25 bp, Homo sapien
tagagccatgctgcggatcaacagg

SEQ ID NO: 4447898 - DNA, 25 bp, Homo sapien
tttagagccatgctgcggatcaaca

SEQ ID NO: 4447899 - DNA, 25 bp, Homo sapien
ggtttcatggttatagcatggaggc

SEQ ID NO: 4447900 - DNA, 25 bp, Homo sapien
tttcatggttatagcatggaggcca

SEQ ID NO: 4447901 - DNA, 25 bp, Homo sapien
gtgggtttcatggttatagcatgga

SEQ ID NO: 4447902 - DNA, 25 bp, Homo sapien
tcatggttatagcatggaggccagg

SEQ ID NO: 4447903 - DNA, 25 bp, Homo sapien
aaatttaggttacactgccactaat

SEQ ID NO: 4447904 - DNA, 25 bp, Homo sapien
aatttaggttacactgccactaata

SEQ ID NO: 4447905 - DNA, 25 bp, Homo sapien
aggatgagattatagaaaaagtaca

SEQ ID NO: 4447906 - DNA, 25 bp, Homo sapien
taggtaaaagtcagtctctagtttc

SEQ ID NO: 4447907 - DNA, 25 bp, Homo sapien
tataaccttatataactcctagcac

SEQ ID NO: 4447908 - DNA, 25 bp, Homo sapien
aactcctagcacatatgaatctctt

SEQ ID NO: 4447909 - DNA, 25 bp, Homo sapien
taggtgccctatcctgccactatca

SEQ ID NO: 4447910 - DNA, 25 bp, Homo sapien
ttatccaatgagatgaaaaagccct

SEQ ID NO: 4447911 - DNA, 25 bp, Homo sapien
gttaaatggcaacactcagctcacg

SEQ ID NO: 4447912 - DNA, 25 bp, Homo sapien
taaagagttattaccctagtcacag

SEQ ID NO: 4447913 - DNA, 25 bp, Homo sapien
gagaagagcccctattgattgagca

SEQ ID NO: 4447914 - DNA, 25 bp, Homo sapien
ggaatctctaatcctagggacctca

SEQ ID NO: 4447915 - DNA, 25 bp, Homo sapien
taggtgaagccagaatcttatcctg

SEQ ID NO: 4447916 - DNA, 25 bp, Homo sapien
gaaactactcctactactagagagc

SEQ ID NO: 4447917 - DNA, 25 bp, Homo sapien
gccgagcctgttagtgcaatggcga

SEQ ID NO: 4447918 - DNA, 25 bp, Homo sapien
ttgctgttgtagccgagcctgttag

SEQ ID NO: 4447919 - DNA, 25 bp, Homo sapien
tgtagccgagcctgttagtgcaatg

SEQ ID NO: 4447920 - DNA, 25 bp, Homo sapien
tgttgtagccgagcctgttagtgca

SEQ ID NO: 4447921 - DNA, 25 bp, Homo sapien
cagtggcacgaattcggctcattgc

SEQ ID NO: 4447922 - DNA, 25 bp, Homo sapien
agtggcacgaattcggctcattgca

SEQ ID NO: 4447923 - DNA, 25 bp, Homo sapien
taggtatgataatcccaaatctgtc

SEQ ID NO: 4447924 - DNA, 25 bp, Homo sapien
gcctaccccatattcttaacaaatg

SEQ ID NO: 4447925 - DNA, 25 bp, Homo sapien
gctaatcaattatcaatgaactctt

SEQ ID NO: 4447926 - DNA, 25 bp, Homo sapien
gcctgaaattatatccatttcacac

SEQ ID NO: 4447927 - DNA, 25 bp, Homo sapien
gagtccctttggagtacatggattt

SEQ ID NO: 4447928 - DNA, 25 bp, Homo sapien
caccggcctcagccaagagtattaa

SEQ ID NO: 4447929 - DNA, 25 bp, Homo sapien
aaagtattttgatgagagccttgga

SEQ ID NO: 4447930 - DNA, 25 bp, Homo sapien
gagagtccctttggagtacatggat

SEQ ID NO: 4447931 - DNA, 25 bp, Homo sapien
tatagatgatatttagtcctttaaa

SEQ ID NO: 4447932 - DNA, 25 bp, Homo sapien
tctatatagatgatatttagtcctt

SEQ ID NO: 4447933 - DNA, 25 bp, Homo sapien
aattataaaagtatccaatattagt

SEQ ID NO: 4447934 - DNA, 25 bp, Homo sapien
aaattataaaagtatccaatattag

SEQ ID NO: 4447935 - DNA, 25 bp, Homo sapien
aatgttgctttccatagtctgcagg

SEQ ID NO: 4447936 - DNA, 25 bp, Homo sapien
ttaaaggacatcattgaaatgttgc

SEQ ID NO: 4447937 - DNA, 25 bp, Homo sapien
aaatgttgctttccatagtctgcag

SEQ ID NO: 4447938 - DNA, 25 bp, Homo sapien
ggacatcattgaaatgttgctttcc

SEQ ID NO: 4447939 - DNA, 25 bp, Homo sapien
ttaggttttctgaagcattccttta

SEQ ID NO: 4447940 - DNA, 25 bp, Homo sapien
ggttttctgaagcattcctttagga

SEQ ID NO: 4447941 - DNA, 25 bp, Homo sapien
aggttttctgaagcattcctttagg

SEQ ID NO: 4447942 - DNA, 25 bp, Homo sapien
gttttctgaagcattcctttaggac

SEQ ID NO: 4447943 - DNA, 25 bp, Homo sapien
aatactgtacagtgtttggcttcca

SEQ ID NO: 4447944 - DNA, 25 bp, Homo sapien
tctggctatagttaaacagtactgg

SEQ ID NO: 4447945 - DNA, 25 bp, Homo sapien
tgtggaaataagtcggctcaataaa

SEQ ID NO: 4447946 - DNA, 25 bp, Homo sapien
gggaggtgactttctacacaatact

SEQ ID NO: 4447947 - DNA, 25 bp, Homo sapien
gcttgacgggttcttaactaacata

SEQ ID NO: 4447948 - DNA, 25 bp, Homo sapien
tagctagcttacacattccactgaa

SEQ ID NO: 4447949 - DNA, 25 bp, Homo sapien
tgtgcaattaacagtagcccttctg

SEQ ID NO: 4447950 - DNA, 25 bp, Homo sapien
tgcacctcagcaagtgaacaacctg

SEQ ID NO: 4447951 - DNA, 25 bp, Homo sapien
gatggtcccgactgcgcaatgtgtg

SEQ ID NO: 4447952 - DNA, 25 bp, Homo sapien
cacaaggccttagtactgggtcgat

SEQ ID NO: 4447953 - DNA, 25 bp, Homo sapien
ttacgccggaagaaactctctagtc

SEQ ID NO: 4447954 - DNA, 25 bp, Homo sapien
aacctatcaggatgagcaagggcct

SEQ ID NO: 4447955 - DNA, 25 bp, Homo sapien
aggagatcccggcagacggccctgg

SEQ ID NO: 4447956 - DNA, 25 bp, Homo sapien
caaggcgccagagccgctggaggac

SEQ ID NO: 4447957 - DNA, 25 bp, Homo sapien
gccagagccgctggaggaccaggtt

SEQ ID NO: 4447958 - DNA, 25 bp, Homo sapien
gatcccggcagacggccctggaaga

SEQ ID NO: 4447959 - DNA, 25 bp, Homo sapien
ctccgcacagtggacgtacgaggcg

SEQ ID NO: 4447960 - DNA, 25 bp, Homo sapien
taaccccagaaatcacaacgcaggc

SEQ ID NO: 4447961 - DNA, 25 bp, Homo sapien
tacgaggcgccaaagagtgcatgcc

SEQ ID NO: 4447962 - DNA, 25 bp, Homo sapien
gcaggccgcaacctaagaggtgaag

SEQ ID NO: 4447963 - DNA, 25 bp, Homo sapien
ggatatcacaaaatacatagtccct

SEQ ID NO: 4447964 - DNA, 25 bp, Homo sapien
tagtccctagtacagtcaactggcc

SEQ ID NO: 4447965 - DNA, 25 bp, Homo sapien
ttccttactgtcaggatcccaaagg

SEQ ID NO: 4447966 - DNA, 25 bp, Homo sapien
tcatctttccgagacaatgctccta

SEQ ID NO: 4447967 - DNA, 25 bp, Homo sapien
gcctcaaacctgtgtaaaccctgtg

SEQ ID NO: 4447968 - DNA, 25 bp, Homo sapien
tagtaacctggcacacgagttaact

SEQ ID NO: 4447969 - DNA, 25 bp, Homo sapien
tcttgaaggtagatgctggatccat

SEQ ID NO: 4447970 - DNA, 25 bp, Homo sapien
gaaggagaccgtatcactgaaacat

SEQ ID NO: 4447971 - DNA, 25 bp, Homo sapien
caagaccagcctggacaacatggtg

SEQ ID NO: 4447972 - DNA, 25 bp, Homo sapien
gccaaggagggtagatcgcctgagc

SEQ ID NO: 4447973 - DNA, 25 bp, Homo sapien
caaggagggtagatcgcctgagctc

SEQ ID NO: 4447974 - DNA, 25 bp, Homo sapien
aggagttcaagaccagcctggacaa

SEQ ID NO: 4447975 - DNA, 25 bp, Homo sapien
ctggaacctaacctattatacaaat

SEQ ID NO: 4447976 - DNA, 25 bp, Homo sapien
atatgaaaaactacagccgggcggg

SEQ ID NO: 4447977 - DNA, 25 bp, Homo sapien
tggaacctaacctattatacaaata

SEQ ID NO: 4447978 - DNA, 25 bp, Homo sapien
tttgtttgattgtttgagatagagc

SEQ ID NO: 4447979 - DNA, 25 bp, Homo sapien
atagagccttgctctgtcacccagg

SEQ ID NO: 4447980 - DNA, 25 bp, Homo sapien
cagcaatttcccatttttctctaag

SEQ ID NO: 4447981 - DNA, 25 bp, Homo sapien
tgtttgattgtttgagatagagcct

SEQ ID NO: 4447982 - DNA, 25 bp, Homo sapien
ggctatcatcaacctctgaatattt

SEQ ID NO: 4447983 - DNA, 25 bp, Homo sapien
cctctttgctctggcagtgcgttgt

SEQ ID NO: 4447984 - DNA, 25 bp, Homo sapien
acaagccggtttcattcttcgatgg

SEQ ID NO: 4447985 - DNA, 25 bp, Homo sapien
gagaagctttccgtgttctcagcct

SEQ ID NO: 4447986 - DNA, 25 bp, Homo sapien
gaggctgatgacaacccattaggaa

SEQ ID NO: 4447987 - DNA, 25 bp, Homo sapien
tacaaaaaagtaacatgagaaagca

SEQ ID NO: 4447988 - DNA, 25 bp, Homo sapien
cactttatgacaactaaagctgctc

SEQ ID NO: 4447989 - DNA, 25 bp, Homo sapien
agcaaaagatgaggacgcactttat

SEQ ID NO: 4447990 - DNA, 25 bp, Homo sapien
ctgggcgatataaatgagacctcat

SEQ ID NO: 4447991 - DNA, 25 bp, Homo sapien
cctgggcgatataaatgagacctca

SEQ ID NO: 4447992 - DNA, 25 bp, Homo sapien
gagattaagctactaaagaaggaca

SEQ ID NO: 4447993 - DNA, 25 bp, Homo sapien
tcagctgctagtgccaaaacggttg

SEQ ID NO: 4447994 - DNA, 25 bp, Homo sapien
ggactgctgttccagttgacatgag

SEQ ID NO: 4447995 - DNA, 25 bp, Homo sapien
catgagccaaaatttgctgaccaac

SEQ ID NO: 4447996 - DNA, 25 bp, Homo sapien
gggacaaatccagaatacatagtaa

SEQ ID NO: 4447997 - DNA, 25 bp, Homo sapien
ctttaaactcaaacatattaataat

SEQ ID NO: 4447998 - DNA, 25 bp, Homo sapien
agagaaacaaaagatgggacaaatc

SEQ ID NO: 4447999 - DNA, 25 bp, Homo sapien
agactttaaactcaaacatattaat

SEQ ID NO: 4448000 - DNA, 25 bp, Homo sapien
taaagttgaggcaatggttgcacaa

SEQ ID NO: 4448001 - DNA, 25 bp, Homo sapien
ttagtgactgcttagggctagagag

SEQ ID NO: 4448002 - DNA, 25 bp, Homo sapien
ggaagcagattagtgactgcttagg

SEQ ID NO: 4448003 - DNA, 25 bp, Homo sapien
gccagacataatagactatggtttc

SEQ ID NO: 4448004 - DNA, 25 bp, Homo sapien
tatatcacgttcaattctactccgt

SEQ ID NO: 4448005 - DNA, 25 bp, Homo sapien
tacttgacttttccgtcttactcga

SEQ ID NO: 4448006 - DNA, 25 bp, Homo sapien
tactcgagatatctgtttgttaggt

SEQ ID NO: 4448007 - DNA, 25 bp, Homo sapien
tgctcttggtgttgacgtgatcaaa

SEQ ID NO: 4448008 - DNA, 25 bp, Homo sapien
tatggacactgagacgccatctcag

SEQ ID NO: 4448009 - DNA, 25 bp, Homo sapien
gaggcaacataactctactgaagca

SEQ ID NO: 4448010 - DNA, 25 bp, Homo sapien
tgacagcgaaatgaatagaggcaac

SEQ ID NO: 4448011 - DNA, 25 bp, Homo sapien
tctcagagtggctagggaaaataat

SEQ ID NO: 4448012 - DNA, 25 bp, Homo sapien
atggtccccaacaaagtagtccttg

SEQ ID NO: 4448013 - DNA, 25 bp, Homo sapien
atatggtccccaacaaagtagtcct

SEQ ID NO: 4448014 - DNA, 25 bp, Homo sapien
caggtgaaaatatggtccccaacaa

SEQ ID NO: 4448015 - DNA, 25 bp, Homo sapien
agacaggtgaaaatatggtccccaa

SEQ ID NO: 4448016 - DNA, 25 bp, Homo sapien
tatttagactgatcattcctgcagg

SEQ ID NO: 4448017 - DNA, 25 bp, Homo sapien
agtttctgcatcctagtcatgtgtg

SEQ ID NO: 4448018 - DNA, 25 bp, Homo sapien
tcccctaatcatgagaaccttttaa

SEQ ID NO: 4448019 - DNA, 25 bp, Homo sapien
acaggctagagtaacatttgtgagc

SEQ ID NO: 4448020 - DNA, 25 bp, Homo sapien
gagtaagctgctccattagttgatg

SEQ ID NO: 4448021 - DNA, 25 bp, Homo sapien
gctgctccattagttgatgtagtag

SEQ ID NO: 4448022 - DNA, 25 bp, Homo sapien
taagctgctccattagttgatgtag

SEQ ID NO: 4448023 - DNA, 25 bp, Homo sapien
gatttgagtaagctgctccattagt

SEQ ID NO: 4448024 - DNA, 25 bp, Homo sapien
tctaaaccattgtttagtgatggtc

SEQ ID NO: 4448025 - DNA, 25 bp, Homo sapien
cttctaaaccattgtttagtgatgg

SEQ ID NO: 4448026 - DNA, 25 bp, Homo sapien
aaccattgtttagtgatggtctcac

SEQ ID NO: 4448027 - DNA, 25 bp, Homo sapien
taaaccattgtttagtgatggtctc

SEQ ID NO: 4448028 - DNA, 25 bp, Homo sapien
aaaatagctgggagtggtgtcacat

SEQ ID NO: 4448029 - DNA, 25 bp, Homo sapien
catagctcacggcagtctggaattc

SEQ ID NO: 4448030 - DNA, 25 bp, Homo sapien
agactccaccccagacagggtctgg

SEQ ID NO: 4448031 - DNA, 25 bp, Homo sapien
agtgagactccaccccagacagggt

SEQ ID NO: 4448032 - DNA, 25 bp, Homo sapien
cagagtaactgcaatgtgacacacc

SEQ ID NO: 4448033 - DNA, 25 bp, Homo sapien
tgtccaaagtaacacagctgctagc

SEQ ID NO: 4448034 - DNA, 25 bp, Homo sapien
catgatcatcccaatcagagtaact

SEQ ID NO: 4448035 - DNA, 25 bp, Homo sapien
ctcctttagcctgcaaaaccttgta

SEQ ID NO: 4448036 - DNA, 25 bp, Homo sapien
cagtcttcttcataggtggcctccg

SEQ ID NO: 4448037 - DNA, 25 bp, Homo sapien
gatgaataaccactatctggagtta

SEQ ID NO: 4448038 - DNA, 25 bp, Homo sapien
ttcataggtggcctccgcgtgggct

SEQ ID NO: 4448039 - DNA, 25 bp, Homo sapien
cctccgcgtgggctgatgaataacc

SEQ ID NO: 4448040 - DNA, 25 bp, Homo sapien
tcagtggcgggacatgtttgatgaa

SEQ ID NO: 4448041 - DNA, 25 bp, Homo sapien
cgggacatgtttgatgaaataatag

SEQ ID NO: 4448042 - DNA, 25 bp, Homo sapien
ctgtcagtggcgggacatgtttgat

SEQ ID NO: 4448043 - DNA, 25 bp, Homo sapien
gcgggacatgtttgatgaaataata

SEQ ID NO: 4448044 - DNA, 25 bp, Homo sapien
tcttgttttcaacggaagagcaggt

SEQ ID NO: 4448045 - DNA, 25 bp, Homo sapien
aaactagggagaattccggtgtgct

SEQ ID NO: 4448046 - DNA, 25 bp, Homo sapien
tcaacggaagagcaggtttcctatt

SEQ ID NO: 4448047 - DNA, 25 bp, Homo sapien
cggaagagcaggtttcctatttagt

SEQ ID NO: 4448048 - DNA, 25 bp, Homo sapien
aaaggactggaaaagtaagtgctgc

SEQ ID NO: 4448049 - DNA, 25 bp, Homo sapien
aaaaggactggaaaagtaagtgctg

SEQ ID NO: 4448050 - DNA, 25 bp, Homo sapien
ctatcaggccaaaaatcatcaaaaa

SEQ ID NO: 4448051 - DNA, 25 bp, Homo sapien
tcaggccaaaaatcatcaaaaaaat

SEQ ID NO: 4448052 - DNA, 25 bp, Homo sapien
caggccaaaaatcatcaaaaaaatt

SEQ ID NO: 4448053 - DNA, 25 bp, Homo sapien
tatcaggccaaaaatcatcaaaaaa

SEQ ID NO: 4448054 - DNA, 25 bp, Homo sapien
ttgccagtagatggagacaacacca

SEQ ID NO: 4448055 - DNA, 25 bp, Homo sapien
tttgccagtagatggagacaacacc

SEQ ID NO: 4448056 - DNA, 25 bp, Homo sapien
ggtttctccaatatctcttagatca

SEQ ID NO: 4448057 - DNA, 25 bp, Homo sapien
atgtggtttctccaatatctcttag

SEQ ID NO: 4448058 - DNA, 25 bp, Homo sapien
gacctagagtcttgaattggtggat

SEQ ID NO: 4448059 - DNA, 25 bp, Homo sapien
ggagtgagatgacctagagtcttga

SEQ ID NO: 4448060 - DNA, 25 bp, Homo sapien
tagaagtcatcttcgggatggaaga

SEQ ID NO: 4448061 - DNA, 25 bp, Homo sapien
tcctgcttgtggatagaagtcatct

SEQ ID NO: 4448062 - DNA, 25 bp, Homo sapien
gcgggtaagctttgctaaccgtggc

SEQ ID NO: 4448063 - DNA, 25 bp, Homo sapien
actgcacctggttctacttctcttg

SEQ ID NO: 4448064 - DNA, 25 bp, Homo sapien
cctaagctgtaagattcccaagaaa

SEQ ID NO: 4448065 - DNA, 25 bp, Homo sapien
ttacaagtagctccctacagggatc

SEQ ID NO: 4448066 - DNA, 25 bp, Homo sapien
tgttccctacaagctaaaatattag

SEQ ID NO: 4448067 - DNA, 25 bp, Homo sapien
ctatgcaactatgaccctgaaatgg

SEQ ID NO: 4448068 - DNA, 25 bp, Homo sapien
gaaatggttgtctgatttctcagcc

SEQ ID NO: 4448069 - DNA, 25 bp, Homo sapien
tatcctctatactatgcaactatga

SEQ ID NO: 4448070 - DNA, 25 bp, Homo sapien
aacccactacactactactacttga

SEQ ID NO: 4448071 - DNA, 25 bp, Homo sapien
ggttttgacatgtcagcaaggcaag

SEQ ID NO: 4448072 - DNA, 25 bp, Homo sapien
gatatgaataatacttgatggtcta

SEQ ID NO: 4448073 - DNA, 25 bp, Homo sapien
tactgaaaggctattaatagttaac

SEQ ID NO: 4448074 - DNA, 25 bp, Homo sapien
cacgacacaattccactgcacaaga

SEQ ID NO: 4448075 - DNA, 25 bp, Homo sapien
gaagcactacgtactgtctggtaag

SEQ ID NO: 4448076 - DNA, 25 bp, Homo sapien
gatattcaacctgcagtaaactaag

SEQ ID NO: 4448077 - DNA, 25 bp, Homo sapien
gatgagacataaggccagcagcgtc

SEQ ID NO: 4448078 - DNA, 25 bp, Homo sapien
tccctgaaaaatggtcttaatctca

SEQ ID NO: 4448079 - DNA, 25 bp, Homo sapien
tgagacattcgttccaggaattccc

SEQ ID NO: 4448080 - DNA, 25 bp, Homo sapien
cctgaaaaatggtcttaatctcaca

SEQ ID NO: 4448081 - DNA, 25 bp, Homo sapien
ctcatacatctgagacattcgttcc

SEQ ID NO: 4448082 - DNA, 25 bp, Homo sapien
gggtctagtatgttcagtaacttgt

SEQ ID NO: 4448083 - DNA, 25 bp, Homo sapien
ggtctagtatgttcagtaacttgtc

SEQ ID NO: 4448084 - DNA, 25 bp, Homo sapien
cagcatctggttgtcagcgaggtcc

SEQ ID NO: 4448085 - DNA, 25 bp, Homo sapien
gatggttgactgaggaacaaggagg

SEQ ID NO: 4448086 - DNA, 25 bp, Homo sapien
tggctctaaccagtggaccacacag

SEQ ID NO: 4448087 - DNA, 25 bp, Homo sapien
acagtaagtcagtggttagccccgc

SEQ ID NO: 4448088 - DNA, 25 bp, Homo sapien
aacacaatgttcacggaaaagccgg

SEQ ID NO: 4448089 - DNA, 25 bp, Homo sapien
aaacacaatgttcacggaaaagccg

SEQ ID NO: 4448090 - DNA, 25 bp, Homo sapien
acacaatgttcacggaaaagccggt

SEQ ID NO: 4448091 - DNA, 25 bp, Homo sapien
caattagtacaatgctaggtaggca

SEQ ID NO: 4448092 - DNA, 25 bp, Homo sapien
gacaactcaatagtgcaagagacag

SEQ ID NO: 4448093 - DNA, 25 bp, Homo sapien
cctattctggactggcttattgtga

SEQ ID NO: 4448094 - DNA, 25 bp, Homo sapien
tcccatcgagtaggatgataacttg

SEQ ID NO: 4448095 - DNA, 25 bp, Homo sapien
caggaatggaatcaattttaggagt

SEQ ID NO: 4448096 - DNA, 25 bp, Homo sapien
ccataaaccaactttctatagggat

SEQ ID NO: 4448097 - DNA, 25 bp, Homo sapien
aattttaggagttcattgtcatttt

SEQ ID NO: 4448098 - DNA, 25 bp, Homo sapien
agttctacaagcttctccaggaatg

SEQ ID NO: 4448099 - DNA, 25 bp, Homo sapien
tgatgtgtggtcgaacatcttcatt

SEQ ID NO: 4448100 - DNA, 25 bp, Homo sapien
tctgatgtgtggtcgaacatcttca

SEQ ID NO: 4448101 - DNA, 25 bp, Homo sapien
ctctgatgtgtggtcgaacatcttc

SEQ ID NO: 4448102 - DNA, 25 bp, Homo sapien
ctgatgtgtggtcgaacatcttcat

SEQ ID NO: 4448103 - DNA, 25 bp, Homo sapien
ccgaaaaggagattacacgccacta

SEQ ID NO: 4448104 - DNA, 25 bp, Homo sapien
agagcataacagaggtactaccagc

SEQ ID NO: 4448105 - DNA, 25 bp, Homo sapien
tgaagcgcctcaactaaaaggaatg

SEQ ID NO: 4448106 - DNA, 25 bp, Homo sapien
cagacaaagcaggaaaacggccatt

SEQ ID NO: 4448107 - DNA, 25 bp, Homo sapien
tgaaaattgacataactcatgcctt

SEQ ID NO: 4448108 - DNA, 25 bp, Homo sapien
aaaacaggcttgctctacatgctag

SEQ ID NO: 4448109 - DNA, 25 bp, Homo sapien
gaaaacactcaacctgatgaaaagt

SEQ ID NO: 4448110 - DNA, 25 bp, Homo sapien
tgcccagatgccctaaagataaata

SEQ ID NO: 4448111 - DNA, 25 bp, Homo sapien
tttgtcgtaggctttcaactcaggg

SEQ ID NO: 4448112 - DNA, 25 bp, Homo sapien
tcaatgaatgacaaccctaaggcct

SEQ ID NO: 4448113 - DNA, 25 bp, Homo sapien
tgcccacaggcacaagagtataggt

SEQ ID NO: 4448114 - DNA, 25 bp, Homo sapien
gaagaattctgtgctcgcaggaaag

SEQ ID NO: 4448115 - DNA, 25 bp, Homo sapien
ttgattcacgtggaaacaaggcaga

SEQ ID NO: 4448116 - DNA, 25 bp, Homo sapien
cattacttgttcacggctatactgc

SEQ ID NO: 4448117 - DNA, 25 bp, Homo sapien
gctctgtgaaatctggtcccagttt

SEQ ID NO: 4448118 - DNA, 25 bp, Homo sapien
taatggtctcattcagggacatgtc

SEQ ID NO: 4448119 - DNA, 25 bp, Homo sapien
gcctccagactgcagcgtcaaatct

SEQ ID NO: 4448120 - DNA, 25 bp, Homo sapien
cgcatccggtcagttcaaattaaaa

SEQ ID NO: 4448121 - DNA, 25 bp, Homo sapien
aagaagaagcaattcagcctccaga

SEQ ID NO: 4448122 - DNA, 25 bp, Homo sapien
agggtgggccgcatccggtcagttc

SEQ ID NO: 4448123 - DNA, 25 bp, Homo sapien
caagatgggctaaacttcgccgttg

SEQ ID NO: 4448124 - DNA, 25 bp, Homo sapien
aaagggcaagatgggctaaacttcg

SEQ ID NO: 4448125 - DNA, 25 bp, Homo sapien
tgggctaaacttcgccgttgggcca

SEQ ID NO: 4448126 - DNA, 25 bp, Homo sapien
ctaaacttcgccgttgggccactgg

SEQ ID NO: 4448127 - DNA, 25 bp, Homo sapien
tgctctcgttgaccggcgcggagca

SEQ ID NO: 4448128 - DNA, 25 bp, Homo sapien
ctcgagccgggtgtgagcgtgtgtg

SEQ ID NO: 4448129 - DNA, 25 bp, Homo sapien
actgggtttgctctcgttgaccggc

SEQ ID NO: 4448130 - DNA, 25 bp, Homo sapien
ttagcacggcggaggtgagtcactg

SEQ ID NO: 4448131 - DNA, 25 bp, Homo sapien
caggagtccgagtcccccgccgccg

SEQ ID NO: 4448132 - DNA, 25 bp, Homo sapien
gtcttccacggagaaagcgtcggcg

SEQ ID NO: 4448133 - DNA, 25 bp, Homo sapien
tcttccacggagaaagcgtcggcgt

SEQ ID NO: 4448134 - DNA, 25 bp, Homo sapien
gtgatcagaattatattcatcagag

SEQ ID NO: 4448135 - DNA, 25 bp, Homo sapien
caaaacttgttccaagtgatcagaa

SEQ ID NO: 4448136 - DNA, 25 bp, Homo sapien
tctttgtggtcccttacaacttgta

SEQ ID NO: 4448137 - DNA, 25 bp, Homo sapien
aaaaagagcaactggacaagataat

SEQ ID NO: 4448138 - DNA, 25 bp, Homo sapien
gaggagacaagactggtcactggtt

SEQ ID NO: 4448139 - DNA, 25 bp, Homo sapien
tctggctcagcgatatcaagacact

SEQ ID NO: 4448140 - DNA, 25 bp, Homo sapien
gctagtttataaaagtggcagggta

SEQ ID NO: 4448141 - DNA, 25 bp, Homo sapien
caggacagttatcaatctactttaa

SEQ ID NO: 4448142 - DNA, 25 bp, Homo sapien
tactacaatggatcagcactcagct

SEQ ID NO: 4448143 - DNA, 25 bp, Homo sapien
agatcttggcaagggtagacttccc

SEQ ID NO: 4448144 - DNA, 25 bp, Homo sapien
cagaactgtgcaacgagatcttggc

SEQ ID NO: 4448145 - DNA, 25 bp, Homo sapien
ccatctcagaactatgctgggtgcc

SEQ ID NO: 4448146 - DNA, 25 bp, Homo sapien
tctggatggatttcaagtcaattag

SEQ ID NO: 4448147 - DNA, 25 bp, Homo sapien
ctggatggatttcaagtcaattaga

SEQ ID NO: 4448148 - DNA, 25 bp, Homo sapien
ctctggatggatttcaagtcaatta

SEQ ID NO: 4448149 - DNA, 25 bp, Homo sapien
tggatggatttcaagtcaattagaa

SEQ ID NO: 4448150 - DNA, 25 bp, Homo sapien
tttcatcatcatcgtcatcccagtt

SEQ ID NO: 4448151 - DNA, 25 bp, Homo sapien
catcatcatcgtcatcccagttatc

SEQ ID NO: 4448152 - DNA, 25 bp, Homo sapien
ctggttttacttctgcttcctcttt

SEQ ID NO: 4448153 - DNA, 25 bp, Homo sapien
ttcctcttttttttcatcatcatcg

SEQ ID NO: 4448154 - DNA, 25 bp, Homo sapien
tgacccctaagatccaaatatctct

SEQ ID NO: 4448155 - DNA, 25 bp, Homo sapien
tctcctctctaatgtgacccctaag

SEQ ID NO: 4448156 - DNA, 25 bp, Homo sapien
aataatgggaaacttctgggactct

SEQ ID NO: 4448157 - DNA, 25 bp, Homo sapien
cacaaataatgggaaacttctggga

SEQ ID NO: 4448158 - DNA, 25 bp, Homo sapien
tctcttttatcttctctgctatttt

SEQ ID NO: 4448159 - DNA, 25 bp, Homo sapien
tgccttttcttctgttgccgttctt

SEQ ID NO: 4448160 - DNA, 25 bp, Homo sapien
cttgccttttcttctgttgccgttc

SEQ ID NO: 4448161 - DNA, 25 bp, Homo sapien
ttttcttctgttgccgttctttctc

SEQ ID NO: 4448162 - DNA, 25 bp, Homo sapien
ttctgatcctgtgccaaaaaatcaa

SEQ ID NO: 4448163 - DNA, 25 bp, Homo sapien
aacaagcatatatttctgatcctgt

SEQ ID NO: 4448164 - DNA, 25 bp, Homo sapien
tatatttctgatcctgtgccaaaaa

SEQ ID NO: 4448165 - DNA, 25 bp, Homo sapien
agcatatatttctgatcctgtgcca

SEQ ID NO: 4448166 - DNA, 25 bp, Homo sapien
gaaggtaacagctggtaacgtgaca

SEQ ID NO: 4448167 - DNA, 25 bp, Homo sapien
gtaagcccaagaatgtacattagag

SEQ ID NO: 4448168 - DNA, 25 bp, Homo sapien
cagatttgtacccaggaagactggg

SEQ ID NO: 4448169 - DNA, 25 bp, Homo sapien
actgcgcccagtccactttaggtat

SEQ ID NO: 4448170 - DNA, 25 bp, Homo sapien
tttcctttgctaattcgaggtctga

SEQ ID NO: 4448171 - DNA, 25 bp, Homo sapien
gtttcctttgctaattcgaggtctg

SEQ ID NO: 4448172 - DNA, 25 bp, Homo sapien
ttcctttgctaattcgaggtctgac

SEQ ID NO: 4448173 - DNA, 25 bp, Homo sapien
aacaatatatcaaggccagacacag

SEQ ID NO: 4448174 - DNA, 25 bp, Homo sapien
tcaattgactggcaacaaatcacag

SEQ ID NO: 4448175 - DNA, 25 bp, Homo sapien
gcaaaacttgacttaccaggagaga

SEQ ID NO: 4448176 - DNA, 25 bp, Homo sapien
gacattatttgacgtgccactacac

SEQ ID NO: 4448177 - DNA, 25 bp, Homo sapien
taaccctgtcgtttcattctaaagc

SEQ ID NO: 4448178 - DNA, 25 bp, Homo sapien
aatgaaaccttacaaagccaatagc

SEQ ID NO: 4448179 - DNA, 25 bp, Homo sapien
aagccaatagctatctgaataaccc

SEQ ID NO: 4448180 - DNA, 25 bp, Homo sapien
tctgaataaccctgtcgtttcattc

SEQ ID NO: 4448181 - DNA, 25 bp, Homo sapien
attccataaactgcattattaacac

SEQ ID NO: 4448182 - DNA, 25 bp, Homo sapien
tctattccataaactgcattattaa

SEQ ID NO: 4448183 - DNA, 25 bp, Homo sapien
catctattccataaactgcattatt

SEQ ID NO: 4448184 - DNA, 25 bp, Homo sapien
agcatctattccataaactgcatta

SEQ ID NO: 4448185 - DNA, 25 bp, Homo sapien
ctaagacttccaaaaaactggcata

SEQ ID NO: 4448186 - DNA, 25 bp, Homo sapien
caaactctgtaaagtcatctcttga

SEQ ID NO: 4448187 - DNA, 25 bp, Homo sapien
aagtcatctcttgaagatgggttca

SEQ ID NO: 4448188 - DNA, 25 bp, Homo sapien
tgaaatacacacatctcgaactaag

SEQ ID NO: 4448189 - DNA, 25 bp, Homo sapien
taccagcctcagcctcccaaagtgc

SEQ ID NO: 4448190 - DNA, 25 bp, Homo sapien
gtgatctaccagcctcagcctccca

SEQ ID NO: 4448191 - DNA, 25 bp, Homo sapien
taccatgttggcaaggttagtctca

SEQ ID NO: 4448192 - DNA, 25 bp, Homo sapien
gttagtctcaaactcctgacctcag

SEQ ID NO: 4448193 - DNA, 25 bp, Homo sapien
agcacagtcagtgaattggtaattt

SEQ ID NO: 4448194 - DNA, 25 bp, Homo sapien
aagcacagtcagtgaattggtaatt

SEQ ID NO: 4448195 - DNA, 25 bp, Homo sapien
gtttttcactgcaaagcacagtcag

SEQ ID NO: 4448196 - DNA, 25 bp, Homo sapien
cactgcaaagcacagtcagtgaatt

SEQ ID NO: 4448197 - DNA, 25 bp, Homo sapien
catgaaccttagtgtgctatgggca

SEQ ID NO: 4448198 - DNA, 25 bp, Homo sapien
gttctgtaagggacatccgagccta

SEQ ID NO: 4448199 - DNA, 25 bp, Homo sapien
tagcagtgctagtatttgaacccag

SEQ ID NO: 4448200 - DNA, 25 bp, Homo sapien
tatgggcatcttatctggtacagca

SEQ ID NO: 4448201 - DNA, 25 bp, Homo sapien
tagtcttgtacatatcctccatcat

SEQ ID NO: 4448202 - DNA, 25 bp, Homo sapien
catcataaccaccataatctgccag

SEQ ID NO: 4448203 - DNA, 25 bp, Homo sapien
catggtggcttttaatccccctcca

SEQ ID NO: 4448204 - DNA, 25 bp, Homo sapien
taatctgccagatcatctttcatgg

SEQ ID NO: 4448205 - DNA, 25 bp, Homo sapien
tcaagggattgtgggcaacataaag

SEQ ID NO: 4448206 - DNA, 25 bp, Homo sapien
gattgtgggcaacataaagatgaca

SEQ ID NO: 4448207 - DNA, 25 bp, Homo sapien
acatgttcaagggattgtgggcaac

SEQ ID NO: 4448208 - DNA, 25 bp, Homo sapien
gcaacataaagatgacaccaagaaa

SEQ ID NO: 4448209 - DNA, 25 bp, Homo sapien
cacattagcacctaagtgtcaaggg

SEQ ID NO: 4448210 - DNA, 25 bp, Homo sapien
tcttgacaagttatgaagtagttca

SEQ ID NO: 4448211 - DNA, 25 bp, Homo sapien
catgcccttgctgcaaactgctttt

SEQ ID NO: 4448212 - DNA, 25 bp, Homo sapien
tatgaaatcagatagcaacaacgac

SEQ ID NO: 4448213 - DNA, 25 bp, Homo sapien
tcaaggaggtatggttaaggctgta

SEQ ID NO: 4448214 - DNA, 25 bp, Homo sapien
tcaaactagtgcttttcagccgcag

SEQ ID NO: 4448215 - DNA, 25 bp, Homo sapien
tatcaaactagtgcttttcagccgc

SEQ ID NO: 4448216 - DNA, 25 bp, Homo sapien
actagtgcttttcagccgcagtatc

SEQ ID NO: 4448217 - DNA, 25 bp, Homo sapien
tttatatcaaactagtgcttttcag

SEQ ID NO: 4448218 - DNA, 25 bp, Homo sapien
cagttcatcagtagaaatagcctga

SEQ ID NO: 4448219 - DNA, 25 bp, Homo sapien
taactggtgcagtttgctgagcatg

SEQ ID NO: 4448220 - DNA, 25 bp, Homo sapien
tgcactcgagagattccacaacatg

SEQ ID NO: 4448221 - DNA, 25 bp, Homo sapien
taactagacagtctttgcactcgag

SEQ ID NO: 4448222 - DNA, 25 bp, Homo sapien
tattaagatttagtagagaacgtag

SEQ ID NO: 4448223 - DNA, 25 bp, Homo sapien
gagctgtgttctatactctcaaaaa

SEQ ID NO: 4448224 - DNA, 25 bp, Homo sapien
aaagtatctcttgggaggtaacaca

SEQ ID NO: 4448225 - DNA, 25 bp, Homo sapien
gaactgtactcccaagagctgtgtt

SEQ ID NO: 4448226 - DNA, 25 bp, Homo sapien
tatggtgacaacataaggacctggc

SEQ ID NO: 4448227 - DNA, 25 bp, Homo sapien
cacacatttggttaaactgcttagg

SEQ ID NO: 4448228 - DNA, 25 bp, Homo sapien
cataaacctgagttacaggctcagt

SEQ ID NO: 4448229 - DNA, 25 bp, Homo sapien
ggaaggcagccctatacctttgttg

SEQ ID NO: 4448230 - DNA, 25 bp, Homo sapien
ctgtaattattgctgtgtagtcact

SEQ ID NO: 4448231 - DNA, 25 bp, Homo sapien
tacacagttaaggaacaggtgatac

SEQ ID NO: 4448232 - DNA, 25 bp, Homo sapien
tagcccttgtctgccttaaaggaat

SEQ ID NO: 4448233 - DNA, 25 bp, Homo sapien
gagctttgacgttcctattatttcc

SEQ ID NO: 4448234 - DNA, 25 bp, Homo sapien
ttctactttagatgatccaataatg

SEQ ID NO: 4448235 - DNA, 25 bp, Homo sapien
tactagtattaagatcaaaagcttc

SEQ ID NO: 4448236 - DNA, 25 bp, Homo sapien
tttagatgattgttcatccacacca

SEQ ID NO: 4448237 - DNA, 25 bp, Homo sapien
tagatgatccaataatgattaaaga

SEQ ID NO: 4448238 - DNA, 25 bp, Homo sapien
tactgacatggtcatggaaaacctg

SEQ ID NO: 4448239 - DNA, 25 bp, Homo sapien
aatgggaggatagctactcagtgcc

SEQ ID NO: 4448240 - DNA, 25 bp, Homo sapien
tgaaggaccctcagacaggttgctg

SEQ ID NO: 4448241 - DNA, 25 bp, Homo sapien
caaaatacagtatcctaaggtgggc

SEQ ID NO: 4448242 - DNA, 25 bp, Homo sapien
caagctgatggactgtattctggcc

SEQ ID NO: 4448243 - DNA, 25 bp, Homo sapien
taagcgtatgcatttctggcccaat

SEQ ID NO: 4448244 - DNA, 25 bp, Homo sapien
gagggcatcataggccaaccaggaa

SEQ ID NO: 4448245 - DNA, 25 bp, Homo sapien
tatatccagggtatcatccaccagg

SEQ ID NO: 4448246 - DNA, 25 bp, Homo sapien
attggcgagaaccacgaggcagctg

SEQ ID NO: 4448247 - DNA, 25 bp, Homo sapien
tacatcaaacgctgccgtcctggag

SEQ ID NO: 4448248 - DNA, 25 bp, Homo sapien
tgcagaacaaggtgactcagctagt

SEQ ID NO: 4448249 - DNA, 25 bp, Homo sapien
cagagtggtaccctgaaaacagccc

SEQ ID NO: 4448250 - DNA, 25 bp, Homo sapien
taactcattataggccttcattaga

SEQ ID NO: 4448251 - DNA, 25 bp, Homo sapien
taattagagactaggagtctgagac

SEQ ID NO: 4448252 - DNA, 25 bp, Homo sapien
gaacccagtccatggattcaaagcc

SEQ ID NO: 4448253 - DNA, 25 bp, Homo sapien
tgtgattgcaacactgaactctagt

SEQ ID NO: 4448254 - DNA, 25 bp, Homo sapien
ttagcagacagttgacctggttagg

SEQ ID NO: 4448255 - DNA, 25 bp, Homo sapien
gttcaagctgaagttccaaaccact

SEQ ID NO: 4448256 - DNA, 25 bp, Homo sapien
tcctttgcggtagtattcagatctg

SEQ ID NO: 4448257 - DNA, 25 bp, Homo sapien
tgtgtgcacgccacctagtggtcaa

SEQ ID NO: 4448258 - DNA, 25 bp, Homo sapien
gggttgcatctggacattttgggtt

SEQ ID NO: 4448259 - DNA, 25 bp, Homo sapien
gctgagtaatctggggttgcatctg

SEQ ID NO: 4448260 - DNA, 25 bp, Homo sapien
cttatgctgagtaatctggggttgc

SEQ ID NO: 4448261 - DNA, 25 bp, Homo sapien
taatctggggttgcatctggacatt

SEQ ID NO: 4448262 - DNA, 25 bp, Homo sapien
aatgtaggaggaatcttaccaccat

SEQ ID NO: 4448263 - DNA, 25 bp, Homo sapien
gactctgcatctttgtatagtttaa

SEQ ID NO: 4448264 - DNA, 25 bp, Homo sapien
cttaaacaattacaggactattcag

SEQ ID NO: 4448265 - DNA, 25 bp, Homo sapien
agtgtacatccttaactttccacag

SEQ ID NO: 4448266 - DNA, 25 bp, Homo sapien
gacctcaggcgattcgtccacctcg

SEQ ID NO: 4448267 - DNA, 25 bp, Homo sapien
ctcccaaagtgccgagattataggg

SEQ ID NO: 4448268 - DNA, 25 bp, Homo sapien
aaagtgccgagattatagggcgtga

SEQ ID NO: 4448269 - DNA, 25 bp, Homo sapien
gcgtgagccaccgcacccggccaga

SEQ ID NO: 4448270 - DNA, 25 bp, Homo sapien
ttgaagcagtgaaacaacaggcccc

SEQ ID NO: 4448271 - DNA, 25 bp, Homo sapien
tccaggtgaggatcatgagaagcct

SEQ ID NO: 4448272 - DNA, 25 bp, Homo sapien
cagtttagaacagtcccttggttgc

SEQ ID NO: 4448273 - DNA, 25 bp, Homo sapien
agaaagacgctttggtggactgacc

SEQ ID NO: 4448274 - DNA, 25 bp, Homo sapien
ttatgcaacttctcaggtacacatc

SEQ ID NO: 4448275 - DNA, 25 bp, Homo sapien
gctgaagcatcatttcttaccagag

SEQ ID NO: 4448276 - DNA, 25 bp, Homo sapien
ctcaggtacacatctttgtataaaa

SEQ ID NO: 4448277 - DNA, 25 bp, Homo sapien
ccgtacccggctgaagcatcatttc

SEQ ID NO: 4448278 - DNA, 25 bp, Homo sapien
aactatagggttattggctattgcc

SEQ ID NO: 4448279 - DNA, 25 bp, Homo sapien
acagtgagttggctttggtgaacag

SEQ ID NO: 4448280 - DNA, 25 bp, Homo sapien
gcataatgaccttttgtgaatgaat

SEQ ID NO: 4448281 - DNA, 25 bp, Homo sapien
tgaacagaggactcatataaatatg

SEQ ID NO: 4448282 - DNA, 25 bp, Homo sapien
ggtcacaatgtgaaaagtccttgga

SEQ ID NO: 4448283 - DNA, 25 bp, Homo sapien
cgtgacaggagtgactatttctttc

SEQ ID NO: 4448284 - DNA, 25 bp, Homo sapien
ttctttctaactggagtcagccctc

SEQ ID NO: 4448285 - DNA, 25 bp, Homo sapien
gacaattgaatagtacgtgacagga

SEQ ID NO: 4448286 - DNA, 25 bp, Homo sapien
ttggttttgcatgctgattatgaag

SEQ ID NO: 4448287 - DNA, 25 bp, Homo sapien
gccacagacaactatcaagaaggta

SEQ ID NO: 4448288 - DNA, 25 bp, Homo sapien
cacagacaactatcaagaaggtaat

SEQ ID NO: 4448289 - DNA, 25 bp, Homo sapien
gaagccacagacaactatcaagaag

SEQ ID NO: 4448290 - DNA, 25 bp, Homo sapien
tagttcagtgtcgacaagttgccag

SEQ ID NO: 4448291 - DNA, 25 bp, Homo sapien
taggctcacacttgaggtaagaagc

SEQ ID NO: 4448292 - DNA, 25 bp, Homo sapien
gaaaagctagacctggagcaaagag

SEQ ID NO: 4448293 - DNA, 25 bp, Homo sapien
aaaaggttagccatcagccagccaa

SEQ ID NO: 4448294 - DNA, 25 bp, Homo sapien
gaaacagacctatacctgtatgatc

SEQ ID NO: 4448295 - DNA, 25 bp, Homo sapien
cctgcacaagagtggagaaagaacc

SEQ ID NO: 4448296 - DNA, 25 bp, Homo sapien
cagttaagacagagtattggtgccg

SEQ ID NO: 4448297 - DNA, 25 bp, Homo sapien
gacaatggggctagaataactgaat

SEQ ID NO: 4448298 - DNA, 25 bp, Homo sapien
caaagagaagagatagcctacagaa

SEQ ID NO: 4448299 - DNA, 25 bp, Homo sapien
aagagactgcggcatgggaatcact

SEQ ID NO: 4448300 - DNA, 25 bp, Homo sapien
aagagaagagatagcctacagaatg

SEQ ID NO: 4448301 - DNA, 25 bp, Homo sapien
ctactcaagagactgcggcatggga

SEQ ID NO: 4448302 - DNA, 25 bp, Homo sapien
ccagcgcgacgcctccacttatatt

SEQ ID NO: 4448303 - DNA, 25 bp, Homo sapien
gcttcaggaatgcccgccagcgcga

SEQ ID NO: 4448304 - DNA, 25 bp, Homo sapien
gccagcgcgacgcctccacttatat

SEQ ID NO: 4448305 - DNA, 25 bp, Homo sapien
ttcaggaatgcccgccagcgcgacg

SEQ ID NO: 4448306 - DNA, 25 bp, Homo sapien
gcgagcacagctaaggccacggagc

SEQ ID NO: 4448307 - DNA, 25 bp, Homo sapien
ccagaaagagagagtagcgcgagca

SEQ ID NO: 4448308 - DNA, 25 bp, Homo sapien
agtagcgcgagcacagctaaggcca

SEQ ID NO: 4448309 - DNA, 25 bp, Homo sapien
agagagtagcgcgagcacagctaag

SEQ ID NO: 4448310 - DNA, 25 bp, Homo sapien
tgacgcttatcgacgccctaaactt

SEQ ID NO: 4448311 - DNA, 25 bp, Homo sapien
aagtcacggagcgagagagcacagc

SEQ ID NO: 4448312 - DNA, 25 bp, Homo sapien
cgcgaaagagcggaagagaaaccct

SEQ ID NO: 4448313 - DNA, 25 bp, Homo sapien
acggcgggccaccaaggagaacttg

SEQ ID NO: 4448314 - DNA, 25 bp, Homo sapien
gaattacagccaaaaggcatgcgct

SEQ ID NO: 4448315 - DNA, 25 bp, Homo sapien
gacatgcgaacttagcgggcgccta

SEQ ID NO: 4448316 - DNA, 25 bp, Homo sapien
gaggaagccctctgtacgaaaagac

SEQ ID NO: 4448317 - DNA, 25 bp, Homo sapien
acccagaggtgctaggacatgcgaa

SEQ ID NO: 4448318 - DNA, 25 bp, Homo sapien
tagcaattgctctatacgtggcaga

SEQ ID NO: 4448319 - DNA, 25 bp, Homo sapien
gctactagccccatcaagaggtgga

SEQ ID NO: 4448320 - DNA, 25 bp, Homo sapien
gagtctacatgatttggccccaaga

SEQ ID NO: 4448321 - DNA, 25 bp, Homo sapien
gaggcatgactagaccatccatggg

SEQ ID NO: 4448322 - DNA, 25 bp, Homo sapien
tgctggatgacgtgagtaaacctga

SEQ ID NO: 4448323 - DNA, 25 bp, Homo sapien
gacacatagcaattcaggaaatttg

SEQ ID NO: 4448324 - DNA, 25 bp, Homo sapien
ctggatgacgtgagtaaacctgaat

SEQ ID NO: 4448325 - DNA, 25 bp, Homo sapien
tctgctggatgacgtgagtaaacct

SEQ ID NO: 4448326 - DNA, 25 bp, Homo sapien
tccattcttcagtaagtcaacttca

SEQ ID NO: 4448327 - DNA, 25 bp, Homo sapien
tcttcagtaagtcaacttcaatgtc

SEQ ID NO: 4448328 - DNA, 25 bp, Homo sapien
cagtaagtcaacttcaatgtcggat

SEQ ID NO: 4448329 - DNA, 25 bp, Homo sapien
ttcagtaagtcaacttcaatgtcgg

SEQ ID NO: 4448330 - DNA, 25 bp, Homo sapien
gaatgctccactttttcaattctct

SEQ ID NO: 4448331 - DNA, 25 bp, Homo sapien
gaaagacaagtctgaatgctccact

SEQ ID NO: 4448332 - DNA, 25 bp, Homo sapien
tgtagtacaagagatagaaagacca

SEQ ID NO: 4448333 - DNA, 25 bp, Homo sapien
agaaagaccagtccttgctgaaaga

SEQ ID NO: 4448334 - DNA, 25 bp, Homo sapien
tggttcacacggcaggcatactcat

SEQ ID NO: 4448335 - DNA, 25 bp, Homo sapien
taagaacattccctgacaatcccaa

SEQ ID NO: 4448336 - DNA, 25 bp, Homo sapien
tggccatagaccttttttatatcaa

SEQ ID NO: 4448337 - DNA, 25 bp, Homo sapien
ctttcagcagcttacaaaagaatgt

SEQ ID NO: 4448338 - DNA, 25 bp, Homo sapien
ggatgggactcattcagggtagtat

SEQ ID NO: 4448339 - DNA, 25 bp, Homo sapien
tatatgtatttgtgcaagtgctgct

SEQ ID NO: 4448340 - DNA, 25 bp, Homo sapien
taagaagtgttaagagtgtatatgt

SEQ ID NO: 4448341 - DNA, 25 bp, Homo sapien
ggaaactactggttcagaaaccatg

SEQ ID NO: 4448342 - DNA, 25 bp, Homo sapien
gcatcagtatctcagcaggtgccac

SEQ ID NO: 4448343 - DNA, 25 bp, Homo sapien
tcttgagatgttcgttcagtgctaa

SEQ ID NO: 4448344 - DNA, 25 bp, Homo sapien
gagatgttcgttcagtgctaaatat

SEQ ID NO: 4448345 - DNA, 25 bp, Homo sapien
ttcttgagatgttcgttcagtgcta

SEQ ID NO: 4448346 - DNA, 25 bp, Homo sapien
cttcttgagatgttcgttcagtgct

SEQ ID NO: 4448347 - DNA, 25 bp, Homo sapien
gcctcagataccaatccagccagaa

SEQ ID NO: 4448348 - DNA, 25 bp, Homo sapien
ttataggatgctaggacagcaggac

SEQ ID NO: 4448349 - DNA, 25 bp, Homo sapien
cattgtttagagctacccagcagga

SEQ ID NO: 4448350 - DNA, 25 bp, Homo sapien
gccagaaagtactggagaagtccag

SEQ ID NO: 4448351 - DNA, 25 bp, Homo sapien
gagaagggaacatgaccctgtagga

SEQ ID NO: 4448352 - DNA, 25 bp, Homo sapien
tgagggttatcatgttagagctgtc

SEQ ID NO: 4448353 - DNA, 25 bp, Homo sapien
tgtagagggtcagtaatatggccat

SEQ ID NO: 4448354 - DNA, 25 bp, Homo sapien
tcaatgttctccacatagtgagggt

SEQ ID NO: 4448355 - DNA, 25 bp, Homo sapien
cctgcaataccatactggcagttcc

SEQ ID NO: 4448356 - DNA, 25 bp, Homo sapien
tgcctttatcctgcaataccatact

SEQ ID NO: 4448357 - DNA, 25 bp, Homo sapien
tatcctgcaataccatactggcagt

SEQ ID NO: 4448358 - DNA, 25 bp, Homo sapien
ctttatcctgcaataccatactggc

SEQ ID NO: 4448359 - DNA, 25 bp, Homo sapien
gccttgcaggtaatgtgggtaacca

SEQ ID NO: 4448360 - DNA, 25 bp, Homo sapien
agccttgcaggtaatgtgggtaacc

SEQ ID NO: 4448361 - DNA, 25 bp, Homo sapien
ccttgcaggtaatgtgggtaaccac

SEQ ID NO: 4448362 - DNA, 25 bp, Homo sapien
aacaacattatacaaaggaaaagag

SEQ ID NO: 4448363 - DNA, 25 bp, Homo sapien
acattatacaaaggaaaagagtggt

SEQ ID NO: 4448364 - DNA, 25 bp, Homo sapien
gaataaaacaacattatacaaagga

SEQ ID NO: 4448365 - DNA, 25 bp, Homo sapien
caacattatacaaaggaaaagagtg

SEQ ID NO: 4448366 - DNA, 25 bp, Homo sapien
tgggatgtctgcagagctgtataac

SEQ ID NO: 4448367 - DNA, 25 bp, Homo sapien
agtccccatacaggaatgggatgtc

SEQ ID NO: 4448368 - DNA, 25 bp, Homo sapien
gaggcaaacacagtccccatacagg

SEQ ID NO: 4448369 - DNA, 25 bp, Homo sapien
aacacagtccccatacaggaatggg

SEQ ID NO: 4448370 - DNA, 25 bp, Homo sapien
ggtttcagcatcaatgtaccctggg

SEQ ID NO: 4448371 - DNA, 25 bp, Homo sapien
tttggactccaactaaagatgcaga

SEQ ID NO: 4448372 - DNA, 25 bp, Homo sapien
tatctcctctagtggcctgggaacc

SEQ ID NO: 4448373 - DNA, 25 bp, Homo sapien
taccctgggcagtagaatttcattg

SEQ ID NO: 4448374 - DNA, 25 bp, Homo sapien
tggaattcatccaatccaaatgcgg

SEQ ID NO: 4448375 - DNA, 25 bp, Homo sapien
aaagcaagcaagcagaatttggaat

SEQ ID NO: 4448376 - DNA, 25 bp, Homo sapien
ttcatccaatccaaatgcggcatct

SEQ ID NO: 4448377 - DNA, 25 bp, Homo sapien
agcatatcaatattaaaaagcaagc

SEQ ID NO: 4448378 - DNA, 25 bp, Homo sapien
taaagaagatcatgtccatgttaac

SEQ ID NO: 4448379 - DNA, 25 bp, Homo sapien
tataaagaagatcatgtccatgtta

SEQ ID NO: 4448380 - DNA, 25 bp, Homo sapien
aaagaagatcatgtccatgttaaca

SEQ ID NO: 4448381 - DNA, 25 bp, Homo sapien
attataaagaagatcatgtccatgt

SEQ ID NO: 4448382 - DNA, 25 bp, Homo sapien
cacctctaagttgccagccctccta

SEQ ID NO: 4448383 - DNA, 25 bp, Homo sapien
ccccacctctaagttgccagccctc

SEQ ID NO: 4448384 - DNA, 25 bp, Homo sapien
ccacctctaagttgccagccctcct

SEQ ID NO: 4448385 - DNA, 25 bp, Homo sapien
tccccacctctaagttgccagccct

SEQ ID NO: 4448386 - DNA, 25 bp, Homo sapien
tgcacgcttaactatcttaacaagc

SEQ ID NO: 4448387 - DNA, 25 bp, Homo sapien
tatcttaacaagctttgagtgcaag

SEQ ID NO: 4448388 - DNA, 25 bp, Homo sapien
gttaacttatgcacgcttaactatc

SEQ ID NO: 4448389 - DNA, 25 bp, Homo sapien
tgcaagagattgaagagttcaaatc

SEQ ID NO: 4448390 - DNA, 25 bp, Homo sapien
taaaccagattaaccacaaccatgc

SEQ ID NO: 4448391 - DNA, 25 bp, Homo sapien
ccccaaattctaagcagagtatgta

SEQ ID NO: 4448392 - DNA, 25 bp, Homo sapien
caaatttccaataatcctgtcaatt

SEQ ID NO: 4448393 - DNA, 25 bp, Homo sapien
aatatgaatcttatatgacaaaatg

SEQ ID NO: 4448394 - DNA, 25 bp, Homo sapien
gaggccctttacactgtgagccaaa

SEQ ID NO: 4448395 - DNA, 25 bp, Homo sapien
agtctgcatactcctcatgacctgg

SEQ ID NO: 4448396 - DNA, 25 bp, Homo sapien
aatatagaaggctggcctcccacta

SEQ ID NO: 4448397 - DNA, 25 bp, Homo sapien
tggcccgcaggaaagaacgctggct

SEQ ID NO: 4448398 - DNA, 25 bp, Homo sapien
tgttatttgtcattcaaagtacagc

SEQ ID NO: 4448399 - DNA, 25 bp, Homo sapien
agtacagcgggccttccgtatccag

SEQ ID NO: 4448400 - DNA, 25 bp, Homo sapien
tcattcaaagtacagcgggccttcc

SEQ ID NO: 4448401 - DNA, 25 bp, Homo sapien
tacagcgggccttccgtatccaggg

SEQ ID NO: 4448402 - DNA, 25 bp, Homo sapien
catgtaattttagtttgcagccagg

SEQ ID NO: 4448403 - DNA, 25 bp, Homo sapien
cagccaggtgaagagttaatgaatg

SEQ ID NO: 4448404 - DNA, 25 bp, Homo sapien
ggtttgggcccctagatagcctcag

SEQ ID NO: 4448405 - DNA, 25 bp, Homo sapien
ttaatgaatggcctaggtaagtgtg

SEQ ID NO: 4448406 - DNA, 25 bp, Homo sapien
ccttgtaatatcagccagcagagca

SEQ ID NO: 4448407 - DNA, 25 bp, Homo sapien
tacttcagacatgccaaagaccagc

SEQ ID NO: 4448408 - DNA, 25 bp, Homo sapien
tgaaatgacctgctacaactctgag

SEQ ID NO: 4448409 - DNA, 25 bp, Homo sapien
tctcagagcgataagtaacattttc

SEQ ID NO: 4448410 - DNA, 25 bp, Homo sapien
agaaggtactcgacgatggacgcgc

SEQ ID NO: 4448411 - DNA, 25 bp, Homo sapien
aggcagaggagaaggtactcgacga

SEQ ID NO: 4448412 - DNA, 25 bp, Homo sapien
gaggagaaggtactcgacgatggac

SEQ ID NO: 4448413 - DNA, 25 bp, Homo sapien
ctcgacgatggacgcgcccaggctg

SEQ ID NO: 4448414 - DNA, 25 bp, Homo sapien
tcagcgatgagagagtaggaagctt

SEQ ID NO: 4448415 - DNA, 25 bp, Homo sapien
gctccaggagtgtgccactttcccg

SEQ ID NO: 4448416 - DNA, 25 bp, Homo sapien
ttcccagtcccggacagagacctga

SEQ ID NO: 4448417 - DNA, 25 bp, Homo sapien
agtcctgcccggtagttattcagcg

SEQ ID NO: 4448418 - DNA, 25 bp, Homo sapien
caggaaaagcgagccctcggaagga

SEQ ID NO: 4448419 - DNA, 25 bp, Homo sapien
tctttcccgctctgcccaggaaaag

SEQ ID NO: 4448420 - DNA, 25 bp, Homo sapien
cgagatggtacttctcttgggcccc

SEQ ID NO: 4448421 - DNA, 25 bp, Homo sapien
gactatttgcgtttcgcgaccggcc

SEQ ID NO: 4448422 - DNA, 25 bp, Homo sapien
tctccttacatactcctaaaagcaa

SEQ ID NO: 4448423 - DNA, 25 bp, Homo sapien
cttgcaggttcatcttgcccagtgt

SEQ ID NO: 4448424 - DNA, 25 bp, Homo sapien
tctaacagaggcaacaaatggagtt

SEQ ID NO: 4448425 - DNA, 25 bp, Homo sapien
ataaaccatttactctacttgcagg

SEQ ID NO: 4448426 - DNA, 25 bp, Homo sapien
aaatcaagactgatagtagtgtatg

SEQ ID NO: 4448427 - DNA, 25 bp, Homo sapien
gctttagtaatgtctaaatcaagac

SEQ ID NO: 4448428 - DNA, 25 bp, Homo sapien
cctattctatgacctgatggtagtg

SEQ ID NO: 4448429 - DNA, 25 bp, Homo sapien
agcacaatatcattgaacacccaag

SEQ ID NO: 4448430 - DNA, 25 bp, Homo sapien
aaaactcttcgatgtctcactgctg

SEQ ID NO: 4448431 - DNA, 25 bp, Homo sapien
tgtgccaaggtttacagcagatatt

SEQ ID NO: 4448432 - DNA, 25 bp, Homo sapien
gagaagtaaatgatctgtgccaagg

SEQ ID NO: 4448433 - DNA, 25 bp, Homo sapien
caggcttgtctggaattcaccatgc

SEQ ID NO: 4448434 - DNA, 25 bp, Homo sapien
caggtgctagagattcacaggtgag

SEQ ID NO: 4448435 - DNA, 25 bp, Homo sapien
gagtcacggtgagttaggtcaatca

SEQ ID NO: 4448436 - DNA, 25 bp, Homo sapien
tcaataatcactacagagtcacggt

SEQ ID NO: 4448437 - DNA, 25 bp, Homo sapien
cacaggtgaggtcaactacttcatc

SEQ ID NO: 4448438 - DNA, 25 bp, Homo sapien
ggatgccaacaacccatagttcctg

SEQ ID NO: 4448439 - DNA, 25 bp, Homo sapien
gtgcatgacataacacttgcctggc

SEQ ID NO: 4448440 - DNA, 25 bp, Homo sapien
caggatctgtcttgagcaataaggc

SEQ ID NO: 4448441 - DNA, 25 bp, Homo sapien
gctttaaggacgaccccagtatctg

SEQ ID NO: 4448442 - DNA, 25 bp, Homo sapien
acttgatgctgaataggttggctaa

SEQ ID NO: 4448443 - DNA, 25 bp, Homo sapien
ggtaggaacttgatgctgaataggt

SEQ ID NO: 4448444 - DNA, 25 bp, Homo sapien
catcctgactcatgcttattgaaca

SEQ ID NO: 4448445 - DNA, 25 bp, Homo sapien
tataaagcgttaaaggcctgcaagg

SEQ ID NO: 4448446 - DNA, 25 bp, Homo sapien
tagattcgagttagtggtctaatct

SEQ ID NO: 4448447 - DNA, 25 bp, Homo sapien
tctaatcttaaggttcatagctccc

SEQ ID NO: 4448448 - DNA, 25 bp, Homo sapien
tccccatttctggactaaggatgct

SEQ ID NO: 4448449 - DNA, 25 bp, Homo sapien
caagggcagctcatttagattcgag

SEQ ID NO: 4448450 - DNA, 25 bp, Homo sapien
ctttgatcatcatttgcttaagaga

SEQ ID NO: 4448451 - DNA, 25 bp, Homo sapien
cagagtgaggtctggcagattccgt

SEQ ID NO: 4448452 - DNA, 25 bp, Homo sapien
acagtttgtcagttaactttgatca

SEQ ID NO: 4448453 - DNA, 25 bp, Homo sapien
tggcagattccgtgacagtttgtca

SEQ ID NO: 4448454 - DNA, 25 bp, Homo sapien
tttagttttcaaggaatgggctcag

SEQ ID NO: 4448455 - DNA, 25 bp, Homo sapien
ttttagttttcaaggaatgggctca

SEQ ID NO: 4448456 - DNA, 25 bp, Homo sapien
aattatcagttattccaaggcttgg

SEQ ID NO: 4448457 - DNA, 25 bp, Homo sapien
tttgtgctcctaaatccatatcctc

SEQ ID NO: 4448458 - DNA, 25 bp, Homo sapien
cctaccagcttctctagtataaatt

SEQ ID NO: 4448459 - DNA, 25 bp, Homo sapien
gcttggagagagtatagtagctacc

SEQ ID NO: 4448460 - DNA, 25 bp, Homo sapien
tattctgaggcaaaatccctgagag

SEQ ID NO: 4448461 - DNA, 25 bp, Homo sapien
tatgggaccaggacaaagtgcaact

SEQ ID NO: 4448462 - DNA, 25 bp, Homo sapien
aatgaataacatagaggctctgccc

SEQ ID NO: 4448463 - DNA, 25 bp, Homo sapien
caaagaactctatcctgaaggccag

SEQ ID NO: 4448464 - DNA, 25 bp, Homo sapien
tgttggaggaggggttggtggatac

SEQ ID NO: 4448465 - DNA, 25 bp, Homo sapien
atgttggaggaggggttggtggata

SEQ ID NO: 4448466 - DNA, 25 bp, Homo sapien
ctggatcgatgttggaggaggggtt

SEQ ID NO: 4448467 - DNA, 25 bp, Homo sapien
gatcgatgttggaggaggggttggt

SEQ ID NO: 4448468 - DNA, 25 bp, Homo sapien
agtaatatcttgtatcaccacttta

SEQ ID NO: 4448469 - DNA, 25 bp, Homo sapien
taatatcttgtatcaccactttaga

SEQ ID NO: 4448470 - DNA, 25 bp, Homo sapien
gtaggtgggtgattgaatcattcat

SEQ ID NO: 4448471 - DNA, 25 bp, Homo sapien
ggtaggtgggtgattgaatcattca

SEQ ID NO: 4448472 - DNA, 25 bp, Homo sapien
tagcatcagtgggtctcggaaccaa

SEQ ID NO: 4448473 - DNA, 25 bp, Homo sapien
caaaagtcttggatacaggcttcac

SEQ ID NO: 4448474 - DNA, 25 bp, Homo sapien
gacatagcatcttacactcaggaca

SEQ ID NO: 4448475 - DNA, 25 bp, Homo sapien
agttgtggccacagcttagcatcag

SEQ ID NO: 4448476 - DNA, 25 bp, Homo sapien
aagaaatggacagcatcagagattt

SEQ ID NO: 4448477 - DNA, 25 bp, Homo sapien
gatttgcaggaactccttagactgc

SEQ ID NO: 4448478 - DNA, 25 bp, Homo sapien
aatggacagcatcagagatttgcag

SEQ ID NO: 4448479 - DNA, 25 bp, Homo sapien
ttagactgccccacagacaaccgag

SEQ ID NO: 4448480 - DNA, 25 bp, Homo sapien
cttgtgagcagcaatagcttccttc

SEQ ID NO: 4448481 - DNA, 25 bp, Homo sapien
tgtgagcagcaatagcttccttctg

SEQ ID NO: 4448482 - DNA, 25 bp, Homo sapien
ctccagttgaccctgttggatggca

SEQ ID NO: 4448483 - DNA, 25 bp, Homo sapien
gaccctgttggatggcaagctcctc

SEQ ID NO: 4448484 - DNA, 25 bp, Homo sapien
tcataacccctctttcttgctcctc

SEQ ID NO: 4448485 - DNA, 25 bp, Homo sapien
cataacccctctttcttgctcctca

SEQ ID NO: 4448486 - DNA, 25 bp, Homo sapien
ataacccctctttcttgctcctcac

SEQ ID NO: 4448487 - DNA, 25 bp, Homo sapien
ggcccacaccaccaacactcacaca

SEQ ID NO: 4448488 - DNA, 25 bp, Homo sapien
agtgcttggggatgggggcccacac

SEQ ID NO: 4448489 - DNA, 25 bp, Homo sapien
gggatgggggcccacaccaccaaca

SEQ ID NO: 4448490 - DNA, 25 bp, Homo sapien
ttggggatgggggcccacaccacca

SEQ ID NO: 4448491 - DNA, 25 bp, Homo sapien
gattatcaccatggttattgcagag

SEQ ID NO: 4448492 - DNA, 25 bp, Homo sapien
tgattatcaccatggttattgcaga

SEQ ID NO: 4448493 - DNA, 25 bp, Homo sapien
gctggctcagattcaactccatctc

SEQ ID NO: 4448494 - DNA, 25 bp, Homo sapien
cttcccggagctcagttaaaatgtc

SEQ ID NO: 4448495 - DNA, 25 bp, Homo sapien
ggctaagagacattgctcctgaagc

SEQ ID NO: 4448496 - DNA, 25 bp, Homo sapien
acatatccttggctaagagacattg

SEQ ID NO: 4448497 - DNA, 25 bp, Homo sapien
tcgaaggagttctgttgttccgtct

SEQ ID NO: 4448498 - DNA, 25 bp, Homo sapien
tgttccgtctttgcctgaatgctca

SEQ ID NO: 4448499 - DNA, 25 bp, Homo sapien
tttgagaaagtcgaaggagttctgt

SEQ ID NO: 4448500 - DNA, 25 bp, Homo sapien
agttctgttgttccgtctttgcctg

SEQ ID NO: 4448501 - DNA, 25 bp, Homo sapien
tctggaaataagctctctggttgcc

SEQ ID NO: 4448502 - DNA, 25 bp, Homo sapien
gaaataagctctctggttgccagca

SEQ ID NO: 4448503 - DNA, 25 bp, Homo sapien
gctttctggaaataagctctctggt

SEQ ID NO: 4448504 - DNA, 25 bp, Homo sapien
catgtactggataggacctttgtac

SEQ ID NO: 4448505 - DNA, 25 bp, Homo sapien
ggcagagagtgtcctgcatttccct

SEQ ID NO: 4448506 - DNA, 25 bp, Homo sapien
tgggcagagagtgtcctgcatttcc

SEQ ID NO: 4448507 - DNA, 25 bp, Homo sapien
gggcagagagtgtcctgcatttccc

SEQ ID NO: 4448508 - DNA, 25 bp, Homo sapien
ccttagtcttaaaagccagaatcct

SEQ ID NO: 4448509 - DNA, 25 bp, Homo sapien
taatccaggtatatgcccaccttgt

SEQ ID NO: 4448510 - DNA, 25 bp, Homo sapien
gagtcaaacctctcaggatcatcag

SEQ ID NO: 4448511 - DNA, 25 bp, Homo sapien
ttaatgtcaccatgccagacgctgg

SEQ ID NO: 4448512 - DNA, 25 bp, Homo sapien
aatacctctttaataacactctgaa

SEQ ID NO: 4448513 - DNA, 25 bp, Homo sapien
tcaatacctctttaataacactctg

SEQ ID NO: 4448514 - DNA, 25 bp, Homo sapien
ctctgaatttgtataatattatgac

SEQ ID NO: 4448515 - DNA, 25 bp, Homo sapien
tatttcaatacctctttaataacac

SEQ ID NO: 4448516 - DNA, 25 bp, Homo sapien
caaactaaaacatcaagcagtatgg

SEQ ID NO: 4448517 - DNA, 25 bp, Homo sapien
ggcaatactccgtgtcaaacaaaaa

SEQ ID NO: 4448518 - DNA, 25 bp, Homo sapien
cgacggggcaatactccgtgtcaaa

SEQ ID NO: 4448519 - DNA, 25 bp, Homo sapien
gtaaagttaatctagagtcactttg

SEQ ID NO: 4448520 - DNA, 25 bp, Homo sapien
tggcttcatgggatgagtcacatgc

SEQ ID NO: 4448521 - DNA, 25 bp, Homo sapien
tttggcttcatgggatgagtcacat

SEQ ID NO: 4448522 - DNA, 25 bp, Homo sapien
ggcttcatgggatgagtcacatgct

SEQ ID NO: 4448523 - DNA, 25 bp, Homo sapien
atgagtcacatgcttgcatctgttc

SEQ ID NO: 4448524 - DNA, 25 bp, Homo sapien
tagctgtacattccaagggctctct

SEQ ID NO: 4448525 - DNA, 25 bp, Homo sapien
tctgtagctgtacattccaagggct

SEQ ID NO: 4448526 - DNA, 25 bp, Homo sapien
gtctgtagctgtacattccaagggc

SEQ ID NO: 4448527 - DNA, 25 bp, Homo sapien
tgtagctgtacattccaagggctct

SEQ ID NO: 4448528 - DNA, 25 bp, Homo sapien
ggcgaggttttaccatgttagtcag

SEQ ID NO: 4448529 - DNA, 25 bp, Homo sapien
gaggcgaggttttaccatgttagtc

SEQ ID NO: 4448530 - DNA, 25 bp, Homo sapien
gcgaggttttaccatgttagtcagg

SEQ ID NO: 4448531 - DNA, 25 bp, Homo sapien
gtagaggcgaggttttaccatgtta

SEQ ID NO: 4448532 - DNA, 25 bp, Homo sapien
ctgtttaccactctctggtgcatgc

SEQ ID NO: 4448533 - DNA, 25 bp, Homo sapien
gcttcctgtttggtaattctgcttt

SEQ ID NO: 4448534 - DNA, 25 bp, Homo sapien
cctgtttggtaattctgctttgaca

SEQ ID NO: 4448535 - DNA, 25 bp, Homo sapien
cattctttctgtttaccactctctg

SEQ ID NO: 4448536 - DNA, 25 bp, Homo sapien
gggcatagggcacagaactggtact

SEQ ID NO: 4448537 - DNA, 25 bp, Homo sapien
tggcctaagacactgaatccaatga

SEQ ID NO: 4448538 - DNA, 25 bp, Homo sapien
acatgaggcaaaggatcagtaagag

SEQ ID NO: 4448539 - DNA, 25 bp, Homo sapien
agtaagagaagtggccagaagcacc

SEQ ID NO: 4448540 - DNA, 25 bp, Homo sapien
ttattagaatcaggcggcttgaagc

SEQ ID NO: 4448541 - DNA, 25 bp, Homo sapien
ggcggcttgaagcaccactcattag

SEQ ID NO: 4448542 - DNA, 25 bp, Homo sapien
accactcattagtcagtttgtgcag

SEQ ID NO: 4448543 - DNA, 25 bp, Homo sapien
gaaacaggtttattagaatcaggcg

SEQ ID NO: 4448544 - DNA, 25 bp, Homo sapien
tccaagagtctcagagtccacgaaa

SEQ ID NO: 4448545 - DNA, 25 bp, Homo sapien
cagagtccacgaaacagcaacagga

SEQ ID NO: 4448546 - DNA, 25 bp, Homo sapien
cagaggtttagttactggaccagga

SEQ ID NO: 4448547 - DNA, 25 bp, Homo sapien
gaacctcgaggtaattccagcagag

SEQ ID NO: 4448548 - DNA, 25 bp, Homo sapien
aagccaggtgccctcatcaactcgg

SEQ ID NO: 4448549 - DNA, 25 bp, Homo sapien
tgaactctagctttgatgagctgct

SEQ ID NO: 4448550 - DNA, 25 bp, Homo sapien
tcgggctcaccctgcagtgattgtg

SEQ ID NO: 4448551 - DNA, 25 bp, Homo sapien
gctttgatgagctgctgccaaagcc

SEQ ID NO: 4448552 - DNA, 25 bp, Homo sapien
aatcaattgactgttaaccaaaggg

SEQ ID NO: 4448553 - DNA, 25 bp, Homo sapien
tctgattgaactatgtgacatcttc

SEQ ID NO: 4448554 - DNA, 25 bp, Homo sapien
tgacatcttcgtggcagtaccaggc

SEQ ID NO: 4448555 - DNA, 25 bp, Homo sapien
ccaaagggtttatgtctagactcta

SEQ ID NO: 4448556 - DNA, 25 bp, Homo sapien
ccagaaagcccttgactgcagcaat

SEQ ID NO: 4448557 - DNA, 25 bp, Homo sapien
ttccagaaagcccttgactgcagca

SEQ ID NO: 4448558 - DNA, 25 bp, Homo sapien
ctgtggctttcaggctcagctgcaa

SEQ ID NO: 4448559 - DNA, 25 bp, Homo sapien
tcagctgcaacattttcattccaga

SEQ ID NO: 4448560 - DNA, 25 bp, Homo sapien
taagacaacggagctggacgtcact

SEQ ID NO: 4448561 - DNA, 25 bp, Homo sapien
cacccggccgtgtgtatgttcttaa

SEQ ID NO: 4448562 - DNA, 25 bp, Homo sapien
aaaacaataccagaccagaggcagg

SEQ ID NO: 4448563 - DNA, 25 bp, Homo sapien
cactgagggacaaggagtaggacca

SEQ ID NO: 4448564 - DNA, 25 bp, Homo sapien
cgtccagagactgcagcaagaggag

SEQ ID NO: 4448565 - DNA, 25 bp, Homo sapien
agccaaacctcgaggaccaggaggg

SEQ ID NO: 4448566 - DNA, 25 bp, Homo sapien
accaggaggggcacgtccagagact

SEQ ID NO: 4448567 - DNA, 25 bp, Homo sapien
agaggagggctcacctggcctagag

SEQ ID NO: 4448568 - DNA, 25 bp, Homo sapien
ggttcacatggacggggacctccag

SEQ ID NO: 4448569 - DNA, 25 bp, Homo sapien
tctgaagagccgctggatccaggag

SEQ ID NO: 4448570 - DNA, 25 bp, Homo sapien
gagctctgggcggttggttcacatg

SEQ ID NO: 4448571 - DNA, 25 bp, Homo sapien
tgctcccctgatgcccctctgaaga

SEQ ID NO: 4448572 - DNA, 25 bp, Homo sapien
ctgagtctgcaaaggtgcttgaagg

SEQ ID NO: 4448573 - DNA, 25 bp, Homo sapien
tgaaggtacgtgaagagttcccagg

SEQ ID NO: 4448574 - DNA, 25 bp, Homo sapien
atgaccctcaagacttttccagctc

SEQ ID NO: 4448575 - DNA, 25 bp, Homo sapien
taaatgagtaggatgaatgaccctc

SEQ ID NO: 4448576 - DNA, 25 bp, Homo sapien
tgccttcctccggaatggggttcca

SEQ ID NO: 4448577 - DNA, 25 bp, Homo sapien
cttgctgaacacccaacaaaactag

SEQ ID NO: 4448578 - DNA, 25 bp, Homo sapien
aactaggacctgaggaaggcccttg

SEQ ID NO: 4448579 - DNA, 25 bp, Homo sapien
ccaacaaaactaggacctgaggaag

SEQ ID NO: 4448580 - DNA, 25 bp, Homo sapien
gtcttcactccctagcactcgtgga

SEQ ID NO: 4448581 - DNA, 25 bp, Homo sapien
cctagcactcgtggagctgactggg

SEQ ID NO: 4448582 - DNA, 25 bp, Homo sapien
tctttctcctttagggtccatggag

SEQ ID NO: 4448583 - DNA, 25 bp, Homo sapien
tccatggagcagtccgctgcttcca

SEQ ID NO: 4448584 - DNA, 25 bp, Homo sapien
ctggctccaccaactccccaacagg

SEQ ID NO: 4448585 - DNA, 25 bp, Homo sapien
ctctggctccaccaactccccaaca

SEQ ID NO: 4448586 - DNA, 25 bp, Homo sapien
tggctccaccaactccccaacaggc

SEQ ID NO: 4448587 - DNA, 25 bp, Homo sapien
ctccaccaactccccaacaggcctc

SEQ ID NO: 4448588 - DNA, 25 bp, Homo sapien
ctaagcagtcttggtggaaacatca

SEQ ID NO: 4448589 - DNA, 25 bp, Homo sapien
ctcacgccctgtgccccctttcagg

SEQ ID NO: 4448590 - DNA, 25 bp, Homo sapien
cccctttcaggtgcccagagaagga

SEQ ID NO: 4448591 - DNA, 25 bp, Homo sapien
agctcagtgtctgcttcagccaggg

SEQ ID NO: 4448592 - DNA, 25 bp, Homo sapien
ggtttggttagctcacaggacttcc

SEQ ID NO: 4448593 - DNA, 25 bp, Homo sapien
gactcatactcaactcaactaggct

SEQ ID NO: 4448594 - DNA, 25 bp, Homo sapien
tatagtagccatgacatagcttgag

SEQ ID NO: 4448595 - DNA, 25 bp, Homo sapien
aactgctacttgtggacctcaccag

SEQ ID NO: 4448596 - DNA, 25 bp, Homo sapien
tcatgaaaatctgccactcagggtc

SEQ ID NO: 4448597 - DNA, 25 bp, Homo sapien
aaggcatcactttcctggatccagg

SEQ ID NO: 4448598 - DNA, 25 bp, Homo sapien
cagaatgccctgttcatgctgagca

SEQ ID NO: 4448599 - DNA, 25 bp, Homo sapien
taactggcccagaagctgattttca

SEQ ID NO: 4448600 - DNA, 25 bp, Homo sapien
caattaagatgatgcactaccttca

SEQ ID NO: 4448601 - DNA, 25 bp, Homo sapien
aattaagatgatgcactaccttcag

SEQ ID NO: 4448602 - DNA, 25 bp, Homo sapien
attaagatgatgcactaccttcaga

SEQ ID NO: 4448603 - DNA, 25 bp, Homo sapien
gggaaagcacgaatgcagttcctca

SEQ ID NO: 4448604 - DNA, 25 bp, Homo sapien
aggggaaagcacgaatgcagttcct

SEQ ID NO: 4448605 - DNA, 25 bp, Homo sapien
ggggaaagcacgaatgcagttcctc

SEQ ID NO: 4448606 - DNA, 25 bp, Homo sapien
gtcatttctactggtgtctaacctc

SEQ ID NO: 4448607 - DNA, 25 bp, Homo sapien
aaataatccaataatctctttggct

SEQ ID NO: 4448608 - DNA, 25 bp, Homo sapien
aatccaataatctctttggctgtgt

SEQ ID NO: 4448609 - DNA, 25 bp, Homo sapien
tgtcatttctactggtgtctaacct

SEQ ID NO: 4448610 - DNA, 25 bp, Homo sapien
tgttctgaagtaaaactgctcaggg

SEQ ID NO: 4448611 - DNA, 25 bp, Homo sapien
taaaactgctcagggcattaggtgg

SEQ ID NO: 4448612 - DNA, 25 bp, Homo sapien
tgtgcaggctctgaaaggtaaaggg

SEQ ID NO: 4448613 - DNA, 25 bp, Homo sapien
ctatggtgtatcactgagtgcagaa

SEQ ID NO: 4448614 - DNA, 25 bp, Homo sapien
ctctctttacgggagatacatggta

SEQ ID NO: 4448615 - DNA, 25 bp, Homo sapien
cactttgggcagctagagttttaaa

SEQ ID NO: 4448616 - DNA, 25 bp, Homo sapien
aaaggtaagtggactaaatgcttca

SEQ ID NO: 4448617 - DNA, 25 bp, Homo sapien
tatttaccctagtatatcaacaatt

SEQ ID NO: 4448618 - DNA, 25 bp, Homo sapien
tgaaggtggattgaaattcctcatc

SEQ ID NO: 4448619 - DNA, 25 bp, Homo sapien
cccagtttgatgaaggtggattgaa

SEQ ID NO: 4448620 - DNA, 25 bp, Homo sapien
tcaccagctgagtttccacctctgt

SEQ ID NO: 4448621 - DNA, 25 bp, Homo sapien
cttggatcttcaggttacagcttaa

SEQ ID NO: 4448622 - DNA, 25 bp, Homo sapien
tccaagtaatgcagtagtggcacat

SEQ ID NO: 4448623 - DNA, 25 bp, Homo sapien
aaggaaattttgactatgttgatcc

SEQ ID NO: 4448624 - DNA, 25 bp, Homo sapien
gaaattttgactatgttgatccaag

SEQ ID NO: 4448625 - DNA, 25 bp, Homo sapien
gtaatgcagtagtggcacatttgtt

SEQ ID NO: 4448626 - DNA, 25 bp, Homo sapien
tgacgacattgttgtttgacatact

SEQ ID NO: 4448627 - DNA, 25 bp, Homo sapien
tttgagatcattgagtttggatgac

SEQ ID NO: 4448628 - DNA, 25 bp, Homo sapien
cattgagtttggatgacgacattgt

SEQ ID NO: 4448629 - DNA, 25 bp, Homo sapien
gacatactgaccattgtagaattcc

SEQ ID NO: 4448630 - DNA, 25 bp, Homo sapien
ctccctgcagtagctaatgccgaaa

SEQ ID NO: 4448631 - DNA, 25 bp, Homo sapien
tctcctagaatatatcagagtcttg

SEQ ID NO: 4448632 - DNA, 25 bp, Homo sapien
tggctttgggtcgtttcattcttcc

SEQ ID NO: 4448633 - DNA, 25 bp, Homo sapien
cagagtcttgattacatagaggata

SEQ ID NO: 4448634 - DNA, 25 bp, Homo sapien
tcccttggaggacacttctacatgg

SEQ ID NO: 4448635 - DNA, 25 bp, Homo sapien
cctggctgctgcgttttgcaatgtc

SEQ ID NO: 4448636 - DNA, 25 bp, Homo sapien
ggcttcaacctggatagattcccaa

SEQ ID NO: 4448637 - DNA, 25 bp, Homo sapien
tctacatgggaacaattgcagctgt

SEQ ID NO: 4448638 - DNA, 25 bp, Homo sapien
ctggctaacgctgccgcaaaaccaa

SEQ ID NO: 4448639 - DNA, 25 bp, Homo sapien
tcagatcctggctaacgctgccgca

SEQ ID NO: 4448640 - DNA, 25 bp, Homo sapien
cccagaattgcctcagatcctggct

SEQ ID NO: 4448641 - DNA, 25 bp, Homo sapien
accaaccgcgctgcccttgaaacat

SEQ ID NO: 4448642 - DNA, 25 bp, Homo sapien
ctcaccacctaacccgctgcttcca

SEQ ID NO: 4448643 - DNA, 25 bp, Homo sapien
cctaacccgctgcttccactcagct

SEQ ID NO: 4448644 - DNA, 25 bp, Homo sapien
agggtgaacctatcaagcaccctgg

SEQ ID NO: 4448645 - DNA, 25 bp, Homo sapien
gtgaacctatcaagcaccctggacc

SEQ ID NO: 4448646 - DNA, 25 bp, Homo sapien
ctcagcgtgtctgggtgcgaggcat

SEQ ID NO: 4448647 - DNA, 25 bp, Homo sapien
gcggctcgcgggtcactgatcgttc

SEQ ID NO: 4448648 - DNA, 25 bp, Homo sapien
cacagctgaacaagaagtcggcggc

SEQ ID NO: 4448649 - DNA, 25 bp, Homo sapien
gtgtctgggtgcgaggcatcacagc

SEQ ID NO: 4448650 - DNA, 25 bp, Homo sapien
cgcgcccagcctcatcaatatttat

SEQ ID NO: 4448651 - DNA, 25 bp, Homo sapien
gcccagcctcatcaatatttattag

SEQ ID NO: 4448652 - DNA, 25 bp, Homo sapien
cagcctcatcaatatttattagtgg

SEQ ID NO: 4448653 - DNA, 25 bp, Homo sapien
cgcccagcctcatcaatatttatta

SEQ ID NO: 4448654 - DNA, 25 bp, Homo sapien
gcaggcacagccacgatctaaatct

SEQ ID NO: 4448655 - DNA, 25 bp, Homo sapien
taaaacggtcgtgttcactgggcat

SEQ ID NO: 4448656 - DNA, 25 bp, Homo sapien
aacaataatggcagttcgggttgac

SEQ ID NO: 4448657 - DNA, 25 bp, Homo sapien
gggctacggaagtcatgagaaaaac

SEQ ID NO: 4448658 - DNA, 25 bp, Homo sapien
ttattttggcattagctaccgcaga

SEQ ID NO: 4448659 - DNA, 25 bp, Homo sapien
gaaaaactgtagcattatcttctat

SEQ ID NO: 4448660 - DNA, 25 bp, Homo sapien
tggcattagctaccgcagagagata

SEQ ID NO: 4448661 - DNA, 25 bp, Homo sapien
tttggcattagctaccgcagagaga

SEQ ID NO: 4448662 - DNA, 25 bp, Homo sapien
atcagaaaatgttggtcttgttccc

SEQ ID NO: 4448663 - DNA, 25 bp, Homo sapien
cagaaaatgttggtcttgttcccaa

SEQ ID NO: 4448664 - DNA, 25 bp, Homo sapien
tcagaaaatgttggtcttgttccca

SEQ ID NO: 4448665 - DNA, 25 bp, Homo sapien
tatgtgtgctgccgaagcaagcaca

SEQ ID NO: 4448666 - DNA, 25 bp, Homo sapien
tgctagttcactgttttccctaagg

SEQ ID NO: 4448667 - DNA, 25 bp, Homo sapien
tatttcatttggtgttacttcatca

SEQ ID NO: 4448668 - DNA, 25 bp, Homo sapien
tttgtgctctgttgctagttcactg

SEQ ID NO: 4448669 - DNA, 25 bp, Homo sapien
tttcatttggtgttacttcatcatg

SEQ ID NO: 4448670 - DNA, 25 bp, Homo sapien
cctctgaatagttccagttttggta

SEQ ID NO: 4448671 - DNA, 25 bp, Homo sapien
ggagttcttataaaatgcttttctg

SEQ ID NO: 4448672 - DNA, 25 bp, Homo sapien
ctacaactggagttcttataaaatg

SEQ ID NO: 4448673 - DNA, 25 bp, Homo sapien
agttcttataaaatgcttttctggg

SEQ ID NO: 4448674 - DNA, 25 bp, Homo sapien
acaactggagttcttataaaatgct

SEQ ID NO: 4448675 - DNA, 25 bp, Homo sapien
taattctgtagagggaagtacatct

SEQ ID NO: 4448676 - DNA, 25 bp, Homo sapien
gggtaattctgtagagggaagtaca

SEQ ID NO: 4448677 - DNA, 25 bp, Homo sapien
tgttaccatgttgttaactgggtaa

SEQ ID NO: 4448678 - DNA, 25 bp, Homo sapien
aactgggtaattctgtagagggaag

SEQ ID NO: 4448679 - DNA, 25 bp, Homo sapien
catgatatgccaaatatcctgaggt

SEQ ID NO: 4448680 - DNA, 25 bp, Homo sapien
tcttcatggcatcaattgatatata

SEQ ID NO: 4448681 - DNA, 25 bp, Homo sapien
catgtagctccccaaggaatttctt

SEQ ID NO: 4448682 - DNA, 25 bp, Homo sapien
caggaatgaagtcatgtagctcccc

SEQ ID NO: 4448683 - DNA, 25 bp, Homo sapien
gtaattcagaatgcaactagcatcc

SEQ ID NO: 4448684 - DNA, 25 bp, Homo sapien
tactcattaacaactgtgcattgag

SEQ ID NO: 4448685 - DNA, 25 bp, Homo sapien
ttagcattcacagtattcaatctag

SEQ ID NO: 4448686 - DNA, 25 bp, Homo sapien
tattattagaaaccatccaacatga

SEQ ID NO: 4448687 - DNA, 25 bp, Homo sapien
aggcagtaggcaccagaccagcgct

SEQ ID NO: 4448688 - DNA, 25 bp, Homo sapien
ccagaccagcgctctcaaacgttag

SEQ ID NO: 4448689 - DNA, 25 bp, Homo sapien
gctgccttgaaaaccgcctgcagag

SEQ ID NO: 4448690 - DNA, 25 bp, Homo sapien
tgcaagcacacacggctgccttgaa

SEQ ID NO: 4448691 - DNA, 25 bp, Homo sapien
caggggcgggactaggcttcctcct

SEQ ID NO: 4448692 - DNA, 25 bp, Homo sapien
cgccgcacgcaggggcgggactagg

SEQ ID NO: 4448693 - DNA, 25 bp, Homo sapien
cgcacgcaggggcgggactaggctt

SEQ ID NO: 4448694 - DNA, 25 bp, Homo sapien
acgcaggggcgggactaggcttcct

SEQ ID NO: 4448695 - DNA, 25 bp, Homo sapien
agtgcggcctggaaggcgcgggacg

SEQ ID NO: 4448696 - DNA, 25 bp, Homo sapien
tggaaggcgcgggacgtttggtcgc

SEQ ID NO: 4448697 - DNA, 25 bp, Homo sapien
cgggacgtttggtcgctctggtggc

SEQ ID NO: 4448698 - DNA, 25 bp, Homo sapien
cttttggctctggagtgcggcctgg

SEQ ID NO: 4448699 - DNA, 25 bp, Homo sapien
gcaagtcccccggtccgtgcaccac

SEQ ID NO: 4448700 - DNA, 25 bp, Homo sapien
cgtgcaccaccagggaaaggttgtt

SEQ ID NO: 4448701 - DNA, 25 bp, Homo sapien
ccggtccgtgcaccaccagggaaag

SEQ ID NO: 4448702 - DNA, 25 bp, Homo sapien
tccgtgcaccaccagggaaaggttg

SEQ ID NO: 4448703 - DNA, 25 bp, Homo sapien
tatcaagatccacaagtctggcaca

SEQ ID NO: 4448704 - DNA, 25 bp, Homo sapien
agggagctatcaagatccacaagtc

SEQ ID NO: 4448705 - DNA, 25 bp, Homo sapien
gagctatcaagatccacaagtctgg

SEQ ID NO: 4448706 - DNA, 25 bp, Homo sapien
gctatcaagatccacaagtctggca

SEQ ID NO: 4448707 - DNA, 25 bp, Homo sapien
tgataccacactcggggtctgggtt

SEQ ID NO: 4448708 - DNA, 25 bp, Homo sapien
cagtgataccacactcggggtctgg

SEQ ID NO: 4448709 - DNA, 25 bp, Homo sapien
gcagtgataccacactcggggtctg

SEQ ID NO: 4448710 - DNA, 25 bp, Homo sapien
gtgataccacactcggggtctgggt

SEQ ID NO: 4448711 - DNA, 25 bp, Homo sapien
tatggtttaagtgtccgtcctcagg

SEQ ID NO: 4448712 - DNA, 25 bp, Homo sapien
tatagcattttgacgtgacacagca

SEQ ID NO: 4448713 - DNA, 25 bp, Homo sapien
tgtattaaagttcccagcacatgcc

SEQ ID NO: 4448714 - DNA, 25 bp, Homo sapien
aaaattggcccttcattgtggacag

SEQ ID NO: 4448715 - DNA, 25 bp, Homo sapien
cagggcgcaagagaccctgtttttc

SEQ ID NO: 4448716 - DNA, 25 bp, Homo sapien
tgcagggcgcaagagaccctgtttt

SEQ ID NO: 4448717 - DNA, 25 bp, Homo sapien
cctgcagggcgcaagagaccctgtt

SEQ ID NO: 4448718 - DNA, 25 bp, Homo sapien
acacctgcagggcgcaagagaccct

SEQ ID NO: 4448719 - DNA, 25 bp, Homo sapien
gtgtgagttttccagaatatttcac

SEQ ID NO: 4448720 - DNA, 25 bp, Homo sapien
catagttgtgtgagttttccagaat

SEQ ID NO: 4448721 - DNA, 25 bp, Homo sapien
agttttccagaatatttcacttcaa

SEQ ID NO: 4448722 - DNA, 25 bp, Homo sapien
tatttcacttcaagtcagaaataca

SEQ ID NO: 4448723 - DNA, 25 bp, Homo sapien
ctaaacttcccatgtggcatttgag

SEQ ID NO: 4448724 - DNA, 25 bp, Homo sapien
ccttgggaacacataagacctgcat

SEQ ID NO: 4448725 - DNA, 25 bp, Homo sapien
tgaggggccccttgggaacacataa

SEQ ID NO: 4448726 - DNA, 25 bp, Homo sapien
tcctaaacttcccatgtggcatttg

SEQ ID NO: 4448727 - DNA, 25 bp, Homo sapien
ctggttcagggataggatagttctc

SEQ ID NO: 4448728 - DNA, 25 bp, Homo sapien
ttctgtgcttggttgattagggcag

SEQ ID NO: 4448729 - DNA, 25 bp, Homo sapien
tttctgtgcttggttgattagggca

SEQ ID NO: 4448730 - DNA, 25 bp, Homo sapien
tcaccatagcactcagtttgtacat

SEQ ID NO: 4448731 - DNA, 25 bp, Homo sapien
tgtacatgagaaacccaaagctggg

SEQ ID NO: 4448732 - DNA, 25 bp, Homo sapien
cagatgccaccttgggcgtcagcat

SEQ ID NO: 4448733 - DNA, 25 bp, Homo sapien
gcatgtcagctaagccccacaggct

SEQ ID NO: 4448734 - DNA, 25 bp, Homo sapien
tgtgaggtaggacaaagtgggaaag

SEQ ID NO: 4448735 - DNA, 25 bp, Homo sapien
gacctgactgtctaggtgtgagagg

SEQ ID NO: 4448736 - DNA, 25 bp, Homo sapien
gagggtgagtatctacagacactct

SEQ ID NO: 4448737 - DNA, 25 bp, Homo sapien
aaaggggacctgactgtctaggtgt

SEQ ID NO: 4448738 - DNA, 25 bp, Homo sapien
ctttcagtagcaaagctgtggatct

SEQ ID NO: 4448739 - DNA, 25 bp, Homo sapien
tcagtagcaaagctgtggatctacc

SEQ ID NO: 4448740 - DNA, 25 bp, Homo sapien
tgatgttcacccagaagctgcggtt

SEQ ID NO: 4448741 - DNA, 25 bp, Homo sapien
gcctttgatctgatgttcacccaga

SEQ ID NO: 4448742 - DNA, 25 bp, Homo sapien
acttacaagtcgataacacaactga

SEQ ID NO: 4448743 - DNA, 25 bp, Homo sapien
cacttacaagtcgataacacaactg

SEQ ID NO: 4448744 - DNA, 25 bp, Homo sapien
cttacaagtcgataacacaactgac

SEQ ID NO: 4448745 - DNA, 25 bp, Homo sapien
caacagaatgcatcctcagcaagac

SEQ ID NO: 4448746 - DNA, 25 bp, Homo sapien
gattccaacagaatgcatcctcagc

SEQ ID NO: 4448747 - DNA, 25 bp, Homo sapien
tccaacagaatgcatcctcagcaag

SEQ ID NO: 4448748 - DNA, 25 bp, Homo sapien
cagattccaacagaatgcatcctca

SEQ ID NO: 4448749 - DNA, 25 bp, Homo sapien
tgatcccactttttcgactgttccc

SEQ ID NO: 4448750 - DNA, 25 bp, Homo sapien
ttaggtgctttaccgatgatcccac

SEQ ID NO: 4448751 - DNA, 25 bp, Homo sapien
aattcgaccatactcccagtagtgg

SEQ ID NO: 4448752 - DNA, 25 bp, Homo sapien
tgttcccgaagcttcatgtcccagc

SEQ ID NO: 4448753 - DNA, 25 bp, Homo sapien
actaacgcaagggtgaaatttggct

SEQ ID NO: 4448754 - DNA, 25 bp, Homo sapien
aagtcctccctcttaatgagtgaag

SEQ ID NO: 4448755 - DNA, 25 bp, Homo sapien
gattgtttggaagctaagtcctccc

SEQ ID NO: 4448756 - DNA, 25 bp, Homo sapien
tctcctcttgcacaggattttcatg

SEQ ID NO: 4448757 - DNA, 25 bp, Homo sapien
gctgccatgttatcatatcgctcag

SEQ ID NO: 4448758 - DNA, 25 bp, Homo sapien
ctgctcagccagtttggccttctga

SEQ ID NO: 4448759 - DNA, 25 bp, Homo sapien
gttatcatatcgctcagcctgctca

SEQ ID NO: 4448760 - DNA, 25 bp, Homo sapien
gcaggctgccatgttatcatatcgc

SEQ ID NO: 4448761 - DNA, 25 bp, Homo sapien
gttcaatacttgagatgacccccca

SEQ ID NO: 4448762 - DNA, 25 bp, Homo sapien
tttgttcaatacttgagatgacccc

SEQ ID NO: 4448763 - DNA, 25 bp, Homo sapien
caatacttgagatgaccccccaaga

SEQ ID NO: 4448764 - DNA, 25 bp, Homo sapien
tcttttgttcaatacttgagatgac

SEQ ID NO: 4448765 - DNA, 25 bp, Homo sapien
caggcaagtaacagtagtacttgcc

SEQ ID NO: 4448766 - DNA, 25 bp, Homo sapien
ggcaagtaacagtagtacttgcctt

SEQ ID NO: 4448767 - DNA, 25 bp, Homo sapien
aggcaagtaacagtagtacttgcct

SEQ ID NO: 4448768 - DNA, 25 bp, Homo sapien
tcaggcaagtaacagtagtacttgc

SEQ ID NO: 4448769 - DNA, 25 bp, Homo sapien
tattagtgttttgtctttgtatgac

SEQ ID NO: 4448770 - DNA, 25 bp, Homo sapien
gaatctcataagagaacacagagaa

SEQ ID NO: 4448771 - DNA, 25 bp, Homo sapien
ttaggtatctgatgtccacaacgtc

SEQ ID NO: 4448772 - DNA, 25 bp, Homo sapien
taattgcattattagtgttttgtct

SEQ ID NO: 4448773 - DNA, 25 bp, Homo sapien
cagttaagagtggttagtgcagcca

SEQ ID NO: 4448774 - DNA, 25 bp, Homo sapien
gaaggtttctggttgaggctacacc

SEQ ID NO: 4448775 - DNA, 25 bp, Homo sapien
ccaggcctctgttggtcagttaaga

SEQ ID NO: 4448776 - DNA, 25 bp, Homo sapien
tctgtaagactcagaggacaggctt

SEQ ID NO: 4448777 - DNA, 25 bp, Homo sapien
taaaacatgcccgtagttgctcagg

SEQ ID NO: 4448778 - DNA, 25 bp, Homo sapien
gtggaggcttgcttaaaacatgccc

SEQ ID NO: 4448779 - DNA, 25 bp, Homo sapien
ggttctctgtgtaatcagtgcactc

SEQ ID NO: 4448780 - DNA, 25 bp, Homo sapien
ctctgtgtaatcagtgcactcccag

SEQ ID NO: 4448781 - DNA, 25 bp, Homo sapien
tcatcattttctcggggagcaccag

SEQ ID NO: 4448782 - DNA, 25 bp, Homo sapien
tcggcccatcttgcagaattcatca

SEQ ID NO: 4448783 - DNA, 25 bp, Homo sapien
ggtgacagattgtatcggcccatct

SEQ ID NO: 4448784 - DNA, 25 bp, Homo sapien
tgtaacaaaaggctgcattgtgctt

SEQ ID NO: 4448785 - DNA, 25 bp, Homo sapien
gcaggcatggatccccacagaaagt

SEQ ID NO: 4448786 - DNA, 25 bp, Homo sapien
ttgtgtcccagggtaactccgcctc

SEQ ID NO: 4448787 - DNA, 25 bp, Homo sapien
cacacacaaggaccttgtgtcccag

SEQ ID NO: 4448788 - DNA, 25 bp, Homo sapien
ctcaaaggtgacattgtcaggaagc

SEQ ID NO: 4448789 - DNA, 25 bp, Homo sapien
agcaaagtgaccatcccgattggcc

SEQ ID NO: 4448790 - DNA, 25 bp, Homo sapien
ccttggctttggacaatcgggtagc

SEQ ID NO: 4448791 - DNA, 25 bp, Homo sapien
tcctggcgatttcctgagggctctc

SEQ ID NO: 4448792 - DNA, 25 bp, Homo sapien
gaggactaaatcagccccaatctcc

SEQ ID NO: 4448793 - DNA, 25 bp, Homo sapien
ttggacaatcgggtagcagacagat

SEQ ID NO: 4448794 - DNA, 25 bp, Homo sapien
cgtgcactcgatggtgacttccggc

SEQ ID NO: 4448795 - DNA, 25 bp, Homo sapien
cactcgatggtgacttccggcttgc

SEQ ID NO: 4448796 - DNA, 25 bp, Homo sapien
cccgtgcactcgatggtgacttccg

SEQ ID NO: 4448797 - DNA, 25 bp, Homo sapien
tcgatggtgacttccggcttgcacc

SEQ ID NO: 4448798 - DNA, 25 bp, Homo sapien
cacatacaattaaggcatggttccc

SEQ ID NO: 4448799 - DNA, 25 bp, Homo sapien
taagtgactaaagactgcagttttc

SEQ ID NO: 4448800 - DNA, 25 bp, Homo sapien
aaatatgatcatgaagccaacccca

SEQ ID NO: 4448801 - DNA, 25 bp, Homo sapien
agtcagctgtgaccctggaaaatca

SEQ ID NO: 4448802 - DNA, 25 bp, Homo sapien
ctgccaacttcccataagtggctgg

SEQ ID NO: 4448803 - DNA, 25 bp, Homo sapien
ttcctgccaacttcccataagtggc

SEQ ID NO: 4448804 - DNA, 25 bp, Homo sapien
taagtggctggtgggtcgctgaggg

SEQ ID NO: 4448805 - DNA, 25 bp, Homo sapien
ccaacttcccataagtggctggtgg

SEQ ID NO: 4448806 - DNA, 25 bp, Homo sapien
cacaaatccctcagcataaaatggt

SEQ ID NO: 4448807 - DNA, 25 bp, Homo sapien
ggcctgacttggcttgcctcaaaca

SEQ ID NO: 4448808 - DNA, 25 bp, Homo sapien
tggcgtacagtagggcttggaacct

SEQ ID NO: 4448809 - DNA, 25 bp, Homo sapien
cctagcatggttgttcgtgccctcc

SEQ ID NO: 4448810 - DNA, 25 bp, Homo sapien
agctgaaactcacgacactgccaag

SEQ ID NO: 4448811 - DNA, 25 bp, Homo sapien
acagatccattgttcctctctgagc

SEQ ID NO: 4448812 - DNA, 25 bp, Homo sapien
tgagcttcggcttctttttgcccct

SEQ ID NO: 4448813 - DNA, 25 bp, Homo sapien
cacatggcgaccactgcctatgaca

SEQ ID NO: 4448814 - DNA, 25 bp, Homo sapien
gttccccacttggagtgggtcacag

SEQ ID NO: 4448815 - DNA, 25 bp, Homo sapien
gtttatctgccttatcagttcccca

SEQ ID NO: 4448816 - DNA, 25 bp, Homo sapien
tcaacagtatgagccataatgggtt

SEQ ID NO: 4448817 - DNA, 25 bp, Homo sapien
cttccttgaatgtttatctgcctta

SEQ ID NO: 4448818 - DNA, 25 bp, Homo sapien
acgcccttgatatccacctcccgga

SEQ ID NO: 4448819 - DNA, 25 bp, Homo sapien
cagtaggggtacggtggtcatctca

SEQ ID NO: 4448820 - DNA, 25 bp, Homo sapien
gaaacacgcccttgatatccacctc

SEQ ID NO: 4448821 - DNA, 25 bp, Homo sapien
gcagtatcgaaacacgcccttgata

SEQ ID NO: 4448822 - DNA, 25 bp, Homo sapien
agggctaaggaacggaagccacagg

SEQ ID NO: 4448823 - DNA, 25 bp, Homo sapien
ctagggctaaggaacggaagccaca

SEQ ID NO: 4448824 - DNA, 25 bp, Homo sapien
gggctaaggaacggaagccacagga

SEQ ID NO: 4448825 - DNA, 25 bp, Homo sapien
tagggctaaggaacggaagccacag

SEQ ID NO: 4448826 - DNA, 25 bp, Homo sapien
gttacagcctctaaagccaggagta

SEQ ID NO: 4448827 - DNA, 25 bp, Homo sapien
ggagttacagcctctaaagccagga

SEQ ID NO: 4448828 - DNA, 25 bp, Homo sapien
agccaggagtaagggacactgctgg

SEQ ID NO: 4448829 - DNA, 25 bp, Homo sapien
gaaaactggcgccctgatgagggca

SEQ ID NO: 4448830 - DNA, 25 bp, Homo sapien
ccacccgctcactctgccacgtctg

SEQ ID NO: 4448831 - DNA, 25 bp, Homo sapien
gccacgtctgccatggagcctagaa

SEQ ID NO: 4448832 - DNA, 25 bp, Homo sapien
tgccacgtctgccatggagcctaga

SEQ ID NO: 4448833 - DNA, 25 bp, Homo sapien
acgtctgccatggagcctagaattc

SEQ ID NO: 4448834 - DNA, 25 bp, Homo sapien
aagcatcgaaatcgccactggccac

SEQ ID NO: 4448835 - DNA, 25 bp, Homo sapien
gggttttacattcacagacttggac

SEQ ID NO: 4448836 - DNA, 25 bp, Homo sapien
cttggacgcaagcatcgaaatcgcc

SEQ ID NO: 4448837 - DNA, 25 bp, Homo sapien
tacattcacagacttggacgcaagc

SEQ ID NO: 4448838 - DNA, 25 bp, Homo sapien
tcagggattctggtcactggggtca

SEQ ID NO: 4448839 - DNA, 25 bp, Homo sapien
agggattctggtcactggggtcaca

SEQ ID NO: 4448840 - DNA, 25 bp, Homo sapien
cagggattctggtcactggggtcac

SEQ ID NO: 4448841 - DNA, 25 bp, Homo sapien
gggattctggtcactggggtcacac

SEQ ID NO: 4448842 - DNA, 25 bp, Homo sapien
ggtgaggtccacaagtagcagtttc

SEQ ID NO: 4448843 - DNA, 25 bp, Homo sapien
ccagaccctgagtggcagattttca

SEQ ID NO: 4448844 - DNA, 25 bp, Homo sapien
ggaagtcctgtgagctaaccaaacc

SEQ ID NO: 4448845 - DNA, 25 bp, Homo sapien
tctaaactggaagtgctgacaagcc

SEQ ID NO: 4448846 - DNA, 25 bp, Homo sapien
aaggtcatggctttcccaggttaca

SEQ ID NO: 4448847 - DNA, 25 bp, Homo sapien
caaagtcacaagttggcatgatgcg

SEQ ID NO: 4448848 - DNA, 25 bp, Homo sapien
caatctgaaagaatcgggcacaagg

SEQ ID NO: 4448849 - DNA, 25 bp, Homo sapien
ggaattaaaggctatagctcaagct

SEQ ID NO: 4448850 - DNA, 25 bp, Homo sapien
gcttccttctctcttaaagccctgg

SEQ ID NO: 4448851 - DNA, 25 bp, Homo sapien
tcttaaagccctggctgaagcagac

SEQ ID NO: 4448852 - DNA, 25 bp, Homo sapien
agcagacactggagctccttctctg

SEQ ID NO: 4448853 - DNA, 25 bp, Homo sapien
aagccctggctgaagcagacactgg

SEQ ID NO: 4448854 - DNA, 25 bp, Homo sapien
gcagacattctctggtagagcctct

SEQ ID NO: 4448855 - DNA, 25 bp, Homo sapien
cagcagacattctctggtagagcct

SEQ ID NO: 4448856 - DNA, 25 bp, Homo sapien
gacattctctggtagagcctctgcc

SEQ ID NO: 4448857 - DNA, 25 bp, Homo sapien
cagacattctctggtagagcctctg

SEQ ID NO: 4448858 - DNA, 25 bp, Homo sapien
cttcacgaggcatgcataggctgca

SEQ ID NO: 4448859 - DNA, 25 bp, Homo sapien
cacacactgacttctacctagggct

SEQ ID NO: 4448860 - DNA, 25 bp, Homo sapien
acctaggttcaaggtacagaggcca

SEQ ID NO: 4448861 - DNA, 25 bp, Homo sapien
taggctgcaggaagtgcctccaaga

SEQ ID NO: 4448862 - DNA, 25 bp, Homo sapien
tttcagtcaacactgaggtccccac

SEQ ID NO: 4448863 - DNA, 25 bp, Homo sapien
tgggaaggaccccacaggcaacctg

SEQ ID NO: 4448864 - DNA, 25 bp, Homo sapien
cagtgcctggcacttgattcacgct

SEQ ID NO: 4448865 - DNA, 25 bp, Homo sapien
cagtcagctccacgagtgctaggga

SEQ ID NO: 4448866 - DNA, 25 bp, Homo sapien
taacagtggcatgtgaaccaaaatg

SEQ ID NO: 4448867 - DNA, 25 bp, Homo sapien
ccagtttcttcaacataacagtggc

SEQ ID NO: 4448868 - DNA, 25 bp, Homo sapien
tatccagaagacaaaggacccagtt

SEQ ID NO: 4448869 - DNA, 25 bp, Homo sapien
gcatgcaatatgtttagatcctgat

SEQ ID NO: 4448870 - DNA, 25 bp, Homo sapien
gagcgagtcaggctgctgaattctg

SEQ ID NO: 4448871 - DNA, 25 bp, Homo sapien
ctattgcagaatgcctgtagtaggg

SEQ ID NO: 4448872 - DNA, 25 bp, Homo sapien
tggcagcctcaaggttagctgaagc

SEQ ID NO: 4448873 - DNA, 25 bp, Homo sapien
tcccaaccatgtcagtgagctcagg

SEQ ID NO: 4448874 - DNA, 25 bp, Homo sapien
caacacccagtgtgatatggaaaca

SEQ ID NO: 4448875 - DNA, 25 bp, Homo sapien
tggaaaacaagagccgcacctcatc

SEQ ID NO: 4448876 - DNA, 25 bp, Homo sapien
ctgccaacacccagtgtgatatgga

SEQ ID NO: 4448877 - DNA, 25 bp, Homo sapien
agagccgcacctcatcaggactcag

SEQ ID NO: 4448878 - DNA, 25 bp, Homo sapien
tgctgactggactacgttcctcttc

SEQ ID NO: 4448879 - DNA, 25 bp, Homo sapien
cctgctgactggactacgttcctct

SEQ ID NO: 4448880 - DNA, 25 bp, Homo sapien
ctgctgactggactacgttcctctt

SEQ ID NO: 4448881 - DNA, 25 bp, Homo sapien
cttcctggggctttatgaccaactc

SEQ ID NO: 4448882 - DNA, 25 bp, Homo sapien
tgggttcagaaagcgaggtcattgc

SEQ ID NO: 4448883 - DNA, 25 bp, Homo sapien
caactctttgagaagtgggctagaa

SEQ ID NO: 4448884 - DNA, 25 bp, Homo sapien
tcaggcagctattgggtgatacctt

SEQ ID NO: 4448885 - DNA, 25 bp, Homo sapien
gatagctccccacatctctaattga

SEQ ID NO: 4448886 - DNA, 25 bp, Homo sapien
gatgcttagaacctggacagcccga

SEQ ID NO: 4448887 - DNA, 25 bp, Homo sapien
tttgcttggactgacatttgaggga

SEQ ID NO: 4448888 - DNA, 25 bp, Homo sapien
tgacttccacaaaatcgatgcgttg

SEQ ID NO: 4448889 - DNA, 25 bp, Homo sapien
gcacctctccgttaaggaagcgtgg

SEQ ID NO: 4448890 - DNA, 25 bp, Homo sapien
tgcacctctccgttaaggaagcgtg

SEQ ID NO: 4448891 - DNA, 25 bp, Homo sapien
cacctctccgttaaggaagcgtgga

SEQ ID NO: 4448892 - DNA, 25 bp, Homo sapien
cctctccgttaaggaagcgtggagg

SEQ ID NO: 4448893 - DNA, 25 bp, Homo sapien
ctttgcgtacaaggctgggaccgag

SEQ ID NO: 4448894 - DNA, 25 bp, Homo sapien
ggagagcgcgtccttggcgtctctt

SEQ ID NO: 4448895 - DNA, 25 bp, Homo sapien
ccgagtgctgcacgcaggcgggcag

SEQ ID NO: 4448896 - DNA, 25 bp, Homo sapien
tggcgtctctttgcgtacaaggctg

SEQ ID NO: 4448897 - DNA, 25 bp, Homo sapien
gatgagcagtggaacgctgaagcct

SEQ ID NO: 4448898 - DNA, 25 bp, Homo sapien
gctgctagagccaaaaacactagaa

SEQ ID NO: 4448899 - DNA, 25 bp, Homo sapien
taaaaaggcagtacgccgttccaca

SEQ ID NO: 4448900 - DNA, 25 bp, Homo sapien
acggatccccggcaagatgagcagg

SEQ ID NO: 4448901 - DNA, 25 bp, Homo sapien
agtctaagacaatgcacccagttgg

SEQ ID NO: 4448902 - DNA, 25 bp, Homo sapien
caacttctaatccaatgtgggagtc

SEQ ID NO: 4448903 - DNA, 25 bp, Homo sapien
gaactgaaaaatgcacaacctaggt

SEQ ID NO: 4448904 - DNA, 25 bp, Homo sapien
gaaaagctgggtcctcccagaactg

SEQ ID NO: 4448905 - DNA, 25 bp, Homo sapien
tgcttggtgaggctcagtgagtcca

SEQ ID NO: 4448906 - DNA, 25 bp, Homo sapien
gctgtctggcgcctggtcctggttc

SEQ ID NO: 4448907 - DNA, 25 bp, Homo sapien
gaagtgctaggcacgcaggggtcac

SEQ ID NO: 4448908 - DNA, 25 bp, Homo sapien
accttcactcccctagctgtctggc

SEQ ID NO: 4448909 - DNA, 25 bp, Homo sapien
tttctgatattttgtgaccacgcac

SEQ ID NO: 4448910 - DNA, 25 bp, Homo sapien
tgcaagtccctctgggctactggca

SEQ ID NO: 4448911 - DNA, 25 bp, Homo sapien
ttaggcacgcttttcctgcaagtcc

SEQ ID NO: 4448912 - DNA, 25 bp, Homo sapien
ataggcacccgggtcaggcctgagc

SEQ ID NO: 4448913 - DNA, 25 bp, Homo sapien
caatttctgcgcctatgaacagact

SEQ ID NO: 4448914 - DNA, 25 bp, Homo sapien
aagaactctcaccaaccaaaaccag

SEQ ID NO: 4448915 - DNA, 25 bp, Homo sapien
gaacagactgagaagaactctcacc

SEQ ID NO: 4448916 - DNA, 25 bp, Homo sapien
tttctgcgcctatgaacagactgag

SEQ ID NO: 4448917 - DNA, 25 bp, Homo sapien
tctccccatgggctgcaccacacac

SEQ ID NO: 4448918 - DNA, 25 bp, Homo sapien
ctccccatgggctgcaccacacact

SEQ ID NO: 4448919 - DNA, 25 bp, Homo sapien
ccgtcctctccccatgggctgcacc

SEQ ID NO: 4448920 - DNA, 25 bp, Homo sapien
tcctctccccatgggctgcaccaca

SEQ ID NO: 4448921 - DNA, 25 bp, Homo sapien
gtgtaatattaatgccctccaggcc

SEQ ID NO: 4448922 - DNA, 25 bp, Homo sapien
agcagacggacacgggctgtaacgc

SEQ ID NO: 4448923 - DNA, 25 bp, Homo sapien
ggatgtgttggtgttcactgtaccc

SEQ ID NO: 4448924 - DNA, 25 bp, Homo sapien
cgcgcgctgcgctgaaggctttgta

SEQ ID NO: 4448925 - DNA, 25 bp, Homo sapien
ctgcccgcggtcggagacctcgcaa

SEQ ID NO: 4448926 - DNA, 25 bp, Homo sapien
tctttcagacgccaggtgaactgct

SEQ ID NO: 4448927 - DNA, 25 bp, Homo sapien
tactcggtgtgaacttctccgccag

SEQ ID NO: 4448928 - DNA, 25 bp, Homo sapien
tccgcggcgtaattctctttcagac

SEQ ID NO: 4448929 - DNA, 25 bp, Homo sapien
gaactgctcgttgtagtcaatggtc

SEQ ID NO: 4448930 - DNA, 25 bp, Homo sapien
ccgctgtgagcgggcttctcccagc

SEQ ID NO: 4448931 - DNA, 25 bp, Homo sapien
gacccgctgtgagcgggcttctccc

SEQ ID NO: 4448932 - DNA, 25 bp, Homo sapien
gggacccgctgtgagcgggcttctc

SEQ ID NO: 4448933 - DNA, 25 bp, Homo sapien
gggttcccacagctgcgctcttctt

SEQ ID NO: 4448934 - DNA, 25 bp, Homo sapien
tcagcagtgccaggcctccgtagag

SEQ ID NO: 4448935 - DNA, 25 bp, Homo sapien
gcagcacgttggagaggagccagaa

SEQ ID NO: 4448936 - DNA, 25 bp, Homo sapien
ttgccagcgtgacccagaaggcggc

SEQ ID NO: 4448937 - DNA, 25 bp, Homo sapien
gaggccaaggcgaagaccccgaaga

SEQ ID NO: 4448938 - DNA, 25 bp, Homo sapien
cggggcccattctctcggtcctcac

SEQ ID NO: 4448939 - DNA, 25 bp, Homo sapien
ccggggcccattctctcggtcctca

SEQ ID NO: 4448940 - DNA, 25 bp, Homo sapien
tggggatcgaaagaaaggagggcat

SEQ ID NO: 4448941 - DNA, 25 bp, Homo sapien
ggggatcgaaagaaaggagggcatg

SEQ ID NO: 4448942 - DNA, 25 bp, Homo sapien
gtggggatcgaaagaaaggagggca

SEQ ID NO: 4448943 - DNA, 25 bp, Homo sapien
cagtccttggcgctttggtccagaa

SEQ ID NO: 4448944 - DNA, 25 bp, Homo sapien
gctgggccgaacatactggagactc

SEQ ID NO: 4448945 - DNA, 25 bp, Homo sapien
ttatttacagatcgccccaggagac

SEQ ID NO: 4448946 - DNA, 25 bp, Homo sapien
tcgccgaggataagaggtgagcccc

SEQ ID NO: 4448947 - DNA, 25 bp, Homo sapien
tggagtcgacgcagagaatcaggtt

SEQ ID NO: 4448948 - DNA, 25 bp, Homo sapien
gctacataagattgcaagacttgcc

SEQ ID NO: 4448949 - DNA, 25 bp, Homo sapien
gatgctagctctggtagggtccctc

SEQ ID NO: 4448950 - DNA, 25 bp, Homo sapien
gagggcgcccctattactctggagt

SEQ ID NO: 4448951 - DNA, 25 bp, Homo sapien
tcccgatggacaccactttggccag

SEQ ID NO: 4448952 - DNA, 25 bp, Homo sapien
ctgcactggccacgttcatcgtcat

SEQ ID NO: 4448953 - DNA, 25 bp, Homo sapien
ttcccgatggacaccactttggcca

SEQ ID NO: 4448954 - DNA, 25 bp, Homo sapien
tgactgcactggccacgttcatcgt

SEQ ID NO: 4448955 - DNA, 25 bp, Homo sapien
gttctgtgatctatctgtgctaggg

SEQ ID NO: 4448956 - DNA, 25 bp, Homo sapien
aatatagctccttttatgttctgtg

SEQ ID NO: 4448957 - DNA, 25 bp, Homo sapien
tatagctccttttatgttctgtgat

SEQ ID NO: 4448958 - DNA, 25 bp, Homo sapien
ttatgttctgtgatctatctgtgct

SEQ ID NO: 4448959 - DNA, 25 bp, Homo sapien
gcttagatctgtgcggtccaggtga

SEQ ID NO: 4448960 - DNA, 25 bp, Homo sapien
ttaactcgagtctggatactttggc

SEQ ID NO: 4448961 - DNA, 25 bp, Homo sapien
caaggtttatagacatcgaatcgcc

SEQ ID NO: 4448962 - DNA, 25 bp, Homo sapien
gaatcgccatcccagtttaactcga

SEQ ID NO: 4448963 - DNA, 25 bp, Homo sapien
tgcggccacggcgtcaccagagccc

SEQ ID NO: 4448964 - DNA, 25 bp, Homo sapien
agcccgggactgcaacttgtctccg

SEQ ID NO: 4448965 - DNA, 25 bp, Homo sapien
ctgggcccgcggagccctctctcgt

SEQ ID NO: 4448966 - DNA, 25 bp, Homo sapien
aacttgtctccggcctggctgccag

SEQ ID NO: 4448967 - DNA, 25 bp, Homo sapien
taaagctggatatacggaagtagcc

SEQ ID NO: 4448968 - DNA, 25 bp, Homo sapien
catttcacagagtctgtccaggtgc

SEQ ID NO: 4448969 - DNA, 25 bp, Homo sapien
ggatcctgggcctcaacgctaatgt

SEQ ID NO: 4448970 - DNA, 25 bp, Homo sapien
agcggtccttccctgatcccaagat

SEQ ID NO: 4448971 - DNA, 25 bp, Homo sapien
ctgtgggatcttagataaatcactt

SEQ ID NO: 4448972 - DNA, 25 bp, Homo sapien
cactgtgggatcttagataaatcac

SEQ ID NO: 4448973 - DNA, 25 bp, Homo sapien
ccagcactctgcagagtgtgttcct

SEQ ID NO: 4448974 - DNA, 25 bp, Homo sapien
caggagactaggctgaggtctcagt

SEQ ID NO: 4448975 - DNA, 25 bp, Homo sapien
gggattagaatgtcccaaaatggag

SEQ ID NO: 4448976 - DNA, 25 bp, Homo sapien
attagaatgtcccaaaatggagacc

SEQ ID NO: 4448977 - DNA, 25 bp, Homo sapien
cagggattagaatgtcccaaaatgg

SEQ ID NO: 4448978 - DNA, 25 bp, Homo sapien
ggattagaatgtcccaaaatggaga

SEQ ID NO: 4448979 - DNA, 25 bp, Homo sapien
caaccagaagtgtccatgctagagc

SEQ ID NO: 4448980 - DNA, 25 bp, Homo sapien
tgtccatgctagagccaggcagaag

SEQ ID NO: 4448981 - DNA, 25 bp, Homo sapien
agaggggtccatgccccaaccagaa

SEQ ID NO: 4448982 - DNA, 25 bp, Homo sapien
catgccccaaccagaagtgtccatg

SEQ ID NO: 4448983 - DNA, 25 bp, Homo sapien
gatcctgttgtattctccaaaatga

SEQ ID NO: 4448984 - DNA, 25 bp, Homo sapien
actggactggtgatgtggatgactt

SEQ ID NO: 4448985 - DNA, 25 bp, Homo sapien
cctcttgatcctgttgtattctcca

SEQ ID NO: 4448986 - DNA, 25 bp, Homo sapien
ttcctcctcttgatcctgttgtatt

SEQ ID NO: 4448987 - DNA, 25 bp, Homo sapien
gaaggacatgtcattctgtgaccca

SEQ ID NO: 4448988 - DNA, 25 bp, Homo sapien
cggagaaggacatgtcattctgtga

SEQ ID NO: 4448989 - DNA, 25 bp, Homo sapien
cctgggcagggtcggtgtggtgagg

SEQ ID NO: 4448990 - DNA, 25 bp, Homo sapien
ggacatgtcattctgtgacccatcc

SEQ ID NO: 4448991 - DNA, 25 bp, Homo sapien
aaatcgctgcacctcccacgaaatg

SEQ ID NO: 4448992 - DNA, 25 bp, Homo sapien
atcgctgcacctcccacgaaatggg

SEQ ID NO: 4448993 - DNA, 25 bp, Homo sapien
ccatctgtgctccatgaggttgttg

SEQ ID NO: 4448994 - DNA, 25 bp, Homo sapien
tgttgtaccacccatcaaatcgctg

SEQ ID NO: 4448995 - DNA, 25 bp, Homo sapien
ttctcccaagggctggtacacgcca

SEQ ID NO: 4448996 - DNA, 25 bp, Homo sapien
aagaagacccccaacactgtgcggt

SEQ ID NO: 4448997 - DNA, 25 bp, Homo sapien
aacactgtgcggtttctcagggagg

SEQ ID NO: 4448998 - DNA, 25 bp, Homo sapien
ctgcagggccccttgagatggtgtt

SEQ ID NO: 4448999 - DNA, 25 bp, Homo sapien
tccgggcgggatgcgaatgttgagg

SEQ ID NO: 4449000 - DNA, 25 bp, Homo sapien
ggtctccgggcgggatgcgaatgtt

SEQ ID NO: 4449001 - DNA, 25 bp, Homo sapien
cgggcgggatgcgaatgttgaggaa

SEQ ID NO: 4449002 - DNA, 25 bp, Homo sapien
tctccgggcgggatgcgaatgttga

SEQ ID NO: 4449003 - DNA, 25 bp, Homo sapien
gccgtccagccagcccgtcacctgg

SEQ ID NO: 4449004 - DNA, 25 bp, Homo sapien
tgccgtccagccagcccgtcacctg

SEQ ID NO: 4449005 - DNA, 25 bp, Homo sapien
ccaggaatgcgaggaaccatagatg

SEQ ID NO: 4449006 - DNA, 25 bp, Homo sapien
aggaatgcgaggaaccatagatggc

SEQ ID NO: 4449007 - DNA, 25 bp, Homo sapien
ggagaagctccgcagcgcgtcgctc

SEQ ID NO: 4449008 - DNA, 25 bp, Homo sapien
gcagcgcgtcgctccaggaatgcga

SEQ ID NO: 4449009 - DNA, 25 bp, Homo sapien
tctgcccggtggcggggtcgggcgc

SEQ ID NO: 4449010 - DNA, 25 bp, Homo sapien
ggcgcaggggaggagacgagcggta

SEQ ID NO: 4449011 - DNA, 25 bp, Homo sapien
atcgggggagcccacactcgcagac

SEQ ID NO: 4449012 - DNA, 25 bp, Homo sapien
ctgcatccgacgtgggggcgcaggg

SEQ ID NO: 4449013 - DNA, 25 bp, Homo sapien
ggagacgagcggtagcgtgatcggg

SEQ ID NO: 4449014 - DNA, 25 bp, Homo sapien
tggtagcggaaccagagcaggccca

SEQ ID NO: 4449015 - DNA, 25 bp, Homo sapien
tcgtcctcccagtctgggtgctggc

SEQ ID NO: 4449016 - DNA, 25 bp, Homo sapien
tcttgcgtgcgtgctggaacagctc

SEQ ID NO: 4449017 - DNA, 25 bp, Homo sapien
gtaggtggcgatgaccctcttgcgt

SEQ ID NO: 4449018 - DNA, 25 bp, Homo sapien
cagcggagtctcccgtgggcttgca

SEQ ID NO: 4449019 - DNA, 25 bp, Homo sapien
tctcccgtgggcttgcacgcggaag

SEQ ID NO: 4449020 - DNA, 25 bp, Homo sapien
tgggtggcggttgtccacagatggg

SEQ ID NO: 4449021 - DNA, 25 bp, Homo sapien
cacgcggaagggaggacgtcgcggg

SEQ ID NO: 4449022 - DNA, 25 bp, Homo sapien
gtatactccgggagtgttttctgca

SEQ ID NO: 4449023 - DNA, 25 bp, Homo sapien
tgtatactccgggagtgttttctgc

SEQ ID NO: 4449024 - DNA, 25 bp, Homo sapien
ctgggcagccactcatacacagcga

SEQ ID NO: 4449025 - DNA, 25 bp, Homo sapien
gcagccactcatacacagcgatgtt

SEQ ID NO: 4449026 - DNA, 25 bp, Homo sapien
ggcaccatggtggacaggaactgct

SEQ ID NO: 4449027 - DNA, 25 bp, Homo sapien
aactgctcagaggccgccacgaact

SEQ ID NO: 4449028 - DNA, 25 bp, Homo sapien
caccatggtggacaggaactgctca

SEQ ID NO: 4449029 - DNA, 25 bp, Homo sapien
gccgccacgaactctgaggagatgc

SEQ ID NO: 4449030 - DNA, 25 bp, Homo sapien
agctctggagacacttgagttccga

SEQ ID NO: 4449031 - DNA, 25 bp, Homo sapien
cacttgagttccgattgatgacccc

SEQ ID NO: 4449032 - DNA, 25 bp, Homo sapien
tccgattgatgaccccctggaagtg

SEQ ID NO: 4449033 - DNA, 25 bp, Homo sapien
gagacacttgagttccgattgatga

SEQ ID NO: 4449034 - DNA, 25 bp, Homo sapien
acaagcacaagggatcttaaaattt

SEQ ID NO: 4449035 - DNA, 25 bp, Homo sapien
atacaagcacaagggatcttaaaat

SEQ ID NO: 4449036 - DNA, 25 bp, Homo sapien
caagcacaagggatcttaaaatttt

SEQ ID NO: 4449037 - DNA, 25 bp, Homo sapien
ctatacaagcacaagggatcttaaa

SEQ ID NO: 4449038 - DNA, 25 bp, Homo sapien
aaccggtgggacattcctcttctgc

SEQ ID NO: 4449039 - DNA, 25 bp, Homo sapien
tgtttgctcccaaaccggtgggaca

SEQ ID NO: 4449040 - DNA, 25 bp, Homo sapien
ggtgaggggtgtcccctctgtcagt

SEQ ID NO: 4449041 - DNA, 25 bp, Homo sapien
gctgtttgctcccaaaccggtggga

SEQ ID NO: 4449042 - DNA, 25 bp, Homo sapien
ggtcagaggttagacagccggctcc

SEQ ID NO: 4449043 - DNA, 25 bp, Homo sapien
agaggttagacagccggctccctcc

SEQ ID NO: 4449044 - DNA, 25 bp, Homo sapien
ggggtcagaggttagacagccggct

SEQ ID NO: 4449045 - DNA, 25 bp, Homo sapien
cagaggttagacagccggctccctc

SEQ ID NO: 4449046 - DNA, 25 bp, Homo sapien
ggtcctctcgctctgcgatctggga

SEQ ID NO: 4449047 - DNA, 25 bp, Homo sapien
ctcgctctgcgatctgggaggccat

SEQ ID NO: 4449048 - DNA, 25 bp, Homo sapien
aacacatggtcctctcgctctgcga

SEQ ID NO: 4449049 - DNA, 25 bp, Homo sapien
cgcacatcttcaaccaacacatggt

SEQ ID NO: 4449050 - DNA, 25 bp, Homo sapien
ggttctggaagtccagctgagcctc

SEQ ID NO: 4449051 - DNA, 25 bp, Homo sapien
acaacctgcagggacagcctcagac

SEQ ID NO: 4449052 - DNA, 25 bp, Homo sapien
caggagttcacaacctgcagggaca

SEQ ID NO: 4449053 - DNA, 25 bp, Homo sapien
ctggaagtccagctgagcctcttcc

SEQ ID NO: 4449054 - DNA, 25 bp, Homo sapien
gtctgtgcgggaaaacttcagtggc

SEQ ID NO: 4449055 - DNA, 25 bp, Homo sapien
cttggtgtaagagggcaggcccaga

SEQ ID NO: 4449056 - DNA, 25 bp, Homo sapien
tcctgccagcgggtaatgggagaca

SEQ ID NO: 4449057 - DNA, 25 bp, Homo sapien
agtgtcattgctccgggagagtgca

SEQ ID NO: 4449058 - DNA, 25 bp, Homo sapien
acagattgttcctaagtcaaggacc

SEQ ID NO: 4449059 - DNA, 25 bp, Homo sapien
ctcctgaaaggtggcttaaacatcg

SEQ ID NO: 4449060 - DNA, 25 bp, Homo sapien
gctcagggtgtaacagctgactcct

SEQ ID NO: 4449061 - DNA, 25 bp, Homo sapien
ggtggcttaaacatcggtgcaagaa

SEQ ID NO: 4449062 - DNA, 25 bp, Homo sapien
gggaaccctctcacacattcagctg

SEQ ID NO: 4449063 - DNA, 25 bp, Homo sapien
cagccaatccgcattcataacttgt

SEQ ID NO: 4449064 - DNA, 25 bp, Homo sapien
agtaagagaaaggacacggcaccca

SEQ ID NO: 4449065 - DNA, 25 bp, Homo sapien
tcccagggattagccccagggatga

SEQ ID NO: 4449066 - DNA, 25 bp, Homo sapien
cagggagcagctctagccaggataa

SEQ ID NO: 4449067 - DNA, 25 bp, Homo sapien
gccaggataagtcctggttgtacag

SEQ ID NO: 4449068 - DNA, 25 bp, Homo sapien
atcccgtagccgcacaaattgttca

SEQ ID NO: 4449069 - DNA, 25 bp, Homo sapien
gacgatggtgctgaacagaggtcca

SEQ ID NO: 4449070 - DNA, 25 bp, Homo sapien
cactggggtcaatgttgataacagc

SEQ ID NO: 4449071 - DNA, 25 bp, Homo sapien
gttgataacagcgaccagcacgtcc

SEQ ID NO: 4449072 - DNA, 25 bp, Homo sapien
gggtcaatgttgataacagcgacca

SEQ ID NO: 4449073 - DNA, 25 bp, Homo sapien
aatgttgataacagcgaccagcacg

SEQ ID NO: 4449074 - DNA, 25 bp, Homo sapien
tcagtgctgagctgtctcggctgcg

SEQ ID NO: 4449075 - DNA, 25 bp, Homo sapien
aatagtcacgaacaacagagggagc

SEQ ID NO: 4449076 - DNA, 25 bp, Homo sapien
ggagcacacgctggcaggccttcag

SEQ ID NO: 4449077 - DNA, 25 bp, Homo sapien
atggtgaccccgaagccaaatccac

SEQ ID NO: 4449078 - DNA, 25 bp, Homo sapien
cccaccccactctgtccatgatttt

SEQ ID NO: 4449079 - DNA, 25 bp, Homo sapien
caccccactctgtccatgattttac

SEQ ID NO: 4449080 - DNA, 25 bp, Homo sapien
ccaccccactctgtccatgatttta

SEQ ID NO: 4449081 - DNA, 25 bp, Homo sapien
tcagacacgatgctctggcggtcct

SEQ ID NO: 4449082 - DNA, 25 bp, Homo sapien
tcccacgagcttctcagacacgatg

SEQ ID NO: 4449083 - DNA, 25 bp, Homo sapien
acacgatgctctggcggtcctggcc

SEQ ID NO: 4449084 - DNA, 25 bp, Homo sapien
gcttctcagacacgatgctctggcg

SEQ ID NO: 4449085 - DNA, 25 bp, Homo sapien
gagtgcggcgtccacggttgctgga

SEQ ID NO: 4449086 - DNA, 25 bp, Homo sapien
gttgctggacaggacgaagttgacc

SEQ ID NO: 4449087 - DNA, 25 bp, Homo sapien
tggatggtgcggagcacggtgagcc

SEQ ID NO: 4449088 - DNA, 25 bp, Homo sapien
ctgcaggtacacaagcacgggccgg

SEQ ID NO: 4449089 - DNA, 25 bp, Homo sapien
agagctccccggagattttccacca

SEQ ID NO: 4449090 - DNA, 25 bp, Homo sapien
actcctggatgctcaacccgctctc

SEQ ID NO: 4449091 - DNA, 25 bp, Homo sapien
ctgaaaaaggtctccaggaggtgcc

SEQ ID NO: 4449092 - DNA, 25 bp, Homo sapien
ctgggagaaaaggtgcctgaaaaag

SEQ ID NO: 4449093 - DNA, 25 bp, Homo sapien
agacaaggcttccttgacttgaagt

SEQ ID NO: 4449094 - DNA, 25 bp, Homo sapien
ggagacaaggcttccttgacttgaa

SEQ ID NO: 4449095 - DNA, 25 bp, Homo sapien
gagaggagacaaggcttccttgact

SEQ ID NO: 4449096 - DNA, 25 bp, Homo sapien
gaggagacaaggcttccttgacttg

SEQ ID NO: 4449097 - DNA, 25 bp, Homo sapien
ccctgcgtcggcctggttgatgtcc

SEQ ID NO: 4449098 - DNA, 25 bp, Homo sapien
gaaggacaggtagccattgccatcc

SEQ ID NO: 4449099 - DNA, 25 bp, Homo sapien
cagggactcggcaaactcggccctg

SEQ ID NO: 4449100 - DNA, 25 bp, Homo sapien
gccagagagaacatggactccacaa

SEQ ID NO: 4449101 - DNA, 25 bp, Homo sapien
tacatgcggaacataaggcgagact

SEQ ID NO: 4449102 - DNA, 25 bp, Homo sapien
aacataaggcgagacttttcctcag

SEQ ID NO: 4449103 - DNA, 25 bp, Homo sapien
aggccattcccatcaaagtcgtaca

SEQ ID NO: 4449104 - DNA, 25 bp, Homo sapien
gaactcatccttggaaatgaggcca

SEQ ID NO: 4449105 - DNA, 25 bp, Homo sapien
aagcggagctcgctattgtggtccc

SEQ ID NO: 4449106 - DNA, 25 bp, Homo sapien
gaagcggagctcgctattgtggtcc

SEQ ID NO: 4449107 - DNA, 25 bp, Homo sapien
cggagctcgctattgtggtcccgca

SEQ ID NO: 4449108 - DNA, 25 bp, Homo sapien
tgtgcctactatgcctaaccaatga

SEQ ID NO: 4449109 - DNA, 25 bp, Homo sapien
tcctaaaagtatgtgggcattgtgc

SEQ ID NO: 4449110 - DNA, 25 bp, Homo sapien
taaccaatgagtcagtgctgcctac

SEQ ID NO: 4449111 - DNA, 25 bp, Homo sapien
tctgtggactcctaaaagtatgtgg

SEQ ID NO: 4449112 - DNA, 25 bp, Homo sapien
tgcaccttcgttgcccctgccctta

SEQ ID NO: 4449113 - DNA, 25 bp, Homo sapien
aggtgttggatgtccctgggactct

SEQ ID NO: 4449114 - DNA, 25 bp, Homo sapien
tcccttccatgcaccttcgttgccc

SEQ ID NO: 4449115 - DNA, 25 bp, Homo sapien
ccccaggtgttggatgtccctggga

SEQ ID NO: 4449116 - DNA, 25 bp, Homo sapien
aggctcgccggcagaggtccttgat

SEQ ID NO: 4449117 - DNA, 25 bp, Homo sapien
cagatcatatcctggctgatgtagg

SEQ ID NO: 4449118 - DNA, 25 bp, Homo sapien
cttgatgacttcaggcacctccacc

SEQ ID NO: 4449119 - DNA, 25 bp, Homo sapien
tggctgatgtaggaggctcgccggc

SEQ ID NO: 4449120 - DNA, 25 bp, Homo sapien
tctctgaggtgtcaactcagtctca

SEQ ID NO: 4449121 - DNA, 25 bp, Homo sapien
cctccgccgaatctcctggggaggg

SEQ ID NO: 4449122 - DNA, 25 bp, Homo sapien
aacctccgccgaatctcctggggag

SEQ ID NO: 4449123 - DNA, 25 bp, Homo sapien
caaacctccgccgaatctcctgggg

SEQ ID NO: 4449124 - DNA, 25 bp, Homo sapien
ctgggagacaggaagccttagcctt

SEQ ID NO: 4449125 - DNA, 25 bp, Homo sapien
ttggaacttctctcggtgcgcctca

SEQ ID NO: 4449126 - DNA, 25 bp, Homo sapien
cttgaactgttgcaccgtctggtgg

SEQ ID NO: 4449127 - DNA, 25 bp, Homo sapien
cagcaagggctggaatgacgttacc

SEQ ID NO: 4449128 - DNA, 25 bp, Homo sapien
ccagcgatggcgtagaacacggcca

SEQ ID NO: 4449129 - DNA, 25 bp, Homo sapien
cacgtagcggttgaggaaggtttct

SEQ ID NO: 4449130 - DNA, 25 bp, Homo sapien
aaggtttctcgcaggaaggtgatga

SEQ ID NO: 4449131 - DNA, 25 bp, Homo sapien
ttcccacgcgggtggtgtctgtgat

SEQ ID NO: 4449132 - DNA, 25 bp, Homo sapien
gctgtgccccgcgacaggatgattc

SEQ ID NO: 4449133 - DNA, 25 bp, Homo sapien
aggcaatgaggcgatggaagtccac

SEQ ID NO: 4449134 - DNA, 25 bp, Homo sapien
cggtggaggcaatgaggcgatggaa

SEQ ID NO: 4449135 - DNA, 25 bp, Homo sapien
cgatggcggtggaggcaatgaggcg

SEQ ID NO: 4449136 - DNA, 25 bp, Homo sapien
ctgtgaggacgatggcggtggaggc

SEQ ID NO: 4449137 - DNA, 25 bp, Homo sapien
aggccctggagagcctcccagggac

SEQ ID NO: 4449138 - DNA, 25 bp, Homo sapien
gggaggccctggagagcctcccagg

SEQ ID NO: 4449139 - DNA, 25 bp, Homo sapien
gggcgggaggccctggagagcctcc

SEQ ID NO: 4449140 - DNA, 25 bp, Homo sapien
gcgggggcgggaggccctggagagc

SEQ ID NO: 4449141 - DNA, 25 bp, Homo sapien
gaaattacagcattagaagttcact

SEQ ID NO: 4449142 - DNA, 25 bp, Homo sapien
tgttagtaacttgtcagctgaggct

SEQ ID NO: 4449143 - DNA, 25 bp, Homo sapien
acacattatgcacactcattctggg

SEQ ID NO: 4449144 - DNA, 25 bp, Homo sapien
gacattaaaggtaagtgccagcaga

SEQ ID NO: 4449145 - DNA, 25 bp, Homo sapien
catccatgtgcgcaaccatgtgagt

SEQ ID NO: 4449146 - DNA, 25 bp, Homo sapien
gacttctgacctctaaacaatcacc

SEQ ID NO: 4449147 - DNA, 25 bp, Homo sapien
attaggggcataagccgccgcgccg

SEQ ID NO: 4449148 - DNA, 25 bp, Homo sapien
aacaatcacctggccctacccaaca

SEQ ID NO: 4449149 - DNA, 25 bp, Homo sapien
taggggcataagccgccgcgccggc

SEQ ID NO: 4449150 - DNA, 25 bp, Homo sapien
aagagaggacgctgagggggctgat

SEQ ID NO: 4449151 - DNA, 25 bp, Homo sapien
gcaagagaggacgctgagggggctg

SEQ ID NO: 4449152 - DNA, 25 bp, Homo sapien
gaggcaagagaggacgctgaggggg

SEQ ID NO: 4449153 - DNA, 25 bp, Homo sapien
gatggagaacaggtacacattcacc

SEQ ID NO: 4449154 - DNA, 25 bp, Homo sapien
gcaaagagacaccttgagaggagat

SEQ ID NO: 4449155 - DNA, 25 bp, Homo sapien
aagagacaccttgagaggagatctc

SEQ ID NO: 4449156 - DNA, 25 bp, Homo sapien
cagcaaagagacaccttgagaggag

SEQ ID NO: 4449157 - DNA, 25 bp, Homo sapien
caaagagacaccttgagaggagatc

SEQ ID NO: 4449158 - DNA, 25 bp, Homo sapien
ctggaagaaccaccagtaatacttc

SEQ ID NO: 4449159 - DNA, 25 bp, Homo sapien
ccaccagtaatacttctgggggagc

SEQ ID NO: 4449160 - DNA, 25 bp, Homo sapien
accaccagtaatacttctgggggag

SEQ ID NO: 4449161 - DNA, 25 bp, Homo sapien
aagaaccaccagtaatacttctggg

SEQ ID NO: 4449162 - DNA, 25 bp, Homo sapien
tccctgcaccactctttgttggctg

SEQ ID NO: 4449163 - DNA, 25 bp, Homo sapien
tcatcgagtcaaggtttggtccttg

SEQ ID NO: 4449164 - DNA, 25 bp, Homo sapien
tgctcatcactagggtccccaagta

SEQ ID NO: 4449165 - DNA, 25 bp, Homo sapien
cactggcactgttagtgactggcca

SEQ ID NO: 4449166 - DNA, 25 bp, Homo sapien
aggagcagcacaacccccgtgaggc

SEQ ID NO: 4449167 - DNA, 25 bp, Homo sapien
tggatcagggcaaagctaccatgga

SEQ ID NO: 4449168 - DNA, 25 bp, Homo sapien
gggcaaagctaccatggatgatgag

SEQ ID NO: 4449169 - DNA, 25 bp, Homo sapien
aaacggggcagctggatcagggcaa

SEQ ID NO: 4449170 - DNA, 25 bp, Homo sapien
tcagggcaaagctaccatggatgat

SEQ ID NO: 4449171 - DNA, 25 bp, Homo sapien
accttcttccggctcaggctcacca

SEQ ID NO: 4449172 - DNA, 25 bp, Homo sapien
cagctccgccttcaccacgctgatc

SEQ ID NO: 4449173 - DNA, 25 bp, Homo sapien
ccttcaccacgctgatctccacctt

SEQ ID NO: 4449174 - DNA, 25 bp, Homo sapien
tccgccttcaccacgctgatctcca

SEQ ID NO: 4449175 - DNA, 25 bp, Homo sapien
cacccgtcggggctgagtagatctc

SEQ ID NO: 4449176 - DNA, 25 bp, Homo sapien
tcaaagccctggggccgctggaacc

SEQ ID NO: 4449177 - DNA, 25 bp, Homo sapien
atctggcacatctgtcacccgtcgg

SEQ ID NO: 4449178 - DNA, 25 bp, Homo sapien
ctttgggtatctggcacatctgtca

SEQ ID NO: 4449179 - DNA, 25 bp, Homo sapien
acacttggcagctgacggatgactt

SEQ ID NO: 4449180 - DNA, 25 bp, Homo sapien
cacttggcagctgacggatgacttg

SEQ ID NO: 4449181 - DNA, 25 bp, Homo sapien
cttggcagctgacggatgacttgaa

SEQ ID NO: 4449182 - DNA, 25 bp, Homo sapien
ggcagctgacggatgacttgaagac

SEQ ID NO: 4449183 - DNA, 25 bp, Homo sapien
ggcccagagaaacgagcaggggcct

SEQ ID NO: 4449184 - DNA, 25 bp, Homo sapien
caggcccagagaaacgagcaggggc

SEQ ID NO: 4449185 - DNA, 25 bp, Homo sapien
cccagagaaacgagcaggggcctgc

SEQ ID NO: 4449186 - DNA, 25 bp, Homo sapien
agagaaacgagcaggggcctgccac

SEQ ID NO: 4449187 - DNA, 25 bp, Homo sapien
ccctctgcagcttccgagggaggaa

SEQ ID NO: 4449188 - DNA, 25 bp, Homo sapien
cagcgggtggaagctgccctgcggg

SEQ ID NO: 4449189 - DNA, 25 bp, Homo sapien
agccctctgcagcttccgagggagg

SEQ ID NO: 4449190 - DNA, 25 bp, Homo sapien
ctctgcagcttccgagggaggaaag

SEQ ID NO: 4449191 - DNA, 25 bp, Homo sapien
gccagctgggtgatgtagatgtgca

SEQ ID NO: 4449192 - DNA, 25 bp, Homo sapien
agccagctgggtgatgtagatgtgc

SEQ ID NO: 4449193 - DNA, 25 bp, Homo sapien
cagccagctgggtgatgtagatgtg

SEQ ID NO: 4449194 - DNA, 25 bp, Homo sapien
tagactccggttcagaaccttctgg

SEQ ID NO: 4449195 - DNA, 25 bp, Homo sapien
gcctgtgaatagactccggttcaga

SEQ ID NO: 4449196 - DNA, 25 bp, Homo sapien
gaatagactccggttcagaaccttc

SEQ ID NO: 4449197 - DNA, 25 bp, Homo sapien
tgtgaatagactccggttcagaacc

SEQ ID NO: 4449198 - DNA, 25 bp, Homo sapien
gggatgggttctcatcagcagtcga

SEQ ID NO: 4449199 - DNA, 25 bp, Homo sapien
tcagaccccaaatgataaagaggaa

SEQ ID NO: 4449200 - DNA, 25 bp, Homo sapien
agcagtcgatttcttcctcgatggg

SEQ ID NO: 4449201 - DNA, 25 bp, Homo sapien
gaacctggttatgggttggactgac

SEQ ID NO: 4449202 - DNA, 25 bp, Homo sapien
tgagctgacaggccttttccacatt

SEQ ID NO: 4449203 - DNA, 25 bp, Homo sapien
tcttggtcatgccaggggggccaca

SEQ ID NO: 4449204 - DNA, 25 bp, Homo sapien
gccacagctaaacaccccgatcttc

SEQ ID NO: 4449205 - DNA, 25 bp, Homo sapien
ctcataatggtgggagaagtgagtc

SEQ ID NO: 4449206 - DNA, 25 bp, Homo sapien
tatggccacctggaacaaggttggg

SEQ ID NO: 4449207 - DNA, 25 bp, Homo sapien
ccagggtctgatgaaagaacgtgct

SEQ ID NO: 4449208 - DNA, 25 bp, Homo sapien
tatttggaagggagactactggagc

SEQ ID NO: 4449209 - DNA, 25 bp, Homo sapien
catacataggtattgggccagggtc

SEQ ID NO: 4449210 - DNA, 25 bp, Homo sapien
taaagacagctatgggtgtaacctg

SEQ ID NO: 4449211 - DNA, 25 bp, Homo sapien
tgtaacctgaattctagggctctgc

SEQ ID NO: 4449212 - DNA, 25 bp, Homo sapien
tttgctcctgggtccttgattcagg

SEQ ID NO: 4449213 - DNA, 25 bp, Homo sapien
cccaaggagatttctgaggagcaga

SEQ ID NO: 4449214 - DNA, 25 bp, Homo sapien
tcagatgtagatctgctgagagcct

SEQ ID NO: 4449215 - DNA, 25 bp, Homo sapien
gcctgttgagcgtcccttagtatac

SEQ ID NO: 4449216 - DNA, 25 bp, Homo sapien
aaggtgatgtcactccagaggatgg

SEQ ID NO: 4449217 - DNA, 25 bp, Homo sapien
gccagccctgagattgatgcaggat

SEQ ID NO: 4449218 - DNA, 25 bp, Homo sapien
agcctcttcttgccaagggcctcca

SEQ ID NO: 4449219 - DNA, 25 bp, Homo sapien
gcctcttcttgccaagggcctccat

SEQ ID NO: 4449220 - DNA, 25 bp, Homo sapien
tgacctcttgacttggaatgacctt

SEQ ID NO: 4449221 - DNA, 25 bp, Homo sapien
aagcgacatactttcctccaatttg

SEQ ID NO: 4449222 - DNA, 25 bp, Homo sapien
ttaaaaagcgacatactttcctcca

SEQ ID NO: 4449223 - DNA, 25 bp, Homo sapien
gaagcctgcataaggccactcgcct

SEQ ID NO: 4449224 - DNA, 25 bp, Homo sapien
ggcggagtacaacgcgcctgcgcat

SEQ ID NO: 4449225 - DNA, 25 bp, Homo sapien
agaaaagcaactggcggagtacaac

SEQ ID NO: 4449226 - DNA, 25 bp, Homo sapien
gctaatgggccaaaacagaagaaga

SEQ ID NO: 4449227 - DNA, 25 bp, Homo sapien
caccacagcccgtggctaatgggcc

SEQ ID NO: 4449228 - DNA, 25 bp, Homo sapien
cctggagggttcgcggcaagggtct

SEQ ID NO: 4449229 - DNA, 25 bp, Homo sapien
acgggcatcccccaagggtagtctg

SEQ ID NO: 4449230 - DNA, 25 bp, Homo sapien
agggtagtctgagttccgcccagcc

SEQ ID NO: 4449231 - DNA, 25 bp, Homo sapien
caggagggaggacccgtgaggagcg

SEQ ID NO: 4449232 - DNA, 25 bp, Homo sapien
ctggcacggcggaagcattgcggaa

SEQ ID NO: 4449233 - DNA, 25 bp, Homo sapien
ccacagaggcggcattgggtcaccg

SEQ ID NO: 4449234 - DNA, 25 bp, Homo sapien
tctagggtgtccacaatctccacag

SEQ ID NO: 4449235 - DNA, 25 bp, Homo sapien
aacatggggagatgcgtttgctgaa

SEQ ID NO: 4449236 - DNA, 25 bp, Homo sapien
ttcgaaccgaggttgctgcggccac

SEQ ID NO: 4449237 - DNA, 25 bp, Homo sapien
tgactcggattcgaaccgaggttgc

SEQ ID NO: 4449238 - DNA, 25 bp, Homo sapien
tgccgtgactcggattcgaaccgag

SEQ ID NO: 4449239 - DNA, 25 bp, Homo sapien
ctcggattcgaaccgaggttgctgc

SEQ ID NO: 4449240 - DNA, 25 bp, Homo sapien
actcgccaaatgtagagaactggga

SEQ ID NO: 4449241 - DNA, 25 bp, Homo sapien
tgtggtttaaactcgccaaatgtag

SEQ ID NO: 4449242 - DNA, 25 bp, Homo sapien
ctttccccattctattttgcgcaga

SEQ ID NO: 4449243 - DNA, 25 bp, Homo sapien
gaacactctcgaggtgtgagctgtc

SEQ ID NO: 4449244 - DNA, 25 bp, Homo sapien
tattccagcccacagattgaaatcc

SEQ ID NO: 4449245 - DNA, 25 bp, Homo sapien
tggcatcccaccctgacaccttatt

SEQ ID NO: 4449246 - DNA, 25 bp, Homo sapien
gggttggaggaatataagtcaccac

SEQ ID NO: 4449247 - DNA, 25 bp, Homo sapien
cgtcacagcagttatttggtgaggg

SEQ ID NO: 4449248 - DNA, 25 bp, Homo sapien
ggggtgctgactgattgctcagaga

SEQ ID NO: 4449249 - DNA, 25 bp, Homo sapien
agcggggtcttgatgaggtcattcc

SEQ ID NO: 4449250 - DNA, 25 bp, Homo sapien
cagggcagcggggtcttgatgaggt

SEQ ID NO: 4449251 - DNA, 25 bp, Homo sapien
tgctgactgattgctcagagagggt

SEQ ID NO: 4449252 - DNA, 25 bp, Homo sapien
tgtaggcttcctacgaacaaactgt

SEQ ID NO: 4449253 - DNA, 25 bp, Homo sapien
gttgagagatagacaaaaccaccac

SEQ ID NO: 4449254 - DNA, 25 bp, Homo sapien
tgtgacgagaggtaccaaaacttgt

SEQ ID NO: 4449255 - DNA, 25 bp, Homo sapien
caggaatctgggatcattgtgacga

SEQ ID NO: 4449256 - DNA, 25 bp, Homo sapien
gggagtttgcgaattagttcagtgg

SEQ ID NO: 4449257 - DNA, 25 bp, Homo sapien
ggggagtttgcgaattagttcagtg

SEQ ID NO: 4449258 - DNA, 25 bp, Homo sapien
ggagtttgcgaattagttcagtgga

SEQ ID NO: 4449259 - DNA, 25 bp, Homo sapien
caccgatagctctggaagcacaaat

SEQ ID NO: 4449260 - DNA, 25 bp, Homo sapien
gatagctctggaagcacaaatctgt

SEQ ID NO: 4449261 - DNA, 25 bp, Homo sapien
atagctctggaagcacaaatctgtt

SEQ ID NO: 4449262 - DNA, 25 bp, Homo sapien
ccgatagctctggaagcacaaatct

SEQ ID NO: 4449263 - DNA, 25 bp, Homo sapien
tagcacacaggttggtgttttcaaa

SEQ ID NO: 4449264 - DNA, 25 bp, Homo sapien
tgttttcaaaaaggccaacaagata

SEQ ID NO: 4449265 - DNA, 25 bp, Homo sapien
caaaaaggccaacaagataggcctt

SEQ ID NO: 4449266 - DNA, 25 bp, Homo sapien
ctgttacatgcttggcatggatagc

SEQ ID NO: 4449267 - DNA, 25 bp, Homo sapien
tgtgcggagtgctagctggatatct

SEQ ID NO: 4449268 - DNA, 25 bp, Homo sapien
gtgcggagtgctagctggatatctt

SEQ ID NO: 4449269 - DNA, 25 bp, Homo sapien
gaactaccaataacaggaataagat

SEQ ID NO: 4449270 - DNA, 25 bp, Homo sapien
taccaataacaggaataagataatt

SEQ ID NO: 4449271 - DNA, 25 bp, Homo sapien
aaatgtttcccatcatagtggattc

SEQ ID NO: 4449272 - DNA, 25 bp, Homo sapien
ctaccaataacaggaataagataat

SEQ ID NO: 4449273 - DNA, 25 bp, Homo sapien
tcagtgttgtgccttggggtagcca

SEQ ID NO: 4449274 - DNA, 25 bp, Homo sapien
tatcagtgttgtgccttggggtagc

SEQ ID NO: 4449275 - DNA, 25 bp, Homo sapien
ctatatcagtgttgtgccttggggt

SEQ ID NO: 4449276 - DNA, 25 bp, Homo sapien
cagtgttgtgccttggggtagccat

SEQ ID NO: 4449277 - DNA, 25 bp, Homo sapien
gggcatgtcataatagggaccctct

SEQ ID NO: 4449278 - DNA, 25 bp, Homo sapien
tctgctttgcttgtcatgcactcag

SEQ ID NO: 4449279 - DNA, 25 bp, Homo sapien
gcttgtcatgcactcaggcttcagt

SEQ ID NO: 4449280 - DNA, 25 bp, Homo sapien
aagatgacagcccatcacacacttc

SEQ ID NO: 4449281 - DNA, 25 bp, Homo sapien
cctgtacaagcttcggaaccatgag

SEQ ID NO: 4449282 - DNA, 25 bp, Homo sapien
tatatataatcctcaaagctagagg

SEQ ID NO: 4449283 - DNA, 25 bp, Homo sapien
gattggctcgtgaggacagagttct

SEQ ID NO: 4449284 - DNA, 25 bp, Homo sapien
cctccttagaagctgaacagatgac

SEQ ID NO: 4449285 - DNA, 25 bp, Homo sapien
cttgattaactgacttgggccccat

SEQ ID NO: 4449286 - DNA, 25 bp, Homo sapien
ccttgattaactgacttgggcccca

SEQ ID NO: 4449287 - DNA, 25 bp, Homo sapien
ctccccttgattaactgacttgggc

SEQ ID NO: 4449288 - DNA, 25 bp, Homo sapien
tccccttgattaactgacttgggcc

SEQ ID NO: 4449289 - DNA, 25 bp, Homo sapien
cttgttcttcactgtatccctaggc

SEQ ID NO: 4449290 - DNA, 25 bp, Homo sapien
tttctgtggggataggggtctcaat

SEQ ID NO: 4449291 - DNA, 25 bp, Homo sapien
ctggccaggttctctatcttgttct

SEQ ID NO: 4449292 - DNA, 25 bp, Homo sapien
tcttcactgtatccctaggctcaag

SEQ ID NO: 4449293 - DNA, 25 bp, Homo sapien
tggctcctcagtgaaggactgaaag

SEQ ID NO: 4449294 - DNA, 25 bp, Homo sapien
cccagcttgtggaattgattccctc

SEQ ID NO: 4449295 - DNA, 25 bp, Homo sapien
tgtggaattgattccctctggctcc

SEQ ID NO: 4449296 - DNA, 25 bp, Homo sapien
cagtgaaggactgaaagaaaagctc

SEQ ID NO: 4449297 - DNA, 25 bp, Homo sapien
ggccaagcctgaaagattggtcatt

SEQ ID NO: 4449298 - DNA, 25 bp, Homo sapien
ccaagcctgaaagattggtcattct

SEQ ID NO: 4449299 - DNA, 25 bp, Homo sapien
gccaagcctgaaagattggtcattc

SEQ ID NO: 4449300 - DNA, 25 bp, Homo sapien
cactgtggacagagcaatggactgt

SEQ ID NO: 4449301 - DNA, 25 bp, Homo sapien
tccagccccgggttcactgtgccag

SEQ ID NO: 4449302 - DNA, 25 bp, Homo sapien
ggttcactgtgccagtctccactgt

SEQ ID NO: 4449303 - DNA, 25 bp, Homo sapien
tctccactgtggacagagcaatgga

SEQ ID NO: 4449304 - DNA, 25 bp, Homo sapien
gcagagagaaactaaactggtgatt

SEQ ID NO: 4449305 - DNA, 25 bp, Homo sapien
tgcagagagaaactaaactggtgat

SEQ ID NO: 4449306 - DNA, 25 bp, Homo sapien
caggctgtgtccttgtgcgtcagtc

SEQ ID NO: 4449307 - DNA, 25 bp, Homo sapien
tgaacaagattccaaaacaccagta

SEQ ID NO: 4449308 - DNA, 25 bp, Homo sapien
gaacaagattccaaaacaccagtac

SEQ ID NO: 4449309 - DNA, 25 bp, Homo sapien
aactgaacaagattccaaaacacca

SEQ ID NO: 4449310 - DNA, 25 bp, Homo sapien
ctaactgaacaagattccaaaacac

SEQ ID NO: 4449311 - DNA, 25 bp, Homo sapien
tagtactggggccagtgaggttgag

SEQ ID NO: 4449312 - DNA, 25 bp, Homo sapien
cttttagtactggggccagtgaggt

SEQ ID NO: 4449313 - DNA, 25 bp, Homo sapien
gcagcatcagggaaagtttcatgga

SEQ ID NO: 4449314 - DNA, 25 bp, Homo sapien
gcatcagggaaagtttcatggacat

SEQ ID NO: 4449315 - DNA, 25 bp, Homo sapien
caagctggcgtgtgttttgcagaaa

SEQ ID NO: 4449316 - DNA, 25 bp, Homo sapien
acaggatcttcttgaacaagctggc

SEQ ID NO: 4449317 - DNA, 25 bp, Homo sapien
ccaaacacaacaggcccaacaggat

SEQ ID NO: 4449318 - DNA, 25 bp, Homo sapien
tcttcttgaacaagctggcgtgtgt

SEQ ID NO: 4449319 - DNA, 25 bp, Homo sapien
aagctgccaggagataggcagcata

SEQ ID NO: 4449320 - DNA, 25 bp, Homo sapien
agctgccaggagataggcagcatag

SEQ ID NO: 4449321 - DNA, 25 bp, Homo sapien
gctgccaggagataggcagcatagg

SEQ ID NO: 4449322 - DNA, 25 bp, Homo sapien
atttcgtccaaagcctcaggcggga

SEQ ID NO: 4449323 - DNA, 25 bp, Homo sapien
tgcccaggagctttttcaaaaacga

SEQ ID NO: 4449324 - DNA, 25 bp, Homo sapien
caaagggcttcagacatcttgttaa

SEQ ID NO: 4449325 - DNA, 25 bp, Homo sapien
ctcaggcgggagttttcaaagggct

SEQ ID NO: 4449326 - DNA, 25 bp, Homo sapien
tgaagaaggaatgccaagaccatgt

SEQ ID NO: 4449327 - DNA, 25 bp, Homo sapien
agaaggaatgccaagaccatgtcat

SEQ ID NO: 4449328 - DNA, 25 bp, Homo sapien
ctgaagaaggaatgccaagaccatg

SEQ ID NO: 4449329 - DNA, 25 bp, Homo sapien
aagaaggaatgccaagaccatgtca

SEQ ID NO: 4449330 - DNA, 25 bp, Homo sapien
gtctaaagccaaccacagtataagg

SEQ ID NO: 4449331 - DNA, 25 bp, Homo sapien
aaccaaggagactcctgcaaacacc

SEQ ID NO: 4449332 - DNA, 25 bp, Homo sapien
aaccacagtataaggccaaccaagg

SEQ ID NO: 4449333 - DNA, 25 bp, Homo sapien
gcctttgggctgtgtctaaagccaa

SEQ ID NO: 4449334 - DNA, 25 bp, Homo sapien
tacagtatatccaagatcagttctg

SEQ ID NO: 4449335 - DNA, 25 bp, Homo sapien
tcccaaagacaaattgaagacctag

SEQ ID NO: 4449336 - DNA, 25 bp, Homo sapien
ttctgatgaccaagatcccaaagac

SEQ ID NO: 4449337 - DNA, 25 bp, Homo sapien
tgaagacctaggcccgaaaacactg

SEQ ID NO: 4449338 - DNA, 25 bp, Homo sapien
actggagccggccacagtgtagttc

SEQ ID NO: 4449339 - DNA, 25 bp, Homo sapien
cttgaccagtgtatccccaaagaca

SEQ ID NO: 4449340 - DNA, 25 bp, Homo sapien
tggagccggccacagtgtagttcag

SEQ ID NO: 4449341 - DNA, 25 bp, Homo sapien
acatccttgaccagtgtatccccaa

SEQ ID NO: 4449342 - DNA, 25 bp, Homo sapien
atcattcctgcccataaaataggta

SEQ ID NO: 4449343 - DNA, 25 bp, Homo sapien
ccctccatagaccatcattcctgcc

SEQ ID NO: 4449344 - DNA, 25 bp, Homo sapien
tcattcctgcccataaaataggtat

SEQ ID NO: 4449345 - DNA, 25 bp, Homo sapien
attcctgcccataaaataggtatca

SEQ ID NO: 4449346 - DNA, 25 bp, Homo sapien
tgcacaaggcccaggtagtagagaa

SEQ ID NO: 4449347 - DNA, 25 bp, Homo sapien
gaatggacaccacacatccaaagaa

SEQ ID NO: 4449348 - DNA, 25 bp, Homo sapien
gcccaggtagtagagaatggacacc

SEQ ID NO: 4449349 - DNA, 25 bp, Homo sapien
ttctgaactacccattgcacaaggc

SEQ ID NO: 4449350 - DNA, 25 bp, Homo sapien
tgactggtgtaagagaacgactcac

SEQ ID NO: 4449351 - DNA, 25 bp, Homo sapien
ccaaagctgactgatgacaggatga

SEQ ID NO: 4449352 - DNA, 25 bp, Homo sapien
caaagctgactgatgacaggatgaa

SEQ ID NO: 4449353 - DNA, 25 bp, Homo sapien
gcccatagtgatttgtaaaaaccag

SEQ ID NO: 4449354 - DNA, 25 bp, Homo sapien
tgcccatagtgatttgtaaaaacca

SEQ ID NO: 4449355 - DNA, 25 bp, Homo sapien
cccatagtgatttgtaaaaaccagg

SEQ ID NO: 4449356 - DNA, 25 bp, Homo sapien
gtgcccatagtgatttgtaaaaacc

SEQ ID NO: 4449357 - DNA, 25 bp, Homo sapien
cccaaaggctatgaaggctcccagc

SEQ ID NO: 4449358 - DNA, 25 bp, Homo sapien
cctccagtcatcaccgcatggattt

SEQ ID NO: 4449359 - DNA, 25 bp, Homo sapien
gagagtgtcatgtccccaaggtagg

SEQ ID NO: 4449360 - DNA, 25 bp, Homo sapien
accgcatggatttcagagagtgtca

SEQ ID NO: 4449361 - DNA, 25 bp, Homo sapien
tccggatacgctagctttgatgagg

SEQ ID NO: 4449362 - DNA, 25 bp, Homo sapien
tagctttgatgaggcgagagcacaa

SEQ ID NO: 4449363 - DNA, 25 bp, Homo sapien
ctccacttccggatacgctagcttt

SEQ ID NO: 4449364 - DNA, 25 bp, Homo sapien
gatacgctagctttgatgaggcgag

SEQ ID NO: 4449365 - DNA, 25 bp, Homo sapien
gctacattagtagcaaggcctatgg

SEQ ID NO: 4449366 - DNA, 25 bp, Homo sapien
aagtgagcccctgtatgtccaccaa

SEQ ID NO: 4449367 - DNA, 25 bp, Homo sapien
ggcaatcaggttggctgctacatta

SEQ ID NO: 4449368 - DNA, 25 bp, Homo sapien
tctacggctccgttgctggcagctt

SEQ ID NO: 4449369 - DNA, 25 bp, Homo sapien
tattgagacagttgctgataagcca

SEQ ID NO: 4449370 - DNA, 25 bp, Homo sapien
tctacacccatcatgaaaaccatgg

SEQ ID NO: 4449371 - DNA, 25 bp, Homo sapien
accatgggccttaggagataggagc

SEQ ID NO: 4449372 - DNA, 25 bp, Homo sapien
gagacgtttgttcttgtattgagac

SEQ ID NO: 4449373 - DNA, 25 bp, Homo sapien
tgtttatgctttttggattgtcact

SEQ ID NO: 4449374 - DNA, 25 bp, Homo sapien
ggtgtttatgctttttggattgtca

SEQ ID NO: 4449375 - DNA, 25 bp, Homo sapien
ttatgctttttggattgtcacttac

SEQ ID NO: 4449376 - DNA, 25 bp, Homo sapien
gtttatgctttttggattgtcactt

SEQ ID NO: 4449377 - DNA, 25 bp, Homo sapien
ccataatagctcaggcgctgcagat

SEQ ID NO: 4449378 - DNA, 25 bp, Homo sapien
gcaggtctgcaacaaacctgtttgg

SEQ ID NO: 4449379 - DNA, 25 bp, Homo sapien
gctttgtagttaggcctgcgacccc

SEQ ID NO: 4449380 - DNA, 25 bp, Homo sapien
tgtctaccctcagataaccatggct

SEQ ID NO: 4449381 - DNA, 25 bp, Homo sapien
tccaagtgtgattcctatggaacta

SEQ ID NO: 4449382 - DNA, 25 bp, Homo sapien
tgtgattcctatggaactaagattg

SEQ ID NO: 4449383 - DNA, 25 bp, Homo sapien
cacagagtgaaaatgttgtaatgat

SEQ ID NO: 4449384 - DNA, 25 bp, Homo sapien
ctatggaactaagattggcaaatcc

SEQ ID NO: 4449385 - DNA, 25 bp, Homo sapien
ggagctgggaaaatggatgaactca

SEQ ID NO: 4449386 - DNA, 25 bp, Homo sapien
gggagctgggaaaatggatgaactc

SEQ ID NO: 4449387 - DNA, 25 bp, Homo sapien
gagctgggaaaatggatgaactcac

SEQ ID NO: 4449388 - DNA, 25 bp, Homo sapien
tggggagctgggaaaatggatgaac

SEQ ID NO: 4449389 - DNA, 25 bp, Homo sapien
tgggatctgctagtcacccctgtgc

SEQ ID NO: 4449390 - DNA, 25 bp, Homo sapien
tgcagcagtatctccaacagtctaa

SEQ ID NO: 4449391 - DNA, 25 bp, Homo sapien
tactggaggctcgatctgagttcaa

SEQ ID NO: 4449392 - DNA, 25 bp, Homo sapien
tggatcttccaaacttgggatctgc

SEQ ID NO: 4449393 - DNA, 25 bp, Homo sapien
ttgagatacgcactcttaagcctgg

SEQ ID NO: 4449394 - DNA, 25 bp, Homo sapien
caatcaggtatatcccatgggcccc

SEQ ID NO: 4449395 - DNA, 25 bp, Homo sapien
taatcggacagtaatcaggcatcaa

SEQ ID NO: 4449396 - DNA, 25 bp, Homo sapien
aaatgcctggcgttcactgcttgag

SEQ ID NO: 4449397 - DNA, 25 bp, Homo sapien
cactcttccggtgaggtactattga

SEQ ID NO: 4449398 - DNA, 25 bp, Homo sapien
tggacaagtcactcttccggtgagg

SEQ ID NO: 4449399 - DNA, 25 bp, Homo sapien
gataagggatacacaggcccctgtg

SEQ ID NO: 4449400 - DNA, 25 bp, Homo sapien
ggccctgaccacaaccttggacaag

SEQ ID NO: 4449401 - DNA, 25 bp, Homo sapien
ggtgcctttgccatgtatctgtgga

SEQ ID NO: 4449402 - DNA, 25 bp, Homo sapien
ggaagtaatctttgttgcccctgta

SEQ ID NO: 4449403 - DNA, 25 bp, Homo sapien
tatctgtggaatgcatgggtaaatc

SEQ ID NO: 4449404 - DNA, 25 bp, Homo sapien
gacagcctgtcatgatctagggaag

SEQ ID NO: 4449405 - DNA, 25 bp, Homo sapien
taggttctattggtgaaacttgtgt

SEQ ID NO: 4449406 - DNA, 25 bp, Homo sapien
cacatgtaggtctcataggttctat

SEQ ID NO: 4449407 - DNA, 25 bp, Homo sapien
ctctgcagcacatgtaggtctcata

SEQ ID NO: 4449408 - DNA, 25 bp, Homo sapien
gaaggagacacagtcagcttcagct

SEQ ID NO: 4449409 - DNA, 25 bp, Homo sapien
tccacagcagttagtaagggccata

SEQ ID NO: 4449410 - DNA, 25 bp, Homo sapien
tattgttgtagaatccacagcagtt

SEQ ID NO: 4449411 - DNA, 25 bp, Homo sapien
agggccatagcactgaactccttat

SEQ ID NO: 4449412 - DNA, 25 bp, Homo sapien
aaagaaggagggttggtgccattca

SEQ ID NO: 4449413 - DNA, 25 bp, Homo sapien
tgtgggcaccctgagtacataaaca

SEQ ID NO: 4449414 - DNA, 25 bp, Homo sapien
catcttggtgagtgagttgtgggca

SEQ ID NO: 4449415 - DNA, 25 bp, Homo sapien
ctgagcccggcccaaaatgaatctt

SEQ ID NO: 4449416 - DNA, 25 bp, Homo sapien
tacatttactgttacttactgttaa

SEQ ID NO: 4449417 - DNA, 25 bp, Homo sapien
ctacagtcgcccgacaccactcccg

SEQ ID NO: 4449418 - DNA, 25 bp, Homo sapien
gactacagtcgcccgacaccactcc

SEQ ID NO: 4449419 - DNA, 25 bp, Homo sapien
gggactacagtcgcccgacaccact

SEQ ID NO: 4449420 - DNA, 25 bp, Homo sapien
tacagtcgcccgacaccactcccgg

SEQ ID NO: 4449421 - DNA, 25 bp, Homo sapien
ccgtcccaggcaaattacatactaa

SEQ ID NO: 4449422 - DNA, 25 bp, Homo sapien
caaatgtttgacaaccagaaaaatc

SEQ ID NO: 4449423 - DNA, 25 bp, Homo sapien
gatggcaactagaagcatgatttgt

SEQ ID NO: 4449424 - DNA, 25 bp, Homo sapien
taaatcacatttatagcacactgca

SEQ ID NO: 4449425 - DNA, 25 bp, Homo sapien
gaattttagtagcaatattggcctc

SEQ ID NO: 4449426 - DNA, 25 bp, Homo sapien
taaacttggagcaaatgtggctagc

SEQ ID NO: 4449427 - DNA, 25 bp, Homo sapien
taattcttcgttgtgggagagctga

SEQ ID NO: 4449428 - DNA, 25 bp, Homo sapien
taatcaccaataatgtctggagaca

SEQ ID NO: 4449429 - DNA, 25 bp, Homo sapien
ttcagtgacataatattcacaatgt

SEQ ID NO: 4449430 - DNA, 25 bp, Homo sapien
tcgtttagcatgttttcggggtgcc

SEQ ID NO: 4449431 - DNA, 25 bp, Homo sapien
caataataagacttttgtgtctagc

SEQ ID NO: 4449432 - DNA, 25 bp, Homo sapien
tgttttcggggtgcctctacatagc

SEQ ID NO: 4449433 - DNA, 25 bp, Homo sapien
cattatttcaatggacttttgagca

SEQ ID NO: 4449434 - DNA, 25 bp, Homo sapien
caagaggagctaggcttccacactc

SEQ ID NO: 4449435 - DNA, 25 bp, Homo sapien
tttcaatggacttttgagcaagagg

SEQ ID NO: 4449436 - DNA, 25 bp, Homo sapien
ggagctaggcttccacactctacga

SEQ ID NO: 4449437 - DNA, 25 bp, Homo sapien
gcaaaatctactgctacagccaagg

SEQ ID NO: 4449438 - DNA, 25 bp, Homo sapien
gccaaggctttaaggtcagcattct

SEQ ID NO: 4449439 - DNA, 25 bp, Homo sapien
caacagtcatggcaaaatctactgc

SEQ ID NO: 4449440 - DNA, 25 bp, Homo sapien
ctattccacaacagtcatggcaaaa

SEQ ID NO: 4449441 - DNA, 25 bp, Homo sapien
tctgatggagccagactagatggag

SEQ ID NO: 4449442 - DNA, 25 bp, Homo sapien
attccctttctaatgcgttggaaag

SEQ ID NO: 4449443 - DNA, 25 bp, Homo sapien
ctctgatggagccagactagatgga

SEQ ID NO: 4449444 - DNA, 25 bp, Homo sapien
ccgacagagaaatatgtgagtgtct

SEQ ID NO: 4449445 - DNA, 25 bp, Homo sapien
aatatgtgagtgtcttccttgtgaa

SEQ ID NO: 4449446 - DNA, 25 bp, Homo sapien
tcttccttgtgaagctgaagcagac

SEQ ID NO: 4449447 - DNA, 25 bp, Homo sapien
ttccttgtgaagctgaagcagacat

SEQ ID NO: 4449448 - DNA, 25 bp, Homo sapien
aattttggcgctcattatcaccttc

SEQ ID NO: 4449449 - DNA, 25 bp, Homo sapien
tgtgaaaattttggcgctcattatc

SEQ ID NO: 4449450 - DNA, 25 bp, Homo sapien
ggcgctcattatcaccttcagcagg

SEQ ID NO: 4449451 - DNA, 25 bp, Homo sapien
ttgtgaaaattttggcgctcattat

SEQ ID NO: 4449452 - DNA, 25 bp, Homo sapien
cactctcccggtgggacacttttga

SEQ ID NO: 4449453 - DNA, 25 bp, Homo sapien
cccagtgagaaagatacccatgaca

SEQ ID NO: 4449454 - DNA, 25 bp, Homo sapien
cacaagcattgggaagcacaagccc

SEQ ID NO: 4449455 - DNA, 25 bp, Homo sapien
tggaaaagtcactctcccggtggga

SEQ ID NO: 4449456 - DNA, 25 bp, Homo sapien
acctcggaaactctttccacttctg

SEQ ID NO: 4449457 - DNA, 25 bp, Homo sapien
tcaggctccaagatacaggggtgtg

SEQ ID NO: 4449458 - DNA, 25 bp, Homo sapien
ggctccaagatacaggggtgtgact

SEQ ID NO: 4449459 - DNA, 25 bp, Homo sapien
agatacaggggtgtgactttccaaa

SEQ ID NO: 4449460 - DNA, 25 bp, Homo sapien
ggctggcctcagatacacctaagaa

SEQ ID NO: 4449461 - DNA, 25 bp, Homo sapien
tacttggactgaacaggcctgatgg

SEQ ID NO: 4449462 - DNA, 25 bp, Homo sapien
cattgctggacctgcgatgtccggc

SEQ ID NO: 4449463 - DNA, 25 bp, Homo sapien
gaggcaccttacagtcctacttgga

SEQ ID NO: 4449464 - DNA, 25 bp, Homo sapien
gtctgtaggcctactttctctatga

SEQ ID NO: 4449465 - DNA, 25 bp, Homo sapien
ccattggttaaataggccatgcaca

SEQ ID NO: 4449466 - DNA, 25 bp, Homo sapien
tttggtaggtacatctgctcagtct

SEQ ID NO: 4449467 - DNA, 25 bp, Homo sapien
cattgtttccttatggtggcctggt

SEQ ID NO: 4449468 - DNA, 25 bp, Homo sapien
gaccctttagtgactttgtagccta

SEQ ID NO: 4449469 - DNA, 25 bp, Homo sapien
gaactactgaaagaactgagctgtc

SEQ ID NO: 4449470 - DNA, 25 bp, Homo sapien
gatagcggacatggtttaacagttg

SEQ ID NO: 4449471 - DNA, 25 bp, Homo sapien
tgaggcaccatctctgggcaatagt

SEQ ID NO: 4449472 - DNA, 25 bp, Homo sapien
tatggtggatgccaatgaagttcca

SEQ ID NO: 4449473 - DNA, 25 bp, Homo sapien
tccctagccggaattgcacgagagt

SEQ ID NO: 4449474 - DNA, 25 bp, Homo sapien
tcagcttcaagagccttcgcaggct

SEQ ID NO: 4449475 - DNA, 25 bp, Homo sapien
gagcgagcgaccagattcactccaa

SEQ ID NO: 4449476 - DNA, 25 bp, Homo sapien
ctctaccggaccttggtgcgctgca

SEQ ID NO: 4449477 - DNA, 25 bp, Homo sapien
tttgcttttataacagtaggactgg

SEQ ID NO: 4449478 - DNA, 25 bp, Homo sapien
aatcagaggcatagcaaaaaggagg

SEQ ID NO: 4449479 - DNA, 25 bp, Homo sapien
tttaaattgatgaggtcactctaga

SEQ ID NO: 4449480 - DNA, 25 bp, Homo sapien
tagcaaaaaggaggagtgagtgctt

SEQ ID NO: 4449481 - DNA, 25 bp, Homo sapien
gcccacaaaaagcggaacaccgagc

SEQ ID NO: 4449482 - DNA, 25 bp, Homo sapien
atgaaccaggcagacgaaaccagat

SEQ ID NO: 4449483 - DNA, 25 bp, Homo sapien
gcagacgaaaccagattaggaaacc

SEQ ID NO: 4449484 - DNA, 25 bp, Homo sapien
accaggcagacgaaaccagattagg

SEQ ID NO: 4449485 - DNA, 25 bp, Homo sapien
ttcaggctgagactcctccgggatc

SEQ ID NO: 4449486 - DNA, 25 bp, Homo sapien
gtgccccggtctctagcgtctaagg

SEQ ID NO: 4449487 - DNA, 25 bp, Homo sapien
ggtagcgagatcttcactgccgagc

SEQ ID NO: 4449488 - DNA, 25 bp, Homo sapien
taagggtagcagctttaagagcggc

SEQ ID NO: 4449489 - DNA, 25 bp, Homo sapien
cgaggttccaccgacagtgggcaaa

SEQ ID NO: 4449490 - DNA, 25 bp, Homo sapien
ctaagaggcaaacgcctccggggca

SEQ ID NO: 4449491 - DNA, 25 bp, Homo sapien
tccggggcagccaaatggcgccaga

SEQ ID NO: 4449492 - DNA, 25 bp, Homo sapien
gggcaaacccgccaagcccattcac

SEQ ID NO: 4449493 - DNA, 25 bp, Homo sapien
taatctgtaatggacacctcgcttc

SEQ ID NO: 4449494 - DNA, 25 bp, Homo sapien
cattactgattataggacctgcaca

SEQ ID NO: 4449495 - DNA, 25 bp, Homo sapien
ggtatagatagctaggtccctgccc

SEQ ID NO: 4449496 - DNA, 25 bp, Homo sapien
tgtgggtacctcctcaattgtggaa

SEQ ID NO: 4449497 - DNA, 25 bp, Homo sapien
tcgaggtaatcacttgcagaatttc

SEQ ID NO: 4449498 - DNA, 25 bp, Homo sapien
tctttgtttaagtgtgggagtccca

SEQ ID NO: 4449499 - DNA, 25 bp, Homo sapien
cttcgaggtaatcacttgcagaatt

SEQ ID NO: 4449500 - DNA, 25 bp, Homo sapien
taagtgtgggagtcccaatgaccac

SEQ ID NO: 4449501 - DNA, 25 bp, Homo sapien
gagtgctgtcaggtcggcaccaaca

SEQ ID NO: 4449502 - DNA, 25 bp, Homo sapien
aatcaacatgactggagatgggcat

SEQ ID NO: 4449503 - DNA, 25 bp, Homo sapien
aacatagccaactgtcatttctgca

SEQ ID NO: 4449504 - DNA, 25 bp, Homo sapien
tggcagcctccctacagagtgctgt

SEQ ID NO: 4449505 - DNA, 25 bp, Homo sapien
gatcatcatactgtggttaaggtcc

SEQ ID NO: 4449506 - DNA, 25 bp, Homo sapien
gaacaaattcactcagtagacccag

SEQ ID NO: 4449507 - DNA, 25 bp, Homo sapien
gtagacccagaggactcagcccttt

SEQ ID NO: 4449508 - DNA, 25 bp, Homo sapien
tcagcactagggagttactataaga

SEQ ID NO: 4449509 - DNA, 25 bp, Homo sapien
cctcctgaagtagcagtgggctcca

SEQ ID NO: 4449510 - DNA, 25 bp, Homo sapien
agtgagaggtgcttatggtcaaacc

SEQ ID NO: 4449511 - DNA, 25 bp, Homo sapien
cacctgtggtaactacacctgagca

SEQ ID NO: 4449512 - DNA, 25 bp, Homo sapien
tgactggtccacctaagtgagaggt

SEQ ID NO: 4449513 - DNA, 25 bp, Homo sapien
gcttcgaaacgatgagggctgaata

SEQ ID NO: 4449514 - DNA, 25 bp, Homo sapien
tcctcccagtcaacaggcttgatat

SEQ ID NO: 4449515 - DNA, 25 bp, Homo sapien
cattaatccaatgacgcttcgaaac

SEQ ID NO: 4449516 - DNA, 25 bp, Homo sapien
gcttcaaggaagtctatttcatcaa

SEQ ID NO: 4449517 - DNA, 25 bp, Homo sapien
gagctgactagctgaactttttaca

SEQ ID NO: 4449518 - DNA, 25 bp, Homo sapien
tcaaaaattctagggttcactggag

SEQ ID NO: 4449519 - DNA, 25 bp, Homo sapien
tgagtcaacagttttcagggatgct

SEQ ID NO: 4449520 - DNA, 25 bp, Homo sapien
ggaaacagagtgcttccaacaggaa

SEQ ID NO: 4449521 - DNA, 25 bp, Homo sapien
tcccaagggaatttcagaggccact

SEQ ID NO: 4449522 - DNA, 25 bp, Homo sapien
ctttggttgtgtcaggcccattcta

SEQ ID NO: 4449523 - DNA, 25 bp, Homo sapien
gtgtcaggcccattctaacaaattc

SEQ ID NO: 4449524 - DNA, 25 bp, Homo sapien
ggcccatagaggagaactccctttg

SEQ ID NO: 4449525 - DNA, 25 bp, Homo sapien
aaacgaaagagcagtgacagcttgt

SEQ ID NO: 4449526 - DNA, 25 bp, Homo sapien
gaaacgaaagagcagtgacagcttg

SEQ ID NO: 4449527 - DNA, 25 bp, Homo sapien
tgaaacgaaagagcagtgacagctt

SEQ ID NO: 4449528 - DNA, 25 bp, Homo sapien
tctgaatctccaacaaacggtgaaa

SEQ ID NO: 4449529 - DNA, 25 bp, Homo sapien
gtgaaaacagatcagctccactcac

SEQ ID NO: 4449530 - DNA, 25 bp, Homo sapien
tgaatctccaacaaacggtgaaaac

SEQ ID NO: 4449531 - DNA, 25 bp, Homo sapien
ttttctgaatctccaacaaacggtg

SEQ ID NO: 4449532 - DNA, 25 bp, Homo sapien
ctatgaattggggaatgagtaaata

SEQ ID NO: 4449533 - DNA, 25 bp, Homo sapien
ggtttgtccataagaaatgaaataa

SEQ ID NO: 4449534 - DNA, 25 bp, Homo sapien
cagtaggtaggaggattatgaagga

SEQ ID NO: 4449535 - DNA, 25 bp, Homo sapien
caatggagtattatgtaagagttaa

SEQ ID NO: 4449536 - DNA, 25 bp, Homo sapien
tgcttgctcttgcttgtcgaaatat

SEQ ID NO: 4449537 - DNA, 25 bp, Homo sapien
tccaacaccatctaattcattcagg

SEQ ID NO: 4449538 - DNA, 25 bp, Homo sapien
cacatcctgtcttgctggctgagcg

SEQ ID NO: 4449539 - DNA, 25 bp, Homo sapien
gctgagcgagctcccaagattgaat

SEQ ID NO: 4449540 - DNA, 25 bp, Homo sapien
cttcattttttcagctccttgtatt

SEQ ID NO: 4449541 - DNA, 25 bp, Homo sapien
tcattttttcagctccttgtattta

SEQ ID NO: 4449542 - DNA, 25 bp, Homo sapien
ctcttcattttttcagctccttgta

SEQ ID NO: 4449543 - DNA, 25 bp, Homo sapien
cattttttcagctccttgtatttac

SEQ ID NO: 4449544 - DNA, 25 bp, Homo sapien
gattagataacctcgtggatacctc

SEQ ID NO: 4449545 - DNA, 25 bp, Homo sapien
tgtcagatgctatagaaggaattcc

SEQ ID NO: 4449546 - DNA, 25 bp, Homo sapien
gaaactcattcctcaagaaaactgg

SEQ ID NO: 4449547 - DNA, 25 bp, Homo sapien
tattcctaaggagtgtatgcaacaa

SEQ ID NO: 4449548 - DNA, 25 bp, Homo sapien
tccaggtcgtaacaaagcagtatct

SEQ ID NO: 4449549 - DNA, 25 bp, Homo sapien
tctggaggtgggatatagatgatct

SEQ ID NO: 4449550 - DNA, 25 bp, Homo sapien
ctgcaataatcatgacacttcggtt

SEQ ID NO: 4449551 - DNA, 25 bp, Homo sapien
gcagtatctaacacatcaggtctat

SEQ ID NO: 4449552 - DNA, 25 bp, Homo sapien
ctatatccaagttggaattcaattc

SEQ ID NO: 4449553 - DNA, 25 bp, Homo sapien
acagagtaaatgtgtaaatgactac

SEQ ID NO: 4449554 - DNA, 25 bp, Homo sapien
atatccaagttggaattcaattctg

SEQ ID NO: 4449555 - DNA, 25 bp, Homo sapien
cacagagtaaatgtgtaaatgacta

SEQ ID NO: 4449556 - DNA, 25 bp, Homo sapien
tgcaaaataacgctgagtagactca

SEQ ID NO: 4449557 - DNA, 25 bp, Homo sapien
caagatcagagtatccaacaaagga

SEQ ID NO: 4449558 - DNA, 25 bp, Homo sapien
aacccagggtaagtagaacaccatg

SEQ ID NO: 4449559 - DNA, 25 bp, Homo sapien
ggattcctccactctagttgcaaaa

SEQ ID NO: 4449560 - DNA, 25 bp, Homo sapien
tctgtaatctcagatttctgcaccg

SEQ ID NO: 4449561 - DNA, 25 bp, Homo sapien
gctctggatgttaacgacaaaaaat

SEQ ID NO: 4449562 - DNA, 25 bp, Homo sapien
tgtaatctcagatttctgcaccgta

SEQ ID NO: 4449563 - DNA, 25 bp, Homo sapien
ctgtcagtggctctggatgttaacg

SEQ ID NO: 4449564 - DNA, 25 bp, Homo sapien
aacatttatgtttgacacaatgatt

SEQ ID NO: 4449565 - DNA, 25 bp, Homo sapien
tcctttcacattaccgagaaaatat

SEQ ID NO: 4449566 - DNA, 25 bp, Homo sapien
cattaccgagaaaatatatataggg

SEQ ID NO: 4449567 - DNA, 25 bp, Homo sapien
catttatgtttgacacaatgattta

SEQ ID NO: 4449568 - DNA, 25 bp, Homo sapien
gacatcaggccctattggcatggtt

SEQ ID NO: 4449569 - DNA, 25 bp, Homo sapien
acaggtttctgctgcgaggttttct

SEQ ID NO: 4449570 - DNA, 25 bp, Homo sapien
ttttctaaggagacatcaggcccta

SEQ ID NO: 4449571 - DNA, 25 bp, Homo sapien
cctattggcatggtttttgtacaga

SEQ ID NO: 4449572 - DNA, 25 bp, Homo sapien
gctggtgtctttcctaggtgctccc

SEQ ID NO: 4449573 - DNA, 25 bp, Homo sapien
tagctggctaactcccgatttgtcc

SEQ ID NO: 4449574 - DNA, 25 bp, Homo sapien
cacatggtaccacacaggcttttag

SEQ ID NO: 4449575 - DNA, 25 bp, Homo sapien
gctgggactaacaccacatttgact

SEQ ID NO: 4449576 - DNA, 25 bp, Homo sapien
aaatgtgatcactttaattcaatga

SEQ ID NO: 4449577 - DNA, 25 bp, Homo sapien
tcttttggaagaaggtaggtgacag

SEQ ID NO: 4449578 - DNA, 25 bp, Homo sapien
gttctatttcttgacataagtagtg

SEQ ID NO: 4449579 - DNA, 25 bp, Homo sapien
gaactgtacccttatgatccgtgca

SEQ ID NO: 4449580 - DNA, 25 bp, Homo sapien
tagacacgggaactaagagacatgt

SEQ ID NO: 4449581 - DNA, 25 bp, Homo sapien
gagacatgtacaaggctgttcacag

SEQ ID NO: 4449582 - DNA, 25 bp, Homo sapien
gagagaatatcttcctgatcgttaa

SEQ ID NO: 4449583 - DNA, 25 bp, Homo sapien
gatcgttaagtagggaagagtcttc

SEQ ID NO: 4449584 - DNA, 25 bp, Homo sapien
caagtccttgcaacttaacgacggt

SEQ ID NO: 4449585 - DNA, 25 bp, Homo sapien
cgacggttttacagtcttaagtgat

SEQ ID NO: 4449586 - DNA, 25 bp, Homo sapien
tgtagttgcgtctagtccattttct

SEQ ID NO: 4449587 - DNA, 25 bp, Homo sapien
gctcttgtttcactgtagttgcgtc

SEQ ID NO: 4449588 - DNA, 25 bp, Homo sapien
caggcaagttcacatttcaattaat

SEQ ID NO: 4449589 - DNA, 25 bp, Homo sapien
gttgcaaacgacaggcaagttcaca

SEQ ID NO: 4449590 - DNA, 25 bp, Homo sapien
tgtgaagttgcaaacgacaggcaag

SEQ ID NO: 4449591 - DNA, 25 bp, Homo sapien
aaagtgtgaagttgcaaacgacagg

SEQ ID NO: 4449592 - DNA, 25 bp, Homo sapien
tgagccttagcttatcaggcacaag

SEQ ID NO: 4449593 - DNA, 25 bp, Homo sapien
ccttagcttatcaggcacaagtttt

SEQ ID NO: 4449594 - DNA, 25 bp, Homo sapien
gagccttagcttatcaggcacaagt

SEQ ID NO: 4449595 - DNA, 25 bp, Homo sapien
aatgagccttagcttatcaggcaca

SEQ ID NO: 4449596 - DNA, 25 bp, Homo sapien
accctctgtggctgccccggagccc

SEQ ID NO: 4449597 - DNA, 25 bp, Homo sapien
cctctgtggctgccccggagcccat

SEQ ID NO: 4449598 - DNA, 25 bp, Homo sapien
cagcatcaccctctgtggctgcccc

SEQ ID NO: 4449599 - DNA, 25 bp, Homo sapien
gcatcaccctctgtggctgccccgg

SEQ ID NO: 4449600 - DNA, 25 bp, Homo sapien
aagaggggagcgcagatagccgagg

SEQ ID NO: 4449601 - DNA, 25 bp, Homo sapien
taagaggggagcgcagatagccgag

SEQ ID NO: 4449602 - DNA, 25 bp, Homo sapien
ctaagaggggagcgcagatagccga

SEQ ID NO: 4449603 - DNA, 25 bp, Homo sapien
agaggggagcgcagatagccgaggc

SEQ ID NO: 4449604 - DNA, 25 bp, Homo sapien
gcccccctaggtgcttgtgaggagt

SEQ ID NO: 4449605 - DNA, 25 bp, Homo sapien
tggcccccctaggtgcttgtgagga

SEQ ID NO: 4449606 - DNA, 25 bp, Homo sapien
ctgccgaccccggtcgctcttggcc

SEQ ID NO: 4449607 - DNA, 25 bp, Homo sapien
cccctaggtgcttgtgaggagtttg

SEQ ID NO: 4449608 - DNA, 25 bp, Homo sapien
ggcggcctccccaccttatatatag

SEQ ID NO: 4449609 - DNA, 25 bp, Homo sapien
gcacggacgatggtaacgcccggaa

SEQ ID NO: 4449610 - DNA, 25 bp, Homo sapien
cgggcggtgcgcacggacgatggta

SEQ ID NO: 4449611 - DNA, 25 bp, Homo sapien
atatatagcgaccacaaccgccccg

SEQ ID NO: 4449612 - DNA, 25 bp, Homo sapien
cgcgtccgcgtctctgcagatggga

SEQ ID NO: 4449613 - DNA, 25 bp, Homo sapien
ctggtgggcgccaaaccgtccaccg

SEQ ID NO: 4449614 - DNA, 25 bp, Homo sapien
ctccgcaggccaactgcgggccggc

SEQ ID NO: 4449615 - DNA, 25 bp, Homo sapien
caaagtattgatcgcctggtgggcg

SEQ ID NO: 4449616 - DNA, 25 bp, Homo sapien
tgacttcagcgaagaattgccaaat

SEQ ID NO: 4449617 - DNA, 25 bp, Homo sapien
atgacttcagcgaagaattgccaaa

SEQ ID NO: 4449618 - DNA, 25 bp, Homo sapien
gatgacttcagcgaagaattgccaa

SEQ ID NO: 4449619 - DNA, 25 bp, Homo sapien
ccttccttttcatcaggagttggaa

SEQ ID NO: 4449620 - DNA, 25 bp, Homo sapien
cttttcatcaggagttggaaaaagc

SEQ ID NO: 4449621 - DNA, 25 bp, Homo sapien
ccttttcatcaggagttggaaaaag

SEQ ID NO: 4449622 - DNA, 25 bp, Homo sapien
ttccttttcatcaggagttggaaaa

SEQ ID NO: 4449623 - DNA, 25 bp, Homo sapien
aagagaatacacagcgaaagatgag

SEQ ID NO: 4449624 - DNA, 25 bp, Homo sapien
agatgaggctccacccgccgccaca

SEQ ID NO: 4449625 - DNA, 25 bp, Homo sapien
agagaatacacagcgaaagatgagg

SEQ ID NO: 4449626 - DNA, 25 bp, Homo sapien
acagtcatgaacaccaccaagggaa

SEQ ID NO: 4449627 - DNA, 25 bp, Homo sapien
cttttgaggtacagtagggtccaca

SEQ ID NO: 4449628 - DNA, 25 bp, Homo sapien
acagtagggtccacagtttcccaag

SEQ ID NO: 4449629 - DNA, 25 bp, Homo sapien
tgaggtacagtagggtccacagttt

SEQ ID NO: 4449630 - DNA, 25 bp, Homo sapien
gtacagtagggtccacagtttccca

SEQ ID NO: 4449631 - DNA, 25 bp, Homo sapien
ttggacattttgcaactcttcaatg

SEQ ID NO: 4449632 - DNA, 25 bp, Homo sapien
ctttggacattttgcaactcttcaa

SEQ ID NO: 4449633 - DNA, 25 bp, Homo sapien
tggacattttgcaactcttcaatgg

SEQ ID NO: 4449634 - DNA, 25 bp, Homo sapien
cctttggacattttgcaactcttca

SEQ ID NO: 4449635 - DNA, 25 bp, Homo sapien
ccagaatctagtttgtgcagaaatg

SEQ ID NO: 4449636 - DNA, 25 bp, Homo sapien
gaagcatttccgcacactggtgtcc

SEQ ID NO: 4449637 - DNA, 25 bp, Homo sapien
tccagagcccaaaaaatgtagacaa

SEQ ID NO: 4449638 - DNA, 25 bp, Homo sapien
agacaaaccctaaaaatgtagcaga

SEQ ID NO: 4449639 - DNA, 25 bp, Homo sapien
aaaacattcatagatcataaacaaa

SEQ ID NO: 4449640 - DNA, 25 bp, Homo sapien
aaacattcatagatcataaacaaaa

SEQ ID NO: 4449641 - DNA, 25 bp, Homo sapien
gaaatttcatggttcaaatgtattt

SEQ ID NO: 4449642 - DNA, 25 bp, Homo sapien
tctgtactggatgttatttaaaaga

SEQ ID NO: 4449643 - DNA, 25 bp, Homo sapien
gaaatctgtactggatgttatttaa

SEQ ID NO: 4449644 - DNA, 25 bp, Homo sapien
aaagatgaaatttcatggttcaaat

SEQ ID NO: 4449645 - DNA, 25 bp, Homo sapien
aaaaatgtgcttcccaattgctacg

SEQ ID NO: 4449646 - DNA, 25 bp, Homo sapien
gagactttaatctgagacgacttga

SEQ ID NO: 4449647 - DNA, 25 bp, Homo sapien
tattgctgtgaaggtaacgctggag

SEQ ID NO: 4449648 - DNA, 25 bp, Homo sapien
tgataccccaaatgaaggccgcaga

SEQ ID NO: 4449649 - DNA, 25 bp, Homo sapien
agtggagccaagtgcctcccaggcc

SEQ ID NO: 4449650 - DNA, 25 bp, Homo sapien
gggcgctgtggggttgccctcctca

SEQ ID NO: 4449651 - DNA, 25 bp, Homo sapien
gtctgcaggtgacaaacccagatag

SEQ ID NO: 4449652 - DNA, 25 bp, Homo sapien
caggttgcccaatccctcagggcag

SEQ ID NO: 4449653 - DNA, 25 bp, Homo sapien
acgttagctggtgagtgatttcccc

SEQ ID NO: 4449654 - DNA, 25 bp, Homo sapien
attcaaaggtggctggcgcacggtg

SEQ ID NO: 4449655 - DNA, 25 bp, Homo sapien
gtggctggcgcacggtgagcactga

SEQ ID NO: 4449656 - DNA, 25 bp, Homo sapien
cctcaagggctgtggaggattcaaa

SEQ ID NO: 4449657 - DNA, 25 bp, Homo sapien
gcttcaccatcacactgctggacgc

SEQ ID NO: 4449658 - DNA, 25 bp, Homo sapien
gacgccctcagaatggtgacatccc

SEQ ID NO: 4449659 - DNA, 25 bp, Homo sapien
tgctggacgccctcagaatggtgac

SEQ ID NO: 4449660 - DNA, 25 bp, Homo sapien
tggacgccctcagaatggtgacatc

SEQ ID NO: 4449661 - DNA, 25 bp, Homo sapien
gacgcgggacaggaggggctggaac

SEQ ID NO: 4449662 - DNA, 25 bp, Homo sapien
ctgacgcgggacaggaggggctgga

SEQ ID NO: 4449663 - DNA, 25 bp, Homo sapien
tgacgcgggacaggaggggctggaa

SEQ ID NO: 4449664 - DNA, 25 bp, Homo sapien
tgcagtatgcaggagccgagacctg

SEQ ID NO: 4449665 - DNA, 25 bp, Homo sapien
gggcaggcagcttgtgtgctacaga

SEQ ID NO: 4449666 - DNA, 25 bp, Homo sapien
agccgagacctgcaggtcagagtga

SEQ ID NO: 4449667 - DNA, 25 bp, Homo sapien
cgagacctgcaggtcagagtgaaga

SEQ ID NO: 4449668 - DNA, 25 bp, Homo sapien
cccagacgctccctggatgttccag

SEQ ID NO: 4449669 - DNA, 25 bp, Homo sapien
ttctgaccatttgtgaccttcctgt

SEQ ID NO: 4449670 - DNA, 25 bp, Homo sapien
gagttgtcgaagactcctggggaaa

SEQ ID NO: 4449671 - DNA, 25 bp, Homo sapien
catttgtgaccttcctgtggcctgg

SEQ ID NO: 4449672 - DNA, 25 bp, Homo sapien
tgagtcaggactcctttcggtaagg

SEQ ID NO: 4449673 - DNA, 25 bp, Homo sapien
cccttctcatccacaggtgggagca

SEQ ID NO: 4449674 - DNA, 25 bp, Homo sapien
tcctttcggtaaggcgtggccgcca

SEQ ID NO: 4449675 - DNA, 25 bp, Homo sapien
caaagcttggtcaacctgataggcc

SEQ ID NO: 4449676 - DNA, 25 bp, Homo sapien
tgctggggtttgaggctgtgtcagg

SEQ ID NO: 4449677 - DNA, 25 bp, Homo sapien
ctgctggggtttgaggctgtgtcag

SEQ ID NO: 4449678 - DNA, 25 bp, Homo sapien
tttagctcctgtgggctatacagtg

SEQ ID NO: 4449679 - DNA, 25 bp, Homo sapien
gggtctgcccctggatttagctcct

SEQ ID NO: 4449680 - DNA, 25 bp, Homo sapien
ccctctacccttcggcagaagcctg

SEQ ID NO: 4449681 - DNA, 25 bp, Homo sapien
ctgcccctggatttagctcctgtgg

SEQ ID NO: 4449682 - DNA, 25 bp, Homo sapien
tctgggctcttggcccagaagcctg

SEQ ID NO: 4449683 - DNA, 25 bp, Homo sapien
tccgatctcatttcggggacagcag

SEQ ID NO: 4449684 - DNA, 25 bp, Homo sapien
agcaccagtggccaaacctggacgg

SEQ ID NO: 4449685 - DNA, 25 bp, Homo sapien
tcaagctggatgtcccatgggcact

SEQ ID NO: 4449686 - DNA, 25 bp, Homo sapien
tcagacttgtcacctctcctccaaa

SEQ ID NO: 4449687 - DNA, 25 bp, Homo sapien
ttgtgacgacacagcggggaaacca

SEQ ID NO: 4449688 - DNA, 25 bp, Homo sapien
gctggcagcaggccttgtgacgaca

SEQ ID NO: 4449689 - DNA, 25 bp, Homo sapien
ggcagcaggccttgtgacgacacag

SEQ ID NO: 4449690 - DNA, 25 bp, Homo sapien
cacagcggggaaaccacaggattct

SEQ ID NO: 4449691 - DNA, 25 bp, Homo sapien
ggaatgtggtgaatgacgtcatcac

SEQ ID NO: 4449692 - DNA, 25 bp, Homo sapien
gaatgacgtcatcactgctgttcat

SEQ ID NO: 4449693 - DNA, 25 bp, Homo sapien
caaagacgagcgcatgtggaatgtg

SEQ ID NO: 4449694 - DNA, 25 bp, Homo sapien
ctagtgcaaagacgagcgcatgtgg

SEQ ID NO: 4449695 - DNA, 25 bp, Homo sapien
caagaatacaggaacgtcaagccac

SEQ ID NO: 4449696 - DNA, 25 bp, Homo sapien
gacatcgtgagtggttcatcagcaa

SEQ ID NO: 4449697 - DNA, 25 bp, Homo sapien
catttcctgaggtagccaagacagg

SEQ ID NO: 4449698 - DNA, 25 bp, Homo sapien
tttcacaagcgcctggcaggagcca

SEQ ID NO: 4449699 - DNA, 25 bp, Homo sapien
cgaggctatagtgagctataactgc

SEQ ID NO: 4449700 - DNA, 25 bp, Homo sapien
gctatagtgagctataactgcacca

SEQ ID NO: 4449701 - DNA, 25 bp, Homo sapien
gtagtcctgactactcgggagactg

SEQ ID NO: 4449702 - DNA, 25 bp, Homo sapien
ggctatagtgagctataactgcacc

SEQ ID NO: 4449703 - DNA, 25 bp, Homo sapien
gggctagcttagacaagctacctcc

SEQ ID NO: 4449704 - DNA, 25 bp, Homo sapien
tgtggatcagcctctgggctagctt

SEQ ID NO: 4449705 - DNA, 25 bp, Homo sapien
agctacctccgttcccacatttgca

SEQ ID NO: 4449706 - DNA, 25 bp, Homo sapien
gcttgatgtggatcagcctctgggc

SEQ ID NO: 4449707 - DNA, 25 bp, Homo sapien
gaacccgagaaagaaggactgtagc

SEQ ID NO: 4449708 - DNA, 25 bp, Homo sapien
cttggtacttttatgggcgtccttg

SEQ ID NO: 4449709 - DNA, 25 bp, Homo sapien
tatttgcggaagcaggacctttgct

SEQ ID NO: 4449710 - DNA, 25 bp, Homo sapien
caagtacaagctatttgagttgccg

SEQ ID NO: 4449711 - DNA, 25 bp, Homo sapien
tgctcccgttgtcctcactgtctgt

SEQ ID NO: 4449712 - DNA, 25 bp, Homo sapien
tgtctgtcccctaataagtaaccac

SEQ ID NO: 4449713 - DNA, 25 bp, Homo sapien
aaagacagtgaatagctcatcctcc

SEQ ID NO: 4449714 - DNA, 25 bp, Homo sapien
tacgtgaaccttcacgcggtccaaa

SEQ ID NO: 4449715 - DNA, 25 bp, Homo sapien
cattttacaggttatctcagtagga

SEQ ID NO: 4449716 - DNA, 25 bp, Homo sapien
tatctcagtaggagtgggaaagcct

SEQ ID NO: 4449717 - DNA, 25 bp, Homo sapien
ggaaagcctcgatccttcaccaaac

SEQ ID NO: 4449718 - DNA, 25 bp, Homo sapien
gaaacaccaggttcaccaacaacta

SEQ ID NO: 4449719 - DNA, 25 bp, Homo sapien
ccagaagcctatggttggagctgct

SEQ ID NO: 4449720 - DNA, 25 bp, Homo sapien
tcatccttccaccagaagcctatgg

SEQ ID NO: 4449721 - DNA, 25 bp, Homo sapien
tccaccagaagcctatggttggagc

SEQ ID NO: 4449722 - DNA, 25 bp, Homo sapien
gtgacatcctatcacagccccttcc

SEQ ID NO: 4449723 - DNA, 25 bp, Homo sapien
gctgaaattctgctgctgcactcca

SEQ ID NO: 4449724 - DNA, 25 bp, Homo sapien
cagtgagctgaaattctgctgctgc

SEQ ID NO: 4449725 - DNA, 25 bp, Homo sapien
gctacttgggagatcccttgaaccc

SEQ ID NO: 4449726 - DNA, 25 bp, Homo sapien
cccttgaacccagcaagtcgaggtt

SEQ ID NO: 4449727 - DNA, 25 bp, Homo sapien
ctgtgaaggctatggggcaattcct

SEQ ID NO: 4449728 - DNA, 25 bp, Homo sapien
caattccttgtttcaacacgttctt

SEQ ID NO: 4449729 - DNA, 25 bp, Homo sapien
tatggggcaattccttgtttcaaca

SEQ ID NO: 4449730 - DNA, 25 bp, Homo sapien
tctttttcagtttacaacttgactg

SEQ ID NO: 4449731 - DNA, 25 bp, Homo sapien
gaagtctcctagaacctgcttgcaa

SEQ ID NO: 4449732 - DNA, 25 bp, Homo sapien
taagactataacaagccgggtgcgg

SEQ ID NO: 4449733 - DNA, 25 bp, Homo sapien
gactggtaagtctgaagccacctga

SEQ ID NO: 4449734 - DNA, 25 bp, Homo sapien
gcctgctgactctccaatcgtgtgg

SEQ ID NO: 4449735 - DNA, 25 bp, Homo sapien
gacaaggcaccgcttagaaatgtat

SEQ ID NO: 4449736 - DNA, 25 bp, Homo sapien
tgcacactggacttcgtagagtaag

SEQ ID NO: 4449737 - DNA, 25 bp, Homo sapien
tcaagatcagacacgtgagcttctc

SEQ ID NO: 4449738 - DNA, 25 bp, Homo sapien
gactttgggtcgtgtttctcagcca

SEQ ID NO: 4449739 - DNA, 25 bp, Homo sapien
aaagagctctatgccctgtgaaaag

SEQ ID NO: 4449740 - DNA, 25 bp, Homo sapien
gaccaaggactgaatgacttctgac

SEQ ID NO: 4449741 - DNA, 25 bp, Homo sapien
taacttagcagataggaccaaggac

SEQ ID NO: 4449742 - DNA, 25 bp, Homo sapien
gacttctgacaaaaagcgtttggtc

SEQ ID NO: 4449743 - DNA, 25 bp, Homo sapien
tgatggtccctctaatgaaacccag

SEQ ID NO: 4449744 - DNA, 25 bp, Homo sapien
gatttacctataagattgttgggag

SEQ ID NO: 4449745 - DNA, 25 bp, Homo sapien
taaaaggattgatggtccctctaat

SEQ ID NO: 4449746 - DNA, 25 bp, Homo sapien
tgttgggagttaatggtgtcaataa

SEQ ID NO: 4449747 - DNA, 25 bp, Homo sapien
tattgggctcctctaagaatcagag

SEQ ID NO: 4449748 - DNA, 25 bp, Homo sapien
tcagagtagggtaacaatgtaccag

SEQ ID NO: 4449749 - DNA, 25 bp, Homo sapien
tttaaagcactagatagggatggac

SEQ ID NO: 4449750 - DNA, 25 bp, Homo sapien
taaagaggcagcttgactgttcatg

SEQ ID NO: 4449751 - DNA, 25 bp, Homo sapien
ctttaaagggtaagttgcaggtcag

SEQ ID NO: 4449752 - DNA, 25 bp, Homo sapien
agaatatttcctgactggcatggtg

SEQ ID NO: 4449753 - DNA, 25 bp, Homo sapien
aaatatctggtctctcacttcagga

SEQ ID NO: 4449754 - DNA, 25 bp, Homo sapien
gcctttgaaactaaacatccctgct

SEQ ID NO: 4449755 - DNA, 25 bp, Homo sapien
tgtagtggcactgttgcagttcact

SEQ ID NO: 4449756 - DNA, 25 bp, Homo sapien
ccttaaaaactatggtgagctaact

SEQ ID NO: 4449757 - DNA, 25 bp, Homo sapien
gagtgtagtggcactgttgcagttc

SEQ ID NO: 4449758 - DNA, 25 bp, Homo sapien
agctaactgctagcttcagccttgg

SEQ ID NO: 4449759 - DNA, 25 bp, Homo sapien
taccaaaaagttagccgagcatggt

SEQ ID NO: 4449760 - DNA, 25 bp, Homo sapien
tactcgggaggctgaggcaggagaa

SEQ ID NO: 4449761 - DNA, 25 bp, Homo sapien
gacatgtgcctgtaattccagctac

SEQ ID NO: 4449762 - DNA, 25 bp, Homo sapien
aaataccaaaaagttagccgagcat

SEQ ID NO: 4449763 - DNA, 25 bp, Homo sapien
ttgtgggatacagtggctattccag

SEQ ID NO: 4449764 - DNA, 25 bp, Homo sapien
tgtgggcatgctatcttattctgga

SEQ ID NO: 4449765 - DNA, 25 bp, Homo sapien
ccattctaaagagaacaggctccac

SEQ ID NO: 4449766 - DNA, 25 bp, Homo sapien
gaaatcccacaagttctcaggagga

SEQ ID NO: 4449767 - DNA, 25 bp, Homo sapien
gatgaatggaaccttttaaagtcac

SEQ ID NO: 4449768 - DNA, 25 bp, Homo sapien
ggcctgatgaatggaaccttttaaa

SEQ ID NO: 4449769 - DNA, 25 bp, Homo sapien
taaagtcactaatagtccaggcact

SEQ ID NO: 4449770 - DNA, 25 bp, Homo sapien
caggcctgatgaatggaacctttta

SEQ ID NO: 4449771 - DNA, 25 bp, Homo sapien
tcacctttggatttcatcgcttagg

SEQ ID NO: 4449772 - DNA, 25 bp, Homo sapien
tgaactcgttccagtgatatcttgt

SEQ ID NO: 4449773 - DNA, 25 bp, Homo sapien
tataaccctgattaactgaactcgt

SEQ ID NO: 4449774 - DNA, 25 bp, Homo sapien
cctgcttgctttgtggctatcatca

SEQ ID NO: 4449775 - DNA, 25 bp, Homo sapien
tgacagatgcacttcatatgttaac

SEQ ID NO: 4449776 - DNA, 25 bp, Homo sapien
taactgacctaagcgccatcatact

SEQ ID NO: 4449777 - DNA, 25 bp, Homo sapien
tggatacattgcaaatagcctagca

SEQ ID NO: 4449778 - DNA, 25 bp, Homo sapien
gcaaatagcctagcaatcatgacag

SEQ ID NO: 4449779 - DNA, 25 bp, Homo sapien
ttctcgaagtgtggttccaagactt

SEQ ID NO: 4449780 - DNA, 25 bp, Homo sapien
ataacagtgattctcgaagtgtggt

SEQ ID NO: 4449781 - DNA, 25 bp, Homo sapien
tgattctcgaagtgtggttccaaga

SEQ ID NO: 4449782 - DNA, 25 bp, Homo sapien
agtgattctcgaagtgtggttccaa

SEQ ID NO: 4449783 - DNA, 25 bp, Homo sapien
gcaagcttcaagtgtccagtcaaat

SEQ ID NO: 4449784 - DNA, 25 bp, Homo sapien
tcaggaagccgcagtgttagttgcc

SEQ ID NO: 4449785 - DNA, 25 bp, Homo sapien
gggcattgaaggagatccaaactca

SEQ ID NO: 4449786 - DNA, 25 bp, Homo sapien
aaacatccttgcacgtcctttaggg

SEQ ID NO: 4449787 - DNA, 25 bp, Homo sapien
aagtgtttgtgcaattgctctccag

SEQ ID NO: 4449788 - DNA, 25 bp, Homo sapien
atcacttgaggacaagaagttgagg

SEQ ID NO: 4449789 - DNA, 25 bp, Homo sapien
gatcacttgaggacaagaagttgag

SEQ ID NO: 4449790 - DNA, 25 bp, Homo sapien
cagtgagccaagtgtttgtgcaatt

SEQ ID NO: 4449791 - DNA, 25 bp, Homo sapien
ccccccaccgcgcctagctaatatt

SEQ ID NO: 4449792 - DNA, 25 bp, Homo sapien
ccccaccgcgcctagctaatatttt

SEQ ID NO: 4449793 - DNA, 25 bp, Homo sapien
cccaccgcgcctagctaatattttg

SEQ ID NO: 4449794 - DNA, 25 bp, Homo sapien
cgccccccaccgcgcctagctaata

SEQ ID NO: 4449795 - DNA, 25 bp, Homo sapien
tataagacatagtaaccagtaggac

SEQ ID NO: 4449796 - DNA, 25 bp, Homo sapien
taggagttacccaaacagagtgagg

SEQ ID NO: 4449797 - DNA, 25 bp, Homo sapien
gaagagaacagcatgtaccaaggtc

SEQ ID NO: 4449798 - DNA, 25 bp, Homo sapien
catagtttatgcatggaccaggtac

SEQ ID NO: 4449799 - DNA, 25 bp, Homo sapien
tattaaagtgtgtccaaagcgctta

SEQ ID NO: 4449800 - DNA, 25 bp, Homo sapien
agagttcaactgtatacaatagagc

SEQ ID NO: 4449801 - DNA, 25 bp, Homo sapien
taaagcatcttcgaggcaggcggct

SEQ ID NO: 4449802 - DNA, 25 bp, Homo sapien
gtagtacttagggtaagcattaaca

SEQ ID NO: 4449803 - DNA, 25 bp, Homo sapien
ttttcctcttacaactcacaaagct

SEQ ID NO: 4449804 - DNA, 25 bp, Homo sapien
gtggctggtccttctatctcagtgg

SEQ ID NO: 4449805 - DNA, 25 bp, Homo sapien
tctaaggcgttcaaagtggctggtc

SEQ ID NO: 4449806 - DNA, 25 bp, Homo sapien
ctctttttgcctctaaggcgttcaa

SEQ ID NO: 4449807 - DNA, 25 bp, Homo sapien
gcctgaaatgaaccagaggactccg

SEQ ID NO: 4449808 - DNA, 25 bp, Homo sapien
accagtggaataagtcgtgagggcc

SEQ ID NO: 4449809 - DNA, 25 bp, Homo sapien
gaggactccgccaaagttctatgag

SEQ ID NO: 4449810 - DNA, 25 bp, Homo sapien
tttttgcctcgtaagaagggcctga

SEQ ID NO: 4449811 - DNA, 25 bp, Homo sapien
tacacaggctttgaggtttaaccca

SEQ ID NO: 4449812 - DNA, 25 bp, Homo sapien
tcctcgagagtctttgtcaagctgt

SEQ ID NO: 4449813 - DNA, 25 bp, Homo sapien
cactgatctcatgtgaaaaggccac

SEQ ID NO: 4449814 - DNA, 25 bp, Homo sapien
gaaagccaggttgaccattgctgcc

SEQ ID NO: 4449815 - DNA, 25 bp, Homo sapien
cagcgcctttgacttctcggatgag

SEQ ID NO: 4449816 - DNA, 25 bp, Homo sapien
caaacttcgagttgtggtggccgat

SEQ ID NO: 4449817 - DNA, 25 bp, Homo sapien
taaggaaggatgatgcgccgctgtt

SEQ ID NO: 4449818 - DNA, 25 bp, Homo sapien
gcgtggaagcgcctcaaatctatgc

SEQ ID NO: 4449819 - DNA, 25 bp, Homo sapien
ccccaatccagcctcggggcgagag

SEQ ID NO: 4449820 - DNA, 25 bp, Homo sapien
aggcggcgcagtggcccccaatcca

SEQ ID NO: 4449821 - DNA, 25 bp, Homo sapien
cccaatccagcctcggggcgagagg

SEQ ID NO: 4449822 - DNA, 25 bp, Homo sapien
gggcggaggcggcgcagtggccccc

SEQ ID NO: 4449823 - DNA, 25 bp, Homo sapien
ggtatgcctgtactagattttctat

SEQ ID NO: 4449824 - DNA, 25 bp, Homo sapien
gaaccaaattcgcagtatctccaag

SEQ ID NO: 4449825 - DNA, 25 bp, Homo sapien
tgtatttgcactgggacatgaaaca

SEQ ID NO: 4449826 - DNA, 25 bp, Homo sapien
gttttagacataacgctattacacg

SEQ ID NO: 4449827 - DNA, 25 bp, Homo sapien
tagcagggttctgaccatgggggcc

SEQ ID NO: 4449828 - DNA, 25 bp, Homo sapien
tctagcagggttctgaccatggggg

SEQ ID NO: 4449829 - DNA, 25 bp, Homo sapien
ggctctagcagggttctgaccatgg

SEQ ID NO: 4449830 - DNA, 25 bp, Homo sapien
ctgggaccttgatggctctagcagg

SEQ ID NO: 4449831 - DNA, 25 bp, Homo sapien
cacatatgcctactctctgttttgc

SEQ ID NO: 4449832 - DNA, 25 bp, Homo sapien
gtctgtcacacatatgcctactctc

SEQ ID NO: 4449833 - DNA, 25 bp, Homo sapien
agaagagctgcagaccaatagtggt

SEQ ID NO: 4449834 - DNA, 25 bp, Homo sapien
gagctgcagaccaatagtggtggaa

SEQ ID NO: 4449835 - DNA, 25 bp, Homo sapien
gaatccgtgaggccaggaacctctg

SEQ ID NO: 4449836 - DNA, 25 bp, Homo sapien
aggaacctctggtcagagaacaaaa

SEQ ID NO: 4449837 - DNA, 25 bp, Homo sapien
caggaacctctggtcagagaacaaa

SEQ ID NO: 4449838 - DNA, 25 bp, Homo sapien
tgaggccaggaacctctggtcagag

SEQ ID NO: 4449839 - DNA, 25 bp, Homo sapien
atctttgcaactaacacttccagac

SEQ ID NO: 4449840 - DNA, 25 bp, Homo sapien
ttcttttttgtagccagagaagtaa

SEQ ID NO: 4449841 - DNA, 25 bp, Homo sapien
cttttttgtagccagagaagtaaat

SEQ ID NO: 4449842 - DNA, 25 bp, Homo sapien
tcttttttgtagccagagaagtaaa

SEQ ID NO: 4449843 - DNA, 25 bp, Homo sapien
ctgcagttcctacttaaccttggtt

SEQ ID NO: 4449844 - DNA, 25 bp, Homo sapien
ctttggtcggtctaggggtcatcgc

SEQ ID NO: 4449845 - DNA, 25 bp, Homo sapien
cactgggcagtggagcacgggcttt

SEQ ID NO: 4449846 - DNA, 25 bp, Homo sapien
cagcgacagtggtgggacataggca

SEQ ID NO: 4449847 - DNA, 25 bp, Homo sapien
gaagtacacagttatcaaaaatgca

SEQ ID NO: 4449848 - DNA, 25 bp, Homo sapien
cagaagtacacagttatcaaaaatg

SEQ ID NO: 4449849 - DNA, 25 bp, Homo sapien
agtacacagttatcaaaaatgcaca

SEQ ID NO: 4449850 - DNA, 25 bp, Homo sapien
acacagttatcaaaaatgcacacac

SEQ ID NO: 4449851 - DNA, 25 bp, Homo sapien
catgaaccgaccctggctttcagga

SEQ ID NO: 4449852 - DNA, 25 bp, Homo sapien
taaagaatcatggtattttgggcag

SEQ ID NO: 4449853 - DNA, 25 bp, Homo sapien
tctgaaccggcaaagtttagtgagg

SEQ ID NO: 4449854 - DNA, 25 bp, Homo sapien
tgaagatccacaacctagaaacagg

SEQ ID NO: 4449855 - DNA, 25 bp, Homo sapien
ttctagggtgtcttgccagctgcca

SEQ ID NO: 4449856 - DNA, 25 bp, Homo sapien
cataaggaggcttgcacggaggaat

SEQ ID NO: 4449857 - DNA, 25 bp, Homo sapien
ttctaaataatctgagtgggcctga

SEQ ID NO: 4449858 - DNA, 25 bp, Homo sapien
tggtgtctaagagaccaggcctgct

SEQ ID NO: 4449859 - DNA, 25 bp, Homo sapien
gaaaaaagattttgtggactatgtg

SEQ ID NO: 4449860 - DNA, 25 bp, Homo sapien
taaaaagatatcctgagcctgggca

SEQ ID NO: 4449861 - DNA, 25 bp, Homo sapien
aaagattttgtggactatgtgctgg

SEQ ID NO: 4449862 - DNA, 25 bp, Homo sapien
ttaaaaagatatcctgagcctgggc

SEQ ID NO: 4449863 - DNA, 25 bp, Homo sapien
ttgccctgctgacttcctgggcttc

SEQ ID NO: 4449864 - DNA, 25 bp, Homo sapien
tcctgggcttctgtgatcctcccac

SEQ ID NO: 4449865 - DNA, 25 bp, Homo sapien
ttcctgggcttctgtgatcctccca

SEQ ID NO: 4449866 - DNA, 25 bp, Homo sapien
tcattgccctgctgacttcctgggc

SEQ ID NO: 4449867 - DNA, 25 bp, Homo sapien
cagactggagcagagtttaaaccaa

SEQ ID NO: 4449868 - DNA, 25 bp, Homo sapien
taaaccaagctggaaccactcagcc

SEQ ID NO: 4449869 - DNA, 25 bp, Homo sapien
cgacctcagtgaggtctgaagattt

SEQ ID NO: 4449870 - DNA, 25 bp, Homo sapien
cctcagtgaggtctgaagatttcag

SEQ ID NO: 4449871 - DNA, 25 bp, Homo sapien
ttggcccaaccaaaacaacagatgt

SEQ ID NO: 4449872 - DNA, 25 bp, Homo sapien
cctgctaggagttatagaaaggcac

SEQ ID NO: 4449873 - DNA, 25 bp, Homo sapien
cgtataccaatctctgcatctaggg

SEQ ID NO: 4449874 - DNA, 25 bp, Homo sapien
cacacataacagacagaggcagagc

SEQ ID NO: 4449875 - DNA, 25 bp, Homo sapien
taagagattgaaattcaacttgcct

SEQ ID NO: 4449876 - DNA, 25 bp, Homo sapien
atcagatactactgtacagtcaggg

SEQ ID NO: 4449877 - DNA, 25 bp, Homo sapien
cgagggtcactagagaactagaggt

SEQ ID NO: 4449878 - DNA, 25 bp, Homo sapien
tcttttatgttattcgagggtcact

SEQ ID NO: 4449879 - DNA, 25 bp, Homo sapien
ttgctgttttaaatgtttctatatc

SEQ ID NO: 4449880 - DNA, 25 bp, Homo sapien
tctatatcctttattttttgctgac

SEQ ID NO: 4449881 - DNA, 25 bp, Homo sapien
gctgttttaaatgtttctatatcct

SEQ ID NO: 4449882 - DNA, 25 bp, Homo sapien
tttctatatcctttattttttgctg

SEQ ID NO: 4449883 - DNA, 25 bp, Homo sapien
tccagtgggctgattgtaatcatag

SEQ ID NO: 4449884 - DNA, 25 bp, Homo sapien
gttccagtgggctgattgtaatcat

SEQ ID NO: 4449885 - DNA, 25 bp, Homo sapien
tgggctgattgtaatcatagggcct

SEQ ID NO: 4449886 - DNA, 25 bp, Homo sapien
gattgtaatcatagggcctccaaaa

SEQ ID NO: 4449887 - DNA, 25 bp, Homo sapien
gtcacgaagaccggaagagcgttgt

SEQ ID NO: 4449888 - DNA, 25 bp, Homo sapien
ctcacggggtgggtcacgaagaccg

SEQ ID NO: 4449889 - DNA, 25 bp, Homo sapien
ggtgggtcacgaagaccggaagagc

SEQ ID NO: 4449890 - DNA, 25 bp, Homo sapien
gctgctcacggggtgggtcacgaag

SEQ ID NO: 4449891 - DNA, 25 bp, Homo sapien
gatcacgcgctcgagagttggctct

SEQ ID NO: 4449892 - DNA, 25 bp, Homo sapien
aaaaactgcgggcttcgatcacgcg

SEQ ID NO: 4449893 - DNA, 25 bp, Homo sapien
gcaaacgtgtggctcgtcagaagca

SEQ ID NO: 4449894 - DNA, 25 bp, Homo sapien
gagattgtcgcacccggaagtgacg

SEQ ID NO: 4449895 - DNA, 25 bp, Homo sapien
tgtcagggccccgtccggagacgac

SEQ ID NO: 4449896 - DNA, 25 bp, Homo sapien
cggagacgacggcccagggacactc

SEQ ID NO: 4449897 - DNA, 25 bp, Homo sapien
caggcagtagggtggccgtgtcagg

SEQ ID NO: 4449898 - DNA, 25 bp, Homo sapien
ccggcctccaggcagtagggtggcc

SEQ ID NO: 4449899 - DNA, 25 bp, Homo sapien
ttctccggagttctactcactcagg

SEQ ID NO: 4449900 - DNA, 25 bp, Homo sapien
gccggcgcggttccccatttctgca

SEQ ID NO: 4449901 - DNA, 25 bp, Homo sapien
gcagccgccaaaaaccgcttactcc

SEQ ID NO: 4449902 - DNA, 25 bp, Homo sapien
cagggtttctccggagttctactca

SEQ ID NO: 4449903 - DNA, 25 bp, Homo sapien
cgggacttcagttccgcccattgcg

SEQ ID NO: 4449904 - DNA, 25 bp, Homo sapien
tcagaatggcttcaccatcaaccgc

SEQ ID NO: 4449905 - DNA, 25 bp, Homo sapien
catcaaccgccttcaattgcacccc

SEQ ID NO: 4449906 - DNA, 25 bp, Homo sapien
cttcaattgcacccccaatacaaag

SEQ ID NO: 4449907 - DNA, 25 bp, Homo sapien
aattataagctgatcatctttctgg

SEQ ID NO: 4449908 - DNA, 25 bp, Homo sapien
accactgccgtatgacaaataacca

SEQ ID NO: 4449909 - DNA, 25 bp, Homo sapien
cccaccactgccgtatgacaaataa

SEQ ID NO: 4449910 - DNA, 25 bp, Homo sapien
ctctctgaattataagctgatcatc

SEQ ID NO: 4449911 - DNA, 25 bp, Homo sapien
agaaggaacaaagaaatctgtaact

SEQ ID NO: 4449912 - DNA, 25 bp, Homo sapien
aacaccactgcactctgaccagccg

SEQ ID NO: 4449913 - DNA, 25 bp, Homo sapien
ggctggtcaactgaagcagtgggat

SEQ ID NO: 4449914 - DNA, 25 bp, Homo sapien
tggtcaactgaagcagtgggattag

SEQ ID NO: 4449915 - DNA, 25 bp, Homo sapien
tatagtcaagtcctctattaaccct

SEQ ID NO: 4449916 - DNA, 25 bp, Homo sapien
ctttgtcttctatagtcaagtcctc

SEQ ID NO: 4449917 - DNA, 25 bp, Homo sapien
aaataatgagaaagcaatccttctg

SEQ ID NO: 4449918 - DNA, 25 bp, Homo sapien
aatccttctgccagttgctccactg

SEQ ID NO: 4449919 - DNA, 25 bp, Homo sapien
caacaacaaagattgattggcatca

SEQ ID NO: 4449920 - DNA, 25 bp, Homo sapien
ttagcacaaaactgagaaggttgcc

SEQ ID NO: 4449921 - DNA, 25 bp, Homo sapien
tatatcgcgcgctagggataaaaaa

SEQ ID NO: 4449922 - DNA, 25 bp, Homo sapien
gaaggttgccaactccctaactata

SEQ ID NO: 4449923 - DNA, 25 bp, Homo sapien
ccttaatgcagtgtctgaggaatga

SEQ ID NO: 4449924 - DNA, 25 bp, Homo sapien
tcccttgaagctttgtataatttac

SEQ ID NO: 4449925 - DNA, 25 bp, Homo sapien
tacttccttacaagttccaagtgtg

SEQ ID NO: 4449926 - DNA, 25 bp, Homo sapien
gaattatctcgaagggagctccatg

SEQ ID NO: 4449927 - DNA, 25 bp, Homo sapien
tgatgtgctggcagcgggggtttcc

SEQ ID NO: 4449928 - DNA, 25 bp, Homo sapien
tgctggcagcgggggtttcctctca

SEQ ID NO: 4449929 - DNA, 25 bp, Homo sapien
ctcgaacaccaagctgctgaacaca

SEQ ID NO: 4449930 - DNA, 25 bp, Homo sapien
cagcgggggtttcctctcactggga

SEQ ID NO: 4449931 - DNA, 25 bp, Homo sapien
cttattataaagctacagaaatctg

SEQ ID NO: 4449932 - DNA, 25 bp, Homo sapien
gaggtgcaagaatcacgaacctgag

SEQ ID NO: 4449933 - DNA, 25 bp, Homo sapien
aggtgcaagaatcacgaacctgaga

SEQ ID NO: 4449934 - DNA, 25 bp, Homo sapien
ataaagctacagaaatctggccagg

SEQ ID NO: 4449935 - DNA, 25 bp, Homo sapien
tcatcaaggatattcaacatcatac

SEQ ID NO: 4449936 - DNA, 25 bp, Homo sapien
ttcatcaaggatattcaacatcata

SEQ ID NO: 4449937 - DNA, 25 bp, Homo sapien
gaagacgtgataccaattccccaca

SEQ ID NO: 4449938 - DNA, 25 bp, Homo sapien
cagaaaatatgtcagtcctccttta

SEQ ID NO: 4449939 - DNA, 25 bp, Homo sapien
taggcacgtacagtcaactgcagct

SEQ ID NO: 4449940 - DNA, 25 bp, Homo sapien
gctttcttcagttttaggcacgtac

SEQ ID NO: 4449941 - DNA, 25 bp, Homo sapien
tatttctctggcctaaatctcctca

SEQ ID NO: 4449942 - DNA, 25 bp, Homo sapien
ggccaacagccagttagctatatga

SEQ ID NO: 4449943 - DNA, 25 bp, Homo sapien
gaaatcatagctttccccggccaac

SEQ ID NO: 4449944 - DNA, 25 bp, Homo sapien
tacaaagtgagaagatcagaccaga

SEQ ID NO: 4449945 - DNA, 25 bp, Homo sapien
aaattttgaaatctcttgttccagt

SEQ ID NO: 4449946 - DNA, 25 bp, Homo sapien
taaattttgaaatctcttgttccag

SEQ ID NO: 4449947 - DNA, 25 bp, Homo sapien
ttttgaaatctcttgttccagtgtg

SEQ ID NO: 4449948 - DNA, 25 bp, Homo sapien
aattttgaaatctcttgttccagtg

SEQ ID NO: 4449949 - DNA, 25 bp, Homo sapien
caccaacttggcatgatagtgttta

SEQ ID NO: 4449950 - DNA, 25 bp, Homo sapien
tggcatgatagtgtttagcctcagc

SEQ ID NO: 4449951 - DNA, 25 bp, Homo sapien
tatattcaccaacttggcatgatag

SEQ ID NO: 4449952 - DNA, 25 bp, Homo sapien
caacttggcatgatagtgtttagcc

SEQ ID NO: 4449953 - DNA, 25 bp, Homo sapien
catccttttggctggtctggcagtt

SEQ ID NO: 4449954 - DNA, 25 bp, Homo sapien
gctggtctggcagttaactgctttt

SEQ ID NO: 4449955 - DNA, 25 bp, Homo sapien
tctctcgttgctgctccctttccaa

SEQ ID NO: 4449956 - DNA, 25 bp, Homo sapien
tcaaactccttctctcgttgctgct

SEQ ID NO: 4449957 - DNA, 25 bp, Homo sapien
gacataatggcataaggcactacct

SEQ ID NO: 4449958 - DNA, 25 bp, Homo sapien
gcaacatgacgtctgctacttggaa

SEQ ID NO: 4449959 - DNA, 25 bp, Homo sapien
gcatggagacacagtaataccggaa

SEQ ID NO: 4449960 - DNA, 25 bp, Homo sapien
taaccacttagagttttgactcaca

SEQ ID NO: 4449961 - DNA, 25 bp, Homo sapien
acctgaactacacctaaagtgctgt

SEQ ID NO: 4449962 - DNA, 25 bp, Homo sapien
tctggcatcttgctcacctgaacta

SEQ ID NO: 4449963 - DNA, 25 bp, Homo sapien
tgagtgtgtgatagctccactacct

SEQ ID NO: 4449964 - DNA, 25 bp, Homo sapien
cacagaagcagtgacaacgacgcta

SEQ ID NO: 4449965 - DNA, 25 bp, Homo sapien
tagagaattgtgtgcaggaaccagc

SEQ ID NO: 4449966 - DNA, 25 bp, Homo sapien
ctatgcagcctagcgtgggaaaccc

SEQ ID NO: 4449967 - DNA, 25 bp, Homo sapien
tgtctgcaagccctaatgaatcctg

SEQ ID NO: 4449968 - DNA, 25 bp, Homo sapien
ccctatgtaatggagattggagacc

SEQ ID NO: 4449969 - DNA, 25 bp, Homo sapien
gaaggagctgacatagatctggtat

SEQ ID NO: 4449970 - DNA, 25 bp, Homo sapien
aataagggaaacacccaggtgtgtg

SEQ ID NO: 4449971 - DNA, 25 bp, Homo sapien
tataatacacgctcaacagagctgg

SEQ ID NO: 4449972 - DNA, 25 bp, Homo sapien
ttggacgacatgaaggaaacacgca

SEQ ID NO: 4449973 - DNA, 25 bp, Homo sapien
accgctcccggcctatattttcgat

SEQ ID NO: 4449974 - DNA, 25 bp, Homo sapien
ataataccttattacaaaaatagag

SEQ ID NO: 4449975 - DNA, 25 bp, Homo sapien
cgctcccggcctatattttcgattt

SEQ ID NO: 4449976 - DNA, 25 bp, Homo sapien
accttattacaaaaatagagatggg

SEQ ID NO: 4449977 - DNA, 25 bp, Homo sapien
aagccctgtgcccgctgtctaggca

SEQ ID NO: 4449978 - DNA, 25 bp, Homo sapien
gcaagccctgtgcccgctgtctagg

SEQ ID NO: 4449979 - DNA, 25 bp, Homo sapien
cctgtgcccgctgtctaggcataca

SEQ ID NO: 4449980 - DNA, 25 bp, Homo sapien
gccctgtgcccgctgtctaggcata

SEQ ID NO: 4449981 - DNA, 25 bp, Homo sapien
ggtattcccgcgctcatttcacaga

SEQ ID NO: 4449982 - DNA, 25 bp, Homo sapien
acagagaaggtgaccgaggttcagc

SEQ ID NO: 4449983 - DNA, 25 bp, Homo sapien
cttccttcaaaacgcgcaggcaggg

SEQ ID NO: 4449984 - DNA, 25 bp, Homo sapien
gtgtgcgctggagcccttccttcaa

SEQ ID NO: 4449985 - DNA, 25 bp, Homo sapien
gaaccaggaacaagcgtccatccgg

SEQ ID NO: 4449986 - DNA, 25 bp, Homo sapien
gtgctgccggctggacagactcgcc

SEQ ID NO: 4449987 - DNA, 25 bp, Homo sapien
gctggacagactcgccccttgcgcg

SEQ ID NO: 4449988 - DNA, 25 bp, Homo sapien
ggcgttgagcgctcacggggcacag

SEQ ID NO: 4449989 - DNA, 25 bp, Homo sapien
cgggcgtgagcggagccttcggtca

SEQ ID NO: 4449990 - DNA, 25 bp, Homo sapien
tgcgttggcgcagcaaaaaccttcg

SEQ ID NO: 4449991 - DNA, 25 bp, Homo sapien
agccttcggtcactgcgttggcgca

SEQ ID NO: 4449992 - DNA, 25 bp, Homo sapien
ttcgctcccttctgggtctcaaggc

SEQ ID NO: 4449993 - DNA, 25 bp, Homo sapien
ccagggccaaagatcggccgcggat

SEQ ID NO: 4449994 - DNA, 25 bp, Homo sapien
ggccaaagatcggccgcggatgcct

SEQ ID NO: 4449995 - DNA, 25 bp, Homo sapien
cgcccagtctccctccgctggccca

SEQ ID NO: 4449996 - DNA, 25 bp, Homo sapien
aagatcggccgcggatgcctcttac

SEQ ID NO: 4449997 - DNA, 25 bp, Homo sapien
tggatgactgtgtcaatccctggcc

SEQ ID NO: 4449998 - DNA, 25 bp, Homo sapien
tgaggctctgacactctgagaagga

SEQ ID NO: 4449999 - DNA, 25 bp, Homo sapien
gacggtgccgagtgacagtcaacag

SEQ ID NO: 4450000 - DNA, 25 bp, Homo sapien
cacaccaagaccacggatacttcgg

SEQ ID NO: 4450001 - DNA, 25 bp, Homo sapien
agccaggttggaattttgataaata

SEQ ID NO: 4450002 - DNA, 25 bp, Homo sapien
cattatagcaatgggcagcgcaggc

SEQ ID NO: 4450003 - DNA, 25 bp, Homo sapien
tgttcagcaggtgccctaaatcctc

SEQ ID NO: 4450004 - DNA, 25 bp, Homo sapien
gcgtctttgagcaaaaagccaggtt

SEQ ID NO: 4450005 - DNA, 25 bp, Homo sapien
cctttgttctgcgatctcttttaga

SEQ ID NO: 4450006 - DNA, 25 bp, Homo sapien
aaatgtatcagaaatacaaacatag

SEQ ID NO: 4450007 - DNA, 25 bp, Homo sapien
cttggtgagtcaggaccctttgttc

SEQ ID NO: 4450008 - DNA, 25 bp, Homo sapien
ctgtatccttggtgagtcaggaccc

SEQ ID NO: 4450009 - DNA, 25 bp, Homo sapien
agggatggcctctctgctgcgatag

SEQ ID NO: 4450010 - DNA, 25 bp, Homo sapien
tctctgctgcgatagggcagaacag

SEQ ID NO: 4450011 - DNA, 25 bp, Homo sapien
gcgatagggcagaacagaagagtcc

SEQ ID NO: 4450012 - DNA, 25 bp, Homo sapien
tctgctgcgatagggcagaacagaa

SEQ ID NO: 4450013 - DNA, 25 bp, Homo sapien
tgtgagctgttggtctggatctctg

SEQ ID NO: 4450014 - DNA, 25 bp, Homo sapien
ctgtgtacacggcacaggtcaggct

SEQ ID NO: 4450015 - DNA, 25 bp, Homo sapien
tggagggactgttggaaaactcctc

SEQ ID NO: 4450016 - DNA, 25 bp, Homo sapien
aggtcaggcttacacctggtgccca

SEQ ID NO: 4450017 - DNA, 25 bp, Homo sapien
gcacggggccctgataccacagcca

SEQ ID NO: 4450018 - DNA, 25 bp, Homo sapien
cacggggccctgataccacagccac

SEQ ID NO: 4450019 - DNA, 25 bp, Homo sapien
ggcacggggccctgataccacagcc

SEQ ID NO: 4450020 - DNA, 25 bp, Homo sapien
tgtgcagctgaagggggccgacctg

SEQ ID NO: 4450021 - DNA, 25 bp, Homo sapien
cataatggttcctggccgcatggct

SEQ ID NO: 4450022 - DNA, 25 bp, Homo sapien
accagcacctcataatggttcctgg

SEQ ID NO: 4450023 - DNA, 25 bp, Homo sapien
gcacctcataatggttcctggccgc

SEQ ID NO: 4450024 - DNA, 25 bp, Homo sapien
tcactgggctcaacaatggccacat

SEQ ID NO: 4450025 - DNA, 25 bp, Homo sapien
ctcactgggctcaacaatggccaca

SEQ ID NO: 4450026 - DNA, 25 bp, Homo sapien
ggacaattgtttggcaccagcaccc

SEQ ID NO: 4450027 - DNA, 25 bp, Homo sapien
ttgtctgggttcaactcagtcactc

SEQ ID NO: 4450028 - DNA, 25 bp, Homo sapien
gctttgatccattctacaccagatg

SEQ ID NO: 4450029 - DNA, 25 bp, Homo sapien
gatggaatcacacttgccgtgggac

SEQ ID NO: 4450030 - DNA, 25 bp, Homo sapien
caataataagatatcggtaggagat

SEQ ID NO: 4450031 - DNA, 25 bp, Homo sapien
ctggattccgagagcaataataaga

SEQ ID NO: 4450032 - DNA, 25 bp, Homo sapien
ggattccgagagcaataataagata

SEQ ID NO: 4450033 - DNA, 25 bp, Homo sapien
agagcaataataagatatcggtagg

SEQ ID NO: 4450034 - DNA, 25 bp, Homo sapien
tgccgtaaagtggtaaccaagctcc

SEQ ID NO: 4450035 - DNA, 25 bp, Homo sapien
gcagaaacaagcagttgatgtctta

SEQ ID NO: 4450036 - DNA, 25 bp, Homo sapien
agctgtcgttgatggaaaagttgcc

SEQ ID NO: 4450037 - DNA, 25 bp, Homo sapien
tggtaaccaagctcctttcaggaaa

SEQ ID NO: 4450038 - DNA, 25 bp, Homo sapien
tccatgtcttctctacagtcttaac

SEQ ID NO: 4450039 - DNA, 25 bp, Homo sapien
cctgaagtaggcttctgataagtac

SEQ ID NO: 4450040 - DNA, 25 bp, Homo sapien
gaagtcctgcagagctttccatgtc

SEQ ID NO: 4450041 - DNA, 25 bp, Homo sapien
tgaataattcgaccctattttggga

SEQ ID NO: 4450042 - DNA, 25 bp, Homo sapien
gtgaattagcactgtccgccctgct

SEQ ID NO: 4450043 - DNA, 25 bp, Homo sapien
tattaaagcaattggatcatgagtg

SEQ ID NO: 4450044 - DNA, 25 bp, Homo sapien
gataaaaaagggattacaatagaga

SEQ ID NO: 4450045 - DNA, 25 bp, Homo sapien
gaattcttgcaatcagtgaattagc

SEQ ID NO: 4450046 - DNA, 25 bp, Homo sapien
gcatctgcatacttcttaaccccga

SEQ ID NO: 4450047 - DNA, 25 bp, Homo sapien
tattggccttggatcgcttccctgt

SEQ ID NO: 4450048 - DNA, 25 bp, Homo sapien
ttaacagtgaggttccgctcctgga

SEQ ID NO: 4450049 - DNA, 25 bp, Homo sapien
tgtttatcggctcggacttcaatga

SEQ ID NO: 4450050 - DNA, 25 bp, Homo sapien
tctttgacgtaggaaggttggtgca

SEQ ID NO: 4450051 - DNA, 25 bp, Homo sapien
ccacaggactggtcttgaggacatc

SEQ ID NO: 4450052 - DNA, 25 bp, Homo sapien
ggttggtgcagtccccaatcccaaa

SEQ ID NO: 4450053 - DNA, 25 bp, Homo sapien
acatttgggtacctcctgtgttgca

SEQ ID NO: 4450054 - DNA, 25 bp, Homo sapien
tctgttccacaggtgtctaattcac

SEQ ID NO: 4450055 - DNA, 25 bp, Homo sapien
acacaatctgttccacaggtgtcta

SEQ ID NO: 4450056 - DNA, 25 bp, Homo sapien
ccatactgaaggtcttgtgttttat

SEQ ID NO: 4450057 - DNA, 25 bp, Homo sapien
cacaggtgtctaattcacacaaaac

SEQ ID NO: 4450058 - DNA, 25 bp, Homo sapien
tctttaattcatggaaggcctgcgc

SEQ ID NO: 4450059 - DNA, 25 bp, Homo sapien
gtttgatactaaagagccgactccc

SEQ ID NO: 4450060 - DNA, 25 bp, Homo sapien
cagtctggattggtagccccaggca

SEQ ID NO: 4450061 - DNA, 25 bp, Homo sapien
tccaataagacaaagcaggccttcc

SEQ ID NO: 4450062 - DNA, 25 bp, Homo sapien
ttacagaaattgtcctatcaagtat

SEQ ID NO: 4450063 - DNA, 25 bp, Homo sapien
gtgtttgattcttcataattacaga

SEQ ID NO: 4450064 - DNA, 25 bp, Homo sapien
ctatcaagtattcctgactgggcag

SEQ ID NO: 4450065 - DNA, 25 bp, Homo sapien
aattgtcctatcaagtattcctgac

SEQ ID NO: 4450066 - DNA, 25 bp, Homo sapien
cggttgtagccggtcaccagtggac

SEQ ID NO: 4450067 - DNA, 25 bp, Homo sapien
caccagtggacatgatgtgtagcca

SEQ ID NO: 4450068 - DNA, 25 bp, Homo sapien
agaatcacacggttgtagccggtca

SEQ ID NO: 4450069 - DNA, 25 bp, Homo sapien
actcagcaagaatcacacggttgta

SEQ ID NO: 4450070 - DNA, 25 bp, Homo sapien
atcaggtcagctttcatgagataca

SEQ ID NO: 4450071 - DNA, 25 bp, Homo sapien
ttcatgagatacatggaaaggcgct

SEQ ID NO: 4450072 - DNA, 25 bp, Homo sapien
caggtcagctttcatgagatacatg

SEQ ID NO: 4450073 - DNA, 25 bp, Homo sapien
catggaaaggcgctctttgctttga

SEQ ID NO: 4450074 - DNA, 25 bp, Homo sapien
aggctgcatcccctttgggtggaga

SEQ ID NO: 4450075 - DNA, 25 bp, Homo sapien
agggcctagagcatggaagacagaa

SEQ ID NO: 4450076 - DNA, 25 bp, Homo sapien
ggcctagagcatggaagacagaaca

SEQ ID NO: 4450077 - DNA, 25 bp, Homo sapien
agagggcctagagcatggaagacag

SEQ ID NO: 4450078 - DNA, 25 bp, Homo sapien
ggaggtcatcagcttttagaatgca

SEQ ID NO: 4450079 - DNA, 25 bp, Homo sapien
ttagaatgcagaagagtggctgggt

SEQ ID NO: 4450080 - DNA, 25 bp, Homo sapien
ctctcatatgggtttagaaaagtca

SEQ ID NO: 4450081 - DNA, 25 bp, Homo sapien
ggaccactgatgtagacacccagat

SEQ ID NO: 4450082 - DNA, 25 bp, Homo sapien
cgtaaagcaagattgtctagtgagt

SEQ ID NO: 4450083 - DNA, 25 bp, Homo sapien
ctgctcacagagcatgttcatcagc

SEQ ID NO: 4450084 - DNA, 25 bp, Homo sapien
ttggagagatcccatgactaggagg

SEQ ID NO: 4450085 - DNA, 25 bp, Homo sapien
ggacaacctacttccattcctaagc

SEQ ID NO: 4450086 - DNA, 25 bp, Homo sapien
gatggggcgacttcagtcaggagga

SEQ ID NO: 4450087 - DNA, 25 bp, Homo sapien
agagatggggcgacttcagtcagga

SEQ ID NO: 4450088 - DNA, 25 bp, Homo sapien
tggggcgacttcagtcaggaggatg

SEQ ID NO: 4450089 - DNA, 25 bp, Homo sapien
gagatggggcgacttcagtcaggag

SEQ ID NO: 4450090 - DNA, 25 bp, Homo sapien
ctgtaagaaataacacaaaaaaatg

SEQ ID NO: 4450091 - DNA, 25 bp, Homo sapien
aaacaacttgcgcagaaacgctggt

SEQ ID NO: 4450092 - DNA, 25 bp, Homo sapien
ctagatgaaacaacttgcgcagaaa

SEQ ID NO: 4450093 - DNA, 25 bp, Homo sapien
gatgaaacaacttgcgcagaaacgc

SEQ ID NO: 4450094 - DNA, 25 bp, Homo sapien
acttgcgcagaaacgctggtcctcc

SEQ ID NO: 4450095 - DNA, 25 bp, Homo sapien
tgactgcagttttggcccagaagcc

SEQ ID NO: 4450096 - DNA, 25 bp, Homo sapien
gaagccatccaagatgagcaagtgc

SEQ ID NO: 4450097 - DNA, 25 bp, Homo sapien
ggaggcatttggtcaccattaccca

SEQ ID NO: 4450098 - DNA, 25 bp, Homo sapien
tagcccacatggttgctgttcaaag

SEQ ID NO: 4450099 - DNA, 25 bp, Homo sapien
gacactccgttgagaattaaaaact

SEQ ID NO: 4450100 - DNA, 25 bp, Homo sapien
agtttttaattctcaacggagtgtc

SEQ ID NO: 4450101 - DNA, 25 bp, Homo sapien
ttagaggtgaacagcccccggctct

SEQ ID NO: 4450102 - DNA, 25 bp, Homo sapien
attagaggtgaacagcccccggctc

SEQ ID NO: 4450103 - DNA, 25 bp, Homo sapien
cattagaggtgaacagcccccggct

SEQ ID NO: 4450104 - DNA, 25 bp, Homo sapien
accattagaggtgaacagcccccgg

SEQ ID NO: 4450105 - DNA, 25 bp, Homo sapien
agtcccaactggattatccccaagc

SEQ ID NO: 4450106 - DNA, 25 bp, Homo sapien
acttttgtctacatccagggagaga

SEQ ID NO: 4450107 - DNA, 25 bp, Homo sapien
ggattatccccaagccttcctagac

SEQ ID NO: 4450108 - DNA, 25 bp, Homo sapien
cacttttgtctacatccagggagag

SEQ ID NO: 4450109 - DNA, 25 bp, Homo sapien
tggatttgtgagctggattactacc

SEQ ID NO: 4450110 - DNA, 25 bp, Homo sapien
gaaggcattcctcatttagaagaca

SEQ ID NO: 4450111 - DNA, 25 bp, Homo sapien
gccctacccttgtggactcatttaa

SEQ ID NO: 4450112 - DNA, 25 bp, Homo sapien
atttcttttggatcagagccctacc

SEQ ID NO: 4450113 - DNA, 25 bp, Homo sapien
cactgacaagccctgcgacgttgaa

SEQ ID NO: 4450114 - DNA, 25 bp, Homo sapien
cctgcgacgttgaaagggctgtcgt

SEQ ID NO: 4450115 - DNA, 25 bp, Homo sapien
acgttgaaagggctgtcgtaagcag

SEQ ID NO: 4450116 - DNA, 25 bp, Homo sapien
gacaagccctgcgacgttgaaaggg

SEQ ID NO: 4450117 - DNA, 25 bp, Homo sapien
ctaactggtcaagccaagcgtttct

SEQ ID NO: 4450118 - DNA, 25 bp, Homo sapien
aggaacgagccaggcgctttcgcgc

SEQ ID NO: 4450119 - DNA, 25 bp, Homo sapien
taggcacggcctataaaaggccagg

SEQ ID NO: 4450120 - DNA, 25 bp, Homo sapien
gagacccctcaggtttcgcagcacg

SEQ ID NO: 4450121 - DNA, 25 bp, Homo sapien
ttatattatctcacttgcgcactcc

SEQ ID NO: 4450122 - DNA, 25 bp, Homo sapien
tgcgcactcctttgtttaagagatg

SEQ ID NO: 4450123 - DNA, 25 bp, Homo sapien
gtggaggagaccgagagccgtcggg

SEQ ID NO: 4450124 - DNA, 25 bp, Homo sapien
gtttattgaacacctcagccggaaa

SEQ ID NO: 4450125 - DNA, 25 bp, Homo sapien
ctacagcccatattcccaaggctgc

SEQ ID NO: 4450126 - DNA, 25 bp, Homo sapien
cagcccatattcccaaggctgccca

SEQ ID NO: 4450127 - DNA, 25 bp, Homo sapien
ccatattcccaaggctgcccatccc

SEQ ID NO: 4450128 - DNA, 25 bp, Homo sapien
gcccatattcccaaggctgcccatc

SEQ ID NO: 4450129 - DNA, 25 bp, Homo sapien
ttgaacctgggaggcagaggttgta

SEQ ID NO: 4450130 - DNA, 25 bp, Homo sapien
ctgtagtcccaggcagaagaatcgc

SEQ ID NO: 4450131 - DNA, 25 bp, Homo sapien
aggttgtagtgagcccggatcacac

SEQ ID NO: 4450132 - DNA, 25 bp, Homo sapien
ttgtagtgagcccggatcacaccac

SEQ ID NO: 4450133 - DNA, 25 bp, Homo sapien
ggcggctcggccccatgggagcagc

SEQ ID NO: 4450134 - DNA, 25 bp, Homo sapien
gcggatgatcagagcgttggaggac

SEQ ID NO: 4450135 - DNA, 25 bp, Homo sapien
ctctgcggatgatcagagcgttgga

SEQ ID NO: 4450136 - DNA, 25 bp, Homo sapien
atgatcagagcgttggaggacaggg

SEQ ID NO: 4450137 - DNA, 25 bp, Homo sapien
tggttcaattcctctcttggatctc

SEQ ID NO: 4450138 - DNA, 25 bp, Homo sapien
cctgtcaccagggatatgccacttg

SEQ ID NO: 4450139 - DNA, 25 bp, Homo sapien
ttcctggccacaagacactctctat

SEQ ID NO: 4450140 - DNA, 25 bp, Homo sapien
agagggccctcatccaagcatcaga

SEQ ID NO: 4450141 - DNA, 25 bp, Homo sapien
gcagcttagtaggagctgtgaacat

SEQ ID NO: 4450142 - DNA, 25 bp, Homo sapien
tcactatgtaaatcaggcagcttag

SEQ ID NO: 4450143 - DNA, 25 bp, Homo sapien
tcccttcaaagcctgtcaagacaca

SEQ ID NO: 4450144 - DNA, 25 bp, Homo sapien
gaccttgcgttgtctgtcctcgaga

SEQ ID NO: 4450145 - DNA, 25 bp, Homo sapien
cataggtgcaaatcaaagcctggtt

SEQ ID NO: 4450146 - DNA, 25 bp, Homo sapien
aaatgacatcttttggagcctgcag

SEQ ID NO: 4450147 - DNA, 25 bp, Homo sapien
tagctgagcctgacgtattgtgact

SEQ ID NO: 4450148 - DNA, 25 bp, Homo sapien
tcagtcaggtggcaaattaccaaga

SEQ ID NO: 4450149 - DNA, 25 bp, Homo sapien
tagatgaccgggaggtaaacctgta

SEQ ID NO: 4450150 - DNA, 25 bp, Homo sapien
tggaaggtagatgaccgggaggtaa

SEQ ID NO: 4450151 - DNA, 25 bp, Homo sapien
tctggaaggtagatgaccgggaggt

SEQ ID NO: 4450152 - DNA, 25 bp, Homo sapien
ctggaaggtagatgaccgggaggta

SEQ ID NO: 4450153 - DNA, 25 bp, Homo sapien
cttgatcagatcacttacacagatt

SEQ ID NO: 4450154 - DNA, 25 bp, Homo sapien
gagcctagactctcgagttgaggag

SEQ ID NO: 4450155 - DNA, 25 bp, Homo sapien
gaagcttgcagccattccaatggat

SEQ ID NO: 4450156 - DNA, 25 bp, Homo sapien
aactgtgtgttaggtcttctgtgca

SEQ ID NO: 4450157 - DNA, 25 bp, Homo sapien
gtgatggtgctagaactgtgtgtta

SEQ ID NO: 4450158 - DNA, 25 bp, Homo sapien
cagtaccaatattgtaccagtcaag

SEQ ID NO: 4450159 - DNA, 25 bp, Homo sapien
ttctcccagtaccaatattgtacca

SEQ ID NO: 4450160 - DNA, 25 bp, Homo sapien
ccagtaccaatattgtaccagtcaa

SEQ ID NO: 4450161 - DNA, 25 bp, Homo sapien
tcccagtaccaatattgtaccagtc

SEQ ID NO: 4450162 - DNA, 25 bp, Homo sapien
gcttctcggaaaacccatgtgtcgc

SEQ ID NO: 4450163 - DNA, 25 bp, Homo sapien
atgtgtcgctcatcttcccaggcag

SEQ ID NO: 4450164 - DNA, 25 bp, Homo sapien
cactcttcagatgtgtcgcttctcg

SEQ ID NO: 4450165 - DNA, 25 bp, Homo sapien
acagcccctctttgcggatatatta

SEQ ID NO: 4450166 - DNA, 25 bp, Homo sapien
gcccgcatacagctgctttaggaga

SEQ ID NO: 4450167 - DNA, 25 bp, Homo sapien
cgcatacagctgctttaggagacag

SEQ ID NO: 4450168 - DNA, 25 bp, Homo sapien
tcagcccgcatacagctgctttagg

SEQ ID NO: 4450169 - DNA, 25 bp, Homo sapien
ccgcatacagctgctttaggagaca

SEQ ID NO: 4450170 - DNA, 25 bp, Homo sapien
ctactggcaagaaactagactgagg

SEQ ID NO: 4450171 - DNA, 25 bp, Homo sapien
attctgtcagttttgatggactgga

SEQ ID NO: 4450172 - DNA, 25 bp, Homo sapien
cagaagagtcacaggacccaggcta

SEQ ID NO: 4450173 - DNA, 25 bp, Homo sapien
gcagaagagtcacaggacccaggct

SEQ ID NO: 4450174 - DNA, 25 bp, Homo sapien
ctggcacctgcaccgatgctgcgaa

SEQ ID NO: 4450175 - DNA, 25 bp, Homo sapien
tgcaccgatgctgcgaagccttcat

SEQ ID NO: 4450176 - DNA, 25 bp, Homo sapien
catgattccttcagactgcaggagc

SEQ ID NO: 4450177 - DNA, 25 bp, Homo sapien
cttcctggcacctgcaccgatgctg

SEQ ID NO: 4450178 - DNA, 25 bp, Homo sapien
ctcagcccctttttccaggtatgtc

SEQ ID NO: 4450179 - DNA, 25 bp, Homo sapien
tcagcccctttttccaggtatgtca

SEQ ID NO: 4450180 - DNA, 25 bp, Homo sapien
gtggatgaggggcatgcacttggcc

SEQ ID NO: 4450181 - DNA, 25 bp, Homo sapien
gggtcacaactggtggatgaggggc

SEQ ID NO: 4450182 - DNA, 25 bp, Homo sapien
aggggcatgcacttggcccacagac

SEQ ID NO: 4450183 - DNA, 25 bp, Homo sapien
gatgaggggcatgcacttggcccac

SEQ ID NO: 4450184 - DNA, 25 bp, Homo sapien
tcctaggcttgaggttcgaataacc

SEQ ID NO: 4450185 - DNA, 25 bp, Homo sapien
cctaggcttgaggttcgaataacca

SEQ ID NO: 4450186 - DNA, 25 bp, Homo sapien
gtcctaggcttgaggttcgaataac

SEQ ID NO: 4450187 - DNA, 25 bp, Homo sapien
ctcagctgaagtggtagtaaggagg

SEQ ID NO: 4450188 - DNA, 25 bp, Homo sapien
tgctccagagaaatgtttggcaact

SEQ ID NO: 4450189 - DNA, 25 bp, Homo sapien
tagttccatccatcacaccatttat

SEQ ID NO: 4450190 - DNA, 25 bp, Homo sapien
ctttgttgtatagttgggcatcccc

SEQ ID NO: 4450191 - DNA, 25 bp, Homo sapien
ggtgatccagttagttccatccatc

SEQ ID NO: 4450192 - DNA, 25 bp, Homo sapien
tgaattaatgtcatggcccgaggag

SEQ ID NO: 4450193 - DNA, 25 bp, Homo sapien
agtgaattaatgtcatggcccgagg

SEQ ID NO: 4450194 - DNA, 25 bp, Homo sapien
aattaatgtcatggcccgaggaggc

SEQ ID NO: 4450195 - DNA, 25 bp, Homo sapien
ccagtgaattaatgtcatggcccga

SEQ ID NO: 4450196 - DNA, 25 bp, Homo sapien
aaggaagaatctctggctgggccac

SEQ ID NO: 4450197 - DNA, 25 bp, Homo sapien
cagcaaaggaagaatctctggctgg

SEQ ID NO: 4450198 - DNA, 25 bp, Homo sapien
caaaggaagaatctctggctgggcc

SEQ ID NO: 4450199 - DNA, 25 bp, Homo sapien
aggaagaatctctggctgggccacc

SEQ ID NO: 4450200 - DNA, 25 bp, Homo sapien
tgagttcagtttccaggccaaggcc

SEQ ID NO: 4450201 - DNA, 25 bp, Homo sapien
agtgagttcagtttccaggccaagg

SEQ ID NO: 4450202 - DNA, 25 bp, Homo sapien
aaagtgagttcagtttccaggccaa

SEQ ID NO: 4450203 - DNA, 25 bp, Homo sapien
aaaggaaagtgagttcagtttccag

SEQ ID NO: 4450204 - DNA, 25 bp, Homo sapien
cttgtgcagaggagggtttagccta

SEQ ID NO: 4450205 - DNA, 25 bp, Homo sapien
agcttgtgcagaggagggtttagcc

SEQ ID NO: 4450206 - DNA, 25 bp, Homo sapien
cagaggagggtttagcctatactgt

SEQ ID NO: 4450207 - DNA, 25 bp, Homo sapien
gtgcagaggagggtttagcctatac

SEQ ID NO: 4450208 - DNA, 25 bp, Homo sapien
gagcagtcccctcaggatcactcac

SEQ ID NO: 4450209 - DNA, 25 bp, Homo sapien
atcctagagcagtcccctcaggatc

SEQ ID NO: 4450210 - DNA, 25 bp, Homo sapien
ttatcctagagcagtcccctcagga

SEQ ID NO: 4450211 - DNA, 25 bp, Homo sapien
tagagcagtcccctcaggatcactc

SEQ ID NO: 4450212 - DNA, 25 bp, Homo sapien
cccaaggggtgaataatcatccgat

SEQ ID NO: 4450213 - DNA, 25 bp, Homo sapien
aatcatccgattttgatgttagttc

SEQ ID NO: 4450214 - DNA, 25 bp, Homo sapien
gggtgaataatcatccgattttgat

SEQ ID NO: 4450215 - DNA, 25 bp, Homo sapien
gaatcccaaggggtgaataatcatc

SEQ ID NO: 4450216 - DNA, 25 bp, Homo sapien
tatgccagaattttcggagcccaga

SEQ ID NO: 4450217 - DNA, 25 bp, Homo sapien
atatgccagaattttcggagcccag

SEQ ID NO: 4450218 - DNA, 25 bp, Homo sapien
tgccagaattttcggagcccagaaa

SEQ ID NO: 4450219 - DNA, 25 bp, Homo sapien
atgccagaattttcggagcccagaa

SEQ ID NO: 4450220 - DNA, 25 bp, Homo sapien
gcatccactgaaaaccttgttgtgg

SEQ ID NO: 4450221 - DNA, 25 bp, Homo sapien
gtgaggacaatcagcatccactgaa

SEQ ID NO: 4450222 - DNA, 25 bp, Homo sapien
aatcagcatccactgaaaaccttgt

SEQ ID NO: 4450223 - DNA, 25 bp, Homo sapien
ccttgttgtggatgaatggcaataa

SEQ ID NO: 4450224 - DNA, 25 bp, Homo sapien
ctgatgatggctagtgaacactgtg

SEQ ID NO: 4450225 - DNA, 25 bp, Homo sapien
gtgaacactgtgaggaactgtgcca

SEQ ID NO: 4450226 - DNA, 25 bp, Homo sapien
cttgagagttgatactgatgatggc

SEQ ID NO: 4450227 - DNA, 25 bp, Homo sapien
tggctagtgaacactgtgaggaact

SEQ ID NO: 4450228 - DNA, 25 bp, Homo sapien
ggcaccagaagagagcaacatggaa

SEQ ID NO: 4450229 - DNA, 25 bp, Homo sapien
ggaggacggggactgatgaggaaac

SEQ ID NO: 4450230 - DNA, 25 bp, Homo sapien
tcaggcaccagaagagagcaacatg

SEQ ID NO: 4450231 - DNA, 25 bp, Homo sapien
gcaccagaagagagcaacatggaag

SEQ ID NO: 4450232 - DNA, 25 bp, Homo sapien
ctggccatcccgataacaatgctct

SEQ ID NO: 4450233 - DNA, 25 bp, Homo sapien
gaagtacttgttctcccaaagagac

SEQ ID NO: 4450234 - DNA, 25 bp, Homo sapien
catctggaagtacttgttctcccaa

SEQ ID NO: 4450235 - DNA, 25 bp, Homo sapien
cccgataacaatgctctggagaggc

SEQ ID NO: 4450236 - DNA, 25 bp, Homo sapien
caacaacactgtaaactggttattt

SEQ ID NO: 4450237 - DNA, 25 bp, Homo sapien
tcaacaacactgtaaactggttatt

SEQ ID NO: 4450238 - DNA, 25 bp, Homo sapien
ttcaacaacactgtaaactggttat

SEQ ID NO: 4450239 - DNA, 25 bp, Homo sapien
catcaattttgaccgcatgagaatg

SEQ ID NO: 4450240 - DNA, 25 bp, Homo sapien
catgttcaatgatctggctgcaagc

SEQ ID NO: 4450241 - DNA, 25 bp, Homo sapien
cagttttaataggacatgagggtcc

SEQ ID NO: 4450242 - DNA, 25 bp, Homo sapien
caagcaccaatcagccagccaaaat

SEQ ID NO: 4450243 - DNA, 25 bp, Homo sapien
agcacgtattagcacaacttttctg

SEQ ID NO: 4450244 - DNA, 25 bp, Homo sapien
gacaaacactgggtaccatgtgtca

SEQ ID NO: 4450245 - DNA, 25 bp, Homo sapien
atggagttggtacaagcacgtatta

SEQ ID NO: 4450246 - DNA, 25 bp, Homo sapien
cactgggtaccatgtgtcaaatgtg

SEQ ID NO: 4450247 - DNA, 25 bp, Homo sapien
catcattcctcaggacaaaggggag

SEQ ID NO: 4450248 - DNA, 25 bp, Homo sapien
acatcattcctcaggacaaagggga

SEQ ID NO: 4450249 - DNA, 25 bp, Homo sapien
ccaacatcattcctcaggacaaagg

SEQ ID NO: 4450250 - DNA, 25 bp, Homo sapien
caacatcattcctcaggacaaaggg

SEQ ID NO: 4450251 - DNA, 25 bp, Homo sapien
gctccattaaggatacctgttctcc

SEQ ID NO: 4450252 - DNA, 25 bp, Homo sapien
cagaggctccattaaggatacctgt

SEQ ID NO: 4450253 - DNA, 25 bp, Homo sapien
caacagaggctccattaaggatacc

SEQ ID NO: 4450254 - DNA, 25 bp, Homo sapien
tggcaacagaggctccattaaggat

SEQ ID NO: 4450255 - DNA, 25 bp, Homo sapien
tctcagtgtaaaccttgcttgttgc

SEQ ID NO: 4450256 - DNA, 25 bp, Homo sapien
cacagaaagggtatgggcttccgcc

SEQ ID NO: 4450257 - DNA, 25 bp, Homo sapien
caagcaatgacatccgacatctgat

SEQ ID NO: 4450258 - DNA, 25 bp, Homo sapien
cgacaccatcttgataagccaagct

SEQ ID NO: 4450259 - DNA, 25 bp, Homo sapien
cctcagtgccattatcagttgcctt

SEQ ID NO: 4450260 - DNA, 25 bp, Homo sapien
gtgccattatcagttgccttaggac

SEQ ID NO: 4450261 - DNA, 25 bp, Homo sapien
ttttctcatatccactcgccagcca

SEQ ID NO: 4450262 - DNA, 25 bp, Homo sapien
agccaccctcagtgccattatcagt

SEQ ID NO: 4450263 - DNA, 25 bp, Homo sapien
ctgcaaattcacatggatcctctgg

SEQ ID NO: 4450264 - DNA, 25 bp, Homo sapien
gctgcaaattcacatggatcctctg

SEQ ID NO: 4450265 - DNA, 25 bp, Homo sapien
tgcaaattcacatggatcctctggc

SEQ ID NO: 4450266 - DNA, 25 bp, Homo sapien
catgaggccatttgaggtggaggcc

SEQ ID NO: 4450267 - DNA, 25 bp, Homo sapien
atgagaaggaggaccatgaggccat

SEQ ID NO: 4450268 - DNA, 25 bp, Homo sapien
agaacgatgagaaggaggaccatga

SEQ ID NO: 4450269 - DNA, 25 bp, Homo sapien
ctagaacgatgagaaggaggaccat

SEQ ID NO: 4450270 - DNA, 25 bp, Homo sapien
tgagtcttaataagaatgcagattt

SEQ ID NO: 4450271 - DNA, 25 bp, Homo sapien
tgaaaataagtgggagggacccatg

SEQ ID NO: 4450272 - DNA, 25 bp, Homo sapien
ccttgagtcttaataagaatgcaga

SEQ ID NO: 4450273 - DNA, 25 bp, Homo sapien
ctccttgagtcttaataagaatgca

SEQ ID NO: 4450274 - DNA, 25 bp, Homo sapien
tcctgctaggagtcctcattggcag

SEQ ID NO: 4450275 - DNA, 25 bp, Homo sapien
gggccatagaacagggtggagggtg

SEQ ID NO: 4450276 - DNA, 25 bp, Homo sapien
cctttcagttaaatatgagagcccc

SEQ ID NO: 4450277 - DNA, 25 bp, Homo sapien
ctaggagtcctcattggcaggatcc

SEQ ID NO: 4450278 - DNA, 25 bp, Homo sapien
tggtccactctcagcagtgagcagc

SEQ ID NO: 4450279 - DNA, 25 bp, Homo sapien
tctttatctcatcgtgctgtgtggg

SEQ ID NO: 4450280 - DNA, 25 bp, Homo sapien
gtggctggctggaaattatgtgacc

SEQ ID NO: 4450281 - DNA, 25 bp, Homo sapien
aaatcttgcccataaggtggctggc

SEQ ID NO: 4450282 - DNA, 25 bp, Homo sapien
ctttagtcaccctgttgttctttat

SEQ ID NO: 4450283 - DNA, 25 bp, Homo sapien
tttaggttgcctccaaatcttccaa

SEQ ID NO: 4450284 - DNA, 25 bp, Homo sapien
ttagtcaccctgttgttctttatcc

SEQ ID NO: 4450285 - DNA, 25 bp, Homo sapien
tgactttagtcaccctgttgttctt

SEQ ID NO: 4450286 - DNA, 25 bp, Homo sapien
agccatcactgtagcagctcgtaga

SEQ ID NO: 4450287 - DNA, 25 bp, Homo sapien
tcagataaatctcctagactgacac

SEQ ID NO: 4450288 - DNA, 25 bp, Homo sapien
gcagctcgtagagatctcagataaa

SEQ ID NO: 4450289 - DNA, 25 bp, Homo sapien
ctttcatagaagaggacccaaagca

SEQ ID NO: 4450290 - DNA, 25 bp, Homo sapien
cactatttgctaacctgaggcccat

SEQ ID NO: 4450291 - DNA, 25 bp, Homo sapien
gtttccactatttgctaacctgagg

SEQ ID NO: 4450292 - DNA, 25 bp, Homo sapien
ccactatttgctaacctgaggccca

SEQ ID NO: 4450293 - DNA, 25 bp, Homo sapien
ttccactatttgctaacctgaggcc

SEQ ID NO: 4450294 - DNA, 25 bp, Homo sapien
tgacccaagttgtccataaactgtt

SEQ ID NO: 4450295 - DNA, 25 bp, Homo sapien
gttcactgccaatatagggctccag

SEQ ID NO: 4450296 - DNA, 25 bp, Homo sapien
tggtaaaagtacctgaagacgagga

SEQ ID NO: 4450297 - DNA, 25 bp, Homo sapien
gccctgtggtaaaagtacctgaaga

SEQ ID NO: 4450298 - DNA, 25 bp, Homo sapien
cacagctctccaagtattccagaag

SEQ ID NO: 4450299 - DNA, 25 bp, Homo sapien
gaaagtcagtccaatataggcacat

SEQ ID NO: 4450300 - DNA, 25 bp, Homo sapien
gagtcttccttagcggccttcctca

SEQ ID NO: 4450301 - DNA, 25 bp, Homo sapien
cctatgactgaagaggagttgttca

SEQ ID NO: 4450302 - DNA, 25 bp, Homo sapien
ccagttggtatttgatgcatagatc

SEQ ID NO: 4450303 - DNA, 25 bp, Homo sapien
gctgtcaatactctcatagctggag

SEQ ID NO: 4450304 - DNA, 25 bp, Homo sapien
aaatcagctggcaacacatttggag

SEQ ID NO: 4450305 - DNA, 25 bp, Homo sapien
tgtggacaacgcatggcagcatctg

SEQ ID NO: 4450306 - DNA, 25 bp, Homo sapien
tgtgaagaaattaggaacccaacta

SEQ ID NO: 4450307 - DNA, 25 bp, Homo sapien
catggaagacttcaagatctggtcc

SEQ ID NO: 4450308 - DNA, 25 bp, Homo sapien
actgtggcatccttgaagtcataga

SEQ ID NO: 4450309 - DNA, 25 bp, Homo sapien
ccaactataatgatgtgggtcaatg

SEQ ID NO: 4450310 - DNA, 25 bp, Homo sapien
gctttgagtagaattactgcttaag

SEQ ID NO: 4450311 - DNA, 25 bp, Homo sapien
gtaaccctgtgcatgtctaaacctc

SEQ ID NO: 4450312 - DNA, 25 bp, Homo sapien
gaattctaacatgagtagggtaacc

SEQ ID NO: 4450313 - DNA, 25 bp, Homo sapien
cagagtgagctttgagtagaattac

SEQ ID NO: 4450314 - DNA, 25 bp, Homo sapien
caagagattcacagcgcagttggga

SEQ ID NO: 4450315 - DNA, 25 bp, Homo sapien
gcatgaagcaagagattcacagcgc

SEQ ID NO: 4450316 - DNA, 25 bp, Homo sapien
tcagaagcccaagcatgaagcaaga

SEQ ID NO: 4450317 - DNA, 25 bp, Homo sapien
attcacagcgcagttgggaagaggt

SEQ ID NO: 4450318 - DNA, 25 bp, Homo sapien
aatgaggcccgggaacaggcgaatc

SEQ ID NO: 4450319 - DNA, 25 bp, Homo sapien
ctgctacttcaggacaggtcacaga

SEQ ID NO: 4450320 - DNA, 25 bp, Homo sapien
ccgggaacaggcgaatcattgtgtt

SEQ ID NO: 4450321 - DNA, 25 bp, Homo sapien
tcacagaaggctgctcatgaggcag

SEQ ID NO: 4450322 - DNA, 25 bp, Homo sapien
taaagggcatgaagtacaaacttag

SEQ ID NO: 4450323 - DNA, 25 bp, Homo sapien
aaggacttcagctctttataaaggg

SEQ ID NO: 4450324 - DNA, 25 bp, Homo sapien
tataaagggcatgaagtacaaactt

SEQ ID NO: 4450325 - DNA, 25 bp, Homo sapien
gacttcagctctttataaagggcat

SEQ ID NO: 4450326 - DNA, 25 bp, Homo sapien
ggcttaatgcatccggggctagcgc

SEQ ID NO: 4450327 - DNA, 25 bp, Homo sapien
ttgaggagggttattagagcagcac

SEQ ID NO: 4450328 - DNA, 25 bp, Homo sapien
agctgacttccccgtccatctaaat

SEQ ID NO: 4450329 - DNA, 25 bp, Homo sapien
tgaagcctctagctgacttccccgt

SEQ ID NO: 4450330 - DNA, 25 bp, Homo sapien
aaacatgtctgaagacctactgaat

SEQ ID NO: 4450331 - DNA, 25 bp, Homo sapien
tccaacgcagatctgcacattcctg

SEQ ID NO: 4450332 - DNA, 25 bp, Homo sapien
ccttccaacgcagatctgcacattc

SEQ ID NO: 4450333 - DNA, 25 bp, Homo sapien
tcctggggcatcctaaacatgtctg

SEQ ID NO: 4450334 - DNA, 25 bp, Homo sapien
cttcttggaactgagttgcccaatt

SEQ ID NO: 4450335 - DNA, 25 bp, Homo sapien
atcttggtagaggaacttgaccctg

SEQ ID NO: 4450336 - DNA, 25 bp, Homo sapien
ttggaactgagttgcccaattatca

SEQ ID NO: 4450337 - DNA, 25 bp, Homo sapien
cctgatcatgaggaggagttaggac

SEQ ID NO: 4450338 - DNA, 25 bp, Homo sapien
atgatggcatgctcagcagtaaagc

SEQ ID NO: 4450339 - DNA, 25 bp, Homo sapien
atctctcccaaacatgagggataat

SEQ ID NO: 4450340 - DNA, 25 bp, Homo sapien
ctctcccaaacatgagggataattt

SEQ ID NO: 4450341 - DNA, 25 bp, Homo sapien
gagggataatttccatgatggcatg

SEQ ID NO: 4450342 - DNA, 25 bp, Homo sapien
ctgatgtagcgatggcaaggaggaa

SEQ ID NO: 4450343 - DNA, 25 bp, Homo sapien
ggtcaaacaagctttgtggtaaggc

SEQ ID NO: 4450344 - DNA, 25 bp, Homo sapien
cagatgggcctctttgaggtggtca

SEQ ID NO: 4450345 - DNA, 25 bp, Homo sapien
tggtaaggctgatgtagcgatggca

SEQ ID NO: 4450346 - DNA, 25 bp, Homo sapien
tgtatcagttatgtggtgtaaaaac

SEQ ID NO: 4450347 - DNA, 25 bp, Homo sapien
ccaccttagcctcgcaagtaattgg

SEQ ID NO: 4450348 - DNA, 25 bp, Homo sapien
gattctcttaacagtcacctttgca

SEQ ID NO: 4450349 - DNA, 25 bp, Homo sapien
gtatactttggatacaagttctgta

SEQ ID NO: 4450350 - DNA, 25 bp, Homo sapien
ctcagccgctaaagagtaaatattt

SEQ ID NO: 4450351 - DNA, 25 bp, Homo sapien
caattatccctttggttgcactagg

SEQ ID NO: 4450352 - DNA, 25 bp, Homo sapien
gcatctagtctagtgtctaaaaact

SEQ ID NO: 4450353 - DNA, 25 bp, Homo sapien
tttaggtatatataaggcttttctc

SEQ ID NO: 4450354 - DNA, 25 bp, Homo sapien
gttagtctcctctattccctgtgcc

SEQ ID NO: 4450355 - DNA, 25 bp, Homo sapien
cctcgttaggcctaatgaacacatt

SEQ ID NO: 4450356 - DNA, 25 bp, Homo sapien
tctcttctctgacgcatttccagca

SEQ ID NO: 4450357 - DNA, 25 bp, Homo sapien
gactccgttcatgagctctctcttc

SEQ ID NO: 4450358 - DNA, 25 bp, Homo sapien
ttaaaactaccactccctgtggcat

SEQ ID NO: 4450359 - DNA, 25 bp, Homo sapien
tttaaaactaccactccctgtggca

SEQ ID NO: 4450360 - DNA, 25 bp, Homo sapien
tcccagcaatatcttagagcctatt

SEQ ID NO: 4450361 - DNA, 25 bp, Homo sapien
gcaatatcttagagcctatttccat

SEQ ID NO: 4450362 - DNA, 25 bp, Homo sapien
ccagcaatatcttagagcctatttc

SEQ ID NO: 4450363 - DNA, 25 bp, Homo sapien
cagcaatatcttagagcctatttcc

SEQ ID NO: 4450364 - DNA, 25 bp, Homo sapien
ttgctgcagtaatcacagtaatcac

SEQ ID NO: 4450365 - DNA, 25 bp, Homo sapien
gacccacgttgctgcagtaatcaca

SEQ ID NO: 4450366 - DNA, 25 bp, Homo sapien
agctcaggcaaattggtgctccatg

SEQ ID NO: 4450367 - DNA, 25 bp, Homo sapien
gctccatgcgagagaagagctccct

SEQ ID NO: 4450368 - DNA, 25 bp, Homo sapien
ctgggctatgtgtgagtcatagcta

SEQ ID NO: 4450369 - DNA, 25 bp, Homo sapien
gggctatgtgtgagtcatagctaga

SEQ ID NO: 4450370 - DNA, 25 bp, Homo sapien
ggctatgtgtgagtcatagctagag

SEQ ID NO: 4450371 - DNA, 25 bp, Homo sapien
cctgggctatgtgtgagtcatagct

SEQ ID NO: 4450372 - DNA, 25 bp, Homo sapien
tctatgagctttaatggtgtgaccc

SEQ ID NO: 4450373 - DNA, 25 bp, Homo sapien
atttctatgagctttaatggtgtga

SEQ ID NO: 4450374 - DNA, 25 bp, Homo sapien
tgagctttaatggtgtgacccttgg

SEQ ID NO: 4450375 - DNA, 25 bp, Homo sapien
tatgagctttaatggtgtgaccctt

SEQ ID NO: 4450376 - DNA, 25 bp, Homo sapien
tccttgtacaagtaccttacaaaca

SEQ ID NO: 4450377 - DNA, 25 bp, Homo sapien
tccaggaactatctccaagcctgct

SEQ ID NO: 4450378 - DNA, 25 bp, Homo sapien
ggaactatctccaagcctgcttttg

SEQ ID NO: 4450379 - DNA, 25 bp, Homo sapien
aacaaatccaggaactatctccaag

SEQ ID NO: 4450380 - DNA, 25 bp, Homo sapien
ggcagctcctagtcattgatgtctg

SEQ ID NO: 4450381 - DNA, 25 bp, Homo sapien
cttccagggtgtgtgagcaaaatat

SEQ ID NO: 4450382 - DNA, 25 bp, Homo sapien
tttcgagactgtggcatcccttttc

SEQ ID NO: 4450383 - DNA, 25 bp, Homo sapien
caagaaacgggtaggtatcttccag

SEQ ID NO: 4450384 - DNA, 25 bp, Homo sapien
ctattgcctctttcgagactgtggc

SEQ ID NO: 4450385 - DNA, 25 bp, Homo sapien
ccatatacagatgattaaaactgaa

SEQ ID NO: 4450386 - DNA, 25 bp, Homo sapien
aactatactaataggctacataaca

SEQ ID NO: 4450387 - DNA, 25 bp, Homo sapien
ggcagacacattatactacctgatt

SEQ ID NO: 4450388 - DNA, 25 bp, Homo sapien
aagttagcacaaataagcaatgagg

SEQ ID NO: 4450389 - DNA, 25 bp, Homo sapien
cattgctccatccagatgctctaga

SEQ ID NO: 4450390 - DNA, 25 bp, Homo sapien
gagcctgtttgaccccgtcattgct

SEQ ID NO: 4450391 - DNA, 25 bp, Homo sapien
aggagagcctgtttgaccccgtcat

SEQ ID NO: 4450392 - DNA, 25 bp, Homo sapien
tgtttgaccccgtcattgctccatc

SEQ ID NO: 4450393 - DNA, 25 bp, Homo sapien
gctttgacaaatgctgctctctcag

SEQ ID NO: 4450394 - DNA, 25 bp, Homo sapien
tattgctttgacaaatgctgctctc

SEQ ID NO: 4450395 - DNA, 25 bp, Homo sapien
cgtattgctttgacaaatgctgctc

SEQ ID NO: 4450396 - DNA, 25 bp, Homo sapien
ttgctttgacaaatgctgctctctc

SEQ ID NO: 4450397 - DNA, 25 bp, Homo sapien
tcatgttggttaggagaaggccaaa

SEQ ID NO: 4450398 - DNA, 25 bp, Homo sapien
aactcggagcctatatcttaattgc

SEQ ID NO: 4450399 - DNA, 25 bp, Homo sapien
aattatggagccgtgaactcggagc

SEQ ID NO: 4450400 - DNA, 25 bp, Homo sapien
tatgcatgtataaacctccttccag

SEQ ID NO: 4450401 - DNA, 25 bp, Homo sapien
ggtccccttcatacatcactgtttg

SEQ ID NO: 4450402 - DNA, 25 bp, Homo sapien
cttcatacatcactgtttgttcatc

SEQ ID NO: 4450403 - DNA, 25 bp, Homo sapien
ctgtttctggaacatgatcccttaa

SEQ ID NO: 4450404 - DNA, 25 bp, Homo sapien
gaacatgatcccttaatatgctcca

SEQ ID NO: 4450405 - DNA, 25 bp, Homo sapien
gatttgttcaaaaggcacaagaagt

SEQ ID NO: 4450406 - DNA, 25 bp, Homo sapien
ttctttgaggcaacctgtatttcag

SEQ ID NO: 4450407 - DNA, 25 bp, Homo sapien
tcatcgagctgatttgttcaaaagg

SEQ ID NO: 4450408 - DNA, 25 bp, Homo sapien
tgctaggtctcccagtgacttgcca

SEQ ID NO: 4450409 - DNA, 25 bp, Homo sapien
ggtagccagagttggctcttgcttt

SEQ ID NO: 4450410 - DNA, 25 bp, Homo sapien
agccagagttggctcttgctttcgg

SEQ ID NO: 4450411 - DNA, 25 bp, Homo sapien
gccagagttggctcttgctttcggg

SEQ ID NO: 4450412 - DNA, 25 bp, Homo sapien
cttgctttcgggggcaaaggagact

SEQ ID NO: 4450413 - DNA, 25 bp, Homo sapien
gctgccattgatcagctggaggaaa

SEQ ID NO: 4450414 - DNA, 25 bp, Homo sapien
gcatatgctgccattgatcagctgg

SEQ ID NO: 4450415 - DNA, 25 bp, Homo sapien
tgccattgatcagctggaggaaatc

SEQ ID NO: 4450416 - DNA, 25 bp, Homo sapien
tatgctgccattgatcagctggagg

SEQ ID NO: 4450417 - DNA, 25 bp, Homo sapien
cagaattccagtcccttcttgtttg

SEQ ID NO: 4450418 - DNA, 25 bp, Homo sapien
tgtccagaattccagtcccttcttg

SEQ ID NO: 4450419 - DNA, 25 bp, Homo sapien
tggtgtccagaattccagtcccttc

SEQ ID NO: 4450420 - DNA, 25 bp, Homo sapien
gctggtgtccagaattccagtccct

SEQ ID NO: 4450421 - DNA, 25 bp, Homo sapien
caaactgagtcctggaaacattcaa

SEQ ID NO: 4450422 - DNA, 25 bp, Homo sapien
gagtcctggaaacattcaacttctc

SEQ ID NO: 4450423 - DNA, 25 bp, Homo sapien
ctttgcattgccagcagctttatta

SEQ ID NO: 4450424 - DNA, 25 bp, Homo sapien
ttctcttcagtctttgcattgccag

SEQ ID NO: 4450425 - DNA, 25 bp, Homo sapien
aagaatggagcttctacggtggcta

SEQ ID NO: 4450426 - DNA, 25 bp, Homo sapien
tgttgaagttctctagagtccagcc

SEQ ID NO: 4450427 - DNA, 25 bp, Homo sapien
tgtcaatgctgaaggaacactttgg

SEQ ID NO: 4450428 - DNA, 25 bp, Homo sapien
tatttgtcaccgtcctagtcggaga

SEQ ID NO: 4450429 - DNA, 25 bp, Homo sapien
tggttacagttctataatctctctt

SEQ ID NO: 4450430 - DNA, 25 bp, Homo sapien
ctagctgttcaagttggttacagtt

SEQ ID NO: 4450431 - DNA, 25 bp, Homo sapien
tacccataggtttttctcaccctga

SEQ ID NO: 4450432 - DNA, 25 bp, Homo sapien
cacttctacccataggtttttctca

SEQ ID NO: 4450433 - DNA, 25 bp, Homo sapien
tagctgcctctttgtaatgaatcag

SEQ ID NO: 4450434 - DNA, 25 bp, Homo sapien
tgcctctttgtaatgaatcagcaaa

SEQ ID NO: 4450435 - DNA, 25 bp, Homo sapien
agcaaaagcagttctcgaaaaccta

SEQ ID NO: 4450436 - DNA, 25 bp, Homo sapien
aaagcagttctcgaaaacctagcat

SEQ ID NO: 4450437 - DNA, 25 bp, Homo sapien
caagtgacatgagttcttggaccca

SEQ ID NO: 4450438 - DNA, 25 bp, Homo sapien
gcaacacaagtgacatgagttcttg

SEQ ID NO: 4450439 - DNA, 25 bp, Homo sapien
ggttcaatccttgacagggcaacgt

SEQ ID NO: 4450440 - DNA, 25 bp, Homo sapien
gagcagctgtacaaccaaagtctgg

SEQ ID NO: 4450441 - DNA, 25 bp, Homo sapien
actttatcccgttgtagccacttat

SEQ ID NO: 4450442 - DNA, 25 bp, Homo sapien
ctttatcccgttgtagccacttatc

SEQ ID NO: 4450443 - DNA, 25 bp, Homo sapien
ccatttactgtggatagttccttca

SEQ ID NO: 4450444 - DNA, 25 bp, Homo sapien
agaaaagtgcaccagttcttcccat

SEQ ID NO: 4450445 - DNA, 25 bp, Homo sapien
catttactgtggatagttccttcag

SEQ ID NO: 4450446 - DNA, 25 bp, Homo sapien
tctgcagacataagaggactcatga

SEQ ID NO: 4450447 - DNA, 25 bp, Homo sapien
gatactcctagtcccatgacaagct

SEQ ID NO: 4450448 - DNA, 25 bp, Homo sapien
tctgcatactaacagggttgtccct

SEQ ID NO: 4450449 - DNA, 25 bp, Homo sapien
tgatgtgcaccaagagactgacagc

SEQ ID NO: 4450450 - DNA, 25 bp, Homo sapien
ttgaattgcaatgaatctatagctt

SEQ ID NO: 4450451 - DNA, 25 bp, Homo sapien
tgcaatgaatctatagcttgctttt

SEQ ID NO: 4450452 - DNA, 25 bp, Homo sapien
tgaattgcaatgaatctatagcttg

SEQ ID NO: 4450453 - DNA, 25 bp, Homo sapien
aatgaatctatagcttgcttttggc

SEQ ID NO: 4450454 - DNA, 25 bp, Homo sapien
tgcatacttcccaatcttgtccatg

SEQ ID NO: 4450455 - DNA, 25 bp, Homo sapien
gcatacttcccaatcttgtccatgt

SEQ ID NO: 4450456 - DNA, 25 bp, Homo sapien
tagataaagggtgaatatccaaaat

SEQ ID NO: 4450457 - DNA, 25 bp, Homo sapien
tggaaatgttatattagataaaggg

SEQ ID NO: 4450458 - DNA, 25 bp, Homo sapien
attagtagaatgaagagacaatcca

SEQ ID NO: 4450459 - DNA, 25 bp, Homo sapien
ccttttatgtaagaatcaacccaca

SEQ ID NO: 4450460 - DNA, 25 bp, Homo sapien
tatcctaggtcttggaaggaaccag

SEQ ID NO: 4450461 - DNA, 25 bp, Homo sapien
agtgtaagccctagtccaatatgac

SEQ ID NO: 4450462 - DNA, 25 bp, Homo sapien
tgaaatgaagagtactgcaacagtc

SEQ ID NO: 4450463 - DNA, 25 bp, Homo sapien
tatgactgctctcctagtaagaaga

SEQ ID NO: 4450464 - DNA, 25 bp, Homo sapien
agctggcatggtttcgaattatacc

SEQ ID NO: 4450465 - DNA, 25 bp, Homo sapien
gcatcaagcatagccttttttaatg

SEQ ID NO: 4450466 - DNA, 25 bp, Homo sapien
gaattataccaatgaagatgctttc

SEQ ID NO: 4450467 - DNA, 25 bp, Homo sapien
actggaggactgaatttggatctgg

SEQ ID NO: 4450468 - DNA, 25 bp, Homo sapien
gatgcagaactgacttatatcctcc

SEQ ID NO: 4450469 - DNA, 25 bp, Homo sapien
cggcgaacatgatgcagaactgact

SEQ ID NO: 4450470 - DNA, 25 bp, Homo sapien
taaagtttctgtcacggcgaacatg

SEQ ID NO: 4450471 - DNA, 25 bp, Homo sapien
tgaaacatttgtctccccagggtac

SEQ ID NO: 4450472 - DNA, 25 bp, Homo sapien
tttactgtgtttccaggatgcaggc

SEQ ID NO: 4450473 - DNA, 25 bp, Homo sapien
gatgcaggcagcaaatgttaatgat

SEQ ID NO: 4450474 - DNA, 25 bp, Homo sapien
gctgcttcaactaatgaactgaggg

SEQ ID NO: 4450475 - DNA, 25 bp, Homo sapien
cagttgcggctcgtgaagacttggc

SEQ ID NO: 4450476 - DNA, 25 bp, Homo sapien
tgagagatggactagaattcagact

SEQ ID NO: 4450477 - DNA, 25 bp, Homo sapien
ggattgcttgctatgatcactggac

SEQ ID NO: 4450478 - DNA, 25 bp, Homo sapien
ggttgaggaagcatcagtcttgttt

SEQ ID NO: 4450479 - DNA, 25 bp, Homo sapien
ctggactatactcagtttctatgga

SEQ ID NO: 4450480 - DNA, 25 bp, Homo sapien
tcatggttaatgttgagaaccaacc

SEQ ID NO: 4450481 - DNA, 25 bp, Homo sapien
ctagtctcaagctttgcagttgcag

SEQ ID NO: 4450482 - DNA, 25 bp, Homo sapien
gtgacatggcatgctaacagcaaaa

SEQ ID NO: 4450483 - DNA, 25 bp, Homo sapien
tctcctggaatgactaagaagctag

SEQ ID NO: 4450484 - DNA, 25 bp, Homo sapien
tacaccaaacagcccatggtgggtt

SEQ ID NO: 4450485 - DNA, 25 bp, Homo sapien
acaccaaacagcccatggtgggttc

SEQ ID NO: 4450486 - DNA, 25 bp, Homo sapien
tttacaccaaacagcccatggtggg

SEQ ID NO: 4450487 - DNA, 25 bp, Homo sapien
ttacaccaaacagcccatggtgggt

SEQ ID NO: 4450488 - DNA, 25 bp, Homo sapien
ggcttccaggtggtatgattagaaa

SEQ ID NO: 4450489 - DNA, 25 bp, Homo sapien
cctcagtagggaaagctcacagcag

SEQ ID NO: 4450490 - DNA, 25 bp, Homo sapien
gcttgactggatattgggctccaga

SEQ ID NO: 4450491 - DNA, 25 bp, Homo sapien
gcagcagtgataggtgtacaggtcc

SEQ ID NO: 4450492 - DNA, 25 bp, Homo sapien
taaaacctctgacatcgttttttca

SEQ ID NO: 4450493 - DNA, 25 bp, Homo sapien
tctggcctttgctacttgacttgct

SEQ ID NO: 4450494 - DNA, 25 bp, Homo sapien
aaaacctctgacatcgttttttcag

SEQ ID NO: 4450495 - DNA, 25 bp, Homo sapien
ttgctacttgacttgctagcaatga

SEQ ID NO: 4450496 - DNA, 25 bp, Homo sapien
agcatgtagccaaatactaagaact

SEQ ID NO: 4450497 - DNA, 25 bp, Homo sapien
tctgggtccacgaaggatgacctca

SEQ ID NO: 4450498 - DNA, 25 bp, Homo sapien
aaataaagcatgtagccaaatacta

SEQ ID NO: 4450499 - DNA, 25 bp, Homo sapien
gctctgggtccacgaaggatgacct

SEQ ID NO: 4450500 - DNA, 25 bp, Homo sapien
ccaagtctgattcagagatgtctct

SEQ ID NO: 4450501 - DNA, 25 bp, Homo sapien
ggttttggaccaagtctgattcaga

SEQ ID NO: 4450502 - DNA, 25 bp, Homo sapien
atacagactcctggttttggaccaa

SEQ ID NO: 4450503 - DNA, 25 bp, Homo sapien
ctgattcagagatgtctcttgctgc

SEQ ID NO: 4450504 - DNA, 25 bp, Homo sapien
gacatagacatcatcatttgtgcag

SEQ ID NO: 4450505 - DNA, 25 bp, Homo sapien
tctttagattcatcaaacaatccca

SEQ ID NO: 4450506 - DNA, 25 bp, Homo sapien
catttgtgcagctattcagactggc

SEQ ID NO: 4450507 - DNA, 25 bp, Homo sapien
ccagtttagtaaagacatagacatc

SEQ ID NO: 4450508 - DNA, 25 bp, Homo sapien
tccaacaatgtgagtacagcttctg

SEQ ID NO: 4450509 - DNA, 25 bp, Homo sapien
tatcctctggagctcggtcacacag

SEQ ID NO: 4450510 - DNA, 25 bp, Homo sapien
tgaaatatcctctggagctcggtca

SEQ ID NO: 4450511 - DNA, 25 bp, Homo sapien
tgtgtccacctatgtccaacaatgt

SEQ ID NO: 4450512 - DNA, 25 bp, Homo sapien
tgtagtcgtggctgcaatcctgttc

SEQ ID NO: 4450513 - DNA, 25 bp, Homo sapien
gagctgtagtcgtggctgcaatcct

SEQ ID NO: 4450514 - DNA, 25 bp, Homo sapien
tagagagctgtagtcgtggctgcaa

SEQ ID NO: 4450515 - DNA, 25 bp, Homo sapien
tcgtggctgcaatcctgttccttcc

SEQ ID NO: 4450516 - DNA, 25 bp, Homo sapien
ttgatatcatctatgtccctttcca

SEQ ID NO: 4450517 - DNA, 25 bp, Homo sapien
gatccaggatgtgagcatttcctcc

SEQ ID NO: 4450518 - DNA, 25 bp, Homo sapien
tcatctatgtccctttccaagtgtg

SEQ ID NO: 4450519 - DNA, 25 bp, Homo sapien
gtgttgtgaacagcccattgatcca

SEQ ID NO: 4450520 - DNA, 25 bp, Homo sapien
tcttgtcatcagacttcggagcaga

SEQ ID NO: 4450521 - DNA, 25 bp, Homo sapien
gagatggcatctatggattcaggat

SEQ ID NO: 4450522 - DNA, 25 bp, Homo sapien
catcagacttcggagcagagatggc

SEQ ID NO: 4450523 - DNA, 25 bp, Homo sapien
gagcagagatggcatctatggattc

SEQ ID NO: 4450524 - DNA, 25 bp, Homo sapien
gggactcatgcaggtagatctcttg

SEQ ID NO: 4450525 - DNA, 25 bp, Homo sapien
catgcctgcaatccttcccttgaag

SEQ ID NO: 4450526 - DNA, 25 bp, Homo sapien
tgttcggacctttggtggctgccag

SEQ ID NO: 4450527 - DNA, 25 bp, Homo sapien
ttaaaactttcgcactgtggctatg

SEQ ID NO: 4450528 - DNA, 25 bp, Homo sapien
aatctctgtgtcatttccactttag

SEQ ID NO: 4450529 - DNA, 25 bp, Homo sapien
tgcatgttatctttgtggactggcc

SEQ ID NO: 4450530 - DNA, 25 bp, Homo sapien
tatctttgtggactggccatgctaa

SEQ ID NO: 4450531 - DNA, 25 bp, Homo sapien
tgtcatttccactttagtatatgtg

SEQ ID NO: 4450532 - DNA, 25 bp, Homo sapien
cagtcctcactagtggtcaatatcc

SEQ ID NO: 4450533 - DNA, 25 bp, Homo sapien
tcccacagtcctcactagtggtcaa

SEQ ID NO: 4450534 - DNA, 25 bp, Homo sapien
acctggccacaacttttccactcct

SEQ ID NO: 4450535 - DNA, 25 bp, Homo sapien
tcctcactagtggtcaatatcctca

SEQ ID NO: 4450536 - DNA, 25 bp, Homo sapien
gttgtactgatggataaaatagctc

SEQ ID NO: 4450537 - DNA, 25 bp, Homo sapien
cactacgctgttgtactgatggata

SEQ ID NO: 4450538 - DNA, 25 bp, Homo sapien
gtctatgagcactacgctgttgtac

SEQ ID NO: 4450539 - DNA, 25 bp, Homo sapien
ctgatggataaaatagctctggccc

SEQ ID NO: 4450540 - DNA, 25 bp, Homo sapien
atagaagctccataattttgccata

SEQ ID NO: 4450541 - DNA, 25 bp, Homo sapien
tcatagaagctccataattttgcca

SEQ ID NO: 4450542 - DNA, 25 bp, Homo sapien
ttgccatactcattcaaatattcca

SEQ ID NO: 4450543 - DNA, 25 bp, Homo sapien
ttttgccatactcattcaaatattc

SEQ ID NO: 4450544 - DNA, 25 bp, Homo sapien
cctctttgccatcatgtattcttca

SEQ ID NO: 4450545 - DNA, 25 bp, Homo sapien
atggttgcgttctcccagtttcagg

SEQ ID NO: 4450546 - DNA, 25 bp, Homo sapien
ctctttgccatcatgtattcttcag

SEQ ID NO: 4450547 - DNA, 25 bp, Homo sapien
tgatggttgcgttctcccagtttca

SEQ ID NO: 4450548 - DNA, 25 bp, Homo sapien
caaacaacagttaagattcccacaa

SEQ ID NO: 4450549 - DNA, 25 bp, Homo sapien
gattcccacaatgctttcaactgaa

SEQ ID NO: 4450550 - DNA, 25 bp, Homo sapien
tcaactgaaaaaggttgcaaaatgg

SEQ ID NO: 4450551 - DNA, 25 bp, Homo sapien
tgcaaaatggtggttcgcaggtaga

SEQ ID NO: 4450552 - DNA, 25 bp, Homo sapien
gagtaagctcaccttcgtattcagc

SEQ ID NO: 4450553 - DNA, 25 bp, Homo sapien
cttgagtaagctcaccttcgtattc

SEQ ID NO: 4450554 - DNA, 25 bp, Homo sapien
gctcaccttcgtattcagctaacca

SEQ ID NO: 4450555 - DNA, 25 bp, Homo sapien
taagctcaccttcgtattcagctaa

SEQ ID NO: 4450556 - DNA, 25 bp, Homo sapien
aaattagcctggcaaaggaaccctg

SEQ ID NO: 4450557 - DNA, 25 bp, Homo sapien
agcctggcaaaggaaccctgtgaat

SEQ ID NO: 4450558 - DNA, 25 bp, Homo sapien
ttagcctggcaaaggaaccctgtga

SEQ ID NO: 4450559 - DNA, 25 bp, Homo sapien
attagcctggcaaaggaaccctgtg

SEQ ID NO: 4450560 - DNA, 25 bp, Homo sapien
taactgttcctgagcctgtatcagc

SEQ ID NO: 4450561 - DNA, 25 bp, Homo sapien
gctgaaatattgaccgccagttttt

SEQ ID NO: 4450562 - DNA, 25 bp, Homo sapien
gagtgtccgatttgtgcctatgaaa

SEQ ID NO: 4450563 - DNA, 25 bp, Homo sapien
gaaggtgtcatgtggattataactg

SEQ ID NO: 4450564 - DNA, 25 bp, Homo sapien
tattggagatgctatcaacttgtac

SEQ ID NO: 4450565 - DNA, 25 bp, Homo sapien
cctaccagtcagttgggacaccata

SEQ ID NO: 4450566 - DNA, 25 bp, Homo sapien
tagaattgccctagacttcctcttg

SEQ ID NO: 4450567 - DNA, 25 bp, Homo sapien
gattaatgtcccaggccaagaggaa

SEQ ID NO: 4450568 - DNA, 25 bp, Homo sapien
aaagcatgatgcgatttttcctcct

SEQ ID NO: 4450569 - DNA, 25 bp, Homo sapien
cacttttctgaattctcggctctga

SEQ ID NO: 4450570 - DNA, 25 bp, Homo sapien
ctaatagtgcattgattacagctgg

SEQ ID NO: 4450571 - DNA, 25 bp, Homo sapien
taaatggtacgatgtgccccaacca

SEQ ID NO: 4450572 - DNA, 25 bp, Homo sapien
tcaggtcagttttcatcaagtctgt

SEQ ID NO: 4450573 - DNA, 25 bp, Homo sapien
tacccagtcatttgatgtgcagatc

SEQ ID NO: 4450574 - DNA, 25 bp, Homo sapien
cttttctgtgtacctacccagtcat

SEQ ID NO: 4450575 - DNA, 25 bp, Homo sapien
caagtctgttactgtctctctttca

SEQ ID NO: 4450576 - DNA, 25 bp, Homo sapien
aacacctagctatgggattatccgt

SEQ ID NO: 4450577 - DNA, 25 bp, Homo sapien
cctgtgaggtgctaacagtggagct

SEQ ID NO: 4450578 - DNA, 25 bp, Homo sapien
ttgaaaaaccctggcaacacctagc

SEQ ID NO: 4450579 - DNA, 25 bp, Homo sapien
tgcagtacaagaacacctgtgaggt

SEQ ID NO: 4450580 - DNA, 25 bp, Homo sapien
agatgcaggactttatttctgggtt

SEQ ID NO: 4450581 - DNA, 25 bp, Homo sapien
gatgcaggactttatttctgggttt

SEQ ID NO: 4450582 - DNA, 25 bp, Homo sapien
aagtaactgctaccctggcacttaa

SEQ ID NO: 4450583 - DNA, 25 bp, Homo sapien
tatgctggacttcaatggtgtgtgg

SEQ ID NO: 4450584 - DNA, 25 bp, Homo sapien
tgaaacttgcttggactttgaagaa

SEQ ID NO: 4450585 - DNA, 25 bp, Homo sapien
ctacacgtggtttggatttagagac

SEQ ID NO: 4450586 - DNA, 25 bp, Homo sapien
gaattgcacaaggagtcactggcat

SEQ ID NO: 4450587 - DNA, 25 bp, Homo sapien
gaataaaagagacactgatacaggg

SEQ ID NO: 4450588 - DNA, 25 bp, Homo sapien
actgatacagggcaatcatagccag

SEQ ID NO: 4450589 - DNA, 25 bp, Homo sapien
tagccagaattgcacaaggagtcac

SEQ ID NO: 4450590 - DNA, 25 bp, Homo sapien
tccagaagtcttggggcgttctctt

SEQ ID NO: 4450591 - DNA, 25 bp, Homo sapien
ccatagggcctgctggcattgtggg

SEQ ID NO: 4450592 - DNA, 25 bp, Homo sapien
ggcattgtgggcagaatggacacca

SEQ ID NO: 4450593 - DNA, 25 bp, Homo sapien
tttccagaagtcttggggcgttctc

SEQ ID NO: 4450594 - DNA, 25 bp, Homo sapien
taaatgggatgttccttctcttgca

SEQ ID NO: 4450595 - DNA, 25 bp, Homo sapien
ttgggattccagtcgcctagggttg

SEQ ID NO: 4450596 - DNA, 25 bp, Homo sapien
ttaaatgggatgttccttctcttgc

SEQ ID NO: 4450597 - DNA, 25 bp, Homo sapien
tgttgggattccagtcgcctagggt

SEQ ID NO: 4450598 - DNA, 25 bp, Homo sapien
tgcatgcacagtagtgggagaattc

SEQ ID NO: 4450599 - DNA, 25 bp, Homo sapien
catatcaactgtccactcagttcct

SEQ ID NO: 4450600 - DNA, 25 bp, Homo sapien
ttcctgccaactggctctccctgac

SEQ ID NO: 4450601 - DNA, 25 bp, Homo sapien
agaattcaccttggtcttgccatat

SEQ ID NO: 4450602 - DNA, 25 bp, Homo sapien
gagagcatagccttatgtgctaatg

SEQ ID NO: 4450603 - DNA, 25 bp, Homo sapien
cctctgtatagtgaaggtcaaactg

SEQ ID NO: 4450604 - DNA, 25 bp, Homo sapien
caaactgacgcctttccacctgtaa

SEQ ID NO: 4450605 - DNA, 25 bp, Homo sapien
gagcatagccttatgtgctaatgca

SEQ ID NO: 4450606 - DNA, 25 bp, Homo sapien
gatagggaaaatccaatatggccag

SEQ ID NO: 4450607 - DNA, 25 bp, Homo sapien
tgaggtcactcaaatggacagcacc

SEQ ID NO: 4450608 - DNA, 25 bp, Homo sapien
ggaacatcgtagagtcgcccatgga

SEQ ID NO: 4450609 - DNA, 25 bp, Homo sapien
cagaggagtggcctacatctacaaa

SEQ ID NO: 4450610 - DNA, 25 bp, Homo sapien
tgagacaggtaacctaagaggatag

SEQ ID NO: 4450611 - DNA, 25 bp, Homo sapien
aggagtgagacaggtaacctaagag

SEQ ID NO: 4450612 - DNA, 25 bp, Homo sapien
gacaggtaacctaagaggatagcac

SEQ ID NO: 4450613 - DNA, 25 bp, Homo sapien
tttgctttccaatatgtaggagtga

SEQ ID NO: 4450614 - DNA, 25 bp, Homo sapien
gatgtcgaggcagaagtctgccata

SEQ ID NO: 4450615 - DNA, 25 bp, Homo sapien
tctgccataggagtggagccctcat

SEQ ID NO: 4450616 - DNA, 25 bp, Homo sapien
catggagaacctctattagagcaat

SEQ ID NO: 4450617 - DNA, 25 bp, Homo sapien
gaccctcaacaacagctcatggaag

SEQ ID NO: 4450618 - DNA, 25 bp, Homo sapien
caggacatgtggtctacctgaagct

SEQ ID NO: 4450619 - DNA, 25 bp, Homo sapien
ggacatgtggtctacctgaagctgc

SEQ ID NO: 4450620 - DNA, 25 bp, Homo sapien
gacatgtggtctacctgaagctgct

SEQ ID NO: 4450621 - DNA, 25 bp, Homo sapien
gccaggacatgtggtctacctgaag

SEQ ID NO: 4450622 - DNA, 25 bp, Homo sapien
cagtatgtatgcgaaatttgtctgc

SEQ ID NO: 4450623 - DNA, 25 bp, Homo sapien
taagcgctaaacagatactatataa

SEQ ID NO: 4450624 - DNA, 25 bp, Homo sapien
tagctattttaagcgctaaacagat

SEQ ID NO: 4450625 - DNA, 25 bp, Homo sapien
tattgactgcttctaagtaagtttc

SEQ ID NO: 4450626 - DNA, 25 bp, Homo sapien
gaaattggcaactgccattggcaca

SEQ ID NO: 4450627 - DNA, 25 bp, Homo sapien
ttatcaggtcaacagaatttgatgc

SEQ ID NO: 4450628 - DNA, 25 bp, Homo sapien
tgaaattggcaactgccattggcac

SEQ ID NO: 4450629 - DNA, 25 bp, Homo sapien
attagatgttatcaggtcaacagaa

SEQ ID NO: 4450630 - DNA, 25 bp, Homo sapien
catccagtaaggcactggaaaaaca

SEQ ID NO: 4450631 - DNA, 25 bp, Homo sapien
ggcacatccagtaaggcactggaaa

SEQ ID NO: 4450632 - DNA, 25 bp, Homo sapien
catggcacatccagtaaggcactgg

SEQ ID NO: 4450633 - DNA, 25 bp, Homo sapien
ctcatggcacatccagtaaggcact

SEQ ID NO: 4450634 - DNA, 25 bp, Homo sapien
tatgcactgtaaaagattttcccat

SEQ ID NO: 4450635 - DNA, 25 bp, Homo sapien
catttttatgcactgtaaaagattt

SEQ ID NO: 4450636 - DNA, 25 bp, Homo sapien
tagcaaaatcatttttatgcactgt

SEQ ID NO: 4450637 - DNA, 25 bp, Homo sapien
gcaaaatcatttttatgcactgtaa

SEQ ID NO: 4450638 - DNA, 25 bp, Homo sapien
cttggacacctgcacgtgatgctgc

SEQ ID NO: 4450639 - DNA, 25 bp, Homo sapien
catgcagcgggactcagtattgaca

SEQ ID NO: 4450640 - DNA, 25 bp, Homo sapien
cacatcatcaggttccagcttagat

SEQ ID NO: 4450641 - DNA, 25 bp, Homo sapien
gactttggtctgatccttggacacc

SEQ ID NO: 4450642 - DNA, 25 bp, Homo sapien
tagcataggcgccaggttcaatggc

SEQ ID NO: 4450643 - DNA, 25 bp, Homo sapien
gtagagtaattttgagatatcctgg

SEQ ID NO: 4450644 - DNA, 25 bp, Homo sapien
tcctggcttcgtgtacagtaggccc

SEQ ID NO: 4450645 - DNA, 25 bp, Homo sapien
gaacacctcttgcatacagaggata

SEQ ID NO: 4450646 - DNA, 25 bp, Homo sapien
ctggcccaaggaaatcactgataca

SEQ ID NO: 4450647 - DNA, 25 bp, Homo sapien
gcccaaggaaatcactgatacatgc

SEQ ID NO: 4450648 - DNA, 25 bp, Homo sapien
ggaaatcactgatacatgcttggcc

SEQ ID NO: 4450649 - DNA, 25 bp, Homo sapien
aaggaaatcactgatacatgcttgg

SEQ ID NO: 4450650 - DNA, 25 bp, Homo sapien
gctctttcttccacctcgcctacat

SEQ ID NO: 4450651 - DNA, 25 bp, Homo sapien
attcctccagtgatgctctttcttc

SEQ ID NO: 4450652 - DNA, 25 bp, Homo sapien
atgctctttcttccacctcgcctac

SEQ ID NO: 4450653 - DNA, 25 bp, Homo sapien
ctattcctccagtgatgctctttct

SEQ ID NO: 4450654 - DNA, 25 bp, Homo sapien
tgtccctgtcttaagcttcccaatt

SEQ ID NO: 4450655 - DNA, 25 bp, Homo sapien
tgcttaacttgtagggtactcccat

SEQ ID NO: 4450656 - DNA, 25 bp, Homo sapien
tcttcaagtagtttgccgtttctct

SEQ ID NO: 4450657 - DNA, 25 bp, Homo sapien
ggagaatgtatcctgattgcagttt

SEQ ID NO: 4450658 - DNA, 25 bp, Homo sapien
gctttcagggcaccttagattctac

SEQ ID NO: 4450659 - DNA, 25 bp, Homo sapien
taaagacagcctgcctaaaaatagc

SEQ ID NO: 4450660 - DNA, 25 bp, Homo sapien
gacaaatatatagatccccatggaa

SEQ ID NO: 4450661 - DNA, 25 bp, Homo sapien
aaatttagccgagcatagcagcgtg

SEQ ID NO: 4450662 - DNA, 25 bp, Homo sapien
tacatactattgtcctcttccctgc

SEQ ID NO: 4450663 - DNA, 25 bp, Homo sapien
acatactattgtcctcttccctgct

SEQ ID NO: 4450664 - DNA, 25 bp, Homo sapien
tcagcctgaggccattctctgagta

SEQ ID NO: 4450665 - DNA, 25 bp, Homo sapien
agctttctatctcaacatctctcag

SEQ ID NO: 4450666 - DNA, 25 bp, Homo sapien
tccaaagagctttctatctcaacat

SEQ ID NO: 4450667 - DNA, 25 bp, Homo sapien
tcagctgatggttctcacatattcc

SEQ ID NO: 4450668 - DNA, 25 bp, Homo sapien
attcagtttctaccatattaatttg

SEQ ID NO: 4450669 - DNA, 25 bp, Homo sapien
tcagtttctaccatattaatttgca

SEQ ID NO: 4450670 - DNA, 25 bp, Homo sapien
cagtttctaccatattaatttgcat

SEQ ID NO: 4450671 - DNA, 25 bp, Homo sapien
gtattcagtttctaccatattaatt

SEQ ID NO: 4450672 - DNA, 25 bp, Homo sapien
tgtgataacagaagtgtagggtgtc

SEQ ID NO: 4450673 - DNA, 25 bp, Homo sapien
agttgcccatccgtttgcacaatgg

SEQ ID NO: 4450674 - DNA, 25 bp, Homo sapien
tccgtttgcacaatggaatagcatg

SEQ ID NO: 4450675 - DNA, 25 bp, Homo sapien
gagagccaattggaagatcattgta

SEQ ID NO: 4450676 - DNA, 25 bp, Homo sapien
actgaagctaggctggaacaggact

SEQ ID NO: 4450677 - DNA, 25 bp, Homo sapien
tccttgtggcatacagtggttgcac

SEQ ID NO: 4450678 - DNA, 25 bp, Homo sapien
taggctggaacaggactgtcactgg

SEQ ID NO: 4450679 - DNA, 25 bp, Homo sapien
tgactggatgctttgtccactgaag

SEQ ID NO: 4450680 - DNA, 25 bp, Homo sapien
tgactcccgcttcggactcggcagg

SEQ ID NO: 4450681 - DNA, 25 bp, Homo sapien
caggtgtctagcaccgcgggcccag

SEQ ID NO: 4450682 - DNA, 25 bp, Homo sapien
gggactccacttatcgaggactgga

SEQ ID NO: 4450683 - DNA, 25 bp, Homo sapien
ttgacacttccaccggttactccgc

SEQ ID NO: 4450684 - DNA, 25 bp, Homo sapien
tctttcaaaatgcaccggtgttttg

SEQ ID NO: 4450685 - DNA, 25 bp, Homo sapien
aatgcaccggtgttttgacaagcat

SEQ ID NO: 4450686 - DNA, 25 bp, Homo sapien
caaaatgcaccggtgttttgacaag

SEQ ID NO: 4450687 - DNA, 25 bp, Homo sapien
tttcaaaatgcaccggtgttttgac

SEQ ID NO: 4450688 - DNA, 25 bp, Homo sapien
cagtgaacgggcagagccattaatc

SEQ ID NO: 4450689 - DNA, 25 bp, Homo sapien
gggatgtccaagaactgagcttgtc

SEQ ID NO: 4450690 - DNA, 25 bp, Homo sapien
taaacgccttgagaacagttctgag

SEQ ID NO: 4450691 - DNA, 25 bp, Homo sapien
gagccattaatcattcccagggcac

SEQ ID NO: 4450692 - DNA, 25 bp, Homo sapien
taacactccgtggttcttacagtgt

SEQ ID NO: 4450693 - DNA, 25 bp, Homo sapien
caagccccaagtttaacactccgtg

SEQ ID NO: 4450694 - DNA, 25 bp, Homo sapien
ttgatttcggtcgtttcttttgtga

SEQ ID NO: 4450695 - DNA, 25 bp, Homo sapien
tttgtgaaattcaaggatggactct

SEQ ID NO: 4450696 - DNA, 25 bp, Homo sapien
catgcacaaagactagaagtttggg

SEQ ID NO: 4450697 - DNA, 25 bp, Homo sapien
tgacaacctaaaccctaatcgtgct

SEQ ID NO: 4450698 - DNA, 25 bp, Homo sapien
ggagtatgtttatcagtgacgacta

SEQ ID NO: 4450699 - DNA, 25 bp, Homo sapien
cacttttgctatataggaggaacaa

SEQ ID NO: 4450700 - DNA, 25 bp, Homo sapien
cagctacttgtatactctctattgg

SEQ ID NO: 4450701 - DNA, 25 bp, Homo sapien
tccacccaatgcacagctttgggag

SEQ ID NO: 4450702 - DNA, 25 bp, Homo sapien
gtatactctctattggtcttcctct

SEQ ID NO: 4450703 - DNA, 25 bp, Homo sapien
cttgtatactctctattggtcttcc

SEQ ID NO: 4450704 - DNA, 25 bp, Homo sapien
gaaaatgcaggcaatcatgaagcta

SEQ ID NO: 4450705 - DNA, 25 bp, Homo sapien
gcacatgttggaaaaattgcactga

SEQ ID NO: 4450706 - DNA, 25 bp, Homo sapien
tccttatactaacagtgactgctag

SEQ ID NO: 4450707 - DNA, 25 bp, Homo sapien
taatatgggcacaggttatgatgcc

SEQ ID NO: 4450708 - DNA, 25 bp, Homo sapien
tcacctgcctcggccttccaaagtg

SEQ ID NO: 4450709 - DNA, 25 bp, Homo sapien
ttggcctcctgagtagctgggatta

SEQ ID NO: 4450710 - DNA, 25 bp, Homo sapien
ggttcgagcgattctcctgctttgg

SEQ ID NO: 4450711 - DNA, 25 bp, Homo sapien
ggcccactgaaacctccgcctccta

SEQ ID NO: 4450712 - DNA, 25 bp, Homo sapien
tacaaacatatcaacaggtggagca

SEQ ID NO: 4450713 - DNA, 25 bp, Homo sapien
gcattgccaggaactgcttaaagga

SEQ ID NO: 4450714 - DNA, 25 bp, Homo sapien
taggtactaaccaaacacactgcca

SEQ ID NO: 4450715 - DNA, 25 bp, Homo sapien
cgcgagaacagaggccaaactttgc

SEQ ID NO: 4450716 - DNA, 25 bp, Homo sapien
tccaatagtgcacggctctgaaaag

SEQ ID NO: 4450717 - DNA, 25 bp, Homo sapien
atttggccggcaagcactgctgacg

SEQ ID NO: 4450718 - DNA, 25 bp, Homo sapien
tacagacagctgtgctagtcctgga

SEQ ID NO: 4450719 - DNA, 25 bp, Homo sapien
tcaaaagtatcatggcaaaggccct

SEQ ID NO: 4450720 - DNA, 25 bp, Homo sapien
cacgtctctttatcacagtgacagg

SEQ ID NO: 4450721 - DNA, 25 bp, Homo sapien
tcagatagaatccatgaccagagtg

SEQ ID NO: 4450722 - DNA, 25 bp, Homo sapien
catagaccaaacagcatgcacttcc

SEQ ID NO: 4450723 - DNA, 25 bp, Homo sapien
tcctaggtagacaaggacagatccc

SEQ ID NO: 4450724 - DNA, 25 bp, Homo sapien
ggagacagaagttggccagctgcat

SEQ ID NO: 4450725 - DNA, 25 bp, Homo sapien
ctagagcttattgtggtaggagaca

SEQ ID NO: 4450726 - DNA, 25 bp, Homo sapien
cacctctatgggcaggacctgagct

SEQ ID NO: 4450727 - DNA, 25 bp, Homo sapien
cttggatgaagaggctactgggctc

SEQ ID NO: 4450728 - DNA, 25 bp, Homo sapien
gcagcatggagctaccatgctctct

SEQ ID NO: 4450729 - DNA, 25 bp, Homo sapien
agcagcatggagctaccatgctctc

SEQ ID NO: 4450730 - DNA, 25 bp, Homo sapien
cagcatggagctaccatgctctctc

SEQ ID NO: 4450731 - DNA, 25 bp, Homo sapien
aagcagcatggagctaccatgctct

SEQ ID NO: 4450732 - DNA, 25 bp, Homo sapien
gggcttaaccagatgcaccaacatg

SEQ ID NO: 4450733 - DNA, 25 bp, Homo sapien
gcttaaccagatgcaccaacatgcc

SEQ ID NO: 4450734 - DNA, 25 bp, Homo sapien
cttctctgggcttaaccagatgcac

SEQ ID NO: 4450735 - DNA, 25 bp, Homo sapien
tctgggcttaaccagatgcaccaac

SEQ ID NO: 4450736 - DNA, 25 bp, Homo sapien
aacacccttacttttgtgtgaggca

SEQ ID NO: 4450737 - DNA, 25 bp, Homo sapien
caagaaatcttccatatcagagcta

SEQ ID NO: 4450738 - DNA, 25 bp, Homo sapien
tacagtaattcaggtcataggtaat

SEQ ID NO: 4450739 - DNA, 25 bp, Homo sapien
catggttagaacaccaggaagactc

SEQ ID NO: 4450740 - DNA, 25 bp, Homo sapien
atcttggtaattctattaaattgga

SEQ ID NO: 4450741 - DNA, 25 bp, Homo sapien
aaatcttggtaattctattaaattg

SEQ ID NO: 4450742 - DNA, 25 bp, Homo sapien
gaattcttcgaagagagtgttgcaa

SEQ ID NO: 4450743 - DNA, 25 bp, Homo sapien
ttaaattggaattcttcgaagagag

SEQ ID NO: 4450744 - DNA, 25 bp, Homo sapien
gggtaaccagagatttgaggacttc

SEQ ID NO: 4450745 - DNA, 25 bp, Homo sapien
cttgacaatgagcttggccacaatt

SEQ ID NO: 4450746 - DNA, 25 bp, Homo sapien
tgcaaggaagggtaaccagagattt

SEQ ID NO: 4450747 - DNA, 25 bp, Homo sapien
tgcaactccaatgggatttcttcca

SEQ ID NO: 4450748 - DNA, 25 bp, Homo sapien
caccgggtggacattatgatggagc

SEQ ID NO: 4450749 - DNA, 25 bp, Homo sapien
tagtgctcggctagaaagctgaaca

SEQ ID NO: 4450750 - DNA, 25 bp, Homo sapien
ctcacagtagcaattttaggcgaca

SEQ ID NO: 4450751 - DNA, 25 bp, Homo sapien
aaccattcacataaccaccgggtgg

SEQ ID NO: 4450752 - DNA, 25 bp, Homo sapien
taacctaataaagagccagtgctcc

SEQ ID NO: 4450753 - DNA, 25 bp, Homo sapien
cagtaacgtgtaacctaataaagag

SEQ ID NO: 4450754 - DNA, 25 bp, Homo sapien
tctgggtagagttgtttatctttct

SEQ ID NO: 4450755 - DNA, 25 bp, Homo sapien
cgtgtaacctaataaagagccagtg

SEQ ID NO: 4450756 - DNA, 25 bp, Homo sapien
tacaattgtattctgccctgagaca

SEQ ID NO: 4450757 - DNA, 25 bp, Homo sapien
caaatttacaaagggtcaactgagg

SEQ ID NO: 4450758 - DNA, 25 bp, Homo sapien
tacagtagaagaacactagatgcct

SEQ ID NO: 4450759 - DNA, 25 bp, Homo sapien
catattttaccccacaagaaggcaa

SEQ ID NO: 4450760 - DNA, 25 bp, Homo sapien
aagccactgggagcatgatggagcc

SEQ ID NO: 4450761 - DNA, 25 bp, Homo sapien
agcagggcccgtgcagtgaagcaca

SEQ ID NO: 4450762 - DNA, 25 bp, Homo sapien
tgtggtcacatctataagctgactt

SEQ ID NO: 4450763 - DNA, 25 bp, Homo sapien
tcagtgtgggccaacacccacaatg

SEQ ID NO: 4450764 - DNA, 25 bp, Homo sapien
tgctgtcaccccaacagataatggc

SEQ ID NO: 4450765 - DNA, 25 bp, Homo sapien
aaattatgcctacgttgctgtcacc

SEQ ID NO: 4450766 - DNA, 25 bp, Homo sapien
taggcacttggctgatgtggatctc

SEQ ID NO: 4450767 - DNA, 25 bp, Homo sapien
taggaatgaggcttttaggcacttg

SEQ ID NO: 4450768 - DNA, 25 bp, Homo sapien
cctgttaaggttggctatgctgcta

SEQ ID NO: 4450769 - DNA, 25 bp, Homo sapien
acacaaatcccatgattaacactgg

SEQ ID NO: 4450770 - DNA, 25 bp, Homo sapien
cactggaaggcctatacataagctg

SEQ ID NO: 4450771 - DNA, 25 bp, Homo sapien
tgttgtttatggtaacacaaatccc

SEQ ID NO: 4450772 - DNA, 25 bp, Homo sapien
tataacatgccagtgcggataaagc

SEQ ID NO: 4450773 - DNA, 25 bp, Homo sapien
gaaagctacccaagtcctgagggag

SEQ ID NO: 4450774 - DNA, 25 bp, Homo sapien
tggctttagcaaccaggaggatgaa

SEQ ID NO: 4450775 - DNA, 25 bp, Homo sapien
gcagacaatgtacccatgacaaggg

SEQ ID NO: 4450776 - DNA, 25 bp, Homo sapien
cctcagtgttcccatgtcaactggc

SEQ ID NO: 4450777 - DNA, 25 bp, Homo sapien
ctgcaagcaaatgtgaaatccttaa

SEQ ID NO: 4450778 - DNA, 25 bp, Homo sapien
tgttcccatgtcaactggcatatgc

SEQ ID NO: 4450779 - DNA, 25 bp, Homo sapien
aatccttaaattgctggcctcagtg

SEQ ID NO: 4450780 - DNA, 25 bp, Homo sapien
gagaactgaatagctgcccctaagg

SEQ ID NO: 4450781 - DNA, 25 bp, Homo sapien
cactgtttggctcaacttaagaggg

SEQ ID NO: 4450782 - DNA, 25 bp, Homo sapien
gactgatcataggtagtgcctccaa

SEQ ID NO: 4450783 - DNA, 25 bp, Homo sapien
gacaaacaatggagagggccactag

SEQ ID NO: 4450784 - DNA, 25 bp, Homo sapien
actgagggagcaaagcagccttcat

SEQ ID NO: 4450785 - DNA, 25 bp, Homo sapien
aaggactgagggagcaaagcagcct

SEQ ID NO: 4450786 - DNA, 25 bp, Homo sapien
ggactgagggagcaaagcagccttc

SEQ ID NO: 4450787 - DNA, 25 bp, Homo sapien
tcaaaggactgagggagcaaagcag

SEQ ID NO: 4450788 - DNA, 25 bp, Homo sapien
gtgactaagaagacgtcatctcttc

SEQ ID NO: 4450789 - DNA, 25 bp, Homo sapien
acagtgactaagaagacgtcatctc

SEQ ID NO: 4450790 - DNA, 25 bp, Homo sapien
gactaagaagacgtcatctcttctt

SEQ ID NO: 4450791 - DNA, 25 bp, Homo sapien
cagtgactaagaagacgtcatctct

SEQ ID NO: 4450792 - DNA, 25 bp, Homo sapien
aatcatattcatccttgggacccgc

SEQ ID NO: 4450793 - DNA, 25 bp, Homo sapien
cttgggacccgcaaagaacagagca

SEQ ID NO: 4450794 - DNA, 25 bp, Homo sapien
acccgcaaagaacagagcatcccat

SEQ ID NO: 4450795 - DNA, 25 bp, Homo sapien
ccccactggtatgcgctggcttccc

SEQ ID NO: 4450796 - DNA, 25 bp, Homo sapien
tgtgtcatgtcgtgatttccggatg

SEQ ID NO: 4450797 - DNA, 25 bp, Homo sapien
tgtcatgtcgtgatttccggatgtt

SEQ ID NO: 4450798 - DNA, 25 bp, Homo sapien
catgtcgtgatttccggatgttgtc

SEQ ID NO: 4450799 - DNA, 25 bp, Homo sapien
ctatgtgtcatgtcgtgatttccgg

SEQ ID NO: 4450800 - DNA, 25 bp, Homo sapien
gcattcgattttgggttcacagggc

SEQ ID NO: 4450801 - DNA, 25 bp, Homo sapien
ggaagcttttgatcgcccagtagta

SEQ ID NO: 4450802 - DNA, 25 bp, Homo sapien
ttctttcactggacaaaccaggtag

SEQ ID NO: 4450803 - DNA, 25 bp, Homo sapien
taaaatccttgccataacctgtgtg

SEQ ID NO: 4450804 - DNA, 25 bp, Homo sapien
tcaggctgtcgatttgcgaacaaga

SEQ ID NO: 4450805 - DNA, 25 bp, Homo sapien
tgcgaacaagagatccaggattacg

SEQ ID NO: 4450806 - DNA, 25 bp, Homo sapien
tcgatttgcgaacaagagatccagg

SEQ ID NO: 4450807 - DNA, 25 bp, Homo sapien
gggcttcaggctgtcgatttgcgaa

SEQ ID NO: 4450808 - DNA, 25 bp, Homo sapien
tgtgtggctgcttaacagacaaggc

SEQ ID NO: 4450809 - DNA, 25 bp, Homo sapien
cctgtgtggctgcttaacagacaag

SEQ ID NO: 4450810 - DNA, 25 bp, Homo sapien
catgcaacttgccttcctgtgtggc

SEQ ID NO: 4450811 - DNA, 25 bp, Homo sapien
gtggctgcttaacagacaaggccat

SEQ ID NO: 4450812 - DNA, 25 bp, Homo sapien
agccacatgtccactcacagactct

SEQ ID NO: 4450813 - DNA, 25 bp, Homo sapien
cttgatcataatttggagtatttcc

SEQ ID NO: 4450814 - DNA, 25 bp, Homo sapien
cgtagaattgtcgactgccctggcc

SEQ ID NO: 4450815 - DNA, 25 bp, Homo sapien
cactgtgtgcgtagaattgtcgact

SEQ ID NO: 4450816 - DNA, 25 bp, Homo sapien
agaagacgtagagtctgaatgtctc

SEQ ID NO: 4450817 - DNA, 25 bp, Homo sapien
tctctagccccggttttggactgga

SEQ ID NO: 4450818 - DNA, 25 bp, Homo sapien
tggctccacaaatcctaaatcttct

SEQ ID NO: 4450819 - DNA, 25 bp, Homo sapien
tcagactgaccctagagaagacgta

SEQ ID NO: 4450820 - DNA, 25 bp, Homo sapien
cattcactagatgtgcaacctttaa

SEQ ID NO: 4450821 - DNA, 25 bp, Homo sapien
gactatttctgaggacggattagag

SEQ ID NO: 4450822 - DNA, 25 bp, Homo sapien
aagggcgtagaagccaggatagaaa

SEQ ID NO: 4450823 - DNA, 25 bp, Homo sapien
tgcgggtaagccatggaagttatgc

SEQ ID NO: 4450824 - DNA, 25 bp, Homo sapien
tgataatgtcaagaacctccatggg

SEQ ID NO: 4450825 - DNA, 25 bp, Homo sapien
gaatgaaagtgcaccatcagagtgt

SEQ ID NO: 4450826 - DNA, 25 bp, Homo sapien
catcaggagggtcattctactagca

SEQ ID NO: 4450827 - DNA, 25 bp, Homo sapien
tctcaagggcaaagtggcttctaac

SEQ ID NO: 4450828 - DNA, 25 bp, Homo sapien
caggctctggattagctctaggaga

SEQ ID NO: 4450829 - DNA, 25 bp, Homo sapien
gagaggagcaaataggttttcccca

SEQ ID NO: 4450830 - DNA, 25 bp, Homo sapien
tcctagaagtgcagctagaagctac

SEQ ID NO: 4450831 - DNA, 25 bp, Homo sapien
gcagctctctgcactcaaggaaatt

SEQ ID NO: 4450832 - DNA, 25 bp, Homo sapien
tctaaggtgtctcatgatgaagcag

SEQ ID NO: 4450833 - DNA, 25 bp, Homo sapien
ttcactgtggcttgacctgaaagct

SEQ ID NO: 4450834 - DNA, 25 bp, Homo sapien
gatgtcctccatgtgaccaactatg

SEQ ID NO: 4450835 - DNA, 25 bp, Homo sapien
caactatgcagcagagatttcactg

SEQ ID NO: 4450836 - DNA, 25 bp, Homo sapien
ggaagcgtctaaggaggaatataaa

SEQ ID NO: 4450837 - DNA, 25 bp, Homo sapien
aggaagcgtctaaggaggaatataa

SEQ ID NO: 4450838 - DNA, 25 bp, Homo sapien
tcttcaggaagcgtctaaggaggaa

SEQ ID NO: 4450839 - DNA, 25 bp, Homo sapien
tccttgaagagcacatccagtctca

SEQ ID NO: 4450840 - DNA, 25 bp, Homo sapien
tgacagccatgtattatcccagaca

SEQ ID NO: 4450841 - DNA, 25 bp, Homo sapien
ctaattctgtgtaatgctctcaagc

SEQ ID NO: 4450842 - DNA, 25 bp, Homo sapien
cagtctcatgttctgtgcccacagc

SEQ ID NO: 4450843 - DNA, 25 bp, Homo sapien
taggagaaaagcacttggttggctc

SEQ ID NO: 4450844 - DNA, 25 bp, Homo sapien
tcaggtgctataggagaaaagcact

SEQ ID NO: 4450845 - DNA, 25 bp, Homo sapien
ggtgctataggagaaaagcacttgg

SEQ ID NO: 4450846 - DNA, 25 bp, Homo sapien
ctataggagaaaagcacttggttgg

SEQ ID NO: 4450847 - DNA, 25 bp, Homo sapien
caggctttctcgctatctgttttct

SEQ ID NO: 4450848 - DNA, 25 bp, Homo sapien
gactgcaggctttctcgctatctgt

SEQ ID NO: 4450849 - DNA, 25 bp, Homo sapien
agagttgactgcaggctttctcgct

SEQ ID NO: 4450850 - DNA, 25 bp, Homo sapien
ctgtttcctctaagcagggaaggct

SEQ ID NO: 4450851 - DNA, 25 bp, Homo sapien
tctagttattagtggttagtagacc

SEQ ID NO: 4450852 - DNA, 25 bp, Homo sapien
gtttatgatatttggtagcacacaa

SEQ ID NO: 4450853 - DNA, 25 bp, Homo sapien
caataccttaagtgtttataatcat

SEQ ID NO: 4450854 - DNA, 25 bp, Homo sapien
gaaacaggaaggtttgtacaaatca

SEQ ID NO: 4450855 - DNA, 25 bp, Homo sapien
ggcttctaatgaggcctttattctc

SEQ ID NO: 4450856 - DNA, 25 bp, Homo sapien
tctggcttctaatgaggcctttatt

SEQ ID NO: 4450857 - DNA, 25 bp, Homo sapien
ctaatgaggcctttattctcactgt

SEQ ID NO: 4450858 - DNA, 25 bp, Homo sapien
ttctaatgaggcctttattctcact

SEQ ID NO: 4450859 - DNA, 25 bp, Homo sapien
attaacaggcccgttctaacagcag

SEQ ID NO: 4450860 - DNA, 25 bp, Homo sapien
cactgtagggtaacaaattaacagg

SEQ ID NO: 4450861 - DNA, 25 bp, Homo sapien
caaattaacaggcccgttctaacag

SEQ ID NO: 4450862 - DNA, 25 bp, Homo sapien
aacaggcccgttctaacagcagagt

SEQ ID NO: 4450863 - DNA, 25 bp, Homo sapien
taatgtactgctctggactcaagaa

SEQ ID NO: 4450864 - DNA, 25 bp, Homo sapien
agacagcagagcatctgtaattggc

SEQ ID NO: 4450865 - DNA, 25 bp, Homo sapien
cagacagcagagcatctgtaattgg

SEQ ID NO: 4450866 - DNA, 25 bp, Homo sapien
gctctggactcaagaatgctctaat

SEQ ID NO: 4450867 - DNA, 25 bp, Homo sapien
gggtatgggcttgccttagcaccag

SEQ ID NO: 4450868 - DNA, 25 bp, Homo sapien
ggcttgccttagcaccagatcctgc

SEQ ID NO: 4450869 - DNA, 25 bp, Homo sapien
aacaacttcacttggggtatgggct

SEQ ID NO: 4450870 - DNA, 25 bp, Homo sapien
tatgggcttgccttagcaccagatc

SEQ ID NO: 4450871 - DNA, 25 bp, Homo sapien
aaatggctatttgcatgagatgcta

SEQ ID NO: 4450872 - DNA, 25 bp, Homo sapien
ttattatcactttcatgatcatcaa

SEQ ID NO: 4450873 - DNA, 25 bp, Homo sapien
catcaaacacaagtattaaatggct

SEQ ID NO: 4450874 - DNA, 25 bp, Homo sapien
tatttgcatgagatgctatgccagg

SEQ ID NO: 4450875 - DNA, 25 bp, Homo sapien
tccatccccagaaggctgctttgcc

SEQ ID NO: 4450876 - DNA, 25 bp, Homo sapien
ttccatccccagaaggctgctttgc

SEQ ID NO: 4450877 - DNA, 25 bp, Homo sapien
cttccatccccagaaggctgctttg

SEQ ID NO: 4450878 - DNA, 25 bp, Homo sapien
tgaaaaaggttggcttgtctggtca

SEQ ID NO: 4450879 - DNA, 25 bp, Homo sapien
gaaaaaggttggcttgtctggtcaa

SEQ ID NO: 4450880 - DNA, 25 bp, Homo sapien
ggtgcaaggccctgtcacagctgct

SEQ ID NO: 4450881 - DNA, 25 bp, Homo sapien
tactctcctgctagagttggacagg

SEQ ID NO: 4450882 - DNA, 25 bp, Homo sapien
tgaacatcagagacaaagagtctgc

SEQ ID NO: 4450883 - DNA, 25 bp, Homo sapien
tctgctgtatcacaaaagggctgac

SEQ ID NO: 4450884 - DNA, 25 bp, Homo sapien
tacttccttcatcagcatgagctgg

SEQ ID NO: 4450885 - DNA, 25 bp, Homo sapien
gacggtgacaattgtaattacctta

SEQ ID NO: 4450886 - DNA, 25 bp, Homo sapien
gagattgcctgtaatgtaattatac

SEQ ID NO: 4450887 - DNA, 25 bp, Homo sapien
cctgtttaattggattgacggtgac

SEQ ID NO: 4450888 - DNA, 25 bp, Homo sapien
gcgacttgtcatctaatgccaccat

SEQ ID NO: 4450889 - DNA, 25 bp, Homo sapien
tggccaagtgcgacttgtcatctaa

SEQ ID NO: 4450890 - DNA, 25 bp, Homo sapien
gcccactggccaagtgcgacttgtc

SEQ ID NO: 4450891 - DNA, 25 bp, Homo sapien
caagtgcgacttgtcatctaatgcc

SEQ ID NO: 4450892 - DNA, 25 bp, Homo sapien
gactgtgaactaacaaggatgtaag

SEQ ID NO: 4450893 - DNA, 25 bp, Homo sapien
tgtgaactaacaaggatgtaagagc

SEQ ID NO: 4450894 - DNA, 25 bp, Homo sapien
aactaacaaggatgtaagagcccat

SEQ ID NO: 4450895 - DNA, 25 bp, Homo sapien
ctgactgtgaactaacaaggatgta

SEQ ID NO: 4450896 - DNA, 25 bp, Homo sapien
ctgctgttgtagtgggtgcttgagc

SEQ ID NO: 4450897 - DNA, 25 bp, Homo sapien
gctgttgtagtgggtgcttgagcat

SEQ ID NO: 4450898 - DNA, 25 bp, Homo sapien
tgctgttgtagtgggtgcttgagca

SEQ ID NO: 4450899 - DNA, 25 bp, Homo sapien
tactatcccacacttttaggagaca

SEQ ID NO: 4450900 - DNA, 25 bp, Homo sapien
tctcagtagtgccaccagggacttc

SEQ ID NO: 4450901 - DNA, 25 bp, Homo sapien
ttaggagacagcaaccactagcttt

SEQ ID NO: 4450902 - DNA, 25 bp, Homo sapien
tcatgaacggaaccctccaggttac

SEQ ID NO: 4450903 - DNA, 25 bp, Homo sapien
ggaagctgaactttggttactgtta

SEQ ID NO: 4450904 - DNA, 25 bp, Homo sapien
gaggaaacctcatggaaatcagaca

SEQ ID NO: 4450905 - DNA, 25 bp, Homo sapien
tgttattcccacgttttgagactct

SEQ ID NO: 4450906 - DNA, 25 bp, Homo sapien
gagagaggtaacattagaggaaacc

SEQ ID NO: 4450907 - DNA, 25 bp, Homo sapien
tgtgatgcttcctttggataggctg

SEQ ID NO: 4450908 - DNA, 25 bp, Homo sapien
ggctttagcatactccggttccatg

SEQ ID NO: 4450909 - DNA, 25 bp, Homo sapien
ttcctttggataggctgaatttcct

SEQ ID NO: 4450910 - DNA, 25 bp, Homo sapien
gatgcttcctttggataggctgaat

SEQ ID NO: 4450911 - DNA, 25 bp, Homo sapien
caaggacgctaaagacaaactgaac

SEQ ID NO: 4450912 - DNA, 25 bp, Homo sapien
taaaaggtcaaggacgctaaagaca

SEQ ID NO: 4450913 - DNA, 25 bp, Homo sapien
aaggagaagcaaagttgaagagatg

SEQ ID NO: 4450914 - DNA, 25 bp, Homo sapien
gaagagatgcattaaaaggtcaagg

SEQ ID NO: 4450915 - DNA, 25 bp, Homo sapien
tctcctagccaaaacaccaggaaag

SEQ ID NO: 4450916 - DNA, 25 bp, Homo sapien
ctgaaaagctccaaaaaaggtctgt

SEQ ID NO: 4450917 - DNA, 25 bp, Homo sapien
caggaaagtgctggcgtaaaagcag

SEQ ID NO: 4450918 - DNA, 25 bp, Homo sapien
gtactatctgttattgactgaaaag

SEQ ID NO: 4450919 - DNA, 25 bp, Homo sapien
tgccaaagctcaggtacccaactgt

SEQ ID NO: 4450920 - DNA, 25 bp, Homo sapien
cattgctactaaacaccagaagaga

SEQ ID NO: 4450921 - DNA, 25 bp, Homo sapien
gatcacacatttgggtgccttggta

SEQ ID NO: 4450922 - DNA, 25 bp, Homo sapien
gacatttgtcatgtgcacctggtga

SEQ ID NO: 4450923 - DNA, 25 bp, Homo sapien
gcattattgtcctctttgcattgta

SEQ ID NO: 4450924 - DNA, 25 bp, Homo sapien
taacaagagtttcactagggacaaa

SEQ ID NO: 4450925 - DNA, 25 bp, Homo sapien
tattgtcctctttgcattgtacact

SEQ ID NO: 4450926 - DNA, 25 bp, Homo sapien
cactagggacaaagggttgcattat

SEQ ID NO: 4450927 - DNA, 25 bp, Homo sapien
atcttgccttcgctgtgatgttagg

SEQ ID NO: 4450928 - DNA, 25 bp, Homo sapien
cttcgctgtgatgttaggagatgtg

SEQ ID NO: 4450929 - DNA, 25 bp, Homo sapien
agaatatcttgccttcgctgtgatg

SEQ ID NO: 4450930 - DNA, 25 bp, Homo sapien
tgccttcgctgtgatgttaggagat

SEQ ID NO: 4450931 - DNA, 25 bp, Homo sapien
caggacaaaagccaatatactgcct

SEQ ID NO: 4450932 - DNA, 25 bp, Homo sapien
taggacagtgctgactgagaggaca

SEQ ID NO: 4450933 - DNA, 25 bp, Homo sapien
ctacagtagtgttgccacaggacaa

SEQ ID NO: 4450934 - DNA, 25 bp, Homo sapien
gccttcttcccttggacgctaggac

SEQ ID NO: 4450935 - DNA, 25 bp, Homo sapien
ctagggcccttctgtattgcaggcc

SEQ ID NO: 4450936 - DNA, 25 bp, Homo sapien
tctagggcccttctgtattgcaggc

SEQ ID NO: 4450937 - DNA, 25 bp, Homo sapien
tagggcccttctgtattgcaggccc

SEQ ID NO: 4450938 - DNA, 25 bp, Homo sapien
cccttctgtattgcaggccctggtt

SEQ ID NO: 4450939 - DNA, 25 bp, Homo sapien
ttccccaatctcctgagcattgagg

SEQ ID NO: 4450940 - DNA, 25 bp, Homo sapien
ggttagtgtgaaatgttccccaatc

SEQ ID NO: 4450941 - DNA, 25 bp, Homo sapien
catgggctctctgctattgattgat

SEQ ID NO: 4450942 - DNA, 25 bp, Homo sapien
ttgaaaaactgacacgatgctgagc

SEQ ID NO: 4450943 - DNA, 25 bp, Homo sapien
tggctttgaaaaggacgaccactgg

SEQ ID NO: 4450944 - DNA, 25 bp, Homo sapien
taaagccatgatatttctagacgtg

SEQ ID NO: 4450945 - DNA, 25 bp, Homo sapien
tgatccccaagctgcacatgcaggt

SEQ ID NO: 4450946 - DNA, 25 bp, Homo sapien
cactagtgacttcctttcccaagaa

SEQ ID NO: 4450947 - DNA, 25 bp, Homo sapien
gagaactgggagtgataagtacgca

SEQ ID NO: 4450948 - DNA, 25 bp, Homo sapien
actgggagtgataagtacgcatgga

SEQ ID NO: 4450949 - DNA, 25 bp, Homo sapien
gataagtacgcatggagagtaagtc

SEQ ID NO: 4450950 - DNA, 25 bp, Homo sapien
ccaaggagaactgggagtgataagt

SEQ ID NO: 4450951 - DNA, 25 bp, Homo sapien
agaatgggagaagccagctcttcat

SEQ ID NO: 4450952 - DNA, 25 bp, Homo sapien
cttcaggagagaatgggagaagcca

SEQ ID NO: 4450953 - DNA, 25 bp, Homo sapien
agagaatgggagaagccagctcttc

SEQ ID NO: 4450954 - DNA, 25 bp, Homo sapien
ggagagaatgggagaagccagctct

SEQ ID NO: 4450955 - DNA, 25 bp, Homo sapien
ggaatgagcttttcactaatactgt

SEQ ID NO: 4450956 - DNA, 25 bp, Homo sapien
gaatgagcttttcactaatactgtt

SEQ ID NO: 4450957 - DNA, 25 bp, Homo sapien
tggaatgagcttttcactaatactg

SEQ ID NO: 4450958 - DNA, 25 bp, Homo sapien
cttggttctgtgatcaggcacagca

SEQ ID NO: 4450959 - DNA, 25 bp, Homo sapien
atctgtttccgatagggaaaatggg

SEQ ID NO: 4450960 - DNA, 25 bp, Homo sapien
tatgaatctgtttccgatagggaaa

SEQ ID NO: 4450961 - DNA, 25 bp, Homo sapien
tttctatgaatctgtttccgatagg

SEQ ID NO: 4450962 - DNA, 25 bp, Homo sapien
gaaaatggggatgatcaggaaagcc

SEQ ID NO: 4450963 - DNA, 25 bp, Homo sapien
gtggtgatacgcagaaccctcaccc

SEQ ID NO: 4450964 - DNA, 25 bp, Homo sapien
agtggtgatacgcagaaccctcacc

SEQ ID NO: 4450965 - DNA, 25 bp, Homo sapien
tgagtggtgatacgcagaaccctca

SEQ ID NO: 4450966 - DNA, 25 bp, Homo sapien
ctgagtggtgatacgcagaaccctc

SEQ ID NO: 4450967 - DNA, 25 bp, Homo sapien
tctgagactacaaaagcgccatcct

SEQ ID NO: 4450968 - DNA, 25 bp, Homo sapien
tagctgcaccttaatcctcatgtac

SEQ ID NO: 4450969 - DNA, 25 bp, Homo sapien
tagtctgctcctataattagctgca

SEQ ID NO: 4450970 - DNA, 25 bp, Homo sapien
tgcaaaatggtgtcagttccatagt

SEQ ID NO: 4450971 - DNA, 25 bp, Homo sapien
ggaccaaacagccaaagattgcaaa

SEQ ID NO: 4450972 - DNA, 25 bp, Homo sapien
gttacagccacattactgatgggca

SEQ ID NO: 4450973 - DNA, 25 bp, Homo sapien
ctttcatatctgcagaacgttacag

SEQ ID NO: 4450974 - DNA, 25 bp, Homo sapien
tgcagaacgttacagccacattact

SEQ ID NO: 4450975 - DNA, 25 bp, Homo sapien
ggtcatctgtagttggatagcgcac

SEQ ID NO: 4450976 - DNA, 25 bp, Homo sapien
ttggacctcatttgtgagctccagg

SEQ ID NO: 4450977 - DNA, 25 bp, Homo sapien
cctcattaagttagtttggacctca

SEQ ID NO: 4450978 - DNA, 25 bp, Homo sapien
caaatacattctgggttaacacata

SEQ ID NO: 4450979 - DNA, 25 bp, Homo sapien
gaagacacaaggtggtaatgctttg

SEQ ID NO: 4450980 - DNA, 25 bp, Homo sapien
gacacaaggtggtaatgctttgtta

SEQ ID NO: 4450981 - DNA, 25 bp, Homo sapien
aagacacaaggtggtaatgctttgt

SEQ ID NO: 4450982 - DNA, 25 bp, Homo sapien
ctgaagacacaaggtggtaatgctt

SEQ ID NO: 4450983 - DNA, 25 bp, Homo sapien
agtttagcacaagcttgcgtgtaag

SEQ ID NO: 4450984 - DNA, 25 bp, Homo sapien
tagcacaagcttgcgtgtaagttgg

SEQ ID NO: 4450985 - DNA, 25 bp, Homo sapien
gggactctgcataaatttttgacac

SEQ ID NO: 4450986 - DNA, 25 bp, Homo sapien
ttgacactgggaactaccttgtagt

SEQ ID NO: 4450987 - DNA, 25 bp, Homo sapien
gagaaaagctgccatattctttccg

SEQ ID NO: 4450988 - DNA, 25 bp, Homo sapien
aaaatgatctgatttgagaaaagct

SEQ ID NO: 4450989 - DNA, 25 bp, Homo sapien
acttttcatctttgtcactatcata

SEQ ID NO: 4450990 - DNA, 25 bp, Homo sapien
ttcatctttgtcactatcatagaaa

SEQ ID NO: 4450991 - DNA, 25 bp, Homo sapien
ggggcttttgccaagtggagatacc

SEQ ID NO: 4450992 - DNA, 25 bp, Homo sapien
gtcactaggggcttttgccaagtgg

SEQ ID NO: 4450993 - DNA, 25 bp, Homo sapien
ggcttttgccaagtggagataccac

SEQ ID NO: 4450994 - DNA, 25 bp, Homo sapien
cactaggggcttttgccaagtggag

SEQ ID NO: 4450995 - DNA, 25 bp, Homo sapien
agtcctcccacatgagcctcctggg

SEQ ID NO: 4450996 - DNA, 25 bp, Homo sapien
aatcagtcctcccacatgagcctcc

SEQ ID NO: 4450997 - DNA, 25 bp, Homo sapien
catgatcatggctccatggctcact

SEQ ID NO: 4450998 - DNA, 25 bp, Homo sapien
ggctcaatcagtcctcccacatgag

SEQ ID NO: 4450999 - DNA, 25 bp, Homo sapien
tcaatgtgcgtcaagaacccaggaa

SEQ ID NO: 4451000 - DNA, 25 bp, Homo sapien
gaactggtcttaggtattcctgtac

SEQ ID NO: 4451001 - DNA, 25 bp, Homo sapien
tcttgatagcgtaagtcaatgtgcg

SEQ ID NO: 4451002 - DNA, 25 bp, Homo sapien
ttggaaaggcctgttgtgattaaga

SEQ ID NO: 4451003 - DNA, 25 bp, Homo sapien
tagaaagccaaaatgcttcgtagtg

SEQ ID NO: 4451004 - DNA, 25 bp, Homo sapien
gccaaaatgcttcgtagtgcagcac

SEQ ID NO: 4451005 - DNA, 25 bp, Homo sapien
gaaagccaaaatgcttcgtagtgca

SEQ ID NO: 4451006 - DNA, 25 bp, Homo sapien
aaatgcttcgtagtgcagcacagac

SEQ ID NO: 4451007 - DNA, 25 bp, Homo sapien
caggctgcccttgattggaagccat

SEQ ID NO: 4451008 - DNA, 25 bp, Homo sapien
tgaaggtgttggttccctggtaatg

SEQ ID NO: 4451009 - DNA, 25 bp, Homo sapien
ccttgattggaagccataggagtgt

SEQ ID NO: 4451010 - DNA, 25 bp, Homo sapien
taggagtgtggctatccactgaagg

SEQ ID NO: 4451011 - DNA, 25 bp, Homo sapien
tcctctcatattccttaagttgcaa

SEQ ID NO: 4451012 - DNA, 25 bp, Homo sapien
tgaggtagattaggacaagggctct

SEQ ID NO: 4451013 - DNA, 25 bp, Homo sapien
cacatgtgccccgtaactgaggtag

SEQ ID NO: 4451014 - DNA, 25 bp, Homo sapien
tcccactttagcagtgagatctggg

SEQ ID NO: 4451015 - DNA, 25 bp, Homo sapien
taaacttaggcatccttaggctctg

SEQ ID NO: 4451016 - DNA, 25 bp, Homo sapien
cagtcttactggtggcttgcaaaca

SEQ ID NO: 4451017 - DNA, 25 bp, Homo sapien
tgaaggcgtacgtgctcaagagaac

SEQ ID NO: 4451018 - DNA, 25 bp, Homo sapien
cagttacttcagtagacagcgggaa

SEQ ID NO: 4451019 - DNA, 25 bp, Homo sapien
gaacagatggcaaacctgactttgg

SEQ ID NO: 4451020 - DNA, 25 bp, Homo sapien
cactagaaatatacaagggctgaca

SEQ ID NO: 4451021 - DNA, 25 bp, Homo sapien
tatcaagtaaatgtgcagcctagag

SEQ ID NO: 4451022 - DNA, 25 bp, Homo sapien
tatcatttagagtcgtggcagggaa

SEQ ID NO: 4451023 - DNA, 25 bp, Homo sapien
actgtgccacactgtttcatggtgt

SEQ ID NO: 4451024 - DNA, 25 bp, Homo sapien
ctgtgccacactgtttcatggtgtc

SEQ ID NO: 4451025 - DNA, 25 bp, Homo sapien
tgtgccacactgtttcatggtgtct

SEQ ID NO: 4451026 - DNA, 25 bp, Homo sapien
ggagacagaaagctcttgagttgtc

SEQ ID NO: 4451027 - DNA, 25 bp, Homo sapien
tcctggcgtccagttattctgtatt

SEQ ID NO: 4451028 - DNA, 25 bp, Homo sapien
ttttctccatcaagggagcaagccc

SEQ ID NO: 4451029 - DNA, 25 bp, Homo sapien
gccattggcttgatgaggagtcaaa

SEQ ID NO: 4451030 - DNA, 25 bp, Homo sapien
gcaagcccccgttgcaggcagagga

SEQ ID NO: 4451031 - DNA, 25 bp, Homo sapien
gactcatccggagaactatttcctc

SEQ ID NO: 4451032 - DNA, 25 bp, Homo sapien
aggacagccttgaaaaggaactcaa

SEQ ID NO: 4451033 - DNA, 25 bp, Homo sapien
cttccaaggacagccttgaaaagga

SEQ ID NO: 4451034 - DNA, 25 bp, Homo sapien
ccccaagcaactgctgcaggactca

SEQ ID NO: 4451035 - DNA, 25 bp, Homo sapien
aaaaagcttgccacgcgcaaggaag

SEQ ID NO: 4451036 - DNA, 25 bp, Homo sapien
cattagcaaattgttgaaaacggtc

SEQ ID NO: 4451037 - DNA, 25 bp, Homo sapien
accgggcgccacaagagcattagca

SEQ ID NO: 4451038 - DNA, 25 bp, Homo sapien
gattcgggatctcaggttccgaccc

SEQ ID NO: 4451039 - DNA, 25 bp, Homo sapien
caactgtccagtggcaacacacaca

SEQ ID NO: 4451040 - DNA, 25 bp, Homo sapien
aaataaatcaactgtccagtggcaa

SEQ ID NO: 4451041 - DNA, 25 bp, Homo sapien
cacacacagcgattcgggatctcag

SEQ ID NO: 4451042 - DNA, 25 bp, Homo sapien
ttgcacggcaggcagagagagcagc

SEQ ID NO: 4451043 - DNA, 25 bp, Homo sapien
cagttttgacgcgtccgccaaacct

SEQ ID NO: 4451044 - DNA, 25 bp, Homo sapien
gctttgccagttttgacgcgtccgc

SEQ ID NO: 4451045 - DNA, 25 bp, Homo sapien
gcaagaaacttttacttgatgcccc

SEQ ID NO: 4451046 - DNA, 25 bp, Homo sapien
caaacctctctagccctttgcgcgt

SEQ ID NO: 4451047 - DNA, 25 bp, Homo sapien
agacgctgtgcccggcagagaagca

SEQ ID NO: 4451048 - DNA, 25 bp, Homo sapien
gtgcccggcagagaagcaacccctg

SEQ ID NO: 4451049 - DNA, 25 bp, Homo sapien
cgctgtgcccggcagagaagcaacc

SEQ ID NO: 4451050 - DNA, 25 bp, Homo sapien
ctggagacgctgtgcccggcagaga

SEQ ID NO: 4451051 - DNA, 25 bp, Homo sapien
ccagcgtccgctctggggccaacgg

SEQ ID NO: 4451052 - DNA, 25 bp, Homo sapien
cgcccgctcctagccgggcgcagag

SEQ ID NO: 4451053 - DNA, 25 bp, Homo sapien
tcgcccgcccgctcctagccgggcg

SEQ ID NO: 4451054 - DNA, 25 bp, Homo sapien
agcgtccgctctggggccaacgggc

SEQ ID NO: 4451055 - DNA, 25 bp, Homo sapien
ccctcgccggcaggcactacccggg

SEQ ID NO: 4451056 - DNA, 25 bp, Homo sapien
cccctcgccggcaggcactacccgg

SEQ ID NO: 4451057 - DNA, 25 bp, Homo sapien
cggcaggcactacccgggggccgtg

SEQ ID NO: 4451058 - DNA, 25 bp, Homo sapien
ggcactacccgggggccgtgcaatc

SEQ ID NO: 4451059 - DNA, 25 bp, Homo sapien
ctgccagtaaggggagagggacggt

SEQ ID NO: 4451060 - DNA, 25 bp, Homo sapien
ctggcggagaccctgtccaagacgc

SEQ ID NO: 4451061 - DNA, 25 bp, Homo sapien
accgagctcttgtcgcctggcggag

SEQ ID NO: 4451062 - DNA, 25 bp, Homo sapien
gcttccgtaaagcatttccagtcgg

SEQ ID NO: 4451063 - DNA, 25 bp, Homo sapien
gaacaaagcacggaaagttgctggg

SEQ ID NO: 4451064 - DNA, 25 bp, Homo sapien
gaaggggctcagcaaaattgactct

SEQ ID NO: 4451065 - DNA, 25 bp, Homo sapien
catccataattgatggggagatgag

SEQ ID NO: 4451066 - DNA, 25 bp, Homo sapien
aacgcctctcgttgccggagaaggg

SEQ ID NO: 4451067 - DNA, 25 bp, Homo sapien
gactcttccttatttgtttccatcc

SEQ ID NO: 4451068 - DNA, 25 bp, Homo sapien
gatgatctacatactgtgtccaagc

SEQ ID NO: 4451069 - DNA, 25 bp, Homo sapien
aaaattgctgtagccagctgtgctg

SEQ ID NO: 4451070 - DNA, 25 bp, Homo sapien
gacaatactgccagtggtatagaag

SEQ ID NO: 4451071 - DNA, 25 bp, Homo sapien
cggatggattccatgtagctccaaa

SEQ ID NO: 4451072 - DNA, 25 bp, Homo sapien
tcatgtgtatttccctttttgtttc

SEQ ID NO: 4451073 - DNA, 25 bp, Homo sapien
catgtgtatttccctttttgtttct

SEQ ID NO: 4451074 - DNA, 25 bp, Homo sapien
ccctttttgtttcttctcatagaga

SEQ ID NO: 4451075 - DNA, 25 bp, Homo sapien
ctttttgtttcttctcatagagatc

SEQ ID NO: 4451076 - DNA, 25 bp, Homo sapien
aatatttgtggattgcatggcaaac

SEQ ID NO: 4451077 - DNA, 25 bp, Homo sapien
tctgttgtaggtaagggcataaata

SEQ ID NO: 4451078 - DNA, 25 bp, Homo sapien
ttgtggattgcatggcaaactgcct

SEQ ID NO: 4451079 - DNA, 25 bp, Homo sapien
cctgaattacaagtctgttgtaggt

SEQ ID NO: 4451080 - DNA, 25 bp, Homo sapien
ttctgatggcttaagctgtagggcc

SEQ ID NO: 4451081 - DNA, 25 bp, Homo sapien
gctgatgtgcgggttttagtcctga

SEQ ID NO: 4451082 - DNA, 25 bp, Homo sapien
tagagtccaactcatatgagcatgg

SEQ ID NO: 4451083 - DNA, 25 bp, Homo sapien
tagtcctgatcacggagcaatctag

SEQ ID NO: 4451084 - DNA, 25 bp, Homo sapien
tagtggcagatgagtttatctggaa

SEQ ID NO: 4451085 - DNA, 25 bp, Homo sapien
tgagtttatctggaagactcaggcc

SEQ ID NO: 4451086 - DNA, 25 bp, Homo sapien
gcagatgagtttatctggaagactc

SEQ ID NO: 4451087 - DNA, 25 bp, Homo sapien
gactggggaccgttagtggcagatg

SEQ ID NO: 4451088 - DNA, 25 bp, Homo sapien
gggagccagaccgattactaaacta

SEQ ID NO: 4451089 - DNA, 25 bp, Homo sapien
catggaaaattgaacccctggagca

SEQ ID NO: 4451090 - DNA, 25 bp, Homo sapien
tttagatcccgtctgtaggcaagtg

SEQ ID NO: 4451091 - DNA, 25 bp, Homo sapien
tattagtctagttgaaccaggccag

SEQ ID NO: 4451092 - DNA, 25 bp, Homo sapien
atctgtgtctcacaacacccctagg

SEQ ID NO: 4451093 - DNA, 25 bp, Homo sapien
cctaggaggtgggtattaccaccat

SEQ ID NO: 4451094 - DNA, 25 bp, Homo sapien
caagcactattataagtgctgttca

SEQ ID NO: 4451095 - DNA, 25 bp, Homo sapien
tatatttatagcactcactacatgc

SEQ ID NO: 4451096 - DNA, 25 bp, Homo sapien
cagatttttaatagccccagggcca

SEQ ID NO: 4451097 - DNA, 25 bp, Homo sapien
caaggtctagggtaaatctccagcc

SEQ ID NO: 4451098 - DNA, 25 bp, Homo sapien
tcaacagtaccgacagtggaagcca

SEQ ID NO: 4451099 - DNA, 25 bp, Homo sapien
tagctgttgtggaactggcctcaag

SEQ ID NO: 4451100 - DNA, 25 bp, Homo sapien
aacagtagccctgaggtctagcacc

SEQ ID NO: 4451101 - DNA, 25 bp, Homo sapien
tgaagggacaatgggcacaagttac

SEQ ID NO: 4451102 - DNA, 25 bp, Homo sapien
gaggtcttagatctactactgagtg

SEQ ID NO: 4451103 - DNA, 25 bp, Homo sapien
gccaggcaatctgtaggcacactga

SEQ ID NO: 4451104 - DNA, 25 bp, Homo sapien
ggggaagccactttagctctgagca

SEQ ID NO: 4451105 - DNA, 25 bp, Homo sapien
tagtctttcatgagctagctgggat

SEQ ID NO: 4451106 - DNA, 25 bp, Homo sapien
ataaagatcctttgcaaactggggg

SEQ ID NO: 4451107 - DNA, 25 bp, Homo sapien
ctcactataaagatcctttgcaaac

SEQ ID NO: 4451108 - DNA, 25 bp, Homo sapien
atctctgttgactccctctttcacc

SEQ ID NO: 4451109 - DNA, 25 bp, Homo sapien
agatgagggaaggatgcatctctgt

SEQ ID NO: 4451110 - DNA, 25 bp, Homo sapien
tgagggaaggatgcatctctgttga

SEQ ID NO: 4451111 - DNA, 25 bp, Homo sapien
tctctgttgactccctctttcacca

SEQ ID NO: 4451112 - DNA, 25 bp, Homo sapien
tgtctccaggtccattgctctatga

SEQ ID NO: 4451113 - DNA, 25 bp, Homo sapien
caaaaatcaaaactaggttccacag

SEQ ID NO: 4451114 - DNA, 25 bp, Homo sapien
gacctccaaggctaatctcagagag

SEQ ID NO: 4451115 - DNA, 25 bp, Homo sapien
aaatggatttgcattgacaaaaatc

SEQ ID NO: 4451116 - DNA, 25 bp, Homo sapien
cttttgtctaggctctgtatctgat

SEQ ID NO: 4451117 - DNA, 25 bp, Homo sapien
tctaggctctgtatctgatggacta

SEQ ID NO: 4451118 - DNA, 25 bp, Homo sapien
tgcagccttttgtctaggctctgta

SEQ ID NO: 4451119 - DNA, 25 bp, Homo sapien
ctgtatctgatggactatgaacttc

SEQ ID NO: 4451120 - DNA, 25 bp, Homo sapien
tgaggatgggctgctgctcctattc

SEQ ID NO: 4451121 - DNA, 25 bp, Homo sapien
actgaggatgggctgctgctcctat

SEQ ID NO: 4451122 - DNA, 25 bp, Homo sapien
ctggcaaagaaggactgaggatggg

SEQ ID NO: 4451123 - DNA, 25 bp, Homo sapien
ggactgaggatgggctgctgctcct

SEQ ID NO: 4451124 - DNA, 25 bp, Homo sapien
tgcaaccaccgtgtagccatagctt

SEQ ID NO: 4451125 - DNA, 25 bp, Homo sapien
tgccctttgggctcggatgacagaa

SEQ ID NO: 4451126 - DNA, 25 bp, Homo sapien
gatattagggcctgggtctatgcct

SEQ ID NO: 4451127 - DNA, 25 bp, Homo sapien
tactgacttgtctgatgcaaccacc

SEQ ID NO: 4451128 - DNA, 25 bp, Homo sapien
accatcaacccaacagcgaatcttg

SEQ ID NO: 4451129 - DNA, 25 bp, Homo sapien
tcctgcagcgttggcacaatatcct

SEQ ID NO: 4451130 - DNA, 25 bp, Homo sapien
agtctaccatcattctcctgcagcg

SEQ ID NO: 4451131 - DNA, 25 bp, Homo sapien
gcacaatatcctcattagcctccag

SEQ ID NO: 4451132 - DNA, 25 bp, Homo sapien
tgaagccctgctgacacatcagaat

SEQ ID NO: 4451133 - DNA, 25 bp, Homo sapien
gaagccctgctgacacatcagaatc

SEQ ID NO: 4451134 - DNA, 25 bp, Homo sapien
gctgaagccctgctgacacatcaga

SEQ ID NO: 4451135 - DNA, 25 bp, Homo sapien
ctgaagccctgctgacacatcagaa

SEQ ID NO: 4451136 - DNA, 25 bp, Homo sapien
cctggtgtcacaggaattatccatt

SEQ ID NO: 4451137 - DNA, 25 bp, Homo sapien
agattgatttagtaccactaaacaa

SEQ ID NO: 4451138 - DNA, 25 bp, Homo sapien
ttagattgatttagtaccactaaac

SEQ ID NO: 4451139 - DNA, 25 bp, Homo sapien
tagattgatttagtaccactaaaca

SEQ ID NO: 4451140 - DNA, 25 bp, Homo sapien
cagtaaataaccaaaggctatcatt

SEQ ID NO: 4451141 - DNA, 25 bp, Homo sapien
ttccagtaaataaccaaaggctatc

SEQ ID NO: 4451142 - DNA, 25 bp, Homo sapien
ccaaaggctatcatttgggcctctg

SEQ ID NO: 4451143 - DNA, 25 bp, Homo sapien
aataaccaaaggctatcatttgggc

SEQ ID NO: 4451144 - DNA, 25 bp, Homo sapien
tgaagtcagggtggcccctgctcag

SEQ ID NO: 4451145 - DNA, 25 bp, Homo sapien
ggtgggccaaggtgaagtcagggtg

SEQ ID NO: 4451146 - DNA, 25 bp, Homo sapien
ctgctcagaaatgccactgagctac

SEQ ID NO: 4451147 - DNA, 25 bp, Homo sapien
ccctgctcagaaatgccactgagct

SEQ ID NO: 4451148 - DNA, 25 bp, Homo sapien
cagcagcagtatgtaggcacaaagc

SEQ ID NO: 4451149 - DNA, 25 bp, Homo sapien
aagctgactgccctcaactgggaaa

SEQ ID NO: 4451150 - DNA, 25 bp, Homo sapien
tagtcgacagtattaaggggttcat

SEQ ID NO: 4451151 - DNA, 25 bp, Homo sapien
ctgccctcaactgggaaaccatcag

SEQ ID NO: 4451152 - DNA, 25 bp, Homo sapien
tctaaaaaccggatattgccttgaa

SEQ ID NO: 4451153 - DNA, 25 bp, Homo sapien
tcattgcctgaagggcgtcctctaa

SEQ ID NO: 4451154 - DNA, 25 bp, Homo sapien
gccagcaatataaagtgtgtctcga

SEQ ID NO: 4451155 - DNA, 25 bp, Homo sapien
gtctcgaattttcaacatcagctga

SEQ ID NO: 4451156 - DNA, 25 bp, Homo sapien
taagtttactgtataaacttgatcc

SEQ ID NO: 4451157 - DNA, 25 bp, Homo sapien
ttaagtttactgtataaacttgatc

SEQ ID NO: 4451158 - DNA, 25 bp, Homo sapien
catttaagtttactgtataaacttg

SEQ ID NO: 4451159 - DNA, 25 bp, Homo sapien
tgttgtcttgatcgccatgtcagtt

SEQ ID NO: 4451160 - DNA, 25 bp, Homo sapien
tcatagcacagttttctcgatcctg

SEQ ID NO: 4451161 - DNA, 25 bp, Homo sapien
cgatcctgttgtcttgatcgccatg

SEQ ID NO: 4451162 - DNA, 25 bp, Homo sapien
agttttctcgatcctgttgtcttga

SEQ ID NO: 4451163 - DNA, 25 bp, Homo sapien
tgtagtatctacacatgggattgaa

SEQ ID NO: 4451164 - DNA, 25 bp, Homo sapien
tctacacatgggattgaatgcattg

SEQ ID NO: 4451165 - DNA, 25 bp, Homo sapien
gtatctacacatgggattgaatgca

SEQ ID NO: 4451166 - DNA, 25 bp, Homo sapien
acatgggattgaatgcattggtacc

SEQ ID NO: 4451167 - DNA, 25 bp, Homo sapien
tccccatcatattctaaggtactca

SEQ ID NO: 4451168 - DNA, 25 bp, Homo sapien
ggcatcttgccaggccactaatttc

SEQ ID NO: 4451169 - DNA, 25 bp, Homo sapien
gtctggcatcaaatgggcatcttgc

SEQ ID NO: 4451170 - DNA, 25 bp, Homo sapien
agagggcaacattggtttgtctggc

SEQ ID NO: 4451171 - DNA, 25 bp, Homo sapien
ggcagatccatcacccatgcttcga

SEQ ID NO: 4451172 - DNA, 25 bp, Homo sapien
taacggcatcgctggccaagaagtc

SEQ ID NO: 4451173 - DNA, 25 bp, Homo sapien
tcacccatgcttcgataaataacgg

SEQ ID NO: 4451174 - DNA, 25 bp, Homo sapien
attttattgtgcgaagggcagatcc

SEQ ID NO: 4451175 - DNA, 25 bp, Homo sapien
catccactatcctggtgaccccacg

SEQ ID NO: 4451176 - DNA, 25 bp, Homo sapien
ctggtgaccccacgacactgctctt

SEQ ID NO: 4451177 - DNA, 25 bp, Homo sapien
ctatcctggtgaccccacgacactg

SEQ ID NO: 4451178 - DNA, 25 bp, Homo sapien
gtgaccccacgacactgctcttcaa

SEQ ID NO: 4451179 - DNA, 25 bp, Homo sapien
cttgatggccgtggctgctgtcccc

SEQ ID NO: 4451180 - DNA, 25 bp, Homo sapien
ctcttgatggccgtggctgctgtcc

SEQ ID NO: 4451181 - DNA, 25 bp, Homo sapien
tgatggccgtggctgctgtccccac

SEQ ID NO: 4451182 - DNA, 25 bp, Homo sapien
tcttgatggccgtggctgctgtccc

SEQ ID NO: 4451183 - DNA, 25 bp, Homo sapien
gcctaaattattatgttcgacagcg

SEQ ID NO: 4451184 - DNA, 25 bp, Homo sapien
cgacagcgatttctcgaaagaagaa

SEQ ID NO: 4451185 - DNA, 25 bp, Homo sapien
gaagaaatagacatagtttccatat

SEQ ID NO: 4451186 - DNA, 25 bp, Homo sapien
tccatattctatggcatgaagaaag

SEQ ID NO: 4451187 - DNA, 25 bp, Homo sapien
caaagcaatggggttatgagcatgg

SEQ ID NO: 4451188 - DNA, 25 bp, Homo sapien
ctgcccaacggatagaagcaaagca

SEQ ID NO: 4451189 - DNA, 25 bp, Homo sapien
agcaatggggttatgagcatggaaa

SEQ ID NO: 4451190 - DNA, 25 bp, Homo sapien
cccaacggatagaagcaaagcaatg

SEQ ID NO: 4451191 - DNA, 25 bp, Homo sapien
ccgctgggaaccacccatgtcgttt

SEQ ID NO: 4451192 - DNA, 25 bp, Homo sapien
gacagaacagttcagccgagccttt

SEQ ID NO: 4451193 - DNA, 25 bp, Homo sapien
tattgagctgcgtggtaaacacccc

SEQ ID NO: 4451194 - DNA, 25 bp, Homo sapien
catgtcgtttttacatatgcgggcc

SEQ ID NO: 4451195 - DNA, 25 bp, Homo sapien
actgctgtccaaacagaatctggag

SEQ ID NO: 4451196 - DNA, 25 bp, Homo sapien
tgctaaatgcacagacagcagaacc

SEQ ID NO: 4451197 - DNA, 25 bp, Homo sapien
gcactttgtcttcgggaactgctgt

SEQ ID NO: 4451198 - DNA, 25 bp, Homo sapien
tggctttggcactttgtcttcggga

SEQ ID NO: 4451199 - DNA, 25 bp, Homo sapien
taagcttcggcaaggccgtgttttg

SEQ ID NO: 4451200 - DNA, 25 bp, Homo sapien
gaaccagggctcatcggcaatgggt

SEQ ID NO: 4451201 - DNA, 25 bp, Homo sapien
agtttcatccgggaaatcgatggag

SEQ ID NO: 4451202 - DNA, 25 bp, Homo sapien
ctcatcggcaatgggtggaacggca

SEQ ID NO: 4451203 - DNA, 25 bp, Homo sapien
aatacgctgtcgttcaaagagaaag

SEQ ID NO: 4451204 - DNA, 25 bp, Homo sapien
gaaaggactggtctttgccagaact

SEQ ID NO: 4451205 - DNA, 25 bp, Homo sapien
tgactgtgtagttctggtagggtcc

SEQ ID NO: 4451206 - DNA, 25 bp, Homo sapien
gtagggtccggctgaatggtccact

SEQ ID NO: 4451207 - DNA, 25 bp, Homo sapien
ctcgccctagcaggctcgggaaaaa

SEQ ID NO: 4451208 - DNA, 25 bp, Homo sapien
tgaagggcgttctcgtaacatatac

SEQ ID NO: 4451209 - DNA, 25 bp, Homo sapien
catgactagatgaaatacatgccga

SEQ ID NO: 4451210 - DNA, 25 bp, Homo sapien
tgctaatttagaggaccaaaaggac

SEQ ID NO: 4451211 - DNA, 25 bp, Homo sapien
tgatctttatccaactgtaatgaga

SEQ ID NO: 4451212 - DNA, 25 bp, Homo sapien
tagagaacgccacatataaagcgtg

SEQ ID NO: 4451213 - DNA, 25 bp, Homo sapien
actgtaatgagatgacctttttgtc

SEQ ID NO: 4451214 - DNA, 25 bp, Homo sapien
taaagcgtggtgatctttatccaac

SEQ ID NO: 4451215 - DNA, 25 bp, Homo sapien
tttttacatgatccataacgctcac

SEQ ID NO: 4451216 - DNA, 25 bp, Homo sapien
tacatgatccataacgctcacagcg

SEQ ID NO: 4451217 - DNA, 25 bp, Homo sapien
ccataacgctcacagcgactgaggg

SEQ ID NO: 4451218 - DNA, 25 bp, Homo sapien
tgatccataacgctcacagcgactg

SEQ ID NO: 4451219 - DNA, 25 bp, Homo sapien
gattttctcatcaacaaaggtttcg

SEQ ID NO: 4451220 - DNA, 25 bp, Homo sapien
agaatgtaacttggattttctcatc

SEQ ID NO: 4451221 - DNA, 25 bp, Homo sapien
tttctcatcaacaaaggtttcgata

SEQ ID NO: 4451222 - DNA, 25 bp, Homo sapien
acagaatgtaacttggattttctca

SEQ ID NO: 4451223 - DNA, 25 bp, Homo sapien
ccagccacaatacgggtcacgagat

SEQ ID NO: 4451224 - DNA, 25 bp, Homo sapien
ccacaatacgggtcacgagatgcaa

SEQ ID NO: 4451225 - DNA, 25 bp, Homo sapien
tacgggtcacgagatgcaatacaag

SEQ ID NO: 4451226 - DNA, 25 bp, Homo sapien
ggcttaaccagccacaatacgggtc

SEQ ID NO: 4451227 - DNA, 25 bp, Homo sapien
ctgtggttatggaaagcaaagaagt

SEQ ID NO: 4451228 - DNA, 25 bp, Homo sapien
gctgtgttgccgaattctgtgtctt

SEQ ID NO: 4451229 - DNA, 25 bp, Homo sapien
gagctgtgttgccgaattctgtgtc

SEQ ID NO: 4451230 - DNA, 25 bp, Homo sapien
gcagtcccctagatgagctgtgttg

SEQ ID NO: 4451231 - DNA, 25 bp, Homo sapien
atgagctgtgttgccgaattctgtg

SEQ ID NO: 4451232 - DNA, 25 bp, Homo sapien
cagctcagcttttgcgaagtttaag

SEQ ID NO: 4451233 - DNA, 25 bp, Homo sapien
taatgtatccccatgaccgaacagc

SEQ ID NO: 4451234 - DNA, 25 bp, Homo sapien
taatgtcgacgtgcaaatgtggtca

SEQ ID NO: 4451235 - DNA, 25 bp, Homo sapien
tcaaaaagaagctccaggtgggaat

SEQ ID NO: 4451236 - DNA, 25 bp, Homo sapien
tgttggaccgccaaatattttgtaa

SEQ ID NO: 4451237 - DNA, 25 bp, Homo sapien
atattttgtaatctggtgtagttga

SEQ ID NO: 4451238 - DNA, 25 bp, Homo sapien
cagatgttggaccgccaaatatttt

SEQ ID NO: 4451239 - DNA, 25 bp, Homo sapien
gatgttggaccgccaaatattttgt

SEQ ID NO: 4451240 - DNA, 25 bp, Homo sapien
gattcccaggattagcgcaaaccat

SEQ ID NO: 4451241 - DNA, 25 bp, Homo sapien
tagaagcagcaataggaccgggagt

SEQ ID NO: 4451242 - DNA, 25 bp, Homo sapien
tgcaacagttaacagaaggaggctc

SEQ ID NO: 4451243 - DNA, 25 bp, Homo sapien
tgaagggctgccaaactgcgcaaaa

SEQ ID NO: 4451244 - DNA, 25 bp, Homo sapien
aaaggtaatataattcccagggcag

SEQ ID NO: 4451245 - DNA, 25 bp, Homo sapien
ggaaagcccctgtggttactaatga

SEQ ID NO: 4451246 - DNA, 25 bp, Homo sapien
tgattttggacgtgacaaaccagct

SEQ ID NO: 4451247 - DNA, 25 bp, Homo sapien
taaaaacacgcctgaggaagctaca

SEQ ID NO: 4451248 - DNA, 25 bp, Homo sapien
attgtggtaacagaagatgaagata

SEQ ID NO: 4451249 - DNA, 25 bp, Homo sapien
gtaacagaagatgaagatacctcca

SEQ ID NO: 4451250 - DNA, 25 bp, Homo sapien
acagaagatgaagatacctccatgt

SEQ ID NO: 4451251 - DNA, 25 bp, Homo sapien
cattgtggtaacagaagatgaagat

SEQ ID NO: 4451252 - DNA, 25 bp, Homo sapien
aaaggatcagtaaaatcagaagtgt

SEQ ID NO: 4451253 - DNA, 25 bp, Homo sapien
tttgggatacccgataaaggatcag

SEQ ID NO: 4451254 - DNA, 25 bp, Homo sapien
agagcttgtcagtttaggtctccag

SEQ ID NO: 4451255 - DNA, 25 bp, Homo sapien
tgaactacaaatttccgagagcttg

SEQ ID NO: 4451256 - DNA, 25 bp, Homo sapien
ggtggaggtacaaccgcagaagctc

SEQ ID NO: 4451257 - DNA, 25 bp, Homo sapien
cagtgacattaaggatcaggtttcc

SEQ ID NO: 4451258 - DNA, 25 bp, Homo sapien
gaatgcactcagatataaccacaga

SEQ ID NO: 4451259 - DNA, 25 bp, Homo sapien
caggtttccacgcagttagagatga

SEQ ID NO: 4451260 - DNA, 25 bp, Homo sapien
tatcccagagtaaggtaagtcagag

SEQ ID NO: 4451261 - DNA, 25 bp, Homo sapien
taactgctcctattacgggctgaaa

SEQ ID NO: 4451262 - DNA, 25 bp, Homo sapien
gaaaggctcctagacaaaacatctg

SEQ ID NO: 4451263 - DNA, 25 bp, Homo sapien
tgcggtgaccctcgaaattccctga

SEQ ID NO: 4451264 - DNA, 25 bp, Homo sapien
taatcaaactaggatccccagagac

SEQ ID NO: 4451265 - DNA, 25 bp, Homo sapien
cccagagacatacaggattgctgca

SEQ ID NO: 4451266 - DNA, 25 bp, Homo sapien
tagctcggagggtcaagtagactcc

SEQ ID NO: 4451267 - DNA, 25 bp, Homo sapien
tatggttcatatgcttagctcggag

SEQ ID NO: 4451268 - DNA, 25 bp, Homo sapien
catctggttggactctccagactgg

SEQ ID NO: 4451269 - DNA, 25 bp, Homo sapien
ggactctccagactggacttcccat

SEQ ID NO: 4451270 - DNA, 25 bp, Homo sapien
gtggaccatctggttggactctcca

SEQ ID NO: 4451271 - DNA, 25 bp, Homo sapien
tggttggactctccagactggactt

SEQ ID NO: 4451272 - DNA, 25 bp, Homo sapien
tctgtgcatgactgggcggactctg

SEQ ID NO: 4451273 - DNA, 25 bp, Homo sapien
tatagcgatgcctcccggttaggga

SEQ ID NO: 4451274 - DNA, 25 bp, Homo sapien
cacggttcatactaggctgtctgga

SEQ ID NO: 4451275 - DNA, 25 bp, Homo sapien
tctggaatcaacagaacgccggtga

SEQ ID NO: 4451276 - DNA, 25 bp, Homo sapien
tactggtaaggtagcccctgtgagc

SEQ ID NO: 4451277 - DNA, 25 bp, Homo sapien
aaacagtcagcagggttgcgcatca

SEQ ID NO: 4451278 - DNA, 25 bp, Homo sapien
gctttagcgcttccagagatcactg

SEQ ID NO: 4451279 - DNA, 25 bp, Homo sapien
cacatgggaatagcacacttgaggc

SEQ ID NO: 4451280 - DNA, 25 bp, Homo sapien
actggtctgaagtcagtctttacag

SEQ ID NO: 4451281 - DNA, 25 bp, Homo sapien
ctgaagtcagtctttacagtagcat

SEQ ID NO: 4451282 - DNA, 25 bp, Homo sapien
ctttacagtagcattgggtaggtcc

SEQ ID NO: 4451283 - DNA, 25 bp, Homo sapien
ggtctgaagtcagtctttacagtag

SEQ ID NO: 4451284 - DNA, 25 bp, Homo sapien
actttggagcctaattcatatccca

SEQ ID NO: 4451285 - DNA, 25 bp, Homo sapien
tcattgaactttggagcctaattca

SEQ ID NO: 4451286 - DNA, 25 bp, Homo sapien
tgcaaatgtactccaagggttccat

SEQ ID NO: 4451287 - DNA, 25 bp, Homo sapien
ctgtctcccaaacccgtggaatgct

SEQ ID NO: 4451288 - DNA, 25 bp, Homo sapien
atcctttttcagtagcgattggttt

SEQ ID NO: 4451289 - DNA, 25 bp, Homo sapien
ggtgttcatctttaaccattgatcc

SEQ ID NO: 4451290 - DNA, 25 bp, Homo sapien
cctttttcagtagcgattggtttca

SEQ ID NO: 4451291 - DNA, 25 bp, Homo sapien
ggtgtggtgttcatctttaaccatt

SEQ ID NO: 4451292 - DNA, 25 bp, Homo sapien
tcaaggatttctggtgaacaatatc

SEQ ID NO: 4451293 - DNA, 25 bp, Homo sapien
tggtccattgttgggatatctgcag

SEQ ID NO: 4451294 - DNA, 25 bp, Homo sapien
gatgccatggtccattgttgggata

SEQ ID NO: 4451295 - DNA, 25 bp, Homo sapien
agggtgagggatagatgccatggtc

SEQ ID NO: 4451296 - DNA, 25 bp, Homo sapien
cactctctcttcagcaccacgtcca

SEQ ID NO: 4451297 - DNA, 25 bp, Homo sapien
tcttcagcaccacgtccatattcca

SEQ ID NO: 4451298 - DNA, 25 bp, Homo sapien
tctctcttcagcaccacgtccatat

SEQ ID NO: 4451299 - DNA, 25 bp, Homo sapien
tctcttcagcaccacgtccatattc

SEQ ID NO: 4451300 - DNA, 25 bp, Homo sapien
cacagtgtatcgacaccatttgtgt

SEQ ID NO: 4451301 - DNA, 25 bp, Homo sapien
ctttgagaacccacagtgtatcgac

SEQ ID NO: 4451302 - DNA, 25 bp, Homo sapien
gaacccacagtgtatcgacaccatt

SEQ ID NO: 4451303 - DNA, 25 bp, Homo sapien
cagtgtatcgacaccatttgtgtag

SEQ ID NO: 4451304 - DNA, 25 bp, Homo sapien
gcaccatatgctgccctgacagaat

SEQ ID NO: 4451305 - DNA, 25 bp, Homo sapien
ccgtttaggttccacttgaggtgat

SEQ ID NO: 4451306 - DNA, 25 bp, Homo sapien
ggcttgatggtatcagccaatgtca

SEQ ID NO: 4451307 - DNA, 25 bp, Homo sapien
ttcctcttgacaggataaccactat

SEQ ID NO: 4451308 - DNA, 25 bp, Homo sapien
tgtactctttattgcgtgaaatttt

SEQ ID NO: 4451309 - DNA, 25 bp, Homo sapien
gctctttgtactctttattgcgtga

SEQ ID NO: 4451310 - DNA, 25 bp, Homo sapien
ttttttccatcagcagctatcattt

SEQ ID NO: 4451311 - DNA, 25 bp, Homo sapien
catcagcagctatcatttttacaaa

SEQ ID NO: 4451312 - DNA, 25 bp, Homo sapien
aggtgaggcttccacagactgcttg

SEQ ID NO: 4451313 - DNA, 25 bp, Homo sapien
ggtgaggcttccacagactgcttgt

SEQ ID NO: 4451314 - DNA, 25 bp, Homo sapien
gtgaggcttccacagactgcttgtg

SEQ ID NO: 4451315 - DNA, 25 bp, Homo sapien
tttctcttgcatttcaactgtaatg

SEQ ID NO: 4451316 - DNA, 25 bp, Homo sapien
ccatgctgttcagagaagtcatcca

SEQ ID NO: 4451317 - DNA, 25 bp, Homo sapien
gggggaggctgaccttgcataacac

SEQ ID NO: 4451318 - DNA, 25 bp, Homo sapien
tgcatttcaactgtaatgataagaa

SEQ ID NO: 4451319 - DNA, 25 bp, Homo sapien
agacaacagccagggatctccactg

SEQ ID NO: 4451320 - DNA, 25 bp, Homo sapien
ctgccagtggtgataggaaatggga

SEQ ID NO: 4451321 - DNA, 25 bp, Homo sapien
tctgtataggatgcctgagctgctg

SEQ ID NO: 4451322 - DNA, 25 bp, Homo sapien
ggtcccaggctttcatggatcgagt

SEQ ID NO: 4451323 - DNA, 25 bp, Homo sapien
ctaatccccagctccatggctggtt

SEQ ID NO: 4451324 - DNA, 25 bp, Homo sapien
aatccccagctccatggctggtttc

SEQ ID NO: 4451325 - DNA, 25 bp, Homo sapien
tccccagctccatggctggtttcat

SEQ ID NO: 4451326 - DNA, 25 bp, Homo sapien
taatccccagctccatggctggttt

SEQ ID NO: 4451327 - DNA, 25 bp, Homo sapien
cctgctttccaagcagccagagagg

SEQ ID NO: 4451328 - DNA, 25 bp, Homo sapien
tgcctgctttccaagcagccagaga

SEQ ID NO: 4451329 - DNA, 25 bp, Homo sapien
gcctgctttccaagcagccagagag

SEQ ID NO: 4451330 - DNA, 25 bp, Homo sapien
aatttaccaggacagtgcgttcatc

SEQ ID NO: 4451331 - DNA, 25 bp, Homo sapien
cttaaactaatttaccaggacagtg

SEQ ID NO: 4451332 - DNA, 25 bp, Homo sapien
ctgcacttctgtgtatatgaaccat

SEQ ID NO: 4451333 - DNA, 25 bp, Homo sapien
taccaggacagtgcgttcatcattt

SEQ ID NO: 4451334 - DNA, 25 bp, Homo sapien
gcattttcaggtgatagttgcctct

SEQ ID NO: 4451335 - DNA, 25 bp, Homo sapien
tccatgggttccaaggcttcccgtg

SEQ ID NO: 4451336 - DNA, 25 bp, Homo sapien
tcttgtcccagcctatgaggtcctc

SEQ ID NO: 4451337 - DNA, 25 bp, Homo sapien
caataattggaatatcagcagaccc

SEQ ID NO: 4451338 - DNA, 25 bp, Homo sapien
tggatgaggtccagactctgcagct

SEQ ID NO: 4451339 - DNA, 25 bp, Homo sapien
cttcatgtaatcagctgtaaacagg

SEQ ID NO: 4451340 - DNA, 25 bp, Homo sapien
tgcttgtttcaggtgtctaagcttc

SEQ ID NO: 4451341 - DNA, 25 bp, Homo sapien
ggatgaggtccagactctgcagctg

SEQ ID NO: 4451342 - DNA, 25 bp, Homo sapien
tctgcttagcggcttgggttgaagc

SEQ ID NO: 4451343 - DNA, 25 bp, Homo sapien
tggttcgttcgcctgctgtgccctt

SEQ ID NO: 4451344 - DNA, 25 bp, Homo sapien
aagcttctcttggaccctggttcgt

SEQ ID NO: 4451345 - DNA, 25 bp, Homo sapien
ctgctgtctgcttagcggcttgggt

SEQ ID NO: 4451346 - DNA, 25 bp, Homo sapien
actaccatctgacgtgtcctctgtg

SEQ ID NO: 4451347 - DNA, 25 bp, Homo sapien
tcactaccatctgacgtgtcctctg

SEQ ID NO: 4451348 - DNA, 25 bp, Homo sapien
cactaccatctgacgtgtcctctgt

SEQ ID NO: 4451349 - DNA, 25 bp, Homo sapien
caatgcgaatgtactggttctttgc

SEQ ID NO: 4451350 - DNA, 25 bp, Homo sapien
ctgagtgtggtcaatgcgaatgtac

SEQ ID NO: 4451351 - DNA, 25 bp, Homo sapien
tgtggtcaatgcgaatgtactggtt

SEQ ID NO: 4451352 - DNA, 25 bp, Homo sapien
tgtattttctgagtgtggtcaatgc

SEQ ID NO: 4451353 - DNA, 25 bp, Homo sapien
aacaaagccagtccagtctaaggag

SEQ ID NO: 4451354 - DNA, 25 bp, Homo sapien
tccagccttttggccggagctatat

SEQ ID NO: 4451355 - DNA, 25 bp, Homo sapien
gccttttggccggagctatatttta

SEQ ID NO: 4451356 - DNA, 25 bp, Homo sapien
tccagtctaaggagcgaattctgct

SEQ ID NO: 4451357 - DNA, 25 bp, Homo sapien
caagaatagtgctttgctcagtaac

SEQ ID NO: 4451358 - DNA, 25 bp, Homo sapien
tcagctacacatttcttcggtgaca

SEQ ID NO: 4451359 - DNA, 25 bp, Homo sapien
tctgctcagcgttcaaagattggaa

SEQ ID NO: 4451360 - DNA, 25 bp, Homo sapien
cagtgcctgagcaccaagaatagtg

SEQ ID NO: 4451361 - DNA, 25 bp, Homo sapien
agcacagttgtaattagtctttaac

SEQ ID NO: 4451362 - DNA, 25 bp, Homo sapien
tatgaaaacatgtctgaactctccc

SEQ ID NO: 4451363 - DNA, 25 bp, Homo sapien
tctgtttcataaccgaaaattagcc

SEQ ID NO: 4451364 - DNA, 25 bp, Homo sapien
tacaatcactggtttgctggaaagc

SEQ ID NO: 4451365 - DNA, 25 bp, Homo sapien
gaatagggatgttcacactcaggcc

SEQ ID NO: 4451366 - DNA, 25 bp, Homo sapien
tcttggtatgaatagggatgttcac

SEQ ID NO: 4451367 - DNA, 25 bp, Homo sapien
caccagtgtggccataggcttgttt

SEQ ID NO: 4451368 - DNA, 25 bp, Homo sapien
gtgaccaaatggctcttggtatgaa

SEQ ID NO: 4451369 - DNA, 25 bp, Homo sapien
ctgtgcacttctagaacttggcaga

SEQ ID NO: 4451370 - DNA, 25 bp, Homo sapien
gagatggtatttgaaccaggccttc

SEQ ID NO: 4451371 - DNA, 25 bp, Homo sapien
cagaagagatggtatttgaaccagg

SEQ ID NO: 4451372 - DNA, 25 bp, Homo sapien
gctgtgcacttctagaacttggcag

SEQ ID NO: 4451373 - DNA, 25 bp, Homo sapien
gggagtgacgagctctgcctgccta

SEQ ID NO: 4451374 - DNA, 25 bp, Homo sapien
ctgaggagggagtgacgagctctgc

SEQ ID NO: 4451375 - DNA, 25 bp, Homo sapien
tagtggacaagagtgctcagtgtca

SEQ ID NO: 4451376 - DNA, 25 bp, Homo sapien
aacatgacaaattaggtagtggaca

SEQ ID NO: 4451377 - DNA, 25 bp, Homo sapien
tttcccaaggagctcaaagcattgc

SEQ ID NO: 4451378 - DNA, 25 bp, Homo sapien
catgtgaaagatggactcagcttgt

SEQ ID NO: 4451379 - DNA, 25 bp, Homo sapien
cacttaaagagtgctgctttcccaa

SEQ ID NO: 4451380 - DNA, 25 bp, Homo sapien
tcttcgtggtaacagaaatattgct

SEQ ID NO: 4451381 - DNA, 25 bp, Homo sapien
tcccatgggtcaacaattcaaagag

SEQ ID NO: 4451382 - DNA, 25 bp, Homo sapien
catagagggttgcaaagtgtgccaa

SEQ ID NO: 4451383 - DNA, 25 bp, Homo sapien
tgtgccaatacggagctacagtcct

SEQ ID NO: 4451384 - DNA, 25 bp, Homo sapien
gggcctcagctagcaagactcaaag

SEQ ID NO: 4451385 - DNA, 25 bp, Homo sapien
agtggcaggcattggaatctaatag

SEQ ID NO: 4451386 - DNA, 25 bp, Homo sapien
ttggaatctaatagaaaagtctttg

SEQ ID NO: 4451387 - DNA, 25 bp, Homo sapien
gcaggcattggaatctaatagaaaa

SEQ ID NO: 4451388 - DNA, 25 bp, Homo sapien
tgaaggtctgatgaccacgtggagt

SEQ ID NO: 4451389 - DNA, 25 bp, Homo sapien
caccataactgcctgccttgagttg

SEQ ID NO: 4451390 - DNA, 25 bp, Homo sapien
gcctttgttacagtgtctagaaaca

SEQ ID NO: 4451391 - DNA, 25 bp, Homo sapien
aactgcctgccttgagttgactgcc

SEQ ID NO: 4451392 - DNA, 25 bp, Homo sapien
gaatgtgtctgccaccataactgcc

SEQ ID NO: 4451393 - DNA, 25 bp, Homo sapien
ctgctcccagcaggagggttgctca

SEQ ID NO: 4451394 - DNA, 25 bp, Homo sapien
tgctcccagcaggagggttgctcac

SEQ ID NO: 4451395 - DNA, 25 bp, Homo sapien
gaagtgggccaagtccatagaggca

SEQ ID NO: 4451396 - DNA, 25 bp, Homo sapien
ctatgatagcgttctccagtttggg

SEQ ID NO: 4451397 - DNA, 25 bp, Homo sapien
gacttatttgcgatgaagttcctgc

SEQ ID NO: 4451398 - DNA, 25 bp, Homo sapien
cttgtcacagcagatgaagtgggcc

SEQ ID NO: 4451399 - DNA, 25 bp, Homo sapien
atatctacagctgggcttctgagta

SEQ ID NO: 4451400 - DNA, 25 bp, Homo sapien
ggtcatatctacagctgggcttctg

SEQ ID NO: 4451401 - DNA, 25 bp, Homo sapien
catatctacagctgggcttctgagt

SEQ ID NO: 4451402 - DNA, 25 bp, Homo sapien
tcatatctacagctgggcttctgag

SEQ ID NO: 4451403 - DNA, 25 bp, Homo sapien
cattctcatttctcgttgcattttg

SEQ ID NO: 4451404 - DNA, 25 bp, Homo sapien
acattctcatttctcgttgcatttt

SEQ ID NO: 4451405 - DNA, 25 bp, Homo sapien
ctcatttctcgttgcattttgtcgt

SEQ ID NO: 4451406 - DNA, 25 bp, Homo sapien
ttctcatttctcgttgcattttgtc

SEQ ID NO: 4451407 - DNA, 25 bp, Homo sapien
gagaatgctcccacttttggacctg

SEQ ID NO: 4451408 - DNA, 25 bp, Homo sapien
gttgttaagcagctcccatgttcag

SEQ ID NO: 4451409 - DNA, 25 bp, Homo sapien
ttgtcctgggcaagggctacacacc

SEQ ID NO: 4451410 - DNA, 25 bp, Homo sapien
gccatgagggctgcacttctccttg

SEQ ID NO: 4451411 - DNA, 25 bp, Homo sapien
tttattatcatccttaatacctgac

SEQ ID NO: 4451412 - DNA, 25 bp, Homo sapien
ttattatcatccttaatacctgaca

SEQ ID NO: 4451413 - DNA, 25 bp, Homo sapien
tattatcatccttaatacctgacat

SEQ ID NO: 4451414 - DNA, 25 bp, Homo sapien
gtttattatcatccttaatacctga

SEQ ID NO: 4451415 - DNA, 25 bp, Homo sapien
ttctcacagctggaccactgattcc

SEQ ID NO: 4451416 - DNA, 25 bp, Homo sapien
tccacacgtattctccatcttggtc

SEQ ID NO: 4451417 - DNA, 25 bp, Homo sapien
gggtggcatgggtgacaagcgcagc

SEQ ID NO: 4451418 - DNA, 25 bp, Homo sapien
catgggtgacaagcgcagctgggct

SEQ ID NO: 4451419 - DNA, 25 bp, Homo sapien
acggtggtagcaataggtctcttgc

SEQ ID NO: 4451420 - DNA, 25 bp, Homo sapien
gacttcccaatacatgagtaacatt

SEQ ID NO: 4451421 - DNA, 25 bp, Homo sapien
aacaacggtggtagcaataggtctc

SEQ ID NO: 4451422 - DNA, 25 bp, Homo sapien
agaaacaacggtggtagcaataggt

SEQ ID NO: 4451423 - DNA, 25 bp, Homo sapien
gtctaagagcaaggtgccatcaagt

SEQ ID NO: 4451424 - DNA, 25 bp, Homo sapien
cttcatagcctctgcaagggcttgg

SEQ ID NO: 4451425 - DNA, 25 bp, Homo sapien
agcatggcaagctactggaaagccc

SEQ ID NO: 4451426 - DNA, 25 bp, Homo sapien
ctccagcatggcaagctactggaaa

SEQ ID NO: 4451427 - DNA, 25 bp, Homo sapien
ccttcatagcctctgcaagggcttg

SEQ ID NO: 4451428 - DNA, 25 bp, Homo sapien
agctccggctcaggtccaggggcaa

SEQ ID NO: 4451429 - DNA, 25 bp, Homo sapien
tcagtgttgccagatggtgtcctca

SEQ ID NO: 4451430 - DNA, 25 bp, Homo sapien
tcatgtagatagacagctccggctc

SEQ ID NO: 4451431 - DNA, 25 bp, Homo sapien
tgatggcatacagtgagggcaacat

SEQ ID NO: 4451432 - DNA, 25 bp, Homo sapien
tctctgcggctctgcaacatgagcc

SEQ ID NO: 4451433 - DNA, 25 bp, Homo sapien
tgcacaaagggaagatgaggtaatc

SEQ ID NO: 4451434 - DNA, 25 bp, Homo sapien
ttggaagatccaaatagctatcatc

SEQ ID NO: 4451435 - DNA, 25 bp, Homo sapien
tctgtttgaacataatgccagagac

SEQ ID NO: 4451436 - DNA, 25 bp, Homo sapien
ctttctaggtgacagtaatgtagag

SEQ ID NO: 4451437 - DNA, 25 bp, Homo sapien
taggtgacagtaatgtagagttttc

SEQ ID NO: 4451438 - DNA, 25 bp, Homo sapien
gtgacagtaatgtagagttttcttc

SEQ ID NO: 4451439 - DNA, 25 bp, Homo sapien
tctaggtgacagtaatgtagagttt

SEQ ID NO: 4451440 - DNA, 25 bp, Homo sapien
gacggttgggccaaagtggctgctc

SEQ ID NO: 4451441 - DNA, 25 bp, Homo sapien
tgctgtaggtgacggttgggccaaa

SEQ ID NO: 4451442 - DNA, 25 bp, Homo sapien
gctccacctctaaggtgcgagtgct

SEQ ID NO: 4451443 - DNA, 25 bp, Homo sapien
cctctaaggtgcgagtgctgtaggt

SEQ ID NO: 4451444 - DNA, 25 bp, Homo sapien
gaaaatgacataacgaaagagaaga

SEQ ID NO: 4451445 - DNA, 25 bp, Homo sapien
cagtcccatgtggttaccacaaggt

SEQ ID NO: 4451446 - DNA, 25 bp, Homo sapien
tgagaggggagacgaggctcagtcc

SEQ ID NO: 4451447 - DNA, 25 bp, Homo sapien
tcccatgtggttaccacaaggtgtg

SEQ ID NO: 4451448 - DNA, 25 bp, Homo sapien
cccatgtggttaccacaaggtgtgc

SEQ ID NO: 4451449 - DNA, 25 bp, Homo sapien
catgtgccacagatgccagctgtgg

SEQ ID NO: 4451450 - DNA, 25 bp, Homo sapien
gtgccacagatgccagctgtgggcc

SEQ ID NO: 4451451 - DNA, 25 bp, Homo sapien
tgtgccacagatgccagctgtgggc

SEQ ID NO: 4451452 - DNA, 25 bp, Homo sapien
tcatgtgccacagatgccagctgtg

SEQ ID NO: 4451453 - DNA, 25 bp, Homo sapien
caagtcattttttctcggtagctgt

SEQ ID NO: 4451454 - DNA, 25 bp, Homo sapien
aagtcattttttctcggtagctgtg

SEQ ID NO: 4451455 - DNA, 25 bp, Homo sapien
agtcattttttctcggtagctgtgg

SEQ ID NO: 4451456 - DNA, 25 bp, Homo sapien
aatctgattgaaccaggctgttgca

SEQ ID NO: 4451457 - DNA, 25 bp, Homo sapien
attttcaatttcagtgccccaaaga

SEQ ID NO: 4451458 - DNA, 25 bp, Homo sapien
tttcaatttcagtgccccaaagaga

SEQ ID NO: 4451459 - DNA, 25 bp, Homo sapien
gaaaatctgattgaaccaggctgtt

SEQ ID NO: 4451460 - DNA, 25 bp, Homo sapien
caaatcctgggcgttctgtggtcag

SEQ ID NO: 4451461 - DNA, 25 bp, Homo sapien
cagagatctaaggaaaccaagtgac

SEQ ID NO: 4451462 - DNA, 25 bp, Homo sapien
tcaaatgacctcaaatcctgggcgt

SEQ ID NO: 4451463 - DNA, 25 bp, Homo sapien
tcaggatgcctgtgctcagagatct

SEQ ID NO: 4451464 - DNA, 25 bp, Homo sapien
tggttccggttgccagaaggtgggc

SEQ ID NO: 4451465 - DNA, 25 bp, Homo sapien
agaagccagacaccaggtgtacaga

SEQ ID NO: 4451466 - DNA, 25 bp, Homo sapien
attggaagcaaaagcacccagaagc

SEQ ID NO: 4451467 - DNA, 25 bp, Homo sapien
tatgaccttgccatgacttgacttg

SEQ ID NO: 4451468 - DNA, 25 bp, Homo sapien
caattgattctaacggctgtgaggg

SEQ ID NO: 4451469 - DNA, 25 bp, Homo sapien
caactactgttgatgggagggactg

SEQ ID NO: 4451470 - DNA, 25 bp, Homo sapien
ttcaaagagtccctgtgaacgggca

SEQ ID NO: 4451471 - DNA, 25 bp, Homo sapien
acatgttgctggcatagggccacaa

SEQ ID NO: 4451472 - DNA, 25 bp, Homo sapien
gctgctgattgaagcaatttgcttt

SEQ ID NO: 4451473 - DNA, 25 bp, Homo sapien
gaacctcactgtccaaaacaggcat

SEQ ID NO: 4451474 - DNA, 25 bp, Homo sapien
tctgccagcgctgaagagaacctca

SEQ ID NO: 4451475 - DNA, 25 bp, Homo sapien
taggaggtcatctggttcgtgacca

SEQ ID NO: 4451476 - DNA, 25 bp, Homo sapien
aagcctgctggtttgccttattgaa

SEQ ID NO: 4451477 - DNA, 25 bp, Homo sapien
ttcactttttctggcgaataatagg

SEQ ID NO: 4451478 - DNA, 25 bp, Homo sapien
tgactcaggccgtggctacctgctt

SEQ ID NO: 4451479 - DNA, 25 bp, Homo sapien
ccaggagcgggaaagcatggctact

SEQ ID NO: 4451480 - DNA, 25 bp, Homo sapien
ttttgggcaccaggagcgggaaagc

SEQ ID NO: 4451481 - DNA, 25 bp, Homo sapien
agcagccagggagattttgggcacc

SEQ ID NO: 4451482 - DNA, 25 bp, Homo sapien
gagcccacagtggaagcagccaggg

SEQ ID NO: 4451483 - DNA, 25 bp, Homo sapien
gatgtggccttgatccactgaccgc

SEQ ID NO: 4451484 - DNA, 25 bp, Homo sapien
tattatatgatgtggccttgatcca

SEQ ID NO: 4451485 - DNA, 25 bp, Homo sapien
agctgattattccagggctagcccc

SEQ ID NO: 4451486 - DNA, 25 bp, Homo sapien
cactgaccgcagctgattattccag

SEQ ID NO: 4451487 - DNA, 25 bp, Homo sapien
aaaatcaatatctaacccagagaac

SEQ ID NO: 4451488 - DNA, 25 bp, Homo sapien
aaagaactgtaatgactgcagccag

SEQ ID NO: 4451489 - DNA, 25 bp, Homo sapien
acaaatcaaacagctccagataggc

SEQ ID NO: 4451490 - DNA, 25 bp, Homo sapien
tggtgcccatctaaagaagatatct

SEQ ID NO: 4451491 - DNA, 25 bp, Homo sapien
agccccgggccaatctgtcaaagaa

SEQ ID NO: 4451492 - DNA, 25 bp, Homo sapien
tcagccccgggccaatctgtcaaag

SEQ ID NO: 4451493 - DNA, 25 bp, Homo sapien
cttgctatgacatatttgccagcgg

SEQ ID NO: 4451494 - DNA, 25 bp, Homo sapien
aggaaatgtctcttgctatgacata

SEQ ID NO: 4451495 - DNA, 25 bp, Homo sapien
gcttgtcttcccgatcacttaggtt

SEQ ID NO: 4451496 - DNA, 25 bp, Homo sapien
tcttcccgatcacttaggttattgg

SEQ ID NO: 4451497 - DNA, 25 bp, Homo sapien
ctgtggcttgatcagcttgtcttcc

SEQ ID NO: 4451498 - DNA, 25 bp, Homo sapien
tcagcttgtcttcccgatcacttag

SEQ ID NO: 4451499 - DNA, 25 bp, Homo sapien
gccgctaagccgcatgagtcatgag

SEQ ID NO: 4451500 - DNA, 25 bp, Homo sapien
gaggtgcaactgttctttggcaatc

SEQ ID NO: 4451501 - DNA, 25 bp, Homo sapien
agggctgttctgacagaggtgcaac

SEQ ID NO: 4451502 - DNA, 25 bp, Homo sapien
gctcttatcccttgctttgccgcta

SEQ ID NO: 4451503 - DNA, 25 bp, Homo sapien
catatctgtcctctttgcgataggg

SEQ ID NO: 4451504 - DNA, 25 bp, Homo sapien
cttgctgtatgaatgctctgctgaa

SEQ ID NO: 4451505 - DNA, 25 bp, Homo sapien
gggactgggcaactaacttgtcttg

SEQ ID NO: 4451506 - DNA, 25 bp, Homo sapien
tgtagacatatctgtcctctttgcg

SEQ ID NO: 4451507 - DNA, 25 bp, Homo sapien
agggatgacacaggccagtggtcca

SEQ ID NO: 4451508 - DNA, 25 bp, Homo sapien
tgatgggcaggagatcagggatgac

SEQ ID NO: 4451509 - DNA, 25 bp, Homo sapien
tataagctcacactctgatgggcag

SEQ ID NO: 4451510 - DNA, 25 bp, Homo sapien
aaatataagctcacactctgatggg

SEQ ID NO: 4451511 - DNA, 25 bp, Homo sapien
ttgctgatgaactttggtcattgcc

SEQ ID NO: 4451512 - DNA, 25 bp, Homo sapien
ggtcattgcctgttgctctgcccgc

SEQ ID NO: 4451513 - DNA, 25 bp, Homo sapien
tctgcccgccaagctagagctctgt

SEQ ID NO: 4451514 - DNA, 25 bp, Homo sapien
gcctcaatgtggagagtagctgtta

SEQ ID NO: 4451515 - DNA, 25 bp, Homo sapien
ggctggtctaatttataagctcctg

SEQ ID NO: 4451516 - DNA, 25 bp, Homo sapien
ttataagctcctgtacgagaggata

SEQ ID NO: 4451517 - DNA, 25 bp, Homo sapien
ggtctaatttataagctcctgtacg

SEQ ID NO: 4451518 - DNA, 25 bp, Homo sapien
catcagcactgttatccacagcagg

SEQ ID NO: 4451519 - DNA, 25 bp, Homo sapien
tgttgtttcttcttgtcgtcgttgt

SEQ ID NO: 4451520 - DNA, 25 bp, Homo sapien
tgctgagagctccaaaacactgaag

SEQ ID NO: 4451521 - DNA, 25 bp, Homo sapien
gatcccattggacatttgagatgct

SEQ ID NO: 4451522 - DNA, 25 bp, Homo sapien
aatagaaaacttcgaattgatccca

SEQ ID NO: 4451523 - DNA, 25 bp, Homo sapien
tgttgaacttggtacctgatggctt

SEQ ID NO: 4451524 - DNA, 25 bp, Homo sapien
tagagcccacgttaagtccaggatg

SEQ ID NO: 4451525 - DNA, 25 bp, Homo sapien
taaacccaggagagtcaaatctcag

SEQ ID NO: 4451526 - DNA, 25 bp, Homo sapien
ggctgaaggctgcataatcctaatc

SEQ ID NO: 4451527 - DNA, 25 bp, Homo sapien
gtcttgttcaagctctttccctgtg

SEQ ID NO: 4451528 - DNA, 25 bp, Homo sapien
tctgatacctactgggcctgcatca

SEQ ID NO: 4451529 - DNA, 25 bp, Homo sapien
cacgtcttgttcaagctctttccct

SEQ ID NO: 4451530 - DNA, 25 bp, Homo sapien
ctcacaacctctgatacctactggg

SEQ ID NO: 4451531 - DNA, 25 bp, Homo sapien
ggagttgtgtaagctgacagcccac

SEQ ID NO: 4451532 - DNA, 25 bp, Homo sapien
cagtatagaccgtgctccctggatt

SEQ ID NO: 4451533 - DNA, 25 bp, Homo sapien
catgaggcgcttaaaacatcagagg

SEQ ID NO: 4451534 - DNA, 25 bp, Homo sapien
catcagaggcaaatgtagacctggg

SEQ ID NO: 4451535 - DNA, 25 bp, Homo sapien
taaagcctccccgttgatttctgcc

SEQ ID NO: 4451536 - DNA, 25 bp, Homo sapien
tctgcttaaagcctccccgttgatt

SEQ ID NO: 4451537 - DNA, 25 bp, Homo sapien
tctgccagcgatgaaagtttttgta

SEQ ID NO: 4451538 - DNA, 25 bp, Homo sapien
ccgttgatttctgccagcgatgaaa

SEQ ID NO: 4451539 - DNA, 25 bp, Homo sapien
tcacaagctttttgctgagcatcca

SEQ ID NO: 4451540 - DNA, 25 bp, Homo sapien
ttctatggatcctggaaggcgcttc

SEQ ID NO: 4451541 - DNA, 25 bp, Homo sapien
tgcgtcagaactccacttgtagaac

SEQ ID NO: 4451542 - DNA, 25 bp, Homo sapien
tgagcatccagctaatgcgtcagaa

SEQ ID NO: 4451543 - DNA, 25 bp, Homo sapien
gcacagccattaaatcgtcctgcat

SEQ ID NO: 4451544 - DNA, 25 bp, Homo sapien
ctcctctagctctgtttcattaggg

SEQ ID NO: 4451545 - DNA, 25 bp, Homo sapien
aggagtgatctggaaaaaggcctct

SEQ ID NO: 4451546 - DNA, 25 bp, Homo sapien
gatctggaaaaaggcctcttgcttg

SEQ ID NO: 4451547 - DNA, 25 bp, Homo sapien
ttctcctctagctctgtttcattag

SEQ ID NO: 4451548 - DNA, 25 bp, Homo sapien
tgctgatgcttccacacaggttggg

SEQ ID NO: 4451549 - DNA, 25 bp, Homo sapien
ctgctgatgcttccacacaggttgg

SEQ ID NO: 4451550 - DNA, 25 bp, Homo sapien
cctgctgatgcttccacacaggttg

SEQ ID NO: 4451551 - DNA, 25 bp, Homo sapien
acctgctgatgcttccacacaggtt

SEQ ID NO: 4451552 - DNA, 25 bp, Homo sapien
atctgcccagttctggaagcacttg

SEQ ID NO: 4451553 - DNA, 25 bp, Homo sapien
tctggaagcacttgtctgagatgtc

SEQ ID NO: 4451554 - DNA, 25 bp, Homo sapien
tctcatccaaaatgccatctgccca

SEQ ID NO: 4451555 - DNA, 25 bp, Homo sapien
gcacttgtctgagatgtccccttac

SEQ ID NO: 4451556 - DNA, 25 bp, Homo sapien
tccgccatgggtagcagtttcaatg

SEQ ID NO: 4451557 - DNA, 25 bp, Homo sapien
tatcctgttagcttttccgccatgg

SEQ ID NO: 4451558 - DNA, 25 bp, Homo sapien
gtcctccacgcctgtgtttatctgg

SEQ ID NO: 4451559 - DNA, 25 bp, Homo sapien
aatgtgtagtttaagacctccatgc

SEQ ID NO: 4451560 - DNA, 25 bp, Homo sapien
gggagaagaggaggattaaactgga

SEQ ID NO: 4451561 - DNA, 25 bp, Homo sapien
gctgtgctcttactgcagcgtgcag

SEQ ID NO: 4451562 - DNA, 25 bp, Homo sapien
tgctgtgctcttactgcagcgtgca

SEQ ID NO: 4451563 - DNA, 25 bp, Homo sapien
ttctgctgtgctcttactgcagcgt

SEQ ID NO: 4451564 - DNA, 25 bp, Homo sapien
tctgctgtgctcttactgcagcgtg

SEQ ID NO: 4451565 - DNA, 25 bp, Homo sapien
ccacaggatgccgagcaacagagcc

SEQ ID NO: 4451566 - DNA, 25 bp, Homo sapien
aggatgccgagcaacagagcccttc

SEQ ID NO: 4451567 - DNA, 25 bp, Homo sapien
atgccgagcaacagagcccttctcg

SEQ ID NO: 4451568 - DNA, 25 bp, Homo sapien
cagtggcccacaggatgccgagcaa

SEQ ID NO: 4451569 - DNA, 25 bp, Homo sapien
aacccttcgggaaactccgatgatg

SEQ ID NO: 4451570 - DNA, 25 bp, Homo sapien
catcacagacaatagatatggccat

SEQ ID NO: 4451571 - DNA, 25 bp, Homo sapien
ggaaatagattatgatgcctccatc

SEQ ID NO: 4451572 - DNA, 25 bp, Homo sapien
catctctgcgctcctgtctcgtgaa

SEQ ID NO: 4451573 - DNA, 25 bp, Homo sapien
caagaagctggtgctctgcaaccag

SEQ ID NO: 4451574 - DNA, 25 bp, Homo sapien
acacgggaccccacaacaagaagct

SEQ ID NO: 4451575 - DNA, 25 bp, Homo sapien
tgcaaccagttgagaagtacaggac

SEQ ID NO: 4451576 - DNA, 25 bp, Homo sapien
tcgaccagttccttaagacacggga

SEQ ID NO: 4451577 - DNA, 25 bp, Homo sapien
tcgtagagataggtgcttttccagc

SEQ ID NO: 4451578 - DNA, 25 bp, Homo sapien
ggcagctctaggagaccaagaccaa

SEQ ID NO: 4451579 - DNA, 25 bp, Homo sapien
ccaacatacataggtccaaaagaga

SEQ ID NO: 4451580 - DNA, 25 bp, Homo sapien
tggtaaagtgtctgaggttgcctcg

SEQ ID NO: 4451581 - DNA, 25 bp, Homo sapien
agagggtgatatatttgtgtcccct

SEQ ID NO: 4451582 - DNA, 25 bp, Homo sapien
tagagggtgatatatttgtgtcccc

SEQ ID NO: 4451583 - DNA, 25 bp, Homo sapien
ctagagggtgatatatttgtgtccc

SEQ ID NO: 4451584 - DNA, 25 bp, Homo sapien
ctagctcctttagctctaacttggg

SEQ ID NO: 4451585 - DNA, 25 bp, Homo sapien
tgggcttggataatgctcctcttct

SEQ ID NO: 4451586 - DNA, 25 bp, Homo sapien
aggctttcctccaaacgtgaaatgc

SEQ ID NO: 4451587 - DNA, 25 bp, Homo sapien
tccaaacgtgaaatgccctggacaa

SEQ ID NO: 4451588 - DNA, 25 bp, Homo sapien
cctcagggtatccatccgggtaaca

SEQ ID NO: 4451589 - DNA, 25 bp, Homo sapien
tgatcagagacgacaaaggctccct

SEQ ID NO: 4451590 - DNA, 25 bp, Homo sapien
gtcatttggattcctctctcactgt

SEQ ID NO: 4451591 - DNA, 25 bp, Homo sapien
ttccttagtcatttggattcctctc

SEQ ID NO: 4451592 - DNA, 25 bp, Homo sapien
acacaggtttctaagtcaggcttac

SEQ ID NO: 4451593 - DNA, 25 bp, Homo sapien
ttagacacaggtttctaagtcaggc

SEQ ID NO: 4451594 - DNA, 25 bp, Homo sapien
tagacacaggtttctaagtcaggct

SEQ ID NO: 4451595 - DNA, 25 bp, Homo sapien
gacacaggtttctaagtcaggctta

SEQ ID NO: 4451596 - DNA, 25 bp, Homo sapien
agcatatgacggctgtgtccttccc

SEQ ID NO: 4451597 - DNA, 25 bp, Homo sapien
tctcagcatttgtcatagaccattc

SEQ ID NO: 4451598 - DNA, 25 bp, Homo sapien
gcatttgtcatagaccattcagcaa

SEQ ID NO: 4451599 - DNA, 25 bp, Homo sapien
tgtccggggattctcagcatttgtc

SEQ ID NO: 4451600 - DNA, 25 bp, Homo sapien
tgttctgtagtctgctgggacggca

SEQ ID NO: 4451601 - DNA, 25 bp, Homo sapien
tcaaactctggtgtgcttggttgac

SEQ ID NO: 4451602 - DNA, 25 bp, Homo sapien
cctgtcacaggtggttggtatttcc

SEQ ID NO: 4451603 - DNA, 25 bp, Homo sapien
ggaccacctgttgcctgcactcagg

SEQ ID NO: 4451604 - DNA, 25 bp, Homo sapien
aactgcccgctgccatgaaagttgt

SEQ ID NO: 4451605 - DNA, 25 bp, Homo sapien
atgaaagttgtgcctgcaacatcct

SEQ ID NO: 4451606 - DNA, 25 bp, Homo sapien
gccatgaaagttgtgcctgcaacat

SEQ ID NO: 4451607 - DNA, 25 bp, Homo sapien
cagtaactaattcaggagctgaact

SEQ ID NO: 4451608 - DNA, 25 bp, Homo sapien
aagcaagaagtataaggagcaatat

SEQ ID NO: 4451609 - DNA, 25 bp, Homo sapien
caagaagtataaggagcaatattta

SEQ ID NO: 4451610 - DNA, 25 bp, Homo sapien
tgtgcaagatagtaccagctaagtt

SEQ ID NO: 4451611 - DNA, 25 bp, Homo sapien
ccagctaagttagtgttaacttgaa

SEQ ID NO: 4451612 - DNA, 25 bp, Homo sapien
tgccaaggagattataaattgcaga

SEQ ID NO: 4451613 - DNA, 25 bp, Homo sapien
gatccaaggatggtgctaatgccaa

SEQ ID NO: 4451614 - DNA, 25 bp, Homo sapien
caatatctccctttgtgataaatac

SEQ ID NO: 4451615 - DNA, 25 bp, Homo sapien
tattagatagcaaaccacaggcagc

SEQ ID NO: 4451616 - DNA, 25 bp, Homo sapien
tgctgcactaattgtgtacgctgca

SEQ ID NO: 4451617 - DNA, 25 bp, Homo sapien
tgtcatatattataccaagaactgc

SEQ ID NO: 4451618 - DNA, 25 bp, Homo sapien
tgaataggggccaacatgatagtgt

SEQ ID NO: 4451619 - DNA, 25 bp, Homo sapien
taattgtgtacgctgcacagtctct

SEQ ID NO: 4451620 - DNA, 25 bp, Homo sapien
tttcttggaccagctaggcacagag

SEQ ID NO: 4451621 - DNA, 25 bp, Homo sapien
tggctttaatggacaacaggagttg

SEQ ID NO: 4451622 - DNA, 25 bp, Homo sapien
gcaaggtgagcagtaacccagcaga

SEQ ID NO: 4451623 - DNA, 25 bp, Homo sapien
gacctagtaggtgcctgctgcttac

SEQ ID NO: 4451624 - DNA, 25 bp, Homo sapien
tttggcaagacaggcgcagcaagga

SEQ ID NO: 4451625 - DNA, 25 bp, Homo sapien
gcaagacaggcgcagcaaggactgc

SEQ ID NO: 4451626 - DNA, 25 bp, Homo sapien
ctttggcaagacaggcgcagcaagg

SEQ ID NO: 4451627 - DNA, 25 bp, Homo sapien
tggcaagacaggcgcagcaaggact

SEQ ID NO: 4451628 - DNA, 25 bp, Homo sapien
catcagtggctgttgttcacttctc

SEQ ID NO: 4451629 - DNA, 25 bp, Homo sapien
cttcagaaacctgactaaggccatg

SEQ ID NO: 4451630 - DNA, 25 bp, Homo sapien
gccgacgaatgaatggttgaccttc

SEQ ID NO: 4451631 - DNA, 25 bp, Homo sapien
tagagagctgagagtagccagaatc

SEQ ID NO: 4451632 - DNA, 25 bp, Homo sapien
cgaatagacttaataatgggcaaga

SEQ ID NO: 4451633 - DNA, 25 bp, Homo sapien
tggtacttaacgttcatactttagc

SEQ ID NO: 4451634 - DNA, 25 bp, Homo sapien
tatttcctgtgatattggaagttcc

SEQ ID NO: 4451635 - DNA, 25 bp, Homo sapien
tttcctttgcgaatagacttaataa

SEQ ID NO: 4451636 - DNA, 25 bp, Homo sapien
tataaacttaatttggagaggcata

SEQ ID NO: 4451637 - DNA, 25 bp, Homo sapien
ttataaacttaatttggagaggcat

SEQ ID NO: 4451638 - DNA, 25 bp, Homo sapien
tggttcttttgcgtttcttattata

SEQ ID NO: 4451639 - DNA, 25 bp, Homo sapien
aagtaatgtaataataggaagggat

SEQ ID NO: 4451640 - DNA, 25 bp, Homo sapien
aaatgcggatatccatattgcagac

SEQ ID NO: 4451641 - DNA, 25 bp, Homo sapien
gatatatgtaaatgcggatatccat

SEQ ID NO: 4451642 - DNA, 25 bp, Homo sapien
tacaatctggtgtggttagaaaaag

SEQ ID NO: 4451643 - DNA, 25 bp, Homo sapien
taccccaggctaaataacagtggaa

SEQ ID NO: 4451644 - DNA, 25 bp, Homo sapien
ctcttgaattgtaccccaggctaaa

SEQ ID NO: 4451645 - DNA, 25 bp, Homo sapien
ccccatggaatgtgattaaattatt

SEQ ID NO: 4451646 - DNA, 25 bp, Homo sapien
ccagtgatcttgttatagtaatact

SEQ ID NO: 4451647 - DNA, 25 bp, Homo sapien
gttctactttagtgatataccttaa

SEQ ID NO: 4451648 - DNA, 25 bp, Homo sapien
accttaatttagtgggctttggcag

SEQ ID NO: 4451649 - DNA, 25 bp, Homo sapien
gatgtcaggtcaacatttttcagaa

SEQ ID NO: 4451650 - DNA, 25 bp, Homo sapien
tctacttgagtctaacatatggtcc

SEQ ID NO: 4451651 - DNA, 25 bp, Homo sapien
aacagatatttcaagttacaaatct

SEQ ID NO: 4451652 - DNA, 25 bp, Homo sapien
aaacagatatttcaagttacaaatc

SEQ ID NO: 4451653 - DNA, 25 bp, Homo sapien
cagatatttcaagttacaaatctta

SEQ ID NO: 4451654 - DNA, 25 bp, Homo sapien
gatatttcaagttacaaatcttaaa

SEQ ID NO: 4451655 - DNA, 25 bp, Homo sapien
cacttgcaattgtgtctggtatgct

SEQ ID NO: 4451656 - DNA, 25 bp, Homo sapien
tttcttgcaaccaacacacttgcaa

SEQ ID NO: 4451657 - DNA, 25 bp, Homo sapien
tgtatcgggaatttctagtgtttcc

SEQ ID NO: 4451658 - DNA, 25 bp, Homo sapien
tgctgctaataaagtaaggcccatt

SEQ ID NO: 4451659 - DNA, 25 bp, Homo sapien
cattgcagcttgagggacctagttc

SEQ ID NO: 4451660 - DNA, 25 bp, Homo sapien
accattgcagcttgagggacctagt

SEQ ID NO: 4451661 - DNA, 25 bp, Homo sapien
gcagcttgagggacctagttcttac

SEQ ID NO: 4451662 - DNA, 25 bp, Homo sapien
agccttgtagaatgaccattgcagc

SEQ ID NO: 4451663 - DNA, 25 bp, Homo sapien
catactgttaaaatgtgcttaccaa

SEQ ID NO: 4451664 - DNA, 25 bp, Homo sapien
tgtgcttaccaatactgtgttttat

SEQ ID NO: 4451665 - DNA, 25 bp, Homo sapien
gcatactgttaaaatgtgcttacca

SEQ ID NO: 4451666 - DNA, 25 bp, Homo sapien
taaaatgtgcttaccaatactgtgt

SEQ ID NO: 4451667 - DNA, 25 bp, Homo sapien
aacacattggatcccacgatgttag

SEQ ID NO: 4451668 - DNA, 25 bp, Homo sapien
gatcccacgatgttagacatagcca

SEQ ID NO: 4451669 - DNA, 25 bp, Homo sapien
ggcacaacatatcaaacacattgga

SEQ ID NO: 4451670 - DNA, 25 bp, Homo sapien
taaaccatggaataccaaggcacaa

SEQ ID NO: 4451671 - DNA, 25 bp, Homo sapien
tctgctgtttacttctgcaggagct

SEQ ID NO: 4451672 - DNA, 25 bp, Homo sapien
ggttatgtaagttagtcctctgctg

SEQ ID NO: 4451673 - DNA, 25 bp, Homo sapien
tagaactgataatgtagcaagcccc

SEQ ID NO: 4451674 - DNA, 25 bp, Homo sapien
gataataggcagactattcccaact

SEQ ID NO: 4451675 - DNA, 25 bp, Homo sapien
aagccatggttggaacattcctaca

SEQ ID NO: 4451676 - DNA, 25 bp, Homo sapien
gaaattgatgttcgcttggatcgta

SEQ ID NO: 4451677 - DNA, 25 bp, Homo sapien
cccagaatcagctgaaaaagcctgc

SEQ ID NO: 4451678 - DNA, 25 bp, Homo sapien
gaatggaaagtcaaaaggctgtgga

SEQ ID NO: 4451679 - DNA, 25 bp, Homo sapien
gctagcttgacttattgcttataaa

SEQ ID NO: 4451680 - DNA, 25 bp, Homo sapien
taagtttgttatagggcatggtgag

SEQ ID NO: 4451681 - DNA, 25 bp, Homo sapien
gagttggcggcattttgtgctagct

SEQ ID NO: 4451682 - DNA, 25 bp, Homo sapien
ctcaggaattagggatttaacataa

SEQ ID NO: 4451683 - DNA, 25 bp, Homo sapien
gccttgtgtaattcctcagagagat

SEQ ID NO: 4451684 - DNA, 25 bp, Homo sapien
tcttgggcagtaaaaggcagtcttc

SEQ ID NO: 4451685 - DNA, 25 bp, Homo sapien
aatatctgtcagtaaagggtgccac

SEQ ID NO: 4451686 - DNA, 25 bp, Homo sapien
tctggctcagtatgatgcaagacta

SEQ ID NO: 4451687 - DNA, 25 bp, Homo sapien
gtggcattgttttgacatgaggaca

SEQ ID NO: 4451688 - DNA, 25 bp, Homo sapien
gaggttagatatgagcaaggcttgc

SEQ ID NO: 4451689 - DNA, 25 bp, Homo sapien
aaaaggtgaccattgttgagttgac

SEQ ID NO: 4451690 - DNA, 25 bp, Homo sapien
tgaaacttagcaagataaagagcaa

SEQ ID NO: 4451691 - DNA, 25 bp, Homo sapien
gaacctgcgtagagtcacagggccc

SEQ ID NO: 4451692 - DNA, 25 bp, Homo sapien
tgtgtaaatatttgcgctcgcgtgt

SEQ ID NO: 4451693 - DNA, 25 bp, Homo sapien
tagaaggcgtgttctggaacctgcg

SEQ ID NO: 4451694 - DNA, 25 bp, Homo sapien
aaaacgtgcatggatttcttcggtg

SEQ ID NO: 4451695 - DNA, 25 bp, Homo sapien
gatttcaaccttaagagaatttctc

SEQ ID NO: 4451696 - DNA, 25 bp, Homo sapien
tttggatggctcaaggactctgaca

SEQ ID NO: 4451697 - DNA, 25 bp, Homo sapien
tcaatccttccaacgcactgggaaa

SEQ ID NO: 4451698 - DNA, 25 bp, Homo sapien
cagaccttaggatctgccagaatcc

SEQ ID NO: 4451699 - DNA, 25 bp, Homo sapien
cactggcacattgttgtggctcttc

SEQ ID NO: 4451700 - DNA, 25 bp, Homo sapien
ggcacattgttgtggctcttcacag

SEQ ID NO: 4451701 - DNA, 25 bp, Homo sapien
tattcactggcacattgttgtggct

SEQ ID NO: 4451702 - DNA, 25 bp, Homo sapien
tggcacattgttgtggctcttcaca

SEQ ID NO: 4451703 - DNA, 25 bp, Homo sapien
cttagctgaagagttgccacagtag

SEQ ID NO: 4451704 - DNA, 25 bp, Homo sapien
agctgaagagttgccacagtaggta

SEQ ID NO: 4451705 - DNA, 25 bp, Homo sapien
ttagctgaagagttgccacagtagg

SEQ ID NO: 4451706 - DNA, 25 bp, Homo sapien
tagctgaagagttgccacagtaggt

SEQ ID NO: 4451707 - DNA, 25 bp, Homo sapien
tatgggtctagcaggattttgaagc

SEQ ID NO: 4451708 - DNA, 25 bp, Homo sapien
gaaagctgatacttcgttgacactc

SEQ ID NO: 4451709 - DNA, 25 bp, Homo sapien
gaaggcatgctactatatgggtcta

SEQ ID NO: 4451710 - DNA, 25 bp, Homo sapien
gaagcatcggataataagaagtccc

SEQ ID NO: 4451711 - DNA, 25 bp, Homo sapien
cacgcgagtgcatattcaaatgtcc

SEQ ID NO: 4451712 - DNA, 25 bp, Homo sapien
acgcgagtgcatattcaaatgtccc

SEQ ID NO: 4451713 - DNA, 25 bp, Homo sapien
tcacgcgagtgcatattcaaatgtc

SEQ ID NO: 4451714 - DNA, 25 bp, Homo sapien
cctcaaggtagttacaattgtatcc

SEQ ID NO: 4451715 - DNA, 25 bp, Homo sapien
tgtcccgatggcacaaccataaaaa

SEQ ID NO: 4451716 - DNA, 25 bp, Homo sapien
tatccagaatgtgtcccgatggcac

SEQ ID NO: 4451717 - DNA, 25 bp, Homo sapien
ttgaattcactgaacaaaatgagcc

SEQ ID NO: 4451718 - DNA, 25 bp, Homo sapien
aagatggtaaacatggcggcagcca

SEQ ID NO: 4451719 - DNA, 25 bp, Homo sapien
tactaactggctatgaggtgtacca

SEQ ID NO: 4451720 - DNA, 25 bp, Homo sapien
tacatttgtagcattcatagggcac

SEQ ID NO: 4451721 - DNA, 25 bp, Homo sapien
tttggaattccatagacctgagcag

SEQ ID NO: 4451722 - DNA, 25 bp, Homo sapien
ttcttctgaggaaatgtaacctgct

SEQ ID NO: 4451723 - DNA, 25 bp, Homo sapien
cttctgaggaaatgtaacctgcttc

SEQ ID NO: 4451724 - DNA, 25 bp, Homo sapien
tcttctgaggaaatgtaacctgctt

SEQ ID NO: 4451725 - DNA, 25 bp, Homo sapien
gtgcttccattagggagctcctggc

SEQ ID NO: 4451726 - DNA, 25 bp, Homo sapien
tattgtctccgatataatcttcagg

SEQ ID NO: 4451727 - DNA, 25 bp, Homo sapien
tagattcttgatatattgtctccga

SEQ ID NO: 4451728 - DNA, 25 bp, Homo sapien
tactgagctatctactttgtggttg

SEQ ID NO: 4451729 - DNA, 25 bp, Homo sapien
tcccaggcctaaagctgattctgag

SEQ ID NO: 4451730 - DNA, 25 bp, Homo sapien
tctgagcttcatccccaaaagaggt

SEQ ID NO: 4451731 - DNA, 25 bp, Homo sapien
tctatcttgggaacggcatccatgg

SEQ ID NO: 4451732 - DNA, 25 bp, Homo sapien
tgctgccggtgttacgatagtactc

SEQ ID NO: 4451733 - DNA, 25 bp, Homo sapien
gaatagacctctccatttgactgtt

SEQ ID NO: 4451734 - DNA, 25 bp, Homo sapien
tctgggaactagggacagttttgta

SEQ ID NO: 4451735 - DNA, 25 bp, Homo sapien
gttatgaataagggaggagacttgc

SEQ ID NO: 4451736 - DNA, 25 bp, Homo sapien
taagtaagatggatagtgtttggaa

SEQ ID NO: 4451737 - DNA, 25 bp, Homo sapien
catacaatagcttgtagagagcaag

SEQ ID NO: 4451738 - DNA, 25 bp, Homo sapien
ttagtaatgattgtcctggagagaa

SEQ ID NO: 4451739 - DNA, 25 bp, Homo sapien
tatagaaactaatgttcacaagcat

SEQ ID NO: 4451740 - DNA, 25 bp, Homo sapien
gcaagtaaaggacagttgtttctcc

SEQ ID NO: 4451741 - DNA, 25 bp, Homo sapien
tgcctgagaattgttgaatatgcta

SEQ ID NO: 4451742 - DNA, 25 bp, Homo sapien
tgagattccgttatgcctttgcctg

SEQ ID NO: 4451743 - DNA, 25 bp, Homo sapien
tttaaatgcactggatgatgacaag

SEQ ID NO: 4451744 - DNA, 25 bp, Homo sapien
tcatgaccctcttgacctgaaggcc

SEQ ID NO: 4451745 - DNA, 25 bp, Homo sapien
tcaccgttagcaactctgtcagctg

SEQ ID NO: 4451746 - DNA, 25 bp, Homo sapien
tccaggtatcccatcaccgttagca

SEQ ID NO: 4451747 - DNA, 25 bp, Homo sapien
tatcccatcaccgttagcaactctg

SEQ ID NO: 4451748 - DNA, 25 bp, Homo sapien
ttgttcatctccaggtatcccatca

SEQ ID NO: 4451749 - DNA, 25 bp, Homo sapien
catgactccccagatgttcagcatg

SEQ ID NO: 4451750 - DNA, 25 bp, Homo sapien
caatccaggagaggcgaatgaagag

SEQ ID NO: 4451751 - DNA, 25 bp, Homo sapien
cccagatgttcagcatgcatcttac

SEQ ID NO: 4451752 - DNA, 25 bp, Homo sapien
acaatccaggagaggcgaatgaaga

SEQ ID NO: 4451753 - DNA, 25 bp, Homo sapien
attagtcaggtcacattttcaccag

SEQ ID NO: 4451754 - DNA, 25 bp, Homo sapien
gcatttttattagtcaggtcacatt

SEQ ID NO: 4451755 - DNA, 25 bp, Homo sapien
ttttattagtcaggtcacattttca

SEQ ID NO: 4451756 - DNA, 25 bp, Homo sapien
catttttattagtcaggtcacattt

SEQ ID NO: 4451757 - DNA, 25 bp, Homo sapien
gattatttggagctgagacaaccga

SEQ ID NO: 4451758 - DNA, 25 bp, Homo sapien
taatggaggccgacccagaattcag

SEQ ID NO: 4451759 - DNA, 25 bp, Homo sapien
tgccccagcaaggtctccaagatag

SEQ ID NO: 4451760 - DNA, 25 bp, Homo sapien
tgaaaccctggagcaaaaccttggc

SEQ ID NO: 4451761 - DNA, 25 bp, Homo sapien
tggataaaccagtgataccagtcac

SEQ ID NO: 4451762 - DNA, 25 bp, Homo sapien
tggcaatagcagaggtggataaacc

SEQ ID NO: 4451763 - DNA, 25 bp, Homo sapien
tgataccagtcactgtcacggctaa

SEQ ID NO: 4451764 - DNA, 25 bp, Homo sapien
cacggctaagccgatgataatcaca

SEQ ID NO: 4451765 - DNA, 25 bp, Homo sapien
gagagaaactatcctggctgtgaaa

SEQ ID NO: 4451766 - DNA, 25 bp, Homo sapien
taagttttcaggtccatgcctcggg

SEQ ID NO: 4451767 - DNA, 25 bp, Homo sapien
cactccagaaaggtcagtggtgaac

SEQ ID NO: 4451768 - DNA, 25 bp, Homo sapien
ccttacaaatgatggtgcgggtcac

SEQ ID NO: 4451769 - DNA, 25 bp, Homo sapien
aaagaagaattatgagaactccaag

SEQ ID NO: 4451770 - DNA, 25 bp, Homo sapien
agaagaattatgagaactccaagac

SEQ ID NO: 4451771 - DNA, 25 bp, Homo sapien
gtggaaagaagaattatgagaactc

SEQ ID NO: 4451772 - DNA, 25 bp, Homo sapien
gaaagaagaattatgagaactccaa

SEQ ID NO: 4451773 - DNA, 25 bp, Homo sapien
cgaacaaacccgttagttgctatcg

SEQ ID NO: 4451774 - DNA, 25 bp, Homo sapien
gctatcgcagaagttgacaacccag

SEQ ID NO: 4451775 - DNA, 25 bp, Homo sapien
cagaagttgacaacccagtaataga

SEQ ID NO: 4451776 - DNA, 25 bp, Homo sapien
cgttagttgctatcgcagaagttga

SEQ ID NO: 4451777 - DNA, 25 bp, Homo sapien
gagggcattagatatcttagagatt

SEQ ID NO: 4451778 - DNA, 25 bp, Homo sapien
gcattagatatcttagagattttac

SEQ ID NO: 4451779 - DNA, 25 bp, Homo sapien
atgagggcattagatatcttagaga

SEQ ID NO: 4451780 - DNA, 25 bp, Homo sapien
gggcattagatatcttagagatttt

SEQ ID NO: 4451781 - DNA, 25 bp, Homo sapien
gatccattagaaaagagaccagagt

SEQ ID NO: 4451782 - DNA, 25 bp, Homo sapien
caggcttcaagaacatcgggctact

SEQ ID NO: 4451783 - DNA, 25 bp, Homo sapien
ttccaaggaacatcagctagaggtg

SEQ ID NO: 4451784 - DNA, 25 bp, Homo sapien
gagtagacctggactattctcatcg

SEQ ID NO: 4451785 - DNA, 25 bp, Homo sapien
aaaggtgtttggttccagtactgag

SEQ ID NO: 4451786 - DNA, 25 bp, Homo sapien
tccagtactgagagaagtcaccagt

SEQ ID NO: 4451787 - DNA, 25 bp, Homo sapien
ccagtactgagagaagtcaccagta

SEQ ID NO: 4451788 - DNA, 25 bp, Homo sapien
aggtgtttggttccagtactgagag

SEQ ID NO: 4451789 - DNA, 25 bp, Homo sapien
catagaaatacctgtgagtgtcgtt

SEQ ID NO: 4451790 - DNA, 25 bp, Homo sapien
tactccattcgtgcaaatagcagac

SEQ ID NO: 4451791 - DNA, 25 bp, Homo sapien
acacttaggccaatgatgatgactc

SEQ ID NO: 4451792 - DNA, 25 bp, Homo sapien
gtcgttactaccacacttaggccaa

SEQ ID NO: 4451793 - DNA, 25 bp, Homo sapien
tatgacttcctatacagagctggct

SEQ ID NO: 4451794 - DNA, 25 bp, Homo sapien
ccttgcctgttggtcattgggagca

SEQ ID NO: 4451795 - DNA, 25 bp, Homo sapien
cagtgggtctcatccaaggtacaaa

SEQ ID NO: 4451796 - DNA, 25 bp, Homo sapien
aagtaggtcccttgcctgttggcca

SEQ ID NO: 4451797 - DNA, 25 bp, Homo sapien
aatgaacatacttcacattgaggaa

SEQ ID NO: 4451798 - DNA, 25 bp, Homo sapien
gaacatacttcacattgaggaactg

SEQ ID NO: 4451799 - DNA, 25 bp, Homo sapien
atgaacatacttcacattgaggaac

SEQ ID NO: 4451800 - DNA, 25 bp, Homo sapien
tgaacatacttcacattgaggaact

SEQ ID NO: 4451801 - DNA, 25 bp, Homo sapien
agatcaggcctattgacccaccgaa

SEQ ID NO: 4451802 - DNA, 25 bp, Homo sapien
taagaagatctactacagtctcagc

SEQ ID NO: 4451803 - DNA, 25 bp, Homo sapien
aagcaaagatcaggcctattgaccc

SEQ ID NO: 4451804 - DNA, 25 bp, Homo sapien
tctggaaataagatagtaggcccca

SEQ ID NO: 4451805 - DNA, 25 bp, Homo sapien
tcaccactgtgatggagcctataat

SEQ ID NO: 4451806 - DNA, 25 bp, Homo sapien
tcattggttggatccaccatcatcg

SEQ ID NO: 4451807 - DNA, 25 bp, Homo sapien
ggttggatccaccatcatcgaatca

SEQ ID NO: 4451808 - DNA, 25 bp, Homo sapien
cctataatccggatgtcattggttg

SEQ ID NO: 4451809 - DNA, 25 bp, Homo sapien
cattgttggatggaatgacagttcc

SEQ ID NO: 4451810 - DNA, 25 bp, Homo sapien
gaagtttgcaatagcaattagaaga

SEQ ID NO: 4451811 - DNA, 25 bp, Homo sapien
tgttggatggaatgacagttccaat

SEQ ID NO: 4451812 - DNA, 25 bp, Homo sapien
ttgcaatagcaattagaagaatgac

SEQ ID NO: 4451813 - DNA, 25 bp, Homo sapien
gaatcccagtagctgctgggaaaaa

SEQ ID NO: 4451814 - DNA, 25 bp, Homo sapien
cctttgtgaagcgtggcccaaagtt

SEQ ID NO: 4451815 - DNA, 25 bp, Homo sapien
ccttcaccctttgtgaagcgtggcc

SEQ ID NO: 4451816 - DNA, 25 bp, Homo sapien
cagcaagaatcccagtagctgctgg

SEQ ID NO: 4451817 - DNA, 25 bp, Homo sapien
tccaaatctcctgagatattggcac

SEQ ID NO: 4451818 - DNA, 25 bp, Homo sapien
ctgcaaagcagagcaaacaacgtac

SEQ ID NO: 4451819 - DNA, 25 bp, Homo sapien
ccactcccaggactgcaaagcagag

SEQ ID NO: 4451820 - DNA, 25 bp, Homo sapien
actgcaaagcagagcaaacaacgta

SEQ ID NO: 4451821 - DNA, 25 bp, Homo sapien
aagtgtaccaccactcccaggactg

SEQ ID NO: 4451822 - DNA, 25 bp, Homo sapien
tatgacacactatcacactaccctg

SEQ ID NO: 4451823 - DNA, 25 bp, Homo sapien
aatttggcattaaaagagagaactt

SEQ ID NO: 4451824 - DNA, 25 bp, Homo sapien
tctgtagggtaatatggtcacatct

SEQ ID NO: 4451825 - DNA, 25 bp, Homo sapien
cagtttgaatctgtagggtaatatg

SEQ ID NO: 4451826 - DNA, 25 bp, Homo sapien
tcagcaggagcgatacatgcaagtt

SEQ ID NO: 4451827 - DNA, 25 bp, Homo sapien
caggtaaggccacaaggctaaattc

SEQ ID NO: 4451828 - DNA, 25 bp, Homo sapien
ccactggatggcctacgggatgatt

SEQ ID NO: 4451829 - DNA, 25 bp, Homo sapien
taggaattgcttgccctctacatgc

SEQ ID NO: 4451830 - DNA, 25 bp, Homo sapien
agggagaggtgaagctccttgtttc

SEQ ID NO: 4451831 - DNA, 25 bp, Homo sapien
gagggagaggtgaagctccttgttt

SEQ ID NO: 4451832 - DNA, 25 bp, Homo sapien
ggtgccttcttacatcccattcctt

SEQ ID NO: 4451833 - DNA, 25 bp, Homo sapien
tctgtttcaaatgtccgtctcttct

SEQ ID NO: 4451834 - DNA, 25 bp, Homo sapien
ttgcacttgattctactcttgcttg

SEQ ID NO: 4451835 - DNA, 25 bp, Homo sapien
ggattacatacactactctgcactt

SEQ ID NO: 4451836 - DNA, 25 bp, Homo sapien
tacacaaattgcaacccctaagtag

SEQ ID NO: 4451837 - DNA, 25 bp, Homo sapien
cctaagtaggcaacagtggtgatga

SEQ ID NO: 4451838 - DNA, 25 bp, Homo sapien
aacagtggtgatgaaaatggccagc

SEQ ID NO: 4451839 - DNA, 25 bp, Homo sapien
tgcaacccctaagtaggcaacagtg

SEQ ID NO: 4451840 - DNA, 25 bp, Homo sapien
acaactggacccctcgtaattctga

SEQ ID NO: 4451841 - DNA, 25 bp, Homo sapien
gacccctcgtaattctgacattctg

SEQ ID NO: 4451842 - DNA, 25 bp, Homo sapien
ctgacactggagacgtaccacttac

SEQ ID NO: 4451843 - DNA, 25 bp, Homo sapien
tctgacactggagacgtaccactta

SEQ ID NO: 4451844 - DNA, 25 bp, Homo sapien
aagtatgaggcaacccccaaccagg

SEQ ID NO: 4451845 - DNA, 25 bp, Homo sapien
tggaaaaagtatgaggcaaccccca

SEQ ID NO: 4451846 - DNA, 25 bp, Homo sapien
aaagtatgaggcaacccccaaccag

SEQ ID NO: 4451847 - DNA, 25 bp, Homo sapien
cctttggcttccatggtggtccagc

SEQ ID NO: 4451848 - DNA, 25 bp, Homo sapien
tggttcatgtcgacatcttgagaag

SEQ ID NO: 4451849 - DNA, 25 bp, Homo sapien
cagcccgtactgacatggttcatgt

SEQ ID NO: 4451850 - DNA, 25 bp, Homo sapien
aagtcatagcccaacccacatgctg

SEQ ID NO: 4451851 - DNA, 25 bp, Homo sapien
ggtgtcattcatgttcccggtggca

SEQ ID NO: 4451852 - DNA, 25 bp, Homo sapien
tgaacatagagtggcaacaagggac

SEQ ID NO: 4451853 - DNA, 25 bp, Homo sapien
tgatcggaacacacatagtgccagg

SEQ ID NO: 4451854 - DNA, 25 bp, Homo sapien
catagaggatactccctgaatctgg

SEQ ID NO: 4451855 - DNA, 25 bp, Homo sapien
gaaatcttgcacaactgatcggaac

SEQ ID NO: 4451856 - DNA, 25 bp, Homo sapien
gagaggtacaagtaaggagactttc

SEQ ID NO: 4451857 - DNA, 25 bp, Homo sapien
gagactttctgtgatttggaatctg

SEQ ID NO: 4451858 - DNA, 25 bp, Homo sapien
tctgtttcataagcaaacggctttc

SEQ ID NO: 4451859 - DNA, 25 bp, Homo sapien
aagcaaacggctttcaactacattt

SEQ ID NO: 4451860 - DNA, 25 bp, Homo sapien
aacactttgggtgcgctgacaaggg

SEQ ID NO: 4451861 - DNA, 25 bp, Homo sapien
cagaaaagattcccgcagtgatgag

SEQ ID NO: 4451862 - DNA, 25 bp, Homo sapien
ctggaacactttgggtgcgctgaca

SEQ ID NO: 4451863 - DNA, 25 bp, Homo sapien
ggccgaaccctgataccatgctcat

SEQ ID NO: 4451864 - DNA, 25 bp, Homo sapien
caatagggagaagcacaagctgttg

SEQ ID NO: 4451865 - DNA, 25 bp, Homo sapien
tcagcttgattcacattctgtggaa

SEQ ID NO: 4451866 - DNA, 25 bp, Homo sapien
cattctgtggaaatagcaataggga

SEQ ID NO: 4451867 - DNA, 25 bp, Homo sapien
gcacaagctgttgtgcttgtattac

SEQ ID NO: 4451868 - DNA, 25 bp, Homo sapien
aaatgattgccagtgagaacgaata

SEQ ID NO: 4451869 - DNA, 25 bp, Homo sapien
tcccatatccctttgcaaaaaactg

SEQ ID NO: 4451870 - DNA, 25 bp, Homo sapien
gaatatatcctctcaggggttcatt

SEQ ID NO: 4451871 - DNA, 25 bp, Homo sapien
tgccatggctataagaaaagtgaga

SEQ ID NO: 4451872 - DNA, 25 bp, Homo sapien
ataagaataaatgccatggctataa

SEQ ID NO: 4451873 - DNA, 25 bp, Homo sapien
tattcgcttaaatgcagcacagggc

SEQ ID NO: 4451874 - DNA, 25 bp, Homo sapien
gaaagtaggcataacagctgccatg

SEQ ID NO: 4451875 - DNA, 25 bp, Homo sapien
gaaggtcagacatctatcaccctca

SEQ ID NO: 4451876 - DNA, 25 bp, Homo sapien
ccatgaagcttatgggtggagccaa

SEQ ID NO: 4451877 - DNA, 25 bp, Homo sapien
catgtacgtatgagtgatgagacca

SEQ ID NO: 4451878 - DNA, 25 bp, Homo sapien
tgcgactgggcatacaattaactcc

SEQ ID NO: 4451879 - DNA, 25 bp, Homo sapien
gctgaacagctgttatagcctcgaa

SEQ ID NO: 4451880 - DNA, 25 bp, Homo sapien
tacaaaaagttcaagtggcaatggg

SEQ ID NO: 4451881 - DNA, 25 bp, Homo sapien
ttggagatgatgggagcaatggtgt

SEQ ID NO: 4451882 - DNA, 25 bp, Homo sapien
ttaataagtgcatatgaggccagga

SEQ ID NO: 4451883 - DNA, 25 bp, Homo sapien
aataagtgcatatgaggccaggaaa

SEQ ID NO: 4451884 - DNA, 25 bp, Homo sapien
gagatttggcataagaggcatggaa

SEQ ID NO: 4451885 - DNA, 25 bp, Homo sapien
tattttagtttggaagtcagcttac

SEQ ID NO: 4451886 - DNA, 25 bp, Homo sapien
gcatattttagtttggaagtcagct

SEQ ID NO: 4451887 - DNA, 25 bp, Homo sapien
gagacaaactaactgtttgcttagg

SEQ ID NO: 4451888 - DNA, 25 bp, Homo sapien
aactgtttgcttaggcatattttag

SEQ ID NO: 4451889 - DNA, 25 bp, Homo sapien
gatgacaaacatgactgcacagcac

SEQ ID NO: 4451890 - DNA, 25 bp, Homo sapien
ccaaaaagagatacccacatgttgt

SEQ ID NO: 4451891 - DNA, 25 bp, Homo sapien
cacatagacgtaaaggaagaattca

SEQ ID NO: 4451892 - DNA, 25 bp, Homo sapien
cagctgcccaccagttgatgacaaa

SEQ ID NO: 4451893 - DNA, 25 bp, Homo sapien
tccagagcattgtctaaagcactca

SEQ ID NO: 4451894 - DNA, 25 bp, Homo sapien
gcactcacgtaggaaagagcctgtg

SEQ ID NO: 4451895 - DNA, 25 bp, Homo sapien
tccactgtggttaattccagagcat

SEQ ID NO: 4451896 - DNA, 25 bp, Homo sapien
tttacgtggtcttccactgtggtta

SEQ ID NO: 4451897 - DNA, 25 bp, Homo sapien
tccccctgttaagacaatgcactgg

SEQ ID NO: 4451898 - DNA, 25 bp, Homo sapien
aaggccactgttcttggtaaaggcg

SEQ ID NO: 4451899 - DNA, 25 bp, Homo sapien
cttggtaaaggcgtgagttatgtcc

SEQ ID NO: 4451900 - DNA, 25 bp, Homo sapien
agcaggtcttgtcatgggtccccct

SEQ ID NO: 4451901 - DNA, 25 bp, Homo sapien
taatccaagataagcagggaggaaa

SEQ ID NO: 4451902 - DNA, 25 bp, Homo sapien
aaaataatccaagataagcagggag

SEQ ID NO: 4451903 - DNA, 25 bp, Homo sapien
aataatccaagataagcagggagga

SEQ ID NO: 4451904 - DNA, 25 bp, Homo sapien
ttccctggggtgaagtggctcttac

SEQ ID NO: 4451905 - DNA, 25 bp, Homo sapien
tctgaaacgctttacatctacctgt

SEQ ID NO: 4451906 - DNA, 25 bp, Homo sapien
tatgaatcaaggtagagggctctcc

SEQ ID NO: 4451907 - DNA, 25 bp, Homo sapien
tcttgactcaaaggccatcatttgg

SEQ ID NO: 4451908 - DNA, 25 bp, Homo sapien
taaattcaggatcacgggctcttgc

SEQ ID NO: 4451909 - DNA, 25 bp, Homo sapien
ttctatgtgctgtcatttaaggcca

SEQ ID NO: 4451910 - DNA, 25 bp, Homo sapien
ttactagcaccagttttgaatacct

SEQ ID NO: 4451911 - DNA, 25 bp, Homo sapien
tccacacttgagaaattggtcaaca

SEQ ID NO: 4451912 - DNA, 25 bp, Homo sapien
gctctgaatgtttatctaaggcatg

SEQ ID NO: 4451913 - DNA, 25 bp, Homo sapien
tccttaacacacagtttgcgcggtc

SEQ ID NO: 4451914 - DNA, 25 bp, Homo sapien
ccttaacacacagtttgcgcggtcc

SEQ ID NO: 4451915 - DNA, 25 bp, Homo sapien
ctccttaacacacagtttgcgcggt

SEQ ID NO: 4451916 - DNA, 25 bp, Homo sapien
gacttcggacaccatccctgaaaca

SEQ ID NO: 4451917 - DNA, 25 bp, Homo sapien
aagaagacttcggacaccatccctg

SEQ ID NO: 4451918 - DNA, 25 bp, Homo sapien
ttgttctttataagccaggcctgtt

SEQ ID NO: 4451919 - DNA, 25 bp, Homo sapien
ctgaaacagtctgccgccactgcag

SEQ ID NO: 4451920 - DNA, 25 bp, Homo sapien
ccacgtagttctcaatctctgtcaa

SEQ ID NO: 4451921 - DNA, 25 bp, Homo sapien
tgattcccacgtagttctcaatctc

SEQ ID NO: 4451922 - DNA, 25 bp, Homo sapien
ttcccacgtagttctcaatctctgt

SEQ ID NO: 4451923 - DNA, 25 bp, Homo sapien
tcttatatccaatcaccagagtgtt

SEQ ID NO: 4451924 - DNA, 25 bp, Homo sapien
taaccacgccaatctcaaaatcaaa

SEQ ID NO: 4451925 - DNA, 25 bp, Homo sapien
tctgactataaccacgccaatctca

SEQ ID NO: 4451926 - DNA, 25 bp, Homo sapien
tgattctgactataaccacgccaat

SEQ ID NO: 4451927 - DNA, 25 bp, Homo sapien
tgactataaccacgccaatctcaaa

SEQ ID NO: 4451928 - DNA, 25 bp, Homo sapien
taactacagtatatgggcactctga

SEQ ID NO: 4451929 - DNA, 25 bp, Homo sapien
taatctgtgatgacactgtggtgcc

SEQ ID NO: 4451930 - DNA, 25 bp, Homo sapien
tattaggcccttattaggccctgaa

SEQ ID NO: 4451931 - DNA, 25 bp, Homo sapien
aaacaatgcatggaaatgtggcgga

SEQ ID NO: 4451932 - DNA, 25 bp, Homo sapien
taggcgttgtcttagtaatgttcaa

SEQ ID NO: 4451933 - DNA, 25 bp, Homo sapien
aatgctagtctctcctgttctaatc

SEQ ID NO: 4451934 - DNA, 25 bp, Homo sapien
ttttaaacaagcctcggatgcctcc

SEQ ID NO: 4451935 - DNA, 25 bp, Homo sapien
cattatctttgatagtcgcttccaa

SEQ ID NO: 4451936 - DNA, 25 bp, Homo sapien
gaaatcagcgttccagctggatacc

SEQ ID NO: 4451937 - DNA, 25 bp, Homo sapien
aaagatgcttttgttgaaatcagcg

SEQ ID NO: 4451938 - DNA, 25 bp, Homo sapien
gaaatctacaggtagtgagtaccaa

SEQ ID NO: 4451939 - DNA, 25 bp, Homo sapien
taaagttctaagtcgtgcattctgg

SEQ ID NO: 4451940 - DNA, 25 bp, Homo sapien
cagagtagtgaatgggcccacttta

SEQ ID NO: 4451941 - DNA, 25 bp, Homo sapien
gattggttctcgtctagaactcaaa

SEQ ID NO: 4451942 - DNA, 25 bp, Homo sapien
gaggcaggattggttctcgtctaga

SEQ ID NO: 4451943 - DNA, 25 bp, Homo sapien
tggaagcccagagtagtgaatgggc

SEQ ID NO: 4451944 - DNA, 25 bp, Homo sapien
agacaagtcaaagcagccagaggcc

SEQ ID NO: 4451945 - DNA, 25 bp, Homo sapien
gaggcctcctgttcacactcaggta

SEQ ID NO: 4451946 - DNA, 25 bp, Homo sapien
agtcaaagcagccagaggcctcctg

SEQ ID NO: 4451947 - DNA, 25 bp, Homo sapien
cagccagaggcctcctgttcacact

SEQ ID NO: 4451948 - DNA, 25 bp, Homo sapien
aagaggaattgatgcatctgtttgc

SEQ ID NO: 4451949 - DNA, 25 bp, Homo sapien
cgaaagaggaattgatgcatctgtt

SEQ ID NO: 4451950 - DNA, 25 bp, Homo sapien
gaaacgaaagaggaattgatgcatc

SEQ ID NO: 4451951 - DNA, 25 bp, Homo sapien
ctgaaacgaaagaggaattgatgca

SEQ ID NO: 4451952 - DNA, 25 bp, Homo sapien
gcatcgactggcttgtgttaatgct

SEQ ID NO: 4451953 - DNA, 25 bp, Homo sapien
tctcccacatgcatcgactggcttg

SEQ ID NO: 4451954 - DNA, 25 bp, Homo sapien
caaccaccaaacatcaattgtgcct

SEQ ID NO: 4451955 - DNA, 25 bp, Homo sapien
ccatcatcaaacaaccaccaaacat

SEQ ID NO: 4451956 - DNA, 25 bp, Homo sapien
caaaattgaaattcttgtccctagt

SEQ ID NO: 4451957 - DNA, 25 bp, Homo sapien
attgaaattcttgtccctagtgtat

SEQ ID NO: 4451958 - DNA, 25 bp, Homo sapien
aattgaaattcttgtccctagtgta

SEQ ID NO: 4451959 - DNA, 25 bp, Homo sapien
aaattgaaattcttgtccctagtgt

SEQ ID NO: 4451960 - DNA, 25 bp, Homo sapien
tttttcttcttcaatgcggttgatc

SEQ ID NO: 4451961 - DNA, 25 bp, Homo sapien
ttcaatgcggttgatcttccctccc

SEQ ID NO: 4451962 - DNA, 25 bp, Homo sapien
ttccctcccacatagattcttaatt

SEQ ID NO: 4451963 - DNA, 25 bp, Homo sapien
tcttccctcccacatagattcttaa

SEQ ID NO: 4451964 - DNA, 25 bp, Homo sapien
tttggcctaatgttgatgtcaccga

SEQ ID NO: 4451965 - DNA, 25 bp, Homo sapien
tggatgtctgcaaattttatcctaa

SEQ ID NO: 4451966 - DNA, 25 bp, Homo sapien
ctctctttgtttggcctaatgttga

SEQ ID NO: 4451967 - DNA, 25 bp, Homo sapien
gatgtcaccgatgatatggatgtct

SEQ ID NO: 4451968 - DNA, 25 bp, Homo sapien
tagtatgaccttgcacttcgtgctg

SEQ ID NO: 4451969 - DNA, 25 bp, Homo sapien
tagtgcctaaaagctaaagtggccc

SEQ ID NO: 4451970 - DNA, 25 bp, Homo sapien
aggctgccccacgagtaactctgaa

SEQ ID NO: 4451971 - DNA, 25 bp, Homo sapien
aaattcataggccttccctgttggg

SEQ ID NO: 4451972 - DNA, 25 bp, Homo sapien
tctctttgatttccacataaagatt

SEQ ID NO: 4451973 - DNA, 25 bp, Homo sapien
gattgttgtctttttgtcctatgac

SEQ ID NO: 4451974 - DNA, 25 bp, Homo sapien
tttccacataaagattgttgtcttt

SEQ ID NO: 4451975 - DNA, 25 bp, Homo sapien
tttgtcctatgacttttaattcagt

SEQ ID NO: 4451976 - DNA, 25 bp, Homo sapien
tctttgcagctttcatggagacgat

SEQ ID NO: 4451977 - DNA, 25 bp, Homo sapien
tgcagctttcatggagacgatatgg

SEQ ID NO: 4451978 - DNA, 25 bp, Homo sapien
gctttcatggagacgatatggttca

SEQ ID NO: 4451979 - DNA, 25 bp, Homo sapien
tcatggagacgatatggttcaatca

SEQ ID NO: 4451980 - DNA, 25 bp, Homo sapien
gtaagagttcattcagtcgaacttg

SEQ ID NO: 4451981 - DNA, 25 bp, Homo sapien
aggacaatgagattagcagctctgg

SEQ ID NO: 4451982 - DNA, 25 bp, Homo sapien
cattcagtcgaacttggcggtaact

SEQ ID NO: 4451983 - DNA, 25 bp, Homo sapien
caatgagattagcagctctggagtg

SEQ ID NO: 4451984 - DNA, 25 bp, Homo sapien
ggcatggtggacagcaagtccaagt

SEQ ID NO: 4451985 - DNA, 25 bp, Homo sapien
ttctttgtgaggatttccaaccaag

SEQ ID NO: 4451986 - DNA, 25 bp, Homo sapien
tttgtgaggatttccaaccaagcca

SEQ ID NO: 4451987 - DNA, 25 bp, Homo sapien
tggatccctttcttgccacgggaag

SEQ ID NO: 4451988 - DNA, 25 bp, Homo sapien
ccatatacaacaaatccgatatgga

SEQ ID NO: 4451989 - DNA, 25 bp, Homo sapien
aatgtcaagacatttttgtgatttc

SEQ ID NO: 4451990 - DNA, 25 bp, Homo sapien
agtaaaatgtcaagacatttttgtg

SEQ ID NO: 4451991 - DNA, 25 bp, Homo sapien
tgtcaagacatttttgtgatttcct

SEQ ID NO: 4451992 - DNA, 25 bp, Homo sapien
ttaagagtaaaatgtcaagacattt

SEQ ID NO: 4451993 - DNA, 25 bp, Homo sapien
tttgacaaccccttaagctgagaag

SEQ ID NO: 4451994 - DNA, 25 bp, Homo sapien
cacctgtggttactatgccagcctg

SEQ ID NO: 4451995 - DNA, 25 bp, Homo sapien
tgtagaatctggtaggatcctctcc

SEQ ID NO: 4451996 - DNA, 25 bp, Homo sapien
cacattggtggttttcatgagcata

SEQ ID NO: 4451997 - DNA, 25 bp, Homo sapien
gacaccaatgcacatgactgtggaa

SEQ ID NO: 4451998 - DNA, 25 bp, Homo sapien
caagggctggataaatctgctgcta

SEQ ID NO: 4451999 - DNA, 25 bp, Homo sapien
taggacaatgctcccagtatggcac

SEQ ID NO: 4452000 - DNA, 25 bp, Homo sapien
ggaatccaagggctatactcagcca

SEQ ID NO: 4452001 - DNA, 25 bp, Homo sapien
gatctggtatcaataagcctttcaa

SEQ ID NO: 4452002 - DNA, 25 bp, Homo sapien
gccctgtagtcatgaaagcagtaat

SEQ ID NO: 4452003 - DNA, 25 bp, Homo sapien
tctgagtgtcttgggagagctttca

SEQ ID NO: 4452004 - DNA, 25 bp, Homo sapien
tgaaggtctctgtatgcctgcttgc

SEQ ID NO: 4452005 - DNA, 25 bp, Homo sapien
taaaaacttcttcgatctcaccctc

SEQ ID NO: 4452006 - DNA, 25 bp, Homo sapien
acttcttcgatctcaccctcccata

SEQ ID NO: 4452007 - DNA, 25 bp, Homo sapien
agatttctcggccatattctttctt

SEQ ID NO: 4452008 - DNA, 25 bp, Homo sapien
ttcttgttgtttagagaccttctct

SEQ ID NO: 4452009 - DNA, 25 bp, Homo sapien
tgcagacagttattatcatgccact

SEQ ID NO: 4452010 - DNA, 25 bp, Homo sapien
tgggaggctgcagacagttattatc

SEQ ID NO: 4452011 - DNA, 25 bp, Homo sapien
agcacagagtgattaaataacttac

SEQ ID NO: 4452012 - DNA, 25 bp, Homo sapien
tcgtttaatcatgacaactagagga

SEQ ID NO: 4452013 - DNA, 25 bp, Homo sapien
ctttatgtcaggtgtattctaagtg

SEQ ID NO: 4452014 - DNA, 25 bp, Homo sapien
ttatgtcaggtgtattctaagtgct

SEQ ID NO: 4452015 - DNA, 25 bp, Homo sapien
ctactttatgtcaggtgtattctaa

SEQ ID NO: 4452016 - DNA, 25 bp, Homo sapien
tactttatgtcaggtgtattctaag

SEQ ID NO: 4452017 - DNA, 25 bp, Homo sapien
ctcccgggctctgagtttagcggcg

SEQ ID NO: 4452018 - DNA, 25 bp, Homo sapien
ctggggcggcaccgcccgcagccat

SEQ ID NO: 4452019 - DNA, 25 bp, Homo sapien
ttttccgagagtgtacgccaggccc

SEQ ID NO: 4452020 - DNA, 25 bp, Homo sapien
ccgagagtgtacgccaggcccgggc

SEQ ID NO: 4452021 - DNA, 25 bp, Homo sapien
ttccgagagtgtacgccaggcccgg

SEQ ID NO: 4452022 - DNA, 25 bp, Homo sapien
tttccgagagtgtacgccaggcccg

SEQ ID NO: 4452023 - DNA, 25 bp, Homo sapien
tctggctgcctagccctcttgcttt

SEQ ID NO: 4452024 - DNA, 25 bp, Homo sapien
cgttggcgtcttgagtcttgctgcc

SEQ ID NO: 4452025 - DNA, 25 bp, Homo sapien
gcgtcttgagtcttgctgccgcctc

SEQ ID NO: 4452026 - DNA, 25 bp, Homo sapien
gcgccgttggcgtcttgagtcttgc

SEQ ID NO: 4452027 - DNA, 25 bp, Homo sapien
ggcttccaccctgaagacgcgcccg

SEQ ID NO: 4452028 - DNA, 25 bp, Homo sapien
ctccggacgtgcgccaggcttccac

SEQ ID NO: 4452029 - DNA, 25 bp, Homo sapien
caggcttccaccctgaagacgcgcc

SEQ ID NO: 4452030 - DNA, 25 bp, Homo sapien
ccggacgtgcgccaggcttccaccc

SEQ ID NO: 4452031 - DNA, 25 bp, Homo sapien
agagtttgggctggttgggtcctcg

SEQ ID NO: 4452032 - DNA, 25 bp, Homo sapien
tttgggctggttgggtcctcggcac

SEQ ID NO: 4452033 - DNA, 25 bp, Homo sapien
ccagagtttgggctggttgggtcct

SEQ ID NO: 4452034 - DNA, 25 bp, Homo sapien
gtttgggctggttgggtcctcggca

SEQ ID NO: 4452035 - DNA, 25 bp, Homo sapien
ttttgcatcgctgagcgaagcagag

SEQ ID NO: 4452036 - DNA, 25 bp, Homo sapien
cctggcccggagagtaccgcggctt

SEQ ID NO: 4452037 - DNA, 25 bp, Homo sapien
tgagcgaagcagagacgtaaggaaa

SEQ ID NO: 4452038 - DNA, 25 bp, Homo sapien
tggctccgcggcagccttggctcag

SEQ ID NO: 4452039 - DNA, 25 bp, Homo sapien
ccgccttaggaagctcgcccttcca

SEQ ID NO: 4452040 - DNA, 25 bp, Homo sapien
gccttaggaagctcgcccttccagc

SEQ ID NO: 4452041 - DNA, 25 bp, Homo sapien
cgccttaggaagctcgcccttccag

SEQ ID NO: 4452042 - DNA, 25 bp, Homo sapien
ggattccttccagacggccggagcc

SEQ ID NO: 4452043 - DNA, 25 bp, Homo sapien
cagggagcgcgccaaaaccgaaatt

SEQ ID NO: 4452044 - DNA, 25 bp, Homo sapien
tttgaagcccttctcggaaagcagg

SEQ ID NO: 4452045 - DNA, 25 bp, Homo sapien
tccccgggacgagtccacagttctg

SEQ ID NO: 4452046 - DNA, 25 bp, Homo sapien
cgggcccgcttactgggtgaaatgg

SEQ ID NO: 4452047 - DNA, 25 bp, Homo sapien
ccgggcccgcttactgggtgaaatg

SEQ ID NO: 4452048 - DNA, 25 bp, Homo sapien
cccgcttactgggtgaaatggcggg

SEQ ID NO: 4452049 - DNA, 25 bp, Homo sapien
ggcccgcttactgggtgaaatggcg

SEQ ID NO: 4452050 - DNA, 25 bp, Homo sapien
gtggcgtgctcggagagccgggcaa

SEQ ID NO: 4452051 - DNA, 25 bp, Homo sapien
gtacaggtcgtagcccgcggcgcgc

SEQ ID NO: 4452052 - DNA, 25 bp, Homo sapien
tgtacaggtcgtagcccgcggcgcg

SEQ ID NO: 4452053 - DNA, 25 bp, Homo sapien
cgtgctcggagagccgggcaaagcg

SEQ ID NO: 4452054 - DNA, 25 bp, Homo sapien
taaacgttgcaaagtaacgccttgc

SEQ ID NO: 4452055 - DNA, 25 bp, Homo sapien
tggtttttctattgagcacagcatc

SEQ ID NO: 4452056 - DNA, 25 bp, Homo sapien
ttaggaagggcacaataaacgttgc

SEQ ID NO: 4452057 - DNA, 25 bp, Homo sapien
tgatctctccggtgactgtttctag

SEQ ID NO: 4452058 - DNA, 25 bp, Homo sapien
aggtggtattgtgtaatcataggca

SEQ ID NO: 4452059 - DNA, 25 bp, Homo sapien
cacccagaagggagcgctatctgaa

SEQ ID NO: 4452060 - DNA, 25 bp, Homo sapien
taacacccagaagggagcgctatct

SEQ ID NO: 4452061 - DNA, 25 bp, Homo sapien
cataacacccagaagggagcgctat

SEQ ID NO: 4452062 - DNA, 25 bp, Homo sapien
ttccataacacccagaagggagcgc

SEQ ID NO: 4452063 - DNA, 25 bp, Homo sapien
gttttgcagccaagcctgaccgtgg

SEQ ID NO: 4452064 - DNA, 25 bp, Homo sapien
tttgcagccaagcctgaccgtggag

SEQ ID NO: 4452065 - DNA, 25 bp, Homo sapien
caataaagtgttttgcagccaagcc

SEQ ID NO: 4452066 - DNA, 25 bp, Homo sapien
gtgttttgcagccaagcctgaccgt

SEQ ID NO: 4452067 - DNA, 25 bp, Homo sapien
ggtgtagccactcaaacttccatca

SEQ ID NO: 4452068 - DNA, 25 bp, Homo sapien
tgcataatatcagacacaggctgct

SEQ ID NO: 4452069 - DNA, 25 bp, Homo sapien
tgatctttatgcttgggccacgaaa

SEQ ID NO: 4452070 - DNA, 25 bp, Homo sapien
ggcctctgctaacgtatctgtaaag

SEQ ID NO: 4452071 - DNA, 25 bp, Homo sapien
ctccatgtcacatcttacttgttat

SEQ ID NO: 4452072 - DNA, 25 bp, Homo sapien
catcttacttgttattaatactcta

SEQ ID NO: 4452073 - DNA, 25 bp, Homo sapien
tacttgttattaatactctacccca

SEQ ID NO: 4452074 - DNA, 25 bp, Homo sapien
tgttattaatactctaccccaaaca

SEQ ID NO: 4452075 - DNA, 25 bp, Homo sapien
tcatagtgtatcagagttggccaac

SEQ ID NO: 4452076 - DNA, 25 bp, Homo sapien
acagataatacaggtgcaccgggcc

SEQ ID NO: 4452077 - DNA, 25 bp, Homo sapien
tctcagaagactgtagcacataggc

SEQ ID NO: 4452078 - DNA, 25 bp, Homo sapien
tcttgccctggtactatgtaaagcc

SEQ ID NO: 4452079 - DNA, 25 bp, Homo sapien
aacaccaacatttcctctataatct

SEQ ID NO: 4452080 - DNA, 25 bp, Homo sapien
tgccaaaattaaacagtacaacacc

SEQ ID NO: 4452081 - DNA, 25 bp, Homo sapien
agtacaacaccaacatttcctctat

SEQ ID NO: 4452082 - DNA, 25 bp, Homo sapien
ctctataatcttcatctatgacacc

SEQ ID NO: 4452083 - DNA, 25 bp, Homo sapien
gacgttactgacacattcgccatat

SEQ ID NO: 4452084 - DNA, 25 bp, Homo sapien
gaatagtttattactgacgttactg

SEQ ID NO: 4452085 - DNA, 25 bp, Homo sapien
gtttattactgacgttactgacaca

SEQ ID NO: 4452086 - DNA, 25 bp, Homo sapien
tactgacgttactgacacattcgcc

SEQ ID NO: 4452087 - DNA, 25 bp, Homo sapien
tctggataaaaaatccgttcgcaaa

SEQ ID NO: 4452088 - DNA, 25 bp, Homo sapien
tggataaaaaatccgttcgcaaatg

SEQ ID NO: 4452089 - DNA, 25 bp, Homo sapien
ggataaaaaatccgttcgcaaatga

SEQ ID NO: 4452090 - DNA, 25 bp, Homo sapien
ctggataaaaaatccgttcgcaaat

SEQ ID NO: 4452091 - DNA, 25 bp, Homo sapien
actatttagttacaaacagcatatt

SEQ ID NO: 4452092 - DNA, 25 bp, Homo sapien
tagaaaggtagtaagcttcacagtt

SEQ ID NO: 4452093 - DNA, 25 bp, Homo sapien
gttacaaacagcatattaaattctc

SEQ ID NO: 4452094 - DNA, 25 bp, Homo sapien
agtaatactacataatagctacatg

SEQ ID NO: 4452095 - DNA, 25 bp, Homo sapien
tgaacccctttcggtgtcatccaag

SEQ ID NO: 4452096 - DNA, 25 bp, Homo sapien
ttacatacaaccttcaattgcggaa

SEQ ID NO: 4452097 - DNA, 25 bp, Homo sapien
catacaaccttcaattgcggaaaaa

SEQ ID NO: 4452098 - DNA, 25 bp, Homo sapien
tacatacaaccttcaattgcggaaa

SEQ ID NO: 4452099 - DNA, 25 bp, Homo sapien
tacaaccttcaattgcggaaaaaca

SEQ ID NO: 4452100 - DNA, 25 bp, Homo sapien
attttagttcagcttatgcaagatt

SEQ ID NO: 4452101 - DNA, 25 bp, Homo sapien
gcaagattttgtaccttgtgaaaga

SEQ ID NO: 4452102 - DNA, 25 bp, Homo sapien
agttgctgaagggagatcatatgag

SEQ ID NO: 4452103 - DNA, 25 bp, Homo sapien
caaaataagttgctgaagggagatc

SEQ ID NO: 4452104 - DNA, 25 bp, Homo sapien
tcaaggtaagccacagaatcagtcc

SEQ ID NO: 4452105 - DNA, 25 bp, Homo sapien
cacaaactgggtggtcaagtgggct

SEQ ID NO: 4452106 - DNA, 25 bp, Homo sapien
aaaatgctggctatgtcccactgag

SEQ ID NO: 4452107 - DNA, 25 bp, Homo sapien
tcaaaacgatgcctggtgtctcaca

SEQ ID NO: 4452108 - DNA, 25 bp, Homo sapien
tcttctgtgactggccattgcctcc

SEQ ID NO: 4452109 - DNA, 25 bp, Homo sapien
cattgcctccttgacgtttaggacc

SEQ ID NO: 4452110 - DNA, 25 bp, Homo sapien
taggaccctctagagcagatctgca

SEQ ID NO: 4452111 - DNA, 25 bp, Homo sapien
ggcttcttaacctcattgtcagaca

SEQ ID NO: 4452112 - DNA, 25 bp, Homo sapien
cacatagtaagttgcatagagagga

SEQ ID NO: 4452113 - DNA, 25 bp, Homo sapien
ggacattaaactcggtcagccacca

SEQ ID NO: 4452114 - DNA, 25 bp, Homo sapien
caaaggaaacagagtcatgagatac

SEQ ID NO: 4452115 - DNA, 25 bp, Homo sapien
tcagccaccagtgcttacttcaaag

SEQ ID NO: 4452116 - DNA, 25 bp, Homo sapien
ctccacactgggtagttcccaggga

SEQ ID NO: 4452117 - DNA, 25 bp, Homo sapien
tcacgctagccttggggcaagatta

SEQ ID NO: 4452118 - DNA, 25 bp, Homo sapien
tgtccaatgtgaaatctgtccacag

SEQ ID NO: 4452119 - DNA, 25 bp, Homo sapien
tcccagggagtcagcgtgtccaatg

SEQ ID NO: 4452120 - DNA, 25 bp, Homo sapien
tgctatggtgcaatacggactcagt

SEQ ID NO: 4452121 - DNA, 25 bp, Homo sapien
catgaatcacagatgcccaaggagt

SEQ ID NO: 4452122 - DNA, 25 bp, Homo sapien
gaatataggtaccaagatggcactg

SEQ ID NO: 4452123 - DNA, 25 bp, Homo sapien
tacagatggttcctatcgctgcgag

SEQ ID NO: 4452124 - DNA, 25 bp, Homo sapien
gcaagcagagctatcaatgaaggaa

SEQ ID NO: 4452125 - DNA, 25 bp, Homo sapien
ttttaaacctgcagattgtggcctc

SEQ ID NO: 4452126 - DNA, 25 bp, Homo sapien
ttttgtagccagcatctccgggagt

SEQ ID NO: 4452127 - DNA, 25 bp, Homo sapien
tctgcttcagtgaccaacccttgtg

SEQ ID NO: 4452128 - DNA, 25 bp, Homo sapien
aaagagatcaaaagtgttctccaag

SEQ ID NO: 4452129 - DNA, 25 bp, Homo sapien
ggtagttggaggcataaataacaaa

SEQ ID NO: 4452130 - DNA, 25 bp, Homo sapien
gaattatatctaaaggtagttggag

SEQ ID NO: 4452131 - DNA, 25 bp, Homo sapien
aataaaagagatcaaaagtgttctc

SEQ ID NO: 4452132 - DNA, 25 bp, Homo sapien
tgggggagatagagctggggtctgg

SEQ ID NO: 4452133 - DNA, 25 bp, Homo sapien
ggagatagagctggggtctgggacg

SEQ ID NO: 4452134 - DNA, 25 bp, Homo sapien
gtgtgggggagatagagctggggtc

SEQ ID NO: 4452135 - DNA, 25 bp, Homo sapien
ggggagatagagctggggtctggga

SEQ ID NO: 4452136 - DNA, 25 bp, Homo sapien
tacttggtgaaacaacagtacacag

SEQ ID NO: 4452137 - DNA, 25 bp, Homo sapien
tctgagtccttctactgacgaatgg

SEQ ID NO: 4452138 - DNA, 25 bp, Homo sapien
tgtgttgaaagaagcagcatctacc

SEQ ID NO: 4452139 - DNA, 25 bp, Homo sapien
ccagatattgatgaatgcagcacca

SEQ ID NO: 4452140 - DNA, 25 bp, Homo sapien
aaatctacataatcgggttttggtg

SEQ ID NO: 4452141 - DNA, 25 bp, Homo sapien
aggaatcttctcttgttgatgaatt

SEQ ID NO: 4452142 - DNA, 25 bp, Homo sapien
tacataatcgggttttggtgctgct

SEQ ID NO: 4452143 - DNA, 25 bp, Homo sapien
ggaatcttctcttgttgatgaatta

SEQ ID NO: 4452144 - DNA, 25 bp, Homo sapien
ctaagaatatggatcatctgttgta

SEQ ID NO: 4452145 - DNA, 25 bp, Homo sapien
ttgtatttgatatctgagcacgtac

SEQ ID NO: 4452146 - DNA, 25 bp, Homo sapien
aaatggacgaccataaaataacagt

SEQ ID NO: 4452147 - DNA, 25 bp, Homo sapien
ctgctgccttagttgttggtgtcta

SEQ ID NO: 4452148 - DNA, 25 bp, Homo sapien
gatgtgttctcactccacttagcag

SEQ ID NO: 4452149 - DNA, 25 bp, Homo sapien
ttagtgatgtgttctcactccactt

SEQ ID NO: 4452150 - DNA, 25 bp, Homo sapien
tgtgttctcactccacttagcaggt

SEQ ID NO: 4452151 - DNA, 25 bp, Homo sapien
agtgatgtgttctcactccacttag

SEQ ID NO: 4452152 - DNA, 25 bp, Homo sapien
cagtggcccagaatatcgaaatctg

SEQ ID NO: 4452153 - DNA, 25 bp, Homo sapien
caagagaccccatgtgattgtccca

SEQ ID NO: 4452154 - DNA, 25 bp, Homo sapien
gaatatcgaaatctgtatgtttcca

SEQ ID NO: 4452155 - DNA, 25 bp, Homo sapien
ccaagagaccccatgtgattgtccc

SEQ ID NO: 4452156 - DNA, 25 bp, Homo sapien
caatctcgactgctgtgatttaatc

SEQ ID NO: 4452157 - DNA, 25 bp, Homo sapien
gaaggctttgttagctcaagattta

SEQ ID NO: 4452158 - DNA, 25 bp, Homo sapien
catttcttgcaaacaacactccaac

SEQ ID NO: 4452159 - DNA, 25 bp, Homo sapien
tcctgaaactgatttgaacgttgct

SEQ ID NO: 4452160 - DNA, 25 bp, Homo sapien
ctttcttgacgccatcctcagcgtg

SEQ ID NO: 4452161 - DNA, 25 bp, Homo sapien
ttaaacctggctttcttgacgccat

SEQ ID NO: 4452162 - DNA, 25 bp, Homo sapien
aaacctggctttcttgacgccatcc

SEQ ID NO: 4452163 - DNA, 25 bp, Homo sapien
ctggctttcttgacgccatcctcag

SEQ ID NO: 4452164 - DNA, 25 bp, Homo sapien
ttggagatctggattcttattattt

SEQ ID NO: 4452165 - DNA, 25 bp, Homo sapien
ttttgacagtcattttgaaagtcac

SEQ ID NO: 4452166 - DNA, 25 bp, Homo sapien
ctttaatgtcttcatcttggagatc

SEQ ID NO: 4452167 - DNA, 25 bp, Homo sapien
tttgaaagtcacttgacatctgcat

SEQ ID NO: 4452168 - DNA, 25 bp, Homo sapien
tccacgatgcccttccattctattg

SEQ ID NO: 4452169 - DNA, 25 bp, Homo sapien
cattctattgaactgtgcttctgta

SEQ ID NO: 4452170 - DNA, 25 bp, Homo sapien
ctccaaagaagggagggcctattgc

SEQ ID NO: 4452171 - DNA, 25 bp, Homo sapien
agggagggcctattgcaagcttctc

SEQ ID NO: 4452172 - DNA, 25 bp, Homo sapien
gtgtcagctttcatggtactggagc

SEQ ID NO: 4452173 - DNA, 25 bp, Homo sapien
tgtgtcagctttcatggtactggag

SEQ ID NO: 4452174 - DNA, 25 bp, Homo sapien
ctgtgtcagctttcatggtactgga

SEQ ID NO: 4452175 - DNA, 25 bp, Homo sapien
gctgtgtcagctttcatggtactgg

SEQ ID NO: 4452176 - DNA, 25 bp, Homo sapien
ctgggaaaggagctaggctcagtcc

SEQ ID NO: 4452177 - DNA, 25 bp, Homo sapien
gaaaggagctaggctcagtccacat

SEQ ID NO: 4452178 - DNA, 25 bp, Homo sapien
ggaaaggagctaggctcagtccaca

SEQ ID NO: 4452179 - DNA, 25 bp, Homo sapien
tgggaaaggagctaggctcagtcca

SEQ ID NO: 4452180 - DNA, 25 bp, Homo sapien
cctatagttcctttaatgggggcag

SEQ ID NO: 4452181 - DNA, 25 bp, Homo sapien
ctgttttggactttctcccctatag

SEQ ID NO: 4452182 - DNA, 25 bp, Homo sapien
tgggcatccagtggtacttccagcc

SEQ ID NO: 4452183 - DNA, 25 bp, Homo sapien
ctcctgctggtagatgaaatcatct

SEQ ID NO: 4452184 - DNA, 25 bp, Homo sapien
gatggattttgttcgaggccaaata

SEQ ID NO: 4452185 - DNA, 25 bp, Homo sapien
gccaaatatgtgcacttgcccatct

SEQ ID NO: 4452186 - DNA, 25 bp, Homo sapien
tttgccggcattcctgtggggatgg

SEQ ID NO: 4452187 - DNA, 25 bp, Homo sapien
gattttgttcgaggccaaatatgtg

SEQ ID NO: 4452188 - DNA, 25 bp, Homo sapien
caaatgataacagaggttcctctat

SEQ ID NO: 4452189 - DNA, 25 bp, Homo sapien
caaatcgcatgccagacaaggtgtt

SEQ ID NO: 4452190 - DNA, 25 bp, Homo sapien
acagaggttcctctattgatttctg

SEQ ID NO: 4452191 - DNA, 25 bp, Homo sapien
tgagtgacaaatcgcatgccagaca

SEQ ID NO: 4452192 - DNA, 25 bp, Homo sapien
tataatgcttactgttgccctggat

SEQ ID NO: 4452193 - DNA, 25 bp, Homo sapien
ccttacctggcggaaatcagtgtat

SEQ ID NO: 4452194 - DNA, 25 bp, Homo sapien
cctggatggaaaaccttacctggcg

SEQ ID NO: 4452195 - DNA, 25 bp, Homo sapien
cccaatgtctgtggatcacgttata

SEQ ID NO: 4452196 - DNA, 25 bp, Homo sapien
gggacaaagggttgagagcctttga

SEQ ID NO: 4452197 - DNA, 25 bp, Homo sapien
atggagggacaaagggttgagagcc

SEQ ID NO: 4452198 - DNA, 25 bp, Homo sapien
gcattactttgtcatggagggacaa

SEQ ID NO: 4452199 - DNA, 25 bp, Homo sapien
cattactttgtcatggagggacaaa

SEQ ID NO: 4452200 - DNA, 25 bp, Homo sapien
catcactactgggagacttgacctc

SEQ ID NO: 4452201 - DNA, 25 bp, Homo sapien
cagtgaagagggccagaataaaggc

SEQ ID NO: 4452202 - DNA, 25 bp, Homo sapien
cagtcacatgaggtattcacatcac

SEQ ID NO: 4452203 - DNA, 25 bp, Homo sapien
cccaggttgcattgtgactggcaga

SEQ ID NO: 4452204 - DNA, 25 bp, Homo sapien
tgtgtcagagatagcagtgcgtgca

SEQ ID NO: 4452205 - DNA, 25 bp, Homo sapien
gatatctgaacctaataatgagatg

SEQ ID NO: 4452206 - DNA, 25 bp, Homo sapien
tgaaggtataggtaaagataagagt

SEQ ID NO: 4452207 - DNA, 25 bp, Homo sapien
ggtagattaggcctacctggtagat

SEQ ID NO: 4452208 - DNA, 25 bp, Homo sapien
ggaactcaagtatcaaatcaccctg

SEQ ID NO: 4452209 - DNA, 25 bp, Homo sapien
gggctgccagtacattcagaagata

SEQ ID NO: 4452210 - DNA, 25 bp, Homo sapien
cctgcactctaggttcctgaaagac

SEQ ID NO: 4452211 - DNA, 25 bp, Homo sapien
gggctgacagcattcggaactcaag

SEQ ID NO: 4452212 - DNA, 25 bp, Homo sapien
gcatcatgcgtcgagggcgtctgct

SEQ ID NO: 4452213 - DNA, 25 bp, Homo sapien
tctgctggagatcgccctgggattt

SEQ ID NO: 4452214 - DNA, 25 bp, Homo sapien
tttagcgtcctacacgagccatggg

SEQ ID NO: 4452215 - DNA, 25 bp, Homo sapien
tccctgtggaagactccttggcaag

SEQ ID NO: 4452216 - DNA, 25 bp, Homo sapien
gggaccgcgaggcttcagcatcccg

SEQ ID NO: 4452217 - DNA, 25 bp, Homo sapien
cagcatcccgatgccctgaaagtct

SEQ ID NO: 4452218 - DNA, 25 bp, Homo sapien
cagctgtggaccaaacggtcttccc

SEQ ID NO: 4452219 - DNA, 25 bp, Homo sapien
ttacccaaattaactgcgccacgcg

SEQ ID NO: 4452220 - DNA, 25 bp, Homo sapien
gccgccgcttctccagtgggtgcag

SEQ ID NO: 4452221 - DNA, 25 bp, Homo sapien
gcgcgcaattcgtgccgctaaaaaa

SEQ ID NO: 4452222 - DNA, 25 bp, Homo sapien
cttggtgccgggctccgcgtcagat

SEQ ID NO: 4452223 - DNA, 25 bp, Homo sapien
ggcttttgcgtttgcgccgcgccga

SEQ ID NO: 4452224 - DNA, 25 bp, Homo sapien
gcgagaaaccgctgcgcggacgata

SEQ ID NO: 4452225 - DNA, 25 bp, Homo sapien
ccactgcgctaatcctgcgagcgag

SEQ ID NO: 4452226 - DNA, 25 bp, Homo sapien
tatttctctcgcgagaaaccgctgc

SEQ ID NO: 4452227 - DNA, 25 bp, Homo sapien
aatcctgcgagcgagaggccccgca

SEQ ID NO: 4452228 - DNA, 25 bp, Homo sapien
tctgctgagtgtccggcgggagagg

SEQ ID NO: 4452229 - DNA, 25 bp, Homo sapien
agggagcgcgctaccgggaggcgcg

SEQ ID NO: 4452230 - DNA, 25 bp, Homo sapien
gaacagctttctgctccggtagggc

SEQ ID NO: 4452231 - DNA, 25 bp, Homo sapien
gcgcattcttggtgcaggtggaaca

SEQ ID NO: 4452232 - DNA, 25 bp, Homo sapien
agagccctctcctcggtcggcacag

SEQ ID NO: 4452233 - DNA, 25 bp, Homo sapien
cagaagagccgcgtctggagtgggc

SEQ ID NO: 4452234 - DNA, 25 bp, Homo sapien
gctctcgacacccagggcaagtggg

SEQ ID NO: 4452235 - DNA, 25 bp, Homo sapien
gtctggagtgggctctcgacaccca

SEQ ID NO: 4452236 - DNA, 25 bp, Homo sapien
taaactgttacagggtgcaggcatc

SEQ ID NO: 4452237 - DNA, 25 bp, Homo sapien
taagtagagtcctccagatgaaccc

SEQ ID NO: 4452238 - DNA, 25 bp, Homo sapien
tggacaccgacttagagagagcacc

SEQ ID NO: 4452239 - DNA, 25 bp, Homo sapien
cactaaattcactgtgccgcgcata

SEQ ID NO: 4452240 - DNA, 25 bp, Homo sapien
aggacccagtgtgcgacttcaggcc

SEQ ID NO: 4452241 - DNA, 25 bp, Homo sapien
gcagccaggacccagtgtgcgactt

SEQ ID NO: 4452242 - DNA, 25 bp, Homo sapien
tttattattggcttgacagcaggct

SEQ ID NO: 4452243 - DNA, 25 bp, Homo sapien
tattattggcttgacagcaggctgg

SEQ ID NO: 4452244 - DNA, 25 bp, Homo sapien
tgctgaccaacatgtcactgagtgt

SEQ ID NO: 4452245 - DNA, 25 bp, Homo sapien
aagggcacagcatgtcttgcatgct

SEQ ID NO: 4452246 - DNA, 25 bp, Homo sapien
tgtaagattctgagagaaagggcac

SEQ ID NO: 4452247 - DNA, 25 bp, Homo sapien
tgctggagtacaaggaaagcatgca

SEQ ID NO: 4452248 - DNA, 25 bp, Homo sapien
tgttgtggatactgggaatgactcc

SEQ ID NO: 4452249 - DNA, 25 bp, Homo sapien
tatgagggaactagaagctgaagca

SEQ ID NO: 4452250 - DNA, 25 bp, Homo sapien
cacggatgaggtagcagtgacgaca

SEQ ID NO: 4452251 - DNA, 25 bp, Homo sapien
tggagcacccgttttgtacaaggaa

SEQ ID NO: 4452252 - DNA, 25 bp, Homo sapien
gaaatggcacatacatagaggtact

SEQ ID NO: 4452253 - DNA, 25 bp, Homo sapien
gcacaatgaggcaatatgacacacc

SEQ ID NO: 4452254 - DNA, 25 bp, Homo sapien
taattgttgctgtaaggacctcctg

SEQ ID NO: 4452255 - DNA, 25 bp, Homo sapien
caaggctctgtcaattgctggaaaa

SEQ ID NO: 4452256 - DNA, 25 bp, Homo sapien
ctagaacactggggaactcaggtga

SEQ ID NO: 4452257 - DNA, 25 bp, Homo sapien
aactcagaacctggggtgcggcgat

SEQ ID NO: 4452258 - DNA, 25 bp, Homo sapien
actggggaactcaggtgaggagcaa

SEQ ID NO: 4452259 - DNA, 25 bp, Homo sapien
agtaactcagaacctggggtgcggc

SEQ ID NO: 4452260 - DNA, 25 bp, Homo sapien
ggagcctgccataagtgctttcaca

SEQ ID NO: 4452261 - DNA, 25 bp, Homo sapien
taccttggatatcatagggattctc

SEQ ID NO: 4452262 - DNA, 25 bp, Homo sapien
cagccatcgtatccctttaccttgg

SEQ ID NO: 4452263 - DNA, 25 bp, Homo sapien
ggtgtgatgcgtttcttttggagcc

SEQ ID NO: 4452264 - DNA, 25 bp, Homo sapien
gaaatatcccaacagcagaacaccc

SEQ ID NO: 4452265 - DNA, 25 bp, Homo sapien
gctgattgtatcttttaaggtttgg

SEQ ID NO: 4452266 - DNA, 25 bp, Homo sapien
tgattgtatcttttaaggtttggtg

SEQ ID NO: 4452267 - DNA, 25 bp, Homo sapien
cttgtgaacttctgttgctgattgt

SEQ ID NO: 4452268 - DNA, 25 bp, Homo sapien
tgcaaggaaagtaaatcagtagggt

SEQ ID NO: 4452269 - DNA, 25 bp, Homo sapien
aggaaagtaaatcagtagggtacat

SEQ ID NO: 4452270 - DNA, 25 bp, Homo sapien
gcaaggaaagtaaatcagtagggta

SEQ ID NO: 4452271 - DNA, 25 bp, Homo sapien
ctttcctttgaaggtgcaaggaaag

SEQ ID NO: 4452272 - DNA, 25 bp, Homo sapien
accacgatcacaagacccatcctgt

SEQ ID NO: 4452273 - DNA, 25 bp, Homo sapien
gtagaatttcttacaccacgatcac

SEQ ID NO: 4452274 - DNA, 25 bp, Homo sapien
cacgatcacaagacccatcctgtga

SEQ ID NO: 4452275 - DNA, 25 bp, Homo sapien
agaatttcttacaccacgatcacaa

SEQ ID NO: 4452276 - DNA, 25 bp, Homo sapien
aggagagacttatgcctggaggaac

SEQ ID NO: 4452277 - DNA, 25 bp, Homo sapien
atggaggagagacttatgcctggag

SEQ ID NO: 4452278 - DNA, 25 bp, Homo sapien
gaacttggaaatcaaactcagtaag

SEQ ID NO: 4452279 - DNA, 25 bp, Homo sapien
taagtgtattatgtgttgttgatac

SEQ ID NO: 4452280 - DNA, 25 bp, Homo sapien
agaactgttccactgccttccctgc

SEQ ID NO: 4452281 - DNA, 25 bp, Homo sapien
ctggaatgagaactgttccactgcc

SEQ ID NO: 4452282 - DNA, 25 bp, Homo sapien
tggaatgagaactgttccactgcct

SEQ ID NO: 4452283 - DNA, 25 bp, Homo sapien
atgagaactgttccactgccttccc

SEQ ID NO: 4452284 - DNA, 25 bp, Homo sapien
tggaaaggatgacactgagctagtg

SEQ ID NO: 4452285 - DNA, 25 bp, Homo sapien
cagagaaggacacgggtcacagaaa

SEQ ID NO: 4452286 - DNA, 25 bp, Homo sapien
agtctggaaaggatgacactgagct

SEQ ID NO: 4452287 - DNA, 25 bp, Homo sapien
gggtcagagaaggacacgggtcaca

SEQ ID NO: 4452288 - DNA, 25 bp, Homo sapien
cactcactttaaatggctcagctgc

SEQ ID NO: 4452289 - DNA, 25 bp, Homo sapien
tcactcactttaaatggctcagctg

SEQ ID NO: 4452290 - DNA, 25 bp, Homo sapien
caaaggctgttagagaactcagagc

SEQ ID NO: 4452291 - DNA, 25 bp, Homo sapien
tagcactgcccctaacttcagagat

SEQ ID NO: 4452292 - DNA, 25 bp, Homo sapien
tctgtgcgaacaagctcccaagagg

SEQ ID NO: 4452293 - DNA, 25 bp, Homo sapien
gaggagggcagcttgtaacttacaa

SEQ ID NO: 4452294 - DNA, 25 bp, Homo sapien
tctttatagtattaagtttgagaca

SEQ ID NO: 4452295 - DNA, 25 bp, Homo sapien
ctaatatggtctttatagtattaag

SEQ ID NO: 4452296 - DNA, 25 bp, Homo sapien
tggtctttatagtattaagtttgag

SEQ ID NO: 4452297 - DNA, 25 bp, Homo sapien
tagtattaagtttgagacatatgct

SEQ ID NO: 4452298 - DNA, 25 bp, Homo sapien
gaggagagtcaaaagcagtgtgccc

SEQ ID NO: 4452299 - DNA, 25 bp, Homo sapien
cagaaagaatgtagtaggatccatg

SEQ ID NO: 4452300 - DNA, 25 bp, Homo sapien
acttgttgcagtccggtaggtgtct

SEQ ID NO: 4452301 - DNA, 25 bp, Homo sapien
ttgacaagaagtctagaggagagtc

SEQ ID NO: 4452302 - DNA, 25 bp, Homo sapien
gcatgattcaaagtagtctgcctaa

SEQ ID NO: 4452303 - DNA, 25 bp, Homo sapien
gagactttagaaggcacctaattca

SEQ ID NO: 4452304 - DNA, 25 bp, Homo sapien
tttggctgctcttaatggaatgaac

SEQ ID NO: 4452305 - DNA, 25 bp, Homo sapien
cacttgatatgtctaaggcactgca

SEQ ID NO: 4452306 - DNA, 25 bp, Homo sapien
cctgggccccgtgcggctttggtca

SEQ ID NO: 4452307 - DNA, 25 bp, Homo sapien
agtaggtgctctgtgcacgtgtgtt

SEQ ID NO: 4452308 - DNA, 25 bp, Homo sapien
tgcacgtgtgttgaccgagtacaag

SEQ ID NO: 4452309 - DNA, 25 bp, Homo sapien
tgaccgagtacaagtgacgctggca

SEQ ID NO: 4452310 - DNA, 25 bp, Homo sapien
gtgacgctggcacccgaagccagta

SEQ ID NO: 4452311 - DNA, 25 bp, Homo sapien
tgggaagcccgcctcgtttccaggc

SEQ ID NO: 4452312 - DNA, 25 bp, Homo sapien
ttcattcctccaatatcctacttag

SEQ ID NO: 4452313 - DNA, 25 bp, Homo sapien
taacgtgtcatttagacctcttcat

SEQ ID NO: 4452314 - DNA, 25 bp, Homo sapien
tccaatatcctacttagaagtgaca

SEQ ID NO: 4452315 - DNA, 25 bp, Homo sapien
ccaaatcccgcggtggtggactgcc

SEQ ID NO: 4452316 - DNA, 25 bp, Homo sapien
aaatcccgcggtggtggactgcccg

SEQ ID NO: 4452317 - DNA, 25 bp, Homo sapien
tcccgcggtggtggactgcccgcat

SEQ ID NO: 4452318 - DNA, 25 bp, Homo sapien
ccccaaatcccgcggtggtggactg

SEQ ID NO: 4452319 - DNA, 25 bp, Homo sapien
ggtaagttctgattcacgggtgagc

SEQ ID NO: 4452320 - DNA, 25 bp, Homo sapien
ggactagagtttcctcgcggtaaca

SEQ ID NO: 4452321 - DNA, 25 bp, Homo sapien
gatgcgagtgctccttaagggcctc

SEQ ID NO: 4452322 - DNA, 25 bp, Homo sapien
gaagttggtcttccgccaggactag

SEQ ID NO: 4452323 - DNA, 25 bp, Homo sapien
tgaggaaggcggagacttctgcctc

SEQ ID NO: 4452324 - DNA, 25 bp, Homo sapien
aggcggagacttctgcctcctcgct

SEQ ID NO: 4452325 - DNA, 25 bp, Homo sapien
gccctgagctggcacggctccgccc

SEQ ID NO: 4452326 - DNA, 25 bp, Homo sapien
acggctccgcccaccgggcgagctt

SEQ ID NO: 4452327 - DNA, 25 bp, Homo sapien
aacagccgtactttgcaactgcagg

SEQ ID NO: 4452328 - DNA, 25 bp, Homo sapien
tggcgcccgctttcaaacagccgta

SEQ ID NO: 4452329 - DNA, 25 bp, Homo sapien
gggtgacttcctcgtaattggctct

SEQ ID NO: 4452330 - DNA, 25 bp, Homo sapien
tggctctcgaatccaccaatgggcg

SEQ ID NO: 4452331 - DNA, 25 bp, Homo sapien
ctgctgcaccctggccgaaggtagc

SEQ ID NO: 4452332 - DNA, 25 bp, Homo sapien
aagcgcctcggcgtctctaggcaac

SEQ ID NO: 4452333 - DNA, 25 bp, Homo sapien
aaggggtccccgtaagactgctgca

SEQ ID NO: 4452334 - DNA, 25 bp, Homo sapien
cagtctccggtaccaaacgggcaag

SEQ ID NO: 4452335 - DNA, 25 bp, Homo sapien
tttactccgtgccagtacacatggg

SEQ ID NO: 4452336 - DNA, 25 bp, Homo sapien
gagaagatagacacagtactgggct

SEQ ID NO: 4452337 - DNA, 25 bp, Homo sapien
tactgggctttactgaggactgggt

SEQ ID NO: 4452338 - DNA, 25 bp, Homo sapien
gaaaggatatgtgaacctgccgcca

SEQ ID NO: 4452339 - DNA, 25 bp, Homo sapien
cttgataaacccgaaaaatgcactc

SEQ ID NO: 4452340 - DNA, 25 bp, Homo sapien
aatattgcacatccaaatgatgatc

SEQ ID NO: 4452341 - DNA, 25 bp, Homo sapien
gatgatcattcttgataaacccgaa

SEQ ID NO: 4452342 - DNA, 25 bp, Homo sapien
gagcaagagctttgtaatattgcac

SEQ ID NO: 4452343 - DNA, 25 bp, Homo sapien
tggtcaatatcacttctgacagctt

SEQ ID NO: 4452344 - DNA, 25 bp, Homo sapien
cttctgacagcttttactggtttct

SEQ ID NO: 4452345 - DNA, 25 bp, Homo sapien
aatggtcaatatcacttctgacagc

SEQ ID NO: 4452346 - DNA, 25 bp, Homo sapien
tctgacagcttttactggtttctga

SEQ ID NO: 4452347 - DNA, 25 bp, Homo sapien
gagctacgtttccatcgattcgaac

SEQ ID NO: 4452348 - DNA, 25 bp, Homo sapien
tcgaacttcgtatctagggaccctg

SEQ ID NO: 4452349 - DNA, 25 bp, Homo sapien
tgtgcaaaccgctcaacctctagga

SEQ ID NO: 4452350 - DNA, 25 bp, Homo sapien
tacttggcgcgccactgtggttgga

SEQ ID NO: 4452351 - DNA, 25 bp, Homo sapien
ctccatctgcggaaggtcaccctcg

SEQ ID NO: 4452352 - DNA, 25 bp, Homo sapien
catacagctcggacaactcagccat

SEQ ID NO: 4452353 - DNA, 25 bp, Homo sapien
tcttcatacagctcggacaactcag

SEQ ID NO: 4452354 - DNA, 25 bp, Homo sapien
ggaaggtcaccctcgccaggcatca

SEQ ID NO: 4452355 - DNA, 25 bp, Homo sapien
cgggagggacgcagggatagctccc

SEQ ID NO: 4452356 - DNA, 25 bp, Homo sapien
ggacgcagggatagctcccggctcc

SEQ ID NO: 4452357 - DNA, 25 bp, Homo sapien
cctcgagctgttgggccccgctgcg

SEQ ID NO: 4452358 - DNA, 25 bp, Homo sapien
gggccttcctcctcgagctgttggg

SEQ ID NO: 4452359 - DNA, 25 bp, Homo sapien
ctggctgctccccagcgttgggccc

SEQ ID NO: 4452360 - DNA, 25 bp, Homo sapien
gctccgtttcccctctggcgccgcc

SEQ ID NO: 4452361 - DNA, 25 bp, Homo sapien
cgtttcccctctggcgccgccattg

SEQ ID NO: 4452362 - DNA, 25 bp, Homo sapien
tgctccccagcgttgggcccgttag

SEQ ID NO: 4452363 - DNA, 25 bp, Homo sapien
cagtcatcaaattcctcgccctcgt

SEQ ID NO: 4452364 - DNA, 25 bp, Homo sapien
tcgtcctcgctctcgaagtctgcgc

SEQ ID NO: 4452365 - DNA, 25 bp, Homo sapien
gctcctcttcgggatagtcgtagtc

SEQ ID NO: 4452366 - DNA, 25 bp, Homo sapien
gtcgtagtcgtcctcccagtcatca

SEQ ID NO: 4452367 - DNA, 25 bp, Homo sapien
ctgaaacccgccatccagggctggt

SEQ ID NO: 4452368 - DNA, 25 bp, Homo sapien
tgaaacccgccatccagggctggtt

SEQ ID NO: 4452369 - DNA, 25 bp, Homo sapien
gaaacccgccatccagggctggttc

SEQ ID NO: 4452370 - DNA, 25 bp, Homo sapien
aagctcttcgataaaagctaactga

SEQ ID NO: 4452371 - DNA, 25 bp, Homo sapien
agccgagttcttcggtcagacgatt

SEQ ID NO: 4452372 - DNA, 25 bp, Homo sapien
agctaactgatcaaacggggtcttc

SEQ ID NO: 4452373 - DNA, 25 bp, Homo sapien
cagacgattgacaaccatcagtgaa

SEQ ID NO: 4452374 - DNA, 25 bp, Homo sapien
ctactctctatcaataatctcatca

SEQ ID NO: 4452375 - DNA, 25 bp, Homo sapien
tactctctatcaataatctcatcac

SEQ ID NO: 4452376 - DNA, 25 bp, Homo sapien
tagcggaaagttgggtccctcctca

SEQ ID NO: 4452377 - DNA, 25 bp, Homo sapien
cacaaaactatttggaatgaaccca

SEQ ID NO: 4452378 - DNA, 25 bp, Homo sapien
caaagccataggtgttttaggacgt

SEQ ID NO: 4452379 - DNA, 25 bp, Homo sapien
tatcagtgggcttttgtattggcag

SEQ ID NO: 4452380 - DNA, 25 bp, Homo sapien
tgtcctagttggatacatttttttc

SEQ ID NO: 4452381 - DNA, 25 bp, Homo sapien
tggatacatttttttctcattatat

SEQ ID NO: 4452382 - DNA, 25 bp, Homo sapien
tagttggatacatttttttctcatt

SEQ ID NO: 4452383 - DNA, 25 bp, Homo sapien
gttggatacatttttttctcattat

SEQ ID NO: 4452384 - DNA, 25 bp, Homo sapien
gataactgtggcttgactagatcac

SEQ ID NO: 4452385 - DNA, 25 bp, Homo sapien
gatacaaagcacacgtgatacatat

SEQ ID NO: 4452386 - DNA, 25 bp, Homo sapien
cacagtggctttataaatgatcaag

SEQ ID NO: 4452387 - DNA, 25 bp, Homo sapien
caaaatttcagatgctcttggaaac

SEQ ID NO: 4452388 - DNA, 25 bp, Homo sapien
ggtgcatgacaaataacaagcttaa

SEQ ID NO: 4452389 - DNA, 25 bp, Homo sapien
acaagcttaattagaggaggagaca

SEQ ID NO: 4452390 - DNA, 25 bp, Homo sapien
ttcagataccaaggtaatttctggg

SEQ ID NO: 4452391 - DNA, 25 bp, Homo sapien
ttattatctccaatgctggtgcatg

SEQ ID NO: 4452392 - DNA, 25 bp, Homo sapien
tactcattgatagggcaggttttcc

SEQ ID NO: 4452393 - DNA, 25 bp, Homo sapien
gctgaacctagccttctgatgtaat

SEQ ID NO: 4452394 - DNA, 25 bp, Homo sapien
ggtaaccacggcaacatactcattg

SEQ ID NO: 4452395 - DNA, 25 bp, Homo sapien
tcagcatcttagtaaggtaaccacg

SEQ ID NO: 4452396 - DNA, 25 bp, Homo sapien
tagaggccaagtaggtaatgcaagc

SEQ ID NO: 4452397 - DNA, 25 bp, Homo sapien
gaaaaaacaatggtgcaggcccaat

SEQ ID NO: 4452398 - DNA, 25 bp, Homo sapien
taggtctataggtcaaaggctccca

SEQ ID NO: 4452399 - DNA, 25 bp, Homo sapien
tagggcctcaagcaaagtcagagtc

SEQ ID NO: 4452400 - DNA, 25 bp, Homo sapien
gcctccagttaagttcctatcaaca

SEQ ID NO: 4452401 - DNA, 25 bp, Homo sapien
tggactttgactcatttttaacatt

SEQ ID NO: 4452402 - DNA, 25 bp, Homo sapien
tccagttaagttcctatcaacagtc

SEQ ID NO: 4452403 - DNA, 25 bp, Homo sapien
aaagcctccagttaagttcctatca

SEQ ID NO: 4452404 - DNA, 25 bp, Homo sapien
tgaacacatagatcactgagccttg

SEQ ID NO: 4452405 - DNA, 25 bp, Homo sapien
gcttatcgccacagaggcaggttcc

SEQ ID NO: 4452406 - DNA, 25 bp, Homo sapien
cctgtctgagggctttcacaaattc

SEQ ID NO: 4452407 - DNA, 25 bp, Homo sapien
ggcaggttcctgttctaaagtgtcc

SEQ ID NO: 4452408 - DNA, 25 bp, Homo sapien
agatttagtccctgggggagccact

SEQ ID NO: 4452409 - DNA, 25 bp, Homo sapien
actgttgttcctccactaactctca

SEQ ID NO: 4452410 - DNA, 25 bp, Homo sapien
cactaactctcacccaggcattcat

SEQ ID NO: 4452411 - DNA, 25 bp, Homo sapien
ggggagccacttgaatggcttttac

SEQ ID NO: 4452412 - DNA, 25 bp, Homo sapien
gggaagatatctggtatggtatctg

SEQ ID NO: 4452413 - DNA, 25 bp, Homo sapien
caaggggaagatatctggtatggta

SEQ ID NO: 4452414 - DNA, 25 bp, Homo sapien
ggaagatatctggtatggtatctgg

SEQ ID NO: 4452415 - DNA, 25 bp, Homo sapien
aggggaagatatctggtatggtatc

SEQ ID NO: 4452416 - DNA, 25 bp, Homo sapien
gactgcaggatatagggacgcaaga

SEQ ID NO: 4452417 - DNA, 25 bp, Homo sapien
agccaggactgcaggatatagggac

SEQ ID NO: 4452418 - DNA, 25 bp, Homo sapien
gatatagggacgcaagacctaggct

SEQ ID NO: 4452419 - DNA, 25 bp, Homo sapien
caggatatagggacgcaagacctag

SEQ ID NO: 4452420 - DNA, 25 bp, Homo sapien
tcaactctatcatccagggctgttc

SEQ ID NO: 4452421 - DNA, 25 bp, Homo sapien
gttcccacccacagcttatagcccg

SEQ ID NO: 4452422 - DNA, 25 bp, Homo sapien
cactgtcaactctatcatccagggc

SEQ ID NO: 4452423 - DNA, 25 bp, Homo sapien
tttaaagttcccactgtcaactcta

SEQ ID NO: 4452424 - DNA, 25 bp, Homo sapien
aaatattctcccatactcctagcca

SEQ ID NO: 4452425 - DNA, 25 bp, Homo sapien
ttctcccatactcctagccaagatg

SEQ ID NO: 4452426 - DNA, 25 bp, Homo sapien
cccatactcctagccaagatgcagg

SEQ ID NO: 4452427 - DNA, 25 bp, Homo sapien
gcagggcctgtgccttaaacttctc

SEQ ID NO: 4452428 - DNA, 25 bp, Homo sapien
cggctgctgggatcaattattcagt

SEQ ID NO: 4452429 - DNA, 25 bp, Homo sapien
gttaaacggctgctgggatcaatta

SEQ ID NO: 4452430 - DNA, 25 bp, Homo sapien
gctgggatcaattattcagttgttc

SEQ ID NO: 4452431 - DNA, 25 bp, Homo sapien
ccagttaaacggctgctgggatcaa

SEQ ID NO: 4452432 - DNA, 25 bp, Homo sapien
tcattgcctgcccttcataactcgc

SEQ ID NO: 4452433 - DNA, 25 bp, Homo sapien
actcgccccagcgtccttcctctga

SEQ ID NO: 4452434 - DNA, 25 bp, Homo sapien
tagccccttgcatcccagtgctcat

SEQ ID NO: 4452435 - DNA, 25 bp, Homo sapien
ccatagccccttgcatcccagtgct

SEQ ID NO: 4452436 - DNA, 25 bp, Homo sapien
ctcttgcacatgctgtgcccattgt

SEQ ID NO: 4452437 - DNA, 25 bp, Homo sapien
acatgctgtgcccattgtctggaaa

SEQ ID NO: 4452438 - DNA, 25 bp, Homo sapien
cattgtctggaaattcctccaccat

SEQ ID NO: 4452439 - DNA, 25 bp, Homo sapien
tgtgcccattgtctggaaattcctc

SEQ ID NO: 4452440 - DNA, 25 bp, Homo sapien
cagacatgaccacacattgaacatg

SEQ ID NO: 4452441 - DNA, 25 bp, Homo sapien
attgaacatgcaaagtcctagagcg

SEQ ID NO: 4452442 - DNA, 25 bp, Homo sapien
aatgaggttctttgcccacatggtc

SEQ ID NO: 4452443 - DNA, 25 bp, Homo sapien
tcaatgaggttctttgcccacatgg

SEQ ID NO: 4452444 - DNA, 25 bp, Homo sapien
gagtcagaattcactgctccaggta

SEQ ID NO: 4452445 - DNA, 25 bp, Homo sapien
tttgagctgcatttccgcaaagccg

SEQ ID NO: 4452446 - DNA, 25 bp, Homo sapien
gacaactcttgtgtttcatgtaaaa

SEQ ID NO: 4452447 - DNA, 25 bp, Homo sapien
caaagccgtattgttgactgctgct

SEQ ID NO: 4452448 - DNA, 25 bp, Homo sapien
gcttctccctttagatgtcagtctt

SEQ ID NO: 4452449 - DNA, 25 bp, Homo sapien
cagtaagaatctcgacacagtaaag

SEQ ID NO: 4452450 - DNA, 25 bp, Homo sapien
catcactaggcaatcattgactttt

SEQ ID NO: 4452451 - DNA, 25 bp, Homo sapien
cacagtaaagctcatttagttgaca

SEQ ID NO: 4452452 - DNA, 25 bp, Homo sapien
tttattgaaagacaagacccagagg

SEQ ID NO: 4452453 - DNA, 25 bp, Homo sapien
caagacccagaggtgctggatgacc

SEQ ID NO: 4452454 - DNA, 25 bp, Homo sapien
cacttctagccattcctttattgaa

SEQ ID NO: 4452455 - DNA, 25 bp, Homo sapien
tctagccattcctttattgaaagac

SEQ ID NO: 4452456 - DNA, 25 bp, Homo sapien
caacatcaatcttctagagggccct

SEQ ID NO: 4452457 - DNA, 25 bp, Homo sapien
tgaatcagcaacgagaagggtgtct

SEQ ID NO: 4452458 - DNA, 25 bp, Homo sapien
gaatcctatccaagaccctgtgtat

SEQ ID NO: 4452459 - DNA, 25 bp, Homo sapien
gaaaatgatatatagagagtgtccc

SEQ ID NO: 4452460 - DNA, 25 bp, Homo sapien
tgccctctaagaacttccgtggaag

SEQ ID NO: 4452461 - DNA, 25 bp, Homo sapien
tctctgccctctaagaacttccgtg

SEQ ID NO: 4452462 - DNA, 25 bp, Homo sapien
tgaactactgtgtgagggtaagtcc

SEQ ID NO: 4452463 - DNA, 25 bp, Homo sapien
gcatgaactactgtgtgagggtaag

SEQ ID NO: 4452464 - DNA, 25 bp, Homo sapien
tgtatgtaggactcttcgggcaccc

SEQ ID NO: 4452465 - DNA, 25 bp, Homo sapien
aacgagtcgatcacgtccttggacg

SEQ ID NO: 4452466 - DNA, 25 bp, Homo sapien
taccagacgacgaggcgatttatgc

SEQ ID NO: 4452467 - DNA, 25 bp, Homo sapien
actgccaaggctatgcgagaacgcg

SEQ ID NO: 4452468 - DNA, 25 bp, Homo sapien
ccacttccagttgcagatctggtct

SEQ ID NO: 4452469 - DNA, 25 bp, Homo sapien
tcagcctagaggctattccccactt

SEQ ID NO: 4452470 - DNA, 25 bp, Homo sapien
tcgtaaaacgctgtagcagagctac

SEQ ID NO: 4452471 - DNA, 25 bp, Homo sapien
cagagctacccaggacagccaaggt

SEQ ID NO: 4452472 - DNA, 25 bp, Homo sapien
taggacttctgggtcaccctgatgg

SEQ ID NO: 4452473 - DNA, 25 bp, Homo sapien
cttgtaggacttctgggtcaccctg

SEQ ID NO: 4452474 - DNA, 25 bp, Homo sapien
acttctgggtcaccctgatggacat

SEQ ID NO: 4452475 - DNA, 25 bp, Homo sapien
gacttctgggtcaccctgatggaca

SEQ ID NO: 4452476 - DNA, 25 bp, Homo sapien
acacagacccatgctggtgcccagg

SEQ ID NO: 4452477 - DNA, 25 bp, Homo sapien
acagacccatgctggtgcccaggac

SEQ ID NO: 4452478 - DNA, 25 bp, Homo sapien
cacacagacccatgctggtgcccag

SEQ ID NO: 4452479 - DNA, 25 bp, Homo sapien
tccacacagacccatgctggtgccc

SEQ ID NO: 4452480 - DNA, 25 bp, Homo sapien
cctcccatacgctggccccgcatag

SEQ ID NO: 4452481 - DNA, 25 bp, Homo sapien
gctgtgatgcctcccatacgctggc

SEQ ID NO: 4452482 - DNA, 25 bp, Homo sapien
atgcctcccatacgctggccccgca

SEQ ID NO: 4452483 - DNA, 25 bp, Homo sapien
tgacggctgtgatgcctcccatacg

SEQ ID NO: 4452484 - DNA, 25 bp, Homo sapien
ccttcacgaaaaacatgcagagccc

SEQ ID NO: 4452485 - DNA, 25 bp, Homo sapien
tcagcccctccaggcgaaactctag

SEQ ID NO: 4452486 - DNA, 25 bp, Homo sapien
tcctccttcacgaaaaacatgcaga

SEQ ID NO: 4452487 - DNA, 25 bp, Homo sapien
cctccaggcgaaactctagctctac

SEQ ID NO: 4452488 - DNA, 25 bp, Homo sapien
gctacataatctcagcctcgggccg

SEQ ID NO: 4452489 - DNA, 25 bp, Homo sapien
tgctacataatctcagcctcgggcc

SEQ ID NO: 4452490 - DNA, 25 bp, Homo sapien
ctgctacataatctcagcctcgggc

SEQ ID NO: 4452491 - DNA, 25 bp, Homo sapien
tagtcttggcgtccttaatggccag

SEQ ID NO: 4452492 - DNA, 25 bp, Homo sapien
gctcggacagcttagtcttggcgtc

SEQ ID NO: 4452493 - DNA, 25 bp, Homo sapien
gacagcttagtcttggcgtccttaa

SEQ ID NO: 4452494 - DNA, 25 bp, Homo sapien
tcagaaatcttcgtctttgtaagac

SEQ ID NO: 4452495 - DNA, 25 bp, Homo sapien
atgttttgccaggtagagccattta

SEQ ID NO: 4452496 - DNA, 25 bp, Homo sapien
gctgctaacttatgttttgccaggt

SEQ ID NO: 4452497 - DNA, 25 bp, Homo sapien
tgttttgccaggtagagccatttaa

SEQ ID NO: 4452498 - DNA, 25 bp, Homo sapien
aaatagggctgctaacttatgtttt

SEQ ID NO: 4452499 - DNA, 25 bp, Homo sapien
ccgggcttctcgagaagggcacagc

SEQ ID NO: 4452500 - DNA, 25 bp, Homo sapien
ttttcagggagaccgtgcgaaagcg

SEQ ID NO: 4452501 - DNA, 25 bp, Homo sapien
ggtgctccgctggtctttttcaggg

SEQ ID NO: 4452502 - DNA, 25 bp, Homo sapien
ctttgatgctgtgcgcctggcagcc

SEQ ID NO: 4452503 - DNA, 25 bp, Homo sapien
catcttagggaaagaacttggccct

SEQ ID NO: 4452504 - DNA, 25 bp, Homo sapien
tacaacacgtgtgcataggcgcctt

SEQ ID NO: 4452505 - DNA, 25 bp, Homo sapien
caagttcgcattgctgtacaacacg

SEQ ID NO: 4452506 - DNA, 25 bp, Homo sapien
tctcgatagaaacactgaccgctgt

SEQ ID NO: 4452507 - DNA, 25 bp, Homo sapien
tgttggcacatcacaccttgaaagt

SEQ ID NO: 4452508 - DNA, 25 bp, Homo sapien
catacatcacagaatcaaccaaact

SEQ ID NO: 4452509 - DNA, 25 bp, Homo sapien
caaactgtttgcctaatctgaaatc

SEQ ID NO: 4452510 - DNA, 25 bp, Homo sapien
tctgaaatctgaatcctaatgagaa

SEQ ID NO: 4452511 - DNA, 25 bp, Homo sapien
tcaactctttaacatgaaactgttc

SEQ ID NO: 4452512 - DNA, 25 bp, Homo sapien
catgaaactgttcaatcttaacaca

SEQ ID NO: 4452513 - DNA, 25 bp, Homo sapien
caaatgagtagtgaatgctacactc

SEQ ID NO: 4452514 - DNA, 25 bp, Homo sapien
gtgcaaatgagtagtgaatgctaca

SEQ ID NO: 4452515 - DNA, 25 bp, Homo sapien
ctggcaataattaataatagatttc

SEQ ID NO: 4452516 - DNA, 25 bp, Homo sapien
attacacttccaaagttagatttct

SEQ ID NO: 4452517 - DNA, 25 bp, Homo sapien
tcatattagcttaattttcggttta

SEQ ID NO: 4452518 - DNA, 25 bp, Homo sapien
ttttactggcaataattaataatag

SEQ ID NO: 4452519 - DNA, 25 bp, Homo sapien
cattgtccagccatcgaagcagaaa

SEQ ID NO: 4452520 - DNA, 25 bp, Homo sapien
cagaatgcactgagcgtccaagtca

SEQ ID NO: 4452521 - DNA, 25 bp, Homo sapien
ccttgaatgggaactttggactgcc

SEQ ID NO: 4452522 - DNA, 25 bp, Homo sapien
cagtaacagaggatcagtggtccca

SEQ ID NO: 4452523 - DNA, 25 bp, Homo sapien
taagtactgtgttttgtttcggcat

SEQ ID NO: 4452524 - DNA, 25 bp, Homo sapien
gtaagtactgtgttttgtttcggca

SEQ ID NO: 4452525 - DNA, 25 bp, Homo sapien
tgtaagtactgtgttttgtttcggc

SEQ ID NO: 4452526 - DNA, 25 bp, Homo sapien
aggcggagggctcgccgttgccgct

SEQ ID NO: 4452527 - DNA, 25 bp, Homo sapien
ttcccaggcggagggctcgccgttg

SEQ ID NO: 4452528 - DNA, 25 bp, Homo sapien
ggtcagaaggctccaagttgtccct

SEQ ID NO: 4452529 - DNA, 25 bp, Homo sapien
ctgcttggtgaaggggtcagaaggc

SEQ ID NO: 4452530 - DNA, 25 bp, Homo sapien
cggaacccagtctggacccgagcgg

SEQ ID NO: 4452531 - DNA, 25 bp, Homo sapien
tcctcggccagtggcgtagccgaat

SEQ ID NO: 4452532 - DNA, 25 bp, Homo sapien
ccgaggcgctgtttacaccgactag

SEQ ID NO: 4452533 - DNA, 25 bp, Homo sapien
tagccgaatcggtgtcgcggccagc

SEQ ID NO: 4452534 - DNA, 25 bp, Homo sapien
ctccataaaccaggtgatccctcgg

SEQ ID NO: 4452535 - DNA, 25 bp, Homo sapien
tcagaggatacgattgtgaactcca

SEQ ID NO: 4452536 - DNA, 25 bp, Homo sapien
gtgatccctcggcatctcatctaac

SEQ ID NO: 4452537 - DNA, 25 bp, Homo sapien
tgtgaactccataaaccaggtgatc

SEQ ID NO: 4452538 - DNA, 25 bp, Homo sapien
agttgtagctgactgcaaacaatct

SEQ ID NO: 4452539 - DNA, 25 bp, Homo sapien
tagtcaagtacagcaatgagaggtg

SEQ ID NO: 4452540 - DNA, 25 bp, Homo sapien
caaacaatctacaggactcactccc

SEQ ID NO: 4452541 - DNA, 25 bp, Homo sapien
aacaatctacaggactcactccctg

SEQ ID NO: 4452542 - DNA, 25 bp, Homo sapien
ctttccctgataggctattcccttg

SEQ ID NO: 4452543 - DNA, 25 bp, Homo sapien
aggtttggggtctgccatcaccacc

SEQ ID NO: 4452544 - DNA, 25 bp, Homo sapien
tgataggctattcccttgtcctgtt

SEQ ID NO: 4452545 - DNA, 25 bp, Homo sapien
cacttttctttaacagagtcccagc

SEQ ID NO: 4452546 - DNA, 25 bp, Homo sapien
tattaagcccatcgtagtgagttga

SEQ ID NO: 4452547 - DNA, 25 bp, Homo sapien
tgagttgaataatgtcaccccaaaa

SEQ ID NO: 4452548 - DNA, 25 bp, Homo sapien
tcatgtatactaagacctcagaatg

SEQ ID NO: 4452549 - DNA, 25 bp, Homo sapien
taaagatcttaagatgaaagcatcc

SEQ ID NO: 4452550 - DNA, 25 bp, Homo sapien
cataccagtggtttacatcatattg

SEQ ID NO: 4452551 - DNA, 25 bp, Homo sapien
taaacctagctaaaagttactgcaa

SEQ ID NO: 4452552 - DNA, 25 bp, Homo sapien
gatgctctctactacaagagctgga

SEQ ID NO: 4452553 - DNA, 25 bp, Homo sapien
tggctgccacaagtagatgctctct

SEQ ID NO: 4452554 - DNA, 25 bp, Homo sapien
tatcctccaattcttacagtgccca

SEQ ID NO: 4452555 - DNA, 25 bp, Homo sapien
tgtacaatagtgcatcttccacttt

SEQ ID NO: 4452556 - DNA, 25 bp, Homo sapien
gtgctatctttgctttgtacaatag

SEQ ID NO: 4452557 - DNA, 25 bp, Homo sapien
tcttacagtgcccagttctcctgtg

SEQ ID NO: 4452558 - DNA, 25 bp, Homo sapien
aggctggaaactgctcgatgcgagc

SEQ ID NO: 4452559 - DNA, 25 bp, Homo sapien
gacgatgtcccagttgccagcttta

SEQ ID NO: 4452560 - DNA, 25 bp, Homo sapien
gtttccgacgcccttcggctgagac

SEQ ID NO: 4452561 - DNA, 25 bp, Homo sapien
gccagctttagttgctaaggcacca

SEQ ID NO: 4452562 - DNA, 25 bp, Homo sapien
tccgcgaaaggcttctggtcctaag

SEQ ID NO: 4452563 - DNA, 25 bp, Homo sapien
gcatgtcagccttttctccgcgaaa

SEQ ID NO: 4452564 - DNA, 25 bp, Homo sapien
gaatgagatgcgtccagagtcccaa

SEQ ID NO: 4452565 - DNA, 25 bp, Homo sapien
cccttactttcaccggaatgagatg

SEQ ID NO: 4452566 - DNA, 25 bp, Homo sapien
gtgcctgggagcgagagagggcttc

SEQ ID NO: 4452567 - DNA, 25 bp, Homo sapien
tcagctgcacggaagacacaggatc

SEQ ID NO: 4452568 - DNA, 25 bp, Homo sapien
cagcagctttcagctgcacggaaga

SEQ ID NO: 4452569 - DNA, 25 bp, Homo sapien
gcctgggagcgagagagggcttcat

SEQ ID NO: 4452570 - DNA, 25 bp, Homo sapien
ttgaaaagtgtcaatgcttctacag

SEQ ID NO: 4452571 - DNA, 25 bp, Homo sapien
aaagtgtcaatgcttctacagtgga

SEQ ID NO: 4452572 - DNA, 25 bp, Homo sapien
aatctgaatttctttggctcctgac

SEQ ID NO: 4452573 - DNA, 25 bp, Homo sapien
atggcctttcggcaatctgaatttc

SEQ ID NO: 4452574 - DNA, 25 bp, Homo sapien
ctgaagtcctagccactgaggaggc

SEQ ID NO: 4452575 - DNA, 25 bp, Homo sapien
agatgggaaggtcacttaaaccaag

SEQ ID NO: 4452576 - DNA, 25 bp, Homo sapien
ctgagatgggaaggtcacttaaacc

SEQ ID NO: 4452577 - DNA, 25 bp, Homo sapien
ggctgagatgggaaggtcacttaaa

SEQ ID NO: 4452578 - DNA, 25 bp, Homo sapien
cagcttatttgcatacttattttcc

SEQ ID NO: 4452579 - DNA, 25 bp, Homo sapien
agcttatttgcatacttattttccc

SEQ ID NO: 4452580 - DNA, 25 bp, Homo sapien
gaaatcagattagcgtggttccact

SEQ ID NO: 4452581 - DNA, 25 bp, Homo sapien
gcatttcaagcttacagtgtacatt

SEQ ID NO: 4452582 - DNA, 25 bp, Homo sapien
caaaaagctcctgctattatggcaa

SEQ ID NO: 4452583 - DNA, 25 bp, Homo sapien
tggttccactactttgtgaccctag

SEQ ID NO: 4452584 - DNA, 25 bp, Homo sapien
gagcacgtgcgaagctgactagtga

SEQ ID NO: 4452585 - DNA, 25 bp, Homo sapien
ctgcgcagagcacgtgcgaagctga

SEQ ID NO: 4452586 - DNA, 25 bp, Homo sapien
cgtgcgaagctgactagtgaggttt

SEQ ID NO: 4452587 - DNA, 25 bp, Homo sapien
cgaagctgactagtgaggttttctt

SEQ ID NO: 4452588 - DNA, 25 bp, Homo sapien
tgacaggagccgttttcttccggga

SEQ ID NO: 4452589 - DNA, 25 bp, Homo sapien
gcggaaatcctgcagcttcgctgag

SEQ ID NO: 4452590 - DNA, 25 bp, Homo sapien
tcctgctcttagctcccagggaggg

SEQ ID NO: 4452591 - DNA, 25 bp, Homo sapien
tcaagtgtctaagcaaagctcccag

SEQ ID NO: 4452592 - DNA, 25 bp, Homo sapien
tggacccgacgcgtagcagggctct

SEQ ID NO: 4452593 - DNA, 25 bp, Homo sapien
ctggacccgacgcgtagcagggctc

SEQ ID NO: 4452594 - DNA, 25 bp, Homo sapien
gacccgacgcgtagcagggctctct

SEQ ID NO: 4452595 - DNA, 25 bp, Homo sapien
ggacccgacgcgtagcagggctctc

SEQ ID NO: 4452596 - DNA, 25 bp, Homo sapien
agccacgtgtccttatagaatccca

SEQ ID NO: 4452597 - DNA, 25 bp, Homo sapien
tcttttttgcaagcccagccacgtg

SEQ ID NO: 4452598 - DNA, 25 bp, Homo sapien
ccttcgtagtagtcaaggtagaatg

SEQ ID NO: 4452599 - DNA, 25 bp, Homo sapien
tagaatgtgtttgcggcgtgatctt

SEQ ID NO: 4452600 - DNA, 25 bp, Homo sapien
taaaacctgccacgaagggaacatg

SEQ ID NO: 4452601 - DNA, 25 bp, Homo sapien
tataaaggctgtgcactaactgtct

SEQ ID NO: 4452602 - DNA, 25 bp, Homo sapien
tcacctactagaaaagggcatgtcc

SEQ ID NO: 4452603 - DNA, 25 bp, Homo sapien
tacaggtcgaggtgtaacaacttcc

SEQ ID NO: 4452604 - DNA, 25 bp, Homo sapien
ctaaaaaacaatttaggacagtcat

SEQ ID NO: 4452605 - DNA, 25 bp, Homo sapien
cacaagcaaagggtgatgcatgggc

SEQ ID NO: 4452606 - DNA, 25 bp, Homo sapien
ccactaatgtaagtaatgtttgtaa

SEQ ID NO: 4452607 - DNA, 25 bp, Homo sapien
caactccaccgttaccactaatgta

SEQ ID NO: 4452608 - DNA, 25 bp, Homo sapien
aaaggcacaatactctccaactcca

SEQ ID NO: 4452609 - DNA, 25 bp, Homo sapien
ctccataatgctgtcagaaaaaatc

SEQ ID NO: 4452610 - DNA, 25 bp, Homo sapien
actccataatgctgtcagaaaaaat

SEQ ID NO: 4452611 - DNA, 25 bp, Homo sapien
taatgctgtcagaaaaaatcctgcc

SEQ ID NO: 4452612 - DNA, 25 bp, Homo sapien
ataatgctgtcagaaaaaatcctgc

SEQ ID NO: 4452613 - DNA, 25 bp, Homo sapien
tgctcctccataccttcagttttca

SEQ ID NO: 4452614 - DNA, 25 bp, Homo sapien
gctcctccataccttcagttttcat

SEQ ID NO: 4452615 - DNA, 25 bp, Homo sapien
ttctgctcctccataccttcagttt

SEQ ID NO: 4452616 - DNA, 25 bp, Homo sapien
tctgctcctccataccttcagtttt

SEQ ID NO: 4452617 - DNA, 25 bp, Homo sapien
aaacttgggaatagatccaaacttg

SEQ ID NO: 4452618 - DNA, 25 bp, Homo sapien
ttcctggtgctcgaacataaaactt

SEQ ID NO: 4452619 - DNA, 25 bp, Homo sapien
tggtgctcgaacataaaacttggga

SEQ ID NO: 4452620 - DNA, 25 bp, Homo sapien
ggaatagatccaaacttggagttaa

SEQ ID NO: 4452621 - DNA, 25 bp, Homo sapien
ataggccccaatatctcaccattta

SEQ ID NO: 4452622 - DNA, 25 bp, Homo sapien
ggccccaatatctcaccatttataa

SEQ ID NO: 4452623 - DNA, 25 bp, Homo sapien
ccccaatatctcaccatttataaaa

SEQ ID NO: 4452624 - DNA, 25 bp, Homo sapien
taggccccaatatctcaccatttat

SEQ ID NO: 4452625 - DNA, 25 bp, Homo sapien
tatccacaataatctatatgctctc

SEQ ID NO: 4452626 - DNA, 25 bp, Homo sapien
gatacaagggatttgtattggccag

SEQ ID NO: 4452627 - DNA, 25 bp, Homo sapien
tattggccagttggagagcgtacgt

SEQ ID NO: 4452628 - DNA, 25 bp, Homo sapien
gagagcgtacgttttcacaggttct

SEQ ID NO: 4452629 - DNA, 25 bp, Homo sapien
cacaggttctacagctattagcaca

SEQ ID NO: 4452630 - DNA, 25 bp, Homo sapien
caagaatggtgtggcctatctgcag

SEQ ID NO: 4452631 - DNA, 25 bp, Homo sapien
ccatgaagcagtaacagggattggg

SEQ ID NO: 4452632 - DNA, 25 bp, Homo sapien
tggcccacttctgaacaggccatga

SEQ ID NO: 4452633 - DNA, 25 bp, Homo sapien
gggaaccctgctctacaggaccagt

SEQ ID NO: 4452634 - DNA, 25 bp, Homo sapien
gtggccttagtgactaaactacctc

SEQ ID NO: 4452635 - DNA, 25 bp, Homo sapien
cttagtgactaaactacctccaact

SEQ ID NO: 4452636 - DNA, 25 bp, Homo sapien
agctgctaagagttaagagaggaag

SEQ ID NO: 4452637 - DNA, 25 bp, Homo sapien
tgctaagagttaagagaggaagttg

SEQ ID NO: 4452638 - DNA, 25 bp, Homo sapien
taagaaatagttgtgccacaaaggc

SEQ ID NO: 4452639 - DNA, 25 bp, Homo sapien
gttattagcactagtactgaagtcc

SEQ ID NO: 4452640 - DNA, 25 bp, Homo sapien
aagtccacataagaaatagttgtgc

SEQ ID NO: 4452641 - DNA, 25 bp, Homo sapien
ttggttttatcaatctggatgttat

SEQ ID NO: 4452642 - DNA, 25 bp, Homo sapien
gggatatttccatctaccaggcagt

SEQ ID NO: 4452643 - DNA, 25 bp, Homo sapien
agcactgtgagcgtcaccaagccag

SEQ ID NO: 4452644 - DNA, 25 bp, Homo sapien
tcaggttactaagaccaaagtgttc

SEQ ID NO: 4452645 - DNA, 25 bp, Homo sapien
aagccagcacaacagaccaaagcac

SEQ ID NO: 4452646 - DNA, 25 bp, Homo sapien
tctatgaggtttcctatcaaaggta

SEQ ID NO: 4452647 - DNA, 25 bp, Homo sapien
aggagagggttctatgaggtttcct

SEQ ID NO: 4452648 - DNA, 25 bp, Homo sapien
ggttctatgaggtttcctatcaaag

SEQ ID NO: 4452649 - DNA, 25 bp, Homo sapien
gagggttctatgaggtttcctatca

SEQ ID NO: 4452650 - DNA, 25 bp, Homo sapien
tcaaatgatggttccatcaacacca

SEQ ID NO: 4452651 - DNA, 25 bp, Homo sapien
aatgatggttccatcaacaccaccc

SEQ ID NO: 4452652 - DNA, 25 bp, Homo sapien
tgatggttccatcaacaccacccat

SEQ ID NO: 4452653 - DNA, 25 bp, Homo sapien
caaatgatggttccatcaacaccac

SEQ ID NO: 4452654 - DNA, 25 bp, Homo sapien
actgatttgtactgtgagtagtcat

SEQ ID NO: 4452655 - DNA, 25 bp, Homo sapien
aaaaactgatttgtactgtgagtag

SEQ ID NO: 4452656 - DNA, 25 bp, Homo sapien
aaactgatttgtactgtgagtagtc

SEQ ID NO: 4452657 - DNA, 25 bp, Homo sapien
aactgatttgtactgtgagtagtca

SEQ ID NO: 4452658 - DNA, 25 bp, Homo sapien
tcttctgcaagaaatgatatagact

SEQ ID NO: 4452659 - DNA, 25 bp, Homo sapien
gaaatgatatagactggtccatgcc

SEQ ID NO: 4452660 - DNA, 25 bp, Homo sapien
cttcagtgccaatgtaacgctcact

SEQ ID NO: 4452661 - DNA, 25 bp, Homo sapien
aatgtaacgctcactcttggcacag

SEQ ID NO: 4452662 - DNA, 25 bp, Homo sapien
aaatgggaagttgctgccttattca

SEQ ID NO: 4452663 - DNA, 25 bp, Homo sapien
cacttgggagttttacatcggttgc

SEQ ID NO: 4452664 - DNA, 25 bp, Homo sapien
gacactccatcaccctgatattgaa

SEQ ID NO: 4452665 - DNA, 25 bp, Homo sapien
gaggactaaattctatcaacttggc

SEQ ID NO: 4452666 - DNA, 25 bp, Homo sapien
cagataccacttctgagaggttcct

SEQ ID NO: 4452667 - DNA, 25 bp, Homo sapien
cattaagtattcctatcagatacca

SEQ ID NO: 4452668 - DNA, 25 bp, Homo sapien
tcaccatggcaaacattaagtattc

SEQ ID NO: 4452669 - DNA, 25 bp, Homo sapien
tcttttcaccatggcaaacattaag

SEQ ID NO: 4452670 - DNA, 25 bp, Homo sapien
cattgcaagcttttgtatttagcca

SEQ ID NO: 4452671 - DNA, 25 bp, Homo sapien
taatccctagtttagcctgcacctc

SEQ ID NO: 4452672 - DNA, 25 bp, Homo sapien
tccagcctcagtactttgtcccatt

SEQ ID NO: 4452673 - DNA, 25 bp, Homo sapien
ctttgtcccattgcaagcttttgta

SEQ ID NO: 4452674 - DNA, 25 bp, Homo sapien
ttgggttcggagttcctccaggcta

SEQ ID NO: 4452675 - DNA, 25 bp, Homo sapien
ctcctcagggttatagggttcagga

SEQ ID NO: 4452676 - DNA, 25 bp, Homo sapien
ggctaattcccagacacctgcagat

SEQ ID NO: 4452677 - DNA, 25 bp, Homo sapien
cttgagtgtttggactcaggatttg

SEQ ID NO: 4452678 - DNA, 25 bp, Homo sapien
tgcctacccagcatagtggtgaatg

SEQ ID NO: 4452679 - DNA, 25 bp, Homo sapien
agcttactgaattataagcccctgg

SEQ ID NO: 4452680 - DNA, 25 bp, Homo sapien
tccagctgtaagtgagggaataaca

SEQ ID NO: 4452681 - DNA, 25 bp, Homo sapien
gcccctggaagacaggaatcatgtc

SEQ ID NO: 4452682 - DNA, 25 bp, Homo sapien
gagctggtgtggtgggtctgggaaa

SEQ ID NO: 4452683 - DNA, 25 bp, Homo sapien
ctggtgtggtgggtctgggaaaatt

SEQ ID NO: 4452684 - DNA, 25 bp, Homo sapien
gctgaacagttgctgagctggtgtg

SEQ ID NO: 4452685 - DNA, 25 bp, Homo sapien
ctgaacagttgctgagctggtgtgg

SEQ ID NO: 4452686 - DNA, 25 bp, Homo sapien
ctgggcatgatgatggtgggtgcat

SEQ ID NO: 4452687 - DNA, 25 bp, Homo sapien
catgatgatggtgggtgcatgtaat

SEQ ID NO: 4452688 - DNA, 25 bp, Homo sapien
ccagctatttgagagactgaagtgg

SEQ ID NO: 4452689 - DNA, 25 bp, Homo sapien
ggcatgatgatggtgggtgcatgta

SEQ ID NO: 4452690 - DNA, 25 bp, Homo sapien
tacatgtcccggcagctcatgtggc

SEQ ID NO: 4452691 - DNA, 25 bp, Homo sapien
gcgcagcctcgctgtacacatgctt

SEQ ID NO: 4452692 - DNA, 25 bp, Homo sapien
ggctctggttcatcaactctcccag

SEQ ID NO: 4452693 - DNA, 25 bp, Homo sapien
tacacatgctttgcccgctgataga

SEQ ID NO: 4452694 - DNA, 25 bp, Homo sapien
gcttgggcgataatgcagcaattaa

SEQ ID NO: 4452695 - DNA, 25 bp, Homo sapien
tccccattatgaccttgttgaagaa

SEQ ID NO: 4452696 - DNA, 25 bp, Homo sapien
gcctcaccatggaatacattgcaga

SEQ ID NO: 4452697 - DNA, 25 bp, Homo sapien
tcatctcccttaatagcttgggcga

SEQ ID NO: 4452698 - DNA, 25 bp, Homo sapien
aaaatggttgtcatgccgggtgcag

SEQ ID NO: 4452699 - DNA, 25 bp, Homo sapien
aaaaaatggttgtcatatgcagtcg

SEQ ID NO: 4452700 - DNA, 25 bp, Homo sapien
gatttaaaaaatggttgtcatgccg

SEQ ID NO: 4452701 - DNA, 25 bp, Homo sapien
agtcgtatcaaactcttactgtgga

SEQ ID NO: 4452702 - DNA, 25 bp, Homo sapien
tcagtaattgattttcctgtcagtg

SEQ ID NO: 4452703 - DNA, 25 bp, Homo sapien
cagtaattgattttcctgtcagtga

SEQ ID NO: 4452704 - DNA, 25 bp, Homo sapien
tatatattaaaatacgcttttcaaa

SEQ ID NO: 4452705 - DNA, 25 bp, Homo sapien
atgaacataggtatttaagaaagaa

SEQ ID NO: 4452706 - DNA, 25 bp, Homo sapien
tagtccctggttttgactccaagtg

SEQ ID NO: 4452707 - DNA, 25 bp, Homo sapien
tccaagtggtaagtcaacagtactc

SEQ ID NO: 4452708 - DNA, 25 bp, Homo sapien
ctgcattcttaaggccgggctgttt

SEQ ID NO: 4452709 - DNA, 25 bp, Homo sapien
gaaatgtaggcaaccctgaatcaga

SEQ ID NO: 4452710 - DNA, 25 bp, Homo sapien
agtaagtcgtgacccttgagcccca

SEQ ID NO: 4452711 - DNA, 25 bp, Homo sapien
cctctggtaataagctttgtgcaca

SEQ ID NO: 4452712 - DNA, 25 bp, Homo sapien
gcagcttgtccgcaggtaccattga

SEQ ID NO: 4452713 - DNA, 25 bp, Homo sapien
catttgctagaaagctgggcagctt

SEQ ID NO: 4452714 - DNA, 25 bp, Homo sapien
taagtgccctaagtagtttctctca

SEQ ID NO: 4452715 - DNA, 25 bp, Homo sapien
agaaagtcctgccaattcctaagtg

SEQ ID NO: 4452716 - DNA, 25 bp, Homo sapien
tcttaaaagatctgtccaagcatga

SEQ ID NO: 4452717 - DNA, 25 bp, Homo sapien
ttcaagtccaatccatgtaatcagt

SEQ ID NO: 4452718 - DNA, 25 bp, Homo sapien
caacagacaactacaactttgagga

SEQ ID NO: 4452719 - DNA, 25 bp, Homo sapien
atgaactctattcaagaataatgca

SEQ ID NO: 4452720 - DNA, 25 bp, Homo sapien
aatgtgtggcatcactatcgtcatc

SEQ ID NO: 4452721 - DNA, 25 bp, Homo sapien
gaagaagaatactaagagaaaccag

SEQ ID NO: 4452722 - DNA, 25 bp, Homo sapien
tacaaacaagctttgctagacaagc

SEQ ID NO: 4452723 - DNA, 25 bp, Homo sapien
gtattattttcatagcgttccgaag

SEQ ID NO: 4452724 - DNA, 25 bp, Homo sapien
tcttgataactggagaaatctcaca

SEQ ID NO: 4452725 - DNA, 25 bp, Homo sapien
tagctcagggccaaaagaattgaaa

SEQ ID NO: 4452726 - DNA, 25 bp, Homo sapien
aataaaactagctttgcgcaggcct

SEQ ID NO: 4452727 - DNA, 25 bp, Homo sapien
aaatttgactcaagctttctcaagc

SEQ ID NO: 4452728 - DNA, 25 bp, Homo sapien
ctgaaattctagatggtgatgccca

SEQ ID NO: 4452729 - DNA, 25 bp, Homo sapien
gcgcaggcctcccttaaactgaaat

SEQ ID NO: 4452730 - DNA, 25 bp, Homo sapien
taaagggcaagtgacctcagctggt

SEQ ID NO: 4452731 - DNA, 25 bp, Homo sapien
taacccctgatctaaatgctgcctg

SEQ ID NO: 4452732 - DNA, 25 bp, Homo sapien
aactgtagcgcactggatagccatg

SEQ ID NO: 4452733 - DNA, 25 bp, Homo sapien
ctactattgatagggacatgggcac

SEQ ID NO: 4452734 - DNA, 25 bp, Homo sapien
tgatagaaagagtgaaacacctggg

SEQ ID NO: 4452735 - DNA, 25 bp, Homo sapien
ggcttccattcaaaaatctagagca

SEQ ID NO: 4452736 - DNA, 25 bp, Homo sapien
ggatcaaatcaaattcctacatggg

SEQ ID NO: 4452737 - DNA, 25 bp, Homo sapien
tctctcccaacagacaagaacatgt

SEQ ID NO: 4452738 - DNA, 25 bp, Homo sapien
tttcataagcaatgtatggtggcac

SEQ ID NO: 4452739 - DNA, 25 bp, Homo sapien
gagaagttcctacataaactggtag

SEQ ID NO: 4452740 - DNA, 25 bp, Homo sapien
ttccatgattagactccaagcaaag

SEQ ID NO: 4452741 - DNA, 25 bp, Homo sapien
gaaacctcatgaagtgaaacaggac

SEQ ID NO: 4452742 - DNA, 25 bp, Homo sapien
tgagtggaatcagttaaagcaatac

SEQ ID NO: 4452743 - DNA, 25 bp, Homo sapien
gtcactccttaaagtctgggctaga

SEQ ID NO: 4452744 - DNA, 25 bp, Homo sapien
gggctagagccttatgagtggaatc

SEQ ID NO: 4452745 - DNA, 25 bp, Homo sapien
ccatctaactgaagaggatgtgcca

SEQ ID NO: 4452746 - DNA, 25 bp, Homo sapien
gtaagcgctgtcacccactggcctt

SEQ ID NO: 4452747 - DNA, 25 bp, Homo sapien
ctctctttctttcctgtgtctctac

SEQ ID NO: 4452748 - DNA, 25 bp, Homo sapien
cactggccttttccatctccctctc

SEQ ID NO: 4452749 - DNA, 25 bp, Homo sapien
ctagtaagcgctgtcacccactggc

SEQ ID NO: 4452750 - DNA, 25 bp, Homo sapien
tgtagagggcttttactaacacgtg

SEQ ID NO: 4452751 - DNA, 25 bp, Homo sapien
cggatggacacctttctagagggcc

SEQ ID NO: 4452752 - DNA, 25 bp, Homo sapien
ctagagggcccctgtggtagcagaa

SEQ ID NO: 4452753 - DNA, 25 bp, Homo sapien
cagttatgtcctatccagcgggcag

SEQ ID NO: 4452754 - DNA, 25 bp, Homo sapien
ggtgcaccccaacaggaagaggcaa

SEQ ID NO: 4452755 - DNA, 25 bp, Homo sapien
gataagccctggaagactagcagaa

SEQ ID NO: 4452756 - DNA, 25 bp, Homo sapien
taatcttatgtgctaggaagctagg

SEQ ID NO: 4452757 - DNA, 25 bp, Homo sapien
ccttaatgatgaggagagtcatgtc

SEQ ID NO: 4452758 - DNA, 25 bp, Homo sapien
tgccctatggttgctgtggttgaga

SEQ ID NO: 4452759 - DNA, 25 bp, Homo sapien
aataataagcctagcacactacctg

SEQ ID NO: 4452760 - DNA, 25 bp, Homo sapien
aagtgaaggtcacacggtccccttg

SEQ ID NO: 4452761 - DNA, 25 bp, Homo sapien
ccttggttcctctgtgaagggtact

SEQ ID NO: 4452762 - DNA, 25 bp, Homo sapien
gattcattcctctacgggcagggca

SEQ ID NO: 4452763 - DNA, 25 bp, Homo sapien
gcctctctagattcattcctctacg

SEQ ID NO: 4452764 - DNA, 25 bp, Homo sapien
aaacttaaacgtccatacttggcag

SEQ ID NO: 4452765 - DNA, 25 bp, Homo sapien
tctgagctcaacctgggaccctcaa

SEQ ID NO: 4452766 - DNA, 25 bp, Homo sapien
taaagggaacaccttcaggctacag

SEQ ID NO: 4452767 - DNA, 25 bp, Homo sapien
caagcactaagggaattcattgcca

SEQ ID NO: 4452768 - DNA, 25 bp, Homo sapien
tctcctggagtaaaatgagttgccc

SEQ ID NO: 4452769 - DNA, 25 bp, Homo sapien
caaaatgaggccttaactgggaaga

SEQ ID NO: 4452770 - DNA, 25 bp, Homo sapien
tatgtaacagatgaaaagacacaga

SEQ ID NO: 4452771 - DNA, 25 bp, Homo sapien
atgtaacagatgaaaagacacagaa

SEQ ID NO: 4452772 - DNA, 25 bp, Homo sapien
atttgtatgtaacagatgaaaagac

SEQ ID NO: 4452773 - DNA, 25 bp, Homo sapien
tgtatttgtatgtaacagatgaaaa

SEQ ID NO: 4452774 - DNA, 25 bp, Homo sapien
tctaagatcagtttaggccacatgc

SEQ ID NO: 4452775 - DNA, 25 bp, Homo sapien
gggcactttcgccttaagcctgaga

SEQ ID NO: 4452776 - DNA, 25 bp, Homo sapien
tgtataaagtaggagattctggcca

SEQ ID NO: 4452777 - DNA, 25 bp, Homo sapien
tcctgagtatactacaaaactgctg

SEQ ID NO: 4452778 - DNA, 25 bp, Homo sapien
ttttgcattgtgtggaagacatttg

SEQ ID NO: 4452779 - DNA, 25 bp, Homo sapien
taacaattccatagctagtagtcat

SEQ ID NO: 4452780 - DNA, 25 bp, Homo sapien
tagaagcacagtgtataatcacaca

SEQ ID NO: 4452781 - DNA, 25 bp, Homo sapien
cacacactgtgcctatgcagttctt

SEQ ID NO: 4452782 - DNA, 25 bp, Homo sapien
taagcctcctacacgctgatctttg

SEQ ID NO: 4452783 - DNA, 25 bp, Homo sapien
tttgggcggaattggccgtatcttc

SEQ ID NO: 4452784 - DNA, 25 bp, Homo sapien
aacccaacttgggacggtgtatgtg

SEQ ID NO: 4452785 - DNA, 25 bp, Homo sapien
caatagtcgattagatggaagcaga

SEQ ID NO: 4452786 - DNA, 25 bp, Homo sapien
tcttgaagtgcgctgtgatgaccaa

SEQ ID NO: 4452787 - DNA, 25 bp, Homo sapien
cctcagctgctgatagtggacttac

SEQ ID NO: 4452788 - DNA, 25 bp, Homo sapien
atacatatggtaggcgctctgaagc

SEQ ID NO: 4452789 - DNA, 25 bp, Homo sapien
tggctaccaataccctacaaggatt

SEQ ID NO: 4452790 - DNA, 25 bp, Homo sapien
gactcttcagcagtataggaaaaaa

SEQ ID NO: 4452791 - DNA, 25 bp, Homo sapien
attttactctaatttgagcccaaat

SEQ ID NO: 4452792 - DNA, 25 bp, Homo sapien
cagtgtgatcccaaacaggcgaagg

SEQ ID NO: 4452793 - DNA, 25 bp, Homo sapien
ttgattgcactgaagaggactcttc

SEQ ID NO: 4452794 - DNA, 25 bp, Homo sapien
tcctgtggcaacgtagagataaaag

SEQ ID NO: 4452795 - DNA, 25 bp, Homo sapien
taggaaagcctatactgcaagaaag

SEQ ID NO: 4452796 - DNA, 25 bp, Homo sapien
tctgggcgaagtgaataggaaagcc

SEQ ID NO: 4452797 - DNA, 25 bp, Homo sapien
gacttcctctgccaaaatatgatgg

SEQ ID NO: 4452798 - DNA, 25 bp, Homo sapien
catgagctggctggtatttccaaag

SEQ ID NO: 4452799 - DNA, 25 bp, Homo sapien
tcttacagtcgcactatagtagtac

SEQ ID NO: 4452800 - DNA, 25 bp, Homo sapien
gagccttactgcatgtacttataga

SEQ ID NO: 4452801 - DNA, 25 bp, Homo sapien
tcttcaattttggaggtcagagtcc

SEQ ID NO: 4452802 - DNA, 25 bp, Homo sapien
agaatacatctgagactcgtcccca

SEQ ID NO: 4452803 - DNA, 25 bp, Homo sapien
tgttgcattgcagctacctaagaat

SEQ ID NO: 4452804 - DNA, 25 bp, Homo sapien
tcaacaactaagaggatcgctgtgt

SEQ ID NO: 4452805 - DNA, 25 bp, Homo sapien
ttctgttggtaggaaagtcacacac

SEQ ID NO: 4452806 - DNA, 25 bp, Homo sapien
cattgtcttaggagataccttcaga

SEQ ID NO: 4452807 - DNA, 25 bp, Homo sapien
gagcacgttttacaggaagagcaag

SEQ ID NO: 4452808 - DNA, 25 bp, Homo sapien
gctattagagcacgttttacaggaa

SEQ ID NO: 4452809 - DNA, 25 bp, Homo sapien
cgttttacaggaagagcaaggtcct

SEQ ID NO: 4452810 - DNA, 25 bp, Homo sapien
tacctaatgtgtagttttgtatctc

SEQ ID NO: 4452811 - DNA, 25 bp, Homo sapien
gtatctctagccctcctctcaccct

SEQ ID NO: 4452812 - DNA, 25 bp, Homo sapien
tcctttgaatggctgagtagtccat

SEQ ID NO: 4452813 - DNA, 25 bp, Homo sapien
tcagttttccactcctgtgttactt

SEQ ID NO: 4452814 - DNA, 25 bp, Homo sapien
taatatatgtcttgatgagaagacc

SEQ ID NO: 4452815 - DNA, 25 bp, Homo sapien
ccaaccaggtatttgcaagactgcc

SEQ ID NO: 4452816 - DNA, 25 bp, Homo sapien
gactgcctcgtagtcgctgtaagaa

SEQ ID NO: 4452817 - DNA, 25 bp, Homo sapien
gatgagaagaccaaccaggtatttg

SEQ ID NO: 4452818 - DNA, 25 bp, Homo sapien
cttgattgccttctttatgccttcc

SEQ ID NO: 4452819 - DNA, 25 bp, Homo sapien
tatttgtgcacaattttggaaatgt

SEQ ID NO: 4452820 - DNA, 25 bp, Homo sapien
ttatttgtgcacaattttggaaatg

SEQ ID NO: 4452821 - DNA, 25 bp, Homo sapien
tgagcctttctactgtagctacaaa

SEQ ID NO: 4452822 - DNA, 25 bp, Homo sapien
taacagctggatatataagaattcc

SEQ ID NO: 4452823 - DNA, 25 bp, Homo sapien
tttccataaatcaacaggcagaagg

SEQ ID NO: 4452824 - DNA, 25 bp, Homo sapien
tctgcctggtgcaacttgagccttt

SEQ ID NO: 4452825 - DNA, 25 bp, Homo sapien
caggattgctctggagaacttcaac

SEQ ID NO: 4452826 - DNA, 25 bp, Homo sapien
gagaaccatactgcactcagaacta

SEQ ID NO: 4452827 - DNA, 25 bp, Homo sapien
ccaattgctattttgtgagaaccat

SEQ ID NO: 4452828 - DNA, 25 bp, Homo sapien
gccttcacagaggatgtcaaaatct

SEQ ID NO: 4452829 - DNA, 25 bp, Homo sapien
tgataacaacacaggattcctcctt

SEQ ID NO: 4452830 - DNA, 25 bp, Homo sapien
tcagttgctgtgacgctgtttgcta

SEQ ID NO: 4452831 - DNA, 25 bp, Homo sapien
gattgttactcctaggtcattgacc

SEQ ID NO: 4452832 - DNA, 25 bp, Homo sapien
aacagttcgtagtaagttcagttgc

SEQ ID NO: 4452833 - DNA, 25 bp, Homo sapien
gtgtagtgctccgggtgttcatgaa

SEQ ID NO: 4452834 - DNA, 25 bp, Homo sapien
atagtgtagtgctccgggtgttcat

SEQ ID NO: 4452835 - DNA, 25 bp, Homo sapien
tagtgctccgggtgttcatgaataa

SEQ ID NO: 4452836 - DNA, 25 bp, Homo sapien
tagtgtagtgctccgggtgttcatg

SEQ ID NO: 4452837 - DNA, 25 bp, Homo sapien
agcaaagttggcaggatccatgtca

SEQ ID NO: 4452838 - DNA, 25 bp, Homo sapien
agttggcaggatccatgtcagtatc

SEQ ID NO: 4452839 - DNA, 25 bp, Homo sapien
ctgtagagcaaagttggcaggatcc

SEQ ID NO: 4452840 - DNA, 25 bp, Homo sapien
ggcaggatccatgtcagtatccatt

SEQ ID NO: 4452841 - DNA, 25 bp, Homo sapien
tagacagataatgtgaaagcatgat

SEQ ID NO: 4452842 - DNA, 25 bp, Homo sapien
ctagacagataatgtgaaagcatga

SEQ ID NO: 4452843 - DNA, 25 bp, Homo sapien
gagtcttctcactcttatatcccct

SEQ ID NO: 4452844 - DNA, 25 bp, Homo sapien
gatcctcaggtaccactgtgttcga

SEQ ID NO: 4452845 - DNA, 25 bp, Homo sapien
tggaacagttcacatttgtagccat

SEQ ID NO: 4452846 - DNA, 25 bp, Homo sapien
tttgcctcttttatcgatcctcagg

SEQ ID NO: 4452847 - DNA, 25 bp, Homo sapien
ttgatccattaacagattgctaagg

SEQ ID NO: 4452848 - DNA, 25 bp, Homo sapien
gagaaaacatatcacctgaaaattg

SEQ ID NO: 4452849 - DNA, 25 bp, Homo sapien
tagttcaacatagttcaatttagag

SEQ ID NO: 4452850 - DNA, 25 bp, Homo sapien
gctaaggttcatgagcagtacttaa

SEQ ID NO: 4452851 - DNA, 25 bp, Homo sapien
tggcttggattatcaggtccaacta

SEQ ID NO: 4452852 - DNA, 25 bp, Homo sapien
tgaataaggataccacagattccct

SEQ ID NO: 4452853 - DNA, 25 bp, Homo sapien
gagcattttcaggacaaggagtata

SEQ ID NO: 4452854 - DNA, 25 bp, Homo sapien
taaggaaaacgttaggagagatctg

SEQ ID NO: 4452855 - DNA, 25 bp, Homo sapien
gatagccacataaccttacgacagt

SEQ ID NO: 4452856 - DNA, 25 bp, Homo sapien
tttataacaatatagggcgacttcc

SEQ ID NO: 4452857 - DNA, 25 bp, Homo sapien
gtgattgacatgacaacctgttgaa

SEQ ID NO: 4452858 - DNA, 25 bp, Homo sapien
tatagcagcttcaacttcacatgtg

SEQ ID NO: 4452859 - DNA, 25 bp, Homo sapien
cgctgaaggttttgtagccaaagtc

SEQ ID NO: 4452860 - DNA, 25 bp, Homo sapien
ggagcctatccaaagaattgttgac

SEQ ID NO: 4452861 - DNA, 25 bp, Homo sapien
ttgttaggccatatcccatcacagt

SEQ ID NO: 4452862 - DNA, 25 bp, Homo sapien
tgttgacaaatgagtcgctgaaggt

SEQ ID NO: 4452863 - DNA, 25 bp, Homo sapien
ttacaacatagcaactatgatatag

SEQ ID NO: 4452864 - DNA, 25 bp, Homo sapien
tgttcccagttgtacattgtaagat

SEQ ID NO: 4452865 - DNA, 25 bp, Homo sapien
tggcaacagtaacagatttacttct

SEQ ID NO: 4452866 - DNA, 25 bp, Homo sapien
cagtgcagtgattttagtggtaata

SEQ ID NO: 4452867 - DNA, 25 bp, Homo sapien
tatgatagatatcctgagataaccc

SEQ ID NO: 4452868 - DNA, 25 bp, Homo sapien
caatagtgaaatgttagggagaagg

SEQ ID NO: 4452869 - DNA, 25 bp, Homo sapien
caggaaagaagacaaatttggaagg

SEQ ID NO: 4452870 - DNA, 25 bp, Homo sapien
gcacaaggaatttacccagtcactt

SEQ ID NO: 4452871 - DNA, 25 bp, Homo sapien
aaataaagcctcaaaacttgtcatc

SEQ ID NO: 4452872 - DNA, 25 bp, Homo sapien
acctgggaccacttcaaagattctg

SEQ ID NO: 4452873 - DNA, 25 bp, Homo sapien
gattctgctctaagatcatactcat

SEQ ID NO: 4452874 - DNA, 25 bp, Homo sapien
tcatttttcaagtctgtactcaagt

SEQ ID NO: 4452875 - DNA, 25 bp, Homo sapien
ctctcttggggcttgcctcttccat

SEQ ID NO: 4452876 - DNA, 25 bp, Homo sapien
agaagtaactttggcaggtactagg

SEQ ID NO: 4452877 - DNA, 25 bp, Homo sapien
cttcagaagtaactttggcaggtac

SEQ ID NO: 4452878 - DNA, 25 bp, Homo sapien
tcagaagtaactttggcaggtacta

SEQ ID NO: 4452879 - DNA, 25 bp, Homo sapien
ctgagtacccaaattgaaattccag

SEQ ID NO: 4452880 - DNA, 25 bp, Homo sapien
ccaaattgaaattccagtttctcca

SEQ ID NO: 4452881 - DNA, 25 bp, Homo sapien
tgagtacccaaattgaaattccagt

SEQ ID NO: 4452882 - DNA, 25 bp, Homo sapien
caaattgaaattccagtttctccat

SEQ ID NO: 4452883 - DNA, 25 bp, Homo sapien
tactggatatacagaccactgtttc

SEQ ID NO: 4452884 - DNA, 25 bp, Homo sapien
tatggacagtaaagaggagtaaggt

SEQ ID NO: 4452885 - DNA, 25 bp, Homo sapien
taagtgtacagtatctctcaggtgt

SEQ ID NO: 4452886 - DNA, 25 bp, Homo sapien
taagtgatacctggcagtatatgcc

SEQ ID NO: 4452887 - DNA, 25 bp, Homo sapien
ttccacccctttgattgccacaatt

SEQ ID NO: 4452888 - DNA, 25 bp, Homo sapien
ccttccttgttcattgcaagataga

SEQ ID NO: 4452889 - DNA, 25 bp, Homo sapien
ttgccacaattccaactgccactgt

SEQ ID NO: 4452890 - DNA, 25 bp, Homo sapien
ccttgttcattgcaagatagaattc

SEQ ID NO: 4452891 - DNA, 25 bp, Homo sapien
ccatttagctgatgcatatgtgttg

SEQ ID NO: 4452892 - DNA, 25 bp, Homo sapien
cgttgtgtgtccatttagctgatgc

SEQ ID NO: 4452893 - DNA, 25 bp, Homo sapien
tcccctccgttgtgtgtccatttag

SEQ ID NO: 4452894 - DNA, 25 bp, Homo sapien
caaacatttcccctccgttgtgtgt

SEQ ID NO: 4452895 - DNA, 25 bp, Homo sapien
cataggaagaaagtgggctgttttt

SEQ ID NO: 4452896 - DNA, 25 bp, Homo sapien
ttaagttattgccataggaagaaag

SEQ ID NO: 4452897 - DNA, 25 bp, Homo sapien
taagttattgccataggaagaaagt

SEQ ID NO: 4452898 - DNA, 25 bp, Homo sapien
tgccataggaagaaagtgggctgtt

SEQ ID NO: 4452899 - DNA, 25 bp, Homo sapien
taggtataagcatgttctaatcctg

SEQ ID NO: 4452900 - DNA, 25 bp, Homo sapien
ctaacatcatgattgtacaaccagt

SEQ ID NO: 4452901 - DNA, 25 bp, Homo sapien
caaatctaacatactcttaagggta

SEQ ID NO: 4452902 - DNA, 25 bp, Homo sapien
tagtgtggcttgattatctgacaaa

SEQ ID NO: 4452903 - DNA, 25 bp, Homo sapien
tgtgctagacttagtgtcagtcaga

SEQ ID NO: 4452904 - DNA, 25 bp, Homo sapien
agacttagtgtcagtcagaaaaggg

SEQ ID NO: 4452905 - DNA, 25 bp, Homo sapien
gctagacttagtgtcagtcagaaaa

SEQ ID NO: 4452906 - DNA, 25 bp, Homo sapien
tagacttagtgtcagtcagaaaagg

SEQ ID NO: 4452907 - DNA, 25 bp, Homo sapien
tctattttgggcattgtgctcttgc

SEQ ID NO: 4452908 - DNA, 25 bp, Homo sapien
ccttattcttaactgcatcttctat

SEQ ID NO: 4452909 - DNA, 25 bp, Homo sapien
tcagggccccttattcttaactgca

SEQ ID NO: 4452910 - DNA, 25 bp, Homo sapien
gggccccttattcttaactgcatct

SEQ ID NO: 4452911 - DNA, 25 bp, Homo sapien
tgtatatctacccagctgcgtgacc

SEQ ID NO: 4452912 - DNA, 25 bp, Homo sapien
tataaagtgctaccaagatctgcca

SEQ ID NO: 4452913 - DNA, 25 bp, Homo sapien
gaaatgttccgtctgtggtgggccc

SEQ ID NO: 4452914 - DNA, 25 bp, Homo sapien
tacatcctggtcgtataggtcaacc

SEQ ID NO: 4452915 - DNA, 25 bp, Homo sapien
ggattatgggaggcaaataatcttt

SEQ ID NO: 4452916 - DNA, 25 bp, Homo sapien
ggagtagggatgtaaaccaaactgc

SEQ ID NO: 4452917 - DNA, 25 bp, Homo sapien
tcgatgtatcagtgatgtattctga

SEQ ID NO: 4452918 - DNA, 25 bp, Homo sapien
cagtggagtagggatgtaaaccaaa

SEQ ID NO: 4452919 - DNA, 25 bp, Homo sapien
gaagtgtagtttgagaatggagaaa

SEQ ID NO: 4452920 - DNA, 25 bp, Homo sapien
gaggctaggactgtattatttcttg

SEQ ID NO: 4452921 - DNA, 25 bp, Homo sapien
cacatggaaggattcatcaagagaa

SEQ ID NO: 4452922 - DNA, 25 bp, Homo sapien
tgcaaccacatgataaccaggaagt

SEQ ID NO: 4452923 - DNA, 25 bp, Homo sapien
ggctatgagtttcccctgagtaaac

SEQ ID NO: 4452924 - DNA, 25 bp, Homo sapien
taattttgcttgtattgtcattact

SEQ ID NO: 4452925 - DNA, 25 bp, Homo sapien
tatatctcatgatgtttaactataa

SEQ ID NO: 4452926 - DNA, 25 bp, Homo sapien
tcattatatgattctaatccctaaa

SEQ ID NO: 4452927 - DNA, 25 bp, Homo sapien
gccactgactcttcatgtgtactca

SEQ ID NO: 4452928 - DNA, 25 bp, Homo sapien
gctgcagagggacctgcaccacagg

SEQ ID NO: 4452929 - DNA, 25 bp, Homo sapien
ttgtgggcactgaacatcagacact

SEQ ID NO: 4452930 - DNA, 25 bp, Homo sapien
ccatggccattttgtgggcactgaa

SEQ ID NO: 4452931 - DNA, 25 bp, Homo sapien
gagctctgcctgaatttactctcca

SEQ ID NO: 4452932 - DNA, 25 bp, Homo sapien
taaacacctcctatggacaccagag

SEQ ID NO: 4452933 - DNA, 25 bp, Homo sapien
tctgcatctgcattgtggactctag

SEQ ID NO: 4452934 - DNA, 25 bp, Homo sapien
gctctggaccccagatcctagggca

SEQ ID NO: 4452935 - DNA, 25 bp, Homo sapien
tgctctgcaaaggatcctagcaacc

SEQ ID NO: 4452936 - DNA, 25 bp, Homo sapien
ctagcaaccttttctactaaggact

SEQ ID NO: 4452937 - DNA, 25 bp, Homo sapien
cagctttcacatcagatgtcccctt

SEQ ID NO: 4452938 - DNA, 25 bp, Homo sapien
tcagatgtccccttagtgttcatcc

SEQ ID NO: 4452939 - DNA, 25 bp, Homo sapien
tcatactcagtattactgagtattg

SEQ ID NO: 4452940 - DNA, 25 bp, Homo sapien
tcttttcatactcagtattactgag

SEQ ID NO: 4452941 - DNA, 25 bp, Homo sapien
actcagtattactgagtattggcat

SEQ ID NO: 4452942 - DNA, 25 bp, Homo sapien
tttcttttcatactcagtattactg

SEQ ID NO: 4452943 - DNA, 25 bp, Homo sapien
tgatgatattcacacataaagggag

SEQ ID NO: 4452944 - DNA, 25 bp, Homo sapien
ccaagggaatgatgatgatattcac

SEQ ID NO: 4452945 - DNA, 25 bp, Homo sapien
accacaggtatcagaatccaaggga

SEQ ID NO: 4452946 - DNA, 25 bp, Homo sapien
gatttctgagcccaacaatggtgag

SEQ ID NO: 4452947 - DNA, 25 bp, Homo sapien
tattaatgactttgggacaccagtc

SEQ ID NO: 4452948 - DNA, 25 bp, Homo sapien
caagaggtaccttattgaaggcaaa

SEQ ID NO: 4452949 - DNA, 25 bp, Homo sapien
gaagacagagtctcatcagccttat

SEQ ID NO: 4452950 - DNA, 25 bp, Homo sapien
tagctgctagttgactcgatttgcc

SEQ ID NO: 4452951 - DNA, 25 bp, Homo sapien
ccacacgtctccagctccgcccgag

SEQ ID NO: 4452952 - DNA, 25 bp, Homo sapien
caccagggatcggagtggtactcag

SEQ ID NO: 4452953 - DNA, 25 bp, Homo sapien
accagggatcggagtggtactcaga

SEQ ID NO: 4452954 - DNA, 25 bp, Homo sapien
gggaatgcatgtaccactcaaaggc

SEQ ID NO: 4452955 - DNA, 25 bp, Homo sapien
tgaaactacatgatcagggcatctg

SEQ ID NO: 4452956 - DNA, 25 bp, Homo sapien
gattggagtagctcaacctgacttc

SEQ ID NO: 4452957 - DNA, 25 bp, Homo sapien
aacagcctgcctcgactgtgagaaa

SEQ ID NO: 4452958 - DNA, 25 bp, Homo sapien
ggagatctcctagagtccatctacg

SEQ ID NO: 4452959 - DNA, 25 bp, Homo sapien
ttcaggaggtttggagatctcctag

SEQ ID NO: 4452960 - DNA, 25 bp, Homo sapien
caggtaaggaagttccaagcttggg

SEQ ID NO: 4452961 - DNA, 25 bp, Homo sapien
catctacgacccaggtaaggaagtt

SEQ ID NO: 4452962 - DNA, 25 bp, Homo sapien
caggatattaagatgccctcttttc

SEQ ID NO: 4452963 - DNA, 25 bp, Homo sapien
gatctttgtgatcatgccctcaatg

SEQ ID NO: 4452964 - DNA, 25 bp, Homo sapien
cagattcttttaggaatcacatgaa

SEQ ID NO: 4452965 - DNA, 25 bp, Homo sapien
ttcttgagcctcagattcttttagg

SEQ ID NO: 4452966 - DNA, 25 bp, Homo sapien
cagatttgcattttgggtaagaaag

SEQ ID NO: 4452967 - DNA, 25 bp, Homo sapien
agagatacaaaaacgccggttatag

SEQ ID NO: 4452968 - DNA, 25 bp, Homo sapien
tttttgctgtgtactgattacgcac

SEQ ID NO: 4452969 - DNA, 25 bp, Homo sapien
gaacaatggtccaatcccttgttcc

SEQ ID NO: 4452970 - DNA, 25 bp, Homo sapien
ttaacggctatttctaaaacacata

SEQ ID NO: 4452971 - DNA, 25 bp, Homo sapien
taacggctatttctaaaacacatat

SEQ ID NO: 4452972 - DNA, 25 bp, Homo sapien
ttctaaaacacatatcataggtgca

SEQ ID NO: 4452973 - DNA, 25 bp, Homo sapien
tatttctaaaacacatatcataggt

SEQ ID NO: 4452974 - DNA, 25 bp, Homo sapien
gaaatataggtggattgagagacat

SEQ ID NO: 4452975 - DNA, 25 bp, Homo sapien
ctgaagctatggaagtagtttgtga

SEQ ID NO: 4452976 - DNA, 25 bp, Homo sapien
gaagctatggaagtagtttgtgact

SEQ ID NO: 4452977 - DNA, 25 bp, Homo sapien
ttgagaaatataggtggattgagag

SEQ ID NO: 4452978 - DNA, 25 bp, Homo sapien
gaacataacatgtatagcagtagaa

SEQ ID NO: 4452979 - DNA, 25 bp, Homo sapien
aacataacatgtatagcagtagaac

SEQ ID NO: 4452980 - DNA, 25 bp, Homo sapien
gcctatacatgtgattttagatgct

SEQ ID NO: 4452981 - DNA, 25 bp, Homo sapien
agcctatacatgtgattttagatgc

SEQ ID NO: 4452982 - DNA, 25 bp, Homo sapien
tagcctatacatgtgattttagatg

SEQ ID NO: 4452983 - DNA, 25 bp, Homo sapien
ttccacacttacttattcttggcta

SEQ ID NO: 4452984 - DNA, 25 bp, Homo sapien
cacttacttattcttggctagtaaa

SEQ ID NO: 4452985 - DNA, 25 bp, Homo sapien
ttattcttggctagtaaactttcca

SEQ ID NO: 4452986 - DNA, 25 bp, Homo sapien
cacacttacttattcttggctagta

SEQ ID NO: 4452987 - DNA, 25 bp, Homo sapien
tactgacaaggagacctaagcattt

SEQ ID NO: 4452988 - DNA, 25 bp, Homo sapien
tggcctagcgaagtgtaaccattgt

SEQ ID NO: 4452989 - DNA, 25 bp, Homo sapien
ggctctaaatgcctatggcctagcg

SEQ ID NO: 4452990 - DNA, 25 bp, Homo sapien
catacattacccctgaagagcttcc

SEQ ID NO: 4452991 - DNA, 25 bp, Homo sapien
tacttctggctgaacactacatcag

SEQ ID NO: 4452992 - DNA, 25 bp, Homo sapien
catgacgctcggtctcagttgaaac

SEQ ID NO: 4452993 - DNA, 25 bp, Homo sapien
tataaataatacacccctggaggac

SEQ ID NO: 4452994 - DNA, 25 bp, Homo sapien
gaccttggcctacaaatgaattcct

SEQ ID NO: 4452995 - DNA, 25 bp, Homo sapien
aaatcagcaggatccctgagctggt

SEQ ID NO: 4452996 - DNA, 25 bp, Homo sapien
tcagcaggatccctgagctggtttt

SEQ ID NO: 4452997 - DNA, 25 bp, Homo sapien
taatgtaaaatcagcaggatccctg

SEQ ID NO: 4452998 - DNA, 25 bp, Homo sapien
tgtaaaatcagcaggatccctgagc

SEQ ID NO: 4452999 - DNA, 25 bp, Homo sapien
gattttcggcatcacattttcaata

SEQ ID NO: 4453000 - DNA, 25 bp, Homo sapien
tagtaacaatagacctaagaggtgt

SEQ ID NO: 4453001 - DNA, 25 bp, Homo sapien
aaacatcatgattttcggcatcaca

SEQ ID NO: 4453002 - DNA, 25 bp, Homo sapien
aaactgttatcctttgcaggaaaca

SEQ ID NO: 4453003 - DNA, 25 bp, Homo sapien
gaatacacggatacgtgtaaatgtt

SEQ ID NO: 4453004 - DNA, 25 bp, Homo sapien
atattctggaatacacggatacgtg

SEQ ID NO: 4453005 - DNA, 25 bp, Homo sapien
attctggaatacacggatacgtgta

SEQ ID NO: 4453006 - DNA, 25 bp, Homo sapien
ctggaatacacggatacgtgtaaat

SEQ ID NO: 4453007 - DNA, 25 bp, Homo sapien
tccaatgtgaagagttataaaaact

SEQ ID NO: 4453008 - DNA, 25 bp, Homo sapien
tatatccaatgtgaagagttataaa

SEQ ID NO: 4453009 - DNA, 25 bp, Homo sapien
tgaagagttataaaaactaagttgc

SEQ ID NO: 4453010 - DNA, 25 bp, Homo sapien
tcatttttatatccaatgtgaagag

SEQ ID NO: 4453011 - DNA, 25 bp, Homo sapien
cagttcttttgcgtttaaaagatgg

SEQ ID NO: 4453012 - DNA, 25 bp, Homo sapien
tgttcttcagttcttttgcgtttaa

SEQ ID NO: 4453013 - DNA, 25 bp, Homo sapien
taaaagatggcttgtcagggtcatc

SEQ ID NO: 4453014 - DNA, 25 bp, Homo sapien
tcagttcttttgcgtttaaaagatg

SEQ ID NO: 4453015 - DNA, 25 bp, Homo sapien
gtttggttccaggtgctatctataa

SEQ ID NO: 4453016 - DNA, 25 bp, Homo sapien
aagtcgctcatcagtgaatattttg

SEQ ID NO: 4453017 - DNA, 25 bp, Homo sapien
ttgtttgtttggttccaggtgctat

SEQ ID NO: 4453018 - DNA, 25 bp, Homo sapien
gaagtcgctcatcagtgaatatttt

SEQ ID NO: 4453019 - DNA, 25 bp, Homo sapien
taatatttaagggtgaagtgttaca

SEQ ID NO: 4453020 - DNA, 25 bp, Homo sapien
gaaacttactttcaattgatcaacc

SEQ ID NO: 4453021 - DNA, 25 bp, Homo sapien
taagggtgaagtgttacaaagcctg

SEQ ID NO: 4453022 - DNA, 25 bp, Homo sapien
tggcaaaatgtataggtattcagtg

SEQ ID NO: 4453023 - DNA, 25 bp, Homo sapien
ctacttggcaataaatgtatgacct

SEQ ID NO: 4453024 - DNA, 25 bp, Homo sapien
gtagcatatccatacaacgaaatac

SEQ ID NO: 4453025 - DNA, 25 bp, Homo sapien
agtagaaaatgggaaacaaccagtg

SEQ ID NO: 4453026 - DNA, 25 bp, Homo sapien
cctaacttgtagtgatggtctcaca

SEQ ID NO: 4453027 - DNA, 25 bp, Homo sapien
taaactagacatagacaaccctgga

SEQ ID NO: 4453028 - DNA, 25 bp, Homo sapien
tacccaaacgatagatataaactag

SEQ ID NO: 4453029 - DNA, 25 bp, Homo sapien
tccttacctgtaagtatcctaggca

SEQ ID NO: 4453030 - DNA, 25 bp, Homo sapien
cacctatgaattggttagccataca

SEQ ID NO: 4453031 - DNA, 25 bp, Homo sapien
tttcctgtggtgcaatgaagagcca

SEQ ID NO: 4453032 - DNA, 25 bp, Homo sapien
tttgacactggtagaacacacagag

SEQ ID NO: 4453033 - DNA, 25 bp, Homo sapien
gattaatctcacgaaatgacgaagt

SEQ ID NO: 4453034 - DNA, 25 bp, Homo sapien
tatagagccctaattgtttcctgtg

SEQ ID NO: 4453035 - DNA, 25 bp, Homo sapien
cagaataggacacgtatatggccaa

SEQ ID NO: 4453036 - DNA, 25 bp, Homo sapien
gacatttgataataccaaggtagga

SEQ ID NO: 4453037 - DNA, 25 bp, Homo sapien
gcaattggcattacttacacagaaa

SEQ ID NO: 4453038 - DNA, 25 bp, Homo sapien
tcagcaatgtgactcctagggatgt

SEQ ID NO: 4453039 - DNA, 25 bp, Homo sapien
tgaaaactgaacatacgccaacaag

SEQ ID NO: 4453040 - DNA, 25 bp, Homo sapien
tcaaatgactaacaggagttcgagg

SEQ ID NO: 4453041 - DNA, 25 bp, Homo sapien
tgtgaacccagcagaacaacctatc

SEQ ID NO: 4453042 - DNA, 25 bp, Homo sapien
gaaacatcatgtgtctcgagcagga

SEQ ID NO: 4453043 - DNA, 25 bp, Homo sapien
aacacctcaaggtatatacagaagc

SEQ ID NO: 4453044 - DNA, 25 bp, Homo sapien
ccacaggcttggtacaataataatg

SEQ ID NO: 4453045 - DNA, 25 bp, Homo sapien
gacaggactgcattcaccaattttc

SEQ ID NO: 4453046 - DNA, 25 bp, Homo sapien
tatacatgacagttaacactgagtc

SEQ ID NO: 4453047 - DNA, 25 bp, Homo sapien
tttgatggcgccaaaagcaagtttt

SEQ ID NO: 4453048 - DNA, 25 bp, Homo sapien
taaatggcttcaattgtagaaagga

SEQ ID NO: 4453049 - DNA, 25 bp, Homo sapien
taccagaaagtagtaaatggcttca

SEQ ID NO: 4453050 - DNA, 25 bp, Homo sapien
atatatcagtatggtagtctaccag

SEQ ID NO: 4453051 - DNA, 25 bp, Homo sapien
tttggcattctttatcaactggtac

SEQ ID NO: 4453052 - DNA, 25 bp, Homo sapien
ctccagagcatttggcattctttat

SEQ ID NO: 4453053 - DNA, 25 bp, Homo sapien
ccagagcatttggcattctttatca

SEQ ID NO: 4453054 - DNA, 25 bp, Homo sapien
tccagagcatttggcattctttatc

SEQ ID NO: 4453055 - DNA, 25 bp, Homo sapien
aaataaaaagacataagtggcttgt

SEQ ID NO: 4453056 - DNA, 25 bp, Homo sapien
ataaaaagacataagtggcttgtta

SEQ ID NO: 4453057 - DNA, 25 bp, Homo sapien
aataaaaagacataagtggcttgtt

SEQ ID NO: 4453058 - DNA, 25 bp, Homo sapien
taaaaagacataagtggcttgttaa

SEQ ID NO: 4453059 - DNA, 25 bp, Homo sapien
cagtagggctctattcacaagcagc

SEQ ID NO: 4453060 - DNA, 25 bp, Homo sapien
tagattcaggtagtctagctccaga

SEQ ID NO: 4453061 - DNA, 25 bp, Homo sapien
caggtgaatttatcagagtccccaa

SEQ ID NO: 4453062 - DNA, 25 bp, Homo sapien
tcagccagcagattgtaaccccatt

SEQ ID NO: 4453063 - DNA, 25 bp, Homo sapien
taaggcaaagcaagtggtcaagagc

SEQ ID NO: 4453064 - DNA, 25 bp, Homo sapien
taaatagctataagacattggtggc

SEQ ID NO: 4453065 - DNA, 25 bp, Homo sapien
tagacaagattcagtgagggtgacc

SEQ ID NO: 4453066 - DNA, 25 bp, Homo sapien
tgtcaacagcagaagcacaagtgta

SEQ ID NO: 4453067 - DNA, 25 bp, Homo sapien
gctggtggccttcaatgtagggtca

SEQ ID NO: 4453068 - DNA, 25 bp, Homo sapien
caagctcaaaattaaggcaatgggt

SEQ ID NO: 4453069 - DNA, 25 bp, Homo sapien
gatgtttcgaggctcttaggtacct

SEQ ID NO: 4453070 - DNA, 25 bp, Homo sapien
caaagaccaaatcaagggactgcca

SEQ ID NO: 4453071 - DNA, 25 bp, Homo sapien
agacaataatttgacacatagtatg

SEQ ID NO: 4453072 - DNA, 25 bp, Homo sapien
acctagacaataatttgacacatag

SEQ ID NO: 4453073 - DNA, 25 bp, Homo sapien
tagacaataatttgacacatagtat

SEQ ID NO: 4453074 - DNA, 25 bp, Homo sapien
ggtgggcactgcacgtaatacagag

SEQ ID NO: 4453075 - DNA, 25 bp, Homo sapien
cagtactgaatgctctctggtgggc

SEQ ID NO: 4453076 - DNA, 25 bp, Homo sapien
tacctgatatactgcacttgctggc

SEQ ID NO: 4453077 - DNA, 25 bp, Homo sapien
tgtatgcaaccaaagaagccctctt

SEQ ID NO: 4453078 - DNA, 25 bp, Homo sapien
ttctggacactctggaaagaatctg

SEQ ID NO: 4453079 - DNA, 25 bp, Homo sapien
cttcccatcctccagtaagagtttg

SEQ ID NO: 4453080 - DNA, 25 bp, Homo sapien
gcagccataataagttcatcagtac

SEQ ID NO: 4453081 - DNA, 25 bp, Homo sapien
caagatgttagctgaactgcattcc

SEQ ID NO: 4453082 - DNA, 25 bp, Homo sapien
gagactatcattcaaaaaaggagac

SEQ ID NO: 4453083 - DNA, 25 bp, Homo sapien
taggataggaacaccacacagagac

SEQ ID NO: 4453084 - DNA, 25 bp, Homo sapien
ggaaatggactctaccctctgaaga

SEQ ID NO: 4453085 - DNA, 25 bp, Homo sapien
gatgcttgagagtagcttgtcccag

SEQ ID NO: 4453086 - DNA, 25 bp, Homo sapien
gatatctctagaaggatatcctgga

SEQ ID NO: 4453087 - DNA, 25 bp, Homo sapien
gagatatggatatctctagaaggat

SEQ ID NO: 4453088 - DNA, 25 bp, Homo sapien
aaggatatcctggaattctaatatg

SEQ ID NO: 4453089 - DNA, 25 bp, Homo sapien
gatatcctggaattctaatatgaag

SEQ ID NO: 4453090 - DNA, 25 bp, Homo sapien
gaaaagccgaacgtgccaacagtaa

SEQ ID NO: 4453091 - DNA, 25 bp, Homo sapien
caacagtaaaacgtggtcccagagt

SEQ ID NO: 4453092 - DNA, 25 bp, Homo sapien
agctatacctcatcggccctgtagg

SEQ ID NO: 4453093 - DNA, 25 bp, Homo sapien
tcagctccagatggtgttacccagg

SEQ ID NO: 4453094 - DNA, 25 bp, Homo sapien
ccatagccaaatgcctaagctccaa

SEQ ID NO: 4453095 - DNA, 25 bp, Homo sapien
tttcattactagtgacctgctggtg

SEQ ID NO: 4453096 - DNA, 25 bp, Homo sapien
gaatagatgtgtctggtagcctctc

SEQ ID NO: 4453097 - DNA, 25 bp, Homo sapien
gcttaaggattgacactggcatagg

SEQ ID NO: 4453098 - DNA, 25 bp, Homo sapien
agagcataagcagcaccccagaaac

SEQ ID NO: 4453099 - DNA, 25 bp, Homo sapien
ccatggagatgctaatacctcttaa

SEQ ID NO: 4453100 - DNA, 25 bp, Homo sapien
tccagcaggcatatgatcttgtact

SEQ ID NO: 4453101 - DNA, 25 bp, Homo sapien
cataattagttttcctagtagccct

SEQ ID NO: 4453102 - DNA, 25 bp, Homo sapien
gtaggtaaatccaaatgaggctcct

SEQ ID NO: 4453103 - DNA, 25 bp, Homo sapien
aaaatatctttgtaatcagctattg

SEQ ID NO: 4453104 - DNA, 25 bp, Homo sapien
aatatctttgtaatcagctattgtg

SEQ ID NO: 4453105 - DNA, 25 bp, Homo sapien
taaatccaaatgaggctccttgcag

SEQ ID NO: 4453106 - DNA, 25 bp, Homo sapien
cagtgattatcagggtccacaataa

SEQ ID NO: 4453107 - DNA, 25 bp, Homo sapien
tcactcacctccatttttatttcca

SEQ ID NO: 4453108 - DNA, 25 bp, Homo sapien
cagggtccacaataattttctcact

SEQ ID NO: 4453109 - DNA, 25 bp, Homo sapien
tccatttttatttccatggcctcaa

SEQ ID NO: 4453110 - DNA, 25 bp, Homo sapien
ggggaggggatactgagctgttttg

SEQ ID NO: 4453111 - DNA, 25 bp, Homo sapien
tggatgtggcttctttccgggggag

SEQ ID NO: 4453112 - DNA, 25 bp, Homo sapien
gaggggatactgagctgttttgtgc

SEQ ID NO: 4453113 - DNA, 25 bp, Homo sapien
gggatactgagctgttttgtgcacc

SEQ ID NO: 4453114 - DNA, 25 bp, Homo sapien
actgtaggtacataggggctgcctt

SEQ ID NO: 4453115 - DNA, 25 bp, Homo sapien
cactgtaggtacataggggctgcct

SEQ ID NO: 4453116 - DNA, 25 bp, Homo sapien
tgtaggtacataggggctgccttac

SEQ ID NO: 4453117 - DNA, 25 bp, Homo sapien
ctgtaggtacataggggctgcctta

SEQ ID NO: 4453118 - DNA, 25 bp, Homo sapien
ggctcactgaactgtaggtagtatc

SEQ ID NO: 4453119 - DNA, 25 bp, Homo sapien
tagtatccttggaagaagttctaac

SEQ ID NO: 4453120 - DNA, 25 bp, Homo sapien
ctgaactgtaggtagtatccttgga

SEQ ID NO: 4453121 - DNA, 25 bp, Homo sapien
ccttggaagaagttctaacatttgc

SEQ ID NO: 4453122 - DNA, 25 bp, Homo sapien
tcaatcaagttctgtagcttttgtc

SEQ ID NO: 4453123 - DNA, 25 bp, Homo sapien
acttggcccctcaatcaagttctgt

SEQ ID NO: 4453124 - DNA, 25 bp, Homo sapien
ggcccctcaatcaagttctgtagct

SEQ ID NO: 4453125 - DNA, 25 bp, Homo sapien
ccaggaacttggcccctcaatcaag

SEQ ID NO: 4453126 - DNA, 25 bp, Homo sapien
tagctggttgagacccgcctctagc

SEQ ID NO: 4453127 - DNA, 25 bp, Homo sapien
agtagctggttgagacccgcctcta

SEQ ID NO: 4453128 - DNA, 25 bp, Homo sapien
agctggttgagacccgcctctagcc

SEQ ID NO: 4453129 - DNA, 25 bp, Homo sapien
gtagctggttgagacccgcctctag

SEQ ID NO: 4453130 - DNA, 25 bp, Homo sapien
tgcagactgatcaccacttcctttg

SEQ ID NO: 4453131 - DNA, 25 bp, Homo sapien
attattatctccataagcctataat

SEQ ID NO: 4453132 - DNA, 25 bp, Homo sapien
ctagcaaattattatctccataagc

SEQ ID NO: 4453133 - DNA, 25 bp, Homo sapien
atctccataagcctataatcttctt

SEQ ID NO: 4453134 - DNA, 25 bp, Homo sapien
ctccataagcctataatcttcttca

SEQ ID NO: 4453135 - DNA, 25 bp, Homo sapien
tcagcaactcttcctcagtactttc

SEQ ID NO: 4453136 - DNA, 25 bp, Homo sapien
tcagatcgtgggttttccacttgcc

SEQ ID NO: 4453137 - DNA, 25 bp, Homo sapien
gccttgcagatgttgattcagatcg

SEQ ID NO: 4453138 - DNA, 25 bp, Homo sapien
tttgtctgacagagttaagccagtc

SEQ ID NO: 4453139 - DNA, 25 bp, Homo sapien
tctccactagaacgtcttgcagatg

SEQ ID NO: 4453140 - DNA, 25 bp, Homo sapien
tgccctccccgacctctggtaggtg

SEQ ID NO: 4453141 - DNA, 25 bp, Homo sapien
cttgccctccccgacctctggtagg

SEQ ID NO: 4453142 - DNA, 25 bp, Homo sapien
ggctctcccacggtctgggctcctg

SEQ ID NO: 4453143 - DNA, 25 bp, Homo sapien
ctggctctcccacggtctgggctcc

SEQ ID NO: 4453144 - DNA, 25 bp, Homo sapien
tgctctggctctcccacggtctggg

SEQ ID NO: 4453145 - DNA, 25 bp, Homo sapien
ctctggctctcccacggtctgggct

SEQ ID NO: 4453146 - DNA, 25 bp, Homo sapien
gagatactatgatgagatcttcgtg

SEQ ID NO: 4453147 - DNA, 25 bp, Homo sapien
gatactatgatgagatcttcgtgga

SEQ ID NO: 4453148 - DNA, 25 bp, Homo sapien
gaatttcactcattggatgcagagg

SEQ ID NO: 4453149 - DNA, 25 bp, Homo sapien
gagatgagatactatgatgagatct

SEQ ID NO: 4453150 - DNA, 25 bp, Homo sapien
taggtgatagtgttgtttggcctct

SEQ ID NO: 4453151 - DNA, 25 bp, Homo sapien
aagattctacaaatggggattctgg

SEQ ID NO: 4453152 - DNA, 25 bp, Homo sapien
aacgtacgcctgaaacctcctcgct

SEQ ID NO: 4453153 - DNA, 25 bp, Homo sapien
tcaatgtcacacagggccgggttct

SEQ ID NO: 4453154 - DNA, 25 bp, Homo sapien
ctgtacataaaatagcttaactcac

SEQ ID NO: 4453155 - DNA, 25 bp, Homo sapien
tcttccactccgtgactctgccctt

SEQ ID NO: 4453156 - DNA, 25 bp, Homo sapien
gactgagccagtaggctctgagtcg

SEQ ID NO: 4453157 - DNA, 25 bp, Homo sapien
tccgtgactctgccctttccatatt

SEQ ID NO: 4453158 - DNA, 25 bp, Homo sapien
ttcaccaccggaactggaactagga

SEQ ID NO: 4453159 - DNA, 25 bp, Homo sapien
caccggaactggaactaggactgga

SEQ ID NO: 4453160 - DNA, 25 bp, Homo sapien
ctttcaccaccggaactggaactag

SEQ ID NO: 4453161 - DNA, 25 bp, Homo sapien
caccaccggaactggaactaggact

SEQ ID NO: 4453162 - DNA, 25 bp, Homo sapien
ttccttcattactgccttcaaataa

SEQ ID NO: 4453163 - DNA, 25 bp, Homo sapien
gagcctgatgataagcttccttcat

SEQ ID NO: 4453164 - DNA, 25 bp, Homo sapien
tggggccgtatgtcgaccctctcgc

SEQ ID NO: 4453165 - DNA, 25 bp, Homo sapien
ctcgcctggcacctgatgagcctga

SEQ ID NO: 4453166 - DNA, 25 bp, Homo sapien
ctgagccaggctaggaagggcaaag

SEQ ID NO: 4453167 - DNA, 25 bp, Homo sapien
ccaggctaggaagggcaaagagcca

SEQ ID NO: 4453168 - DNA, 25 bp, Homo sapien
gcaaagagccactttaatgaaatat

SEQ ID NO: 4453169 - DNA, 25 bp, Homo sapien
ggaagggcaaagagccactttaatg

SEQ ID NO: 4453170 - DNA, 25 bp, Homo sapien
tacctcagaaagcaacgactcaatt

SEQ ID NO: 4453171 - DNA, 25 bp, Homo sapien
tgattacctcagaaagcaacgactc

SEQ ID NO: 4453172 - DNA, 25 bp, Homo sapien
gacaatgattacctcagaaagcaac

SEQ ID NO: 4453173 - DNA, 25 bp, Homo sapien
caatgattacctcagaaagcaacga

SEQ ID NO: 4453174 - DNA, 25 bp, Homo sapien
gtggctgcttgtaatcactcctctt

SEQ ID NO: 4453175 - DNA, 25 bp, Homo sapien
ccaaagtttcgccttctccatgcaa

SEQ ID NO: 4453176 - DNA, 25 bp, Homo sapien
aaccaaagtttcgccttctccatgc

SEQ ID NO: 4453177 - DNA, 25 bp, Homo sapien
gaaccaaagtttcgccttctccatg

SEQ ID NO: 4453178 - DNA, 25 bp, Homo sapien
ctcccagacttggaaggctggcagc

SEQ ID NO: 4453179 - DNA, 25 bp, Homo sapien
cacacagttgctctcccagacttgg

SEQ ID NO: 4453180 - DNA, 25 bp, Homo sapien
ccagacttggaaggctggcagcaac

SEQ ID NO: 4453181 - DNA, 25 bp, Homo sapien
agttgctctcccagacttggaaggc

SEQ ID NO: 4453182 - DNA, 25 bp, Homo sapien
catttccttcctctcgacgtctggt

SEQ ID NO: 4453183 - DNA, 25 bp, Homo sapien
tcgacgtctggtatgaatcagatgt

SEQ ID NO: 4453184 - DNA, 25 bp, Homo sapien
agtcccctgaggtgttatcctggcc

SEQ ID NO: 4453185 - DNA, 25 bp, Homo sapien
gagtcccctgaggtgttatcctggc

SEQ ID NO: 4453186 - DNA, 25 bp, Homo sapien
cttctccgtctgagcctagagccag

SEQ ID NO: 4453187 - DNA, 25 bp, Homo sapien
ggtggagcagacaaagctcttgtgc

SEQ ID NO: 4453188 - DNA, 25 bp, Homo sapien
acaaagctcttgtgcctggtcctca

SEQ ID NO: 4453189 - DNA, 25 bp, Homo sapien
tccgtctgagcctagagccaggagg

SEQ ID NO: 4453190 - DNA, 25 bp, Homo sapien
ggtagtaaacatgtgaggaatttct

SEQ ID NO: 4453191 - DNA, 25 bp, Homo sapien
ctcaataaacaacagaggggacagg

SEQ ID NO: 4453192 - DNA, 25 bp, Homo sapien
ggaaggtagtaaacatgtgaggaat

SEQ ID NO: 4453193 - DNA, 25 bp, Homo sapien
aattagaaggaaggtagtaaacatg

SEQ ID NO: 4453194 - DNA, 25 bp, Homo sapien
cttgaagtaggctatctgatgttcc

SEQ ID NO: 4453195 - DNA, 25 bp, Homo sapien
aatgccagtcctgaaaatcactgtg

SEQ ID NO: 4453196 - DNA, 25 bp, Homo sapien
tctctcgtggaccaggcattggcca

SEQ ID NO: 4453197 - DNA, 25 bp, Homo sapien
cattggccagacctataaagtaata

SEQ ID NO: 4453198 - DNA, 25 bp, Homo sapien
aatgtaagcaagtggtaccttctca

SEQ ID NO: 4453199 - DNA, 25 bp, Homo sapien
caaaccacatgactggagaggaatc

SEQ ID NO: 4453200 - DNA, 25 bp, Homo sapien
gcttctggccaaagtaactcaaacc

SEQ ID NO: 4453201 - DNA, 25 bp, Homo sapien
cacagcacagattgggcctcagttg

SEQ ID NO: 4453202 - DNA, 25 bp, Homo sapien
tgacagcagagatgccggcttagcc

SEQ ID NO: 4453203 - DNA, 25 bp, Homo sapien
tggccccaaatgcttctgtacgtaa

SEQ ID NO: 4453204 - DNA, 25 bp, Homo sapien
tctctctgcagtctggcaactgaca

SEQ ID NO: 4453205 - DNA, 25 bp, Homo sapien
ttggaaacaccttgtggaaggaggc

SEQ ID NO: 4453206 - DNA, 25 bp, Homo sapien
gaaactgccgtttagagagatctag

SEQ ID NO: 4453207 - DNA, 25 bp, Homo sapien
cataataagctctgtaaccgaaagg

SEQ ID NO: 4453208 - DNA, 25 bp, Homo sapien
gacttttagtgaggcccatgcaggg

SEQ ID NO: 4453209 - DNA, 25 bp, Homo sapien
cagtatagaatgctgcacgtcccag

SEQ ID NO: 4453210 - DNA, 25 bp, Homo sapien
gagtcataagctttcccacttccac

SEQ ID NO: 4453211 - DNA, 25 bp, Homo sapien
gaaatagttattctgagtcataagc

SEQ ID NO: 4453212 - DNA, 25 bp, Homo sapien
gttattctgagtcataagctttccc

SEQ ID NO: 4453213 - DNA, 25 bp, Homo sapien
agtttcttctcagcatagcatccag

SEQ ID NO: 4453214 - DNA, 25 bp, Homo sapien
gaacagtcagatgccatcatcaatg

SEQ ID NO: 4453215 - DNA, 25 bp, Homo sapien
cagtcagatgccatcatcaatgagt

SEQ ID NO: 4453216 - DNA, 25 bp, Homo sapien
tcagatgccatcatcaatgagttga

SEQ ID NO: 4453217 - DNA, 25 bp, Homo sapien
ctggaacagtcagatgccatcatca

SEQ ID NO: 4453218 - DNA, 25 bp, Homo sapien
catttgtgatgatgagggcacgcta

SEQ ID NO: 4453219 - DNA, 25 bp, Homo sapien
tctgagtgccggttgacaaatgctg

SEQ ID NO: 4453220 - DNA, 25 bp, Homo sapien
gtccacagttgagtacgccataatt

SEQ ID NO: 4453221 - DNA, 25 bp, Homo sapien
gcttgtaatgcgagcccatttgtga

SEQ ID NO: 4453222 - DNA, 25 bp, Homo sapien
gaagccactcatggaggcacggagt

SEQ ID NO: 4453223 - DNA, 25 bp, Homo sapien
tgagaagtaagaggatggacatccc

SEQ ID NO: 4453224 - DNA, 25 bp, Homo sapien
gacccttccaggatcaaacatattg

SEQ ID NO: 4453225 - DNA, 25 bp, Homo sapien
gatactggtatagggaacccaggag

SEQ ID NO: 4453226 - DNA, 25 bp, Homo sapien
ggagagctggacatagatgtttaca

SEQ ID NO: 4453227 - DNA, 25 bp, Homo sapien
cctggcaggtgacctaatgcttagt

SEQ ID NO: 4453228 - DNA, 25 bp, Homo sapien
caaccctaccgtgatagaaatgaag

SEQ ID NO: 4453229 - DNA, 25 bp, Homo sapien
tccagcgccagagcagctagcaaca

SEQ ID NO: 4453230 - DNA, 25 bp, Homo sapien
acttcgtgatccgcctaccttggct

SEQ ID NO: 4453231 - DNA, 25 bp, Homo sapien
gacttcgtgatccgcctaccttggc

SEQ ID NO: 4453232 - DNA, 25 bp, Homo sapien
cgtgatccgcctaccttggcttctc

SEQ ID NO: 4453233 - DNA, 25 bp, Homo sapien
ttcgtgatccgcctaccttggcttc

SEQ ID NO: 4453234 - DNA, 25 bp, Homo sapien
aagcctacagcaccaaatatcccca

SEQ ID NO: 4453235 - DNA, 25 bp, Homo sapien
aatatccccagtctcccatctaagt

SEQ ID NO: 4453236 - DNA, 25 bp, Homo sapien
tatgttcagggtgctatggctacag

SEQ ID NO: 4453237 - DNA, 25 bp, Homo sapien
gagatcaagtatgttcagggtgcta

SEQ ID NO: 4453238 - DNA, 25 bp, Homo sapien
gcattgactttagtctggtcacaaa

SEQ ID NO: 4453239 - DNA, 25 bp, Homo sapien
gcaggagaccttatcaactggatgt

SEQ ID NO: 4453240 - DNA, 25 bp, Homo sapien
ccacagtgttcacttgcaggagacc

SEQ ID NO: 4453241 - DNA, 25 bp, Homo sapien
tgtaaagcagagcatgcctgcattg

SEQ ID NO: 4453242 - DNA, 25 bp, Homo sapien
tcatgctagggcagttgttgtgaac

SEQ ID NO: 4453243 - DNA, 25 bp, Homo sapien
tgaaccgctgagaggccaagttctt

SEQ ID NO: 4453244 - DNA, 25 bp, Homo sapien
tgctagggcagttgttgtgaaccgc

SEQ ID NO: 4453245 - DNA, 25 bp, Homo sapien
cagttgttgtgaaccgctgagaggc

SEQ ID NO: 4453246 - DNA, 25 bp, Homo sapien
caaatgtagttctgttggcctaatc

SEQ ID NO: 4453247 - DNA, 25 bp, Homo sapien
aacaggagtgaagcccatttgggcc

SEQ ID NO: 4453248 - DNA, 25 bp, Homo sapien
gagtggcgccacatgacctaggtga

SEQ ID NO: 4453249 - DNA, 25 bp, Homo sapien
ccagggcaacttagagcttccagca

SEQ ID NO: 4453250 - DNA, 25 bp, Homo sapien
agaggccaggtttacccagacctga

SEQ ID NO: 4453251 - DNA, 25 bp, Homo sapien
tttaggaccttcaccagaggccagg

SEQ ID NO: 4453252 - DNA, 25 bp, Homo sapien
gggcactctagttcatgtcataggt

SEQ ID NO: 4453253 - DNA, 25 bp, Homo sapien
cctgacgggtctagaaatagaggat

SEQ ID NO: 4453254 - DNA, 25 bp, Homo sapien
tagggtcttcaaactagggcaggag

SEQ ID NO: 4453255 - DNA, 25 bp, Homo sapien
aactagggcaggagccattggcatg

SEQ ID NO: 4453256 - DNA, 25 bp, Homo sapien
cttggacttagggtcttcaaactag

SEQ ID NO: 4453257 - DNA, 25 bp, Homo sapien
tgtcacattgggttgggcactgcca

SEQ ID NO: 4453258 - DNA, 25 bp, Homo sapien
taagacagacctaggagccccttgt

SEQ ID NO: 4453259 - DNA, 25 bp, Homo sapien
agtaggtactcaagcaatgactgcc

SEQ ID NO: 4453260 - DNA, 25 bp, Homo sapien
cttgcgggctccaacaggaactcaa

SEQ ID NO: 4453261 - DNA, 25 bp, Homo sapien
gccttgagccacacagagttgaaat

SEQ ID NO: 4453262 - DNA, 25 bp, Homo sapien
tcattccatcctaaatctttggtca

SEQ ID NO: 4453263 - DNA, 25 bp, Homo sapien
tctttggtcaactctggaagtacct

SEQ ID NO: 4453264 - DNA, 25 bp, Homo sapien
aaatctttggtcaactctggaagta

SEQ ID NO: 4453265 - DNA, 25 bp, Homo sapien
tttggtcaactctggaagtacctct

SEQ ID NO: 4453266 - DNA, 25 bp, Homo sapien
gccaaaaggtctttatatcccctca

SEQ ID NO: 4453267 - DNA, 25 bp, Homo sapien
caggatgtgatttattgccaaaagg

SEQ ID NO: 4453268 - DNA, 25 bp, Homo sapien
tcattgaacctctgagccgttctca

SEQ ID NO: 4453269 - DNA, 25 bp, Homo sapien
cgttctcaatgggaatagttatggg

SEQ ID NO: 4453270 - DNA, 25 bp, Homo sapien
gcatttgatgagagggctcttcccc

SEQ ID NO: 4453271 - DNA, 25 bp, Homo sapien
gaaacacgcactacaggaaggcctt

SEQ ID NO: 4453272 - DNA, 25 bp, Homo sapien
gacctttggaccaaggcacacacca

SEQ ID NO: 4453273 - DNA, 25 bp, Homo sapien
gagtattcttagtgaactgcccaaa

SEQ ID NO: 4453274 - DNA, 25 bp, Homo sapien
tgctgaacggcctcagatcattaaa

SEQ ID NO: 4453275 - DNA, 25 bp, Homo sapien
tattatcagcaggttgcttggtgag

SEQ ID NO: 4453276 - DNA, 25 bp, Homo sapien
tcctcacaggatgcttaaatagcag

SEQ ID NO: 4453277 - DNA, 25 bp, Homo sapien
cttcagcatgacaagtgcattcttt

SEQ ID NO: 4453278 - DNA, 25 bp, Homo sapien
tctgaggctttgctcttcaggctct

SEQ ID NO: 4453279 - DNA, 25 bp, Homo sapien
ggactctctgaggctttgctcttca

SEQ ID NO: 4453280 - DNA, 25 bp, Homo sapien
agggtgggaggactctctgaggctt

SEQ ID NO: 4453281 - DNA, 25 bp, Homo sapien
ccagggtgggaggactctctgaggc

SEQ ID NO: 4453282 - DNA, 25 bp, Homo sapien
aggtaatattttgggttggcaggca

SEQ ID NO: 4453283 - DNA, 25 bp, Homo sapien
gggctgcaggtaatattttgggttg

SEQ ID NO: 4453284 - DNA, 25 bp, Homo sapien
actggggctgcaggtaatattttgg

SEQ ID NO: 4453285 - DNA, 25 bp, Homo sapien
tgcaggtaatattttgggttggcag

SEQ ID NO: 4453286 - DNA, 25 bp, Homo sapien
gcccatgaagtatccccttttactc

SEQ ID NO: 4453287 - DNA, 25 bp, Homo sapien
ccatgaagtatccccttttactcag

SEQ ID NO: 4453288 - DNA, 25 bp, Homo sapien
gtgcccatgaagtatccccttttac

SEQ ID NO: 4453289 - DNA, 25 bp, Homo sapien
ctgtgcccatgaagtatcccctttt

SEQ ID NO: 4453290 - DNA, 25 bp, Homo sapien
gaagccagcctcttgggagtttcct

SEQ ID NO: 4453291 - DNA, 25 bp, Homo sapien
aagccagcctcttgggagtttcctt

SEQ ID NO: 4453292 - DNA, 25 bp, Homo sapien
agccagcctcttgggagtttccttt

SEQ ID NO: 4453293 - DNA, 25 bp, Homo sapien
cagcttcacttgttctgagggtttc

SEQ ID NO: 4453294 - DNA, 25 bp, Homo sapien
acccacactgaaatatggcttcccc

SEQ ID NO: 4453295 - DNA, 25 bp, Homo sapien
agcttcacttgttctgagggtttcc

SEQ ID NO: 4453296 - DNA, 25 bp, Homo sapien
gtttcccgtgacacctccacaccca

SEQ ID NO: 4453297 - DNA, 25 bp, Homo sapien
cagtaacaatatcaggtcatcggga

SEQ ID NO: 4453298 - DNA, 25 bp, Homo sapien
ctctggttcaaaggccttggacgcc

SEQ ID NO: 4453299 - DNA, 25 bp, Homo sapien
tggacgcctctgacagtattagtga

SEQ ID NO: 4453300 - DNA, 25 bp, Homo sapien
agaaactcggacctccaccaaatgg

SEQ ID NO: 4453301 - DNA, 25 bp, Homo sapien
gctcctgaatgaccagtgactcaat

SEQ ID NO: 4453302 - DNA, 25 bp, Homo sapien
caccgagaagcaagtttatagcagt

SEQ ID NO: 4453303 - DNA, 25 bp, Homo sapien
cagataaacaacttaacgatacacc

SEQ ID NO: 4453304 - DNA, 25 bp, Homo sapien
attttggtaactatacaaacatttg

SEQ ID NO: 4453305 - DNA, 25 bp, Homo sapien
cactaaaaggtatgagagaggcctg

SEQ ID NO: 4453306 - DNA, 25 bp, Homo sapien
gaaactaatatgctaaaccacattg

SEQ ID NO: 4453307 - DNA, 25 bp, Homo sapien
tttaagacatcaagtttatggtgat

SEQ ID NO: 4453308 - DNA, 25 bp, Homo sapien
gaatgtcaaaagttgctagcaggca

SEQ ID NO: 4453309 - DNA, 25 bp, Homo sapien
ctcagagggaatgctttcagctttt

SEQ ID NO: 4453310 - DNA, 25 bp, Homo sapien
ttctcagagggaatgctttcagctt

SEQ ID NO: 4453311 - DNA, 25 bp, Homo sapien
tccccattcagtattatgctggctg

SEQ ID NO: 4453312 - DNA, 25 bp, Homo sapien
agaggagtggtgacagtgtgcatcc

SEQ ID NO: 4453313 - DNA, 25 bp, Homo sapien
cggtctcctgtagcgaaggcttcaa

SEQ ID NO: 4453314 - DNA, 25 bp, Homo sapien
gggagtcctgatttcgtgaagagca

SEQ ID NO: 4453315 - DNA, 25 bp, Homo sapien
tattaatagcgggtaccaggtgcca

SEQ ID NO: 4453316 - DNA, 25 bp, Homo sapien
gcaggacactctaacctagtcggcc

SEQ ID NO: 4453317 - DNA, 25 bp, Homo sapien
gccacttcccagctcgagtctggag

SEQ ID NO: 4453318 - DNA, 25 bp, Homo sapien
agtctggacctcctcgcgttgtgac

SEQ ID NO: 4453319 - DNA, 25 bp, Homo sapien
agtactttacctctaggagccacgg

SEQ ID NO: 4453320 - DNA, 25 bp, Homo sapien
tgtgaccgaagtactttacctctag

SEQ ID NO: 4453321 - DNA, 25 bp, Homo sapien
tccgctgcaggtaccgccgcgggct

SEQ ID NO: 4453322 - DNA, 25 bp, Homo sapien
ggctccggagcaggtgtagtcgtat

SEQ ID NO: 4453323 - DNA, 25 bp, Homo sapien
gcagagggttcaccccgggcgtgca

SEQ ID NO: 4453324 - DNA, 25 bp, Homo sapien
ggccctctgtcccagcgagggcaga

SEQ ID NO: 4453325 - DNA, 25 bp, Homo sapien
tgtaattgaggcacgccatggcaca

SEQ ID NO: 4453326 - DNA, 25 bp, Homo sapien
gaagtagcctatgtcctggaagaag

SEQ ID NO: 4453327 - DNA, 25 bp, Homo sapien
gaagtatgggcagcagaggttcacc

SEQ ID NO: 4453328 - DNA, 25 bp, Homo sapien
cctgcgcgtaggtgagagtctcgtc

SEQ ID NO: 4453329 - DNA, 25 bp, Homo sapien
caagtcagtgtatggagggtcacat

SEQ ID NO: 4453330 - DNA, 25 bp, Homo sapien
aaatgaaaagaatcattctgggctt

SEQ ID NO: 4453331 - DNA, 25 bp, Homo sapien
tatggagggtcacatgcaaaatgaa

SEQ ID NO: 4453332 - DNA, 25 bp, Homo sapien
ccttgtatgagccattcagattaag

SEQ ID NO: 4453333 - DNA, 25 bp, Homo sapien
gaaagacgacctagaagaagtgccc

SEQ ID NO: 4453334 - DNA, 25 bp, Homo sapien
gatcagctgggactgactaagcctg

SEQ ID NO: 4453335 - DNA, 25 bp, Homo sapien
gaagtgccctgtaaactgagacctg

SEQ ID NO: 4453336 - DNA, 25 bp, Homo sapien
tcagggtccatagtcaaacaatccg

SEQ ID NO: 4453337 - DNA, 25 bp, Homo sapien
gttgatacttcatccactttgtcca

SEQ ID NO: 4453338 - DNA, 25 bp, Homo sapien
ctgggataggttcagttgatacttc

SEQ ID NO: 4453339 - DNA, 25 bp, Homo sapien
gttagaagttctgctcacataatag

SEQ ID NO: 4453340 - DNA, 25 bp, Homo sapien
aagagtcaatcccatctgtgttaga

SEQ ID NO: 4453341 - DNA, 25 bp, Homo sapien
gggcagaatcttatcaacaaatgtt

SEQ ID NO: 4453342 - DNA, 25 bp, Homo sapien
gaagaatgcctagtacacatgctac

SEQ ID NO: 4453343 - DNA, 25 bp, Homo sapien
gttgtaaagctccttgaagaatgcc

SEQ ID NO: 4453344 - DNA, 25 bp, Homo sapien
aaagagtaccgatgtcaagagtggg

SEQ ID NO: 4453345 - DNA, 25 bp, Homo sapien
taccatatgcgctgatgagtgatca

SEQ ID NO: 4453346 - DNA, 25 bp, Homo sapien
gccacaatacatccgtgaatgccaa

SEQ ID NO: 4453347 - DNA, 25 bp, Homo sapien
tcaatccgcttacaaaagtgaggcc

SEQ ID NO: 4453348 - DNA, 25 bp, Homo sapien
tagtgcagcactgtggtaaaagggc

SEQ ID NO: 4453349 - DNA, 25 bp, Homo sapien
ctggctggctgaaaatttagtccgc

SEQ ID NO: 4453350 - DNA, 25 bp, Homo sapien
ggtgagttgcataaataccgaagca

SEQ ID NO: 4453351 - DNA, 25 bp, Homo sapien
taccgaagcagttcaccgatatact

SEQ ID NO: 4453352 - DNA, 25 bp, Homo sapien
tttagtccgcaaggcaagagtagca

SEQ ID NO: 4453353 - DNA, 25 bp, Homo sapien
caggaggagctcttgagaacaaccc

SEQ ID NO: 4453354 - DNA, 25 bp, Homo sapien
ggaggagctcttgagaacaacccca

SEQ ID NO: 4453355 - DNA, 25 bp, Homo sapien
gagctcttgagaacaaccccatcga

SEQ ID NO: 4453356 - DNA, 25 bp, Homo sapien
aggaggagctcttgagaacaacccc

SEQ ID NO: 4453357 - DNA, 25 bp, Homo sapien
tggtggggttagtccctccagcaac

SEQ ID NO: 4453358 - DNA, 25 bp, Homo sapien
ctgttctgctaaggcagaggttgcc

SEQ ID NO: 4453359 - DNA, 25 bp, Homo sapien
ctgtggatgggtgtcacttggttta

SEQ ID NO: 4453360 - DNA, 25 bp, Homo sapien
gatgagctgggccatatatgtctgt

SEQ ID NO: 4453361 - DNA, 25 bp, Homo sapien
tccctggcgaaccttcctgattctg

SEQ ID NO: 4453362 - DNA, 25 bp, Homo sapien
actctgtgctgcaacagatccatcc

SEQ ID NO: 4453363 - DNA, 25 bp, Homo sapien
gtgctgcaacagatccatccattct

SEQ ID NO: 4453364 - DNA, 25 bp, Homo sapien
ttgggccccagtcatattggccact

SEQ ID NO: 4453365 - DNA, 25 bp, Homo sapien
tggtattagggtgattctggctcta

SEQ ID NO: 4453366 - DNA, 25 bp, Homo sapien
ggtgtctgggggagctgcctgagaa

SEQ ID NO: 4453367 - DNA, 25 bp, Homo sapien
gtctgggggagctgcctgagaagcc

SEQ ID NO: 4453368 - DNA, 25 bp, Homo sapien
tgggggagctgcctgagaagccttt

SEQ ID NO: 4453369 - DNA, 25 bp, Homo sapien
gagctgcctgagaagccttttgaac

SEQ ID NO: 4453370 - DNA, 25 bp, Homo sapien
agtagaacaagaagtttgatctata

SEQ ID NO: 4453371 - DNA, 25 bp, Homo sapien
caagaagtttgatctataactgtga

SEQ ID NO: 4453372 - DNA, 25 bp, Homo sapien
acaatcaattgaggtaactcactac

SEQ ID NO: 4453373 - DNA, 25 bp, Homo sapien
aattgaggtaactcactaccttcag

SEQ ID NO: 4453374 - DNA, 25 bp, Homo sapien
caaatctcttgacaaattgtctcca

SEQ ID NO: 4453375 - DNA, 25 bp, Homo sapien
ccttcagtggcagcatagaactcat

SEQ ID NO: 4453376 - DNA, 25 bp, Homo sapien
tagaactcatagatgcatatgtccc

SEQ ID NO: 4453377 - DNA, 25 bp, Homo sapien
gcaccaacttttctcgcataattca

SEQ ID NO: 4453378 - DNA, 25 bp, Homo sapien
ttctgtaggtagtttactcttccaa

SEQ ID NO: 4453379 - DNA, 25 bp, Homo sapien
tttctgtaggtagtttactcttcca

SEQ ID NO: 4453380 - DNA, 25 bp, Homo sapien
tctgtaggtagtttactcttccaac

SEQ ID NO: 4453381 - DNA, 25 bp, Homo sapien
tcatatttaatcaggtcataagtta

SEQ ID NO: 4453382 - DNA, 25 bp, Homo sapien
tttgggaactctgacgcaatatcca

SEQ ID NO: 4453383 - DNA, 25 bp, Homo sapien
tatccattttcatcacggacaggtt

SEQ ID NO: 4453384 - DNA, 25 bp, Homo sapien
catcacggacaggttcatctttctc

SEQ ID NO: 4453385 - DNA, 25 bp, Homo sapien
aggggcacaggttgattgaacaaaa

SEQ ID NO: 4453386 - DNA, 25 bp, Homo sapien
gggcacaggttgattgaacaaaagt

SEQ ID NO: 4453387 - DNA, 25 bp, Homo sapien
gcacaggttgattgaacaaaagtcc

SEQ ID NO: 4453388 - DNA, 25 bp, Homo sapien
aggttgattgaacaaaagtccactg

SEQ ID NO: 4453389 - DNA, 25 bp, Homo sapien
ggtcaaccattaagagatctccact

SEQ ID NO: 4453390 - DNA, 25 bp, Homo sapien
ccaactctgtcgtggaaatagatga

SEQ ID NO: 4453391 - DNA, 25 bp, Homo sapien
tccactgttgaaatagaggtctcct

SEQ ID NO: 4453392 - DNA, 25 bp, Homo sapien
ccattaaatggtgtaagttgtgtga

SEQ ID NO: 4453393 - DNA, 25 bp, Homo sapien
cggagagctggtgtttcctttagat

SEQ ID NO: 4453394 - DNA, 25 bp, Homo sapien
ctggcccaggttgcaatgtcggaga

SEQ ID NO: 4453395 - DNA, 25 bp, Homo sapien
catgatcctgatctcgtgttcctca

SEQ ID NO: 4453396 - DNA, 25 bp, Homo sapien
aaggacaaagttagcagaggtcact

SEQ ID NO: 4453397 - DNA, 25 bp, Homo sapien
tggcacatgcactccataaacattt

SEQ ID NO: 4453398 - DNA, 25 bp, Homo sapien
cttcttggacaaaatcaaccagtcc

SEQ ID NO: 4453399 - DNA, 25 bp, Homo sapien
aaatcaaccagtccaactgtatcag

SEQ ID NO: 4453400 - DNA, 25 bp, Homo sapien
tggacaaaatcaaccagtccaactg

SEQ ID NO: 4453401 - DNA, 25 bp, Homo sapien
gggccttgcataactaggtaggtaa

SEQ ID NO: 4453402 - DNA, 25 bp, Homo sapien
tattcttagaaaccggggccttgca

SEQ ID NO: 4453403 - DNA, 25 bp, Homo sapien
tgatggaggccatgccaatgcgacc

SEQ ID NO: 4453404 - DNA, 25 bp, Homo sapien
tgtgctgaaagagtttctttccatc

SEQ ID NO: 4453405 - DNA, 25 bp, Homo sapien
cagggttttagcacttatggcatta

SEQ ID NO: 4453406 - DNA, 25 bp, Homo sapien
tatagatgtcctcagtcataggcac

SEQ ID NO: 4453407 - DNA, 25 bp, Homo sapien
tgtgtcatccaagaaatacaaggca

SEQ ID NO: 4453408 - DNA, 25 bp, Homo sapien
tttgatgacagcagggttaaagccc

SEQ ID NO: 4453409 - DNA, 25 bp, Homo sapien
tcacaatcttcaatcaaattaaagt

SEQ ID NO: 4453410 - DNA, 25 bp, Homo sapien
ttaaagttggattatatcaagtggc

SEQ ID NO: 4453411 - DNA, 25 bp, Homo sapien
agtctccctttacgggtatgcaaat

SEQ ID NO: 4453412 - DNA, 25 bp, Homo sapien
atttcctcacaatcttcaatcaaat

SEQ ID NO: 4453413 - DNA, 25 bp, Homo sapien
ttatagataactagtctgttgtagt

SEQ ID NO: 4453414 - DNA, 25 bp, Homo sapien
tcattctcagattattctgcgtaac

SEQ ID NO: 4453415 - DNA, 25 bp, Homo sapien
tgagaaaacctgatgcacatggact

SEQ ID NO: 4453416 - DNA, 25 bp, Homo sapien
catggactcagtttgacgtaagctc

SEQ ID NO: 4453417 - DNA, 25 bp, Homo sapien
tgttgaattccacaatgtatggaca

SEQ ID NO: 4453418 - DNA, 25 bp, Homo sapien
gcactttaaggcactgattttaaga

SEQ ID NO: 4453419 - DNA, 25 bp, Homo sapien
gtgctatgacttgctctcatcacaa

SEQ ID NO: 4453420 - DNA, 25 bp, Homo sapien
gggacgtgaaactgtattctgtgcc

SEQ ID NO: 4453421 - DNA, 25 bp, Homo sapien
tactcctgtaggtataaacctctgt

SEQ ID NO: 4453422 - DNA, 25 bp, Homo sapien
ggtgatcgttgttggttaggccaaa

SEQ ID NO: 4453423 - DNA, 25 bp, Homo sapien
cagctttaagttgtgtcagattctc

SEQ ID NO: 4453424 - DNA, 25 bp, Homo sapien
gactgatgctggaattactcctgta

SEQ ID NO: 4453425 - DNA, 25 bp, Homo sapien
catatccaggtcatatctcttctct

SEQ ID NO: 4453426 - DNA, 25 bp, Homo sapien
ctgggaccgctatacccggctaagt

SEQ ID NO: 4453427 - DNA, 25 bp, Homo sapien
tattttcatagagagggtgtcttgc

SEQ ID NO: 4453428 - DNA, 25 bp, Homo sapien
ctggcataagtcaccatatccaggt

SEQ ID NO: 4453429 - DNA, 25 bp, Homo sapien
tcttttcttatgtgtcaaaacaggg

SEQ ID NO: 4453430 - DNA, 25 bp, Homo sapien
caaaggtgtaatgcatctggtggct

SEQ ID NO: 4453431 - DNA, 25 bp, Homo sapien
ttaaactgccaccataataccttcg

SEQ ID NO: 4453432 - DNA, 25 bp, Homo sapien
tagggtgatacaactcaattggctt

SEQ ID NO: 4453433 - DNA, 25 bp, Homo sapien
cccacggtaatcatatgaagtgggt

SEQ ID NO: 4453434 - DNA, 25 bp, Homo sapien
taattgtgagcatactagatgcagt

SEQ ID NO: 4453435 - DNA, 25 bp, Homo sapien
caaggtacctgagttagttaagtgt

SEQ ID NO: 4453436 - DNA, 25 bp, Homo sapien
atgcctttaagccccacggtaatca

SEQ ID NO: 4453437 - DNA, 25 bp, Homo sapien
gggccgagaccacagtacttctgaa

SEQ ID NO: 4453438 - DNA, 25 bp, Homo sapien
tcggccggaccagacagggttaatg

SEQ ID NO: 4453439 - DNA, 25 bp, Homo sapien
tgtgttgaatcagcgtgcctagcct

SEQ ID NO: 4453440 - DNA, 25 bp, Homo sapien
tagcctcaagggtgcatcgtgaaaa

SEQ ID NO: 4453441 - DNA, 25 bp, Homo sapien
gccgctcccgaagcttttccaggtc

SEQ ID NO: 4453442 - DNA, 25 bp, Homo sapien
aggtcagtgcgggtctgtgtagggc

SEQ ID NO: 4453443 - DNA, 25 bp, Homo sapien
agcttttccaggtcagtgcgggtct

SEQ ID NO: 4453444 - DNA, 25 bp, Homo sapien
cgccgctcccgaagcttttccaggt

SEQ ID NO: 4453445 - DNA, 25 bp, Homo sapien
attttgggcgccgaccagacgcggc

SEQ ID NO: 4453446 - DNA, 25 bp, Homo sapien
gcttgactcactcgcacaccatgtg

SEQ ID NO: 4453447 - DNA, 25 bp, Homo sapien
gccctgtgcagctgaagcgctttgt

SEQ ID NO: 4453448 - DNA, 25 bp, Homo sapien
ttttcggaaaatagcgccctgtgca

SEQ ID NO: 4453449 - DNA, 25 bp, Homo sapien
gcggaaaatcctcgggcgatgagct

SEQ ID NO: 4453450 - DNA, 25 bp, Homo sapien
gaaaatcctcgggcgatgagctgaa

SEQ ID NO: 4453451 - DNA, 25 bp, Homo sapien
ggaaaatcctcgggcgatgagctga

SEQ ID NO: 4453452 - DNA, 25 bp, Homo sapien
aaaatcctcgggcgatgagctgaag

SEQ ID NO: 4453453 - DNA, 25 bp, Homo sapien
ggagcaggatctgccgacgagggca

SEQ ID NO: 4453454 - DNA, 25 bp, Homo sapien
gggtaggagcaggatctgccgacga

SEQ ID NO: 4453455 - DNA, 25 bp, Homo sapien
gctgaagcgctagaaatggcatatt

SEQ ID NO: 4453456 - DNA, 25 bp, Homo sapien
ttgtgtggctgaagcgctagaaatg

SEQ ID NO: 4453457 - DNA, 25 bp, Homo sapien
cttgcggtcgccgagagcggatcat

SEQ ID NO: 4453458 - DNA, 25 bp, Homo sapien
cgggacttgcggtcgccgagagcgg

SEQ ID NO: 4453459 - DNA, 25 bp, Homo sapien
cgccgcgcacatggccgtccgcagc

SEQ ID NO: 4453460 - DNA, 25 bp, Homo sapien
cagaacaggcgggaaggttcggtgg

SEQ ID NO: 4453461 - DNA, 25 bp, Homo sapien
gacacgaaggttagcacaggaacat

SEQ ID NO: 4453462 - DNA, 25 bp, Homo sapien
tctgctaggccgcacagttggcaag

SEQ ID NO: 4453463 - DNA, 25 bp, Homo sapien
taaaggtaaatcctagcctcttggc

SEQ ID NO: 4453464 - DNA, 25 bp, Homo sapien
tcaacagtcatgtcacagagacacg

SEQ ID NO: 4453465 - DNA, 25 bp, Homo sapien
tccagccacggaaaaacagatctct

SEQ ID NO: 4453466 - DNA, 25 bp, Homo sapien
tactaggatctacgaaacatgaggc

SEQ ID NO: 4453467 - DNA, 25 bp, Homo sapien
tacctctgaggtggcagtaatccaa

SEQ ID NO: 4453468 - DNA, 25 bp, Homo sapien
tatatcttcgtcatgaacctgactg

SEQ ID NO: 4453469 - DNA, 25 bp, Homo sapien
gattacttatctgaagctgcacaaa

SEQ ID NO: 4453470 - DNA, 25 bp, Homo sapien
gattaaattcttggcgctgtctcac

SEQ ID NO: 4453471 - DNA, 25 bp, Homo sapien
aaaggctaagtggagaaagattact

SEQ ID NO: 4453472 - DNA, 25 bp, Homo sapien
catattcccaagtcctacatgtagg

SEQ ID NO: 4453473 - DNA, 25 bp, Homo sapien
tagatttcggatacactgaccttgc

SEQ ID NO: 4453474 - DNA, 25 bp, Homo sapien
tatatgactggttggctcacatgca

SEQ ID NO: 4453475 - DNA, 25 bp, Homo sapien
tgacttctgcacatagcattcaagg

SEQ ID NO: 4453476 - DNA, 25 bp, Homo sapien
tttcagtgtgtagaacagtaccagg

SEQ ID NO: 4453477 - DNA, 25 bp, Homo sapien
gcaagataggtcagctttttggatc

SEQ ID NO: 4453478 - DNA, 25 bp, Homo sapien
tctctactgctactatcctagtcca

SEQ ID NO: 4453479 - DNA, 25 bp, Homo sapien
tcatttaattggtaagcaagatagg

SEQ ID NO: 4453480 - DNA, 25 bp, Homo sapien
tctactgctactatcctagtccatg

SEQ ID NO: 4453481 - DNA, 25 bp, Homo sapien
tgcctgactcaagggtaaaatctca

SEQ ID NO: 4453482 - DNA, 25 bp, Homo sapien
agactttgaatccacagggctgaag

SEQ ID NO: 4453483 - DNA, 25 bp, Homo sapien
tatgcttggaacgacttgggtacgt

SEQ ID NO: 4453484 - DNA, 25 bp, Homo sapien
tgctctagagcgctgacaaaaatca

SEQ ID NO: 4453485 - DNA, 25 bp, Homo sapien
tttatatgtcttctgggagtttggt

SEQ ID NO: 4453486 - DNA, 25 bp, Homo sapien
tatatggtagctactataaactcgg

SEQ ID NO: 4453487 - DNA, 25 bp, Homo sapien
aatgtactgagtctttatgccaggg

SEQ ID NO: 4453488 - DNA, 25 bp, Homo sapien
taacagatacagtacaggtctctca

SEQ ID NO: 4453489 - DNA, 25 bp, Homo sapien
gtggctggcatacaggaaacgttta

SEQ ID NO: 4453490 - DNA, 25 bp, Homo sapien
gaatgttcggcttatttggctcacg

SEQ ID NO: 4453491 - DNA, 25 bp, Homo sapien
tacagaaaaattggctcagtcaggg

SEQ ID NO: 4453492 - DNA, 25 bp, Homo sapien
tagtgtgtatccagcattgctcacg

SEQ ID NO: 4453493 - DNA, 25 bp, Homo sapien
tacagaatacgaagccactcatgag

SEQ ID NO: 4453494 - DNA, 25 bp, Homo sapien
gctgctatgttatgggaacccctta

SEQ ID NO: 4453495 - DNA, 25 bp, Homo sapien
cagaataaactggagtcaagctggt

SEQ ID NO: 4453496 - DNA, 25 bp, Homo sapien
ttcacagacgcgttaagacaggagt

SEQ ID NO: 4453497 - DNA, 25 bp, Homo sapien
tacaaagccagtctatcaagtgagg

SEQ ID NO: 4453498 - DNA, 25 bp, Homo sapien
ttttgataccatgccctagactgtg

SEQ ID NO: 4453499 - DNA, 25 bp, Homo sapien
tgtgggaaactagagacgcgctgtc

SEQ ID NO: 4453500 - DNA, 25 bp, Homo sapien
caacatgtccggtggaaggatggct

SEQ ID NO: 4453501 - DNA, 25 bp, Homo sapien
tgtgcaggatccataccactggtga

SEQ ID NO: 4453502 - DNA, 25 bp, Homo sapien
ctgcgacgtttcttccatttggccc

SEQ ID NO: 4453503 - DNA, 25 bp, Homo sapien
tgcctgcgacgtttcttccatttgg

SEQ ID NO: 4453504 - DNA, 25 bp, Homo sapien
tgcgacgtttcttccatttggccct

SEQ ID NO: 4453505 - DNA, 25 bp, Homo sapien
cctgcgacgtttcttccatttggcc

SEQ ID NO: 4453506 - DNA, 25 bp, Homo sapien
gcagctccttgaggactagatgtag

SEQ ID NO: 4453507 - DNA, 25 bp, Homo sapien
cactgtgttttgtgcgtttgaatat

SEQ ID NO: 4453508 - DNA, 25 bp, Homo sapien
gactagatgtagtcccactgctgcc

SEQ ID NO: 4453509 - DNA, 25 bp, Homo sapien
tccttgaggactagatgtagtccca

SEQ ID NO: 4453510 - DNA, 25 bp, Homo sapien
tgcttataggctgaacatggaggca

SEQ ID NO: 4453511 - DNA, 25 bp, Homo sapien
gcttggacccgggtcaagtctgcag

SEQ ID NO: 4453512 - DNA, 25 bp, Homo sapien
gttatataactaacagctggctggc

SEQ ID NO: 4453513 - DNA, 25 bp, Homo sapien
gccttgcttaggtatgatccagtga

SEQ ID NO: 4453514 - DNA, 25 bp, Homo sapien
caggcagccagtgatgcggacgctc

SEQ ID NO: 4453515 - DNA, 25 bp, Homo sapien
gtgatgcggacgctcttcagtggct

SEQ ID NO: 4453516 - DNA, 25 bp, Homo sapien
ggcagccagtgatgcggacgctctt

SEQ ID NO: 4453517 - DNA, 25 bp, Homo sapien
gccagtgatgcggacgctcttcagt

SEQ ID NO: 4453518 - DNA, 25 bp, Homo sapien
gggtctcagtgaggacgactgtctc

SEQ ID NO: 4453519 - DNA, 25 bp, Homo sapien
cgttcactggaatcccagccttggc

SEQ ID NO: 4453520 - DNA, 25 bp, Homo sapien
caggcgttcactggaatcccagcct

SEQ ID NO: 4453521 - DNA, 25 bp, Homo sapien
ggagggtctcagtgaggacgactgt

SEQ ID NO: 4453522 - DNA, 25 bp, Homo sapien
tgcaccaaaggtacttctcctccgt

SEQ ID NO: 4453523 - DNA, 25 bp, Homo sapien
ggtgcaccaaaggtacttctcctcc

SEQ ID NO: 4453524 - DNA, 25 bp, Homo sapien
gtgcaccaaaggtacttctcctccg

SEQ ID NO: 4453525 - DNA, 25 bp, Homo sapien
ttgtataggttgtggacctcagtca

SEQ ID NO: 4453526 - DNA, 25 bp, Homo sapien
tctcctcggagatgtctctgatgcc

SEQ ID NO: 4453527 - DNA, 25 bp, Homo sapien
agctgtgggtacttagtgtgagtga

SEQ ID NO: 4453528 - DNA, 25 bp, Homo sapien
taggttgtggacctcagtcatggtc

SEQ ID NO: 4453529 - DNA, 25 bp, Homo sapien
atagaccgctaccacagctaccttg

SEQ ID NO: 4453530 - DNA, 25 bp, Homo sapien
catcaccatagaccgctaccacagc

SEQ ID NO: 4453531 - DNA, 25 bp, Homo sapien
caccatagaccgctaccacagctac

SEQ ID NO: 4453532 - DNA, 25 bp, Homo sapien
catagaccgctaccacagctacctt

SEQ ID NO: 4453533 - DNA, 25 bp, Homo sapien
atccctgcagggcctgggcacagcc

SEQ ID NO: 4453534 - DNA, 25 bp, Homo sapien
cgaatccctgcagggcctgggcaca

SEQ ID NO: 4453535 - DNA, 25 bp, Homo sapien
gtgagccccgaatccctgcagggcc

SEQ ID NO: 4453536 - DNA, 25 bp, Homo sapien
tgagccccgaatccctgcagggcct

SEQ ID NO: 4453537 - DNA, 25 bp, Homo sapien
gtggtcccctcatagcgctgcatgg

SEQ ID NO: 4453538 - DNA, 25 bp, Homo sapien
cttcttcatagcattcttgttgagc

SEQ ID NO: 4453539 - DNA, 25 bp, Homo sapien
tagcattcttgttgagccacctgac

SEQ ID NO: 4453540 - DNA, 25 bp, Homo sapien
gagccacctgacatcgattttcacg

SEQ ID NO: 4453541 - DNA, 25 bp, Homo sapien
cgattttcacgtcaaagtgtccagt

SEQ ID NO: 4453542 - DNA, 25 bp, Homo sapien
aaagctgggttggtccatagcacaa

SEQ ID NO: 4453543 - DNA, 25 bp, Homo sapien
gctgggttggtccatagcacaaccc

SEQ ID NO: 4453544 - DNA, 25 bp, Homo sapien
tcacaaagctgggttggtccatagc

SEQ ID NO: 4453545 - DNA, 25 bp, Homo sapien
caggtagaccagctgacactcagcc

SEQ ID NO: 4453546 - DNA, 25 bp, Homo sapien
ctcaatggggtacttatctgagtgg

SEQ ID NO: 4453547 - DNA, 25 bp, Homo sapien
tcaatggggtacttatctgagtggg

SEQ ID NO: 4453548 - DNA, 25 bp, Homo sapien
cagtctgcttggtcagtttcatgtt

SEQ ID NO: 4453549 - DNA, 25 bp, Homo sapien
gcttctcagtctgcttggtcagttt

SEQ ID NO: 4453550 - DNA, 25 bp, Homo sapien
gtcaacatagttggccggtccctta

SEQ ID NO: 4453551 - DNA, 25 bp, Homo sapien
tcgcgtctccagacgtcacggcagg

SEQ ID NO: 4453552 - DNA, 25 bp, Homo sapien
tcccgatttgcattgcgaggcgacg

SEQ ID NO: 4453553 - DNA, 25 bp, Homo sapien
ggtttctctgagtcgggtcaacata

SEQ ID NO: 4453554 - DNA, 25 bp, Homo sapien
ttggctaccaggacggaagccagcc

SEQ ID NO: 4453555 - DNA, 25 bp, Homo sapien
gtgacgccgggcgcgcttcactaac

SEQ ID NO: 4453556 - DNA, 25 bp, Homo sapien
ctaacgccagccttctcgccaaatg

SEQ ID NO: 4453557 - DNA, 25 bp, Homo sapien
gaactcgagggagaattagccttgg

SEQ ID NO: 4453558 - DNA, 25 bp, Homo sapien
aaggcgttcatcgttcacagcggac

SEQ ID NO: 4453559 - DNA, 25 bp, Homo sapien
tcctctccgcggacagagcttgtct

SEQ ID NO: 4453560 - DNA, 25 bp, Homo sapien
acagcggacgacttcccagagaaca

SEQ ID NO: 4453561 - DNA, 25 bp, Homo sapien
tttaggagttgtcccactcctctcc

SEQ ID NO: 4453562 - DNA, 25 bp, Homo sapien
tttaaagtagcagcaagactttctc

SEQ ID NO: 4453563 - DNA, 25 bp, Homo sapien
aaaagcagtgcactgactgggcgtg

SEQ ID NO: 4453564 - DNA, 25 bp, Homo sapien
tagcagcaagactttctccatgcaa

SEQ ID NO: 4453565 - DNA, 25 bp, Homo sapien
ctccatgcaaaaagcagtgcactga

SEQ ID NO: 4453566 - DNA, 25 bp, Homo sapien
ccacttcccagattcaagcagcctc

SEQ ID NO: 4453567 - DNA, 25 bp, Homo sapien
ttcccagattcaagcagcctcagcc

SEQ ID NO: 4453568 - DNA, 25 bp, Homo sapien
cccagattcaagcagcctcagcctc

SEQ ID NO: 4453569 - DNA, 25 bp, Homo sapien
acttcccagattcaagcagcctcag

SEQ ID NO: 4453570 - DNA, 25 bp, Homo sapien
caatggatgctatatttccttacaa

SEQ ID NO: 4453571 - DNA, 25 bp, Homo sapien
ttttccactttcacaatggatgcta

SEQ ID NO: 4453572 - DNA, 25 bp, Homo sapien
tttccactttcacaatggatgctat

SEQ ID NO: 4453573 - DNA, 25 bp, Homo sapien
ttccactttcacaatggatgctata

SEQ ID NO: 4453574 - DNA, 25 bp, Homo sapien
tgaggtagagttctttaggaactga

SEQ ID NO: 4453575 - DNA, 25 bp, Homo sapien
agaactgaggtagagttctttagga

SEQ ID NO: 4453576 - DNA, 25 bp, Homo sapien
tattttctctggtttaacttctgtc

SEQ ID NO: 4453577 - DNA, 25 bp, Homo sapien
tttctctggtttaacttctgtcttc

SEQ ID NO: 4453578 - DNA, 25 bp, Homo sapien
gcctagccaaggttgcgcattcttt

SEQ ID NO: 4453579 - DNA, 25 bp, Homo sapien
gggaccactgatcttgataaagcaa

SEQ ID NO: 4453580 - DNA, 25 bp, Homo sapien
gggtagtgctagaggtaaaccagac

SEQ ID NO: 4453581 - DNA, 25 bp, Homo sapien
cccagatgtgatggtccagttgcag

SEQ ID NO: 4453582 - DNA, 25 bp, Homo sapien
tagagaaaaaataataattaaagca

SEQ ID NO: 4453583 - DNA, 25 bp, Homo sapien
aaaataataattaaagcaattgaca

SEQ ID NO: 4453584 - DNA, 25 bp, Homo sapien
aaataataattaaagcaattgacat

SEQ ID NO: 4453585 - DNA, 25 bp, Homo sapien
agtacataggccctttcctcatcac

SEQ ID NO: 4453586 - DNA, 25 bp, Homo sapien
catcacgatctaatctgcattcttc

SEQ ID NO: 4453587 - DNA, 25 bp, Homo sapien
ttcatatatagtacataggcccttt

SEQ ID NO: 4453588 - DNA, 25 bp, Homo sapien
tttcctcatcacgatctaatctgca

SEQ ID NO: 4453589 - DNA, 25 bp, Homo sapien
acagagcgtgcaaaaacttgtttga

SEQ ID NO: 4453590 - DNA, 25 bp, Homo sapien
ttcacagagcgtgcaaaaacttgtt

SEQ ID NO: 4453591 - DNA, 25 bp, Homo sapien
tttcacagagcgtgcaaaaacttgt

SEQ ID NO: 4453592 - DNA, 25 bp, Homo sapien
tcacagagcgtgcaaaaacttgttt

SEQ ID NO: 4453593 - DNA, 25 bp, Homo sapien
tctgcctacatactccctttggaaa

SEQ ID NO: 4453594 - DNA, 25 bp, Homo sapien
gcagggagcgtctcagcctggactt

SEQ ID NO: 4453595 - DNA, 25 bp, Homo sapien
ttgcagggagcgtctcagcctggac

SEQ ID NO: 4453596 - DNA, 25 bp, Homo sapien
tgcctacatactccctttggaaatg

SEQ ID NO: 4453597 - DNA, 25 bp, Homo sapien
agcttcttcgacagcttttttgatg

SEQ ID NO: 4453598 - DNA, 25 bp, Homo sapien
gcttcttcgacagcttttttgatgt

SEQ ID NO: 4453599 - DNA, 25 bp, Homo sapien
tcagcttcttcgacagcttttttga

SEQ ID NO: 4453600 - DNA, 25 bp, Homo sapien
cagcttcttcgacagcttttttgat

SEQ ID NO: 4453601 - DNA, 25 bp, Homo sapien
acaagtattccttaatggcaggtga

SEQ ID NO: 4453602 - DNA, 25 bp, Homo sapien
taagacctcccctaacatgaatgta

SEQ ID NO: 4453603 - DNA, 25 bp, Homo sapien
gcgaggcatgctctctgaaactaac

SEQ ID NO: 4453604 - DNA, 25 bp, Homo sapien
agaaacgggacaggcaaataaatgc

SEQ ID NO: 4453605 - DNA, 25 bp, Homo sapien
ctcaagttttttccggacttcagct

SEQ ID NO: 4453606 - DNA, 25 bp, Homo sapien
aaagagcctttagccaatgtgccac

SEQ ID NO: 4453607 - DNA, 25 bp, Homo sapien
ccttttttgttgtagccgctgtgct

SEQ ID NO: 4453608 - DNA, 25 bp, Homo sapien
aatccaaaacattctccaaagagcc

SEQ ID NO: 4453609 - DNA, 25 bp, Homo sapien
tttcatccttgttgcctaaaagaac

SEQ ID NO: 4453610 - DNA, 25 bp, Homo sapien
aaacattaaatttcatccttgttgc

SEQ ID NO: 4453611 - DNA, 25 bp, Homo sapien
catccttgttgcctaaaagaacttt

SEQ ID NO: 4453612 - DNA, 25 bp, Homo sapien
acattaaatttcatccttgttgcct

SEQ ID NO: 4453613 - DNA, 25 bp, Homo sapien
tgtgcactatcatgactggctaatt

SEQ ID NO: 4453614 - DNA, 25 bp, Homo sapien
taaaaaatgtttgtagaggccaggc

SEQ ID NO: 4453615 - DNA, 25 bp, Homo sapien
caggtgtgcactatcatgactggct

SEQ ID NO: 4453616 - DNA, 25 bp, Homo sapien
agttgcatgatcactgcagcctgga

SEQ ID NO: 4453617 - DNA, 25 bp, Homo sapien
ctttctctttggtctcacatttttc

SEQ ID NO: 4453618 - DNA, 25 bp, Homo sapien
ttctctttggtctcacatttttcat

SEQ ID NO: 4453619 - DNA, 25 bp, Homo sapien
atttttcattcttttcaccattgct

SEQ ID NO: 4453620 - DNA, 25 bp, Homo sapien
ctctttggtctcacatttttcattc

SEQ ID NO: 4453621 - DNA, 25 bp, Homo sapien
caagtacaagctttggttttgacat

SEQ ID NO: 4453622 - DNA, 25 bp, Homo sapien
ccattattgctaaactgcatgttga

SEQ ID NO: 4453623 - DNA, 25 bp, Homo sapien
tatattagctcattcaaccctgaca

SEQ ID NO: 4453624 - DNA, 25 bp, Homo sapien
acaaaggtagaatgtttaagcaaca

SEQ ID NO: 4453625 - DNA, 25 bp, Homo sapien
cttggaattgagagagacagtgtaa

SEQ ID NO: 4453626 - DNA, 25 bp, Homo sapien
tgacaagaaacagcacaagatgtgc

SEQ ID NO: 4453627 - DNA, 25 bp, Homo sapien
gcacaagatgtgctgacatcacaaa

SEQ ID NO: 4453628 - DNA, 25 bp, Homo sapien
gaaacagcacaagatgtgctgacat

SEQ ID NO: 4453629 - DNA, 25 bp, Homo sapien
cttcaggaacactgagagaatgtaa

SEQ ID NO: 4453630 - DNA, 25 bp, Homo sapien
tcttcaggaacactgagagaatgta

SEQ ID NO: 4453631 - DNA, 25 bp, Homo sapien
cagtttactacttactacacagttt

SEQ ID NO: 4453632 - DNA, 25 bp, Homo sapien
tagtaacatttactaaggtccacag

SEQ ID NO: 4453633 - DNA, 25 bp, Homo sapien
ggaaaagactactttatcacattta

SEQ ID NO: 4453634 - DNA, 25 bp, Homo sapien
catttagcttggatgctaagtagta

SEQ ID NO: 4453635 - DNA, 25 bp, Homo sapien
tgaattgctatctccggctccatgg

SEQ ID NO: 4453636 - DNA, 25 bp, Homo sapien
gtgaattgctatctccggctccatg

SEQ ID NO: 4453637 - DNA, 25 bp, Homo sapien
agtgaattgctatctccggctccat

SEQ ID NO: 4453638 - DNA, 25 bp, Homo sapien
aaagtcttagtaggcatttgaactg

SEQ ID NO: 4453639 - DNA, 25 bp, Homo sapien
agtcttagtaggcatttgaactggt

SEQ ID NO: 4453640 - DNA, 25 bp, Homo sapien
tcttagtaggcatttgaactggtcc

SEQ ID NO: 4453641 - DNA, 25 bp, Homo sapien
ctcaaagtcttagtaggcatttgaa

SEQ ID NO: 4453642 - DNA, 25 bp, Homo sapien
tgcaagtcaatgagttgtttgtgga

SEQ ID NO: 4453643 - DNA, 25 bp, Homo sapien
ttctcatatggaaatgatcccatgt

SEQ ID NO: 4453644 - DNA, 25 bp, Homo sapien
caatctcagaaaggatgtgcaagtc

SEQ ID NO: 4453645 - DNA, 25 bp, Homo sapien
aatgagttgtttgtggattctcata

SEQ ID NO: 4453646 - DNA, 25 bp, Homo sapien
tagcaaagcacttagtatatcgtgg

SEQ ID NO: 4453647 - DNA, 25 bp, Homo sapien
caaagcacttagtatatcgtggcat

SEQ ID NO: 4453648 - DNA, 25 bp, Homo sapien
ttattcttagcaaagcacttagtat

SEQ ID NO: 4453649 - DNA, 25 bp, Homo sapien
tcttagcaaagcacttagtatatcg

SEQ ID NO: 4453650 - DNA, 25 bp, Homo sapien
tccggagagttgttccaatctgtaa

SEQ ID NO: 4453651 - DNA, 25 bp, Homo sapien
tcagactccggagagttgttccaat

SEQ ID NO: 4453652 - DNA, 25 bp, Homo sapien
tttagaatcatctggcaggtgtgct

SEQ ID NO: 4453653 - DNA, 25 bp, Homo sapien
agtgcatctttcagactccggagag

SEQ ID NO: 4453654 - DNA, 25 bp, Homo sapien
taaaaccaaaggctcattgcgcagg

SEQ ID NO: 4453655 - DNA, 25 bp, Homo sapien
gggataacaaaggagccagttttca

SEQ ID NO: 4453656 - DNA, 25 bp, Homo sapien
aaccaaaggctcattgcgcaggaca

SEQ ID NO: 4453657 - DNA, 25 bp, Homo sapien
cctctaaaaccaaaggctcattgcg

SEQ ID NO: 4453658 - DNA, 25 bp, Homo sapien
catctacttctatagatgcaggtgg

SEQ ID NO: 4453659 - DNA, 25 bp, Homo sapien
tcatctacttctatagatgcaggtg

SEQ ID NO: 4453660 - DNA, 25 bp, Homo sapien
ttcatctacttctatagatgcaggt

SEQ ID NO: 4453661 - DNA, 25 bp, Homo sapien
atttgactgctggttttttagtacg

SEQ ID NO: 4453662 - DNA, 25 bp, Homo sapien
ctgctggttttttagtacgatcaat

SEQ ID NO: 4453663 - DNA, 25 bp, Homo sapien
attgctgctcatggtttgtactttc

SEQ ID NO: 4453664 - DNA, 25 bp, Homo sapien
gattgctgctcatggtttgtacttt

SEQ ID NO: 4453665 - DNA, 25 bp, Homo sapien
catctgttaacatgagagttggaga

SEQ ID NO: 4453666 - DNA, 25 bp, Homo sapien
tgttaacatgagagttggagaaaaa

SEQ ID NO: 4453667 - DNA, 25 bp, Homo sapien
acatgagagttggagaaaaaactac

SEQ ID NO: 4453668 - DNA, 25 bp, Homo sapien
tcttcatctgttaacatgagagttg

SEQ ID NO: 4453669 - DNA, 25 bp, Homo sapien
cttggcatcagaagtttcatgttca

SEQ ID NO: 4453670 - DNA, 25 bp, Homo sapien
ttggcatcagaagtttcatgttcac

SEQ ID NO: 4453671 - DNA, 25 bp, Homo sapien
gcatcagaagtttcatgttcacttt

SEQ ID NO: 4453672 - DNA, 25 bp, Homo sapien
ttctgtatttctggggttggacacc

SEQ ID NO: 4453673 - DNA, 25 bp, Homo sapien
tttctgtatttctggggttggacac

SEQ ID NO: 4453674 - DNA, 25 bp, Homo sapien
ctgtcacagatgtatggggcacatc

SEQ ID NO: 4453675 - DNA, 25 bp, Homo sapien
gggcacatctcctgttgactttttc

SEQ ID NO: 4453676 - DNA, 25 bp, Homo sapien
tggcacctatatactaaatgactcc

SEQ ID NO: 4453677 - DNA, 25 bp, Homo sapien
tgcaatcttagatgtgtaggaatat

SEQ ID NO: 4453678 - DNA, 25 bp, Homo sapien
cactgtctatgtgatcctaggcaaa

SEQ ID NO: 4453679 - DNA, 25 bp, Homo sapien
catgcctctagtatagcaagatgga

SEQ ID NO: 4453680 - DNA, 25 bp, Homo sapien
ctggttgtcctttaatcttaaatgg

SEQ ID NO: 4453681 - DNA, 25 bp, Homo sapien
tatttctttcggtatcgtctgtatc

SEQ ID NO: 4453682 - DNA, 25 bp, Homo sapien
tatcctctctaaaagttcctgtcct

SEQ ID NO: 4453683 - DNA, 25 bp, Homo sapien
tccttagaattccactttctggttg

SEQ ID NO: 4453684 - DNA, 25 bp, Homo sapien
cgcacccggccattagtaagttctt

SEQ ID NO: 4453685 - DNA, 25 bp, Homo sapien
ttgttgagacagaatttcatcatgt

SEQ ID NO: 4453686 - DNA, 25 bp, Homo sapien
ccggctactttttgttgagacagaa

SEQ ID NO: 4453687 - DNA, 25 bp, Homo sapien
caccgcacccggccattagtaagtt

SEQ ID NO: 4453688 - DNA, 25 bp, Homo sapien
gccaatatattgaggcatcaacctc

SEQ ID NO: 4453689 - DNA, 25 bp, Homo sapien
gatacatacattctaggccaggcag

SEQ ID NO: 4453690 - DNA, 25 bp, Homo sapien
tcacaagaaaggctacaaaacttca

SEQ ID NO: 4453691 - DNA, 25 bp, Homo sapien
gaatagacgttatagtatcctagca

SEQ ID NO: 4453692 - DNA, 25 bp, Homo sapien
ttcgtgctcttgtcaaaggttctcg

SEQ ID NO: 4453693 - DNA, 25 bp, Homo sapien
ctcttgtcaaaggttctcgttgagc

SEQ ID NO: 4453694 - DNA, 25 bp, Homo sapien
tcttcacttcgtgctcttgtcaaag

SEQ ID NO: 4453695 - DNA, 25 bp, Homo sapien
cacttcgtgctcttgtcaaaggttc

SEQ ID NO: 4453696 - DNA, 25 bp, Homo sapien
ggtgggtgaatgataataacgaaag

SEQ ID NO: 4453697 - DNA, 25 bp, Homo sapien
tgggtgaatgataataacgaaaggt

SEQ ID NO: 4453698 - DNA, 25 bp, Homo sapien
ttggtgggtgaatgataataacgaa

SEQ ID NO: 4453699 - DNA, 25 bp, Homo sapien
gtgttggtgggtgaatgataataac

SEQ ID NO: 4453700 - DNA, 25 bp, Homo sapien
tgttcaacttacttaggattaggct

SEQ ID NO: 4453701 - DNA, 25 bp, Homo sapien
tactcaggtgcatgtactcgtgtgc

SEQ ID NO: 4453702 - DNA, 25 bp, Homo sapien
tccacccctaaaagtaatactgaga

SEQ ID NO: 4453703 - DNA, 25 bp, Homo sapien
taaaagctccttcgaataagtctgc

SEQ ID NO: 4453704 - DNA, 25 bp, Homo sapien
attgagttcatataacaagtatttc

SEQ ID NO: 4453705 - DNA, 25 bp, Homo sapien
tcctaagttacgaagtccagtaaga

SEQ ID NO: 4453706 - DNA, 25 bp, Homo sapien
cggttgaaataatcagccaaatgtg

SEQ ID NO: 4453707 - DNA, 25 bp, Homo sapien
cataggcactgcaatattgagttca

SEQ ID NO: 4453708 - DNA, 25 bp, Homo sapien
taggttaccaccagattcacgtcaa

SEQ ID NO: 4453709 - DNA, 25 bp, Homo sapien
tctgaatctgacttgcttacatccc

SEQ ID NO: 4453710 - DNA, 25 bp, Homo sapien
tatttatttgcaggctcaccaccag

SEQ ID NO: 4453711 - DNA, 25 bp, Homo sapien
gctccagttcatgacagcgaggttc

SEQ ID NO: 4453712 - DNA, 25 bp, Homo sapien
cttctgccacttcacctttatgccc

SEQ ID NO: 4453713 - DNA, 25 bp, Homo sapien
tttggactgatatatctatactgtc

SEQ ID NO: 4453714 - DNA, 25 bp, Homo sapien
tgattataccaaattcttctgccac

SEQ ID NO: 4453715 - DNA, 25 bp, Homo sapien
ggactgatatatctatactgtcctg

SEQ ID NO: 4453716 - DNA, 25 bp, Homo sapien
gatgctagtggtagagacaaataca

SEQ ID NO: 4453717 - DNA, 25 bp, Homo sapien
tgtggatgctagtggtagagacaaa

SEQ ID NO: 4453718 - DNA, 25 bp, Homo sapien
tctatcttttttagagaatcccgtc

SEQ ID NO: 4453719 - DNA, 25 bp, Homo sapien
tcgagtcaagcttgtacttcagaga

SEQ ID NO: 4453720 - DNA, 25 bp, Homo sapien
ctcgagtcaagcttgtacttcagag

SEQ ID NO: 4453721 - DNA, 25 bp, Homo sapien
gaatgacagctgctctcgagtcaag

SEQ ID NO: 4453722 - DNA, 25 bp, Homo sapien
aatgacagctgctctcgagtcaagc

SEQ ID NO: 4453723 - DNA, 25 bp, Homo sapien
aacattacaattacactgacagagg

SEQ ID NO: 4453724 - DNA, 25 bp, Homo sapien
ctgacagaggaagataccaggatga

SEQ ID NO: 4453725 - DNA, 25 bp, Homo sapien
gataccaggatgaatcctcattcat

SEQ ID NO: 4453726 - DNA, 25 bp, Homo sapien
cctcattcattaacatctagatttt

SEQ ID NO: 4453727 - DNA, 25 bp, Homo sapien
tttggaccaataacatactgtgaca

SEQ ID NO: 4453728 - DNA, 25 bp, Homo sapien
caaattgttctttggaccaataaca

SEQ ID NO: 4453729 - DNA, 25 bp, Homo sapien
ttttctaacgggaagtccacagatg

SEQ ID NO: 4453730 - DNA, 25 bp, Homo sapien
aacgggaagtccacagatgtctgta

SEQ ID NO: 4453731 - DNA, 25 bp, Homo sapien
tatttaaaatacgccaatagtttca

SEQ ID NO: 4453732 - DNA, 25 bp, Homo sapien
tcaaagctttatgttgttcttactc

SEQ ID NO: 4453733 - DNA, 25 bp, Homo sapien
aaatacgccaatagtttcaaagctt

SEQ ID NO: 4453734 - DNA, 25 bp, Homo sapien
aaaagtcttcagttcaaagagatac

SEQ ID NO: 4453735 - DNA, 25 bp, Homo sapien
taaaagaggatataagctgctgaag

SEQ ID NO: 4453736 - DNA, 25 bp, Homo sapien
aagaggatataagctgctgaagatt

SEQ ID NO: 4453737 - DNA, 25 bp, Homo sapien
tatatagtgctagtaacacagctcc

SEQ ID NO: 4453738 - DNA, 25 bp, Homo sapien
caaaaggaccacgtgttaaactatg

SEQ ID NO: 4453739 - DNA, 25 bp, Homo sapien
gaattcctctaaatggccagctata

SEQ ID NO: 4453740 - DNA, 25 bp, Homo sapien
tgttatttgtcagcactgaccggaa

SEQ ID NO: 4453741 - DNA, 25 bp, Homo sapien
caatgctaatggatgcaggccttca

SEQ ID NO: 4453742 - DNA, 25 bp, Homo sapien
tattaaagacagaacacccacaggg

SEQ ID NO: 4453743 - DNA, 25 bp, Homo sapien
gctttgataacacacgagtcagtga

SEQ ID NO: 4453744 - DNA, 25 bp, Homo sapien
tctgtcgtccagaagatgggtcttg

SEQ ID NO: 4453745 - DNA, 25 bp, Homo sapien
tgcctaggaattcatgtacagcctg

SEQ ID NO: 4453746 - DNA, 25 bp, Homo sapien
tattacacccgaattcacgttggaa

SEQ ID NO: 4453747 - DNA, 25 bp, Homo sapien
cacgttggaattaactagtcagatc

SEQ ID NO: 4453748 - DNA, 25 bp, Homo sapien
taatttcgctaaggtcacaatgtac

SEQ ID NO: 4453749 - DNA, 25 bp, Homo sapien
accgcgcccagtccggtttattcat

SEQ ID NO: 4453750 - DNA, 25 bp, Homo sapien
ccagtacagttgtacctcagtatct

SEQ ID NO: 4453751 - DNA, 25 bp, Homo sapien
ctgtgtcctaatatcttcattaagt

SEQ ID NO: 4453752 - DNA, 25 bp, Homo sapien
tatcttcattaagttaatttccagt

SEQ ID NO: 4453753 - DNA, 25 bp, Homo sapien
gtcatttacatgttctagatccttg

SEQ ID NO: 4453754 - DNA, 25 bp, Homo sapien
caagtgattataccaatacataccc

SEQ ID NO: 4453755 - DNA, 25 bp, Homo sapien
tggcatgaacaacattatgcagaca

SEQ ID NO: 4453756 - DNA, 25 bp, Homo sapien
tcacttagatcataaagtatgtgca

SEQ ID NO: 4453757 - DNA, 25 bp, Homo sapien
tgagacatccatcatcacccagctg

SEQ ID NO: 4453758 - DNA, 25 bp, Homo sapien
gagaaatgcacctacaagaacgaag

SEQ ID NO: 4453759 - DNA, 25 bp, Homo sapien
tgattcagtaccactactcccggag

SEQ ID NO: 4453760 - DNA, 25 bp, Homo sapien
tatgaatgctcccttcgggtaggaa

SEQ ID NO: 4453761 - DNA, 25 bp, Homo sapien
tagcttcttccattagtactcaaag

SEQ ID NO: 4453762 - DNA, 25 bp, Homo sapien
gggcaggatggtacaaggtattaat

SEQ ID NO: 4453763 - DNA, 25 bp, Homo sapien
tcagagtgtgtaagtctaacccatc

SEQ ID NO: 4453764 - DNA, 25 bp, Homo sapien
gtactcaaagtatgaccacacgctt

SEQ ID NO: 4453765 - DNA, 25 bp, Homo sapien
gagaggtaaagtaacgtccataaga

SEQ ID NO: 4453766 - DNA, 25 bp, Homo sapien
atttgaaagtcaaggtgctagagag

SEQ ID NO: 4453767 - DNA, 25 bp, Homo sapien
tccataagattcttacgtttattta

SEQ ID NO: 4453768 - DNA, 25 bp, Homo sapien
taataataagtagcaacggtaggat

SEQ ID NO: 4453769 - DNA, 25 bp, Homo sapien
accgcacctggctgctaacacttat

SEQ ID NO: 4453770 - DNA, 25 bp, Homo sapien
actgtgtaccagacattactctaag

SEQ ID NO: 4453771 - DNA, 25 bp, Homo sapien
gcacctggctgctaacacttattta

SEQ ID NO: 4453772 - DNA, 25 bp, Homo sapien
tatattaacctacttaatccttata

SEQ ID NO: 4453773 - DNA, 25 bp, Homo sapien
gatactatatacgttttgtatatca

SEQ ID NO: 4453774 - DNA, 25 bp, Homo sapien
agtgtatctcatagatacagacaag

SEQ ID NO: 4453775 - DNA, 25 bp, Homo sapien
aagggagcagtataaagcttatttg

SEQ ID NO: 4453776 - DNA, 25 bp, Homo sapien
tattacttaaagatactatatacgt

SEQ ID NO: 4453777 - DNA, 25 bp, Homo sapien
gagaagcctgaactgaagaccattt

SEQ ID NO: 4453778 - DNA, 25 bp, Homo sapien
tatttatgaatcagggttaggctcc

SEQ ID NO: 4453779 - DNA, 25 bp, Homo sapien
gaaacctaactcactcgtcaaggga

SEQ ID NO: 4453780 - DNA, 25 bp, Homo sapien
gatactggcagattgcagtgcaacc

SEQ ID NO: 4453781 - DNA, 25 bp, Homo sapien
tttgttgagagacctagtttgagac

SEQ ID NO: 4453782 - DNA, 25 bp, Homo sapien
tacaggaagatccactagaaagctg

SEQ ID NO: 4453783 - DNA, 25 bp, Homo sapien
tgaaggattggttacaagatagacc

SEQ ID NO: 4453784 - DNA, 25 bp, Homo sapien
caatctgacaggttattgtccccag

SEQ ID NO: 4453785 - DNA, 25 bp, Homo sapien
atgagctcactcttcccagatccaa

SEQ ID NO: 4453786 - DNA, 25 bp, Homo sapien
tagaaacctattgtctagcagtgag

SEQ ID NO: 4453787 - DNA, 25 bp, Homo sapien
tcttagaaacctattgtctagcagt

SEQ ID NO: 4453788 - DNA, 25 bp, Homo sapien
tgactcttagaaacctattgtctag

SEQ ID NO: 4453789 - DNA, 25 bp, Homo sapien
gatgacaaagatccccagtgtaata

SEQ ID NO: 4453790 - DNA, 25 bp, Homo sapien
tccagaactgcgacagagactacat

SEQ ID NO: 4453791 - DNA, 25 bp, Homo sapien
aagacttacctgcagtaccccagag

SEQ ID NO: 4453792 - DNA, 25 bp, Homo sapien
taggcagttcatctactagcatacc

SEQ ID NO: 4453793 - DNA, 25 bp, Homo sapien
taaccatgggaatgtatttcctata

SEQ ID NO: 4453794 - DNA, 25 bp, Homo sapien
catctgtggtgatgactataaccaa

SEQ ID NO: 4453795 - DNA, 25 bp, Homo sapien
ggtgatgactataaccaaccttatt

SEQ ID NO: 4453796 - DNA, 25 bp, Homo sapien
gagtttatttagtcacttctcctct

SEQ ID NO: 4453797 - DNA, 25 bp, Homo sapien
ctacctgaaagttagtgtagagtga

SEQ ID NO: 4453798 - DNA, 25 bp, Homo sapien
gaaactatgacggtatcccatctgt

SEQ ID NO: 4453799 - DNA, 25 bp, Homo sapien
aacaacattatagcgaaaaatcttc

SEQ ID NO: 4453800 - DNA, 25 bp, Homo sapien
taagggattgaagcacacacacact

SEQ ID NO: 4453801 - DNA, 25 bp, Homo sapien
gaagttccccatatgttattcatgt

SEQ ID NO: 4453802 - DNA, 25 bp, Homo sapien
gcctgatctctcagttgtgaagttc

SEQ ID NO: 4453803 - DNA, 25 bp, Homo sapien
tgctttaagtttggtacctgggtca

SEQ ID NO: 4453804 - DNA, 25 bp, Homo sapien
cagtggattcgtgttgtctgatgcc

SEQ ID NO: 4453805 - DNA, 25 bp, Homo sapien
aactgggctcacatgagccttctgc

SEQ ID NO: 4453806 - DNA, 25 bp, Homo sapien
acagccacccaatccgcatagcaca

SEQ ID NO: 4453807 - DNA, 25 bp, Homo sapien
gacgtggtcttgctacgtagtccag

SEQ ID NO: 4453808 - DNA, 25 bp, Homo sapien
aggaagtcactacgttgatgctgaa

SEQ ID NO: 4453809 - DNA, 25 bp, Homo sapien
cggagtttcattatgctggtctcga

SEQ ID NO: 4453810 - DNA, 25 bp, Homo sapien
gtgcctggcctagaagtttgcttgt

SEQ ID NO: 4453811 - DNA, 25 bp, Homo sapien
cctggcctagaagtttgcttgttgt

SEQ ID NO: 4453812 - DNA, 25 bp, Homo sapien
acggagtttcattatgctggtctcg

SEQ ID NO: 4453813 - DNA, 25 bp, Homo sapien
attaccggcgtccgccacatcgcct

SEQ ID NO: 4453814 - DNA, 25 bp, Homo sapien
tcaggctctgggattcaagggattc

SEQ ID NO: 4453815 - DNA, 25 bp, Homo sapien
caacctcaggctctgggattcaagg

SEQ ID NO: 4453816 - DNA, 25 bp, Homo sapien
cccagcctagaagttgttacttatt

SEQ ID NO: 4453817 - DNA, 25 bp, Homo sapien
taactggtacatccagaaatctgaa

SEQ ID NO: 4453818 - DNA, 25 bp, Homo sapien
ttaaatgtgtagcaaccaagctgac

SEQ ID NO: 4453819 - DNA, 25 bp, Homo sapien
gaaatctgaaatccgagttacttga

SEQ ID NO: 4453820 - DNA, 25 bp, Homo sapien
ttcatcaactagatgtatctcctca

SEQ ID NO: 4453821 - DNA, 25 bp, Homo sapien
taggttagaccagctaatcactctg

SEQ ID NO: 4453822 - DNA, 25 bp, Homo sapien
atgtggcctgaacattctcctggaa

SEQ ID NO: 4453823 - DNA, 25 bp, Homo sapien
cgtttatggcaaatgacttacctga

SEQ ID NO: 4453824 - DNA, 25 bp, Homo sapien
gagaagcttcattgacagtcagtcc

SEQ ID NO: 4453825 - DNA, 25 bp, Homo sapien
gatgtacaaagtgcggttcagagaa

SEQ ID NO: 4453826 - DNA, 25 bp, Homo sapien
cagcaagagacttggtgttagtctc

SEQ ID NO: 4453827 - DNA, 25 bp, Homo sapien
gagaaaagaattggcaacaacagca

SEQ ID NO: 4453828 - DNA, 25 bp, Homo sapien
tatggctcatcgttgaatacagcat

SEQ ID NO: 4453829 - DNA, 25 bp, Homo sapien
gtaatgagtgtgtgcctcatgcctg

SEQ ID NO: 4453830 - DNA, 25 bp, Homo sapien
tgtttttgaacagttgccagtagtc

SEQ ID NO: 4453831 - DNA, 25 bp, Homo sapien
cctcatgcctgtttcaatattgggt

SEQ ID NO: 4453832 - DNA, 25 bp, Homo sapien
cagtagtcatcagagtaccaaaact

SEQ ID NO: 4453833 - DNA, 25 bp, Homo sapien
tacatttctctaattgcaatcagat

SEQ ID NO: 4453834 - DNA, 25 bp, Homo sapien
gtatatccaatggcgggattgctgg

SEQ ID NO: 4453835 - DNA, 25 bp, Homo sapien
catgtatatccaatggcgggattgc

SEQ ID NO: 4453836 - DNA, 25 bp, Homo sapien
gcatgtatatccaatggcgggattg

SEQ ID NO: 4453837 - DNA, 25 bp, Homo sapien
tctaaggatgttagtaatgtccatc

SEQ ID NO: 4453838 - DNA, 25 bp, Homo sapien
ggcctcatcattctgtttaatgctt

SEQ ID NO: 4453839 - DNA, 25 bp, Homo sapien
cattcaggccaactaaaatggtact

SEQ ID NO: 4453840 - DNA, 25 bp, Homo sapien
tttaatgctttaggaattctaagga

SEQ ID NO: 4453841 - DNA, 25 bp, Homo sapien
aaagtcagcatcactagtgcaggaa

SEQ ID NO: 4453842 - DNA, 25 bp, Homo sapien
aagtcagcatcactagtgcaggaaa

SEQ ID NO: 4453843 - DNA, 25 bp, Homo sapien
gtcagcatcactagtgcaggaaatc

SEQ ID NO: 4453844 - DNA, 25 bp, Homo sapien
caaagtcagcatcactagtgcagga

SEQ ID NO: 4453845 - DNA, 25 bp, Homo sapien
tttagttaaggatcatcatggaggc

SEQ ID NO: 4453846 - DNA, 25 bp, Homo sapien
tatcctggtgagaagaagctgttgg

SEQ ID NO: 4453847 - DNA, 25 bp, Homo sapien
caaaggatactagccagtaagggta

SEQ ID NO: 4453848 - DNA, 25 bp, Homo sapien
tgggctgttcacatggtgccataga

SEQ ID NO: 4453849 - DNA, 25 bp, Homo sapien
tgagaaatccgttctcccgccaggc

SEQ ID NO: 4453850 - DNA, 25 bp, Homo sapien
gctgcatgcaacactcgggtagtta

SEQ ID NO: 4453851 - DNA, 25 bp, Homo sapien
tcagacacttccgagccttgagaaa

SEQ ID NO: 4453852 - DNA, 25 bp, Homo sapien
cccgccaggcttcggtgtgagttaa

SEQ ID NO: 4453853 - DNA, 25 bp, Homo sapien
gattacagtcacaatgcatctgcag

SEQ ID NO: 4453854 - DNA, 25 bp, Homo sapien
cctggcatgattacgcatttctaac

SEQ ID NO: 4453855 - DNA, 25 bp, Homo sapien
cagaactgtacctattcctggcatg

SEQ ID NO: 4453856 - DNA, 25 bp, Homo sapien
taaatagtcttctagacagtacagg

SEQ ID NO: 4453857 - DNA, 25 bp, Homo sapien
agggcaagttgggagcgactctgct

SEQ ID NO: 4453858 - DNA, 25 bp, Homo sapien
aagttgggagcgactctgctgccag

SEQ ID NO: 4453859 - DNA, 25 bp, Homo sapien
tcagagggcaagttgggagcgactc

SEQ ID NO: 4453860 - DNA, 25 bp, Homo sapien
ggcaagttgggagcgactctgctgc

SEQ ID NO: 4453861 - DNA, 25 bp, Homo sapien
ggtggacacaatagctagcagaata

SEQ ID NO: 4453862 - DNA, 25 bp, Homo sapien
gacacaatagctagcagaatagcca

SEQ ID NO: 4453863 - DNA, 25 bp, Homo sapien
tggtggacacaatagctagcagaat

SEQ ID NO: 4453864 - DNA, 25 bp, Homo sapien
tggacacaatagctagcagaatagc

SEQ ID NO: 4453865 - DNA, 25 bp, Homo sapien
ttgattctaacactaaattgtttga

SEQ ID NO: 4453866 - DNA, 25 bp, Homo sapien
agcttttgttaaggcacacttgatt

SEQ ID NO: 4453867 - DNA, 25 bp, Homo sapien
tgattctaacactaaattgtttgaa

SEQ ID NO: 4453868 - DNA, 25 bp, Homo sapien
ttttgttaaggcacacttgattcta

SEQ ID NO: 4453869 - DNA, 25 bp, Homo sapien
gatagtaaggtgacacagtacattt

SEQ ID NO: 4453870 - DNA, 25 bp, Homo sapien
gcagagcttgcccacaagactatca

SEQ ID NO: 4453871 - DNA, 25 bp, Homo sapien
gactatcatagatctctgaccacgg

SEQ ID NO: 4453872 - DNA, 25 bp, Homo sapien
tccaattagcagtaccaaagatagt

SEQ ID NO: 4453873 - DNA, 25 bp, Homo sapien
ttatgtctcaacttgaaatgtcttc

SEQ ID NO: 4453874 - DNA, 25 bp, Homo sapien
aacttgaaatgtcttcaaaaagagt

SEQ ID NO: 4453875 - DNA, 25 bp, Homo sapien
cttgaaatgtcttcaaaaagagtac

SEQ ID NO: 4453876 - DNA, 25 bp, Homo sapien
atgtctcaacttgaaatgtcttcaa

SEQ ID NO: 4453877 - DNA, 25 bp, Homo sapien
caagttaaggaggatacggagtgtc

SEQ ID NO: 4453878 - DNA, 25 bp, Homo sapien
cttcccagagtttgtgttccagcgg

SEQ ID NO: 4453879 - DNA, 25 bp, Homo sapien
tattgagggcctatcttagacacta

SEQ ID NO: 4453880 - DNA, 25 bp, Homo sapien
tattccaggcgctcagatacagtaa

SEQ ID NO: 4453881 - DNA, 25 bp, Homo sapien
gattgcgcgcgtaagtagacctcct

SEQ ID NO: 4453882 - DNA, 25 bp, Homo sapien
tcctcagcaggtcgcagttgaaagg

SEQ ID NO: 4453883 - DNA, 25 bp, Homo sapien
tggaaaaggccgctcgctcgagatt

SEQ ID NO: 4453884 - DNA, 25 bp, Homo sapien
cagaaccgtgagtcctcctgaggaa

SEQ ID NO: 4453885 - DNA, 25 bp, Homo sapien
cgccgccgccgcccgcgatgccgcc

SEQ ID NO: 4453886 - DNA, 25 bp, Homo sapien
gccgccgcccgcgatgccgccgccg

SEQ ID NO: 4453887 - DNA, 25 bp, Homo sapien
ccgccgcccgcgatgccgccgccgc

SEQ ID NO: 4453888 - DNA, 25 bp, Homo sapien
ccgccgccgcccgcgatgccgccgc

SEQ ID NO: 4453889 - DNA, 25 bp, Homo sapien
gccgtcagcgtcttctccactatgt

SEQ ID NO: 4453890 - DNA, 25 bp, Homo sapien
cagcctcgaggagaaggacgccttg

SEQ ID NO: 4453891 - DNA, 25 bp, Homo sapien
tgtgatgccgcggacaaggctgccc

SEQ ID NO: 4453892 - DNA, 25 bp, Homo sapien
tgcagaaagagtcccggcagcgccg

SEQ ID NO: 4453893 - DNA, 25 bp, Homo sapien
gaaacagtcgctttcagactactca

SEQ ID NO: 4453894 - DNA, 25 bp, Homo sapien
cagaaacagtcgctttcagactact

SEQ ID NO: 4453895 - DNA, 25 bp, Homo sapien
agcagaaacagtcgctttcagacta

SEQ ID NO: 4453896 - DNA, 25 bp, Homo sapien
aaacagtcgctttcagactactcag

SEQ ID NO: 4453897 - DNA, 25 bp, Homo sapien
agccaaaggaagcatcatatccaag

SEQ ID NO: 4453898 - DNA, 25 bp, Homo sapien
ttgttgggctaacttgattgcatga

SEQ ID NO: 4453899 - DNA, 25 bp, Homo sapien
gttgggctaacttgattgcatgaat

SEQ ID NO: 4453900 - DNA, 25 bp, Homo sapien
tcatatccaagcatttcacaatata

SEQ ID NO: 4453901 - DNA, 25 bp, Homo sapien
agtgtatggttcaatgagttctgac

SEQ ID NO: 4453902 - DNA, 25 bp, Homo sapien
atctaaccgccatcacaagagcaag

SEQ ID NO: 4453903 - DNA, 25 bp, Homo sapien
gagttctgacatatatagtcatcta

SEQ ID NO: 4453904 - DNA, 25 bp, Homo sapien
gtataatagatgcaacttcaaggac

SEQ ID NO: 4453905 - DNA, 25 bp, Homo sapien
cagtgggcactcatcttatcaattc

SEQ ID NO: 4453906 - DNA, 25 bp, Homo sapien
taaacagacaatccctaagaagact

SEQ ID NO: 4453907 - DNA, 25 bp, Homo sapien
tgcagggatcctcaaaatgtaagtt

SEQ ID NO: 4453908 - DNA, 25 bp, Homo sapien
ctgtacccggcctgtactgtaacta

SEQ ID NO: 4453909 - DNA, 25 bp, Homo sapien
gaggtatacaagctttgagtacaga

SEQ ID NO: 4453910 - DNA, 25 bp, Homo sapien
tcccaagtcaccaatatcaaggtca

SEQ ID NO: 4453911 - DNA, 25 bp, Homo sapien
gcagagattgtcttatcagattgct

SEQ ID NO: 4453912 - DNA, 25 bp, Homo sapien
taaggtatcacccattcccaagtca

SEQ ID NO: 4453913 - DNA, 25 bp, Homo sapien
caactgtattcacaaggagaagcaa

SEQ ID NO: 4453914 - DNA, 25 bp, Homo sapien
gtattcacaaggagaagcaataatt

SEQ ID NO: 4453915 - DNA, 25 bp, Homo sapien
aggagaagcaataattcatgacttt

SEQ ID NO: 4453916 - DNA, 25 bp, Homo sapien
ctttacaactgtattcacaaggaga

SEQ ID NO: 4453917 - DNA, 25 bp, Homo sapien
cacttctactaggttagtgctctgc

SEQ ID NO: 4453918 - DNA, 25 bp, Homo sapien
ggaaaatctggctaacaacagtcag

SEQ ID NO: 4453919 - DNA, 25 bp, Homo sapien
tatcttctattaatggaagaacagc

SEQ ID NO: 4453920 - DNA, 25 bp, Homo sapien
cagtcagtgccatacacacttctac

SEQ ID NO: 4453921 - DNA, 25 bp, Homo sapien
ggagcttcaaccaaccccatatagc

SEQ ID NO: 4453922 - DNA, 25 bp, Homo sapien
tattattcctagcagtcaaataatc

SEQ ID NO: 4453923 - DNA, 25 bp, Homo sapien
gattcctggatactaggcctcactg

SEQ ID NO: 4453924 - DNA, 25 bp, Homo sapien
caagaccactgctcattagtggtag

SEQ ID NO: 4453925 - DNA, 25 bp, Homo sapien
gaacagcttttcttcgtacaatctc

SEQ ID NO: 4453926 - DNA, 25 bp, Homo sapien
tacttgattaggagcaatgagatgg

SEQ ID NO: 4453927 - DNA, 25 bp, Homo sapien
gaatttgtataatgccagaacagct

SEQ ID NO: 4453928 - DNA, 25 bp, Homo sapien
cacaaagtgctttccgaaacttaat

SEQ ID NO: 4453929 - DNA, 25 bp, Homo sapien
gctctcaacaacttgcaaaactact

SEQ ID NO: 4453930 - DNA, 25 bp, Homo sapien
ctactaattcaaaggtcaataataa

SEQ ID NO: 4453931 - DNA, 25 bp, Homo sapien
taatggtaactactcagtacttgct

SEQ ID NO: 4453932 - DNA, 25 bp, Homo sapien
tgtaatgtgcctacaactcatgctc

SEQ ID NO: 4453933 - DNA, 25 bp, Homo sapien
ggagctttcctccaactacttgctt

SEQ ID NO: 4453934 - DNA, 25 bp, Homo sapien
aattgaattctactgggagctttcc

SEQ ID NO: 4453935 - DNA, 25 bp, Homo sapien
gctgaatttgtaaccatggtgctgg

SEQ ID NO: 4453936 - DNA, 25 bp, Homo sapien
tggttacaaaactcccagtcaagtc

SEQ ID NO: 4453937 - DNA, 25 bp, Homo sapien
gctcttcgtaaggattcatcaagaa

SEQ ID NO: 4453938 - DNA, 25 bp, Homo sapien
caagaacatcatacattaattcact

SEQ ID NO: 4453939 - DNA, 25 bp, Homo sapien
ctcagctcttcgtaaggattcatca

SEQ ID NO: 4453940 - DNA, 25 bp, Homo sapien
tcatcaagaacatcatacattaatt

SEQ ID NO: 4453941 - DNA, 25 bp, Homo sapien
tttctgtagcaaggtgaaacactgg

SEQ ID NO: 4453942 - DNA, 25 bp, Homo sapien
taaggtttctgtagcaaggtgaaac

SEQ ID NO: 4453943 - DNA, 25 bp, Homo sapien
ctataaggtttctgtagcaaggtga

SEQ ID NO: 4453944 - DNA, 25 bp, Homo sapien
ctgtagcaaggtgaaacactggacc

SEQ ID NO: 4453945 - DNA, 25 bp, Homo sapien
ctatatcaggattgctagcaaatac

SEQ ID NO: 4453946 - DNA, 25 bp, Homo sapien
gctagcaaatactctaccactgata

SEQ ID NO: 4453947 - DNA, 25 bp, Homo sapien
taagctctatcaatacagatataga

SEQ ID NO: 4453948 - DNA, 25 bp, Homo sapien
tactctaccactgatataatcaatg

SEQ ID NO: 4453949 - DNA, 25 bp, Homo sapien
tccatacctccggatttacaaatcc

SEQ ID NO: 4453950 - DNA, 25 bp, Homo sapien
tgctccccaccataaattatccttt

SEQ ID NO: 4453951 - DNA, 25 bp, Homo sapien
aatccaaactcatttggctgttgtg

SEQ ID NO: 4453952 - DNA, 25 bp, Homo sapien
tttggctgttgtgacaggtcctcca

SEQ ID NO: 4453953 - DNA, 25 bp, Homo sapien
tcaagtaattccgatttaggataaa

SEQ ID NO: 4453954 - DNA, 25 bp, Homo sapien
taggataaatagaatagactgtatg

SEQ ID NO: 4453955 - DNA, 25 bp, Homo sapien
aatagaatagactgtatgcacacat

SEQ ID NO: 4453956 - DNA, 25 bp, Homo sapien
ccgatttaggataaatagaatagac

SEQ ID NO: 4453957 - DNA, 25 bp, Homo sapien
tgaagagccagagtaggatcctgtt

SEQ ID NO: 4453958 - DNA, 25 bp, Homo sapien
tgtcatctggtgttgaagagccaga

SEQ ID NO: 4453959 - DNA, 25 bp, Homo sapien
taatgggatcaggatgatctaaaca

SEQ ID NO: 4453960 - DNA, 25 bp, Homo sapien
tcctgttggataacataggtaagag

SEQ ID NO: 4453961 - DNA, 25 bp, Homo sapien
gacaacagcattgaagagacagtac

SEQ ID NO: 4453962 - DNA, 25 bp, Homo sapien
cgtatcatttgatagaggttagaag

SEQ ID NO: 4453963 - DNA, 25 bp, Homo sapien
cattgaagagacagtactttagtgc

SEQ ID NO: 4453964 - DNA, 25 bp, Homo sapien
gatagaggttagaagtgacaacagc

SEQ ID NO: 4453965 - DNA, 25 bp, Homo sapien
tcttggtgaccatccagcaaagcaa

SEQ ID NO: 4453966 - DNA, 25 bp, Homo sapien
ttgtattgtatggatacatttctgt

SEQ ID NO: 4453967 - DNA, 25 bp, Homo sapien
gtgagtacgtattccttatacaaag

SEQ ID NO: 4453968 - DNA, 25 bp, Homo sapien
ggtttcacagacataattgtccaga

SEQ ID NO: 4453969 - DNA, 25 bp, Homo sapien
tcctaatgttgtatgtaatggttct

SEQ ID NO: 4453970 - DNA, 25 bp, Homo sapien
tgttgtatgtaatggttcttcctca

SEQ ID NO: 4453971 - DNA, 25 bp, Homo sapien
acagtgatgataaaccccagtatac

SEQ ID NO: 4453972 - DNA, 25 bp, Homo sapien
aatccccaggtcattgaacatacag

SEQ ID NO: 4453973 - DNA, 25 bp, Homo sapien
agaaatgtctcgattgggttaaatt

SEQ ID NO: 4453974 - DNA, 25 bp, Homo sapien
tttctcatgatgtaagcacaccaaa

SEQ ID NO: 4453975 - DNA, 25 bp, Homo sapien
tacaaatagctttatcgaaactagc

SEQ ID NO: 4453976 - DNA, 25 bp, Homo sapien
caacttttgtctataggaaagatac

SEQ ID NO: 4453977 - DNA, 25 bp, Homo sapien
cccagtgggagggtaatccatgtca

SEQ ID NO: 4453978 - DNA, 25 bp, Homo sapien
gcttgctgtgtttaatacgattcac

SEQ ID NO: 4453979 - DNA, 25 bp, Homo sapien
gctgtgtttaatacgattcacttcc

SEQ ID NO: 4453980 - DNA, 25 bp, Homo sapien
tgtagagttctcaaatcaaaagtaa

SEQ ID NO: 4453981 - DNA, 25 bp, Homo sapien
atttgtagagttctcaaatcaaaag

SEQ ID NO: 4453982 - DNA, 25 bp, Homo sapien
ttgtagagttctcaaatcaaaagta

SEQ ID NO: 4453983 - DNA, 25 bp, Homo sapien
tttgtagagttctcaaatcaaaagt

SEQ ID NO: 4453984 - DNA, 25 bp, Homo sapien
gaccaaattgacgatgacatactct

SEQ ID NO: 4453985 - DNA, 25 bp, Homo sapien
tatattctgtgcattagtaattctg

SEQ ID NO: 4453986 - DNA, 25 bp, Homo sapien
catactcttctttgctctgatgtaa

SEQ ID NO: 4453987 - DNA, 25 bp, Homo sapien
cagctctgctattttgccgaccaaa

SEQ ID NO: 4453988 - DNA, 25 bp, Homo sapien
gtccacagtgttaagaacaagtaca

SEQ ID NO: 4453989 - DNA, 25 bp, Homo sapien
tgttaagaacaagtacacttccaaa

SEQ ID NO: 4453990 - DNA, 25 bp, Homo sapien
tgtccacagtgttaagaacaagtac

SEQ ID NO: 4453991 - DNA, 25 bp, Homo sapien
gtgtccacagtgttaagaacaagta

SEQ ID NO: 4453992 - DNA, 25 bp, Homo sapien
aataaaccatgcattatcaggagca

SEQ ID NO: 4453993 - DNA, 25 bp, Homo sapien
ctgaataaaccatgcattatcagga

SEQ ID NO: 4453994 - DNA, 25 bp, Homo sapien
aaaccatgcattatcaggagcatat

SEQ ID NO: 4453995 - DNA, 25 bp, Homo sapien
gaataaaccatgcattatcaggagc

SEQ ID NO: 4453996 - DNA, 25 bp, Homo sapien
cattacatctcctcctactgaaaac

SEQ ID NO: 4453997 - DNA, 25 bp, Homo sapien
tctcagaaagttattgggaatatca

SEQ ID NO: 4453998 - DNA, 25 bp, Homo sapien
ggaatatcaggatgcattacatctc

SEQ ID NO: 4453999 - DNA, 25 bp, Homo sapien
ttccgctagtagtctcagaaagtta

SEQ ID NO: 4454000 - DNA, 25 bp, Homo sapien
gactgaactgcatagagtcttaatt

SEQ ID NO: 4454001 - DNA, 25 bp, Homo sapien
aactgcatagagtcttaattgctga

SEQ ID NO: 4454002 - DNA, 25 bp, Homo sapien
gataagactgaactgcatagagtct

SEQ ID NO: 4454003 - DNA, 25 bp, Homo sapien
ctgaactgcatagagtcttaattgc

SEQ ID NO: 4454004 - DNA, 25 bp, Homo sapien
tattagaagagtgcgcctgagatgt

SEQ ID NO: 4454005 - DNA, 25 bp, Homo sapien
cctgagatgtcaatttggtcacagc

SEQ ID NO: 4454006 - DNA, 25 bp, Homo sapien
tggcgtttccttatctaagaggtag

SEQ ID NO: 4454007 - DNA, 25 bp, Homo sapien
ggtcacagcagcaattaaccaggct

SEQ ID NO: 4454008 - DNA, 25 bp, Homo sapien
cttcagccacaaaaccatccagaaa

SEQ ID NO: 4454009 - DNA, 25 bp, Homo sapien
cagccacaaaaccatccagaaaaga

SEQ ID NO: 4454010 - DNA, 25 bp, Homo sapien
tttgtaaggcgctgcaccctgactg

SEQ ID NO: 4454011 - DNA, 25 bp, Homo sapien
ggaggtttgtaaggcgctgcaccct

SEQ ID NO: 4454012 - DNA, 25 bp, Homo sapien
tacactctagcttatcataaatcca

SEQ ID NO: 4454013 - DNA, 25 bp, Homo sapien
cactctagcttatcataaatccatg

SEQ ID NO: 4454014 - DNA, 25 bp, Homo sapien
ccctacactctagcttatcataaat

SEQ ID NO: 4454015 - DNA, 25 bp, Homo sapien
tctagcttatcataaatccatgaaa

SEQ ID NO: 4454016 - DNA, 25 bp, Homo sapien
cattgttctcaaggctgagctatct

SEQ ID NO: 4454017 - DNA, 25 bp, Homo sapien
cagcttcacttctcaggaccaattt

SEQ ID NO: 4454018 - DNA, 25 bp, Homo sapien
tatggccgggtggtaattccagcac

SEQ ID NO: 4454019 - DNA, 25 bp, Homo sapien
gcaatctaagattttcctagcctgc

SEQ ID NO: 4454020 - DNA, 25 bp, Homo sapien
actgcatctggcccgaacttgcttt

SEQ ID NO: 4454021 - DNA, 25 bp, Homo sapien
acaccatagcattctgctcctgccc

SEQ ID NO: 4454022 - DNA, 25 bp, Homo sapien
gaactttggagtacacattcacacc

SEQ ID NO: 4454023 - DNA, 25 bp, Homo sapien
catctggcccgaacttgctttttta

SEQ ID NO: 4454024 - DNA, 25 bp, Homo sapien
gatacatctgaaccaagagaaatgc

SEQ ID NO: 4454025 - DNA, 25 bp, Homo sapien
tgtctcagcactattcccagataca

SEQ ID NO: 4454026 - DNA, 25 bp, Homo sapien
gagactgtcgtccagtgaagccaga

SEQ ID NO: 4454027 - DNA, 25 bp, Homo sapien
cagcaggagactgtcgtccagtgaa

SEQ ID NO: 4454028 - DNA, 25 bp, Homo sapien
cacttaattgctgtcacctccatca

SEQ ID NO: 4454029 - DNA, 25 bp, Homo sapien
ctgttgtgcaggtaaaagtgtgtaa

SEQ ID NO: 4454030 - DNA, 25 bp, Homo sapien
tccccatgcttggagtatcaaaatt

SEQ ID NO: 4454031 - DNA, 25 bp, Homo sapien
ccctgtttgggacacttaattgctg

SEQ ID NO: 4454032 - DNA, 25 bp, Homo sapien
ggcagagctccactttcatcaccag

SEQ ID NO: 4454033 - DNA, 25 bp, Homo sapien
gattgtactttctgatcctagacca

SEQ ID NO: 4454034 - DNA, 25 bp, Homo sapien
ttatactctcttgaggaacaggcag

SEQ ID NO: 4454035 - DNA, 25 bp, Homo sapien
ttgggtaagaacttgagattgatcc

SEQ ID NO: 4454036 - DNA, 25 bp, Homo sapien
tgtgagtgactcagaatccaaaagt

SEQ ID NO: 4454037 - DNA, 25 bp, Homo sapien
tattagtgactgaccagaccatcaa

SEQ ID NO: 4454038 - DNA, 25 bp, Homo sapien
tattatgagtactggttgtttcgcc

SEQ ID NO: 4454039 - DNA, 25 bp, Homo sapien
aattccttgtctcctgtatcgtgca

SEQ ID NO: 4454040 - DNA, 25 bp, Homo sapien
tgcacactatattgaaagcttttgg

SEQ ID NO: 4454041 - DNA, 25 bp, Homo sapien
gagcagaatgagtatccatcatatg

SEQ ID NO: 4454042 - DNA, 25 bp, Homo sapien
gtaaaaggtttttctatctgcacac

SEQ ID NO: 4454043 - DNA, 25 bp, Homo sapien
tgcttccattacaggcaaacagcat

SEQ ID NO: 4454044 - DNA, 25 bp, Homo sapien
tagtttaataacacatcacactctg

SEQ ID NO: 4454045 - DNA, 25 bp, Homo sapien
gtttaataacacatcacactctggg

SEQ ID NO: 4454046 - DNA, 25 bp, Homo sapien
atagtttaataacacatcacactct

SEQ ID NO: 4454047 - DNA, 25 bp, Homo sapien
agtttaataacacatcacactctgg

SEQ ID NO: 4454048 - DNA, 25 bp, Homo sapien
gcgaaggataaccagagtttcccaa

SEQ ID NO: 4454049 - DNA, 25 bp, Homo sapien
tcatttgcgaaggataaccagagtt

SEQ ID NO: 4454050 - DNA, 25 bp, Homo sapien
ctataatctcaataatatggagtct

SEQ ID NO: 4454051 - DNA, 25 bp, Homo sapien
tcccaaagtcgtcacttgagatttt

SEQ ID NO: 4454052 - DNA, 25 bp, Homo sapien
cagctgacaggccaatagcccttca

SEQ ID NO: 4454053 - DNA, 25 bp, Homo sapien
atacatctgcatgaactcggcaatg

SEQ ID NO: 4454054 - DNA, 25 bp, Homo sapien
tgacaggccaatagcccttcattgc

SEQ ID NO: 4454055 - DNA, 25 bp, Homo sapien
acatctgcatgaactcggcaatgca

SEQ ID NO: 4454056 - DNA, 25 bp, Homo sapien
taggatccctccatcaccttttgac

SEQ ID NO: 4454057 - DNA, 25 bp, Homo sapien
ccttttgacactgatacagtaaata

SEQ ID NO: 4454058 - DNA, 25 bp, Homo sapien
gaagagtagaacaggaggatctgaa

SEQ ID NO: 4454059 - DNA, 25 bp, Homo sapien
tacagtaaatagtcaggaagagtag

SEQ ID NO: 4454060 - DNA, 25 bp, Homo sapien
gacaccatgttcctttgggcagacc

SEQ ID NO: 4454061 - DNA, 25 bp, Homo sapien
caactgttagtgtgtgctatgccaa

SEQ ID NO: 4454062 - DNA, 25 bp, Homo sapien
gaggaatactcgacacaaatgacta

SEQ ID NO: 4454063 - DNA, 25 bp, Homo sapien
tgtaaccaagcaacagatctccctg

SEQ ID NO: 4454064 - DNA, 25 bp, Homo sapien
gctcttaccccagatgttgtccctt

SEQ ID NO: 4454065 - DNA, 25 bp, Homo sapien
tgtcccttcactgactaaattatga

SEQ ID NO: 4454066 - DNA, 25 bp, Homo sapien
cattttcagcaaagatgcctggcac

SEQ ID NO: 4454067 - DNA, 25 bp, Homo sapien
ccatagctcttaccccagatgttgt

SEQ ID NO: 4454068 - DNA, 25 bp, Homo sapien
tctcagtggctcacaatcatgaggc

SEQ ID NO: 4454069 - DNA, 25 bp, Homo sapien
gcagtttctctagcaggacccttac

SEQ ID NO: 4454070 - DNA, 25 bp, Homo sapien
gaataggttcagtgcactctcagtg

SEQ ID NO: 4454071 - DNA, 25 bp, Homo sapien
catgctgtgcttggtatacttggca

SEQ ID NO: 4454072 - DNA, 25 bp, Homo sapien
gcaactacgtctttcagtaagtgaa

SEQ ID NO: 4454073 - DNA, 25 bp, Homo sapien
cagaagggataagcaggcagagcac

SEQ ID NO: 4454074 - DNA, 25 bp, Homo sapien
tctaaaaaggctactactatatgat

SEQ ID NO: 4454075 - DNA, 25 bp, Homo sapien
tgtggtatacacaacgaatttttca

SEQ ID NO: 4454076 - DNA, 25 bp, Homo sapien
gatggatccgttacaatctaccctg

SEQ ID NO: 4454077 - DNA, 25 bp, Homo sapien
tggtcaggctaaatataatcccata

SEQ ID NO: 4454078 - DNA, 25 bp, Homo sapien
gattgagcctgctacaaacatttta

SEQ ID NO: 4454079 - DNA, 25 bp, Homo sapien
tctgaccacaaatacccaatcttgc

SEQ ID NO: 4454080 - DNA, 25 bp, Homo sapien
tagactagctggacttttggcagtc

SEQ ID NO: 4454081 - DNA, 25 bp, Homo sapien
ctttagactagctggacttttggca

SEQ ID NO: 4454082 - DNA, 25 bp, Homo sapien
ttctttagactagctggacttttgg

SEQ ID NO: 4454083 - DNA, 25 bp, Homo sapien
gactagctggacttttggcagtcag

SEQ ID NO: 4454084 - DNA, 25 bp, Homo sapien
cttggaagtccacttcagataaaca

SEQ ID NO: 4454085 - DNA, 25 bp, Homo sapien
ctgttaatcagcaggccttgcttgg

SEQ ID NO: 4454086 - DNA, 25 bp, Homo sapien
taagacttagctattctgttaatca

SEQ ID NO: 4454087 - DNA, 25 bp, Homo sapien
tagctattctgttaatcagcaggcc

SEQ ID NO: 4454088 - DNA, 25 bp, Homo sapien
gctcttcttagctgactactaaggc

SEQ ID NO: 4454089 - DNA, 25 bp, Homo sapien
tagctgactactaaggccattctgg

SEQ ID NO: 4454090 - DNA, 25 bp, Homo sapien
taaggccattctggaccagttcctg

SEQ ID NO: 4454091 - DNA, 25 bp, Homo sapien
cattctggaccagttcctgagacaa

SEQ ID NO: 4454092 - DNA, 25 bp, Homo sapien
catgtggctctaagatactggtgac

SEQ ID NO: 4454093 - DNA, 25 bp, Homo sapien
ggaggatccattcccattgacccaa

SEQ ID NO: 4454094 - DNA, 25 bp, Homo sapien
gaccaacctatgctggcaatcctaa

SEQ ID NO: 4454095 - DNA, 25 bp, Homo sapien
tgctggcatgcagacacaagtccaa

SEQ ID NO: 4454096 - DNA, 25 bp, Homo sapien
tgaaaacattgcactaacaggagct

SEQ ID NO: 4454097 - DNA, 25 bp, Homo sapien
taatctgaccctgctacatgagcca

SEQ ID NO: 4454098 - DNA, 25 bp, Homo sapien
ttaattcaacatgatcccagaggtc

SEQ ID NO: 4454099 - DNA, 25 bp, Homo sapien
tcagatggccttcgagaagagggtt

SEQ ID NO: 4454100 - DNA, 25 bp, Homo sapien
ccagcttggtaaagatcttcctgtt

SEQ ID NO: 4454101 - DNA, 25 bp, Homo sapien
gcttggtaaagatcttcctgttgtt

SEQ ID NO: 4454102 - DNA, 25 bp, Homo sapien
gatcttcctgttgtttatcaccatt

SEQ ID NO: 4454103 - DNA, 25 bp, Homo sapien
ggtaaagatcttcctgttgtttatc

SEQ ID NO: 4454104 - DNA, 25 bp, Homo sapien
actcccacatcctagagtgatgctc

SEQ ID NO: 4454105 - DNA, 25 bp, Homo sapien
ccacatcctagagtgatgctcagag

SEQ ID NO: 4454106 - DNA, 25 bp, Homo sapien
cctgtccactcccacatcctagagt

SEQ ID NO: 4454107 - DNA, 25 bp, Homo sapien
tcccacatcctagagtgatgctcag

SEQ ID NO: 4454108 - DNA, 25 bp, Homo sapien
gcctgctgctaggttgttactttct

SEQ ID NO: 4454109 - DNA, 25 bp, Homo sapien
catgtgccaaaaggcacccttttcc

SEQ ID NO: 4454110 - DNA, 25 bp, Homo sapien
cagatacttcatagcaaaaactgga

SEQ ID NO: 4454111 - DNA, 25 bp, Homo sapien
ggcagcctgctgctaggttgttact

SEQ ID NO: 4454112 - DNA, 25 bp, Homo sapien
tatttcagccagttgggttagggca

SEQ ID NO: 4454113 - DNA, 25 bp, Homo sapien
gccagaggtctgttcatggagctcc

SEQ ID NO: 4454114 - DNA, 25 bp, Homo sapien
tctggtactgtttggctgtcatccc

SEQ ID NO: 4454115 - DNA, 25 bp, Homo sapien
tgtgaagagttgagcctccttttgg

SEQ ID NO: 4454116 - DNA, 25 bp, Homo sapien
gggcatggctggcagccagggcagc

SEQ ID NO: 4454117 - DNA, 25 bp, Homo sapien
tcagggcatggctggcagccagggc

SEQ ID NO: 4454118 - DNA, 25 bp, Homo sapien
gcatggctggcagccagggcagcac

SEQ ID NO: 4454119 - DNA, 25 bp, Homo sapien
cagggcatggctggcagccagggca

SEQ ID NO: 4454120 - DNA, 25 bp, Homo sapien
cattagactgtttactaatttcaca

SEQ ID NO: 4454121 - DNA, 25 bp, Homo sapien
tggtgtccttgttagcagtctggtg

SEQ ID NO: 4454122 - DNA, 25 bp, Homo sapien
tggctctgaatgtggcatcctactg

SEQ ID NO: 4454123 - DNA, 25 bp, Homo sapien
tacggtgttggcatgctcccatggc

SEQ ID NO: 4454124 - DNA, 25 bp, Homo sapien
gccttggggagagccagcatgacgc

SEQ ID NO: 4454125 - DNA, 25 bp, Homo sapien
gggagagccagcatgacgcctgctg

SEQ ID NO: 4454126 - DNA, 25 bp, Homo sapien
cttggggagagccagcatgacgcct

SEQ ID NO: 4454127 - DNA, 25 bp, Homo sapien
agagccagcatgacgcctgctgacc

SEQ ID NO: 4454128 - DNA, 25 bp, Homo sapien
tgtctagcgagagaagaggaccctg

SEQ ID NO: 4454129 - DNA, 25 bp, Homo sapien
gaggacacccagacatgaagcatag

SEQ ID NO: 4454130 - DNA, 25 bp, Homo sapien
gagaaataaggcaaggatggtcccc

SEQ ID NO: 4454131 - DNA, 25 bp, Homo sapien
gatgaggtccgcagacacattgaaa

SEQ ID NO: 4454132 - DNA, 25 bp, Homo sapien
ctagaaggacgctccagccgtgggc

SEQ ID NO: 4454133 - DNA, 25 bp, Homo sapien
tccagccgtgggcttcttctggatc

SEQ ID NO: 4454134 - DNA, 25 bp, Homo sapien
ccagccgtgggcttcttctggatca

SEQ ID NO: 4454135 - DNA, 25 bp, Homo sapien
aggcagaaggccctagaaggacgct

SEQ ID NO: 4454136 - DNA, 25 bp, Homo sapien
tcaaacagccggagttagcattacc

SEQ ID NO: 4454137 - DNA, 25 bp, Homo sapien
tacctgcctgtgtgtttacttcgtc

SEQ ID NO: 4454138 - DNA, 25 bp, Homo sapien
gtttacttcgtcactaggtgccagg

SEQ ID NO: 4454139 - DNA, 25 bp, Homo sapien
cgcacacgccttgtcttactacttt

SEQ ID NO: 4454140 - DNA, 25 bp, Homo sapien
aattagtgttctttccagttatcaa

SEQ ID NO: 4454141 - DNA, 25 bp, Homo sapien
taaatgggatccattcaatctaaaa

SEQ ID NO: 4454142 - DNA, 25 bp, Homo sapien
tccagttatcaaacattcactgtgt

SEQ ID NO: 4454143 - DNA, 25 bp, Homo sapien
ttctaaatgggatccattcaatcta

SEQ ID NO: 4454144 - DNA, 25 bp, Homo sapien
tggagactgtactgtcccctgccta

SEQ ID NO: 4454145 - DNA, 25 bp, Homo sapien
acactggagactgtactgtcccctg

SEQ ID NO: 4454146 - DNA, 25 bp, Homo sapien
gagcctttagcacaaaccccaaatc

SEQ ID NO: 4454147 - DNA, 25 bp, Homo sapien
tagggttacatgtggagcctttagc

SEQ ID NO: 4454148 - DNA, 25 bp, Homo sapien
aagccaaaactcttgtatggcctcc

SEQ ID NO: 4454149 - DNA, 25 bp, Homo sapien
catgactgtggaaaaccctcttcct

SEQ ID NO: 4454150 - DNA, 25 bp, Homo sapien
accaccaccccatgactgtggaaaa

SEQ ID NO: 4454151 - DNA, 25 bp, Homo sapien
aaactcttgtatggcctccaggcca

SEQ ID NO: 4454152 - DNA, 25 bp, Homo sapien
tgataaacacacaaagctgaccggg

SEQ ID NO: 4454153 - DNA, 25 bp, Homo sapien
accgggccacccctagcatccacag

SEQ ID NO: 4454154 - DNA, 25 bp, Homo sapien
ggccacccctagcatccacaggcat

SEQ ID NO: 4454155 - DNA, 25 bp, Homo sapien
aaacacacaaagctgaccgggccac

SEQ ID NO: 4454156 - DNA, 25 bp, Homo sapien
tgagcaacggctttcaccaggacta

SEQ ID NO: 4454157 - DNA, 25 bp, Homo sapien
aggactatgaccctgatatttccaa

SEQ ID NO: 4454158 - DNA, 25 bp, Homo sapien
cactgagctgagcaacggctttcac

SEQ ID NO: 4454159 - DNA, 25 bp, Homo sapien
ggactatgaccctgatatttccaac

SEQ ID NO: 4454160 - DNA, 25 bp, Homo sapien
gtcactctcaggtgacactgtactt

SEQ ID NO: 4454161 - DNA, 25 bp, Homo sapien
tctttacggcaatcttttccctgca

SEQ ID NO: 4454162 - DNA, 25 bp, Homo sapien
gcagcttctgaagctaatgggattg

SEQ ID NO: 4454163 - DNA, 25 bp, Homo sapien
tcccacttcatgctgagcagtgtgg

SEQ ID NO: 4454164 - DNA, 25 bp, Homo sapien
gggattgtcggcctttgcctcattc

SEQ ID NO: 4454165 - DNA, 25 bp, Homo sapien
tccaaacactatcatcactctaatg

SEQ ID NO: 4454166 - DNA, 25 bp, Homo sapien
aacactatcatcactctaatgatag

SEQ ID NO: 4454167 - DNA, 25 bp, Homo sapien
aaactattccaaacactatcatcac

SEQ ID NO: 4454168 - DNA, 25 bp, Homo sapien
tattccaaacactatcatcactcta

SEQ ID NO: 4454169 - DNA, 25 bp, Homo sapien
cagcctcacctgtattcttgaaaat

SEQ ID NO: 4454170 - DNA, 25 bp, Homo sapien
tcagcctcacctgtattcttgaaaa

SEQ ID NO: 4454171 - DNA, 25 bp, Homo sapien
ctcagcctcacctgtattcttgaaa

SEQ ID NO: 4454172 - DNA, 25 bp, Homo sapien
ctgtcagcagctgcacagaattgag

SEQ ID NO: 4454173 - DNA, 25 bp, Homo sapien
tgtcagcagctgcacagaattgagg

SEQ ID NO: 4454174 - DNA, 25 bp, Homo sapien
cttcagaggcaccagcaaggtgtgt

SEQ ID NO: 4454175 - DNA, 25 bp, Homo sapien
tcacttcagaggcaccagcaaggtg

SEQ ID NO: 4454176 - DNA, 25 bp, Homo sapien
aatgtcacttcagaggcaccagcaa

SEQ ID NO: 4454177 - DNA, 25 bp, Homo sapien
cctggcaatgtcacttcagaggcac

SEQ ID NO: 4454178 - DNA, 25 bp, Homo sapien
tggattcgttcatttattcgacacg

SEQ ID NO: 4454179 - DNA, 25 bp, Homo sapien
gactggacaccgactgctgttattt

SEQ ID NO: 4454180 - DNA, 25 bp, Homo sapien
atggcctgaattctggattcgttca

SEQ ID NO: 4454181 - DNA, 25 bp, Homo sapien
tattcgacacgttttgactggacac

SEQ ID NO: 4454182 - DNA, 25 bp, Homo sapien
actatctatagtgaaacaaaaccag

SEQ ID NO: 4454183 - DNA, 25 bp, Homo sapien
caaaaccagaaaagtggttggctct

SEQ ID NO: 4454184 - DNA, 25 bp, Homo sapien
agcaacaaacgggaaaaatctgctt

SEQ ID NO: 4454185 - DNA, 25 bp, Homo sapien
tatgaagttctacacaagacaaaac

SEQ ID NO: 4454186 - DNA, 25 bp, Homo sapien
tgctcactagcagaggagcctctgg

SEQ ID NO: 4454187 - DNA, 25 bp, Homo sapien
catggctcccttaaacctgaaaggc

SEQ ID NO: 4454188 - DNA, 25 bp, Homo sapien
gccccttgaaggtagccttgccttg

SEQ ID NO: 4454189 - DNA, 25 bp, Homo sapien
tcacctgctcactagcagaggagcc

SEQ ID NO: 4454190 - DNA, 25 bp, Homo sapien
tgggcagcgaggtatgcacacagct

SEQ ID NO: 4454191 - DNA, 25 bp, Homo sapien
tctgaaagagcaatgtaagtgcccc

SEQ ID NO: 4454192 - DNA, 25 bp, Homo sapien
cacagctggatgtgccaacgtcggg

SEQ ID NO: 4454193 - DNA, 25 bp, Homo sapien
tttcataccgagtgtcctcaccagg

SEQ ID NO: 4454194 - DNA, 25 bp, Homo sapien
gcccggctgccatcaggaggacttt

SEQ ID NO: 4454195 - DNA, 25 bp, Homo sapien
gcagacctggcacgtgcaggtttat

SEQ ID NO: 4454196 - DNA, 25 bp, Homo sapien
cagcatgacacggatgcaggagcca

SEQ ID NO: 4454197 - DNA, 25 bp, Homo sapien
gaaaaactctgcgagccttggagca

SEQ ID NO: 4454198 - DNA, 25 bp, Homo sapien
catgctaaaggcaaccacatgaggg

SEQ ID NO: 4454199 - DNA, 25 bp, Homo sapien
tgatggcagtcgtaatggctggcat

SEQ ID NO: 4454200 - DNA, 25 bp, Homo sapien
cgtctttctagttgggaagtgacaa

SEQ ID NO: 4454201 - DNA, 25 bp, Homo sapien
ggagcagcgtgtcctgtcgtttcat

SEQ ID NO: 4454202 - DNA, 25 bp, Homo sapien
gccaggatgtaaataagtcacctgc

SEQ ID NO: 4454203 - DNA, 25 bp, Homo sapien
gttcaccggccagctcgggcagctg

SEQ ID NO: 4454204 - DNA, 25 bp, Homo sapien
tccggagtggaaaaacacaactgag

SEQ ID NO: 4454205 - DNA, 25 bp, Homo sapien
agctgagtgtccaggttcaccggcc

SEQ ID NO: 4454206 - DNA, 25 bp, Homo sapien
ctctcctccagatttgtctcttccc

SEQ ID NO: 4454207 - DNA, 25 bp, Homo sapien
tctcctccagatttgtctcttccca

SEQ ID NO: 4454208 - DNA, 25 bp, Homo sapien
ctcctccagatttgtctcttcccat

SEQ ID NO: 4454209 - DNA, 25 bp, Homo sapien
ctggccacaaatgcaggtgcaggtg

SEQ ID NO: 4454210 - DNA, 25 bp, Homo sapien
agtggagccaacagttgagggtgtt

SEQ ID NO: 4454211 - DNA, 25 bp, Homo sapien
gtggagccaacagttgagggtgttt

SEQ ID NO: 4454212 - DNA, 25 bp, Homo sapien
aagtggagccaacagttgagggtgt

SEQ ID NO: 4454213 - DNA, 25 bp, Homo sapien
tcctactgtctagtaataagctgag

SEQ ID NO: 4454214 - DNA, 25 bp, Homo sapien
tataagatgacagtgtaatctccct

SEQ ID NO: 4454215 - DNA, 25 bp, Homo sapien
gctcagttctgaatagacattcctg

SEQ ID NO: 4454216 - DNA, 25 bp, Homo sapien
tgctcagagatactcccaactgatg

SEQ ID NO: 4454217 - DNA, 25 bp, Homo sapien
gtatgtggtcatggataaattgcac

SEQ ID NO: 4454218 - DNA, 25 bp, Homo sapien
atatagccaatataactatctctac

SEQ ID NO: 4454219 - DNA, 25 bp, Homo sapien
caccttggaattcgctttctaaagg

SEQ ID NO: 4454220 - DNA, 25 bp, Homo sapien
cactttacttgtgttatatagccaa

SEQ ID NO: 4454221 - DNA, 25 bp, Homo sapien
tacctcctatgggttgtcaccaagc

SEQ ID NO: 4454222 - DNA, 25 bp, Homo sapien
tcaagttgattagaaagaccaggcc

SEQ ID NO: 4454223 - DNA, 25 bp, Homo sapien
tagagaaggctggtcagtacccact

SEQ ID NO: 4454224 - DNA, 25 bp, Homo sapien
gacccttgctgtgaattaagcccaa

SEQ ID NO: 4454225 - DNA, 25 bp, Homo sapien
caggaatggaattcactggacttgt

SEQ ID NO: 4454226 - DNA, 25 bp, Homo sapien
cacacactaacctggaaagtatagg

SEQ ID NO: 4454227 - DNA, 25 bp, Homo sapien
tagtctccattttagtagtctgtgc

SEQ ID NO: 4454228 - DNA, 25 bp, Homo sapien
tggccttacattgcctcaagaggaa

SEQ ID NO: 4454229 - DNA, 25 bp, Homo sapien
ttagcaatgcacgttcttgggcccc

SEQ ID NO: 4454230 - DNA, 25 bp, Homo sapien
gtgttttaacaaagcctgcaggtga

SEQ ID NO: 4454231 - DNA, 25 bp, Homo sapien
ggctatggtctcacaaatatcctgg

SEQ ID NO: 4454232 - DNA, 25 bp, Homo sapien
gacctactaaatgagacagtctggg

SEQ ID NO: 4454233 - DNA, 25 bp, Homo sapien
catgtggaacttgggattaatatca

SEQ ID NO: 4454234 - DNA, 25 bp, Homo sapien
tctcaggaccgctgataacagcttt

SEQ ID NO: 4454235 - DNA, 25 bp, Homo sapien
tgatttctcaggaccgctgataaca

SEQ ID NO: 4454236 - DNA, 25 bp, Homo sapien
caagcaagccatggattttgtctcc

SEQ ID NO: 4454237 - DNA, 25 bp, Homo sapien
cagcagcaacgagggcagtattgat

SEQ ID NO: 4454238 - DNA, 25 bp, Homo sapien
taaaaggtagctgtgctcattctta

SEQ ID NO: 4454239 - DNA, 25 bp, Homo sapien
aataaaaggtagctgtgctcattct

SEQ ID NO: 4454240 - DNA, 25 bp, Homo sapien
tcaataaaaggtagctgtgctcatt

SEQ ID NO: 4454241 - DNA, 25 bp, Homo sapien
aaaaggtagctgtgctcattcttac

SEQ ID NO: 4454242 - DNA, 25 bp, Homo sapien
gccgcgcatcattagcaaaactcac

SEQ ID NO: 4454243 - DNA, 25 bp, Homo sapien
gcacctttataaaagatggcacacg

SEQ ID NO: 4454244 - DNA, 25 bp, Homo sapien
aagcaactgatctcttagcaacaag

SEQ ID NO: 4454245 - DNA, 25 bp, Homo sapien
ggttcttaaacagccgcgcatcatt

SEQ ID NO: 4454246 - DNA, 25 bp, Homo sapien
caagtcctggcggagttagcagcag

SEQ ID NO: 4454247 - DNA, 25 bp, Homo sapien
gagttgtggtcactacactggagtc

SEQ ID NO: 4454248 - DNA, 25 bp, Homo sapien
ggcaatagatagcatcagggtctct

SEQ ID NO: 4454249 - DNA, 25 bp, Homo sapien
tcctgagactggaatatggagctca

SEQ ID NO: 4454250 - DNA, 25 bp, Homo sapien
gcaagccttaacgtattcagagtaa

SEQ ID NO: 4454251 - DNA, 25 bp, Homo sapien
cgtattcagagtaatggcttgcttg

SEQ ID NO: 4454252 - DNA, 25 bp, Homo sapien
catcgcaagccttaacgtattcaga

SEQ ID NO: 4454253 - DNA, 25 bp, Homo sapien
gccttaacgtattcagagtaatggc

SEQ ID NO: 4454254 - DNA, 25 bp, Homo sapien
tttggcagctccccaggaaacaggg

SEQ ID NO: 4454255 - DNA, 25 bp, Homo sapien
aattgttgtacgcttgtgagggcac

SEQ ID NO: 4454256 - DNA, 25 bp, Homo sapien
ttgtgtccaaattgccgacaattgg

SEQ ID NO: 4454257 - DNA, 25 bp, Homo sapien
tctttagaacgacactgatttgccc

SEQ ID NO: 4454258 - DNA, 25 bp, Homo sapien
gagtttcccgcggatgtacactggc

SEQ ID NO: 4454259 - DNA, 25 bp, Homo sapien
tttagcgagtttcccgcggatgtac

SEQ ID NO: 4454260 - DNA, 25 bp, Homo sapien
gtttcccgcggatgtacactggccc

SEQ ID NO: 4454261 - DNA, 25 bp, Homo sapien
aattttagcgagtttcccgcggatg

SEQ ID NO: 4454262 - DNA, 25 bp, Homo sapien
aggccttgccggttccagcaaaact

SEQ ID NO: 4454263 - DNA, 25 bp, Homo sapien
ccggttccagcaaaacttcatggag

SEQ ID NO: 4454264 - DNA, 25 bp, Homo sapien
ccttgccggttccagcaaaacttca

SEQ ID NO: 4454265 - DNA, 25 bp, Homo sapien
cagaaaaaggccttgccggttccag

SEQ ID NO: 4454266 - DNA, 25 bp, Homo sapien
tttgctcaacagaaagccatgtaaa

SEQ ID NO: 4454267 - DNA, 25 bp, Homo sapien
gctcctgtgaatgaatcgcctttgt

SEQ ID NO: 4454268 - DNA, 25 bp, Homo sapien
ggaccagaaggccaaaacatctgtc

SEQ ID NO: 4454269 - DNA, 25 bp, Homo sapien
agctcctgtgaatgaatcgcctttg

SEQ ID NO: 4454270 - DNA, 25 bp, Homo sapien
agctgtcctgaccaaaggccacgct

SEQ ID NO: 4454271 - DNA, 25 bp, Homo sapien
ggtctgcaaacacagaatttgagca

SEQ ID NO: 4454272 - DNA, 25 bp, Homo sapien
gaaacagctctaagagccactaaga

SEQ ID NO: 4454273 - DNA, 25 bp, Homo sapien
tctgcaaacacagaatttgagcagc

SEQ ID NO: 4454274 - DNA, 25 bp, Homo sapien
aatgttctatttagaaacgcatttt

SEQ ID NO: 4454275 - DNA, 25 bp, Homo sapien
tggcaaatgttctatttagaaacgc

SEQ ID NO: 4454276 - DNA, 25 bp, Homo sapien
caaatgttctatttagaaacgcatt

SEQ ID NO: 4454277 - DNA, 25 bp, Homo sapien
tgttctatttagaaacgcattttta

SEQ ID NO: 4454278 - DNA, 25 bp, Homo sapien
catagcgccccagatgtagcatcct

SEQ ID NO: 4454279 - DNA, 25 bp, Homo sapien
gagccatatccagcaccagtcacct

SEQ ID NO: 4454280 - DNA, 25 bp, Homo sapien
gattcaagtgctgctctcctaagga

SEQ ID NO: 4454281 - DNA, 25 bp, Homo sapien
gaggagagcaggttttctttgcttg

SEQ ID NO: 4454282 - DNA, 25 bp, Homo sapien
tgagtccactctccctaccaagctt

SEQ ID NO: 4454283 - DNA, 25 bp, Homo sapien
tcttgagtccactctccctaccaag

SEQ ID NO: 4454284 - DNA, 25 bp, Homo sapien
ctgtcttgagtccactctccctacc

SEQ ID NO: 4454285 - DNA, 25 bp, Homo sapien
ttgagtccactctccctaccaagct

SEQ ID NO: 4454286 - DNA, 25 bp, Homo sapien
ccctctgaatcctttatgatttaaa

SEQ ID NO: 4454287 - DNA, 25 bp, Homo sapien
tgtgtacccgagtgtgtacacctca

SEQ ID NO: 4454288 - DNA, 25 bp, Homo sapien
aatagtccctctgaatcctttatga

SEQ ID NO: 4454289 - DNA, 25 bp, Homo sapien
tggcagtgcttgtgtgtacccgagt

SEQ ID NO: 4454290 - DNA, 25 bp, Homo sapien
tcatagctcgagcagcacttttggc

SEQ ID NO: 4454291 - DNA, 25 bp, Homo sapien
ttgaggcaaacccagaagttgacag

SEQ ID NO: 4454292 - DNA, 25 bp, Homo sapien
tacgggagcccatggaatctcatag

SEQ ID NO: 4454293 - DNA, 25 bp, Homo sapien
gacagcttagctgggaaccaaagat

SEQ ID NO: 4454294 - DNA, 25 bp, Homo sapien
catttagcgagcacaagtaggtgcc

SEQ ID NO: 4454295 - DNA, 25 bp, Homo sapien
caagtaggtgccgtgtgtcagcaag

SEQ ID NO: 4454296 - DNA, 25 bp, Homo sapien
caagggtaccctgtgcatgagttat

SEQ ID NO: 4454297 - DNA, 25 bp, Homo sapien
gagggaagaatcagggttcagccat

SEQ ID NO: 4454298 - DNA, 25 bp, Homo sapien
ttctgcattgatgtaatgccagagg

SEQ ID NO: 4454299 - DNA, 25 bp, Homo sapien
tgcattgatgtaatgccagaggatt

SEQ ID NO: 4454300 - DNA, 25 bp, Homo sapien
tctttctgcattgatgtaatgccag

SEQ ID NO: 4454301 - DNA, 25 bp, Homo sapien
ttgatgtaatgccagaggattggat

SEQ ID NO: 4454302 - DNA, 25 bp, Homo sapien
tgagatcagggtgctagcagagaca

SEQ ID NO: 4454303 - DNA, 25 bp, Homo sapien
agctaaaaagccgtctggtacctct

SEQ ID NO: 4454304 - DNA, 25 bp, Homo sapien
ttcttacagaggcaccaatccaatt

SEQ ID NO: 4454305 - DNA, 25 bp, Homo sapien
caatccaattcatgtgggctccacc

SEQ ID NO: 4454306 - DNA, 25 bp, Homo sapien
cagggtgttgcttcactacttctag

SEQ ID NO: 4454307 - DNA, 25 bp, Homo sapien
gggtgttgcttcactacttctaggc

SEQ ID NO: 4454308 - DNA, 25 bp, Homo sapien
ccagggtgttgcttcactacttcta

SEQ ID NO: 4454309 - DNA, 25 bp, Homo sapien
gtgttgcttcactacttctaggctc

SEQ ID NO: 4454310 - DNA, 25 bp, Homo sapien
cattcttgccagcacgtagttcaag

SEQ ID NO: 4454311 - DNA, 25 bp, Homo sapien
ccaggtcaccgtgttgtcagccaca

SEQ ID NO: 4454312 - DNA, 25 bp, Homo sapien
ctaaccctgcgtgagagccctgctc

SEQ ID NO: 4454313 - DNA, 25 bp, Homo sapien
ttgccagcacgtagttcaagtttcc

SEQ ID NO: 4454314 - DNA, 25 bp, Homo sapien
tttccttgatgagcagcccattcag

SEQ ID NO: 4454315 - DNA, 25 bp, Homo sapien
tgaatggcgaaggaaccagaactgg

SEQ ID NO: 4454316 - DNA, 25 bp, Homo sapien
gctaagtgatgtgcccatgatggca

SEQ ID NO: 4454317 - DNA, 25 bp, Homo sapien
tctgctaactgtcactcggaagcct

SEQ ID NO: 4454318 - DNA, 25 bp, Homo sapien
gtgagacacttaggcggagcttgaa

SEQ ID NO: 4454319 - DNA, 25 bp, Homo sapien
catagttgcgcaatgaatgcagagg

SEQ ID NO: 4454320 - DNA, 25 bp, Homo sapien
gaatagtgtgggctgacgacaactg

SEQ ID NO: 4454321 - DNA, 25 bp, Homo sapien
tcatgctggaatgctggacatacca

SEQ ID NO: 4454322 - DNA, 25 bp, Homo sapien
tgcactgtccagtacaggccgtgag

SEQ ID NO: 4454323 - DNA, 25 bp, Homo sapien
cactggagtgtggctggtctgaatt

SEQ ID NO: 4454324 - DNA, 25 bp, Homo sapien
gctgcactgtccagtacaggccgtg

SEQ ID NO: 4454325 - DNA, 25 bp, Homo sapien
cactgtccagtacaggccgtgagcc

SEQ ID NO: 4454326 - DNA, 25 bp, Homo sapien
gcctgcctggatactctttcatggg

SEQ ID NO: 4454327 - DNA, 25 bp, Homo sapien
ttgatatctgacttcatggagcctg

SEQ ID NO: 4454328 - DNA, 25 bp, Homo sapien
catttctctccgtttagttaacagg

SEQ ID NO: 4454329 - DNA, 25 bp, Homo sapien
caagtccctagtgctgtccatctgc

SEQ ID NO: 4454330 - DNA, 25 bp, Homo sapien
cagttcaggcgaaagcctccactgg

SEQ ID NO: 4454331 - DNA, 25 bp, Homo sapien
caggtaaggattgcacagttcaggc

SEQ ID NO: 4454332 - DNA, 25 bp, Homo sapien
gcagcccctttgtctgtggagccag

SEQ ID NO: 4454333 - DNA, 25 bp, Homo sapien
tgacaagggcagagatctccatact

SEQ ID NO: 4454334 - DNA, 25 bp, Homo sapien
tgcttttattatctggatgatgaac

SEQ ID NO: 4454335 - DNA, 25 bp, Homo sapien
aatatagtgtacaaaaagagaggta

SEQ ID NO: 4454336 - DNA, 25 bp, Homo sapien
ctaaatatagtgtacaaaaagagag

SEQ ID NO: 4454337 - DNA, 25 bp, Homo sapien
tgtttctctaaatatagtgtacaaa

SEQ ID NO: 4454338 - DNA, 25 bp, Homo sapien
tctgtgaatattgtcagaagggaca

SEQ ID NO: 4454339 - DNA, 25 bp, Homo sapien
tgctgcttgattgtaaaattggacc

SEQ ID NO: 4454340 - DNA, 25 bp, Homo sapien
tttacataaattagtgtgtccactc

SEQ ID NO: 4454341 - DNA, 25 bp, Homo sapien
ggaatagccccattccaagtgctgc

SEQ ID NO: 4454342 - DNA, 25 bp, Homo sapien
ctttctgagatcttgcttcctgacc

SEQ ID NO: 4454343 - DNA, 25 bp, Homo sapien
cgctgaagaggagtgatcagtttca

SEQ ID NO: 4454344 - DNA, 25 bp, Homo sapien
tcttcatccccggtggtatttgaag

SEQ ID NO: 4454345 - DNA, 25 bp, Homo sapien
tatttgaagggagttctctatacat

SEQ ID NO: 4454346 - DNA, 25 bp, Homo sapien
aggtctcacattggtgtgtgagagt

SEQ ID NO: 4454347 - DNA, 25 bp, Homo sapien
tgggaagtgaaagcgtcctaaaggc

SEQ ID NO: 4454348 - DNA, 25 bp, Homo sapien
caggtctcacattggtgtgtgagag

SEQ ID NO: 4454349 - DNA, 25 bp, Homo sapien
gtgaaagcgtcctaaaggcctcatg

SEQ ID NO: 4454350 - DNA, 25 bp, Homo sapien
tggcagcgtcgtgagtcaagtcacc

SEQ ID NO: 4454351 - DNA, 25 bp, Homo sapien
cgggcaagccgtgggctggtggcag

SEQ ID NO: 4454352 - DNA, 25 bp, Homo sapien
tcgtgagtcaagtcaccctttggcc

SEQ ID NO: 4454353 - DNA, 25 bp, Homo sapien
cctggcagcctttatacgcctcggg

SEQ ID NO: 4454354 - DNA, 25 bp, Homo sapien
tgtcatggctctcggcgcggatatg

SEQ ID NO: 4454355 - DNA, 25 bp, Homo sapien
gcaccatggagtaggtcatcatcat

SEQ ID NO: 4454356 - DNA, 25 bp, Homo sapien
cccgcagcgttgagcgccgagagca

SEQ ID NO: 4454357 - DNA, 25 bp, Homo sapien
cgcgcggctcaactcggccaggaag

SEQ ID NO: 4454358 - DNA, 25 bp, Homo sapien
gccggggcgccacggggaacagaga

SEQ ID NO: 4454359 - DNA, 25 bp, Homo sapien
tggccggggcgccacggggaacaga

SEQ ID NO: 4454360 - DNA, 25 bp, Homo sapien
ctggccggggcgccacggggaacag

SEQ ID NO: 4454361 - DNA, 25 bp, Homo sapien
gcgccacggggaacagagaccccgc

SEQ ID NO: 4454362 - DNA, 25 bp, Homo sapien
tcaatttgttagtgacggaataggt

SEQ ID NO: 4454363 - DNA, 25 bp, Homo sapien
agttagtggtagcactgcgaggtca

SEQ ID NO: 4454364 - DNA, 25 bp, Homo sapien
gcaattcggatacgaaagcttctac

SEQ ID NO: 4454365 - DNA, 25 bp, Homo sapien
gcgaggtcacctagagttaatttga

SEQ ID NO: 4454366 - DNA, 25 bp, Homo sapien
tatacacattgtgagaataaaacta

SEQ ID NO: 4454367 - DNA, 25 bp, Homo sapien
gctatgccgaagttttgctgctgtt

SEQ ID NO: 4454368 - DNA, 25 bp, Homo sapien
tgctgctgtttcatgtgcttttaaa

SEQ ID NO: 4454369 - DNA, 25 bp, Homo sapien
tttagagcttgttatacacattgtg

SEQ ID NO: 4454370 - DNA, 25 bp, Homo sapien
caggaggctccggttcttgtacagt

SEQ ID NO: 4454371 - DNA, 25 bp, Homo sapien
gaagcaggaggctccggttcttgta

SEQ ID NO: 4454372 - DNA, 25 bp, Homo sapien
ggaggctccggttcttgtacagtca

SEQ ID NO: 4454373 - DNA, 25 bp, Homo sapien
gtacagtcaccatcagcgggagcct

SEQ ID NO: 4454374 - DNA, 25 bp, Homo sapien
gagctactaagaatcaaccctaggc

SEQ ID NO: 4454375 - DNA, 25 bp, Homo sapien
acccctgatttagtagcccgagcta

SEQ ID NO: 4454376 - DNA, 25 bp, Homo sapien
tagtagcccgagctactaagaatca

SEQ ID NO: 4454377 - DNA, 25 bp, Homo sapien
taagaatcaaccctaggccgggtgc

SEQ ID NO: 4454378 - DNA, 25 bp, Homo sapien
caatatcctggagaacacaagaccc

SEQ ID NO: 4454379 - DNA, 25 bp, Homo sapien
gcagaggcataactacccaacaggt

SEQ ID NO: 4454380 - DNA, 25 bp, Homo sapien
taacaatagctgagccagtcggaga

SEQ ID NO: 4454381 - DNA, 25 bp, Homo sapien
tcaggaatgccaccaacaggaatca

SEQ ID NO: 4454382 - DNA, 25 bp, Homo sapien
tgcattgcaccaacagatctgtcct

SEQ ID NO: 4454383 - DNA, 25 bp, Homo sapien
tgcctgtacttggaatgattcaccc

SEQ ID NO: 4454384 - DNA, 25 bp, Homo sapien
gcaaaggttctacgatggctcccaa

SEQ ID NO: 4454385 - DNA, 25 bp, Homo sapien
aaactctccagtacaggaaggcctg

SEQ ID NO: 4454386 - DNA, 25 bp, Homo sapien
ttcaggatccaaccccaggtcaagg

SEQ ID NO: 4454387 - DNA, 25 bp, Homo sapien
cagcaagatcctggacaggttccca

SEQ ID NO: 4454388 - DNA, 25 bp, Homo sapien
tcagggctttggagaaaaactccat

SEQ ID NO: 4454389 - DNA, 25 bp, Homo sapien
ccgcagatggcctaggaggttcttc

SEQ ID NO: 4454390 - DNA, 25 bp, Homo sapien
ctcttgcacgcaagggctacggcag

SEQ ID NO: 4454391 - DNA, 25 bp, Homo sapien
cagccctcttgcacgcaagggctac

SEQ ID NO: 4454392 - DNA, 25 bp, Homo sapien
ccctcttgcacgcaagggctacggc

SEQ ID NO: 4454393 - DNA, 25 bp, Homo sapien
tggccagccctcttgcacgcaaggg

SEQ ID NO: 4454394 - DNA, 25 bp, Homo sapien
tggaggccacagtttagtacccaag

SEQ ID NO: 4454395 - DNA, 25 bp, Homo sapien
gattcaatgaaattaaaccaacgga

SEQ ID NO: 4454396 - DNA, 25 bp, Homo sapien
caaaacttagctcttactgattccc

SEQ ID NO: 4454397 - DNA, 25 bp, Homo sapien
aaccaacggatataggcaaatcagc

SEQ ID NO: 4454398 - DNA, 25 bp, Homo sapien
tctccaagcacaggttacagtttgc

SEQ ID NO: 4454399 - DNA, 25 bp, Homo sapien
cttgtcactggagggttagatcgca

SEQ ID NO: 4454400 - DNA, 25 bp, Homo sapien
tgaagctgaggtcagacaccctgga

SEQ ID NO: 4454401 - DNA, 25 bp, Homo sapien
gataattcaccttaccattggctga

SEQ ID NO: 4454402 - DNA, 25 bp, Homo sapien
tcaacaacgaatcatacacaatggt

SEQ ID NO: 4454403 - DNA, 25 bp, Homo sapien
tgcagtcaacaacgaatcatacaca

SEQ ID NO: 4454404 - DNA, 25 bp, Homo sapien
gctgcagtcaacaacgaatcataca

SEQ ID NO: 4454405 - DNA, 25 bp, Homo sapien
agtcaacaacgaatcatacacaatg

SEQ ID NO: 4454406 - DNA, 25 bp, Homo sapien
ttcagacgagcagaaagcaatcata

SEQ ID NO: 4454407 - DNA, 25 bp, Homo sapien
ccgcggaagttcaaggaaaacgcag

SEQ ID NO: 4454408 - DNA, 25 bp, Homo sapien
gcggaagttcaaggaaaacgcagtg

SEQ ID NO: 4454409 - DNA, 25 bp, Homo sapien
atcctttattcagacgagcagaaag

SEQ ID NO: 4454410 - DNA, 25 bp, Homo sapien
gatgcccttggtgctgttgcacagg

SEQ ID NO: 4454411 - DNA, 25 bp, Homo sapien
atgcccttggtgctgttgcacaggt

SEQ ID NO: 4454412 - DNA, 25 bp, Homo sapien
ggtctatcccaaaggatcctctcac

SEQ ID NO: 4454413 - DNA, 25 bp, Homo sapien
aatccaggcctcgtggtctatccca

SEQ ID NO: 4454414 - DNA, 25 bp, Homo sapien
aggatcctctcactttgcaacttgt

SEQ ID NO: 4454415 - DNA, 25 bp, Homo sapien
ggcctcgtggtctatcccaaaggat

SEQ ID NO: 4454416 - DNA, 25 bp, Homo sapien
ctaggtgcaacaagacgagagagac

SEQ ID NO: 4454417 - DNA, 25 bp, Homo sapien
aaaccctaggggatctttgtagctg

SEQ ID NO: 4454418 - DNA, 25 bp, Homo sapien
ggaggatgggcattgcagaaaaaaa

SEQ ID NO: 4454419 - DNA, 25 bp, Homo sapien
tctttgtagctgtcaactcagtgac

SEQ ID NO: 4454420 - DNA, 25 bp, Homo sapien
ctgtgaaagcagtgtgggtttgata

SEQ ID NO: 4454421 - DNA, 25 bp, Homo sapien
ctctttgtcgttggtagatggatag

SEQ ID NO: 4454422 - DNA, 25 bp, Homo sapien
aaagcagtgtgggtttgatagcctc

SEQ ID NO: 4454423 - DNA, 25 bp, Homo sapien
ggtttgatagcctctttgtcgttgg

SEQ ID NO: 4454424 - DNA, 25 bp, Homo sapien
agttagaggactggccaagtgtgta

SEQ ID NO: 4454425 - DNA, 25 bp, Homo sapien
ggctgaagaaggacctgggtatggt

SEQ ID NO: 4454426 - DNA, 25 bp, Homo sapien
gacctgggtatggtgggtggcagaa

SEQ ID NO: 4454427 - DNA, 25 bp, Homo sapien
gtgggaggaagttagaggactggcc

SEQ ID NO: 4454428 - DNA, 25 bp, Homo sapien
ttcacagtctacgtgggaaagatgg

SEQ ID NO: 4454429 - DNA, 25 bp, Homo sapien
tcctggagccacgacattgaagaaa

SEQ ID NO: 4454430 - DNA, 25 bp, Homo sapien
taaatctaagcctgtgaccattcac

SEQ ID NO: 4454431 - DNA, 25 bp, Homo sapien
ccataatgcagtatgagagagctac

SEQ ID NO: 4454432 - DNA, 25 bp, Homo sapien
actgagcaggcatcaattccttttc

SEQ ID NO: 4454433 - DNA, 25 bp, Homo sapien
aactgagcaggcatcaattcctttt

SEQ ID NO: 4454434 - DNA, 25 bp, Homo sapien
aaactgagcaggcatcaattccttt

SEQ ID NO: 4454435 - DNA, 25 bp, Homo sapien
catccaatccgttgtgtcctggcaa

SEQ ID NO: 4454436 - DNA, 25 bp, Homo sapien
tgtgtcctggcaacccgccggctcc

SEQ ID NO: 4454437 - DNA, 25 bp, Homo sapien
ggctgtccatccaatccgttgtgtc

SEQ ID NO: 4454438 - DNA, 25 bp, Homo sapien
tgtccatccaatccgttgtgtcctg

SEQ ID NO: 4454439 - DNA, 25 bp, Homo sapien
gagatgaaacaccttacccctgctg

SEQ ID NO: 4454440 - DNA, 25 bp, Homo sapien
gagctgagcctcgaaagagcatgca

SEQ ID NO: 4454441 - DNA, 25 bp, Homo sapien
caaacacagattcgctgggcaggag

SEQ ID NO: 4454442 - DNA, 25 bp, Homo sapien
tctagccaagaaatgccttaccagg

SEQ ID NO: 4454443 - DNA, 25 bp, Homo sapien
tggcctgctcataacagggcaaagg

SEQ ID NO: 4454444 - DNA, 25 bp, Homo sapien
tgggcacatctcgtgccttggtgct

SEQ ID NO: 4454445 - DNA, 25 bp, Homo sapien
tatcttcatagttatcctgtagccc

SEQ ID NO: 4454446 - DNA, 25 bp, Homo sapien
ccttttctccagtggtgatggcctg

SEQ ID NO: 4454447 - DNA, 25 bp, Homo sapien
ccaagtgagtttgggtagcagagcc

SEQ ID NO: 4454448 - DNA, 25 bp, Homo sapien
tggagtctccggctgaaaacaacct

SEQ ID NO: 4454449 - DNA, 25 bp, Homo sapien
tgagagccaggccttcgtaggagcc

SEQ ID NO: 4454450 - DNA, 25 bp, Homo sapien
tctaccatttcttctcgtccagggc

SEQ ID NO: 4454451 - DNA, 25 bp, Homo sapien
aatggtaattactggccttctgagg

SEQ ID NO: 4454452 - DNA, 25 bp, Homo sapien
ccttctgaggattgagctggcttgg

SEQ ID NO: 4454453 - DNA, 25 bp, Homo sapien
gcttggacggtgtgtgcccgttttc

SEQ ID NO: 4454454 - DNA, 25 bp, Homo sapien
tatatgaacgatccattgctgctgt

SEQ ID NO: 4454455 - DNA, 25 bp, Homo sapien
tcttcccaggataagccaataggca

SEQ ID NO: 4454456 - DNA, 25 bp, Homo sapien
cagcgatgctcatgtataattataa

SEQ ID NO: 4454457 - DNA, 25 bp, Homo sapien
gaatcacatttttggagtcttccca

SEQ ID NO: 4454458 - DNA, 25 bp, Homo sapien
caataggcatcattattctacagcg

SEQ ID NO: 4454459 - DNA, 25 bp, Homo sapien
ctgccacacaaatatgtgctccata

SEQ ID NO: 4454460 - DNA, 25 bp, Homo sapien
agctaggatgtaagcctcgtgaagg

SEQ ID NO: 4454461 - DNA, 25 bp, Homo sapien
gcatctagaatggtacctgccacac

SEQ ID NO: 4454462 - DNA, 25 bp, Homo sapien
gttgcaggctgcatgcgaagcacat

SEQ ID NO: 4454463 - DNA, 25 bp, Homo sapien
caatagcaaataatcaccgtgggtc

SEQ ID NO: 4454464 - DNA, 25 bp, Homo sapien
ggaggtcacaccattagcgcaatag

SEQ ID NO: 4454465 - DNA, 25 bp, Homo sapien
gcacaacagcgaataatcaccaggg

SEQ ID NO: 4454466 - DNA, 25 bp, Homo sapien
gattgattccacttgggaggtcaca

SEQ ID NO: 4454467 - DNA, 25 bp, Homo sapien
ccctctttgtgagaagacgttcttt

SEQ ID NO: 4454468 - DNA, 25 bp, Homo sapien
ccggccctctttgtgagaagacgtt

SEQ ID NO: 4454469 - DNA, 25 bp, Homo sapien
gtgagaagacgttcttttgtcagtg

SEQ ID NO: 4454470 - DNA, 25 bp, Homo sapien
ctttgtgagaagacgttcttttgtc

SEQ ID NO: 4454471 - DNA, 25 bp, Homo sapien
ggggcccctccactgtcagcactgg

SEQ ID NO: 4454472 - DNA, 25 bp, Homo sapien
gtagaagaggatgtgaagaggagca

SEQ ID NO: 4454473 - DNA, 25 bp, Homo sapien
cacagtagaagaggatgtgaagagg

SEQ ID NO: 4454474 - DNA, 25 bp, Homo sapien
agcacagtagaagaggatgtgaaga

SEQ ID NO: 4454475 - DNA, 25 bp, Homo sapien
gtaagcttgggtggcggctgcccgt

SEQ ID NO: 4454476 - DNA, 25 bp, Homo sapien
ccagtggtaagcttgggtggcggct

SEQ ID NO: 4454477 - DNA, 25 bp, Homo sapien
cactaccagtggtaagcttgggtgg

SEQ ID NO: 4454478 - DNA, 25 bp, Homo sapien
tggtaagcttgggtggcggctgccc

SEQ ID NO: 4454479 - DNA, 25 bp, Homo sapien
tgccaggagcacgtcgttggacaca

SEQ ID NO: 4454480 - DNA, 25 bp, Homo sapien
ggcccagttcaccatggtctccctt

SEQ ID NO: 4454481 - DNA, 25 bp, Homo sapien
gcacgtcgttggacacatctccttt

SEQ ID NO: 4454482 - DNA, 25 bp, Homo sapien
ccaggagcacgtcgttggacacatc

SEQ ID NO: 4454483 - DNA, 25 bp, Homo sapien
tgggcactggccgttgaacatgctt

SEQ ID NO: 4454484 - DNA, 25 bp, Homo sapien
cactggccgttgaacatgcttggct

SEQ ID NO: 4454485 - DNA, 25 bp, Homo sapien
tggccgttgaacatgcttggctgcc

SEQ ID NO: 4454486 - DNA, 25 bp, Homo sapien
gccgttgaacatgcttggctgccga

SEQ ID NO: 4454487 - DNA, 25 bp, Homo sapien
ggtatcatcatttggtatggcacaa

SEQ ID NO: 4454488 - DNA, 25 bp, Homo sapien
cagcttttccaaccaaggtatcatc

SEQ ID NO: 4454489 - DNA, 25 bp, Homo sapien
gcttttccaaccaaggtatcatcat

SEQ ID NO: 4454490 - DNA, 25 bp, Homo sapien
atcatttggtatggcacaagtctca

SEQ ID NO: 4454491 - DNA, 25 bp, Homo sapien
caagtcccaaatgtctctgtcactt

SEQ ID NO: 4454492 - DNA, 25 bp, Homo sapien
acccaaatccggtcatcactcttgt

SEQ ID NO: 4454493 - DNA, 25 bp, Homo sapien
cactcttgttagcagactctcttat

SEQ ID NO: 4454494 - DNA, 25 bp, Homo sapien
gactctcttatccaagtcccaaatg

SEQ ID NO: 4454495 - DNA, 25 bp, Homo sapien
tggatgaacgtgtaactgccattca

SEQ ID NO: 4454496 - DNA, 25 bp, Homo sapien
gttgtaaacaacgtgcccacagcca

SEQ ID NO: 4454497 - DNA, 25 bp, Homo sapien
aaatagtatggaaggtggatgaacg

SEQ ID NO: 4454498 - DNA, 25 bp, Homo sapien
tccttgaattccttaaccatgatgc

SEQ ID NO: 4454499 - DNA, 25 bp, Homo sapien
attcagtcgacaaaccctgattgac

SEQ ID NO: 4454500 - DNA, 25 bp, Homo sapien
gagaaggtgctgtggtgcgacttac

SEQ ID NO: 4454501 - DNA, 25 bp, Homo sapien
tgtgtcagccctagggacacaaaga

SEQ ID NO: 4454502 - DNA, 25 bp, Homo sapien
gccatggggctcactaacatatcct

SEQ ID NO: 4454503 - DNA, 25 bp, Homo sapien
cagagtttgggatgtttcctggcca

SEQ ID NO: 4454504 - DNA, 25 bp, Homo sapien
tattgacgtgttgcaccactgagaa

SEQ ID NO: 4454505 - DNA, 25 bp, Homo sapien
tgctacaagaatgctcgagccgtcc

SEQ ID NO: 4454506 - DNA, 25 bp, Homo sapien
gattcctcgggcaatgaaggcgttg

SEQ ID NO: 4454507 - DNA, 25 bp, Homo sapien
cactgatttaaggtagttgacaaaa

SEQ ID NO: 4454508 - DNA, 25 bp, Homo sapien
tttgctgaagggagccgaatgcagc

SEQ ID NO: 4454509 - DNA, 25 bp, Homo sapien
gggctcactgaccatataaacactt

SEQ ID NO: 4454510 - DNA, 25 bp, Homo sapien
taaatatctggctgacgttaaaaaa

SEQ ID NO: 4454511 - DNA, 25 bp, Homo sapien
agccatttcaacttccaatctgttg

SEQ ID NO: 4454512 - DNA, 25 bp, Homo sapien
aaggagaaagaggtaacttgcagag

SEQ ID NO: 4454513 - DNA, 25 bp, Homo sapien
ttagccaattcagattaccaatggg

SEQ ID NO: 4454514 - DNA, 25 bp, Homo sapien
tcatcttagccaattcagattacca

SEQ ID NO: 4454515 - DNA, 25 bp, Homo sapien
aaagaggtaacttgcagagccagct

SEQ ID NO: 4454516 - DNA, 25 bp, Homo sapien
aaagtcccggtgtaagcttctccag

SEQ ID NO: 4454517 - DNA, 25 bp, Homo sapien
cacctacttggcttcaggaggacac

SEQ ID NO: 4454518 - DNA, 25 bp, Homo sapien
tctggatgaaaacgcaaagccctat

SEQ ID NO: 4454519 - DNA, 25 bp, Homo sapien
tgcttaacgatacttggagaccaga

SEQ ID NO: 4454520 - DNA, 25 bp, Homo sapien
agtcctcagtgacctacaaagagac

SEQ ID NO: 4454521 - DNA, 25 bp, Homo sapien
aagtcctcagtgacctacaaagaga

SEQ ID NO: 4454522 - DNA, 25 bp, Homo sapien
aagcaagtcctcagtgacctacaaa

SEQ ID NO: 4454523 - DNA, 25 bp, Homo sapien
cataaagcaagtcctcagtgaccta

SEQ ID NO: 4454524 - DNA, 25 bp, Homo sapien
taggtagtactctcaaggattttgc

SEQ ID NO: 4454525 - DNA, 25 bp, Homo sapien
aatacactagatgggattcacagca

SEQ ID NO: 4454526 - DNA, 25 bp, Homo sapien
cactatcatggtcctgcctaagaaa

SEQ ID NO: 4454527 - DNA, 25 bp, Homo sapien
tgaatatgaaggcacaatagaaact

SEQ ID NO: 4454528 - DNA, 25 bp, Homo sapien
gaatttgaatatgacccaagctgag

SEQ ID NO: 4454529 - DNA, 25 bp, Homo sapien
ccactgactgaagcatgcctgcagt

SEQ ID NO: 4454530 - DNA, 25 bp, Homo sapien
ttgttaggagcgctagaccacctgg

SEQ ID NO: 4454531 - DNA, 25 bp, Homo sapien
tacagtcatcactaggcaattctgc

SEQ ID NO: 4454532 - DNA, 25 bp, Homo sapien
tacctcttcaagtctagttgccaca

SEQ ID NO: 4454533 - DNA, 25 bp, Homo sapien
cagtaaagccacaagtgactttgca

SEQ ID NO: 4454534 - DNA, 25 bp, Homo sapien
caataggtaggttgacagaaaagca

SEQ ID NO: 4454535 - DNA, 25 bp, Homo sapien
tctggacactccaatgacaataggt

SEQ ID NO: 4454536 - DNA, 25 bp, Homo sapien
ggcactggacagactagcactggag

SEQ ID NO: 4454537 - DNA, 25 bp, Homo sapien
tgagctatctgtacttgaagagaac

SEQ ID NO: 4454538 - DNA, 25 bp, Homo sapien
aacattggcgattaggacttgtacc

SEQ ID NO: 4454539 - DNA, 25 bp, Homo sapien
gtgcagcaataaagttgtccccaaa

SEQ ID NO: 4454540 - DNA, 25 bp, Homo sapien
catgcttgaggatggtgccatgata

SEQ ID NO: 4454541 - DNA, 25 bp, Homo sapien
tctccagactcttagaaattgttca

SEQ ID NO: 4454542 - DNA, 25 bp, Homo sapien
aattgttcatgcttgaggatggtgc

SEQ ID NO: 4454543 - DNA, 25 bp, Homo sapien
ggatggtgccatgatagtttctctc

SEQ ID NO: 4454544 - DNA, 25 bp, Homo sapien
catccataaggaatctgatatgatc

SEQ ID NO: 4454545 - DNA, 25 bp, Homo sapien
gctatccaggtggaaaggcgaaagt

SEQ ID NO: 4454546 - DNA, 25 bp, Homo sapien
tggaaaggcgaaagtcatccataag

SEQ ID NO: 4454547 - DNA, 25 bp, Homo sapien
taaggaatctgatatgatcatggca

SEQ ID NO: 4454548 - DNA, 25 bp, Homo sapien
catctgcttatacaaatgggcttta

SEQ ID NO: 4454549 - DNA, 25 bp, Homo sapien
tgtaatagtcacattaattttgctc

SEQ ID NO: 4454550 - DNA, 25 bp, Homo sapien
tagggcaggaatttatgtagcatct

SEQ ID NO: 4454551 - DNA, 25 bp, Homo sapien
ttaaatcaacccctatagggcagga

SEQ ID NO: 4454552 - DNA, 25 bp, Homo sapien
tcactgagttagctgtgccacacat

SEQ ID NO: 4454553 - DNA, 25 bp, Homo sapien
tgaatggcccttcgtgatgaaagga

SEQ ID NO: 4454554 - DNA, 25 bp, Homo sapien
tggaggcatgggcagaaaatttgaa

SEQ ID NO: 4454555 - DNA, 25 bp, Homo sapien
aaatagattcttcagcagtttggcc

SEQ ID NO: 4454556 - DNA, 25 bp, Homo sapien
taccccattcaagtaagaaagctct

SEQ ID NO: 4454557 - DNA, 25 bp, Homo sapien
gctagaacctgaaaataccccattc

SEQ ID NO: 4454558 - DNA, 25 bp, Homo sapien
gctggaccagctattcttcgaaata

SEQ ID NO: 4454559 - DNA, 25 bp, Homo sapien
aatggatcagtttgaaggtccaccc

SEQ ID NO: 4454560 - DNA, 25 bp, Homo sapien
gctgcgttgtggattcatttgagtc

SEQ ID NO: 4454561 - DNA, 25 bp, Homo sapien
cctcaggcctgatgatgttggggat

SEQ ID NO: 4454562 - DNA, 25 bp, Homo sapien
ggcaggctgcgttgtggattcattt

SEQ ID NO: 4454563 - DNA, 25 bp, Homo sapien
tggattcatttgagtcttgatgcat

SEQ ID NO: 4454564 - DNA, 25 bp, Homo sapien
acgccagatccagtcagttttatac

SEQ ID NO: 4454565 - DNA, 25 bp, Homo sapien
gatggggcacttttctctagaaagg

SEQ ID NO: 4454566 - DNA, 25 bp, Homo sapien
aagtgtcaacgccagatccagtcag

SEQ ID NO: 4454567 - DNA, 25 bp, Homo sapien
atactgttgatcacgtggtctgcca

SEQ ID NO: 4454568 - DNA, 25 bp, Homo sapien
tagcagatagtttggaaaatcaggc

SEQ ID NO: 4454569 - DNA, 25 bp, Homo sapien
gcagatagtttggaaaatcaggcga

SEQ ID NO: 4454570 - DNA, 25 bp, Homo sapien
ttagcagatagtttggaaaatcagg

SEQ ID NO: 4454571 - DNA, 25 bp, Homo sapien
agatagtttggaaaatcaggcgatt

SEQ ID NO: 4454572 - DNA, 25 bp, Homo sapien
taataggccacatagcaaaggctga

SEQ ID NO: 4454573 - DNA, 25 bp, Homo sapien
gatgggctgaatttcaaagactcgg

SEQ ID NO: 4454574 - DNA, 25 bp, Homo sapien
ctattcctgtagtagctgctagcca

SEQ ID NO: 4454575 - DNA, 25 bp, Homo sapien
cacctggccaggaaagtcattttaa

SEQ ID NO: 4454576 - DNA, 25 bp, Homo sapien
tagaagtgttggtcaagatcatctg

SEQ ID NO: 4454577 - DNA, 25 bp, Homo sapien
tctctgggttgtgcagaggtgacag

SEQ ID NO: 4454578 - DNA, 25 bp, Homo sapien
ggtgcaccagagtcatccttcatgg

SEQ ID NO: 4454579 - DNA, 25 bp, Homo sapien
gatcatctggatttctaaggaggag

SEQ ID NO: 4454580 - DNA, 25 bp, Homo sapien
ccagtctgaataatgaccaaagaga

SEQ ID NO: 4454581 - DNA, 25 bp, Homo sapien
ttttcctctggactgcggcatgctg

SEQ ID NO: 4454582 - DNA, 25 bp, Homo sapien
ggattcagcacaatcaggcctttga

SEQ ID NO: 4454583 - DNA, 25 bp, Homo sapien
caaagagaaggattcagcacaatca

SEQ ID NO: 4454584 - DNA, 25 bp, Homo sapien
ggatggcgtcggtgactccaacgct

SEQ ID NO: 4454585 - DNA, 25 bp, Homo sapien
tgaggaaggaagcgcatgctccatg

SEQ ID NO: 4454586 - DNA, 25 bp, Homo sapien
tcggtgactccaacgctactccaat

SEQ ID NO: 4454587 - DNA, 25 bp, Homo sapien
atgctccatgcacgccagaggcggg

SEQ ID NO: 4454588 - DNA, 25 bp, Homo sapien
gcgccagggcgtagctttactctcg

SEQ ID NO: 4454589 - DNA, 25 bp, Homo sapien
cgcgcgggagtcaagtctccaggta

SEQ ID NO: 4454590 - DNA, 25 bp, Homo sapien
gaggagtaaaaacaggaagagccag

SEQ ID NO: 4454591 - DNA, 25 bp, Homo sapien
gacactcgacggtcaagggataagc

SEQ ID NO: 4454592 - DNA, 25 bp, Homo sapien
ggagcactaacaccagaatccaagt

SEQ ID NO: 4454593 - DNA, 25 bp, Homo sapien
tcctccaggtttggggaaagcttga

SEQ ID NO: 4454594 - DNA, 25 bp, Homo sapien
cagaatccaagtgccggtcccgagg

SEQ ID NO: 4454595 - DNA, 25 bp, Homo sapien
gggaaagcttgaatcgggagcacta

SEQ ID NO: 4454596 - DNA, 25 bp, Homo sapien
ggtctttctgcacttaattctctat

SEQ ID NO: 4454597 - DNA, 25 bp, Homo sapien
tcaaaggtctttctgcacttaattc

SEQ ID NO: 4454598 - DNA, 25 bp, Homo sapien
aaaggtctttctgcacttaattctc

SEQ ID NO: 4454599 - DNA, 25 bp, Homo sapien
gcacttaattctctattatgtagag

SEQ ID NO: 4454600 - DNA, 25 bp, Homo sapien
tttttaatcttgtcttcttctgctt

SEQ ID NO: 4454601 - DNA, 25 bp, Homo sapien
tttttttaatcttgtcttcttctgc

SEQ ID NO: 4454602 - DNA, 25 bp, Homo sapien
ctggaggatatgtttttttaatctt

SEQ ID NO: 4454603 - DNA, 25 bp, Homo sapien
gatatgtttttttaatcttgtcttc

SEQ ID NO: 4454604 - DNA, 25 bp, Homo sapien
aaaagaatagttgctctgacctggc

SEQ ID NO: 4454605 - DNA, 25 bp, Homo sapien
tagtagagtcataatcatcgatcag

SEQ ID NO: 4454606 - DNA, 25 bp, Homo sapien
cgatcagttttcgattcttggttga

SEQ ID NO: 4454607 - DNA, 25 bp, Homo sapien
atgatccaatccactcttagtagag

SEQ ID NO: 4454608 - DNA, 25 bp, Homo sapien
tgtcttcagcggttaaaggagtccc

SEQ ID NO: 4454609 - DNA, 25 bp, Homo sapien
aaggagtcccgtctagttgatgaag

SEQ ID NO: 4454610 - DNA, 25 bp, Homo sapien
aatcttgtcaaacacggctctgtca

SEQ ID NO: 4454611 - DNA, 25 bp, Homo sapien
cctggcagcgattttatggacaatg

SEQ ID NO: 4454612 - DNA, 25 bp, Homo sapien
cataattgttggcttcctttgagat

SEQ ID NO: 4454613 - DNA, 25 bp, Homo sapien
tcctcctcataattgttggcttcct

SEQ ID NO: 4454614 - DNA, 25 bp, Homo sapien
tgggatcctcctcataattgttggc

SEQ ID NO: 4454615 - DNA, 25 bp, Homo sapien
cctcataattgttggcttcctttga

SEQ ID NO: 4454616 - DNA, 25 bp, Homo sapien
tcagtagcgcatagaaatttgggaa

SEQ ID NO: 4454617 - DNA, 25 bp, Homo sapien
aatattggagttcctcaaagttgtc

SEQ ID NO: 4454618 - DNA, 25 bp, Homo sapien
tcaatacttttcagtagcgcataga

SEQ ID NO: 4454619 - DNA, 25 bp, Homo sapien
ccatttgtcaaggttaatgtgttag

SEQ ID NO: 4454620 - DNA, 25 bp, Homo sapien
cttcttctggagatattgttccata

SEQ ID NO: 4454621 - DNA, 25 bp, Homo sapien
tattgttccatatttcaccatcatc

SEQ ID NO: 4454622 - DNA, 25 bp, Homo sapien
tcatgatagtaatcagtgtttcttt

SEQ ID NO: 4454623 - DNA, 25 bp, Homo sapien
tttcatgatagtaatcagtgtttct

SEQ ID NO: 4454624 - DNA, 25 bp, Homo sapien
tgggaaaagcttgcttatattgtca

SEQ ID NO: 4454625 - DNA, 25 bp, Homo sapien
ctgggaaaagcttgcttatattgtc

SEQ ID NO: 4454626 - DNA, 25 bp, Homo sapien
ttttggtctgaagagcaatcatttc

SEQ ID NO: 4454627 - DNA, 25 bp, Homo sapien
gcttgtttttggtctgaagagcaat

SEQ ID NO: 4454628 - DNA, 25 bp, Homo sapien
gaatccttcaagcttccatattcct

SEQ ID NO: 4454629 - DNA, 25 bp, Homo sapien
ctcctgggttggagttatcatcttt

SEQ ID NO: 4454630 - DNA, 25 bp, Homo sapien
gagttatcatcttttgtggaatcct

SEQ ID NO: 4454631 - DNA, 25 bp, Homo sapien
tcatcttttgtggaatccttcaagc

SEQ ID NO: 4454632 - DNA, 25 bp, Homo sapien
tctgatggcttccaaataggcttct

SEQ ID NO: 4454633 - DNA, 25 bp, Homo sapien
gtctctcatctttgaaaggtcataa

SEQ ID NO: 4454634 - DNA, 25 bp, Homo sapien
ggctgctataaatgcgcttgatggc

SEQ ID NO: 4454635 - DNA, 25 bp, Homo sapien
caggctgctataaatgcgcttgatg

SEQ ID NO: 4454636 - DNA, 25 bp, Homo sapien
tgatgaagtctctcatctttgaaag

SEQ ID NO: 4454637 - DNA, 25 bp, Homo sapien
gttgaaagactcctggatcttttgc

SEQ ID NO: 4454638 - DNA, 25 bp, Homo sapien
gaagtgttttaagctatattatgtt

SEQ ID NO: 4454639 - DNA, 25 bp, Homo sapien
gaaacagttgaaagactcctggatc

SEQ ID NO: 4454640 - DNA, 25 bp, Homo sapien
tttctgaaacagttgaaagactcct

SEQ ID NO: 4454641 - DNA, 25 bp, Homo sapien
ctcccctaagggaactgctggtgga

SEQ ID NO: 4454642 - DNA, 25 bp, Homo sapien
taatagacacgctctgcaaggtgct

SEQ ID NO: 4454643 - DNA, 25 bp, Homo sapien
tgtcactgagcctaataaaaagcca

SEQ ID NO: 4454644 - DNA, 25 bp, Homo sapien
taacatttcaagaggaccttgcgcc

SEQ ID NO: 4454645 - DNA, 25 bp, Homo sapien
gcaaggtttattatgaagagcaaaa

SEQ ID NO: 4454646 - DNA, 25 bp, Homo sapien
tgatttcttcatcgcaaagtggaga

SEQ ID NO: 4454647 - DNA, 25 bp, Homo sapien
gcaggatgaacagggtccacttagt

SEQ ID NO: 4454648 - DNA, 25 bp, Homo sapien
tcagatgttgtacggacttcggagt

SEQ ID NO: 4454649 - DNA, 25 bp, Homo sapien
gagagtagtaagtaccatccactgc

SEQ ID NO: 4454650 - DNA, 25 bp, Homo sapien
catcgagcgccatgtggagcaccgg

SEQ ID NO: 4454651 - DNA, 25 bp, Homo sapien
accaagacccgctcgtacggcagca

SEQ ID NO: 4454652 - DNA, 25 bp, Homo sapien
gaggaggccgagctgtcgctgagcc

SEQ ID NO: 4454653 - DNA, 25 bp, Homo sapien
gcgccggcgtcatcgagcgccatgt

SEQ ID NO: 4454654 - DNA, 25 bp, Homo sapien
ctcgcccgcactgtccctgcgggaa

SEQ ID NO: 4454655 - DNA, 25 bp, Homo sapien
gcctcggcaggacccatggcggatt

SEQ ID NO: 4454656 - DNA, 25 bp, Homo sapien
ggcaggacccatggcggattcctcg

SEQ ID NO: 4454657 - DNA, 25 bp, Homo sapien
atggcggattcctcgcccgcactgt

SEQ ID NO: 4454658 - DNA, 25 bp, Homo sapien
ggcgggagctgctttcgctcttaac

SEQ ID NO: 4454659 - DNA, 25 bp, Homo sapien
ccagggctctatcgccaatggagca

SEQ ID NO: 4454660 - DNA, 25 bp, Homo sapien
gctctgcagggtcttcccggtaccg

SEQ ID NO: 4454661 - DNA, 25 bp, Homo sapien
ttaaccttgcaggtgcgtgtgccgc

SEQ ID NO: 4454662 - DNA, 25 bp, Homo sapien
tgtctgccaggttcttgagagctcc

SEQ ID NO: 4454663 - DNA, 25 bp, Homo sapien
catagcacttaggatctggcactta

SEQ ID NO: 4454664 - DNA, 25 bp, Homo sapien
tgaggattaagcgacccatagcact

SEQ ID NO: 4454665 - DNA, 25 bp, Homo sapien
taaagatagttggacctcgttgggc

SEQ ID NO: 4454666 - DNA, 25 bp, Homo sapien
tgggaagcgtagttcccggctgagc

SEQ ID NO: 4454667 - DNA, 25 bp, Homo sapien
agcgcggcgatcaacaggcggctcc

SEQ ID NO: 4454668 - DNA, 25 bp, Homo sapien
ggctgcagcggagcaggctgggaag

SEQ ID NO: 4454669 - DNA, 25 bp, Homo sapien
gctgtgctggccgtcagtccgtcag

SEQ ID NO: 4454670 - DNA, 25 bp, Homo sapien
ggctgaaacgccctgcgagtgacag

SEQ ID NO: 4454671 - DNA, 25 bp, Homo sapien
agatgcataccgctccaggagctca

SEQ ID NO: 4454672 - DNA, 25 bp, Homo sapien
gagtgacagctccagcgatctcagg

SEQ ID NO: 4454673 - DNA, 25 bp, Homo sapien
catcgcctgctgaacgaggcaggga

SEQ ID NO: 4454674 - DNA, 25 bp, Homo sapien
gaatgaactattattgcacctaaga

SEQ ID NO: 4454675 - DNA, 25 bp, Homo sapien
taaggattgtctggtctaggtaacc

SEQ ID NO: 4454676 - DNA, 25 bp, Homo sapien
tatcatctaacatgcaatccatatt

SEQ ID NO: 4454677 - DNA, 25 bp, Homo sapien
taacaccaattccataatatcatct

SEQ ID NO: 4454678 - DNA, 25 bp, Homo sapien
gtctgaaatatggtacggcaatggg

SEQ ID NO: 4454679 - DNA, 25 bp, Homo sapien
aaatatggtacggcaatgggaagga

SEQ ID NO: 4454680 - DNA, 25 bp, Homo sapien
atatggtacggcaatgggaaggaac

SEQ ID NO: 4454681 - DNA, 25 bp, Homo sapien
ctgaaatatggtacggcaatgggaa

SEQ ID NO: 4454682 - DNA, 25 bp, Homo sapien
gaatcatggccacctaaatacgtcc

SEQ ID NO: 4454683 - DNA, 25 bp, Homo sapien
ggcactagcaggaaactggagagca

SEQ ID NO: 4454684 - DNA, 25 bp, Homo sapien
caatgggttccctttctgtctggct

SEQ ID NO: 4454685 - DNA, 25 bp, Homo sapien
gcagcaatagggaatgaacacaccc

SEQ ID NO: 4454686 - DNA, 25 bp, Homo sapien
gcagagcaacctgacagcttacaaa

SEQ ID NO: 4454687 - DNA, 25 bp, Homo sapien
gcccgtgacgatattatcattccca

SEQ ID NO: 4454688 - DNA, 25 bp, Homo sapien
gaggaagcccgtgacgatattatca

SEQ ID NO: 4454689 - DNA, 25 bp, Homo sapien
catttgcagagcaacctgacagctt

SEQ ID NO: 4454690 - DNA, 25 bp, Homo sapien
ttcttataagcctttctcatgggcc

SEQ ID NO: 4454691 - DNA, 25 bp, Homo sapien
tcttataagcctttctcatgggcca

SEQ ID NO: 4454692 - DNA, 25 bp, Homo sapien
cttataagcctttctcatgggccat

SEQ ID NO: 4454693 - DNA, 25 bp, Homo sapien
tcaggatctaggtcatctagaacat

SEQ ID NO: 4454694 - DNA, 25 bp, Homo sapien
ctcaggatctaggtcatctagaaca

SEQ ID NO: 4454695 - DNA, 25 bp, Homo sapien
gctctttttgaaaggggagtgccat

SEQ ID NO: 4454696 - DNA, 25 bp, Homo sapien
ctccagctctttttgaaaggggagt

SEQ ID NO: 4454697 - DNA, 25 bp, Homo sapien
tgtttaaggaccaagccatgccatt

SEQ ID NO: 4454698 - DNA, 25 bp, Homo sapien
taaacacaggtgacccagaaccaat

SEQ ID NO: 4454699 - DNA, 25 bp, Homo sapien
tctgtgcccagagaaatatatgact

SEQ ID NO: 4454700 - DNA, 25 bp, Homo sapien
gaaaatgtgcattccgagctaaggg

SEQ ID NO: 4454701 - DNA, 25 bp, Homo sapien
ctccaggtacatgaggaggtgctcg

SEQ ID NO: 4454702 - DNA, 25 bp, Homo sapien
tggtctttctgtcgaaatccagctg

SEQ ID NO: 4454703 - DNA, 25 bp, Homo sapien
tctgtcgaaatccagctggcagcat

SEQ ID NO: 4454704 - DNA, 25 bp, Homo sapien
acatgaggaggtgctcgcggtcaaa

SEQ ID NO: 4454705 - DNA, 25 bp, Homo sapien
tcatagagttcggtgtcagaggcac

SEQ ID NO: 4454706 - DNA, 25 bp, Homo sapien
ctgcaagatcatagagttcggtgtc

SEQ ID NO: 4454707 - DNA, 25 bp, Homo sapien
ttcggtgtcagaggcactggccaaa

SEQ ID NO: 4454708 - DNA, 25 bp, Homo sapien
tcttctttacgagtttctataggct

SEQ ID NO: 4454709 - DNA, 25 bp, Homo sapien
ttgagcaaattgtgtactccaagga

SEQ ID NO: 4454710 - DNA, 25 bp, Homo sapien
actttggattgttgagcaaattgtg

SEQ ID NO: 4454711 - DNA, 25 bp, Homo sapien
tggctgtttcttcatcgaactttgg

SEQ ID NO: 4454712 - DNA, 25 bp, Homo sapien
ggctgtttcttcatcgaactttgga

SEQ ID NO: 4454713 - DNA, 25 bp, Homo sapien
aaccacagattgcacatcaacttac

SEQ ID NO: 4454714 - DNA, 25 bp, Homo sapien
caaaaccacagattgcacatcaact

SEQ ID NO: 4454715 - DNA, 25 bp, Homo sapien
ggctccaaagctttacaaaaccaca

SEQ ID NO: 4454716 - DNA, 25 bp, Homo sapien
gctccaaagctttacaaaaccacag

SEQ ID NO: 4454717 - DNA, 25 bp, Homo sapien
tcttctgactaaacagacctaccaa

SEQ ID NO: 4454718 - DNA, 25 bp, Homo sapien
cacactgatttgtactagtttcacc

SEQ ID NO: 4454719 - DNA, 25 bp, Homo sapien
tagtttcaccgccagatggagctct

SEQ ID NO: 4454720 - DNA, 25 bp, Homo sapien
acagacctaccaagaaagtgttctg

SEQ ID NO: 4454721 - DNA, 25 bp, Homo sapien
ccaagcagtcttatatcagcaattt

SEQ ID NO: 4454722 - DNA, 25 bp, Homo sapien
tgtgatgaccaagcagtcttatatc

SEQ ID NO: 4454723 - DNA, 25 bp, Homo sapien
gatgaccaagcagtcttatatcagc

SEQ ID NO: 4454724 - DNA, 25 bp, Homo sapien
gaccaagcagtcttatatcagcaat

SEQ ID NO: 4454725 - DNA, 25 bp, Homo sapien
agtctctcctatcaaaatcagtggt

SEQ ID NO: 4454726 - DNA, 25 bp, Homo sapien
gcaatgacagtaggtgtattctcag

SEQ ID NO: 4454727 - DNA, 25 bp, Homo sapien
aataacactttaatagcaatgacag

SEQ ID NO: 4454728 - DNA, 25 bp, Homo sapien
tctttcatatgctgattccaataac

SEQ ID NO: 4454729 - DNA, 25 bp, Homo sapien
ggtggttcctcaaatactggcttta

SEQ ID NO: 4454730 - DNA, 25 bp, Homo sapien
gcaggcttatttccacatttgtggg

SEQ ID NO: 4454731 - DNA, 25 bp, Homo sapien
aatgttgttgaggttgacttcttgc

SEQ ID NO: 4454732 - DNA, 25 bp, Homo sapien
ttcttgcaagctaggatcattggct

SEQ ID NO: 4454733 - DNA, 25 bp, Homo sapien
acagggtcattgctgcgagttgcgg

SEQ ID NO: 4454734 - DNA, 25 bp, Homo sapien
tcttcacgtgagtgttggtctccag

SEQ ID NO: 4454735 - DNA, 25 bp, Homo sapien
tcattgctgcgagttgcggccaggc

SEQ ID NO: 4454736 - DNA, 25 bp, Homo sapien
ccctcagggttggaattggaatgtt

SEQ ID NO: 4454737 - DNA, 25 bp, Homo sapien
taaatattcagttagttaaatgcca

SEQ ID NO: 4454738 - DNA, 25 bp, Homo sapien
actgtgtagaaggtaagttttccag

SEQ ID NO: 4454739 - DNA, 25 bp, Homo sapien
gcacagagcaaactctaaatattca

SEQ ID NO: 4454740 - DNA, 25 bp, Homo sapien
actataattttgctcactaactgtg

SEQ ID NO: 4454741 - DNA, 25 bp, Homo sapien
tctaactcgattcaagggctgagca

SEQ ID NO: 4454742 - DNA, 25 bp, Homo sapien
ggaccagaggtgtacgttaccacac

SEQ ID NO: 4454743 - DNA, 25 bp, Homo sapien
catagaacaacaggctgatgcccag

SEQ ID NO: 4454744 - DNA, 25 bp, Homo sapien
tttagcaaatgtatgacagccaggc

SEQ ID NO: 4454745 - DNA, 25 bp, Homo sapien
gatttctgtcaaggtgtcattttct

SEQ ID NO: 4454746 - DNA, 25 bp, Homo sapien
cttgtcaaggtcttgtttactttca

SEQ ID NO: 4454747 - DNA, 25 bp, Homo sapien
gattctatgtttagacttgtcaagg

SEQ ID NO: 4454748 - DNA, 25 bp, Homo sapien
cagtgataaaattggattctatgtt

SEQ ID NO: 4454749 - DNA, 25 bp, Homo sapien
tcatggctgatcactgagagttgct

SEQ ID NO: 4454750 - DNA, 25 bp, Homo sapien
ccagcagagcaactcggaaggcact

SEQ ID NO: 4454751 - DNA, 25 bp, Homo sapien
tatagtgtctggaaccccatcacag

SEQ ID NO: 4454752 - DNA, 25 bp, Homo sapien
gagcagggctctacatcatggctga

SEQ ID NO: 4454753 - DNA, 25 bp, Homo sapien
cccacaggggaacgaatgctcatac

SEQ ID NO: 4454754 - DNA, 25 bp, Homo sapien
tcccacaggggaacgaatgctcata

SEQ ID NO: 4454755 - DNA, 25 bp, Homo sapien
atcccacaggggaacgaatgctcat

SEQ ID NO: 4454756 - DNA, 25 bp, Homo sapien
tctctgtgtctaggaaagccgtttt

SEQ ID NO: 4454757 - DNA, 25 bp, Homo sapien
ggatacacagcatcgaacttcctga

SEQ ID NO: 4454758 - DNA, 25 bp, Homo sapien
caaacatcattagtccagggccaga

SEQ ID NO: 4454759 - DNA, 25 bp, Homo sapien
taaaagttcctctctcctagtgggc

SEQ ID NO: 4454760 - DNA, 25 bp, Homo sapien
tctctctggcttgtttccttactcc

SEQ ID NO: 4454761 - DNA, 25 bp, Homo sapien
tctctggcttgtttccttactcccc

SEQ ID NO: 4454762 - DNA, 25 bp, Homo sapien
tggcttgtttccttactcccccaca

SEQ ID NO: 4454763 - DNA, 25 bp, Homo sapien
tcatatttctctctggcttgtttcc

SEQ ID NO: 4454764 - DNA, 25 bp, Homo sapien
tctacagctgttcccaactgctgcc

SEQ ID NO: 4454765 - DNA, 25 bp, Homo sapien
ctctacagctgttcccaactgctgc

SEQ ID NO: 4454766 - DNA, 25 bp, Homo sapien
ctacagctgttcccaactgctgcct

SEQ ID NO: 4454767 - DNA, 25 bp, Homo sapien
ccacccttgttcgtggcccttgctt

SEQ ID NO: 4454768 - DNA, 25 bp, Homo sapien
acccttgttcgtggcccttgcttgg

SEQ ID NO: 4454769 - DNA, 25 bp, Homo sapien
ccttgcttggtaaactggtatccaa

SEQ ID NO: 4454770 - DNA, 25 bp, Homo sapien
tgccacccttgttcgtggcccttgc

SEQ ID NO: 4454771 - DNA, 25 bp, Homo sapien
tgttaacagcaaatattatggctga

SEQ ID NO: 4454772 - DNA, 25 bp, Homo sapien
taacagcaaatattatggctgaatt

SEQ ID NO: 4454773 - DNA, 25 bp, Homo sapien
acagcaaatattatggctgaattac

SEQ ID NO: 4454774 - DNA, 25 bp, Homo sapien
aattgttaacagcaaatattatggc

SEQ ID NO: 4454775 - DNA, 25 bp, Homo sapien
gtggctgggatatcctcagaccaag

SEQ ID NO: 4454776 - DNA, 25 bp, Homo sapien
aggtggctgggatatcctcagacca

SEQ ID NO: 4454777 - DNA, 25 bp, Homo sapien
gggatatcctcagaccaagctttcc

SEQ ID NO: 4454778 - DNA, 25 bp, Homo sapien
ggtggctgggatatcctcagaccaa

SEQ ID NO: 4454779 - DNA, 25 bp, Homo sapien
cctgctattgactgactgaccactt

SEQ ID NO: 4454780 - DNA, 25 bp, Homo sapien
gggattgaagcctgctattgactga

SEQ ID NO: 4454781 - DNA, 25 bp, Homo sapien
caagatctggcattctgtccctgaa

SEQ ID NO: 4454782 - DNA, 25 bp, Homo sapien
tggtggaacgccttgcccagttcct

SEQ ID NO: 4454783 - DNA, 25 bp, Homo sapien
ggtctgcttcaactctcttcttacg

SEQ ID NO: 4454784 - DNA, 25 bp, Homo sapien
cttcggtctgcttcaactctcttct

SEQ ID NO: 4454785 - DNA, 25 bp, Homo sapien
tcggtctgcttcaactctcttctta

SEQ ID NO: 4454786 - DNA, 25 bp, Homo sapien
tctgcttcaactctcttcttacgaa

SEQ ID NO: 4454787 - DNA, 25 bp, Homo sapien
tcagggactcagcacttaaacaggt

SEQ ID NO: 4454788 - DNA, 25 bp, Homo sapien
caaggaatgctctatagggtccagg

SEQ ID NO: 4454789 - DNA, 25 bp, Homo sapien
tgctactaggcaactcaggaacact

SEQ ID NO: 4454790 - DNA, 25 bp, Homo sapien
gagagcatctcccttcaatcagttg

SEQ ID NO: 4454791 - DNA, 25 bp, Homo sapien
tcacccatgttcagaggcaacggaa

SEQ ID NO: 4454792 - DNA, 25 bp, Homo sapien
tatattacaacaggaggccctatcg

SEQ ID NO: 4454793 - DNA, 25 bp, Homo sapien
gaaaaggccgcttatccagaaccat

SEQ ID NO: 4454794 - DNA, 25 bp, Homo sapien
gaggtgatctcacaacaggtggcac

SEQ ID NO: 4454795 - DNA, 25 bp, Homo sapien
tagcattaggtctggctggctaatt

SEQ ID NO: 4454796 - DNA, 25 bp, Homo sapien
gggtcctgaataattatccagggta

SEQ ID NO: 4454797 - DNA, 25 bp, Homo sapien
aattgcacctatttgggccaactgg

SEQ ID NO: 4454798 - DNA, 25 bp, Homo sapien
gatacattataccttcgaaagcaga

SEQ ID NO: 4454799 - DNA, 25 bp, Homo sapien
tcactcgaccgccctgtaggtgcgg

SEQ ID NO: 4454800 - DNA, 25 bp, Homo sapien
cctcccaaagagttgccagacccac

SEQ ID NO: 4454801 - DNA, 25 bp, Homo sapien
aaactgccggccgcaagccgaggct

SEQ ID NO: 4454802 - DNA, 25 bp, Homo sapien
acctcttcacagacccacggaaact

SEQ ID NO: 4454803 - DNA, 25 bp, Homo sapien
ggcacaatcattgtctctcactgta

SEQ ID NO: 4454804 - DNA, 25 bp, Homo sapien
gcacaatcattgtctctcactgtaa

SEQ ID NO: 4454805 - DNA, 25 bp, Homo sapien
gcattttcaatcatgtgccattctg

SEQ ID NO: 4454806 - DNA, 25 bp, Homo sapien
taaataagcacttaatggaccagtt

SEQ ID NO: 4454807 - DNA, 25 bp, Homo sapien
tcaaatgaaattcaagactacacaa

SEQ ID NO: 4454808 - DNA, 25 bp, Homo sapien
tagcaatgtgcttcaagatacagac

SEQ ID NO: 4454809 - DNA, 25 bp, Homo sapien
taaaatgcaaagtagctcagctgac

SEQ ID NO: 4454810 - DNA, 25 bp, Homo sapien
ggaaatacatggtaactagccctgg

SEQ ID NO: 4454811 - DNA, 25 bp, Homo sapien
ttaactcgacccacagaaaagccat

SEQ ID NO: 4454812 - DNA, 25 bp, Homo sapien
tcagctgacacgctaagatgccaag

SEQ ID NO: 4454813 - DNA, 25 bp, Homo sapien
ggtaggactaccagcataagacatc

SEQ ID NO: 4454814 - DNA, 25 bp, Homo sapien
gacatcatgcccaaactgttgttat

SEQ ID NO: 4454815 - DNA, 25 bp, Homo sapien
taaccacaggttgtatgtacatcgg

SEQ ID NO: 4454816 - DNA, 25 bp, Homo sapien
taagggtgtaactgaaaatactgac

SEQ ID NO: 4454817 - DNA, 25 bp, Homo sapien
gttaagcgtccattttgtacctcca

SEQ ID NO: 4454818 - DNA, 25 bp, Homo sapien
ctttaagatagcaagtttggccagg

SEQ ID NO: 4454819 - DNA, 25 bp, Homo sapien
gtcttcagataagattcaatggaag

SEQ ID NO: 4454820 - DNA, 25 bp, Homo sapien
taagcaagcttacaagtatatttac

SEQ ID NO: 4454821 - DNA, 25 bp, Homo sapien
tggagagaagaaacaaatacatttt

SEQ ID NO: 4454822 - DNA, 25 bp, Homo sapien
tatggagagaagaaacaaatacatt

SEQ ID NO: 4454823 - DNA, 25 bp, Homo sapien
gagagaagaaacaaatacattttaa

SEQ ID NO: 4454824 - DNA, 25 bp, Homo sapien
ctatggagagaagaaacaaatacat

SEQ ID NO: 4454825 - DNA, 25 bp, Homo sapien
ggcagcaagtcacttaatttttgct

SEQ ID NO: 4454826 - DNA, 25 bp, Homo sapien
agtcagaagtgatctctactttttc

SEQ ID NO: 4454827 - DNA, 25 bp, Homo sapien
gcagggcagcaagtcacttaatttt

SEQ ID NO: 4454828 - DNA, 25 bp, Homo sapien
cagggcagcaagtcacttaattttt

SEQ ID NO: 4454829 - DNA, 25 bp, Homo sapien
agtccttacggaatggcagtgccat

SEQ ID NO: 4454830 - DNA, 25 bp, Homo sapien
taagtccttacggaatggcagtgcc

SEQ ID NO: 4454831 - DNA, 25 bp, Homo sapien
catcaaggtctttgtacttttctaa

SEQ ID NO: 4454832 - DNA, 25 bp, Homo sapien
tttctaagtccttacggaatggcag

SEQ ID NO: 4454833 - DNA, 25 bp, Homo sapien
agctcaaaggcagctactgagtttc

SEQ ID NO: 4454834 - DNA, 25 bp, Homo sapien
gtcattaaacatatggaggcagaag

SEQ ID NO: 4454835 - DNA, 25 bp, Homo sapien
gaaaagctcaaaggcagctactgag

SEQ ID NO: 4454836 - DNA, 25 bp, Homo sapien
caaggatactgaagtagtttaggac

SEQ ID NO: 4454837 - DNA, 25 bp, Homo sapien
caagtagcctggggctacatgcgtg

SEQ ID NO: 4454838 - DNA, 25 bp, Homo sapien
aagtagcctggggctacatgcgtgc

SEQ ID NO: 4454839 - DNA, 25 bp, Homo sapien
taatcctggagagaccactccttcc

SEQ ID NO: 4454840 - DNA, 25 bp, Homo sapien
cagggctggctagagagcgcactat

SEQ ID NO: 4454841 - DNA, 25 bp, Homo sapien
agagtgagaattgggctctaaaaaa

SEQ ID NO: 4454842 - DNA, 25 bp, Homo sapien
tcttggggccttgctaatcctggag

SEQ ID NO: 4454843 - DNA, 25 bp, Homo sapien
gcaaacacgtacactgaatacagca

SEQ ID NO: 4454844 - DNA, 25 bp, Homo sapien
gaacgctttccaaaaacatgtcacc

SEQ ID NO: 4454845 - DNA, 25 bp, Homo sapien
tagctgctactacccttgacctctt

SEQ ID NO: 4454846 - DNA, 25 bp, Homo sapien
gttctcctagcctcaactaacagta

SEQ ID NO: 4454847 - DNA, 25 bp, Homo sapien
agcaagagctatgttcctgggtttc

SEQ ID NO: 4454848 - DNA, 25 bp, Homo sapien
cagcctttttgagcgcatggactga

SEQ ID NO: 4454849 - DNA, 25 bp, Homo sapien
tccacacgggtacagcctttttgag

SEQ ID NO: 4454850 - DNA, 25 bp, Homo sapien
tcctgggtttccacacgggtacagc

SEQ ID NO: 4454851 - DNA, 25 bp, Homo sapien
tgatgtctggttcttctgccggaac

SEQ ID NO: 4454852 - DNA, 25 bp, Homo sapien
tctctatcaaatggccctgtggtgg

SEQ ID NO: 4454853 - DNA, 25 bp, Homo sapien
tgtagggcacatagtcttccctgtc

SEQ ID NO: 4454854 - DNA, 25 bp, Homo sapien
tccctgtctttatgctccaatgctt

SEQ ID NO: 4454855 - DNA, 25 bp, Homo sapien
cacctgtaacagtagcgtgatggtt

SEQ ID NO: 4454856 - DNA, 25 bp, Homo sapien
tgaaacacgcagaataacagaaggt

SEQ ID NO: 4454857 - DNA, 25 bp, Homo sapien
taaagccataaacactgacatacgt

SEQ ID NO: 4454858 - DNA, 25 bp, Homo sapien
tgacatacgtatggctgcacagaga

SEQ ID NO: 4454859 - DNA, 25 bp, Homo sapien
tgtaaacaccactgcacttggacca

SEQ ID NO: 4454860 - DNA, 25 bp, Homo sapien
gtaactgtgatcaattagctgtaaa

SEQ ID NO: 4454861 - DNA, 25 bp, Homo sapien
taaacaccactgcacttggaccagc

SEQ ID NO: 4454862 - DNA, 25 bp, Homo sapien
aacaccactgcacttggaccagcct

SEQ ID NO: 4454863 - DNA, 25 bp, Homo sapien
ctgtaaaagtctgtacaggtttctg

SEQ ID NO: 4454864 - DNA, 25 bp, Homo sapien
cttctgtaaaagtctgtacaggttt

SEQ ID NO: 4454865 - DNA, 25 bp, Homo sapien
tgtaaaagtctgtacaggtttctgt

SEQ ID NO: 4454866 - DNA, 25 bp, Homo sapien
tctgtaaaagtctgtacaggtttct

SEQ ID NO: 4454867 - DNA, 25 bp, Homo sapien
atgttcttggtcaacaccattacta

SEQ ID NO: 4454868 - DNA, 25 bp, Homo sapien
aaaaatgttcttggtcaacaccatt

SEQ ID NO: 4454869 - DNA, 25 bp, Homo sapien
ttcgttatcaaattgtgcatcccaa

SEQ ID NO: 4454870 - DNA, 25 bp, Homo sapien
tacagaactttgtattcgttatcaa

SEQ ID NO: 4454871 - DNA, 25 bp, Homo sapien
aactctcttctacattggttggatt

SEQ ID NO: 4454872 - DNA, 25 bp, Homo sapien
ggttggatttggtggctcatcaaat

SEQ ID NO: 4454873 - DNA, 25 bp, Homo sapien
tcaaataccggaagaatcttttcac

SEQ ID NO: 4454874 - DNA, 25 bp, Homo sapien
gatgagcatcgttttctttagttct

SEQ ID NO: 4454875 - DNA, 25 bp, Homo sapien
aacagggtcattgctccgggtggct

SEQ ID NO: 4454876 - DNA, 25 bp, Homo sapien
agtagcaacagggtcattgctccgg

SEQ ID NO: 4454877 - DNA, 25 bp, Homo sapien
acatgtgtgttggtttccaaagcct

SEQ ID NO: 4454878 - DNA, 25 bp, Homo sapien
tcacatgtgtgttggtttccaaagc

SEQ ID NO: 4454879 - DNA, 25 bp, Homo sapien
tttggtcacatgtaattccccgttg

SEQ ID NO: 4454880 - DNA, 25 bp, Homo sapien
tggtgacattctctactcctcattc

SEQ ID NO: 4454881 - DNA, 25 bp, Homo sapien
tatgtacccagtcataatcttttga

SEQ ID NO: 4454882 - DNA, 25 bp, Homo sapien
ttcatatgtacccagtcataatctt

SEQ ID NO: 4454883 - DNA, 25 bp, Homo sapien
ctcccgtgataaagttggactccac

SEQ ID NO: 4454884 - DNA, 25 bp, Homo sapien
cagaatcccaactcccgtgataaag

SEQ ID NO: 4454885 - DNA, 25 bp, Homo sapien
tctcttaacgcatcaatcagtgcca

SEQ ID NO: 4454886 - DNA, 25 bp, Homo sapien
gccagggtttcattatctcttaacg

SEQ ID NO: 4454887 - DNA, 25 bp, Homo sapien
tgatatccaaatttaaggatatttg

SEQ ID NO: 4454888 - DNA, 25 bp, Homo sapien
aattctacagctgtccccaactgct

SEQ ID NO: 4454889 - DNA, 25 bp, Homo sapien
ttagctgctctggttcgtggtccct

SEQ ID NO: 4454890 - DNA, 25 bp, Homo sapien
ttttttgttatagcattagctgctc

SEQ ID NO: 4454891 - DNA, 25 bp, Homo sapien
taggaagacgagcaaacacctacat

SEQ ID NO: 4454892 - DNA, 25 bp, Homo sapien
gtccttttaggaagacgagcaaaca

SEQ ID NO: 4454893 - DNA, 25 bp, Homo sapien
gcaaacacctacataccagactata

SEQ ID NO: 4454894 - DNA, 25 bp, Homo sapien
cataccagactataaaacctgggtg

SEQ ID NO: 4454895 - DNA, 25 bp, Homo sapien
gattgcttcatgaatgtctgtgtca

SEQ ID NO: 4454896 - DNA, 25 bp, Homo sapien
gggctatcagcattgtggccggctc

SEQ ID NO: 4454897 - DNA, 25 bp, Homo sapien
tgagggccaccaattcagggctatc

SEQ ID NO: 4454898 - DNA, 25 bp, Homo sapien
gagagcattcactgagggccaccaa

SEQ ID NO: 4454899 - DNA, 25 bp, Homo sapien
aattcagggctatcagcattgtggc

SEQ ID NO: 4454900 - DNA, 25 bp, Homo sapien
gtgatctccttcaactcgtctctta

SEQ ID NO: 4454901 - DNA, 25 bp, Homo sapien
gatctccttcaactcgtctcttacg

SEQ ID NO: 4454902 - DNA, 25 bp, Homo sapien
tggtgatctccttcaactcgtctct

SEQ ID NO: 4454903 - DNA, 25 bp, Homo sapien
tctccttcaactcgtctcttacgca

SEQ ID NO: 4454904 - DNA, 25 bp, Homo sapien
agtcttccaaagattacacctttgc

SEQ ID NO: 4454905 - DNA, 25 bp, Homo sapien
tcttccaaagattacacctttgcag

SEQ ID NO: 4454906 - DNA, 25 bp, Homo sapien
ttccaaagattacacctttgcagac

SEQ ID NO: 4454907 - DNA, 25 bp, Homo sapien
gtcttccaaagattacacctttgca

SEQ ID NO: 4454908 - DNA, 25 bp, Homo sapien
gctttagctcctacacagatgacta

SEQ ID NO: 4454909 - DNA, 25 bp, Homo sapien
aaaaatcacacccttgccaagttca

SEQ ID NO: 4454910 - DNA, 25 bp, Homo sapien
gaaaactctccaggtcacggagtga

SEQ ID NO: 4454911 - DNA, 25 bp, Homo sapien
ctgataccagcaacatcccttttga

SEQ ID NO: 4454912 - DNA, 25 bp, Homo sapien
gctacgtcacatcagacaagtgcag

SEQ ID NO: 4454913 - DNA, 25 bp, Homo sapien
gaagacctgggtgttgctacgtcac

SEQ ID NO: 4454914 - DNA, 25 bp, Homo sapien
ggaatgaacttcgacctcactatac

SEQ ID NO: 4454915 - DNA, 25 bp, Homo sapien
taaagtatgtaacctggcaaagctg

SEQ ID NO: 4454916 - DNA, 25 bp, Homo sapien
ataactaagagttggctgtacgcct

SEQ ID NO: 4454917 - DNA, 25 bp, Homo sapien
acttcttcggatatggtgtaacacc

SEQ ID NO: 4454918 - DNA, 25 bp, Homo sapien
tctgcactgcacataggaacttctt

SEQ ID NO: 4454919 - DNA, 25 bp, Homo sapien
taaatgactgttttgcaagtgcctc

SEQ ID NO: 4454920 - DNA, 25 bp, Homo sapien
cctttaactgacagggaatagtgca

SEQ ID NO: 4454921 - DNA, 25 bp, Homo sapien
gaaacaccacagttcttatgaggga

SEQ ID NO: 4454922 - DNA, 25 bp, Homo sapien
ggccagggctacctcagattccatt

SEQ ID NO: 4454923 - DNA, 25 bp, Homo sapien
cagcccaagccaaagtagcagacat

SEQ ID NO: 4454924 - DNA, 25 bp, Homo sapien
tgcctgactcccaatcttgctggaa

SEQ ID NO: 4454925 - DNA, 25 bp, Homo sapien
gactgaaagtctaggtgaccaattc

SEQ ID NO: 4454926 - DNA, 25 bp, Homo sapien
aggacaatgcaaacgaggatgcctg

SEQ ID NO: 4454927 - DNA, 25 bp, Homo sapien
ctcccaatcttgctggaactgtgca

SEQ ID NO: 4454928 - DNA, 25 bp, Homo sapien
taaatgacaggcaactttgaaagtg

SEQ ID NO: 4454929 - DNA, 25 bp, Homo sapien
cacataagctggttagactacaaaa

SEQ ID NO: 4454930 - DNA, 25 bp, Homo sapien
gagaattctactaggctttagctac

SEQ ID NO: 4454931 - DNA, 25 bp, Homo sapien
ctataatgcagaattgaaatggtac

SEQ ID NO: 4454932 - DNA, 25 bp, Homo sapien
ctcggtcaactggaaaacaatttat

SEQ ID NO: 4454933 - DNA, 25 bp, Homo sapien
aaaacacaacagatactcggtcaac

SEQ ID NO: 4454934 - DNA, 25 bp, Homo sapien
tgtaacttctccagagcgaatatct

SEQ ID NO: 4454935 - DNA, 25 bp, Homo sapien
catgaagtcgcaattaaatgaccaa

SEQ ID NO: 4454936 - DNA, 25 bp, Homo sapien
gaccccaagaactcatagcccttaa

SEQ ID NO: 4454937 - DNA, 25 bp, Homo sapien
catgggtcaatacgttcaaagtgca

SEQ ID NO: 4454938 - DNA, 25 bp, Homo sapien
tagcccttaactgagagcagcaacc

SEQ ID NO: 4454939 - DNA, 25 bp, Homo sapien
ccgagttgtctctagtgcatccata

SEQ ID NO: 4454940 - DNA, 25 bp, Homo sapien
ccaacatgctgggaccattaagtgt

SEQ ID NO: 4454941 - DNA, 25 bp, Homo sapien
tatagggaagaacttatagaactga

SEQ ID NO: 4454942 - DNA, 25 bp, Homo sapien
cagtacttggccaaaattctttatg

SEQ ID NO: 4454943 - DNA, 25 bp, Homo sapien
ggattttggaatactgggcattaca

SEQ ID NO: 4454944 - DNA, 25 bp, Homo sapien
agcaggtgtcctaagtaaaagacaa

SEQ ID NO: 4454945 - DNA, 25 bp, Homo sapien
tacaatctatttttatctagcctct

SEQ ID NO: 4454946 - DNA, 25 bp, Homo sapien
ctagcctctagagcaggtgtcctaa

SEQ ID NO: 4454947 - DNA, 25 bp, Homo sapien
ttatctagcctctagagcaggtgtc

SEQ ID NO: 4454948 - DNA, 25 bp, Homo sapien
cactgtgctgttatgaatttggata

SEQ ID NO: 4454949 - DNA, 25 bp, Homo sapien
agaggtgtctgtcttacgaatgtaa

SEQ ID NO: 4454950 - DNA, 25 bp, Homo sapien
actgctatatacacccaccaagaag

SEQ ID NO: 4454951 - DNA, 25 bp, Homo sapien
taaatgcttccagtacatagtcttc

SEQ ID NO: 4454952 - DNA, 25 bp, Homo sapien
aatgccatcataaggggaccaacct

SEQ ID NO: 4454953 - DNA, 25 bp, Homo sapien
tgaccctatctagccttaattacct

SEQ ID NO: 4454954 - DNA, 25 bp, Homo sapien
gaccaaccttgtgaccctatctagc

SEQ ID NO: 4454955 - DNA, 25 bp, Homo sapien
tcataaggggaccaaccttgtgacc

SEQ ID NO: 4454956 - DNA, 25 bp, Homo sapien
cttcacatgatggagagagtctcct

SEQ ID NO: 4454957 - DNA, 25 bp, Homo sapien
ggctgggacgtccgagatcatggtt

SEQ ID NO: 4454958 - DNA, 25 bp, Homo sapien
tgggacgtccgagatcatggtttgg

SEQ ID NO: 4454959 - DNA, 25 bp, Homo sapien
gttcctagaggctgggacgtccgag

SEQ ID NO: 4454960 - DNA, 25 bp, Homo sapien
cagagtgtactgtatcacaggaccc

SEQ ID NO: 4454961 - DNA, 25 bp, Homo sapien
cagacaggacctagtactgatgata

SEQ ID NO: 4454962 - DNA, 25 bp, Homo sapien
gtcctaacaagataccatagactgg

SEQ ID NO: 4454963 - DNA, 25 bp, Homo sapien
tagccaggtcagattgtcctaacaa

SEQ ID NO: 4454964 - DNA, 25 bp, Homo sapien
ggaattatggacacccgccaatgca

SEQ ID NO: 4454965 - DNA, 25 bp, Homo sapien
attatggacacccgccaatgcacct

SEQ ID NO: 4454966 - DNA, 25 bp, Homo sapien
atggacacccgccaatgcacctaat

SEQ ID NO: 4454967 - DNA, 25 bp, Homo sapien
gaattatggacacccgccaatgcac

SEQ ID NO: 4454968 - DNA, 25 bp, Homo sapien
cacaggccaggttaggcactctagg

SEQ ID NO: 4454969 - DNA, 25 bp, Homo sapien
gagcagaagcttacaagcacacagg

SEQ ID NO: 4454970 - DNA, 25 bp, Homo sapien
caagtctcggctacagaactacgaa

SEQ ID NO: 4454971 - DNA, 25 bp, Homo sapien
gcagggcctgagatatcaagtctcg

SEQ ID NO: 4454972 - DNA, 25 bp, Homo sapien
ctaggagtggcccaaaggtctgata

SEQ ID NO: 4454973 - DNA, 25 bp, Homo sapien
agcagtaggactaggagtggcccaa

SEQ ID NO: 4454974 - DNA, 25 bp, Homo sapien
taggactaggagtggcccaaaggtc

SEQ ID NO: 4454975 - DNA, 25 bp, Homo sapien
taggagtggcccaaaggtctgatac

SEQ ID NO: 4454976 - DNA, 25 bp, Homo sapien
tttaggctgaagaggttatttgctt

SEQ ID NO: 4454977 - DNA, 25 bp, Homo sapien
tgcaagagggcacaagtttctgttt

SEQ ID NO: 4454978 - DNA, 25 bp, Homo sapien
tgcaaaccaatggatccacgtggag

SEQ ID NO: 4454979 - DNA, 25 bp, Homo sapien
ccacgtggagtaacagaggtgtgat

SEQ ID NO: 4454980 - DNA, 25 bp, Homo sapien
gtttttcactatgtggacctctcca

SEQ ID NO: 4454981 - DNA, 25 bp, Homo sapien
tccataggcagtttgaatgtcctca

SEQ ID NO: 4454982 - DNA, 25 bp, Homo sapien
gggccttagtttttcactatgtgga

SEQ ID NO: 4454983 - DNA, 25 bp, Homo sapien
gcagtttgaatgtcctcacggcatg

SEQ ID NO: 4454984 - DNA, 25 bp, Homo sapien
gatgttggctggcactacattatct

SEQ ID NO: 4454985 - DNA, 25 bp, Homo sapien
ggcttcgctggttgtttctaactca

SEQ ID NO: 4454986 - DNA, 25 bp, Homo sapien
tacattatctaagggcttgcctagg

SEQ ID NO: 4454987 - DNA, 25 bp, Homo sapien
gcaggctgctgtcaagatgttggct

SEQ ID NO: 4454988 - DNA, 25 bp, Homo sapien
tctgcaaaaatcgtgaccatcttta

SEQ ID NO: 4454989 - DNA, 25 bp, Homo sapien
gcaaaaatcgtgaccatctttatgt

SEQ ID NO: 4454990 - DNA, 25 bp, Homo sapien
tgcatatggagtctgcaaaaatcgt

SEQ ID NO: 4454991 - DNA, 25 bp, Homo sapien
tggagtctgcaaaaatcgtgaccat

SEQ ID NO: 4454992 - DNA, 25 bp, Homo sapien
ttattgtacagttataaatatgtaa

SEQ ID NO: 4454993 - DNA, 25 bp, Homo sapien
aatgaatcgatttgcttttgtgtaa

SEQ ID NO: 4454994 - DNA, 25 bp, Homo sapien
tttgattgaaatgaatcgatttgct

SEQ ID NO: 4454995 - DNA, 25 bp, Homo sapien
aagatgatgattgaagtatgaaata

SEQ ID NO: 4454996 - DNA, 25 bp, Homo sapien
gattagttcacagttgctgacacct

SEQ ID NO: 4454997 - DNA, 25 bp, Homo sapien
tcacaacctgcaggaaccgttactt

SEQ ID NO: 4454998 - DNA, 25 bp, Homo sapien
tgagttgtcagagggtcattcagct

SEQ ID NO: 4454999 - DNA, 25 bp, Homo sapien
tgaaccttccggaaagagaaaagca

SEQ ID NO: 4455000 - DNA, 25 bp, Homo sapien
gagagtagaggctttggagtcttaa

SEQ ID NO: 4455001 - DNA, 25 bp, Homo sapien
gcataagccactgcgatggactgtt

SEQ ID NO: 4455002 - DNA, 25 bp, Homo sapien
ataatggccttacctgtttcccagg

SEQ ID NO: 4455003 - DNA, 25 bp, Homo sapien
cactgactgctttgttgagagtatg

SEQ ID NO: 4455004 - DNA, 25 bp, Homo sapien
taaacgtctgaaggtagtgacagtg

SEQ ID NO: 4455005 - DNA, 25 bp, Homo sapien
caggaaaacgatatagagaatgctc

SEQ ID NO: 4455006 - DNA, 25 bp, Homo sapien
cactccagtgagtatttaacacccc

SEQ ID NO: 4455007 - DNA, 25 bp, Homo sapien
ctctcactggaatggtgatctttga

SEQ ID NO: 4455008 - DNA, 25 bp, Homo sapien
taggtcactccggatagatggaaag

SEQ ID NO: 4455009 - DNA, 25 bp, Homo sapien
ctgtactcaggagccaactgctttg

SEQ ID NO: 4455010 - DNA, 25 bp, Homo sapien
taacaagacagagtgatccagagga

SEQ ID NO: 4455011 - DNA, 25 bp, Homo sapien
cttagagaggtcttagaaggctgca

SEQ ID NO: 4455012 - DNA, 25 bp, Homo sapien
ggcctccttcaggattttaaagaca

SEQ ID NO: 4455013 - DNA, 25 bp, Homo sapien
agggaatgaatttgataagctggtc

SEQ ID NO: 4455014 - DNA, 25 bp, Homo sapien
aataactgcgttccctctggtcact

SEQ ID NO: 4455015 - DNA, 25 bp, Homo sapien
tcttcatatgccagcagatttttct

SEQ ID NO: 4455016 - DNA, 25 bp, Homo sapien
tgtcttcttaactagcttagcagca

SEQ ID NO: 4455017 - DNA, 25 bp, Homo sapien
tgtagccagtcttgctagaacccca

SEQ ID NO: 4455018 - DNA, 25 bp, Homo sapien
ccaaagggccccagaaattatgtag

SEQ ID NO: 4455019 - DNA, 25 bp, Homo sapien
gggtaagtgtccaaggctgcctcaa

SEQ ID NO: 4455020 - DNA, 25 bp, Homo sapien
gataattactaccactggaactccc

SEQ ID NO: 4455021 - DNA, 25 bp, Homo sapien
tctggcaatcccctaggtctggtgt

SEQ ID NO: 4455022 - DNA, 25 bp, Homo sapien
agaaactgataaccacctctggagt

SEQ ID NO: 4455023 - DNA, 25 bp, Homo sapien
cctctggagtctttatctgcattca

SEQ ID NO: 4455024 - DNA, 25 bp, Homo sapien
ctggcggcagcggcgtctccgaggc

SEQ ID NO: 4455025 - DNA, 25 bp, Homo sapien
tcggctcaggtctccggctgtgctg

SEQ ID NO: 4455026 - DNA, 25 bp, Homo sapien
gaggctctcgctttgccgcagtcgc

SEQ ID NO: 4455027 - DNA, 25 bp, Homo sapien
gactcatcgagagagtgcggggctc

SEQ ID NO: 4455028 - DNA, 25 bp, Homo sapien
agggagccggctccgccgtcgccgc

SEQ ID NO: 4455029 - DNA, 25 bp, Homo sapien
gccgccgccgggcccgccgcggcgc

SEQ ID NO: 4455030 - DNA, 25 bp, Homo sapien
gctccgccgtcgccgccgccgccgc

SEQ ID NO: 4455031 - DNA, 25 bp, Homo sapien
cgccgccgccgccgggcccgccgcg

SEQ ID NO: 4455032 - DNA, 25 bp, Homo sapien
tttgggcacttttacagaccaccac

SEQ ID NO: 4455033 - DNA, 25 bp, Homo sapien
catttgggcacttttacagaccacc

SEQ ID NO: 4455034 - DNA, 25 bp, Homo sapien
gggcacttttacagaccaccactta

SEQ ID NO: 4455035 - DNA, 25 bp, Homo sapien
tcatttgggcacttttacagaccac

SEQ ID NO: 4455036 - DNA, 25 bp, Homo sapien
tctcagttttccagcgttaaagagg

SEQ ID NO: 4455037 - DNA, 25 bp, Homo sapien
ctcagttttccagcgttaaagaggg

SEQ ID NO: 4455038 - DNA, 25 bp, Homo sapien
atctcagttttccagcgttaaagag

SEQ ID NO: 4455039 - DNA, 25 bp, Homo sapien
cagttttccagcgttaaagagggag

SEQ ID NO: 4455040 - DNA, 25 bp, Homo sapien
tcccagttacttctcaggaagtgag

SEQ ID NO: 4455041 - DNA, 25 bp, Homo sapien
tgtctccagcagactttcacttcaa

SEQ ID NO: 4455042 - DNA, 25 bp, Homo sapien
aaatatctatccacggccaggcaca

SEQ ID NO: 4455043 - DNA, 25 bp, Homo sapien
taactaaccccagatctacagagag

SEQ ID NO: 4455044 - DNA, 25 bp, Homo sapien
gatgtattagtcacacttctccaca

SEQ ID NO: 4455045 - DNA, 25 bp, Homo sapien
taagaatgatagctgatttatcact

SEQ ID NO: 4455046 - DNA, 25 bp, Homo sapien
tatatactggagaagaataataaga

SEQ ID NO: 4455047 - DNA, 25 bp, Homo sapien
caaagcctattaacccagatgtatt

SEQ ID NO: 4455048 - DNA, 25 bp, Homo sapien
acaactcttcgccagggcacagtgg

SEQ ID NO: 4455049 - DNA, 25 bp, Homo sapien
ttaaaagcaaccaggagtccgggca

SEQ ID NO: 4455050 - DNA, 25 bp, Homo sapien
catcgtgctccagtatgggtaacag

SEQ ID NO: 4455051 - DNA, 25 bp, Homo sapien
caaaaatacctacgcacagagtgaa

SEQ ID NO: 4455052 - DNA, 25 bp, Homo sapien
tattagagaatctggaggaggccca

SEQ ID NO: 4455053 - DNA, 25 bp, Homo sapien
taaactgcaacaagctggataagct

SEQ ID NO: 4455054 - DNA, 25 bp, Homo sapien
aaagttgcaagataccaagcctcac

SEQ ID NO: 4455055 - DNA, 25 bp, Homo sapien
ccactgacaggattaaggagaaacc

SEQ ID NO: 4455056 - DNA, 25 bp, Homo sapien
tggaattacagatcagccccgcatc

SEQ ID NO: 4455057 - DNA, 25 bp, Homo sapien
gaagaaggtcacattatgcaaggcc

SEQ ID NO: 4455058 - DNA, 25 bp, Homo sapien
gagtccagtctttcactaggcccgt

SEQ ID NO: 4455059 - DNA, 25 bp, Homo sapien
cagtccatcctagcagggtttagca

SEQ ID NO: 4455060 - DNA, 25 bp, Homo sapien
caaagctactaagattttcgggcag

SEQ ID NO: 4455061 - DNA, 25 bp, Homo sapien
tcaggatttggacatcaaggaggct

SEQ ID NO: 4455062 - DNA, 25 bp, Homo sapien
tgctcctaatgtatggtgggcggcc

SEQ ID NO: 4455063 - DNA, 25 bp, Homo sapien
gggctatctcctaaccctggcacag

SEQ ID NO: 4455064 - DNA, 25 bp, Homo sapien
tgccttaacgtagacaattccttaa

SEQ ID NO: 4455065 - DNA, 25 bp, Homo sapien
tgataaatgtacactgtaaagtcag

SEQ ID NO: 4455066 - DNA, 25 bp, Homo sapien
gataaatgtacactgtaaagtcagt

SEQ ID NO: 4455067 - DNA, 25 bp, Homo sapien
cttcttgccttaacgtagacaattc

SEQ ID NO: 4455068 - DNA, 25 bp, Homo sapien
tagcaataaactactactggtacat

SEQ ID NO: 4455069 - DNA, 25 bp, Homo sapien
tatggtcattaagtgacaaattacc

SEQ ID NO: 4455070 - DNA, 25 bp, Homo sapien
tcttcaaatttgtagtatgacacaa

SEQ ID NO: 4455071 - DNA, 25 bp, Homo sapien
acacaaagtaggcatttagcaataa

SEQ ID NO: 4455072 - DNA, 25 bp, Homo sapien
agctaccgtccatcttactctgata

SEQ ID NO: 4455073 - DNA, 25 bp, Homo sapien
ttgcatatgccaaacaggcctgtcg

SEQ ID NO: 4455074 - DNA, 25 bp, Homo sapien
gcctgtcgagttccccttagattta

SEQ ID NO: 4455075 - DNA, 25 bp, Homo sapien
gacatactgtgcactcagattaccg

SEQ ID NO: 4455076 - DNA, 25 bp, Homo sapien
gcagtactcatagttcaagaaaggg

SEQ ID NO: 4455077 - DNA, 25 bp, Homo sapien
agaaaactggcatcaaaaggaaaga

SEQ ID NO: 4455078 - DNA, 25 bp, Homo sapien
gaagaaaactggcatcaaaaggaaa

SEQ ID NO: 4455079 - DNA, 25 bp, Homo sapien
aaggaagaaaactggcatcaaaagg

SEQ ID NO: 4455080 - DNA, 25 bp, Homo sapien
aggaagaaaactggcatcaaaagga

SEQ ID NO: 4455081 - DNA, 25 bp, Homo sapien
ctattgccttttcctttcaaattga

SEQ ID NO: 4455082 - DNA, 25 bp, Homo sapien
tattgccttttcctttcaaattgaa

SEQ ID NO: 4455083 - DNA, 25 bp, Homo sapien
actattgccttttcctttcaaattg

SEQ ID NO: 4455084 - DNA, 25 bp, Homo sapien
tccactgggaccaagaatctcaaac

SEQ ID NO: 4455085 - DNA, 25 bp, Homo sapien
ttccactgggaccaagaatctcaaa

SEQ ID NO: 4455086 - DNA, 25 bp, Homo sapien
gcttccactgggaccaagaatctca

SEQ ID NO: 4455087 - DNA, 25 bp, Homo sapien
cttccactgggaccaagaatctcaa

SEQ ID NO: 4455088 - DNA, 25 bp, Homo sapien
ggagaaagtaaaagacgtggagatc

SEQ ID NO: 4455089 - DNA, 25 bp, Homo sapien
gcctgcagcccacatgtcaatggct

SEQ ID NO: 4455090 - DNA, 25 bp, Homo sapien
ccatttagtaaccaatccttcagaa

SEQ ID NO: 4455091 - DNA, 25 bp, Homo sapien
ggttttaccagtcagcatttcagca

SEQ ID NO: 4455092 - DNA, 25 bp, Homo sapien
gattactcatctcatcttgacaaag

SEQ ID NO: 4455093 - DNA, 25 bp, Homo sapien
tactttctagtattccgaccccatc

SEQ ID NO: 4455094 - DNA, 25 bp, Homo sapien
aaaatctgtttgactccataatgcc

SEQ ID NO: 4455095 - DNA, 25 bp, Homo sapien
gatgcatagcttctctaagtttaca

SEQ ID NO: 4455096 - DNA, 25 bp, Homo sapien
tcagagtggtactagaacaaagggt

SEQ ID NO: 4455097 - DNA, 25 bp, Homo sapien
ccctggctgcgatgtggtaactaaa

SEQ ID NO: 4455098 - DNA, 25 bp, Homo sapien
agacataatggctgactggaccggg

SEQ ID NO: 4455099 - DNA, 25 bp, Homo sapien
tagtaagagtgacagtaacaagccg

SEQ ID NO: 4455100 - DNA, 25 bp, Homo sapien
gacgatcttcctcatgtacaacagg

SEQ ID NO: 4455101 - DNA, 25 bp, Homo sapien
tgtacaacaggaatagattctaaaa

SEQ ID NO: 4455102 - DNA, 25 bp, Homo sapien
gctgagaagctcctgacgatcttcc

SEQ ID NO: 4455103 - DNA, 25 bp, Homo sapien
aggtttgtgtggctcagtcatgtca

SEQ ID NO: 4455104 - DNA, 25 bp, Homo sapien
ggctcctaggagtcttatacgttca

SEQ ID NO: 4455105 - DNA, 25 bp, Homo sapien
gaaattaaccagagtagggctccta

SEQ ID NO: 4455106 - DNA, 25 bp, Homo sapien
actacaggaatgctacaatggtgct

SEQ ID NO: 4455107 - DNA, 25 bp, Homo sapien
caagttgccactgcctcagaatgtg

SEQ ID NO: 4455108 - DNA, 25 bp, Homo sapien
ctaataggtccccatcttataaaag

SEQ ID NO: 4455109 - DNA, 25 bp, Homo sapien
gattaccttagcactacatactaca

SEQ ID NO: 4455110 - DNA, 25 bp, Homo sapien
gaaatgagcatcttaattgtactaa

SEQ ID NO: 4455111 - DNA, 25 bp, Homo sapien
caatgactagctaagtgattacctt

SEQ ID NO: 4455112 - DNA, 25 bp, Homo sapien
gatccatggggctaaatgtcaaaat

SEQ ID NO: 4455113 - DNA, 25 bp, Homo sapien
atgtaaggatgggagagtgcttctt

SEQ ID NO: 4455114 - DNA, 25 bp, Homo sapien
cttctgctgttaaccgatccatggg

SEQ ID NO: 4455115 - DNA, 25 bp, Homo sapien
aatatatgctcatgtaaggatggga

SEQ ID NO: 4455116 - DNA, 25 bp, Homo sapien
ttcatagtaatggttaacttcactc

SEQ ID NO: 4455117 - DNA, 25 bp, Homo sapien
gttcagatgtttcagaatgctgctg

SEQ ID NO: 4455118 - DNA, 25 bp, Homo sapien
gatgtttcagaatgctgctgtatgt

SEQ ID NO: 4455119 - DNA, 25 bp, Homo sapien
cagaaggtgttaatgtggcctgtat

SEQ ID NO: 4455120 - DNA, 25 bp, Homo sapien
tcagatgtttcagaatgctgctgta

SEQ ID NO: 4455121 - DNA, 25 bp, Homo sapien
ttttgtgtgcaaatgacatgccagt

SEQ ID NO: 4455122 - DNA, 25 bp, Homo sapien
taacacatgtgtaccaaattcggca

SEQ ID NO: 4455123 - DNA, 25 bp, Homo sapien
gccacatactcttgttaccttgagg

SEQ ID NO: 4455124 - DNA, 25 bp, Homo sapien
taaacgctggctaaatagaagtgca

SEQ ID NO: 4455125 - DNA, 25 bp, Homo sapien
tcaaacaggataaccaaagatacag

SEQ ID NO: 4455126 - DNA, 25 bp, Homo sapien
caggataaccaaagatacagacagt

SEQ ID NO: 4455127 - DNA, 25 bp, Homo sapien
tttcttcaaacaggataaccaaaga

SEQ ID NO: 4455128 - DNA, 25 bp, Homo sapien
taaccaaagatacagacagtattca

SEQ ID NO: 4455129 - DNA, 25 bp, Homo sapien
tatggccataattcaaagtgattct

SEQ ID NO: 4455130 - DNA, 25 bp, Homo sapien
tcaaaagacttgaaccttctcagcc

SEQ ID NO: 4455131 - DNA, 25 bp, Homo sapien
gatggttttgtagctggataggtaa

SEQ ID NO: 4455132 - DNA, 25 bp, Homo sapien
cttacgcaaagatgtattacagagc

SEQ ID NO: 4455133 - DNA, 25 bp, Homo sapien
tgccaaggtgacagtttaacgaatg

SEQ ID NO: 4455134 - DNA, 25 bp, Homo sapien
cagatcattgtgtagatggccacta

SEQ ID NO: 4455135 - DNA, 25 bp, Homo sapien
tacaacttagtactcagcctgggtc

SEQ ID NO: 4455136 - DNA, 25 bp, Homo sapien
tccaggagccaagtttcccagtaag

SEQ ID NO: 4455137 - DNA, 25 bp, Homo sapien
aaagacgggtttgccatgttctcca

SEQ ID NO: 4455138 - DNA, 25 bp, Homo sapien
gtaaagacgggtttgccatgttctc

SEQ ID NO: 4455139 - DNA, 25 bp, Homo sapien
agacgggtttgccatgttctccagg

SEQ ID NO: 4455140 - DNA, 25 bp, Homo sapien
gacgggtttgccatgttctccaggc

SEQ ID NO: 4455141 - DNA, 25 bp, Homo sapien
tttaaattctctctcaacctgaact

SEQ ID NO: 4455142 - DNA, 25 bp, Homo sapien
tcaagatggccggtatgtttcctcc

SEQ ID NO: 4455143 - DNA, 25 bp, Homo sapien
agtgttggtcttctgggaacccagc

SEQ ID NO: 4455144 - DNA, 25 bp, Homo sapien
gaacaatggagaacagaggcacctg

SEQ ID NO: 4455145 - DNA, 25 bp, Homo sapien
ccaggagccctggatatgcagcggc

SEQ ID NO: 4455146 - DNA, 25 bp, Homo sapien
ctctctttttgtgtgggataggtaa

SEQ ID NO: 4455147 - DNA, 25 bp, Homo sapien
gataggtaatgcaccctaggctgtt

SEQ ID NO: 4455148 - DNA, 25 bp, Homo sapien
tgaggtagagcgctaagcagtcccc

SEQ ID NO: 4455149 - DNA, 25 bp, Homo sapien
tgggccacagcctgggacatgccag

SEQ ID NO: 4455150 - DNA, 25 bp, Homo sapien
ctgacacagtctgggccacagcctg

SEQ ID NO: 4455151 - DNA, 25 bp, Homo sapien
ccacagcctgggacatgccaggcat

SEQ ID NO: 4455152 - DNA, 25 bp, Homo sapien
gccacagcctgggacatgccaggca

SEQ ID NO: 4455153 - DNA, 25 bp, Homo sapien
accctcaaggttggcaattgtcctg

SEQ ID NO: 4455154 - DNA, 25 bp, Homo sapien
caagtgcagtctttaccacagctat

SEQ ID NO: 4455155 - DNA, 25 bp, Homo sapien
gagggagtaccccataggctgaata

SEQ ID NO: 4455156 - DNA, 25 bp, Homo sapien
tgggaggcctgcaactaccaagacc

SEQ ID NO: 4455157 - DNA, 25 bp, Homo sapien
ggaagcaaatgaagataccagagga

SEQ ID NO: 4455158 - DNA, 25 bp, Homo sapien
gaagggaagcaaatgaagataccag

SEQ ID NO: 4455159 - DNA, 25 bp, Homo sapien
ttttcttgaagggaagcaaatgaag

SEQ ID NO: 4455160 - DNA, 25 bp, Homo sapien
agaagagcttttcttgaagggaagc

SEQ ID NO: 4455161 - DNA, 25 bp, Homo sapien
ggatgtcatgtctgcaatcatgtca

SEQ ID NO: 4455162 - DNA, 25 bp, Homo sapien
caatcatgtcatctctgagtgggga

SEQ ID NO: 4455163 - DNA, 25 bp, Homo sapien
ggaaaaactgaatatcttcttggtg

SEQ ID NO: 4455164 - DNA, 25 bp, Homo sapien
tgagagctttgagctcatggatgtc

SEQ ID NO: 4455165 - DNA, 25 bp, Homo sapien
tggcagtaggtgcttgaccaatgtt

SEQ ID NO: 4455166 - DNA, 25 bp, Homo sapien
taggtgcttgaccaatgtttggctg

SEQ ID NO: 4455167 - DNA, 25 bp, Homo sapien
ggtgcttgaccaatgtttggctgaa

SEQ ID NO: 4455168 - DNA, 25 bp, Homo sapien
agtaggtgcttgaccaatgtttggc

SEQ ID NO: 4455169 - DNA, 25 bp, Homo sapien
ttaagagaattatgaagggcaaggg

SEQ ID NO: 4455170 - DNA, 25 bp, Homo sapien
tgttctttgagtcaactgcttgtgg

SEQ ID NO: 4455171 - DNA, 25 bp, Homo sapien
aaattgtggttgttgattgatcgag

SEQ ID NO: 4455172 - DNA, 25 bp, Homo sapien
gggtcctttagaccagccgatgtca

SEQ ID NO: 4455173 - DNA, 25 bp, Homo sapien
tggcaccagggtggaagccacttgc

SEQ ID NO: 4455174 - DNA, 25 bp, Homo sapien
cagccatacacatcaggccagaggg

SEQ ID NO: 4455175 - DNA, 25 bp, Homo sapien
tggagtattccaggccccaacagct

SEQ ID NO: 4455176 - DNA, 25 bp, Homo sapien
tttccaaggaaaggatgagagggca

SEQ ID NO: 4455177 - DNA, 25 bp, Homo sapien
cagccacattgcattgcgatcctta

SEQ ID NO: 4455178 - DNA, 25 bp, Homo sapien
agccacattgcattgcgatccttac

SEQ ID NO: 4455179 - DNA, 25 bp, Homo sapien
ttagcaatcttcggaaacttgtcca

SEQ ID NO: 4455180 - DNA, 25 bp, Homo sapien
gcagccacattgcattgcgatcctt

SEQ ID NO: 4455181 - DNA, 25 bp, Homo sapien
ggcgatagggcaaagccaaccggga

SEQ ID NO: 4455182 - DNA, 25 bp, Homo sapien
gcgatagggcaaagccaaccgggac

SEQ ID NO: 4455183 - DNA, 25 bp, Homo sapien
cgatagggcaaagccaaccgggacg

SEQ ID NO: 4455184 - DNA, 25 bp, Homo sapien
tggcgatagggcaaagccaaccggg

SEQ ID NO: 4455185 - DNA, 25 bp, Homo sapien
tgtgcaacactatgtcagtctctca

SEQ ID NO: 4455186 - DNA, 25 bp, Homo sapien
tacttgtgcaacactatgtcagtct

SEQ ID NO: 4455187 - DNA, 25 bp, Homo sapien
cttgtgcaacactatgtcagtctct

SEQ ID NO: 4455188 - DNA, 25 bp, Homo sapien
gtacttgtgcaacactatgtcagtc

SEQ ID NO: 4455189 - DNA, 25 bp, Homo sapien
tatcgagccaagtggtgaatccagc

SEQ ID NO: 4455190 - DNA, 25 bp, Homo sapien
aagtggtgaatccagctctctatca

SEQ ID NO: 4455191 - DNA, 25 bp, Homo sapien
ttgtaatatcgagccaagtggtgaa

SEQ ID NO: 4455192 - DNA, 25 bp, Homo sapien
tggtcttgtaatatcgagccaagtg

SEQ ID NO: 4455193 - DNA, 25 bp, Homo sapien
tcagcctttggagggagaattccat

SEQ ID NO: 4455194 - DNA, 25 bp, Homo sapien
ttggaagagtctgagccgcctgctc

SEQ ID NO: 4455195 - DNA, 25 bp, Homo sapien
ccattcggagggattcagccacata

SEQ ID NO: 4455196 - DNA, 25 bp, Homo sapien
tcagtcaactggacataggcagcat

SEQ ID NO: 4455197 - DNA, 25 bp, Homo sapien
cctaaataacaaagacaggctcgct

SEQ ID NO: 4455198 - DNA, 25 bp, Homo sapien
tcagggttggtcagtctccacaggg

SEQ ID NO: 4455199 - DNA, 25 bp, Homo sapien
tgcagcaagataggagtctagtgtt

SEQ ID NO: 4455200 - DNA, 25 bp, Homo sapien
tcaaaagtagggcattgcaacagga

SEQ ID NO: 4455201 - DNA, 25 bp, Homo sapien
gaggccgcgagtgaatcttgtctct

SEQ ID NO: 4455202 - DNA, 25 bp, Homo sapien
tgtggatcctttgtaaggattgcca

SEQ ID NO: 4455203 - DNA, 25 bp, Homo sapien
ggcaggttcctgcactgcgccttca

SEQ ID NO: 4455204 - DNA, 25 bp, Homo sapien
gccaggaaatctgagccggaggccc

SEQ ID NO: 4455205 - DNA, 25 bp, Homo sapien
tttcaaaagaggacgcctggaagcc

SEQ ID NO: 4455206 - DNA, 25 bp, Homo sapien
ggatgattgaggagagccaccctag

SEQ ID NO: 4455207 - DNA, 25 bp, Homo sapien
cacaagaatacagatgcacacgttc

SEQ ID NO: 4455208 - DNA, 25 bp, Homo sapien
gcacacgttccattagccatcaagg

SEQ ID NO: 4455209 - DNA, 25 bp, Homo sapien
gccagaggtgggcatcccgttgcca

SEQ ID NO: 4455210 - DNA, 25 bp, Homo sapien
cctggcagccgtccctcttctccca

SEQ ID NO: 4455211 - DNA, 25 bp, Homo sapien
tcctttgcacccttctctaggttat

SEQ ID NO: 4455212 - DNA, 25 bp, Homo sapien
agaggtgggcatcccgttgccactg

SEQ ID NO: 4455213 - DNA, 25 bp, Homo sapien
ccaattgtggtgaaggggccaaaca

SEQ ID NO: 4455214 - DNA, 25 bp, Homo sapien
ggtgaaggggccaaacagatgggcc

SEQ ID NO: 4455215 - DNA, 25 bp, Homo sapien
caaaccaattgtggtgaaggggcca

SEQ ID NO: 4455216 - DNA, 25 bp, Homo sapien
aattgtggtgaaggggccaaacaga

SEQ ID NO: 4455217 - DNA, 25 bp, Homo sapien
atcgtgatgggccactcggtccaaa

SEQ ID NO: 4455218 - DNA, 25 bp, Homo sapien
tgtaaacatccaggggtgtgccagg

SEQ ID NO: 4455219 - DNA, 25 bp, Homo sapien
cttgttcaggtatcgtgatgggcca

SEQ ID NO: 4455220 - DNA, 25 bp, Homo sapien
ctcacaactgcttgttcaggtatcg

SEQ ID NO: 4455221 - DNA, 25 bp, Homo sapien
tgaaggctgcgtgcaccttgtcccc

SEQ ID NO: 4455222 - DNA, 25 bp, Homo sapien
ttgtcccctggacaggtctcctttc

SEQ ID NO: 4455223 - DNA, 25 bp, Homo sapien
cccttcttctagtggtagctctggc

SEQ ID NO: 4455224 - DNA, 25 bp, Homo sapien
gccataagacaggactggaccagat

SEQ ID NO: 4455225 - DNA, 25 bp, Homo sapien
gtgaggcctgcctcgtcggtggcct

SEQ ID NO: 4455226 - DNA, 25 bp, Homo sapien
gggtctgccggcaggttctggctgc

SEQ ID NO: 4455227 - DNA, 25 bp, Homo sapien
aggcctgcctcgtcggtggcctggg

SEQ ID NO: 4455228 - DNA, 25 bp, Homo sapien
gtctgccggcaggttctggctgcac

SEQ ID NO: 4455229 - DNA, 25 bp, Homo sapien
gggaataaaaggtcacctcagacac

SEQ ID NO: 4455230 - DNA, 25 bp, Homo sapien
taacgtctgctcctcttacatagaa

SEQ ID NO: 4455231 - DNA, 25 bp, Homo sapien
gatagtcatgaataataacgtctgc

SEQ ID NO: 4455232 - DNA, 25 bp, Homo sapien
ttaaaaagatggcatgcacctaggg

SEQ ID NO: 4455233 - DNA, 25 bp, Homo sapien
tctaaattatagtagcctcaactca

SEQ ID NO: 4455234 - DNA, 25 bp, Homo sapien
ctgattttatggactgaggactggt

SEQ ID NO: 4455235 - DNA, 25 bp, Homo sapien
tctatggtgaactgctgtaaatgac

SEQ ID NO: 4455236 - DNA, 25 bp, Homo sapien
gcactttaaagtctgatatttctcg

SEQ ID NO: 4455237 - DNA, 25 bp, Homo sapien
atgattacactatcaacgtctggga

SEQ ID NO: 4455238 - DNA, 25 bp, Homo sapien
cttcaaggtcgcctgctgtttgctg

SEQ ID NO: 4455239 - DNA, 25 bp, Homo sapien
ctatcaacgtctgggatgttctcaa

SEQ ID NO: 4455240 - DNA, 25 bp, Homo sapien
tgtttgctggatacaatgattacac

SEQ ID NO: 4455241 - DNA, 25 bp, Homo sapien
ttcacttccacaatgctctcaggca

SEQ ID NO: 4455242 - DNA, 25 bp, Homo sapien
gtccttcaaggcaatgaagtgtcag

SEQ ID NO: 4455243 - DNA, 25 bp, Homo sapien
tgaagtgtcagaaattcacttccac

SEQ ID NO: 4455244 - DNA, 25 bp, Homo sapien
cacttccacaatgctctcaggcatt

SEQ ID NO: 4455245 - DNA, 25 bp, Homo sapien
aaactgaagccagaagtaagtgctt

SEQ ID NO: 4455246 - DNA, 25 bp, Homo sapien
atcacgtcaccaaactgaagccaga

SEQ ID NO: 4455247 - DNA, 25 bp, Homo sapien
ctgaagccagaagtaagtgcttctt

SEQ ID NO: 4455248 - DNA, 25 bp, Homo sapien
tcatcacgtcaccaaactgaagcca

SEQ ID NO: 4455249 - DNA, 25 bp, Homo sapien
caatatctagtaagtgtaaatgcga

SEQ ID NO: 4455250 - DNA, 25 bp, Homo sapien
aataagcccctgtgtattaataaag

SEQ ID NO: 4455251 - DNA, 25 bp, Homo sapien
gatgtagtattttctcagggtatgc

SEQ ID NO: 4455252 - DNA, 25 bp, Homo sapien
tccctcagataccagaatcctacat

SEQ ID NO: 4455253 - DNA, 25 bp, Homo sapien
ccaaatttcagcctcggttcaggtt

SEQ ID NO: 4455254 - DNA, 25 bp, Homo sapien
cctcggttcaggttttgtgtgtcca

SEQ ID NO: 4455255 - DNA, 25 bp, Homo sapien
agccagtgggtgcaacaccagggcg

SEQ ID NO: 4455256 - DNA, 25 bp, Homo sapien
tcttgttggatgtatgcaggcctcc

SEQ ID NO: 4455257 - DNA, 25 bp, Homo sapien
ctcaaaataaactgtaagttactgc

SEQ ID NO: 4455258 - DNA, 25 bp, Homo sapien
tactgcaagtgttattaggaaagca

SEQ ID NO: 4455259 - DNA, 25 bp, Homo sapien
ttctttgatcaaacagtatggtatg

SEQ ID NO: 4455260 - DNA, 25 bp, Homo sapien
gagattgagggaatttgagcatcca

SEQ ID NO: 4455261 - DNA, 25 bp, Homo sapien
tatttgagcctaaccaggaatcttg

SEQ ID NO: 4455262 - DNA, 25 bp, Homo sapien
gatgttgggacttgcagtgtcacca

SEQ ID NO: 4455263 - DNA, 25 bp, Homo sapien
ttagccggagataaagggaagtcac

SEQ ID NO: 4455264 - DNA, 25 bp, Homo sapien
gcaggattggatcttggctccgctg

SEQ ID NO: 4455265 - DNA, 25 bp, Homo sapien
aacaccattgcactcggatcagcct

SEQ ID NO: 4455266 - DNA, 25 bp, Homo sapien
tgtaatcaattagtagtaaacacca

SEQ ID NO: 4455267 - DNA, 25 bp, Homo sapien
gtaatcaattagtagtaaacaccat

SEQ ID NO: 4455268 - DNA, 25 bp, Homo sapien
gtagtaaacaccattgcactcggat

SEQ ID NO: 4455269 - DNA, 25 bp, Homo sapien
cactttattgctcacctggagtcca

SEQ ID NO: 4455270 - DNA, 25 bp, Homo sapien
gctcacctggagtccagtagcgtga

SEQ ID NO: 4455271 - DNA, 25 bp, Homo sapien
gagtctcactttattgctcacctgg

SEQ ID NO: 4455272 - DNA, 25 bp, Homo sapien
atagagtctcactttattgctcacc

SEQ ID NO: 4455273 - DNA, 25 bp, Homo sapien
acttgccagctcctaatggaagtta

SEQ ID NO: 4455274 - DNA, 25 bp, Homo sapien
gccagctcctaatggaagttacagc

SEQ ID NO: 4455275 - DNA, 25 bp, Homo sapien
tgaaggtggaagagcgagagatgat

SEQ ID NO: 4455276 - DNA, 25 bp, Homo sapien
taatggaagttacagctgaaggtgg

SEQ ID NO: 4455277 - DNA, 25 bp, Homo sapien
gatcacttaagagaagtggatgacc

SEQ ID NO: 4455278 - DNA, 25 bp, Homo sapien
tgttctcctgccattcctaatcgat

SEQ ID NO: 4455279 - DNA, 25 bp, Homo sapien
cctaatcgatgccaccctttacatt

SEQ ID NO: 4455280 - DNA, 25 bp, Homo sapien
cctggatctagcgtgtgctgtgctt

SEQ ID NO: 4455281 - DNA, 25 bp, Homo sapien
ggtaaaatgggcgtcacactccctg

SEQ ID NO: 4455282 - DNA, 25 bp, Homo sapien
tgtgtgcgtcctcgggcaaatcacc

SEQ ID NO: 4455283 - DNA, 25 bp, Homo sapien
taagccacagtttgcccgctggtaa

SEQ ID NO: 4455284 - DNA, 25 bp, Homo sapien
agtcccgagttggaatcccggcttg

SEQ ID NO: 4455285 - DNA, 25 bp, Homo sapien
ctgcggccaagcctcgtagccgtct

SEQ ID NO: 4455286 - DNA, 25 bp, Homo sapien
gcctcgtagccgtctcctctcccgt

SEQ ID NO: 4455287 - DNA, 25 bp, Homo sapien
cacgggcccgcagcccgcaatcaag

SEQ ID NO: 4455288 - DNA, 25 bp, Homo sapien
caatcaagtcccacagagcggagat

SEQ ID NO: 4455289 - DNA, 25 bp, Homo sapien
ttccttgttgggggagcaccgtagc

SEQ ID NO: 4455290 - DNA, 25 bp, Homo sapien
cttgttgggggagcaccgtagctac

SEQ ID NO: 4455291 - DNA, 25 bp, Homo sapien
tccttgttgggggagcaccgtagct

SEQ ID NO: 4455292 - DNA, 25 bp, Homo sapien
tagatcaacaaacgaagagggtttc

SEQ ID NO: 4455293 - DNA, 25 bp, Homo sapien
gaaggcttgagttggatcatccaca

SEQ ID NO: 4455294 - DNA, 25 bp, Homo sapien
caaagtccagagcactagggagcca

SEQ ID NO: 4455295 - DNA, 25 bp, Homo sapien
aagtcgctaaacgtgcatcctggca

SEQ ID NO: 4455296 - DNA, 25 bp, Homo sapien
tcagaagtgagaggtccgagatgcc

SEQ ID NO: 4455297 - DNA, 25 bp, Homo sapien
aacttttctcagatagagaaggccc

SEQ ID NO: 4455298 - DNA, 25 bp, Homo sapien
ggacagcacccaagattctgcttgg

SEQ ID NO: 4455299 - DNA, 25 bp, Homo sapien
tgggagggagcaggtacagagaggt

SEQ ID NO: 4455300 - DNA, 25 bp, Homo sapien
gaaggcccgggacagcaagtggagg

SEQ ID NO: 4455301 - DNA, 25 bp, Homo sapien
tattaaagcttaattgccatgccgt

SEQ ID NO: 4455302 - DNA, 25 bp, Homo sapien
tgtcggaccctacttttgagaaatc

SEQ ID NO: 4455303 - DNA, 25 bp, Homo sapien
gataagcactcctagtctctggcct

SEQ ID NO: 4455304 - DNA, 25 bp, Homo sapien
aactggctattccttgtcccggcac

SEQ ID NO: 4455305 - DNA, 25 bp, Homo sapien
agcgaactctggtaccctctcggga

SEQ ID NO: 4455306 - DNA, 25 bp, Homo sapien
gagtatctggcacccttccctaaag

SEQ ID NO: 4455307 - DNA, 25 bp, Homo sapien
tgccaaggagatctacgaacgctgc

SEQ ID NO: 4455308 - DNA, 25 bp, Homo sapien
tcttggtttagccagctgtgggcac

SEQ ID NO: 4455309 - DNA, 25 bp, Homo sapien
tcctgaaacaaaccgaagagcgtcg

SEQ ID NO: 4455310 - DNA, 25 bp, Homo sapien
gaacgttccgcgtgtgtctcctggc

SEQ ID NO: 4455311 - DNA, 25 bp, Homo sapien
gaaaaacgtgctgcttcaaacctac

SEQ ID NO: 4455312 - DNA, 25 bp, Homo sapien
tctagcatagacgacacggacggct

SEQ ID NO: 4455313 - DNA, 25 bp, Homo sapien
aaagaatatccaaccgataataggt

SEQ ID NO: 4455314 - DNA, 25 bp, Homo sapien
tgtgattatgtgtaacattgtttaa

SEQ ID NO: 4455315 - DNA, 25 bp, Homo sapien
ggtaagaagagaatggatgaccaaa

SEQ ID NO: 4455316 - DNA, 25 bp, Homo sapien
tatcatcaatttattatcataatgg

SEQ ID NO: 4455317 - DNA, 25 bp, Homo sapien
taatgactcgtatccacaactgtag

SEQ ID NO: 4455318 - DNA, 25 bp, Homo sapien
tactatgactggtgaaccaacactg

SEQ ID NO: 4455319 - DNA, 25 bp, Homo sapien
cataatgcttcctaactagctagaa

SEQ ID NO: 4455320 - DNA, 25 bp, Homo sapien
ccacagtgatgtgtttactatgact

SEQ ID NO: 4455321 - DNA, 25 bp, Homo sapien
agaccaatttcttgggacatgggtt

SEQ ID NO: 4455322 - DNA, 25 bp, Homo sapien
ccaatttcttgggacatgggtttct

SEQ ID NO: 4455323 - DNA, 25 bp, Homo sapien
catcagcccaatctttgcacagtcc

SEQ ID NO: 4455324 - DNA, 25 bp, Homo sapien
atcagcccaatctttgcacagtcct

SEQ ID NO: 4455325 - DNA, 25 bp, Homo sapien
tccttcagaagatcagtcatcaact

SEQ ID NO: 4455326 - DNA, 25 bp, Homo sapien
tcagttgcccctgctggccttcctg

SEQ ID NO: 4455327 - DNA, 25 bp, Homo sapien
ttgcccctgctggccttcctggtgc

SEQ ID NO: 4455328 - DNA, 25 bp, Homo sapien
ccctgctggccttcctggtgcttac

SEQ ID NO: 4455329 - DNA, 25 bp, Homo sapien
gcccctgctggccttcctggtgctt

SEQ ID NO: 4455330 - DNA, 25 bp, Homo sapien
ccgttgcctgctgtttgactgtgca

SEQ ID NO: 4455331 - DNA, 25 bp, Homo sapien
ctatcccgttgcctgctgtttgact

SEQ ID NO: 4455332 - DNA, 25 bp, Homo sapien
aagaccagtgtgtagtgcctgtcaa

SEQ ID NO: 4455333 - DNA, 25 bp, Homo sapien
taagaaaatgcaacgtggtacaggc

SEQ ID NO: 4455334 - DNA, 25 bp, Homo sapien
tgtacatgcttttagaaggtcctac

SEQ ID NO: 4455335 - DNA, 25 bp, Homo sapien
cagaatctaacagcatccgataggc

SEQ ID NO: 4455336 - DNA, 25 bp, Homo sapien
tatgaagcacaacacatctcgccag

SEQ ID NO: 4455337 - DNA, 25 bp, Homo sapien
taactttgccttatgactctagggc

SEQ ID NO: 4455338 - DNA, 25 bp, Homo sapien
caattttgacctggctgagtatcgg

SEQ ID NO: 4455339 - DNA, 25 bp, Homo sapien
gcatttgagaatgtcagtcctggca

SEQ ID NO: 4455340 - DNA, 25 bp, Homo sapien
cactggcaagttcagagggtctggt

SEQ ID NO: 4455341 - DNA, 25 bp, Homo sapien
tctgaagggtcaagacactggcaag

SEQ ID NO: 4455342 - DNA, 25 bp, Homo sapien
ccttgttgctggatcctctgaaggg

SEQ ID NO: 4455343 - DNA, 25 bp, Homo sapien
cctagaagaatggatcattgggctc

SEQ ID NO: 4455344 - DNA, 25 bp, Homo sapien
taatcttaagccattgtcaatcaga

SEQ ID NO: 4455345 - DNA, 25 bp, Homo sapien
cagacagcagagtatttgtttgaaa

SEQ ID NO: 4455346 - DNA, 25 bp, Homo sapien
cactttgcaccaattatatcatgag

SEQ ID NO: 4455347 - DNA, 25 bp, Homo sapien
tatcatgagatgataatcagacagc

SEQ ID NO: 4455348 - DNA, 25 bp, Homo sapien
cagtctttggaatagccttcaaacc

SEQ ID NO: 4455349 - DNA, 25 bp, Homo sapien
ccagcctaaagccaaattttaagct

SEQ ID NO: 4455350 - DNA, 25 bp, Homo sapien
taagcttatttcaatgttctcactg

SEQ ID NO: 4455351 - DNA, 25 bp, Homo sapien
ctcactgcttaagggattttgagac

SEQ ID NO: 4455352 - DNA, 25 bp, Homo sapien
taatgcttcaaacctttatgaccaa

SEQ ID NO: 4455353 - DNA, 25 bp, Homo sapien
tatttttgagaacagagatctacta

SEQ ID NO: 4455354 - DNA, 25 bp, Homo sapien
gagaacagagatctactaatgcttc

SEQ ID NO: 4455355 - DNA, 25 bp, Homo sapien
gagatctactaatgcttcaaacctt

SEQ ID NO: 4455356 - DNA, 25 bp, Homo sapien
tattaactgtcatacattgttcttg

SEQ ID NO: 4455357 - DNA, 25 bp, Homo sapien
cagagagataactggtattaactgt

SEQ ID NO: 4455358 - DNA, 25 bp, Homo sapien
tggtaagtaaaaagtcacataatca

SEQ ID NO: 4455359 - DNA, 25 bp, Homo sapien
aaagcatccatcatacccagagaga

SEQ ID NO: 4455360 - DNA, 25 bp, Homo sapien
agctatcttcatgagcctgctgtgc

SEQ ID NO: 4455361 - DNA, 25 bp, Homo sapien
gaaatcctgacatacttgttggtga

SEQ ID NO: 4455362 - DNA, 25 bp, Homo sapien
gagctgcctcacttacgaaatcctg

SEQ ID NO: 4455363 - DNA, 25 bp, Homo sapien
tgctccataatctcagagtccgctt

SEQ ID NO: 4455364 - DNA, 25 bp, Homo sapien
gctgctcaaagattataagccagga

SEQ ID NO: 4455365 - DNA, 25 bp, Homo sapien
gagctgctcaaagattataagccag

SEQ ID NO: 4455366 - DNA, 25 bp, Homo sapien
ctgctcaaagattataagccaggag

SEQ ID NO: 4455367 - DNA, 25 bp, Homo sapien
cagagctgctcaaagattataagcc

SEQ ID NO: 4455368 - DNA, 25 bp, Homo sapien
tatcttagatcacaaagacaagaca

SEQ ID NO: 4455369 - DNA, 25 bp, Homo sapien
tctcttaacgggttcctgctgctat

SEQ ID NO: 4455370 - DNA, 25 bp, Homo sapien
tatcttccagacattatactagtta

SEQ ID NO: 4455371 - DNA, 25 bp, Homo sapien
taataagttatgtcaaggagatgac

SEQ ID NO: 4455372 - DNA, 25 bp, Homo sapien
aattaagtggcccacagattgtcct

SEQ ID NO: 4455373 - DNA, 25 bp, Homo sapien
tatctgagagttctccatgtacgaa

SEQ ID NO: 4455374 - DNA, 25 bp, Homo sapien
gttctccatgtacgaattgagggcc

SEQ ID NO: 4455375 - DNA, 25 bp, Homo sapien
cagattgtccttggaccttttgttg

SEQ ID NO: 4455376 - DNA, 25 bp, Homo sapien
gtgggcggggcactgcttcaaatac

SEQ ID NO: 4455377 - DNA, 25 bp, Homo sapien
tctgtcaggtaatcattgagcacct

SEQ ID NO: 4455378 - DNA, 25 bp, Homo sapien
tgggcggggcactgcttcaaatact

SEQ ID NO: 4455379 - DNA, 25 bp, Homo sapien
tagctcttgtctgtcaggtaatcat

SEQ ID NO: 4455380 - DNA, 25 bp, Homo sapien
tcctcatcatcagatccagagagat

SEQ ID NO: 4455381 - DNA, 25 bp, Homo sapien
tcctgtagtgtcttccacatctgca

SEQ ID NO: 4455382 - DNA, 25 bp, Homo sapien
ttcctgtagtgtcttccacatctgc

SEQ ID NO: 4455383 - DNA, 25 bp, Homo sapien
catcatcagatccagagagatcaat

SEQ ID NO: 4455384 - DNA, 25 bp, Homo sapien
cgccctctaatttcgccatatctgt

SEQ ID NO: 4455385 - DNA, 25 bp, Homo sapien
tgaatgcttctgacgccctctaatt

SEQ ID NO: 4455386 - DNA, 25 bp, Homo sapien
catcatcccaagatttcacatctaa

SEQ ID NO: 4455387 - DNA, 25 bp, Homo sapien
caagatttcacatctaataagatgg

SEQ ID NO: 4455388 - DNA, 25 bp, Homo sapien
cctcaactacacactgtatttgaag

SEQ ID NO: 4455389 - DNA, 25 bp, Homo sapien
gctgcacatagtcctcaaacgcagt

SEQ ID NO: 4455390 - DNA, 25 bp, Homo sapien
tgggctgcacatagtcctcaaacgc

SEQ ID NO: 4455391 - DNA, 25 bp, Homo sapien
catgggctgcacatagtcctcaaac

SEQ ID NO: 4455392 - DNA, 25 bp, Homo sapien
tatttaaatgccatgatccaggatg

SEQ ID NO: 4455393 - DNA, 25 bp, Homo sapien
tttaaatgccatgatccaggatgga

SEQ ID NO: 4455394 - DNA, 25 bp, Homo sapien
ttatttaaatgccatgatccaggat

SEQ ID NO: 4455395 - DNA, 25 bp, Homo sapien
taaatgccatgatccaggatggatt

SEQ ID NO: 4455396 - DNA, 25 bp, Homo sapien
gcgagatggtgaaggcggcggaagg

SEQ ID NO: 4455397 - DNA, 25 bp, Homo sapien
agcgcctcagaaccctcggccctac

SEQ ID NO: 4455398 - DNA, 25 bp, Homo sapien
cagagcgggcttcggagtggaaagg

SEQ ID NO: 4455399 - DNA, 25 bp, Homo sapien
caccttcctctttcgggcgagatgg

SEQ ID NO: 4455400 - DNA, 25 bp, Homo sapien
gccctcgccgccagctgtcaggctg

SEQ ID NO: 4455401 - DNA, 25 bp, Homo sapien
cgcggccggcgtcgaggactggggc

SEQ ID NO: 4455402 - DNA, 25 bp, Homo sapien
gcggccggcgtcgaggactggggct

SEQ ID NO: 4455403 - DNA, 25 bp, Homo sapien
ctcgccgccagctgtcaggctgggg

SEQ ID NO: 4455404 - DNA, 25 bp, Homo sapien
tgcgtcggagctctacacaaaggta

SEQ ID NO: 4455405 - DNA, 25 bp, Homo sapien
atggctgcgtcggagctctacacaa

SEQ ID NO: 4455406 - DNA, 25 bp, Homo sapien
cgccatggctgcgtcggagctctac

SEQ ID NO: 4455407 - DNA, 25 bp, Homo sapien
ggagctctacacaaaggtaaggcac

SEQ ID NO: 4455408 - DNA, 25 bp, Homo sapien
cagcgtgagcccgagagagcccaga

SEQ ID NO: 4455409 - DNA, 25 bp, Homo sapien
gatgatgctctgtgctcgtagccga

SEQ ID NO: 4455410 - DNA, 25 bp, Homo sapien
tgctctgtgctcgtagccgatggga

SEQ ID NO: 4455411 - DNA, 25 bp, Homo sapien
ctcgtagccgatgggaggcagcgtg

SEQ ID NO: 4455412 - DNA, 25 bp, Homo sapien
aacagcccgtgccatggctgcgcta

SEQ ID NO: 4455413 - DNA, 25 bp, Homo sapien
ctggaggctcccatcgtttattcgg

SEQ ID NO: 4455414 - DNA, 25 bp, Homo sapien
tttattcggacacagtaacagcccg

SEQ ID NO: 4455415 - DNA, 25 bp, Homo sapien
cccatcgtttattcggacacagtaa

SEQ ID NO: 4455416 - DNA, 25 bp, Homo sapien
tgggttattctacagtctttcaaga

SEQ ID NO: 4455417 - DNA, 25 bp, Homo sapien
cactgctgctgacaaggctcttcta

SEQ ID NO: 4455418 - DNA, 25 bp, Homo sapien
tgcattgcccatctcccgggtcact

SEQ ID NO: 4455419 - DNA, 25 bp, Homo sapien
ggctcttctacagtcctgggttatt

SEQ ID NO: 4455420 - DNA, 25 bp, Homo sapien
tctgtagcttagaagcggcccttgc

SEQ ID NO: 4455421 - DNA, 25 bp, Homo sapien
tatcgggagacgactttgctgcaga

SEQ ID NO: 4455422 - DNA, 25 bp, Homo sapien
ctgcagacatcgaggtgctcggaat

SEQ ID NO: 4455423 - DNA, 25 bp, Homo sapien
gcccttgccctctggtatcgggaga

SEQ ID NO: 4455424 - DNA, 25 bp, Homo sapien
gcacctgggctgtccccgggctatc

SEQ ID NO: 4455425 - DNA, 25 bp, Homo sapien
ctgggctgtccccgggctatctcgt

SEQ ID NO: 4455426 - DNA, 25 bp, Homo sapien
gctgtccccgggctatctcgtttca

SEQ ID NO: 4455427 - DNA, 25 bp, Homo sapien
tgtccccgggctatctcgtttcaaa

SEQ ID NO: 4455428 - DNA, 25 bp, Homo sapien
gacaatcaccagcagcgaacaggac

SEQ ID NO: 4455429 - DNA, 25 bp, Homo sapien
agggtagttgcatctccgcaaacgc

SEQ ID NO: 4455430 - DNA, 25 bp, Homo sapien
gttgcatctccgcaaacgcacaggt

SEQ ID NO: 4455431 - DNA, 25 bp, Homo sapien
aggtgccaccatggagccgacaatc

SEQ ID NO: 4455432 - DNA, 25 bp, Homo sapien
gcccttttgatgttgagttaaactg

SEQ ID NO: 4455433 - DNA, 25 bp, Homo sapien
ttttccatgtaagtactccgtcatt

SEQ ID NO: 4455434 - DNA, 25 bp, Homo sapien
gctggatgttcaaggatcaccgtga

SEQ ID NO: 4455435 - DNA, 25 bp, Homo sapien
actccgtcattttcaggtggcaacc

SEQ ID NO: 4455436 - DNA, 25 bp, Homo sapien
aaacgacaatgagggtggggagaag

SEQ ID NO: 4455437 - DNA, 25 bp, Homo sapien
tattcaaccagaaacgacaatgagg

SEQ ID NO: 4455438 - DNA, 25 bp, Homo sapien
caaccagaaacgacaatgagggtgg

SEQ ID NO: 4455439 - DNA, 25 bp, Homo sapien
ttcaaccagaaacgacaatgagggt

SEQ ID NO: 4455440 - DNA, 25 bp, Homo sapien
ggttaccaccttgcacacgacatga

SEQ ID NO: 4455441 - DNA, 25 bp, Homo sapien
gaagaaactgcaaggcgtaggagcc

SEQ ID NO: 4455442 - DNA, 25 bp, Homo sapien
gagaggtctgagttccacggagtaa

SEQ ID NO: 4455443 - DNA, 25 bp, Homo sapien
gactggccccgttcctttcagtgaa

SEQ ID NO: 4455444 - DNA, 25 bp, Homo sapien
tggaccaaggttgcctcaggtaaca

SEQ ID NO: 4455445 - DNA, 25 bp, Homo sapien
gaacacttcgcctgtactgaaaggg

SEQ ID NO: 4455446 - DNA, 25 bp, Homo sapien
tttgggtgatcagaagcaggtagcc

SEQ ID NO: 4455447 - DNA, 25 bp, Homo sapien
tgcccggccggcttatgatttaaaa

SEQ ID NO: 4455448 - DNA, 25 bp, Homo sapien
tgacatggttctcagcaagttggaa

SEQ ID NO: 4455449 - DNA, 25 bp, Homo sapien
cttgtttcgatgagtggaagcggca

SEQ ID NO: 4455450 - DNA, 25 bp, Homo sapien
gaagcggcatgtttgtagcatacaa

SEQ ID NO: 4455451 - DNA, 25 bp, Homo sapien
tcttgaacgcagcatctgacatggt

SEQ ID NO: 4455452 - DNA, 25 bp, Homo sapien
aacggttcggaatactggctcaaga

SEQ ID NO: 4455453 - DNA, 25 bp, Homo sapien
tgtcacctgagctctagtgcagtag

SEQ ID NO: 4455454 - DNA, 25 bp, Homo sapien
gaacttagcagactttactgggaca

SEQ ID NO: 4455455 - DNA, 25 bp, Homo sapien
tttgacttgcagagagcctcccgtt

SEQ ID NO: 4455456 - DNA, 25 bp, Homo sapien
aaaagtagataatgtgccaaccaga

SEQ ID NO: 4455457 - DNA, 25 bp, Homo sapien
acaatctcgggcttatagaatacca

SEQ ID NO: 4455458 - DNA, 25 bp, Homo sapien
gccaaccagaagcacaagagttcct

SEQ ID NO: 4455459 - DNA, 25 bp, Homo sapien
tgactctagtgcttaacagctgccg

SEQ ID NO: 4455460 - DNA, 25 bp, Homo sapien
aggggcgactgctgtctgctgttgg

SEQ ID NO: 4455461 - DNA, 25 bp, Homo sapien
gcgactgctgtctgctgttggtggt

SEQ ID NO: 4455462 - DNA, 25 bp, Homo sapien
gggcgactgctgtctgctgttggtg

SEQ ID NO: 4455463 - DNA, 25 bp, Homo sapien
tgctgtctgctgttggtggtggcat

SEQ ID NO: 4455464 - DNA, 25 bp, Homo sapien
ttatagtttactggtaggttgcctg

SEQ ID NO: 4455465 - DNA, 25 bp, Homo sapien
aagaattaaggtagatagctgggcc

SEQ ID NO: 4455466 - DNA, 25 bp, Homo sapien
tgcctgttgccgctaaagaattaag

SEQ ID NO: 4455467 - DNA, 25 bp, Homo sapien
aattaaggtagatagctgggccttg

SEQ ID NO: 4455468 - DNA, 25 bp, Homo sapien
taaaggccgaatactggtgcttgcc

SEQ ID NO: 4455469 - DNA, 25 bp, Homo sapien
taaagtccggccttcagtgtcttca

SEQ ID NO: 4455470 - DNA, 25 bp, Homo sapien
ggtcagtgagtaaagtccggccttc

SEQ ID NO: 4455471 - DNA, 25 bp, Homo sapien
agtgtcttcacctgtaaaggccgaa

SEQ ID NO: 4455472 - DNA, 25 bp, Homo sapien
ggccaggattggcatttcagggcca

SEQ ID NO: 4455473 - DNA, 25 bp, Homo sapien
tgagcgtgcggttcactccaaaagc

SEQ ID NO: 4455474 - DNA, 25 bp, Homo sapien
tctccaactacttgtattgtgagcg

SEQ ID NO: 4455475 - DNA, 25 bp, Homo sapien
aaaagcagtgcctcgtgtgcgggcc

SEQ ID NO: 4455476 - DNA, 25 bp, Homo sapien
tggtgtttgctacactcagatgata

SEQ ID NO: 4455477 - DNA, 25 bp, Homo sapien
cccaggatttttggtgttcagtatc

SEQ ID NO: 4455478 - DNA, 25 bp, Homo sapien
attcagttaacaatctctgggcttt

SEQ ID NO: 4455479 - DNA, 25 bp, Homo sapien
tcatagaaatcaccattcatcccag

SEQ ID NO: 4455480 - DNA, 25 bp, Homo sapien
gatagcggtgctgcatatgaactca

SEQ ID NO: 4455481 - DNA, 25 bp, Homo sapien
cgtacggctcctgttctctagaaag

SEQ ID NO: 4455482 - DNA, 25 bp, Homo sapien
cagtgcaatgtggactaagctgctt

SEQ ID NO: 4455483 - DNA, 25 bp, Homo sapien
gatctacctccatagagacgtacgg

SEQ ID NO: 4455484 - DNA, 25 bp, Homo sapien
atatgatttacgagatatgccagcc

SEQ ID NO: 4455485 - DNA, 25 bp, Homo sapien
ttatttaatcctaataagactgtgg

SEQ ID NO: 4455486 - DNA, 25 bp, Homo sapien
ctgtggtgaagatgtttgttgtgat

SEQ ID NO: 4455487 - DNA, 25 bp, Homo sapien
atcatcagacattcctacgacaaag

SEQ ID NO: 4455488 - DNA, 25 bp, Homo sapien
ttctttttgcaagtgacccagttcc

SEQ ID NO: 4455489 - DNA, 25 bp, Homo sapien
caagtgacccagttccagtctttcc

SEQ ID NO: 4455490 - DNA, 25 bp, Homo sapien
cagtctttcctgctatgaattaatt

SEQ ID NO: 4455491 - DNA, 25 bp, Homo sapien
tttttgcaagtgacccagttccagt

SEQ ID NO: 4455492 - DNA, 25 bp, Homo sapien
tagctaggactctacgcttgtacca

SEQ ID NO: 4455493 - DNA, 25 bp, Homo sapien
cacaggcttttcgtaaactcctggc

SEQ ID NO: 4455494 - DNA, 25 bp, Homo sapien
ggttgaagcattcatcccacctcag

SEQ ID NO: 4455495 - DNA, 25 bp, Homo sapien
agtgtagctgcgtgatcatacctca

SEQ ID NO: 4455496 - DNA, 25 bp, Homo sapien
gttctgagactatccaacccatagg

SEQ ID NO: 4455497 - DNA, 25 bp, Homo sapien
gatgttctgagactatccaacccat

SEQ ID NO: 4455498 - DNA, 25 bp, Homo sapien
gagactatccaacccataggtctta

SEQ ID NO: 4455499 - DNA, 25 bp, Homo sapien
tagagatgttctgagactatccaac

SEQ ID NO: 4455500 - DNA, 25 bp, Homo sapien
tgtagatacacagtttgagcatccc

SEQ ID NO: 4455501 - DNA, 25 bp, Homo sapien
gggttcatggaatatatcccctgag

SEQ ID NO: 4455502 - DNA, 25 bp, Homo sapien
tttgtactacacgtggtttcaggca

SEQ ID NO: 4455503 - DNA, 25 bp, Homo sapien
taaccagtaaagtatatatgatgca

SEQ ID NO: 4455504 - DNA, 25 bp, Homo sapien
tcagataagaggtttgtggtaaatg

SEQ ID NO: 4455505 - DNA, 25 bp, Homo sapien
agaggtttgtggtaaatggtttcat

SEQ ID NO: 4455506 - DNA, 25 bp, Homo sapien
tgtggtaaatggtttcattctccaa

SEQ ID NO: 4455507 - DNA, 25 bp, Homo sapien
cttcagataagaggtttgtggtaaa

SEQ ID NO: 4455508 - DNA, 25 bp, Homo sapien
gtggaacatggtctaccctccccat

SEQ ID NO: 4455509 - DNA, 25 bp, Homo sapien
tccccatcattgctccttcagatga

SEQ ID NO: 4455510 - DNA, 25 bp, Homo sapien
tggcaagctatcattctcatacact

SEQ ID NO: 4455511 - DNA, 25 bp, Homo sapien
acagttttctgctttcgtggaacat

SEQ ID NO: 4455512 - DNA, 25 bp, Homo sapien
gagtcactagctataatttttggga

SEQ ID NO: 4455513 - DNA, 25 bp, Homo sapien
tggaatattctcctaatgcatgaag

SEQ ID NO: 4455514 - DNA, 25 bp, Homo sapien
tttcatggtacgtctttataaggcc

SEQ ID NO: 4455515 - DNA, 25 bp, Homo sapien
tgggaaccaccgttaaatctgaaga

SEQ ID NO: 4455516 - DNA, 25 bp, Homo sapien
gaatgattgctgtacgtcagcatct

SEQ ID NO: 4455517 - DNA, 25 bp, Homo sapien
gattgctgtacgtcagcatcttcta

SEQ ID NO: 4455518 - DNA, 25 bp, Homo sapien
atgattgctgtacgtcagcatcttc

SEQ ID NO: 4455519 - DNA, 25 bp, Homo sapien
ttgctgtacgtcagcatcttctact

SEQ ID NO: 4455520 - DNA, 25 bp, Homo sapien
attgctaggaatctcatgtaagtgg

SEQ ID NO: 4455521 - DNA, 25 bp, Homo sapien
aatgtatggcttaatttatccctga

SEQ ID NO: 4455522 - DNA, 25 bp, Homo sapien
caagtcagtgggtaatcattgcagc

SEQ ID NO: 4455523 - DNA, 25 bp, Homo sapien
ttatccctgaactgacctaacatca

SEQ ID NO: 4455524 - DNA, 25 bp, Homo sapien
cctgtatcagcctcctaaagtctgg

SEQ ID NO: 4455525 - DNA, 25 bp, Homo sapien
gtatcagcctcctaaagtctggaat

SEQ ID NO: 4455526 - DNA, 25 bp, Homo sapien
ctcctaaagtctggaattacaagca

SEQ ID NO: 4455527 - DNA, 25 bp, Homo sapien
tcagcctggtcttaaactcatgtcc

SEQ ID NO: 4455528 - DNA, 25 bp, Homo sapien
aaacaactctccagcggggagaggg

SEQ ID NO: 4455529 - DNA, 25 bp, Homo sapien
cagacgcggcgctcggtgcggcggg

SEQ ID NO: 4455530 - DNA, 25 bp, Homo sapien
ccatgaaaacaactctccagcgggg

SEQ ID NO: 4455531 - DNA, 25 bp, Homo sapien
gcagacgcggcgctcggtgcggcgg

SEQ ID NO: 4455532 - DNA, 25 bp, Homo sapien
ggtaaggttcctgccagctatcttg

SEQ ID NO: 4455533 - DNA, 25 bp, Homo sapien
tcatatacggctttgaaaccctagg

SEQ ID NO: 4455534 - DNA, 25 bp, Homo sapien
cagagcaccttagagtgaattgcca

SEQ ID NO: 4455535 - DNA, 25 bp, Homo sapien
gctccttgaaagtagtgaccctatc

SEQ ID NO: 4455536 - DNA, 25 bp, Homo sapien
acttgccagcctatagagggttgcc

SEQ ID NO: 4455537 - DNA, 25 bp, Homo sapien
cacaaagaatacgattggccaatca

SEQ ID NO: 4455538 - DNA, 25 bp, Homo sapien
tagcttttggcttaggagcacttgg

SEQ ID NO: 4455539 - DNA, 25 bp, Homo sapien
gcactgagcaactttgtaggccact

SEQ ID NO: 4455540 - DNA, 25 bp, Homo sapien
gattcattcatggagccttaaaaag

SEQ ID NO: 4455541 - DNA, 25 bp, Homo sapien
agattcattcatggagccttaaaaa

SEQ ID NO: 4455542 - DNA, 25 bp, Homo sapien
aaaaatcttaacaggtatacagtca

SEQ ID NO: 4455543 - DNA, 25 bp, Homo sapien
atcttaacaggtatacagtcaagtt

SEQ ID NO: 4455544 - DNA, 25 bp, Homo sapien
caagtttcaagtatcagaaatgttc

SEQ ID NO: 4455545 - DNA, 25 bp, Homo sapien
ttcaagtttcaagtatcagaaatgt

SEQ ID NO: 4455546 - DNA, 25 bp, Homo sapien
tattttcaagtttcaagtatcagaa

SEQ ID NO: 4455547 - DNA, 25 bp, Homo sapien
agtttcaagtatcagaaatgttcag

SEQ ID NO: 4455548 - DNA, 25 bp, Homo sapien
ttcttcctccactgatggtcaatct

SEQ ID NO: 4455549 - DNA, 25 bp, Homo sapien
atggtcaatcttttcagttaatttc

SEQ ID NO: 4455550 - DNA, 25 bp, Homo sapien
ccactgatggtcaatcttttcagtt

SEQ ID NO: 4455551 - DNA, 25 bp, Homo sapien
ttcctccactgatggtcaatctttt

SEQ ID NO: 4455552 - DNA, 25 bp, Homo sapien
tcctgaagtcccggaaaaccatctc

SEQ ID NO: 4455553 - DNA, 25 bp, Homo sapien
tactctcctttcctgaagtcccgga

SEQ ID NO: 4455554 - DNA, 25 bp, Homo sapien
ctgaagtcccggaaaaccatctcca

SEQ ID NO: 4455555 - DNA, 25 bp, Homo sapien
cattctacgtttcatagaaggctgt

SEQ ID NO: 4455556 - DNA, 25 bp, Homo sapien
attctacgtttcatagaaggctgta

SEQ ID NO: 4455557 - DNA, 25 bp, Homo sapien
tcattctacgtttcatagaaggctg

SEQ ID NO: 4455558 - DNA, 25 bp, Homo sapien
tgagtacttgggccagcttcaaagg

SEQ ID NO: 4455559 - DNA, 25 bp, Homo sapien
caaaggaggtgcagaattcagaagg

SEQ ID NO: 4455560 - DNA, 25 bp, Homo sapien
ggccagcttcaaaggaggtgcagaa

SEQ ID NO: 4455561 - DNA, 25 bp, Homo sapien
gcttcaaaggaggtgcagaattcag

SEQ ID NO: 4455562 - DNA, 25 bp, Homo sapien
gaaggatcctggtactcagggaagc

SEQ ID NO: 4455563 - DNA, 25 bp, Homo sapien
agaagggaaggatcctggtactcag

SEQ ID NO: 4455564 - DNA, 25 bp, Homo sapien
gggaaggatcctggtactcagggaa

SEQ ID NO: 4455565 - DNA, 25 bp, Homo sapien
agagaagggaaggatcctggtactc

SEQ ID NO: 4455566 - DNA, 25 bp, Homo sapien
tgaaccaggtacaggctaaaatgcc

SEQ ID NO: 4455567 - DNA, 25 bp, Homo sapien
ccaggtacaggctaaaatgccacga

SEQ ID NO: 4455568 - DNA, 25 bp, Homo sapien
catgccgtagaatcaagtgttttcc

SEQ ID NO: 4455569 - DNA, 25 bp, Homo sapien
cattctctctatgagcgttattgtc

SEQ ID NO: 4455570 - DNA, 25 bp, Homo sapien
gcaactgaatttgtgactccattcc

SEQ ID NO: 4455571 - DNA, 25 bp, Homo sapien
tcctcacagcctgcttttggctcat

SEQ ID NO: 4455572 - DNA, 25 bp, Homo sapien
attcctcacagcctgcttttggctc

SEQ ID NO: 4455573 - DNA, 25 bp, Homo sapien
ccattcctcacagcctgcttttggc

SEQ ID NO: 4455574 - DNA, 25 bp, Homo sapien
tctagtccaaatcttccagcccagg

SEQ ID NO: 4455575 - DNA, 25 bp, Homo sapien
gaggcagttccaatgggagctgttc

SEQ ID NO: 4455576 - DNA, 25 bp, Homo sapien
tggagcgcaccgataatagttggtt

SEQ ID NO: 4455577 - DNA, 25 bp, Homo sapien
taagggcagctgtctctataggaac

SEQ ID NO: 4455578 - DNA, 25 bp, Homo sapien
gatacttggccctacctgtgatgag

SEQ ID NO: 4455579 - DNA, 25 bp, Homo sapien
cacagaattctcaactgacagtggc

SEQ ID NO: 4455580 - DNA, 25 bp, Homo sapien
tattttgctgaaagaagttgccctc

SEQ ID NO: 4455581 - DNA, 25 bp, Homo sapien
tttctgcactagagatgatccctgc

SEQ ID NO: 4455582 - DNA, 25 bp, Homo sapien
gaatgtactccacgcctctctgagt

SEQ ID NO: 4455583 - DNA, 25 bp, Homo sapien
ggtgaatgtactccacgcctctctg

SEQ ID NO: 4455584 - DNA, 25 bp, Homo sapien
tccacgcctctctgagtttgtctct

SEQ ID NO: 4455585 - DNA, 25 bp, Homo sapien
tgtactccacgcctctctgagtttg

SEQ ID NO: 4455586 - DNA, 25 bp, Homo sapien
gggtttattttcttggcagaactgc

SEQ ID NO: 4455587 - DNA, 25 bp, Homo sapien
gtttattttcttggcagaactgctc

SEQ ID NO: 4455588 - DNA, 25 bp, Homo sapien
tgatttggggtttattttcttggca

SEQ ID NO: 4455589 - DNA, 25 bp, Homo sapien
tttattttcttggcagaactgctct

SEQ ID NO: 4455590 - DNA, 25 bp, Homo sapien
caaagtgttaaaccgctgttgacct

SEQ ID NO: 4455591 - DNA, 25 bp, Homo sapien
ggcaggccgtgcataacttttacca

SEQ ID NO: 4455592 - DNA, 25 bp, Homo sapien
gacgagtgccttgcttgaaccaaag

SEQ ID NO: 4455593 - DNA, 25 bp, Homo sapien
tttgtaaactcctaggacgagtgcc

SEQ ID NO: 4455594 - DNA, 25 bp, Homo sapien
ttttgagacatgtttggccttctgg

SEQ ID NO: 4455595 - DNA, 25 bp, Homo sapien
attactgtggtgtggttagctttac

SEQ ID NO: 4455596 - DNA, 25 bp, Homo sapien
gaggctgttttgagacatgtttggc

SEQ ID NO: 4455597 - DNA, 25 bp, Homo sapien
tagggtgcattcaaacaccagaggc

SEQ ID NO: 4455598 - DNA, 25 bp, Homo sapien
tgctaccccaggtgaatgaccgtgg

SEQ ID NO: 4455599 - DNA, 25 bp, Homo sapien
gaattgagtattccagtccctggat

SEQ ID NO: 4455600 - DNA, 25 bp, Homo sapien
taaatgaacatgtcactcactgtgc

SEQ ID NO: 4455601 - DNA, 25 bp, Homo sapien
ggagttgtgacgtctggacacccca

SEQ ID NO: 4455602 - DNA, 25 bp, Homo sapien
tactgcccgttaggttgatgccgcc

SEQ ID NO: 4455603 - DNA, 25 bp, Homo sapien
gctctgagggagttggacatttaat

SEQ ID NO: 4455604 - DNA, 25 bp, Homo sapien
ctggctcaggatgtctataactcga

SEQ ID NO: 4455605 - DNA, 25 bp, Homo sapien
tgtctataactcgaggctctgaggg

SEQ ID NO: 4455606 - DNA, 25 bp, Homo sapien
tacagtgcttgaggtcccagggcag

SEQ ID NO: 4455607 - DNA, 25 bp, Homo sapien
ccaggttctggtattgtaacgtcta

SEQ ID NO: 4455608 - DNA, 25 bp, Homo sapien
tattgtataagacattaatcgacag

SEQ ID NO: 4455609 - DNA, 25 bp, Homo sapien
gacattaatcgacagtctccaccaa

SEQ ID NO: 4455610 - DNA, 25 bp, Homo sapien
gtggggatcacatgataaggtttta

SEQ ID NO: 4455611 - DNA, 25 bp, Homo sapien
atcacatgataaggttttatggagg

SEQ ID NO: 4455612 - DNA, 25 bp, Homo sapien
catgataaggttttatggaggtgtt

SEQ ID NO: 4455613 - DNA, 25 bp, Homo sapien
gggatcacatgataaggttttatgg

SEQ ID NO: 4455614 - DNA, 25 bp, Homo sapien
gacggatctggctgacaactggcct

SEQ ID NO: 4455615 - DNA, 25 bp, Homo sapien
tcctggaaggccaaactgcagtcct

SEQ ID NO: 4455616 - DNA, 25 bp, Homo sapien
caccttgggtgcaagttctctgagc

SEQ ID NO: 4455617 - DNA, 25 bp, Homo sapien
gcttggctgaccaactgctgctgtt

SEQ ID NO: 4455618 - DNA, 25 bp, Homo sapien
caagctgttagcaaggatatgggtc

SEQ ID NO: 4455619 - DNA, 25 bp, Homo sapien
tagccactactggtggaaacgaaag

SEQ ID NO: 4455620 - DNA, 25 bp, Homo sapien
tatgggtcattaggaactcttagcc

SEQ ID NO: 4455621 - DNA, 25 bp, Homo sapien
caaagtgctgcagcttgagattcca

SEQ ID NO: 4455622 - DNA, 25 bp, Homo sapien
tgatgactatgtatctatccatggg

SEQ ID NO: 4455623 - DNA, 25 bp, Homo sapien
ggtctcaacaaagtgtaagcctcag

SEQ ID NO: 4455624 - DNA, 25 bp, Homo sapien
gattgattgccttctatgatgacta

SEQ ID NO: 4455625 - DNA, 25 bp, Homo sapien
gattaagaataaagtgccccagagg

SEQ ID NO: 4455626 - DNA, 25 bp, Homo sapien
ttcctttgcatatgccgccacggga

SEQ ID NO: 4455627 - DNA, 25 bp, Homo sapien
cagaatcgacggtttctgaaatcac

SEQ ID NO: 4455628 - DNA, 25 bp, Homo sapien
gccgccacgggatattcagaatcga

SEQ ID NO: 4455629 - DNA, 25 bp, Homo sapien
gctttcgttttcacatctggtgatg

SEQ ID NO: 4455630 - DNA, 25 bp, Homo sapien
tgcttataaaatcggaattcgcgtc

SEQ ID NO: 4455631 - DNA, 25 bp, Homo sapien
gcttataaaatcggaattcgcgtcc

SEQ ID NO: 4455632 - DNA, 25 bp, Homo sapien
ctgcttataaaatcggaattcgcgt

SEQ ID NO: 4455633 - DNA, 25 bp, Homo sapien
cagtgccaacaatagcacggttgtg

SEQ ID NO: 4455634 - DNA, 25 bp, Homo sapien
ggatgcgcctctccttatctgcaag

SEQ ID NO: 4455635 - DNA, 25 bp, Homo sapien
accgacacttgggtcggacagtgcc

SEQ ID NO: 4455636 - DNA, 25 bp, Homo sapien
ccctccattcggctccctttctggg

SEQ ID NO: 4455637 - DNA, 25 bp, Homo sapien
ccagcctgacccagggcacagcggt

SEQ ID NO: 4455638 - DNA, 25 bp, Homo sapien
agcctgacccagggcacagcggttg

SEQ ID NO: 4455639 - DNA, 25 bp, Homo sapien
ggggcgaccagcctgacccagggca

SEQ ID NO: 4455640 - DNA, 25 bp, Homo sapien
ctggggcgaccagcctgacccaggg

SEQ ID NO: 4455641 - DNA, 25 bp, Homo sapien
aagcatccggagagggatcccggta

SEQ ID NO: 4455642 - DNA, 25 bp, Homo sapien
cggctatcccgtcaatgggtgcagc

SEQ ID NO: 4455643 - DNA, 25 bp, Homo sapien
ctgttcggaggtatgcggctatccc

SEQ ID NO: 4455644 - DNA, 25 bp, Homo sapien
atgggtgcagcacctatcgccctgg

SEQ ID NO: 4455645 - DNA, 25 bp, Homo sapien
cggtgtctgtcccctcgagggtgta

SEQ ID NO: 4455646 - DNA, 25 bp, Homo sapien
gcataaacccgggtgaggagaggga

SEQ ID NO: 4455647 - DNA, 25 bp, Homo sapien
ccatagttccccctgtgtagttctc

SEQ ID NO: 4455648 - DNA, 25 bp, Homo sapien
ctctctgtgtaacgggcataaaccc

SEQ ID NO: 4455649 - DNA, 25 bp, Homo sapien
accagaaggctctgcgtggtgcctg

SEQ ID NO: 4455650 - DNA, 25 bp, Homo sapien
tgcaaaaccaaaaaaggtctcgctc

SEQ ID NO: 4455651 - DNA, 25 bp, Homo sapien
gctcctgcggacagtcaccagaagg

SEQ ID NO: 4455652 - DNA, 25 bp, Homo sapien
caaaaaaggtctcgctcctgcggac

SEQ ID NO: 4455653 - DNA, 25 bp, Homo sapien
tcaagcgcagcggtttcctcgcgct

SEQ ID NO: 4455654 - DNA, 25 bp, Homo sapien
ggtttcctcgcgcttcgcgtcttgg

SEQ ID NO: 4455655 - DNA, 25 bp, Homo sapien
tgtgggtctggtgtcgcgcagctgc

SEQ ID NO: 4455656 - DNA, 25 bp, Homo sapien
tcgcgcttcgcgtcttggcgctgtg

SEQ ID NO: 4455657 - DNA, 25 bp, Homo sapien
ctggcgggcgtgagggcgggccgct

SEQ ID NO: 4455658 - DNA, 25 bp, Homo sapien
caggagccgagagcgttaggttcaa

SEQ ID NO: 4455659 - DNA, 25 bp, Homo sapien
taggttcaaatgcatcaaggctctg

SEQ ID NO: 4455660 - DNA, 25 bp, Homo sapien
aatttgagcgggtgccaagagaacc

SEQ ID NO: 4455661 - DNA, 25 bp, Homo sapien
aataaccctgtcgttgggagccgag

SEQ ID NO: 4455662 - DNA, 25 bp, Homo sapien
gcgcttgctgggagccttatgccaa

SEQ ID NO: 4455663 - DNA, 25 bp, Homo sapien
tgagattgaccctcgggctctgaac

SEQ ID NO: 4455664 - DNA, 25 bp, Homo sapien
ccgaattacaggagaattgggccca

SEQ ID NO: 4455665 - DNA, 25 bp, Homo sapien
tagcccgggaacagctagcctagaa

SEQ ID NO: 4455666 - DNA, 25 bp, Homo sapien
ttctaggaaattgtaattgccctgg

SEQ ID NO: 4455667 - DNA, 25 bp, Homo sapien
tgtaattgccctggtggaccacctg

SEQ ID NO: 4455668 - DNA, 25 bp, Homo sapien
tgggcctttgcctgcagtaccagac

SEQ ID NO: 4455669 - DNA, 25 bp, Homo sapien
aaataagaaaggagtgatagagaag

SEQ ID NO: 4455670 - DNA, 25 bp, Homo sapien
tggactggcacccttcatataaaag

SEQ ID NO: 4455671 - DNA, 25 bp, Homo sapien
cctgcacaggttatggactgaagcc

SEQ ID NO: 4455672 - DNA, 25 bp, Homo sapien
tgtcagaaatgtaccacgctcagga

SEQ ID NO: 4455673 - DNA, 25 bp, Homo sapien
gacagtgatttgaatgggccgcccc

SEQ ID NO: 4455674 - DNA, 25 bp, Homo sapien
agctgtctggcggtgagctttttcg

SEQ ID NO: 4455675 - DNA, 25 bp, Homo sapien
ctggcggtgagctttttcgttgcgt

SEQ ID NO: 4455676 - DNA, 25 bp, Homo sapien
ctttttcgttgcgtgtggtttatgc

SEQ ID NO: 4455677 - DNA, 25 bp, Homo sapien
gagctttttcgttgcgtgtggttta

SEQ ID NO: 4455678 - DNA, 25 bp, Homo sapien
aacttgactacacttccctgggctg

SEQ ID NO: 4455679 - DNA, 25 bp, Homo sapien
ccgataactcggtggcaaaatcagc

SEQ ID NO: 4455680 - DNA, 25 bp, Homo sapien
gctataaacatgatcacaggccact

SEQ ID NO: 4455681 - DNA, 25 bp, Homo sapien
cctgggctggttcacggtttcataa

SEQ ID NO: 4455682 - DNA, 25 bp, Homo sapien
tattgatccgcagccggcattgtag

SEQ ID NO: 4455683 - DNA, 25 bp, Homo sapien
ggattacagtgagcgggtattgatc

SEQ ID NO: 4455684 - DNA, 25 bp, Homo sapien
gcagccggcattgtaggatcaagcg

SEQ ID NO: 4455685 - DNA, 25 bp, Homo sapien
agcgggtattgatccgcagccggca

SEQ ID NO: 4455686 - DNA, 25 bp, Homo sapien
tccgaggcagcaggccgttttgtcc

SEQ ID NO: 4455687 - DNA, 25 bp, Homo sapien
tgctgtccactggccggacctgcgg

SEQ ID NO: 4455688 - DNA, 25 bp, Homo sapien
aacatttgaacttctcctatccgag

SEQ ID NO: 4455689 - DNA, 25 bp, Homo sapien
cagatggtcattttcgggggcgcca

SEQ ID NO: 4455690 - DNA, 25 bp, Homo sapien
tgctgaatgcctgattgattaattg

SEQ ID NO: 4455691 - DNA, 25 bp, Homo sapien
tctaaggtgcttcaatgctgaatgc

SEQ ID NO: 4455692 - DNA, 25 bp, Homo sapien
cagtcaatatactggagggccatgc

SEQ ID NO: 4455693 - DNA, 25 bp, Homo sapien
tgttgcagcaccttaccttaaagac

SEQ ID NO: 4455694 - DNA, 25 bp, Homo sapien
tgtaagagtctgatcaaactgacac

SEQ ID NO: 4455695 - DNA, 25 bp, Homo sapien
tcacagtcaccacgggaagagtaaa

SEQ ID NO: 4455696 - DNA, 25 bp, Homo sapien
tttgccaccgtgcattggtattgcc

SEQ ID NO: 4455697 - DNA, 25 bp, Homo sapien
caggccactctcttgcctgtaagag

SEQ ID NO: 4455698 - DNA, 25 bp, Homo sapien
ggcatctggcgcatacaaagtgtct

SEQ ID NO: 4455699 - DNA, 25 bp, Homo sapien
tgctttgaggtaggcctcaagtcag

SEQ ID NO: 4455700 - DNA, 25 bp, Homo sapien
tacctaccttgtgggaagttgagag

SEQ ID NO: 4455701 - DNA, 25 bp, Homo sapien
caaacatgactggatttggttcgtt

SEQ ID NO: 4455702 - DNA, 25 bp, Homo sapien
aagaatttcacccaaaaccatgaag

SEQ ID NO: 4455703 - DNA, 25 bp, Homo sapien
aagaaaattgtgtactccagaagaa

SEQ ID NO: 4455704 - DNA, 25 bp, Homo sapien
gaagttgaccaatccaaaatcatca

SEQ ID NO: 4455705 - DNA, 25 bp, Homo sapien
aaatcatcacaaccacataatccaa

SEQ ID NO: 4455706 - DNA, 25 bp, Homo sapien
gtttcttgaagccattcccagagcc

SEQ ID NO: 4455707 - DNA, 25 bp, Homo sapien
tcagtcactccatggtttcttgaag

SEQ ID NO: 4455708 - DNA, 25 bp, Homo sapien
cagtcactccatggtttcttgaagc

SEQ ID NO: 4455709 - DNA, 25 bp, Homo sapien
atggtttcttgaagccattcccaga

SEQ ID NO: 4455710 - DNA, 25 bp, Homo sapien
gcatcatgaactacagctgatgaat

SEQ ID NO: 4455711 - DNA, 25 bp, Homo sapien
tgaggcttgcctgttgctgacaaat

SEQ ID NO: 4455712 - DNA, 25 bp, Homo sapien
tgacaaatgtagatggacagatacg

SEQ ID NO: 4455713 - DNA, 25 bp, Homo sapien
gacagatacgtaaagatgatgcatc

SEQ ID NO: 4455714 - DNA, 25 bp, Homo sapien
cctgcatgagccagcatgaggcagc

SEQ ID NO: 4455715 - DNA, 25 bp, Homo sapien
agtggcatctttggtgactacagca

SEQ ID NO: 4455716 - DNA, 25 bp, Homo sapien
catcaaacacactatgagccagagg

SEQ ID NO: 4455717 - DNA, 25 bp, Homo sapien
agcaaccagagatgtcctctcaggg

SEQ ID NO: 4455718 - DNA, 25 bp, Homo sapien
cgacaccaaaaccagtggttttgtg

SEQ ID NO: 4455719 - DNA, 25 bp, Homo sapien
aaaccagtggttttgtggatagaga

SEQ ID NO: 4455720 - DNA, 25 bp, Homo sapien
ccagtggttttgtggatagagaaat

SEQ ID NO: 4455721 - DNA, 25 bp, Homo sapien
caccaaaaccagtggttttgtggat

SEQ ID NO: 4455722 - DNA, 25 bp, Homo sapien
tccatgtgtatttaaacagagccat

SEQ ID NO: 4455723 - DNA, 25 bp, Homo sapien
aacagagccatctcgtattaaaggg

SEQ ID NO: 4455724 - DNA, 25 bp, Homo sapien
taaacagagccatctcgtattaaag

SEQ ID NO: 4455725 - DNA, 25 bp, Homo sapien
tgtatttaaacagagccatctcgta

SEQ ID NO: 4455726 - DNA, 25 bp, Homo sapien
cagaacttgcgagtgaagccaggag

SEQ ID NO: 4455727 - DNA, 25 bp, Homo sapien
gagctaatagggacggcagcgctat

SEQ ID NO: 4455728 - DNA, 25 bp, Homo sapien
taattaccacaggatgattcgtctg

SEQ ID NO: 4455729 - DNA, 25 bp, Homo sapien
gaagggtgccactactgcgtgtcct

SEQ ID NO: 4455730 - DNA, 25 bp, Homo sapien
taaaggagcgttttctgaggcagct

SEQ ID NO: 4455731 - DNA, 25 bp, Homo sapien
tccgtgccccgaataattccaaaga

SEQ ID NO: 4455732 - DNA, 25 bp, Homo sapien
aactcgtgggtcaagtgttttcaga

SEQ ID NO: 4455733 - DNA, 25 bp, Homo sapien
ggtactgcactcagagtgtttgact

SEQ ID NO: 4455734 - DNA, 25 bp, Homo sapien
tccacacttttaggcagagtcagac

SEQ ID NO: 4455735 - DNA, 25 bp, Homo sapien
ttccacacttttaggcagagtcaga

SEQ ID NO: 4455736 - DNA, 25 bp, Homo sapien
ccacacttttaggcagagtcagaca

SEQ ID NO: 4455737 - DNA, 25 bp, Homo sapien
ttttccacacttttaggcagagtca

SEQ ID NO: 4455738 - DNA, 25 bp, Homo sapien
caaggcacctagtgttgtgtggata

SEQ ID NO: 4455739 - DNA, 25 bp, Homo sapien
tttgatttaccataggacagcctgg

SEQ ID NO: 4455740 - DNA, 25 bp, Homo sapien
tgtggataaaagtattgccctgctg

SEQ ID NO: 4455741 - DNA, 25 bp, Homo sapien
ttatctcaggttcactcagaagtgc

SEQ ID NO: 4455742 - DNA, 25 bp, Homo sapien
aacaatcagcccctcaacactcaga

SEQ ID NO: 4455743 - DNA, 25 bp, Homo sapien
aacactcagagatggccagttttct

SEQ ID NO: 4455744 - DNA, 25 bp, Homo sapien
ccgggcttgcaggagaacaatcagc

SEQ ID NO: 4455745 - DNA, 25 bp, Homo sapien
caacactgtcacagagctgacgcat

SEQ ID NO: 4455746 - DNA, 25 bp, Homo sapien
atgaagatgattgagggagctggca

SEQ ID NO: 4455747 - DNA, 25 bp, Homo sapien
aagcatgaagatgattgagggagct

SEQ ID NO: 4455748 - DNA, 25 bp, Homo sapien
ctttaagcatgaagatgattgaggg

SEQ ID NO: 4455749 - DNA, 25 bp, Homo sapien
tgaagatgattgagggagctggcaa

SEQ ID NO: 4455750 - DNA, 25 bp, Homo sapien
tgtggaccggaagtaatctgactga

SEQ ID NO: 4455751 - DNA, 25 bp, Homo sapien
ttccatcagaattcctggagacagg

SEQ ID NO: 4455752 - DNA, 25 bp, Homo sapien
caggaaagaacttccgcatccagga

SEQ ID NO: 4455753 - DNA, 25 bp, Homo sapien
ttggcttagggcacagcccgcagag

SEQ ID NO: 4455754 - DNA, 25 bp, Homo sapien
tcctgctacaagagtacacattgac

SEQ ID NO: 4455755 - DNA, 25 bp, Homo sapien
tatactatgttaaaaggcatcatgg

SEQ ID NO: 4455756 - DNA, 25 bp, Homo sapien
cttgagaaagtttggactgaactcc

SEQ ID NO: 4455757 - DNA, 25 bp, Homo sapien
tgaactcctatctctaccatctgct

SEQ ID NO: 4455758 - DNA, 25 bp, Homo sapien
cagggcatcaagggctccagacatt

SEQ ID NO: 4455759 - DNA, 25 bp, Homo sapien
ttcctgctgcaaggacatcctcctc

SEQ ID NO: 4455760 - DNA, 25 bp, Homo sapien
ttgcagggcatcaagggctccagac

SEQ ID NO: 4455761 - DNA, 25 bp, Homo sapien
ggctccagacattgtgaaagtttcc

SEQ ID NO: 4455762 - DNA, 25 bp, Homo sapien
agtgtctcctgtggcagcaacaaac

SEQ ID NO: 4455763 - DNA, 25 bp, Homo sapien
gtctcctgtggcagcaacaaacttc

SEQ ID NO: 4455764 - DNA, 25 bp, Homo sapien
ggagtgtctcctgtggcagcaacaa

SEQ ID NO: 4455765 - DNA, 25 bp, Homo sapien
attggagtgtctcctgtggcagcaa

SEQ ID NO: 4455766 - DNA, 25 bp, Homo sapien
cacatgtgcagaactttgcaagcca

SEQ ID NO: 4455767 - DNA, 25 bp, Homo sapien
ccacacatgtgcagaactttgcaag

SEQ ID NO: 4455768 - DNA, 25 bp, Homo sapien
catgtgcagaactttgcaagccagc

SEQ ID NO: 4455769 - DNA, 25 bp, Homo sapien
cacacatgtgcagaactttgcaagc

SEQ ID NO: 4455770 - DNA, 25 bp, Homo sapien
ctccagtcttccgtagggaacctct

SEQ ID NO: 4455771 - DNA, 25 bp, Homo sapien
ggtgcctgcactccttcagaccagc

SEQ ID NO: 4455772 - DNA, 25 bp, Homo sapien
aataggcacagagggtgcctgcact

SEQ ID NO: 4455773 - DNA, 25 bp, Homo sapien
tccgtagggaacctctgaataggca

SEQ ID NO: 4455774 - DNA, 25 bp, Homo sapien
aagaccattcagtggttgctcctac

SEQ ID NO: 4455775 - DNA, 25 bp, Homo sapien
ttaagaccattcagtggttgctcct

SEQ ID NO: 4455776 - DNA, 25 bp, Homo sapien
taagaccattcagtggttgctccta

SEQ ID NO: 4455777 - DNA, 25 bp, Homo sapien
aactttactttaggaattgtggcag

SEQ ID NO: 4455778 - DNA, 25 bp, Homo sapien
gcagggtgacaaataaaaagttgcc

SEQ ID NO: 4455779 - DNA, 25 bp, Homo sapien
aatgtgaagtgagaggacaggaatc

SEQ ID NO: 4455780 - DNA, 25 bp, Homo sapien
taaaataggttttatctgctgcagt

SEQ ID NO: 4455781 - DNA, 25 bp, Homo sapien
gtcataatgtcacggcctttcaggt

SEQ ID NO: 4455782 - DNA, 25 bp, Homo sapien
aatgtcataatgtcacggcctttca

SEQ ID NO: 4455783 - DNA, 25 bp, Homo sapien
taatgtcacggcctttcaggtcatc

SEQ ID NO: 4455784 - DNA, 25 bp, Homo sapien
tcacggcctttcaggtcatcatctt

SEQ ID NO: 4455785 - DNA, 25 bp, Homo sapien
tctgatttgcgagaacatcagctgt

SEQ ID NO: 4455786 - DNA, 25 bp, Homo sapien
gacttcgccaatacattcttgctta

SEQ ID NO: 4455787 - DNA, 25 bp, Homo sapien
ttctcactgactaaattagtaaatt

SEQ ID NO: 4455788 - DNA, 25 bp, Homo sapien
gagataggtgacttcgccaatacat

SEQ ID NO: 4455789 - DNA, 25 bp, Homo sapien
tactgacagaatcatagatccaagg

SEQ ID NO: 4455790 - DNA, 25 bp, Homo sapien
tctctcaatactgacagaatcatag

SEQ ID NO: 4455791 - DNA, 25 bp, Homo sapien
cccgaggtttatagtgcagcattga

SEQ ID NO: 4455792 - DNA, 25 bp, Homo sapien
tgaccacgttggccagaggcggccc

SEQ ID NO: 4455793 - DNA, 25 bp, Homo sapien
tgtactcttggctttaggaccaatt

SEQ ID NO: 4455794 - DNA, 25 bp, Homo sapien
ccaattagtctgtgaaagcagcggg

SEQ ID NO: 4455795 - DNA, 25 bp, Homo sapien
gcatccgcacttgattactctaatg

SEQ ID NO: 4455796 - DNA, 25 bp, Homo sapien
gggacagaatataaatgcaggatgc

SEQ ID NO: 4455797 - DNA, 25 bp, Homo sapien
gtggaggacattggctgcgatgtgt

SEQ ID NO: 4455798 - DNA, 25 bp, Homo sapien
tggctgcgatgtgtgaagctgggcc

SEQ ID NO: 4455799 - DNA, 25 bp, Homo sapien
cagagtggaggacattggctgcgat

SEQ ID NO: 4455800 - DNA, 25 bp, Homo sapien
gtcagagtggaggacattggctgcg

SEQ ID NO: 4455801 - DNA, 25 bp, Homo sapien
ctctaggtgctgtctggtagcccat

SEQ ID NO: 4455802 - DNA, 25 bp, Homo sapien
gtctggtagcccatgtggaatgagt

SEQ ID NO: 4455803 - DNA, 25 bp, Homo sapien
cctgttccatgtggacagttgccca

SEQ ID NO: 4455804 - DNA, 25 bp, Homo sapien
gaatgagttgatggtctctgtcctg

SEQ ID NO: 4455805 - DNA, 25 bp, Homo sapien
cagacttgctgttgtggccgaagaa

SEQ ID NO: 4455806 - DNA, 25 bp, Homo sapien
tgttgtggccgaagaaaaaggacat

SEQ ID NO: 4455807 - DNA, 25 bp, Homo sapien
gctgttgtggccgaagaaaaaggac

SEQ ID NO: 4455808 - DNA, 25 bp, Homo sapien
ccttaaaacagacttgctgttgtgg

SEQ ID NO: 4455809 - DNA, 25 bp, Homo sapien
ctcttagaggatcccaggttacaaa

SEQ ID NO: 4455810 - DNA, 25 bp, Homo sapien
tagaggatcccaggttacaaatgtg

SEQ ID NO: 4455811 - DNA, 25 bp, Homo sapien
aggatcccaggttacaaatgtgttc

SEQ ID NO: 4455812 - DNA, 25 bp, Homo sapien
gagcctcttagaggatcccaggtta

SEQ ID NO: 4455813 - DNA, 25 bp, Homo sapien
aaagtagatgaaagggaccagatcc

SEQ ID NO: 4455814 - DNA, 25 bp, Homo sapien
gtagatgaaagggaccagatccatt

SEQ ID NO: 4455815 - DNA, 25 bp, Homo sapien
gatgaaagggaccagatccatttgc

SEQ ID NO: 4455816 - DNA, 25 bp, Homo sapien
cagaacaagagaagtcaaagtagat

SEQ ID NO: 4455817 - DNA, 25 bp, Homo sapien
atatgagcctgcaaactgagtcctc

SEQ ID NO: 4455818 - DNA, 25 bp, Homo sapien
gatatgagcctgcaaactgagtcct

SEQ ID NO: 4455819 - DNA, 25 bp, Homo sapien
agatatgagcctgcaaactgagtcc

SEQ ID NO: 4455820 - DNA, 25 bp, Homo sapien
tcagatatgagcctgcaaactgagt

SEQ ID NO: 4455821 - DNA, 25 bp, Homo sapien
tcattagagctatatcatctgtcac

SEQ ID NO: 4455822 - DNA, 25 bp, Homo sapien
ggtcattagagctatatcatctgtc

SEQ ID NO: 4455823 - DNA, 25 bp, Homo sapien
gtcattagagctatatcatctgtca

SEQ ID NO: 4455824 - DNA, 25 bp, Homo sapien
tggtcattagagctatatcatctgt

SEQ ID NO: 4455825 - DNA, 25 bp, Homo sapien
gccaggctctgtatggcaaaccgtc

SEQ ID NO: 4455826 - DNA, 25 bp, Homo sapien
caggctctgtatggcaaaccgtccg

SEQ ID NO: 4455827 - DNA, 25 bp, Homo sapien
gcagccaggctctgtatggcaaacc

SEQ ID NO: 4455828 - DNA, 25 bp, Homo sapien
ggctctgtatggcaaaccgtccgct

SEQ ID NO: 4455829 - DNA, 25 bp, Homo sapien
acctgtggttcctaagatggaccac

SEQ ID NO: 4455830 - DNA, 25 bp, Homo sapien
acagaatgtgtacaacaacacctgt

SEQ ID NO: 4455831 - DNA, 25 bp, Homo sapien
cagaatgtgtacaacaacacctgtg

SEQ ID NO: 4455832 - DNA, 25 bp, Homo sapien
ctgtggttcctaagatggaccactg

SEQ ID NO: 4455833 - DNA, 25 bp, Homo sapien
gctgaaagcccgactgaggctcttt

SEQ ID NO: 4455834 - DNA, 25 bp, Homo sapien
tcttttgactctatgatttgcacaa

SEQ ID NO: 4455835 - DNA, 25 bp, Homo sapien
cctgtctctgtaattgcagcatgga

SEQ ID NO: 4455836 - DNA, 25 bp, Homo sapien
tgaatgtgatcatccccagtagtcg

SEQ ID NO: 4455837 - DNA, 25 bp, Homo sapien
tcccacaattgcaagctcttgttca

SEQ ID NO: 4455838 - DNA, 25 bp, Homo sapien
caattgcaagctcttgttcagaagc

SEQ ID NO: 4455839 - DNA, 25 bp, Homo sapien
tcctcccacaattgcaagctcttgt

SEQ ID NO: 4455840 - DNA, 25 bp, Homo sapien
cacaattgcaagctcttgttcagaa

SEQ ID NO: 4455841 - DNA, 25 bp, Homo sapien
tgagggttttcttgctgcatcctca

SEQ ID NO: 4455842 - DNA, 25 bp, Homo sapien
aagatcaaggcactggcatctggtg

SEQ ID NO: 4455843 - DNA, 25 bp, Homo sapien
agatcaaggcactggcatctggtga

SEQ ID NO: 4455844 - DNA, 25 bp, Homo sapien
tggtgagggttttcttgctgcatcc

SEQ ID NO: 4455845 - DNA, 25 bp, Homo sapien
gtagatgaagagttaaatcaaaggg

SEQ ID NO: 4455846 - DNA, 25 bp, Homo sapien
gatgaagagttaaatcaaagggcca

SEQ ID NO: 4455847 - DNA, 25 bp, Homo sapien
gaagagttaaatcaaagggccagct

SEQ ID NO: 4455848 - DNA, 25 bp, Homo sapien
agagttaaatcaaagggccagctag

SEQ ID NO: 4455849 - DNA, 25 bp, Homo sapien
ggaagaattggtttcaagccgagtc

SEQ ID NO: 4455850 - DNA, 25 bp, Homo sapien
tgtccctttgatcccattgtgcgat

SEQ ID NO: 4455851 - DNA, 25 bp, Homo sapien
catagacgtaactgctcctggtgat

SEQ ID NO: 4455852 - DNA, 25 bp, Homo sapien
gtgtcctggtaagcttttcctctgg

SEQ ID NO: 4455853 - DNA, 25 bp, Homo sapien
ggcccttgaattctctgacgaggag

SEQ ID NO: 4455854 - DNA, 25 bp, Homo sapien
taatttacttccacgtgagcaggcc

SEQ ID NO: 4455855 - DNA, 25 bp, Homo sapien
taataattcacaagggagaaagcct

SEQ ID NO: 4455856 - DNA, 25 bp, Homo sapien
gccgaaaaagcatttggcccttgaa

SEQ ID NO: 4455857 - DNA, 25 bp, Homo sapien
tggagatcattcacccgacgtgtag

SEQ ID NO: 4455858 - DNA, 25 bp, Homo sapien
cacagtcacgtggaataggaccaaa

SEQ ID NO: 4455859 - DNA, 25 bp, Homo sapien
gagtttgaggcactccacagtcacg

SEQ ID NO: 4455860 - DNA, 25 bp, Homo sapien
tttttagcactcagctgatcagggc

SEQ ID NO: 4455861 - DNA, 25 bp, Homo sapien
gcatatcttgctgattgtcccctca

SEQ ID NO: 4455862 - DNA, 25 bp, Homo sapien
gaccaccacctgagcatatcttgct

SEQ ID NO: 4455863 - DNA, 25 bp, Homo sapien
ggtattgctcgaatcatttccctgg

SEQ ID NO: 4455864 - DNA, 25 bp, Homo sapien
aatagaatccttgaggatccttccc

SEQ ID NO: 4455865 - DNA, 25 bp, Homo sapien
gtagccatgtgcaccttctgcattg

SEQ ID NO: 4455866 - DNA, 25 bp, Homo sapien
gtccttgatgcacaatagtcaacca

SEQ ID NO: 4455867 - DNA, 25 bp, Homo sapien
tcacctccgatcacagtagccatgt

SEQ ID NO: 4455868 - DNA, 25 bp, Homo sapien
tttccccaacacagtccttgatgca

SEQ ID NO: 4455869 - DNA, 25 bp, Homo sapien
ctgaagcttgtgccttcatcatgta

SEQ ID NO: 4455870 - DNA, 25 bp, Homo sapien
gaagcttgtgccttcatcatgtagt

SEQ ID NO: 4455871 - DNA, 25 bp, Homo sapien
tactgaagcttgtgccttcatcatg

SEQ ID NO: 4455872 - DNA, 25 bp, Homo sapien
agcttgtgccttcatcatgtagttc

SEQ ID NO: 4455873 - DNA, 25 bp, Homo sapien
tttccatacagctattctggtgggc

SEQ ID NO: 4455874 - DNA, 25 bp, Homo sapien
tggtgggcccatatttactaaagaa

SEQ ID NO: 4455875 - DNA, 25 bp, Homo sapien
acaacacatgtagcagcttgccttt

SEQ ID NO: 4455876 - DNA, 25 bp, Homo sapien
acacatgtagcagcttgccttttcc

SEQ ID NO: 4455877 - DNA, 25 bp, Homo sapien
tttgggcgcctgacaaacgcaggga

SEQ ID NO: 4455878 - DNA, 25 bp, Homo sapien
tgctgcctcgatgggaaatttctga

SEQ ID NO: 4455879 - DNA, 25 bp, Homo sapien
ccgaaatgacgcagcggagcttttt

SEQ ID NO: 4455880 - DNA, 25 bp, Homo sapien
cagggatgatcgaccggtggcttcc

SEQ ID NO: 4455881 - DNA, 25 bp, Homo sapien
gatgaacacgcaggagggagatcat

SEQ ID NO: 4455882 - DNA, 25 bp, Homo sapien
tttcagattgttgttcgttggctga

SEQ ID NO: 4455883 - DNA, 25 bp, Homo sapien
tgttcgttggctgatgaacacgcag

SEQ ID NO: 4455884 - DNA, 25 bp, Homo sapien
tctggacagctcttagcttcacaaa

SEQ ID NO: 4455885 - DNA, 25 bp, Homo sapien
ctccatattgacagacatcctctta

SEQ ID NO: 4455886 - DNA, 25 bp, Homo sapien
tccatattgacagacatcctcttac

SEQ ID NO: 4455887 - DNA, 25 bp, Homo sapien
tgttaatcgaaagagaaaactccat

SEQ ID NO: 4455888 - DNA, 25 bp, Homo sapien
aagcagctgttaatcgaaagagaaa

SEQ ID NO: 4455889 - DNA, 25 bp, Homo sapien
ctggtataggttgacctgaattttt

SEQ ID NO: 4455890 - DNA, 25 bp, Homo sapien
ttctctagatggctgcttaagcagc

SEQ ID NO: 4455891 - DNA, 25 bp, Homo sapien
tggaatctcatcacttatataaatt

SEQ ID NO: 4455892 - DNA, 25 bp, Homo sapien
tttggaatctcatcacttatataaa

SEQ ID NO: 4455893 - DNA, 25 bp, Homo sapien
atttggaatctcatcacttatataa

SEQ ID NO: 4455894 - DNA, 25 bp, Homo sapien
ttggaatctcatcacttatataaat

SEQ ID NO: 4455895 - DNA, 25 bp, Homo sapien
gcccagagcctctaatatctccact

SEQ ID NO: 4455896 - DNA, 25 bp, Homo sapien
tgcccagagcctctaatatctccac

SEQ ID NO: 4455897 - DNA, 25 bp, Homo sapien
gagcctctaatatctccactcccag

SEQ ID NO: 4455898 - DNA, 25 bp, Homo sapien
ccagagcctctaatatctccactcc

SEQ ID NO: 4455899 - DNA, 25 bp, Homo sapien
aaggatgacatagcgtaaggaagat

SEQ ID NO: 4455900 - DNA, 25 bp, Homo sapien
gatgtctaatattttcggatatgat

SEQ ID NO: 4455901 - DNA, 25 bp, Homo sapien
tctgcatgcattgccttgagggaag

SEQ ID NO: 4455902 - DNA, 25 bp, Homo sapien
taatgggacaaggagtcagggcctt

SEQ ID NO: 4455903 - DNA, 25 bp, Homo sapien
gacaaggagctcctcttgacaaggt

SEQ ID NO: 4455904 - DNA, 25 bp, Homo sapien
cagcagctgatgaaggacttaccga

SEQ ID NO: 4455905 - DNA, 25 bp, Homo sapien
tgcaccctttgcaaggacaaggagc

SEQ ID NO: 4455906 - DNA, 25 bp, Homo sapien
ttccagttatgtggcacagcagctg

SEQ ID NO: 4455907 - DNA, 25 bp, Homo sapien
gcgcatattaggtgcctaatccaca

SEQ ID NO: 4455908 - DNA, 25 bp, Homo sapien
gtctggtgtactggcgcatattagg

SEQ ID NO: 4455909 - DNA, 25 bp, Homo sapien
atattaggtgcctaatccacatttg

SEQ ID NO: 4455910 - DNA, 25 bp, Homo sapien
tactggcgcatattaggtgcctaat

SEQ ID NO: 4455911 - DNA, 25 bp, Homo sapien
atctagagcccccactctaactgag

SEQ ID NO: 4455912 - DNA, 25 bp, Homo sapien
tatgtcttagccacatctagagccc

SEQ ID NO: 4455913 - DNA, 25 bp, Homo sapien
gagagaagacacagtatgtcttagc

SEQ ID NO: 4455914 - DNA, 25 bp, Homo sapien
gacacagtatgtcttagccacatct

SEQ ID NO: 4455915 - DNA, 25 bp, Homo sapien
tcagtctcttccagatcaattatgt

SEQ ID NO: 4455916 - DNA, 25 bp, Homo sapien
ttatgtcagcagatagaccaacctg

SEQ ID NO: 4455917 - DNA, 25 bp, Homo sapien
agatagaccaacctgggtgtctctc

SEQ ID NO: 4455918 - DNA, 25 bp, Homo sapien
gctgggcccttcataaaaccatcta

SEQ ID NO: 4455919 - DNA, 25 bp, Homo sapien
aataattgatgttcccgttgcacca

SEQ ID NO: 4455920 - DNA, 25 bp, Homo sapien
aaccgataagcagcagagtaattgg

SEQ ID NO: 4455921 - DNA, 25 bp, Homo sapien
gaggctccagcatcctttaatatga

SEQ ID NO: 4455922 - DNA, 25 bp, Homo sapien
ccaagcatcatttgcaaccgataag

SEQ ID NO: 4455923 - DNA, 25 bp, Homo sapien
gcccattcttatgtagccaaacaag

SEQ ID NO: 4455924 - DNA, 25 bp, Homo sapien
aacaagattcgaaagattgtgtgca

SEQ ID NO: 4455925 - DNA, 25 bp, Homo sapien
ccatggcccattcttatgtagccaa

SEQ ID NO: 4455926 - DNA, 25 bp, Homo sapien
tgtagccaaacaagattcgaaagat

SEQ ID NO: 4455927 - DNA, 25 bp, Homo sapien
caacccctcccctgtggagtctgaa

SEQ ID NO: 4455928 - DNA, 25 bp, Homo sapien
gcatgcacctcactgtatgctacag

SEQ ID NO: 4455929 - DNA, 25 bp, Homo sapien
caaatacagaaatctggatgcatgc

SEQ ID NO: 4455930 - DNA, 25 bp, Homo sapien
tatgctacagtagaagggtcccaac

SEQ ID NO: 4455931 - DNA, 25 bp, Homo sapien
gtgtgtagaagatccagccctttgc

SEQ ID NO: 4455932 - DNA, 25 bp, Homo sapien
cagccctttgcaatgcatcagttcc

SEQ ID NO: 4455933 - DNA, 25 bp, Homo sapien
caagaggagagtgtgtagaagatcc

SEQ ID NO: 4455934 - DNA, 25 bp, Homo sapien
tttgcaatgcatcagttccctgtgg

SEQ ID NO: 4455935 - DNA, 25 bp, Homo sapien
ggttcctgacaacgctgccatcgct

SEQ ID NO: 4455936 - DNA, 25 bp, Homo sapien
tgctacagggttgtcaaagccctgc

SEQ ID NO: 4455937 - DNA, 25 bp, Homo sapien
tctgttgccaccactaattcagccg

SEQ ID NO: 4455938 - DNA, 25 bp, Homo sapien
aattcagccgccgtcatcatggttc

SEQ ID NO: 4455939 - DNA, 25 bp, Homo sapien
tgcaagtcatgctcctcagagtcct

SEQ ID NO: 4455940 - DNA, 25 bp, Homo sapien
tcggaagtctccctacagaaggcaa

SEQ ID NO: 4455941 - DNA, 25 bp, Homo sapien
gaggactcaggtccctcggaagtct

SEQ ID NO: 4455942 - DNA, 25 bp, Homo sapien
tgacatctgacctgagagtctggga

SEQ ID NO: 4455943 - DNA, 25 bp, Homo sapien
cactatctttggaagcactaagcta

SEQ ID NO: 4455944 - DNA, 25 bp, Homo sapien
gattgcttactaggcaataattctc

SEQ ID NO: 4455945 - DNA, 25 bp, Homo sapien
gaagcactaagctatttctgaaccc

SEQ ID NO: 4455946 - DNA, 25 bp, Homo sapien
gagctacttgcctgactgggatttt

SEQ ID NO: 4455947 - DNA, 25 bp, Homo sapien
cattgctcagtgactttctagttct

SEQ ID NO: 4455948 - DNA, 25 bp, Homo sapien
tgctcagtgactttctagttctcat

SEQ ID NO: 4455949 - DNA, 25 bp, Homo sapien
aaagccacattgctcagtgactttc

SEQ ID NO: 4455950 - DNA, 25 bp, Homo sapien
gccacattgctcagtgactttctag

SEQ ID NO: 4455951 - DNA, 25 bp, Homo sapien
cacagcttttgcaaggattggttca

SEQ ID NO: 4455952 - DNA, 25 bp, Homo sapien
ctagtgagagccattggttgaatcg

SEQ ID NO: 4455953 - DNA, 25 bp, Homo sapien
tcaattgtgaaaaagaatatgtttg

SEQ ID NO: 4455954 - DNA, 25 bp, Homo sapien
tgaatcgttttgaaagtgcttgcct

SEQ ID NO: 4455955 - DNA, 25 bp, Homo sapien
tattagaatctgagcagcaatactg

SEQ ID NO: 4455956 - DNA, 25 bp, Homo sapien
aaaattcagaaatccggcacagagc

SEQ ID NO: 4455957 - DNA, 25 bp, Homo sapien
gcacagagcaactcaggtcttagtg

SEQ ID NO: 4455958 - DNA, 25 bp, Homo sapien
ggtcttagtggcatttcccacccat

SEQ ID NO: 4455959 - DNA, 25 bp, Homo sapien
ggacctgaacgtctggtgttcttgt

SEQ ID NO: 4455960 - DNA, 25 bp, Homo sapien
gaacgtctggtgttcttgttctacc

SEQ ID NO: 4455961 - DNA, 25 bp, Homo sapien
ctgtgaactaggcaaatccttctcc

SEQ ID NO: 4455962 - DNA, 25 bp, Homo sapien
ttcaaggacctgaacgtctggtgtt

SEQ ID NO: 4455963 - DNA, 25 bp, Homo sapien
gtcaattagcagagtcaggagactg

SEQ ID NO: 4455964 - DNA, 25 bp, Homo sapien
gagcctagcaccattaaagttggag

SEQ ID NO: 4455965 - DNA, 25 bp, Homo sapien
cccaaatgctgaggtcggacactgc

SEQ ID NO: 4455966 - DNA, 25 bp, Homo sapien
tcctgtaggatgatcattctctgag

SEQ ID NO: 4455967 - DNA, 25 bp, Homo sapien
ctttctcctgccacttcacaatcac

SEQ ID NO: 4455968 - DNA, 25 bp, Homo sapien
aggctgcagcccttctgctgctcat

SEQ ID NO: 4455969 - DNA, 25 bp, Homo sapien
ccacttcacaatcaccccaggctgc

SEQ ID NO: 4455970 - DNA, 25 bp, Homo sapien
tgccacttcacaatcaccccaggct

SEQ ID NO: 4455971 - DNA, 25 bp, Homo sapien
gagtgaggctccaaatttgaggaca

SEQ ID NO: 4455972 - DNA, 25 bp, Homo sapien
gccagcctaggaggccaaaacaaag

SEQ ID NO: 4455973 - DNA, 25 bp, Homo sapien
ctacctctacgtgactgcaaagcca

SEQ ID NO: 4455974 - DNA, 25 bp, Homo sapien
ttgtgtggaaaagcatagtcagagc

SEQ ID NO: 4455975 - DNA, 25 bp, Homo sapien
gatgttccgcaatagttcagcacag

SEQ ID NO: 4455976 - DNA, 25 bp, Homo sapien
taagttctcgaaagctcgggaaggc

SEQ ID NO: 4455977 - DNA, 25 bp, Homo sapien
tcctttggacggattgtatttccca

SEQ ID NO: 4455978 - DNA, 25 bp, Homo sapien
gtatttcccacagacagctccacat

SEQ ID NO: 4455979 - DNA, 25 bp, Homo sapien
gggattttgctgaaatgatcatatt

SEQ ID NO: 4455980 - DNA, 25 bp, Homo sapien
cagggattttgctgaaatgatcata

SEQ ID NO: 4455981 - DNA, 25 bp, Homo sapien
gattttgctgaaatgatcatattca

SEQ ID NO: 4455982 - DNA, 25 bp, Homo sapien
attttgctgaaatgatcatattcat

SEQ ID NO: 4455983 - DNA, 25 bp, Homo sapien
ccagctttaacctctcctgtttcca

SEQ ID NO: 4455984 - DNA, 25 bp, Homo sapien
gtccagctttaacctctcctgtttc

SEQ ID NO: 4455985 - DNA, 25 bp, Homo sapien
cagctttaacctctcctgtttccat

SEQ ID NO: 4455986 - DNA, 25 bp, Homo sapien
ctgtccagctttaacctctcctgtt

SEQ ID NO: 4455987 - DNA, 25 bp, Homo sapien
gccggttgtcgtccttatcttcaca

SEQ ID NO: 4455988 - DNA, 25 bp, Homo sapien
agttcctctgatgccagttcattcc

SEQ ID NO: 4455989 - DNA, 25 bp, Homo sapien
taatttgtaagttcctctgatgcca

SEQ ID NO: 4455990 - DNA, 25 bp, Homo sapien
ggttggcttagagtttgtggccaca

SEQ ID NO: 4455991 - DNA, 25 bp, Homo sapien
tgtgtcttcagcaaagcggactggt

SEQ ID NO: 4455992 - DNA, 25 bp, Homo sapien
tgagaggcacaagcacagatttagg

SEQ ID NO: 4455993 - DNA, 25 bp, Homo sapien
cactgggtttattgagtttgtgaca

SEQ ID NO: 4455994 - DNA, 25 bp, Homo sapien
tgttcaggcttttttacggcagcca

SEQ ID NO: 4455995 - DNA, 25 bp, Homo sapien
aagacagtctcatccctcaggtttg

SEQ ID NO: 4455996 - DNA, 25 bp, Homo sapien
gagttctactcacaggccatcttgc

SEQ ID NO: 4455997 - DNA, 25 bp, Homo sapien
ctcacacaggtgaccattaactctg

SEQ ID NO: 4455998 - DNA, 25 bp, Homo sapien
aaatgtttattactcacgcttggtg

SEQ ID NO: 4455999 - DNA, 25 bp, Homo sapien
gatttacacatgaaggtggcaccca

SEQ ID NO: 4456000 - DNA, 25 bp, Homo sapien
agatttacacatgaaggtggcaccc

SEQ ID NO: 4456001 - DNA, 25 bp, Homo sapien
tcccctcgacccaaatctccttcat

SEQ ID NO: 4456002 - DNA, 25 bp, Homo sapien
ctcctcccctcgacccaaatctcct

SEQ ID NO: 4456003 - DNA, 25 bp, Homo sapien
agatctttcactgcggctatttctg

SEQ ID NO: 4456004 - DNA, 25 bp, Homo sapien
ttctgttggaccagagcaaatgtga

SEQ ID NO: 4456005 - DNA, 25 bp, Homo sapien
cggctatttctgttggaccagagca

SEQ ID NO: 4456006 - DNA, 25 bp, Homo sapien
caatccctgttcatatctagatctt

SEQ ID NO: 4456007 - DNA, 25 bp, Homo sapien
tgaatcaaaagtcccataactgtct

SEQ ID NO: 4456008 - DNA, 25 bp, Homo sapien
tgtctttggcatcagtgagcagggc

SEQ ID NO: 4456009 - DNA, 25 bp, Homo sapien
gatgagcatgaaagagatattaagg

SEQ ID NO: 4456010 - DNA, 25 bp, Homo sapien
tccgggtcagaatgagttaagttcc

SEQ ID NO: 4456011 - DNA, 25 bp, Homo sapien
tgagttcgtgttgataaagtactca

SEQ ID NO: 4456012 - DNA, 25 bp, Homo sapien
aatgtaagcaaagaggttatatgtc

SEQ ID NO: 4456013 - DNA, 25 bp, Homo sapien
taaactgtgggcaatgggccaaatc

SEQ ID NO: 4456014 - DNA, 25 bp, Homo sapien
ttaaagcaggagtcagtaaactgtg

SEQ ID NO: 4456015 - DNA, 25 bp, Homo sapien
tacacaagatctgagtgagagaacg

SEQ ID NO: 4456016 - DNA, 25 bp, Homo sapien
caccaagctgctgtacacaagatct

SEQ ID NO: 4456017 - DNA, 25 bp, Homo sapien
gatctgagtgagagaacgcccctca

SEQ ID NO: 4456018 - DNA, 25 bp, Homo sapien
tgctgtacacaagatctgagtgaga

SEQ ID NO: 4456019 - DNA, 25 bp, Homo sapien
gtcaaactgtccatcatcagataat

SEQ ID NO: 4456020 - DNA, 25 bp, Homo sapien
tgtgatcacgattcctgctaggtta

SEQ ID NO: 4456021 - DNA, 25 bp, Homo sapien
tcacgattcctgctaggttacagga

SEQ ID NO: 4456022 - DNA, 25 bp, Homo sapien
tccttcatttgtgatcacgattcct

SEQ ID NO: 4456023 - DNA, 25 bp, Homo sapien
atgagcactcaggagctcgtccact

SEQ ID NO: 4456024 - DNA, 25 bp, Homo sapien
gtttgttgagttgctacagagctag

SEQ ID NO: 4456025 - DNA, 25 bp, Homo sapien
agagctagaacccaaacagggtatg

SEQ ID NO: 4456026 - DNA, 25 bp, Homo sapien
tctttagccatccacttagatcgca

SEQ ID NO: 4456027 - DNA, 25 bp, Homo sapien
atgtcttccactgatgagaagataa

SEQ ID NO: 4456028 - DNA, 25 bp, Homo sapien
tgtcttccactgatgagaagataag

SEQ ID NO: 4456029 - DNA, 25 bp, Homo sapien
gctcgctgtaggtgcacattccctg

SEQ ID NO: 4456030 - DNA, 25 bp, Homo sapien
tctgagcatgatgggcacaaggacg

SEQ ID NO: 4456031 - DNA, 25 bp, Homo sapien
ctgaagccacgtcagtggtctgagc

SEQ ID NO: 4456032 - DNA, 25 bp, Homo sapien
caaggacgcaaagttgagagagcct

SEQ ID NO: 4456033 - DNA, 25 bp, Homo sapien
gggaagttagatcctgaagccacgt

SEQ ID NO: 4456034 - DNA, 25 bp, Homo sapien
ttcatctctgatctagcttgctccc

SEQ ID NO: 4456035 - DNA, 25 bp, Homo sapien
tcatctctgatctagcttgctcccc

SEQ ID NO: 4456036 - DNA, 25 bp, Homo sapien
catctctgatctagcttgctcccca

SEQ ID NO: 4456037 - DNA, 25 bp, Homo sapien
attcatctctgatctagcttgctcc

SEQ ID NO: 4456038 - DNA, 25 bp, Homo sapien
acaatgcaatagtcagatttaatgg

SEQ ID NO: 4456039 - DNA, 25 bp, Homo sapien
tttaacaatgcaatagtcagattta

SEQ ID NO: 4456040 - DNA, 25 bp, Homo sapien
aatgcaatagtcagatttaatggcc

SEQ ID NO: 4456041 - DNA, 25 bp, Homo sapien
tgcaatagtcagatttaatggccat

SEQ ID NO: 4456042 - DNA, 25 bp, Homo sapien
taacaaatactaacatgccttcagg

SEQ ID NO: 4456043 - DNA, 25 bp, Homo sapien
gcagctgatgcctgtctgaaaggtg

SEQ ID NO: 4456044 - DNA, 25 bp, Homo sapien
gtggcagcaacactcaaggctagaa

SEQ ID NO: 4456045 - DNA, 25 bp, Homo sapien
gtttgtagtcttcccaccatgtagg

SEQ ID NO: 4456046 - DNA, 25 bp, Homo sapien
ggcttcatgtacaatagtccccaga

SEQ ID NO: 4456047 - DNA, 25 bp, Homo sapien
catgtacaatagtccccagatcacc

SEQ ID NO: 4456048 - DNA, 25 bp, Homo sapien
tcgcactgtagtttgctcaagaagg

SEQ ID NO: 4456049 - DNA, 25 bp, Homo sapien
cccagatcacctcgcactgtagttt

SEQ ID NO: 4456050 - DNA, 25 bp, Homo sapien
ttgagtaggtatctttcagacaaag

SEQ ID NO: 4456051 - DNA, 25 bp, Homo sapien
tgagtaggtatctttcagacaaagc

SEQ ID NO: 4456052 - DNA, 25 bp, Homo sapien
aaaagcagaggctcctcggcagcgt

SEQ ID NO: 4456053 - DNA, 25 bp, Homo sapien
taaaagcagaggctcctcggcagcg

SEQ ID NO: 4456054 - DNA, 25 bp, Homo sapien
ttaaaagcagaggctcctcggcagc

SEQ ID NO: 4456055 - DNA, 25 bp, Homo sapien
ttaactggatagaccacgtacgtgg

SEQ ID NO: 4456056 - DNA, 25 bp, Homo sapien
cggcatcgcatgttagaatctctaa

SEQ ID NO: 4456057 - DNA, 25 bp, Homo sapien
gaaattagaactggcacaaccctga

SEQ ID NO: 4456058 - DNA, 25 bp, Homo sapien
cgtctaggcctaggtaaccagtgga

SEQ ID NO: 4456059 - DNA, 25 bp, Homo sapien
tttgagattttagggccattaggct

SEQ ID NO: 4456060 - DNA, 25 bp, Homo sapien
gacagtatcatgaactttcagctcc

SEQ ID NO: 4456061 - DNA, 25 bp, Homo sapien
ttgatgtctagtaatagaagcactg

SEQ ID NO: 4456062 - DNA, 25 bp, Homo sapien
tctttaaggcctggttgcttctgaa

SEQ ID NO: 4456063 - DNA, 25 bp, Homo sapien
gaatagctcagttgtttgaacagca

SEQ ID NO: 4456064 - DNA, 25 bp, Homo sapien
gctgaatgtggtcaatcttctaact

SEQ ID NO: 4456065 - DNA, 25 bp, Homo sapien
catggttttatctatgcaatgctaa

SEQ ID NO: 4456066 - DNA, 25 bp, Homo sapien
tgtcctcgaaccagaagaggtgctt

SEQ ID NO: 4456067 - DNA, 25 bp, Homo sapien
ggtgcttgtcctgacacagctgtca

SEQ ID NO: 4456068 - DNA, 25 bp, Homo sapien
cacttctgacagaggtgcttgttta

SEQ ID NO: 4456069 - DNA, 25 bp, Homo sapien
gaagcatgagtattcgatgggcaaa

SEQ ID NO: 4456070 - DNA, 25 bp, Homo sapien
tgcagttcagggacacacaacaaag

SEQ ID NO: 4456071 - DNA, 25 bp, Homo sapien
ggttgtcatggagacatcgtatttc

SEQ ID NO: 4456072 - DNA, 25 bp, Homo sapien
tccaagaattgctcatattgatccg

SEQ ID NO: 4456073 - DNA, 25 bp, Homo sapien
tggagacatcgtatttctccaagaa

SEQ ID NO: 4456074 - DNA, 25 bp, Homo sapien
tggccaggagtaaatggccaagcca

SEQ ID NO: 4456075 - DNA, 25 bp, Homo sapien
agggaagctgacactattagttcat

SEQ ID NO: 4456076 - DNA, 25 bp, Homo sapien
ttcagttggaggaagtacaaaggct

SEQ ID NO: 4456077 - DNA, 25 bp, Homo sapien
gacactattagttcattatcatcaa

SEQ ID NO: 4456078 - DNA, 25 bp, Homo sapien
cagtgtggagctgttatcttttcct

SEQ ID NO: 4456079 - DNA, 25 bp, Homo sapien
gttgattgtgttgctcgtctccttc

SEQ ID NO: 4456080 - DNA, 25 bp, Homo sapien
gtctccttccgaaagcaccagcctt

SEQ ID NO: 4456081 - DNA, 25 bp, Homo sapien
gaaagcaccagccttctgttagcca

SEQ ID NO: 4456082 - DNA, 25 bp, Homo sapien
tggttggttgattgtgttgctcgtc

SEQ ID NO: 4456083 - DNA, 25 bp, Homo sapien
tgaagtaaattagtgtgaaccagtc

SEQ ID NO: 4456084 - DNA, 25 bp, Homo sapien
gccacttccatggataactagctgg

SEQ ID NO: 4456085 - DNA, 25 bp, Homo sapien
cagtcaatctgagtgtcagccttga

SEQ ID NO: 4456086 - DNA, 25 bp, Homo sapien
atcttgtgccataggtgggttggaa

SEQ ID NO: 4456087 - DNA, 25 bp, Homo sapien
tggtgaggtacagatgagtttttgc

SEQ ID NO: 4456088 - DNA, 25 bp, Homo sapien
ccgatggcccctgagtgtgggtagt

SEQ ID NO: 4456089 - DNA, 25 bp, Homo sapien
gccgatggcccctgagtgtgggtag

SEQ ID NO: 4456090 - DNA, 25 bp, Homo sapien
atggcccctgagtgtgggtagtcat

SEQ ID NO: 4456091 - DNA, 25 bp, Homo sapien
gatggcccctgagtgtgggtagtca

SEQ ID NO: 4456092 - DNA, 25 bp, Homo sapien
tttgggattccaccgcttcctatag

SEQ ID NO: 4456093 - DNA, 25 bp, Homo sapien
ctttgggattccaccgcttcctata

SEQ ID NO: 4456094 - DNA, 25 bp, Homo sapien
caacacaatgatgcttactagggct

SEQ ID NO: 4456095 - DNA, 25 bp, Homo sapien
cccataaatctaggtcaagtgcctt

SEQ ID NO: 4456096 - DNA, 25 bp, Homo sapien
taattagaatgggacctcacccata

SEQ ID NO: 4456097 - DNA, 25 bp, Homo sapien
aaaagttcaatatgcacaaagcaaa

SEQ ID NO: 4456098 - DNA, 25 bp, Homo sapien
tatatctatgtagcagtagtattcc

SEQ ID NO: 4456099 - DNA, 25 bp, Homo sapien
tcagctgatgtatatctatgtagca

SEQ ID NO: 4456100 - DNA, 25 bp, Homo sapien
tcttctcctgtatcacagttcagct

SEQ ID NO: 4456101 - DNA, 25 bp, Homo sapien
ctcctgtatcacagttcagctgatg

SEQ ID NO: 4456102 - DNA, 25 bp, Homo sapien
tattctacgtgagtttgtagtgagg

SEQ ID NO: 4456103 - DNA, 25 bp, Homo sapien
tagacgggacaaagaagtgctccac

SEQ ID NO: 4456104 - DNA, 25 bp, Homo sapien
taaatgtgaagtgtgtagacgggac

SEQ ID NO: 4456105 - DNA, 25 bp, Homo sapien
catacataaggtgtcatttttcctc

SEQ ID NO: 4456106 - DNA, 25 bp, Homo sapien
tgctctgaagtctttcgtgggtccg

SEQ ID NO: 4456107 - DNA, 25 bp, Homo sapien
agtctttcgtgggtccgccctgcct

SEQ ID NO: 4456108 - DNA, 25 bp, Homo sapien
tgcatctttgtctcccagtgtttct

SEQ ID NO: 4456109 - DNA, 25 bp, Homo sapien
tctgaagtctttcgtgggtccgccc

SEQ ID NO: 4456110 - DNA, 25 bp, Homo sapien
tttgtcctcctgtgtaagaacggta

SEQ ID NO: 4456111 - DNA, 25 bp, Homo sapien
gaacggtagtcaggatcacaaaacc

SEQ ID NO: 4456112 - DNA, 25 bp, Homo sapien
aaccttcttgtttgggcacaattgc

SEQ ID NO: 4456113 - DNA, 25 bp, Homo sapien
ctactgtggctgtcggaacggaaat

SEQ ID NO: 4456114 - DNA, 25 bp, Homo sapien
tcatccttgacctgttccttaaatg

SEQ ID NO: 4456115 - DNA, 25 bp, Homo sapien
ccttaaatgttgctccgtagatgag

SEQ ID NO: 4456116 - DNA, 25 bp, Homo sapien
tccttgacctgttccttaaatgttg

SEQ ID NO: 4456117 - DNA, 25 bp, Homo sapien
gttgctccgtagatgagcctatcca

SEQ ID NO: 4456118 - DNA, 25 bp, Homo sapien
tgcagaaagaaacagaccataagtc

SEQ ID NO: 4456119 - DNA, 25 bp, Homo sapien
tcatgtgcagaaagaaacagaccat

SEQ ID NO: 4456120 - DNA, 25 bp, Homo sapien
tgtgcagaaagaaacagaccataag

SEQ ID NO: 4456121 - DNA, 25 bp, Homo sapien
catgtgcagaaagaaacagaccata

SEQ ID NO: 4456122 - DNA, 25 bp, Homo sapien
aactggaggctctataccttacttc

SEQ ID NO: 4456123 - DNA, 25 bp, Homo sapien
aaaacttaatttcagaatgttcatc

SEQ ID NO: 4456124 - DNA, 25 bp, Homo sapien
ttcagaatgttcatcttactgctga

SEQ ID NO: 4456125 - DNA, 25 bp, Homo sapien
ctgcttatggagagttttggaggaa

SEQ ID NO: 4456126 - DNA, 25 bp, Homo sapien
tgcagtgggccattttccaataatg

SEQ ID NO: 4456127 - DNA, 25 bp, Homo sapien
gatgagatttcctagaagtacacgc

SEQ ID NO: 4456128 - DNA, 25 bp, Homo sapien
tggcccctgaagatatgaaagtgct

SEQ ID NO: 4456129 - DNA, 25 bp, Homo sapien
aatcaatacattttagtggcccctg

SEQ ID NO: 4456130 - DNA, 25 bp, Homo sapien
ccccatgctctgtaagatgctgtgc

SEQ ID NO: 4456131 - DNA, 25 bp, Homo sapien
cagtgcctaccaagctagctgctga

SEQ ID NO: 4456132 - DNA, 25 bp, Homo sapien
cctgtttcaaggctcaagtcacaaa

SEQ ID NO: 4456133 - DNA, 25 bp, Homo sapien
gatgctgtgcctctgtttggtgccc

SEQ ID NO: 4456134 - DNA, 25 bp, Homo sapien
taattccctcagaaatactacaatg

SEQ ID NO: 4456135 - DNA, 25 bp, Homo sapien
gaacagaggctgtattagtttttct

SEQ ID NO: 4456136 - DNA, 25 bp, Homo sapien
catggaatgcaggttggaaagtgct

SEQ ID NO: 4456137 - DNA, 25 bp, Homo sapien
tttgaatcaggcaattatgtaattc

SEQ ID NO: 4456138 - DNA, 25 bp, Homo sapien
gaagagacgtactgctaaaatccct

SEQ ID NO: 4456139 - DNA, 25 bp, Homo sapien
taatatctgacccagcgttggagca

SEQ ID NO: 4456140 - DNA, 25 bp, Homo sapien
tactgtaaaggcatagagagccacc

SEQ ID NO: 4456141 - DNA, 25 bp, Homo sapien
tcttcttgggacgatggctgagcat

SEQ ID NO: 4456142 - DNA, 25 bp, Homo sapien
gcttaataaacgtatcagagcacaa

SEQ ID NO: 4456143 - DNA, 25 bp, Homo sapien
gagcacaaataataccttcttgata

SEQ ID NO: 4456144 - DNA, 25 bp, Homo sapien
gatctgctcgcattgtcctccgaaa

SEQ ID NO: 4456145 - DNA, 25 bp, Homo sapien
accatggcttaataaacgtatcaga

SEQ ID NO: 4456146 - DNA, 25 bp, Homo sapien
ttttcaaaaatgatgagcagtttgt

SEQ ID NO: 4456147 - DNA, 25 bp, Homo sapien
tttttcaaaaatgatgagcagtttg

SEQ ID NO: 4456148 - DNA, 25 bp, Homo sapien
agatgctacatttgatcttagccag

SEQ ID NO: 4456149 - DNA, 25 bp, Homo sapien
ttagccagaaggccgagaagtgatt

SEQ ID NO: 4456150 - DNA, 25 bp, Homo sapien
gataaaaacagatgctacatttgat

SEQ ID NO: 4456151 - DNA, 25 bp, Homo sapien
actgataaaaacagatgctacattt

SEQ ID NO: 4456152 - DNA, 25 bp, Homo sapien
ttagattcccatgacaaggctcttc

SEQ ID NO: 4456153 - DNA, 25 bp, Homo sapien
tccataatttctcgtacactagtgc

SEQ ID NO: 4456154 - DNA, 25 bp, Homo sapien
ggttctggtgactctattctccaca

SEQ ID NO: 4456155 - DNA, 25 bp, Homo sapien
tccacatgggtggttctggtgactc

SEQ ID NO: 4456156 - DNA, 25 bp, Homo sapien
tcttccttttctctgaagaccccat

SEQ ID NO: 4456157 - DNA, 25 bp, Homo sapien
ttcttccttttctctgaagacccca

SEQ ID NO: 4456158 - DNA, 25 bp, Homo sapien
tcttcttccttttctctgaagaccc

SEQ ID NO: 4456159 - DNA, 25 bp, Homo sapien
tggattagcagccccaggagaaact

SEQ ID NO: 4456160 - DNA, 25 bp, Homo sapien
gattagcagccccaggagaaactga

SEQ ID NO: 4456161 - DNA, 25 bp, Homo sapien
ttagcagccccaggagaaactgagc

SEQ ID NO: 4456162 - DNA, 25 bp, Homo sapien
tagcagccccaggagaaactgagct

SEQ ID NO: 4456163 - DNA, 25 bp, Homo sapien
cgtggccttctccattgattctctg

SEQ ID NO: 4456164 - DNA, 25 bp, Homo sapien
taaaacgtggccttctccattgatt

SEQ ID NO: 4456165 - DNA, 25 bp, Homo sapien
gagctcccactagaggtctcttgtc

SEQ ID NO: 4456166 - DNA, 25 bp, Homo sapien
tcttgtcgttatataaaacgtggcc

SEQ ID NO: 4456167 - DNA, 25 bp, Homo sapien
ggagcactacttctgtaccaatgac

SEQ ID NO: 4456168 - DNA, 25 bp, Homo sapien
tcttgttgaaagctggtaataccac

SEQ ID NO: 4456169 - DNA, 25 bp, Homo sapien
caatgacttatgttgaaactggccc

SEQ ID NO: 4456170 - DNA, 25 bp, Homo sapien
cttgtagtacccaaaagatgaccct

SEQ ID NO: 4456171 - DNA, 25 bp, Homo sapien
tcattcaaggtcggcgttattgttt

SEQ ID NO: 4456172 - DNA, 25 bp, Homo sapien
ttataattgctgataggcaaccgtg

SEQ ID NO: 4456173 - DNA, 25 bp, Homo sapien
ttttataattgctgataggcaaccg

SEQ ID NO: 4456174 - DNA, 25 bp, Homo sapien
gtttttataattgctgataggcaac

SEQ ID NO: 4456175 - DNA, 25 bp, Homo sapien
agatgccttactgcactgctgaaaa

SEQ ID NO: 4456176 - DNA, 25 bp, Homo sapien
aaatagaatggagatgccttactgc

SEQ ID NO: 4456177 - DNA, 25 bp, Homo sapien
gacagcagccaaatagaatggagat

SEQ ID NO: 4456178 - DNA, 25 bp, Homo sapien
tgccttactgcactgctgaaaaatc

SEQ ID NO: 4456179 - DNA, 25 bp, Homo sapien
tggctcctccggcaattcttaaaaa

SEQ ID NO: 4456180 - DNA, 25 bp, Homo sapien
ctcctccggcaattcttaaaaacag

SEQ ID NO: 4456181 - DNA, 25 bp, Homo sapien
ttggctcctccggcaattcttaaaa

SEQ ID NO: 4456182 - DNA, 25 bp, Homo sapien
gctcctccggcaattcttaaaaaca

SEQ ID NO: 4456183 - DNA, 25 bp, Homo sapien
cacatcccgtgactcctgttggaga

SEQ ID NO: 4456184 - DNA, 25 bp, Homo sapien
gggactgaagtctttgaccaattag

SEQ ID NO: 4456185 - DNA, 25 bp, Homo sapien
ccatggtggattccagacctaagga

SEQ ID NO: 4456186 - DNA, 25 bp, Homo sapien
caattagtaggtagaaatcagggtc

SEQ ID NO: 4456187 - DNA, 25 bp, Homo sapien
atttggcactgacaactctgggcgg

SEQ ID NO: 4456188 - DNA, 25 bp, Homo sapien
caatttgattaatatttgagctccc

SEQ ID NO: 4456189 - DNA, 25 bp, Homo sapien
gattaatatttgagctcccacagtg

SEQ ID NO: 4456190 - DNA, 25 bp, Homo sapien
tgtatttggcactgacaactctggg

SEQ ID NO: 4456191 - DNA, 25 bp, Homo sapien
ttattgatttgccggatgtcccatg

SEQ ID NO: 4456192 - DNA, 25 bp, Homo sapien
attgatttgccggatgtcccatgat

SEQ ID NO: 4456193 - DNA, 25 bp, Homo sapien
tgatttgccggatgtcccatgatgt

SEQ ID NO: 4456194 - DNA, 25 bp, Homo sapien
ttgatttgccggatgtcccatgatg

SEQ ID NO: 4456195 - DNA, 25 bp, Homo sapien
cataaaggtatttatcagatctttc

SEQ ID NO: 4456196 - DNA, 25 bp, Homo sapien
tttcagcactagagcaactccagag

SEQ ID NO: 4456197 - DNA, 25 bp, Homo sapien
ggaggaataaattgacataaaggta

SEQ ID NO: 4456198 - DNA, 25 bp, Homo sapien
agcactagagcaactccagagccca

SEQ ID NO: 4456199 - DNA, 25 bp, Homo sapien
ggaaagagttgcctcctgcatgccc

SEQ ID NO: 4456200 - DNA, 25 bp, Homo sapien
tgagcagataatttgctgtgtgtgc

SEQ ID NO: 4456201 - DNA, 25 bp, Homo sapien
tctccttcaccttgagggaaagagt

SEQ ID NO: 4456202 - DNA, 25 bp, Homo sapien
tgtgcggtgaccattccgtggctct

SEQ ID NO: 4456203 - DNA, 25 bp, Homo sapien
catcttttgaccttcctgtgaagtt

SEQ ID NO: 4456204 - DNA, 25 bp, Homo sapien
tcttataagtagatctgtcctggat

SEQ ID NO: 4456205 - DNA, 25 bp, Homo sapien
agttgttgagcttagactccactct

SEQ ID NO: 4456206 - DNA, 25 bp, Homo sapien
ttatcttataagtagatctgtcctg

SEQ ID NO: 4456207 - DNA, 25 bp, Homo sapien
ttagactgtgtctacactgagtttc

SEQ ID NO: 4456208 - DNA, 25 bp, Homo sapien
cctgtttggattagaacctgtatag

SEQ ID NO: 4456209 - DNA, 25 bp, Homo sapien
tttcctgtttggattagaacctgta

SEQ ID NO: 4456210 - DNA, 25 bp, Homo sapien
tagactgtgtctacactgagtttcc

SEQ ID NO: 4456211 - DNA, 25 bp, Homo sapien
tcacagcagggccacttccttcact

SEQ ID NO: 4456212 - DNA, 25 bp, Homo sapien
agggccacttccttcactgtcctca

SEQ ID NO: 4456213 - DNA, 25 bp, Homo sapien
tcacccctgttaggctcatgacact

SEQ ID NO: 4456214 - DNA, 25 bp, Homo sapien
gtcctcacccctgttaggctcatga

SEQ ID NO: 4456215 - DNA, 25 bp, Homo sapien
ctgagtcggcaataaagactgcggg

SEQ ID NO: 4456216 - DNA, 25 bp, Homo sapien
gactgcggggacaagacttttgccc

SEQ ID NO: 4456217 - DNA, 25 bp, Homo sapien
ttgctctgccgcttgggctgagtcg

SEQ ID NO: 4456218 - DNA, 25 bp, Homo sapien
gggctggcgaaactttccttgctct

SEQ ID NO: 4456219 - DNA, 25 bp, Homo sapien
gcttcatacatttggatgtcatcct

SEQ ID NO: 4456220 - DNA, 25 bp, Homo sapien
tccttgtgcaggggagatgttagtc

SEQ ID NO: 4456221 - DNA, 25 bp, Homo sapien
ggggagatgttagtcttctctgtat

SEQ ID NO: 4456222 - DNA, 25 bp, Homo sapien
tttttactgtatgtgctgtcgaagc

SEQ ID NO: 4456223 - DNA, 25 bp, Homo sapien
tgaagataacctccgtggcttccta

SEQ ID NO: 4456224 - DNA, 25 bp, Homo sapien
tatacagactggctactatttgggc

SEQ ID NO: 4456225 - DNA, 25 bp, Homo sapien
tgggctttgggcacgtatctcatgc

SEQ ID NO: 4456226 - DNA, 25 bp, Homo sapien
tagaatgtcctcgtaaaccctggca

SEQ ID NO: 4456227 - DNA, 25 bp, Homo sapien
ctgagctttgactgagcgttgatga

SEQ ID NO: 4456228 - DNA, 25 bp, Homo sapien
ttcagcatgggtcccggtgctgtag

SEQ ID NO: 4456229 - DNA, 25 bp, Homo sapien
gactgagcgttgatgattctcccca

SEQ ID NO: 4456230 - DNA, 25 bp, Homo sapien
agctttgactgagcgttgatgattc

SEQ ID NO: 4456231 - DNA, 25 bp, Homo sapien
tggggagtactggctacagggaggg

SEQ ID NO: 4456232 - DNA, 25 bp, Homo sapien
agtactggctacagggagggcaaaa

SEQ ID NO: 4456233 - DNA, 25 bp, Homo sapien
gggagtactggctacagggagggca

SEQ ID NO: 4456234 - DNA, 25 bp, Homo sapien
gagtactggctacagggagggcaaa

SEQ ID NO: 4456235 - DNA, 25 bp, Homo sapien
ctctcaatttggcagccctgtctga

SEQ ID NO: 4456236 - DNA, 25 bp, Homo sapien
ctgcctgtaacctaactctcaattt

SEQ ID NO: 4456237 - DNA, 25 bp, Homo sapien
gtaacctaactctcaatttggcagc

SEQ ID NO: 4456238 - DNA, 25 bp, Homo sapien
cctgtctgaactccaaatgtgaaga

SEQ ID NO: 4456239 - DNA, 25 bp, Homo sapien
tcttaaatcctagcaaactgaagct

SEQ ID NO: 4456240 - DNA, 25 bp, Homo sapien
cctattgatatatggacttcagagc

SEQ ID NO: 4456241 - DNA, 25 bp, Homo sapien
gaaatcactggaaactaagccatgc

SEQ ID NO: 4456242 - DNA, 25 bp, Homo sapien
ggacttcagagcaatgtggctatat

SEQ ID NO: 4456243 - DNA, 25 bp, Homo sapien
tcagtgtgctgcgtggaccattcca

SEQ ID NO: 4456244 - DNA, 25 bp, Homo sapien
ttcgcacccggtgtgataataagtg

SEQ ID NO: 4456245 - DNA, 25 bp, Homo sapien
agaaacaagttcctcttcgcacccg

SEQ ID NO: 4456246 - DNA, 25 bp, Homo sapien
tagacaagatggaactgactccacc

SEQ ID NO: 4456247 - DNA, 25 bp, Homo sapien
gtctcactctcagtctgattataca

SEQ ID NO: 4456248 - DNA, 25 bp, Homo sapien
tctcctgctgaggtgttctgagaca

SEQ ID NO: 4456249 - DNA, 25 bp, Homo sapien
agtcacggagctttgctctcctgct

SEQ ID NO: 4456250 - DNA, 25 bp, Homo sapien
ggtgttctgagacatctctgtctca

SEQ ID NO: 4456251 - DNA, 25 bp, Homo sapien
gcctagtcaaagagctcagatttca

SEQ ID NO: 4456252 - DNA, 25 bp, Homo sapien
cagaatggacacgatatggtaaact

SEQ ID NO: 4456253 - DNA, 25 bp, Homo sapien
gagtgatctggaagagcctagtcaa

SEQ ID NO: 4456254 - DNA, 25 bp, Homo sapien
taccttgaggcaattaccagacagc

SEQ ID NO: 4456255 - DNA, 25 bp, Homo sapien
gaggacagtgcagatatttctcacc

SEQ ID NO: 4456256 - DNA, 25 bp, Homo sapien
tagacaaaaacatatccggatttct

SEQ ID NO: 4456257 - DNA, 25 bp, Homo sapien
ggaatcacagctagtgtgggaattc

SEQ ID NO: 4456258 - DNA, 25 bp, Homo sapien
gaagatggtctgtgctgctataatt

SEQ ID NO: 4456259 - DNA, 25 bp, Homo sapien
caaggcaaagctgctccatgagttt

SEQ ID NO: 4456260 - DNA, 25 bp, Homo sapien
ccatgagtttcctgtgggtcagatg

SEQ ID NO: 4456261 - DNA, 25 bp, Homo sapien
atcgtggaagaggaggcaagttgag

SEQ ID NO: 4456262 - DNA, 25 bp, Homo sapien
tcctgtgggtcagatggacatcgtg

SEQ ID NO: 4456263 - DNA, 25 bp, Homo sapien
tcgtgcatcagggtaactgatatct

SEQ ID NO: 4456264 - DNA, 25 bp, Homo sapien
ctaaagccaagtgagagggcctcca

SEQ ID NO: 4456265 - DNA, 25 bp, Homo sapien
taaagccaagtgagagggcctccaa

SEQ ID NO: 4456266 - DNA, 25 bp, Homo sapien
ccaagagaatcacttcgtgcatcag

SEQ ID NO: 4456267 - DNA, 25 bp, Homo sapien
tcaagtctatgatggaaggtccagc

SEQ ID NO: 4456268 - DNA, 25 bp, Homo sapien
tataagccctgaagcaacactgtga

SEQ ID NO: 4456269 - DNA, 25 bp, Homo sapien
taaactgctcggctgttggcacaga

SEQ ID NO: 4456270 - DNA, 25 bp, Homo sapien
tcaggtacatgactacgccaaaggt

SEQ ID NO: 4456271 - DNA, 25 bp, Homo sapien
tctgcaaatatggacagccctgact

SEQ ID NO: 4456272 - DNA, 25 bp, Homo sapien
cacagtgtcgacagggcagttctac

SEQ ID NO: 4456273 - DNA, 25 bp, Homo sapien
agctgtatggcctgctctcccttgg

SEQ ID NO: 4456274 - DNA, 25 bp, Homo sapien
tagctctctacactgttcgcctgtg

SEQ ID NO: 4456275 - DNA, 25 bp, Homo sapien
ctctctggtttgtttctcagggctg

SEQ ID NO: 4456276 - DNA, 25 bp, Homo sapien
ttcccattctctctctggtttgttt

SEQ ID NO: 4456277 - DNA, 25 bp, Homo sapien
aagtcctggcctttcccattctctc

SEQ ID NO: 4456278 - DNA, 25 bp, Homo sapien
cctttcccattctctctctggtttg

SEQ ID NO: 4456279 - DNA, 25 bp, Homo sapien
ccacggatttgcgtccctgttgctt

SEQ ID NO: 4456280 - DNA, 25 bp, Homo sapien
cgtccctgttgcttctgcgatggag

SEQ ID NO: 4456281 - DNA, 25 bp, Homo sapien
gggctgaagactccacggatttgcg

SEQ ID NO: 4456282 - DNA, 25 bp, Homo sapien
ccctgttgcttctgcgatggagtgg

SEQ ID NO: 4456283 - DNA, 25 bp, Homo sapien
ttcagttctgcagactcatctttaa

SEQ ID NO: 4456284 - DNA, 25 bp, Homo sapien
tccactcttagcagggctcctctta

SEQ ID NO: 4456285 - DNA, 25 bp, Homo sapien
gcagactcatctttaacaagccttc

SEQ ID NO: 4456286 - DNA, 25 bp, Homo sapien
ctcttagcagggctcctcttataca

SEQ ID NO: 4456287 - DNA, 25 bp, Homo sapien
ccatgaatgtcagccattggttcct

SEQ ID NO: 4456288 - DNA, 25 bp, Homo sapien
tgaatgtcagccattggttcctcac

SEQ ID NO: 4456289 - DNA, 25 bp, Homo sapien
ttgtgaaccatgaatgtcagccatt

SEQ ID NO: 4456290 - DNA, 25 bp, Homo sapien
tgaaccatgaatgtcagccattggt

SEQ ID NO: 4456291 - DNA, 25 bp, Homo sapien
tctctctccttcagcaaactctttg

SEQ ID NO: 4456292 - DNA, 25 bp, Homo sapien
agaaagcaaaatgggatctctcccg

SEQ ID NO: 4456293 - DNA, 25 bp, Homo sapien
aaaaaatgtgcacgccaactgggtt

SEQ ID NO: 4456294 - DNA, 25 bp, Homo sapien
ttgtcaattctatcgcactcccggg

SEQ ID NO: 4456295 - DNA, 25 bp, Homo sapien
gactcgtgcaatcaggcatgccttg

SEQ ID NO: 4456296 - DNA, 25 bp, Homo sapien
gaagttctgtgaatcactggaaaga

SEQ ID NO: 4456297 - DNA, 25 bp, Homo sapien
catttccacataactccatgtagtg

SEQ ID NO: 4456298 - DNA, 25 bp, Homo sapien
ccaaggcaagcatcactgttcagaa

SEQ ID NO: 4456299 - DNA, 25 bp, Homo sapien
ggagagcaattagtgcaagcttttc

SEQ ID NO: 4456300 - DNA, 25 bp, Homo sapien
ttaagccatgtagagtacgctcccc

SEQ ID NO: 4456301 - DNA, 25 bp, Homo sapien
tgacgtgccctcgtagttcagaaag

SEQ ID NO: 4456302 - DNA, 25 bp, Homo sapien
cacaagtatgggtcgaggctttgca

SEQ ID NO: 4456303 - DNA, 25 bp, Homo sapien
taatgactccggtctccagatgcac

SEQ ID NO: 4456304 - DNA, 25 bp, Homo sapien
atgaatccaagcctaaatcagctcc

SEQ ID NO: 4456305 - DNA, 25 bp, Homo sapien
ctgggtggatgaatccaagcctaaa

SEQ ID NO: 4456306 - DNA, 25 bp, Homo sapien
ggatgaatccaagcctaaatcagct

SEQ ID NO: 4456307 - DNA, 25 bp, Homo sapien
ggtggatgaatccaagcctaaatca

SEQ ID NO: 4456308 - DNA, 25 bp, Homo sapien
ggttcattatccaagccagggcatg

SEQ ID NO: 4456309 - DNA, 25 bp, Homo sapien
tccccattaatgaagagccactgtc

SEQ ID NO: 4456310 - DNA, 25 bp, Homo sapien
taatagggctccgtgtagacatcag

SEQ ID NO: 4456311 - DNA, 25 bp, Homo sapien
tagccctctgcagtgtagatccaaa

SEQ ID NO: 4456312 - DNA, 25 bp, Homo sapien
catgaaaatcacttccttccacaca

SEQ ID NO: 4456313 - DNA, 25 bp, Homo sapien
ttgctattctttctaaatcgttcat

SEQ ID NO: 4456314 - DNA, 25 bp, Homo sapien
ccacacaaattgctattctttctaa

SEQ ID NO: 4456315 - DNA, 25 bp, Homo sapien
cttccttccacacaaattgctattc

SEQ ID NO: 4456316 - DNA, 25 bp, Homo sapien
tcccatgcctgtgcaaattggcttc

SEQ ID NO: 4456317 - DNA, 25 bp, Homo sapien
tctgctatcttggttgatggaaaac

SEQ ID NO: 4456318 - DNA, 25 bp, Homo sapien
cattgggtgcgctcatctattctca

SEQ ID NO: 4456319 - DNA, 25 bp, Homo sapien
taaatcgggtcagaaatccagtcac

SEQ ID NO: 4456320 - DNA, 25 bp, Homo sapien
ggctgcacgtaagaatccaaatcat

SEQ ID NO: 4456321 - DNA, 25 bp, Homo sapien
tttctggcatccaacggctgcacgt

SEQ ID NO: 4456322 - DNA, 25 bp, Homo sapien
gttgcaatacctccccaccttgtga

SEQ ID NO: 4456323 - DNA, 25 bp, Homo sapien
ggaattttgccccagactctctgct

SEQ ID NO: 4456324 - DNA, 25 bp, Homo sapien
ggtagctagtactcaaaacagatgg

SEQ ID NO: 4456325 - DNA, 25 bp, Homo sapien
cagtggtgctaaactcaaggcagct

SEQ ID NO: 4456326 - DNA, 25 bp, Homo sapien
gacaggtctccccttaatgctaggt

SEQ ID NO: 4456327 - DNA, 25 bp, Homo sapien
cacatcaccggagtgcctaaaaggg

SEQ ID NO: 4456328 - DNA, 25 bp, Homo sapien
ttttaagcaatcgaagtacctctcc

SEQ ID NO: 4456329 - DNA, 25 bp, Homo sapien
tcttctccttttaagcaatcgaagt

SEQ ID NO: 4456330 - DNA, 25 bp, Homo sapien
taagcaatcgaagtacctctccaag

SEQ ID NO: 4456331 - DNA, 25 bp, Homo sapien
atcgaagtacctctccaagtacatg

SEQ ID NO: 4456332 - DNA, 25 bp, Homo sapien
cccaaagaggaggtctatacagaat

SEQ ID NO: 4456333 - DNA, 25 bp, Homo sapien
gaagctgattccctttggcaagcac

SEQ ID NO: 4456334 - DNA, 25 bp, Homo sapien
tacagtccactgaggaccgaagcag

SEQ ID NO: 4456335 - DNA, 25 bp, Homo sapien
gcacattggaagtcctaccgcttgt

SEQ ID NO: 4456336 - DNA, 25 bp, Homo sapien
aattagatttaaccctgacctggct

SEQ ID NO: 4456337 - DNA, 25 bp, Homo sapien
cagtaatacgatttgcagcagagtc

SEQ ID NO: 4456338 - DNA, 25 bp, Homo sapien
ttcccaagcaaagttcagtaatacg

SEQ ID NO: 4456339 - DNA, 25 bp, Homo sapien
tatagcctcttacactgaacactgg

SEQ ID NO: 4456340 - DNA, 25 bp, Homo sapien
aagcatccaaatcattgccacttac

SEQ ID NO: 4456341 - DNA, 25 bp, Homo sapien
tctttcctccacatgatcggacata

SEQ ID NO: 4456342 - DNA, 25 bp, Homo sapien
actttcttgcctatgatgcaactca

SEQ ID NO: 4456343 - DNA, 25 bp, Homo sapien
gtccactttcttgcctatgatgcaa

SEQ ID NO: 4456344 - DNA, 25 bp, Homo sapien
gatcggacatactactgtccacttt

SEQ ID NO: 4456345 - DNA, 25 bp, Homo sapien
gagatgagttccttgagatatgatt

SEQ ID NO: 4456346 - DNA, 25 bp, Homo sapien
atgagttccttgagatatgattttc

SEQ ID NO: 4456347 - DNA, 25 bp, Homo sapien
tttgtcgttctggagatgagttcct

SEQ ID NO: 4456348 - DNA, 25 bp, Homo sapien
ttgtcgttctggagatgagttcctt

SEQ ID NO: 4456349 - DNA, 25 bp, Homo sapien
gcccttaaactctagattattaaga

SEQ ID NO: 4456350 - DNA, 25 bp, Homo sapien
tcatgccagaagtaggcccttaaac

SEQ ID NO: 4456351 - DNA, 25 bp, Homo sapien
taggcccttaaactctagattatta

SEQ ID NO: 4456352 - DNA, 25 bp, Homo sapien
taaactctagattattaagacacat

SEQ ID NO: 4456353 - DNA, 25 bp, Homo sapien
ggctggaatcagaacctagctctgt

SEQ ID NO: 4456354 - DNA, 25 bp, Homo sapien
taagttctgaagtaacacagggctg

SEQ ID NO: 4456355 - DNA, 25 bp, Homo sapien
taaattgcagcaatgggaaccactt

SEQ ID NO: 4456356 - DNA, 25 bp, Homo sapien
tctgtcatttactcactgtgtggcc

SEQ ID NO: 4456357 - DNA, 25 bp, Homo sapien
cagtacatgacccaaattgttcaca

SEQ ID NO: 4456358 - DNA, 25 bp, Homo sapien
agtacatgacccaaattgttcacag

SEQ ID NO: 4456359 - DNA, 25 bp, Homo sapien
tcatgtgaggttccttccgattgag

SEQ ID NO: 4456360 - DNA, 25 bp, Homo sapien
tgtggggtcaataggcttgagctca

SEQ ID NO: 4456361 - DNA, 25 bp, Homo sapien
gcttaggcgagtgcaaggagaaaca

SEQ ID NO: 4456362 - DNA, 25 bp, Homo sapien
gattgtgaactttggataactggca

SEQ ID NO: 4456363 - DNA, 25 bp, Homo sapien
tggcccttaataacctacacatgta

SEQ ID NO: 4456364 - DNA, 25 bp, Homo sapien
taagtaatagcatagtcagaactgc

SEQ ID NO: 4456365 - DNA, 25 bp, Homo sapien
aaatcgtttcgataatccatggtcc

SEQ ID NO: 4456366 - DNA, 25 bp, Homo sapien
cagttctataaatgccctatgtgag

SEQ ID NO: 4456367 - DNA, 25 bp, Homo sapien
cacagcactactccatcagtaactt

SEQ ID NO: 4456368 - DNA, 25 bp, Homo sapien
tacacagcactactccatcagtaac

SEQ ID NO: 4456369 - DNA, 25 bp, Homo sapien
acacagcactactccatcagtaact

SEQ ID NO: 4456370 - DNA, 25 bp, Homo sapien
aattgcaatgggtaaaatgacttct

SEQ ID NO: 4456371 - DNA, 25 bp, Homo sapien
caataattgcaatgggtaaaatgac

SEQ ID NO: 4456372 - DNA, 25 bp, Homo sapien
aacatccactgttcatggtataaag

SEQ ID NO: 4456373 - DNA, 25 bp, Homo sapien
aataaaaccaataattgcaatgggt

SEQ ID NO: 4456374 - DNA, 25 bp, Homo sapien
catctcggacaataggcaaagtttt

SEQ ID NO: 4456375 - DNA, 25 bp, Homo sapien
ttttttctgcgaagatccggcatgc

SEQ ID NO: 4456376 - DNA, 25 bp, Homo sapien
tcaataccataaagtccacctccag

SEQ ID NO: 4456377 - DNA, 25 bp, Homo sapien
cacatctcggacaataggcaaagtt

SEQ ID NO: 4456378 - DNA, 25 bp, Homo sapien
agttcctcattatttagggatgtcc

SEQ ID NO: 4456379 - DNA, 25 bp, Homo sapien
agagtccagatttccgggcagccag

SEQ ID NO: 4456380 - DNA, 25 bp, Homo sapien
tgtcctaatcaccatagccagggag

SEQ ID NO: 4456381 - DNA, 25 bp, Homo sapien
ccagggagagtccagatttccgggc

SEQ ID NO: 4456382 - DNA, 25 bp, Homo sapien
taatagcgcctcatgggtaaggtgg

SEQ ID NO: 4456383 - DNA, 25 bp, Homo sapien
catggccagcagagcgttagtgaag

SEQ ID NO: 4456384 - DNA, 25 bp, Homo sapien
gggcactggcgatgcttcacccatg

SEQ ID NO: 4456385 - DNA, 25 bp, Homo sapien
cagtgctaggtgacccactgtcatc

SEQ ID NO: 4456386 - DNA, 25 bp, Homo sapien
caagttcctgccctactgcgctgat

SEQ ID NO: 4456387 - DNA, 25 bp, Homo sapien
ggcagggaggcattagactcagcat

SEQ ID NO: 4456388 - DNA, 25 bp, Homo sapien
ttagactcagcatgtattctgcagc

SEQ ID NO: 4456389 - DNA, 25 bp, Homo sapien
agttcctgccctactgcgctgatgg

SEQ ID NO: 4456390 - DNA, 25 bp, Homo sapien
caagcagtcagcgtttagcaggtcc

SEQ ID NO: 4456391 - DNA, 25 bp, Homo sapien
tcacactcataacagtaggtgggtg

SEQ ID NO: 4456392 - DNA, 25 bp, Homo sapien
caggtcctgacacttttcgtggcat

SEQ ID NO: 4456393 - DNA, 25 bp, Homo sapien
gacatagggtagatcagtgcctgca

SEQ ID NO: 4456394 - DNA, 25 bp, Homo sapien
tttttcagccaaaccaagtactcac

SEQ ID NO: 4456395 - DNA, 25 bp, Homo sapien
ctttttcagccaaaccaagtactca

SEQ ID NO: 4456396 - DNA, 25 bp, Homo sapien
cactttttcagccaaaccaagtact

SEQ ID NO: 4456397 - DNA, 25 bp, Homo sapien
ggagcgggtaggatttcttgacaac

SEQ ID NO: 4456398 - DNA, 25 bp, Homo sapien
tcatcaactgtgatttgatggacag

SEQ ID NO: 4456399 - DNA, 25 bp, Homo sapien
cactgtaagaatgcatcatcaactg

SEQ ID NO: 4456400 - DNA, 25 bp, Homo sapien
tgacaaccagcaagagttgaagtga

SEQ ID NO: 4456401 - DNA, 25 bp, Homo sapien
tgtcaagcaatccacatatcttaca

SEQ ID NO: 4456402 - DNA, 25 bp, Homo sapien
ttcagtgtcaagcaatccacatatc

SEQ ID NO: 4456403 - DNA, 25 bp, Homo sapien
cagtgtcaagcaatccacatatctt

SEQ ID NO: 4456404 - DNA, 25 bp, Homo sapien
cccttcagtgtcaagcaatccacat

SEQ ID NO: 4456405 - DNA, 25 bp, Homo sapien
tggaaatgccattactttttgatgg

SEQ ID NO: 4456406 - DNA, 25 bp, Homo sapien
tgtgaatggaaatgccattactttt

SEQ ID NO: 4456407 - DNA, 25 bp, Homo sapien
ggaaacatcaatggtgatgtgaatg

SEQ ID NO: 4456408 - DNA, 25 bp, Homo sapien
gaaacatcaatggtgatgtgaatgg

SEQ ID NO: 4456409 - DNA, 25 bp, Homo sapien
tgtttggccgcctttgtaaactgca

SEQ ID NO: 4456410 - DNA, 25 bp, Homo sapien
cttagatgtcccatccagtacactc

SEQ ID NO: 4456411 - DNA, 25 bp, Homo sapien
tctgagtcttgtcttcggcaccatg

SEQ ID NO: 4456412 - DNA, 25 bp, Homo sapien
tatttttgcagaccacttagatgtc

SEQ ID NO: 4456413 - DNA, 25 bp, Homo sapien
aataaacattttaacatacagagtc

SEQ ID NO: 4456414 - DNA, 25 bp, Homo sapien
aaaataaacattttaacatacagag

SEQ ID NO: 4456415 - DNA, 25 bp, Homo sapien
aaataaacattttaacatacagagt

SEQ ID NO: 4456416 - DNA, 25 bp, Homo sapien
ccaaaataaacattttaacatacag

SEQ ID NO: 4456417 - DNA, 25 bp, Homo sapien
tgcctgtagaccctgtgcagaaacc

SEQ ID NO: 4456418 - DNA, 25 bp, Homo sapien
caacttgaactgtaacatatggatc

SEQ ID NO: 4456419 - DNA, 25 bp, Homo sapien
tggatcactagaccctgttttatct

SEQ ID NO: 4456420 - DNA, 25 bp, Homo sapien
gcctgtagaccctgtgcagaaacca

SEQ ID NO: 4456421 - DNA, 25 bp, Homo sapien
ctgcaaaagagaaccgtttataaag

SEQ ID NO: 4456422 - DNA, 25 bp, Homo sapien
aagaaaaggtaactctgcaattctc

SEQ ID NO: 4456423 - DNA, 25 bp, Homo sapien
caacgtctgaacataaattcactgt

SEQ ID NO: 4456424 - DNA, 25 bp, Homo sapien
tgtgatgtgtatacatttttcaacg

SEQ ID NO: 4456425 - DNA, 25 bp, Homo sapien
cagtactcacccttgagtgtaggca

SEQ ID NO: 4456426 - DNA, 25 bp, Homo sapien
tcacccttgagtgtaggcactgata

SEQ ID NO: 4456427 - DNA, 25 bp, Homo sapien
tactcacccttgagtgtaggcactg

SEQ ID NO: 4456428 - DNA, 25 bp, Homo sapien
ctttcacagtactcacccttgagtg

SEQ ID NO: 4456429 - DNA, 25 bp, Homo sapien
aattgtttgtcccagaaaatcatct

SEQ ID NO: 4456430 - DNA, 25 bp, Homo sapien
atccatttctccactcaaggtcctc

SEQ ID NO: 4456431 - DNA, 25 bp, Homo sapien
catttctccactcaaggtcctcact

SEQ ID NO: 4456432 - DNA, 25 bp, Homo sapien
tttgtcccagaaaatcatctgactc

SEQ ID NO: 4456433 - DNA, 25 bp, Homo sapien
tgattttcaatcgtatggccccaga

SEQ ID NO: 4456434 - DNA, 25 bp, Homo sapien
ccacattgattttcaatcgtatggc

SEQ ID NO: 4456435 - DNA, 25 bp, Homo sapien
tggccccagatacagctgacttatc

SEQ ID NO: 4456436 - DNA, 25 bp, Homo sapien
acatgtatattgaatatgatatgga

SEQ ID NO: 4456437 - DNA, 25 bp, Homo sapien
gattcaattccataacgcatagcaa

SEQ ID NO: 4456438 - DNA, 25 bp, Homo sapien
caaattcatcaactatttcttggga

SEQ ID NO: 4456439 - DNA, 25 bp, Homo sapien
tatttcttgggaagcatcatcaaag

SEQ ID NO: 4456440 - DNA, 25 bp, Homo sapien
tggattcaattccataacgcatagc

SEQ ID NO: 4456441 - DNA, 25 bp, Homo sapien
cacaggctatgtggtaatgagaaac

SEQ ID NO: 4456442 - DNA, 25 bp, Homo sapien
ctcacaggctatgtggtaatgagaa

SEQ ID NO: 4456443 - DNA, 25 bp, Homo sapien
aggctatgtggtaatgagaaaccca

SEQ ID NO: 4456444 - DNA, 25 bp, Homo sapien
acccaaatacccagcactccagggg

SEQ ID NO: 4456445 - DNA, 25 bp, Homo sapien
tggtagcagcaaatcgatctgaggc

SEQ ID NO: 4456446 - DNA, 25 bp, Homo sapien
gatctgaggcagaaacctgtatgtt

SEQ ID NO: 4456447 - DNA, 25 bp, Homo sapien
tagccagcaaggtgctcatgacggc

SEQ ID NO: 4456448 - DNA, 25 bp, Homo sapien
aactgttgtgtgagcataaaaagca

SEQ ID NO: 4456449 - DNA, 25 bp, Homo sapien
agatcaatcctcaaagagttatgta

SEQ ID NO: 4456450 - DNA, 25 bp, Homo sapien
gtaactggtccagtagttttatgaa

SEQ ID NO: 4456451 - DNA, 25 bp, Homo sapien
aaaggtgatacttgttaacaggtca

SEQ ID NO: 4456452 - DNA, 25 bp, Homo sapien
tacttgttaacaggtcaacagttga

SEQ ID NO: 4456453 - DNA, 25 bp, Homo sapien
cttgcagtctttcagtattgcttgc

SEQ ID NO: 4456454 - DNA, 25 bp, Homo sapien
caacagttgatttcaggtcttgcag

SEQ ID NO: 4456455 - DNA, 25 bp, Homo sapien
ttttggggggctttgcagctccaga

SEQ ID NO: 4456456 - DNA, 25 bp, Homo sapien
ctcgcttttggggggctttgcagct

SEQ ID NO: 4456457 - DNA, 25 bp, Homo sapien
ttggggggctttgcagctccagaac

SEQ ID NO: 4456458 - DNA, 25 bp, Homo sapien
gcttttggggggctttgcagctcca

SEQ ID NO: 4456459 - DNA, 25 bp, Homo sapien
aggcaagcccttacacagtccttca

SEQ ID NO: 4456460 - DNA, 25 bp, Homo sapien
ttagctgggagtagagttcatggca

SEQ ID NO: 4456461 - DNA, 25 bp, Homo sapien
tagagttcatggcagttgtcaaaaa

SEQ ID NO: 4456462 - DNA, 25 bp, Homo sapien
cgggtctgttagctgggagtagagt

SEQ ID NO: 4456463 - DNA, 25 bp, Homo sapien
cttttctatcaaatcgattttcctt

SEQ ID NO: 4456464 - DNA, 25 bp, Homo sapien
cttgttctaactgcagctgtctcta

SEQ ID NO: 4456465 - DNA, 25 bp, Homo sapien
gtctttgctagccatctatcagaga

SEQ ID NO: 4456466 - DNA, 25 bp, Homo sapien
caaaattgaacacctctatagagag

SEQ ID NO: 4456467 - DNA, 25 bp, Homo sapien
tgccaaagaagaacgtctcaaagat

SEQ ID NO: 4456468 - DNA, 25 bp, Homo sapien
cattaacttgttctggagagagcaa

SEQ ID NO: 4456469 - DNA, 25 bp, Homo sapien
ggttttggtgccacttaagtcttca

SEQ ID NO: 4456470 - DNA, 25 bp, Homo sapien
acatggtcttatatgccatcccaaa

SEQ ID NO: 4456471 - DNA, 25 bp, Homo sapien
tatgccatcccaaattcctacgtaa

SEQ ID NO: 4456472 - DNA, 25 bp, Homo sapien
caagttgtatagactgaatatgtac

SEQ ID NO: 4456473 - DNA, 25 bp, Homo sapien
tcctacgtaatacaaaagatatctt

SEQ ID NO: 4456474 - DNA, 25 bp, Homo sapien
taatgctacctccactacttccaaa

SEQ ID NO: 4456475 - DNA, 25 bp, Homo sapien
atgctacctccactacttccaaaag

SEQ ID NO: 4456476 - DNA, 25 bp, Homo sapien
cttccaaaagcagcaacagaggcat

SEQ ID NO: 4456477 - DNA, 25 bp, Homo sapien
cacctaatgctacctccactacttc

SEQ ID NO: 4456478 - DNA, 25 bp, Homo sapien
ttcaggacaggtgtgtaggcagttt

SEQ ID NO: 4456479 - DNA, 25 bp, Homo sapien
caaattcttggtggttggtccctga

SEQ ID NO: 4456480 - DNA, 25 bp, Homo sapien
gcagttttatcctcatcaataatag

SEQ ID NO: 4456481 - DNA, 25 bp, Homo sapien
gtaaccatcagtgtaataagttggg

SEQ ID NO: 4456482 - DNA, 25 bp, Homo sapien
tctgcattagtttaggtaaccaagg

SEQ ID NO: 4456483 - DNA, 25 bp, Homo sapien
gtgatccttaccctagtggtctgga

SEQ ID NO: 4456484 - DNA, 25 bp, Homo sapien
ccagatgagttcacttaaggcattt

SEQ ID NO: 4456485 - DNA, 25 bp, Homo sapien
tacaaatgcaacattggccaccagg

SEQ ID NO: 4456486 - DNA, 25 bp, Homo sapien
caaatggaataacccagaaagtggc

SEQ ID NO: 4456487 - DNA, 25 bp, Homo sapien
taagactgtcagcactaatcaaggt

SEQ ID NO: 4456488 - DNA, 25 bp, Homo sapien
caataccagggccttaccgttaatg

SEQ ID NO: 4456489 - DNA, 25 bp, Homo sapien
cagataatgtcctacctgatgtgac

SEQ ID NO: 4456490 - DNA, 25 bp, Homo sapien
ctcactatgtactgatctcaaactc

SEQ ID NO: 4456491 - DNA, 25 bp, Homo sapien
gctcagagtgttgccttggctcact

SEQ ID NO: 4456492 - DNA, 25 bp, Homo sapien
tgctcagagtgttgccttggctcac

SEQ ID NO: 4456493 - DNA, 25 bp, Homo sapien
attgctcagagtgttgccttggctc

SEQ ID NO: 4456494 - DNA, 25 bp, Homo sapien
aaaagagtccacataatttcggcac

SEQ ID NO: 4456495 - DNA, 25 bp, Homo sapien
caaaaagagtccacataatttcggc

SEQ ID NO: 4456496 - DNA, 25 bp, Homo sapien
atttcatatccagagcaaaaagagt

SEQ ID NO: 4456497 - DNA, 25 bp, Homo sapien
tatccagagcaaaaagagtccacat

SEQ ID NO: 4456498 - DNA, 25 bp, Homo sapien
accaggtctatggttctatctctaa

SEQ ID NO: 4456499 - DNA, 25 bp, Homo sapien
ctagaggatagtaaccaggtctatg

SEQ ID NO: 4456500 - DNA, 25 bp, Homo sapien
agaggatagtaaccaggtctatggt

SEQ ID NO: 4456501 - DNA, 25 bp, Homo sapien
tagaggatagtaaccaggtctatgg

SEQ ID NO: 4456502 - DNA, 25 bp, Homo sapien
tgggagctactacagataatgcggt

SEQ ID NO: 4456503 - DNA, 25 bp, Homo sapien
gaggtgtcagtagctgagccctcca

SEQ ID NO: 4456504 - DNA, 25 bp, Homo sapien
tccctcatgcaggaataaactttta

SEQ ID NO: 4456505 - DNA, 25 bp, Homo sapien
agagcagctggccaaaaaatccctc

SEQ ID NO: 4456506 - DNA, 25 bp, Homo sapien
tacaatatatgggaaatacgggacc

SEQ ID NO: 4456507 - DNA, 25 bp, Homo sapien
ttatacaatatatgggaaatacggg

SEQ ID NO: 4456508 - DNA, 25 bp, Homo sapien
atatgggaaatacgggacccgattg

SEQ ID NO: 4456509 - DNA, 25 bp, Homo sapien
caatatatgggaaatacgggacccg

SEQ ID NO: 4456510 - DNA, 25 bp, Homo sapien
tgtttgagcacctaagaccatgtct

SEQ ID NO: 4456511 - DNA, 25 bp, Homo sapien
gaatacttccatgctcgctaaaaag

SEQ ID NO: 4456512 - DNA, 25 bp, Homo sapien
gaccatgtctcccactataatcctg

SEQ ID NO: 4456513 - DNA, 25 bp, Homo sapien
gagaaaactgtgtagctaatcatca

SEQ ID NO: 4456514 - DNA, 25 bp, Homo sapien
ctgtatgccattttagttctgacat

SEQ ID NO: 4456515 - DNA, 25 bp, Homo sapien
taatgtatttgtttaataagtctaa

SEQ ID NO: 4456516 - DNA, 25 bp, Homo sapien
aataagtctaaatttcctttctctg

SEQ ID NO: 4456517 - DNA, 25 bp, Homo sapien
ttctctgtatgccattttagttctg

SEQ ID NO: 4456518 - DNA, 25 bp, Homo sapien
taaaatgtattattggcaggaatag

SEQ ID NO: 4456519 - DNA, 25 bp, Homo sapien
aaatgtattattggcaggaatagtt

SEQ ID NO: 4456520 - DNA, 25 bp, Homo sapien
gatgggcccaagtgataggtcatga

SEQ ID NO: 4456521 - DNA, 25 bp, Homo sapien
tgggcccaagtgataggtcatgaag

SEQ ID NO: 4456522 - DNA, 25 bp, Homo sapien
atgacttggaagaatgctgcatgac

SEQ ID NO: 4456523 - DNA, 25 bp, Homo sapien
gctgcatgacttgtccaagccatag

SEQ ID NO: 4456524 - DNA, 25 bp, Homo sapien
tgcatgacttgtccaagccatagac

SEQ ID NO: 4456525 - DNA, 25 bp, Homo sapien
tcactccatgatatgacttggaaga

SEQ ID NO: 4456526 - DNA, 25 bp, Homo sapien
aaatcatctggaccaatgtgaatcc

SEQ ID NO: 4456527 - DNA, 25 bp, Homo sapien
aatcatctggaccaatgtgaatcct

SEQ ID NO: 4456528 - DNA, 25 bp, Homo sapien
tgaaggcaggaagttcacgcacata

SEQ ID NO: 4456529 - DNA, 25 bp, Homo sapien
aattcatataatcggtgctcttgca

SEQ ID NO: 4456530 - DNA, 25 bp, Homo sapien
tattcaggaacagcatccttgaagg

SEQ ID NO: 4456531 - DNA, 25 bp, Homo sapien
gctcttgcataaccgctgattttca

SEQ ID NO: 4456532 - DNA, 25 bp, Homo sapien
cacatcttcaccctttacatacttg

SEQ ID NO: 4456533 - DNA, 25 bp, Homo sapien
tttaaccccatatgtctttagttga

SEQ ID NO: 4456534 - DNA, 25 bp, Homo sapien
atcttcaccctttacatacttgctg

SEQ ID NO: 4456535 - DNA, 25 bp, Homo sapien
taaccccatatgtctttagttgaca

SEQ ID NO: 4456536 - DNA, 25 bp, Homo sapien
tgcacccattatctaagcagtgttt

SEQ ID NO: 4456537 - DNA, 25 bp, Homo sapien
gcacccattatctaagcagtgttta

SEQ ID NO: 4456538 - DNA, 25 bp, Homo sapien
ctacccccgtcttggttcttcgcat

SEQ ID NO: 4456539 - DNA, 25 bp, Homo sapien
tctacccccgtcttggttcttcgca

SEQ ID NO: 4456540 - DNA, 25 bp, Homo sapien
tctagccattgcatgacaaaaggtt

SEQ ID NO: 4456541 - DNA, 25 bp, Homo sapien
ggaattccattgacacatcttcgtt

SEQ ID NO: 4456542 - DNA, 25 bp, Homo sapien
tccattgacacatcttcgttttcat

SEQ ID NO: 4456543 - DNA, 25 bp, Homo sapien
tcatctagccattgcatgacaaaag

SEQ ID NO: 4456544 - DNA, 25 bp, Homo sapien
ggagaggaggtgaaaccatcccaaa

SEQ ID NO: 4456545 - DNA, 25 bp, Homo sapien
cactgctgaattgaggtactggttc

SEQ ID NO: 4456546 - DNA, 25 bp, Homo sapien
catcccaaacagtacattagaggcg

SEQ ID NO: 4456547 - DNA, 25 bp, Homo sapien
caagctactgctaattggtttttcc

SEQ ID NO: 4456548 - DNA, 25 bp, Homo sapien
agacatcaaccacggagcaagaaaa

SEQ ID NO: 4456549 - DNA, 25 bp, Homo sapien
aagctctgattcagctgagcaaaga

SEQ ID NO: 4456550 - DNA, 25 bp, Homo sapien
tcaggattagggcattccagtttct

SEQ ID NO: 4456551 - DNA, 25 bp, Homo sapien
caaccacggagcaagaaaagagagc

SEQ ID NO: 4456552 - DNA, 25 bp, Homo sapien
tgtcactaccctgcataaaaatctc

SEQ ID NO: 4456553 - DNA, 25 bp, Homo sapien
ctaagttgaccagcacattaagtct

SEQ ID NO: 4456554 - DNA, 25 bp, Homo sapien
tactatgtttgttatgtcactaccc

SEQ ID NO: 4456555 - DNA, 25 bp, Homo sapien
aatctccaaaggttctgcgtttcct

SEQ ID NO: 4456556 - DNA, 25 bp, Homo sapien
ttttccttatcacaatgtgaactga

SEQ ID NO: 4456557 - DNA, 25 bp, Homo sapien
caattgcagcatactggagcagcac

SEQ ID NO: 4456558 - DNA, 25 bp, Homo sapien
cttgatacaattgcagcatactgga

SEQ ID NO: 4456559 - DNA, 25 bp, Homo sapien
aaatcacttgatacaattgcagcat

SEQ ID NO: 4456560 - DNA, 25 bp, Homo sapien
cagctggacccgcaattgttgaata

SEQ ID NO: 4456561 - DNA, 25 bp, Homo sapien
gttgaatattgttcatcaagataca

SEQ ID NO: 4456562 - DNA, 25 bp, Homo sapien
gaatattgttcatcaagatacaggg

SEQ ID NO: 4456563 - DNA, 25 bp, Homo sapien
gacccgcaattgttgaatattgttc

SEQ ID NO: 4456564 - DNA, 25 bp, Homo sapien
atattactttggagttttgagaaag

SEQ ID NO: 4456565 - DNA, 25 bp, Homo sapien
acaatattactttggagttttgaga

SEQ ID NO: 4456566 - DNA, 25 bp, Homo sapien
aacaatattactttggagttttgag

SEQ ID NO: 4456567 - DNA, 25 bp, Homo sapien
ttactttggagttttgagaaagcat

SEQ ID NO: 4456568 - DNA, 25 bp, Homo sapien
caccataagtgacgctgagctcatc

SEQ ID NO: 4456569 - DNA, 25 bp, Homo sapien
caggaccccactgagcttaacctga

SEQ ID NO: 4456570 - DNA, 25 bp, Homo sapien
tcttttagaatagtactagcttcag

SEQ ID NO: 4456571 - DNA, 25 bp, Homo sapien
gagcttaacctgaagttcttttaga

SEQ ID NO: 4456572 - DNA, 25 bp, Homo sapien
gctggctgtagtcaaaatcaccttt

SEQ ID NO: 4456573 - DNA, 25 bp, Homo sapien
ctgattttcgaatcagtgcattggg

SEQ ID NO: 4456574 - DNA, 25 bp, Homo sapien
aatcacctttgaaatgactactttc

SEQ ID NO: 4456575 - DNA, 25 bp, Homo sapien
acggggtcatccatgatcctgctgg

SEQ ID NO: 4456576 - DNA, 25 bp, Homo sapien
tgatttagttcgaaactcatctgtt

SEQ ID NO: 4456577 - DNA, 25 bp, Homo sapien
gctgcactgttcttattagatgtgg

SEQ ID NO: 4456578 - DNA, 25 bp, Homo sapien
tctgttttatacactcttcaattat

SEQ ID NO: 4456579 - DNA, 25 bp, Homo sapien
taagagatcttaacacaatctctgc

SEQ ID NO: 4456580 - DNA, 25 bp, Homo sapien
atacttggcatgctgactaaccctg

SEQ ID NO: 4456581 - DNA, 25 bp, Homo sapien
ctgactaaccctgcttagaccggaa

SEQ ID NO: 4456582 - DNA, 25 bp, Homo sapien
ggcatgctgactaaccctgcttaga

SEQ ID NO: 4456583 - DNA, 25 bp, Homo sapien
tgctgactaaccctgcttagaccgg

SEQ ID NO: 4456584 - DNA, 25 bp, Homo sapien
ctattttgttgagaactagcttcca

SEQ ID NO: 4456585 - DNA, 25 bp, Homo sapien
attttgttgagaactagcttccata

SEQ ID NO: 4456586 - DNA, 25 bp, Homo sapien
tttctattttgttgagaactagctt

SEQ ID NO: 4456587 - DNA, 25 bp, Homo sapien
aactcgctttaggactgttttctca

SEQ ID NO: 4456588 - DNA, 25 bp, Homo sapien
tgtctggcagtaaatcaacaaaaac

SEQ ID NO: 4456589 - DNA, 25 bp, Homo sapien
ggcagtaaatcaacaaaaacacagg

SEQ ID NO: 4456590 - DNA, 25 bp, Homo sapien
gtctggcagtaaatcaacaaaaaca

SEQ ID NO: 4456591 - DNA, 25 bp, Homo sapien
agtaaatcaacaaaaacacaggcat

SEQ ID NO: 4456592 - DNA, 25 bp, Homo sapien
ctgcaatgaaaatcatctggggtcc

SEQ ID NO: 4456593 - DNA, 25 bp, Homo sapien
cttcagtttggataattgtccaaga

SEQ ID NO: 4456594 - DNA, 25 bp, Homo sapien
aattgtccaagatctttagctgcaa

SEQ ID NO: 4456595 - DNA, 25 bp, Homo sapien
gatctttagctgcaatgaaaatcat

SEQ ID NO: 4456596 - DNA, 25 bp, Homo sapien
ggactacctccattatagcgcattg

SEQ ID NO: 4456597 - DNA, 25 bp, Homo sapien
ttgtcttggcgtcagacccctggca

SEQ ID NO: 4456598 - DNA, 25 bp, Homo sapien
cttgatggtagccaggactacctcc

SEQ ID NO: 4456599 - DNA, 25 bp, Homo sapien
ctggcatcctctcgaatcatgtgct

SEQ ID NO: 4456600 - DNA, 25 bp, Homo sapien
tcggtcactcatgctgtgttttcta

SEQ ID NO: 4456601 - DNA, 25 bp, Homo sapien
gtgttttctataggcctgcaatgtc

SEQ ID NO: 4456602 - DNA, 25 bp, Homo sapien
ggccaatgccttctcttcggtcact

SEQ ID NO: 4456603 - DNA, 25 bp, Homo sapien
taaagttttcatgccggccaatgcc

SEQ ID NO: 4456604 - DNA, 25 bp, Homo sapien
tgcctccaagccttcttgtcttgtg

SEQ ID NO: 4456605 - DNA, 25 bp, Homo sapien
tgtgcctttccctggtgaaattcct

SEQ ID NO: 4456606 - DNA, 25 bp, Homo sapien
gtcttgtgcctttccctggtgaaat

SEQ ID NO: 4456607 - DNA, 25 bp, Homo sapien
ctccaagccttcttgtcttgtgcct

SEQ ID NO: 4456608 - DNA, 25 bp, Homo sapien
aaggaactggagagtagaatctgca

SEQ ID NO: 4456609 - DNA, 25 bp, Homo sapien
gaaggaactggagagtagaatctgc

SEQ ID NO: 4456610 - DNA, 25 bp, Homo sapien
aggaactggagagtagaatctgcat

SEQ ID NO: 4456611 - DNA, 25 bp, Homo sapien
cttactggcacagataatcaggaga

SEQ ID NO: 4456612 - DNA, 25 bp, Homo sapien
tactggcacagataatcaggagaaa

SEQ ID NO: 4456613 - DNA, 25 bp, Homo sapien
gggctgcagttattacatggacctt

SEQ ID NO: 4456614 - DNA, 25 bp, Homo sapien
tacatggaccttggcattcagagat

SEQ ID NO: 4456615 - DNA, 25 bp, Homo sapien
caaggcatcagtagtttgggtataa

SEQ ID NO: 4456616 - DNA, 25 bp, Homo sapien
ggtataaagactgagagcatatctc

SEQ ID NO: 4456617 - DNA, 25 bp, Homo sapien
gagagcatatctcagagactgaaga

SEQ ID NO: 4456618 - DNA, 25 bp, Homo sapien
tctgtgaggtttgagtatctatgaa

SEQ ID NO: 4456619 - DNA, 25 bp, Homo sapien
atgtacagataggagggtccccaga

SEQ ID NO: 4456620 - DNA, 25 bp, Homo sapien
gcaaccatataggaagcattgaggg

SEQ ID NO: 4456621 - DNA, 25 bp, Homo sapien
cacgagagaccagcgtttggatgca

SEQ ID NO: 4456622 - DNA, 25 bp, Homo sapien
gaaatgtacagataggagggtcccc

SEQ ID NO: 4456623 - DNA, 25 bp, Homo sapien
gaaactggatcccatctcataggga

SEQ ID NO: 4456624 - DNA, 25 bp, Homo sapien
ggtcacaaatgaggaagatagagat

SEQ ID NO: 4456625 - DNA, 25 bp, Homo sapien
tagggaaactctggagtgctgtata

SEQ ID NO: 4456626 - DNA, 25 bp, Homo sapien
tagaatacacatcagagttggtcac

SEQ ID NO: 4456627 - DNA, 25 bp, Homo sapien
aaaaagaataaacgagcaagataca

SEQ ID NO: 4456628 - DNA, 25 bp, Homo sapien
taaacgagcaagatacaagaggcat

SEQ ID NO: 4456629 - DNA, 25 bp, Homo sapien
aacgagcaagatacaagaggcattt

SEQ ID NO: 4456630 - DNA, 25 bp, Homo sapien
gaataaacgagcaagatacaagagg

SEQ ID NO: 4456631 - DNA, 25 bp, Homo sapien
tagaaactgcaggtgtgaatcattc

SEQ ID NO: 4456632 - DNA, 25 bp, Homo sapien
tgaaccatacatcttccccgaaggc

SEQ ID NO: 4456633 - DNA, 25 bp, Homo sapien
gctttgtgcacagtacaggttcaat

SEQ ID NO: 4456634 - DNA, 25 bp, Homo sapien
tggcatctagcataaactaccctgg

SEQ ID NO: 4456635 - DNA, 25 bp, Homo sapien
tcttcttgtcgctttgatctctgtg

SEQ ID NO: 4456636 - DNA, 25 bp, Homo sapien
tggtcttcttgtcgctttgatctct

SEQ ID NO: 4456637 - DNA, 25 bp, Homo sapien
ctgattggtcttcttgtcgctttga

SEQ ID NO: 4456638 - DNA, 25 bp, Homo sapien
actctgattggtcttcttgtcgctt

SEQ ID NO: 4456639 - DNA, 25 bp, Homo sapien
gttgtgccccattgctattaatgaa

SEQ ID NO: 4456640 - DNA, 25 bp, Homo sapien
tgtgccccattgctattaatgaacc

SEQ ID NO: 4456641 - DNA, 25 bp, Homo sapien
ttgtgccccattgctattaatgaac

SEQ ID NO: 4456642 - DNA, 25 bp, Homo sapien
tacaggaacaatggctctcttgagg

SEQ ID NO: 4456643 - DNA, 25 bp, Homo sapien
gttggaacatttcactactacagga

SEQ ID NO: 4456644 - DNA, 25 bp, Homo sapien
cagtgccctagatccataatgaaca

SEQ ID NO: 4456645 - DNA, 25 bp, Homo sapien
cagtctagacaaccatgtgtttcgg

SEQ ID NO: 4456646 - DNA, 25 bp, Homo sapien
tgtcatccatagttgcaagtagcac

SEQ ID NO: 4456647 - DNA, 25 bp, Homo sapien
gccttcatggcatattgctcgcaaa

SEQ ID NO: 4456648 - DNA, 25 bp, Homo sapien
catttaagcgatcgagcaatacagg

SEQ ID NO: 4456649 - DNA, 25 bp, Homo sapien
gctgcatcctggttgactgaatcca

SEQ ID NO: 4456650 - DNA, 25 bp, Homo sapien
tgaccaggatattatccaccccgcc

SEQ ID NO: 4456651 - DNA, 25 bp, Homo sapien
gaccaggatattatccaccccgcca

SEQ ID NO: 4456652 - DNA, 25 bp, Homo sapien
aggatattatccaccccgccaagca

SEQ ID NO: 4456653 - DNA, 25 bp, Homo sapien
ccaggatattatccaccccgccaag

SEQ ID NO: 4456654 - DNA, 25 bp, Homo sapien
aatcatagcggtttcaaaggagtat

SEQ ID NO: 4456655 - DNA, 25 bp, Homo sapien
aaagttcctccagagattatttcag

SEQ ID NO: 4456656 - DNA, 25 bp, Homo sapien
gaaataagaactcagccaacctatg

SEQ ID NO: 4456657 - DNA, 25 bp, Homo sapien
caacctatggatggaccttctcttc

SEQ ID NO: 4456658 - DNA, 25 bp, Homo sapien
tcttttactctttgtactactgaag

SEQ ID NO: 4456659 - DNA, 25 bp, Homo sapien
ttttactctttgtactactgaaggc

SEQ ID NO: 4456660 - DNA, 25 bp, Homo sapien
ttactctttgtactactgaaggcat

SEQ ID NO: 4456661 - DNA, 25 bp, Homo sapien
tttactctttgtactactgaaggca

SEQ ID NO: 4456662 - DNA, 25 bp, Homo sapien
cccacggcatctttggaggaacgac

SEQ ID NO: 4456663 - DNA, 25 bp, Homo sapien
agtgactttatgatctcccgttcct

SEQ ID NO: 4456664 - DNA, 25 bp, Homo sapien
gactttatgatctcccgttcctggg

SEQ ID NO: 4456665 - DNA, 25 bp, Homo sapien
tccacatgaacagatatctgaccca

SEQ ID NO: 4456666 - DNA, 25 bp, Homo sapien
cacaaaggggcggaacattgctgtg

SEQ ID NO: 4456667 - DNA, 25 bp, Homo sapien
gtggtctgccagtttaggtcattaa

SEQ ID NO: 4456668 - DNA, 25 bp, Homo sapien
tccaaggttgggtcccagtatacaa

SEQ ID NO: 4456669 - DNA, 25 bp, Homo sapien
attgctgtggtctgccagtttaggt

SEQ ID NO: 4456670 - DNA, 25 bp, Homo sapien
gataattcgatcttctctggcaaag

SEQ ID NO: 4456671 - DNA, 25 bp, Homo sapien
aatgactgtcattccgataattcga

SEQ ID NO: 4456672 - DNA, 25 bp, Homo sapien
gtcaaaccagtttcatccatagaga

SEQ ID NO: 4456673 - DNA, 25 bp, Homo sapien
gatgaagttcataagcccctggtcg

SEQ ID NO: 4456674 - DNA, 25 bp, Homo sapien
caagcactctcttcagtagatcttg

SEQ ID NO: 4456675 - DNA, 25 bp, Homo sapien
ctcttcagtagatcttgtttcagat

SEQ ID NO: 4456676 - DNA, 25 bp, Homo sapien
gcactctcttcagtagatcttgttt

SEQ ID NO: 4456677 - DNA, 25 bp, Homo sapien
cttcagtagatcttgtttcagattt

SEQ ID NO: 4456678 - DNA, 25 bp, Homo sapien
cacatgcatgcagtagtcaaacaat

SEQ ID NO: 4456679 - DNA, 25 bp, Homo sapien
ccttgtagacatcgtacatgagtac

SEQ ID NO: 4456680 - DNA, 25 bp, Homo sapien
gaactaaacattcccatgtatttgc

SEQ ID NO: 4456681 - DNA, 25 bp, Homo sapien
taattttggcacttcatggaacact

SEQ ID NO: 4456682 - DNA, 25 bp, Homo sapien
tcagaaaggttggaaactggtcagc

SEQ ID NO: 4456683 - DNA, 25 bp, Homo sapien
caaagcagtggcctaacagtttaac

SEQ ID NO: 4456684 - DNA, 25 bp, Homo sapien
catatgccagaggatcgcatcacac

SEQ ID NO: 4456685 - DNA, 25 bp, Homo sapien
tgaattagctcacctcactggtctg

SEQ ID NO: 4456686 - DNA, 25 bp, Homo sapien
gatttagacgaactgggaggacttc

SEQ ID NO: 4456687 - DNA, 25 bp, Homo sapien
tagaccaggttgagccaagtagatg

SEQ ID NO: 4456688 - DNA, 25 bp, Homo sapien
ccaagtagatgggaacttgatctag

SEQ ID NO: 4456689 - DNA, 25 bp, Homo sapien
tagcttcaacgtggctagaccaggt

SEQ ID NO: 4456690 - DNA, 25 bp, Homo sapien
ctagaattagatcctgccatttcaa

SEQ ID NO: 4456691 - DNA, 25 bp, Homo sapien
aattagatcctgccatttcaaatgc

SEQ ID NO: 4456692 - DNA, 25 bp, Homo sapien
agaattagatcctgccatttcaaat

SEQ ID NO: 4456693 - DNA, 25 bp, Homo sapien
attagatcctgccatttcaaatgct

SEQ ID NO: 4456694 - DNA, 25 bp, Homo sapien
tagaagcctttatacccagaacgta

SEQ ID NO: 4456695 - DNA, 25 bp, Homo sapien
atgcaggttttacaatagaagcctt

SEQ ID NO: 4456696 - DNA, 25 bp, Homo sapien
gcaggttttacaatagaagccttta

SEQ ID NO: 4456697 - DNA, 25 bp, Homo sapien
cccagaacgtaatagatttttgcat

SEQ ID NO: 4456698 - DNA, 25 bp, Homo sapien
cattttcaagtaacgctgattccta

SEQ ID NO: 4456699 - DNA, 25 bp, Homo sapien
ttccattttcaagtaacgctgattc

SEQ ID NO: 4456700 - DNA, 25 bp, Homo sapien
gttgccagctttataccctttccca

SEQ ID NO: 4456701 - DNA, 25 bp, Homo sapien
tttgtccttaatgaggttgccagct

SEQ ID NO: 4456702 - DNA, 25 bp, Homo sapien
tatgctgttgccaagttgccaacat

SEQ ID NO: 4456703 - DNA, 25 bp, Homo sapien
atctgcatttatgctgttgccaagt

SEQ ID NO: 4456704 - DNA, 25 bp, Homo sapien
catttatgctgttgccaagttgcca

SEQ ID NO: 4456705 - DNA, 25 bp, Homo sapien
tgcatttatgctgttgccaagttgc

SEQ ID NO: 4456706 - DNA, 25 bp, Homo sapien
acttgtctttccgatccttggtctg

SEQ ID NO: 4456707 - DNA, 25 bp, Homo sapien
tcaaacttgtctttccgatccttgg

SEQ ID NO: 4456708 - DNA, 25 bp, Homo sapien
tctttccgatccttggtctgtatgg

SEQ ID NO: 4456709 - DNA, 25 bp, Homo sapien
ccgatccttggtctgtatggtggtt

SEQ ID NO: 4456710 - DNA, 25 bp, Homo sapien
gacaatctgaggacccaaagccttt

SEQ ID NO: 4456711 - DNA, 25 bp, Homo sapien
ctgacaatctgaggacccaaagcct

SEQ ID NO: 4456712 - DNA, 25 bp, Homo sapien
tctgaggacccaaagccttttacca

SEQ ID NO: 4456713 - DNA, 25 bp, Homo sapien
caatctgaggacccaaagcctttta

SEQ ID NO: 4456714 - DNA, 25 bp, Homo sapien
ggaaatatatcgcatctgtactcag

SEQ ID NO: 4456715 - DNA, 25 bp, Homo sapien
atggaaatatatcgcatctgtactc

SEQ ID NO: 4456716 - DNA, 25 bp, Homo sapien
tatatggaaatatatcgcatctgta

SEQ ID NO: 4456717 - DNA, 25 bp, Homo sapien
tatggaaatatatcgcatctgtact

SEQ ID NO: 4456718 - DNA, 25 bp, Homo sapien
aattgtagcaagacgtaaccttgag

SEQ ID NO: 4456719 - DNA, 25 bp, Homo sapien
agaactcctgtccaaaaaccccatg

SEQ ID NO: 4456720 - DNA, 25 bp, Homo sapien
gataccagagtgcttatcctgagca

SEQ ID NO: 4456721 - DNA, 25 bp, Homo sapien
tactctcctgccttaagaactcctg

SEQ ID NO: 4456722 - DNA, 25 bp, Homo sapien
cgagattttgacactatttggttca

SEQ ID NO: 4456723 - DNA, 25 bp, Homo sapien
gatctttgtggcatcgtgtggcagt

SEQ ID NO: 4456724 - DNA, 25 bp, Homo sapien
cagtggcagtgacggtagtagctag

SEQ ID NO: 4456725 - DNA, 25 bp, Homo sapien
ggtagtagctagatgatcctttttg

SEQ ID NO: 4456726 - DNA, 25 bp, Homo sapien
catgctagtgggtcaaatgccctgt

SEQ ID NO: 4456727 - DNA, 25 bp, Homo sapien
taagtggctagttgatctccgaggg

SEQ ID NO: 4456728 - DNA, 25 bp, Homo sapien
ccaggctggcaggatattgtcatta

SEQ ID NO: 4456729 - DNA, 25 bp, Homo sapien
tctccgagggatggtgctctatcag

SEQ ID NO: 4456730 - DNA, 25 bp, Homo sapien
ctttcccagttatcatatttcttca

SEQ ID NO: 4456731 - DNA, 25 bp, Homo sapien
cctttcccagttatcatatttcttc

SEQ ID NO: 4456732 - DNA, 25 bp, Homo sapien
tttcccagttatcatatttcttcat

SEQ ID NO: 4456733 - DNA, 25 bp, Homo sapien
aaagcactgattgagtcagcactga

SEQ ID NO: 4456734 - DNA, 25 bp, Homo sapien
gagtcagcactgaaggctttgcact

SEQ ID NO: 4456735 - DNA, 25 bp, Homo sapien
gagaagctctgagatgtcaaagcac

SEQ ID NO: 4456736 - DNA, 25 bp, Homo sapien
ggcttggcaatgaaggagaagctct

SEQ ID NO: 4456737 - DNA, 25 bp, Homo sapien
tatctagaaggtcttcaagtcgctg

SEQ ID NO: 4456738 - DNA, 25 bp, Homo sapien
cgactgtcagtttcactttatctag

SEQ ID NO: 4456739 - DNA, 25 bp, Homo sapien
cttggtggaatctcttgcgactgtc

SEQ ID NO: 4456740 - DNA, 25 bp, Homo sapien
aaggtcttcaagtcgctgtctccaa

SEQ ID NO: 4456741 - DNA, 25 bp, Homo sapien
ttcctccatgtttagactctgcatc

SEQ ID NO: 4456742 - DNA, 25 bp, Homo sapien
ttcttttcacttgccccttcacctc

SEQ ID NO: 4456743 - DNA, 25 bp, Homo sapien
cacgttgtaggtaactccttcctct

SEQ ID NO: 4456744 - DNA, 25 bp, Homo sapien
tcacgttgtaggtaactccttcctc

SEQ ID NO: 4456745 - DNA, 25 bp, Homo sapien
aagtgccttctctcttttctcagag

SEQ ID NO: 4456746 - DNA, 25 bp, Homo sapien
caagtgccttctctcttttctcaga

SEQ ID NO: 4456747 - DNA, 25 bp, Homo sapien
ttttctcagaggtgctgtatcccct

SEQ ID NO: 4456748 - DNA, 25 bp, Homo sapien
ctcttttctcagaggtgctgtatcc

SEQ ID NO: 4456749 - DNA, 25 bp, Homo sapien
gatttctgggtcgatcaccttgcct

SEQ ID NO: 4456750 - DNA, 25 bp, Homo sapien
tctatgaccccgtggtgtctccagc

SEQ ID NO: 4456751 - DNA, 25 bp, Homo sapien
actgtgttgtaatcctgggaactgc

SEQ ID NO: 4456752 - DNA, 25 bp, Homo sapien
tgtagcaagggtaccagcaatgatg

SEQ ID NO: 4456753 - DNA, 25 bp, Homo sapien
ctgtattttgggtatgagaattagc

SEQ ID NO: 4456754 - DNA, 25 bp, Homo sapien
tggtggtgttgtggactgtcttcct

SEQ ID NO: 4456755 - DNA, 25 bp, Homo sapien
cttcctgctcgagaaagaaccaaac

SEQ ID NO: 4456756 - DNA, 25 bp, Homo sapien
ttttgggtatgagaattagcagaca

SEQ ID NO: 4456757 - DNA, 25 bp, Homo sapien
tcaaacagtgtaagcagaatgctag

SEQ ID NO: 4456758 - DNA, 25 bp, Homo sapien
cacttcgggactgttaaatttgtgg

SEQ ID NO: 4456759 - DNA, 25 bp, Homo sapien
tgtgctgtagctctcagcacttcgg

SEQ ID NO: 4456760 - DNA, 25 bp, Homo sapien
tcttttggatgttaatgctgacggc

SEQ ID NO: 4456761 - DNA, 25 bp, Homo sapien
gtgagaacaaagccacgtcttggga

SEQ ID NO: 4456762 - DNA, 25 bp, Homo sapien
gactgccactcctttgtggtgaaaa

SEQ ID NO: 4456763 - DNA, 25 bp, Homo sapien
atgtgagaacaaagccacgtcttgg

SEQ ID NO: 4456764 - DNA, 25 bp, Homo sapien
tgtgagaacaaagccacgtcttggg

SEQ ID NO: 4456765 - DNA, 25 bp, Homo sapien
gaagcccttttcacacgcacagctg

SEQ ID NO: 4456766 - DNA, 25 bp, Homo sapien
cggaacttaggaaatgcgaagccct

SEQ ID NO: 4456767 - DNA, 25 bp, Homo sapien
tcttcacggaacttaggaaatgcga

SEQ ID NO: 4456768 - DNA, 25 bp, Homo sapien
taggaaatgcgaagcccttttcaca

SEQ ID NO: 4456769 - DNA, 25 bp, Homo sapien
gtgggtctcaggtaactccatgccc

SEQ ID NO: 4456770 - DNA, 25 bp, Homo sapien
aggtaactccatgcccagaaaaggg

SEQ ID NO: 4456771 - DNA, 25 bp, Homo sapien
ctgacgtggacagcaacagcttctg

SEQ ID NO: 4456772 - DNA, 25 bp, Homo sapien
tggagtctcgacctcactcatagat

SEQ ID NO: 4456773 - DNA, 25 bp, Homo sapien
cttctaggatgggaagtgcctccat

SEQ ID NO: 4456774 - DNA, 25 bp, Homo sapien
ctcttctaggatgggaagtgcctcc

SEQ ID NO: 4456775 - DNA, 25 bp, Homo sapien
ctttgtggctcttctaggatgggaa

SEQ ID NO: 4456776 - DNA, 25 bp, Homo sapien
gctcttctaggatgggaagtgcctc

SEQ ID NO: 4456777 - DNA, 25 bp, Homo sapien
tcatttcattcatttagacttccat

SEQ ID NO: 4456778 - DNA, 25 bp, Homo sapien
cagggctgtgaacattgatagtacc

SEQ ID NO: 4456779 - DNA, 25 bp, Homo sapien
tcagaccagggttttgcagttacgg

SEQ ID NO: 4456780 - DNA, 25 bp, Homo sapien
tcatatcacaagatgctgtgggatc

SEQ ID NO: 4456781 - DNA, 25 bp, Homo sapien
tccgttctagatgcaaagagcagaa

SEQ ID NO: 4456782 - DNA, 25 bp, Homo sapien
tccactgtagattcttatggatggg

SEQ ID NO: 4456783 - DNA, 25 bp, Homo sapien
tgacacttgcacagctggtaagagc

SEQ ID NO: 4456784 - DNA, 25 bp, Homo sapien
tatacttttgtactaagagctgtcc

SEQ ID NO: 4456785 - DNA, 25 bp, Homo sapien
aagagctgtagctcattgtctagca

SEQ ID NO: 4456786 - DNA, 25 bp, Homo sapien
tacaaacagctgttatagaaaacat

SEQ ID NO: 4456787 - DNA, 25 bp, Homo sapien
gcaatttcatgactgggtatatatt

SEQ ID NO: 4456788 - DNA, 25 bp, Homo sapien
aaatacagctatctcataatctagc

SEQ ID NO: 4456789 - DNA, 25 bp, Homo sapien
tatacactaatagtgaattatctga

SEQ ID NO: 4456790 - DNA, 25 bp, Homo sapien
gacaaacccataggtaacataccta

SEQ ID NO: 4456791 - DNA, 25 bp, Homo sapien
tgacaaacccataggtaacatacct

SEQ ID NO: 4456792 - DNA, 25 bp, Homo sapien
caaacccataggtaacatacctagg

SEQ ID NO: 4456793 - DNA, 25 bp, Homo sapien
atgacaaacccataggtaacatacc

SEQ ID NO: 4456794 - DNA, 25 bp, Homo sapien
cattgtaagacgtgtatttttactc

SEQ ID NO: 4456795 - DNA, 25 bp, Homo sapien
cctgcttattagttcatctcttctc

SEQ ID NO: 4456796 - DNA, 25 bp, Homo sapien
ccataaaagtatcctgcttattagt

SEQ ID NO: 4456797 - DNA, 25 bp, Homo sapien
ttactcatgagctcccataaaagta

SEQ ID NO: 4456798 - DNA, 25 bp, Homo sapien
ggcagtttgggagtcataaaattgg

SEQ ID NO: 4456799 - DNA, 25 bp, Homo sapien
aattggtgaggaaggagtttgtgat

SEQ ID NO: 4456800 - DNA, 25 bp, Homo sapien
gggcagtttgggagtcataaaattg

SEQ ID NO: 4456801 - DNA, 25 bp, Homo sapien
cacttggctgaaggctcccataatc

SEQ ID NO: 4456802 - DNA, 25 bp, Homo sapien
gctgaaggctcccataatcacccat

SEQ ID NO: 4456803 - DNA, 25 bp, Homo sapien
ctgacacaagcacttggctgaaggc

SEQ ID NO: 4456804 - DNA, 25 bp, Homo sapien
acacaagcacttggctgaaggctcc

SEQ ID NO: 4456805 - DNA, 25 bp, Homo sapien
gtaaataagaataatctttatttgc

SEQ ID NO: 4456806 - DNA, 25 bp, Homo sapien
aataagaataatctttatttgccca

SEQ ID NO: 4456807 - DNA, 25 bp, Homo sapien
ataagaataatctttatttgcccac

SEQ ID NO: 4456808 - DNA, 25 bp, Homo sapien
ctagtaaataagaataatctttatt

SEQ ID NO: 4456809 - DNA, 25 bp, Homo sapien
atcgtgtattggggaagggccaaag

SEQ ID NO: 4456810 - DNA, 25 bp, Homo sapien
ctaatcgtgtattggggaagggcca

SEQ ID NO: 4456811 - DNA, 25 bp, Homo sapien
taatcgtgtattggggaagggccaa

SEQ ID NO: 4456812 - DNA, 25 bp, Homo sapien
tttctcttttgggacccatgcttcg

SEQ ID NO: 4456813 - DNA, 25 bp, Homo sapien
cccatgcttcgggacccaaaataat

SEQ ID NO: 4456814 - DNA, 25 bp, Homo sapien
tcgggacccaaaataattgctgtat

SEQ ID NO: 4456815 - DNA, 25 bp, Homo sapien
ttctcttttgggacccatgcttcgg

SEQ ID NO: 4456816 - DNA, 25 bp, Homo sapien
cagctgcctgcaattcgtaacttag

SEQ ID NO: 4456817 - DNA, 25 bp, Homo sapien
agctgcctgcaattcgtaacttagc

SEQ ID NO: 4456818 - DNA, 25 bp, Homo sapien
tcagctgcctgcaattcgtaactta

SEQ ID NO: 4456819 - DNA, 25 bp, Homo sapien
tttgcttttctgaagaggattttgt

SEQ ID NO: 4456820 - DNA, 25 bp, Homo sapien
tgcttatgaagtttagtttgactgg

SEQ ID NO: 4456821 - DNA, 25 bp, Homo sapien
catttgcttttctgaagaggatttt

SEQ ID NO: 4456822 - DNA, 25 bp, Homo sapien
agcatttgcttttctgaagaggatt

SEQ ID NO: 4456823 - DNA, 25 bp, Homo sapien
cattttcctgagtggctgacgctcc

SEQ ID NO: 4456824 - DNA, 25 bp, Homo sapien
tgaaacactccagtacagcctggtg

SEQ ID NO: 4456825 - DNA, 25 bp, Homo sapien
tgcatctggctacagcagtgctgct

SEQ ID NO: 4456826 - DNA, 25 bp, Homo sapien
tatcgtagtcctcagaatccatggc

SEQ ID NO: 4456827 - DNA, 25 bp, Homo sapien
cagtggcagatcctcggtatcctct

SEQ ID NO: 4456828 - DNA, 25 bp, Homo sapien
taggaatggtattcagtggcagatc

SEQ ID NO: 4456829 - DNA, 25 bp, Homo sapien
aggaatggtattcagtggcagatcc

SEQ ID NO: 4456830 - DNA, 25 bp, Homo sapien
caggcacagcagcccatctttcagt

SEQ ID NO: 4456831 - DNA, 25 bp, Homo sapien
tcaggcacagcagcccatctttcag

SEQ ID NO: 4456832 - DNA, 25 bp, Homo sapien
atcaggcacagcagcccatctttca

SEQ ID NO: 4456833 - DNA, 25 bp, Homo sapien
gatcaggcacagcagcccatctttc

SEQ ID NO: 4456834 - DNA, 25 bp, Homo sapien
tgctccagtagccagatcaatatga

SEQ ID NO: 4456835 - DNA, 25 bp, Homo sapien
gtaatgcttatcgattcctcctgct

SEQ ID NO: 4456836 - DNA, 25 bp, Homo sapien
gaatctgatttcctcgaatcgaaag

SEQ ID NO: 4456837 - DNA, 25 bp, Homo sapien
ggtagatatttggttccccagccta

SEQ ID NO: 4456838 - DNA, 25 bp, Homo sapien
gtctcttagcccctagtcaattatt

SEQ ID NO: 4456839 - DNA, 25 bp, Homo sapien
cagtcatgcagcatcagaagtgggc

SEQ ID NO: 4456840 - DNA, 25 bp, Homo sapien
gaagtgggctagttcccctcaagtc

SEQ ID NO: 4456841 - DNA, 25 bp, Homo sapien
ccagctttaaagtaccatgattcta

SEQ ID NO: 4456842 - DNA, 25 bp, Homo sapien
gggtaagggagagctatccctctcc

SEQ ID NO: 4456843 - DNA, 25 bp, Homo sapien
tccctctcccgtggattagcagaaa

SEQ ID NO: 4456844 - DNA, 25 bp, Homo sapien
gtaagggagagctatccctctcccg

SEQ ID NO: 4456845 - DNA, 25 bp, Homo sapien
tctcccgtggattagcagaaatggc

SEQ ID NO: 4456846 - DNA, 25 bp, Homo sapien
cagtttgctatccaggatttcaaag

SEQ ID NO: 4456847 - DNA, 25 bp, Homo sapien
taaattatccagtttgctatccagg

SEQ ID NO: 4456848 - DNA, 25 bp, Homo sapien
gatttcaaagccctttgtccagagc

SEQ ID NO: 4456849 - DNA, 25 bp, Homo sapien
ctcacactcatattgcattctaaat

SEQ ID NO: 4456850 - DNA, 25 bp, Homo sapien
cttttcttgttctttgctcccacca

SEQ ID NO: 4456851 - DNA, 25 bp, Homo sapien
tcttgttctttgctcccaccacata

SEQ ID NO: 4456852 - DNA, 25 bp, Homo sapien
tctttgctcccaccacataccgtcg

SEQ ID NO: 4456853 - DNA, 25 bp, Homo sapien
ggcttttcttgttctttgctcccac

SEQ ID NO: 4456854 - DNA, 25 bp, Homo sapien
tttcctagacgtgacacaaacagat

SEQ ID NO: 4456855 - DNA, 25 bp, Homo sapien
ccttgagcttccatcccattagcag

SEQ ID NO: 4456856 - DNA, 25 bp, Homo sapien
gctcttcagattgccttggaaacag

SEQ ID NO: 4456857 - DNA, 25 bp, Homo sapien
tagcagtggcagcttcacctttttc

SEQ ID NO: 4456858 - DNA, 25 bp, Homo sapien
tcatggtattcataagacgttctct

SEQ ID NO: 4456859 - DNA, 25 bp, Homo sapien
ttcaccttcattaaggtcatggtat

SEQ ID NO: 4456860 - DNA, 25 bp, Homo sapien
tcttctgtaataaatcagcgttcac

SEQ ID NO: 4456861 - DNA, 25 bp, Homo sapien
tctgtaataaatcagcgttcacctt

SEQ ID NO: 4456862 - DNA, 25 bp, Homo sapien
cctgcagtgccaaacttgactggtt

SEQ ID NO: 4456863 - DNA, 25 bp, Homo sapien
ctggttatcttgaggagggctgtta

SEQ ID NO: 4456864 - DNA, 25 bp, Homo sapien
caaacttgactggttatcttgagga

SEQ ID NO: 4456865 - DNA, 25 bp, Homo sapien
aggagggctgttatctggctctcag

SEQ ID NO: 4456866 - DNA, 25 bp, Homo sapien
tgaacgaatagtggttttcttctgg

SEQ ID NO: 4456867 - DNA, 25 bp, Homo sapien
cagccaatgtgaacgaatagtggtt

SEQ ID NO: 4456868 - DNA, 25 bp, Homo sapien
tcaatcagccaatgtgaacgaatag

SEQ ID NO: 4456869 - DNA, 25 bp, Homo sapien
ccaatgtgaacgaatagtggttttc

SEQ ID NO: 4456870 - DNA, 25 bp, Homo sapien
tgaggagagggtcatgttctccact

SEQ ID NO: 4456871 - DNA, 25 bp, Homo sapien
gccatacttgtttcttgaggactgg

SEQ ID NO: 4456872 - DNA, 25 bp, Homo sapien
actggaaggtttggacgtatggagc

SEQ ID NO: 4456873 - DNA, 25 bp, Homo sapien
cagaactcagccatacttgtttctt

SEQ ID NO: 4456874 - DNA, 25 bp, Homo sapien
gcatttatatgttattcaaagtaac

SEQ ID NO: 4456875 - DNA, 25 bp, Homo sapien
ttcttttcgtaaaaatgagatatat

SEQ ID NO: 4456876 - DNA, 25 bp, Homo sapien
caaagtaactatttcctctgggtgg

SEQ ID NO: 4456877 - DNA, 25 bp, Homo sapien
taataaacctactgattgcatttat

SEQ ID NO: 4456878 - DNA, 25 bp, Homo sapien
ctggaacatgaaggctaatcagcat

SEQ ID NO: 4456879 - DNA, 25 bp, Homo sapien
tcttcacatggacctaatggtagaa

SEQ ID NO: 4456880 - DNA, 25 bp, Homo sapien
gacctaatggtagaacagctggaac

SEQ ID NO: 4456881 - DNA, 25 bp, Homo sapien
ggtagaacagctggaacatgaaggc

SEQ ID NO: 4456882 - DNA, 25 bp, Homo sapien
tattctagggcaaggtgtcgaccct

SEQ ID NO: 4456883 - DNA, 25 bp, Homo sapien
tgtcgaccctgcttgtttgcatccc

SEQ ID NO: 4456884 - DNA, 25 bp, Homo sapien
gggcaaggtgtcgaccctgcttgtt

SEQ ID NO: 4456885 - DNA, 25 bp, Homo sapien
accctgcttgtttgcatcccttctg

SEQ ID NO: 4456886 - DNA, 25 bp, Homo sapien
gcttctgcagtatgatccctctctt

SEQ ID NO: 4456887 - DNA, 25 bp, Homo sapien
ggtttcttacagcttcaacaagggc

SEQ ID NO: 4456888 - DNA, 25 bp, Homo sapien
tcttcccattgccacagtgcacatg

SEQ ID NO: 4456889 - DNA, 25 bp, Homo sapien
taatgggtggcagattcctttttgc

SEQ ID NO: 4456890 - DNA, 25 bp, Homo sapien
ctcggtatctttggatacgaggctt

SEQ ID NO: 4456891 - DNA, 25 bp, Homo sapien
ctctgctattcctttcctcggtatc

SEQ ID NO: 4456892 - DNA, 25 bp, Homo sapien
tattcctttcctcggtatctttgga

SEQ ID NO: 4456893 - DNA, 25 bp, Homo sapien
cttgccttttgtcccctgtcttatt

SEQ ID NO: 4456894 - DNA, 25 bp, Homo sapien
gttgaagtgggccctgtttctacag

SEQ ID NO: 4456895 - DNA, 25 bp, Homo sapien
ttgaagtgggccctgtttctacagt

SEQ ID NO: 4456896 - DNA, 25 bp, Homo sapien
ggttgaagtgggccctgtttctaca

SEQ ID NO: 4456897 - DNA, 25 bp, Homo sapien
tgaagtgggccctgtttctacagtc

SEQ ID NO: 4456898 - DNA, 25 bp, Homo sapien
gacaacaaggattctactgctgcca

SEQ ID NO: 4456899 - DNA, 25 bp, Homo sapien
gtgggacaacaaggattctactgct

SEQ ID NO: 4456900 - DNA, 25 bp, Homo sapien
atggtgggacaacaaggattctact

SEQ ID NO: 4456901 - DNA, 25 bp, Homo sapien
gggacaacaaggattctactgctgc

SEQ ID NO: 4456902 - DNA, 25 bp, Homo sapien
tggcattctctgtatctcctgaatt

SEQ ID NO: 4456903 - DNA, 25 bp, Homo sapien
ggcattctctgtatctcctgaattt

SEQ ID NO: 4456904 - DNA, 25 bp, Homo sapien
gcattctctgtatctcctgaatttg

SEQ ID NO: 4456905 - DNA, 25 bp, Homo sapien
cttcctcctggttgctgagcctttg

SEQ ID NO: 4456906 - DNA, 25 bp, Homo sapien
tggttgctgagcctttgaccacttc

SEQ ID NO: 4456907 - DNA, 25 bp, Homo sapien
tgaccacttctccactagcctccat

SEQ ID NO: 4456908 - DNA, 25 bp, Homo sapien
ttgaccacttctccactagcctcca

SEQ ID NO: 4456909 - DNA, 25 bp, Homo sapien
acttgtgtaaccagaggagtggaag

SEQ ID NO: 4456910 - DNA, 25 bp, Homo sapien
gcctttatgctgtaacttgtgtaac

SEQ ID NO: 4456911 - DNA, 25 bp, Homo sapien
agtggaagaggtaagaagattcatc

SEQ ID NO: 4456912 - DNA, 25 bp, Homo sapien
tctgtgatcgctaacaccgatgccc

SEQ ID NO: 4456913 - DNA, 25 bp, Homo sapien
accctcccccatcaagtaggcccag

SEQ ID NO: 4456914 - DNA, 25 bp, Homo sapien
ctgcatgtcatgggtgtttggtgta

SEQ ID NO: 4456915 - DNA, 25 bp, Homo sapien
catcaagtaggcccaggcaccagtg

SEQ ID NO: 4456916 - DNA, 25 bp, Homo sapien
tcccccatcaagtaggcccaggcac

SEQ ID NO: 4456917 - DNA, 25 bp, Homo sapien
tggcaagaggcatcctaactaggaa

SEQ ID NO: 4456918 - DNA, 25 bp, Homo sapien
tgggccaggctgaattgaacagcat

SEQ ID NO: 4456919 - DNA, 25 bp, Homo sapien
catagattctgcttgtgggcaggcc

SEQ ID NO: 4456920 - DNA, 25 bp, Homo sapien
caaggacctgcaggccacttatggg

SEQ ID NO: 4456921 - DNA, 25 bp, Homo sapien
ctccaagccagtgtcgttgaaggac

SEQ ID NO: 4456922 - DNA, 25 bp, Homo sapien
tgtgcttctcgaaccttctccaagc

SEQ ID NO: 4456923 - DNA, 25 bp, Homo sapien
ttgtgcttctcgaaccttctccaag

SEQ ID NO: 4456924 - DNA, 25 bp, Homo sapien
ccagtgtcgttgaaggacagatttg

SEQ ID NO: 4456925 - DNA, 25 bp, Homo sapien
ttatcgaatggtagtaaaagctgca

SEQ ID NO: 4456926 - DNA, 25 bp, Homo sapien
atcgaatggtagtaaaagctgcatt

SEQ ID NO: 4456927 - DNA, 25 bp, Homo sapien
aggaaagacagcatgagctgttttt

SEQ ID NO: 4456928 - DNA, 25 bp, Homo sapien
tcacatgtcgaagaatcccaggaaa

SEQ ID NO: 4456929 - DNA, 25 bp, Homo sapien
ccttctgataggtagttgtggatgc

SEQ ID NO: 4456930 - DNA, 25 bp, Homo sapien
ggagaatactcagttccaacttgtg

SEQ ID NO: 4456931 - DNA, 25 bp, Homo sapien
tatttggataatggcactaggcagc

SEQ ID NO: 4456932 - DNA, 25 bp, Homo sapien
caacttgtgattcctgatagaacag

SEQ ID NO: 4456933 - DNA, 25 bp, Homo sapien
taatggatcataggcagggcatccc

SEQ ID NO: 4456934 - DNA, 25 bp, Homo sapien
tacctaggaccatgtggagaaactg

SEQ ID NO: 4456935 - DNA, 25 bp, Homo sapien
tccagtcagtcacgagacttcaggg

SEQ ID NO: 4456936 - DNA, 25 bp, Homo sapien
taaccagagtctgtaaggcttagaa

SEQ ID NO: 4456937 - DNA, 25 bp, Homo sapien
caacctagtctatgcctttaatctc

SEQ ID NO: 4456938 - DNA, 25 bp, Homo sapien
ctggattacttggtggaagcaaagc

SEQ ID NO: 4456939 - DNA, 25 bp, Homo sapien
actacaagtcggcttgaacacaggt

SEQ ID NO: 4456940 - DNA, 25 bp, Homo sapien
caccctactatggatgagattacaa

SEQ ID NO: 4456941 - DNA, 25 bp, Homo sapien
caattaagtgtatacatgatatagt

SEQ ID NO: 4456942 - DNA, 25 bp, Homo sapien
gaagtactatattttttgtgcatca

SEQ ID NO: 4456943 - DNA, 25 bp, Homo sapien
taacctgtattctttttggaaatca

SEQ ID NO: 4456944 - DNA, 25 bp, Homo sapien
tatttacaagcctatgtaaaagtga

SEQ ID NO: 4456945 - DNA, 25 bp, Homo sapien
tgttgatctggcatcctcaggctgc

SEQ ID NO: 4456946 - DNA, 25 bp, Homo sapien
ttactgtacttgctgggtcttgcca

SEQ ID NO: 4456947 - DNA, 25 bp, Homo sapien
tattccgctgcattgccaaagtgtc

SEQ ID NO: 4456948 - DNA, 25 bp, Homo sapien
tcatctctatctttaccagcaggct

SEQ ID NO: 4456949 - DNA, 25 bp, Homo sapien
gatggttgttctcaagactcttcct

SEQ ID NO: 4456950 - DNA, 25 bp, Homo sapien
tttccccaggaatgacgcaatgatg

SEQ ID NO: 4456951 - DNA, 25 bp, Homo sapien
gcagtttggcctcgatttttccagg

SEQ ID NO: 4456952 - DNA, 25 bp, Homo sapien
tatcccatggtcgatgctgcttctt

SEQ ID NO: 4456953 - DNA, 25 bp, Homo sapien
tttgagtcacggtcagattgctccc

SEQ ID NO: 4456954 - DNA, 25 bp, Homo sapien
gaagaaggtgctcagctcaggtcct

SEQ ID NO: 4456955 - DNA, 25 bp, Homo sapien
agcattcctttgagtttacagccag

SEQ ID NO: 4456956 - DNA, 25 bp, Homo sapien
taccaatggattagtcgtcctgctc

SEQ ID NO: 4456957 - DNA, 25 bp, Homo sapien
gatgatctctcatgctgaacctgcc

SEQ ID NO: 4456958 - DNA, 25 bp, Homo sapien
tggtcatgtggctttgatgatctct

SEQ ID NO: 4456959 - DNA, 25 bp, Homo sapien
cagaggtaaatgtgggccacaggga

SEQ ID NO: 4456960 - DNA, 25 bp, Homo sapien
aacctgccccgatccaatctcatca

SEQ ID NO: 4456961 - DNA, 25 bp, Homo sapien
gactgttgctcttctagagccacat

SEQ ID NO: 4456962 - DNA, 25 bp, Homo sapien
ttgctcttctagagccacattcttg

SEQ ID NO: 4456963 - DNA, 25 bp, Homo sapien
ctattagactgttgctcttctagag

SEQ ID NO: 4456964 - DNA, 25 bp, Homo sapien
attagactgttgctcttctagagcc

SEQ ID NO: 4456965 - DNA, 25 bp, Homo sapien
tggacagcctaaccacaagagacac

SEQ ID NO: 4456966 - DNA, 25 bp, Homo sapien
tgagcacccataagcatagattaag

SEQ ID NO: 4456967 - DNA, 25 bp, Homo sapien
tcagggtcctgacacatggacagcc

SEQ ID NO: 4456968 - DNA, 25 bp, Homo sapien
caaactcatgcttttcacctgggaa

SEQ ID NO: 4456969 - DNA, 25 bp, Homo sapien
gagctgaagtgcagagtcttctaac

SEQ ID NO: 4456970 - DNA, 25 bp, Homo sapien
caccagaagaggttaataaagccgc

SEQ ID NO: 4456971 - DNA, 25 bp, Homo sapien
tttacttatgaaattggaggccagc

SEQ ID NO: 4456972 - DNA, 25 bp, Homo sapien
tctgagtggccagtcgaactggaac

SEQ ID NO: 4456973 - DNA, 25 bp, Homo sapien
tttcatccgtttggtgatacaagcc

SEQ ID NO: 4456974 - DNA, 25 bp, Homo sapien
gatacaagcccttatttttcaggga

SEQ ID NO: 4456975 - DNA, 25 bp, Homo sapien
cattatctatcccaaagtttggaac

SEQ ID NO: 4456976 - DNA, 25 bp, Homo sapien
gcttcttagagggttcctaggccat

SEQ ID NO: 4456977 - DNA, 25 bp, Homo sapien
gccctaattggttgaccagttgccc

SEQ ID NO: 4456978 - DNA, 25 bp, Homo sapien
ctgccctaattggttgaccagttgc

SEQ ID NO: 4456979 - DNA, 25 bp, Homo sapien
ctaattggttgaccagttgcccctc

SEQ ID NO: 4456980 - DNA, 25 bp, Homo sapien
accagttgcccctcaaggcttctct

SEQ ID NO: 4456981 - DNA, 25 bp, Homo sapien
gggttctcagtctttgcacgataag

SEQ ID NO: 4456982 - DNA, 25 bp, Homo sapien
agctgccaggaatgtctacttccca

SEQ ID NO: 4456983 - DNA, 25 bp, Homo sapien
ctgaagggttacacagggacttggg

SEQ ID NO: 4456984 - DNA, 25 bp, Homo sapien
cagatttccagctgaccaccatacc

SEQ ID NO: 4456985 - DNA, 25 bp, Homo sapien
tttcctcaggtggcggctcattcct

SEQ ID NO: 4456986 - DNA, 25 bp, Homo sapien
gtagtgaagtgggttgtggtatttc

SEQ ID NO: 4456987 - DNA, 25 bp, Homo sapien
tattgaagtgggttgtgtagtgaag

SEQ ID NO: 4456988 - DNA, 25 bp, Homo sapien
ggctcattcctgtgttccggacttc

SEQ ID NO: 4456989 - DNA, 25 bp, Homo sapien
actggagacctaatgtggcttttct

SEQ ID NO: 4456990 - DNA, 25 bp, Homo sapien
tctcattagggacaaggtcagctgt

SEQ ID NO: 4456991 - DNA, 25 bp, Homo sapien
tttctcattagggacaaggtcagct

SEQ ID NO: 4456992 - DNA, 25 bp, Homo sapien
tggcttttctcattagggacaaggt

SEQ ID NO: 4456993 - DNA, 25 bp, Homo sapien
ggagatcgggcacatccaggatggt

SEQ ID NO: 4456994 - DNA, 25 bp, Homo sapien
catccaggatggtatgtctgtagag

SEQ ID NO: 4456995 - DNA, 25 bp, Homo sapien
gatgtggggccaggcggaaaatacc

SEQ ID NO: 4456996 - DNA, 25 bp, Homo sapien
cccgaggtgacaggagaaggcggga

SEQ ID NO: 4456997 - DNA, 25 bp, Homo sapien
tccgggagggccgagcgaggcgtcc

SEQ ID NO: 4456998 - DNA, 25 bp, Homo sapien
cgctctcctttacgggaagtgatgt

SEQ ID NO: 4456999 - DNA, 25 bp, Homo sapien
gaggtagacacaagtcagcgagacg

SEQ ID NO: 4457000 - DNA, 25 bp, Homo sapien
ctgctgtaatgccaactgtgagtag

SEQ ID NO: 4457001 - DNA, 25 bp, Homo sapien
gtgagtagctacagactggaaaggt

SEQ ID NO: 4457002 - DNA, 25 bp, Homo sapien
gcctgcgacagctggaatttgcggt

SEQ ID NO: 4457003 - DNA, 25 bp, Homo sapien
tactgtgatcgattctgtggctgca

SEQ ID NO: 4457004 - DNA, 25 bp, Homo sapien
aaaagccccagtgtgggaagcaaga

SEQ ID NO: 4457005 - DNA, 25 bp, Homo sapien
gaactctccatgttgcaagtagcag

SEQ ID NO: 4457006 - DNA, 25 bp, Homo sapien
gatgactttgaactgacacacgaga

SEQ ID NO: 4457007 - DNA, 25 bp, Homo sapien
tctccaaagcaatgggaaacgttcc

SEQ ID NO: 4457008 - DNA, 25 bp, Homo sapien
catttggtgaccacgaagggatctc

SEQ ID NO: 4457009 - DNA, 25 bp, Homo sapien
aagcagcctgccactatcgggagct

SEQ ID NO: 4457010 - DNA, 25 bp, Homo sapien
gaaacgcccctgagatgtattctgg

SEQ ID NO: 4457011 - DNA, 25 bp, Homo sapien
caggttcgttgctctcacaaaaaat

SEQ ID NO: 4457012 - DNA, 25 bp, Homo sapien
cggtaacggtaattgtagacgtcag

SEQ ID NO: 4457013 - DNA, 25 bp, Homo sapien
ggtgttaacatttcaggttcgttgc

SEQ ID NO: 4457014 - DNA, 25 bp, Homo sapien
tagacgtcagtgttggtgttaacat

SEQ ID NO: 4457015 - DNA, 25 bp, Homo sapien
tgacgtggagcaggcgcagaacagt

SEQ ID NO: 4457016 - DNA, 25 bp, Homo sapien
agtttagtgacgtggagcaggcgca

SEQ ID NO: 4457017 - DNA, 25 bp, Homo sapien
tagcgagtttagtgacgtggagcag

SEQ ID NO: 4457018 - DNA, 25 bp, Homo sapien
gggagcaggcggtagcgagtttagt

SEQ ID NO: 4457019 - DNA, 25 bp, Homo sapien
ggaacgggcaacttcgtagctccca

SEQ ID NO: 4457020 - DNA, 25 bp, Homo sapien
tttccgaaccgagggattgctactc

SEQ ID NO: 4457021 - DNA, 25 bp, Homo sapien
tcctaaggcggaagaaagctgcagt

SEQ ID NO: 4457022 - DNA, 25 bp, Homo sapien
gcgctgctcgtccatccattaagtt

SEQ ID NO: 4457023 - DNA, 25 bp, Homo sapien
ggctccattccgcacttgcttaggg

SEQ ID NO: 4457024 - DNA, 25 bp, Homo sapien
cccggctccattccgcacttgctta

SEQ ID NO: 4457025 - DNA, 25 bp, Homo sapien
ctttatcttgccgtgggagcggttc

SEQ ID NO: 4457026 - DNA, 25 bp, Homo sapien
aggctggcatctccgccccccggct

SEQ ID NO: 4457027 - DNA, 25 bp, Homo sapien
cttctcctgggtgttgaagtacaag

SEQ ID NO: 4457028 - DNA, 25 bp, Homo sapien
ttgaagtacaaggtagactttctct

SEQ ID NO: 4457029 - DNA, 25 bp, Homo sapien
tgggtgttgaagtacaaggtagact

SEQ ID NO: 4457030 - DNA, 25 bp, Homo sapien
tctcctgggtgttgaagtacaaggt

SEQ ID NO: 4457031 - DNA, 25 bp, Homo sapien
cacaccattcttaaagccaacttgg

SEQ ID NO: 4457032 - DNA, 25 bp, Homo sapien
ggttatacaagcaccacagcgtcat

SEQ ID NO: 4457033 - DNA, 25 bp, Homo sapien
tggctccttgtaaggcacagtagtg

SEQ ID NO: 4457034 - DNA, 25 bp, Homo sapien
cagcgtcatcactgggtgactgcca

SEQ ID NO: 4457035 - DNA, 25 bp, Homo sapien
catgtgatgtgaaacttcaagagac

SEQ ID NO: 4457036 - DNA, 25 bp, Homo sapien
tgccagtattcatctggaacaaaac

SEQ ID NO: 4457037 - DNA, 25 bp, Homo sapien
tattcgtaaagctatggtaaacaag

SEQ ID NO: 4457038 - DNA, 25 bp, Homo sapien
gaacaaaacttgtctgcactaaaaa

SEQ ID NO: 4457039 - DNA, 25 bp, Homo sapien
atagtctggaaaagaaaccacaaag

SEQ ID NO: 4457040 - DNA, 25 bp, Homo sapien
tctggaaaagaaaccacaaaggata

SEQ ID NO: 4457041 - DNA, 25 bp, Homo sapien
tcatagtctggaaaagaaaccacaa

SEQ ID NO: 4457042 - DNA, 25 bp, Homo sapien
ctggaaaagaaaccacaaaggatat

SEQ ID NO: 4457043 - DNA, 25 bp, Homo sapien
gaaactatctactgaagacgaggga

SEQ ID NO: 4457044 - DNA, 25 bp, Homo sapien
gaaactgagcacaatttccaagatg

SEQ ID NO: 4457045 - DNA, 25 bp, Homo sapien
gtactgtctacagtttcaagcatcc

SEQ ID NO: 4457046 - DNA, 25 bp, Homo sapien
tcaagcatccactagggattttgga

SEQ ID NO: 4457047 - DNA, 25 bp, Homo sapien
cctccaagtgctaagtactgtggga

SEQ ID NO: 4457048 - DNA, 25 bp, Homo sapien
tgctaacggctgtgtcaagtatatt

SEQ ID NO: 4457049 - DNA, 25 bp, Homo sapien
tactgtgggaatgtatgctaacggc

SEQ ID NO: 4457050 - DNA, 25 bp, Homo sapien
ctaaactcttaacttcttcaaggca

SEQ ID NO: 4457051 - DNA, 25 bp, Homo sapien
cattaaggagtaaatgtccaataat

SEQ ID NO: 4457052 - DNA, 25 bp, Homo sapien
gtaacattaaggagtaaatgtccaa

SEQ ID NO: 4457053 - DNA, 25 bp, Homo sapien
aacattaaggagtaaatgtccaata

SEQ ID NO: 4457054 - DNA, 25 bp, Homo sapien
agtaacattaaggagtaaatgtcca

SEQ ID NO: 4457055 - DNA, 25 bp, Homo sapien
gatgaagaatcttgtaaatgcttgc

SEQ ID NO: 4457056 - DNA, 25 bp, Homo sapien
aagaatcttgtaaatgcttgcaaag

SEQ ID NO: 4457057 - DNA, 25 bp, Homo sapien
tgtaactcctcagtctctctgtcca

SEQ ID NO: 4457058 - DNA, 25 bp, Homo sapien
gattaagggataagtgtaactcctc

SEQ ID NO: 4457059 - DNA, 25 bp, Homo sapien
taaagtctcacatctgctacagcag

SEQ ID NO: 4457060 - DNA, 25 bp, Homo sapien
tctagttgcttcattaatgagtaaa

SEQ ID NO: 4457061 - DNA, 25 bp, Homo sapien
tcattaatgagtaaagtctcacatc

SEQ ID NO: 4457062 - DNA, 25 bp, Homo sapien
taatgagtaaagtctcacatctgct

SEQ ID NO: 4457063 - DNA, 25 bp, Homo sapien
tgtgaaccaggagcacaactggcaa

SEQ ID NO: 4457064 - DNA, 25 bp, Homo sapien
gtgaaccaggagcacaactggcaaa

SEQ ID NO: 4457065 - DNA, 25 bp, Homo sapien
gcaattatagtgagaacagtttcca

SEQ ID NO: 4457066 - DNA, 25 bp, Homo sapien
ccttccaaaggatagtagaaaagag

SEQ ID NO: 4457067 - DNA, 25 bp, Homo sapien
ccaaaggatagtagaaaagagcaat

SEQ ID NO: 4457068 - DNA, 25 bp, Homo sapien
agagcaattatagtgagaacagttt

SEQ ID NO: 4457069 - DNA, 25 bp, Homo sapien
caagtgccaccagggatgagtattt

SEQ ID NO: 4457070 - DNA, 25 bp, Homo sapien
gaatgacagctgtgggacgaattat

SEQ ID NO: 4457071 - DNA, 25 bp, Homo sapien
gacgaattatgaaggcaagtgccac

SEQ ID NO: 4457072 - DNA, 25 bp, Homo sapien
gcaaaggtgtccacagaatgacagc

SEQ ID NO: 4457073 - DNA, 25 bp, Homo sapien
tgctgctgatgagattaaaaaggct

SEQ ID NO: 4457074 - DNA, 25 bp, Homo sapien
ccacagactttgactttgagagcag

SEQ ID NO: 4457075 - DNA, 25 bp, Homo sapien
catacttagtacttggctggcccct

SEQ ID NO: 4457076 - DNA, 25 bp, Homo sapien
taaagccgataggaactgagcccct

SEQ ID NO: 4457077 - DNA, 25 bp, Homo sapien
gcatttctgttagacatatacctag

SEQ ID NO: 4457078 - DNA, 25 bp, Homo sapien
taggattggaattggtgggccctaa

SEQ ID NO: 4457079 - DNA, 25 bp, Homo sapien
tattgtaactatgtataccacactg

SEQ ID NO: 4457080 - DNA, 25 bp, Homo sapien
tcattgtgcttgtgagattgaacca

SEQ ID NO: 4457081 - DNA, 25 bp, Homo sapien
gggattatacaaagacataaatagc

SEQ ID NO: 4457082 - DNA, 25 bp, Homo sapien
cctggccaccatagtcttttcataa

SEQ ID NO: 4457083 - DNA, 25 bp, Homo sapien
taacccagtcttgtaagtgatatcc

SEQ ID NO: 4457084 - DNA, 25 bp, Homo sapien
gaattgagtcgacaaatctagccca

SEQ ID NO: 4457085 - DNA, 25 bp, Homo sapien
aaatacgatcaatcatcagagacaa

SEQ ID NO: 4457086 - DNA, 25 bp, Homo sapien
aatacgatcaatcatcagagacaaa

SEQ ID NO: 4457087 - DNA, 25 bp, Homo sapien
catcagagacaaactcaaagtaaca

SEQ ID NO: 4457088 - DNA, 25 bp, Homo sapien
tgcagcacgttaaatttcaaaaaat

SEQ ID NO: 4457089 - DNA, 25 bp, Homo sapien
ctgcagcacgttaaatttcaaaaaa

SEQ ID NO: 4457090 - DNA, 25 bp, Homo sapien
aagtgagtacccaagataactggaa

SEQ ID NO: 4457091 - DNA, 25 bp, Homo sapien
tagatagcagccatgaataaagaag

SEQ ID NO: 4457092 - DNA, 25 bp, Homo sapien
taccagtgccatggatgagaaccat

SEQ ID NO: 4457093 - DNA, 25 bp, Homo sapien
atccttgactgaagtaccagtgcca

SEQ ID NO: 4457094 - DNA, 25 bp, Homo sapien
cagcacagtcaccaaaagtatccgg

SEQ ID NO: 4457095 - DNA, 25 bp, Homo sapien
gtcaccaaaagtatccggtatctct

SEQ ID NO: 4457096 - DNA, 25 bp, Homo sapien
gcacagtcaccaaaagtatccggta

SEQ ID NO: 4457097 - DNA, 25 bp, Homo sapien
aaaagtatccggtatctctttggtg

SEQ ID NO: 4457098 - DNA, 25 bp, Homo sapien
tatctaaagtattcactctagtgcc

SEQ ID NO: 4457099 - DNA, 25 bp, Homo sapien
cttaaaaattgagtgtaatccttat

SEQ ID NO: 4457100 - DNA, 25 bp, Homo sapien
cttctaagataattcccactaacaa

SEQ ID NO: 4457101 - DNA, 25 bp, Homo sapien
tcactctagtgcctccataattact

SEQ ID NO: 4457102 - DNA, 25 bp, Homo sapien
gaacaccatacagaatggtaaaact

SEQ ID NO: 4457103 - DNA, 25 bp, Homo sapien
cacagaacaccatacagaatggtaa

SEQ ID NO: 4457104 - DNA, 25 bp, Homo sapien
ccatacagaatggtaaaactggata

SEQ ID NO: 4457105 - DNA, 25 bp, Homo sapien
caccatacagaatggtaaaactgga

SEQ ID NO: 4457106 - DNA, 25 bp, Homo sapien
gaaggacttgccatatggtaggctg

SEQ ID NO: 4457107 - DNA, 25 bp, Homo sapien
caaaaactgctttgggtattggata

SEQ ID NO: 4457108 - DNA, 25 bp, Homo sapien
tatctcactttagaggatataggaa

SEQ ID NO: 4457109 - DNA, 25 bp, Homo sapien
ttggactacaaaaagggaatattgc

SEQ ID NO: 4457110 - DNA, 25 bp, Homo sapien
gaaaataagccattgggcacctggg

SEQ ID NO: 4457111 - DNA, 25 bp, Homo sapien
caacaggtccagatttgaattccag

SEQ ID NO: 4457112 - DNA, 25 bp, Homo sapien
gtacaatactgaatgggaccaaggc

SEQ ID NO: 4457113 - DNA, 25 bp, Homo sapien
tgagaatacaaagaacaggcctttc

SEQ ID NO: 4457114 - DNA, 25 bp, Homo sapien
gttttcaggtgggttaatgagtatc

SEQ ID NO: 4457115 - DNA, 25 bp, Homo sapien
aacaggaaacttagagctggtttct

SEQ ID NO: 4457116 - DNA, 25 bp, Homo sapien
ccagtataaagggcgaggaacaaat

SEQ ID NO: 4457117 - DNA, 25 bp, Homo sapien
caggaaacttagagctggtttcttc

SEQ ID NO: 4457118 - DNA, 25 bp, Homo sapien
tataaagggcgaggaacaaatttga

SEQ ID NO: 4457119 - DNA, 25 bp, Homo sapien
gatttattgggattgttgtaacaaa

SEQ ID NO: 4457120 - DNA, 25 bp, Homo sapien
atcattataaatattgaagctgaag

SEQ ID NO: 4457121 - DNA, 25 bp, Homo sapien
ctgaagatttattgggattgttgta

SEQ ID NO: 4457122 - DNA, 25 bp, Homo sapien
taaatattgaagctgaagatttatt

SEQ ID NO: 4457123 - DNA, 25 bp, Homo sapien
ttttcattagtcttaagatatgtca

SEQ ID NO: 4457124 - DNA, 25 bp, Homo sapien
tgttgcagttaagtgaagaagcaag

SEQ ID NO: 4457125 - DNA, 25 bp, Homo sapien
aaacatgattcttataccatgtacc

SEQ ID NO: 4457126 - DNA, 25 bp, Homo sapien
aactgtgttgcagttaagtgaagaa

SEQ ID NO: 4457127 - DNA, 25 bp, Homo sapien
gtctggcgggcactggagaaatctc

SEQ ID NO: 4457128 - DNA, 25 bp, Homo sapien
ctctctatgtaaccagtttaaggga

SEQ ID NO: 4457129 - DNA, 25 bp, Homo sapien
gactttttccagtcaggtctggcgg

SEQ ID NO: 4457130 - DNA, 25 bp, Homo sapien
caagtgagtaggcaatgatgcatca

SEQ ID NO: 4457131 - DNA, 25 bp, Homo sapien
caagtgagtgtggaagaaaacagca

SEQ ID NO: 4457132 - DNA, 25 bp, Homo sapien
gcaagtgagtgtggaagaaaacagc

SEQ ID NO: 4457133 - DNA, 25 bp, Homo sapien
atatgtgacttccaattcgaccctc

SEQ ID NO: 4457134 - DNA, 25 bp, Homo sapien
gacttccaattcgaccctctggcaa

SEQ ID NO: 4457135 - DNA, 25 bp, Homo sapien
atttcatcttcatgttgaatttccc

SEQ ID NO: 4457136 - DNA, 25 bp, Homo sapien
tcatcttcatgttgaatttcccttt

SEQ ID NO: 4457137 - DNA, 25 bp, Homo sapien
atcttcatgttgaatttccctttta

SEQ ID NO: 4457138 - DNA, 25 bp, Homo sapien
tcagaatttcatcttcatgttgaat

SEQ ID NO: 4457139 - DNA, 25 bp, Homo sapien
gcagcatctgaatatttccacccag

SEQ ID NO: 4457140 - DNA, 25 bp, Homo sapien
cctcagtagtgatatttggtaaagc

SEQ ID NO: 4457141 - DNA, 25 bp, Homo sapien
gcagttcatacagcttttttctaag

SEQ ID NO: 4457142 - DNA, 25 bp, Homo sapien
taccgaagtatttaagcagcatctg

SEQ ID NO: 4457143 - DNA, 25 bp, Homo sapien
taaagcaagctcagtcatacatgac

SEQ ID NO: 4457144 - DNA, 25 bp, Homo sapien
gaagccaggcatgcaacagattttg

SEQ ID NO: 4457145 - DNA, 25 bp, Homo sapien
ctttttgtgggttcaagagccctct

SEQ ID NO: 4457146 - DNA, 25 bp, Homo sapien
tgagacttcctttcagtgtaagagc

SEQ ID NO: 4457147 - DNA, 25 bp, Homo sapien
tttatattattcctcagaagcatta

SEQ ID NO: 4457148 - DNA, 25 bp, Homo sapien
agttaaaagtctactaacctgcatt

SEQ ID NO: 4457149 - DNA, 25 bp, Homo sapien
cattagttaaaagtctactaacctg

SEQ ID NO: 4457150 - DNA, 25 bp, Homo sapien
tatattattcctcagaagcattagt

SEQ ID NO: 4457151 - DNA, 25 bp, Homo sapien
gaagtagtgacggaagcctgatcat

SEQ ID NO: 4457152 - DNA, 25 bp, Homo sapien
tgatcatagacattaaggaaagcgg

SEQ ID NO: 4457153 - DNA, 25 bp, Homo sapien
tatggtcgcactaatggaagacaaa

SEQ ID NO: 4457154 - DNA, 25 bp, Homo sapien
taaatattgaaaactccaggcatcg

SEQ ID NO: 4457155 - DNA, 25 bp, Homo sapien
tcctgggagaacaccaacatccatg

SEQ ID NO: 4457156 - DNA, 25 bp, Homo sapien
tgtaccccgcctaaaactgatgaat

SEQ ID NO: 4457157 - DNA, 25 bp, Homo sapien
cctcaatcacagaaagtaaagccgt

SEQ ID NO: 4457158 - DNA, 25 bp, Homo sapien
gaggtaactactgacattcaagtgg

SEQ ID NO: 4457159 - DNA, 25 bp, Homo sapien
gaggtggcctttgaactgaacttag

SEQ ID NO: 4457160 - DNA, 25 bp, Homo sapien
ccatatggacccaggtcggtttaca

SEQ ID NO: 4457161 - DNA, 25 bp, Homo sapien
cacttttggaagctaggaatgagca

SEQ ID NO: 4457162 - DNA, 25 bp, Homo sapien
tgaagggccccattttatgctaaag

SEQ ID NO: 4457163 - DNA, 25 bp, Homo sapien
gaagctaaccttcgaacagcagcgt

SEQ ID NO: 4457164 - DNA, 25 bp, Homo sapien
gccatgaagaattctaccaaggagt

SEQ ID NO: 4457165 - DNA, 25 bp, Homo sapien
gatttggtgctacaaaagaagcagc

SEQ ID NO: 4457166 - DNA, 25 bp, Homo sapien
cagcagcgttctgatttgtgggaaa

SEQ ID NO: 4457167 - DNA, 25 bp, Homo sapien
cagcagttaagtggtagtcagttac

SEQ ID NO: 4457168 - DNA, 25 bp, Homo sapien
gagagagaacgactagtaactacgg

SEQ ID NO: 4457169 - DNA, 25 bp, Homo sapien
gaaaaagccttatcctcattacagg

SEQ ID NO: 4457170 - DNA, 25 bp, Homo sapien
tgaaactcagaaaacgaaccttgct

SEQ ID NO: 4457171 - DNA, 25 bp, Homo sapien
cctgcctagcttctgccatcagagg

SEQ ID NO: 4457172 - DNA, 25 bp, Homo sapien
agactggcggcatttagggtgttat

SEQ ID NO: 4457173 - DNA, 25 bp, Homo sapien
ctgcctagcttctgccatcagagga

SEQ ID NO: 4457174 - DNA, 25 bp, Homo sapien
cggcatttagggtgttatggctgta

SEQ ID NO: 4457175 - DNA, 25 bp, Homo sapien
acaagaatcttttatagattataag

SEQ ID NO: 4457176 - DNA, 25 bp, Homo sapien
tgtagaaaatgtgctagctgcttca

SEQ ID NO: 4457177 - DNA, 25 bp, Homo sapien
gaagttttgccagatgataaataga

SEQ ID NO: 4457178 - DNA, 25 bp, Homo sapien
ctgtaatctggatatttggtgagga

SEQ ID NO: 4457179 - DNA, 25 bp, Homo sapien
gaccttgacaattggaataacagtg

SEQ ID NO: 4457180 - DNA, 25 bp, Homo sapien
gagtggttcaagactttaatggagg

SEQ ID NO: 4457181 - DNA, 25 bp, Homo sapien
gactttaatggaggaaggaactgca

SEQ ID NO: 4457182 - DNA, 25 bp, Homo sapien
tgatttcaaccttcatgactttgag

SEQ ID NO: 4457183 - DNA, 25 bp, Homo sapien
tagaagtggatcctggtcgggtgtg

SEQ ID NO: 4457184 - DNA, 25 bp, Homo sapien
aaatgacttaaagggtccagagcgg

SEQ ID NO: 4457185 - DNA, 25 bp, Homo sapien
gaaatgacttaaagggtccagagcg

SEQ ID NO: 4457186 - DNA, 25 bp, Homo sapien
atgacttaaagggtccagagcggtg

SEQ ID NO: 4457187 - DNA, 25 bp, Homo sapien
tgacttaaagggtccagagcggtgg

SEQ ID NO: 4457188 - DNA, 25 bp, Homo sapien
aaaccccgagtgctataccgaactg

SEQ ID NO: 4457189 - DNA, 25 bp, Homo sapien
tgccgggtttaatgccagcctgtct

SEQ ID NO: 4457190 - DNA, 25 bp, Homo sapien
ctttgaggtgcttgtcggtctggac

SEQ ID NO: 4457191 - DNA, 25 bp, Homo sapien
taatgcccggagacttccgctagca

SEQ ID NO: 4457192 - DNA, 25 bp, Homo sapien
gatcagtatgtgtaaacctatccgt

SEQ ID NO: 4457193 - DNA, 25 bp, Homo sapien
taaccgcacccaattaaagcagcaa

SEQ ID NO: 4457194 - DNA, 25 bp, Homo sapien
ggtgaaaccacgaattctttctgga

SEQ ID NO: 4457195 - DNA, 25 bp, Homo sapien
gatggcaagaaagccggtgaacgcc

SEQ ID NO: 4457196 - DNA, 25 bp, Homo sapien
tattcaatctactcttcatcaactt

SEQ ID NO: 4457197 - DNA, 25 bp, Homo sapien
taaaaccatattcaatctactcttc

SEQ ID NO: 4457198 - DNA, 25 bp, Homo sapien
aaatgggataatagtgcactgcaac

SEQ ID NO: 4457199 - DNA, 25 bp, Homo sapien
ggataatagtgcactgcaacctgga

SEQ ID NO: 4457200 - DNA, 25 bp, Homo sapien
gctgtctggagtgtctttggatcca

SEQ ID NO: 4457201 - DNA, 25 bp, Homo sapien
tttgatagtgaggtggctgtctgga

SEQ ID NO: 4457202 - DNA, 25 bp, Homo sapien
acacaggattgccagggttcacaca

SEQ ID NO: 4457203 - DNA, 25 bp, Homo sapien
ttgccagggttcacacaaggaggca

SEQ ID NO: 4457204 - DNA, 25 bp, Homo sapien
aaaatacttgctcctttggagtata

SEQ ID NO: 4457205 - DNA, 25 bp, Homo sapien
ccagttgctctgatatggcttgaaa

SEQ ID NO: 4457206 - DNA, 25 bp, Homo sapien
actgtggaataggtagaaattcacc

SEQ ID NO: 4457207 - DNA, 25 bp, Homo sapien
gttctggttctgtcaggtgcagtat

SEQ ID NO: 4457208 - DNA, 25 bp, Homo sapien
cgaagagacagcgaccatcgagaac

SEQ ID NO: 4457209 - DNA, 25 bp, Homo sapien
acagcgaccatcgagaacgggccat

SEQ ID NO: 4457210 - DNA, 25 bp, Homo sapien
gagacagcgaccatcgagaacgggc

SEQ ID NO: 4457211 - DNA, 25 bp, Homo sapien
ctccgaagagacagcgaccatcgag

SEQ ID NO: 4457212 - DNA, 25 bp, Homo sapien
tataacgtacgttcccagttgtgct

SEQ ID NO: 4457213 - DNA, 25 bp, Homo sapien
gtttgtacagatacgagacagatct

SEQ ID NO: 4457214 - DNA, 25 bp, Homo sapien
ggatggtaccacatgaaattgctaa

SEQ ID NO: 4457215 - DNA, 25 bp, Homo sapien
tgttgattaacttgtggatggtacc

SEQ ID NO: 4457216 - DNA, 25 bp, Homo sapien
tgcctcggctccgaggcttgcctcg

SEQ ID NO: 4457217 - DNA, 25 bp, Homo sapien
cctcggccgtgcctcggctccgagg

SEQ ID NO: 4457218 - DNA, 25 bp, Homo sapien
tcggctccgaggcttgcctcgcagc

SEQ ID NO: 4457219 - DNA, 25 bp, Homo sapien
tccgaggcttgcctcgcagccgcag

SEQ ID NO: 4457220 - DNA, 25 bp, Homo sapien
ctgctgtggcctccgacgaagttcg

SEQ ID NO: 4457221 - DNA, 25 bp, Homo sapien
ccttgcgaaagctgggcccggtagc

SEQ ID NO: 4457222 - DNA, 25 bp, Homo sapien
gacgaagttcggagatgccctttcc

SEQ ID NO: 4457223 - DNA, 25 bp, Homo sapien
gatgccctttccttgcgaaagctgg

SEQ ID NO: 4457224 - DNA, 25 bp, Homo sapien
ggtacgttcatctttccgatcccta

SEQ ID NO: 4457225 - DNA, 25 bp, Homo sapien
agctcccgcttacaaagtttcctcg

SEQ ID NO: 4457226 - DNA, 25 bp, Homo sapien
aaagtttcctcgcatggtacgttca

SEQ ID NO: 4457227 - DNA, 25 bp, Homo sapien
caagtggaggcattctacagacagg

SEQ ID NO: 4457228 - DNA, 25 bp, Homo sapien
ttggagccgccttggtaagtcttct

SEQ ID NO: 4457229 - DNA, 25 bp, Homo sapien
gaatgcatggccacaggaaatccca

SEQ ID NO: 4457230 - DNA, 25 bp, Homo sapien
caacaattatagcaggtccacagaa

SEQ ID NO: 4457231 - DNA, 25 bp, Homo sapien
gtccacagaacataacaacatctct

SEQ ID NO: 4457232 - DNA, 25 bp, Homo sapien
gaagaaaacctggactgaagacatt

SEQ ID NO: 4457233 - DNA, 25 bp, Homo sapien
attcttcacaagagatactggtttc

SEQ ID NO: 4457234 - DNA, 25 bp, Homo sapien
ctggtttctaacatatcctttaagg

SEQ ID NO: 4457235 - DNA, 25 bp, Homo sapien
gaagacattgttgaacttcacataa

SEQ ID NO: 4457236 - DNA, 25 bp, Homo sapien
ttatcacgtgtcactgtcttcttga

SEQ ID NO: 4457237 - DNA, 25 bp, Homo sapien
gttttgatggccagtagttgttgta

SEQ ID NO: 4457238 - DNA, 25 bp, Homo sapien
cttcttgatgccatccccaactctc

SEQ ID NO: 4457239 - DNA, 25 bp, Homo sapien
tctgcctggactactcttgataatc

SEQ ID NO: 4457240 - DNA, 25 bp, Homo sapien
ttgtgtattcttattgctctgtgcc

SEQ ID NO: 4457241 - DNA, 25 bp, Homo sapien
gttccagttctctgcatgtgttgtg

SEQ ID NO: 4457242 - DNA, 25 bp, Homo sapien
cacatggagttccagttctctgcat

SEQ ID NO: 4457243 - DNA, 25 bp, Homo sapien
catgtgttgtgtattcttattgctc

SEQ ID NO: 4457244 - DNA, 25 bp, Homo sapien
tgatttctgcccataccccaaattc

SEQ ID NO: 4457245 - DNA, 25 bp, Homo sapien
tctgatttctgcccataccccaaat

SEQ ID NO: 4457246 - DNA, 25 bp, Homo sapien
tttctgcccataccccaaattccca

SEQ ID NO: 4457247 - DNA, 25 bp, Homo sapien
cctctgatttctgcccataccccaa

SEQ ID NO: 4457248 - DNA, 25 bp, Homo sapien
aaatcccagaaaccttcactgtggc

SEQ ID NO: 4457249 - DNA, 25 bp, Homo sapien
taaatcccagaaaccttcactgtgg

SEQ ID NO: 4457250 - DNA, 25 bp, Homo sapien
gtaaatcccagaaaccttcactgtg

SEQ ID NO: 4457251 - DNA, 25 bp, Homo sapien
gctgagcatcaccttaggtggaggt

SEQ ID NO: 4457252 - DNA, 25 bp, Homo sapien
ggtggatggagcaggatgagcatac

SEQ ID NO: 4457253 - DNA, 25 bp, Homo sapien
cagctgagcatcaccttaggtggag

SEQ ID NO: 4457254 - DNA, 25 bp, Homo sapien
tcagctgagcatcaccttaggtgga

SEQ ID NO: 4457255 - DNA, 25 bp, Homo sapien
gttgatacatctgtccaaatggaag

SEQ ID NO: 4457256 - DNA, 25 bp, Homo sapien
tcttttcttgtgtatatcctccgtg

SEQ ID NO: 4457257 - DNA, 25 bp, Homo sapien
catggaggttgagctccagtccttt

SEQ ID NO: 4457258 - DNA, 25 bp, Homo sapien
ggcatttgttgatacatctgtccaa

SEQ ID NO: 4457259 - DNA, 25 bp, Homo sapien
tactcacttattggaaacaggctgg

SEQ ID NO: 4457260 - DNA, 25 bp, Homo sapien
ctgggactactggagcggctaagtt

SEQ ID NO: 4457261 - DNA, 25 bp, Homo sapien
atcagcagctttcatgaaggctagc

SEQ ID NO: 4457262 - DNA, 25 bp, Homo sapien
gatttctggaacgtgctaaaggcag

SEQ ID NO: 4457263 - DNA, 25 bp, Homo sapien
tggaggcactctttatggcgcttgc

SEQ ID NO: 4457264 - DNA, 25 bp, Homo sapien
ttcatctctggtgcctgaattactt

SEQ ID NO: 4457265 - DNA, 25 bp, Homo sapien
tgctggcatacgtccacagggatgc

SEQ ID NO: 4457266 - DNA, 25 bp, Homo sapien
ccagtgcccttggccttagttctaa

SEQ ID NO: 4457267 - DNA, 25 bp, Homo sapien
tagttctaaacgtcctgtgctcccc

SEQ ID NO: 4457268 - DNA, 25 bp, Homo sapien
taatttttgtattagctggtcccaa

SEQ ID NO: 4457269 - DNA, 25 bp, Homo sapien
ttttgattcccagatttacaattgc

SEQ ID NO: 4457270 - DNA, 25 bp, Homo sapien
attgcagttctctaccatgagttcc

SEQ ID NO: 4457271 - DNA, 25 bp, Homo sapien
cccctttgacatgcatggagattca

SEQ ID NO: 4457272 - DNA, 25 bp, Homo sapien
ttcattccagctttggttattgtga

SEQ ID NO: 4457273 - DNA, 25 bp, Homo sapien
ggccatagctgattgatccaggagt

SEQ ID NO: 4457274 - DNA, 25 bp, Homo sapien
agataatccctccatgggtccctcc

SEQ ID NO: 4457275 - DNA, 25 bp, Homo sapien
tgaagagtggccctaactcaaaggg

SEQ ID NO: 4457276 - DNA, 25 bp, Homo sapien
ccccaaagggcacatccatactttg

SEQ ID NO: 4457277 - DNA, 25 bp, Homo sapien
gctgggaacaagctttgcagacaga

SEQ ID NO: 4457278 - DNA, 25 bp, Homo sapien
acactccagagaggcaatcactctt

SEQ ID NO: 4457279 - DNA, 25 bp, Homo sapien
aggtggtgctgggaacaagctttgc

SEQ ID NO: 4457280 - DNA, 25 bp, Homo sapien
aacaagctttgcagacagagaaatc

SEQ ID NO: 4457281 - DNA, 25 bp, Homo sapien
ctgtgcagccataagcctgaggagc

SEQ ID NO: 4457282 - DNA, 25 bp, Homo sapien
ataagcctgaggagctgggcaagct

SEQ ID NO: 4457283 - DNA, 25 bp, Homo sapien
ccataagcctgaggagctgggcaag

SEQ ID NO: 4457284 - DNA, 25 bp, Homo sapien
gtgcagccataagcctgaggagctg

SEQ ID NO: 4457285 - DNA, 25 bp, Homo sapien
tgggacaccttgtgtgagtgactgc

SEQ ID NO: 4457286 - DNA, 25 bp, Homo sapien
actgcaggttccacggggacctcca

SEQ ID NO: 4457287 - DNA, 25 bp, Homo sapien
cctccaactgcaggttccacgggga

SEQ ID NO: 4457288 - DNA, 25 bp, Homo sapien
ggacaccttgtgtgagtgactgcag

SEQ ID NO: 4457289 - DNA, 25 bp, Homo sapien
tcactttggcgtctaggtgctagaa

SEQ ID NO: 4457290 - DNA, 25 bp, Homo sapien
tgccttgcactataaagtggtcctc

SEQ ID NO: 4457291 - DNA, 25 bp, Homo sapien
cctgcacctgtggataacgtcactg

SEQ ID NO: 4457292 - DNA, 25 bp, Homo sapien
taggtgctagaaggccaaaagctgt

SEQ ID NO: 4457293 - DNA, 25 bp, Homo sapien
gcaggaattttgctgaaagtcgccc

SEQ ID NO: 4457294 - DNA, 25 bp, Homo sapien
gaaagtcgcccacccagtactgagg

SEQ ID NO: 4457295 - DNA, 25 bp, Homo sapien
gagtgtgccactgtagctcctatag

SEQ ID NO: 4457296 - DNA, 25 bp, Homo sapien
actgaggtggtccccacaatactga

SEQ ID NO: 4457297 - DNA, 25 bp, Homo sapien
tgtctacttggtaagtcactccact

SEQ ID NO: 4457298 - DNA, 25 bp, Homo sapien
tccttccagcccctaatcactgcag

SEQ ID NO: 4457299 - DNA, 25 bp, Homo sapien
ctcatgtctacttggtaagtcactc

SEQ ID NO: 4457300 - DNA, 25 bp, Homo sapien
catgtctacttggtaagtcactcca

SEQ ID NO: 4457301 - DNA, 25 bp, Homo sapien
tacaaatgcatttcatcagaactca

SEQ ID NO: 4457302 - DNA, 25 bp, Homo sapien
gaatccacaaataaagttctattct

SEQ ID NO: 4457303 - DNA, 25 bp, Homo sapien
tacaagcatataactttagcctaca

SEQ ID NO: 4457304 - DNA, 25 bp, Homo sapien
tccatataagtatcaagttaaacac

SEQ ID NO: 4457305 - DNA, 25 bp, Homo sapien
taaatgagaccagactcaactgcca

SEQ ID NO: 4457306 - DNA, 25 bp, Homo sapien
gacagtcagtaggatcattttcata

SEQ ID NO: 4457307 - DNA, 25 bp, Homo sapien
aacacagccccttatcccagataga

SEQ ID NO: 4457308 - DNA, 25 bp, Homo sapien
tcaaatgcattctactgcgggacag

SEQ ID NO: 4457309 - DNA, 25 bp, Homo sapien
ggaaagtgttctaggttccagcaca

SEQ ID NO: 4457310 - DNA, 25 bp, Homo sapien
gaagctgagtcctgatcctcaagga

SEQ ID NO: 4457311 - DNA, 25 bp, Homo sapien
aaacaatcaaaagtaggcgtaagca

SEQ ID NO: 4457312 - DNA, 25 bp, Homo sapien
cctgcaaagataaagtgtgccaaga

SEQ ID NO: 4457313 - DNA, 25 bp, Homo sapien
tcacattagtaaaaaggcccaagca

SEQ ID NO: 4457314 - DNA, 25 bp, Homo sapien
caaaagagcagaacacttagaatgt

SEQ ID NO: 4457315 - DNA, 25 bp, Homo sapien
agacatgaagtcaccccagaaggag

SEQ ID NO: 4457316 - DNA, 25 bp, Homo sapien
gtaagaacatgtaacaccaaaacag

SEQ ID NO: 4457317 - DNA, 25 bp, Homo sapien
aagtgaaagcactgtcaagttagca

SEQ ID NO: 4457318 - DNA, 25 bp, Homo sapien
tatctctatgctctaaccaagccag

SEQ ID NO: 4457319 - DNA, 25 bp, Homo sapien
tcatttgagttgtgatgtcggctgc

SEQ ID NO: 4457320 - DNA, 25 bp, Homo sapien
cagacatgtgcatagtccgtgttct

SEQ ID NO: 4457321 - DNA, 25 bp, Homo sapien
gtatttctggttttgatcatcataa

SEQ ID NO: 4457322 - DNA, 25 bp, Homo sapien
tgaaaagtatatgaggattctctcg

SEQ ID NO: 4457323 - DNA, 25 bp, Homo sapien
ggattctctcgcagtatttttgcaa

SEQ ID NO: 4457324 - DNA, 25 bp, Homo sapien
aagtctgtagagtagttaatagtat

SEQ ID NO: 4457325 - DNA, 25 bp, Homo sapien
cctcaaaggcttttcccacaagata

SEQ ID NO: 4457326 - DNA, 25 bp, Homo sapien
caacaaatcagtatcgtgtgcctcc

SEQ ID NO: 4457327 - DNA, 25 bp, Homo sapien
gaaatgggctatttacataacctca

SEQ ID NO: 4457328 - DNA, 25 bp, Homo sapien
caatggatgctaaagtttgtgagaa

SEQ ID NO: 4457329 - DNA, 25 bp, Homo sapien
tgtagtatgaatccatatagtgtgg

SEQ ID NO: 4457330 - DNA, 25 bp, Homo sapien
ccattatagtataaagcacagtcaa

SEQ ID NO: 4457331 - DNA, 25 bp, Homo sapien
ggccgagcaaatcacaaacttaaga

SEQ ID NO: 4457332 - DNA, 25 bp, Homo sapien
tctgagacactcatgtgcgaatatc

SEQ ID NO: 4457333 - DNA, 25 bp, Homo sapien
tcaaagaaccaagtaccggtgtctc

SEQ ID NO: 4457334 - DNA, 25 bp, Homo sapien
agtgtgaagctactatcaaagaacc

SEQ ID NO: 4457335 - DNA, 25 bp, Homo sapien
tctaagggccgtagaatttcaagta

SEQ ID NO: 4457336 - DNA, 25 bp, Homo sapien
cccaatctgtgaggtaaaagcccct

SEQ ID NO: 4457337 - DNA, 25 bp, Homo sapien
taaattgaacatccaagattttaca

SEQ ID NO: 4457338 - DNA, 25 bp, Homo sapien
cagtagcagtcgtctgctgatttca

SEQ ID NO: 4457339 - DNA, 25 bp, Homo sapien
gaattgaaggcactctatatttgca

SEQ ID NO: 4457340 - DNA, 25 bp, Homo sapien
atttgcaacagtagcagtcgtctgc

SEQ ID NO: 4457341 - DNA, 25 bp, Homo sapien
atcagaagaaatgtgtagttatggc

SEQ ID NO: 4457342 - DNA, 25 bp, Homo sapien
tcagaagaaatgtgtagttatggcc

SEQ ID NO: 4457343 - DNA, 25 bp, Homo sapien
cagaagaaatgtgtagttatggccc

SEQ ID NO: 4457344 - DNA, 25 bp, Homo sapien
caaagtgcttataccaattctactg

SEQ ID NO: 4457345 - DNA, 25 bp, Homo sapien
gagactattatgactacctctatgc

SEQ ID NO: 4457346 - DNA, 25 bp, Homo sapien
taaaccattagctagattagcgaag

SEQ ID NO: 4457347 - DNA, 25 bp, Homo sapien
ggttattacaaacgatcccacagaa

SEQ ID NO: 4457348 - DNA, 25 bp, Homo sapien
caaagcggccattttagagaattcc

SEQ ID NO: 4457349 - DNA, 25 bp, Homo sapien
cccaaagcggccattttagagaatt

SEQ ID NO: 4457350 - DNA, 25 bp, Homo sapien
tgttcctcccggctctcaggcagcc

SEQ ID NO: 4457351 - DNA, 25 bp, Homo sapien
ctgttcctcccggctctcaggcagc

SEQ ID NO: 4457352 - DNA, 25 bp, Homo sapien
catggtgtcgggtgtctgtaaaatc

SEQ ID NO: 4457353 - DNA, 25 bp, Homo sapien
cagaaagactataaaagtttttgtg

SEQ ID NO: 4457354 - DNA, 25 bp, Homo sapien
gaatacatcggcattaaattagtgc

SEQ ID NO: 4457355 - DNA, 25 bp, Homo sapien
gttgctgagaatgcttgtatctggg

SEQ ID NO: 4457356 - DNA, 25 bp, Homo sapien
atttacagtttgtgctcaatgcaaa

SEQ ID NO: 4457357 - DNA, 25 bp, Homo sapien
aaatcaattccataacataagaagt

SEQ ID NO: 4457358 - DNA, 25 bp, Homo sapien
agatgtatagcattctggaataaag

SEQ ID NO: 4457359 - DNA, 25 bp, Homo sapien
tacaatccaaaatagatgtatagca

SEQ ID NO: 4457360 - DNA, 25 bp, Homo sapien
tactataatgtgctttactacacga

SEQ ID NO: 4457361 - DNA, 25 bp, Homo sapien
acagtagttgaatattgcggtagca

SEQ ID NO: 4457362 - DNA, 25 bp, Homo sapien
gtacctgctgaaactacagtagttg

SEQ ID NO: 4457363 - DNA, 25 bp, Homo sapien
tgacaaaaacaagccctgtttcatg

SEQ ID NO: 4457364 - DNA, 25 bp, Homo sapien
tgcacaccaaagtatgcaataccca

SEQ ID NO: 4457365 - DNA, 25 bp, Homo sapien
gattttgaggccattctaatccctt

SEQ ID NO: 4457366 - DNA, 25 bp, Homo sapien
taaatggtgctagagttggcgcaga

SEQ ID NO: 4457367 - DNA, 25 bp, Homo sapien
tcttcactgtacattgagacacagc

SEQ ID NO: 4457368 - DNA, 25 bp, Homo sapien
gattttaatatggagctagcacaca

SEQ ID NO: 4457369 - DNA, 25 bp, Homo sapien
catttacacccacgatgaagggctt

SEQ ID NO: 4457370 - DNA, 25 bp, Homo sapien
tagcacacatagatgcgcaggcacg

SEQ ID NO: 4457371 - DNA, 25 bp, Homo sapien
cctaaggtctgaagccacaaatctt

SEQ ID NO: 4457372 - DNA, 25 bp, Homo sapien
tggaagctgcgacccagcggagcac

SEQ ID NO: 4457373 - DNA, 25 bp, Homo sapien
tggatgtgttaactcccgaccctgt

SEQ ID NO: 4457374 - DNA, 25 bp, Homo sapien
ctttgagtggatgtgttaactcccg

SEQ ID NO: 4457375 - DNA, 25 bp, Homo sapien
gaacgctgcactgggagttctgctg

SEQ ID NO: 4457376 - DNA, 25 bp, Homo sapien
ggtgtggtccagcaaatcaagcatc

SEQ ID NO: 4457377 - DNA, 25 bp, Homo sapien
gaatcttattggtatggcttgctcc

SEQ ID NO: 4457378 - DNA, 25 bp, Homo sapien
tactgaccctgtagatggaccagaa

SEQ ID NO: 4457379 - DNA, 25 bp, Homo sapien
gaggtactaactaccccatgtgaaa

SEQ ID NO: 4457380 - DNA, 25 bp, Homo sapien
ctttctgggcacacatgagttgtcc

SEQ ID NO: 4457381 - DNA, 25 bp, Homo sapien
cacagtgtttgtactcctgaggcaa

SEQ ID NO: 4457382 - DNA, 25 bp, Homo sapien
gtctaagtggaacagttacgtccca

SEQ ID NO: 4457383 - DNA, 25 bp, Homo sapien
tgagggatctaggttatacgtgcct

SEQ ID NO: 4457384 - DNA, 25 bp, Homo sapien
taattgaaacactcaaagtatattc

SEQ ID NO: 4457385 - DNA, 25 bp, Homo sapien
tcaggtgttagttcaggaaactgaa

SEQ ID NO: 4457386 - DNA, 25 bp, Homo sapien
gttaacttgtcgttatctgaagcag

SEQ ID NO: 4457387 - DNA, 25 bp, Homo sapien
catccactaaatggaatattacaaa

SEQ ID NO: 4457388 - DNA, 25 bp, Homo sapien
aagccttataaaaattctactagtg

SEQ ID NO: 4457389 - DNA, 25 bp, Homo sapien
ataaaaattctactagtgcactttg

SEQ ID NO: 4457390 - DNA, 25 bp, Homo sapien
aaattctactagtgcactttgggag

SEQ ID NO: 4457391 - DNA, 25 bp, Homo sapien
cctcaggcaaaagccttataaaaat

SEQ ID NO: 4457392 - DNA, 25 bp, Homo sapien
ttatgctagatagtttacttgcttg

SEQ ID NO: 4457393 - DNA, 25 bp, Homo sapien
agtttacttgcttgtagtctccaga

SEQ ID NO: 4457394 - DNA, 25 bp, Homo sapien
tgcttgtagtctccagatataaaga

SEQ ID NO: 4457395 - DNA, 25 bp, Homo sapien
tagtctccagatataaagataccaa

SEQ ID NO: 4457396 - DNA, 25 bp, Homo sapien
gcataatgggaatatcagaagtgga

SEQ ID NO: 4457397 - DNA, 25 bp, Homo sapien
gagcacttagtgtcttaatcatagt

SEQ ID NO: 4457398 - DNA, 25 bp, Homo sapien
caaaaggtgtaacataagcataatg

SEQ ID NO: 4457399 - DNA, 25 bp, Homo sapien
tttgaatataatcctacagcctcat

SEQ ID NO: 4457400 - DNA, 25 bp, Homo sapien
cggagcggtaggtgttgtgcggtct

SEQ ID NO: 4457401 - DNA, 25 bp, Homo sapien
cggtaggtgttgtgcggtctgcgcc

SEQ ID NO: 4457402 - DNA, 25 bp, Homo sapien
gttgtgcggtctgcgccgggccgca

SEQ ID NO: 4457403 - DNA, 25 bp, Homo sapien
cccggcggagcggtaggtgttgtgc

SEQ ID NO: 4457404 - DNA, 25 bp, Homo sapien
tactcagggaggaagtaatcctcac

SEQ ID NO: 4457405 - DNA, 25 bp, Homo sapien
ccatttccacgccaaatattattaa

SEQ ID NO: 4457406 - DNA, 25 bp, Homo sapien
tcctcctcacgcaagttctctttct

SEQ ID NO: 4457407 - DNA, 25 bp, Homo sapien
tctctttacttgctttgaagatgcc

SEQ ID NO: 4457408 - DNA, 25 bp, Homo sapien
ctatctctccatcatgctttgtccc

SEQ ID NO: 4457409 - DNA, 25 bp, Homo sapien
cctatctctccatcatgctttgtcc

SEQ ID NO: 4457410 - DNA, 25 bp, Homo sapien
tatctctccatcatgctttgtccct

SEQ ID NO: 4457411 - DNA, 25 bp, Homo sapien
atctctccatcatgctttgtccctg

SEQ ID NO: 4457412 - DNA, 25 bp, Homo sapien
caaagactttgtaactccgagcatg

SEQ ID NO: 4457413 - DNA, 25 bp, Homo sapien
tgccatagagagctagacatcagcc

SEQ ID NO: 4457414 - DNA, 25 bp, Homo sapien
tagttagctaattcacactccagag

SEQ ID NO: 4457415 - DNA, 25 bp, Homo sapien
caccagagacactgcaatagttagc

SEQ ID NO: 4457416 - DNA, 25 bp, Homo sapien
ttaaataatgctgaaacacaatgtc

SEQ ID NO: 4457417 - DNA, 25 bp, Homo sapien
agtgaaacctttggctagcaattaa

SEQ ID NO: 4457418 - DNA, 25 bp, Homo sapien
gctaattttaatgccctagctttaa

SEQ ID NO: 4457419 - DNA, 25 bp, Homo sapien
taactttgagatattgtagccgaaa

SEQ ID NO: 4457420 - DNA, 25 bp, Homo sapien
tttctctttgagttatttgaccttc

SEQ ID NO: 4457421 - DNA, 25 bp, Homo sapien
ttctctttgagttatttgaccttct

SEQ ID NO: 4457422 - DNA, 25 bp, Homo sapien
tctctttgagttatttgaccttctt

SEQ ID NO: 4457423 - DNA, 25 bp, Homo sapien
ctctttgagttatttgaccttctta

SEQ ID NO: 4457424 - DNA, 25 bp, Homo sapien
caggctacgattgtaaagtggcttt

SEQ ID NO: 4457425 - DNA, 25 bp, Homo sapien
gcatattagtggaaatgtactgtct

SEQ ID NO: 4457426 - DNA, 25 bp, Homo sapien
cgtggcttaggctttgtctcatgca

SEQ ID NO: 4457427 - DNA, 25 bp, Homo sapien
gttaacaactctggcaggctacgat

SEQ ID NO: 4457428 - DNA, 25 bp, Homo sapien
cctgagtattctgtgctctggcctt

SEQ ID NO: 4457429 - DNA, 25 bp, Homo sapien
cagttgcttcttaacctgagtattc

SEQ ID NO: 4457430 - DNA, 25 bp, Homo sapien
gcttcttaacctgagtattctgtgc

SEQ ID NO: 4457431 - DNA, 25 bp, Homo sapien
ttaacctgagtattctgtgctctgg

SEQ ID NO: 4457432 - DNA, 25 bp, Homo sapien
gcagacatgatcttccactactctg

SEQ ID NO: 4457433 - DNA, 25 bp, Homo sapien
agaatgcatatgaggacattttgat

SEQ ID NO: 4457434 - DNA, 25 bp, Homo sapien
tggcagacatgatcttccactactc

SEQ ID NO: 4457435 - DNA, 25 bp, Homo sapien
gactgaagcattggctgctttttct

SEQ ID NO: 4457436 - DNA, 25 bp, Homo sapien
aattacagagtgatatttagttaaa

SEQ ID NO: 4457437 - DNA, 25 bp, Homo sapien
ccaggtttgtggctatggaaaatac

SEQ ID NO: 4457438 - DNA, 25 bp, Homo sapien
gatttctatgccagtttacgacccc

SEQ ID NO: 4457439 - DNA, 25 bp, Homo sapien
ggaaaatactaccagggcatgatat

SEQ ID NO: 4457440 - DNA, 25 bp, Homo sapien
tttctgtggcaatgagacttctgta

SEQ ID NO: 4457441 - DNA, 25 bp, Homo sapien
ccactatctagctgatggattaacc

SEQ ID NO: 4457442 - DNA, 25 bp, Homo sapien
caaggtggtaatcaatgctacacag

SEQ ID NO: 4457443 - DNA, 25 bp, Homo sapien
gacttctgtatcacaagatccagga

SEQ ID NO: 4457444 - DNA, 25 bp, Homo sapien
tggcaaagattagtaccatacttga

SEQ ID NO: 4457445 - DNA, 25 bp, Homo sapien
aatacaaggtgaaggtcttaatcta

SEQ ID NO: 4457446 - DNA, 25 bp, Homo sapien
catcatatccccaagtcattatcca

SEQ ID NO: 4457447 - DNA, 25 bp, Homo sapien
gacgtcaatgatacaggcttagtgg

SEQ ID NO: 4457448 - DNA, 25 bp, Homo sapien
tttttatattcaagtggaactacac

SEQ ID NO: 4457449 - DNA, 25 bp, Homo sapien
tggaactacacactctaactttttg

SEQ ID NO: 4457450 - DNA, 25 bp, Homo sapien
gaactacacactctaactttttgag

SEQ ID NO: 4457451 - DNA, 25 bp, Homo sapien
tattcaagtggaactacacactcta

SEQ ID NO: 4457452 - DNA, 25 bp, Homo sapien
cactggctgcactcgagctcttggg

SEQ ID NO: 4457453 - DNA, 25 bp, Homo sapien
acactggctgcactcgagctcttgg

SEQ ID NO: 4457454 - DNA, 25 bp, Homo sapien
actggctgcactcgagctcttgggt

SEQ ID NO: 4457455 - DNA, 25 bp, Homo sapien
ctaaagacacagagatcattcaggg

SEQ ID NO: 4457456 - DNA, 25 bp, Homo sapien
cacagagatcattcagggcttttcc

SEQ ID NO: 4457457 - DNA, 25 bp, Homo sapien
ctaactaaagacacagagatcattc

SEQ ID NO: 4457458 - DNA, 25 bp, Homo sapien
agacacagagatcattcagggcttt

SEQ ID NO: 4457459 - DNA, 25 bp, Homo sapien
gactgcgacgcggttaccgaggcaa

SEQ ID NO: 4457460 - DNA, 25 bp, Homo sapien
ttcggcgactgcgacgcggttaccg

SEQ ID NO: 4457461 - DNA, 25 bp, Homo sapien
cgcggttaccgaggcaacgacgcat

SEQ ID NO: 4457462 - DNA, 25 bp, Homo sapien
tgcgacgcggttaccgaggcaacga

SEQ ID NO: 4457463 - DNA, 25 bp, Homo sapien
aggcgtcctagtcgccggaacccag

SEQ ID NO: 4457464 - DNA, 25 bp, Homo sapien
ccacagactttcagacccgaagtta

SEQ ID NO: 4457465 - DNA, 25 bp, Homo sapien
cagactttcagacccgaagttaaag

SEQ ID NO: 4457466 - DNA, 25 bp, Homo sapien
aggaagttaggcgtcctagtcgccg

SEQ ID NO: 4457467 - DNA, 25 bp, Homo sapien
ttgctgaacgggtggcgggaacgga

SEQ ID NO: 4457468 - DNA, 25 bp, Homo sapien
ttcttcctccaaggcgaggaggtcg

SEQ ID NO: 4457469 - DNA, 25 bp, Homo sapien
aggaggtcgggtccaggtgtagagg

SEQ ID NO: 4457470 - DNA, 25 bp, Homo sapien
acggagtccctggaacgctgcttct

SEQ ID NO: 4457471 - DNA, 25 bp, Homo sapien
agtggtcccgaagatccagccagtc

SEQ ID NO: 4457472 - DNA, 25 bp, Homo sapien
gcaggcgaactactcagatcaaaga

SEQ ID NO: 4457473 - DNA, 25 bp, Homo sapien
gaaaaaagtacttgtaagcagcctc

SEQ ID NO: 4457474 - DNA, 25 bp, Homo sapien
taaacggcaggtgaacgagatgacg

SEQ ID NO: 4457475 - DNA, 25 bp, Homo sapien
aggccctgctctaatgtgggcagaa

SEQ ID NO: 4457476 - DNA, 25 bp, Homo sapien
tataactggggagctaaatgtgagg

SEQ ID NO: 4457477 - DNA, 25 bp, Homo sapien
aatgtgaggtttagtgagcagaccc

SEQ ID NO: 4457478 - DNA, 25 bp, Homo sapien
tgagcagacccaacgtggctcacac

SEQ ID NO: 4457479 - DNA, 25 bp, Homo sapien
ccttagcttgttgaaccacgtcagc

SEQ ID NO: 4457480 - DNA, 25 bp, Homo sapien
tagcttgttgaaccacgtcagctgt

SEQ ID NO: 4457481 - DNA, 25 bp, Homo sapien
gcttgttgaaccacgtcagctgttt

SEQ ID NO: 4457482 - DNA, 25 bp, Homo sapien
tttccttagcttgttgaaccacgtc

SEQ ID NO: 4457483 - DNA, 25 bp, Homo sapien
gacagcacaacatgtttattatagt

SEQ ID NO: 4457484 - DNA, 25 bp, Homo sapien
tatgagaaaccttatattgtttgct

SEQ ID NO: 4457485 - DNA, 25 bp, Homo sapien
gggctctctgagtagaaaacgtaat

SEQ ID NO: 4457486 - DNA, 25 bp, Homo sapien
atctgtcattctactataacgtggg

SEQ ID NO: 4457487 - DNA, 25 bp, Homo sapien
aatcaaaacaacttaacatatggag

SEQ ID NO: 4457488 - DNA, 25 bp, Homo sapien
gagttgaagaatggttatcagagac

SEQ ID NO: 4457489 - DNA, 25 bp, Homo sapien
aaacaacttaacatatggagataga

SEQ ID NO: 4457490 - DNA, 25 bp, Homo sapien
agagagttgaagaatggttatcaga

SEQ ID NO: 4457491 - DNA, 25 bp, Homo sapien
gttgaaacaggcctagatcgtactt

SEQ ID NO: 4457492 - DNA, 25 bp, Homo sapien
catcttcgtcatcacatgatttcat

SEQ ID NO: 4457493 - DNA, 25 bp, Homo sapien
cttaaactgtaatcatcttcgtcat

SEQ ID NO: 4457494 - DNA, 25 bp, Homo sapien
tagatcgtacttcttgccgatctct

SEQ ID NO: 4457495 - DNA, 25 bp, Homo sapien
tccacagttacaacaagggtaatca

SEQ ID NO: 4457496 - DNA, 25 bp, Homo sapien
cacagttacaacaagggtaatcaag

SEQ ID NO: 4457497 - DNA, 25 bp, Homo sapien
cagttacaacaagggtaatcaagag

SEQ ID NO: 4457498 - DNA, 25 bp, Homo sapien
tacaacaagggtaatcaagagtgtg

SEQ ID NO: 4457499 - DNA, 25 bp, Homo sapien
cactgtcaagcttctaaggagagac

SEQ ID NO: 4457500 - DNA, 25 bp, Homo sapien
gcattgaggagccttaatccactga

SEQ ID NO: 4457501 - DNA, 25 bp, Homo sapien
ttagttaggtctttgccatgggcca

SEQ ID NO: 4457502 - DNA, 25 bp, Homo sapien
tgatttctgtccctaaagctctgcc

SEQ ID NO: 4457503 - DNA, 25 bp, Homo sapien
gaactatcccttcagatggtaacag

SEQ ID NO: 4457504 - DNA, 25 bp, Homo sapien
gaagatgaactatcccttcagatgg

SEQ ID NO: 4457505 - DNA, 25 bp, Homo sapien
gtttctgaatgaagatgaactatcc

SEQ ID NO: 4457506 - DNA, 25 bp, Homo sapien
tatcccttcagatggtaacagacct

SEQ ID NO: 4457507 - DNA, 25 bp, Homo sapien
gaaagtattgactaattagagtcta

SEQ ID NO: 4457508 - DNA, 25 bp, Homo sapien
ctattttcatggaattaccaaaaat

SEQ ID NO: 4457509 - DNA, 25 bp, Homo sapien
gccaaagaaagcaattctgtaacac

SEQ ID NO: 4457510 - DNA, 25 bp, Homo sapien
gaatatcacaactgtatagctggaa

SEQ ID NO: 4457511 - DNA, 25 bp, Homo sapien
tgaaccttgtttacaggatcaatgt

SEQ ID NO: 4457512 - DNA, 25 bp, Homo sapien
gttccaatgtcattactaacaccag

SEQ ID NO: 4457513 - DNA, 25 bp, Homo sapien
cctctggaatggcaacatcgtcggc

SEQ ID NO: 4457514 - DNA, 25 bp, Homo sapien
catcgtcggcagtttggacatcaga

SEQ ID NO: 4457515 - DNA, 25 bp, Homo sapien
catctatatattcaggtaagccttc

SEQ ID NO: 4457516 - DNA, 25 bp, Homo sapien
cataacatggagtttggcctttaga

SEQ ID NO: 4457517 - DNA, 25 bp, Homo sapien
aattcctcctgcataacatggagtt

SEQ ID NO: 4457518 - DNA, 25 bp, Homo sapien
cacatacaacattatccaattcctc

SEQ ID NO: 4457519 - DNA, 25 bp, Homo sapien
tttattgcattcacatacaacatta

SEQ ID NO: 4457520 - DNA, 25 bp, Homo sapien
aagacaactgttgctgtaatccatc

SEQ ID NO: 4457521 - DNA, 25 bp, Homo sapien
tctacttgagactgttgcatattaa

SEQ ID NO: 4457522 - DNA, 25 bp, Homo sapien
taattgttcgctgctgtctcataaa

SEQ ID NO: 4457523 - DNA, 25 bp, Homo sapien
caactgttgctgtaatccatcatac

SEQ ID NO: 4457524 - DNA, 25 bp, Homo sapien
tgttggaaagtaaaaggcatgtctc

SEQ ID NO: 4457525 - DNA, 25 bp, Homo sapien
tcatgctggaaggtaaaggcacatc

SEQ ID NO: 4457526 - DNA, 25 bp, Homo sapien
gaagacctctgcataccttgggaga

SEQ ID NO: 4457527 - DNA, 25 bp, Homo sapien
ggagcttcatgcactactggtagga

SEQ ID NO: 4457528 - DNA, 25 bp, Homo sapien
tccccctgccagctccctagcgcca

SEQ ID NO: 4457529 - DNA, 25 bp, Homo sapien
gctccctagcgccagacaggccctg

SEQ ID NO: 4457530 - DNA, 25 bp, Homo sapien
gccagctccctagcgccagacaggc

SEQ ID NO: 4457531 - DNA, 25 bp, Homo sapien
cctgccagctccctagcgccagaca

SEQ ID NO: 4457532 - DNA, 25 bp, Homo sapien
ggcactttgactacttgcagcctgt

SEQ ID NO: 4457533 - DNA, 25 bp, Homo sapien
cttctagagctctattcaagcgaac

SEQ ID NO: 4457534 - DNA, 25 bp, Homo sapien
tctgtggcactttgactacttgcag

SEQ ID NO: 4457535 - DNA, 25 bp, Homo sapien
tattcaagcgaacctctgtggcact

SEQ ID NO: 4457536 - DNA, 25 bp, Homo sapien
tctccagaagaatgatttggaagtt

SEQ ID NO: 4457537 - DNA, 25 bp, Homo sapien
ttctccagaagaatgatttggaagt

SEQ ID NO: 4457538 - DNA, 25 bp, Homo sapien
ttgaaccctatcattaattctcctt

SEQ ID NO: 4457539 - DNA, 25 bp, Homo sapien
actgtttcttgaaccctatcattaa

SEQ ID NO: 4457540 - DNA, 25 bp, Homo sapien
ttgttttctgattttaacacttcaa

SEQ ID NO: 4457541 - DNA, 25 bp, Homo sapien
tttaactgtttcttgaaccctatca

SEQ ID NO: 4457542 - DNA, 25 bp, Homo sapien
cagtgaaagatagcatcttggcagc

SEQ ID NO: 4457543 - DNA, 25 bp, Homo sapien
cctcagtgaaagatagcatcttggc

SEQ ID NO: 4457544 - DNA, 25 bp, Homo sapien
ctcagtgaaagatagcatcttggca

SEQ ID NO: 4457545 - DNA, 25 bp, Homo sapien
gtgaaagatagcatcttggcagctt

SEQ ID NO: 4457546 - DNA, 25 bp, Homo sapien
tcatagagactaactgaagtagatc

SEQ ID NO: 4457547 - DNA, 25 bp, Homo sapien
gtcatagagactaactgaagtagat

SEQ ID NO: 4457548 - DNA, 25 bp, Homo sapien
tgtcatagagactaactgaagtaga

SEQ ID NO: 4457549 - DNA, 25 bp, Homo sapien
taattcaaaccactacaataagtaa

SEQ ID NO: 4457550 - DNA, 25 bp, Homo sapien
taattgtcacgctaagaacttaaaa

SEQ ID NO: 4457551 - DNA, 25 bp, Homo sapien
tatctgatgtgcttaattgtcacgc

SEQ ID NO: 4457552 - DNA, 25 bp, Homo sapien
caactcaaaaagagctaatagctaa

SEQ ID NO: 4457553 - DNA, 25 bp, Homo sapien
gattcctatgaaaagctcctacact

SEQ ID NO: 4457554 - DNA, 25 bp, Homo sapien
tcctatctaggtaatccaagcagta

SEQ ID NO: 4457555 - DNA, 25 bp, Homo sapien
cacaaagtatttttctcgtagggag

SEQ ID NO: 4457556 - DNA, 25 bp, Homo sapien
gtacagtatagatgaagtgccttcc

SEQ ID NO: 4457557 - DNA, 25 bp, Homo sapien
gcctggccacaggacttgatagtct

SEQ ID NO: 4457558 - DNA, 25 bp, Homo sapien
gatatataggtaattactgcctggc

SEQ ID NO: 4457559 - DNA, 25 bp, Homo sapien
agattgactgtttgctgattagcca

SEQ ID NO: 4457560 - DNA, 25 bp, Homo sapien
ttaggtcctaatggtgccaaatgac

SEQ ID NO: 4457561 - DNA, 25 bp, Homo sapien
agattggagctcatctgttctcaga

SEQ ID NO: 4457562 - DNA, 25 bp, Homo sapien
tgtctacctctacgaaaatcatacg

SEQ ID NO: 4457563 - DNA, 25 bp, Homo sapien
tgttcccaatatgaagctgtcggct

SEQ ID NO: 4457564 - DNA, 25 bp, Homo sapien
caaggacagatcttcgtgatgaaac

SEQ ID NO: 4457565 - DNA, 25 bp, Homo sapien
ggtgactgggtgacatcctaaggaa

SEQ ID NO: 4457566 - DNA, 25 bp, Homo sapien
tttggctttggatacattgacttat

SEQ ID NO: 4457567 - DNA, 25 bp, Homo sapien
gacttatttatgtctcatccgtaaa

SEQ ID NO: 4457568 - DNA, 25 bp, Homo sapien
aagaaatagattttgagggtgcaaa

SEQ ID NO: 4457569 - DNA, 25 bp, Homo sapien
aaacttattgaagagcgtcgccaac

SEQ ID NO: 4457570 - DNA, 25 bp, Homo sapien
tgcaaatagataagggatccacccg

SEQ ID NO: 4457571 - DNA, 25 bp, Homo sapien
cagtgacaagtggtgaaacccatgc

SEQ ID NO: 4457572 - DNA, 25 bp, Homo sapien
ccacccgagagatgttaaggatacg

SEQ ID NO: 4457573 - DNA, 25 bp, Homo sapien
gtggtcaactttggaataagtgcgg

SEQ ID NO: 4457574 - DNA, 25 bp, Homo sapien
caactttggaataagtgcggtgtgg

SEQ ID NO: 4457575 - DNA, 25 bp, Homo sapien
tcaactttggaataagtgcggtgtg

SEQ ID NO: 4457576 - DNA, 25 bp, Homo sapien
ggtcaactttggaataagtgcggtg

SEQ ID NO: 4457577 - DNA, 25 bp, Homo sapien
ttctttgttatgagtcttgctagcg

SEQ ID NO: 4457578 - DNA, 25 bp, Homo sapien
gacagacgaccaaagtatcaggatg

SEQ ID NO: 4457579 - DNA, 25 bp, Homo sapien
tttccgttggatctgtggtgatatc

SEQ ID NO: 4457580 - DNA, 25 bp, Homo sapien
ggtagtatttccgttggatctgtgg

SEQ ID NO: 4457581 - DNA, 25 bp, Homo sapien
attagctgggttttgtggtaactgc

SEQ ID NO: 4457582 - DNA, 25 bp, Homo sapien
aacagactgccaaagtgatttccag

SEQ ID NO: 4457583 - DNA, 25 bp, Homo sapien
aaatatatgagttacgcagtctgtc

SEQ ID NO: 4457584 - DNA, 25 bp, Homo sapien
tatttgaccatttgcccattaaagg

SEQ ID NO: 4457585 - DNA, 25 bp, Homo sapien
tttacgttccttagatattatggat

SEQ ID NO: 4457586 - DNA, 25 bp, Homo sapien
cgttccttagatattatggatatta

SEQ ID NO: 4457587 - DNA, 25 bp, Homo sapien
tacgttccttagatattatggatat

SEQ ID NO: 4457588 - DNA, 25 bp, Homo sapien
tgtttacgttccttagatattatgg

SEQ ID NO: 4457589 - DNA, 25 bp, Homo sapien
ggtcatggggatttggtgtaacatt

SEQ ID NO: 4457590 - DNA, 25 bp, Homo sapien
ttgtatgtgaagacatgtagtattt

SEQ ID NO: 4457591 - DNA, 25 bp, Homo sapien
tatccctgcattaattagcataggc

SEQ ID NO: 4457592 - DNA, 25 bp, Homo sapien
ctatccctgcattaattagcatagg

SEQ ID NO: 4457593 - DNA, 25 bp, Homo sapien
gtcatgcaagtactagttttggctt

SEQ ID NO: 4457594 - DNA, 25 bp, Homo sapien
tctgactcctacgagaattgctgct

SEQ ID NO: 4457595 - DNA, 25 bp, Homo sapien
aatgaaagtcgaatactactaggac

SEQ ID NO: 4457596 - DNA, 25 bp, Homo sapien
tactaggacttgactaggtgtcatg

SEQ ID NO: 4457597 - DNA, 25 bp, Homo sapien
caagaatggctaagacagtctctaa

SEQ ID NO: 4457598 - DNA, 25 bp, Homo sapien
gaatgtaatagaacagagcagtact

SEQ ID NO: 4457599 - DNA, 25 bp, Homo sapien
tgaattcagtactatcacagccagt

SEQ ID NO: 4457600 - DNA, 25 bp, Homo sapien
tctctaagaagatgaccaaaattgg

SEQ ID NO: 4457601 - DNA, 25 bp, Homo sapien
gcatatggcagtatgttcaacagcg

SEQ ID NO: 4457602 - DNA, 25 bp, Homo sapien
cctctagaggtttctgctgattcca

SEQ ID NO: 4457603 - DNA, 25 bp, Homo sapien
gattctctaagagattaccgatcct

SEQ ID NO: 4457604 - DNA, 25 bp, Homo sapien
gaagcagagcttggccaataagcat

SEQ ID NO: 4457605 - DNA, 25 bp, Homo sapien
aaaaatagataagtaggtgccaggg

SEQ ID NO: 4457606 - DNA, 25 bp, Homo sapien
tgactgctaataggttacaggtttc

SEQ ID NO: 4457607 - DNA, 25 bp, Homo sapien
cagctttatagctgccatagcacaa

SEQ ID NO: 4457608 - DNA, 25 bp, Homo sapien
gatgtaaacattctggagtgttgac

SEQ ID NO: 4457609 - DNA, 25 bp, Homo sapien
taagtttacccaccatctccagtgg

SEQ ID NO: 4457610 - DNA, 25 bp, Homo sapien
gaactcctcattgatatgtggacag

SEQ ID NO: 4457611 - DNA, 25 bp, Homo sapien
gaaatcaacaagtagaggaccaagc

SEQ ID NO: 4457612 - DNA, 25 bp, Homo sapien
gactaatgctgccttagaggccact

SEQ ID NO: 4457613 - DNA, 25 bp, Homo sapien
gatggttgtcccttctcaataacta

SEQ ID NO: 4457614 - DNA, 25 bp, Homo sapien
gtcctgatggttgtcccttctcaat

SEQ ID NO: 4457615 - DNA, 25 bp, Homo sapien
aaaatccaagaagtgtcctgatggt

SEQ ID NO: 4457616 - DNA, 25 bp, Homo sapien
cctgatggttgtcccttctcaataa

SEQ ID NO: 4457617 - DNA, 25 bp, Homo sapien
ttaaacgctgtattagctagtgtca

SEQ ID NO: 4457618 - DNA, 25 bp, Homo sapien
ccatgcctttaaacgctgtattagc

SEQ ID NO: 4457619 - DNA, 25 bp, Homo sapien
atttatagaatgtctttgcatgcca

SEQ ID NO: 4457620 - DNA, 25 bp, Homo sapien
atagaatgtctttgcatgccagttc

SEQ ID NO: 4457621 - DNA, 25 bp, Homo sapien
tgtgcttcattaaagtcaatctcca

SEQ ID NO: 4457622 - DNA, 25 bp, Homo sapien
tgataaacaggctgcgagctggaca

SEQ ID NO: 4457623 - DNA, 25 bp, Homo sapien
gataaacaggctgcgagctggacat

SEQ ID NO: 4457624 - DNA, 25 bp, Homo sapien
attaaagtcaatctccacagggcag

SEQ ID NO: 4457625 - DNA, 25 bp, Homo sapien
gactttctattttgttcgcatagag

SEQ ID NO: 4457626 - DNA, 25 bp, Homo sapien
gtttatatttctctagggtcagtgg

SEQ ID NO: 4457627 - DNA, 25 bp, Homo sapien
tattttgttcgcatagaggtgttca

SEQ ID NO: 4457628 - DNA, 25 bp, Homo sapien
tgccccttgttatttccgattgtgt

SEQ ID NO: 4457629 - DNA, 25 bp, Homo sapien
ccctagcacaacagaggcaacagta

SEQ ID NO: 4457630 - DNA, 25 bp, Homo sapien
tagttctgatgttagcgagcaaggc

SEQ ID NO: 4457631 - DNA, 25 bp, Homo sapien
gaaaggtagtggtgatccttcagcc

SEQ ID NO: 4457632 - DNA, 25 bp, Homo sapien
ccgaggtacttgagtatgaagccac

SEQ ID NO: 4457633 - DNA, 25 bp, Homo sapien
tactgccatagcgaggattgggaac

SEQ ID NO: 4457634 - DNA, 25 bp, Homo sapien
tcttgcctaagaaaatggcctcctc

SEQ ID NO: 4457635 - DNA, 25 bp, Homo sapien
ggctcaaaaaacatcgtcagttgtg

SEQ ID NO: 4457636 - DNA, 25 bp, Homo sapien
gaaacctgtcttgcagaccaggaaa

SEQ ID NO: 4457637 - DNA, 25 bp, Homo sapien
tgtactgttgatgcatttgcttcca

SEQ ID NO: 4457638 - DNA, 25 bp, Homo sapien
gctaatgtgagtttaattctcctac

SEQ ID NO: 4457639 - DNA, 25 bp, Homo sapien
aaatctttaagtttaagctaatgtg

SEQ ID NO: 4457640 - DNA, 25 bp, Homo sapien
tgaaaatgtactgttgatgcatttg

SEQ ID NO: 4457641 - DNA, 25 bp, Homo sapien
aatatagtaatgtaggagtacagtc

SEQ ID NO: 4457642 - DNA, 25 bp, Homo sapien
cttggtcataggtcaaaagcaggat

SEQ ID NO: 4457643 - DNA, 25 bp, Homo sapien
gtacagtcaatccttcatatccttg

SEQ ID NO: 4457644 - DNA, 25 bp, Homo sapien
tcaaaagcaggataaaccacattgt

SEQ ID NO: 4457645 - DNA, 25 bp, Homo sapien
tggttataccacacacttagaatcc

SEQ ID NO: 4457646 - DNA, 25 bp, Homo sapien
cttagaatccactgagcgctattgt

SEQ ID NO: 4457647 - DNA, 25 bp, Homo sapien
cagtgtctttgttccaccaagctga

SEQ ID NO: 4457648 - DNA, 25 bp, Homo sapien
tggtgtccagaggaaaccttgatgc

SEQ ID NO: 4457649 - DNA, 25 bp, Homo sapien
gaagcattcagaaaatctccggtaa

SEQ ID NO: 4457650 - DNA, 25 bp, Homo sapien
cagtgctaaccatctaagaatatgc

SEQ ID NO: 4457651 - DNA, 25 bp, Homo sapien
tcatagtaaccgtccaagcaaaagg

SEQ ID NO: 4457652 - DNA, 25 bp, Homo sapien
tgcagcaatcaccagttagttttgg

SEQ ID NO: 4457653 - DNA, 25 bp, Homo sapien
tcactttccaagccaacggactggg

SEQ ID NO: 4457654 - DNA, 25 bp, Homo sapien
cgcgtgggtcttcgagggcccgcga

SEQ ID NO: 4457655 - DNA, 25 bp, Homo sapien
tcgttacacacgcggagggcccgga

SEQ ID NO: 4457656 - DNA, 25 bp, Homo sapien
aattccgagcagtccggattttggg

SEQ ID NO: 4457657 - DNA, 25 bp, Homo sapien
gcttctttcgaacggcggctgtatc

SEQ ID NO: 4457658 - DNA, 25 bp, Homo sapien
tcgaacggcggctgtatcccatgac

SEQ ID NO: 4457659 - DNA, 25 bp, Homo sapien
tttcgaacggcggctgtatcccatg

SEQ ID NO: 4457660 - DNA, 25 bp, Homo sapien
ttgcttctttcgaacggcggctgta

SEQ ID NO: 4457661 - DNA, 25 bp, Homo sapien
caaaacttttgcaccctactctatt

SEQ ID NO: 4457662 - DNA, 25 bp, Homo sapien
cttgcatgtaacacaaataatgaca

SEQ ID NO: 4457663 - DNA, 25 bp, Homo sapien
tttgcaactgctaatcttgcatgta

SEQ ID NO: 4457664 - DNA, 25 bp, Homo sapien
aaacttaaataagccggcaatgaat

SEQ ID NO: 4457665 - DNA, 25 bp, Homo sapien
catcagtatctagtctccactgtgc

SEQ ID NO: 4457666 - DNA, 25 bp, Homo sapien
tcttattgctaacttctatgtttct

SEQ ID NO: 4457667 - DNA, 25 bp, Homo sapien
ctgtatattggatttcctttgcctg

SEQ ID NO: 4457668 - DNA, 25 bp, Homo sapien
ccactgtgctacttctgattttgac

SEQ ID NO: 4457669 - DNA, 25 bp, Homo sapien
gggtttactcaggtacatgtatgaa

SEQ ID NO: 4457670 - DNA, 25 bp, Homo sapien
ctcaggtacatgtatgaaaggattt

SEQ ID NO: 4457671 - DNA, 25 bp, Homo sapien
tttactcaggtacatgtatgaaagg

SEQ ID NO: 4457672 - DNA, 25 bp, Homo sapien
tactcaggtacatgtatgaaaggat

SEQ ID NO: 4457673 - DNA, 25 bp, Homo sapien
tgacctctatccatgctcgtattaa

SEQ ID NO: 4457674 - DNA, 25 bp, Homo sapien
gaatctctgtgtactgctgctttgt

SEQ ID NO: 4457675 - DNA, 25 bp, Homo sapien
caagaaaggattggctacagggaat

SEQ ID NO: 4457676 - DNA, 25 bp, Homo sapien
tgcggcttagaaacgataagaatct

SEQ ID NO: 4457677 - DNA, 25 bp, Homo sapien
tttagctgcttaacacattttatgg

SEQ ID NO: 4457678 - DNA, 25 bp, Homo sapien
ctgcagtgaactgtttgccaggaat

SEQ ID NO: 4457679 - DNA, 25 bp, Homo sapien
gaattataacttctgccaagaaaaa

SEQ ID NO: 4457680 - DNA, 25 bp, Homo sapien
gtcatcataattagagctgcagtga

SEQ ID NO: 4457681 - DNA, 25 bp, Homo sapien
aagagcccacgtgtcttgcaaaagg

SEQ ID NO: 4457682 - DNA, 25 bp, Homo sapien
gagaaaggatgtctgctagagaagc

SEQ ID NO: 4457683 - DNA, 25 bp, Homo sapien
ggttctggattctcagaagtgccac

SEQ ID NO: 4457684 - DNA, 25 bp, Homo sapien
cagatctggtacctgtccttgagaa

SEQ ID NO: 4457685 - DNA, 25 bp, Homo sapien
gagcacagaggtacgccaaagggct

SEQ ID NO: 4457686 - DNA, 25 bp, Homo sapien
tgatctagcaagtcccgtgtgttct

SEQ ID NO: 4457687 - DNA, 25 bp, Homo sapien
atgttgtacaggtgatctagcaagt

SEQ ID NO: 4457688 - DNA, 25 bp, Homo sapien
ctgatgagacagaggttttgagagc

SEQ ID NO: 4457689 - DNA, 25 bp, Homo sapien
ctaggtcatgatatgcgttgctcta

SEQ ID NO: 4457690 - DNA, 25 bp, Homo sapien
taggtcatgatatgcgttgctctac

SEQ ID NO: 4457691 - DNA, 25 bp, Homo sapien
aggtcatgatatgcgttgctctacc

SEQ ID NO: 4457692 - DNA, 25 bp, Homo sapien
tctaaaatgatggacttgacaggtc

SEQ ID NO: 4457693 - DNA, 25 bp, Homo sapien
atgatggacttgacaggtctcagcc

SEQ ID NO: 4457694 - DNA, 25 bp, Homo sapien
ttcagcagtttctaaaatgatggac

SEQ ID NO: 4457695 - DNA, 25 bp, Homo sapien
cagcagtttctaaaatgatggactt

SEQ ID NO: 4457696 - DNA, 25 bp, Homo sapien
tcagggaattcaggcagttctcttt

SEQ ID NO: 4457697 - DNA, 25 bp, Homo sapien
tgtctcagggaattcaggcagttct

SEQ ID NO: 4457698 - DNA, 25 bp, Homo sapien
tgtgtctcagggaattcaggcagtt

SEQ ID NO: 4457699 - DNA, 25 bp, Homo sapien
tctcagggaattcaggcagttctct

SEQ ID NO: 4457700 - DNA, 25 bp, Homo sapien
atcgggcagagttaccaccccgctg

SEQ ID NO: 4457701 - DNA, 25 bp, Homo sapien
ttgctgttggacatgtcccagctgc

SEQ ID NO: 4457702 - DNA, 25 bp, Homo sapien
ctgcagcttgggaacatcgggcaga

SEQ ID NO: 4457703 - DNA, 25 bp, Homo sapien
aacaaggcgagggagcgcaccagca

SEQ ID NO: 4457704 - DNA, 25 bp, Homo sapien
cattcttcaggatctgtctccagaa

SEQ ID NO: 4457705 - DNA, 25 bp, Homo sapien
tttcttgaatataaggtcgggccca

SEQ ID NO: 4457706 - DNA, 25 bp, Homo sapien
ttcaggatctgtctccagaactgtc

SEQ ID NO: 4457707 - DNA, 25 bp, Homo sapien
tcttgaatataaggtcgggcccata

SEQ ID NO: 4457708 - DNA, 25 bp, Homo sapien
cttctgtgaccatgtcaaaatcagc

SEQ ID NO: 4457709 - DNA, 25 bp, Homo sapien
tcctcacatcttctgtgaccatgtc

SEQ ID NO: 4457710 - DNA, 25 bp, Homo sapien
tcagttcttcatcatctggtcttgt

SEQ ID NO: 4457711 - DNA, 25 bp, Homo sapien
agcttgtttgtaaagcccataaagt

SEQ ID NO: 4457712 - DNA, 25 bp, Homo sapien
gcatttctgaacactcaatattaat

SEQ ID NO: 4457713 - DNA, 25 bp, Homo sapien
gaaataaaggcacgcatcatatctt

SEQ ID NO: 4457714 - DNA, 25 bp, Homo sapien
cagctcttcggctttagaaataaag

SEQ ID NO: 4457715 - DNA, 25 bp, Homo sapien
ctgaacactcaatattaatgtttcc

SEQ ID NO: 4457716 - DNA, 25 bp, Homo sapien
gacaaatgtaagcagaagtttgatc

SEQ ID NO: 4457717 - DNA, 25 bp, Homo sapien
caaatgtaagcagaagtttgatcat

SEQ ID NO: 4457718 - DNA, 25 bp, Homo sapien
acaaatgtaagcagaagtttgatca

SEQ ID NO: 4457719 - DNA, 25 bp, Homo sapien
tggaaatgcagtgcgctgatactct

SEQ ID NO: 4457720 - DNA, 25 bp, Homo sapien
cccagagtggagcatggaaatgcag

SEQ ID NO: 4457721 - DNA, 25 bp, Homo sapien
gcagtgcgctgatactcttttctca

SEQ ID NO: 4457722 - DNA, 25 bp, Homo sapien
gcgctgatactcttttctcaaggtc

SEQ ID NO: 4457723 - DNA, 25 bp, Homo sapien
cactggctcggcaatgtgggagtcc

SEQ ID NO: 4457724 - DNA, 25 bp, Homo sapien
tctttgaatcacatcctggaggagc

SEQ ID NO: 4457725 - DNA, 25 bp, Homo sapien
tacttgtcccctggagattgagtcc

SEQ ID NO: 4457726 - DNA, 25 bp, Homo sapien
tgataatggcttggctttaacctga

SEQ ID NO: 4457727 - DNA, 25 bp, Homo sapien
caaaccattgctagttacaggtaca

SEQ ID NO: 4457728 - DNA, 25 bp, Homo sapien
cacttgagtctaaactgtggctgga

SEQ ID NO: 4457729 - DNA, 25 bp, Homo sapien
tctagaagccaattgactggagcga

SEQ ID NO: 4457730 - DNA, 25 bp, Homo sapien
tctgtggaactgatagggcaaggct

SEQ ID NO: 4457731 - DNA, 25 bp, Homo sapien
aaaattgtggtcagagtacttcata

SEQ ID NO: 4457732 - DNA, 25 bp, Homo sapien
attgtggtcagagtacttcataaat

SEQ ID NO: 4457733 - DNA, 25 bp, Homo sapien
aaattgtggtcagagtacttcataa

SEQ ID NO: 4457734 - DNA, 25 bp, Homo sapien
gtggtcagagtacttcataaatcct

SEQ ID NO: 4457735 - DNA, 25 bp, Homo sapien
agaatccacgcctcccagcaacagc

SEQ ID NO: 4457736 - DNA, 25 bp, Homo sapien
tttccagaatccacgcctcccagca

SEQ ID NO: 4457737 - DNA, 25 bp, Homo sapien
ctccagcaccgcgacgctgcccttc

SEQ ID NO: 4457738 - DNA, 25 bp, Homo sapien
cctccagcaccgcgacgctgccctt

SEQ ID NO: 4457739 - DNA, 25 bp, Homo sapien
cccgccgcgcgtccgggccaatcgg

SEQ ID NO: 4457740 - DNA, 25 bp, Homo sapien
gctccgcgggcggtgctccagggac

SEQ ID NO: 4457741 - DNA, 25 bp, Homo sapien
ggcggtgctccagggacgcgcacac

SEQ ID NO: 4457742 - DNA, 25 bp, Homo sapien
cgcgtccgggccaatcggctccgcg

SEQ ID NO: 4457743 - DNA, 25 bp, Homo sapien
cagagccgcgtagaggtgcgcggca

SEQ ID NO: 4457744 - DNA, 25 bp, Homo sapien
ccgcgtagaggtgcgcggcactgcc

SEQ ID NO: 4457745 - DNA, 25 bp, Homo sapien
ggcgagcagagccgcgtagaggtgc

SEQ ID NO: 4457746 - DNA, 25 bp, Homo sapien
gagcagagccgcgtagaggtgcgcg

SEQ ID NO: 4457747 - DNA, 25 bp, Homo sapien
gcttaaggctctcattctggctgca

SEQ ID NO: 4457748 - DNA, 25 bp, Homo sapien
gaaaggtcaccagggtgcaatctct

SEQ ID NO: 4457749 - DNA, 25 bp, Homo sapien
taagggaagtttgctactgccaagg

SEQ ID NO: 4457750 - DNA, 25 bp, Homo sapien
caagaggtccaagtttaagtcacaa

SEQ ID NO: 4457751 - DNA, 25 bp, Homo sapien
cctctaagaacagaagcgttagtct

SEQ ID NO: 4457752 - DNA, 25 bp, Homo sapien
tcctctggaattgggaacgaaagct

SEQ ID NO: 4457753 - DNA, 25 bp, Homo sapien
tatgcttggtgggattaaaactgcc

SEQ ID NO: 4457754 - DNA, 25 bp, Homo sapien
ggagggatatcaacttcctctggaa

SEQ ID NO: 4457755 - DNA, 25 bp, Homo sapien
gttggtcttgctggttctcggcccc

SEQ ID NO: 4457756 - DNA, 25 bp, Homo sapien
agcttcccggaacccgaggccgcag

SEQ ID NO: 4457757 - DNA, 25 bp, Homo sapien
agcggagcgacggagacacagctgt

SEQ ID NO: 4457758 - DNA, 25 bp, Homo sapien
gctcgccgacgaagcctcgtccggg

SEQ ID NO: 4457759 - DNA, 25 bp, Homo sapien
cactttggccgggagaacgggcttg

SEQ ID NO: 4457760 - DNA, 25 bp, Homo sapien
catttttttcgctgaggcggcctca

SEQ ID NO: 4457761 - DNA, 25 bp, Homo sapien
acttgtgggtctcttcaggcggaca

SEQ ID NO: 4457762 - DNA, 25 bp, Homo sapien
cagcggctcggttcactttgccccg

SEQ ID NO: 4457763 - DNA, 25 bp, Homo sapien
ctcgccgcggcccgagatcgacgcg

SEQ ID NO: 4457764 - DNA, 25 bp, Homo sapien
tcgccgcggcccgagatcgacgcgg

SEQ ID NO: 4457765 - DNA, 25 bp, Homo sapien
cctcgccgcggcccgagatcgacgc

SEQ ID NO: 4457766 - DNA, 25 bp, Homo sapien
agctccttgtcggtccctatagcgg

SEQ ID NO: 4457767 - DNA, 25 bp, Homo sapien
gctcagctccttgtcggtccctata

SEQ ID NO: 4457768 - DNA, 25 bp, Homo sapien
tatagcggccatgcgttgttgctgg

SEQ ID NO: 4457769 - DNA, 25 bp, Homo sapien
tgaagtccagtaggtcgctcagctc

SEQ ID NO: 4457770 - DNA, 25 bp, Homo sapien
accccaagatgccatggaaagctct

SEQ ID NO: 4457771 - DNA, 25 bp, Homo sapien
agaaccccaagatgccatggaaagc

SEQ ID NO: 4457772 - DNA, 25 bp, Homo sapien
cccaagatgccatggaaagctctca

SEQ ID NO: 4457773 - DNA, 25 bp, Homo sapien
aagatgccatggaaagctctcatac

SEQ ID NO: 4457774 - DNA, 25 bp, Homo sapien
cataaactacatctgatactggaga

SEQ ID NO: 4457775 - DNA, 25 bp, Homo sapien
ggactacttttcttgtcgctgacat

SEQ ID NO: 4457776 - DNA, 25 bp, Homo sapien
tcagaaggctcgaaattctagctct

SEQ ID NO: 4457777 - DNA, 25 bp, Homo sapien
caggtaccataaactacatctgata

SEQ ID NO: 4457778 - DNA, 25 bp, Homo sapien
aacccaaatatatctgttagtcctg

SEQ ID NO: 4457779 - DNA, 25 bp, Homo sapien
aatatatctgttagtcctgaaattc

SEQ ID NO: 4457780 - DNA, 25 bp, Homo sapien
ataacccaaatatatctgttagtcc

SEQ ID NO: 4457781 - DNA, 25 bp, Homo sapien
ccaaatatatctgttagtcctgaaa

SEQ ID NO: 4457782 - DNA, 25 bp, Homo sapien
gatccactgaattgactgcttccca

SEQ ID NO: 4457783 - DNA, 25 bp, Homo sapien
tgcttcccagtgtagttggtctagt

SEQ ID NO: 4457784 - DNA, 25 bp, Homo sapien
ctgatccactgaattgactgcttcc

SEQ ID NO: 4457785 - DNA, 25 bp, Homo sapien
tgatccactgaattgactgcttccc

SEQ ID NO: 4457786 - DNA, 25 bp, Homo sapien
aggataccttgaagacagaaacttg

SEQ ID NO: 4457787 - DNA, 25 bp, Homo sapien
aacagtaattgtaggtatgcctcac

SEQ ID NO: 4457788 - DNA, 25 bp, Homo sapien
atccattataagcaatgactacggg

SEQ ID NO: 4457789 - DNA, 25 bp, Homo sapien
taaacaagcccctaaaatgttgtga

SEQ ID NO: 4457790 - DNA, 25 bp, Homo sapien
ccttgagcagagtaagtaagaacac

SEQ ID NO: 4457791 - DNA, 25 bp, Homo sapien
tagagctgactgtggttctacagaa

SEQ ID NO: 4457792 - DNA, 25 bp, Homo sapien
gctcctctagccaatgaatcccaga

SEQ ID NO: 4457793 - DNA, 25 bp, Homo sapien
ccaaaagtgctatataccctgtcaa

SEQ ID NO: 4457794 - DNA, 25 bp, Homo sapien
ttttatgctgctacaacagagtacg

SEQ ID NO: 4457795 - DNA, 25 bp, Homo sapien
gatagagcagccgaaatgttttcaa

SEQ ID NO: 4457796 - DNA, 25 bp, Homo sapien
tacacagagaaaccttgccttagtc

SEQ ID NO: 4457797 - DNA, 25 bp, Homo sapien
gtgtaattgaagtcctagaaggaaa

SEQ ID NO: 4457798 - DNA, 25 bp, Homo sapien
gacatcagagcaaccttatgcaggc

SEQ ID NO: 4457799 - DNA, 25 bp, Homo sapien
aacaaattagctcttccagaagggc

SEQ ID NO: 4457800 - DNA, 25 bp, Homo sapien
taaaatgatacaaccgctttggcag

SEQ ID NO: 4457801 - DNA, 25 bp, Homo sapien
ttaagaatggtcataatggccgggc

SEQ ID NO: 4457802 - DNA, 25 bp, Homo sapien
gacatgaaaaagctgaaaggaattc

SEQ ID NO: 4457803 - DNA, 25 bp, Homo sapien
aaaaaacgcagaacccaattatatg

SEQ ID NO: 4457804 - DNA, 25 bp, Homo sapien
ggaattcattaccagcagatcacta

SEQ ID NO: 4457805 - DNA, 25 bp, Homo sapien
ggaaatgacataatatcacctgaag

SEQ ID NO: 4457806 - DNA, 25 bp, Homo sapien
gctataatgcaataccaaagactgg

SEQ ID NO: 4457807 - DNA, 25 bp, Homo sapien
tagtccattctcgaagacagagccc

SEQ ID NO: 4457808 - DNA, 25 bp, Homo sapien
tcataacgacaagaaattggctcac

SEQ ID NO: 4457809 - DNA, 25 bp, Homo sapien
cgagggccttcttattgcattgtaa

SEQ ID NO: 4457810 - DNA, 25 bp, Homo sapien
tatcaaagaattgggataaagtaca

SEQ ID NO: 4457811 - DNA, 25 bp, Homo sapien
gaattgggataaagtacaatacagt

SEQ ID NO: 4457812 - DNA, 25 bp, Homo sapien
aaagtacaatacagtaggccgggca

SEQ ID NO: 4457813 - DNA, 25 bp, Homo sapien
tgggataaagtacaatacagtaggc

SEQ ID NO: 4457814 - DNA, 25 bp, Homo sapien
agtgttttctcaacccactaattgg

SEQ ID NO: 4457815 - DNA, 25 bp, Homo sapien
taatgaccagcagtttgaaacatga

SEQ ID NO: 4457816 - DNA, 25 bp, Homo sapien
catgtgatacactctcatagcttcc

SEQ ID NO: 4457817 - DNA, 25 bp, Homo sapien
tattttatatcaccacctagtgtac

SEQ ID NO: 4457818 - DNA, 25 bp, Homo sapien
agaccttaacacattaaatctgctt

SEQ ID NO: 4457819 - DNA, 25 bp, Homo sapien
aagaccttaacacattaaatctgct

SEQ ID NO: 4457820 - DNA, 25 bp, Homo sapien
ggttgcctatatgtctggatatgcc

SEQ ID NO: 4457821 - DNA, 25 bp, Homo sapien
cagccaccattaattaggttgccta

SEQ ID NO: 4457822 - DNA, 25 bp, Homo sapien
cactgtttcaatatgctcttaggtc

SEQ ID NO: 4457823 - DNA, 25 bp, Homo sapien
gagatgccaagtttaccatacactg

SEQ ID NO: 4457824 - DNA, 25 bp, Homo sapien
gctgggacaataggcgtggactgcc

SEQ ID NO: 4457825 - DNA, 25 bp, Homo sapien
gtggcacaaacactacagcctcaac

SEQ ID NO: 4457826 - DNA, 25 bp, Homo sapien
gacaataggcgtggactgccatgcc

SEQ ID NO: 4457827 - DNA, 25 bp, Homo sapien
cagtggcacaaacactacagcctca

SEQ ID NO: 4457828 - DNA, 25 bp, Homo sapien
gtacctcttaccagatacagcttgg

SEQ ID NO: 4457829 - DNA, 25 bp, Homo sapien
tgacagtagcacagataaggccagt

SEQ ID NO: 4457830 - DNA, 25 bp, Homo sapien
tgggagtcctacaaatatcctgtgc

SEQ ID NO: 4457831 - DNA, 25 bp, Homo sapien
gattgttgatcgactgacagatggg

SEQ ID NO: 4457832 - DNA, 25 bp, Homo sapien
tctgggtgggagagaccacttcaca

SEQ ID NO: 4457833 - DNA, 25 bp, Homo sapien
gtgtctagctgtcttctggtaatat

SEQ ID NO: 4457834 - DNA, 25 bp, Homo sapien
gattaagattcaactgtctgggtgg

SEQ ID NO: 4457835 - DNA, 25 bp, Homo sapien
tggtactgtcttacatcaggaagca

SEQ ID NO: 4457836 - DNA, 25 bp, Homo sapien
ctcaatataaccttctgcaaagatg

SEQ ID NO: 4457837 - DNA, 25 bp, Homo sapien
aatgttctaaatcagcactgtccaa

SEQ ID NO: 4457838 - DNA, 25 bp, Homo sapien
taagaaactaatgtaactgctcaat

SEQ ID NO: 4457839 - DNA, 25 bp, Homo sapien
tgccagtaccttgcaacatcttgat

SEQ ID NO: 4457840 - DNA, 25 bp, Homo sapien
gaaaactctgaggatgaagtcaagc

SEQ ID NO: 4457841 - DNA, 25 bp, Homo sapien
tgtcaaagagtggtcccgcaaccag

SEQ ID NO: 4457842 - DNA, 25 bp, Homo sapien
tgccctatctccaagccagtaagtt

SEQ ID NO: 4457843 - DNA, 25 bp, Homo sapien
ctaattccgttcagagtggagggca

SEQ ID NO: 4457844 - DNA, 25 bp, Homo sapien
tgagaatccacttacacttagtaaa

SEQ ID NO: 4457845 - DNA, 25 bp, Homo sapien
ataaaagctacaccaagtgtacctg

SEQ ID NO: 4457846 - DNA, 25 bp, Homo sapien
taagccccaagagcttatgtgtttc

SEQ ID NO: 4457847 - DNA, 25 bp, Homo sapien
tattatctctaaagcctacctgagt

SEQ ID NO: 4457848 - DNA, 25 bp, Homo sapien
cgtgcctagccccttgaacaaaatc

SEQ ID NO: 4457849 - DNA, 25 bp, Homo sapien
tatagggttctgcaatagatctctc

SEQ ID NO: 4457850 - DNA, 25 bp, Homo sapien
tatttgacggtaaaacctgacctga

SEQ ID NO: 4457851 - DNA, 25 bp, Homo sapien
tccaaggcaaatccaatttcaaggt

SEQ ID NO: 4457852 - DNA, 25 bp, Homo sapien
catatgaagattggtaggcccgagg

SEQ ID NO: 4457853 - DNA, 25 bp, Homo sapien
aatttgctaccatctacgtatctgg

SEQ ID NO: 4457854 - DNA, 25 bp, Homo sapien
ggaactacggttataagcacactta

SEQ ID NO: 4457855 - DNA, 25 bp, Homo sapien
aataagccatggtatacatatgaag

SEQ ID NO: 4457856 - DNA, 25 bp, Homo sapien
tatttatcaacagaagctcaaattt

SEQ ID NO: 4457857 - DNA, 25 bp, Homo sapien
cattttatttatcaacagaagctca

SEQ ID NO: 4457858 - DNA, 25 bp, Homo sapien
ttttatttatcaacagaagctcaaa

SEQ ID NO: 4457859 - DNA, 25 bp, Homo sapien
ttatcaacagaagctcaaatttttt

SEQ ID NO: 4457860 - DNA, 25 bp, Homo sapien
gaatcataacccaagaacacattgg

SEQ ID NO: 4457861 - DNA, 25 bp, Homo sapien
aaatttaaggattagccaagtgcag

SEQ ID NO: 4457862 - DNA, 25 bp, Homo sapien
gaacacattgggctatcaagctaca

SEQ ID NO: 4457863 - DNA, 25 bp, Homo sapien
ttctgcagtaagtatgctacaggcc

SEQ ID NO: 4457864 - DNA, 25 bp, Homo sapien
taggtccaaactttactgtcaaaca

SEQ ID NO: 4457865 - DNA, 25 bp, Homo sapien
taacataaggtcacaagttcagccc

SEQ ID NO: 4457866 - DNA, 25 bp, Homo sapien
tatttggaaggaattaaggtacaca

SEQ ID NO: 4457867 - DNA, 25 bp, Homo sapien
ttcattcaagcagtaggtatagctc

SEQ ID NO: 4457868 - DNA, 25 bp, Homo sapien
tcatccctcagttttgaccatgggc

SEQ ID NO: 4457869 - DNA, 25 bp, Homo sapien
gaagagttccatccattttgcctag

SEQ ID NO: 4457870 - DNA, 25 bp, Homo sapien
cctgttccttgagccagaagtagca

SEQ ID NO: 4457871 - DNA, 25 bp, Homo sapien
tctgctgccattaccacacggttgc

SEQ ID NO: 4457872 - DNA, 25 bp, Homo sapien
tgctattgacccatccagtggtctt

SEQ ID NO: 4457873 - DNA, 25 bp, Homo sapien
tgttgactacctcttccattgtgag

SEQ ID NO: 4457874 - DNA, 25 bp, Homo sapien
gattttggattacaacctggatgtc

SEQ ID NO: 4457875 - DNA, 25 bp, Homo sapien
cataatatcctaaggctctgttcaa

SEQ ID NO: 4457876 - DNA, 25 bp, Homo sapien
tctattcgtaagagaagaatgtgga

SEQ ID NO: 4457877 - DNA, 25 bp, Homo sapien
tcaagcattctataccattagtaat

SEQ ID NO: 4457878 - DNA, 25 bp, Homo sapien
ccagaccaccttcaagcattctata

SEQ ID NO: 4457879 - DNA, 25 bp, Homo sapien
taattattgaattccctatttctcc

SEQ ID NO: 4457880 - DNA, 25 bp, Homo sapien
gaatactcctagttatgaacaagag

SEQ ID NO: 4457881 - DNA, 25 bp, Homo sapien
ttgctcacagattttaagtatagga

SEQ ID NO: 4457882 - DNA, 25 bp, Homo sapien
tactgcacaagtgaatgaatactcc

SEQ ID NO: 4457883 - DNA, 25 bp, Homo sapien
ggagacggaggctgtaacgaactat

SEQ ID NO: 4457884 - DNA, 25 bp, Homo sapien
cgcacaagtagtttcttcaggtaaa

SEQ ID NO: 4457885 - DNA, 25 bp, Homo sapien
tgagctacaggacttttgaaacact

SEQ ID NO: 4457886 - DNA, 25 bp, Homo sapien
cactgtttcaggctcggatcttcat

SEQ ID NO: 4457887 - DNA, 25 bp, Homo sapien
gaaagcaagtatccaattgctaggg

SEQ ID NO: 4457888 - DNA, 25 bp, Homo sapien
gaaggcataccatcatcagggtgca

SEQ ID NO: 4457889 - DNA, 25 bp, Homo sapien
ggtccaatgtagtcaagatgccagc

SEQ ID NO: 4457890 - DNA, 25 bp, Homo sapien
tgcaaatggtcccacaagctgagtg

SEQ ID NO: 4457891 - DNA, 25 bp, Homo sapien
ggaacccatgcaacgtgacctagat

SEQ ID NO: 4457892 - DNA, 25 bp, Homo sapien
gataaactctatggcttgtcgcttc

SEQ ID NO: 4457893 - DNA, 25 bp, Homo sapien
tggagatacaccaagcagtctggcc

SEQ ID NO: 4457894 - DNA, 25 bp, Homo sapien
tacttggaacaaggactagctaaag

SEQ ID NO: 4457895 - DNA, 25 bp, Homo sapien
caagaatgcgaaggtatgaaaagcg

SEQ ID NO: 4457896 - DNA, 25 bp, Homo sapien
tccaatgcatttttcgttttatcaa

SEQ ID NO: 4457897 - DNA, 25 bp, Homo sapien
gaagtacctgatgtcaggtaggaca

SEQ ID NO: 4457898 - DNA, 25 bp, Homo sapien
tgtagaagaagtacctgatgtcagg

SEQ ID NO: 4457899 - DNA, 25 bp, Homo sapien
gcatttttcgttttatcaaatgtag

SEQ ID NO: 4457900 - DNA, 25 bp, Homo sapien
tgctgacatgaacaccagttccttc

SEQ ID NO: 4457901 - DNA, 25 bp, Homo sapien
agacctatcactaaagactccgcca

SEQ ID NO: 4457902 - DNA, 25 bp, Homo sapien
atttgccactaccagacctatcact

SEQ ID NO: 4457903 - DNA, 25 bp, Homo sapien
gctgacatgaacaccagttccttct

SEQ ID NO: 4457904 - DNA, 25 bp, Homo sapien
gtaaaaggtcgtggctggcactgac

SEQ ID NO: 4457905 - DNA, 25 bp, Homo sapien
agaatctggctaggttttaaactca

SEQ ID NO: 4457906 - DNA, 25 bp, Homo sapien
tcagccgtaagaccaaggtaagcag

SEQ ID NO: 4457907 - DNA, 25 bp, Homo sapien
ggcatcaccagctaaagagtagtac

SEQ ID NO: 4457908 - DNA, 25 bp, Homo sapien
tcttctgttttgaagactccagtct

SEQ ID NO: 4457909 - DNA, 25 bp, Homo sapien
ttctgttttgaagactccagtcttt

SEQ ID NO: 4457910 - DNA, 25 bp, Homo sapien
ctacctcttctgttttgaagactcc

SEQ ID NO: 4457911 - DNA, 25 bp, Homo sapien
cctcttctgttttgaagactccagt

SEQ ID NO: 4457912 - DNA, 25 bp, Homo sapien
tggaagacttggagatctcttaatc

SEQ ID NO: 4457913 - DNA, 25 bp, Homo sapien
aagctggaagacttggagatctctt

SEQ ID NO: 4457914 - DNA, 25 bp, Homo sapien
gaagacttggagatctcttaatcca

SEQ ID NO: 4457915 - DNA, 25 bp, Homo sapien
gctggaagacttggagatctcttaa

SEQ ID NO: 4457916 - DNA, 25 bp, Homo sapien
cacttgttccccaagatgttgtacc

SEQ ID NO: 4457917 - DNA, 25 bp, Homo sapien
gacttggttgaccacttgttcccca

SEQ ID NO: 4457918 - DNA, 25 bp, Homo sapien
tagatgaatcataggaaggacttgg

SEQ ID NO: 4457919 - DNA, 25 bp, Homo sapien
gatgttgtacctcctctttcatcaa

SEQ ID NO: 4457920 - DNA, 25 bp, Homo sapien
gagttcctgatgcaaagggctgatg

SEQ ID NO: 4457921 - DNA, 25 bp, Homo sapien
tgacctcagtgtgtagaaagttgac

SEQ ID NO: 4457922 - DNA, 25 bp, Homo sapien
gttagtatgttgaaagccaatgcca

SEQ ID NO: 4457923 - DNA, 25 bp, Homo sapien
gctggaaagggctctaaccttgtga

SEQ ID NO: 4457924 - DNA, 25 bp, Homo sapien
cagagcttggcgtaggttggctaac

SEQ ID NO: 4457925 - DNA, 25 bp, Homo sapien
tgccagaggctgtcattaactagtc

SEQ ID NO: 4457926 - DNA, 25 bp, Homo sapien
gatgaagagtgcagaaaccaggact

SEQ ID NO: 4457927 - DNA, 25 bp, Homo sapien
tcctgttaagaatggagagagcgct

SEQ ID NO: 4457928 - DNA, 25 bp, Homo sapien
tacaaccatagctaacttgacaaag

SEQ ID NO: 4457929 - DNA, 25 bp, Homo sapien
tcccagtcacttagttgtaccagtt

SEQ ID NO: 4457930 - DNA, 25 bp, Homo sapien
gctgacaaatgggacaactgagtaa

SEQ ID NO: 4457931 - DNA, 25 bp, Homo sapien
aattcaggagttaccattttgtggg

SEQ ID NO: 4457932 - DNA, 25 bp, Homo sapien
ttaattctctgacccttctgtcttg

SEQ ID NO: 4457933 - DNA, 25 bp, Homo sapien
taattctctgacccttctgtcttgc

SEQ ID NO: 4457934 - DNA, 25 bp, Homo sapien
aattctctgacccttctgtcttgct

SEQ ID NO: 4457935 - DNA, 25 bp, Homo sapien
tttaattctctgacccttctgtctt

SEQ ID NO: 4457936 - DNA, 25 bp, Homo sapien
gatttaaaggtgcttacatcatcac

SEQ ID NO: 4457937 - DNA, 25 bp, Homo sapien
cattcagaacattcagaaggagcag

SEQ ID NO: 4457938 - DNA, 25 bp, Homo sapien
gaaggagcagttacataacaaaaca

SEQ ID NO: 4457939 - DNA, 25 bp, Homo sapien
ggaacacagatgcaatatatagaaa

SEQ ID NO: 4457940 - DNA, 25 bp, Homo sapien
tgaggctcgggaattaactctcttg

SEQ ID NO: 4457941 - DNA, 25 bp, Homo sapien
cctatgagaaaaagctctttggaga

SEQ ID NO: 4457942 - DNA, 25 bp, Homo sapien
taagatggcagtaccgttatcctga

SEQ ID NO: 4457943 - DNA, 25 bp, Homo sapien
aaacctgtctgattcatcctatggc

SEQ ID NO: 4457944 - DNA, 25 bp, Homo sapien
gtagctcacgtctgtgaacctagca

SEQ ID NO: 4457945 - DNA, 25 bp, Homo sapien
tggcggcagcctgtaatccaaaaaa

SEQ ID NO: 4457946 - DNA, 25 bp, Homo sapien
aacatcatcaaaaattatgaaacat

SEQ ID NO: 4457947 - DNA, 25 bp, Homo sapien
tgcaattaaaaatacttataacatc

SEQ ID NO: 4457948 - DNA, 25 bp, Homo sapien
gcctcccaaaatgtgggcaatcaaa

SEQ ID NO: 4457949 - DNA, 25 bp, Homo sapien
gctcaacgcagcctcaatctgctgg

SEQ ID NO: 4457950 - DNA, 25 bp, Homo sapien
ccaaggtgagcaggggggtagggag

SEQ ID NO: 4457951 - DNA, 25 bp, Homo sapien
accacgaccagccaatatttttatt

SEQ ID NO: 4457952 - DNA, 25 bp, Homo sapien
gagcaattttgtatcctcccagttc

SEQ ID NO: 4457953 - DNA, 25 bp, Homo sapien
gctgttcccactgctaatgactggg

SEQ ID NO: 4457954 - DNA, 25 bp, Homo sapien
catgtagtgtcttttaccctgctaa

SEQ ID NO: 4457955 - DNA, 25 bp, Homo sapien
tgtgcttgcggaacagctacattgt

SEQ ID NO: 4457956 - DNA, 25 bp, Homo sapien
ttgttttggagacagggccctcgct

SEQ ID NO: 4457957 - DNA, 25 bp, Homo sapien
gccctcgctctgttgcccaggctgg

SEQ ID NO: 4457958 - DNA, 25 bp, Homo sapien
tgttttggagacagggccctcgctc

SEQ ID NO: 4457959 - DNA, 25 bp, Homo sapien
gaagaatctgggtgccattcacaac

SEQ ID NO: 4457960 - DNA, 25 bp, Homo sapien
catgctgtcagttcaatgaaagggc

SEQ ID NO: 4457961 - DNA, 25 bp, Homo sapien
cactatctttgcaggcatgctgtca

SEQ ID NO: 4457962 - DNA, 25 bp, Homo sapien
gcaggctaccatttaagaggacatt

SEQ ID NO: 4457963 - DNA, 25 bp, Homo sapien
actgtcattcaagtgatcactgtaa

SEQ ID NO: 4457964 - DNA, 25 bp, Homo sapien
agtgatcactgtaatgagggctgtc

SEQ ID NO: 4457965 - DNA, 25 bp, Homo sapien
tcatgggctcctaatcgactgtcat

SEQ ID NO: 4457966 - DNA, 25 bp, Homo sapien
tgttggggacaagccttcatgggct

SEQ ID NO: 4457967 - DNA, 25 bp, Homo sapien
gaagactacttgcagagaattacca

SEQ ID NO: 4457968 - DNA, 25 bp, Homo sapien
cctgtccctcctggacaaagggata

SEQ ID NO: 4457969 - DNA, 25 bp, Homo sapien
tttgagaagactacttgcagagaat

SEQ ID NO: 4457970 - DNA, 25 bp, Homo sapien
ttcttctagatacttacctgtccct

SEQ ID NO: 4457971 - DNA, 25 bp, Homo sapien
taacaaacggccagaaaagtcagtc

SEQ ID NO: 4457972 - DNA, 25 bp, Homo sapien
agttgaattgcctgttgctgtatag

SEQ ID NO: 4457973 - DNA, 25 bp, Homo sapien
gctataaacccacgtttgggtgtca

SEQ ID NO: 4457974 - DNA, 25 bp, Homo sapien
tacttcagctcatatcaagttgaat

SEQ ID NO: 4457975 - DNA, 25 bp, Homo sapien
gaagacagtggtgctttataatcca

SEQ ID NO: 4457976 - DNA, 25 bp, Homo sapien
caggcaaatgtgcttatggctgaac

SEQ ID NO: 4457977 - DNA, 25 bp, Homo sapien
ttgaaagctctatcacagaagacag

SEQ ID NO: 4457978 - DNA, 25 bp, Homo sapien
tatccacaggagatttctgcaattc

SEQ ID NO: 4457979 - DNA, 25 bp, Homo sapien
acagtgtggcctaatggaaacagca

SEQ ID NO: 4457980 - DNA, 25 bp, Homo sapien
gaacaactgatacgcaatggtgtcc

SEQ ID NO: 4457981 - DNA, 25 bp, Homo sapien
cggtcatccatcaagatcagtgtct

SEQ ID NO: 4457982 - DNA, 25 bp, Homo sapien
gaattcccagcattaccctatcaga

SEQ ID NO: 4457983 - DNA, 25 bp, Homo sapien
tatacttgagcaattagacccaacc

SEQ ID NO: 4457984 - DNA, 25 bp, Homo sapien
cacagaagctttaccagaggtgccc

SEQ ID NO: 4457985 - DNA, 25 bp, Homo sapien
gcaatgggaagacacttggtctgct

SEQ ID NO: 4457986 - DNA, 25 bp, Homo sapien
gatggttgcatctgtgccgaatgta

SEQ ID NO: 4457987 - DNA, 25 bp, Homo sapien
tgttaaattatctagagcaagactg

SEQ ID NO: 4457988 - DNA, 25 bp, Homo sapien
agagttactgctatttcaagtattt

SEQ ID NO: 4457989 - DNA, 25 bp, Homo sapien
ttaattcttcaacaaattggcagag

SEQ ID NO: 4457990 - DNA, 25 bp, Homo sapien
gagcaagactggcaaatgtagccta

SEQ ID NO: 4457991 - DNA, 25 bp, Homo sapien
cattctgtatagaggcagtatagct

SEQ ID NO: 4457992 - DNA, 25 bp, Homo sapien
attctgtatagaggcagtatagctc

SEQ ID NO: 4457993 - DNA, 25 bp, Homo sapien
gaagttatgaattagctcactgaca

SEQ ID NO: 4457994 - DNA, 25 bp, Homo sapien
tctttcggctagtgaaaaactgaaa

SEQ ID NO: 4457995 - DNA, 25 bp, Homo sapien
tgcagtgcactcaagggaaaggact

SEQ ID NO: 4457996 - DNA, 25 bp, Homo sapien
tcacccagtaaacttgaggacagac

SEQ ID NO: 4457997 - DNA, 25 bp, Homo sapien
atagctgacatcttagcccttttag

SEQ ID NO: 4457998 - DNA, 25 bp, Homo sapien
caatagctgacatcttagccctttt

SEQ ID NO: 4457999 - DNA, 25 bp, Homo sapien
ctttacaatagctgacatcttagcc

SEQ ID NO: 4458000 - DNA, 25 bp, Homo sapien
tacaatagctgacatcttagccctt

SEQ ID NO: 4458001 - DNA, 25 bp, Homo sapien
ggaattctacatttctgtccactga

SEQ ID NO: 4458002 - DNA, 25 bp, Homo sapien
ttggcaataatctgaaggtaaagct

SEQ ID NO: 4458003 - DNA, 25 bp, Homo sapien
ccatttaaagtccaatctatgggac

SEQ ID NO: 4458004 - DNA, 25 bp, Homo sapien
tatgggactaacaccaggcacaatg

SEQ ID NO: 4458005 - DNA, 25 bp, Homo sapien
cagaagtccattcagcgctagctag

SEQ ID NO: 4458006 - DNA, 25 bp, Homo sapien
ggacactccatgactccgtccaggg

SEQ ID NO: 4458007 - DNA, 25 bp, Homo sapien
ctccatgactccgtccagggtgaaa

SEQ ID NO: 4458008 - DNA, 25 bp, Homo sapien
gctagctagttgtcacaaactccat

SEQ ID NO: 4458009 - DNA, 25 bp, Homo sapien
tcaagtgccatactaaggagcctag

SEQ ID NO: 4458010 - DNA, 25 bp, Homo sapien
caatgatgtgcaggagatccacgat

SEQ ID NO: 4458011 - DNA, 25 bp, Homo sapien
tatttccgaagctacagatgtcaag

SEQ ID NO: 4458012 - DNA, 25 bp, Homo sapien
tacaggtgttaagcgactgagccca

SEQ ID NO: 4458013 - DNA, 25 bp, Homo sapien
ctgtcccgctactacctccacttaa

SEQ ID NO: 4458014 - DNA, 25 bp, Homo sapien
catgactaacctatcacagtacatg

SEQ ID NO: 4458015 - DNA, 25 bp, Homo sapien
cattaactgcaaattcatgactaac

SEQ ID NO: 4458016 - DNA, 25 bp, Homo sapien
gtcatggtggttcatacttgcagtc

SEQ ID NO: 4458017 - DNA, 25 bp, Homo sapien
tcatggtggttcatacttgcagtcc

SEQ ID NO: 4458018 - DNA, 25 bp, Homo sapien
tctcacaggagatcagcatttacca

SEQ ID NO: 4458019 - DNA, 25 bp, Homo sapien
ggagagacagatatgcattcaaaca

SEQ ID NO: 4458020 - DNA, 25 bp, Homo sapien
gaagctggcaacctaacaggagaga

SEQ ID NO: 4458021 - DNA, 25 bp, Homo sapien
gattcctcactcaggtggctctcac

SEQ ID NO: 4458022 - DNA, 25 bp, Homo sapien
cagtgacaaagtctggttctatcca

SEQ ID NO: 4458023 - DNA, 25 bp, Homo sapien
cagtgaactcatggaactgctctaa

SEQ ID NO: 4458024 - DNA, 25 bp, Homo sapien
tacgtcagtcatgtagcctcactgg

SEQ ID NO: 4458025 - DNA, 25 bp, Homo sapien
tcctagactagcgaaagaacctcag

SEQ ID NO: 4458026 - DNA, 25 bp, Homo sapien
gactggcatctgatatgggttgctc

SEQ ID NO: 4458027 - DNA, 25 bp, Homo sapien
aagggcaagaaggtgcgcctttcga

SEQ ID NO: 4458028 - DNA, 25 bp, Homo sapien
cagaagggcaagagataaacgctgt

SEQ ID NO: 4458029 - DNA, 25 bp, Homo sapien
gcctttcgaccttgagccacttcat

SEQ ID NO: 4458030 - DNA, 25 bp, Homo sapien
cattgttagcagtggtttcagcttc

SEQ ID NO: 4458031 - DNA, 25 bp, Homo sapien
gaagtggtagagttgccttagcagc

SEQ ID NO: 4458032 - DNA, 25 bp, Homo sapien
tctgtgttagtatcccaaataaatc

SEQ ID NO: 4458033 - DNA, 25 bp, Homo sapien
tctgacatagcaaagagctaaagtt

SEQ ID NO: 4458034 - DNA, 25 bp, Homo sapien
gagagcttaataaagctacctgttt

SEQ ID NO: 4458035 - DNA, 25 bp, Homo sapien
aataaagctacctgtttctcgtcat

SEQ ID NO: 4458036 - DNA, 25 bp, Homo sapien
gtagaagttaaacatgatcttgatt

SEQ ID NO: 4458037 - DNA, 25 bp, Homo sapien
cttgattctaacttgagagcttaat

SEQ ID NO: 4458038 - DNA, 25 bp, Homo sapien
ctggagtcttactggtccatgcctg

SEQ ID NO: 4458039 - DNA, 25 bp, Homo sapien
ggtccatgcctgatgacttcataat

SEQ ID NO: 4458040 - DNA, 25 bp, Homo sapien
ggccaccaatcaatggcaccctgag

SEQ ID NO: 4458041 - DNA, 25 bp, Homo sapien
tatcgggcacaaacacatggccacc

SEQ ID NO: 4458042 - DNA, 25 bp, Homo sapien
tccagaataacaagatgctgctcca

SEQ ID NO: 4458043 - DNA, 25 bp, Homo sapien
ctattctcaggctctatgagtgaac

SEQ ID NO: 4458044 - DNA, 25 bp, Homo sapien
gctctattctcaggctctatgagtg

SEQ ID NO: 4458045 - DNA, 25 bp, Homo sapien
gagcccctttagcctggcttttggc

SEQ ID NO: 4458046 - DNA, 25 bp, Homo sapien
taatgatgtcagggtaaatgcggta

SEQ ID NO: 4458047 - DNA, 25 bp, Homo sapien
gggatacatcaagtattttggtaaa

SEQ ID NO: 4458048 - DNA, 25 bp, Homo sapien
tgatgtcagggtaaatgcggtatcc

SEQ ID NO: 4458049 - DNA, 25 bp, Homo sapien
ttatgggatacatcaagtattttgg

SEQ ID NO: 4458050 - DNA, 25 bp, Homo sapien
cactgtcacaaagtagcctatctcc

SEQ ID NO: 4458051 - DNA, 25 bp, Homo sapien
tctctcttactggagacagaagtaa

SEQ ID NO: 4458052 - DNA, 25 bp, Homo sapien
ttttgagtaactcgtctctgggtac

SEQ ID NO: 4458053 - DNA, 25 bp, Homo sapien
catttgcttaccataagtgccctga

SEQ ID NO: 4458054 - DNA, 25 bp, Homo sapien
tttggtaaaaccattataactcaca

SEQ ID NO: 4458055 - DNA, 25 bp, Homo sapien
atgaaacttggccagtaacctttgg

SEQ ID NO: 4458056 - DNA, 25 bp, Homo sapien
ccttgcagagataatgaaacttggc

SEQ ID NO: 4458057 - DNA, 25 bp, Homo sapien
aaaaagtctagtttcccttgcagag

SEQ ID NO: 4458058 - DNA, 25 bp, Homo sapien
tgctggtttggcttgttagcccctc

SEQ ID NO: 4458059 - DNA, 25 bp, Homo sapien
tgttcttttgtcacagcattaagtc

SEQ ID NO: 4458060 - DNA, 25 bp, Homo sapien
gtctgtgagggaaactagacaattt

SEQ ID NO: 4458061 - DNA, 25 bp, Homo sapien
gttagcccctctgtatgaattgttc

SEQ ID NO: 4458062 - DNA, 25 bp, Homo sapien
gccactattggtagataagttacat

SEQ ID NO: 4458063 - DNA, 25 bp, Homo sapien
gcttttagattgagcattccattta

SEQ ID NO: 4458064 - DNA, 25 bp, Homo sapien
taatttcttagcgattgccctcagt

SEQ ID NO: 4458065 - DNA, 25 bp, Homo sapien
tcccatcttttagattactgttaca

SEQ ID NO: 4458066 - DNA, 25 bp, Homo sapien
taattatctgtgtcgaggctaccca

SEQ ID NO: 4458067 - DNA, 25 bp, Homo sapien
aaatctctggctactgtattaaggg

SEQ ID NO: 4458068 - DNA, 25 bp, Homo sapien
tcttgggcggacttctcagaatcac

SEQ ID NO: 4458069 - DNA, 25 bp, Homo sapien
tgcacatgtgcatgggcctcttggg

SEQ ID NO: 4458070 - DNA, 25 bp, Homo sapien
cagtatctctgctgtacagggaaaa

SEQ ID NO: 4458071 - DNA, 25 bp, Homo sapien
tccagtatctctgctgtacagggaa

SEQ ID NO: 4458072 - DNA, 25 bp, Homo sapien
ctctgctgtacagggaaaatgagcc

SEQ ID NO: 4458073 - DNA, 25 bp, Homo sapien
gtatctctgctgtacagggaaaatg

SEQ ID NO: 4458074 - DNA, 25 bp, Homo sapien
tgagtgttggtccagtaactacccc

SEQ ID NO: 4458075 - DNA, 25 bp, Homo sapien
cactggctatgacacaatgctaatc

SEQ ID NO: 4458076 - DNA, 25 bp, Homo sapien
cagattcggctcttgtcagctagta

SEQ ID NO: 4458077 - DNA, 25 bp, Homo sapien
gctggacttgtactactgagctgaa

SEQ ID NO: 4458078 - DNA, 25 bp, Homo sapien
tagattcagaggcacatgttcagct

SEQ ID NO: 4458079 - DNA, 25 bp, Homo sapien
gaagtaagcctagcacccaatagct

SEQ ID NO: 4458080 - DNA, 25 bp, Homo sapien
gacactagttttatggaccagcgta

SEQ ID NO: 4458081 - DNA, 25 bp, Homo sapien
tagtgtaatgtgtgcccctgaaagg

SEQ ID NO: 4458082 - DNA, 25 bp, Homo sapien
tcactgcataacaaccaatatcttg

SEQ ID NO: 4458083 - DNA, 25 bp, Homo sapien
cactgcataacaaccaatatcttga

SEQ ID NO: 4458084 - DNA, 25 bp, Homo sapien
ctgcataacaaccaatatcttgacc

SEQ ID NO: 4458085 - DNA, 25 bp, Homo sapien
tttcactgcataacaaccaatatct

SEQ ID NO: 4458086 - DNA, 25 bp, Homo sapien
gatatcacagtagagagatccggga

SEQ ID NO: 4458087 - DNA, 25 bp, Homo sapien
tgaatgttctcctatgtgttaccag

SEQ ID NO: 4458088 - DNA, 25 bp, Homo sapien
tccgggatgtagatcaatacagaca

SEQ ID NO: 4458089 - DNA, 25 bp, Homo sapien
tgttaccagtatgcctttgcgcctt

SEQ ID NO: 4458090 - DNA, 25 bp, Homo sapien
tacagtgctaaaacgtgacaatcta

SEQ ID NO: 4458091 - DNA, 25 bp, Homo sapien
gaatgagtaatcaatagcaactggc

SEQ ID NO: 4458092 - DNA, 25 bp, Homo sapien
tgtatcctgccaacgaaatcagccc

SEQ ID NO: 4458093 - DNA, 25 bp, Homo sapien
gctttgtgcaacctgaatagttcca

SEQ ID NO: 4458094 - DNA, 25 bp, Homo sapien
tagacatcagatcttaccacattgc

SEQ ID NO: 4458095 - DNA, 25 bp, Homo sapien
gaatttgtctacttcatccagatta

SEQ ID NO: 4458096 - DNA, 25 bp, Homo sapien
ttcttaagccagttttggtagtgtg

SEQ ID NO: 4458097 - DNA, 25 bp, Homo sapien
ggtagtgtgtttatatctaggaatt

SEQ ID NO: 4458098 - DNA, 25 bp, Homo sapien
tttttcacttgagtctcatgacatg

SEQ ID NO: 4458099 - DNA, 25 bp, Homo sapien
agtctcatgacatgggtttgagagt

SEQ ID NO: 4458100 - DNA, 25 bp, Homo sapien
agcttactatagcctggaacctggg

SEQ ID NO: 4458101 - DNA, 25 bp, Homo sapien
tcctcaccatctcttttttaacact

SEQ ID NO: 4458102 - DNA, 25 bp, Homo sapien
gcagagtcatggagtggtctcctcc

SEQ ID NO: 4458103 - DNA, 25 bp, Homo sapien
ttgtagcagagaatgaatagtatgc

SEQ ID NO: 4458104 - DNA, 25 bp, Homo sapien
aatagtatgctgtcccaggttttcc

SEQ ID NO: 4458105 - DNA, 25 bp, Homo sapien
gtctcctcctggaacttgtagcaga

SEQ ID NO: 4458106 - DNA, 25 bp, Homo sapien
ccaggaggcacctttctgacttttt

SEQ ID NO: 4458107 - DNA, 25 bp, Homo sapien
aaccaggaggcacctttctgacttt

SEQ ID NO: 4458108 - DNA, 25 bp, Homo sapien
gcaaaccaggaggcacctttctgac

SEQ ID NO: 4458109 - DNA, 25 bp, Homo sapien
caaaccaggaggcacctttctgact

SEQ ID NO: 4458110 - DNA, 25 bp, Homo sapien
cttttctgcatctgagaaatgcttc

SEQ ID NO: 4458111 - DNA, 25 bp, Homo sapien
tatctactgcagcacataaaagaaa

SEQ ID NO: 4458112 - DNA, 25 bp, Homo sapien
aaagtgtcgactcctgagagttcag

SEQ ID NO: 4458113 - DNA, 25 bp, Homo sapien
gttcaacgagtgatttagaaaagga

SEQ ID NO: 4458114 - DNA, 25 bp, Homo sapien
tcagtttagacaccctcaggattta

SEQ ID NO: 4458115 - DNA, 25 bp, Homo sapien
tggcttcctagtgacttccatacga

SEQ ID NO: 4458116 - DNA, 25 bp, Homo sapien
tcaagcaacgctctctcagagtagc

SEQ ID NO: 4458117 - DNA, 25 bp, Homo sapien
ggccgggccggataattgcctataa

SEQ ID NO: 4458118 - DNA, 25 bp, Homo sapien
gaagtctctaagatcttaccagcag

SEQ ID NO: 4458119 - DNA, 25 bp, Homo sapien
cagcagccaaagagttcaataaacc

SEQ ID NO: 4458120 - DNA, 25 bp, Homo sapien
tacaactggatccataggactcact

SEQ ID NO: 4458121 - DNA, 25 bp, Homo sapien
tatacagccatatcagtacaactgg

SEQ ID NO: 4458122 - DNA, 25 bp, Homo sapien
aaagcagtgacatcctaccgataga

SEQ ID NO: 4458123 - DNA, 25 bp, Homo sapien
tgtgcaagttaatctacaagtcaga

SEQ ID NO: 4458124 - DNA, 25 bp, Homo sapien
tttagcacgcaacacagagttaagg

SEQ ID NO: 4458125 - DNA, 25 bp, Homo sapien
gagttaaggagtcaatatgggagct

SEQ ID NO: 4458126 - DNA, 25 bp, Homo sapien
tctgcaatccaaagctgtaagtaac

SEQ ID NO: 4458127 - DNA, 25 bp, Homo sapien
tcaaaggactgcctaaaggtgtgtg

SEQ ID NO: 4458128 - DNA, 25 bp, Homo sapien
gtcttgggtcaaattagctgtctct

SEQ ID NO: 4458129 - DNA, 25 bp, Homo sapien
gacacaaggctttgcgctattgact

SEQ ID NO: 4458130 - DNA, 25 bp, Homo sapien
gataacccttcaaatgagacagaac

SEQ ID NO: 4458131 - DNA, 25 bp, Homo sapien
gatcatacaaagcttctaaaaggca

SEQ ID NO: 4458132 - DNA, 25 bp, Homo sapien
tcacaaactcacaacgacaaagcag

SEQ ID NO: 4458133 - DNA, 25 bp, Homo sapien
ggtgaataaattgtatccctccgac

SEQ ID NO: 4458134 - DNA, 25 bp, Homo sapien
gattagtctgagtactggtaaataa

SEQ ID NO: 4458135 - DNA, 25 bp, Homo sapien
tcataaaatagcgtctgtctcagat

SEQ ID NO: 4458136 - DNA, 25 bp, Homo sapien
aactgttccaattaagcctcaattg

SEQ ID NO: 4458137 - DNA, 25 bp, Homo sapien
gatctttactcaagtggcactccat

SEQ ID NO: 4458138 - DNA, 25 bp, Homo sapien
gacaaaacgagtcagctggagacag

SEQ ID NO: 4458139 - DNA, 25 bp, Homo sapien
gccataacgtgctttgcctaaacaa

SEQ ID NO: 4458140 - DNA, 25 bp, Homo sapien
cattaagcacagacctaaactaggc

SEQ ID NO: 4458141 - DNA, 25 bp, Homo sapien
taaacctgatttcagacaggctgcc

SEQ ID NO: 4458142 - DNA, 25 bp, Homo sapien
tatttgtagctaatgcacacagcct

SEQ ID NO: 4458143 - DNA, 25 bp, Homo sapien
tgaaaatgttactatttgtagctaa

SEQ ID NO: 4458144 - DNA, 25 bp, Homo sapien
gacatatatccacacaggcaaaggg

SEQ ID NO: 4458145 - DNA, 25 bp, Homo sapien
agcctctctccaagacatatatcca

SEQ ID NO: 4458146 - DNA, 25 bp, Homo sapien
gttttcccattgtagtaatacatca

SEQ ID NO: 4458147 - DNA, 25 bp, Homo sapien
cgttttcccattgtagtaatacatc

SEQ ID NO: 4458148 - DNA, 25 bp, Homo sapien
ttttcccattgtagtaatacatcaa

SEQ ID NO: 4458149 - DNA, 25 bp, Homo sapien
cccattgtagtaatacatcaaagaa

SEQ ID NO: 4458150 - DNA, 25 bp, Homo sapien
ttggacttcgaattgggaaggaaga

SEQ ID NO: 4458151 - DNA, 25 bp, Homo sapien
tgatattttaccccaagcatatatt

SEQ ID NO: 4458152 - DNA, 25 bp, Homo sapien
ctctttggacttcgaattgggaagg

SEQ ID NO: 4458153 - DNA, 25 bp, Homo sapien
atgttcttctacataatttgatatt

SEQ ID NO: 4458154 - DNA, 25 bp, Homo sapien
ggattcaaaatctgatcgagcaaac

SEQ ID NO: 4458155 - DNA, 25 bp, Homo sapien
cattgagctggcttaccaaacacaa

SEQ ID NO: 4458156 - DNA, 25 bp, Homo sapien
gggtaactatcaaaggcacaacaca

SEQ ID NO: 4458157 - DNA, 25 bp, Homo sapien
ggtatgacagttacaccaagtgact

SEQ ID NO: 4458158 - DNA, 25 bp, Homo sapien
tggtggcttaggagatggataacta

SEQ ID NO: 4458159 - DNA, 25 bp, Homo sapien
cacggttgaaatcatctgaatttgg

SEQ ID NO: 4458160 - DNA, 25 bp, Homo sapien
gctagcgaacatactggttggtggc

SEQ ID NO: 4458161 - DNA, 25 bp, Homo sapien
gataactaggagattcacggttgaa

SEQ ID NO: 4458162 - DNA, 25 bp, Homo sapien
tggaggtccccagaattccaccaaa

SEQ ID NO: 4458163 - DNA, 25 bp, Homo sapien
tgtgaatgaaggttgccataactac

SEQ ID NO: 4458164 - DNA, 25 bp, Homo sapien
caagcggtcatgtgaatgaaggttg

SEQ ID NO: 4458165 - DNA, 25 bp, Homo sapien
taactactggattgagacatgtggg

SEQ ID NO: 4458166 - DNA, 25 bp, Homo sapien
ggacaaagtgttgctgtaccctagt

SEQ ID NO: 4458167 - DNA, 25 bp, Homo sapien
gctaaagagcactacttattgtcat

SEQ ID NO: 4458168 - DNA, 25 bp, Homo sapien
ttagaaaggcatggtaaacgcggta

SEQ ID NO: 4458169 - DNA, 25 bp, Homo sapien
ttggcagacttagattttacacttc

SEQ ID NO: 4458170 - DNA, 25 bp, Homo sapien
gtactgccgcgatgaaagctggaca

SEQ ID NO: 4458171 - DNA, 25 bp, Homo sapien
aagctggacattggtggaagactcg

SEQ ID NO: 4458172 - DNA, 25 bp, Homo sapien
tgtctgatccattgatgggaggagt

SEQ ID NO: 4458173 - DNA, 25 bp, Homo sapien
taaggtgaactgctggtactgccgc

SEQ ID NO: 4458174 - DNA, 25 bp, Homo sapien
gcttccagcagcattccctctggtt

SEQ ID NO: 4458175 - DNA, 25 bp, Homo sapien
ttccaagtgcatcacctgtctgtga

SEQ ID NO: 4458176 - DNA, 25 bp, Homo sapien
agatgccaaagcctttccaagtgca

SEQ ID NO: 4458177 - DNA, 25 bp, Homo sapien
caagtgcatcacctgtctgtgagct

SEQ ID NO: 4458178 - DNA, 25 bp, Homo sapien
cattcagtagaatgtgtaaaatcaa

SEQ ID NO: 4458179 - DNA, 25 bp, Homo sapien
tcagtagaatgtgtaaaatcaatac

SEQ ID NO: 4458180 - DNA, 25 bp, Homo sapien
tagaatgtgtaaaatcaatactcac

SEQ ID NO: 4458181 - DNA, 25 bp, Homo sapien
tcattcagtagaatgtgtaaaatca

SEQ ID NO: 4458182 - DNA, 25 bp, Homo sapien
tgacttattttaatggaccacttac

SEQ ID NO: 4458183 - DNA, 25 bp, Homo sapien
tactgagttatctttcgtggttcca

SEQ ID NO: 4458184 - DNA, 25 bp, Homo sapien
ttctctggatcagaatactgagtta

SEQ ID NO: 4458185 - DNA, 25 bp, Homo sapien
tataaaggtacttcattctctggat

SEQ ID NO: 4458186 - DNA, 25 bp, Homo sapien
tctttctgagctcaagttacttcac

SEQ ID NO: 4458187 - DNA, 25 bp, Homo sapien
ttcccctagggcgagctgcttaatc

SEQ ID NO: 4458188 - DNA, 25 bp, Homo sapien
gggctttatccatgctagcttatga

SEQ ID NO: 4458189 - DNA, 25 bp, Homo sapien
gaagctggtctgatcagggttctaa

SEQ ID NO: 4458190 - DNA, 25 bp, Homo sapien
ttaaaagcgtcacattctaaagaac

SEQ ID NO: 4458191 - DNA, 25 bp, Homo sapien
taaaatttcaaaagagtcagtcacc

SEQ ID NO: 4458192 - DNA, 25 bp, Homo sapien
ccatctaaaaccagaggctatatta

SEQ ID NO: 4458193 - DNA, 25 bp, Homo sapien
aatgacaatagcatagtgtttctcc

SEQ ID NO: 4458194 - DNA, 25 bp, Homo sapien
acaaaggttgtaccctctgatgttt

SEQ ID NO: 4458195 - DNA, 25 bp, Homo sapien
tgcaaatgcattatctggccttaca

SEQ ID NO: 4458196 - DNA, 25 bp, Homo sapien
cacaattatgcaggcttaaacctaa

SEQ ID NO: 4458197 - DNA, 25 bp, Homo sapien
ctttcttgctatcctgagattaaga

SEQ ID NO: 4458198 - DNA, 25 bp, Homo sapien
tgggaactttgtgtaaatactttca

SEQ ID NO: 4458199 - DNA, 25 bp, Homo sapien
tagtgttgatgtactaagctgtcca

SEQ ID NO: 4458200 - DNA, 25 bp, Homo sapien
tcacactgttaggtaggcatgggct

SEQ ID NO: 4458201 - DNA, 25 bp, Homo sapien
tactaactgataaaaagcaggactc

SEQ ID NO: 4458202 - DNA, 25 bp, Homo sapien
tagaaatggactaccaatcccgatt

SEQ ID NO: 4458203 - DNA, 25 bp, Homo sapien
ttttaacctacataccctattatgc

SEQ ID NO: 4458204 - DNA, 25 bp, Homo sapien
cctacataccctattatgcaaacaa

SEQ ID NO: 4458205 - DNA, 25 bp, Homo sapien
tacaggcgtggtgttgcctagccct

SEQ ID NO: 4458206 - DNA, 25 bp, Homo sapien
tgttgcctagcccttatagtctact

SEQ ID NO: 4458207 - DNA, 25 bp, Homo sapien
tccacaacagtgcagataaatggtg

SEQ ID NO: 4458208 - DNA, 25 bp, Homo sapien
gataaagtccctagggtccatctct

SEQ ID NO: 4458209 - DNA, 25 bp, Homo sapien
caggtatgactcctaaattggtatc

SEQ ID NO: 4458210 - DNA, 25 bp, Homo sapien
tgtaggtttccccagagttctagtc

SEQ ID NO: 4458211 - DNA, 25 bp, Homo sapien
gttgatggatttgacggaaaactac

SEQ ID NO: 4458212 - DNA, 25 bp, Homo sapien
aggtgaaggtgatccaactggtgtt

SEQ ID NO: 4458213 - DNA, 25 bp, Homo sapien
gaaggtgatccaactggtgttgatg

SEQ ID NO: 4458214 - DNA, 25 bp, Homo sapien
tccaactggtgttgatggatttgac

SEQ ID NO: 4458215 - DNA, 25 bp, Homo sapien
aaagacaaaaacaactgatcaaaat

SEQ ID NO: 4458216 - DNA, 25 bp, Homo sapien
caaaaacaactgatcaaaatcttca

SEQ ID NO: 4458217 - DNA, 25 bp, Homo sapien
gacaaaaacaactgatcaaaatctt

SEQ ID NO: 4458218 - DNA, 25 bp, Homo sapien
aaaaacaactgatcaaaatcttcat

SEQ ID NO: 4458219 - DNA, 25 bp, Homo sapien
ctcagtgatcttgataatgttgtga

SEQ ID NO: 4458220 - DNA, 25 bp, Homo sapien
ttgtttggccttcagcatagtattg

SEQ ID NO: 4458221 - DNA, 25 bp, Homo sapien
cacacacctgggttaactcagtgat

SEQ ID NO: 4458222 - DNA, 25 bp, Homo sapien
catagtattggctacttataagccc

SEQ ID NO: 4458223 - DNA, 25 bp, Homo sapien
cagggagtggagtgagttttcatag

SEQ ID NO: 4458224 - DNA, 25 bp, Homo sapien
gggagtggagtgagttttcatagct

SEQ ID NO: 4458225 - DNA, 25 bp, Homo sapien
atagcttggggatgaaggtgcttgc

SEQ ID NO: 4458226 - DNA, 25 bp, Homo sapien
agcttggggatgaaggtgcttgccc

SEQ ID NO: 4458227 - DNA, 25 bp, Homo sapien
gcctgatgtcccaaagaacagatgg

SEQ ID NO: 4458228 - DNA, 25 bp, Homo sapien
taacatcagctgtcctgacaccaga

SEQ ID NO: 4458229 - DNA, 25 bp, Homo sapien
gaacagatggcaaaaggcataccca

SEQ ID NO: 4458230 - DNA, 25 bp, Homo sapien
catgtgcaatgctagcctactgttt

SEQ ID NO: 4458231 - DNA, 25 bp, Homo sapien
caacctggaattacgaataagagca

SEQ ID NO: 4458232 - DNA, 25 bp, Homo sapien
acagggaagttacaaggttagcatc

SEQ ID NO: 4458233 - DNA, 25 bp, Homo sapien
gaaaaggctgggattcaacagggaa

SEQ ID NO: 4458234 - DNA, 25 bp, Homo sapien
taaagttaacgccaagacttgcgag

SEQ ID NO: 4458235 - DNA, 25 bp, Homo sapien
ttgcaaatgctcgtgaagttgctgc

SEQ ID NO: 4458236 - DNA, 25 bp, Homo sapien
catcttgcaaatgctcgtgaagttg

SEQ ID NO: 4458237 - DNA, 25 bp, Homo sapien
aatgctcgtgaagttgctgctcaac

SEQ ID NO: 4458238 - DNA, 25 bp, Homo sapien
gaagttgctgctcaactcgattttt

SEQ ID NO: 4458239 - DNA, 25 bp, Homo sapien
caagtgaaatgcagtatcaagtagc

SEQ ID NO: 4458240 - DNA, 25 bp, Homo sapien
gtagcttcaaaagcaaccacctgaa

SEQ ID NO: 4458241 - DNA, 25 bp, Homo sapien
tgtggatacacacatgccccataca

SEQ ID NO: 4458242 - DNA, 25 bp, Homo sapien
aaacatggtggttattgctggcatc

SEQ ID NO: 4458243 - DNA, 25 bp, Homo sapien
caattggtgcattatgggatggtcc

SEQ ID NO: 4458244 - DNA, 25 bp, Homo sapien
aaggtcccacagcatggttccgcag

SEQ ID NO: 4458245 - DNA, 25 bp, Homo sapien
gctgatcgactgcttgcaacaaggc

SEQ ID NO: 4458246 - DNA, 25 bp, Homo sapien
gcaacaaggcttgatcctccatagt

SEQ ID NO: 4458247 - DNA, 25 bp, Homo sapien
caaaacaggtatctaatgttaccca

SEQ ID NO: 4458248 - DNA, 25 bp, Homo sapien
taagtttttagccttcatcacatgg

SEQ ID NO: 4458249 - DNA, 25 bp, Homo sapien
ggaaccaaccctatcttacagaata

SEQ ID NO: 4458250 - DNA, 25 bp, Homo sapien
caagcagccttgtgtgacgtttact

SEQ ID NO: 4458251 - DNA, 25 bp, Homo sapien
aataacatgcctaagactctgcggg

SEQ ID NO: 4458252 - DNA, 25 bp, Homo sapien
taggatgctgcccattaggataaag

SEQ ID NO: 4458253 - DNA, 25 bp, Homo sapien
gattaactcttggagccagttggca

SEQ ID NO: 4458254 - DNA, 25 bp, Homo sapien
cagcagtactaatggaagccctcag

SEQ ID NO: 4458255 - DNA, 25 bp, Homo sapien
caaggtctggcctgtagccaaatct

SEQ ID NO: 4458256 - DNA, 25 bp, Homo sapien
tgcttctagcaatccatcgagaatg

SEQ ID NO: 4458257 - DNA, 25 bp, Homo sapien
agtggatcctggcttgcctcaagta

SEQ ID NO: 4458258 - DNA, 25 bp, Homo sapien
taagccaaacgttataggctccaag

SEQ ID NO: 4458259 - DNA, 25 bp, Homo sapien
gaatgattgccattgagactgacag

SEQ ID NO: 4458260 - DNA, 25 bp, Homo sapien
tagtgactgtactagacaggactga

SEQ ID NO: 4458261 - DNA, 25 bp, Homo sapien
cagagtcttcccgatgagttccaac

SEQ ID NO: 4458262 - DNA, 25 bp, Homo sapien
tcaggtctgtgcttgaagtagtgac

SEQ ID NO: 4458263 - DNA, 25 bp, Homo sapien
tctgttgtaacaacagttccagact

SEQ ID NO: 4458264 - DNA, 25 bp, Homo sapien
tgcctctagatgaaaccttgatatc

SEQ ID NO: 4458265 - DNA, 25 bp, Homo sapien
ggaggttcatgaaggttttcatcct

SEQ ID NO: 4458266 - DNA, 25 bp, Homo sapien
atctttttgggaggattcatcatct

SEQ ID NO: 4458267 - DNA, 25 bp, Homo sapien
caacaaggtctattaggtttcctat

SEQ ID NO: 4458268 - DNA, 25 bp, Homo sapien
gactgccacggcttgatgaagaata

SEQ ID NO: 4458269 - DNA, 25 bp, Homo sapien
gacacattcggccaagctctttgaa

SEQ ID NO: 4458270 - DNA, 25 bp, Homo sapien
taagcgttctctggcattgttagcc

SEQ ID NO: 4458271 - DNA, 25 bp, Homo sapien
tgttctagactaaggatgactgcca

SEQ ID NO: 4458272 - DNA, 25 bp, Homo sapien
cttgagtaacgctgagagtacaaac

SEQ ID NO: 4458273 - DNA, 25 bp, Homo sapien
aatgtttaaccactgagtcttgagt

SEQ ID NO: 4458274 - DNA, 25 bp, Homo sapien
gactaagctgacctgtgaaagagct

SEQ ID NO: 4458275 - DNA, 25 bp, Homo sapien
ctgactaagctgacctgtgaaagag

SEQ ID NO: 4458276 - DNA, 25 bp, Homo sapien
gacatcttgtacttagagagagaca

SEQ ID NO: 4458277 - DNA, 25 bp, Homo sapien
gatatcctcagctattcctctaaag

SEQ ID NO: 4458278 - DNA, 25 bp, Homo sapien
tcaccattaagtcagtgggagccct

SEQ ID NO: 4458279 - DNA, 25 bp, Homo sapien
taagacacggtacactgaattgaca

SEQ ID NO: 4458280 - DNA, 25 bp, Homo sapien
tttcactaagcccaggatgggttcc

SEQ ID NO: 4458281 - DNA, 25 bp, Homo sapien
tacatatgacccatagggttggtag

SEQ ID NO: 4458282 - DNA, 25 bp, Homo sapien
ggcggctctgccgatacggcagaaa

SEQ ID NO: 4458283 - DNA, 25 bp, Homo sapien
ttctcttaaggcaggctgctttggg

SEQ ID NO: 4458284 - DNA, 25 bp, Homo sapien
cactagagaattctgttcaaagatt

SEQ ID NO: 4458285 - DNA, 25 bp, Homo sapien
tgttcaaagattctaacccagttta

SEQ ID NO: 4458286 - DNA, 25 bp, Homo sapien
gacctttacaatggccactgctcac

SEQ ID NO: 4458287 - DNA, 25 bp, Homo sapien
tctctaagtctgataatgtaacaga

SEQ ID NO: 4458288 - DNA, 25 bp, Homo sapien
tctgacggttgagtcattgtactat

SEQ ID NO: 4458289 - DNA, 25 bp, Homo sapien
tcaggaagatactcatgtaagagag

SEQ ID NO: 4458290 - DNA, 25 bp, Homo sapien
gaacatgagtggtaacaagagcgtt

SEQ ID NO: 4458291 - DNA, 25 bp, Homo sapien
tgatgactccgaacagaagaaccaa

SEQ ID NO: 4458292 - DNA, 25 bp, Homo sapien
aatagattctagagggtgttaactg

SEQ ID NO: 4458293 - DNA, 25 bp, Homo sapien
gacaaaaagctagataattggcaga

SEQ ID NO: 4458294 - DNA, 25 bp, Homo sapien
tgttaactgatgtgcttgcaagtgg

SEQ ID NO: 4458295 - DNA, 25 bp, Homo sapien
gtataaaggcttcatgacaaaaagc

SEQ ID NO: 4458296 - DNA, 25 bp, Homo sapien
ccagctcaggcgacagagtcaaact

SEQ ID NO: 4458297 - DNA, 25 bp, Homo sapien
tctccagtgtgctaatgttacagtt

SEQ ID NO: 4458298 - DNA, 25 bp, Homo sapien
gctcttgcctaaagtccctgacatg

SEQ ID NO: 4458299 - DNA, 25 bp, Homo sapien
gaggatctgtaaactagctcttgcc

SEQ ID NO: 4458300 - DNA, 25 bp, Homo sapien
tttgttgcaaacatctcatgggctg

SEQ ID NO: 4458301 - DNA, 25 bp, Homo sapien
gattgtgcagaagcgacacactgct

SEQ ID NO: 4458302 - DNA, 25 bp, Homo sapien
gtcaattcagtttaggcacaaggca

SEQ ID NO: 4458303 - DNA, 25 bp, Homo sapien
acaaggcaacttccacggtgagtgg

SEQ ID NO: 4458304 - DNA, 25 bp, Homo sapien
gctaggctatggtcacagatggtct

SEQ ID NO: 4458305 - DNA, 25 bp, Homo sapien
gctaagggccaatggttgtcactgc

SEQ ID NO: 4458306 - DNA, 25 bp, Homo sapien
gatggtctctgcttaccactgtaag

SEQ ID NO: 4458307 - DNA, 25 bp, Homo sapien
cactaataggtatgccgggaatgct

SEQ ID NO: 4458308 - DNA, 25 bp, Homo sapien
cctaaggattagagacagagagtgc

SEQ ID NO: 4458309 - DNA, 25 bp, Homo sapien
taagctacatagtgatttgggtcct

SEQ ID NO: 4458310 - DNA, 25 bp, Homo sapien
gctaggataaggaaatacgggtgac

SEQ ID NO: 4458311 - DNA, 25 bp, Homo sapien
gaacaaggccacagatagagtccga

SEQ ID NO: 4458312 - DNA, 25 bp, Homo sapien
gcttctgggcatactgcaaagtcta

SEQ ID NO: 4458313 - DNA, 25 bp, Homo sapien
caaatctgcaataaaccaacaatgg

SEQ ID NO: 4458314 - DNA, 25 bp, Homo sapien
tactacacggtatgctagaatccta

SEQ ID NO: 4458315 - DNA, 25 bp, Homo sapien
taatatagcgaaaaagacaacaagc

SEQ ID NO: 4458316 - DNA, 25 bp, Homo sapien
caattgccatgggtttcgcacgcac

SEQ ID NO: 4458317 - DNA, 25 bp, Homo sapien
aatctgccagcataccaagaggatg

SEQ ID NO: 4458318 - DNA, 25 bp, Homo sapien
taaaaggccaccgtcagtagtgagg

SEQ ID NO: 4458319 - DNA, 25 bp, Homo sapien
agcaaaatgttctgttaggcaccca

SEQ ID NO: 4458320 - DNA, 25 bp, Homo sapien
catttacctctgacaggatggctga

SEQ ID NO: 4458321 - DNA, 25 bp, Homo sapien
accatttacctctgacaggatggct

SEQ ID NO: 4458322 - DNA, 25 bp, Homo sapien
ccatttacctctgacaggatggctg

SEQ ID NO: 4458323 - DNA, 25 bp, Homo sapien
tttacctctgacaggatggctgaag

SEQ ID NO: 4458324 - DNA, 25 bp, Homo sapien
tttgtgccagaacaccctcactggg

SEQ ID NO: 4458325 - DNA, 25 bp, Homo sapien
tgaccttgtgtatcgctcgcattgg

SEQ ID NO: 4458326 - DNA, 25 bp, Homo sapien
taaaatgcagccatgggagggcact

SEQ ID NO: 4458327 - DNA, 25 bp, Homo sapien
ttaatgtcaaacctgcagcatggtg

SEQ ID NO: 4458328 - DNA, 25 bp, Homo sapien
cattcttccagacaatacgtgtaag

SEQ ID NO: 4458329 - DNA, 25 bp, Homo sapien
tccagattacataagcccacaccag

SEQ ID NO: 4458330 - DNA, 25 bp, Homo sapien
tcagtgacttcagaagaccctttgg

SEQ ID NO: 4458331 - DNA, 25 bp, Homo sapien
cattggcccaatgagatcagctatt

SEQ ID NO: 4458332 - DNA, 25 bp, Homo sapien
gacttggaaatcttgcacatggtgc

SEQ ID NO: 4458333 - DNA, 25 bp, Homo sapien
gcacacgtaagaaagcctagggctg

SEQ ID NO: 4458334 - DNA, 25 bp, Homo sapien
cagggaaacacctccaaatgatgag

SEQ ID NO: 4458335 - DNA, 25 bp, Homo sapien
gacccagcgtagtggaacactgacc

SEQ ID NO: 4458336 - DNA, 25 bp, Homo sapien
taaacccttatcagaatgtgtggct

SEQ ID NO: 4458337 - DNA, 25 bp, Homo sapien
tatcagaatgtgtggcttgcaaata

SEQ ID NO: 4458338 - DNA, 25 bp, Homo sapien
atggttaataatgtcgagcactttt

SEQ ID NO: 4458339 - DNA, 25 bp, Homo sapien
taataatgtcgagcactttttcata

SEQ ID NO: 4458340 - DNA, 25 bp, Homo sapien
ttcactgaagagaaaccgaagctca

SEQ ID NO: 4458341 - DNA, 25 bp, Homo sapien
tgattggccaaacctcacagttgcc

SEQ ID NO: 4458342 - DNA, 25 bp, Homo sapien
cacagttgccacattgaaggtccct

SEQ ID NO: 4458343 - DNA, 25 bp, Homo sapien
ccgaagctcagcatgggtaagttga

SEQ ID NO: 4458344 - DNA, 25 bp, Homo sapien
ggtacctgaggctcccatagcctct

SEQ ID NO: 4458345 - DNA, 25 bp, Homo sapien
gatgctcggtacctgaggctcccat

SEQ ID NO: 4458346 - DNA, 25 bp, Homo sapien
tcggtacctgaggctcccatagcct

SEQ ID NO: 4458347 - DNA, 25 bp, Homo sapien
tgctcggtacctgaggctcccatag

SEQ ID NO: 4458348 - DNA, 25 bp, Homo sapien
ttagttcttcttgggcccatcacag

SEQ ID NO: 4458349 - DNA, 25 bp, Homo sapien
cccctggagtgattggcttagttct

SEQ ID NO: 4458350 - DNA, 25 bp, Homo sapien
tacaacgtggatgctggaatcagct

SEQ ID NO: 4458351 - DNA, 25 bp, Homo sapien
cctgtgttcaaatgggcctgggctt

SEQ ID NO: 4458352 - DNA, 25 bp, Homo sapien
ctaccatgtacttttggctagaata

SEQ ID NO: 4458353 - DNA, 25 bp, Homo sapien
catgagcagccgagtctggcctatt

SEQ ID NO: 4458354 - DNA, 25 bp, Homo sapien
taaactttcatgtatcttcgtctag

SEQ ID NO: 4458355 - DNA, 25 bp, Homo sapien
aaataaatgaccagtatcatatgac

SEQ ID NO: 4458356 - DNA, 25 bp, Homo sapien
ccatgaatagcaagggacagctgta

SEQ ID NO: 4458357 - DNA, 25 bp, Homo sapien
ctaagcaatacagcgtagcaactac

SEQ ID NO: 4458358 - DNA, 25 bp, Homo sapien
gacagctgtactccgtgtgtgcttg

SEQ ID NO: 4458359 - DNA, 25 bp, Homo sapien
ggcagtgtctgggatcaatctgcca

SEQ ID NO: 4458360 - DNA, 25 bp, Homo sapien
tggaacagggtatagggccgactca

SEQ ID NO: 4458361 - DNA, 25 bp, Homo sapien
ccctgtgcccatccagaataattgg

SEQ ID NO: 4458362 - DNA, 25 bp, Homo sapien
ggaagcagccctgcaagctacgtgc

SEQ ID NO: 4458363 - DNA, 25 bp, Homo sapien
gctacgtgccaaggacaccaggcat

SEQ ID NO: 4458364 - DNA, 25 bp, Homo sapien
tctcgttgggtccaaatacctgctc

SEQ ID NO: 4458365 - DNA, 25 bp, Homo sapien
tcctggatccatgcatgcaccaacg

SEQ ID NO: 4458366 - DNA, 25 bp, Homo sapien
tgcaccaacgctaggacaatcagag

SEQ ID NO: 4458367 - DNA, 25 bp, Homo sapien
caatcagagggacaattcgttgtgc

SEQ ID NO: 4458368 - DNA, 25 bp, Homo sapien
tcctaaaccaatcgctgcagctgtg

SEQ ID NO: 4458369 - DNA, 25 bp, Homo sapien
gacaccgcagcaagttccctgagaa

SEQ ID NO: 4458370 - DNA, 25 bp, Homo sapien
gaggcactgcatagcttagatgtgg

SEQ ID NO: 4458371 - DNA, 25 bp, Homo sapien
ccagaaaggaacatggaggagcctg

SEQ ID NO: 4458372 - DNA, 25 bp, Homo sapien
ggtttttgctgagcacccctacagt

SEQ ID NO: 4458373 - DNA, 25 bp, Homo sapien
aatttggcgtcgaaagattctccca

SEQ ID NO: 4458374 - DNA, 25 bp, Homo sapien
gattgaggaaactttatggccccaa

SEQ ID NO: 4458375 - DNA, 25 bp, Homo sapien
tttccagggaatcaaccagccatgg

SEQ ID NO: 4458376 - DNA, 25 bp, Homo sapien
gcaggcaccacctgaaccaagagat

SEQ ID NO: 4458377 - DNA, 25 bp, Homo sapien
tccagaaggtggcacttaattcccc

SEQ ID NO: 4458378 - DNA, 25 bp, Homo sapien
gtttgacctcgcttagtgactggct

SEQ ID NO: 4458379 - DNA, 25 bp, Homo sapien
ggatgggtctctcgatcattcctga

SEQ ID NO: 4458380 - DNA, 25 bp, Homo sapien
cagcacttgttttgatagcgaggca

SEQ ID NO: 4458381 - DNA, 25 bp, Homo sapien
tagcgaggcaaggagtcacaaagtc

SEQ ID NO: 4458382 - DNA, 25 bp, Homo sapien
tgtgttaggccttactctgaccccg

SEQ ID NO: 4458383 - DNA, 25 bp, Homo sapien
gcagagcgagtattgcagcagcctt

SEQ ID NO: 4458384 - DNA, 25 bp, Homo sapien
agcccactcggtggtcttatttgta

SEQ ID NO: 4458385 - DNA, 25 bp, Homo sapien
aggagcccactcggtggtcttattt

SEQ ID NO: 4458386 - DNA, 25 bp, Homo sapien
gcctctgaagactgcgcgcggctgg

SEQ ID NO: 4458387 - DNA, 25 bp, Homo sapien
cctctgaagactgcgcgcggctggt

SEQ ID NO: 4458388 - DNA, 25 bp, Homo sapien
acacggggaaagggaagcagagaca

SEQ ID NO: 4458389 - DNA, 25 bp, Homo sapien
acggggaaagggaagcagagacaca

SEQ ID NO: 4458390 - DNA, 25 bp, Homo sapien
cacggggaaagggaagcagagacac

SEQ ID NO: 4458391 - DNA, 25 bp, Homo sapien
cggggaaagggaagcagagacacac

SEQ ID NO: 4458392 - DNA, 25 bp, Homo sapien
aagcactgcggcgaaagcccgagct

SEQ ID NO: 4458393 - DNA, 25 bp, Homo sapien
tcccagaagggccaagataccagct

SEQ ID NO: 4458394 - DNA, 25 bp, Homo sapien
gaccccggctaggagcacacacgtg

SEQ ID NO: 4458395 - DNA, 25 bp, Homo sapien
cgggctgtgcgcgtcctcccagaag

SEQ ID NO: 4458396 - DNA, 25 bp, Homo sapien
tgaaaagcccattcccgtctggggc

SEQ ID NO: 4458397 - DNA, 25 bp, Homo sapien
tctgaaaagcccattcccgtctggg

SEQ ID NO: 4458398 - DNA, 25 bp, Homo sapien
ctctgaaaagcccattcccgtctgg

SEQ ID NO: 4458399 - DNA, 25 bp, Homo sapien
ctgaaaagcccattcccgtctgggg

SEQ ID NO: 4458400 - DNA, 25 bp, Homo sapien
gggcgcgggatcacaaaggcagctg

SEQ ID NO: 4458401 - DNA, 25 bp, Homo sapien
accggggcgcgggatcacaaaggca

SEQ ID NO: 4458402 - DNA, 25 bp, Homo sapien
attaaaaataatgcatcgtcccctc

SEQ ID NO: 4458403 - DNA, 25 bp, Homo sapien
aaaaataatgcatcgtcccctcgcc

SEQ ID NO: 4458404 - DNA, 25 bp, Homo sapien
tcatctgcccctcggttcgctgtcc

SEQ ID NO: 4458405 - DNA, 25 bp, Homo sapien
cctctgcccggtcacagccgcttcc

SEQ ID NO: 4458406 - DNA, 25 bp, Homo sapien
gagaacccagagtcccagatagcac

SEQ ID NO: 4458407 - DNA, 25 bp, Homo sapien
tcggttcgctgtccccgggctgaga

SEQ ID NO: 4458408 - DNA, 25 bp, Homo sapien
tcaaagatggggtcaagcggccgta

SEQ ID NO: 4458409 - DNA, 25 bp, Homo sapien
tcaagcggccgtagcgggtgcggcg

SEQ ID NO: 4458410 - DNA, 25 bp, Homo sapien
gcagtgccggctcttttctgatgga

SEQ ID NO: 4458411 - DNA, 25 bp, Homo sapien
cttgatgaggggcacgacggtccca

SEQ ID NO: 4458412 - DNA, 25 bp, Homo sapien
tcagcctaaaggttaatgtcttcct

SEQ ID NO: 4458413 - DNA, 25 bp, Homo sapien
agggatcccgccctggtcacggtgt

SEQ ID NO: 4458414 - DNA, 25 bp, Homo sapien
tcttgggagccggtgaaccagactt

SEQ ID NO: 4458415 - DNA, 25 bp, Homo sapien
ccagctagctgagaatgggttccag

SEQ ID NO: 4458416 - DNA, 25 bp, Homo sapien
aagctctctagggagcatcccgtca

SEQ ID NO: 4458417 - DNA, 25 bp, Homo sapien
cacactgggatgttcgtgggcccca

SEQ ID NO: 4458418 - DNA, 25 bp, Homo sapien
tcaccgccatgtgcaagaaatctgg

SEQ ID NO: 4458419 - DNA, 25 bp, Homo sapien
ggtcttcacccgcattttagctgtg

SEQ ID NO: 4458420 - DNA, 25 bp, Homo sapien
gatgcaaatcccgaaaagcaggctt

SEQ ID NO: 4458421 - DNA, 25 bp, Homo sapien
agaactctgtggctatgaacttgac

SEQ ID NO: 4458422 - DNA, 25 bp, Homo sapien
gttattctgcgcaagtaactctggg

SEQ ID NO: 4458423 - DNA, 25 bp, Homo sapien
tgaacttgactagcattgtcctggc

SEQ ID NO: 4458424 - DNA, 25 bp, Homo sapien
tggtttcgcagttgctttggaatgc

SEQ ID NO: 4458425 - DNA, 25 bp, Homo sapien
ttcgcagttgctttggaatgctgcc

SEQ ID NO: 4458426 - DNA, 25 bp, Homo sapien
tgatcccccaggttactcgttccaa

SEQ ID NO: 4458427 - DNA, 25 bp, Homo sapien
ctggaaagacattcacccaaccact

SEQ ID NO: 4458428 - DNA, 25 bp, Homo sapien
atgtactctttgtcctcacgtagga

SEQ ID NO: 4458429 - DNA, 25 bp, Homo sapien
caagggccccggtgcctctggtgtt

SEQ ID NO: 4458430 - DNA, 25 bp, Homo sapien
tcacgtaggacagactgcaagggcc

SEQ ID NO: 4458431 - DNA, 25 bp, Homo sapien
ggtttgcagagtaggccctgttgta

SEQ ID NO: 4458432 - DNA, 25 bp, Homo sapien
ttctggggatgaccccgctgacttg

SEQ ID NO: 4458433 - DNA, 25 bp, Homo sapien
tcctttctggggatgaccccgctga

SEQ ID NO: 4458434 - DNA, 25 bp, Homo sapien
ctttctggggatgaccccgctgact

SEQ ID NO: 4458435 - DNA, 25 bp, Homo sapien
gtcctttctggggatgaccccgctg

SEQ ID NO: 4458436 - DNA, 25 bp, Homo sapien
gatcctacgactgccagaatgttgg

SEQ ID NO: 4458437 - DNA, 25 bp, Homo sapien
gattcacccatagaccaagcaggag

SEQ ID NO: 4458438 - DNA, 25 bp, Homo sapien
tgcggagattcacccatagaccaag

SEQ ID NO: 4458439 - DNA, 25 bp, Homo sapien
caggagaacatagcttctgctggtg

SEQ ID NO: 4458440 - DNA, 25 bp, Homo sapien
atactgtgcaaacggcttcacatgc

SEQ ID NO: 4458441 - DNA, 25 bp, Homo sapien
gcaaacggcttcacatgcgtctccg

SEQ ID NO: 4458442 - DNA, 25 bp, Homo sapien
atgcgtctccgtttccaagctccaa

SEQ ID NO: 4458443 - DNA, 25 bp, Homo sapien
ggcttcacatgcgtctccgtttcca

SEQ ID NO: 4458444 - DNA, 25 bp, Homo sapien
gctgaccgcgtgtgcttgggctgca

SEQ ID NO: 4458445 - DNA, 25 bp, Homo sapien
tgcagtttgctcctcgcggcgtgcc

SEQ ID NO: 4458446 - DNA, 25 bp, Homo sapien
ctgtgctccgcgtgctgaccgcgtg

SEQ ID NO: 4458447 - DNA, 25 bp, Homo sapien
gctgcagtttgctcctcgcggcgtg

SEQ ID NO: 4458448 - DNA, 25 bp, Homo sapien
ctggacacccagagctcggggcagc

SEQ ID NO: 4458449 - DNA, 25 bp, Homo sapien
agaccccagactccaggagctttcc

SEQ ID NO: 4458450 - DNA, 25 bp, Homo sapien
acacccagagctcggggcagcagac

SEQ ID NO: 4458451 - DNA, 25 bp, Homo sapien
tggacacccagagctcggggcagca

SEQ ID NO: 4458452 - DNA, 25 bp, Homo sapien
gctgtttcccactcccgcagaacag

SEQ ID NO: 4458453 - DNA, 25 bp, Homo sapien
tgtttcccactcccgcagaacagac

SEQ ID NO: 4458454 - DNA, 25 bp, Homo sapien
gtttcccactcccgcagaacagacc

SEQ ID NO: 4458455 - DNA, 25 bp, Homo sapien
ctgtttcccactcccgcagaacaga

SEQ ID NO: 4458456 - DNA, 25 bp, Homo sapien
tgtcagcaccagagcaacgcgtagg

SEQ ID NO: 4458457 - DNA, 25 bp, Homo sapien
agcaccagagcaacgcgtagggagc

SEQ ID NO: 4458458 - DNA, 25 bp, Homo sapien
ctacatggagagcatagccagggat

SEQ ID NO: 4458459 - DNA, 25 bp, Homo sapien
catggagagcatagccagggatgtc

SEQ ID NO: 4458460 - DNA, 25 bp, Homo sapien
gaccacgaaattggcctgatcttca

SEQ ID NO: 4458461 - DNA, 25 bp, Homo sapien
cttcagatttcagttgaggcagagg

SEQ ID NO: 4458462 - DNA, 25 bp, Homo sapien
tttaccgacgtctgagagaccacga

SEQ ID NO: 4458463 - DNA, 25 bp, Homo sapien
cgtctgagagaccacgaaattggcc

SEQ ID NO: 4458464 - DNA, 25 bp, Homo sapien
ctggtagcaggtgcgaacaaggccc

SEQ ID NO: 4458465 - DNA, 25 bp, Homo sapien
ggtagcaggtgcgaacaaggccctg

SEQ ID NO: 4458466 - DNA, 25 bp, Homo sapien
tagcaggtgcgaacaaggccctggc

SEQ ID NO: 4458467 - DNA, 25 bp, Homo sapien
gcaggtgcgaacaaggccctggcgg

SEQ ID NO: 4458468 - DNA, 25 bp, Homo sapien
gaagggctagcgaattgcaatcgca

SEQ ID NO: 4458469 - DNA, 25 bp, Homo sapien
cattgacagctgaaagactaacagg

SEQ ID NO: 4458470 - DNA, 25 bp, Homo sapien
tacgggattggaaagatcacgaccc

SEQ ID NO: 4458471 - DNA, 25 bp, Homo sapien
actaacaggacgtcttcaggccagg

SEQ ID NO: 4458472 - DNA, 25 bp, Homo sapien
cgtccctgtccaagttgcccccatc

SEQ ID NO: 4458473 - DNA, 25 bp, Homo sapien
gatgagcctctagggagagggcagg

SEQ ID NO: 4458474 - DNA, 25 bp, Homo sapien
ctgatgagcctctagggagagggca

SEQ ID NO: 4458475 - DNA, 25 bp, Homo sapien
gagctgatgagcctctagggagagg

SEQ ID NO: 4458476 - DNA, 25 bp, Homo sapien
ggagctgatgagcctctagggagag

SEQ ID NO: 4458477 - DNA, 25 bp, Homo sapien
gcagagaattgtatacggtatgatc

SEQ ID NO: 4458478 - DNA, 25 bp, Homo sapien
gttaggtgagcaaaacaaatagcag

SEQ ID NO: 4458479 - DNA, 25 bp, Homo sapien
agcagttttcaatagctggtaccca

SEQ ID NO: 4458480 - DNA, 25 bp, Homo sapien
caaatagtgacaaaaaggaatgaca

SEQ ID NO: 4458481 - DNA, 25 bp, Homo sapien
cattctgccaggaagtgccgggcca

SEQ ID NO: 4458482 - DNA, 25 bp, Homo sapien
cgggccaaacacaagcagaggatgc

SEQ ID NO: 4458483 - DNA, 25 bp, Homo sapien
ctgccaggaagtgccgggccaaaca

SEQ ID NO: 4458484 - DNA, 25 bp, Homo sapien
gaagtgccgggccaaacacaagcag

SEQ ID NO: 4458485 - DNA, 25 bp, Homo sapien
ggcagtactgccgcgtgctgggcat

SEQ ID NO: 4458486 - DNA, 25 bp, Homo sapien
cggcagtactgccgcgtgctgggca

SEQ ID NO: 4458487 - DNA, 25 bp, Homo sapien
cctgtacttgtttctgacgcttcca

SEQ ID NO: 4458488 - DNA, 25 bp, Homo sapien
tggctggccttgcccaagtccctgg

SEQ ID NO: 4458489 - DNA, 25 bp, Homo sapien
ctgtacttgtttctgacgcttccat

SEQ ID NO: 4458490 - DNA, 25 bp, Homo sapien
cctttgaggggttctgcttgatcgg

SEQ ID NO: 4458491 - DNA, 25 bp, Homo sapien
agtaagcacgggtttccgcaccagg

SEQ ID NO: 4458492 - DNA, 25 bp, Homo sapien
gttctgcttgatcggggtcccttgg

SEQ ID NO: 4458493 - DNA, 25 bp, Homo sapien
gattctgcagtaagcacgggtttcc

SEQ ID NO: 4458494 - DNA, 25 bp, Homo sapien
cagactgtgtttgccggaaagtgga

SEQ ID NO: 4458495 - DNA, 25 bp, Homo sapien
tggaaatgttatgcgcggtctggga

SEQ ID NO: 4458496 - DNA, 25 bp, Homo sapien
tgcgcggtctgggagaccaagttct

SEQ ID NO: 4458497 - DNA, 25 bp, Homo sapien
tgatcacgcacagactgtgtttgcc

SEQ ID NO: 4458498 - DNA, 25 bp, Homo sapien
tgggaatccaaaagctcagcagagc

SEQ ID NO: 4458499 - DNA, 25 bp, Homo sapien
cccaggcgatcatcccaggatggaa

SEQ ID NO: 4458500 - DNA, 25 bp, Homo sapien
actaggtgtcgcaagaagaaaactc

SEQ ID NO: 4458501 - DNA, 25 bp, Homo sapien
gagacttcatgaccaccgggttgtg

SEQ ID NO: 4458502 - DNA, 25 bp, Homo sapien
tgctcccacacttcatggctgagaa

SEQ ID NO: 4458503 - DNA, 25 bp, Homo sapien
ggaggttctgggcagcaacgtctac

SEQ ID NO: 4458504 - DNA, 25 bp, Homo sapien
tctgaccctgagcaaaactgtgtag

SEQ ID NO: 4458505 - DNA, 25 bp, Homo sapien
gtctaccatgacctccgcagtgaac

SEQ ID NO: 4458506 - DNA, 25 bp, Homo sapien
tcattattagacgaaagtttcctcg

SEQ ID NO: 4458507 - DNA, 25 bp, Homo sapien
tgccataatgtggttcagttcatta

SEQ ID NO: 4458508 - DNA, 25 bp, Homo sapien
agtttcctcgaagctgaatctgcat

SEQ ID NO: 4458509 - DNA, 25 bp, Homo sapien
cttggagatagcatgccataatgtg

SEQ ID NO: 4458510 - DNA, 25 bp, Homo sapien
cagatgacccttgaataatgtgagg

SEQ ID NO: 4458511 - DNA, 25 bp, Homo sapien
gagggttgggatgccactcctatgt

SEQ ID NO: 4458512 - DNA, 25 bp, Homo sapien
taatactaatagcatactgttgact

SEQ ID NO: 4458513 - DNA, 25 bp, Homo sapien
ttctttggcggtgagaaacctggct

SEQ ID NO: 4458514 - DNA, 25 bp, Homo sapien
ccggccggagtgcaagggccgcggc

SEQ ID NO: 4458515 - DNA, 25 bp, Homo sapien
agcccggccggagtgcaagggccgc

SEQ ID NO: 4458516 - DNA, 25 bp, Homo sapien
ggccggagtgcaagggccgcggcgc

SEQ ID NO: 4458517 - DNA, 25 bp, Homo sapien
ccagcagagcccggccggagtgcaa

SEQ ID NO: 4458518 - DNA, 25 bp, Homo sapien
agtaagcacttggtcattcagagaa

SEQ ID NO: 4458519 - DNA, 25 bp, Homo sapien
tcaggattttcatgtcataactggt

SEQ ID NO: 4458520 - DNA, 25 bp, Homo sapien
ctcttagataaatgggtttcacggg

SEQ ID NO: 4458521 - DNA, 25 bp, Homo sapien
ccgccctttagtgccgagatcagaa

SEQ ID NO: 4458522 - DNA, 25 bp, Homo sapien
tcctaaatcctattgggcgagaggg

SEQ ID NO: 4458523 - DNA, 25 bp, Homo sapien
gggagactcccacatctaatagcct

SEQ ID NO: 4458524 - DNA, 25 bp, Homo sapien
tcattcctagttccaaagcccagct

SEQ ID NO: 4458525 - DNA, 25 bp, Homo sapien
ggtaactaactcctgcacgtgtctt

SEQ ID NO: 4458526 - DNA, 25 bp, Homo sapien
tggcactccagcctgggtgacaaaa

SEQ ID NO: 4458527 - DNA, 25 bp, Homo sapien
agtgaaccatgatcgtgccatggca

SEQ ID NO: 4458528 - DNA, 25 bp, Homo sapien
ccatggcactccagcctgggtgaca

SEQ ID NO: 4458529 - DNA, 25 bp, Homo sapien
cagtgaaccatgatcgtgccatggc

SEQ ID NO: 4458530 - DNA, 25 bp, Homo sapien
gtcttgggcaaatgtcataacctta

SEQ ID NO: 4458531 - DNA, 25 bp, Homo sapien
ggtcttgggcaaatgtcataacctt

SEQ ID NO: 4458532 - DNA, 25 bp, Homo sapien
tttctgcaagactttagcgaccccg

SEQ ID NO: 4458533 - DNA, 25 bp, Homo sapien
gaagtagactctcccagtgctccaa

SEQ ID NO: 4458534 - DNA, 25 bp, Homo sapien
gaagaagccatatcccagaagactg

SEQ ID NO: 4458535 - DNA, 25 bp, Homo sapien
tgctccaacagtgccctatgcatgg

SEQ ID NO: 4458536 - DNA, 25 bp, Homo sapien
cattatatggccatccaaaatcccc

SEQ ID NO: 4458537 - DNA, 25 bp, Homo sapien
ttcctatttcattatatggccatcc

SEQ ID NO: 4458538 - DNA, 25 bp, Homo sapien
tcctgggcttccattaatcgttttc

SEQ ID NO: 4458539 - DNA, 25 bp, Homo sapien
ctcctgggcttccattaatcgtttt

SEQ ID NO: 4458540 - DNA, 25 bp, Homo sapien
tgcaggaccaggtgcgtggcaggca

SEQ ID NO: 4458541 - DNA, 25 bp, Homo sapien
gcgtggcaggcacacaataagggct

SEQ ID NO: 4458542 - DNA, 25 bp, Homo sapien
caggtgcgtggcaggcacacaataa

SEQ ID NO: 4458543 - DNA, 25 bp, Homo sapien
ggcacacaataagggctggcttcct

SEQ ID NO: 4458544 - DNA, 25 bp, Homo sapien
accttcaagatggtgttggagacac

SEQ ID NO: 4458545 - DNA, 25 bp, Homo sapien
ctactatatgcaagtcactgcacct

SEQ ID NO: 4458546 - DNA, 25 bp, Homo sapien
ccttcaagatggtgttggagacaca

SEQ ID NO: 4458547 - DNA, 25 bp, Homo sapien
caagtcactgcaccttcaagatggt

SEQ ID NO: 4458548 - DNA, 25 bp, Homo sapien
taaatgaataaaaggcatttatttg

SEQ ID NO: 4458549 - DNA, 25 bp, Homo sapien
ggcatttatttgtattaagcataag

SEQ ID NO: 4458550 - DNA, 25 bp, Homo sapien
ctgtattaaatgaataaaaggcatt

SEQ ID NO: 4458551 - DNA, 25 bp, Homo sapien
catttatttgtattaagcataagtt

SEQ ID NO: 4458552 - DNA, 25 bp, Homo sapien
tcctgctgtatccttagggtgagag

SEQ ID NO: 4458553 - DNA, 25 bp, Homo sapien
tgctgtatccttagggtgagagtag

SEQ ID NO: 4458554 - DNA, 25 bp, Homo sapien
tagggtgagagtagggcctgaccca

SEQ ID NO: 4458555 - DNA, 25 bp, Homo sapien
tatccttagggtgagagtagggcct

SEQ ID NO: 4458556 - DNA, 25 bp, Homo sapien
acaggtaggattctctccgccccat

SEQ ID NO: 4458557 - DNA, 25 bp, Homo sapien
ggtctcaccctcctgttgcttatca

SEQ ID NO: 4458558 - DNA, 25 bp, Homo sapien
aaaaggctttgccaacaggtaggat

SEQ ID NO: 4458559 - DNA, 25 bp, Homo sapien
tcaccctctacctcatctggccata

SEQ ID NO: 4458560 - DNA, 25 bp, Homo sapien
attcagagcccagcactattgatca

SEQ ID NO: 4458561 - DNA, 25 bp, Homo sapien
ttacttaaactgattgtacgggtca

SEQ ID NO: 4458562 - DNA, 25 bp, Homo sapien
ccagcactattgatcattggcaaat

SEQ ID NO: 4458563 - DNA, 25 bp, Homo sapien
caactagtacagtaagcaccagtat

SEQ ID NO: 4458564 - DNA, 25 bp, Homo sapien
gacagatggcccaacattccaagcg

SEQ ID NO: 4458565 - DNA, 25 bp, Homo sapien
ggtgtccaaacatcaggttgctgta

SEQ ID NO: 4458566 - DNA, 25 bp, Homo sapien
tgtaagttatagcaagtcagccaag

SEQ ID NO: 4458567 - DNA, 25 bp, Homo sapien
gagacctcttgtaaacgctgaaact

SEQ ID NO: 4458568 - DNA, 25 bp, Homo sapien
gttcttgaggtaagaagtccaagac

SEQ ID NO: 4458569 - DNA, 25 bp, Homo sapien
ttcttgctatgttctcacacggcct

SEQ ID NO: 4458570 - DNA, 25 bp, Homo sapien
cttgcaggtagctgtcttcttgcta

SEQ ID NO: 4458571 - DNA, 25 bp, Homo sapien
ccaaggtgccagtcaattcagttcc

SEQ ID NO: 4458572 - DNA, 25 bp, Homo sapien
tcattgcaggagttgccaccaaagc

SEQ ID NO: 4458573 - DNA, 25 bp, Homo sapien
tactaaggacaagtacagcgagctt

SEQ ID NO: 4458574 - DNA, 25 bp, Homo sapien
aagtgatgcgtgagggctgacacca

SEQ ID NO: 4458575 - DNA, 25 bp, Homo sapien
cagcgagcttgccttagactaatga

SEQ ID NO: 4458576 - DNA, 25 bp, Homo sapien
tgcagagagctcaccaagcaggatg

SEQ ID NO: 4458577 - DNA, 25 bp, Homo sapien
gatgttccagttaccagcatttgag

SEQ ID NO: 4458578 - DNA, 25 bp, Homo sapien
gactccaggaagaacagtagcaact

SEQ ID NO: 4458579 - DNA, 25 bp, Homo sapien
tcctgatgccaagaatagttgccgt

SEQ ID NO: 4458580 - DNA, 25 bp, Homo sapien
ggaggtgttcgcttgacttgcccaa

SEQ ID NO: 4458581 - DNA, 25 bp, Homo sapien
tcagaaaacgatgtgcctgctaggc

SEQ ID NO: 4458582 - DNA, 25 bp, Homo sapien
aatactgacaccgtaggagcctgcc

SEQ ID NO: 4458583 - DNA, 25 bp, Homo sapien
cagggtcatagggttgcaaaagctc

SEQ ID NO: 4458584 - DNA, 25 bp, Homo sapien
tgcagctttgcaaaggtgcggccca

SEQ ID NO: 4458585 - DNA, 25 bp, Homo sapien
aaaggtgcggcccacgctctgtttc

SEQ ID NO: 4458586 - DNA, 25 bp, Homo sapien
atgaagccccgtgcgctgctccctg

SEQ ID NO: 4458587 - DNA, 25 bp, Homo sapien
ggcacatgaagccccgtgcgctgct

SEQ ID NO: 4458588 - DNA, 25 bp, Homo sapien
tctgtaacatcagcgtagcggtggc

SEQ ID NO: 4458589 - DNA, 25 bp, Homo sapien
gcaccagaatcaggcgaagttgctg

SEQ ID NO: 4458590 - DNA, 25 bp, Homo sapien
gagggcgcacggatcactgtacttt

SEQ ID NO: 4458591 - DNA, 25 bp, Homo sapien
gaagttgctgttgcccggttctgta

SEQ ID NO: 4458592 - DNA, 25 bp, Homo sapien
gaggcttccaaacaccaaacaattc

SEQ ID NO: 4458593 - DNA, 25 bp, Homo sapien
aatatataacaaacagtgcctagca

SEQ ID NO: 4458594 - DNA, 25 bp, Homo sapien
cctccagtgagcatccttcttagag

SEQ ID NO: 4458595 - DNA, 25 bp, Homo sapien
taaggcctgttgttagaccatgagg

SEQ ID NO: 4458596 - DNA, 25 bp, Homo sapien
ggccctttaagagatccggtgtggc

SEQ ID NO: 4458597 - DNA, 25 bp, Homo sapien
agctgtctcctcattggtttgctga

SEQ ID NO: 4458598 - DNA, 25 bp, Homo sapien
attgtagagaatctgcttagctgtc

SEQ ID NO: 4458599 - DNA, 25 bp, Homo sapien
ctggccctttaagagatccggtgtg

SEQ ID NO: 4458600 - DNA, 25 bp, Homo sapien
gatggcggactccattcaaacctga

SEQ ID NO: 4458601 - DNA, 25 bp, Homo sapien
tctaaaggactaccacattgcacgg

SEQ ID NO: 4458602 - DNA, 25 bp, Homo sapien
tagtatctaagtaagggctgaaacc

SEQ ID NO: 4458603 - DNA, 25 bp, Homo sapien
cattgcacggaagaactcaaggtga

SEQ ID NO: 4458604 - DNA, 25 bp, Homo sapien
gactttccttttagtagcatcgtca

SEQ ID NO: 4458605 - DNA, 25 bp, Homo sapien
cccagctgctcgagactttaaggtc

SEQ ID NO: 4458606 - DNA, 25 bp, Homo sapien
gactttaaggtctggattttctcaa

SEQ ID NO: 4458607 - DNA, 25 bp, Homo sapien
tagtagcatcgtcattatcagtgct

SEQ ID NO: 4458608 - DNA, 25 bp, Homo sapien
catgctaaatgcactctacaaaata

SEQ ID NO: 4458609 - DNA, 25 bp, Homo sapien
atgctaaatgcactctacaaaatac

SEQ ID NO: 4458610 - DNA, 25 bp, Homo sapien
gctaaatgcactctacaaaatacaa

SEQ ID NO: 4458611 - DNA, 25 bp, Homo sapien
tgctaaatgcactctacaaaataca

SEQ ID NO: 4458612 - DNA, 25 bp, Homo sapien
gaagattgaggaacgagtgtttagc

SEQ ID NO: 4458613 - DNA, 25 bp, Homo sapien
caagaaatgagttccacacaaggcg

SEQ ID NO: 4458614 - DNA, 25 bp, Homo sapien
tcttacgagtggcttccttccaggg

SEQ ID NO: 4458615 - DNA, 25 bp, Homo sapien
gtttagccgtactctcttacgagtg

SEQ ID NO: 4458616 - DNA, 25 bp, Homo sapien
ctgcctccaggtgtcttcctctttc

SEQ ID NO: 4458617 - DNA, 25 bp, Homo sapien
tctttccttcccatgcagaactccc

SEQ ID NO: 4458618 - DNA, 25 bp, Homo sapien
tgcctccaggtgtcttcctctttcc

SEQ ID NO: 4458619 - DNA, 25 bp, Homo sapien
tcctctttccttcccatgcagaact

SEQ ID NO: 4458620 - DNA, 25 bp, Homo sapien
cagttcaggctgttcacccctagtc

SEQ ID NO: 4458621 - DNA, 25 bp, Homo sapien
caatctcaacatcaaggccaaagac

SEQ ID NO: 4458622 - DNA, 25 bp, Homo sapien
agtctgtgacccacaaggacaatct

SEQ ID NO: 4458623 - DNA, 25 bp, Homo sapien
atcaaggccaaagactgcgctcact

SEQ ID NO: 4458624 - DNA, 25 bp, Homo sapien
cttctatggtcaacttgcttttctg

SEQ ID NO: 4458625 - DNA, 25 bp, Homo sapien
tctgttccaatagatctttgacttc

SEQ ID NO: 4458626 - DNA, 25 bp, Homo sapien
ttcagccacttctatggtcaacttg

SEQ ID NO: 4458627 - DNA, 25 bp, Homo sapien
tttctgttccaatagatctttgact

SEQ ID NO: 4458628 - DNA, 25 bp, Homo sapien
tctctctctcttctttaatgttctg

SEQ ID NO: 4458629 - DNA, 25 bp, Homo sapien
tctcttctttaatgttctgttgatt

SEQ ID NO: 4458630 - DNA, 25 bp, Homo sapien
tctctcttctttaatgttctgttga

SEQ ID NO: 4458631 - DNA, 25 bp, Homo sapien
ctctctcttctttaatgttctgttg

SEQ ID NO: 4458632 - DNA, 25 bp, Homo sapien
cggagctcttctaggtttgctctca

SEQ ID NO: 4458633 - DNA, 25 bp, Homo sapien
gttgctgcaatgtggagttctcctc

SEQ ID NO: 4458634 - DNA, 25 bp, Homo sapien
tttcgttgtgttggcttcggagctc

SEQ ID NO: 4458635 - DNA, 25 bp, Homo sapien
tcctccaccttttcgttgtgttggc

SEQ ID NO: 4458636 - DNA, 25 bp, Homo sapien
tgctcccgttccatcttcacctgga

SEQ ID NO: 4458637 - DNA, 25 bp, Homo sapien
tccctgatctcagtctgatgctgct

SEQ ID NO: 4458638 - DNA, 25 bp, Homo sapien
tccgatcgctttgcactgtccagtt

SEQ ID NO: 4458639 - DNA, 25 bp, Homo sapien
cagttcatcgtgcatttctgagagc

SEQ ID NO: 4458640 - DNA, 25 bp, Homo sapien
acatatatcttcttgtctttgtaac

SEQ ID NO: 4458641 - DNA, 25 bp, Homo sapien
tcagtgataaatacatatatcttct

SEQ ID NO: 4458642 - DNA, 25 bp, Homo sapien
cttcttgtctttgtaactctgagcc

SEQ ID NO: 4458643 - DNA, 25 bp, Homo sapien
atcttcttgtctttgtaactctgag

SEQ ID NO: 4458644 - DNA, 25 bp, Homo sapien
tctggagcaagagaaacccactttg

SEQ ID NO: 4458645 - DNA, 25 bp, Homo sapien
cactttggcctagggagactaatta

SEQ ID NO: 4458646 - DNA, 25 bp, Homo sapien
gtaagccagcaacatcacgaacagg

SEQ ID NO: 4458647 - DNA, 25 bp, Homo sapien
gaaaatatgtgctattgcccactcc

SEQ ID NO: 4458648 - DNA, 25 bp, Homo sapien
taagtataaccgacaacgagatctc

SEQ ID NO: 4458649 - DNA, 25 bp, Homo sapien
tattgggagcacttatctgttcaga

SEQ ID NO: 4458650 - DNA, 25 bp, Homo sapien
taatcagaggcatggttgccaccgg

SEQ ID NO: 4458651 - DNA, 25 bp, Homo sapien
tgaagacccagatacggtaagacct

SEQ ID NO: 4458652 - DNA, 25 bp, Homo sapien
ggcacctcagattcagtaagattac

SEQ ID NO: 4458653 - DNA, 25 bp, Homo sapien
ttcaaagacctgctagatgaaccca

SEQ ID NO: 4458654 - DNA, 25 bp, Homo sapien
atctggatgtcctgtggcacctcag

SEQ ID NO: 4458655 - DNA, 25 bp, Homo sapien
gatgcccttctttcttgtagtgcca

SEQ ID NO: 4458656 - DNA, 25 bp, Homo sapien
tgtcctgccaaaggctcggcattcc

SEQ ID NO: 4458657 - DNA, 25 bp, Homo sapien
cagtgtgtcctgccaaaggctcggc

SEQ ID NO: 4458658 - DNA, 25 bp, Homo sapien
tcctgccaaaggctcggcattcctt

SEQ ID NO: 4458659 - DNA, 25 bp, Homo sapien
tgtgtcctgccaaaggctcggcatt

SEQ ID NO: 4458660 - DNA, 25 bp, Homo sapien
gatcatggctggaaacctcttcttt

SEQ ID NO: 4458661 - DNA, 25 bp, Homo sapien
ccctcagggcctgcaactcagcatc

SEQ ID NO: 4458662 - DNA, 25 bp, Homo sapien
cccttcagggcggtgagttcacgct

SEQ ID NO: 4458663 - DNA, 25 bp, Homo sapien
agcatcatattgctccttcagcttg

SEQ ID NO: 4458664 - DNA, 25 bp, Homo sapien
agccagattctcctgccccatccct

SEQ ID NO: 4458665 - DNA, 25 bp, Homo sapien
cacaagccagattctcctgccccat

SEQ ID NO: 4458666 - DNA, 25 bp, Homo sapien
cagattctcctgccccatccctcac

SEQ ID NO: 4458667 - DNA, 25 bp, Homo sapien
tcacaagccagattctcctgcccca

SEQ ID NO: 4458668 - DNA, 25 bp, Homo sapien
gaaaagaacctgaattgtccaacaa

SEQ ID NO: 4458669 - DNA, 25 bp, Homo sapien
agaacctgaattgtccaacaaaagg

SEQ ID NO: 4458670 - DNA, 25 bp, Homo sapien
ctgagaaaagaacctgaattgtcca

SEQ ID NO: 4458671 - DNA, 25 bp, Homo sapien
gagaaaagaacctgaattgtccaac

SEQ ID NO: 4458672 - DNA, 25 bp, Homo sapien
tcttcaacagccagtatgacgtctg

SEQ ID NO: 4458673 - DNA, 25 bp, Homo sapien
cagtatgacgtctgccccaaaagac

SEQ ID NO: 4458674 - DNA, 25 bp, Homo sapien
gggtttcggcaattcagccaattaa

SEQ ID NO: 4458675 - DNA, 25 bp, Homo sapien
tctatttgtaggagccaagaattca

SEQ ID NO: 4458676 - DNA, 25 bp, Homo sapien
tcagtagcctattggcatgtacctg

SEQ ID NO: 4458677 - DNA, 25 bp, Homo sapien
gaatacaccacattaagtcaagttt

SEQ ID NO: 4458678 - DNA, 25 bp, Homo sapien
ttaagggtgataaagatatgggtcc

SEQ ID NO: 4458679 - DNA, 25 bp, Homo sapien
actattctcaactgcccttaaagga

SEQ ID NO: 4458680 - DNA, 25 bp, Homo sapien
aagatatcctttcacctaccatgta

SEQ ID NO: 4458681 - DNA, 25 bp, Homo sapien
caattccatacaacaaagatatcct

SEQ ID NO: 4458682 - DNA, 25 bp, Homo sapien
cacttacatatctctgacagtagag

SEQ ID NO: 4458683 - DNA, 25 bp, Homo sapien
gtctctactgatgatctcaattcca

SEQ ID NO: 4458684 - DNA, 25 bp, Homo sapien
tgaaagatctagcaacatgggccca

SEQ ID NO: 4458685 - DNA, 25 bp, Homo sapien
gagtttgtcactccctctcaggaaa

SEQ ID NO: 4458686 - DNA, 25 bp, Homo sapien
actgaccgctccagcaaaggacatg

SEQ ID NO: 4458687 - DNA, 25 bp, Homo sapien
tctggccccagaggtactagagttt

SEQ ID NO: 4458688 - DNA, 25 bp, Homo sapien
cattgacactgactattgaacacga

SEQ ID NO: 4458689 - DNA, 25 bp, Homo sapien
gttattcctacaacccagcgcagtg

SEQ ID NO: 4458690 - DNA, 25 bp, Homo sapien
catcactgttcatcgcaggtgggaa

SEQ ID NO: 4458691 - DNA, 25 bp, Homo sapien
gcgcagtgcctgacataaataaaat

SEQ ID NO: 4458692 - DNA, 25 bp, Homo sapien
tatgctggactcaagtttagggtca

SEQ ID NO: 4458693 - DNA, 25 bp, Homo sapien
ggacttggcatatgctggactcaag

SEQ ID NO: 4458694 - DNA, 25 bp, Homo sapien
tcctttggacttggcatatgctgga

SEQ ID NO: 4458695 - DNA, 25 bp, Homo sapien
atgctggactcaagtttagggtcat

SEQ ID NO: 4458696 - DNA, 25 bp, Homo sapien
caactgccttctccaaaagtacatg

SEQ ID NO: 4458697 - DNA, 25 bp, Homo sapien
gccttctccaaaagtacatgcatgt

SEQ ID NO: 4458698 - DNA, 25 bp, Homo sapien
ctggataaaggtgccagccaatgta

SEQ ID NO: 4458699 - DNA, 25 bp, Homo sapien
gtttacagagcgtgtatttgttggc

SEQ ID NO: 4458700 - DNA, 25 bp, Homo sapien
gcctgtcagtggattggggggtaag

SEQ ID NO: 4458701 - DNA, 25 bp, Homo sapien
gggtaaggggaggaagctcattaga

SEQ ID NO: 4458702 - DNA, 25 bp, Homo sapien
gggcctgtcagtggattggggggta

SEQ ID NO: 4458703 - DNA, 25 bp, Homo sapien
tcattagaagaaatacctaatgcat

SEQ ID NO: 4458704 - DNA, 25 bp, Homo sapien
gaagctcctacctcaagaatctgga

SEQ ID NO: 4458705 - DNA, 25 bp, Homo sapien
gactcgaactagacaacaggcaaac

SEQ ID NO: 4458706 - DNA, 25 bp, Homo sapien
caggcaaacacccaagcacttagaa

SEQ ID NO: 4458707 - DNA, 25 bp, Homo sapien
tctgaattcaataatcgaagctcct

SEQ ID NO: 4458708 - DNA, 25 bp, Homo sapien
tcatgtggccctaaagtttggttaa

SEQ ID NO: 4458709 - DNA, 25 bp, Homo sapien
cagtttataactcttgcagaagcgc

SEQ ID NO: 4458710 - DNA, 25 bp, Homo sapien
cagaagcgcccagtatctgtctggc

SEQ ID NO: 4458711 - DNA, 25 bp, Homo sapien
aggaagactggacggactcatgtga

SEQ ID NO: 4458712 - DNA, 25 bp, Homo sapien
attgacagcccggaagtcatttgtg

SEQ ID NO: 4458713 - DNA, 25 bp, Homo sapien
tgacagcccggaagtcatttgtgtc

SEQ ID NO: 4458714 - DNA, 25 bp, Homo sapien
acagcccggaagtcatttgtgtcag

SEQ ID NO: 4458715 - DNA, 25 bp, Homo sapien
cagcccggaagtcatttgtgtcagc

SEQ ID NO: 4458716 - DNA, 25 bp, Homo sapien
caaacacgccagtgtctgagctcat

SEQ ID NO: 4458717 - DNA, 25 bp, Homo sapien
gcacatggagacatttagagggatg

SEQ ID NO: 4458718 - DNA, 25 bp, Homo sapien
cagttagaattatacatgaagcaca

SEQ ID NO: 4458719 - DNA, 25 bp, Homo sapien
ctagacactcgagtttccagggaac

SEQ ID NO: 4458720 - DNA, 25 bp, Homo sapien
taccgccaaacacagcaggatgtgg

SEQ ID NO: 4458721 - DNA, 25 bp, Homo sapien
cacacaacgtggatgcaactgccat

SEQ ID NO: 4458722 - DNA, 25 bp, Homo sapien
cttctcagcattgccggactcagca

SEQ ID NO: 4458723 - DNA, 25 bp, Homo sapien
tgcaccagctgggatatcagtcccc

SEQ ID NO: 4458724 - DNA, 25 bp, Homo sapien
ccgctgcaggatccacggtggcagt

SEQ ID NO: 4458725 - DNA, 25 bp, Homo sapien
tcctgtgcagctctcggatggctcc

SEQ ID NO: 4458726 - DNA, 25 bp, Homo sapien
taggggcctccaataaccctctggc

SEQ ID NO: 4458727 - DNA, 25 bp, Homo sapien
ctagaggtcacctcttgccccaacc

SEQ ID NO: 4458728 - DNA, 25 bp, Homo sapien
tctatgaaacacagccttaggcctt

SEQ ID NO: 4458729 - DNA, 25 bp, Homo sapien
tgaaacacagccttaggccttccat

SEQ ID NO: 4458730 - DNA, 25 bp, Homo sapien
ttcaggggcttctatgaaacacagc

SEQ ID NO: 4458731 - DNA, 25 bp, Homo sapien
gggcttctatgaaacacagccttag

SEQ ID NO: 4458732 - DNA, 25 bp, Homo sapien
cttgggcaagatggggttgagccat

SEQ ID NO: 4458733 - DNA, 25 bp, Homo sapien
tttcacttgcacaatagggcccggg

SEQ ID NO: 4458734 - DNA, 25 bp, Homo sapien
taggaaagcaagtcccccatattgt

SEQ ID NO: 4458735 - DNA, 25 bp, Homo sapien
tcctcactctgaagtgttaggaaag

SEQ ID NO: 4458736 - DNA, 25 bp, Homo sapien
ggtcacaataatgcgtcccttcctc

SEQ ID NO: 4458737 - DNA, 25 bp, Homo sapien
gagagtggaaaaggcccagatggcc

SEQ ID NO: 4458738 - DNA, 25 bp, Homo sapien
gagtggaaaaggcccagatggccca

SEQ ID NO: 4458739 - DNA, 25 bp, Homo sapien
agagtggaaaaggcccagatggccc

SEQ ID NO: 4458740 - DNA, 25 bp, Homo sapien
ggagagtggaaaaggcccagatggc

SEQ ID NO: 4458741 - DNA, 25 bp, Homo sapien
tctcccacgccagtttacatagtta

SEQ ID NO: 4458742 - DNA, 25 bp, Homo sapien
caaacagagcatagcgccaactctc

SEQ ID NO: 4458743 - DNA, 25 bp, Homo sapien
ccagtttacatagttaagcaattcc

SEQ ID NO: 4458744 - DNA, 25 bp, Homo sapien
aaacagagcatagcgccaactctcc

SEQ ID NO: 4458745 - DNA, 25 bp, Homo sapien
ccgtgaaagatagcggagccggagc

SEQ ID NO: 4458746 - DNA, 25 bp, Homo sapien
tctgggccgtgaaagatagcggagc

SEQ ID NO: 4458747 - DNA, 25 bp, Homo sapien
ggccgtgaaagatagcggagccgga

SEQ ID NO: 4458748 - DNA, 25 bp, Homo sapien
tgggccgtgaaagatagcggagccg

SEQ ID NO: 4458749 - DNA, 25 bp, Homo sapien
cagcctctggaaacccttcctttgt

SEQ ID NO: 4458750 - DNA, 25 bp, Homo sapien
ctccagcctctggaaacccttcctt

SEQ ID NO: 4458751 - DNA, 25 bp, Homo sapien
ccagcctctggaaacccttcctttg

SEQ ID NO: 4458752 - DNA, 25 bp, Homo sapien
ctcctccagcctctggaaacccttc

SEQ ID NO: 4458753 - DNA, 25 bp, Homo sapien
ctgaagtgttgctcctgctcgccaa

SEQ ID NO: 4458754 - DNA, 25 bp, Homo sapien
gtgttgctcctgctcgccaagacct

SEQ ID NO: 4458755 - DNA, 25 bp, Homo sapien
aagtgttgctcctgctcgccaagac

SEQ ID NO: 4458756 - DNA, 25 bp, Homo sapien
tgaagtgttgctcctgctcgccaag

SEQ ID NO: 4458757 - DNA, 25 bp, Homo sapien
aagctgagcaactctccgctccagc

SEQ ID NO: 4458758 - DNA, 25 bp, Homo sapien
aggtcctcgatctgcctttgaagct

SEQ ID NO: 4458759 - DNA, 25 bp, Homo sapien
gcttcatcgcctttcaggtcctcga

SEQ ID NO: 4458760 - DNA, 25 bp, Homo sapien
cagcgtttccttcgccttggcttca

SEQ ID NO: 4458761 - DNA, 25 bp, Homo sapien
ttcttcctttctggcgtgcacaagg

SEQ ID NO: 4458762 - DNA, 25 bp, Homo sapien
tgtgatgtggggctaaaacacgacc

SEQ ID NO: 4458763 - DNA, 25 bp, Homo sapien
gtggccgacctgctgaagttaattg

SEQ ID NO: 4458764 - DNA, 25 bp, Homo sapien
taaaacacgacccatagcggccttc

SEQ ID NO: 4458765 - DNA, 25 bp, Homo sapien
gggctaaaacacgacccatagcggc

SEQ ID NO: 4458766 - DNA, 25 bp, Homo sapien
aacaacgtgctacagaaatacatgg

SEQ ID NO: 4458767 - DNA, 25 bp, Homo sapien
gacaaacaacgtgctacagaaatac

SEQ ID NO: 4458768 - DNA, 25 bp, Homo sapien
aacgtgctacagaaatacatggcca

SEQ ID NO: 4458769 - DNA, 25 bp, Homo sapien
gggcagacaaacaacgtgctacaga

SEQ ID NO: 4458770 - DNA, 25 bp, Homo sapien
ctgtcagagatagaagggcattgtt

SEQ ID NO: 4458771 - DNA, 25 bp, Homo sapien
cagagatagaagggcattgttggtt

SEQ ID NO: 4458772 - DNA, 25 bp, Homo sapien
tgtcagagatagaagggcattgttg

SEQ ID NO: 4458773 - DNA, 25 bp, Homo sapien
tcagagatagaagggcattgttggt

SEQ ID NO: 4458774 - DNA, 25 bp, Homo sapien
gatctgttaaatccgtgatgaggaa

SEQ ID NO: 4458775 - DNA, 25 bp, Homo sapien
cacactgcaaagcaatcagatctgt

SEQ ID NO: 4458776 - DNA, 25 bp, Homo sapien
catagtcacactgcaaagcaatcag

SEQ ID NO: 4458777 - DNA, 25 bp, Homo sapien
tagccacaggaacgggtggcacagg

SEQ ID NO: 4458778 - DNA, 25 bp, Homo sapien
caggtgccaccgctcattctccatc

SEQ ID NO: 4458779 - DNA, 25 bp, Homo sapien
tctgctcctgggtagtctgactcag

SEQ ID NO: 4458780 - DNA, 25 bp, Homo sapien
gtgccaccgctcattctccatctcg

SEQ ID NO: 4458781 - DNA, 25 bp, Homo sapien
accgctcattctccatctcgttctt

SEQ ID NO: 4458782 - DNA, 25 bp, Homo sapien
catttctgcgagctccctgcggttt

SEQ ID NO: 4458783 - DNA, 25 bp, Homo sapien
ttgaggtacgggaggcctcaacaat

SEQ ID NO: 4458784 - DNA, 25 bp, Homo sapien
gctgtcagtcgggacttttctgcct

SEQ ID NO: 4458785 - DNA, 25 bp, Homo sapien
attttcatggctgtcagtcgggact

SEQ ID NO: 4458786 - DNA, 25 bp, Homo sapien
tctgcttgaccagcctgctgcggtc

SEQ ID NO: 4458787 - DNA, 25 bp, Homo sapien
tgctgcggtcatctttgaggtgact

SEQ ID NO: 4458788 - DNA, 25 bp, Homo sapien
tggcttccagctcatactccaggtc

SEQ ID NO: 4458789 - DNA, 25 bp, Homo sapien
cctgagctctctggtagtcccgtaa

SEQ ID NO: 4458790 - DNA, 25 bp, Homo sapien
tccactgcctgaaggggctttagct

SEQ ID NO: 4458791 - DNA, 25 bp, Homo sapien
tgcacagaacccagcaggagtgtta

SEQ ID NO: 4458792 - DNA, 25 bp, Homo sapien
cattactccaaaggttcttcctcca

SEQ ID NO: 4458793 - DNA, 25 bp, Homo sapien
aagggtgccggccagggccattact

SEQ ID NO: 4458794 - DNA, 25 bp, Homo sapien
tgttccctgctcctactgatcctct

SEQ ID NO: 4458795 - DNA, 25 bp, Homo sapien
tcctactgatcctctcagacagcaa

SEQ ID NO: 4458796 - DNA, 25 bp, Homo sapien
gttccatctccagttgagacacctt

SEQ ID NO: 4458797 - DNA, 25 bp, Homo sapien
agacagcaaatctgagttgtttctc

SEQ ID NO: 4458798 - DNA, 25 bp, Homo sapien
ataaggtgctatccccaagctctgg

SEQ ID NO: 4458799 - DNA, 25 bp, Homo sapien
agcagggctgcctgctcataaggtg

SEQ ID NO: 4458800 - DNA, 25 bp, Homo sapien
tgcctgctcataaggtgctatcccc

SEQ ID NO: 4458801 - DNA, 25 bp, Homo sapien
gggctgcctgctcataaggtgctat

SEQ ID NO: 4458802 - DNA, 25 bp, Homo sapien
tcactctcaggagcaaaggagcatg

SEQ ID NO: 4458803 - DNA, 25 bp, Homo sapien
gacagaacccactctccatgaggag

SEQ ID NO: 4458804 - DNA, 25 bp, Homo sapien
agataaatcatagcctgggaacacg

SEQ ID NO: 4458805 - DNA, 25 bp, Homo sapien
gaacacagctgggttgcaactttct

SEQ ID NO: 4458806 - DNA, 25 bp, Homo sapien
taacggcctcattactgataggatg

SEQ ID NO: 4458807 - DNA, 25 bp, Homo sapien
tgatccaagtgctcagttgaaagga

SEQ ID NO: 4458808 - DNA, 25 bp, Homo sapien
gaactgaaggtctgttgtaacggcc

SEQ ID NO: 4458809 - DNA, 25 bp, Homo sapien
tagcataagccacaagaagcgctgg

SEQ ID NO: 4458810 - DNA, 25 bp, Homo sapien
agttcttggcttagtggaaatattt

SEQ ID NO: 4458811 - DNA, 25 bp, Homo sapien
cttagtggaaatatttttagccttg

SEQ ID NO: 4458812 - DNA, 25 bp, Homo sapien
gggtcatcatggtctccatagccaa

SEQ ID NO: 4458813 - DNA, 25 bp, Homo sapien
cacccaaagctcgagttggtatttt

SEQ ID NO: 4458814 - DNA, 25 bp, Homo sapien
ggcatttaatcctgcagttgccgag

SEQ ID NO: 4458815 - DNA, 25 bp, Homo sapien
tgggcttgatgagtcatctctccac

SEQ ID NO: 4458816 - DNA, 25 bp, Homo sapien
gcaaagacgacggtcccatttagca

SEQ ID NO: 4458817 - DNA, 25 bp, Homo sapien
aactgcaaagacgacggtcccattt

SEQ ID NO: 4458818 - DNA, 25 bp, Homo sapien
ctgcaaagacgacggtcccatttag

SEQ ID NO: 4458819 - DNA, 25 bp, Homo sapien
aaagacgacggtcccatttagcagg

SEQ ID NO: 4458820 - DNA, 25 bp, Homo sapien
ctagtgggggacaaatgaacgagcc

SEQ ID NO: 4458821 - DNA, 25 bp, Homo sapien
caggacattgtgacaaagagaccca

SEQ ID NO: 4458822 - DNA, 25 bp, Homo sapien
cgctgttcaaacgacatgatgtgtc

SEQ ID NO: 4458823 - DNA, 25 bp, Homo sapien
caagcatgtgtctgcgagtgcacac

SEQ ID NO: 4458824 - DNA, 25 bp, Homo sapien
tgggcaagggtagtctcagaacgat

SEQ ID NO: 4458825 - DNA, 25 bp, Homo sapien
ccctgctcccaaggtggtttctgaa

SEQ ID NO: 4458826 - DNA, 25 bp, Homo sapien
attgctgttactgttaccccagcac

SEQ ID NO: 4458827 - DNA, 25 bp, Homo sapien
ctgttactgttaccccagcacaaag

SEQ ID NO: 4458828 - DNA, 25 bp, Homo sapien
aatgaatgcaggctcacggccctgc

SEQ ID NO: 4458829 - DNA, 25 bp, Homo sapien
gcagggcacgtccacccaactcagg

SEQ ID NO: 4458830 - DNA, 25 bp, Homo sapien
aggcagggcacgtccacccaactca

SEQ ID NO: 4458831 - DNA, 25 bp, Homo sapien
cagcaggcagggcacgtccacccaa

SEQ ID NO: 4458832 - DNA, 25 bp, Homo sapien
gcaggcagggcacgtccacccaact

SEQ ID NO: 4458833 - DNA, 25 bp, Homo sapien
ggcctcaagttgaatttcgccacct

SEQ ID NO: 4458834 - DNA, 25 bp, Homo sapien
attgggccaggcttgcatttgctcc

SEQ ID NO: 4458835 - DNA, 25 bp, Homo sapien
gcaccccagtgagtaaaagataagc

SEQ ID NO: 4458836 - DNA, 25 bp, Homo sapien
gaggagacatcccacattgggccag

SEQ ID NO: 4458837 - DNA, 25 bp, Homo sapien
cagggaaatcttgtcgcactccaag

SEQ ID NO: 4458838 - DNA, 25 bp, Homo sapien
ctgaagtagctcattcctcaactgc

SEQ ID NO: 4458839 - DNA, 25 bp, Homo sapien
tcttgtcgcactccaagtcttgtct

SEQ ID NO: 4458840 - DNA, 25 bp, Homo sapien
ctctctcctgaagtagctcattcct

SEQ ID NO: 4458841 - DNA, 25 bp, Homo sapien
cagaacctggtgtttggtcgctgca

SEQ ID NO: 4458842 - DNA, 25 bp, Homo sapien
gcgatgaggctgctttccacaccag

SEQ ID NO: 4458843 - DNA, 25 bp, Homo sapien
tatgtgtctgccacgctctgtgcag

SEQ ID NO: 4458844 - DNA, 25 bp, Homo sapien
tctgtgcagagcagcgaagaatatg

SEQ ID NO: 4458845 - DNA, 25 bp, Homo sapien
catctgcacaaccagcccctctttg

SEQ ID NO: 4458846 - DNA, 25 bp, Homo sapien
gataatccggctctttaagtccttg

SEQ ID NO: 4458847 - DNA, 25 bp, Homo sapien
gaaccttccaggtggataatccggc

SEQ ID NO: 4458848 - DNA, 25 bp, Homo sapien
tttgctggacctgtaggaaccttcc

SEQ ID NO: 4458849 - DNA, 25 bp, Homo sapien
gaaccaagaaccctctcactcccat

SEQ ID NO: 4458850 - DNA, 25 bp, Homo sapien
acagaaccaagaaccctctcactcc

SEQ ID NO: 4458851 - DNA, 25 bp, Homo sapien
accaagaaccctctcactcccatcc

SEQ ID NO: 4458852 - DNA, 25 bp, Homo sapien
gacagaaccaagaaccctctcactc

SEQ ID NO: 4458853 - DNA, 25 bp, Homo sapien
caatgacaggtgctcatcatccacc

SEQ ID NO: 4458854 - DNA, 25 bp, Homo sapien
gctgagctgaagattggcccgatcc

SEQ ID NO: 4458855 - DNA, 25 bp, Homo sapien
ctggtccttctgatcagtcaatgac

SEQ ID NO: 4458856 - DNA, 25 bp, Homo sapien
agccgccggttgctgagctgaagat

SEQ ID NO: 4458857 - DNA, 25 bp, Homo sapien
tcatggctttcaaacgcaagctcag

SEQ ID NO: 4458858 - DNA, 25 bp, Homo sapien
ctttttagaactttccagtctgtcg

SEQ ID NO: 4458859 - DNA, 25 bp, Homo sapien
tgcccctgcagatgctcattcatgt

SEQ ID NO: 4458860 - DNA, 25 bp, Homo sapien
cacctgccgcttcatggctttcaaa

SEQ ID NO: 4458861 - DNA, 25 bp, Homo sapien
ccaaccctgcattccacgtccccat

SEQ ID NO: 4458862 - DNA, 25 bp, Homo sapien
aggaccacggcagacagcttcagag

SEQ ID NO: 4458863 - DNA, 25 bp, Homo sapien
ccatccttaggaccacggcagacag

SEQ ID NO: 4458864 - DNA, 25 bp, Homo sapien
cacgtccccatccttaggaccacgg

SEQ ID NO: 4458865 - DNA, 25 bp, Homo sapien
tccgtgctgaggtcatcgtcgtcat

SEQ ID NO: 4458866 - DNA, 25 bp, Homo sapien
cactttactcggcagcttcttcagt

SEQ ID NO: 4458867 - DNA, 25 bp, Homo sapien
cccatccgtgctgaggtcatcgtcg

SEQ ID NO: 4458868 - DNA, 25 bp, Homo sapien
catccagcactttactcggcagctt

SEQ ID NO: 4458869 - DNA, 25 bp, Homo sapien
tctggctggcgacggtgctgtcctt

SEQ ID NO: 4458870 - DNA, 25 bp, Homo sapien
tgtccttggagaatgtgtagctcac

SEQ ID NO: 4458871 - DNA, 25 bp, Homo sapien
tcagatctggctggcgacggtgctg

SEQ ID NO: 4458872 - DNA, 25 bp, Homo sapien
agatctggctggcgacggtgctgtc

SEQ ID NO: 4458873 - DNA, 25 bp, Homo sapien
caaaagcttgctgtgggacatgacc

SEQ ID NO: 4458874 - DNA, 25 bp, Homo sapien
gaaggagtcctccagtttgcacaga

SEQ ID NO: 4458875 - DNA, 25 bp, Homo sapien
aaaagaatactcaatggctgggcgt

SEQ ID NO: 4458876 - DNA, 25 bp, Homo sapien
gacttgtttacccagaccatgtgaa

SEQ ID NO: 4458877 - DNA, 25 bp, Homo sapien
tcccatattctgacctgtggaagcc

SEQ ID NO: 4458878 - DNA, 25 bp, Homo sapien
cccatattctgacctgtggaagccc

SEQ ID NO: 4458879 - DNA, 25 bp, Homo sapien
ccatattctgacctgtggaagccca

SEQ ID NO: 4458880 - DNA, 25 bp, Homo sapien
gtcccatattctgacctgtggaagc

SEQ ID NO: 4458881 - DNA, 25 bp, Homo sapien
tactgtcatggagtcctctggccca

SEQ ID NO: 4458882 - DNA, 25 bp, Homo sapien
taaactgggctgaccactctgaaac

SEQ ID NO: 4458883 - DNA, 25 bp, Homo sapien
tgactaaagggaggaatcggccaca

SEQ ID NO: 4458884 - DNA, 25 bp, Homo sapien
caaagtgagctctagggaaccaggc

SEQ ID NO: 4458885 - DNA, 25 bp, Homo sapien
ccatggctactggaaagaactggcc

SEQ ID NO: 4458886 - DNA, 25 bp, Homo sapien
ttgcttcttgtagccagccccatgg

SEQ ID NO: 4458887 - DNA, 25 bp, Homo sapien
gcttctctcagcaggcttactggca

SEQ ID NO: 4458888 - DNA, 25 bp, Homo sapien
ccagcagcgtctctaggtatgagtg

SEQ ID NO: 4458889 - DNA, 25 bp, Homo sapien
tatacctggaaaggaccgtgggcac

SEQ ID NO: 4458890 - DNA, 25 bp, Homo sapien
gttccaggtaatccatggctctgag

SEQ ID NO: 4458891 - DNA, 25 bp, Homo sapien
tggctctgagagtgagcacactgtc

SEQ ID NO: 4458892 - DNA, 25 bp, Homo sapien
ccctcagagtgtaggatagcgcaat

SEQ ID NO: 4458893 - DNA, 25 bp, Homo sapien
ccattgggtgacagcgtttattgaa

SEQ ID NO: 4458894 - DNA, 25 bp, Homo sapien
tcaacgggcattgtagaacgacact

SEQ ID NO: 4458895 - DNA, 25 bp, Homo sapien
gaattcactcacatggaggtagctg

SEQ ID NO: 4458896 - DNA, 25 bp, Homo sapien
taccctaaagcagagacgcaatgga

SEQ ID NO: 4458897 - DNA, 25 bp, Homo sapien
gcagtttcttaaaggacacagagcc

SEQ ID NO: 4458898 - DNA, 25 bp, Homo sapien
tggcagtttcttaaaggacacagag

SEQ ID NO: 4458899 - DNA, 25 bp, Homo sapien
gtttcttaaaggacacagagccaag

SEQ ID NO: 4458900 - DNA, 25 bp, Homo sapien
cagtttcttaaaggacacagagcca

SEQ ID NO: 4458901 - DNA, 25 bp, Homo sapien
acagcaagagaaagccatgacccgc

SEQ ID NO: 4458902 - DNA, 25 bp, Homo sapien
tggcaggaacccaccaaggtaggga

SEQ ID NO: 4458903 - DNA, 25 bp, Homo sapien
gaactgcggcagctcaatgaagggc

SEQ ID NO: 4458904 - DNA, 25 bp, Homo sapien
catgacccgcccttagaactggagg

SEQ ID NO: 4458905 - DNA, 25 bp, Homo sapien
caagtaagatcctgcgcagtgggaa

SEQ ID NO: 4458906 - DNA, 25 bp, Homo sapien
aatctttagccctgtgtattcggca

SEQ ID NO: 4458907 - DNA, 25 bp, Homo sapien
ccttggtcatgcctgtgaaagtcag

SEQ ID NO: 4458908 - DNA, 25 bp, Homo sapien
tctgcaaagcctagaacgtctgaat

SEQ ID NO: 4458909 - DNA, 25 bp, Homo sapien
ccacggagagaagcgagcaaaccaa

SEQ ID NO: 4458910 - DNA, 25 bp, Homo sapien
tggaatggcagccttcccggccctt

SEQ ID NO: 4458911 - DNA, 25 bp, Homo sapien
cagctggcttatcttaatctccaaa

SEQ ID NO: 4458912 - DNA, 25 bp, Homo sapien
ccaacgataggcagggacggatgaa

SEQ ID NO: 4458913 - DNA, 25 bp, Homo sapien
gaaagcacacgctccacatgatgac

SEQ ID NO: 4458914 - DNA, 25 bp, Homo sapien
ggaggagcgctatgcttccagcctg

SEQ ID NO: 4458915 - DNA, 25 bp, Homo sapien
tgcccagagatcagatgtcaagcct

SEQ ID NO: 4458916 - DNA, 25 bp, Homo sapien
gggtgcatctaacctttccacaggg

SEQ ID NO: 4458917 - DNA, 25 bp, Homo sapien
tggattccactacagcgaccttcag

SEQ ID NO: 4458918 - DNA, 25 bp, Homo sapien
tgtgccattgatcaggtcagccctt

SEQ ID NO: 4458919 - DNA, 25 bp, Homo sapien
caatggccaattccacatcagagtg

SEQ ID NO: 4458920 - DNA, 25 bp, Homo sapien
cccggtgtggctactaaggtactga

SEQ ID NO: 4458921 - DNA, 25 bp, Homo sapien
tctgcatatgcatctattacggtgt

SEQ ID NO: 4458922 - DNA, 25 bp, Homo sapien
gccagccagcaagggaattgcagcc

SEQ ID NO: 4458923 - DNA, 25 bp, Homo sapien
gtgcagacaaaacagccccggaatg

SEQ ID NO: 4458924 - DNA, 25 bp, Homo sapien
aatcaaaaggtcttaagcagcgagc

SEQ ID NO: 4458925 - DNA, 25 bp, Homo sapien
agtgggctccagttgagcagaagcc

SEQ ID NO: 4458926 - DNA, 25 bp, Homo sapien
ttctagatggcagtagggccacccc

SEQ ID NO: 4458927 - DNA, 25 bp, Homo sapien
ttgagcagaagcctgcggccttatt

SEQ ID NO: 4458928 - DNA, 25 bp, Homo sapien
tagatggcagtagggccaccccagt

SEQ ID NO: 4458929 - DNA, 25 bp, Homo sapien
caattgaccctaacagctgggcctc

SEQ ID NO: 4458930 - DNA, 25 bp, Homo sapien
tttggatgattgcagccaattgacc

SEQ ID NO: 4458931 - DNA, 25 bp, Homo sapien
gattgcagccaattgaccctaacag

SEQ ID NO: 4458932 - DNA, 25 bp, Homo sapien
agccaattgaccctaacagctgggc

SEQ ID NO: 4458933 - DNA, 25 bp, Homo sapien
attcaaattccctgttcgtgggctc

SEQ ID NO: 4458934 - DNA, 25 bp, Homo sapien
gcagggttcctgcaatgtccccatc

SEQ ID NO: 4458935 - DNA, 25 bp, Homo sapien
tgggctctgtgagacatccctccaa

SEQ ID NO: 4458936 - DNA, 25 bp, Homo sapien
gagaaagaacttgcagggttcctgc

SEQ ID NO: 4458937 - DNA, 25 bp, Homo sapien
tactggctacaatgtgagcactcaa

SEQ ID NO: 4458938 - DNA, 25 bp, Homo sapien
caaagctaataagaagaggaactgg

SEQ ID NO: 4458939 - DNA, 25 bp, Homo sapien
tttacactcaggtcatttcaatgtg

SEQ ID NO: 4458940 - DNA, 25 bp, Homo sapien
tgtccctgctgctatgcaagaacta

SEQ ID NO: 4458941 - DNA, 25 bp, Homo sapien
gcagcagtgcttgggaagctgtaca

SEQ ID NO: 4458942 - DNA, 25 bp, Homo sapien
gcccaaagggtgcatagagccttgt

SEQ ID NO: 4458943 - DNA, 25 bp, Homo sapien
gcctggctggattgctgttggcccc

SEQ ID NO: 4458944 - DNA, 25 bp, Homo sapien
ttcagagtagcggaatggcctgcag

SEQ ID NO: 4458945 - DNA, 25 bp, Homo sapien
tgccgctctgactgtgagttctcag

SEQ ID NO: 4458946 - DNA, 25 bp, Homo sapien
ctgaggaattagtggttgccgctct

SEQ ID NO: 4458947 - DNA, 25 bp, Homo sapien
catggtgccttccaagctgaggagg

SEQ ID NO: 4458948 - DNA, 25 bp, Homo sapien
tctcagagatgggatagtttgaagc

SEQ ID NO: 4458949 - DNA, 25 bp, Homo sapien
tgtagtctcaggaagggtaaagaac

SEQ ID NO: 4458950 - DNA, 25 bp, Homo sapien
caggaagggtaaagaactggttctg

SEQ ID NO: 4458951 - DNA, 25 bp, Homo sapien
aagaactggttctgagagtggagca

SEQ ID NO: 4458952 - DNA, 25 bp, Homo sapien
gagtggagcaatggcttgcagagct

SEQ ID NO: 4458953 - DNA, 25 bp, Homo sapien
cttgagaagagttgttggagcattt

SEQ ID NO: 4458954 - DNA, 25 bp, Homo sapien
agaagagttgttggagcatttctgg

SEQ ID NO: 4458955 - DNA, 25 bp, Homo sapien
agttgttggagcatttctgggaagc

SEQ ID NO: 4458956 - DNA, 25 bp, Homo sapien
cagatttgtgttcctagggacaagc

SEQ ID NO: 4458957 - DNA, 25 bp, Homo sapien
gacttctgtggcttccgcatttatc

SEQ ID NO: 4458958 - DNA, 25 bp, Homo sapien
tcatctcgattggagggaagcagct

SEQ ID NO: 4458959 - DNA, 25 bp, Homo sapien
tatggccgcattaactctgaacggg

SEQ ID NO: 4458960 - DNA, 25 bp, Homo sapien
agctgccctgagagtgacttctgtg

SEQ ID NO: 4458961 - DNA, 25 bp, Homo sapien
tggacgccggcgttcctcccgggca

SEQ ID NO: 4458962 - DNA, 25 bp, Homo sapien
ccgcagcggcggtcggtagcgggct

SEQ ID NO: 4458963 - DNA, 25 bp, Homo sapien
ggcagaataagcgtgcggggcccgc

SEQ ID NO: 4458964 - DNA, 25 bp, Homo sapien
cggcggtcggtagcgggctggacgc

SEQ ID NO: 4458965 - DNA, 25 bp, Homo sapien
tgaccgtggacgtggagcgcagcat

SEQ ID NO: 4458966 - DNA, 25 bp, Homo sapien
ccgagagcagggtgaccgtggacgt

SEQ ID NO: 4458967 - DNA, 25 bp, Homo sapien
ggtgaccgtggacgtggagcgcagc

SEQ ID NO: 4458968 - DNA, 25 bp, Homo sapien
gcgccgcccgagagcagggtgaccg

SEQ ID NO: 4458969 - DNA, 25 bp, Homo sapien
cccgagtaacatcaaggcagcattc

SEQ ID NO: 4458970 - DNA, 25 bp, Homo sapien
ggcagcattccttacctccgagcat

SEQ ID NO: 4458971 - DNA, 25 bp, Homo sapien
gaaactcggatacacaatctccaga

SEQ ID NO: 4458972 - DNA, 25 bp, Homo sapien
ggctgatctccatggtctcctgaaa

SEQ ID NO: 4458973 - DNA, 25 bp, Homo sapien
gttcattttccatgaacaggttagg

SEQ ID NO: 4458974 - DNA, 25 bp, Homo sapien
ccatgaacaggttagggagcccagg

SEQ ID NO: 4458975 - DNA, 25 bp, Homo sapien
catgaacaggttagggagcccaggt

SEQ ID NO: 4458976 - DNA, 25 bp, Homo sapien
cattttccatgaacaggttagggag

SEQ ID NO: 4458977 - DNA, 25 bp, Homo sapien
caggaactggactctcaggaggtac

SEQ ID NO: 4458978 - DNA, 25 bp, Homo sapien
ctctcaggaggtacggtcagccgta

SEQ ID NO: 4458979 - DNA, 25 bp, Homo sapien
tgctcaggaactggactctcaggag

SEQ ID NO: 4458980 - DNA, 25 bp, Homo sapien
gtacggtcagccgtagtctgcaaac

SEQ ID NO: 4458981 - DNA, 25 bp, Homo sapien
tcatcatttgcatcagcacaggcag

SEQ ID NO: 4458982 - DNA, 25 bp, Homo sapien
ttgcatcagcacaggcagctctctg

SEQ ID NO: 4458983 - DNA, 25 bp, Homo sapien
tttctctagtcagaacttcatttgc

SEQ ID NO: 4458984 - DNA, 25 bp, Homo sapien
ctctctgtccttggtagaaagtggg

SEQ ID NO: 4458985 - DNA, 25 bp, Homo sapien
atccacaacacacccacattgggag

SEQ ID NO: 4458986 - DNA, 25 bp, Homo sapien
cacccacattgggagcaattccttt

SEQ ID NO: 4458987 - DNA, 25 bp, Homo sapien
tgggagcaattcctttctccaataa

SEQ ID NO: 4458988 - DNA, 25 bp, Homo sapien
gaaatgggcaaaatacgccatccac

SEQ ID NO: 4458989 - DNA, 25 bp, Homo sapien
ctccataagaaggtgctgactctgt

SEQ ID NO: 4458990 - DNA, 25 bp, Homo sapien
ctgacaggaaaagtgaagaagaaag

SEQ ID NO: 4458991 - DNA, 25 bp, Homo sapien
tgacaggaaaagtgaagaagaaagt

SEQ ID NO: 4458992 - DNA, 25 bp, Homo sapien
aggcagcccaaggagctgatggtcc

SEQ ID NO: 4458993 - DNA, 25 bp, Homo sapien
cacaccaggggagaggactcctgag

SEQ ID NO: 4458994 - DNA, 25 bp, Homo sapien
gggagaggactcctgaggcagccca

SEQ ID NO: 4458995 - DNA, 25 bp, Homo sapien
gaggactcctgaggcagcccaagga

SEQ ID NO: 4458996 - DNA, 25 bp, Homo sapien
gattttgatctgatcttcgcaccac

SEQ ID NO: 4458997 - DNA, 25 bp, Homo sapien
caccataaacaacaccctgaggaag

SEQ ID NO: 4458998 - DNA, 25 bp, Homo sapien
ttcagctgactggtggaccacccat

SEQ ID NO: 4458999 - DNA, 25 bp, Homo sapien
ggtaggttctccattgctcaggtca

SEQ ID NO: 4459000 - DNA, 25 bp, Homo sapien
tcatagtctccatacattcgctttc

SEQ ID NO: 4459001 - DNA, 25 bp, Homo sapien
tctcatcatagtctccatacattcg

SEQ ID NO: 4459002 - DNA, 25 bp, Homo sapien
tcctgggtgagctgtcgaatcttct

SEQ ID NO: 4459003 - DNA, 25 bp, Homo sapien
tctcatctcatcatagtctccatac

SEQ ID NO: 4459004 - DNA, 25 bp, Homo sapien
taaaacgatccagggcagacgactg

SEQ ID NO: 4459005 - DNA, 25 bp, Homo sapien
gccaatggaatctgatgccaaggct

SEQ ID NO: 4459006 - DNA, 25 bp, Homo sapien
acgactgggtttggatgtgattctc

SEQ ID NO: 4459007 - DNA, 25 bp, Homo sapien
tgagttcatggcattaaaacgatcc

SEQ ID NO: 4459008 - DNA, 25 bp, Homo sapien
taccgactaagtctgaactcaggtg

SEQ ID NO: 4459009 - DNA, 25 bp, Homo sapien
gcagtaaatgccagagtgttggcca

SEQ ID NO: 4459010 - DNA, 25 bp, Homo sapien
caagaattgccagaaaatactggca

SEQ ID NO: 4459011 - DNA, 25 bp, Homo sapien
gagtgttggccagatggcaaagcac

SEQ ID NO: 4459012 - DNA, 25 bp, Homo sapien
ggatgcttcatacgtctgctgcaga

SEQ ID NO: 4459013 - DNA, 25 bp, Homo sapien
tgtccatggatgcttcatacgtctg

SEQ ID NO: 4459014 - DNA, 25 bp, Homo sapien
ttccaaagtcacatccacgagggtt

SEQ ID NO: 4459015 - DNA, 25 bp, Homo sapien
ccaaagtcacatccacgagggtttt

SEQ ID NO: 4459016 - DNA, 25 bp, Homo sapien
gcagctggttttcaacttgcgctac

SEQ ID NO: 4459017 - DNA, 25 bp, Homo sapien
tcagaacgacagcttttgcagggcc

SEQ ID NO: 4459018 - DNA, 25 bp, Homo sapien
gactcatttcagaacgacagctttt

SEQ ID NO: 4459019 - DNA, 25 bp, Homo sapien
aacgacagcttttgcagggcccaga

SEQ ID NO: 4459020 - DNA, 25 bp, Homo sapien
catttcagaacgacagcttttgcag

SEQ ID NO: 4459021 - DNA, 25 bp, Homo sapien
ggtcatctctcgcatcacctcagca

SEQ ID NO: 4459022 - DNA, 25 bp, Homo sapien
tcatactggctgtacagcttcttgg

SEQ ID NO: 4459023 - DNA, 25 bp, Homo sapien
tcctcatactggctgtacagcttct

SEQ ID NO: 4459024 - DNA, 25 bp, Homo sapien
tctcgcatcacctcagcattggctt

SEQ ID NO: 4459025 - DNA, 25 bp, Homo sapien
agtacaggcatggagtaccgaggct

SEQ ID NO: 4459026 - DNA, 25 bp, Homo sapien
acaggcatggagtaccgaggctact

SEQ ID NO: 4459027 - DNA, 25 bp, Homo sapien
tacaggcatggagtaccgaggctac

SEQ ID NO: 4459028 - DNA, 25 bp, Homo sapien
caggcatggagtaccgaggctactc

SEQ ID NO: 4459029 - DNA, 25 bp, Homo sapien
gctccccgatcctctggtctttctc

SEQ ID NO: 4459030 - DNA, 25 bp, Homo sapien
ggcttcttcaatcgctttcagaaaa

SEQ ID NO: 4459031 - DNA, 25 bp, Homo sapien
cttttccatgcgctcaatcagcctg

SEQ ID NO: 4459032 - DNA, 25 bp, Homo sapien
attggcttcttcaatcgctttcaga

SEQ ID NO: 4459033 - DNA, 25 bp, Homo sapien
tcgtatctcagatggacctacaggg

SEQ ID NO: 4459034 - DNA, 25 bp, Homo sapien
ctacagggaaaagtttgggcaagtg

SEQ ID NO: 4459035 - DNA, 25 bp, Homo sapien
gaatccatatccagggcctctcgta

SEQ ID NO: 4459036 - DNA, 25 bp, Homo sapien
gcaataggcccaacgctgtgtccta

SEQ ID NO: 4459037 - DNA, 25 bp, Homo sapien
tctgtttcatgttctaggagttgaa

SEQ ID NO: 4459038 - DNA, 25 bp, Homo sapien
ccttgtcagaatcagttaactcccc

SEQ ID NO: 4459039 - DNA, 25 bp, Homo sapien
ttgtcagaatcagttaactccccag

SEQ ID NO: 4459040 - DNA, 25 bp, Homo sapien
ttcatgttctaggagttgaagttgc

SEQ ID NO: 4459041 - DNA, 25 bp, Homo sapien
tgtctgatccgctcacggaggctgg

SEQ ID NO: 4459042 - DNA, 25 bp, Homo sapien
catctaggtgtctgatccgctcacg

SEQ ID NO: 4459043 - DNA, 25 bp, Homo sapien
gctggcaatgcaccatgtcatctag

SEQ ID NO: 4459044 - DNA, 25 bp, Homo sapien
tcctcgaccatctgcttgactttct

SEQ ID NO: 4459045 - DNA, 25 bp, Homo sapien
ctaacgattagatacaagaatgaca

SEQ ID NO: 4459046 - DNA, 25 bp, Homo sapien
acgattagatacaagaatgacacag

SEQ ID NO: 4459047 - DNA, 25 bp, Homo sapien
gattagatacaagaatgacacagac

SEQ ID NO: 4459048 - DNA, 25 bp, Homo sapien
taacgattagatacaagaatgacac

SEQ ID NO: 4459049 - DNA, 25 bp, Homo sapien
taggaggcactctcaggctatgcag

SEQ ID NO: 4459050 - DNA, 25 bp, Homo sapien
tccaggtacggttcatagcccaaaa

SEQ ID NO: 4459051 - DNA, 25 bp, Homo sapien
gaaagcaggacttacatgggtgacc

SEQ ID NO: 4459052 - DNA, 25 bp, Homo sapien
tatctgctccagaataaggcctgcc

SEQ ID NO: 4459053 - DNA, 25 bp, Homo sapien
tatcccaggtgttagagatacaacc

SEQ ID NO: 4459054 - DNA, 25 bp, Homo sapien
tcatttgccagtgactatcccaggt

SEQ ID NO: 4459055 - DNA, 25 bp, Homo sapien
tttcaatgagtaatcaggctgacgc

SEQ ID NO: 4459056 - DNA, 25 bp, Homo sapien
gtagagttcctacaagtcagctgga

SEQ ID NO: 4459057 - DNA, 25 bp, Homo sapien
aagccccctaggtgaagccctcaat

SEQ ID NO: 4459058 - DNA, 25 bp, Homo sapien
cccctaggtgaagccctcaattgca

SEQ ID NO: 4459059 - DNA, 25 bp, Homo sapien
gaagccctcaattgcatgtggcctg

SEQ ID NO: 4459060 - DNA, 25 bp, Homo sapien
ggtgaagccctcaattgcatgtggc

SEQ ID NO: 4459061 - DNA, 25 bp, Homo sapien
taaaagctgcagtattaagagctgt

SEQ ID NO: 4459062 - DNA, 25 bp, Homo sapien
gctgcagtattaagagctgtttctg

SEQ ID NO: 4459063 - DNA, 25 bp, Homo sapien
ctgtttctgttgcaactttttcttt

SEQ ID NO: 4459064 - DNA, 25 bp, Homo sapien
tctaaaagctgcagtattaagagct

SEQ ID NO: 4459065 - DNA, 25 bp, Homo sapien
tatcattgtctgctgggctctctca

SEQ ID NO: 4459066 - DNA, 25 bp, Homo sapien
ttgtctgctgggctctctcactgtg

SEQ ID NO: 4459067 - DNA, 25 bp, Homo sapien
gctgggctctctcactgtggaagga

SEQ ID NO: 4459068 - DNA, 25 bp, Homo sapien
tttatcattgtctgctgggctctct

SEQ ID NO: 4459069 - DNA, 25 bp, Homo sapien
gactcttactggggaaggtgtgctt

SEQ ID NO: 4459070 - DNA, 25 bp, Homo sapien
tgactcttactggggaaggtgtgct

SEQ ID NO: 4459071 - DNA, 25 bp, Homo sapien
ctgactcttactggggaaggtgtgc

SEQ ID NO: 4459072 - DNA, 25 bp, Homo sapien
cagtaggagagcttgctttagcagc

SEQ ID NO: 4459073 - DNA, 25 bp, Homo sapien
actgtcttgggggaccttctgcctc

SEQ ID NO: 4459074 - DNA, 25 bp, Homo sapien
gtaggagagcttgctttagcagcac

SEQ ID NO: 4459075 - DNA, 25 bp, Homo sapien
taccagtaggagagcttgctttagc

SEQ ID NO: 4459076 - DNA, 25 bp, Homo sapien
tagtccaacctgctttgtagttcat

SEQ ID NO: 4459077 - DNA, 25 bp, Homo sapien
tcacagcccactcctatctctctgg

SEQ ID NO: 4459078 - DNA, 25 bp, Homo sapien
gtttctgttaaatagtccaacctgc

SEQ ID NO: 4459079 - DNA, 25 bp, Homo sapien
tggcctgggtttctgttaaatagtc

SEQ ID NO: 4459080 - DNA, 25 bp, Homo sapien
gggtgtagttcctagaaggcatcac

SEQ ID NO: 4459081 - DNA, 25 bp, Homo sapien
ggcatcacaatttcacgagtcctgc

SEQ ID NO: 4459082 - DNA, 25 bp, Homo sapien
tggttaactccaggactcttgtgta

SEQ ID NO: 4459083 - DNA, 25 bp, Homo sapien
taactccaggactcttgtgtatggg

SEQ ID NO: 4459084 - DNA, 25 bp, Homo sapien
taaaccaagggactagcgcatcaga

SEQ ID NO: 4459085 - DNA, 25 bp, Homo sapien
gatcagagcctcagcgattcccatt

SEQ ID NO: 4459086 - DNA, 25 bp, Homo sapien
tcccaaaggatttgaagccacaggg

SEQ ID NO: 4459087 - DNA, 25 bp, Homo sapien
gtaaaaagtgtatgcctctgagtgc

SEQ ID NO: 4459088 - DNA, 25 bp, Homo sapien
cactccctatgtgggaatgacctca

SEQ ID NO: 4459089 - DNA, 25 bp, Homo sapien
gcaatcactgcctgtgtgcctagca

SEQ ID NO: 4459090 - DNA, 25 bp, Homo sapien
tcaagtaggtgtgataatccgaggt

SEQ ID NO: 4459091 - DNA, 25 bp, Homo sapien
aatgacctcatgtggcactcacgtc

SEQ ID NO: 4459092 - DNA, 25 bp, Homo sapien
tgtaatacccctgctcatgaagagg

SEQ ID NO: 4459093 - DNA, 25 bp, Homo sapien
gcttctttcggtttcagtctgtaca

SEQ ID NO: 4459094 - DNA, 25 bp, Homo sapien
aaggatctggaaggattatctctca

SEQ ID NO: 4459095 - DNA, 25 bp, Homo sapien
tgaatgtcagtcctttagatggagg

SEQ ID NO: 4459096 - DNA, 25 bp, Homo sapien
ggtcagccttggttggtgcaccctc

SEQ ID NO: 4459097 - DNA, 25 bp, Homo sapien
tgatgctggctcactaagcggcagg

SEQ ID NO: 4459098 - DNA, 25 bp, Homo sapien
ggtgaccaccctagagttcctggag

SEQ ID NO: 4459099 - DNA, 25 bp, Homo sapien
gagtcaaaccgcatcttaggcatgt

SEQ ID NO: 4459100 - DNA, 25 bp, Homo sapien
ccctctcagtctggccgtcaagaag

SEQ ID NO: 4459101 - DNA, 25 bp, Homo sapien
ctggcatgtgctgggtgaactgaac

SEQ ID NO: 4459102 - DNA, 25 bp, Homo sapien
ggtgaactgaactggccctctcagt

SEQ ID NO: 4459103 - DNA, 25 bp, Homo sapien
gtctggccgtcaagaagagcaccat

SEQ ID NO: 4459104 - DNA, 25 bp, Homo sapien
tcttggtgcaatactggcttcccgg

SEQ ID NO: 4459105 - DNA, 25 bp, Homo sapien
gatttaatggcagacctgggactga

SEQ ID NO: 4459106 - DNA, 25 bp, Homo sapien
ggtgataacatcttccaggcaggac

SEQ ID NO: 4459107 - DNA, 25 bp, Homo sapien
ttcatcgaaaaagctgcatcctggg

SEQ ID NO: 4459108 - DNA, 25 bp, Homo sapien
tcatctttagtctcccttttaggcc

SEQ ID NO: 4459109 - DNA, 25 bp, Homo sapien
tagcaactcatctttagtctccctt

SEQ ID NO: 4459110 - DNA, 25 bp, Homo sapien
ctcatctttagtctcccttttaggc

SEQ ID NO: 4459111 - DNA, 25 bp, Homo sapien
tcttttttagcaactcatctttagt

SEQ ID NO: 4459112 - DNA, 25 bp, Homo sapien
tcatggccgatgataaagctacagc

SEQ ID NO: 4459113 - DNA, 25 bp, Homo sapien
tgttgctaggagctggcctgacaca

SEQ ID NO: 4459114 - DNA, 25 bp, Homo sapien
cgaattaccccaagctttagcagca

SEQ ID NO: 4459115 - DNA, 25 bp, Homo sapien
tattttcaacaatggtacaagggca

SEQ ID NO: 4459116 - DNA, 25 bp, Homo sapien
ggacggcggtgactccggggcacga

SEQ ID NO: 4459117 - DNA, 25 bp, Homo sapien
gcgggcactcggcttcctcggcagg

SEQ ID NO: 4459118 - DNA, 25 bp, Homo sapien
tactagcgccggatccgcggacggc

SEQ ID NO: 4459119 - DNA, 25 bp, Homo sapien
gcaggccccgctactagcgccggat

SEQ ID NO: 4459120 - DNA, 25 bp, Homo sapien
ggagcttggggctcgaagccgcggg

SEQ ID NO: 4459121 - DNA, 25 bp, Homo sapien
ccgcagctccaccaaactccgctgc

SEQ ID NO: 4459122 - DNA, 25 bp, Homo sapien
tccgctgcgccaagtcctcgggagc

SEQ ID NO: 4459123 - DNA, 25 bp, Homo sapien
tcctcgggagcttggggctcgaagc

SEQ ID NO: 4459124 - DNA, 25 bp, Homo sapien
gctgaaggagcctggcggagactcc

SEQ ID NO: 4459125 - DNA, 25 bp, Homo sapien
ggagcgcccagggagctcgagctga

SEQ ID NO: 4459126 - DNA, 25 bp, Homo sapien
ctggcggagactccgcgggacccca

SEQ ID NO: 4459127 - DNA, 25 bp, Homo sapien
cagggagctcgagctgaaggagcct

SEQ ID NO: 4459128 - DNA, 25 bp, Homo sapien
gtccactcgcccgtaggactgaagc

SEQ ID NO: 4459129 - DNA, 25 bp, Homo sapien
cactcgcccgtaggactgaagcgaa

SEQ ID NO: 4459130 - DNA, 25 bp, Homo sapien
aagccctccgtccactcgcccgtag

SEQ ID NO: 4459131 - DNA, 25 bp, Homo sapien
cgcccgtaggactgaagcgaatgtg

SEQ ID NO: 4459132 - DNA, 25 bp, Homo sapien
gttcaatccgagctatcctcgcagg

SEQ ID NO: 4459133 - DNA, 25 bp, Homo sapien
cctgcaacgccaggtagccgttcaa

SEQ ID NO: 4459134 - DNA, 25 bp, Homo sapien
gccaggtagccgttcaatccgagct

SEQ ID NO: 4459135 - DNA, 25 bp, Homo sapien
gagctatcctcgcaggcatacgtgc

SEQ ID NO: 4459136 - DNA, 25 bp, Homo sapien
acactctacagctgaaattcctgtt

SEQ ID NO: 4459137 - DNA, 25 bp, Homo sapien
cactctacagctgaaattcctgttt

SEQ ID NO: 4459138 - DNA, 25 bp, Homo sapien
actctacagctgaaattcctgtttt

SEQ ID NO: 4459139 - DNA, 25 bp, Homo sapien
tcctctgttctttttgacactacat

SEQ ID NO: 4459140 - DNA, 25 bp, Homo sapien
ctgttctttttgacactacattcat

SEQ ID NO: 4459141 - DNA, 25 bp, Homo sapien
ttatttatttgtcccttttgctgga

SEQ ID NO: 4459142 - DNA, 25 bp, Homo sapien
atttatttgtcccttttgctggatg

SEQ ID NO: 4459143 - DNA, 25 bp, Homo sapien
ttatttgtcccttttgctggatgac

SEQ ID NO: 4459144 - DNA, 25 bp, Homo sapien
tatttgtcccttttgctggatgaca

SEQ ID NO: 4459145 - DNA, 25 bp, Homo sapien
cagtcattaaagtgcaatctccaaa

SEQ ID NO: 4459146 - DNA, 25 bp, Homo sapien
ggaagaatagggaatatatgcctca

SEQ ID NO: 4459147 - DNA, 25 bp, Homo sapien
tgatttctaactgccccaaaacaag

SEQ ID NO: 4459148 - DNA, 25 bp, Homo sapien
ataagacattccaagaaccagcagt

SEQ ID NO: 4459149 - DNA, 25 bp, Homo sapien
gtcgggcaatttgcaaatgaatttt

SEQ ID NO: 4459150 - DNA, 25 bp, Homo sapien
ttgtcgggcaatttgcaaatgaatt

SEQ ID NO: 4459151 - DNA, 25 bp, Homo sapien
ctttgtcgggcaatttgcaaatgaa

SEQ ID NO: 4459152 - DNA, 25 bp, Homo sapien
tgtcgggcaatttgcaaatgaattt

SEQ ID NO: 4459153 - DNA, 25 bp, Homo sapien
caccttcaagagtaggacgtccaag

SEQ ID NO: 4459154 - DNA, 25 bp, Homo sapien
aagctgggcccttattcactgtgta

SEQ ID NO: 4459155 - DNA, 25 bp, Homo sapien
gggtgatgctcactagcttcagatg

SEQ ID NO: 4459156 - DNA, 25 bp, Homo sapien
gcttcagatgaaggtggtaccctgt

SEQ ID NO: 4459157 - DNA, 25 bp, Homo sapien
ctgtcaataaacaggttgtcaaagc

SEQ ID NO: 4459158 - DNA, 25 bp, Homo sapien
tgtcaataaacaggttgtcaaagct

SEQ ID NO: 4459159 - DNA, 25 bp, Homo sapien
gtcaataaacaggttgtcaaagctg

SEQ ID NO: 4459160 - DNA, 25 bp, Homo sapien
gttcaccttggtccgcaatggtgat

SEQ ID NO: 4459161 - DNA, 25 bp, Homo sapien
cattggttttaaatttacgcagctg

SEQ ID NO: 4459162 - DNA, 25 bp, Homo sapien
caagttcttagtacttgcgttttct

SEQ ID NO: 4459163 - DNA, 25 bp, Homo sapien
tgggtttttggctcgcatttctagc

SEQ ID NO: 4459164 - DNA, 25 bp, Homo sapien
caattacagcccgagagagatgaga

SEQ ID NO: 4459165 - DNA, 25 bp, Homo sapien
actctggcagcagtggagatagact

SEQ ID NO: 4459166 - DNA, 25 bp, Homo sapien
taagtaggtcttcatggctagcaga

SEQ ID NO: 4459167 - DNA, 25 bp, Homo sapien
gatgagagtcttcacttcgacagaa

SEQ ID NO: 4459168 - DNA, 25 bp, Homo sapien
aggagagaagtgcatcccagcaagg

SEQ ID NO: 4459169 - DNA, 25 bp, Homo sapien
aaatacacatgtaaagtttcagtgc

SEQ ID NO: 4459170 - DNA, 25 bp, Homo sapien
tgtgatagatatctcaacaagatac

SEQ ID NO: 4459171 - DNA, 25 bp, Homo sapien
ggcttattgcccagtagaaagaaat

SEQ ID NO: 4459172 - DNA, 25 bp, Homo sapien
aacataaggaaatggccagttctag

SEQ ID NO: 4459173 - DNA, 25 bp, Homo sapien
caatgactagatgaatcattttgtc

SEQ ID NO: 4459174 - DNA, 25 bp, Homo sapien
tgaggaaataggagacccactcttc

SEQ ID NO: 4459175 - DNA, 25 bp, Homo sapien
cttctggcaatgactagatgaatca

SEQ ID NO: 4459176 - DNA, 25 bp, Homo sapien
tgaatcattttgtcgaaaaggtaac

SEQ ID NO: 4459177 - DNA, 25 bp, Homo sapien
ttcttctatggagagcagctgcgtg

SEQ ID NO: 4459178 - DNA, 25 bp, Homo sapien
tcaagatgctgcttatccctgcgcc

SEQ ID NO: 4459179 - DNA, 25 bp, Homo sapien
gctgtttctgaagtgccaaggattc

SEQ ID NO: 4459180 - DNA, 25 bp, Homo sapien
catatggtgaagtggtagaagccga

SEQ ID NO: 4459181 - DNA, 25 bp, Homo sapien
tttttgcgctgcgagctttgcttgc

SEQ ID NO: 4459182 - DNA, 25 bp, Homo sapien
ctaatttttgcgctgcgagctttgc

SEQ ID NO: 4459183 - DNA, 25 bp, Homo sapien
gcgctgcgagctttgcttgcatctc

SEQ ID NO: 4459184 - DNA, 25 bp, Homo sapien
ttgcgctgcgagctttgcttgcatc

SEQ ID NO: 4459185 - DNA, 25 bp, Homo sapien
ccttacttctcggtatctccctgaa

SEQ ID NO: 4459186 - DNA, 25 bp, Homo sapien
tctccctgaagactccccttctgga

SEQ ID NO: 4459187 - DNA, 25 bp, Homo sapien
cccttctggattataactccgcatt

SEQ ID NO: 4459188 - DNA, 25 bp, Homo sapien
aattcatcagaggaccaatcgtcat

SEQ ID NO: 4459189 - DNA, 25 bp, Homo sapien
tccctcaacaatatctgacactgat

SEQ ID NO: 4459190 - DNA, 25 bp, Homo sapien
ttttaataccatgtggttaaacaca

SEQ ID NO: 4459191 - DNA, 25 bp, Homo sapien
caacgtcagtgatttaggagattat

SEQ ID NO: 4459192 - DNA, 25 bp, Homo sapien
gacactgatcttgatactagttaga

SEQ ID NO: 4459193 - DNA, 25 bp, Homo sapien
tgtgacagcaaggaactcaagccag

SEQ ID NO: 4459194 - DNA, 25 bp, Homo sapien
taaaaagacctccacctagattgca

SEQ ID NO: 4459195 - DNA, 25 bp, Homo sapien
aagccaggtgatgcacaagccttca

SEQ ID NO: 4459196 - DNA, 25 bp, Homo sapien
gagagataacgttcttcctaaggga

SEQ ID NO: 4459197 - DNA, 25 bp, Homo sapien
aatatgaatgaaacacaccatgtga

SEQ ID NO: 4459198 - DNA, 25 bp, Homo sapien
cttatatgcgatgttgaaagacacc

SEQ ID NO: 4459199 - DNA, 25 bp, Homo sapien
tattgacagtgtagaaaaaacccag

SEQ ID NO: 4459200 - DNA, 25 bp, Homo sapien
gaaagacaccaaacacgacatatag

SEQ ID NO: 4459201 - DNA, 25 bp, Homo sapien
tctcatacatcatggaagcagaggt

SEQ ID NO: 4459202 - DNA, 25 bp, Homo sapien
aagtgttgataaacaagcactctca

SEQ ID NO: 4459203 - DNA, 25 bp, Homo sapien
cgtaccttataactgagcaattcca

SEQ ID NO: 4459204 - DNA, 25 bp, Homo sapien
tacacaaagatgcttactgaagcat

SEQ ID NO: 4459205 - DNA, 25 bp, Homo sapien
cctgtggtcctgtctactgtggata

SEQ ID NO: 4459206 - DNA, 25 bp, Homo sapien
ctgtggataaggatgctgtgtgctt

SEQ ID NO: 4459207 - DNA, 25 bp, Homo sapien
tgagtccagcgtggtctgctgctgc

SEQ ID NO: 4459208 - DNA, 25 bp, Homo sapien
cttgtggcagctctagaaggtctgc

SEQ ID NO: 4459209 - DNA, 25 bp, Homo sapien
gctgtgtctacccatctctctatca

SEQ ID NO: 4459210 - DNA, 25 bp, Homo sapien
tctccatttcccagatgtccttaat

SEQ ID NO: 4459211 - DNA, 25 bp, Homo sapien
ctttgcaaatgctgtgtctacccat

SEQ ID NO: 4459212 - DNA, 25 bp, Homo sapien
aaccctggttcaagaactggttctg

SEQ ID NO: 4459213 - DNA, 25 bp, Homo sapien
gtgtatcttccttgactaatattct

SEQ ID NO: 4459214 - DNA, 25 bp, Homo sapien
gtatcttccttgactaatattctca

SEQ ID NO: 4459215 - DNA, 25 bp, Homo sapien
cagagttctaatgtcaatactaggg

SEQ ID NO: 4459216 - DNA, 25 bp, Homo sapien
ttatttaagttgctcccacagagtt

SEQ ID NO: 4459217 - DNA, 25 bp, Homo sapien
gtgtccttagctgcggctgccaagc

SEQ ID NO: 4459218 - DNA, 25 bp, Homo sapien
ggagcccatcttcccgcttttacta

SEQ ID NO: 4459219 - DNA, 25 bp, Homo sapien
ggaactgcggtactgagggctgtaa

SEQ ID NO: 4459220 - DNA, 25 bp, Homo sapien
gcaagttcatggaactgcggtactg

SEQ ID NO: 4459221 - DNA, 25 bp, Homo sapien
ttgttgtgagtgacaggagactgaa

SEQ ID NO: 4459222 - DNA, 25 bp, Homo sapien
tgttgtgagtgacaggagactgaac

SEQ ID NO: 4459223 - DNA, 25 bp, Homo sapien
cttgttgtgagtgacaggagactga

SEQ ID NO: 4459224 - DNA, 25 bp, Homo sapien
gccaggccacttaaacatttgccgg

SEQ ID NO: 4459225 - DNA, 25 bp, Homo sapien
aacatttgccgggactgactcaagt

SEQ ID NO: 4459226 - DNA, 25 bp, Homo sapien
actgactcaagtccaaacaacgagg

SEQ ID NO: 4459227 - DNA, 25 bp, Homo sapien
cacttaaacatttgccgggactgac

SEQ ID NO: 4459228 - DNA, 25 bp, Homo sapien
gaaagctctgtctctaacaggtgat

SEQ ID NO: 4459229 - DNA, 25 bp, Homo sapien
cacatcatcgacctttgagcaagca

SEQ ID NO: 4459230 - DNA, 25 bp, Homo sapien
tcaatttccacagaatgtcaggatc

SEQ ID NO: 4459231 - DNA, 25 bp, Homo sapien
gctgtgctgctgacatctactgaga

SEQ ID NO: 4459232 - DNA, 25 bp, Homo sapien
tctccaaggcagtgtcaaagctact

SEQ ID NO: 4459233 - DNA, 25 bp, Homo sapien
gctgcagaccatacaatccttattg

SEQ ID NO: 4459234 - DNA, 25 bp, Homo sapien
caaggtctttgaacctaaaggcact

SEQ ID NO: 4459235 - DNA, 25 bp, Homo sapien
tgcccaggatatccggagtttgtct

SEQ ID NO: 4459236 - DNA, 25 bp, Homo sapien
tggataacagccgacgaggctgctg

SEQ ID NO: 4459237 - DNA, 25 bp, Homo sapien
aaaagcttccgagccgtcccacata

SEQ ID NO: 4459238 - DNA, 25 bp, Homo sapien
ggagggctgcgccagaaaagcttcc

SEQ ID NO: 4459239 - DNA, 25 bp, Homo sapien
gctgcctgagggctcccgtgaggat

SEQ ID NO: 4459240 - DNA, 25 bp, Homo sapien
atggcaaatatgaagcgagttcagg

SEQ ID NO: 4459241 - DNA, 25 bp, Homo sapien
gaagcaattcccatcgacaggaagg

SEQ ID NO: 4459242 - DNA, 25 bp, Homo sapien
aatatgaagcgagttcaggagaagt

SEQ ID NO: 4459243 - DNA, 25 bp, Homo sapien
attcccatcgacaggaaggctgtag

SEQ ID NO: 4459244 - DNA, 25 bp, Homo sapien
tgtaaaataaacacagggctctgaa

SEQ ID NO: 4459245 - DNA, 25 bp, Homo sapien
gttgtaaaataaacacagggctctg

SEQ ID NO: 4459246 - DNA, 25 bp, Homo sapien
ttgtaaaataaacacagggctctga

SEQ ID NO: 4459247 - DNA, 25 bp, Homo sapien
tagtctggggccttggtgactattt

SEQ ID NO: 4459248 - DNA, 25 bp, Homo sapien
ctagtctggggccttggtgactatt

SEQ ID NO: 4459249 - DNA, 25 bp, Homo sapien
tccaagtgtacagagcgtgtgctaa

SEQ ID NO: 4459250 - DNA, 25 bp, Homo sapien
cgtgtgctaagtatcagaggcccag

SEQ ID NO: 4459251 - DNA, 25 bp, Homo sapien
tgcacctagggcattctggagggct

SEQ ID NO: 4459252 - DNA, 25 bp, Homo sapien
caatgagtgattagctgcacctagg

SEQ ID NO: 4459253 - DNA, 25 bp, Homo sapien
gggctttagagccaaccgtgactca

SEQ ID NO: 4459254 - DNA, 25 bp, Homo sapien
gttggtcactggctctaattggtcc

SEQ ID NO: 4459255 - DNA, 25 bp, Homo sapien
ttggtccatggacaggctagacggc

SEQ ID NO: 4459256 - DNA, 25 bp, Homo sapien
tggaaagatacccagctctctggag

SEQ ID NO: 4459257 - DNA, 25 bp, Homo sapien
taaactacaggttagactgagccac

SEQ ID NO: 4459258 - DNA, 25 bp, Homo sapien
gtcaccgtgggaaactgtatcagcc

SEQ ID NO: 4459259 - DNA, 25 bp, Homo sapien
gatttgctagcctgtcagagccagg

SEQ ID NO: 4459260 - DNA, 25 bp, Homo sapien
tgacacaacttgaggcattccgagg

SEQ ID NO: 4459261 - DNA, 25 bp, Homo sapien
gccttgttgatttataggaagaccc

SEQ ID NO: 4459262 - DNA, 25 bp, Homo sapien
tgcagccaagtctgtgatagagaca

SEQ ID NO: 4459263 - DNA, 25 bp, Homo sapien
aaaacatttaacctttgcagccaag

SEQ ID NO: 4459264 - DNA, 25 bp, Homo sapien
acaggaaaggtcttgatgggccttg

SEQ ID NO: 4459265 - DNA, 25 bp, Homo sapien
ctgcaatgagcaaggtgcccctaca

SEQ ID NO: 4459266 - DNA, 25 bp, Homo sapien
gcaatgagcaaggtgcccctacacc

SEQ ID NO: 4459267 - DNA, 25 bp, Homo sapien
aatgagcaaggtgcccctacaccag

SEQ ID NO: 4459268 - DNA, 25 bp, Homo sapien
tgcaatgagcaaggtgcccctacac

SEQ ID NO: 4459269 - DNA, 25 bp, Homo sapien
ttcaaaagtactgaagatggcctcc

SEQ ID NO: 4459270 - DNA, 25 bp, Homo sapien
tccacatcgtcctggcttccgccac

SEQ ID NO: 4459271 - DNA, 25 bp, Homo sapien
ctggcttccgccactcactctgccc

SEQ ID NO: 4459272 - DNA, 25 bp, Homo sapien
atcgtcctggcttccgccactcact

SEQ ID NO: 4459273 - DNA, 25 bp, Homo sapien
tcgtgaccctcctctatgatccaga

SEQ ID NO: 4459274 - DNA, 25 bp, Homo sapien
gaatgggacaaagggtattcgtgac

SEQ ID NO: 4459275 - DNA, 25 bp, Homo sapien
caaagggtattcgtgaccctcctct

SEQ ID NO: 4459276 - DNA, 25 bp, Homo sapien
gggtattcgtgaccctcctctatga

SEQ ID NO: 4459277 - DNA, 25 bp, Homo sapien
agcttgtgagtccggaccagaggct

SEQ ID NO: 4459278 - DNA, 25 bp, Homo sapien
cttgtgagtccggaccagaggctgc

SEQ ID NO: 4459279 - DNA, 25 bp, Homo sapien
ggagcttgtgagtccggaccagagg

SEQ ID NO: 4459280 - DNA, 25 bp, Homo sapien
tgtgagtccggaccagaggctgcat

SEQ ID NO: 4459281 - DNA, 25 bp, Homo sapien
ctgtctccaatgtagcaagcatgag

SEQ ID NO: 4459282 - DNA, 25 bp, Homo sapien
tcttctgtgggaatctcagcagcca

SEQ ID NO: 4459283 - DNA, 25 bp, Homo sapien
cactataatggactgtggccctggt

SEQ ID NO: 4459284 - DNA, 25 bp, Homo sapien
gcatgaggatgctcaatattggctc

SEQ ID NO: 4459285 - DNA, 25 bp, Homo sapien
tggtttaatcacagaacataacgtc

SEQ ID NO: 4459286 - DNA, 25 bp, Homo sapien
gaacataacgtctccaggacctggt

SEQ ID NO: 4459287 - DNA, 25 bp, Homo sapien
gacaggaagggattgtcacggtcat

SEQ ID NO: 4459288 - DNA, 25 bp, Homo sapien
gattgtcacggtcattgtgtttcct

SEQ ID NO: 4459289 - DNA, 25 bp, Homo sapien
aagagctggagtattggtgcttgca

SEQ ID NO: 4459290 - DNA, 25 bp, Homo sapien
aaggcggcagccaggtgagcaaggt

SEQ ID NO: 4459291 - DNA, 25 bp, Homo sapien
tggattccgggctgtggtaacagca

SEQ ID NO: 4459292 - DNA, 25 bp, Homo sapien
ggaaagagagccctaaagagctgga

SEQ ID NO: 4459293 - DNA, 25 bp, Homo sapien
ttccgcagtcttgaggcggcagcac

SEQ ID NO: 4459294 - DNA, 25 bp, Homo sapien
ttgaggcggcagcaccaccttttgc

SEQ ID NO: 4459295 - DNA, 25 bp, Homo sapien
ttttgccccctgctgaggcacggag

SEQ ID NO: 4459296 - DNA, 25 bp, Homo sapien
cacagttcagccttccgcagtcttg

SEQ ID NO: 4459297 - DNA, 25 bp, Homo sapien
tgccttgttctagaagaacttgtgg

SEQ ID NO: 4459298 - DNA, 25 bp, Homo sapien
ccttgttctagaagaacttgtggtg

SEQ ID NO: 4459299 - DNA, 25 bp, Homo sapien
gccttgttctagaagaacttgtggt

SEQ ID NO: 4459300 - DNA, 25 bp, Homo sapien
gagtttaggacacccatacactggg

SEQ ID NO: 4459301 - DNA, 25 bp, Homo sapien
tctttgcatcccaccaagagagggc

SEQ ID NO: 4459302 - DNA, 25 bp, Homo sapien
agagagggcttcagtgtacaccttg

SEQ ID NO: 4459303 - DNA, 25 bp, Homo sapien
caccggtgtgatagatccctcgaca

SEQ ID NO: 4459304 - DNA, 25 bp, Homo sapien
gaatgaaatcccagagactgtggct

SEQ ID NO: 4459305 - DNA, 25 bp, Homo sapien
catgtgaagcttgttggatgccagc

SEQ ID NO: 4459306 - DNA, 25 bp, Homo sapien
tagctaatgactcaccaaggaagat

SEQ ID NO: 4459307 - DNA, 25 bp, Homo sapien
gaactgagaattccccattggctct

SEQ ID NO: 4459308 - DNA, 25 bp, Homo sapien
ggaggatggacctgaaattctgtct

SEQ ID NO: 4459309 - DNA, 25 bp, Homo sapien
tgaaagcaatacctggacttggagg

SEQ ID NO: 4459310 - DNA, 25 bp, Homo sapien
ctgtgaaagcaatacctggacttgg

SEQ ID NO: 4459311 - DNA, 25 bp, Homo sapien
gaaagcaatacctggacttggagga

SEQ ID NO: 4459312 - DNA, 25 bp, Homo sapien
aaccacaaccggctcattctcagca

SEQ ID NO: 4459313 - DNA, 25 bp, Homo sapien
tcagctcttgtaagtgtgtagacag

SEQ ID NO: 4459314 - DNA, 25 bp, Homo sapien
agtgcatctctacatacaccaacca

SEQ ID NO: 4459315 - DNA, 25 bp, Homo sapien
cagaatcttggatagtgcaggggca

SEQ ID NO: 4459316 - DNA, 25 bp, Homo sapien
tcagctttggagcaagcatgaagcc

SEQ ID NO: 4459317 - DNA, 25 bp, Homo sapien
agcatgaagcctgcacctttcataa

SEQ ID NO: 4459318 - DNA, 25 bp, Homo sapien
tttcataattgtgatgggatccaga

SEQ ID NO: 4459319 - DNA, 25 bp, Homo sapien
tgcacctttcataattgtgatggga

SEQ ID NO: 4459320 - DNA, 25 bp, Homo sapien
ttccatccgttttgtatcctggctc

SEQ ID NO: 4459321 - DNA, 25 bp, Homo sapien
tttggggacagtctgctaaaaggtg

SEQ ID NO: 4459322 - DNA, 25 bp, Homo sapien
ggacagtctgctaaaaggtgggacc

SEQ ID NO: 4459323 - DNA, 25 bp, Homo sapien
tcttcttttccatccgttttgtatc

SEQ ID NO: 4459324 - DNA, 25 bp, Homo sapien
ccagtgaaatggagatgtaccttct

SEQ ID NO: 4459325 - DNA, 25 bp, Homo sapien
tgaagcttcttactccaggtaagaa

SEQ ID NO: 4459326 - DNA, 25 bp, Homo sapien
cctggaaggtactatcactcttgaa

SEQ ID NO: 4459327 - DNA, 25 bp, Homo sapien
ggtactatcactcttgaagctctgc

SEQ ID NO: 4459328 - DNA, 25 bp, Homo sapien
ggcactgggtctcaaacaagaaggc

SEQ ID NO: 4459329 - DNA, 25 bp, Homo sapien
ctgttggagagattgccagtgagga

SEQ ID NO: 4459330 - DNA, 25 bp, Homo sapien
gagattgccagtgaggaacttagct

SEQ ID NO: 4459331 - DNA, 25 bp, Homo sapien
ctcttgttgcccaaagggctcagct

SEQ ID NO: 4459332 - DNA, 25 bp, Homo sapien
gaacattgcaacctcaacaggaaaa

SEQ ID NO: 4459333 - DNA, 25 bp, Homo sapien
acattgcaacctcaacaggaaaaca

SEQ ID NO: 4459334 - DNA, 25 bp, Homo sapien
acagaacattgcaacctcaacagga

SEQ ID NO: 4459335 - DNA, 25 bp, Homo sapien
cagaacattgcaacctcaacaggaa

SEQ ID NO: 4459336 - DNA, 25 bp, Homo sapien
cgagggctggccctcatgaaatgag

SEQ ID NO: 4459337 - DNA, 25 bp, Homo sapien
ggctggccctcatgaaatgaggtga

SEQ ID NO: 4459338 - DNA, 25 bp, Homo sapien
catgaaatgaggtgacccaactcac

SEQ ID NO: 4459339 - DNA, 25 bp, Homo sapien
attaagcctgtggagcctccccgag

SEQ ID NO: 4459340 - DNA, 25 bp, Homo sapien
ctatggaagatgtcgggaaaggcca

SEQ ID NO: 4459341 - DNA, 25 bp, Homo sapien
gaagatgtcgggaaaggccaaacat

SEQ ID NO: 4459342 - DNA, 25 bp, Homo sapien
tggaagatgtcgggaaaggccaaac

SEQ ID NO: 4459343 - DNA, 25 bp, Homo sapien
tatggaagatgtcgggaaaggccaa

SEQ ID NO: 4459344 - DNA, 25 bp, Homo sapien
ttcccacatcaggatctacttctac

SEQ ID NO: 4459345 - DNA, 25 bp, Homo sapien
ccacatcaggatctacttctacctc

SEQ ID NO: 4459346 - DNA, 25 bp, Homo sapien
ctgagtcttttctacacacttctct

SEQ ID NO: 4459347 - DNA, 25 bp, Homo sapien
tgagtcttttctacacacttctctc

SEQ ID NO: 4459348 - DNA, 25 bp, Homo sapien
cctttccccatagaacacgagcagg

SEQ ID NO: 4459349 - DNA, 25 bp, Homo sapien
caaaagccaaattctggctctctga

SEQ ID NO: 4459350 - DNA, 25 bp, Homo sapien
caggttttcatttagcctgtccctt

SEQ ID NO: 4459351 - DNA, 25 bp, Homo sapien
gcaggcagggcgttgccacacacat

SEQ ID NO: 4459352 - DNA, 25 bp, Homo sapien
gagtggtttcacttaggccattcca

SEQ ID NO: 4459353 - DNA, 25 bp, Homo sapien
ttcaggattcgtgagagcagagcct

SEQ ID NO: 4459354 - DNA, 25 bp, Homo sapien
ctgaggaaagcttcaggattcgtga

SEQ ID NO: 4459355 - DNA, 25 bp, Homo sapien
tgaggagtggtttcacttaggccat

SEQ ID NO: 4459356 - DNA, 25 bp, Homo sapien
tccactgagatgcatcgggccatct

SEQ ID NO: 4459357 - DNA, 25 bp, Homo sapien
gaagaggacactctagcttgaaagt

SEQ ID NO: 4459358 - DNA, 25 bp, Homo sapien
agcttgaaagtcttggtactcccca

SEQ ID NO: 4459359 - DNA, 25 bp, Homo sapien
gaaaggggccttccactgagatgca

SEQ ID NO: 4459360 - DNA, 25 bp, Homo sapien
tccttaggagaagcacaactgcaat

SEQ ID NO: 4459361 - DNA, 25 bp, Homo sapien
ttaggagaagcacaactgcaataaa

SEQ ID NO: 4459362 - DNA, 25 bp, Homo sapien
ccttaggagaagcacaactgcaata

SEQ ID NO: 4459363 - DNA, 25 bp, Homo sapien
cttaggagaagcacaactgcaataa

SEQ ID NO: 4459364 - DNA, 25 bp, Homo sapien
tattcactgcatgagcttgcccaag

SEQ ID NO: 4459365 - DNA, 25 bp, Homo sapien
gggatgtggttaaaacttccagctc

SEQ ID NO: 4459366 - DNA, 25 bp, Homo sapien
gaacgtaatagtagtactagccaag

SEQ ID NO: 4459367 - DNA, 25 bp, Homo sapien
gacaccctgggtgaataccatggct

SEQ ID NO: 4459368 - DNA, 25 bp, Homo sapien
tacagtactgtgaacaagacttggc

SEQ ID NO: 4459369 - DNA, 25 bp, Homo sapien
tccaagcggcttgtggcttcatttg

SEQ ID NO: 4459370 - DNA, 25 bp, Homo sapien
tggctcgtgtctccaagcggcttgt

SEQ ID NO: 4459371 - DNA, 25 bp, Homo sapien
tattgccacggcaaatggcattgat

SEQ ID NO: 4459372 - DNA, 25 bp, Homo sapien
tctctagtgtagcaagctggccagt

SEQ ID NO: 4459373 - DNA, 25 bp, Homo sapien
gaaagatatacccaaggaccctgaa

SEQ ID NO: 4459374 - DNA, 25 bp, Homo sapien
taatggtgacgaagagggaacccat

SEQ ID NO: 4459375 - DNA, 25 bp, Homo sapien
ggcaagtagaactctggctgctaga

SEQ ID NO: 4459376 - DNA, 25 bp, Homo sapien
tccattgtgccaggactgccgtgct

SEQ ID NO: 4459377 - DNA, 25 bp, Homo sapien
cttggaaaatctggccaagcctagg

SEQ ID NO: 4459378 - DNA, 25 bp, Homo sapien
gcaggccatggcctacagcttgcag

SEQ ID NO: 4459379 - DNA, 25 bp, Homo sapien
gctttccagtgactccaccagtttg

SEQ ID NO: 4459380 - DNA, 25 bp, Homo sapien
ggctgttgttaagaatccaaggggc

SEQ ID NO: 4459381 - DNA, 25 bp, Homo sapien
gaggacagtgctgtggtagaggctg

SEQ ID NO: 4459382 - DNA, 25 bp, Homo sapien
tgttaagaatccaaggggcaccttc

SEQ ID NO: 4459383 - DNA, 25 bp, Homo sapien
tgttgttaagaatccaaggggcacc

SEQ ID NO: 4459384 - DNA, 25 bp, Homo sapien
tgggaatggccttcacaattgaggt

SEQ ID NO: 4459385 - DNA, 25 bp, Homo sapien
tgtgagtcacttaactagccctaac

SEQ ID NO: 4459386 - DNA, 25 bp, Homo sapien
gccttaattaacatcgattccaggg

SEQ ID NO: 4459387 - DNA, 25 bp, Homo sapien
ggttgaacaatgaactctctgggtg

SEQ ID NO: 4459388 - DNA, 25 bp, Homo sapien
aatcagttagcttggccattccctt

SEQ ID NO: 4459389 - DNA, 25 bp, Homo sapien
ccagctcctaaatcagttagcttgg

SEQ ID NO: 4459390 - DNA, 25 bp, Homo sapien
catgaaattgtaaccagctcctaaa

SEQ ID NO: 4459391 - DNA, 25 bp, Homo sapien
gccatgaaattgtaaccagctccta

SEQ ID NO: 4459392 - DNA, 25 bp, Homo sapien
cggccttgtccatcaaaggctgacc

SEQ ID NO: 4459393 - DNA, 25 bp, Homo sapien
tcctctggggaacacgactagtgac

SEQ ID NO: 4459394 - DNA, 25 bp, Homo sapien
caattcatttggatccggccttgtc

SEQ ID NO: 4459395 - DNA, 25 bp, Homo sapien
cgactagtgaccttttgtctctgta

SEQ ID NO: 4459396 - DNA, 25 bp, Homo sapien
tggtttctgtccgattctcccggtc

SEQ ID NO: 4459397 - DNA, 25 bp, Homo sapien
tgccccggactctgaggctggtttc

SEQ ID NO: 4459398 - DNA, 25 bp, Homo sapien
ttagtatcctcagatggaggccggg

SEQ ID NO: 4459399 - DNA, 25 bp, Homo sapien
gaaggcgtcggaaccgcttagtatc

SEQ ID NO: 4459400 - DNA, 25 bp, Homo sapien
cgtcgtccacggagactttctagaa

SEQ ID NO: 4459401 - DNA, 25 bp, Homo sapien
ccagcaagatagagatgcccggcga

SEQ ID NO: 4459402 - DNA, 25 bp, Homo sapien
ccgatctcttcagcgggtgagggct

SEQ ID NO: 4459403 - DNA, 25 bp, Homo sapien
taagtacaccaaggtaagcggccgc

SEQ ID NO: 4459404 - DNA, 25 bp, Homo sapien
ggatgggagggaacgtgggcgagct

SEQ ID NO: 4459405 - DNA, 25 bp, Homo sapien
ctcgctcgacttcggccgctgtgcg

SEQ ID NO: 4459406 - DNA, 25 bp, Homo sapien
tttctctactccgaagcagcaccgg

SEQ ID NO: 4459407 - DNA, 25 bp, Homo sapien
gagagggcgtagctgccgagagcct

SEQ ID NO: 4459408 - DNA, 25 bp, Homo sapien
tgatttagtccacggagtccaaagc

SEQ ID NO: 4459409 - DNA, 25 bp, Homo sapien
gcagggtctctaggttcttggttta

SEQ ID NO: 4459410 - DNA, 25 bp, Homo sapien
aagggaagggacttatgcaggtctt

SEQ ID NO: 4459411 - DNA, 25 bp, Homo sapien
tccaaagcccattctgaggcagggt

SEQ ID NO: 4459412 - DNA, 25 bp, Homo sapien
aacatatacgaaatggaactgggcc

SEQ ID NO: 4459413 - DNA, 25 bp, Homo sapien
gcccttcagaaaaggcggtgcagct

SEQ ID NO: 4459414 - DNA, 25 bp, Homo sapien
cagtacccaaattgaagcttctcga

SEQ ID NO: 4459415 - DNA, 25 bp, Homo sapien
gattattgatgaagtactgcgctca

SEQ ID NO: 4459416 - DNA, 25 bp, Homo sapien
gacacatgttcttcggagcacttag

SEQ ID NO: 4459417 - DNA, 25 bp, Homo sapien
gcctttcacacagcaaaccgtttgg

SEQ ID NO: 4459418 - DNA, 25 bp, Homo sapien
ggatgtgccacaaacttccgttggg

SEQ ID NO: 4459419 - DNA, 25 bp, Homo sapien
ggttgagacaaaagaggctgccatg

SEQ ID NO: 4459420 - DNA, 25 bp, Homo sapien
ttctggacttctgtaactgatgtgt

SEQ ID NO: 4459421 - DNA, 25 bp, Homo sapien
aactgatgtgtctcccaggatctga

SEQ ID NO: 4459422 - DNA, 25 bp, Homo sapien
ggacttctgtaactgatgtgtctcc

SEQ ID NO: 4459423 - DNA, 25 bp, Homo sapien
tctgtaactgatgtgtctcccagga

SEQ ID NO: 4459424 - DNA, 25 bp, Homo sapien
tccttcccactgctcaagagttgca

SEQ ID NO: 4459425 - DNA, 25 bp, Homo sapien
cagggataagtactgctgggctcaa

SEQ ID NO: 4459426 - DNA, 25 bp, Homo sapien
ctgtctctggacaaatagaagctgg

SEQ ID NO: 4459427 - DNA, 25 bp, Homo sapien
tagaagctggatgcaaaagtacccc

SEQ ID NO: 4459428 - DNA, 25 bp, Homo sapien
ctcatgaggggagatagaaagcaaa

SEQ ID NO: 4459429 - DNA, 25 bp, Homo sapien
catgaggggagatagaaagcaaaaa

SEQ ID NO: 4459430 - DNA, 25 bp, Homo sapien
agcaaaaagggaaggctggaagcac

SEQ ID NO: 4459431 - DNA, 25 bp, Homo sapien
ctactcatgaggggagatagaaagc

SEQ ID NO: 4459432 - DNA, 25 bp, Homo sapien
tcatttgcaattcgtaggccattac

SEQ ID NO: 4459433 - DNA, 25 bp, Homo sapien
atttccatattgcaccaggtctgtc

SEQ ID NO: 4459434 - DNA, 25 bp, Homo sapien
tttctcatttgcaattcgtaggcca

SEQ ID NO: 4459435 - DNA, 25 bp, Homo sapien
ctatttccatattgcaccaggtctg

SEQ ID NO: 4459436 - DNA, 25 bp, Homo sapien
tcaactctcattcctttgaattcca

SEQ ID NO: 4459437 - DNA, 25 bp, Homo sapien
ctgagtcctcactgtttgctcaact

SEQ ID NO: 4459438 - DNA, 25 bp, Homo sapien
tgagtcctcactgtttgctcaactc

SEQ ID NO: 4459439 - DNA, 25 bp, Homo sapien
tgctcaactctcattcctttgaatt

SEQ ID NO: 4459440 - DNA, 25 bp, Homo sapien
tattgattagaggaattggcgggta

SEQ ID NO: 4459441 - DNA, 25 bp, Homo sapien
cctcaggtagcagtcagttattata

SEQ ID NO: 4459442 - DNA, 25 bp, Homo sapien
agattgggggcatcatcctcacgcc

SEQ ID NO: 4459443 - DNA, 25 bp, Homo sapien
cttcctaggaactgaactgatcctg

SEQ ID NO: 4459444 - DNA, 25 bp, Homo sapien
tatgaaggtgccagatcataaatct

SEQ ID NO: 4459445 - DNA, 25 bp, Homo sapien
ccttccagaagcgactcaacaaatt

SEQ ID NO: 4459446 - DNA, 25 bp, Homo sapien
aagcgactcaacaaatttccattcc

SEQ ID NO: 4459447 - DNA, 25 bp, Homo sapien
gaaggtgccagatcataaatctctc

SEQ ID NO: 4459448 - DNA, 25 bp, Homo sapien
taatcgtcttctggtggaactgtca

SEQ ID NO: 4459449 - DNA, 25 bp, Homo sapien
tgaatctgcgacttagaacccgaaa

SEQ ID NO: 4459450 - DNA, 25 bp, Homo sapien
gacaatggctcacagattcctggag

SEQ ID NO: 4459451 - DNA, 25 bp, Homo sapien
tacaaatgccgttccaattagaggc

SEQ ID NO: 4459452 - DNA, 25 bp, Homo sapien
ccttttctgctccctcaggctgcat

SEQ ID NO: 4459453 - DNA, 25 bp, Homo sapien
ctgcttgaagctttttcccttttct

SEQ ID NO: 4459454 - DNA, 25 bp, Homo sapien
tttcccttttctgctccctcaggct

SEQ ID NO: 4459455 - DNA, 25 bp, Homo sapien
tcccttttctgctccctcaggctgc

SEQ ID NO: 4459456 - DNA, 25 bp, Homo sapien
ttctttcgctaagctgctcttcaag

SEQ ID NO: 4459457 - DNA, 25 bp, Homo sapien
tcagagagggtttctttcgctaagc

SEQ ID NO: 4459458 - DNA, 25 bp, Homo sapien
ccaagaactcagagagggtttcttt

SEQ ID NO: 4459459 - DNA, 25 bp, Homo sapien
tcaagatgaacgtgcccaagaactc

SEQ ID NO: 4459460 - DNA, 25 bp, Homo sapien
tattgggtctgaatgtaggaaatca

SEQ ID NO: 4459461 - DNA, 25 bp, Homo sapien
gcattattgggtctgaatgtaggaa

SEQ ID NO: 4459462 - DNA, 25 bp, Homo sapien
cagctagggaggcattattgggtct

SEQ ID NO: 4459463 - DNA, 25 bp, Homo sapien
cagcctggcagctagggaggcatta

SEQ ID NO: 4459464 - DNA, 25 bp, Homo sapien
gttagattagtttgagatgctcccc

SEQ ID NO: 4459465 - DNA, 25 bp, Homo sapien
tgtaccagtccgtggcccatgtgtt

SEQ ID NO: 4459466 - DNA, 25 bp, Homo sapien
tttctcttaatgctaccagtaggcc

SEQ ID NO: 4459467 - DNA, 25 bp, Homo sapien
tccccataagagcagtttttgaaag

SEQ ID NO: 4459468 - DNA, 25 bp, Homo sapien
ccacactagtaaaggtgaaaggcct

SEQ ID NO: 4459469 - DNA, 25 bp, Homo sapien
tacgtatcccaatgactaaaaggcc

SEQ ID NO: 4459470 - DNA, 25 bp, Homo sapien
tcccaatgactaaaaggccaaatta

SEQ ID NO: 4459471 - DNA, 25 bp, Homo sapien
ggtgaaaggcctacgtatcccaatg

SEQ ID NO: 4459472 - DNA, 25 bp, Homo sapien
taccatggtgataacacacctgggc

SEQ ID NO: 4459473 - DNA, 25 bp, Homo sapien
ggagctgttgactcctgtcttaagg

SEQ ID NO: 4459474 - DNA, 25 bp, Homo sapien
tgtggctaccatcaaaggaaggact

SEQ ID NO: 4459475 - DNA, 25 bp, Homo sapien
ggatgcagtcctagctcctggagaa

SEQ ID NO: 4459476 - DNA, 25 bp, Homo sapien
caaatattatcaaagcttattgatt

SEQ ID NO: 4459477 - DNA, 25 bp, Homo sapien
tcaaatattatcaaagcttattgat

SEQ ID NO: 4459478 - DNA, 25 bp, Homo sapien
tattatcaaagcttattgattggaa

SEQ ID NO: 4459479 - DNA, 25 bp, Homo sapien
atcaaagcttattgattggaagtca

SEQ ID NO: 4459480 - DNA, 25 bp, Homo sapien
ttggtaaatatagtctatcataatc

SEQ ID NO: 4459481 - DNA, 25 bp, Homo sapien
tgagtcgaaatcatttattttaact

SEQ ID NO: 4459482 - DNA, 25 bp, Homo sapien
tggtaaatatagtctatcataatct

SEQ ID NO: 4459483 - DNA, 25 bp, Homo sapien
tcataatctaatgagtcgaaatcat

SEQ ID NO: 4459484 - DNA, 25 bp, Homo sapien
taagaagtttcagacttctgttatt

SEQ ID NO: 4459485 - DNA, 25 bp, Homo sapien
gtagataagaagtttcagacttctg

SEQ ID NO: 4459486 - DNA, 25 bp, Homo sapien
gtttcagacttctgttattagatcc

SEQ ID NO: 4459487 - DNA, 25 bp, Homo sapien
gaagtttcagacttctgttattaga

SEQ ID NO: 4459488 - DNA, 25 bp, Homo sapien
ccgattattaggtgcttaattgggt

SEQ ID NO: 4459489 - DNA, 25 bp, Homo sapien
tgccgattattaggtgcttaattgg

SEQ ID NO: 4459490 - DNA, 25 bp, Homo sapien
tgttaataataatcagttgtgaagc

SEQ ID NO: 4459491 - DNA, 25 bp, Homo sapien
taatcagttgtgaagcgaggttgtc

SEQ ID NO: 4459492 - DNA, 25 bp, Homo sapien
ggtagctcaggagatcaggtgaaaa

SEQ ID NO: 4459493 - DNA, 25 bp, Homo sapien
gaggaggagaattaggcctagaata

SEQ ID NO: 4459494 - DNA, 25 bp, Homo sapien
gagatccctgaagggttattagatc

SEQ ID NO: 4459495 - DNA, 25 bp, Homo sapien
tgtagtaagcgtggaaagtgatttt

SEQ ID NO: 4459496 - DNA, 25 bp, Homo sapien
cttctgactcatggcttctattgcc

SEQ ID NO: 4459497 - DNA, 25 bp, Homo sapien
tctgactcatggcttctattgccat

SEQ ID NO: 4459498 - DNA, 25 bp, Homo sapien
ttctgactcatggcttctattgcca

SEQ ID NO: 4459499 - DNA, 25 bp, Homo sapien
ggaaataatcgagcacagtagcagt

SEQ ID NO: 4459500 - DNA, 25 bp, Homo sapien
gggaaaggccatttgtaccatgcat

SEQ ID NO: 4459501 - DNA, 25 bp, Homo sapien
ttgtggctcccagtataaaagcagg

SEQ ID NO: 4459502 - DNA, 25 bp, Homo sapien
taaacagagcttatgccttcccaac

SEQ ID NO: 4459503 - DNA, 25 bp, Homo sapien
ctccaaaacgtcctcgactgagaat

SEQ ID NO: 4459504 - DNA, 25 bp, Homo sapien
tgcaactgccattgaaaatccaaca

SEQ ID NO: 4459505 - DNA, 25 bp, Homo sapien
cacataaatggccattgcaactgcc

SEQ ID NO: 4459506 - DNA, 25 bp, Homo sapien
tgatagtgatgacccctccaaaacg

SEQ ID NO: 4459507 - DNA, 25 bp, Homo sapien
catagtaaatgccaaagacggttgc

SEQ ID NO: 4459508 - DNA, 25 bp, Homo sapien
catttcatccgtccaaagagacaca

SEQ ID NO: 4459509 - DNA, 25 bp, Homo sapien
taaatgccaaagacggttgcagccc

SEQ ID NO: 4459510 - DNA, 25 bp, Homo sapien
gaactgggctcccacataaaatggc

SEQ ID NO: 4459511 - DNA, 25 bp, Homo sapien
tgcaaaaatgtgtgctgttgcattt

SEQ ID NO: 4459512 - DNA, 25 bp, Homo sapien
ttcgccagagatagatacggagctg

SEQ ID NO: 4459513 - DNA, 25 bp, Homo sapien
cagcagttttccaccagcaaaggac

SEQ ID NO: 4459514 - DNA, 25 bp, Homo sapien
tgatctgcaaatgcgttcgccagag

SEQ ID NO: 4459515 - DNA, 25 bp, Homo sapien
tctggagtcaaagatggcaaagacg

SEQ ID NO: 4459516 - DNA, 25 bp, Homo sapien
gactcaggtctcgagctgggttcat

SEQ ID NO: 4459517 - DNA, 25 bp, Homo sapien
gccactgttcagtcccagggaggaa

SEQ ID NO: 4459518 - DNA, 25 bp, Homo sapien
gatggcaatgggctctaggcctctg

SEQ ID NO: 4459519 - DNA, 25 bp, Homo sapien
tgcttaacagcattcctggcgtcta

SEQ ID NO: 4459520 - DNA, 25 bp, Homo sapien
caagagatccatcctagttgcggac

SEQ ID NO: 4459521 - DNA, 25 bp, Homo sapien
caggtccagccgtgacaaccaaaaa

SEQ ID NO: 4459522 - DNA, 25 bp, Homo sapien
tccattggaaagatacaagagatcc

SEQ ID NO: 4459523 - DNA, 25 bp, Homo sapien
agatgtcactcttaccacacggcag

SEQ ID NO: 4459524 - DNA, 25 bp, Homo sapien
cttgcagggttgatggaagagcact

SEQ ID NO: 4459525 - DNA, 25 bp, Homo sapien
cctaagtggtctccgaagtcctcca

SEQ ID NO: 4459526 - DNA, 25 bp, Homo sapien
cagcgaggatgctgtactcggccgc

SEQ ID NO: 4459527 - DNA, 25 bp, Homo sapien
ccccattccccatcgtgagctccat

SEQ ID NO: 4459528 - DNA, 25 bp, Homo sapien
ccattccccatcgtgagctccattt

SEQ ID NO: 4459529 - DNA, 25 bp, Homo sapien
ttccccatcgtgagctccatttcct

SEQ ID NO: 4459530 - DNA, 25 bp, Homo sapien
cattccccatcgtgagctccatttc

SEQ ID NO: 4459531 - DNA, 25 bp, Homo sapien
aactaagtctaatctcaagattatc

SEQ ID NO: 4459532 - DNA, 25 bp, Homo sapien
taagtctaatctcaagattatctag

SEQ ID NO: 4459533 - DNA, 25 bp, Homo sapien
actaagtctaatctcaagattatct

SEQ ID NO: 4459534 - DNA, 25 bp, Homo sapien
aaactaagtctaatctcaagattat

SEQ ID NO: 4459535 - DNA, 25 bp, Homo sapien
taaaggaaataagcaggacacaaga

SEQ ID NO: 4459536 - DNA, 25 bp, Homo sapien
aaggaaataagcaggacacaagaac

SEQ ID NO: 4459537 - DNA, 25 bp, Homo sapien
gaaagaacgataaaggaaataagca

SEQ ID NO: 4459538 - DNA, 25 bp, Homo sapien
aagaacgataaaggaaataagcagg

SEQ ID NO: 4459539 - DNA, 25 bp, Homo sapien
cattacagcaaagctatagttctgg

SEQ ID NO: 4459540 - DNA, 25 bp, Homo sapien
tcctgtggattacaagcagaatgtg

SEQ ID NO: 4459541 - DNA, 25 bp, Homo sapien
taagatcttagcttgaggctaccct

SEQ ID NO: 4459542 - DNA, 25 bp, Homo sapien
atcgttaagattgagggcccctaag

SEQ ID NO: 4459543 - DNA, 25 bp, Homo sapien
catagatgaggcctccaatgacagc

SEQ ID NO: 4459544 - DNA, 25 bp, Homo sapien
aatgacagcaccaaccaaagggccc

SEQ ID NO: 4459545 - DNA, 25 bp, Homo sapien
ctctggatggtggatttcaatgaca

SEQ ID NO: 4459546 - DNA, 25 bp, Homo sapien
caaagggcccactacaggaatccac

SEQ ID NO: 4459547 - DNA, 25 bp, Homo sapien
gtggattccacctcaggcttacaag

SEQ ID NO: 4459548 - DNA, 25 bp, Homo sapien
tgactgcaaatccagagctgagcat

SEQ ID NO: 4459549 - DNA, 25 bp, Homo sapien
cccatatggctagcagacaaaactg

SEQ ID NO: 4459550 - DNA, 25 bp, Homo sapien
ttacctagcaagaattcccatcgag

SEQ ID NO: 4459551 - DNA, 25 bp, Homo sapien
gtgcagctgaaaccacccaaatggg

SEQ ID NO: 4459552 - DNA, 25 bp, Homo sapien
tgaaaccacccaaatgggactatcg

SEQ ID NO: 4459553 - DNA, 25 bp, Homo sapien
ccacccaaatgggactatcgtcaag

SEQ ID NO: 4459554 - DNA, 25 bp, Homo sapien
aaccacccaaatgggactatcgtca

SEQ ID NO: 4459555 - DNA, 25 bp, Homo sapien
catagcgggaactggaagcttaacc

SEQ ID NO: 4459556 - DNA, 25 bp, Homo sapien
tgatatcagcacaaagcagttggga

SEQ ID NO: 4459557 - DNA, 25 bp, Homo sapien
gattcagctagaccaggatccagtg

SEQ ID NO: 4459558 - DNA, 25 bp, Homo sapien
gatcaagacttagcaagaccagagg

SEQ ID NO: 4459559 - DNA, 25 bp, Homo sapien
agcctgaggtggagggcggagtgcc

SEQ ID NO: 4459560 - DNA, 25 bp, Homo sapien
ccagggctcccgcagtgtttcctaa

SEQ ID NO: 4459561 - DNA, 25 bp, Homo sapien
tctgggctctggagcgtccctcaca

SEQ ID NO: 4459562 - DNA, 25 bp, Homo sapien
gatccccatgaacagtggtctgggc

SEQ ID NO: 4459563 - DNA, 25 bp, Homo sapien
gcatcgggggtactcgggccctgga

SEQ ID NO: 4459564 - DNA, 25 bp, Homo sapien
tgcatcgggggtactcgggccctgg

SEQ ID NO: 4459565 - DNA, 25 bp, Homo sapien
ttgcatcgggggtactcgggccctg

SEQ ID NO: 4459566 - DNA, 25 bp, Homo sapien
gtggtgagttggcatggtagcagag

SEQ ID NO: 4459567 - DNA, 25 bp, Homo sapien
ggtagcagagggaacgtggggcttc

SEQ ID NO: 4459568 - DNA, 25 bp, Homo sapien
cttgtggtgagttggcatggtagca

SEQ ID NO: 4459569 - DNA, 25 bp, Homo sapien
tggggcttcaggttactgggcttgg

SEQ ID NO: 4459570 - DNA, 25 bp, Homo sapien
tgttccatcggctgttggcttcaca

SEQ ID NO: 4459571 - DNA, 25 bp, Homo sapien
ttccatcggctgttggcttcacatc

SEQ ID NO: 4459572 - DNA, 25 bp, Homo sapien
gttccatcggctgttggcttcacat

SEQ ID NO: 4459573 - DNA, 25 bp, Homo sapien
gtggctggcttttgctggcctgatc

SEQ ID NO: 4459574 - DNA, 25 bp, Homo sapien
tggctggcttttgctggcctgatct

SEQ ID NO: 4459575 - DNA, 25 bp, Homo sapien
gtaggaggtggctggcttttgctgg

SEQ ID NO: 4459576 - DNA, 25 bp, Homo sapien
gaggtggctggcttttgctggcctg

SEQ ID NO: 4459577 - DNA, 25 bp, Homo sapien
ggctctggctatgcaggatggcatt

SEQ ID NO: 4459578 - DNA, 25 bp, Homo sapien
ctctggctatgcaggatggcattag

SEQ ID NO: 4459579 - DNA, 25 bp, Homo sapien
caggctctggctatgcaggatggca

SEQ ID NO: 4459580 - DNA, 25 bp, Homo sapien
gctctggctatgcaggatggcatta

SEQ ID NO: 4459581 - DNA, 25 bp, Homo sapien
caaacattcttggaggcttagccgg

SEQ ID NO: 4459582 - DNA, 25 bp, Homo sapien
catccagattcttcaggtcgtatct

SEQ ID NO: 4459583 - DNA, 25 bp, Homo sapien
tagccggtgccaacactttactttg

SEQ ID NO: 4459584 - DNA, 25 bp, Homo sapien
ggtagaaactacagcacaggagcca

SEQ ID NO: 4459585 - DNA, 25 bp, Homo sapien
tggagtttgagcagcttctgaattt

SEQ ID NO: 4459586 - DNA, 25 bp, Homo sapien
acaaggctgcatgctgcttggaggc

SEQ ID NO: 4459587 - DNA, 25 bp, Homo sapien
gcggtgcagtttctgacaaggctgc

SEQ ID NO: 4459588 - DNA, 25 bp, Homo sapien
agtttctgacaaggctgcatgctgc

SEQ ID NO: 4459589 - DNA, 25 bp, Homo sapien
atgttccctctaggagaggcaaagc

SEQ ID NO: 4459590 - DNA, 25 bp, Homo sapien
gtgatgttccctctaggagaggcaa

SEQ ID NO: 4459591 - DNA, 25 bp, Homo sapien
tgttccctctaggagaggcaaagcc

SEQ ID NO: 4459592 - DNA, 25 bp, Homo sapien
acaaaggtgaggggttgcacatgga

SEQ ID NO: 4459593 - DNA, 25 bp, Homo sapien
cacaaaggtgaggggttgcacatgg

SEQ ID NO: 4459594 - DNA, 25 bp, Homo sapien
caaaggtgaggggttgcacatggac

SEQ ID NO: 4459595 - DNA, 25 bp, Homo sapien
acacaaaggtgaggggttgcacatg

SEQ ID NO: 4459596 - DNA, 25 bp, Homo sapien
tcaagtctaatctacttagtgacat

SEQ ID NO: 4459597 - DNA, 25 bp, Homo sapien
gcaggttccatcaagtctaatctac

SEQ ID NO: 4459598 - DNA, 25 bp, Homo sapien
ccctggatcccgctgtatcttgctg

SEQ ID NO: 4459599 - DNA, 25 bp, Homo sapien
gctgggacataatcagcaggttcca

SEQ ID NO: 4459600 - DNA, 25 bp, Homo sapien
agaggcgagtcctcttcagtgggcc

SEQ ID NO: 4459601 - DNA, 25 bp, Homo sapien
cttcagtgggcccagaatataaaat

SEQ ID NO: 4459602 - DNA, 25 bp, Homo sapien
gaggcgagtcctcttcagtgggccc

SEQ ID NO: 4459603 - DNA, 25 bp, Homo sapien
ttcagtgggcccagaatataaaatc

SEQ ID NO: 4459604 - DNA, 25 bp, Homo sapien
catggtctcagacaccttgggtgct

SEQ ID NO: 4459605 - DNA, 25 bp, Homo sapien
gatagcctttctgtccctctcaggg

SEQ ID NO: 4459606 - DNA, 25 bp, Homo sapien
tagtaagagtgcctcgcctatgccc

SEQ ID NO: 4459607 - DNA, 25 bp, Homo sapien
catctacggcagtgattcaaagacc

SEQ ID NO: 4459608 - DNA, 25 bp, Homo sapien
tgtcagggacgttgcagtcaaatca

SEQ ID NO: 4459609 - DNA, 25 bp, Homo sapien
gactcagtggagacaaagctatgga

SEQ ID NO: 4459610 - DNA, 25 bp, Homo sapien
gatctaacagcttttgactcagtgg

SEQ ID NO: 4459611 - DNA, 25 bp, Homo sapien
ggctgttcattctaaggaccactca

SEQ ID NO: 4459612 - DNA, 25 bp, Homo sapien
gaaaatgcagtcagtggccagagaa

SEQ ID NO: 4459613 - DNA, 25 bp, Homo sapien
tcaaagaagccaagagcacatgccg

SEQ ID NO: 4459614 - DNA, 25 bp, Homo sapien
ttctcgagggaatcagcaaacagct

SEQ ID NO: 4459615 - DNA, 25 bp, Homo sapien
tgtgacaggctcaaactggtgactg

SEQ ID NO: 4459616 - DNA, 25 bp, Homo sapien
tgtttttatctgctgccgcttttat

SEQ ID NO: 4459617 - DNA, 25 bp, Homo sapien
gctgccgcttttatcttatcagacc

SEQ ID NO: 4459618 - DNA, 25 bp, Homo sapien
tctcctggttggcagatagccattg

SEQ ID NO: 4459619 - DNA, 25 bp, Homo sapien
gctttgctatacgtcatcggtgtca

SEQ ID NO: 4459620 - DNA, 25 bp, Homo sapien
aatcccagctttcttgtatgtcctg

SEQ ID NO: 4459621 - DNA, 25 bp, Homo sapien
tttatgagactatacaggtttggag

SEQ ID NO: 4459622 - DNA, 25 bp, Homo sapien
ttagaaccatataccacatgaaggg

SEQ ID NO: 4459623 - DNA, 25 bp, Homo sapien
atactgatcactgcttactcctctg

SEQ ID NO: 4459624 - DNA, 25 bp, Homo sapien
gattcagactggaacttcaccacca

SEQ ID NO: 4459625 - DNA, 25 bp, Homo sapien
tcttcagacctggactcacaccatt

SEQ ID NO: 4459626 - DNA, 25 bp, Homo sapien
ccttggacgtaaatgctgctggttc

SEQ ID NO: 4459627 - DNA, 25 bp, Homo sapien
cttctgaccttggacgtaaatgctg

SEQ ID NO: 4459628 - DNA, 25 bp, Homo sapien
ccccgtgtacatcacctgttgaagg

SEQ ID NO: 4459629 - DNA, 25 bp, Homo sapien
gttatgtgttaacttgatagggtca

SEQ ID NO: 4459630 - DNA, 25 bp, Homo sapien
taaataccatttccgggcatgtctg

SEQ ID NO: 4459631 - DNA, 25 bp, Homo sapien
aagggatgcccagattttttgctaa

SEQ ID NO: 4459632 - DNA, 25 bp, Homo sapien
tccttagtctcatggagtgggcagg

SEQ ID NO: 4459633 - DNA, 25 bp, Homo sapien
tagtctcatggagtgggcaggatat

SEQ ID NO: 4459634 - DNA, 25 bp, Homo sapien
tgaatccttagtctcatggagtggg

SEQ ID NO: 4459635 - DNA, 25 bp, Homo sapien
aatccttagtctcatggagtgggca

SEQ ID NO: 4459636 - DNA, 25 bp, Homo sapien
gacttccaattccttgctggtagga

SEQ ID NO: 4459637 - DNA, 25 bp, Homo sapien
gggtagtgggtgtcattctgtctcc

SEQ ID NO: 4459638 - DNA, 25 bp, Homo sapien
gtaatgaacgaagagtaatggcccc

SEQ ID NO: 4459639 - DNA, 25 bp, Homo sapien
gcatgggtccctacagtctagtgta

SEQ ID NO: 4459640 - DNA, 25 bp, Homo sapien
tctccgtgacaacacgaaggttcat

SEQ ID NO: 4459641 - DNA, 25 bp, Homo sapien
tgtggctctccgtgacaacacgaag

SEQ ID NO: 4459642 - DNA, 25 bp, Homo sapien
cgatgtggctctccgtgacaacacg

SEQ ID NO: 4459643 - DNA, 25 bp, Homo sapien
ggctctccgtgacaacacgaaggtt

SEQ ID NO: 4459644 - DNA, 25 bp, Homo sapien
gactccagaacaaggtctgcatttc

SEQ ID NO: 4459645 - DNA, 25 bp, Homo sapien
ctccagaacaaggtctgcatttctt

SEQ ID NO: 4459646 - DNA, 25 bp, Homo sapien
tcaccttgaccggctccttttcctg

SEQ ID NO: 4459647 - DNA, 25 bp, Homo sapien
actccagaacaaggtctgcatttct

SEQ ID NO: 4459648 - DNA, 25 bp, Homo sapien
gtttatgcctgatgatgcagtctca

SEQ ID NO: 4459649 - DNA, 25 bp, Homo sapien
gagagatacttcctctaatggacat

SEQ ID NO: 4459650 - DNA, 25 bp, Homo sapien
tatgcctgatgatgcagtctcacca

SEQ ID NO: 4459651 - DNA, 25 bp, Homo sapien
tggtctggaagtttcattacccagt

SEQ ID NO: 4459652 - DNA, 25 bp, Homo sapien
ttcgtgtgacctatgctcaggaagc

SEQ ID NO: 4459653 - DNA, 25 bp, Homo sapien
cagactctgtccacgtgcactgaag

SEQ ID NO: 4459654 - DNA, 25 bp, Homo sapien
tagtatcagcatggtggacaggtcg

SEQ ID NO: 4459655 - DNA, 25 bp, Homo sapien
tagggccagtcagagtcttccaact

SEQ ID NO: 4459656 - DNA, 25 bp, Homo sapien
tggcttcgaacacctgacttaaggt

SEQ ID NO: 4459657 - DNA, 25 bp, Homo sapien
aggctggcttcgaacacctgactta

SEQ ID NO: 4459658 - DNA, 25 bp, Homo sapien
gcttcgaacacctgacttaaggtga

SEQ ID NO: 4459659 - DNA, 25 bp, Homo sapien
gctggcttcgaacacctgacttaag

SEQ ID NO: 4459660 - DNA, 25 bp, Homo sapien
aacagctccgatgattcagtcccct

SEQ ID NO: 4459661 - DNA, 25 bp, Homo sapien
ccgatgattcagtcccctcctcaca

SEQ ID NO: 4459662 - DNA, 25 bp, Homo sapien
ctccgatgattcagtcccctcctca

SEQ ID NO: 4459663 - DNA, 25 bp, Homo sapien
aggaacagctccgatgattcagtcc

SEQ ID NO: 4459664 - DNA, 25 bp, Homo sapien
ccagtcccggcaatgaggcggagtt

SEQ ID NO: 4459665 - DNA, 25 bp, Homo sapien
cacactgggcattcggttagggcca

SEQ ID NO: 4459666 - DNA, 25 bp, Homo sapien
gcggagttctgccaagaacaaggca

SEQ ID NO: 4459667 - DNA, 25 bp, Homo sapien
gcctgcaggcacagatctggtggcc

SEQ ID NO: 4459668 - DNA, 25 bp, Homo sapien
atttctgctgggtagtggtcgtcca

SEQ ID NO: 4459669 - DNA, 25 bp, Homo sapien
ggtacagttcatagcaccccaaaac

SEQ ID NO: 4459670 - DNA, 25 bp, Homo sapien
gagcaggactgccagaagtctttac

SEQ ID NO: 4459671 - DNA, 25 bp, Homo sapien
tggtcgtccagatccctccaattgc

SEQ ID NO: 4459672 - DNA, 25 bp, Homo sapien
tgggcccgctgtctttgctggctga

SEQ ID NO: 4459673 - DNA, 25 bp, Homo sapien
cgtaggagtctctaatcaggatgcc

SEQ ID NO: 4459674 - DNA, 25 bp, Homo sapien
tcttgcgctgtctcttgcaggtggg

SEQ ID NO: 4459675 - DNA, 25 bp, Homo sapien
ttacaacacgctcccgtttgctgag

SEQ ID NO: 4459676 - DNA, 25 bp, Homo sapien
tccagaccagtgctaacagagatac

SEQ ID NO: 4459677 - DNA, 25 bp, Homo sapien
tatgcgccaacaaggattacagtga

SEQ ID NO: 4459678 - DNA, 25 bp, Homo sapien
tctagctggagagatatatgcgcca

SEQ ID NO: 4459679 - DNA, 25 bp, Homo sapien
ccccagagaaaggtgatggacccaa

SEQ ID NO: 4459680 - DNA, 25 bp, Homo sapien
cgtctgacaaatgctcaccaaccat

SEQ ID NO: 4459681 - DNA, 25 bp, Homo sapien
ctttgggcccggcactgagtttcat

SEQ ID NO: 4459682 - DNA, 25 bp, Homo sapien
tcttcctttgggcccggcactgagt

SEQ ID NO: 4459683 - DNA, 25 bp, Homo sapien
actgagtttcattcacgtctgacaa

SEQ ID NO: 4459684 - DNA, 25 bp, Homo sapien
cgagccagttgtattccatcaacaa

SEQ ID NO: 4459685 - DNA, 25 bp, Homo sapien
gaacacgagccagttgtattccatc

SEQ ID NO: 4459686 - DNA, 25 bp, Homo sapien
aagtgtctactaagcccatctcctc

SEQ ID NO: 4459687 - DNA, 25 bp, Homo sapien
tcttcctgtgaacacgagccagttg

SEQ ID NO: 4459688 - DNA, 25 bp, Homo sapien
cactagcacatttgagaactccaga

SEQ ID NO: 4459689 - DNA, 25 bp, Homo sapien
tgtcacttggcgactcacaatggcc

SEQ ID NO: 4459690 - DNA, 25 bp, Homo sapien
tcaatggccttatagaacctctggc

SEQ ID NO: 4459691 - DNA, 25 bp, Homo sapien
tagaacctctggcaatcaactgtgt

SEQ ID NO: 4459692 - DNA, 25 bp, Homo sapien
gtggcttccttgttgatgtgatgtc

SEQ ID NO: 4459693 - DNA, 25 bp, Homo sapien
tggtggcttccttgttgatgtgatg

SEQ ID NO: 4459694 - DNA, 25 bp, Homo sapien
gcttccttgttgatgtgatgtccat

SEQ ID NO: 4459695 - DNA, 25 bp, Homo sapien
cttccgggcttggtggcttccttgt

SEQ ID NO: 4459696 - DNA, 25 bp, Homo sapien
gctactgacacattcatggtggggt

SEQ ID NO: 4459697 - DNA, 25 bp, Homo sapien
ctgctactgacacattcatggtggg

SEQ ID NO: 4459698 - DNA, 25 bp, Homo sapien
tgctactgacacattcatggtgggg

SEQ ID NO: 4459699 - DNA, 25 bp, Homo sapien
ccgtggccatactcagatttggaaa

SEQ ID NO: 4459700 - DNA, 25 bp, Homo sapien
gatttggaaaggtcagttccacttc

SEQ ID NO: 4459701 - DNA, 25 bp, Homo sapien
gagatgctgccgtggccatactcag

SEQ ID NO: 4459702 - DNA, 25 bp, Homo sapien
gctgccgtggccatactcagatttg

SEQ ID NO: 4459703 - DNA, 25 bp, Homo sapien
ttctttgcccgctctttcctttcag

SEQ ID NO: 4459704 - DNA, 25 bp, Homo sapien
tttcagcttttgttcaaatgcatgc

SEQ ID NO: 4459705 - DNA, 25 bp, Homo sapien
tcagcttttgttcaaatgcatgcag

SEQ ID NO: 4459706 - DNA, 25 bp, Homo sapien
tcctttcagcttttgttcaaatgca

SEQ ID NO: 4459707 - DNA, 25 bp, Homo sapien
tagcaacgagatcaacctggctaac

SEQ ID NO: 4459708 - DNA, 25 bp, Homo sapien
gatcaacctggctaacactattttg

SEQ ID NO: 4459709 - DNA, 25 bp, Homo sapien
cagtccataaatagcaacgagatca

SEQ ID NO: 4459710 - DNA, 25 bp, Homo sapien
aaggtaacacagtccataaatagca

SEQ ID NO: 4459711 - DNA, 25 bp, Homo sapien
aaagcaagggtagagcccgtggctg

SEQ ID NO: 4459712 - DNA, 25 bp, Homo sapien
gaggtgctccagtttgacctttctg

SEQ ID NO: 4459713 - DNA, 25 bp, Homo sapien
aagcaagggtagagcccgtggctgt

SEQ ID NO: 4459714 - DNA, 25 bp, Homo sapien
ctgaggtgctccagtttgacctttc

SEQ ID NO: 4459715 - DNA, 25 bp, Homo sapien
cctcacacggggcacagtccggttt

SEQ ID NO: 4459716 - DNA, 25 bp, Homo sapien
cacagtccggtttacttgcttttct

SEQ ID NO: 4459717 - DNA, 25 bp, Homo sapien
gcacagtccggtttacttgcttttc

SEQ ID NO: 4459718 - DNA, 25 bp, Homo sapien
cacggggcacagtccggtttacttg

SEQ ID NO: 4459719 - DNA, 25 bp, Homo sapien
tcagaactgagatcgttttggctgc

SEQ ID NO: 4459720 - DNA, 25 bp, Homo sapien
gaactgagatcgttttggctgctga

SEQ ID NO: 4459721 - DNA, 25 bp, Homo sapien
ctgagatcgttttggctgctgaaac

SEQ ID NO: 4459722 - DNA, 25 bp, Homo sapien
tccctcttcatgtcccagcatgggc

SEQ ID NO: 4459723 - DNA, 25 bp, Homo sapien
taccacggacataaaacagactgct

SEQ ID NO: 4459724 - DNA, 25 bp, Homo sapien
ctaccacggacataaaacagactgc

SEQ ID NO: 4459725 - DNA, 25 bp, Homo sapien
acggacataaaacagactgcttgat

SEQ ID NO: 4459726 - DNA, 25 bp, Homo sapien
ccacggacataaaacagactgcttg

SEQ ID NO: 4459727 - DNA, 25 bp, Homo sapien
cagggttaaagacgcagaatgaagc

SEQ ID NO: 4459728 - DNA, 25 bp, Homo sapien
ctgaagagcagggttaaagacgcag

SEQ ID NO: 4459729 - DNA, 25 bp, Homo sapien
taaagacgcagaatgaagctggtct

SEQ ID NO: 4459730 - DNA, 25 bp, Homo sapien
agtaaatacttgatgcctgcatgaa

SEQ ID NO: 4459731 - DNA, 25 bp, Homo sapien
ccttccatgtgacagtcatggcagt

SEQ ID NO: 4459732 - DNA, 25 bp, Homo sapien
gttaagtcatgcaaagtactcaggg

SEQ ID NO: 4459733 - DNA, 25 bp, Homo sapien
gaggacataagacagttcttggctg

SEQ ID NO: 4459734 - DNA, 25 bp, Homo sapien
cttacattgggtcacaggagcgtcc

SEQ ID NO: 4459735 - DNA, 25 bp, Homo sapien
tcacagcttgacttaaattcggcca

SEQ ID NO: 4459736 - DNA, 25 bp, Homo sapien
tggctgcacctggagcttcacagct

SEQ ID NO: 4459737 - DNA, 25 bp, Homo sapien
tatttgctctcatgacgggtatgga

SEQ ID NO: 4459738 - DNA, 25 bp, Homo sapien
aattcggccatgtcaggaatcactc

SEQ ID NO: 4459739 - DNA, 25 bp, Homo sapien
ctttgctggtctctctttccttcat

SEQ ID NO: 4459740 - DNA, 25 bp, Homo sapien
gcttctctctggatgtctttgctgg

SEQ ID NO: 4459741 - DNA, 25 bp, Homo sapien
tctctctggatgtctttgctggtct

SEQ ID NO: 4459742 - DNA, 25 bp, Homo sapien
tctctggatgtctttgctggtctct

SEQ ID NO: 4459743 - DNA, 25 bp, Homo sapien
gggttaatatgatgaccaagttcac

SEQ ID NO: 4459744 - DNA, 25 bp, Homo sapien
gataagctctggtagatcaagcctg

SEQ ID NO: 4459745 - DNA, 25 bp, Homo sapien
cctggatgttttgttattgcatagg

SEQ ID NO: 4459746 - DNA, 25 bp, Homo sapien
cataggggttaatatgatgaccaag

SEQ ID NO: 4459747 - DNA, 25 bp, Homo sapien
tgaccaccaacagatggacagctct

SEQ ID NO: 4459748 - DNA, 25 bp, Homo sapien
cagtgggctgtctcacaataattcc

SEQ ID NO: 4459749 - DNA, 25 bp, Homo sapien
gtgaccaccaacagatggacagctc

SEQ ID NO: 4459750 - DNA, 25 bp, Homo sapien
cttggaggtacccaccttcagtggg

SEQ ID NO: 4459751 - DNA, 25 bp, Homo sapien
ttgtttcagctcttgatagaaatgt

SEQ ID NO: 4459752 - DNA, 25 bp, Homo sapien
cagcaagatccacacttggccaaac

SEQ ID NO: 4459753 - DNA, 25 bp, Homo sapien
tgtttcagctcttgatagaaatgta

SEQ ID NO: 4459754 - DNA, 25 bp, Homo sapien
tatgcagcaagatccacacttggcc

SEQ ID NO: 4459755 - DNA, 25 bp, Homo sapien
tggtcctagtgctgccaaccatggg

SEQ ID NO: 4459756 - DNA, 25 bp, Homo sapien
ctggctgtgtctcttggtcctagtg

SEQ ID NO: 4459757 - DNA, 25 bp, Homo sapien
tagctgcttgcaacaagcaaggaca

SEQ ID NO: 4459758 - DNA, 25 bp, Homo sapien
cactggtcagattgcaacggcccaa

SEQ ID NO: 4459759 - DNA, 25 bp, Homo sapien
tggcttgatgtagggtgggagagca

SEQ ID NO: 4459760 - DNA, 25 bp, Homo sapien
ggcttgatgtagggtgggagagcag

SEQ ID NO: 4459761 - DNA, 25 bp, Homo sapien
ggagttggataacggacagtagaca

SEQ ID NO: 4459762 - DNA, 25 bp, Homo sapien
gttggataacggacagtagacataa

SEQ ID NO: 4459763 - DNA, 25 bp, Homo sapien
tggagttggataacggacagtagac

SEQ ID NO: 4459764 - DNA, 25 bp, Homo sapien
ttctggagttggataacggacagta

SEQ ID NO: 4459765 - DNA, 25 bp, Homo sapien
gatactttgttagggaagactgccc

SEQ ID NO: 4459766 - DNA, 25 bp, Homo sapien
ccacaatgcctattagatactttgt

SEQ ID NO: 4459767 - DNA, 25 bp, Homo sapien
tgttatccactgttcagaccctttc

SEQ ID NO: 4459768 - DNA, 25 bp, Homo sapien
ccccaactgcaaatctaattatatc

SEQ ID NO: 4459769 - DNA, 25 bp, Homo sapien
tgtccaagggcacttgattggataa

SEQ ID NO: 4459770 - DNA, 25 bp, Homo sapien
gaatggagaaacacaggggacttgt

SEQ ID NO: 4459771 - DNA, 25 bp, Homo sapien
aggctttgtccaagggcacttgatt

SEQ ID NO: 4459772 - DNA, 25 bp, Homo sapien
caagggcacttgattggataaagat

SEQ ID NO: 4459773 - DNA, 25 bp, Homo sapien
agcaagctctgtcccatacagtcag

SEQ ID NO: 4459774 - DNA, 25 bp, Homo sapien
cctgtgaggtcgtgtatagaaccac

SEQ ID NO: 4459775 - DNA, 25 bp, Homo sapien
tacaaacggctacgtgtccctgtga

SEQ ID NO: 4459776 - DNA, 25 bp, Homo sapien
cctggcacgctctgaagcaagctct

SEQ ID NO: 4459777 - DNA, 25 bp, Homo sapien
catgcagaagcaggtaataagtgcc

SEQ ID NO: 4459778 - DNA, 25 bp, Homo sapien
ggccaagtgcataaccgggagttct

SEQ ID NO: 4459779 - DNA, 25 bp, Homo sapien
aagaacacgcccctgagtctgtgca

SEQ ID NO: 4459780 - DNA, 25 bp, Homo sapien
cataaggacgtcaaaggatctgaac

SEQ ID NO: 4459781 - DNA, 25 bp, Homo sapien
tctgctattgtacaaggaaagcctc

SEQ ID NO: 4459782 - DNA, 25 bp, Homo sapien
tgtatttgacacacagaacggatca

SEQ ID NO: 4459783 - DNA, 25 bp, Homo sapien
catatgtgactcagtggtatacctc

SEQ ID NO: 4459784 - DNA, 25 bp, Homo sapien
cattctcttctgtccggataccatc

SEQ ID NO: 4459785 - DNA, 25 bp, Homo sapien
cagcaaacagggcaacaggaggatc

SEQ ID NO: 4459786 - DNA, 25 bp, Homo sapien
cccagtctgaaaaacgctatcaaca

SEQ ID NO: 4459787 - DNA, 25 bp, Homo sapien
aggagaatgtccttagtaagaggca

SEQ ID NO: 4459788 - DNA, 25 bp, Homo sapien
gaattgaagtatcatgatgtccaca

SEQ ID NO: 4459789 - DNA, 25 bp, Homo sapien
gaaacaacagtagctaagactggcc

SEQ ID NO: 4459790 - DNA, 25 bp, Homo sapien
tccaccctcctaggtttgagtgatt

SEQ ID NO: 4459791 - DNA, 25 bp, Homo sapien
gattcaaacatgcaacagtcatttg

SEQ ID NO: 4459792 - DNA, 25 bp, Homo sapien
tgtgcaagcagatagctgggtgcaa

SEQ ID NO: 4459793 - DNA, 25 bp, Homo sapien
ggttgtgcctgttttagccatctga

SEQ ID NO: 4459794 - DNA, 25 bp, Homo sapien
tactatgaggcagtgtacctgaggg

SEQ ID NO: 4459795 - DNA, 25 bp, Homo sapien
ccttagtgacaaatgggctgggctc

SEQ ID NO: 4459796 - DNA, 25 bp, Homo sapien
tctgagactttgtacaggaggacag

SEQ ID NO: 4459797 - DNA, 25 bp, Homo sapien
gacccatgtgactgggcatgaccag

SEQ ID NO: 4459798 - DNA, 25 bp, Homo sapien
agaaaattgccatgcactgtggtca

SEQ ID NO: 4459799 - DNA, 25 bp, Homo sapien
gaaagaagcctcttgtgtgtagcag

SEQ ID NO: 4459800 - DNA, 25 bp, Homo sapien
tttgacctgggctgggtactccatg

SEQ ID NO: 4459801 - DNA, 25 bp, Homo sapien
cttttggcttgatctcatagcatgt

SEQ ID NO: 4459802 - DNA, 25 bp, Homo sapien
cacagagcaatttatttaagtgcat

SEQ ID NO: 4459803 - DNA, 25 bp, Homo sapien
gtttccatgccattacatatatttg

SEQ ID NO: 4459804 - DNA, 25 bp, Homo sapien
tatcacacagagcaatttatttaag

SEQ ID NO: 4459805 - DNA, 25 bp, Homo sapien
acggggtgccttgtaggccttcttg

SEQ ID NO: 4459806 - DNA, 25 bp, Homo sapien
agccaagtggcatatcgtaaacggg

SEQ ID NO: 4459807 - DNA, 25 bp, Homo sapien
aaatttgaggagtgcttagaatacg

SEQ ID NO: 4459808 - DNA, 25 bp, Homo sapien
ccctgaaggagccaagtggcatatc

SEQ ID NO: 4459809 - DNA, 25 bp, Homo sapien
gagctagttgtataagatgtgtaat

SEQ ID NO: 4459810 - DNA, 25 bp, Homo sapien
gaaaccaggatcaaggacaagggac

SEQ ID NO: 4459811 - DNA, 25 bp, Homo sapien
tgcagggacaggagctagttgtata

SEQ ID NO: 4459812 - DNA, 25 bp, Homo sapien
tgaccagattctgctggcaagggct

SEQ ID NO: 4459813 - DNA, 25 bp, Homo sapien
gaacaaagagatggtggcaaaaaac

SEQ ID NO: 4459814 - DNA, 25 bp, Homo sapien
agagatggtggcaaaaaaccctctg

SEQ ID NO: 4459815 - DNA, 25 bp, Homo sapien
aggaacaaagagatggtggcaaaaa

SEQ ID NO: 4459816 - DNA, 25 bp, Homo sapien
caaagagatggtggcaaaaaaccct

SEQ ID NO: 4459817 - DNA, 25 bp, Homo sapien
agccaccagaacacggtgcagagca

SEQ ID NO: 4459818 - DNA, 25 bp, Homo sapien
agaacacggtgcagagcacgaggct

SEQ ID NO: 4459819 - DNA, 25 bp, Homo sapien
agcacgaggctgattttcaatccca

SEQ ID NO: 4459820 - DNA, 25 bp, Homo sapien
agagcacgaggctgattttcaatcc

SEQ ID NO: 4459821 - DNA, 25 bp, Homo sapien
gcatctgttcccgtgcaggcgtcct

SEQ ID NO: 4459822 - DNA, 25 bp, Homo sapien
cgggtgtggattccttcctgtgaca

SEQ ID NO: 4459823 - DNA, 25 bp, Homo sapien
gacgggtgtggattccttcctgtga

SEQ ID NO: 4459824 - DNA, 25 bp, Homo sapien
caaggggtaagggagcgggcatctg

SEQ ID NO: 4459825 - DNA, 25 bp, Homo sapien
tctgtaaccatcctgtggaccaacc

SEQ ID NO: 4459826 - DNA, 25 bp, Homo sapien
gtaaccatcctgtggaccaacccca

SEQ ID NO: 4459827 - DNA, 25 bp, Homo sapien
cctctgtaaccatcctgtggaccaa

SEQ ID NO: 4459828 - DNA, 25 bp, Homo sapien
ttcctctgtaaccatcctgtggacc

SEQ ID NO: 4459829 - DNA, 25 bp, Homo sapien
cagaggggtacagacatttggcatg

SEQ ID NO: 4459830 - DNA, 25 bp, Homo sapien
taacttggatgatccagtgcaggct

SEQ ID NO: 4459831 - DNA, 25 bp, Homo sapien
tttggcatgtaacttggatgatcca

SEQ ID NO: 4459832 - DNA, 25 bp, Homo sapien
gggtacagacatttggcatgtaact

SEQ ID NO: 4459833 - DNA, 25 bp, Homo sapien
gaatcgacttcttggagtcttttac

SEQ ID NO: 4459834 - DNA, 25 bp, Homo sapien
gacttcttggagtcttttacaagga

SEQ ID NO: 4459835 - DNA, 25 bp, Homo sapien
gaagagattggaatcgacttcttgg

SEQ ID NO: 4459836 - DNA, 25 bp, Homo sapien
gattggaatcgacttcttggagtct

SEQ ID NO: 4459837 - DNA, 25 bp, Homo sapien
ttggctgccactctaacagccacac

SEQ ID NO: 4459838 - DNA, 25 bp, Homo sapien
ctttcactggggagctggcccttgg

SEQ ID NO: 4459839 - DNA, 25 bp, Homo sapien
ggagctggcccttggctgccactct

SEQ ID NO: 4459840 - DNA, 25 bp, Homo sapien
tgccactctaacagccacacacccc

SEQ ID NO: 4459841 - DNA, 25 bp, Homo sapien
gtgtgcggtagaagcacaatatcac

SEQ ID NO: 4459842 - DNA, 25 bp, Homo sapien
tcccaacgtgcaggtgtgcggtaga

SEQ ID NO: 4459843 - DNA, 25 bp, Homo sapien
caaacaccatcccaacgtgcaggtg

SEQ ID NO: 4459844 - DNA, 25 bp, Homo sapien
gtcaggccggaaggcaaacaccatc

SEQ ID NO: 4459845 - DNA, 25 bp, Homo sapien
agaaaagacctgatggattctttcc

SEQ ID NO: 4459846 - DNA, 25 bp, Homo sapien
catgggtgacccagtctggctgcag

SEQ ID NO: 4459847 - DNA, 25 bp, Homo sapien
tgcgcaatctcaggacacagaaaag

SEQ ID NO: 4459848 - DNA, 25 bp, Homo sapien
ctgcaggagctcaggtaggatagac

SEQ ID NO: 4459849 - DNA, 25 bp, Homo sapien
ccaaggtgcaaagattaggggagca

SEQ ID NO: 4459850 - DNA, 25 bp, Homo sapien
gaaatgagttgttctgattggaaga

SEQ ID NO: 4459851 - DNA, 25 bp, Homo sapien
ggtgcacttgacacagaatcttctt

SEQ ID NO: 4459852 - DNA, 25 bp, Homo sapien
catggacagatgtagggtgcacttg

SEQ ID NO: 4459853 - DNA, 25 bp, Homo sapien
tgctttgcaggaggtaaaatgctca

SEQ ID NO: 4459854 - DNA, 25 bp, Homo sapien
agtagcccaaacaacatagaaagtg

SEQ ID NO: 4459855 - DNA, 25 bp, Homo sapien
gcatttcatatgacctgcaaagaga

SEQ ID NO: 4459856 - DNA, 25 bp, Homo sapien
caaagccattatgtgtttagggaaa

SEQ ID NO: 4459857 - DNA, 25 bp, Homo sapien
gcttgggaagtgcttcactagatga

SEQ ID NO: 4459858 - DNA, 25 bp, Homo sapien
cagaatgtgctccagaagttctcat

SEQ ID NO: 4459859 - DNA, 25 bp, Homo sapien
gtctgttcccttgccgacgtcctca

SEQ ID NO: 4459860 - DNA, 25 bp, Homo sapien
gtgcttcactagatgaattctagag

SEQ ID NO: 4459861 - DNA, 25 bp, Homo sapien
cttgggcctgttcactatttgattg

SEQ ID NO: 4459862 - DNA, 25 bp, Homo sapien
cactatttgattgtttgccaagcac

SEQ ID NO: 4459863 - DNA, 25 bp, Homo sapien
tgccatctgccatctaaattatttc

SEQ ID NO: 4459864 - DNA, 25 bp, Homo sapien
gcacttctagtggagccaactgcca

SEQ ID NO: 4459865 - DNA, 25 bp, Homo sapien
agtgtgcccccgttgtcccgcctca

SEQ ID NO: 4459866 - DNA, 25 bp, Homo sapien
gcaggagggaagtgtgcccccgttg

SEQ ID NO: 4459867 - DNA, 25 bp, Homo sapien
gtgcccccgttgtcccgcctcacac

SEQ ID NO: 4459868 - DNA, 25 bp, Homo sapien
caggagggaagtgtgcccccgttgt

SEQ ID NO: 4459869 - DNA, 25 bp, Homo sapien
tcccagttgattaccagataaaggc

SEQ ID NO: 4459870 - DNA, 25 bp, Homo sapien
catttagttatgaagtggcgcagct

SEQ ID NO: 4459871 - DNA, 25 bp, Homo sapien
tcagcaacctggtggaatgcccaga

SEQ ID NO: 4459872 - DNA, 25 bp, Homo sapien
catttgcccatgagaatggaagctc

SEQ ID NO: 4459873 - DNA, 25 bp, Homo sapien
gaataaaagtacgactgtgaagttg

SEQ ID NO: 4459874 - DNA, 25 bp, Homo sapien
ggaatccatcaggaatttggtctct

SEQ ID NO: 4459875 - DNA, 25 bp, Homo sapien
cacacactgaataaaagtacgactg

SEQ ID NO: 4459876 - DNA, 25 bp, Homo sapien
cactgaataaaagtacgactgtgaa

SEQ ID NO: 4459877 - DNA, 25 bp, Homo sapien
gaaggctgtacaatgggtgctctgt

SEQ ID NO: 4459878 - DNA, 25 bp, Homo sapien
tgtacaatgggtgctctgttgcttg

SEQ ID NO: 4459879 - DNA, 25 bp, Homo sapien
gctgtacaatgggtgctctgttgct

SEQ ID NO: 4459880 - DNA, 25 bp, Homo sapien
ctggggaaggctgtacaatgggtgc

SEQ ID NO: 4459881 - DNA, 25 bp, Homo sapien
agttgaggatctgctaggaactgag

SEQ ID NO: 4459882 - DNA, 25 bp, Homo sapien
ggtagaatgcttggggagcctcccc

SEQ ID NO: 4459883 - DNA, 25 bp, Homo sapien
tgctgtcagattctgggtggcacct

SEQ ID NO: 4459884 - DNA, 25 bp, Homo sapien
acaaacatcaaagcaggccaagttg

SEQ ID NO: 4459885 - DNA, 25 bp, Homo sapien
aagcaattcattcctttcagtaccc

SEQ ID NO: 4459886 - DNA, 25 bp, Homo sapien
cattcctttcagtacccattgccat

SEQ ID NO: 4459887 - DNA, 25 bp, Homo sapien
aattcattcctttcagtacccattg

SEQ ID NO: 4459888 - DNA, 25 bp, Homo sapien
taaagttcccccacaagcaattcat

SEQ ID NO: 4459889 - DNA, 25 bp, Homo sapien
cactgggatcaacttatagggttcg

SEQ ID NO: 4459890 - DNA, 25 bp, Homo sapien
gggttcggtggctgactggacatag

SEQ ID NO: 4459891 - DNA, 25 bp, Homo sapien
gcggaagagttgatccactgggatc

SEQ ID NO: 4459892 - DNA, 25 bp, Homo sapien
tcagagaaaccggagcggaagagtt

SEQ ID NO: 4459893 - DNA, 25 bp, Homo sapien
gatttagcatttcgggtggctcctg

SEQ ID NO: 4459894 - DNA, 25 bp, Homo sapien
ccaacttgtttagcaagaagacaga

SEQ ID NO: 4459895 - DNA, 25 bp, Homo sapien
gggcctggataagaaatggatcccc

SEQ ID NO: 4459896 - DNA, 25 bp, Homo sapien
tagaccagggctatacagttatgac

SEQ ID NO: 4459897 - DNA, 25 bp, Homo sapien
tagggtgctgatatgcgccagtatc

SEQ ID NO: 4459898 - DNA, 25 bp, Homo sapien
gctgatatgcgccagtatcagatgc

SEQ ID NO: 4459899 - DNA, 25 bp, Homo sapien
tatgcgccagtatcagatgcgaggt

SEQ ID NO: 4459900 - DNA, 25 bp, Homo sapien
tccagtagggtgctgatatgcgcca

SEQ ID NO: 4459901 - DNA, 25 bp, Homo sapien
ggaattcctctatccaaagcccagg

SEQ ID NO: 4459902 - DNA, 25 bp, Homo sapien
gcggctgccatccactctatggaag

SEQ ID NO: 4459903 - DNA, 25 bp, Homo sapien
gcaacagccgcctcttgtgaggagg

SEQ ID NO: 4459904 - DNA, 25 bp, Homo sapien
gctgtatggtactggctccctaggg

SEQ ID NO: 4459905 - DNA, 25 bp, Homo sapien
tgctttgccctggtcaaaggcctct

SEQ ID NO: 4459906 - DNA, 25 bp, Homo sapien
tggaacagtggtcatgtgccttctg

SEQ ID NO: 4459907 - DNA, 25 bp, Homo sapien
tttctgttctcctgcatagctgtgg

SEQ ID NO: 4459908 - DNA, 25 bp, Homo sapien
caatgtgcccatgccaaagaagact

SEQ ID NO: 4459909 - DNA, 25 bp, Homo sapien
ctttgctgtgccttctcatcagcac

SEQ ID NO: 4459910 - DNA, 25 bp, Homo sapien
tcatattgctcctggttcaaaggcc

SEQ ID NO: 4459911 - DNA, 25 bp, Homo sapien
ttgctcctggttcaaaggccccatc

SEQ ID NO: 4459912 - DNA, 25 bp, Homo sapien
tattgctcctggttcaaaggcccca

SEQ ID NO: 4459913 - DNA, 25 bp, Homo sapien
ttctcatattgctcctggttcaaag

SEQ ID NO: 4459914 - DNA, 25 bp, Homo sapien
ttttcctcccatcacctttgattct

SEQ ID NO: 4459915 - DNA, 25 bp, Homo sapien
aactaattccgtgttgccttccaga

SEQ ID NO: 4459916 - DNA, 25 bp, Homo sapien
tccatcaccggagattagttttgcc

SEQ ID NO: 4459917 - DNA, 25 bp, Homo sapien
gaacttcgagttagtagattcacac

SEQ ID NO: 4459918 - DNA, 25 bp, Homo sapien
acaatagatgctcttttgggcctgg

SEQ ID NO: 4459919 - DNA, 25 bp, Homo sapien
aggtcccggatgcctctgtgccttt

SEQ ID NO: 4459920 - DNA, 25 bp, Homo sapien
cccaatcccctgttcagaccttgag

SEQ ID NO: 4459921 - DNA, 25 bp, Homo sapien
tcccatttcatgactaggctctaag

SEQ ID NO: 4459922 - DNA, 25 bp, Homo sapien
ccctcaaccttggaggaattagaat

SEQ ID NO: 4459923 - DNA, 25 bp, Homo sapien
agagagagagatgacagagcgttcc

SEQ ID NO: 4459924 - DNA, 25 bp, Homo sapien
agagatgacagagcgttcctagtca

SEQ ID NO: 4459925 - DNA, 25 bp, Homo sapien
ctcacacaaccaggaaggaaagaga

SEQ ID NO: 4459926 - DNA, 25 bp, Homo sapien
gagagagatgacagagcgttcctag

SEQ ID NO: 4459927 - DNA, 25 bp, Homo sapien
gatgaagacgcaaactctcttctgg

SEQ ID NO: 4459928 - DNA, 25 bp, Homo sapien
tgctttctgatgaagacgcaaactc

SEQ ID NO: 4459929 - DNA, 25 bp, Homo sapien
ttgttcttcacaacctcccgtctcc

SEQ ID NO: 4459930 - DNA, 25 bp, Homo sapien
ctgccccaggtgctttctgatgaag

SEQ ID NO: 4459931 - DNA, 25 bp, Homo sapien
tggatggagaagctagcaccaactc

SEQ ID NO: 4459932 - DNA, 25 bp, Homo sapien
taatgcatcctaagacgagggtgcc

SEQ ID NO: 4459933 - DNA, 25 bp, Homo sapien
gagaagggatcctcactatggacca

SEQ ID NO: 4459934 - DNA, 25 bp, Homo sapien
tcaggcttaggcgagtcacagagaa

SEQ ID NO: 4459935 - DNA, 25 bp, Homo sapien
gctgggccatagcaatgcctgaggt

SEQ ID NO: 4459936 - DNA, 25 bp, Homo sapien
tggagtcgggcctgttcagttccgc

SEQ ID NO: 4459937 - DNA, 25 bp, Homo sapien
gacagagccccgacatcaataaaga

SEQ ID NO: 4459938 - DNA, 25 bp, Homo sapien
tgtggatttagaagcaggcacgcag

SEQ ID NO: 4459939 - DNA, 25 bp, Homo sapien
aaactgagaagtcttttgctgtccc

SEQ ID NO: 4459940 - DNA, 25 bp, Homo sapien
tgagaagtcttttgctgtcccagat

SEQ ID NO: 4459941 - DNA, 25 bp, Homo sapien
taagatgtgccgagctttttggaag

SEQ ID NO: 4459942 - DNA, 25 bp, Homo sapien
ctggcagctaagatgtgccgagctt

SEQ ID NO: 4459943 - DNA, 25 bp, Homo sapien
tcaaaagtgacgaatgttggaaagt

SEQ ID NO: 4459944 - DNA, 25 bp, Homo sapien
ttggaaagtgccacgggcatctctg

SEQ ID NO: 4459945 - DNA, 25 bp, Homo sapien
gccacgggcatctctgggagctcac

SEQ ID NO: 4459946 - DNA, 25 bp, Homo sapien
aagtgacgaatgttggaaagtgcca

SEQ ID NO: 4459947 - DNA, 25 bp, Homo sapien
tggagagactgatgcttccccagca

SEQ ID NO: 4459948 - DNA, 25 bp, Homo sapien
tctgggagctaggatattttagatg

SEQ ID NO: 4459949 - DNA, 25 bp, Homo sapien
ctgggctggtgctcacgcagctctg

SEQ ID NO: 4459950 - DNA, 25 bp, Homo sapien
gctgctggaacatagaggtgcccgc

SEQ ID NO: 4459951 - DNA, 25 bp, Homo sapien
tgactcggcagatggcaaagtgctt

SEQ ID NO: 4459952 - DNA, 25 bp, Homo sapien
agagaactccccacatcagctgctt

SEQ ID NO: 4459953 - DNA, 25 bp, Homo sapien
gcagaactgactcggcagatggcaa

SEQ ID NO: 4459954 - DNA, 25 bp, Homo sapien
catctctggcagaactgactcggca

SEQ ID NO: 4459955 - DNA, 25 bp, Homo sapien
ctatttaataggtcagggggtcagt

SEQ ID NO: 4459956 - DNA, 25 bp, Homo sapien
agtttccttctgagagtaaaggtga

SEQ ID NO: 4459957 - DNA, 25 bp, Homo sapien
gtttccttctgagagtaaaggtgac

SEQ ID NO: 4459958 - DNA, 25 bp, Homo sapien
caccgacttgggtcctagtggccct

SEQ ID NO: 4459959 - DNA, 25 bp, Homo sapien
accttcaccgacttgggtcctagtg

SEQ ID NO: 4459960 - DNA, 25 bp, Homo sapien
ttgggtcctagtggcccttgatttc

SEQ ID NO: 4459961 - DNA, 25 bp, Homo sapien
agttgcaccttcaccgacttgggtc

SEQ ID NO: 4459962 - DNA, 25 bp, Homo sapien
gactctcatcttctttgagacttgc

SEQ ID NO: 4459963 - DNA, 25 bp, Homo sapien
cttcagctttcctgaggcgcttggt

SEQ ID NO: 4459964 - DNA, 25 bp, Homo sapien
ttctttgagacttgcctgaccctgg

SEQ ID NO: 4459965 - DNA, 25 bp, Homo sapien
gaggcgcttggtgactctcatcttc

SEQ ID NO: 4459966 - DNA, 25 bp, Homo sapien
gacttggcatgtccggaaggtcttc

SEQ ID NO: 4459967 - DNA, 25 bp, Homo sapien
ttacttgcataagtcagggctgggc

SEQ ID NO: 4459968 - DNA, 25 bp, Homo sapien
ttggcagacataactccaggactga

SEQ ID NO: 4459969 - DNA, 25 bp, Homo sapien
ccttcaggccggagatggccaaggg

SEQ ID NO: 4459970 - DNA, 25 bp, Homo sapien
ggaatgtttctcccactcccaccat

SEQ ID NO: 4459971 - DNA, 25 bp, Homo sapien
gtgaggaatgtttctcccactccca

SEQ ID NO: 4459972 - DNA, 25 bp, Homo sapien
gaggaatgtttctcccactcccacc

SEQ ID NO: 4459973 - DNA, 25 bp, Homo sapien
ggtgaggaatgtttctcccactccc

SEQ ID NO: 4459974 - DNA, 25 bp, Homo sapien
ctggagataagcagattctgcccaa

SEQ ID NO: 4459975 - DNA, 25 bp, Homo sapien
ttaaattgaggtaagtgatcaaatc

SEQ ID NO: 4459976 - DNA, 25 bp, Homo sapien
aggaggaggaatattaaattgaggt

SEQ ID NO: 4459977 - DNA, 25 bp, Homo sapien
aattgaggtaagtgatcaaatccat

SEQ ID NO: 4459978 - DNA, 25 bp, Homo sapien
tcaaatccatcaagggattcagccc

SEQ ID NO: 4459979 - DNA, 25 bp, Homo sapien
cagtgataagaatctggggatgata

SEQ ID NO: 4459980 - DNA, 25 bp, Homo sapien
ggtagtcacaccagtgataagaatc

SEQ ID NO: 4459981 - DNA, 25 bp, Homo sapien
gaggtagtcacaccagtgataagaa

SEQ ID NO: 4459982 - DNA, 25 bp, Homo sapien
gaagaggtagtcacaccagtgataa

SEQ ID NO: 4459983 - DNA, 25 bp, Homo sapien
ttcatctcatgcagcgttttgtttg

SEQ ID NO: 4459984 - DNA, 25 bp, Homo sapien
tcatctcatgcagcgttttgtttgt

SEQ ID NO: 4459985 - DNA, 25 bp, Homo sapien
cttcatctcatgcagcgttttgttt

SEQ ID NO: 4459986 - DNA, 25 bp, Homo sapien
ttcgaatctgacagccctgattggt

SEQ ID NO: 4459987 - DNA, 25 bp, Homo sapien
taacgtgtccggatgattgattcga

SEQ ID NO: 4459988 - DNA, 25 bp, Homo sapien
agggaggagttgaagccgcactcct

SEQ ID NO: 4459989 - DNA, 25 bp, Homo sapien
gcactcctgtaacgtgtccggatga

SEQ ID NO: 4459990 - DNA, 25 bp, Homo sapien
cctaaacccatagcactggctctgc

SEQ ID NO: 4459991 - DNA, 25 bp, Homo sapien
tggacttagcgggatgggcactgtg

SEQ ID NO: 4459992 - DNA, 25 bp, Homo sapien
ctgccctgcagactgcgttatgctg

SEQ ID NO: 4459993 - DNA, 25 bp, Homo sapien
tgcgttatgctggacttagcgggat

SEQ ID NO: 4459994 - DNA, 25 bp, Homo sapien
tgggccagggtgatccagtccacca

SEQ ID NO: 4459995 - DNA, 25 bp, Homo sapien
cagatccagttttctagcacgccgt

SEQ ID NO: 4459996 - DNA, 25 bp, Homo sapien
gacctccttgcccacaaggcgggtg

SEQ ID NO: 4459997 - DNA, 25 bp, Homo sapien
cacgttcactggctgggccggctga

SEQ ID NO: 4459998 - DNA, 25 bp, Homo sapien
ctgtgattctcccaatcttgtgcgt

SEQ ID NO: 4459999 - DNA, 25 bp, Homo sapien
gccggcaaatcctgacacgtgtgca

SEQ ID NO: 4460000 - DNA, 25 bp, Homo sapien
tccaccgatggaactgccggcaaat

SEQ ID NO: 4460001 - DNA, 25 bp, Homo sapien
caggctgtacccaattaggtgaaca

SEQ ID NO: 4460002 - DNA, 25 bp, Homo sapien
ttaatgatgagcctgttggaaaagc

SEQ ID NO: 4460003 - DNA, 25 bp, Homo sapien
tgagcctgttggaaaagcaggtcct

SEQ ID NO: 4460004 - DNA, 25 bp, Homo sapien
tgatgagcctgttggaaaagcaggt

SEQ ID NO: 4460005 - DNA, 25 bp, Homo sapien
aaaagcaggtccttgttggatgccc

SEQ ID NO: 4460006 - DNA, 25 bp, Homo sapien
aggaagaagaaacacgtagggctga

SEQ ID NO: 4460007 - DNA, 25 bp, Homo sapien
tagggctgatccttccctagaaaac

SEQ ID NO: 4460008 - DNA, 25 bp, Homo sapien
tggatattattatacatcagtgaac

SEQ ID NO: 4460009 - DNA, 25 bp, Homo sapien
tattattatacatcagtgaactagc

SEQ ID NO: 4460010 - DNA, 25 bp, Homo sapien
gcaatatgtctgtagagctctagga

SEQ ID NO: 4460011 - DNA, 25 bp, Homo sapien
gaatggcatccacaaaattggcatc

SEQ ID NO: 4460012 - DNA, 25 bp, Homo sapien
tcatctggagaaagacgattgctgg

SEQ ID NO: 4460013 - DNA, 25 bp, Homo sapien
tgctcccgggtaaaggtatgaatgg

SEQ ID NO: 4460014 - DNA, 25 bp, Homo sapien
gtaggccggtgctcccggcccatga

SEQ ID NO: 4460015 - DNA, 25 bp, Homo sapien
ccgtatgttggtagattccgctgaa

SEQ ID NO: 4460016 - DNA, 25 bp, Homo sapien
tccagaggccccattgaaatgtagg

SEQ ID NO: 4460017 - DNA, 25 bp, Homo sapien
tcttccctgagtcccgtatgttggt

SEQ ID NO: 4460018 - DNA, 25 bp, Homo sapien
aagtggaggttcctgttggtgccct

SEQ ID NO: 4460019 - DNA, 25 bp, Homo sapien
cgggagagggtttgcctgggcacat

SEQ ID NO: 4460020 - DNA, 25 bp, Homo sapien
ttcatcctcagggcgtggcgttggc

SEQ ID NO: 4460021 - DNA, 25 bp, Homo sapien
tcagaagagctggtaccccgggaga

SEQ ID NO: 4460022 - DNA, 25 bp, Homo sapien
caagaaatttggaatgcccgtggaa

SEQ ID NO: 4460023 - DNA, 25 bp, Homo sapien
gtggttcagaatagaggcggtccct

SEQ ID NO: 4460024 - DNA, 25 bp, Homo sapien
cattccgtgtctgccctgaggtaaa

SEQ ID NO: 4460025 - DNA, 25 bp, Homo sapien
tgagagagaagtgggatcacaaccc

SEQ ID NO: 4460026 - DNA, 25 bp, Homo sapien
aaagagcaaatggtaatgattggtc

SEQ ID NO: 4460027 - DNA, 25 bp, Homo sapien
cctacatttggttccgtcactttga

SEQ ID NO: 4460028 - DNA, 25 bp, Homo sapien
taaagcccatacaccatcctgatgg

SEQ ID NO: 4460029 - DNA, 25 bp, Homo sapien
gcttgggcaagctgaatacctacat

SEQ ID NO: 4460030 - DNA, 25 bp, Homo sapien
tgaggccgctgttttcgacgagaaa

SEQ ID NO: 4460031 - DNA, 25 bp, Homo sapien
gattagtcactgcagtccttggacg

SEQ ID NO: 4460032 - DNA, 25 bp, Homo sapien
tctcaagggatgttgaggaaccacc

SEQ ID NO: 4460033 - DNA, 25 bp, Homo sapien
cccagttgtctggaggctaaatgcc

SEQ ID NO: 4460034 - DNA, 25 bp, Homo sapien
cacagggcaagaaggacgttatcac

SEQ ID NO: 4460035 - DNA, 25 bp, Homo sapien
acagggcaagaaggacgttatcacc

SEQ ID NO: 4460036 - DNA, 25 bp, Homo sapien
cagggcaagaaggacgttatcaccc

SEQ ID NO: 4460037 - DNA, 25 bp, Homo sapien
tcgcgttacgaggaagagcctcttg

SEQ ID NO: 4460038 - DNA, 25 bp, Homo sapien
cgctcgtgggagcattttatggtct

SEQ ID NO: 4460039 - DNA, 25 bp, Homo sapien
tgaaaaggtgcaccgatcgctcgtg

SEQ ID NO: 4460040 - DNA, 25 bp, Homo sapien
gcgtgcagcaaggagtcgatgaaaa

SEQ ID NO: 4460041 - DNA, 25 bp, Homo sapien
catcctgcccttctgaaggctcccc

SEQ ID NO: 4460042 - DNA, 25 bp, Homo sapien
gccctttggacaggggactgcatcc

SEQ ID NO: 4460043 - DNA, 25 bp, Homo sapien
ttggacaggggactgcatcctgccc

SEQ ID NO: 4460044 - DNA, 25 bp, Homo sapien
caaggggacttctgagccctttgga

SEQ ID NO: 4460045 - DNA, 25 bp, Homo sapien
tgtgtcaacgttgctgtctggagcc

SEQ ID NO: 4460046 - DNA, 25 bp, Homo sapien
gaaaggctgtgtcaacgttgctgtc

SEQ ID NO: 4460047 - DNA, 25 bp, Homo sapien
agcccttggcggcaaggtggccaca

SEQ ID NO: 4460048 - DNA, 25 bp, Homo sapien
acaggagaaaggctgtgtcaacgtt

SEQ ID NO: 4460049 - DNA, 25 bp, Homo sapien
ctgcgtgctgccatctcctccagcc

SEQ ID NO: 4460050 - DNA, 25 bp, Homo sapien
taaattgcctcgtttcactcggcga

SEQ ID NO: 4460051 - DNA, 25 bp, Homo sapien
tgtgaaactacaatcaggaggcgat

SEQ ID NO: 4460052 - DNA, 25 bp, Homo sapien
tgtcgaaatatcttgggagccagag

SEQ ID NO: 4460053 - DNA, 25 bp, Homo sapien
ccagaggaattcaggccaagttagt

SEQ ID NO: 4460054 - DNA, 25 bp, Homo sapien
taaaagttgtttgtattggtgtctc

SEQ ID NO: 4460055 - DNA, 25 bp, Homo sapien
ccgagtagtgacatggtaaaagttg

SEQ ID NO: 4460056 - DNA, 25 bp, Homo sapien
aaagttgtttgtattggtgtctcag

SEQ ID NO: 4460057 - DNA, 25 bp, Homo sapien
tttctcttttgttccgagtagtgac

SEQ ID NO: 4460058 - DNA, 25 bp, Homo sapien
ggaacacctgctccgcccctcacca

SEQ ID NO: 4460059 - DNA, 25 bp, Homo sapien
gcactgcaggccctagtggggccat

SEQ ID NO: 4460060 - DNA, 25 bp, Homo sapien
gagggttcgggcttgggtggatgtc

SEQ ID NO: 4460061 - DNA, 25 bp, Homo sapien
cgtgagggttcgggcttgggtggat

SEQ ID NO: 4460062 - DNA, 25 bp, Homo sapien
gacattggcccacactgcactgttt

SEQ ID NO: 4460063 - DNA, 25 bp, Homo sapien
tctggaccgtgtcccagacattggc

SEQ ID NO: 4460064 - DNA, 25 bp, Homo sapien
tctgatcgtcttcagaacgaggcct

SEQ ID NO: 4460065 - DNA, 25 bp, Homo sapien
gatcatgatcagctcgccgatatcc

SEQ ID NO: 4460066 - DNA, 25 bp, Homo sapien
catatgttaatgtccagcactgcaa

SEQ ID NO: 4460067 - DNA, 25 bp, Homo sapien
gcaactctgctagattagactgaga

SEQ ID NO: 4460068 - DNA, 25 bp, Homo sapien
tacagtacctcctacagccctaagg

SEQ ID NO: 4460069 - DNA, 25 bp, Homo sapien
agatcacgtgagaccaatgccatgg

SEQ ID NO: 4460070 - DNA, 25 bp, Homo sapien
tttaatgttcccatcccgattctgg

SEQ ID NO: 4460071 - DNA, 25 bp, Homo sapien
tcccatcccgattctgggattttgg

SEQ ID NO: 4460072 - DNA, 25 bp, Homo sapien
tcccacttgcacttagcagcgatat

SEQ ID NO: 4460073 - DNA, 25 bp, Homo sapien
gcgatattacgagtgtagagtttaa

SEQ ID NO: 4460074 - DNA, 25 bp, Homo sapien
ctgggttgggcgaagtagtaggtca

SEQ ID NO: 4460075 - DNA, 25 bp, Homo sapien
ggttgggcgaagtagtaggtcatct

SEQ ID NO: 4460076 - DNA, 25 bp, Homo sapien
gggttgggcgaagtagtaggtcatc

SEQ ID NO: 4460077 - DNA, 25 bp, Homo sapien
ttgggcgaagtagtaggtcatctgt

SEQ ID NO: 4460078 - DNA, 25 bp, Homo sapien
tcatctgatctttcgctttgatgtt

SEQ ID NO: 4460079 - DNA, 25 bp, Homo sapien
ctttcgctttgatgttttagacttt

SEQ ID NO: 4460080 - DNA, 25 bp, Homo sapien
tcgctttgatgttttagactttatt

SEQ ID NO: 4460081 - DNA, 25 bp, Homo sapien
gatctttcgctttgatgttttagac

SEQ ID NO: 4460082 - DNA, 25 bp, Homo sapien
catttattctttacactgggtcttc

SEQ ID NO: 4460083 - DNA, 25 bp, Homo sapien
ttcatttattctttacactgggtct

SEQ ID NO: 4460084 - DNA, 25 bp, Homo sapien
atttattctttacactgggtcttca

SEQ ID NO: 4460085 - DNA, 25 bp, Homo sapien
agattcatttattctttacactggg

SEQ ID NO: 4460086 - DNA, 25 bp, Homo sapien
ttatgagagtgaaacatacccccct

SEQ ID NO: 4460087 - DNA, 25 bp, Homo sapien
tgagagtgaaacataccccccttaa

SEQ ID NO: 4460088 - DNA, 25 bp, Homo sapien
tgtgagattctttatgtaattttgg

SEQ ID NO: 4460089 - DNA, 25 bp, Homo sapien
gtgagattctttatgtaattttggc

SEQ ID NO: 4460090 - DNA, 25 bp, Homo sapien
gctttattgaagcactagttaccta

SEQ ID NO: 4460091 - DNA, 25 bp, Homo sapien
aaatgggtcataataaactagcaag

SEQ ID NO: 4460092 - DNA, 25 bp, Homo sapien
ctttctagcatggttcaaaaatggg

SEQ ID NO: 4460093 - DNA, 25 bp, Homo sapien
aactagcaaggacatgtgggaaact

SEQ ID NO: 4460094 - DNA, 25 bp, Homo sapien
actgggattaagggccttgggagag

SEQ ID NO: 4460095 - DNA, 25 bp, Homo sapien
aagctgttaagttatttctgagcac

SEQ ID NO: 4460096 - DNA, 25 bp, Homo sapien
tgggattaagggccttgggagagta

SEQ ID NO: 4460097 - DNA, 25 bp, Homo sapien
gattaagggccttgggagagtaaga

SEQ ID NO: 4460098 - DNA, 25 bp, Homo sapien
taaagtatgccacaattttgaggga

SEQ ID NO: 4460099 - DNA, 25 bp, Homo sapien
gaacggagatcatatttcttcccac

SEQ ID NO: 4460100 - DNA, 25 bp, Homo sapien
caaccattgaagaatgcaggctacc

SEQ ID NO: 4460101 - DNA, 25 bp, Homo sapien
ggcattttgcactccctactgtgta

SEQ ID NO: 4460102 - DNA, 25 bp, Homo sapien
gagttctgcagaacacgctgggtgt

SEQ ID NO: 4460103 - DNA, 25 bp, Homo sapien
caggaggtataaattccagggtcaa

SEQ ID NO: 4460104 - DNA, 25 bp, Homo sapien
catctgttatgacacttggcactga

SEQ ID NO: 4460105 - DNA, 25 bp, Homo sapien
tacctaaggaattctcactgggctg

SEQ ID NO: 4460106 - DNA, 25 bp, Homo sapien
gggatttattatactattttctcta

SEQ ID NO: 4460107 - DNA, 25 bp, Homo sapien
taaagtattgtgcaaagatgtaagg

SEQ ID NO: 4460108 - DNA, 25 bp, Homo sapien
caacttgaaggttctatactctttg

SEQ ID NO: 4460109 - DNA, 25 bp, Homo sapien
aaggcagtgttttcttacagttgtc

SEQ ID NO: 4460110 - DNA, 25 bp, Homo sapien
gaactatcacaagaagcttcccaca

SEQ ID NO: 4460111 - DNA, 25 bp, Homo sapien
ggtaggattttggcaggtacacaca

SEQ ID NO: 4460112 - DNA, 25 bp, Homo sapien
tggtaggattttggcaggtacacac

SEQ ID NO: 4460113 - DNA, 25 bp, Homo sapien
gtaggattttggcaggtacacacac

SEQ ID NO: 4460114 - DNA, 25 bp, Homo sapien
aacagcattgaaggtgaaacagcac

SEQ ID NO: 4460115 - DNA, 25 bp, Homo sapien
cctgacttcacataggaggcaaatt

SEQ ID NO: 4460116 - DNA, 25 bp, Homo sapien
caaattttgtacatgaaaccccaga

SEQ ID NO: 4460117 - DNA, 25 bp, Homo sapien
cataatgtgacgcaagccagcaagg

SEQ ID NO: 4460118 - DNA, 25 bp, Homo sapien
gcggccccgagagagttatcaaatg

SEQ ID NO: 4460119 - DNA, 25 bp, Homo sapien
tatcaaatgggacacatgagacgct

SEQ ID NO: 4460120 - DNA, 25 bp, Homo sapien
tgagacgctaactgcagcttttgcc

SEQ ID NO: 4460121 - DNA, 25 bp, Homo sapien
aatggcaagagatcatatcctcaga

SEQ ID NO: 4460122 - DNA, 25 bp, Homo sapien
taagatatgcagtgttcatactcca

SEQ ID NO: 4460123 - DNA, 25 bp, Homo sapien
gatcatgctaatggctggatttatt

SEQ ID NO: 4460124 - DNA, 25 bp, Homo sapien
caagtagtaatccaaagttgcctcc

SEQ ID NO: 4460125 - DNA, 25 bp, Homo sapien
tatgggaattgctctgatcatgcta

SEQ ID NO: 4460126 - DNA, 25 bp, Homo sapien
taaattccaagccagattcagccct

SEQ ID NO: 4460127 - DNA, 25 bp, Homo sapien
taagcttttgagtttgccgtccctg

SEQ ID NO: 4460128 - DNA, 25 bp, Homo sapien
cagtaaggttgaattgcattccacc

SEQ ID NO: 4460129 - DNA, 25 bp, Homo sapien
tctggcagtctcaagaagtggcttt

SEQ ID NO: 4460130 - DNA, 25 bp, Homo sapien
gcccatcatcgtgagaaagctagta

SEQ ID NO: 4460131 - DNA, 25 bp, Homo sapien
gtgtgtctcctgtacccaacttgcc

SEQ ID NO: 4460132 - DNA, 25 bp, Homo sapien
attagaggtgttaccacttccccag

SEQ ID NO: 4460133 - DNA, 25 bp, Homo sapien
catggattggctcacattagaggtg

SEQ ID NO: 4460134 - DNA, 25 bp, Homo sapien
gatggagtctcagaaaaacctgtca

SEQ ID NO: 4460135 - DNA, 25 bp, Homo sapien
acttggcaagttataactatttcac

SEQ ID NO: 4460136 - DNA, 25 bp, Homo sapien
gcagtgtaagcaattgtttgcacaa

SEQ ID NO: 4460137 - DNA, 25 bp, Homo sapien
atatttagttaatgtggaatccatt

SEQ ID NO: 4460138 - DNA, 25 bp, Homo sapien
cacagaccgagattttgatgatggc

SEQ ID NO: 4460139 - DNA, 25 bp, Homo sapien
tactgtttggcctatgtcttcacag

SEQ ID NO: 4460140 - DNA, 25 bp, Homo sapien
tgatgatggcgtacttggtctggct

SEQ ID NO: 4460141 - DNA, 25 bp, Homo sapien
tccgtttcccaaatattggtgtgga

SEQ ID NO: 4460142 - DNA, 25 bp, Homo sapien
tacaatttaccagaccacagacttc

SEQ ID NO: 4460143 - DNA, 25 bp, Homo sapien
ccggaatccgtaacatcagtttcat

SEQ ID NO: 4460144 - DNA, 25 bp, Homo sapien
ccagtcatgttaaagcgattgatac

SEQ ID NO: 4460145 - DNA, 25 bp, Homo sapien
ccacagacttctccggaatccgtaa

SEQ ID NO: 4460146 - DNA, 25 bp, Homo sapien
tctttaaatattacggaacacgaga

SEQ ID NO: 4460147 - DNA, 25 bp, Homo sapien
tacggaacacgagaagctgtgattg

SEQ ID NO: 4460148 - DNA, 25 bp, Homo sapien
aacacgagaagctgtgattgcccag

SEQ ID NO: 4460149 - DNA, 25 bp, Homo sapien
taaatattacggaacacgagaagct

SEQ ID NO: 4460150 - DNA, 25 bp, Homo sapien
ggttcactcttgtaggcccagcttg

SEQ ID NO: 4460151 - DNA, 25 bp, Homo sapien
gaaaataaagagagaacggccaggc

SEQ ID NO: 4460152 - DNA, 25 bp, Homo sapien
taaagagctaggtgagatggttcac

SEQ ID NO: 4460153 - DNA, 25 bp, Homo sapien
aatccacaaccaaagttagctgggt

SEQ ID NO: 4460154 - DNA, 25 bp, Homo sapien
ttcttgttctcctcctggaagtttg

SEQ ID NO: 4460155 - DNA, 25 bp, Homo sapien
ggcttcttaggatcttcttttacca

SEQ ID NO: 4460156 - DNA, 25 bp, Homo sapien
cttcttaggatcttcttttaccaag

SEQ ID NO: 4460157 - DNA, 25 bp, Homo sapien
ctcctggaagtttgcacaaagaatg

SEQ ID NO: 4460158 - DNA, 25 bp, Homo sapien
ttctctttagcagatacggctttcc

SEQ ID NO: 4460159 - DNA, 25 bp, Homo sapien
tttctctttagcagatacggctttc

SEQ ID NO: 4460160 - DNA, 25 bp, Homo sapien
tagaaaattccgagaagttaactga

SEQ ID NO: 4460161 - DNA, 25 bp, Homo sapien
gataggtttggatattctccttaga

SEQ ID NO: 4460162 - DNA, 25 bp, Homo sapien
gatgtaagtttctctttaatagcca

SEQ ID NO: 4460163 - DNA, 25 bp, Homo sapien
tctttgaaacatcacgaatggatag

SEQ ID NO: 4460164 - DNA, 25 bp, Homo sapien
ggctgcttgtcatatgcaccatatc

SEQ ID NO: 4460165 - DNA, 25 bp, Homo sapien
gctcagtatgcagcaatatccattt

SEQ ID NO: 4460166 - DNA, 25 bp, Homo sapien
tagctcagtatgcagcaatatccat

SEQ ID NO: 4460167 - DNA, 25 bp, Homo sapien
tttagctcagtatgcagcaatatcc

SEQ ID NO: 4460168 - DNA, 25 bp, Homo sapien
ctcagtatgcagcaatatccatttc

SEQ ID NO: 4460169 - DNA, 25 bp, Homo sapien
tctggtgaccagctctattccaagg

SEQ ID NO: 4460170 - DNA, 25 bp, Homo sapien
tatctgtggattcagtcagccttgg

SEQ ID NO: 4460171 - DNA, 25 bp, Homo sapien
tcagtgtgttcaaccctggaagctg

SEQ ID NO: 4460172 - DNA, 25 bp, Homo sapien
tgaagagacacctatcactgaggat

SEQ ID NO: 4460173 - DNA, 25 bp, Homo sapien
gggcgctcgcgctagccccagagga

SEQ ID NO: 4460174 - DNA, 25 bp, Homo sapien
agggcatccttgcaggcattctgca

SEQ ID NO: 4460175 - DNA, 25 bp, Homo sapien
tgcggctgcctgagagacattgatc

SEQ ID NO: 4460176 - DNA, 25 bp, Homo sapien
acagtactgttgaagctctgcggct

SEQ ID NO: 4460177 - DNA, 25 bp, Homo sapien
ttctctcttagagtcttcagagtaa

SEQ ID NO: 4460178 - DNA, 25 bp, Homo sapien
aaacttctctcttagagtcttcaga

SEQ ID NO: 4460179 - DNA, 25 bp, Homo sapien
tcagagtaaagcacaggatctgggt

SEQ ID NO: 4460180 - DNA, 25 bp, Homo sapien
aagcacaggatctgggttcccagaa

SEQ ID NO: 4460181 - DNA, 25 bp, Homo sapien
gggccacaggaaagggctgaaatat

SEQ ID NO: 4460182 - DNA, 25 bp, Homo sapien
attttggctataggacggggccaca

SEQ ID NO: 4460183 - DNA, 25 bp, Homo sapien
tcactcaagtagaaactcatgaatt

SEQ ID NO: 4460184 - DNA, 25 bp, Homo sapien
ttctgtgattttggctataggacgg

SEQ ID NO: 4460185 - DNA, 25 bp, Homo sapien
catgtgctaagcaaggtccatttac

SEQ ID NO: 4460186 - DNA, 25 bp, Homo sapien
gccatgatctatatatgttgagacc

SEQ ID NO: 4460187 - DNA, 25 bp, Homo sapien
taccaaggccatgacagttttcttc

SEQ ID NO: 4460188 - DNA, 25 bp, Homo sapien
taaggtagcattgactaccaaggcc

SEQ ID NO: 4460189 - DNA, 25 bp, Homo sapien
tcatctttttgatgtcgatgatggt

SEQ ID NO: 4460190 - DNA, 25 bp, Homo sapien
tctttttgatgtcgatgatggtcat

SEQ ID NO: 4460191 - DNA, 25 bp, Homo sapien
atctttttgatgtcgatgatggtca

SEQ ID NO: 4460192 - DNA, 25 bp, Homo sapien
catctttttgatgtcgatgatggtc

SEQ ID NO: 4460193 - DNA, 25 bp, Homo sapien
ccacgcccagcgaaacaatggtttt

SEQ ID NO: 4460194 - DNA, 25 bp, Homo sapien
taaggttggcccttcgattgtgcca

SEQ ID NO: 4460195 - DNA, 25 bp, Homo sapien
tgcagaggcttccactgtagtgttc

SEQ ID NO: 4460196 - DNA, 25 bp, Homo sapien
tggtcatcaggtagtgaaggaccct

SEQ ID NO: 4460197 - DNA, 25 bp, Homo sapien
tgaatgtgcatacagatcactctgg

SEQ ID NO: 4460198 - DNA, 25 bp, Homo sapien
gaacacatagtgagtagtaggcctc

SEQ ID NO: 4460199 - DNA, 25 bp, Homo sapien
actcaacctgtatagctgctggtag

SEQ ID NO: 4460200 - DNA, 25 bp, Homo sapien
gatacctatgctgttagtcgctgaa

SEQ ID NO: 4460201 - DNA, 25 bp, Homo sapien
caaagatttgatacctgttctgtaa

SEQ ID NO: 4460202 - DNA, 25 bp, Homo sapien
acttgtcacatgatctgcactcata

SEQ ID NO: 4460203 - DNA, 25 bp, Homo sapien
agacttgtcacatgatctgcactca

SEQ ID NO: 4460204 - DNA, 25 bp, Homo sapien
tgtcacatgatctgcactcataagg

SEQ ID NO: 4460205 - DNA, 25 bp, Homo sapien
ttgtcacatgatctgcactcataag

SEQ ID NO: 4460206 - DNA, 25 bp, Homo sapien
tacaacacttagaagtctcttttcc

SEQ ID NO: 4460207 - DNA, 25 bp, Homo sapien
cacgaattctcttatatgctgtaag

SEQ ID NO: 4460208 - DNA, 25 bp, Homo sapien
gttccatcacgaattctcttatatg

SEQ ID NO: 4460209 - DNA, 25 bp, Homo sapien
gtaagataggaattgtggctgaaga

SEQ ID NO: 4460210 - DNA, 25 bp, Homo sapien
tcatgacatccaatttataagcatt

SEQ ID NO: 4460211 - DNA, 25 bp, Homo sapien
ggatattgttctgtacatggtaaga

SEQ ID NO: 4460212 - DNA, 25 bp, Homo sapien
cagatagcaagtgcttgatacattt

SEQ ID NO: 4460213 - DNA, 25 bp, Homo sapien
taaacaagaaattgatgtaatcagg

SEQ ID NO: 4460214 - DNA, 25 bp, Homo sapien
ttaagaagtcgaaagcagccctgct

SEQ ID NO: 4460215 - DNA, 25 bp, Homo sapien
tcggaaaattacatctcggacatgg

SEQ ID NO: 4460216 - DNA, 25 bp, Homo sapien
tttacttggtagctgtggtgcacca

SEQ ID NO: 4460217 - DNA, 25 bp, Homo sapien
cgtggattcgcttcaaagatgtgac

SEQ ID NO: 4460218 - DNA, 25 bp, Homo sapien
gattttatatccaagagcacaaagg

SEQ ID NO: 4460219 - DNA, 25 bp, Homo sapien
tggcatcactggctataatgtttga

SEQ ID NO: 4460220 - DNA, 25 bp, Homo sapien
attttatatccaagagcacaaaggc

SEQ ID NO: 4460221 - DNA, 25 bp, Homo sapien
tcactggctataatgtttgaagacc

SEQ ID NO: 4460222 - DNA, 25 bp, Homo sapien
tgtccgtgcgctctgagcttgcctc

SEQ ID NO: 4460223 - DNA, 25 bp, Homo sapien
ctgtattggcagcaacagcgccctg

SEQ ID NO: 4460224 - DNA, 25 bp, Homo sapien
ttggacgccatgacagctgtattgg

SEQ ID NO: 4460225 - DNA, 25 bp, Homo sapien
tcaccggggagagtactaagaacgc

SEQ ID NO: 4460226 - DNA, 25 bp, Homo sapien
gcaaaacattgaggatggccagcaa

SEQ ID NO: 4460227 - DNA, 25 bp, Homo sapien
gaatgcaggttagagaacgactcca

SEQ ID NO: 4460228 - DNA, 25 bp, Homo sapien
gatacacagattgtcccgggaagcg

SEQ ID NO: 4460229 - DNA, 25 bp, Homo sapien
cactattgaactcgcagctactggg

SEQ ID NO: 4460230 - DNA, 25 bp, Homo sapien
ccaccccaaaagctgtaggaagtag

SEQ ID NO: 4460231 - DNA, 25 bp, Homo sapien
taacactgcaagcttaaatgagaca

SEQ ID NO: 4460232 - DNA, 25 bp, Homo sapien
gaaaacttagtccatgatatcacgg

SEQ ID NO: 4460233 - DNA, 25 bp, Homo sapien
cattcggatgcatggttactggtaa

SEQ ID NO: 4460234 - DNA, 25 bp, Homo sapien
gaagttacggtaattgggtctcaga

SEQ ID NO: 4460235 - DNA, 25 bp, Homo sapien
agttttctaggactacgccatacca

SEQ ID NO: 4460236 - DNA, 25 bp, Homo sapien
tcaagacccataaatcccatgaagt

SEQ ID NO: 4460237 - DNA, 25 bp, Homo sapien
aaagattggttcaagacccataaat

SEQ ID NO: 4460238 - DNA, 25 bp, Homo sapien
tacgccataccaaaggaaaatgtcc

SEQ ID NO: 4460239 - DNA, 25 bp, Homo sapien
gaactctctaaccaaagcgctatct

SEQ ID NO: 4460240 - DNA, 25 bp, Homo sapien
tcattgggagaagtcatcattggga

SEQ ID NO: 4460241 - DNA, 25 bp, Homo sapien
gcgctatctgcatcaattcttcgtg

SEQ ID NO: 4460242 - DNA, 25 bp, Homo sapien
gggaacgctacattatcctcatcaa

SEQ ID NO: 4460243 - DNA, 25 bp, Homo sapien
ctaaatattccatcagctgctcagc

SEQ ID NO: 4460244 - DNA, 25 bp, Homo sapien
catcagctgctcagcagttatgatt

SEQ ID NO: 4460245 - DNA, 25 bp, Homo sapien
gctgctcagcagttatgatttccat

SEQ ID NO: 4460246 - DNA, 25 bp, Homo sapien
aaatattccatcagctgctcagcag

SEQ ID NO: 4460247 - DNA, 25 bp, Homo sapien
gaatcacactttcggtagcactgct

SEQ ID NO: 4460248 - DNA, 25 bp, Homo sapien
gagactgggtaatcaactagctttg

SEQ ID NO: 4460249 - DNA, 25 bp, Homo sapien
caagttcaactcaatgtagccagtc

SEQ ID NO: 4460250 - DNA, 25 bp, Homo sapien
cactttctacatgcaatgtcagcga

SEQ ID NO: 4460251 - DNA, 25 bp, Homo sapien
ttggctttgcatcaagcatgtaatc

SEQ ID NO: 4460252 - DNA, 25 bp, Homo sapien
cataatttaaacgttgaatttctga

SEQ ID NO: 4460253 - DNA, 25 bp, Homo sapien
ctgttcataatttaaacgttgaatt

SEQ ID NO: 4460254 - DNA, 25 bp, Homo sapien
cttttggctttgcatcaagcatgta

SEQ ID NO: 4460255 - DNA, 25 bp, Homo sapien
tccaggcctgtctgtagtttgtgca

SEQ ID NO: 4460256 - DNA, 25 bp, Homo sapien
atttacatccaggcctgtctgtagt

SEQ ID NO: 4460257 - DNA, 25 bp, Homo sapien
aaattgccatggcatcactcatatt

SEQ ID NO: 4460258 - DNA, 25 bp, Homo sapien
tacatccaggcctgtctgtagtttg

SEQ ID NO: 4460259 - DNA, 25 bp, Homo sapien
tggtgtatattcaaacactcgaaca

SEQ ID NO: 4460260 - DNA, 25 bp, Homo sapien
gtatattcaaacactcgaacaccag

SEQ ID NO: 4460261 - DNA, 25 bp, Homo sapien
acactcgaacaccagtgaatcttac

SEQ ID NO: 4460262 - DNA, 25 bp, Homo sapien
tacaaaggaatatcaagaagatcaa

SEQ ID NO: 4460263 - DNA, 25 bp, Homo sapien
tccaaccttggatgtataaactgct

SEQ ID NO: 4460264 - DNA, 25 bp, Homo sapien
tccccattgctctagagtgccctag

SEQ ID NO: 4460265 - DNA, 25 bp, Homo sapien
ggcttacattcctcagactgtcatt

SEQ ID NO: 4460266 - DNA, 25 bp, Homo sapien
gcatgctgatgcacaactgcagccc

SEQ ID NO: 4460267 - DNA, 25 bp, Homo sapien
tgtctgactgtttacaagagatgat

SEQ ID NO: 4460268 - DNA, 25 bp, Homo sapien
actgtttacaagagatgatcttctc

SEQ ID NO: 4460269 - DNA, 25 bp, Homo sapien
cactattgtctgactgtttacaaga

SEQ ID NO: 4460270 - DNA, 25 bp, Homo sapien
taaccagctcactattgtctgactg

SEQ ID NO: 4460271 - DNA, 25 bp, Homo sapien
aaagtcaggaaatagcagcactcac

SEQ ID NO: 4460272 - DNA, 25 bp, Homo sapien
attatcttgccaagaatttcaaaag

SEQ ID NO: 4460273 - DNA, 25 bp, Homo sapien
ttcatacaagtaatataacatgtgt

SEQ ID NO: 4460274 - DNA, 25 bp, Homo sapien
tttcaaaagtcaggaaatagcagca

SEQ ID NO: 4460275 - DNA, 25 bp, Homo sapien
aaaacctttcattggcacctttatg

SEQ ID NO: 4460276 - DNA, 25 bp, Homo sapien
tcagtaacctctgggtacctgacca

SEQ ID NO: 4460277 - DNA, 25 bp, Homo sapien
aatttttaatagaatccaggcctga

SEQ ID NO: 4460278 - DNA, 25 bp, Homo sapien
cataccaaagttagcaagtgattcc

SEQ ID NO: 4460279 - DNA, 25 bp, Homo sapien
tattcaggatcaatgataaagtcca

SEQ ID NO: 4460280 - DNA, 25 bp, Homo sapien
taatactcatctcagtcagttgaag

SEQ ID NO: 4460281 - DNA, 25 bp, Homo sapien
ctagagtacttgagcaccataatac

SEQ ID NO: 4460282 - DNA, 25 bp, Homo sapien
taggaattccagttagctaaggatt

SEQ ID NO: 4460283 - DNA, 25 bp, Homo sapien
tgtttactgcaagtagaagaatagc

SEQ ID NO: 4460284 - DNA, 25 bp, Homo sapien
agtagaagaatagcataaacctccc

SEQ ID NO: 4460285 - DNA, 25 bp, Homo sapien
tctttatatgtttactgcaagtaga

SEQ ID NO: 4460286 - DNA, 25 bp, Homo sapien
agaatagcataaacctcccagcttg

SEQ ID NO: 4460287 - DNA, 25 bp, Homo sapien
ctagggacagtggttcagcattcac

SEQ ID NO: 4460288 - DNA, 25 bp, Homo sapien
gctgtgagtttaacgctagtgaatc

SEQ ID NO: 4460289 - DNA, 25 bp, Homo sapien
tctgcattatactgatcagctgagc

SEQ ID NO: 4460290 - DNA, 25 bp, Homo sapien
tcactcatatttatcctagggacag

SEQ ID NO: 4460291 - DNA, 25 bp, Homo sapien
agttctccttcctgaaccgttgaag

SEQ ID NO: 4460292 - DNA, 25 bp, Homo sapien
gattattccgaaagaacacacaaag

SEQ ID NO: 4460293 - DNA, 25 bp, Homo sapien
tccatggtatgtcagttgagtggct

SEQ ID NO: 4460294 - DNA, 25 bp, Homo sapien
gaagttagttcacataatccatggt

SEQ ID NO: 4460295 - DNA, 25 bp, Homo sapien
cagtgaatagacaccattttggctg

SEQ ID NO: 4460296 - DNA, 25 bp, Homo sapien
gggcaacccactccttcaagatatg

SEQ ID NO: 4460297 - DNA, 25 bp, Homo sapien
tatccccacgcatgaagtgctactg

SEQ ID NO: 4460298 - DNA, 25 bp, Homo sapien
ggcgtggatcctccgcatgctgaac

SEQ ID NO: 4460299 - DNA, 25 bp, Homo sapien
gaacaaaggcacaatcctctctctg

SEQ ID NO: 4460300 - DNA, 25 bp, Homo sapien
tcccttattaagcaaatggacacca

SEQ ID NO: 4460301 - DNA, 25 bp, Homo sapien
taggggttctattctacaccaacag

SEQ ID NO: 4460302 - DNA, 25 bp, Homo sapien
aataatcttaatgatgaacagcctt

SEQ ID NO: 4460303 - DNA, 25 bp, Homo sapien
agtgaaatgctagaaggcagtagga

SEQ ID NO: 4460304 - DNA, 25 bp, Homo sapien
taagcctggctggtcattaaatatg

SEQ ID NO: 4460305 - DNA, 25 bp, Homo sapien
aggtcttacttcattgtccatgctg

SEQ ID NO: 4460306 - DNA, 25 bp, Homo sapien
agttaactgtagcttcgatctcctg

SEQ ID NO: 4460307 - DNA, 25 bp, Homo sapien
tctgaaggaggtcgaagatgaaatt

SEQ ID NO: 4460308 - DNA, 25 bp, Homo sapien
tctcttcagtaagaaacccctggtc

SEQ ID NO: 4460309 - DNA, 25 bp, Homo sapien
cctggtccgttaccaacaaatacag

SEQ ID NO: 4460310 - DNA, 25 bp, Homo sapien
catctacgttgtgtaggctttccca

SEQ ID NO: 4460311 - DNA, 25 bp, Homo sapien
gttcctgttcctgatagtattgaga

SEQ ID NO: 4460312 - DNA, 25 bp, Homo sapien
aatcactgattccttccgggatttg

SEQ ID NO: 4460313 - DNA, 25 bp, Homo sapien
ggagtttctttgctagttccaaatc

SEQ ID NO: 4460314 - DNA, 25 bp, Homo sapien
tagtattgagaagcccgtctgtcct

SEQ ID NO: 4460315 - DNA, 25 bp, Homo sapien
tactcatggttatctagaaaggaaa

SEQ ID NO: 4460316 - DNA, 25 bp, Homo sapien
aagaagctagctattggcatacaga

SEQ ID NO: 4460317 - DNA, 25 bp, Homo sapien
tctaactattctgagggacttactc

SEQ ID NO: 4460318 - DNA, 25 bp, Homo sapien
gagccattaccgctaccattctgga

SEQ ID NO: 4460319 - DNA, 25 bp, Homo sapien
gtttacgttcactattcccagattg

SEQ ID NO: 4460320 - DNA, 25 bp, Homo sapien
tccgtttacgttcactattcccaga

SEQ ID NO: 4460321 - DNA, 25 bp, Homo sapien
tcccagattgtcttccacttgatgg

SEQ ID NO: 4460322 - DNA, 25 bp, Homo sapien
gttcactattcccagattgtcttcc

SEQ ID NO: 4460323 - DNA, 25 bp, Homo sapien
tctccaagtggatgctcaggtcaga

SEQ ID NO: 4460324 - DNA, 25 bp, Homo sapien
tcaacctgtttgagccaatagagag

SEQ ID NO: 4460325 - DNA, 25 bp, Homo sapien
tatcactactatctgtcccgggaaa

SEQ ID NO: 4460326 - DNA, 25 bp, Homo sapien
ccagagggaatgcagtatggcagca

SEQ ID NO: 4460327 - DNA, 25 bp, Homo sapien
aattctttatacccttcaagggcag

SEQ ID NO: 4460328 - DNA, 25 bp, Homo sapien
ggcatgatctaaattctttataccc

SEQ ID NO: 4460329 - DNA, 25 bp, Homo sapien
tacaggcatgatctaaattctttat

SEQ ID NO: 4460330 - DNA, 25 bp, Homo sapien
ttctttatacccttcaagggcagga

SEQ ID NO: 4460331 - DNA, 25 bp, Homo sapien
aattatgagagccaaaggagccagg

SEQ ID NO: 4460332 - DNA, 25 bp, Homo sapien
catttgggaagagatcacgccatac

SEQ ID NO: 4460333 - DNA, 25 bp, Homo sapien
tgtacccaaaccagcaatgaagtgg

SEQ ID NO: 4460334 - DNA, 25 bp, Homo sapien
tgcccaaggcaagatagaaagtcgg

SEQ ID NO: 4460335 - DNA, 25 bp, Homo sapien
ggctggcagcgcgctcagaaactgc

SEQ ID NO: 4460336 - DNA, 25 bp, Homo sapien
gctggcagcgcgctcagaaactgct

SEQ ID NO: 4460337 - DNA, 25 bp, Homo sapien
ctggcagcgcgctcagaaactgctc

SEQ ID NO: 4460338 - DNA, 25 bp, Homo sapien
gcctcctcccagcttagcggctgac

SEQ ID NO: 4460339 - DNA, 25 bp, Homo sapien
ctcccagcttagcggctgacggctg

SEQ ID NO: 4460340 - DNA, 25 bp, Homo sapien
tcctcccagcttagcggctgacggc

SEQ ID NO: 4460341 - DNA, 25 bp, Homo sapien
ctcctcccagcttagcggctgacgg

SEQ ID NO: 4460342 - DNA, 25 bp, Homo sapien
cagcacccagcaggcactcggtaca

SEQ ID NO: 4460343 - DNA, 25 bp, Homo sapien
gcacccagcaggcactcggtacaca

SEQ ID NO: 4460344 - DNA, 25 bp, Homo sapien
cacccagcaggcactcggtacacac

SEQ ID NO: 4460345 - DNA, 25 bp, Homo sapien
ccagcacccagcaggcactcggtac

SEQ ID NO: 4460346 - DNA, 25 bp, Homo sapien
aaggagggtgaggatagagaagcca

SEQ ID NO: 4460347 - DNA, 25 bp, Homo sapien
ggtgaggatagagaagccagagtca

SEQ ID NO: 4460348 - DNA, 25 bp, Homo sapien
gagggtgaggatagagaagccagag

SEQ ID NO: 4460349 - DNA, 25 bp, Homo sapien
tgaggatagagaagccagagtcagc

SEQ ID NO: 4460350 - DNA, 25 bp, Homo sapien
ggagattacattttcacataagatt

SEQ ID NO: 4460351 - DNA, 25 bp, Homo sapien
gaagcatagaggcttccacttctgg

SEQ ID NO: 4460352 - DNA, 25 bp, Homo sapien
gcacataccacatggccagaacaag

SEQ ID NO: 4460353 - DNA, 25 bp, Homo sapien
tatggatatccacttttttcagtat

SEQ ID NO: 4460354 - DNA, 25 bp, Homo sapien
attgtgtttttagatttcgatgaag

SEQ ID NO: 4460355 - DNA, 25 bp, Homo sapien
aattgtgtttttagatttcgatgaa

SEQ ID NO: 4460356 - DNA, 25 bp, Homo sapien
tgtttttagatttcgatgaagtggg

SEQ ID NO: 4460357 - DNA, 25 bp, Homo sapien
tgtgtttttagatttcgatgaagtg

SEQ ID NO: 4460358 - DNA, 25 bp, Homo sapien
tgtgcttctctgggtagaggctgct

SEQ ID NO: 4460359 - DNA, 25 bp, Homo sapien
ttctctgggtagaggctgctgcttc

SEQ ID NO: 4460360 - DNA, 25 bp, Homo sapien
tgcttctctgggtagaggctgctgc

SEQ ID NO: 4460361 - DNA, 25 bp, Homo sapien
tctgggtagaggctgctgcttcagt

SEQ ID NO: 4460362 - DNA, 25 bp, Homo sapien
tatgaatttgtagggaagaggttcc

SEQ ID NO: 4460363 - DNA, 25 bp, Homo sapien
ttatgctatgaatttgtagggaaga

SEQ ID NO: 4460364 - DNA, 25 bp, Homo sapien
gctatgaatttgtagggaagaggtt

SEQ ID NO: 4460365 - DNA, 25 bp, Homo sapien
agcagctcagactccttcccattgg

SEQ ID NO: 4460366 - DNA, 25 bp, Homo sapien
cccagtcctacagctgtgggagcag

SEQ ID NO: 4460367 - DNA, 25 bp, Homo sapien
gctcaatacggtcatgcccatgaga

SEQ ID NO: 4460368 - DNA, 25 bp, Homo sapien
ccatgagatggctcacacttctgag

SEQ ID NO: 4460369 - DNA, 25 bp, Homo sapien
tttcttacgttttctgccattccca

SEQ ID NO: 4460370 - DNA, 25 bp, Homo sapien
cctggcccttataatctagttttat

SEQ ID NO: 4460371 - DNA, 25 bp, Homo sapien
tgcctgaaccatttcactgtagatt

SEQ ID NO: 4460372 - DNA, 25 bp, Homo sapien
tatcatagctatcccttattcctca

SEQ ID NO: 4460373 - DNA, 25 bp, Homo sapien
tttccaagacgaagtatctgtcccc

SEQ ID NO: 4460374 - DNA, 25 bp, Homo sapien
gtctgagcataggactatgagtcca

SEQ ID NO: 4460375 - DNA, 25 bp, Homo sapien
gctctgcaatatcatggcagcctaa

SEQ ID NO: 4460376 - DNA, 25 bp, Homo sapien
tccagagtagttgtaatccaggctc

SEQ ID NO: 4460377 - DNA, 25 bp, Homo sapien
actggtaataattctagctctgcaa

SEQ ID NO: 4460378 - DNA, 25 bp, Homo sapien
aagaaagcaaggatactaagaaaat

SEQ ID NO: 4460379 - DNA, 25 bp, Homo sapien
tgaagaaaagaagcgaataagtatg

SEQ ID NO: 4460380 - DNA, 25 bp, Homo sapien
agaaaagatcgtctgagaaatctga

SEQ ID NO: 4460381 - DNA, 25 bp, Homo sapien
gcaagtggccaaacatcagaatcga

SEQ ID NO: 4460382 - DNA, 25 bp, Homo sapien
ttttttgtctggggcggtatggtca

SEQ ID NO: 4460383 - DNA, 25 bp, Homo sapien
ttttggtacattatgaagtactcat

SEQ ID NO: 4460384 - DNA, 25 bp, Homo sapien
cattatgaagtactcattctgtttt

SEQ ID NO: 4460385 - DNA, 25 bp, Homo sapien
gggcggtatggtcaggacacaagcc

SEQ ID NO: 4460386 - DNA, 25 bp, Homo sapien
catacaaaacaagttattaaaacat

SEQ ID NO: 4460387 - DNA, 25 bp, Homo sapien
taaaacatttggtagggcacagtgg

SEQ ID NO: 4460388 - DNA, 25 bp, Homo sapien
gcaagacctcgtctccacttagaat

SEQ ID NO: 4460389 - DNA, 25 bp, Homo sapien
gacctcgtctccacttagaattaaa

SEQ ID NO: 4460390 - DNA, 25 bp, Homo sapien
gaaaatttaatctggctggatgcag

SEQ ID NO: 4460391 - DNA, 25 bp, Homo sapien
tagaaaatttaatctggctggatgc

SEQ ID NO: 4460392 - DNA, 25 bp, Homo sapien
cagtagaaaatttaatctggctgga

SEQ ID NO: 4460393 - DNA, 25 bp, Homo sapien
aaaatttaatctggctggatgcagt

SEQ ID NO: 4460394 - DNA, 25 bp, Homo sapien
ccgtgaagggagtcagcgcccattg

SEQ ID NO: 4460395 - DNA, 25 bp, Homo sapien
aaatgcatgcatcccccgtgaaggg

SEQ ID NO: 4460396 - DNA, 25 bp, Homo sapien
cccattggtatgtgttagctctaga

SEQ ID NO: 4460397 - DNA, 25 bp, Homo sapien
cacagttacccaagtaggacaggat

SEQ ID NO: 4460398 - DNA, 25 bp, Homo sapien
tagaaagttaacacaacaccaagcg

SEQ ID NO: 4460399 - DNA, 25 bp, Homo sapien
catacttggaaggactagcatatct

SEQ ID NO: 4460400 - DNA, 25 bp, Homo sapien
tagatgacagataggagctaccgag

SEQ ID NO: 4460401 - DNA, 25 bp, Homo sapien
taccgaggagactagggaaatgcag

SEQ ID NO: 4460402 - DNA, 25 bp, Homo sapien
catcatagggtgcttggacaaatca

SEQ ID NO: 4460403 - DNA, 25 bp, Homo sapien
tcataataagatatagtggcaggac

SEQ ID NO: 4460404 - DNA, 25 bp, Homo sapien
gattggtcacgaaatcctggcttca

SEQ ID NO: 4460405 - DNA, 25 bp, Homo sapien
gcttcagttctgacagcaccatttt

SEQ ID NO: 4460406 - DNA, 25 bp, Homo sapien
gtaacgcgcgcactatgtcattcag

SEQ ID NO: 4460407 - DNA, 25 bp, Homo sapien
gaacctagttcgttggtgcacaccg

SEQ ID NO: 4460408 - DNA, 25 bp, Homo sapien
tatttccttgagaggttcagcgcgc

SEQ ID NO: 4460409 - DNA, 25 bp, Homo sapien
tgttgctcaagactcaagacgttgc

SEQ ID NO: 4460410 - DNA, 25 bp, Homo sapien
tttcccattttatacttgcacactg

SEQ ID NO: 4460411 - DNA, 25 bp, Homo sapien
atgtttttccgctaacatttcccat

SEQ ID NO: 4460412 - DNA, 25 bp, Homo sapien
cactgaacactagtggtattattgt

SEQ ID NO: 4460413 - DNA, 25 bp, Homo sapien
gcctcatattcatgtctccaatcca

SEQ ID NO: 4460414 - DNA, 25 bp, Homo sapien
tctgatgccatggaatctgctgtgc

SEQ ID NO: 4460415 - DNA, 25 bp, Homo sapien
tttcaaggaacttgtgactctgatc

SEQ ID NO: 4460416 - DNA, 25 bp, Homo sapien
actctgatcagtgcattgtcatctg

SEQ ID NO: 4460417 - DNA, 25 bp, Homo sapien
cagtgcattgtcatctgatgccatg

SEQ ID NO: 4460418 - DNA, 25 bp, Homo sapien
taatgcgtcgagagccagcgatctg

SEQ ID NO: 4460419 - DNA, 25 bp, Homo sapien
caccaaaactgtacgtgcggcagcg

SEQ ID NO: 4460420 - DNA, 25 bp, Homo sapien
taggcccctagagtcaagaacagtg

SEQ ID NO: 4460421 - DNA, 25 bp, Homo sapien
ctaagccggcgtgggttcagaatgc

SEQ ID NO: 4460422 - DNA, 25 bp, Homo sapien
cctaagtcaccaccgagccagagat

SEQ ID NO: 4460423 - DNA, 25 bp, Homo sapien
agtcaccaccgagccagagataacc

SEQ ID NO: 4460424 - DNA, 25 bp, Homo sapien
ctgcggagacccagaccctaagtca

SEQ ID NO: 4460425 - DNA, 25 bp, Homo sapien
tgcggagacccagaccctaagtcac

SEQ ID NO: 4460426 - DNA, 25 bp, Homo sapien
tagacgaatgccttgcccaaacaca

SEQ ID NO: 4460427 - DNA, 25 bp, Homo sapien
tcggtagacgaatgccttgcccaaa

SEQ ID NO: 4460428 - DNA, 25 bp, Homo sapien
taggctgtgggtgtgtcggtagacg

SEQ ID NO: 4460429 - DNA, 25 bp, Homo sapien
gtgtgtcggtagacgaatgccttgc

SEQ ID NO: 4460430 - DNA, 25 bp, Homo sapien
ggaagtgggagagaaatcccctcac

SEQ ID NO: 4460431 - DNA, 25 bp, Homo sapien
ctagggagagtcggaagtgggagag

SEQ ID NO: 4460432 - DNA, 25 bp, Homo sapien
agggagagtcggaagtgggagagaa

SEQ ID NO: 4460433 - DNA, 25 bp, Homo sapien
tcggaagtgggagagaaatcccctc

SEQ ID NO: 4460434 - DNA, 25 bp, Homo sapien
tccattgtcaaatcgcactcccacg

SEQ ID NO: 4460435 - DNA, 25 bp, Homo sapien
attgtcaaatcgcactcccacgcct

SEQ ID NO: 4460436 - DNA, 25 bp, Homo sapien
gcactcccacgcctcggtcctcagc

SEQ ID NO: 4460437 - DNA, 25 bp, Homo sapien
tcatcactccattgtcaaatcgcac

SEQ ID NO: 4460438 - DNA, 25 bp, Homo sapien
tgacactgactctgataaattatcg

SEQ ID NO: 4460439 - DNA, 25 bp, Homo sapien
tgcactgaacagatattcccactat

SEQ ID NO: 4460440 - DNA, 25 bp, Homo sapien
gataaattatcgaaggacaatagta

SEQ ID NO: 4460441 - DNA, 25 bp, Homo sapien
tattcccactatagcactgacactg

SEQ ID NO: 4460442 - DNA, 25 bp, Homo sapien
taaagcaaatatccatacacaggtg

SEQ ID NO: 4460443 - DNA, 25 bp, Homo sapien
tatccatacacaggtgagaaactgg

SEQ ID NO: 4460444 - DNA, 25 bp, Homo sapien
tatgaaatataccaagatgtaacag

SEQ ID NO: 4460445 - DNA, 25 bp, Homo sapien
cacacattaagttagattgaataag

SEQ ID NO: 4460446 - DNA, 25 bp, Homo sapien
ggaacttgtccctcacataagaatg

SEQ ID NO: 4460447 - DNA, 25 bp, Homo sapien
catgggaaaacggaagggacagcta

SEQ ID NO: 4460448 - DNA, 25 bp, Homo sapien
cgtacttcccgtatttaccatgcag

SEQ ID NO: 4460449 - DNA, 25 bp, Homo sapien
tatgaatgcctacacagtgcccatg

SEQ ID NO: 4460450 - DNA, 25 bp, Homo sapien
tcactgacaatacattagctatcac

SEQ ID NO: 4460451 - DNA, 25 bp, Homo sapien
ccaagaaaagtcaatcaggaaagag

SEQ ID NO: 4460452 - DNA, 25 bp, Homo sapien
ttttagaagatacagtatcactgac

SEQ ID NO: 4460453 - DNA, 25 bp, Homo sapien
taatgagctaggcacttgttttagg

SEQ ID NO: 4460454 - DNA, 25 bp, Homo sapien
aataaataaatccaagagtctggga

SEQ ID NO: 4460455 - DNA, 25 bp, Homo sapien
cggcaaggaggataaacacaggata

SEQ ID NO: 4460456 - DNA, 25 bp, Homo sapien
aataaatccaagagtctgggaagag

SEQ ID NO: 4460457 - DNA, 25 bp, Homo sapien
aaaagatcaactcagctacggcaag

SEQ ID NO: 4460458 - DNA, 25 bp, Homo sapien
agtttcagtaaacctaaacagcaag

SEQ ID NO: 4460459 - DNA, 25 bp, Homo sapien
cgttaagtctcatctacacacattt

SEQ ID NO: 4460460 - DNA, 25 bp, Homo sapien
tcctaatgtgaattcttgtacacgt

SEQ ID NO: 4460461 - DNA, 25 bp, Homo sapien
gatagtaaggtgctaccctttccta

SEQ ID NO: 4460462 - DNA, 25 bp, Homo sapien
cgggatctaatgttgggagcaaaac

SEQ ID NO: 4460463 - DNA, 25 bp, Homo sapien
taatgaaagcctatgttctagaggc

SEQ ID NO: 4460464 - DNA, 25 bp, Homo sapien
gtctaacttattcaagtgaacctca

SEQ ID NO: 4460465 - DNA, 25 bp, Homo sapien
agattagaccaaaacactgagttgt

SEQ ID NO: 4460466 - DNA, 25 bp, Homo sapien
cctgctctctaacttcaccatccat

SEQ ID NO: 4460467 - DNA, 25 bp, Homo sapien
tcctagtaaagagcgagagacctca

SEQ ID NO: 4460468 - DNA, 25 bp, Homo sapien
tattaagcctgacaagaatggtgta

SEQ ID NO: 4460469 - DNA, 25 bp, Homo sapien
tatagttattccaaggtattaagcc

SEQ ID NO: 4460470 - DNA, 25 bp, Homo sapien
caaggactccaaattggctccgtca

SEQ ID NO: 4460471 - DNA, 25 bp, Homo sapien
attctgtagccacaagatatttacc

SEQ ID NO: 4460472 - DNA, 25 bp, Homo sapien
cttcttcaggtattctgtagccaca

SEQ ID NO: 4460473 - DNA, 25 bp, Homo sapien
taccatataactggggataatcagg

SEQ ID NO: 4460474 - DNA, 25 bp, Homo sapien
tgtagccacaagatatttaccatat

SEQ ID NO: 4460475 - DNA, 25 bp, Homo sapien
gaagtctccgtaacgaactgccatg

SEQ ID NO: 4460476 - DNA, 25 bp, Homo sapien
acaattctgcacatacgaagggcca

SEQ ID NO: 4460477 - DNA, 25 bp, Homo sapien
ttatgagaccgtgcactatggcttc

SEQ ID NO: 4460478 - DNA, 25 bp, Homo sapien
tcagtccgaggccacttatgagacc

SEQ ID NO: 4460479 - DNA, 25 bp, Homo sapien
ctagccttatagatgtcgtatctca

SEQ ID NO: 4460480 - DNA, 25 bp, Homo sapien
tagccttatagatgtcgtatctcat

SEQ ID NO: 4460481 - DNA, 25 bp, Homo sapien
ctacaggagcctgctcactagcctt

SEQ ID NO: 4460482 - DNA, 25 bp, Homo sapien
tgtcaatacaaatgtcacccaacag

SEQ ID NO: 4460483 - DNA, 25 bp, Homo sapien
aaatttatggagtgtaatcatcacc

SEQ ID NO: 4460484 - DNA, 25 bp, Homo sapien
ggcttcttcattactatcacctgtc

SEQ ID NO: 4460485 - DNA, 25 bp, Homo sapien
ttccaataaccccaaaagagctcgc

SEQ ID NO: 4460486 - DNA, 25 bp, Homo sapien
aaaaagaagaggcacctccaatttg

SEQ ID NO: 4460487 - DNA, 25 bp, Homo sapien
caataattcaccaagatgacaaaca

SEQ ID NO: 4460488 - DNA, 25 bp, Homo sapien
caatttgttctctagggcttttgga

SEQ ID NO: 4460489 - DNA, 25 bp, Homo sapien
gaagaggcacctccaatttgttctc

SEQ ID NO: 4460490 - DNA, 25 bp, Homo sapien
tttcttcattggcagtaacctgggg

SEQ ID NO: 4460491 - DNA, 25 bp, Homo sapien
cgatagctttctccaactgttacaa

SEQ ID NO: 4460492 - DNA, 25 bp, Homo sapien
aggaagcttctatcaccacaacatc

SEQ ID NO: 4460493 - DNA, 25 bp, Homo sapien
cacttcactgtcagttgaggtaaca

SEQ ID NO: 4460494 - DNA, 25 bp, Homo sapien
tggagtgtccaagggttgaacgaga

SEQ ID NO: 4460495 - DNA, 25 bp, Homo sapien
ggagtgtccaagggttgaacgagac

SEQ ID NO: 4460496 - DNA, 25 bp, Homo sapien
tgcctcaagggctgtataacagtag

SEQ ID NO: 4460497 - DNA, 25 bp, Homo sapien
tagaaatcctactgcggttccgtgg

SEQ ID NO: 4460498 - DNA, 25 bp, Homo sapien
catcttcatcaacggtaaggtccac

SEQ ID NO: 4460499 - DNA, 25 bp, Homo sapien
gacttgcatgagaactggaaccctg

SEQ ID NO: 4460500 - DNA, 25 bp, Homo sapien
gcgctagtagcttgtgattccattc

SEQ ID NO: 4460501 - DNA, 25 bp, Homo sapien
tcttgcagaagtggttggtactaca

SEQ ID NO: 4460502 - DNA, 25 bp, Homo sapien
tctgacactgtggaaggttggctac

SEQ ID NO: 4460503 - DNA, 25 bp, Homo sapien
tcctatagaagtgccagtggtacta

SEQ ID NO: 4460504 - DNA, 25 bp, Homo sapien
gaatacccgcttattaacatagcta

SEQ ID NO: 4460505 - DNA, 25 bp, Homo sapien
taagaatacccgcttattaacatag

SEQ ID NO: 4460506 - DNA, 25 bp, Homo sapien
cccgcttattaacatagctaaaatc

SEQ ID NO: 4460507 - DNA, 25 bp, Homo sapien
tattaacatagctaaaatcttagac

SEQ ID NO: 4460508 - DNA, 25 bp, Homo sapien
cctgttgggcagttttaagagtgct

SEQ ID NO: 4460509 - DNA, 25 bp, Homo sapien
ttctaaagtgcttatcagataaagg

SEQ ID NO: 4460510 - DNA, 25 bp, Homo sapien
aatactctggttacatatagcacac

SEQ ID NO: 4460511 - DNA, 25 bp, Homo sapien
gataatatcctttaatgcacgaaag

SEQ ID NO: 4460512 - DNA, 25 bp, Homo sapien
tccagccacatgtagttttctaatc

SEQ ID NO: 4460513 - DNA, 25 bp, Homo sapien
tataagatacccaagtaacaagcta

SEQ ID NO: 4460514 - DNA, 25 bp, Homo sapien
gatacccaagtaacaagctaagaaa

SEQ ID NO: 4460515 - DNA, 25 bp, Homo sapien
ctgatccagccacatgtagttttct

SEQ ID NO: 4460516 - DNA, 25 bp, Homo sapien
tggttaaagtgcctcctaggagtgc

SEQ ID NO: 4460517 - DNA, 25 bp, Homo sapien
tagagggcccactaaaaatgagaca

SEQ ID NO: 4460518 - DNA, 25 bp, Homo sapien
caggattatcgagaggcaggcatga

SEQ ID NO: 4460519 - DNA, 25 bp, Homo sapien
tctacaaaaggcactggataataca

SEQ ID NO: 4460520 - DNA, 25 bp, Homo sapien
taatcaaatcatgaaatatcactgt

SEQ ID NO: 4460521 - DNA, 25 bp, Homo sapien
cactgtgtaaaaaaataggtatggg

SEQ ID NO: 4460522 - DNA, 25 bp, Homo sapien
gaataatcaaatcatgaaatatcac

SEQ ID NO: 4460523 - DNA, 25 bp, Homo sapien
aaaaaatgcacagaataatcaaatc

SEQ ID NO: 4460524 - DNA, 25 bp, Homo sapien
gtttccgttacagcactagatgtag

SEQ ID NO: 4460525 - DNA, 25 bp, Homo sapien
gttacagcactagatgtagttctcc

SEQ ID NO: 4460526 - DNA, 25 bp, Homo sapien
ggccagtttccgttacagcactaga

SEQ ID NO: 4460527 - DNA, 25 bp, Homo sapien
ttgcaggagggccagtttccgttac

SEQ ID NO: 4460528 - DNA, 25 bp, Homo sapien
gaaagcaacttgtatgaggatgtcc

SEQ ID NO: 4460529 - DNA, 25 bp, Homo sapien
gacgaccctccacatggtgagtgct

SEQ ID NO: 4460530 - DNA, 25 bp, Homo sapien
taatgcatggtggttctgtgacgac

SEQ ID NO: 4460531 - DNA, 25 bp, Homo sapien
tgtatgaggatgtcctaatgcatgg

SEQ ID NO: 4460532 - DNA, 25 bp, Homo sapien
ctaaaggaaggagaaactgggacag

SEQ ID NO: 4460533 - DNA, 25 bp, Homo sapien
gctggtaccagaactactatttgct

SEQ ID NO: 4460534 - DNA, 25 bp, Homo sapien
caaggtgcttgtacttgtggaggtc

SEQ ID NO: 4460535 - DNA, 25 bp, Homo sapien
tctttccacagggcaagcaggatca

SEQ ID NO: 4460536 - DNA, 25 bp, Homo sapien
taccagaactactatttgctccaca

SEQ ID NO: 4460537 - DNA, 25 bp, Homo sapien
tgacatagaaaagtggtagcttggc

SEQ ID NO: 4460538 - DNA, 25 bp, Homo sapien
ctttaggaaaggtcgggtgacatag

SEQ ID NO: 4460539 - DNA, 25 bp, Homo sapien
cagaagacataccatcaaaatttta

SEQ ID NO: 4460540 - DNA, 25 bp, Homo sapien
gacccagaagacataccatcaaaat

SEQ ID NO: 4460541 - DNA, 25 bp, Homo sapien
ccatctattgatgataaaggttgac

SEQ ID NO: 4460542 - DNA, 25 bp, Homo sapien
gggctgcgcaaccatgcttgatcca

SEQ ID NO: 4460543 - DNA, 25 bp, Homo sapien
catgacttctgataccactgttgct

SEQ ID NO: 4460544 - DNA, 25 bp, Homo sapien
gccaaagattgcagctcgggaggaa

SEQ ID NO: 4460545 - DNA, 25 bp, Homo sapien
cattcctagtgtacttttaaacata

SEQ ID NO: 4460546 - DNA, 25 bp, Homo sapien
aagtattcaagcaactgctcaagca

SEQ ID NO: 4460547 - DNA, 25 bp, Homo sapien
taggcaccatgcagttgaacatata

SEQ ID NO: 4460548 - DNA, 25 bp, Homo sapien
taatcttggatatcttatgtcaata

SEQ ID NO: 4460549 - DNA, 25 bp, Homo sapien
cagctgtactggctaagtgagttgg

SEQ ID NO: 4460550 - DNA, 25 bp, Homo sapien
gatgaggaataacataatccacttg

SEQ ID NO: 4460551 - DNA, 25 bp, Homo sapien
gctggaatatggtgcgaaattggct

SEQ ID NO: 4460552 - DNA, 25 bp, Homo sapien
gaagcttgatgatgaagtggccttg

SEQ ID NO: 4460553 - DNA, 25 bp, Homo sapien
agtagaagaaaaagcaaacttgact

SEQ ID NO: 4460554 - DNA, 25 bp, Homo sapien
tgcataaagaaattagcctgggtca

SEQ ID NO: 4460555 - DNA, 25 bp, Homo sapien
ttttttcagctctacaggccgtatg

SEQ ID NO: 4460556 - DNA, 25 bp, Homo sapien
gatttttaccacacgatattgcaga

SEQ ID NO: 4460557 - DNA, 25 bp, Homo sapien
tagctcacatcagaccagtctgggt

SEQ ID NO: 4460558 - DNA, 25 bp, Homo sapien
cacacctaggaaacgtgtatttagc

SEQ ID NO: 4460559 - DNA, 25 bp, Homo sapien
aataccccaggcaaatgttgcaggc

SEQ ID NO: 4460560 - DNA, 25 bp, Homo sapien
agcaggacacattgaaaccttaatt

SEQ ID NO: 4460561 - DNA, 25 bp, Homo sapien
actcttatactgtaaagacattcaa

SEQ ID NO: 4460562 - DNA, 25 bp, Homo sapien
tggaaataattgaataattggttat

SEQ ID NO: 4460563 - DNA, 25 bp, Homo sapien
ctggaaataattgaataattggtta

SEQ ID NO: 4460564 - DNA, 25 bp, Homo sapien
ctggaaacacagaacacaaaaagac

SEQ ID NO: 4460565 - DNA, 25 bp, Homo sapien
ggaaacacagaacacaaaaagacca

SEQ ID NO: 4460566 - DNA, 25 bp, Homo sapien
tggaaacacagaacacaaaaagacc

SEQ ID NO: 4460567 - DNA, 25 bp, Homo sapien
catgaatatgatgcccatgaccata

SEQ ID NO: 4460568 - DNA, 25 bp, Homo sapien
gtttgggtgcatcctatgtggatgg

SEQ ID NO: 4460569 - DNA, 25 bp, Homo sapien
tctctggagcctgtcgaggatgtga

SEQ ID NO: 4460570 - DNA, 25 bp, Homo sapien
catagtctgaggcacatgaatatga

SEQ ID NO: 4460571 - DNA, 25 bp, Homo sapien
taccacaagctgtgaagcactgttt

SEQ ID NO: 4460572 - DNA, 25 bp, Homo sapien
tactcctgcttgatatggttccctg

SEQ ID NO: 4460573 - DNA, 25 bp, Homo sapien
tattgaaatactatgctgtacctcc

SEQ ID NO: 4460574 - DNA, 25 bp, Homo sapien
gaggcagtgtctcagttaaactggg

SEQ ID NO: 4460575 - DNA, 25 bp, Homo sapien
gtctcttttttatcaacagacatgg

SEQ ID NO: 4460576 - DNA, 25 bp, Homo sapien
tgagaacagtttaatcctccttagg

SEQ ID NO: 4460577 - DNA, 25 bp, Homo sapien
ggatgagaacagtttaatcctcctt

SEQ ID NO: 4460578 - DNA, 25 bp, Homo sapien
ttagggtctcttttttatcaacaga

SEQ ID NO: 4460579 - DNA, 25 bp, Homo sapien
tgcaccaggtgtataagtagctgca

SEQ ID NO: 4460580 - DNA, 25 bp, Homo sapien
caagtgaggatgcaatgcaccaggt

SEQ ID NO: 4460581 - DNA, 25 bp, Homo sapien
gtcactccagcttcaattcccagtt

SEQ ID NO: 4460582 - DNA, 25 bp, Homo sapien
ggaagagctcctaattgtaagtgat

SEQ ID NO: 4460583 - DNA, 25 bp, Homo sapien
tataaagcaagaaggctatattcac

SEQ ID NO: 4460584 - DNA, 25 bp, Homo sapien
tcccttcacagccaagcttataaag

SEQ ID NO: 4460585 - DNA, 25 bp, Homo sapien
tggaattactgccaaccaaataggg

SEQ ID NO: 4460586 - DNA, 25 bp, Homo sapien
cctaaattctctactaatcctggaa

SEQ ID NO: 4460587 - DNA, 25 bp, Homo sapien
tcaaaattgcccctgaaaggacctc

SEQ ID NO: 4460588 - DNA, 25 bp, Homo sapien
taacggatgtgaggatagcctgcca

SEQ ID NO: 4460589 - DNA, 25 bp, Homo sapien
gaaaggacctctgaatgatgttcca

SEQ ID NO: 4460590 - DNA, 25 bp, Homo sapien
tgatgttccatccaatcctgatgaa

SEQ ID NO: 4460591 - DNA, 25 bp, Homo sapien
tgtaactcccagaagcaacatcaga

SEQ ID NO: 4460592 - DNA, 25 bp, Homo sapien
catgtgattcccagccactgtagca

SEQ ID NO: 4460593 - DNA, 25 bp, Homo sapien
actgtagcagtcctacacaattgtg

SEQ ID NO: 4460594 - DNA, 25 bp, Homo sapien
gcattaaagatactgtgacaaacat

SEQ ID NO: 4460595 - DNA, 25 bp, Homo sapien
gtacatctttcaattgtcccctggg

SEQ ID NO: 4460596 - DNA, 25 bp, Homo sapien
cacgattgacattgcctaatctttc

SEQ ID NO: 4460597 - DNA, 25 bp, Homo sapien
tcccctgggatgctccacgattgac

SEQ ID NO: 4460598 - DNA, 25 bp, Homo sapien
tacatctttcaattgtcccctggga

SEQ ID NO: 4460599 - DNA, 25 bp, Homo sapien
ggtattgagcatggtttaagacacg

SEQ ID NO: 4460600 - DNA, 25 bp, Homo sapien
gatctgtgggagctaattggcatga

SEQ ID NO: 4460601 - DNA, 25 bp, Homo sapien
tagggtctgcagagtaaaaaactgc

SEQ ID NO: 4460602 - DNA, 25 bp, Homo sapien
tacaagcaactgagggtagagtaga

SEQ ID NO: 4460603 - DNA, 25 bp, Homo sapien
gatgacattattgaacaactgagta

SEQ ID NO: 4460604 - DNA, 25 bp, Homo sapien
cttattagtagagatgacattattg

SEQ ID NO: 4460605 - DNA, 25 bp, Homo sapien
gacattattgaacaactgagtaaag

SEQ ID NO: 4460606 - DNA, 25 bp, Homo sapien
tagagatgacattattgaacaactg

SEQ ID NO: 4460607 - DNA, 25 bp, Homo sapien
aatagacaaacagatagtacatttt

SEQ ID NO: 4460608 - DNA, 25 bp, Homo sapien
tcttcaccttcctctaaaatagaca

SEQ ID NO: 4460609 - DNA, 25 bp, Homo sapien
ttcagcccaggaggtggaggttgca

SEQ ID NO: 4460610 - DNA, 25 bp, Homo sapien
gcttcagcccaggaggtggaggttg

SEQ ID NO: 4460611 - DNA, 25 bp, Homo sapien
gctgaggtaggtggatcgcttcagc

SEQ ID NO: 4460612 - DNA, 25 bp, Homo sapien
tgaggtaggtggatcgcttcagccc

SEQ ID NO: 4460613 - DNA, 25 bp, Homo sapien
tcatgtggcaaatatatagtaacta

SEQ ID NO: 4460614 - DNA, 25 bp, Homo sapien
tgccaatgccctggagttagcagta

SEQ ID NO: 4460615 - DNA, 25 bp, Homo sapien
ttaactttcaaagctacaggaccaa

SEQ ID NO: 4460616 - DNA, 25 bp, Homo sapien
tagcactctgggcaatataatatat

SEQ ID NO: 4460617 - DNA, 25 bp, Homo sapien
tattggtaatcaaccattggtcaac

SEQ ID NO: 4460618 - DNA, 25 bp, Homo sapien
ggcctcaatgtccactctgcatatg

SEQ ID NO: 4460619 - DNA, 25 bp, Homo sapien
gaaaaggtgcatacatggaagacgt

SEQ ID NO: 4460620 - DNA, 25 bp, Homo sapien
acttcttattggtaatcaaccattg

SEQ ID NO: 4460621 - DNA, 25 bp, Homo sapien
gagggagggcaagagttctgaaaca

SEQ ID NO: 4460622 - DNA, 25 bp, Homo sapien
gggagggcaagagttctgaaacatg

SEQ ID NO: 4460623 - DNA, 25 bp, Homo sapien
ggagggcaagagttctgaaacatgg

SEQ ID NO: 4460624 - DNA, 25 bp, Homo sapien
agggagggcaagagttctgaaacat

SEQ ID NO: 4460625 - DNA, 25 bp, Homo sapien
tgcgcaggtaagtcatgccatcttt

SEQ ID NO: 4460626 - DNA, 25 bp, Homo sapien
gcgcaggtaagtcatgccatctttg

SEQ ID NO: 4460627 - DNA, 25 bp, Homo sapien
gcaggtaagtcatgccatctttggt

SEQ ID NO: 4460628 - DNA, 25 bp, Homo sapien
ctgcgcaggtaagtcatgccatctt

SEQ ID NO: 4460629 - DNA, 25 bp, Homo sapien
agagccagcactctaagttcaatgc

SEQ ID NO: 4460630 - DNA, 25 bp, Homo sapien
gccagcactctaagttcaatgcttc

SEQ ID NO: 4460631 - DNA, 25 bp, Homo sapien
gagccagcactctaagttcaatgct

SEQ ID NO: 4460632 - DNA, 25 bp, Homo sapien
cagcactctaagttcaatgcttcca

SEQ ID NO: 4460633 - DNA, 25 bp, Homo sapien
tgcaagtttagggtcacaagcccat

SEQ ID NO: 4460634 - DNA, 25 bp, Homo sapien
gcaatacaaggaaccatgcaaaaat

SEQ ID NO: 4460635 - DNA, 25 bp, Homo sapien
agaaatgcaatacaaggaaccatgc

SEQ ID NO: 4460636 - DNA, 25 bp, Homo sapien
ttgcctgcaagtttagggtcacaag

SEQ ID NO: 4460637 - DNA, 25 bp, Homo sapien
tgatgtgactaccacctgcatctga

SEQ ID NO: 4460638 - DNA, 25 bp, Homo sapien
gatacctgccagtgacttaaattcc

SEQ ID NO: 4460639 - DNA, 25 bp, Homo sapien
ttctatgaatgcacagatacctgcc

SEQ ID NO: 4460640 - DNA, 25 bp, Homo sapien
tattactgactggatgcatttgcaa

SEQ ID NO: 4460641 - DNA, 25 bp, Homo sapien
aagcaggtggcttaatgcaagctta

SEQ ID NO: 4460642 - DNA, 25 bp, Homo sapien
agcaggtggcttaatgcaagcttat

SEQ ID NO: 4460643 - DNA, 25 bp, Homo sapien
ggtggcttaatgcaagcttattgac

SEQ ID NO: 4460644 - DNA, 25 bp, Homo sapien
gcttaatgcaagcttattgacatct

SEQ ID NO: 4460645 - DNA, 25 bp, Homo sapien
gttatttattaatcaatccacttac

SEQ ID NO: 4460646 - DNA, 25 bp, Homo sapien
taagttatttattaatcaatccact

SEQ ID NO: 4460647 - DNA, 25 bp, Homo sapien
ataagttatttattaatcaatccac

SEQ ID NO: 4460648 - DNA, 25 bp, Homo sapien
atataagttatttattaatcaatcc

SEQ ID NO: 4460649 - DNA, 25 bp, Homo sapien
tggcagacataggtcactgactcct

SEQ ID NO: 4460650 - DNA, 25 bp, Homo sapien
ttttccccagtaagatggcagacat

SEQ ID NO: 4460651 - DNA, 25 bp, Homo sapien
taaaacaagtcaacaggtagtcgtg

SEQ ID NO: 4460652 - DNA, 25 bp, Homo sapien
caaaaatagagaaatccacctgtgc

SEQ ID NO: 4460653 - DNA, 25 bp, Homo sapien
taatggcagtagcttaataagctcc

SEQ ID NO: 4460654 - DNA, 25 bp, Homo sapien
taagatgcagcaggatatggaagac

SEQ ID NO: 4460655 - DNA, 25 bp, Homo sapien
tatgtatttggacagctaccactga

SEQ ID NO: 4460656 - DNA, 25 bp, Homo sapien
taagctcctatattaacaattcagg

SEQ ID NO: 4460657 - DNA, 25 bp, Homo sapien
tctcaatgatgttatcctggtagat

SEQ ID NO: 4460658 - DNA, 25 bp, Homo sapien
gggaaatttgagttgccttcgtcat

SEQ ID NO: 4460659 - DNA, 25 bp, Homo sapien
cacagggggatcacagtttaagaaa

SEQ ID NO: 4460660 - DNA, 25 bp, Homo sapien
tcaaagagatattttggcatttggt

SEQ ID NO: 4460661 - DNA, 25 bp, Homo sapien
tccaagtcgttgcaccaaataagct

SEQ ID NO: 4460662 - DNA, 25 bp, Homo sapien
tcgttgcaccaaataagcttttcgt

SEQ ID NO: 4460663 - DNA, 25 bp, Homo sapien
tcgtttgctggaatagtcttatcat

SEQ ID NO: 4460664 - DNA, 25 bp, Homo sapien
caaataagcttttcgtttgctggaa

SEQ ID NO: 4460665 - DNA, 25 bp, Homo sapien
aaggtgaggccacgtggacactgtc

SEQ ID NO: 4460666 - DNA, 25 bp, Homo sapien
cagctaacgcgtcagatatgcaagg

SEQ ID NO: 4460667 - DNA, 25 bp, Homo sapien
tgaggaaacgtcataccacagtgaa

SEQ ID NO: 4460668 - DNA, 25 bp, Homo sapien
acactgtctcagtagaacttgcagc

SEQ ID NO: 4460669 - DNA, 25 bp, Homo sapien
caggattcaaataccgcgtcgcttg

SEQ ID NO: 4460670 - DNA, 25 bp, Homo sapien
ttggccaacacaagatgcactctcg

SEQ ID NO: 4460671 - DNA, 25 bp, Homo sapien
tacgaggcgccgttaggactgctct

SEQ ID NO: 4460672 - DNA, 25 bp, Homo sapien
tgaaaagggaggacactagcgtacg

SEQ ID NO: 4460673 - DNA, 25 bp, Homo sapien
gaaggcaagagtgccagcccggccc

SEQ ID NO: 4460674 - DNA, 25 bp, Homo sapien
ttgacaggcgccatctcggaagcgc

SEQ ID NO: 4460675 - DNA, 25 bp, Homo sapien
agtgagctccggagaagagaaaagc

SEQ ID NO: 4460676 - DNA, 25 bp, Homo sapien
ggttgggacggagaagctcggagca

SEQ ID NO: 4460677 - DNA, 25 bp, Homo sapien
gacggactcgcctctgagagcggtc

SEQ ID NO: 4460678 - DNA, 25 bp, Homo sapien
aaaacagttcgcctaatagtcacat

SEQ ID NO: 4460679 - DNA, 25 bp, Homo sapien
caatattctccaaatcactggacac

SEQ ID NO: 4460680 - DNA, 25 bp, Homo sapien
cttctaaaacagttcgcctaatagt

SEQ ID NO: 4460681 - DNA, 25 bp, Homo sapien
tctaaaacagttcgcctaatagtca

SEQ ID NO: 4460682 - DNA, 25 bp, Homo sapien
gctacttgtgctgctctggttgtaa

SEQ ID NO: 4460683 - DNA, 25 bp, Homo sapien
cttagctacttgtgctgctctggtt

SEQ ID NO: 4460684 - DNA, 25 bp, Homo sapien
tagctacttgtgctgctctggttgt

SEQ ID NO: 4460685 - DNA, 25 bp, Homo sapien
ctacttgtgctgctctggttgtaac

SEQ ID NO: 4460686 - DNA, 25 bp, Homo sapien
agccagcgttgtgggactcagcact

SEQ ID NO: 4460687 - DNA, 25 bp, Homo sapien
gaatcggcctctgtattcacattca

SEQ ID NO: 4460688 - DNA, 25 bp, Homo sapien
gaaacatgaatagcgcaagacagcc

SEQ ID NO: 4460689 - DNA, 25 bp, Homo sapien
tcagcactatacagaatcggcctct

SEQ ID NO: 4460690 - DNA, 25 bp, Homo sapien
acagaagcagtaggtttcagttgtt

SEQ ID NO: 4460691 - DNA, 25 bp, Homo sapien
agcagtaggtttcagttgtttgttg

SEQ ID NO: 4460692 - DNA, 25 bp, Homo sapien
cagtaggtttcagttgtttgttgac

SEQ ID NO: 4460693 - DNA, 25 bp, Homo sapien
gaagcagtaggtttcagttgtttgt

SEQ ID NO: 4460694 - DNA, 25 bp, Homo sapien
actttgttctccacaaacgtgccct

SEQ ID NO: 4460695 - DNA, 25 bp, Homo sapien
tataggtccatatccgctttggtac

SEQ ID NO: 4460696 - DNA, 25 bp, Homo sapien
catatccgctttggtaccttgatct

SEQ ID NO: 4460697 - DNA, 25 bp, Homo sapien
acaaacgtgccctttcctgtcagct

SEQ ID NO: 4460698 - DNA, 25 bp, Homo sapien
catcctcaggtgtgggagaaggacc

SEQ ID NO: 4460699 - DNA, 25 bp, Homo sapien
gacatcctcaggtgtgggagaagga

SEQ ID NO: 4460700 - DNA, 25 bp, Homo sapien
ggagacatcctcaggtgtgggagaa

SEQ ID NO: 4460701 - DNA, 25 bp, Homo sapien
gagacatcctcaggtgtgggagaag

SEQ ID NO: 4460702 - DNA, 25 bp, Homo sapien
tgtcctcgattttgcagagcaaggc

SEQ ID NO: 4460703 - DNA, 25 bp, Homo sapien
tatccttaacgtagtcactgcagag

SEQ ID NO: 4460704 - DNA, 25 bp, Homo sapien
gagggttctcccaatcttcgttatc

SEQ ID NO: 4460705 - DNA, 25 bp, Homo sapien
agcttggcagagattctcttccttc

SEQ ID NO: 4460706 - DNA, 25 bp, Homo sapien
cgcacatgtacagagtctcctgcag

SEQ ID NO: 4460707 - DNA, 25 bp, Homo sapien
gatccataatgccaacgcacatgta

SEQ ID NO: 4460708 - DNA, 25 bp, Homo sapien
tggagtggacttgtaccagccaatc

SEQ ID NO: 4460709 - DNA, 25 bp, Homo sapien
actaggatggcacgcatgcgtccat

SEQ ID NO: 4460710 - DNA, 25 bp, Homo sapien
cggatttgggaactggtataagcat

SEQ ID NO: 4460711 - DNA, 25 bp, Homo sapien
attgaagcttcttccgggaaactgg

SEQ ID NO: 4460712 - DNA, 25 bp, Homo sapien
taatcccaactaattgaagcttctt

SEQ ID NO: 4460713 - DNA, 25 bp, Homo sapien
ttccatttctcggatttgggaactg

SEQ ID NO: 4460714 - DNA, 25 bp, Homo sapien
tgcaccatatcatagtcgatgagag

SEQ ID NO: 4460715 - DNA, 25 bp, Homo sapien
atgataatgcaccatatcatagtcg

SEQ ID NO: 4460716 - DNA, 25 bp, Homo sapien
ccatatcatagtcgatgagagtcag

SEQ ID NO: 4460717 - DNA, 25 bp, Homo sapien
taatgcaccatatcatagtcgatga

SEQ ID NO: 4460718 - DNA, 25 bp, Homo sapien
tatagcctaattagtttcttcttaa

SEQ ID NO: 4460719 - DNA, 25 bp, Homo sapien
ctaaaatatagcctaattagtttct

SEQ ID NO: 4460720 - DNA, 25 bp, Homo sapien
aggactaaaatatagcctaattagt

SEQ ID NO: 4460721 - DNA, 25 bp, Homo sapien
aaatatagcctaattagtttcttct

SEQ ID NO: 4460722 - DNA, 25 bp, Homo sapien
tgatcaatcatgaacatgtgccacg

SEQ ID NO: 4460723 - DNA, 25 bp, Homo sapien
gtaccagtgacatttttgcctcaaa

SEQ ID NO: 4460724 - DNA, 25 bp, Homo sapien
aaatgagccattggtaccatgtacc

SEQ ID NO: 4460725 - DNA, 25 bp, Homo sapien
gaaaactgggagagcgaagcacatt

SEQ ID NO: 4460726 - DNA, 25 bp, Homo sapien
ctctgtgtatcctgtgtaatactgc

SEQ ID NO: 4460727 - DNA, 25 bp, Homo sapien
ttctctgtgtatcctgtgtaatact

SEQ ID NO: 4460728 - DNA, 25 bp, Homo sapien
tctgtgtatcctgtgtaatactgct

SEQ ID NO: 4460729 - DNA, 25 bp, Homo sapien
ctgtgtatcctgtgtaatactgctg

SEQ ID NO: 4460730 - DNA, 25 bp, Homo sapien
gcacagagtaattcaatacattgag

SEQ ID NO: 4460731 - DNA, 25 bp, Homo sapien
cctatcgaccttgtttcaaataaag

SEQ ID NO: 4460732 - DNA, 25 bp, Homo sapien
taaccgactggttgactgggatctg

SEQ ID NO: 4460733 - DNA, 25 bp, Homo sapien
gcctggacatggctagcctatcgac

SEQ ID NO: 4460734 - DNA, 25 bp, Homo sapien
tcaaaagaccctggacaaaggctct

SEQ ID NO: 4460735 - DNA, 25 bp, Homo sapien
aattaggcgtttttccatcattgcc

SEQ ID NO: 4460736 - DNA, 25 bp, Homo sapien
taacatcacctgaatacgcaatata

SEQ ID NO: 4460737 - DNA, 25 bp, Homo sapien
ataatacaccgccatttgaagtggg

SEQ ID NO: 4460738 - DNA, 25 bp, Homo sapien
tgcagagatagacaccatgccctca

SEQ ID NO: 4460739 - DNA, 25 bp, Homo sapien
tgcttaacaaatcccagacagtcct

SEQ ID NO: 4460740 - DNA, 25 bp, Homo sapien
ggacagcactaagtctcctttggct

SEQ ID NO: 4460741 - DNA, 25 bp, Homo sapien
tttggtgtcacacaagcacaggaca

SEQ ID NO: 4460742 - DNA, 25 bp, Homo sapien
aaagctctgggctcataacatgtgc

SEQ ID NO: 4460743 - DNA, 25 bp, Homo sapien
gatgatgcccaatcgctgaagccag

SEQ ID NO: 4460744 - DNA, 25 bp, Homo sapien
tgtgattaagcacatgtcaggaacc

SEQ ID NO: 4460745 - DNA, 25 bp, Homo sapien
tcacaattatcaaaggtccacggct

SEQ ID NO: 4460746 - DNA, 25 bp, Homo sapien
taggaccttcctatcagtggggagg

SEQ ID NO: 4460747 - DNA, 25 bp, Homo sapien
ggaccttcctatcagtggggaggca

SEQ ID NO: 4460748 - DNA, 25 bp, Homo sapien
ctaggaccttcctatcagtggggag

SEQ ID NO: 4460749 - DNA, 25 bp, Homo sapien
accttcctatcagtggggaggcaag

SEQ ID NO: 4460750 - DNA, 25 bp, Homo sapien
aagaggtttcatgagatagaccaga

SEQ ID NO: 4460751 - DNA, 25 bp, Homo sapien
ccagaggactatgtacaaaatcaag

SEQ ID NO: 4460752 - DNA, 25 bp, Homo sapien
tcaagagttctaaaccaataagaaa

SEQ ID NO: 4460753 - DNA, 25 bp, Homo sapien
tgagaagaggtttcatgagatagac

SEQ ID NO: 4460754 - DNA, 25 bp, Homo sapien
aatacacaaataaatacacatggga

SEQ ID NO: 4460755 - DNA, 25 bp, Homo sapien
tacagaatacacaaataaatacaca

SEQ ID NO: 4460756 - DNA, 25 bp, Homo sapien
cagaatacacaaataaatacacatg

SEQ ID NO: 4460757 - DNA, 25 bp, Homo sapien
gaatacacaaataaatacacatggg

SEQ ID NO: 4460758 - DNA, 25 bp, Homo sapien
tctcaaagctctgggctcaagcagt

SEQ ID NO: 4460759 - DNA, 25 bp, Homo sapien
gtctccctgtgttgcccagctggtc

SEQ ID NO: 4460760 - DNA, 25 bp, Homo sapien
ttgcccagctggtctcaaagctctg

SEQ ID NO: 4460761 - DNA, 25 bp, Homo sapien
tcggctaattatttgtacagatggg

SEQ ID NO: 4460762 - DNA, 25 bp, Homo sapien
taggagggacatctgtggagtaata

SEQ ID NO: 4460763 - DNA, 25 bp, Homo sapien
tctgaggagtaataatgaggaggta

SEQ ID NO: 4460764 - DNA, 25 bp, Homo sapien
taatgagaaggtgagacggaagtct

SEQ ID NO: 4460765 - DNA, 25 bp, Homo sapien
ggcagaaaagcctgtagagtaataa

SEQ ID NO: 4460766 - DNA, 25 bp, Homo sapien
cttctggctctgcaccgttccacag

SEQ ID NO: 4460767 - DNA, 25 bp, Homo sapien
ggctctgcaccgttccacagtctct

SEQ ID NO: 4460768 - DNA, 25 bp, Homo sapien
ttctggctctgcaccgttccacagt

SEQ ID NO: 4460769 - DNA, 25 bp, Homo sapien
tctgcaccgttccacagtctcttcc

SEQ ID NO: 4460770 - DNA, 25 bp, Homo sapien
tctggcctgcctagagctgtggact

SEQ ID NO: 4460771 - DNA, 25 bp, Homo sapien
aatgggcagcctagggaagccaaga

SEQ ID NO: 4460772 - DNA, 25 bp, Homo sapien
ttctatgtgctaccccaggcttgtc

SEQ ID NO: 4460773 - DNA, 25 bp, Homo sapien
tgtggactccatgaaggtctacgct

SEQ ID NO: 4460774 - DNA, 25 bp, Homo sapien
gctgagacatgaagattatttgagc

SEQ ID NO: 4460775 - DNA, 25 bp, Homo sapien
aggctgagacatgaagattatttga

SEQ ID NO: 4460776 - DNA, 25 bp, Homo sapien
aaggctgagacatgaagattatttg

SEQ ID NO: 4460777 - DNA, 25 bp, Homo sapien
ggctgagacatgaagattatttgag

SEQ ID NO: 4460778 - DNA, 25 bp, Homo sapien
tccacaagcacagaatcagggacaa

SEQ ID NO: 4460779 - DNA, 25 bp, Homo sapien
tagtacaggactaaacaaagccagg

SEQ ID NO: 4460780 - DNA, 25 bp, Homo sapien
tatgctagagtcctcaagctggcct

SEQ ID NO: 4460781 - DNA, 25 bp, Homo sapien
tcctagctacaaaaataaggccaag

SEQ ID NO: 4460782 - DNA, 25 bp, Homo sapien
tgaaagattattacttatagaaaga

SEQ ID NO: 4460783 - DNA, 25 bp, Homo sapien
ggaaaaagtactttgatcatgcttt

SEQ ID NO: 4460784 - DNA, 25 bp, Homo sapien
taaaccttctttgaaagcagatttc

SEQ ID NO: 4460785 - DNA, 25 bp, Homo sapien
tgcttttgttggactataaaccttc

SEQ ID NO: 4460786 - DNA, 25 bp, Homo sapien
gatcagtaactttgcagcactgggc

SEQ ID NO: 4460787 - DNA, 25 bp, Homo sapien
aaagagtacgcaggttttcaccagg

SEQ ID NO: 4460788 - DNA, 25 bp, Homo sapien
gcctgagccttcgaacgctggtaaa

SEQ ID NO: 4460789 - DNA, 25 bp, Homo sapien
cttgcccgggtagaaaaccagtgcg

SEQ ID NO: 4460790 - DNA, 25 bp, Homo sapien
tgtctctattgtcaaaaagtaggct

SEQ ID NO: 4460791 - DNA, 25 bp, Homo sapien
gacaaatagccttgtctctattgtc

SEQ ID NO: 4460792 - DNA, 25 bp, Homo sapien
acaaatagccttgtctctattgtca

SEQ ID NO: 4460793 - DNA, 25 bp, Homo sapien
gagagccgttggcaggaccttcagc

SEQ ID NO: 4460794 - DNA, 25 bp, Homo sapien
ggaaaaaagctgctgatccgaacgt

SEQ ID NO: 4460795 - DNA, 25 bp, Homo sapien
tgatccgaacgttgagacgccaaga

SEQ ID NO: 4460796 - DNA, 25 bp, Homo sapien
cgttgagacgccaagagagccgttg

SEQ ID NO: 4460797 - DNA, 25 bp, Homo sapien
cccaggcataggaaattcgctccca

SEQ ID NO: 4460798 - DNA, 25 bp, Homo sapien
ataggaaattcgctcccaccgagct

SEQ ID NO: 4460799 - DNA, 25 bp, Homo sapien
gcataggaaattcgctcccaccgag

SEQ ID NO: 4460800 - DNA, 25 bp, Homo sapien
aggcataggaaattcgctcccaccg

SEQ ID NO: 4460801 - DNA, 25 bp, Homo sapien
ttgcttgacgcggacacagggccat

SEQ ID NO: 4460802 - DNA, 25 bp, Homo sapien
gatgcgcgttgcttgacgcggacac

SEQ ID NO: 4460803 - DNA, 25 bp, Homo sapien
gaagagccaggtgccgttgagcggg

SEQ ID NO: 4460804 - DNA, 25 bp, Homo sapien
ccgttgagcgggatgcgcgttgctt

SEQ ID NO: 4460805 - DNA, 25 bp, Homo sapien
gcttctcggaagtgaaacgctcaat

SEQ ID NO: 4460806 - DNA, 25 bp, Homo sapien
ggtaataccgttctctcccaggata

SEQ ID NO: 4460807 - DNA, 25 bp, Homo sapien
ggcagttgcagtcacttctttgtgg

SEQ ID NO: 4460808 - DNA, 25 bp, Homo sapien
tgaacgggcttctcggaagtgaaac

SEQ ID NO: 4460809 - DNA, 25 bp, Homo sapien
ttaaagcttaagcttattctgaatt

SEQ ID NO: 4460810 - DNA, 25 bp, Homo sapien
aaagcttaagcttattctgaatttc

SEQ ID NO: 4460811 - DNA, 25 bp, Homo sapien
taaagcttaagcttattctgaattt

SEQ ID NO: 4460812 - DNA, 25 bp, Homo sapien
tgaaaagagtcggaatttctagaac

SEQ ID NO: 4460813 - DNA, 25 bp, Homo sapien
caaaatttcgttatataatcctgta

SEQ ID NO: 4460814 - DNA, 25 bp, Homo sapien
cgtccagcacgtggatgctcaataa

SEQ ID NO: 4460815 - DNA, 25 bp, Homo sapien
gaagaagctactacttttttacagc

SEQ ID NO: 4460816 - DNA, 25 bp, Homo sapien
ccttaatgagtttacagctccagtc

SEQ ID NO: 4460817 - DNA, 25 bp, Homo sapien
actgacattccgcagagcgatggct

SEQ ID NO: 4460818 - DNA, 25 bp, Homo sapien
acattccgcagagcgatggctggtg

SEQ ID NO: 4460819 - DNA, 25 bp, Homo sapien
gccactgacattccgcagagcgatg

SEQ ID NO: 4460820 - DNA, 25 bp, Homo sapien
tgacattccgcagagcgatggctgg

SEQ ID NO: 4460821 - DNA, 25 bp, Homo sapien
ttatagggtttgctcacgcttgctc

SEQ ID NO: 4460822 - DNA, 25 bp, Homo sapien
gctggaaaagatcatagttgctgag

SEQ ID NO: 4460823 - DNA, 25 bp, Homo sapien
catacttatggtgatatgtaggaag

SEQ ID NO: 4460824 - DNA, 25 bp, Homo sapien
gaatgcagatatcctatttttggaa

SEQ ID NO: 4460825 - DNA, 25 bp, Homo sapien
tccttggattataccattgtaaatg

SEQ ID NO: 4460826 - DNA, 25 bp, Homo sapien
tttctatagttagtacacagacccc

SEQ ID NO: 4460827 - DNA, 25 bp, Homo sapien
gctgaataagttgaagtgaatagaa

SEQ ID NO: 4460828 - DNA, 25 bp, Homo sapien
gaacattctttccatttcgttgata

SEQ ID NO: 4460829 - DNA, 25 bp, Homo sapien
gcccttgccaactgacccatggaga

SEQ ID NO: 4460830 - DNA, 25 bp, Homo sapien
tcaccagacaagatcttgacaatgt

SEQ ID NO: 4460831 - DNA, 25 bp, Homo sapien
gacaatgtggccagaggcatttctg

SEQ ID NO: 4460832 - DNA, 25 bp, Homo sapien
gaagaactggcaagctttgttcatg

SEQ ID NO: 4460833 - DNA, 25 bp, Homo sapien
aggaagccgacgtatgactttcagt

SEQ ID NO: 4460834 - DNA, 25 bp, Homo sapien
gaggaggaagccgacgtatgacttt

SEQ ID NO: 4460835 - DNA, 25 bp, Homo sapien
aaggcgaggaggaagccgacgtatg

SEQ ID NO: 4460836 - DNA, 25 bp, Homo sapien
agccgacgtatgactttcagtaagc

SEQ ID NO: 4460837 - DNA, 25 bp, Homo sapien
tcccagaggcacacctgaattatgc

SEQ ID NO: 4460838 - DNA, 25 bp, Homo sapien
aaaactgatagatccacgggcaggc

SEQ ID NO: 4460839 - DNA, 25 bp, Homo sapien
tgatccgaacggcttttcccagagg

SEQ ID NO: 4460840 - DNA, 25 bp, Homo sapien
tcttgctgcaggtcaatgaaaactg

SEQ ID NO: 4460841 - DNA, 25 bp, Homo sapien
gtcagtccttcataactccaggcgg

SEQ ID NO: 4460842 - DNA, 25 bp, Homo sapien
taaaatctcccacataaggctgttg

SEQ ID NO: 4460843 - DNA, 25 bp, Homo sapien
catgcaggtgtgtaagtgcttccca

SEQ ID NO: 4460844 - DNA, 25 bp, Homo sapien
gaaacgttttgtgacctctgtgcct

SEQ ID NO: 4460845 - DNA, 25 bp, Homo sapien
gtcagtgtagcctggaatttattca

SEQ ID NO: 4460846 - DNA, 25 bp, Homo sapien
aatttattcacccagctagtaaaga

SEQ ID NO: 4460847 - DNA, 25 bp, Homo sapien
agtcagtgtagcctggaatttattc

SEQ ID NO: 4460848 - DNA, 25 bp, Homo sapien
aaagattgggcactcccatgcccca

SEQ ID NO: 4460849 - DNA, 25 bp, Homo sapien
atttgccccacgatagctgctgcca

SEQ ID NO: 4460850 - DNA, 25 bp, Homo sapien
caggactcctatttgccccacgata

SEQ ID NO: 4460851 - DNA, 25 bp, Homo sapien
ctgccacagtgctgccgtgtaccta

SEQ ID NO: 4460852 - DNA, 25 bp, Homo sapien
gctgccgtgtacctacagcaaacat

SEQ ID NO: 4460853 - DNA, 25 bp, Homo sapien
aaaatagtaatcatccaacctcaaa

SEQ ID NO: 4460854 - DNA, 25 bp, Homo sapien
aatagtaatcatccaacctcaaata

SEQ ID NO: 4460855 - DNA, 25 bp, Homo sapien
taaaatagtaatcatccaacctcaa

SEQ ID NO: 4460856 - DNA, 25 bp, Homo sapien
aaatagtaatcatccaacctcaaat

SEQ ID NO: 4460857 - DNA, 25 bp, Homo sapien
gagaagcccgctgttactgaacacc

SEQ ID NO: 4460858 - DNA, 25 bp, Homo sapien
aaagatgtcgcagggtggctccaaa

SEQ ID NO: 4460859 - DNA, 25 bp, Homo sapien
taagagtcagtcattcaaggtaccc

SEQ ID NO: 4460860 - DNA, 25 bp, Homo sapien
gaaagggtagctctgttccgtagcc

SEQ ID NO: 4460861 - DNA, 25 bp, Homo sapien
gaattgacatgtagtcacacccagg

SEQ ID NO: 4460862 - DNA, 25 bp, Homo sapien
ttcatattttgggtcgctgggctca

SEQ ID NO: 4460863 - DNA, 25 bp, Homo sapien
taactccggtgaacttgaattgaca

SEQ ID NO: 4460864 - DNA, 25 bp, Homo sapien
agagacttttgtgcacttgggaaca

SEQ ID NO: 4460865 - DNA, 25 bp, Homo sapien
tgggtagacccacgctcatttcgcg

SEQ ID NO: 4460866 - DNA, 25 bp, Homo sapien
tcatttcgcggtcttgtttgtagct

SEQ ID NO: 4460867 - DNA, 25 bp, Homo sapien
tagtactgtcgcagttcagttgaga

SEQ ID NO: 4460868 - DNA, 25 bp, Homo sapien
aattcatagtgaaggttactacagc

SEQ ID NO: 4460869 - DNA, 25 bp, Homo sapien
catgtggccgtaatattggcagagc

SEQ ID NO: 4460870 - DNA, 25 bp, Homo sapien
tccaggcttgtaaaacatgtggccg

SEQ ID NO: 4460871 - DNA, 25 bp, Homo sapien
gaaatggactccaggcttgtaaaac

SEQ ID NO: 4460872 - DNA, 25 bp, Homo sapien
ctttggcctctgaataagctcactg

SEQ ID NO: 4460873 - DNA, 25 bp, Homo sapien
ggtttcaaaaagtgtgaccgcatca

SEQ ID NO: 4460874 - DNA, 25 bp, Homo sapien
agatcagtgcaccagcgttcagctt

SEQ ID NO: 4460875 - DNA, 25 bp, Homo sapien
tcatgggtagactcacttcctcttg

SEQ ID NO: 4460876 - DNA, 25 bp, Homo sapien
gcgttcagcttccttttacaacatg

SEQ ID NO: 4460877 - DNA, 25 bp, Homo sapien
gaggtttgatggtttgacagctgcc

SEQ ID NO: 4460878 - DNA, 25 bp, Homo sapien
cccttgtgacaggttagattagcca

SEQ ID NO: 4460879 - DNA, 25 bp, Homo sapien
tacttgttggcccacgggtgcctca

SEQ ID NO: 4460880 - DNA, 25 bp, Homo sapien
gattagccataaacctggatacact

SEQ ID NO: 4460881 - DNA, 25 bp, Homo sapien
tccaaatgtctatgactggcaatgc

SEQ ID NO: 4460882 - DNA, 25 bp, Homo sapien
tgcccagtttctataagacaggaag

SEQ ID NO: 4460883 - DNA, 25 bp, Homo sapien
aaattaattggtgcacgtgaagtcc

SEQ ID NO: 4460884 - DNA, 25 bp, Homo sapien
tcatggtagtctccgttgggctcaa

SEQ ID NO: 4460885 - DNA, 25 bp, Homo sapien
cacatcccgcaagctctagtaataa

SEQ ID NO: 4460886 - DNA, 25 bp, Homo sapien
agtaataatataaggtgacagcccc

SEQ ID NO: 4460887 - DNA, 25 bp, Homo sapien
gcctgctattttcccttaacttcca

SEQ ID NO: 4460888 - DNA, 25 bp, Homo sapien
gtcactgtgggctcatgaagggtct

SEQ ID NO: 4460889 - DNA, 25 bp, Homo sapien
cagacttgtgttgctcataggcgag

SEQ ID NO: 4460890 - DNA, 25 bp, Homo sapien
gtcaccttgaacttgaggagctcta

SEQ ID NO: 4460891 - DNA, 25 bp, Homo sapien
ggagctctatctggcagcatctctg

SEQ ID NO: 4460892 - DNA, 25 bp, Homo sapien
ttgaaccaacccagatactctagca

SEQ ID NO: 4460893 - DNA, 25 bp, Homo sapien
aggtcccctcagtctgaaagaagca

SEQ ID NO: 4460894 - DNA, 25 bp, Homo sapien
taattctcaggctctgctgtatgct

SEQ ID NO: 4460895 - DNA, 25 bp, Homo sapien
gataaatacggcgagacacagctct

SEQ ID NO: 4460896 - DNA, 25 bp, Homo sapien
aaccaataattctcaggctctgctg

SEQ ID NO: 4460897 - DNA, 25 bp, Homo sapien
tcctccgtaccttctgttgataaca

SEQ ID NO: 4460898 - DNA, 25 bp, Homo sapien
cgtaccttctgttgataacagtcat

SEQ ID NO: 4460899 - DNA, 25 bp, Homo sapien
tttgagtcctccgtaccttctgttg

SEQ ID NO: 4460900 - DNA, 25 bp, Homo sapien
ccattttgagtcctccgtaccttct

SEQ ID NO: 4460901 - DNA, 25 bp, Homo sapien
tgtgtccataatatagtgagtccac

SEQ ID NO: 4460902 - DNA, 25 bp, Homo sapien
cataatatagtgagtccacctgtgg

SEQ ID NO: 4460903 - DNA, 25 bp, Homo sapien
gtcacatctttcaaggttttcctca

SEQ ID NO: 4460904 - DNA, 25 bp, Homo sapien
ccacctgtggactgagcaaggctgc

SEQ ID NO: 4460905 - DNA, 25 bp, Homo sapien
ttggaagttgactataggaacgaga

SEQ ID NO: 4460906 - DNA, 25 bp, Homo sapien
ttgactataggaacgagaaggaaac

SEQ ID NO: 4460907 - DNA, 25 bp, Homo sapien
gaagttgactataggaacgagaagg

SEQ ID NO: 4460908 - DNA, 25 bp, Homo sapien
ctataggaacgagaaggaaactggg

SEQ ID NO: 4460909 - DNA, 25 bp, Homo sapien
ctttcaggcttagatgttctccatc

SEQ ID NO: 4460910 - DNA, 25 bp, Homo sapien
tgtctggctggaatcaattcctccc

SEQ ID NO: 4460911 - DNA, 25 bp, Homo sapien
catccacttggtgtttccctttcag

SEQ ID NO: 4460912 - DNA, 25 bp, Homo sapien
tctccatcccgtcagtctaattctt

SEQ ID NO: 4460913 - DNA, 25 bp, Homo sapien
gcatgagctgccatgcctagctaat

SEQ ID NO: 4460914 - DNA, 25 bp, Homo sapien
caccgcatgcagcctctttcttttt

SEQ ID NO: 4460915 - DNA, 25 bp, Homo sapien
gccaccgcatgcagcctctttcttt

SEQ ID NO: 4460916 - DNA, 25 bp, Homo sapien
gagccaccgcatgcagcctctttct

SEQ ID NO: 4460917 - DNA, 25 bp, Homo sapien
aatggatgatctagggtggcctcac

SEQ ID NO: 4460918 - DNA, 25 bp, Homo sapien
ggccatgtgtctcttgtcacaacag

SEQ ID NO: 4460919 - DNA, 25 bp, Homo sapien
gcactggcgtggcagttctggtctc

SEQ ID NO: 4460920 - DNA, 25 bp, Homo sapien
gtcacaacagtctagctctggcttg

SEQ ID NO: 4460921 - DNA, 25 bp, Homo sapien
taaacccctgaagcccatacagtag

SEQ ID NO: 4460922 - DNA, 25 bp, Homo sapien
ggatctatgtcaggttatttcaatg

SEQ ID NO: 4460923 - DNA, 25 bp, Homo sapien
cagtcgcatcaatagtgagtcccac

SEQ ID NO: 4460924 - DNA, 25 bp, Homo sapien
gaaatgagtattagggagtatggtc

SEQ ID NO: 4460925 - DNA, 25 bp, Homo sapien
ttgggtgagcttgggatgcatactc

SEQ ID NO: 4460926 - DNA, 25 bp, Homo sapien
cagtaatgggctgcttaatctttgg

SEQ ID NO: 4460927 - DNA, 25 bp, Homo sapien
cacccactagaaccgctgtggtcag

SEQ ID NO: 4460928 - DNA, 25 bp, Homo sapien
ccgctgtggtcagtaatgggctgct

SEQ ID NO: 4460929 - DNA, 25 bp, Homo sapien
aatgcagcaacttgtgtttttacca

SEQ ID NO: 4460930 - DNA, 25 bp, Homo sapien
tgtaatagtggtaaacaaattgtgt

SEQ ID NO: 4460931 - DNA, 25 bp, Homo sapien
aataaacatctcagccttataagca

SEQ ID NO: 4460932 - DNA, 25 bp, Homo sapien
tctcagccttataagcacattctgt

SEQ ID NO: 4460933 - DNA, 25 bp, Homo sapien
gtggtgaggctgcaaattgagcttt

SEQ ID NO: 4460934 - DNA, 25 bp, Homo sapien
tccacgagtggtgaggctgcaaatt

SEQ ID NO: 4460935 - DNA, 25 bp, Homo sapien
cacgagtggtgaggctgcaaattga

SEQ ID NO: 4460936 - DNA, 25 bp, Homo sapien
tgtgtaggatggttccacgagtggt

SEQ ID NO: 4460937 - DNA, 25 bp, Homo sapien
ggcacgtcgcgagctctgatttcct

SEQ ID NO: 4460938 - DNA, 25 bp, Homo sapien
gaaactttctgtggccgggttgcta

SEQ ID NO: 4460939 - DNA, 25 bp, Homo sapien
tgctatggctgccagctgtcggaag

SEQ ID NO: 4460940 - DNA, 25 bp, Homo sapien
tattccaagtcggtttctgcgtcgc

SEQ ID NO: 4460941 - DNA, 25 bp, Homo sapien
ggtgtcgggagcctgtttttggcga

SEQ ID NO: 4460942 - DNA, 25 bp, Homo sapien
cgcgagtcaccatggtgagttggcc

SEQ ID NO: 4460943 - DNA, 25 bp, Homo sapien
ttgaagttcgcccagaagactgcgt

SEQ ID NO: 4460944 - DNA, 25 bp, Homo sapien
accgccaatcccgcctggatggagt

SEQ ID NO: 4460945 - DNA, 25 bp, Homo sapien
gcgagtacgagtggactcttgccct

SEQ ID NO: 4460946 - DNA, 25 bp, Homo sapien
ggactcttgccctccgcagcatgcg

SEQ ID NO: 4460947 - DNA, 25 bp, Homo sapien
gcggcgaccggcgagtacgagtgga

SEQ ID NO: 4460948 - DNA, 25 bp, Homo sapien
cgaccggcgagtacgagtggactct

SEQ ID NO: 4460949 - DNA, 25 bp, Homo sapien
ttcgggtcttgctaccaggagcgag

SEQ ID NO: 4460950 - DNA, 25 bp, Homo sapien
tcgggtcttgctaccaggagcgagc

SEQ ID NO: 4460951 - DNA, 25 bp, Homo sapien
agttcgggtcttgctaccaggagcg

SEQ ID NO: 4460952 - DNA, 25 bp, Homo sapien
ctgggtccgcagcgttcttcggtgg

SEQ ID NO: 4460953 - DNA, 25 bp, Homo sapien
cagcgaagtgaaaggtttgctcctc

SEQ ID NO: 4460954 - DNA, 25 bp, Homo sapien
aaaacgcagcgaagtgaaaggtttg

SEQ ID NO: 4460955 - DNA, 25 bp, Homo sapien
cgcagcgaagtgaaaggtttgctcc

SEQ ID NO: 4460956 - DNA, 25 bp, Homo sapien
gaagtgaaaggtttgctcctctttc

SEQ ID NO: 4460957 - DNA, 25 bp, Homo sapien
tacaactggtgaaattctcttcaac

SEQ ID NO: 4460958 - DNA, 25 bp, Homo sapien
atcttaatcagaagtagcatcatgt

SEQ ID NO: 4460959 - DNA, 25 bp, Homo sapien
gcatcatgttacattatacaactgg

SEQ ID NO: 4460960 - DNA, 25 bp, Homo sapien
tataaaccaatatcaacatactggg

SEQ ID NO: 4460961 - DNA, 25 bp, Homo sapien
cagcactttgtgagggtgcagcggc

SEQ ID NO: 4460962 - DNA, 25 bp, Homo sapien
cagcggctggatcactggagatcag

SEQ ID NO: 4460963 - DNA, 25 bp, Homo sapien
tttgtgagggtgcagcggctggatc

SEQ ID NO: 4460964 - DNA, 25 bp, Homo sapien
cactttgtgagggtgcagcggctgg

SEQ ID NO: 4460965 - DNA, 25 bp, Homo sapien
taagtgtagaaatcgaggcagcaga

SEQ ID NO: 4460966 - DNA, 25 bp, Homo sapien
tgtagaaatcgaggcagcagacagg

SEQ ID NO: 4460967 - DNA, 25 bp, Homo sapien
tcgaggcagcagacaggcaaagtca

SEQ ID NO: 4460968 - DNA, 25 bp, Homo sapien
agaaatcgaggcagcagacaggcaa

SEQ ID NO: 4460969 - DNA, 25 bp, Homo sapien
tagaacctctgttagcaccaactga

SEQ ID NO: 4460970 - DNA, 25 bp, Homo sapien
taacggaactcgctgaaaccagacc

SEQ ID NO: 4460971 - DNA, 25 bp, Homo sapien
ttccctgaggttcaaccagtctctc

SEQ ID NO: 4460972 - DNA, 25 bp, Homo sapien
ctctccaagagatgtctagaacctc

SEQ ID NO: 4460973 - DNA, 25 bp, Homo sapien
tcaatagatcttgggaatctttcca

SEQ ID NO: 4460974 - DNA, 25 bp, Homo sapien
tttaacttatcaatagatcttggga

SEQ ID NO: 4460975 - DNA, 25 bp, Homo sapien
tccatataggtttagaaacaaattc

SEQ ID NO: 4460976 - DNA, 25 bp, Homo sapien
gggaatctttccatataggtttaga

SEQ ID NO: 4460977 - DNA, 25 bp, Homo sapien
aaagtagatgcccaagcatctgaaa

SEQ ID NO: 4460978 - DNA, 25 bp, Homo sapien
gcttcaaagtagatgcccaagcatc

SEQ ID NO: 4460979 - DNA, 25 bp, Homo sapien
tgcccaagcatctgaaaatgaaaca

SEQ ID NO: 4460980 - DNA, 25 bp, Homo sapien
gtagatgcccaagcatctgaaaatg

SEQ ID NO: 4460981 - DNA, 25 bp, Homo sapien
tcagatgggtaatgggcctacgtcg

SEQ ID NO: 4460982 - DNA, 25 bp, Homo sapien
tgggtaatgggcctacgtcgtaaca

SEQ ID NO: 4460983 - DNA, 25 bp, Homo sapien
tctcacacacaagcatgaaaccaca

SEQ ID NO: 4460984 - DNA, 25 bp, Homo sapien
cacaagcatgaaaccacagtcatca

SEQ ID NO: 4460985 - DNA, 25 bp, Homo sapien
gtccagctgcaaccacatgctgtac

SEQ ID NO: 4460986 - DNA, 25 bp, Homo sapien
atgctgtaccgcctcacatctgtcc

SEQ ID NO: 4460987 - DNA, 25 bp, Homo sapien
agagaaaccttcacagtccaaatgg

SEQ ID NO: 4460988 - DNA, 25 bp, Homo sapien
cagtccaaatggctcagagcatggt

SEQ ID NO: 4460989 - DNA, 25 bp, Homo sapien
ccctgacaaggcagaaagcttcgag

SEQ ID NO: 4460990 - DNA, 25 bp, Homo sapien
gaccatggtctactgagcttctccc

SEQ ID NO: 4460991 - DNA, 25 bp, Homo sapien
cactaagagtgaagggaccatggtc

SEQ ID NO: 4460992 - DNA, 25 bp, Homo sapien
tgcttcatgtcaggagctggccgaa

SEQ ID NO: 4460993 - DNA, 25 bp, Homo sapien
tggctttacaagaataccacctaag

SEQ ID NO: 4460994 - DNA, 25 bp, Homo sapien
tgtaacatatcctgaactgaaagtc

SEQ ID NO: 4460995 - DNA, 25 bp, Homo sapien
ttaccaaaggtactgccatggaggt

SEQ ID NO: 4460996 - DNA, 25 bp, Homo sapien
cttgtgatgcaaggcggcagttatt

SEQ ID NO: 4460997 - DNA, 25 bp, Homo sapien
tccaggaccctaggtgactgactgt

SEQ ID NO: 4460998 - DNA, 25 bp, Homo sapien
acatttccagtcttcgtttccaggg

SEQ ID NO: 4460999 - DNA, 25 bp, Homo sapien
cctaggagacgctctaaggcagaca

SEQ ID NO: 4461000 - DNA, 25 bp, Homo sapien
tctgggtcgagttgcaaggataaaa

SEQ ID NO: 4461001 - DNA, 25 bp, Homo sapien
tgatctggaaggcacatgctctagc

SEQ ID NO: 4461002 - DNA, 25 bp, Homo sapien
gatctggaaggcacatgctctagca

SEQ ID NO: 4461003 - DNA, 25 bp, Homo sapien
ctggaaggcacatgctctagcactg

SEQ ID NO: 4461004 - DNA, 25 bp, Homo sapien
gaaggcacatgctctagcactgtct

SEQ ID NO: 4461005 - DNA, 25 bp, Homo sapien
tcaagtacagtagcaagaagtaggg

SEQ ID NO: 4461006 - DNA, 25 bp, Homo sapien
aagagaacaaggtgttttatctgta

SEQ ID NO: 4461007 - DNA, 25 bp, Homo sapien
tacagtagcaagaagtagggaaaga

SEQ ID NO: 4461008 - DNA, 25 bp, Homo sapien
gaaagagaacaaggtgttttatctg

SEQ ID NO: 4461009 - DNA, 25 bp, Homo sapien
gcaaccgtacatagaaagagccctt

SEQ ID NO: 4461010 - DNA, 25 bp, Homo sapien
cctgtgctctgtgcatggtccctaa

SEQ ID NO: 4461011 - DNA, 25 bp, Homo sapien
ggagatgatttcacacctatgaggg

SEQ ID NO: 4461012 - DNA, 25 bp, Homo sapien
ggaaccccagtgatctctattggaa

SEQ ID NO: 4461013 - DNA, 25 bp, Homo sapien
tataatggggattgccagaatcagc

SEQ ID NO: 4461014 - DNA, 25 bp, Homo sapien
catgtaagagatgtgtttcctgctt

SEQ ID NO: 4461015 - DNA, 25 bp, Homo sapien
cgctagaagctgcatgtaagagatg

SEQ ID NO: 4461016 - DNA, 25 bp, Homo sapien
gattgccagaatcagcgctagaagc

SEQ ID NO: 4461017 - DNA, 25 bp, Homo sapien
tcgccggcgcggctgggtgcggcgg

SEQ ID NO: 4461018 - DNA, 25 bp, Homo sapien
ggagccgcttccgggcgcgttgcct

SEQ ID NO: 4461019 - DNA, 25 bp, Homo sapien
gggagcgccgtccaatcagcgcgcg

SEQ ID NO: 4461020 - DNA, 25 bp, Homo sapien
gcgttgcctggacgcggttgccgtg

SEQ ID NO: 4461021 - DNA, 25 bp, Homo sapien
gggtgggcgcgccgcggctgcccat

SEQ ID NO: 4461022 - DNA, 25 bp, Homo sapien
cggggggtgggcgcgccgcggctgc

SEQ ID NO: 4461023 - DNA, 25 bp, Homo sapien
ggggggtgggcgcgccgcggctgcc

SEQ ID NO: 4461024 - DNA, 25 bp, Homo sapien
gcgcggggggtgggcgcgccgcggc

SEQ ID NO: 4461025 - DNA, 25 bp, Homo sapien
ggagcattaatcctgattttgttca

SEQ ID NO: 4461026 - DNA, 25 bp, Homo sapien
cctattagattaactacaggaaaga

SEQ ID NO: 4461027 - DNA, 25 bp, Homo sapien
gtttcctattagattaactacagga

SEQ ID NO: 4461028 - DNA, 25 bp, Homo sapien
caggaaagaagaacttaggagcatt

SEQ ID NO: 4461029 - DNA, 25 bp, Homo sapien
tgcctgccacgattgggttttgatt

SEQ ID NO: 4461030 - DNA, 25 bp, Homo sapien
tgccacgattgggttttgattttac

SEQ ID NO: 4461031 - DNA, 25 bp, Homo sapien
tgctgcctgccacgattgggttttg

SEQ ID NO: 4461032 - DNA, 25 bp, Homo sapien
gctgctgcctgccacgattgggttt

SEQ ID NO: 4461033 - DNA, 25 bp, Homo sapien
tccctactctggtgagacggtggag

SEQ ID NO: 4461034 - DNA, 25 bp, Homo sapien
cagcactaaggagaagcggaagagc

SEQ ID NO: 4461035 - DNA, 25 bp, Homo sapien
tgcattggtttggaggcagcactaa

SEQ ID NO: 4461036 - DNA, 25 bp, Homo sapien
ggcaagttgttcactcaggctctgg

SEQ ID NO: 4461037 - DNA, 25 bp, Homo sapien
gggtgacaaccagtcagcaaacgca

SEQ ID NO: 4461038 - DNA, 25 bp, Homo sapien
tggggcagggggtgacaaccagtca

SEQ ID NO: 4461039 - DNA, 25 bp, Homo sapien
gcagggggtgacaaccagtcagcaa

SEQ ID NO: 4461040 - DNA, 25 bp, Homo sapien
gacaaccagtcagcaaacgcagaca

SEQ ID NO: 4461041 - DNA, 25 bp, Homo sapien
tagttgcttcatccagagagaatgt

SEQ ID NO: 4461042 - DNA, 25 bp, Homo sapien
agttgcttcatccagagagaatgtc

SEQ ID NO: 4461043 - DNA, 25 bp, Homo sapien
agaatgtcttcttcacaaacgcgtt

SEQ ID NO: 4461044 - DNA, 25 bp, Homo sapien
tgtagttgcttcatccagagagaat

SEQ ID NO: 4461045 - DNA, 25 bp, Homo sapien
ttttatttaagccacactcagcgac

SEQ ID NO: 4461046 - DNA, 25 bp, Homo sapien
tctctcccacataaacatgcttttt

SEQ ID NO: 4461047 - DNA, 25 bp, Homo sapien
tttaagccacactcagcgacggcag

SEQ ID NO: 4461048 - DNA, 25 bp, Homo sapien
cagcgacggcagcacaatgtcttgc

SEQ ID NO: 4461049 - DNA, 25 bp, Homo sapien
cgacttgagtacagcacattaattt

SEQ ID NO: 4461050 - DNA, 25 bp, Homo sapien
gaattccataatgcgaaagcaaccc

SEQ ID NO: 4461051 - DNA, 25 bp, Homo sapien
ccaccaggggtttctgaataacatc

SEQ ID NO: 4461052 - DNA, 25 bp, Homo sapien
gaataacatcttcccggttcaacaa

SEQ ID NO: 4461053 - DNA, 25 bp, Homo sapien
tgacatatcgattgctgactgaagg

SEQ ID NO: 4461054 - DNA, 25 bp, Homo sapien
tacccaaatgacatatcgattgctg

SEQ ID NO: 4461055 - DNA, 25 bp, Homo sapien
tatcgattgctgactgaaggtgccc

SEQ ID NO: 4461056 - DNA, 25 bp, Homo sapien
caaatgacatatcgattgctgactg

SEQ ID NO: 4461057 - DNA, 25 bp, Homo sapien
caacatttgacagtgctcttccagc

SEQ ID NO: 4461058 - DNA, 25 bp, Homo sapien
cagccagtgcagagatttctgcata

SEQ ID NO: 4461059 - DNA, 25 bp, Homo sapien
ttagaatgcttacaacatttgacag

SEQ ID NO: 4461060 - DNA, 25 bp, Homo sapien
gtgaactttagaatgcttacaacat

SEQ ID NO: 4461061 - DNA, 25 bp, Homo sapien
tggccttgagtccacttagcaagac

SEQ ID NO: 4461062 - DNA, 25 bp, Homo sapien
ctccattctatcacattcataaagg

SEQ ID NO: 4461063 - DNA, 25 bp, Homo sapien
gaaaatggccttgagtccacttagc

SEQ ID NO: 4461064 - DNA, 25 bp, Homo sapien
ttgagtccacttagcaagacttgca

SEQ ID NO: 4461065 - DNA, 25 bp, Homo sapien
ttgtgggcacagaacaaggcttgag

SEQ ID NO: 4461066 - DNA, 25 bp, Homo sapien
gctggtgctctcatcaaagctggga

SEQ ID NO: 4461067 - DNA, 25 bp, Homo sapien
gctgggaatgaagcctggatcgcct

SEQ ID NO: 4461068 - DNA, 25 bp, Homo sapien
gcacagtattccaaaaactcgaggt

SEQ ID NO: 4461069 - DNA, 25 bp, Homo sapien
gaaatacagtgctccgttgggccat

SEQ ID NO: 4461070 - DNA, 25 bp, Homo sapien
ctttccttggtgacacgagaaggaa

SEQ ID NO: 4461071 - DNA, 25 bp, Homo sapien
agaaggaaatacagtgctccgttgg

SEQ ID NO: 4461072 - DNA, 25 bp, Homo sapien
ttggtgacacgagaaggaaatacag

SEQ ID NO: 4461073 - DNA, 25 bp, Homo sapien
gctgctccacgaggcttacagatga

SEQ ID NO: 4461074 - DNA, 25 bp, Homo sapien
tgatatgctcctccaagaaaagcct

SEQ ID NO: 4461075 - DNA, 25 bp, Homo sapien
tttaatccgaaaggcgtgctctacg

SEQ ID NO: 4461076 - DNA, 25 bp, Homo sapien
tttctcatggcagaggatcctgtct

SEQ ID NO: 4461077 - DNA, 25 bp, Homo sapien
tgtgggtgacctcctgacatggagc

SEQ ID NO: 4461078 - DNA, 25 bp, Homo sapien
gacagacagctttgttctaaatgca

SEQ ID NO: 4461079 - DNA, 25 bp, Homo sapien
aacattgcgtagtgagggaaaccca

SEQ ID NO: 4461080 - DNA, 25 bp, Homo sapien
aattctgtggaaagggacataggcc

SEQ ID NO: 4461081 - DNA, 25 bp, Homo sapien
tgcccatcagttcatgaatggttaa

SEQ ID NO: 4461082 - DNA, 25 bp, Homo sapien
taagctcactataagacccagcaat

SEQ ID NO: 4461083 - DNA, 25 bp, Homo sapien
aagttaaacataagctcactataag

SEQ ID NO: 4461084 - DNA, 25 bp, Homo sapien
tcacatcaaagacctgtcacaaatg

SEQ ID NO: 4461085 - DNA, 25 bp, Homo sapien
cagggctcggcttccagggaccgat

SEQ ID NO: 4461086 - DNA, 25 bp, Homo sapien
ctcggcttccagggaccgataacgg

SEQ ID NO: 4461087 - DNA, 25 bp, Homo sapien
gctcggcttccagggaccgataacg

SEQ ID NO: 4461088 - DNA, 25 bp, Homo sapien
gggctcggcttccagggaccgataa

SEQ ID NO: 4461089 - DNA, 25 bp, Homo sapien
gttccatagctaatgttgtcccggg

SEQ ID NO: 4461090 - DNA, 25 bp, Homo sapien
tggcgcatctccagggtctttaagg

SEQ ID NO: 4461091 - DNA, 25 bp, Homo sapien
tcccgggcacgaatctgctcctgga

SEQ ID NO: 4461092 - DNA, 25 bp, Homo sapien
tcctcgaagatctcccaaaccggag

SEQ ID NO: 4461093 - DNA, 25 bp, Homo sapien
tttttgatgagcagagaccccaaca

SEQ ID NO: 4461094 - DNA, 25 bp, Homo sapien
gatgagcagagaccccaacatttga

SEQ ID NO: 4461095 - DNA, 25 bp, Homo sapien
gagcagagaccccaacatttgaaca

SEQ ID NO: 4461096 - DNA, 25 bp, Homo sapien
cagagaccccaacatttgaacacct

SEQ ID NO: 4461097 - DNA, 25 bp, Homo sapien
gagtcaacagggtgtcatcaccaag

SEQ ID NO: 4461098 - DNA, 25 bp, Homo sapien
ggtacagtgcaagggtagagagaga

SEQ ID NO: 4461099 - DNA, 25 bp, Homo sapien
gatcacactaaggagactggagttc

SEQ ID NO: 4461100 - DNA, 25 bp, Homo sapien
tgatcactgctgaaaggtacagtgc

SEQ ID NO: 4461101 - DNA, 25 bp, Homo sapien
tgatgttcaacaccattagtcctca

SEQ ID NO: 4461102 - DNA, 25 bp, Homo sapien
gatgtgaaggaatcggagccctcag

SEQ ID NO: 4461103 - DNA, 25 bp, Homo sapien
tgacgagcaagcacattaaatgatg

SEQ ID NO: 4461104 - DNA, 25 bp, Homo sapien
gggcaatgtaaagtggcggccactt

SEQ ID NO: 4461105 - DNA, 25 bp, Homo sapien
tctttgttcaagtgctggagcccct

SEQ ID NO: 4461106 - DNA, 25 bp, Homo sapien
tccaagataagtttggcagcctgct

SEQ ID NO: 4461107 - DNA, 25 bp, Homo sapien
ctcataggtcgttttgtgctctgca

SEQ ID NO: 4461108 - DNA, 25 bp, Homo sapien
gaaagtctagctatgctggcatcac

SEQ ID NO: 4461109 - DNA, 25 bp, Homo sapien
ctctgtgagacatcttcagtttggt

SEQ ID NO: 4461110 - DNA, 25 bp, Homo sapien
tgtctctgtgagacatcttcagttt

SEQ ID NO: 4461111 - DNA, 25 bp, Homo sapien
gtctctgtgagacatcttcagtttg

SEQ ID NO: 4461112 - DNA, 25 bp, Homo sapien
tctctgtgagacatcttcagtttgg

SEQ ID NO: 4461113 - DNA, 25 bp, Homo sapien
tcctgttgcaaccaactccgtgcag

SEQ ID NO: 4461114 - DNA, 25 bp, Homo sapien
tggttactgagttcctcaactgtac

SEQ ID NO: 4461115 - DNA, 25 bp, Homo sapien
caaggaaagctgatcaattttctgt

SEQ ID NO: 4461116 - DNA, 25 bp, Homo sapien
aaagctctttttctatccgttcttg

SEQ ID NO: 4461117 - DNA, 25 bp, Homo sapien
ggtgattcgcccgtgcatcttctcc

SEQ ID NO: 4461118 - DNA, 25 bp, Homo sapien
gtgattcgcccgtgcatcttctcct

SEQ ID NO: 4461119 - DNA, 25 bp, Homo sapien
agcttggtgattcgcccgtgcatct

SEQ ID NO: 4461120 - DNA, 25 bp, Homo sapien
ctccagcttggtgattcgcccgtgc

SEQ ID NO: 4461121 - DNA, 25 bp, Homo sapien
cttctgtagctggtccctgtccagc

SEQ ID NO: 4461122 - DNA, 25 bp, Homo sapien
cttgcctgagggatcctatgctttc

SEQ ID NO: 4461123 - DNA, 25 bp, Homo sapien
cacatgggggtctctggcttctgca

SEQ ID NO: 4461124 - DNA, 25 bp, Homo sapien
tcttggcctcgagaacttgcctgag

SEQ ID NO: 4461125 - DNA, 25 bp, Homo sapien
aatcctgaatgcagcgatggcctgg

SEQ ID NO: 4461126 - DNA, 25 bp, Homo sapien
gacttaatcggtctgggaggcacag

SEQ ID NO: 4461127 - DNA, 25 bp, Homo sapien
gggacaccctcacagttcagaacgt

SEQ ID NO: 4461128 - DNA, 25 bp, Homo sapien
tggctacagaggtatccggctccta

SEQ ID NO: 4461129 - DNA, 25 bp, Homo sapien
gaaattgtcaattcatcttgggcca

SEQ ID NO: 4461130 - DNA, 25 bp, Homo sapien
cctcacatgtctattggaaattgtc

SEQ ID NO: 4461131 - DNA, 25 bp, Homo sapien
tggaaattgtcaattcatcttgggc

SEQ ID NO: 4461132 - DNA, 25 bp, Homo sapien
ttctaagctccctcacatgtctatt

SEQ ID NO: 4461133 - DNA, 25 bp, Homo sapien
tgggttccgctgaagcaccagcctg

SEQ ID NO: 4461134 - DNA, 25 bp, Homo sapien
ggttccgctgaagcaccagcctgct

SEQ ID NO: 4461135 - DNA, 25 bp, Homo sapien
gggttccgctgaagcaccagcctgc

SEQ ID NO: 4461136 - DNA, 25 bp, Homo sapien
ctgggttccgctgaagcaccagcct

SEQ ID NO: 4461137 - DNA, 25 bp, Homo sapien
ggacacacacacgtgaatctacaag

SEQ ID NO: 4461138 - DNA, 25 bp, Homo sapien
acacacgtgaatctacaagaaggga

SEQ ID NO: 4461139 - DNA, 25 bp, Homo sapien
ttccctgggccttttagaatgcatg

SEQ ID NO: 4461140 - DNA, 25 bp, Homo sapien
cctgggccttttagaatgcatggag

SEQ ID NO: 4461141 - DNA, 25 bp, Homo sapien
tccaggacttgttcgcggacacagg

SEQ ID NO: 4461142 - DNA, 25 bp, Homo sapien
ccaggacttgttcgcggacacaggg

SEQ ID NO: 4461143 - DNA, 25 bp, Homo sapien
tgtccaggacttgttcgcggacaca

SEQ ID NO: 4461144 - DNA, 25 bp, Homo sapien
caggacttgttcgcggacacaggga

SEQ ID NO: 4461145 - DNA, 25 bp, Homo sapien
cggcatttggtcccgcccaacatgg

SEQ ID NO: 4461146 - DNA, 25 bp, Homo sapien
gctgctagacaggtaaactctaggc

SEQ ID NO: 4461147 - DNA, 25 bp, Homo sapien
caggtaaactctaggccagagggtt

SEQ ID NO: 4461148 - DNA, 25 bp, Homo sapien
acatggtttgggcagcagcacagca

SEQ ID NO: 4461149 - DNA, 25 bp, Homo sapien
ggaatactcctgctaccattaaggg

SEQ ID NO: 4461150 - DNA, 25 bp, Homo sapien
tcctgctaccattaagggacttaag

SEQ ID NO: 4461151 - DNA, 25 bp, Homo sapien
taagggacttaaggctccctcatcc

SEQ ID NO: 4461152 - DNA, 25 bp, Homo sapien
ccatgatgcagaaggaatactcctg

SEQ ID NO: 4461153 - DNA, 25 bp, Homo sapien
tcagttttgaaattcagaatagata

SEQ ID NO: 4461154 - DNA, 25 bp, Homo sapien
cagttttgaaattcagaatagatac

SEQ ID NO: 4461155 - DNA, 25 bp, Homo sapien
cttataaaaatgcctgttttctgct

SEQ ID NO: 4461156 - DNA, 25 bp, Homo sapien
cacggctaaactggaagagtctgcc

SEQ ID NO: 4461157 - DNA, 25 bp, Homo sapien
tggaagagtctgccgtgtcccccag

SEQ ID NO: 4461158 - DNA, 25 bp, Homo sapien
accacggctaaactggaagagtctg

SEQ ID NO: 4461159 - DNA, 25 bp, Homo sapien
aaactggaagagtctgccgtgtccc

SEQ ID NO: 4461160 - DNA, 25 bp, Homo sapien
cgttcctttggccacatatatgtga

SEQ ID NO: 4461161 - DNA, 25 bp, Homo sapien
catccgatatatgttctctagtcct

SEQ ID NO: 4461162 - DNA, 25 bp, Homo sapien
aggcatccgatatatgttctctagt

SEQ ID NO: 4461163 - DNA, 25 bp, Homo sapien
gcgcctttcggcgggaaccgccatc

SEQ ID NO: 4461164 - DNA, 25 bp, Homo sapien
tctgaagattcagagccctggccac

SEQ ID NO: 4461165 - DNA, 25 bp, Homo sapien
ttctgaagattcagagccctggcca

SEQ ID NO: 4461166 - DNA, 25 bp, Homo sapien
agacataaactgtgggaagcttggg

SEQ ID NO: 4461167 - DNA, 25 bp, Homo sapien
gatcagccagacaaacaacaggaga

SEQ ID NO: 4461168 - DNA, 25 bp, Homo sapien
gaggaagtggcatttaggctaatac

SEQ ID NO: 4461169 - DNA, 25 bp, Homo sapien
ctaatacttgatgggtgagcagaga

SEQ ID NO: 4461170 - DNA, 25 bp, Homo sapien
tggagtctggcctggttgtggacta

SEQ ID NO: 4461171 - DNA, 25 bp, Homo sapien
tataatataattccagctcatcaga

SEQ ID NO: 4461172 - DNA, 25 bp, Homo sapien
tttcctgcgatagccctgcccaggg

SEQ ID NO: 4461173 - DNA, 25 bp, Homo sapien
tttgagcagtgtttcctgcgatagc

SEQ ID NO: 4461174 - DNA, 25 bp, Homo sapien
taaaactgcacaggtgggaggttga

SEQ ID NO: 4461175 - DNA, 25 bp, Homo sapien
gggaggcacagggtaaaactgcaca

SEQ ID NO: 4461176 - DNA, 25 bp, Homo sapien
cacagggtaaaactgcacaggtggg

SEQ ID NO: 4461177 - DNA, 25 bp, Homo sapien
cacaggtgggaggttgaacagactg

SEQ ID NO: 4461178 - DNA, 25 bp, Homo sapien
tgtaggagccagtcatgggcctctt

SEQ ID NO: 4461179 - DNA, 25 bp, Homo sapien
gtcatgggcctcttctcttctctcc

SEQ ID NO: 4461180 - DNA, 25 bp, Homo sapien
ccagtcatgggcctcttctcttctc

SEQ ID NO: 4461181 - DNA, 25 bp, Homo sapien
ctgtaggagccagtcatgggcctct

SEQ ID NO: 4461182 - DNA, 25 bp, Homo sapien
tggggagcagaggagaaggtgagga

SEQ ID NO: 4461183 - DNA, 25 bp, Homo sapien
ctaggtggggagcagaggagaaggt

SEQ ID NO: 4461184 - DNA, 25 bp, Homo sapien
agcagaggagaaggtgaggaggaag

SEQ ID NO: 4461185 - DNA, 25 bp, Homo sapien
ggagcagaggagaaggtgaggagga

SEQ ID NO: 4461186 - DNA, 25 bp, Homo sapien
ctgggcctgggcagacagtctacct

SEQ ID NO: 4461187 - DNA, 25 bp, Homo sapien
tgggcctgggcagacagtctacctt

SEQ ID NO: 4461188 - DNA, 25 bp, Homo sapien
gggcctgggcagacagtctaccttt

SEQ ID NO: 4461189 - DNA, 25 bp, Homo sapien
tagtgtcgaagcaaagagtcaaact

SEQ ID NO: 4461190 - DNA, 25 bp, Homo sapien
caagaacttgcagacggtagtgtcg

SEQ ID NO: 4461191 - DNA, 25 bp, Homo sapien
cagcggctagcacaagaacttgcag

SEQ ID NO: 4461192 - DNA, 25 bp, Homo sapien
tgtctttcccacagcggctagcaca

SEQ ID NO: 4461193 - DNA, 25 bp, Homo sapien
tgctcagcaccacggaagcaaaggg

SEQ ID NO: 4461194 - DNA, 25 bp, Homo sapien
ctgctcagcaccacggaagcaaagg

SEQ ID NO: 4461195 - DNA, 25 bp, Homo sapien
cagcaccacggaagcaaagggcagc

SEQ ID NO: 4461196 - DNA, 25 bp, Homo sapien
ctcagcaccacggaagcaaagggca

SEQ ID NO: 4461197 - DNA, 25 bp, Homo sapien
gagtaaagggcaggtcacaagtagc

SEQ ID NO: 4461198 - DNA, 25 bp, Homo sapien
tattagcagaatcccagggcttccc

SEQ ID NO: 4461199 - DNA, 25 bp, Homo sapien
caggtcacaagtagcaagggcagtt

SEQ ID NO: 4461200 - DNA, 25 bp, Homo sapien
gggcttcccagaacaaaaactgctg

SEQ ID NO: 4461201 - DNA, 25 bp, Homo sapien
caggcgtcagcttggtcttctcatt

SEQ ID NO: 4461202 - DNA, 25 bp, Homo sapien
ggcgtcagcttggtcttctcattga

SEQ ID NO: 4461203 - DNA, 25 bp, Homo sapien
ccaggcgtcagcttggtcttctcat

SEQ ID NO: 4461204 - DNA, 25 bp, Homo sapien
gcgtcagcttggtcttctcattgac

SEQ ID NO: 4461205 - DNA, 25 bp, Homo sapien
gatatttcagccagaacagcccagt

SEQ ID NO: 4461206 - DNA, 25 bp, Homo sapien
atgctggcaatatccgacaaggcaa

SEQ ID NO: 4461207 - DNA, 25 bp, Homo sapien
gcagaaacattctcaagcccaagtc

SEQ ID NO: 4461208 - DNA, 25 bp, Homo sapien
ggtaagacagcaagctcagagaaat

SEQ ID NO: 4461209 - DNA, 25 bp, Homo sapien
gcaaagtagagggcagcaggtggct

SEQ ID NO: 4461210 - DNA, 25 bp, Homo sapien
aaagtagagggcagcaggtggctcc

SEQ ID NO: 4461211 - DNA, 25 bp, Homo sapien
ctgcaaagtagagggcagcaggtgg

SEQ ID NO: 4461212 - DNA, 25 bp, Homo sapien
agtagagggcagcaggtggctccat

SEQ ID NO: 4461213 - DNA, 25 bp, Homo sapien
tgtccaaggaacagtttcaggctcc

SEQ ID NO: 4461214 - DNA, 25 bp, Homo sapien
gggatgatctcttcacaaggcgtga

SEQ ID NO: 4461215 - DNA, 25 bp, Homo sapien
ctgatcttctaaccctccaaaaggt

SEQ ID NO: 4461216 - DNA, 25 bp, Homo sapien
ttccaagtgaagactggcggtgttc

SEQ ID NO: 4461217 - DNA, 25 bp, Homo sapien
aatccttagtaaagacctgcctaga

SEQ ID NO: 4461218 - DNA, 25 bp, Homo sapien
agacctgcctagaagccccttacat

SEQ ID NO: 4461219 - DNA, 25 bp, Homo sapien
ctagaagccccttacatctggtttg

SEQ ID NO: 4461220 - DNA, 25 bp, Homo sapien
ctggtttgttgatggagatctgtaa

SEQ ID NO: 4461221 - DNA, 25 bp, Homo sapien
ggtggagaccgagcacagggaaggt

SEQ ID NO: 4461222 - DNA, 25 bp, Homo sapien
aggtggagaccgagcacagggaagg

SEQ ID NO: 4461223 - DNA, 25 bp, Homo sapien
caggtggagaccgagcacagggaag

SEQ ID NO: 4461224 - DNA, 25 bp, Homo sapien
ccacaagtaatgcagctggcagagt

SEQ ID NO: 4461225 - DNA, 25 bp, Homo sapien
ggctttgagattccctggactccag

SEQ ID NO: 4461226 - DNA, 25 bp, Homo sapien
tcgggtgacccctgaacagttgata

SEQ ID NO: 4461227 - DNA, 25 bp, Homo sapien
tcagaatagcctgaagcactgcctc

SEQ ID NO: 4461228 - DNA, 25 bp, Homo sapien
gagtatgcaatagggaactccacct

SEQ ID NO: 4461229 - DNA, 25 bp, Homo sapien
ctgaggggcatacacagctcgcagt

SEQ ID NO: 4461230 - DNA, 25 bp, Homo sapien
gaggggcatacacagctcgcagtag

SEQ ID NO: 4461231 - DNA, 25 bp, Homo sapien
tgaggggcatacacagctcgcagta

SEQ ID NO: 4461232 - DNA, 25 bp, Homo sapien
taaacgcagatagcccgctggtgga

SEQ ID NO: 4461233 - DNA, 25 bp, Homo sapien
ccagagcagggagcataaggagcac

SEQ ID NO: 4461234 - DNA, 25 bp, Homo sapien
aaagtccgtcccacatgtattcagg

SEQ ID NO: 4461235 - DNA, 25 bp, Homo sapien
aaaacatgttggacgaaatctcggg

SEQ ID NO: 4461236 - DNA, 25 bp, Homo sapien
ggtagcaacgctctcatagtgtgtc

SEQ ID NO: 4461237 - DNA, 25 bp, Homo sapien
tatcctaaaggatgccacgaattgc

SEQ ID NO: 4461238 - DNA, 25 bp, Homo sapien
gaacggcagctccacagaatggaaa

SEQ ID NO: 4461239 - DNA, 25 bp, Homo sapien
acctggaattattaggaacggcagc

SEQ ID NO: 4461240 - DNA, 25 bp, Homo sapien
gactcaagaggcctaaacatggaat

SEQ ID NO: 4461241 - DNA, 25 bp, Homo sapien
gaatttgctatttgtaggccaggcg

SEQ ID NO: 4461242 - DNA, 25 bp, Homo sapien
tgcagcttgtcaggaccatttcaga

SEQ ID NO: 4461243 - DNA, 25 bp, Homo sapien
tagtgctgcgattttcctgtaagag

SEQ ID NO: 4461244 - DNA, 25 bp, Homo sapien
cgtgatcgatcaccactgctggcaa

SEQ ID NO: 4461245 - DNA, 25 bp, Homo sapien
tcagggcacacccactgtgtataca

SEQ ID NO: 4461246 - DNA, 25 bp, Homo sapien
caatgcaggcaagttggtagtgaca

SEQ ID NO: 4461247 - DNA, 25 bp, Homo sapien
tgctggcaacagacctctcagggca

SEQ ID NO: 4461248 - DNA, 25 bp, Homo sapien
taaataaacagcacttcctacgcac

SEQ ID NO: 4461249 - DNA, 25 bp, Homo sapien
taaattcgacccctctgatatgaag

SEQ ID NO: 4461250 - DNA, 25 bp, Homo sapien
caaaccctgagaggtaatacaaaca

SEQ ID NO: 4461251 - DNA, 25 bp, Homo sapien
tgagatttttccttaccagagaacg

SEQ ID NO: 4461252 - DNA, 25 bp, Homo sapien
tgttcccaagcaaggttatcaacgg

SEQ ID NO: 4461253 - DNA, 25 bp, Homo sapien
agtatttgacctcctcaactgatgt

SEQ ID NO: 4461254 - DNA, 25 bp, Homo sapien
gatgtatgtcatatgttcccaagca

SEQ ID NO: 4461255 - DNA, 25 bp, Homo sapien
aggttatcaacggccttctccttct

SEQ ID NO: 4461256 - DNA, 25 bp, Homo sapien
ggctcaagtaaggtacttaaagcag

SEQ ID NO: 4461257 - DNA, 25 bp, Homo sapien
tgatctttggctcaagtaaggtact

SEQ ID NO: 4461258 - DNA, 25 bp, Homo sapien
tagaaaaactgatctttggctcaag

SEQ ID NO: 4461259 - DNA, 25 bp, Homo sapien
aaggtacttaaagcagacaagcagg

SEQ ID NO: 4461260 - DNA, 25 bp, Homo sapien
tgattgccagtacattcaagcttca

SEQ ID NO: 4461261 - DNA, 25 bp, Homo sapien
tatctcattgattgccagtacattc

SEQ ID NO: 4461262 - DNA, 25 bp, Homo sapien
catagaggcagaaaccatatcttat

SEQ ID NO: 4461263 - DNA, 25 bp, Homo sapien
tacattcaagcttcatagaggcaga

SEQ ID NO: 4461264 - DNA, 25 bp, Homo sapien
taacacccaaggagtggacaaagaa

SEQ ID NO: 4461265 - DNA, 25 bp, Homo sapien
ctcttccttgggcttaatgccagac

SEQ ID NO: 4461266 - DNA, 25 bp, Homo sapien
cttgggcttaatgccagactggtga

SEQ ID NO: 4461267 - DNA, 25 bp, Homo sapien
gactgattggcttattatgatttac

SEQ ID NO: 4461268 - DNA, 25 bp, Homo sapien
cttacatggttaactggattgaccc

SEQ ID NO: 4461269 - DNA, 25 bp, Homo sapien
ttgttacctcagcatgccactgtag

SEQ ID NO: 4461270 - DNA, 25 bp, Homo sapien
tgttacctcgatgctcctgcagttg

SEQ ID NO: 4461271 - DNA, 25 bp, Homo sapien
gaagtaacatactgaccctaggtga

SEQ ID NO: 4461272 - DNA, 25 bp, Homo sapien
caatactacagaatgaatagaaaaa

SEQ ID NO: 4461273 - DNA, 25 bp, Homo sapien
gcacggtgtagtaattgatctttag

SEQ ID NO: 4461274 - DNA, 25 bp, Homo sapien
gtttattgcagtagtttttgaggat

SEQ ID NO: 4461275 - DNA, 25 bp, Homo sapien
tctttagtgagaagattgttgactc

SEQ ID NO: 4461276 - DNA, 25 bp, Homo sapien
gattgttgactcaaggaaagcttaa

SEQ ID NO: 4461277 - DNA, 25 bp, Homo sapien
gataaagtgaaaattgtagcctgtg

SEQ ID NO: 4461278 - DNA, 25 bp, Homo sapien
gagaggtgacagaacttattaaagt

SEQ ID NO: 4461279 - DNA, 25 bp, Homo sapien
taatgtgtggacttttgtactgaat

SEQ ID NO: 4461280 - DNA, 25 bp, Homo sapien
gaacttattaaagtggataaagtga

SEQ ID NO: 4461281 - DNA, 25 bp, Homo sapien
aggttccgcgagcacttccgggtcg

SEQ ID NO: 4461282 - DNA, 25 bp, Homo sapien
tcagctcagttctgcggtttctgcg

SEQ ID NO: 4461283 - DNA, 25 bp, Homo sapien
agaagtaggaacctcctgccgggct

SEQ ID NO: 4461284 - DNA, 25 bp, Homo sapien
gcttctgtccgctccgcggagggaa

SEQ ID NO: 4461285 - DNA, 25 bp, Homo sapien
tgaaatatgaatgccctacatttct

SEQ ID NO: 4461286 - DNA, 25 bp, Homo sapien
accatattatgctggtcgcgaactc

SEQ ID NO: 4461287 - DNA, 25 bp, Homo sapien
tgcaaggtcttcaacactgttaccc

SEQ ID NO: 4461288 - DNA, 25 bp, Homo sapien
taccctgaacacacttccggcatga

SEQ ID NO: 4461289 - DNA, 25 bp, Homo sapien
tgctgcgagaaagagtcaagaactt

SEQ ID NO: 4461290 - DNA, 25 bp, Homo sapien
tagaatcagatcaatggtgagaccc

SEQ ID NO: 4461291 - DNA, 25 bp, Homo sapien
tcttaagatgatgttgcccagccga

SEQ ID NO: 4461292 - DNA, 25 bp, Homo sapien
gaaatggaccacaaatctgagaggg

SEQ ID NO: 4461293 - DNA, 25 bp, Homo sapien
gaagtaccatatgtgactgctgatg

SEQ ID NO: 4461294 - DNA, 25 bp, Homo sapien
ggctatacgcaaggtatgtgaataa

SEQ ID NO: 4461295 - DNA, 25 bp, Homo sapien
ggaaaacctgcaggctatacgcaag

SEQ ID NO: 4461296 - DNA, 25 bp, Homo sapien
gatggtaacatttcttgtatgcagc

SEQ ID NO: 4461297 - DNA, 25 bp, Homo sapien
ggataacacgtttgttacaagcatt

SEQ ID NO: 4461298 - DNA, 25 bp, Homo sapien
catcatattgtgctgttttggataa

SEQ ID NO: 4461299 - DNA, 25 bp, Homo sapien
tgacaatactgtaaattaggttaat

SEQ ID NO: 4461300 - DNA, 25 bp, Homo sapien
taggttaattttgtaagtcttagca

SEQ ID NO: 4461301 - DNA, 25 bp, Homo sapien
attcagcaagtacagatgcaagcgc

SEQ ID NO: 4461302 - DNA, 25 bp, Homo sapien
cgaagtgtattagtaccatcccaag

SEQ ID NO: 4461303 - DNA, 25 bp, Homo sapien
gattgtcatgaatacccaaagatca

SEQ ID NO: 4461304 - DNA, 25 bp, Homo sapien
tcataaggcaacagatggttaaact

SEQ ID NO: 4461305 - DNA, 25 bp, Homo sapien
taggtaatttttgagagccattgac

SEQ ID NO: 4461306 - DNA, 25 bp, Homo sapien
tcagaacacttctggctgttacaag

SEQ ID NO: 4461307 - DNA, 25 bp, Homo sapien
tatacatacttatgggatacagagc

SEQ ID NO: 4461308 - DNA, 25 bp, Homo sapien
cctaatcattgtacatccttcttgg

SEQ ID NO: 4461309 - DNA, 25 bp, Homo sapien
cagatatccgaaaagctccgctcat

SEQ ID NO: 4461310 - DNA, 25 bp, Homo sapien
gccagccacaccgtgcaggtgacag

SEQ ID NO: 4461311 - DNA, 25 bp, Homo sapien
tcgcagagggtgaagagtccgtagg

SEQ ID NO: 4461312 - DNA, 25 bp, Homo sapien
ctaagagggtgatgaagatggcagc

SEQ ID NO: 4461313 - DNA, 25 bp, Homo sapien
atctgaatgccaagggaatcaatga

SEQ ID NO: 4461314 - DNA, 25 bp, Homo sapien
agcataagatgaagtcatctgaatg

SEQ ID NO: 4461315 - DNA, 25 bp, Homo sapien
cataagatgaagtcatctgaatgcc

SEQ ID NO: 4461316 - DNA, 25 bp, Homo sapien
aagatgaagtcatctgaatgccaag

SEQ ID NO: 4461317 - DNA, 25 bp, Homo sapien
tgtgtcaaaattcttaaggtctccc

SEQ ID NO: 4461318 - DNA, 25 bp, Homo sapien
gacgggtactacttgggatatccca

SEQ ID NO: 4461319 - DNA, 25 bp, Homo sapien
cacctgatggtttggagtacggaaa

SEQ ID NO: 4461320 - DNA, 25 bp, Homo sapien
taatggttcctaggactgtgtccac

SEQ ID NO: 4461321 - DNA, 25 bp, Homo sapien
aattggctcccagatagctacttga

SEQ ID NO: 4461322 - DNA, 25 bp, Homo sapien
gagtagttaaccacttcctatctgg

SEQ ID NO: 4461323 - DNA, 25 bp, Homo sapien
aaaaagaagatggacgacgctggcg

SEQ ID NO: 4461324 - DNA, 25 bp, Homo sapien
gccagggagaatattgtcacaagtt

SEQ ID NO: 4461325 - DNA, 25 bp, Homo sapien
cttgtgaaatctaacacttcaggat

SEQ ID NO: 4461326 - DNA, 25 bp, Homo sapien
tgtcattacggaacataaggctttt

SEQ ID NO: 4461327 - DNA, 25 bp, Homo sapien
tagcagataagatagctataggaca

SEQ ID NO: 4461328 - DNA, 25 bp, Homo sapien
gcatcttttgaatgttgacgtagca

SEQ ID NO: 4461329 - DNA, 25 bp, Homo sapien
cgcttttccgtttctggtagttgtg

SEQ ID NO: 4461330 - DNA, 25 bp, Homo sapien
tgtgctcgggatggaaccttgcccc

SEQ ID NO: 4461331 - DNA, 25 bp, Homo sapien
gccatagaacctgctcgggaggtgc

SEQ ID NO: 4461332 - DNA, 25 bp, Homo sapien
tgcttaggtccccgcccttggcttg

SEQ ID NO: 4461333 - DNA, 25 bp, Homo sapien
gcctgggagaactcggcacggtggc

SEQ ID NO: 4461334 - DNA, 25 bp, Homo sapien
cgaagaggacgagggggccaaggct

SEQ ID NO: 4461335 - DNA, 25 bp, Homo sapien
ctggaggggcgaagaggacgagggg

SEQ ID NO: 4461336 - DNA, 25 bp, Homo sapien
gcgaagaggacgagggggccaaggc

SEQ ID NO: 4461337 - DNA, 25 bp, Homo sapien
tcggccctgctttttgcgacctggc

SEQ ID NO: 4461338 - DNA, 25 bp, Homo sapien
gccctgctttttgcgacctggccgt

SEQ ID NO: 4461339 - DNA, 25 bp, Homo sapien
cctgctttttgcgacctggccgtca

SEQ ID NO: 4461340 - DNA, 25 bp, Homo sapien
gctttttgcgacctggccgtcagcc

SEQ ID NO: 4461341 - DNA, 25 bp, Homo sapien
gccgacgccgtaccgctgcggccgg

SEQ ID NO: 4461342 - DNA, 25 bp, Homo sapien
taccgctgcggccgggggattgggc

SEQ ID NO: 4461343 - DNA, 25 bp, Homo sapien
cgccgtaccgctgcggccgggggat

SEQ ID NO: 4461344 - DNA, 25 bp, Homo sapien
gctgccgccgacgccgtaccgctgc

SEQ ID NO: 4461345 - DNA, 25 bp, Homo sapien
aacacagttgatccagtgaatggta

SEQ ID NO: 4461346 - DNA, 25 bp, Homo sapien
caacacagttgatccagtgaatggt

SEQ ID NO: 4461347 - DNA, 25 bp, Homo sapien
acacagttgatccagtgaatggtac

SEQ ID NO: 4461348 - DNA, 25 bp, Homo sapien
caaaggagtcaaatcagcggcaaaa

SEQ ID NO: 4461349 - DNA, 25 bp, Homo sapien
catggttgtgaacttttatgagagg

SEQ ID NO: 4461350 - DNA, 25 bp, Homo sapien
gaagttacatggttgtgaactttta

SEQ ID NO: 4461351 - DNA, 25 bp, Homo sapien
tttctctgtgcaaaggagtcaaatc

SEQ ID NO: 4461352 - DNA, 25 bp, Homo sapien
gaggtctgatcatatccttgctgga

SEQ ID NO: 4461353 - DNA, 25 bp, Homo sapien
tctgatcatatccttgctggagcaa

SEQ ID NO: 4461354 - DNA, 25 bp, Homo sapien
tgatcatatccttgctggagcaacc

SEQ ID NO: 4461355 - DNA, 25 bp, Homo sapien
tcatatccttgctggagcaacccac

SEQ ID NO: 4461356 - DNA, 25 bp, Homo sapien
taagaaggtctgtggcagcattccc

SEQ ID NO: 4461357 - DNA, 25 bp, Homo sapien
aggttaacatgggtatctgtgacag

SEQ ID NO: 4461358 - DNA, 25 bp, Homo sapien
tgtgacaggtcaagccttaagaagg

SEQ ID NO: 4461359 - DNA, 25 bp, Homo sapien
agccttaagaaggtctgtggcagca

SEQ ID NO: 4461360 - DNA, 25 bp, Homo sapien
tgaaaagtttagaactccaagcaca

SEQ ID NO: 4461361 - DNA, 25 bp, Homo sapien
aagcacagaactctgggcaatttta

SEQ ID NO: 4461362 - DNA, 25 bp, Homo sapien
gaactctgggcaattttatccctat

SEQ ID NO: 4461363 - DNA, 25 bp, Homo sapien
aaagtttagaactccaagcacagaa

SEQ ID NO: 4461364 - DNA, 25 bp, Homo sapien
tgccatgtagcaaccgctgcttaaa

SEQ ID NO: 4461365 - DNA, 25 bp, Homo sapien
ctccactctctttgatgccatgtag

SEQ ID NO: 4461366 - DNA, 25 bp, Homo sapien
tcagggtgatgaagaggtctgcggt

SEQ ID NO: 4461367 - DNA, 25 bp, Homo sapien
gttttggcaccaactgacagcatcc

SEQ ID NO: 4461368 - DNA, 25 bp, Homo sapien
aatggtgtctcaggggtagtggata

SEQ ID NO: 4461369 - DNA, 25 bp, Homo sapien
tggaatggtgtctcaggggtagtgg

SEQ ID NO: 4461370 - DNA, 25 bp, Homo sapien
cagtgcagtaaaatcagtgaataca

SEQ ID NO: 4461371 - DNA, 25 bp, Homo sapien
gggtagtggatacccagtgcagtaa

SEQ ID NO: 4461372 - DNA, 25 bp, Homo sapien
gccacgctctcatatcttgttatct

SEQ ID NO: 4461373 - DNA, 25 bp, Homo sapien
ggcagagccacgctctcatatcttg

SEQ ID NO: 4461374 - DNA, 25 bp, Homo sapien
agagccacgctctcatatcttgtta

SEQ ID NO: 4461375 - DNA, 25 bp, Homo sapien
cgctctcatatcttgttatcttcat

SEQ ID NO: 4461376 - DNA, 25 bp, Homo sapien
tgaaatgccgtgtcagctcagctcg

SEQ ID NO: 4461377 - DNA, 25 bp, Homo sapien
tcagctcgcatggtcagggagctca

SEQ ID NO: 4461378 - DNA, 25 bp, Homo sapien
acaggacttgaaatgccgtgtcagc

SEQ ID NO: 4461379 - DNA, 25 bp, Homo sapien
aagagaaccgttgagctggtaacag

SEQ ID NO: 4461380 - DNA, 25 bp, Homo sapien
atggagaggctaaatgaagaggtgc

SEQ ID NO: 4461381 - DNA, 25 bp, Homo sapien
gagaggctaaatgaagaggtgcttt

SEQ ID NO: 4461382 - DNA, 25 bp, Homo sapien
gaaattattgatagcccatcagcaa

SEQ ID NO: 4461383 - DNA, 25 bp, Homo sapien
acttgaaattattgatagcccatca

SEQ ID NO: 4461384 - DNA, 25 bp, Homo sapien
ctggagagtccactgtccaatttga

SEQ ID NO: 4461385 - DNA, 25 bp, Homo sapien
gagtccactgtccaatttgaaacaa

SEQ ID NO: 4461386 - DNA, 25 bp, Homo sapien
gagagtccactgtccaatttgaaac

SEQ ID NO: 4461387 - DNA, 25 bp, Homo sapien
caggtgtggtacgatttttatctgt

SEQ ID NO: 4461388 - DNA, 25 bp, Homo sapien
taacaacggctgcaattccagtgct

SEQ ID NO: 4461389 - DNA, 25 bp, Homo sapien
tatcgccatacagtgtaacaacggc

SEQ ID NO: 4461390 - DNA, 25 bp, Homo sapien
tgttggtacccaaacacatatcgcc

SEQ ID NO: 4461391 - DNA, 25 bp, Homo sapien
tattctagtcgtagtgaggtcatca

SEQ ID NO: 4461392 - DNA, 25 bp, Homo sapien
gccagagcagctttcctttaggcat

SEQ ID NO: 4461393 - DNA, 25 bp, Homo sapien
agccagagcagctttcctttaggca

SEQ ID NO: 4461394 - DNA, 25 bp, Homo sapien
cttcaccctgcttcagccagagcag

SEQ ID NO: 4461395 - DNA, 25 bp, Homo sapien
ctgcagcccttcaccctgcttcagc

SEQ ID NO: 4461396 - DNA, 25 bp, Homo sapien
tctcttagagaagatctcgttttca

SEQ ID NO: 4461397 - DNA, 25 bp, Homo sapien
ttcttgtttgatggtgtggtattta

SEQ ID NO: 4461398 - DNA, 25 bp, Homo sapien
ttctgaatgagacccggctgctgtt

SEQ ID NO: 4461399 - DNA, 25 bp, Homo sapien
tgagacccggctgctgtttacataa

SEQ ID NO: 4461400 - DNA, 25 bp, Homo sapien
tcttagactgatctggggcaacgtt

SEQ ID NO: 4461401 - DNA, 25 bp, Homo sapien
gggcaacgttgtgtgaagtgtggta

SEQ ID NO: 4461402 - DNA, 25 bp, Homo sapien
gatttcttagactgatctggggcaa

SEQ ID NO: 4461403 - DNA, 25 bp, Homo sapien
tgtgtgaagtgtggtagaactcttc

SEQ ID NO: 4461404 - DNA, 25 bp, Homo sapien
gaataggctcccgttgcattagtct

SEQ ID NO: 4461405 - DNA, 25 bp, Homo sapien
ggctcccgttgcattagtctctgaa

SEQ ID NO: 4461406 - DNA, 25 bp, Homo sapien
aagccacgagttccccaaagaatag

SEQ ID NO: 4461407 - DNA, 25 bp, Homo sapien
tccccaaagaataggctcccgttgc

SEQ ID NO: 4461408 - DNA, 25 bp, Homo sapien
tccttcttgtttgctgaacaaacac

SEQ ID NO: 4461409 - DNA, 25 bp, Homo sapien
gcttccttcttgtttgctgaacaaa

SEQ ID NO: 4461410 - DNA, 25 bp, Homo sapien
cttcttgtttgctgaacaaacactc

SEQ ID NO: 4461411 - DNA, 25 bp, Homo sapien
ctgcttccttcttgtttgctgaaca

SEQ ID NO: 4461412 - DNA, 25 bp, Homo sapien
aatatatgtgtgcaacgggaacgga

SEQ ID NO: 4461413 - DNA, 25 bp, Homo sapien
tatatgtgtgcaacgggaacggagc

SEQ ID NO: 4461414 - DNA, 25 bp, Homo sapien
acgggaacggagccatacttcacct

SEQ ID NO: 4461415 - DNA, 25 bp, Homo sapien
gtaatatatgtgtgcaacgggaacg

SEQ ID NO: 4461416 - DNA, 25 bp, Homo sapien
gactcccctgggaatccaacggatg

SEQ ID NO: 4461417 - DNA, 25 bp, Homo sapien
tgccaagtggactcccctgggaatc

SEQ ID NO: 4461418 - DNA, 25 bp, Homo sapien
tcctccacccttccgggttgcacag

SEQ ID NO: 4461419 - DNA, 25 bp, Homo sapien
tcccctgggaatccaacggatgaca

SEQ ID NO: 4461420 - DNA, 25 bp, Homo sapien
gaatccagcaacgtgtgtctgaaag

SEQ ID NO: 4461421 - DNA, 25 bp, Homo sapien
aaacatttgttgaatccagcaacgt

SEQ ID NO: 4461422 - DNA, 25 bp, Homo sapien
gaacatactcttattctcttgcctt

SEQ ID NO: 4461423 - DNA, 25 bp, Homo sapien
agtttcagaacatactcttattctc

SEQ ID NO: 4461424 - DNA, 25 bp, Homo sapien
aacagacgaagcaagtaaccatcgg

SEQ ID NO: 4461425 - DNA, 25 bp, Homo sapien
aggtcttccgtatctgatttttgcg

SEQ ID NO: 4461426 - DNA, 25 bp, Homo sapien
cagacgaagcaagtaaccatcggta

SEQ ID NO: 4461427 - DNA, 25 bp, Homo sapien
cgtatctgatttttgcgttttttag

SEQ ID NO: 4461428 - DNA, 25 bp, Homo sapien
ttccatcatcttcttccggatttgg

SEQ ID NO: 4461429 - DNA, 25 bp, Homo sapien
tcggatcatgatttccatcatcttc

SEQ ID NO: 4461430 - DNA, 25 bp, Homo sapien
catcatcttcttccggatttggcgg

SEQ ID NO: 4461431 - DNA, 25 bp, Homo sapien
ctcggatcatgatttccatcatctt

SEQ ID NO: 4461432 - DNA, 25 bp, Homo sapien
tcgttcaactttagcacctgtctcg

SEQ ID NO: 4461433 - DNA, 25 bp, Homo sapien
agctcgttcaactttagcacctgtc

SEQ ID NO: 4461434 - DNA, 25 bp, Homo sapien
gcacctgtctcgtccccagtggctt

SEQ ID NO: 4461435 - DNA, 25 bp, Homo sapien
tcagctcgttcaactttagcacctg

SEQ ID NO: 4461436 - DNA, 25 bp, Homo sapien
cccagtgattgtgagggagcctgca

SEQ ID NO: 4461437 - DNA, 25 bp, Homo sapien
cagtttacctatgcaggtgtccagg

SEQ ID NO: 4461438 - DNA, 25 bp, Homo sapien
gaaactgacattgaatccctagctg

SEQ ID NO: 4461439 - DNA, 25 bp, Homo sapien
taaataccagaggagtagggcactt

SEQ ID NO: 4461440 - DNA, 25 bp, Homo sapien
tgtgattgtcacaatccagtactgt

SEQ ID NO: 4461441 - DNA, 25 bp, Homo sapien
gataatccttgtcgatttagtgtga

SEQ ID NO: 4461442 - DNA, 25 bp, Homo sapien
tttaatgactgataatccttgtcga

SEQ ID NO: 4461443 - DNA, 25 bp, Homo sapien
ccttgtcgatttagtgtgattgtca

SEQ ID NO: 4461444 - DNA, 25 bp, Homo sapien
tcccaaagacctgatgcccctaact

SEQ ID NO: 4461445 - DNA, 25 bp, Homo sapien
ctcaaattcatcccaaagacctgat

SEQ ID NO: 4461446 - DNA, 25 bp, Homo sapien
cccaaagacctgatgcccctaactt

SEQ ID NO: 4461447 - DNA, 25 bp, Homo sapien
aattcatcccaaagacctgatgccc

SEQ ID NO: 4461448 - DNA, 25 bp, Homo sapien
gcacctgaaagcccgaggtgcaggt

SEQ ID NO: 4461449 - DNA, 25 bp, Homo sapien
cgcacctgaaagcccgaggtgcagg

SEQ ID NO: 4461450 - DNA, 25 bp, Homo sapien
cagtgtggtgcctctgttcatgcct

SEQ ID NO: 4461451 - DNA, 25 bp, Homo sapien
tgtaaccttgtaaaccacaccggca

SEQ ID NO: 4461452 - DNA, 25 bp, Homo sapien
agcatcaaaaagttcagctactggg

SEQ ID NO: 4461453 - DNA, 25 bp, Homo sapien
ggcaaagaacatcaacacctttggg

SEQ ID NO: 4461454 - DNA, 25 bp, Homo sapien
tctctccgggatcatgttttccttt

SEQ ID NO: 4461455 - DNA, 25 bp, Homo sapien
tggattcctaatttctggtgtgtaa

SEQ ID NO: 4461456 - DNA, 25 bp, Homo sapien
tcaccctggctggacctgtcttttg

SEQ ID NO: 4461457 - DNA, 25 bp, Homo sapien
tgggcttgaccgtcatcaccctggc

SEQ ID NO: 4461458 - DNA, 25 bp, Homo sapien
ggcacagtctcggctactgcaagct

SEQ ID NO: 4461459 - DNA, 25 bp, Homo sapien
caagtagctaggactctgggactac

SEQ ID NO: 4461460 - DNA, 25 bp, Homo sapien
aagtagctaggactctgggactaca

SEQ ID NO: 4461461 - DNA, 25 bp, Homo sapien
gtggcacagtctcggctactgcaag

SEQ ID NO: 4461462 - DNA, 25 bp, Homo sapien
cattgtcctggatccctttcgtagt

SEQ ID NO: 4461463 - DNA, 25 bp, Homo sapien
ggaggcctgaagcacctttacatcc

SEQ ID NO: 4461464 - DNA, 25 bp, Homo sapien
actgtgtatgtgcaccatgttggct

SEQ ID NO: 4461465 - DNA, 25 bp, Homo sapien
tggacagagcacaaaacacccactg

SEQ ID NO: 4461466 - DNA, 25 bp, Homo sapien
tatataacattctttcctcacaagt

SEQ ID NO: 4461467 - DNA, 25 bp, Homo sapien
ctttcctcacaagttgcacttccgc

SEQ ID NO: 4461468 - DNA, 25 bp, Homo sapien
gagcagcacagacgtatataacatt

SEQ ID NO: 4461469 - DNA, 25 bp, Homo sapien
cacttccgctttctacatcctcctt

SEQ ID NO: 4461470 - DNA, 25 bp, Homo sapien
aggaaatgccatctcgggcggcaga

SEQ ID NO: 4461471 - DNA, 25 bp, Homo sapien
ggggaacatcagaatgaccagtgct

SEQ ID NO: 4461472 - DNA, 25 bp, Homo sapien
gaacatcagaatgaccagtgctggg

SEQ ID NO: 4461473 - DNA, 25 bp, Homo sapien
caggaaatgccatctcgggcggcag

SEQ ID NO: 4461474 - DNA, 25 bp, Homo sapien
ttccaacagtaatggtctctgcaaa

SEQ ID NO: 4461475 - DNA, 25 bp, Homo sapien
caaaggttagaactcccttgtattg

SEQ ID NO: 4461476 - DNA, 25 bp, Homo sapien
tttctttaatctcaggggagccttc

SEQ ID NO: 4461477 - DNA, 25 bp, Homo sapien
gggagccttcattaaattggaaaca

SEQ ID NO: 4461478 - DNA, 25 bp, Homo sapien
gcttggcacaggaggcatagttaga

SEQ ID NO: 4461479 - DNA, 25 bp, Homo sapien
gacatgaaggcaagctcctgccgtg

SEQ ID NO: 4461480 - DNA, 25 bp, Homo sapien
cctgccgtgttaagggccgatgcct

SEQ ID NO: 4461481 - DNA, 25 bp, Homo sapien
cctttttcactgtgggagtgtttga

SEQ ID NO: 4461482 - DNA, 25 bp, Homo sapien
cacctgtgtggccaaacttggttgt

SEQ ID NO: 4461483 - DNA, 25 bp, Homo sapien
taggttgtatgttatctccagcaaa

SEQ ID NO: 4461484 - DNA, 25 bp, Homo sapien
gaaagacgtgtaataacaaggactg

SEQ ID NO: 4461485 - DNA, 25 bp, Homo sapien
ttaaacatgccagccatgaggatgt

SEQ ID NO: 4461486 - DNA, 25 bp, Homo sapien
cagagagcatcctccggtttgaaat

SEQ ID NO: 4461487 - DNA, 25 bp, Homo sapien
cctgggcgttgtgttaggatcagca

SEQ ID NO: 4461488 - DNA, 25 bp, Homo sapien
tttatgctcaaggtctcagagggcc

SEQ ID NO: 4461489 - DNA, 25 bp, Homo sapien
aaataatgatgattagccgtctggc

SEQ ID NO: 4461490 - DNA, 25 bp, Homo sapien
tcttgatactgcaactactgctgtg

SEQ ID NO: 4461491 - DNA, 25 bp, Homo sapien
tgatactgcaactactgctgtgtcc

SEQ ID NO: 4461492 - DNA, 25 bp, Homo sapien
tagcttcttgatactgcaactactg

SEQ ID NO: 4461493 - DNA, 25 bp, Homo sapien
tcagtagcttcttgatactgcaact

SEQ ID NO: 4461494 - DNA, 25 bp, Homo sapien
agcttcccaggagcgttataaatcc

SEQ ID NO: 4461495 - DNA, 25 bp, Homo sapien
gcgctcggtaacctgctcacgtgga

SEQ ID NO: 4461496 - DNA, 25 bp, Homo sapien
ctagcagcaggaagcgtaatacagt

SEQ ID NO: 4461497 - DNA, 25 bp, Homo sapien
caggaagcgtaatacagtggtcagc

SEQ ID NO: 4461498 - DNA, 25 bp, Homo sapien
atttggaattcttggtggcaagttc

SEQ ID NO: 4461499 - DNA, 25 bp, Homo sapien
aattcttggtggcaagttctgccat

SEQ ID NO: 4461500 - DNA, 25 bp, Homo sapien
ggaattcttggtggcaagttctgcc

SEQ ID NO: 4461501 - DNA, 25 bp, Homo sapien
ccatttggaattcttggtggcaagt

SEQ ID NO: 4461502 - DNA, 25 bp, Homo sapien
cttgatggtgtcttaacaatctctg

SEQ ID NO: 4461503 - DNA, 25 bp, Homo sapien
tcactcttccacgaaggactccaat

SEQ ID NO: 4461504 - DNA, 25 bp, Homo sapien
cacacctttcgttttgggctctagg

SEQ ID NO: 4461505 - DNA, 25 bp, Homo sapien
ttggcacacctttcgttttgggctc

SEQ ID NO: 4461506 - DNA, 25 bp, Homo sapien
ctcttccacgaaggactccaataaa

SEQ ID NO: 4461507 - DNA, 25 bp, Homo sapien
gtaatccattccttcacaacatgaa

SEQ ID NO: 4461508 - DNA, 25 bp, Homo sapien
tggtaccaagtagcaaatgctctgg

SEQ ID NO: 4461509 - DNA, 25 bp, Homo sapien
gtcttcattcttggaactgtacaaa

SEQ ID NO: 4461510 - DNA, 25 bp, Homo sapien
gagatgtcattagtaatccattcct

SEQ ID NO: 4461511 - DNA, 25 bp, Homo sapien
ttctgtgacatttctctgcaaaggg

SEQ ID NO: 4461512 - DNA, 25 bp, Homo sapien
atttctctgcaaaggggccaggatg

SEQ ID NO: 4461513 - DNA, 25 bp, Homo sapien
ctatgccttagcttctgtgacattt

SEQ ID NO: 4461514 - DNA, 25 bp, Homo sapien
gacatttctctgcaaaggggccagg

SEQ ID NO: 4461515 - DNA, 25 bp, Homo sapien
gagcattcagacttataaaatcctt

SEQ ID NO: 4461516 - DNA, 25 bp, Homo sapien
ttctagattcaatgtagcctgatgt

SEQ ID NO: 4461517 - DNA, 25 bp, Homo sapien
taaaatccttgaatgagtcccctca

SEQ ID NO: 4461518 - DNA, 25 bp, Homo sapien
tagattcaatgtagcctgatgtcct

SEQ ID NO: 4461519 - DNA, 25 bp, Homo sapien
aaaattgttgctccatttcattatt

SEQ ID NO: 4461520 - DNA, 25 bp, Homo sapien
ggctcctgcaaggattcccacatgc

SEQ ID NO: 4461521 - DNA, 25 bp, Homo sapien
catttcattattaccagggctcctg

SEQ ID NO: 4461522 - DNA, 25 bp, Homo sapien
tctttctacaaaattgttgctccat

SEQ ID NO: 4461523 - DNA, 25 bp, Homo sapien
tgaggccagcaattgtgtcgccaac

SEQ ID NO: 4461524 - DNA, 25 bp, Homo sapien
tcagggaacgttgatcactcctttc

SEQ ID NO: 4461525 - DNA, 25 bp, Homo sapien
tcccacttgctgaccctcgtataat

SEQ ID NO: 4461526 - DNA, 25 bp, Homo sapien
tgcattgcagttcagggaacgttga

SEQ ID NO: 4461527 - DNA, 25 bp, Homo sapien
tagaagatgaaattatctccaacat

SEQ ID NO: 4461528 - DNA, 25 bp, Homo sapien
tacagttactctagaagatgaaatt

SEQ ID NO: 4461529 - DNA, 25 bp, Homo sapien
tactctagaagatgaaattatctcc

SEQ ID NO: 4461530 - DNA, 25 bp, Homo sapien
ttatttacagttactctagaagatg

SEQ ID NO: 4461531 - DNA, 25 bp, Homo sapien
acttatcagggcttctagagtctgc

SEQ ID NO: 4461532 - DNA, 25 bp, Homo sapien
tttctgtccaaggaattgagtcgtc

SEQ ID NO: 4461533 - DNA, 25 bp, Homo sapien
tctggtgggcactatatattgcttt

SEQ ID NO: 4461534 - DNA, 25 bp, Homo sapien
tagagtctgcgagtcttccgatgaa

SEQ ID NO: 4461535 - DNA, 25 bp, Homo sapien
tgagcaactcgaattgatcccttac

SEQ ID NO: 4461536 - DNA, 25 bp, Homo sapien
gcatgagcaactcgaattgatccct

SEQ ID NO: 4461537 - DNA, 25 bp, Homo sapien
cagcatgagcaactcgaattgatcc

SEQ ID NO: 4461538 - DNA, 25 bp, Homo sapien
catgagcaactcgaattgatccctt

SEQ ID NO: 4461539 - DNA, 25 bp, Homo sapien
ccaggagtgaggaccactgggcgag

SEQ ID NO: 4461540 - DNA, 25 bp, Homo sapien
taaataagaaagtgtcactggctcc

SEQ ID NO: 4461541 - DNA, 25 bp, Homo sapien
aaataaataagaaagtgtcactggc

SEQ ID NO: 4461542 - DNA, 25 bp, Homo sapien
gaccactgggcgaggagcgatttgc

SEQ ID NO: 4461543 - DNA, 25 bp, Homo sapien
tgcctcttccggctggcctggaaat

SEQ ID NO: 4461544 - DNA, 25 bp, Homo sapien
gcagcctgttcgctttctgcctctt

SEQ ID NO: 4461545 - DNA, 25 bp, Homo sapien
gcctcttccggctggcctggaaatc

SEQ ID NO: 4461546 - DNA, 25 bp, Homo sapien
ctctgagcagcctgttcgctttctg

SEQ ID NO: 4461547 - DNA, 25 bp, Homo sapien
caagaaagggagaatgcgcccagga

SEQ ID NO: 4461548 - DNA, 25 bp, Homo sapien
gcagttttgaagaccgcagcgcttc

SEQ ID NO: 4461549 - DNA, 25 bp, Homo sapien
cattttcgggatccaagcgtcctcc

SEQ ID NO: 4461550 - DNA, 25 bp, Homo sapien
aagtgtgagcgacttctctcgggtc

SEQ ID NO: 4461551 - DNA, 25 bp, Homo sapien
tagcggtaggctacatcaggtggtt

SEQ ID NO: 4461552 - DNA, 25 bp, Homo sapien
ctccgcggcgtagcggtaggctaca

SEQ ID NO: 4461553 - DNA, 25 bp, Homo sapien
ctacatcaggtggttggcgagtggg

SEQ ID NO: 4461554 - DNA, 25 bp, Homo sapien
cgcggcgtagcggtaggctacatca

SEQ ID NO: 4461555 - DNA, 25 bp, Homo sapien
ggcattcccagtagcgcaaactttc

SEQ ID NO: 4461556 - DNA, 25 bp, Homo sapien
tccgggattggcagggcattttctt

SEQ ID NO: 4461557 - DNA, 25 bp, Homo sapien
tgctcagctggcctaaccaaaataa

SEQ ID NO: 4461558 - DNA, 25 bp, Homo sapien
caaactttccgggattggcagggca

SEQ ID NO: 4461559 - DNA, 25 bp, Homo sapien
ccgactgagtctggcgggaaatcaa

SEQ ID NO: 4461560 - DNA, 25 bp, Homo sapien
tttggagtttgagcccgctcttcca

SEQ ID NO: 4461561 - DNA, 25 bp, Homo sapien
gactctcccacgactgcctttggag

SEQ ID NO: 4461562 - DNA, 25 bp, Homo sapien
gggaaacgtatccgctacgactctc

SEQ ID NO: 4461563 - DNA, 25 bp, Homo sapien
gcgctaacgcatcgcgcctctttgt

SEQ ID NO: 4461564 - DNA, 25 bp, Homo sapien
cccagtgctgcgctcgctctgggaa

SEQ ID NO: 4461565 - DNA, 25 bp, Homo sapien
gctctgggaacccgcgctaacgcat

SEQ ID NO: 4461566 - DNA, 25 bp, Homo sapien
catcgcgcctctttgtcccatcagt

SEQ ID NO: 4461567 - DNA, 25 bp, Homo sapien
caccgaccacctttctgcttggaga

SEQ ID NO: 4461568 - DNA, 25 bp, Homo sapien
tcgcaatagcctcttttcccacaag

SEQ ID NO: 4461569 - DNA, 25 bp, Homo sapien
gctggaccacacacggctacagatt

SEQ ID NO: 4461570 - DNA, 25 bp, Homo sapien
cataaatccacaattcgcttcagtg

SEQ ID NO: 4461571 - DNA, 25 bp, Homo sapien
tgtagataggagtgaaagctctgct

SEQ ID NO: 4461572 - DNA, 25 bp, Homo sapien
ctggaattgggatgtagataggagt

SEQ ID NO: 4461573 - DNA, 25 bp, Homo sapien
aagctctgctccgttcccccagtga

SEQ ID NO: 4461574 - DNA, 25 bp, Homo sapien
aattgggatgtagataggagtgaaa

SEQ ID NO: 4461575 - DNA, 25 bp, Homo sapien
tgtggaagggtaccagcatagactc

SEQ ID NO: 4461576 - DNA, 25 bp, Homo sapien
ggccagattcggatcgaaggtcctg

SEQ ID NO: 4461577 - DNA, 25 bp, Homo sapien
caaaacagttactgtgggcaaggca

SEQ ID NO: 4461578 - DNA, 25 bp, Homo sapien
tacagctggcctcggtacaaaacag

SEQ ID NO: 4461579 - DNA, 25 bp, Homo sapien
cttcaggtcataacgaggtgcggcg

SEQ ID NO: 4461580 - DNA, 25 bp, Homo sapien
caggtcataacgaggtgcggcgttt

SEQ ID NO: 4461581 - DNA, 25 bp, Homo sapien
ctactcgcgcttcaggtcataacga

SEQ ID NO: 4461582 - DNA, 25 bp, Homo sapien
cgcgcttcaggtcataacgaggtgc

SEQ ID NO: 4461583 - DNA, 25 bp, Homo sapien
cagctttgtatagttagtgtgtagc

SEQ ID NO: 4461584 - DNA, 25 bp, Homo sapien
tgactttcctatgcagctgcttcag

SEQ ID NO: 4461585 - DNA, 25 bp, Homo sapien
tcaaaatgtgattggacatccccat

SEQ ID NO: 4461586 - DNA, 25 bp, Homo sapien
cggagagttaggtcgaaatttgact

SEQ ID NO: 4461587 - DNA, 25 bp, Homo sapien
ccatctgatagttttaagcggtgac

SEQ ID NO: 4461588 - DNA, 25 bp, Homo sapien
tccgcgtctccgctgagctaggtgg

SEQ ID NO: 4461589 - DNA, 25 bp, Homo sapien
tagcggcgcttcattaatgtgccac

SEQ ID NO: 4461590 - DNA, 25 bp, Homo sapien
ggtgacaggagcagaaaagacccct

SEQ ID NO: 4461591 - DNA, 25 bp, Homo sapien
cggtccgcgacgctcctggagcgtc

SEQ ID NO: 4461592 - DNA, 25 bp, Homo sapien
cggcgcgaacctgggctcttgagct

SEQ ID NO: 4461593 - DNA, 25 bp, Homo sapien
tcgacgcgcactccgcgcgcagcgt

SEQ ID NO: 4461594 - DNA, 25 bp, Homo sapien
cgcagcgtccgggtccggttggact

SEQ ID NO: 4461595 - DNA, 25 bp, Homo sapien
gcgccgcttctctctcggcgcgcac

SEQ ID NO: 4461596 - DNA, 25 bp, Homo sapien
gttgcttcaagttgcgcgtccgcat

SEQ ID NO: 4461597 - DNA, 25 bp, Homo sapien
ttcaagttgcgcgtccgcatccggg

SEQ ID NO: 4461598 - DNA, 25 bp, Homo sapien
caagttgcgcgtccgcatccgggag

SEQ ID NO: 4461599 - DNA, 25 bp, Homo sapien
cttaaagttgcttcaagttgcgcgt

SEQ ID NO: 4461600 - DNA, 25 bp, Homo sapien
atgcacagagacaccggcggggtca

SEQ ID NO: 4461601 - DNA, 25 bp, Homo sapien
taatagggaaaggtagcatggatgc

SEQ ID NO: 4461602 - DNA, 25 bp, Homo sapien
ggactctttcgccagcaactttgcg

SEQ ID NO: 4461603 - DNA, 25 bp, Homo sapien
gccagaccgagtaacagacttcggg

SEQ ID NO: 4461604 - DNA, 25 bp, Homo sapien
cgcgcgggccggcggactgctcgga

SEQ ID NO: 4461605 - DNA, 25 bp, Homo sapien
gcgcgggccggcggactgctcggat

SEQ ID NO: 4461606 - DNA, 25 bp, Homo sapien
cttcttgctctgggtccgcgcgggc

SEQ ID NO: 4461607 - DNA, 25 bp, Homo sapien
gcatcttctcgggagagctctggat

SEQ ID NO: 4461608 - DNA, 25 bp, Homo sapien
tattcccgcgcgatgatgttctcga

SEQ ID NO: 4461609 - DNA, 25 bp, Homo sapien
tggtcggacttaagcaccttgaagc

SEQ ID NO: 4461610 - DNA, 25 bp, Homo sapien
agcgctgcgtgttctccctgtagta

SEQ ID NO: 4461611 - DNA, 25 bp, Homo sapien
ccgcgtggcacagcggcttcaacgg

SEQ ID NO: 4461612 - DNA, 25 bp, Homo sapien
tcagtgcaccgccaccgagtgcaag

SEQ ID NO: 4461613 - DNA, 25 bp, Homo sapien
cgagggcggcgagttcgagagcaag

SEQ ID NO: 4461614 - DNA, 25 bp, Homo sapien
gcttcaacggcacgccgtaggcgct

SEQ ID NO: 4461615 - DNA, 25 bp, Homo sapien
gacgagcgtcgctttctcagcttgg

SEQ ID NO: 4461616 - DNA, 25 bp, Homo sapien
tccaagacgtaaagagatccggccc

SEQ ID NO: 4461617 - DNA, 25 bp, Homo sapien
tccgcctagcaagacagattcaagt

SEQ ID NO: 4461618 - DNA, 25 bp, Homo sapien
gaagacgcgcttttctcggcgaaga

SEQ ID NO: 4461619 - DNA, 25 bp, Homo sapien
gagctaaatctacatcggtggccca

SEQ ID NO: 4461620 - DNA, 25 bp, Homo sapien
tttgtctcccagtaaaaaggagcta

SEQ ID NO: 4461621 - DNA, 25 bp, Homo sapien
tagtccccgagtcagcaatgtgttt

SEQ ID NO: 4461622 - DNA, 25 bp, Homo sapien
gatgcctgctgcatcttgcactgta

SEQ ID NO: 4461623 - DNA, 25 bp, Homo sapien
gagatattgctggataatgcactct

SEQ ID NO: 4461624 - DNA, 25 bp, Homo sapien
gacagttgccgtgaatatctcattt

SEQ ID NO: 4461625 - DNA, 25 bp, Homo sapien
aaatttccagatgagtaaccaaaca

SEQ ID NO: 4461626 - DNA, 25 bp, Homo sapien
aaatagatgagacagttgccgtgaa

SEQ ID NO: 4461627 - DNA, 25 bp, Homo sapien
tggaaggttccgatgggctttctga

SEQ ID NO: 4461628 - DNA, 25 bp, Homo sapien
gcagttatccattggcatcaggtcc

SEQ ID NO: 4461629 - DNA, 25 bp, Homo sapien
cagttatctctgcttgcaaaggaag

SEQ ID NO: 4461630 - DNA, 25 bp, Homo sapien
gctttctgaccctaagtcgactttg

SEQ ID NO: 4461631 - DNA, 25 bp, Homo sapien
tgttctttaggagccaactcctcca

SEQ ID NO: 4461632 - DNA, 25 bp, Homo sapien
gttctttaggagccaactcctccat

SEQ ID NO: 4461633 - DNA, 25 bp, Homo sapien
gtgttctttaggagccaactcctcc

SEQ ID NO: 4461634 - DNA, 25 bp, Homo sapien
ccagcacaacatggcaagaaccatc

SEQ ID NO: 4461635 - DNA, 25 bp, Homo sapien
cgagtccagccagcacaacatggca

SEQ ID NO: 4461636 - DNA, 25 bp, Homo sapien
gcagaaggatcatctgagtccgcag

SEQ ID NO: 4461637 - DNA, 25 bp, Homo sapien
catctgagtccgcaggaggattgct

SEQ ID NO: 4461638 - DNA, 25 bp, Homo sapien
tatgctgtgacttaccatctggcct

SEQ ID NO: 4461639 - DNA, 25 bp, Homo sapien
caggctgtctacacacagagtgtct

SEQ ID NO: 4461640 - DNA, 25 bp, Homo sapien
tcccaggtggcgtttctgctccagg

SEQ ID NO: 4461641 - DNA, 25 bp, Homo sapien
tgtcctctgcaggagcatatgctgt

SEQ ID NO: 4461642 - DNA, 25 bp, Homo sapien
ctcagaaatgacgtgtatttcacac

SEQ ID NO: 4461643 - DNA, 25 bp, Homo sapien
tagagggcatatctcaagtatcaag

SEQ ID NO: 4461644 - DNA, 25 bp, Homo sapien
ctttctggccctgataaattcctca

SEQ ID NO: 4461645 - DNA, 25 bp, Homo sapien
gcagagagtgtcagtcctttctggc

SEQ ID NO: 4461646 - DNA, 25 bp, Homo sapien
aacacggtggttttgcacaggatgg

SEQ ID NO: 4461647 - DNA, 25 bp, Homo sapien
ttgtctgggcggctcaaacatccaa

SEQ ID NO: 4461648 - DNA, 25 bp, Homo sapien
ccttgaccgtcataggaaaatttga

SEQ ID NO: 4461649 - DNA, 25 bp, Homo sapien
aacatccaaccggagaaggtctgag

SEQ ID NO: 4461650 - DNA, 25 bp, Homo sapien
gccttgggcaggacaagacagctga

SEQ ID NO: 4461651 - DNA, 25 bp, Homo sapien
gagccactgtgaatgcactgcagag

SEQ ID NO: 4461652 - DNA, 25 bp, Homo sapien
tgtgaatgcactgcagaggctctcc

SEQ ID NO: 4461653 - DNA, 25 bp, Homo sapien
gctgaatgatatccatctgagccac

SEQ ID NO: 4461654 - DNA, 25 bp, Homo sapien
tgcatccaatcttaggttttggcaa

SEQ ID NO: 4461655 - DNA, 25 bp, Homo sapien
aggcagaatgcaaaggtccaaaaat

SEQ ID NO: 4461656 - DNA, 25 bp, Homo sapien
ggcagaatgcaaaggtccaaaaata

SEQ ID NO: 4461657 - DNA, 25 bp, Homo sapien
aaaaatatcttgcatccaatcttag

SEQ ID NO: 4461658 - DNA, 25 bp, Homo sapien
ttgtcaggttgatcccaactgcctc

SEQ ID NO: 4461659 - DNA, 25 bp, Homo sapien
tatttggcgtgatactcccacagcc

SEQ ID NO: 4461660 - DNA, 25 bp, Homo sapien
ttctgcaactatgcctgcaagctcc

SEQ ID NO: 4461661 - DNA, 25 bp, Homo sapien
gcaagctcctttgacaatatacgag

SEQ ID NO: 4461662 - DNA, 25 bp, Homo sapien
gaaaccagcagagcgttgcagggca

SEQ ID NO: 4461663 - DNA, 25 bp, Homo sapien
cactcgggaaggattaatggccagc

SEQ ID NO: 4461664 - DNA, 25 bp, Homo sapien
aagagcttgaatgaaaccagcagag

SEQ ID NO: 4461665 - DNA, 25 bp, Homo sapien
cattgtcagtgcgaagagagtttta

SEQ ID NO: 4461666 - DNA, 25 bp, Homo sapien
tcaacaagatggttaggtgcaaaca

SEQ ID NO: 4461667 - DNA, 25 bp, Homo sapien
caacaagatggttaggtgcaaacat

SEQ ID NO: 4461668 - DNA, 25 bp, Homo sapien
gctgtggccacggaacctgtcacaa

SEQ ID NO: 4461669 - DNA, 25 bp, Homo sapien
gattttgaagtgcaaacatcttttc

SEQ ID NO: 4461670 - DNA, 25 bp, Homo sapien
tcttcatcgggaactgaattaagtt

SEQ ID NO: 4461671 - DNA, 25 bp, Homo sapien
aatatcatcagagggtgttgatctc

SEQ ID NO: 4461672 - DNA, 25 bp, Homo sapien
ctcagtgcaagcctcgtcataactt

SEQ ID NO: 4461673 - DNA, 25 bp, Homo sapien
cctcgtcataacttgctggcttgtt

SEQ ID NO: 4461674 - DNA, 25 bp, Homo sapien
tgcaagcctcgtcataacttgctgg

SEQ ID NO: 4461675 - DNA, 25 bp, Homo sapien
tgtggatcctggtccacaagagatg

SEQ ID NO: 4461676 - DNA, 25 bp, Homo sapien
gtcttccctgatgcctgacctctcc

SEQ ID NO: 4461677 - DNA, 25 bp, Homo sapien
aggtggcttctgctgaagaccatac

SEQ ID NO: 4461678 - DNA, 25 bp, Homo sapien
aatgttaatgaaggtaagagattca

SEQ ID NO: 4461679 - DNA, 25 bp, Homo sapien
taatgaaggtaagagattcaaattc

SEQ ID NO: 4461680 - DNA, 25 bp, Homo sapien
gttaatgaaggtaagagattcaaat

SEQ ID NO: 4461681 - DNA, 25 bp, Homo sapien
tgttaatgaaggtaagagattcaaa

SEQ ID NO: 4461682 - DNA, 25 bp, Homo sapien
gggcacgagaatggcctctctcgac

SEQ ID NO: 4461683 - DNA, 25 bp, Homo sapien
tagctttcactaatggtaggtcttg

SEQ ID NO: 4461684 - DNA, 25 bp, Homo sapien
acagggctcccttcacgcttctttc

SEQ ID NO: 4461685 - DNA, 25 bp, Homo sapien
tgtacaatgtccacggacagcctgg

SEQ ID NO: 4461686 - DNA, 25 bp, Homo sapien
tcttagcacatctcgatgatgaagg

SEQ ID NO: 4461687 - DNA, 25 bp, Homo sapien
acttcttagagtgggcgagaggttc

SEQ ID NO: 4461688 - DNA, 25 bp, Homo sapien
tgggcgagaggttccttgcatatac

SEQ ID NO: 4461689 - DNA, 25 bp, Homo sapien
aggtttttcaggctcaaagatctcc

SEQ ID NO: 4461690 - DNA, 25 bp, Homo sapien
atgctgatgggtgccgtccgccagt

SEQ ID NO: 4461691 - DNA, 25 bp, Homo sapien
tggagtctcataccggctatcaggc

SEQ ID NO: 4461692 - DNA, 25 bp, Homo sapien
ccccatccttcatgtgagtcagtaa

SEQ ID NO: 4461693 - DNA, 25 bp, Homo sapien
ttcatgtgagtcagtaattctgtca

SEQ ID NO: 4461694 - DNA, 25 bp, Homo sapien
tatataggacaataagatcctaagc

SEQ ID NO: 4461695 - DNA, 25 bp, Homo sapien
tataggacaataagatcctaagctg

SEQ ID NO: 4461696 - DNA, 25 bp, Homo sapien
atatataggacaataagatcctaag

SEQ ID NO: 4461697 - DNA, 25 bp, Homo sapien
ataggacaataagatcctaagctgc

SEQ ID NO: 4461698 - DNA, 25 bp, Homo sapien
tgagctgccgaatacccaaatcctg

SEQ ID NO: 4461699 - DNA, 25 bp, Homo sapien
tagcagcggcaccactgttcagtca

SEQ ID NO: 4461700 - DNA, 25 bp, Homo sapien
tcaccacctgtttggcgagctcatg

SEQ ID NO: 4461701 - DNA, 25 bp, Homo sapien
catcagcctgcctttgcttgacaaa

SEQ ID NO: 4461702 - DNA, 25 bp, Homo sapien
cttcctgtgactggcccttcatctc

SEQ ID NO: 4461703 - DNA, 25 bp, Homo sapien
gtgtggttcataccccttcctgtga

SEQ ID NO: 4461704 - DNA, 25 bp, Homo sapien
atgactcctcctttgacgatgtgag

SEQ ID NO: 4461705 - DNA, 25 bp, Homo sapien
cttgaaagttaattttgaatcttct

SEQ ID NO: 4461706 - DNA, 25 bp, Homo sapien
tatattttttacgggttctgagtga

SEQ ID NO: 4461707 - DNA, 25 bp, Homo sapien
tcttgagggattttagacttatcca

SEQ ID NO: 4461708 - DNA, 25 bp, Homo sapien
gggttctgagtgaattggtcctgtc

SEQ ID NO: 4461709 - DNA, 25 bp, Homo sapien
gattttagacttatccatcatcaca

SEQ ID NO: 4461710 - DNA, 25 bp, Homo sapien
gtccagcacaagtgtgaatttattg

SEQ ID NO: 4461711 - DNA, 25 bp, Homo sapien
gctttgaagtccagcacaagtgtga

SEQ ID NO: 4461712 - DNA, 25 bp, Homo sapien
gaagtccagcacaagtgtgaattta

SEQ ID NO: 4461713 - DNA, 25 bp, Homo sapien
ggcagctttgaagtccagcacaagt

SEQ ID NO: 4461714 - DNA, 25 bp, Homo sapien
tggctctcagctgcgggatgccttc

SEQ ID NO: 4461715 - DNA, 25 bp, Homo sapien
ctgcgggatgccttctgctaccagg

SEQ ID NO: 4461716 - DNA, 25 bp, Homo sapien
tgttgacctggctctcagctgcggg

SEQ ID NO: 4461717 - DNA, 25 bp, Homo sapien
tctcagctgcgggatgccttctgct

SEQ ID NO: 4461718 - DNA, 25 bp, Homo sapien
tccaaaattccactgatcccaattt

SEQ ID NO: 4461719 - DNA, 25 bp, Homo sapien
aaggactcccaagttgtgcaagcgc

SEQ ID NO: 4461720 - DNA, 25 bp, Homo sapien
atttgtacttgggacattttgtcat

SEQ ID NO: 4461721 - DNA, 25 bp, Homo sapien
ccaagttgtgcaagcgctgcatttg

SEQ ID NO: 4461722 - DNA, 25 bp, Homo sapien
gcaagcgctgcatttgtacttggga

SEQ ID NO: 4461723 - DNA, 25 bp, Homo sapien
tgatcgtgagctccagtaggttggg

SEQ ID NO: 4461724 - DNA, 25 bp, Homo sapien
ctgatcgtgagctccagtaggttgg

SEQ ID NO: 4461725 - DNA, 25 bp, Homo sapien
atcgtgagctccagtaggttgggtc

SEQ ID NO: 4461726 - DNA, 25 bp, Homo sapien
cgtgagctccagtaggttgggtcat

SEQ ID NO: 4461727 - DNA, 25 bp, Homo sapien
ttcacaaactctcactaatctggca

SEQ ID NO: 4461728 - DNA, 25 bp, Homo sapien
tgttgaccgcatggacacgcaagtg

SEQ ID NO: 4461729 - DNA, 25 bp, Homo sapien
cactaatctggcaaccaggtggtta

SEQ ID NO: 4461730 - DNA, 25 bp, Homo sapien
ggtggttaatgccagtgttgaccgc

SEQ ID NO: 4461731 - DNA, 25 bp, Homo sapien
tcacaagggtggacaactttgcaga

SEQ ID NO: 4461732 - DNA, 25 bp, Homo sapien
catcatctctaatgtcatccttatc

SEQ ID NO: 4461733 - DNA, 25 bp, Homo sapien
tcatccttatcacaagggtggacaa

SEQ ID NO: 4461734 - DNA, 25 bp, Homo sapien
tccttatcacaagggtggacaactt

SEQ ID NO: 4461735 - DNA, 25 bp, Homo sapien
tcttcaacacattcaggcatctcga

SEQ ID NO: 4461736 - DNA, 25 bp, Homo sapien
tcaggcatctcgaactgtaaaatag

SEQ ID NO: 4461737 - DNA, 25 bp, Homo sapien
tcttgtatcttgtatgtctccttct

SEQ ID NO: 4461738 - DNA, 25 bp, Homo sapien
cacattcaggcatctcgaactgtaa

SEQ ID NO: 4461739 - DNA, 25 bp, Homo sapien
gcaaaatggcatttcgttaactgca

SEQ ID NO: 4461740 - DNA, 25 bp, Homo sapien
gagagaagtagtaacgccagtagca

SEQ ID NO: 4461741 - DNA, 25 bp, Homo sapien
tgcaaaactagatgatggcagaaac

SEQ ID NO: 4461742 - DNA, 25 bp, Homo sapien
tggcagaaaccgttcatcaactggg

SEQ ID NO: 4461743 - DNA, 25 bp, Homo sapien
tgtttgagtcgctacccaagaacgg

SEQ ID NO: 4461744 - DNA, 25 bp, Homo sapien
aagctgagtgtttgagtcgctaccc

SEQ ID NO: 4461745 - DNA, 25 bp, Homo sapien
gctacccaagaacggattcctgagt

SEQ ID NO: 4461746 - DNA, 25 bp, Homo sapien
gagtcgctacccaagaacggattcc

SEQ ID NO: 4461747 - DNA, 25 bp, Homo sapien
agtgatggggcattcccaggatctg

SEQ ID NO: 4461748 - DNA, 25 bp, Homo sapien
tgtttcatttctaaacctgagcccc

SEQ ID NO: 4461749 - DNA, 25 bp, Homo sapien
tcagccgcccactgtggtcagtgat

SEQ ID NO: 4461750 - DNA, 25 bp, Homo sapien
ccaggatctggacactcttgtttca

SEQ ID NO: 4461751 - DNA, 25 bp, Homo sapien
ggtgcagagggctacattcacaggc

SEQ ID NO: 4461752 - DNA, 25 bp, Homo sapien
cagagggctacattcacaggcttgg

SEQ ID NO: 4461753 - DNA, 25 bp, Homo sapien
ttgtgaccggtactgggctagatgc

SEQ ID NO: 4461754 - DNA, 25 bp, Homo sapien
aagaacttggttgtgaccggtactg

SEQ ID NO: 4461755 - DNA, 25 bp, Homo sapien
catgtattaaatcaggagtgagcca

SEQ ID NO: 4461756 - DNA, 25 bp, Homo sapien
gaggccaggtacagacaaacttatc

SEQ ID NO: 4461757 - DNA, 25 bp, Homo sapien
tagtctggagtgaagtgccacaaac

SEQ ID NO: 4461758 - DNA, 25 bp, Homo sapien
gagtgagccagataatccccagcct

SEQ ID NO: 4461759 - DNA, 25 bp, Homo sapien
ccttgcgtcctcaagatctttctgg

SEQ ID NO: 4461760 - DNA, 25 bp, Homo sapien
gaatgccagatgcagatccatccat

SEQ ID NO: 4461761 - DNA, 25 bp, Homo sapien
tctaatctaattagaatgccagatg

SEQ ID NO: 4461762 - DNA, 25 bp, Homo sapien
ttctggtcattattctctaatctaa

SEQ ID NO: 4461763 - DNA, 25 bp, Homo sapien
acacttcttcgatagggtggaagta

SEQ ID NO: 4461764 - DNA, 25 bp, Homo sapien
tgaacacttcttcgatagggtggaa

SEQ ID NO: 4461765 - DNA, 25 bp, Homo sapien
tagggtggaagtaatatgagtaata

SEQ ID NO: 4461766 - DNA, 25 bp, Homo sapien
tctgaacacttcttcgatagggtgg

SEQ ID NO: 4461767 - DNA, 25 bp, Homo sapien
aaatgggttagacacgcagtatggc

SEQ ID NO: 4461768 - DNA, 25 bp, Homo sapien
cacgcagtatggcaaatagagtcac

SEQ ID NO: 4461769 - DNA, 25 bp, Homo sapien
cattcttgctcaaatggaaatgggt

SEQ ID NO: 4461770 - DNA, 25 bp, Homo sapien
gtatggcaaatagagtcactatcca

SEQ ID NO: 4461771 - DNA, 25 bp, Homo sapien
gcttgggtacttgtgagtgccaacc

SEQ ID NO: 4461772 - DNA, 25 bp, Homo sapien
gatcagtggccttttgtgcaaaacc

SEQ ID NO: 4461773 - DNA, 25 bp, Homo sapien
tgagtgccaacctctgacaagtgga

SEQ ID NO: 4461774 - DNA, 25 bp, Homo sapien
tctgagcctgtgataaacaaggaac

SEQ ID NO: 4461775 - DNA, 25 bp, Homo sapien
cattaattgtagaaccttgcaagga

SEQ ID NO: 4461776 - DNA, 25 bp, Homo sapien
taattgtagaaccttgcaaggacat

SEQ ID NO: 4461777 - DNA, 25 bp, Homo sapien
ttaattgtagaaccttgcaaggaca

SEQ ID NO: 4461778 - DNA, 25 bp, Homo sapien
tcattaattgtagaaccttgcaagg

SEQ ID NO: 4461779 - DNA, 25 bp, Homo sapien
tgctgggggtgccttatattcaggc

SEQ ID NO: 4461780 - DNA, 25 bp, Homo sapien
ctgggaccctcagcgttgcttgctg

SEQ ID NO: 4461781 - DNA, 25 bp, Homo sapien
caggcaagatctgcccactgggacc

SEQ ID NO: 4461782 - DNA, 25 bp, Homo sapien
tggagttcaggcaagatctgcccac

SEQ ID NO: 4461783 - DNA, 25 bp, Homo sapien
ttgagggggagcgtcaaccctttgc

SEQ ID NO: 4461784 - DNA, 25 bp, Homo sapien
gcctctgggagcactgtatgcattc

SEQ ID NO: 4461785 - DNA, 25 bp, Homo sapien
ggagcgtcaaccctttgccttcttg

SEQ ID NO: 4461786 - DNA, 25 bp, Homo sapien
agcactgtatgcattcagatctcca

SEQ ID NO: 4461787 - DNA, 25 bp, Homo sapien
tcctgttactaatttctgaagtggc

SEQ ID NO: 4461788 - DNA, 25 bp, Homo sapien
gttagaaatgaattcatggtttctg

SEQ ID NO: 4461789 - DNA, 25 bp, Homo sapien
tggccgaactgacagagattccaca

SEQ ID NO: 4461790 - DNA, 25 bp, Homo sapien
taatttctgaagtggccgaactgac

SEQ ID NO: 4461791 - DNA, 25 bp, Homo sapien
tcaaagtagcatttagtttgaatga

SEQ ID NO: 4461792 - DNA, 25 bp, Homo sapien
cagccaagtaactgaacttcaaagt

SEQ ID NO: 4461793 - DNA, 25 bp, Homo sapien
aatttcagaccatttgcaattatca

SEQ ID NO: 4461794 - DNA, 25 bp, Homo sapien
ctgttttccagccaagtaactgaac

SEQ ID NO: 4461795 - DNA, 25 bp, Homo sapien
cacactgagtttccacgcccttgag

SEQ ID NO: 4461796 - DNA, 25 bp, Homo sapien
acactgagtttccacgcccttgagc

SEQ ID NO: 4461797 - DNA, 25 bp, Homo sapien
gagtttccacgcccttgagcacatg

SEQ ID NO: 4461798 - DNA, 25 bp, Homo sapien
actgagtttccacgcccttgagcac

SEQ ID NO: 4461799 - DNA, 25 bp, Homo sapien
tggggttccatttgctattaagggc

SEQ ID NO: 4461800 - DNA, 25 bp, Homo sapien
tcagcactgagctgtgaaaccagct

SEQ ID NO: 4461801 - DNA, 25 bp, Homo sapien
gaaaccagcttgctggcactctgca

SEQ ID NO: 4461802 - DNA, 25 bp, Homo sapien
tggcactctgcactggggttccatt

SEQ ID NO: 4461803 - DNA, 25 bp, Homo sapien
tctgcaatacagactgtctattttt

SEQ ID NO: 4461804 - DNA, 25 bp, Homo sapien
ctggttttagggttggcatgtgaac

SEQ ID NO: 4461805 - DNA, 25 bp, Homo sapien
tgtgaacatctgcaatacagactgt

SEQ ID NO: 4461806 - DNA, 25 bp, Homo sapien
ttttagggttggcatgtgaacatct

SEQ ID NO: 4461807 - DNA, 25 bp, Homo sapien
gaaatattccctctatgtcccaagc

SEQ ID NO: 4461808 - DNA, 25 bp, Homo sapien
aggtcttagctcacttcttggatgc

SEQ ID NO: 4461809 - DNA, 25 bp, Homo sapien
gctgctactggataaactttgaaca

SEQ ID NO: 4461810 - DNA, 25 bp, Homo sapien
ggcgtccatggtctatgttcatagg

SEQ ID NO: 4461811 - DNA, 25 bp, Homo sapien
ccctggcaataaggatgttgtggct

SEQ ID NO: 4461812 - DNA, 25 bp, Homo sapien
caaggatggtactgagagttgccct

SEQ ID NO: 4461813 - DNA, 25 bp, Homo sapien
tgttgtggctcaaccccagggtaaa

SEQ ID NO: 4461814 - DNA, 25 bp, Homo sapien
gatctgctgcctcattagaagccaa

SEQ ID NO: 4461815 - DNA, 25 bp, Homo sapien
tgtctgatggttacactgctccgct

SEQ ID NO: 4461816 - DNA, 25 bp, Homo sapien
caggaagcctcctggtgtctgatgg

SEQ ID NO: 4461817 - DNA, 25 bp, Homo sapien
aaaaagctgccattgcgtgatgtac

SEQ ID NO: 4461818 - DNA, 25 bp, Homo sapien
tgccattgcgtgatgtactgagaag

SEQ ID NO: 4461819 - DNA, 25 bp, Homo sapien
caggagggataccttcaatgttctt

SEQ ID NO: 4461820 - DNA, 25 bp, Homo sapien
tccaggagggataccttcaatgttc

SEQ ID NO: 4461821 - DNA, 25 bp, Homo sapien
ccaggagggataccttcaatgttct

SEQ ID NO: 4461822 - DNA, 25 bp, Homo sapien
ctcctttgccaatcgtttagtcata

SEQ ID NO: 4461823 - DNA, 25 bp, Homo sapien
gctcctttgccaatcgtttagtcat

SEQ ID NO: 4461824 - DNA, 25 bp, Homo sapien
cagctcctttgccaatcgtttagtc

SEQ ID NO: 4461825 - DNA, 25 bp, Homo sapien
agctcctttgccaatcgtttagtca

SEQ ID NO: 4461826 - DNA, 25 bp, Homo sapien
cttttttcaataagggagagtcctg

SEQ ID NO: 4461827 - DNA, 25 bp, Homo sapien
tatattttgcgaacaaagtagggct

SEQ ID NO: 4461828 - DNA, 25 bp, Homo sapien
gataataagatctagcttgtagcaa

SEQ ID NO: 4461829 - DNA, 25 bp, Homo sapien
gagtcctggcatcattaccctgaca

SEQ ID NO: 4461830 - DNA, 25 bp, Homo sapien
tgtctaaccagacactgccgatctg

SEQ ID NO: 4461831 - DNA, 25 bp, Homo sapien
ggaatcttcagagaaacccatgcta

SEQ ID NO: 4461832 - DNA, 25 bp, Homo sapien
tacatttaactttgggagctctcct

SEQ ID NO: 4461833 - DNA, 25 bp, Homo sapien
tctcctgtgggcttgtgtctaacca

SEQ ID NO: 4461834 - DNA, 25 bp, Homo sapien
gaattatacccataatctcgttcac

SEQ ID NO: 4461835 - DNA, 25 bp, Homo sapien
gctgggaattatacccataatctcg

SEQ ID NO: 4461836 - DNA, 25 bp, Homo sapien
cccataatctcgttcaccttcagat

SEQ ID NO: 4461837 - DNA, 25 bp, Homo sapien
ttgtgctgggaattatacccataat

SEQ ID NO: 4461838 - DNA, 25 bp, Homo sapien
aattgtgggaacgattggtccaggg

SEQ ID NO: 4461839 - DNA, 25 bp, Homo sapien
gggaattgtgggaacgattggtcca

SEQ ID NO: 4461840 - DNA, 25 bp, Homo sapien
tgggaacgattggtccagggggcac

SEQ ID NO: 4461841 - DNA, 25 bp, Homo sapien
gtgggaacgattggtccagggggca

SEQ ID NO: 4461842 - DNA, 25 bp, Homo sapien
gctgtgtgtaatttcaaacccacaa

SEQ ID NO: 4461843 - DNA, 25 bp, Homo sapien
gaggcagaaagttgtctaatggatt

SEQ ID NO: 4461844 - DNA, 25 bp, Homo sapien
gaagagcgtgtgaaacatcctggaa

SEQ ID NO: 4461845 - DNA, 25 bp, Homo sapien
aacccacaaagaagagcgtgtgaaa

SEQ ID NO: 4461846 - DNA, 25 bp, Homo sapien
ctaacttctacaaatgttggttcca

SEQ ID NO: 4461847 - DNA, 25 bp, Homo sapien
ttggttccagctccaaaccccatgc

SEQ ID NO: 4461848 - DNA, 25 bp, Homo sapien
atgttggttccagctccaaacccca

SEQ ID NO: 4461849 - DNA, 25 bp, Homo sapien
gttggttccagctccaaaccccatg

SEQ ID NO: 4461850 - DNA, 25 bp, Homo sapien
aacagcattggccaactgatggcag

SEQ ID NO: 4461851 - DNA, 25 bp, Homo sapien
ctgatggaacagcattggccaactg

SEQ ID NO: 4461852 - DNA, 25 bp, Homo sapien
gtcattctgttggttagtgacactg

SEQ ID NO: 4461853 - DNA, 25 bp, Homo sapien
tgtccaatcgttggtacttgggcct

SEQ ID NO: 4461854 - DNA, 25 bp, Homo sapien
tattgttaaaggagctgtggccacc

SEQ ID NO: 4461855 - DNA, 25 bp, Homo sapien
gacaggtctcttagatttggctgcc

SEQ ID NO: 4461856 - DNA, 25 bp, Homo sapien
agggttgacatctccagcgttgttc

SEQ ID NO: 4461857 - DNA, 25 bp, Homo sapien
tcctggttagctctacgctgatgac

SEQ ID NO: 4461858 - DNA, 25 bp, Homo sapien
ctggcacttggctttcctgattcct

SEQ ID NO: 4461859 - DNA, 25 bp, Homo sapien
ggcacttggctttcctgattcctca

SEQ ID NO: 4461860 - DNA, 25 bp, Homo sapien
tttcctgattcctcagtgccacccc

SEQ ID NO: 4461861 - DNA, 25 bp, Homo sapien
cctgattcctcagtgccacccccat

SEQ ID NO: 4461862 - DNA, 25 bp, Homo sapien
catctggcgctcgtgaatgtgctta

SEQ ID NO: 4461863 - DNA, 25 bp, Homo sapien
caatcgtctggatgaggcggctcct

SEQ ID NO: 4461864 - DNA, 25 bp, Homo sapien
gcactaatcatgatcgcctctgaag

SEQ ID NO: 4461865 - DNA, 25 bp, Homo sapien
cctgggacagcatatcggaggcaga

SEQ ID NO: 4461866 - DNA, 25 bp, Homo sapien
aagaaactggttcgcaatggcttga

SEQ ID NO: 4461867 - DNA, 25 bp, Homo sapien
gccctgctctcatcagatgcttttc

SEQ ID NO: 4461868 - DNA, 25 bp, Homo sapien
tgcaggatcctcagcgaaatgtaag

SEQ ID NO: 4461869 - DNA, 25 bp, Homo sapien
aatggcttgactcctccacgatggc

SEQ ID NO: 4461870 - DNA, 25 bp, Homo sapien
gctggtgctgtagccctccccatcc

SEQ ID NO: 4461871 - DNA, 25 bp, Homo sapien
cagctggtgctgtagccctccccat

SEQ ID NO: 4461872 - DNA, 25 bp, Homo sapien
agctggtgctgtagccctccccatc

SEQ ID NO: 4461873 - DNA, 25 bp, Homo sapien
gcttggttggcctcacactttgttt

SEQ ID NO: 4461874 - DNA, 25 bp, Homo sapien
ttggttggcctcacactttgtttcc

SEQ ID NO: 4461875 - DNA, 25 bp, Homo sapien
tggttggcctcacactttgtttcct

SEQ ID NO: 4461876 - DNA, 25 bp, Homo sapien
tgcttggttggcctcacactttgtt

SEQ ID NO: 4461877 - DNA, 25 bp, Homo sapien
gaaatgccagttggagcagagtgtt

SEQ ID NO: 4461878 - DNA, 25 bp, Homo sapien
agaaatgccagttggagcagagtgt

SEQ ID NO: 4461879 - DNA, 25 bp, Homo sapien
caggagaaatgccagttggagcaga

SEQ ID NO: 4461880 - DNA, 25 bp, Homo sapien
ggagaaatgccagttggagcagagt

SEQ ID NO: 4461881 - DNA, 25 bp, Homo sapien
gccctccgggaagcgtacagagtgt

SEQ ID NO: 4461882 - DNA, 25 bp, Homo sapien
cattccagggatgccttgtggctta

SEQ ID NO: 4461883 - DNA, 25 bp, Homo sapien
gaaagactcttcctgctatgcgctg

SEQ ID NO: 4461884 - DNA, 25 bp, Homo sapien
taatagcctcggatgtgcctcctgc

SEQ ID NO: 4461885 - DNA, 25 bp, Homo sapien
ccagctaacaggtctagaaaaccag

SEQ ID NO: 4461886 - DNA, 25 bp, Homo sapien
tttagttgcctaagcattgcctggc

SEQ ID NO: 4461887 - DNA, 25 bp, Homo sapien
agcttgcgaataacagtccccgtgg

SEQ ID NO: 4461888 - DNA, 25 bp, Homo sapien
cctgtgagggtgacgttagcattac

SEQ ID NO: 4461889 - DNA, 25 bp, Homo sapien
tcagaatcatggtctcccgcagtga

SEQ ID NO: 4461890 - DNA, 25 bp, Homo sapien
gagaaagtacggcaagtccctgtac

SEQ ID NO: 4461891 - DNA, 25 bp, Homo sapien
ggacatgttgaaaattaggtctgaa

SEQ ID NO: 4461892 - DNA, 25 bp, Homo sapien
gtctcccgcagtgaagtggacatgt

SEQ ID NO: 4461893 - DNA, 25 bp, Homo sapien
gtaagcatcagctttcatcacctgc

SEQ ID NO: 4461894 - DNA, 25 bp, Homo sapien
tgagccacgtagctatcaaacactg

SEQ ID NO: 4461895 - DNA, 25 bp, Homo sapien
cactggaaaaggagtccttggtgcc

SEQ ID NO: 4461896 - DNA, 25 bp, Homo sapien
tatgtatctatgtaggtgccagacc

SEQ ID NO: 4461897 - DNA, 25 bp, Homo sapien
ctatcggcatgggaggaaagtggcc

SEQ ID NO: 4461898 - DNA, 25 bp, Homo sapien
aagtggccatattttatttctaggg

SEQ ID NO: 4461899 - DNA, 25 bp, Homo sapien
gaaagtggccatattttatttctag

SEQ ID NO: 4461900 - DNA, 25 bp, Homo sapien
aggaaagtggccatattttatttct

SEQ ID NO: 4461901 - DNA, 25 bp, Homo sapien
ggagtcctggtattgtgccgttttg

SEQ ID NO: 4461902 - DNA, 25 bp, Homo sapien
gagtcctggtattgtgccgttttgt

SEQ ID NO: 4461903 - DNA, 25 bp, Homo sapien
tcctggtattgtgccgttttgtggg

SEQ ID NO: 4461904 - DNA, 25 bp, Homo sapien
gtcctggtattgtgccgttttgtgg

SEQ ID NO: 4461905 - DNA, 25 bp, Homo sapien
gcaaaatgactttgcattgctaggg

SEQ ID NO: 4461906 - DNA, 25 bp, Homo sapien
aaaatgtttgcatgtcttaacagcc

SEQ ID NO: 4461907 - DNA, 25 bp, Homo sapien
ttccagaaaattgccttagtctacc

SEQ ID NO: 4461908 - DNA, 25 bp, Homo sapien
tcttagatctgcagatggggtcagc

SEQ ID NO: 4461909 - DNA, 25 bp, Homo sapien
gggtgaccctggactagactctcag

SEQ ID NO: 4461910 - DNA, 25 bp, Homo sapien
tatattttaggttccccacagggca

SEQ ID NO: 4461911 - DNA, 25 bp, Homo sapien
tcttggctggaacctcccatggtga

SEQ ID NO: 4461912 - DNA, 25 bp, Homo sapien
aactaatcccgctctgatggctgtg

SEQ ID NO: 4461913 - DNA, 25 bp, Homo sapien
catttgaatcaccagtccctgattg

SEQ ID NO: 4461914 - DNA, 25 bp, Homo sapien
aatcaccagtccctgattgattcac

SEQ ID NO: 4461915 - DNA, 25 bp, Homo sapien
tcttcatttgaatcaccagtccctg

SEQ ID NO: 4461916 - DNA, 25 bp, Homo sapien
caccagtccctgattgattcaccat

SEQ ID NO: 4461917 - DNA, 25 bp, Homo sapien
tggaactgcattcgaaatgtccagt

SEQ ID NO: 4461918 - DNA, 25 bp, Homo sapien
tgctgggctttgctaagatttgcag

SEQ ID NO: 4461919 - DNA, 25 bp, Homo sapien
gcagaagttggtgatttaagcctcc

SEQ ID NO: 4461920 - DNA, 25 bp, Homo sapien
aagcctccaactctgaatgcacgga

SEQ ID NO: 4461921 - DNA, 25 bp, Homo sapien
gagttgtaggttacgttcccatgtg

SEQ ID NO: 4461922 - DNA, 25 bp, Homo sapien
cctatggacagagctagggtccaag

SEQ ID NO: 4461923 - DNA, 25 bp, Homo sapien
agggtccaagtatccctgacagcac

SEQ ID NO: 4461924 - DNA, 25 bp, Homo sapien
gctatatgttgataagaggctgccc

SEQ ID NO: 4461925 - DNA, 25 bp, Homo sapien
gtaggggtcaggagatgcccatatt

SEQ ID NO: 4461926 - DNA, 25 bp, Homo sapien
tggttctaccagatgacttccaaat

SEQ ID NO: 4461927 - DNA, 25 bp, Homo sapien
tcctcatctactttctccagggaca

SEQ ID NO: 4461928 - DNA, 25 bp, Homo sapien
gacaggtcagcagtaggggtcagga

SEQ ID NO: 4461929 - DNA, 25 bp, Homo sapien
ctgcttaggcgtgtagacatccttc

SEQ ID NO: 4461930 - DNA, 25 bp, Homo sapien
gccaactctggctgcttaggcgtgt

SEQ ID NO: 4461931 - DNA, 25 bp, Homo sapien
tctggctgcttaggcgtgtagacat

SEQ ID NO: 4461932 - DNA, 25 bp, Homo sapien
aactctggctgcttaggcgtgtaga

SEQ ID NO: 4461933 - DNA, 25 bp, Homo sapien
actcccagcatcggctttcttgtca

SEQ ID NO: 4461934 - DNA, 25 bp, Homo sapien
ggttgctgacccactcccagcatcg

SEQ ID NO: 4461935 - DNA, 25 bp, Homo sapien
ctaagttgtattctcatagattata

SEQ ID NO: 4461936 - DNA, 25 bp, Homo sapien
taagttgtattctcatagattataa

SEQ ID NO: 4461937 - DNA, 25 bp, Homo sapien
ttaattcacatccagccgtgaggaa

SEQ ID NO: 4461938 - DNA, 25 bp, Homo sapien
tcacatccagccgtgaggaagtctt

SEQ ID NO: 4461939 - DNA, 25 bp, Homo sapien
cgtgaggaagtcttcggaatgttaa

SEQ ID NO: 4461940 - DNA, 25 bp, Homo sapien
ttcggaatgttaagactgtcagctg

SEQ ID NO: 4461941 - DNA, 25 bp, Homo sapien
taagccaagaagtaactgacaatat

SEQ ID NO: 4461942 - DNA, 25 bp, Homo sapien
tagtactgagaatttataagccaag

SEQ ID NO: 4461943 - DNA, 25 bp, Homo sapien
tttgcttgtgcttagtgaagcctcc

SEQ ID NO: 4461944 - DNA, 25 bp, Homo sapien
gacttctgaataccagaaagacttg

SEQ ID NO: 4461945 - DNA, 25 bp, Homo sapien
caagttgaaactgaaggagtggctc

SEQ ID NO: 4461946 - DNA, 25 bp, Homo sapien
tcctgtagtagctagagtgccttga

SEQ ID NO: 4461947 - DNA, 25 bp, Homo sapien
cacccttgaagtttgaggaggatct

SEQ ID NO: 4461948 - DNA, 25 bp, Homo sapien
tggtggaacgagaatgcctacacgc

SEQ ID NO: 4461949 - DNA, 25 bp, Homo sapien
ccatcatggaagaataccttgtact

SEQ ID NO: 4461950 - DNA, 25 bp, Homo sapien
catggaagaataccttgtacttttc

SEQ ID NO: 4461951 - DNA, 25 bp, Homo sapien
acttttccaccgaaatcactggata

SEQ ID NO: 4461952 - DNA, 25 bp, Homo sapien
cactggataccacaacacaacaaaa

SEQ ID NO: 4461953 - DNA, 25 bp, Homo sapien
aaggtgtcagcaggagtggtccttt

SEQ ID NO: 4461954 - DNA, 25 bp, Homo sapien
cattttgctttgatacatctgattt

SEQ ID NO: 4461955 - DNA, 25 bp, Homo sapien
taatttagtatctggctttaatgag

SEQ ID NO: 4461956 - DNA, 25 bp, Homo sapien
tgtactgttaggaatagagacaaaa

SEQ ID NO: 4461957 - DNA, 25 bp, Homo sapien
tatgtttgggtctttccagtaccgc

SEQ ID NO: 4461958 - DNA, 25 bp, Homo sapien
agtaccgcacttgtcgcttgtccgc

SEQ ID NO: 4461959 - DNA, 25 bp, Homo sapien
ccgacgaaggtcgaggactttctag

SEQ ID NO: 4461960 - DNA, 25 bp, Homo sapien
ctttctaggaaaacacgcagtctcc

SEQ ID NO: 4461961 - DNA, 25 bp, Homo sapien
ccgtaatggatgagaacaaaactag

SEQ ID NO: 4461962 - DNA, 25 bp, Homo sapien
aaatgtcttagattgccagagatcc

SEQ ID NO: 4461963 - DNA, 25 bp, Homo sapien
ccaaaaaaccgtatgatgcagcagt

SEQ ID NO: 4461964 - DNA, 25 bp, Homo sapien
ggagcacttaatgaggccctactat

SEQ ID NO: 4461965 - DNA, 25 bp, Homo sapien
tcattctaatatgaatgttgttata

SEQ ID NO: 4461966 - DNA, 25 bp, Homo sapien
caattttagatgtgctttatgtact

SEQ ID NO: 4461967 - DNA, 25 bp, Homo sapien
tatattgtacttagaaactgtacct

SEQ ID NO: 4461968 - DNA, 25 bp, Homo sapien
ctgtacctttaatattacattacct

SEQ ID NO: 4461969 - DNA, 25 bp, Homo sapien
ttcactcttacactagtctgcttat

SEQ ID NO: 4461970 - DNA, 25 bp, Homo sapien
tttcaattcactcttacactagtct

SEQ ID NO: 4461971 - DNA, 25 bp, Homo sapien
caattcactcttacactagtctgct

SEQ ID NO: 4461972 - DNA, 25 bp, Homo sapien
tcttacactagtctgcttatttcca

SEQ ID NO: 4461973 - DNA, 25 bp, Homo sapien
tttctgccacactaaaaatgcaagc

SEQ ID NO: 4461974 - DNA, 25 bp, Homo sapien
tgtaggtcttgaggattaagcacac

SEQ ID NO: 4461975 - DNA, 25 bp, Homo sapien
gcaagccatttatgggaatcctaaa

SEQ ID NO: 4461976 - DNA, 25 bp, Homo sapien
gatctttattagaggatcgtccaac

SEQ ID NO: 4461977 - DNA, 25 bp, Homo sapien
taaatgtacctgtattgtctgcctg

SEQ ID NO: 4461978 - DNA, 25 bp, Homo sapien
ttttaaacattaggacattagctgg

SEQ ID NO: 4461979 - DNA, 25 bp, Homo sapien
acattaggacattagctggctgctt

SEQ ID NO: 4461980 - DNA, 25 bp, Homo sapien
tataaatgtacctgtattgtctgcc

SEQ ID NO: 4461981 - DNA, 25 bp, Homo sapien
ttgccacattagcagtaccacactt

SEQ ID NO: 4461982 - DNA, 25 bp, Homo sapien
taggaacttgattatcactgaacag

SEQ ID NO: 4461983 - DNA, 25 bp, Homo sapien
cagtgatgcaacataacatggagtc

SEQ ID NO: 4461984 - DNA, 25 bp, Homo sapien
gctattagctttgacatgttgcaca

SEQ ID NO: 4461985 - DNA, 25 bp, Homo sapien
gaaaaacatgacttaagacactgct

SEQ ID NO: 4461986 - DNA, 25 bp, Homo sapien
ctggccttggtcacaatgcaaacaa

SEQ ID NO: 4461987 - DNA, 25 bp, Homo sapien
tgcaaattgtgttaaagctacggat

SEQ ID NO: 4461988 - DNA, 25 bp, Homo sapien
gccccgctgctacaatgcctttgta

SEQ ID NO: 4461989 - DNA, 25 bp, Homo sapien
tttgaggaaaactaacatccactgg

SEQ ID NO: 4461990 - DNA, 25 bp, Homo sapien
caggagaatagattaagcagcttcc

SEQ ID NO: 4461991 - DNA, 25 bp, Homo sapien
aatatgaggctgacaaatagtaccc

SEQ ID NO: 4461992 - DNA, 25 bp, Homo sapien
cagtctgaacctagcaatatgaggc

SEQ ID NO: 4461993 - DNA, 25 bp, Homo sapien
caaaatgttctgatgatggatattg

SEQ ID NO: 4461994 - DNA, 25 bp, Homo sapien
taaggctcaccatgcaaaagacaaa

SEQ ID NO: 4461995 - DNA, 25 bp, Homo sapien
aattgatgtaattcatataaggctc

SEQ ID NO: 4461996 - DNA, 25 bp, Homo sapien
ctgatgatggatattggtgacaaaa

SEQ ID NO: 4461997 - DNA, 25 bp, Homo sapien
tgccccatatgagaacaactaagga

SEQ ID NO: 4461998 - DNA, 25 bp, Homo sapien
taaggaggaattcttttgacacaca

SEQ ID NO: 4461999 - DNA, 25 bp, Homo sapien
tttaccccatgctacagcgaggact

SEQ ID NO: 4462000 - DNA, 25 bp, Homo sapien
tatgtgactcctaatccagatcagg

SEQ ID NO: 4462001 - DNA, 25 bp, Homo sapien
gacattggttcgagccacagtgcca

SEQ ID NO: 4462002 - DNA, 25 bp, Homo sapien
aataaggtgtgtctgcttgcgtgcc

SEQ ID NO: 4462003 - DNA, 25 bp, Homo sapien
ataagggtaatcctcttccaagcag

SEQ ID NO: 4462004 - DNA, 25 bp, Homo sapien
ccttgtgggtatgactctgttgact

SEQ ID NO: 4462005 - DNA, 25 bp, Homo sapien
cctgtttctcccttctcagctctca

SEQ ID NO: 4462006 - DNA, 25 bp, Homo sapien
ctgtttctcccttctcagctctcac

SEQ ID NO: 4462007 - DNA, 25 bp, Homo sapien
tatggatatagtcttgattgttgtg

SEQ ID NO: 4462008 - DNA, 25 bp, Homo sapien
tcttggtggcttggtaatgctgctc

SEQ ID NO: 4462009 - DNA, 25 bp, Homo sapien
ttatcattgtcattactaggcagac

SEQ ID NO: 4462010 - DNA, 25 bp, Homo sapien
gaccatttgcaatgtgttatgtaga

SEQ ID NO: 4462011 - DNA, 25 bp, Homo sapien
ggtaaaggtggttctatcatgatca

SEQ ID NO: 4462012 - DNA, 25 bp, Homo sapien
ccataagaaactagaggacctgttt

SEQ ID NO: 4462013 - DNA, 25 bp, Homo sapien
gattgggcctatgcctagccaggga

SEQ ID NO: 4462014 - DNA, 25 bp, Homo sapien
taaattaacaagctgacaccataag

SEQ ID NO: 4462015 - DNA, 25 bp, Homo sapien
cctaagttgactgagtaccatggca

SEQ ID NO: 4462016 - DNA, 25 bp, Homo sapien
tacctcctcagtgccaaagtggttt

SEQ ID NO: 4462017 - DNA, 25 bp, Homo sapien
taacaacatgctattgagtaaaacc

SEQ ID NO: 4462018 - DNA, 25 bp, Homo sapien
cagaagtgattatctaggaatggag

SEQ ID NO: 4462019 - DNA, 25 bp, Homo sapien
tgtgcattgcgtatcacctgggtgt

SEQ ID NO: 4462020 - DNA, 25 bp, Homo sapien
taaatggacagggttctaggcagca

SEQ ID NO: 4462021 - DNA, 25 bp, Homo sapien
tcattctgcccaaaaaactgatggc

SEQ ID NO: 4462022 - DNA, 25 bp, Homo sapien
tctgaatctgtcagtaaggcaagtg

SEQ ID NO: 4462023 - DNA, 25 bp, Homo sapien
tgtccctggtagacatgtcatggcc

SEQ ID NO: 4462024 - DNA, 25 bp, Homo sapien
tgcttatattggaagggcctcgaga

SEQ ID NO: 4462025 - DNA, 25 bp, Homo sapien
ttaagcaaaatgagaggcccggtgt

SEQ ID NO: 4462026 - DNA, 25 bp, Homo sapien
gagacagccgattgctacaaccagg

SEQ ID NO: 4462027 - DNA, 25 bp, Homo sapien
gaagtgcagtgctaaatgacagcct

SEQ ID NO: 4462028 - DNA, 25 bp, Homo sapien
catcttaagaatgctagtgcccaag

SEQ ID NO: 4462029 - DNA, 25 bp, Homo sapien
gaagtactgggtgcctgtcatacaa

SEQ ID NO: 4462030 - DNA, 25 bp, Homo sapien
taagtgatgcctaccgcatagggta

SEQ ID NO: 4462031 - DNA, 25 bp, Homo sapien
tacatcaacagcgtattagcatggt

SEQ ID NO: 4462032 - DNA, 25 bp, Homo sapien
ataaaaacggtgttctagctgccag

SEQ ID NO: 4462033 - DNA, 25 bp, Homo sapien
ctctaatggcaagacatggttttga

SEQ ID NO: 4462034 - DNA, 25 bp, Homo sapien
tgttgccttgtctcatctctaatgg

SEQ ID NO: 4462035 - DNA, 25 bp, Homo sapien
caggcctctttgaatagcagtgaag

SEQ ID NO: 4462036 - DNA, 25 bp, Homo sapien
gaagttactcctctgtgtcctgatg

SEQ ID NO: 4462037 - DNA, 25 bp, Homo sapien
catctcacagcgaaggcacttgtct

SEQ ID NO: 4462038 - DNA, 25 bp, Homo sapien
tgaaggcaaaatcagggcaagtcgt

SEQ ID NO: 4462039 - DNA, 25 bp, Homo sapien
cggagaagtctctcacgatctcaaa

SEQ ID NO: 4462040 - DNA, 25 bp, Homo sapien
gctaaagtatttgtgaccagtttcc

SEQ ID NO: 4462041 - DNA, 25 bp, Homo sapien
gccacactggagtgaaatgaatgac

SEQ ID NO: 4462042 - DNA, 25 bp, Homo sapien
gaatgacaacattcccggagaagtc

SEQ ID NO: 4462043 - DNA, 25 bp, Homo sapien
cataacgctgtcactgccaaaagct

SEQ ID NO: 4462044 - DNA, 25 bp, Homo sapien
catagtggccatagttctcctagaa

SEQ ID NO: 4462045 - DNA, 25 bp, Homo sapien
aactggaaaggctgaatgtccgtgc

SEQ ID NO: 4462046 - DNA, 25 bp, Homo sapien
taggaggtatacttccacgtgaaca

SEQ ID NO: 4462047 - DNA, 25 bp, Homo sapien
tgtgaaactgaccggcttctgcttg

SEQ ID NO: 4462048 - DNA, 25 bp, Homo sapien
gaaactgaccggcttctgcttgtta

SEQ ID NO: 4462049 - DNA, 25 bp, Homo sapien
tgaaactgaccggcttctgcttgtt

SEQ ID NO: 4462050 - DNA, 25 bp, Homo sapien
ttgtgaaactgaccggcttctgctt

SEQ ID NO: 4462051 - DNA, 25 bp, Homo sapien
caaaagcttttgcatttacagagag

SEQ ID NO: 4462052 - DNA, 25 bp, Homo sapien
ttacagagagtgagaaatctctctg

SEQ ID NO: 4462053 - DNA, 25 bp, Homo sapien
aagcttttgcatttacagagagtga

SEQ ID NO: 4462054 - DNA, 25 bp, Homo sapien
atgccagacattccaaaagcttttg

SEQ ID NO: 4462055 - DNA, 25 bp, Homo sapien
tatcaagccgtaatgcaaataacag

SEQ ID NO: 4462056 - DNA, 25 bp, Homo sapien
ggcattgagaagagatcgagaaact

SEQ ID NO: 4462057 - DNA, 25 bp, Homo sapien
catgaaactggcctcgcttaggtaa

SEQ ID NO: 4462058 - DNA, 25 bp, Homo sapien
ggtcattgtcctattccttgcacga

SEQ ID NO: 4462059 - DNA, 25 bp, Homo sapien
tagaagaagaaagtcatttgaatac

SEQ ID NO: 4462060 - DNA, 25 bp, Homo sapien
aaatggacaaattgcccaggcagcc

SEQ ID NO: 4462061 - DNA, 25 bp, Homo sapien
tctccccgaccagtagccgagacta

SEQ ID NO: 4462062 - DNA, 25 bp, Homo sapien
cagcttactgcagccgtgacccagg

SEQ ID NO: 4462063 - DNA, 25 bp, Homo sapien
aagtgtgctcaagtcaagcagccca

SEQ ID NO: 4462064 - DNA, 25 bp, Homo sapien
caattgtaagcatgcatctttctca

SEQ ID NO: 4462065 - DNA, 25 bp, Homo sapien
cagccgtgctgtataccaattgtaa

SEQ ID NO: 4462066 - DNA, 25 bp, Homo sapien
gaagtatgtagtgagaagtgtgctc

SEQ ID NO: 4462067 - DNA, 25 bp, Homo sapien
cactgcagtagaatggaagtagaca

SEQ ID NO: 4462068 - DNA, 25 bp, Homo sapien
cattgttccagattccgagattagg

SEQ ID NO: 4462069 - DNA, 25 bp, Homo sapien
gaggaggagcacaaatcagactgag

SEQ ID NO: 4462070 - DNA, 25 bp, Homo sapien
taaatgctagagcagaggaatgcag

SEQ ID NO: 4462071 - DNA, 25 bp, Homo sapien
tagatactatcctctacagtagtgg

SEQ ID NO: 4462072 - DNA, 25 bp, Homo sapien
gttccataacaatactgaggcattg

SEQ ID NO: 4462073 - DNA, 25 bp, Homo sapien
gaagcaggacggtaatgccaagctg

SEQ ID NO: 4462074 - DNA, 25 bp, Homo sapien
agctccaagagataaaaaccagttc

SEQ ID NO: 4462075 - DNA, 25 bp, Homo sapien
gccatctgaagatgcctcagggtgt

SEQ ID NO: 4462076 - DNA, 25 bp, Homo sapien
gaaggttggttaccagccatctgaa

SEQ ID NO: 4462077 - DNA, 25 bp, Homo sapien
caaagatagtgtggtaatcagcagg

SEQ ID NO: 4462078 - DNA, 25 bp, Homo sapien
gatgcttgtaaaagaggcgctgtaa

SEQ ID NO: 4462079 - DNA, 25 bp, Homo sapien
taatttatttaatgctgcccagtca

SEQ ID NO: 4462080 - DNA, 25 bp, Homo sapien
taattgcaaagcacctacaatagca

SEQ ID NO: 4462081 - DNA, 25 bp, Homo sapien
caagtgagacacaataaaagtggat

SEQ ID NO: 4462082 - DNA, 25 bp, Homo sapien
tacagtatgtcatctaaaccttagc

SEQ ID NO: 4462083 - DNA, 25 bp, Homo sapien
gaaacgtcttaaatgccctctgcag

SEQ ID NO: 4462084 - DNA, 25 bp, Homo sapien
tattaacaggccgaaacgtactgga

SEQ ID NO: 4462085 - DNA, 25 bp, Homo sapien
cattagccctgtaagtgtgaaacgt

SEQ ID NO: 4462086 - DNA, 25 bp, Homo sapien
cgtactggacgttaagatgagctgc

SEQ ID NO: 4462087 - DNA, 25 bp, Homo sapien
ccgtggcaagtcagggaactttctg

SEQ ID NO: 4462088 - DNA, 25 bp, Homo sapien
agaaaccgtggcaagtcagggaact

SEQ ID NO: 4462089 - DNA, 25 bp, Homo sapien
taggtcctctcaggtgagaaggaga

SEQ ID NO: 4462090 - DNA, 25 bp, Homo sapien
tggctctaggtcctctcaggtgaga

SEQ ID NO: 4462091 - DNA, 25 bp, Homo sapien
ggcgcctcgagcgtgccaagacgct

SEQ ID NO: 4462092 - DNA, 25 bp, Homo sapien
gcaccccgcttgacactttggctgg

SEQ ID NO: 4462093 - DNA, 25 bp, Homo sapien
gaggaactcggcagcccacgggatc

SEQ ID NO: 4462094 - DNA, 25 bp, Homo sapien
gttagtcgcggccaatcctgccggg

SEQ ID NO: 4462095 - DNA, 25 bp, Homo sapien
ggtgaccgtagctccccagaccaaa

SEQ ID NO: 4462096 - DNA, 25 bp, Homo sapien
tgtcttttccaccaacgagctggcg

SEQ ID NO: 4462097 - DNA, 25 bp, Homo sapien
agagctggggcactctaggaaatgc

SEQ ID NO: 4462098 - DNA, 25 bp, Homo sapien
taggaaatgcgggtgaccgtagctc

SEQ ID NO: 4462099 - DNA, 25 bp, Homo sapien
tgcaggtatcagtggtcttggacgc

SEQ ID NO: 4462100 - DNA, 25 bp, Homo sapien
aatttagcggctcaaatcagctggc

SEQ ID NO: 4462101 - DNA, 25 bp, Homo sapien
caatttccggctttccttgcaggta

SEQ ID NO: 4462102 - DNA, 25 bp, Homo sapien
tgccaatatccaagggttgccaagg

SEQ ID NO: 4462103 - DNA, 25 bp, Homo sapien
tctgggttcacttgcattgagtagg

SEQ ID NO: 4462104 - DNA, 25 bp, Homo sapien
gatgtctcacaaggcacgctagagc

SEQ ID NO: 4462105 - DNA, 25 bp, Homo sapien
gaatcatccgagttgtatatctggg

SEQ ID NO: 4462106 - DNA, 25 bp, Homo sapien
tacttccgaggatgcagtctccgat

SEQ ID NO: 4462107 - DNA, 25 bp, Homo sapien
tccttattgtcttcacagtgagtag

SEQ ID NO: 4462108 - DNA, 25 bp, Homo sapien
tcatccttattgtcttcacagtgag

SEQ ID NO: 4462109 - DNA, 25 bp, Homo sapien
cttcatccttattgtcttcacagtg

SEQ ID NO: 4462110 - DNA, 25 bp, Homo sapien
ccttattgtcttcacagtgagtagg

SEQ ID NO: 4462111 - DNA, 25 bp, Homo sapien
atggttccaccggttattggccctg

SEQ ID NO: 4462112 - DNA, 25 bp, Homo sapien
tccaccggttattggccctgtcctc

SEQ ID NO: 4462113 - DNA, 25 bp, Homo sapien
tcttatggttccaccggttattggc

SEQ ID NO: 4462114 - DNA, 25 bp, Homo sapien
gaagaacgtgggagctctgaagaca

SEQ ID NO: 4462115 - DNA, 25 bp, Homo sapien
gaacgtgggagctctgaagacacaa

SEQ ID NO: 4462116 - DNA, 25 bp, Homo sapien
aagttagaggcagggaaatagtcgt

SEQ ID NO: 4462117 - DNA, 25 bp, Homo sapien
gtcgtgagctaacacaggctgagca

SEQ ID NO: 4462118 - DNA, 25 bp, Homo sapien
cagcagattcacagggcctctgagc

SEQ ID NO: 4462119 - DNA, 25 bp, Homo sapien
gagccatctgtctgatcaccttgga

SEQ ID NO: 4462120 - DNA, 25 bp, Homo sapien
gatcaccttggactccatagtacac

SEQ ID NO: 4462121 - DNA, 25 bp, Homo sapien
tccacccagctgttggagccatctg

SEQ ID NO: 4462122 - DNA, 25 bp, Homo sapien
gctaatggttcccttggacgctgta

SEQ ID NO: 4462123 - DNA, 25 bp, Homo sapien
aagatggttggttggaccatgtgct

SEQ ID NO: 4462124 - DNA, 25 bp, Homo sapien
tgtgcttggtcgtcccaggagcctg

SEQ ID NO: 4462125 - DNA, 25 bp, Homo sapien
tacacacaggtcattgttatcttcc

SEQ ID NO: 4462126 - DNA, 25 bp, Homo sapien
gaaagttcgcgggtgagaagtgagg

SEQ ID NO: 4462127 - DNA, 25 bp, Homo sapien
gcctgtgaggttgcccttagccgta

SEQ ID NO: 4462128 - DNA, 25 bp, Homo sapien
tgtgaggttgcccttagccgtactg

SEQ ID NO: 4462129 - DNA, 25 bp, Homo sapien
aggttgcccttagccgtactgggca

SEQ ID NO: 4462130 - DNA, 25 bp, Homo sapien
taattccctctaacccacactgaag

SEQ ID NO: 4462131 - DNA, 25 bp, Homo sapien
gcttttcagatgctgcggagtaatt

SEQ ID NO: 4462132 - DNA, 25 bp, Homo sapien
gagtaattccctctaacccacactg

SEQ ID NO: 4462133 - DNA, 25 bp, Homo sapien
gatgctgcggagtaattccctctaa

SEQ ID NO: 4462134 - DNA, 25 bp, Homo sapien
cttgtaaaggagttgatagccagtg

SEQ ID NO: 4462135 - DNA, 25 bp, Homo sapien
tgtaaaggagttgatagccagtgtt

SEQ ID NO: 4462136 - DNA, 25 bp, Homo sapien
gagttgatagccagtgtttacaagc

SEQ ID NO: 4462137 - DNA, 25 bp, Homo sapien
ggagttgatagccagtgtttacaag

SEQ ID NO: 4462138 - DNA, 25 bp, Homo sapien
gttcactagtgagatgtttatcaca

SEQ ID NO: 4462139 - DNA, 25 bp, Homo sapien
gctctgggcttgctaaccaaaccgt

SEQ ID NO: 4462140 - DNA, 25 bp, Homo sapien
tgtaggaggcaaaaggtatctgcag

SEQ ID NO: 4462141 - DNA, 25 bp, Homo sapien
caaaccgttaatcgcttagaaacag

SEQ ID NO: 4462142 - DNA, 25 bp, Homo sapien
gactccataaccactaccactgcta

SEQ ID NO: 4462143 - DNA, 25 bp, Homo sapien
gagagagccagatctgaaaatacag

SEQ ID NO: 4462144 - DNA, 25 bp, Homo sapien
ctgaagagagctttcggcattttaa

SEQ ID NO: 4462145 - DNA, 25 bp, Homo sapien
taaaaatggcaagtcttacagactc

SEQ ID NO: 4462146 - DNA, 25 bp, Homo sapien
acatcggtttcttgttcaggaaagg

SEQ ID NO: 4462147 - DNA, 25 bp, Homo sapien
cagtagatgaagaacatcggtttct

SEQ ID NO: 4462148 - DNA, 25 bp, Homo sapien
gaagaacatcggtttcttgttcagg

SEQ ID NO: 4462149 - DNA, 25 bp, Homo sapien
cagacagtagatgaagaacatcggt

SEQ ID NO: 4462150 - DNA, 25 bp, Homo sapien
gacactggtcccgttgaagcttcga

SEQ ID NO: 4462151 - DNA, 25 bp, Homo sapien
cactggtcccgttgaagcttcgatg

SEQ ID NO: 4462152 - DNA, 25 bp, Homo sapien
ggagacactggtcccgttgaagctt

SEQ ID NO: 4462153 - DNA, 25 bp, Homo sapien
actggtcccgttgaagcttcgatgg

SEQ ID NO: 4462154 - DNA, 25 bp, Homo sapien
acattggccttgacagtatctgagc

SEQ ID NO: 4462155 - DNA, 25 bp, Homo sapien
aagccgggacgtggagatccactgt

SEQ ID NO: 4462156 - DNA, 25 bp, Homo sapien
ggaaattttccccatctcacagggc

SEQ ID NO: 4462157 - DNA, 25 bp, Homo sapien
gagacttgacatgccaaacgctcct

SEQ ID NO: 4462158 - DNA, 25 bp, Homo sapien
ggtggcttcctggtcacgttcatcc

SEQ ID NO: 4462159 - DNA, 25 bp, Homo sapien
gaaggctctatatcaataatgggca

SEQ ID NO: 4462160 - DNA, 25 bp, Homo sapien
tgatgcctgcggctgacccaactgc

SEQ ID NO: 4462161 - DNA, 25 bp, Homo sapien
ggtcacgttcatccagatacagaga

SEQ ID NO: 4462162 - DNA, 25 bp, Homo sapien
gtgattatgaagtgaactctgttgt

SEQ ID NO: 4462163 - DNA, 25 bp, Homo sapien
ttatgaagtgaactctgttgttgca

SEQ ID NO: 4462164 - DNA, 25 bp, Homo sapien
ggtgattatgaagtgaactctgttg

SEQ ID NO: 4462165 - DNA, 25 bp, Homo sapien
gattatgaagtgaactctgttgttg

SEQ ID NO: 4462166 - DNA, 25 bp, Homo sapien
catagaaatatggtttgtcccattg

SEQ ID NO: 4462167 - DNA, 25 bp, Homo sapien
tgtggattctgcgtcggcagttgtc

SEQ ID NO: 4462168 - DNA, 25 bp, Homo sapien
attctgcgtcggcagttgtcatgga

SEQ ID NO: 4462169 - DNA, 25 bp, Homo sapien
ttgttcatagaaatatggtttgtcc

SEQ ID NO: 4462170 - DNA, 25 bp, Homo sapien
attctgcagaggagtcaacgattgg

SEQ ID NO: 4462171 - DNA, 25 bp, Homo sapien
ccaaggaggagattctaaagggtct

SEQ ID NO: 4462172 - DNA, 25 bp, Homo sapien
caacgattggacaggtgaacacagg

SEQ ID NO: 4462173 - DNA, 25 bp, Homo sapien
cacgctggcatagctttttaagaac

SEQ ID NO: 4462174 - DNA, 25 bp, Homo sapien
gggtcctggaagtcaccgtggatga

SEQ ID NO: 4462175 - DNA, 25 bp, Homo sapien
ggatgaagtgttggctaagaaatat

SEQ ID NO: 4462176 - DNA, 25 bp, Homo sapien
tcctggaagtcaccgtggatgaagt

SEQ ID NO: 4462177 - DNA, 25 bp, Homo sapien
tggatgaagtgttggctaagaaata

SEQ ID NO: 4462178 - DNA, 25 bp, Homo sapien
ccaagttgtgtgatgagtcccagaa

SEQ ID NO: 4462179 - DNA, 25 bp, Homo sapien
tcctcgggcttacacagactttctg

SEQ ID NO: 4462180 - DNA, 25 bp, Homo sapien
tcatttcaggtagtgtggccccaaa

SEQ ID NO: 4462181 - DNA, 25 bp, Homo sapien
tgcagcaggtttgcggcatgttcct

SEQ ID NO: 4462182 - DNA, 25 bp, Homo sapien
ccaggatccatgctcgatgaggtat

SEQ ID NO: 4462183 - DNA, 25 bp, Homo sapien
gacttggtatgctgaccaggatcca

SEQ ID NO: 4462184 - DNA, 25 bp, Homo sapien
taataccccattggatcctagggct

SEQ ID NO: 4462185 - DNA, 25 bp, Homo sapien
ttcatcttatctgagagtgggcctc

SEQ ID NO: 4462186 - DNA, 25 bp, Homo sapien
ttgaagcgccggtggtttatctgtg

SEQ ID NO: 4462187 - DNA, 25 bp, Homo sapien
tgtgccattacttgccggctgaggc

SEQ ID NO: 4462188 - DNA, 25 bp, Homo sapien
gaggctgattcattctgcgactgat

SEQ ID NO: 4462189 - DNA, 25 bp, Homo sapien
cagcttataagtgatgtaggagttc

SEQ ID NO: 4462190 - DNA, 25 bp, Homo sapien
tagcaaggctcctaaactcggaaca

SEQ ID NO: 4462191 - DNA, 25 bp, Homo sapien
ggctcctaaactcggaacatctcat

SEQ ID NO: 4462192 - DNA, 25 bp, Homo sapien
aaaatagcaaggctcctaaactcgg

SEQ ID NO: 4462193 - DNA, 25 bp, Homo sapien
gttgaaaatagcaaggctcctaaac

SEQ ID NO: 4462194 - DNA, 25 bp, Homo sapien
catgctgatggtgccaatgaacctt

SEQ ID NO: 4462195 - DNA, 25 bp, Homo sapien
tgagacatgctgatggtgccaatga

SEQ ID NO: 4462196 - DNA, 25 bp, Homo sapien
gacatgctgatggtgccaatgaacc

SEQ ID NO: 4462197 - DNA, 25 bp, Homo sapien
gctgatggtgccaatgaaccttcat

SEQ ID NO: 4462198 - DNA, 25 bp, Homo sapien
ccaattgagggccatcggatggact

SEQ ID NO: 4462199 - DNA, 25 bp, Homo sapien
tggaaaaagtggtatcttccctcag

SEQ ID NO: 4462200 - DNA, 25 bp, Homo sapien
gacttgttgagttccaacattggaa

SEQ ID NO: 4462201 - DNA, 25 bp, Homo sapien
tgtctagtggcaaaccaacggttac

SEQ ID NO: 4462202 - DNA, 25 bp, Homo sapien
cctccaccaacccttgaagtaggag

SEQ ID NO: 4462203 - DNA, 25 bp, Homo sapien
aatttaagggtctgatatgtaccag

SEQ ID NO: 4462204 - DNA, 25 bp, Homo sapien
aagtaggagtctgcaaggtgaattt

SEQ ID NO: 4462205 - DNA, 25 bp, Homo sapien
ttccggtacccaagcacctccacca

SEQ ID NO: 4462206 - DNA, 25 bp, Homo sapien
gataagagcgatggccggttcatgt

SEQ ID NO: 4462207 - DNA, 25 bp, Homo sapien
ctgggacccctgaaatctataactg

SEQ ID NO: 4462208 - DNA, 25 bp, Homo sapien
tgctttgcctccagataccctggga

SEQ ID NO: 4462209 - DNA, 25 bp, Homo sapien
tcccttcgtgcactggtcccagttg

SEQ ID NO: 4462210 - DNA, 25 bp, Homo sapien
ttggtgtcccagtctccgagttaaa

SEQ ID NO: 4462211 - DNA, 25 bp, Homo sapien
cgagttaaagtggggatgtagccca

SEQ ID NO: 4462212 - DNA, 25 bp, Homo sapien
tgtcccagtctccgagttaaagtgg

SEQ ID NO: 4462213 - DNA, 25 bp, Homo sapien
gagttaaagtggggatgtagcccat

SEQ ID NO: 4462214 - DNA, 25 bp, Homo sapien
ggaaagccgtcttcctgtatagagg

SEQ ID NO: 4462215 - DNA, 25 bp, Homo sapien
tcctgtatagaggaagaccttccag

SEQ ID NO: 4462216 - DNA, 25 bp, Homo sapien
catctagtacagatcttctcctgca

SEQ ID NO: 4462217 - DNA, 25 bp, Homo sapien
ctgaaaccgtgtgggaggaaagccg

SEQ ID NO: 4462218 - DNA, 25 bp, Homo sapien
acatccgagtgtcatgtgtgcacac

SEQ ID NO: 4462219 - DNA, 25 bp, Homo sapien
tcacatccgagtgtcatgtgtgcac

SEQ ID NO: 4462220 - DNA, 25 bp, Homo sapien
cacatccgagtgtcatgtgtgcaca

SEQ ID NO: 4462221 - DNA, 25 bp, Homo sapien
ttggctgaaaaagaacgctgacagc

SEQ ID NO: 4462222 - DNA, 25 bp, Homo sapien
tgcctggagtaccaagaatgccaca

SEQ ID NO: 4462223 - DNA, 25 bp, Homo sapien
gggcactaacagcagtcaactggta

SEQ ID NO: 4462224 - DNA, 25 bp, Homo sapien
gatgactcccatgactgaataacaa

SEQ ID NO: 4462225 - DNA, 25 bp, Homo sapien
tttccctgggacgtgtcctcctctg

SEQ ID NO: 4462226 - DNA, 25 bp, Homo sapien
ctaatagagacctcctattttccct

SEQ ID NO: 4462227 - DNA, 25 bp, Homo sapien
ggtcatactcataagtaagattggc

SEQ ID NO: 4462228 - DNA, 25 bp, Homo sapien
ccacacagactggtcatactcataa

SEQ ID NO: 4462229 - DNA, 25 bp, Homo sapien
cataagtaagattggcatttgtgtc

SEQ ID NO: 4462230 - DNA, 25 bp, Homo sapien
gtaagattggcatttgtgtcctcca

SEQ ID NO: 4462231 - DNA, 25 bp, Homo sapien
gaagtctggcatgacatgagttgcc

SEQ ID NO: 4462232 - DNA, 25 bp, Homo sapien
tcagtgaagtctggcatgacatgag

SEQ ID NO: 4462233 - DNA, 25 bp, Homo sapien
catgacatgagttgcctcagcccac

SEQ ID NO: 4462234 - DNA, 25 bp, Homo sapien
gttgcctcagcccacgcaaaaactg

SEQ ID NO: 4462235 - DNA, 25 bp, Homo sapien
gtgatatatttgccttctcttgaat

SEQ ID NO: 4462236 - DNA, 25 bp, Homo sapien
ttatcataagcaacaaatctttctg

SEQ ID NO: 4462237 - DNA, 25 bp, Homo sapien
tctgaggcagatgtcctgtgaccca

SEQ ID NO: 4462238 - DNA, 25 bp, Homo sapien
ctgaggcagatgtcctgtgacccag

SEQ ID NO: 4462239 - DNA, 25 bp, Homo sapien
caagatcgggcaccttcagggaggt

SEQ ID NO: 4462240 - DNA, 25 bp, Homo sapien
atgtctccatttggtacattgtcga

SEQ ID NO: 4462241 - DNA, 25 bp, Homo sapien
ggcatattgaagagttgtttttgct

SEQ ID NO: 4462242 - DNA, 25 bp, Homo sapien
gcatattgaagagttgtttttgctt

SEQ ID NO: 4462243 - DNA, 25 bp, Homo sapien
tggcatattgaagagttgtttttgc

SEQ ID NO: 4462244 - DNA, 25 bp, Homo sapien
ctggcatattgaagagttgtttttg

SEQ ID NO: 4462245 - DNA, 25 bp, Homo sapien
aacgaactgggtagcccacacgttg

SEQ ID NO: 4462246 - DNA, 25 bp, Homo sapien
actgggtagcccacacgttgttggg

SEQ ID NO: 4462247 - DNA, 25 bp, Homo sapien
gaactgggtagcccacacgttgttg

SEQ ID NO: 4462248 - DNA, 25 bp, Homo sapien
ctgaagtgcggggggtaacgaactg

SEQ ID NO: 4462249 - DNA, 25 bp, Homo sapien
tgtttcagttctcgcttgatgggcc

SEQ ID NO: 4462250 - DNA, 25 bp, Homo sapien
gatagtccagctttggacacagcct

SEQ ID NO: 4462251 - DNA, 25 bp, Homo sapien
caatttaaatggacaggcagagttc

SEQ ID NO: 4462252 - DNA, 25 bp, Homo sapien
gatgggccttctcggactgtgcaac

SEQ ID NO: 4462253 - DNA, 25 bp, Homo sapien
tgcacactctcgaaggaattactgt

SEQ ID NO: 4462254 - DNA, 25 bp, Homo sapien
tctcgaaggaattactgttatttac

SEQ ID NO: 4462255 - DNA, 25 bp, Homo sapien
cttcatttctggcatgcacactctc

SEQ ID NO: 4462256 - DNA, 25 bp, Homo sapien
tctggcatgcacactctcgaaggaa

SEQ ID NO: 4462257 - DNA, 25 bp, Homo sapien
tctattggtagcaacaggattctgc

SEQ ID NO: 4462258 - DNA, 25 bp, Homo sapien
cctctattggtagcaacaggattct

SEQ ID NO: 4462259 - DNA, 25 bp, Homo sapien
gattctgctagctccttcagtatgg

SEQ ID NO: 4462260 - DNA, 25 bp, Homo sapien
ttcagtatggtcataaaaccaccaa

SEQ ID NO: 4462261 - DNA, 25 bp, Homo sapien
cttgtggatacttcttttgtcaacc

SEQ ID NO: 4462262 - DNA, 25 bp, Homo sapien
tctcttgggaccggctaccaggagt

SEQ ID NO: 4462263 - DNA, 25 bp, Homo sapien
ttcagttttctcttgggaccggcta

SEQ ID NO: 4462264 - DNA, 25 bp, Homo sapien
tcagttttctcttgggaccggctac

SEQ ID NO: 4462265 - DNA, 25 bp, Homo sapien
tttctcttgggaccggctaccagga

SEQ ID NO: 4462266 - DNA, 25 bp, Homo sapien
catgttgtcggatctcttcccaaac

SEQ ID NO: 4462267 - DNA, 25 bp, Homo sapien
gcttccctatctcctcacacatgtt

SEQ ID NO: 4462268 - DNA, 25 bp, Homo sapien
ctccttattgatggcccttctctca

SEQ ID NO: 4462269 - DNA, 25 bp, Homo sapien
tggagataggttaaatgcatacagc

SEQ ID NO: 4462270 - DNA, 25 bp, Homo sapien
taactgtaatgagagacaccagccc

SEQ ID NO: 4462271 - DNA, 25 bp, Homo sapien
tagggaaacttccatgggccaacac

SEQ ID NO: 4462272 - DNA, 25 bp, Homo sapien
cagatgttgccgcatcaaaggcctc

SEQ ID NO: 4462273 - DNA, 25 bp, Homo sapien
gaggcaagtgtcttccctagtgaga

SEQ ID NO: 4462274 - DNA, 25 bp, Homo sapien
tgaaactgggcaccaacttcccgat

SEQ ID NO: 4462275 - DNA, 25 bp, Homo sapien
cgcttccttttgtggaggcatacca

SEQ ID NO: 4462276 - DNA, 25 bp, Homo sapien
tagcaatgaaggcaacacatgatgc

SEQ ID NO: 4462277 - DNA, 25 bp, Homo sapien
ataccaccgagaggacaggcttctg

SEQ ID NO: 4462278 - DNA, 25 bp, Homo sapien
ccctgggatcgaggatattcccaat

SEQ ID NO: 4462279 - DNA, 25 bp, Homo sapien
gaaatgggccctgggatcgaggata

SEQ ID NO: 4462280 - DNA, 25 bp, Homo sapien
ggccctgggatcgaggatattccca

SEQ ID NO: 4462281 - DNA, 25 bp, Homo sapien
tgggccctgggatcgaggatattcc

SEQ ID NO: 4462282 - DNA, 25 bp, Homo sapien
gatcctgggagcaagctactttgac

SEQ ID NO: 4462283 - DNA, 25 bp, Homo sapien
tgactcatagatgtaaacagtaaga

SEQ ID NO: 4462284 - DNA, 25 bp, Homo sapien
accaaactgttgatttgagccaaag

SEQ ID NO: 4462285 - DNA, 25 bp, Homo sapien
caaagtccttctcgttcaaaaatag

SEQ ID NO: 4462286 - DNA, 25 bp, Homo sapien
aagactgtcagtatcctaaggcaat

SEQ ID NO: 4462287 - DNA, 25 bp, Homo sapien
gaatcttacacaagacccgaccaag

SEQ ID NO: 4462288 - DNA, 25 bp, Homo sapien
acaggtgtggtaacttggctatctc

SEQ ID NO: 4462289 - DNA, 25 bp, Homo sapien
tatccgaatcgtgatacaggtgtgg

SEQ ID NO: 4462290 - DNA, 25 bp, Homo sapien
tattggaagtagtgagtgcattgcc

SEQ ID NO: 4462291 - DNA, 25 bp, Homo sapien
ttgaagttgcttgatggatgtatct

SEQ ID NO: 4462292 - DNA, 25 bp, Homo sapien
tgatggatgtatctgggtattggaa

SEQ ID NO: 4462293 - DNA, 25 bp, Homo sapien
cagcaagtttctgatgtgtttcaaa

SEQ ID NO: 4462294 - DNA, 25 bp, Homo sapien
tttaggaatccccagaagccgtggc

SEQ ID NO: 4462295 - DNA, 25 bp, Homo sapien
tgctctgacaaaagccaacccattc

SEQ ID NO: 4462296 - DNA, 25 bp, Homo sapien
gtgggtgtccgccaggtcctccagt

SEQ ID NO: 4462297 - DNA, 25 bp, Homo sapien
cagagcgataacatgatcaggttcc

SEQ ID NO: 4462298 - DNA, 25 bp, Homo sapien
gcatttccccttctatggtgcttcc

SEQ ID NO: 4462299 - DNA, 25 bp, Homo sapien
ttccccttctatggtgcttcctgct

SEQ ID NO: 4462300 - DNA, 25 bp, Homo sapien
acagcatttccccttctatggtgct

SEQ ID NO: 4462301 - DNA, 25 bp, Homo sapien
tccccttctatggtgcttcctgctc

SEQ ID NO: 4462302 - DNA, 25 bp, Homo sapien
cccgtggtgctgatgactgtgtgga

SEQ ID NO: 4462303 - DNA, 25 bp, Homo sapien
gccccgtggtgctgatgactgtgtg

SEQ ID NO: 4462304 - DNA, 25 bp, Homo sapien
ccccgtggtgctgatgactgtgtgg

SEQ ID NO: 4462305 - DNA, 25 bp, Homo sapien
ccgtggtgctgatgactgtgtggat

SEQ ID NO: 4462306 - DNA, 25 bp, Homo sapien
ccaagtttagaatcaggcttctcca

SEQ ID NO: 4462307 - DNA, 25 bp, Homo sapien
tctccaagtttagaatcaggcttct

SEQ ID NO: 4462308 - DNA, 25 bp, Homo sapien
tccaagtttagaatcaggcttctcc

SEQ ID NO: 4462309 - DNA, 25 bp, Homo sapien
ctccaagtttagaatcaggcttctc

SEQ ID NO: 4462310 - DNA, 25 bp, Homo sapien
tgcttcttgtcaaccgcgtgctggt

SEQ ID NO: 4462311 - DNA, 25 bp, Homo sapien
gctgcttcttgtcaaccgcgtgctg

SEQ ID NO: 4462312 - DNA, 25 bp, Homo sapien
tgctgcttcttgtcaaccgcgtgct

SEQ ID NO: 4462313 - DNA, 25 bp, Homo sapien
ctgcttcttgtcaaccgcgtgctgg

SEQ ID NO: 4462314 - DNA, 25 bp, Homo sapien
aaggaagtacctagctgctgaagct

SEQ ID NO: 4462315 - DNA, 25 bp, Homo sapien
tgctgaagctggcaattgctcgatg

SEQ ID NO: 4462316 - DNA, 25 bp, Homo sapien
gctggcaattgctcgatgagcccat

SEQ ID NO: 4462317 - DNA, 25 bp, Homo sapien
gaaggaagtacctagctgctgaagc

SEQ ID NO: 4462318 - DNA, 25 bp, Homo sapien
agtgactgggtatggtgaagtcacc

SEQ ID NO: 4462319 - DNA, 25 bp, Homo sapien
cagagtgactgggtatggtgaagtc

SEQ ID NO: 4462320 - DNA, 25 bp, Homo sapien
gcaggtgttcccttgcgtgtcagag

SEQ ID NO: 4462321 - DNA, 25 bp, Homo sapien
ttatttgggctgttgtcagagtgac

SEQ ID NO: 4462322 - DNA, 25 bp, Homo sapien
aagcaggactgagtatccgacattt

SEQ ID NO: 4462323 - DNA, 25 bp, Homo sapien
taagcaggactgagtatccgacatt

SEQ ID NO: 4462324 - DNA, 25 bp, Homo sapien
ctaagcaggactgagtatccgacat

SEQ ID NO: 4462325 - DNA, 25 bp, Homo sapien
gcaggactgagtatccgacatttac

SEQ ID NO: 4462326 - DNA, 25 bp, Homo sapien
agcatccttagcatatgattcatgc

SEQ ID NO: 4462327 - DNA, 25 bp, Homo sapien
gaacgccttgaagaacgctggctaa

SEQ ID NO: 4462328 - DNA, 25 bp, Homo sapien
ggagagtcacatgcagaacgccttg

SEQ ID NO: 4462329 - DNA, 25 bp, Homo sapien
tcatgcttcagtacaggagagtcac

SEQ ID NO: 4462330 - DNA, 25 bp, Homo sapien
cactcaggtccgaggaaaaaggagg

SEQ ID NO: 4462331 - DNA, 25 bp, Homo sapien
ggaaaaaggaggaagctcgtactgc

SEQ ID NO: 4462332 - DNA, 25 bp, Homo sapien
aaaaaggaggaagctcgtactgcat

SEQ ID NO: 4462333 - DNA, 25 bp, Homo sapien
caaccatccactcaggtccgaggaa

SEQ ID NO: 4462334 - DNA, 25 bp, Homo sapien
cagttcctggtggtgttcccttcca

SEQ ID NO: 4462335 - DNA, 25 bp, Homo sapien
ctggcataggtgaggtatcctctgg

SEQ ID NO: 4462336 - DNA, 25 bp, Homo sapien
cataggtgaggtatcctctggcagt

SEQ ID NO: 4462337 - DNA, 25 bp, Homo sapien
cctggtggtgttcccttccagagag

SEQ ID NO: 4462338 - DNA, 25 bp, Homo sapien
ggtggaaggagccaatgttggccaa

SEQ ID NO: 4462339 - DNA, 25 bp, Homo sapien
gctggaaataggtaattggtgacac

SEQ ID NO: 4462340 - DNA, 25 bp, Homo sapien
gccaatgttggccaaggtcctaggc

SEQ ID NO: 4462341 - DNA, 25 bp, Homo sapien
ggccaaggtcctaggccctacagct

SEQ ID NO: 4462342 - DNA, 25 bp, Homo sapien
ttctggaggacttaaggggaccaca

SEQ ID NO: 4462343 - DNA, 25 bp, Homo sapien
gcagatggagcggacccagtgcaga

SEQ ID NO: 4462344 - DNA, 25 bp, Homo sapien
gggctagaagccccggatccaaaca

SEQ ID NO: 4462345 - DNA, 25 bp, Homo sapien
accacaggcgccaggacacgggcag

SEQ ID NO: 4462346 - DNA, 25 bp, Homo sapien
ccactgaggttaaatcatggacggt

SEQ ID NO: 4462347 - DNA, 25 bp, Homo sapien
tggatggacctgcttgccttgcatt

SEQ ID NO: 4462348 - DNA, 25 bp, Homo sapien
cagtgtggagcgtttccactgaggt

SEQ ID NO: 4462349 - DNA, 25 bp, Homo sapien
tgaaagaactggatctggatggacc

SEQ ID NO: 4462350 - DNA, 25 bp, Homo sapien
tcacaaatccccagttgcaatgtga

SEQ ID NO: 4462351 - DNA, 25 bp, Homo sapien
aatccccagttgcaatgtgagcctg

SEQ ID NO: 4462352 - DNA, 25 bp, Homo sapien
ccccagttgcaatgtgagcctgtaa

SEQ ID NO: 4462353 - DNA, 25 bp, Homo sapien
caaatccccagttgcaatgtgagcc

SEQ ID NO: 4462354 - DNA, 25 bp, Homo sapien
agaatgtttgcaagtcccaaacctc

SEQ ID NO: 4462355 - DNA, 25 bp, Homo sapien
gatcctcctgattatggcagcccat

SEQ ID NO: 4462356 - DNA, 25 bp, Homo sapien
gagcctggttgaatcaagaatgttt

SEQ ID NO: 4462357 - DNA, 25 bp, Homo sapien
tagtgtgctctcctcatgcagatct

SEQ ID NO: 4462358 - DNA, 25 bp, Homo sapien
tgctccgggcagcagtgacctgctg

SEQ ID NO: 4462359 - DNA, 25 bp, Homo sapien
tagagttgaacaggccggtgctccg

SEQ ID NO: 4462360 - DNA, 25 bp, Homo sapien
gactgaggagggaatcgtccatccc

SEQ ID NO: 4462361 - DNA, 25 bp, Homo sapien
cgtccatcccggtgagatgtagagt

SEQ ID NO: 4462362 - DNA, 25 bp, Homo sapien
aattattaaagccccacctgtagag

SEQ ID NO: 4462363 - DNA, 25 bp, Homo sapien
ggagctggtgttcgccaagcttcat

SEQ ID NO: 4462364 - DNA, 25 bp, Homo sapien
ccttcttgcttcgtaattattaaag

SEQ ID NO: 4462365 - DNA, 25 bp, Homo sapien
ctgtagaggagctggtgttcgccaa

SEQ ID NO: 4462366 - DNA, 25 bp, Homo sapien
gaggttggcagtgtgctgcgtgcgc

SEQ ID NO: 4462367 - DNA, 25 bp, Homo sapien
caagcctgagcctgtattgacgtgt

SEQ ID NO: 4462368 - DNA, 25 bp, Homo sapien
cgtgcgcattgattgatatatgtgc

SEQ ID NO: 4462369 - DNA, 25 bp, Homo sapien
gagcctgtattgacgtgtgcaagga

SEQ ID NO: 4462370 - DNA, 25 bp, Homo sapien
gccaaatgcctgcatgcaaagcgga

SEQ ID NO: 4462371 - DNA, 25 bp, Homo sapien
tgcaaagcggacaactcaattgctc

SEQ ID NO: 4462372 - DNA, 25 bp, Homo sapien
tcaattgctcccagaggtgtccaaa

SEQ ID NO: 4462373 - DNA, 25 bp, Homo sapien
gacaactcaattgctcccagaggtg

SEQ ID NO: 4462374 - DNA, 25 bp, Homo sapien
tcatgggatagagccgggttgttca

SEQ ID NO: 4462375 - DNA, 25 bp, Homo sapien
acttgggatggctcgagtggatctc

SEQ ID NO: 4462376 - DNA, 25 bp, Homo sapien
tattttcagacgttttctctgccag

SEQ ID NO: 4462377 - DNA, 25 bp, Homo sapien
ggtccactacgctcctcttcatggg

SEQ ID NO: 4462378 - DNA, 25 bp, Homo sapien
ggggtagggaacacagctcatccca

SEQ ID NO: 4462379 - DNA, 25 bp, Homo sapien
gggtagggaacacagctcatcccac

SEQ ID NO: 4462380 - DNA, 25 bp, Homo sapien
gggggtagggaacacagctcatccc

SEQ ID NO: 4462381 - DNA, 25 bp, Homo sapien
cattgtctggagacttctggttaag

SEQ ID NO: 4462382 - DNA, 25 bp, Homo sapien
agccacagatctgaatcaaatcttg

SEQ ID NO: 4462383 - DNA, 25 bp, Homo sapien
atcaaatcttgcctaagaacctggg

SEQ ID NO: 4462384 - DNA, 25 bp, Homo sapien
ggacagggttctatgagtcatggct

SEQ ID NO: 4462385 - DNA, 25 bp, Homo sapien
cacagtgacctttaggccaagagtg

SEQ ID NO: 4462386 - DNA, 25 bp, Homo sapien
tggcacagtgacctttaggccaaga

SEQ ID NO: 4462387 - DNA, 25 bp, Homo sapien
cagtgacctttaggccaagagtggg

SEQ ID NO: 4462388 - DNA, 25 bp, Homo sapien
gcacagtgacctttaggccaagagt

SEQ ID NO: 4462389 - DNA, 25 bp, Homo sapien
ccacctctgaaatgtcagctaaaac

SEQ ID NO: 4462390 - DNA, 25 bp, Homo sapien
cacctctgaaatgtcagctaaaact

SEQ ID NO: 4462391 - DNA, 25 bp, Homo sapien
cctctgaaatgtcagctaaaactct

SEQ ID NO: 4462392 - DNA, 25 bp, Homo sapien
caacacatgcttctgacagtccagg

SEQ ID NO: 4462393 - DNA, 25 bp, Homo sapien
ggcattttggcacgtccagttctgt

SEQ ID NO: 4462394 - DNA, 25 bp, Homo sapien
gagtttatgtcagggatcggctgca

SEQ ID NO: 4462395 - DNA, 25 bp, Homo sapien
gtttctttgaaagcagcaggtgtag

SEQ ID NO: 4462396 - DNA, 25 bp, Homo sapien
tcaagccagccacattcgatgaagt

SEQ ID NO: 4462397 - DNA, 25 bp, Homo sapien
tcaagatacccaacgtcttgctcag

SEQ ID NO: 4462398 - DNA, 25 bp, Homo sapien
aagatacccaacgtcttgctcagac

SEQ ID NO: 4462399 - DNA, 25 bp, Homo sapien
cttctcaagatacccaacgtcttgc

SEQ ID NO: 4462400 - DNA, 25 bp, Homo sapien
gatacccaacgtcttgctcagaccg

SEQ ID NO: 4462401 - DNA, 25 bp, Homo sapien
tggtgtcacaggcagactgaagttg

SEQ ID NO: 4462402 - DNA, 25 bp, Homo sapien
ctcttatcacatagccttgatgtga

SEQ ID NO: 4462403 - DNA, 25 bp, Homo sapien
cttgatgtgataacgaaggttttaa

SEQ ID NO: 4462404 - DNA, 25 bp, Homo sapien
cagtgcagtaatgtccaggatttcc

SEQ ID NO: 4462405 - DNA, 25 bp, Homo sapien
gggacagttccgcaacacgtgcgcg

SEQ ID NO: 4462406 - DNA, 25 bp, Homo sapien
ggttaactagcacgggcagcatact

SEQ ID NO: 4462407 - DNA, 25 bp, Homo sapien
ctgggttaactagcacgggcagcat

SEQ ID NO: 4462408 - DNA, 25 bp, Homo sapien
cgtgcgcgggaagacaatgctctga

SEQ ID NO: 4462409 - DNA, 25 bp, Homo sapien
tcatgggtctgggttaacattggtc

SEQ ID NO: 4462410 - DNA, 25 bp, Homo sapien
gtcagccacggacgcaatccagttg

SEQ ID NO: 4462411 - DNA, 25 bp, Homo sapien
ggccactggaggctataaccaacga

SEQ ID NO: 4462412 - DNA, 25 bp, Homo sapien
ggttgttccagaagctagcctctca

SEQ ID NO: 4462413 - DNA, 25 bp, Homo sapien
gattcagtgtttgcaggacagcccc

SEQ ID NO: 4462414 - DNA, 25 bp, Homo sapien
attcagtgtttgcaggacagcccca

SEQ ID NO: 4462415 - DNA, 25 bp, Homo sapien
tggattagtcctttgaaacaaccaa

SEQ ID NO: 4462416 - DNA, 25 bp, Homo sapien
gaacaaaataccattgctggaacct

SEQ ID NO: 4462417 - DNA, 25 bp, Homo sapien
gtggaacaaaataccattgctggaa

SEQ ID NO: 4462418 - DNA, 25 bp, Homo sapien
tgctgatgcccgcagcaaggtgccg

SEQ ID NO: 4462419 - DNA, 25 bp, Homo sapien
aaataccattgctggaacctccaca

SEQ ID NO: 4462420 - DNA, 25 bp, Homo sapien
gaaagcccttgctccattgaagtgt

SEQ ID NO: 4462421 - DNA, 25 bp, Homo sapien
gaagtgttgtgcatccagccgatga

SEQ ID NO: 4462422 - DNA, 25 bp, Homo sapien
gatggagcaagagggcaggtacaac

SEQ ID NO: 4462423 - DNA, 25 bp, Homo sapien
gacagcatccgtggccgggtatgta

SEQ ID NO: 4462424 - DNA, 25 bp, Homo sapien
cagtgaagcctaattcaccagggtt

SEQ ID NO: 4462425 - DNA, 25 bp, Homo sapien
tgcaaggcagtgaagcctaattcac

SEQ ID NO: 4462426 - DNA, 25 bp, Homo sapien
aggaagtctgcaaggcagtgaagcc

SEQ ID NO: 4462427 - DNA, 25 bp, Homo sapien
taggaagtctgcaaggcagtgaagc

SEQ ID NO: 4462428 - DNA, 25 bp, Homo sapien
tgaatcctattcaaccgcctccttg

SEQ ID NO: 4462429 - DNA, 25 bp, Homo sapien
cgcctccttgtgatttggacatgaa

SEQ ID NO: 4462430 - DNA, 25 bp, Homo sapien
gaattaccacggcaagcattgttct

SEQ ID NO: 4462431 - DNA, 25 bp, Homo sapien
gaaagctttctcgtcccactattgg

SEQ ID NO: 4462432 - DNA, 25 bp, Homo sapien
tctggagctaatattgttcctctca

SEQ ID NO: 4462433 - DNA, 25 bp, Homo sapien
ccgcctcttgctgcccgtttgactt

SEQ ID NO: 4462434 - DNA, 25 bp, Homo sapien
ttgctgcccgtttgacttttctact

SEQ ID NO: 4462435 - DNA, 25 bp, Homo sapien
agccttgacctgagggtctccctgg

SEQ ID NO: 4462436 - DNA, 25 bp, Homo sapien
aagcaggtcatttgatgttgaagca

SEQ ID NO: 4462437 - DNA, 25 bp, Homo sapien
ctttggttaaagctgtgtccttggg

SEQ ID NO: 4462438 - DNA, 25 bp, Homo sapien
cataacaggagacaccctggtgatt

SEQ ID NO: 4462439 - DNA, 25 bp, Homo sapien
gggtaacctggtgaagcaggtcatt

SEQ ID NO: 4462440 - DNA, 25 bp, Homo sapien
cttggaaattcaactgcatatcggc

SEQ ID NO: 4462441 - DNA, 25 bp, Homo sapien
ccagacaaacggatacaagggaatc

SEQ ID NO: 4462442 - DNA, 25 bp, Homo sapien
cagacaaacggatacaagggaatcc

SEQ ID NO: 4462443 - DNA, 25 bp, Homo sapien
actgcatatcggctgctttgatttc

SEQ ID NO: 4462444 - DNA, 25 bp, Homo sapien
cagggagctgccgtgttaaaaaatg

SEQ ID NO: 4462445 - DNA, 25 bp, Homo sapien
aagcggtgagggctcttcacaggaa

SEQ ID NO: 4462446 - DNA, 25 bp, Homo sapien
tcgctgaagcggctttgccagcttc

SEQ ID NO: 4462447 - DNA, 25 bp, Homo sapien
acaggaagaactctggctgcgggcc

SEQ ID NO: 4462448 - DNA, 25 bp, Homo sapien
cagggatgtttaagttgcacctcac

SEQ ID NO: 4462449 - DNA, 25 bp, Homo sapien
gatgctgtgacaacgagccctggtg

SEQ ID NO: 4462450 - DNA, 25 bp, Homo sapien
gccctggtgtctgtgcgatttcatt

SEQ ID NO: 4462451 - DNA, 25 bp, Homo sapien
gcgatttcatttcccgccttgcctg

SEQ ID NO: 4462452 - DNA, 25 bp, Homo sapien
taagatgaccctttactgatggaat

SEQ ID NO: 4462453 - DNA, 25 bp, Homo sapien
ggctgtacttgaccatgtgcgttgt

SEQ ID NO: 4462454 - DNA, 25 bp, Homo sapien
tgaacaaattgagcagtgaagcctt

SEQ ID NO: 4462455 - DNA, 25 bp, Homo sapien
tctaagtgcttacaggatgagtggg

SEQ ID NO: 4462456 - DNA, 25 bp, Homo sapien
ttgagtactacccaagtgtcaggcc

SEQ ID NO: 4462457 - DNA, 25 bp, Homo sapien
gctcttgaatttccactcaggcctg

SEQ ID NO: 4462458 - DNA, 25 bp, Homo sapien
gtgtcaggccccacttagataaagt

SEQ ID NO: 4462459 - DNA, 25 bp, Homo sapien
gctgagcctcttagaggttaagtga

SEQ ID NO: 4462460 - DNA, 25 bp, Homo sapien
ctctgtcttctcaaccttgggtaga

SEQ ID NO: 4462461 - DNA, 25 bp, Homo sapien
tctcaaccttgggtagatattctgt

SEQ ID NO: 4462462 - DNA, 25 bp, Homo sapien
ccaggacccactcctgaagctgcct

SEQ ID NO: 4462463 - DNA, 25 bp, Homo sapien
tgggtagatattctgtcctgaccat

SEQ ID NO: 4462464 - DNA, 25 bp, Homo sapien
taagttagggcagaactggagtgaa

SEQ ID NO: 4462465 - DNA, 25 bp, Homo sapien
gacctggtgatccacagatgagtga

SEQ ID NO: 4462466 - DNA, 25 bp, Homo sapien
gaaaggccctgatatgtaataagtt

SEQ ID NO: 4462467 - DNA, 25 bp, Homo sapien
taaacaacatcgaaaacgtctccca

SEQ ID NO: 4462468 - DNA, 25 bp, Homo sapien
cccagaatagggagtcctggtctct

SEQ ID NO: 4462469 - DNA, 25 bp, Homo sapien
cattactgaggtcattggttcatgc

SEQ ID NO: 4462470 - DNA, 25 bp, Homo sapien
acatgggttcatccctgagcaaggg

SEQ ID NO: 4462471 - DNA, 25 bp, Homo sapien
tggtctctggaaccattactgaggt

SEQ ID NO: 4462472 - DNA, 25 bp, Homo sapien
tgtcatagggaaatccaaaggcttc

SEQ ID NO: 4462473 - DNA, 25 bp, Homo sapien
catctattgcatgaggcagtacacc

SEQ ID NO: 4462474 - DNA, 25 bp, Homo sapien
taaaggtggagggaaatatcaagtc

SEQ ID NO: 4462475 - DNA, 25 bp, Homo sapien
gagacttagctccttcgctgtgtaa

SEQ ID NO: 4462476 - DNA, 25 bp, Homo sapien
gtagaaacaacagatcctgctggtc

SEQ ID NO: 4462477 - DNA, 25 bp, Homo sapien
caatagggcccataaacgcgtccaa

SEQ ID NO: 4462478 - DNA, 25 bp, Homo sapien
gcttgccaaatcggccaatagggcc

SEQ ID NO: 4462479 - DNA, 25 bp, Homo sapien
ggatggttccggaagacattttata

SEQ ID NO: 4462480 - DNA, 25 bp, Homo sapien
caatccctgggttgtttgtctacag

SEQ ID NO: 4462481 - DNA, 25 bp, Homo sapien
gaatctctggagaaaatggctcctg

SEQ ID NO: 4462482 - DNA, 25 bp, Homo sapien
tcagtataccaagcagcatgcaggg

SEQ ID NO: 4462483 - DNA, 25 bp, Homo sapien
ttggcagaaccacgctttctgtggg

SEQ ID NO: 4462484 - DNA, 25 bp, Homo sapien
ggacatgcttcaacttgcctggaga

SEQ ID NO: 4462485 - DNA, 25 bp, Homo sapien
tctctctggaggtaataatgacaaa

SEQ ID NO: 4462486 - DNA, 25 bp, Homo sapien
gtgtgagcagatccctgggtgtctc

SEQ ID NO: 4462487 - DNA, 25 bp, Homo sapien
agctgtccagggttcaggtggcttt

SEQ ID NO: 4462488 - DNA, 25 bp, Homo sapien
tcagcagagtacctggaatggaact

SEQ ID NO: 4462489 - DNA, 25 bp, Homo sapien
gccagtgtccttgcagtctgaatat

SEQ ID NO: 4462490 - DNA, 25 bp, Homo sapien
tagcccacctaggttctaaagagct

SEQ ID NO: 4462491 - DNA, 25 bp, Homo sapien
caagcaggtcgaagcttgggagcca

SEQ ID NO: 4462492 - DNA, 25 bp, Homo sapien
caataagggcacttggcaaccagaa

SEQ ID NO: 4462493 - DNA, 25 bp, Homo sapien
tggaataccaagacgttggccaatt

SEQ ID NO: 4462494 - DNA, 25 bp, Homo sapien
catttggtgccctgagataaaggac

SEQ ID NO: 4462495 - DNA, 25 bp, Homo sapien
agcacagcctgtcacgtggcagtca

SEQ ID NO: 4462496 - DNA, 25 bp, Homo sapien
agggccagcactctgtaggtgagtg

SEQ ID NO: 4462497 - DNA, 25 bp, Homo sapien
cagggccagcactctgtaggtgagt

SEQ ID NO: 4462498 - DNA, 25 bp, Homo sapien
gggccagcactctgtaggtgagtgc

SEQ ID NO: 4462499 - DNA, 25 bp, Homo sapien
ccagggccagcactctgtaggtgag

SEQ ID NO: 4462500 - DNA, 25 bp, Homo sapien
agaggacggcatcctgtgtgcaaga

SEQ ID NO: 4462501 - DNA, 25 bp, Homo sapien
aagatgaaaacgacagcttctttgg

SEQ ID NO: 4462502 - DNA, 25 bp, Homo sapien
gtgcaagatgaaaacgacagcttct

SEQ ID NO: 4462503 - DNA, 25 bp, Homo sapien
cggcatcctgtgtgcaagatgaaaa

SEQ ID NO: 4462504 - DNA, 25 bp, Homo sapien
tccatgaatatgttgcaaaaggctc

SEQ ID NO: 4462505 - DNA, 25 bp, Homo sapien
ccagctgttgtgtgtgaaagattat

SEQ ID NO: 4462506 - DNA, 25 bp, Homo sapien
agattatttcttcagggtgccactg

SEQ ID NO: 4462507 - DNA, 25 bp, Homo sapien
atttcttcagggtgccactgtggtc

SEQ ID NO: 4462508 - DNA, 25 bp, Homo sapien
ggacacttcaaggaaggaattcaga

SEQ ID NO: 4462509 - DNA, 25 bp, Homo sapien
tggacacttcaaggaaggaattcag

SEQ ID NO: 4462510 - DNA, 25 bp, Homo sapien
aggaaggaattcagaagtctaactt

SEQ ID NO: 4462511 - DNA, 25 bp, Homo sapien
gacacttcaaggaaggaattcagaa

SEQ ID NO: 4462512 - DNA, 25 bp, Homo sapien
tcacagacagggagttcttccccag

SEQ ID NO: 4462513 - DNA, 25 bp, Homo sapien
ctcacagacagggagttcttcccca

SEQ ID NO: 4462514 - DNA, 25 bp, Homo sapien
ttaccgaacgactgtcagctgcaag

SEQ ID NO: 4462515 - DNA, 25 bp, Homo sapien
gactgtcagctgcaagactccaatg

SEQ ID NO: 4462516 - DNA, 25 bp, Homo sapien
agctgcaagactccaatgcgcttct

SEQ ID NO: 4462517 - DNA, 25 bp, Homo sapien
gaacgactgtcagctgcaagactcc

SEQ ID NO: 4462518 - DNA, 25 bp, Homo sapien
cagccaattacaggcaaatgggtta

SEQ ID NO: 4462519 - DNA, 25 bp, Homo sapien
tcctcagcttgtgtgggatcactgt

SEQ ID NO: 4462520 - DNA, 25 bp, Homo sapien
tgtagtgcaggaacaaatgactggt

SEQ ID NO: 4462521 - DNA, 25 bp, Homo sapien
ccagcgaggagatgtctacacaaag

SEQ ID NO: 4462522 - DNA, 25 bp, Homo sapien
tggcaactggattgattatcacagg

SEQ ID NO: 4462523 - DNA, 25 bp, Homo sapien
ttatcacaggtacctcaggaccagc

SEQ ID NO: 4462524 - DNA, 25 bp, Homo sapien
gctccaggtcgcatagtggtaaatg

SEQ ID NO: 4462525 - DNA, 25 bp, Homo sapien
tggtaaatgaacacttaaggccgct

SEQ ID NO: 4462526 - DNA, 25 bp, Homo sapien
tcggtagttgtagcctggagagcct

SEQ ID NO: 4462527 - DNA, 25 bp, Homo sapien
caacgtttcccctgacgggagctca

SEQ ID NO: 4462528 - DNA, 25 bp, Homo sapien
cgggagctcatgcaagccactgtgt

SEQ ID NO: 4462529 - DNA, 25 bp, Homo sapien
gcagccatgatataacaacgtttcc

SEQ ID NO: 4462530 - DNA, 25 bp, Homo sapien
gctacaggaattgcatgagagcacc

SEQ ID NO: 4462531 - DNA, 25 bp, Homo sapien
ggaagggaccacaaaatcaatctag

SEQ ID NO: 4462532 - DNA, 25 bp, Homo sapien
tgtctatctcaagtgctatctcagc

SEQ ID NO: 4462533 - DNA, 25 bp, Homo sapien
cttgttaaatgtgccagccgtaagc

SEQ ID NO: 4462534 - DNA, 25 bp, Homo sapien
cctggaatgtgctagcagagctaac

SEQ ID NO: 4462535 - DNA, 25 bp, Homo sapien
tctcctggaatgtgctagcagagct

SEQ ID NO: 4462536 - DNA, 25 bp, Homo sapien
tcctggaatgtgctagcagagctaa

SEQ ID NO: 4462537 - DNA, 25 bp, Homo sapien
ggaatgtgctagcagagctaactgg

SEQ ID NO: 4462538 - DNA, 25 bp, Homo sapien
cctcccacatcagcaactgtggcgc

SEQ ID NO: 4462539 - DNA, 25 bp, Homo sapien
ccacatcagcaactgtggcgctctt

SEQ ID NO: 4462540 - DNA, 25 bp, Homo sapien
atcagcaactgtggcgctctttgcc

SEQ ID NO: 4462541 - DNA, 25 bp, Homo sapien
caactgtggcgctctttgccaaagg

SEQ ID NO: 4462542 - DNA, 25 bp, Homo sapien
gcttctcccagaagggtcacttgca

SEQ ID NO: 4462543 - DNA, 25 bp, Homo sapien
gaagggtcacttgcatatgcttctg

SEQ ID NO: 4462544 - DNA, 25 bp, Homo sapien
ccagaagggtcacttgcatatgctt

SEQ ID NO: 4462545 - DNA, 25 bp, Homo sapien
tctcccagaagggtcacttgcatat

SEQ ID NO: 4462546 - DNA, 25 bp, Homo sapien
tcagtggtgtttcccctgtgccaca

SEQ ID NO: 4462547 - DNA, 25 bp, Homo sapien
tagcttcatttgcatgcccttaaga

SEQ ID NO: 4462548 - DNA, 25 bp, Homo sapien
tatcgaatgaattgagggactggcc

SEQ ID NO: 4462549 - DNA, 25 bp, Homo sapien
gtctctggaatagcgtaagcaccaa

SEQ ID NO: 4462550 - DNA, 25 bp, Homo sapien
taacagctgggatgtgccgtttgtc

SEQ ID NO: 4462551 - DNA, 25 bp, Homo sapien
gctacaagggtcgtgagggcaactt

SEQ ID NO: 4462552 - DNA, 25 bp, Homo sapien
tcaccactgttacaagtttcagagt

SEQ ID NO: 4462553 - DNA, 25 bp, Homo sapien
ttgtaagccgaataatgttaacagc

SEQ ID NO: 4462554 - DNA, 25 bp, Homo sapien
gttacacgcattgagtcccgcaggg

SEQ ID NO: 4462555 - DNA, 25 bp, Homo sapien
cagaattgaaatgtcgccgctgatg

SEQ ID NO: 4462556 - DNA, 25 bp, Homo sapien
cacgtggtctgatcaaactggcaga

SEQ ID NO: 4462557 - DNA, 25 bp, Homo sapien
taggtaggtgaggattctaacgccc

SEQ ID NO: 4462558 - DNA, 25 bp, Homo sapien
tgtgtcagcacaacaggcataaacc

SEQ ID NO: 4462559 - DNA, 25 bp, Homo sapien
caaatacttggtgtgcgagcgagga

SEQ ID NO: 4462560 - DNA, 25 bp, Homo sapien
cattattgcccaaacaagacgcttt

SEQ ID NO: 4462561 - DNA, 25 bp, Homo sapien
aatggttttaatgagcccgtctggg

SEQ ID NO: 4462562 - DNA, 25 bp, Homo sapien
agatgagcccatgtctaaagctccc

SEQ ID NO: 4462563 - DNA, 25 bp, Homo sapien
gatgagcccatgtctaaagctccca

SEQ ID NO: 4462564 - DNA, 25 bp, Homo sapien
cagatgagcccatgtctaaagctcc

SEQ ID NO: 4462565 - DNA, 25 bp, Homo sapien
taaaggtattggctgtttgatcagc

SEQ ID NO: 4462566 - DNA, 25 bp, Homo sapien
atcagtttacattcctgaagaatat

SEQ ID NO: 4462567 - DNA, 25 bp, Homo sapien
gagaacccaagttcttccaggatct

SEQ ID NO: 4462568 - DNA, 25 bp, Homo sapien
aggatctgctgtcttatcagtttac

SEQ ID NO: 4462569 - DNA, 25 bp, Homo sapien
tgagtctccccttacccagtctgta

SEQ ID NO: 4462570 - DNA, 25 bp, Homo sapien
gagtctccccttacccagtctgtag

SEQ ID NO: 4462571 - DNA, 25 bp, Homo sapien
tgtcagggagccagctgcactggct

SEQ ID NO: 4462572 - DNA, 25 bp, Homo sapien
ccagctcaaattggctgatttttcc

SEQ ID NO: 4462573 - DNA, 25 bp, Homo sapien
gctaacaaccagctcaaattggctg

SEQ ID NO: 4462574 - DNA, 25 bp, Homo sapien
gagccagctgcactggctcagctga

SEQ ID NO: 4462575 - DNA, 25 bp, Homo sapien
gaggcaggccctcatttatctgagc

SEQ ID NO: 4462576 - DNA, 25 bp, Homo sapien
ccctcatttatctgagcctctgtac

SEQ ID NO: 4462577 - DNA, 25 bp, Homo sapien
ctgaggcaggccctcatttatctga

SEQ ID NO: 4462578 - DNA, 25 bp, Homo sapien
ggccctcatttatctgagcctctgt

SEQ ID NO: 4462579 - DNA, 25 bp, Homo sapien
aacagaatggtcagatgtgcgttct

SEQ ID NO: 4462580 - DNA, 25 bp, Homo sapien
cagaatggtcagatgtgcgttcttt

SEQ ID NO: 4462581 - DNA, 25 bp, Homo sapien
acagaatggtcagatgtgcgttctt

SEQ ID NO: 4462582 - DNA, 25 bp, Homo sapien
tgatgtcccttcactcaccagtgtg

SEQ ID NO: 4462583 - DNA, 25 bp, Homo sapien
tgttcccaggccttaaaatgtccag

SEQ ID NO: 4462584 - DNA, 25 bp, Homo sapien
tattttccgtcaggttagcagcttc

SEQ ID NO: 4462585 - DNA, 25 bp, Homo sapien
cattagttggctggtcagtagaaca

SEQ ID NO: 4462586 - DNA, 25 bp, Homo sapien
cccaagagggtaagatgcttatctc

SEQ ID NO: 4462587 - DNA, 25 bp, Homo sapien
gcttatctcaggtgtccccacatga

SEQ ID NO: 4462588 - DNA, 25 bp, Homo sapien
taaaagatcatcatgagctggagga

SEQ ID NO: 4462589 - DNA, 25 bp, Homo sapien
tgggtccacccaggtcctctaattc

SEQ ID NO: 4462590 - DNA, 25 bp, Homo sapien
tccagcagaccatggattggtaact

SEQ ID NO: 4462591 - DNA, 25 bp, Homo sapien
tagttccaatgggaatctgagccct

SEQ ID NO: 4462592 - DNA, 25 bp, Homo sapien
aaaagcgttgtttcctccagcagac

SEQ ID NO: 4462593 - DNA, 25 bp, Homo sapien
tttcaaggaaactagcccagcacat

SEQ ID NO: 4462594 - DNA, 25 bp, Homo sapien
actaatgtcatgtggacatggtttc

SEQ ID NO: 4462595 - DNA, 25 bp, Homo sapien
tgggactaagtcctccttcctagat

SEQ ID NO: 4462596 - DNA, 25 bp, Homo sapien
agaagggaactgaaacctctcaggg

SEQ ID NO: 4462597 - DNA, 25 bp, Homo sapien
tcctagatgcaggtactaatgtcat

SEQ ID NO: 4462598 - DNA, 25 bp, Homo sapien
tattggttcatatgctgcagcttca

SEQ ID NO: 4462599 - DNA, 25 bp, Homo sapien
gaggtagctttattggttcatatgc

SEQ ID NO: 4462600 - DNA, 25 bp, Homo sapien
cttgcttccatgttactcagaggta

SEQ ID NO: 4462601 - DNA, 25 bp, Homo sapien
tactcagaggtagctttattggttc

SEQ ID NO: 4462602 - DNA, 25 bp, Homo sapien
tgtgccttgggactctggaccttgc

SEQ ID NO: 4462603 - DNA, 25 bp, Homo sapien
tggaccttgcagaaatacttatggc

SEQ ID NO: 4462604 - DNA, 25 bp, Homo sapien
gctccggggacctggaccagacagc

SEQ ID NO: 4462605 - DNA, 25 bp, Homo sapien
gacaggtatacttcttagctccggg

SEQ ID NO: 4462606 - DNA, 25 bp, Homo sapien
tgattcccacaatgctgatttaggc

SEQ ID NO: 4462607 - DNA, 25 bp, Homo sapien
tgctgatttaggcattttacatttt

SEQ ID NO: 4462608 - DNA, 25 bp, Homo sapien
cacaatgctgatttaggcattttac

SEQ ID NO: 4462609 - DNA, 25 bp, Homo sapien
ttcccacaatgctgatttaggcatt

SEQ ID NO: 4462610 - DNA, 25 bp, Homo sapien
tgaacagatgagcacctacgcttct

SEQ ID NO: 4462611 - DNA, 25 bp, Homo sapien
gaaattgcaggtgagcaaaaggcct

SEQ ID NO: 4462612 - DNA, 25 bp, Homo sapien
attctgaggtccaaggatttgggca

SEQ ID NO: 4462613 - DNA, 25 bp, Homo sapien
taataatagcacagacttcatggca

SEQ ID NO: 4462614 - DNA, 25 bp, Homo sapien
aatgtattccgctgggcatgttctg

SEQ ID NO: 4462615 - DNA, 25 bp, Homo sapien
aaatttggggcgagtgatgccagca

SEQ ID NO: 4462616 - DNA, 25 bp, Homo sapien
tcaatttcagaggagctgcgtggag

SEQ ID NO: 4462617 - DNA, 25 bp, Homo sapien
gcgtggagcgctgtgtaatgtattc

SEQ ID NO: 4462618 - DNA, 25 bp, Homo sapien
cgtccccagcgttggaacacaggtg

SEQ ID NO: 4462619 - DNA, 25 bp, Homo sapien
aggcctctcccgtccccagcgttgg

SEQ ID NO: 4462620 - DNA, 25 bp, Homo sapien
aacttggtgcttgccgcagctgcta

SEQ ID NO: 4462621 - DNA, 25 bp, Homo sapien
gtgaacttggtgcttgccgcagctg

SEQ ID NO: 4462622 - DNA, 25 bp, Homo sapien
ggtgtcctgtgttcacccttatatt

SEQ ID NO: 4462623 - DNA, 25 bp, Homo sapien
tctgagtcgcattttcatctctaga

SEQ ID NO: 4462624 - DNA, 25 bp, Homo sapien
ggtaatgactcaaggacaacagctc

SEQ ID NO: 4462625 - DNA, 25 bp, Homo sapien
tagtcacaaagactgtctgagtcgc

SEQ ID NO: 4462626 - DNA, 25 bp, Homo sapien
gcctctatatagactgactcaagca

SEQ ID NO: 4462627 - DNA, 25 bp, Homo sapien
caacagctttcaactaagatccagg

SEQ ID NO: 4462628 - DNA, 25 bp, Homo sapien
taaatattccctgacctgtaagcta

SEQ ID NO: 4462629 - DNA, 25 bp, Homo sapien
ggtaaataatcctccctactggcag

SEQ ID NO: 4462630 - DNA, 25 bp, Homo sapien
atgccacagaagaagtttgttgaga

SEQ ID NO: 4462631 - DNA, 25 bp, Homo sapien
ggctgataacggcagctgacagtga

SEQ ID NO: 4462632 - DNA, 25 bp, Homo sapien
tgataacggcagctgacagtgattg

SEQ ID NO: 4462633 - DNA, 25 bp, Homo sapien
catgccacagaagaagtttgttgag

SEQ ID NO: 4462634 - DNA, 25 bp, Homo sapien
aatttttacaggcttctggaggatc

SEQ ID NO: 4462635 - DNA, 25 bp, Homo sapien
atttttacaggcttctggaggatct

SEQ ID NO: 4462636 - DNA, 25 bp, Homo sapien
tttttacaggcttctggaggatctg

SEQ ID NO: 4462637 - DNA, 25 bp, Homo sapien
agtgagataagttaagcttcctaag

SEQ ID NO: 4462638 - DNA, 25 bp, Homo sapien
gtgagataagttaagcttcctaagg

SEQ ID NO: 4462639 - DNA, 25 bp, Homo sapien
tgagataagttaagcttcctaaggg

SEQ ID NO: 4462640 - DNA, 25 bp, Homo sapien
cagtgagataagttaagcttcctaa

SEQ ID NO: 4462641 - DNA, 25 bp, Homo sapien
tgccacgaagtccttttcccttagc

SEQ ID NO: 4462642 - DNA, 25 bp, Homo sapien
tctctgcatgccacgaagtcctttt

SEQ ID NO: 4462643 - DNA, 25 bp, Homo sapien
agttgtgcctgttgttctctgcatg

SEQ ID NO: 4462644 - DNA, 25 bp, Homo sapien
aaagtgatcagacattccgtttgtg

SEQ ID NO: 4462645 - DNA, 25 bp, Homo sapien
ggctcgcctctggctcactcaggtg

SEQ ID NO: 4462646 - DNA, 25 bp, Homo sapien
tggcagcaggatgattgcgacactc

SEQ ID NO: 4462647 - DNA, 25 bp, Homo sapien
caggtggatctctaagctgctccag

SEQ ID NO: 4462648 - DNA, 25 bp, Homo sapien
ggatgattgcgacactcagttccat

SEQ ID NO: 4462649 - DNA, 25 bp, Homo sapien
aaatgaaggactaggtagagctgcc

SEQ ID NO: 4462650 - DNA, 25 bp, Homo sapien
tcagcggttgagaactccgaggcag

SEQ ID NO: 4462651 - DNA, 25 bp, Homo sapien
aaagatgctctccaagaagggcctt

SEQ ID NO: 4462652 - DNA, 25 bp, Homo sapien
gaggcagccatttcgagcaaaagat

SEQ ID NO: 4462653 - DNA, 25 bp, Homo sapien
caaagaaggccctctgtggttttga

SEQ ID NO: 4462654 - DNA, 25 bp, Homo sapien
gaagagagctagtgcaaatccctgg

SEQ ID NO: 4462655 - DNA, 25 bp, Homo sapien
ttttgaaggccgctcagcatgccag

SEQ ID NO: 4462656 - DNA, 25 bp, Homo sapien
ggcataaggacggtcagaacccact

SEQ ID NO: 4462657 - DNA, 25 bp, Homo sapien
aaacacgtgagtcacctctgcattc

SEQ ID NO: 4462658 - DNA, 25 bp, Homo sapien
taaacacgtgagtcacctctgcatt

SEQ ID NO: 4462659 - DNA, 25 bp, Homo sapien
gtcctctctgccgtgtgactcttga

SEQ ID NO: 4462660 - DNA, 25 bp, Homo sapien
tctctgccgtgtgactcttgacaga

SEQ ID NO: 4462661 - DNA, 25 bp, Homo sapien
cccgggacaggagtcttgtcctctc

SEQ ID NO: 4462662 - DNA, 25 bp, Homo sapien
cagttcccccgggacaggagtcttg

SEQ ID NO: 4462663 - DNA, 25 bp, Homo sapien
ctttcagggcaggggctgtcacgaa

SEQ ID NO: 4462664 - DNA, 25 bp, Homo sapien
ggctttcagggcaggggctgtcacg

SEQ ID NO: 4462665 - DNA, 25 bp, Homo sapien
agggcaggggctgtcacgaagatat

SEQ ID NO: 4462666 - DNA, 25 bp, Homo sapien
tcagggcaggggctgtcacgaagat

SEQ ID NO: 4462667 - DNA, 25 bp, Homo sapien
cctgcagttaagaagtacttgggcc

SEQ ID NO: 4462668 - DNA, 25 bp, Homo sapien
ggccagatcagaccacatgggcagt

SEQ ID NO: 4462669 - DNA, 25 bp, Homo sapien
tttagactttgtgagccacgggtgc

SEQ ID NO: 4462670 - DNA, 25 bp, Homo sapien
ccacgggtgcgtgtctcatgactca

SEQ ID NO: 4462671 - DNA, 25 bp, Homo sapien
gcattcaggtcaagtggaggattct

SEQ ID NO: 4462672 - DNA, 25 bp, Homo sapien
ggatgctttgatgaaatacccgata

SEQ ID NO: 4462673 - DNA, 25 bp, Homo sapien
gaaatacccgataggattcctgtcc

SEQ ID NO: 4462674 - DNA, 25 bp, Homo sapien
tggagccacacttaaaactgctgtg

SEQ ID NO: 4462675 - DNA, 25 bp, Homo sapien
ctaggtggcacagctgtcctggtgt

SEQ ID NO: 4462676 - DNA, 25 bp, Homo sapien
ggtggcacagctgtcctggtgtctt

SEQ ID NO: 4462677 - DNA, 25 bp, Homo sapien
taggtggcacagctgtcctggtgtc

SEQ ID NO: 4462678 - DNA, 25 bp, Homo sapien
tggcacagctgtcctggtgtcttac

SEQ ID NO: 4462679 - DNA, 25 bp, Homo sapien
cgtgaaactgtattcacaaccccgt

SEQ ID NO: 4462680 - DNA, 25 bp, Homo sapien
cccgtgccttctcgctgagctttct

SEQ ID NO: 4462681 - DNA, 25 bp, Homo sapien
gaaactgtattcacaaccccgtgcc

SEQ ID NO: 4462682 - DNA, 25 bp, Homo sapien
aaccccgtgccttctcgctgagctt

SEQ ID NO: 4462683 - DNA, 25 bp, Homo sapien
catctgcccatttgtagctgatcag

SEQ ID NO: 4462684 - DNA, 25 bp, Homo sapien
cctggcatctgcccatttgtagctg

SEQ ID NO: 4462685 - DNA, 25 bp, Homo sapien
gcatctgcccatttgtagctgatca

SEQ ID NO: 4462686 - DNA, 25 bp, Homo sapien
tggcatctgcccatttgtagctgat

SEQ ID NO: 4462687 - DNA, 25 bp, Homo sapien
tgtggcctcggtcccttagtgaagc

SEQ ID NO: 4462688 - DNA, 25 bp, Homo sapien
gaagccatgcttactccaggaactg

SEQ ID NO: 4462689 - DNA, 25 bp, Homo sapien
gctgcgatgaagagtggtgaaaatt

SEQ ID NO: 4462690 - DNA, 25 bp, Homo sapien
ccaggaactgctgcgatgaagagtg

SEQ ID NO: 4462691 - DNA, 25 bp, Homo sapien
attttgtagggtgggcctaataatg

SEQ ID NO: 4462692 - DNA, 25 bp, Homo sapien
gcagcctccgttttgctaaagtcat

SEQ ID NO: 4462693 - DNA, 25 bp, Homo sapien
tcgaaaacacctaaagaacctgaca

SEQ ID NO: 4462694 - DNA, 25 bp, Homo sapien
gacctgaacatcgaaaacacctaaa

SEQ ID NO: 4462695 - DNA, 25 bp, Homo sapien
catgtaagaatgactcgcaaaatcc

SEQ ID NO: 4462696 - DNA, 25 bp, Homo sapien
tcaaacttccccatccgtagtggtc

SEQ ID NO: 4462697 - DNA, 25 bp, Homo sapien
tagtcccacaggatcttttgctgaa

SEQ ID NO: 4462698 - DNA, 25 bp, Homo sapien
ggtctaaatgcctgtccttcaaact

SEQ ID NO: 4462699 - DNA, 25 bp, Homo sapien
tctctgtaggagactataatctgtc

SEQ ID NO: 4462700 - DNA, 25 bp, Homo sapien
ctgtcttcagagctgtaacatccct

SEQ ID NO: 4462701 - DNA, 25 bp, Homo sapien
aggaagatgcaggagtatttgtgca

SEQ ID NO: 4462702 - DNA, 25 bp, Homo sapien
gaaaggccatgactgatagacatta

SEQ ID NO: 4462703 - DNA, 25 bp, Homo sapien
gtcatgacagccacctgaaaccagg

SEQ ID NO: 4462704 - DNA, 25 bp, Homo sapien
ctgcaatgcattaactctcccagga

SEQ ID NO: 4462705 - DNA, 25 bp, Homo sapien
cccatggcaagtgcctgctctcagg

SEQ ID NO: 4462706 - DNA, 25 bp, Homo sapien
gaaagagatgtccaagtaccaggga

SEQ ID NO: 4462707 - DNA, 25 bp, Homo sapien
tggataaggcactcctgttgcatgc

SEQ ID NO: 4462708 - DNA, 25 bp, Homo sapien
gggatggagactgctttttcaattg

SEQ ID NO: 4462709 - DNA, 25 bp, Homo sapien
tcactcggggatggagactgctttt

SEQ ID NO: 4462710 - DNA, 25 bp, Homo sapien
gctttttcaattggataaggcactc

SEQ ID NO: 4462711 - DNA, 25 bp, Homo sapien
tgggatgccttattctaccacgtgc

SEQ ID NO: 4462712 - DNA, 25 bp, Homo sapien
gctccacgccgtgaagggttcagat

SEQ ID NO: 4462713 - DNA, 25 bp, Homo sapien
tacgccgggtctgtgagttcccact

SEQ ID NO: 4462714 - DNA, 25 bp, Homo sapien
gagcacactggtgaatacgccgggt

SEQ ID NO: 4462715 - DNA, 25 bp, Homo sapien
caatgttatgaactgggtccgtggg

SEQ ID NO: 4462716 - DNA, 25 bp, Homo sapien
cacaatgtggattaatcaatgttat

SEQ ID NO: 4462717 - DNA, 25 bp, Homo sapien
ttcagatgacactttgctagtcaat

SEQ ID NO: 4462718 - DNA, 25 bp, Homo sapien
ggactttttcacaatgtggattaat

SEQ ID NO: 4462719 - DNA, 25 bp, Homo sapien
ctgctcagaggagccgtttacagca

SEQ ID NO: 4462720 - DNA, 25 bp, Homo sapien
ctcagaggagccgtttacagcacag

SEQ ID NO: 4462721 - DNA, 25 bp, Homo sapien
gaggagccgtttacagcacagaagc

SEQ ID NO: 4462722 - DNA, 25 bp, Homo sapien
gccgtttacagcacagaagcaagag

SEQ ID NO: 4462723 - DNA, 25 bp, Homo sapien
acatgccattaggttggagcagccc

SEQ ID NO: 4462724 - DNA, 25 bp, Homo sapien
cagatccggttgatggcagttcaag

SEQ ID NO: 4462725 - DNA, 25 bp, Homo sapien
agccatgcctgctgtcagatccggt

SEQ ID NO: 4462726 - DNA, 25 bp, Homo sapien
gcagcccaatctggctttagaattg

SEQ ID NO: 4462727 - DNA, 25 bp, Homo sapien
tgccacctagacagagggtcatggc

SEQ ID NO: 4462728 - DNA, 25 bp, Homo sapien
ctgcctttcacgttcataaccctat

SEQ ID NO: 4462729 - DNA, 25 bp, Homo sapien
gaagggcagtatgggcaaaacagtt

SEQ ID NO: 4462730 - DNA, 25 bp, Homo sapien
ttccctgtagccagtgccacctaga

SEQ ID NO: 4462731 - DNA, 25 bp, Homo sapien
tatgccagtcgttggtataaacatc

SEQ ID NO: 4462732 - DNA, 25 bp, Homo sapien
taaacatctgaactgcatccacatt

SEQ ID NO: 4462733 - DNA, 25 bp, Homo sapien
tcgttggtataaacatctgaactgc

SEQ ID NO: 4462734 - DNA, 25 bp, Homo sapien
ttctttcctcgtttatttatgccag

SEQ ID NO: 4462735 - DNA, 25 bp, Homo sapien
tctctgatgggtctgttctcgagct

SEQ ID NO: 4462736 - DNA, 25 bp, Homo sapien
gatgggtctgttctcgagctctgtt

SEQ ID NO: 4462737 - DNA, 25 bp, Homo sapien
ttcgccctctctgatgggtctgttc

SEQ ID NO: 4462738 - DNA, 25 bp, Homo sapien
gccctctctgatgggtctgttctcg

SEQ ID NO: 4462739 - DNA, 25 bp, Homo sapien
tatggcctctcctgcgagcagactt

SEQ ID NO: 4462740 - DNA, 25 bp, Homo sapien
gcgagcagacttccacaggttgtca

SEQ ID NO: 4462741 - DNA, 25 bp, Homo sapien
tcaagactttgtacaggcatatggc

SEQ ID NO: 4462742 - DNA, 25 bp, Homo sapien
ccttcaagactttgtacaggcatat

SEQ ID NO: 4462743 - DNA, 25 bp, Homo sapien
ttagtgcaagcccttgagctctgtc

SEQ ID NO: 4462744 - DNA, 25 bp, Homo sapien
gcatggtctcttgtggcacctaatg

SEQ ID NO: 4462745 - DNA, 25 bp, Homo sapien
gaaactttgggtctagcatggtctc

SEQ ID NO: 4462746 - DNA, 25 bp, Homo sapien
ctgacacctgcttagtgcaagccct

SEQ ID NO: 4462747 - DNA, 25 bp, Homo sapien
tcgagttatgggtcatgagaacagc

SEQ ID NO: 4462748 - DNA, 25 bp, Homo sapien
tgcatgtcccctgtgaccgaagtaa

SEQ ID NO: 4462749 - DNA, 25 bp, Homo sapien
cagttgattagcttcagaggtggcc

SEQ ID NO: 4462750 - DNA, 25 bp, Homo sapien
tctatagaagtccagatgagcatgc

SEQ ID NO: 4462751 - DNA, 25 bp, Homo sapien
cagtgggtaacaactacttgtagac

SEQ ID NO: 4462752 - DNA, 25 bp, Homo sapien
ccaaaccccgtttcatggagttctg

SEQ ID NO: 4462753 - DNA, 25 bp, Homo sapien
ctttaggtcattgacatggcagaca

SEQ ID NO: 4462754 - DNA, 25 bp, Homo sapien
cgttcagtatgtgcctgcccaaacc

SEQ ID NO: 4462755 - DNA, 25 bp, Homo sapien
atgggcatcgcctacggctggagca

SEQ ID NO: 4462756 - DNA, 25 bp, Homo sapien
tgtttgagagaagtgggaccaatgc

SEQ ID NO: 4462757 - DNA, 25 bp, Homo sapien
cccatggtgtgttctatattcattg

SEQ ID NO: 4462758 - DNA, 25 bp, Homo sapien
tgatgaaactctttcccatggtgtg

SEQ ID NO: 4462759 - DNA, 25 bp, Homo sapien
ggatgccaagaccttgtgttactca

SEQ ID NO: 4462760 - DNA, 25 bp, Homo sapien
tggatgccaagaccttgtgttactc

SEQ ID NO: 4462761 - DNA, 25 bp, Homo sapien
acagtctgccccatcggaaacactc

SEQ ID NO: 4462762 - DNA, 25 bp, Homo sapien
tccacaagctcttccacagtctgcc

SEQ ID NO: 4462763 - DNA, 25 bp, Homo sapien
cgactttctggaccctgctcaaatc

SEQ ID NO: 4462764 - DNA, 25 bp, Homo sapien
gagtcagtctttcccgactttctgg

SEQ ID NO: 4462765 - DNA, 25 bp, Homo sapien
ctttccattctccttgtatctttcc

SEQ ID NO: 4462766 - DNA, 25 bp, Homo sapien
cattctccttgtatctttcctgatt

SEQ ID NO: 4462767 - DNA, 25 bp, Homo sapien
ttccattctccttgtatctttcctg

SEQ ID NO: 4462768 - DNA, 25 bp, Homo sapien
tccattctccttgtatctttcctga

SEQ ID NO: 4462769 - DNA, 25 bp, Homo sapien
ggtgttgcccacacataaaggtctt

SEQ ID NO: 4462770 - DNA, 25 bp, Homo sapien
ttgaggtctcctagcagtggcaggc

SEQ ID NO: 4462771 - DNA, 25 bp, Homo sapien
aacgtgtgcacactctgactttgag

SEQ ID NO: 4462772 - DNA, 25 bp, Homo sapien
cctgagaattagaatggagccccaa

SEQ ID NO: 4462773 - DNA, 25 bp, Homo sapien
atggacggggtgggggatggcctct

SEQ ID NO: 4462774 - DNA, 25 bp, Homo sapien
aggtccaagtggcagggcacattct

SEQ ID NO: 4462775 - DNA, 25 bp, Homo sapien
caaattggccaagtgtgaacatcag

SEQ ID NO: 4462776 - DNA, 25 bp, Homo sapien
tgctacttccctctgattcagtgag

SEQ ID NO: 4462777 - DNA, 25 bp, Homo sapien
gagtttagcgtgtccatagttgcca

SEQ ID NO: 4462778 - DNA, 25 bp, Homo sapien
cataaaccttgtggtgcttgccgag

SEQ ID NO: 4462779 - DNA, 25 bp, Homo sapien
catagctgaccgtgagaggaatgct

SEQ ID NO: 4462780 - DNA, 25 bp, Homo sapien
tggaaactgacagagcctaccggct

SEQ ID NO: 4462781 - DNA, 25 bp, Homo sapien
caatgacctgtctgcatagcgtgaa

SEQ ID NO: 4462782 - DNA, 25 bp, Homo sapien
caagctgttgacacaacctggaaag

SEQ ID NO: 4462783 - DNA, 25 bp, Homo sapien
tataatacccaagtatggaacatgc

SEQ ID NO: 4462784 - DNA, 25 bp, Homo sapien
cttcattataaatgtaaaaggtctg

SEQ ID NO: 4462785 - DNA, 25 bp, Homo sapien
tacttttgagttgagatcccaagag

SEQ ID NO: 4462786 - DNA, 25 bp, Homo sapien
gggttaactagctgtattagtccac

SEQ ID NO: 4462787 - DNA, 25 bp, Homo sapien
tgaacaagatggtcaaagacacagg

SEQ ID NO: 4462788 - DNA, 25 bp, Homo sapien
gaatgttgaacatgtagcagatgct

SEQ ID NO: 4462789 - DNA, 25 bp, Homo sapien
tcctctgaacttagtctatagcaca

SEQ ID NO: 4462790 - DNA, 25 bp, Homo sapien
ctcaattctgtatggtctcacctca

SEQ ID NO: 4462791 - DNA, 25 bp, Homo sapien
tgaatggatagtgtattctctctgg

SEQ ID NO: 4462792 - DNA, 25 bp, Homo sapien
tttaagccagagtgaagtcttgtta

SEQ ID NO: 4462793 - DNA, 25 bp, Homo sapien
tgatctggtcagaaggttactggtg

SEQ ID NO: 4462794 - DNA, 25 bp, Homo sapien
gattcggtgtccaggtttaagccag

SEQ ID NO: 4462795 - DNA, 25 bp, Homo sapien
tagctagacattttagggccctgtc

SEQ ID NO: 4462796 - DNA, 25 bp, Homo sapien
tgtggacttgggaataaccgcaggc

SEQ ID NO: 4462797 - DNA, 25 bp, Homo sapien
ggaggcacctggtttacgaagagct

SEQ ID NO: 4462798 - DNA, 25 bp, Homo sapien
ctagggccacaggagttactttgtc

SEQ ID NO: 4462799 - DNA, 25 bp, Homo sapien
tctgttgagaccatattgctggcgt

SEQ ID NO: 4462800 - DNA, 25 bp, Homo sapien
taggctgtagtgagtaatgttcccc

SEQ ID NO: 4462801 - DNA, 25 bp, Homo sapien
tcatgggacaggaaacagttatagg

SEQ ID NO: 4462802 - DNA, 25 bp, Homo sapien
tgattttggccctcaaagaacagct

SEQ ID NO: 4462803 - DNA, 25 bp, Homo sapien
gaataattactggatcatttagttc

SEQ ID NO: 4462804 - DNA, 25 bp, Homo sapien
tgtagaataattactggatcattta

SEQ ID NO: 4462805 - DNA, 25 bp, Homo sapien
ccttgtagaataattactggatcat

SEQ ID NO: 4462806 - DNA, 25 bp, Homo sapien
tagaataattactggatcatttagt

SEQ ID NO: 4462807 - DNA, 25 bp, Homo sapien
tccaggaatggggtatccggtgata

SEQ ID NO: 4462808 - DNA, 25 bp, Homo sapien
cgcttggtccaggaatggggtatcc

SEQ ID NO: 4462809 - DNA, 25 bp, Homo sapien
ccggtgataggtgaatatgttgtga

SEQ ID NO: 4462810 - DNA, 25 bp, Homo sapien
ggtatccggtgataggtgaatatgt

SEQ ID NO: 4462811 - DNA, 25 bp, Homo sapien
caactctggtatactccagctgtcc

SEQ ID NO: 4462812 - DNA, 25 bp, Homo sapien
tcaactctggtatactccagctgtc

SEQ ID NO: 4462813 - DNA, 25 bp, Homo sapien
ctctggtatactccagctgtcctgc

SEQ ID NO: 4462814 - DNA, 25 bp, Homo sapien
actctggtatactccagctgtcctg

SEQ ID NO: 4462815 - DNA, 25 bp, Homo sapien
ccaaagacaaagagacgtgcaagta

SEQ ID NO: 4462816 - DNA, 25 bp, Homo sapien
agtttaatcattgctgacttcaggc

SEQ ID NO: 4462817 - DNA, 25 bp, Homo sapien
gggcagtttaatcattgctgacttc

SEQ ID NO: 4462818 - DNA, 25 bp, Homo sapien
gacgtgcaagtagctaagggtttca

SEQ ID NO: 4462819 - DNA, 25 bp, Homo sapien
cagagtcttgttaggagggcatttc

SEQ ID NO: 4462820 - DNA, 25 bp, Homo sapien
tttcttcttgccctcgccatgacag

SEQ ID NO: 4462821 - DNA, 25 bp, Homo sapien
cagctccagcgatgcccagagtctt

SEQ ID NO: 4462822 - DNA, 25 bp, Homo sapien
catgaagaatatgagtctttggaag

SEQ ID NO: 4462823 - DNA, 25 bp, Homo sapien
tgcagtttctcctgttcctatgagc

SEQ ID NO: 4462824 - DNA, 25 bp, Homo sapien
gtgcagtttctcctgttcctatgag

SEQ ID NO: 4462825 - DNA, 25 bp, Homo sapien
gagtgaatgaacgaagccgtttccc

SEQ ID NO: 4462826 - DNA, 25 bp, Homo sapien
atttgcaagctttagctgctcagtt

SEQ ID NO: 4462827 - DNA, 25 bp, Homo sapien
tgaatgaacgaagccgtttcccatc

SEQ ID NO: 4462828 - DNA, 25 bp, Homo sapien
gttttgatatatgttggtctgtgag

SEQ ID NO: 4462829 - DNA, 25 bp, Homo sapien
gctttgaagggaatcagcagagctg

SEQ ID NO: 4462830 - DNA, 25 bp, Homo sapien
tgctggcgggtaaggaaccttctca

SEQ ID NO: 4462831 - DNA, 25 bp, Homo sapien
gacttcgaggattttgcagcaggct

SEQ ID NO: 4462832 - DNA, 25 bp, Homo sapien
gaagtgaattgctccggtgttctca

SEQ ID NO: 4462833 - DNA, 25 bp, Homo sapien
aaagccatgttccagtgcgtccctc

SEQ ID NO: 4462834 - DNA, 25 bp, Homo sapien
gaatcggcatcaaacgcttcaggag

SEQ ID NO: 4462835 - DNA, 25 bp, Homo sapien
tcttgggattctctggctagaaagc

SEQ ID NO: 4462836 - DNA, 25 bp, Homo sapien
cctgatgagaagcaacacttgtgag

SEQ ID NO: 4462837 - DNA, 25 bp, Homo sapien
ttcttgggtcccatgtaaatgagcg

SEQ ID NO: 4462838 - DNA, 25 bp, Homo sapien
taaatgagcgtgcaggaccaggttg

SEQ ID NO: 4462839 - DNA, 25 bp, Homo sapien
gactcttgtctcaggatgcattgcc

SEQ ID NO: 4462840 - DNA, 25 bp, Homo sapien
caacagcgtcataggtctgtgctca

SEQ ID NO: 4462841 - DNA, 25 bp, Homo sapien
atcaaagtgtgagaaaaactatcac

SEQ ID NO: 4462842 - DNA, 25 bp, Homo sapien
aactatcacacttagatattattct

SEQ ID NO: 4462843 - DNA, 25 bp, Homo sapien
gaaaaactatcacacttagatatta

SEQ ID NO: 4462844 - DNA, 25 bp, Homo sapien
gagaaaaactatcacacttagatat

SEQ ID NO: 4462845 - DNA, 25 bp, Homo sapien
cattttcagagtggtcttcgtaacc

SEQ ID NO: 4462846 - DNA, 25 bp, Homo sapien
aacattgcaactggagcattttcag

SEQ ID NO: 4462847 - DNA, 25 bp, Homo sapien
caaaacaggcaaacattgcaactgg

SEQ ID NO: 4462848 - DNA, 25 bp, Homo sapien
aagggcatccaaaaatcggtgctca

SEQ ID NO: 4462849 - DNA, 25 bp, Homo sapien
cttaggcacctgaatgccagcatcc

SEQ ID NO: 4462850 - DNA, 25 bp, Homo sapien
taggcacctgaatgccagcatccaa

SEQ ID NO: 4462851 - DNA, 25 bp, Homo sapien
ttaggcacctgaatgccagcatcca

SEQ ID NO: 4462852 - DNA, 25 bp, Homo sapien
ggcacctgaatgccagcatccaact

SEQ ID NO: 4462853 - DNA, 25 bp, Homo sapien
gactcccagtccgatatctgttctt

SEQ ID NO: 4462854 - DNA, 25 bp, Homo sapien
gtaattcttgactcccagtccgata

SEQ ID NO: 4462855 - DNA, 25 bp, Homo sapien
tcttgactcccagtccgatatctgt

SEQ ID NO: 4462856 - DNA, 25 bp, Homo sapien
cagtccgatatctgttctttcctta

SEQ ID NO: 4462857 - DNA, 25 bp, Homo sapien
ctgggcctggtgattcaccagcttt

SEQ ID NO: 4462858 - DNA, 25 bp, Homo sapien
tgaggtatctgaatccttggatctg

SEQ ID NO: 4462859 - DNA, 25 bp, Homo sapien
ctggtgattcaccagctttgctgtt

SEQ ID NO: 4462860 - DNA, 25 bp, Homo sapien
aaagctgtggttctgaggtatctga

SEQ ID NO: 4462861 - DNA, 25 bp, Homo sapien
attttatgactcatgtactgtaggg

SEQ ID NO: 4462862 - DNA, 25 bp, Homo sapien
aatggagagttgctgagaagacttg

SEQ ID NO: 4462863 - DNA, 25 bp, Homo sapien
tggagagttgctgagaagacttgat

SEQ ID NO: 4462864 - DNA, 25 bp, Homo sapien
ctcttccaggagctattttatgact

SEQ ID NO: 4462865 - DNA, 25 bp, Homo sapien
gggctgttctctggcgccatctctc

SEQ ID NO: 4462866 - DNA, 25 bp, Homo sapien
ggctgttctctggcgccatctctcc

SEQ ID NO: 4462867 - DNA, 25 bp, Homo sapien
gctacttgcggttgccagtgacaaa

SEQ ID NO: 4462868 - DNA, 25 bp, Homo sapien
aatggctccctatggaagaaggcag

SEQ ID NO: 4462869 - DNA, 25 bp, Homo sapien
tttgccagtggcataagctgcgtga

SEQ ID NO: 4462870 - DNA, 25 bp, Homo sapien
gagcttactgggtgaaactaggaaa

SEQ ID NO: 4462871 - DNA, 25 bp, Homo sapien
tttgtaaaatctcatgagactctgc

SEQ ID NO: 4462872 - DNA, 25 bp, Homo sapien
tgagggaactccctagtctccttgg

SEQ ID NO: 4462873 - DNA, 25 bp, Homo sapien
tgtaaaatctcatgagactctgccc

SEQ ID NO: 4462874 - DNA, 25 bp, Homo sapien
cctagtctccttggcccttgtgttt

SEQ ID NO: 4462875 - DNA, 25 bp, Homo sapien
tgggaactgctgtgctaaatcatgc

SEQ ID NO: 4462876 - DNA, 25 bp, Homo sapien
tcctggaggtgccttgaaaagaacc

SEQ ID NO: 4462877 - DNA, 25 bp, Homo sapien
aatcatgctgcttccctctatggag

SEQ ID NO: 4462878 - DNA, 25 bp, Homo sapien
tctatggagtggagatactgaatcc

SEQ ID NO: 4462879 - DNA, 25 bp, Homo sapien
agcactgtggcttcatgcgatgctc

SEQ ID NO: 4462880 - DNA, 25 bp, Homo sapien
tggcttcatgcgatgctctgtcttc

SEQ ID NO: 4462881 - DNA, 25 bp, Homo sapien
gtggcttcatgcgatgctctgtctt

SEQ ID NO: 4462882 - DNA, 25 bp, Homo sapien
actgtggcttcatgcgatgctctgt

SEQ ID NO: 4462883 - DNA, 25 bp, Homo sapien
ctggcaactcagcaagagaagcagg

SEQ ID NO: 4462884 - DNA, 25 bp, Homo sapien
aagcaggggctccttgctcttgcat

SEQ ID NO: 4462885 - DNA, 25 bp, Homo sapien
gcaactcagcaagagaagcaggggc

SEQ ID NO: 4462886 - DNA, 25 bp, Homo sapien
aactcagcaagagaagcaggggctc

SEQ ID NO: 4462887 - DNA, 25 bp, Homo sapien
tgtagcctggttaggaaactggcaa

SEQ ID NO: 4462888 - DNA, 25 bp, Homo sapien
gagtatgctggatcccttgtagcct

SEQ ID NO: 4462889 - DNA, 25 bp, Homo sapien
ggtgcggatggtagatattgtcatc

SEQ ID NO: 4462890 - DNA, 25 bp, Homo sapien
tgcctttaggcataagccagtacaa

SEQ ID NO: 4462891 - DNA, 25 bp, Homo sapien
ctggagccatccgctaaggttagtg

SEQ ID NO: 4462892 - DNA, 25 bp, Homo sapien
cctggagccatccgctaaggttagt

SEQ ID NO: 4462893 - DNA, 25 bp, Homo sapien
tggagccatccgctaaggttagtgt

SEQ ID NO: 4462894 - DNA, 25 bp, Homo sapien
gccgcgttaagagcaacaacccttc

SEQ ID NO: 4462895 - DNA, 25 bp, Homo sapien
agtgaagggcatctagaggtgccat

SEQ ID NO: 4462896 - DNA, 25 bp, Homo sapien
cattggtaaaagcatactccccagg

SEQ ID NO: 4462897 - DNA, 25 bp, Homo sapien
tggagctgcttccaactacagcaat

SEQ ID NO: 4462898 - DNA, 25 bp, Homo sapien
tataggaaattactgtggagctgct

SEQ ID NO: 4462899 - DNA, 25 bp, Homo sapien
ttgattcacgttggacttcgtgcgc

SEQ ID NO: 4462900 - DNA, 25 bp, Homo sapien
cttctgctctagaacttgaagcaat

SEQ ID NO: 4462901 - DNA, 25 bp, Homo sapien
ttcccacgggccattcgttatcagt

SEQ ID NO: 4462902 - DNA, 25 bp, Homo sapien
tcattagtgctatcgttgattcacg

SEQ ID NO: 4462903 - DNA, 25 bp, Homo sapien
tttgacatcttgacggttcccagtg

SEQ ID NO: 4462904 - DNA, 25 bp, Homo sapien
tgggatccaggacaaacctgtttcg

SEQ ID NO: 4462905 - DNA, 25 bp, Homo sapien
gaagtgggaacctcctcgttgtgct

SEQ ID NO: 4462906 - DNA, 25 bp, Homo sapien
caccaggtctttttggatgggatcc

SEQ ID NO: 4462907 - DNA, 25 bp, Homo sapien
ggcattgagatgtgcatggagagac

SEQ ID NO: 4462908 - DNA, 25 bp, Homo sapien
aaggcattgagatgtgcatggagag

SEQ ID NO: 4462909 - DNA, 25 bp, Homo sapien
aggcattgagatgtgcatggagaga

SEQ ID NO: 4462910 - DNA, 25 bp, Homo sapien
tgttgagaacaacctgcgactgtgg

SEQ ID NO: 4462911 - DNA, 25 bp, Homo sapien
tcctgcgtgcaatcctgacaagtaa

SEQ ID NO: 4462912 - DNA, 25 bp, Homo sapien
gcgaaactctgatcttgctggagga

SEQ ID NO: 4462913 - DNA, 25 bp, Homo sapien
ccggctgactagacaaagcgaaact

SEQ ID NO: 4462914 - DNA, 25 bp, Homo sapien
gcttgactgctttcgccttggccac

SEQ ID NO: 4462915 - DNA, 25 bp, Homo sapien
caccttcgggagttctccggcttga

SEQ ID NO: 4462916 - DNA, 25 bp, Homo sapien
agctccagcgacagctgagggtcag

SEQ ID NO: 4462917 - DNA, 25 bp, Homo sapien
gctggttacctgagaaccaccttcg

SEQ ID NO: 4462918 - DNA, 25 bp, Homo sapien
gtttctcttgaaaggtgccctccag

SEQ ID NO: 4462919 - DNA, 25 bp, Homo sapien
caggacagcagagcctttctttggg

SEQ ID NO: 4462920 - DNA, 25 bp, Homo sapien
cccttttgttaagcgagcgtcccat

SEQ ID NO: 4462921 - DNA, 25 bp, Homo sapien
tcaggacgttggtggccaaacagtc

SEQ ID NO: 4462922 - DNA, 25 bp, Homo sapien
ggctgccccaggtagagcttctata

SEQ ID NO: 4462923 - DNA, 25 bp, Homo sapien
cctggtgatggttttgtccgcagaa

SEQ ID NO: 4462924 - DNA, 25 bp, Homo sapien
tgtacagcacccactgacagctgag

SEQ ID NO: 4462925 - DNA, 25 bp, Homo sapien
aggtttcacacacccttgtaggtgg

SEQ ID NO: 4462926 - DNA, 25 bp, Homo sapien
tcctcttgacagtttcggccctggc

SEQ ID NO: 4462927 - DNA, 25 bp, Homo sapien
tacgctcccccaaaatacggagatg

SEQ ID NO: 4462928 - DNA, 25 bp, Homo sapien
gcaaacttttgcagcccgttctcgg

SEQ ID NO: 4462929 - DNA, 25 bp, Homo sapien
ggaaagctgcgttgcctcaattaaa

SEQ ID NO: 4462930 - DNA, 25 bp, Homo sapien
ctacattgggaaaaaacatggagtc

SEQ ID NO: 4462931 - DNA, 25 bp, Homo sapien
cattgggaaaaaacatggagtcagc

SEQ ID NO: 4462932 - DNA, 25 bp, Homo sapien
tacattgggaaaaaacatggagtca

SEQ ID NO: 4462933 - DNA, 25 bp, Homo sapien
tgggaaaaaacatggagtcagctcc

SEQ ID NO: 4462934 - DNA, 25 bp, Homo sapien
ggagtctcggagctcgccatctcca

SEQ ID NO: 4462935 - DNA, 25 bp, Homo sapien
cagaagatagagggagtctcggagc

SEQ ID NO: 4462936 - DNA, 25 bp, Homo sapien
agtctcggagctcgccatctccagc

SEQ ID NO: 4462937 - DNA, 25 bp, Homo sapien
agaagatagagggagtctcggagct

SEQ ID NO: 4462938 - DNA, 25 bp, Homo sapien
tgctttcgccggtcgccttctcctt

SEQ ID NO: 4462939 - DNA, 25 bp, Homo sapien
tccctcgcgcttttgcttgcccgcc

SEQ ID NO: 4462940 - DNA, 25 bp, Homo sapien
aagctctcgctagcgctgcctgtgg

SEQ ID NO: 4462941 - DNA, 25 bp, Homo sapien
gcagccagtctgtggctctcggtct

SEQ ID NO: 4462942 - DNA, 25 bp, Homo sapien
acactaagaataggtccacctggag

SEQ ID NO: 4462943 - DNA, 25 bp, Homo sapien
gaaaacatgtttgtgtgcaacacta

SEQ ID NO: 4462944 - DNA, 25 bp, Homo sapien
cattctatggcaaagtacaggtgct

SEQ ID NO: 4462945 - DNA, 25 bp, Homo sapien
gagaatacaaatggagtcagcaacc

SEQ ID NO: 4462946 - DNA, 25 bp, Homo sapien
catcagggtgactcgtgacagcaca

SEQ ID NO: 4462947 - DNA, 25 bp, Homo sapien
taagtcaaatgatagttaggcccac

SEQ ID NO: 4462948 - DNA, 25 bp, Homo sapien
gatagggtttcttacatggtgctgg

SEQ ID NO: 4462949 - DNA, 25 bp, Homo sapien
taggcccacagaagtataggtctca

SEQ ID NO: 4462950 - DNA, 25 bp, Homo sapien
ctggaacacggtcctccccgtccat

SEQ ID NO: 4462951 - DNA, 25 bp, Homo sapien
ttgactgcatctccacgctgtcttg

SEQ ID NO: 4462952 - DNA, 25 bp, Homo sapien
cacgctgtcttggaagtgctggaac

SEQ ID NO: 4462953 - DNA, 25 bp, Homo sapien
tgtcttggaagtgctggaacacggt

SEQ ID NO: 4462954 - DNA, 25 bp, Homo sapien
acctgatctgataagcaaggtcaag

SEQ ID NO: 4462955 - DNA, 25 bp, Homo sapien
gcagcccgagcctcttgtgaaaaat

SEQ ID NO: 4462956 - DNA, 25 bp, Homo sapien
ggaaatgtaatgaccacatgtggta

SEQ ID NO: 4462957 - DNA, 25 bp, Homo sapien
gaggccctcggtttcctacctgatc

SEQ ID NO: 4462958 - DNA, 25 bp, Homo sapien
gggaacgaagaaggctctctcctac

SEQ ID NO: 4462959 - DNA, 25 bp, Homo sapien
agccaatcatgtgggaacgaagaag

SEQ ID NO: 4462960 - DNA, 25 bp, Homo sapien
tgggaacgaagaaggctctctccta

SEQ ID NO: 4462961 - DNA, 25 bp, Homo sapien
gaacgaagaaggctctctcctacaa

SEQ ID NO: 4462962 - DNA, 25 bp, Homo sapien
ctccagggcagaaggtaacagattt

SEQ ID NO: 4462963 - DNA, 25 bp, Homo sapien
ggtaacagatttccggaatgaagcc

SEQ ID NO: 4462964 - DNA, 25 bp, Homo sapien
gcagaaggtaacagatttccggaat

SEQ ID NO: 4462965 - DNA, 25 bp, Homo sapien
aggatagacccagccaagttgtcct

SEQ ID NO: 4462966 - DNA, 25 bp, Homo sapien
ctgcacggatgttaccagtttcccc

SEQ ID NO: 4462967 - DNA, 25 bp, Homo sapien
gaagctaatgttttaagcctggcaa

SEQ ID NO: 4462968 - DNA, 25 bp, Homo sapien
aatagccaaatgttctccaaagtgg

SEQ ID NO: 4462969 - DNA, 25 bp, Homo sapien
tagatcattcatcgctgtcggcaag

SEQ ID NO: 4462970 - DNA, 25 bp, Homo sapien
gagatgcctgcacattaaaagactg

SEQ ID NO: 4462971 - DNA, 25 bp, Homo sapien
ctgcccctcatcctcagccatggct

SEQ ID NO: 4462972 - DNA, 25 bp, Homo sapien
gctccagtctggaggcagaccccgc

SEQ ID NO: 4462973 - DNA, 25 bp, Homo sapien
agtctggaggcagaccccgcctgcc

SEQ ID NO: 4462974 - DNA, 25 bp, Homo sapien
gcccctcatcctcagccatggctgc

SEQ ID NO: 4462975 - DNA, 25 bp, Homo sapien
ctgtgggtctctgattgcattcccc

SEQ ID NO: 4462976 - DNA, 25 bp, Homo sapien
atggaacctgtgaagctatcgatga

SEQ ID NO: 4462977 - DNA, 25 bp, Homo sapien
tatcgatgagtgaagggttttctcc

SEQ ID NO: 4462978 - DNA, 25 bp, Homo sapien
cctgtgaagctatcgatgagtgaag

SEQ ID NO: 4462979 - DNA, 25 bp, Homo sapien
ttcatgaggctcaaactaagtagtt

SEQ ID NO: 4462980 - DNA, 25 bp, Homo sapien
ttcgttgggcccatgactgtcagct

SEQ ID NO: 4462981 - DNA, 25 bp, Homo sapien
tccattatttgtggagacccattcg

SEQ ID NO: 4462982 - DNA, 25 bp, Homo sapien
tttgaactccctccgaagtccatgc

SEQ ID NO: 4462983 - DNA, 25 bp, Homo sapien
tgcatgcttccctttagggcacctc

SEQ ID NO: 4462984 - DNA, 25 bp, Homo sapien
tgcttccctttagggcacctcttta

SEQ ID NO: 4462985 - DNA, 25 bp, Homo sapien
catgcttccctttagggcacctctt

SEQ ID NO: 4462986 - DNA, 25 bp, Homo sapien
gcatgcttccctttagggcacctct

SEQ ID NO: 4462987 - DNA, 25 bp, Homo sapien
tagtccagatgacaagctccaaatg

SEQ ID NO: 4462988 - DNA, 25 bp, Homo sapien
ggggctgctgtagctctcgtttata

SEQ ID NO: 4462989 - DNA, 25 bp, Homo sapien
caaatggactaagactttaacatca

SEQ ID NO: 4462990 - DNA, 25 bp, Homo sapien
tcgtttataaactgcaatagtccag

SEQ ID NO: 4462991 - DNA, 25 bp, Homo sapien
tcagtaagtgaaatggctcttggga

SEQ ID NO: 4462992 - DNA, 25 bp, Homo sapien
gatggtagtgtggtaagtatttcag

SEQ ID NO: 4462993 - DNA, 25 bp, Homo sapien
tgtattaatggtatcccaaggtgtt

SEQ ID NO: 4462994 - DNA, 25 bp, Homo sapien
catcctgagataagtagcccttaag

SEQ ID NO: 4462995 - DNA, 25 bp, Homo sapien
acaggtagagcacacagcatgaatg

SEQ ID NO: 4462996 - DNA, 25 bp, Homo sapien
tctgcagtaacaggtagagcacaca

SEQ ID NO: 4462997 - DNA, 25 bp, Homo sapien
agcactgagttattcactgaagcca

SEQ ID NO: 4462998 - DNA, 25 bp, Homo sapien
gaaatcttgcttggacagtcataag

SEQ ID NO: 4462999 - DNA, 25 bp, Homo sapien
gttttgtggtcaagggaactatgac

SEQ ID NO: 4463000 - DNA, 25 bp, Homo sapien
gagttttgtggtcaagggaactatg

SEQ ID NO: 4463001 - DNA, 25 bp, Homo sapien
ttttgtggtcaagggaactatgaca

SEQ ID NO: 4463002 - DNA, 25 bp, Homo sapien
ttgtggtcaagggaactatgacatt

SEQ ID NO: 4463003 - DNA, 25 bp, Homo sapien
cagtaaggcctctgagtaaacttgc

SEQ ID NO: 4463004 - DNA, 25 bp, Homo sapien
tccagtcgaatcacaaatcttgagc

SEQ ID NO: 4463005 - DNA, 25 bp, Homo sapien
gcacgtgcatagcattgccctgtag

SEQ ID NO: 4463006 - DNA, 25 bp, Homo sapien
gtcaacctcaccaacagtaaggcct

SEQ ID NO: 4463007 - DNA, 25 bp, Homo sapien
gtaaagcgtttggatacttgcccag

SEQ ID NO: 4463008 - DNA, 25 bp, Homo sapien
gctggtttggtaaagcgtttggata

SEQ ID NO: 4463009 - DNA, 25 bp, Homo sapien
ggtttctagggagcttccagtagca

SEQ ID NO: 4463010 - DNA, 25 bp, Homo sapien
ggaacccggttgaaagccctgatca

SEQ ID NO: 4463011 - DNA, 25 bp, Homo sapien
ctgtcccaaattgacctcgttactc

SEQ ID NO: 4463012 - DNA, 25 bp, Homo sapien
tgtcccaaattgacctcgttactca

SEQ ID NO: 4463013 - DNA, 25 bp, Homo sapien
gtcccaaattgacctcgttactcat

SEQ ID NO: 4463014 - DNA, 25 bp, Homo sapien
ctgtccaaattgtggcacaaaacct

SEQ ID NO: 4463015 - DNA, 25 bp, Homo sapien
tgtccaaattgtggcacaaaacctg

SEQ ID NO: 4463016 - DNA, 25 bp, Homo sapien
gtccaaattgtggcacaaaacctgc

SEQ ID NO: 4463017 - DNA, 25 bp, Homo sapien
tgaacacttagtacttttggcaaga

SEQ ID NO: 4463018 - DNA, 25 bp, Homo sapien
tacttttggcaagaaccaccacttg

SEQ ID NO: 4463019 - DNA, 25 bp, Homo sapien
cctggtgacccatcgcctttgaaca

SEQ ID NO: 4463020 - DNA, 25 bp, Homo sapien
taatcagtggactcctccaagcgtc

SEQ ID NO: 4463021 - DNA, 25 bp, Homo sapien
aagattctgcaagtatacatctggt

SEQ ID NO: 4463022 - DNA, 25 bp, Homo sapien
caagtatacatctggttggaaagca

SEQ ID NO: 4463023 - DNA, 25 bp, Homo sapien
ctaaagattctgcaagtatacatct

SEQ ID NO: 4463024 - DNA, 25 bp, Homo sapien
tgcaagtatacatctggttggaaag

SEQ ID NO: 4463025 - DNA, 25 bp, Homo sapien
gtgcaagactttcggtcactgtaca

SEQ ID NO: 4463026 - DNA, 25 bp, Homo sapien
tagtgcaagactttcggtcactgta

SEQ ID NO: 4463027 - DNA, 25 bp, Homo sapien
gcaagactttcggtcactgtacaca

SEQ ID NO: 4463028 - DNA, 25 bp, Homo sapien
gactttcggtcactgtacacacatt

SEQ ID NO: 4463029 - DNA, 25 bp, Homo sapien
caccagcctctaggattggccgcat

SEQ ID NO: 4463030 - DNA, 25 bp, Homo sapien
ctccaccagcctctaggattggccg

SEQ ID NO: 4463031 - DNA, 25 bp, Homo sapien
gggagaggtgtggtcgtggccacag

SEQ ID NO: 4463032 - DNA, 25 bp, Homo sapien
gatggggggagaggtgtggtcgtgg

SEQ ID NO: 4463033 - DNA, 25 bp, Homo sapien
tctggattgaaagcacttggggttt

SEQ ID NO: 4463034 - DNA, 25 bp, Homo sapien
acctttgctagggaactgttggagt

SEQ ID NO: 4463035 - DNA, 25 bp, Homo sapien
ctttgctagggaactgttggagtga

SEQ ID NO: 4463036 - DNA, 25 bp, Homo sapien
gcttttctgtattcccattggcttc

SEQ ID NO: 4463037 - DNA, 25 bp, Homo sapien
gtggtgaatgccgcaggagcaaaac

SEQ ID NO: 4463038 - DNA, 25 bp, Homo sapien
ccagcacgtggtgaatgccgcagga

SEQ ID NO: 4463039 - DNA, 25 bp, Homo sapien
cacgtggtgaatgccgcaggagcaa

SEQ ID NO: 4463040 - DNA, 25 bp, Homo sapien
agcacgtggtgaatgccgcaggagc

SEQ ID NO: 4463041 - DNA, 25 bp, Homo sapien
tttttccaaaacgggaggcagcaca

SEQ ID NO: 4463042 - DNA, 25 bp, Homo sapien
gaggcagcacatgggcccagagccc

SEQ ID NO: 4463043 - DNA, 25 bp, Homo sapien
aaacgggaggcagcacatgggccca

SEQ ID NO: 4463044 - DNA, 25 bp, Homo sapien
ttccaaaacgggaggcagcacatgg

SEQ ID NO: 4463045 - DNA, 25 bp, Homo sapien
acagtcatcctgtgagcaatggcag

SEQ ID NO: 4463046 - DNA, 25 bp, Homo sapien
agactcagggcccttatttcagcag

SEQ ID NO: 4463047 - DNA, 25 bp, Homo sapien
tctgatcaactggtagcaggataag

SEQ ID NO: 4463048 - DNA, 25 bp, Homo sapien
ctcataattaactgagcagactgga

SEQ ID NO: 4463049 - DNA, 25 bp, Homo sapien
caaggcctgaacgttgggctgctga

SEQ ID NO: 4463050 - DNA, 25 bp, Homo sapien
tgcacggactgcaggcagacggttc

SEQ ID NO: 4463051 - DNA, 25 bp, Homo sapien
tagagctagctcaagtggtccgtga

SEQ ID NO: 4463052 - DNA, 25 bp, Homo sapien
gaagaagatgccatgacatccctct

SEQ ID NO: 4463053 - DNA, 25 bp, Homo sapien
ctacttctaccagccagtcattggc

SEQ ID NO: 4463054 - DNA, 25 bp, Homo sapien
ttgtgctaggtcttgaatccttttc

SEQ ID NO: 4463055 - DNA, 25 bp, Homo sapien
gctggaacctgactggcatctcaca

SEQ ID NO: 4463056 - DNA, 25 bp, Homo sapien
tggagcccacctgttctacttctac

SEQ ID NO: 4463057 - DNA, 25 bp, Homo sapien
gaactctgatacacgtgtaatctgc

SEQ ID NO: 4463058 - DNA, 25 bp, Homo sapien
tatttggagtctctgcaagaacaaa

SEQ ID NO: 4463059 - DNA, 25 bp, Homo sapien
gaacaaataaacctctgaactctga

SEQ ID NO: 4463060 - DNA, 25 bp, Homo sapien
tcttaattcgttttctgtgccgcat

SEQ ID NO: 4463061 - DNA, 25 bp, Homo sapien
gtttctgtgcaccaaacaattgtga

SEQ ID NO: 4463062 - DNA, 25 bp, Homo sapien
cctgttgaggaatcgccaggactga

SEQ ID NO: 4463063 - DNA, 25 bp, Homo sapien
ttgtgcagataagccaagggtgact

SEQ ID NO: 4463064 - DNA, 25 bp, Homo sapien
aaatagactcctggaggctgtaaac

SEQ ID NO: 4463065 - DNA, 25 bp, Homo sapien
gcatataaattgcacgccaagcctg

SEQ ID NO: 4463066 - DNA, 25 bp, Homo sapien
tttggtgaaccaaacatagtttcga

SEQ ID NO: 4463067 - DNA, 25 bp, Homo sapien
gatgtcccaatattaataaccaggt

SEQ ID NO: 4463068 - DNA, 25 bp, Homo sapien
tctaaatgactaaatgtcttgcaga

SEQ ID NO: 4463069 - DNA, 25 bp, Homo sapien
tctcagagtgccacggaagtgccaa

SEQ ID NO: 4463070 - DNA, 25 bp, Homo sapien
taaattgcttgcagtccagagtggg

SEQ ID NO: 4463071 - DNA, 25 bp, Homo sapien
tgaactggagactgtactaggtgct

SEQ ID NO: 4463072 - DNA, 25 bp, Homo sapien
caagtgccctggatagagcaaagag

SEQ ID NO: 4463073 - DNA, 25 bp, Homo sapien
gtcaagttgactgtagttgataaat

SEQ ID NO: 4463074 - DNA, 25 bp, Homo sapien
cttttggagacctaagtgggaccat

SEQ ID NO: 4463075 - DNA, 25 bp, Homo sapien
gatgattataaagtggcagacagcc

SEQ ID NO: 4463076 - DNA, 25 bp, Homo sapien
ggcagacagccgttactaaatgagt

SEQ ID NO: 4463077 - DNA, 25 bp, Homo sapien
gctttgtcctatcacccgtagctag

SEQ ID NO: 4463078 - DNA, 25 bp, Homo sapien
tggaagctgatttggcattgatgag

SEQ ID NO: 4463079 - DNA, 25 bp, Homo sapien
tagacatggccccaccttagcttgg

SEQ ID NO: 4463080 - DNA, 25 bp, Homo sapien
tggcattgatgagcctctctcctgc

SEQ ID NO: 4463081 - DNA, 25 bp, Homo sapien
tttgaaaacgactgtacctcacttg

SEQ ID NO: 4463082 - DNA, 25 bp, Homo sapien
tgtcttctcgatgagaatgtaagct

SEQ ID NO: 4463083 - DNA, 25 bp, Homo sapien
tagtaaatcaccacggacagcatgt

SEQ ID NO: 4463084 - DNA, 25 bp, Homo sapien
ggtagtgggataagtctgtcttctc

SEQ ID NO: 4463085 - DNA, 25 bp, Homo sapien
ttttgtcgatgtgcctgcagtgact

SEQ ID NO: 4463086 - DNA, 25 bp, Homo sapien
cttttgtcgatgtgcctgcagtgac

SEQ ID NO: 4463087 - DNA, 25 bp, Homo sapien
tttgtcgatgtgcctgcagtgactg

SEQ ID NO: 4463088 - DNA, 25 bp, Homo sapien
aaaagagaacggaccgccacgtcat

SEQ ID NO: 4463089 - DNA, 25 bp, Homo sapien
ccagccaaactgagccactgaatgc

SEQ ID NO: 4463090 - DNA, 25 bp, Homo sapien
taaaagagaacggaccgccacgtca

SEQ ID NO: 4463091 - DNA, 25 bp, Homo sapien
ccaaactgagccactgaatgccaca

SEQ ID NO: 4463092 - DNA, 25 bp, Homo sapien
caagaactttgtgttagtcacctgg

SEQ ID NO: 4463093 - DNA, 25 bp, Homo sapien
taaaggcagtggttcataaggtgac

SEQ ID NO: 4463094 - DNA, 25 bp, Homo sapien
ggattgaattgagccaagccccaag

SEQ ID NO: 4463095 - DNA, 25 bp, Homo sapien
tgagggaagtgccataaagagcccc

SEQ ID NO: 4463096 - DNA, 25 bp, Homo sapien
gatgcagatgctgagaatcctcgaa

SEQ ID NO: 4463097 - DNA, 25 bp, Homo sapien
taccaagggtgttggacacaagtgc

SEQ ID NO: 4463098 - DNA, 25 bp, Homo sapien
tcctcgaagggctccaaagtcctct

SEQ ID NO: 4463099 - DNA, 25 bp, Homo sapien
ccttagctacaaacagtcatcaagt

SEQ ID NO: 4463100 - DNA, 25 bp, Homo sapien
tacccaatgtggatatgtagaagga

SEQ ID NO: 4463101 - DNA, 25 bp, Homo sapien
gaatgatgctttgcggctttgagct

SEQ ID NO: 4463102 - DNA, 25 bp, Homo sapien
gacaaatcagccaagtgtcaccatt

SEQ ID NO: 4463103 - DNA, 25 bp, Homo sapien
tcattgccattccaaatgggctgat

SEQ ID NO: 4463104 - DNA, 25 bp, Homo sapien
tgtcctcttgacagcttccaatctg

SEQ ID NO: 4463105 - DNA, 25 bp, Homo sapien
cacctgtcctcttgacagcttccaa

SEQ ID NO: 4463106 - DNA, 25 bp, Homo sapien
caatctgagtatcctctattgcctg

SEQ ID NO: 4463107 - DNA, 25 bp, Homo sapien
cagcttccaatctgagtatcctcta

SEQ ID NO: 4463108 - DNA, 25 bp, Homo sapien
agtttcaaatatttgacactatagt

SEQ ID NO: 4463109 - DNA, 25 bp, Homo sapien
ctatagttcattaaatgtagggtca

SEQ ID NO: 4463110 - DNA, 25 bp, Homo sapien
tcaaatatttgacactatagttcat

SEQ ID NO: 4463111 - DNA, 25 bp, Homo sapien
ttgacactatagttcattaaatgta

SEQ ID NO: 4463112 - DNA, 25 bp, Homo sapien
gaaaaagaagggacctgctctcgca

SEQ ID NO: 4463113 - DNA, 25 bp, Homo sapien
taacagcaacgtgatatgaagggag

SEQ ID NO: 4463114 - DNA, 25 bp, Homo sapien
tctgacacaagataaacgagcttgg

SEQ ID NO: 4463115 - DNA, 25 bp, Homo sapien
gggccttcggcgattcactctggct

SEQ ID NO: 4463116 - DNA, 25 bp, Homo sapien
ctgatgggtagcacacgttgaggag

SEQ ID NO: 4463117 - DNA, 25 bp, Homo sapien
atgggtagcacacgttgaggagtcc

SEQ ID NO: 4463118 - DNA, 25 bp, Homo sapien
gtagcacacgttgaggagtccccag

SEQ ID NO: 4463119 - DNA, 25 bp, Homo sapien
ggtagcacacgttgaggagtcccca

SEQ ID NO: 4463120 - DNA, 25 bp, Homo sapien
tgaacgtgggaagaagcctgccgtc

SEQ ID NO: 4463121 - DNA, 25 bp, Homo sapien
gaagtatttcctcactgcctcgaaa

SEQ ID NO: 4463122 - DNA, 25 bp, Homo sapien
aggctgagaacccagtgtgaacgtg

SEQ ID NO: 4463123 - DNA, 25 bp, Homo sapien
atctgagtgaaagctgggacaggcc

SEQ ID NO: 4463124 - DNA, 25 bp, Homo sapien
cagaccttgcgtggaaaggcccctt

SEQ ID NO: 4463125 - DNA, 25 bp, Homo sapien
aaaggccccttttgcatatgcagtt

SEQ ID NO: 4463126 - DNA, 25 bp, Homo sapien
tttgatgccacagaccttgcgtgga

SEQ ID NO: 4463127 - DNA, 25 bp, Homo sapien
gccacagaccttgcgtggaaaggcc

SEQ ID NO: 4463128 - DNA, 25 bp, Homo sapien
cattcagtggtcactcttagaggct

SEQ ID NO: 4463129 - DNA, 25 bp, Homo sapien
taaaatgggcattcccaggcctcac

SEQ ID NO: 4463130 - DNA, 25 bp, Homo sapien
gaaattaatgcttgcttcacgggct

SEQ ID NO: 4463131 - DNA, 25 bp, Homo sapien
gggactgaagtccacttgcaccaga

SEQ ID NO: 4463132 - DNA, 25 bp, Homo sapien
caggagcctttgtggtgcctggttt

SEQ ID NO: 4463133 - DNA, 25 bp, Homo sapien
aaagggtggcttgtcaacactgaat

SEQ ID NO: 4463134 - DNA, 25 bp, Homo sapien
ggtttagaatctctcaaccctgcca

SEQ ID NO: 4463135 - DNA, 25 bp, Homo sapien
gtccctggagcgaatggcatctgca

SEQ ID NO: 4463136 - DNA, 25 bp, Homo sapien
gcttctgggagcagtccctgctagc

SEQ ID NO: 4463137 - DNA, 25 bp, Homo sapien
tgaatgttctaagtggctgttggtc

SEQ ID NO: 4463138 - DNA, 25 bp, Homo sapien
tctccgcgtctgaattgtaaaggct

SEQ ID NO: 4463139 - DNA, 25 bp, Homo sapien
gaatgggccctttgataaccggtgc

SEQ ID NO: 4463140 - DNA, 25 bp, Homo sapien
atagcttgtctgtcccccactggat

SEQ ID NO: 4463141 - DNA, 25 bp, Homo sapien
tatccccgagatagcttgtctgtcc

SEQ ID NO: 4463142 - DNA, 25 bp, Homo sapien
cttcctatccccgagatagcttgtc

SEQ ID NO: 4463143 - DNA, 25 bp, Homo sapien
cctatccccgagatagcttgtctgt

SEQ ID NO: 4463144 - DNA, 25 bp, Homo sapien
actgaagagcacagatattttcagg

SEQ ID NO: 4463145 - DNA, 25 bp, Homo sapien
ctgaagagcacagatattttcagga

SEQ ID NO: 4463146 - DNA, 25 bp, Homo sapien
ctgggatgctgactaaacccatcca

SEQ ID NO: 4463147 - DNA, 25 bp, Homo sapien
atcgtccttgagtgtgctgggatgc

SEQ ID NO: 4463148 - DNA, 25 bp, Homo sapien
gctgattttcaggtgccatcaactc

SEQ ID NO: 4463149 - DNA, 25 bp, Homo sapien
gccatcaactcatgccagcctgtgt

SEQ ID NO: 4463150 - DNA, 25 bp, Homo sapien
cctgtgtccaataaagactccatga

SEQ ID NO: 4463151 - DNA, 25 bp, Homo sapien
agcctgtgtccaataaagactccat

SEQ ID NO: 4463152 - DNA, 25 bp, Homo sapien
gtaattgcactagggaacagtcact

SEQ ID NO: 4463153 - DNA, 25 bp, Homo sapien
cagcttaagcaagatatgtgggccg

SEQ ID NO: 4463154 - DNA, 25 bp, Homo sapien
gagagggtaagagaacacatgccat

SEQ ID NO: 4463155 - DNA, 25 bp, Homo sapien
cagtatcctgtaaaacgcagcagcc

SEQ ID NO: 4463156 - DNA, 25 bp, Homo sapien
tgagagcattagtttcagccacact

SEQ ID NO: 4463157 - DNA, 25 bp, Homo sapien
cgtttccctgtttgcatcccagaga

SEQ ID NO: 4463158 - DNA, 25 bp, Homo sapien
cacactgtggtttacacgtgtcaac

SEQ ID NO: 4463159 - DNA, 25 bp, Homo sapien
cataatgaccgaatggatgttctag

SEQ ID NO: 4463160 - DNA, 25 bp, Homo sapien
tcaccagtgtggtttttagatgtca

SEQ ID NO: 4463161 - DNA, 25 bp, Homo sapien
tacagggttatagtcgaccagagac

SEQ ID NO: 4463162 - DNA, 25 bp, Homo sapien
ccagtgtggtttttagatgtcagct

SEQ ID NO: 4463163 - DNA, 25 bp, Homo sapien
ccacagtgaagcttcggtacagggt

SEQ ID NO: 4463164 - DNA, 25 bp, Homo sapien
gctgcccaaccagattggtgatttt

SEQ ID NO: 4463165 - DNA, 25 bp, Homo sapien
agtgctgcccaaccagattggtgat

SEQ ID NO: 4463166 - DNA, 25 bp, Homo sapien
gtgctgcccaaccagattggtgatt

SEQ ID NO: 4463167 - DNA, 25 bp, Homo sapien
cagtgctgcccaaccagattggtga

SEQ ID NO: 4463168 - DNA, 25 bp, Homo sapien
cattcggaagtaaactcgctgggca

SEQ ID NO: 4463169 - DNA, 25 bp, Homo sapien
ttcttgcttcgcagagaggctgggt

SEQ ID NO: 4463170 - DNA, 25 bp, Homo sapien
gcactgtttacttgcctggccggta

SEQ ID NO: 4463171 - DNA, 25 bp, Homo sapien
ggcaacttcttgcatgaggctcatg

SEQ ID NO: 4463172 - DNA, 25 bp, Homo sapien
tagtgagcacggtagacaccacgat

SEQ ID NO: 4463173 - DNA, 25 bp, Homo sapien
acaagccagcaagatatagcagaga

SEQ ID NO: 4463174 - DNA, 25 bp, Homo sapien
agatgtgctcaaggcagagcttgga

SEQ ID NO: 4463175 - DNA, 25 bp, Homo sapien
tatataaagcgaggtacaagccagc

SEQ ID NO: 4463176 - DNA, 25 bp, Homo sapien
catcccgaaggactctactccacct

SEQ ID NO: 4463177 - DNA, 25 bp, Homo sapien
ctctactccacctggaaactggacc

SEQ ID NO: 4463178 - DNA, 25 bp, Homo sapien
ctactccacctggaaactggaccac

SEQ ID NO: 4463179 - DNA, 25 bp, Homo sapien
tcccgaaggactctactccacctgg

SEQ ID NO: 4463180 - DNA, 25 bp, Homo sapien
ccactgtctactgtctactggtgga

SEQ ID NO: 4463181 - DNA, 25 bp, Homo sapien
ccccactatactgccccactgtcta

SEQ ID NO: 4463182 - DNA, 25 bp, Homo sapien
tctgtaccagtatggaacatactgg

SEQ ID NO: 4463183 - DNA, 25 bp, Homo sapien
cacatttcagcagagggtgtgtaat

SEQ ID NO: 4463184 - DNA, 25 bp, Homo sapien
tttcctggtccgtcactgctctctg

SEQ ID NO: 4463185 - DNA, 25 bp, Homo sapien
ctcatgctgcattttggcccacact

SEQ ID NO: 4463186 - DNA, 25 bp, Homo sapien
taaggctgtgcttctctttgatgct

SEQ ID NO: 4463187 - DNA, 25 bp, Homo sapien
tgatgctttcctggtccgtcactgc

SEQ ID NO: 4463188 - DNA, 25 bp, Homo sapien
atttgccaggcattcattgtatacc

SEQ ID NO: 4463189 - DNA, 25 bp, Homo sapien
gaagagcccatgagtgtctacacag

SEQ ID NO: 4463190 - DNA, 25 bp, Homo sapien
gaacaatgacgtgatacagactgag

SEQ ID NO: 4463191 - DNA, 25 bp, Homo sapien
tctacacagtcaacttcaatttgcc

SEQ ID NO: 4463192 - DNA, 25 bp, Homo sapien
aatggttcaagttggtaacggatct

SEQ ID NO: 4463193 - DNA, 25 bp, Homo sapien
tgctctggtgcgagatgtccctggc

SEQ ID NO: 4463194 - DNA, 25 bp, Homo sapien
tcaagttggtaacggatctgtgaag

SEQ ID NO: 4463195 - DNA, 25 bp, Homo sapien
taatcatcagcaagcataggatgct

SEQ ID NO: 4463196 - DNA, 25 bp, Homo sapien
tccaaagtgatagctgactgggctg

SEQ ID NO: 4463197 - DNA, 25 bp, Homo sapien
cttatgacatgtgagggaaaggcac

SEQ ID NO: 4463198 - DNA, 25 bp, Homo sapien
tggtcgcagtagcacaaattagtta

SEQ ID NO: 4463199 - DNA, 25 bp, Homo sapien
gaaaggcacgtaggcagtaggcttt

SEQ ID NO: 4463200 - DNA, 25 bp, Homo sapien
ttcatctgtgtcaagcacaacatcc

SEQ ID NO: 4463201 - DNA, 25 bp, Homo sapien
catctgtgtcaagcacaacatccat

SEQ ID NO: 4463202 - DNA, 25 bp, Homo sapien
cttcatctgtgtcaagcacaacatc

SEQ ID NO: 4463203 - DNA, 25 bp, Homo sapien
tcatctgtgtcaagcacaacatcca

SEQ ID NO: 4463204 - DNA, 25 bp, Homo sapien
ccctgtccttctgagagttactggg

SEQ ID NO: 4463205 - DNA, 25 bp, Homo sapien
ctcccagatatttgaccctgtcctt

SEQ ID NO: 4463206 - DNA, 25 bp, Homo sapien
tcccagatatttgaccctgtccttc

SEQ ID NO: 4463207 - DNA, 25 bp, Homo sapien
tgtccttctgagagttactgggcat

SEQ ID NO: 4463208 - DNA, 25 bp, Homo sapien
taaatgctccctgtgtgttcgtact

SEQ ID NO: 4463209 - DNA, 25 bp, Homo sapien
gatgcaaggcaagaacagggcttcg

SEQ ID NO: 4463210 - DNA, 25 bp, Homo sapien
caaggctctgactcttgaagaaacg

SEQ ID NO: 4463211 - DNA, 25 bp, Homo sapien
tgttcgtacttcacaccggtggaca

SEQ ID NO: 4463212 - DNA, 25 bp, Homo sapien
gaaattctgtcctacccttccatac

SEQ ID NO: 4463213 - DNA, 25 bp, Homo sapien
ttcctcaaagaaattctgtcctacc

SEQ ID NO: 4463214 - DNA, 25 bp, Homo sapien
cctcaaagaaattctgtcctaccct

SEQ ID NO: 4463215 - DNA, 25 bp, Homo sapien
agaaattctgtcctacccttccata

SEQ ID NO: 4463216 - DNA, 25 bp, Homo sapien
ataaagttaccaataggaacaatag

SEQ ID NO: 4463217 - DNA, 25 bp, Homo sapien
aaagttaccaataggaacaatagag

SEQ ID NO: 4463218 - DNA, 25 bp, Homo sapien
gcagggtgtagacctgtcagcaccc

SEQ ID NO: 4463219 - DNA, 25 bp, Homo sapien
cagcagggtgtagacctgtcagcac

SEQ ID NO: 4463220 - DNA, 25 bp, Homo sapien
tcatcccacatattgtgaactcctc

SEQ ID NO: 4463221 - DNA, 25 bp, Homo sapien
tcctcaaggtagtttggccctgtgg

SEQ ID NO: 4463222 - DNA, 25 bp, Homo sapien
tttgtcatcccacatattgtgaact

SEQ ID NO: 4463223 - DNA, 25 bp, Homo sapien
tgtgaactcctcaaggtagtttggc

SEQ ID NO: 4463224 - DNA, 25 bp, Homo sapien
gactctggcttctgattagggagcc

SEQ ID NO: 4463225 - DNA, 25 bp, Homo sapien
gaaagaatcagctgcccgtgtcaac

SEQ ID NO: 4463226 - DNA, 25 bp, Homo sapien
aatgtaaaggtgagaggcttcagtc

SEQ ID NO: 4463227 - DNA, 25 bp, Homo sapien
tgattgagaagactaggacatggga

SEQ ID NO: 4463228 - DNA, 25 bp, Homo sapien
gaagtatttcaacatttggatttga

SEQ ID NO: 4463229 - DNA, 25 bp, Homo sapien
ccacctgaagtatttcaacatttgg

SEQ ID NO: 4463230 - DNA, 25 bp, Homo sapien
cttttccacctgaagtatttcaaca

SEQ ID NO: 4463231 - DNA, 25 bp, Homo sapien
cctgaagtatttcaacatttggatt

SEQ ID NO: 4463232 - DNA, 25 bp, Homo sapien
cttcttccccgcatgcctttttctt

SEQ ID NO: 4463233 - DNA, 25 bp, Homo sapien
aaacaccttcttccccgcatgcctt

SEQ ID NO: 4463234 - DNA, 25 bp, Homo sapien
ccttcttccccgcatgcctttttct

SEQ ID NO: 4463235 - DNA, 25 bp, Homo sapien
aggacaaacaccttcttccccgcat

SEQ ID NO: 4463236 - DNA, 25 bp, Homo sapien
ctttgaccctgcctttcggagaact

SEQ ID NO: 4463237 - DNA, 25 bp, Homo sapien
cagggcaccctttgaccctgccttt

SEQ ID NO: 4463238 - DNA, 25 bp, Homo sapien
caccctttgaccctgcctttcggag

SEQ ID NO: 4463239 - DNA, 25 bp, Homo sapien
tccccagggcaccctttgaccctgc

SEQ ID NO: 4463240 - DNA, 25 bp, Homo sapien
gaatccaagggaaatgagactcccg

SEQ ID NO: 4463241 - DNA, 25 bp, Homo sapien
taattctcgtcactctgatcttcgg

SEQ ID NO: 4463242 - DNA, 25 bp, Homo sapien
gaagaactgggttactacgcatgct

SEQ ID NO: 4463243 - DNA, 25 bp, Homo sapien
gcctgttggaaatgcgcttgcgtcc

SEQ ID NO: 4463244 - DNA, 25 bp, Homo sapien
cttggttttagaagcggctgctgcc

SEQ ID NO: 4463245 - DNA, 25 bp, Homo sapien
ttggttttagaagcggctgctgcct

SEQ ID NO: 4463246 - DNA, 25 bp, Homo sapien
tagaagcggctgctgcctgtgatct

SEQ ID NO: 4463247 - DNA, 25 bp, Homo sapien
ttttagaagcggctgctgcctgtga

SEQ ID NO: 4463248 - DNA, 25 bp, Homo sapien
tgtggatgtggctctagctccctca

SEQ ID NO: 4463249 - DNA, 25 bp, Homo sapien
tagcgagctggtgctagcaatggcc

SEQ ID NO: 4463250 - DNA, 25 bp, Homo sapien
ataattaggccccaagcggcagctg

SEQ ID NO: 4463251 - DNA, 25 bp, Homo sapien
tgtcaccagggctttgactgccgga

SEQ ID NO: 4463252 - DNA, 25 bp, Homo sapien
tcccagcatcatgggacttccgaag

SEQ ID NO: 4463253 - DNA, 25 bp, Homo sapien
tccgaagttccccacatggatcatc

SEQ ID NO: 4463254 - DNA, 25 bp, Homo sapien
acttccgaagttccccacatggatc

SEQ ID NO: 4463255 - DNA, 25 bp, Homo sapien
gaagttccccacatggatcatccat

SEQ ID NO: 4463256 - DNA, 25 bp, Homo sapien
gctgctgaggtacagaacccacagg

SEQ ID NO: 4463257 - DNA, 25 bp, Homo sapien
agaaagaagacgtggcaggaagttg

SEQ ID NO: 4463258 - DNA, 25 bp, Homo sapien
tgaggtacagaacccacaggtcggg

SEQ ID NO: 4463259 - DNA, 25 bp, Homo sapien
ccacaggtcggggacacggtcactg

SEQ ID NO: 4463260 - DNA, 25 bp, Homo sapien
ggtaaaatccactctgaagtgcagc

SEQ ID NO: 4463261 - DNA, 25 bp, Homo sapien
catttccattacggaacccagtggt

SEQ ID NO: 4463262 - DNA, 25 bp, Homo sapien
ccctcataattaagattatgtcagc

SEQ ID NO: 4463263 - DNA, 25 bp, Homo sapien
gttttaaagctcttcgtcttggaga

SEQ ID NO: 4463264 - DNA, 25 bp, Homo sapien
ttctttattcacctttaggcctgaa

SEQ ID NO: 4463265 - DNA, 25 bp, Homo sapien
aacatgtattgactgttccagctgt

SEQ ID NO: 4463266 - DNA, 25 bp, Homo sapien
ggagaacatgtattgactgttccag

SEQ ID NO: 4463267 - DNA, 25 bp, Homo sapien
gaaaagacatattttggagaacatg

SEQ ID NO: 4463268 - DNA, 25 bp, Homo sapien
cactaagacgaatcacagcagggca

SEQ ID NO: 4463269 - DNA, 25 bp, Homo sapien
ttccagagcatgtggccggcatctc

SEQ ID NO: 4463270 - DNA, 25 bp, Homo sapien
catttgcatcgtaaggagaccttga

SEQ ID NO: 4463271 - DNA, 25 bp, Homo sapien
gcaggttagttcttcaccagtgtcc

SEQ ID NO: 4463272 - DNA, 25 bp, Homo sapien
cccttggaactgagctcccagcgac

SEQ ID NO: 4463273 - DNA, 25 bp, Homo sapien
ccttggaactgagctcccagcgaca

SEQ ID NO: 4463274 - DNA, 25 bp, Homo sapien
agcccttggaactgagctcccagcg

SEQ ID NO: 4463275 - DNA, 25 bp, Homo sapien
gcccttggaactgagctcccagcga

SEQ ID NO: 4463276 - DNA, 25 bp, Homo sapien
cttgactggaggagatgcttttgaa

SEQ ID NO: 4463277 - DNA, 25 bp, Homo sapien
agtgttggctggcttgactggagga

SEQ ID NO: 4463278 - DNA, 25 bp, Homo sapien
tgcttttgaagggctctgaggtgcc

SEQ ID NO: 4463279 - DNA, 25 bp, Homo sapien
aggagatgcttttgaagggctctga

SEQ ID NO: 4463280 - DNA, 25 bp, Homo sapien
agctgatattttggagcccaaggac

SEQ ID NO: 4463281 - DNA, 25 bp, Homo sapien
gaggccggatgtggctgggccagct

SEQ ID NO: 4463282 - DNA, 25 bp, Homo sapien
ggaggtggcgcatatgtgcttccaa

SEQ ID NO: 4463283 - DNA, 25 bp, Homo sapien
tgcttccaaatgggaggccggatgt

SEQ ID NO: 4463284 - DNA, 25 bp, Homo sapien
tccttagtttccgcgaggtggccat

SEQ ID NO: 4463285 - DNA, 25 bp, Homo sapien
gcttccttagtttccgcgaggtggc

SEQ ID NO: 4463286 - DNA, 25 bp, Homo sapien
cttagtttccgcgaggtggccatct

SEQ ID NO: 4463287 - DNA, 25 bp, Homo sapien
tagtttccgcgaggtggccatctag

SEQ ID NO: 4463288 - DNA, 25 bp, Homo sapien
taatagctccccaagcctcgagttc

SEQ ID NO: 4463289 - DNA, 25 bp, Homo sapien
ctagggattgatgctgccccgtgcc

SEQ ID NO: 4463290 - DNA, 25 bp, Homo sapien
tctgttcgcagtgcccagcttgtgc

SEQ ID NO: 4463291 - DNA, 25 bp, Homo sapien
gagtgaacgctggactctcggcaga

SEQ ID NO: 4463292 - DNA, 25 bp, Homo sapien
ctatctgctcatcgtagctggggct

SEQ ID NO: 4463293 - DNA, 25 bp, Homo sapien
tctgctcatcgtagctggggcttcc

SEQ ID NO: 4463294 - DNA, 25 bp, Homo sapien
tatctgctcatcgtagctggggctt

SEQ ID NO: 4463295 - DNA, 25 bp, Homo sapien
tgctcatcgtagctggggcttcctg

SEQ ID NO: 4463296 - DNA, 25 bp, Homo sapien
gggtgcttttgcacacgggatgccc

SEQ ID NO: 4463297 - DNA, 25 bp, Homo sapien
agggtgcttttgcacacgggatgcc

SEQ ID NO: 4463298 - DNA, 25 bp, Homo sapien
gacaccgtggaacattcgatgagaa

SEQ ID NO: 4463299 - DNA, 25 bp, Homo sapien
agaataacccggagccacattccca

SEQ ID NO: 4463300 - DNA, 25 bp, Homo sapien
gaatgtcttctgacaccgtggaaca

SEQ ID NO: 4463301 - DNA, 25 bp, Homo sapien
taaggacctcgttttgtgcaacctg

SEQ ID NO: 4463302 - DNA, 25 bp, Homo sapien
ggcactgaagcctgcctaccagtca

SEQ ID NO: 4463303 - DNA, 25 bp, Homo sapien
taccagtcaacgtggaagcagatgt

SEQ ID NO: 4463304 - DNA, 25 bp, Homo sapien
tgttatgaactgaaggtcgttccct

SEQ ID NO: 4463305 - DNA, 25 bp, Homo sapien
cctagactggatcataggaggcact

SEQ ID NO: 4463306 - DNA, 25 bp, Homo sapien
gtcctgtggtgagataggaactgaa

SEQ ID NO: 4463307 - DNA, 25 bp, Homo sapien
tgagataggaactgaaattaggatc

SEQ ID NO: 4463308 - DNA, 25 bp, Homo sapien
tgaaattaggatccaacatcaccaa

SEQ ID NO: 4463309 - DNA, 25 bp, Homo sapien
gaaattaggatccaacatcaccaac

SEQ ID NO: 4463310 - DNA, 25 bp, Homo sapien
gaacctttcttagactgcatggcag

SEQ ID NO: 4463311 - DNA, 25 bp, Homo sapien
gacagccgactttggcttgaagact

SEQ ID NO: 4463312 - DNA, 25 bp, Homo sapien
gcatggcagtctgggatgttctacc

SEQ ID NO: 4463313 - DNA, 25 bp, Homo sapien
tccgtggtttctctcagcgactggc

SEQ ID NO: 4463314 - DNA, 25 bp, Homo sapien
gctttaacccatgaacaaatgttgg

SEQ ID NO: 4463315 - DNA, 25 bp, Homo sapien
aatcacagctgttgacaatgtccca

SEQ ID NO: 4463316 - DNA, 25 bp, Homo sapien
gatgtggacacgcttggtttgctct

SEQ ID NO: 4463317 - DNA, 25 bp, Homo sapien
taaaatagctacactctgccctctg

SEQ ID NO: 4463318 - DNA, 25 bp, Homo sapien
taagaagagcgatggacagagtctc

SEQ ID NO: 4463319 - DNA, 25 bp, Homo sapien
tgggagatcagtcataggtagcagc

SEQ ID NO: 4463320 - DNA, 25 bp, Homo sapien
tctgaggacatagggaaaactcttg

SEQ ID NO: 4463321 - DNA, 25 bp, Homo sapien
caatagtatggcactttgaccagta

SEQ ID NO: 4463322 - DNA, 25 bp, Homo sapien
tcatgtcaaatgtgaacattgacac

SEQ ID NO: 4463323 - DNA, 25 bp, Homo sapien
gctggcatgtaagaaagcagttgac

SEQ ID NO: 4463324 - DNA, 25 bp, Homo sapien
caggtgttccaacataatttgttga

SEQ ID NO: 4463325 - DNA, 25 bp, Homo sapien
agtttcctcacttagatcacataca

SEQ ID NO: 4463326 - DNA, 25 bp, Homo sapien
gatgtgttaatctccagatttcaag

SEQ ID NO: 4463327 - DNA, 25 bp, Homo sapien
gttgagctgcattaggcagatttac

SEQ ID NO: 4463328 - DNA, 25 bp, Homo sapien
attacttacaatttcttaaccattg

SEQ ID NO: 4463329 - DNA, 25 bp, Homo sapien
ttttgttgcttctgattttgagtga

SEQ ID NO: 4463330 - DNA, 25 bp, Homo sapien
acgagacaggcgcaagctaacttcc

SEQ ID NO: 4463331 - DNA, 25 bp, Homo sapien
catagatgtccctgtactcggtaac

SEQ ID NO: 4463332 - DNA, 25 bp, Homo sapien
ttcaacagcaggtgacggcgggaaa

SEQ ID NO: 4463333 - DNA, 25 bp, Homo sapien
tggttgcctaggtgacgctcagcgc

SEQ ID NO: 4463334 - DNA, 25 bp, Homo sapien
aactctagcaggacaagaacgcggt

SEQ ID NO: 4463335 - DNA, 25 bp, Homo sapien
aggcggagtcgaactctagcaggac

SEQ ID NO: 4463336 - DNA, 25 bp, Homo sapien
ggagtcgaactctagcaggacaaga

SEQ ID NO: 4463337 - DNA, 25 bp, Homo sapien
tagcaggacaagaacgcggtcggtc

SEQ ID NO: 4463338 - DNA, 25 bp, Homo sapien
gaccaagctatgttgcctgtgccat

SEQ ID NO: 4463339 - DNA, 25 bp, Homo sapien
caaattatttgtcgcgcgccagtgg

SEQ ID NO: 4463340 - DNA, 25 bp, Homo sapien
taaggtcgtgctacatcaaagacag

SEQ ID NO: 4463341 - DNA, 25 bp, Homo sapien
tgtgaccagctaggaaaaacagacg

SEQ ID NO: 4463342 - DNA, 25 bp, Homo sapien
ttctctctccggcttcaggtggagg

SEQ ID NO: 4463343 - DNA, 25 bp, Homo sapien
tcattgtgaggatcgacgggcgtaa

SEQ ID NO: 4463344 - DNA, 25 bp, Homo sapien
ctgagcaaggtttggagacccagtt

SEQ ID NO: 4463345 - DNA, 25 bp, Homo sapien
tactataccgcagagtcattgtgag

SEQ ID NO: 4463346 - DNA, 25 bp, Homo sapien
acgccaggctcttccctgtccctct

SEQ ID NO: 4463347 - DNA, 25 bp, Homo sapien
ctgacgccaggctcttccctgtccc

SEQ ID NO: 4463348 - DNA, 25 bp, Homo sapien
tgtccctctgccacgtggctggatt

SEQ ID NO: 4463349 - DNA, 25 bp, Homo sapien
tcttccctgtccctctgccacgtgg

SEQ ID NO: 4463350 - DNA, 25 bp, Homo sapien
cctgccgctgggagcgcttgccagt

SEQ ID NO: 4463351 - DNA, 25 bp, Homo sapien
tgagcttttatacctgccgctggga

SEQ ID NO: 4463352 - DNA, 25 bp, Homo sapien
agtgttcaaggactgccagcctgag

SEQ ID NO: 4463353 - DNA, 25 bp, Homo sapien
cagtgttcaaggactgccagcctga

SEQ ID NO: 4463354 - DNA, 25 bp, Homo sapien
caccgaccaggagaggcgcttagcg

SEQ ID NO: 4463355 - DNA, 25 bp, Homo sapien
gagaggcgcttagcggctgggaaat

SEQ ID NO: 4463356 - DNA, 25 bp, Homo sapien
ggacaccgaccaggagaggcgctta

SEQ ID NO: 4463357 - DNA, 25 bp, Homo sapien
tctgcctgggacaccgaccaggaga

SEQ ID NO: 4463358 - DNA, 25 bp, Homo sapien
atcgtcagagcgagtcccgcaaggt

SEQ ID NO: 4463359 - DNA, 25 bp, Homo sapien
cacaaggatcgtcagagcgagtccc

SEQ ID NO: 4463360 - DNA, 25 bp, Homo sapien
gtcccgcaaggtgcagtaaatcctg

SEQ ID NO: 4463361 - DNA, 25 bp, Homo sapien
cacaaaggcacaaggatcgtcagag

SEQ ID NO: 4463362 - DNA, 25 bp, Homo sapien
tggccactctctgctggagcttgtc

SEQ ID NO: 4463363 - DNA, 25 bp, Homo sapien
gccactctctgctggagcttgtcta

SEQ ID NO: 4463364 - DNA, 25 bp, Homo sapien
ctggccactctctgctggagcttgt

SEQ ID NO: 4463365 - DNA, 25 bp, Homo sapien
ccactctctgctggagcttgtctac

SEQ ID NO: 4463366 - DNA, 25 bp, Homo sapien
ttcgacccaagaattccggagcgca

SEQ ID NO: 4463367 - DNA, 25 bp, Homo sapien
agtgagcacatttgcgcacgcggcg

SEQ ID NO: 4463368 - DNA, 25 bp, Homo sapien
agcggagtcgctccaggcaccacat

SEQ ID NO: 4463369 - DNA, 25 bp, Homo sapien
aggcactcaggacccaagcggagtc

SEQ ID NO: 4463370 - DNA, 25 bp, Homo sapien
ggggcaggtgcggcagtgacagcgc

SEQ ID NO: 4463371 - DNA, 25 bp, Homo sapien
tccttgcggcgcgtgtgcgggctct

SEQ ID NO: 4463372 - DNA, 25 bp, Homo sapien
cagaagccgtaggcggtgcgcacac

SEQ ID NO: 4463373 - DNA, 25 bp, Homo sapien
agcagcgcgcagaagccgtaggcgg

SEQ ID NO: 4463374 - DNA, 25 bp, Homo sapien
gtgtgcgggctctcgagcagcgcgc

SEQ ID NO: 4463375 - DNA, 25 bp, Homo sapien
ccgggcccggagctcgcgggacgcg

SEQ ID NO: 4463376 - DNA, 25 bp, Homo sapien
tcagcagcccgtcggggacgcgcag

SEQ ID NO: 4463377 - DNA, 25 bp, Homo sapien
ccgctggagacggagcggacgcggg

SEQ ID NO: 4463378 - DNA, 25 bp, Homo sapien
gtcctcgttcccgctggagacggag

SEQ ID NO: 4463379 - DNA, 25 bp, Homo sapien
cctcgttcccgctggagacggagcg

SEQ ID NO: 4463380 - DNA, 25 bp, Homo sapien
ttcccgctggagacggagcggacgc

SEQ ID NO: 4463381 - DNA, 25 bp, Homo sapien
acagtgctgcattgccgaagcgcgg

SEQ ID NO: 4463382 - DNA, 25 bp, Homo sapien
tgctgcattgccgaagcgcggtgcc

SEQ ID NO: 4463383 - DNA, 25 bp, Homo sapien
ctgcattgccgaagcgcggtgcccg

SEQ ID NO: 4463384 - DNA, 25 bp, Homo sapien
ccaccacagtgctgcattgccgaag

SEQ ID NO: 4463385 - DNA, 25 bp, Homo sapien
tatagctaggagtatcaggctggcg

SEQ ID NO: 4463386 - DNA, 25 bp, Homo sapien
ggtcaacaactgcaagctcctggat

SEQ ID NO: 4463387 - DNA, 25 bp, Homo sapien
tagcgagccctttagacactgtggt

SEQ ID NO: 4463388 - DNA, 25 bp, Homo sapien
tgagaagccaaagcgggatgacagc

SEQ ID NO: 4463389 - DNA, 25 bp, Homo sapien
aaacccacaattatacgtagccaag

SEQ ID NO: 4463390 - DNA, 25 bp, Homo sapien
ggcagctgggggctgcctcttcatc

SEQ ID NO: 4463391 - DNA, 25 bp, Homo sapien
aggatggcaagggctgccttgggct

SEQ ID NO: 4463392 - DNA, 25 bp, Homo sapien
cagctgggggctgcctcttcatcca

SEQ ID NO: 4463393 - DNA, 25 bp, Homo sapien
gatggcaagggctgccttgggctgg

SEQ ID NO: 4463394 - DNA, 25 bp, Homo sapien
ccaagctcttcagcacaggctgagt

SEQ ID NO: 4463395 - DNA, 25 bp, Homo sapien
caagctcttcagcacaggctgagtc

SEQ ID NO: 4463396 - DNA, 25 bp, Homo sapien
tggtcacttcgggacttttctctcc

SEQ ID NO: 4463397 - DNA, 25 bp, Homo sapien
tctcccacgtgggaaaaggatttca

SEQ ID NO: 4463398 - DNA, 25 bp, Homo sapien
gaaaaagaccctcacattacacagg

SEQ ID NO: 4463399 - DNA, 25 bp, Homo sapien
tctgcgcaaagaggaaggtgtagca

SEQ ID NO: 4463400 - DNA, 25 bp, Homo sapien
aatgacagcgtttgtctgcaggaag

SEQ ID NO: 4463401 - DNA, 25 bp, Homo sapien
tgttgagctagtttgaagggtttct

SEQ ID NO: 4463402 - DNA, 25 bp, Homo sapien
tctgcctttccttgattactctgag

SEQ ID NO: 4463403 - DNA, 25 bp, Homo sapien
ctcagccccgctttctgcctttcct

SEQ ID NO: 4463404 - DNA, 25 bp, Homo sapien
tttccttgattactctgagatacac

SEQ ID NO: 4463405 - DNA, 25 bp, Homo sapien
catgggctcagccccgctttctgcc

SEQ ID NO: 4463406 - DNA, 25 bp, Homo sapien
gcctttgttactgcttgtctatctg

SEQ ID NO: 4463407 - DNA, 25 bp, Homo sapien
gttcttggacccattgatccctgaa

SEQ ID NO: 4463408 - DNA, 25 bp, Homo sapien
tctttggccatctgtaggaacagtg

SEQ ID NO: 4463409 - DNA, 25 bp, Homo sapien
tttggccatctgtaggaacagtggg

SEQ ID NO: 4463410 - DNA, 25 bp, Homo sapien
agcctgctctgagtatgcctcagcc

SEQ ID NO: 4463411 - DNA, 25 bp, Homo sapien
cagtcgtgccggaggaggaaaacca

SEQ ID NO: 4463412 - DNA, 25 bp, Homo sapien
tgcatttctagtggggcttcaggga

SEQ ID NO: 4463413 - DNA, 25 bp, Homo sapien
gccaggattccagctgagtatggat

SEQ ID NO: 4463414 - DNA, 25 bp, Homo sapien
tgagaatataccagatgggtctaat

SEQ ID NO: 4463415 - DNA, 25 bp, Homo sapien
cagatgggtctaatcgtgcactgcc

SEQ ID NO: 4463416 - DNA, 25 bp, Homo sapien
gggtctaatcgtgcactgccttctg

SEQ ID NO: 4463417 - DNA, 25 bp, Homo sapien
tataccagatgggtctaatcgtgca

SEQ ID NO: 4463418 - DNA, 25 bp, Homo sapien
acctctgaacccctcttttagtgag

SEQ ID NO: 4463419 - DNA, 25 bp, Homo sapien
taatgacctggtccaatctaggtgg

SEQ ID NO: 4463420 - DNA, 25 bp, Homo sapien
tttctcagatttgggcctccacctc

SEQ ID NO: 4463421 - DNA, 25 bp, Homo sapien
tatcactgaactttgaccttggacc

SEQ ID NO: 4463422 - DNA, 25 bp, Homo sapien
tcttggttgtccctggttgtcactg

SEQ ID NO: 4463423 - DNA, 25 bp, Homo sapien
caggactcaggatgcataggacaag

SEQ ID NO: 4463424 - DNA, 25 bp, Homo sapien
ctttggcttggcatgattcagagat

SEQ ID NO: 4463425 - DNA, 25 bp, Homo sapien
cttgaactcctgagtcccaccagga

SEQ ID NO: 4463426 - DNA, 25 bp, Homo sapien
tgaccaggttgaactttggtccgag

SEQ ID NO: 4463427 - DNA, 25 bp, Homo sapien
tgaactttggtccgagttggcagtt

SEQ ID NO: 4463428 - DNA, 25 bp, Homo sapien
ggttgaactttggtccgagttggca

SEQ ID NO: 4463429 - DNA, 25 bp, Homo sapien
ccaggttgaactttggtccgagttg

SEQ ID NO: 4463430 - DNA, 25 bp, Homo sapien
tacaaatgtgttgttgaagtcccct

SEQ ID NO: 4463431 - DNA, 25 bp, Homo sapien
taatttgggatttcggttgttctca

SEQ ID NO: 4463432 - DNA, 25 bp, Homo sapien
atggaatgttctgtaactgcctgtt

SEQ ID NO: 4463433 - DNA, 25 bp, Homo sapien
cagtagcatggttgtttaattttca

SEQ ID NO: 4463434 - DNA, 25 bp, Homo sapien
gagaaaggaagtacacccatctgca

SEQ ID NO: 4463435 - DNA, 25 bp, Homo sapien
ttccggttttctatcaatgttacag

SEQ ID NO: 4463436 - DNA, 25 bp, Homo sapien
catttgtcatcgtctattggtaaag

SEQ ID NO: 4463437 - DNA, 25 bp, Homo sapien
cgcgtggtacagaataaacgttatt

SEQ ID NO: 4463438 - DNA, 25 bp, Homo sapien
gccgcgcgggatccgagtccccggc

SEQ ID NO: 4463439 - DNA, 25 bp, Homo sapien
ggacgaggagcgccgcgcgggatcc

SEQ ID NO: 4463440 - DNA, 25 bp, Homo sapien
acgaggagcgccgcgcgggatccga

SEQ ID NO: 4463441 - DNA, 25 bp, Homo sapien
aggagcgccgcgcgggatccgagtc

SEQ ID NO: 4463442 - DNA, 25 bp, Homo sapien
tgaagaagtcaacaagaagtgttct

SEQ ID NO: 4463443 - DNA, 25 bp, Homo sapien
gaagaagtcaacaagaagtgttctg

SEQ ID NO: 4463444 - DNA, 25 bp, Homo sapien
ctgcttttcccttctggagggtatt

SEQ ID NO: 4463445 - DNA, 25 bp, Homo sapien
cccttctggagggtatttttctgtg

SEQ ID NO: 4463446 - DNA, 25 bp, Homo sapien
ctggagggtatttttctgtggccat

SEQ ID NO: 4463447 - DNA, 25 bp, Homo sapien
cctgcttttcccttctggagggtat

SEQ ID NO: 4463448 - DNA, 25 bp, Homo sapien
ggagatggcttcacttccgaggagc

SEQ ID NO: 4463449 - DNA, 25 bp, Homo sapien
cgttgcgcagggagagaccgccacc

SEQ ID NO: 4463450 - DNA, 25 bp, Homo sapien
gaaggacaggcccggtagcagggcc

SEQ ID NO: 4463451 - DNA, 25 bp, Homo sapien
ttcacttccgaggagcgttgcgcag

SEQ ID NO: 4463452 - DNA, 25 bp, Homo sapien
agagccaagtgggctcagccccaga

SEQ ID NO: 4463453 - DNA, 25 bp, Homo sapien
gagagccaagtgggctcagccccag

SEQ ID NO: 4463454 - DNA, 25 bp, Homo sapien
gcaggcgcttcagaacaagctgcct

SEQ ID NO: 4463455 - DNA, 25 bp, Homo sapien
taagaggcgctagaagcaaggcagc

SEQ ID NO: 4463456 - DNA, 25 bp, Homo sapien
gacaggttactagacgcaggcgctt

SEQ ID NO: 4463457 - DNA, 25 bp, Homo sapien
tagaagcaaggcagcgacaggttac

SEQ ID NO: 4463458 - DNA, 25 bp, Homo sapien
gagtttcaacataaaggctaagagg

SEQ ID NO: 4463459 - DNA, 25 bp, Homo sapien
tgagtatggcttcccggtgcaaaaa

SEQ ID NO: 4463460 - DNA, 25 bp, Homo sapien
caacacaaatagtggtgagtatggc

SEQ ID NO: 4463461 - DNA, 25 bp, Homo sapien
tcaacataaaggctaagaggcaggg

SEQ ID NO: 4463462 - DNA, 25 bp, Homo sapien
tcaccacgtgatatgctgcctcctc

SEQ ID NO: 4463463 - DNA, 25 bp, Homo sapien
tctcaccacgtgatatgctgcctcc

SEQ ID NO: 4463464 - DNA, 25 bp, Homo sapien
accacgtgatatgctgcctcctcct

SEQ ID NO: 4463465 - DNA, 25 bp, Homo sapien
cactctcaccacgtgatatgctgcc

SEQ ID NO: 4463466 - DNA, 25 bp, Homo sapien
catccacgtgacctttttgctgctg

SEQ ID NO: 4463467 - DNA, 25 bp, Homo sapien
ggcctggctttccttctttcaccat

SEQ ID NO: 4463468 - DNA, 25 bp, Homo sapien
agctgctttttggggcctggctttc

SEQ ID NO: 4463469 - DNA, 25 bp, Homo sapien
cacgtgacctttttgctgctggagc

SEQ ID NO: 4463470 - DNA, 25 bp, Homo sapien
tcttgaagctgacaatggagggaga

SEQ ID NO: 4463471 - DNA, 25 bp, Homo sapien
ctgaaaacacgaacacttgcagacg

SEQ ID NO: 4463472 - DNA, 25 bp, Homo sapien
gagggagaggactggtctgccaaga

SEQ ID NO: 4463473 - DNA, 25 bp, Homo sapien
gaacacttgcagacgtctttcttcc

SEQ ID NO: 4463474 - DNA, 25 bp, Homo sapien
ggaagttcccttctactagtcatag

SEQ ID NO: 4463475 - DNA, 25 bp, Homo sapien
ttttatcactaaagggtgttggagc

SEQ ID NO: 4463476 - DNA, 25 bp, Homo sapien
gccttgtaccctaactctgctgagt

SEQ ID NO: 4463477 - DNA, 25 bp, Homo sapien
aacaaaacaagatcacgcagacttt

SEQ ID NO: 4463478 - DNA, 25 bp, Homo sapien
ttccttactcttgcccttgtccttc

SEQ ID NO: 4463479 - DNA, 25 bp, Homo sapien
ttctttccttactcttgcccttgtc

SEQ ID NO: 4463480 - DNA, 25 bp, Homo sapien
ctgtttctttccttactcttgccct

SEQ ID NO: 4463481 - DNA, 25 bp, Homo sapien
ccttgtccttcttccagcgacccat

SEQ ID NO: 4463482 - DNA, 25 bp, Homo sapien
agccaacaggctcagaatcctgatc

SEQ ID NO: 4463483 - DNA, 25 bp, Homo sapien
catcctggtgtgttcctatttcctt

SEQ ID NO: 4463484 - DNA, 25 bp, Homo sapien
aatcctgatctagcggtggccggga

SEQ ID NO: 4463485 - DNA, 25 bp, Homo sapien
tggtgtgttcctatttccttcactg

SEQ ID NO: 4463486 - DNA, 25 bp, Homo sapien
ccagaaacacgaactgaagaagtat

SEQ ID NO: 4463487 - DNA, 25 bp, Homo sapien
gaaacacgaactgaagaagtatctg

SEQ ID NO: 4463488 - DNA, 25 bp, Homo sapien
ctctcccagaaacacgaactgaaga

SEQ ID NO: 4463489 - DNA, 25 bp, Homo sapien
cgaactgaagaagtatctgggcgag

SEQ ID NO: 4463490 - DNA, 25 bp, Homo sapien
ggaaaaagtgcctgttgtcagccac

SEQ ID NO: 4463491 - DNA, 25 bp, Homo sapien
cggcaagtcttgtcatctccacgag

SEQ ID NO: 4463492 - DNA, 25 bp, Homo sapien
ttggctgaactaaggaaccaggtgg

SEQ ID NO: 4463493 - DNA, 25 bp, Homo sapien
gagtacaggagctggagacgatctt

SEQ ID NO: 4463494 - DNA, 25 bp, Homo sapien
tcagttatctagctggtgtgaagcc

SEQ ID NO: 4463495 - DNA, 25 bp, Homo sapien
tgtacattgaacctagctctagccc

SEQ ID NO: 4463496 - DNA, 25 bp, Homo sapien
tatgccgagtatctgcatggagaga

SEQ ID NO: 4463497 - DNA, 25 bp, Homo sapien
gatggagtggctgaagtatctgcaa

SEQ ID NO: 4463498 - DNA, 25 bp, Homo sapien
gcagccctcatgtgaagcggcactt

SEQ ID NO: 4463499 - DNA, 25 bp, Homo sapien
gaaagtctagcaggacagctccagt

SEQ ID NO: 4463500 - DNA, 25 bp, Homo sapien
cccacatgcaagacaatgaggactt

SEQ ID NO: 4463501 - DNA, 25 bp, Homo sapien
tttgagaatccagaggccgttattg

SEQ ID NO: 4463502 - DNA, 25 bp, Homo sapien
tggtgcctggtgaagcgctcaaagc

SEQ ID NO: 4463503 - DNA, 25 bp, Homo sapien
tctgattaagctgtgagggccctgg

SEQ ID NO: 4463504 - DNA, 25 bp, Homo sapien
gactgccttagaccctccgatgaat

SEQ ID NO: 4463505 - DNA, 25 bp, Homo sapien
taaatgggattgctagcatggtgcc

SEQ ID NO: 4463506 - DNA, 25 bp, Homo sapien
tctaggaagtcagagcgaaagagcc

SEQ ID NO: 4463507 - DNA, 25 bp, Homo sapien
tatcatatgcaacgtgctgccaggc

SEQ ID NO: 4463508 - DNA, 25 bp, Homo sapien
gcttgaaagtggtctcagagccaga

SEQ ID NO: 4463509 - DNA, 25 bp, Homo sapien
cctaggtgtgggatatggtacttgc

SEQ ID NO: 4463510 - DNA, 25 bp, Homo sapien
ttcagaggccaggaccaaagggtcc

SEQ ID NO: 4463511 - DNA, 25 bp, Homo sapien
tacagcacttgctctaaggagggaa

SEQ ID NO: 4463512 - DNA, 25 bp, Homo sapien
tccctggagcgaggtgtagccactt

SEQ ID NO: 4463513 - DNA, 25 bp, Homo sapien
tctagagccagatgcttgggccaag

SEQ ID NO: 4463514 - DNA, 25 bp, Homo sapien
ttggttccgaatggactcgaggccg

SEQ ID NO: 4463515 - DNA, 25 bp, Homo sapien
gataagtgaccgaaacattctgccc

SEQ ID NO: 4463516 - DNA, 25 bp, Homo sapien
caagctaggctgcacactgagtgag

SEQ ID NO: 4463517 - DNA, 25 bp, Homo sapien
ggacacttagccatattcattgggc

SEQ ID NO: 4463518 - DNA, 25 bp, Homo sapien
catgagggcaggttctaccgtttca

SEQ ID NO: 4463519 - DNA, 25 bp, Homo sapien
tgttcaaggtcgcacattgctcaag

SEQ ID NO: 4463520 - DNA, 25 bp, Homo sapien
tatcctagacgcttagttcactgcc

SEQ ID NO: 4463521 - DNA, 25 bp, Homo sapien
aaggagcccacgagcaatcaaggga

SEQ ID NO: 4463522 - DNA, 25 bp, Homo sapien
gaggctgcttcactaacaggtgcca

SEQ ID NO: 4463523 - DNA, 25 bp, Homo sapien
tggaacgtgcataaggagtgacaga

SEQ ID NO: 4463524 - DNA, 25 bp, Homo sapien
taagtgactgctagggtctggttca

SEQ ID NO: 4463525 - DNA, 25 bp, Homo sapien
tatttgaccttagcttggaacgtgc

SEQ ID NO: 4463526 - DNA, 25 bp, Homo sapien
tatcaagattgccaccataaaggcc

SEQ ID NO: 4463527 - DNA, 25 bp, Homo sapien
caatctctgagcctaagatcttccc

SEQ ID NO: 4463528 - DNA, 25 bp, Homo sapien
cattcctgtgggtaaattatgtaaa

SEQ ID NO: 4463529 - DNA, 25 bp, Homo sapien
gggaaatattgtgaactgcagtctt

SEQ ID NO: 4463530 - DNA, 25 bp, Homo sapien
gacatttaggatgtttcatataatg

SEQ ID NO: 4463531 - DNA, 25 bp, Homo sapien
ggagaattgtttgaatcccaggagg

SEQ ID NO: 4463532 - DNA, 25 bp, Homo sapien
agaattgtttgaatcccaggaggcg

SEQ ID NO: 4463533 - DNA, 25 bp, Homo sapien
gaggctgccgtgagctgagatcgca

SEQ ID NO: 4463534 - DNA, 25 bp, Homo sapien
cgcaccactgcagtccagcctggag

SEQ ID NO: 4463535 - DNA, 25 bp, Homo sapien
tcacaatcatttcggagtttcaggg

SEQ ID NO: 4463536 - DNA, 25 bp, Homo sapien
tgggctttgtgtaccttgctactga

SEQ ID NO: 4463537 - DNA, 25 bp, Homo sapien
tacagtaaagcctctgcagaaacat

SEQ ID NO: 4463538 - DNA, 25 bp, Homo sapien
tgcattatggcagggctttactagt

SEQ ID NO: 4463539 - DNA, 25 bp, Homo sapien
cctggggatcaactaaaccaacaag

SEQ ID NO: 4463540 - DNA, 25 bp, Homo sapien
tgaagttgacagaaggaaagaaacc

SEQ ID NO: 4463541 - DNA, 25 bp, Homo sapien
gggatcaactaaaccaacaaggtgc

SEQ ID NO: 4463542 - DNA, 25 bp, Homo sapien
gatcaactaaaccaacaaggtgcat

SEQ ID NO: 4463543 - DNA, 25 bp, Homo sapien
tagggatgggttcaattgatgagac

SEQ ID NO: 4463544 - DNA, 25 bp, Homo sapien
ccttggtctagggatgggttcaatt

SEQ ID NO: 4463545 - DNA, 25 bp, Homo sapien
ggttcaattgatgagacgcacaagg

SEQ ID NO: 4463546 - DNA, 25 bp, Homo sapien
ttgatgagacgcacaaggagtggta

SEQ ID NO: 4463547 - DNA, 25 bp, Homo sapien
accgccgctcccatctggaggtcca

SEQ ID NO: 4463548 - DNA, 25 bp, Homo sapien
ccgccgctcccatctggaggtccat

SEQ ID NO: 4463549 - DNA, 25 bp, Homo sapien
gaccgccgctcccatctggaggtcc

SEQ ID NO: 4463550 - DNA, 25 bp, Homo sapien
tgaccgccgctcccatctggaggtc

SEQ ID NO: 4463551 - DNA, 25 bp, Homo sapien
taacatgtacctggctctaaactac

SEQ ID NO: 4463552 - DNA, 25 bp, Homo sapien
ccacgtgggtgttgaagttcacaga

SEQ ID NO: 4463553 - DNA, 25 bp, Homo sapien
tcagggcatgtgcacgtatccaggg

SEQ ID NO: 4463554 - DNA, 25 bp, Homo sapien
cagtttgagtgtacactggtctgtg

SEQ ID NO: 4463555 - DNA, 25 bp, Homo sapien
tcatgtccttggtagagcactcgga

SEQ ID NO: 4463556 - DNA, 25 bp, Homo sapien
catcatactgctcaagtcggcaggg

SEQ ID NO: 4463557 - DNA, 25 bp, Homo sapien
ttttggcaaacattcctgtgcagcg

SEQ ID NO: 4463558 - DNA, 25 bp, Homo sapien
actctgcttcgctatggccatcata

SEQ ID NO: 4463559 - DNA, 25 bp, Homo sapien
aaagactgaagctaggaaccaaatg

SEQ ID NO: 4463560 - DNA, 25 bp, Homo sapien
agactgaagctaggaaccaaatgct

SEQ ID NO: 4463561 - DNA, 25 bp, Homo sapien
tgggaagaatatctccagaagctaa

SEQ ID NO: 4463562 - DNA, 25 bp, Homo sapien
gctctgaagtgctgtatccaattcc

SEQ ID NO: 4463563 - DNA, 25 bp, Homo sapien
gaagctaaagtgatgggttaccacc

SEQ ID NO: 4463564 - DNA, 25 bp, Homo sapien
cactttttaagtgggacactgaggc

SEQ ID NO: 4463565 - DNA, 25 bp, Homo sapien
gttttatctgctagaagtaccccaa

SEQ ID NO: 4463566 - DNA, 25 bp, Homo sapien
ggtagtaagctcctttgcaacagac

SEQ ID NO: 4463567 - DNA, 25 bp, Homo sapien
taggacccagtgacattatagaaac

SEQ ID NO: 4463568 - DNA, 25 bp, Homo sapien
taaacagttgtggtgtgggtcagtc

SEQ ID NO: 4463569 - DNA, 25 bp, Homo sapien
tttaggaatccacagactacaaggg

SEQ ID NO: 4463570 - DNA, 25 bp, Homo sapien
ggcaagaaggccgtgttttgtggtg

SEQ ID NO: 4463571 - DNA, 25 bp, Homo sapien
cttctttgtgtatctttaggaatcc

SEQ ID NO: 4463572 - DNA, 25 bp, Homo sapien
cagactacaagggatggcaagaagg

SEQ ID NO: 4463573 - DNA, 25 bp, Homo sapien
ctctcagggaagattgtctttcagg

SEQ ID NO: 4463574 - DNA, 25 bp, Homo sapien
gagctgggacccacgataaaatctt

SEQ ID NO: 4463575 - DNA, 25 bp, Homo sapien
tttctgagctgggacccacgataaa

SEQ ID NO: 4463576 - DNA, 25 bp, Homo sapien
ggcacttcatcgtagcatgattcca

SEQ ID NO: 4463577 - DNA, 25 bp, Homo sapien
aatgtaggtgtacaagggaccagag

SEQ ID NO: 4463578 - DNA, 25 bp, Homo sapien
agaggcaggtgacagccccggtctc

SEQ ID NO: 4463579 - DNA, 25 bp, Homo sapien
gaagaaatgctcttaggcattgtga

SEQ ID NO: 4463580 - DNA, 25 bp, Homo sapien
ggaccagagggaaaagggtatgagc

SEQ ID NO: 4463581 - DNA, 25 bp, Homo sapien
ctcagttggacgatgataaaaggta

SEQ ID NO: 4463582 - DNA, 25 bp, Homo sapien
taaaaggtagctggctgctcttgaa

SEQ ID NO: 4463583 - DNA, 25 bp, Homo sapien
gatgataaaaggtagctggctgctc

SEQ ID NO: 4463584 - DNA, 25 bp, Homo sapien
tggacgatgataaaaggtagctggc

SEQ ID NO: 4463585 - DNA, 25 bp, Homo sapien
aggcaaatggccatggaccagatgg

SEQ ID NO: 4463586 - DNA, 25 bp, Homo sapien
cttctgcggagtcctcggtgttgca

SEQ ID NO: 4463587 - DNA, 25 bp, Homo sapien
tggaagggccggcggtccttctctc

SEQ ID NO: 4463588 - DNA, 25 bp, Homo sapien
ccatggaccagatggcaccgggtgt

SEQ ID NO: 4463589 - DNA, 25 bp, Homo sapien
ggaaatatagaacaaatcgaaattg

SEQ ID NO: 4463590 - DNA, 25 bp, Homo sapien
ctaggaaatatagaacaaatcgaaa

SEQ ID NO: 4463591 - DNA, 25 bp, Homo sapien
tatagaacaaatcgaaattgaaaaa

SEQ ID NO: 4463592 - DNA, 25 bp, Homo sapien
aatatagaacaaatcgaaattgaaa

SEQ ID NO: 4463593 - DNA, 25 bp, Homo sapien
tttgacttggaagtgcactaggagc

SEQ ID NO: 4463594 - DNA, 25 bp, Homo sapien
gtagcactcgagtcaaatatttctg

SEQ ID NO: 4463595 - DNA, 25 bp, Homo sapien
cactaggagctaaagggaaccagca

SEQ ID NO: 4463596 - DNA, 25 bp, Homo sapien
gcaataataaaacccggtgaaatgc

SEQ ID NO: 4463597 - DNA, 25 bp, Homo sapien
cttggctatttactcgggcaggttg

SEQ ID NO: 4463598 - DNA, 25 bp, Homo sapien
gggccttggctatttactcgggcag

SEQ ID NO: 4463599 - DNA, 25 bp, Homo sapien
tggattggggccttggctatttact

SEQ ID NO: 4463600 - DNA, 25 bp, Homo sapien
tggctatttactcgggcaggttgga

SEQ ID NO: 4463601 - DNA, 25 bp, Homo sapien
tcctctaaaactttggatgcccaac

SEQ ID NO: 4463602 - DNA, 25 bp, Homo sapien
tagtcacccaagtactgaaggcaag

SEQ ID NO: 4463603 - DNA, 25 bp, Homo sapien
tcgagaactgatcacttcactgtct

SEQ ID NO: 4463604 - DNA, 25 bp, Homo sapien
tttggatgcccaacatctcacattg

SEQ ID NO: 4463605 - DNA, 25 bp, Homo sapien
gtcttaagctagctacttcattatc

SEQ ID NO: 4463606 - DNA, 25 bp, Homo sapien
tttctgtcttaagctagctacttca

SEQ ID NO: 4463607 - DNA, 25 bp, Homo sapien
tttttctgtcttaagctagctactt

SEQ ID NO: 4463608 - DNA, 25 bp, Homo sapien
tctgtcttaagctagctacttcatt

SEQ ID NO: 4463609 - DNA, 25 bp, Homo sapien
gcctctgagcgtcagaaggggagga

SEQ ID NO: 4463610 - DNA, 25 bp, Homo sapien
caggaaaaggatctttgcctctgag

SEQ ID NO: 4463611 - DNA, 25 bp, Homo sapien
cagaaggggaggagtccggtggagc

SEQ ID NO: 4463612 - DNA, 25 bp, Homo sapien
ctgaaatcaggaaaaggatctttgc

SEQ ID NO: 4463613 - DNA, 25 bp, Homo sapien
ttccttgtggccgttctcggcccca

SEQ ID NO: 4463614 - DNA, 25 bp, Homo sapien
tccttgtggccgttctcggccccac

SEQ ID NO: 4463615 - DNA, 25 bp, Homo sapien
gcgatttccttgtggccgttctcgg

SEQ ID NO: 4463616 - DNA, 25 bp, Homo sapien
gatttccttgtggccgttctcggcc

SEQ ID NO: 4463617 - DNA, 25 bp, Homo sapien
tctcacccagaactgccatgatcct

SEQ ID NO: 4463618 - DNA, 25 bp, Homo sapien
ctaaggctggccattaccgtcacgt

SEQ ID NO: 4463619 - DNA, 25 bp, Homo sapien
ttaccgtcacgtgggccctctaatc

SEQ ID NO: 4463620 - DNA, 25 bp, Homo sapien
ctctaatccgcagaagtcagagttc

SEQ ID NO: 4463621 - DNA, 25 bp, Homo sapien
tcagccactggctgtgtggaagcag

SEQ ID NO: 4463622 - DNA, 25 bp, Homo sapien
gccactggctgtgtggaagcagcta

SEQ ID NO: 4463623 - DNA, 25 bp, Homo sapien
ccactggctgtgtggaagcagctaa

SEQ ID NO: 4463624 - DNA, 25 bp, Homo sapien
cagccactggctgtgtggaagcagc

SEQ ID NO: 4463625 - DNA, 25 bp, Homo sapien
tcatagccaattcatctaacagtag

SEQ ID NO: 4463626 - DNA, 25 bp, Homo sapien
cctcatagccaattcatctaacagt

SEQ ID NO: 4463627 - DNA, 25 bp, Homo sapien
gccaattcatctaacagtagttcca

SEQ ID NO: 4463628 - DNA, 25 bp, Homo sapien
tagccaattcatctaacagtagttc

SEQ ID NO: 4463629 - DNA, 25 bp, Homo sapien
ccatattgtcctgcatgtgagcatg

SEQ ID NO: 4463630 - DNA, 25 bp, Homo sapien
gagcatgtagcgcattgcttcctgc

SEQ ID NO: 4463631 - DNA, 25 bp, Homo sapien
catgtgagcatgtagcgcattgctt

SEQ ID NO: 4463632 - DNA, 25 bp, Homo sapien
tctgcccatattgtcccatattgtc

SEQ ID NO: 4463633 - DNA, 25 bp, Homo sapien
tgggatccatcatcatagatggtgt

SEQ ID NO: 4463634 - DNA, 25 bp, Homo sapien
tcatagatggtgtcaaggtttcagg

SEQ ID NO: 4463635 - DNA, 25 bp, Homo sapien
cacacagtgatggtctgggatccat

SEQ ID NO: 4463636 - DNA, 25 bp, Homo sapien
aaaaccaggatgaaactgatcacac

SEQ ID NO: 4463637 - DNA, 25 bp, Homo sapien
gggaaaagacacgagaaattcatgc

SEQ ID NO: 4463638 - DNA, 25 bp, Homo sapien
ttcatgcaacgtgcatgcagctgga

SEQ ID NO: 4463639 - DNA, 25 bp, Homo sapien
agaggaaaacccgagtgagccgtgc

SEQ ID NO: 4463640 - DNA, 25 bp, Homo sapien
catcactcacgagaagcaaaaggga

SEQ ID NO: 4463641 - DNA, 25 bp, Homo sapien
cggaagtgccgacaaaacctcaata

SEQ ID NO: 4463642 - DNA, 25 bp, Homo sapien
caattggctgcctgtaggttggcaa

SEQ ID NO: 4463643 - DNA, 25 bp, Homo sapien
tcatttcggtaacactccaaggaga

SEQ ID NO: 4463644 - DNA, 25 bp, Homo sapien
gagaacacgttcctgcaattggctg

SEQ ID NO: 4463645 - DNA, 25 bp, Homo sapien
aaatcttggctgacattcatatcgg

SEQ ID NO: 4463646 - DNA, 25 bp, Homo sapien
cagggaaagagctgcctaacaccta

SEQ ID NO: 4463647 - DNA, 25 bp, Homo sapien
aaaaaggcattcgtgtaggcatccc

SEQ ID NO: 4463648 - DNA, 25 bp, Homo sapien
tagaggtcccaaataagcaatcaag

SEQ ID NO: 4463649 - DNA, 25 bp, Homo sapien
gttagaatctacaggctagtggcca

SEQ ID NO: 4463650 - DNA, 25 bp, Homo sapien
caaattaaaatctccaggtattggg

SEQ ID NO: 4463651 - DNA, 25 bp, Homo sapien
taatactgatggtggtgatccaaag

SEQ ID NO: 4463652 - DNA, 25 bp, Homo sapien
cattattcagagagacggtcattgt

SEQ ID NO: 4463653 - DNA, 25 bp, Homo sapien
ccctgttctgtgttccgtaggtcgc

SEQ ID NO: 4463654 - DNA, 25 bp, Homo sapien
tatctggcgcgtcaagccaagagaa

SEQ ID NO: 4463655 - DNA, 25 bp, Homo sapien
tcaagccaagagaaacagccgggta

SEQ ID NO: 4463656 - DNA, 25 bp, Homo sapien
taggtcgctctatctggcgcgtcaa

SEQ ID NO: 4463657 - DNA, 25 bp, Homo sapien
ctgacgccatctccacagcactccc

SEQ ID NO: 4463658 - DNA, 25 bp, Homo sapien
gatgatctgcggaatagatctgtta

SEQ ID NO: 4463659 - DNA, 25 bp, Homo sapien
tccccaacgtcaactccaaaagctg

SEQ ID NO: 4463660 - DNA, 25 bp, Homo sapien
ctctgtaactcgatgatctgcggaa

SEQ ID NO: 4463661 - DNA, 25 bp, Homo sapien
gcccagaaacgaagctgatgaggaa

SEQ ID NO: 4463662 - DNA, 25 bp, Homo sapien
aagggacaaagatgccgaaggaagc

SEQ ID NO: 4463663 - DNA, 25 bp, Homo sapien
cacttcctctagagatagcccagaa

SEQ ID NO: 4463664 - DNA, 25 bp, Homo sapien
tccctgattctgactggagagcaaa

SEQ ID NO: 4463665 - DNA, 25 bp, Homo sapien
tcttcagccactcacaatgccagct

SEQ ID NO: 4463666 - DNA, 25 bp, Homo sapien
ctgaggccttcaccactccgcgtct

SEQ ID NO: 4463667 - DNA, 25 bp, Homo sapien
tgaggccttcaccactccgcgtctc

SEQ ID NO: 4463668 - DNA, 25 bp, Homo sapien
ccaagggcatcgtctggagggcaaa

SEQ ID NO: 4463669 - DNA, 25 bp, Homo sapien
actcagatcccaagggcatcgtctg

SEQ ID NO: 4463670 - DNA, 25 bp, Homo sapien
aaggagggtcgcaatctggaaggga

SEQ ID NO: 4463671 - DNA, 25 bp, Homo sapien
gagggcaaaggagggtcgcaatctg

SEQ ID NO: 4463672 - DNA, 25 bp, Homo sapien
agaaactgccaactgccccagagag

SEQ ID NO: 4463673 - DNA, 25 bp, Homo sapien
tatttgttgtctgcatggcatggcc

SEQ ID NO: 4463674 - DNA, 25 bp, Homo sapien
aatagggagtcgaggcttcccaagg

SEQ ID NO: 4463675 - DNA, 25 bp, Homo sapien
agctgagatccaatttacatatttg

SEQ ID NO: 4463676 - DNA, 25 bp, Homo sapien
aggtcagctgtcaccggtgttaagg

SEQ ID NO: 4463677 - DNA, 25 bp, Homo sapien
ttactcttccacctaatttctcaaa

SEQ ID NO: 4463678 - DNA, 25 bp, Homo sapien
caccggtgttaaggccaccatggca

SEQ ID NO: 4463679 - DNA, 25 bp, Homo sapien
aggccaccatggcaaaacacgactc

SEQ ID NO: 4463680 - DNA, 25 bp, Homo sapien
agatatcccaggcagaaccatccaa

SEQ ID NO: 4463681 - DNA, 25 bp, Homo sapien
gggctttcaccaaccgatgaatcag

SEQ ID NO: 4463682 - DNA, 25 bp, Homo sapien
tcgattttcgaagcacctaaaggga

SEQ ID NO: 4463683 - DNA, 25 bp, Homo sapien
aggcctctcctcagtttgctaccag

SEQ ID NO: 4463684 - DNA, 25 bp, Homo sapien
tgttcaatctgacataccgggccat

SEQ ID NO: 4463685 - DNA, 25 bp, Homo sapien
ggaagcctttgagacttctagacca

SEQ ID NO: 4463686 - DNA, 25 bp, Homo sapien
tccaatggctaaagtgagtatcact

SEQ ID NO: 4463687 - DNA, 25 bp, Homo sapien
tgagcacaatgcagggtaccagtaa

SEQ ID NO: 4463688 - DNA, 25 bp, Homo sapien
tgtatttaccgatctgcagccagga

SEQ ID NO: 4463689 - DNA, 25 bp, Homo sapien
cacagccaagggcaagacagggata

SEQ ID NO: 4463690 - DNA, 25 bp, Homo sapien
gccaggaccgtgctcttgccaagtt

SEQ ID NO: 4463691 - DNA, 25 bp, Homo sapien
tgaaactgcctcaaggagctaaact

SEQ ID NO: 4463692 - DNA, 25 bp, Homo sapien
tatagactgcttccttcagagcagt

SEQ ID NO: 4463693 - DNA, 25 bp, Homo sapien
gcagtatttgctgtcacagtcattc

SEQ ID NO: 4463694 - DNA, 25 bp, Homo sapien
gactgcttccttcagagcagtattt

SEQ ID NO: 4463695 - DNA, 25 bp, Homo sapien
cacagtcattcgtgctttcagtatt

SEQ ID NO: 4463696 - DNA, 25 bp, Homo sapien
cacatctgacccatcattagttcga

SEQ ID NO: 4463697 - DNA, 25 bp, Homo sapien
aggaaatgagcttcatcaggaaacg

SEQ ID NO: 4463698 - DNA, 25 bp, Homo sapien
agttcgatggattttcactaggaaa

SEQ ID NO: 4463699 - DNA, 25 bp, Homo sapien
catcattagttcgatggattttcac

SEQ ID NO: 4463700 - DNA, 25 bp, Homo sapien
tcacagtgaggaatagccaagttct

SEQ ID NO: 4463701 - DNA, 25 bp, Homo sapien
tgtaaggaggcactatgcaggctcc

SEQ ID NO: 4463702 - DNA, 25 bp, Homo sapien
caagttctattctggtgtcacgagc

SEQ ID NO: 4463703 - DNA, 25 bp, Homo sapien
gctatacggaattaggccctgactg

SEQ ID NO: 4463704 - DNA, 25 bp, Homo sapien
ctgttgacgagttaagccacttcat

SEQ ID NO: 4463705 - DNA, 25 bp, Homo sapien
ggtcccctcctcttaagacttgctg

SEQ ID NO: 4463706 - DNA, 25 bp, Homo sapien
caatccatttgggtcccctcctctt

SEQ ID NO: 4463707 - DNA, 25 bp, Homo sapien
tgggtcccctcctcttaagacttgc

SEQ ID NO: 4463708 - DNA, 25 bp, Homo sapien
cccctcctcttaagacttgctgcat

SEQ ID NO: 4463709 - DNA, 25 bp, Homo sapien
tcagtccctgctagcagtcaggtag

SEQ ID NO: 4463710 - DNA, 25 bp, Homo sapien
cctgctagcagtcaggtagcccagc

SEQ ID NO: 4463711 - DNA, 25 bp, Homo sapien
tccctgctagcagtcaggtagccca

SEQ ID NO: 4463712 - DNA, 25 bp, Homo sapien
tgctagcagtcaggtagcccagcac

SEQ ID NO: 4463713 - DNA, 25 bp, Homo sapien
tgaggagaaagcaaaccagccacag

SEQ ID NO: 4463714 - DNA, 25 bp, Homo sapien
ctgaggagaaagcaaaccagccaca

SEQ ID NO: 4463715 - DNA, 25 bp, Homo sapien
aggagaaagcaaaccagccacagga

SEQ ID NO: 4463716 - DNA, 25 bp, Homo sapien
gagaaagcaaaccagccacaggaac

SEQ ID NO: 4463717 - DNA, 25 bp, Homo sapien
gaagggctcacactgtttgcaaacc

SEQ ID NO: 4463718 - DNA, 25 bp, Homo sapien
ccctgagaactatcattttatgtcc

SEQ ID NO: 4463719 - DNA, 25 bp, Homo sapien
ttgcaaaccctgagaactatcattt

SEQ ID NO: 4463720 - DNA, 25 bp, Homo sapien
ggaagggctcacactgtttgcaaac

SEQ ID NO: 4463721 - DNA, 25 bp, Homo sapien
agacggctctcaggtcccattcatc

SEQ ID NO: 4463722 - DNA, 25 bp, Homo sapien
ctcaggtcccattcatccaagcccc

SEQ ID NO: 4463723 - DNA, 25 bp, Homo sapien
tgcaggagacggctctcaggtccca

SEQ ID NO: 4463724 - DNA, 25 bp, Homo sapien
agccccaaccagacccctccaatgg

SEQ ID NO: 4463725 - DNA, 25 bp, Homo sapien
tctaaggcaaactaggagctggatc

SEQ ID NO: 4463726 - DNA, 25 bp, Homo sapien
tcagtccctgctaggctactctggg

SEQ ID NO: 4463727 - DNA, 25 bp, Homo sapien
tctaaagggccgaatgaaagaagcc

SEQ ID NO: 4463728 - DNA, 25 bp, Homo sapien
gccatccgaaagagttcagtccctg

SEQ ID NO: 4463729 - DNA, 25 bp, Homo sapien
ctccatcgagcacctctctcctcac

SEQ ID NO: 4463730 - DNA, 25 bp, Homo sapien
ctcacctggaaactgcaatattgct

SEQ ID NO: 4463731 - DNA, 25 bp, Homo sapien
cagattgctgaaggcgcggctgaag

SEQ ID NO: 4463732 - DNA, 25 bp, Homo sapien
ttgacattctgcagattgctgaagg

SEQ ID NO: 4463733 - DNA, 25 bp, Homo sapien
ctggccaagatgtaaagctcaggca

SEQ ID NO: 4463734 - DNA, 25 bp, Homo sapien
caagatgtaaagctcaggcacaggg

SEQ ID NO: 4463735 - DNA, 25 bp, Homo sapien
aacaggtggcggcggtagagaaggg

SEQ ID NO: 4463736 - DNA, 25 bp, Homo sapien
gccaagatgtaaagctcaggcacag

SEQ ID NO: 4463737 - DNA, 25 bp, Homo sapien
ggctgcactggtctgcaaaagcaaa

SEQ ID NO: 4463738 - DNA, 25 bp, Homo sapien
tgcagactcgtaacccccaggagca

SEQ ID NO: 4463739 - DNA, 25 bp, Homo sapien
tgggtttctggggttcgcaactgca

SEQ ID NO: 4463740 - DNA, 25 bp, Homo sapien
gttcgcaactgcagactcgtaaccc

SEQ ID NO: 4463741 - DNA, 25 bp, Homo sapien
ctcttacctgttggccttgctctca

SEQ ID NO: 4463742 - DNA, 25 bp, Homo sapien
tgctcttcccctcgcatggagtagg

SEQ ID NO: 4463743 - DNA, 25 bp, Homo sapien
tgagccaccagcaatttctgtgagt

SEQ ID NO: 4463744 - DNA, 25 bp, Homo sapien
caatttctgtgagtgctcctgtgca

SEQ ID NO: 4463745 - DNA, 25 bp, Homo sapien
cacaccacactggttctggttccgg

SEQ ID NO: 4463746 - DNA, 25 bp, Homo sapien
tggcgctgtccttagtgtctccttc

SEQ ID NO: 4463747 - DNA, 25 bp, Homo sapien
gagctctagagagtttggcgctgtc

SEQ ID NO: 4463748 - DNA, 25 bp, Homo sapien
gctctagagagtttggcgctgtcct

SEQ ID NO: 4463749 - DNA, 25 bp, Homo sapien
gagagtttggcgctgtccttagtgt

SEQ ID NO: 4463750 - DNA, 25 bp, Homo sapien
ggaagagatccagaagggaacacag

SEQ ID NO: 4463751 - DNA, 25 bp, Homo sapien
gaaagtgggaagtcagtgggtggct

SEQ ID NO: 4463752 - DNA, 25 bp, Homo sapien
gcagtttgacttttgaagggaggaa

SEQ ID NO: 4463753 - DNA, 25 bp, Homo sapien
gtgggcggacggtcagaaagtggga

SEQ ID NO: 4463754 - DNA, 25 bp, Homo sapien
ctaggccaacgggaaagtaagcgat

SEQ ID NO: 4463755 - DNA, 25 bp, Homo sapien
cgataactcccagcaaagagagaga

SEQ ID NO: 4463756 - DNA, 25 bp, Homo sapien
caagccacggattctccaggtggca

SEQ ID NO: 4463757 - DNA, 25 bp, Homo sapien
ccacggattctccaggtggcaagct

SEQ ID NO: 4463758 - DNA, 25 bp, Homo sapien
aattaaaagtacaagctgcttagtg

SEQ ID NO: 4463759 - DNA, 25 bp, Homo sapien
attaaaagtacaagctgcttagtgg

SEQ ID NO: 4463760 - DNA, 25 bp, Homo sapien
aaagtacaagctgcttagtggagac

SEQ ID NO: 4463761 - DNA, 25 bp, Homo sapien
gcttttggaatattttgacaacttc

SEQ ID NO: 4463762 - DNA, 25 bp, Homo sapien
tggaatattttgacaacttccccac

SEQ ID NO: 4463763 - DNA, 25 bp, Homo sapien
tcattggcttttggaatattttgac

SEQ ID NO: 4463764 - DNA, 25 bp, Homo sapien
tggcttttggaatattttgacaact

SEQ ID NO: 4463765 - DNA, 25 bp, Homo sapien
acccacacgcaagagccatgcccat

SEQ ID NO: 4463766 - DNA, 25 bp, Homo sapien
cacacccacacgcaagagccatgcc

SEQ ID NO: 4463767 - DNA, 25 bp, Homo sapien
acacacccacacgcaagagccatgc

SEQ ID NO: 4463768 - DNA, 25 bp, Homo sapien
acacccacacgcaagagccatgccc

SEQ ID NO: 4463769 - DNA, 25 bp, Homo sapien
tgtgaagggccagctagtgtgaatc

SEQ ID NO: 4463770 - DNA, 25 bp, Homo sapien
tagtgtgaatcactaggaattcaag

SEQ ID NO: 4463771 - DNA, 25 bp, Homo sapien
gaagggccagctagtgtgaatcact

SEQ ID NO: 4463772 - DNA, 25 bp, Homo sapien
gccagctagtgtgaatcactaggaa

SEQ ID NO: 4463773 - DNA, 25 bp, Homo sapien
tgtggcctcttcctgcccgtgctct

SEQ ID NO: 4463774 - DNA, 25 bp, Homo sapien
cagggaactcttgtttgacagagac

SEQ ID NO: 4463775 - DNA, 25 bp, Homo sapien
agaaaagggtagttcttgccctcag

SEQ ID NO: 4463776 - DNA, 25 bp, Homo sapien
gcagaaaagggtagttcttgccctc

SEQ ID NO: 4463777 - DNA, 25 bp, Homo sapien
ctccatagcatgactcttgggtgcc

SEQ ID NO: 4463778 - DNA, 25 bp, Homo sapien
ccccaaaccaactcttatctttcat

SEQ ID NO: 4463779 - DNA, 25 bp, Homo sapien
accaactcttatctttcatctcagt

SEQ ID NO: 4463780 - DNA, 25 bp, Homo sapien
aaccaactcttatctttcatctcag

SEQ ID NO: 4463781 - DNA, 25 bp, Homo sapien
tccccaaaccaactcttatctttca

SEQ ID NO: 4463782 - DNA, 25 bp, Homo sapien
tgagcgacatcctcccggcactgaa

SEQ ID NO: 4463783 - DNA, 25 bp, Homo sapien
cgtgtcagcgggtgagcgacatcct

SEQ ID NO: 4463784 - DNA, 25 bp, Homo sapien
tgacatgtgtcagtgcaggtagccg

SEQ ID NO: 4463785 - DNA, 25 bp, Homo sapien
cagcagcgcactggcagagaagaca

SEQ ID NO: 4463786 - DNA, 25 bp, Homo sapien
tgctcgaaggtttctgccccagtcc

SEQ ID NO: 4463787 - DNA, 25 bp, Homo sapien
agtccccagcttccagtatggtctc

SEQ ID NO: 4463788 - DNA, 25 bp, Homo sapien
cccagtccccagcttccagtatggt

SEQ ID NO: 4463789 - DNA, 25 bp, Homo sapien
ctgctcgaaggtttctgccccagtc

SEQ ID NO: 4463790 - DNA, 25 bp, Homo sapien
tctcttccctgttcacgactgcccc

SEQ ID NO: 4463791 - DNA, 25 bp, Homo sapien
gcagaggtagacaagaagtctgcct

SEQ ID NO: 4463792 - DNA, 25 bp, Homo sapien
caaaatgaacacaccctttctctct

SEQ ID NO: 4463793 - DNA, 25 bp, Homo sapien
tgcccccacattgtccaagtttctc

SEQ ID NO: 4463794 - DNA, 25 bp, Homo sapien
gcactggctctccagactaccagaa

SEQ ID NO: 4463795 - DNA, 25 bp, Homo sapien
ccctcgaggactaggtcttggcact

SEQ ID NO: 4463796 - DNA, 25 bp, Homo sapien
tccagactaccagaaacaatcgagt

SEQ ID NO: 4463797 - DNA, 25 bp, Homo sapien
aatcgagtccccctggagagctgtt

SEQ ID NO: 4463798 - DNA, 25 bp, Homo sapien
ccagagaggtcttcactcctgaagt

SEQ ID NO: 4463799 - DNA, 25 bp, Homo sapien
aagaccccagagaggtcttcactcc

SEQ ID NO: 4463800 - DNA, 25 bp, Homo sapien
ccccagagaggtcttcactcctgaa

SEQ ID NO: 4463801 - DNA, 25 bp, Homo sapien
gaccccagagaggtcttcactcctg

SEQ ID NO: 4463802 - DNA, 25 bp, Homo sapien
gacacccaggaacggaagaatgagt

SEQ ID NO: 4463803 - DNA, 25 bp, Homo sapien
taagggtctacagtgtggcattaca

SEQ ID NO: 4463804 - DNA, 25 bp, Homo sapien
ggctgaaccacaagaccagaaattg

SEQ ID NO: 4463805 - DNA, 25 bp, Homo sapien
taacattctgtgctaatgagggccc

SEQ ID NO: 4463806 - DNA, 25 bp, Homo sapien
cacaagaaggggtcgctcctgagca

SEQ ID NO: 4463807 - DNA, 25 bp, Homo sapien
tcgctcctgagcatctgtcaacacc

SEQ ID NO: 4463808 - DNA, 25 bp, Homo sapien
cctgagcatctgtcaacaccaagca

SEQ ID NO: 4463809 - DNA, 25 bp, Homo sapien
gctcctgagcatctgtcaacaccaa

SEQ ID NO: 4463810 - DNA, 25 bp, Homo sapien
caccttggtacaggaatgggccagg

SEQ ID NO: 4463811 - DNA, 25 bp, Homo sapien
gttctggcccgaaagaggtctgttc

SEQ ID NO: 4463812 - DNA, 25 bp, Homo sapien
taagagatcccagctaatgcagaca

SEQ ID NO: 4463813 - DNA, 25 bp, Homo sapien
tgtaggcccagtctagaagcagtct

SEQ ID NO: 4463814 - DNA, 25 bp, Homo sapien
gatggatctcacagttgctacaagg

SEQ ID NO: 4463815 - DNA, 25 bp, Homo sapien
tacctgtatcgaagagcagaccctg

SEQ ID NO: 4463816 - DNA, 25 bp, Homo sapien
tccttcggcagatcagggaccgtgt

SEQ ID NO: 4463817 - DNA, 25 bp, Homo sapien
gacacacagattgagccaggaagcg

SEQ ID NO: 4463818 - DNA, 25 bp, Homo sapien
gagataagagcatatctgattgccc

SEQ ID NO: 4463819 - DNA, 25 bp, Homo sapien
tttcccttggtgagataaggcttcc

SEQ ID NO: 4463820 - DNA, 25 bp, Homo sapien
gaaacttcaagcactaccacactgt

SEQ ID NO: 4463821 - DNA, 25 bp, Homo sapien
gaaaacatcatccactgaaggacag

SEQ ID NO: 4463822 - DNA, 25 bp, Homo sapien
agctcactcgtacttgcccagtttc

SEQ ID NO: 4463823 - DNA, 25 bp, Homo sapien
tttcagaccatcagaggaaagctca

SEQ ID NO: 4463824 - DNA, 25 bp, Homo sapien
caatttcagaccatcagaggaaagc

SEQ ID NO: 4463825 - DNA, 25 bp, Homo sapien
cagaggaaagctcactcgtacttgc

SEQ ID NO: 4463826 - DNA, 25 bp, Homo sapien
taaattttgtcaagggtccactgcc

SEQ ID NO: 4463827 - DNA, 25 bp, Homo sapien
cagcatctgcatcaggtctggagga

SEQ ID NO: 4463828 - DNA, 25 bp, Homo sapien
tccttgagtgaaggctggacggccc

SEQ ID NO: 4463829 - DNA, 25 bp, Homo sapien
tctgcctggaggagaattaacacca

SEQ ID NO: 4463830 - DNA, 25 bp, Homo sapien
aacaggcagggtcatgttctgcccc

SEQ ID NO: 4463831 - DNA, 25 bp, Homo sapien
taggctttctcaaccatcagtggat

SEQ ID NO: 4463832 - DNA, 25 bp, Homo sapien
catgagaggctttcctaagattggt

SEQ ID NO: 4463833 - DNA, 25 bp, Homo sapien
gagggcaggacaacttttcaacagg

SEQ ID NO: 4463834 - DNA, 25 bp, Homo sapien
gaggtcatccatgattaaagactgg

SEQ ID NO: 4463835 - DNA, 25 bp, Homo sapien
aaaggcaacatgcaattagccaacc

SEQ ID NO: 4463836 - DNA, 25 bp, Homo sapien
ccatctttaaagagctctgtggcca

SEQ ID NO: 4463837 - DNA, 25 bp, Homo sapien
gctgcaaagtacaatttcgttaata

SEQ ID NO: 4463838 - DNA, 25 bp, Homo sapien
gacatctggcgtagaatccaccctg

SEQ ID NO: 4463839 - DNA, 25 bp, Homo sapien
tacgggtgatgctgaggcacagcca

SEQ ID NO: 4463840 - DNA, 25 bp, Homo sapien
agcagcttccagagatccatgggaa

SEQ ID NO: 4463841 - DNA, 25 bp, Homo sapien
tcgtagacacgtaagaaccagcagc

SEQ ID NO: 4463842 - DNA, 25 bp, Homo sapien
ggagttctcaatcatcagccccact

SEQ ID NO: 4463843 - DNA, 25 bp, Homo sapien
cagagaggatctaactaagggtcca

SEQ ID NO: 4463844 - DNA, 25 bp, Homo sapien
taagtatgccctcttagacacaggg

SEQ ID NO: 4463845 - DNA, 25 bp, Homo sapien
gagaaaacacaagtccatatgtagg

SEQ ID NO: 4463846 - DNA, 25 bp, Homo sapien
cagcagcacggggaagccagaatgc

SEQ ID NO: 4463847 - DNA, 25 bp, Homo sapien
actgtccacgcttggtcagcagcac

SEQ ID NO: 4463848 - DNA, 25 bp, Homo sapien
aaaaactgtccacgcttggtcagca

SEQ ID NO: 4463849 - DNA, 25 bp, Homo sapien
accaaaaactgtccacgcttggtca

SEQ ID NO: 4463850 - DNA, 25 bp, Homo sapien
atgagatggtctataacatgcccca

SEQ ID NO: 4463851 - DNA, 25 bp, Homo sapien
aatgagatggtctataacatgcccc

SEQ ID NO: 4463852 - DNA, 25 bp, Homo sapien
tgagatggtctataacatgccccat

SEQ ID NO: 4463853 - DNA, 25 bp, Homo sapien
gacccctcgtatcaccaggcccagt

SEQ ID NO: 4463854 - DNA, 25 bp, Homo sapien
ccaggcccagtgcctcggcaataaa

SEQ ID NO: 4463855 - DNA, 25 bp, Homo sapien
caggcccagtgcctcggcaataaac

SEQ ID NO: 4463856 - DNA, 25 bp, Homo sapien
cacttagacccctcgtatcaccagg

SEQ ID NO: 4463857 - DNA, 25 bp, Homo sapien
taccagcagccactagataatgtgc

SEQ ID NO: 4463858 - DNA, 25 bp, Homo sapien
tcccagagggtagcctaaaccctca

SEQ ID NO: 4463859 - DNA, 25 bp, Homo sapien
gtagcctaaaccctcataccagcag

SEQ ID NO: 4463860 - DNA, 25 bp, Homo sapien
gataatgtgctataaccactgccac

SEQ ID NO: 4463861 - DNA, 25 bp, Homo sapien
gaaaccaacctcgaagcacgatctc

SEQ ID NO: 4463862 - DNA, 25 bp, Homo sapien
tcgtcttgagaaaccaacctcgaag

SEQ ID NO: 4463863 - DNA, 25 bp, Homo sapien
ctttcccaaattgtgctgactgata

SEQ ID NO: 4463864 - DNA, 25 bp, Homo sapien
gctgactgataacttcgtcttgaga

SEQ ID NO: 4463865 - DNA, 25 bp, Homo sapien
aggtagacaggcacagcaagcaaag

SEQ ID NO: 4463866 - DNA, 25 bp, Homo sapien
ggagggaccacaaaagagggatcac

SEQ ID NO: 4463867 - DNA, 25 bp, Homo sapien
gaccacaaaagagggatcactggag

SEQ ID NO: 4463868 - DNA, 25 bp, Homo sapien
aacaggtagacaggcacagcaagca

SEQ ID NO: 4463869 - DNA, 25 bp, Homo sapien
caggggtaaattgcaggctcttcta

SEQ ID NO: 4463870 - DNA, 25 bp, Homo sapien
acttcaggggtaaattgcaggctct

SEQ ID NO: 4463871 - DNA, 25 bp, Homo sapien
gggtaaattgcaggctcttctaaga

SEQ ID NO: 4463872 - DNA, 25 bp, Homo sapien
caaacttcaggggtaaattgcaggc

SEQ ID NO: 4463873 - DNA, 25 bp, Homo sapien
caagacgcatgaggggcacactgac

SEQ ID NO: 4463874 - DNA, 25 bp, Homo sapien
agaattcctcagcaagacgcatgag

SEQ ID NO: 4463875 - DNA, 25 bp, Homo sapien
agctctgacagactgccagaattcc

SEQ ID NO: 4463876 - DNA, 25 bp, Homo sapien
ctgagctagaagcaggggtgccgtg

SEQ ID NO: 4463877 - DNA, 25 bp, Homo sapien
tctacactattacagcgctgttcag

SEQ ID NO: 4463878 - DNA, 25 bp, Homo sapien
catctacactattacagcgctgttc

SEQ ID NO: 4463879 - DNA, 25 bp, Homo sapien
actattacagcgctgttcagacacc

SEQ ID NO: 4463880 - DNA, 25 bp, Homo sapien
tacactattacagcgctgttcagac

SEQ ID NO: 4463881 - DNA, 25 bp, Homo sapien
caaactgattttgcctttcctccac

SEQ ID NO: 4463882 - DNA, 25 bp, Homo sapien
actgattttgcctttcctccacact

SEQ ID NO: 4463883 - DNA, 25 bp, Homo sapien
tttgcctttcctccacactggccat

SEQ ID NO: 4463884 - DNA, 25 bp, Homo sapien
ttttgcctttcctccacactggcca

SEQ ID NO: 4463885 - DNA, 25 bp, Homo sapien
taattcacatagcaatgtagaggat

SEQ ID NO: 4463886 - DNA, 25 bp, Homo sapien
ttggccacggccctgtcacatttca

SEQ ID NO: 4463887 - DNA, 25 bp, Homo sapien
tccaacatcacacaattggccacgg

SEQ ID NO: 4463888 - DNA, 25 bp, Homo sapien
cacatagcaatgtagaggatagaca

SEQ ID NO: 4463889 - DNA, 25 bp, Homo sapien
agaaaatagttcttactggccttgg

SEQ ID NO: 4463890 - DNA, 25 bp, Homo sapien
tacagctttctggtataaatagggc

SEQ ID NO: 4463891 - DNA, 25 bp, Homo sapien
tcaacagctggtacaaggtctcact

SEQ ID NO: 4463892 - DNA, 25 bp, Homo sapien
ctctgtcccatcatcctagaaagga

SEQ ID NO: 4463893 - DNA, 25 bp, Homo sapien
cagagttgcacagtgcagagcccca

SEQ ID NO: 4463894 - DNA, 25 bp, Homo sapien
gtcagctctaccagggataattctg

SEQ ID NO: 4463895 - DNA, 25 bp, Homo sapien
gcctcctgcaagctgtgtggctaag

SEQ ID NO: 4463896 - DNA, 25 bp, Homo sapien
gagtcttgccaccaatgtgtgaaaa

SEQ ID NO: 4463897 - DNA, 25 bp, Homo sapien
tgagttcaccggcttacacaagaag

SEQ ID NO: 4463898 - DNA, 25 bp, Homo sapien
tatctacgatgttcctgccaggtgc

SEQ ID NO: 4463899 - DNA, 25 bp, Homo sapien
caaaaggtgccaagtgtcaggctca

SEQ ID NO: 4463900 - DNA, 25 bp, Homo sapien
cacagacacaagacgaggaaggcat

SEQ ID NO: 4463901 - DNA, 25 bp, Homo sapien
tcaggaagcatcgatccggactcag

SEQ ID NO: 4463902 - DNA, 25 bp, Homo sapien
taatgatgcatccaagggctgggcc

SEQ ID NO: 4463903 - DNA, 25 bp, Homo sapien
tccttaaccctgcaccaaagatggg

SEQ ID NO: 4463904 - DNA, 25 bp, Homo sapien
taaacaccggatgctgattggaagg

SEQ ID NO: 4463905 - DNA, 25 bp, Homo sapien
gaacccatttgtcatcaaattccat

SEQ ID NO: 4463906 - DNA, 25 bp, Homo sapien
agccaagaacccatttgtcatcaaa

SEQ ID NO: 4463907 - DNA, 25 bp, Homo sapien
aagaacccatttgtcatcaaattcc

SEQ ID NO: 4463908 - DNA, 25 bp, Homo sapien
gcagccaagaacccatttgtcatca

SEQ ID NO: 4463909 - DNA, 25 bp, Homo sapien
caggaatgtgggtgtaagttgaagg

SEQ ID NO: 4463910 - DNA, 25 bp, Homo sapien
cagtttttcaccatgagagttttat

SEQ ID NO: 4463911 - DNA, 25 bp, Homo sapien
tttacttggcgtaatccccacagga

SEQ ID NO: 4463912 - DNA, 25 bp, Homo sapien
tgcaggatgtatgcagctgaaccct

SEQ ID NO: 4463913 - DNA, 25 bp, Homo sapien
tttcacttatgctggctagagtgag

SEQ ID NO: 4463914 - DNA, 25 bp, Homo sapien
ccaatggaatcccatctatctttct

SEQ ID NO: 4463915 - DNA, 25 bp, Homo sapien
gtgagtgtgttactgtgaccaatgg

SEQ ID NO: 4463916 - DNA, 25 bp, Homo sapien
aatcatcccataccatttgaaaaca

SEQ ID NO: 4463917 - DNA, 25 bp, Homo sapien
tcagtttctattaagagcgtatttc

SEQ ID NO: 4463918 - DNA, 25 bp, Homo sapien
ctcagtttctattaagagcgtattt

SEQ ID NO: 4463919 - DNA, 25 bp, Homo sapien
cagtttctattaagagcgtatttcc

SEQ ID NO: 4463920 - DNA, 25 bp, Homo sapien
cagacagcagttttaacactttaca

SEQ ID NO: 4463921 - DNA, 25 bp, Homo sapien
gcctcgcaaaaccacagtgaagatg

SEQ ID NO: 4463922 - DNA, 25 bp, Homo sapien
ctgcctcgcaaaaccacagtgaaga

SEQ ID NO: 4463923 - DNA, 25 bp, Homo sapien
gtgaagatgaaacgagacagcataa

SEQ ID NO: 4463924 - DNA, 25 bp, Homo sapien
gacctctctagtttgaccatgccag

SEQ ID NO: 4463925 - DNA, 25 bp, Homo sapien
ttgaccatggtgtgactcaaagcta

SEQ ID NO: 4463926 - DNA, 25 bp, Homo sapien
gaatcccttctgtatggccctctga

SEQ ID NO: 4463927 - DNA, 25 bp, Homo sapien
caaagctaaactggatgttcgcaca

SEQ ID NO: 4463928 - DNA, 25 bp, Homo sapien
tcagatctgaagtcttggtaacggc

SEQ ID NO: 4463929 - DNA, 25 bp, Homo sapien
tgtgccccaggtcttttagccagat

SEQ ID NO: 4463930 - DNA, 25 bp, Homo sapien
acccagaacactcctttcagatctg

SEQ ID NO: 4463931 - DNA, 25 bp, Homo sapien
ggtcctcaaaggacaatatccaccc

SEQ ID NO: 4463932 - DNA, 25 bp, Homo sapien
cagtatggaatttcgcagctaaaaa

SEQ ID NO: 4463933 - DNA, 25 bp, Homo sapien
caggctttatagtggtgtgttgaca

SEQ ID NO: 4463934 - DNA, 25 bp, Homo sapien
gaggtaaggtagtataatgcctcca

SEQ ID NO: 4463935 - DNA, 25 bp, Homo sapien
acagaatagaatggctttaatggcc

SEQ ID NO: 4463936 - DNA, 25 bp, Homo sapien
aatgaaccaagcatccggaccacct

SEQ ID NO: 4463937 - DNA, 25 bp, Homo sapien
tgtgccggcaacaacctctccaaag

SEQ ID NO: 4463938 - DNA, 25 bp, Homo sapien
agcatccggaccacctgggtgacca

SEQ ID NO: 4463939 - DNA, 25 bp, Homo sapien
tgggtgaccagagccaaaagttctc

SEQ ID NO: 4463940 - DNA, 25 bp, Homo sapien
gacccccagggctacaagataacca

SEQ ID NO: 4463941 - DNA, 25 bp, Homo sapien
tacaagataaccaggtcagcaatgt

SEQ ID NO: 4463942 - DNA, 25 bp, Homo sapien
cagggctacaagataaccaggtcag

SEQ ID NO: 4463943 - DNA, 25 bp, Homo sapien
ccccagggctacaagataaccaggt

SEQ ID NO: 4463944 - DNA, 25 bp, Homo sapien
cacagaggtgacaaaacagacatgg

SEQ ID NO: 4463945 - DNA, 25 bp, Homo sapien
ataacacagaggtgacaaaacagac

SEQ ID NO: 4463946 - DNA, 25 bp, Homo sapien
cagaggtgacaaaacagacatggcc

SEQ ID NO: 4463947 - DNA, 25 bp, Homo sapien
ccataacacagaggtgacaaaacag

SEQ ID NO: 4463948 - DNA, 25 bp, Homo sapien
aaaccaagagtccatatgcctttct

SEQ ID NO: 4463949 - DNA, 25 bp, Homo sapien
ctctcatattttgctatctcaccgg

SEQ ID NO: 4463950 - DNA, 25 bp, Homo sapien
tattttgctatctcaccggacttat

SEQ ID NO: 4463951 - DNA, 25 bp, Homo sapien
gctatctcaccggacttattctcat

SEQ ID NO: 4463952 - DNA, 25 bp, Homo sapien
cctcttggagtctacctttcagtcc

SEQ ID NO: 4463953 - DNA, 25 bp, Homo sapien
gacagctgaataaatcatccataca

SEQ ID NO: 4463954 - DNA, 25 bp, Homo sapien
tgccaagacagctgaataaatcatc

SEQ ID NO: 4463955 - DNA, 25 bp, Homo sapien
ctcttggagtctacctttcagtcct

SEQ ID NO: 4463956 - DNA, 25 bp, Homo sapien
tagatgatgtggacagtctcactta

SEQ ID NO: 4463957 - DNA, 25 bp, Homo sapien
ctagatgatgtggacagtctcactt

SEQ ID NO: 4463958 - DNA, 25 bp, Homo sapien
gatgtggacagtctcacttagaatg

SEQ ID NO: 4463959 - DNA, 25 bp, Homo sapien
gatgatgtggacagtctcacttaga

SEQ ID NO: 4463960 - DNA, 25 bp, Homo sapien
ccacgttgcagtggcgcacacaaat

SEQ ID NO: 4463961 - DNA, 25 bp, Homo sapien
cgttgcagtggcgcacacaaatctt

SEQ ID NO: 4463962 - DNA, 25 bp, Homo sapien
ttgcagtggcgcacacaaatcttta

SEQ ID NO: 4463963 - DNA, 25 bp, Homo sapien
cacgttgcagtggcgcacacaaatc

SEQ ID NO: 4463964 - DNA, 25 bp, Homo sapien
gtgcctcaggcacccgttcccgaat

SEQ ID NO: 4463965 - DNA, 25 bp, Homo sapien
gacacgcatcgtacacagctgtaga

SEQ ID NO: 4463966 - DNA, 25 bp, Homo sapien
cgttcccgaatgactcgacacgcat

SEQ ID NO: 4463967 - DNA, 25 bp, Homo sapien
gaatgactcgacacgcatcgtacac

SEQ ID NO: 4463968 - DNA, 25 bp, Homo sapien
cgccaatactgttagggcagcttca

SEQ ID NO: 4463969 - DNA, 25 bp, Homo sapien
aaagaaagacaaattgagagaagac

SEQ ID NO: 4463970 - DNA, 25 bp, Homo sapien
gacaaattgagagaagacaaaggga

SEQ ID NO: 4463971 - DNA, 25 bp, Homo sapien
aagacaaattgagagaagacaaagg

SEQ ID NO: 4463972 - DNA, 25 bp, Homo sapien
gaaagacaaattgagagaagacaaa

SEQ ID NO: 4463973 - DNA, 25 bp, Homo sapien
atccaatttctcaactgcctgtcaa

SEQ ID NO: 4463974 - DNA, 25 bp, Homo sapien
gggatccaatttctcaactgcctgt

SEQ ID NO: 4463975 - DNA, 25 bp, Homo sapien
aagggatccaatttctcaactgcct

SEQ ID NO: 4463976 - DNA, 25 bp, Homo sapien
ccaatttctcaactgcctgtcaaat

SEQ ID NO: 4463977 - DNA, 25 bp, Homo sapien
catccgactttcacctaaagactta

SEQ ID NO: 4463978 - DNA, 25 bp, Homo sapien
taagataagtttcatccgactttca

SEQ ID NO: 4463979 - DNA, 25 bp, Homo sapien
gtttcatccgactttcacctaaaga

SEQ ID NO: 4463980 - DNA, 25 bp, Homo sapien
accatgcttggcctattctttccat

SEQ ID NO: 4463981 - DNA, 25 bp, Homo sapien
gcaatgtttcgttttgacaacacaa

SEQ ID NO: 4463982 - DNA, 25 bp, Homo sapien
caatgtttcgttttgacaacacaag

SEQ ID NO: 4463983 - DNA, 25 bp, Homo sapien
agcaatgtttcgttttgacaacaca

SEQ ID NO: 4463984 - DNA, 25 bp, Homo sapien
aagtggtgatgaagccatcactgac

SEQ ID NO: 4463985 - DNA, 25 bp, Homo sapien
caaagtggtgatgaagccatcactg

SEQ ID NO: 4463986 - DNA, 25 bp, Homo sapien
acagaaggcaaagtggtgatgaagc

SEQ ID NO: 4463987 - DNA, 25 bp, Homo sapien
aaacagaaggcaaagtggtgatgaa

SEQ ID NO: 4463988 - DNA, 25 bp, Homo sapien
cccattccgcaacatgtagtaatcc

SEQ ID NO: 4463989 - DNA, 25 bp, Homo sapien
tgcccgcttccagccaaatcccttt

SEQ ID NO: 4463990 - DNA, 25 bp, Homo sapien
tcatccgaaagaaagagtccatagt

SEQ ID NO: 4463991 - DNA, 25 bp, Homo sapien
ctttcctcgggtcttcatccgaaag

SEQ ID NO: 4463992 - DNA, 25 bp, Homo sapien
tacaaatagtgaccaggagctcccc

SEQ ID NO: 4463993 - DNA, 25 bp, Homo sapien
ccccacagtcttggaatcatccacc

SEQ ID NO: 4463994 - DNA, 25 bp, Homo sapien
agcatccggattttctgaggtctct

SEQ ID NO: 4463995 - DNA, 25 bp, Homo sapien
cagatccatccagcatccggatttt

SEQ ID NO: 4463996 - DNA, 25 bp, Homo sapien
tagtgaaatcgtacccaaagaagtc

SEQ ID NO: 4463997 - DNA, 25 bp, Homo sapien
ttttgggaaacaccgccacagagga

SEQ ID NO: 4463998 - DNA, 25 bp, Homo sapien
caagacagtgtcaaacaagaagtgt

SEQ ID NO: 4463999 - DNA, 25 bp, Homo sapien
tgtcactacaatacagaatctccag

SEQ ID NO: 4464000 - DNA, 25 bp, Homo sapien
ggagctcctggtggcaaagaaccag

SEQ ID NO: 4464001 - DNA, 25 bp, Homo sapien
acggccttacaaatatgagggtcag

SEQ ID NO: 4464002 - DNA, 25 bp, Homo sapien
acctcttccagcctaaggcctgtga

SEQ ID NO: 4464003 - DNA, 25 bp, Homo sapien
tggtggcaaagaaccagaaacggcc

SEQ ID NO: 4464004 - DNA, 25 bp, Homo sapien
tttcctctcatctcgtaacagtgtc

SEQ ID NO: 4464005 - DNA, 25 bp, Homo sapien
tcatctcgtaacagtgtcctgtctt

SEQ ID NO: 4464006 - DNA, 25 bp, Homo sapien
caatagtttcttggattaaggagta

SEQ ID NO: 4464007 - DNA, 25 bp, Homo sapien
taacagtgtcctgtcttttttgagt

SEQ ID NO: 4464008 - DNA, 25 bp, Homo sapien
tctcgaatctacattctgatcagag

SEQ ID NO: 4464009 - DNA, 25 bp, Homo sapien
gtaaaagaacttccgtctaagcagc

SEQ ID NO: 4464010 - DNA, 25 bp, Homo sapien
gcaacgtttcgttttcatctactcc

SEQ ID NO: 4464011 - DNA, 25 bp, Homo sapien
acataaagcaagttcagctgcacgg

SEQ ID NO: 4464012 - DNA, 25 bp, Homo sapien
tgcaccacaaccaaacacatgcggg

SEQ ID NO: 4464013 - DNA, 25 bp, Homo sapien
tccagaatatcaacctgcaccacaa

SEQ ID NO: 4464014 - DNA, 25 bp, Homo sapien
ctgcaccacaaccaaacacatgcgg

SEQ ID NO: 4464015 - DNA, 25 bp, Homo sapien
aatatcaacctgcaccacaaccaaa

SEQ ID NO: 4464016 - DNA, 25 bp, Homo sapien
ctgggaagccatagggaggccctac

SEQ ID NO: 4464017 - DNA, 25 bp, Homo sapien
aatctgggaagccatagggaggccc

SEQ ID NO: 4464018 - DNA, 25 bp, Homo sapien
caatctgggaagccatagggaggcc

SEQ ID NO: 4464019 - DNA, 25 bp, Homo sapien
tctgggaagccatagggaggcccta

SEQ ID NO: 4464020 - DNA, 25 bp, Homo sapien
gagtgacacgttctctccactgacg

SEQ ID NO: 4464021 - DNA, 25 bp, Homo sapien
tcggggagtgacacgttctctccac

SEQ ID NO: 4464022 - DNA, 25 bp, Homo sapien
gacacgttctctccactgacgcatt

SEQ ID NO: 4464023 - DNA, 25 bp, Homo sapien
cactgacgcattcccatggcccagt

SEQ ID NO: 4464024 - DNA, 25 bp, Homo sapien
agctttctcgaaggagacagggtga

SEQ ID NO: 4464025 - DNA, 25 bp, Homo sapien
aagctttctcgaaggagacagggtg

SEQ ID NO: 4464026 - DNA, 25 bp, Homo sapien
gaggtccaaattgtatctgggcttg

SEQ ID NO: 4464027 - DNA, 25 bp, Homo sapien
tgggcttgaaatccaccaaactcac

SEQ ID NO: 4464028 - DNA, 25 bp, Homo sapien
tctgggcttgaaatccaccaaactc

SEQ ID NO: 4464029 - DNA, 25 bp, Homo sapien
tgttccacatgaggtccaaattgta

SEQ ID NO: 4464030 - DNA, 25 bp, Homo sapien
gaaattagggtatgatcttagacac

SEQ ID NO: 4464031 - DNA, 25 bp, Homo sapien
tcatctactcgatggaagaaaagct

SEQ ID NO: 4464032 - DNA, 25 bp, Homo sapien
gaaaagctagcattctcacaaatga

SEQ ID NO: 4464033 - DNA, 25 bp, Homo sapien
caaaatctgcaaatttggtcatcta

SEQ ID NO: 4464034 - DNA, 25 bp, Homo sapien
gaactaagtaggtggtagaaactgc

SEQ ID NO: 4464035 - DNA, 25 bp, Homo sapien
ctgaggaacacccggcagtatgact

SEQ ID NO: 4464036 - DNA, 25 bp, Homo sapien
cggcagtatgactcatttggagaat

SEQ ID NO: 4464037 - DNA, 25 bp, Homo sapien
gaatacagaactaagtaggtggtag

SEQ ID NO: 4464038 - DNA, 25 bp, Homo sapien
cagactggtggggtaaaagcaggcc

SEQ ID NO: 4464039 - DNA, 25 bp, Homo sapien
cacatggccttcgataggtggcgga

SEQ ID NO: 4464040 - DNA, 25 bp, Homo sapien
gaacttgtgcacatggccttcgata

SEQ ID NO: 4464041 - DNA, 25 bp, Homo sapien
ccgtggccataatcctcaggctgat

SEQ ID NO: 4464042 - DNA, 25 bp, Homo sapien
tgggaacgtggaaactgctaaagga

SEQ ID NO: 4464043 - DNA, 25 bp, Homo sapien
tatttgtcaccagtcactctagcaa

SEQ ID NO: 4464044 - DNA, 25 bp, Homo sapien
tgtcaccagtcactctagcaacaga

SEQ ID NO: 4464045 - DNA, 25 bp, Homo sapien
tccaaggcccctctagctcttggtg

SEQ ID NO: 4464046 - DNA, 25 bp, Homo sapien
attttctatttgtcaccagtcactc

SEQ ID NO: 4464047 - DNA, 25 bp, Homo sapien
tgtaagtgactggaattgaactgaa

SEQ ID NO: 4464048 - DNA, 25 bp, Homo sapien
aacatagcatttactcagacttcct

SEQ ID NO: 4464049 - DNA, 25 bp, Homo sapien
gatacaagtcttcctacccattaac

SEQ ID NO: 4464050 - DNA, 25 bp, Homo sapien
gatcttggagtatgcattgcaaata

SEQ ID NO: 4464051 - DNA, 25 bp, Homo sapien
tccgccaaaccctactgccagcctt

SEQ ID NO: 4464052 - DNA, 25 bp, Homo sapien
caaaccctactgccagccttttaag

SEQ ID NO: 4464053 - DNA, 25 bp, Homo sapien
ttctccgccaaaccctactgccagc

SEQ ID NO: 4464054 - DNA, 25 bp, Homo sapien
accctactgccagccttttaagcat

SEQ ID NO: 4464055 - DNA, 25 bp, Homo sapien
aaagtgggtccacctgaacacacag

SEQ ID NO: 4464056 - DNA, 25 bp, Homo sapien
caaaagtgggtccacctgaacacac

SEQ ID NO: 4464057 - DNA, 25 bp, Homo sapien
agtgggtccacctgaacacacagct

SEQ ID NO: 4464058 - DNA, 25 bp, Homo sapien
acaaaagtgggtccacctgaacaca

SEQ ID NO: 4464059 - DNA, 25 bp, Homo sapien
tgaaagatcctcttttcagctcctc

SEQ ID NO: 4464060 - DNA, 25 bp, Homo sapien
cagctcctctctgcttgatatattc

SEQ ID NO: 4464061 - DNA, 25 bp, Homo sapien
atattctttgggcaggaattccttc

SEQ ID NO: 4464062 - DNA, 25 bp, Homo sapien
gcttgatatattctttgggcaggaa

SEQ ID NO: 4464063 - DNA, 25 bp, Homo sapien
aaagtgacagtggtcgggaccagtt

SEQ ID NO: 4464064 - DNA, 25 bp, Homo sapien
aagtgacagtggtcgggaccagtta

SEQ ID NO: 4464065 - DNA, 25 bp, Homo sapien
gtggtcgggaccagttattgcatct

SEQ ID NO: 4464066 - DNA, 25 bp, Homo sapien
gacagtggtcgggaccagttattgc

SEQ ID NO: 4464067 - DNA, 25 bp, Homo sapien
accaggaagaaggacacgccatatg

SEQ ID NO: 4464068 - DNA, 25 bp, Homo sapien
gagtttgacgtacttgaccttggct

SEQ ID NO: 4464069 - DNA, 25 bp, Homo sapien
cacgccatatgtgcggagggaccgt

SEQ ID NO: 4464070 - DNA, 25 bp, Homo sapien
agggaccgtgcgagtttgacgtact

SEQ ID NO: 4464071 - DNA, 25 bp, Homo sapien
tgcctgtgcggcagctaaacgcagg

SEQ ID NO: 4464072 - DNA, 25 bp, Homo sapien
ggcagctaaacgcaggtcagcacta

SEQ ID NO: 4464073 - DNA, 25 bp, Homo sapien
aacgcaggtcagcactagccagatg

SEQ ID NO: 4464074 - DNA, 25 bp, Homo sapien
actagccagatgttccacccgcaaa

SEQ ID NO: 4464075 - DNA, 25 bp, Homo sapien
tgcaaggcattggagctcatctact

SEQ ID NO: 4464076 - DNA, 25 bp, Homo sapien
tacagctagaggttgggaacaccat

SEQ ID NO: 4464077 - DNA, 25 bp, Homo sapien
ggaaacgtgaattcaagtcctggct

SEQ ID NO: 4464078 - DNA, 25 bp, Homo sapien
tcactccggctaaggcagtacagct

SEQ ID NO: 4464079 - DNA, 25 bp, Homo sapien
gttgcttgtggggttttggtgtagc

SEQ ID NO: 4464080 - DNA, 25 bp, Homo sapien
gcttgtggggttttggtgtagcaga

SEQ ID NO: 4464081 - DNA, 25 bp, Homo sapien
tgtggggttttggtgtagcagatca

SEQ ID NO: 4464082 - DNA, 25 bp, Homo sapien
cttgtggggttttggtgtagcagat

SEQ ID NO: 4464083 - DNA, 25 bp, Homo sapien
gctgcccagcgcttgacggtggtga

SEQ ID NO: 4464084 - DNA, 25 bp, Homo sapien
gtctttggtgatccccagcaggcga

SEQ ID NO: 4464085 - DNA, 25 bp, Homo sapien
acgcgcatcaccgagtctttggtga

SEQ ID NO: 4464086 - DNA, 25 bp, Homo sapien
atccacgcgcatcaccgagtctttg

SEQ ID NO: 4464087 - DNA, 25 bp, Homo sapien
aaggccacgctagtgctctccttgc

SEQ ID NO: 4464088 - DNA, 25 bp, Homo sapien
gccagagaaacccaatgggcaagaa

SEQ ID NO: 4464089 - DNA, 25 bp, Homo sapien
cagagaaacccaatgggcaagaatc

SEQ ID NO: 4464090 - DNA, 25 bp, Homo sapien
tgtccccacaatatcactcaaggcc

SEQ ID NO: 4464091 - DNA, 25 bp, Homo sapien
cagagcttcacggacttataggaca

SEQ ID NO: 4464092 - DNA, 25 bp, Homo sapien
tattcatatcgagagccaggacacc

SEQ ID NO: 4464093 - DNA, 25 bp, Homo sapien
caggacacccacaatatgaatgaca

SEQ ID NO: 4464094 - DNA, 25 bp, Homo sapien
catcagagtaacaggagaggacagt

SEQ ID NO: 4464095 - DNA, 25 bp, Homo sapien
tactgaatagtagctttcctgatac

SEQ ID NO: 4464096 - DNA, 25 bp, Homo sapien
tcaatgtagcctgcaatcagctggg

SEQ ID NO: 4464097 - DNA, 25 bp, Homo sapien
tatctgctctccctcggtggtttgt

SEQ ID NO: 4464098 - DNA, 25 bp, Homo sapien
tccctcggtggtttgtactgaatag

SEQ ID NO: 4464099 - DNA, 25 bp, Homo sapien
tggggaaacggactcttctaacatg

SEQ ID NO: 4464100 - DNA, 25 bp, Homo sapien
tagtccaaatcgatctttactttgt

SEQ ID NO: 4464101 - DNA, 25 bp, Homo sapien
ccttctagtccaaatcgatctttac

SEQ ID NO: 4464102 - DNA, 25 bp, Homo sapien
tctagtccaaatcgatctttacttt

SEQ ID NO: 4464103 - DNA, 25 bp, Homo sapien
atgtggcctcggtgcatctgcccaa

SEQ ID NO: 4464104 - DNA, 25 bp, Homo sapien
gcgagggcatgctgccaacgttgaa

SEQ ID NO: 4464105 - DNA, 25 bp, Homo sapien
cggtccggttgaactgctgctgcaa

SEQ ID NO: 4464106 - DNA, 25 bp, Homo sapien
ttgaaggtctcaggcccgctggagc

SEQ ID NO: 4464107 - DNA, 25 bp, Homo sapien
catatcctggccgagaggtggcagc

SEQ ID NO: 4464108 - DNA, 25 bp, Homo sapien
aggtggcagcgagtcgagctcactg

SEQ ID NO: 4464109 - DNA, 25 bp, Homo sapien
tggcagcgagtcgagctcactgaga

SEQ ID NO: 4464110 - DNA, 25 bp, Homo sapien
cagcgagtcgagctcactgagatca

SEQ ID NO: 4464111 - DNA, 25 bp, Homo sapien
ggatttcgtgtttggattcgtcgac

SEQ ID NO: 4464112 - DNA, 25 bp, Homo sapien
catcaacttgagaatggatttcgtg

SEQ ID NO: 4464113 - DNA, 25 bp, Homo sapien
caactgaagccgttccggccgtgat

SEQ ID NO: 4464114 - DNA, 25 bp, Homo sapien
cagctgtgaggttaacaactgaagc

SEQ ID NO: 4464115 - DNA, 25 bp, Homo sapien
catgagggcggccaatagcttcaca

SEQ ID NO: 4464116 - DNA, 25 bp, Homo sapien
gaaatagtggtgatcgcacatccca

SEQ ID NO: 4464117 - DNA, 25 bp, Homo sapien
cagctttcagcaagtctgacaccgc

SEQ ID NO: 4464118 - DNA, 25 bp, Homo sapien
gccaatagcttcacacccttggaca

SEQ ID NO: 4464119 - DNA, 25 bp, Homo sapien
tggcttgtccgatgctgccagcagc

SEQ ID NO: 4464120 - DNA, 25 bp, Homo sapien
ctgtctcagaagatccccactggct

SEQ ID NO: 4464121 - DNA, 25 bp, Homo sapien
gatccccactggcttgtccgatgct

SEQ ID NO: 4464122 - DNA, 25 bp, Homo sapien
tggaatcgctcatcagtctcattct

SEQ ID NO: 4464123 - DNA, 25 bp, Homo sapien
gcccaccagcacgtaagcagctcat

SEQ ID NO: 4464124 - DNA, 25 bp, Homo sapien
actggcccaccagcacgtaagcagc

SEQ ID NO: 4464125 - DNA, 25 bp, Homo sapien
atcctggcctgaaccaccccagaag

SEQ ID NO: 4464126 - DNA, 25 bp, Homo sapien
caaaattagagacttaggagaagga

SEQ ID NO: 4464127 - DNA, 25 bp, Homo sapien
agtgtcttcggccacttgggcaaca

SEQ ID NO: 4464128 - DNA, 25 bp, Homo sapien
gggtggcagcagcaattaccctgtt

SEQ ID NO: 4464129 - DNA, 25 bp, Homo sapien
taccctgttctgtaggacagtgtct

SEQ ID NO: 4464130 - DNA, 25 bp, Homo sapien
tctttgcctttagtaccaacatggc

SEQ ID NO: 4464131 - DNA, 25 bp, Homo sapien
tgcttcaggagctcactatcggtag

SEQ ID NO: 4464132 - DNA, 25 bp, Homo sapien
gatgctctcggtgacacacatgatg

SEQ ID NO: 4464133 - DNA, 25 bp, Homo sapien
acccatggagctgaagatgctctcg

SEQ ID NO: 4464134 - DNA, 25 bp, Homo sapien
cagtagcctggtcgtagcggccgat

SEQ ID NO: 4464135 - DNA, 25 bp, Homo sapien
gaattctccatgtcgatttcggctt

SEQ ID NO: 4464136 - DNA, 25 bp, Homo sapien
ctcatggcattgacgaggtctgatg

SEQ ID NO: 4464137 - DNA, 25 bp, Homo sapien
tctgcatctgacctcatggcattga

SEQ ID NO: 4464138 - DNA, 25 bp, Homo sapien
caccatgcgagcagtggagtcagct

SEQ ID NO: 4464139 - DNA, 25 bp, Homo sapien
gttgctacccggaggccttctgcag

SEQ ID NO: 4464140 - DNA, 25 bp, Homo sapien
tgcgttggttgctacccggaggcct

SEQ ID NO: 4464141 - DNA, 25 bp, Homo sapien
gctgcgttggttgctacccggaggc

SEQ ID NO: 4464142 - DNA, 25 bp, Homo sapien
ttggttgctacccggaggccttctg

SEQ ID NO: 4464143 - DNA, 25 bp, Homo sapien
gccgctgcggcctgcttggctgcaa

SEQ ID NO: 4464144 - DNA, 25 bp, Homo sapien
tgctgggccgcagggttcttgttgg

SEQ ID NO: 4464145 - DNA, 25 bp, Homo sapien
tcttgttggaaacagctgcattctg

SEQ ID NO: 4464146 - DNA, 25 bp, Homo sapien
tgcattctgggaggcggcgatggtc

SEQ ID NO: 4464147 - DNA, 25 bp, Homo sapien
ctggctctctgtgcactggaacctc

SEQ ID NO: 4464148 - DNA, 25 bp, Homo sapien
ggctctctgtgcactggaacctcac

SEQ ID NO: 4464149 - DNA, 25 bp, Homo sapien
tggctctctgtgcactggaacctca

SEQ ID NO: 4464150 - DNA, 25 bp, Homo sapien
ctgggcactcaggtcttcagcttga

SEQ ID NO: 4464151 - DNA, 25 bp, Homo sapien
ctcactccctggaccagctgaggga

SEQ ID NO: 4464152 - DNA, 25 bp, Homo sapien
actgcggctttggcagaggacacca

SEQ ID NO: 4464153 - DNA, 25 bp, Homo sapien
cactgcggctttggcagaggacacc

SEQ ID NO: 4464154 - DNA, 25 bp, Homo sapien
ggcactgcggctttggcagaggaca

SEQ ID NO: 4464155 - DNA, 25 bp, Homo sapien
gcactgcggctttggcagaggacac

SEQ ID NO: 4464156 - DNA, 25 bp, Homo sapien
tgcatggctgcggcctggtcactca

SEQ ID NO: 4464157 - DNA, 25 bp, Homo sapien
cggtacgcagctccgccaagctggt

SEQ ID NO: 4464158 - DNA, 25 bp, Homo sapien
gaggcggtacgcagctccgccaagc

SEQ ID NO: 4464159 - DNA, 25 bp, Homo sapien
ttctgcgaggcggtacgcagctccg

SEQ ID NO: 4464160 - DNA, 25 bp, Homo sapien
gagttggaaatatgtatacccagtc

SEQ ID NO: 4464161 - DNA, 25 bp, Homo sapien
aacagagttggaaatatgtataccc

SEQ ID NO: 4464162 - DNA, 25 bp, Homo sapien
ggaaatatgtatacccagtctgctt

SEQ ID NO: 4464163 - DNA, 25 bp, Homo sapien
ttggaaatatgtatacccagtctgc

SEQ ID NO: 4464164 - DNA, 25 bp, Homo sapien
cgtattcagagctgaatcgatttcc

SEQ ID NO: 4464165 - DNA, 25 bp, Homo sapien
agttcattcttaagcgtctgcaccg

SEQ ID NO: 4464166 - DNA, 25 bp, Homo sapien
gcatcctgcagttcattcttaagcg

SEQ ID NO: 4464167 - DNA, 25 bp, Homo sapien
cgtctgcaccgtattcagagctgaa

SEQ ID NO: 4464168 - DNA, 25 bp, Homo sapien
gagcccaccgccttggatgtgcttc

SEQ ID NO: 4464169 - DNA, 25 bp, Homo sapien
tgtagtgttcgttgccttgagcagc

SEQ ID NO: 4464170 - DNA, 25 bp, Homo sapien
agtgttcgttgccttgagcagcaca

SEQ ID NO: 4464171 - DNA, 25 bp, Homo sapien
ctgtgtagtgttcgttgccttgagc

SEQ ID NO: 4464172 - DNA, 25 bp, Homo sapien
ccacagtggcatgaagggcgtgggt

SEQ ID NO: 4464173 - DNA, 25 bp, Homo sapien
ggccacagtggcatgaagggcgtgg

SEQ ID NO: 4464174 - DNA, 25 bp, Homo sapien
gccacagtggcatgaagggcgtggg

SEQ ID NO: 4464175 - DNA, 25 bp, Homo sapien
tggccacagtggcatgaagggcgtg

SEQ ID NO: 4464176 - DNA, 25 bp, Homo sapien
ccacgagaggtcagaaagcccagtg

SEQ ID NO: 4464177 - DNA, 25 bp, Homo sapien
ggaagcccataccatcaaaaggacg

SEQ ID NO: 4464178 - DNA, 25 bp, Homo sapien
aagcccagtgaacacccatggcggt

SEQ ID NO: 4464179 - DNA, 25 bp, Homo sapien
aaaggacgaaagaaggccacgagag

SEQ ID NO: 4464180 - DNA, 25 bp, Homo sapien
acagcaggtggtcttttcctcactg

SEQ ID NO: 4464181 - DNA, 25 bp, Homo sapien
ttgaatgagcatggcggagccctcc

SEQ ID NO: 4464182 - DNA, 25 bp, Homo sapien
tccatcacgtctcgagcagaatcta

SEQ ID NO: 4464183 - DNA, 25 bp, Homo sapien
aatctaacatggcatgggcggccgc

SEQ ID NO: 4464184 - DNA, 25 bp, Homo sapien
ggtcggttgtcgatgcagccactcc

SEQ ID NO: 4464185 - DNA, 25 bp, Homo sapien
ggcaatttacgcagttattcaagga

SEQ ID NO: 4464186 - DNA, 25 bp, Homo sapien
cagttattcaaggagtgtgagacgg

SEQ ID NO: 4464187 - DNA, 25 bp, Homo sapien
tttacgcagttattcaaggagtgtg

SEQ ID NO: 4464188 - DNA, 25 bp, Homo sapien
tgcccagggaggcaatttacgcagt

SEQ ID NO: 4464189 - DNA, 25 bp, Homo sapien
tcttcaaggccacgtccacatcctt

SEQ ID NO: 4464190 - DNA, 25 bp, Homo sapien
gctcttcaaggccacgtccacatcc

SEQ ID NO: 4464191 - DNA, 25 bp, Homo sapien
cgatgctcttcaaggccacgtccac

SEQ ID NO: 4464192 - DNA, 25 bp, Homo sapien
atgctcttcaaggccacgtccacat

SEQ ID NO: 4464193 - DNA, 25 bp, Homo sapien
ctgtggggaacagacggcacacccc

SEQ ID NO: 4464194 - DNA, 25 bp, Homo sapien
tgtggggaacagacggcacacccca

SEQ ID NO: 4464195 - DNA, 25 bp, Homo sapien
gtggggaacagacggcacaccccat

SEQ ID NO: 4464196 - DNA, 25 bp, Homo sapien
actgaactttccagaggctgcagcc

SEQ ID NO: 4464197 - DNA, 25 bp, Homo sapien
gcttggccagccatctcaatgccag

SEQ ID NO: 4464198 - DNA, 25 bp, Homo sapien
tcctggaaaggcttcgtgcttggag

SEQ ID NO: 4464199 - DNA, 25 bp, Homo sapien
agcatcgaggaattcatcaaaatca

SEQ ID NO: 4464200 - DNA, 25 bp, Homo sapien
aaaggagccggagctattagggcct

SEQ ID NO: 4464201 - DNA, 25 bp, Homo sapien
ttaaacccagttagcccgcagatgc

SEQ ID NO: 4464202 - DNA, 25 bp, Homo sapien
gcattcagagagctaggagcagcat

SEQ ID NO: 4464203 - DNA, 25 bp, Homo sapien
cgcagatgcctaactcgttgagaca

SEQ ID NO: 4464204 - DNA, 25 bp, Homo sapien
gctgcagccaggagatttttcgcat

SEQ ID NO: 4464205 - DNA, 25 bp, Homo sapien
ggatgccatcgagatattcttgagg

SEQ ID NO: 4464206 - DNA, 25 bp, Homo sapien
gaggttccctatcacttggatctgg

SEQ ID NO: 4464207 - DNA, 25 bp, Homo sapien
tgggagctcctggatctacagagag

SEQ ID NO: 4464208 - DNA, 25 bp, Homo sapien
aatgtcagttgccttatccaaaggc

SEQ ID NO: 4464209 - DNA, 25 bp, Homo sapien
atgtcagttgccttatccaaaggct

SEQ ID NO: 4464210 - DNA, 25 bp, Homo sapien
tgtcagttgccttatccaaaggctc

SEQ ID NO: 4464211 - DNA, 25 bp, Homo sapien
cgctgtgggcttaaagccttctcag

SEQ ID NO: 4464212 - DNA, 25 bp, Homo sapien
tgtgggcttaaagccttctcagttc

SEQ ID NO: 4464213 - DNA, 25 bp, Homo sapien
ggccgctgtgggcttaaagccttct

SEQ ID NO: 4464214 - DNA, 25 bp, Homo sapien
gggcttaaagccttctcagttctgg

SEQ ID NO: 4464215 - DNA, 25 bp, Homo sapien
gaaacactgcgctctctatggtgca

SEQ ID NO: 4464216 - DNA, 25 bp, Homo sapien
ggtggccttgagacacgcttctgag

SEQ ID NO: 4464217 - DNA, 25 bp, Homo sapien
ggtgtagtcctcaatgcgcgctttt

SEQ ID NO: 4464218 - DNA, 25 bp, Homo sapien
gcagggcccagaattcgactcagtt

SEQ ID NO: 4464219 - DNA, 25 bp, Homo sapien
cccgcagggcattatcgcactcttt

SEQ ID NO: 4464220 - DNA, 25 bp, Homo sapien
tacacagagtgatgagttgattgat

SEQ ID NO: 4464221 - DNA, 25 bp, Homo sapien
tggcccggagcttgttgggtacaca

SEQ ID NO: 4464222 - DNA, 25 bp, Homo sapien
cgcactctttctggcccggagcttg

SEQ ID NO: 4464223 - DNA, 25 bp, Homo sapien
acaggttcattaggattgtccaaca

SEQ ID NO: 4464224 - DNA, 25 bp, Homo sapien
tcacactctcaatgcagtcaaagta

SEQ ID NO: 4464225 - DNA, 25 bp, Homo sapien
tggagttttccatcacactctcaat

SEQ ID NO: 4464226 - DNA, 25 bp, Homo sapien
taagagaggtcactaacaggttcat

SEQ ID NO: 4464227 - DNA, 25 bp, Homo sapien
tgtgaaatccctgccatcgattcac

SEQ ID NO: 4464228 - DNA, 25 bp, Homo sapien
cacagagagccttggatgcaatccc

SEQ ID NO: 4464229 - DNA, 25 bp, Homo sapien
gggaggtctccggtcttggcattct

SEQ ID NO: 4464230 - DNA, 25 bp, Homo sapien
gagccttggatgcaatccccacaca

SEQ ID NO: 4464231 - DNA, 25 bp, Homo sapien
ccctggcaaactggatggggtccac

SEQ ID NO: 4464232 - DNA, 25 bp, Homo sapien
tggcctggttagccctggcaaactg

SEQ ID NO: 4464233 - DNA, 25 bp, Homo sapien
ggctgtttggatcagagatgccaac

SEQ ID NO: 4464234 - DNA, 25 bp, Homo sapien
gttctggcatgccatctggatggcc

SEQ ID NO: 4464235 - DNA, 25 bp, Homo sapien
tgagccccaggtagtcttaaaggag

SEQ ID NO: 4464236 - DNA, 25 bp, Homo sapien
tgctgaggctggtaacacccctttg

SEQ ID NO: 4464237 - DNA, 25 bp, Homo sapien
taatcagttagcctttggaacccca

SEQ ID NO: 4464238 - DNA, 25 bp, Homo sapien
tacatatcaaggtgcaacagctccc

SEQ ID NO: 4464239 - DNA, 25 bp, Homo sapien
agtgctgttggcgacttccttggct

SEQ ID NO: 4464240 - DNA, 25 bp, Homo sapien
tgtgcttggcaacaattgtggcggc

SEQ ID NO: 4464241 - DNA, 25 bp, Homo sapien
cttggctgactggacgaagtgcctc

SEQ ID NO: 4464242 - DNA, 25 bp, Homo sapien
caggcattgcacaaggctgacgtgt

SEQ ID NO: 4464243 - DNA, 25 bp, Homo sapien
gaaaacttctcttactctaggactg

SEQ ID NO: 4464244 - DNA, 25 bp, Homo sapien
tggtatcttgcctcccatgacaatg

SEQ ID NO: 4464245 - DNA, 25 bp, Homo sapien
agcttccaactagcgctgggctggg

SEQ ID NO: 4464246 - DNA, 25 bp, Homo sapien
tgtgcagtgtcctatcctctggaga

SEQ ID NO: 4464247 - DNA, 25 bp, Homo sapien
attaaagagagctggatcgggtgtc

SEQ ID NO: 4464248 - DNA, 25 bp, Homo sapien
caaattcgattaaagagagctggat

SEQ ID NO: 4464249 - DNA, 25 bp, Homo sapien
agccaagtcaaattcgattaaagag

SEQ ID NO: 4464250 - DNA, 25 bp, Homo sapien
ctggatcgggtgtctgtggtacaca

SEQ ID NO: 4464251 - DNA, 25 bp, Homo sapien
ctctccaagcttttctcttcccctt

SEQ ID NO: 4464252 - DNA, 25 bp, Homo sapien
tctcttcccctttctgctcccacaa

SEQ ID NO: 4464253 - DNA, 25 bp, Homo sapien
tcttcccctttctgctcccacaaac

SEQ ID NO: 4464254 - DNA, 25 bp, Homo sapien
tttctgctcccacaaacctctcagt

SEQ ID NO: 4464255 - DNA, 25 bp, Homo sapien
ctgccggcactggccacgtagaagt

SEQ ID NO: 4464256 - DNA, 25 bp, Homo sapien
aaatgttgatttatgctgccggcac

SEQ ID NO: 4464257 - DNA, 25 bp, Homo sapien
ggccacgtagaagtgaaccactttg

SEQ ID NO: 4464258 - DNA, 25 bp, Homo sapien
agtgaaccactttggtactgtgatc

SEQ ID NO: 4464259 - DNA, 25 bp, Homo sapien
cttcaatcaagggtgcggtggcgat

SEQ ID NO: 4464260 - DNA, 25 bp, Homo sapien
caaactcagggtttgaggcgaacgc

SEQ ID NO: 4464261 - DNA, 25 bp, Homo sapien
tcttcagagaaatccccatccaggg

SEQ ID NO: 4464262 - DNA, 25 bp, Homo sapien
gatgcgacacttattgcggttgtct

SEQ ID NO: 4464263 - DNA, 25 bp, Homo sapien
tgtccagccagtacagaccaggtgg

SEQ ID NO: 4464264 - DNA, 25 bp, Homo sapien
ggtacgatgaactctccagcatggt

SEQ ID NO: 4464265 - DNA, 25 bp, Homo sapien
gagactcttgatggagtcggacact

SEQ ID NO: 4464266 - DNA, 25 bp, Homo sapien
gacactgtatgggaatgtccagcca

SEQ ID NO: 4464267 - DNA, 25 bp, Homo sapien
tggttggcaacgtctcactgcacag

SEQ ID NO: 4464268 - DNA, 25 bp, Homo sapien
ctggtggaaagaatatggtcctgcc

SEQ ID NO: 4464269 - DNA, 25 bp, Homo sapien
tagtgcaagttggacacaggctcca

SEQ ID NO: 4464270 - DNA, 25 bp, Homo sapien
tctattcactggcttaagcacagga

SEQ ID NO: 4464271 - DNA, 25 bp, Homo sapien
tcgatgtcccggatgcaccggttga

SEQ ID NO: 4464272 - DNA, 25 bp, Homo sapien
tcgatggagtaatcacactccctct

SEQ ID NO: 4464273 - DNA, 25 bp, Homo sapien
ggatgcaccggttgatgccatcgat

SEQ ID NO: 4464274 - DNA, 25 bp, Homo sapien
ctccacagagatgtcgtccctcgtg

SEQ ID NO: 4464275 - DNA, 25 bp, Homo sapien
gataaggtgtccgatttcctggacc

SEQ ID NO: 4464276 - DNA, 25 bp, Homo sapien
cgatgggatcgataaggtgtccgat

SEQ ID NO: 4464277 - DNA, 25 bp, Homo sapien
ggaccaccgaagtcagctgctcctg

SEQ ID NO: 4464278 - DNA, 25 bp, Homo sapien
cccgagccgctgtggcgatgggatc

SEQ ID NO: 4464279 - DNA, 25 bp, Homo sapien
agagggcttagggtggtcctttatg

SEQ ID NO: 4464280 - DNA, 25 bp, Homo sapien
cactgaagggtcatcgggacagagg

SEQ ID NO: 4464281 - DNA, 25 bp, Homo sapien
ccaccaaagggaacggagcactgaa

SEQ ID NO: 4464282 - DNA, 25 bp, Homo sapien
ctggtgtcaccaccaaagggaacgg

SEQ ID NO: 4464283 - DNA, 25 bp, Homo sapien
aaagcaggagatgaaagaaaccttc

SEQ ID NO: 4464284 - DNA, 25 bp, Homo sapien
tttgcccagagcattttgaccaagc

SEQ ID NO: 4464285 - DNA, 25 bp, Homo sapien
aaagggtaaggtagcaggggagcag

SEQ ID NO: 4464286 - DNA, 25 bp, Homo sapien
tttgtaggaagccaatcccaactgc

SEQ ID NO: 4464287 - DNA, 25 bp, Homo sapien
caagggctcaaaatagcttgccagt

SEQ ID NO: 4464288 - DNA, 25 bp, Homo sapien
atcttggaggccacaccaactgcgg

SEQ ID NO: 4464289 - DNA, 25 bp, Homo sapien
tctgcgagagtcttggtctggtcca

SEQ ID NO: 4464290 - DNA, 25 bp, Homo sapien
caactgcggctaagatcaagggctc

SEQ ID NO: 4464291 - DNA, 25 bp, Homo sapien
ttccttcatcaactgggcggcctct

SEQ ID NO: 4464292 - DNA, 25 bp, Homo sapien
ttcactggcagcttcgttcagcgtc

SEQ ID NO: 4464293 - DNA, 25 bp, Homo sapien
ttcagcgtcaccatgatgtcatcca

SEQ ID NO: 4464294 - DNA, 25 bp, Homo sapien
ggcttctgcaatggcgtccaccatg

SEQ ID NO: 4464295 - DNA, 25 bp, Homo sapien
gggtaagcaatgacgtatttgagat

SEQ ID NO: 4464296 - DNA, 25 bp, Homo sapien
cgtatttgagatttccctggcagct

SEQ ID NO: 4464297 - DNA, 25 bp, Homo sapien
aaaccttgaaatcatgacgacaaca

SEQ ID NO: 4464298 - DNA, 25 bp, Homo sapien
catgacgacaacagtgggatctggg

SEQ ID NO: 4464299 - DNA, 25 bp, Homo sapien
ctttggttctggaggagtgccttca

SEQ ID NO: 4464300 - DNA, 25 bp, Homo sapien
gatagtcgacaaatgttccctttgg

SEQ ID NO: 4464301 - DNA, 25 bp, Homo sapien
cgcaatggctttggagtatttaacc

SEQ ID NO: 4464302 - DNA, 25 bp, Homo sapien
taaccacagtcgtctgatagtcgac

SEQ ID NO: 4464303 - DNA, 25 bp, Homo sapien
cactgagctgcacgagagtgagtgt

SEQ ID NO: 4464304 - DNA, 25 bp, Homo sapien
aacgcacactgagctgcacgagagt

SEQ ID NO: 4464305 - DNA, 25 bp, Homo sapien
aggaacgcacactgagctgcacgag

SEQ ID NO: 4464306 - DNA, 25 bp, Homo sapien
agctgcacgagagtgagtgttgcca

SEQ ID NO: 4464307 - DNA, 25 bp, Homo sapien
gaatgtccaccctttctaaggcatg

SEQ ID NO: 4464308 - DNA, 25 bp, Homo sapien
tccatcaaggcaggacaggaatgtc

SEQ ID NO: 4464309 - DNA, 25 bp, Homo sapien
tttgaatgactctccatccatcaag

SEQ ID NO: 4464310 - DNA, 25 bp, Homo sapien
cttttgaatgactctccatccatca

SEQ ID NO: 4464311 - DNA, 25 bp, Homo sapien
tctggttccgccgtggctgctgcca

SEQ ID NO: 4464312 - DNA, 25 bp, Homo sapien
tggttccgccgtggctgctgccatc

SEQ ID NO: 4464313 - DNA, 25 bp, Homo sapien
ctcctctggttccgccgtggctgct

SEQ ID NO: 4464314 - DNA, 25 bp, Homo sapien
catttgtgaagccagtcctcccaac

SEQ ID NO: 4464315 - DNA, 25 bp, Homo sapien
tccacaggaggtatgtctgggctaa

SEQ ID NO: 4464316 - DNA, 25 bp, Homo sapien
caaagtccttctgtctgaaagccca

SEQ ID NO: 4464317 - DNA, 25 bp, Homo sapien
gaacgtctcgaacatggtttgcgct

SEQ ID NO: 4464318 - DNA, 25 bp, Homo sapien
taagatggcagtcccaagcttgggc

SEQ ID NO: 4464319 - DNA, 25 bp, Homo sapien
cagataaagctcctgcttgatgttc

SEQ ID NO: 4464320 - DNA, 25 bp, Homo sapien
aagtgatgttaacaaaggcttgaat

SEQ ID NO: 4464321 - DNA, 25 bp, Homo sapien
gatgttaacaaaggcttgaattttc

SEQ ID NO: 4464322 - DNA, 25 bp, Homo sapien
agcagataaagctcctgcttgatgt

SEQ ID NO: 4464323 - DNA, 25 bp, Homo sapien
tgttgactacctccatgcagaatac

SEQ ID NO: 4464324 - DNA, 25 bp, Homo sapien
catttcataattaagcagggctgtc

SEQ ID NO: 4464325 - DNA, 25 bp, Homo sapien
ctgaggcgggaaaaacactccagcc

SEQ ID NO: 4464326 - DNA, 25 bp, Homo sapien
cacagggtgctacagacatttcata

SEQ ID NO: 4464327 - DNA, 25 bp, Homo sapien
atggactctgccatcgaggccttcc

SEQ ID NO: 4464328 - DNA, 25 bp, Homo sapien
tgatggactctgccatcgaggcctt

SEQ ID NO: 4464329 - DNA, 25 bp, Homo sapien
ggaaggagaagcgtgatggactctg

SEQ ID NO: 4464330 - DNA, 25 bp, Homo sapien
aaggagaagcgtgatggactctgcc

SEQ ID NO: 4464331 - DNA, 25 bp, Homo sapien
acacgagtgcgaatctggaatccga

SEQ ID NO: 4464332 - DNA, 25 bp, Homo sapien
ctgcaccaggaagatacagccgtgg

SEQ ID NO: 4464333 - DNA, 25 bp, Homo sapien
tttccgtgacggcacgggcgcattc

SEQ ID NO: 4464334 - DNA, 25 bp, Homo sapien
ccaggtcctgcacacgagtgcgaat

SEQ ID NO: 4464335 - DNA, 25 bp, Homo sapien
tccaagaccagcccacaaggaattg

SEQ ID NO: 4464336 - DNA, 25 bp, Homo sapien
caagaccagcccacaaggaattgtt

SEQ ID NO: 4464337 - DNA, 25 bp, Homo sapien
agaccagcccacaaggaattgtttc

SEQ ID NO: 4464338 - DNA, 25 bp, Homo sapien
accagcccacaaggaattgtttctc

SEQ ID NO: 4464339 - DNA, 25 bp, Homo sapien
tggagagccgagagcaccaaggaga

SEQ ID NO: 4464340 - DNA, 25 bp, Homo sapien
ctggagagccgagagcaccaaggag

SEQ ID NO: 4464341 - DNA, 25 bp, Homo sapien
ggagagccgagagcaccaaggagac

SEQ ID NO: 4464342 - DNA, 25 bp, Homo sapien
tccccgctgttgcaaacataatggt

SEQ ID NO: 4464343 - DNA, 25 bp, Homo sapien
tctgcattcagcgtccccgctgttg

SEQ ID NO: 4464344 - DNA, 25 bp, Homo sapien
catgcctgggttcctttgttcccgg

SEQ ID NO: 4464345 - DNA, 25 bp, Homo sapien
tgtccaggtcggcaatgatcccaga

SEQ ID NO: 4464346 - DNA, 25 bp, Homo sapien
cctttaccaacggactctcatcttc

SEQ ID NO: 4464347 - DNA, 25 bp, Homo sapien
gctgtgttacacctccctttaccaa

SEQ ID NO: 4464348 - DNA, 25 bp, Homo sapien
agtgctgtgttacacctccctttac

SEQ ID NO: 4464349 - DNA, 25 bp, Homo sapien
gagaagtgctgtgttacacctccct

SEQ ID NO: 4464350 - DNA, 25 bp, Homo sapien
ccagcttgtcaggagtggacgcagc

SEQ ID NO: 4464351 - DNA, 25 bp, Homo sapien
cttggccgtcttgagaatgttctcc

SEQ ID NO: 4464352 - DNA, 25 bp, Homo sapien
tcgtgtcttctaccaaggccttggc

SEQ ID NO: 4464353 - DNA, 25 bp, Homo sapien
agtagtttcgtgtcttctaccaagg

SEQ ID NO: 4464354 - DNA, 25 bp, Homo sapien
cactgatgagatcagaaagggcctt

SEQ ID NO: 4464355 - DNA, 25 bp, Homo sapien
cttgctggcagctcccttggtagca

SEQ ID NO: 4464356 - DNA, 25 bp, Homo sapien
ccttgagctggtacatggaagggtc

SEQ ID NO: 4464357 - DNA, 25 bp, Homo sapien
tggaagggtcgtccactggcttgct

SEQ ID NO: 4464358 - DNA, 25 bp, Homo sapien
atccccagtcggagccccactctac

SEQ ID NO: 4464359 - DNA, 25 bp, Homo sapien
tcatccccagtcggagccccactct

SEQ ID NO: 4464360 - DNA, 25 bp, Homo sapien
catccccagtcggagccccactcta

SEQ ID NO: 4464361 - DNA, 25 bp, Homo sapien
cgtaagctcctgctttatgcattca

SEQ ID NO: 4464362 - DNA, 25 bp, Homo sapien
gagcgaggtgacattggtcaccatc

SEQ ID NO: 4464363 - DNA, 25 bp, Homo sapien
gcattcaattgtggcctcaagcgcc

SEQ ID NO: 4464364 - DNA, 25 bp, Homo sapien
gcctttacagtcttgaggagcgagg

SEQ ID NO: 4464365 - DNA, 25 bp, Homo sapien
aacatatctgacacggctttccggc

SEQ ID NO: 4464366 - DNA, 25 bp, Homo sapien
tgtctacatgagttcccagctgcca

SEQ ID NO: 4464367 - DNA, 25 bp, Homo sapien
caggtacgtcttttgactggaacac

SEQ ID NO: 4464368 - DNA, 25 bp, Homo sapien
ggttggcagtagcaatcacgtcctc

SEQ ID NO: 4464369 - DNA, 25 bp, Homo sapien
taaacaagggtccagcggaagagca

SEQ ID NO: 4464370 - DNA, 25 bp, Homo sapien
cacactctgcaagaaggcttcctgc

SEQ ID NO: 4464371 - DNA, 25 bp, Homo sapien
ggaaccaagtgctgcaatccctatc

SEQ ID NO: 4464372 - DNA, 25 bp, Homo sapien
ctatccaccaccctcggagaggcct

SEQ ID NO: 4464373 - DNA, 25 bp, Homo sapien
aacacctctcctagtgcacaatggc

SEQ ID NO: 4464374 - DNA, 25 bp, Homo sapien
cagggatggcaacacctctcctagt

SEQ ID NO: 4464375 - DNA, 25 bp, Homo sapien
gatggcaacacctctcctagtgcac

SEQ ID NO: 4464376 - DNA, 25 bp, Homo sapien
gcaacacctctcctagtgcacaatg

SEQ ID NO: 4464377 - DNA, 25 bp, Homo sapien
attgattgctgagcagaagccggag

SEQ ID NO: 4464378 - DNA, 25 bp, Homo sapien
catggcagcggatcatcaattgatt

SEQ ID NO: 4464379 - DNA, 25 bp, Homo sapien
tcatcaattgattgctgagcagaag

SEQ ID NO: 4464380 - DNA, 25 bp, Homo sapien
cggatcatcaattgattgctgagca

SEQ ID NO: 4464381 - DNA, 25 bp, Homo sapien
tcatacccctgtgcctcgaacggtg

SEQ ID NO: 4464382 - DNA, 25 bp, Homo sapien
tacccctgtgcctcgaacggtgagg

SEQ ID NO: 4464383 - DNA, 25 bp, Homo sapien
cggtgaggcacaaggccccacgtct

SEQ ID NO: 4464384 - DNA, 25 bp, Homo sapien
gcctcgaacggtgaggcacaaggcc

SEQ ID NO: 4464385 - DNA, 25 bp, Homo sapien
ggttctcacctcgtcactgacatcg

SEQ ID NO: 4464386 - DNA, 25 bp, Homo sapien
ctggttctcacctcgtcactgacat

SEQ ID NO: 4464387 - DNA, 25 bp, Homo sapien
ttctcacctcgtcactgacatcggg

SEQ ID NO: 4464388 - DNA, 25 bp, Homo sapien
ggctctggttctcacctcgtcactg

SEQ ID NO: 4464389 - DNA, 25 bp, Homo sapien
tccaggaggtccaagtagccaaggg

SEQ ID NO: 4464390 - DNA, 25 bp, Homo sapien
gggacacagctactccccagccctg

SEQ ID NO: 4464391 - DNA, 25 bp, Homo sapien
ggacacagctactccccagccctga

SEQ ID NO: 4464392 - DNA, 25 bp, Homo sapien
agccctgactcatgcgctttcttac

SEQ ID NO: 4464393 - DNA, 25 bp, Homo sapien
gacctgtgatggtgggtctcccgtc

SEQ ID NO: 4464394 - DNA, 25 bp, Homo sapien
gatggtgggtctcccgtcagtaagt

SEQ ID NO: 4464395 - DNA, 25 bp, Homo sapien
cgatctccagcctccatgagatgag

SEQ ID NO: 4464396 - DNA, 25 bp, Homo sapien
tgggtctcccgtcagtaagtgccct

SEQ ID NO: 4464397 - DNA, 25 bp, Homo sapien
ggaagaatccataacagaaaatcaa

SEQ ID NO: 4464398 - DNA, 25 bp, Homo sapien
tcaatggtcaccagagaagcacgtc

SEQ ID NO: 4464399 - DNA, 25 bp, Homo sapien
ccatgcaagtttgtaacacacaaga

SEQ ID NO: 4464400 - DNA, 25 bp, Homo sapien
caagatttaagagtactgattctac

SEQ ID NO: 4464401 - DNA, 25 bp, Homo sapien
ccataaagcccaaatgataagtctt

SEQ ID NO: 4464402 - DNA, 25 bp, Homo sapien
accataaagcccaaatgataagtct

SEQ ID NO: 4464403 - DNA, 25 bp, Homo sapien
gtattccccttctttcagcgaatat

SEQ ID NO: 4464404 - DNA, 25 bp, Homo sapien
tgtattccccttctttcagcgaata

SEQ ID NO: 4464405 - DNA, 25 bp, Homo sapien
acagcgccggcgactcgcttggaga

SEQ ID NO: 4464406 - DNA, 25 bp, Homo sapien
cgcctggatgagctctgtcacagcg

SEQ ID NO: 4464407 - DNA, 25 bp, Homo sapien
atgagctctgtcacagcgccggcga

SEQ ID NO: 4464408 - DNA, 25 bp, Homo sapien
gcgactcgcttggagaaagcggcca

SEQ ID NO: 4464409 - DNA, 25 bp, Homo sapien
tgctcttggcttcagttgctctaac

SEQ ID NO: 4464410 - DNA, 25 bp, Homo sapien
ttagcagcagcttcgatggatgctg

SEQ ID NO: 4464411 - DNA, 25 bp, Homo sapien
agttgggtcttctggatccacccac

SEQ ID NO: 4464412 - DNA, 25 bp, Homo sapien
ctctgtttctgcaatgacagttggg

SEQ ID NO: 4464413 - DNA, 25 bp, Homo sapien
tggggtaggaggtattagcttaaca

SEQ ID NO: 4464414 - DNA, 25 bp, Homo sapien
ggtaggaggtattagcttaacagga

SEQ ID NO: 4464415 - DNA, 25 bp, Homo sapien
taggaggtattagcttaacaggatt

SEQ ID NO: 4464416 - DNA, 25 bp, Homo sapien
gaggtattagcttaacaggattggg

SEQ ID NO: 4464417 - DNA, 25 bp, Homo sapien
caacctaatatatcaaacatatcac

SEQ ID NO: 4464418 - DNA, 25 bp, Homo sapien
tgatatatagttggattaaataaca

SEQ ID NO: 4464419 - DNA, 25 bp, Homo sapien
cactgtaggaatatgtttgatatat

SEQ ID NO: 4464420 - DNA, 25 bp, Homo sapien
tatagttggattaaataacaaccta

SEQ ID NO: 4464421 - DNA, 25 bp, Homo sapien
caaactgaagaaccacccgtgtcat

SEQ ID NO: 4464422 - DNA, 25 bp, Homo sapien
cacaaactgaagaaccacccgtgtc

SEQ ID NO: 4464423 - DNA, 25 bp, Homo sapien
aaaaacacaatggtcgcccttctca

SEQ ID NO: 4464424 - DNA, 25 bp, Homo sapien
gggaatgctttgttgagagctaaaa

SEQ ID NO: 4464425 - DNA, 25 bp, Homo sapien
ccacttcccctgctcactgtccttg

SEQ ID NO: 4464426 - DNA, 25 bp, Homo sapien
tcccctgctcactgtccttgtcagg

SEQ ID NO: 4464427 - DNA, 25 bp, Homo sapien
cttcccctgctcactgtccttgtca

SEQ ID NO: 4464428 - DNA, 25 bp, Homo sapien
ccctgctcactgtccttgtcaggtc

SEQ ID NO: 4464429 - DNA, 25 bp, Homo sapien
cacatggctagaactggagatcctt

SEQ ID NO: 4464430 - DNA, 25 bp, Homo sapien
caattggatcatgtaaagacccgct

SEQ ID NO: 4464431 - DNA, 25 bp, Homo sapien
gataacggaatcctcgcttctgggt

SEQ ID NO: 4464432 - DNA, 25 bp, Homo sapien
tggcatcaagctaaagcaaggaact

SEQ ID NO: 4464433 - DNA, 25 bp, Homo sapien
tgggagacatttgctctgataagaa

SEQ ID NO: 4464434 - DNA, 25 bp, Homo sapien
gtttatgactaagacgcactgccca

SEQ ID NO: 4464435 - DNA, 25 bp, Homo sapien
gagtaccctgatgaaacctgccttc

SEQ ID NO: 4464436 - DNA, 25 bp, Homo sapien
tgttagatactacagtttgggcaga

SEQ ID NO: 4464437 - DNA, 25 bp, Homo sapien
aacagatacggcagaagttcttatc

SEQ ID NO: 4464438 - DNA, 25 bp, Homo sapien
aactgttgtaatgttctttgacgaa

SEQ ID NO: 4464439 - DNA, 25 bp, Homo sapien
acaacatctctatgctttaaaacag

SEQ ID NO: 4464440 - DNA, 25 bp, Homo sapien
gatttttctggtaatggcaactgtt

SEQ ID NO: 4464441 - DNA, 25 bp, Homo sapien
aagcttgtaataatagatattcaac

SEQ ID NO: 4464442 - DNA, 25 bp, Homo sapien
ttgtaataatagatattcaacttgg

SEQ ID NO: 4464443 - DNA, 25 bp, Homo sapien
gtaataatagatattcaacttggaa

SEQ ID NO: 4464444 - DNA, 25 bp, Homo sapien
aataatagatattcaacttggaaat

SEQ ID NO: 4464445 - DNA, 25 bp, Homo sapien
ccgatttgaccagggcgcttgtggc

SEQ ID NO: 4464446 - DNA, 25 bp, Homo sapien
ctgctgaggccgatttgaccagggc

SEQ ID NO: 4464447 - DNA, 25 bp, Homo sapien
ctgaggccgatttgaccagggcgct

SEQ ID NO: 4464448 - DNA, 25 bp, Homo sapien
tgggctgctgaggccgatttgacca

SEQ ID NO: 4464449 - DNA, 25 bp, Homo sapien
gttgagtgtcccgcatgtggtcagc

SEQ ID NO: 4464450 - DNA, 25 bp, Homo sapien
ttgagtgtcccgcatgtggtcagcg

SEQ ID NO: 4464451 - DNA, 25 bp, Homo sapien
agtgtcccgcatgtggtcagcggct

SEQ ID NO: 4464452 - DNA, 25 bp, Homo sapien
tcccgcatgtggtcagcggctttac

SEQ ID NO: 4464453 - DNA, 25 bp, Homo sapien
tcagtcggtcagcacagagagtggc

SEQ ID NO: 4464454 - DNA, 25 bp, Homo sapien
acaaaagcttgtagctcttttcctg

SEQ ID NO: 4464455 - DNA, 25 bp, Homo sapien
gaaggcactgcatgtgtttccttgg

SEQ ID NO: 4464456 - DNA, 25 bp, Homo sapien
agagagtggcaattcagggagggaa

SEQ ID NO: 4464457 - DNA, 25 bp, Homo sapien
ttgctcgggaaccagacttgtaccc

SEQ ID NO: 4464458 - DNA, 25 bp, Homo sapien
aaccagacttgtaccccgcttggtg

SEQ ID NO: 4464459 - DNA, 25 bp, Homo sapien
tgctcgggaaccagacttgtacccc

SEQ ID NO: 4464460 - DNA, 25 bp, Homo sapien
agacttgtaccccgcttggtgcctc

SEQ ID NO: 4464461 - DNA, 25 bp, Homo sapien
tagagtcgagaaattggccatgagg

SEQ ID NO: 4464462 - DNA, 25 bp, Homo sapien
gagagtagagtcgagaaattggcca

SEQ ID NO: 4464463 - DNA, 25 bp, Homo sapien
ctagagagtagagtcgagaaattgg

SEQ ID NO: 4464464 - DNA, 25 bp, Homo sapien
agtcgagaaattggccatgagggca

SEQ ID NO: 4464465 - DNA, 25 bp, Homo sapien
gaccactgtccgtcgtctgcagcat

SEQ ID NO: 4464466 - DNA, 25 bp, Homo sapien
tgtccgtcgtctgcagcattggcag

SEQ ID NO: 4464467 - DNA, 25 bp, Homo sapien
actgtccgtcgtctgcagcattggc

SEQ ID NO: 4464468 - DNA, 25 bp, Homo sapien
ccactgtccgtcgtctgcagcattg

SEQ ID NO: 4464469 - DNA, 25 bp, Homo sapien
gtcaacggagaagtgacccaaggcc

SEQ ID NO: 4464470 - DNA, 25 bp, Homo sapien
caacggagaagtgacccaaggccca

SEQ ID NO: 4464471 - DNA, 25 bp, Homo sapien
cagtcaacggagaagtgacccaagg

SEQ ID NO: 4464472 - DNA, 25 bp, Homo sapien
agtcaacggagaagtgacccaaggc

SEQ ID NO: 4464473 - DNA, 25 bp, Homo sapien
tgtccctgaacggaggcattggccg

SEQ ID NO: 4464474 - DNA, 25 bp, Homo sapien
tcctcgctggcgtgtccctgaacgg

SEQ ID NO: 4464475 - DNA, 25 bp, Homo sapien
tcacagagactgctggtcgcagccg

SEQ ID NO: 4464476 - DNA, 25 bp, Homo sapien
gaagcggcgacctgcttggcagatg

SEQ ID NO: 4464477 - DNA, 25 bp, Homo sapien
gctccaacaggagtattttcccacc

SEQ ID NO: 4464478 - DNA, 25 bp, Homo sapien
tccaacaggagtattttcccaccag

SEQ ID NO: 4464479 - DNA, 25 bp, Homo sapien
ccgctccaacaggagtattttccca

SEQ ID NO: 4464480 - DNA, 25 bp, Homo sapien
ctccaacaggagtattttcccacca

SEQ ID NO: 4464481 - DNA, 25 bp, Homo sapien
acattatatcattagaaacagccat

SEQ ID NO: 4464482 - DNA, 25 bp, Homo sapien
cattatatcattagaaacagccatt

SEQ ID NO: 4464483 - DNA, 25 bp, Homo sapien
tacattatatcattagaaacagcca

SEQ ID NO: 4464484 - DNA, 25 bp, Homo sapien
ctgaggctcttttcacagcatttcc

SEQ ID NO: 4464485 - DNA, 25 bp, Homo sapien
caacatcgtcgtcatcagctttgcc

SEQ ID NO: 4464486 - DNA, 25 bp, Homo sapien
ggttttcactacaacatcgtcgtca

SEQ ID NO: 4464487 - DNA, 25 bp, Homo sapien
tgggctgcacggacaagattgtctg

SEQ ID NO: 4464488 - DNA, 25 bp, Homo sapien
ctgctggcggatttgggccagtttt

SEQ ID NO: 4464489 - DNA, 25 bp, Homo sapien
tgctggcggatttgggccagttttt

SEQ ID NO: 4464490 - DNA, 25 bp, Homo sapien
tcagctcggtgggtaaaaacttata

SEQ ID NO: 4464491 - DNA, 25 bp, Homo sapien
catcttccctcagctcggtgggtaa

SEQ ID NO: 4464492 - DNA, 25 bp, Homo sapien
tgtgacatcacgatcatgcagccag

SEQ ID NO: 4464493 - DNA, 25 bp, Homo sapien
cctggacgctaaggagacgagcatt

SEQ ID NO: 4464494 - DNA, 25 bp, Homo sapien
tctgccctttggactacggaggaac

SEQ ID NO: 4464495 - DNA, 25 bp, Homo sapien
tgtacaaggagcttacacacggagg

SEQ ID NO: 4464496 - DNA, 25 bp, Homo sapien
aatccgggcttgtgaccattctgaa

SEQ ID NO: 4464497 - DNA, 25 bp, Homo sapien
taagcagatcctttccaatccgggc

SEQ ID NO: 4464498 - DNA, 25 bp, Homo sapien
ttcccttcctatgggagggctctga

SEQ ID NO: 4464499 - DNA, 25 bp, Homo sapien
tgcagattaagggtaaattcaagcc

SEQ ID NO: 4464500 - DNA, 25 bp, Homo sapien
acatcttcggaggaccaaagcacca

SEQ ID NO: 4464501 - DNA, 25 bp, Homo sapien
tccaagacatgatagcacaccagag

SEQ ID NO: 4464502 - DNA, 25 bp, Homo sapien
tctggtgaaacaagatcgggcaagg

SEQ ID NO: 4464503 - DNA, 25 bp, Homo sapien
tgccctgggcacagcatagaagagc

SEQ ID NO: 4464504 - DNA, 25 bp, Homo sapien
tcttaaggcccgtgcatagactgca

SEQ ID NO: 4464505 - DNA, 25 bp, Homo sapien
gaagaaccacatgtcaacacaccgg

SEQ ID NO: 4464506 - DNA, 25 bp, Homo sapien
tacacttctatgctccagacctggg

SEQ ID NO: 4464507 - DNA, 25 bp, Homo sapien
ccttttggccatcgggaacagcaat

SEQ ID NO: 4464508 - DNA, 25 bp, Homo sapien
gactcaggtacactgatgctccctg

SEQ ID NO: 4464509 - DNA, 25 bp, Homo sapien
gcagagctgaacgttcctgttttct

SEQ ID NO: 4464510 - DNA, 25 bp, Homo sapien
gattagatacgacacagggcagagc

SEQ ID NO: 4464511 - DNA, 25 bp, Homo sapien
tgagaggccgctgaatgagacccag

SEQ ID NO: 4464512 - DNA, 25 bp, Homo sapien
taactcttgaaagtggacgcagtgg

SEQ ID NO: 4464513 - DNA, 25 bp, Homo sapien
gacctactgtgagtctggcaccacg

SEQ ID NO: 4464514 - DNA, 25 bp, Homo sapien
tagcttctcagagcgcagggatgga

SEQ ID NO: 4464515 - DNA, 25 bp, Homo sapien
gctacctggcattagttagggcacc

SEQ ID NO: 4464516 - DNA, 25 bp, Homo sapien
gacactgggtcagtgtgtccatcca

SEQ ID NO: 4464517 - DNA, 25 bp, Homo sapien
tgggatggttggtgagacgacactg

SEQ ID NO: 4464518 - DNA, 25 bp, Homo sapien
gtgtgtccatccaaagcttcattgt

SEQ ID NO: 4464519 - DNA, 25 bp, Homo sapien
tgagacgacactgggtcagtgtgtc

SEQ ID NO: 4464520 - DNA, 25 bp, Homo sapien
gatttcctgaaggtgtttggtctgg

SEQ ID NO: 4464521 - DNA, 25 bp, Homo sapien
cctgaaggtgtttggtctggggaat

SEQ ID NO: 4464522 - DNA, 25 bp, Homo sapien
atttcctgaaggtgtttggtctggg

SEQ ID NO: 4464523 - DNA, 25 bp, Homo sapien
ttcctgaaggtgtttggtctgggga

SEQ ID NO: 4464524 - DNA, 25 bp, Homo sapien
tgggaagactgtgattagggacaac

SEQ ID NO: 4464525 - DNA, 25 bp, Homo sapien
gattagggacaacctcctatcctta

SEQ ID NO: 4464526 - DNA, 25 bp, Homo sapien
gacaacctcctatccttaaggctgg

SEQ ID NO: 4464527 - DNA, 25 bp, Homo sapien
ctcctatccttaaggctggccagga

SEQ ID NO: 4464528 - DNA, 25 bp, Homo sapien
gcacagagcatgtactccatcaaca

SEQ ID NO: 4464529 - DNA, 25 bp, Homo sapien
tgtactccatcaacattagtcactg

SEQ ID NO: 4464530 - DNA, 25 bp, Homo sapien
gagttggttccaagcacagagcatg

SEQ ID NO: 4464531 - DNA, 25 bp, Homo sapien
tttgattcctgagttggttccaagc

SEQ ID NO: 4464532 - DNA, 25 bp, Homo sapien
gggagttgacacatagtatctctca

SEQ ID NO: 4464533 - DNA, 25 bp, Homo sapien
tgattgcttaggtcagggagttgac

SEQ ID NO: 4464534 - DNA, 25 bp, Homo sapien
ggtttgggtgattgcttaggtcagg

SEQ ID NO: 4464535 - DNA, 25 bp, Homo sapien
taggtcagggagttgacacatagta

SEQ ID NO: 4464536 - DNA, 25 bp, Homo sapien
tagaatctaacctgaagcctgccag

SEQ ID NO: 4464537 - DNA, 25 bp, Homo sapien
cagagagtctgggaagcgttgtttc

SEQ ID NO: 4464538 - DNA, 25 bp, Homo sapien
tgctgctgcgagctggcctgtcctg

SEQ ID NO: 4464539 - DNA, 25 bp, Homo sapien
ccccaaacaagcgagagtagaatct

SEQ ID NO: 4464540 - DNA, 25 bp, Homo sapien
ggcaggctttggagcgaaatcacct

SEQ ID NO: 4464541 - DNA, 25 bp, Homo sapien
gaaatcacctattatggtcctggaa

SEQ ID NO: 4464542 - DNA, 25 bp, Homo sapien
ggctttggagcgaaatcacctatta

SEQ ID NO: 4464543 - DNA, 25 bp, Homo sapien
tggagcgaaatcacctattatggtc

SEQ ID NO: 4464544 - DNA, 25 bp, Homo sapien
cacagaaggtctgagtgggtagtta

SEQ ID NO: 4464545 - DNA, 25 bp, Homo sapien
acagaaggtctgagtgggtagttat

SEQ ID NO: 4464546 - DNA, 25 bp, Homo sapien
tgagtgggtagttatgggcacccca

SEQ ID NO: 4464547 - DNA, 25 bp, Homo sapien
gtctgagtgggtagttatgggcacc

SEQ ID NO: 4464548 - DNA, 25 bp, Homo sapien
ggaacagttgcacccctatttgagg

SEQ ID NO: 4464549 - DNA, 25 bp, Homo sapien
tcttcagggagtagatagagctgtg

SEQ ID NO: 4464550 - DNA, 25 bp, Homo sapien
tgggttcagtcctaaacagcttggt

SEQ ID NO: 4464551 - DNA, 25 bp, Homo sapien
tctgtaatattcagagtccctctgg

SEQ ID NO: 4464552 - DNA, 25 bp, Homo sapien
acggtgtgccccattaaaactctga

SEQ ID NO: 4464553 - DNA, 25 bp, Homo sapien
gcagaattccttagctgacaggtga

SEQ ID NO: 4464554 - DNA, 25 bp, Homo sapien
gagcagacacctcactggtacctgg

SEQ ID NO: 4464555 - DNA, 25 bp, Homo sapien
tgatcggtccttcagatgtttgggc

SEQ ID NO: 4464556 - DNA, 25 bp, Homo sapien
agctctgaaatatcttcattttcca

SEQ ID NO: 4464557 - DNA, 25 bp, Homo sapien
acagctctgaaatatcttcattttc

SEQ ID NO: 4464558 - DNA, 25 bp, Homo sapien
cttaaccctcaacagctctgaaata

SEQ ID NO: 4464559 - DNA, 25 bp, Homo sapien
caacagctctgaaatatcttcattt

SEQ ID NO: 4464560 - DNA, 25 bp, Homo sapien
tccacacttggaacctgaccttcaa

SEQ ID NO: 4464561 - DNA, 25 bp, Homo sapien
caactggagccctagcagccacagt

SEQ ID NO: 4464562 - DNA, 25 bp, Homo sapien
tcatcatccaaggcagccgccaggt

SEQ ID NO: 4464563 - DNA, 25 bp, Homo sapien
tgaccttcaactggagccctagcag

SEQ ID NO: 4464564 - DNA, 25 bp, Homo sapien
ccaccataggtgtttcgttcttctg

SEQ ID NO: 4464565 - DNA, 25 bp, Homo sapien
tatttgctggcatgaccatctctca

SEQ ID NO: 4464566 - DNA, 25 bp, Homo sapien
gctggaattatttgctggcatgacc

SEQ ID NO: 4464567 - DNA, 25 bp, Homo sapien
tcttctgccagagcattccacttgg

SEQ ID NO: 4464568 - DNA, 25 bp, Homo sapien
tacactgtgctcgttgaacttggga

SEQ ID NO: 4464569 - DNA, 25 bp, Homo sapien
gaacttgggagtccacttgcagcgt

SEQ ID NO: 4464570 - DNA, 25 bp, Homo sapien
ggctctgcaccgacgtaaatgtaca

SEQ ID NO: 4464571 - DNA, 25 bp, Homo sapien
aatgtacacggatacttcactgggc

SEQ ID NO: 4464572 - DNA, 25 bp, Homo sapien
ctcctggttcccacaacactgcaca

SEQ ID NO: 4464573 - DNA, 25 bp, Homo sapien
acaacactgcacactccgaggtcct

SEQ ID NO: 4464574 - DNA, 25 bp, Homo sapien
gctctcctggttcccacaacactgc

SEQ ID NO: 4464575 - DNA, 25 bp, Homo sapien
actgcacactccgaggtcctctgca

SEQ ID NO: 4464576 - DNA, 25 bp, Homo sapien
tgacccttattcttaactcctacat

SEQ ID NO: 4464577 - DNA, 25 bp, Homo sapien
ttaactcctacatcttctttaggcc

SEQ ID NO: 4464578 - DNA, 25 bp, Homo sapien
aatgagacacttgaagtgctccaca

SEQ ID NO: 4464579 - DNA, 25 bp, Homo sapien
gacacttgaagtgctccacaatttg

SEQ ID NO: 4464580 - DNA, 25 bp, Homo sapien
actggaaggtatgccccatcttctt

SEQ ID NO: 4464581 - DNA, 25 bp, Homo sapien
gcaggtacagttcggtgccgtcagg

SEQ ID NO: 4464582 - DNA, 25 bp, Homo sapien
agggcaggtacagttcggtgccgtc

SEQ ID NO: 4464583 - DNA, 25 bp, Homo sapien
aggtatgccccatcttcttgtgctt

SEQ ID NO: 4464584 - DNA, 25 bp, Homo sapien
ttgctcctggcctgcaaggaaccca

SEQ ID NO: 4464585 - DNA, 25 bp, Homo sapien
ctatccattgctcctggcctgcaag

SEQ ID NO: 4464586 - DNA, 25 bp, Homo sapien
cattgctcctggcctgcaaggaacc

SEQ ID NO: 4464587 - DNA, 25 bp, Homo sapien
atctatccattgctcctggcctgca

SEQ ID NO: 4464588 - DNA, 25 bp, Homo sapien
gtgtacagaagggatatcaggcgtg

SEQ ID NO: 4464589 - DNA, 25 bp, Homo sapien
gaactgggccaggataaaaacaaga

SEQ ID NO: 4464590 - DNA, 25 bp, Homo sapien
caggagcactcatattaggccacgg

SEQ ID NO: 4464591 - DNA, 25 bp, Homo sapien
aaacaagattggcaggagcactcat

SEQ ID NO: 4464592 - DNA, 25 bp, Homo sapien
tcaggtgacgctgcagcagacgcaa

SEQ ID NO: 4464593 - DNA, 25 bp, Homo sapien
gcaatggagcccttgataatcaatc

SEQ ID NO: 4464594 - DNA, 25 bp, Homo sapien
taatcaatcaaggtgtcaatccaga

SEQ ID NO: 4464595 - DNA, 25 bp, Homo sapien
tgcagcagacgcaatggagcccttg

SEQ ID NO: 4464596 - DNA, 25 bp, Homo sapien
tgtgaggccgcccaggacaccgttc

SEQ ID NO: 4464597 - DNA, 25 bp, Homo sapien
tatataatggttatagtctgctgca

SEQ ID NO: 4464598 - DNA, 25 bp, Homo sapien
catagtctccctatctaccctggga

SEQ ID NO: 4464599 - DNA, 25 bp, Homo sapien
tagcgtctatataatggttatagtc

SEQ ID NO: 4464600 - DNA, 25 bp, Homo sapien
tggtaattgcgtggaggacccccac

SEQ ID NO: 4464601 - DNA, 25 bp, Homo sapien
tttgctggtaattgcgtggaggacc

SEQ ID NO: 4464602 - DNA, 25 bp, Homo sapien
gttctggtaattttgctggtaattg

SEQ ID NO: 4464603 - DNA, 25 bp, Homo sapien
tgttctggtaattttgctggtaatt

SEQ ID NO: 4464604 - DNA, 25 bp, Homo sapien
ctttgccgccgtagggccggcgttg

SEQ ID NO: 4464605 - DNA, 25 bp, Homo sapien
ctggccttcgggagcactccccgat

SEQ ID NO: 4464606 - DNA, 25 bp, Homo sapien
tcgggagcactccccgatccctcgt

SEQ ID NO: 4464607 - DNA, 25 bp, Homo sapien
agcactccccgatccctcgttcttt

SEQ ID NO: 4464608 - DNA, 25 bp, Homo sapien
tctccgcatggagtcaggtgggaac

SEQ ID NO: 4464609 - DNA, 25 bp, Homo sapien
atagggtctccgcatggagtcaggt

SEQ ID NO: 4464610 - DNA, 25 bp, Homo sapien
gggtctccgcatggagtcaggtggg

SEQ ID NO: 4464611 - DNA, 25 bp, Homo sapien
tagggtctccgcatggagtcaggtg

SEQ ID NO: 4464612 - DNA, 25 bp, Homo sapien
tcacttctccctgcacaggttggaa

SEQ ID NO: 4464613 - DNA, 25 bp, Homo sapien
catcacttctccctgcacaggttgg

SEQ ID NO: 4464614 - DNA, 25 bp, Homo sapien
acttctccctgcacaggttggaatg

SEQ ID NO: 4464615 - DNA, 25 bp, Homo sapien
tccatcacttctccctgcacaggtt

SEQ ID NO: 4464616 - DNA, 25 bp, Homo sapien
gcctcattggtctacgttgttctcc

SEQ ID NO: 4464617 - DNA, 25 bp, Homo sapien
ccccaacacatattctgcctcattg

SEQ ID NO: 4464618 - DNA, 25 bp, Homo sapien
ccaacacatattctgcctcattggt

SEQ ID NO: 4464619 - DNA, 25 bp, Homo sapien
atccccaacacatattctgcctcat

SEQ ID NO: 4464620 - DNA, 25 bp, Homo sapien
tggctgctgaccttgggtgtcacct

SEQ ID NO: 4464621 - DNA, 25 bp, Homo sapien
ttttctgggcgtctgcgtcggtaat

SEQ ID NO: 4464622 - DNA, 25 bp, Homo sapien
tcggtaattgaagttgcggaggtac

SEQ ID NO: 4464623 - DNA, 25 bp, Homo sapien
gaattctcaactggtggatctgctg

SEQ ID NO: 4464624 - DNA, 25 bp, Homo sapien
gccctgctcagcctccggagtggac

SEQ ID NO: 4464625 - DNA, 25 bp, Homo sapien
tgccctgctcagcctccggagtgga

SEQ ID NO: 4464626 - DNA, 25 bp, Homo sapien
tcagcctgccctgctcagcctccgg

SEQ ID NO: 4464627 - DNA, 25 bp, Homo sapien
gcctgccctgctcagcctccggagt

SEQ ID NO: 4464628 - DNA, 25 bp, Homo sapien
gtatgttggtagagatgaagccggc

SEQ ID NO: 4464629 - DNA, 25 bp, Homo sapien
tgttggtagagatgaagccggcatt

SEQ ID NO: 4464630 - DNA, 25 bp, Homo sapien
ctaaactgtatgttggtagagatga

SEQ ID NO: 4464631 - DNA, 25 bp, Homo sapien
taaactgtatgttggtagagatgaa

SEQ ID NO: 4464632 - DNA, 25 bp, Homo sapien
aaaaataataacctcatgctgcata

SEQ ID NO: 4464633 - DNA, 25 bp, Homo sapien
gttctgcttctctggtcaacgggca

SEQ ID NO: 4464634 - DNA, 25 bp, Homo sapien
tccagcttttacaacgagcagtact

SEQ ID NO: 4464635 - DNA, 25 bp, Homo sapien
gcttttacaacgagcagtactactg

SEQ ID NO: 4464636 - DNA, 25 bp, Homo sapien
cacatctccagcttttacaacgagc

SEQ ID NO: 4464637 - DNA, 25 bp, Homo sapien
tttacaacgagcagtactactgctg

SEQ ID NO: 4464638 - DNA, 25 bp, Homo sapien
atctcttcctgaaggcctgaggcac

SEQ ID NO: 4464639 - DNA, 25 bp, Homo sapien
tcccatctcttcctgaaggcctgag

SEQ ID NO: 4464640 - DNA, 25 bp, Homo sapien
ccatctcttcctgaaggcctgaggc

SEQ ID NO: 4464641 - DNA, 25 bp, Homo sapien
agtatcccatctcttcctgaaggcc

SEQ ID NO: 4464642 - DNA, 25 bp, Homo sapien
gcctctgctaagatgtctgataggt

SEQ ID NO: 4464643 - DNA, 25 bp, Homo sapien
ttgccagggaatgttggcgcccaga

SEQ ID NO: 4464644 - DNA, 25 bp, Homo sapien
tctgataggtgtgagtgtactcccc

SEQ ID NO: 4464645 - DNA, 25 bp, Homo sapien
gagtaaattgctccttagcctctgc

SEQ ID NO: 4464646 - DNA, 25 bp, Homo sapien
cagtcctgtgggctcggccagagct

SEQ ID NO: 4464647 - DNA, 25 bp, Homo sapien
cctccctgcaacaccagtcctgtgg

SEQ ID NO: 4464648 - DNA, 25 bp, Homo sapien
cctgtgggctcggccagagctagtc

SEQ ID NO: 4464649 - DNA, 25 bp, Homo sapien
acttcctccctgcaacaccagtcct

SEQ ID NO: 4464650 - DNA, 25 bp, Homo sapien
tacagacaccgtttctggagtgtct

SEQ ID NO: 4464651 - DNA, 25 bp, Homo sapien
tctccaggccaattacagacaccgt

SEQ ID NO: 4464652 - DNA, 25 bp, Homo sapien
caattacagacaccgtttctggagt

SEQ ID NO: 4464653 - DNA, 25 bp, Homo sapien
ggccaattacagacaccgtttctgg

SEQ ID NO: 4464654 - DNA, 25 bp, Homo sapien
tgagagtcatgctgggctgccctca

SEQ ID NO: 4464655 - DNA, 25 bp, Homo sapien
gagagagcttgtgggttaggagttc

SEQ ID NO: 4464656 - DNA, 25 bp, Homo sapien
cagtgccattggcagaagcgtcctg

SEQ ID NO: 4464657 - DNA, 25 bp, Homo sapien
tgccattggcagaagcgtcctgaga

SEQ ID NO: 4464658 - DNA, 25 bp, Homo sapien
cccagtgtaagctattctgggtggg

SEQ ID NO: 4464659 - DNA, 25 bp, Homo sapien
tgtgacccagtgtaagctattctgg

SEQ ID NO: 4464660 - DNA, 25 bp, Homo sapien
tgcaccttgtctttgtgacccagtg

SEQ ID NO: 4464661 - DNA, 25 bp, Homo sapien
gtctttgtgacccagtgtaagctat

SEQ ID NO: 4464662 - DNA, 25 bp, Homo sapien
taagaagaatctctagttacactgg

SEQ ID NO: 4464663 - DNA, 25 bp, Homo sapien
tggttcgaaactgctctggatcacg

SEQ ID NO: 4464664 - DNA, 25 bp, Homo sapien
ctggatcacgtggctttccagggag

SEQ ID NO: 4464665 - DNA, 25 bp, Homo sapien
gttacactggtgtaattctccaggc

SEQ ID NO: 4464666 - DNA, 25 bp, Homo sapien
ttgatcggggcacaggaccgagtca

SEQ ID NO: 4464667 - DNA, 25 bp, Homo sapien
acaggaccgagtcattcctaaggga

SEQ ID NO: 4464668 - DNA, 25 bp, Homo sapien
agagtgagctcgaagtcctcttcca

SEQ ID NO: 4464669 - DNA, 25 bp, Homo sapien
gagtgagctcgaagtcctcttccag

SEQ ID NO: 4464670 - DNA, 25 bp, Homo sapien
ggctccaaccacattgtagtacatc

SEQ ID NO: 4464671 - DNA, 25 bp, Homo sapien
tgcacacagtatgtttctgggctcc

SEQ ID NO: 4464672 - DNA, 25 bp, Homo sapien
aggctgaacactgactgcgtagacc

SEQ ID NO: 4464673 - DNA, 25 bp, Homo sapien
ctgactgcgtagaccagacctcagg

SEQ ID NO: 4464674 - DNA, 25 bp, Homo sapien
catcattgacttggccgaaaccgct

SEQ ID NO: 4464675 - DNA, 25 bp, Homo sapien
tgcgtttgagcactaaaaaaggacc

SEQ ID NO: 4464676 - DNA, 25 bp, Homo sapien
tctttgttgactcaaggccaccctt

SEQ ID NO: 4464677 - DNA, 25 bp, Homo sapien
cacccttgtgaacacacttgtgaag

SEQ ID NO: 4464678 - DNA, 25 bp, Homo sapien
ggcctagggagtgcggagaagggcg

SEQ ID NO: 4464679 - DNA, 25 bp, Homo sapien
ggaacaaaggcctagggagtgcgga

SEQ ID NO: 4464680 - DNA, 25 bp, Homo sapien
caggaagacgaggcagtcgtacaga

SEQ ID NO: 4464681 - DNA, 25 bp, Homo sapien
aagacgaggcagtcgtacagaggta

SEQ ID NO: 4464682 - DNA, 25 bp, Homo sapien
tacttggaacaaaagcacttgtttc

SEQ ID NO: 4464683 - DNA, 25 bp, Homo sapien
tccatgatgactcgtagataagcct

SEQ ID NO: 4464684 - DNA, 25 bp, Homo sapien
gatatcttatcataaccagctcttg

SEQ ID NO: 4464685 - DNA, 25 bp, Homo sapien
atgcgaccaggcaggctaccatggc

SEQ ID NO: 4464686 - DNA, 25 bp, Homo sapien
gctcctggccgccttcccaggctcc

SEQ ID NO: 4464687 - DNA, 25 bp, Homo sapien
tcctggccgccttcccaggctccca

SEQ ID NO: 4464688 - DNA, 25 bp, Homo sapien
catgctcctggccgccttcccaggc

SEQ ID NO: 4464689 - DNA, 25 bp, Homo sapien
cctggccgccttcccaggctcccat

SEQ ID NO: 4464690 - DNA, 25 bp, Homo sapien
ggtggtaacgagggcccaggctgta

SEQ ID NO: 4464691 - DNA, 25 bp, Homo sapien
tcttccttcccggtgtgggctgctg

SEQ ID NO: 4464692 - DNA, 25 bp, Homo sapien
ccttaatgccgacacactgatctct

SEQ ID NO: 4464693 - DNA, 25 bp, Homo sapien
cgagggcccaggctgtaggggtgag

SEQ ID NO: 4464694 - DNA, 25 bp, Homo sapien
gtaaaaagcaggatatgagtctctc

SEQ ID NO: 4464695 - DNA, 25 bp, Homo sapien
gtctcccttgggatttgcatctggg

SEQ ID NO: 4464696 - DNA, 25 bp, Homo sapien
cctaagacagcagggtgagtagtcg

SEQ ID NO: 4464697 - DNA, 25 bp, Homo sapien
agctccccagttaggctggcgcctg

SEQ ID NO: 4464698 - DNA, 25 bp, Homo sapien
gtatcgtattgggtactccctggtg

SEQ ID NO: 4464699 - DNA, 25 bp, Homo sapien
tcagtttttcgtgactgcttcaggg

SEQ ID NO: 4464700 - DNA, 25 bp, Homo sapien
tccctggtgcaaagtctctcagttt

SEQ ID NO: 4464701 - DNA, 25 bp, Homo sapien
tggctccacacaagcttcactgagt

SEQ ID NO: 4464702 - DNA, 25 bp, Homo sapien
tccaatttccctggcctgcccggtg

SEQ ID NO: 4464703 - DNA, 25 bp, Homo sapien
ctccaatttccctggcctgcccggt

SEQ ID NO: 4464704 - DNA, 25 bp, Homo sapien
tccctggcctgcccggtgctccctt

SEQ ID NO: 4464705 - DNA, 25 bp, Homo sapien
aatttccctggcctgcccggtgctc

SEQ ID NO: 4464706 - DNA, 25 bp, Homo sapien
atcctccaatactggtctcctctat

SEQ ID NO: 4464707 - DNA, 25 bp, Homo sapien
tttctacattgacctcctaatcctc

SEQ ID NO: 4464708 - DNA, 25 bp, Homo sapien
catttctacattgacctcctaatcc

SEQ ID NO: 4464709 - DNA, 25 bp, Homo sapien
ttctacattgacctcctaatcctcc

SEQ ID NO: 4464710 - DNA, 25 bp, Homo sapien
cacccatgaatggaggtctgtgacc

SEQ ID NO: 4464711 - DNA, 25 bp, Homo sapien
gggttgaagggtcgaccacccatga

SEQ ID NO: 4464712 - DNA, 25 bp, Homo sapien
ggctgttggataattacccactggg

SEQ ID NO: 4464713 - DNA, 25 bp, Homo sapien
gacctcagaagaatccccggactga

SEQ ID NO: 4464714 - DNA, 25 bp, Homo sapien
gagagagaatttgactggcccagct

SEQ ID NO: 4464715 - DNA, 25 bp, Homo sapien
tgtggctggagggtgtaaggacacg

SEQ ID NO: 4464716 - DNA, 25 bp, Homo sapien
ctcagtcacgtcaactgtggctgga

SEQ ID NO: 4464717 - DNA, 25 bp, Homo sapien
tggcccagcttggtccgctctcagt

SEQ ID NO: 4464718 - DNA, 25 bp, Homo sapien
tgaggcatgcgtttcccatactcct

SEQ ID NO: 4464719 - DNA, 25 bp, Homo sapien
catgaaagtgagtcttcctgggtaa

SEQ ID NO: 4464720 - DNA, 25 bp, Homo sapien
ggtaaagatcccaatagaagctgac

SEQ ID NO: 4464721 - DNA, 25 bp, Homo sapien
cttggaatgaggcatgcgtttccca

SEQ ID NO: 4464722 - DNA, 25 bp, Homo sapien
acatgtgctgatggctgttccctgg

SEQ ID NO: 4464723 - DNA, 25 bp, Homo sapien
gcaccctggtattgccagagacaaa

SEQ ID NO: 4464724 - DNA, 25 bp, Homo sapien
ggtgggttttctcctcggtgtcatc

SEQ ID NO: 4464725 - DNA, 25 bp, Homo sapien
acctgctgagctggtcggcctgagc

SEQ ID NO: 4464726 - DNA, 25 bp, Homo sapien
tctctggcaactctaaattctccca

SEQ ID NO: 4464727 - DNA, 25 bp, Homo sapien
ttctctggcaactctaaattctccc

SEQ ID NO: 4464728 - DNA, 25 bp, Homo sapien
ctctggcaactctaaattctcccaa

SEQ ID NO: 4464729 - DNA, 25 bp, Homo sapien
tttctctggcaactctaaattctcc

SEQ ID NO: 4464730 - DNA, 25 bp, Homo sapien
tactgtccttgccagatggaagcaa

SEQ ID NO: 4464731 - DNA, 25 bp, Homo sapien
actgtccttgccagatggaagcaac

SEQ ID NO: 4464732 - DNA, 25 bp, Homo sapien
ctgtccttgccagatggaagcaaca

SEQ ID NO: 4464733 - DNA, 25 bp, Homo sapien
tctactgtccttgccagatggaagc

SEQ ID NO: 4464734 - DNA, 25 bp, Homo sapien
cagtgtccctggaacaagatacggc

SEQ ID NO: 4464735 - DNA, 25 bp, Homo sapien
gtgtccctggaacaagatacggcat

SEQ ID NO: 4464736 - DNA, 25 bp, Homo sapien
ctcagtgtccctggaacaagatacg

SEQ ID NO: 4464737 - DNA, 25 bp, Homo sapien
gactcagtgtccctggaacaagata

SEQ ID NO: 4464738 - DNA, 25 bp, Homo sapien
gcttctttcattgcagtttgaatta

SEQ ID NO: 4464739 - DNA, 25 bp, Homo sapien
gaaaaatgggaatcactagccgtgg

SEQ ID NO: 4464740 - DNA, 25 bp, Homo sapien
cattgcagtttgaattaaggaacgt

SEQ ID NO: 4464741 - DNA, 25 bp, Homo sapien
acttggcgttgtggcttgtcaggca

SEQ ID NO: 4464742 - DNA, 25 bp, Homo sapien
gcgtcagggtcagtgcgctctcggc

SEQ ID NO: 4464743 - DNA, 25 bp, Homo sapien
cccgcgtcagggtcagtgcgctctc

SEQ ID NO: 4464744 - DNA, 25 bp, Homo sapien
gctctcggcacccgccagcgcctcc

SEQ ID NO: 4464745 - DNA, 25 bp, Homo sapien
gtcagggtcagtgcgctctcggcac

SEQ ID NO: 4464746 - DNA, 25 bp, Homo sapien
gggcgaccgcattcctcaagacagc

SEQ ID NO: 4464747 - DNA, 25 bp, Homo sapien
tcccagatatgtactttcccaaggg

SEQ ID NO: 4464748 - DNA, 25 bp, Homo sapien
ttcctcaagacagccaatacttttt

SEQ ID NO: 4464749 - DNA, 25 bp, Homo sapien
aggagcgggagtgcgagcgcggagc

SEQ ID NO: 4464750 - DNA, 25 bp, Homo sapien
ctgcagcaggagcggcggggcgagc

SEQ ID NO: 4464751 - DNA, 25 bp, Homo sapien
gagcggcggggcgagcgcgcggtcg

SEQ ID NO: 4464752 - DNA, 25 bp, Homo sapien
tgcagcaggagcggcggggcgagcg

SEQ ID NO: 4464753 - DNA, 25 bp, Homo sapien
cggcggggcgagcgcgcggtcgggc

SEQ ID NO: 4464754 - DNA, 25 bp, Homo sapien
tcagctcgatccaaggcgttctcct

SEQ ID NO: 4464755 - DNA, 25 bp, Homo sapien
tgcttgctcctgtcttccgccgcct

SEQ ID NO: 4464756 - DNA, 25 bp, Homo sapien
ggcctccgcctgctcagctcgatcc

SEQ ID NO: 4464757 - DNA, 25 bp, Homo sapien
gcctgctcagctcgatccaaggcgt

SEQ ID NO: 4464758 - DNA, 25 bp, Homo sapien
tcccagtcctgagaataaagcgcct

SEQ ID NO: 4464759 - DNA, 25 bp, Homo sapien
ggacacagaagaacgccactgctgg

SEQ ID NO: 4464760 - DNA, 25 bp, Homo sapien
tgggacgagactcctgccgaggtct

SEQ ID NO: 4464761 - DNA, 25 bp, Homo sapien
gaagggaaataagcgtcctcagacc

SEQ ID NO: 4464762 - DNA, 25 bp, Homo sapien
taacttcctctttacccgagctgga

SEQ ID NO: 4464763 - DNA, 25 bp, Homo sapien
gagctggaaccgctccgcggctcac

SEQ ID NO: 4464764 - DNA, 25 bp, Homo sapien
gggcgccgccgagttggagtgcaaa

SEQ ID NO: 4464765 - DNA, 25 bp, Homo sapien
ccgagttggagtgcaaaggacccga

SEQ ID NO: 4464766 - DNA, 25 bp, Homo sapien
gcacggaccgggtgttagacacaca

SEQ ID NO: 4464767 - DNA, 25 bp, Homo sapien
cacggaccgggtgttagacacacac

SEQ ID NO: 4464768 - DNA, 25 bp, Homo sapien
gccggcacggaccgggtgttagaca

SEQ ID NO: 4464769 - DNA, 25 bp, Homo sapien
cggcacggaccgggtgttagacaca

SEQ ID NO: 4464770 - DNA, 25 bp, Homo sapien
ggcggcctcttcggcggccaggagg

SEQ ID NO: 4464771 - DNA, 25 bp, Homo sapien
tccgacacccgcagcaacttctcct

SEQ ID NO: 4464772 - DNA, 25 bp, Homo sapien
aacttctccttggccgcgatgtcct

SEQ ID NO: 4464773 - DNA, 25 bp, Homo sapien
gtcccgctcgtcctccgacacccgc

SEQ ID NO: 4464774 - DNA, 25 bp, Homo sapien
agagttagccattcgtgcgccacgc

SEQ ID NO: 4464775 - DNA, 25 bp, Homo sapien
gaaagagttagccattcgtgcgcca

SEQ ID NO: 4464776 - DNA, 25 bp, Homo sapien
cagcgtgatcccgaaggggaggggt

SEQ ID NO: 4464777 - DNA, 25 bp, Homo sapien
ttagccattcgtgcgccacgccgtg

SEQ ID NO: 4464778 - DNA, 25 bp, Homo sapien
ccagttcatcttcggtgcccttgag

SEQ ID NO: 4464779 - DNA, 25 bp, Homo sapien
gtccagttcatcttcggtgcccttg

SEQ ID NO: 4464780 - DNA, 25 bp, Homo sapien
tccagttcatcttcggtgcccttga

SEQ ID NO: 4464781 - DNA, 25 bp, Homo sapien
tgagagcctcagagtatttgtccag

SEQ ID NO: 4464782 - DNA, 25 bp, Homo sapien
tccagccctgtggtgaccccggagt

SEQ ID NO: 4464783 - DNA, 25 bp, Homo sapien
ccccggagtggccacgcaggcaaga

SEQ ID NO: 4464784 - DNA, 25 bp, Homo sapien
tgaatgtgtgcagtagcagtcagag

SEQ ID NO: 4464785 - DNA, 25 bp, Homo sapien
agtcagaggcggcatccaatgctct

SEQ ID NO: 4464786 - DNA, 25 bp, Homo sapien
ctcaagggttttctgccaccaggga

SEQ ID NO: 4464787 - DNA, 25 bp, Homo sapien
tggtgatgacacctcaagggttttc

SEQ ID NO: 4464788 - DNA, 25 bp, Homo sapien
cacaaaccttggtgatgacacctca

SEQ ID NO: 4464789 - DNA, 25 bp, Homo sapien
gaaaacctggcattctctacacaaa

SEQ ID NO: 4464790 - DNA, 25 bp, Homo sapien
tgaaccctgactagacccaccacca

SEQ ID NO: 4464791 - DNA, 25 bp, Homo sapien
gaaccctgactagacccaccaccaa

SEQ ID NO: 4464792 - DNA, 25 bp, Homo sapien
tctgaaccctgactagacccaccac

SEQ ID NO: 4464793 - DNA, 25 bp, Homo sapien
tctctgaaccctgactagacccacc

SEQ ID NO: 4464794 - DNA, 25 bp, Homo sapien
tgggctattttcaaattctctgcat

SEQ ID NO: 4464795 - DNA, 25 bp, Homo sapien
tctttccttgatctattagcagctc

SEQ ID NO: 4464796 - DNA, 25 bp, Homo sapien
tccatttagccatatatagagcagg

SEQ ID NO: 4464797 - DNA, 25 bp, Homo sapien
aaaagctaaataaacgtcctgctgg

SEQ ID NO: 4464798 - DNA, 25 bp, Homo sapien
actaaaaaattcctatcgcctggtg

SEQ ID NO: 4464799 - DNA, 25 bp, Homo sapien
ggtaatacgattccacctcaggaag

SEQ ID NO: 4464800 - DNA, 25 bp, Homo sapien
caatgaaatgtcctaatcccaaagg

SEQ ID NO: 4464801 - DNA, 25 bp, Homo sapien
tcttcaatattcctacgggctccaa

SEQ ID NO: 4464802 - DNA, 25 bp, Homo sapien
tggagaaaaccaccgcagatacagt

SEQ ID NO: 4464803 - DNA, 25 bp, Homo sapien
ggttacagctggtcccctaagtgca

SEQ ID NO: 4464804 - DNA, 25 bp, Homo sapien
gaaagccacagaaccctatgagaga

SEQ ID NO: 4464805 - DNA, 25 bp, Homo sapien
catcctgtaggtgggagcttctcgc

SEQ ID NO: 4464806 - DNA, 25 bp, Homo sapien
ggagcagtccggaagtcgcagcctc

SEQ ID NO: 4464807 - DNA, 25 bp, Homo sapien
ccctgcggccaggagcagtccggaa

SEQ ID NO: 4464808 - DNA, 25 bp, Homo sapien
cagtccggaagtcgcagcctccagg

SEQ ID NO: 4464809 - DNA, 25 bp, Homo sapien
agcagtccggaagtcgcagcctcca

SEQ ID NO: 4464810 - DNA, 25 bp, Homo sapien
ctgcagtgggagaggccggctgctg

SEQ ID NO: 4464811 - DNA, 25 bp, Homo sapien
cggctgctgccctgcggacccggct

SEQ ID NO: 4464812 - DNA, 25 bp, Homo sapien
gtcctggctgcccagcgccggtccg

SEQ ID NO: 4464813 - DNA, 25 bp, Homo sapien
cggacccggctgccgcggctgtcct

SEQ ID NO: 4464814 - DNA, 25 bp, Homo sapien
ctcagcttcctctcgtggtccagct

SEQ ID NO: 4464815 - DNA, 25 bp, Homo sapien
gcgcgctcctcagcggcgtccgcct

SEQ ID NO: 4464816 - DNA, 25 bp, Homo sapien
ctccggatcttcctgcgcaccgcct

SEQ ID NO: 4464817 - DNA, 25 bp, Homo sapien
accgcctccagcgagctactccccg

SEQ ID NO: 4464818 - DNA, 25 bp, Homo sapien
tttcttagcagggtgaggagacctc

SEQ ID NO: 4464819 - DNA, 25 bp, Homo sapien
gtctaacatcaatcactaggccagg

SEQ ID NO: 4464820 - DNA, 25 bp, Homo sapien
cagttttaatgacagcgggcacaca

SEQ ID NO: 4464821 - DNA, 25 bp, Homo sapien
caaggctctcctgcatagggtcaca

SEQ ID NO: 4464822 - DNA, 25 bp, Homo sapien
ccctagtgggtcacaagatctggaa

SEQ ID NO: 4464823 - DNA, 25 bp, Homo sapien
gatctggaatcaatcatgtcaagca

SEQ ID NO: 4464824 - DNA, 25 bp, Homo sapien
tgttactaattaagaaccttctggc

SEQ ID NO: 4464825 - DNA, 25 bp, Homo sapien
tgctggatactactcagaaaggaag

SEQ ID NO: 4464826 - DNA, 25 bp, Homo sapien
ctgcacccagccaagttagctttct

SEQ ID NO: 4464827 - DNA, 25 bp, Homo sapien
tgcacccagccaagttagctttctt

SEQ ID NO: 4464828 - DNA, 25 bp, Homo sapien
actgcacccagccaagttagctttc

SEQ ID NO: 4464829 - DNA, 25 bp, Homo sapien
tggggagggtcaagaccccagacac

SEQ ID NO: 4464830 - DNA, 25 bp, Homo sapien
atgtaaatcactcttagtgtactga

SEQ ID NO: 4464831 - DNA, 25 bp, Homo sapien
ttggggagggtcaagaccccagaca

SEQ ID NO: 4464832 - DNA, 25 bp, Homo sapien
gcccatagacacatgaccatctgtt

SEQ ID NO: 4464833 - DNA, 25 bp, Homo sapien
ctctgccggtacaagcccatagaca

SEQ ID NO: 4464834 - DNA, 25 bp, Homo sapien
cggtacaagcccatagacacatgac

SEQ ID NO: 4464835 - DNA, 25 bp, Homo sapien
gctgttgcctctgccggtacaagcc

SEQ ID NO: 4464836 - DNA, 25 bp, Homo sapien
tatgctctatgttccaaaagcccca

SEQ ID NO: 4464837 - DNA, 25 bp, Homo sapien
taagttttgagcttatttcaatatt

SEQ ID NO: 4464838 - DNA, 25 bp, Homo sapien
tgctctatgttccaaaagccccaca

SEQ ID NO: 4464839 - DNA, 25 bp, Homo sapien
tttaagttttgagcttatttcaata

SEQ ID NO: 4464840 - DNA, 25 bp, Homo sapien
gcagacctgagagtggctgcccctt

SEQ ID NO: 4464841 - DNA, 25 bp, Homo sapien
ccagcaacgactgggcatggagacc

SEQ ID NO: 4464842 - DNA, 25 bp, Homo sapien
cagggcttcatacagggtgccccag

SEQ ID NO: 4464843 - DNA, 25 bp, Homo sapien
catggagaccagtttctaggtgcca

SEQ ID NO: 4464844 - DNA, 25 bp, Homo sapien
gctcttggcactgtgtttacagaat

SEQ ID NO: 4464845 - DNA, 25 bp, Homo sapien
tggcactgtgtttacagaatgctgt

SEQ ID NO: 4464846 - DNA, 25 bp, Homo sapien
gtgtttacagaatgctgttgtctaa

SEQ ID NO: 4464847 - DNA, 25 bp, Homo sapien
actgtgtttacagaatgctgttgtc

SEQ ID NO: 4464848 - DNA, 25 bp, Homo sapien
tccttgttacagaggctatggccta

SEQ ID NO: 4464849 - DNA, 25 bp, Homo sapien
gctctgctttagatctgggcctgaa

SEQ ID NO: 4464850 - DNA, 25 bp, Homo sapien
cctcaaggactttgtactcacagaa

SEQ ID NO: 4464851 - DNA, 25 bp, Homo sapien
tagctaccaagttccaagttctctg

SEQ ID NO: 4464852 - DNA, 25 bp, Homo sapien
taaaatacacaccacatgaaggccc

SEQ ID NO: 4464853 - DNA, 25 bp, Homo sapien
tgttaaacaagagcgtcatcacggc

SEQ ID NO: 4464854 - DNA, 25 bp, Homo sapien
tgaaggcccaacacaatccagtaac

SEQ ID NO: 4464855 - DNA, 25 bp, Homo sapien
tagcagtacagccagaaatcggact

SEQ ID NO: 4464856 - DNA, 25 bp, Homo sapien
ctcaaccagctggatgcgtctgttc

SEQ ID NO: 4464857 - DNA, 25 bp, Homo sapien
tcagagaagctacgtcggcttcagc

SEQ ID NO: 4464858 - DNA, 25 bp, Homo sapien
cagctggatgcgtctgttcagagaa

SEQ ID NO: 4464859 - DNA, 25 bp, Homo sapien
cgtctgttcagagaagctacgtcgg

SEQ ID NO: 4464860 - DNA, 25 bp, Homo sapien
tctgcaaagctgttgccagacgctc

SEQ ID NO: 4464861 - DNA, 25 bp, Homo sapien
cgctcctgggcacgatccaactctt

SEQ ID NO: 4464862 - DNA, 25 bp, Homo sapien
tgcaaagctgttgccagacgctcct

SEQ ID NO: 4464863 - DNA, 25 bp, Homo sapien
cagcttctgcaaagctgttgccaga

SEQ ID NO: 4464864 - DNA, 25 bp, Homo sapien
cggtttattccaccaggaaaggcag

SEQ ID NO: 4464865 - DNA, 25 bp, Homo sapien
tagggcttaggacagtgctttggac

SEQ ID NO: 4464866 - DNA, 25 bp, Homo sapien
aaagggccaacttgtatccctgaca

SEQ ID NO: 4464867 - DNA, 25 bp, Homo sapien
ccaaccgagttatacctgggatcaa

SEQ ID NO: 4464868 - DNA, 25 bp, Homo sapien
tataatggaaccctttcatgacagc

SEQ ID NO: 4464869 - DNA, 25 bp, Homo sapien
tagcgtggtgtaatgtttcagaaaa

SEQ ID NO: 4464870 - DNA, 25 bp, Homo sapien
taagtaggcagtataagtgaaccac

SEQ ID NO: 4464871 - DNA, 25 bp, Homo sapien
tatattagggtcctatagcgtggtg

SEQ ID NO: 4464872 - DNA, 25 bp, Homo sapien
gcttgcacatgaaccaaagctagaa

SEQ ID NO: 4464873 - DNA, 25 bp, Homo sapien
gcctcagcttgcacatgaaccaaag

SEQ ID NO: 4464874 - DNA, 25 bp, Homo sapien
gggaagcctcagcttgcacatgaac

SEQ ID NO: 4464875 - DNA, 25 bp, Homo sapien
gcacatgaaccaaagctagaacaaa

SEQ ID NO: 4464876 - DNA, 25 bp, Homo sapien
tgcggtcggcatcttcagcaatgtg

SEQ ID NO: 4464877 - DNA, 25 bp, Homo sapien
tcttcatctttttgggctcgactct

SEQ ID NO: 4464878 - DNA, 25 bp, Homo sapien
tgggctcgactctcaatgactttca

SEQ ID NO: 4464879 - DNA, 25 bp, Homo sapien
ggcctctttcagttggatctcctga

SEQ ID NO: 4464880 - DNA, 25 bp, Homo sapien
gactgtacattgctccctggcttcc

SEQ ID NO: 4464881 - DNA, 25 bp, Homo sapien
gcagatggcctcactcgggaatcaa

SEQ ID NO: 4464882 - DNA, 25 bp, Homo sapien
cctgataaagcctgggatcccctag

SEQ ID NO: 4464883 - DNA, 25 bp, Homo sapien
gttttggtccttcttcgcagtgcta

SEQ ID NO: 4464884 - DNA, 25 bp, Homo sapien
cgttccaggtcgctctcaatgatga

SEQ ID NO: 4464885 - DNA, 25 bp, Homo sapien
tctgcacgttccaggtcgctctcaa

SEQ ID NO: 4464886 - DNA, 25 bp, Homo sapien
tcaatgatgaccagcttacgggcca

SEQ ID NO: 4464887 - DNA, 25 bp, Homo sapien
ggtcgctctcaatgatgaccagctt

SEQ ID NO: 4464888 - DNA, 25 bp, Homo sapien
tgttccatactcgtggctcatccac

SEQ ID NO: 4464889 - DNA, 25 bp, Homo sapien
tcagtgtgcaggtaaggcatgcagt

SEQ ID NO: 4464890 - DNA, 25 bp, Homo sapien
atacataagacaccccacacgagtc

SEQ ID NO: 4464891 - DNA, 25 bp, Homo sapien
cacatcaaatgagcacaaaaggagc

SEQ ID NO: 4464892 - DNA, 25 bp, Homo sapien
cattattcttaattgttcttccagc

SEQ ID NO: 4464893 - DNA, 25 bp, Homo sapien
tttcaaggtctgatccattattctt

SEQ ID NO: 4464894 - DNA, 25 bp, Homo sapien
ccattattcttaattgttcttccag

SEQ ID NO: 4464895 - DNA, 25 bp, Homo sapien
ggtctgatccattattcttaattgt

SEQ ID NO: 4464896 - DNA, 25 bp, Homo sapien
aacctaaaaaccacacgagccatca

SEQ ID NO: 4464897 - DNA, 25 bp, Homo sapien
cctaaaaaccacacgagccatcagt

SEQ ID NO: 4464898 - DNA, 25 bp, Homo sapien
taaaaaccacacgagccatcagtac

SEQ ID NO: 4464899 - DNA, 25 bp, Homo sapien
ctaaaaaccacacgagccatcagta

SEQ ID NO: 4464900 - DNA, 25 bp, Homo sapien
ctttgaagtgcgataatttggctcc

SEQ ID NO: 4464901 - DNA, 25 bp, Homo sapien
cgaagggctgccttaaagtagccaa

SEQ ID NO: 4464902 - DNA, 25 bp, Homo sapien
ggcagggtgaccaaatccaacaact

SEQ ID NO: 4464903 - DNA, 25 bp, Homo sapien
tgaaggtgcagtcgttataccaaac

SEQ ID NO: 4464904 - DNA, 25 bp, Homo sapien
taatgttttcgatcagaggcagaaa

SEQ ID NO: 4464905 - DNA, 25 bp, Homo sapien
ctaatgttttcgatcagaggcagaa

SEQ ID NO: 4464906 - DNA, 25 bp, Homo sapien
acttcaagttgttcgtcacagtttt

SEQ ID NO: 4464907 - DNA, 25 bp, Homo sapien
gacttcaagttgttcgtcacagttt

SEQ ID NO: 4464908 - DNA, 25 bp, Homo sapien
attcttcttcaagctcggcacattt

SEQ ID NO: 4464909 - DNA, 25 bp, Homo sapien
cttcaagttgttcgtcacagttttc

SEQ ID NO: 4464910 - DNA, 25 bp, Homo sapien
gatctcttaggaggtaatggaacct

SEQ ID NO: 4464911 - DNA, 25 bp, Homo sapien
cgccagctcagccaacagatgttaa

SEQ ID NO: 4464912 - DNA, 25 bp, Homo sapien
gcttctcatgcaaagaactcgccag

SEQ ID NO: 4464913 - DNA, 25 bp, Homo sapien
gataacttatccacttggcacttgg

SEQ ID NO: 4464914 - DNA, 25 bp, Homo sapien
cagcttgtcggaaaggaccttgatc

SEQ ID NO: 4464915 - DNA, 25 bp, Homo sapien
tcggaaaggaccttgatctcttcct

SEQ ID NO: 4464916 - DNA, 25 bp, Homo sapien
gcttgtcggaaaggaccttgatctc

SEQ ID NO: 4464917 - DNA, 25 bp, Homo sapien
ccttcagcttgtcggaaaggacctt

SEQ ID NO: 4464918 - DNA, 25 bp, Homo sapien
tgagaaatggcagttagcacagtac

SEQ ID NO: 4464919 - DNA, 25 bp, Homo sapien
caaggcgacctttgaatattcctga

SEQ ID NO: 4464920 - DNA, 25 bp, Homo sapien
gcacagtacataaactccaaggcga

SEQ ID NO: 4464921 - DNA, 25 bp, Homo sapien
ggccctgaccggttccatgaaaaca

SEQ ID NO: 4464922 - DNA, 25 bp, Homo sapien
tgatttatttgagttaaagttggga

SEQ ID NO: 4464923 - DNA, 25 bp, Homo sapien
aatgatttatttgagttaaagttgg

SEQ ID NO: 4464924 - DNA, 25 bp, Homo sapien
taatgatttatttgagttaaagttg

SEQ ID NO: 4464925 - DNA, 25 bp, Homo sapien
ctgtaatgatttatttgagttaaag

SEQ ID NO: 4464926 - DNA, 25 bp, Homo sapien
tccaatttagttactgacctctccg

SEQ ID NO: 4464927 - DNA, 25 bp, Homo sapien
tttagttactgacctctccgcaaac

SEQ ID NO: 4464928 - DNA, 25 bp, Homo sapien
tccgcaaactcagcccgagtctcag

SEQ ID NO: 4464929 - DNA, 25 bp, Homo sapien
gttactgacctctccgcaaactcag

SEQ ID NO: 4464930 - DNA, 25 bp, Homo sapien
gcttgaaaagcaatgggcgccacac

SEQ ID NO: 4464931 - DNA, 25 bp, Homo sapien
caaaggagcgtatcaatgtggatgc

SEQ ID NO: 4464932 - DNA, 25 bp, Homo sapien
gaccactgggatagcgatttcttag

SEQ ID NO: 4464933 - DNA, 25 bp, Homo sapien
tacactggagtagtcaggcatctgc

SEQ ID NO: 4464934 - DNA, 25 bp, Homo sapien
ttcagtttctgagcgtacagctcgt

SEQ ID NO: 4464935 - DNA, 25 bp, Homo sapien
ggaagtcatatcgttgagagcgtgg

SEQ ID NO: 4464936 - DNA, 25 bp, Homo sapien
cttcagtttctgagcgtacagctcg

SEQ ID NO: 4464937 - DNA, 25 bp, Homo sapien
atggaagtcatatcgttgagagcgt

SEQ ID NO: 4464938 - DNA, 25 bp, Homo sapien
agggcagggtgtaagcaggcagagt

SEQ ID NO: 4464939 - DNA, 25 bp, Homo sapien
cagggtgtaagcaggcagagtggat

SEQ ID NO: 4464940 - DNA, 25 bp, Homo sapien
catgagggcagggtgtaagcaggca

SEQ ID NO: 4464941 - DNA, 25 bp, Homo sapien
gcatgagggcagggtgtaagcaggc

SEQ ID NO: 4464942 - DNA, 25 bp, Homo sapien
ttcccaaaaggacagtgctcaaggt

SEQ ID NO: 4464943 - DNA, 25 bp, Homo sapien
tggcaacagtcatgtctctagaggc

SEQ ID NO: 4464944 - DNA, 25 bp, Homo sapien
taaaggcttggttactcagcagagg

SEQ ID NO: 4464945 - DNA, 25 bp, Homo sapien
tcctgtacaacaaacggcatggcct

SEQ ID NO: 4464946 - DNA, 25 bp, Homo sapien
cagctggagaatagacaaatgcaga

SEQ ID NO: 4464947 - DNA, 25 bp, Homo sapien
agagaggtgggacatccagctcgac

SEQ ID NO: 4464948 - DNA, 25 bp, Homo sapien
catccagctcgacgagggagtcttg

SEQ ID NO: 4464949 - DNA, 25 bp, Homo sapien
tctaaggcaggatgctaagagagag

SEQ ID NO: 4464950 - DNA, 25 bp, Homo sapien
ttacacagtgtttatttgacactga

SEQ ID NO: 4464951 - DNA, 25 bp, Homo sapien
ttcaatgttgaaactaaaatgtcaa

SEQ ID NO: 4464952 - DNA, 25 bp, Homo sapien
gtgaagcagctttgtagttttattc

SEQ ID NO: 4464953 - DNA, 25 bp, Homo sapien
caatgttgaaactaaaatgtcaata

SEQ ID NO: 4464954 - DNA, 25 bp, Homo sapien
tggtggtatatcagccctctcgggc

SEQ ID NO: 4464955 - DNA, 25 bp, Homo sapien
taaaccactttgtgagctgagccat

SEQ ID NO: 4464956 - DNA, 25 bp, Homo sapien
caagagcccggtatgcactgggaac

SEQ ID NO: 4464957 - DNA, 25 bp, Homo sapien
cactatggacataggaagtgtcgcc

SEQ ID NO: 4464958 - DNA, 25 bp, Homo sapien
atcctcattcagggccagctttagt

SEQ ID NO: 4464959 - DNA, 25 bp, Homo sapien
gaggcggcgattttgctcaagttgc

SEQ ID NO: 4464960 - DNA, 25 bp, Homo sapien
ctttagttcattagtgaggcggcga

SEQ ID NO: 4464961 - DNA, 25 bp, Homo sapien
tgctcaagttgctggtagagttgat

SEQ ID NO: 4464962 - DNA, 25 bp, Homo sapien
tccacgcctagaattcagcccaagt

SEQ ID NO: 4464963 - DNA, 25 bp, Homo sapien
tctattagttgaaggtaggacagtc

SEQ ID NO: 4464964 - DNA, 25 bp, Homo sapien
caagaggacctgctatttcaaggag

SEQ ID NO: 4464965 - DNA, 25 bp, Homo sapien
taaagagaacgtaattattccagcc

SEQ ID NO: 4464966 - DNA, 25 bp, Homo sapien
tccaacagcaccattagactgagta

SEQ ID NO: 4464967 - DNA, 25 bp, Homo sapien
ttctgttgctcataaaaaattgtca

SEQ ID NO: 4464968 - DNA, 25 bp, Homo sapien
tgtttcatgcacacttcattaggac

SEQ ID NO: 4464969 - DNA, 25 bp, Homo sapien
tattagcatgacattctccccagac

SEQ ID NO: 4464970 - DNA, 25 bp, Homo sapien
tcactgacggtgtgccgtgggaaca

SEQ ID NO: 4464971 - DNA, 25 bp, Homo sapien
cagacatttccaaggtacaggcagt

SEQ ID NO: 4464972 - DNA, 25 bp, Homo sapien
tctagacaagaacctaagacggagg

SEQ ID NO: 4464973 - DNA, 25 bp, Homo sapien
caaaggagccatggcacggattctc

SEQ ID NO: 4464974 - DNA, 25 bp, Homo sapien
taactccagtaaagtctgatccagc

SEQ ID NO: 4464975 - DNA, 25 bp, Homo sapien
gtaaagtctgatccagcatctgatg

SEQ ID NO: 4464976 - DNA, 25 bp, Homo sapien
tcacatgttgtttaactccagtaaa

SEQ ID NO: 4464977 - DNA, 25 bp, Homo sapien
cagcatctgatgcatactaaggttt

SEQ ID NO: 4464978 - DNA, 25 bp, Homo sapien
tgaggattcctacgctgactaagca

SEQ ID NO: 4464979 - DNA, 25 bp, Homo sapien
tctctacaaagtgtggcagcatcaa

SEQ ID NO: 4464980 - DNA, 25 bp, Homo sapien
gcacatttgaaccaggatcgccctg

SEQ ID NO: 4464981 - DNA, 25 bp, Homo sapien
catcaacccgggaaatggcacattt

SEQ ID NO: 4464982 - DNA, 25 bp, Homo sapien
tatcctacagattgtcatgagctgc

SEQ ID NO: 4464983 - DNA, 25 bp, Homo sapien
tctcggaagagcagcgtggcttaca

SEQ ID NO: 4464984 - DNA, 25 bp, Homo sapien
taacatgaaggactgaaaagagtgg

SEQ ID NO: 4464985 - DNA, 25 bp, Homo sapien
aacgtcctttaccagttgtatgtgg

SEQ ID NO: 4464986 - DNA, 25 bp, Homo sapien
tgccttcatttacatccgatgccag

SEQ ID NO: 4464987 - DNA, 25 bp, Homo sapien
gatgccaggcctaagagcagtgttc

SEQ ID NO: 4464988 - DNA, 25 bp, Homo sapien
gagacagtggattccacggctccac

SEQ ID NO: 4464989 - DNA, 25 bp, Homo sapien
acggctccacaggatctgcctcgtg

SEQ ID NO: 4464990 - DNA, 25 bp, Homo sapien
gtctgtattgtcctataacccccaa

SEQ ID NO: 4464991 - DNA, 25 bp, Homo sapien
gcttccatagactccttgagggcaa

SEQ ID NO: 4464992 - DNA, 25 bp, Homo sapien
tttagtgcgtttgtgcacatattca

SEQ ID NO: 4464993 - DNA, 25 bp, Homo sapien
gacgtctattatactttgtctgtat

SEQ ID NO: 4464994 - DNA, 25 bp, Homo sapien
ttaccagaaaccaaaggctccttca

SEQ ID NO: 4464995 - DNA, 25 bp, Homo sapien
gggcctgtcttcacgtgcatgagtt

SEQ ID NO: 4464996 - DNA, 25 bp, Homo sapien
gactcctcagctataggcttctcag

SEQ ID NO: 4464997 - DNA, 25 bp, Homo sapien
acctcattccccgaggactcctcag

SEQ ID NO: 4464998 - DNA, 25 bp, Homo sapien
ggcttgcgtttccagatgacctcat

SEQ ID NO: 4464999 - DNA, 25 bp, Homo sapien
aaggtcctattttctccctgactgc

SEQ ID NO: 4465000 - DNA, 25 bp, Homo sapien
tagtaaagccccagctgagatccag

SEQ ID NO: 4465001 - DNA, 25 bp, Homo sapien
ccttttattattcggctttcttcag

SEQ ID NO: 4465002 - DNA, 25 bp, Homo sapien
gctctctgcttgttgaagtaaacag

SEQ ID NO: 4465003 - DNA, 25 bp, Homo sapien
caggctgggtggcatcctcctccgt

SEQ ID NO: 4465004 - DNA, 25 bp, Homo sapien
aggctgggtggcatcctcctccgtc

SEQ ID NO: 4465005 - DNA, 25 bp, Homo sapien
ctacaaacgcctcctcactggctgc

SEQ ID NO: 4465006 - DNA, 25 bp, Homo sapien
ggctgcttcaggctgaggtcatttg

SEQ ID NO: 4465007 - DNA, 25 bp, Homo sapien
ggctgaggtcatttgcccggagccc

SEQ ID NO: 4465008 - DNA, 25 bp, Homo sapien
gcttcaggctgaggtcatttgcccg

SEQ ID NO: 4465009 - DNA, 25 bp, Homo sapien
tctgcctttctggtcactgacacgc

SEQ ID NO: 4465010 - DNA, 25 bp, Homo sapien
gtctctgcctttctggtcactgaca

SEQ ID NO: 4465011 - DNA, 25 bp, Homo sapien
ctctgcctttctggtcactgacacg

SEQ ID NO: 4465012 - DNA, 25 bp, Homo sapien
tgcctttctggtcactgacacgcat

SEQ ID NO: 4465013 - DNA, 25 bp, Homo sapien
ccagacggggtcacggcagggcaga

SEQ ID NO: 4465014 - DNA, 25 bp, Homo sapien
tcccagacggggtcacggcagggca

SEQ ID NO: 4465015 - DNA, 25 bp, Homo sapien
cggggtcacggcagggcagaggcgc

SEQ ID NO: 4465016 - DNA, 25 bp, Homo sapien
gacggggtcacggcagggcagaggc

SEQ ID NO: 4465017 - DNA, 25 bp, Homo sapien
aggaaccaattccgggcacgctatc

SEQ ID NO: 4465018 - DNA, 25 bp, Homo sapien
caattccgggcacgctatcatccaa

SEQ ID NO: 4465019 - DNA, 25 bp, Homo sapien
ggcacgctatcatccaaatagtcca

SEQ ID NO: 4465020 - DNA, 25 bp, Homo sapien
tcatccaaatagtccattacttgaa

SEQ ID NO: 4465021 - DNA, 25 bp, Homo sapien
tgggaagcataaactaacactaccc

SEQ ID NO: 4465022 - DNA, 25 bp, Homo sapien
ctgggaagcataaactaacactacc

SEQ ID NO: 4465023 - DNA, 25 bp, Homo sapien
gaagcataaactaacactaccccca

SEQ ID NO: 4465024 - DNA, 25 bp, Homo sapien
aagcataaactaacactacccccat

SEQ ID NO: 4465025 - DNA, 25 bp, Homo sapien
gttgtgggcagatatttagattctc

SEQ ID NO: 4465026 - DNA, 25 bp, Homo sapien
gggttgtgggcagatatttagattc

SEQ ID NO: 4465027 - DNA, 25 bp, Homo sapien
gggggttgtgggcagatatttagat

SEQ ID NO: 4465028 - DNA, 25 bp, Homo sapien
ttgtgggcagatatttagattctca

SEQ ID NO: 4465029 - DNA, 25 bp, Homo sapien
ttgcttggttggctcctgtacctcc

SEQ ID NO: 4465030 - DNA, 25 bp, Homo sapien
gcttggttggctcctgtacctccca

SEQ ID NO: 4465031 - DNA, 25 bp, Homo sapien
ggcttgcttggttggctcctgtacc

SEQ ID NO: 4465032 - DNA, 25 bp, Homo sapien
cttggttggctcctgtacctcccat

SEQ ID NO: 4465033 - DNA, 25 bp, Homo sapien
cctccaggaaccagatcctgaccat

SEQ ID NO: 4465034 - DNA, 25 bp, Homo sapien
tggcttccccggattccagcctcca

SEQ ID NO: 4465035 - DNA, 25 bp, Homo sapien
ctggcttccccggattccagcctcc

SEQ ID NO: 4465036 - DNA, 25 bp, Homo sapien
ctccccggttaagacgctggctggt

SEQ ID NO: 4465037 - DNA, 25 bp, Homo sapien
ggttaagacgctggctggtgtttcc

SEQ ID NO: 4465038 - DNA, 25 bp, Homo sapien
ccccggttaagacgctggctggtgt

SEQ ID NO: 4465039 - DNA, 25 bp, Homo sapien
tcctccccggttaagacgctggctg

SEQ ID NO: 4465040 - DNA, 25 bp, Homo sapien
gcgacggccacttcagttccacttt

SEQ ID NO: 4465041 - DNA, 25 bp, Homo sapien
ctgctggcctaaaggcaagcgacgg

SEQ ID NO: 4465042 - DNA, 25 bp, Homo sapien
aaaggcaagcgacggccacttcagt

SEQ ID NO: 4465043 - DNA, 25 bp, Homo sapien
ggcctaaaggcaagcgacggccact

SEQ ID NO: 4465044 - DNA, 25 bp, Homo sapien
gagatctacatacgcctgcacagtg

SEQ ID NO: 4465045 - DNA, 25 bp, Homo sapien
tctagtattctccactttggctgca

SEQ ID NO: 4465046 - DNA, 25 bp, Homo sapien
taatcactgttaatacccaacgcac

SEQ ID NO: 4465047 - DNA, 25 bp, Homo sapien
aacgcacttctaaggaaggcccctg

SEQ ID NO: 4465048 - DNA, 25 bp, Homo sapien
agtctgccatccaatcaacaaggag

SEQ ID NO: 4465049 - DNA, 25 bp, Homo sapien
tgtagccttttatcagacggactcc

SEQ ID NO: 4465050 - DNA, 25 bp, Homo sapien
gatgtgtacaatctccatggacagg

SEQ ID NO: 4465051 - DNA, 25 bp, Homo sapien
gacggactccagtgctgattgtcag

SEQ ID NO: 4465052 - DNA, 25 bp, Homo sapien
tactcagcctatctccttcggtcag

SEQ ID NO: 4465053 - DNA, 25 bp, Homo sapien
tgaaatatggacatcttgagggagc

SEQ ID NO: 4465054 - DNA, 25 bp, Homo sapien
ttagtttaatcacagccacaaagtc

SEQ ID NO: 4465055 - DNA, 25 bp, Homo sapien
tgatgcatctggacgatcccggaga

SEQ ID NO: 4465056 - DNA, 25 bp, Homo sapien
tggcataattagaaataactccact

SEQ ID NO: 4465057 - DNA, 25 bp, Homo sapien
taggagcacccgaatcttaaaagac

SEQ ID NO: 4465058 - DNA, 25 bp, Homo sapien
ctgtatcaggcgcaaggccgctgtc

SEQ ID NO: 4465059 - DNA, 25 bp, Homo sapien
cttaaaagactccattcgtgtgtcc

SEQ ID NO: 4465060 - DNA, 25 bp, Homo sapien
tgtaactggttgtttgagaggtccc

SEQ ID NO: 4465061 - DNA, 25 bp, Homo sapien
caatccaccgaagtataaacaacga

SEQ ID NO: 4465062 - DNA, 25 bp, Homo sapien
tgtttttcccagtaattgctacctg

SEQ ID NO: 4465063 - DNA, 25 bp, Homo sapien
tacctgctttgcttggccaaatccc

SEQ ID NO: 4465064 - DNA, 25 bp, Homo sapien
aaactcacgcacaccctgccagccg

SEQ ID NO: 4465065 - DNA, 25 bp, Homo sapien
gcacaccctgccagccgcggcgcgg

SEQ ID NO: 4465066 - DNA, 25 bp, Homo sapien
acagccggccgccaccaaactcacg

SEQ ID NO: 4465067 - DNA, 25 bp, Homo sapien
cgccaccaaactcacgcacaccctg

SEQ ID NO: 4465068 - DNA, 25 bp, Homo sapien
cgcgtcgtccgcagcttgaggccaa

SEQ ID NO: 4465069 - DNA, 25 bp, Homo sapien
cccgcgtcgtccgcagcttgaggcc

SEQ ID NO: 4465070 - DNA, 25 bp, Homo sapien
ccgcgtcgtccgcagcttgaggcca

SEQ ID NO: 4465071 - DNA, 25 bp, Homo sapien
tcggccagaggcgacgcctcagggt

SEQ ID NO: 4465072 - DNA, 25 bp, Homo sapien
cgacccagccgtggccgagaggcgg

SEQ ID NO: 4465073 - DNA, 25 bp, Homo sapien
agaccacggggcgagggactgctcc

SEQ ID NO: 4465074 - DNA, 25 bp, Homo sapien
gactgctcctgtggcggctcggcca

SEQ ID NO: 4465075 - DNA, 25 bp, Homo sapien
cttgatcctgtgcagcaggtcgcgg

SEQ ID NO: 4465076 - DNA, 25 bp, Homo sapien
gctctcgatggctctggcgaagcac

SEQ ID NO: 4465077 - DNA, 25 bp, Homo sapien
tgtgcagcaggtcgcggctgctctc

SEQ ID NO: 4465078 - DNA, 25 bp, Homo sapien
agcaggtcgcggctgctctcgatgg

SEQ ID NO: 4465079 - DNA, 25 bp, Homo sapien
agaaactccaaccactatgcccggt

SEQ ID NO: 4465080 - DNA, 25 bp, Homo sapien
ttctgaccagacttcttttccatct

SEQ ID NO: 4465081 - DNA, 25 bp, Homo sapien
atctacagaaactccaaccactatg

SEQ ID NO: 4465082 - DNA, 25 bp, Homo sapien
ccactatgcccggtgcgcccacctc

SEQ ID NO: 4465083 - DNA, 25 bp, Homo sapien
caattagatcaatttctgtgcaaca

SEQ ID NO: 4465084 - DNA, 25 bp, Homo sapien
ggatgaccaattagatcaatttctg

SEQ ID NO: 4465085 - DNA, 25 bp, Homo sapien
cctagaaacctaggatgaccaatta

SEQ ID NO: 4465086 - DNA, 25 bp, Homo sapien
gaaacctaggatgaccaattagatc

SEQ ID NO: 4465087 - DNA, 25 bp, Homo sapien
ggtttacatggtacacggttctcaa

SEQ ID NO: 4465088 - DNA, 25 bp, Homo sapien
gaatatcaagatccagtttccctgc

SEQ ID NO: 4465089 - DNA, 25 bp, Homo sapien
ccatggtgagacttttgctgatgct

SEQ ID NO: 4465090 - DNA, 25 bp, Homo sapien
cacaatttggcaagagcaaccatgg

SEQ ID NO: 4465091 - DNA, 25 bp, Homo sapien
accatttaacatgccattagtaaaa

SEQ ID NO: 4465092 - DNA, 25 bp, Homo sapien
taaatataaattccagcataaacca

SEQ ID NO: 4465093 - DNA, 25 bp, Homo sapien
attccagcataaaccatttaacatg

SEQ ID NO: 4465094 - DNA, 25 bp, Homo sapien
aaccatttaacatgccattagtaaa

SEQ ID NO: 4465095 - DNA, 25 bp, Homo sapien
caggttttgaattccggcatttggc

SEQ ID NO: 4465096 - DNA, 25 bp, Homo sapien
aaatcagtaatcttgttgtgacaga

SEQ ID NO: 4465097 - DNA, 25 bp, Homo sapien
tcttcaaggctttataagctttctc

SEQ ID NO: 4465098 - DNA, 25 bp, Homo sapien
taatgacgaattccacttaaatggg

SEQ ID NO: 4465099 - DNA, 25 bp, Homo sapien
tccaagtccttaacacaagaataaa

SEQ ID NO: 4465100 - DNA, 25 bp, Homo sapien
caggcaatacatcaacaaattgagt

SEQ ID NO: 4465101 - DNA, 25 bp, Homo sapien
cagcattcagaaaaagaacacaggc

SEQ ID NO: 4465102 - DNA, 25 bp, Homo sapien
tgcaactgtccttattccaagtcct

SEQ ID NO: 4465103 - DNA, 25 bp, Homo sapien
tgaagctctctctactatggctgcc

SEQ ID NO: 4465104 - DNA, 25 bp, Homo sapien
ccagtagggtatagccaaaagttga

SEQ ID NO: 4465105 - DNA, 25 bp, Homo sapien
tgctctattgtaaatcactggctcg

SEQ ID NO: 4465106 - DNA, 25 bp, Homo sapien
agtcgtcagcatatccaagtcatgg

SEQ ID NO: 4465107 - DNA, 25 bp, Homo sapien
tagacagaaaggtaatgcaaatgcg

SEQ ID NO: 4465108 - DNA, 25 bp, Homo sapien
cacccggccctgaatgtccttgttt

SEQ ID NO: 4465109 - DNA, 25 bp, Homo sapien
tagagagagggttgatttcaccaca

SEQ ID NO: 4465110 - DNA, 25 bp, Homo sapien
gctagacacagcagaaggtattcat

SEQ ID NO: 4465111 - DNA, 25 bp, Homo sapien
caatgtgagatcatggattagatcc

SEQ ID NO: 4465112 - DNA, 25 bp, Homo sapien
tgggacaaactgatgtcaagtgact

SEQ ID NO: 4465113 - DNA, 25 bp, Homo sapien
tacaataacctgacaggcaccacct

SEQ ID NO: 4465114 - DNA, 25 bp, Homo sapien
gaatccatgagtgcatactggtatg

SEQ ID NO: 4465115 - DNA, 25 bp, Homo sapien
tctcagagctgatagggacccttaa

SEQ ID NO: 4465116 - DNA, 25 bp, Homo sapien
tggttatacccaacaagtcagtaga

SEQ ID NO: 4465117 - DNA, 25 bp, Homo sapien
tagaggcccaaatagatactgtatc

SEQ ID NO: 4465118 - DNA, 25 bp, Homo sapien
tcagtagactacataacgaagctgg

SEQ ID NO: 4465119 - DNA, 25 bp, Homo sapien
ttaagactggaaactagaactcctc

SEQ ID NO: 4465120 - DNA, 25 bp, Homo sapien
actgatgggatgacgccagatgaca

SEQ ID NO: 4465121 - DNA, 25 bp, Homo sapien
aactaccagtagagagtctgtcagc

SEQ ID NO: 4465122 - DNA, 25 bp, Homo sapien
cacaagttcttgactaggttactga

SEQ ID NO: 4465123 - DNA, 25 bp, Homo sapien
gagtggccacaggtatgtgtctgaa

SEQ ID NO: 4465124 - DNA, 25 bp, Homo sapien
tgtgacatggtagtttcttggtgca

SEQ ID NO: 4465125 - DNA, 25 bp, Homo sapien
aataccatataagctgggtgcagca

SEQ ID NO: 4465126 - DNA, 25 bp, Homo sapien
tcaagattcttatacgtcccctaaa

SEQ ID NO: 4465127 - DNA, 25 bp, Homo sapien
aaggaaataagaaatgatcatgaaa

SEQ ID NO: 4465128 - DNA, 25 bp, Homo sapien
actggcttcacacatgatgatagaa

SEQ ID NO: 4465129 - DNA, 25 bp, Homo sapien
ttcatagtcactggcttcacacatg

SEQ ID NO: 4465130 - DNA, 25 bp, Homo sapien
gaaaaatttcatagtcactggcttc

SEQ ID NO: 4465131 - DNA, 25 bp, Homo sapien
gcataatgccgttgctttctacacg

SEQ ID NO: 4465132 - DNA, 25 bp, Homo sapien
aatttcagaaggtcacccactgtag

SEQ ID NO: 4465133 - DNA, 25 bp, Homo sapien
tccacgtaaggtgtgttgacaagac

SEQ ID NO: 4465134 - DNA, 25 bp, Homo sapien
gcccatttataggagttatccacgt

SEQ ID NO: 4465135 - DNA, 25 bp, Homo sapien
gcatgttacatatgatagaaacaat

SEQ ID NO: 4465136 - DNA, 25 bp, Homo sapien
cggtgctattgaggccaacagattg

SEQ ID NO: 4465137 - DNA, 25 bp, Homo sapien
gtctttatcaaattcaagggcaatc

SEQ ID NO: 4465138 - DNA, 25 bp, Homo sapien
caagggcaatcttcaaagcggtgct

SEQ ID NO: 4465139 - DNA, 25 bp, Homo sapien
gcaattagaggtacataattctctg

SEQ ID NO: 4465140 - DNA, 25 bp, Homo sapien
tcattttgcacctatggtgttaagg

SEQ ID NO: 4465141 - DNA, 25 bp, Homo sapien
tccctgagtataaagaaccaattct

SEQ ID NO: 4465142 - DNA, 25 bp, Homo sapien
taattacttccctgagtataaagaa

SEQ ID NO: 4465143 - DNA, 25 bp, Homo sapien
tacctaaggaactcatcccaaggag

SEQ ID NO: 4465144 - DNA, 25 bp, Homo sapien
gagcccagagaacatagccaagaac

SEQ ID NO: 4465145 - DNA, 25 bp, Homo sapien
cacacttgcacctgacctgatttag

SEQ ID NO: 4465146 - DNA, 25 bp, Homo sapien
cagactgtggtacccaacttccaag

SEQ ID NO: 4465147 - DNA, 25 bp, Homo sapien
gaatcaacatggtgcttcagagaac

SEQ ID NO: 4465148 - DNA, 25 bp, Homo sapien
ggtggcttttgtctactggcataaa

SEQ ID NO: 4465149 - DNA, 25 bp, Homo sapien
agagacaagccccaagttagagagg

SEQ ID NO: 4465150 - DNA, 25 bp, Homo sapien
tcccattatcttggcagagacaagc

SEQ ID NO: 4465151 - DNA, 25 bp, Homo sapien
tgttgtctcacagaaagccttatca

SEQ ID NO: 4465152 - DNA, 25 bp, Homo sapien
tacatttggttttgtaaggtataca

SEQ ID NO: 4465153 - DNA, 25 bp, Homo sapien
gaagaaagcaacactaatgattcaa

SEQ ID NO: 4465154 - DNA, 25 bp, Homo sapien
atacagcagtaatctcctattttgg

SEQ ID NO: 4465155 - DNA, 25 bp, Homo sapien
caccacggttttcagccatgctcag

SEQ ID NO: 4465156 - DNA, 25 bp, Homo sapien
cagacagtggttctttgtgtaggtt

SEQ ID NO: 4465157 - DNA, 25 bp, Homo sapien
caacagtgttgtgccagcctacagg

SEQ ID NO: 4465158 - DNA, 25 bp, Homo sapien
tgtaggttgttcaacagtgttgtgc

SEQ ID NO: 4465159 - DNA, 25 bp, Homo sapien
ggctagagatttactacatccgtcc

SEQ ID NO: 4465160 - DNA, 25 bp, Homo sapien
tttactacatccgtccttggaagag

SEQ ID NO: 4465161 - DNA, 25 bp, Homo sapien
gagatttactacatccgtccttgga

SEQ ID NO: 4465162 - DNA, 25 bp, Homo sapien
tagagatttactacatccgtccttg

SEQ ID NO: 4465163 - DNA, 25 bp, Homo sapien
cacttgccatgtaactaaaggttct

SEQ ID NO: 4465164 - DNA, 25 bp, Homo sapien
aaagattatgcacaagatgatccca

SEQ ID NO: 4465165 - DNA, 25 bp, Homo sapien
gaggattaggccactgatgtctttg

SEQ ID NO: 4465166 - DNA, 25 bp, Homo sapien
tcacaggacaaatgctatatgccca

SEQ ID NO: 4465167 - DNA, 25 bp, Homo sapien
catgtttacaggaagctgtgaggaa

SEQ ID NO: 4465168 - DNA, 25 bp, Homo sapien
tgcttcaccctcaagctctggggga

SEQ ID NO: 4465169 - DNA, 25 bp, Homo sapien
agaattcctgacagactggactgag

SEQ ID NO: 4465170 - DNA, 25 bp, Homo sapien
aaatcagcatgtttacaggaagctg

SEQ ID NO: 4465171 - DNA, 25 bp, Homo sapien
tctgctggtcgagccgcgggaactt

SEQ ID NO: 4465172 - DNA, 25 bp, Homo sapien
ctcagaatcagagccccgtagttcc

SEQ ID NO: 4465173 - DNA, 25 bp, Homo sapien
tgcagacgccttccaaatccaggac

SEQ ID NO: 4465174 - DNA, 25 bp, Homo sapien
tatttctttgtgtgcagacgccttc

SEQ ID NO: 4465175 - DNA, 25 bp, Homo sapien
ggtggaggcgtttccacccgagctg

SEQ ID NO: 4465176 - DNA, 25 bp, Homo sapien
gaggcgtttccacccgagctgggaa

SEQ ID NO: 4465177 - DNA, 25 bp, Homo sapien
tggaggcgtttccacccgagctggg

SEQ ID NO: 4465178 - DNA, 25 bp, Homo sapien
tgacagggtggaggcgtttccaccc

SEQ ID NO: 4465179 - DNA, 25 bp, Homo sapien
ccccgggacttcatgggacttgtag

SEQ ID NO: 4465180 - DNA, 25 bp, Homo sapien
gagggcttcgtcatcaccgcccgcg

SEQ ID NO: 4465181 - DNA, 25 bp, Homo sapien
gagcctcgggcgtgccccgcgagga

SEQ ID NO: 4465182 - DNA, 25 bp, Homo sapien
gggagcctcgggcgtgccccgcgag

SEQ ID NO: 4465183 - DNA, 25 bp, Homo sapien
tcctctcggagaaggcctgcgcgcc

SEQ ID NO: 4465184 - DNA, 25 bp, Homo sapien
ggcgagggggcgtgcccgccaatcc

SEQ ID NO: 4465185 - DNA, 25 bp, Homo sapien
gggcgtgcccgccaatccgccgctg

SEQ ID NO: 4465186 - DNA, 25 bp, Homo sapien
ctgaccggggagccagaggaggcgg

SEQ ID NO: 4465187 - DNA, 25 bp, Homo sapien
caggagcttgaagagataatcgtac

SEQ ID NO: 4465188 - DNA, 25 bp, Homo sapien
aggaggcaggtcttgcctacccccg

SEQ ID NO: 4465189 - DNA, 25 bp, Homo sapien
agagataatcgtacgtcttcgccat

SEQ ID NO: 4465190 - DNA, 25 bp, Homo sapien
gcttgaagagataatcgtacgtctt

SEQ ID NO: 4465191 - DNA, 25 bp, Homo sapien
tccagcatggcaatggtaaagctgc

SEQ ID NO: 4465192 - DNA, 25 bp, Homo sapien
gggaatacatacaatccagggtcca

SEQ ID NO: 4465193 - DNA, 25 bp, Homo sapien
caccagaaccatgtgagtttgcaac

SEQ ID NO: 4465194 - DNA, 25 bp, Homo sapien
tttgcaagctggtagctcacaggcc

SEQ ID NO: 4465195 - DNA, 25 bp, Homo sapien
aattataatgtgatatgggaagcca

SEQ ID NO: 4465196 - DNA, 25 bp, Homo sapien
gagtatgctgcaatatccattccag

SEQ ID NO: 4465197 - DNA, 25 bp, Homo sapien
tatgtgtgcataaggagattagagt

SEQ ID NO: 4465198 - DNA, 25 bp, Homo sapien
tatatcttcagagttgtccttccac

SEQ ID NO: 4465199 - DNA, 25 bp, Homo sapien
tccagcacctgttttgagaggaaga

SEQ ID NO: 4465200 - DNA, 25 bp, Homo sapien
tgttgcagctagagtacagtccaga

SEQ ID NO: 4465201 - DNA, 25 bp, Homo sapien
tccagaactgaagtgcgaggctcac

SEQ ID NO: 4465202 - DNA, 25 bp, Homo sapien
cacagagtcctgtggaaaactccag

SEQ ID NO: 4465203 - DNA, 25 bp, Homo sapien
aaaccacaagtccactgacctctgg

SEQ ID NO: 4465204 - DNA, 25 bp, Homo sapien
gagatttctgatacaattagtttcc

SEQ ID NO: 4465205 - DNA, 25 bp, Homo sapien
acatatttgattgcttcctaagggc

SEQ ID NO: 4465206 - DNA, 25 bp, Homo sapien
gtttccttttcacgaaagagtcaga

SEQ ID NO: 4465207 - DNA, 25 bp, Homo sapien
tactccattaaaatcagctaccatg

SEQ ID NO: 4465208 - DNA, 25 bp, Homo sapien
taaaattcaggagatttcactcaga

SEQ ID NO: 4465209 - DNA, 25 bp, Homo sapien
tgttaaatggaggaaatcacacttt

SEQ ID NO: 4465210 - DNA, 25 bp, Homo sapien
ccctaacagagggtattgaactaga

SEQ ID NO: 4465211 - DNA, 25 bp, Homo sapien
agtccacccagcacagatgttgagg

SEQ ID NO: 4465212 - DNA, 25 bp, Homo sapien
agctgaaaatgtggccacagtccac

SEQ ID NO: 4465213 - DNA, 25 bp, Homo sapien
acccagcacagatgttgagggtccc

SEQ ID NO: 4465214 - DNA, 25 bp, Homo sapien
tgaaaatgtggccacagtccaccca

SEQ ID NO: 4465215 - DNA, 25 bp, Homo sapien
cttctcatgtaagggcctctaaaac

SEQ ID NO: 4465216 - DNA, 25 bp, Homo sapien
tcttctcatgtaagggcctctaaaa

SEQ ID NO: 4465217 - DNA, 25 bp, Homo sapien
ctcatgtaagggcctctaaaaccct

SEQ ID NO: 4465218 - DNA, 25 bp, Homo sapien
tctcatgtaagggcctctaaaaccc

SEQ ID NO: 4465219 - DNA, 25 bp, Homo sapien
gagcccctgttggtagttattgaca

SEQ ID NO: 4465220 - DNA, 25 bp, Homo sapien
tagagaaaggatgggtatgagggac

SEQ ID NO: 4465221 - DNA, 25 bp, Homo sapien
caaagggcccttggactgaattatc

SEQ ID NO: 4465222 - DNA, 25 bp, Homo sapien
tttggtcacaaatagcaacagcagg

SEQ ID NO: 4465223 - DNA, 25 bp, Homo sapien
atccaatactctgtccactacatca

SEQ ID NO: 4465224 - DNA, 25 bp, Homo sapien
ttttattcctctatgtgaggccgca

SEQ ID NO: 4465225 - DNA, 25 bp, Homo sapien
gtgctataagtgacagtgattccaa

SEQ ID NO: 4465226 - DNA, 25 bp, Homo sapien
ttagcagacattttgtgggataata

SEQ ID NO: 4465227 - DNA, 25 bp, Homo sapien
ggaacagatcacaaccatagacggc

SEQ ID NO: 4465228 - DNA, 25 bp, Homo sapien
catagacggcagatcttggcatgaa

SEQ ID NO: 4465229 - DNA, 25 bp, Homo sapien
caattccttatcctacgtgtgagta

SEQ ID NO: 4465230 - DNA, 25 bp, Homo sapien
tcagaaaagtgggagatttggcccc

SEQ ID NO: 4465231 - DNA, 25 bp, Homo sapien
aacaaagaaagggatcaagacatga

SEQ ID NO: 4465232 - DNA, 25 bp, Homo sapien
tgctgtgttttatgaccatctgcag

SEQ ID NO: 4465233 - DNA, 25 bp, Homo sapien
gaaagggatcaagacatgaacttgc

SEQ ID NO: 4465234 - DNA, 25 bp, Homo sapien
acatgctgtgttttatgaccatctg

SEQ ID NO: 4465235 - DNA, 25 bp, Homo sapien
cagcataagctgtgacttgatgcat

SEQ ID NO: 4465236 - DNA, 25 bp, Homo sapien
gatatttctcagcaaccagtgatgt

SEQ ID NO: 4465237 - DNA, 25 bp, Homo sapien
agatatttctcagcaaccagtgatg

SEQ ID NO: 4465238 - DNA, 25 bp, Homo sapien
tatttctcagcaaccagtgatgtcg

SEQ ID NO: 4465239 - DNA, 25 bp, Homo sapien
cagatatttctcagcaaccagtgat

SEQ ID NO: 4465240 - DNA, 25 bp, Homo sapien
tcccaagggaatgactcaaaggcat

SEQ ID NO: 4465241 - DNA, 25 bp, Homo sapien
ccaagagagatgcagcaatttacgc

SEQ ID NO: 4465242 - DNA, 25 bp, Homo sapien
caatttacgcagattcacgaagacc

SEQ ID NO: 4465243 - DNA, 25 bp, Homo sapien
cttataacataaggaggcagggaaa

SEQ ID NO: 4465244 - DNA, 25 bp, Homo sapien
caaacttcgcatgttctaatttatt

SEQ ID NO: 4465245 - DNA, 25 bp, Homo sapien
gagagtagaagaatggttaggctgg

SEQ ID NO: 4465246 - DNA, 25 bp, Homo sapien
gatttggaagcaatctaagcatcca

SEQ ID NO: 4465247 - DNA, 25 bp, Homo sapien
aaagacaaacttcgcatgttctaat

SEQ ID NO: 4465248 - DNA, 25 bp, Homo sapien
ggccaactgacagacaacggctgca

SEQ ID NO: 4465249 - DNA, 25 bp, Homo sapien
tctaagagctgtgaactatggcatt

SEQ ID NO: 4465250 - DNA, 25 bp, Homo sapien
tgcttatgctgttgtcaagggccaa

SEQ ID NO: 4465251 - DNA, 25 bp, Homo sapien
cattgaaaagcactgaactgtaggt

SEQ ID NO: 4465252 - DNA, 25 bp, Homo sapien
gatataatccaagtctcattaggag

SEQ ID NO: 4465253 - DNA, 25 bp, Homo sapien
taatccaagtctcattaggaggaca

SEQ ID NO: 4465254 - DNA, 25 bp, Homo sapien
tccaagtctcattaggaggacaaag

SEQ ID NO: 4465255 - DNA, 25 bp, Homo sapien
tcagatataatccaagtctcattag

SEQ ID NO: 4465256 - DNA, 25 bp, Homo sapien
ctatcgttctaattttaaaatcaat

SEQ ID NO: 4465257 - DNA, 25 bp, Homo sapien
gaagcttaattttctttccatctag

SEQ ID NO: 4465258 - DNA, 25 bp, Homo sapien
ctgaagcttaattttctttccatct

SEQ ID NO: 4465259 - DNA, 25 bp, Homo sapien
atctgaagcttaattttctttccat

SEQ ID NO: 4465260 - DNA, 25 bp, Homo sapien
agcttaattttctttccatctagtt

SEQ ID NO: 4465261 - DNA, 25 bp, Homo sapien
gaatctttcctgacccgctgtgtcc

SEQ ID NO: 4465262 - DNA, 25 bp, Homo sapien
ggaatctttcctgacccgctgtgtc

SEQ ID NO: 4465263 - DNA, 25 bp, Homo sapien
catggctcctctgtagtacgctgtc

SEQ ID NO: 4465264 - DNA, 25 bp, Homo sapien
tcctctgtagtacgctgtcgtgatt

SEQ ID NO: 4465265 - DNA, 25 bp, Homo sapien
ctgtagtacgctgtcgtgattgttc

SEQ ID NO: 4465266 - DNA, 25 bp, Homo sapien
ggctcctctgtagtacgctgtcgtg

SEQ ID NO: 4465267 - DNA, 25 bp, Homo sapien
ccaaatcatccctgttatgatgttc

SEQ ID NO: 4465268 - DNA, 25 bp, Homo sapien
actattccaaatcatccctgttatg

SEQ ID NO: 4465269 - DNA, 25 bp, Homo sapien
ctattccaaatcatccctgttatga

SEQ ID NO: 4465270 - DNA, 25 bp, Homo sapien
attccaaatcatccctgttatgatg

SEQ ID NO: 4465271 - DNA, 25 bp, Homo sapien
gtcagcttggcaaggctgcacagat

SEQ ID NO: 4465272 - DNA, 25 bp, Homo sapien
tgatgttgaaccagagaccgctgga

SEQ ID NO: 4465273 - DNA, 25 bp, Homo sapien
ccgctggattgagtgaaagaaagtc

SEQ ID NO: 4465274 - DNA, 25 bp, Homo sapien
tgaaagaaagtcagcttggcaaggc

SEQ ID NO: 4465275 - DNA, 25 bp, Homo sapien
tttaatattgtcaaaggatttttca

SEQ ID NO: 4465276 - DNA, 25 bp, Homo sapien
tgatgtcatagaccagcataatgcc

SEQ ID NO: 4465277 - DNA, 25 bp, Homo sapien
ggatttttcatttgtgatgtcatag

SEQ ID NO: 4465278 - DNA, 25 bp, Homo sapien
ctcttcaatgtttctgatccaattt

SEQ ID NO: 4465279 - DNA, 25 bp, Homo sapien
taataagacataatcttttactcac

SEQ ID NO: 4465280 - DNA, 25 bp, Homo sapien
tacttaatagacaaatccaacctgt

SEQ ID NO: 4465281 - DNA, 25 bp, Homo sapien
ttacttaatagacaaatccaacctg

SEQ ID NO: 4465282 - DNA, 25 bp, Homo sapien
aatcttttactcacacaaggcctaa

SEQ ID NO: 4465283 - DNA, 25 bp, Homo sapien
tgttacccaggatcattctttcgac

SEQ ID NO: 4465284 - DNA, 25 bp, Homo sapien
ttcatatcacatttgttacccagga

SEQ ID NO: 4465285 - DNA, 25 bp, Homo sapien
ttctttcgacatcggaagaggcatg

SEQ ID NO: 4465286 - DNA, 25 bp, Homo sapien
caggatcattctttcgacatcggaa

SEQ ID NO: 4465287 - DNA, 25 bp, Homo sapien
ctttatccattccattcacatttac

SEQ ID NO: 4465288 - DNA, 25 bp, Homo sapien
ggattacatctctttgttgttgata

SEQ ID NO: 4465289 - DNA, 25 bp, Homo sapien
ttcaagtatggattacatctctttg

SEQ ID NO: 4465290 - DNA, 25 bp, Homo sapien
tgttgttgatatccaatttaaaggg

SEQ ID NO: 4465291 - DNA, 25 bp, Homo sapien
atgcttaatgtgagtagattccaac

SEQ ID NO: 4465292 - DNA, 25 bp, Homo sapien
tgattgagacaaattgcgaactctt

SEQ ID NO: 4465293 - DNA, 25 bp, Homo sapien
tgagtccagaattgaacaaaaactt

SEQ ID NO: 4465294 - DNA, 25 bp, Homo sapien
taataaatgagtccagaattgaaca

SEQ ID NO: 4465295 - DNA, 25 bp, Homo sapien
aattgcgaactcttatatattcctc

SEQ ID NO: 4465296 - DNA, 25 bp, Homo sapien
atctgctcccaaagtttaattctcc

SEQ ID NO: 4465297 - DNA, 25 bp, Homo sapien
aagtttaattctccaacagttactg

SEQ ID NO: 4465298 - DNA, 25 bp, Homo sapien
tatctgctcccaaagtttaattctc

SEQ ID NO: 4465299 - DNA, 25 bp, Homo sapien
tttaattctccaacagttactgtat

SEQ ID NO: 4465300 - DNA, 25 bp, Homo sapien
tctacatttgcactggattttgcgc

SEQ ID NO: 4465301 - DNA, 25 bp, Homo sapien
tacatttgcactggattttgcgctt

SEQ ID NO: 4465302 - DNA, 25 bp, Homo sapien
catttgcactggattttgcgcttgt

SEQ ID NO: 4465303 - DNA, 25 bp, Homo sapien
tgcactggattttgcgcttgtctcc

SEQ ID NO: 4465304 - DNA, 25 bp, Homo sapien
agagctgtttgaacacaggccccta

SEQ ID NO: 4465305 - DNA, 25 bp, Homo sapien
tgctccgtaacagtcaccaaacgtt

SEQ ID NO: 4465306 - DNA, 25 bp, Homo sapien
ctgagagctgtttgaacacaggccc

SEQ ID NO: 4465307 - DNA, 25 bp, Homo sapien
ggtgctgctccgtaacagtcaccaa

SEQ ID NO: 4465308 - DNA, 25 bp, Homo sapien
gacacttaggtggatacactgattc

SEQ ID NO: 4465309 - DNA, 25 bp, Homo sapien
gggtaaatactcagtagtgagactg

SEQ ID NO: 4465310 - DNA, 25 bp, Homo sapien
cacttaggtggatacactgattccc

SEQ ID NO: 4465311 - DNA, 25 bp, Homo sapien
ggtaaatactcagtagtgagactgc

SEQ ID NO: 4465312 - DNA, 25 bp, Homo sapien
gttttgtcattatatctcgtgcaag

SEQ ID NO: 4465313 - DNA, 25 bp, Homo sapien
tgtcattatatctcgtgcaagtgta

SEQ ID NO: 4465314 - DNA, 25 bp, Homo sapien
tgagttttgtcattatatctcgtgc

SEQ ID NO: 4465315 - DNA, 25 bp, Homo sapien
cattatatctcgtgcaagtgtaaaa

SEQ ID NO: 4465316 - DNA, 25 bp, Homo sapien
aagtagcgagcaacgaaagaaactg

SEQ ID NO: 4465317 - DNA, 25 bp, Homo sapien
tcaaagtagcgagcaacgaaagaaa

SEQ ID NO: 4465318 - DNA, 25 bp, Homo sapien
tgttattttcactggtccacctgct

SEQ ID NO: 4465319 - DNA, 25 bp, Homo sapien
tagcgagcaacgaaagaaactggtc

SEQ ID NO: 4465320 - DNA, 25 bp, Homo sapien
gaggtctaagttcagtggtgctctc

SEQ ID NO: 4465321 - DNA, 25 bp, Homo sapien
agcagccgggaggtgtgattctgag

SEQ ID NO: 4465322 - DNA, 25 bp, Homo sapien
ggctggaatccacttggcatactgt

SEQ ID NO: 4465323 - DNA, 25 bp, Homo sapien
ccctctaggtgtgctgcagtctctc

SEQ ID NO: 4465324 - DNA, 25 bp, Homo sapien
gaaaaaacgagttaggtcctgcatg

SEQ ID NO: 4465325 - DNA, 25 bp, Homo sapien
tagaacttcacgacacaaaagtgtg

SEQ ID NO: 4465326 - DNA, 25 bp, Homo sapien
gaaagataaccgcttctgcaacagg

SEQ ID NO: 4465327 - DNA, 25 bp, Homo sapien
tattaacctctgctgtaaatgctct

SEQ ID NO: 4465328 - DNA, 25 bp, Homo sapien
taccaaggcagtaatatttgaccat

SEQ ID NO: 4465329 - DNA, 25 bp, Homo sapien
taaatgctaccaaggcagtaatatt

SEQ ID NO: 4465330 - DNA, 25 bp, Homo sapien
atgctaccaaggcagtaatatttga

SEQ ID NO: 4465331 - DNA, 25 bp, Homo sapien
aaataaatgctaccaaggcagtaat

SEQ ID NO: 4465332 - DNA, 25 bp, Homo sapien
tggctttagcccaaatgactggact

SEQ ID NO: 4465333 - DNA, 25 bp, Homo sapien
tatgacactgaaggctagagcaaca

SEQ ID NO: 4465334 - DNA, 25 bp, Homo sapien
gatgctgcactaaaaccctaaatgg

SEQ ID NO: 4465335 - DNA, 25 bp, Homo sapien
tctgtggtaacaagcaatccctttc

SEQ ID NO: 4465336 - DNA, 25 bp, Homo sapien
tagcatatcctgtccgtctaggtcc

SEQ ID NO: 4465337 - DNA, 25 bp, Homo sapien
tagatgcttaaaggctggctcactg

SEQ ID NO: 4465338 - DNA, 25 bp, Homo sapien
caagattaaccacatgacaggtcca

SEQ ID NO: 4465339 - DNA, 25 bp, Homo sapien
gacaggtccacttatctgcaggagc

SEQ ID NO: 4465340 - DNA, 25 bp, Homo sapien
atcaaaactcgggtcgagacaacag

SEQ ID NO: 4465341 - DNA, 25 bp, Homo sapien
tcgggtcgagacaacagttcagagt

SEQ ID NO: 4465342 - DNA, 25 bp, Homo sapien
aacagttcagagtgatagatctgct

SEQ ID NO: 4465343 - DNA, 25 bp, Homo sapien
gatagatctgctttgtaaagatatg

SEQ ID NO: 4465344 - DNA, 25 bp, Homo sapien
tatttccattcactcccacagaata

SEQ ID NO: 4465345 - DNA, 25 bp, Homo sapien
cttcagattccagtgattgtatttt

SEQ ID NO: 4465346 - DNA, 25 bp, Homo sapien
ttttgaatggtcagatcccagcaca

SEQ ID NO: 4465347 - DNA, 25 bp, Homo sapien
tgtattttgaatggtcagatcccag

SEQ ID NO: 4465348 - DNA, 25 bp, Homo sapien
tccgtcttctcacagtcgtccattt

SEQ ID NO: 4465349 - DNA, 25 bp, Homo sapien
cacagtcgtccatttcacttgctta

SEQ ID NO: 4465350 - DNA, 25 bp, Homo sapien
ggcattctgtgaccaccctacaagc

SEQ ID NO: 4465351 - DNA, 25 bp, Homo sapien
cctcagcacctagaagttcactaat

SEQ ID NO: 4465352 - DNA, 25 bp, Homo sapien
tcctcggcgacgttagggccccagc

SEQ ID NO: 4465353 - DNA, 25 bp, Homo sapien
ctcctgctcccgaggcgggcgtcct

SEQ ID NO: 4465354 - DNA, 25 bp, Homo sapien
tcggcgacgttagggccccagccat

SEQ ID NO: 4465355 - DNA, 25 bp, Homo sapien
gggtgtccggaagcgccagggccac

SEQ ID NO: 4465356 - DNA, 25 bp, Homo sapien
acgcgagatgctcccggcgcgggcg

SEQ ID NO: 4465357 - DNA, 25 bp, Homo sapien
ggcccgttggggacgcgagatgctc

SEQ ID NO: 4465358 - DNA, 25 bp, Homo sapien
gggacgcgagatgctcccggcgcgg

SEQ ID NO: 4465359 - DNA, 25 bp, Homo sapien
cgttggggacgcgagatgctcccgg

SEQ ID NO: 4465360 - DNA, 25 bp, Homo sapien
tcggtggcgatggtgaagacataaa

SEQ ID NO: 4465361 - DNA, 25 bp, Homo sapien
aggaagatgatacgcaacggctcgg

SEQ ID NO: 4465362 - DNA, 25 bp, Homo sapien
gcccgaaggcaatgaaggcgcagcc

SEQ ID NO: 4465363 - DNA, 25 bp, Homo sapien
agccgaagaacacggccgcagtcat

SEQ ID NO: 4465364 - DNA, 25 bp, Homo sapien
gacaaacgctccaaagatcagcaga

SEQ ID NO: 4465365 - DNA, 25 bp, Homo sapien
caataatgactcttgccatgaacca

SEQ ID NO: 4465366 - DNA, 25 bp, Homo sapien
tatgcaaatcggaacatttcttgga

SEQ ID NO: 4465367 - DNA, 25 bp, Homo sapien
aacaagggacgaaatcagtagagac

SEQ ID NO: 4465368 - DNA, 25 bp, Homo sapien
tccaggtactaatgggaatttcatt

SEQ ID NO: 4465369 - DNA, 25 bp, Homo sapien
cagctagatgtccatctgttaggga

SEQ ID NO: 4465370 - DNA, 25 bp, Homo sapien
gcaattggcctaccttgctttccca

SEQ ID NO: 4465371 - DNA, 25 bp, Homo sapien
caagcccagcagaggtagatgtggt

SEQ ID NO: 4465372 - DNA, 25 bp, Homo sapien
ttatactcttcaaaccttcactggc

SEQ ID NO: 4465373 - DNA, 25 bp, Homo sapien
cataggccagcagtcgcatagaggg

SEQ ID NO: 4465374 - DNA, 25 bp, Homo sapien
tgtctcacctgggtttatactcttc

SEQ ID NO: 4465375 - DNA, 25 bp, Homo sapien
catagagggtgctgtctcacctggg

SEQ ID NO: 4465376 - DNA, 25 bp, Homo sapien
tgtgcttggctaaatgatgaatcag

SEQ ID NO: 4465377 - DNA, 25 bp, Homo sapien
tggctaaatgatgaatcagagaggg

SEQ ID NO: 4465378 - DNA, 25 bp, Homo sapien
aaggactagttaatacaaagtgtgt

SEQ ID NO: 4465379 - DNA, 25 bp, Homo sapien
tagttaatacaaagtgtgttggagg

SEQ ID NO: 4465380 - DNA, 25 bp, Homo sapien
caggaagaaaaacactgttaactct

SEQ ID NO: 4465381 - DNA, 25 bp, Homo sapien
gagaatctccatgaatgcccactgt

SEQ ID NO: 4465382 - DNA, 25 bp, Homo sapien
tcagatagggtattcacaaaggaaa

SEQ ID NO: 4465383 - DNA, 25 bp, Homo sapien
aaatactccactcatgattccaaag

SEQ ID NO: 4465384 - DNA, 25 bp, Homo sapien
tggccccaaggagtcagatagggta

SEQ ID NO: 4465385 - DNA, 25 bp, Homo sapien
tgacaatttttagctcgtggacgaa

SEQ ID NO: 4465386 - DNA, 25 bp, Homo sapien
gaaacaaagggtctactgcgaatgg

SEQ ID NO: 4465387 - DNA, 25 bp, Homo sapien
gatgtcaaggcctgaactgaaatgg

SEQ ID NO: 4465388 - DNA, 25 bp, Homo sapien
gactaaccagttgagggcagatgat

SEQ ID NO: 4465389 - DNA, 25 bp, Homo sapien
tctaaaggctgactgtgcattgctg

SEQ ID NO: 4465390 - DNA, 25 bp, Homo sapien
ttcaagggtccaggctaagtggcca

SEQ ID NO: 4465391 - DNA, 25 bp, Homo sapien
ggtatcttcttctcatggcaccaga

SEQ ID NO: 4465392 - DNA, 25 bp, Homo sapien
tcagctggaaaactctgctgcaagc

SEQ ID NO: 4465393 - DNA, 25 bp, Homo sapien
ccatccatcctggccgtagaaactc

SEQ ID NO: 4465394 - DNA, 25 bp, Homo sapien
agactcttgagagatcccccagtca

SEQ ID NO: 4465395 - DNA, 25 bp, Homo sapien
aggatgtgaagatcaatgggctttt

SEQ ID NO: 4465396 - DNA, 25 bp, Homo sapien
gactcttgagagatcccccagtcag

SEQ ID NO: 4465397 - DNA, 25 bp, Homo sapien
caggagaacgataaggaggatgccc

SEQ ID NO: 4465398 - DNA, 25 bp, Homo sapien
gataaggaggatgccccactttttc

SEQ ID NO: 4465399 - DNA, 25 bp, Homo sapien
aaaaaatacaatgccccagaataca

SEQ ID NO: 4465400 - DNA, 25 bp, Homo sapien
cagcaagataatgaccagcgtcatg

SEQ ID NO: 4465401 - DNA, 25 bp, Homo sapien
tgctcttctcaagaggcctccgtgg

SEQ ID NO: 4465402 - DNA, 25 bp, Homo sapien
aaacaaggtgatctccttagggctg

SEQ ID NO: 4465403 - DNA, 25 bp, Homo sapien
cactaatggaatgctgagaggtact

SEQ ID NO: 4465404 - DNA, 25 bp, Homo sapien
cgatgaggctaggatgggtaaaaac

SEQ ID NO: 4465405 - DNA, 25 bp, Homo sapien
atgctgacgccaggtttattccata

SEQ ID NO: 4465406 - DNA, 25 bp, Homo sapien
caggattataaatgctgacgccagg

SEQ ID NO: 4465407 - DNA, 25 bp, Homo sapien
tataaatgctgacgccaggtttatt

SEQ ID NO: 4465408 - DNA, 25 bp, Homo sapien
gattataaatgctgacgccaggttt

SEQ ID NO: 4465409 - DNA, 25 bp, Homo sapien
atctggagcgctggttgtaaagaag

SEQ ID NO: 4465410 - DNA, 25 bp, Homo sapien
ttatctggagcgctggttgtaaaga

SEQ ID NO: 4465411 - DNA, 25 bp, Homo sapien
tatctggagcgctggttgtaaagaa

SEQ ID NO: 4465412 - DNA, 25 bp, Homo sapien
aaagatgtagtctgcggtttgggaa

SEQ ID NO: 4465413 - DNA, 25 bp, Homo sapien
cacagttgtgcttcctctaaagatg

SEQ ID NO: 4465414 - DNA, 25 bp, Homo sapien
gaaaaaggcacagttgtgcttcctc

SEQ ID NO: 4465415 - DNA, 25 bp, Homo sapien
aagggattttcagaaaaaggcacag

SEQ ID NO: 4465416 - DNA, 25 bp, Homo sapien
cacttaaggtgttctcaggaagctc

SEQ ID NO: 4465417 - DNA, 25 bp, Homo sapien
tcagcacgagttgagttaggagaca

SEQ ID NO: 4465418 - DNA, 25 bp, Homo sapien
gtgattctcgtgcagccaggacgca

SEQ ID NO: 4465419 - DNA, 25 bp, Homo sapien
tgagcacccctttcggagagcagtt

SEQ ID NO: 4465420 - DNA, 25 bp, Homo sapien
tattatacagccagtcaggcaagcc

SEQ ID NO: 4465421 - DNA, 25 bp, Homo sapien
tctaagctgactctggaaaggctca

SEQ ID NO: 4465422 - DNA, 25 bp, Homo sapien
gaaaccatcggcgtacagagaacat

SEQ ID NO: 4465423 - DNA, 25 bp, Homo sapien
taaagggaacgctgtatctgctacc

SEQ ID NO: 4465424 - DNA, 25 bp, Homo sapien
gccagacaatctttttattgttcac

SEQ ID NO: 4465425 - DNA, 25 bp, Homo sapien
ccagacaatctttttattgttcact

SEQ ID NO: 4465426 - DNA, 25 bp, Homo sapien
agacaatctttttattgttcactga

SEQ ID NO: 4465427 - DNA, 25 bp, Homo sapien
cagacaatctttttattgttcactg

SEQ ID NO: 4465428 - DNA, 25 bp, Homo sapien
tttatcaagatcaccagcaagttcc

SEQ ID NO: 4465429 - DNA, 25 bp, Homo sapien
tggtaagccctgaataagcactgta

SEQ ID NO: 4465430 - DNA, 25 bp, Homo sapien
agcagtattctgtgcatggtaagcc

SEQ ID NO: 4465431 - DNA, 25 bp, Homo sapien
gatttacagcgatccacactgaggc

SEQ ID NO: 4465432 - DNA, 25 bp, Homo sapien
gcgagtggcactgttatcaatccga

SEQ ID NO: 4465433 - DNA, 25 bp, Homo sapien
gcataccaggtattctttcatagtg

SEQ ID NO: 4465434 - DNA, 25 bp, Homo sapien
catatccatgagtgcagatttgtga

SEQ ID NO: 4465435 - DNA, 25 bp, Homo sapien
tatacccgggcctgttctgaaactc

SEQ ID NO: 4465436 - DNA, 25 bp, Homo sapien
gagttgctccaaacacacttagaag

SEQ ID NO: 4465437 - DNA, 25 bp, Homo sapien
taaaagattccaatatccgagttgc

SEQ ID NO: 4465438 - DNA, 25 bp, Homo sapien
ggaatcaatgatcggcttttagatg

SEQ ID NO: 4465439 - DNA, 25 bp, Homo sapien
tacactgacagcacactcgattcag

SEQ ID NO: 4465440 - DNA, 25 bp, Homo sapien
tttgtttagttagtatcatctggta

SEQ ID NO: 4465441 - DNA, 25 bp, Homo sapien
ggtctgtttagcacttctgtattta

SEQ ID NO: 4465442 - DNA, 25 bp, Homo sapien
cacaggccactgtgataatggtctg

SEQ ID NO: 4465443 - DNA, 25 bp, Homo sapien
tgtttctagcatgtgctgcattgac

SEQ ID NO: 4465444 - DNA, 25 bp, Homo sapien
caacttttcacaacgatggcaagcc

SEQ ID NO: 4465445 - DNA, 25 bp, Homo sapien
tgtacctggcacaagggctgttcat

SEQ ID NO: 4465446 - DNA, 25 bp, Homo sapien
tcatcagatgacaaggacaaccctc

SEQ ID NO: 4465447 - DNA, 25 bp, Homo sapien
taaaggactccagagcagtgggact

SEQ ID NO: 4465448 - DNA, 25 bp, Homo sapien
cagacagtttctgacaggcgcaact

SEQ ID NO: 4465449 - DNA, 25 bp, Homo sapien
aaccctgtggagatgagtcagtgcc

SEQ ID NO: 4465450 - DNA, 25 bp, Homo sapien
ggaaccgacccctagttgagagcac

SEQ ID NO: 4465451 - DNA, 25 bp, Homo sapien
tgccatgactgagaaggaaccgacc

SEQ ID NO: 4465452 - DNA, 25 bp, Homo sapien
gacattttcaagtctctctctgcca

SEQ ID NO: 4465453 - DNA, 25 bp, Homo sapien
ctacatcaccctgtgtggaatatgg

SEQ ID NO: 4465454 - DNA, 25 bp, Homo sapien
tcccactggtttcccgtgagtgccg

SEQ ID NO: 4465455 - DNA, 25 bp, Homo sapien
agtgccggggaacattgctacatca

SEQ ID NO: 4465456 - DNA, 25 bp, Homo sapien
taccgcttcacactcttcacaaaga

SEQ ID NO: 4465457 - DNA, 25 bp, Homo sapien
gcttcacactcttcacaaagatgag

SEQ ID NO: 4465458 - DNA, 25 bp, Homo sapien
ccgcttcacactcttcacaaagatg

SEQ ID NO: 4465459 - DNA, 25 bp, Homo sapien
ctaccgcttcacactcttcacaaag

SEQ ID NO: 4465460 - DNA, 25 bp, Homo sapien
tgacagggagagcagccaactccat

SEQ ID NO: 4465461 - DNA, 25 bp, Homo sapien
tgccccagagaacgactgacaggga

SEQ ID NO: 4465462 - DNA, 25 bp, Homo sapien
cagctgtttgtgtgatcagtgctcc

SEQ ID NO: 4465463 - DNA, 25 bp, Homo sapien
catcaagatcaacctccgctgtggg

SEQ ID NO: 4465464 - DNA, 25 bp, Homo sapien
taatcaggtgttggctttcctgcaa

SEQ ID NO: 4465465 - DNA, 25 bp, Homo sapien
gcatgggtacttcttgggttaataa

SEQ ID NO: 4465466 - DNA, 25 bp, Homo sapien
cctgcaaaggctgattatcacttgt

SEQ ID NO: 4465467 - DNA, 25 bp, Homo sapien
tgtttcctgccacataactgtccca

SEQ ID NO: 4465468 - DNA, 25 bp, Homo sapien
gctgtgctccgacttgaccattctg

SEQ ID NO: 4465469 - DNA, 25 bp, Homo sapien
gctgtcctgccagggcctttcaggc

SEQ ID NO: 4465470 - DNA, 25 bp, Homo sapien
catcaagccttggaaccgcaggtgc

SEQ ID NO: 4465471 - DNA, 25 bp, Homo sapien
tcaagccttggaaccgcaggtgcag

SEQ ID NO: 4465472 - DNA, 25 bp, Homo sapien
tctgtcctgtatctgcggaaatatt

SEQ ID NO: 4465473 - DNA, 25 bp, Homo sapien
ccagttctctgttgcggcaggccag

SEQ ID NO: 4465474 - DNA, 25 bp, Homo sapien
cctcggctctggcaggactcggtgt

SEQ ID NO: 4465475 - DNA, 25 bp, Homo sapien
tcccagataatacattgtccgtctt

SEQ ID NO: 4465476 - DNA, 25 bp, Homo sapien
gctcctgagcccctccagacactgc

SEQ ID NO: 4465477 - DNA, 25 bp, Homo sapien
ctcctgagcccctccagacactgcc

SEQ ID NO: 4465478 - DNA, 25 bp, Homo sapien
tccagctcctgagcccctccagaca

SEQ ID NO: 4465479 - DNA, 25 bp, Homo sapien
cagctcctgagcccctccagacact

SEQ ID NO: 4465480 - DNA, 25 bp, Homo sapien
agggcggacgtactcgccacggcac

SEQ ID NO: 4465481 - DNA, 25 bp, Homo sapien
ggctgcgcgcacgcggtcccggtgt

SEQ ID NO: 4465482 - DNA, 25 bp, Homo sapien
tgcgcgcacgcggtcccggtgtgca

SEQ ID NO: 4465483 - DNA, 25 bp, Homo sapien
gagcgaagggcggacgtactcgcca

SEQ ID NO: 4465484 - DNA, 25 bp, Homo sapien
ctccccgcacgatgacatcaagtgt

SEQ ID NO: 4465485 - DNA, 25 bp, Homo sapien
ttggcgttgagttgctccataaaag

SEQ ID NO: 4465486 - DNA, 25 bp, Homo sapien
catcaagtgtttggcgttgagttgc

SEQ ID NO: 4465487 - DNA, 25 bp, Homo sapien
ggcgccagccctccggtgggcaggg

SEQ ID NO: 4465488 - DNA, 25 bp, Homo sapien
gtgagacaggcggatctcacccacg

SEQ ID NO: 4465489 - DNA, 25 bp, Homo sapien
agcagctcctcggagaactgtgttc

SEQ ID NO: 4465490 - DNA, 25 bp, Homo sapien
ccttctggatgtgagacaggcggat

SEQ ID NO: 4465491 - DNA, 25 bp, Homo sapien
cagctcctcggagaactgtgttcct

SEQ ID NO: 4465492 - DNA, 25 bp, Homo sapien
tgtgaatgtaactatcttgtccagt

SEQ ID NO: 4465493 - DNA, 25 bp, Homo sapien
tcatgtgaatgtaactatcttgtcc

SEQ ID NO: 4465494 - DNA, 25 bp, Homo sapien
gtccagttccttaacctgtgctaag

SEQ ID NO: 4465495 - DNA, 25 bp, Homo sapien
agttccttaacctgtgctaagtcca

SEQ ID NO: 4465496 - DNA, 25 bp, Homo sapien
gacctgagcagtgtgcataggcagc

SEQ ID NO: 4465497 - DNA, 25 bp, Homo sapien
gcagtgagtaggatcatagagcggg

SEQ ID NO: 4465498 - DNA, 25 bp, Homo sapien
tagagcggggaggaaaccgagcctg

SEQ ID NO: 4465499 - DNA, 25 bp, Homo sapien
gggtggacacccttccgcagcccat

SEQ ID NO: 4465500 - DNA, 25 bp, Homo sapien
gtcttgccacgctgtgtcttcttgg

SEQ ID NO: 4465501 - DNA, 25 bp, Homo sapien
ttgccgtgggtgagaactatgaagc

SEQ ID NO: 4465502 - DNA, 25 bp, Homo sapien
gaagtgtctctagtttgctagctga

SEQ ID NO: 4465503 - DNA, 25 bp, Homo sapien
tttatgcgtctcagcagtcttgcca

SEQ ID NO: 4465504 - DNA, 25 bp, Homo sapien
agtcacagtttctcgcgtctcagcg

SEQ ID NO: 4465505 - DNA, 25 bp, Homo sapien
cactctgtggtttgcagaacttgtt

SEQ ID NO: 4465506 - DNA, 25 bp, Homo sapien
cacatgcgctgagtgatctctctgc

SEQ ID NO: 4465507 - DNA, 25 bp, Homo sapien
cttctagattctgtgcactctgtgg

SEQ ID NO: 4465508 - DNA, 25 bp, Homo sapien
tggcttgggatctcccaatccatca

SEQ ID NO: 4465509 - DNA, 25 bp, Homo sapien
ggatctcccaatccatcactttgaa

SEQ ID NO: 4465510 - DNA, 25 bp, Homo sapien
tgggatctcccaatccatcactttg

SEQ ID NO: 4465511 - DNA, 25 bp, Homo sapien
ttcatggcttgggatctcccaatcc

SEQ ID NO: 4465512 - DNA, 25 bp, Homo sapien
gtcaggaatcagaactcctgcccct

SEQ ID NO: 4465513 - DNA, 25 bp, Homo sapien
ctgtgtcaggaatcagaactcctgc

SEQ ID NO: 4465514 - DNA, 25 bp, Homo sapien
ctgtccaggtgtgctctcgccattg

SEQ ID NO: 4465515 - DNA, 25 bp, Homo sapien
tctcgccattgttccatctgtgatg

SEQ ID NO: 4465516 - DNA, 25 bp, Homo sapien
agcaaggatgtcaagaagaagatct

SEQ ID NO: 4465517 - DNA, 25 bp, Homo sapien
tcagcaaggatgtcaagaagaagat

SEQ ID NO: 4465518 - DNA, 25 bp, Homo sapien
cagcaaggatgtcaagaagaagatc

SEQ ID NO: 4465519 - DNA, 25 bp, Homo sapien
ctagttctgggagtgtctcagaaat

SEQ ID NO: 4465520 - DNA, 25 bp, Homo sapien
gatggatctgagaatctaatgtgat

SEQ ID NO: 4465521 - DNA, 25 bp, Homo sapien
gataattgtgagaagtttctagagg

SEQ ID NO: 4465522 - DNA, 25 bp, Homo sapien
tggagcccagtgtatgtgtttgcga

SEQ ID NO: 4465523 - DNA, 25 bp, Homo sapien
gtctgaaagggatctctggtctgca

SEQ ID NO: 4465524 - DNA, 25 bp, Homo sapien
gctgggcatgcagtatccttatcat

SEQ ID NO: 4465525 - DNA, 25 bp, Homo sapien
cttggggtttgagccccaaatgtct

SEQ ID NO: 4465526 - DNA, 25 bp, Homo sapien
gaaagggatctctggtctgcagatc

SEQ ID NO: 4465527 - DNA, 25 bp, Homo sapien
acagaatgacattggctttgtgggt

SEQ ID NO: 4465528 - DNA, 25 bp, Homo sapien
cagaatgacattggctttgtgggtt

SEQ ID NO: 4465529 - DNA, 25 bp, Homo sapien
tagacatgatttcatgccatcctcc

SEQ ID NO: 4465530 - DNA, 25 bp, Homo sapien
gctctttgttatttgcaaaaggcat

SEQ ID NO: 4465531 - DNA, 25 bp, Homo sapien
tttgcaaaaggcatagacatgattt

SEQ ID NO: 4465532 - DNA, 25 bp, Homo sapien
tgcaaaaggcatagacatgatttca

SEQ ID NO: 4465533 - DNA, 25 bp, Homo sapien
tcactgggtccagagatgtcgctag

SEQ ID NO: 4465534 - DNA, 25 bp, Homo sapien
agtccctctgaattcgacattggag

SEQ ID NO: 4465535 - DNA, 25 bp, Homo sapien
tctgaattcgacattggagtttctc

SEQ ID NO: 4465536 - DNA, 25 bp, Homo sapien
aggtggccaaaccctctgcccttgt

SEQ ID NO: 4465537 - DNA, 25 bp, Homo sapien
gcaaactgggatttgcccatctgct

SEQ ID NO: 4465538 - DNA, 25 bp, Homo sapien
tgggcaaactgggatttgcccatct

SEQ ID NO: 4465539 - DNA, 25 bp, Homo sapien
ggcaaactgggatttgcccatctgc

SEQ ID NO: 4465540 - DNA, 25 bp, Homo sapien
ctttgggcaaactgggatttgccca

SEQ ID NO: 4465541 - DNA, 25 bp, Homo sapien
actgagtcttaaagagggccggtca

SEQ ID NO: 4465542 - DNA, 25 bp, Homo sapien
cactgagtcttaaagagggccggtc

SEQ ID NO: 4465543 - DNA, 25 bp, Homo sapien
ctgagtcttaaagagggccggtcac

SEQ ID NO: 4465544 - DNA, 25 bp, Homo sapien
tgagtcttaaagagggccggtcact

SEQ ID NO: 4465545 - DNA, 25 bp, Homo sapien
tgaggtgtagtgaacatcccagagg

SEQ ID NO: 4465546 - DNA, 25 bp, Homo sapien
ccttctatgttttgggactgcatcc

SEQ ID NO: 4465547 - DNA, 25 bp, Homo sapien
tcattgcttggatctggagtaaatc

SEQ ID NO: 4465548 - DNA, 25 bp, Homo sapien
ctctgaacttgcttggtcttgtgtg

SEQ ID NO: 4465549 - DNA, 25 bp, Homo sapien
ccagttgcaggaagtagacggtagt

SEQ ID NO: 4465550 - DNA, 25 bp, Homo sapien
cctgcatgggttaagaggcctgagc

SEQ ID NO: 4465551 - DNA, 25 bp, Homo sapien
tccggcagctccacaagagatctgg

SEQ ID NO: 4465552 - DNA, 25 bp, Homo sapien
taaatactgaggcatgtggtccgtg

SEQ ID NO: 4465553 - DNA, 25 bp, Homo sapien
gcatcttgggatcaaatacagcctg

SEQ ID NO: 4465554 - DNA, 25 bp, Homo sapien
ctgcatcttgggatcaaatacagcc

SEQ ID NO: 4465555 - DNA, 25 bp, Homo sapien
tgcatcttgggatcaaatacagcct

SEQ ID NO: 4465556 - DNA, 25 bp, Homo sapien
catcttgggatcaaatacagcctgg

SEQ ID NO: 4465557 - DNA, 25 bp, Homo sapien
taacctgcttctggtactgctccat

SEQ ID NO: 4465558 - DNA, 25 bp, Homo sapien
gctttgttcctctctcacacttgat

SEQ ID NO: 4465559 - DNA, 25 bp, Homo sapien
tctttttctaacctgcttctggtac

SEQ ID NO: 4465560 - DNA, 25 bp, Homo sapien
tgctccatcaagagataaagcaagc

SEQ ID NO: 4465561 - DNA, 25 bp, Homo sapien
cagatacctcgatagtctcctgggt

SEQ ID NO: 4465562 - DNA, 25 bp, Homo sapien
gtctccccgactcctatcgtgctca

SEQ ID NO: 4465563 - DNA, 25 bp, Homo sapien
ggtctccccgactcctatcgtgctc

SEQ ID NO: 4465564 - DNA, 25 bp, Homo sapien
ctccagatacctcgatagtctcctg

SEQ ID NO: 4465565 - DNA, 25 bp, Homo sapien
ccttgctgaccagtcacttggtccc

SEQ ID NO: 4465566 - DNA, 25 bp, Homo sapien
tgctgaccagtcacttggtcccacg

SEQ ID NO: 4465567 - DNA, 25 bp, Homo sapien
gaccagtcacttggtcccacggcct

SEQ ID NO: 4465568 - DNA, 25 bp, Homo sapien
gctgaccagtcacttggtcccacgg

SEQ ID NO: 4465569 - DNA, 25 bp, Homo sapien
cctggctagctttgccggagtcgag

SEQ ID NO: 4465570 - DNA, 25 bp, Homo sapien
gctggcacctggctctttagagcag

SEQ ID NO: 4465571 - DNA, 25 bp, Homo sapien
gctctttagagcagccctggctagc

SEQ ID NO: 4465572 - DNA, 25 bp, Homo sapien
tttgccggagtcgaggcccctggct

SEQ ID NO: 4465573 - DNA, 25 bp, Homo sapien
agacagtatccccatgggtgctcta

SEQ ID NO: 4465574 - DNA, 25 bp, Homo sapien
tctacaaagtgtcctagagcagcat

SEQ ID NO: 4465575 - DNA, 25 bp, Homo sapien
tagagcagcattcaacctggctccc

SEQ ID NO: 4465576 - DNA, 25 bp, Homo sapien
catgggtgctctacaaagtgtccta

SEQ ID NO: 4465577 - DNA, 25 bp, Homo sapien
ctaaggagggagatagttctcttag

SEQ ID NO: 4465578 - DNA, 25 bp, Homo sapien
ggagggagatagttctcttagagcc

SEQ ID NO: 4465579 - DNA, 25 bp, Homo sapien
gagatagttctcttagagcctggtg

SEQ ID NO: 4465580 - DNA, 25 bp, Homo sapien
gggagatagttctcttagagcctgg

SEQ ID NO: 4465581 - DNA, 25 bp, Homo sapien
tacagcagaacggagcttgcacttt

SEQ ID NO: 4465582 - DNA, 25 bp, Homo sapien
tttatttggatactaatgagcgccc

SEQ ID NO: 4465583 - DNA, 25 bp, Homo sapien
tctcaagggcatgcagtctggctgg

SEQ ID NO: 4465584 - DNA, 25 bp, Homo sapien
gctggtgtcagaccccgcttgagaa

SEQ ID NO: 4465585 - DNA, 25 bp, Homo sapien
aagcgcaagagagcgtctttgcctg

SEQ ID NO: 4465586 - DNA, 25 bp, Homo sapien
gagcgtctttgcctgcagacttgct

SEQ ID NO: 4465587 - DNA, 25 bp, Homo sapien
aagagagcgtctttgcctgcagact

SEQ ID NO: 4465588 - DNA, 25 bp, Homo sapien
gcaagagagcgtctttgcctgcaga

SEQ ID NO: 4465589 - DNA, 25 bp, Homo sapien
tgaaatcatattgagaagaaaccca

SEQ ID NO: 4465590 - DNA, 25 bp, Homo sapien
agtaatgaaatcatattgagaagaa

SEQ ID NO: 4465591 - DNA, 25 bp, Homo sapien
gaaatcatattgagaagaaacccac

SEQ ID NO: 4465592 - DNA, 25 bp, Homo sapien
aatgaaatcatattgagaagaaacc

SEQ ID NO: 4465593 - DNA, 25 bp, Homo sapien
gtgcaaaccagggagtcccctgctg

SEQ ID NO: 4465594 - DNA, 25 bp, Homo sapien
tgcaaaccagggagtcccctgctga

SEQ ID NO: 4465595 - DNA, 25 bp, Homo sapien
caaaccagggagtcccctgctgacc

SEQ ID NO: 4465596 - DNA, 25 bp, Homo sapien
gcaaaccagggagtcccctgctgac

SEQ ID NO: 4465597 - DNA, 25 bp, Homo sapien
tttgtaaaagctctgcgggaccaat

SEQ ID NO: 4465598 - DNA, 25 bp, Homo sapien
ccttttcggtgatcctcttcttgcc

SEQ ID NO: 4465599 - DNA, 25 bp, Homo sapien
tgtgatcccttttcggtgatcctct

SEQ ID NO: 4465600 - DNA, 25 bp, Homo sapien
attctctcgggccttccgcgcagag

SEQ ID NO: 4465601 - DNA, 25 bp, Homo sapien
ttcccaagtgtcccagcgctgggtt

SEQ ID NO: 4465602 - DNA, 25 bp, Homo sapien
ccaagtgtcccagcgctgggttctt

SEQ ID NO: 4465603 - DNA, 25 bp, Homo sapien
aagtgtcccagcgctgggttctttg

SEQ ID NO: 4465604 - DNA, 25 bp, Homo sapien
tcccaagtgtcccagcgctgggttc

SEQ ID NO: 4465605 - DNA, 25 bp, Homo sapien
taaaaatgtgttgggcagcagaacg

SEQ ID NO: 4465606 - DNA, 25 bp, Homo sapien
aataaaaatgtgttgggcagcagaa

SEQ ID NO: 4465607 - DNA, 25 bp, Homo sapien
atcaataaaaatgtgttgggcagca

SEQ ID NO: 4465608 - DNA, 25 bp, Homo sapien
tcatcaataaaaatgtgttgggcag

SEQ ID NO: 4465609 - DNA, 25 bp, Homo sapien
tcacaaaggagctttttaccacaac

SEQ ID NO: 4465610 - DNA, 25 bp, Homo sapien
gagctccgaggacctccggctgaca

SEQ ID NO: 4465611 - DNA, 25 bp, Homo sapien
gctggtgctgcacaggcttcacaaa

SEQ ID NO: 4465612 - DNA, 25 bp, Homo sapien
tccggctgacagatttgcagcctcc

SEQ ID NO: 4465613 - DNA, 25 bp, Homo sapien
tccttgcctgagagtagcttctcgt

SEQ ID NO: 4465614 - DNA, 25 bp, Homo sapien
ccttgcctgagagtagcttctcgtc

SEQ ID NO: 4465615 - DNA, 25 bp, Homo sapien
cctgtttctctatgacagtcccgta

SEQ ID NO: 4465616 - DNA, 25 bp, Homo sapien
attttgctgtgatatgatgcaggtg

SEQ ID NO: 4465617 - DNA, 25 bp, Homo sapien
aaattttgctgtgatatgatgcagg

SEQ ID NO: 4465618 - DNA, 25 bp, Homo sapien
ttctctatgacagtcccgtaaagaa

SEQ ID NO: 4465619 - DNA, 25 bp, Homo sapien
tgagaatgttggcagaccaccagct

SEQ ID NO: 4465620 - DNA, 25 bp, Homo sapien
ggccaagctcccttgaataagtcga

SEQ ID NO: 4465621 - DNA, 25 bp, Homo sapien
ttttccttggattccaggagcagca

SEQ ID NO: 4465622 - DNA, 25 bp, Homo sapien
tctcagcgtacattcttaaatgggt

SEQ ID NO: 4465623 - DNA, 25 bp, Homo sapien
ctttttaatgtgagcctgaataact

SEQ ID NO: 4465624 - DNA, 25 bp, Homo sapien
tgtgagcctgaataactggaggaca

SEQ ID NO: 4465625 - DNA, 25 bp, Homo sapien
tttaatgtgagcctgaataactgga

SEQ ID NO: 4465626 - DNA, 25 bp, Homo sapien
gagcctgaataactggaggacagga

SEQ ID NO: 4465627 - DNA, 25 bp, Homo sapien
ctgaatgctgtcaccctggctcctg

SEQ ID NO: 4465628 - DNA, 25 bp, Homo sapien
tcctggctcgagctgtttcctctgc

SEQ ID NO: 4465629 - DNA, 25 bp, Homo sapien
tgcgaggcttgcctctctccatagc

SEQ ID NO: 4465630 - DNA, 25 bp, Homo sapien
cctgactgtggagcagatcctgaat

SEQ ID NO: 4465631 - DNA, 25 bp, Homo sapien
tctcctgcatttgatcctgactgac

SEQ ID NO: 4465632 - DNA, 25 bp, Homo sapien
ggactctcctgcatttgatcctgac

SEQ ID NO: 4465633 - DNA, 25 bp, Homo sapien
gactctcctgcatttgatcctgact

SEQ ID NO: 4465634 - DNA, 25 bp, Homo sapien
actctcctgcatttgatcctgactg

SEQ ID NO: 4465635 - DNA, 25 bp, Homo sapien
ctgaaggcagcggtagcaccaggat

SEQ ID NO: 4465636 - DNA, 25 bp, Homo sapien
tgaaggcagcggtagcaccaggata

SEQ ID NO: 4465637 - DNA, 25 bp, Homo sapien
tctgaaggcagcggtagcaccagga

SEQ ID NO: 4465638 - DNA, 25 bp, Homo sapien
tggtcagctcctgacaccataatgc

SEQ ID NO: 4465639 - DNA, 25 bp, Homo sapien
gctcctgacaccataatgctccttg

SEQ ID NO: 4465640 - DNA, 25 bp, Homo sapien
ggtcagctcctgacaccataatgct

SEQ ID NO: 4465641 - DNA, 25 bp, Homo sapien
tgacaccataatgctccttgcttgc

SEQ ID NO: 4465642 - DNA, 25 bp, Homo sapien
tcttctggctagaaatggagcccag

SEQ ID NO: 4465643 - DNA, 25 bp, Homo sapien
gggtcttctggctagaaatggagcc

SEQ ID NO: 4465644 - DNA, 25 bp, Homo sapien
ttctggctagaaatggagcccagaa

SEQ ID NO: 4465645 - DNA, 25 bp, Homo sapien
agctggggtcttctggctagaaatg

SEQ ID NO: 4465646 - DNA, 25 bp, Homo sapien
gatggaaaatgttgtggtatcactt

SEQ ID NO: 4465647 - DNA, 25 bp, Homo sapien
tctttgccactaccaagatggaaaa

SEQ ID NO: 4465648 - DNA, 25 bp, Homo sapien
cttccattctgttgacatctctttg

SEQ ID NO: 4465649 - DNA, 25 bp, Homo sapien
tgttgtggtatcacttatttcccct

SEQ ID NO: 4465650 - DNA, 25 bp, Homo sapien
atgaaggagatgagggggttttctt

SEQ ID NO: 4465651 - DNA, 25 bp, Homo sapien
cttttatgaaggagatgagggggtt

SEQ ID NO: 4465652 - DNA, 25 bp, Homo sapien
ttatgaaggagatgagggggttttc

SEQ ID NO: 4465653 - DNA, 25 bp, Homo sapien
tgaaggagatgagggggttttcttg

SEQ ID NO: 4465654 - DNA, 25 bp, Homo sapien
gaagaaagatttatgttcggtgcca

SEQ ID NO: 4465655 - DNA, 25 bp, Homo sapien
ggacacagacaagcctctgagtaac

SEQ ID NO: 4465656 - DNA, 25 bp, Homo sapien
ggagaagccaaagttccgaataatg

SEQ ID NO: 4465657 - DNA, 25 bp, Homo sapien
ggtgccattgttgtaattaccgcat

SEQ ID NO: 4465658 - DNA, 25 bp, Homo sapien
gacacccacccccacttagcatcca

SEQ ID NO: 4465659 - DNA, 25 bp, Homo sapien
cggacacccacccccacttagcatc

SEQ ID NO: 4465660 - DNA, 25 bp, Homo sapien
acacccacccccacttagcatccat

SEQ ID NO: 4465661 - DNA, 25 bp, Homo sapien
tccggacacccacccccacttagca

SEQ ID NO: 4465662 - DNA, 25 bp, Homo sapien
tttttatggcagtgatgcgttgtgg

SEQ ID NO: 4465663 - DNA, 25 bp, Homo sapien
tgcgttgtggaaagtgcgtctgcct

SEQ ID NO: 4465664 - DNA, 25 bp, Homo sapien
tctgcctaggaaggcaggccggcat

SEQ ID NO: 4465665 - DNA, 25 bp, Homo sapien
caggccggcatgctttcaaatctta

SEQ ID NO: 4465666 - DNA, 25 bp, Homo sapien
tgcctaatggtatccacccaccggg

SEQ ID NO: 4465667 - DNA, 25 bp, Homo sapien
aagatctgtccttttccaagtggta

SEQ ID NO: 4465668 - DNA, 25 bp, Homo sapien
tgggtcctcaaagatctgtcctttt

SEQ ID NO: 4465669 - DNA, 25 bp, Homo sapien
tcttccgcatagacctctgcctaat

SEQ ID NO: 4465670 - DNA, 25 bp, Homo sapien
gcagtggttagagccgggcacctcc

SEQ ID NO: 4465671 - DNA, 25 bp, Homo sapien
tccccgcaatgcagtcctagagcag

SEQ ID NO: 4465672 - DNA, 25 bp, Homo sapien
gggacgccccgtcaatcacttctta

SEQ ID NO: 4465673 - DNA, 25 bp, Homo sapien
aaatgattaaccgggccgggcagtg

SEQ ID NO: 4465674 - DNA, 25 bp, Homo sapien
tgaggacgtccggggctattacaaa

SEQ ID NO: 4465675 - DNA, 25 bp, Homo sapien
gcacttgaggacgtccggggctatt

SEQ ID NO: 4465676 - DNA, 25 bp, Homo sapien
gggcacttgaggacgtccggggcta

SEQ ID NO: 4465677 - DNA, 25 bp, Homo sapien
cttgaggacgtccggggctattaca

SEQ ID NO: 4465678 - DNA, 25 bp, Homo sapien
tcaaggggccgcttgggccggcata

SEQ ID NO: 4465679 - DNA, 25 bp, Homo sapien
caaggggccgcttgggccggcatac

SEQ ID NO: 4465680 - DNA, 25 bp, Homo sapien
gccgctccgcaaagtgtaaagaaga

SEQ ID NO: 4465681 - DNA, 25 bp, Homo sapien
tcaagtgagataaacgtagcctggg

SEQ ID NO: 4465682 - DNA, 25 bp, Homo sapien
tttatacacgaagaaacaagctggg

SEQ ID NO: 4465683 - DNA, 25 bp, Homo sapien
gacttagcgttaggctccttgcggc

SEQ ID NO: 4465684 - DNA, 25 bp, Homo sapien
tcaaagaaagcacgggcttccggac

SEQ ID NO: 4465685 - DNA, 25 bp, Homo sapien
taactccgagatccgggttctgcag

SEQ ID NO: 4465686 - DNA, 25 bp, Homo sapien
gcagagtccggctgtgttccgaagt

SEQ ID NO: 4465687 - DNA, 25 bp, Homo sapien
gctccgtagaacgtgtaactccgag

SEQ ID NO: 4465688 - DNA, 25 bp, Homo sapien
cggaggctccgtctggtgtcgcttc

SEQ ID NO: 4465689 - DNA, 25 bp, Homo sapien
ctccgtctggtgtcgcttctagccg

SEQ ID NO: 4465690 - DNA, 25 bp, Homo sapien
cgtctggtgtcgcttctagccgggc

SEQ ID NO: 4465691 - DNA, 25 bp, Homo sapien
tggtgtcgcttctagccgggcgctc

SEQ ID NO: 4465692 - DNA, 25 bp, Homo sapien
ggaacttggctgagtccggagcaat

SEQ ID NO: 4465693 - DNA, 25 bp, Homo sapien
ccggagcaatgcagacgctggagct

SEQ ID NO: 4465694 - DNA, 25 bp, Homo sapien
tggctgagtccggagcaatgcagac

SEQ ID NO: 4465695 - DNA, 25 bp, Homo sapien
gcaatgcagacgctggagctcaggt

SEQ ID NO: 4465696 - DNA, 25 bp, Homo sapien
acgcgcccgcctcatcgcgtaccct

SEQ ID NO: 4465697 - DNA, 25 bp, Homo sapien
cgcgctcgaggcctccgcggactcc

SEQ ID NO: 4465698 - DNA, 25 bp, Homo sapien
ccgcctgcggcccctagacggcagg

SEQ ID NO: 4465699 - DNA, 25 bp, Homo sapien
ttcgctggcccggccgtcgggcctc

SEQ ID NO: 4465700 - DNA, 25 bp, Homo sapien
tcagcccgcagcctgttttcaaact

SEQ ID NO: 4465701 - DNA, 25 bp, Homo sapien
tcagcctccgagcttctcagcccgc

SEQ ID NO: 4465702 - DNA, 25 bp, Homo sapien
acttcaccatccctgacggatgaaa

SEQ ID NO: 4465703 - DNA, 25 bp, Homo sapien
ctgacggatgaaagaccccgacctc

SEQ ID NO: 4465704 - DNA, 25 bp, Homo sapien
gttaggctcaatctctatactgaag

SEQ ID NO: 4465705 - DNA, 25 bp, Homo sapien
gctgagattgctctaagattctggg

SEQ ID NO: 4465706 - DNA, 25 bp, Homo sapien
tctgcttagaccatgaaggatgttc

SEQ ID NO: 4465707 - DNA, 25 bp, Homo sapien
ggaaagaacttctcatcaatgtgtc

SEQ ID NO: 4465708 - DNA, 25 bp, Homo sapien
tctgaacagtgttagagtttaagct

SEQ ID NO: 4465709 - DNA, 25 bp, Homo sapien
catctgcagactcacagcagttaaa

SEQ ID NO: 4465710 - DNA, 25 bp, Homo sapien
gggcaactcgtaacctttgtctcag

SEQ ID NO: 4465711 - DNA, 25 bp, Homo sapien
taagccaaagttcattcaacgaccc

SEQ ID NO: 4465712 - DNA, 25 bp, Homo sapien
caccttctacctcacatggctatgg

SEQ ID NO: 4465713 - DNA, 25 bp, Homo sapien
gacttgtatcaagcacgggcttcag

SEQ ID NO: 4465714 - DNA, 25 bp, Homo sapien
tacgctaagttcgttccagagcctg

SEQ ID NO: 4465715 - DNA, 25 bp, Homo sapien
cacagggcctaatcaacggaaagca

SEQ ID NO: 4465716 - DNA, 25 bp, Homo sapien
tatctcaggacaacctaattcttga

SEQ ID NO: 4465717 - DNA, 25 bp, Homo sapien
taagcattctaggaaaccccaggct

SEQ ID NO: 4465718 - DNA, 25 bp, Homo sapien
tttatcttcaactaagctgccactg

SEQ ID NO: 4465719 - DNA, 25 bp, Homo sapien
tcaaatctagatgtgccacctctat

SEQ ID NO: 4465720 - DNA, 25 bp, Homo sapien
aacagataaccagaccaccacttaa

SEQ ID NO: 4465721 - DNA, 25 bp, Homo sapien
acagataaccagaccaccacttaac

SEQ ID NO: 4465722 - DNA, 25 bp, Homo sapien
cacaagcctattctatgctgaaatt

SEQ ID NO: 4465723 - DNA, 25 bp, Homo sapien
tgtacactataaatcctctctgaac

SEQ ID NO: 4465724 - DNA, 25 bp, Homo sapien
acttgagtcccttgaaattattagg

SEQ ID NO: 4465725 - DNA, 25 bp, Homo sapien
cctctctgaactgcatgttcacaag

SEQ ID NO: 4465726 - DNA, 25 bp, Homo sapien
cttccaaatgaaacatttttagatg

SEQ ID NO: 4465727 - DNA, 25 bp, Homo sapien
ggataggagccactatactgttaaa

SEQ ID NO: 4465728 - DNA, 25 bp, Homo sapien
caaggcactgactgttgcaaagcag

SEQ ID NO: 4465729 - DNA, 25 bp, Homo sapien
taaagactggaagtagctgttatca

SEQ ID NO: 4465730 - DNA, 25 bp, Homo sapien
aaatatattccagacggacctaact

SEQ ID NO: 4465731 - DNA, 25 bp, Homo sapien
cagaaggtagaagctatcacatatg

SEQ ID NO: 4465732 - DNA, 25 bp, Homo sapien
tccagaaggtagaagctatcacata

SEQ ID NO: 4465733 - DNA, 25 bp, Homo sapien
ctccagaaggtagaagctatcacat

SEQ ID NO: 4465734 - DNA, 25 bp, Homo sapien
tctccagaaggtagaagctatcaca

SEQ ID NO: 4465735 - DNA, 25 bp, Homo sapien
caggagggctcctttgcatggagga

SEQ ID NO: 4465736 - DNA, 25 bp, Homo sapien
ggagatgaagaagctctatcctctc

SEQ ID NO: 4465737 - DNA, 25 bp, Homo sapien
cttcagctacggcttcagaatcttc

SEQ ID NO: 4465738 - DNA, 25 bp, Homo sapien
tcaagctcttcaagatggcaggagg

SEQ ID NO: 4465739 - DNA, 25 bp, Homo sapien
acatttcccatggaaacagtattaa

SEQ ID NO: 4465740 - DNA, 25 bp, Homo sapien
cacatttcccatggaaacagtatta

SEQ ID NO: 4465741 - DNA, 25 bp, Homo sapien
aacacatttcccatggaaacagtat

SEQ ID NO: 4465742 - DNA, 25 bp, Homo sapien
acacatttcccatggaaacagtatt

SEQ ID NO: 4465743 - DNA, 25 bp, Homo sapien
tgagggcataatacagtcacaccag

SEQ ID NO: 4465744 - DNA, 25 bp, Homo sapien
cagtactctctgagggcataataca

SEQ ID NO: 4465745 - DNA, 25 bp, Homo sapien
aacatacagtactctctgagggcat

SEQ ID NO: 4465746 - DNA, 25 bp, Homo sapien
tctctgagggcataatacagtcaca

SEQ ID NO: 4465747 - DNA, 25 bp, Homo sapien
ctgccaagtgtggtggtgattgcat

SEQ ID NO: 4465748 - DNA, 25 bp, Homo sapien
caagtcaaacagacccaagggcttt

SEQ ID NO: 4465749 - DNA, 25 bp, Homo sapien
caagggcttttgttggaccggcaca

SEQ ID NO: 4465750 - DNA, 25 bp, Homo sapien
agtcaaacagacccaagggcttttg

SEQ ID NO: 4465751 - DNA, 25 bp, Homo sapien
tagcagattgtcttggtcatcaaac

SEQ ID NO: 4465752 - DNA, 25 bp, Homo sapien
cccagttgtatcacagaacaaaggg

SEQ ID NO: 4465753 - DNA, 25 bp, Homo sapien
gagaaggaagccctacagggaatta

SEQ ID NO: 4465754 - DNA, 25 bp, Homo sapien
gaacaaagggattcaactggagaag

SEQ ID NO: 4465755 - DNA, 25 bp, Homo sapien
gttatctgtacaaagtattttcagg

SEQ ID NO: 4465756 - DNA, 25 bp, Homo sapien
gcagaatttaagtgcttctactttt

SEQ ID NO: 4465757 - DNA, 25 bp, Homo sapien
aaatctaggagaggaatctgtctct

SEQ ID NO: 4465758 - DNA, 25 bp, Homo sapien
cttcaactgcagaatttaagtgctt

SEQ ID NO: 4465759 - DNA, 25 bp, Homo sapien
gaaataaggctccatatgcacatgg

SEQ ID NO: 4465760 - DNA, 25 bp, Homo sapien
tgaggcaccttaactgcaccaggaa

SEQ ID NO: 4465761 - DNA, 25 bp, Homo sapien
ccgtaactgggaaggatcaacttca

SEQ ID NO: 4465762 - DNA, 25 bp, Homo sapien
catagactctgctcaagttgctgct

SEQ ID NO: 4465763 - DNA, 25 bp, Homo sapien
ggttaaaggtacttgtgcatcttca

SEQ ID NO: 4465764 - DNA, 25 bp, Homo sapien
gtagctactgcaatccatacatact

SEQ ID NO: 4465765 - DNA, 25 bp, Homo sapien
cagtatgtactgtagctactgcaat

SEQ ID NO: 4465766 - DNA, 25 bp, Homo sapien
tatggttggttaaaggtacttgtgc

SEQ ID NO: 4465767 - DNA, 25 bp, Homo sapien
aagctacgtaccaaattcttgacat

SEQ ID NO: 4465768 - DNA, 25 bp, Homo sapien
aggcagacattgaggtgagccgata

SEQ ID NO: 4465769 - DNA, 25 bp, Homo sapien
aaatagcctggaaagctacgtacca

SEQ ID NO: 4465770 - DNA, 25 bp, Homo sapien
agacattgaggtgagccgatattgc

SEQ ID NO: 4465771 - DNA, 25 bp, Homo sapien
catttctactgaaatcttcacctac

SEQ ID NO: 4465772 - DNA, 25 bp, Homo sapien
tttctactgaaatcttcacctacct

SEQ ID NO: 4465773 - DNA, 25 bp, Homo sapien
tctactgaaatcttcacctacctct

SEQ ID NO: 4465774 - DNA, 25 bp, Homo sapien
tactgaaatcttcacctacctctag

SEQ ID NO: 4465775 - DNA, 25 bp, Homo sapien
ggttaatgcatgcttcctctctggg

SEQ ID NO: 4465776 - DNA, 25 bp, Homo sapien
gaagaactgcaagcctcagagtatg

SEQ ID NO: 4465777 - DNA, 25 bp, Homo sapien
gattacattcagctacaactggagc

SEQ ID NO: 4465778 - DNA, 25 bp, Homo sapien
tctgcaggaaaaatgttacgtggct

SEQ ID NO: 4465779 - DNA, 25 bp, Homo sapien
tagtgctattgaagttactcaagtc

SEQ ID NO: 4465780 - DNA, 25 bp, Homo sapien
gttactcaagtcatgacttccacat

SEQ ID NO: 4465781 - DNA, 25 bp, Homo sapien
tattgaagttactcaagtcatgact

SEQ ID NO: 4465782 - DNA, 25 bp, Homo sapien
caattcctgttgttagtgctattga

SEQ ID NO: 4465783 - DNA, 25 bp, Homo sapien
caccacaggtgaaactgatttagga

SEQ ID NO: 4465784 - DNA, 25 bp, Homo sapien
tacatcatcgtcactatcttgcaga

SEQ ID NO: 4465785 - DNA, 25 bp, Homo sapien
taaacagaatgaggacaccacaggt

SEQ ID NO: 4465786 - DNA, 25 bp, Homo sapien
tatgtttgatgagcacagagtagga

SEQ ID NO: 4465787 - DNA, 25 bp, Homo sapien
acaatattcctcattcggtcatctc

SEQ ID NO: 4465788 - DNA, 25 bp, Homo sapien
cggtattttccatttcgcactattc

SEQ ID NO: 4465789 - DNA, 25 bp, Homo sapien
catttcgcactattcacttatttaa

SEQ ID NO: 4465790 - DNA, 25 bp, Homo sapien
attcctcattcggtcatctccatct

SEQ ID NO: 4465791 - DNA, 25 bp, Homo sapien
ttactaccgtgcactgaaaaaagat

SEQ ID NO: 4465792 - DNA, 25 bp, Homo sapien
gaaaaaagatacatcaagtagcagg

SEQ ID NO: 4465793 - DNA, 25 bp, Homo sapien
gacggactttttgtcagataaggac

SEQ ID NO: 4465794 - DNA, 25 bp, Homo sapien
taagtatagtatttgatggtcccca

SEQ ID NO: 4465795 - DNA, 25 bp, Homo sapien
cactatgcccggccataactcaatt

SEQ ID NO: 4465796 - DNA, 25 bp, Homo sapien
ctcaagagccaattctaggtgttcc

SEQ ID NO: 4465797 - DNA, 25 bp, Homo sapien
acaactatctctatttctcaagagc

SEQ ID NO: 4465798 - DNA, 25 bp, Homo sapien
tttacaactatctctatttctcaag

SEQ ID NO: 4465799 - DNA, 25 bp, Homo sapien
agaggacctggaattcacaatggaa

SEQ ID NO: 4465800 - DNA, 25 bp, Homo sapien
tgaaatcactaaaaggtctggctgt

SEQ ID NO: 4465801 - DNA, 25 bp, Homo sapien
tctgcaggcagttactgctggtggt

SEQ ID NO: 4465802 - DNA, 25 bp, Homo sapien
tgctggtggtaagtttaaagaggac

SEQ ID NO: 4465803 - DNA, 25 bp, Homo sapien
tgtaagtgttctctgactttctgta

SEQ ID NO: 4465804 - DNA, 25 bp, Homo sapien
ccagcttggtgtcattaaccacaaa

SEQ ID NO: 4465805 - DNA, 25 bp, Homo sapien
ggtgtcattaaccacaaaatcatca

SEQ ID NO: 4465806 - DNA, 25 bp, Homo sapien
actttctgtaccagtcccagcttgg

SEQ ID NO: 4465807 - DNA, 25 bp, Homo sapien
ttgctgtttagtgttgagttttcca

SEQ ID NO: 4465808 - DNA, 25 bp, Homo sapien
tatgcctgtcagctgtgaaagctga

SEQ ID NO: 4465809 - DNA, 25 bp, Homo sapien
tcttttcttatgcctgtcagctgtg

SEQ ID NO: 4465810 - DNA, 25 bp, Homo sapien
tgctgtttagtgttgagttttccaa

SEQ ID NO: 4465811 - DNA, 25 bp, Homo sapien
catgtgttccccaaattccgaaggc

SEQ ID NO: 4465812 - DNA, 25 bp, Homo sapien
aaattccgaaggcctgtggcacaaa

SEQ ID NO: 4465813 - DNA, 25 bp, Homo sapien
tccgaaggcctgtggcacaaatggc

SEQ ID NO: 4465814 - DNA, 25 bp, Homo sapien
ttccgaaggcctgtggcacaaatgg

SEQ ID NO: 4465815 - DNA, 25 bp, Homo sapien
cctggtgtggtatgtccgccttcct

SEQ ID NO: 4465816 - DNA, 25 bp, Homo sapien
ttggctcctggtgtggtatgtccgc

SEQ ID NO: 4465817 - DNA, 25 bp, Homo sapien
cgggcagttctttgaaataacagca

SEQ ID NO: 4465818 - DNA, 25 bp, Homo sapien
attccttaactccacggcgggcagt

SEQ ID NO: 4465819 - DNA, 25 bp, Homo sapien
caccgccatgtttgtacactttgag

SEQ ID NO: 4465820 - DNA, 25 bp, Homo sapien
tacagcactgggtgagttataggcc

SEQ ID NO: 4465821 - DNA, 25 bp, Homo sapien
ggacagtgccctcagattagtgaga

SEQ ID NO: 4465822 - DNA, 25 bp, Homo sapien
ttaactctgagtgtgcccatgcacc

SEQ ID NO: 4465823 - DNA, 25 bp, Homo sapien
aataaggactctgggctaaatgcag

SEQ ID NO: 4465824 - DNA, 25 bp, Homo sapien
taaaataaggactctgggctaaatg

SEQ ID NO: 4465825 - DNA, 25 bp, Homo sapien
ggctgccttgccataaagcacagag

SEQ ID NO: 4465826 - DNA, 25 bp, Homo sapien
gcacagagtgtctttctaaactctt

SEQ ID NO: 4465827 - DNA, 25 bp, Homo sapien
caaacacctgtagtgcctcaaagct

SEQ ID NO: 4465828 - DNA, 25 bp, Homo sapien
ccgaatccctacagggatgacagac

SEQ ID NO: 4465829 - DNA, 25 bp, Homo sapien
cttgcttcagaagggtaaaatcggc

SEQ ID NO: 4465830 - DNA, 25 bp, Homo sapien
aaagctgctatcacccgaatcccta

SEQ ID NO: 4465831 - DNA, 25 bp, Homo sapien
gcagccccgtgctcacaagcacagc

SEQ ID NO: 4465832 - DNA, 25 bp, Homo sapien
gacggcagccccgtgctcacaagca

SEQ ID NO: 4465833 - DNA, 25 bp, Homo sapien
cggcagccccgtgctcacaagcaca

SEQ ID NO: 4465834 - DNA, 25 bp, Homo sapien
agccccgtgctcacaagcacagcca

SEQ ID NO: 4465835 - DNA, 25 bp, Homo sapien
tgaaaccgccctgaagttccaagtg

SEQ ID NO: 4465836 - DNA, 25 bp, Homo sapien
taggtggtccaaaaggtagcgcatg

SEQ ID NO: 4465837 - DNA, 25 bp, Homo sapien
tcatgggcgtcctgctgttgatagc

SEQ ID NO: 4465838 - DNA, 25 bp, Homo sapien
cctgcagaattgctgagcgggaaac

SEQ ID NO: 4465839 - DNA, 25 bp, Homo sapien
gagaacttacaaatgcctcgatttc

SEQ ID NO: 4465840 - DNA, 25 bp, Homo sapien
gaacttacaaatgcctcgatttcat

SEQ ID NO: 4465841 - DNA, 25 bp, Homo sapien
tatacttgggggctgctagtacatg

SEQ ID NO: 4465842 - DNA, 25 bp, Homo sapien
ctgagaacttacaaatgcctcgatt

SEQ ID NO: 4465843 - DNA, 25 bp, Homo sapien
gatgacaaaacctactcgagcaatt

SEQ ID NO: 4465844 - DNA, 25 bp, Homo sapien
gagctgtaggacctagtggccattt

SEQ ID NO: 4465845 - DNA, 25 bp, Homo sapien
gggactctaactgaccctttcatgc

SEQ ID NO: 4465846 - DNA, 25 bp, Homo sapien
gttaaacctactgcaatgatgacaa

SEQ ID NO: 4465847 - DNA, 25 bp, Homo sapien
taaagcccctacagatgactgcctt

SEQ ID NO: 4465848 - DNA, 25 bp, Homo sapien
gggcaacatgactccttccatttcc

SEQ ID NO: 4465849 - DNA, 25 bp, Homo sapien
agatcacatgcatgactctgcacag

SEQ ID NO: 4465850 - DNA, 25 bp, Homo sapien
tccccaagagtaactaacactggcc

SEQ ID NO: 4465851 - DNA, 25 bp, Homo sapien
tagccgtgacaacagtagatgctcc

SEQ ID NO: 4465852 - DNA, 25 bp, Homo sapien
tagattctgtcccacatatgaggca

SEQ ID NO: 4465853 - DNA, 25 bp, Homo sapien
ggaatggatcaaactttctagattc

SEQ ID NO: 4465854 - DNA, 25 bp, Homo sapien
gaatgcctccgaatatagccgtgac

SEQ ID NO: 4465855 - DNA, 25 bp, Homo sapien
agcgcttacttctgaactgacttgg

SEQ ID NO: 4465856 - DNA, 25 bp, Homo sapien
tcttagagcgcttacttctgaactg

SEQ ID NO: 4465857 - DNA, 25 bp, Homo sapien
tagagcgcttacttctgaactgact

SEQ ID NO: 4465858 - DNA, 25 bp, Homo sapien
attcttagagcgcttacttctgaac

SEQ ID NO: 4465859 - DNA, 25 bp, Homo sapien
taagctgtgtcatgcactctcctcc

SEQ ID NO: 4465860 - DNA, 25 bp, Homo sapien
gtcttctagccaaagatcatctgga

SEQ ID NO: 4465861 - DNA, 25 bp, Homo sapien
tctcctcctggatgggctcgagaag

SEQ ID NO: 4465862 - DNA, 25 bp, Homo sapien
tattaaactattctgggataagtcg

SEQ ID NO: 4465863 - DNA, 25 bp, Homo sapien
caggcctagagtacaggagcagtgc

SEQ ID NO: 4465864 - DNA, 25 bp, Homo sapien
ccaggcctagagtacaggagcagtg

SEQ ID NO: 4465865 - DNA, 25 bp, Homo sapien
cccaggcctagagtacaggagcagt

SEQ ID NO: 4465866 - DNA, 25 bp, Homo sapien
cctggccaagttaacatttctattc

SEQ ID NO: 4465867 - DNA, 25 bp, Homo sapien
ctggccaagttaacatttctattcc

SEQ ID NO: 4465868 - DNA, 25 bp, Homo sapien
gcaaaggaggctctttatgccttct

SEQ ID NO: 4465869 - DNA, 25 bp, Homo sapien
aatgcaaaggaggctctttatgcct

SEQ ID NO: 4465870 - DNA, 25 bp, Homo sapien
atgcaaaggaggctctttatgcctt

SEQ ID NO: 4465871 - DNA, 25 bp, Homo sapien
tgcaaaggaggctctttatgccttc

SEQ ID NO: 4465872 - DNA, 25 bp, Homo sapien
tttctgaaaccaaagcacctctcgc

SEQ ID NO: 4465873 - DNA, 25 bp, Homo sapien
aaccaaagcacctctcgcagccttc

SEQ ID NO: 4465874 - DNA, 25 bp, Homo sapien
cttttctgaaaccaaagcacctctc

SEQ ID NO: 4465875 - DNA, 25 bp, Homo sapien
tctgaaaccaaagcacctctcgcag

SEQ ID NO: 4465876 - DNA, 25 bp, Homo sapien
tattttatgtcagtgatggttcctg

SEQ ID NO: 4465877 - DNA, 25 bp, Homo sapien
gtctcagacattacaaccaaacttg

SEQ ID NO: 4465878 - DNA, 25 bp, Homo sapien
caaatagagtgatgctgttctcagg

SEQ ID NO: 4465879 - DNA, 25 bp, Homo sapien
tacaaccaaacttgcaaatagagtg

SEQ ID NO: 4465880 - DNA, 25 bp, Homo sapien
gacgctgtactctcagttcctagat

SEQ ID NO: 4465881 - DNA, 25 bp, Homo sapien
taaagatgtaattgtgtaacctggg

SEQ ID NO: 4465882 - DNA, 25 bp, Homo sapien
taaacatagatcacagaaggctaca

SEQ ID NO: 4465883 - DNA, 25 bp, Homo sapien
tacagtcctaaaacatccagccagc

SEQ ID NO: 4465884 - DNA, 25 bp, Homo sapien
ctcatcaagttcttctaagtcggta

SEQ ID NO: 4465885 - DNA, 25 bp, Homo sapien
tttttgcatttatggcacatatata

SEQ ID NO: 4465886 - DNA, 25 bp, Homo sapien
gtctcatcaagttcttctaagtcgg

SEQ ID NO: 4465887 - DNA, 25 bp, Homo sapien
ttatggcacatatataactctgtct

SEQ ID NO: 4465888 - DNA, 25 bp, Homo sapien
cagtcaaagtttgatactactatca

SEQ ID NO: 4465889 - DNA, 25 bp, Homo sapien
gtaaataacattttagctgccctat

SEQ ID NO: 4465890 - DNA, 25 bp, Homo sapien
tcattcttccatgcataccttatgc

SEQ ID NO: 4465891 - DNA, 25 bp, Homo sapien
cggtcaaagattgtgaacacctaat

SEQ ID NO: 4465892 - DNA, 25 bp, Homo sapien
ggaaattctacgtatgtatcaactt

SEQ ID NO: 4465893 - DNA, 25 bp, Homo sapien
tcagtggaaattctacgtatgtatc

SEQ ID NO: 4465894 - DNA, 25 bp, Homo sapien
ttaaatatgctgtccaatgaaatct

SEQ ID NO: 4465895 - DNA, 25 bp, Homo sapien
ctctcagtggaaattctacgtatgt

SEQ ID NO: 4465896 - DNA, 25 bp, Homo sapien
caccacagcggcgaggtcatacagg

SEQ ID NO: 4465897 - DNA, 25 bp, Homo sapien
cacagcggcgaggtcatacaggcag

SEQ ID NO: 4465898 - DNA, 25 bp, Homo sapien
cgaggtcatacaggcagctctccgg

SEQ ID NO: 4465899 - DNA, 25 bp, Homo sapien
gcggcgaggtcatacaggcagctct

SEQ ID NO: 4465900 - DNA, 25 bp, Homo sapien
gagtcagtcctccaagtcagacgga

SEQ ID NO: 4465901 - DNA, 25 bp, Homo sapien
gaactcgcaacctaacaagcacagg

SEQ ID NO: 4465902 - DNA, 25 bp, Homo sapien
caagcacaggtcaaagcctacggaa

SEQ ID NO: 4465903 - DNA, 25 bp, Homo sapien
agcctacggaaacatggaaaactag

SEQ ID NO: 4465904 - DNA, 25 bp, Homo sapien
gagggtttgctagaacacaaagcag

SEQ ID NO: 4465905 - DNA, 25 bp, Homo sapien
gaaatcgagggtttgctagaacaca

SEQ ID NO: 4465906 - DNA, 25 bp, Homo sapien
aactgaccagaaatcgagggtttgc

SEQ ID NO: 4465907 - DNA, 25 bp, Homo sapien
tgaccagaaatcgagggtttgctag

SEQ ID NO: 4465908 - DNA, 25 bp, Homo sapien
aaaagacctgtacaactatataatg

SEQ ID NO: 4465909 - DNA, 25 bp, Homo sapien
tacatcctagacttttgatttaaga

SEQ ID NO: 4465910 - DNA, 25 bp, Homo sapien
gaatacatcctagacttttgattta

SEQ ID NO: 4465911 - DNA, 25 bp, Homo sapien
cctgtacaactatataatgttagat

SEQ ID NO: 4465912 - DNA, 25 bp, Homo sapien
accagcggccttcgtgagttgcgta

SEQ ID NO: 4465913 - DNA, 25 bp, Homo sapien
cagtctcctcgtcagtcagtgttac

SEQ ID NO: 4465914 - DNA, 25 bp, Homo sapien
ttccacgtagaaaaggatgtaggcc

SEQ ID NO: 4465915 - DNA, 25 bp, Homo sapien
tttatccgatccagctttggcctgg

SEQ ID NO: 4465916 - DNA, 25 bp, Homo sapien
cagcaggcagttgtgtcgctcttca

SEQ ID NO: 4465917 - DNA, 25 bp, Homo sapien
tgagagacaagcagtaattacctgg

SEQ ID NO: 4465918 - DNA, 25 bp, Homo sapien
gttggtgcccatgttcagtaagtca

SEQ ID NO: 4465919 - DNA, 25 bp, Homo sapien
tacctggtctacttaatgatgccct

SEQ ID NO: 4465920 - DNA, 25 bp, Homo sapien
tgattcaaaaggaggcagacgccat

SEQ ID NO: 4465921 - DNA, 25 bp, Homo sapien
ccttctaagcaaaagagcccggatt

SEQ ID NO: 4465922 - DNA, 25 bp, Homo sapien
tgttaaaacccagagcagcgaagat

SEQ ID NO: 4465923 - DNA, 25 bp, Homo sapien
aaggagccatgtgactcagcgcgag

SEQ ID NO: 4465924 - DNA, 25 bp, Homo sapien
cacttgactggtttaattctagtac

SEQ ID NO: 4465925 - DNA, 25 bp, Homo sapien
ggtttaattctagtacatctgtcat

SEQ ID NO: 4465926 - DNA, 25 bp, Homo sapien
gactggtttaattctagtacatctg

SEQ ID NO: 4465927 - DNA, 25 bp, Homo sapien
acacttgactggtttaattctagta

SEQ ID NO: 4465928 - DNA, 25 bp, Homo sapien
gaaggcagtctagagtccatcacgc

SEQ ID NO: 4465929 - DNA, 25 bp, Homo sapien
gctgagtaggttccacaggcgagat

SEQ ID NO: 4465930 - DNA, 25 bp, Homo sapien
tgaccaacactcatggaaggcagtc

SEQ ID NO: 4465931 - DNA, 25 bp, Homo sapien
actgacgagacgcagagaccttgga

SEQ ID NO: 4465932 - DNA, 25 bp, Homo sapien
tgcagccgggggacggctgacctgc

SEQ ID NO: 4465933 - DNA, 25 bp, Homo sapien
tgagcagtggccacatgtgagtgca

SEQ ID NO: 4465934 - DNA, 25 bp, Homo sapien
cagtggccacatgtgagtgcagctg

SEQ ID NO: 4465935 - DNA, 25 bp, Homo sapien
ggccacatgtgagtgcagctgcagc

SEQ ID NO: 4465936 - DNA, 25 bp, Homo sapien
ggaaggcactcttgagccagtcctc

SEQ ID NO: 4465937 - DNA, 25 bp, Homo sapien
tcctcaaacacgtcgtggagctggg

SEQ ID NO: 4465938 - DNA, 25 bp, Homo sapien
tcccggttgagctgggttatgtgca

SEQ ID NO: 4465939 - DNA, 25 bp, Homo sapien
ggaaatcattgaccaggctctcgtg

SEQ ID NO: 4465940 - DNA, 25 bp, Homo sapien
tgggcctagtttgaggcgccccgaa

SEQ ID NO: 4465941 - DNA, 25 bp, Homo sapien
gccagcactgctcaggaggcaaggt

SEQ ID NO: 4465942 - DNA, 25 bp, Homo sapien
gccatcttggtctcgtaatttgctc

SEQ ID NO: 4465943 - DNA, 25 bp, Homo sapien
ctttgggcggtctggatgtctgcct

SEQ ID NO: 4465944 - DNA, 25 bp, Homo sapien
caggtgccactgtgtcatttaatcc

SEQ ID NO: 4465945 - DNA, 25 bp, Homo sapien
tgccaggtgccactgtgtcatttaa

SEQ ID NO: 4465946 - DNA, 25 bp, Homo sapien
tatgtgccaggtgccactgtgtcat

SEQ ID NO: 4465947 - DNA, 25 bp, Homo sapien
ctatgtgccaggtgccactgtgtca

SEQ ID NO: 4465948 - DNA, 25 bp, Homo sapien
cacgcgttagcattgagtccgggtt

SEQ ID NO: 4465949 - DNA, 25 bp, Homo sapien
tccagaaggaccgactaatgggccg

SEQ ID NO: 4465950 - DNA, 25 bp, Homo sapien
tacatgaagaaactggctccggcag

SEQ ID NO: 4465951 - DNA, 25 bp, Homo sapien
aacttaaatatgttgggtgcagcca

SEQ ID NO: 4465952 - DNA, 25 bp, Homo sapien
ggcgattgctccagtctagcttcaa

SEQ ID NO: 4465953 - DNA, 25 bp, Homo sapien
gctctggatgtgctgccttgcaggg

SEQ ID NO: 4465954 - DNA, 25 bp, Homo sapien
acccttgactctttgtttcgctctg

SEQ ID NO: 4465955 - DNA, 25 bp, Homo sapien
agggaatgccggttccaggagccac

SEQ ID NO: 4465956 - DNA, 25 bp, Homo sapien
gaagacacttggctgcgatgacact

SEQ ID NO: 4465957 - DNA, 25 bp, Homo sapien
ccccatgggaccgagtggactcatt

SEQ ID NO: 4465958 - DNA, 25 bp, Homo sapien
tggactcatttaccgaggaggactc

SEQ ID NO: 4465959 - DNA, 25 bp, Homo sapien
cgggccctgcgaggtgaagacactt

SEQ ID NO: 4465960 - DNA, 25 bp, Homo sapien
agagcgtgacggacgccaggttggg

SEQ ID NO: 4465961 - DNA, 25 bp, Homo sapien
cagcccgagagcgtgacggacgcca

SEQ ID NO: 4465962 - DNA, 25 bp, Homo sapien
cccgagagcgtgacggacgccaggt

SEQ ID NO: 4465963 - DNA, 25 bp, Homo sapien
cgcagcccgagagcgtgacggacgc

SEQ ID NO: 4465964 - DNA, 25 bp, Homo sapien
cgccaggcagtcgtcggtaacgtgg

SEQ ID NO: 4465965 - DNA, 25 bp, Homo sapien
gttggtgacgcgcgcgcagttctcc

SEQ ID NO: 4465966 - DNA, 25 bp, Homo sapien
ccacggcagccaacgtgcggttggt

SEQ ID NO: 4465967 - DNA, 25 bp, Homo sapien
agaagtccacgtgcaatgtctgcag

SEQ ID NO: 4465968 - DNA, 25 bp, Homo sapien
caggcgcgggcacgcggcgcgcagg

SEQ ID NO: 4465969 - DNA, 25 bp, Homo sapien
cgcagggccaggcgcgggcacgcgg

SEQ ID NO: 4465970 - DNA, 25 bp, Homo sapien
agggccaggcgcgggcacgcggcgc

SEQ ID NO: 4465971 - DNA, 25 bp, Homo sapien
ccaggcgcgggcacgcggcgcgcag

SEQ ID NO: 4465972 - DNA, 25 bp, Homo sapien
gcgcgggggctggtcgggcagcatg

SEQ ID NO: 4465973 - DNA, 25 bp, Homo sapien
cgcgggcgcgggggctggtcgggca

SEQ ID NO: 4465974 - DNA, 25 bp, Homo sapien
gcgggggctggtcgggcagcatggc

SEQ ID NO: 4465975 - DNA, 25 bp, Homo sapien
gggcgcgggggctggtcgggcagca

SEQ ID NO: 4465976 - DNA, 25 bp, Homo sapien
taacgtgaggtaggctttcttatcc

SEQ ID NO: 4465977 - DNA, 25 bp, Homo sapien
aaatgaggctcagaatatgcggtgg

SEQ ID NO: 4465978 - DNA, 25 bp, Homo sapien
gaagagctgggttcgaagccaggac

SEQ ID NO: 4465979 - DNA, 25 bp, Homo sapien
tctagcgctgcagcagcttgccgag

SEQ ID NO: 4465980 - DNA, 25 bp, Homo sapien
aaatatccatttaatcttgcgttta

SEQ ID NO: 4465981 - DNA, 25 bp, Homo sapien
atatccatttaatcttgcgtttatc

SEQ ID NO: 4465982 - DNA, 25 bp, Homo sapien
tttccaaatatccatttaatcttgc

SEQ ID NO: 4465983 - DNA, 25 bp, Homo sapien
tccaaatatccatttaatcttgcgt

SEQ ID NO: 4465984 - DNA, 25 bp, Homo sapien
aaggcggtggtgttgagtgagaacc

SEQ ID NO: 4465985 - DNA, 25 bp, Homo sapien
gggaaaggcggtggtgttgagtgag

SEQ ID NO: 4465986 - DNA, 25 bp, Homo sapien
tgttgagtgagaaccagccgagtgt

SEQ ID NO: 4465987 - DNA, 25 bp, Homo sapien
ggtgttgagtgagaaccagccgagt

SEQ ID NO: 4465988 - DNA, 25 bp, Homo sapien
ccgagcgcaagtcggcgaactccga

SEQ ID NO: 4465989 - DNA, 25 bp, Homo sapien
caccgaggtgatttcggtccaacgg

SEQ ID NO: 4465990 - DNA, 25 bp, Homo sapien
caacggcgatcggagtccccgagga

SEQ ID NO: 4465991 - DNA, 25 bp, Homo sapien
cgaactccgagtggtcaggtcctcc

SEQ ID NO: 4465992 - DNA, 25 bp, Homo sapien
cccaggaaaggtgggcgggcagacg

SEQ ID NO: 4465993 - DNA, 25 bp, Homo sapien
tgcgggaacgcatccgccccaggaa

SEQ ID NO: 4465994 - DNA, 25 bp, Homo sapien
cgtgcgggcaaaaccgcaaggagga

SEQ ID NO: 4465995 - DNA, 25 bp, Homo sapien
gagcggctcggtggctccttctgcc

SEQ ID NO: 4465996 - DNA, 25 bp, Homo sapien
ggccgagagccttcactaaatgtga

SEQ ID NO: 4465997 - DNA, 25 bp, Homo sapien
aagcctaggcttgtgctcatgtcca

SEQ ID NO: 4465998 - DNA, 25 bp, Homo sapien
gaattttctacaatcgcgagtgcgg

SEQ ID NO: 4465999 - DNA, 25 bp, Homo sapien
taaagggctttgtcgcagctggcgc

SEQ ID NO: 4466000 - DNA, 25 bp, Homo sapien
atgcctgtagtccgcggcctctgca

SEQ ID NO: 4466001 - DNA, 25 bp, Homo sapien
tcctctgccaggagtatctatgccc

SEQ ID NO: 4466002 - DNA, 25 bp, Homo sapien
ctgcctcacttcatgcctcagatgt

SEQ ID NO: 4466003 - DNA, 25 bp, Homo sapien
catcttctcagtgaggcttacattg

SEQ ID NO: 4466004 - DNA, 25 bp, Homo sapien
tgttctggtggctatcttgggcttc

SEQ ID NO: 4466005 - DNA, 25 bp, Homo sapien
ccacctggacctcggattgacatta

SEQ ID NO: 4466006 - DNA, 25 bp, Homo sapien
aaggcatgcaagaaatgggctgagt

SEQ ID NO: 4466007 - DNA, 25 bp, Homo sapien
gattagccactgaaacttctaagac

SEQ ID NO: 4466008 - DNA, 25 bp, Homo sapien
tggaacaaaatccagggccgctggg

SEQ ID NO: 4466009 - DNA, 25 bp, Homo sapien
tgggccagggcttactgtggctacc

SEQ ID NO: 4466010 - DNA, 25 bp, Homo sapien
cttcacctatcatctgtgcatggcg

SEQ ID NO: 4466011 - DNA, 25 bp, Homo sapien
tgtggctaccctgtttctggagtaa

SEQ ID NO: 4466012 - DNA, 25 bp, Homo sapien
caggaacctccatgcatgtagctat

SEQ ID NO: 4466013 - DNA, 25 bp, Homo sapien
gccaatttgggtccctagaaacagc

SEQ ID NO: 4466014 - DNA, 25 bp, Homo sapien
tctggaagctccaaaagtggttttg

SEQ ID NO: 4466015 - DNA, 25 bp, Homo sapien
tgctcatgcctggtggtgaacagtg

SEQ ID NO: 4466016 - DNA, 25 bp, Homo sapien
ccctggatatgccttgggcttcttg

SEQ ID NO: 4466017 - DNA, 25 bp, Homo sapien
ctttgctgtgccatgcctgccaatg

SEQ ID NO: 4466018 - DNA, 25 bp, Homo sapien
cctttgctgtgccatgcctgccaat

SEQ ID NO: 4466019 - DNA, 25 bp, Homo sapien
caggacttctggccggatgaagccc

SEQ ID NO: 4466020 - DNA, 25 bp, Homo sapien
tgagcttggtttttagccaaaagca

SEQ ID NO: 4466021 - DNA, 25 bp, Homo sapien
gaagcccacatcttgtgagcttggt

SEQ ID NO: 4466022 - DNA, 25 bp, Homo sapien
gcagatcttgggcattgaatcctag

SEQ ID NO: 4466023 - DNA, 25 bp, Homo sapien
gcacaagtccctgatctgaggagct

SEQ ID NO: 4466024 - DNA, 25 bp, Homo sapien
cattcacttaacagatacttgcagt

SEQ ID NO: 4466025 - DNA, 25 bp, Homo sapien
taagcagcctcaagcaaacgttgac

SEQ ID NO: 4466026 - DNA, 25 bp, Homo sapien
ggtttactttcagctcttagagagg

SEQ ID NO: 4466027 - DNA, 25 bp, Homo sapien
ctgcacagtgccatgattttataac

SEQ ID NO: 4466028 - DNA, 25 bp, Homo sapien
tgcacagtgccatgattttataaca

SEQ ID NO: 4466029 - DNA, 25 bp, Homo sapien
cacagtgccatgattttataacaca

SEQ ID NO: 4466030 - DNA, 25 bp, Homo sapien
gcacagtgccatgattttataacac

SEQ ID NO: 4466031 - DNA, 25 bp, Homo sapien
gagcaaaggatacctctgcagtctc

SEQ ID NO: 4466032 - DNA, 25 bp, Homo sapien
ggctggcactcatggttgcaggtcc

SEQ ID NO: 4466033 - DNA, 25 bp, Homo sapien
agtttgctctggactcgggggcagg

SEQ ID NO: 4466034 - DNA, 25 bp, Homo sapien
cagaaggctggcactcatggttgca

SEQ ID NO: 4466035 - DNA, 25 bp, Homo sapien
tcctgctcggggtgggaaggccctg

SEQ ID NO: 4466036 - DNA, 25 bp, Homo sapien
cctgctcggggtgggaaggccctgc

SEQ ID NO: 4466037 - DNA, 25 bp, Homo sapien
aaaggcttcaactagaattgggtct

SEQ ID NO: 4466038 - DNA, 25 bp, Homo sapien
tgaaaaaaggcttcaactagaattg

SEQ ID NO: 4466039 - DNA, 25 bp, Homo sapien
tcaactagaattgggtctcagggag

SEQ ID NO: 4466040 - DNA, 25 bp, Homo sapien
tcttagtgagaatacctaataatat

SEQ ID NO: 4466041 - DNA, 25 bp, Homo sapien
tgctcaaatgaggtgccagacagac

SEQ ID NO: 4466042 - DNA, 25 bp, Homo sapien
tacttcgcggacagggtctttgccg

SEQ ID NO: 4466043 - DNA, 25 bp, Homo sapien
tacagcaagttcatgccacaggcta

SEQ ID NO: 4466044 - DNA, 25 bp, Homo sapien
gaaagggccatcttgagagcagctg

SEQ ID NO: 4466045 - DNA, 25 bp, Homo sapien
cactgactactgaccgtgcgggtgc

SEQ ID NO: 4466046 - DNA, 25 bp, Homo sapien
gattcaggaattggagcgtggctct

SEQ ID NO: 4466047 - DNA, 25 bp, Homo sapien
gaaccgtgtggttctaggagatccc

SEQ ID NO: 4466048 - DNA, 25 bp, Homo sapien
ggttaccatcgaggcagacattagc

SEQ ID NO: 4466049 - DNA, 25 bp, Homo sapien
cactctagttgggttagtcagggcc

SEQ ID NO: 4466050 - DNA, 25 bp, Homo sapien
gctggtcttatgacctcacatggat

SEQ ID NO: 4466051 - DNA, 25 bp, Homo sapien
tacccagtgccttaaatcggttctg

SEQ ID NO: 4466052 - DNA, 25 bp, Homo sapien
tttaagcctcagctaagagggcatc

SEQ ID NO: 4466053 - DNA, 25 bp, Homo sapien
tggcctccccataatgaattttctg

SEQ ID NO: 4466054 - DNA, 25 bp, Homo sapien
tatgtttctgaaggcccacatggcc

SEQ ID NO: 4466055 - DNA, 25 bp, Homo sapien
caggcacttccatcaagacttggta

SEQ ID NO: 4466056 - DNA, 25 bp, Homo sapien
aacagaatgattacgcagctcctca

SEQ ID NO: 4466057 - DNA, 25 bp, Homo sapien
gaaactccatgggagcacatccatc

SEQ ID NO: 4466058 - DNA, 25 bp, Homo sapien
cctctaggcgagtaacataaattca

SEQ ID NO: 4466059 - DNA, 25 bp, Homo sapien
aaagaatctccaactgatgccagaa

SEQ ID NO: 4466060 - DNA, 25 bp, Homo sapien
ccagaatccttgctatgaagaatga

SEQ ID NO: 4466061 - DNA, 25 bp, Homo sapien
ttttttagcctctactattgcttga

SEQ ID NO: 4466062 - DNA, 25 bp, Homo sapien
tttttagcctctactattgcttgat

SEQ ID NO: 4466063 - DNA, 25 bp, Homo sapien
tttttttagcctctactattgcttg

SEQ ID NO: 4466064 - DNA, 25 bp, Homo sapien
ttttagcctctactattgcttgata

SEQ ID NO: 4466065 - DNA, 25 bp, Homo sapien
ttcatatagcttactaacagcagcc

SEQ ID NO: 4466066 - DNA, 25 bp, Homo sapien
gccctcctgttcatatagcttacta

SEQ ID NO: 4466067 - DNA, 25 bp, Homo sapien
tatagcttactaacagcagccttgc

SEQ ID NO: 4466068 - DNA, 25 bp, Homo sapien
ctgccctcctgttcatatagcttac

SEQ ID NO: 4466069 - DNA, 25 bp, Homo sapien
cctcgttctattgtctgggatggaa

SEQ ID NO: 4466070 - DNA, 25 bp, Homo sapien
tgcagttcctagcagggtgttttgg

SEQ ID NO: 4466071 - DNA, 25 bp, Homo sapien
cgtttagaggcacttcatcagatcc

SEQ ID NO: 4466072 - DNA, 25 bp, Homo sapien
agaaaaaggtagcatctcactggca

SEQ ID NO: 4466073 - DNA, 25 bp, Homo sapien
taagctgatcaactacagtgatggg

SEQ ID NO: 4466074 - DNA, 25 bp, Homo sapien
ccacagagaaatagttcagaagtat

SEQ ID NO: 4466075 - DNA, 25 bp, Homo sapien
gaaagcagtagcagtactaccttat

SEQ ID NO: 4466076 - DNA, 25 bp, Homo sapien
gaagctcaaggaagagtatacaaga

SEQ ID NO: 4466077 - DNA, 25 bp, Homo sapien
tggaatattacaaagatagtgtcaa

SEQ ID NO: 4466078 - DNA, 25 bp, Homo sapien
caaagatagtgtcaaaagatggaaa

SEQ ID NO: 4466079 - DNA, 25 bp, Homo sapien
aaaaacaccagattgacttttgatc

SEQ ID NO: 4466080 - DNA, 25 bp, Homo sapien
aagacaagaactagagagaaagcag

SEQ ID NO: 4466081 - DNA, 25 bp, Homo sapien
gctttgtgccttcgctgtttttaga

SEQ ID NO: 4466082 - DNA, 25 bp, Homo sapien
gaaattggtactgggatggccactc

SEQ ID NO: 4466083 - DNA, 25 bp, Homo sapien
ggtcctatgcttttggcaggcagcc

SEQ ID NO: 4466084 - DNA, 25 bp, Homo sapien
tgaattccgagtcccatttctgaga

SEQ ID NO: 4466085 - DNA, 25 bp, Homo sapien
cactggctgtgatagacctgtagat

SEQ ID NO: 4466086 - DNA, 25 bp, Homo sapien
ccttttattagggactggcagctgt

SEQ ID NO: 4466087 - DNA, 25 bp, Homo sapien
cctggctggccagtatcaagaggca

SEQ ID NO: 4466088 - DNA, 25 bp, Homo sapien
tttggatggtgtctctgctgcccgg

SEQ ID NO: 4466089 - DNA, 25 bp, Homo sapien
ggttcacacatctctaacacaggga

SEQ ID NO: 4466090 - DNA, 25 bp, Homo sapien
tggttcacacatctctaacacaggg

SEQ ID NO: 4466091 - DNA, 25 bp, Homo sapien
catagaggttctgtactggaaaggg

SEQ ID NO: 4466092 - DNA, 25 bp, Homo sapien
ccagatagctgaacccatagaggtt

SEQ ID NO: 4466093 - DNA, 25 bp, Homo sapien
ctgtttccaggtttatttgactagt

SEQ ID NO: 4466094 - DNA, 25 bp, Homo sapien
gtctgtttccaggtttatttgacta

SEQ ID NO: 4466095 - DNA, 25 bp, Homo sapien
tctgtttccaggtttatttgactag

SEQ ID NO: 4466096 - DNA, 25 bp, Homo sapien
cgtctgtttccaggtttatttgact

SEQ ID NO: 4466097 - DNA, 25 bp, Homo sapien
ttagaccagaattaattcctcttct

SEQ ID NO: 4466098 - DNA, 25 bp, Homo sapien
ttctacaatgttctgagcccttgca

SEQ ID NO: 4466099 - DNA, 25 bp, Homo sapien
agaccagaattaattcctcttctac

SEQ ID NO: 4466100 - DNA, 25 bp, Homo sapien
tagaccagaattaattcctcttcta

SEQ ID NO: 4466101 - DNA, 25 bp, Homo sapien
gatgattggcaaggttctgtggtgg

SEQ ID NO: 4466102 - DNA, 25 bp, Homo sapien
gtatgccagcactggtactgggatg

SEQ ID NO: 4466103 - DNA, 25 bp, Homo sapien
ccctgtaagttgtatgtttaggaca

SEQ ID NO: 4466104 - DNA, 25 bp, Homo sapien
tgtttaggacactgtatgccagcac

SEQ ID NO: 4466105 - DNA, 25 bp, Homo sapien
gtggaggctgggacgacgtgtcttc

SEQ ID NO: 4466106 - DNA, 25 bp, Homo sapien
gggtggaggctgggacgacgtgtct

SEQ ID NO: 4466107 - DNA, 25 bp, Homo sapien
ggtggaggctgggacgacgtgtctt

SEQ ID NO: 4466108 - DNA, 25 bp, Homo sapien
gagtgccgcgaccccggtgtcccca

SEQ ID NO: 4466109 - DNA, 25 bp, Homo sapien
tcggtccgcgggcggcggccgactc

SEQ ID NO: 4466110 - DNA, 25 bp, Homo sapien
cggcggccgactccctctcagggtc

SEQ ID NO: 4466111 - DNA, 25 bp, Homo sapien
ctgcagcaaaaataaaggacgcgac

SEQ ID NO: 4466112 - DNA, 25 bp, Homo sapien
aataaaggacgcgaccgccgcagcc

SEQ ID NO: 4466113 - DNA, 25 bp, Homo sapien
ataaaggacgcgaccgccgcagcct

SEQ ID NO: 4466114 - DNA, 25 bp, Homo sapien
cagcaaaaataaaggacgcgaccgc

SEQ ID NO: 4466115 - DNA, 25 bp, Homo sapien
ctgcgcgagagttccgcccaaatct

SEQ ID NO: 4466116 - DNA, 25 bp, Homo sapien
cgcggtagcaaagtgtccccagcac

SEQ ID NO: 4466117 - DNA, 25 bp, Homo sapien
ccggattccgcgacggctgaagggt

SEQ ID NO: 4466118 - DNA, 25 bp, Homo sapien
aaatctcgtgagactcgcctgacgc

SEQ ID NO: 4466119 - DNA, 25 bp, Homo sapien
gagggtgagcagcttaaggatccac

SEQ ID NO: 4466120 - DNA, 25 bp, Homo sapien
tgggcacagttctacaaacaaggaa

SEQ ID NO: 4466121 - DNA, 25 bp, Homo sapien
agcagcttaaggatccaccaggtgg

SEQ ID NO: 4466122 - DNA, 25 bp, Homo sapien
ctctctgtgttgtcatagtggcctg

SEQ ID NO: 4466123 - DNA, 25 bp, Homo sapien
cccatcggtaaaaggagccattggc

SEQ ID NO: 4466124 - DNA, 25 bp, Homo sapien
tttatcagcctctcaagcgtctgca

SEQ ID NO: 4466125 - DNA, 25 bp, Homo sapien
ccattggccttcctgtttatcagcc

SEQ ID NO: 4466126 - DNA, 25 bp, Homo sapien
cagtgtgtccccatcggtaaaagga

SEQ ID NO: 4466127 - DNA, 25 bp, Homo sapien
ctgcctcctccgcttgacccaggag

SEQ ID NO: 4466128 - DNA, 25 bp, Homo sapien
gggattctgagggtaagtgctccct

SEQ ID NO: 4466129 - DNA, 25 bp, Homo sapien
aggattggcctctcccaacccggag

SEQ ID NO: 4466130 - DNA, 25 bp, Homo sapien
tgtcagggattctgtaggattggcc

SEQ ID NO: 4466131 - DNA, 25 bp, Homo sapien
caaggtcttgttactcccaggagcc

SEQ ID NO: 4466132 - DNA, 25 bp, Homo sapien
gaaggcttgtcctctttagctctcc

SEQ ID NO: 4466133 - DNA, 25 bp, Homo sapien
tagtcttaggctgaccacagataaa

SEQ ID NO: 4466134 - DNA, 25 bp, Homo sapien
gcatcctttgcagggtgcacccgag

SEQ ID NO: 4466135 - DNA, 25 bp, Homo sapien
tcaaagcagaattccccaggcctag

SEQ ID NO: 4466136 - DNA, 25 bp, Homo sapien
ttcaaagcagaattccccaggccta

SEQ ID NO: 4466137 - DNA, 25 bp, Homo sapien
tgttgaaaccaacttcaaagcagaa

SEQ ID NO: 4466138 - DNA, 25 bp, Homo sapien
tccccatgttgaaaccaacttcaaa

SEQ ID NO: 4466139 - DNA, 25 bp, Homo sapien
tctgcatccctcgaggcatcgtgtg

SEQ ID NO: 4466140 - DNA, 25 bp, Homo sapien
tccctcgaggcatcgtgtggtcagg

SEQ ID NO: 4466141 - DNA, 25 bp, Homo sapien
gggctcctcggagcatctgcatccc

SEQ ID NO: 4466142 - DNA, 25 bp, Homo sapien
gcatctgcatccctcgaggcatcgt

SEQ ID NO: 4466143 - DNA, 25 bp, Homo sapien
tccattgttggcattagtcctgggt

SEQ ID NO: 4466144 - DNA, 25 bp, Homo sapien
ccattgttggcattagtcctgggtt

SEQ ID NO: 4466145 - DNA, 25 bp, Homo sapien
tctccattgttggcattagtcctgg

SEQ ID NO: 4466146 - DNA, 25 bp, Homo sapien
cattgttggcattagtcctgggttc

SEQ ID NO: 4466147 - DNA, 25 bp, Homo sapien
ttaaagtgtgggttgggattcacag

SEQ ID NO: 4466148 - DNA, 25 bp, Homo sapien
tggcagaaggtggattaaagtgtgg

SEQ ID NO: 4466149 - DNA, 25 bp, Homo sapien
taagtgcatgtgtcatatgtgtaca

SEQ ID NO: 4466150 - DNA, 25 bp, Homo sapien
tcttgcagcgccttcatcctcgtga

SEQ ID NO: 4466151 - DNA, 25 bp, Homo sapien
ccggctgctcaagccttcttgagat

SEQ ID NO: 4466152 - DNA, 25 bp, Homo sapien
gaatgatgccaaactgccggctgct

SEQ ID NO: 4466153 - DNA, 25 bp, Homo sapien
ccaaccacggtgacctgtaggacct

SEQ ID NO: 4466154 - DNA, 25 bp, Homo sapien
cttaacctcctgctgtagaatgatg

SEQ ID NO: 4466155 - DNA, 25 bp, Homo sapien
ggtggagttcccaacaacgctgaag

SEQ ID NO: 4466156 - DNA, 25 bp, Homo sapien
agtgacaagaatacaaggctggctc

SEQ ID NO: 4466157 - DNA, 25 bp, Homo sapien
tgtagtggctaaagttgcctgtccc

SEQ ID NO: 4466158 - DNA, 25 bp, Homo sapien
acgctgaagcccatcctcgaggact

SEQ ID NO: 4466159 - DNA, 25 bp, Homo sapien
gaggcggtgatcagaggaaggcagg

SEQ ID NO: 4466160 - DNA, 25 bp, Homo sapien
gggaggcggtgatcagaggaaggca

SEQ ID NO: 4466161 - DNA, 25 bp, Homo sapien
cgggggaggcggtgatcagaggaag

SEQ ID NO: 4466162 - DNA, 25 bp, Homo sapien
cttcgggggaggcggtgatcagagg

SEQ ID NO: 4466163 - DNA, 25 bp, Homo sapien
tcagcttgcccatagatgagctgct

SEQ ID NO: 4466164 - DNA, 25 bp, Homo sapien
ccacgtgagatatggatgaggtaag

SEQ ID NO: 4466165 - DNA, 25 bp, Homo sapien
gcttcccctggccacgtgagatatg

SEQ ID NO: 4466166 - DNA, 25 bp, Homo sapien
taaggaaaggcgatgtgagtacatc

SEQ ID NO: 4466167 - DNA, 25 bp, Homo sapien
cagcctgacggaaggtcgtgcaagc

SEQ ID NO: 4466168 - DNA, 25 bp, Homo sapien
aggcactgagtgtttgtctctgggc

SEQ ID NO: 4466169 - DNA, 25 bp, Homo sapien
tatttacacactttgcccctgtgag

SEQ ID NO: 4466170 - DNA, 25 bp, Homo sapien
cttggaagatctgtccggaagggcc

SEQ ID NO: 4466171 - DNA, 25 bp, Homo sapien
agagacagagtcctccccattggga

SEQ ID NO: 4466172 - DNA, 25 bp, Homo sapien
tgtgcagacttttggacccagctca

SEQ ID NO: 4466173 - DNA, 25 bp, Homo sapien
tagcccgtgtgcctgtaactctgag

SEQ ID NO: 4466174 - DNA, 25 bp, Homo sapien
tgggcagaatctcagaaggtcctcc

SEQ ID NO: 4466175 - DNA, 25 bp, Homo sapien
cactggctttcttccggtccctgat

SEQ ID NO: 4466176 - DNA, 25 bp, Homo sapien
gctttcttccggtccctgatgccat

SEQ ID NO: 4466177 - DNA, 25 bp, Homo sapien
gcagtgtgcactggctttcttccgg

SEQ ID NO: 4466178 - DNA, 25 bp, Homo sapien
ggccagcagtgtgcactggctttct

SEQ ID NO: 4466179 - DNA, 25 bp, Homo sapien
aaggccttccagggggatgggcagc

SEQ ID NO: 4466180 - DNA, 25 bp, Homo sapien
ttgaaggccttccagggggatgggc

SEQ ID NO: 4466181 - DNA, 25 bp, Homo sapien
tgaaggccttccagggggatgggca

SEQ ID NO: 4466182 - DNA, 25 bp, Homo sapien
gccttccagggggatgggcagcagg

SEQ ID NO: 4466183 - DNA, 25 bp, Homo sapien
ctgcaagttgaccttccagccatgg

SEQ ID NO: 4466184 - DNA, 25 bp, Homo sapien
gcaaactctccttgtgaggtgcagg

SEQ ID NO: 4466185 - DNA, 25 bp, Homo sapien
gagtctactaatcccatctgagcaa

SEQ ID NO: 4466186 - DNA, 25 bp, Homo sapien
acgagattccccacacctgcaagtt

SEQ ID NO: 4466187 - DNA, 25 bp, Homo sapien
tgagaatggactgtttcgctggtgc

SEQ ID NO: 4466188 - DNA, 25 bp, Homo sapien
taacaatggcgggaagggctgtgag

SEQ ID NO: 4466189 - DNA, 25 bp, Homo sapien
tacaacagtgtggagggctaacaat

SEQ ID NO: 4466190 - DNA, 25 bp, Homo sapien
gaagtcccgtccttccatggcattg

SEQ ID NO: 4466191 - DNA, 25 bp, Homo sapien
cttagacgtgtcgtaaacagacctt

SEQ ID NO: 4466192 - DNA, 25 bp, Homo sapien
tctcacttagacgtgtcgtaaacag

SEQ ID NO: 4466193 - DNA, 25 bp, Homo sapien
tgtttctcacttagacgtgtcgtaa

SEQ ID NO: 4466194 - DNA, 25 bp, Homo sapien
aactgtttctcacttagacgtgtcg

SEQ ID NO: 4466195 - DNA, 25 bp, Homo sapien
tgacctgtctacagtctctccaagg

SEQ ID NO: 4466196 - DNA, 25 bp, Homo sapien
cttgtttggtgctgagacactgcaa

SEQ ID NO: 4466197 - DNA, 25 bp, Homo sapien
aaggtcttacctgccctgtcacggg

SEQ ID NO: 4466198 - DNA, 25 bp, Homo sapien
aaaaatgtatatcttggaaccaatg

SEQ ID NO: 4466199 - DNA, 25 bp, Homo sapien
gattcctgtctcacggagtgctcag

SEQ ID NO: 4466200 - DNA, 25 bp, Homo sapien
aagcagtgacactggaacggaggtc

SEQ ID NO: 4466201 - DNA, 25 bp, Homo sapien
ggtcagctaagccaaccagggagag

SEQ ID NO: 4466202 - DNA, 25 bp, Homo sapien
gctcagtccagcgaaggatttgaac

SEQ ID NO: 4466203 - DNA, 25 bp, Homo sapien
gctatttttatagcaccctggagta

SEQ ID NO: 4466204 - DNA, 25 bp, Homo sapien
gcagctgagaggattattctctcaa

SEQ ID NO: 4466205 - DNA, 25 bp, Homo sapien
tctcaatgatccctatgagccaggt

SEQ ID NO: 4466206 - DNA, 25 bp, Homo sapien
tcccagcagctcttggactaggagc

SEQ ID NO: 4466207 - DNA, 25 bp, Homo sapien
cagggttcagagctcgatgactcca

SEQ ID NO: 4466208 - DNA, 25 bp, Homo sapien
catgagacggcatccagggtctgct

SEQ ID NO: 4466209 - DNA, 25 bp, Homo sapien
tttgcaggagcataggcgtcatcac

SEQ ID NO: 4466210 - DNA, 25 bp, Homo sapien
tcttgaacttgggtcttcggactca

SEQ ID NO: 4466211 - DNA, 25 bp, Homo sapien
gaggtaccctctttcagaccagact

SEQ ID NO: 4466212 - DNA, 25 bp, Homo sapien
ctcaagctcattgtctcagggaccc

SEQ ID NO: 4466213 - DNA, 25 bp, Homo sapien
ctcaggtgggaggtaccctctttca

SEQ ID NO: 4466214 - DNA, 25 bp, Homo sapien
ctcaggcacctcaagctcattgtct

SEQ ID NO: 4466215 - DNA, 25 bp, Homo sapien
tttccagggattatctgcttgatct

SEQ ID NO: 4466216 - DNA, 25 bp, Homo sapien
tcatcacatcgttggctcagctcct

SEQ ID NO: 4466217 - DNA, 25 bp, Homo sapien
ccttcctgtacatggatggctccaa

SEQ ID NO: 4466218 - DNA, 25 bp, Homo sapien
gggagcatttgatcttcttctctcc

SEQ ID NO: 4466219 - DNA, 25 bp, Homo sapien
actgcggggctgtgaaattcaacac

SEQ ID NO: 4466220 - DNA, 25 bp, Homo sapien
cactgcggggctgtgaaattcaaca

SEQ ID NO: 4466221 - DNA, 25 bp, Homo sapien
ggcactgcggggctgtgaaattcaa

SEQ ID NO: 4466222 - DNA, 25 bp, Homo sapien
gcggggctgtgaaattcaacactca

SEQ ID NO: 4466223 - DNA, 25 bp, Homo sapien
ttccattcgcagttgaatgggctca

SEQ ID NO: 4466224 - DNA, 25 bp, Homo sapien
tccattcgcagttgaatgggctcag

SEQ ID NO: 4466225 - DNA, 25 bp, Homo sapien
tttccattcgcagttgaatgggctc

SEQ ID NO: 4466226 - DNA, 25 bp, Homo sapien
gagagagttgaagaattgaaagagc

SEQ ID NO: 4466227 - DNA, 25 bp, Homo sapien
aggacaatatataccaggcagaaaa

SEQ ID NO: 4466228 - DNA, 25 bp, Homo sapien
gctagagcaccatagagtgacaaag

SEQ ID NO: 4466229 - DNA, 25 bp, Homo sapien
gaaaacttatcatagatctctttgg

SEQ ID NO: 4466230 - DNA, 25 bp, Homo sapien
aaggaatgagcgctgagaaccacca

SEQ ID NO: 4466231 - DNA, 25 bp, Homo sapien
ttggggtcatgaagaaatagcctgt

SEQ ID NO: 4466232 - DNA, 25 bp, Homo sapien
ccttatagggcttgggccggagatt

SEQ ID NO: 4466233 - DNA, 25 bp, Homo sapien
cccagaagcctccttatagggcttg

SEQ ID NO: 4466234 - DNA, 25 bp, Homo sapien
aaccttctctgaactagcttttgat

SEQ ID NO: 4466235 - DNA, 25 bp, Homo sapien
ctcttgaattcccataaactcaacc

SEQ ID NO: 4466236 - DNA, 25 bp, Homo sapien
aaactcaaccttctctgaactagct

SEQ ID NO: 4466237 - DNA, 25 bp, Homo sapien
tcaaccttctctgaactagcttttg

SEQ ID NO: 4466238 - DNA, 25 bp, Homo sapien
cattgttgtgtcagacctggcagct

SEQ ID NO: 4466239 - DNA, 25 bp, Homo sapien
tggaaatcgggtgcatttttcctgt

SEQ ID NO: 4466240 - DNA, 25 bp, Homo sapien
attttccctggaaatcgggtgcatt

SEQ ID NO: 4466241 - DNA, 25 bp, Homo sapien
ctgcattgttgtgtcagacctggca

SEQ ID NO: 4466242 - DNA, 25 bp, Homo sapien
tgcaggggcaaagatgcaaagatct

SEQ ID NO: 4466243 - DNA, 25 bp, Homo sapien
agatctgagtcctccttccggctga

SEQ ID NO: 4466244 - DNA, 25 bp, Homo sapien
ttccggctgaggacagctctggtag

SEQ ID NO: 4466245 - DNA, 25 bp, Homo sapien
gtgctctgcattgcaggggcaaaga

SEQ ID NO: 4466246 - DNA, 25 bp, Homo sapien
tgtgggaatgtgacccctccctcca

SEQ ID NO: 4466247 - DNA, 25 bp, Homo sapien
tttacacgtcctgccttagagccca

SEQ ID NO: 4466248 - DNA, 25 bp, Homo sapien
gagtatggatagaatcggactgccc

SEQ ID NO: 4466249 - DNA, 25 bp, Homo sapien
ttgttttgacaagggtatttctgcc

SEQ ID NO: 4466250 - DNA, 25 bp, Homo sapien
acaaaggagcacgttggcctctccc

SEQ ID NO: 4466251 - DNA, 25 bp, Homo sapien
cggacaaccaccttctggtcggcac

SEQ ID NO: 4466252 - DNA, 25 bp, Homo sapien
cttctggtcggcaccacagcaggca

SEQ ID NO: 4466253 - DNA, 25 bp, Homo sapien
aaaggagcacgttggcctctcccat

SEQ ID NO: 4466254 - DNA, 25 bp, Homo sapien
ggcccacaggccatgggtgccccac

SEQ ID NO: 4466255 - DNA, 25 bp, Homo sapien
gctgggcccacaggccatgggtgcc

SEQ ID NO: 4466256 - DNA, 25 bp, Homo sapien
gggcccacaggccatgggtgcccca

SEQ ID NO: 4466257 - DNA, 25 bp, Homo sapien
tcaggacacgctgtgctgggcccac

SEQ ID NO: 4466258 - DNA, 25 bp, Homo sapien
gcctagcatggagcggccttccttt

SEQ ID NO: 4466259 - DNA, 25 bp, Homo sapien
catggctggtgaagattggtaggca

SEQ ID NO: 4466260 - DNA, 25 bp, Homo sapien
aagattggtaggcagcttccttgtc

SEQ ID NO: 4466261 - DNA, 25 bp, Homo sapien
tgagcagagcagcctcactcagcag

SEQ ID NO: 4466262 - DNA, 25 bp, Homo sapien
agaggcacgtattgggcatgggcca

SEQ ID NO: 4466263 - DNA, 25 bp, Homo sapien
cgtattgggcatgggccacactgaa

SEQ ID NO: 4466264 - DNA, 25 bp, Homo sapien
tcccatcgacagtgtgtgaggacag

SEQ ID NO: 4466265 - DNA, 25 bp, Homo sapien
gctgtggtcccatcgacagtgtgtg

SEQ ID NO: 4466266 - DNA, 25 bp, Homo sapien
gcttgagatgatggataccctgttc

SEQ ID NO: 4466267 - DNA, 25 bp, Homo sapien
tagataaatgaagatgatctagtat

SEQ ID NO: 4466268 - DNA, 25 bp, Homo sapien
atagcacaatagagtatagccaaca

SEQ ID NO: 4466269 - DNA, 25 bp, Homo sapien
ggataccctgttcatcctgatatga

SEQ ID NO: 4466270 - DNA, 25 bp, Homo sapien
agttcatcaagaagcggcagagccg

SEQ ID NO: 4466271 - DNA, 25 bp, Homo sapien
gggcttgagtatgcagccaagttca

SEQ ID NO: 4466272 - DNA, 25 bp, Homo sapien
gaggtgagcatcctgcggcaggtgc

SEQ ID NO: 4466273 - DNA, 25 bp, Homo sapien
ggtgctgcaccacaatgtcatcacg

SEQ ID NO: 4466274 - DNA, 25 bp, Homo sapien
actgtcaggaactcagatggtggga

SEQ ID NO: 4466275 - DNA, 25 bp, Homo sapien
tggtcccttgactgcttgttctctc

SEQ ID NO: 4466276 - DNA, 25 bp, Homo sapien
tctgactgtcaggaactcagatggt

SEQ ID NO: 4466277 - DNA, 25 bp, Homo sapien
caactgagcccgactggtcccttga

SEQ ID NO: 4466278 - DNA, 25 bp, Homo sapien
tgttgaagttcttttgttaaacata

SEQ ID NO: 4466279 - DNA, 25 bp, Homo sapien
gctctgttgaagttcttttgttaaa

SEQ ID NO: 4466280 - DNA, 25 bp, Homo sapien
ctgctctgttgaagttcttttgtta

SEQ ID NO: 4466281 - DNA, 25 bp, Homo sapien
tctgttgaagttcttttgttaaaca

SEQ ID NO: 4466282 - DNA, 25 bp, Homo sapien
cacagtaacaggagagcctcaaacc

SEQ ID NO: 4466283 - DNA, 25 bp, Homo sapien
tttttcctgcgtggcagcacaagct

SEQ ID NO: 4466284 - DNA, 25 bp, Homo sapien
gcacaagctcgtttttaaggtatta

SEQ ID NO: 4466285 - DNA, 25 bp, Homo sapien
tattatcctttggttctgtctcctg

SEQ ID NO: 4466286 - DNA, 25 bp, Homo sapien
cattttatgaggggtaatcctgtac

SEQ ID NO: 4466287 - DNA, 25 bp, Homo sapien
tgaggacggaggtgattttctgggg

SEQ ID NO: 4466288 - DNA, 25 bp, Homo sapien
ctgaggacggaggtgattttctggg

SEQ ID NO: 4466289 - DNA, 25 bp, Homo sapien
atgtgggagcccatgactgctctgt

SEQ ID NO: 4466290 - DNA, 25 bp, Homo sapien
tacagcccacggtgagattccggga

SEQ ID NO: 4466291 - DNA, 25 bp, Homo sapien
tgggtctcctccgggcataggtcca

SEQ ID NO: 4466292 - DNA, 25 bp, Homo sapien
cacctactgttacggccatggcaac

SEQ ID NO: 4466293 - DNA, 25 bp, Homo sapien
gctgtgcacacggaaagcacctact

SEQ ID NO: 4466294 - DNA, 25 bp, Homo sapien
atttacttaacactgcagaatctgt

SEQ ID NO: 4466295 - DNA, 25 bp, Homo sapien
cctcttctgtccagatctccctccc

SEQ ID NO: 4466296 - DNA, 25 bp, Homo sapien
acttaacactgcagaatctgttctt

SEQ ID NO: 4466297 - DNA, 25 bp, Homo sapien
cttctgtccagatctccctccccat

SEQ ID NO: 4466298 - DNA, 25 bp, Homo sapien
gctgtcgttgtcctgtgtggcataa

SEQ ID NO: 4466299 - DNA, 25 bp, Homo sapien
ctcgaacatgctgtcgttgtcctgt

SEQ ID NO: 4466300 - DNA, 25 bp, Homo sapien
gaggctgtccttggcatggcagggc

SEQ ID NO: 4466301 - DNA, 25 bp, Homo sapien
cctgtgtggcataagcaagagagag

SEQ ID NO: 4466302 - DNA, 25 bp, Homo sapien
ctgttaaggtgtggacctgcccgtg

SEQ ID NO: 4466303 - DNA, 25 bp, Homo sapien
accttgagacctgactgtgactgtc

SEQ ID NO: 4466304 - DNA, 25 bp, Homo sapien
taaggtgtggacctgcccgtgtcct

SEQ ID NO: 4466305 - DNA, 25 bp, Homo sapien
gcacagggagatgcaagcaccttga

SEQ ID NO: 4466306 - DNA, 25 bp, Homo sapien
taaggctgtttagctttttcgctgg

SEQ ID NO: 4466307 - DNA, 25 bp, Homo sapien
tcgctgggttagtagagctaatttc

SEQ ID NO: 4466308 - DNA, 25 bp, Homo sapien
tgggactggccaagtgctgatttct

SEQ ID NO: 4466309 - DNA, 25 bp, Homo sapien
cagcagttgcttccttgggctcaca

SEQ ID NO: 4466310 - DNA, 25 bp, Homo sapien
tgttcctcccgaaagtgactgagac

SEQ ID NO: 4466311 - DNA, 25 bp, Homo sapien
tccctttcatgtgccagagtcgtcc

SEQ ID NO: 4466312 - DNA, 25 bp, Homo sapien
tatcatcctgtgctgacgtgagcct

SEQ ID NO: 4466313 - DNA, 25 bp, Homo sapien
gagtcgtcccacatcgcagtatcat

SEQ ID NO: 4466314 - DNA, 25 bp, Homo sapien
ccatttggcgaagcaggtacttggg

SEQ ID NO: 4466315 - DNA, 25 bp, Homo sapien
caaaagggagagcttctgtcctcca

SEQ ID NO: 4466316 - DNA, 25 bp, Homo sapien
gagagggcaaaagggagagcttctg

SEQ ID NO: 4466317 - DNA, 25 bp, Homo sapien
ttctgagagcgtaccatttggcgaa

SEQ ID NO: 4466318 - DNA, 25 bp, Homo sapien
actgatgactacaaggggccctggg

SEQ ID NO: 4466319 - DNA, 25 bp, Homo sapien
tgccaggaggactgatgactacaag

SEQ ID NO: 4466320 - DNA, 25 bp, Homo sapien
agagggcatgtggagaaggtgaagg

SEQ ID NO: 4466321 - DNA, 25 bp, Homo sapien
ggctctgccacgaccaaggagcaga

SEQ ID NO: 4466322 - DNA, 25 bp, Homo sapien
acccatgagacttgtagccacagga

SEQ ID NO: 4466323 - DNA, 25 bp, Homo sapien
gatgaggttcttaaacccatgagac

SEQ ID NO: 4466324 - DNA, 25 bp, Homo sapien
tgcagccttgatgaggttcttaaac

SEQ ID NO: 4466325 - DNA, 25 bp, Homo sapien
ggttcttaaacccatgagacttgta

SEQ ID NO: 4466326 - DNA, 25 bp, Homo sapien
gcgagtaggggtaggggatcaaaga

SEQ ID NO: 4466327 - DNA, 25 bp, Homo sapien
ccagggctcagggtggttgagggcg

SEQ ID NO: 4466328 - DNA, 25 bp, Homo sapien
taggggatcaaagagtttgtcagta

SEQ ID NO: 4466329 - DNA, 25 bp, Homo sapien
atctattctagtaaaggcccagggc

SEQ ID NO: 4466330 - DNA, 25 bp, Homo sapien
caagtcttctcagcttgggctgact

SEQ ID NO: 4466331 - DNA, 25 bp, Homo sapien
tgggctgactctctcacctcttgct

SEQ ID NO: 4466332 - DNA, 25 bp, Homo sapien
tagcacccgtctgcgggctcgatgg

SEQ ID NO: 4466333 - DNA, 25 bp, Homo sapien
gacagacgtccatcgagttaggccc

SEQ ID NO: 4466334 - DNA, 25 bp, Homo sapien
taaaggattctttccaagcgagatt

SEQ ID NO: 4466335 - DNA, 25 bp, Homo sapien
cataggtgatttgtacctcagagta

SEQ ID NO: 4466336 - DNA, 25 bp, Homo sapien
gtcaaatatctactgtgcccaaatg

SEQ ID NO: 4466337 - DNA, 25 bp, Homo sapien
gagccactggcctgtaattgtttga

SEQ ID NO: 4466338 - DNA, 25 bp, Homo sapien
aaactgttctgtaagggtgctaaca

SEQ ID NO: 4466339 - DNA, 25 bp, Homo sapien
tgtacgtggacaaatatcaggagag

SEQ ID NO: 4466340 - DNA, 25 bp, Homo sapien
cgttatgcatttcagctaagaccat

SEQ ID NO: 4466341 - DNA, 25 bp, Homo sapien
ctgtagaaagttttgtcttagccct

SEQ ID NO: 4466342 - DNA, 25 bp, Homo sapien
gcggatcccgcggagaaataattgt

SEQ ID NO: 4466343 - DNA, 25 bp, Homo sapien
gagtgagtcagtcgcggttaacaga

SEQ ID NO: 4466344 - DNA, 25 bp, Homo sapien
taagaaagacgttggctgtcagcgg

SEQ ID NO: 4466345 - DNA, 25 bp, Homo sapien
taattgtaaagagtctccgtgctgg

SEQ ID NO: 4466346 - DNA, 25 bp, Homo sapien
aaagcgatccaacggtgcgaggagt

SEQ ID NO: 4466347 - DNA, 25 bp, Homo sapien
gagatagcgccgtgagcaaagcgat

SEQ ID NO: 4466348 - DNA, 25 bp, Homo sapien
tgagcaaagcgatccaacggtgcga

SEQ ID NO: 4466349 - DNA, 25 bp, Homo sapien
ctttatcgagagatagcgccgtgag

SEQ ID NO: 4466350 - DNA, 25 bp, Homo sapien
cccgcggcggaagccgcaacaacaa

SEQ ID NO: 4466351 - DNA, 25 bp, Homo sapien
ccacccgcggcggaagccgcaacaa

SEQ ID NO: 4466352 - DNA, 25 bp, Homo sapien
tcttccacccgcggcggaagccgca

SEQ ID NO: 4466353 - DNA, 25 bp, Homo sapien
cttcttccacccgcggcggaagccg

SEQ ID NO: 4466354 - DNA, 25 bp, Homo sapien
gcggaggcagtctctccgaagcgct

SEQ ID NO: 4466355 - DNA, 25 bp, Homo sapien
gcggcgccggtgaaaatgtcctccc

SEQ ID NO: 4466356 - DNA, 25 bp, Homo sapien
gaccaccgcggcgccggtgaaaatg

SEQ ID NO: 4466357 - DNA, 25 bp, Homo sapien
ggcagtctctccgaagcgctacagc

SEQ ID NO: 4466358 - DNA, 25 bp, Homo sapien
actaagatccagaaagggcctttgg

SEQ ID NO: 4466359 - DNA, 25 bp, Homo sapien
agggaccatccgttcatctgcacag

SEQ ID NO: 4466360 - DNA, 25 bp, Homo sapien
aataaccccgtggatccgtggagtg

SEQ ID NO: 4466361 - DNA, 25 bp, Homo sapien
tacacgtgtgcatggcactcggcca

SEQ ID NO: 4466362 - DNA, 25 bp, Homo sapien
tggtgattgattaccagggactgtg

SEQ ID NO: 4466363 - DNA, 25 bp, Homo sapien
cgtggtgactcacgcatataattct

SEQ ID NO: 4466364 - DNA, 25 bp, Homo sapien
atgaggaagttttggatctctgtta

SEQ ID NO: 4466365 - DNA, 25 bp, Homo sapien
tttgtcatgtgaattttaccccagt

SEQ ID NO: 4466366 - DNA, 25 bp, Homo sapien
caggataattagtatatccagcatc

SEQ ID NO: 4466367 - DNA, 25 bp, Homo sapien
tgttaccagaggttggttaggattc

SEQ ID NO: 4466368 - DNA, 25 bp, Homo sapien
agagagctcagtcctcctatctagc

SEQ ID NO: 4466369 - DNA, 25 bp, Homo sapien
gttaaccacattcactctacagggc

SEQ ID NO: 4466370 - DNA, 25 bp, Homo sapien
gaggtactagaaaggtgtgccagaa

SEQ ID NO: 4466371 - DNA, 25 bp, Homo sapien
cagtcaaaggatctcaaaaacgtag

SEQ ID NO: 4466372 - DNA, 25 bp, Homo sapien
gagagagcacttttgttaagagcag

SEQ ID NO: 4466373 - DNA, 25 bp, Homo sapien
tagccagtggttctactgatcagcc

SEQ ID NO: 4466374 - DNA, 25 bp, Homo sapien
actgcgcctaccctaggtctgcatt

SEQ ID NO: 4466375 - DNA, 25 bp, Homo sapien
gcgcctaccctaggtctgcattttt

SEQ ID NO: 4466376 - DNA, 25 bp, Homo sapien
tctctcgcatattgtacagtacccc

SEQ ID NO: 4466377 - DNA, 25 bp, Homo sapien
ttcttacacagaagtatgttaaccc

SEQ ID NO: 4466378 - DNA, 25 bp, Homo sapien
tgactgtgcacattctagtgaccag

SEQ ID NO: 4466379 - DNA, 25 bp, Homo sapien
ctggagtccagaactcaagctctga

SEQ ID NO: 4466380 - DNA, 25 bp, Homo sapien
tagtgaccaggatactacactggag

SEQ ID NO: 4466381 - DNA, 25 bp, Homo sapien
tagtaaaataagtgctgcccaagtc

SEQ ID NO: 4466382 - DNA, 25 bp, Homo sapien
gttatctttggagactgatgtttac

SEQ ID NO: 4466383 - DNA, 25 bp, Homo sapien
ctgcaaagagatcctgtggctcttg

SEQ ID NO: 4466384 - DNA, 25 bp, Homo sapien
gagatcctgtggctcttggtcttgt

SEQ ID NO: 4466385 - DNA, 25 bp, Homo sapien
ggaagaagggatgtagttatctttg

SEQ ID NO: 4466386 - DNA, 25 bp, Homo sapien
gccatttaggaggttcctagagtaa

SEQ ID NO: 4466387 - DNA, 25 bp, Homo sapien
agccatttaggaggttcctagagta

SEQ ID NO: 4466388 - DNA, 25 bp, Homo sapien
aagccatttaggaggttcctagagt

SEQ ID NO: 4466389 - DNA, 25 bp, Homo sapien
catgaccacaccactgcactccagc

SEQ ID NO: 4466390 - DNA, 25 bp, Homo sapien
gggaagatcacttgagcctgggagg

SEQ ID NO: 4466391 - DNA, 25 bp, Homo sapien
ctcagaaggttgaggtgggaagatc

SEQ ID NO: 4466392 - DNA, 25 bp, Homo sapien
tcggggctgcagtgagccatgacca

SEQ ID NO: 4466393 - DNA, 25 bp, Homo sapien
tttggctagcaccttcttctgatta

SEQ ID NO: 4466394 - DNA, 25 bp, Homo sapien
cttctgattattttgtgtgctgtcc

SEQ ID NO: 4466395 - DNA, 25 bp, Homo sapien
gctgtccaaggatagctccactgtg

SEQ ID NO: 4466396 - DNA, 25 bp, Homo sapien
tccaaggatagctccactgtggcat

SEQ ID NO: 4466397 - DNA, 25 bp, Homo sapien
gctggggcttcgaagaatttgtggc

SEQ ID NO: 4466398 - DNA, 25 bp, Homo sapien
ctcctcataggttggctggggcttc

SEQ ID NO: 4466399 - DNA, 25 bp, Homo sapien
ctcataggttggctggggcttcgaa

SEQ ID NO: 4466400 - DNA, 25 bp, Homo sapien
ttggctggggcttcgaagaatttgt

SEQ ID NO: 4466401 - DNA, 25 bp, Homo sapien
aatcaaattgatcctcctgttcttc

SEQ ID NO: 4466402 - DNA, 25 bp, Homo sapien
caggatcagttataccgactgtcaa

SEQ ID NO: 4466403 - DNA, 25 bp, Homo sapien
tatcttctcaggatcagttataccg

SEQ ID NO: 4466404 - DNA, 25 bp, Homo sapien
tataccgactgtcaaatcaaattga

SEQ ID NO: 4466405 - DNA, 25 bp, Homo sapien
aaataatttgggattcaagctattg

SEQ ID NO: 4466406 - DNA, 25 bp, Homo sapien
aggaagacactttggctgcctaatg

SEQ ID NO: 4466407 - DNA, 25 bp, Homo sapien
accacttaaggagataaagatgcca

SEQ ID NO: 4466408 - DNA, 25 bp, Homo sapien
gatgtcctgacctagaccacttaag

SEQ ID NO: 4466409 - DNA, 25 bp, Homo sapien
tggatactgacaatccatcagttgt

SEQ ID NO: 4466410 - DNA, 25 bp, Homo sapien
caatccatcagttgttaccatgcca

SEQ ID NO: 4466411 - DNA, 25 bp, Homo sapien
acaaagcagcactggatactgacaa

SEQ ID NO: 4466412 - DNA, 25 bp, Homo sapien
catgccaatatttgggctggttaca

SEQ ID NO: 4466413 - DNA, 25 bp, Homo sapien
ctttgtaggctacatatgcattcat

SEQ ID NO: 4466414 - DNA, 25 bp, Homo sapien
tgtaactttgtaggctacatatgca

SEQ ID NO: 4466415 - DNA, 25 bp, Homo sapien
gtaggctacatatgcattcatacca

SEQ ID NO: 4466416 - DNA, 25 bp, Homo sapien
gtgttgtaactttgtaggctacata

SEQ ID NO: 4466417 - DNA, 25 bp, Homo sapien
cgcaggtggatccaatgatactcaa

SEQ ID NO: 4466418 - DNA, 25 bp, Homo sapien
gactagtggtaagtttagggcttca

SEQ ID NO: 4466419 - DNA, 25 bp, Homo sapien
gatatgatggaaaaacacgcaggtg

SEQ ID NO: 4466420 - DNA, 25 bp, Homo sapien
gacacctctaaggtatgaggcaggg

SEQ ID NO: 4466421 - DNA, 25 bp, Homo sapien
tacgtgtgtactagagatgtgcaag

SEQ ID NO: 4466422 - DNA, 25 bp, Homo sapien
tcctggttacatactctagagaaat

SEQ ID NO: 4466423 - DNA, 25 bp, Homo sapien
ggtatatgaactaactacagccatg

SEQ ID NO: 4466424 - DNA, 25 bp, Homo sapien
tatttgcagtacctatgacccacgg

SEQ ID NO: 4466425 - DNA, 25 bp, Homo sapien
taaatcttctttttactgcaaactg

SEQ ID NO: 4466426 - DNA, 25 bp, Homo sapien
taaagacccagaaagtcactaaatc

SEQ ID NO: 4466427 - DNA, 25 bp, Homo sapien
tatgaggctcttctccgggggcgga

SEQ ID NO: 4466428 - DNA, 25 bp, Homo sapien
ctgagagtgcttctcggaaagcttc

SEQ ID NO: 4466429 - DNA, 25 bp, Homo sapien
tttcaagaaattctgcagaagaaga

SEQ ID NO: 4466430 - DNA, 25 bp, Homo sapien
ccttcccaactttcacttttgtcat

SEQ ID NO: 4466431 - DNA, 25 bp, Homo sapien
cctccgtttttcaagaaattctgca

SEQ ID NO: 4466432 - DNA, 25 bp, Homo sapien
gaagaatcttccttcccaactttca

SEQ ID NO: 4466433 - DNA, 25 bp, Homo sapien
atgatttacaatcctctgaaggtac

SEQ ID NO: 4466434 - DNA, 25 bp, Homo sapien
tccaagaactctctgacgtcagggt

SEQ ID NO: 4466435 - DNA, 25 bp, Homo sapien
tctttttccaagaactctctgacgt

SEQ ID NO: 4466436 - DNA, 25 bp, Homo sapien
tcagggtcctgtaacatggtaggat

SEQ ID NO: 4466437 - DNA, 25 bp, Homo sapien
gcagggatggcaagttatctgctgc

SEQ ID NO: 4466438 - DNA, 25 bp, Homo sapien
agaaggcagggatggcaagttatct

SEQ ID NO: 4466439 - DNA, 25 bp, Homo sapien
aggcagggatggcaagttatctgct

SEQ ID NO: 4466440 - DNA, 25 bp, Homo sapien
agggatggcaagttatctgctgccc

SEQ ID NO: 4466441 - DNA, 25 bp, Homo sapien
tgaggagaccagcaccactcaatgt

SEQ ID NO: 4466442 - DNA, 25 bp, Homo sapien
ggtcattttgctgacggcatctgtg

SEQ ID NO: 4466443 - DNA, 25 bp, Homo sapien
ctttgttgaacatcttgaggagacc

SEQ ID NO: 4466444 - DNA, 25 bp, Homo sapien
cagcaccactcaatgtctgggtacc

SEQ ID NO: 4466445 - DNA, 25 bp, Homo sapien
ccataagcctgaggtgtaggtggag

SEQ ID NO: 4466446 - DNA, 25 bp, Homo sapien
aggtaagaggcacagggctactcac

SEQ ID NO: 4466447 - DNA, 25 bp, Homo sapien
cctgaggtgtaggtggaggtaagag

SEQ ID NO: 4466448 - DNA, 25 bp, Homo sapien
aggtgtaggtggaggtaagaggcac

SEQ ID NO: 4466449 - DNA, 25 bp, Homo sapien
aacagcatgcagtttccgtaagcgc

SEQ ID NO: 4466450 - DNA, 25 bp, Homo sapien
cctatggttgactagagtttctaca

SEQ ID NO: 4466451 - DNA, 25 bp, Homo sapien
cagtttccgtaagcgctgctcctca

SEQ ID NO: 4466452 - DNA, 25 bp, Homo sapien
tagagtttctacaacagcatgcagt

SEQ ID NO: 4466453 - DNA, 25 bp, Homo sapien
ttcaacttggatggctgagaggatt

SEQ ID NO: 4466454 - DNA, 25 bp, Homo sapien
gccctcgcatctccagttcactaga

SEQ ID NO: 4466455 - DNA, 25 bp, Homo sapien
agttcactagagacaacaatttccc

SEQ ID NO: 4466456 - DNA, 25 bp, Homo sapien
ggattggaacagcatgccctcgcat

SEQ ID NO: 4466457 - DNA, 25 bp, Homo sapien
gagtggtagcctctctgtacaagag

SEQ ID NO: 4466458 - DNA, 25 bp, Homo sapien
gaaggctacacatagtctgctacag

SEQ ID NO: 4466459 - DNA, 25 bp, Homo sapien
tgcacgttctagagtagggcaaact

SEQ ID NO: 4466460 - DNA, 25 bp, Homo sapien
catgtgcacatcgtatagtcttgca

SEQ ID NO: 4466461 - DNA, 25 bp, Homo sapien
gggacaaatcagctgacactgcatg

SEQ ID NO: 4466462 - DNA, 25 bp, Homo sapien
ctgagtttcactgggttaggcctac

SEQ ID NO: 4466463 - DNA, 25 bp, Homo sapien
gagggctctgcaacccagtcactta

SEQ ID NO: 4466464 - DNA, 25 bp, Homo sapien
caatgccgcccactgcatatctggg

SEQ ID NO: 4466465 - DNA, 25 bp, Homo sapien
ccaggaggcgaatgtagtcactcag

SEQ ID NO: 4466466 - DNA, 25 bp, Homo sapien
aaactgggctgtgttcagcgctagc

SEQ ID NO: 4466467 - DNA, 25 bp, Homo sapien
tgacaatgccgtgttgtcctcagag

SEQ ID NO: 4466468 - DNA, 25 bp, Homo sapien
cagctgggagagtgcccgtgacaat

SEQ ID NO: 4466469 - DNA, 25 bp, Homo sapien
tcctccatgcaatgccaagccagtt

SEQ ID NO: 4466470 - DNA, 25 bp, Homo sapien
ccatgtagttacctgactgcccata

SEQ ID NO: 4466471 - DNA, 25 bp, Homo sapien
gtgacaagctctctcagtcccctgg

SEQ ID NO: 4466472 - DNA, 25 bp, Homo sapien
ggctctggtgacaagctctctcagt

SEQ ID NO: 4466473 - DNA, 25 bp, Homo sapien
caaccttccaggctctatgaggcat

SEQ ID NO: 4466474 - DNA, 25 bp, Homo sapien
tctaagtagcctgcccagttctaag

SEQ ID NO: 4466475 - DNA, 25 bp, Homo sapien
ccaaatagcaatgggagaggacaat

SEQ ID NO: 4466476 - DNA, 25 bp, Homo sapien
acaacgcacaagctccctaatggga

SEQ ID NO: 4466477 - DNA, 25 bp, Homo sapien
tgccctgcaaaagttccccgaatat

SEQ ID NO: 4466478 - DNA, 25 bp, Homo sapien
cgcccacccggacttgcttaatagg

SEQ ID NO: 4466479 - DNA, 25 bp, Homo sapien
gctccccaaaatctatttgctagtt

SEQ ID NO: 4466480 - DNA, 25 bp, Homo sapien
gcagcagcctggatcaaggatctgt

SEQ ID NO: 4466481 - DNA, 25 bp, Homo sapien
gaggaggagcacaaccagctcttca

SEQ ID NO: 4466482 - DNA, 25 bp, Homo sapien
ggttgaggaggagcacaaccagctc

SEQ ID NO: 4466483 - DNA, 25 bp, Homo sapien
ttgaggaggagcacaaccagctctt

SEQ ID NO: 4466484 - DNA, 25 bp, Homo sapien
gaggagcacaaccagctcttcaaga

SEQ ID NO: 4466485 - DNA, 25 bp, Homo sapien
agcttatcaggcttgttggcccaca

SEQ ID NO: 4466486 - DNA, 25 bp, Homo sapien
tcttcatgcgctggtcgaaggcagc

SEQ ID NO: 4466487 - DNA, 25 bp, Homo sapien
gaggatctcgtccttggcctgctgc

SEQ ID NO: 4466488 - DNA, 25 bp, Homo sapien
gccagcgctgccatgtcttcatgcg

SEQ ID NO: 4466489 - DNA, 25 bp, Homo sapien
accgtgcccagccctggctaatttt

SEQ ID NO: 4466490 - DNA, 25 bp, Homo sapien
ccgtgcccagccctggctaattttt

SEQ ID NO: 4466491 - DNA, 25 bp, Homo sapien
gagtatctgagactataagtgggtg

SEQ ID NO: 4466492 - DNA, 25 bp, Homo sapien
ctataagtgggtgctaccacgccca

SEQ ID NO: 4466493 - DNA, 25 bp, Homo sapien
tctgagactataagtgggtgctacc

SEQ ID NO: 4466494 - DNA, 25 bp, Homo sapien
gagactataagtgggtgctaccacg

SEQ ID NO: 4466495 - DNA, 25 bp, Homo sapien
catattgagtcacccgagactccca

SEQ ID NO: 4466496 - DNA, 25 bp, Homo sapien
agtccctttcatattgagtcacccg

SEQ ID NO: 4466497 - DNA, 25 bp, Homo sapien
tgttgaaatcctctcgaagtccctt

SEQ ID NO: 4466498 - DNA, 25 bp, Homo sapien
tcaaaccgtatcacttcttttcgga

SEQ ID NO: 4466499 - DNA, 25 bp, Homo sapien
aggatcaagcacacacccccccaaa

SEQ ID NO: 4466500 - DNA, 25 bp, Homo sapien
ctaggatcaagcacacaccccccca

SEQ ID NO: 4466501 - DNA, 25 bp, Homo sapien
taggatcaagcacacacccccccaa

SEQ ID NO: 4466502 - DNA, 25 bp, Homo sapien
gatcaagcacacacccccccaaaga

SEQ ID NO: 4466503 - DNA, 25 bp, Homo sapien
tggtccagccacaagtgtaagattg

SEQ ID NO: 4466504 - DNA, 25 bp, Homo sapien
cacaagtgtaagattgccactgttc

SEQ ID NO: 4466505 - DNA, 25 bp, Homo sapien
ccagccacaagtgtaagattgccac

SEQ ID NO: 4466506 - DNA, 25 bp, Homo sapien
tgtggtccagccacaagtgtaagat

SEQ ID NO: 4466507 - DNA, 25 bp, Homo sapien
ccgagggtatatggcagctgcaaga

SEQ ID NO: 4466508 - DNA, 25 bp, Homo sapien
tatatggcagctgcaagatttgtgt

SEQ ID NO: 4466509 - DNA, 25 bp, Homo sapien
agcaggtggaacagctgtaatttcc

SEQ ID NO: 4466510 - DNA, 25 bp, Homo sapien
ctgccaaggccttgaaaggctttgt

SEQ ID NO: 4466511 - DNA, 25 bp, Homo sapien
ctacactgaccatccagtttttgct

SEQ ID NO: 4466512 - DNA, 25 bp, Homo sapien
tacactgaccatccagtttttgctt

SEQ ID NO: 4466513 - DNA, 25 bp, Homo sapien
gatggtggtgtttattgctgaccaa

SEQ ID NO: 4466514 - DNA, 25 bp, Homo sapien
attgctgaccaaggccaaacacagt

SEQ ID NO: 4466515 - DNA, 25 bp, Homo sapien
tcaaggtacttgatcacgtggttct

SEQ ID NO: 4466516 - DNA, 25 bp, Homo sapien
tgtgagtaaaggagtgtctcaaggt

SEQ ID NO: 4466517 - DNA, 25 bp, Homo sapien
gagtgtctcaaggtacttgatcacg

SEQ ID NO: 4466518 - DNA, 25 bp, Homo sapien
acttgatcacgtggttcttgaagtc

SEQ ID NO: 4466519 - DNA, 25 bp, Homo sapien
ggggacattaagcaagtgcccccac

SEQ ID NO: 4466520 - DNA, 25 bp, Homo sapien
agtggggacattaagcaagtgcccc

SEQ ID NO: 4466521 - DNA, 25 bp, Homo sapien
tggggacattaagcaagtgccccca

SEQ ID NO: 4466522 - DNA, 25 bp, Homo sapien
gaagtggggacattaagcaagtgcc

SEQ ID NO: 4466523 - DNA, 25 bp, Homo sapien
ggaaggcttcccagtactttgccag

SEQ ID NO: 4466524 - DNA, 25 bp, Homo sapien
taattccaccacctattgtaggtct

SEQ ID NO: 4466525 - DNA, 25 bp, Homo sapien
tataaaaaggcagcgtcacacaggt

SEQ ID NO: 4466526 - DNA, 25 bp, Homo sapien
ccagcctaggcaggatgcatcacta

SEQ ID NO: 4466527 - DNA, 25 bp, Homo sapien
cataaccttttcatggcaccatcag

SEQ ID NO: 4466528 - DNA, 25 bp, Homo sapien
cttggttaggagtattccagacctg

SEQ ID NO: 4466529 - DNA, 25 bp, Homo sapien
caacttcttggttaggagtattcca

SEQ ID NO: 4466530 - DNA, 25 bp, Homo sapien
cttcttggttaggagtattccagac

SEQ ID NO: 4466531 - DNA, 25 bp, Homo sapien
ctgggcaacttcttggttaggagta

SEQ ID NO: 4466532 - DNA, 25 bp, Homo sapien
ggaagcccatccttgactgacgaga

SEQ ID NO: 4466533 - DNA, 25 bp, Homo sapien
ggatcaccctatctagaggcagagg

SEQ ID NO: 4466534 - DNA, 25 bp, Homo sapien
caaggctcccatagtggcagtcagc

SEQ ID NO: 4466535 - DNA, 25 bp, Homo sapien
tatataagacttgccatcagagggc

SEQ ID NO: 4466536 - DNA, 25 bp, Homo sapien
attccagggctagggtagggaacat

SEQ ID NO: 4466537 - DNA, 25 bp, Homo sapien
ctaaataacattctctggctgggta

SEQ ID NO: 4466538 - DNA, 25 bp, Homo sapien
gtttctaaataacattctctggctg

SEQ ID NO: 4466539 - DNA, 25 bp, Homo sapien
gtagggaacattcaagatgagcctg

SEQ ID NO: 4466540 - DNA, 25 bp, Homo sapien
caatggtaatgtggaaagcgcctcc

SEQ ID NO: 4466541 - DNA, 25 bp, Homo sapien
cagttcaagcatcaggttctccaca

SEQ ID NO: 4466542 - DNA, 25 bp, Homo sapien
tggtgtgtccagatcacgaagcgac

SEQ ID NO: 4466543 - DNA, 25 bp, Homo sapien
gaggcttctggctcagtacccctaa

SEQ ID NO: 4466544 - DNA, 25 bp, Homo sapien
ccctgagtgtgctcggcaaaagaca

SEQ ID NO: 4466545 - DNA, 25 bp, Homo sapien
caaagacagagtgtacatccaggca

SEQ ID NO: 4466546 - DNA, 25 bp, Homo sapien
tgacacatgcaccagaagacaggct

SEQ ID NO: 4466547 - DNA, 25 bp, Homo sapien
cagacagtatgaacgccaggtggca

SEQ ID NO: 4466548 - DNA, 25 bp, Homo sapien
tcatttaatcccctcctgatggaca

SEQ ID NO: 4466549 - DNA, 25 bp, Homo sapien
tctagaagtgcctatgaggatcctc

SEQ ID NO: 4466550 - DNA, 25 bp, Homo sapien
aaacttccatctctagaggtgacca

SEQ ID NO: 4466551 - DNA, 25 bp, Homo sapien
taaacagtgctatgacgggcatttc

SEQ ID NO: 4466552 - DNA, 25 bp, Homo sapien
tcatgtctgccattaaggtccccag

SEQ ID NO: 4466553 - DNA, 25 bp, Homo sapien
tcaggtgggtatccaaatgggactt

SEQ ID NO: 4466554 - DNA, 25 bp, Homo sapien
ctcatatgctagctgtccccagggt

SEQ ID NO: 4466555 - DNA, 25 bp, Homo sapien
ccaatgcttaccaggtcaggtgggt

SEQ ID NO: 4466556 - DNA, 25 bp, Homo sapien
gcgctcggctcggagccctaactct

SEQ ID NO: 4466557 - DNA, 25 bp, Homo sapien
ccgcgcgctcggctcggagccctaa

SEQ ID NO: 4466558 - DNA, 25 bp, Homo sapien
gctcggagccctaactctcccggag

SEQ ID NO: 4466559 - DNA, 25 bp, Homo sapien
gctcggctcggagccctaactctcc

SEQ ID NO: 4466560 - DNA, 25 bp, Homo sapien
taaaaagttagccttctagaaagaa

SEQ ID NO: 4466561 - DNA, 25 bp, Homo sapien
ttctttctagaaggctaacttttta

SEQ ID NO: 4466562 - DNA, 25 bp, Homo sapien
ccaccgacgggatgtgaacttccag

SEQ ID NO: 4466563 - DNA, 25 bp, Homo sapien
gccccaccgacgggatgtgaacttc

SEQ ID NO: 4466564 - DNA, 25 bp, Homo sapien
cccaccgacgggatgtgaacttcca

SEQ ID NO: 4466565 - DNA, 25 bp, Homo sapien
caccgacgggatgtgaacttccagc

SEQ ID NO: 4466566 - DNA, 25 bp, Homo sapien
catggtccgcgaggctggcaaatcc

SEQ ID NO: 4466567 - DNA, 25 bp, Homo sapien
cagcgcggggaaatcctgcgggtcc

SEQ ID NO: 4466568 - DNA, 25 bp, Homo sapien
tggggtccctcaagagctcgaacca

SEQ ID NO: 4466569 - DNA, 25 bp, Homo sapien
agagctcgaaccatggtccgcgagg

SEQ ID NO: 4466570 - DNA, 25 bp, Homo sapien
gctgcccggggactctccgctcccg

SEQ ID NO: 4466571 - DNA, 25 bp, Homo sapien
gggcagcgggtctgcgcgtgaggcc

SEQ ID NO: 4466572 - DNA, 25 bp, Homo sapien
gcacctgcgcctggcgacgtgccca

SEQ ID NO: 4466573 - DNA, 25 bp, Homo sapien
gcgtgaggccccgcgggaggacgcc

SEQ ID NO: 4466574 - DNA, 25 bp, Homo sapien
gaactcgctgtagcgccttggcacc

SEQ ID NO: 4466575 - DNA, 25 bp, Homo sapien
cttgtgcagcgcgtggaactcgctg

SEQ ID NO: 4466576 - DNA, 25 bp, Homo sapien
ttggcaccgtgtgtctgcgcccgct

SEQ ID NO: 4466577 - DNA, 25 bp, Homo sapien
tagcgccttggcaccgtgtgtctgc

SEQ ID NO: 4466578 - DNA, 25 bp, Homo sapien
gaggtttaccgcgtgcgatcacagc

SEQ ID NO: 4466579 - DNA, 25 bp, Homo sapien
cctggtgagtggtggaccggccgag

SEQ ID NO: 4466580 - DNA, 25 bp, Homo sapien
gcgtgcgatcacagcatcccgactg

SEQ ID NO: 4466581 - DNA, 25 bp, Homo sapien
ttcgggctctactgggacagaccct

SEQ ID NO: 4466582 - DNA, 25 bp, Homo sapien
cctgccggcgctgttccaaccctct

SEQ ID NO: 4466583 - DNA, 25 bp, Homo sapien
agtcgggcactttgtacagcttctt

SEQ ID NO: 4466584 - DNA, 25 bp, Homo sapien
cctccagttgggcaggcgtttcgag

SEQ ID NO: 4466585 - DNA, 25 bp, Homo sapien
ctggtcctccagttgggcaggcgtt

SEQ ID NO: 4466586 - DNA, 25 bp, Homo sapien
aggttgtaccccatgacgcggcata

SEQ ID NO: 4466587 - DNA, 25 bp, Homo sapien
ggtgaataacatccccaagttgtgg

SEQ ID NO: 4466588 - DNA, 25 bp, Homo sapien
tactaatttgcatagcgcagtgcca

SEQ ID NO: 4466589 - DNA, 25 bp, Homo sapien
tgacagcagagcgttgaaccaggct

SEQ ID NO: 4466590 - DNA, 25 bp, Homo sapien
cctcctggttcaggtacaggatgcc

SEQ ID NO: 4466591 - DNA, 25 bp, Homo sapien
ccccagttgctagccttggggtctg

SEQ ID NO: 4466592 - DNA, 25 bp, Homo sapien
gaattccagtaactccttgggcacc

SEQ ID NO: 4466593 - DNA, 25 bp, Homo sapien
gggaagtgccgaagtctcaggaatt

SEQ ID NO: 4466594 - DNA, 25 bp, Homo sapien
actgctgacagcccctggcccccgc

SEQ ID NO: 4466595 - DNA, 25 bp, Homo sapien
ctgacagcccctggcccccgccatc

SEQ ID NO: 4466596 - DNA, 25 bp, Homo sapien
ctgctcactgctgacagcccctggc

SEQ ID NO: 4466597 - DNA, 25 bp, Homo sapien
gctcactgctgacagcccctggccc

SEQ ID NO: 4466598 - DNA, 25 bp, Homo sapien
gaagagaaacactgtaagctgcctg

SEQ ID NO: 4466599 - DNA, 25 bp, Homo sapien
ggcggtcatgctggatcctggcaga

SEQ ID NO: 4466600 - DNA, 25 bp, Homo sapien
acaagccccagttccggaggtggcg

SEQ ID NO: 4466601 - DNA, 25 bp, Homo sapien
tcaagagagctggtgagggcggtca

SEQ ID NO: 4466602 - DNA, 25 bp, Homo sapien
tgctgtcgccaggcaggaactccct

SEQ ID NO: 4466603 - DNA, 25 bp, Homo sapien
tcgccaggcaggaactccctcaggg

SEQ ID NO: 4466604 - DNA, 25 bp, Homo sapien
tgtcgccaggcaggaactccctcag

SEQ ID NO: 4466605 - DNA, 25 bp, Homo sapien
gctgtcgccaggcaggaactccctc

SEQ ID NO: 4466606 - DNA, 25 bp, Homo sapien
gcctcctagcatatggccactaggg

SEQ ID NO: 4466607 - DNA, 25 bp, Homo sapien
agacggggttgccatcaccagggac

SEQ ID NO: 4466608 - DNA, 25 bp, Homo sapien
caagcgcgggctagggctttgactt

SEQ ID NO: 4466609 - DNA, 25 bp, Homo sapien
aaacagggtcatgaaccatgggtgc

SEQ ID NO: 4466610 - DNA, 25 bp, Homo sapien
aagctcaggacaggccgctggtgct

SEQ ID NO: 4466611 - DNA, 25 bp, Homo sapien
ggatccacatggaagctcaggacag

SEQ ID NO: 4466612 - DNA, 25 bp, Homo sapien
caaacatagggatccacatggaagc

SEQ ID NO: 4466613 - DNA, 25 bp, Homo sapien
gggttgcaaacatagggatccacat

SEQ ID NO: 4466614 - DNA, 25 bp, Homo sapien
acattcttttcacatcagcttggta

SEQ ID NO: 4466615 - DNA, 25 bp, Homo sapien
gggtcccaggagccgagaaatgcaa

SEQ ID NO: 4466616 - DNA, 25 bp, Homo sapien
atgaagcctccgcattcccaggtca

SEQ ID NO: 4466617 - DNA, 25 bp, Homo sapien
tcagcccccacttgggagtaggagc

SEQ ID NO: 4466618 - DNA, 25 bp, Homo sapien
ttggctgggctttatctgggctgat

SEQ ID NO: 4466619 - DNA, 25 bp, Homo sapien
acaggccgcctttggctgggcttta

SEQ ID NO: 4466620 - DNA, 25 bp, Homo sapien
gccgcctttggctgggctttatctg

SEQ ID NO: 4466621 - DNA, 25 bp, Homo sapien
cctttggctgggctttatctgggct

SEQ ID NO: 4466622 - DNA, 25 bp, Homo sapien
tatatggagttcataggacagaggc

SEQ ID NO: 4466623 - DNA, 25 bp, Homo sapien
ctaccaatgcgagccaagttctgag

SEQ ID NO: 4466624 - DNA, 25 bp, Homo sapien
tggctgttgggctctaagagcatac

SEQ ID NO: 4466625 - DNA, 25 bp, Homo sapien
taagagcatacaaattctaccacct

SEQ ID NO: 4466626 - DNA, 25 bp, Homo sapien
ggaagcgggggttgccgtgagccga

SEQ ID NO: 4466627 - DNA, 25 bp, Homo sapien
ggcaacaagagtgaaactccgtctc

SEQ ID NO: 4466628 - DNA, 25 bp, Homo sapien
gatcgtgccattgcattccagcctg

SEQ ID NO: 4466629 - DNA, 25 bp, Homo sapien
gagattctcctacctcagcttcccg

SEQ ID NO: 4466630 - DNA, 25 bp, Homo sapien
ctcctgccttgggccgagcacggtg

SEQ ID NO: 4466631 - DNA, 25 bp, Homo sapien
cctccagtctatgttaagggatgta

SEQ ID NO: 4466632 - DNA, 25 bp, Homo sapien
gcttctaaactttgccagctactgg

SEQ ID NO: 4466633 - DNA, 25 bp, Homo sapien
ttgacccaggagctacccaggaaaa

SEQ ID NO: 4466634 - DNA, 25 bp, Homo sapien
aacatgcctgcaactctcctgtggc

SEQ ID NO: 4466635 - DNA, 25 bp, Homo sapien
gatcgaggtggagaagccctttgcc

SEQ ID NO: 4466636 - DNA, 25 bp, Homo sapien
gaagcaagggctactactgggcaat

SEQ ID NO: 4466637 - DNA, 25 bp, Homo sapien
agctgaacgcaatgtccctgagaag

SEQ ID NO: 4466638 - DNA, 25 bp, Homo sapien
ttgtgctcataggaaaacaggctgg

SEQ ID NO: 4466639 - DNA, 25 bp, Homo sapien
ttcattccttgttaagaggctttga

SEQ ID NO: 4466640 - DNA, 25 bp, Homo sapien
gttcattccttgttaagaggctttg

SEQ ID NO: 4466641 - DNA, 25 bp, Homo sapien
cctgttcattccttgttaagaggct

SEQ ID NO: 4466642 - DNA, 25 bp, Homo sapien
gctctacagtccctcagacattgca

SEQ ID NO: 4466643 - DNA, 25 bp, Homo sapien
tcataaaaacccttaatagtataca

SEQ ID NO: 4466644 - DNA, 25 bp, Homo sapien
ggccaagactccaccaaggcataaa

SEQ ID NO: 4466645 - DNA, 25 bp, Homo sapien
cctgaaagctaactcagcatctatt

SEQ ID NO: 4466646 - DNA, 25 bp, Homo sapien
ccaggtccctttagcatgcagagta

SEQ ID NO: 4466647 - DNA, 25 bp, Homo sapien
tgagtaccctagatgcaattggcca

SEQ ID NO: 4466648 - DNA, 25 bp, Homo sapien
tgcagagtaatggtgatccctccag

SEQ ID NO: 4466649 - DNA, 25 bp, Homo sapien
tgccttgcagctggatttgcgactt

SEQ ID NO: 4466650 - DNA, 25 bp, Homo sapien
tggcagggagatacaatatcacacc

SEQ ID NO: 4466651 - DNA, 25 bp, Homo sapien
cattaacatggatcagaggtactgg

SEQ ID NO: 4466652 - DNA, 25 bp, Homo sapien
tgttccattggaccttggctaggga

SEQ ID NO: 4466653 - DNA, 25 bp, Homo sapien
cagttgggatttgggcattgctaac

SEQ ID NO: 4466654 - DNA, 25 bp, Homo sapien
tgtatctgggagtagagagctaacc

SEQ ID NO: 4466655 - DNA, 25 bp, Homo sapien
tggcttaaccaaacaatgactcctc

SEQ ID NO: 4466656 - DNA, 25 bp, Homo sapien
catttacatcaggaaagaggtcttg

SEQ ID NO: 4466657 - DNA, 25 bp, Homo sapien
gacttagtctgatggtttgtggacc

SEQ ID NO: 4466658 - DNA, 25 bp, Homo sapien
gaaaggtggccgtgcctctaagcat

SEQ ID NO: 4466659 - DNA, 25 bp, Homo sapien
ccagcaggtccatagcagtaggctt

SEQ ID NO: 4466660 - DNA, 25 bp, Homo sapien
tatgaagatcttctcccagcaggtc

SEQ ID NO: 4466661 - DNA, 25 bp, Homo sapien
gaaaatcggtgtatcctatctgccc

SEQ ID NO: 4466662 - DNA, 25 bp, Homo sapien
gattctcctgtcagcctctagagca

SEQ ID NO: 4466663 - DNA, 25 bp, Homo sapien
ggcttactgcaactgctgtttcccg

SEQ ID NO: 4466664 - DNA, 25 bp, Homo sapien
ctcctgtcagcctctagagcagctg

SEQ ID NO: 4466665 - DNA, 25 bp, Homo sapien
ttggcttactgcaactgctgtttcc

SEQ ID NO: 4466666 - DNA, 25 bp, Homo sapien
gatgtaccaggtagcccactttggg

SEQ ID NO: 4466667 - DNA, 25 bp, Homo sapien
cccgggcaaattatagagctggtca

SEQ ID NO: 4466668 - DNA, 25 bp, Homo sapien
caaaagacctgttggaggctactct

SEQ ID NO: 4466669 - DNA, 25 bp, Homo sapien
cagaggcatctaccataggaccaaa

SEQ ID NO: 4466670 - DNA, 25 bp, Homo sapien
acaatcaagttgaaggtagcctctt

SEQ ID NO: 4466671 - DNA, 25 bp, Homo sapien
ggctggttgattgcttgattggccc

SEQ ID NO: 4466672 - DNA, 25 bp, Homo sapien
attttgagttagctgagtggctttc

SEQ ID NO: 4466673 - DNA, 25 bp, Homo sapien
gataaagccctaaacttgattctga

SEQ ID NO: 4466674 - DNA, 25 bp, Homo sapien
caggcttgtctaaactggtctcaag

SEQ ID NO: 4466675 - DNA, 25 bp, Homo sapien
tataacccattgcactaacactcag

SEQ ID NO: 4466676 - DNA, 25 bp, Homo sapien
gagaagtttgtcacaagccctttgg

SEQ ID NO: 4466677 - DNA, 25 bp, Homo sapien
gaagaggcagctcttgtagctccta

SEQ ID NO: 4466678 - DNA, 25 bp, Homo sapien
tagaggatacaagctaggaataaac

SEQ ID NO: 4466679 - DNA, 25 bp, Homo sapien
tagcaggagtaacatatgttagagg

SEQ ID NO: 4466680 - DNA, 25 bp, Homo sapien
tgttcaagttgtttaggatttaggc

SEQ ID NO: 4466681 - DNA, 25 bp, Homo sapien
cagatatttattgaactagcaggag

SEQ ID NO: 4466682 - DNA, 25 bp, Homo sapien
tctcttccatccgtattctcacagc

SEQ ID NO: 4466683 - DNA, 25 bp, Homo sapien
ttctcttccatccgtattctcacag

SEQ ID NO: 4466684 - DNA, 25 bp, Homo sapien
cttccatccgtattctcacagccat

SEQ ID NO: 4466685 - DNA, 25 bp, Homo sapien
tcttccatccgtattctcacagcca

SEQ ID NO: 4466686 - DNA, 25 bp, Homo sapien
cgtggtatatgttcgttaattgact

SEQ ID NO: 4466687 - DNA, 25 bp, Homo sapien
cacatgacaacagcgtggtatatgt

SEQ ID NO: 4466688 - DNA, 25 bp, Homo sapien
tgttcgttaattgactagaagatga

SEQ ID NO: 4466689 - DNA, 25 bp, Homo sapien
caacagcgtggtatatgttcgttaa

SEQ ID NO: 4466690 - DNA, 25 bp, Homo sapien
aggagttagggttgtcttgtgagga

SEQ ID NO: 4466691 - DNA, 25 bp, Homo sapien
atccagcttgcttgtggaggagtta

SEQ ID NO: 4466692 - DNA, 25 bp, Homo sapien
gaggaactgacagttaccagatttg

SEQ ID NO: 4466693 - DNA, 25 bp, Homo sapien
gtgattggttgttcttctcatccag

SEQ ID NO: 4466694 - DNA, 25 bp, Homo sapien
taagtgttgtctagctgaagatctg

SEQ ID NO: 4466695 - DNA, 25 bp, Homo sapien
ccgttattgcaggaagaactttgag

SEQ ID NO: 4466696 - DNA, 25 bp, Homo sapien
tcatcattccaagttcttagtctaa

SEQ ID NO: 4466697 - DNA, 25 bp, Homo sapien
taaacgtctgggaatattgattaca

SEQ ID NO: 4466698 - DNA, 25 bp, Homo sapien
tacctcttctctgctataataatag

SEQ ID NO: 4466699 - DNA, 25 bp, Homo sapien
tacatgtaatccaaacgttgttagg

SEQ ID NO: 4466700 - DNA, 25 bp, Homo sapien
gaagatcctattctagtcctcttag

SEQ ID NO: 4466701 - DNA, 25 bp, Homo sapien
tctagcaccttgcagtttacaaaat

SEQ ID NO: 4466702 - DNA, 25 bp, Homo sapien
cggtacttctgagcgttgtaacctc

SEQ ID NO: 4466703 - DNA, 25 bp, Homo sapien
tatccggtacttctgagcgttgtaa

SEQ ID NO: 4466704 - DNA, 25 bp, Homo sapien
tcaatatccggtacttctgagcgtt

SEQ ID NO: 4466705 - DNA, 25 bp, Homo sapien
acttctgagcgttgtaacctcttca

SEQ ID NO: 4466706 - DNA, 25 bp, Homo sapien
cccagctagtcagggaaattttctt

SEQ ID NO: 4466707 - DNA, 25 bp, Homo sapien
ccactgctcccagctagtcagggaa

SEQ ID NO: 4466708 - DNA, 25 bp, Homo sapien
tgctcccagctagtcagggaaattt

SEQ ID NO: 4466709 - DNA, 25 bp, Homo sapien
agctagtcagggaaattttcttcaa

SEQ ID NO: 4466710 - DNA, 25 bp, Homo sapien
caagggttgctttatccctggatga

SEQ ID NO: 4466711 - DNA, 25 bp, Homo sapien
tatccctggatgacatgagatggac

SEQ ID NO: 4466712 - DNA, 25 bp, Homo sapien
gatgacatgagatggacatcaccac

SEQ ID NO: 4466713 - DNA, 25 bp, Homo sapien
ccagccatgggcacagaccaagagc

SEQ ID NO: 4466714 - DNA, 25 bp, Homo sapien
gaacaatagcattggatccccatgg

SEQ ID NO: 4466715 - DNA, 25 bp, Homo sapien
cattggaggtgtgggtatactgggt

SEQ ID NO: 4466716 - DNA, 25 bp, Homo sapien
ttgcccttgccacgaaaagggagaa

SEQ ID NO: 4466717 - DNA, 25 bp, Homo sapien
cgggtgaagaggtagccattgccct

SEQ ID NO: 4466718 - DNA, 25 bp, Homo sapien
cagtgtagttatagtgggggttggg

SEQ ID NO: 4466719 - DNA, 25 bp, Homo sapien
gctagggatgggaattattctttaa

SEQ ID NO: 4466720 - DNA, 25 bp, Homo sapien
gcagtgtagttatagtgggggttgg

SEQ ID NO: 4466721 - DNA, 25 bp, Homo sapien
ggagcaatgtcccccaagtgggcag

SEQ ID NO: 4466722 - DNA, 25 bp, Homo sapien
agcaatgtcccccaagtgggcaggc

SEQ ID NO: 4466723 - DNA, 25 bp, Homo sapien
caatgtcccccaagtgggcaggcat

SEQ ID NO: 4466724 - DNA, 25 bp, Homo sapien
ctacaggagcaatgtcccccaagtg

SEQ ID NO: 4466725 - DNA, 25 bp, Homo sapien
ttctgagtcgactgggtaccgcggg

SEQ ID NO: 4466726 - DNA, 25 bp, Homo sapien
cccttggcggagcttagggcacaag

SEQ ID NO: 4466727 - DNA, 25 bp, Homo sapien
aagagtgggtaatgagactttcctc

SEQ ID NO: 4466728 - DNA, 25 bp, Homo sapien
gggagccgcccttggcggagcttag

SEQ ID NO: 4466729 - DNA, 25 bp, Homo sapien
gccggtgtggaccgggagtttgcca

SEQ ID NO: 4466730 - DNA, 25 bp, Homo sapien
gtggaccgggagtttgccacctgga

SEQ ID NO: 4466731 - DNA, 25 bp, Homo sapien
gtgtggaccgggagtttgccacctg

SEQ ID NO: 4466732 - DNA, 25 bp, Homo sapien
ctagccggtgtggaccgggagtttg

SEQ ID NO: 4466733 - DNA, 25 bp, Homo sapien
aataattccctcgagggacctgaga

SEQ ID NO: 4466734 - DNA, 25 bp, Homo sapien
tctggcagcgaagcgtgtacttggt

SEQ ID NO: 4466735 - DNA, 25 bp, Homo sapien
aaagcgggatgggtttcgtgcctct

SEQ ID NO: 4466736 - DNA, 25 bp, Homo sapien
gagcctggagccttaggaacagcca

SEQ ID NO: 4466737 - DNA, 25 bp, Homo sapien
caagagggagatgcttgctaaaccg

SEQ ID NO: 4466738 - DNA, 25 bp, Homo sapien
taaaaatctggttgaaacacaatta

SEQ ID NO: 4466739 - DNA, 25 bp, Homo sapien
acaattaaaaatccacaagagggag

SEQ ID NO: 4466740 - DNA, 25 bp, Homo sapien
aaaatccacaagagggagatgcttg

SEQ ID NO: 4466741 - DNA, 25 bp, Homo sapien
gctgtcacaggagaactaagtgcat

SEQ ID NO: 4466742 - DNA, 25 bp, Homo sapien
ggctgtcacaggagaactaagtgca

SEQ ID NO: 4466743 - DNA, 25 bp, Homo sapien
ctgtcacaggagaactaagtgcatg

SEQ ID NO: 4466744 - DNA, 25 bp, Homo sapien
tgaatgctagagcattgtgagcatc

SEQ ID NO: 4466745 - DNA, 25 bp, Homo sapien
tacaaaggacgagcaaatactcaag

SEQ ID NO: 4466746 - DNA, 25 bp, Homo sapien
tgtgagcatcatatgtattttgtgt

SEQ ID NO: 4466747 - DNA, 25 bp, Homo sapien
aagagagctcaaagacttatttaaa

SEQ ID NO: 4466748 - DNA, 25 bp, Homo sapien
tcaccatgcccagctaattgttttt

SEQ ID NO: 4466749 - DNA, 25 bp, Homo sapien
ccaggctggagtccacctcctgggt

SEQ ID NO: 4466750 - DNA, 25 bp, Homo sapien
accatgcccagctaattgtttttgt

SEQ ID NO: 4466751 - DNA, 25 bp, Homo sapien
cgtcaccatgcccagctaattgttt

SEQ ID NO: 4466752 - DNA, 25 bp, Homo sapien
gtctggcacctttcttcctcgttct

SEQ ID NO: 4466753 - DNA, 25 bp, Homo sapien
caacagagcgataatccgtctgaaa

SEQ ID NO: 4466754 - DNA, 25 bp, Homo sapien
tccatgaggccaggcatgcctagca

SEQ ID NO: 4466755 - DNA, 25 bp, Homo sapien
aaaaaagaaatacgtactccatgag

SEQ ID NO: 4466756 - DNA, 25 bp, Homo sapien
ggccaggcatgcctagcactttggg

SEQ ID NO: 4466757 - DNA, 25 bp, Homo sapien
tagagcctgggcctaagcataagtg

SEQ ID NO: 4466758 - DNA, 25 bp, Homo sapien
taagcataagtggacttgattctgg

SEQ ID NO: 4466759 - DNA, 25 bp, Homo sapien
tggacttgattctggtaagtaaaac

SEQ ID NO: 4466760 - DNA, 25 bp, Homo sapien
cctgggcctaagcataagtggactt

SEQ ID NO: 4466761 - DNA, 25 bp, Homo sapien
ccttattaacagagaaacgcttgag

SEQ ID NO: 4466762 - DNA, 25 bp, Homo sapien
cactaaaaccgaatccaaatggtgc

SEQ ID NO: 4466763 - DNA, 25 bp, Homo sapien
tgcctagaagttcaatgtggcaagg

SEQ ID NO: 4466764 - DNA, 25 bp, Homo sapien
tcaaactggactggtttaaagagca

SEQ ID NO: 4466765 - DNA, 25 bp, Homo sapien
ttctacatctctaccattaagaggc

SEQ ID NO: 4466766 - DNA, 25 bp, Homo sapien
ctacatctctaccattaagaggcag

SEQ ID NO: 4466767 - DNA, 25 bp, Homo sapien
tctacatctctaccattaagaggca

SEQ ID NO: 4466768 - DNA, 25 bp, Homo sapien
ccttctacatctctaccattaagag

SEQ ID NO: 4466769 - DNA, 25 bp, Homo sapien
ggactcgaggaaggccattggcaat

SEQ ID NO: 4466770 - DNA, 25 bp, Homo sapien
tcttgccaatcgctaaacgtaggac

SEQ ID NO: 4466771 - DNA, 25 bp, Homo sapien
ctctgtcagtgcatgattcttgcca

SEQ ID NO: 4466772 - DNA, 25 bp, Homo sapien
cttccttgtgccctccggagtcgag

SEQ ID NO: 4466773 - DNA, 25 bp, Homo sapien
tctctcacgcgggttccgccagctt

SEQ ID NO: 4466774 - DNA, 25 bp, Homo sapien
ccgcaaggtcgcaccgcctccagtg

SEQ ID NO: 4466775 - DNA, 25 bp, Homo sapien
tccagtgcagatcccgcccatctgt

SEQ ID NO: 4466776 - DNA, 25 bp, Homo sapien
atcccgcccatctgtgcgcctcctg

SEQ ID NO: 4466777 - DNA, 25 bp, Homo sapien
aagccccacgtcctgcaccggacta

SEQ ID NO: 4466778 - DNA, 25 bp, Homo sapien
tgcaccggactagttcccttcgcaa

SEQ ID NO: 4466779 - DNA, 25 bp, Homo sapien
ggactagttcccttcgcaacaccaa

SEQ ID NO: 4466780 - DNA, 25 bp, Homo sapien
cgtcctgcaccggactagttccctt

SEQ ID NO: 4466781 - DNA, 25 bp, Homo sapien
ggccgaaagtcttccgcaactgctg

SEQ ID NO: 4466782 - DNA, 25 bp, Homo sapien
tcctcgctgacatccaggccgaaag

SEQ ID NO: 4466783 - DNA, 25 bp, Homo sapien
aaagtcttccgcaactgctgggtgc

SEQ ID NO: 4466784 - DNA, 25 bp, Homo sapien
acatccaggccgaaagtcttccgca

SEQ ID NO: 4466785 - DNA, 25 bp, Homo sapien
aaaattcgacgcctacagactacag

SEQ ID NO: 4466786 - DNA, 25 bp, Homo sapien
taggaaatacagtttgacctgcccc

SEQ ID NO: 4466787 - DNA, 25 bp, Homo sapien
aattattacagattgggcgtcttcc

SEQ ID NO: 4466788 - DNA, 25 bp, Homo sapien
gtggagccggacaccctattccaga

SEQ ID NO: 4466789 - DNA, 25 bp, Homo sapien
ttctcgtatctcttcagcactctca

SEQ ID NO: 4466790 - DNA, 25 bp, Homo sapien
ctggaggagatcagtaacatattct

SEQ ID NO: 4466791 - DNA, 25 bp, Homo sapien
acatattctcgtatctcttcagcac

SEQ ID NO: 4466792 - DNA, 25 bp, Homo sapien
gatcagtaacatattctcgtatctc

SEQ ID NO: 4466793 - DNA, 25 bp, Homo sapien
caactcctgatcattcttttgccat

SEQ ID NO: 4466794 - DNA, 25 bp, Homo sapien
tgctgcaaaggatccgaaatcaact

SEQ ID NO: 4466795 - DNA, 25 bp, Homo sapien
ggatccgaaatcaactcctgatcat

SEQ ID NO: 4466796 - DNA, 25 bp, Homo sapien
caaaggatccgaaatcaactcctga

SEQ ID NO: 4466797 - DNA, 25 bp, Homo sapien
ggttcagtaaatgcaggaacttcct

SEQ ID NO: 4466798 - DNA, 25 bp, Homo sapien
tgttttaacctctgcagtcgtgtca

SEQ ID NO: 4466799 - DNA, 25 bp, Homo sapien
cttcctaccccgctttagatggtcg

SEQ ID NO: 4466800 - DNA, 25 bp, Homo sapien
tagatggtcgcctgatttctgccca

SEQ ID NO: 4466801 - DNA, 25 bp, Homo sapien
aggactgcaagcctgtcctgtccct

SEQ ID NO: 4466802 - DNA, 25 bp, Homo sapien
cttgttcacagacaatgcgcccaca

SEQ ID NO: 4466803 - DNA, 25 bp, Homo sapien
ttcacagacaatgcgcccacagatc

SEQ ID NO: 4466804 - DNA, 25 bp, Homo sapien
gagcaggactgcaagcctgtcctgt

SEQ ID NO: 4466805 - DNA, 25 bp, Homo sapien
cactggatattttagggaagaaatt

SEQ ID NO: 4466806 - DNA, 25 bp, Homo sapien
tcactggatattttagggaagaaat

SEQ ID NO: 4466807 - DNA, 25 bp, Homo sapien
gtttgagtcacgctgtaaaatatct

SEQ ID NO: 4466808 - DNA, 25 bp, Homo sapien
gagtcacgctgtaaaatatcttgtt

SEQ ID NO: 4466809 - DNA, 25 bp, Homo sapien
gcagtttctggctcttgtttgagtc

SEQ ID NO: 4466810 - DNA, 25 bp, Homo sapien
ggctcttgtttgagtcacgctgtaa

SEQ ID NO: 4466811 - DNA, 25 bp, Homo sapien
ctccagaccagacttaattcgcaat

SEQ ID NO: 4466812 - DNA, 25 bp, Homo sapien
aagaaggtccttggtagagatgtcc

SEQ ID NO: 4466813 - DNA, 25 bp, Homo sapien
cttaattcgcaattcttgatgagga

SEQ ID NO: 4466814 - DNA, 25 bp, Homo sapien
tttgtctttatgcttgatagccttc

SEQ ID NO: 4466815 - DNA, 25 bp, Homo sapien
gggccaagttccaaaatatgacaat

SEQ ID NO: 4466816 - DNA, 25 bp, Homo sapien
ggaatcttgatggtctaactctcta

SEQ ID NO: 4466817 - DNA, 25 bp, Homo sapien
cagtggtgtgactgcctcctcagtt

SEQ ID NO: 4466818 - DNA, 25 bp, Homo sapien
tactgacagagacactaaaacctgg

SEQ ID NO: 4466819 - DNA, 25 bp, Homo sapien
tctgactcatcatcaatgacttggg

SEQ ID NO: 4466820 - DNA, 25 bp, Homo sapien
ctgctatgatactctgctagtgaat

SEQ ID NO: 4466821 - DNA, 25 bp, Homo sapien
gaccttcttagaaagtcgagaggcg

SEQ ID NO: 4466822 - DNA, 25 bp, Homo sapien
tcgagaggcgtgtcgaagttctctc

SEQ ID NO: 4466823 - DNA, 25 bp, Homo sapien
ccaatttggtcagtggctggttcaa

SEQ ID NO: 4466824 - DNA, 25 bp, Homo sapien
ccagaactcccaaaggctcttcaga

SEQ ID NO: 4466825 - DNA, 25 bp, Homo sapien
gggactggtacatgttgggatttac

SEQ ID NO: 4466826 - DNA, 25 bp, Homo sapien
ggctggttcaaggttccattggcaa

SEQ ID NO: 4466827 - DNA, 25 bp, Homo sapien
gataccatgtcctccaaaattaaaa

SEQ ID NO: 4466828 - DNA, 25 bp, Homo sapien
cagagcaacgataccatgtcctcca

SEQ ID NO: 4466829 - DNA, 25 bp, Homo sapien
tgtagcttcactagttactcaggag

SEQ ID NO: 4466830 - DNA, 25 bp, Homo sapien
taaaggcaattagcatgatgatatt

SEQ ID NO: 4466831 - DNA, 25 bp, Homo sapien
caacaacaaatgaaaaataatccca

SEQ ID NO: 4466832 - DNA, 25 bp, Homo sapien
caacaacaacaaatgaaaaataatc

SEQ ID NO: 4466833 - DNA, 25 bp, Homo sapien
caacaacaacaacaaatgaaaaata

SEQ ID NO: 4466834 - DNA, 25 bp, Homo sapien
acaaatgaaaaataatcccatcttt

SEQ ID NO: 4466835 - DNA, 25 bp, Homo sapien
atcctgaagaacggaaagccttctt

SEQ ID NO: 4466836 - DNA, 25 bp, Homo sapien
caaatcctgaagaacggaaagcctt

SEQ ID NO: 4466837 - DNA, 25 bp, Homo sapien
gaactctagtccaaatcctgaagaa

SEQ ID NO: 4466838 - DNA, 25 bp, Homo sapien
aatcctgaagaacggaaagccttct

SEQ ID NO: 4466839 - DNA, 25 bp, Homo sapien
caccagccaccatcaaagccttcct

SEQ ID NO: 4466840 - DNA, 25 bp, Homo sapien
taatccctctgacaagcagagaagc

SEQ ID NO: 4466841 - DNA, 25 bp, Homo sapien
ttcctgaaattcttgatcctggatt

SEQ ID NO: 4466842 - DNA, 25 bp, Homo sapien
gaagcccagggctgatgtacagaga

SEQ ID NO: 4466843 - DNA, 25 bp, Homo sapien
tcagatttggaaccctgaccagtct

SEQ ID NO: 4466844 - DNA, 25 bp, Homo sapien
caaattatccagttgaaccaagagg

SEQ ID NO: 4466845 - DNA, 25 bp, Homo sapien
tagatgatgccttctcaagagcagt

SEQ ID NO: 4466846 - DNA, 25 bp, Homo sapien
tccatcagaatagcgacaagtcatc

SEQ ID NO: 4466847 - DNA, 25 bp, Homo sapien
aatagaaatttagtgggaaggatat

SEQ ID NO: 4466848 - DNA, 25 bp, Homo sapien
atagaaatttagtgggaaggatata

SEQ ID NO: 4466849 - DNA, 25 bp, Homo sapien
caaatagaaatttagtgggaaggat

SEQ ID NO: 4466850 - DNA, 25 bp, Homo sapien
gggggtgtaccaggatctgccctcc

SEQ ID NO: 4466851 - DNA, 25 bp, Homo sapien
gctatccaaagtcgtcctctgtggg

SEQ ID NO: 4466852 - DNA, 25 bp, Homo sapien
ttagctgtggctgctatccaaagtc

SEQ ID NO: 4466853 - DNA, 25 bp, Homo sapien
cgaagaagacgatatgtagcctgga

SEQ ID NO: 4466854 - DNA, 25 bp, Homo sapien
tgcactgttttgacagattaatgct

SEQ ID NO: 4466855 - DNA, 25 bp, Homo sapien
tgaaagaagatgaacgtcaatgact

SEQ ID NO: 4466856 - DNA, 25 bp, Homo sapien
tgacagattaatgctttgaacgctg

SEQ ID NO: 4466857 - DNA, 25 bp, Homo sapien
cgctgtcaatgatttaccactaaac

SEQ ID NO: 4466858 - DNA, 25 bp, Homo sapien
cggatagtcattaggaaattccaca

SEQ ID NO: 4466859 - DNA, 25 bp, Homo sapien
tctgggacaagcagtcaattaggtc

SEQ ID NO: 4466860 - DNA, 25 bp, Homo sapien
gcagtcaattaggtccacacagccc

SEQ ID NO: 4466861 - DNA, 25 bp, Homo sapien
acacagcccagaagacaacctgacg

SEQ ID NO: 4466862 - DNA, 25 bp, Homo sapien
ttaacgactgtgaatctctaaaact

SEQ ID NO: 4466863 - DNA, 25 bp, Homo sapien
aaactgtaaagcctacaccagtgta

SEQ ID NO: 4466864 - DNA, 25 bp, Homo sapien
taacgactgtgaatctctaaaactg

SEQ ID NO: 4466865 - DNA, 25 bp, Homo sapien
tctctaaaactgtaaagcctacacc

SEQ ID NO: 4466866 - DNA, 25 bp, Homo sapien
cttctctaggctgatcctctgccat

SEQ ID NO: 4466867 - DNA, 25 bp, Homo sapien
ttttaccctgagttgaacccatagc

SEQ ID NO: 4466868 - DNA, 25 bp, Homo sapien
tttaccctgagttgaacccatagcc

SEQ ID NO: 4466869 - DNA, 25 bp, Homo sapien
taccctgagttgaacccatagcctt

SEQ ID NO: 4466870 - DNA, 25 bp, Homo sapien
tgctgctggcagataaaatgctggc

SEQ ID NO: 4466871 - DNA, 25 bp, Homo sapien
gctgctggcagataaaatgctggca

SEQ ID NO: 4466872 - DNA, 25 bp, Homo sapien
agccttgatgcattgttgcagtcaa

SEQ ID NO: 4466873 - DNA, 25 bp, Homo sapien
tgcattgttgcagtcaacatcctcc

SEQ ID NO: 4466874 - DNA, 25 bp, Homo sapien
gcagtcaacatcctccctgctgttt

SEQ ID NO: 4466875 - DNA, 25 bp, Homo sapien
cattgttgcagtcaacatcctccct

SEQ ID NO: 4466876 - DNA, 25 bp, Homo sapien
attctcctagatcctgaagatactt

SEQ ID NO: 4466877 - DNA, 25 bp, Homo sapien
aattctcctagatcctgaagatact

SEQ ID NO: 4466878 - DNA, 25 bp, Homo sapien
ttctcctagatcctgaagatacttt

SEQ ID NO: 4466879 - DNA, 25 bp, Homo sapien
tctcctagatcctgaagatactttt

SEQ ID NO: 4466880 - DNA, 25 bp, Homo sapien
ccttcaaagctaattcaaaaccatc

SEQ ID NO: 4466881 - DNA, 25 bp, Homo sapien
gggatccttcccagctagaagcaag

SEQ ID NO: 4466882 - DNA, 25 bp, Homo sapien
tagaaaatagcatgatgaatgtggc

SEQ ID NO: 4466883 - DNA, 25 bp, Homo sapien
gatgatatttcatccctaaaggagg

SEQ ID NO: 4466884 - DNA, 25 bp, Homo sapien
gcagattagtttcagagagactccc

SEQ ID NO: 4466885 - DNA, 25 bp, Homo sapien
gaccacatgcatcccacgggccaca

SEQ ID NO: 4466886 - DNA, 25 bp, Homo sapien
tgtttgctgcttattcctctatacc

SEQ ID NO: 4466887 - DNA, 25 bp, Homo sapien
agtcccagaagcagattagtttcag

SEQ ID NO: 4466888 - DNA, 25 bp, Homo sapien
tagatgacaaaccaaggagtcctga

SEQ ID NO: 4466889 - DNA, 25 bp, Homo sapien
cacttggtttacatggtagactaga

SEQ ID NO: 4466890 - DNA, 25 bp, Homo sapien
aaagccccttgcatcattgttcctg

SEQ ID NO: 4466891 - DNA, 25 bp, Homo sapien
tccaagtagatagcgacactacagc

SEQ ID NO: 4466892 - DNA, 25 bp, Homo sapien
caaacttggcactcttaaactacct

SEQ ID NO: 4466893 - DNA, 25 bp, Homo sapien
tacaagtccatagacaatctggccc

SEQ ID NO: 4466894 - DNA, 25 bp, Homo sapien
tcagaataaaagtctaagtccttgc

SEQ ID NO: 4466895 - DNA, 25 bp, Homo sapien
ccaacgggttttcatctcaatcaga

SEQ ID NO: 4466896 - DNA, 25 bp, Homo sapien
tcagaacggaatgctcttttatcac

SEQ ID NO: 4466897 - DNA, 25 bp, Homo sapien
ttttatcacaaacaaccaagagtca

SEQ ID NO: 4466898 - DNA, 25 bp, Homo sapien
cagaagaatcagaacggaatgctct

SEQ ID NO: 4466899 - DNA, 25 bp, Homo sapien
tgctcttttatcacaaacaaccaag

SEQ ID NO: 4466900 - DNA, 25 bp, Homo sapien
ctttaataggaaacttcacaaccat

SEQ ID NO: 4466901 - DNA, 25 bp, Homo sapien
tgcccagcccttattcttgagttga

SEQ ID NO: 4466902 - DNA, 25 bp, Homo sapien
cagcccttattcttgagttgaatac

SEQ ID NO: 4466903 - DNA, 25 bp, Homo sapien
cccagcccttattcttgagttgaat

SEQ ID NO: 4466904 - DNA, 25 bp, Homo sapien
gagttgaatactgaacaatgaataa

SEQ ID NO: 4466905 - DNA, 25 bp, Homo sapien
cctaccaccagtgttgccaccagta

SEQ ID NO: 4466906 - DNA, 25 bp, Homo sapien
ctaccaccagtgttgccaccagtac

SEQ ID NO: 4466907 - DNA, 25 bp, Homo sapien
tgtgcctgaccaagtattaatatta

SEQ ID NO: 4466908 - DNA, 25 bp, Homo sapien
gctattaaacttaatcacttcatgt

SEQ ID NO: 4466909 - DNA, 25 bp, Homo sapien
gacttttccagcttaaactactgga

SEQ ID NO: 4466910 - DNA, 25 bp, Homo sapien
tatcccctaggacctaaggcaagag

SEQ ID NO: 4466911 - DNA, 25 bp, Homo sapien
aactccagtatgattatgaaagccc

SEQ ID NO: 4466912 - DNA, 25 bp, Homo sapien
gacgttctttcatcctctaggctgc

SEQ ID NO: 4466913 - DNA, 25 bp, Homo sapien
gaccagctcaggtaagatcaaccca

SEQ ID NO: 4466914 - DNA, 25 bp, Homo sapien
tgaaagccctcaagtgagaccagct

SEQ ID NO: 4466915 - DNA, 25 bp, Homo sapien
tccatctcattaggagaatcttaag

SEQ ID NO: 4466916 - DNA, 25 bp, Homo sapien
gctcagtggtagcagccttaggaac

SEQ ID NO: 4466917 - DNA, 25 bp, Homo sapien
ttaagagaattcctgtctgtctggc

SEQ ID NO: 4466918 - DNA, 25 bp, Homo sapien
cagatctaccaggatagagtttggc

SEQ ID NO: 4466919 - DNA, 25 bp, Homo sapien
ttcaattatcttacttcaggactca

SEQ ID NO: 4466920 - DNA, 25 bp, Homo sapien
caattatcttacttcaggactcaga

SEQ ID NO: 4466921 - DNA, 25 bp, Homo sapien
attatcttacttcaggactcagaca

SEQ ID NO: 4466922 - DNA, 25 bp, Homo sapien
gttcctgtcacattcaattatctta

SEQ ID NO: 4466923 - DNA, 25 bp, Homo sapien
ttattctgcttcattaaccccttct

SEQ ID NO: 4466924 - DNA, 25 bp, Homo sapien
tccttgatggatcttggaatccaat

SEQ ID NO: 4466925 - DNA, 25 bp, Homo sapien
aaccccttctttgctccttgatgga

SEQ ID NO: 4466926 - DNA, 25 bp, Homo sapien
tcattaaccccttctttgctccttg

SEQ ID NO: 4466927 - DNA, 25 bp, Homo sapien
tagagctatgcaacaagcagggttc

SEQ ID NO: 4466928 - DNA, 25 bp, Homo sapien
gcacacaactgctggagggagtcca

SEQ ID NO: 4466929 - DNA, 25 bp, Homo sapien
tgagatattcaagcctgacgccaag

SEQ ID NO: 4466930 - DNA, 25 bp, Homo sapien
cagtgtttcactaaggacggccaga

SEQ ID NO: 4466931 - DNA, 25 bp, Homo sapien
cctaaaaggctattcctgggcaagt

SEQ ID NO: 4466932 - DNA, 25 bp, Homo sapien
ccagagttacacagtcagagcaaag

SEQ ID NO: 4466933 - DNA, 25 bp, Homo sapien
ggcaagtttgcactcaggctgctaa

SEQ ID NO: 4466934 - DNA, 25 bp, Homo sapien
gtgaaacttcctttaggccacactg

SEQ ID NO: 4466935 - DNA, 25 bp, Homo sapien
gggccgtagagccgccgctgctacg

SEQ ID NO: 4466936 - DNA, 25 bp, Homo sapien
gccccgggccgtagagccgccgctg

SEQ ID NO: 4466937 - DNA, 25 bp, Homo sapien
cccgggccgtagagccgccgctgct

SEQ ID NO: 4466938 - DNA, 25 bp, Homo sapien
ccgccgctgctacggggcccaggcc

SEQ ID NO: 4466939 - DNA, 25 bp, Homo sapien
gaaattaactcaaggctgcagagca

SEQ ID NO: 4466940 - DNA, 25 bp, Homo sapien
tccaaacaggatagggtcacaaacc

SEQ ID NO: 4466941 - DNA, 25 bp, Homo sapien
caaagcacagagatgatccaaccgt

SEQ ID NO: 4466942 - DNA, 25 bp, Homo sapien
cttaggctctggacacatggctgga

SEQ ID NO: 4466943 - DNA, 25 bp, Homo sapien
ctctggcctcctccaatggcaagcc

SEQ ID NO: 4466944 - DNA, 25 bp, Homo sapien
ctctctggcctcctccaatggcaag

SEQ ID NO: 4466945 - DNA, 25 bp, Homo sapien
aaaaagaagagcctttctctctggc

SEQ ID NO: 4466946 - DNA, 25 bp, Homo sapien
gcctcctccaatggcaagccccagt

SEQ ID NO: 4466947 - DNA, 25 bp, Homo sapien
tattgaaaggtttgttcccacagcc

SEQ ID NO: 4466948 - DNA, 25 bp, Homo sapien
tattattgaccaggaagccaccatt

SEQ ID NO: 4466949 - DNA, 25 bp, Homo sapien
ccagataggcaaattctgtggcttt

SEQ ID NO: 4466950 - DNA, 25 bp, Homo sapien
gatatagacttttgcacaatgagca

SEQ ID NO: 4466951 - DNA, 25 bp, Homo sapien
cctgggctcaacgagatctttctac

SEQ ID NO: 4466952 - DNA, 25 bp, Homo sapien
gctcaacgagatctttctacctcag

SEQ ID NO: 4466953 - DNA, 25 bp, Homo sapien
ggctcaacgagatctttctacctca

SEQ ID NO: 4466954 - DNA, 25 bp, Homo sapien
caattgcttagctaccttcagagta

SEQ ID NO: 4466955 - DNA, 25 bp, Homo sapien
ttcccacacaatataaggctgcctc

SEQ ID NO: 4466956 - DNA, 25 bp, Homo sapien
taacagaggtatcatgaaggcatat

SEQ ID NO: 4466957 - DNA, 25 bp, Homo sapien
ccatgaccagttttccatgagggaa

SEQ ID NO: 4466958 - DNA, 25 bp, Homo sapien
gacacttagtggacccagaacctgc

SEQ ID NO: 4466959 - DNA, 25 bp, Homo sapien
gaacctgccaatcaacatcacctat

SEQ ID NO: 4466960 - DNA, 25 bp, Homo sapien
ctgttccctagcgaaaagagtcctt

SEQ ID NO: 4466961 - DNA, 25 bp, Homo sapien
gcgaaaagagtccttcactgacact

SEQ ID NO: 4466962 - DNA, 25 bp, Homo sapien
tcttcagctacacagctgctgccaa

SEQ ID NO: 4466963 - DNA, 25 bp, Homo sapien
cttcagctacacagctgctgccaat

SEQ ID NO: 4466964 - DNA, 25 bp, Homo sapien
gatagatggcaaatccttccaggta

SEQ ID NO: 4466965 - DNA, 25 bp, Homo sapien
tgtgggcaactcaacttgtactcag

SEQ ID NO: 4466966 - DNA, 25 bp, Homo sapien
ccactaggtcaaggctgggtaagac

SEQ ID NO: 4466967 - DNA, 25 bp, Homo sapien
gaaggctgaggtgaacccactaggt

SEQ ID NO: 4466968 - DNA, 25 bp, Homo sapien
cttcggcaaatgtcatcaacgtgca

SEQ ID NO: 4466969 - DNA, 25 bp, Homo sapien
tactctcaatctgaaagttcctgaa

SEQ ID NO: 4466970 - DNA, 25 bp, Homo sapien
tcctgaaacacttaccaaccagctt

SEQ ID NO: 4466971 - DNA, 25 bp, Homo sapien
cccttgttcgtcatacttcggcaaa

SEQ ID NO: 4466972 - DNA, 25 bp, Homo sapien
gcctatattgccctagcagaaccaa

SEQ ID NO: 4466973 - DNA, 25 bp, Homo sapien
atcaccactagacccttgctgcaag

SEQ ID NO: 4466974 - DNA, 25 bp, Homo sapien
tcagctcggatgtatggaaccacag

SEQ ID NO: 4466975 - DNA, 25 bp, Homo sapien
ggaaccacagtacagtcatatgcag

SEQ ID NO: 4466976 - DNA, 25 bp, Homo sapien
tcttcatctctaaacatggtcaaat

SEQ ID NO: 4466977 - DNA, 25 bp, Homo sapien
tggtcaaattcatagtctcagggaa

SEQ ID NO: 4466978 - DNA, 25 bp, Homo sapien
tacatcacgcctagttcttcatctc

SEQ ID NO: 4466979 - DNA, 25 bp, Homo sapien
gtgctggaattacatcacgcctagt

SEQ ID NO: 4466980 - DNA, 25 bp, Homo sapien
tggctatgtagctctttagaagttc

SEQ ID NO: 4466981 - DNA, 25 bp, Homo sapien
aaaaataagctctgccatgcctctt

SEQ ID NO: 4466982 - DNA, 25 bp, Homo sapien
gcctcttcccctcataattggatgg

SEQ ID NO: 4466983 - DNA, 25 bp, Homo sapien
tagaagttcttatccccagagataa

SEQ ID NO: 4466984 - DNA, 25 bp, Homo sapien
ccatgaactcagtgattagggtttt

SEQ ID NO: 4466985 - DNA, 25 bp, Homo sapien
tgaactcagtgattagggttttcct

SEQ ID NO: 4466986 - DNA, 25 bp, Homo sapien
ggctatgcctaccttcacatgtggc

SEQ ID NO: 4466987 - DNA, 25 bp, Homo sapien
tccttttaggctatgcctaccttca

SEQ ID NO: 4466988 - DNA, 25 bp, Homo sapien
ggagatgccaactgaatttccatga

SEQ ID NO: 4466989 - DNA, 25 bp, Homo sapien
tgagtaaggcaatggaacatggtac

SEQ ID NO: 4466990 - DNA, 25 bp, Homo sapien
tgtggctaggcttagagtgtaacct

SEQ ID NO: 4466991 - DNA, 25 bp, Homo sapien
tctaagggttactcactatcctcag

SEQ ID NO: 4466992 - DNA, 25 bp, Homo sapien
agtgtcacagtgaattctgcaaagt

SEQ ID NO: 4466993 - DNA, 25 bp, Homo sapien
gcgtgcaccacaatgactgactaac

SEQ ID NO: 4466994 - DNA, 25 bp, Homo sapien
tgagtagaaagaacaagccagtagt

SEQ ID NO: 4466995 - DNA, 25 bp, Homo sapien
tttataaggtaattgagtagaaaga

SEQ ID NO: 4466996 - DNA, 25 bp, Homo sapien
ttggtcagtacatgcccagtggaca

SEQ ID NO: 4466997 - DNA, 25 bp, Homo sapien
tcaacgtcccacctcaagattcaag

SEQ ID NO: 4466998 - DNA, 25 bp, Homo sapien
cttagagtcaacgtcccacctcaag

SEQ ID NO: 4466999 - DNA, 25 bp, Homo sapien
gccacattggtcagtacatgcccag

SEQ ID NO: 4467000 - DNA, 25 bp, Homo sapien
ccacagcattgggagccggtatccc

SEQ ID NO: 4467001 - DNA, 25 bp, Homo sapien
cactgtcgtatgtctcaaccgggtt

SEQ ID NO: 4467002 - DNA, 25 bp, Homo sapien
tccagatcggcgtccaggtcaatga

SEQ ID NO: 4467003 - DNA, 25 bp, Homo sapien
cggaggctccactgctcaaggacat

SEQ ID NO: 4467004 - DNA, 25 bp, Homo sapien
tggcaccatctcctgagcgcccctg

SEQ ID NO: 4467005 - DNA, 25 bp, Homo sapien
cccctgcacctctttcttgctagct

SEQ ID NO: 4467006 - DNA, 25 bp, Homo sapien
attggcaccatctcctgagcgcccc

SEQ ID NO: 4467007 - DNA, 25 bp, Homo sapien
cattggcaccatctcctgagcgccc

SEQ ID NO: 4467008 - DNA, 25 bp, Homo sapien
gacttgactttctttagcaggcgac

SEQ ID NO: 4467009 - DNA, 25 bp, Homo sapien
tacactgcgggatgccttagccgcc

SEQ ID NO: 4467010 - DNA, 25 bp, Homo sapien
gttcccaaaggattgagcgctgccc

SEQ ID NO: 4467011 - DNA, 25 bp, Homo sapien
tcctttttggaaccggctacactgc

SEQ ID NO: 4467012 - DNA, 25 bp, Homo sapien
tgtaattggtcattacccacacact

SEQ ID NO: 4467013 - DNA, 25 bp, Homo sapien
tagtccagggcagttctgactggca

SEQ ID NO: 4467014 - DNA, 25 bp, Homo sapien
tacacatagtatttggcagttagtc

SEQ ID NO: 4467015 - DNA, 25 bp, Homo sapien
tgagcctcccacagagtacacatag

SEQ ID NO: 4467016 - DNA, 25 bp, Homo sapien
ctgcctgagctgaccctagactcac

SEQ ID NO: 4467017 - DNA, 25 bp, Homo sapien
ataagctgctgaagtttaatgctgc

SEQ ID NO: 4467018 - DNA, 25 bp, Homo sapien
tgaccctagactcacacccattctc

SEQ ID NO: 4467019 - DNA, 25 bp, Homo sapien
aataagctgctgaagtttaatgctg

SEQ ID NO: 4467020 - DNA, 25 bp, Homo sapien
gaaataggtattccctgctgcagct

SEQ ID NO: 4467021 - DNA, 25 bp, Homo sapien
tatactgcatctgctgggatcagct

SEQ ID NO: 4467022 - DNA, 25 bp, Homo sapien
gagctaccactggaatacaggcact

SEQ ID NO: 4467023 - DNA, 25 bp, Homo sapien
acaggcactaagagggcaccaccac

SEQ ID NO: 4467024 - DNA, 25 bp, Homo sapien
tttcatccacagactatcactgggc

SEQ ID NO: 4467025 - DNA, 25 bp, Homo sapien
tcactgggcttagaaggttgcaaca

SEQ ID NO: 4467026 - DNA, 25 bp, Homo sapien
tgcacctctatgtgagaaaatgggt

SEQ ID NO: 4467027 - DNA, 25 bp, Homo sapien
ggcaccaggatgtattcttagctga

SEQ ID NO: 4467028 - DNA, 25 bp, Homo sapien
caggttcttgcttatggttacatga

SEQ ID NO: 4467029 - DNA, 25 bp, Homo sapien
gtaatatggaaaggcaccctcagga

SEQ ID NO: 4467030 - DNA, 25 bp, Homo sapien
catgaaactgtatagcaaattttct

SEQ ID NO: 4467031 - DNA, 25 bp, Homo sapien
tttcaatagccaaaggtaatatgga

SEQ ID NO: 4467032 - DNA, 25 bp, Homo sapien
gagcacctattatgccccaaaccgg

SEQ ID NO: 4467033 - DNA, 25 bp, Homo sapien
caaaccggagattgttgtttctcaa

SEQ ID NO: 4467034 - DNA, 25 bp, Homo sapien
tgcatggttcctaacttcctttcct

SEQ ID NO: 4467035 - DNA, 25 bp, Homo sapien
caaaaaccgctcctctgcatggttc

SEQ ID NO: 4467036 - DNA, 25 bp, Homo sapien
cattggctagtagtcaacactgcta

SEQ ID NO: 4467037 - DNA, 25 bp, Homo sapien
tcttcatgacagttcccagttgaga

SEQ ID NO: 4467038 - DNA, 25 bp, Homo sapien
tgctactctgcaccacagaattcag

SEQ ID NO: 4467039 - DNA, 25 bp, Homo sapien
tacatagaaacgtcccaaaccacag

SEQ ID NO: 4467040 - DNA, 25 bp, Homo sapien
actctgtcagaggaaggtatggtcg

SEQ ID NO: 4467041 - DNA, 25 bp, Homo sapien
cagaggaaggtatggtcgagcaaaa

SEQ ID NO: 4467042 - DNA, 25 bp, Homo sapien
agaaaatttcccaggccatagcctg

SEQ ID NO: 4467043 - DNA, 25 bp, Homo sapien
ccaggccatagcctgagatatctac

SEQ ID NO: 4467044 - DNA, 25 bp, Homo sapien
agcagctctggaggcgggttactca

SEQ ID NO: 4467045 - DNA, 25 bp, Homo sapien
aatttccaaggcctctgaacacagc

SEQ ID NO: 4467046 - DNA, 25 bp, Homo sapien
tgcaggtcaggggatgataaggaaa

SEQ ID NO: 4467047 - DNA, 25 bp, Homo sapien
ggatgataaggaaatgaacagtgta

SEQ ID NO: 4467048 - DNA, 25 bp, Homo sapien
ggctgggagccgtctggattttttc

SEQ ID NO: 4467049 - DNA, 25 bp, Homo sapien
ttgtagctcttgacacatgctggct

SEQ ID NO: 4467050 - DNA, 25 bp, Homo sapien
ctgaaaatcaaagcctaaccccatg

SEQ ID NO: 4467051 - DNA, 25 bp, Homo sapien
taactctccacaggaactgaaaatc

SEQ ID NO: 4467052 - DNA, 25 bp, Homo sapien
gctggctgttccttaatctggtttc

SEQ ID NO: 4467053 - DNA, 25 bp, Homo sapien
cagccagctggctgttccttaatct

SEQ ID NO: 4467054 - DNA, 25 bp, Homo sapien
ccatgtgcctctcataatataagca

SEQ ID NO: 4467055 - DNA, 25 bp, Homo sapien
actcccatgtgcctctcataatata

SEQ ID NO: 4467056 - DNA, 25 bp, Homo sapien
gattatgctattctctcacctggca

SEQ ID NO: 4467057 - DNA, 25 bp, Homo sapien
tcatgcctcaagattagtcttacca

SEQ ID NO: 4467058 - DNA, 25 bp, Homo sapien
cctcctccagtcatagtgaacttct

SEQ ID NO: 4467059 - DNA, 25 bp, Homo sapien
tctgcagatgttaggatgaaatcca

SEQ ID NO: 4467060 - DNA, 25 bp, Homo sapien
gctgctgtaacatactgccatgagg

SEQ ID NO: 4467061 - DNA, 25 bp, Homo sapien
tctctaggacacaaggaagcagttc

SEQ ID NO: 4467062 - DNA, 25 bp, Homo sapien
tcataagtggcatgagaaacgaact

SEQ ID NO: 4467063 - DNA, 25 bp, Homo sapien
taaaaaagttgagagtgatgatgcc

SEQ ID NO: 4467064 - DNA, 25 bp, Homo sapien
agggaaatgcctacaccccagagac

SEQ ID NO: 4467065 - DNA, 25 bp, Homo sapien
gactttgttggcacatgccagctct

SEQ ID NO: 4467066 - DNA, 25 bp, Homo sapien
gaacaatcctccacttacagaggct

SEQ ID NO: 4467067 - DNA, 25 bp, Homo sapien
acaatcagtatccaatcatttcctg

SEQ ID NO: 4467068 - DNA, 25 bp, Homo sapien
gaagaaagcaggtcaacattaagtc

SEQ ID NO: 4467069 - DNA, 25 bp, Homo sapien
tctagactggtcaacatagaaatcc

SEQ ID NO: 4467070 - DNA, 25 bp, Homo sapien
taaacatcgaatagacaaaaggtct

SEQ ID NO: 4467071 - DNA, 25 bp, Homo sapien
tgagcaagctcatcaacgaaagcaa

SEQ ID NO: 4467072 - DNA, 25 bp, Homo sapien
tgttaagattgcagaactctccaaa

SEQ ID NO: 4467073 - DNA, 25 bp, Homo sapien
gaaaaagggcaagatttgtacacta

SEQ ID NO: 4467074 - DNA, 25 bp, Homo sapien
agaaaaagggcaagatttgtacact

SEQ ID NO: 4467075 - DNA, 25 bp, Homo sapien
ttaagattgcagaactctccaaact

SEQ ID NO: 4467076 - DNA, 25 bp, Homo sapien
tccaactggtggtaagcaggtaagc

SEQ ID NO: 4467077 - DNA, 25 bp, Homo sapien
gagagatgtactccttcacagtgac

SEQ ID NO: 4467078 - DNA, 25 bp, Homo sapien
cacagtgactaagatgtatagccac

SEQ ID NO: 4467079 - DNA, 25 bp, Homo sapien
gatttgcagcaactagaactctcat

SEQ ID NO: 4467080 - DNA, 25 bp, Homo sapien
ggaccactggatacccataaacaaa

SEQ ID NO: 4467081 - DNA, 25 bp, Homo sapien
gtaatcaagacatgtagtaatgcca

SEQ ID NO: 4467082 - DNA, 25 bp, Homo sapien
tttttaaacagtgctggaccactgg

SEQ ID NO: 4467083 - DNA, 25 bp, Homo sapien
gagtgcaatgccttatgccctgtaa

SEQ ID NO: 4467084 - DNA, 25 bp, Homo sapien
gggctacttacaccttgaattacag

SEQ ID NO: 4467085 - DNA, 25 bp, Homo sapien
caaaaaaggtacagcaataatggag

SEQ ID NO: 4467086 - DNA, 25 bp, Homo sapien
aaactgccacagttacatggtaagc

SEQ ID NO: 4467087 - DNA, 25 bp, Homo sapien
taagtatggtgagcttcttgggaga

SEQ ID NO: 4467088 - DNA, 25 bp, Homo sapien
tttctagtgttcagctacagggccg

SEQ ID NO: 4467089 - DNA, 25 bp, Homo sapien
tacagggccgcttctcagattccaa

SEQ ID NO: 4467090 - DNA, 25 bp, Homo sapien
caatcttgttgggaagagcggtccc

SEQ ID NO: 4467091 - DNA, 25 bp, Homo sapien
taacaagtcactgagggtaccacgt

SEQ ID NO: 4467092 - DNA, 25 bp, Homo sapien
gggcccctaaatcataacatgagag

SEQ ID NO: 4467093 - DNA, 25 bp, Homo sapien
gcatgtatgtactaggcctagggca

SEQ ID NO: 4467094 - DNA, 25 bp, Homo sapien
ggaactccatcaataaacccctgca

SEQ ID NO: 4467095 - DNA, 25 bp, Homo sapien
caaaaaaggctaatgcagtgccaca

SEQ ID NO: 4467096 - DNA, 25 bp, Homo sapien
cctcgagtgatccattcgcttcagt

SEQ ID NO: 4467097 - DNA, 25 bp, Homo sapien
ggtttctcaaggtgcctaatcctga

SEQ ID NO: 4467098 - DNA, 25 bp, Homo sapien
gctttctagaatagggcatggaagt

SEQ ID NO: 4467099 - DNA, 25 bp, Homo sapien
ttttcgtagaaacatccagtagctt

SEQ ID NO: 4467100 - DNA, 25 bp, Homo sapien
tggagataaaagacaagagccacag

SEQ ID NO: 4467101 - DNA, 25 bp, Homo sapien
aagcatatatgatgggtctaataaa

SEQ ID NO: 4467102 - DNA, 25 bp, Homo sapien
agagccacaggttgccacattacag

SEQ ID NO: 4467103 - DNA, 25 bp, Homo sapien
tgtctctctgtatgaaacatatggg

SEQ ID NO: 4467104 - DNA, 25 bp, Homo sapien
ccacatccatagacaatcaggagta

SEQ ID NO: 4467105 - DNA, 25 bp, Homo sapien
tgtttccctaccagaataaactgga

SEQ ID NO: 4467106 - DNA, 25 bp, Homo sapien
tctttagagactctgctatccacac

SEQ ID NO: 4467107 - DNA, 25 bp, Homo sapien
ttgtaacacttatctcaggcaaaag

SEQ ID NO: 4467108 - DNA, 25 bp, Homo sapien
cagagtgtcgctctgttacgcaggc

SEQ ID NO: 4467109 - DNA, 25 bp, Homo sapien
acagagtgtcgctctgttacgcagg

SEQ ID NO: 4467110 - DNA, 25 bp, Homo sapien
tggagtgcagtagggcaatcttggc

SEQ ID NO: 4467111 - DNA, 25 bp, Homo sapien
cagtagggcaatcttggctcactgc

SEQ ID NO: 4467112 - DNA, 25 bp, Homo sapien
tgcacggtaggtcgagatcgtgcca

SEQ ID NO: 4467113 - DNA, 25 bp, Homo sapien
cagtgatctatctcagtctgccaag

SEQ ID NO: 4467114 - DNA, 25 bp, Homo sapien
cacttgaacccggtgcacggtaggt

SEQ ID NO: 4467115 - DNA, 25 bp, Homo sapien
ggcacattccaccagctgattaaaa

SEQ ID NO: 4467116 - DNA, 25 bp, Homo sapien
cttgtctttgggcacgcatcgggca

SEQ ID NO: 4467117 - DNA, 25 bp, Homo sapien
tttgggcacgcatcgggcacagtta

SEQ ID NO: 4467118 - DNA, 25 bp, Homo sapien
aataggctgcatgtggccgcggccc

SEQ ID NO: 4467119 - DNA, 25 bp, Homo sapien
gcggactccactatgtttcgaatga

SEQ ID NO: 4467120 - DNA, 25 bp, Homo sapien
tccttgcgggcttcacgagatcgat

SEQ ID NO: 4467121 - DNA, 25 bp, Homo sapien
cgggcttcacgagatcgattcctga

SEQ ID NO: 4467122 - DNA, 25 bp, Homo sapien
gtgggggacgtggggcagcacccgc

SEQ ID NO: 4467123 - DNA, 25 bp, Homo sapien
cacccgcaggtctaaatcggggtgg

SEQ ID NO: 4467124 - DNA, 25 bp, Homo sapien
cttcagtctttaagaactcacctcc

SEQ ID NO: 4467125 - DNA, 25 bp, Homo sapien
gagaatagcctgtcttcagtcttta

SEQ ID NO: 4467126 - DNA, 25 bp, Homo sapien
tctccagagaatagcctgtcttcag

SEQ ID NO: 4467127 - DNA, 25 bp, Homo sapien
ttttctccagagaatagcctgtctt

SEQ ID NO: 4467128 - DNA, 25 bp, Homo sapien
aagcagatcactccagtgtcattgg

SEQ ID NO: 4467129 - DNA, 25 bp, Homo sapien
caatacccatcttcctgtgctgaga

SEQ ID NO: 4467130 - DNA, 25 bp, Homo sapien
gatgcaggtcagctaaacaataccc

SEQ ID NO: 4467131 - DNA, 25 bp, Homo sapien
tgtttccaaatagcagtccctcctg

SEQ ID NO: 4467132 - DNA, 25 bp, Homo sapien
agaggcactgatggacaaaaatctt

SEQ ID NO: 4467133 - DNA, 25 bp, Homo sapien
agatgagaggcactgatggacaaaa

SEQ ID NO: 4467134 - DNA, 25 bp, Homo sapien
tgagaggcactgatggacaaaaatc

SEQ ID NO: 4467135 - DNA, 25 bp, Homo sapien
ggtacgaaccatgatctgctcacag

SEQ ID NO: 4467136 - DNA, 25 bp, Homo sapien
tgtcattgttgaccactggcaccaa

SEQ ID NO: 4467137 - DNA, 25 bp, Homo sapien
gtttcctgccacacgatgccttcaa

SEQ ID NO: 4467138 - DNA, 25 bp, Homo sapien
caaggttgacgctagttccaggttc

SEQ ID NO: 4467139 - DNA, 25 bp, Homo sapien
tgagactctaataaccacttggtaa

SEQ ID NO: 4467140 - DNA, 25 bp, Homo sapien
tgctaagtctgctaaaatcctctgt

SEQ ID NO: 4467141 - DNA, 25 bp, Homo sapien
tttacaacaataagtccctggtggc

SEQ ID NO: 4467142 - DNA, 25 bp, Homo sapien
gggtatctcccgcagactgtggaca

SEQ ID NO: 4467143 - DNA, 25 bp, Homo sapien
gtaccaggatcaacactgttgaata

SEQ ID NO: 4467144 - DNA, 25 bp, Homo sapien
tgcatatcataagtaccaggatcaa

SEQ ID NO: 4467145 - DNA, 25 bp, Homo sapien
cataagtaccaggatcaacactgtt

SEQ ID NO: 4467146 - DNA, 25 bp, Homo sapien
tcacatgactgcatatcataagtac

SEQ ID NO: 4467147 - DNA, 25 bp, Homo sapien
agatcttcagagaatgatctttgca

SEQ ID NO: 4467148 - DNA, 25 bp, Homo sapien
gagaatgatctttgcaggaaatctc

SEQ ID NO: 4467149 - DNA, 25 bp, Homo sapien
cagagaatgatctttgcaggaaatc

SEQ ID NO: 4467150 - DNA, 25 bp, Homo sapien
tcttcagagaatgatctttgcagga

SEQ ID NO: 4467151 - DNA, 25 bp, Homo sapien
cttttctgtttgaagacagtgtagt

SEQ ID NO: 4467152 - DNA, 25 bp, Homo sapien
gacttttctgtttgaagacagtgta

SEQ ID NO: 4467153 - DNA, 25 bp, Homo sapien
aggacttttctgtttgaagacagtg

SEQ ID NO: 4467154 - DNA, 25 bp, Homo sapien
ttctgtttgaagacagtgtagtttg

SEQ ID NO: 4467155 - DNA, 25 bp, Homo sapien
agtctacagtgtcccccagcacgct

SEQ ID NO: 4467156 - DNA, 25 bp, Homo sapien
aagagtctacagtgtcccccagcac

SEQ ID NO: 4467157 - DNA, 25 bp, Homo sapien
gtgtcccccagcacgctgttggcat

SEQ ID NO: 4467158 - DNA, 25 bp, Homo sapien
tacagtgtcccccagcacgctgttg

SEQ ID NO: 4467159 - DNA, 25 bp, Homo sapien
atctccagctgcctaaattataaag

SEQ ID NO: 4467160 - DNA, 25 bp, Homo sapien
tctccagctgcctaaattataaagt

SEQ ID NO: 4467161 - DNA, 25 bp, Homo sapien
ttgatgccctgtgatttctttgttc

SEQ ID NO: 4467162 - DNA, 25 bp, Homo sapien
aattataaagttgatgccctgtgat

SEQ ID NO: 4467163 - DNA, 25 bp, Homo sapien
gctgggagtactaagtaagcctaac

SEQ ID NO: 4467164 - DNA, 25 bp, Homo sapien
tatccattctagatacctaagtgga

SEQ ID NO: 4467165 - DNA, 25 bp, Homo sapien
tacatccttaacatggaatactctg

SEQ ID NO: 4467166 - DNA, 25 bp, Homo sapien
gataatgagtttatcactgcacgtg

SEQ ID NO: 4467167 - DNA, 25 bp, Homo sapien
tataactgtagttgcctcaaggtag

SEQ ID NO: 4467168 - DNA, 25 bp, Homo sapien
gctgacagaagaataggaactcctc

SEQ ID NO: 4467169 - DNA, 25 bp, Homo sapien
tcaaggtagcagaactaggtgggct

SEQ ID NO: 4467170 - DNA, 25 bp, Homo sapien
tatgtgatgtgtcaaagtgtgtccc

SEQ ID NO: 4467171 - DNA, 25 bp, Homo sapien
agtgtttgccctctgatacctgtga

SEQ ID NO: 4467172 - DNA, 25 bp, Homo sapien
aaaactacagtgttcgggtctggag

SEQ ID NO: 4467173 - DNA, 25 bp, Homo sapien
gtggcttacaaacatctaggtcacc

SEQ ID NO: 4467174 - DNA, 25 bp, Homo sapien
aacaagagttgctgtggtctgctca

SEQ ID NO: 4467175 - DNA, 25 bp, Homo sapien
agcaatgggattagagatggaacaa

SEQ ID NO: 4467176 - DNA, 25 bp, Homo sapien
agaaatctgtaattggttgtgatca

SEQ ID NO: 4467177 - DNA, 25 bp, Homo sapien
aaggttagttaagtgaagcaatggg

SEQ ID NO: 4467178 - DNA, 25 bp, Homo sapien
gtaattggttgtgatcaactagttg

SEQ ID NO: 4467179 - DNA, 25 bp, Homo sapien
taattgaactgatggcggggcatga

SEQ ID NO: 4467180 - DNA, 25 bp, Homo sapien
aaaaaaggataggaagaatgtgata

SEQ ID NO: 4467181 - DNA, 25 bp, Homo sapien
gaatgtgatatctagatttaattga

SEQ ID NO: 4467182 - DNA, 25 bp, Homo sapien
tatcatgacatgtataataaaaaag

SEQ ID NO: 4467183 - DNA, 25 bp, Homo sapien
gctcctggccttaagtgatctgtct

SEQ ID NO: 4467184 - DNA, 25 bp, Homo sapien
cttgagctcctggccttaagtgatc

SEQ ID NO: 4467185 - DNA, 25 bp, Homo sapien
gagctcctggccttaagtgatctgt

SEQ ID NO: 4467186 - DNA, 25 bp, Homo sapien
ttgagctcctggccttaagtgatct

SEQ ID NO: 4467187 - DNA, 25 bp, Homo sapien
taatggccctctttaattgagacca

SEQ ID NO: 4467188 - DNA, 25 bp, Homo sapien
tgagaccaaactactctgctgagtt

SEQ ID NO: 4467189 - DNA, 25 bp, Homo sapien
gactcagggtcattattctagatac

SEQ ID NO: 4467190 - DNA, 25 bp, Homo sapien
tggaccacaaaccattcgtaagttg

SEQ ID NO: 4467191 - DNA, 25 bp, Homo sapien
tcttgtcaagaccattttgcccagg

SEQ ID NO: 4467192 - DNA, 25 bp, Homo sapien
cattccatatgtgtagacagagaac

SEQ ID NO: 4467193 - DNA, 25 bp, Homo sapien
ggcagcatttgaacggacatttagg

SEQ ID NO: 4467194 - DNA, 25 bp, Homo sapien
gaagtgtcccttccataactgttct

SEQ ID NO: 4467195 - DNA, 25 bp, Homo sapien
gactaggtaatgtagccttactcca

SEQ ID NO: 4467196 - DNA, 25 bp, Homo sapien
gggtgcccaatcatgtcgtgtgcag

SEQ ID NO: 4467197 - DNA, 25 bp, Homo sapien
gtcttgttcctccacgttacattta

SEQ ID NO: 4467198 - DNA, 25 bp, Homo sapien
tccacgttacatttaccaccaacat

SEQ ID NO: 4467199 - DNA, 25 bp, Homo sapien
gcagtcaaggagtgtacctacatat

SEQ ID NO: 4467200 - DNA, 25 bp, Homo sapien
ttcagtcttcttgaatgtcagataa

SEQ ID NO: 4467201 - DNA, 25 bp, Homo sapien
cgcgcctggccattcagtcttcttg

SEQ ID NO: 4467202 - DNA, 25 bp, Homo sapien
tcttgaatgtcagataaatacagtg

SEQ ID NO: 4467203 - DNA, 25 bp, Homo sapien
ggccattcagtcttcttgaatgtca

SEQ ID NO: 4467204 - DNA, 25 bp, Homo sapien
tataaaacacttaacgaatctgcat

SEQ ID NO: 4467205 - DNA, 25 bp, Homo sapien
ttagtatatgtaccactgaagtgag

SEQ ID NO: 4467206 - DNA, 25 bp, Homo sapien
aaatataaaacacttaacgaatctg

SEQ ID NO: 4467207 - DNA, 25 bp, Homo sapien
tatatgtaccactgaagtgagcacc

SEQ ID NO: 4467208 - DNA, 25 bp, Homo sapien
tgactggaactgctcagctcgggct

SEQ ID NO: 4467209 - DNA, 25 bp, Homo sapien
catgtacatattgggacgctgctgg

SEQ ID NO: 4467210 - DNA, 25 bp, Homo sapien
tcagagatgtcagagtatgcagggc

SEQ ID NO: 4467211 - DNA, 25 bp, Homo sapien
gatgagccatttaggagcccctcca

SEQ ID NO: 4467212 - DNA, 25 bp, Homo sapien
gacgattaccatacggtatttccac

SEQ ID NO: 4467213 - DNA, 25 bp, Homo sapien
atagacgattaccatacggtatttc

SEQ ID NO: 4467214 - DNA, 25 bp, Homo sapien
cgattaccatacggtatttccactt

SEQ ID NO: 4467215 - DNA, 25 bp, Homo sapien
tagacgattaccatacggtatttcc

SEQ ID NO: 4467216 - DNA, 25 bp, Homo sapien
gggacagagtccttactccgactcc

SEQ ID NO: 4467217 - DNA, 25 bp, Homo sapien
cgtaggactgactgtaggaatagcc

SEQ ID NO: 4467218 - DNA, 25 bp, Homo sapien
caaggcgagactcctctgacgtggg

SEQ ID NO: 4467219 - DNA, 25 bp, Homo sapien
tacttggcaggataaacatatgtcc

SEQ ID NO: 4467220 - DNA, 25 bp, Homo sapien
acaagtcacactggggctggctcgt

SEQ ID NO: 4467221 - DNA, 25 bp, Homo sapien
gcatcttcaccacctgagaccttgc

SEQ ID NO: 4467222 - DNA, 25 bp, Homo sapien
ggagacttgctcttgtagtgactgg

SEQ ID NO: 4467223 - DNA, 25 bp, Homo sapien
tgcaagatgtccagggctttggact

SEQ ID NO: 4467224 - DNA, 25 bp, Homo sapien
tctctcctgagaagttttatcactt

SEQ ID NO: 4467225 - DNA, 25 bp, Homo sapien
atctctctcctgagaagttttatca

SEQ ID NO: 4467226 - DNA, 25 bp, Homo sapien
tctcctgagaagttttatcacttat

SEQ ID NO: 4467227 - DNA, 25 bp, Homo sapien
ctctctcctgagaagttttatcact

SEQ ID NO: 4467228 - DNA, 25 bp, Homo sapien
aacactccgttcacccccacttgct

SEQ ID NO: 4467229 - DNA, 25 bp, Homo sapien
ctgggaaggagaggtgcggggccgg

SEQ ID NO: 4467230 - DNA, 25 bp, Homo sapien
gcggggccggtcaacactccgttca

SEQ ID NO: 4467231 - DNA, 25 bp, Homo sapien
ttgctcccccgacgctgctacagct

SEQ ID NO: 4467232 - DNA, 25 bp, Homo sapien
ctgctgcatagggtaagttgtactg

SEQ ID NO: 4467233 - DNA, 25 bp, Homo sapien
ctgcatagggtaagttgtactgtgc

SEQ ID NO: 4467234 - DNA, 25 bp, Homo sapien
catagggtaagttgtactgtgctgg

SEQ ID NO: 4467235 - DNA, 25 bp, Homo sapien
tgctgcatagggtaagttgtactgt

SEQ ID NO: 4467236 - DNA, 25 bp, Homo sapien
ttgttggctggcaacaatggctgta

SEQ ID NO: 4467237 - DNA, 25 bp, Homo sapien
gagccttgttggctggcaacaatgg

SEQ ID NO: 4467238 - DNA, 25 bp, Homo sapien
tagagtgagggagttgagccttgtt

SEQ ID NO: 4467239 - DNA, 25 bp, Homo sapien
ggctggcaacaatggctgtagaaga

SEQ ID NO: 4467240 - DNA, 25 bp, Homo sapien
cagcacctccttgggtaagccagtc

SEQ ID NO: 4467241 - DNA, 25 bp, Homo sapien
gggcccgtgaagctgactttatccg

SEQ ID NO: 4467242 - DNA, 25 bp, Homo sapien
gtgaagctgactttatccgggcact

SEQ ID NO: 4467243 - DNA, 25 bp, Homo sapien
cagtccgggcccgtgaagctgactt

SEQ ID NO: 4467244 - DNA, 25 bp, Homo sapien
gaaacacagcttatattggcccaca

SEQ ID NO: 4467245 - DNA, 25 bp, Homo sapien
tctgcactagctacttccacggagg

SEQ ID NO: 4467246 - DNA, 25 bp, Homo sapien
tacagagtatgctgcaggccagtgc

SEQ ID NO: 4467247 - DNA, 25 bp, Homo sapien
gaagccccgtgagcaatgtctgtga

SEQ ID NO: 4467248 - DNA, 25 bp, Homo sapien
catagtttcacaggtgagtgtccca

SEQ ID NO: 4467249 - DNA, 25 bp, Homo sapien
cagagtaaagctcctgggctaagcc

SEQ ID NO: 4467250 - DNA, 25 bp, Homo sapien
gggtccaaagccacttcggtgaatg

SEQ ID NO: 4467251 - DNA, 25 bp, Homo sapien
gattcaacagcttgccatcagccag

SEQ ID NO: 4467252 - DNA, 25 bp, Homo sapien
tcaatacggctagagtcacaaaggc

SEQ ID NO: 4467253 - DNA, 25 bp, Homo sapien
tgctattgaagaccactgacaggaa

SEQ ID NO: 4467254 - DNA, 25 bp, Homo sapien
cacaaaggctaaattggaaacccag

SEQ ID NO: 4467255 - DNA, 25 bp, Homo sapien
agaaatatggtacccaaaaggctgc

SEQ ID NO: 4467256 - DNA, 25 bp, Homo sapien
ggactggatacttctggctggctga

SEQ ID NO: 4467257 - DNA, 25 bp, Homo sapien
tgcatttgcgtctggcctggagtaa

SEQ ID NO: 4467258 - DNA, 25 bp, Homo sapien
gaatatatagcaactcagggcctgg

SEQ ID NO: 4467259 - DNA, 25 bp, Homo sapien
caccaggttccgagtagtgtctgag

SEQ ID NO: 4467260 - DNA, 25 bp, Homo sapien
agcccagagcttctgtatttatatt

SEQ ID NO: 4467261 - DNA, 25 bp, Homo sapien
agagcttctgtatttatattgctgg

SEQ ID NO: 4467262 - DNA, 25 bp, Homo sapien
cccagagcttctgtatttatattgc

SEQ ID NO: 4467263 - DNA, 25 bp, Homo sapien
ccagagcttctgtatttatattgct

SEQ ID NO: 4467264 - DNA, 25 bp, Homo sapien
taatctgctgtaattgaggcccaga

SEQ ID NO: 4467265 - DNA, 25 bp, Homo sapien
tctcactaagactgggatggaaggt

SEQ ID NO: 4467266 - DNA, 25 bp, Homo sapien
tatgggacagcactttgtacttggc

SEQ ID NO: 4467267 - DNA, 25 bp, Homo sapien
tgtgcccaagggagataacacggac

SEQ ID NO: 4467268 - DNA, 25 bp, Homo sapien
caagtcttggtgtttactgtctcac

SEQ ID NO: 4467269 - DNA, 25 bp, Homo sapien
tggtgtttactgtctcaccctctct

SEQ ID NO: 4467270 - DNA, 25 bp, Homo sapien
tcgtcaagtcttggtgtttactgtc

SEQ ID NO: 4467271 - DNA, 25 bp, Homo sapien
aaatcgtcaagtcttggtgtttact

SEQ ID NO: 4467272 - DNA, 25 bp, Homo sapien
tcaaggtggccagtaaggtgacagc

SEQ ID NO: 4467273 - DNA, 25 bp, Homo sapien
tactattgtgtacctctgctctggg

SEQ ID NO: 4467274 - DNA, 25 bp, Homo sapien
cacgaaaggatcagcaaagaagggc

SEQ ID NO: 4467275 - DNA, 25 bp, Homo sapien
tgagcagatctacagccctgttggg

SEQ ID NO: 4467276 - DNA, 25 bp, Homo sapien
tgaaatctttgagagaacagaccct

SEQ ID NO: 4467277 - DNA, 25 bp, Homo sapien
tacagttctgctaataggactgccc

SEQ ID NO: 4467278 - DNA, 25 bp, Homo sapien
cattttcagctggagtgcagataca

SEQ ID NO: 4467279 - DNA, 25 bp, Homo sapien
aaagtgcacccctagatactgatgc

SEQ ID NO: 4467280 - DNA, 25 bp, Homo sapien
cctggccgtttttgttttgagctga

SEQ ID NO: 4467281 - DNA, 25 bp, Homo sapien
tggccgtttttgttttgagctgaag

SEQ ID NO: 4467282 - DNA, 25 bp, Homo sapien
gagctgaagtttcgctctgtcatcc

SEQ ID NO: 4467283 - DNA, 25 bp, Homo sapien
cacgcctggccgtttttgttttgag

SEQ ID NO: 4467284 - DNA, 25 bp, Homo sapien
gaaatatcacaagccccactgctaa

SEQ ID NO: 4467285 - DNA, 25 bp, Homo sapien
tcttttcagtgagttggcccattgc

SEQ ID NO: 4467286 - DNA, 25 bp, Homo sapien
caagctcatagattagtgctggaca

SEQ ID NO: 4467287 - DNA, 25 bp, Homo sapien
gcagaggttgaatgcagctcgctca

SEQ ID NO: 4467288 - DNA, 25 bp, Homo sapien
gcctgtctgtagtcagtgtgtgaaa

SEQ ID NO: 4467289 - DNA, 25 bp, Homo sapien
tcatcattgcccagctgtacatctg

SEQ ID NO: 4467290 - DNA, 25 bp, Homo sapien
tgtgaaattgtaacctgctaagggc

SEQ ID NO: 4467291 - DNA, 25 bp, Homo sapien
tacatctgctgcatacgctgcctgt

SEQ ID NO: 4467292 - DNA, 25 bp, Homo sapien
gatggcacatctttttgcgtaggga

SEQ ID NO: 4467293 - DNA, 25 bp, Homo sapien
gcacctttgggtgttctatgaggca

SEQ ID NO: 4467294 - DNA, 25 bp, Homo sapien
ggtagctaataccaaggccatctga

SEQ ID NO: 4467295 - DNA, 25 bp, Homo sapien
cgaaggaggctactgattcaagtga

SEQ ID NO: 4467296 - DNA, 25 bp, Homo sapien
catatgtaccaatatcagctgtgtg

SEQ ID NO: 4467297 - DNA, 25 bp, Homo sapien
tgtggaacgcagaatagccctagtg

SEQ ID NO: 4467298 - DNA, 25 bp, Homo sapien
gctttcagcctgtgattcagagtgg

SEQ ID NO: 4467299 - DNA, 25 bp, Homo sapien
gtgtgataagcaaaccccaaaggca

SEQ ID NO: 4467300 - DNA, 25 bp, Homo sapien
tctggactgagctggtcgaaatgcc

SEQ ID NO: 4467301 - DNA, 25 bp, Homo sapien
taactagggattctgataagagccg

SEQ ID NO: 4467302 - DNA, 25 bp, Homo sapien
tacttgtggcaaaggcgccgtgtgt

SEQ ID NO: 4467303 - DNA, 25 bp, Homo sapien
tacagtatgtagagaagcactagcc

SEQ ID NO: 4467304 - DNA, 25 bp, Homo sapien
ttattagcatatagttttaaagctc

SEQ ID NO: 4467305 - DNA, 25 bp, Homo sapien
gcctagagtgtcctgattattagca

SEQ ID NO: 4467306 - DNA, 25 bp, Homo sapien
attggtctcattggcctagagtgtc

SEQ ID NO: 4467307 - DNA, 25 bp, Homo sapien
aagattggtctcattggcctagagt

SEQ ID NO: 4467308 - DNA, 25 bp, Homo sapien
agtctttctctcaggcgtcagggcg

SEQ ID NO: 4467309 - DNA, 25 bp, Homo sapien
gccaaataagccatgtgcctgcggg

SEQ ID NO: 4467310 - DNA, 25 bp, Homo sapien
tagattcattagacgccaagacccc

SEQ ID NO: 4467311 - DNA, 25 bp, Homo sapien
ccttggcagacgagtggaaatgctc

SEQ ID NO: 4467312 - DNA, 25 bp, Homo sapien
tatgaataggcctgggactgtcact

SEQ ID NO: 4467313 - DNA, 25 bp, Homo sapien
aattttggcgcaaggcctgtgacac

SEQ ID NO: 4467314 - DNA, 25 bp, Homo sapien
tatttgcttatagataggcctggct

SEQ ID NO: 4467315 - DNA, 25 bp, Homo sapien
ttcacagggtcattggcaaccaggg

SEQ ID NO: 4467316 - DNA, 25 bp, Homo sapien
caaaggctgggctatctgagcatgt

SEQ ID NO: 4467317 - DNA, 25 bp, Homo sapien
gcttccttagaacgctgtatctgca

SEQ ID NO: 4467318 - DNA, 25 bp, Homo sapien
tatctgcaatgctcccagaggccac

SEQ ID NO: 4467319 - DNA, 25 bp, Homo sapien
gcagggtagaatgccgaaaactatt

SEQ ID NO: 4467320 - DNA, 25 bp, Homo sapien
agccacggcgcttgtcctttttgtt

SEQ ID NO: 4467321 - DNA, 25 bp, Homo sapien
tgtgagccacggcgcttgtcctttt

SEQ ID NO: 4467322 - DNA, 25 bp, Homo sapien
ttgcagagggagacacgcttctggt

SEQ ID NO: 4467323 - DNA, 25 bp, Homo sapien
cacgcttctggtgagcggccaggcc

SEQ ID NO: 4467324 - DNA, 25 bp, Homo sapien
agagttggatccctcagcatcgggc

SEQ ID NO: 4467325 - DNA, 25 bp, Homo sapien
agcatcgggcttgtccttccccttg

SEQ ID NO: 4467326 - DNA, 25 bp, Homo sapien
tccatcactaataaaagccagcact

SEQ ID NO: 4467327 - DNA, 25 bp, Homo sapien
catcactaataaaagccagcactta

SEQ ID NO: 4467328 - DNA, 25 bp, Homo sapien
ccatcactaataaaagccagcactt

SEQ ID NO: 4467329 - DNA, 25 bp, Homo sapien
ggccagagttggcctctaggggtga

SEQ ID NO: 4467330 - DNA, 25 bp, Homo sapien
agttggcctctaggggtgactgttc

SEQ ID NO: 4467331 - DNA, 25 bp, Homo sapien
cctctaggggtgactgttcctggtg

SEQ ID NO: 4467332 - DNA, 25 bp, Homo sapien
ccagagttggcctctaggggtgact

SEQ ID NO: 4467333 - DNA, 25 bp, Homo sapien
gagagccaaagcgtaaagtccctta

SEQ ID NO: 4467334 - DNA, 25 bp, Homo sapien
agtttctcactcatgggcctcaggt

SEQ ID NO: 4467335 - DNA, 25 bp, Homo sapien
aataaatcttcggagtcgcgtaggg

SEQ ID NO: 4467336 - DNA, 25 bp, Homo sapien
tctggcacgtggcacaggtctcaga

SEQ ID NO: 4467337 - DNA, 25 bp, Homo sapien
ttgagcaggaaggtcaaggcggcag

SEQ ID NO: 4467338 - DNA, 25 bp, Homo sapien
gcaaaatctgatttatacgtcttaa

SEQ ID NO: 4467339 - DNA, 25 bp, Homo sapien
gatgaatagtcttagggaggcattg

SEQ ID NO: 4467340 - DNA, 25 bp, Homo sapien
tgcagtgagctacaagtgccagcct

SEQ ID NO: 4467341 - DNA, 25 bp, Homo sapien
tgagggcttttaactacaccagctg

SEQ ID NO: 4467342 - DNA, 25 bp, Homo sapien
actctccgcgttctgtcccgccggc

SEQ ID NO: 4467343 - DNA, 25 bp, Homo sapien
tctccgcgttctgtcccgccggctg

SEQ ID NO: 4467344 - DNA, 25 bp, Homo sapien
ctctccgcgttctgtcccgccggct

SEQ ID NO: 4467345 - DNA, 25 bp, Homo sapien
caccgcgtctacgcccggccaggcg

SEQ ID NO: 4467346 - DNA, 25 bp, Homo sapien
ggcgagtccgccgaggtcccgccgc

SEQ ID NO: 4467347 - DNA, 25 bp, Homo sapien
gccaccgcgtctacgcccggccagg

SEQ ID NO: 4467348 - DNA, 25 bp, Homo sapien
tgccaccgcgtctacgcccggccag

SEQ ID NO: 4467349 - DNA, 25 bp, Homo sapien
aggaaccgaggccaggagcacacag

SEQ ID NO: 4467350 - DNA, 25 bp, Homo sapien
gaaccgaggccaggagcacacaggt

SEQ ID NO: 4467351 - DNA, 25 bp, Homo sapien
cgaggccaggagcacacaggtgggc

SEQ ID NO: 4467352 - DNA, 25 bp, Homo sapien
accgaggccaggagcacacaggtgg

SEQ ID NO: 4467353 - DNA, 25 bp, Homo sapien
cccgaggcttctcaccggcttcctt

SEQ ID NO: 4467354 - DNA, 25 bp, Homo sapien
cgaggcttctcaccggcttccttca

SEQ ID NO: 4467355 - DNA, 25 bp, Homo sapien
tccccgaggcttctcaccggcttcc

SEQ ID NO: 4467356 - DNA, 25 bp, Homo sapien
tgctccccgaggcttctcaccggct

SEQ ID NO: 4467357 - DNA, 25 bp, Homo sapien
ctggcagaggagcagatatcggtct

SEQ ID NO: 4467358 - DNA, 25 bp, Homo sapien
aggagcagatatcggtctttccaga

SEQ ID NO: 4467359 - DNA, 25 bp, Homo sapien
cactgctcttcttgatccagccagc

SEQ ID NO: 4467360 - DNA, 25 bp, Homo sapien
cagaggagcagatatcggtctttcc

SEQ ID NO: 4467361 - DNA, 25 bp, Homo sapien
gggcacatagcccagaggcgcgtat

SEQ ID NO: 4467362 - DNA, 25 bp, Homo sapien
aaggctccccatccagatgggagat

SEQ ID NO: 4467363 - DNA, 25 bp, Homo sapien
gaccctggcaagtgcatgctggctg

SEQ ID NO: 4467364 - DNA, 25 bp, Homo sapien
aagatgtggtgtccagaccctggca

SEQ ID NO: 4467365 - DNA, 25 bp, Homo sapien
gatcgcagcaggataaagcggtgtt

SEQ ID NO: 4467366 - DNA, 25 bp, Homo sapien
tgttttcgcttgaggagggcacgaa

SEQ ID NO: 4467367 - DNA, 25 bp, Homo sapien
ggcacttctcatagctgcccagctc

SEQ ID NO: 4467368 - DNA, 25 bp, Homo sapien
tgttccctggggatcgcagcaggat

SEQ ID NO: 4467369 - DNA, 25 bp, Homo sapien
cttcattgagggctttgatccagga

SEQ ID NO: 4467370 - DNA, 25 bp, Homo sapien
cattgagggctttgatccaggattc

SEQ ID NO: 4467371 - DNA, 25 bp, Homo sapien
attgagggctttgatccaggattcc

SEQ ID NO: 4467372 - DNA, 25 bp, Homo sapien
tcattgagggctttgatccaggatt

SEQ ID NO: 4467373 - DNA, 25 bp, Homo sapien
cggtcccgtgtcacatgctccaggg

SEQ ID NO: 4467374 - DNA, 25 bp, Homo sapien
ttcaggtggactctcgttggtggcc

SEQ ID NO: 4467375 - DNA, 25 bp, Homo sapien
ctcgcacccggtcccgtgtcacatg

SEQ ID NO: 4467376 - DNA, 25 bp, Homo sapien
ctccttcaggtggactctcgttggt

SEQ ID NO: 4467377 - DNA, 25 bp, Homo sapien
atgtggtcccagaccacagctgact

SEQ ID NO: 4467378 - DNA, 25 bp, Homo sapien
accacagctgactgccagagaacag

SEQ ID NO: 4467379 - DNA, 25 bp, Homo sapien
tctgttccgtctgccagcttctctc

SEQ ID NO: 4467380 - DNA, 25 bp, Homo sapien
cttcctggagacctctgttccgtct

SEQ ID NO: 4467381 - DNA, 25 bp, Homo sapien
gcagaagaccgtcagaagctgcact

SEQ ID NO: 4467382 - DNA, 25 bp, Homo sapien
ggaacatcaagatccaggcgcagaa

SEQ ID NO: 4467383 - DNA, 25 bp, Homo sapien
cccgaggttgggcttcactgacatg

SEQ ID NO: 4467384 - DNA, 25 bp, Homo sapien
ggtgtctcccgaggttgggcttcac

SEQ ID NO: 4467385 - DNA, 25 bp, Homo sapien
cagagcttgctgagacaggggttgg

SEQ ID NO: 4467386 - DNA, 25 bp, Homo sapien
gacgctgttgggaggctgctcagag

SEQ ID NO: 4467387 - DNA, 25 bp, Homo sapien
cttgctgagacaggggttggggctc

SEQ ID NO: 4467388 - DNA, 25 bp, Homo sapien
ggcaggacgctgttgggaggctgct

SEQ ID NO: 4467389 - DNA, 25 bp, Homo sapien
ctcctgggggctggggttctcccag

SEQ ID NO: 4467390 - DNA, 25 bp, Homo sapien
ctgggggctggggttctcccagctc

SEQ ID NO: 4467391 - DNA, 25 bp, Homo sapien
gggggctggggttctcccagctcac

SEQ ID NO: 4467392 - DNA, 25 bp, Homo sapien
tcctgggggctggggttctcccagc

SEQ ID NO: 4467393 - DNA, 25 bp, Homo sapien
gcctgggacggttctgcactctctg

SEQ ID NO: 4467394 - DNA, 25 bp, Homo sapien
ctgggacggttctgcactctctgca

SEQ ID NO: 4467395 - DNA, 25 bp, Homo sapien
gtgcctgggacggttctgcactctc

SEQ ID NO: 4467396 - DNA, 25 bp, Homo sapien
gaacagggtgcctgggacggttctg

SEQ ID NO: 4467397 - DNA, 25 bp, Homo sapien
agtttctccgtctgttccgaggcca

SEQ ID NO: 4467398 - DNA, 25 bp, Homo sapien
tgggcccgatatagccgttccctgg

SEQ ID NO: 4467399 - DNA, 25 bp, Homo sapien
gcaggctcaggactgtcatccatgc

SEQ ID NO: 4467400 - DNA, 25 bp, Homo sapien
cctggctgagcaatgtttcggcact

SEQ ID NO: 4467401 - DNA, 25 bp, Homo sapien
acataggtcccagcgtgtgtgctcc

SEQ ID NO: 4467402 - DNA, 25 bp, Homo sapien
gggcagtttggaacgaccacacaaa

SEQ ID NO: 4467403 - DNA, 25 bp, Homo sapien
gagtctcttcgggtcatggccaaac

SEQ ID NO: 4467404 - DNA, 25 bp, Homo sapien
ggctctttgcctaggaatagctgga

SEQ ID NO: 4467405 - DNA, 25 bp, Homo sapien
gaactgaggctccaattcctggcag

SEQ ID NO: 4467406 - DNA, 25 bp, Homo sapien
tagggcccagcctgctaaaggatgg

SEQ ID NO: 4467407 - DNA, 25 bp, Homo sapien
tagaaagttacaggagagcagccca

SEQ ID NO: 4467408 - DNA, 25 bp, Homo sapien
cagttagctacttgacacaggaggg

SEQ ID NO: 4467409 - DNA, 25 bp, Homo sapien
tggatttattgccaaactttaagaa

SEQ ID NO: 4467410 - DNA, 25 bp, Homo sapien
tcttgctagagtaaatgggtgttct

SEQ ID NO: 4467411 - DNA, 25 bp, Homo sapien
gagaaaacaggtcaatcttgctaga

SEQ ID NO: 4467412 - DNA, 25 bp, Homo sapien
gctagagtaaatgggtgttctttgc

SEQ ID NO: 4467413 - DNA, 25 bp, Homo sapien
caggtcaatcttgctagagtaaatg

SEQ ID NO: 4467414 - DNA, 25 bp, Homo sapien
ccttttgtctgggacatgagggtag

SEQ ID NO: 4467415 - DNA, 25 bp, Homo sapien
tgggtcctgtctgatgatagccacc

SEQ ID NO: 4467416 - DNA, 25 bp, Homo sapien
acagtgactcccgagacaggatgcc

SEQ ID NO: 4467417 - DNA, 25 bp, Homo sapien
tttctgacaccccttttgtctggga

SEQ ID NO: 4467418 - DNA, 25 bp, Homo sapien
tgtagagactgaccttggcccaagc

SEQ ID NO: 4467419 - DNA, 25 bp, Homo sapien
tggccctggctaccaagactattgg

SEQ ID NO: 4467420 - DNA, 25 bp, Homo sapien
gagacttttgctcacccatagcagg

SEQ ID NO: 4467421 - DNA, 25 bp, Homo sapien
gcatctctgcggattcaaggccaca

SEQ ID NO: 4467422 - DNA, 25 bp, Homo sapien
ttagactgaccaaggactacctggg

SEQ ID NO: 4467423 - DNA, 25 bp, Homo sapien
tttctggagccaatcttaactgggt

SEQ ID NO: 4467424 - DNA, 25 bp, Homo sapien
tatttattgaatagtctagggccac

SEQ ID NO: 4467425 - DNA, 25 bp, Homo sapien
tacctgggtcacattcaatgagtct

SEQ ID NO: 4467426 - DNA, 25 bp, Homo sapien
caaacgcttgcttggcttgggagcc

SEQ ID NO: 4467427 - DNA, 25 bp, Homo sapien
gaaatgcactagctataaccttggg

SEQ ID NO: 4467428 - DNA, 25 bp, Homo sapien
cagcacatatctaggtttccggagt

SEQ ID NO: 4467429 - DNA, 25 bp, Homo sapien
gagggcagtgtacccgcaatcatca

SEQ ID NO: 4467430 - DNA, 25 bp, Homo sapien
tgctcattcttctagggacgcccac

SEQ ID NO: 4467431 - DNA, 25 bp, Homo sapien
tcgggttcccttagatgccagatta

SEQ ID NO: 4467432 - DNA, 25 bp, Homo sapien
cctggcaggtagtaggtctcgataa

SEQ ID NO: 4467433 - DNA, 25 bp, Homo sapien
gactcctgctgtagttgcgctgctc

SEQ ID NO: 4467434 - DNA, 25 bp, Homo sapien
aattctcctgcctcaacctcctaag

SEQ ID NO: 4467435 - DNA, 25 bp, Homo sapien
cctaagtagctggaattacaggcgc

SEQ ID NO: 4467436 - DNA, 25 bp, Homo sapien
actgcaacctccgagttcaagcaat

SEQ ID NO: 4467437 - DNA, 25 bp, Homo sapien
ctgccaccatgcctgtctaattttt

SEQ ID NO: 4467438 - DNA, 25 bp, Homo sapien
tgagggtacgtgaatgccaggctaa

SEQ ID NO: 4467439 - DNA, 25 bp, Homo sapien
gctttccccaagattgccagtgagg

SEQ ID NO: 4467440 - DNA, 25 bp, Homo sapien
tgcagtttcggttgtcgacacgcgg

SEQ ID NO: 4467441 - DNA, 25 bp, Homo sapien
aatagcgcaagcacgtaacctgacg

SEQ ID NO: 4467442 - DNA, 25 bp, Homo sapien
ttaaatgattgttggccttttgctt

SEQ ID NO: 4467443 - DNA, 25 bp, Homo sapien
tgttggccttttgcttaagagaaat

SEQ ID NO: 4467444 - DNA, 25 bp, Homo sapien
ttaatgtttgttcattactaaagaa

SEQ ID NO: 4467445 - DNA, 25 bp, Homo sapien
ttcttgtcttattaatgtttgttca

SEQ ID NO: 4467446 - DNA, 25 bp, Homo sapien
ccgtcggtctcccacgccagctcct

SEQ ID NO: 4467447 - DNA, 25 bp, Homo sapien
ggccgtcggtctcccacgccagctc

SEQ ID NO: 4467448 - DNA, 25 bp, Homo sapien
gtcggtctcccacgccagctcctcc

SEQ ID NO: 4467449 - DNA, 25 bp, Homo sapien
ggtctcccacgccagctcctcctgc

SEQ ID NO: 4467450 - DNA, 25 bp, Homo sapien
ttactgagccacctactgcgtgcca

SEQ ID NO: 4467451 - DNA, 25 bp, Homo sapien
tcagtctacacagccaggatttact

SEQ ID NO: 4467452 - DNA, 25 bp, Homo sapien
agtaaccatcttttccacggctcag

SEQ ID NO: 4467453 - DNA, 25 bp, Homo sapien
tccctctggagtcagtaaccatctt

SEQ ID NO: 4467454 - DNA, 25 bp, Homo sapien
gccacgcaaccaggacgtggtgaaa

SEQ ID NO: 4467455 - DNA, 25 bp, Homo sapien
cagccacgcaaccaggacgtggtga

SEQ ID NO: 4467456 - DNA, 25 bp, Homo sapien
cacgcaaccaggacgtggtgaaacc

SEQ ID NO: 4467457 - DNA, 25 bp, Homo sapien
ccacgcaaccaggacgtggtgaaac

SEQ ID NO: 4467458 - DNA, 25 bp, Homo sapien
cctgccgacattgttctggcgggcg

SEQ ID NO: 4467459 - DNA, 25 bp, Homo sapien
gggcggcctcgtggagctgcctctc

SEQ ID NO: 4467460 - DNA, 25 bp, Homo sapien
tggtgttaaccctcctcccaatcag

SEQ ID NO: 4467461 - DNA, 25 bp, Homo sapien
agctcctgcatcctgccgacattgt

SEQ ID NO: 4467462 - DNA, 25 bp, Homo sapien
acagcctgctcgtgccctgcacctg

SEQ ID NO: 4467463 - DNA, 25 bp, Homo sapien
aagcagacgcacagcctgctcgtgc

SEQ ID NO: 4467464 - DNA, 25 bp, Homo sapien
tccagaagcagacgcacagcctgct

SEQ ID NO: 4467465 - DNA, 25 bp, Homo sapien
cagaagcagacgcacagcctgctcg

SEQ ID NO: 4467466 - DNA, 25 bp, Homo sapien
tacagctggccttaactagagccga

SEQ ID NO: 4467467 - DNA, 25 bp, Homo sapien
tggcactggttcagagctcagcacc

SEQ ID NO: 4467468 - DNA, 25 bp, Homo sapien
cagcacctggtagagtatcagcaac

SEQ ID NO: 4467469 - DNA, 25 bp, Homo sapien
tccacagacgcttgggagtaaaaag

SEQ ID NO: 4467470 - DNA, 25 bp, Homo sapien
cactgctttgctttagaaacaggcg

SEQ ID NO: 4467471 - DNA, 25 bp, Homo sapien
aacaggcgggaatttggaggcagga

SEQ ID NO: 4467472 - DNA, 25 bp, Homo sapien
gcatccaaagagagttgcactgctt

SEQ ID NO: 4467473 - DNA, 25 bp, Homo sapien
agcaggctcccgagcatccaaagag

SEQ ID NO: 4467474 - DNA, 25 bp, Homo sapien
aataaatatcccatagaatatcttc

SEQ ID NO: 4467475 - DNA, 25 bp, Homo sapien
tccctgcgcagtcaaacactggctt

SEQ ID NO: 4467476 - DNA, 25 bp, Homo sapien
tcaaggcagatagcttaagtctgca

SEQ ID NO: 4467477 - DNA, 25 bp, Homo sapien
gaaatgcctcctcgagctctattga

SEQ ID NO: 4467478 - DNA, 25 bp, Homo sapien
ccaagatctggaggattcgtaagtg

SEQ ID NO: 4467479 - DNA, 25 bp, Homo sapien
gaggattcgtaagtggccgaaccag

SEQ ID NO: 4467480 - DNA, 25 bp, Homo sapien
tctggaggattcgtaagtggccgaa

SEQ ID NO: 4467481 - DNA, 25 bp, Homo sapien
ggattcgtaagtggccgaaccaggc

SEQ ID NO: 4467482 - DNA, 25 bp, Homo sapien
acagtggatcttggcccctgagttt

SEQ ID NO: 4467483 - DNA, 25 bp, Homo sapien
cagtggatcttggcccctgagttta

SEQ ID NO: 4467484 - DNA, 25 bp, Homo sapien
catagccctggacggatgattttca

SEQ ID NO: 4467485 - DNA, 25 bp, Homo sapien
gactgcagccttgtaggtgagccca

SEQ ID NO: 4467486 - DNA, 25 bp, Homo sapien
tctgcttaactagaagagtccgtga

SEQ ID NO: 4467487 - DNA, 25 bp, Homo sapien
taaatatcaccaatgcctggcaagg

SEQ ID NO: 4467488 - DNA, 25 bp, Homo sapien
ttatgaacgccagcacaggcacatg

SEQ ID NO: 4467489 - DNA, 25 bp, Homo sapien
tccaggtcctccattatgaacgcca

SEQ ID NO: 4467490 - DNA, 25 bp, Homo sapien
ctgcgcagtgcagtaaggtcaggcc

SEQ ID NO: 4467491 - DNA, 25 bp, Homo sapien
tgtctacgtggtccagggccacatc

SEQ ID NO: 4467492 - DNA, 25 bp, Homo sapien
cagctgccctgtgaaacgccgtcct

SEQ ID NO: 4467493 - DNA, 25 bp, Homo sapien
tgccctgtgaaacgccgtcctcccc

SEQ ID NO: 4467494 - DNA, 25 bp, Homo sapien
cttgtctttgacattgtggtcacag

SEQ ID NO: 4467495 - DNA, 25 bp, Homo sapien
tgtctttgacattgtggtcacagcc

SEQ ID NO: 4467496 - DNA, 25 bp, Homo sapien
ctgatgctctccctaactttgcccc

SEQ ID NO: 4467497 - DNA, 25 bp, Homo sapien
catcggtaaacgtgtgcattggtgg

SEQ ID NO: 4467498 - DNA, 25 bp, Homo sapien
cataagcaccacaggggcatctatt

SEQ ID NO: 4467499 - DNA, 25 bp, Homo sapien
gctggaacataagcaccacaggggc

SEQ ID NO: 4467500 - DNA, 25 bp, Homo sapien
agcccgatgtccacaagtcgctgca

SEQ ID NO: 4467501 - DNA, 25 bp, Homo sapien
tgcagcacagccatatggccccgac

SEQ ID NO: 4467502 - DNA, 25 bp, Homo sapien
atgtccacaagtcgctgcagcacag

SEQ ID NO: 4467503 - DNA, 25 bp, Homo sapien
aggtccagcccgatgtccacaagtc

SEQ ID NO: 4467504 - DNA, 25 bp, Homo sapien
cctccagcagccgaatgcagggcag

SEQ ID NO: 4467505 - DNA, 25 bp, Homo sapien
gatcctccagcagccgaatgcaggg

SEQ ID NO: 4467506 - DNA, 25 bp, Homo sapien
gagggcattcacggtgctcccagcc

SEQ ID NO: 4467507 - DNA, 25 bp, Homo sapien
ggtgagggcattcacggtgctccca

SEQ ID NO: 4467508 - DNA, 25 bp, Homo sapien
cgtactagcttgtgaccctgagaaa

SEQ ID NO: 4467509 - DNA, 25 bp, Homo sapien
gaaagtgccctcaaagctccagttt

SEQ ID NO: 4467510 - DNA, 25 bp, Homo sapien
gaagaggttcatccagggtcacacc

SEQ ID NO: 4467511 - DNA, 25 bp, Homo sapien
tactgccgacatggctatggctcag

SEQ ID NO: 4467512 - DNA, 25 bp, Homo sapien
caactcactacctaaagaaaggcca

SEQ ID NO: 4467513 - DNA, 25 bp, Homo sapien
gctatactattgacatttagaacaa

SEQ ID NO: 4467514 - DNA, 25 bp, Homo sapien
tccagaacctgaagccattcaacca

SEQ ID NO: 4467515 - DNA, 25 bp, Homo sapien
ccagccagaaaggttatttgtcact

SEQ ID NO: 4467516 - DNA, 25 bp, Homo sapien
ttcaaagccagtcaaattaagcagt

SEQ ID NO: 4467517 - DNA, 25 bp, Homo sapien
tcttttcaaagccagtcaaattaag

SEQ ID NO: 4467518 - DNA, 25 bp, Homo sapien
ttttcaaagccagtcaaattaagca

SEQ ID NO: 4467519 - DNA, 25 bp, Homo sapien
tcaagcaatattccagctttggcct

SEQ ID NO: 4467520 - DNA, 25 bp, Homo sapien
ggatgaggacccgagacacatcctc

SEQ ID NO: 4467521 - DNA, 25 bp, Homo sapien
acatcctccgagccactgagggctg

SEQ ID NO: 4467522 - DNA, 25 bp, Homo sapien
gaggacccgagacacatcctccgag

SEQ ID NO: 4467523 - DNA, 25 bp, Homo sapien
gcagcctcctgcgtggatgaggacc

SEQ ID NO: 4467524 - DNA, 25 bp, Homo sapien
aggatccgatgtgcctgtttctccc

SEQ ID NO: 4467525 - DNA, 25 bp, Homo sapien
ccccttcaacactcgcaccatactt

SEQ ID NO: 4467526 - DNA, 25 bp, Homo sapien
caaccccaaggatccgatgtgcctg

SEQ ID NO: 4467527 - DNA, 25 bp, Homo sapien
tctccctgtgcttcatcagtgtgct

SEQ ID NO: 4467528 - DNA, 25 bp, Homo sapien
tacttaaggtgttgggaggttctgc

SEQ ID NO: 4467529 - DNA, 25 bp, Homo sapien
cccgtactgcactttctggcaggaa

SEQ ID NO: 4467530 - DNA, 25 bp, Homo sapien
ccattatcaagggtaaatactgcca

SEQ ID NO: 4467531 - DNA, 25 bp, Homo sapien
tcagatttccccagagtaaggttac

SEQ ID NO: 4467532 - DNA, 25 bp, Homo sapien
ttaacagatcctttgcagagcaaaa

SEQ ID NO: 4467533 - DNA, 25 bp, Homo sapien
gacactagcctttataagatatgtg

SEQ ID NO: 4467534 - DNA, 25 bp, Homo sapien
gcttcaatggatcatgtttctggtg

SEQ ID NO: 4467535 - DNA, 25 bp, Homo sapien
gaactctttggcctaaccctagatc

SEQ ID NO: 4467536 - DNA, 25 bp, Homo sapien
cacaaaatggactaggacaccgctc

SEQ ID NO: 4467537 - DNA, 25 bp, Homo sapien
catcatgtcacaacacagcaggaag

SEQ ID NO: 4467538 - DNA, 25 bp, Homo sapien
tagttacacagagctagcacagttg

SEQ ID NO: 4467539 - DNA, 25 bp, Homo sapien
catcctgtggaatagtacaaggcca

SEQ ID NO: 4467540 - DNA, 25 bp, Homo sapien
tcactgtcggagttgatgaggagcc

SEQ ID NO: 4467541 - DNA, 25 bp, Homo sapien
tcacgtcactgtcggagttgatgag

SEQ ID NO: 4467542 - DNA, 25 bp, Homo sapien
acggcattcacgtcactgtcggagt

SEQ ID NO: 4467543 - DNA, 25 bp, Homo sapien
gcattcacgtcactgtcggagttga

SEQ ID NO: 4467544 - DNA, 25 bp, Homo sapien
taaaggtatatgacatattctgcca

SEQ ID NO: 4467545 - DNA, 25 bp, Homo sapien
aatatgtttctcaaggctgagttcc

SEQ ID NO: 4467546 - DNA, 25 bp, Homo sapien
gataaacgccatttttgataactcc

SEQ ID NO: 4467547 - DNA, 25 bp, Homo sapien
attctgccaaattgctttcagctcc

SEQ ID NO: 4467548 - DNA, 25 bp, Homo sapien
gagaagccaagggaataggtaagtg

SEQ ID NO: 4467549 - DNA, 25 bp, Homo sapien
ctaggggagaagccaagggaatagg

SEQ ID NO: 4467550 - DNA, 25 bp, Homo sapien
tctcaggtttaagtcaaccccagca

SEQ ID NO: 4467551 - DNA, 25 bp, Homo sapien
tatgtcctgccaggcgtgctctgca

SEQ ID NO: 4467552 - DNA, 25 bp, Homo sapien
gagcatatctgctatgtcctgccag

SEQ ID NO: 4467553 - DNA, 25 bp, Homo sapien
ccccagcaatgaggagcatatctgc

SEQ ID NO: 4467554 - DNA, 25 bp, Homo sapien
tgaaagcctgaagcgaggtgggttg

SEQ ID NO: 4467555 - DNA, 25 bp, Homo sapien
aagcctgaagcgaggtgggttgtaa

SEQ ID NO: 4467556 - DNA, 25 bp, Homo sapien
cctgaagcgaggtgggttgtaagca

SEQ ID NO: 4467557 - DNA, 25 bp, Homo sapien
gcgaggtgggttgtaagcagaggta

SEQ ID NO: 4467558 - DNA, 25 bp, Homo sapien
gtacacaagggtttctagcactgag

SEQ ID NO: 4467559 - DNA, 25 bp, Homo sapien
gaagtgctttccagcagtctacgct

SEQ ID NO: 4467560 - DNA, 25 bp, Homo sapien
caagggtttctagcactgaggacaa

SEQ ID NO: 4467561 - DNA, 25 bp, Homo sapien
agcagtctacgctgagagcagaaag

SEQ ID NO: 4467562 - DNA, 25 bp, Homo sapien
ggttgctgcggacagccactgccag

SEQ ID NO: 4467563 - DNA, 25 bp, Homo sapien
caccaggctgacatggttgctgcgg

SEQ ID NO: 4467564 - DNA, 25 bp, Homo sapien
gatcagcttttatgatcatgtccac

SEQ ID NO: 4467565 - DNA, 25 bp, Homo sapien
tcccatctgtagaaacgatcagctt

SEQ ID NO: 4467566 - DNA, 25 bp, Homo sapien
aaagatcaagcgtgaggcctccgta

SEQ ID NO: 4467567 - DNA, 25 bp, Homo sapien
tccaatgaggaaagatcaagcgtga

SEQ ID NO: 4467568 - DNA, 25 bp, Homo sapien
aatgaggaaagatcaagcgtgaggc

SEQ ID NO: 4467569 - DNA, 25 bp, Homo sapien
aggaaagatcaagcgtgaggcctcc

SEQ ID NO: 4467570 - DNA, 25 bp, Homo sapien
tactcaaaagacttccttgaaactg

SEQ ID NO: 4467571 - DNA, 25 bp, Homo sapien
catgggacccaacattactcaaaag

SEQ ID NO: 4467572 - DNA, 25 bp, Homo sapien
aaatttgtaacttagcagattcaac

SEQ ID NO: 4467573 - DNA, 25 bp, Homo sapien
ttcaacacagatgcccctcaactta

SEQ ID NO: 4467574 - DNA, 25 bp, Homo sapien
gccgccacagcacagaacggagctg

SEQ ID NO: 4467575 - DNA, 25 bp, Homo sapien
tgtccactgttgctcgatggcgtcg

SEQ ID NO: 4467576 - DNA, 25 bp, Homo sapien
tgctgtgtttcctgccgatggtcct

SEQ ID NO: 4467577 - DNA, 25 bp, Homo sapien
gcgtcgacatgtgcctccgtgaact

SEQ ID NO: 4467578 - DNA, 25 bp, Homo sapien
cagagcaccaggtgtgttggacagt

SEQ ID NO: 4467579 - DNA, 25 bp, Homo sapien
aacagtgggtatcagtttgggctga

SEQ ID NO: 4467580 - DNA, 25 bp, Homo sapien
gaatgtgaaattcacaatcaatggg

SEQ ID NO: 4467581 - DNA, 25 bp, Homo sapien
accaggctgtgggttgcacaggccc

SEQ ID NO: 4467582 - DNA, 25 bp, Homo sapien
tgctggggttctcaccagccgtggc

SEQ ID NO: 4467583 - DNA, 25 bp, Homo sapien
ttcggtggccgtgctcctgatagct

SEQ ID NO: 4467584 - DNA, 25 bp, Homo sapien
aggccctcgaacagcgctttgctgg

SEQ ID NO: 4467585 - DNA, 25 bp, Homo sapien
tgccaatggccacgaggccctcgaa

SEQ ID NO: 4467586 - DNA, 25 bp, Homo sapien
tgaaaaaagtctggaggtggttcca

SEQ ID NO: 4467587 - DNA, 25 bp, Homo sapien
tagcttttccaccttgcctatagca

SEQ ID NO: 4467588 - DNA, 25 bp, Homo sapien
agcttttccaccttgcctatagcag

SEQ ID NO: 4467589 - DNA, 25 bp, Homo sapien
aacaagaatcttacttcctctgttg

SEQ ID NO: 4467590 - DNA, 25 bp, Homo sapien
gcatgccacagtttgtgttaaaaga

SEQ ID NO: 4467591 - DNA, 25 bp, Homo sapien
gctctgcctcacaggactggtttta

SEQ ID NO: 4467592 - DNA, 25 bp, Homo sapien
gcctcacaggactggttttatgttt

SEQ ID NO: 4467593 - DNA, 25 bp, Homo sapien
gcactcggggctgcgtttgctttct

SEQ ID NO: 4467594 - DNA, 25 bp, Homo sapien
acgctgaggtcccacgtgcctgaag

SEQ ID NO: 4467595 - DNA, 25 bp, Homo sapien
ctggcccctccggttacatggctgt

SEQ ID NO: 4467596 - DNA, 25 bp, Homo sapien
ctccggttacatggctgtgcacctc

SEQ ID NO: 4467597 - DNA, 25 bp, Homo sapien
cctgggctctgcatgactgtgcatt

SEQ ID NO: 4467598 - DNA, 25 bp, Homo sapien
acctggaggtctgttaacagtgatt

SEQ ID NO: 4467599 - DNA, 25 bp, Homo sapien
gattacaggcccttggacccatcct

SEQ ID NO: 4467600 - DNA, 25 bp, Homo sapien
cccttggacccatcctcatgaaaaa

SEQ ID NO: 4467601 - DNA, 25 bp, Homo sapien
agaagaaggaggaagaactaagaag

SEQ ID NO: 4467602 - DNA, 25 bp, Homo sapien
aaggaagaaggagaagaataagaag

SEQ ID NO: 4467603 - DNA, 25 bp, Homo sapien
gaaggaggaagaactaagaagaaga

SEQ ID NO: 4467604 - DNA, 25 bp, Homo sapien
gaaggaagaaggagaagaataagaa

SEQ ID NO: 4467605 - DNA, 25 bp, Homo sapien
agacggtgacgaaggaagaagaagg

SEQ ID NO: 4467606 - DNA, 25 bp, Homo sapien
gaaggagaagaagacgaaggaagga

SEQ ID NO: 4467607 - DNA, 25 bp, Homo sapien
gagaagacggtgacgaaggaagaag

SEQ ID NO: 4467608 - DNA, 25 bp, Homo sapien
aaggagaagacggtgacgaaggaag

SEQ ID NO: 4467609 - DNA, 25 bp, Homo sapien
agaagaaagaagaataaggaacaag

SEQ ID NO: 4467610 - DNA, 25 bp, Homo sapien
agaagaactaagaagaaggagagga

SEQ ID NO: 4467611 - DNA, 25 bp, Homo sapien
gaataaggaacaagaaaggagaaga

SEQ ID NO: 4467612 - DNA, 25 bp, Homo sapien
gaagaagaaagtagaaagcggaaga

SEQ ID NO: 4467613 - DNA, 25 bp, Homo sapien
caaggaagaagaacaactaaggaga

SEQ ID NO: 4467614 - DNA, 25 bp, Homo sapien
gaagaacaactaaggagaaggaaga

SEQ ID NO: 4467615 - DNA, 25 bp, Homo sapien
caacaaaaagaaggagaagaacaag

SEQ ID NO: 4467616 - DNA, 25 bp, Homo sapien
agaacaaggaagaagaacaactaag

SEQ ID NO: 4467617 - DNA, 25 bp, Homo sapien
gcagaactttgaggtaagcttttct

SEQ ID NO: 4467618 - DNA, 25 bp, Homo sapien
ctttgaggtaagcttttctaaaatg

SEQ ID NO: 4467619 - DNA, 25 bp, Homo sapien
gtaggctcctaaacgccacagccag

SEQ ID NO: 4467620 - DNA, 25 bp, Homo sapien
aaatgtaggctcctaaacgccacag

SEQ ID NO: 4467621 - DNA, 25 bp, Homo sapien
ccaactttatagtgctgtgaagaaa

SEQ ID NO: 4467622 - DNA, 25 bp, Homo sapien
catgaacagctacaatgtggataca

SEQ ID NO: 4467623 - DNA, 25 bp, Homo sapien
acatgctatgggttttgaccaatgc

SEQ ID NO: 4467624 - DNA, 25 bp, Homo sapien
gagagctcccacgtactcttcagca

SEQ ID NO: 4467625 - DNA, 25 bp, Homo sapien
gactcccattttaagaaccgtgcag

SEQ ID NO: 4467626 - DNA, 25 bp, Homo sapien
tcatcttcatgacaggcggcatctc

SEQ ID NO: 4467627 - DNA, 25 bp, Homo sapien
tggatataaccatgatcagagtgcc

SEQ ID NO: 4467628 - DNA, 25 bp, Homo sapien
tcaggttcgtcaggctcaccggttc

SEQ ID NO: 4467629 - DNA, 25 bp, Homo sapien
gtgaattccatcagagcaagacacc

SEQ ID NO: 4467630 - DNA, 25 bp, Homo sapien
tctggccaccatcccttttctaagg

SEQ ID NO: 4467631 - DNA, 25 bp, Homo sapien
ttgaacaggtatattagagatcccc

SEQ ID NO: 4467632 - DNA, 25 bp, Homo sapien
ggtatgatgtgaccttgccctctgg

SEQ ID NO: 4467633 - DNA, 25 bp, Homo sapien
tcacttgtaagtggtactcccagtg

SEQ ID NO: 4467634 - DNA, 25 bp, Homo sapien
gagagcccgtctcttacttgagaaa

SEQ ID NO: 4467635 - DNA, 25 bp, Homo sapien
tgaggttaccaccaactgaggccac

SEQ ID NO: 4467636 - DNA, 25 bp, Homo sapien
gtctctttagctggcagtcgcctgc

SEQ ID NO: 4467637 - DNA, 25 bp, Homo sapien
tactgcagttgagaactaagacagg

SEQ ID NO: 4467638 - DNA, 25 bp, Homo sapien
aaaagataactgatggtactgcagt

SEQ ID NO: 4467639 - DNA, 25 bp, Homo sapien
gaaaaggctgtctcacatctggtcc

SEQ ID NO: 4467640 - DNA, 25 bp, Homo sapien
tcctagcattgccatgtgatcttgg

SEQ ID NO: 4467641 - DNA, 25 bp, Homo sapien
aggttgggataatcacttgagcctc

SEQ ID NO: 4467642 - DNA, 25 bp, Homo sapien
gaggttgggataatcacttgagcct

SEQ ID NO: 4467643 - DNA, 25 bp, Homo sapien
tgagcctcagaggttaaggctgtgg

SEQ ID NO: 4467644 - DNA, 25 bp, Homo sapien
gcctcagaggttaaggctgtggtga

SEQ ID NO: 4467645 - DNA, 25 bp, Homo sapien
cagttagatttatggtgtattgcga

SEQ ID NO: 4467646 - DNA, 25 bp, Homo sapien
ctggttatgtgctattacagttaga

SEQ ID NO: 4467647 - DNA, 25 bp, Homo sapien
gaatttctggttatgtgctattaca

SEQ ID NO: 4467648 - DNA, 25 bp, Homo sapien
tgtattgcgaatttatcaggaagca

SEQ ID NO: 4467649 - DNA, 25 bp, Homo sapien
tgtggacacactcatgcatgggaac

SEQ ID NO: 4467650 - DNA, 25 bp, Homo sapien
gacctgagaagtgattgcaacttca

SEQ ID NO: 4467651 - DNA, 25 bp, Homo sapien
gggaacatatgccatccagatcaac

SEQ ID NO: 4467652 - DNA, 25 bp, Homo sapien
cagattccctgcagtcataagtggt

SEQ ID NO: 4467653 - DNA, 25 bp, Homo sapien
aaacattagtcaacagtgtgtactg

SEQ ID NO: 4467654 - DNA, 25 bp, Homo sapien
tgagtgaggtcacatgtcaagccca

SEQ ID NO: 4467655 - DNA, 25 bp, Homo sapien
tgctccattggagctcaaactccag

SEQ ID NO: 4467656 - DNA, 25 bp, Homo sapien
gaaagaagacccaacagggaatcta

SEQ ID NO: 4467657 - DNA, 25 bp, Homo sapien
tcctcctctttatgggagaacagga

SEQ ID NO: 4467658 - DNA, 25 bp, Homo sapien
tgttgggagcagcaccgatttctgt

SEQ ID NO: 4467659 - DNA, 25 bp, Homo sapien
aggcagtaacagctgtcacttaggg

SEQ ID NO: 4467660 - DNA, 25 bp, Homo sapien
tcctgagttcctgacgactgccttg

SEQ ID NO: 4467661 - DNA, 25 bp, Homo sapien
tagcgtgtgcaacgaggtccttaga

SEQ ID NO: 4467662 - DNA, 25 bp, Homo sapien
cctggtagcgtgtgcaacgaggtcc

SEQ ID NO: 4467663 - DNA, 25 bp, Homo sapien
tgtgcaacgaggtccttagacccct

SEQ ID NO: 4467664 - DNA, 25 bp, Homo sapien
ctcctggtagcgtgtgcaacgaggt

SEQ ID NO: 4467665 - DNA, 25 bp, Homo sapien
cgggagccccctcactgtgctccat

SEQ ID NO: 4467666 - DNA, 25 bp, Homo sapien
tgggtctccgggagccccctcactg

SEQ ID NO: 4467667 - DNA, 25 bp, Homo sapien
ctccgggagccccctcactgtgctc

SEQ ID NO: 4467668 - DNA, 25 bp, Homo sapien
ctgggtctccgggagccccctcact

SEQ ID NO: 4467669 - DNA, 25 bp, Homo sapien
catcttccacacgaaaaaaccaaag

SEQ ID NO: 4467670 - DNA, 25 bp, Homo sapien
tcttccacacgaaaaaaccaaagca

SEQ ID NO: 4467671 - DNA, 25 bp, Homo sapien
tattgtcgccccagtgctgagaaca

SEQ ID NO: 4467672 - DNA, 25 bp, Homo sapien
aaatgtgatgattggagggctgcat

SEQ ID NO: 4467673 - DNA, 25 bp, Homo sapien
ttattcactattgtcgccccagtgc

SEQ ID NO: 4467674 - DNA, 25 bp, Homo sapien
aatgtgatgattggagggctgcata

SEQ ID NO: 4467675 - DNA, 25 bp, Homo sapien
ctgccagggcaaggatggaatgatt

SEQ ID NO: 4467676 - DNA, 25 bp, Homo sapien
ccatgcttataatgaccaccacagc

SEQ ID NO: 4467677 - DNA, 25 bp, Homo sapien
ttcccaggaggaccatgcttataat

SEQ ID NO: 4467678 - DNA, 25 bp, Homo sapien
gcttgcctggatgcttcttcccagg

SEQ ID NO: 4467679 - DNA, 25 bp, Homo sapien
aggttgtttaggctgttgtgatcct

SEQ ID NO: 4467680 - DNA, 25 bp, Homo sapien
gtttaggctgttgtgatccttggcc

SEQ ID NO: 4467681 - DNA, 25 bp, Homo sapien
ggttgtttaggctgttgtgatcctt

SEQ ID NO: 4467682 - DNA, 25 bp, Homo sapien
ttgtttaggctgttgtgatccttgg

SEQ ID NO: 4467683 - DNA, 25 bp, Homo sapien
gagcccacatcatgtgtctggctta

SEQ ID NO: 4467684 - DNA, 25 bp, Homo sapien
gaaaaaagcggcttcttgggagaga

SEQ ID NO: 4467685 - DNA, 25 bp, Homo sapien
ttcattcattgtatctgctaagaaa

SEQ ID NO: 4467686 - DNA, 25 bp, Homo sapien
gggagagactctaaaacctgagagg

SEQ ID NO: 4467687 - DNA, 25 bp, Homo sapien
gcaataccacctgctcccttccagg

SEQ ID NO: 4467688 - DNA, 25 bp, Homo sapien
caataccacctgctcccttccagga

SEQ ID NO: 4467689 - DNA, 25 bp, Homo sapien
taccacctgctcccttccaggagca

SEQ ID NO: 4467690 - DNA, 25 bp, Homo sapien
aataccacctgctcccttccaggag

SEQ ID NO: 4467691 - DNA, 25 bp, Homo sapien
agtctgtcctttctgatgttcagat

SEQ ID NO: 4467692 - DNA, 25 bp, Homo sapien
ttaaggtagcgtgtctggagtctgt

SEQ ID NO: 4467693 - DNA, 25 bp, Homo sapien
cagtgggcttgtggtctcgctggcc

SEQ ID NO: 4467694 - DNA, 25 bp, Homo sapien
aggtagcgtgtctggagtctgtcct

SEQ ID NO: 4467695 - DNA, 25 bp, Homo sapien
tgtgctccagaaagcgagccagcgc

SEQ ID NO: 4467696 - DNA, 25 bp, Homo sapien
tgtccgacgtgaggttgtgctccag

SEQ ID NO: 4467697 - DNA, 25 bp, Homo sapien
cacagcaatgcgcagttgtccgacg

SEQ ID NO: 4467698 - DNA, 25 bp, Homo sapien
aagagcgcggcactgtggaacacgt

SEQ ID NO: 4467699 - DNA, 25 bp, Homo sapien
ccgtcggggtcgtagcagaagccca

SEQ ID NO: 4467700 - DNA, 25 bp, Homo sapien
gggaactcgtgccacgtgccgccgt

SEQ ID NO: 4467701 - DNA, 25 bp, Homo sapien
acgtgccgccgtcggggtcgtagca

SEQ ID NO: 4467702 - DNA, 25 bp, Homo sapien
cggggtcgtagcagaagcccagctc

SEQ ID NO: 4467703 - DNA, 25 bp, Homo sapien
ttgctgttgacgaactggccgggca

SEQ ID NO: 4467704 - DNA, 25 bp, Homo sapien
cagcgtgaacatgcggttgaccgta

SEQ ID NO: 4467705 - DNA, 25 bp, Homo sapien
ccgttgcgcaccacatagaggctgt

SEQ ID NO: 4467706 - DNA, 25 bp, Homo sapien
ttgagacagtcgatggcgcagtgca

SEQ ID NO: 4467707 - DNA, 25 bp, Homo sapien
caaacctgggtgtctcagtagaaag

SEQ ID NO: 4467708 - DNA, 25 bp, Homo sapien
aacatcatttaagtcgctcccagcg

SEQ ID NO: 4467709 - DNA, 25 bp, Homo sapien
tcctggatccctgtgtggcaactac

SEQ ID NO: 4467710 - DNA, 25 bp, Homo sapien
cacactcagccatagctcagggagg

SEQ ID NO: 4467711 - DNA, 25 bp, Homo sapien
ttctccagggttgggacataggcca

SEQ ID NO: 4467712 - DNA, 25 bp, Homo sapien
gagagtcctcatccaacaacagagg

SEQ ID NO: 4467713 - DNA, 25 bp, Homo sapien
cacagaggatggtagagcactgaca

SEQ ID NO: 4467714 - DNA, 25 bp, Homo sapien
tgacgaggccaagattccccatggg

SEQ ID NO: 4467715 - DNA, 25 bp, Homo sapien
aatcccagttttagtgcagcttagg

SEQ ID NO: 4467716 - DNA, 25 bp, Homo sapien
gaagagccctttgacttctaggaag

SEQ ID NO: 4467717 - DNA, 25 bp, Homo sapien
ggcaagcttgatgcaaaacctcctg

SEQ ID NO: 4467718 - DNA, 25 bp, Homo sapien
aacctgaagagtacccaaattggat

SEQ ID NO: 4467719 - DNA, 25 bp, Homo sapien
aacgcctgcgcgaccggcagtggct

SEQ ID NO: 4467720 - DNA, 25 bp, Homo sapien
tgcgcgcgcgattgctccgggctct

SEQ ID NO: 4467721 - DNA, 25 bp, Homo sapien
ttgacccaggctgcctatgtgggcg

SEQ ID NO: 4467722 - DNA, 25 bp, Homo sapien
tggccgagcggctacagccgttgac

SEQ ID NO: 4467723 - DNA, 25 bp, Homo sapien
taatttgcaacacacaactttgctc

SEQ ID NO: 4467724 - DNA, 25 bp, Homo sapien
caactttgctcatgtagtgaagagt

SEQ ID NO: 4467725 - DNA, 25 bp, Homo sapien
tgtttcctcatagggttctgggcaa

SEQ ID NO: 4467726 - DNA, 25 bp, Homo sapien
tcatcgattggttgggtaaagtgga

SEQ ID NO: 4467727 - DNA, 25 bp, Homo sapien
tgcagtatcagtcatagtaacagcc

SEQ ID NO: 4467728 - DNA, 25 bp, Homo sapien
tacagcaaagctaaaaagtggtggg

SEQ ID NO: 4467729 - DNA, 25 bp, Homo sapien
ccttggtctccctagtaatggttca

SEQ ID NO: 4467730 - DNA, 25 bp, Homo sapien
agactcgagctttccttttacacag

SEQ ID NO: 4467731 - DNA, 25 bp, Homo sapien
tactatcaaaaacaacctctcaggt

SEQ ID NO: 4467732 - DNA, 25 bp, Homo sapien
aagaattcccgaaagctccgtggag

SEQ ID NO: 4467733 - DNA, 25 bp, Homo sapien
caatgatctattggccaacttgacc

SEQ ID NO: 4467734 - DNA, 25 bp, Homo sapien
taatgtttaattccttgcagagcca

SEQ ID NO: 4467735 - DNA, 25 bp, Homo sapien
ggccagatctcagtttactgcaaac

SEQ ID NO: 4467736 - DNA, 25 bp, Homo sapien
gcctggcctctttttgtgtgtctgt

SEQ ID NO: 4467737 - DNA, 25 bp, Homo sapien
gcgcctggcctctttttgtgtgtct

SEQ ID NO: 4467738 - DNA, 25 bp, Homo sapien
gcagtggccagatctcagtttactg

SEQ ID NO: 4467739 - DNA, 25 bp, Homo sapien
tcccatgctactgattggcacgtgg

SEQ ID NO: 4467740 - DNA, 25 bp, Homo sapien
gactgatgcacaaactgtcacttgg

SEQ ID NO: 4467741 - DNA, 25 bp, Homo sapien
gagatttcctagagttgctcaacag

SEQ ID NO: 4467742 - DNA, 25 bp, Homo sapien
caatggcacaataaagcccctttgt

SEQ ID NO: 4467743 - DNA, 25 bp, Homo sapien
cactggctgttcacatgctggtgga

SEQ ID NO: 4467744 - DNA, 25 bp, Homo sapien
ggtctcagtgggtaccagcaggcac

SEQ ID NO: 4467745 - DNA, 25 bp, Homo sapien
taggcttaggcaagagcacaccatc

SEQ ID NO: 4467746 - DNA, 25 bp, Homo sapien
tatacctgaaggcagacacgtactc

SEQ ID NO: 4467747 - DNA, 25 bp, Homo sapien
ttggacagtctagacctacggccac

SEQ ID NO: 4467748 - DNA, 25 bp, Homo sapien
tggttgaggacagcaatagcttccc

SEQ ID NO: 4467749 - DNA, 25 bp, Homo sapien
ggttgaggacagcaatagcttcccc

SEQ ID NO: 4467750 - DNA, 25 bp, Homo sapien
caggccaggccttggacagtctaga

SEQ ID NO: 4467751 - DNA, 25 bp, Homo sapien
taaataggctccacctcataatggg

SEQ ID NO: 4467752 - DNA, 25 bp, Homo sapien
tcattcacctgtctggccattggct

SEQ ID NO: 4467753 - DNA, 25 bp, Homo sapien
tgtacagaatcaaggtccagaccat

SEQ ID NO: 4467754 - DNA, 25 bp, Homo sapien
caagagagcgatggtggaaactgta

SEQ ID NO: 4467755 - DNA, 25 bp, Homo sapien
gagtcatgaagaggcctcgggtcat

SEQ ID NO: 4467756 - DNA, 25 bp, Homo sapien
gcaggcttttctgggctgccagcat

SEQ ID NO: 4467757 - DNA, 25 bp, Homo sapien
tctcaagagagtcatgaagaggcct

SEQ ID NO: 4467758 - DNA, 25 bp, Homo sapien
gggacctctcaagagagtcatgaag

SEQ ID NO: 4467759 - DNA, 25 bp, Homo sapien
ttctccagggttggactgtggctcc

SEQ ID NO: 4467760 - DNA, 25 bp, Homo sapien
acgggtgggtccagaacctccacat

SEQ ID NO: 4467761 - DNA, 25 bp, Homo sapien
agccccagaatacgggtgggtccag

SEQ ID NO: 4467762 - DNA, 25 bp, Homo sapien
ccagcttccggttcctctcactgga

SEQ ID NO: 4467763 - DNA, 25 bp, Homo sapien
ttcctgtgggtccaggaggcctcag

SEQ ID NO: 4467764 - DNA, 25 bp, Homo sapien
aggcttcctgtgggtccaggaggcc

SEQ ID NO: 4467765 - DNA, 25 bp, Homo sapien
ccaggcttcctgtgggtccaggagg

SEQ ID NO: 4467766 - DNA, 25 bp, Homo sapien
gcttcctgtgggtccaggaggcctc

SEQ ID NO: 4467767 - DNA, 25 bp, Homo sapien
agctacaagcccagatgctctctgg

SEQ ID NO: 4467768 - DNA, 25 bp, Homo sapien
tacaagcccagatgctctctggaga

SEQ ID NO: 4467769 - DNA, 25 bp, Homo sapien
tcagctacaagcccagatgctctct

SEQ ID NO: 4467770 - DNA, 25 bp, Homo sapien
caagcccagatgctctctggagagg

SEQ ID NO: 4467771 - DNA, 25 bp, Homo sapien
tagtatatgtgctaccgaagtgatc

SEQ ID NO: 4467772 - DNA, 25 bp, Homo sapien
agtatatgtgctaccgaagtgatca

SEQ ID NO: 4467773 - DNA, 25 bp, Homo sapien
tatatgtgctaccgaagtgatcact

SEQ ID NO: 4467774 - DNA, 25 bp, Homo sapien
gtatatgtgctaccgaagtgatcac

SEQ ID NO: 4467775 - DNA, 25 bp, Homo sapien
tagggcagggccacgttatgacttc

SEQ ID NO: 4467776 - DNA, 25 bp, Homo sapien
aacgcaatacctgatatgactgtgg

SEQ ID NO: 4467777 - DNA, 25 bp, Homo sapien
taaagaatggtcttgccctccagga

SEQ ID NO: 4467778 - DNA, 25 bp, Homo sapien
aaaactctggagtctagagggttcg

SEQ ID NO: 4467779 - DNA, 25 bp, Homo sapien
taaagttgtgaaagagccactacca

SEQ ID NO: 4467780 - DNA, 25 bp, Homo sapien
gaaaagccttctggccacccagaga

SEQ ID NO: 4467781 - DNA, 25 bp, Homo sapien
ttagccataatagggcccggtacga

SEQ ID NO: 4467782 - DNA, 25 bp, Homo sapien
acaaagctgccttgactgtggcctg

SEQ ID NO: 4467783 - DNA, 25 bp, Homo sapien
ttcgtggtcaccaataaccagctgc

SEQ ID NO: 4467784 - DNA, 25 bp, Homo sapien
cgcagacgagcgagaatcaaacata

SEQ ID NO: 4467785 - DNA, 25 bp, Homo sapien
tgctgcgagtgaagtacctcctggt

SEQ ID NO: 4467786 - DNA, 25 bp, Homo sapien
tccaaggagatagatcgcagacgag

SEQ ID NO: 4467787 - DNA, 25 bp, Homo sapien
gaggtcattgaccatccggacgtca

SEQ ID NO: 4467788 - DNA, 25 bp, Homo sapien
tcaagtgccaaaccaagaagaaggg

SEQ ID NO: 4467789 - DNA, 25 bp, Homo sapien
gacctgtgtcgtcttgccgtgccaa

SEQ ID NO: 4467790 - DNA, 25 bp, Homo sapien
tgcagacatccttgttcggagaggg

SEQ ID NO: 4467791 - DNA, 25 bp, Homo sapien
taagcgccgtacaacatggaagccc

SEQ ID NO: 4467792 - DNA, 25 bp, Homo sapien
tcaggaccttgggtacgaaacttca

SEQ ID NO: 4467793 - DNA, 25 bp, Homo sapien
gaggccagcctatggagcatgcaag

SEQ ID NO: 4467794 - DNA, 25 bp, Homo sapien
taaggatacaggattaacccgtgga

SEQ ID NO: 4467795 - DNA, 25 bp, Homo sapien
caatgacaaatgactccgaggactg

SEQ ID NO: 4467796 - DNA, 25 bp, Homo sapien
ggtttccatgagctaagaacactgc

SEQ ID NO: 4467797 - DNA, 25 bp, Homo sapien
gaggcagttccatccgcattagtaa

SEQ ID NO: 4467798 - DNA, 25 bp, Homo sapien
gcccgcggcgactgtaaggactttg

SEQ ID NO: 4467799 - DNA, 25 bp, Homo sapien
ccttgccaaagcaaggcctcaaaaa

SEQ ID NO: 4467800 - DNA, 25 bp, Homo sapien
tagccttgccaaagcaaggcctcaa

SEQ ID NO: 4467801 - DNA, 25 bp, Homo sapien
attgggttaagactcagagttgttc

SEQ ID NO: 4467802 - DNA, 25 bp, Homo sapien
tgggttaagactcagagttgttcct

SEQ ID NO: 4467803 - DNA, 25 bp, Homo sapien
gattggtcttgattgtcctgcctcg

SEQ ID NO: 4467804 - DNA, 25 bp, Homo sapien
gtgtttcaaccggacagtgctgcaa

SEQ ID NO: 4467805 - DNA, 25 bp, Homo sapien
tatacaagccgcatttctttggaac

SEQ ID NO: 4467806 - DNA, 25 bp, Homo sapien
agatcccggaggaggtactacttgt

SEQ ID NO: 4467807 - DNA, 25 bp, Homo sapien
aacttgttcgtaagatgaaagccct

SEQ ID NO: 4467808 - DNA, 25 bp, Homo sapien
agccctgttctgagagcaaggcccc

SEQ ID NO: 4467809 - DNA, 25 bp, Homo sapien
ctataggggtactggctgaaggtca

SEQ ID NO: 4467810 - DNA, 25 bp, Homo sapien
gtcaggaacttgttcgtaagatgaa

SEQ ID NO: 4467811 - DNA, 25 bp, Homo sapien
tccccatgacttggagtcggctctg

SEQ ID NO: 4467812 - DNA, 25 bp, Homo sapien
aagccagtctccttcacgtggtcgt

SEQ ID NO: 4467813 - DNA, 25 bp, Homo sapien
agctgccccgtggtccgggctgaat

SEQ ID NO: 4467814 - DNA, 25 bp, Homo sapien
gaggcgccctggttcgtgatggtga

SEQ ID NO: 4467815 - DNA, 25 bp, Homo sapien
agccttgtcggaacaaggcctcaaa

SEQ ID NO: 4467816 - DNA, 25 bp, Homo sapien
tagccttgtcggaacaaggcctcaa

SEQ ID NO: 4467817 - DNA, 25 bp, Homo sapien
gccttgtcggaacaaggcctcaaaa

SEQ ID NO: 4467818 - DNA, 25 bp, Homo sapien
tacacaaagtttaaacgcatgagcg

SEQ ID NO: 4467819 - DNA, 25 bp, Homo sapien
tcactagaaaaagaacgcttgcact

SEQ ID NO: 4467820 - DNA, 25 bp, Homo sapien
tacccaatgcagtgggattaccggc

SEQ ID NO: 4467821 - DNA, 25 bp, Homo sapien
gaagcgtttacaagcagaaccgaaa

SEQ ID NO: 4467822 - DNA, 25 bp, Homo sapien
acccagctagttattacatcttatg

SEQ ID NO: 4467823 - DNA, 25 bp, Homo sapien
gtgtggccgtagcccctccaggagt

SEQ ID NO: 4467824 - DNA, 25 bp, Homo sapien
tggggtgtttgggtgtggccgtagc

SEQ ID NO: 4467825 - DNA, 25 bp, Homo sapien
tttgggtgtggccgtagcccctcca

SEQ ID NO: 4467826 - DNA, 25 bp, Homo sapien
tgggtgtggccgtagcccctccagg

SEQ ID NO: 4467827 - DNA, 25 bp, Homo sapien
tgttcctggcattgtcagcggccag

SEQ ID NO: 4467828 - DNA, 25 bp, Homo sapien
ttaaacacaatgtgcaaatcttctc

SEQ ID NO: 4467829 - DNA, 25 bp, Homo sapien
cccgcagaacttgagtgtggaagtc

SEQ ID NO: 4467830 - DNA, 25 bp, Homo sapien
gaagtcgaacgcttctggttcccac

SEQ ID NO: 4467831 - DNA, 25 bp, Homo sapien
gctggggagtacagcctggtattta

SEQ ID NO: 4467832 - DNA, 25 bp, Homo sapien
agtacagcctggtatttagggtgcc

SEQ ID NO: 4467833 - DNA, 25 bp, Homo sapien
tggggagtacagcctggtatttagg

SEQ ID NO: 4467834 - DNA, 25 bp, Homo sapien
ggagtacagcctggtatttagggtg

SEQ ID NO: 4467835 - DNA, 25 bp, Homo sapien
tcagcaaaaaggctcatggtgtgtg

SEQ ID NO: 4467836 - DNA, 25 bp, Homo sapien
tagagtcccttttcagcaaaaaggc

SEQ ID NO: 4467837 - DNA, 25 bp, Homo sapien
ctagagtcccttttcagcaaaaagg

SEQ ID NO: 4467838 - DNA, 25 bp, Homo sapien
caaaaaggctcatggtgtgtggctc

SEQ ID NO: 4467839 - DNA, 25 bp, Homo sapien
gactaatttctcagcatgggtcggt

SEQ ID NO: 4467840 - DNA, 25 bp, Homo sapien
aaaaggcgaggcaagatgtttcagc

SEQ ID NO: 4467841 - DNA, 25 bp, Homo sapien
tttcatactttgagcatcccggtgc

SEQ ID NO: 4467842 - DNA, 25 bp, Homo sapien
ggagcagtcccatcttatgcagcct

SEQ ID NO: 4467843 - DNA, 25 bp, Homo sapien
tctcagcacagttgcggcttcctca

SEQ ID NO: 4467844 - DNA, 25 bp, Homo sapien
tattatactcgggtgtcactcactg

SEQ ID NO: 4467845 - DNA, 25 bp, Homo sapien
tgatgtctgcacctacgtttccacc

SEQ ID NO: 4467846 - DNA, 25 bp, Homo sapien
tcttgtttaacaggcactgaggttc

SEQ ID NO: 4467847 - DNA, 25 bp, Homo sapien
ctgcttgccagaggcagccagtgct

SEQ ID NO: 4467848 - DNA, 25 bp, Homo sapien
tgcttgccagaggcagccagtgctt

SEQ ID NO: 4467849 - DNA, 25 bp, Homo sapien
tcgctggacatgcactcagtcacgg

SEQ ID NO: 4467850 - DNA, 25 bp, Homo sapien
gacatgcactcagtcacgggcatca

SEQ ID NO: 4467851 - DNA, 25 bp, Homo sapien
tcacgggcatcatcgtgggtgtctg

SEQ ID NO: 4467852 - DNA, 25 bp, Homo sapien
tgcactcagtcacgggcatcatcgt

SEQ ID NO: 4467853 - DNA, 25 bp, Homo sapien
taacaaggtcccctgctaatctgtg

SEQ ID NO: 4467854 - DNA, 25 bp, Homo sapien
cgcccggtgctccaactgaaagtgt

SEQ ID NO: 4467855 - DNA, 25 bp, Homo sapien
ttgagaattgctgtcccggaggatc

SEQ ID NO: 4467856 - DNA, 25 bp, Homo sapien
ggaggatcctgacacctaggaagag

SEQ ID NO: 4467857 - DNA, 25 bp, Homo sapien
cacagacgtttccactaaaatgggc

SEQ ID NO: 4467858 - DNA, 25 bp, Homo sapien
taaggatgcgcttcctgggcacaga

SEQ ID NO: 4467859 - DNA, 25 bp, Homo sapien
cacagaaatcaggttgagcacagag

SEQ ID NO: 4467860 - DNA, 25 bp, Homo sapien
gctggcacgtgagtccctaaggatg

SEQ ID NO: 4467861 - DNA, 25 bp, Homo sapien
tcaagccggagtcccgagcaagtgc

SEQ ID NO: 4467862 - DNA, 25 bp, Homo sapien
gccctggtctgcatcgggctgcggg

SEQ ID NO: 4467863 - DNA, 25 bp, Homo sapien
actgcggagtgctggtgcgcccgcg

SEQ ID NO: 4467864 - DNA, 25 bp, Homo sapien
tgcttgtccgcagtgggtgtgtgcc

SEQ ID NO: 4467865 - DNA, 25 bp, Homo sapien
tccttccagaaagtatagcccgcct

SEQ ID NO: 4467866 - DNA, 25 bp, Homo sapien
gaggaggaaatatacccacgaccac

SEQ ID NO: 4467867 - DNA, 25 bp, Homo sapien
caaggtcctgggctctaggtgatca

SEQ ID NO: 4467868 - DNA, 25 bp, Homo sapien
gaacaacctacatgctagagagaga

SEQ ID NO: 4467869 - DNA, 25 bp, Homo sapien
tagcaacagtttagtgggagccaaa

SEQ ID NO: 4467870 - DNA, 25 bp, Homo sapien
gaatgcttctattatcactcccagt

SEQ ID NO: 4467871 - DNA, 25 bp, Homo sapien
catccagagggatagttacttgagc

SEQ ID NO: 4467872 - DNA, 25 bp, Homo sapien
tatgggtaacagcttaaacggcaag

SEQ ID NO: 4467873 - DNA, 25 bp, Homo sapien
taatagtagtagatgcaagttttcc

SEQ ID NO: 4467874 - DNA, 25 bp, Homo sapien
taatattactactgagctcatcgga

SEQ ID NO: 4467875 - DNA, 25 bp, Homo sapien
tctggaaaatactggctcactgtgt

SEQ ID NO: 4467876 - DNA, 25 bp, Homo sapien
gctcatcggaaaagtgtctaagtat

SEQ ID NO: 4467877 - DNA, 25 bp, Homo sapien
gagtatggtgacacaattacagctc

SEQ ID NO: 4467878 - DNA, 25 bp, Homo sapien
cctggagtatggtgacacaattaca

SEQ ID NO: 4467879 - DNA, 25 bp, Homo sapien
tggagtatggtgacacaattacagc

SEQ ID NO: 4467880 - DNA, 25 bp, Homo sapien
cagcctggagtatggtgacacaatt

SEQ ID NO: 4467881 - DNA, 25 bp, Homo sapien
ctcaaaaagataccctatactcctg

SEQ ID NO: 4467882 - DNA, 25 bp, Homo sapien
gataccctatactcctgagccgtca

SEQ ID NO: 4467883 - DNA, 25 bp, Homo sapien
gagagagaggctcccgagtcagtct

SEQ ID NO: 4467884 - DNA, 25 bp, Homo sapien
taactcacatgtaatacgatttatt

SEQ ID NO: 4467885 - DNA, 25 bp, Homo sapien
gcctggcctcaaaatcttacataat

SEQ ID NO: 4467886 - DNA, 25 bp, Homo sapien
atcttacataattatggctttgtgg

SEQ ID NO: 4467887 - DNA, 25 bp, Homo sapien
ctggaggggagtggtgttgtgatct

SEQ ID NO: 4467888 - DNA, 25 bp, Homo sapien
acataattatggctttgtggttttc

SEQ ID NO: 4467889 - DNA, 25 bp, Homo sapien
tgagctgagatggagctattgcacc

SEQ ID NO: 4467890 - DNA, 25 bp, Homo sapien
tgagatggagctattgcaccccagc

SEQ ID NO: 4467891 - DNA, 25 bp, Homo sapien
gctgagatggagctattgcacccca

SEQ ID NO: 4467892 - DNA, 25 bp, Homo sapien
agctgagatggagctattgcacccc

SEQ ID NO: 4467893 - DNA, 25 bp, Homo sapien
caataggtttctaagtgaaagtcca

SEQ ID NO: 4467894 - DNA, 25 bp, Homo sapien
cacttgagatggatttggtctatca

SEQ ID NO: 4467895 - DNA, 25 bp, Homo sapien
tctatgaagtattcaggatagtgcc

SEQ ID NO: 4467896 - DNA, 25 bp, Homo sapien
taggtagggagttaatgtcatcagc

SEQ ID NO: 4467897 - DNA, 25 bp, Homo sapien
atgtcagtcaaatgtagcagttagg

SEQ ID NO: 4467898 - DNA, 25 bp, Homo sapien
taacccactactattgggtcagcct

SEQ ID NO: 4467899 - DNA, 25 bp, Homo sapien
caaatgtagcagttaggggttgtat

SEQ ID NO: 4467900 - DNA, 25 bp, Homo sapien
tccgataacccactactattgggtc

SEQ ID NO: 4467901 - DNA, 25 bp, Homo sapien
cactgcaaccaggaccggagtggag

SEQ ID NO: 4467902 - DNA, 25 bp, Homo sapien
tagtgccgcgttcgccgcctgggtt

SEQ ID NO: 4467903 - DNA, 25 bp, Homo sapien
cgccgctgcttcttagtgccgcgtt

SEQ ID NO: 4467904 - DNA, 25 bp, Homo sapien
gtgctaaagcctccgaggccaaggc

SEQ ID NO: 4467905 - DNA, 25 bp, Homo sapien
ttcgccagtcggaaagcggatcgca

SEQ ID NO: 4467906 - DNA, 25 bp, Homo sapien
agcagacagcggcgcccttcttggc

SEQ ID NO: 4467907 - DNA, 25 bp, Homo sapien
cggctgcgccttcgccagtcggaaa

SEQ ID NO: 4467908 - DNA, 25 bp, Homo sapien
agtcggaaagcggatcgcaacgaac

SEQ ID NO: 4467909 - DNA, 25 bp, Homo sapien
gactgcgctgtggtgttggacccca

SEQ ID NO: 4467910 - DNA, 25 bp, Homo sapien
ctagactgcgctgtggtgttggacc

SEQ ID NO: 4467911 - DNA, 25 bp, Homo sapien
tagactgcgctgtggtgttggaccc

SEQ ID NO: 4467912 - DNA, 25 bp, Homo sapien
actgcgctgtggtgttggaccccac

SEQ ID NO: 4467913 - DNA, 25 bp, Homo sapien
tttgccctgtgactttcagcaagtc

SEQ ID NO: 4467914 - DNA, 25 bp, Homo sapien
gactttcagcaagtcgctgttcctt

SEQ ID NO: 4467915 - DNA, 25 bp, Homo sapien
gactacagacgcgccacattttgcc

SEQ ID NO: 4467916 - DNA, 25 bp, Homo sapien
atctctatcccctgctcggcccagt

SEQ ID NO: 4467917 - DNA, 25 bp, Homo sapien
gcgcctcgctgcctcaggtagtgct

SEQ ID NO: 4467918 - DNA, 25 bp, Homo sapien
ctctgctggcgcgagcagaaagcag

SEQ ID NO: 4467919 - DNA, 25 bp, Homo sapien
ggcctcaaaccctagcgctcctgag

SEQ ID NO: 4467920 - DNA, 25 bp, Homo sapien
aggctaggctcgctgcgcctcgctg

SEQ ID NO: 4467921 - DNA, 25 bp, Homo sapien
tatagctcgcggtgtcgctgagccc

SEQ ID NO: 4467922 - DNA, 25 bp, Homo sapien
gtcactcagctccacgcgcagatat

SEQ ID NO: 4467923 - DNA, 25 bp, Homo sapien
gcggcgtcaacacctgattctccat

SEQ ID NO: 4467924 - DNA, 25 bp, Homo sapien
tcgctgagcccagtagacatgcggc

SEQ ID NO: 4467925 - DNA, 25 bp, Homo sapien
aaaagcgccagcacgccgtaagcgc

SEQ ID NO: 4467926 - DNA, 25 bp, Homo sapien
cgactgcgaacaaagaagaggcccg

SEQ ID NO: 4467927 - DNA, 25 bp, Homo sapien
tgcagatgagcctcgaaaagcgcca

SEQ ID NO: 4467928 - DNA, 25 bp, Homo sapien
tcgccgaccttgttggcgcactgca

SEQ ID NO: 4467929 - DNA, 25 bp, Homo sapien
cagcaagccgctgtcacaaccgcac

SEQ ID NO: 4467930 - DNA, 25 bp, Homo sapien
aaccgcacccctgacccaacaagct

SEQ ID NO: 4467931 - DNA, 25 bp, Homo sapien
ccaacaagctcatcccacatctcga

SEQ ID NO: 4467932 - DNA, 25 bp, Homo sapien
aagctcatcccacatctcgaagggc

SEQ ID NO: 4467933 - DNA, 25 bp, Homo sapien
tccagaagcaggcatagcactcaca

SEQ ID NO: 4467934 - DNA, 25 bp, Homo sapien
gatagcatgcccttgaaaagctggg

SEQ ID NO: 4467935 - DNA, 25 bp, Homo sapien
caacaggccctgcatagagcaatca

SEQ ID NO: 4467936 - DNA, 25 bp, Homo sapien
ccagggttccccatggagtatgctc

SEQ ID NO: 4467937 - DNA, 25 bp, Homo sapien
tccacttcttcgaaactcctgttca

SEQ ID NO: 4467938 - DNA, 25 bp, Homo sapien
cacttcttcgaaactcctgttcatt

SEQ ID NO: 4467939 - DNA, 25 bp, Homo sapien
gaatcactacctacgacagttttaa

SEQ ID NO: 4467940 - DNA, 25 bp, Homo sapien
tccatcacagaatcactacctacga

SEQ ID NO: 4467941 - DNA, 25 bp, Homo sapien
tggactgatccaggtggtgactgct

SEQ ID NO: 4467942 - DNA, 25 bp, Homo sapien
agtgagtcacacaaagtttctggtt

SEQ ID NO: 4467943 - DNA, 25 bp, Homo sapien
taccttggagctattgtaggttctg

SEQ ID NO: 4467944 - DNA, 25 bp, Homo sapien
aatgtgagaaacagtatcctatcat

SEQ ID NO: 4467945 - DNA, 25 bp, Homo sapien
attgcaggtggtgaatgaaaatgaa

SEQ ID NO: 4467946 - DNA, 25 bp, Homo sapien
gcagaggattgcaggtggtgaatga

SEQ ID NO: 4467947 - DNA, 25 bp, Homo sapien
attaattccaacaggtagagggaag

SEQ ID NO: 4467948 - DNA, 25 bp, Homo sapien
aggattgcaggtggtgaatgaaaat

SEQ ID NO: 4467949 - DNA, 25 bp, Homo sapien
tgtgaaaagagaccaaggatgcaag

SEQ ID NO: 4467950 - DNA, 25 bp, Homo sapien
ctgtgaaaagagaccaaggatgcaa

SEQ ID NO: 4467951 - DNA, 25 bp, Homo sapien
aaaagagaccaaggatgcaagaagg

SEQ ID NO: 4467952 - DNA, 25 bp, Homo sapien
gtgaaaagagaccaaggatgcaaga

SEQ ID NO: 4467953 - DNA, 25 bp, Homo sapien
gcagcacgttttcagtgatgctgat

SEQ ID NO: 4467954 - DNA, 25 bp, Homo sapien
ttgaaatgcagcacgttttcagtga

SEQ ID NO: 4467955 - DNA, 25 bp, Homo sapien
tttgaaatgcagcacgttttcagtg

SEQ ID NO: 4467956 - DNA, 25 bp, Homo sapien
ctttgaaatgcagcacgttttcagt

SEQ ID NO: 4467957 - DNA, 25 bp, Homo sapien
aaacaatttagcttacctcatgagg

SEQ ID NO: 4467958 - DNA, 25 bp, Homo sapien
cacacctccttaactgtgtatagag

SEQ ID NO: 4467959 - DNA, 25 bp, Homo sapien
tgtgtatagagatgggagcatttgc

SEQ ID NO: 4467960 - DNA, 25 bp, Homo sapien
tacctcatgaggatcagaggcgtga

SEQ ID NO: 4467961 - DNA, 25 bp, Homo sapien
gaactccaggtgaaattcatagaca

SEQ ID NO: 4467962 - DNA, 25 bp, Homo sapien
aaggtctaagaactccaggtgaaat

SEQ ID NO: 4467963 - DNA, 25 bp, Homo sapien
tctaagaactccaggtgaaattcat

SEQ ID NO: 4467964 - DNA, 25 bp, Homo sapien
caggtgaaattcatagacattgtct

SEQ ID NO: 4467965 - DNA, 25 bp, Homo sapien
tgtactgtaatgtttacctgcctct

SEQ ID NO: 4467966 - DNA, 25 bp, Homo sapien
aaaaacagtggtcgcttttcctgct

SEQ ID NO: 4467967 - DNA, 25 bp, Homo sapien
tcactttcttctgtactgtaatgtt

SEQ ID NO: 4467968 - DNA, 25 bp, Homo sapien
gctttgtgagtctctcccaccactg

SEQ ID NO: 4467969 - DNA, 25 bp, Homo sapien
tgagctccatttccgcatcagattc

SEQ ID NO: 4467970 - DNA, 25 bp, Homo sapien
gctctgagctccatttccgcatcag

SEQ ID NO: 4467971 - DNA, 25 bp, Homo sapien
tctgagctccatttccgcatcagat

SEQ ID NO: 4467972 - DNA, 25 bp, Homo sapien
tccatttccgcatcagattcatcca

SEQ ID NO: 4467973 - DNA, 25 bp, Homo sapien
gccttcgctttccagtcggagttta

SEQ ID NO: 4467974 - DNA, 25 bp, Homo sapien
ggagtttatttaggcgctcttcttc

SEQ ID NO: 4467975 - DNA, 25 bp, Homo sapien
caggagagccttcgctttccagtcg

SEQ ID NO: 4467976 - DNA, 25 bp, Homo sapien
ttccagtcggagtttatttaggcgc

SEQ ID NO: 4467977 - DNA, 25 bp, Homo sapien
taggcatcaagctagtctacatgga

SEQ ID NO: 4467978 - DNA, 25 bp, Homo sapien
gaaaaaacgacattaggctggagaa

SEQ ID NO: 4467979 - DNA, 25 bp, Homo sapien
tgaggacataaccaaagcaggacaa

SEQ ID NO: 4467980 - DNA, 25 bp, Homo sapien
tgtgcaaggtactgtgagaagaact

SEQ ID NO: 4467981 - DNA, 25 bp, Homo sapien
tcagaattgaaccagagggcaccca

SEQ ID NO: 4467982 - DNA, 25 bp, Homo sapien
ctccatctgtgggaacctgatgcta

SEQ ID NO: 4467983 - DNA, 25 bp, Homo sapien
cagaactcattgcttgcttggtatg

SEQ ID NO: 4467984 - DNA, 25 bp, Homo sapien
cctgatgctatctctaggtaaacag

SEQ ID NO: 4467985 - DNA, 25 bp, Homo sapien
ggcatatctggatgacttcaaccct

SEQ ID NO: 4467986 - DNA, 25 bp, Homo sapien
tactcccacagagaaacatacaagg

SEQ ID NO: 4467987 - DNA, 25 bp, Homo sapien
tcggcaacggtttctggcttataac

SEQ ID NO: 4467988 - DNA, 25 bp, Homo sapien
tattaaaagcaatagtcccagcagg

SEQ ID NO: 4467989 - DNA, 25 bp, Homo sapien
cccaagatacagaatcgcacagtca

SEQ ID NO: 4467990 - DNA, 25 bp, Homo sapien
aagatccaggagaatcccaagaatt

SEQ ID NO: 4467991 - DNA, 25 bp, Homo sapien
gatacagaatcgcacagtcaggttg

SEQ ID NO: 4467992 - DNA, 25 bp, Homo sapien
cagaatcgcacagtcaggttgacaa

SEQ ID NO: 4467993 - DNA, 25 bp, Homo sapien
gggtgagaacccttttggccttgca

SEQ ID NO: 4467994 - DNA, 25 bp, Homo sapien
ttaactaagcaggaagggtgcaggc

SEQ ID NO: 4467995 - DNA, 25 bp, Homo sapien
ctctggctagctatggatgtgaacc

SEQ ID NO: 4467996 - DNA, 25 bp, Homo sapien
tactgggccaaactactgagaaagg

SEQ ID NO: 4467997 - DNA, 25 bp, Homo sapien
gatagtttccacaactgccagcatc

SEQ ID NO: 4467998 - DNA, 25 bp, Homo sapien
tcagccacagtatggaatgtgtcat

SEQ ID NO: 4467999 - DNA, 25 bp, Homo sapien
gcatctggcagaaatacatcatgtc

SEQ ID NO: 4468000 - DNA, 25 bp, Homo sapien
gacgtagtgactccaattgctgcat

SEQ ID NO: 4468001 - DNA, 25 bp, Homo sapien
tgtaaccagaccatgtcagaggcct

SEQ ID NO: 4468002 - DNA, 25 bp, Homo sapien
cactagacaaataatgggaccttcc

SEQ ID NO: 4468003 - DNA, 25 bp, Homo sapien
aatgatgctactatcctggatggcc

SEQ ID NO: 4468004 - DNA, 25 bp, Homo sapien
gtaaatgaatcagtgcggccggtct

SEQ ID NO: 4468005 - DNA, 25 bp, Homo sapien
tagagcactacaaacgtgggacccc

SEQ ID NO: 4468006 - DNA, 25 bp, Homo sapien
tcttactcagagttacgggccagag

SEQ ID NO: 4468007 - DNA, 25 bp, Homo sapien
gaaatctaaccccactaaatgcaag

SEQ ID NO: 4468008 - DNA, 25 bp, Homo sapien
aatagaaaagattgacctcgaccag

SEQ ID NO: 4468009 - DNA, 25 bp, Homo sapien
accacagctttgttctgcatttctt

SEQ ID NO: 4468010 - DNA, 25 bp, Homo sapien
aaaccacagctttgttctgcatttc

SEQ ID NO: 4468011 - DNA, 25 bp, Homo sapien
gaaaatttcaattgcactccacaaa

SEQ ID NO: 4468012 - DNA, 25 bp, Homo sapien
ctgaaaatttcaattgcactccaca

SEQ ID NO: 4468013 - DNA, 25 bp, Homo sapien
ctattagagggtacactgggtgcca

SEQ ID NO: 4468014 - DNA, 25 bp, Homo sapien
tagtgctgatatacattcccggtgg

SEQ ID NO: 4468015 - DNA, 25 bp, Homo sapien
tatgctactaacaaccgagaacggg

SEQ ID NO: 4468016 - DNA, 25 bp, Homo sapien
tcaactttgcagagcacataggtgc

SEQ ID NO: 4468017 - DNA, 25 bp, Homo sapien
cttccgccaaacatcccagtggata

SEQ ID NO: 4468018 - DNA, 25 bp, Homo sapien
gaatccacagagtgtaacgaagcca

SEQ ID NO: 4468019 - DNA, 25 bp, Homo sapien
ccagtggatataagggaatccacag

SEQ ID NO: 4468020 - DNA, 25 bp, Homo sapien
tccaatccatgtcaatgcacgtcag

SEQ ID NO: 4468021 - DNA, 25 bp, Homo sapien
catacaaatgggaagcatgcaggac

SEQ ID NO: 4468022 - DNA, 25 bp, Homo sapien
ggaagaaaggactggtctctcagcc

SEQ ID NO: 4468023 - DNA, 25 bp, Homo sapien
gaaagctaagagtccctgagagtac

SEQ ID NO: 4468024 - DNA, 25 bp, Homo sapien
atttccatttatcggactaaggccg

SEQ ID NO: 4468025 - DNA, 25 bp, Homo sapien
ctgggtgtgctggaaaggctttctc

SEQ ID NO: 4468026 - DNA, 25 bp, Homo sapien
ggaacttccagtcctagtactctaa

SEQ ID NO: 4468027 - DNA, 25 bp, Homo sapien
aacttccagtcctagtactctaaag

SEQ ID NO: 4468028 - DNA, 25 bp, Homo sapien
cttccagtcctagtactctaaagtt

SEQ ID NO: 4468029 - DNA, 25 bp, Homo sapien
caatgtgaaactgaatcgtccggtc

SEQ ID NO: 4468030 - DNA, 25 bp, Homo sapien
tctcattgaatattggaatggactg

SEQ ID NO: 4468031 - DNA, 25 bp, Homo sapien
ggaatggactgaatcactgagacag

SEQ ID NO: 4468032 - DNA, 25 bp, Homo sapien
actggatatggcaatgtgaaactga

SEQ ID NO: 4468033 - DNA, 25 bp, Homo sapien
aagaattctcatatggacttttaca

SEQ ID NO: 4468034 - DNA, 25 bp, Homo sapien
ttaactgctggagatttagaaaaga

SEQ ID NO: 4468035 - DNA, 25 bp, Homo sapien
gtctaagaagtgacaagaaaaagtc

SEQ ID NO: 4468036 - DNA, 25 bp, Homo sapien
taccatagcatattcccctagtggg

SEQ ID NO: 4468037 - DNA, 25 bp, Homo sapien
aaactctggatgaggaatatgctac

SEQ ID NO: 4468038 - DNA, 25 bp, Homo sapien
tatgacaacccttggctgctcagag

SEQ ID NO: 4468039 - DNA, 25 bp, Homo sapien
tcctattgtgaggtggaaggcttta

SEQ ID NO: 4468040 - DNA, 25 bp, Homo sapien
attaataggtcagcaggttttccat

SEQ ID NO: 4468041 - DNA, 25 bp, Homo sapien
gagacgggctatggcaagaaactga

SEQ ID NO: 4468042 - DNA, 25 bp, Homo sapien
gaaactgaagcttcctgtcaacagc

SEQ ID NO: 4468043 - DNA, 25 bp, Homo sapien
tagcaagccgtgacaatgatcccaa

SEQ ID NO: 4468044 - DNA, 25 bp, Homo sapien
catgagtagccatatggagacgggc

SEQ ID NO: 4468045 - DNA, 25 bp, Homo sapien
tctacccctctaccctgttcactaa

SEQ ID NO: 4468046 - DNA, 25 bp, Homo sapien
ccatttcatggggcctagttatact

SEQ ID NO: 4468047 - DNA, 25 bp, Homo sapien
ctctttatcttatgcccatttcatg

SEQ ID NO: 4468048 - DNA, 25 bp, Homo sapien
ttccaatatttattcctctttatct

SEQ ID NO: 4468049 - DNA, 25 bp, Homo sapien
ccgtctgcgctgtttataaaggtga

SEQ ID NO: 4468050 - DNA, 25 bp, Homo sapien
cgctgtttataaaggtgacgaaaat

SEQ ID NO: 4468051 - DNA, 25 bp, Homo sapien
ctttttttgtccatagcgccgtctg

SEQ ID NO: 4468052 - DNA, 25 bp, Homo sapien
ttttttgtccatagcgccgtctgcg

SEQ ID NO: 4468053 - DNA, 25 bp, Homo sapien
tgtaagaatcagattaggctcaaac

SEQ ID NO: 4468054 - DNA, 25 bp, Homo sapien
ggtaaaactgtaagaatcagattag

SEQ ID NO: 4468055 - DNA, 25 bp, Homo sapien
cattggttcaagaaggtaaaactgt

SEQ ID NO: 4468056 - DNA, 25 bp, Homo sapien
tcagattaggctcaaactggcaaga

SEQ ID NO: 4468057 - DNA, 25 bp, Homo sapien
gctgatctgcccaattacacgtagt

SEQ ID NO: 4468058 - DNA, 25 bp, Homo sapien
gatgtaaagtatgttctctagcccc

SEQ ID NO: 4468059 - DNA, 25 bp, Homo sapien
ccttgttaaaggatcagcgggtgtt

SEQ ID NO: 4468060 - DNA, 25 bp, Homo sapien
cagaattttgccacgaggatgcagc

SEQ ID NO: 4468061 - DNA, 25 bp, Homo sapien
tggctggttgggctttaacttcctg

SEQ ID NO: 4468062 - DNA, 25 bp, Homo sapien
cttgaatgactgatgagcatagagc

SEQ ID NO: 4468063 - DNA, 25 bp, Homo sapien
tatgttcacctctagaatagccacc

SEQ ID NO: 4468064 - DNA, 25 bp, Homo sapien
gaatgactctactagtatgagaagg

SEQ ID NO: 4468065 - DNA, 25 bp, Homo sapien
caagccatagcattacatttcacaa

SEQ ID NO: 4468066 - DNA, 25 bp, Homo sapien
tgactaacataatgggtattggctt

SEQ ID NO: 4468067 - DNA, 25 bp, Homo sapien
atcccttcagtagaactcaagccat

SEQ ID NO: 4468068 - DNA, 25 bp, Homo sapien
agcaaaaagtcatttatacctgttt

SEQ ID NO: 4468069 - DNA, 25 bp, Homo sapien
cagcggcctgcaggtaacattacca

SEQ ID NO: 4468070 - DNA, 25 bp, Homo sapien
gaaaacccttatggcgaggatgaca

SEQ ID NO: 4468071 - DNA, 25 bp, Homo sapien
caaacgcagttatgcccagaatgtg

SEQ ID NO: 4468072 - DNA, 25 bp, Homo sapien
actgtctggatcaaacccagcggcc

SEQ ID NO: 4468073 - DNA, 25 bp, Homo sapien
tcaaccggttcagaggatacgagag

SEQ ID NO: 4468074 - DNA, 25 bp, Homo sapien
cccggccaggatttgtagttcagga

SEQ ID NO: 4468075 - DNA, 25 bp, Homo sapien
ccaagattctcgtgcgttagcctcc

SEQ ID NO: 4468076 - DNA, 25 bp, Homo sapien
tgtgaagcggacacagagtcaccgg

SEQ ID NO: 4468077 - DNA, 25 bp, Homo sapien
gcacagactacaatggagacaccag

SEQ ID NO: 4468078 - DNA, 25 bp, Homo sapien
tacagggaaatctgagcacgcatgc

SEQ ID NO: 4468079 - DNA, 25 bp, Homo sapien
caagagcccatgttgccttacaggg

SEQ ID NO: 4468080 - DNA, 25 bp, Homo sapien
catgccttgtccagggtgagaggaa

SEQ ID NO: 4468081 - DNA, 25 bp, Homo sapien
ggagcccaatgcctgctcaagcata

SEQ ID NO: 4468082 - DNA, 25 bp, Homo sapien
gcccaatgcctgctcaagcataact

SEQ ID NO: 4468083 - DNA, 25 bp, Homo sapien
ccaatgcctgctcaagcataactag

SEQ ID NO: 4468084 - DNA, 25 bp, Homo sapien
aatgcctgctcaagcataactaggt

SEQ ID NO: 4468085 - DNA, 25 bp, Homo sapien
ggatttcatccttacagtcaagtgc

SEQ ID NO: 4468086 - DNA, 25 bp, Homo sapien
cacactgagtgcagctcagagacag

SEQ ID NO: 4468087 - DNA, 25 bp, Homo sapien
tccttacagtcaagtgcccttctgg

SEQ ID NO: 4468088 - DNA, 25 bp, Homo sapien
aggtggtggcacttcacactgagtg

SEQ ID NO: 4468089 - DNA, 25 bp, Homo sapien
aacttgtcagaatccaatatctcaa

SEQ ID NO: 4468090 - DNA, 25 bp, Homo sapien
gaatccaatatctcaaagagtgggt

SEQ ID NO: 4468091 - DNA, 25 bp, Homo sapien
accttgacatctggctgtcttctca

SEQ ID NO: 4468092 - DNA, 25 bp, Homo sapien
ccaatatctcaaagagtgggtctga

SEQ ID NO: 4468093 - DNA, 25 bp, Homo sapien
gaaggcctctcattctgtcctaaga

SEQ ID NO: 4468094 - DNA, 25 bp, Homo sapien
tctcattctgtcctaagatggaggc

SEQ ID NO: 4468095 - DNA, 25 bp, Homo sapien
tgtcctaagatggaggctactctgg

SEQ ID NO: 4468096 - DNA, 25 bp, Homo sapien
tctggttacagaaggcctctcattc

SEQ ID NO: 4468097 - DNA, 25 bp, Homo sapien
cttcactggagaggtcccgactggc

SEQ ID NO: 4468098 - DNA, 25 bp, Homo sapien
tccggagtaaccacctctcttgcgg

SEQ ID NO: 4468099 - DNA, 25 bp, Homo sapien
tagaaccgatgatcaacattcccag

SEQ ID NO: 4468100 - DNA, 25 bp, Homo sapien
caatgaagccgctttgtccggagta

SEQ ID NO: 4468101 - DNA, 25 bp, Homo sapien
ccttggagaagtcaagacgtttgct

SEQ ID NO: 4468102 - DNA, 25 bp, Homo sapien
agtgcctactcttctaccacgtggg

SEQ ID NO: 4468103 - DNA, 25 bp, Homo sapien
tctacctcatgtgtcagaaaagttg

SEQ ID NO: 4468104 - DNA, 25 bp, Homo sapien
gaatgtggacggcacgtaagtgcct

SEQ ID NO: 4468105 - DNA, 25 bp, Homo sapien
gtggctggggtatgcaacaggactg

SEQ ID NO: 4468106 - DNA, 25 bp, Homo sapien
cctggggagtcttcgggttgctctt

SEQ ID NO: 4468107 - DNA, 25 bp, Homo sapien
tccctggggagtcttcgggttgctc

SEQ ID NO: 4468108 - DNA, 25 bp, Homo sapien
gaggtggctggggtatgcaacagga

SEQ ID NO: 4468109 - DNA, 25 bp, Homo sapien
cctgggtgaaggattcctaagactc

SEQ ID NO: 4468110 - DNA, 25 bp, Homo sapien
gggctgttttgatggctgatacact

SEQ ID NO: 4468111 - DNA, 25 bp, Homo sapien
tgatggctgatacactggtcctggg

SEQ ID NO: 4468112 - DNA, 25 bp, Homo sapien
aaggtttctttgccagcctccagac

SEQ ID NO: 4468113 - DNA, 25 bp, Homo sapien
gcttcacaaccacacagtgatggac

SEQ ID NO: 4468114 - DNA, 25 bp, Homo sapien
ggcttcacaaccacacagtgatgga

SEQ ID NO: 4468115 - DNA, 25 bp, Homo sapien
ggttggcttcacaaccacacagtga

SEQ ID NO: 4468116 - DNA, 25 bp, Homo sapien
ctgggggttggcttcacaaccacac

SEQ ID NO: 4468117 - DNA, 25 bp, Homo sapien
cttggggagggagtggtgagcatgg

SEQ ID NO: 4468118 - DNA, 25 bp, Homo sapien
cagcactgagggactaggactgagc

SEQ ID NO: 4468119 - DNA, 25 bp, Homo sapien
aggcagcactgagggactaggactg

SEQ ID NO: 4468120 - DNA, 25 bp, Homo sapien
gcagcactgagggactaggactgag

SEQ ID NO: 4468121 - DNA, 25 bp, Homo sapien
agcactgagggactaggactgagct

SEQ ID NO: 4468122 - DNA, 25 bp, Homo sapien
agtactcgtcgcaaacaatggccaa

SEQ ID NO: 4468123 - DNA, 25 bp, Homo sapien
gcagcttgtctgtgatgacacccag

SEQ ID NO: 4468124 - DNA, 25 bp, Homo sapien
gagacatcacggaataagggccacc

SEQ ID NO: 4468125 - DNA, 25 bp, Homo sapien
catcctcggagatctgcagcttgtc

SEQ ID NO: 4468126 - DNA, 25 bp, Homo sapien
ccctattactcactaaccacactgg

SEQ ID NO: 4468127 - DNA, 25 bp, Homo sapien
gccattaaaagcgaaactaatgaca

SEQ ID NO: 4468128 - DNA, 25 bp, Homo sapien
ttttgcaccaaactaatagctccca

SEQ ID NO: 4468129 - DNA, 25 bp, Homo sapien
gccctgcatggagtattaggctggt

SEQ ID NO: 4468130 - DNA, 25 bp, Homo sapien
tctcaggtagagcacacttcacttt

SEQ ID NO: 4468131 - DNA, 25 bp, Homo sapien
taggaacttcaggtggcaaaccatg

SEQ ID NO: 4468132 - DNA, 25 bp, Homo sapien
ttattgaatcccttgtccgagccct

SEQ ID NO: 4468133 - DNA, 25 bp, Homo sapien
caaaccatggtagcccctagtgggc

SEQ ID NO: 4468134 - DNA, 25 bp, Homo sapien
gtcttactgagaacaggaggtgctc

SEQ ID NO: 4468135 - DNA, 25 bp, Homo sapien
cttactgagaacaggaggtgctcag

SEQ ID NO: 4468136 - DNA, 25 bp, Homo sapien
tcttactgagaacaggaggtgctca

SEQ ID NO: 4468137 - DNA, 25 bp, Homo sapien
gtgtcttactgagaacaggaggtgc

SEQ ID NO: 4468138 - DNA, 25 bp, Homo sapien
cttcagcttcttgttatcctgtagc

SEQ ID NO: 4468139 - DNA, 25 bp, Homo sapien
tcttgttatcctgtagctcatccac

SEQ ID NO: 4468140 - DNA, 25 bp, Homo sapien
tcctgtagctcatccaccgcaatgg

SEQ ID NO: 4468141 - DNA, 25 bp, Homo sapien
gttatcctgtagctcatccaccgca

SEQ ID NO: 4468142 - DNA, 25 bp, Homo sapien
ggctgtggagcatgagctggtagat

SEQ ID NO: 4468143 - DNA, 25 bp, Homo sapien
ctccctcgggtcagcaaggacggga

SEQ ID NO: 4468144 - DNA, 25 bp, Homo sapien
ttgtgcagagaggtcgagctgctcc

SEQ ID NO: 4468145 - DNA, 25 bp, Homo sapien
gtgctgcggatggtgctgttgtgca

SEQ ID NO: 4468146 - DNA, 25 bp, Homo sapien
tgcctctaggattttcaggtcccag

SEQ ID NO: 4468147 - DNA, 25 bp, Homo sapien
cctctaggattttcaggtcccagtt

SEQ ID NO: 4468148 - DNA, 25 bp, Homo sapien
gcctctaggattttcaggtcccagt

SEQ ID NO: 4468149 - DNA, 25 bp, Homo sapien
gactgtctgacttttactactttcc

SEQ ID NO: 4468150 - DNA, 25 bp, Homo sapien
cttttactactttcctctgcttatt

SEQ ID NO: 4468151 - DNA, 25 bp, Homo sapien
ccagactgtctgacttttactactt

SEQ ID NO: 4468152 - DNA, 25 bp, Homo sapien
tctgacttttactactttcctctgc

SEQ ID NO: 4468153 - DNA, 25 bp, Homo sapien
aaatgacatggttggactcaggacc

SEQ ID NO: 4468154 - DNA, 25 bp, Homo sapien
tttacaagctcaagtgatggcctgc

SEQ ID NO: 4468155 - DNA, 25 bp, Homo sapien
gcctgcttgggtactgaattgagaa

SEQ ID NO: 4468156 - DNA, 25 bp, Homo sapien
tggattctgatcctacgaggcctag

SEQ ID NO: 4468157 - DNA, 25 bp, Homo sapien
ggctctggccccttgattcaagctc

SEQ ID NO: 4468158 - DNA, 25 bp, Homo sapien
tgctttctgctttggcctggggttg

SEQ ID NO: 4468159 - DNA, 25 bp, Homo sapien
ctggccccttgattcaagctctcct

SEQ ID NO: 4468160 - DNA, 25 bp, Homo sapien
ggccccttgattcaagctctcctcc

SEQ ID NO: 4468161 - DNA, 25 bp, Homo sapien
ggattctccttctgatctcccttga

SEQ ID NO: 4468162 - DNA, 25 bp, Homo sapien
ggaacaggggctggtgtgaccgtga

SEQ ID NO: 4468163 - DNA, 25 bp, Homo sapien
tctgatctcccttgatgtctggaac

SEQ ID NO: 4468164 - DNA, 25 bp, Homo sapien
cgcagggagcttggctggctcctcc

SEQ ID NO: 4468165 - DNA, 25 bp, Homo sapien
tcagcactgagttcctggctttcag

SEQ ID NO: 4468166 - DNA, 25 bp, Homo sapien
tctgcgtggatttcaccctcatctt

SEQ ID NO: 4468167 - DNA, 25 bp, Homo sapien
ccttcaccttctggttgagtttcac

SEQ ID NO: 4468168 - DNA, 25 bp, Homo sapien
atttcacctgtgctctcggcctcag

SEQ ID NO: 4468169 - DNA, 25 bp, Homo sapien
ccacagtgggaacacgatgggcaga

SEQ ID NO: 4468170 - DNA, 25 bp, Homo sapien
agccacagtgggaacacgatgggca

SEQ ID NO: 4468171 - DNA, 25 bp, Homo sapien
gccacagtgggaacacgatgggcag

SEQ ID NO: 4468172 - DNA, 25 bp, Homo sapien
cacagtgggaacacgatgggcagaa

SEQ ID NO: 4468173 - DNA, 25 bp, Homo sapien
ccacatgatagatcccaggaaggtg

SEQ ID NO: 4468174 - DNA, 25 bp, Homo sapien
agcccaccacaccatgaggtatgag

SEQ ID NO: 4468175 - DNA, 25 bp, Homo sapien
ggctatccacatgatagatcccagg

SEQ ID NO: 4468176 - DNA, 25 bp, Homo sapien
ggtatgagaacatggctatccacat

SEQ ID NO: 4468177 - DNA, 25 bp, Homo sapien
acctgctggtagaggatttcgttcc

SEQ ID NO: 4468178 - DNA, 25 bp, Homo sapien
cctgagtaccggagattgatcctga

SEQ ID NO: 4468179 - DNA, 25 bp, Homo sapien
aaggaaagtgtcgttgggacctgct

SEQ ID NO: 4468180 - DNA, 25 bp, Homo sapien
tgcacgaattcacttgatcctcgag

SEQ ID NO: 4468181 - DNA, 25 bp, Homo sapien
tatgccatgctacaggatatgacag

SEQ ID NO: 4468182 - DNA, 25 bp, Homo sapien
aaacggcaacggtcaacagtaggtg

SEQ ID NO: 4468183 - DNA, 25 bp, Homo sapien
taattgaatgccagagagcaggcga

SEQ ID NO: 4468184 - DNA, 25 bp, Homo sapien
tcagaatgcgtaggatttcaccagg

SEQ ID NO: 4468185 - DNA, 25 bp, Homo sapien
tgatgaggtcaggaattgatgtgcc

SEQ ID NO: 4468186 - DNA, 25 bp, Homo sapien
tgcaaggattgtcaggcccatgatc

SEQ ID NO: 4468187 - DNA, 25 bp, Homo sapien
ttttcgagcgacaatcacactggtg

SEQ ID NO: 4468188 - DNA, 25 bp, Homo sapien
gagcttgacacagccatgtctccca

SEQ ID NO: 4468189 - DNA, 25 bp, Homo sapien
cccacagtgatatcaaatatgttac

SEQ ID NO: 4468190 - DNA, 25 bp, Homo sapien
ttccagtcatacttaacacccctta

SEQ ID NO: 4468191 - DNA, 25 bp, Homo sapien
cagtcatacttaacaccccttagaa

SEQ ID NO: 4468192 - DNA, 25 bp, Homo sapien
atgcccttttattctatgtataatg

SEQ ID NO: 4468193 - DNA, 25 bp, Homo sapien
agtgttttccagtcatacttaacac

SEQ ID NO: 4468194 - DNA, 25 bp, Homo sapien
tagcaggagttcacatacaaaggag

SEQ ID NO: 4468195 - DNA, 25 bp, Homo sapien
ccagccccaatgtgatatgtactct

SEQ ID NO: 4468196 - DNA, 25 bp, Homo sapien
gatgagggctgcctttttagctgcc

SEQ ID NO: 4468197 - DNA, 25 bp, Homo sapien
aaaatagcccctgtttctgacaagg

SEQ ID NO: 4468198 - DNA, 25 bp, Homo sapien
tacatgacgcaattgaagagatcac

SEQ ID NO: 4468199 - DNA, 25 bp, Homo sapien
gaacattgtgaagcccaggatcttg

SEQ ID NO: 4468200 - DNA, 25 bp, Homo sapien
cagacagatacaggacaggatatga

SEQ ID NO: 4468201 - DNA, 25 bp, Homo sapien
gaaaagcaaccaaggaacaggcaag

SEQ ID NO: 4468202 - DNA, 25 bp, Homo sapien
taacttctgcatggtcttctgatcc

SEQ ID NO: 4468203 - DNA, 25 bp, Homo sapien
tttccaaggacaaactttagtctca

SEQ ID NO: 4468204 - DNA, 25 bp, Homo sapien
tatcagaggtcctaggtcacccagt

SEQ ID NO: 4468205 - DNA, 25 bp, Homo sapien
tctcagatcacattcatatcagagg

SEQ ID NO: 4468206 - DNA, 25 bp, Homo sapien
taatagatgtctgcatgagtcaggg

SEQ ID NO: 4468207 - DNA, 25 bp, Homo sapien
tatctcatttagaaaaccctctggc

SEQ ID NO: 4468208 - DNA, 25 bp, Homo sapien
ctccatgtaatagatgtctgcatga

SEQ ID NO: 4468209 - DNA, 25 bp, Homo sapien
cagttatctcatttagaaaaccctc

SEQ ID NO: 4468210 - DNA, 25 bp, Homo sapien
acagtgagcgtaggagcttgtctta

SEQ ID NO: 4468211 - DNA, 25 bp, Homo sapien
gcttgtcttatagctgctgcgccta

SEQ ID NO: 4468212 - DNA, 25 bp, Homo sapien
caggaaggctgagatgtagaccaca

SEQ ID NO: 4468213 - DNA, 25 bp, Homo sapien
gaggagacaaaattgcagcgtgtgt

SEQ ID NO: 4468214 - DNA, 25 bp, Homo sapien
tgcagtgggctacaaaacgtggaat

SEQ ID NO: 4468215 - DNA, 25 bp, Homo sapien
cagatcacgacttcaggctgaggca

SEQ ID NO: 4468216 - DNA, 25 bp, Homo sapien
taaaccagatgtggcgctactgact

SEQ ID NO: 4468217 - DNA, 25 bp, Homo sapien
ccatcataatctgcagtcacccgag

SEQ ID NO: 4468218 - DNA, 25 bp, Homo sapien
ggaagaacgtcagatcccaggctgt

SEQ ID NO: 4468219 - DNA, 25 bp, Homo sapien
tcttctcgggaggattctgaccaaa

SEQ ID NO: 4468220 - DNA, 25 bp, Homo sapien
cagacaccaggttagtgcccagaat

SEQ ID NO: 4468221 - DNA, 25 bp, Homo sapien
ggtgacatccccgaggctaacggga

SEQ ID NO: 4468222 - DNA, 25 bp, Homo sapien
tagttatagattttcaatatgtgtg

SEQ ID NO: 4468223 - DNA, 25 bp, Homo sapien
tccagaaatcagacaataaattgaa

SEQ ID NO: 4468224 - DNA, 25 bp, Homo sapien
tgaaagtttagacatcatgagtatt

SEQ ID NO: 4468225 - DNA, 25 bp, Homo sapien
ttttggctgctagaattagttatag

SEQ ID NO: 4468226 - DNA, 25 bp, Homo sapien
tcatccatattgaggaacttagctt

SEQ ID NO: 4468227 - DNA, 25 bp, Homo sapien
ctaaaatattgggtatgatgcaaat

SEQ ID NO: 4468228 - DNA, 25 bp, Homo sapien
ctacatgaaaacttacattgggaaa

SEQ ID NO: 4468229 - DNA, 25 bp, Homo sapien
tatgcagacaagtgattatattcca

SEQ ID NO: 4468230 - DNA, 25 bp, Homo sapien
taaatggttcaaaagactcagacag

SEQ ID NO: 4468231 - DNA, 25 bp, Homo sapien
actgtgatagaccaccaagtacagg

SEQ ID NO: 4468232 - DNA, 25 bp, Homo sapien
gatggaatgtcgaaaaacctttgga

SEQ ID NO: 4468233 - DNA, 25 bp, Homo sapien
gaagtaattagtacagctgcagatc

SEQ ID NO: 4468234 - DNA, 25 bp, Homo sapien
catctttacagtgtcagagagtgag

SEQ ID NO: 4468235 - DNA, 25 bp, Homo sapien
aattcttccagtatcgttcgcctca

SEQ ID NO: 4468236 - DNA, 25 bp, Homo sapien
gaagtgctgattgccttcctaagct

SEQ ID NO: 4468237 - DNA, 25 bp, Homo sapien
gcctcactggtacaagtaacaacag

SEQ ID NO: 4468238 - DNA, 25 bp, Homo sapien
tttctaccattacgtgccctctcag

SEQ ID NO: 4468239 - DNA, 25 bp, Homo sapien
tgctacgtaattccaaaaatacatg

SEQ ID NO: 4468240 - DNA, 25 bp, Homo sapien
taccattagaatgaatgctacgtaa

SEQ ID NO: 4468241 - DNA, 25 bp, Homo sapien
tagcctcagtggcaaaacacttccc

SEQ ID NO: 4468242 - DNA, 25 bp, Homo sapien
gcgatcacggtttatggcagccaca

SEQ ID NO: 4468243 - DNA, 25 bp, Homo sapien
gaattactgctgtcctaatcctcag

SEQ ID NO: 4468244 - DNA, 25 bp, Homo sapien
tcataataaatacaggccacccatc

SEQ ID NO: 4468245 - DNA, 25 bp, Homo sapien
gaacagttcctcagattctctgcca

SEQ ID NO: 4468246 - DNA, 25 bp, Homo sapien
ttttctttctttcttgaagttgctg

SEQ ID NO: 4468247 - DNA, 25 bp, Homo sapien
tctttctttcttgaagttgctgagg

SEQ ID NO: 4468248 - DNA, 25 bp, Homo sapien
gaagttgctgaggtctgagctcttt

SEQ ID NO: 4468249 - DNA, 25 bp, Homo sapien
tgaagttgctgaggtctgagctctt

SEQ ID NO: 4468250 - DNA, 25 bp, Homo sapien
tgagtattctgttataaagcatgca

SEQ ID NO: 4468251 - DNA, 25 bp, Homo sapien
gctgagacagcctaaagcttttcga

SEQ ID NO: 4468252 - DNA, 25 bp, Homo sapien
ttattcatggaaagcctaaccaaga

SEQ ID NO: 4468253 - DNA, 25 bp, Homo sapien
tcacatgtcacaacctcaagtgcct

SEQ ID NO: 4468254 - DNA, 25 bp, Homo sapien
tacagagccccgtaacttatactgc

SEQ ID NO: 4468255 - DNA, 25 bp, Homo sapien
tagagttgggactttccaatagaga

SEQ ID NO: 4468256 - DNA, 25 bp, Homo sapien
agatatttgcagatagccagacata

SEQ ID NO: 4468257 - DNA, 25 bp, Homo sapien
tacttgtcacctcttgtcacctggc

SEQ ID NO: 4468258 - DNA, 25 bp, Homo sapien
tgacctgggacaagtagcttaacct

SEQ ID NO: 4468259 - DNA, 25 bp, Homo sapien
ttctagagtgtctgggtctgtaccc

SEQ ID NO: 4468260 - DNA, 25 bp, Homo sapien
gctggatgagaacttagagtggtca

SEQ ID NO: 4468261 - DNA, 25 bp, Homo sapien
tatagcaacatgagatactgagggt

SEQ ID NO: 4468262 - DNA, 25 bp, Homo sapien
gatccaattcaggttgcagaactcc

SEQ ID NO: 4468263 - DNA, 25 bp, Homo sapien
agtatagtggactgctcatggctca

SEQ ID NO: 4468264 - DNA, 25 bp, Homo sapien
tttctggatcaaagcgcatatttac

SEQ ID NO: 4468265 - DNA, 25 bp, Homo sapien
tctcgagcagctcagtggattgacc

SEQ ID NO: 4468266 - DNA, 25 bp, Homo sapien
ccaaggataaggtggtagttctcaa

SEQ ID NO: 4468267 - DNA, 25 bp, Homo sapien
caaggataaggtggtagttctcaaa

SEQ ID NO: 4468268 - DNA, 25 bp, Homo sapien
tttcatgatagtactatatctcttc

SEQ ID NO: 4468269 - DNA, 25 bp, Homo sapien
tgtcgacatcgtccaggaggctctg

SEQ ID NO: 4468270 - DNA, 25 bp, Homo sapien
aggctctgaatgctggcaaccgcga

SEQ ID NO: 4468271 - DNA, 25 bp, Homo sapien
gcaaccgcgagaaggcccagcgttt

SEQ ID NO: 4468272 - DNA, 25 bp, Homo sapien
gatgaagctgagaaatgtgtcgaca

SEQ ID NO: 4468273 - DNA, 25 bp, Homo sapien
ctccccacctcaggtgagccaccct

SEQ ID NO: 4468274 - DNA, 25 bp, Homo sapien
cccacctcaggtgagccaccctcct

SEQ ID NO: 4468275 - DNA, 25 bp, Homo sapien
tccccacctcaggtgagccaccctc

SEQ ID NO: 4468276 - DNA, 25 bp, Homo sapien
ccacctcaggtgagccaccctcctt

SEQ ID NO: 4468277 - DNA, 25 bp, Homo sapien
ccttttcccctgacatctgtatttt

SEQ ID NO: 4468278 - DNA, 25 bp, Homo sapien
aaccttttcccctgacatctgtatt

SEQ ID NO: 4468279 - DNA, 25 bp, Homo sapien
aatcaaaccttttcccctgacatct

SEQ ID NO: 4468280 - DNA, 25 bp, Homo sapien
caaaccttttcccctgacatctgta

SEQ ID NO: 4468281 - DNA, 25 bp, Homo sapien
gagaaatctggctcacgccatctga

SEQ ID NO: 4468282 - DNA, 25 bp, Homo sapien
taacctgtatctccatgagaaatgc

SEQ ID NO: 4468283 - DNA, 25 bp, Homo sapien
tcgtccatgtacagcacttttagaa

SEQ ID NO: 4468284 - DNA, 25 bp, Homo sapien
tatttgttcagtcccatcgtccatg

SEQ ID NO: 4468285 - DNA, 25 bp, Homo sapien
tatttcggctttcatttagaaacaa

SEQ ID NO: 4468286 - DNA, 25 bp, Homo sapien
tttgtatttcggctttcatttagaa

SEQ ID NO: 4468287 - DNA, 25 bp, Homo sapien
ctgatctttgtatttcggctttcat

SEQ ID NO: 4468288 - DNA, 25 bp, Homo sapien
tgagacaccattgcccggcccaggt

SEQ ID NO: 4468289 - DNA, 25 bp, Homo sapien
gtcattaaacattgcttctctccaa

SEQ ID NO: 4468290 - DNA, 25 bp, Homo sapien
tgtgttgacagtgccacgtattgat

SEQ ID NO: 4468291 - DNA, 25 bp, Homo sapien
tttgtgtcattaaacattgcttctc

SEQ ID NO: 4468292 - DNA, 25 bp, Homo sapien
gccacgtattgatggattcctctgc

SEQ ID NO: 4468293 - DNA, 25 bp, Homo sapien
gcgtgcgggattccggcgccgctct

SEQ ID NO: 4468294 - DNA, 25 bp, Homo sapien
gccgctctccgagctcgatccgctg

SEQ ID NO: 4468295 - DNA, 25 bp, Homo sapien
ctgctcgcacgggagccagctgggt

SEQ ID NO: 4468296 - DNA, 25 bp, Homo sapien
tcgtgttccgctaccgcgcgtgcgg

SEQ ID NO: 4468297 - DNA, 25 bp, Homo sapien
tataacctttgactaccatgactct

SEQ ID NO: 4468298 - DNA, 25 bp, Homo sapien
ttgagcttggaatgagagcctgagg

SEQ ID NO: 4468299 - DNA, 25 bp, Homo sapien
ggttgagcttggaatgagagcctga

SEQ ID NO: 4468300 - DNA, 25 bp, Homo sapien
gaggcagtggatgcagccgtgaatg

SEQ ID NO: 4468301 - DNA, 25 bp, Homo sapien
gggttgagcttggaatgagagcctg

SEQ ID NO: 4468302 - DNA, 25 bp, Homo sapien
tagcaccagacagccctagaatggg

SEQ ID NO: 4468303 - DNA, 25 bp, Homo sapien
tgtgcagtctgaccaaagaacaggg

SEQ ID NO: 4468304 - DNA, 25 bp, Homo sapien
tagaatgggcattgaatcccaggcg

SEQ ID NO: 4468305 - DNA, 25 bp, Homo sapien
gagtcttagcaatgactgcccatgt

SEQ ID NO: 4468306 - DNA, 25 bp, Homo sapien
aggtatgcatagtctaaaaacaggc

SEQ ID NO: 4468307 - DNA, 25 bp, Homo sapien
gaataaccaacctatgctgctcttg

SEQ ID NO: 4468308 - DNA, 25 bp, Homo sapien
caggcagttgagaaaagaactttct

SEQ ID NO: 4468309 - DNA, 25 bp, Homo sapien
gctccacaatcattggtctacaagg

SEQ ID NO: 4468310 - DNA, 25 bp, Homo sapien
agtagaagcagggaatgtccacaaa

SEQ ID NO: 4468311 - DNA, 25 bp, Homo sapien
ttgagtagaagcagggaatgtccac

SEQ ID NO: 4468312 - DNA, 25 bp, Homo sapien
gagtagaagcagggaatgtccacaa

SEQ ID NO: 4468313 - DNA, 25 bp, Homo sapien
tgagtagaagcagggaatgtccaca

SEQ ID NO: 4468314 - DNA, 25 bp, Homo sapien
tggcatatgaattacatctacattt

SEQ ID NO: 4468315 - DNA, 25 bp, Homo sapien
ccttatgagtataccaaaaaacact

SEQ ID NO: 4468316 - DNA, 25 bp, Homo sapien
tatgagtataccaaaaaacactaaa

SEQ ID NO: 4468317 - DNA, 25 bp, Homo sapien
gcatttatggcatatgaattacatc

SEQ ID NO: 4468318 - DNA, 25 bp, Homo sapien
tttggtttcctacaactgagctgtc

SEQ ID NO: 4468319 - DNA, 25 bp, Homo sapien
caggacttccgctaagtatccggtt

SEQ ID NO: 4468320 - DNA, 25 bp, Homo sapien
gggcttgtggccttgctccaaacaa

SEQ ID NO: 4468321 - DNA, 25 bp, Homo sapien
acaacaccacaggacttccgctaag

SEQ ID NO: 4468322 - DNA, 25 bp, Homo sapien
tcctttatgcccagggaagttatat

SEQ ID NO: 4468323 - DNA, 25 bp, Homo sapien
gtcctttatgcccagggaagttata

SEQ ID NO: 4468324 - DNA, 25 bp, Homo sapien
tatgcccagggaagttatatgagga

SEQ ID NO: 4468325 - DNA, 25 bp, Homo sapien
ccagggaagttatatgaggacccat

SEQ ID NO: 4468326 - DNA, 25 bp, Homo sapien
ttagaaggctacagtgactaatttc

SEQ ID NO: 4468327 - DNA, 25 bp, Homo sapien
ggctacagtgactaatttctgggac

SEQ ID NO: 4468328 - DNA, 25 bp, Homo sapien
gaaggctacagtgactaatttctgg

SEQ ID NO: 4468329 - DNA, 25 bp, Homo sapien
gctacagtgactaatttctgggact

SEQ ID NO: 4468330 - DNA, 25 bp, Homo sapien
ccaaaccctgatattgtaacaaacg

SEQ ID NO: 4468331 - DNA, 25 bp, Homo sapien
tctggaattatctaaccctgaggtt

SEQ ID NO: 4468332 - DNA, 25 bp, Homo sapien
gaggttctcaatcctaacatccaaa

SEQ ID NO: 4468333 - DNA, 25 bp, Homo sapien
tactggtcttgcttgttacaaaagg

SEQ ID NO: 4468334 - DNA, 25 bp, Homo sapien
gcgccgagcttcaactgccggactg

SEQ ID NO: 4468335 - DNA, 25 bp, Homo sapien
gtaacccgagcgccgagcttcaact

SEQ ID NO: 4468336 - DNA, 25 bp, Homo sapien
gagcccctccctgccgctgcgccat

SEQ ID NO: 4468337 - DNA, 25 bp, Homo sapien
caggggtaacccgagcgccgagctt

SEQ ID NO: 4468338 - DNA, 25 bp, Homo sapien
cggccgaggagcgaaagggcgggag

SEQ ID NO: 4468339 - DNA, 25 bp, Homo sapien
gccgaggagcgaaagggcgggagca

SEQ ID NO: 4468340 - DNA, 25 bp, Homo sapien
cgcggccgaggagcgaaagggcggg

SEQ ID NO: 4468341 - DNA, 25 bp, Homo sapien
cgaggagcgaaagggcgggagcagc

SEQ ID NO: 4468342 - DNA, 25 bp, Homo sapien
agaggtagtcgtactcgtcgtcgcg

SEQ ID NO: 4468343 - DNA, 25 bp, Homo sapien
cgtactcgtcgtcgcgggtgcccat

SEQ ID NO: 4468344 - DNA, 25 bp, Homo sapien
taaagaggtagtcgtactcgtcgtc

SEQ ID NO: 4468345 - DNA, 25 bp, Homo sapien
tagtcgtactcgtcgtcgcgggtgc

SEQ ID NO: 4468346 - DNA, 25 bp, Homo sapien
ggagtctgcaccgaaggcaaggcca

SEQ ID NO: 4468347 - DNA, 25 bp, Homo sapien
caaggccaagagggaagcgaagaac

SEQ ID NO: 4468348 - DNA, 25 bp, Homo sapien
ctgtaatgggagtctgcaccgaagg

SEQ ID NO: 4468349 - DNA, 25 bp, Homo sapien
ctgcaccgaaggcaaggccaagagg

SEQ ID NO: 4468350 - DNA, 25 bp, Homo sapien
gatgcttcttgttgcaaactctact

SEQ ID NO: 4468351 - DNA, 25 bp, Homo sapien
tgatgttatagctcgatatcgctct

SEQ ID NO: 4468352 - DNA, 25 bp, Homo sapien
taaatcgagacaggagattactctt

SEQ ID NO: 4468353 - DNA, 25 bp, Homo sapien
aactctactccaatggtgctcttgc

SEQ ID NO: 4468354 - DNA, 25 bp, Homo sapien
gcttcatctgtaggaactgccctga

SEQ ID NO: 4468355 - DNA, 25 bp, Homo sapien
gcaatgtcataaaccaataaggcac

SEQ ID NO: 4468356 - DNA, 25 bp, Homo sapien
ggcacctacagctccacgataatat

SEQ ID NO: 4468357 - DNA, 25 bp, Homo sapien
tgccctgagatgacgtagatcactc

SEQ ID NO: 4468358 - DNA, 25 bp, Homo sapien
ccgaagtttcaatgaatgacaaacc

SEQ ID NO: 4468359 - DNA, 25 bp, Homo sapien
tctagggccgaagtttcaatgaatg

SEQ ID NO: 4468360 - DNA, 25 bp, Homo sapien
gagtctagggccgaagtttcaatga

SEQ ID NO: 4468361 - DNA, 25 bp, Homo sapien
atttgtagagtctagggccgaagtt

SEQ ID NO: 4468362 - DNA, 25 bp, Homo sapien
tgttaaaattgtctgaaaagcagct

SEQ ID NO: 4468363 - DNA, 25 bp, Homo sapien
ctgttaaaattgtctgaaaagcagc

SEQ ID NO: 4468364 - DNA, 25 bp, Homo sapien
gttaaaattgtctgaaaagcagctt

SEQ ID NO: 4468365 - DNA, 25 bp, Homo sapien
ggtgttaggatgtttgagctcaagc

SEQ ID NO: 4468366 - DNA, 25 bp, Homo sapien
ccagctcttaaagggctcaatttta

SEQ ID NO: 4468367 - DNA, 25 bp, Homo sapien
aagtaccgactagttcatgtttgag

SEQ ID NO: 4468368 - DNA, 25 bp, Homo sapien
catgtttgagtggatcagaagctca

SEQ ID NO: 4468369 - DNA, 25 bp, Homo sapien
ctaagaaaagatacacttgctgtct

SEQ ID NO: 4468370 - DNA, 25 bp, Homo sapien
tgaaccactgtcaaccttctcagac

SEQ ID NO: 4468371 - DNA, 25 bp, Homo sapien
ggaaattttctgacataccaaaagc

SEQ ID NO: 4468372 - DNA, 25 bp, Homo sapien
catattcagttgactacagcttact

SEQ ID NO: 4468373 - DNA, 25 bp, Homo sapien
tgcttggagacatgtcattttcgcg

SEQ ID NO: 4468374 - DNA, 25 bp, Homo sapien
tcattttcgcgtctgtctgacattt

SEQ ID NO: 4468375 - DNA, 25 bp, Homo sapien
acattgttgcttggagacatgtcat

SEQ ID NO: 4468376 - DNA, 25 bp, Homo sapien
acatgtcattttcgcgtctgtctga

SEQ ID NO: 4468377 - DNA, 25 bp, Homo sapien
cagacctgggaaatggactatacac

SEQ ID NO: 4468378 - DNA, 25 bp, Homo sapien
ttaaatctcagacctgggaaatgga

SEQ ID NO: 4468379 - DNA, 25 bp, Homo sapien
caaaagacttaggacatggaaaaat

SEQ ID NO: 4468380 - DNA, 25 bp, Homo sapien
aaatggactatacacagccttctag

SEQ ID NO: 4468381 - DNA, 25 bp, Homo sapien
taaggctagtgaagccatagcatga

SEQ ID NO: 4468382 - DNA, 25 bp, Homo sapien
cattcgggacaagtggatgatttta

SEQ ID NO: 4468383 - DNA, 25 bp, Homo sapien
gcagtcattcgggacaagtggatga

SEQ ID NO: 4468384 - DNA, 25 bp, Homo sapien
ttattaaactaaggctagtgaagcc

SEQ ID NO: 4468385 - DNA, 25 bp, Homo sapien
aaataattatccatgcctgctggtg

SEQ ID NO: 4468386 - DNA, 25 bp, Homo sapien
tgactgactacagcaatgccttccg

SEQ ID NO: 4468387 - DNA, 25 bp, Homo sapien
tcatgagcaccgcaagagacaaaag

SEQ ID NO: 4468388 - DNA, 25 bp, Homo sapien
gaccaataggtctgagcttcaagtg

SEQ ID NO: 4468389 - DNA, 25 bp, Homo sapien
taagattaaatcaaggcaccatggc

SEQ ID NO: 4468390 - DNA, 25 bp, Homo sapien
tgtgaccagctctgatgggcaaccc

SEQ ID NO: 4468391 - DNA, 25 bp, Homo sapien
tgatgtaaggtcactagctggcacc

SEQ ID NO: 4468392 - DNA, 25 bp, Homo sapien
taccatcgacctcctacagtttggg

SEQ ID NO: 4468393 - DNA, 25 bp, Homo sapien
cagagttcgaattgggatgaatccc

SEQ ID NO: 4468394 - DNA, 25 bp, Homo sapien
tcagtccagtgctctatcataccag

SEQ ID NO: 4468395 - DNA, 25 bp, Homo sapien
tattgcctagtacacaacatccttt

SEQ ID NO: 4468396 - DNA, 25 bp, Homo sapien
gagccatgactagaatctcttcgtt

SEQ ID NO: 4468397 - DNA, 25 bp, Homo sapien
aacatagcagcccatcaagtgctcc

SEQ ID NO: 4468398 - DNA, 25 bp, Homo sapien
ctctcccttagcatatatggtactt

SEQ ID NO: 4468399 - DNA, 25 bp, Homo sapien
ggtactttgatgcatattgttgata

SEQ ID NO: 4468400 - DNA, 25 bp, Homo sapien
tcccagacatgagtatattttaaag

SEQ ID NO: 4468401 - DNA, 25 bp, Homo sapien
aaatgtaatacaagtcaaaccaggc

SEQ ID NO: 4468402 - DNA, 25 bp, Homo sapien
tcacaaataggttcatggtcagcct

SEQ ID NO: 4468403 - DNA, 25 bp, Homo sapien
gctgccttcccctatcgaacagtta

SEQ ID NO: 4468404 - DNA, 25 bp, Homo sapien
tgggaagacagctctactaaccctt

SEQ ID NO: 4468405 - DNA, 25 bp, Homo sapien
ggtccatcaaattacaacagccaag

SEQ ID NO: 4468406 - DNA, 25 bp, Homo sapien
cacacacacgtttccaaagtgcagc

SEQ ID NO: 4468407 - DNA, 25 bp, Homo sapien
tcagtctacaataagattcctaggg

SEQ ID NO: 4468408 - DNA, 25 bp, Homo sapien
cctaagtgataggtttaaacacaca

SEQ ID NO: 4468409 - DNA, 25 bp, Homo sapien
tcccagattctagaggccactgcat

SEQ ID NO: 4468410 - DNA, 25 bp, Homo sapien
ggataacccctgaacgcctgacatt

SEQ ID NO: 4468411 - DNA, 25 bp, Homo sapien
tcagaagtctggcatgggtttcacg

SEQ ID NO: 4468412 - DNA, 25 bp, Homo sapien
ctctgattgcaggactgaggccctc

SEQ ID NO: 4468413 - DNA, 25 bp, Homo sapien
tctaccacccagcacttctttggtg

SEQ ID NO: 4468414 - DNA, 25 bp, Homo sapien
ggcttgtctctaccacccagcactt

SEQ ID NO: 4468415 - DNA, 25 bp, Homo sapien
ttgaccttatccccagagctgggct

SEQ ID NO: 4468416 - DNA, 25 bp, Homo sapien
taccacccagcacttctttggtgtg

SEQ ID NO: 4468417 - DNA, 25 bp, Homo sapien
atcctcttaaagtgcgactgttgtc

SEQ ID NO: 4468418 - DNA, 25 bp, Homo sapien
gcgactggacctggccgccaagatc

SEQ ID NO: 4468419 - DNA, 25 bp, Homo sapien
catgagcgactggacctggccgcca

SEQ ID NO: 4468420 - DNA, 25 bp, Homo sapien
gtgcgactgttgtccagattttgac

SEQ ID NO: 4468421 - DNA, 25 bp, Homo sapien
gcctctgagttgatgaccctgtgtt

SEQ ID NO: 4468422 - DNA, 25 bp, Homo sapien
gagttgatgaccctgtgtttcccct

SEQ ID NO: 4468423 - DNA, 25 bp, Homo sapien
gcatagtggacacttcactgtccca

SEQ ID NO: 4468424 - DNA, 25 bp, Homo sapien
tcccctgggctcttggtctgcatag

SEQ ID NO: 4468425 - DNA, 25 bp, Homo sapien
gaaggcagtttggattgaagacact

SEQ ID NO: 4468426 - DNA, 25 bp, Homo sapien
taaacttgtcgttttgaaggtgata

SEQ ID NO: 4468427 - DNA, 25 bp, Homo sapien
gtttggattgaagacactttgtcgg

SEQ ID NO: 4468428 - DNA, 25 bp, Homo sapien
aaggtgatattcagctgtcagcttg

SEQ ID NO: 4468429 - DNA, 25 bp, Homo sapien
tgcttctccagcagctcttcatgac

SEQ ID NO: 4468430 - DNA, 25 bp, Homo sapien
gcttctccagcagctcttcatgact

SEQ ID NO: 4468431 - DNA, 25 bp, Homo sapien
ccgggctgtgcttctccagcagctc

SEQ ID NO: 4468432 - DNA, 25 bp, Homo sapien
tctccagcagctcttcatgacttaa

SEQ ID NO: 4468433 - DNA, 25 bp, Homo sapien
gctgtcttggaatgggcaggtgaag

SEQ ID NO: 4468434 - DNA, 25 bp, Homo sapien
tggaatgggcaggtgaaggattgaa

SEQ ID NO: 4468435 - DNA, 25 bp, Homo sapien
gattgaaggaaatgggtagcggtgg

SEQ ID NO: 4468436 - DNA, 25 bp, Homo sapien
tgggtagcggtggaaatagcttaca

SEQ ID NO: 4468437 - DNA, 25 bp, Homo sapien
gggatttgttgcctcttgtaactgg

SEQ ID NO: 4468438 - DNA, 25 bp, Homo sapien
ttgtcagcaatctgtctgcaccttg

SEQ ID NO: 4468439 - DNA, 25 bp, Homo sapien
tcttcccaagtaatagcagagatac

SEQ ID NO: 4468440 - DNA, 25 bp, Homo sapien
cagagatacacaccaacagctccag

SEQ ID NO: 4468441 - DNA, 25 bp, Homo sapien
tcataggcagtggaagccggaagcc

SEQ ID NO: 4468442 - DNA, 25 bp, Homo sapien
atgttggtggagaaatgtgcaaaga

SEQ ID NO: 4468443 - DNA, 25 bp, Homo sapien
caggaggggcgttgatgttggtgga

SEQ ID NO: 4468444 - DNA, 25 bp, Homo sapien
cagtggaagccggaagccccaggag

SEQ ID NO: 4468445 - DNA, 25 bp, Homo sapien
tctgccattggcaactgtttcgact

SEQ ID NO: 4468446 - DNA, 25 bp, Homo sapien
tccttgttggacagtaagccctctg

SEQ ID NO: 4468447 - DNA, 25 bp, Homo sapien
ggcaactgtttcgactgggttacat

SEQ ID NO: 4468448 - DNA, 25 bp, Homo sapien
taagccctctgataccacgtgaggc

SEQ ID NO: 4468449 - DNA, 25 bp, Homo sapien
tgatgagtgaatttgtgagtgaggg

SEQ ID NO: 4468450 - DNA, 25 bp, Homo sapien
ggggcacccaagagcaggcagacac

SEQ ID NO: 4468451 - DNA, 25 bp, Homo sapien
ttgatgagtgaatttgtgagtgagg

SEQ ID NO: 4468452 - DNA, 25 bp, Homo sapien
tgaggggcacccaagagcaggcaga

SEQ ID NO: 4468453 - DNA, 25 bp, Homo sapien
tgtgtccctggcttgtagtaggggc

SEQ ID NO: 4468454 - DNA, 25 bp, Homo sapien
gtccctggcttgtagtaggggccca

SEQ ID NO: 4468455 - DNA, 25 bp, Homo sapien
tgtccctggcttgtagtaggggccc

SEQ ID NO: 4468456 - DNA, 25 bp, Homo sapien
tccctggcttgtagtaggggcccat

SEQ ID NO: 4468457 - DNA, 25 bp, Homo sapien
ggctggcacggcaccccacggtgga

SEQ ID NO: 4468458 - DNA, 25 bp, Homo sapien
accccacggtggagactcttggagg

SEQ ID NO: 4468459 - DNA, 25 bp, Homo sapien
cggcaccccacggtggagactcttg

SEQ ID NO: 4468460 - DNA, 25 bp, Homo sapien
ggcacggcaccccacggtggagact

SEQ ID NO: 4468461 - DNA, 25 bp, Homo sapien
tgctgttcccttgcaaaagttgcca

SEQ ID NO: 4468462 - DNA, 25 bp, Homo sapien
tcagccctggccgatttcttattaa

SEQ ID NO: 4468463 - DNA, 25 bp, Homo sapien
ttcttattaaggttctgctgttccc

SEQ ID NO: 4468464 - DNA, 25 bp, Homo sapien
tgaggctggtgccaactatctgcca

SEQ ID NO: 4468465 - DNA, 25 bp, Homo sapien
cattgaaaaacggagagagtgatct

SEQ ID NO: 4468466 - DNA, 25 bp, Homo sapien
atgggcattgaaaaacggagagagt

SEQ ID NO: 4468467 - DNA, 25 bp, Homo sapien
catgatgggcattgaaaaacggaga

SEQ ID NO: 4468468 - DNA, 25 bp, Homo sapien
ggcattgaaaaacggagagagtgat

SEQ ID NO: 4468469 - DNA, 25 bp, Homo sapien
ccctctggaacggccccaccgccag

SEQ ID NO: 4468470 - DNA, 25 bp, Homo sapien
tccctctggaacggccccaccgcca

SEQ ID NO: 4468471 - DNA, 25 bp, Homo sapien
ttgtgggcctgtcacagcacccctc

SEQ ID NO: 4468472 - DNA, 25 bp, Homo sapien
ccttgcagggatacagcattggtgg

SEQ ID NO: 4468473 - DNA, 25 bp, Homo sapien
cacttccacctagacagcaaagatg

SEQ ID NO: 4468474 - DNA, 25 bp, Homo sapien
cagctcggccgagaaaatcctttgc

SEQ ID NO: 4468475 - DNA, 25 bp, Homo sapien
cattggtggttcgaacagctcggcc

SEQ ID NO: 4468476 - DNA, 25 bp, Homo sapien
ttcttctaaagacttaactgcttgg

SEQ ID NO: 4468477 - DNA, 25 bp, Homo sapien
cagtttcttctaaagacttaactgc

SEQ ID NO: 4468478 - DNA, 25 bp, Homo sapien
ccaaacaggctgtcacaggccttca

SEQ ID NO: 4468479 - DNA, 25 bp, Homo sapien
tcacaggccttcacagtttcttcta

SEQ ID NO: 4468480 - DNA, 25 bp, Homo sapien
aacacctggtgctgagctttgctgc

SEQ ID NO: 4468481 - DNA, 25 bp, Homo sapien
caacacctggtgctgagctttgctg

SEQ ID NO: 4468482 - DNA, 25 bp, Homo sapien
gggtgggagccatggtccatcaccc

SEQ ID NO: 4468483 - DNA, 25 bp, Homo sapien
ggtgggagccatggtccatcaccct

SEQ ID NO: 4468484 - DNA, 25 bp, Homo sapien
gcctttatcaagatgcccagctcca

SEQ ID NO: 4468485 - DNA, 25 bp, Homo sapien
ggctgtttgcctttatcaagatgcc

SEQ ID NO: 4468486 - DNA, 25 bp, Homo sapien
ctggtctacgatgccttcttcacaa

SEQ ID NO: 4468487 - DNA, 25 bp, Homo sapien
tatcctggtctacgatgccttcttc

SEQ ID NO: 4468488 - DNA, 25 bp, Homo sapien
ccacccggggtcaagaaggagctat

SEQ ID NO: 4468489 - DNA, 25 bp, Homo sapien
gaaggagctatcctggtctacgatg

SEQ ID NO: 4468490 - DNA, 25 bp, Homo sapien
cggctgccgcggtgctcctgctccg

SEQ ID NO: 4468491 - DNA, 25 bp, Homo sapien
ctgccgggatggtccggctgccgcg

SEQ ID NO: 4468492 - DNA, 25 bp, Homo sapien
ccggctgccgcggtgctcctgctcc

SEQ ID NO: 4468493 - DNA, 25 bp, Homo sapien
ccgggatggtccggctgccgcggtg

SEQ ID NO: 4468494 - DNA, 25 bp, Homo sapien
gtcaccgtgactccaacaagagcca

SEQ ID NO: 4468495 - DNA, 25 bp, Homo sapien
tctggcagaaacattggtgttctcc

SEQ ID NO: 4468496 - DNA, 25 bp, Homo sapien
ggcagaaacattggtgttctccttc

SEQ ID NO: 4468497 - DNA, 25 bp, Homo sapien
gctgtggtcaccgtgactccaacaa

SEQ ID NO: 4468498 - DNA, 25 bp, Homo sapien
gagttgtccctgtcgacctcactgg

SEQ ID NO: 4468499 - DNA, 25 bp, Homo sapien
tgaacagctcgcagggctcggagtt

SEQ ID NO: 4468500 - DNA, 25 bp, Homo sapien
cagggctcggagttgtccctgtcga

SEQ ID NO: 4468501 - DNA, 25 bp, Homo sapien
ccttcgtgaacagctcgcagggctc

SEQ ID NO: 4468502 - DNA, 25 bp, Homo sapien
gccttttccctgcagtgaatgactc

SEQ ID NO: 4468503 - DNA, 25 bp, Homo sapien
agggccttttccctgcagtgaatga

SEQ ID NO: 4468504 - DNA, 25 bp, Homo sapien
aatgactcctgtgatggtagagggt

SEQ ID NO: 4468505 - DNA, 25 bp, Homo sapien
agtgaatgactcctgtgatggtaga

SEQ ID NO: 4468506 - DNA, 25 bp, Homo sapien
cccactgccccctgacctttgccat

SEQ ID NO: 4468507 - DNA, 25 bp, Homo sapien
ctgctgggtgggcatctgacccact

SEQ ID NO: 4468508 - DNA, 25 bp, Homo sapien
tggctgctgggtgggcatctgaccc

SEQ ID NO: 4468509 - DNA, 25 bp, Homo sapien
ctgacccactgccccctgacctttg

SEQ ID NO: 4468510 - DNA, 25 bp, Homo sapien
cccggagggtctatgctgttaaatt

SEQ ID NO: 4468511 - DNA, 25 bp, Homo sapien
ttccagtgacatctaaagtgataga

SEQ ID NO: 4468512 - DNA, 25 bp, Homo sapien
gcttcccggagggtctatgctgtta

SEQ ID NO: 4468513 - DNA, 25 bp, Homo sapien
gtgacatctaaagtgatagagaagc

SEQ ID NO: 4468514 - DNA, 25 bp, Homo sapien
actggttctggcagtgggagcctct

SEQ ID NO: 4468515 - DNA, 25 bp, Homo sapien
taaatagagatctggggctttggtc

SEQ ID NO: 4468516 - DNA, 25 bp, Homo sapien
tctggggctttggtcttggctgtgg

SEQ ID NO: 4468517 - DNA, 25 bp, Homo sapien
ggctgtgggcccaggaactggttct

SEQ ID NO: 4468518 - DNA, 25 bp, Homo sapien
tccagaaagggaaggacttcctcga

SEQ ID NO: 4468519 - DNA, 25 bp, Homo sapien
ccagaggcccgaaggaagtttccag

SEQ ID NO: 4468520 - DNA, 25 bp, Homo sapien
ctgaaggaaatccagccagaggccc

SEQ ID NO: 4468521 - DNA, 25 bp, Homo sapien
tcgacattctgtattggttggacag

SEQ ID NO: 4468522 - DNA, 25 bp, Homo sapien
agtcctgactggcagtcctgaaaga

SEQ ID NO: 4468523 - DNA, 25 bp, Homo sapien
gactggcagtcctgaaagaaactga

SEQ ID NO: 4468524 - DNA, 25 bp, Homo sapien
ggagcagagtcctgactggcagtcc

SEQ ID NO: 4468525 - DNA, 25 bp, Homo sapien
actggcagtcctgaaagaaactgac

SEQ ID NO: 4468526 - DNA, 25 bp, Homo sapien
caaaggtgcttagggggtcaaagct

SEQ ID NO: 4468527 - DNA, 25 bp, Homo sapien
tggtcagagttctccttgggatcct

SEQ ID NO: 4468528 - DNA, 25 bp, Homo sapien
tgggatcctgtctttcttgtaagca

SEQ ID NO: 4468529 - DNA, 25 bp, Homo sapien
tttgttttggctgattttggtggag

SEQ ID NO: 4468530 - DNA, 25 bp, Homo sapien
tccttcatacagccgagctttcact

SEQ ID NO: 4468531 - DNA, 25 bp, Homo sapien
gaatccttcatacagccgagctttc

SEQ ID NO: 4468532 - DNA, 25 bp, Homo sapien
agaatccttcatacagccgagcttt

SEQ ID NO: 4468533 - DNA, 25 bp, Homo sapien
aatccttcatacagccgagctttca

SEQ ID NO: 4468534 - DNA, 25 bp, Homo sapien
ccctggcgatattcattgctgggaa

SEQ ID NO: 4468535 - DNA, 25 bp, Homo sapien
tctaaattcatccttgactactagt

SEQ ID NO: 4468536 - DNA, 25 bp, Homo sapien
aaccagtggccctggcgatattcat

SEQ ID NO: 4468537 - DNA, 25 bp, Homo sapien
atccttgactactagttttttcttg

SEQ ID NO: 4468538 - DNA, 25 bp, Homo sapien
cagctggttgcctaggagggcagct

SEQ ID NO: 4468539 - DNA, 25 bp, Homo sapien
ccagagcaggctagaagtaggaatg

SEQ ID NO: 4468540 - DNA, 25 bp, Homo sapien
tagaagtaggaatgtgtggcagggc

SEQ ID NO: 4468541 - DNA, 25 bp, Homo sapien
ctctggagtgtaggcagctggttgc

SEQ ID NO: 4468542 - DNA, 25 bp, Homo sapien
ctccctcgcagatctacaggactgg

SEQ ID NO: 4468543 - DNA, 25 bp, Homo sapien
tttctgcccgtcctttgtccacaat

SEQ ID NO: 4468544 - DNA, 25 bp, Homo sapien
aatttcccgatatcaccaaacagct

SEQ ID NO: 4468545 - DNA, 25 bp, Homo sapien
gcacttccccagtgcagggatttgc

SEQ ID NO: 4468546 - DNA, 25 bp, Homo sapien
cctgggtggaggcacttctcagctt

SEQ ID NO: 4468547 - DNA, 25 bp, Homo sapien
ccaggggatagtcattggcagtgtt

SEQ ID NO: 4468548 - DNA, 25 bp, Homo sapien
aaagttccaggggatagtcattggc

SEQ ID NO: 4468549 - DNA, 25 bp, Homo sapien
gtggaggcacttctcagcttagctc

SEQ ID NO: 4468550 - DNA, 25 bp, Homo sapien
gtctaagagaccaatgcgaagatac

SEQ ID NO: 4468551 - DNA, 25 bp, Homo sapien
ccaatgcgaagatacaaagcgatgg

SEQ ID NO: 4468552 - DNA, 25 bp, Homo sapien
actgccttctaagctcaggtctaag

SEQ ID NO: 4468553 - DNA, 25 bp, Homo sapien
tgccttctaagctcaggtctaagag

SEQ ID NO: 4468554 - DNA, 25 bp, Homo sapien
gctcttccatgacccaagtcgtcac

SEQ ID NO: 4468555 - DNA, 25 bp, Homo sapien
tcttccatgacccaagtcgtcacta

SEQ ID NO: 4468556 - DNA, 25 bp, Homo sapien
ttgctcttccatgacccaagtcgtc

SEQ ID NO: 4468557 - DNA, 25 bp, Homo sapien
tgctcttccatgacccaagtcgtca

SEQ ID NO: 4468558 - DNA, 25 bp, Homo sapien
tagttttgagtctatagccagagga

SEQ ID NO: 4468559 - DNA, 25 bp, Homo sapien
cttcagcgttgcgtatagatacatg

SEQ ID NO: 4468560 - DNA, 25 bp, Homo sapien
cagaggactgaagttgacattctct

SEQ ID NO: 4468561 - DNA, 25 bp, Homo sapien
gggcttggactcaaatggtctagtt

SEQ ID NO: 4468562 - DNA, 25 bp, Homo sapien
agacttgatgcttgcctgtggctct

SEQ ID NO: 4468563 - DNA, 25 bp, Homo sapien
acactgaaccgggatagtccttgtc

SEQ ID NO: 4468564 - DNA, 25 bp, Homo sapien
ccttgtccttgatatggagacttga

SEQ ID NO: 4468565 - DNA, 25 bp, Homo sapien
gaaccgggatagtccttgtccttga

SEQ ID NO: 4468566 - DNA, 25 bp, Homo sapien
tggtccatttgcattcgtgtttgca

SEQ ID NO: 4468567 - DNA, 25 bp, Homo sapien
gctcttcttgaaggtcattatatta

SEQ ID NO: 4468568 - DNA, 25 bp, Homo sapien
aaatgtagttgctcttcttgaaggt

SEQ ID NO: 4468569 - DNA, 25 bp, Homo sapien
tatacagactgtgctttcagttctg

SEQ ID NO: 4468570 - DNA, 25 bp, Homo sapien
tggactcgcgggctccatccagcgg

SEQ ID NO: 4468571 - DNA, 25 bp, Homo sapien
gactcgcgggctccatccagcggca

SEQ ID NO: 4468572 - DNA, 25 bp, Homo sapien
actcgcgggctccatccagcggcag

SEQ ID NO: 4468573 - DNA, 25 bp, Homo sapien
ggactcgcgggctccatccagcggc

SEQ ID NO: 4468574 - DNA, 25 bp, Homo sapien
ggacggccttgttggttggctccca

SEQ ID NO: 4468575 - DNA, 25 bp, Homo sapien
catagccgttactctattccgggaa

SEQ ID NO: 4468576 - DNA, 25 bp, Homo sapien
agaagcaagtgactctctgcgcgcg

SEQ ID NO: 4468577 - DNA, 25 bp, Homo sapien
ctggagcgtggtcccgaagttccca

SEQ ID NO: 4468578 - DNA, 25 bp, Homo sapien
ccagcaagtgccatgcacgcttttg

SEQ ID NO: 4468579 - DNA, 25 bp, Homo sapien
ggaggcagagcctgcggggacgcag

SEQ ID NO: 4468580 - DNA, 25 bp, Homo sapien
taagccccagcaagtgccatgcacg

SEQ ID NO: 4468581 - DNA, 25 bp, Homo sapien
ggacgcagcaggttttcggcggcgg

SEQ ID NO: 4468582 - DNA, 25 bp, Homo sapien
gctgccgaagccgagtttggctccg

SEQ ID NO: 4468583 - DNA, 25 bp, Homo sapien
ggcgcctcaatgtgggcagccgcag

SEQ ID NO: 4468584 - DNA, 25 bp, Homo sapien
tggctccgggagtaggtggatgccg

SEQ ID NO: 4468585 - DNA, 25 bp, Homo sapien
ggccgcagtcgggatgcagcgtccg

SEQ ID NO: 4468586 - DNA, 25 bp, Homo sapien
tctgcttctggttgtgtaccacaga

SEQ ID NO: 4468587 - DNA, 25 bp, Homo sapien
taccacagaaatttctggccccaga

SEQ ID NO: 4468588 - DNA, 25 bp, Homo sapien
tggactccatgggaacggagacccc

SEQ ID NO: 4468589 - DNA, 25 bp, Homo sapien
tgagaatcctggtggtgtcgggccg

SEQ ID NO: 4468590 - DNA, 25 bp, Homo sapien
aaattgcttccagatcatcttgtac

SEQ ID NO: 4468591 - DNA, 25 bp, Homo sapien
cagaaattcatgttgcttgtcttca

SEQ ID NO: 4468592 - DNA, 25 bp, Homo sapien
tcagaaattcatgttgcttgtcttc

SEQ ID NO: 4468593 - DNA, 25 bp, Homo sapien
ttcagtccacaaagtagagtttctt

SEQ ID NO: 4468594 - DNA, 25 bp, Homo sapien
ttgtcttcagtccacaaagtagagt

SEQ ID NO: 4468595 - DNA, 25 bp, Homo sapien
tgcattatgcatccgattctcatat

SEQ ID NO: 4468596 - DNA, 25 bp, Homo sapien
tcttccaaggactttcacgaatccc

SEQ ID NO: 4468597 - DNA, 25 bp, Homo sapien
gcctctgaaaattgcattatgcatc

SEQ ID NO: 4468598 - DNA, 25 bp, Homo sapien
ttcacgaatccccatgatgcctctg

SEQ ID NO: 4468599 - DNA, 25 bp, Homo sapien
atccacacttatggatagttaaatt

SEQ ID NO: 4468600 - DNA, 25 bp, Homo sapien
cacttatggatagttaaatttattc

SEQ ID NO: 4468601 - DNA, 25 bp, Homo sapien
cacacttatggatagttaaatttat

SEQ ID NO: 4468602 - DNA, 25 bp, Homo sapien
ccacacttatggatagttaaattta

SEQ ID NO: 4468603 - DNA, 25 bp, Homo sapien
cctgggttgtacctaattgacaagc

SEQ ID NO: 4468604 - DNA, 25 bp, Homo sapien
catgtaggtgtggacactgaagccc

SEQ ID NO: 4468605 - DNA, 25 bp, Homo sapien
tgtgttccagataccttgccaagga

SEQ ID NO: 4468606 - DNA, 25 bp, Homo sapien
gagcattgagttattggaaccctga

SEQ ID NO: 4468607 - DNA, 25 bp, Homo sapien
gaaagcacggtgctttctttcgcca

SEQ ID NO: 4468608 - DNA, 25 bp, Homo sapien
ggtgctttctttcgccatgcaccct

SEQ ID NO: 4468609 - DNA, 25 bp, Homo sapien
acgtgagtcgtgagaaagcacggtg

SEQ ID NO: 4468610 - DNA, 25 bp, Homo sapien
ctctagctctgtctcagagtcctgg

SEQ ID NO: 4468611 - DNA, 25 bp, Homo sapien
cctttgagcatcaagtcccttttct

SEQ ID NO: 4468612 - DNA, 25 bp, Homo sapien
agtaagccagtccttattgcctttc

SEQ ID NO: 4468613 - DNA, 25 bp, Homo sapien
gtgctctctccacttcgatccgcgt

SEQ ID NO: 4468614 - DNA, 25 bp, Homo sapien
ggctgtatagtttagcaggattccc

SEQ ID NO: 4468615 - DNA, 25 bp, Homo sapien
cctatttcagtttctatagttcaga

SEQ ID NO: 4468616 - DNA, 25 bp, Homo sapien
tgttgattgggctgcaatcacttct

SEQ ID NO: 4468617 - DNA, 25 bp, Homo sapien
tagttcagaagtctgagcatggctg

SEQ ID NO: 4468618 - DNA, 25 bp, Homo sapien
ggctgcaatcacttctggagcttgg

SEQ ID NO: 4468619 - DNA, 25 bp, Homo sapien
tgccttgcagatacacaggtgtggc

SEQ ID NO: 4468620 - DNA, 25 bp, Homo sapien
ccagcattagagatggcaggcccct

SEQ ID NO: 4468621 - DNA, 25 bp, Homo sapien
ttcctgttctaccagcgggagacca

SEQ ID NO: 4468622 - DNA, 25 bp, Homo sapien
ctagttggcggaatataatggcacc

SEQ ID NO: 4468623 - DNA, 25 bp, Homo sapien
aggtgaagaagggctgggcgcagct

SEQ ID NO: 4468624 - DNA, 25 bp, Homo sapien
ctggacggcaggtgaagaagggctg

SEQ ID NO: 4468625 - DNA, 25 bp, Homo sapien
ggcaggtgaagaagggctgggcgca

SEQ ID NO: 4468626 - DNA, 25 bp, Homo sapien
tggacggcaggtgaagaagggctgg

SEQ ID NO: 4468627 - DNA, 25 bp, Homo sapien
gcgtgtctcccggcggccgcggagt

SEQ ID NO: 4468628 - DNA, 25 bp, Homo sapien
gcggcgtgtctcccggcggccgcgg

SEQ ID NO: 4468629 - DNA, 25 bp, Homo sapien
gtgtctcccggcggccgcggagtgg

SEQ ID NO: 4468630 - DNA, 25 bp, Homo sapien
ggcgtgtctcccggcggccgcggag

SEQ ID NO: 4468631 - DNA, 25 bp, Homo sapien
cacgcagggccgcaggtagtgctcg

SEQ ID NO: 4468632 - DNA, 25 bp, Homo sapien
tgctcgcgcacgatccgcagcgtgc

SEQ ID NO: 4468633 - DNA, 25 bp, Homo sapien
gctcgcgcacgatccgcagcgtgcg

SEQ ID NO: 4468634 - DNA, 25 bp, Homo sapien
gcacgatccgcagcgtgcggccctg

SEQ ID NO: 4468635 - DNA, 25 bp, Homo sapien
ctcccagctcgggacctccccattt

SEQ ID NO: 4468636 - DNA, 25 bp, Homo sapien
cccagctcgggacctccccatttct

SEQ ID NO: 4468637 - DNA, 25 bp, Homo sapien
gggctcccagctcgggacctcccca

SEQ ID NO: 4468638 - DNA, 25 bp, Homo sapien
cagctcgggacctccccatttctcc

SEQ ID NO: 4468639 - DNA, 25 bp, Homo sapien
gagccagtaacgtgcatcgttctat

SEQ ID NO: 4468640 - DNA, 25 bp, Homo sapien
cagtaacgtgcatcgttctatcggc

SEQ ID NO: 4468641 - DNA, 25 bp, Homo sapien
gccagtaacgtgcatcgttctatcg

SEQ ID NO: 4468642 - DNA, 25 bp, Homo sapien
agagccagtaacgtgcatcgttcta

SEQ ID NO: 4468643 - DNA, 25 bp, Homo sapien
gataatcttgaacaactttccagtc

SEQ ID NO: 4468644 - DNA, 25 bp, Homo sapien
aactcaaggatctcaagataatctt

SEQ ID NO: 4468645 - DNA, 25 bp, Homo sapien
tttccagtctgggatcacgtaatga

SEQ ID NO: 4468646 - DNA, 25 bp, Homo sapien
cgtaatgagtcacatcactagacaa

SEQ ID NO: 4468647 - DNA, 25 bp, Homo sapien
tgctgcacagcttgacaagctgtct

SEQ ID NO: 4468648 - DNA, 25 bp, Homo sapien
tgcacagcttgacaagctgtctgca

SEQ ID NO: 4468649 - DNA, 25 bp, Homo sapien
tttgatgctgcacagcttgacaagc

SEQ ID NO: 4468650 - DNA, 25 bp, Homo sapien
tctttgatgctgcacagcttgacaa

SEQ ID NO: 4468651 - DNA, 25 bp, Homo sapien
cagcaggtttcgcagtttgttatac

SEQ ID NO: 4468652 - DNA, 25 bp, Homo sapien
tggaattcattagcaaagagaatgc

SEQ ID NO: 4468653 - DNA, 25 bp, Homo sapien
tcatgacgcgcatccttcagcaggt

SEQ ID NO: 4468654 - DNA, 25 bp, Homo sapien
caaagagaatgcaatcatgacgcgc

SEQ ID NO: 4468655 - DNA, 25 bp, Homo sapien
actctcctctttcccgtggcagata

SEQ ID NO: 4468656 - DNA, 25 bp, Homo sapien
tctcctctttcccgtggcagatagc

SEQ ID NO: 4468657 - DNA, 25 bp, Homo sapien
ctcctctttcccgtggcagatagca

SEQ ID NO: 4468658 - DNA, 25 bp, Homo sapien
tcctctttcccgtggcagatagcag

SEQ ID NO: 4468659 - DNA, 25 bp, Homo sapien
tccatactgctgaattgcctcttca

SEQ ID NO: 4468660 - DNA, 25 bp, Homo sapien
tggcagtgatgatagtaccaaacag

SEQ ID NO: 4468661 - DNA, 25 bp, Homo sapien
tctgtttcacttccatactgctgaa

SEQ ID NO: 4468662 - DNA, 25 bp, Homo sapien
cttgaaagtaatcacgaatactcct

SEQ ID NO: 4468663 - DNA, 25 bp, Homo sapien
tgcccatgctggagtacaagtggcg

SEQ ID NO: 4468664 - DNA, 25 bp, Homo sapien
atcttggctcactggtcttgctctg

SEQ ID NO: 4468665 - DNA, 25 bp, Homo sapien
tgcccatgctggagtacaagtggca

SEQ ID NO: 4468666 - DNA, 25 bp, Homo sapien
tgatcttggctcactgtagccttga

SEQ ID NO: 4468667 - DNA, 25 bp, Homo sapien
gatgttctgggtactccttcccatg

SEQ ID NO: 4468668 - DNA, 25 bp, Homo sapien
ccgtcgagactgaaggatagaatca

SEQ ID NO: 4468669 - DNA, 25 bp, Homo sapien
tatagcgtccagatttaatcccagc

SEQ ID NO: 4468670 - DNA, 25 bp, Homo sapien
gaatcacaaagctcgtgggcagctt

SEQ ID NO: 4468671 - DNA, 25 bp, Homo sapien
taagttggaaacattagcctctcta

SEQ ID NO: 4468672 - DNA, 25 bp, Homo sapien
ccaggaatgccataaactttactac

SEQ ID NO: 4468673 - DNA, 25 bp, Homo sapien
tgtggttgacaatctactgagttgc

SEQ ID NO: 4468674 - DNA, 25 bp, Homo sapien
cccacacttttagggagtggctttg

SEQ ID NO: 4468675 - DNA, 25 bp, Homo sapien
caaaagcttctatttgggctctgtg

SEQ ID NO: 4468676 - DNA, 25 bp, Homo sapien
tggctccttgaagtcgaacaaaagc

SEQ ID NO: 4468677 - DNA, 25 bp, Homo sapien
gggctctgtgtttgttgacattcag

SEQ ID NO: 4468678 - DNA, 25 bp, Homo sapien
tccttgaagtcgaacaaaagcttct

SEQ ID NO: 4468679 - DNA, 25 bp, Homo sapien
ggtttcgagccttcatcccgtggat

SEQ ID NO: 4468680 - DNA, 25 bp, Homo sapien
gcccgaagccttgtcgtcacagtca

SEQ ID NO: 4468681 - DNA, 25 bp, Homo sapien
tcccgtggattaggatgtcactgac

SEQ ID NO: 4468682 - DNA, 25 bp, Homo sapien
tctcacacagggctacggttcttcc

SEQ ID NO: 4468683 - DNA, 25 bp, Homo sapien
tattctgagtgaaacaggaaccagc

SEQ ID NO: 4468684 - DNA, 25 bp, Homo sapien
tagggtaaggtgatcaagagtgaca

SEQ ID NO: 4468685 - DNA, 25 bp, Homo sapien
tccaaccaggtatgaggctttgttc

SEQ ID NO: 4468686 - DNA, 25 bp, Homo sapien
tgtcactgcggctggagcaaagcat

SEQ ID NO: 4468687 - DNA, 25 bp, Homo sapien
tttgccctgagattggacctcttct

SEQ ID NO: 4468688 - DNA, 25 bp, Homo sapien
tctgtaatcccaaggtgtaaccagg

SEQ ID NO: 4468689 - DNA, 25 bp, Homo sapien
tctttggacggaaatgtcaccacat

SEQ ID NO: 4468690 - DNA, 25 bp, Homo sapien
gcttgctgagtgctaattcgaattt

SEQ ID NO: 4468691 - DNA, 25 bp, Homo sapien
gattcttcctaaaacacgcacaaaa

SEQ ID NO: 4468692 - DNA, 25 bp, Homo sapien
tcgatgcgcacgaccaccctgaagt

SEQ ID NO: 4468693 - DNA, 25 bp, Homo sapien
tctgagaaaggaataactgaaatac

SEQ ID NO: 4468694 - DNA, 25 bp, Homo sapien
gatacacagatgttgactcccagga

SEQ ID NO: 4468695 - DNA, 25 bp, Homo sapien
catctgcgatgtggaccccaagttc

SEQ ID NO: 4468696 - DNA, 25 bp, Homo sapien
ggtcaatgctgaatacgagatggct

SEQ ID NO: 4468697 - DNA, 25 bp, Homo sapien
tccaggttgccattatttaaggttc

SEQ ID NO: 4468698 - DNA, 25 bp, Homo sapien
gccacaaagtgtgttacatctgcga

SEQ ID NO: 4468699 - DNA, 25 bp, Homo sapien
gtgaatgacacacacgcggcaacgc

SEQ ID NO: 4468700 - DNA, 25 bp, Homo sapien
gaatgacacacacgcggcaacgcga

SEQ ID NO: 4468701 - DNA, 25 bp, Homo sapien
ctgtgaatgacacacacgcggcaac

SEQ ID NO: 4468702 - DNA, 25 bp, Homo sapien
aatgacacacacgcggcaacgcgac

SEQ ID NO: 4468703 - DNA, 25 bp, Homo sapien
cgacgatctgctagataataagtgg

SEQ ID NO: 4468704 - DNA, 25 bp, Homo sapien
cgcctcccagaagggaacacaaatc

SEQ ID NO: 4468705 - DNA, 25 bp, Homo sapien
caaatctgcactgaggacggaaggc

SEQ ID NO: 4468706 - DNA, 25 bp, Homo sapien
gacggaaggcagcatgtcatagcga

SEQ ID NO: 4468707 - DNA, 25 bp, Homo sapien
gaggctttatccagttcccacatga

SEQ ID NO: 4468708 - DNA, 25 bp, Homo sapien
tggctttagcacattcccggagttc

SEQ ID NO: 4468709 - DNA, 25 bp, Homo sapien
tatgtcggtcagctttccaattgcc

SEQ ID NO: 4468710 - DNA, 25 bp, Homo sapien
cgacccagtggttggccaggatcat

SEQ ID NO: 4468711 - DNA, 25 bp, Homo sapien
ctaaatatacagcatgccactccat

SEQ ID NO: 4468712 - DNA, 25 bp, Homo sapien
tgtgtcttcaaaaatgaggagagcc

SEQ ID NO: 4468713 - DNA, 25 bp, Homo sapien
tctctatacataacaatgaagaggg

SEQ ID NO: 4468714 - DNA, 25 bp, Homo sapien
gaggagagccaagaatctgttttct

SEQ ID NO: 4468715 - DNA, 25 bp, Homo sapien
tttggtcaaagatctggctgtcaca

SEQ ID NO: 4468716 - DNA, 25 bp, Homo sapien
atgatattgtcacaaagatgctgca

SEQ ID NO: 4468717 - DNA, 25 bp, Homo sapien
taaattcactgttggtgtagtatct

SEQ ID NO: 4468718 - DNA, 25 bp, Homo sapien
cactgttggtgtagtatcttatgat

SEQ ID NO: 4468719 - DNA, 25 bp, Homo sapien
attgagggtggtataaattcactgt

SEQ ID NO: 4468720 - DNA, 25 bp, Homo sapien
tttttagcagagagagtttcatcat

SEQ ID NO: 4468721 - DNA, 25 bp, Homo sapien
ctgacctcagtgatgtgcctgcctc

SEQ ID NO: 4468722 - DNA, 25 bp, Homo sapien
tttagcagagagagtttcatcatgt

SEQ ID NO: 4468723 - DNA, 25 bp, Homo sapien
ggattacaagagtgcgccatgcctg

SEQ ID NO: 4468724 - DNA, 25 bp, Homo sapien
gagcattcgacatggcctgcgtggc

SEQ ID NO: 4468725 - DNA, 25 bp, Homo sapien
tagcctgttcacaatgggatcgtgg

SEQ ID NO: 4468726 - DNA, 25 bp, Homo sapien
gccatggagcgcagtagcctgttca

SEQ ID NO: 4468727 - DNA, 25 bp, Homo sapien
gggtcgttcgcattatccagagaat

SEQ ID NO: 4468728 - DNA, 25 bp, Homo sapien
taatgatggaactcctcctccgcac

SEQ ID NO: 4468729 - DNA, 25 bp, Homo sapien
cgtaatgatggaactcctcctccgc

SEQ ID NO: 4468730 - DNA, 25 bp, Homo sapien
gtaatgatggaactcctcctccgca

SEQ ID NO: 4468731 - DNA, 25 bp, Homo sapien
ttaaaataactagcgcaaagttaca

SEQ ID NO: 4468732 - DNA, 25 bp, Homo sapien
gccacacataggaatatggtatgat

SEQ ID NO: 4468733 - DNA, 25 bp, Homo sapien
taactagcgcaaagttacagccaca

SEQ ID NO: 4468734 - DNA, 25 bp, Homo sapien
agttacagccacacataggaatatg

SEQ ID NO: 4468735 - DNA, 25 bp, Homo sapien
caagcggtgtactacaatatctgaa

SEQ ID NO: 4468736 - DNA, 25 bp, Homo sapien
tctgttgttgatatgtctgcataat

SEQ ID NO: 4468737 - DNA, 25 bp, Homo sapien
cttattggagaagtaaagtgggtat

SEQ ID NO: 4468738 - DNA, 25 bp, Homo sapien
agtgggtatatttatctaatgcaag

SEQ ID NO: 4468739 - DNA, 25 bp, Homo sapien
ttttcttagcaagagatgacaggta

SEQ ID NO: 4468740 - DNA, 25 bp, Homo sapien
cacggtactacacaataaagctgat

SEQ ID NO: 4468741 - DNA, 25 bp, Homo sapien
tgctagaatatatgatacttcacgg

SEQ ID NO: 4468742 - DNA, 25 bp, Homo sapien
agcactggttagaataattctagaa

SEQ ID NO: 4468743 - DNA, 25 bp, Homo sapien
ccaaatccacaagttacctgagaac

SEQ ID NO: 4468744 - DNA, 25 bp, Homo sapien
gataatctaccgtcaaatctcccaa

SEQ ID NO: 4468745 - DNA, 25 bp, Homo sapien
cacaagttacctgagaacatctaca

SEQ ID NO: 4468746 - DNA, 25 bp, Homo sapien
aaaatctgataatctaccgtcaaat

SEQ ID NO: 4468747 - DNA, 25 bp, Homo sapien
aagtgatccgccctcaagtgagcca

SEQ ID NO: 4468748 - DNA, 25 bp, Homo sapien
cattaattgttagctctgggtggta

SEQ ID NO: 4468749 - DNA, 25 bp, Homo sapien
aagcagattcaaacagcaggcacgg

SEQ ID NO: 4468750 - DNA, 25 bp, Homo sapien
tcctgcgttacccaatagtctagtt

SEQ ID NO: 4468751 - DNA, 25 bp, Homo sapien
aagtacatgcactggaagagctcag

SEQ ID NO: 4468752 - DNA, 25 bp, Homo sapien
ttctaattgaataaataactccgtc

SEQ ID NO: 4468753 - DNA, 25 bp, Homo sapien
aaataactccgtcagatatgcaacg

SEQ ID NO: 4468754 - DNA, 25 bp, Homo sapien
aacgctcctcggtggcagggtcttt

SEQ ID NO: 4468755 - DNA, 25 bp, Homo sapien
tcagaacagctatctgggccacatg

SEQ ID NO: 4468756 - DNA, 25 bp, Homo sapien
agattccccatctgttgtagtagag

SEQ ID NO: 4468757 - DNA, 25 bp, Homo sapien
gggccacatgagatgactaaaccat

SEQ ID NO: 4468758 - DNA, 25 bp, Homo sapien
cgttgaagggatcctggtttccatt

SEQ ID NO: 4468759 - DNA, 25 bp, Homo sapien
caacgtgaggcctgtatggatattc

SEQ ID NO: 4468760 - DNA, 25 bp, Homo sapien
tcagaatggcaacgtgaggcctgta

SEQ ID NO: 4468761 - DNA, 25 bp, Homo sapien
ctgattgtatcagaatggcaacgtg

SEQ ID NO: 4468762 - DNA, 25 bp, Homo sapien
ttgtatcagaatggcaacgtgaggc

SEQ ID NO: 4468763 - DNA, 25 bp, Homo sapien
ggtatcttgtatggtttgttactaa

SEQ ID NO: 4468764 - DNA, 25 bp, Homo sapien
atcttgtatggtttgttactaatta

SEQ ID NO: 4468765 - DNA, 25 bp, Homo sapien
tttggtatcttgtatggtttgttac

SEQ ID NO: 4468766 - DNA, 25 bp, Homo sapien
tcttgtatggtttgttactaattat

SEQ ID NO: 4468767 - DNA, 25 bp, Homo sapien
ttgggcaagctgagcttcttccaca

SEQ ID NO: 4468768 - DNA, 25 bp, Homo sapien
ttcactaactcactcttcagcaagg

SEQ ID NO: 4468769 - DNA, 25 bp, Homo sapien
tcctctagaagtgtgtataggctcc

SEQ ID NO: 4468770 - DNA, 25 bp, Homo sapien
gaaacatccaggagagctaggtccc

SEQ ID NO: 4468771 - DNA, 25 bp, Homo sapien
catctgcagagccaccacttactgt

SEQ ID NO: 4468772 - DNA, 25 bp, Homo sapien
tgtccactcattactgaaaactctg

SEQ ID NO: 4468773 - DNA, 25 bp, Homo sapien
tatgcgaaatagctacccagtcctg

SEQ ID NO: 4468774 - DNA, 25 bp, Homo sapien
tcctgatcgactagagcactgagtg

SEQ ID NO: 4468775 - DNA, 25 bp, Homo sapien
ttacctgacaaatgtcagaggggcc

SEQ ID NO: 4468776 - DNA, 25 bp, Homo sapien
tatgacccaaacgtaattactggaa

SEQ ID NO: 4468777 - DNA, 25 bp, Homo sapien
gcctatgacccaaacgtaattactg

SEQ ID NO: 4468778 - DNA, 25 bp, Homo sapien
tgacaaatgtcagaggggcctatga

SEQ ID NO: 4468779 - DNA, 25 bp, Homo sapien
ggcatgagctactgtccctggccaa

SEQ ID NO: 4468780 - DNA, 25 bp, Homo sapien
gagctactgtccctggccaattttt

SEQ ID NO: 4468781 - DNA, 25 bp, Homo sapien
agctactgtccctggccaatttttg

SEQ ID NO: 4468782 - DNA, 25 bp, Homo sapien
catgagctactgtccctggccaatt

SEQ ID NO: 4468783 - DNA, 25 bp, Homo sapien
tcataaggacaagggacagttaacc

SEQ ID NO: 4468784 - DNA, 25 bp, Homo sapien
gatcttgcctatagagtggctcaca

SEQ ID NO: 4468785 - DNA, 25 bp, Homo sapien
cttgagttaactggtttacagggct

SEQ ID NO: 4468786 - DNA, 25 bp, Homo sapien
tatttgactgggcaatcagaaacag

SEQ ID NO: 4468787 - DNA, 25 bp, Homo sapien
gtgactgtgaattgataactcatta

SEQ ID NO: 4468788 - DNA, 25 bp, Homo sapien
gactgtgaattgataactcattacc

SEQ ID NO: 4468789 - DNA, 25 bp, Homo sapien
tgactgtgaattgataactcattac

SEQ ID NO: 4468790 - DNA, 25 bp, Homo sapien
tgtgactgtgaattgataactcatt

SEQ ID NO: 4468791 - DNA, 25 bp, Homo sapien
ttttttagttcagcagaacatattt

SEQ ID NO: 4468792 - DNA, 25 bp, Homo sapien
gctggatgctcagaggtacatttac

SEQ ID NO: 4468793 - DNA, 25 bp, Homo sapien
ttatggtcttgctttggaccaaact

SEQ ID NO: 4468794 - DNA, 25 bp, Homo sapien
acttttggttggtatgatgtggagc

SEQ ID NO: 4468795 - DNA, 25 bp, Homo sapien
tgctcctagccgctctgcgaagcgg

SEQ ID NO: 4468796 - DNA, 25 bp, Homo sapien
cgtgcggttcggcagcccgggattc

SEQ ID NO: 4468797 - DNA, 25 bp, Homo sapien
ttcgcgcgcagagagccgaaaggct

SEQ ID NO: 4468798 - DNA, 25 bp, Homo sapien
agcggagcgggctgaacgtgcggtt

SEQ ID NO: 4468799 - DNA, 25 bp, Homo sapien
cgttaactgcagagccgtcgggggc

SEQ ID NO: 4468800 - DNA, 25 bp, Homo sapien
gtcccgttaactgcagagccgtcgg

SEQ ID NO: 4468801 - DNA, 25 bp, Homo sapien
tcccgttaactgcagagccgtcggg

SEQ ID NO: 4468802 - DNA, 25 bp, Homo sapien
gctggtcccgttaactgcagagccg

SEQ ID NO: 4468803 - DNA, 25 bp, Homo sapien
atatgctccccaaatgtttcctcct

SEQ ID NO: 4468804 - DNA, 25 bp, Homo sapien
tatatgctccccaaatgtttcctcc

SEQ ID NO: 4468805 - DNA, 25 bp, Homo sapien
cagtatatgctccccaaatgtttcc

SEQ ID NO: 4468806 - DNA, 25 bp, Homo sapien
gtatatgctccccaaatgtttcctc

SEQ ID NO: 4468807 - DNA, 25 bp, Homo sapien
tcccacaacatgtttctgcagtcat

SEQ ID NO: 4468808 - DNA, 25 bp, Homo sapien
cttcccacaacatgtttctgcagtc

SEQ ID NO: 4468809 - DNA, 25 bp, Homo sapien
ttcccacaacatgtttctgcagtca

SEQ ID NO: 4468810 - DNA, 25 bp, Homo sapien
cctgtggcatctggcaagcaggaat

SEQ ID NO: 4468811 - DNA, 25 bp, Homo sapien
tccttcccctgtggcatctggcaag

SEQ ID NO: 4468812 - DNA, 25 bp, Homo sapien
cagagagcccagggagttgtaaagt

SEQ ID NO: 4468813 - DNA, 25 bp, Homo sapien
gagcccagggagttgtaaagttctc

SEQ ID NO: 4468814 - DNA, 25 bp, Homo sapien
tggagctgcagcacaataaatctga

SEQ ID NO: 4468815 - DNA, 25 bp, Homo sapien
agggaccagctgtgatcggctccaa

SEQ ID NO: 4468816 - DNA, 25 bp, Homo sapien
cttgcagagggagttgaagttcaac

SEQ ID NO: 4468817 - DNA, 25 bp, Homo sapien
caaaggatataagacagagggccct

SEQ ID NO: 4468818 - DNA, 25 bp, Homo sapien
agtcaacccaaagaagtactcctat

SEQ ID NO: 4468819 - DNA, 25 bp, Homo sapien
caaagtggggagcacaagtcaatac

SEQ ID NO: 4468820 - DNA, 25 bp, Homo sapien
agaagtactcctatcatggaaagaa

SEQ ID NO: 4468821 - DNA, 25 bp, Homo sapien
gcacaagtcaatactgtcaccagag

SEQ ID NO: 4468822 - DNA, 25 bp, Homo sapien
ccatgaccaggccagaaggcttgtg

SEQ ID NO: 4468823 - DNA, 25 bp, Homo sapien
aagtcgtcatccttcagttctccca

SEQ ID NO: 4468824 - DNA, 25 bp, Homo sapien
aggcgctttcgctgctgctcatcaa

SEQ ID NO: 4468825 - DNA, 25 bp, Homo sapien
ggcttgtgggagaccttgaacacca

SEQ ID NO: 4468826 - DNA, 25 bp, Homo sapien
atctcgccatcgctgtagaacgcac

SEQ ID NO: 4468827 - DNA, 25 bp, Homo sapien
gccatcgctgtagaacgcaccatag

SEQ ID NO: 4468828 - DNA, 25 bp, Homo sapien
atcgctgtagaacgcaccatagaag

SEQ ID NO: 4468829 - DNA, 25 bp, Homo sapien
ctgatctcgccatcgctgtagaacg

SEQ ID NO: 4468830 - DNA, 25 bp, Homo sapien
agcaatgctaacttttcctaaaatt

SEQ ID NO: 4468831 - DNA, 25 bp, Homo sapien
taaaatttgttcaggaattcttcca

SEQ ID NO: 4468832 - DNA, 25 bp, Homo sapien
tttcttcaggacttgatccagagaa

SEQ ID NO: 4468833 - DNA, 25 bp, Homo sapien
ggacttgatccagagaacctccatc

SEQ ID NO: 4468834 - DNA, 25 bp, Homo sapien
tgcatgatcttgtgcttctccctca

SEQ ID NO: 4468835 - DNA, 25 bp, Homo sapien
tcagatatgtcaggccttttattac

SEQ ID NO: 4468836 - DNA, 25 bp, Homo sapien
tctgtgcatgatcttgtgcttctcc

SEQ ID NO: 4468837 - DNA, 25 bp, Homo sapien
gcttctccctcagatatgtcaggcc

SEQ ID NO: 4468838 - DNA, 25 bp, Homo sapien
tataggcaataggtgtagcaagacc

SEQ ID NO: 4468839 - DNA, 25 bp, Homo sapien
tgaatagtgacaccggagactgggt

SEQ ID NO: 4468840 - DNA, 25 bp, Homo sapien
tagtaaaactcatatgcagctggcc

SEQ ID NO: 4468841 - DNA, 25 bp, Homo sapien
cagtcctggctttaggcatatgcac

SEQ ID NO: 4468842 - DNA, 25 bp, Homo sapien
tgaagcactcttcctactatggcta

SEQ ID NO: 4468843 - DNA, 25 bp, Homo sapien
tggtgcgcagtctctgctcgctgca

SEQ ID NO: 4468844 - DNA, 25 bp, Homo sapien
actatggctattggaaacagaatcc

SEQ ID NO: 4468845 - DNA, 25 bp, Homo sapien
atgctgtacccctcaaggatttttt

SEQ ID NO: 4468846 - DNA, 25 bp, Homo sapien
gtcagttccaacagcccaccctagt

SEQ ID NO: 4468847 - DNA, 25 bp, Homo sapien
agtgatgtatcacctaatctacggg

SEQ ID NO: 4468848 - DNA, 25 bp, Homo sapien
tagtccactcatctccgcttcagct

SEQ ID NO: 4468849 - DNA, 25 bp, Homo sapien
ggcttgtaagctgtccagtcagttc

SEQ ID NO: 4468850 - DNA, 25 bp, Homo sapien
tacgcccagctaattgcctatttct

SEQ ID NO: 4468851 - DNA, 25 bp, Homo sapien
cccagctaattgcctatttctaaat

SEQ ID NO: 4468852 - DNA, 25 bp, Homo sapien
ttctaaattttcaggtccctgtgcc

SEQ ID NO: 4468853 - DNA, 25 bp, Homo sapien
ccctgtgccctaccccagacctact

SEQ ID NO: 4468854 - DNA, 25 bp, Homo sapien
gcatatgtcaatcgcagcctagaac

SEQ ID NO: 4468855 - DNA, 25 bp, Homo sapien
cagggcatgatccatagtaggtaca

SEQ ID NO: 4468856 - DNA, 25 bp, Homo sapien
tgatgggatgcctttactccaccag

SEQ ID NO: 4468857 - DNA, 25 bp, Homo sapien
cattcgtccttgcatagtggtagac

SEQ ID NO: 4468858 - DNA, 25 bp, Homo sapien
ctaagttttggagcctcgttacata

SEQ ID NO: 4468859 - DNA, 25 bp, Homo sapien
ataatcaacccaagcctagcagctc

SEQ ID NO: 4468860 - DNA, 25 bp, Homo sapien
atcaacccaagcctagcagctcatg

SEQ ID NO: 4468861 - DNA, 25 bp, Homo sapien
gcctcgttacatagcaaatggtaat

SEQ ID NO: 4468862 - DNA, 25 bp, Homo sapien
taaatgactcatccaaggttacaca

SEQ ID NO: 4468863 - DNA, 25 bp, Homo sapien
ggttacacaacaagtagcacagtca

SEQ ID NO: 4468864 - DNA, 25 bp, Homo sapien
tatttcatagctcctcccaacaaga

SEQ ID NO: 4468865 - DNA, 25 bp, Homo sapien
tagaagcttaaaccaagtcaggctg

SEQ ID NO: 4468866 - DNA, 25 bp, Homo sapien
tcagatgtatccccctaattacctc

SEQ ID NO: 4468867 - DNA, 25 bp, Homo sapien
aggagggcttcctaattcagatgta

SEQ ID NO: 4468868 - DNA, 25 bp, Homo sapien
aattcagatgtatccccctaattac

SEQ ID NO: 4468869 - DNA, 25 bp, Homo sapien
ggagggcttcctaattcagatgtat

SEQ ID NO: 4468870 - DNA, 25 bp, Homo sapien
tctcttcacgtatatcctactgtcc

SEQ ID NO: 4468871 - DNA, 25 bp, Homo sapien
tcttctctcttcacgtatatcctac

SEQ ID NO: 4468872 - DNA, 25 bp, Homo sapien
gatatcttctctcttcacgtatatc

SEQ ID NO: 4468873 - DNA, 25 bp, Homo sapien
tctctcttcacgtatatcctactgt

SEQ ID NO: 4468874 - DNA, 25 bp, Homo sapien
gggcatgcatcctcaacctaggcaa

SEQ ID NO: 4468875 - DNA, 25 bp, Homo sapien
tgttcccttcgtgtttgactctgaa

SEQ ID NO: 4468876 - DNA, 25 bp, Homo sapien
ctgttccatatatgttcccttcgtg

SEQ ID NO: 4468877 - DNA, 25 bp, Homo sapien
ctaaattaactgagagtagtctcag

SEQ ID NO: 4468878 - DNA, 25 bp, Homo sapien
tgcgacttgtcctgctacagtggca

SEQ ID NO: 4468879 - DNA, 25 bp, Homo sapien
agctcccagccgaataaagccattc

SEQ ID NO: 4468880 - DNA, 25 bp, Homo sapien
agtcgtgtaccccacttgctcaatc

SEQ ID NO: 4468881 - DNA, 25 bp, Homo sapien
tctgttccaacctgattaccagtgc

SEQ ID NO: 4468882 - DNA, 25 bp, Homo sapien
gagttcaatggctcttgcagcttgg

SEQ ID NO: 4468883 - DNA, 25 bp, Homo sapien
ctaatgtctggcaggtactaagtac

SEQ ID NO: 4468884 - DNA, 25 bp, Homo sapien
tactaagtactcaaatcaggaggct

SEQ ID NO: 4468885 - DNA, 25 bp, Homo sapien
tgccgttcccaacagaaccaaggaa

SEQ ID NO: 4468886 - DNA, 25 bp, Homo sapien
catgcccggccactaacagcatctt

SEQ ID NO: 4468887 - DNA, 25 bp, Homo sapien
gcccggccactaacagcatcttttt

SEQ ID NO: 4468888 - DNA, 25 bp, Homo sapien
ccggccactaacagcatctttttaa

SEQ ID NO: 4468889 - DNA, 25 bp, Homo sapien
tgcccggccactaacagcatctttt

SEQ ID NO: 4468890 - DNA, 25 bp, Homo sapien
gggactacaggcacccaccaccaca

SEQ ID NO: 4468891 - DNA, 25 bp, Homo sapien
tcaagcaattctccctgcctcagct

SEQ ID NO: 4468892 - DNA, 25 bp, Homo sapien
ccctgcctcagcttcccaaatagct

SEQ ID NO: 4468893 - DNA, 25 bp, Homo sapien
ctcactacaactctgcctcccagat

SEQ ID NO: 4468894 - DNA, 25 bp, Homo sapien
gcacagggagttaacgatagggcca

SEQ ID NO: 4468895 - DNA, 25 bp, Homo sapien
tagggccaagggttagaactcagac

SEQ ID NO: 4468896 - DNA, 25 bp, Homo sapien
gacaacaggactaaaggcaacccat

SEQ ID NO: 4468897 - DNA, 25 bp, Homo sapien
tctccaggatctaaaaaatcagggc

SEQ ID NO: 4468898 - DNA, 25 bp, Homo sapien
accatccctggctgtcagctccagc

SEQ ID NO: 4468899 - DNA, 25 bp, Homo sapien
ccacccgctccagggaaaaacactg

SEQ ID NO: 4468900 - DNA, 25 bp, Homo sapien
ataacacagcttgccaccatccctg

SEQ ID NO: 4468901 - DNA, 25 bp, Homo sapien
atccctggctgtcagctccagcttc

SEQ ID NO: 4468902 - DNA, 25 bp, Homo sapien
gtcaggtgttcaggatttggaaaat

SEQ ID NO: 4468903 - DNA, 25 bp, Homo sapien
cagaggaccggtgttgggtacctgg

SEQ ID NO: 4468904 - DNA, 25 bp, Homo sapien
aggtcaggtgttcaggatttggaaa

SEQ ID NO: 4468905 - DNA, 25 bp, Homo sapien
tggcccctcagaggaccggtgttgg

SEQ ID NO: 4468906 - DNA, 25 bp, Homo sapien
tgtcctgtaatgtgcatagaccagg

SEQ ID NO: 4468907 - DNA, 25 bp, Homo sapien
gggtcaattatcctcatttataggt

SEQ ID NO: 4468908 - DNA, 25 bp, Homo sapien
caaataccagtacattggcccttag

SEQ ID NO: 4468909 - DNA, 25 bp, Homo sapien
tggcccttagtttgcagagacctaa

SEQ ID NO: 4468910 - DNA, 25 bp, Homo sapien
ccccacgggagttgactaggatgtt

SEQ ID NO: 4468911 - DNA, 25 bp, Homo sapien
gtgataatcacctaacctaacttgg

SEQ ID NO: 4468912 - DNA, 25 bp, Homo sapien
agagacagacagtgataatcaccta

SEQ ID NO: 4468913 - DNA, 25 bp, Homo sapien
cctgggtctgctaatgcattttctc

SEQ ID NO: 4468914 - DNA, 25 bp, Homo sapien
gacccctgggtctgctaatgcattt

SEQ ID NO: 4468915 - DNA, 25 bp, Homo sapien
actgcacagagtaatgagtcccctg

SEQ ID NO: 4468916 - DNA, 25 bp, Homo sapien
tgactgcacagagtaatgagtcccc

SEQ ID NO: 4468917 - DNA, 25 bp, Homo sapien
gactgcacagagtaatgagtcccct

SEQ ID NO: 4468918 - DNA, 25 bp, Homo sapien
tgcacagagtaatgagtcccctgga

SEQ ID NO: 4468919 - DNA, 25 bp, Homo sapien
ggtggggtctcagccgcatctcctt

SEQ ID NO: 4468920 - DNA, 25 bp, Homo sapien
ctgggtggggtctcagccgcatctc

SEQ ID NO: 4468921 - DNA, 25 bp, Homo sapien
ggtccttggcctgggtggggtctca

SEQ ID NO: 4468922 - DNA, 25 bp, Homo sapien
gcctgggtggggtctcagccgcatc

SEQ ID NO: 4468923 - DNA, 25 bp, Homo sapien
ggaggtcggctgtccattccgtatg

SEQ ID NO: 4468924 - DNA, 25 bp, Homo sapien
ctcaaaaattgccatgggaggtcgg

SEQ ID NO: 4468925 - DNA, 25 bp, Homo sapien
tgccatgggaggtcggctgtccatt

SEQ ID NO: 4468926 - DNA, 25 bp, Homo sapien
aattgccatgggaggtcggctgtcc

SEQ ID NO: 4468927 - DNA, 25 bp, Homo sapien
ttaagcagcgacgaactaatcctga

SEQ ID NO: 4468928 - DNA, 25 bp, Homo sapien
tagtagactgaacctgtgacagcga

SEQ ID NO: 4468929 - DNA, 25 bp, Homo sapien
tgcttttctacagcccatggtgctt

SEQ ID NO: 4468930 - DNA, 25 bp, Homo sapien
gacgcaatggcgtatctaacctcag

SEQ ID NO: 4468931 - DNA, 25 bp, Homo sapien
ctagagaagcagtgaaaagttaata

SEQ ID NO: 4468932 - DNA, 25 bp, Homo sapien
tagagaagcagtgaaaagttaataa

SEQ ID NO: 4468933 - DNA, 25 bp, Homo sapien
tcatccagtcaaggaaaggcacagg

SEQ ID NO: 4468934 - DNA, 25 bp, Homo sapien
caatggtaaatcttggagtgcggca

SEQ ID NO: 4468935 - DNA, 25 bp, Homo sapien
cagtccaaaggcagtactactctca

SEQ ID NO: 4468936 - DNA, 25 bp, Homo sapien
tgcggcatgggaacgtaaccagcaa

SEQ ID NO: 4468937 - DNA, 25 bp, Homo sapien
aattccagactgaacactccactgg

SEQ ID NO: 4468938 - DNA, 25 bp, Homo sapien
cagactgaacactccactgggcagt

SEQ ID NO: 4468939 - DNA, 25 bp, Homo sapien
ttccagactgaacactccactgggc

SEQ ID NO: 4468940 - DNA, 25 bp, Homo sapien
ccagactgaacactccactgggcag

SEQ ID NO: 4468941 - DNA, 25 bp, Homo sapien
tgctctctctgcggggttttttatt

SEQ ID NO: 4468942 - DNA, 25 bp, Homo sapien
gctctctctgcggggttttttatta

SEQ ID NO: 4468943 - DNA, 25 bp, Homo sapien
taaacaggtactgtaagaatccgga

SEQ ID NO: 4468944 - DNA, 25 bp, Homo sapien
caaatgaataaacaggtactgtaag

SEQ ID NO: 4468945 - DNA, 25 bp, Homo sapien
aatgaatgggctctggaagtactgc

SEQ ID NO: 4468946 - DNA, 25 bp, Homo sapien
gaatgaatgggctctggaagtactg

SEQ ID NO: 4468947 - DNA, 25 bp, Homo sapien
cctcttggagcctactcgtgcagta

SEQ ID NO: 4468948 - DNA, 25 bp, Homo sapien
ttcaggtctagagcttgtgctgcac

SEQ ID NO: 4468949 - DNA, 25 bp, Homo sapien
tgcatgtaaggaaacgagaggacgt

SEQ ID NO: 4468950 - DNA, 25 bp, Homo sapien
gtatggagacagtaactctgcctta

SEQ ID NO: 4468951 - DNA, 25 bp, Homo sapien
cctcagcatcagatctcttgataaa

SEQ ID NO: 4468952 - DNA, 25 bp, Homo sapien
ttagacgccagcagcatgggttggt

SEQ ID NO: 4468953 - DNA, 25 bp, Homo sapien
gtggagcagagccaacctgcaaaat

SEQ ID NO: 4468954 - DNA, 25 bp, Homo sapien
tgtgctgggctggttaaggccgatg

SEQ ID NO: 4468955 - DNA, 25 bp, Homo sapien
caaggctccctcctagagagaaagt

SEQ ID NO: 4468956 - DNA, 25 bp, Homo sapien
gaagccccagctatcatggcagtga

SEQ ID NO: 4468957 - DNA, 25 bp, Homo sapien
gaatcccgaaaatacaggcagacag

SEQ ID NO: 4468958 - DNA, 25 bp, Homo sapien
tggcacaggttttgatcatcagcat

SEQ ID NO: 4468959 - DNA, 25 bp, Homo sapien
tagtccaaagcactgaactcggtgt

SEQ ID NO: 4468960 - DNA, 25 bp, Homo sapien
tgtcctatgttgtgcagaaagctcc

SEQ ID NO: 4468961 - DNA, 25 bp, Homo sapien
caaggccctcctatgagcatgacag

SEQ ID NO: 4468962 - DNA, 25 bp, Homo sapien
gatctattcacaggtcccacaagga

SEQ ID NO: 4468963 - DNA, 25 bp, Homo sapien
taaatacaagccagtctttccagtc

SEQ ID NO: 4468964 - DNA, 25 bp, Homo sapien
ggctcaggctacttctcctcaagga

SEQ ID NO: 4468965 - DNA, 25 bp, Homo sapien
caggctggtcagttatacaaattgc

SEQ ID NO: 4468966 - DNA, 25 bp, Homo sapien
aaatggctccatcggtaactcaagc

SEQ ID NO: 4468967 - DNA, 25 bp, Homo sapien
cggtttccgggagtcggcggcgatg

SEQ ID NO: 4468968 - DNA, 25 bp, Homo sapien
gaggttggctatgtgaccaggcaac

SEQ ID NO: 4468969 - DNA, 25 bp, Homo sapien
tcatcaccgagtgccgggccgacag

SEQ ID NO: 4468970 - DNA, 25 bp, Homo sapien
tttcctcaatgtgtcgggcagcccc

SEQ ID NO: 4468971 - DNA, 25 bp, Homo sapien
tggaagtgctgttcacccggtcatt

SEQ ID NO: 4468972 - DNA, 25 bp, Homo sapien
cacttggtgcgcaaatggcctatcg

SEQ ID NO: 4468973 - DNA, 25 bp, Homo sapien
taagcacgtcgtttcttagcacggc

SEQ ID NO: 4468974 - DNA, 25 bp, Homo sapien
tgcagggcctcttaacacagtagag

SEQ ID NO: 4468975 - DNA, 25 bp, Homo sapien
ctcatctgatttggcttgtagtgcc

SEQ ID NO: 4468976 - DNA, 25 bp, Homo sapien
atgatttgacctttatggaataatc

SEQ ID NO: 4468977 - DNA, 25 bp, Homo sapien
ttacctaccacaggcttcttgcctg

SEQ ID NO: 4468978 - DNA, 25 bp, Homo sapien
cctaccacaggcttcttgcctgcaa

SEQ ID NO: 4468979 - DNA, 25 bp, Homo sapien
tcttacctaccacaggcttcttgcc

SEQ ID NO: 4468980 - DNA, 25 bp, Homo sapien
ctaccacaggcttcttgcctgcaac

SEQ ID NO: 4468981 - DNA, 25 bp, Homo sapien
acctaccacaggcttcttgcctgca

SEQ ID NO: 4468982 - DNA, 25 bp, Homo sapien
ttcttacctaccacaggcttcttgc

SEQ ID NO: 4468983 - DNA, 25 bp, Homo sapien
gttgcaggcaagaagcctgtggtag

SEQ ID NO: 4468984 - DNA, 25 bp, Homo sapien
ggcaagaagcctgtggtaggtaaga

SEQ ID NO: 4468985 - DNA, 25 bp, Homo sapien
ttgcaggcaagaagcctgtggtagg

SEQ ID NO: 4468986 - DNA, 25 bp, Homo sapien
caggcaagaagcctgtggtaggtaa

SEQ ID NO: 4468987 - DNA, 25 bp, Homo sapien
tgcaggcaagaagcctgtggtaggt

SEQ ID NO: 4468988 - DNA, 25 bp, Homo sapien
gcaagaagcctgtggtaggtaagaa

SEQ ID NO: 4468989 - DNA, 25 bp, Homo sapien
ggcactacaagccaaatcagatgag

SEQ ID NO: 4468990 - DNA, 25 bp, Homo sapien
gattattccataaaggtcaaatcat

SEQ ID NO: 4468991 - DNA, 25 bp, Homo sapien
gaagctgtccaaaatgatttgacct

SEQ ID NO: 4468992 - DNA, 25 bp, Homo sapien
gatttgacctttatggaataatcaa

SEQ ID NO: 4468993 - DNA, 25 bp, Homo sapien
gcaggcttcttctcctctgtagtag

SEQ ID NO: 4468994 - DNA, 25 bp, Homo sapien
ctcatctgatttggcttgtagtgcc

SEQ ID NO: 4468995 - DNA, 25 bp, Homo sapien
ggtctttattcaaaagaagctgtcc

SEQ ID NO: 4468996 - DNA, 25 bp, Homo sapien
tgtagtaggtttcttctctgcaggc

SEQ ID NO: 4468997 - DNA, 25 bp, Homo sapien
ggacagcttcttttgaataaagacc

SEQ ID NO: 4468998 - DNA, 25 bp, Homo sapien
gaagcctgcagagaagaaacctact

SEQ ID NO: 4468999 - DNA, 25 bp, Homo sapien
ggcactacaagccaaatcagatgag

SEQ ID NO: 4469000 - DNA, 25 bp, Homo sapien
ggtcaaatcattttggacagcttct

SEQ ID NO: 4469001 - DNA, 25 bp, Homo sapien
tactacagaggagaagaagcctgct

SEQ ID NO: 4469002 - DNA, 25 bp, Homo sapien
gattattccataaaggtcaaatcat

SEQ ID NO: 4469003 - DNA, 25 bp, Homo sapien
actctgcgatggatcttcttgctat

SEQ ID NO: 4469004 - DNA, 25 bp, Homo sapien
gcgatggatcttcttgctataaaaa

SEQ ID NO: 4469005 - DNA, 25 bp, Homo sapien
tgcgatggatcttcttgctataaaa

SEQ ID NO: 4469006 - DNA, 25 bp, Homo sapien
gatggatcttcttgctataaaaaag

SEQ ID NO: 4469007 - DNA, 25 bp, Homo sapien
tctgcgatggatcttcttgctataa

SEQ ID NO: 4469008 - DNA, 25 bp, Homo sapien
atggatcttcttgctataaaaaagc

SEQ ID NO: 4469009 - DNA, 25 bp, Homo sapien
aagaatggtgttccggcgcatggtc

SEQ ID NO: 4469010 - DNA, 25 bp, Homo sapien
tcaacatgattctcaagtttttcag

SEQ ID NO: 4469011 - DNA, 25 bp, Homo sapien
tcctggcctggcgaagaatggtgtt

SEQ ID NO: 4469012 - DNA, 25 bp, Homo sapien
ggttcttctttaggactctgcgatg

SEQ ID NO: 4469013 - DNA, 25 bp, Homo sapien
gcatatgggtttagcttcaacatga

SEQ ID NO: 4469014 - DNA, 25 bp, Homo sapien
ccggcgcatggtctttgcatatggg

SEQ ID NO: 4469015 - DNA, 25 bp, Homo sapien
ctgaaaaacttgagaatcatgttga

SEQ ID NO: 4469016 - DNA, 25 bp, Homo sapien
catgttgaagctaaacccatatgca

SEQ ID NO: 4469017 - DNA, 25 bp, Homo sapien
catcgcagagtcctaaagaagaacc

SEQ ID NO: 4469018 - DNA, 25 bp, Homo sapien
gagtcctaaagaagaacccactgaa

SEQ ID NO: 4469019 - DNA, 25 bp, Homo sapien
catatgcaaagaccatgcgccggaa

SEQ ID NO: 4469020 - DNA, 25 bp, Homo sapien
ggaacaccattcttcgccaggccag

SEQ ID NO: 4469021 - DNA, 25 bp, Homo sapien
ttttatagcaagaagatccatcgca

SEQ ID NO: 4469022 - DNA, 25 bp, Homo sapien
ttttttatagcaagaagatccatcg

SEQ ID NO: 4469023 - DNA, 25 bp, Homo sapien
gcttttttatagcaagaagatccat

SEQ ID NO: 4469024 - DNA, 25 bp, Homo sapien
tatagcaagaagatccatcgcagag

SEQ ID NO: 4469025 - DNA, 25 bp, Homo sapien
tttttatagcaagaagatccatcgc

SEQ ID NO: 4469026 - DNA, 25 bp, Homo sapien
tttatagcaagaagatccatcgcag

SEQ ID NO: 4469027 - DNA, 25 bp, Homo sapien
gtggtgctcgaagggctctttggat

SEQ ID NO: 4469028 - DNA, 25 bp, Homo sapien
cgtggtgctcgaagggctctttgga

SEQ ID NO: 4469029 - DNA, 25 bp, Homo sapien
atccaaagagcccttcgagcaccac

SEQ ID NO: 4469030 - DNA, 25 bp, Homo sapien
tccaaagagcccttcgagcaccacg

SEQ ID NO: 4469031 - DNA, 25 bp, Homo sapien
gtgctcgaagggctctttggatctc

SEQ ID NO: 4469032 - DNA, 25 bp, Homo sapien
gctcgaagggctctttggatctctg

SEQ ID NO: 4469033 - DNA, 25 bp, Homo sapien
gtggtgctcgaagggctctttggat

SEQ ID NO: 4469034 - DNA, 25 bp, Homo sapien
cgaagggctctttggatctctgggc

SEQ ID NO: 4469035 - DNA, 25 bp, Homo sapien
cgtggtgctcgaagggctctttgga

SEQ ID NO: 4469036 - DNA, 25 bp, Homo sapien
ctcgaagggctctttggatctctgg

SEQ ID NO: 4469037 - DNA, 25 bp, Homo sapien
ccagagatccaaagagcccttcgag

SEQ ID NO: 4469038 - DNA, 25 bp, Homo sapien
cagagatccaaagagcccttcgagc

SEQ ID NO: 4469039 - DNA, 25 bp, Homo sapien
tccaaagagcccttcgagcaccacg

SEQ ID NO: 4469040 - DNA, 25 bp, Homo sapien
atccaaagagcccttcgagcaccac

SEQ ID NO: 4469041 - DNA, 25 bp, Homo sapien
agcccagagatccaaagagcccttc

SEQ ID NO: 4469042 - DNA, 25 bp, Homo sapien
gagatccaaagagcccttcgagcac

SEQ ID NO: 4469043 - DNA, 25 bp, Homo sapien
cacattaaggattagctatactgcc

SEQ ID NO: 4469044 - DNA, 25 bp, Homo sapien
cagaaacacggaccttaagtggaat

SEQ ID NO: 4469045 - DNA, 25 bp, Homo sapien
gctgagtagacttgcagagtatacc

SEQ ID NO: 4469046 - DNA, 25 bp, Homo sapien
cagagccataaacagcagttaggat

SEQ ID NO: 4469047 - DNA, 25 bp, Homo sapien
gattcaaacccaagtaatcgggctc

SEQ ID NO: 4469048 - DNA, 25 bp, Homo sapien
gaggcatagacctacaaagtgagca

SEQ ID NO: 4469049 - DNA, 25 bp, Homo sapien
ctgcgctggatacggcgacggtttc

SEQ ID NO: 4469050 - DNA, 25 bp, Homo sapien
acggcgacggtttctcattttgcct

SEQ ID NO: 4469051 - DNA, 25 bp, Homo sapien
gatacggcgacggtttctcattttg

SEQ ID NO: 4469052 - DNA, 25 bp, Homo sapien
tacggcgacggtttctcattttgcc

SEQ ID NO: 4469053 - DNA, 25 bp, Homo sapien
gctggatacggcgacggtttctcat

SEQ ID NO: 4469054 - DNA, 25 bp, Homo sapien
ccctgcgctggatacggcgacggtt

SEQ ID NO: 4469055 - DNA, 25 bp, Homo sapien
atgagaaaccgtcgccgtatccagc

SEQ ID NO: 4469056 - DNA, 25 bp, Homo sapien
aggcaaaatgagaaaccgtcgccgt

SEQ ID NO: 4469057 - DNA, 25 bp, Homo sapien
gcaaaatgagaaaccgtcgccgtat

SEQ ID NO: 4469058 - DNA, 25 bp, Homo sapien
aaccgtcgccgtatccagcgcaggg

SEQ ID NO: 4469059 - DNA, 25 bp, Homo sapien
aaatgagaaaccgtcgccgtatcca

SEQ ID NO: 4469060 - DNA, 25 bp, Homo sapien
caaaatgagaaaccgtcgccgtatc

SEQ ID NO: 4469061 - DNA, 25 bp, Homo sapien
ggtatactctgcaagtctactcagc

SEQ ID NO: 4469062 - DNA, 25 bp, Homo sapien
gatgagattccacttaaggtccgtg

SEQ ID NO: 4469063 - DNA, 25 bp, Homo sapien
actgctcactttgtaggtctatgcc

SEQ ID NO: 4469064 - DNA, 25 bp, Homo sapien
cagagcccgattacttgggtttgaa

SEQ ID NO: 4469065 - DNA, 25 bp, Homo sapien
gctaatccttaatgtgtgagagaac

SEQ ID NO: 4469066 - DNA, 25 bp, Homo sapien
gatttatggctgaaagagttgcacc

SEQ ID NO: 4469067 - DNA, 25 bp, Homo sapien
aataagtcctgtttgtccgcaaagt

SEQ ID NO: 4469068 - DNA, 25 bp, Homo sapien
aatagtcttcaacttccgtctgcaa

SEQ ID NO: 4469069 - DNA, 25 bp, Homo sapien
ggaaccgccaaactgaactgcgcgc

SEQ ID NO: 4469070 - DNA, 25 bp, Homo sapien
cgccccaatgtgagagcggtaccgg

SEQ ID NO: 4469071 - DNA, 25 bp, Homo sapien
aaaagtcctctgctgcgcagttcag

SEQ ID NO: 4469072 - DNA, 25 bp, Homo sapien
aataaaagtcctctgctgcgcagtt

SEQ ID NO: 4469073 - DNA, 25 bp, Homo sapien
aagtcctctgctgcgcagttcagcc

SEQ ID NO: 4469074 - DNA, 25 bp, Homo sapien
taaaagtcctctgctgcgcagttca

SEQ ID NO: 4469075 - DNA, 25 bp, Homo sapien
cacactcaggagtcagtcatcactt

SEQ ID NO: 4469076 - DNA, 25 bp, Homo sapien
tgaaacgcagaaccacatgtgaaaa

SEQ ID NO: 4469077 - DNA, 25 bp, Homo sapien
tatctctcccgttattcacactcag

SEQ ID NO: 4469078 - DNA, 25 bp, Homo sapien
gaaaaacagaactacattatctctc

SEQ ID NO: 4469079 - DNA, 25 bp, Homo sapien
catagagaaatgggtctttacggat

SEQ ID NO: 4469080 - DNA, 25 bp, Homo sapien
tagagaaatgggtctttacggattc

SEQ ID NO: 4469081 - DNA, 25 bp, Homo sapien
atagagaaatgggtctttacggatt

SEQ ID NO: 4469082 - DNA, 25 bp, Homo sapien
cactttttccactatgaatactatg

SEQ ID NO: 4469083 - DNA, 25 bp, Homo sapien
gcctttgctgatcaactgcacttgg

SEQ ID NO: 4469084 - DNA, 25 bp, Homo sapien
gctgatcaactgcacttggacatca

SEQ ID NO: 4469085 - DNA, 25 bp, Homo sapien
tttttccactatgaatactatgtca

SEQ ID NO: 4469086 - DNA, 25 bp, Homo sapien
taaagcaagtggtccaacattttcg

SEQ ID NO: 4469087 - DNA, 25 bp, Homo sapien
cttcccaactggtaaagcaagtggt

SEQ ID NO: 4469088 - DNA, 25 bp, Homo sapien
tcttcaatatgacttgtttcttcct

SEQ ID NO: 4469089 - DNA, 25 bp, Homo sapien
ggtccaacattttcgccagtagaga

SEQ ID NO: 4469090 - DNA, 25 bp, Homo sapien
tcttcaaatgggtcatattaggatt

SEQ ID NO: 4469091 - DNA, 25 bp, Homo sapien
aatgggtcatattaggattgtgagc

SEQ ID NO: 4469092 - DNA, 25 bp, Homo sapien
atgggtcatattaggattgtgagcc

SEQ ID NO: 4469093 - DNA, 25 bp, Homo sapien
tcaaatgggtcatattaggattgtg

SEQ ID NO: 4469094 - DNA, 25 bp, Homo sapien
gctcctagccaacaagtaccttcag

SEQ ID NO: 4469095 - DNA, 25 bp, Homo sapien
tgttgtttgttgtgataagctcagc

SEQ ID NO: 4469096 - DNA, 25 bp, Homo sapien
caggatctgaactgtcacatcttac

SEQ ID NO: 4469097 - DNA, 25 bp, Homo sapien
tataagacaattcctgtaatgctgt

SEQ ID NO: 4469098 - DNA, 25 bp, Homo sapien
acacactctctagagagagcactca

SEQ ID NO: 4469099 - DNA, 25 bp, Homo sapien
cacacacactctctagagagagcac

SEQ ID NO: 4469100 - DNA, 25 bp, Homo sapien
cacactctctagagagagcactcac

SEQ ID NO: 4469101 - DNA, 25 bp, Homo sapien
cacacactctctagagagagcactc

SEQ ID NO: 4469102 - DNA, 25 bp, Homo sapien
tcaaaattacattgtcagagctaca

SEQ ID NO: 4469103 - DNA, 25 bp, Homo sapien
ggcacaactcaaaattacattgtca

SEQ ID NO: 4469104 - DNA, 25 bp, Homo sapien
gcacaactcaaaattacattgtcag

SEQ ID NO: 4469105 - DNA, 25 bp, Homo sapien
caactcaaaattacattgtcagagc

SEQ ID NO: 4469106 - DNA, 25 bp, Homo sapien
tgatgtcttttcttgtgtaaatttt

SEQ ID NO: 4469107 - DNA, 25 bp, Homo sapien
tccaggaaatatccaaagcgatcgc

SEQ ID NO: 4469108 - DNA, 25 bp, Homo sapien
caaagcgatcgcagtttgtgatgct

SEQ ID NO: 4469109 - DNA, 25 bp, Homo sapien
ggacttaaagagctcatactgggca

SEQ ID NO: 4469110 - DNA, 25 bp, Homo sapien
tgattgtatcatccaaggcagagga

SEQ ID NO: 4469111 - DNA, 25 bp, Homo sapien
cagttctctgtagagatgattcaaa

SEQ ID NO: 4469112 - DNA, 25 bp, Homo sapien
ggctctcctgattccactttaatat

SEQ ID NO: 4469113 - DNA, 25 bp, Homo sapien
tgggctctcctgattccactttaat

SEQ ID NO: 4469114 - DNA, 25 bp, Homo sapien
tttcagttctctgtagagatgattc

SEQ ID NO: 4469115 - DNA, 25 bp, Homo sapien
tcgagccattcagtgacaccagtcc

SEQ ID NO: 4469116 - DNA, 25 bp, Homo sapien
gcagattttgcttccaggggctcga

SEQ ID NO: 4469117 - DNA, 25 bp, Homo sapien
ttccaggggctcgagccattcagtg

SEQ ID NO: 4469118 - DNA, 25 bp, Homo sapien
gaaattcctgaacaagttcaacagc

SEQ ID NO: 4469119 - DNA, 25 bp, Homo sapien
gaatcaccaaatccatccagcttat

SEQ ID NO: 4469120 - DNA, 25 bp, Homo sapien
agaatcaccaaatccatccagctta

SEQ ID NO: 4469121 - DNA, 25 bp, Homo sapien
ttttgtagaatcaccaaatccatcc

SEQ ID NO: 4469122 - DNA, 25 bp, Homo sapien
tttttttgtagaatcaccaaatcca

SEQ ID NO: 4469123 - DNA, 25 bp, Homo sapien
tgacggaacgatcgactgcagcagt

SEQ ID NO: 4469124 - DNA, 25 bp, Homo sapien
cattttgcaccacagttgctcagca

SEQ ID NO: 4469125 - DNA, 25 bp, Homo sapien
ctgcagcagtgtcatgcttcaaggt

SEQ ID NO: 4469126 - DNA, 25 bp, Homo sapien
gatcactccgaactttgaaaagacg

SEQ ID NO: 4469127 - DNA, 25 bp, Homo sapien
ccacgttgtagactctggatgatca

SEQ ID NO: 4469128 - DNA, 25 bp, Homo sapien
caatgtgaaacacttcaccaagtct

SEQ ID NO: 4469129 - DNA, 25 bp, Homo sapien
ccatggctgtatatcaccacgttgt

SEQ ID NO: 4469130 - DNA, 25 bp, Homo sapien
accaagtcttggtatgaaatcacac

SEQ ID NO: 4469131 - DNA, 25 bp, Homo sapien
tgagcttacttagtaaactgttact

SEQ ID NO: 4469132 - DNA, 25 bp, Homo sapien
gtaaactgttacttccactatggag

SEQ ID NO: 4469133 - DNA, 25 bp, Homo sapien
tagtaaactgttacttccactatgg

SEQ ID NO: 4469134 - DNA, 25 bp, Homo sapien
gatgaatgagcttacttagtaaact

SEQ ID NO: 4469135 - DNA, 25 bp, Homo sapien
tttgaactggaatagtcccactgag

SEQ ID NO: 4469136 - DNA, 25 bp, Homo sapien
aactggaatagtcccactgagagaa

SEQ ID NO: 4469137 - DNA, 25 bp, Homo sapien
gcatttgaactggaatagtcccact

SEQ ID NO: 4469138 - DNA, 25 bp, Homo sapien
ttgtccaaaccaatttccaaaagca

SEQ ID NO: 4469139 - DNA, 25 bp, Homo sapien
atgattcaaagatgcaagttcctga

SEQ ID NO: 4469140 - DNA, 25 bp, Homo sapien
caaatgattcaaagatgcaagttcc

SEQ ID NO: 4469141 - DNA, 25 bp, Homo sapien
tgattcaaagatgcaagttcctgac

SEQ ID NO: 4469142 - DNA, 25 bp, Homo sapien
aatgattcaaagatgcaagttcctg

SEQ ID NO: 4469143 - DNA, 25 bp, Homo sapien
tcaactttctgaagtttctgaatgg

SEQ ID NO: 4469144 - DNA, 25 bp, Homo sapien
caactttctgaagtttctgaatggg

SEQ ID NO: 4469145 - DNA, 25 bp, Homo sapien
ccatggaggattggtaccatgatcc

SEQ ID NO: 4469146 - DNA, 25 bp, Homo sapien
accatgatcccctttgtataccaaa

SEQ ID NO: 4469147 - DNA, 25 bp, Homo sapien
taagtttgtttacgccactccctga

SEQ ID NO: 4469148 - DNA, 25 bp, Homo sapien
tatatacagatacagttgtccgttg

SEQ ID NO: 4469149 - DNA, 25 bp, Homo sapien
ctaatatttctagaatatggtggag

SEQ ID NO: 4469150 - DNA, 25 bp, Homo sapien
taaagaaaagaggagttcatgttga

SEQ ID NO: 4469151 - DNA, 25 bp, Homo sapien
tttggacacgataaacctgttcttg

SEQ ID NO: 4469152 - DNA, 25 bp, Homo sapien
ggcatgcaactgactaatatttcta

SEQ ID NO: 4469153 - DNA, 25 bp, Homo sapien
ttacagcagttggtctgactggcag

SEQ ID NO: 4469154 - DNA, 25 bp, Homo sapien
tttacagcagttggtctgactggca

SEQ ID NO: 4469155 - DNA, 25 bp, Homo sapien
ctttgatataagttctttacagcag

SEQ ID NO: 4469156 - DNA, 25 bp, Homo sapien
aaaatgtgttgctcatcaagaggat

SEQ ID NO: 4469157 - DNA, 25 bp, Homo sapien
tctgaaggaataacaaatacagaga

SEQ ID NO: 4469158 - DNA, 25 bp, Homo sapien
ttttctcctaatccatcatttcctt

SEQ ID NO: 4469159 - DNA, 25 bp, Homo sapien
tcttctctgaaggaataacaaatac

SEQ ID NO: 4469160 - DNA, 25 bp, Homo sapien
cctttctggctatactttccactct

SEQ ID NO: 4469161 - DNA, 25 bp, Homo sapien
ccatttagtgaagtcttcatgtgat

SEQ ID NO: 4469162 - DNA, 25 bp, Homo sapien
cagccatttagtgaagtcttcatgt

SEQ ID NO: 4469163 - DNA, 25 bp, Homo sapien
tacagccatttagtgaagtcttcat

SEQ ID NO: 4469164 - DNA, 25 bp, Homo sapien
ctacagccatttagtgaagtcttca

SEQ ID NO: 4469165 - DNA, 25 bp, Homo sapien
cactcagttgccaaactgtcttaat

SEQ ID NO: 4469166 - DNA, 25 bp, Homo sapien
tcactcagttgccaaactgtcttaa

SEQ ID NO: 4469167 - DNA, 25 bp, Homo sapien
gatggtctatgggtgagctgtcact

SEQ ID NO: 4469168 - DNA, 25 bp, Homo sapien
ttcagatggtctatgggtgagctgt

SEQ ID NO: 4469169 - DNA, 25 bp, Homo sapien
taatgttcagcccaaactggtaatc

SEQ ID NO: 4469170 - DNA, 25 bp, Homo sapien
tatgaaactgctaggccaaagaatg

SEQ ID NO: 4469171 - DNA, 25 bp, Homo sapien
ggtactacctcccacagaagctgta

SEQ ID NO: 4469172 - DNA, 25 bp, Homo sapien
gatttacttggcatgagcaacagaa

SEQ ID NO: 4469173 - DNA, 25 bp, Homo sapien
tcttccaggctaccgtttagtgtta

SEQ ID NO: 4469174 - DNA, 25 bp, Homo sapien
tcacttgaaatgcacctggctgcag

SEQ ID NO: 4469175 - DNA, 25 bp, Homo sapien
tggctgcaggtaaccatgttagtaa

SEQ ID NO: 4469176 - DNA, 25 bp, Homo sapien
taaccatgttagtaaagaatatcct

SEQ ID NO: 4469177 - DNA, 25 bp, Homo sapien
cttatagaggacttcatcagcacac

SEQ ID NO: 4469178 - DNA, 25 bp, Homo sapien
ttatagaggacttcatcagcacact

SEQ ID NO: 4469179 - DNA, 25 bp, Homo sapien
caaagagactaaaatgtgaacataa

SEQ ID NO: 4469180 - DNA, 25 bp, Homo sapien
ggagcttcataagagaatcttcagg

SEQ ID NO: 4469181 - DNA, 25 bp, Homo sapien
tgagggtttccatacattgctgttt

SEQ ID NO: 4469182 - DNA, 25 bp, Homo sapien
tgtagaagaaccaaattcaggcatt

SEQ ID NO: 4469183 - DNA, 25 bp, Homo sapien
cacatgcaaatggttacggagatcg

SEQ ID NO: 4469184 - DNA, 25 bp, Homo sapien
tatttctccataagggcaatcagag

SEQ ID NO: 4469185 - DNA, 25 bp, Homo sapien
gaactccacgtgaggatgtccagtg

SEQ ID NO: 4469186 - DNA, 25 bp, Homo sapien
ggaactgtggaatatggctgctaat

SEQ ID NO: 4469187 - DNA, 25 bp, Homo sapien
gaaggtgcgagaccaaatcttacca

SEQ ID NO: 4469188 - DNA, 25 bp, Homo sapien
cattcggcaagcaattattaagcac

SEQ ID NO: 4469189 - DNA, 25 bp, Homo sapien
taagtcatgagatatagccaggaac

SEQ ID NO: 4469190 - DNA, 25 bp, Homo sapien
tgcaactatgcatcaagaaatgcca

SEQ ID NO: 4469191 - DNA, 25 bp, Homo sapien
gaggaaaagccaaccactataccaa

SEQ ID NO: 4469192 - DNA, 25 bp, Homo sapien
attattaagcgtccactaggtggca

SEQ ID NO: 4469193 - DNA, 25 bp, Homo sapien
aggactggatgctgatgaaccaggc

SEQ ID NO: 4469194 - DNA, 25 bp, Homo sapien
actaggtggcagcactagaggactg

SEQ ID NO: 4469195 - DNA, 25 bp, Homo sapien
agaggactggatgctgatgaaccag

SEQ ID NO: 4469196 - DNA, 25 bp, Homo sapien
tgcatgctggagactggccacaaat

SEQ ID NO: 4469197 - DNA, 25 bp, Homo sapien
taatccaagtcctgtgtgcatgctg

SEQ ID NO: 4469198 - DNA, 25 bp, Homo sapien
tatgcatacctcagacaggtcttag

SEQ ID NO: 4469199 - DNA, 25 bp, Homo sapien
gagagtaagacgtcacacacaaatg

SEQ ID NO: 4469200 - DNA, 25 bp, Homo sapien
catcagcacgctgctcaatgtctgc

SEQ ID NO: 4469201 - DNA, 25 bp, Homo sapien
tgaatttcccgctcagtgcggggca

SEQ ID NO: 4469202 - DNA, 25 bp, Homo sapien
cacagtgggggcagtatacaggctt

SEQ ID NO: 4469203 - DNA, 25 bp, Homo sapien
gcacgctgctcaatgtctgccgctg

SEQ ID NO: 4469204 - DNA, 25 bp, Homo sapien
gctggggaggtttcataatcatggc

SEQ ID NO: 4469205 - DNA, 25 bp, Homo sapien
tggggaggtttcataatcatggcag

SEQ ID NO: 4469206 - DNA, 25 bp, Homo sapien
tggctggggaggtttcataatcatg

SEQ ID NO: 4469207 - DNA, 25 bp, Homo sapien
catggctggggaggtttcataatca

SEQ ID NO: 4469208 - DNA, 25 bp, Homo sapien
attcccatggtccccgctctggaca

SEQ ID NO: 4469209 - DNA, 25 bp, Homo sapien
cctgacagtgaggagcagaacctac

SEQ ID NO: 4469210 - DNA, 25 bp, Homo sapien
gctgatggcgaagacaccgatgctg

SEQ ID NO: 4469211 - DNA, 25 bp, Homo sapien
tgatgttccgctaggaccctgcaag

SEQ ID NO: 4469212 - DNA, 25 bp, Homo sapien
caaaaggctaatgcccctgacagtg

SEQ ID NO: 4469213 - DNA, 25 bp, Homo sapien
tccagccagccagccggcctgctag

SEQ ID NO: 4469214 - DNA, 25 bp, Homo sapien
cagccagccggcctgctagtcattt

SEQ ID NO: 4469215 - DNA, 25 bp, Homo sapien
cagccagccagccggcctgctagtc

SEQ ID NO: 4469216 - DNA, 25 bp, Homo sapien
gccagccagccggcctgctagtcat

SEQ ID NO: 4469217 - DNA, 25 bp, Homo sapien
tattctggaaataggcacccaggca

SEQ ID NO: 4469218 - DNA, 25 bp, Homo sapien
gagccggatcttcaaaggtcttgga

SEQ ID NO: 4469219 - DNA, 25 bp, Homo sapien
cttggacttatcagggaacagagcc

SEQ ID NO: 4469220 - DNA, 25 bp, Homo sapien
caacttaggagggtcaggctcttga

SEQ ID NO: 4469221 - DNA, 25 bp, Homo sapien
tcagagcccgggcattccaaggaga

SEQ ID NO: 4469222 - DNA, 25 bp, Homo sapien
gcaggtagatatgggcctttgcacc

SEQ ID NO: 4469223 - DNA, 25 bp, Homo sapien
ggcctttgcacctgcggcgctcacc

SEQ ID NO: 4469224 - DNA, 25 bp, Homo sapien
gaagcaggtagatatgggcctttgc

SEQ ID NO: 4469225 - DNA, 25 bp, Homo sapien
ttgcctgggggctgccagaatgacc

SEQ ID NO: 4469226 - DNA, 25 bp, Homo sapien
ggggctgccagaatgaccagtcagc

SEQ ID NO: 4469227 - DNA, 25 bp, Homo sapien
cctgggggctgccagaatgaccagt

SEQ ID NO: 4469228 - DNA, 25 bp, Homo sapien
ggctgccagaatgaccagtcagcca

SEQ ID NO: 4469229 - DNA, 25 bp, Homo sapien
tctaaaggagacacgctgtcccgct

SEQ ID NO: 4469230 - DNA, 25 bp, Homo sapien
gccctggtcagcacatggacactgc

SEQ ID NO: 4469231 - DNA, 25 bp, Homo sapien
ctttctaaaggagacacgctgtccc

SEQ ID NO: 4469232 - DNA, 25 bp, Homo sapien
ctaaaggagacacgctgtcccgctg

SEQ ID NO: 4469233 - DNA, 25 bp, Homo sapien
gcagcgcctccttctacaggtgaag

SEQ ID NO: 4469234 - DNA, 25 bp, Homo sapien
tccttctacaggtgaaggcagaagg

SEQ ID NO: 4469235 - DNA, 25 bp, Homo sapien
cctccttctacaggtgaaggcagaa

SEQ ID NO: 4469236 - DNA, 25 bp, Homo sapien
gggatgggaggagagatgcttgttc

SEQ ID NO: 4469237 - DNA, 25 bp, Homo sapien
cctcgaaacgggtgcaggttgctgc

SEQ ID NO: 4469238 - DNA, 25 bp, Homo sapien
gaagcgcaaagtgcgggcctcgaaa

SEQ ID NO: 4469239 - DNA, 25 bp, Homo sapien
tgctcgaccagggtaacaacccctg

SEQ ID NO: 4469240 - DNA, 25 bp, Homo sapien
cagggaccttgctcgaccagggtaa

SEQ ID NO: 4469241 - DNA, 25 bp, Homo sapien
cctttccgcagacggggagttgacg

SEQ ID NO: 4469242 - DNA, 25 bp, Homo sapien
gccctttccgcagacggggagttga

SEQ ID NO: 4469243 - DNA, 25 bp, Homo sapien
tttccgcagacggggagttgacgcc

SEQ ID NO: 4469244 - DNA, 25 bp, Homo sapien
ctgccctttccgcagacggggagtt

SEQ ID NO: 4469245 - DNA, 25 bp, Homo sapien
cctcgcacacggcctgcgcccggac

SEQ ID NO: 4469246 - DNA, 25 bp, Homo sapien
ctccttcctcgcacacggcctgcgc

SEQ ID NO: 4469247 - DNA, 25 bp, Homo sapien
cttcctcgcacacggcctgcgcccg

SEQ ID NO: 4469248 - DNA, 25 bp, Homo sapien
tccttcctcgcacacggcctgcgcc

SEQ ID NO: 4469249 - DNA, 25 bp, Homo sapien
ttcttaacctaatagaatatcgcag

SEQ ID NO: 4469250 - DNA, 25 bp, Homo sapien
caatgagctcattctcagtagttcc

SEQ ID NO: 4469251 - DNA, 25 bp, Homo sapien
ccacaagtcactgcatataaattca

SEQ ID NO: 4469252 - DNA, 25 bp, Homo sapien
atagaatatcgcagacaaccccaca

SEQ ID NO: 4469253 - DNA, 25 bp, Homo sapien
ccccatgccccggtgctttgctgca

SEQ ID NO: 4469254 - DNA, 25 bp, Homo sapien
gctgcacagttgagaatactctctg

SEQ ID NO: 4469255 - DNA, 25 bp, Homo sapien
tgctttgctgcacagttgagaatac

SEQ ID NO: 4469256 - DNA, 25 bp, Homo sapien
ttgctgcacagttgagaatactctc

SEQ ID NO: 4469257 - DNA, 25 bp, Homo sapien
cctgaggaaacacctagctttagca

SEQ ID NO: 4469258 - DNA, 25 bp, Homo sapien
tggagcctgaggaaacacctagctt

SEQ ID NO: 4469259 - DNA, 25 bp, Homo sapien
gactggagcctgaggaaacacctag

SEQ ID NO: 4469260 - DNA, 25 bp, Homo sapien
aaacacctagctttagcactgagcc

SEQ ID NO: 4469261 - DNA, 25 bp, Homo sapien
ctctcaatgaggaggtactgggggc

SEQ ID NO: 4469262 - DNA, 25 bp, Homo sapien
tctcaatgaggaggtactgggggcc

SEQ ID NO: 4469263 - DNA, 25 bp, Homo sapien
ctcaatgaggaggtactgggggccc

SEQ ID NO: 4469264 - DNA, 25 bp, Homo sapien
acttagccgggtgtggcagtgcgca

SEQ ID NO: 4469265 - DNA, 25 bp, Homo sapien
cctgtagtcccagctactggggagg

SEQ ID NO: 4469266 - DNA, 25 bp, Homo sapien
caaaacttagccgggtgtggcagtg

SEQ ID NO: 4469267 - DNA, 25 bp, Homo sapien
aaaacttagccgggtgtggcagtgc

SEQ ID NO: 4469268 - DNA, 25 bp, Homo sapien
tccccatccaggtcctgaatcaggt

SEQ ID NO: 4469269 - DNA, 25 bp, Homo sapien
gtcctgaatcaggtccaggctgaga

SEQ ID NO: 4469270 - DNA, 25 bp, Homo sapien
atcagtaggtcaaggaagagggttc

SEQ ID NO: 4469271 - DNA, 25 bp, Homo sapien
ccatcagtaggtcaaggaagagggt

SEQ ID NO: 4469272 - DNA, 25 bp, Homo sapien
ctgggcctggcgactgtgagccgct

SEQ ID NO: 4469273 - DNA, 25 bp, Homo sapien
gactgtgagccgctgggaacaggaa

SEQ ID NO: 4469274 - DNA, 25 bp, Homo sapien
actgtgagccgctgggaacaggaac

SEQ ID NO: 4469275 - DNA, 25 bp, Homo sapien
ggccgtgcactcaatcaaagcctga

SEQ ID NO: 4469276 - DNA, 25 bp, Homo sapien
cactcaatcaaagcctgaggctgga

SEQ ID NO: 4469277 - DNA, 25 bp, Homo sapien
ggtgggaaggccgtgcactcaatca

SEQ ID NO: 4469278 - DNA, 25 bp, Homo sapien
ggaaggccgtgcactcaatcaaagc

SEQ ID NO: 4469279 - DNA, 25 bp, Homo sapien
gcctgggcaacatagggagacccca

SEQ ID NO: 4469280 - DNA, 25 bp, Homo sapien
tttgggagactgagatgggagcatt

SEQ ID NO: 4469281 - DNA, 25 bp, Homo sapien
tgggagactgagatgggagcattgc

SEQ ID NO: 4469282 - DNA, 25 bp, Homo sapien
ttgagcccaggagttggagttcagc

SEQ ID NO: 4469283 - DNA, 25 bp, Homo sapien
agtaagccaagatcatacctgtact

SEQ ID NO: 4469284 - DNA, 25 bp, Homo sapien
aagatcatacctgtactccagactg

SEQ ID NO: 4469285 - DNA, 25 bp, Homo sapien
ctccagactgggcaacagagcgaga

SEQ ID NO: 4469286 - DNA, 25 bp, Homo sapien
gccaagatcatacctgtactccaga

SEQ ID NO: 4469287 - DNA, 25 bp, Homo sapien
tgcaagcagctgacagcagactggt

SEQ ID NO: 4469288 - DNA, 25 bp, Homo sapien
tgacagcagactggtctaggatgtc

SEQ ID NO: 4469289 - DNA, 25 bp, Homo sapien
caagcagctgacagcagactggtct

SEQ ID NO: 4469290 - DNA, 25 bp, Homo sapien
cagctgacagcagactggtctagga

SEQ ID NO: 4469291 - DNA, 25 bp, Homo sapien
tgctccctcccttgccttctcgggc

SEQ ID NO: 4469292 - DNA, 25 bp, Homo sapien
ctcctctggttctggttcctgctcc

SEQ ID NO: 4469293 - DNA, 25 bp, Homo sapien
cctgctccctcccttgccttctcgg

SEQ ID NO: 4469294 - DNA, 25 bp, Homo sapien
ttcctgctccctcccttgccttctc

SEQ ID NO: 4469295 - DNA, 25 bp, Homo sapien
taggacaggctcttagagaagctcc

SEQ ID NO: 4469296 - DNA, 25 bp, Homo sapien
tccacagtaggtcagttttgactcc

SEQ ID NO: 4469297 - DNA, 25 bp, Homo sapien
gctccatgaagttatcaagaaccta

SEQ ID NO: 4469298 - DNA, 25 bp, Homo sapien
aaaaacctggatgtaggacaggctc

SEQ ID NO: 4469299 - DNA, 25 bp, Homo sapien
gatgccaagcgactttctctggtga

SEQ ID NO: 4469300 - DNA, 25 bp, Homo sapien
accttttgggactccattgtgggca

SEQ ID NO: 4469301 - DNA, 25 bp, Homo sapien
tctctggtgagccaagtgtgacccc

SEQ ID NO: 4469302 - DNA, 25 bp, Homo sapien
gggctcactctgacgcctggatata

SEQ ID NO: 4469303 - DNA, 25 bp, Homo sapien
gcctgcaagtgcatccaggtcattc

SEQ ID NO: 4469304 - DNA, 25 bp, Homo sapien
agagagcccaattgtccctgtcatc

SEQ ID NO: 4469305 - DNA, 25 bp, Homo sapien
ggttccaatgcagggcaagagaaac

SEQ ID NO: 4469306 - DNA, 25 bp, Homo sapien
tgtaaactcccaacttgcctgcaag

SEQ ID NO: 4469307 - DNA, 25 bp, Homo sapien
ctcaacaacttctaagactgtgaat

SEQ ID NO: 4469308 - DNA, 25 bp, Homo sapien
aagactgtgaattcttgctggctgc

SEQ ID NO: 4469309 - DNA, 25 bp, Homo sapien
tctaagactgtgaattcttgctggc

SEQ ID NO: 4469310 - DNA, 25 bp, Homo sapien
aacttctaagactgtgaattcttgc

SEQ ID NO: 4469311 - DNA, 25 bp, Homo sapien
tttgctgggcagtaatggcaaaatc

SEQ ID NO: 4469312 - DNA, 25 bp, Homo sapien
ctttgctgggcagtaatggcaaaat

SEQ ID NO: 4469313 - DNA, 25 bp, Homo sapien
ctgagagtggccgttgctccccgaa

SEQ ID NO: 4469314 - DNA, 25 bp, Homo sapien
gaaagatcggactgagacacttcct

SEQ ID NO: 4469315 - DNA, 25 bp, Homo sapien
ttcgcgctgcgctctctgagagtgg

SEQ ID NO: 4469316 - DNA, 25 bp, Homo sapien
tggaaccaggtactgttcgcgctgc

SEQ ID NO: 4469317 - DNA, 25 bp, Homo sapien
ctgattgttgcgcaaacaaggtttc

SEQ ID NO: 4469318 - DNA, 25 bp, Homo sapien
gattgttgcgcaaacaaggtttcaa

SEQ ID NO: 4469319 - DNA, 25 bp, Homo sapien
attgttgcgcaaacaaggtttcaag

SEQ ID NO: 4469320 - DNA, 25 bp, Homo sapien
tgattgttgcgcaaacaaggtttca

SEQ ID NO: 4469321 - DNA, 25 bp, Homo sapien
gcctcccatcatatgccagtctaga

SEQ ID NO: 4469322 - DNA, 25 bp, Homo sapien
tgttctcctcaaacgcacactgagg

SEQ ID NO: 4469323 - DNA, 25 bp, Homo sapien
ggagcgccgcggagtcattggctgc

SEQ ID NO: 4469324 - DNA, 25 bp, Homo sapien
ggtcccagcgaggtctggcgaggca

SEQ ID NO: 4469325 - DNA, 25 bp, Homo sapien
ctcggacgcttcgtgcgccgaggct

SEQ ID NO: 4469326 - DNA, 25 bp, Homo sapien
acgcttcgtgcgccgaggctgccga

SEQ ID NO: 4469327 - DNA, 25 bp, Homo sapien
gccctcggacgcttcgtgcgccgag

SEQ ID NO: 4469328 - DNA, 25 bp, Homo sapien
gctgccctcggacgcttcgtgcgcc

SEQ ID NO: 4469329 - DNA, 25 bp, Homo sapien
cgcaggatccgaaaggcaggcttgt

SEQ ID NO: 4469330 - DNA, 25 bp, Homo sapien
cttcaaaagttgtgcggctggtcca

SEQ ID NO: 4469331 - DNA, 25 bp, Homo sapien
gcgcgaacccctaaatgtgtctgga

SEQ ID NO: 4469332 - DNA, 25 bp, Homo sapien
gatttgcatgcacgaaaggccaacg

SEQ ID NO: 4469333 - DNA, 25 bp, Homo sapien
gccgggaacacgcgcacgccgagcc

SEQ ID NO: 4469334 - DNA, 25 bp, Homo sapien
gggaacacgcgcacgccgagccgca

SEQ ID NO: 4469335 - DNA, 25 bp, Homo sapien
gccgcagggcgacaacatgagggag

SEQ ID NO: 4469336 - DNA, 25 bp, Homo sapien
ccacatgaagctccgccgcggagcg

SEQ ID NO: 4469337 - DNA, 25 bp, Homo sapien
ccgcgcacagcctgtcgtcgaaggg

SEQ ID NO: 4469338 - DNA, 25 bp, Homo sapien
gcgcgggtcgcagccccacatgaag

SEQ ID NO: 4469339 - DNA, 25 bp, Homo sapien
gatatcctttggcgccaggggtggg

SEQ ID NO: 4469340 - DNA, 25 bp, Homo sapien
gggaccacacgacttcgccaaagtc

SEQ ID NO: 4469341 - DNA, 25 bp, Homo sapien
gccccgagcgtttggacctgaacat

SEQ ID NO: 4469342 - DNA, 25 bp, Homo sapien
gctgcccaagctcccatcctcgtcg

SEQ ID NO: 4469343 - DNA, 25 bp, Homo sapien
gctaccgggcggacttcggagcggc

SEQ ID NO: 4469344 - DNA, 25 bp, Homo sapien
cgcagtcactctcgggcagccagcc

SEQ ID NO: 4469345 - DNA, 25 bp, Homo sapien
tctcgcagtcactctcgggcagcca

SEQ ID NO: 4469346 - DNA, 25 bp, Homo sapien
cgtctcgcagtcactctcgggcagc

SEQ ID NO: 4469347 - DNA, 25 bp, Homo sapien
gtcactctcgggcagccagcccggg

SEQ ID NO: 4469348 - DNA, 25 bp, Homo sapien
cggcgtcccgctccgaaaagagaca

SEQ ID NO: 4469349 - DNA, 25 bp, Homo sapien
gcgtcccgctccgaaaagagacagc

SEQ ID NO: 4469350 - DNA, 25 bp, Homo sapien
tcccgctccgaaaagagacagcagg

SEQ ID NO: 4469351 - DNA, 25 bp, Homo sapien
gggtcgctggcgtcccggggcgcgc

SEQ ID NO: 4469352 - DNA, 25 bp, Homo sapien
gctccagcagcagcagccgcgagcg

SEQ ID NO: 4469353 - DNA, 25 bp, Homo sapien
tccagcagcagcagccgcgagcgcg

SEQ ID NO: 4469354 - DNA, 25 bp, Homo sapien
tgctccagcagcagcagccgcgagc

SEQ ID NO: 4469355 - DNA, 25 bp, Homo sapien
ctgctccagcagcagcagccgcgag

SEQ ID NO: 4469356 - DNA, 25 bp, Homo sapien
cgtgtccagcgagcgctccttgagc

SEQ ID NO: 4469357 - DNA, 25 bp, Homo sapien
agcgtgtccagcgagcgctccttga

SEQ ID NO: 4469358 - DNA, 25 bp, Homo sapien
gcttcagcagcgagtacgtgacggt

SEQ ID NO: 4469359 - DNA, 25 bp, Homo sapien
gcgagtacgtgacggttttgagttc

SEQ ID NO: 4469360 - DNA, 25 bp, Homo sapien
ccgcagagccggctgaagtggtagg

SEQ ID NO: 4469361 - DNA, 25 bp, Homo sapien
gcagcacacggtagggccgtcggcg

SEQ ID NO: 4469362 - DNA, 25 bp, Homo sapien
tcgggccagcgaaagaggcggccga

SEQ ID NO: 4469363 - DNA, 25 bp, Homo sapien
acggcgtgctgcaggtcgggccagc

SEQ ID NO: 4469364 - DNA, 25 bp, Homo sapien
cacttgatgtgtgtgctgggacacc

SEQ ID NO: 4469365 - DNA, 25 bp, Homo sapien
gccttgagataaagttgccacttga

SEQ ID NO: 4469366 - DNA, 25 bp, Homo sapien
gacccgcagtgtcacagagagaagg

SEQ ID NO: 4469367 - DNA, 25 bp, Homo sapien
tcccctcggccggtctgaggcgcct

SEQ ID NO: 4469368 - DNA, 25 bp, Homo sapien
gaaaagagtacatagaaagcctggc

SEQ ID NO: 4469369 - DNA, 25 bp, Homo sapien
tccagtgtactttgctcgctagcgg

SEQ ID NO: 4469370 - DNA, 25 bp, Homo sapien
tcctaaattgggactggagtgacca

SEQ ID NO: 4469371 - DNA, 25 bp, Homo sapien
tggtagttcacacccaatgacctgg

SEQ ID NO: 4469372 - DNA, 25 bp, Homo sapien
gagacgcagaaaaggagctcctggc

SEQ ID NO: 4469373 - DNA, 25 bp, Homo sapien
gagaacttttagagcaccgcaggcc

SEQ ID NO: 4469374 - DNA, 25 bp, Homo sapien
taattcctatagtcctggcctggga

SEQ ID NO: 4469375 - DNA, 25 bp, Homo sapien
tccccgggcgcaatttggataatag

SEQ ID NO: 4469376 - DNA, 25 bp, Homo sapien
acacttggtgggtgagaccaaaggt

SEQ ID NO: 4469377 - DNA, 25 bp, Homo sapien
gcaaggtgggcactcaggtgggaca

SEQ ID NO: 4469378 - DNA, 25 bp, Homo sapien
attacctcaggtgggcaaggtgggc

SEQ ID NO: 4469379 - DNA, 25 bp, Homo sapien
acttggtgggtgagaccaaaggtca

SEQ ID NO: 4469380 - DNA, 25 bp, Homo sapien
cattcttcggacgtaccatatttca

SEQ ID NO: 4469381 - DNA, 25 bp, Homo sapien
gaatgatattccattcttcggacgt

SEQ ID NO: 4469382 - DNA, 25 bp, Homo sapien
tgctggacttcgttctttttcatgg

SEQ ID NO: 4469383 - DNA, 25 bp, Homo sapien
tgttgtagcacgttttggtgctgga

SEQ ID NO: 4469384 - DNA, 25 bp, Homo sapien
tttgtgtctctatgggtttgcccat

SEQ ID NO: 4469385 - DNA, 25 bp, Homo sapien
tgtgtctctatgggtttgcccattc

SEQ ID NO: 4469386 - DNA, 25 bp, Homo sapien
ttgtgtctctatgggtttgcccatt

SEQ ID NO: 4469387 - DNA, 25 bp, Homo sapien
aatataccattcagtggtttttgag

SEQ ID NO: 4469388 - DNA, 25 bp, Homo sapien
tataccattcagtggtttttgagta

SEQ ID NO: 4469389 - DNA, 25 bp, Homo sapien
aaaatataccattcagtggtttttg

SEQ ID NO: 4469390 - DNA, 25 bp, Homo sapien
ggtttttgagtatattcacagtgtt

SEQ ID NO: 4469391 - DNA, 25 bp, Homo sapien
tgtggacacagacaactgggatgag

SEQ ID NO: 4469392 - DNA, 25 bp, Homo sapien
tcagaaagcctgcaattccttaggg

SEQ ID NO: 4469393 - DNA, 25 bp, Homo sapien
caggagctaggtatcgagccagaac

SEQ ID NO: 4469394 - DNA, 25 bp, Homo sapien
cagaacgcgctcactaaatgtggac

SEQ ID NO: 4469395 - DNA, 25 bp, Homo sapien
tcaaagttacttccaacaaagtcaa

SEQ ID NO: 4469396 - DNA, 25 bp, Homo sapien
aaagtcaaagctctgaggtttagaa

SEQ ID NO: 4469397 - DNA, 25 bp, Homo sapien
aagtcaaagctctgaggtttagaaa

SEQ ID NO: 4469398 - DNA, 25 bp, Homo sapien
caccccggcttttccagctcaaagt

SEQ ID NO: 4469399 - DNA, 25 bp, Homo sapien
ggagacagccgagagtagggaggtg

SEQ ID NO: 4469400 - DNA, 25 bp, Homo sapien
ggcttgtactcgtcgcgaggagaca

SEQ ID NO: 4469401 - DNA, 25 bp, Homo sapien
ccagtggcttgtactcgtcgcgagg

SEQ ID NO: 4469402 - DNA, 25 bp, Homo sapien
actcgtcgcgaggagacagccgaga

SEQ ID NO: 4469403 - DNA, 25 bp, Homo sapien
ggctaactgacaaaacctcagggcg

SEQ ID NO: 4469404 - DNA, 25 bp, Homo sapien
gctgagctatttgaccaccggcaag

SEQ ID NO: 4469405 - DNA, 25 bp, Homo sapien
cagggcgatgatccttgacattcaa

SEQ ID NO: 4469406 - DNA, 25 bp, Homo sapien
gggtcctacaagcaactagtgcaat

SEQ ID NO: 4469407 - DNA, 25 bp, Homo sapien
taccagcaatgggtgttgtccccgt

SEQ ID NO: 4469408 - DNA, 25 bp, Homo sapien
cactgagctgctagtttgacaagcc

SEQ ID NO: 4469409 - DNA, 25 bp, Homo sapien
acaatccaggactggctcgggtggc

SEQ ID NO: 4469410 - DNA, 25 bp, Homo sapien
tgacaagccgatgccttttgggaca

SEQ ID NO: 4469411 - DNA, 25 bp, Homo sapien
gcagtgatgagggagttggtagcct

SEQ ID NO: 4469412 - DNA, 25 bp, Homo sapien
ggtagcctccgtttcagtgtaagac

SEQ ID NO: 4469413 - DNA, 25 bp, Homo sapien
gaattcacccggagcagtgatgagg

SEQ ID NO: 4469414 - DNA, 25 bp, Homo sapien
tgtaagacaatgtggaatcggacag

SEQ ID NO: 4469415 - DNA, 25 bp, Homo sapien
catacagactgttcttaaccccaaa

SEQ ID NO: 4469416 - DNA, 25 bp, Homo sapien
aacaccagggactgaaacattggca

SEQ ID NO: 4469417 - DNA, 25 bp, Homo sapien
gaagtcaaaaagtcttccaccaagc

SEQ ID NO: 4469418 - DNA, 25 bp, Homo sapien
cgcagctgtccccttcgataaattt

SEQ ID NO: 4469419 - DNA, 25 bp, Homo sapien
gacagaggactccaaaccacggttc

SEQ ID NO: 4469420 - DNA, 25 bp, Homo sapien
tctcaaggaaagtttgattcaggta

SEQ ID NO: 4469421 - DNA, 25 bp, Homo sapien
cctatgaccagcttctaactgcagg

SEQ ID NO: 4469422 - DNA, 25 bp, Homo sapien
ttcaggtattcctccggatgtaggg

SEQ ID NO: 4469423 - DNA, 25 bp, Homo sapien
cagaactccgggagatggaaggcca

SEQ ID NO: 4469424 - DNA, 25 bp, Homo sapien
tccccaaggtttgtccagtagtggc

SEQ ID NO: 4469425 - DNA, 25 bp, Homo sapien
aaggctctcgggatcggcagacccc

SEQ ID NO: 4469426 - DNA, 25 bp, Homo sapien
gacactgagggtaacaaggctctcg

SEQ ID NO: 4469427 - DNA, 25 bp, Homo sapien
tctcagagtctgttagatgagggtg

SEQ ID NO: 4469428 - DNA, 25 bp, Homo sapien
gatgagggtgttgttggacgagaac

SEQ ID NO: 4469429 - DNA, 25 bp, Homo sapien
actctcagagtctgttagatgaggg

SEQ ID NO: 4469430 - DNA, 25 bp, Homo sapien
tgttggacgagaacacacttggtcc

SEQ ID NO: 4469431 - DNA, 25 bp, Homo sapien
tcagaacacactgaatggactgaac

SEQ ID NO: 4469432 - DNA, 25 bp, Homo sapien
aacacactgaatggactgaaccaca

SEQ ID NO: 4469433 - DNA, 25 bp, Homo sapien
agaacacactgaatggactgaacca

SEQ ID NO: 4469434 - DNA, 25 bp, Homo sapien
acactgaatggactgaaccacacac

SEQ ID NO: 4469435 - DNA, 25 bp, Homo sapien
gatgcaggccgccaatgtatagtga

SEQ ID NO: 4469436 - DNA, 25 bp, Homo sapien
cccctgatgatgcaggccgccaatg

SEQ ID NO: 4469437 - DNA, 25 bp, Homo sapien
tgcaggccgccaatgtatagtgagg

SEQ ID NO: 4469438 - DNA, 25 bp, Homo sapien
aacctgccggttcccctgatgatgc

SEQ ID NO: 4469439 - DNA, 25 bp, Homo sapien
aaaaaatcccaatgcccagtctagc

SEQ ID NO: 4469440 - DNA, 25 bp, Homo sapien
cagtctagccccaaccatttttgga

SEQ ID NO: 4469441 - DNA, 25 bp, Homo sapien
cacaggattgatgtgcaaagagggt

SEQ ID NO: 4469442 - DNA, 25 bp, Homo sapien
tggagaaccaatgatttggaccaac

SEQ ID NO: 4469443 - DNA, 25 bp, Homo sapien
tttgggctgcaaagggcctaggctc

SEQ ID NO: 4469444 - DNA, 25 bp, Homo sapien
cactaccgtcggaggtggagaagta

SEQ ID NO: 4469445 - DNA, 25 bp, Homo sapien
gctccaggcaaacagaacttatatg

SEQ ID NO: 4469446 - DNA, 25 bp, Homo sapien
catgtgccaagtgcctacaccatgc

SEQ ID NO: 4469447 - DNA, 25 bp, Homo sapien
catagaccagaatagaacgcagcca

SEQ ID NO: 4469448 - DNA, 25 bp, Homo sapien
gagaccaggtgtccaactcacaagc

SEQ ID NO: 4469449 - DNA, 25 bp, Homo sapien
taatgctggatgtccacaggactgg

SEQ ID NO: 4469450 - DNA, 25 bp, Homo sapien
accaagctgggtgactagagaaggc

SEQ ID NO: 4469451 - DNA, 25 bp, Homo sapien
tggccaacctttacccactgggctg

SEQ ID NO: 4469452 - DNA, 25 bp, Homo sapien
tatttccagccggaaggcagaggga

SEQ ID NO: 4469453 - DNA, 25 bp, Homo sapien
agtgttactctaaagccaggctctg

SEQ ID NO: 4469454 - DNA, 25 bp, Homo sapien
cctccagggatctcagaaagtcatg

SEQ ID NO: 4469455 - DNA, 25 bp, Homo sapien
tgattcttcaacacggcagtggccc

SEQ ID NO: 4469456 - DNA, 25 bp, Homo sapien
ctgcctggcaccgtcctgtgaacaa

SEQ ID NO: 4469457 - DNA, 25 bp, Homo sapien
gtgagtccatgagaacctgcctggc

SEQ ID NO: 4469458 - DNA, 25 bp, Homo sapien
tctgctggatcctcaaactggtggt

SEQ ID NO: 4469459 - DNA, 25 bp, Homo sapien
tgttaaacggaatagcaggatttca

SEQ ID NO: 4469460 - DNA, 25 bp, Homo sapien
aacggaatagcaggatttcattaag

SEQ ID NO: 4469461 - DNA, 25 bp, Homo sapien
aatatccctgttaaacggaatagca

SEQ ID NO: 4469462 - DNA, 25 bp, Homo sapien
ccctgttaaacggaatagcaggatt

SEQ ID NO: 4469463 - DNA, 25 bp, Homo sapien
ccagagtgtcagagctaagcaggac

SEQ ID NO: 4469464 - DNA, 25 bp, Homo sapien
cctccccagagtgtcagagctaagc

SEQ ID NO: 4469465 - DNA, 25 bp, Homo sapien
gtgtcagagctaagcaggacctcca

SEQ ID NO: 4469466 - DNA, 25 bp, Homo sapien
agagctaagcaggacctccaagaga

SEQ ID NO: 4469467 - DNA, 25 bp, Homo sapien
aggcactgaactactgccctcatgc

SEQ ID NO: 4469468 - DNA, 25 bp, Homo sapien
ctgtgtgagcagaatgcggcgctca

SEQ ID NO: 4469469 - DNA, 25 bp, Homo sapien
agcagaatgcggcgctcagggcagc

SEQ ID NO: 4469470 - DNA, 25 bp, Homo sapien
tccaggcactgaactactgccctca

SEQ ID NO: 4469471 - DNA, 25 bp, Homo sapien
agagcctaccccggtgcccaggatg

SEQ ID NO: 4469472 - DNA, 25 bp, Homo sapien
ttcgcggctcggtggacattctggc

SEQ ID NO: 4469473 - DNA, 25 bp, Homo sapien
aggatgcccagcgcattccatgcca

SEQ ID NO: 4469474 - DNA, 25 bp, Homo sapien
cagcgcattccatgccactctgttg

SEQ ID NO: 4469475 - DNA, 25 bp, Homo sapien
aatgccatcgagtatcctagtatcc

SEQ ID NO: 4469476 - DNA, 25 bp, Homo sapien
gccatcgagtatcctagtatccttt

SEQ ID NO: 4469477 - DNA, 25 bp, Homo sapien
gtggtaaatgccatcgagtatccta

SEQ ID NO: 4469478 - DNA, 25 bp, Homo sapien
gagtatcctagtatccttttggtca

SEQ ID NO: 4469479 - DNA, 25 bp, Homo sapien
tgcccaagtgccttctagaactgtt

SEQ ID NO: 4469480 - DNA, 25 bp, Homo sapien
ggcatgctatgttttccatgatcca

SEQ ID NO: 4469481 - DNA, 25 bp, Homo sapien
gaactcgatgatggcaatgcccaag

SEQ ID NO: 4469482 - DNA, 25 bp, Homo sapien
cagccggcttctatttggtctttta

SEQ ID NO: 4469483 - DNA, 25 bp, Homo sapien
gctgcccagcaattgaaggtgtgtg

SEQ ID NO: 4469484 - DNA, 25 bp, Homo sapien
tggtaccgcccacctgagttggctt

SEQ ID NO: 4469485 - DNA, 25 bp, Homo sapien
cctgacagagtagggttaggctatt

SEQ ID NO: 4469486 - DNA, 25 bp, Homo sapien
tgaaatcccttgtcactgactcggg

SEQ ID NO: 4469487 - DNA, 25 bp, Homo sapien
gcgggacaagcacagggaccgccgc

SEQ ID NO: 4469488 - DNA, 25 bp, Homo sapien
agggaccgccgcgttattctgggtg

SEQ ID NO: 4469489 - DNA, 25 bp, Homo sapien
caagcacagggaccgccgcgttatt

SEQ ID NO: 4469490 - DNA, 25 bp, Homo sapien
acagggaccgccgcgttattctggg

SEQ ID NO: 4469491 - DNA, 25 bp, Homo sapien
cctgaggtaggtcgtagaagatgct

SEQ ID NO: 4469492 - DNA, 25 bp, Homo sapien
cctggtcgtacaccgcatagaggcg

SEQ ID NO: 4469493 - DNA, 25 bp, Homo sapien
cgaacaccttgatggagtagccggg

SEQ ID NO: 4469494 - DNA, 25 bp, Homo sapien
ccttggcgaagctgatgcggacgct

SEQ ID NO: 4469495 - DNA, 25 bp, Homo sapien
tgtctgggcattaatatctcaaaaa

SEQ ID NO: 4469496 - DNA, 25 bp, Homo sapien
gaatactttattatcgagtgactgg

SEQ ID NO: 4469497 - DNA, 25 bp, Homo sapien
gaattataagccaaagtgcgtcttt

SEQ ID NO: 4469498 - DNA, 25 bp, Homo sapien
actggtattagctttttgtctgggc

SEQ ID NO: 4469499 - DNA, 25 bp, Homo sapien
cacatagtaccccagagagtccaag

SEQ ID NO: 4469500 - DNA, 25 bp, Homo sapien
agagtccaaggaggtcaagttgaaa

SEQ ID NO: 4469501 - DNA, 25 bp, Homo sapien
caggtctcacatagtaccccagaga

SEQ ID NO: 4469502 - DNA, 25 bp, Homo sapien
ccccagagagtccaaggaggtcaag

SEQ ID NO: 4469503 - DNA, 25 bp, Homo sapien
ctcagggcagcgacgtgggatggtg

SEQ ID NO: 4469504 - DNA, 25 bp, Homo sapien
ccctcagggcagcgacgtgggatgg

SEQ ID NO: 4469505 - DNA, 25 bp, Homo sapien
cctcagggcagcgacgtgggatggt

SEQ ID NO: 4469506 - DNA, 25 bp, Homo sapien
ccgggtaggcgggggtgcagcagct

SEQ ID NO: 4469507 - DNA, 25 bp, Homo sapien
ggtaggcgggggtgcagcagctaaa

SEQ ID NO: 4469508 - DNA, 25 bp, Homo sapien
taggcgggggtgcagcagctaaatg

SEQ ID NO: 4469509 - DNA, 25 bp, Homo sapien
acaccgggtaggcgggggtgcagca

SEQ ID NO: 4469510 - DNA, 25 bp, Homo sapien
caggccaaccgctgaggtgatggca

SEQ ID NO: 4469511 - DNA, 25 bp, Homo sapien
cagcagcgtgcaggaaggtcctgag

SEQ ID NO: 4469512 - DNA, 25 bp, Homo sapien
ccactgtgtgccagcgctccggcct

SEQ ID NO: 4469513 - DNA, 25 bp, Homo sapien
ggtcccatgaccaccaaacatggtg

SEQ ID NO: 4469514 - DNA, 25 bp, Homo sapien
gtcagcacggacacggacaaactgc

SEQ ID NO: 4469515 - DNA, 25 bp, Homo sapien
tgaaaagcaccactgcaaagatgag

SEQ ID NO: 4469516 - DNA, 25 bp, Homo sapien
ggtggttcagcatatggccactgag

SEQ ID NO: 4469517 - DNA, 25 bp, Homo sapien
actgcctgtgctcccggtggttcag

SEQ ID NO: 4469518 - DNA, 25 bp, Homo sapien
agaaggctttggcagtcctcccctt

SEQ ID NO: 4469519 - DNA, 25 bp, Homo sapien
tggagaaatgtagccagttccagct

SEQ ID NO: 4469520 - DNA, 25 bp, Homo sapien
tgtggacagcaacatgttgggaaag

SEQ ID NO: 4469521 - DNA, 25 bp, Homo sapien
agttccagctcccccatagctgctt

SEQ ID NO: 4469522 - DNA, 25 bp, Homo sapien
gcataggaagttgttggtgcctatg

SEQ ID NO: 4469523 - DNA, 25 bp, Homo sapien
aagcataggaagttgttggtgccta

SEQ ID NO: 4469524 - DNA, 25 bp, Homo sapien
ctggaagcataggaagttgttggtg

SEQ ID NO: 4469525 - DNA, 25 bp, Homo sapien
ggaagcataggaagttgttggtgcc

SEQ ID NO: 4469526 - DNA, 25 bp, Homo sapien
aactcattgttggcctttatggacc

SEQ ID NO: 4469527 - DNA, 25 bp, Homo sapien
tacatgtcgacagcaattccttgat

SEQ ID NO: 4469528 - DNA, 25 bp, Homo sapien
attccttgatattcaggctgtccac

SEQ ID NO: 4469529 - DNA, 25 bp, Homo sapien
gagggcccacatccctcgagttcta

SEQ ID NO: 4469530 - DNA, 25 bp, Homo sapien
ctttcacctgggctcccttcaccac

SEQ ID NO: 4469531 - DNA, 25 bp, Homo sapien
ttcacctgggctcccttcaccactg

SEQ ID NO: 4469532 - DNA, 25 bp, Homo sapien
ccttaaccttgtccactttcacctg

SEQ ID NO: 4469533 - DNA, 25 bp, Homo sapien
tccactttcacctgggctcccttca

SEQ ID NO: 4469534 - DNA, 25 bp, Homo sapien
tgatgagctcagtgataccgatgac

SEQ ID NO: 4469535 - DNA, 25 bp, Homo sapien
cacgcatcgctaagtacacccattt

SEQ ID NO: 4469536 - DNA, 25 bp, Homo sapien
tccttcagtttagaacacgcatcgc

SEQ ID NO: 4469537 - DNA, 25 bp, Homo sapien
tttatccagtgttgaggccaagctg

SEQ ID NO: 4469538 - DNA, 25 bp, Homo sapien
ttctccagcattgctacaatctcag

SEQ ID NO: 4469539 - DNA, 25 bp, Homo sapien
atggaggcagacacctgtcgggcca

SEQ ID NO: 4469540 - DNA, 25 bp, Homo sapien
ctgtcgggccaccaacatgcctgag

SEQ ID NO: 4469541 - DNA, 25 bp, Homo sapien
gagagccaaaaccagccctaattct

SEQ ID NO: 4469542 - DNA, 25 bp, Homo sapien
tctgcgttatccagtagctgctgct

SEQ ID NO: 4469543 - DNA, 25 bp, Homo sapien
ctgcgttatccagtagctgctgctg

SEQ ID NO: 4469544 - DNA, 25 bp, Homo sapien
tggtctgcgttatccagtagctgct

SEQ ID NO: 4469545 - DNA, 25 bp, Homo sapien
atctggtctgcgttatccagtagct

SEQ ID NO: 4469546 - DNA, 25 bp, Homo sapien
tgcgctgacttgtcgttactgaggc

SEQ ID NO: 4469547 - DNA, 25 bp, Homo sapien
tcgggagtgcgctgacttgtcgtta

SEQ ID NO: 4469548 - DNA, 25 bp, Homo sapien
tcatccctgttattcgggagtgcgc

SEQ ID NO: 4469549 - DNA, 25 bp, Homo sapien
cctgttattcgggagtgcgctgact

SEQ ID NO: 4469550 - DNA, 25 bp, Homo sapien
gggaacttatgagggtcttggatcc

SEQ ID NO: 4469551 - DNA, 25 bp, Homo sapien
ttttgccaaccacaagtgctgctgg

SEQ ID NO: 4469552 - DNA, 25 bp, Homo sapien
tgctgctgggaacttatgagggtct

SEQ ID NO: 4469553 - DNA, 25 bp, Homo sapien
cttggttatttttgccaaccacaag

SEQ ID NO: 4469554 - DNA, 25 bp, Homo sapien
tatccaagaaactagcccagagcac

SEQ ID NO: 4469555 - DNA, 25 bp, Homo sapien
ccttaagggtatacgtgatggagac

SEQ ID NO: 4469556 - DNA, 25 bp, Homo sapien
gaaagaatctaaggctggaagcgtc

SEQ ID NO: 4469557 - DNA, 25 bp, Homo sapien
gggctaaaacggctactgcttccat

SEQ ID NO: 4469558 - DNA, 25 bp, Homo sapien
catctcagcagaaggccggtcctgg

SEQ ID NO: 4469559 - DNA, 25 bp, Homo sapien
cccatctcagcagaaggccggtcct

SEQ ID NO: 4469560 - DNA, 25 bp, Homo sapien
gcagccgctcttggtctcccacttc

SEQ ID NO: 4469561 - DNA, 25 bp, Homo sapien
tgtcccatctcagcagaaggccggt

SEQ ID NO: 4469562 - DNA, 25 bp, Homo sapien
acgtggcaaatcctgctggaaactg

SEQ ID NO: 4469563 - DNA, 25 bp, Homo sapien
gcggagcagttcttgcaaagggcaa

SEQ ID NO: 4469564 - DNA, 25 bp, Homo sapien
gaacaaacgtggcaaatcctgctgg

SEQ ID NO: 4469565 - DNA, 25 bp, Homo sapien
gatgacagtgcggagcagttcttgc

SEQ ID NO: 4469566 - DNA, 25 bp, Homo sapien
gccagtattgcgtcttctctccatc

SEQ ID NO: 4469567 - DNA, 25 bp, Homo sapien
gagctactgggtcccctgctatttc

SEQ ID NO: 4469568 - DNA, 25 bp, Homo sapien
cccttccaaggacaatcgtccgcgc

SEQ ID NO: 4469569 - DNA, 25 bp, Homo sapien
ccatggcccagccagtattgcgtct

SEQ ID NO: 4469570 - DNA, 25 bp, Homo sapien
caggtctatgggtcttgctgggcca

SEQ ID NO: 4469571 - DNA, 25 bp, Homo sapien
tgacccaggtctatgggtcttgctg

SEQ ID NO: 4469572 - DNA, 25 bp, Homo sapien
cgtgacccaggtctatgggtcttgc

SEQ ID NO: 4469573 - DNA, 25 bp, Homo sapien
acccaggtctatgggtcttgctggg

SEQ ID NO: 4469574 - DNA, 25 bp, Homo sapien
agctcttccacgtgggatgtctgag

SEQ ID NO: 4469575 - DNA, 25 bp, Homo sapien
tcttccacgtgggatgtctgagaac

SEQ ID NO: 4469576 - DNA, 25 bp, Homo sapien
gctcttccacgtgggatgtctgaga

SEQ ID NO: 4469577 - DNA, 25 bp, Homo sapien
cttccacgtgggatgtctgagaaca

SEQ ID NO: 4469578 - DNA, 25 bp, Homo sapien
caggcggcagagagggtgtgggaca

SEQ ID NO: 4469579 - DNA, 25 bp, Homo sapien
agccggtcccgtgctcggctcgcag

SEQ ID NO: 4469580 - DNA, 25 bp, Homo sapien
ctgatgacgggttccgcggccctcg

SEQ ID NO: 4469581 - DNA, 25 bp, Homo sapien
gtggcgggttcagggcgggcgaagc

SEQ ID NO: 4469582 - DNA, 25 bp, Homo sapien
ttagctgatgacgggttccgcggcc

SEQ ID NO: 4469583 - DNA, 25 bp, Homo sapien
aggtgtccaggttacactctcgcag

SEQ ID NO: 4469584 - DNA, 25 bp, Homo sapien
tccaggttacactctcgcagggcct

SEQ ID NO: 4469585 - DNA, 25 bp, Homo sapien
ccttcagctcatagaggaagggcct

SEQ ID NO: 4469586 - DNA, 25 bp, Homo sapien
gaccttcagctcatagaggaagggc

SEQ ID NO: 4469587 - DNA, 25 bp, Homo sapien
ctgtcagaggccccgctattcccac

SEQ ID NO: 4469588 - DNA, 25 bp, Homo sapien
gaggccccgctattcccacaggccc

SEQ ID NO: 4469589 - DNA, 25 bp, Homo sapien
cagaggccccgctattcccacaggc

SEQ ID NO: 4469590 - DNA, 25 bp, Homo sapien
agaggccccgctattcccacaggcc

SEQ ID NO: 4469591 - DNA, 25 bp, Homo sapien
tgagaagccgcagataacgctggcg

SEQ ID NO: 4469592 - DNA, 25 bp, Homo sapien
ccggcctggagtggtctgagtgact

SEQ ID NO: 4469593 - DNA, 25 bp, Homo sapien
gactcggctgctttgttcccggcct

SEQ ID NO: 4469594 - DNA, 25 bp, Homo sapien
aacgctggcgacagggcctgataaa

SEQ ID NO: 4469595 - DNA, 25 bp, Homo sapien
agtgaccttatttgtatcctgattc

SEQ ID NO: 4469596 - DNA, 25 bp, Homo sapien
gaagagtgataatggcacacatttt

SEQ ID NO: 4469597 - DNA, 25 bp, Homo sapien
gacacataaaccaattggaacacag

SEQ ID NO: 4469598 - DNA, 25 bp, Homo sapien
gactggagagttcatgataggaaga

SEQ ID NO: 4469599 - DNA, 25 bp, Homo sapien
tagccagagctgacgggaatgcaaa

SEQ ID NO: 4469600 - DNA, 25 bp, Homo sapien
aatgcaaatggctcataaccctgtg

SEQ ID NO: 4469601 - DNA, 25 bp, Homo sapien
tggttatcagcacaatggaggactc

SEQ ID NO: 4469602 - DNA, 25 bp, Homo sapien
ggacaatcttgaccaactactaggg

SEQ ID NO: 4469603 - DNA, 25 bp, Homo sapien
caggcttgtttccagtcctctgtga

SEQ ID NO: 4469604 - DNA, 25 bp, Homo sapien
tgccctgcacgtcgtgggggggata

SEQ ID NO: 4469605 - DNA, 25 bp, Homo sapien
cttgtttccagtcctctgtgagctc

SEQ ID NO: 4469606 - DNA, 25 bp, Homo sapien
ggcttgtttccagtcctctgtgagc

SEQ ID NO: 4469607 - DNA, 25 bp, Homo sapien
tgtcgatgtctataccacaggccgg

SEQ ID NO: 4469608 - DNA, 25 bp, Homo sapien
gataattcccaagccctagagtgca

SEQ ID NO: 4469609 - DNA, 25 bp, Homo sapien
accataaaggatagaggcgccccaa

SEQ ID NO: 4469610 - DNA, 25 bp, Homo sapien
ggttacagattacagcctcgggccc

SEQ ID NO: 4469611 - DNA, 25 bp, Homo sapien
caccagtagaggctaactcttttcg

SEQ ID NO: 4469612 - DNA, 25 bp, Homo sapien
atttccaccagtagaggctaactct

SEQ ID NO: 4469613 - DNA, 25 bp, Homo sapien
cacaatgtccgcatttccaccagta

SEQ ID NO: 4469614 - DNA, 25 bp, Homo sapien
gctaactcttttcgattaaaatcca

SEQ ID NO: 4469615 - DNA, 25 bp, Homo sapien
gcgttttcaccactgctaccccaaa

SEQ ID NO: 4469616 - DNA, 25 bp, Homo sapien
ccatgcaagcgttttcaccactgct

SEQ ID NO: 4469617 - DNA, 25 bp, Homo sapien
agcgttttcaccactgctaccccaa

SEQ ID NO: 4469618 - DNA, 25 bp, Homo sapien
tgcaagcgttttcaccactgctacc

SEQ ID NO: 4469619 - DNA, 25 bp, Homo sapien
tatgtgtcatgagcctgtcacgcac

SEQ ID NO: 4469620 - DNA, 25 bp, Homo sapien
ggctcagtatttagaaggacccaga

SEQ ID NO: 4469621 - DNA, 25 bp, Homo sapien
caagtccaaggatgcatggccaata

SEQ ID NO: 4469622 - DNA, 25 bp, Homo sapien
tttaagacaagcaagtccacctgcc

SEQ ID NO: 4469623 - DNA, 25 bp, Homo sapien
gccagacctccttgcatgacagcag

SEQ ID NO: 4469624 - DNA, 25 bp, Homo sapien
tccagtaagagtctggcccaaggct

SEQ ID NO: 4469625 - DNA, 25 bp, Homo sapien
tgctgggtaccagcttgtctgctga

SEQ ID NO: 4469626 - DNA, 25 bp, Homo sapien
tcattctgggcacccagagaccagg

SEQ ID NO: 4469627 - DNA, 25 bp, Homo sapien
tccttgaaagaaagagtcaggcagt

SEQ ID NO: 4469628 - DNA, 25 bp, Homo sapien
ggtccttgaaagaaagagtcaggca

SEQ ID NO: 4469629 - DNA, 25 bp, Homo sapien
ccttgaaagaaagagtcaggcagtg

SEQ ID NO: 4469630 - DNA, 25 bp, Homo sapien
ttcggtccttgaaagaaagagtcag

SEQ ID NO: 4469631 - DNA, 25 bp, Homo sapien
gatgttactgttaggcctgtagttc

SEQ ID NO: 4469632 - DNA, 25 bp, Homo sapien
tagccagggatgttactgttaggcc

SEQ ID NO: 4469633 - DNA, 25 bp, Homo sapien
ctacaaatagccagggatgttactg

SEQ ID NO: 4469634 - DNA, 25 bp, Homo sapien
ttactgttaggcctgtagttcttac

SEQ ID NO: 4469635 - DNA, 25 bp, Homo sapien
ttatagagcatggaccgaccaagcg

SEQ ID NO: 4469636 - DNA, 25 bp, Homo sapien
tctcctgggttacagaggcctgaaa

SEQ ID NO: 4469637 - DNA, 25 bp, Homo sapien
cagatcctgatgttgctgccctagg

SEQ ID NO: 4469638 - DNA, 25 bp, Homo sapien
gaattcacccctcctgggatgcagg

SEQ ID NO: 4469639 - DNA, 25 bp, Homo sapien
tgcttctgcttccacttccgcttcc

SEQ ID NO: 4469640 - DNA, 25 bp, Homo sapien
cttctgcttccacttccgcttccac

SEQ ID NO: 4469641 - DNA, 25 bp, Homo sapien
tctgcttctgcttccacttccgctt

SEQ ID NO: 4469642 - DNA, 25 bp, Homo sapien
ttctgcttctgcttccacttccgct

SEQ ID NO: 4469643 - DNA, 25 bp, Homo sapien
ccccgttcaggatggagtcgctctt

SEQ ID NO: 4469644 - DNA, 25 bp, Homo sapien
taaaacaacggctactctacaggca

SEQ ID NO: 4469645 - DNA, 25 bp, Homo sapien
tgtgggaaaccctcttgagcactca

SEQ ID NO: 4469646 - DNA, 25 bp, Homo sapien
tgcttctgagtccaatccacctggg

SEQ ID NO: 4469647 - DNA, 25 bp, Homo sapien
caggttttgggctacatgtgagtca

SEQ ID NO: 4469648 - DNA, 25 bp, Homo sapien
tctcttggagctctatctgccccta

SEQ ID NO: 4469649 - DNA, 25 bp, Homo sapien
cacatctgatctttaggagccacct

SEQ ID NO: 4469650 - DNA, 25 bp, Homo sapien
caagttctcagctagctggcccatg

SEQ ID NO: 4469651 - DNA, 25 bp, Homo sapien
tgggctcacggcttttctggtagga

SEQ ID NO: 4469652 - DNA, 25 bp, Homo sapien
tctctgggttctggtaccaatatca

SEQ ID NO: 4469653 - DNA, 25 bp, Homo sapien
aaagccatttgcagtactcttcaga

SEQ ID NO: 4469654 - DNA, 25 bp, Homo sapien
caagtgaccaggctaggtccaggct

SEQ ID NO: 4469655 - DNA, 25 bp, Homo sapien
gatcctatattgtaggatataccta

SEQ ID NO: 4469656 - DNA, 25 bp, Homo sapien
cctatattgtaggatatacctacac

SEQ ID NO: 4469657 - DNA, 25 bp, Homo sapien
ttgtaggatatacctacacacagta

SEQ ID NO: 4469658 - DNA, 25 bp, Homo sapien
cctcaaatgatcctatattgtagga

SEQ ID NO: 4469659 - DNA, 25 bp, Homo sapien
tacctcgccactctttggtgaccat

SEQ ID NO: 4469660 - DNA, 25 bp, Homo sapien
tgttatgcgcgcatgcgtgtaggca

SEQ ID NO: 4469661 - DNA, 25 bp, Homo sapien
tccccaggggtgttatgcgcgcatg

SEQ ID NO: 4469662 - DNA, 25 bp, Homo sapien
cccacaaaagcgctggtgaaactac

SEQ ID NO: 4469663 - DNA, 25 bp, Homo sapien
ttgcaacagggactgtggtcatcag

SEQ ID NO: 4469664 - DNA, 25 bp, Homo sapien
agagtgatgctcagtggctattcga

SEQ ID NO: 4469665 - DNA, 25 bp, Homo sapien
tgtgaggcctagctctgctctctgc

SEQ ID NO: 4469666 - DNA, 25 bp, Homo sapien
tcgatgcaggcacttgaactgtcga

SEQ ID NO: 4469667 - DNA, 25 bp, Homo sapien
gaaggctgtggagtcagtacaccag

SEQ ID NO: 4469668 - DNA, 25 bp, Homo sapien
tgaggcttccatgcaggattctgtg

SEQ ID NO: 4469669 - DNA, 25 bp, Homo sapien
gccctacaagaatatgagtgcagcc

SEQ ID NO: 4469670 - DNA, 25 bp, Homo sapien
caaggccaggcactaggttttgagt

SEQ ID NO: 4469671 - DNA, 25 bp, Homo sapien
tcacgccgaccctatttggcaaagg

SEQ ID NO: 4469672 - DNA, 25 bp, Homo sapien
cgctgcgggagggaaatagtacaac

SEQ ID NO: 4469673 - DNA, 25 bp, Homo sapien
ttaacttgcttgatgacgccctcgg

SEQ ID NO: 4469674 - DNA, 25 bp, Homo sapien
caaagacacaggtagccgaggagaa

SEQ ID NO: 4469675 - DNA, 25 bp, Homo sapien
caccctaggtctgtagcctggacca

SEQ ID NO: 4469676 - DNA, 25 bp, Homo sapien
ttcatcgtccttgtccacacgtcct

SEQ ID NO: 4469677 - DNA, 25 bp, Homo sapien
tccccaccctaggtctgtagcctgg

SEQ ID NO: 4469678 - DNA, 25 bp, Homo sapien
ccctaggtctgtagcctggaccagg

SEQ ID NO: 4469679 - DNA, 25 bp, Homo sapien
gctcaggtggcagcttggactctca

SEQ ID NO: 4469680 - DNA, 25 bp, Homo sapien
tggcccaggtgctcttaaatacggg

SEQ ID NO: 4469681 - DNA, 25 bp, Homo sapien
cactcagacagttagaaagcggttc

SEQ ID NO: 4469682 - DNA, 25 bp, Homo sapien
ggaacagagttctatcaaagccaac

SEQ ID NO: 4469683 - DNA, 25 bp, Homo sapien
cctttttgcggactctggagacctg

SEQ ID NO: 4469684 - DNA, 25 bp, Homo sapien
ttttgcggactctggagacctggac

SEQ ID NO: 4469685 - DNA, 25 bp, Homo sapien
ggaactgggcaattccagtcccctc

SEQ ID NO: 4469686 - DNA, 25 bp, Homo sapien
ctggctgctccggaactgggcaatt

SEQ ID NO: 4469687 - DNA, 25 bp, Homo sapien
ccttctttgcgagtttcttccagat

SEQ ID NO: 4469688 - DNA, 25 bp, Homo sapien
cttctttgcgagtttcttccagatc

SEQ ID NO: 4469689 - DNA, 25 bp, Homo sapien
gccttctttgcgagtttcttccaga

SEQ ID NO: 4469690 - DNA, 25 bp, Homo sapien
ttgttatggctactgtgaatttaca

SEQ ID NO: 4469691 - DNA, 25 bp, Homo sapien
gatttatcctaagcattatcctgtg

SEQ ID NO: 4469692 - DNA, 25 bp, Homo sapien
agttggcacactcttatgcaaattg

SEQ ID NO: 4469693 - DNA, 25 bp, Homo sapien
tcctgtgcgtcatactaacagatgt

SEQ ID NO: 4469694 - DNA, 25 bp, Homo sapien
agacatacgccacaaggacctcaga

SEQ ID NO: 4469695 - DNA, 25 bp, Homo sapien
tggcttccctcaaacaaggctccag

SEQ ID NO: 4469696 - DNA, 25 bp, Homo sapien
gacaccttcgcttcatggagggatg

SEQ ID NO: 4469697 - DNA, 25 bp, Homo sapien
aagaggaaccttccgtggtggcaga

SEQ ID NO: 4469698 - DNA, 25 bp, Homo sapien
tcactggagagaggcgcacaggcag

SEQ ID NO: 4469699 - DNA, 25 bp, Homo sapien
gacgaagctcagcttctgccacagt

SEQ ID NO: 4469700 - DNA, 25 bp, Homo sapien
agcctgcggtgccattgtcactgga

SEQ ID NO: 4469701 - DNA, 25 bp, Homo sapien
gatgaccccaggtctggaaatcgag

SEQ ID NO: 4469702 - DNA, 25 bp, Homo sapien
gagcaagcatttgaagtcacgcatg

SEQ ID NO: 4469703 - DNA, 25 bp, Homo sapien
ttgtgaacaagatgcgcagaacagc

SEQ ID NO: 4469704 - DNA, 25 bp, Homo sapien
gaattttgaaggctgctgacgttcc

SEQ ID NO: 4469705 - DNA, 25 bp, Homo sapien
tgacgttccacgtggtcaagagcaa

SEQ ID NO: 4469706 - DNA, 25 bp, Homo sapien
cagctcagtgccaggcactcagagg

SEQ ID NO: 4469707 - DNA, 25 bp, Homo sapien
agctcagtgccaggcactcagaggg

SEQ ID NO: 4469708 - DNA, 25 bp, Homo sapien
ctcagtgccaggcactcagagggtc

SEQ ID NO: 4469709 - DNA, 25 bp, Homo sapien
tcagctcagtgccaggcactcagag

SEQ ID NO: 4469710 - DNA, 25 bp, Homo sapien
agccccgcggaggacacacatgtat

SEQ ID NO: 4469711 - DNA, 25 bp, Homo sapien
aatctattgctgtagccccgcggag

SEQ ID NO: 4469712 - DNA, 25 bp, Homo sapien
gtgttaaagcaacaaaatctattgc

SEQ ID NO: 4469713 - DNA, 25 bp, Homo sapien
cccgcggaggacacacatgtatggg

SEQ ID NO: 4469714 - DNA, 25 bp, Homo sapien
cgtgtgccgttgagggatctgtccc

SEQ ID NO: 4469715 - DNA, 25 bp, Homo sapien
ggatgggtggaatagatcaaaagaa

SEQ ID NO: 4469716 - DNA, 25 bp, Homo sapien
tttagagcttgcaaacgggattccc

SEQ ID NO: 4469717 - DNA, 25 bp, Homo sapien
gaaaggaacagttgagagtaaccaa

SEQ ID NO: 4469718 - DNA, 25 bp, Homo sapien
gaaacccaggctgggcggcaattcc

SEQ ID NO: 4469719 - DNA, 25 bp, Homo sapien
gtgtagccagcagcgagctcagagc

SEQ ID NO: 4469720 - DNA, 25 bp, Homo sapien
tagccagcagcgagctcagagctcg

SEQ ID NO: 4469721 - DNA, 25 bp, Homo sapien
cctgtgtagccagcagcgagctcag

SEQ ID NO: 4469722 - DNA, 25 bp, Homo sapien
tggatccatttcagtggcagtcggg

SEQ ID NO: 4469723 - DNA, 25 bp, Homo sapien
ggcctgtggatccatttcagtggca

SEQ ID NO: 4469724 - DNA, 25 bp, Homo sapien
ctttggatgttcattacgctggatt

SEQ ID NO: 4469725 - DNA, 25 bp, Homo sapien
ccggacagctaaagtagttcatgca

SEQ ID NO: 4469726 - DNA, 25 bp, Homo sapien
cccaaaggacaatggcctaaggcaa

SEQ ID NO: 4469727 - DNA, 25 bp, Homo sapien
caaagaaggcccagatgcttgaggc

SEQ ID NO: 4469728 - DNA, 25 bp, Homo sapien
aagtgctcagcatgccaaaaagtca

SEQ ID NO: 4469729 - DNA, 25 bp, Homo sapien
cgttgtcgtattgttctctgtgccc

SEQ ID NO: 4469730 - DNA, 25 bp, Homo sapien
gtttcattgggaaaacacctccaga

SEQ ID NO: 4469731 - DNA, 25 bp, Homo sapien
gcgaaaatgtatccctggcccaggt

SEQ ID NO: 4469732 - DNA, 25 bp, Homo sapien
tgaaggtggacttgaccactgcggc

SEQ ID NO: 4469733 - DNA, 25 bp, Homo sapien
tgaccactgcggctggcttggctga

SEQ ID NO: 4469734 - DNA, 25 bp, Homo sapien
gagctgatgtgagggttttgtgaat

SEQ ID NO: 4469735 - DNA, 25 bp, Homo sapien
tgcagctatgagtaactgggaagca

SEQ ID NO: 4469736 - DNA, 25 bp, Homo sapien
taactgggaagcacggatgagctga

SEQ ID NO: 4469737 - DNA, 25 bp, Homo sapien
catctgtactggcttagcagtgtct

SEQ ID NO: 4469738 - DNA, 25 bp, Homo sapien
gtctgctgggcactagaagccttgg

SEQ ID NO: 4469739 - DNA, 25 bp, Homo sapien
cattctgacttagagggtgtgggct

SEQ ID NO: 4469740 - DNA, 25 bp, Homo sapien
caatattgttaaatggccaacggcc

SEQ ID NO: 4469741 - DNA, 25 bp, Homo sapien
gaacttaacacctctgtgtcatggg

SEQ ID NO: 4469742 - DNA, 25 bp, Homo sapien
cagtgctggcaacctcaccaggtaa

SEQ ID NO: 4469743 - DNA, 25 bp, Homo sapien
ctggaggcggattataagtgagtga

SEQ ID NO: 4469744 - DNA, 25 bp, Homo sapien
agttctgtactcatcctcgcagcaa

SEQ ID NO: 4469745 - DNA, 25 bp, Homo sapien
tgagaagaagtaagggcagttctgt

SEQ ID NO: 4469746 - DNA, 25 bp, Homo sapien
acatctgatctaagcttggcccctt

SEQ ID NO: 4469747 - DNA, 25 bp, Homo sapien
tctgatctaagcttggcccctttgc

SEQ ID NO: 4469748 - DNA, 25 bp, Homo sapien
catctgatctaagcttggccccttt

SEQ ID NO: 4469749 - DNA, 25 bp, Homo sapien
tgatctaagcttggcccctttgctt

SEQ ID NO: 4469750 - DNA, 25 bp, Homo sapien
tggcccagtacagaacatagcccca

SEQ ID NO: 4469751 - DNA, 25 bp, Homo sapien
tgtggcccagtacagaacatagccc

SEQ ID NO: 4469752 - DNA, 25 bp, Homo sapien
ggcccagtacagaacatagccccac

SEQ ID NO: 4469753 - DNA, 25 bp, Homo sapien
gtggcccagtacagaacatagcccc

SEQ ID NO: 4469754 - DNA, 25 bp, Homo sapien
gggcagcatcaacgtcaatgtcaca

SEQ ID NO: 4469755 - DNA, 25 bp, Homo sapien
gggccagaggtcctgtagcagacat

SEQ ID NO: 4469756 - DNA, 25 bp, Homo sapien
gactggagcatatcagtagctggct

SEQ ID NO: 4469757 - DNA, 25 bp, Homo sapien
caatgtcacagcctgggctatgggc

SEQ ID NO: 4469758 - DNA, 25 bp, Homo sapien
gatgaaagcttccttcccattaatc

SEQ ID NO: 4469759 - DNA, 25 bp, Homo sapien
gtgatgaaagcttccttcccattaa

SEQ ID NO: 4469760 - DNA, 25 bp, Homo sapien
atgaaagcttccttcccattaatca

SEQ ID NO: 4469761 - DNA, 25 bp, Homo sapien
agtgatgaaagcttccttcccatta

SEQ ID NO: 4469762 - DNA, 25 bp, Homo sapien
tgttgtctacaaagcaccatcagtc

SEQ ID NO: 4469763 - DNA, 25 bp, Homo sapien
cagtccttgttctcctaagcggaag

SEQ ID NO: 4469764 - DNA, 25 bp, Homo sapien
ctggtgagccctttggcctggagag

SEQ ID NO: 4469765 - DNA, 25 bp, Homo sapien
cccttcctccaagccctggtgagcc

SEQ ID NO: 4469766 - DNA, 25 bp, Homo sapien
taagcgctggcaaactgtatttcca

SEQ ID NO: 4469767 - DNA, 25 bp, Homo sapien
ccagatttgtaggattctgagccag

SEQ ID NO: 4469768 - DNA, 25 bp, Homo sapien
tggagagtctccatctaaactgtct

SEQ ID NO: 4469769 - DNA, 25 bp, Homo sapien
tgtaggattctgagccaggtgttaa

SEQ ID NO: 4469770 - DNA, 25 bp, Homo sapien
gaactattcggtgcatcccagacct

SEQ ID NO: 4469771 - DNA, 25 bp, Homo sapien
tcagcaccgtgaggagcctcgtcca

SEQ ID NO: 4469772 - DNA, 25 bp, Homo sapien
cccagacctggatttctaagacaca

SEQ ID NO: 4469773 - DNA, 25 bp, Homo sapien
gcctcgtccaggtgattcggaacta

SEQ ID NO: 4469774 - DNA, 25 bp, Homo sapien
tcacagatgtcctggctcaaggatg

SEQ ID NO: 4469775 - DNA, 25 bp, Homo sapien
gtcacagatgtcctggctcaaggat

SEQ ID NO: 4469776 - DNA, 25 bp, Homo sapien
agtcacagatgtcctggctcaagga

SEQ ID NO: 4469777 - DNA, 25 bp, Homo sapien
gaaagttgtcatgcactgttaacaa

SEQ ID NO: 4469778 - DNA, 25 bp, Homo sapien
gaatttgaaagttgtcatgcactgt

SEQ ID NO: 4469779 - DNA, 25 bp, Homo sapien
agttgtcatgcactgttaacaattg

SEQ ID NO: 4469780 - DNA, 25 bp, Homo sapien
ttgaaagttgtcatgcactgttaac

SEQ ID NO: 4469781 - DNA, 25 bp, Homo sapien
gcatcccgcacccagcgcctatgtc

SEQ ID NO: 4469782 - DNA, 25 bp, Homo sapien
gatgctaaagcagatagagccaaga

SEQ ID NO: 4469783 - DNA, 25 bp, Homo sapien
ctaaagcagatagagccaagatgaa

SEQ ID NO: 4469784 - DNA, 25 bp, Homo sapien
ctgcgtgccgcgctgcatcccgcac

SEQ ID NO: 4469785 - DNA, 25 bp, Homo sapien
tggctagaggctcagttcctcactg

SEQ ID NO: 4469786 - DNA, 25 bp, Homo sapien
gctggcttccctcaaaagaaactat

SEQ ID NO: 4469787 - DNA, 25 bp, Homo sapien
tccagaaggctacttggcataacag

SEQ ID NO: 4469788 - DNA, 25 bp, Homo sapien
ggcttagggccttccataggttgta

SEQ ID NO: 4469789 - DNA, 25 bp, Homo sapien
cactcaaagaaggtgcaccagcttt

SEQ ID NO: 4469790 - DNA, 25 bp, Homo sapien
ttgacactcaaagaaggtgcaccag

SEQ ID NO: 4469791 - DNA, 25 bp, Homo sapien
gaaattgacactcaaagaaggtgca

SEQ ID NO: 4469792 - DNA, 25 bp, Homo sapien
caaagaaggtgcaccagctttgtcc

SEQ ID NO: 4469793 - DNA, 25 bp, Homo sapien
gctcaggacattatggagatcaagt

SEQ ID NO: 4469794 - DNA, 25 bp, Homo sapien
gcaaggaggtgggtgctcaggacat

SEQ ID NO: 4469795 - DNA, 25 bp, Homo sapien
tgggtgctcaggacattatggagat

SEQ ID NO: 4469796 - DNA, 25 bp, Homo sapien
tatggagatcaagtttaagtgggtg

SEQ ID NO: 4469797 - DNA, 25 bp, Homo sapien
gtatgaccctgtggccttagccagg

SEQ ID NO: 4469798 - DNA, 25 bp, Homo sapien
tttcctggatttgttgaggctggtc

SEQ ID NO: 4469799 - DNA, 25 bp, Homo sapien
tcttcacttccagtatgaccctgtg

SEQ ID NO: 4469800 - DNA, 25 bp, Homo sapien
gttgaggctggtctcttcacttcca

SEQ ID NO: 4469801 - DNA, 25 bp, Homo sapien
ttaaacatcagggctccaggtgctg

SEQ ID NO: 4469802 - DNA, 25 bp, Homo sapien
aacatcagggctccaggtgctgtcc

SEQ ID NO: 4469803 - DNA, 25 bp, Homo sapien
gggctccaggtgctgtccacaatgt

SEQ ID NO: 4469804 - DNA, 25 bp, Homo sapien
caggtgctgtccacaatgtcacagc

SEQ ID NO: 4469805 - DNA, 25 bp, Homo sapien
cggcagggctgcatgactaaggcaa

SEQ ID NO: 4469806 - DNA, 25 bp, Homo sapien
gattccgcatctatgaagggaggca

SEQ ID NO: 4469807 - DNA, 25 bp, Homo sapien
ttctgttcgaacagcactccggcag

SEQ ID NO: 4469808 - DNA, 25 bp, Homo sapien
cagtgtctgtatactcaggtgctca

SEQ ID NO: 4469809 - DNA, 25 bp, Homo sapien
gtcaaatacaggctaggcgtgctgg

SEQ ID NO: 4469810 - DNA, 25 bp, Homo sapien
gaggcgatgagagttagtatttaat

SEQ ID NO: 4469811 - DNA, 25 bp, Homo sapien
tatttaatgcgtacagaacttctgc

SEQ ID NO: 4469812 - DNA, 25 bp, Homo sapien
agctactactcggaaggatagcttg

SEQ ID NO: 4469813 - DNA, 25 bp, Homo sapien
gggcccttgccttgctccggagaac

SEQ ID NO: 4469814 - DNA, 25 bp, Homo sapien
ggagaaccgcctcccacaagccaat

SEQ ID NO: 4469815 - DNA, 25 bp, Homo sapien
ccctgtgaggtgtggcggaatccac

SEQ ID NO: 4469816 - DNA, 25 bp, Homo sapien
tgctgcagaagtgcgctgtgctcct

SEQ ID NO: 4469817 - DNA, 25 bp, Homo sapien
gccgcgagactccaagtggcagcag

SEQ ID NO: 4469818 - DNA, 25 bp, Homo sapien
aacttcgctcgcctcgctagctttg

SEQ ID NO: 4469819 - DNA, 25 bp, Homo sapien
tcccacggcgaagagaagagcggcc

SEQ ID NO: 4469820 - DNA, 25 bp, Homo sapien
gctagctttgatgcgcagatccctc

SEQ ID NO: 4469821 - DNA, 25 bp, Homo sapien
gcccagcaggcgcttcacgatcggg

SEQ ID NO: 4469822 - DNA, 25 bp, Homo sapien
gaccaggctcttgaccgccttctcg

SEQ ID NO: 4469823 - DNA, 25 bp, Homo sapien
cacttggtgttgacgttctgcgtgg

SEQ ID NO: 4469824 - DNA, 25 bp, Homo sapien
cagctgccccgtcttcttgagtttc

SEQ ID NO: 4469825 - DNA, 25 bp, Homo sapien
cagccccagctgtacggaccgcatt

SEQ ID NO: 4469826 - DNA, 25 bp, Homo sapien
cacagccccagctgtacggaccgca

SEQ ID NO: 4469827 - DNA, 25 bp, Homo sapien
agccccagctgtacggaccgcattc

SEQ ID NO: 4469828 - DNA, 25 bp, Homo sapien
acagccccagctgtacggaccgcat

SEQ ID NO: 4469829 - DNA, 25 bp, Homo sapien
tcaatcactaggctcccgctcctca

SEQ ID NO: 4469830 - DNA, 25 bp, Homo sapien
caatcactaggctcccgctcctcac

SEQ ID NO: 4469831 - DNA, 25 bp, Homo sapien
agctgttgccaagggacacaaggtg

SEQ ID NO: 4469832 - DNA, 25 bp, Homo sapien
tgtctggatccacccaagcaactgg

SEQ ID NO: 4469833 - DNA, 25 bp, Homo sapien
tttctgcccacgaccaaaacagcag

SEQ ID NO: 4469834 - DNA, 25 bp, Homo sapien
ccattttgtctggatccacccaagc

SEQ ID NO: 4469835 - DNA, 25 bp, Homo sapien
tacaaccaggaagatttgaagcaaa

SEQ ID NO: 4469836 - DNA, 25 bp, Homo sapien
tagctgaaattacaggcgcccgcta

SEQ ID NO: 4469837 - DNA, 25 bp, Homo sapien
tcttcagcaggattatccactaaac

SEQ ID NO: 4469838 - DNA, 25 bp, Homo sapien
ttcagcaggattatccactaaactt

SEQ ID NO: 4469839 - DNA, 25 bp, Homo sapien
gattatccactaaactttcaccact

SEQ ID NO: 4469840 - DNA, 25 bp, Homo sapien
aggattatccactaaactttcacca

SEQ ID NO: 4469841 - DNA, 25 bp, Homo sapien
ctctgcagaattccgttggcaggga

SEQ ID NO: 4469842 - DNA, 25 bp, Homo sapien
gttattcggggccacgtgcttgctc

SEQ ID NO: 4469843 - DNA, 25 bp, Homo sapien
tgcttgctccgcagcggccctggca

SEQ ID NO: 4469844 - DNA, 25 bp, Homo sapien
tctctgcagaattccgttggcaggg

SEQ ID NO: 4469845 - DNA, 25 bp, Homo sapien
ggtttggatgatcgcggaaacaaac

SEQ ID NO: 4469846 - DNA, 25 bp, Homo sapien
gaggtttggatgatcgcggaaacaa

SEQ ID NO: 4469847 - DNA, 25 bp, Homo sapien
atgaggtttggatgatcgcggaaac

SEQ ID NO: 4469848 - DNA, 25 bp, Homo sapien
ggatgaggtttggatgatcgcggaa

SEQ ID NO: 4469849 - DNA, 25 bp, Homo sapien
cacagcaacagtctggttggagagt

SEQ ID NO: 4469850 - DNA, 25 bp, Homo sapien
ctggttggagagttgagagaactca

SEQ ID NO: 4469851 - DNA, 25 bp, Homo sapien
ccacagcaacagtctggttggagag

SEQ ID NO: 4469852 - DNA, 25 bp, Homo sapien
gagttgagagaactcaagtccctct

SEQ ID NO: 4469853 - DNA, 25 bp, Homo sapien
ttccaactgctctccttggagctca

SEQ ID NO: 4469854 - DNA, 25 bp, Homo sapien
cattccaactgctctccttggagct

SEQ ID NO: 4469855 - DNA, 25 bp, Homo sapien
tcattccaactgctctccttggagc

SEQ ID NO: 4469856 - DNA, 25 bp, Homo sapien
tccaactgctctccttggagctcac

SEQ ID NO: 4469857 - DNA, 25 bp, Homo sapien
tcatagcacacctcgctggtggtgg

SEQ ID NO: 4469858 - DNA, 25 bp, Homo sapien
tgtgactgtgaacaagagcggctac

SEQ ID NO: 4469859 - DNA, 25 bp, Homo sapien
caatgtatgcggacctctggcgagt

SEQ ID NO: 4469860 - DNA, 25 bp, Homo sapien
aatcaataggctggaggtgtcatcc

SEQ ID NO: 4469861 - DNA, 25 bp, Homo sapien
ttcttgtgtggcaatgaccatcggg

SEQ ID NO: 4469862 - DNA, 25 bp, Homo sapien
acctgacggaacagagggcactcat

SEQ ID NO: 4469863 - DNA, 25 bp, Homo sapien
cagtgtaaacttggccatttgtgcc

SEQ ID NO: 4469864 - DNA, 25 bp, Homo sapien
aagttatccgtcttcggccacctga

SEQ ID NO: 4469865 - DNA, 25 bp, Homo sapien
gatgacagatgtacatttcttagag

SEQ ID NO: 4469866 - DNA, 25 bp, Homo sapien
ccctgaggaaagatacgtaaggtca

SEQ ID NO: 4469867 - DNA, 25 bp, Homo sapien
gggagacctgactcacattcgccag

SEQ ID NO: 4469868 - DNA, 25 bp, Homo sapien
tcagcagatatgacagatgacagat

SEQ ID NO: 4469869 - DNA, 25 bp, Homo sapien
tggactccacttggactccctggaa

SEQ ID NO: 4469870 - DNA, 25 bp, Homo sapien
gctcagtggctaccacgcgggtaac

SEQ ID NO: 4469871 - DNA, 25 bp, Homo sapien
tgaactcagctaaggagactggact

SEQ ID NO: 4469872 - DNA, 25 bp, Homo sapien
tagggaagccgacagaagccaagtc

SEQ ID NO: 4469873 - DNA, 25 bp, Homo sapien
gaagagtcgtcatcttgggccacac

SEQ ID NO: 4469874 - DNA, 25 bp, Homo sapien
gaaaacgcactttctctaagcaggg

SEQ ID NO: 4469875 - DNA, 25 bp, Homo sapien
tgttacagatacaatcatgccctgc

SEQ ID NO: 4469876 - DNA, 25 bp, Homo sapien
acaggaaacgaggagaagagaacac

SEQ ID NO: 4469877 - DNA, 25 bp, Homo sapien
agcgagcggcggcaataaattaccc

SEQ ID NO: 4469878 - DNA, 25 bp, Homo sapien
tcttatggtcagtgcgcttcagccc

SEQ ID NO: 4469879 - DNA, 25 bp, Homo sapien
cacaggcccgagtgtgggtttccat

SEQ ID NO: 4469880 - DNA, 25 bp, Homo sapien
tcctgtgggaatgtcgcatcctgtg

SEQ ID NO: 4469881 - DNA, 25 bp, Homo sapien
cacaaaacggagtccgtgcataacc

SEQ ID NO: 4469882 - DNA, 25 bp, Homo sapien
acaaaacggagtccgtgcataacca

SEQ ID NO: 4469883 - DNA, 25 bp, Homo sapien
caaaacggagtccgtgcataaccat

SEQ ID NO: 4469884 - DNA, 25 bp, Homo sapien
aaaacggagtccgtgcataaccata

SEQ ID NO: 4469885 - DNA, 25 bp, Homo sapien
tgcacattctggtctagcttccatc

SEQ ID NO: 4469886 - DNA, 25 bp, Homo sapien
tatgggaggggcatatagattcccg

SEQ ID NO: 4469887 - DNA, 25 bp, Homo sapien
ggagatggggcaatgttccttgatt

SEQ ID NO: 4469888 - DNA, 25 bp, Homo sapien
agcttccatcttgcctatgggaggg

SEQ ID NO: 4469889 - DNA, 25 bp, Homo sapien
tcaaataggtcaggggaaacagcat

SEQ ID NO: 4469890 - DNA, 25 bp, Homo sapien
caaataggtcaggggaaacagcatt

SEQ ID NO: 4469891 - DNA, 25 bp, Homo sapien
aataggtcaggggaaacagcatttc

SEQ ID NO: 4469892 - DNA, 25 bp, Homo sapien
ctcaaataggtcaggggaaacagca

SEQ ID NO: 4469893 - DNA, 25 bp, Homo sapien
tgaagagaccatggtaccactcccc

SEQ ID NO: 4469894 - DNA, 25 bp, Homo sapien
ggacacatatcctatggtcaatggg

SEQ ID NO: 4469895 - DNA, 25 bp, Homo sapien
ggcctgtctgctacgaaacctgaag

SEQ ID NO: 4469896 - DNA, 25 bp, Homo sapien
aataactgactctgggccgggtgca

SEQ ID NO: 4469897 - DNA, 25 bp, Homo sapien
tgtcaccttgcctagatcagcacca

SEQ ID NO: 4469898 - DNA, 25 bp, Homo sapien
tggcatggtgggtagaccaccagga

SEQ ID NO: 4469899 - DNA, 25 bp, Homo sapien
cctctgttgagcacttgtcaccttg

SEQ ID NO: 4469900 - DNA, 25 bp, Homo sapien
gaccccagcctgatgaactggcatg

SEQ ID NO: 4469901 - DNA, 25 bp, Homo sapien
gcaaaaaccacaaacgcagcctgct

SEQ ID NO: 4469902 - DNA, 25 bp, Homo sapien
tggcaaaaaccacaaacgcagcctg

SEQ ID NO: 4469903 - DNA, 25 bp, Homo sapien
acaaacgcagcctgctccgtcttac

SEQ ID NO: 4469904 - DNA, 25 bp, Homo sapien
accacaaacgcagcctgctccgtct

SEQ ID NO: 4469905 - DNA, 25 bp, Homo sapien
tccaccatgctttccggtgtaccag

SEQ ID NO: 4469906 - DNA, 25 bp, Homo sapien
ggtgtaccagagctgcgcctttcca

SEQ ID NO: 4469907 - DNA, 25 bp, Homo sapien
tttccggtgtaccagagctgcgcct

SEQ ID NO: 4469908 - DNA, 25 bp, Homo sapien
ccagagctgcgcctttccacgtttg

SEQ ID NO: 4469909 - DNA, 25 bp, Homo sapien
gctcagtacagcgatgactggaaag

SEQ ID NO: 4469910 - DNA, 25 bp, Homo sapien
actgtcccagggaaccgctcagtac

SEQ ID NO: 4469911 - DNA, 25 bp, Homo sapien
gatgaattcagttcccctgggttca

SEQ ID NO: 4469912 - DNA, 25 bp, Homo sapien
cactgcgatggcaagcaagctccat

SEQ ID NO: 4469913 - DNA, 25 bp, Homo sapien
ggtcagggtgaaataataattctac

SEQ ID NO: 4469914 - DNA, 25 bp, Homo sapien
tgtgccatacctggtgacagcagat

SEQ ID NO: 4469915 - DNA, 25 bp, Homo sapien
cacctggcctaaacacattcacttt

SEQ ID NO: 4469916 - DNA, 25 bp, Homo sapien
tatgctaatctgactgaagttggtc

SEQ ID NO: 4469917 - DNA, 25 bp, Homo sapien
tcaactaaacagtggcagtcgtagc

SEQ ID NO: 4469918 - DNA, 25 bp, Homo sapien
tagaaaactcagctgtcggtgtaac

SEQ ID NO: 4469919 - DNA, 25 bp, Homo sapien
gacaggttccagacatgctcacatc

SEQ ID NO: 4469920 - DNA, 25 bp, Homo sapien
aaaggatggcatttacccagggatc

SEQ ID NO: 4469921 - DNA, 25 bp, Homo sapien
tcagtgacattcacgcggagaggca

SEQ ID NO: 4469922 - DNA, 25 bp, Homo sapien
taattatgagtcaccggctagagag

SEQ ID NO: 4469923 - DNA, 25 bp, Homo sapien
gcataacatgcaacgggtcaaccgg

SEQ ID NO: 4469924 - DNA, 25 bp, Homo sapien
acttagagaaaatgtcaggcgggca

SEQ ID NO: 4469925 - DNA, 25 bp, Homo sapien
gaagcttgaaatggagtaagtcaca

SEQ ID NO: 4469926 - DNA, 25 bp, Homo sapien
tcatgtagccaacacttagagtctt

SEQ ID NO: 4469927 - DNA, 25 bp, Homo sapien
tcggcagcaggcctgttcatgtagc

SEQ ID NO: 4469928 - DNA, 25 bp, Homo sapien
caaagccaggtgtgtttagacccat

SEQ ID NO: 4469929 - DNA, 25 bp, Homo sapien
ttgaactataagctcaccctgagag

SEQ ID NO: 4469930 - DNA, 25 bp, Homo sapien
tgctcattccatcggaccttctggg

SEQ ID NO: 4469931 - DNA, 25 bp, Homo sapien
caagtttgggtgaagtgctcattcc

SEQ ID NO: 4469932 - DNA, 25 bp, Homo sapien
aaagtctccttgcatcggttccatt

SEQ ID NO: 4469933 - DNA, 25 bp, Homo sapien
cgaccgccagtctggcttggcagta

SEQ ID NO: 4469934 - DNA, 25 bp, Homo sapien
tgtgagcacacgaccgccagtctgg

SEQ ID NO: 4469935 - DNA, 25 bp, Homo sapien
gcacacgaccgccagtctggcttgg

SEQ ID NO: 4469936 - DNA, 25 bp, Homo sapien
cttgtgagcacacgaccgccagtct

SEQ ID NO: 4469937 - DNA, 25 bp, Homo sapien
cagatatgaggactacagtgatcca

SEQ ID NO: 4469938 - DNA, 25 bp, Homo sapien
cttcagttgtgcttggaaaaggtcc

SEQ ID NO: 4469939 - DNA, 25 bp, Homo sapien
caatgagagttctttaggcacagat

SEQ ID NO: 4469940 - DNA, 25 bp, Homo sapien
tcaggtcttcccttgcacattagaa

SEQ ID NO: 4469941 - DNA, 25 bp, Homo sapien
gttccccaactttgtactgctcttc

SEQ ID NO: 4469942 - DNA, 25 bp, Homo sapien
tgggttccccaactttgtactgctc

SEQ ID NO: 4469943 - DNA, 25 bp, Homo sapien
agacaacaaaggccccgtgaggact

SEQ ID NO: 4469944 - DNA, 25 bp, Homo sapien
caggagatcagagcactgctagctg

SEQ ID NO: 4469945 - DNA, 25 bp, Homo sapien
ttgctttctgcagagtccggcctcc

SEQ ID NO: 4469946 - DNA, 25 bp, Homo sapien
ggaaatgtggattgtgcttgctttc

SEQ ID NO: 4469947 - DNA, 25 bp, Homo sapien
tggtagggattcacgcagacctcgt

SEQ ID NO: 4469948 - DNA, 25 bp, Homo sapien
ccacaggcggcagtagatgacatga

SEQ ID NO: 4469949 - DNA, 25 bp, Homo sapien
tattgaaggcgaactcacacagctc

SEQ ID NO: 4469950 - DNA, 25 bp, Homo sapien
tgacatgagggagccccttccgatg

SEQ ID NO: 4469951 - DNA, 25 bp, Homo sapien
tggcgtggcaccaacacaggaggta

SEQ ID NO: 4469952 - DNA, 25 bp, Homo sapien
ctgtgtggcgtggcaccaacacagg

SEQ ID NO: 4469953 - DNA, 25 bp, Homo sapien
gtgtggcgtggcaccaacacaggag

SEQ ID NO: 4469954 - DNA, 25 bp, Homo sapien
gtggcgtggcaccaacacaggaggt

SEQ ID NO: 4469955 - DNA, 25 bp, Homo sapien
tttcggggatggaatggctgtagtc

SEQ ID NO: 4469956 - DNA, 25 bp, Homo sapien
atggaatggctgtagtcgtccagtg

SEQ ID NO: 4469957 - DNA, 25 bp, Homo sapien
gggctcgatgcctgcggggaagtta

SEQ ID NO: 4469958 - DNA, 25 bp, Homo sapien
tggaatattgctctggggctcgatg

SEQ ID NO: 4469959 - DNA, 25 bp, Homo sapien
ccaggatgaacgtcacgtccaaatt

SEQ ID NO: 4469960 - DNA, 25 bp, Homo sapien
tgaacgtcacgtccaaattagaatg

SEQ ID NO: 4469961 - DNA, 25 bp, Homo sapien
gaacgtcacgtccaaattagaatgc

SEQ ID NO: 4469962 - DNA, 25 bp, Homo sapien
ggatgaacgtcacgtccaaattaga

SEQ ID NO: 4469963 - DNA, 25 bp, Homo sapien
ggtggtctgttaaaaggccttcaca

SEQ ID NO: 4469964 - DNA, 25 bp, Homo sapien
gtggtctgttaaaaggccttcacag

SEQ ID NO: 4469965 - DNA, 25 bp, Homo sapien
ggttcatctggtggtcactggtttc

SEQ ID NO: 4469966 - DNA, 25 bp, Homo sapien
tctggtggtcactggtttctccatc

SEQ ID NO: 4469967 - DNA, 25 bp, Homo sapien
tgctgtggttcatctggtggtcact

SEQ ID NO: 4469968 - DNA, 25 bp, Homo sapien
tccatcttcactcaggtagccaggg

SEQ ID NO: 4469969 - DNA, 25 bp, Homo sapien
ttggtcagaggctgcagcagctcag

SEQ ID NO: 4469970 - DNA, 25 bp, Homo sapien
cttggtcagaggctgcagcagctca

SEQ ID NO: 4469971 - DNA, 25 bp, Homo sapien
tggtcagaggctgcagcagctcagg

SEQ ID NO: 4469972 - DNA, 25 bp, Homo sapien
gtcagaggctgcagcagctcaggtg

SEQ ID NO: 4469973 - DNA, 25 bp, Homo sapien
gttattatgtgctggggacatcgga

SEQ ID NO: 4469974 - DNA, 25 bp, Homo sapien
ttatgtgctggggacatcggattcg

SEQ ID NO: 4469975 - DNA, 25 bp, Homo sapien
ccaagttattatgtgctggggacat

SEQ ID NO: 4469976 - DNA, 25 bp, Homo sapien
tcggattcggggataggtttggaga

SEQ ID NO: 4469977 - DNA, 25 bp, Homo sapien
acactggcgactcgccagggctgca

SEQ ID NO: 4469978 - DNA, 25 bp, Homo sapien
ccacactggcgactcgccagggctg

SEQ ID NO: 4469979 - DNA, 25 bp, Homo sapien
ccccacactggcgactcgccagggc

SEQ ID NO: 4469980 - DNA, 25 bp, Homo sapien
ctccccacactggcgactcgccagg

SEQ ID NO: 4469981 - DNA, 25 bp, Homo sapien
ctaagaattctcaactttcaggcaa

SEQ ID NO: 4469982 - DNA, 25 bp, Homo sapien
taagaattctcaactttcaggcaag

SEQ ID NO: 4469983 - DNA, 25 bp, Homo sapien
tgaacggcaggcagacaagaagtat

SEQ ID NO: 4469984 - DNA, 25 bp, Homo sapien
ctgaacggcaggcagacaagaagta

SEQ ID NO: 4469985 - DNA, 25 bp, Homo sapien
cgtagcccctcgatggctatgtctg

SEQ ID NO: 4469986 - DNA, 25 bp, Homo sapien
attgatcccaacaaggccgtagccc

SEQ ID NO: 4469987 - DNA, 25 bp, Homo sapien
tagcccctcgatggctatgtctgtg

SEQ ID NO: 4469988 - DNA, 25 bp, Homo sapien
ccctcgatggctatgtctgtggtcc

SEQ ID NO: 4469989 - DNA, 25 bp, Homo sapien
gcggtaagacagaagtacaggaaca

SEQ ID NO: 4469990 - DNA, 25 bp, Homo sapien
aggaaggctgggtcagacaggcctc

SEQ ID NO: 4469991 - DNA, 25 bp, Homo sapien
taagacagaagtacaggaacagtga

SEQ ID NO: 4469992 - DNA, 25 bp, Homo sapien
aagtacaggaacagtgatcagtgca

SEQ ID NO: 4469993 - DNA, 25 bp, Homo sapien
catcctagggtttgggacgcactga

SEQ ID NO: 4469994 - DNA, 25 bp, Homo sapien
gggtcggcctctccactaaatccat

SEQ ID NO: 4469995 - DNA, 25 bp, Homo sapien
tgacttcagccaaacttcatcggtg

SEQ ID NO: 4469996 - DNA, 25 bp, Homo sapien
cagatgtcctgagatgtccccattt

SEQ ID NO: 4469997 - DNA, 25 bp, Homo sapien
caagctggcacagacgttccattat

SEQ ID NO: 4469998 - DNA, 25 bp, Homo sapien
ccagtgtggtgtcggccagacttct

SEQ ID NO: 4469999 - DNA, 25 bp, Homo sapien
gacttctcaagtgccatagggcact

SEQ ID NO: 4470000 - DNA, 25 bp, Homo sapien
gcctaacgcattggctggcctcagt

SEQ ID NO: 4470001 - DNA, 25 bp, Homo sapien
caccaggcatcatctgcagactgag

SEQ ID NO: 4470002 - DNA, 25 bp, Homo sapien
ttggcgcagtggacacaccaggcat

SEQ ID NO: 4470003 - DNA, 25 bp, Homo sapien
ctggggccatgcctcctatcacaga

SEQ ID NO: 4470004 - DNA, 25 bp, Homo sapien
gcatcatctgcagactgagcctggg

SEQ ID NO: 4470005 - DNA, 25 bp, Homo sapien
cagcctctgttgcaaggtccccaga

SEQ ID NO: 4470006 - DNA, 25 bp, Homo sapien
gagtgggttcccaacagcgccccat

SEQ ID NO: 4470007 - DNA, 25 bp, Homo sapien
gtccccagagtaacccacattaatc

SEQ ID NO: 4470008 - DNA, 25 bp, Homo sapien
caagcctgcagcagccgagtgggtt

SEQ ID NO: 4470009 - DNA, 25 bp, Homo sapien
caggccacacctcctgcacagtcac

SEQ ID NO: 4470010 - DNA, 25 bp, Homo sapien
tgtggggcaggccacacctcctgca

SEQ ID NO: 4470011 - DNA, 25 bp, Homo sapien
gggcaggccacacctcctgcacagt

SEQ ID NO: 4470012 - DNA, 25 bp, Homo sapien
ctgtggggcaggccacacctcctgc

SEQ ID NO: 4470013 - DNA, 25 bp, Homo sapien
ctgggacagccactgcgtgtactca

SEQ ID NO: 4470014 - DNA, 25 bp, Homo sapien
tttatttagctcataaaggccctgc

SEQ ID NO: 4470015 - DNA, 25 bp, Homo sapien
tgaagaggaccaggggccacccagt

SEQ ID NO: 4470016 - DNA, 25 bp, Homo sapien
ttgactggatggaaggagtcttcaa

SEQ ID NO: 4470017 - DNA, 25 bp, Homo sapien
tttagctcataaaggccctgccccg

SEQ ID NO: 4470018 - DNA, 25 bp, Homo sapien
gctccctcgatggggtcccatggac

SEQ ID NO: 4470019 - DNA, 25 bp, Homo sapien
tccctcgatggggtcccatggacac

SEQ ID NO: 4470020 - DNA, 25 bp, Homo sapien
ctccctcgatggggtcccatggaca

SEQ ID NO: 4470021 - DNA, 25 bp, Homo sapien
ccctcgatggggtcccatggacact

SEQ ID NO: 4470022 - DNA, 25 bp, Homo sapien
acacagggtgggctactgggtcatt

SEQ ID NO: 4470023 - DNA, 25 bp, Homo sapien
gctactgggtcattgggtgtcccaa

SEQ ID NO: 4470024 - DNA, 25 bp, Homo sapien
tactgggtcattgggtgtcccaagc

SEQ ID NO: 4470025 - DNA, 25 bp, Homo sapien
tgggctactgggtcattgggtgtcc

SEQ ID NO: 4470026 - DNA, 25 bp, Homo sapien
ccacagtcatggatggctgcgaggc

SEQ ID NO: 4470027 - DNA, 25 bp, Homo sapien
tcgtagtaggagatggagcaccaga

SEQ ID NO: 4470028 - DNA, 25 bp, Homo sapien
taggcagaagcgctccgaattggag

SEQ ID NO: 4470029 - DNA, 25 bp, Homo sapien
aaggccggctcgcagtaggtaactg

SEQ ID NO: 4470030 - DNA, 25 bp, Homo sapien
cgaaatgggaacaacaggtctggta

SEQ ID NO: 4470031 - DNA, 25 bp, Homo sapien
gacatcaggtccctttcctagaaaa

SEQ ID NO: 4470032 - DNA, 25 bp, Homo sapien
gcagtggtatatgcctattgtccca

SEQ ID NO: 4470033 - DNA, 25 bp, Homo sapien
caatcaatcaaacagtggtatgcca

SEQ ID NO: 4470034 - DNA, 25 bp, Homo sapien
ttgggagactggacaaaaatagcgc

SEQ ID NO: 4470035 - DNA, 25 bp, Homo sapien
tcactgaggcactctgcgaagacct

SEQ ID NO: 4470036 - DNA, 25 bp, Homo sapien
gccatagcgctggttacagttggga

SEQ ID NO: 4470037 - DNA, 25 bp, Homo sapien
aagacctcccctccgatgtagtaga

SEQ ID NO: 4470038 - DNA, 25 bp, Homo sapien
gctgcacgtcctgtgaaaagtggac

SEQ ID NO: 4470039 - DNA, 25 bp, Homo sapien
tctgtgggctgcctacacagtggct

SEQ ID NO: 4470040 - DNA, 25 bp, Homo sapien
tgcctacacagtggctgcacgtcct

SEQ ID NO: 4470041 - DNA, 25 bp, Homo sapien
tgctccactagtctgtcacaggcca

SEQ ID NO: 4470042 - DNA, 25 bp, Homo sapien
tgggtggaggtgacattcacagcta

SEQ ID NO: 4470043 - DNA, 25 bp, Homo sapien
ggtgacattcacagctaagtgaagg

SEQ ID NO: 4470044 - DNA, 25 bp, Homo sapien
agagatctgggccaaattttggcct

SEQ ID NO: 4470045 - DNA, 25 bp, Homo sapien
gatctgggccaaattttggcctctg

SEQ ID NO: 4470046 - DNA, 25 bp, Homo sapien
tgggctcctctgatgaatacacctg

SEQ ID NO: 4470047 - DNA, 25 bp, Homo sapien
gctctggccgttccacagcaggcag

SEQ ID NO: 4470048 - DNA, 25 bp, Homo sapien
ggaacaggagctctggccgttccac

SEQ ID NO: 4470049 - DNA, 25 bp, Homo sapien
acgggctggccgaaaggctactggg

SEQ ID NO: 4470050 - DNA, 25 bp, Homo sapien
ctgggccaggttgcccatgctgtgt

SEQ ID NO: 4470051 - DNA, 25 bp, Homo sapien
agggcttccaaaaatagggagatgg

SEQ ID NO: 4470052 - DNA, 25 bp, Homo sapien
aagtctgcaaagagggcttccaaaa

SEQ ID NO: 4470053 - DNA, 25 bp, Homo sapien
ggagaagtctgcaaagagggcttcc

SEQ ID NO: 4470054 - DNA, 25 bp, Homo sapien
aggctggcccacaagctccgactcc

SEQ ID NO: 4470055 - DNA, 25 bp, Homo sapien
tccccttgaacccatctcctcactg

SEQ ID NO: 4470056 - DNA, 25 bp, Homo sapien
tagaccagcctcatttatacagctc

SEQ ID NO: 4470057 - DNA, 25 bp, Homo sapien
tcactgggaggtgccactgacatac

SEQ ID NO: 4470058 - DNA, 25 bp, Homo sapien
gaagtggccaggtccgttgctcccc

SEQ ID NO: 4470059 - DNA, 25 bp, Homo sapien
gcctttgacgaagctcatgcggatg

SEQ ID NO: 4470060 - DNA, 25 bp, Homo sapien
ggtcaactggtagacagcctcaaag

SEQ ID NO: 4470061 - DNA, 25 bp, Homo sapien
gatggtgcacattcgggtcaactgg

SEQ ID NO: 4470062 - DNA, 25 bp, Homo sapien
aagccctggttgaccgactgggcca

SEQ ID NO: 4470063 - DNA, 25 bp, Homo sapien
ggtcccctgatgtaggcagcaccca

SEQ ID NO: 4470064 - DNA, 25 bp, Homo sapien
ccctgatgtaggcagcacccataac

SEQ ID NO: 4470065 - DNA, 25 bp, Homo sapien
gatgtaggcagcacccataactgac

SEQ ID NO: 4470066 - DNA, 25 bp, Homo sapien
tgatgtaggcagcacccataactga

SEQ ID NO: 4470067 - DNA, 25 bp, Homo sapien
gatttcattacaaacggtggcccaa

SEQ ID NO: 4470068 - DNA, 25 bp, Homo sapien
ggatttcattacaaacggtggccca

SEQ ID NO: 4470069 - DNA, 25 bp, Homo sapien
atttcattacaaacggtggcccaag

SEQ ID NO: 4470070 - DNA, 25 bp, Homo sapien
aggctggttgatgacgcagcttgca

SEQ ID NO: 4470071 - DNA, 25 bp, Homo sapien
tcaggctggttgatgacgcagcttg

SEQ ID NO: 4470072 - DNA, 25 bp, Homo sapien
tttgtctaaattcaggctggttgat

SEQ ID NO: 4470073 - DNA, 25 bp, Homo sapien
tggttgatgacgcagcttgcaggca

SEQ ID NO: 4470074 - DNA, 25 bp, Homo sapien
tcttacaagcagaacgagccatgga

SEQ ID NO: 4470075 - DNA, 25 bp, Homo sapien
gtaacttgctgaaactacccggcca

SEQ ID NO: 4470076 - DNA, 25 bp, Homo sapien
tttacaaagcgccaacagtgtccgc

SEQ ID NO: 4470077 - DNA, 25 bp, Homo sapien
cctagaagcggtaccagtaacttgc

SEQ ID NO: 4470078 - DNA, 25 bp, Homo sapien
aacagcggatgcttggggagcccat

SEQ ID NO: 4470079 - DNA, 25 bp, Homo sapien
cagcagggggtactggtcacagtct

SEQ ID NO: 4470080 - DNA, 25 bp, Homo sapien
gaggaccttgtcaagccactgcaaa

SEQ ID NO: 4470081 - DNA, 25 bp, Homo sapien
cccattcaggtgcagctcaatccag

SEQ ID NO: 4470082 - DNA, 25 bp, Homo sapien
tggaagaggcactgtcacaagcgtc

SEQ ID NO: 4470083 - DNA, 25 bp, Homo sapien
caacaatgggttgagtagagttcca

SEQ ID NO: 4470084 - DNA, 25 bp, Homo sapien
tgttctgctcacttaagccaccaga

SEQ ID NO: 4470085 - DNA, 25 bp, Homo sapien
gaaaacaggtgggtgcaccccttca

SEQ ID NO: 4470086 - DNA, 25 bp, Homo sapien
gggcaaggtctgctggagtggtggg

SEQ ID NO: 4470087 - DNA, 25 bp, Homo sapien
aaggtctgctggagtggtggggcgg

SEQ ID NO: 4470088 - DNA, 25 bp, Homo sapien
ggggcaaggtctgctggagtggtgg

SEQ ID NO: 4470089 - DNA, 25 bp, Homo sapien
gcaaggtctgctggagtggtggggc

SEQ ID NO: 4470090 - DNA, 25 bp, Homo sapien
ggagacagacaaaactccctccctc

SEQ ID NO: 4470091 - DNA, 25 bp, Homo sapien
tgggcctcagcagatccttccaact

SEQ ID NO: 4470092 - DNA, 25 bp, Homo sapien
gaggtggcgctcatcgatttttccc

SEQ ID NO: 4470093 - DNA, 25 bp, Homo sapien
gatttttcccgctgtcctgtgtgca

SEQ ID NO: 4470094 - DNA, 25 bp, Homo sapien
tatacattgcatatgcactgggcct

SEQ ID NO: 4470095 - DNA, 25 bp, Homo sapien
tagccgtatgcatcagaatctggag

SEQ ID NO: 4470096 - DNA, 25 bp, Homo sapien
gcaagctcttacagatgactggaga

SEQ ID NO: 4470097 - DNA, 25 bp, Homo sapien
cagtgtggtgctgcctgagaccaaa

SEQ ID NO: 4470098 - DNA, 25 bp, Homo sapien
tgactggagacgcacccagtgtggt

SEQ ID NO: 4470099 - DNA, 25 bp, Homo sapien
tcaggtttcccagtcaatgtgccag

SEQ ID NO: 4470100 - DNA, 25 bp, Homo sapien
cataaggacaatggagacgtctgcc

SEQ ID NO: 4470101 - DNA, 25 bp, Homo sapien
taaaagttggctccttggaaggtgc

SEQ ID NO: 4470102 - DNA, 25 bp, Homo sapien
gaagccctcataggatcgtgcagca

SEQ ID NO: 4470103 - DNA, 25 bp, Homo sapien
ggctaagaatgaaacagatctttgc

SEQ ID NO: 4470104 - DNA, 25 bp, Homo sapien
agaccctcatgaggcctgaggctaa

SEQ ID NO: 4470105 - DNA, 25 bp, Homo sapien
gattacttacatacgtgcatgccat

SEQ ID NO: 4470106 - DNA, 25 bp, Homo sapien
tgtaacctgagctccggccctgtgg

SEQ ID NO: 4470107 - DNA, 25 bp, Homo sapien
gtccagggctaaacgggtgcactct

SEQ ID NO: 4470108 - DNA, 25 bp, Homo sapien
tacccacttgagaagcggctgatgc

SEQ ID NO: 4470109 - DNA, 25 bp, Homo sapien
tacattgtgaagacggttacctgaa

SEQ ID NO: 4470110 - DNA, 25 bp, Homo sapien
tggtgaacagtcctacaagcagcct

SEQ ID NO: 4470111 - DNA, 25 bp, Homo sapien
catcagagtccagaacagccgagtt

SEQ ID NO: 4470112 - DNA, 25 bp, Homo sapien
gaaaagttgcctgtttagcccatca

SEQ ID NO: 4470113 - DNA, 25 bp, Homo sapien
aacattcagaactggctgtgcccca

SEQ ID NO: 4470114 - DNA, 25 bp, Homo sapien
tacacgcggccacttgtttagccag

SEQ ID NO: 4470115 - DNA, 25 bp, Homo sapien
gggtcagtgtaagatctagccaagg

SEQ ID NO: 4470116 - DNA, 25 bp, Homo sapien
tctggggtcagtgtaagatctagcc

SEQ ID NO: 4470117 - DNA, 25 bp, Homo sapien
ggtcagtgtaagatctagccaagga

SEQ ID NO: 4470118 - DNA, 25 bp, Homo sapien
cagtgtaagatctagccaaggaaac

SEQ ID NO: 4470119 - DNA, 25 bp, Homo sapien
ggaggtccttaggaggactgctgca

SEQ ID NO: 4470120 - DNA, 25 bp, Homo sapien
gcagatgtggtcacaccagatgatt

SEQ ID NO: 4470121 - DNA, 25 bp, Homo sapien
tgattactccaacccatttcatcct

SEQ ID NO: 4470122 - DNA, 25 bp, Homo sapien
ggtcacaccagatgattactccaac

SEQ ID NO: 4470123 - DNA, 25 bp, Homo sapien
aacaacagcatagtttaggagagaa

SEQ ID NO: 4470124 - DNA, 25 bp, Homo sapien
ccaggtggctttaatgctattacac

SEQ ID NO: 4470125 - DNA, 25 bp, Homo sapien
aaatgtggactaaggcctagggtag

SEQ ID NO: 4470126 - DNA, 25 bp, Homo sapien
taggaactttatggaaacaacagca

SEQ ID NO: 4470127 - DNA, 25 bp, Homo sapien
ttcctccgcacaactacagatctgg

SEQ ID NO: 4470128 - DNA, 25 bp, Homo sapien
caactacagatctgggaggcataac

SEQ ID NO: 4470129 - DNA, 25 bp, Homo sapien
gaggcataaccaggcaccccaagct

SEQ ID NO: 4470130 - DNA, 25 bp, Homo sapien
ttatgcccagtttactgactaggaa

SEQ ID NO: 4470131 - DNA, 25 bp, Homo sapien
attaggttctagcataggaagtatc

SEQ ID NO: 4470132 - DNA, 25 bp, Homo sapien
tcttgctctatcctaagttgttcct

SEQ ID NO: 4470133 - DNA, 25 bp, Homo sapien
ggtatccttactcagaattaggttc

SEQ ID NO: 4470134 - DNA, 25 bp, Homo sapien
taatgtaggtatccttactcagaat

SEQ ID NO: 4470135 - DNA, 25 bp, Homo sapien
tagctgcagtctatctaaagtgacc

SEQ ID NO: 4470136 - DNA, 25 bp, Homo sapien
gggaagccctatatccttcattgga

SEQ ID NO: 4470137 - DNA, 25 bp, Homo sapien
ttttaagacctcagctatgcaggga

SEQ ID NO: 4470138 - DNA, 25 bp, Homo sapien
cctcttctagggacatatgggatga

SEQ ID NO: 4470139 - DNA, 25 bp, Homo sapien
tccaagcctgtaacctcggaggact

SEQ ID NO: 4470140 - DNA, 25 bp, Homo sapien
taggcgatgaattcctgagcacctt

SEQ ID NO: 4470141 - DNA, 25 bp, Homo sapien
tcttccaaggttcgtagctcctctc

SEQ ID NO: 4470142 - DNA, 25 bp, Homo sapien
tgtcttgtttgagtgggtcagcccc

SEQ ID NO: 4470143 - DNA, 25 bp, Homo sapien
gaaaacctctctactgagttgtggg

SEQ ID NO: 4470144 - DNA, 25 bp, Homo sapien
caaaggatttctattccagtgggaa

SEQ ID NO: 4470145 - DNA, 25 bp, Homo sapien
gcccgcagctaagtctctacctaag

SEQ ID NO: 4470146 - DNA, 25 bp, Homo sapien
tgttagagagaaccttaaggagtcc

SEQ ID NO: 4470147 - DNA, 25 bp, Homo sapien
taaaaccatagatgctagagccagt

SEQ ID NO: 4470148 - DNA, 25 bp, Homo sapien
gaatctatgctaatgaccagcaccg

SEQ ID NO: 4470149 - DNA, 25 bp, Homo sapien
gcttctaaagttaagtgtgccctca

SEQ ID NO: 4470150 - DNA, 25 bp, Homo sapien
ccagcaccgccagattttttcatga

SEQ ID NO: 4470151 - DNA, 25 bp, Homo sapien
cctttacaacattggagaggatagc

SEQ ID NO: 4470152 - DNA, 25 bp, Homo sapien
gagataggactttacaatggaacta

SEQ ID NO: 4470153 - DNA, 25 bp, Homo sapien
ggatagcactcactctgatgtttag

SEQ ID NO: 4470154 - DNA, 25 bp, Homo sapien
gagtgtgcttaaggttctggagata

SEQ ID NO: 4470155 - DNA, 25 bp, Homo sapien
tatttttagacctgggtatgaacca

SEQ ID NO: 4470156 - DNA, 25 bp, Homo sapien
ggttctgaacgatttttgatttgat

SEQ ID NO: 4470157 - DNA, 25 bp, Homo sapien
taaagtcttgtactggttctgaacg

SEQ ID NO: 4470158 - DNA, 25 bp, Homo sapien
gggtatgaaccacttaagtcatctt

SEQ ID NO: 4470159 - DNA, 25 bp, Homo sapien
tatgtgtgtatagaaggcataattt

SEQ ID NO: 4470160 - DNA, 25 bp, Homo sapien
tatgtgttgatctctatctgtgtgt

SEQ ID NO: 4470161 - DNA, 25 bp, Homo sapien
tgtgttgatctctatctgtgtgtgt

SEQ ID NO: 4470162 - DNA, 25 bp, Homo sapien
aatatgtgttgatctctatctgtgt

SEQ ID NO: 4470163 - DNA, 25 bp, Homo sapien
tgaaattgagttccttgagtcagac

SEQ ID NO: 4470164 - DNA, 25 bp, Homo sapien
tctgacagttgtctaaatgtgaatg

SEQ ID NO: 4470165 - DNA, 25 bp, Homo sapien
taacccaggacctaatattgtagag

SEQ ID NO: 4470166 - DNA, 25 bp, Homo sapien
aaaaatggatactctgacagttgtc

SEQ ID NO: 4470167 - DNA, 25 bp, Homo sapien
tgaagacagttctaatcaggtctgt

SEQ ID NO: 4470168 - DNA, 25 bp, Homo sapien
tagaggagaatcgttaatgaagaca

SEQ ID NO: 4470169 - DNA, 25 bp, Homo sapien
cctaacctctaggatgggtagaact

SEQ ID NO: 4470170 - DNA, 25 bp, Homo sapien
tgtctttacccgtgttctcttggaa

SEQ ID NO: 4470171 - DNA, 25 bp, Homo sapien
cagaattaggtaagatgtcccttca

SEQ ID NO: 4470172 - DNA, 25 bp, Homo sapien
gaaaatagccatagtctcattaccc

SEQ ID NO: 4470173 - DNA, 25 bp, Homo sapien
tatatccatctagtgaataaaccag

SEQ ID NO: 4470174 - DNA, 25 bp, Homo sapien
gtcccttcagtgcagatattatatg

SEQ ID NO: 4470175 - DNA, 25 bp, Homo sapien
ggcacattactatctctgtaaccct

SEQ ID NO: 4470176 - DNA, 25 bp, Homo sapien
cattactatctctgtaaccctcaat

SEQ ID NO: 4470177 - DNA, 25 bp, Homo sapien
cacattactatctctgtaaccctca

SEQ ID NO: 4470178 - DNA, 25 bp, Homo sapien
ttactatctctgtaaccctcaattt

SEQ ID NO: 4470179 - DNA, 25 bp, Homo sapien
ggctaggtcagggaacggctacctc

SEQ ID NO: 4470180 - DNA, 25 bp, Homo sapien
tttccaagcacggaaaccttcagcc

SEQ ID NO: 4470181 - DNA, 25 bp, Homo sapien
tacctccgcggaggcgcggtttcca

SEQ ID NO: 4470182 - DNA, 25 bp, Homo sapien
acggaaaccttcagccggagccgct

SEQ ID NO: 4470183 - DNA, 25 bp, Homo sapien
ctggattaagatggatccgacaggg

SEQ ID NO: 4470184 - DNA, 25 bp, Homo sapien
ggatccgacagggtcgtggttttca

SEQ ID NO: 4470185 - DNA, 25 bp, Homo sapien
cgacagggtcgtggttttcagtgtt

SEQ ID NO: 4470186 - DNA, 25 bp, Homo sapien
gattaagatggatccgacagggtcg

SEQ ID NO: 4470187 - DNA, 25 bp, Homo sapien
gcctggcctggttctaaggcattct

SEQ ID NO: 4470188 - DNA, 25 bp, Homo sapien
catgcctggcctggttctaaggcat

SEQ ID NO: 4470189 - DNA, 25 bp, Homo sapien
tcaaactactgtcctcatgatcttc

SEQ ID NO: 4470190 - DNA, 25 bp, Homo sapien
ctcaaactactgtcctcatgatctt

SEQ ID NO: 4470191 - DNA, 25 bp, Homo sapien
cctttaactgataaaggtcttcatg

SEQ ID NO: 4470192 - DNA, 25 bp, Homo sapien
tctcctttaactgataaaggtcttc

SEQ ID NO: 4470193 - DNA, 25 bp, Homo sapien
ctttaactgataaaggtcttcatgg

SEQ ID NO: 4470194 - DNA, 25 bp, Homo sapien
ctcctttaactgataaaggtcttca

SEQ ID NO: 4470195 - DNA, 25 bp, Homo sapien
cccacttcagtccttttgattgctg

SEQ ID NO: 4470196 - DNA, 25 bp, Homo sapien
aaccccacttcagtccttttgattg

SEQ ID NO: 4470197 - DNA, 25 bp, Homo sapien
accccacttcagtccttttgattgc

SEQ ID NO: 4470198 - DNA, 25 bp, Homo sapien
ccccacttcagtccttttgattgct

SEQ ID NO: 4470199 - DNA, 25 bp, Homo sapien
ctctcatcattaacagaagtcgtta

SEQ ID NO: 4470200 - DNA, 25 bp, Homo sapien
cctggggagtatataagctctcatc

SEQ ID NO: 4470201 - DNA, 25 bp, Homo sapien
cagaagtcgttaatacattctggtt

SEQ ID NO: 4470202 - DNA, 25 bp, Homo sapien
aagcctggggagtatataagctctc

SEQ ID NO: 4470203 - DNA, 25 bp, Homo sapien
gatttctgatcaattacagttggaa

SEQ ID NO: 4470204 - DNA, 25 bp, Homo sapien
tttctgatcaattacagttggaagt

SEQ ID NO: 4470205 - DNA, 25 bp, Homo sapien
ctgatcaattacagttggaagtaac

SEQ ID NO: 4470206 - DNA, 25 bp, Homo sapien
atgatttctgatcaattacagttgg

SEQ ID NO: 4470207 - DNA, 25 bp, Homo sapien
tgtctttggggttgccaaaatgtac

SEQ ID NO: 4470208 - DNA, 25 bp, Homo sapien
gctgtctttggggttgccaaaatgt

SEQ ID NO: 4470209 - DNA, 25 bp, Homo sapien
actgtgctgtctttggggttgccaa

SEQ ID NO: 4470210 - DNA, 25 bp, Homo sapien
tgtgctgtctttggggttgccaaaa

SEQ ID NO: 4470211 - DNA, 25 bp, Homo sapien
cagcgtgcctctaataatcctgggc

SEQ ID NO: 4470212 - DNA, 25 bp, Homo sapien
ttttgaaatagttgccacagggcca

SEQ ID NO: 4470213 - DNA, 25 bp, Homo sapien
cagatgagcacactcttagagatca

SEQ ID NO: 4470214 - DNA, 25 bp, Homo sapien
taacaagtgcaaggacagagatagg

SEQ ID NO: 4470215 - DNA, 25 bp, Homo sapien
tttatttcattgctcttataaatca

SEQ ID NO: 4470216 - DNA, 25 bp, Homo sapien
aatcagatacctccatctaatctct

SEQ ID NO: 4470217 - DNA, 25 bp, Homo sapien
atcagatacctccatctaatctctg

SEQ ID NO: 4470218 - DNA, 25 bp, Homo sapien
tgagtggacaaatacaacccgctgt

SEQ ID NO: 4470219 - DNA, 25 bp, Homo sapien
cactggttgcctcatgggattgggt

SEQ ID NO: 4470220 - DNA, 25 bp, Homo sapien
ggagtccatattgatttcgccagtt

SEQ ID NO: 4470221 - DNA, 25 bp, Homo sapien
tgtttgtcacaacaacaagcatgta

SEQ ID NO: 4470222 - DNA, 25 bp, Homo sapien
tctgcacaacaaatccccatgacac

SEQ ID NO: 4470223 - DNA, 25 bp, Homo sapien
tgcacaacaaatccccatgacacaa

SEQ ID NO: 4470224 - DNA, 25 bp, Homo sapien
aatctgcacaacaaatccccatgac

SEQ ID NO: 4470225 - DNA, 25 bp, Homo sapien
taatctgcacaacaaatccccatga

SEQ ID NO: 4470226 - DNA, 25 bp, Homo sapien
gtagaagccctccacaatcacagca

SEQ ID NO: 4470227 - DNA, 25 bp, Homo sapien
aaagtagaagccctccacaatcaca

SEQ ID NO: 4470228 - DNA, 25 bp, Homo sapien
cctcttatctccctgttagggctag

SEQ ID NO: 4470229 - DNA, 25 bp, Homo sapien
cctgttagggctagaaggatcaaca

SEQ ID NO: 4470230 - DNA, 25 bp, Homo sapien
actgattccatagttcgcatttaca

SEQ ID NO: 4470231 - DNA, 25 bp, Homo sapien
tccatagttcgcatttacagcagct

SEQ ID NO: 4470232 - DNA, 25 bp, Homo sapien
tcgcatttacagcagctctgtggtg

SEQ ID NO: 4470233 - DNA, 25 bp, Homo sapien
aagatttttacattcaaccctatct

SEQ ID NO: 4470234 - DNA, 25 bp, Homo sapien
aagtctaactggaactggatgtcag

SEQ ID NO: 4470235 - DNA, 25 bp, Homo sapien
aactggtataattctacagcaactc

SEQ ID NO: 4470236 - DNA, 25 bp, Homo sapien
tcttgtttccacatacctttgagga

SEQ ID NO: 4470237 - DNA, 25 bp, Homo sapien
tgttaacagatacatgtttcaagcc

SEQ ID NO: 4470238 - DNA, 25 bp, Homo sapien
ttgtccggagacagctgtaaaccag

SEQ ID NO: 4470239 - DNA, 25 bp, Homo sapien
ccatagcatcacaatcaggcactga

SEQ ID NO: 4470240 - DNA, 25 bp, Homo sapien
agcaggcggaatatgcaggcccatc

SEQ ID NO: 4470241 - DNA, 25 bp, Homo sapien
tattggaattcaagggtgggcctcc

SEQ ID NO: 4470242 - DNA, 25 bp, Homo sapien
ctgctctcttgggtcactgttttca

SEQ ID NO: 4470243 - DNA, 25 bp, Homo sapien
cctgataatcttctataagggtcag

SEQ ID NO: 4470244 - DNA, 25 bp, Homo sapien
tgctctcttgggtcactgttttcac

SEQ ID NO: 4470245 - DNA, 25 bp, Homo sapien
tttcactatacaactcctcctgata

SEQ ID NO: 4470246 - DNA, 25 bp, Homo sapien
cactaagggcaatatctacgctgag

SEQ ID NO: 4470247 - DNA, 25 bp, Homo sapien
tccctttcccattgacttacagtgt

SEQ ID NO: 4470248 - DNA, 25 bp, Homo sapien
ccatccggagttttcttcgtataga

SEQ ID NO: 4470249 - DNA, 25 bp, Homo sapien
gatctatcaatttttctacccatgg

SEQ ID NO: 4470250 - DNA, 25 bp, Homo sapien
tatactattctgaaggcattatgca

SEQ ID NO: 4470251 - DNA, 25 bp, Homo sapien
gacctgagcctcacctagcactttt

SEQ ID NO: 4470252 - DNA, 25 bp, Homo sapien
tgtacagcagtatgttcatgccatg

SEQ ID NO: 4470253 - DNA, 25 bp, Homo sapien
tagctaaaacgtaatctcctgtagg

SEQ ID NO: 4470254 - DNA, 25 bp, Homo sapien
tgtaaaatataggtttggcagtttc

SEQ ID NO: 4470255 - DNA, 25 bp, Homo sapien
tccggattttctcaaagcctttgac

SEQ ID NO: 4470256 - DNA, 25 bp, Homo sapien
caaagaggataatttatccggattt

SEQ ID NO: 4470257 - DNA, 25 bp, Homo sapien
aaatataggtttggcagtttcagga

SEQ ID NO: 4470258 - DNA, 25 bp, Homo sapien
tgttagaccctttgattaacttcga

SEQ ID NO: 4470259 - DNA, 25 bp, Homo sapien
gctggatatgttagaccctttgatt

SEQ ID NO: 4470260 - DNA, 25 bp, Homo sapien
agaaccgtgaggctggatatgttag

SEQ ID NO: 4470261 - DNA, 25 bp, Homo sapien
ccgtgaggctggatatgttagaccc

SEQ ID NO: 4470262 - DNA, 25 bp, Homo sapien
cttgtaagactggtataggagtgaa

SEQ ID NO: 4470263 - DNA, 25 bp, Homo sapien
tctgcttgtaagactggtataggag

SEQ ID NO: 4470264 - DNA, 25 bp, Homo sapien
gtaagactggtataggagtgaaata

SEQ ID NO: 4470265 - DNA, 25 bp, Homo sapien
ggcatctgcttgtaagactggtata

SEQ ID NO: 4470266 - DNA, 25 bp, Homo sapien
tgtaatgggtggattctgaaaggta

SEQ ID NO: 4470267 - DNA, 25 bp, Homo sapien
agttggaatcttacgtgcttcatca

SEQ ID NO: 4470268 - DNA, 25 bp, Homo sapien
tcatcaaaactatgcagaggagctg

SEQ ID NO: 4470269 - DNA, 25 bp, Homo sapien
tccttgctgttggtggaatcagccc

SEQ ID NO: 4470270 - DNA, 25 bp, Homo sapien
tggcttccggcaagcttccctgtga

SEQ ID NO: 4470271 - DNA, 25 bp, Homo sapien
gcatttgatcaacccatttttacaa

SEQ ID NO: 4470272 - DNA, 25 bp, Homo sapien
ggccagtagtgtatgaagaccccat

SEQ ID NO: 4470273 - DNA, 25 bp, Homo sapien
acttgtagtcctcactatcccctgg

SEQ ID NO: 4470274 - DNA, 25 bp, Homo sapien
tggttcccgaggtatagtgaaagtg

SEQ ID NO: 4470275 - DNA, 25 bp, Homo sapien
tgggaaagaacttcacttctgctgg

SEQ ID NO: 4470276 - DNA, 25 bp, Homo sapien
ctttgatctttgtttcttgggaaag

SEQ ID NO: 4470277 - DNA, 25 bp, Homo sapien
gagatggaggtggttcccgaggtat

SEQ ID NO: 4470278 - DNA, 25 bp, Homo sapien
cttcctatcatgatgtcctcttgac

SEQ ID NO: 4470279 - DNA, 25 bp, Homo sapien
ttcctatcatgatgtcctcttgacc

SEQ ID NO: 4470280 - DNA, 25 bp, Homo sapien
ggacatcaggtgacagaccctaaat

SEQ ID NO: 4470281 - DNA, 25 bp, Homo sapien
cctgaaaccatgatctaatttcttt

SEQ ID NO: 4470282 - DNA, 25 bp, Homo sapien
gaccctaaatttcaactagtcacac

SEQ ID NO: 4470283 - DNA, 25 bp, Homo sapien
tccagctgtcaagcagtcacccata

SEQ ID NO: 4470284 - DNA, 25 bp, Homo sapien
gacctgctctcaaaggaaacatact

SEQ ID NO: 4470285 - DNA, 25 bp, Homo sapien
ctgggaagctatcggtttggagtca

SEQ ID NO: 4470286 - DNA, 25 bp, Homo sapien
gagtcagctaaagcataactgtagt

SEQ ID NO: 4470287 - DNA, 25 bp, Homo sapien
cttggatgatattccagcaaagacc

SEQ ID NO: 4470288 - DNA, 25 bp, Homo sapien
tagggtttttacgtacatcagcaaa

SEQ ID NO: 4470289 - DNA, 25 bp, Homo sapien
tctagggtttttacgtacatcagca

SEQ ID NO: 4470290 - DNA, 25 bp, Homo sapien
gtctagggtttttacgtacatcagc

SEQ ID NO: 4470291 - DNA, 25 bp, Homo sapien
ggtttttacgtacatcagcaaatgt

SEQ ID NO: 4470292 - DNA, 25 bp, Homo sapien
gctgtcccaggtggattaggatcac

SEQ ID NO: 4470293 - DNA, 25 bp, Homo sapien
tattcttaagtctggtttcttctta

SEQ ID NO: 4470294 - DNA, 25 bp, Homo sapien
cttgacacgtgttcttttattctta

SEQ ID NO: 4470295 - DNA, 25 bp, Homo sapien
gtttcttcttaggaacatatctggg

SEQ ID NO: 4470296 - DNA, 25 bp, Homo sapien
gggctgtattgtctatgacaccatc

SEQ ID NO: 4470297 - DNA, 25 bp, Homo sapien
ctggggctgtattgtctatgacacc

SEQ ID NO: 4470298 - DNA, 25 bp, Homo sapien
gtattgtctatgacaccatcataaa

SEQ ID NO: 4470299 - DNA, 25 bp, Homo sapien
gctgtattgtctatgacaccatcat

SEQ ID NO: 4470300 - DNA, 25 bp, Homo sapien
ggcggcctccgaatttccatcttgg

SEQ ID NO: 4470301 - DNA, 25 bp, Homo sapien
tgagctgggtcctctaacactgaga

SEQ ID NO: 4470302 - DNA, 25 bp, Homo sapien
ggcttggatcttcatggcggcctcc

SEQ ID NO: 4470303 - DNA, 25 bp, Homo sapien
gcccacttctgctggcgataaaaga

SEQ ID NO: 4470304 - DNA, 25 bp, Homo sapien
tggctcgaatgcgaaaattctccag

SEQ ID NO: 4470305 - DNA, 25 bp, Homo sapien
ggctcgaatgcgaaaattctccagg

SEQ ID NO: 4470306 - DNA, 25 bp, Homo sapien
cttggctcgaatgcgaaaattctcc

SEQ ID NO: 4470307 - DNA, 25 bp, Homo sapien
gctcgaatgcgaaaattctccaggt

SEQ ID NO: 4470308 - DNA, 25 bp, Homo sapien
cctcctggaggtcctgatgcgattc

SEQ ID NO: 4470309 - DNA, 25 bp, Homo sapien
tgcgattccagttggctgccagatg

SEQ ID NO: 4470310 - DNA, 25 bp, Homo sapien
tatggataatagtcctcctggaggt

SEQ ID NO: 4470311 - DNA, 25 bp, Homo sapien
aatgatgggatatggataatagtcc

SEQ ID NO: 4470312 - DNA, 25 bp, Homo sapien
taatgtggtgggtaatagaggttgc

SEQ ID NO: 4470313 - DNA, 25 bp, Homo sapien
caaggagccataatgtggtgggtaa

SEQ ID NO: 4470314 - DNA, 25 bp, Homo sapien
agccataatgtggtgggtaatagag

SEQ ID NO: 4470315 - DNA, 25 bp, Homo sapien
tggtgggtaatagaggttgctgata

SEQ ID NO: 4470316 - DNA, 25 bp, Homo sapien
gagggtcctgtgttattactctcat

SEQ ID NO: 4470317 - DNA, 25 bp, Homo sapien
tactctcatcatgtcgagaacattt

SEQ ID NO: 4470318 - DNA, 25 bp, Homo sapien
aacgccgtttcaagcgagggtcctg

SEQ ID NO: 4470319 - DNA, 25 bp, Homo sapien
gagaacattttcctgccgagaccaa

SEQ ID NO: 4470320 - DNA, 25 bp, Homo sapien
ggcgccctaggtgcaaataaagcat

SEQ ID NO: 4470321 - DNA, 25 bp, Homo sapien
tatcctggcttattggcgtaacagc

SEQ ID NO: 4470322 - DNA, 25 bp, Homo sapien
catacagatgaaagcgaattacagc

SEQ ID NO: 4470323 - DNA, 25 bp, Homo sapien
aacagtgtacaagcaatatcctggc

SEQ ID NO: 4470324 - DNA, 25 bp, Homo sapien
aattattcccatgtgtgcaaaactg

SEQ ID NO: 4470325 - DNA, 25 bp, Homo sapien
gtgttaaatgcctacctgaaccaga

SEQ ID NO: 4470326 - DNA, 25 bp, Homo sapien
acaagttagtgcagccccaattggc

SEQ ID NO: 4470327 - DNA, 25 bp, Homo sapien
ccaattggctagcagcatggtgtaa

SEQ ID NO: 4470328 - DNA, 25 bp, Homo sapien
gccacactttaaaactgtcggctct

SEQ ID NO: 4470329 - DNA, 25 bp, Homo sapien
ctttaaaactgtcggctcttgtgag

SEQ ID NO: 4470330 - DNA, 25 bp, Homo sapien
tctgggaacccaaggggatactgag

SEQ ID NO: 4470331 - DNA, 25 bp, Homo sapien
attgtgatctgggaacccaagggga

SEQ ID NO: 4470332 - DNA, 25 bp, Homo sapien
gtgtgttgaaatcggcaatatgttc

SEQ ID NO: 4470333 - DNA, 25 bp, Homo sapien
tatgttctctcacaggctgggaata

SEQ ID NO: 4470334 - DNA, 25 bp, Homo sapien
tgttgaaatcggcaatatgttctct

SEQ ID NO: 4470335 - DNA, 25 bp, Homo sapien
tgaaatcggcaatatgttctctcac

SEQ ID NO: 4470336 - DNA, 25 bp, Homo sapien
tgacggctgcatgtagacttaggat

SEQ ID NO: 4470337 - DNA, 25 bp, Homo sapien
tcaaggttcccagatttgacggctg

SEQ ID NO: 4470338 - DNA, 25 bp, Homo sapien
gatgtttacagcttcaggtgtgata

SEQ ID NO: 4470339 - DNA, 25 bp, Homo sapien
tatgatgggagcagatgtagatgac

SEQ ID NO: 4470340 - DNA, 25 bp, Homo sapien
ctgaaaccatagtaattagaacaca

SEQ ID NO: 4470341 - DNA, 25 bp, Homo sapien
tccctgaaaccatagtaattagaac

SEQ ID NO: 4470342 - DNA, 25 bp, Homo sapien
gcatccctgaaaccatagtaattag

SEQ ID NO: 4470343 - DNA, 25 bp, Homo sapien
cctgaaaccatagtaattagaacac

SEQ ID NO: 4470344 - DNA, 25 bp, Homo sapien
agatcatattattcttgttaaaagg

SEQ ID NO: 4470345 - DNA, 25 bp, Homo sapien
tgggggaagatcatattattcttgt

SEQ ID NO: 4470346 - DNA, 25 bp, Homo sapien
catattattcttgttaaaaggtgtc

SEQ ID NO: 4470347 - DNA, 25 bp, Homo sapien
gggaagatcatattattcttgttaa

SEQ ID NO: 4470348 - DNA, 25 bp, Homo sapien
gcccaggatgggtatgtctaacata

SEQ ID NO: 4470349 - DNA, 25 bp, Homo sapien
gattgccttgggactgtacatcagg

SEQ ID NO: 4470350 - DNA, 25 bp, Homo sapien
taaatcatctctgtggaggagcccg

SEQ ID NO: 4470351 - DNA, 25 bp, Homo sapien
tgtaggcctctgttcctcggatgag

SEQ ID NO: 4470352 - DNA, 25 bp, Homo sapien
tgttatcttcaaattccagtggtgg

SEQ ID NO: 4470353 - DNA, 25 bp, Homo sapien
ttgttatcttcaaattccagtggtg

SEQ ID NO: 4470354 - DNA, 25 bp, Homo sapien
cttgttatcttcaaattccagtggt

SEQ ID NO: 4470355 - DNA, 25 bp, Homo sapien
ggtgatcagttatcagctgactcag

SEQ ID NO: 4470356 - DNA, 25 bp, Homo sapien
cccatttgtagcactttaggtagga

SEQ ID NO: 4470357 - DNA, 25 bp, Homo sapien
ccaacgctgtatttgcaggtgatca

SEQ ID NO: 4470358 - DNA, 25 bp, Homo sapien
ggaatatcacaaaatgcagtcccat

SEQ ID NO: 4470359 - DNA, 25 bp, Homo sapien
aaaaggagaccagctcttctgttat

SEQ ID NO: 4470360 - DNA, 25 bp, Homo sapien
gctgccttgtgggaaaaggagacca

SEQ ID NO: 4470361 - DNA, 25 bp, Homo sapien
tcccagtttgctgccttgtgggaaa

SEQ ID NO: 4470362 - DNA, 25 bp, Homo sapien
ggaaaaggagaccagctcttctgtt

SEQ ID NO: 4470363 - DNA, 25 bp, Homo sapien
ggtgacgtgctgctacactaattag

SEQ ID NO: 4470364 - DNA, 25 bp, Homo sapien
tgtaaatgattaagactttccaatg

SEQ ID NO: 4470365 - DNA, 25 bp, Homo sapien
ttccaatgattgtggtgacgtgctg

SEQ ID NO: 4470366 - DNA, 25 bp, Homo sapien
tgattgtggtgacgtgctgctacac

SEQ ID NO: 4470367 - DNA, 25 bp, Homo sapien
gctgttattgcgaaaaactggtagt

SEQ ID NO: 4470368 - DNA, 25 bp, Homo sapien
actggtagttaaattcaattgattc

SEQ ID NO: 4470369 - DNA, 25 bp, Homo sapien
ttgattcaaaatattcgggatccat

SEQ ID NO: 4470370 - DNA, 25 bp, Homo sapien
tccttccttccatgctgttattgcg

SEQ ID NO: 4470371 - DNA, 25 bp, Homo sapien
tgattcgctgtggtggcggctctca

SEQ ID NO: 4470372 - DNA, 25 bp, Homo sapien
taatggcccatttcggctgtgtggc

SEQ ID NO: 4470373 - DNA, 25 bp, Homo sapien
ccatctgctgaaagcggcaaagaca

SEQ ID NO: 4470374 - DNA, 25 bp, Homo sapien
ttttccctcgatagctaatggccca

SEQ ID NO: 4470375 - DNA, 25 bp, Homo sapien
cgcttggagttttcactgtgcacaa

SEQ ID NO: 4470376 - DNA, 25 bp, Homo sapien
ctagaggaaagtcggctgctggaat

SEQ ID NO: 4470377 - DNA, 25 bp, Homo sapien
atttcctagaggaaagtcggctgct

SEQ ID NO: 4470378 - DNA, 25 bp, Homo sapien
ttcctagaggaaagtcggctgctgg

SEQ ID NO: 4470379 - DNA, 25 bp, Homo sapien
caggcttctgccaccgcctctgatc

SEQ ID NO: 4470380 - DNA, 25 bp, Homo sapien
tatgtgagggccaataagtaactca

SEQ ID NO: 4470381 - DNA, 25 bp, Homo sapien
accgcctctgatcacaaagccagcc

SEQ ID NO: 4470382 - DNA, 25 bp, Homo sapien
ccaataagtaactcatcagcctgct

SEQ ID NO: 4470383 - DNA, 25 bp, Homo sapien
aattaaatagaaccacaagcaattt

SEQ ID NO: 4470384 - DNA, 25 bp, Homo sapien
ggctgtgcgtgctgtgctaaaatgc

SEQ ID NO: 4470385 - DNA, 25 bp, Homo sapien
gctgtgctaaaatgcccgccagctc

SEQ ID NO: 4470386 - DNA, 25 bp, Homo sapien
gaaatgtttggaggaatttcctcca

SEQ ID NO: 4470387 - DNA, 25 bp, Homo sapien
tttctcattgactggctgtgcgtgc

SEQ ID NO: 4470388 - DNA, 25 bp, Homo sapien
aggtgggaatgcttcgatcacaccc

SEQ ID NO: 4470389 - DNA, 25 bp, Homo sapien
ggtgggaatgcttcgatcacacccc

SEQ ID NO: 4470390 - DNA, 25 bp, Homo sapien
gacagcacgctgattttcccgttgg

SEQ ID NO: 4470391 - DNA, 25 bp, Homo sapien
caaggtgcttggatctataaaagtc

SEQ ID NO: 4470392 - DNA, 25 bp, Homo sapien
tatcgaaaagtaaccaaccacatct

SEQ ID NO: 4470393 - DNA, 25 bp, Homo sapien
tcccgttgggctctatcagcatgtc

SEQ ID NO: 4470394 - DNA, 25 bp, Homo sapien
gcagaaacaccctttggtgtggtca

SEQ ID NO: 4470395 - DNA, 25 bp, Homo sapien
ttctcttgctaatgcagaaacaccc

SEQ ID NO: 4470396 - DNA, 25 bp, Homo sapien
aacttcttccaatattctgttgata

SEQ ID NO: 4470397 - DNA, 25 bp, Homo sapien
ggtgtggtcactgagaacttcttcc

SEQ ID NO: 4470398 - DNA, 25 bp, Homo sapien
aatacaggcgtggtgacgcgcttgt

SEQ ID NO: 4470399 - DNA, 25 bp, Homo sapien
ggagaatcgctaaaccctagaggca

SEQ ID NO: 4470400 - DNA, 25 bp, Homo sapien
agaatcgctaaaccctagaggcaga

SEQ ID NO: 4470401 - DNA, 25 bp, Homo sapien
atcgctaaaccctagaggcagaggt

SEQ ID NO: 4470402 - DNA, 25 bp, Homo sapien
tgtgctcttgcagtcttgttaaggt

SEQ ID NO: 4470403 - DNA, 25 bp, Homo sapien
tcttgcagtcttgttaaggtaggca

SEQ ID NO: 4470404 - DNA, 25 bp, Homo sapien
tgcagtcttgttaaggtaggcattt

SEQ ID NO: 4470405 - DNA, 25 bp, Homo sapien
agtttgtgctcttgcagtcttgtta

SEQ ID NO: 4470406 - DNA, 25 bp, Homo sapien
agtttatgtgtgtaaaggtggtcat

SEQ ID NO: 4470407 - DNA, 25 bp, Homo sapien
tttatgtgtgtaaaggtggtcatag

SEQ ID NO: 4470408 - DNA, 25 bp, Homo sapien
tttgcttgttatagttctgttcagg

SEQ ID NO: 4470409 - DNA, 25 bp, Homo sapien
taaattaccacttcaatctctttgc

SEQ ID NO: 4470410 - DNA, 25 bp, Homo sapien
gagaatacagccatgggtaggccat

SEQ ID NO: 4470411 - DNA, 25 bp, Homo sapien
gatgtgggcagatgtgctcaggccc

SEQ ID NO: 4470412 - DNA, 25 bp, Homo sapien
ggcagagcacgcagatgtgggcaga

SEQ ID NO: 4470413 - DNA, 25 bp, Homo sapien
tgacaggcgggatgaatgggtggca

SEQ ID NO: 4470414 - DNA, 25 bp, Homo sapien
atgggtggcagagcacgcagatgtg

SEQ ID NO: 4470415 - DNA, 25 bp, Homo sapien
ctgcaatccagatggccgtttgtca

SEQ ID NO: 4470416 - DNA, 25 bp, Homo sapien
agggccagctggtcactatatgcga

SEQ ID NO: 4470417 - DNA, 25 bp, Homo sapien
tatgcgaggttaaggccggttgccc

SEQ ID NO: 4470418 - DNA, 25 bp, Homo sapien
tggccgtttgtcaggtataaggtga

SEQ ID NO: 4470419 - DNA, 25 bp, Homo sapien
cggcattgacagcgcactcatgcat

SEQ ID NO: 4470420 - DNA, 25 bp, Homo sapien
ggcattgacagcgcactcatgcatt

SEQ ID NO: 4470421 - DNA, 25 bp, Homo sapien
tcaaggggattcttgtgagcaaggt

SEQ ID NO: 4470422 - DNA, 25 bp, Homo sapien
gattcttgtgagcaaggttcttcct

SEQ ID NO: 4470423 - DNA, 25 bp, Homo sapien
aagcctcttagcaaggtcctgggtc

SEQ ID NO: 4470424 - DNA, 25 bp, Homo sapien
ctgaaagcctcttagcaaggtcctg

SEQ ID NO: 4470425 - DNA, 25 bp, Homo sapien
catagtctgttcacacttgttcagg

SEQ ID NO: 4470426 - DNA, 25 bp, Homo sapien
tcataaacttgacggcatcatagtc

SEQ ID NO: 4470427 - DNA, 25 bp, Homo sapien
tcgatttgcttgtgagttgtaccgc

SEQ ID NO: 4470428 - DNA, 25 bp, Homo sapien
gttgtaccgcgtgtgcatgtgcaca

SEQ ID NO: 4470429 - DNA, 25 bp, Homo sapien
cactgaaaagcccagaagcatgggc

SEQ ID NO: 4470430 - DNA, 25 bp, Homo sapien
ggaagtgaactgtaaacactctcaa

SEQ ID NO: 4470431 - DNA, 25 bp, Homo sapien
acactgaaaagcccagaagcatggg

SEQ ID NO: 4470432 - DNA, 25 bp, Homo sapien
tgagacactgcaccgtaactagctg

SEQ ID NO: 4470433 - DNA, 25 bp, Homo sapien
cagttccgaggagtaatgggcaagc

SEQ ID NO: 4470434 - DNA, 25 bp, Homo sapien
gaccacgtgggcaaactgccatttt

SEQ ID NO: 4470435 - DNA, 25 bp, Homo sapien
gcttctctggcctgtgacggcttca

SEQ ID NO: 4470436 - DNA, 25 bp, Homo sapien
catcactgcatagcgactggttgcc

SEQ ID NO: 4470437 - DNA, 25 bp, Homo sapien
agccaatgccatgggccctacagat

SEQ ID NO: 4470438 - DNA, 25 bp, Homo sapien
tggaaaaccagtgagagattgctgt

SEQ ID NO: 4470439 - DNA, 25 bp, Homo sapien
acatcatagccaatgccatgggccc

SEQ ID NO: 4470440 - DNA, 25 bp, Homo sapien
gaagagtcctgaccagggatggaca

SEQ ID NO: 4470441 - DNA, 25 bp, Homo sapien
gacagcaagtgaagagtcctgacca

SEQ ID NO: 4470442 - DNA, 25 bp, Homo sapien
caagtgaagagtcctgaccagggat

SEQ ID NO: 4470443 - DNA, 25 bp, Homo sapien
cagcaagtgaagagtcctgaccagg

SEQ ID NO: 4470444 - DNA, 25 bp, Homo sapien
aacattcccaacttgtgtctcttca

SEQ ID NO: 4470445 - DNA, 25 bp, Homo sapien
tgtgtctcttcaggtgctcatataa

SEQ ID NO: 4470446 - DNA, 25 bp, Homo sapien
cttgtgtctcttcaggtgctcatat

SEQ ID NO: 4470447 - DNA, 25 bp, Homo sapien
ttgtgtctcttcaggtgctcatata

SEQ ID NO: 4470448 - DNA, 25 bp, Homo sapien
gagtattttcaatctcacaaggtgg

SEQ ID NO: 4470449 - DNA, 25 bp, Homo sapien
agtattttcaatctcacaaggtggc

SEQ ID NO: 4470450 - DNA, 25 bp, Homo sapien
ggagatatgaaagatgagactccat

SEQ ID NO: 4470451 - DNA, 25 bp, Homo sapien
ggtggcaatcttcagggagatatga

SEQ ID NO: 4470452 - DNA, 25 bp, Homo sapien
caaatgagtttaccaacgattccct

SEQ ID NO: 4470453 - DNA, 25 bp, Homo sapien
caacgattcccttcacatgcttaaa

SEQ ID NO: 4470454 - DNA, 25 bp, Homo sapien
aaacaatcgccctctcatttgtgcc

SEQ ID NO: 4470455 - DNA, 25 bp, Homo sapien
catgcttaaaaacaatcgccctctc

SEQ ID NO: 4470456 - DNA, 25 bp, Homo sapien
atgaggaccccctggagatcctcgc

SEQ ID NO: 4470457 - DNA, 25 bp, Homo sapien
aagagatggcgagcaaaggtcatga

SEQ ID NO: 4470458 - DNA, 25 bp, Homo sapien
ggtcatgaggaccccctggagatcc

SEQ ID NO: 4470459 - DNA, 25 bp, Homo sapien
atgaagagatggcgagcaaaggtca

SEQ ID NO: 4470460 - DNA, 25 bp, Homo sapien
cttaaaattggtctcgccttgcata

SEQ ID NO: 4470461 - DNA, 25 bp, Homo sapien
gaatagtttcaatatcagcaatggt

SEQ ID NO: 4470462 - DNA, 25 bp, Homo sapien
atagtttcaatatcagcaatggtgg

SEQ ID NO: 4470463 - DNA, 25 bp, Homo sapien
tagaatagtttcaatatcagcaatg

SEQ ID NO: 4470464 - DNA, 25 bp, Homo sapien
tagtttcaatatcagcaatggtggt

SEQ ID NO: 4470465 - DNA, 25 bp, Homo sapien
tttattcaagctacagagctcgagc

SEQ ID NO: 4470466 - DNA, 25 bp, Homo sapien
gatactgccacctagatacattctg

SEQ ID NO: 4470467 - DNA, 25 bp, Homo sapien
ctataaatgcagaagatcgatggac

SEQ ID NO: 4470468 - DNA, 25 bp, Homo sapien
cagaaactcttagcctgtggctgaa

SEQ ID NO: 4470469 - DNA, 25 bp, Homo sapien
tactgtgccgaacaaaacggagaca

SEQ ID NO: 4470470 - DNA, 25 bp, Homo sapien
tactctcaggacacgattgtgccag

SEQ ID NO: 4470471 - DNA, 25 bp, Homo sapien
tctaatgggcatgtaggacttccta

SEQ ID NO: 4470472 - DNA, 25 bp, Homo sapien
caatgggcccctcgaatggattaga

SEQ ID NO: 4470473 - DNA, 25 bp, Homo sapien
tgtcatcaggttggcactttgcagc

SEQ ID NO: 4470474 - DNA, 25 bp, Homo sapien
gataacagcatgcatcggtcgccat

SEQ ID NO: 4470475 - DNA, 25 bp, Homo sapien
taagctcaggattgcaagtgtcatc

SEQ ID NO: 4470476 - DNA, 25 bp, Homo sapien
tgcagcaccaagcaaatatactgag

SEQ ID NO: 4470477 - DNA, 25 bp, Homo sapien
gtgtgcggcggcgcgtgcgcacagc

SEQ ID NO: 4470478 - DNA, 25 bp, Homo sapien
cgccgcgccggggacgcaggctggt

SEQ ID NO: 4470479 - DNA, 25 bp, Homo sapien
ggctggtgtccgcagccgctggcgc

SEQ ID NO: 4470480 - DNA, 25 bp, Homo sapien
gagcgccgggaaggccaaccggcgc

SEQ ID NO: 4470481 - DNA, 25 bp, Homo sapien
cctgcaccggccagttgaagtgcga

SEQ ID NO: 4470482 - DNA, 25 bp, Homo sapien
ccttgagcgccgtgaagaagcggtt

SEQ ID NO: 4470483 - DNA, 25 bp, Homo sapien
gagccttggagcagtggtacttgat

SEQ ID NO: 4470484 - DNA, 25 bp, Homo sapien
gacgtggtagttggcgccctgcacc

SEQ ID NO: 4470485 - DNA, 25 bp, Homo sapien
ccggccgggcgggcttcaccgcgtg

SEQ ID NO: 4470486 - DNA, 25 bp, Homo sapien
gggcgggcttcaccgcgtgggcgcg

SEQ ID NO: 4470487 - DNA, 25 bp, Homo sapien
gccgggcgggcttcaccgcgtgggc

SEQ ID NO: 4470488 - DNA, 25 bp, Homo sapien
cgggcgggcttcaccgcgtgggcgc

SEQ ID NO: 4470489 - DNA, 25 bp, Homo sapien
tgggcgaggagtacaaaggacccca

SEQ ID NO: 4470490 - DNA, 25 bp, Homo sapien
aacggcttcgggtgccaggagctca

SEQ ID NO: 4470491 - DNA, 25 bp, Homo sapien
gcttcgggtgccaggagctcagcaa

SEQ ID NO: 4470492 - DNA, 25 bp, Homo sapien
cagcaggcgaacggcttcgggtgcc

SEQ ID NO: 4470493 - DNA, 25 bp, Homo sapien
aggcgaacggcttcgggtgccagga

SEQ ID NO: 4470494 - DNA, 25 bp, Homo sapien
taaacgcagctgcaaagtgatgttc

SEQ ID NO: 4470495 - DNA, 25 bp, Homo sapien
cgggaatgagtcctgccatgcagta

SEQ ID NO: 4470496 - DNA, 25 bp, Homo sapien
aaagagtagttccagttattgcaac

SEQ ID NO: 4470497 - DNA, 25 bp, Homo sapien
gaacttgccgggaattcatacaaag

SEQ ID NO: 4470498 - DNA, 25 bp, Homo sapien
tgacagtaaacatcctcagggcgtc

SEQ ID NO: 4470499 - DNA, 25 bp, Homo sapien
ctagtgacagtaaacatcctcaggg

SEQ ID NO: 4470500 - DNA, 25 bp, Homo sapien
tcctcagggcgtctccatgaaaata

SEQ ID NO: 4470501 - DNA, 25 bp, Homo sapien
taaacatcctcagggcgtctccatg

SEQ ID NO: 4470502 - DNA, 25 bp, Homo sapien
tctgtcattaaaccaaaagaaaata

SEQ ID NO: 4470503 - DNA, 25 bp, Homo sapien
ccctcttctgtcattaaaccaaaag

SEQ ID NO: 4470504 - DNA, 25 bp, Homo sapien
cctcttctgtcattaaaccaaaaga

SEQ ID NO: 4470505 - DNA, 25 bp, Homo sapien
ctccctcttctgtcattaaaccaaa

SEQ ID NO: 4470506 - DNA, 25 bp, Homo sapien
tttttaaccttaatggacgatcaga

SEQ ID NO: 4470507 - DNA, 25 bp, Homo sapien
caaaaagcccacgactgacatatgt

SEQ ID NO: 4470508 - DNA, 25 bp, Homo sapien
tgccagctattagtaagttcaaaac

SEQ ID NO: 4470509 - DNA, 25 bp, Homo sapien
tagtattagtagtacggctgcgcag

SEQ ID NO: 4470510 - DNA, 25 bp, Homo sapien
tcagcttccattgaagggaagacgg

SEQ ID NO: 4470511 - DNA, 25 bp, Homo sapien
taggatatgtactttatcacccaga

SEQ ID NO: 4470512 - DNA, 25 bp, Homo sapien
tacttctcagcaggatacctagact

SEQ ID NO: 4470513 - DNA, 25 bp, Homo sapien
taggtaaaccactgtcaaattaagc

SEQ ID NO: 4470514 - DNA, 25 bp, Homo sapien
tcaacgtggcacatgatggcaatca

SEQ ID NO: 4470515 - DNA, 25 bp, Homo sapien
ttttcatactatagacaaggcgggt

SEQ ID NO: 4470516 - DNA, 25 bp, Homo sapien
caatcacgtgagtccagaggttttc

SEQ ID NO: 4470517 - DNA, 25 bp, Homo sapien
gatcacgtataacactcttcagcaa

SEQ ID NO: 4470518 - DNA, 25 bp, Homo sapien
tatgcacagtctctgtgactctggc

SEQ ID NO: 4470519 - DNA, 25 bp, Homo sapien
gggtccataactggtatgcacagtc

SEQ ID NO: 4470520 - DNA, 25 bp, Homo sapien
actggtatgcacagtctctgtgact

SEQ ID NO: 4470521 - DNA, 25 bp, Homo sapien
tccataactggtatgcacagtctct

SEQ ID NO: 4470522 - DNA, 25 bp, Homo sapien
ctgatatttatgttctttgacgcac

SEQ ID NO: 4470523 - DNA, 25 bp, Homo sapien
tccactgatatttatgttctttgac

SEQ ID NO: 4470524 - DNA, 25 bp, Homo sapien
gatatttatgttctttgacgcacac

SEQ ID NO: 4470525 - DNA, 25 bp, Homo sapien
cactgatatttatgttctttgacgc

SEQ ID NO: 4470526 - DNA, 25 bp, Homo sapien
tcctccaggtaaatggcacaaggcc

SEQ ID NO: 4470527 - DNA, 25 bp, Homo sapien
tgtagttcacatcagctaaacagag

SEQ ID NO: 4470528 - DNA, 25 bp, Homo sapien
cgatatggttttggactctttaagc

SEQ ID NO: 4470529 - DNA, 25 bp, Homo sapien
tctatttacaatcctggcagctgaa

SEQ ID NO: 4470530 - DNA, 25 bp, Homo sapien
tctcagattacaggtggaaaaacca

SEQ ID NO: 4470531 - DNA, 25 bp, Homo sapien
catgccacttcagggttagtgggca

SEQ ID NO: 4470532 - DNA, 25 bp, Homo sapien
ttagtgggcatgtgctatcaatgca

SEQ ID NO: 4470533 - DNA, 25 bp, Homo sapien
aaaagctaatcagtggtttcaccaa

SEQ ID NO: 4470534 - DNA, 25 bp, Homo sapien
taaaaccacttactagtagtagctg

SEQ ID NO: 4470535 - DNA, 25 bp, Homo sapien
gatattctttatccagcaactagga

SEQ ID NO: 4470536 - DNA, 25 bp, Homo sapien
taaattctaagactgcaacatacaa

SEQ ID NO: 4470537 - DNA, 25 bp, Homo sapien
gccttacgttggtcttatctgaaat

SEQ ID NO: 4470538 - DNA, 25 bp, Homo sapien
tccaccgctcgtcagtggactagga

SEQ ID NO: 4470539 - DNA, 25 bp, Homo sapien
agcgaacgctatggtgaaggtctct

SEQ ID NO: 4470540 - DNA, 25 bp, Homo sapien
gatacagcggcaggtgtccaccgct

SEQ ID NO: 4470541 - DNA, 25 bp, Homo sapien
aaggttctggagttgagcgaacgct

SEQ ID NO: 4470542 - DNA, 25 bp, Homo sapien
ggatcttgatgcgaattaccagcac

SEQ ID NO: 4470543 - DNA, 25 bp, Homo sapien
agtccaccgcgccactatttgggat

SEQ ID NO: 4470544 - DNA, 25 bp, Homo sapien
cacatccctgaagagtaactgcggc

SEQ ID NO: 4470545 - DNA, 25 bp, Homo sapien
ggagtgcactgtccagtccaccgcg

SEQ ID NO: 4470546 - DNA, 25 bp, Homo sapien
tctcccagctatttgatgcacagtg

SEQ ID NO: 4470547 - DNA, 25 bp, Homo sapien
ggtcagcctccatagttcagccagt

SEQ ID NO: 4470548 - DNA, 25 bp, Homo sapien
cagttatggctgactcggtgactac

SEQ ID NO: 4470549 - DNA, 25 bp, Homo sapien
gctgacttcaggtccgagacactca

SEQ ID NO: 4470550 - DNA, 25 bp, Homo sapien
caggcagaacctggcctatcacatc

SEQ ID NO: 4470551 - DNA, 25 bp, Homo sapien
gctgtagttgttgcttcaggcagaa

SEQ ID NO: 4470552 - DNA, 25 bp, Homo sapien
gttgttgcttcaggcagaacctggc

SEQ ID NO: 4470553 - DNA, 25 bp, Homo sapien
tcaaatgctgtagttgttgcttcag

SEQ ID NO: 4470554 - DNA, 25 bp, Homo sapien
cggagttaatgacgtgggcaggacc

SEQ ID NO: 4470555 - DNA, 25 bp, Homo sapien
agttaatgacgtgggcaggaccaga

SEQ ID NO: 4470556 - DNA, 25 bp, Homo sapien
ccttctcaggcacggagttaatgac

SEQ ID NO: 4470557 - DNA, 25 bp, Homo sapien
ctcaggcacggagttaatgacgtgg

SEQ ID NO: 4470558 - DNA, 25 bp, Homo sapien
cactgtaattcgatcaccatcttca

SEQ ID NO: 4470559 - DNA, 25 bp, Homo sapien
tgtaattcgatcaccatcttcatct

SEQ ID NO: 4470560 - DNA, 25 bp, Homo sapien
cttctcactgtaattcgatcaccat

SEQ ID NO: 4470561 - DNA, 25 bp, Homo sapien
tctcactgtaattcgatcaccatct

SEQ ID NO: 4470562 - DNA, 25 bp, Homo sapien
tagtcttcatttgtcgtatacttac

SEQ ID NO: 4470563 - DNA, 25 bp, Homo sapien
atagtcttcatttgtcgtatactta

SEQ ID NO: 4470564 - DNA, 25 bp, Homo sapien
aaatagtcttcatttgtcgtatact

SEQ ID NO: 4470565 - DNA, 25 bp, Homo sapien
aatagtcttcatttgtcgtatactt

SEQ ID NO: 4470566 - DNA, 25 bp, Homo sapien
ccagccaacagagtattttttacat

SEQ ID NO: 4470567 - DNA, 25 bp, Homo sapien
cagccaacagagtattttttacatt

SEQ ID NO: 4470568 - DNA, 25 bp, Homo sapien
agccaacagagtattttttacattt

SEQ ID NO: 4470569 - DNA, 25 bp, Homo sapien
taaaagacttgaccgagggtccaca

SEQ ID NO: 4470570 - DNA, 25 bp, Homo sapien
ccacatatggtcacagattgattag

SEQ ID NO: 4470571 - DNA, 25 bp, Homo sapien
catgaggagactacaatgtgtacaa

SEQ ID NO: 4470572 - DNA, 25 bp, Homo sapien
gagactacaatgtgtacaagctttt

SEQ ID NO: 4470573 - DNA, 25 bp, Homo sapien
tcttagcacagagcagtcctgaccg

SEQ ID NO: 4470574 - DNA, 25 bp, Homo sapien
ctcttagcacagagcagtcctgacc

SEQ ID NO: 4470575 - DNA, 25 bp, Homo sapien
cttagcacagagcagtcctgaccgg

SEQ ID NO: 4470576 - DNA, 25 bp, Homo sapien
ttagcacagagcagtcctgaccggc

SEQ ID NO: 4470577 - DNA, 25 bp, Homo sapien
caagtagtctggaaaaattgtccga

SEQ ID NO: 4470578 - DNA, 25 bp, Homo sapien
caaccttttgggacagcaataactg

SEQ ID NO: 4470579 - DNA, 25 bp, Homo sapien
gaaatatcaatcatgtaggctgtca

SEQ ID NO: 4470580 - DNA, 25 bp, Homo sapien
aaatgacttgtcctcggcacacaag

SEQ ID NO: 4470581 - DNA, 25 bp, Homo sapien
tcttggaaatatctgcagaggctct

SEQ ID NO: 4470582 - DNA, 25 bp, Homo sapien
tctgcagaggctctattaactgtcc

SEQ ID NO: 4470583 - DNA, 25 bp, Homo sapien
cagaggctctattaactgtccattt

SEQ ID NO: 4470584 - DNA, 25 bp, Homo sapien
tgtccatttacttgctgttccatta

SEQ ID NO: 4470585 - DNA, 25 bp, Homo sapien
tgatacaaggatagtactgccaaac

SEQ ID NO: 4470586 - DNA, 25 bp, Homo sapien
ccttgagggaccatcaatacttcct

SEQ ID NO: 4470587 - DNA, 25 bp, Homo sapien
ttaaccttttgaactacagtcacat

SEQ ID NO: 4470588 - DNA, 25 bp, Homo sapien
attaagactcaaaatcttctttcct

SEQ ID NO: 4470589 - DNA, 25 bp, Homo sapien
cagtcacatgcatttgacgtctggt

SEQ ID NO: 4470590 - DNA, 25 bp, Homo sapien
ccaaagtgggaattatgaaccaggg

SEQ ID NO: 4470591 - DNA, 25 bp, Homo sapien
aatgagggtgacaccaaaattagca

SEQ ID NO: 4470592 - DNA, 25 bp, Homo sapien
ggttttaacttgcaggagtgagcat

SEQ ID NO: 4470593 - DNA, 25 bp, Homo sapien
gctttctgacaccacctcatataaa

SEQ ID NO: 4470594 - DNA, 25 bp, Homo sapien
ggccatgtatgttccgttccccagg

SEQ ID NO: 4470595 - DNA, 25 bp, Homo sapien
atgttccgttccccaggaggcttgc

SEQ ID NO: 4470596 - DNA, 25 bp, Homo sapien
tgttccgttccccaggaggcttgca

SEQ ID NO: 4470597 - DNA, 25 bp, Homo sapien
ccatgtatgttccgttccccaggag

SEQ ID NO: 4470598 - DNA, 25 bp, Homo sapien
tttactgaaacaattattgaaattc

SEQ ID NO: 4470599 - DNA, 25 bp, Homo sapien
ttactgaaacaattattgaaattcg

SEQ ID NO: 4470600 - DNA, 25 bp, Homo sapien
tactgaaacaattattgaaattcgt

SEQ ID NO: 4470601 - DNA, 25 bp, Homo sapien
ctgaaacaattattgaaattcgtac

SEQ ID NO: 4470602 - DNA, 25 bp, Homo sapien
ttgcttggaagtgaatctgagactg

SEQ ID NO: 4470603 - DNA, 25 bp, Homo sapien
tgtgttgagagggtccggcccgagt

SEQ ID NO: 4470604 - DNA, 25 bp, Homo sapien
tgcttggaagtgaatctgagactgc

SEQ ID NO: 4470605 - DNA, 25 bp, Homo sapien
gagagggtccggcccgagtattcac

SEQ ID NO: 4470606 - DNA, 25 bp, Homo sapien
tttcagttcagcagaagacttcttt

SEQ ID NO: 4470607 - DNA, 25 bp, Homo sapien
cagttcagcagaagacttctttaag

SEQ ID NO: 4470608 - DNA, 25 bp, Homo sapien
tttttcagttcagcagaagacttct

SEQ ID NO: 4470609 - DNA, 25 bp, Homo sapien
tggccattggctagtatttttttca

SEQ ID NO: 4470610 - DNA, 25 bp, Homo sapien
gagactaatcggaaaacacaggcca

SEQ ID NO: 4470611 - DNA, 25 bp, Homo sapien
cacaaatcgaagcaataatggtttc

SEQ ID NO: 4470612 - DNA, 25 bp, Homo sapien
acacaggccagtcaaatgtttctta

SEQ ID NO: 4470613 - DNA, 25 bp, Homo sapien
tcccactttatagagcagagactaa

SEQ ID NO: 4470614 - DNA, 25 bp, Homo sapien
gctgtgataattaggagtacaatgc

SEQ ID NO: 4470615 - DNA, 25 bp, Homo sapien
gaattgcactgccttgcatgggcag

SEQ ID NO: 4470616 - DNA, 25 bp, Homo sapien
caccaattgaataaagcaagggttc

SEQ ID NO: 4470617 - DNA, 25 bp, Homo sapien
tctcagaccagtatagcaaagcttt

SEQ ID NO: 4470618 - DNA, 25 bp, Homo sapien
gatacaacatagctcaaaagggtca

SEQ ID NO: 4470619 - DNA, 25 bp, Homo sapien
tggaaaagcacgaaatcaatgcact

SEQ ID NO: 4470620 - DNA, 25 bp, Homo sapien
catataaccaatgccaaagagcact

SEQ ID NO: 4470621 - DNA, 25 bp, Homo sapien
tcaaacttaggaagacaatacacac

SEQ ID NO: 4470622 - DNA, 25 bp, Homo sapien
cataaacaacaagcagtctgggtca

SEQ ID NO: 4470623 - DNA, 25 bp, Homo sapien
tgggtcatttcaagttcagctgcaa

SEQ ID NO: 4470624 - DNA, 25 bp, Homo sapien
ggaaaagcaactctgggccataaac

SEQ ID NO: 4470625 - DNA, 25 bp, Homo sapien
tataaaagacgataccaagggacga

SEQ ID NO: 4470626 - DNA, 25 bp, Homo sapien
gtcccgatatcgtatgtcttgttca

SEQ ID NO: 4470627 - DNA, 25 bp, Homo sapien
gaccaagagtgtcccgatatcgtat

SEQ ID NO: 4470628 - DNA, 25 bp, Homo sapien
gtagactgtgcctccgttgccatga

SEQ ID NO: 4470629 - DNA, 25 bp, Homo sapien
gttgccatgaccaagagtgtcccga

SEQ ID NO: 4470630 - DNA, 25 bp, Homo sapien
tattagtactaccattaccagtagt

SEQ ID NO: 4470631 - DNA, 25 bp, Homo sapien
tggccaagtcaaggtaggaagtaca

SEQ ID NO: 4470632 - DNA, 25 bp, Homo sapien
catttaataagtgtcagtcatagcg

SEQ ID NO: 4470633 - DNA, 25 bp, Homo sapien
gccttttacggatcttctcatttaa

SEQ ID NO: 4470634 - DNA, 25 bp, Homo sapien
gattcattaagcaactacagaatag

SEQ ID NO: 4470635 - DNA, 25 bp, Homo sapien
tcattaagcaactacagaatagaag

SEQ ID NO: 4470636 - DNA, 25 bp, Homo sapien
cagaagtataatgtgtataatataa

SEQ ID NO: 4470637 - DNA, 25 bp, Homo sapien
acagaagtataatgtgtataatata

SEQ ID NO: 4470638 - DNA, 25 bp, Homo sapien
agactcttactctatcctgtgggaa

SEQ ID NO: 4470639 - DNA, 25 bp, Homo sapien
agccacaagcgaagctgggtccaga

SEQ ID NO: 4470640 - DNA, 25 bp, Homo sapien
ggcctctacagtcaaatcacaagtg

SEQ ID NO: 4470641 - DNA, 25 bp, Homo sapien
tataaaggagtagggccactaacac

SEQ ID NO: 4470642 - DNA, 25 bp, Homo sapien
tcattttgtgcacttttgtgcataa

SEQ ID NO: 4470643 - DNA, 25 bp, Homo sapien
gcacttttgtgcataaaagacttca

SEQ ID NO: 4470644 - DNA, 25 bp, Homo sapien
cagctaccattctgcaaagaaatgg

SEQ ID NO: 4470645 - DNA, 25 bp, Homo sapien
tttcgctgcagctaccattctgcaa

SEQ ID NO: 4470646 - DNA, 25 bp, Homo sapien
tattggcatcaactactctattgcc

SEQ ID NO: 4470647 - DNA, 25 bp, Homo sapien
aaatgcaacctaacctattagctgc

SEQ ID NO: 4470648 - DNA, 25 bp, Homo sapien
tactatcgttgtcttatacagtcag

SEQ ID NO: 4470649 - DNA, 25 bp, Homo sapien
tacctactagatttcctaccctgtg

SEQ ID NO: 4470650 - DNA, 25 bp, Homo sapien
tacacaggattcaaaagttgtaaaa

SEQ ID NO: 4470651 - DNA, 25 bp, Homo sapien
cacacttggcctgaaatgtgattta

SEQ ID NO: 4470652 - DNA, 25 bp, Homo sapien
cataatacgtaagactttgtgatat

SEQ ID NO: 4470653 - DNA, 25 bp, Homo sapien
tattccacgtaaatccaagtaacat

SEQ ID NO: 4470654 - DNA, 25 bp, Homo sapien
tgtttcctctgtggcgtccacgagc

SEQ ID NO: 4470655 - DNA, 25 bp, Homo sapien
gtttcctctgtggcgtccacgagca

SEQ ID NO: 4470656 - DNA, 25 bp, Homo sapien
tttcctctgtggcgtccacgagcag

SEQ ID NO: 4470657 - DNA, 25 bp, Homo sapien
agctctcctcttttgctacgctttg

SEQ ID NO: 4470658 - DNA, 25 bp, Homo sapien
tagctctcctcttttgctacgcttt

SEQ ID NO: 4470659 - DNA, 25 bp, Homo sapien
ctagctctcctcttttgctacgctt

SEQ ID NO: 4470660 - DNA, 25 bp, Homo sapien
ctaatattttcccactcgggacatg

SEQ ID NO: 4470661 - DNA, 25 bp, Homo sapien
tttcccactcgggacatgatatgct

SEQ ID NO: 4470662 - DNA, 25 bp, Homo sapien
tattttcccactcgggacatgatat

SEQ ID NO: 4470663 - DNA, 25 bp, Homo sapien
aatattttcccactcgggacatgat

SEQ ID NO: 4470664 - DNA, 25 bp, Homo sapien
cacgtaacacattctaggtgctgta

SEQ ID NO: 4470665 - DNA, 25 bp, Homo sapien
gaactctggatttcattagcagtca

SEQ ID NO: 4470666 - DNA, 25 bp, Homo sapien
ccctaaatggctgaactgtcaaaga

SEQ ID NO: 4470667 - DNA, 25 bp, Homo sapien
gctgtaacaggtgatctccaaggtc

SEQ ID NO: 4470668 - DNA, 25 bp, Homo sapien
agtctgtagctgaaggcctgaaagc

SEQ ID NO: 4470669 - DNA, 25 bp, Homo sapien
ctgaaagcccccggcaaatcactgg

SEQ ID NO: 4470670 - DNA, 25 bp, Homo sapien
tgaaagcccccggcaaatcactggt

SEQ ID NO: 4470671 - DNA, 25 bp, Homo sapien
tagctgaaggcctgaaagcccccgg

SEQ ID NO: 4470672 - DNA, 25 bp, Homo sapien
cattccatgcaggcgtcagaccctg

SEQ ID NO: 4470673 - DNA, 25 bp, Homo sapien
cgtcagaccctgcaggtgattcagt

SEQ ID NO: 4470674 - DNA, 25 bp, Homo sapien
catcattccatgcaggcgtcagacc

SEQ ID NO: 4470675 - DNA, 25 bp, Homo sapien
tcattccatgcaggcgtcagaccct

SEQ ID NO: 4470676 - DNA, 25 bp, Homo sapien
catggatgacttcgtttatttgctg

SEQ ID NO: 4470677 - DNA, 25 bp, Homo sapien
atttgctggagtggcacacacttca

SEQ ID NO: 4470678 - DNA, 25 bp, Homo sapien
tggatgacttcgtttatttgctgga

SEQ ID NO: 4470679 - DNA, 25 bp, Homo sapien
tgtcatggatgacttcgtttatttg

SEQ ID NO: 4470680 - DNA, 25 bp, Homo sapien
actgctctccactacacctccagga

SEQ ID NO: 4470681 - DNA, 25 bp, Homo sapien
tataaatacggcaattcatcacaag

SEQ ID NO: 4470682 - DNA, 25 bp, Homo sapien
tataagcagtcaagtgactgaatta

SEQ ID NO: 4470683 - DNA, 25 bp, Homo sapien
gagttgtcaagttaaatataagcag

SEQ ID NO: 4470684 - DNA, 25 bp, Homo sapien
ttctgccttgagcatgcatccctca

SEQ ID NO: 4470685 - DNA, 25 bp, Homo sapien
gccctcaatatgtacattctgcctt

SEQ ID NO: 4470686 - DNA, 25 bp, Homo sapien
ctggccctcaatatgtacattctgc

SEQ ID NO: 4470687 - DNA, 25 bp, Homo sapien
tgccttgagcatgcatccctcatct

SEQ ID NO: 4470688 - DNA, 25 bp, Homo sapien
gttccagtgtaatatctagtagtat

SEQ ID NO: 4470689 - DNA, 25 bp, Homo sapien
gaagttccagtgtaatatctagtag

SEQ ID NO: 4470690 - DNA, 25 bp, Homo sapien
tctgaagttccagtgtaatatctag

SEQ ID NO: 4470691 - DNA, 25 bp, Homo sapien
tgaagttccagtgtaatatctagta

SEQ ID NO: 4470692 - DNA, 25 bp, Homo sapien
aatgctccataaaatccaatgatat

SEQ ID NO: 4470693 - DNA, 25 bp, Homo sapien
atccaatgatatatgatgaatcgca

SEQ ID NO: 4470694 - DNA, 25 bp, Homo sapien
atgctccataaaatccaatgatata

SEQ ID NO: 4470695 - DNA, 25 bp, Homo sapien
aatccaatgatatatgatgaatcgc

SEQ ID NO: 4470696 - DNA, 25 bp, Homo sapien
taagaaccgatttctttctgaaaga

SEQ ID NO: 4470697 - DNA, 25 bp, Homo sapien
cacaggacattgggttaatagattt

SEQ ID NO: 4470698 - DNA, 25 bp, Homo sapien
caggacattgggttaatagatttct

SEQ ID NO: 4470699 - DNA, 25 bp, Homo sapien
gacattgggttaatagatttcttta

SEQ ID NO: 4470700 - DNA, 25 bp, Homo sapien
gaaaactagaccaatgtccctcata

SEQ ID NO: 4470701 - DNA, 25 bp, Homo sapien
gaataattccaacactgcaagactg

SEQ ID NO: 4470702 - DNA, 25 bp, Homo sapien
gcattatcttgtatatagagaaccc

SEQ ID NO: 4470703 - DNA, 25 bp, Homo sapien
ggacaactattccaaacccatggct

SEQ ID NO: 4470704 - DNA, 25 bp, Homo sapien
tgctactgcaattcttccaaggaca

SEQ ID NO: 4470705 - DNA, 25 bp, Homo sapien
ttcttccaaggacatgttctggcat

SEQ ID NO: 4470706 - DNA, 25 bp, Homo sapien
tccaaggacatgttctggcattttc

SEQ ID NO: 4470707 - DNA, 25 bp, Homo sapien
tctggcattttcctatatacatcca

SEQ ID NO: 4470708 - DNA, 25 bp, Homo sapien
tgtttactatcacaccaccccatga

SEQ ID NO: 4470709 - DNA, 25 bp, Homo sapien
tagaacaggttggagcacataagcg

SEQ ID NO: 4470710 - DNA, 25 bp, Homo sapien
gcaaacacatgaaactagaacaggt

SEQ ID NO: 4470711 - DNA, 25 bp, Homo sapien
tacgagtcaacaagaataccaaggt

SEQ ID NO: 4470712 - DNA, 25 bp, Homo sapien
tatgtaaaatctttaaactccacaa

SEQ ID NO: 4470713 - DNA, 25 bp, Homo sapien
ctctatgtaaaatctttaaactcca

SEQ ID NO: 4470714 - DNA, 25 bp, Homo sapien
ctatgtaaaatctttaaactccaca

SEQ ID NO: 4470715 - DNA, 25 bp, Homo sapien
tctatgtaaaatctttaaactccac

SEQ ID NO: 4470716 - DNA, 25 bp, Homo sapien
tgaagctgcgatgtttcctgtaatg

SEQ ID NO: 4470717 - DNA, 25 bp, Homo sapien
cctgtaatgtcggatctggcctaac

SEQ ID NO: 4470718 - DNA, 25 bp, Homo sapien
cagttactaccagggcattctcaca

SEQ ID NO: 4470719 - DNA, 25 bp, Homo sapien
cagggctctcacctcattagtggcg

SEQ ID NO: 4470720 - DNA, 25 bp, Homo sapien
gaagtatctgatattcacccatgtt

SEQ ID NO: 4470721 - DNA, 25 bp, Homo sapien
aataaagccactataaagagttgcc

SEQ ID NO: 4470722 - DNA, 25 bp, Homo sapien
cacagctggtaaccctttgagtcac

SEQ ID NO: 4470723 - DNA, 25 bp, Homo sapien
taacaatttaagcaaccttgacgcc

SEQ ID NO: 4470724 - DNA, 25 bp, Homo sapien
tccttaaaaaggatgcccttagatg

SEQ ID NO: 4470725 - DNA, 25 bp, Homo sapien
aaaaaggatgcccttagatgggact

SEQ ID NO: 4470726 - DNA, 25 bp, Homo sapien
gcccttagatgggactgtcttgtgc

SEQ ID NO: 4470727 - DNA, 25 bp, Homo sapien
aaaggatgcccttagatgggactgt

SEQ ID NO: 4470728 - DNA, 25 bp, Homo sapien
aataaataaattgataatccatagt

SEQ ID NO: 4470729 - DNA, 25 bp, Homo sapien
ttaccatgactaattactaataaat

SEQ ID NO: 4470730 - DNA, 25 bp, Homo sapien
aaataaattgataatccatagtttc

SEQ ID NO: 4470731 - DNA, 25 bp, Homo sapien
aaatcactgaattgagtagatgaat

SEQ ID NO: 4470732 - DNA, 25 bp, Homo sapien
tgagagtaaccactactacagggct

SEQ ID NO: 4470733 - DNA, 25 bp, Homo sapien
gaatcttgtgtcgttgaatgctgga

SEQ ID NO: 4470734 - DNA, 25 bp, Homo sapien
catagcttgtgacatgaagtcggct

SEQ ID NO: 4470735 - DNA, 25 bp, Homo sapien
taatgaggcctctctacactggatt

SEQ ID NO: 4470736 - DNA, 25 bp, Homo sapien
aaatcacacagcttaacctgtcctc

SEQ ID NO: 4470737 - DNA, 25 bp, Homo sapien
tgagtgctaactccaaaatcacaca

SEQ ID NO: 4470738 - DNA, 25 bp, Homo sapien
tactagcatattggagggcttcacg

SEQ ID NO: 4470739 - DNA, 25 bp, Homo sapien
tgtcctcttgtgtttactagcatat

SEQ ID NO: 4470740 - DNA, 25 bp, Homo sapien
atataagcatttgttccaacatacg

SEQ ID NO: 4470741 - DNA, 25 bp, Homo sapien
tataagcatttgttccaacatacgt

SEQ ID NO: 4470742 - DNA, 25 bp, Homo sapien
tccaacatacgtcttggctatagaa

SEQ ID NO: 4470743 - DNA, 25 bp, Homo sapien
ataaaagagattcctaagctccaga

SEQ ID NO: 4470744 - DNA, 25 bp, Homo sapien
actgctcccctgaaatcctttcagg

SEQ ID NO: 4470745 - DNA, 25 bp, Homo sapien
gattcctaagctccagacatcagaa

SEQ ID NO: 4470746 - DNA, 25 bp, Homo sapien
gctccagacatcagaatgaattcca

SEQ ID NO: 4470747 - DNA, 25 bp, Homo sapien
ttcaaggagaaagaactacagttcc

SEQ ID NO: 4470748 - DNA, 25 bp, Homo sapien
ggttctcttccccaatacagagtga

SEQ ID NO: 4470749 - DNA, 25 bp, Homo sapien
gagtgagcccacacaaatcccatat

SEQ ID NO: 4470750 - DNA, 25 bp, Homo sapien
tacaaccttgttagtgggtctcact

SEQ ID NO: 4470751 - DNA, 25 bp, Homo sapien
tgtatcccagcacttaataacgtgt

SEQ ID NO: 4470752 - DNA, 25 bp, Homo sapien
cactgattataagtgttggtgccaa

SEQ ID NO: 4470753 - DNA, 25 bp, Homo sapien
gctcaacaaggaaagggaatatgcc

SEQ ID NO: 4470754 - DNA, 25 bp, Homo sapien
gagccaaggctagataatgtttcat

SEQ ID NO: 4470755 - DNA, 25 bp, Homo sapien
gaaaatgggttgtcaaatgcctgct

SEQ ID NO: 4470756 - DNA, 25 bp, Homo sapien
gtatacatgatatgagtatgtgctg

SEQ ID NO: 4470757 - DNA, 25 bp, Homo sapien
tacatgatatgagtatgtgctgttg

SEQ ID NO: 4470758 - DNA, 25 bp, Homo sapien
cactgacaatccttcaaacatctga

SEQ ID NO: 4470759 - DNA, 25 bp, Homo sapien
taatgtggccaatcctcagtcctga

SEQ ID NO: 4470760 - DNA, 25 bp, Homo sapien
ggacgatgttgcacccctgataaaa

SEQ ID NO: 4470761 - DNA, 25 bp, Homo sapien
ggatctaagagagcatcaacccact

SEQ ID NO: 4470762 - DNA, 25 bp, Homo sapien
agcagaatcgcaacatcagggactt

SEQ ID NO: 4470763 - DNA, 25 bp, Homo sapien
ttgtctagttatagatttgcatgca

SEQ ID NO: 4470764 - DNA, 25 bp, Homo sapien
atttgtctagttatagatttgcatg

SEQ ID NO: 4470765 - DNA, 25 bp, Homo sapien
gaaataatatttgtctagttataga

SEQ ID NO: 4470766 - DNA, 25 bp, Homo sapien
aatatttgtctagttatagatttgc

SEQ ID NO: 4470767 - DNA, 25 bp, Homo sapien
aggatatggaaacctcccaagagca

SEQ ID NO: 4470768 - DNA, 25 bp, Homo sapien
ctgaggatatggaaacctcccaaga

SEQ ID NO: 4470769 - DNA, 25 bp, Homo sapien
ggatatggaaacctcccaagagcaa

SEQ ID NO: 4470770 - DNA, 25 bp, Homo sapien
gaggatatggaaacctcccaagagc

SEQ ID NO: 4470771 - DNA, 25 bp, Homo sapien
taaccatgtttgtgatgcatctgca

SEQ ID NO: 4470772 - DNA, 25 bp, Homo sapien
gatgggttacctagagctaagcagc

SEQ ID NO: 4470773 - DNA, 25 bp, Homo sapien
caaatgtagacaggagggagcaaaa

SEQ ID NO: 4470774 - DNA, 25 bp, Homo sapien
gacctagattagatgctttcaccct

SEQ ID NO: 4470775 - DNA, 25 bp, Homo sapien
tgcagcagcggggagtcggaatttt

SEQ ID NO: 4470776 - DNA, 25 bp, Homo sapien
cattcaaagctttacaataccaggg

SEQ ID NO: 4470777 - DNA, 25 bp, Homo sapien
ccaggggcactatttgctcagattt

SEQ ID NO: 4470778 - DNA, 25 bp, Homo sapien
gcagcggggagtcggaatttttgaa

SEQ ID NO: 4470779 - DNA, 25 bp, Homo sapien
taaatgacagttttggcctccggaa

SEQ ID NO: 4470780 - DNA, 25 bp, Homo sapien
aaatctagtacagcctccaggtgaa

SEQ ID NO: 4470781 - DNA, 25 bp, Homo sapien
cagtgaaaagcctggcgcagacaga

SEQ ID NO: 4470782 - DNA, 25 bp, Homo sapien
gaaatgtctggagctccatatggag

SEQ ID NO: 4470783 - DNA, 25 bp, Homo sapien
ggatgtttgcacttcccttgcaaag

SEQ ID NO: 4470784 - DNA, 25 bp, Homo sapien
gtaaggtgtgagtacagattcgccc

SEQ ID NO: 4470785 - DNA, 25 bp, Homo sapien
gattcgcccacagtcgctgttaagc

SEQ ID NO: 4470786 - DNA, 25 bp, Homo sapien
aaaggctcttttctaatcaatgaca

SEQ ID NO: 4470787 - DNA, 25 bp, Homo sapien
atcaaacgaaaaaattccgctggcg

SEQ ID NO: 4470788 - DNA, 25 bp, Homo sapien
taagaatgcctctttgagacaagca

SEQ ID NO: 4470789 - DNA, 25 bp, Homo sapien
gccgtttggaataacatcaagcttg

SEQ ID NO: 4470790 - DNA, 25 bp, Homo sapien
tccgctggcggttgtataaacatca

SEQ ID NO: 4470791 - DNA, 25 bp, Homo sapien
aaatattttctccttgacaagctgc

SEQ ID NO: 4470792 - DNA, 25 bp, Homo sapien
caattccaggagtgatcagtaaaca

SEQ ID NO: 4470793 - DNA, 25 bp, Homo sapien
gacatcagtaaacaatcaacattag

SEQ ID NO: 4470794 - DNA, 25 bp, Homo sapien
catgttaatacaaggatcagaaagc

SEQ ID NO: 4470795 - DNA, 25 bp, Homo sapien
ctcacgtgagtctcctgccttgggc

SEQ ID NO: 4470796 - DNA, 25 bp, Homo sapien
ggctcacgtgagtctcctgccttgg

SEQ ID NO: 4470797 - DNA, 25 bp, Homo sapien
ggtttgagctagcacacctggctcc

SEQ ID NO: 4470798 - DNA, 25 bp, Homo sapien
caggtttgagctagcacacctggct

SEQ ID NO: 4470799 - DNA, 25 bp, Homo sapien
ctgagtacctgagattacagatgca

SEQ ID NO: 4470800 - DNA, 25 bp, Homo sapien
gccaccatgtctggctaatttttgt

SEQ ID NO: 4470801 - DNA, 25 bp, Homo sapien
ttggcctcaagcgatctgcctgtct

SEQ ID NO: 4470802 - DNA, 25 bp, Homo sapien
tcttggcctcaagcgatctgcctgt

SEQ ID NO: 4470803 - DNA, 25 bp, Homo sapien
tacaaggaccatcattagcaattag

SEQ ID NO: 4470804 - DNA, 25 bp, Homo sapien
gggatagttacgtctcattctgatg

SEQ ID NO: 4470805 - DNA, 25 bp, Homo sapien
ccaatggctctggtgataaaaagca

SEQ ID NO: 4470806 - DNA, 25 bp, Homo sapien
tagaagtttgcttgtgggtcctcaa

SEQ ID NO: 4470807 - DNA, 25 bp, Homo sapien
taaaggctgtattatgttcctctgt

SEQ ID NO: 4470808 - DNA, 25 bp, Homo sapien
atagagttagatgtattatctcctt

SEQ ID NO: 4470809 - DNA, 25 bp, Homo sapien
taattccaccagaaaatttaatgcc

SEQ ID NO: 4470810 - DNA, 25 bp, Homo sapien
tatatgaatgccacatagaccatag

SEQ ID NO: 4470811 - DNA, 25 bp, Homo sapien
cattaaagatccctggtttttctga

SEQ ID NO: 4470812 - DNA, 25 bp, Homo sapien
gcaatatctttacagtggagtggaa

SEQ ID NO: 4470813 - DNA, 25 bp, Homo sapien
tcttataaaaacattgatgctcagg

SEQ ID NO: 4470814 - DNA, 25 bp, Homo sapien
gcatgcaaaggaagcagccatcagg

SEQ ID NO: 4470815 - DNA, 25 bp, Homo sapien
taatggtacctaatctaatacaggc

SEQ ID NO: 4470816 - DNA, 25 bp, Homo sapien
caacaatgcactgcagaagctggag

SEQ ID NO: 4470817 - DNA, 25 bp, Homo sapien
tcatcaacaatgcactgcagaagct

SEQ ID NO: 4470818 - DNA, 25 bp, Homo sapien
ctcatcaacaatgcactgcagaagc

SEQ ID NO: 4470819 - DNA, 25 bp, Homo sapien
atcaacaatgcactgcagaagctgg

SEQ ID NO: 4470820 - DNA, 25 bp, Homo sapien
tgggtaaataactcaaggcaggcaa

SEQ ID NO: 4470821 - DNA, 25 bp, Homo sapien
gacaaggccagttcacgtaacatag

SEQ ID NO: 4470822 - DNA, 25 bp, Homo sapien
tgaggaccagcctgcgggatagtct

SEQ ID NO: 4470823 - DNA, 25 bp, Homo sapien
gagtgaaagcacataagacgatgcc

SEQ ID NO: 4470824 - DNA, 25 bp, Homo sapien
cagaggcaatcacaagagggcacag

SEQ ID NO: 4470825 - DNA, 25 bp, Homo sapien
aatgtcagcgccaaacactctggca

SEQ ID NO: 4470826 - DNA, 25 bp, Homo sapien
tgaggagtgcccatagagaacagag

SEQ ID NO: 4470827 - DNA, 25 bp, Homo sapien
tctatacacttcaagaggcccgaga

SEQ ID NO: 4470828 - DNA, 25 bp, Homo sapien
gctcagggtgtgtaggtcccatcat

SEQ ID NO: 4470829 - DNA, 25 bp, Homo sapien
tccaacttgggctcagggtgtgtag

SEQ ID NO: 4470830 - DNA, 25 bp, Homo sapien
cctggcatccaacttgggctcaggg

SEQ ID NO: 4470831 - DNA, 25 bp, Homo sapien
ggctcagggtgtgtaggtcccatca

SEQ ID NO: 4470832 - DNA, 25 bp, Homo sapien
aagtccacatcaccacactgtatgt

SEQ ID NO: 4470833 - DNA, 25 bp, Homo sapien
tgaatgttcactcgactgttagtta

SEQ ID NO: 4470834 - DNA, 25 bp, Homo sapien
ccaaagtccacatcaccacactgta

SEQ ID NO: 4470835 - DNA, 25 bp, Homo sapien
gaatgttcactcgactgttagttaa

SEQ ID NO: 4470836 - DNA, 25 bp, Homo sapien
aacatacttgtctcataccgaaggg

SEQ ID NO: 4470837 - DNA, 25 bp, Homo sapien
ccttttcagtggcttaggcagagca

SEQ ID NO: 4470838 - DNA, 25 bp, Homo sapien
taaatgagctcaccctcgtgggaag

SEQ ID NO: 4470839 - DNA, 25 bp, Homo sapien
tcatcagccatagtgcacagcagtt

SEQ ID NO: 4470840 - DNA, 25 bp, Homo sapien
ttcttccagatgcttttccgttgaa

SEQ ID NO: 4470841 - DNA, 25 bp, Homo sapien
ttccagatgcttttccgttgaactt

SEQ ID NO: 4470842 - DNA, 25 bp, Homo sapien
cttccagatgcttttccgttgaact

SEQ ID NO: 4470843 - DNA, 25 bp, Homo sapien
tcttccagatgcttttccgttgaac

SEQ ID NO: 4470844 - DNA, 25 bp, Homo sapien
aactgtgtcaaatgcatgcatgtat

SEQ ID NO: 4470845 - DNA, 25 bp, Homo sapien
cagcgctgcaggcaagaaactcaga

SEQ ID NO: 4470846 - DNA, 25 bp, Homo sapien
catttggtgggagccaaacaatttc

SEQ ID NO: 4470847 - DNA, 25 bp, Homo sapien
ggccatttggatgagcaatatatca

SEQ ID NO: 4470848 - DNA, 25 bp, Homo sapien
caaagtgccctgcaaagtatgatac

SEQ ID NO: 4470849 - DNA, 25 bp, Homo sapien
tgccctgcaaagtatgatacatgca

SEQ ID NO: 4470850 - DNA, 25 bp, Homo sapien
cctacacaaagtgccctgcaaagta

SEQ ID NO: 4470851 - DNA, 25 bp, Homo sapien
atccctacacaaagtgccctgcaaa

SEQ ID NO: 4470852 - DNA, 25 bp, Homo sapien
tccaagaatgacagagagcgccact

SEQ ID NO: 4470853 - DNA, 25 bp, Homo sapien
ccattaccgtttgcaaaggaaggct

SEQ ID NO: 4470854 - DNA, 25 bp, Homo sapien
ccaccaccacataatacaaagagca

SEQ ID NO: 4470855 - DNA, 25 bp, Homo sapien
gaggtgggagtcagtcaaaaaagca

SEQ ID NO: 4470856 - DNA, 25 bp, Homo sapien
cactgagtgatgaaatgtacaaatg

SEQ ID NO: 4470857 - DNA, 25 bp, Homo sapien
gagtgatgaaatgtacaaatggctc

SEQ ID NO: 4470858 - DNA, 25 bp, Homo sapien
caaatggctccgagaactctccaac

SEQ ID NO: 4470859 - DNA, 25 bp, Homo sapien
ctccaactggaaggacgggcgaatc

SEQ ID NO: 4470860 - DNA, 25 bp, Homo sapien
gatgcagggagagccataaggtctc

SEQ ID NO: 4470861 - DNA, 25 bp, Homo sapien
agtatgcttatgaccctttgtgtaa

SEQ ID NO: 4470862 - DNA, 25 bp, Homo sapien
cacggagctgccgagttaatggcat

SEQ ID NO: 4470863 - DNA, 25 bp, Homo sapien
gagttaatggcatgtatcatttaca

SEQ ID NO: 4470864 - DNA, 25 bp, Homo sapien
ggtttccctttagcataatcatcgg

SEQ ID NO: 4470865 - DNA, 25 bp, Homo sapien
ggatggcacacaacgattttggtta

SEQ ID NO: 4470866 - DNA, 25 bp, Homo sapien
taatcatcggacagatcatagtggg

SEQ ID NO: 4470867 - DNA, 25 bp, Homo sapien
cagtggacatgactctggactttgg

SEQ ID NO: 4470868 - DNA, 25 bp, Homo sapien
atcaattcttcaggtgctggccttt

SEQ ID NO: 4470869 - DNA, 25 bp, Homo sapien
catcaattcttcaggtgctggcctt

SEQ ID NO: 4470870 - DNA, 25 bp, Homo sapien
tcttcaggtgctggcctttcttttg

SEQ ID NO: 4470871 - DNA, 25 bp, Homo sapien
ggtgctggcctttcttttggctgtt

SEQ ID NO: 4470872 - DNA, 25 bp, Homo sapien
aatcctgcaggcctcacatttgaag

SEQ ID NO: 4470873 - DNA, 25 bp, Homo sapien
ctcacatttgaagcggcccatgcag

SEQ ID NO: 4470874 - DNA, 25 bp, Homo sapien
gcctcacatttgaagcggcccatgc

SEQ ID NO: 4470875 - DNA, 25 bp, Homo sapien
tgcaggcctcacatttgaagcggcc

SEQ ID NO: 4470876 - DNA, 25 bp, Homo sapien
cagacccaggagtaagggtgatcta

SEQ ID NO: 4470877 - DNA, 25 bp, Homo sapien
ggtgatctagcccaccagtcctaca

SEQ ID NO: 4470878 - DNA, 25 bp, Homo sapien
gtcacacctggagttcatataagag

SEQ ID NO: 4470879 - DNA, 25 bp, Homo sapien
taggctgagacttgctgtgttcgct

SEQ ID NO: 4470880 - DNA, 25 bp, Homo sapien
gggatggctacaacaaaggtgctaa

SEQ ID NO: 4470881 - DNA, 25 bp, Homo sapien
agggatggctacaacaaaggtgcta

SEQ ID NO: 4470882 - DNA, 25 bp, Homo sapien
gatggctacaacaaaggtgctaaaa

SEQ ID NO: 4470883 - DNA, 25 bp, Homo sapien
tggctacaacaaaggtgctaaaagg

SEQ ID NO: 4470884 - DNA, 25 bp, Homo sapien
ggactgccagaagtttggagcacag

SEQ ID NO: 4470885 - DNA, 25 bp, Homo sapien
ctggggactgccagaagtttggagc

SEQ ID NO: 4470886 - DNA, 25 bp, Homo sapien
tggggactgccagaagtttggagca

SEQ ID NO: 4470887 - DNA, 25 bp, Homo sapien
gggactgccagaagtttggagcaca

SEQ ID NO: 4470888 - DNA, 25 bp, Homo sapien
gaagtgtaatgaacccgtagtccca

SEQ ID NO: 4470889 - DNA, 25 bp, Homo sapien
tgtgcacagcctacagacaagacgg

SEQ ID NO: 4470890 - DNA, 25 bp, Homo sapien
ccttgggcgctctgtggaaagacct

SEQ ID NO: 4470891 - DNA, 25 bp, Homo sapien
cattgcacgcttgctggtcagggct

SEQ ID NO: 4470892 - DNA, 25 bp, Homo sapien
tatactttgacacccttatctcaga

SEQ ID NO: 4470893 - DNA, 25 bp, Homo sapien
tctatgtgcctagatctaagtctgg

SEQ ID NO: 4470894 - DNA, 25 bp, Homo sapien
cactatggatgtgtggagcggtttc

SEQ ID NO: 4470895 - DNA, 25 bp, Homo sapien
gggcactttacaatctatagaccac

SEQ ID NO: 4470896 - DNA, 25 bp, Homo sapien
tggaagaagagcgtaacaaaggtca

SEQ ID NO: 4470897 - DNA, 25 bp, Homo sapien
tagcgaccaatgttttccatctgaa

SEQ ID NO: 4470898 - DNA, 25 bp, Homo sapien
tattctcaagtttctgctattagcg

SEQ ID NO: 4470899 - DNA, 25 bp, Homo sapien
tggtgtcactggtcatgggcagaat

SEQ ID NO: 4470900 - DNA, 25 bp, Homo sapien
gtacggtgttggatggggcacagga

SEQ ID NO: 4470901 - DNA, 25 bp, Homo sapien
gcagccgcaggaccagtgttgtacg

SEQ ID NO: 4470902 - DNA, 25 bp, Homo sapien
cgcaggaccagtgttgtacggtgtt

SEQ ID NO: 4470903 - DNA, 25 bp, Homo sapien
agccgcaggaccagtgttgtacggt

SEQ ID NO: 4470904 - DNA, 25 bp, Homo sapien
ggctgctgtggtgcactggtcattt

SEQ ID NO: 4470905 - DNA, 25 bp, Homo sapien
cacatgcatgtgtaaagctgtgtga

SEQ ID NO: 4470906 - DNA, 25 bp, Homo sapien
actgagccccatcacgtacatcggg

SEQ ID NO: 4470907 - DNA, 25 bp, Homo sapien
tccacttaggacgtacacatgcatg

SEQ ID NO: 4470908 - DNA, 25 bp, Homo sapien
tagtaaagactccaacaagctgctg

SEQ ID NO: 4470909 - DNA, 25 bp, Homo sapien
gctccataagctgtggctgctctag

SEQ ID NO: 4470910 - DNA, 25 bp, Homo sapien
tgaatgccttacatctgaccacagc

SEQ ID NO: 4470911 - DNA, 25 bp, Homo sapien
tgttgaagcagtaagcctggcctag

SEQ ID NO: 4470912 - DNA, 25 bp, Homo sapien
cccttagttgggctttgagcttctt

SEQ ID NO: 4470913 - DNA, 25 bp, Homo sapien
tgtctgcccttagttgggctttgag

SEQ ID NO: 4470914 - DNA, 25 bp, Homo sapien
tctgcccttagttgggctttgagct

SEQ ID NO: 4470915 - DNA, 25 bp, Homo sapien
tcgctgtctgcccttagttgggctt

SEQ ID NO: 4470916 - DNA, 25 bp, Homo sapien
aggtgcccgagttccacacagccag

SEQ ID NO: 4470917 - DNA, 25 bp, Homo sapien
cagaggtgcccgagttccacacagc

SEQ ID NO: 4470918 - DNA, 25 bp, Homo sapien
agaggtgcccgagttccacacagcc

SEQ ID NO: 4470919 - DNA, 25 bp, Homo sapien
gtgcccgagttccacacagccagat

SEQ ID NO: 4470920 - DNA, 25 bp, Homo sapien
agcgtcctaggctgtgcactgtgga

SEQ ID NO: 4470921 - DNA, 25 bp, Homo sapien
actgtggacttggtagctgctggca

SEQ ID NO: 4470922 - DNA, 25 bp, Homo sapien
ggcagctgttcaccaccatttgact

SEQ ID NO: 4470923 - DNA, 25 bp, Homo sapien
aaagccagtgtgtaggacccgagag

SEQ ID NO: 4470924 - DNA, 25 bp, Homo sapien
tctggaacaagcagagcggaactgc

SEQ ID NO: 4470925 - DNA, 25 bp, Homo sapien
agggagcgtagaggcgttcctccac

SEQ ID NO: 4470926 - DNA, 25 bp, Homo sapien
gcgtagaggcgttcctccacattcc

SEQ ID NO: 4470927 - DNA, 25 bp, Homo sapien
tttcccagaatgccgggtgactttg

SEQ ID NO: 4470928 - DNA, 25 bp, Homo sapien
tgtggatggcagaggtttggtctgg

SEQ ID NO: 4470929 - DNA, 25 bp, Homo sapien
ctgcaggacccctaagggcacaggg

SEQ ID NO: 4470930 - DNA, 25 bp, Homo sapien
catggaggccaggctgggtgtggcc

SEQ ID NO: 4470931 - DNA, 25 bp, Homo sapien
gcacaggggccatggaggccaggct

SEQ ID NO: 4470932 - DNA, 25 bp, Homo sapien
gggcacaggggccatggaggccagg

SEQ ID NO: 4470933 - DNA, 25 bp, Homo sapien
cctgcgtgggtctatctcagaggca

SEQ ID NO: 4470934 - DNA, 25 bp, Homo sapien
gctgcttaaagagccgcatggcctc

SEQ ID NO: 4470935 - DNA, 25 bp, Homo sapien
gaggaaactcggcttcgaagatgcc

SEQ ID NO: 4470936 - DNA, 25 bp, Homo sapien
cataatctgctcatagcactctggg

SEQ ID NO: 4470937 - DNA, 25 bp, Homo sapien
ccacatggacaccacggcggcattt

SEQ ID NO: 4470938 - DNA, 25 bp, Homo sapien
ggcatttccatcattgaactgcacg

SEQ ID NO: 4470939 - DNA, 25 bp, Homo sapien
acaccacggcggcatttccatcatt

SEQ ID NO: 4470940 - DNA, 25 bp, Homo sapien
tgaactgcacgatgaacgggtggcc

SEQ ID NO: 4470941 - DNA, 25 bp, Homo sapien
aggcagcatacggagaagggcgacg

SEQ ID NO: 4470942 - DNA, 25 bp, Homo sapien
cagcatacggagaagggcgacgggt

SEQ ID NO: 4470943 - DNA, 25 bp, Homo sapien
gcatacggagaagggcgacgggtgg

SEQ ID NO: 4470944 - DNA, 25 bp, Homo sapien
cgcaggcagcatacggagaagggcg

SEQ ID NO: 4470945 - DNA, 25 bp, Homo sapien
ctgacagaggtgaaggcgagggcag

SEQ ID NO: 4470946 - DNA, 25 bp, Homo sapien
gaggtgaaggcgagggcagggaagc

SEQ ID NO: 4470947 - DNA, 25 bp, Homo sapien
gacagaggtgaaggcgagggcaggg

SEQ ID NO: 4470948 - DNA, 25 bp, Homo sapien
cagaggtgaaggcgagggcagggaa

SEQ ID NO: 4470949 - DNA, 25 bp, Homo sapien
cagaaggtatggggatggcctggtg

SEQ ID NO: 4470950 - DNA, 25 bp, Homo sapien
accagaaggtatggggatggcctgg

SEQ ID NO: 4470951 - DNA, 25 bp, Homo sapien
agaaggtatggggatggcctggtgg

SEQ ID NO: 4470952 - DNA, 25 bp, Homo sapien
ccagaaggtatggggatggcctggt

SEQ ID NO: 4470953 - DNA, 25 bp, Homo sapien
catcagtgatgctgacgggcctgac

SEQ ID NO: 4470954 - DNA, 25 bp, Homo sapien
agcattaatacttttattcccatca

SEQ ID NO: 4470955 - DNA, 25 bp, Homo sapien
tgacgggcctgaccctttatagaga

SEQ ID NO: 4470956 - DNA, 25 bp, Homo sapien
tgctgacgggcctgaccctttatag

SEQ ID NO: 4470957 - DNA, 25 bp, Homo sapien
aagagcatctctggtgggtcgagga

SEQ ID NO: 4470958 - DNA, 25 bp, Homo sapien
catctctggtgggtcgaggatgtga

SEQ ID NO: 4470959 - DNA, 25 bp, Homo sapien
ctctggtgggtcgaggatgtgattt

SEQ ID NO: 4470960 - DNA, 25 bp, Homo sapien
ttgaagagcatctctggtgggtcga

SEQ ID NO: 4470961 - DNA, 25 bp, Homo sapien
tccatttgggtattaggagacttgc

SEQ ID NO: 4470962 - DNA, 25 bp, Homo sapien
gagacttgcattgaatcccgcctct

SEQ ID NO: 4470963 - DNA, 25 bp, Homo sapien
gattgccaaaaaggaccgaggaggc

SEQ ID NO: 4470964 - DNA, 25 bp, Homo sapien
ccacaggattgccaaaaaggaccga

SEQ ID NO: 4470965 - DNA, 25 bp, Homo sapien
catctgtaggatgggcacatggacc

SEQ ID NO: 4470966 - DNA, 25 bp, Homo sapien
ctgcatctgtaggatgggcacatgg

SEQ ID NO: 4470967 - DNA, 25 bp, Homo sapien
tgtaggatgggcacatggaccccca

SEQ ID NO: 4470968 - DNA, 25 bp, Homo sapien
atctgcatctgtaggatgggcacat

SEQ ID NO: 4470969 - DNA, 25 bp, Homo sapien
agaacaattgcggtcctggtgggcc

SEQ ID NO: 4470970 - DNA, 25 bp, Homo sapien
gatcataggtgagaccagcgctcct

SEQ ID NO: 4470971 - DNA, 25 bp, Homo sapien
tgttctcgggaacatcaaaaggagg

SEQ ID NO: 4470972 - DNA, 25 bp, Homo sapien
tctgggtttccgctgcctggaccag

SEQ ID NO: 4470973 - DNA, 25 bp, Homo sapien
actcctgttgcggaccagagactga

SEQ ID NO: 4470974 - DNA, 25 bp, Homo sapien
tcactcctgttgcggaccagagact

SEQ ID NO: 4470975 - DNA, 25 bp, Homo sapien
tcctgttgcggaccagagactgagg

SEQ ID NO: 4470976 - DNA, 25 bp, Homo sapien
ctcactcctgttgcggaccagagac

SEQ ID NO: 4470977 - DNA, 25 bp, Homo sapien
ggtgtgcagcgtcgactctgcgtcc

SEQ ID NO: 4470978 - DNA, 25 bp, Homo sapien
gggtgtgcagcgtcgactctgcgtc

SEQ ID NO: 4470979 - DNA, 25 bp, Homo sapien
gctacggacagctccccgcgctctg

SEQ ID NO: 4470980 - DNA, 25 bp, Homo sapien
ctctgcgtccccgttcagcaccaag

SEQ ID NO: 4470981 - DNA, 25 bp, Homo sapien
cccgggaggcgccataaatcttccg

SEQ ID NO: 4470982 - DNA, 25 bp, Homo sapien
gtggcagcagcgacgaacgcagcct

SEQ ID NO: 4470983 - DNA, 25 bp, Homo sapien
tggaagcgcgaaccgatagctcagg

SEQ ID NO: 4470984 - DNA, 25 bp, Homo sapien
gccataaatcttccgcgggtagcag

SEQ ID NO: 4470985 - DNA, 25 bp, Homo sapien
agatgcgaaccctgagccgttgacc

SEQ ID NO: 4470986 - DNA, 25 bp, Homo sapien
gggcgcggagatgcgaaccctgagc

SEQ ID NO: 4470987 - DNA, 25 bp, Homo sapien
cgcggagatgcgaaccctgagccgt

SEQ ID NO: 4470988 - DNA, 25 bp, Homo sapien
cggagatgcgaaccctgagccgttg

SEQ ID NO: 4470989 - DNA, 25 bp, Homo sapien
gccgggcgagcggtgagcggaggtg

SEQ ID NO: 4470990 - DNA, 25 bp, Homo sapien
ggagtccgggatccgccgggctctc

SEQ ID NO: 4470991 - DNA, 25 bp, Homo sapien
ggagccgggcgagcggtgagcggag

SEQ ID NO: 4470992 - DNA, 25 bp, Homo sapien
tggagccgggcgagcggtgagcgga

SEQ ID NO: 4470993 - DNA, 25 bp, Homo sapien
tggtttccaccgaggtcaacgtgtg

SEQ ID NO: 4470994 - DNA, 25 bp, Homo sapien
tcagatatacgtttcccactcgggc

SEQ ID NO: 4470995 - DNA, 25 bp, Homo sapien
caacgtgtgggacagagaggttctc

SEQ ID NO: 4470996 - DNA, 25 bp, Homo sapien
gctgtcccggctcatatgggctaga

SEQ ID NO: 4470997 - DNA, 25 bp, Homo sapien
atccgtgcgccttcggcaaccctcg

SEQ ID NO: 4470998 - DNA, 25 bp, Homo sapien
acccagatacgcagagtgacttgcc

SEQ ID NO: 4470999 - DNA, 25 bp, Homo sapien
ccagatccgtgcgccttcggcaacc

SEQ ID NO: 4471000 - DNA, 25 bp, Homo sapien
aacccagatacgcagagtgacttgc

SEQ ID NO: 4471001 - DNA, 25 bp, Homo sapien
catgttggcgccgttaacaacagcc

SEQ ID NO: 4471002 - DNA, 25 bp, Homo sapien
agacccatgttggcgccgttaacaa

SEQ ID NO: 4471003 - DNA, 25 bp, Homo sapien
tgttggcgccgttaacaacagcccc

SEQ ID NO: 4471004 - DNA, 25 bp, Homo sapien
cccatgttggcgccgttaacaacag

SEQ ID NO: 4471005 - DNA, 25 bp, Homo sapien
cattatagctgtagttcttgaggag

SEQ ID NO: 4471006 - DNA, 25 bp, Homo sapien
tggccgtcgatgaccagcgacacaa

SEQ ID NO: 4471007 - DNA, 25 bp, Homo sapien
cacgcggcggttgtggatctcatta

SEQ ID NO: 4471008 - DNA, 25 bp, Homo sapien
atgggcaccccgtacagcgacgtct

SEQ ID NO: 4471009 - DNA, 25 bp, Homo sapien
gtaacgcgcagggatgaagctacca

SEQ ID NO: 4471010 - DNA, 25 bp, Homo sapien
cgttcggcctctcgcttagtgatca

SEQ ID NO: 4471011 - DNA, 25 bp, Homo sapien
cacttgatgcacttggcacgagagc

SEQ ID NO: 4471012 - DNA, 25 bp, Homo sapien
tcgtgcaccacatcgaaggcgaagt

SEQ ID NO: 4471013 - DNA, 25 bp, Homo sapien
tagggagaaggtccgcttgcgcgtg

SEQ ID NO: 4471014 - DNA, 25 bp, Homo sapien
gtgccgccattaaacatggccttga

SEQ ID NO: 4471015 - DNA, 25 bp, Homo sapien
gcttgcgcgtgccgccattaaacat

SEQ ID NO: 4471016 - DNA, 25 bp, Homo sapien
cttgtagggagaaggtccgcttgcg

SEQ ID NO: 4471017 - DNA, 25 bp, Homo sapien
ccacccgacccgccattggcaccgc

SEQ ID NO: 4471018 - DNA, 25 bp, Homo sapien
cccacccgacccgccattggcaccg

SEQ ID NO: 4471019 - DNA, 25 bp, Homo sapien
tgcccacccgacccgccattggcac

SEQ ID NO: 4471020 - DNA, 25 bp, Homo sapien
cacccgacccgccattggcaccgcc

SEQ ID NO: 4471021 - DNA, 25 bp, Homo sapien
ccacagcgcaggcttttgtggggcg

SEQ ID NO: 4471022 - DNA, 25 bp, Homo sapien
actagctccagtcgccaggccaagt

SEQ ID NO: 4471023 - DNA, 25 bp, Homo sapien
tcctgggcccgccgggccactagct

SEQ ID NO: 4471024 - DNA, 25 bp, Homo sapien
cgggtagcttcgtacgccggcgccg

SEQ ID NO: 4471025 - DNA, 25 bp, Homo sapien
gggccactagctccagtcgccaggc

SEQ ID NO: 4471026 - DNA, 25 bp, Homo sapien
aagcctttgctgggcaccgggatca

SEQ ID NO: 4471027 - DNA, 25 bp, Homo sapien
gggcataggccgaaggccgtaggga

SEQ ID NO: 4471028 - DNA, 25 bp, Homo sapien
gggcagcttttgcaggagcccaaag

SEQ ID NO: 4471029 - DNA, 25 bp, Homo sapien
aggccgtagggaagccgtaaggatg

SEQ ID NO: 4471030 - DNA, 25 bp, Homo sapien
tgcccccgggggcaagtggctggct

SEQ ID NO: 4471031 - DNA, 25 bp, Homo sapien
gtggctggctcccgggccccccgca

SEQ ID NO: 4471032 - DNA, 25 bp, Homo sapien
gccgccgccgctcccagtgccagga

SEQ ID NO: 4471033 - DNA, 25 bp, Homo sapien
ccctgcccccgggggcaagtggctg

SEQ ID NO: 4471034 - DNA, 25 bp, Homo sapien
tgccccggagggttgatgcccccag

SEQ ID NO: 4471035 - DNA, 25 bp, Homo sapien
gccccggagggttgatgcccccaga

SEQ ID NO: 4471036 - DNA, 25 bp, Homo sapien
ccggagggttgatgcccccagaaca

SEQ ID NO: 4471037 - DNA, 25 bp, Homo sapien
ctgccccggagggttgatgccccca

SEQ ID NO: 4471038 - DNA, 25 bp, Homo sapien
cagaacatgggaaacgtcgggtaca

SEQ ID NO: 4471039 - DNA, 25 bp, Homo sapien
ctgagcagcggggtaggacggtacc

SEQ ID NO: 4471040 - DNA, 25 bp, Homo sapien
tggccagaacatgggaaacgtcggg

SEQ ID NO: 4471041 - DNA, 25 bp, Homo sapien
catgggaaacgtcgggtacacagtg

SEQ ID NO: 4471042 - DNA, 25 bp, Homo sapien
tctggggcaccgctgccagcagctg

SEQ ID NO: 4471043 - DNA, 25 bp, Homo sapien
tgccgctgccgccgccgctgccgcc

SEQ ID NO: 4471044 - DNA, 25 bp, Homo sapien
cgctgccgccgccacggctgccgcc

SEQ ID NO: 4471045 - DNA, 25 bp, Homo sapien
ctgccgccgccacggctgccgccac

SEQ ID NO: 4471046 - DNA, 25 bp, Homo sapien
ctttggctggctcggcaccgtccag

SEQ ID NO: 4471047 - DNA, 25 bp, Homo sapien
tcgtccgtgccgtcttcgtccaggg

SEQ ID NO: 4471048 - DNA, 25 bp, Homo sapien
gcgccgaggccactctctttggctg

SEQ ID NO: 4471049 - DNA, 25 bp, Homo sapien
gacagagcgctcgggcagcgctcct

SEQ ID NO: 4471050 - DNA, 25 bp, Homo sapien
ctttgcgtgcgggcggcgggggcgg

SEQ ID NO: 4471051 - DNA, 25 bp, Homo sapien
ggcaacggggccaggggcggtggca

SEQ ID NO: 4471052 - DNA, 25 bp, Homo sapien
gcaacggggccaggggcggtggcag

SEQ ID NO: 4471053 - DNA, 25 bp, Homo sapien
tgcgtgcgggcggcgggggcggcgg

SEQ ID NO: 4471054 - DNA, 25 bp, Homo sapien
tcggtgtccttgaccaccggccgga

SEQ ID NO: 4471055 - DNA, 25 bp, Homo sapien
ccgggcgctcccgtagagcttagcg

SEQ ID NO: 4471056 - DNA, 25 bp, Homo sapien
agcttagcgatgctctcggtgtcct

SEQ ID NO: 4471057 - DNA, 25 bp, Homo sapien
caccggccggaaggccgacacgtag

SEQ ID NO: 4471058 - DNA, 25 bp, Homo sapien
gattccacgtccacctcgggctcgt

SEQ ID NO: 4471059 - DNA, 25 bp, Homo sapien
tcggtctcctcttgggcgtcctcgt

SEQ ID NO: 4471060 - DNA, 25 bp, Homo sapien
tccacgtcgggcgaggcggaattgt

SEQ ID NO: 4471061 - DNA, 25 bp, Homo sapien
tcgggctcgtccgcggtgtccacgt

SEQ ID NO: 4471062 - DNA, 25 bp, Homo sapien
gaagggggtccagtgggctgttcac

SEQ ID NO: 4471063 - DNA, 25 bp, Homo sapien
tggcggaagggggtccagtgggctg

SEQ ID NO: 4471064 - DNA, 25 bp, Homo sapien
ggaagggggtccagtgggctgttca

SEQ ID NO: 4471065 - DNA, 25 bp, Homo sapien
gggctgccgccgtcgggagagtttg

SEQ ID NO: 4471066 - DNA, 25 bp, Homo sapien
cgggggctgccgccgtcgggagagt

SEQ ID NO: 4471067 - DNA, 25 bp, Homo sapien
ggctgccgccgtcgggagagtttgc

SEQ ID NO: 4471068 - DNA, 25 bp, Homo sapien
gcaccaagtcttcggctgccaagtc

SEQ ID NO: 4471069 - DNA, 25 bp, Homo sapien
ctaggggcccgcaaggctctcgcag

SEQ ID NO: 4471070 - DNA, 25 bp, Homo sapien
tgccaagtccccaaatgcgggccgg

SEQ ID NO: 4471071 - DNA, 25 bp, Homo sapien
tcaggtctccgcaccaagtcttcgg

SEQ ID NO: 4471072 - DNA, 25 bp, Homo sapien
cagacgtaggaggccgcgggcccca

SEQ ID NO: 4471073 - DNA, 25 bp, Homo sapien
cgccgcgctcttcacgtgctcatcc

SEQ ID NO: 4471074 - DNA, 25 bp, Homo sapien
accgccgcgctcttcacgtgctcat

SEQ ID NO: 4471075 - DNA, 25 bp, Homo sapien
ccgccgcgctcttcacgtgctcatc

SEQ ID NO: 4471076 - DNA, 25 bp, Homo sapien
gatttcctcgtttccaaatcatcgg

SEQ ID NO: 4471077 - DNA, 25 bp, Homo sapien
ctttggtctggataggatttcctcg

SEQ ID NO: 4471078 - DNA, 25 bp, Homo sapien
tcggcgggcgagtgattgtcttcct

SEQ ID NO: 4471079 - DNA, 25 bp, Homo sapien
tctgtctgtatttgcaggacttggc

SEQ ID NO: 4471080 - DNA, 25 bp, Homo sapien
cctgtgacatccaaggtaagcccat

SEQ ID NO: 4471081 - DNA, 25 bp, Homo sapien
ggccaggttctcgatatctttctcc

SEQ ID NO: 4471082 - DNA, 25 bp, Homo sapien
tctccaccaaatgagttcctgtgac

SEQ ID NO: 4471083 - DNA, 25 bp, Homo sapien
ctgtgacatccaaggtaagcccatc

SEQ ID NO: 4471084 - DNA, 25 bp, Homo sapien
tctcaagcacagcgtacaccttttt

SEQ ID NO: 4471085 - DNA, 25 bp, Homo sapien
tcaagcacagcgtacacctttttca

SEQ ID NO: 4471086 - DNA, 25 bp, Homo sapien
agcacagcgtacacctttttcacaa

SEQ ID NO: 4471087 - DNA, 25 bp, Homo sapien
caagcacagcgtacacctttttcac

SEQ ID NO: 4471088 - DNA, 25 bp, Homo sapien
cttcttgcggagctccatttgttcc

SEQ ID NO: 4471089 - DNA, 25 bp, Homo sapien
cagcttcttgcggagctccatttgt

SEQ ID NO: 4471090 - DNA, 25 bp, Homo sapien
ttcccgttccagcttcttgcggagc

SEQ ID NO: 4471091 - DNA, 25 bp, Homo sapien
cgttccagcttcttgcggagctcca

SEQ ID NO: 4471092 - DNA, 25 bp, Homo sapien
tggcacccggctttcggagtaggtc

SEQ ID NO: 4471093 - DNA, 25 bp, Homo sapien
tctcctgcagggcacctagtaccag

SEQ ID NO: 4471094 - DNA, 25 bp, Homo sapien
tgcagggcacctagtaccagttgcc

SEQ ID NO: 4471095 - DNA, 25 bp, Homo sapien
ctagtaccagttgcctggcacccgg

SEQ ID NO: 4471096 - DNA, 25 bp, Homo sapien
caccatttcttctcgataagccaat

SEQ ID NO: 4471097 - DNA, 25 bp, Homo sapien
tcttctcgataagccaattccctct

SEQ ID NO: 4471098 - DNA, 25 bp, Homo sapien
catttcttctcgataagccaattcc

SEQ ID NO: 4471099 - DNA, 25 bp, Homo sapien
tctcgataagccaattccctcttca

SEQ ID NO: 4471100 - DNA, 25 bp, Homo sapien
ccagtgaggaaacgcagaccaccct

SEQ ID NO: 4471101 - DNA, 25 bp, Homo sapien
gccagtgaggaaacgcagaccaccc

SEQ ID NO: 4471102 - DNA, 25 bp, Homo sapien
cagtgaggaaacgcagaccaccctc

SEQ ID NO: 4471103 - DNA, 25 bp, Homo sapien
tggtcgagttcgttacacagggtat

SEQ ID NO: 4471104 - DNA, 25 bp, Homo sapien
gccttccgctcctggtcgagttcgt

SEQ ID NO: 4471105 - DNA, 25 bp, Homo sapien
tctgctggatggcatagcgcgcctt

SEQ ID NO: 4471106 - DNA, 25 bp, Homo sapien
ctggatggcatagcgcgccttccgc

SEQ ID NO: 4471107 - DNA, 25 bp, Homo sapien
ggcaacagcggtggcttgaaggagc

SEQ ID NO: 4471108 - DNA, 25 bp, Homo sapien
agtggcggggcgtcagcatcttgca

SEQ ID NO: 4471109 - DNA, 25 bp, Homo sapien
gaaggagcagttgccagtgcagtgg

SEQ ID NO: 4471110 - DNA, 25 bp, Homo sapien
gaaatggtgcagggcgtcgtgggct

SEQ ID NO: 4471111 - DNA, 25 bp, Homo sapien
gctgtatttacatcggtcgggtccg

SEQ ID NO: 4471112 - DNA, 25 bp, Homo sapien
cagcagcgggtatttacaaggagca

SEQ ID NO: 4471113 - DNA, 25 bp, Homo sapien
gaatggcttgttcctcgctcagggc

SEQ ID NO: 4471114 - DNA, 25 bp, Homo sapien
cacaatcgggttcaaggctatacaa

SEQ ID NO: 4471115 - DNA, 25 bp, Homo sapien
gcagacactgctcggtagtttcggg

SEQ ID NO: 4471116 - DNA, 25 bp, Homo sapien
tggaaagacgcgcaggcaaaacgca

SEQ ID NO: 4471117 - DNA, 25 bp, Homo sapien
cgtttgagtaagagcccgcgtctga

SEQ ID NO: 4471118 - DNA, 25 bp, Homo sapien
aaaacgcaccacgtgacggagcgtg

SEQ ID NO: 4471119 - DNA, 25 bp, Homo sapien
ccatgcactgccagaactgggagct

SEQ ID NO: 4471120 - DNA, 25 bp, Homo sapien
gaagccgttcatggtcaggtgcctt

SEQ ID NO: 4471121 - DNA, 25 bp, Homo sapien
aagatgctgagggaagcttctgtca

SEQ ID NO: 4471122 - DNA, 25 bp, Homo sapien
tgggcactgaaggttaccatgcact

SEQ ID NO: 4471123 - DNA, 25 bp, Homo sapien
ttatagaaattagacgctgtccact

SEQ ID NO: 4471124 - DNA, 25 bp, Homo sapien
acttcctgtgtgaccgccacaacat

SEQ ID NO: 4471125 - DNA, 25 bp, Homo sapien
catacaaaggcagtctatccccaag

SEQ ID NO: 4471126 - DNA, 25 bp, Homo sapien
gccacaacattggatgagccagttt

SEQ ID NO: 4471127 - DNA, 25 bp, Homo sapien
cactgctgagcttgtctgtccctgc

SEQ ID NO: 4471128 - DNA, 25 bp, Homo sapien
tcccacactgctgagcttgtctgtc

SEQ ID NO: 4471129 - DNA, 25 bp, Homo sapien
ctgctgcgatttcccacactgctga

SEQ ID NO: 4471130 - DNA, 25 bp, Homo sapien
tctgtccctgcaccgagcccagcat

SEQ ID NO: 4471131 - DNA, 25 bp, Homo sapien
tgcccttatgttctccccctccagc

SEQ ID NO: 4471132 - DNA, 25 bp, Homo sapien
cactgccccagaacttgcccttatg

SEQ ID NO: 4471133 - DNA, 25 bp, Homo sapien
cctccagcttccttagtctgcacac

SEQ ID NO: 4471134 - DNA, 25 bp, Homo sapien
cccctccagcttccttagtctgcac

SEQ ID NO: 4471135 - DNA, 25 bp, Homo sapien
gttctttggagactgactccttggc

SEQ ID NO: 4471136 - DNA, 25 bp, Homo sapien
ggctttcagtctatagccaactgtt

SEQ ID NO: 4471137 - DNA, 25 bp, Homo sapien
tctttggagactgactccttggctt

SEQ ID NO: 4471138 - DNA, 25 bp, Homo sapien
actgttgttgggtttgctgtccatc

SEQ ID NO: 4471139 - DNA, 25 bp, Homo sapien
tctctggggacttcgcagctggaga

SEQ ID NO: 4471140 - DNA, 25 bp, Homo sapien
ttagaagaggaggtttggactctcc

SEQ ID NO: 4471141 - DNA, 25 bp, Homo sapien
atttggagtaattgccacagccctg

SEQ ID NO: 4471142 - DNA, 25 bp, Homo sapien
ggtttggactctcccaacatttgga

SEQ ID NO: 4471143 - DNA, 25 bp, Homo sapien
ctttctctttggtctccatgggagt

SEQ ID NO: 4471144 - DNA, 25 bp, Homo sapien
ctctttggtctccatgggagttgca

SEQ ID NO: 4471145 - DNA, 25 bp, Homo sapien
tctttggtctccatgggagttgcat

SEQ ID NO: 4471146 - DNA, 25 bp, Homo sapien
ttctctttggtctccatgggagttg

SEQ ID NO: 4471147 - DNA, 25 bp, Homo sapien
tggccttaaaaatgtcaccaccaca

SEQ ID NO: 4471148 - DNA, 25 bp, Homo sapien
ggggactccctacaaagacagctaa

SEQ ID NO: 4471149 - DNA, 25 bp, Homo sapien
gaaggggactccctacaaagacagc

SEQ ID NO: 4471150 - DNA, 25 bp, Homo sapien
ccaccacatttatctgaaggggact

SEQ ID NO: 4471151 - DNA, 25 bp, Homo sapien
gagttgcttcagagtagctgatggc

SEQ ID NO: 4471152 - DNA, 25 bp, Homo sapien
ctgactagagttgcttcagagtagc

SEQ ID NO: 4471153 - DNA, 25 bp, Homo sapien
ttgcttcagagtagctgatggcatc

SEQ ID NO: 4471154 - DNA, 25 bp, Homo sapien
actagagttgcttcagagtagctga

SEQ ID NO: 4471155 - DNA, 25 bp, Homo sapien
gcacatggaacagtacagaggaaca

SEQ ID NO: 4471156 - DNA, 25 bp, Homo sapien
tccacagtcatgtgcccagtttgca

SEQ ID NO: 4471157 - DNA, 25 bp, Homo sapien
aaaactgtcctatcgttcaccagaa

SEQ ID NO: 4471158 - DNA, 25 bp, Homo sapien
cagaggaacatatgacgcattccat

SEQ ID NO: 4471159 - DNA, 25 bp, Homo sapien
gagagagactcatcctaaatgtagg

SEQ ID NO: 4471160 - DNA, 25 bp, Homo sapien
accaccttcaattcgtttgtgagac

SEQ ID NO: 4471161 - DNA, 25 bp, Homo sapien
tggagaatctcaggtgaagattacc

SEQ ID NO: 4471162 - DNA, 25 bp, Homo sapien
gcatatagtttttatcatcctctga

SEQ ID NO: 4471163 - DNA, 25 bp, Homo sapien
agcgcaagcgcagtgaacttcgccg

SEQ ID NO: 4471164 - DNA, 25 bp, Homo sapien
cgcaagcgcagtgaacttcgccggg

SEQ ID NO: 4471165 - DNA, 25 bp, Homo sapien
cttgcgtctgtcagcgcaagcgcag

SEQ ID NO: 4471166 - DNA, 25 bp, Homo sapien
ggccgccgctagacccgcccctcta

SEQ ID NO: 4471167 - DNA, 25 bp, Homo sapien
gaaggtgaaaaagccgagcccatga

SEQ ID NO: 4471168 - DNA, 25 bp, Homo sapien
tcggctgcccggaatcagagagaaa

SEQ ID NO: 4471169 - DNA, 25 bp, Homo sapien
tcagctacagcatcgccatcatggt

SEQ ID NO: 4471170 - DNA, 25 bp, Homo sapien
gagaaagagtaacgtcccgctcact

SEQ ID NO: 4471171 - DNA, 25 bp, Homo sapien
caaaattattcaagcggagccccat

SEQ ID NO: 4471172 - DNA, 25 bp, Homo sapien
gttcagagcctcgaaataatacgcg

SEQ ID NO: 4471173 - DNA, 25 bp, Homo sapien
tgggtcgagacataaccagctgctg

SEQ ID NO: 4471174 - DNA, 25 bp, Homo sapien
cacagagaagatcgcgttcagagcc

SEQ ID NO: 4471175 - DNA, 25 bp, Homo sapien
ctttcggtgaggatattccacagga

SEQ ID NO: 4471176 - DNA, 25 bp, Homo sapien
cttggagtgtaaacattgtgaagtt

SEQ ID NO: 4471177 - DNA, 25 bp, Homo sapien
cttaacatacgaatcttggagtgta

SEQ ID NO: 4471178 - DNA, 25 bp, Homo sapien
ggagaaaagctctttcggtgaggat

SEQ ID NO: 4471179 - DNA, 25 bp, Homo sapien
ctccactaaaatgctgatggacttc

SEQ ID NO: 4471180 - DNA, 25 bp, Homo sapien
tactccactaaaatgctgatggact

SEQ ID NO: 4471181 - DNA, 25 bp, Homo sapien
ccactaaaatgctgatggacttctt

SEQ ID NO: 4471182 - DNA, 25 bp, Homo sapien
tccactaaaatgctgatggacttct

SEQ ID NO: 4471183 - DNA, 25 bp, Homo sapien
ttctagggaattttcttttcatgtg

SEQ ID NO: 4471184 - DNA, 25 bp, Homo sapien
agggaattttcttttcatgtgacac

SEQ ID NO: 4471185 - DNA, 25 bp, Homo sapien
cagaaaactctgaaggaagggttct

SEQ ID NO: 4471186 - DNA, 25 bp, Homo sapien
ggaattttcttttcatgtgacacta

SEQ ID NO: 4471187 - DNA, 25 bp, Homo sapien
tataccaaaaactacctgactgtgc

SEQ ID NO: 4471188 - DNA, 25 bp, Homo sapien
tatagacaagagtatcaggccccag

SEQ ID NO: 4471189 - DNA, 25 bp, Homo sapien
aaatagattatcagtcgcctagggc

SEQ ID NO: 4471190 - DNA, 25 bp, Homo sapien
aaaagacgcaaactaacagctctgg

SEQ ID NO: 4471191 - DNA, 25 bp, Homo sapien
tgttctaagggcagagtagtgcaga

SEQ ID NO: 4471192 - DNA, 25 bp, Homo sapien
aaatctatgtgagtgagcagaccag

SEQ ID NO: 4471193 - DNA, 25 bp, Homo sapien
tccttaaatgagagacaatcctggg

SEQ ID NO: 4471194 - DNA, 25 bp, Homo sapien
gaatgactgggcaataacctggcta

SEQ ID NO: 4471195 - DNA, 25 bp, Homo sapien
actgtcgatccttttaaacttagag

SEQ ID NO: 4471196 - DNA, 25 bp, Homo sapien
ttgtcttttagctctatcttctggg

SEQ ID NO: 4471197 - DNA, 25 bp, Homo sapien
tagagatgtatgtccccttcagttc

SEQ ID NO: 4471198 - DNA, 25 bp, Homo sapien
gacacaggtcttcctagactgataa

SEQ ID NO: 4471199 - DNA, 25 bp, Homo sapien
tatgacacaacaataaacttgagcg

SEQ ID NO: 4471200 - DNA, 25 bp, Homo sapien
gactactgtaaactctgcattgatg

SEQ ID NO: 4471201 - DNA, 25 bp, Homo sapien
agttggcatgggtcaaatgtactgc

SEQ ID NO: 4471202 - DNA, 25 bp, Homo sapien
tccataggtacaaagattcagatgc

SEQ ID NO: 4471203 - DNA, 25 bp, Homo sapien
taaattcattgacttctacccttgg

SEQ ID NO: 4471204 - DNA, 25 bp, Homo sapien
tagatggcaaaacgtaatgatgtgc

SEQ ID NO: 4471205 - DNA, 25 bp, Homo sapien
ttaagcaaataaaggccagctcact

SEQ ID NO: 4471206 - DNA, 25 bp, Homo sapien
tctccaggagaatgtcgagtgctat

SEQ ID NO: 4471207 - DNA, 25 bp, Homo sapien
ccggcgtagcccaacagtacttgga

SEQ ID NO: 4471208 - DNA, 25 bp, Homo sapien
catgattttctgtgggaaccgccgc

SEQ ID NO: 4471209 - DNA, 25 bp, Homo sapien
ggactacagccagcctttagcaaat

SEQ ID NO: 4471210 - DNA, 25 bp, Homo sapien
taatggcgatgatgcagggtgacca

SEQ ID NO: 4471211 - DNA, 25 bp, Homo sapien
attcatcctgcaaaagtaaccaaat

SEQ ID NO: 4471212 - DNA, 25 bp, Homo sapien
cctaaaacgaaaattcatcctgcaa

SEQ ID NO: 4471213 - DNA, 25 bp, Homo sapien
aagcctaaaacgaaaattcatcctg

SEQ ID NO: 4471214 - DNA, 25 bp, Homo sapien
catcctgcaaaagtaaccaaatact

SEQ ID NO: 4471215 - DNA, 25 bp, Homo sapien
gcatacatcaaagctcaagtctcct

SEQ ID NO: 4471216 - DNA, 25 bp, Homo sapien
gctcagaaccacataaaaacaggcc

SEQ ID NO: 4471217 - DNA, 25 bp, Homo sapien
tatataaccgtaatcatgagtgtgc

SEQ ID NO: 4471218 - DNA, 25 bp, Homo sapien
tgccagccgtagtatgccaacaaac

SEQ ID NO: 4471219 - DNA, 25 bp, Homo sapien
aatcttcgtgtattcagataatttc

SEQ ID NO: 4471220 - DNA, 25 bp, Homo sapien
gactcctataatcttcgtgtattca

SEQ ID NO: 4471221 - DNA, 25 bp, Homo sapien
ctcctataatcttcgtgtattcaga

SEQ ID NO: 4471222 - DNA, 25 bp, Homo sapien
cctataatcttcgtgtattcagata

SEQ ID NO: 4471223 - DNA, 25 bp, Homo sapien
taaaggaatgtacgacttagcaggt

SEQ ID NO: 4471224 - DNA, 25 bp, Homo sapien
tctaatagttatcagagcctgcgtc

SEQ ID NO: 4471225 - DNA, 25 bp, Homo sapien
accagtgctgccaattagggagaaa

SEQ ID NO: 4471226 - DNA, 25 bp, Homo sapien
gaatttgtatcacctgatctccagg

SEQ ID NO: 4471227 - DNA, 25 bp, Homo sapien
gaactgatggctaatgtgcaacacc

SEQ ID NO: 4471228 - DNA, 25 bp, Homo sapien
taacacatggtatcgttgaaggcac

SEQ ID NO: 4471229 - DNA, 25 bp, Homo sapien
cctctaggaggtagcataggtcatc

SEQ ID NO: 4471230 - DNA, 25 bp, Homo sapien
tacatatatagtcacccagcctgag

SEQ ID NO: 4471231 - DNA, 25 bp, Homo sapien
tagatggatgaaactgcaatgtggc

SEQ ID NO: 4471232 - DNA, 25 bp, Homo sapien
caattcatatcctgagtgaacctga

SEQ ID NO: 4471233 - DNA, 25 bp, Homo sapien
cacctaccctgagttgaatgattgc

SEQ ID NO: 4471234 - DNA, 25 bp, Homo sapien
tggctgtcactatgcaatgtgggaa

SEQ ID NO: 4471235 - DNA, 25 bp, Homo sapien
cactctccaattctgatgtagcaaa

SEQ ID NO: 4471236 - DNA, 25 bp, Homo sapien
caaatggcctgatttacttatctaa

SEQ ID NO: 4471237 - DNA, 25 bp, Homo sapien
gaactccacgatctacacaggcata

SEQ ID NO: 4471238 - DNA, 25 bp, Homo sapien
cctagatcatatggtgggaaagtga

SEQ ID NO: 4471239 - DNA, 25 bp, Homo sapien
tccatttttagccttcatgggcagg

SEQ ID NO: 4471240 - DNA, 25 bp, Homo sapien
catgggcaggtgaggtacaaatagc

SEQ ID NO: 4471241 - DNA, 25 bp, Homo sapien
cacagagacaggtgtttaaccatcc

SEQ ID NO: 4471242 - DNA, 25 bp, Homo sapien
tccaaccctgggtgcaaatgaatgc

SEQ ID NO: 4471243 - DNA, 25 bp, Homo sapien
gctgtaagttaatggacaatcccta

SEQ ID NO: 4471244 - DNA, 25 bp, Homo sapien
tctaggaagtacaaagggtcccatc

SEQ ID NO: 4471245 - DNA, 25 bp, Homo sapien
gattcatttactggagctgacccag

SEQ ID NO: 4471246 - DNA, 25 bp, Homo sapien
gaagtgagaccatacctaagcatac

SEQ ID NO: 4471247 - DNA, 25 bp, Homo sapien
tcaagatttggagtatggagtatgg

SEQ ID NO: 4471248 - DNA, 25 bp, Homo sapien
tagtgacagattaactaaaatcaac

SEQ ID NO: 4471249 - DNA, 25 bp, Homo sapien
ttaattcaagatttggagtatggag

SEQ ID NO: 4471250 - DNA, 25 bp, Homo sapien
gaaggcctaaaaggatccatccatt

SEQ ID NO: 4471251 - DNA, 25 bp, Homo sapien
ccagggatagcccatctactggctt

SEQ ID NO: 4471252 - DNA, 25 bp, Homo sapien
gcataattttcccagggatagccca

SEQ ID NO: 4471253 - DNA, 25 bp, Homo sapien
ctgacaggatcagggagcataattt

SEQ ID NO: 4471254 - DNA, 25 bp, Homo sapien
gatcagggagcataattttcccagg

SEQ ID NO: 4471255 - DNA, 25 bp, Homo sapien
ctctgaccacagaagtaggattgag

SEQ ID NO: 4471256 - DNA, 25 bp, Homo sapien
tctgaccacagaagtaggattgagc

SEQ ID NO: 4471257 - DNA, 25 bp, Homo sapien
gaccacagaagtaggattgagcaga

SEQ ID NO: 4471258 - DNA, 25 bp, Homo sapien
ccacagaagtaggattgagcagatg

SEQ ID NO: 4471259 - DNA, 25 bp, Homo sapien
tctagttaaatcttgccaaccctta

SEQ ID NO: 4471260 - DNA, 25 bp, Homo sapien
ccaacttcgccttctagttaaatct

SEQ ID NO: 4471261 - DNA, 25 bp, Homo sapien
tagtcatgatgcctaacacacccaa

SEQ ID NO: 4471262 - DNA, 25 bp, Homo sapien
taacacacccaacttcgccttctag

SEQ ID NO: 4471263 - DNA, 25 bp, Homo sapien
tatttcaacgcaacctgtactttcc

SEQ ID NO: 4471264 - DNA, 25 bp, Homo sapien
gtactttcctctgatactatttcat

SEQ ID NO: 4471265 - DNA, 25 bp, Homo sapien
taaaatcttaatgaactctcagtag

SEQ ID NO: 4471266 - DNA, 25 bp, Homo sapien
ttagtgttaaattgcaggataggaa

SEQ ID NO: 4471267 - DNA, 25 bp, Homo sapien
taaaaagacgaatcatgttgcaatt

SEQ ID NO: 4471268 - DNA, 25 bp, Homo sapien
taagcagaatataattacaactcaa

SEQ ID NO: 4471269 - DNA, 25 bp, Homo sapien
ccacagagaaacgaactagatcaaa

SEQ ID NO: 4471270 - DNA, 25 bp, Homo sapien
atcaaagtttcatctccaagaaaga

SEQ ID NO: 4471271 - DNA, 25 bp, Homo sapien
tcttgtgaatattaagagcctatta

SEQ ID NO: 4471272 - DNA, 25 bp, Homo sapien
tcatgggggatctctcttgtgaata

SEQ ID NO: 4471273 - DNA, 25 bp, Homo sapien
tatgagagaagatttgtaacaccat

SEQ ID NO: 4471274 - DNA, 25 bp, Homo sapien
tattaagagcctattatgagagaag

SEQ ID NO: 4471275 - DNA, 25 bp, Homo sapien
tgtccacataaagccctccacatgg

SEQ ID NO: 4471276 - DNA, 25 bp, Homo sapien
gaacaatcgaatttagcaaggtgaa

SEQ ID NO: 4471277 - DNA, 25 bp, Homo sapien
caggaaacactttactgagacgtga

SEQ ID NO: 4471278 - DNA, 25 bp, Homo sapien
tatagcaccatgtactgtggaagag

SEQ ID NO: 4471279 - DNA, 25 bp, Homo sapien
tctgtaggttgttgtgctctcttga

SEQ ID NO: 4471280 - DNA, 25 bp, Homo sapien
taatgccatgtgtctatagttgctt

SEQ ID NO: 4471281 - DNA, 25 bp, Homo sapien
cttgtctagaccaatgtcacagagc

SEQ ID NO: 4471282 - DNA, 25 bp, Homo sapien
gtgctttcaaggtttaagccttgtc

SEQ ID NO: 4471283 - DNA, 25 bp, Homo sapien
taagatataccatgaccaaaacaaa

SEQ ID NO: 4471284 - DNA, 25 bp, Homo sapien
aacaaagctggatgacctgggcatg

SEQ ID NO: 4471285 - DNA, 25 bp, Homo sapien
tatcagactggcagatatgagagag

SEQ ID NO: 4471286 - DNA, 25 bp, Homo sapien
gtaacaaagaaggataagatatacc

SEQ ID NO: 4471287 - DNA, 25 bp, Homo sapien
ctggtctcaaacacttggactcaag

SEQ ID NO: 4471288 - DNA, 25 bp, Homo sapien
gctggtctcaaacacttggactcaa

SEQ ID NO: 4471289 - DNA, 25 bp, Homo sapien
gagacagagtttcgccatatcaccc

SEQ ID NO: 4471290 - DNA, 25 bp, Homo sapien
cagagtttcgccatatcacccaggc

SEQ ID NO: 4471291 - DNA, 25 bp, Homo sapien
gcaaattgtttcctatagtgcagac

SEQ ID NO: 4471292 - DNA, 25 bp, Homo sapien
taataccctgattcaaattctctgg

SEQ ID NO: 4471293 - DNA, 25 bp, Homo sapien
catcagtagttgaagaatgcaagag

SEQ ID NO: 4471294 - DNA, 25 bp, Homo sapien
gcatagcagtagtgaaggtacatct

SEQ ID NO: 4471295 - DNA, 25 bp, Homo sapien
gataacacaggccttagacttggct

SEQ ID NO: 4471296 - DNA, 25 bp, Homo sapien
gaactactaagagatatgccacact

SEQ ID NO: 4471297 - DNA, 25 bp, Homo sapien
ttagcagagtatcagttcagaaggc

SEQ ID NO: 4471298 - DNA, 25 bp, Homo sapien
tatgttgaagtctacacccagccaa

SEQ ID NO: 4471299 - DNA, 25 bp, Homo sapien
gaaaggttattacttctagcagaat

SEQ ID NO: 4471300 - DNA, 25 bp, Homo sapien
gacttaattttggatactgcgtcca

SEQ ID NO: 4471301 - DNA, 25 bp, Homo sapien
tgtcctctgttctactaatttgatt

SEQ ID NO: 4471302 - DNA, 25 bp, Homo sapien
tcaattcctaataccactgagaaag

SEQ ID NO: 4471303 - DNA, 25 bp, Homo sapien
taaaaccgcttataacagtgcctac

SEQ ID NO: 4471304 - DNA, 25 bp, Homo sapien
cagtgcctacctaacccaaagtaag

SEQ ID NO: 4471305 - DNA, 25 bp, Homo sapien
tagctgcttccctacaggatgaaga

SEQ ID NO: 4471306 - DNA, 25 bp, Homo sapien
ggatgaagaaaacccctgaacatta

SEQ ID NO: 4471307 - DNA, 25 bp, Homo sapien
taagcatttcacatggtagtcgaag

SEQ ID NO: 4471308 - DNA, 25 bp, Homo sapien
taagatcttattgcacaacacagtg

SEQ ID NO: 4471309 - DNA, 25 bp, Homo sapien
tcgaagatcgtaacatcactctgtg

SEQ ID NO: 4471310 - DNA, 25 bp, Homo sapien
tggagtcagaagtccgcgtgcttac

SEQ ID NO: 4471311 - DNA, 25 bp, Homo sapien
gcactattcaaaataccaagtacgg

SEQ ID NO: 4471312 - DNA, 25 bp, Homo sapien
tgaatggaattagacaatactatgc

SEQ ID NO: 4471313 - DNA, 25 bp, Homo sapien
ccaaaagattcgaaaacagtatgtc

SEQ ID NO: 4471314 - DNA, 25 bp, Homo sapien
ggtcctaaataagtatacataatgg

SEQ ID NO: 4471315 - DNA, 25 bp, Homo sapien
cactacaatagtgggtgccaccatg

SEQ ID NO: 4471316 - DNA, 25 bp, Homo sapien
tgtttctaatagttgttagccattg

SEQ ID NO: 4471317 - DNA, 25 bp, Homo sapien
gattacatgcccaaatcttctttag

SEQ ID NO: 4471318 - DNA, 25 bp, Homo sapien
ccattgagatctaaggttgcttcta

SEQ ID NO: 4471319 - DNA, 25 bp, Homo sapien
tcagatcaagggaattagcacacac

SEQ ID NO: 4471320 - DNA, 25 bp, Homo sapien
tgcttgcagcccaacagagagtagt

SEQ ID NO: 4471321 - DNA, 25 bp, Homo sapien
tttccatgggtacaaaagacaatcc

SEQ ID NO: 4471322 - DNA, 25 bp, Homo sapien
gggacaagattacacagacctggat

SEQ ID NO: 4471323 - DNA, 25 bp, Homo sapien
actactgatttgctgcacttgttgt

SEQ ID NO: 4471324 - DNA, 25 bp, Homo sapien
aatgcaaaacaggtttctcgaaagc

SEQ ID NO: 4471325 - DNA, 25 bp, Homo sapien
gcacttgttgtggtgtcaaggcaaa

SEQ ID NO: 4471326 - DNA, 25 bp, Homo sapien
ttgttgtggtgtcaaggcaaatgca

SEQ ID NO: 4471327 - DNA, 25 bp, Homo sapien
taactggacctgtactgtgaagtca

SEQ ID NO: 4471328 - DNA, 25 bp, Homo sapien
tgaagtcacatttggtcccagaaat

SEQ ID NO: 4471329 - DNA, 25 bp, Homo sapien
tggacctgtactgtgaagtcacatt

SEQ ID NO: 4471330 - DNA, 25 bp, Homo sapien
cttaactggacctgtactgtgaagt

SEQ ID NO: 4471331 - DNA, 25 bp, Homo sapien
gatggcagaagagtatgaaccccta

SEQ ID NO: 4471332 - DNA, 25 bp, Homo sapien
aaaattaacccagagtcaaacatgc

SEQ ID NO: 4471333 - DNA, 25 bp, Homo sapien
tcaaaatgtggaccacacctgttgc

SEQ ID NO: 4471334 - DNA, 25 bp, Homo sapien
taaaatagcagtcatcaagataccc

SEQ ID NO: 4471335 - DNA, 25 bp, Homo sapien
taattctgtcaatgtagagttgtgg

SEQ ID NO: 4471336 - DNA, 25 bp, Homo sapien
ctggacttttcaccctattaataag

SEQ ID NO: 4471337 - DNA, 25 bp, Homo sapien
cctgtagttgtcttcgtgatactgc

SEQ ID NO: 4471338 - DNA, 25 bp, Homo sapien
ggtaatcatgactatcaccctgtag

SEQ ID NO: 4471339 - DNA, 25 bp, Homo sapien
tgtattcactttcacacaaagattg

SEQ ID NO: 4471340 - DNA, 25 bp, Homo sapien
cactttcacacaaagattgggtggg

SEQ ID NO: 4471341 - DNA, 25 bp, Homo sapien
cttcttgtggacaactggtttctga

SEQ ID NO: 4471342 - DNA, 25 bp, Homo sapien
gaaggctgcaaggttttgtattcac

SEQ ID NO: 4471343 - DNA, 25 bp, Homo sapien
caaaatccagtacaacactaaagct

SEQ ID NO: 4471344 - DNA, 25 bp, Homo sapien
tgtcactgctgctaactgtacatag

SEQ ID NO: 4471345 - DNA, 25 bp, Homo sapien
catagttggtacaagtgtttcaccc

SEQ ID NO: 4471346 - DNA, 25 bp, Homo sapien
tcctatgtccccaaagctaatgtca

SEQ ID NO: 4471347 - DNA, 25 bp, Homo sapien
gatattaattggtcggctgggtcgc

SEQ ID NO: 4471348 - DNA, 25 bp, Homo sapien
gctgggtcgctttggttccacgcca

SEQ ID NO: 4471349 - DNA, 25 bp, Homo sapien
gacagtcggacaagtgaggtgatat

SEQ ID NO: 4471350 - DNA, 25 bp, Homo sapien
tgcagtccaagaaacaacaatcgtg

SEQ ID NO: 4471351 - DNA, 25 bp, Homo sapien
gcctattcaggatgtctcacaggca

SEQ ID NO: 4471352 - DNA, 25 bp, Homo sapien
ggagaatcaatgtcagccctgccag

SEQ ID NO: 4471353 - DNA, 25 bp, Homo sapien
ggttccaataaccaccaatatgcag

SEQ ID NO: 4471354 - DNA, 25 bp, Homo sapien
tgtatcctttaagcctatctgcccc

SEQ ID NO: 4471355 - DNA, 25 bp, Homo sapien
ttacttctttcaggcgctatactag

SEQ ID NO: 4471356 - DNA, 25 bp, Homo sapien
ggaactccaaggtacactagaaata

SEQ ID NO: 4471357 - DNA, 25 bp, Homo sapien
taaaaggagtgcttaccctgaggta

SEQ ID NO: 4471358 - DNA, 25 bp, Homo sapien
ctctagtgctttttatcagcggcca

SEQ ID NO: 4471359 - DNA, 25 bp, Homo sapien
caagttcagtgaaaaggtatgctca

SEQ ID NO: 4471360 - DNA, 25 bp, Homo sapien
tcagaacttggaattaccctaaggc

SEQ ID NO: 4471361 - DNA, 25 bp, Homo sapien
caagcagaaactgcaacaagttcag

SEQ ID NO: 4471362 - DNA, 25 bp, Homo sapien
ggtatgctcactctagttgaaacat

SEQ ID NO: 4471363 - DNA, 25 bp, Homo sapien
ctgaagaagaactgttgaggacaac

SEQ ID NO: 4471364 - DNA, 25 bp, Homo sapien
tattccctttgctcgtaacctctga

SEQ ID NO: 4471365 - DNA, 25 bp, Homo sapien
tttacaagatatactgccatggaat

SEQ ID NO: 4471366 - DNA, 25 bp, Homo sapien
taaagctctagaatgatccggattc

SEQ ID NO: 4471367 - DNA, 25 bp, Homo sapien
cttccatgtttgtgcactgacttca

SEQ ID NO: 4471368 - DNA, 25 bp, Homo sapien
gctgaataagtgaaataagtttatc

SEQ ID NO: 4471369 - DNA, 25 bp, Homo sapien
tcagaactactctaagaactacaca

SEQ ID NO: 4471370 - DNA, 25 bp, Homo sapien
tactctaagaactacacaacaggct

SEQ ID NO: 4471371 - DNA, 25 bp, Homo sapien
tatgaacccagacttcgcagaagca

SEQ ID NO: 4471372 - DNA, 25 bp, Homo sapien
gagcagcgttacttgtccacagtca

SEQ ID NO: 4471373 - DNA, 25 bp, Homo sapien
gaaatcagacggcataaacttcttg

SEQ ID NO: 4471374 - DNA, 25 bp, Homo sapien
gcacagccccatttgaagaccttga

SEQ ID NO: 4471375 - DNA, 25 bp, Homo sapien
ggtagtgggatcttttactctgcca

SEQ ID NO: 4471376 - DNA, 25 bp, Homo sapien
tagccaaagtgtgctcccattgatt

SEQ ID NO: 4471377 - DNA, 25 bp, Homo sapien
tgcatgcctacagaggcattagcca

SEQ ID NO: 4471378 - DNA, 25 bp, Homo sapien
tattaagggtatattgatattcagg

SEQ ID NO: 4471379 - DNA, 25 bp, Homo sapien
cagtatcagagaggactacgttccc

SEQ ID NO: 4471380 - DNA, 25 bp, Homo sapien
gaacaaaataaagcgaggactgggc

SEQ ID NO: 4471381 - DNA, 25 bp, Homo sapien
ctacaagcggagaagagttaacagc

SEQ ID NO: 4471382 - DNA, 25 bp, Homo sapien
tccaggtggtgctatagctacaagc

SEQ ID NO: 4471383 - DNA, 25 bp, Homo sapien
caaagagcagatatatgagggagcc

SEQ ID NO: 4471384 - DNA, 25 bp, Homo sapien
tagactactctcacaaaaattcgga

SEQ ID NO: 4471385 - DNA, 25 bp, Homo sapien
gagggagccaggtctcataatactg

SEQ ID NO: 4471386 - DNA, 25 bp, Homo sapien
ccataagggtgcgtagaaaagtgca

SEQ ID NO: 4471387 - DNA, 25 bp, Homo sapien
gaggcatagagcacaaaactaaagc

SEQ ID NO: 4471388 - DNA, 25 bp, Homo sapien
ggaaagtaataagcaggtgccacgt

SEQ ID NO: 4471389 - DNA, 25 bp, Homo sapien
taaatcacttaggaggctaccagag

SEQ ID NO: 4471390 - DNA, 25 bp, Homo sapien
ccagaggagatagaaaaaggcgtca

SEQ ID NO: 4471391 - DNA, 25 bp, Homo sapien
ccgtaagttgggtagctgtatacac

SEQ ID NO: 4471392 - DNA, 25 bp, Homo sapien
acagtcccctggattttagtctgga

SEQ ID NO: 4471393 - DNA, 25 bp, Homo sapien
ggaaaccttagctgttacctctgaa

SEQ ID NO: 4471394 - DNA, 25 bp, Homo sapien
caacagaagttctgagctgtggtac

SEQ ID NO: 4471395 - DNA, 25 bp, Homo sapien
agtagagaaacccttaggctggttg

SEQ ID NO: 4471396 - DNA, 25 bp, Homo sapien
gaaacccttaggctggttgtagcta

SEQ ID NO: 4471397 - DNA, 25 bp, Homo sapien
ggttgtagctatttcactgtctgga

SEQ ID NO: 4471398 - DNA, 25 bp, Homo sapien
tatttcactgtctggatccgcagtc

SEQ ID NO: 4471399 - DNA, 25 bp, Homo sapien
tataacttacagaaactaattcatg

SEQ ID NO: 4471400 - DNA, 25 bp, Homo sapien
gaacaatcagacaaatcaggaaaca

SEQ ID NO: 4471401 - DNA, 25 bp, Homo sapien
aaaagctttcaatatcaggcctgtc

SEQ ID NO: 4471402 - DNA, 25 bp, Homo sapien
catcatctgagattaataggatctc

SEQ ID NO: 4471403 - DNA, 25 bp, Homo sapien
catgatctccagctgtcagttcata

SEQ ID NO: 4471404 - DNA, 25 bp, Homo sapien
aagcctttatcttcagctatactga

SEQ ID NO: 4471405 - DNA, 25 bp, Homo sapien
ggcaagagagcaactctcaagcctt

SEQ ID NO: 4471406 - DNA, 25 bp, Homo sapien
tcttcagctatactgacaaggtgac

SEQ ID NO: 4471407 - DNA, 25 bp, Homo sapien
cctgtgaaatatccataggttaaaa

SEQ ID NO: 4471408 - DNA, 25 bp, Homo sapien
tattagataattgctattcaacatt

SEQ ID NO: 4471409 - DNA, 25 bp, Homo sapien
gtaggcatgctgatttaaagcatac

SEQ ID NO: 4471410 - DNA, 25 bp, Homo sapien
catttcctgtgaaatatccataggt

SEQ ID NO: 4471411 - DNA, 25 bp, Homo sapien
taagggcccgacacggaattgtcag

SEQ ID NO: 4471412 - DNA, 25 bp, Homo sapien
acagacaggacaaacccaggttggt

SEQ ID NO: 4471413 - DNA, 25 bp, Homo sapien
aataataaggtgttcatatggagcc

SEQ ID NO: 4471414 - DNA, 25 bp, Homo sapien
tatggagccttcttatcacagacag

SEQ ID NO: 4471415 - DNA, 25 bp, Homo sapien
gcccaagtgccatcctccttaaatt

SEQ ID NO: 4471416 - DNA, 25 bp, Homo sapien
ccaagtgccatcctccttaaattgt

SEQ ID NO: 4471417 - DNA, 25 bp, Homo sapien
gtgcccaagtgccatcctccttaaa

SEQ ID NO: 4471418 - DNA, 25 bp, Homo sapien
cggtgcccaagtgccatcctcctta

SEQ ID NO: 4471419 - DNA, 25 bp, Homo sapien
actccattgtaagaggcagaaactt

SEQ ID NO: 4471420 - DNA, 25 bp, Homo sapien
tcctgtacttccttttttgatctca

SEQ ID NO: 4471421 - DNA, 25 bp, Homo sapien
catcgactccattgtaagaggcaga

SEQ ID NO: 4471422 - DNA, 25 bp, Homo sapien
tcgactccattgtaagaggcagaaa

SEQ ID NO: 4471423 - DNA, 25 bp, Homo sapien
ttatcagttacagtttagattcaca

SEQ ID NO: 4471424 - DNA, 25 bp, Homo sapien
gattcacaatattgttggagccaga

SEQ ID NO: 4471425 - DNA, 25 bp, Homo sapien
ggcaagggaagagctatgacatctc

SEQ ID NO: 4471426 - DNA, 25 bp, Homo sapien
tctcagtgtcactacagtttatcag

SEQ ID NO: 4471427 - DNA, 25 bp, Homo sapien
gactggtggtgagacgctacctgat

SEQ ID NO: 4471428 - DNA, 25 bp, Homo sapien
tacctgatgctccaatgtggagctc

SEQ ID NO: 4471429 - DNA, 25 bp, Homo sapien
cagatgaactgtctatggttaggtc

SEQ ID NO: 4471430 - DNA, 25 bp, Homo sapien
tattatttagtggtgatgtgggaga

SEQ ID NO: 4471431 - DNA, 25 bp, Homo sapien
taatgtagcttgtgtctacagcagg

SEQ ID NO: 4471432 - DNA, 25 bp, Homo sapien
gatgcctatagtcttggatgaggga

SEQ ID NO: 4471433 - DNA, 25 bp, Homo sapien
taagtcgtaaggcatgggtgtcatg

SEQ ID NO: 4471434 - DNA, 25 bp, Homo sapien
ggtgtcatgtggaaaggatgcctat

SEQ ID NO: 4471435 - DNA, 25 bp, Homo sapien
aatgctctggactcctcttaaggaa

SEQ ID NO: 4471436 - DNA, 25 bp, Homo sapien
tgtcttctccgtgaccccatttggg

SEQ ID NO: 4471437 - DNA, 25 bp, Homo sapien
cacaagcacttcatgaggtatgtaa

SEQ ID NO: 4471438 - DNA, 25 bp, Homo sapien
taacactgatccttaaacgggcata

SEQ ID NO: 4471439 - DNA, 25 bp, Homo sapien
ctgattgtctcctgataagaaagga

SEQ ID NO: 4471440 - DNA, 25 bp, Homo sapien
gattgtctcctgataagaaaggaaa

SEQ ID NO: 4471441 - DNA, 25 bp, Homo sapien
ctgataagaaaggaaagaaatctaa

SEQ ID NO: 4471442 - DNA, 25 bp, Homo sapien
gataagaaaggaaagaaatctaatc

SEQ ID NO: 4471443 - DNA, 25 bp, Homo sapien
ataattgatgtagggatttttcagc

SEQ ID NO: 4471444 - DNA, 25 bp, Homo sapien
gaatgcatatatggcctgtcattga

SEQ ID NO: 4471445 - DNA, 25 bp, Homo sapien
tgtacataattatacgtgtgatact

SEQ ID NO: 4471446 - DNA, 25 bp, Homo sapien
gctacaatgttaccatggctataat

SEQ ID NO: 4471447 - DNA, 25 bp, Homo sapien
ggaggtcagggtcatcgatgtcact

SEQ ID NO: 4471448 - DNA, 25 bp, Homo sapien
gagtagagtggtgcacgcaatctcg

SEQ ID NO: 4471449 - DNA, 25 bp, Homo sapien
tatcataggtttgcttgtaagtaga

SEQ ID NO: 4471450 - DNA, 25 bp, Homo sapien
aaacctttcattgttagggcccatg

SEQ ID NO: 4471451 - DNA, 25 bp, Homo sapien
gtcaatatgactcactgccctgttt

SEQ ID NO: 4471452 - DNA, 25 bp, Homo sapien
gacagtccatgctcttgctagtaag

SEQ ID NO: 4471453 - DNA, 25 bp, Homo sapien
caggcaccactgaaagttagaattt

SEQ ID NO: 4471454 - DNA, 25 bp, Homo sapien
gttcttattatacactcaggcacca

SEQ ID NO: 4471455 - DNA, 25 bp, Homo sapien
agatagcctgagtatctagggtttc

SEQ ID NO: 4471456 - DNA, 25 bp, Homo sapien
caaatggccttatgtaaggactgga

SEQ ID NO: 4471457 - DNA, 25 bp, Homo sapien
ccctaaatttaagatagcctgagta

SEQ ID NO: 4471458 - DNA, 25 bp, Homo sapien
actggagcattgatcttgagaagac

SEQ ID NO: 4471459 - DNA, 25 bp, Homo sapien
tgacggtgtggctatggctttccct

SEQ ID NO: 4471460 - DNA, 25 bp, Homo sapien
tgctgctcctgtttgtgacggtgtg

SEQ ID NO: 4471461 - DNA, 25 bp, Homo sapien
tggttggcagagaagtactgcctcc

SEQ ID NO: 4471462 - DNA, 25 bp, Homo sapien
tgccaaagatggatgccgtgtccgt

SEQ ID NO: 4471463 - DNA, 25 bp, Homo sapien
acagagtaaggtaaaacagagcaca

SEQ ID NO: 4471464 - DNA, 25 bp, Homo sapien
ttctgccaagttcattcgatctggg

SEQ ID NO: 4471465 - DNA, 25 bp, Homo sapien
aggtaaaacagagcacaaagttctc

SEQ ID NO: 4471466 - DNA, 25 bp, Homo sapien
acacgcttgtatacttttctaaaca

SEQ ID NO: 4471467 - DNA, 25 bp, Homo sapien
gttgataaagatgctcacacgtgag

SEQ ID NO: 4471468 - DNA, 25 bp, Homo sapien
tattaactgaatgcacactcgggag

SEQ ID NO: 4471469 - DNA, 25 bp, Homo sapien
tattattcataggtcggctaagcct

SEQ ID NO: 4471470 - DNA, 25 bp, Homo sapien
gaaaacttgttactctgtggccaaa

SEQ ID NO: 4471471 - DNA, 25 bp, Homo sapien
caagtatggcatggttctggttcag

SEQ ID NO: 4471472 - DNA, 25 bp, Homo sapien
gcatacctactatgaacggccaagg

SEQ ID NO: 4471473 - DNA, 25 bp, Homo sapien
caacaatttagtggcagagagatgc

SEQ ID NO: 4471474 - DNA, 25 bp, Homo sapien
taatagttgcggtaggaaaatccag

SEQ ID NO: 4471475 - DNA, 25 bp, Homo sapien
gattgtccccttgaacatccagcag

SEQ ID NO: 4471476 - DNA, 25 bp, Homo sapien
tagtgttgtttacaagaaggccacg

SEQ ID NO: 4471477 - DNA, 25 bp, Homo sapien
atcacttgtctcatagggattgtcc

SEQ ID NO: 4471478 - DNA, 25 bp, Homo sapien
agcatgctgcaagaaaattagttag

SEQ ID NO: 4471479 - DNA, 25 bp, Homo sapien
caatgatttagatggcacaggaaga

SEQ ID NO: 4471480 - DNA, 25 bp, Homo sapien
taataaatgagggtactttccgtca

SEQ ID NO: 4471481 - DNA, 25 bp, Homo sapien
ttcagtggtccagagtctaagatcc

SEQ ID NO: 4471482 - DNA, 25 bp, Homo sapien
cttgccaaaaacacacagttggtgt

SEQ ID NO: 4471483 - DNA, 25 bp, Homo sapien
aggcaaagctcaaaggtcctaggcc

SEQ ID NO: 4471484 - DNA, 25 bp, Homo sapien
agaactgctgtcactttcaggcaaa

SEQ ID NO: 4471485 - DNA, 25 bp, Homo sapien
taaatccaccagagggccggttaga

SEQ ID NO: 4471486 - DNA, 25 bp, Homo sapien
tcttttgagctccagtcatggacat

SEQ ID NO: 4471487 - DNA, 25 bp, Homo sapien
ccaggttggtgctgccagagattca

SEQ ID NO: 4471488 - DNA, 25 bp, Homo sapien
tcctaaaagggctggagtaccacac

SEQ ID NO: 4471489 - DNA, 25 bp, Homo sapien
gcaatggccagggtacaacagccct

SEQ ID NO: 4471490 - DNA, 25 bp, Homo sapien
tggatcattcgtagtgccagcacag

SEQ ID NO: 4471491 - DNA, 25 bp, Homo sapien
gaggaaggattgagctgatgactta

SEQ ID NO: 4471492 - DNA, 25 bp, Homo sapien
gagctgatgacttaagggcaatcta

SEQ ID NO: 4471493 - DNA, 25 bp, Homo sapien
gggctagaaccatcttccatatttc

SEQ ID NO: 4471494 - DNA, 25 bp, Homo sapien
taccaagagacttattctgtatttg

SEQ ID NO: 4471495 - DNA, 25 bp, Homo sapien
gtgatggtagcagacagtgcttgtc

SEQ ID NO: 4471496 - DNA, 25 bp, Homo sapien
gcttgtcactaagtcctctcttggg

SEQ ID NO: 4471497 - DNA, 25 bp, Homo sapien
ggattctagaaatatgggcacaggg

SEQ ID NO: 4471498 - DNA, 25 bp, Homo sapien
ctgagctgcggaaggtaaaaactcc

SEQ ID NO: 4471499 - DNA, 25 bp, Homo sapien
tctgaccattatgcacatgcaaata

SEQ ID NO: 4471500 - DNA, 25 bp, Homo sapien
tcttctagccatgttgatggtggac

SEQ ID NO: 4471501 - DNA, 25 bp, Homo sapien
ctagacggaaatggagagctggatt

SEQ ID NO: 4471502 - DNA, 25 bp, Homo sapien
ccacttttctgaccattatgcacat

SEQ ID NO: 4471503 - DNA, 25 bp, Homo sapien
gctcactctgctgtgtttgcgggtt

SEQ ID NO: 4471504 - DNA, 25 bp, Homo sapien
tcagttgaccttgaaccggctgtgc

SEQ ID NO: 4471505 - DNA, 25 bp, Homo sapien
cactgaggacgttgctgaaatgaag

SEQ ID NO: 4471506 - DNA, 25 bp, Homo sapien
ggccagctggcttcctaggagtctt

SEQ ID NO: 4471507 - DNA, 25 bp, Homo sapien
atgcctgcagttgcgctgggagccc

SEQ ID NO: 4471508 - DNA, 25 bp, Homo sapien
caaaggtggaatgcacacatggacc

SEQ ID NO: 4471509 - DNA, 25 bp, Homo sapien
tgggaatagcacttgacccggagcc

SEQ ID NO: 4471510 - DNA, 25 bp, Homo sapien
tctgctagggttaccagaggcccca

SEQ ID NO: 4471511 - DNA, 25 bp, Homo sapien
gaggccttaccctgatggctactga

SEQ ID NO: 4471512 - DNA, 25 bp, Homo sapien
tcctcagggttactggctatctgtc

SEQ ID NO: 4471513 - DNA, 25 bp, Homo sapien
gcctagttagattcatccatccgtg

SEQ ID NO: 4471514 - DNA, 25 bp, Homo sapien
tgtgtattgccctaggccacgctga

SEQ ID NO: 4471515 - DNA, 25 bp, Homo sapien
caggtccacctgtgactacaccatg

SEQ ID NO: 4471516 - DNA, 25 bp, Homo sapien
gcttctttgtacctgagttaactca

SEQ ID NO: 4471517 - DNA, 25 bp, Homo sapien
gttaactcatctataagcaggagcc

SEQ ID NO: 4471518 - DNA, 25 bp, Homo sapien
tctccgttcaggcagttgtgtggtg

SEQ ID NO: 4471519 - DNA, 25 bp, Homo sapien
tgggagcgtggctttgatctgtcct

SEQ ID NO: 4471520 - DNA, 25 bp, Homo sapien
ctgggagcgtggctttgatctgtcc

SEQ ID NO: 4471521 - DNA, 25 bp, Homo sapien
accttcagcctttctcctgggcacg

SEQ ID NO: 4471522 - DNA, 25 bp, Homo sapien
ctcctgggcacggtggtggcggcaa

SEQ ID NO: 4471523 - DNA, 25 bp, Homo sapien
cggcaacggcggcgggacataggcg

SEQ ID NO: 4471524 - DNA, 25 bp, Homo sapien
ggcacggtggtggcggcaacggcgg

SEQ ID NO: 4471525 - DNA, 25 bp, Homo sapien
agaaaacctcgtggatcttctctgt

SEQ ID NO: 4471526 - DNA, 25 bp, Homo sapien
tgtctggtctgtttgggcatctcca

SEQ ID NO: 4471527 - DNA, 25 bp, Homo sapien
ggtttagcagaaaacctcgtggatc

SEQ ID NO: 4471528 - DNA, 25 bp, Homo sapien
tagcagaaaacctcgtggatcttct

SEQ ID NO: 4471529 - DNA, 25 bp, Homo sapien
tcaccagaagtacacagttatcaaa

SEQ ID NO: 4471530 - DNA, 25 bp, Homo sapien
aagtacacagttatcaaaaatgcac

SEQ ID NO: 4471531 - DNA, 25 bp, Homo sapien
gtacacagttatcaaaaatgcacac

SEQ ID NO: 4471532 - DNA, 25 bp, Homo sapien
acacagttatcaaaaatgcacacac

SEQ ID NO: 4471533 - DNA, 25 bp, Homo sapien
acatcaacctagcttcggagacatt

SEQ ID NO: 4471534 - DNA, 25 bp, Homo sapien
cacatcaacctagcttcggagacat

SEQ ID NO: 4471535 - DNA, 25 bp, Homo sapien
ccacatcaacctagcttcggagaca

SEQ ID NO: 4471536 - DNA, 25 bp, Homo sapien
gggttagggctggcaggactctcgc

SEQ ID NO: 4471537 - DNA, 25 bp, Homo sapien
ttagggctggcaggactctcgctgc

SEQ ID NO: 4471538 - DNA, 25 bp, Homo sapien
acggggttagggctggcaggactct

SEQ ID NO: 4471539 - DNA, 25 bp, Homo sapien
ggagaggtgggtggtggatccaggg

SEQ ID NO: 4471540 - DNA, 25 bp, Homo sapien
atccttctattttgcccacgttaca

SEQ ID NO: 4471541 - DNA, 25 bp, Homo sapien
gaaaggactttgtccccatctgcat

SEQ ID NO: 4471542 - DNA, 25 bp, Homo sapien
ttgccattaacctgctcaagaaagg

SEQ ID NO: 4471543 - DNA, 25 bp, Homo sapien
tgcccacgttacaaaactcttctat

SEQ ID NO: 4471544 - DNA, 25 bp, Homo sapien
ctggaggagtgcctggctctttaga

SEQ ID NO: 4471545 - DNA, 25 bp, Homo sapien
tggaggagtgcctggctctttagaa

SEQ ID NO: 4471546 - DNA, 25 bp, Homo sapien
ctcgtccgccgagctcagaagtgcc

SEQ ID NO: 4471547 - DNA, 25 bp, Homo sapien
ggaggaaacctgcaggctctcgtcc

SEQ ID NO: 4471548 - DNA, 25 bp, Homo sapien
atgcggaacgctcccgcaagagcgg

SEQ ID NO: 4471549 - DNA, 25 bp, Homo sapien
aggcgctgccaacggccccggagat

SEQ ID NO: 4471550 - DNA, 25 bp, Homo sapien
gcgtgcccgagctacgggtcgccgg

SEQ ID NO: 4471551 - DNA, 25 bp, Homo sapien
cgggtcccgagaggacctcgcgcac

SEQ ID NO: 4471552 - DNA, 25 bp, Homo sapien
tccttcctgcgggatgcgacaggcg

SEQ ID NO: 4471553 - DNA, 25 bp, Homo sapien
atggcgaaagatgggcgcgtctctc

SEQ ID NO: 4471554 - DNA, 25 bp, Homo sapien
agcccattcaacagggcgccgtcgc

SEQ ID NO: 4471555 - DNA, 25 bp, Homo sapien
gccctggaccgaggggatctccatg

SEQ ID NO: 4471556 - DNA, 25 bp, Homo sapien
cgcgaagggcacgtccgcgacccag

SEQ ID NO: 4471557 - DNA, 25 bp, Homo sapien
agacgcagaggaggccgagtgccgc

SEQ ID NO: 4471558 - DNA, 25 bp, Homo sapien
cgcccccggaggccgcgttcgccag

SEQ ID NO: 4471559 - DNA, 25 bp, Homo sapien
cccccggaggccgcgttcgccagcg

SEQ ID NO: 4471560 - DNA, 25 bp, Homo sapien
tgcgcccccggaggccgcgttcgcc

SEQ ID NO: 4471561 - DNA, 25 bp, Homo sapien
cgtgcgcccccggaggccgcgttcg

SEQ ID NO: 4471562 - DNA, 25 bp, Homo sapien
acacccgtttggtcgccaccgctgc

SEQ ID NO: 4471563 - DNA, 25 bp, Homo sapien
aacacccgtttggtcgccaccgctg

SEQ ID NO: 4471564 - DNA, 25 bp, Homo sapien
acccgtttggtcgccaccgctgcag

SEQ ID NO: 4471565 - DNA, 25 bp, Homo sapien
caacacccgtttggtcgccaccgct

SEQ ID NO: 4471566 - DNA, 25 bp, Homo sapien
gatgtcgctttcagaccggttgaga

SEQ ID NO: 4471567 - DNA, 25 bp, Homo sapien
tagccaagcagatagcggatgtcgc

SEQ ID NO: 4471568 - DNA, 25 bp, Homo sapien
taagagcaagcgtaccacctttgcg

SEQ ID NO: 4471569 - DNA, 25 bp, Homo sapien
cacccggtaatgttctaagagcaag

SEQ ID NO: 4471570 - DNA, 25 bp, Homo sapien
gcaggttagtgaacaatttggccaa

SEQ ID NO: 4471571 - DNA, 25 bp, Homo sapien
ccccaagggtcaagtcagctttcta

SEQ ID NO: 4471572 - DNA, 25 bp, Homo sapien
cacacagctgttaatccctatatgg

SEQ ID NO: 4471573 - DNA, 25 bp, Homo sapien
tatatggccatgtgtctcaagtgct

SEQ ID NO: 4471574 - DNA, 25 bp, Homo sapien
caaaattctcggaggtcctattctc

SEQ ID NO: 4471575 - DNA, 25 bp, Homo sapien
caatgtttcatggtcatatgacacc

SEQ ID NO: 4471576 - DNA, 25 bp, Homo sapien
cagcttcccattattcaactaaggg

SEQ ID NO: 4471577 - DNA, 25 bp, Homo sapien
ggtattcacatgtcacgccacaagt

SEQ ID NO: 4471578 - DNA, 25 bp, Homo sapien
cttgagctacagtcatttgacagga

SEQ ID NO: 4471579 - DNA, 25 bp, Homo sapien
gcaatgatctttctaggcccagtcc

SEQ ID NO: 4471580 - DNA, 25 bp, Homo sapien
ggcccagtccaaaattacaatgcaa

SEQ ID NO: 4471581 - DNA, 25 bp, Homo sapien
ttcaatgcagaatgtttcacaagac

SEQ ID NO: 4471582 - DNA, 25 bp, Homo sapien
agcctcctgcatactaccttttttt

SEQ ID NO: 4471583 - DNA, 25 bp, Homo sapien
cagcctcctgcatactacctttttt

SEQ ID NO: 4471584 - DNA, 25 bp, Homo sapien
cagttagataacagaggccacagcc

SEQ ID NO: 4471585 - DNA, 25 bp, Homo sapien
ttcactggttactaggagaacagca

SEQ ID NO: 4471586 - DNA, 25 bp, Homo sapien
tccaggtagcaagcagtttctgaca

SEQ ID NO: 4471587 - DNA, 25 bp, Homo sapien
taagggatgtattcactcccaccga

SEQ ID NO: 4471588 - DNA, 25 bp, Homo sapien
tcttcggtcgcaatcagcatgagag

SEQ ID NO: 4471589 - DNA, 25 bp, Homo sapien
tgtcagcacctaaaatccgttcccg

SEQ ID NO: 4471590 - DNA, 25 bp, Homo sapien
tagttctcacggtcatttgcaaagg

SEQ ID NO: 4471591 - DNA, 25 bp, Homo sapien
ctttggcattgggatcagcacgttg

SEQ ID NO: 4471592 - DNA, 25 bp, Homo sapien
agcaaatcgaagaagatccttgtgg

SEQ ID NO: 4471593 - DNA, 25 bp, Homo sapien
cataattgtccatagcattgtggac

SEQ ID NO: 4471594 - DNA, 25 bp, Homo sapien
catagcattgtggacatcagcatct

SEQ ID NO: 4471595 - DNA, 25 bp, Homo sapien
aatacagaaaggtatagagattaca

SEQ ID NO: 4471596 - DNA, 25 bp, Homo sapien
gaaaccttcacgagttctgggatca

SEQ ID NO: 4471597 - DNA, 25 bp, Homo sapien
tcgtcatgtcagtgtgagctccggc

SEQ ID NO: 4471598 - DNA, 25 bp, Homo sapien
gagctccggcttcaactaggctaat

SEQ ID NO: 4471599 - DNA, 25 bp, Homo sapien
ggaattgacagccagatgcagcaag

SEQ ID NO: 4471600 - DNA, 25 bp, Homo sapien
gggtcttttccatcgattaggccag

SEQ ID NO: 4471601 - DNA, 25 bp, Homo sapien
ggctactagagcaaccagggtggac

SEQ ID NO: 4471602 - DNA, 25 bp, Homo sapien
tagactgtccaataagcaggccttg

SEQ ID NO: 4471603 - DNA, 25 bp, Homo sapien
cgaatgaaaacatccacctgggcct

SEQ ID NO: 4471604 - DNA, 25 bp, Homo sapien
caattgccatgaaactaaaaatgac

SEQ ID NO: 4471605 - DNA, 25 bp, Homo sapien
aatgactctacatgtcaaactcaaa

SEQ ID NO: 4471606 - DNA, 25 bp, Homo sapien
cacagcaagattgttagtttcaaat

SEQ ID NO: 4471607 - DNA, 25 bp, Homo sapien
caaattagctgagttattaggactg

SEQ ID NO: 4471608 - DNA, 25 bp, Homo sapien
aaacatgtcctgagggtgtgctcca

SEQ ID NO: 4471609 - DNA, 25 bp, Homo sapien
gagcctactctcagttacgacacac

SEQ ID NO: 4471610 - DNA, 25 bp, Homo sapien
tagtgtatctgggacatccaaaaga

SEQ ID NO: 4471611 - DNA, 25 bp, Homo sapien
gctggaatggccacagagaatctaa

SEQ ID NO: 4471612 - DNA, 25 bp, Homo sapien
gagaacaagcttatcaaggacagag

SEQ ID NO: 4471613 - DNA, 25 bp, Homo sapien
aacaagcttatcaaggacagagtcc

SEQ ID NO: 4471614 - DNA, 25 bp, Homo sapien
caagcttatcaaggacagagtccat

SEQ ID NO: 4471615 - DNA, 25 bp, Homo sapien
tggagaacaagcttatcaaggacag

SEQ ID NO: 4471616 - DNA, 25 bp, Homo sapien
tatttttaaaggatgggcactatcc

SEQ ID NO: 4471617 - DNA, 25 bp, Homo sapien
taaaggatgggcactatccttgagg

SEQ ID NO: 4471618 - DNA, 25 bp, Homo sapien
tgggcactatccttgagggacttac

SEQ ID NO: 4471619 - DNA, 25 bp, Homo sapien
gcactatccttgagggacttaccct

SEQ ID NO: 4471620 - DNA, 25 bp, Homo sapien
ggaacggagccttgctgatttagca

SEQ ID NO: 4471621 - DNA, 25 bp, Homo sapien
gccacgttaaaatctgcacagtgct

SEQ ID NO: 4471622 - DNA, 25 bp, Homo sapien
taggacagcatgttccaaaactgaa

SEQ ID NO: 4471623 - DNA, 25 bp, Homo sapien
gaattgtaagccttgcacctggaca

SEQ ID NO: 4471624 - DNA, 25 bp, Homo sapien
ttccctgttggccacgcagctgccc

SEQ ID NO: 4471625 - DNA, 25 bp, Homo sapien
gcagagttgctgctcatgggatgct

SEQ ID NO: 4471626 - DNA, 25 bp, Homo sapien
catgggatgctcacagtccactgtg

SEQ ID NO: 4471627 - DNA, 25 bp, Homo sapien
atgcaggcagagttgctgctcatgg

SEQ ID NO: 4471628 - DNA, 25 bp, Homo sapien
ttccctgagtgattcaggacaaccc

SEQ ID NO: 4471629 - DNA, 25 bp, Homo sapien
tgattcaggacaacccagccatcag

SEQ ID NO: 4471630 - DNA, 25 bp, Homo sapien
gagcccagaatccatgttgggtgcc

SEQ ID NO: 4471631 - DNA, 25 bp, Homo sapien
gctgtgggtctgcgtctgtcattcc

SEQ ID NO: 4471632 - DNA, 25 bp, Homo sapien
tgcactgcatccagaccttcacttt

SEQ ID NO: 4471633 - DNA, 25 bp, Homo sapien
tgtgcactgcatccagaccttcact

SEQ ID NO: 4471634 - DNA, 25 bp, Homo sapien
ccctgtgcactgcatccagaccttc

SEQ ID NO: 4471635 - DNA, 25 bp, Homo sapien
actgcatccagaccttcactttcat

SEQ ID NO: 4471636 - DNA, 25 bp, Homo sapien
acgtcatgactgcttcccaagactg

SEQ ID NO: 4471637 - DNA, 25 bp, Homo sapien
ctgtgggaattcctcactctgctgc

SEQ ID NO: 4471638 - DNA, 25 bp, Homo sapien
tggccgtgaaccctatgcactgtgg

SEQ ID NO: 4471639 - DNA, 25 bp, Homo sapien
cactctgctgcatgtcttgtttcac

SEQ ID NO: 4471640 - DNA, 25 bp, Homo sapien
ctgaagagcaccaagcatagaattt

SEQ ID NO: 4471641 - DNA, 25 bp, Homo sapien
agagcaccaagcatagaatttgaaa

SEQ ID NO: 4471642 - DNA, 25 bp, Homo sapien
gagcaccaagcatagaatttgaaaa

SEQ ID NO: 4471643 - DNA, 25 bp, Homo sapien
gaagagcaccaagcatagaatttga

SEQ ID NO: 4471644 - DNA, 25 bp, Homo sapien
aagtggacctggaggaaactgcaaa

SEQ ID NO: 4471645 - DNA, 25 bp, Homo sapien
gtggacctggaggaaactgcaaagc

SEQ ID NO: 4471646 - DNA, 25 bp, Homo sapien
aaagccggctctcctttctgaaatc

SEQ ID NO: 4471647 - DNA, 25 bp, Homo sapien
ctgcaaagccggctctcctttctga

SEQ ID NO: 4471648 - DNA, 25 bp, Homo sapien
ttgagtgttgctgggtttcggtctt

SEQ ID NO: 4471649 - DNA, 25 bp, Homo sapien
aggaggaggcaaattccctgcgaac

SEQ ID NO: 4471650 - DNA, 25 bp, Homo sapien
aattccctgcgaacttctttgagtc

SEQ ID NO: 4471651 - DNA, 25 bp, Homo sapien
tttgagtcctcgcttagctgccagc

SEQ ID NO: 4471652 - DNA, 25 bp, Homo sapien
acacacaggagcaagagaggtcttg

SEQ ID NO: 4471653 - DNA, 25 bp, Homo sapien
gggagagtcccgcaacactgtccct

SEQ ID NO: 4471654 - DNA, 25 bp, Homo sapien
ggtcaggggagagtcccgcaacact

SEQ ID NO: 4471655 - DNA, 25 bp, Homo sapien
gaccccagtcagactccagacacac

SEQ ID NO: 4471656 - DNA, 25 bp, Homo sapien
aaaatgcaggttttcaggagtgttg

SEQ ID NO: 4471657 - DNA, 25 bp, Homo sapien
ggtggttgtgaaaatgcaggttttc

SEQ ID NO: 4471658 - DNA, 25 bp, Homo sapien
aatgcaggttttcaggagtgttgtc

SEQ ID NO: 4471659 - DNA, 25 bp, Homo sapien
tgcaggttttcaggagtgttgtcat

SEQ ID NO: 4471660 - DNA, 25 bp, Homo sapien
gaatggagaattcaaaatctccatg

SEQ ID NO: 4471661 - DNA, 25 bp, Homo sapien
tggagaattcaaaatctccatgcat

SEQ ID NO: 4471662 - DNA, 25 bp, Homo sapien
ctgtgtctgcaagacaagaatggag

SEQ ID NO: 4471663 - DNA, 25 bp, Homo sapien
aagaatggagaattcaaaatctcca

SEQ ID NO: 4471664 - DNA, 25 bp, Homo sapien
agggatggtcagcttattggcccac

SEQ ID NO: 4471665 - DNA, 25 bp, Homo sapien
aagggatggtcagcttattggccca

SEQ ID NO: 4471666 - DNA, 25 bp, Homo sapien
tcattaagctttagggttttcacaa

SEQ ID NO: 4471667 - DNA, 25 bp, Homo sapien
gagggacacggtagtcttgattgct

SEQ ID NO: 4471668 - DNA, 25 bp, Homo sapien
gctgattaagttggacccgagaaaa

SEQ ID NO: 4471669 - DNA, 25 bp, Homo sapien
atgttttgggcttttgagggacacg

SEQ ID NO: 4471670 - DNA, 25 bp, Homo sapien
atttacttgaaggttggagaatatt

SEQ ID NO: 4471671 - DNA, 25 bp, Homo sapien
gatttacttgaaggttggagaatat

SEQ ID NO: 4471672 - DNA, 25 bp, Homo sapien
ggatttacttgaaggttggagaata

SEQ ID NO: 4471673 - DNA, 25 bp, Homo sapien
aggatttacttgaaggttggagaat

SEQ ID NO: 4471674 - DNA, 25 bp, Homo sapien
tctggggcacccgaagtagggcaaa

SEQ ID NO: 4471675 - DNA, 25 bp, Homo sapien
cgaagtagggcaaacgaactacagg

SEQ ID NO: 4471676 - DNA, 25 bp, Homo sapien
ctctggggcacccgaagtagggcaa

SEQ ID NO: 4471677 - DNA, 25 bp, Homo sapien
ccgaagtagggcaaacgaactacag

SEQ ID NO: 4471678 - DNA, 25 bp, Homo sapien
tctaaactcatcatttgtgctcttc

SEQ ID NO: 4471679 - DNA, 25 bp, Homo sapien
taaactcatcatttgtgctcttcct

SEQ ID NO: 4471680 - DNA, 25 bp, Homo sapien
ctctaaactcatcatttgtgctctt

SEQ ID NO: 4471681 - DNA, 25 bp, Homo sapien
tcatcatttgtgctcttcctccaca

SEQ ID NO: 4471682 - DNA, 25 bp, Homo sapien
gcctgaaactgacagagggtctgga

SEQ ID NO: 4471683 - DNA, 25 bp, Homo sapien
tgctcacaggcctgaaactgacaga

SEQ ID NO: 4471684 - DNA, 25 bp, Homo sapien
actgacagagggtctggaatattcc

SEQ ID NO: 4471685 - DNA, 25 bp, Homo sapien
cagagggtctggaatattcctgcca

SEQ ID NO: 4471686 - DNA, 25 bp, Homo sapien
gcagctgattaacagactcttcccc

SEQ ID NO: 4471687 - DNA, 25 bp, Homo sapien
cagctgacaggaagcacatcggggt

SEQ ID NO: 4471688 - DNA, 25 bp, Homo sapien
ctgacaggaagcacatcggggtaaa

SEQ ID NO: 4471689 - DNA, 25 bp, Homo sapien
acaggaagcacatcggggtaaaagg

SEQ ID NO: 4471690 - DNA, 25 bp, Homo sapien
ggggcagttccgtagatgggaatga

SEQ ID NO: 4471691 - DNA, 25 bp, Homo sapien
gcagttccgtagatgggaatgagga

SEQ ID NO: 4471692 - DNA, 25 bp, Homo sapien
cacttgaggggcagttccgtagatg

SEQ ID NO: 4471693 - DNA, 25 bp, Homo sapien
tcacttgaggggcagttccgtagat

SEQ ID NO: 4471694 - DNA, 25 bp, Homo sapien
gataacttgttagaacttggtccca

SEQ ID NO: 4471695 - DNA, 25 bp, Homo sapien
caagtcaagggtagaactaaactct

SEQ ID NO: 4471696 - DNA, 25 bp, Homo sapien
cctgagggccagaaagtgagataac

SEQ ID NO: 4471697 - DNA, 25 bp, Homo sapien
cacagtcagtcataatctcatcaac

SEQ ID NO: 4471698 - DNA, 25 bp, Homo sapien
ggaaccccaacagattctagaaatg

SEQ ID NO: 4471699 - DNA, 25 bp, Homo sapien
ttcaatgccagtggcaggtgctctc

SEQ ID NO: 4471700 - DNA, 25 bp, Homo sapien
tttcaatgccagtggcaggtgctct

SEQ ID NO: 4471701 - DNA, 25 bp, Homo sapien
tctctctcaggaaccccaacagatt

SEQ ID NO: 4471702 - DNA, 25 bp, Homo sapien
tgactttccttttcccaaagctgga

SEQ ID NO: 4471703 - DNA, 25 bp, Homo sapien
aaccaaagcagaagttgccagcaat

SEQ ID NO: 4471704 - DNA, 25 bp, Homo sapien
agcagaagttgccagcaatagccat

SEQ ID NO: 4471705 - DNA, 25 bp, Homo sapien
cgaggggacatttatggccaaacca

SEQ ID NO: 4471706 - DNA, 25 bp, Homo sapien
gacatttatggccaaaccaaagcag

SEQ ID NO: 4471707 - DNA, 25 bp, Homo sapien
tggactatgaccaggacctcatgct

SEQ ID NO: 4471708 - DNA, 25 bp, Homo sapien
gtggactatgaccaggacctcatgc

SEQ ID NO: 4471709 - DNA, 25 bp, Homo sapien
gatgtagagatgtttgatgccttgg

SEQ ID NO: 4471710 - DNA, 25 bp, Homo sapien
gcttggatgtagagatgtttgatgc

SEQ ID NO: 4471711 - DNA, 25 bp, Homo sapien
cattcagggttccagcaggacccct

SEQ ID NO: 4471712 - DNA, 25 bp, Homo sapien
cccagccattcagggttccagcagg

SEQ ID NO: 4471713 - DNA, 25 bp, Homo sapien
gaggcagtgttggcttgtccaggtg

SEQ ID NO: 4471714 - DNA, 25 bp, Homo sapien
ggcagtgttggcttgtccaggtgct

SEQ ID NO: 4471715 - DNA, 25 bp, Homo sapien
gcagtgttggcttgtccaggtgctt

SEQ ID NO: 4471716 - DNA, 25 bp, Homo sapien
aggcagtgttggcttgtccaggtgc

SEQ ID NO: 4471717 - DNA, 25 bp, Homo sapien
ctgccctgacagacgccatggaggc

SEQ ID NO: 4471718 - DNA, 25 bp, Homo sapien
tgacagacgccatggaggcatggga

SEQ ID NO: 4471719 - DNA, 25 bp, Homo sapien
cagacgccatggaggcatgggaagg

SEQ ID NO: 4471720 - DNA, 25 bp, Homo sapien
gaggacaacatcattaaggcctttc

SEQ ID NO: 4471721 - DNA, 25 bp, Homo sapien
cctggtctgcttccctgctggctgt

SEQ ID NO: 4471722 - DNA, 25 bp, Homo sapien
gtctgcttccctgctggctgtgggc

SEQ ID NO: 4471723 - DNA, 25 bp, Homo sapien
ctggtctgcttccctgctggctgtg

SEQ ID NO: 4471724 - DNA, 25 bp, Homo sapien
tggtctgcttccctgctggctgtgg

SEQ ID NO: 4471725 - DNA, 25 bp, Homo sapien
cagcgaaggcaacgtcatatatgag

SEQ ID NO: 4471726 - DNA, 25 bp, Homo sapien
caattcacctggacagcgaaggcaa

SEQ ID NO: 4471727 - DNA, 25 bp, Homo sapien
cgtcatatatgagcacctgctctgt

SEQ ID NO: 4471728 - DNA, 25 bp, Homo sapien
cctggacagcgaaggcaacgtcata

SEQ ID NO: 4471729 - DNA, 25 bp, Homo sapien
gaagtcacaggctggacggccgagg

SEQ ID NO: 4471730 - DNA, 25 bp, Homo sapien
ctgccggctgggagaacgggcggcg

SEQ ID NO: 4471731 - DNA, 25 bp, Homo sapien
tgccggctgggagaacgggcggcgc

SEQ ID NO: 4471732 - DNA, 25 bp, Homo sapien
gcccggggacgctggtgaagtcaca

SEQ ID NO: 4471733 - DNA, 25 bp, Homo sapien
ccacgcggctgggcgaggctggctc

SEQ ID NO: 4471734 - DNA, 25 bp, Homo sapien
cgcggctgggcgaggctggctcccg

SEQ ID NO: 4471735 - DNA, 25 bp, Homo sapien
ggctgggcgaggctggctcccggca

SEQ ID NO: 4471736 - DNA, 25 bp, Homo sapien
gctgggcgaggctggctcccggcac

SEQ ID NO: 4471737 - DNA, 25 bp, Homo sapien
atagatgagcctccttcgccgcagg

SEQ ID NO: 4471738 - DNA, 25 bp, Homo sapien
cgccgctcgtcgctgatgtcagccc

SEQ ID NO: 4471739 - DNA, 25 bp, Homo sapien
gatgtcagccccgaatgtgcattta

SEQ ID NO: 4471740 - DNA, 25 bp, Homo sapien
catgcagaaactccgcggcggagcg

SEQ ID NO: 4471741 - DNA, 25 bp, Homo sapien
agtagccagagctgaggaagcccct

SEQ ID NO: 4471742 - DNA, 25 bp, Homo sapien
ggaagcccctgcaccctcaagttca

SEQ ID NO: 4471743 - DNA, 25 bp, Homo sapien
ggtgggccacaacagccctgccaga

SEQ ID NO: 4471744 - DNA, 25 bp, Homo sapien
gccacaacagccctgccagaagtag

SEQ ID NO: 4471745 - DNA, 25 bp, Homo sapien
tctctgttccccacaagaacacgct

SEQ ID NO: 4471746 - DNA, 25 bp, Homo sapien
ctgttccccacaagaacacgctggt

SEQ ID NO: 4471747 - DNA, 25 bp, Homo sapien
cagcgggcttgtagacagcaaagca

SEQ ID NO: 4471748 - DNA, 25 bp, Homo sapien
gggcttgtagacagcaaagcagtcc

SEQ ID NO: 4471749 - DNA, 25 bp, Homo sapien
tagaactggagaagcactgctagtc

SEQ ID NO: 4471750 - DNA, 25 bp, Homo sapien
cttttccagttgatagcaatgtaga

SEQ ID NO: 4471751 - DNA, 25 bp, Homo sapien
tggagaagcactgctagtctggtac

SEQ ID NO: 4471752 - DNA, 25 bp, Homo sapien
ctgcttttccagttgatagcaatgt

SEQ ID NO: 4471753 - DNA, 25 bp, Homo sapien
ttaacttgtactttacacacgactc

SEQ ID NO: 4471754 - DNA, 25 bp, Homo sapien
tttcttatagcccattaacttgtac

SEQ ID NO: 4471755 - DNA, 25 bp, Homo sapien
cttgtactttacacacgactctatt

SEQ ID NO: 4471756 - DNA, 25 bp, Homo sapien
tttacacacgactctattaatgtac

SEQ ID NO: 4471757 - DNA, 25 bp, Homo sapien
cacatgctacaggaactccaaggat

SEQ ID NO: 4471758 - DNA, 25 bp, Homo sapien
gctacaggaactccaaggattgaga

SEQ ID NO: 4471759 - DNA, 25 bp, Homo sapien
tataccagggatcacatgctacagg

SEQ ID NO: 4471760 - DNA, 25 bp, Homo sapien
ctgctggctggtataccagggatca

SEQ ID NO: 4471761 - DNA, 25 bp, Homo sapien
ggagccacaggcttctatatctgac

SEQ ID NO: 4471762 - DNA, 25 bp, Homo sapien
tatctgacgataaggcgtatcccac

SEQ ID NO: 4471763 - DNA, 25 bp, Homo sapien
ggcttctatatctgacgataaggcg

SEQ ID NO: 4471764 - DNA, 25 bp, Homo sapien
cgataaggcgtatcccactgtcatg

SEQ ID NO: 4471765 - DNA, 25 bp, Homo sapien
gtcatagtgggcacaagggtatctg

SEQ ID NO: 4471766 - DNA, 25 bp, Homo sapien
gaggctgttaacaaagaccgctttg

SEQ ID NO: 4471767 - DNA, 25 bp, Homo sapien
tcggcacccatggtcatagtgggca

SEQ ID NO: 4471768 - DNA, 25 bp, Homo sapien
gcacaagggtatctgaaggccccaa

SEQ ID NO: 4471769 - DNA, 25 bp, Homo sapien
agatagggaaggcaaagtgtctgcc

SEQ ID NO: 4471770 - DNA, 25 bp, Homo sapien
tagggaaggcaaagtgtctgcccac

SEQ ID NO: 4471771 - DNA, 25 bp, Homo sapien
gatagggaaggcaaagtgtctgccc

SEQ ID NO: 4471772 - DNA, 25 bp, Homo sapien
ttagatagggaaggcaaagtgtctg

SEQ ID NO: 4471773 - DNA, 25 bp, Homo sapien
tccacatcacccattccagtattcc

SEQ ID NO: 4471774 - DNA, 25 bp, Homo sapien
cattccagtattccaggactcctct

SEQ ID NO: 4471775 - DNA, 25 bp, Homo sapien
attccaggactcctctgcagtgttg

SEQ ID NO: 4471776 - DNA, 25 bp, Homo sapien
aggactcctctgcagtgttggacat

SEQ ID NO: 4471777 - DNA, 25 bp, Homo sapien
ttccacacacaggagctttgtccca

SEQ ID NO: 4471778 - DNA, 25 bp, Homo sapien
gcataatacatgggcgcaggcccgg

SEQ ID NO: 4471779 - DNA, 25 bp, Homo sapien
aggcccggaccagcctcgggaccat

SEQ ID NO: 4471780 - DNA, 25 bp, Homo sapien
acacacaggagctttgtcccagctg

SEQ ID NO: 4471781 - DNA, 25 bp, Homo sapien
acggcacccagcaggcggtttgaat

SEQ ID NO: 4471782 - DNA, 25 bp, Homo sapien
gtcagaatcattcgaccgcggcctg

SEQ ID NO: 4471783 - DNA, 25 bp, Homo sapien
tcgcccatgggagatctcgcagatg

SEQ ID NO: 4471784 - DNA, 25 bp, Homo sapien
cagccgtactcaccgcttgtcagaa

SEQ ID NO: 4471785 - DNA, 25 bp, Homo sapien
cacatccaagttgtcagggctgcca

SEQ ID NO: 4471786 - DNA, 25 bp, Homo sapien
gaatagcgcccaaggagttatgcca

SEQ ID NO: 4471787 - DNA, 25 bp, Homo sapien
gctgcagcagtcaagataacgggaa

SEQ ID NO: 4471788 - DNA, 25 bp, Homo sapien
taacgggaatctgactaccttctag

SEQ ID NO: 4471789 - DNA, 25 bp, Homo sapien
tccatgccgggttcagggctccctt

SEQ ID NO: 4471790 - DNA, 25 bp, Homo sapien
ccgggttcagggctcccttatagct

SEQ ID NO: 4471791 - DNA, 25 bp, Homo sapien
catgccgggttcagggctcccttat

SEQ ID NO: 4471792 - DNA, 25 bp, Homo sapien
ttcagggctcccttatagctgagcc

SEQ ID NO: 4471793 - DNA, 25 bp, Homo sapien
ttctggaaggtgatggacagaggct

SEQ ID NO: 4471794 - DNA, 25 bp, Homo sapien
cacgagtacacactgtgggccaaag

SEQ ID NO: 4471795 - DNA, 25 bp, Homo sapien
gccaggccaggcacgagtacacact

SEQ ID NO: 4471796 - DNA, 25 bp, Homo sapien
gccaggcacgagtacacactgtggg

SEQ ID NO: 4471797 - DNA, 25 bp, Homo sapien
tacttggctttggtaaagcatgcga

SEQ ID NO: 4471798 - DNA, 25 bp, Homo sapien
gggcaatgccaaagttgttcctgta

SEQ ID NO: 4471799 - DNA, 25 bp, Homo sapien
taccaggtcagttgtcagtcatctt

SEQ ID NO: 4471800 - DNA, 25 bp, Homo sapien
gattcaggttactatgtctccatta

SEQ ID NO: 4471801 - DNA, 25 bp, Homo sapien
gggatcccatcgaagcagtgctccc

SEQ ID NO: 4471802 - DNA, 25 bp, Homo sapien
gttggccaccttcccgtagacattc

SEQ ID NO: 4471803 - DNA, 25 bp, Homo sapien
tacggtattgcggacgccaggacat

SEQ ID NO: 4471804 - DNA, 25 bp, Homo sapien
cgctctcggtgacgatggccaggaa

SEQ ID NO: 4471805 - DNA, 25 bp, Homo sapien
ctaagccttttccaaatctgtgctc

SEQ ID NO: 4471806 - DNA, 25 bp, Homo sapien
agccttttccaaatctgtgctcccc

SEQ ID NO: 4471807 - DNA, 25 bp, Homo sapien
taagccttttccaaatctgtgctcc

SEQ ID NO: 4471808 - DNA, 25 bp, Homo sapien
ccttttccaaatctgtgctccccca

SEQ ID NO: 4471809 - DNA, 25 bp, Homo sapien
tgttgacccttgtgagcctaaagtg

SEQ ID NO: 4471810 - DNA, 25 bp, Homo sapien
gatcggaggccatctgattcaggag

SEQ ID NO: 4471811 - DNA, 25 bp, Homo sapien
gtttgagcctcagtaagaaccagcc

SEQ ID NO: 4471812 - DNA, 25 bp, Homo sapien
cgtccctgaggcaacagtgatcgga

SEQ ID NO: 4471813 - DNA, 25 bp, Homo sapien
ctgggacttcagggcaagccatcat

SEQ ID NO: 4471814 - DNA, 25 bp, Homo sapien
ttcagggcaagccatcatgctcggc

SEQ ID NO: 4471815 - DNA, 25 bp, Homo sapien
aaacagggtctcagggcctcactat

SEQ ID NO: 4471816 - DNA, 25 bp, Homo sapien
agaaacagggtctcagggcctcact

SEQ ID NO: 4471817 - DNA, 25 bp, Homo sapien
gagatccccgagaccatttaatgca

SEQ ID NO: 4471818 - DNA, 25 bp, Homo sapien
taatgtgtgatatgcaaagccagcc

SEQ ID NO: 4471819 - DNA, 25 bp, Homo sapien
ctgaacgctggagaacgagactgct

SEQ ID NO: 4471820 - DNA, 25 bp, Homo sapien
tattactttgcatcgctggtcctca

SEQ ID NO: 4471821 - DNA, 25 bp, Homo sapien
tgggttatagggagaacccagactc

SEQ ID NO: 4471822 - DNA, 25 bp, Homo sapien
ccggtgtacagctgggactgagaat

SEQ ID NO: 4471823 - DNA, 25 bp, Homo sapien
tcttgatatctaggccgggtttctt

SEQ ID NO: 4471824 - DNA, 25 bp, Homo sapien
gggtagcaggtagctctgtttctag

SEQ ID NO: 4471825 - DNA, 25 bp, Homo sapien
aaaatgggtagcagatcaagcagac

SEQ ID NO: 4471826 - DNA, 25 bp, Homo sapien
gtaacagtccttggcatcaccatgg

SEQ ID NO: 4471827 - DNA, 25 bp, Homo sapien
tactagcacgtactatgggccaggc

SEQ ID NO: 4471828 - DNA, 25 bp, Homo sapien
cagatgttagatgcctagggtttca

SEQ ID NO: 4471829 - DNA, 25 bp, Homo sapien
caaggcgcttggaatctatgatccc

SEQ ID NO: 4471830 - DNA, 25 bp, Homo sapien
caggcatgtcatgcaaccttggata

SEQ ID NO: 4471831 - DNA, 25 bp, Homo sapien
ggaaagccattgttatcatcgacac

SEQ ID NO: 4471832 - DNA, 25 bp, Homo sapien
ttgtcgtgggcacaacaaggcgctt

SEQ ID NO: 4471833 - DNA, 25 bp, Homo sapien
cattgtgcccgacctcctctttctt

SEQ ID NO: 4471834 - DNA, 25 bp, Homo sapien
tgatggatcccaatcaattctgagg

SEQ ID NO: 4471835 - DNA, 25 bp, Homo sapien
aatgctggtatcatagacgtgagcc

SEQ ID NO: 4471836 - DNA, 25 bp, Homo sapien
taccggcttaggtttccagcactca

SEQ ID NO: 4471837 - DNA, 25 bp, Homo sapien
tcgcctagccagagggcagcatcgt

SEQ ID NO: 4471838 - DNA, 25 bp, Homo sapien
gctctcagaccccaaagggttgctt

SEQ ID NO: 4471839 - DNA, 25 bp, Homo sapien
gcggtggctgcgctactctcagcca

SEQ ID NO: 4471840 - DNA, 25 bp, Homo sapien
gaaagctgtgctaccagcattccac

SEQ ID NO: 4471841 - DNA, 25 bp, Homo sapien
gtctgagggaaaagagcatgagggc

SEQ ID NO: 4471842 - DNA, 25 bp, Homo sapien
ctgctcaggcccagtgggaatgacc

SEQ ID NO: 4471843 - DNA, 25 bp, Homo sapien
cagtctctgctcaggcccagtggga

SEQ ID NO: 4471844 - DNA, 25 bp, Homo sapien
gcagtctctgctcaggcccagtggg

SEQ ID NO: 4471845 - DNA, 25 bp, Homo sapien
tgctcaggcccagtgggaatgacca

SEQ ID NO: 4471846 - DNA, 25 bp, Homo sapien
ccagtggcacgggtgctgtacaagt

SEQ ID NO: 4471847 - DNA, 25 bp, Homo sapien
cagccagtggcacgggtgctgtaca

SEQ ID NO: 4471848 - DNA, 25 bp, Homo sapien
gccagtggcacgggtgctgtacaag

SEQ ID NO: 4471849 - DNA, 25 bp, Homo sapien
agccagtggcacgggtgctgtacaa

SEQ ID NO: 4471850 - DNA, 25 bp, Homo sapien
ccacactctcttgccgagaggtaga

SEQ ID NO: 4471851 - DNA, 25 bp, Homo sapien
ctcttgccgagaggtagaacatgct

SEQ ID NO: 4471852 - DNA, 25 bp, Homo sapien
aggccacactctcttgccgagaggt

SEQ ID NO: 4471853 - DNA, 25 bp, Homo sapien
cactctcttgccgagaggtagaaca

SEQ ID NO: 4471854 - DNA, 25 bp, Homo sapien
tgtcggctcatttccagatcgtttg

SEQ ID NO: 4471855 - DNA, 25 bp, Homo sapien
cggctcatttccagatcgtttgatc

SEQ ID NO: 4471856 - DNA, 25 bp, Homo sapien
ccagatcgtttgatcttttgcaaca

SEQ ID NO: 4471857 - DNA, 25 bp, Homo sapien
atctctgtcggctcatttccagatc

SEQ ID NO: 4471858 - DNA, 25 bp, Homo sapien
gaaggggttccatttgatatccagc

SEQ ID NO: 4471859 - DNA, 25 bp, Homo sapien
ctccgagcacgaggcaatgatgttg

SEQ ID NO: 4471860 - DNA, 25 bp, Homo sapien
tgatatccagcacattgccctggtg

SEQ ID NO: 4471861 - DNA, 25 bp, Homo sapien
ggtagttgggttcaatcctgcctgt

SEQ ID NO: 4471862 - DNA, 25 bp, Homo sapien
cctcctccgggagcacccctctgct

SEQ ID NO: 4471863 - DNA, 25 bp, Homo sapien
ctccactggtgaaagttggtagagt

SEQ ID NO: 4471864 - DNA, 25 bp, Homo sapien
tttcttccaagctggtgtactgatg

SEQ ID NO: 4471865 - DNA, 25 bp, Homo sapien
gggcttaggctgatcctccttcatc

SEQ ID NO: 4471866 - DNA, 25 bp, Homo sapien
agtgagcaccaggtagatgcttgtg

SEQ ID NO: 4471867 - DNA, 25 bp, Homo sapien
gtggcctgactaaaaggctgggatt

SEQ ID NO: 4471868 - DNA, 25 bp, Homo sapien
ggcctcggtggccgatgcctcaggt

SEQ ID NO: 4471869 - DNA, 25 bp, Homo sapien
gcctcggtggccgatgcctcaggtg

SEQ ID NO: 4471870 - DNA, 25 bp, Homo sapien
caagcctgggtctggatgtcgtgtc

SEQ ID NO: 4471871 - DNA, 25 bp, Homo sapien
tgtcgtgtctggtgagcagcaagtt

SEQ ID NO: 4471872 - DNA, 25 bp, Homo sapien
tctggatgtcgtgtctggtgagcag

SEQ ID NO: 4471873 - DNA, 25 bp, Homo sapien
gtctggtgagcagcaagttgaccat

SEQ ID NO: 4471874 - DNA, 25 bp, Homo sapien
cgtagccagcgctgaacaggatgtt

SEQ ID NO: 4471875 - DNA, 25 bp, Homo sapien
tggtggggtgccactcgaccagccc

SEQ ID NO: 4471876 - DNA, 25 bp, Homo sapien
aggagcgcctccgtcatgttccgct

SEQ ID NO: 4471877 - DNA, 25 bp, Homo sapien
acacgccggctgtgcccgtgcagct

SEQ ID NO: 4471878 - DNA, 25 bp, Homo sapien
cagaggatcacatccgtgtggcagt

SEQ ID NO: 4471879 - DNA, 25 bp, Homo sapien
gggctcaatcacacgcagcttcttg

SEQ ID NO: 4471880 - DNA, 25 bp, Homo sapien
gcaggctgccgtccgtgttgaagga

SEQ ID NO: 4471881 - DNA, 25 bp, Homo sapien
tcttgtccttgcacgtggtggtgag

SEQ ID NO: 4471882 - DNA, 25 bp, Homo sapien
tgcttcacagcttgcctcatcaggg

SEQ ID NO: 4471883 - DNA, 25 bp, Homo sapien
catattcaggctggcgtcacacact

SEQ ID NO: 4471884 - DNA, 25 bp, Homo sapien
cagtggcatgaatggtggtcccgaa

SEQ ID NO: 4471885 - DNA, 25 bp, Homo sapien
gagtctcccaacttcgctaaggtta

SEQ ID NO: 4471886 - DNA, 25 bp, Homo sapien
cttgtgttccacctggagacccctg

SEQ ID NO: 4471887 - DNA, 25 bp, Homo sapien
ggagccgcttcatgttccccaggaa

SEQ ID NO: 4471888 - DNA, 25 bp, Homo sapien
agagggcaatctgtcttgtgttcca

SEQ ID NO: 4471889 - DNA, 25 bp, Homo sapien
gagacccctgtcgtgaggagccgct

SEQ ID NO: 4471890 - DNA, 25 bp, Homo sapien
catcatagaaggggaacaggaggcc

SEQ ID NO: 4471891 - DNA, 25 bp, Homo sapien
ccatcaatttcctcttcgatcaggg

SEQ ID NO: 4471892 - DNA, 25 bp, Homo sapien
ccaggtagagcatgtgggtgtcagc

SEQ ID NO: 4471893 - DNA, 25 bp, Homo sapien
agagcccatcaatttcctcttcgat

SEQ ID NO: 4471894 - DNA, 25 bp, Homo sapien
tcagtgctgatctcgtagtaccgga

SEQ ID NO: 4471895 - DNA, 25 bp, Homo sapien
catgaggtaactcaggtagggcttc

SEQ ID NO: 4471896 - DNA, 25 bp, Homo sapien
cgtagtaccggatgtttccatcacc

SEQ ID NO: 4471897 - DNA, 25 bp, Homo sapien
ggcttctcagtgctgatctcgtagt

SEQ ID NO: 4471898 - DNA, 25 bp, Homo sapien
catcatcatagccactgtgggcttc

SEQ ID NO: 4471899 - DNA, 25 bp, Homo sapien
ccactgtgggcttcaggctccccat

SEQ ID NO: 4471900 - DNA, 25 bp, Homo sapien
tagaagcggaacacctcgcaggctg

SEQ ID NO: 4471901 - DNA, 25 bp, Homo sapien
gctgacacatccagcccgtgcttgg

SEQ ID NO: 4471902 - DNA, 25 bp, Homo sapien
gagatgggctcgatcaggcccttga

SEQ ID NO: 4471903 - DNA, 25 bp, Homo sapien
gatgggctcgatcaggcccttgaga

SEQ ID NO: 4471904 - DNA, 25 bp, Homo sapien
ttaggtttgaagaccccagttcaca

SEQ ID NO: 4471905 - DNA, 25 bp, Homo sapien
tggtgagcaggctaagaggcgatgc

SEQ ID NO: 4471906 - DNA, 25 bp, Homo sapien
aaacccaactgtccccatctgagaa

SEQ ID NO: 4471907 - DNA, 25 bp, Homo sapien
gaactacctgactgcactcatgagc

SEQ ID NO: 4471908 - DNA, 25 bp, Homo sapien
cgtgcctggtgtcattgggtaaatg

SEQ ID NO: 4471909 - DNA, 25 bp, Homo sapien
gggtcagtgctggctccgtgcctgg

SEQ ID NO: 4471910 - DNA, 25 bp, Homo sapien
cagccattcatccggggtcagtgct

SEQ ID NO: 4471911 - DNA, 25 bp, Homo sapien
gtcagtgctggctccgtgcctggtg

SEQ ID NO: 4471912 - DNA, 25 bp, Homo sapien
tttctttgatgggagccttaaatac

SEQ ID NO: 4471913 - DNA, 25 bp, Homo sapien
tgatgggagccttaaataccatttt

SEQ ID NO: 4471914 - DNA, 25 bp, Homo sapien
tctattccgttgaccacaacactct

SEQ ID NO: 4471915 - DNA, 25 bp, Homo sapien
ttctaataaatctattccgttgacc

SEQ ID NO: 4471916 - DNA, 25 bp, Homo sapien
tgccgaatgcggatgtccttctggg

SEQ ID NO: 4471917 - DNA, 25 bp, Homo sapien
ggctgttgcgcaagtttttcagttc

SEQ ID NO: 4471918 - DNA, 25 bp, Homo sapien
tttcagttccagctggagctgccga

SEQ ID NO: 4471919 - DNA, 25 bp, Homo sapien
tcaaccgtcgaatctcatcctgctg

SEQ ID NO: 4471920 - DNA, 25 bp, Homo sapien
tcaactgggcagtgtggcacatcgg

SEQ ID NO: 4471921 - DNA, 25 bp, Homo sapien
tggtcattctacgtgcataaggctg

SEQ ID NO: 4471922 - DNA, 25 bp, Homo sapien
tcaattctatccttgggaggcagca

SEQ ID NO: 4471923 - DNA, 25 bp, Homo sapien
tcattatggccttggagagcaatcc

SEQ ID NO: 4471924 - DNA, 25 bp, Homo sapien
ctcatttgctgacttgcaaaggctg

SEQ ID NO: 4471925 - DNA, 25 bp, Homo sapien
tctcatttgctgacttgcaaaggct

SEQ ID NO: 4471926 - DNA, 25 bp, Homo sapien
ttgtctcatttgctgacttgcaaag

SEQ ID NO: 4471927 - DNA, 25 bp, Homo sapien
tgtctcatttgctgacttgcaaagg

SEQ ID NO: 4471928 - DNA, 25 bp, Homo sapien
ttttttcatacacccgagcacggaa

SEQ ID NO: 4471929 - DNA, 25 bp, Homo sapien
tagaggcatccaacgccctggtttg

SEQ ID NO: 4471930 - DNA, 25 bp, Homo sapien
tttggttactcaatgcccaggaggg

SEQ ID NO: 4471931 - DNA, 25 bp, Homo sapien
tttacggacctaagcgctggagacg

SEQ ID NO: 4471932 - DNA, 25 bp, Homo sapien
caaagggctctgtttcaggcccaaa

SEQ ID NO: 4471933 - DNA, 25 bp, Homo sapien
tatagtgtatctcctccgttggtcc

SEQ ID NO: 4471934 - DNA, 25 bp, Homo sapien
gcatttgaagaatgcaccctggccc

SEQ ID NO: 4471935 - DNA, 25 bp, Homo sapien
tccactttaatcagggccagcttca

SEQ ID NO: 4471936 - DNA, 25 bp, Homo sapien
gaaaccagacttgtatcgaccaatg

SEQ ID NO: 4471937 - DNA, 25 bp, Homo sapien
caatggcttattagccccaggaggc

SEQ ID NO: 4471938 - DNA, 25 bp, Homo sapien
cagcggccggtgttcatcatcagga

SEQ ID NO: 4471939 - DNA, 25 bp, Homo sapien
cctctgagattgaccagtggccata

SEQ ID NO: 4471940 - DNA, 25 bp, Homo sapien
ggagctggtggccatgccgcgacgc

SEQ ID NO: 4471941 - DNA, 25 bp, Homo sapien
ccgaaataggacgagcagccatgtt

SEQ ID NO: 4471942 - DNA, 25 bp, Homo sapien
tggccatgccgcgacgccgaaatag

SEQ ID NO: 4471943 - DNA, 25 bp, Homo sapien
acctctcccaactgggctccgggag

SEQ ID NO: 4471944 - DNA, 25 bp, Homo sapien
agcaagcaggaaagcgggtcgaacc

SEQ ID NO: 4471945 - DNA, 25 bp, Homo sapien
tatttgcgggcggtttgcctctctc

SEQ ID NO: 4471946 - DNA, 25 bp, Homo sapien
tcttaagacaaatggctcccggagc

SEQ ID NO: 4471947 - DNA, 25 bp, Homo sapien
ggctctttaaacttccacgagtgtg

SEQ ID NO: 4471948 - DNA, 25 bp, Homo sapien
aacaggacgccctctgatgtgagca

SEQ ID NO: 4471949 - DNA, 25 bp, Homo sapien
ggtcggactgcaagcgaattggcaa

SEQ ID NO: 4471950 - DNA, 25 bp, Homo sapien
gacggattcatttagagctgcggaa

SEQ ID NO: 4471951 - DNA, 25 bp, Homo sapien
tcggagagaatgaggcgaaatcacc

SEQ ID NO: 4471952 - DNA, 25 bp, Homo sapien
tggctgttgcccggagaccctcggc

SEQ ID NO: 4471953 - DNA, 25 bp, Homo sapien
gtctccggcaccactaccaaatggc

SEQ ID NO: 4471954 - DNA, 25 bp, Homo sapien
gcgcagcccgcccattggtcccttc

SEQ ID NO: 4471955 - DNA, 25 bp, Homo sapien
accctcggcggcgattggctcgggc

SEQ ID NO: 4471956 - DNA, 25 bp, Homo sapien
cccggccgaacgctgaggcggcggc

SEQ ID NO: 4471957 - DNA, 25 bp, Homo sapien
ccggccgaacgctgaggcggcggct

SEQ ID NO: 4471958 - DNA, 25 bp, Homo sapien
cccccggccgaacgctgaggcggcg

SEQ ID NO: 4471959 - DNA, 25 bp, Homo sapien
cgcccccggccgaacgctgaggcgg

SEQ ID NO: 4471960 - DNA, 25 bp, Homo sapien
gacttatgtatacgagggtggcgat

SEQ ID NO: 4471961 - DNA, 25 bp, Homo sapien
cgaccgcgcggtaagtcatccaaaa

SEQ ID NO: 4471962 - DNA, 25 bp, Homo sapien
gctgacctaatatgacagcaaagtg

SEQ ID NO: 4471963 - DNA, 25 bp, Homo sapien
tctagcaacggttcttaatccatgg

SEQ ID NO: 4471964 - DNA, 25 bp, Homo sapien
tcatattgcattgctagcagcgtgg

SEQ ID NO: 4471965 - DNA, 25 bp, Homo sapien
gcttctatttagcaaagctggatgg

SEQ ID NO: 4471966 - DNA, 25 bp, Homo sapien
aatttctgtaacgactgacatccag

SEQ ID NO: 4471967 - DNA, 25 bp, Homo sapien
tgtgtaaggaaagcggaaattactc

SEQ ID NO: 4471968 - DNA, 25 bp, Homo sapien
gcaaatgtgctattggtgcaaaagt

SEQ ID NO: 4471969 - DNA, 25 bp, Homo sapien
ttagcttgactcataaaaaggatgc

SEQ ID NO: 4471970 - DNA, 25 bp, Homo sapien
ctacggccgattgccagtgatgtga

SEQ ID NO: 4471971 - DNA, 25 bp, Homo sapien
catctttagagaccaaacaagggca

SEQ ID NO: 4471972 - DNA, 25 bp, Homo sapien
aaaagaacataattaagctggagtt

SEQ ID NO: 4471973 - DNA, 25 bp, Homo sapien
gaacataattaagctggagtttttc

SEQ ID NO: 4471974 - DNA, 25 bp, Homo sapien
ggcttcaacattatttgctattcaa

SEQ ID NO: 4471975 - DNA, 25 bp, Homo sapien
ctttttagatcccaggcttcaacat

SEQ ID NO: 4471976 - DNA, 25 bp, Homo sapien
caatccattaataaggtaactatcc

SEQ ID NO: 4471977 - DNA, 25 bp, Homo sapien
ctccctgaccaatccattaataagg

SEQ ID NO: 4471978 - DNA, 25 bp, Homo sapien
gggcctacaggggaacatcaccatg

SEQ ID NO: 4471979 - DNA, 25 bp, Homo sapien
gacagttttcatccaacagggcttt

SEQ ID NO: 4471980 - DNA, 25 bp, Homo sapien
taaaagtaagagcttacagctctgg

SEQ ID NO: 4471981 - DNA, 25 bp, Homo sapien
gaggtaaacctcaactctagatgga

SEQ ID NO: 4471982 - DNA, 25 bp, Homo sapien
tgtcactttgttctatagctcctca

SEQ ID NO: 4471983 - DNA, 25 bp, Homo sapien
tacgaaagttataaatgccatttgc

SEQ ID NO: 4471984 - DNA, 25 bp, Homo sapien
aagtcctctaacacctatcgtggct

SEQ ID NO: 4471985 - DNA, 25 bp, Homo sapien
tattatagttgctaggatccagaac

SEQ ID NO: 4471986 - DNA, 25 bp, Homo sapien
gatctctaattcaagaggcgctgta

SEQ ID NO: 4471987 - DNA, 25 bp, Homo sapien
tcctccactgggtaaaagtcctcta

SEQ ID NO: 4471988 - DNA, 25 bp, Homo sapien
gacttgccctccaatatatatgtag

SEQ ID NO: 4471989 - DNA, 25 bp, Homo sapien
tagcctagtgaaaaatgtttgtcac

SEQ ID NO: 4471990 - DNA, 25 bp, Homo sapien
cacagacatgagttggcctagccta

SEQ ID NO: 4471991 - DNA, 25 bp, Homo sapien
tggtaattctcatatacaagaaggc

SEQ ID NO: 4471992 - DNA, 25 bp, Homo sapien
cattgtaggtatggtgggattcaca

SEQ ID NO: 4471993 - DNA, 25 bp, Homo sapien
ggctttgaacctcgagggagtgaca

SEQ ID NO: 4471994 - DNA, 25 bp, Homo sapien
aggatgctgagatcattgtaggtat

SEQ ID NO: 4471995 - DNA, 25 bp, Homo sapien
gattcacagcccatagcagagatga

SEQ ID NO: 4471996 - DNA, 25 bp, Homo sapien
caaggaagtcttattgacatcagca

SEQ ID NO: 4471997 - DNA, 25 bp, Homo sapien
ggaagtcttattgacatcagcagtg

SEQ ID NO: 4471998 - DNA, 25 bp, Homo sapien
tcagcagtgatacattgtttcttct

SEQ ID NO: 4471999 - DNA, 25 bp, Homo sapien
tgcccagccaaggaagtcttattga

SEQ ID NO: 4472000 - DNA, 25 bp, Homo sapien
gactgcatccggttatgaactctta

SEQ ID NO: 4472001 - DNA, 25 bp, Homo sapien
gaactcttagttagcctgtgaccac

SEQ ID NO: 4472002 - DNA, 25 bp, Homo sapien
gagtagcagacagaaacccattagc

SEQ ID NO: 4472003 - DNA, 25 bp, Homo sapien
cctgaactgtgctcagagtagcaga

SEQ ID NO: 4472004 - DNA, 25 bp, Homo sapien
caactaactgcaagggccatctagg

SEQ ID NO: 4472005 - DNA, 25 bp, Homo sapien
catctcagtcagtatgcagtggcac

SEQ ID NO: 4472006 - DNA, 25 bp, Homo sapien
taatcaacaagctagaacccagtca

SEQ ID NO: 4472007 - DNA, 25 bp, Homo sapien
tacaagcatataatggcacagcccc

SEQ ID NO: 4472008 - DNA, 25 bp, Homo sapien
acaattcaattcctggttagccacc

SEQ ID NO: 4472009 - DNA, 25 bp, Homo sapien
gaacatggaagtacaagtgctctga

SEQ ID NO: 4472010 - DNA, 25 bp, Homo sapien
tcctgggtaggagcctaaaatacaa

SEQ ID NO: 4472011 - DNA, 25 bp, Homo sapien
aaaagctgtgcccaagtaccttcac

SEQ ID NO: 4472012 - DNA, 25 bp, Homo sapien
cacctgaggtcaggagtttgagacc

SEQ ID NO: 4472013 - DNA, 25 bp, Homo sapien
tgaggtcaggagtttgagaccagcc

SEQ ID NO: 4472014 - DNA, 25 bp, Homo sapien
tggtggctcacgtctctaattctag

SEQ ID NO: 4472015 - DNA, 25 bp, Homo sapien
cctgaggtcaggagtttgagaccag

SEQ ID NO: 4472016 - DNA, 25 bp, Homo sapien
atgacttatcccagaccactgccac

SEQ ID NO: 4472017 - DNA, 25 bp, Homo sapien
tcccagaccactgccacaaactggc

SEQ ID NO: 4472018 - DNA, 25 bp, Homo sapien
cagaccactgccacaaactggccag

SEQ ID NO: 4472019 - DNA, 25 bp, Homo sapien
ttatcccagaccactgccacaaact

SEQ ID NO: 4472020 - DNA, 25 bp, Homo sapien
tgcaacagctggttgttttccacag

SEQ ID NO: 4472021 - DNA, 25 bp, Homo sapien
aacagctggttgttttccacagaca

SEQ ID NO: 4472022 - DNA, 25 bp, Homo sapien
acagctggttgttttccacagacac

SEQ ID NO: 4472023 - DNA, 25 bp, Homo sapien
caacagctggttgttttccacagac

SEQ ID NO: 4472024 - DNA, 25 bp, Homo sapien
tctcagcactcagtagagtggtgct

SEQ ID NO: 4472025 - DNA, 25 bp, Homo sapien
atctacagctggatctactggttct

SEQ ID NO: 4472026 - DNA, 25 bp, Homo sapien
atctcagcactcagtagagtggtgc

SEQ ID NO: 4472027 - DNA, 25 bp, Homo sapien
aacacagcttgctgtcttcgctttg

SEQ ID NO: 4472028 - DNA, 25 bp, Homo sapien
cttccacaagaccggaagcagtcag

SEQ ID NO: 4472029 - DNA, 25 bp, Homo sapien
tcagggctgaacacagcttgctgtc

SEQ ID NO: 4472030 - DNA, 25 bp, Homo sapien
ccacaagaccggaagcagtcagggc

SEQ ID NO: 4472031 - DNA, 25 bp, Homo sapien
gtgttcttgaacagactgtacctcc

SEQ ID NO: 4472032 - DNA, 25 bp, Homo sapien
tcctcagggcttaagggctcccatg

SEQ ID NO: 4472033 - DNA, 25 bp, Homo sapien
taagggctcccatggcagctctttc

SEQ ID NO: 4472034 - DNA, 25 bp, Homo sapien
cttgtgatctgaacaaagagcaggc

SEQ ID NO: 4472035 - DNA, 25 bp, Homo sapien
gatgacttcttggtgatggaaagct

SEQ ID NO: 4472036 - DNA, 25 bp, Homo sapien
aggagatgacttcttggtgatggaa

SEQ ID NO: 4472037 - DNA, 25 bp, Homo sapien
ctgaaggagatgacttcttggtgat

SEQ ID NO: 4472038 - DNA, 25 bp, Homo sapien
gagatgacttcttggtgatggaaag

SEQ ID NO: 4472039 - DNA, 25 bp, Homo sapien
cttcggcaaggccacgggtgcagct

SEQ ID NO: 4472040 - DNA, 25 bp, Homo sapien
ttcggcaaggccacgggtgcagctc

SEQ ID NO: 4472041 - DNA, 25 bp, Homo sapien
tggtaaagactgctattgctcagaa

SEQ ID NO: 4472042 - DNA, 25 bp, Homo sapien
agtggaaactattgcccagatagca

SEQ ID NO: 4472043 - DNA, 25 bp, Homo sapien
atggtaaagactgctattgctcaga

SEQ ID NO: 4472044 - DNA, 25 bp, Homo sapien
actattgcccagatagcagtttcca

SEQ ID NO: 4472045 - DNA, 25 bp, Homo sapien
gttccagctctgacacgccaaaccg

SEQ ID NO: 4472046 - DNA, 25 bp, Homo sapien
aaaccgcccccgcatggacactctc

SEQ ID NO: 4472047 - DNA, 25 bp, Homo sapien
cagctgtcttcatgttgttccagct

SEQ ID NO: 4472048 - DNA, 25 bp, Homo sapien
ctccccttgctgcatggacaccttc

SEQ ID NO: 4472049 - DNA, 25 bp, Homo sapien
aacataatcatccatgatgcctttg

SEQ ID NO: 4472050 - DNA, 25 bp, Homo sapien
ccaacataatcatccatgatgcctt

SEQ ID NO: 4472051 - DNA, 25 bp, Homo sapien
acataatcatccatgatgcctttgc

SEQ ID NO: 4472052 - DNA, 25 bp, Homo sapien
cataatcatccatgatgcctttgcc

SEQ ID NO: 4472053 - DNA, 25 bp, Homo sapien
agcaggcttctgtccactgcgctgc

SEQ ID NO: 4472054 - DNA, 25 bp, Homo sapien
tccactgcgctgcaaatatttgaag

SEQ ID NO: 4472055 - DNA, 25 bp, Homo sapien
agcaatggcctcatctctagatctt

SEQ ID NO: 4472056 - DNA, 25 bp, Homo sapien
ctcatctctagatcttgctgacaac

SEQ ID NO: 4472057 - DNA, 25 bp, Homo sapien
ctctttgggatggatgtaaggtcca

SEQ ID NO: 4472058 - DNA, 25 bp, Homo sapien
gggatccaacgctgaagctgtaagt

SEQ ID NO: 4472059 - DNA, 25 bp, Homo sapien
agtgccttccactaatgggatccaa

SEQ ID NO: 4472060 - DNA, 25 bp, Homo sapien
ttctaaatttaagggcctctgtgaa

SEQ ID NO: 4472061 - DNA, 25 bp, Homo sapien
tacgtcctcacaatcaacctctctc

SEQ ID NO: 4472062 - DNA, 25 bp, Homo sapien
ttctctcctagcagagtggttgaac

SEQ ID NO: 4472063 - DNA, 25 bp, Homo sapien
caatcttcttatcctgttctctgcc

SEQ ID NO: 4472064 - DNA, 25 bp, Homo sapien
ctgcctttctctcctagcagagtgg

SEQ ID NO: 4472065 - DNA, 25 bp, Homo sapien
aagtgatttaatagtaatagccttt

SEQ ID NO: 4472066 - DNA, 25 bp, Homo sapien
tgatttaatagtaatagcctttgtt

SEQ ID NO: 4472067 - DNA, 25 bp, Homo sapien
atagcatgtaataatgtttaagtga

SEQ ID NO: 4472068 - DNA, 25 bp, Homo sapien
tagcatgtaataatgtttaagtgat

SEQ ID NO: 4472069 - DNA, 25 bp, Homo sapien
tagagtactgctaggttttgagctg

SEQ ID NO: 4472070 - DNA, 25 bp, Homo sapien
aaaattcacgtacactcatctctgc

SEQ ID NO: 4472071 - DNA, 25 bp, Homo sapien
agtggccacaagaatctatacatgt

SEQ ID NO: 4472072 - DNA, 25 bp, Homo sapien
ggcttggattttagtctgaggcacc

SEQ ID NO: 4472073 - DNA, 25 bp, Homo sapien
aaggtgtcagcggagtaccgtcctg

SEQ ID NO: 4472074 - DNA, 25 bp, Homo sapien
ctcaaggccgaaagggaaggtgtca

SEQ ID NO: 4472075 - DNA, 25 bp, Homo sapien
aggcgtcgtccgtagcactctgcca

SEQ ID NO: 4472076 - DNA, 25 bp, Homo sapien
cctgggacacccagcaacggttgtc

SEQ ID NO: 4472077 - DNA, 25 bp, Homo sapien
ggcacagacgaaggccatagcaaaa

SEQ ID NO: 4472078 - DNA, 25 bp, Homo sapien
aaaagcgcaactagaaggactaagg

SEQ ID NO: 4472079 - DNA, 25 bp, Homo sapien
cggataagccggcacagacgaaggc

SEQ ID NO: 4472080 - DNA, 25 bp, Homo sapien
ggccatagcaaaagcgcaactagaa

SEQ ID NO: 4472081 - DNA, 25 bp, Homo sapien
tcacacgacccctgcacggtcacac

SEQ ID NO: 4472082 - DNA, 25 bp, Homo sapien
ctcgattttcctctgttcttcatgt

SEQ ID NO: 4472083 - DNA, 25 bp, Homo sapien
cctacctcgattttcctctgttctt

SEQ ID NO: 4472084 - DNA, 25 bp, Homo sapien
ctcctacctcgattttcctctgttc

SEQ ID NO: 4472085 - DNA, 25 bp, Homo sapien
cgattttcctctgttcttcatgtac

SEQ ID NO: 4472086 - DNA, 25 bp, Homo sapien
taacagtggccagaatagattggtt

SEQ ID NO: 4472087 - DNA, 25 bp, Homo sapien
caccatttgtaattagcattaacag

SEQ ID NO: 4472088 - DNA, 25 bp, Homo sapien
caaaatctctttcgtactgctagca

SEQ ID NO: 4472089 - DNA, 25 bp, Homo sapien
gaagttctgcatttacgcccaatga

SEQ ID NO: 4472090 - DNA, 25 bp, Homo sapien
catgggcaattttaaggtttgccat

SEQ ID NO: 4472091 - DNA, 25 bp, Homo sapien
gttttgctcttcatcaggtgtcaca

SEQ ID NO: 4472092 - DNA, 25 bp, Homo sapien
taaacatgttttggagagttagatt

SEQ ID NO: 4472093 - DNA, 25 bp, Homo sapien
tggctccccagagggaacacttcgt

SEQ ID NO: 4472094 - DNA, 25 bp, Homo sapien
gagttagattttttctcacgacctg

SEQ ID NO: 4472095 - DNA, 25 bp, Homo sapien
ccggtgtgaagcctcctgtagggaa

SEQ ID NO: 4472096 - DNA, 25 bp, Homo sapien
gattctgtagagatcccaatgccag

SEQ ID NO: 4472097 - DNA, 25 bp, Homo sapien
taacaactggcaacattcttggtgc

SEQ ID NO: 4472098 - DNA, 25 bp, Homo sapien
tgaagcgtctccatgtgtaactagc

SEQ ID NO: 4472099 - DNA, 25 bp, Homo sapien
ggttgctggtgtcactaagaagtgc

SEQ ID NO: 4472100 - DNA, 25 bp, Homo sapien
tatgctgggttgctggtgtcactaa

SEQ ID NO: 4472101 - DNA, 25 bp, Homo sapien
ttttaggtgatctttagaggcttca

SEQ ID NO: 4472102 - DNA, 25 bp, Homo sapien
gctgctgctagagcaaggcttcgtt

SEQ ID NO: 4472103 - DNA, 25 bp, Homo sapien
gtcctactggcaataactgggactt

SEQ ID NO: 4472104 - DNA, 25 bp, Homo sapien
ttgttcgtcctactggcaataactg

SEQ ID NO: 4472105 - DNA, 25 bp, Homo sapien
tcctactggcaataactgggactta

SEQ ID NO: 4472106 - DNA, 25 bp, Homo sapien
tgttcgtcctactggcaataactgg

SEQ ID NO: 4472107 - DNA, 25 bp, Homo sapien
catgttaataacagtttcgatgtca

SEQ ID NO: 4472108 - DNA, 25 bp, Homo sapien
tattcatagagtttagatctagaat

SEQ ID NO: 4472109 - DNA, 25 bp, Homo sapien
taataacagtttcgatgtcatcaat

SEQ ID NO: 4472110 - DNA, 25 bp, Homo sapien
cagcatgttaataacagtttcgatg

SEQ ID NO: 4472111 - DNA, 25 bp, Homo sapien
ttttaataaggctgtgactctcctt

SEQ ID NO: 4472112 - DNA, 25 bp, Homo sapien
tttaataaggctgtgactctccttg

SEQ ID NO: 4472113 - DNA, 25 bp, Homo sapien
aacttttaataaggctgtgactctc

SEQ ID NO: 4472114 - DNA, 25 bp, Homo sapien
cttttaataaggctgtgactctcct

SEQ ID NO: 4472115 - DNA, 25 bp, Homo sapien
taggtttttagtgcatatgaaaatt

SEQ ID NO: 4472116 - DNA, 25 bp, Homo sapien
tgttggcacatttgaactacaatag

SEQ ID NO: 4472117 - DNA, 25 bp, Homo sapien
tggcacatttgaactacaatagaaa

SEQ ID NO: 4472118 - DNA, 25 bp, Homo sapien
atgacacataaagatgttggcacat

SEQ ID NO: 4472119 - DNA, 25 bp, Homo sapien
ataccagcctgggcgcaatggattg

SEQ ID NO: 4472120 - DNA, 25 bp, Homo sapien
taccagcctgggcgcaatggattga

SEQ ID NO: 4472121 - DNA, 25 bp, Homo sapien
ccagcctgggcgcaatggattgaga

SEQ ID NO: 4472122 - DNA, 25 bp, Homo sapien
agcctgggcgcaatggattgagacc

SEQ ID NO: 4472123 - DNA, 25 bp, Homo sapien
atatttgagaagtgcaaggatgtac

SEQ ID NO: 4472124 - DNA, 25 bp, Homo sapien
ggagtagaatccggaacaccagaaa

SEQ ID NO: 4472125 - DNA, 25 bp, Homo sapien
gctggagtagaatccggaacaccag

SEQ ID NO: 4472126 - DNA, 25 bp, Homo sapien
agtagaatccggaacaccagaaaga

SEQ ID NO: 4472127 - DNA, 25 bp, Homo sapien
ctgctggagtagaatccggaacacc

SEQ ID NO: 4472128 - DNA, 25 bp, Homo sapien
ttagcaagtatggttcatggcccca

SEQ ID NO: 4472129 - DNA, 25 bp, Homo sapien
taacataggaggaagcacctagtcc

SEQ ID NO: 4472130 - DNA, 25 bp, Homo sapien
ctgggagacagtgaaatggacctct

SEQ ID NO: 4472131 - DNA, 25 bp, Homo sapien
tgagcaactcagtgggacaatgagc

SEQ ID NO: 4472132 - DNA, 25 bp, Homo sapien
gaccttctcgtggaaatcagagcag

SEQ ID NO: 4472133 - DNA, 25 bp, Homo sapien
cagctctcagttgcaaaatgcgtat

SEQ ID NO: 4472134 - DNA, 25 bp, Homo sapien
tgagcaatcccctgagtaagaagac

SEQ ID NO: 4472135 - DNA, 25 bp, Homo sapien
gcagctactgctttggttccggtca

SEQ ID NO: 4472136 - DNA, 25 bp, Homo sapien
tgttgaggccgatttgccactaagg

SEQ ID NO: 4472137 - DNA, 25 bp, Homo sapien
tttgccttgttgaggccgatttgcc

SEQ ID NO: 4472138 - DNA, 25 bp, Homo sapien
ccgatttgccactaaggaggaagtt

SEQ ID NO: 4472139 - DNA, 25 bp, Homo sapien
ttgcctgagctagtttgccttgttg

SEQ ID NO: 4472140 - DNA, 25 bp, Homo sapien
ttcagggcccgtctgggctgggtct

SEQ ID NO: 4472141 - DNA, 25 bp, Homo sapien
tgtggaggaggggggtgagatgagg

SEQ ID NO: 4472142 - DNA, 25 bp, Homo sapien
gtggaggaggggggtgagatgaggc

SEQ ID NO: 4472143 - DNA, 25 bp, Homo sapien
tggaggaggggggtgagatgaggca

SEQ ID NO: 4472144 - DNA, 25 bp, Homo sapien
tggtcctagtaagtcactggagctg

SEQ ID NO: 4472145 - DNA, 25 bp, Homo sapien
ctcctcgcctataaatgtgtggtcc

SEQ ID NO: 4472146 - DNA, 25 bp, Homo sapien
tccaaagctcccagggcccaactca

SEQ ID NO: 4472147 - DNA, 25 bp, Homo sapien
taaatgtgtggtcctagtaagtcac

SEQ ID NO: 4472148 - DNA, 25 bp, Homo sapien
caaatgggagttggagtttccctag

SEQ ID NO: 4472149 - DNA, 25 bp, Homo sapien
cctaggatgcctgagcaaccggcgc

SEQ ID NO: 4472150 - DNA, 25 bp, Homo sapien
gatgcctgagcaaccggcgcctctg

SEQ ID NO: 4472151 - DNA, 25 bp, Homo sapien
gagtttccctaggatgcctgagcaa

SEQ ID NO: 4472152 - DNA, 25 bp, Homo sapien
gaggccaggtttcacgatcccattg

SEQ ID NO: 4472153 - DNA, 25 bp, Homo sapien
tccagtccagttgtgggctcatcca

SEQ ID NO: 4472154 - DNA, 25 bp, Homo sapien
caggtctttgaggtcaccttgggta

SEQ ID NO: 4472155 - DNA, 25 bp, Homo sapien
taataatgcctccacttgcgggtcc

SEQ ID NO: 4472156 - DNA, 25 bp, Homo sapien
gtctctacagtctccgtggcttcag

SEQ ID NO: 4472157 - DNA, 25 bp, Homo sapien
tctgtgagtgacttatctctcttag

SEQ ID NO: 4472158 - DNA, 25 bp, Homo sapien
tctctcttagcggtctctacagtct

SEQ ID NO: 4472159 - DNA, 25 bp, Homo sapien
agtctccgtggcttcagtcttcttc

SEQ ID NO: 4472160 - DNA, 25 bp, Homo sapien
ctgagagttgatctaattcagcttt

SEQ ID NO: 4472161 - DNA, 25 bp, Homo sapien
catgagggaaaacatcatgatgatg

SEQ ID NO: 4472162 - DNA, 25 bp, Homo sapien
taaataagtcaccatcatgagggaa

SEQ ID NO: 4472163 - DNA, 25 bp, Homo sapien
tgctatggccagtgctaaataagtc

SEQ ID NO: 4472164 - DNA, 25 bp, Homo sapien
atgatgatgaaggtgtccacctttg

SEQ ID NO: 4472165 - DNA, 25 bp, Homo sapien
aatgtaatagttttcacataagcaa

SEQ ID NO: 4472166 - DNA, 25 bp, Homo sapien
tacatatcacacacatgtaagtaca

SEQ ID NO: 4472167 - DNA, 25 bp, Homo sapien
ttttcacataagcaactagacaaag

SEQ ID NO: 4472168 - DNA, 25 bp, Homo sapien
catatcacacacatgtaagtacata

SEQ ID NO: 4472169 - DNA, 25 bp, Homo sapien
gctttgaattcttgcaggctgatct

SEQ ID NO: 4472170 - DNA, 25 bp, Homo sapien
accggagccacctggcatcctcctc

SEQ ID NO: 4472171 - DNA, 25 bp, Homo sapien
tgctgagtcacccaccggagccacc

SEQ ID NO: 4472172 - DNA, 25 bp, Homo sapien
aattcttgcaggctgatctccccat

SEQ ID NO: 4472173 - DNA, 25 bp, Homo sapien
gggtgatggtgccacttctatcgga

SEQ ID NO: 4472174 - DNA, 25 bp, Homo sapien
tttgagtttgtccatggggctgcca

SEQ ID NO: 4472175 - DNA, 25 bp, Homo sapien
gggctgccatggatgagcagggtca

SEQ ID NO: 4472176 - DNA, 25 bp, Homo sapien
tcggagtcaaatagggcaaagaatc

SEQ ID NO: 4472177 - DNA, 25 bp, Homo sapien
tccccacgggtggagaatctttggc

SEQ ID NO: 4472178 - DNA, 25 bp, Homo sapien
taaaacacctaacgcagtatctggg

SEQ ID NO: 4472179 - DNA, 25 bp, Homo sapien
gcctgctttggatatggacacaccc

SEQ ID NO: 4472180 - DNA, 25 bp, Homo sapien
aatagtgggctctaagtcctctggg

SEQ ID NO: 4472181 - DNA, 25 bp, Homo sapien
gggatgaagcccagtgcgggcctgc

SEQ ID NO: 4472182 - DNA, 25 bp, Homo sapien
ctctgtacctgcagacgccccctgc

SEQ ID NO: 4472183 - DNA, 25 bp, Homo sapien
gagtggggatgaagcccagtgcggg

SEQ ID NO: 4472184 - DNA, 25 bp, Homo sapien
tgcagacgccccctgccgtgcacac

SEQ ID NO: 4472185 - DNA, 25 bp, Homo sapien
gcgagatggcgctctcgcgcagaca

SEQ ID NO: 4472186 - DNA, 25 bp, Homo sapien
ttcgaagagcgccagcgtcagctgg

SEQ ID NO: 4472187 - DNA, 25 bp, Homo sapien
tcatccgggtcaatggagccactgc

SEQ ID NO: 4472188 - DNA, 25 bp, Homo sapien
ggtccagcttctcgtcaggcagcga

SEQ ID NO: 4472189 - DNA, 25 bp, Homo sapien
caggagtctaacgccgccgtggaca

SEQ ID NO: 4472190 - DNA, 25 bp, Homo sapien
acgccgccgtggacagtgccaatgc

SEQ ID NO: 4472191 - DNA, 25 bp, Homo sapien
tctaacgccgccgtggacagtgcca

SEQ ID NO: 4472192 - DNA, 25 bp, Homo sapien
gagtctaacgccgccgtggacagtg

SEQ ID NO: 4472193 - DNA, 25 bp, Homo sapien
ggcgggggccgtcagccagtgggca

SEQ ID NO: 4472194 - DNA, 25 bp, Homo sapien
cgcggccggcgcgggcgtgggcggg

SEQ ID NO: 4472195 - DNA, 25 bp, Homo sapien
ctggcgcggccggcgcgggcgtggg

SEQ ID NO: 4472196 - DNA, 25 bp, Homo sapien
gggcgggggccgtcagccagtgggc

SEQ ID NO: 4472197 - DNA, 25 bp, Homo sapien
tggttgtgccagtaggcgcgggtca

SEQ ID NO: 4472198 - DNA, 25 bp, Homo sapien
ggttgtgccagtaggcgcgggtcag

SEQ ID NO: 4472199 - DNA, 25 bp, Homo sapien
gtggttgtgccagtaggcgcgggtc

SEQ ID NO: 4472200 - DNA, 25 bp, Homo sapien
ctgcataggtggccaggcagaacag

SEQ ID NO: 4472201 - DNA, 25 bp, Homo sapien
tgcataggtggccaggcagaacagc

SEQ ID NO: 4472202 - DNA, 25 bp, Homo sapien
ataggtggccaggcagaacagctgg

SEQ ID NO: 4472203 - DNA, 25 bp, Homo sapien
cataggtggccaggcagaacagctg

SEQ ID NO: 4472204 - DNA, 25 bp, Homo sapien
ttggccaccatgacgctggcgccga

SEQ ID NO: 4472205 - DNA, 25 bp, Homo sapien
gcactggccgcagcccttggccacc

SEQ ID NO: 4472206 - DNA, 25 bp, Homo sapien
tggcgccgaggtcccggtgcgcgct

SEQ ID NO: 4472207 - DNA, 25 bp, Homo sapien
gaagctgcagtcgaagttgaggcac

SEQ ID NO: 4472208 - DNA, 25 bp, Homo sapien
cacgtagcccataagctggtggaac

SEQ ID NO: 4472209 - DNA, 25 bp, Homo sapien
tgtgcacgagggacagccccactac

SEQ ID NO: 4472210 - DNA, 25 bp, Homo sapien
tccagtggtaggacttgagccagcc

SEQ ID NO: 4472211 - DNA, 25 bp, Homo sapien
tggaactggatgttctggtccagtg

SEQ ID NO: 4472212 - DNA, 25 bp, Homo sapien
gaaccgtgtacccagccaatgccag

SEQ ID NO: 4472213 - DNA, 25 bp, Homo sapien
aaccgtgtacccagccaatgccagg

SEQ ID NO: 4472214 - DNA, 25 bp, Homo sapien
ggccgaaccgtgtacccagccaatg

SEQ ID NO: 4472215 - DNA, 25 bp, Homo sapien
ggaggccgaaccgtgtacccagcca

SEQ ID NO: 4472216 - DNA, 25 bp, Homo sapien
gtggccactcctgcggatgcaggaa

SEQ ID NO: 4472217 - DNA, 25 bp, Homo sapien
agtggccactcctgcggatgcagga

SEQ ID NO: 4472218 - DNA, 25 bp, Homo sapien
cagaagccacacgaggaggtaggac

SEQ ID NO: 4472219 - DNA, 25 bp, Homo sapien
cacacggctgccatgcgggacactg

SEQ ID NO: 4472220 - DNA, 25 bp, Homo sapien
aagttgggcccatgaaagatgagca

SEQ ID NO: 4472221 - DNA, 25 bp, Homo sapien
gacactgccagtccgatggccttct

SEQ ID NO: 4472222 - DNA, 25 bp, Homo sapien
aaagggggccgcttgatgaggagat

SEQ ID NO: 4472223 - DNA, 25 bp, Homo sapien
aaaagggggccgcttgatgaggaga

SEQ ID NO: 4472224 - DNA, 25 bp, Homo sapien
ggggccgcttgatgaggagatgagt

SEQ ID NO: 4472225 - DNA, 25 bp, Homo sapien
gccgcttgatgaggagatgagtgac

SEQ ID NO: 4472226 - DNA, 25 bp, Homo sapien
gggtgccactcatagcgagcaatgg

SEQ ID NO: 4472227 - DNA, 25 bp, Homo sapien
gtgccactcatagcgagcaatggtg

SEQ ID NO: 4472228 - DNA, 25 bp, Homo sapien
caatggtggggatgttcagatacaa

SEQ ID NO: 4472229 - DNA, 25 bp, Homo sapien
aggggtgccactcatagcgagcaat

SEQ ID NO: 4472230 - DNA, 25 bp, Homo sapien
gcccagtgggtctgatgccttgaag

SEQ ID NO: 4472231 - DNA, 25 bp, Homo sapien
cctcttagaaccacggcccagtggg

SEQ ID NO: 4472232 - DNA, 25 bp, Homo sapien
cttggacgacctttgactctttctc

SEQ ID NO: 4472233 - DNA, 25 bp, Homo sapien
gaaggactcatacagcctgtttgtc

SEQ ID NO: 4472234 - DNA, 25 bp, Homo sapien
tcctttgtcttcgtgtacaccaggt

SEQ ID NO: 4472235 - DNA, 25 bp, Homo sapien
aggtcttcgtcctgcggccagggat

SEQ ID NO: 4472236 - DNA, 25 bp, Homo sapien
ggccagggatctcccttgggcctat

SEQ ID NO: 4472237 - DNA, 25 bp, Homo sapien
taggacgtcagctccagtgacatcc

SEQ ID NO: 4472238 - DNA, 25 bp, Homo sapien
tgaaggagcctgtgctatttcccgc

SEQ ID NO: 4472239 - DNA, 25 bp, Homo sapien
tcatccaggctgaaagcatgggaag

SEQ ID NO: 4472240 - DNA, 25 bp, Homo sapien
gagtgaccttcgcagtcatccaggc

SEQ ID NO: 4472241 - DNA, 25 bp, Homo sapien
tcaggacttagagcgtggtagacag

SEQ ID NO: 4472242 - DNA, 25 bp, Homo sapien
gtttctccaaaagtatctcagagcc

SEQ ID NO: 4472243 - DNA, 25 bp, Homo sapien
tgttacagaatttgtgtttctccaa

SEQ ID NO: 4472244 - DNA, 25 bp, Homo sapien
gatgttacagaatttgtgtttctcc

SEQ ID NO: 4472245 - DNA, 25 bp, Homo sapien
cttgatgttacagaatttgtgtttc

SEQ ID NO: 4472246 - DNA, 25 bp, Homo sapien
caaggacccaattcgcatccctggg

SEQ ID NO: 4472247 - DNA, 25 bp, Homo sapien
tgcagagctagtgaaaacaaggacc

SEQ ID NO: 4472248 - DNA, 25 bp, Homo sapien
ctgtgcacaagagggcatcagagaa

SEQ ID NO: 4472249 - DNA, 25 bp, Homo sapien
ggagagctctaggtgttacagtgca

SEQ ID NO: 4472250 - DNA, 25 bp, Homo sapien
tcccataaggcccatcgatgtagca

SEQ ID NO: 4472251 - DNA, 25 bp, Homo sapien
gcacggcatgctcagaggcaaagat

SEQ ID NO: 4472252 - DNA, 25 bp, Homo sapien
atgcctgccccgatgagcacggcat

SEQ ID NO: 4472253 - DNA, 25 bp, Homo sapien
ctcagaggcaaagatcctgcgggtg

SEQ ID NO: 4472254 - DNA, 25 bp, Homo sapien
ggacaccttcgatccaggagtgctg

SEQ ID NO: 4472255 - DNA, 25 bp, Homo sapien
tgtcttggacaccttcgatccagga

SEQ ID NO: 4472256 - DNA, 25 bp, Homo sapien
gcagctggggcaagtatgctttctt

SEQ ID NO: 4472257 - DNA, 25 bp, Homo sapien
cttatggagcttcatgttgtcttgg

SEQ ID NO: 4472258 - DNA, 25 bp, Homo sapien
tccagtttagtcagcaggctcacaa

SEQ ID NO: 4472259 - DNA, 25 bp, Homo sapien
aagaccgctggtctctgttgatcca

SEQ ID NO: 4472260 - DNA, 25 bp, Homo sapien
cacaaaccactcgaaagaccgctgg

SEQ ID NO: 4472261 - DNA, 25 bp, Homo sapien
ggctcacaaaccactcgaaagaccg

SEQ ID NO: 4472262 - DNA, 25 bp, Homo sapien
tgcagatgtcatgtacatatgcagc

SEQ ID NO: 4472263 - DNA, 25 bp, Homo sapien
tctgcagccccgtgatggagtcttt

SEQ ID NO: 4472264 - DNA, 25 bp, Homo sapien
ccttcatgtcattcttgcccagtgc

SEQ ID NO: 4472265 - DNA, 25 bp, Homo sapien
gcccaggctgggtgcgcgtctgcag

SEQ ID NO: 4472266 - DNA, 25 bp, Homo sapien
ctgcaagctgcagggctccagttgg

SEQ ID NO: 4472267 - DNA, 25 bp, Homo sapien
gctgcagggctccagttggcattac

SEQ ID NO: 4472268 - DNA, 25 bp, Homo sapien
agctgcagggctccagttggcatta

SEQ ID NO: 4472269 - DNA, 25 bp, Homo sapien
caagctgcagggctccagttggcat

SEQ ID NO: 4472270 - DNA, 25 bp, Homo sapien
cacactttgcccctgacagcttggg

SEQ ID NO: 4472271 - DNA, 25 bp, Homo sapien
ttctggactctggacttaacctcac

SEQ ID NO: 4472272 - DNA, 25 bp, Homo sapien
cccaccgctgcctcgagctctcagc

SEQ ID NO: 4472273 - DNA, 25 bp, Homo sapien
ctttcacaccacgaggtcccttctg

SEQ ID NO: 4472274 - DNA, 25 bp, Homo sapien
gaggtaacagcataacgggtcggca

SEQ ID NO: 4472275 - DNA, 25 bp, Homo sapien
agcataacgggtcggcagcaatgag

SEQ ID NO: 4472276 - DNA, 25 bp, Homo sapien
ataacgggtcggcagcaatgagcat

SEQ ID NO: 4472277 - DNA, 25 bp, Homo sapien
gtaacagcataacgggtcggcagca

SEQ ID NO: 4472278 - DNA, 25 bp, Homo sapien
gccacagaagaagacctgcaccttg

SEQ ID NO: 4472279 - DNA, 25 bp, Homo sapien
agaagaagacctgcaccttgccctt

SEQ ID NO: 4472280 - DNA, 25 bp, Homo sapien
tctcagcagccactttctggaacac

SEQ ID NO: 4472281 - DNA, 25 bp, Homo sapien
acagaagaagacctgcaccttgccc

SEQ ID NO: 4472282 - DNA, 25 bp, Homo sapien
ttggaaaaatctgaagccgaacttc

SEQ ID NO: 4472283 - DNA, 25 bp, Homo sapien
tcttggaaaaatctgaagccgaact

SEQ ID NO: 4472284 - DNA, 25 bp, Homo sapien
gaaaaatctgaagccgaacttctca

SEQ ID NO: 4472285 - DNA, 25 bp, Homo sapien
ctagaaattctcttggaaaaatctg

SEQ ID NO: 4472286 - DNA, 25 bp, Homo sapien
aaccccagaatctacagcagactga

SEQ ID NO: 4472287 - DNA, 25 bp, Homo sapien
ccctgggttctagaggaagttcatc

SEQ ID NO: 4472288 - DNA, 25 bp, Homo sapien
taagatgccggagaaataagcttcc

SEQ ID NO: 4472289 - DNA, 25 bp, Homo sapien
aagctcccgtgaccagcctctggtt

SEQ ID NO: 4472290 - DNA, 25 bp, Homo sapien
cagggacagacgcaaacagaggctg

SEQ ID NO: 4472291 - DNA, 25 bp, Homo sapien
tgatgtagatgcacgaaagcctgga

SEQ ID NO: 4472292 - DNA, 25 bp, Homo sapien
gaactgaggtggaatgtcttgagca

SEQ ID NO: 4472293 - DNA, 25 bp, Homo sapien
tgagcacttggcgtctcatgtcacc

SEQ ID NO: 4472294 - DNA, 25 bp, Homo sapien
cagtatgtgctgagagagcctttgc

SEQ ID NO: 4472295 - DNA, 25 bp, Homo sapien
gtatgtgctgagagagcctttgctg

SEQ ID NO: 4472296 - DNA, 25 bp, Homo sapien
agtatgtgctgagagagcctttgct

SEQ ID NO: 4472297 - DNA, 25 bp, Homo sapien
acagtatgtgctgagagagcctttg

SEQ ID NO: 4472298 - DNA, 25 bp, Homo sapien
acactgtcaagaagagaacctatca

SEQ ID NO: 4472299 - DNA, 25 bp, Homo sapien
atgtggggctcacaggagctcatgg

SEQ ID NO: 4472300 - DNA, 25 bp, Homo sapien
cctatcaggactgactgcaaggtgg

SEQ ID NO: 4472301 - DNA, 25 bp, Homo sapien
ctgtcaagaagagaacctatcagga

SEQ ID NO: 4472302 - DNA, 25 bp, Homo sapien
gaaacaaacccgcttgagatccgtg

SEQ ID NO: 4472303 - DNA, 25 bp, Homo sapien
tctcgtgggcaactggaatctgtct

SEQ ID NO: 4472304 - DNA, 25 bp, Homo sapien
gaaaacctcaggacacgggcatatg

SEQ ID NO: 4472305 - DNA, 25 bp, Homo sapien
tctgttacgagagggcaaaggactg

SEQ ID NO: 4472306 - DNA, 25 bp, Homo sapien
gttgatggccgatgatgcccatctg

SEQ ID NO: 4472307 - DNA, 25 bp, Homo sapien
aaagtcagccagtcatccggatgca

SEQ ID NO: 4472308 - DNA, 25 bp, Homo sapien
catccggatgcattttcctgttgat

SEQ ID NO: 4472309 - DNA, 25 bp, Homo sapien
ttgatggccgatgatgcccatctgc

SEQ ID NO: 4472310 - DNA, 25 bp, Homo sapien
gcatgtgtcagccttatctgtcgtg

SEQ ID NO: 4472311 - DNA, 25 bp, Homo sapien
cagccttatctgtcgtgggcccaga

SEQ ID NO: 4472312 - DNA, 25 bp, Homo sapien
tctctttgcatgtgtcagccttatc

SEQ ID NO: 4472313 - DNA, 25 bp, Homo sapien
cgtgggcccagatgtttctacagca

SEQ ID NO: 4472314 - DNA, 25 bp, Homo sapien
gttaaccactgcgaactgcttagca

SEQ ID NO: 4472315 - DNA, 25 bp, Homo sapien
tacaggaagtgaaaccttactcagg

SEQ ID NO: 4472316 - DNA, 25 bp, Homo sapien
gctggcttctaactgtctttccgtg

SEQ ID NO: 4472317 - DNA, 25 bp, Homo sapien
tcagcaagaaaacgcatcaggatgg

SEQ ID NO: 4472318 - DNA, 25 bp, Homo sapien
caaggtggacattgccaagacctga

SEQ ID NO: 4472319 - DNA, 25 bp, Homo sapien
tactggctgtaatggtagcagatct

SEQ ID NO: 4472320 - DNA, 25 bp, Homo sapien
caagtgtcaggcgatgcagaagcaa

SEQ ID NO: 4472321 - DNA, 25 bp, Homo sapien
taaagtgttccgaagtctcaatctg

SEQ ID NO: 4472322 - DNA, 25 bp, Homo sapien
tcctgtctgcctgcgggtatggtgg

SEQ ID NO: 4472323 - DNA, 25 bp, Homo sapien
tctgcctgcgggtatggtgggatgt

SEQ ID NO: 4472324 - DNA, 25 bp, Homo sapien
tgcgggtatggtgggatgttctcac

SEQ ID NO: 4472325 - DNA, 25 bp, Homo sapien
gtcctgtctgcctgcgggtatggtg

SEQ ID NO: 4472326 - DNA, 25 bp, Homo sapien
ctgaggcgtcagtcaaatgaggctt

SEQ ID NO: 4472327 - DNA, 25 bp, Homo sapien
caaatgaggcttgactaggcctgca

SEQ ID NO: 4472328 - DNA, 25 bp, Homo sapien
ggcagcccttagtttctcacccatg

SEQ ID NO: 4472329 - DNA, 25 bp, Homo sapien
tgggtctctccacaaggctaattga

SEQ ID NO: 4472330 - DNA, 25 bp, Homo sapien
ttttttgtcattacaaacaggaagc

SEQ ID NO: 4472331 - DNA, 25 bp, Homo sapien
tttactgctgcctaacacaatactc

SEQ ID NO: 4472332 - DNA, 25 bp, Homo sapien
actgctgcctaacacaatactccaa

SEQ ID NO: 4472333 - DNA, 25 bp, Homo sapien
ttagttatttactgctgcctaacac

SEQ ID NO: 4472334 - DNA, 25 bp, Homo sapien
cacatccagcgggaaaaggcgagaa

SEQ ID NO: 4472335 - DNA, 25 bp, Homo sapien
ttcttaggttgtagacactcccgcc

SEQ ID NO: 4472336 - DNA, 25 bp, Homo sapien
cctgcacgttccgaaagctgcacat

SEQ ID NO: 4472337 - DNA, 25 bp, Homo sapien
gaaagctgcacatccagcgggaaaa

SEQ ID NO: 4472338 - DNA, 25 bp, Homo sapien
tctgttcagtaagcgcaaacgggca

SEQ ID NO: 4472339 - DNA, 25 bp, Homo sapien
acgggcaggcgtggctgcggaggtg

SEQ ID NO: 4472340 - DNA, 25 bp, Homo sapien
tcagtaagcgcaaacgggcaggcgt

SEQ ID NO: 4472341 - DNA, 25 bp, Homo sapien
tgaggacctctgttcagtaagcgca

SEQ ID NO: 4472342 - DNA, 25 bp, Homo sapien
ccaaaggtcttaatcaggctctgat

SEQ ID NO: 4472343 - DNA, 25 bp, Homo sapien
gctctgatggtgagctcattagggc

SEQ ID NO: 4472344 - DNA, 25 bp, Homo sapien
tagcaagagggtggcgaaaacgccc

SEQ ID NO: 4472345 - DNA, 25 bp, Homo sapien
gagatagtgggtcttataattttag

SEQ ID NO: 4472346 - DNA, 25 bp, Homo sapien
tgccaggaacccaaaatgcaaacac

SEQ ID NO: 4472347 - DNA, 25 bp, Homo sapien
ccaggaacccaaaatgcaaacactc

SEQ ID NO: 4472348 - DNA, 25 bp, Homo sapien
gccaggaacccaaaatgcaaacact

SEQ ID NO: 4472349 - DNA, 25 bp, Homo sapien
tatgccaggaacccaaaatgcaaac

SEQ ID NO: 4472350 - DNA, 25 bp, Homo sapien
tatctgatcataacaactgccaggg

SEQ ID NO: 4472351 - DNA, 25 bp, Homo sapien
tgccagggagcttgttcaaaataca

SEQ ID NO: 4472352 - DNA, 25 bp, Homo sapien
gcaaaactattctagggagtgctcc

SEQ ID NO: 4472353 - DNA, 25 bp, Homo sapien
ttattacacttgtgggtccccaggc

SEQ ID NO: 4472354 - DNA, 25 bp, Homo sapien
acagagcccttgtgtgcagcagcag

SEQ ID NO: 4472355 - DNA, 25 bp, Homo sapien
gcggaatgcacagagcccttgtgtg

SEQ ID NO: 4472356 - DNA, 25 bp, Homo sapien
cagcagcagaaaacgggtgcaggtg

SEQ ID NO: 4472357 - DNA, 25 bp, Homo sapien
tgcacagagcccttgtgtgcagcag

SEQ ID NO: 4472358 - DNA, 25 bp, Homo sapien
tccaaaagcaaaaaggacttgagcg

SEQ ID NO: 4472359 - DNA, 25 bp, Homo sapien
ccacaaaatagacggaagagttgcc

SEQ ID NO: 4472360 - DNA, 25 bp, Homo sapien
gagcttcagcagagatgttgcagga

SEQ ID NO: 4472361 - DNA, 25 bp, Homo sapien
gaagatggcataaagttagtaaccc

SEQ ID NO: 4472362 - DNA, 25 bp, Homo sapien
ctctgaaacgcgtcttggatcttct

SEQ ID NO: 4472363 - DNA, 25 bp, Homo sapien
ggatcttctgtcctaacaccaactc

SEQ ID NO: 4472364 - DNA, 25 bp, Homo sapien
gagcaatctcctaactggacttcca

SEQ ID NO: 4472365 - DNA, 25 bp, Homo sapien
ccagcgcaggagcaatctcctaact

SEQ ID NO: 4472366 - DNA, 25 bp, Homo sapien
ctcttctgctgaacaagggcctcct

SEQ ID NO: 4472367 - DNA, 25 bp, Homo sapien
gtgaggaatcgcaggcccaagaaga

SEQ ID NO: 4472368 - DNA, 25 bp, Homo sapien
caaggtgttctctaggcaggaagtc

SEQ ID NO: 4472369 - DNA, 25 bp, Homo sapien
aggtgaggaatcgcaggcccaagaa

SEQ ID NO: 4472370 - DNA, 25 bp, Homo sapien
gaggaatcgcaggcccaagaagagg

SEQ ID NO: 4472371 - DNA, 25 bp, Homo sapien
cacatttaatccaacaagcactaaa

SEQ ID NO: 4472372 - DNA, 25 bp, Homo sapien
caacaagcactaaatggaaattcat

SEQ ID NO: 4472373 - DNA, 25 bp, Homo sapien
tgcacaccttctcatgacaggaacc

SEQ ID NO: 4472374 - DNA, 25 bp, Homo sapien
ccagagctcacaggctttttcccta

SEQ ID NO: 4472375 - DNA, 25 bp, Homo sapien
cagaaagtaagggacacgtggaact

SEQ ID NO: 4472376 - DNA, 25 bp, Homo sapien
tggtccttagcatggtacgtgccca

SEQ ID NO: 4472377 - DNA, 25 bp, Homo sapien
tacgtgcccatgaatgtgcctacca

SEQ ID NO: 4472378 - DNA, 25 bp, Homo sapien
ggctgctcatcggtatgggttgaat

SEQ ID NO: 4472379 - DNA, 25 bp, Homo sapien
gaggcctggcatcaccaatacttgg

SEQ ID NO: 4472380 - DNA, 25 bp, Homo sapien
caaatatccccagggtagggtgagg

SEQ ID NO: 4472381 - DNA, 25 bp, Homo sapien
tcaggatttccggagtaggcatgaa

SEQ ID NO: 4472382 - DNA, 25 bp, Homo sapien
tccgcagtgcataggagagttccag

SEQ ID NO: 4472383 - DNA, 25 bp, Homo sapien
gtggtttccagtttatgactaatac

SEQ ID NO: 4472384 - DNA, 25 bp, Homo sapien
taatacaaacggctctactatgaac

SEQ ID NO: 4472385 - DNA, 25 bp, Homo sapien
tgaacattcttgtatcttgtgtaat

SEQ ID NO: 4472386 - DNA, 25 bp, Homo sapien
cagtttatgactaatacaaacggct

SEQ ID NO: 4472387 - DNA, 25 bp, Homo sapien
cgctcccattgtgctccgggctcag

SEQ ID NO: 4472388 - DNA, 25 bp, Homo sapien
ccctgtttgatgctgcaacatgaac

SEQ ID NO: 4472389 - DNA, 25 bp, Homo sapien
caggctcctgctgctaaagcaagat

SEQ ID NO: 4472390 - DNA, 25 bp, Homo sapien
aacatgaaccccaaggcagttcttc

SEQ ID NO: 4472391 - DNA, 25 bp, Homo sapien
tcaagggccttatatgggatgtcaa

SEQ ID NO: 4472392 - DNA, 25 bp, Homo sapien
ggaatttcacacagtgagcccagca

SEQ ID NO: 4472393 - DNA, 25 bp, Homo sapien
tctggatgcacactggcgatcatgc

SEQ ID NO: 4472394 - DNA, 25 bp, Homo sapien
tctttatatgtctgtgcctacggcc

SEQ ID NO: 4472395 - DNA, 25 bp, Homo sapien
ggctgtgcctgggttgtcaggagga

SEQ ID NO: 4472396 - DNA, 25 bp, Homo sapien
tgtgcctgggttgtcaggaggaagt

SEQ ID NO: 4472397 - DNA, 25 bp, Homo sapien
gcctgggttgtcaggaggaagtggg

SEQ ID NO: 4472398 - DNA, 25 bp, Homo sapien
gctgtgcctgggttgtcaggaggaa

SEQ ID NO: 4472399 - DNA, 25 bp, Homo sapien
tgacaatgataccattgagagccca

SEQ ID NO: 4472400 - DNA, 25 bp, Homo sapien
ggagttgagtggcagaggctcatga

SEQ ID NO: 4472401 - DNA, 25 bp, Homo sapien
tgttgagtatccgatatgttttgag

SEQ ID NO: 4472402 - DNA, 25 bp, Homo sapien
gagtatccgatatgttttgagctct

SEQ ID NO: 4472403 - DNA, 25 bp, Homo sapien
ggaaacaagccttaagaagccattc

SEQ ID NO: 4472404 - DNA, 25 bp, Homo sapien
caatgagctggttccaggagtccag

SEQ ID NO: 4472405 - DNA, 25 bp, Homo sapien
gatcaatccgacaatgcaccttcaa

SEQ ID NO: 4472406 - DNA, 25 bp, Homo sapien
gaagccattcagctgatcaatccga

SEQ ID NO: 4472407 - DNA, 25 bp, Homo sapien
cagcctgggcaacatagtgagaccc

SEQ ID NO: 4472408 - DNA, 25 bp, Homo sapien
tgggaagctggggtaggaggatcgc

SEQ ID NO: 4472409 - DNA, 25 bp, Homo sapien
ttgagaacaggagtttgagatcagc

SEQ ID NO: 4472410 - DNA, 25 bp, Homo sapien
gcctgggcaacatagtgagacccgt

SEQ ID NO: 4472411 - DNA, 25 bp, Homo sapien
aatttcaaagcatctcagcataggg

SEQ ID NO: 4472412 - DNA, 25 bp, Homo sapien
catctgaaatgttgccctgagtcca

SEQ ID NO: 4472413 - DNA, 25 bp, Homo sapien
cagaagttcagggattcagccaagg

SEQ ID NO: 4472414 - DNA, 25 bp, Homo sapien
tattggaagccacatagaccagggt

SEQ ID NO: 4472415 - DNA, 25 bp, Homo sapien
tcccgccatctgtttggcatcaggt

SEQ ID NO: 4472416 - DNA, 25 bp, Homo sapien
cagagcaagaactctttcccgccat

SEQ ID NO: 4472417 - DNA, 25 bp, Homo sapien
catcaggtgattggtggtgctcagt

SEQ ID NO: 4472418 - DNA, 25 bp, Homo sapien
tctgtttggcatcaggtgattggtg

SEQ ID NO: 4472419 - DNA, 25 bp, Homo sapien
ataaatgatgaaacactgactctga

SEQ ID NO: 4472420 - DNA, 25 bp, Homo sapien
aatgatgaaacactgactctgaaat

SEQ ID NO: 4472421 - DNA, 25 bp, Homo sapien
taaatgatgaaacactgactctgaa

SEQ ID NO: 4472422 - DNA, 25 bp, Homo sapien
tgatgaaacactgactctgaaattc

SEQ ID NO: 4472423 - DNA, 25 bp, Homo sapien
aacaagctcctggtcatgcaggttg

SEQ ID NO: 4472424 - DNA, 25 bp, Homo sapien
acaagctcctggtcatgcaggttgg

SEQ ID NO: 4472425 - DNA, 25 bp, Homo sapien
tacttctcatcacttttgatttcag

SEQ ID NO: 4472426 - DNA, 25 bp, Homo sapien
tcttctgcttccaatgctctctggc

SEQ ID NO: 4472427 - DNA, 25 bp, Homo sapien
gttggatgaggaaattcagattctc

SEQ ID NO: 4472428 - DNA, 25 bp, Homo sapien
cacttttgatttcagagttggcatt

SEQ ID NO: 4472429 - DNA, 25 bp, Homo sapien
gactggctgatcaaaagaccttcca

SEQ ID NO: 4472430 - DNA, 25 bp, Homo sapien
ggttaatcgagtgactggctgatca

SEQ ID NO: 4472431 - DNA, 25 bp, Homo sapien
tggctctattggttaatcgagtgac

SEQ ID NO: 4472432 - DNA, 25 bp, Homo sapien
caataaagatggctctattggttaa

SEQ ID NO: 4472433 - DNA, 25 bp, Homo sapien
cttttgaccctgatccagggtcaga

SEQ ID NO: 4472434 - DNA, 25 bp, Homo sapien
gtgagcctcttttgaccctgatcca

SEQ ID NO: 4472435 - DNA, 25 bp, Homo sapien
agcagatgaggatctgaatttcctc

SEQ ID NO: 4472436 - DNA, 25 bp, Homo sapien
gcagatgaggatctgaatttcctca

SEQ ID NO: 4472437 - DNA, 25 bp, Homo sapien
tcaccgatacactgagcattcagcc

SEQ ID NO: 4472438 - DNA, 25 bp, Homo sapien
ttcaatcaacgatgaatcatcaccg

SEQ ID NO: 4472439 - DNA, 25 bp, Homo sapien
ttctttcaatcaacgatgaatcatc

SEQ ID NO: 4472440 - DNA, 25 bp, Homo sapien
gatgaatcatcaccgatacactgag

SEQ ID NO: 4472441 - DNA, 25 bp, Homo sapien
ctggctgctcttgatcatcgagata

SEQ ID NO: 4472442 - DNA, 25 bp, Homo sapien
taactgtatgcagatctacagcttt

SEQ ID NO: 4472443 - DNA, 25 bp, Homo sapien
cagctttcccgtggcattttccaac

SEQ ID NO: 4472444 - DNA, 25 bp, Homo sapien
tgctcttgatcatcgagataactgt

SEQ ID NO: 4472445 - DNA, 25 bp, Homo sapien
gacaccagcccgctcatttgttctg

SEQ ID NO: 4472446 - DNA, 25 bp, Homo sapien
tgcctcactgcactgaaatctttgg

SEQ ID NO: 4472447 - DNA, 25 bp, Homo sapien
tggtcaccaccaatagcacaagaag

SEQ ID NO: 4472448 - DNA, 25 bp, Homo sapien
tctggtgcgtatgctgaagctgccc

SEQ ID NO: 4472449 - DNA, 25 bp, Homo sapien
gacttcgagaaaatcaaagggcata

SEQ ID NO: 4472450 - DNA, 25 bp, Homo sapien
aaagggcacatcctcgaagctccca

SEQ ID NO: 4472451 - DNA, 25 bp, Homo sapien
cagccttcagccttgatttccatta

SEQ ID NO: 4472452 - DNA, 25 bp, Homo sapien
aagctcccagggttttgcattgtga

SEQ ID NO: 4472453 - DNA, 25 bp, Homo sapien
ctttttgtctctcggctttcatttt

SEQ ID NO: 4472454 - DNA, 25 bp, Homo sapien
ctctttttgtctctcggctttcatt

SEQ ID NO: 4472455 - DNA, 25 bp, Homo sapien
tggctctctttttgtctctcggctt

SEQ ID NO: 4472456 - DNA, 25 bp, Homo sapien
tttgtctctcggctttcatttttca

SEQ ID NO: 4472457 - DNA, 25 bp, Homo sapien
gcagtaagagtactcaaaaggcagt

SEQ ID NO: 4472458 - DNA, 25 bp, Homo sapien
ggagaggcccatttgaagggtacac

SEQ ID NO: 4472459 - DNA, 25 bp, Homo sapien
cagtaagagtactcaaaaggcagtg

SEQ ID NO: 4472460 - DNA, 25 bp, Homo sapien
catttgaagggtacacaggcagtaa

SEQ ID NO: 4472461 - DNA, 25 bp, Homo sapien
gtgcggttacccttggttacagcgc

SEQ ID NO: 4472462 - DNA, 25 bp, Homo sapien
ttggttacagcgctgcccgaagtgc

SEQ ID NO: 4472463 - DNA, 25 bp, Homo sapien
aaacagggcaccattgttaagatgc

SEQ ID NO: 4472464 - DNA, 25 bp, Homo sapien
tcacaccggtgtaaaccgaggtgcg

SEQ ID NO: 4472465 - DNA, 25 bp, Homo sapien
ttcccgcgagatcccagccacggca

SEQ ID NO: 4472466 - DNA, 25 bp, Homo sapien
gcccgcagctcttcccgcgagatcc

SEQ ID NO: 4472467 - DNA, 25 bp, Homo sapien
cagctcctcgagtgacagtcctggc

SEQ ID NO: 4472468 - DNA, 25 bp, Homo sapien
cggtagcggcagctcctcgagtgac

SEQ ID NO: 4472469 - DNA, 25 bp, Homo sapien
agcctctcggcaaggaagcgcttgt

SEQ ID NO: 4472470 - DNA, 25 bp, Homo sapien
cctctcggcaaggaagcgcttgtgt

SEQ ID NO: 4472471 - DNA, 25 bp, Homo sapien
ctcggcaaggaagcgcttgtgtgag

SEQ ID NO: 4472472 - DNA, 25 bp, Homo sapien
tctcggcaaggaagcgcttgtgtga

SEQ ID NO: 4472473 - DNA, 25 bp, Homo sapien
tgagcagcgtcggagggcgagcaga

SEQ ID NO: 4472474 - DNA, 25 bp, Homo sapien
tcggagggcgagcagacacgggagc

SEQ ID NO: 4472475 - DNA, 25 bp, Homo sapien
gcgtcggagggcgagcagacacggg

SEQ ID NO: 4472476 - DNA, 25 bp, Homo sapien
agcagcgtcggagggcgagcagaca

SEQ ID NO: 4472477 - DNA, 25 bp, Homo sapien
cgctccccgaccgctcctcagcgga

SEQ ID NO: 4472478 - DNA, 25 bp, Homo sapien
ctcctcagcggagacgcgctccggg

SEQ ID NO: 4472479 - DNA, 25 bp, Homo sapien
gctcctcagcggagacgcgctccgg

SEQ ID NO: 4472480 - DNA, 25 bp, Homo sapien
cccgctccccgaccgctcctcagcg

SEQ ID NO: 4472481 - DNA, 25 bp, Homo sapien
cacggtttgagagttttcgctacac

SEQ ID NO: 4472482 - DNA, 25 bp, Homo sapien
ttacagagaagcaagcagaaggtct

SEQ ID NO: 4472483 - DNA, 25 bp, Homo sapien
ggagaatacccagctgatgtgcact

SEQ ID NO: 4472484 - DNA, 25 bp, Homo sapien
gacaggtagttctctccaggcttac

SEQ ID NO: 4472485 - DNA, 25 bp, Homo sapien
aatggttccatgagtcacttcatct

SEQ ID NO: 4472486 - DNA, 25 bp, Homo sapien
cctaagatttagctcaggttcagat

SEQ ID NO: 4472487 - DNA, 25 bp, Homo sapien
ttagctcaggttcagataaacaaat

SEQ ID NO: 4472488 - DNA, 25 bp, Homo sapien
gtcacttcatctggacttcttcctg

SEQ ID NO: 4472489 - DNA, 25 bp, Homo sapien
ggactgggccctttatgttgatcaa

SEQ ID NO: 4472490 - DNA, 25 bp, Homo sapien
ccaacttttgatggccgggcacaac

SEQ ID NO: 4472491 - DNA, 25 bp, Homo sapien
cattgttgtgccgaaggactgggcc

SEQ ID NO: 4472492 - DNA, 25 bp, Homo sapien
gatctgggattcgataaactcttgg

SEQ ID NO: 4472493 - DNA, 25 bp, Homo sapien
aagaatctaaactctagaacatctc

SEQ ID NO: 4472494 - DNA, 25 bp, Homo sapien
tgaaagaatctaaactctagaacat

SEQ ID NO: 4472495 - DNA, 25 bp, Homo sapien
tctagaacatctctggtttcaattc

SEQ ID NO: 4472496 - DNA, 25 bp, Homo sapien
tagaacatctctggtttcaattcaa

SEQ ID NO: 4472497 - DNA, 25 bp, Homo sapien
tcccttggaatagttacagataacc

SEQ ID NO: 4472498 - DNA, 25 bp, Homo sapien
taaggcccataatcctgctcctagg

SEQ ID NO: 4472499 - DNA, 25 bp, Homo sapien
gaaagactatctacttggctgatca

SEQ ID NO: 4472500 - DNA, 25 bp, Homo sapien
cctacgatgcaatctagctttagac

SEQ ID NO: 4472501 - DNA, 25 bp, Homo sapien
taccaaagtttgtccatattgacag

SEQ ID NO: 4472502 - DNA, 25 bp, Homo sapien
gtagaaaactaccactgaaacttgc

SEQ ID NO: 4472503 - DNA, 25 bp, Homo sapien
ggcatccccgcacatattctaatgg

SEQ ID NO: 4472504 - DNA, 25 bp, Homo sapien
aactgattagttgtaagaacatacc

SEQ ID NO: 4472505 - DNA, 25 bp, Homo sapien
taaaatgtgtgtaatcacgcctcct

SEQ ID NO: 4472506 - DNA, 25 bp, Homo sapien
tgtctgagtcagagtcaaccaaaga

SEQ ID NO: 4472507 - DNA, 25 bp, Homo sapien
taggctgctatcaaggccttacaga

SEQ ID NO: 4472508 - DNA, 25 bp, Homo sapien
tcatacatgcaaaactgctagcagg

SEQ ID NO: 4472509 - DNA, 25 bp, Homo sapien
accataagccatagaaccaccagca

SEQ ID NO: 4472510 - DNA, 25 bp, Homo sapien
accaccagcatagttatcttgggct

SEQ ID NO: 4472511 - DNA, 25 bp, Homo sapien
tatatcactatgggtatatgtagca

SEQ ID NO: 4472512 - DNA, 25 bp, Homo sapien
caccagcatagttatcttgggctgc

SEQ ID NO: 4472513 - DNA, 25 bp, Homo sapien
atcaaagggtgtagatactttctgt

SEQ ID NO: 4472514 - DNA, 25 bp, Homo sapien
aagggtgtagatactttctgttggt

SEQ ID NO: 4472515 - DNA, 25 bp, Homo sapien
aggtgaatgtaacttgcagcacaga

SEQ ID NO: 4472516 - DNA, 25 bp, Homo sapien
gaatgtaacttgcagcacagaaaca

SEQ ID NO: 4472517 - DNA, 25 bp, Homo sapien
tcactgtagctgcaatctctcgggc

SEQ ID NO: 4472518 - DNA, 25 bp, Homo sapien
gctcactgtagctgcaatctctcgg

SEQ ID NO: 4472519 - DNA, 25 bp, Homo sapien
ctcactgtagctgcaatctctcggg

SEQ ID NO: 4472520 - DNA, 25 bp, Homo sapien
ttactatgagaaaccaaagtgtgta

SEQ ID NO: 4472521 - DNA, 25 bp, Homo sapien
atgagaaaccaaagtgtgtaacaaa

SEQ ID NO: 4472522 - DNA, 25 bp, Homo sapien
ctatgagaaaccaaagtgtgtaaca

SEQ ID NO: 4472523 - DNA, 25 bp, Homo sapien
actatgagaaaccaaagtgtgtaac

SEQ ID NO: 4472524 - DNA, 25 bp, Homo sapien
tgtactaccggcatttcataggata

SEQ ID NO: 4472525 - DNA, 25 bp, Homo sapien
tgtggctcccttggtatctcagtaa

SEQ ID NO: 4472526 - DNA, 25 bp, Homo sapien
gagtatgctgtacccaaaatgcttg

SEQ ID NO: 4472527 - DNA, 25 bp, Homo sapien
taacagttcagcaccccagatctaa

SEQ ID NO: 4472528 - DNA, 25 bp, Homo sapien
gccaagcaacgcatattcagaccat

SEQ ID NO: 4472529 - DNA, 25 bp, Homo sapien
caagcaacgcatattcagaccatac

SEQ ID NO: 4472530 - DNA, 25 bp, Homo sapien
acccgagctgccaagcaacgcatat

SEQ ID NO: 4472531 - DNA, 25 bp, Homo sapien
gagctgccaagcaacgcatattcag

SEQ ID NO: 4472532 - DNA, 25 bp, Homo sapien
gggctctctgtgcatagactttgga

SEQ ID NO: 4472533 - DNA, 25 bp, Homo sapien
tgaagccactactcgaacgccgtgg

SEQ ID NO: 4472534 - DNA, 25 bp, Homo sapien
tatagttgttactctcagatgctgc

SEQ ID NO: 4472535 - DNA, 25 bp, Homo sapien
gaccaaagtgaagagtgcgcagata

SEQ ID NO: 4472536 - DNA, 25 bp, Homo sapien
cagccctttggcacagtccagtcat

SEQ ID NO: 4472537 - DNA, 25 bp, Homo sapien
tatcagccacattcgccataaagca

SEQ ID NO: 4472538 - DNA, 25 bp, Homo sapien
tccccattgtgtagataatggcaca

SEQ ID NO: 4472539 - DNA, 25 bp, Homo sapien
gatagaaatagccttgaggtcccca

SEQ ID NO: 4472540 - DNA, 25 bp, Homo sapien
tacttaatcttctgaagctggtagg

SEQ ID NO: 4472541 - DNA, 25 bp, Homo sapien
gatatgtaggctttgcaaggttaaa

SEQ ID NO: 4472542 - DNA, 25 bp, Homo sapien
ggtttgcccaatgccaaaagctaat

SEQ ID NO: 4472543 - DNA, 25 bp, Homo sapien
caggtttcccggactcaggttcaga

SEQ ID NO: 4472544 - DNA, 25 bp, Homo sapien
caggtccctggtaactgtgctccat

SEQ ID NO: 4472545 - DNA, 25 bp, Homo sapien
cattattttggttggcttgacagct

SEQ ID NO: 4472546 - DNA, 25 bp, Homo sapien
gttgcaaggatacaccttcactggt

SEQ ID NO: 4472547 - DNA, 25 bp, Homo sapien
tcttttgtgtttcccagttgcaagg

SEQ ID NO: 4472548 - DNA, 25 bp, Homo sapien
gatggtaatgttgtcgaggaatccc

SEQ ID NO: 4472549 - DNA, 25 bp, Homo sapien
gtaatgttgtcgaggaatcccttac

SEQ ID NO: 4472550 - DNA, 25 bp, Homo sapien
tggtaatgttgtcgaggaatccctt

SEQ ID NO: 4472551 - DNA, 25 bp, Homo sapien
tagagatggtaatgttgtcgaggaa

SEQ ID NO: 4472552 - DNA, 25 bp, Homo sapien
ctttctcatcctggttccttactag

SEQ ID NO: 4472553 - DNA, 25 bp, Homo sapien
cataattggccagccacctttctca

SEQ ID NO: 4472554 - DNA, 25 bp, Homo sapien
gggtcaccataattggccagccacc

SEQ ID NO: 4472555 - DNA, 25 bp, Homo sapien
ttactagccaatcactagcagcaaa

SEQ ID NO: 4472556 - DNA, 25 bp, Homo sapien
tgactaatgtagaaatggcttgccc

SEQ ID NO: 4472557 - DNA, 25 bp, Homo sapien
ctgaattgaggaatatatggtcttt

SEQ ID NO: 4472558 - DNA, 25 bp, Homo sapien
gcagaataccatcctggctctaaag

SEQ ID NO: 4472559 - DNA, 25 bp, Homo sapien
tggtcttttgttaacagataggccc

SEQ ID NO: 4472560 - DNA, 25 bp, Homo sapien
gaggtcatagatggttcctgagcca

SEQ ID NO: 4472561 - DNA, 25 bp, Homo sapien
tggtatgatagtcccagcgagccag

SEQ ID NO: 4472562 - DNA, 25 bp, Homo sapien
agccaggttaggagcgatgccaagc

SEQ ID NO: 4472563 - DNA, 25 bp, Homo sapien
tgccaagcatgaagtgacggaggtc

SEQ ID NO: 4472564 - DNA, 25 bp, Homo sapien
tgtgtttgtcagactcggtcccctg

SEQ ID NO: 4472565 - DNA, 25 bp, Homo sapien
cgaaactgtatagggtgatgggcaa

SEQ ID NO: 4472566 - DNA, 25 bp, Homo sapien
gcagactatcatacttcacaggcag

SEQ ID NO: 4472567 - DNA, 25 bp, Homo sapien
tttattttgaacatcggcactggga

SEQ ID NO: 4472568 - DNA, 25 bp, Homo sapien
gatttggatctcaactaatttctac

SEQ ID NO: 4472569 - DNA, 25 bp, Homo sapien
caaaggaccaaggaatccaccacca

SEQ ID NO: 4472570 - DNA, 25 bp, Homo sapien
aagcctgcagaatctgttcagtcaa

SEQ ID NO: 4472571 - DNA, 25 bp, Homo sapien
atctgttcagtcaaataactccagc

SEQ ID NO: 4472572 - DNA, 25 bp, Homo sapien
ttattgtcttttacttttctacata

SEQ ID NO: 4472573 - DNA, 25 bp, Homo sapien
agagtatctgtaattcttgcccacc

SEQ ID NO: 4472574 - DNA, 25 bp, Homo sapien
gtttgtcacttgagcttatgtacag

SEQ ID NO: 4472575 - DNA, 25 bp, Homo sapien
atgggctgcaagtacacctgcaaat

SEQ ID NO: 4472576 - DNA, 25 bp, Homo sapien
aataagtgccagttttgcattttca

SEQ ID NO: 4472577 - DNA, 25 bp, Homo sapien
gcccaccaaacaagcctgcagaatc

SEQ ID NO: 4472578 - DNA, 25 bp, Homo sapien
ataactccagctcatttctgaattt

SEQ ID NO: 4472579 - DNA, 25 bp, Homo sapien
gtagaaattagttgagatccaaatc

SEQ ID NO: 4472580 - DNA, 25 bp, Homo sapien
gattctgcaggcttgtttggtgggc

SEQ ID NO: 4472581 - DNA, 25 bp, Homo sapien
gctggagttatttgactgaacagat

SEQ ID NO: 4472582 - DNA, 25 bp, Homo sapien
ggtgggcaagaattacagatactct

SEQ ID NO: 4472583 - DNA, 25 bp, Homo sapien
ctgtacataagctcaagtgacaaac

SEQ ID NO: 4472584 - DNA, 25 bp, Homo sapien
tatgtagaaaagtaaaagacaataa

SEQ ID NO: 4472585 - DNA, 25 bp, Homo sapien
ttgactgaacagattctgcaggctt

SEQ ID NO: 4472586 - DNA, 25 bp, Homo sapien
atttgcaggtgtacttgcagcccat

SEQ ID NO: 4472587 - DNA, 25 bp, Homo sapien
aaattcagaaatgagctggagttat

SEQ ID NO: 4472588 - DNA, 25 bp, Homo sapien
tgaaaatgcaaaactggcacttatt

SEQ ID NO: 4472589 - DNA, 25 bp, Homo sapien
tggtggtggattccttggtcctttg

SEQ ID NO: 4472590 - DNA, 25 bp, Homo sapien
tctggggctgagatctgcctccctg

SEQ ID NO: 4472591 - DNA, 25 bp, Homo sapien
agctctggggctgagatctgcctcc

SEQ ID NO: 4472592 - DNA, 25 bp, Homo sapien
ctggcgaatgtaggagagctctggg

SEQ ID NO: 4472593 - DNA, 25 bp, Homo sapien
ctggggctgagatctgcctccctgg

SEQ ID NO: 4472594 - DNA, 25 bp, Homo sapien
agaggaggtgcccactcggccagtc

SEQ ID NO: 4472595 - DNA, 25 bp, Homo sapien
cactcggccagtctcttagggccat

SEQ ID NO: 4472596 - DNA, 25 bp, Homo sapien
ctgctccgccactgagaggaggtgc

SEQ ID NO: 4472597 - DNA, 25 bp, Homo sapien
tgctccgccactgagaggaggtgcc

SEQ ID NO: 4472598 - DNA, 25 bp, Homo sapien
aacatgtagacaggcctttgggtgg

SEQ ID NO: 4472599 - DNA, 25 bp, Homo sapien
taaataagacaaccaggcaacatgt

SEQ ID NO: 4472600 - DNA, 25 bp, Homo sapien
ttagccatcacaccccacaaaaaat

SEQ ID NO: 4472601 - DNA, 25 bp, Homo sapien
gagctcagacataatgagacagaga

SEQ ID NO: 4472602 - DNA, 25 bp, Homo sapien
cggagtcaccaagatgtgaagaggc

SEQ ID NO: 4472603 - DNA, 25 bp, Homo sapien
gaagaggcaaagtcactggctccac

SEQ ID NO: 4472604 - DNA, 25 bp, Homo sapien
cacgaagcggcttttctcacagcta

SEQ ID NO: 4472605 - DNA, 25 bp, Homo sapien
agcgcgaatcgcagggtggcactca

SEQ ID NO: 4472606 - DNA, 25 bp, Homo sapien
tgattccccattagtcctcactcca

SEQ ID NO: 4472607 - DNA, 25 bp, Homo sapien
aaatggaagcagtgccattggaaga

SEQ ID NO: 4472608 - DNA, 25 bp, Homo sapien
acagctggacgtccttgattcccca

SEQ ID NO: 4472609 - DNA, 25 bp, Homo sapien
tcctttgggaatgtccagacttccc

SEQ ID NO: 4472610 - DNA, 25 bp, Homo sapien
ggtgacgtgttaaatgctggttctg

SEQ ID NO: 4472611 - DNA, 25 bp, Homo sapien
ttcttcattccaacaagctcccggg

SEQ ID NO: 4472612 - DNA, 25 bp, Homo sapien
ctgggatcctggtgacgtgttaaat

SEQ ID NO: 4472613 - DNA, 25 bp, Homo sapien
tgattcagcaggtttcgggtggagc

SEQ ID NO: 4472614 - DNA, 25 bp, Homo sapien
tccccaagacggtagtccggctgca

SEQ ID NO: 4472615 - DNA, 25 bp, Homo sapien
attccccaagacggtagtccggctg

SEQ ID NO: 4472616 - DNA, 25 bp, Homo sapien
ttccccaagacggtagtccggctgc

SEQ ID NO: 4472617 - DNA, 25 bp, Homo sapien
tgacataacattgttcgcaaaatga

SEQ ID NO: 4472618 - DNA, 25 bp, Homo sapien
ctgtgacataacattgttcgcaaaa

SEQ ID NO: 4472619 - DNA, 25 bp, Homo sapien
gacataacattgttcgcaaaatgag

SEQ ID NO: 4472620 - DNA, 25 bp, Homo sapien
gtgacataacattgttcgcaaaatg

SEQ ID NO: 4472621 - DNA, 25 bp, Homo sapien
acagttgagccaaggacagccaagt

SEQ ID NO: 4472622 - DNA, 25 bp, Homo sapien
ggactcctccttactcacagttgag

SEQ ID NO: 4472623 - DNA, 25 bp, Homo sapien
agttgagccaaggacagccaagtga

SEQ ID NO: 4472624 - DNA, 25 bp, Homo sapien
tcatttttcattccgcaggactcct

SEQ ID NO: 4472625 - DNA, 25 bp, Homo sapien
tctgccgatggcaaagtgttgtact

SEQ ID NO: 4472626 - DNA, 25 bp, Homo sapien
tgcctcccggcactgcttagaaatc

SEQ ID NO: 4472627 - DNA, 25 bp, Homo sapien
gcatttgaaacaagatgacccactt

SEQ ID NO: 4472628 - DNA, 25 bp, Homo sapien
tcataagtcaaaagcgatcctgcct

SEQ ID NO: 4472629 - DNA, 25 bp, Homo sapien
gagcatctgctctgtacaggccgtg

SEQ ID NO: 4472630 - DNA, 25 bp, Homo sapien
gccgtgtactaagtgctagagagat

SEQ ID NO: 4472631 - DNA, 25 bp, Homo sapien
ccacagatcctgtgagtatgttacc

SEQ ID NO: 4472632 - DNA, 25 bp, Homo sapien
gagatgttcacgtcctgatccacag

SEQ ID NO: 4472633 - DNA, 25 bp, Homo sapien
ggtcaccacaataaccctgagaggg

SEQ ID NO: 4472634 - DNA, 25 bp, Homo sapien
tccctgggctcgtggcagcatcaca

SEQ ID NO: 4472635 - DNA, 25 bp, Homo sapien
ccaaatgcattctgtggtcaccaca

SEQ ID NO: 4472636 - DNA, 25 bp, Homo sapien
ttgaattggcttatcactctgcagt

SEQ ID NO: 4472637 - DNA, 25 bp, Homo sapien
gaccagacactcctcccgggctgcg

SEQ ID NO: 4472638 - DNA, 25 bp, Homo sapien
cagcacaggcaggccggagaccaga

SEQ ID NO: 4472639 - DNA, 25 bp, Homo sapien
ggcaggccggagaccagacactcct

SEQ ID NO: 4472640 - DNA, 25 bp, Homo sapien
acaggcaggccggagaccagacact

SEQ ID NO: 4472641 - DNA, 25 bp, Homo sapien
tgcggtgaaagtggccgagccgcgc

SEQ ID NO: 4472642 - DNA, 25 bp, Homo sapien
aggctcaacgggctccacgggcgca

SEQ ID NO: 4472643 - DNA, 25 bp, Homo sapien
gccctcgattgcagcagagagcctt

SEQ ID NO: 4472644 - DNA, 25 bp, Homo sapien
caccggccccgcgtgcggtgaaagt

SEQ ID NO: 4472645 - DNA, 25 bp, Homo sapien
ggaggccaggctaatacacatgaga

SEQ ID NO: 4472646 - DNA, 25 bp, Homo sapien
ttacagtttgatttgcagcccacag

SEQ ID NO: 4472647 - DNA, 25 bp, Homo sapien
gctgagaaaggacttaccgccaacc

SEQ ID NO: 4472648 - DNA, 25 bp, Homo sapien
ccccagagggatgcataagaattct

SEQ ID NO: 4472649 - DNA, 25 bp, Homo sapien
ggaactcaccaatcgcctcatgtgg

SEQ ID NO: 4472650 - DNA, 25 bp, Homo sapien
ccctttgggtaactctggaggcagc

SEQ ID NO: 4472651 - DNA, 25 bp, Homo sapien
taaggagtgaaatctataggccatc

SEQ ID NO: 4472652 - DNA, 25 bp, Homo sapien
ctgccttgggagagcaaccctggga

SEQ ID NO: 4472653 - DNA, 25 bp, Homo sapien
tctccaaggagccaacaccatgtct

SEQ ID NO: 4472654 - DNA, 25 bp, Homo sapien
ttttctccaaggagccaacaccatg

SEQ ID NO: 4472655 - DNA, 25 bp, Homo sapien
tttctccaaggagccaacaccatgt

SEQ ID NO: 4472656 - DNA, 25 bp, Homo sapien
ccttttctccaaggagccaacacca

SEQ ID NO: 4472657 - DNA, 25 bp, Homo sapien
tcctgcataatttcaaactgatgtc

SEQ ID NO: 4472658 - DNA, 25 bp, Homo sapien
ctcactgccatcctgcataatttca

SEQ ID NO: 4472659 - DNA, 25 bp, Homo sapien
tgccatcctgcataatttcaaactg

SEQ ID NO: 4472660 - DNA, 25 bp, Homo sapien
aactgatgtctagagtcacccttac

SEQ ID NO: 4472661 - DNA, 25 bp, Homo sapien
taagtccatagcatgctgggggtgg

SEQ ID NO: 4472662 - DNA, 25 bp, Homo sapien
cttaagtccatagcatgctgggggt

SEQ ID NO: 4472663 - DNA, 25 bp, Homo sapien
ccttaagtccatagcatgctggggg

SEQ ID NO: 4472664 - DNA, 25 bp, Homo sapien
cccttaagtccatagcatgctgggg

SEQ ID NO: 4472665 - DNA, 25 bp, Homo sapien
ttctcaagtcaaatgcccctggaaa

SEQ ID NO: 4472666 - DNA, 25 bp, Homo sapien
tctcaagtcaaatgcccctggaaag

SEQ ID NO: 4472667 - DNA, 25 bp, Homo sapien
ggaccacacagcgagctgatcgcgg

SEQ ID NO: 4472668 - DNA, 25 bp, Homo sapien
acagcgagctgatcgcgggtccaga

SEQ ID NO: 4472669 - DNA, 25 bp, Homo sapien
ccacacagcgagctgatcgcgggtc

SEQ ID NO: 4472670 - DNA, 25 bp, Homo sapien
agctgatcgcgggtccagaggccat

SEQ ID NO: 4472671 - DNA, 25 bp, Homo sapien
ttaaggtaatcctgagggtgtgaag

SEQ ID NO: 4472672 - DNA, 25 bp, Homo sapien
aagactttatcatccatggggggga

SEQ ID NO: 4472673 - DNA, 25 bp, Homo sapien
tatcatccatgggggggaatggtcc

SEQ ID NO: 4472674 - DNA, 25 bp, Homo sapien
tttaaggtaatcctgagggtgtgaa

SEQ ID NO: 4472675 - DNA, 25 bp, Homo sapien
gacaatgcggggtgttcccagcaca

SEQ ID NO: 4472676 - DNA, 25 bp, Homo sapien
tccctttgaaagtcaaatctgaggc

SEQ ID NO: 4472677 - DNA, 25 bp, Homo sapien
cctgcaagagcacggctggaattca

SEQ ID NO: 4472678 - DNA, 25 bp, Homo sapien
tatcaggagagctgttttccctttg

SEQ ID NO: 4472679 - DNA, 25 bp, Homo sapien
aatgcagtggtggattaagagcccc

SEQ ID NO: 4472680 - DNA, 25 bp, Homo sapien
aagtgtaagccccatgtgtaagccc

SEQ ID NO: 4472681 - DNA, 25 bp, Homo sapien
ttctaacttatgaccagggacatgc

SEQ ID NO: 4472682 - DNA, 25 bp, Homo sapien
tgtaagcccttgatgcatagccggg

SEQ ID NO: 4472683 - DNA, 25 bp, Homo sapien
aattacccaggcctagtggcgtgtg

SEQ ID NO: 4472684 - DNA, 25 bp, Homo sapien
tttgaaacaccactattgagcactc

SEQ ID NO: 4472685 - DNA, 25 bp, Homo sapien
taaaccccttgtggactgggtgcag

SEQ ID NO: 4472686 - DNA, 25 bp, Homo sapien
gagcactcaatctattctaaacccc

SEQ ID NO: 4472687 - DNA, 25 bp, Homo sapien
cagactcttggcctagtggacagag

SEQ ID NO: 4472688 - DNA, 25 bp, Homo sapien
tatcaagcactcactgtgcgccagc

SEQ ID NO: 4472689 - DNA, 25 bp, Homo sapien
ctgctagtagacctatatcaagcac

SEQ ID NO: 4472690 - DNA, 25 bp, Homo sapien
gatccaggcagactcttggcctagt

SEQ ID NO: 4472691 - DNA, 25 bp, Homo sapien
caccataggtgaaggtggaggctgg

SEQ ID NO: 4472692 - DNA, 25 bp, Homo sapien
ccataggtgaaggtggaggctggtg

SEQ ID NO: 4472693 - DNA, 25 bp, Homo sapien
gtgggagcactctcactgggagcat

SEQ ID NO: 4472694 - DNA, 25 bp, Homo sapien
tcactgggagcatggcagaggccat

SEQ ID NO: 4472695 - DNA, 25 bp, Homo sapien
ccatttccctgagccgaaggcataa

SEQ ID NO: 4472696 - DNA, 25 bp, Homo sapien
caggtgagccttactctatgtgccc

SEQ ID NO: 4472697 - DNA, 25 bp, Homo sapien
gcatttgcttgtacattcacctgag

SEQ ID NO: 4472698 - DNA, 25 bp, Homo sapien
gattaattgtgtcagccagcccatg

SEQ ID NO: 4472699 - DNA, 25 bp, Homo sapien
caacagaactggtgggtaacttacg

SEQ ID NO: 4472700 - DNA, 25 bp, Homo sapien
taacaacagggtttgcccacaatga

SEQ ID NO: 4472701 - DNA, 25 bp, Homo sapien
tagaaggctgttcattgtggctctc

SEQ ID NO: 4472702 - DNA, 25 bp, Homo sapien
gatattccctagcacattgcagaga

SEQ ID NO: 4472703 - DNA, 25 bp, Homo sapien
tggagccgtggcaaatgggcactcc

SEQ ID NO: 4472704 - DNA, 25 bp, Homo sapien
gtggcaaatgggcactccctgtgtg

SEQ ID NO: 4472705 - DNA, 25 bp, Homo sapien
aatgggcactccctgtgtgaggatg

SEQ ID NO: 4472706 - DNA, 25 bp, Homo sapien
gccgtggcaaatgggcactccctgt

SEQ ID NO: 4472707 - DNA, 25 bp, Homo sapien
gataagcgttcacccagaaccttag

SEQ ID NO: 4472708 - DNA, 25 bp, Homo sapien
gtgatgataagcgttcacccagaac

SEQ ID NO: 4472709 - DNA, 25 bp, Homo sapien
tagaggtgatgataagcgttcaccc

SEQ ID NO: 4472710 - DNA, 25 bp, Homo sapien
tgatgtggtagaggtgatgataagc

SEQ ID NO: 4472711 - DNA, 25 bp, Homo sapien
caaatccttggtaaaatgcccagtt

SEQ ID NO: 4472712 - DNA, 25 bp, Homo sapien
tcaggaaccttgtacaggaactctg

SEQ ID NO: 4472713 - DNA, 25 bp, Homo sapien
gtcaggaaccttgtacaggaactct

SEQ ID NO: 4472714 - DNA, 25 bp, Homo sapien
ctctaaaagtcaactttcatcttta

SEQ ID NO: 4472715 - DNA, 25 bp, Homo sapien
ggcttctttagccagtgctgcaagg

SEQ ID NO: 4472716 - DNA, 25 bp, Homo sapien
tctgaatgcctcctgcatgtggtag

SEQ ID NO: 4472717 - DNA, 25 bp, Homo sapien
tgaatgcctcctgcatgtggtagga

SEQ ID NO: 4472718 - DNA, 25 bp, Homo sapien
tttagccagtgctgcaaggtgcagg

SEQ ID NO: 4472719 - DNA, 25 bp, Homo sapien
cctaggcctcgtctgccccttcagg

SEQ ID NO: 4472720 - DNA, 25 bp, Homo sapien
agctaactccctaggcctcgtctgc

SEQ ID NO: 4472721 - DNA, 25 bp, Homo sapien
acagctaactccctaggcctcgtct

SEQ ID NO: 4472722 - DNA, 25 bp, Homo sapien
taggcctcgtctgccccttcaggaa

SEQ ID NO: 4472723 - DNA, 25 bp, Homo sapien
cagagttgggaatttaccatagtaa

SEQ ID NO: 4472724 - DNA, 25 bp, Homo sapien
gacccagagaccttgcttgtatgta

SEQ ID NO: 4472725 - DNA, 25 bp, Homo sapien
cttggatttagcaaagaagagcaga

SEQ ID NO: 4472726 - DNA, 25 bp, Homo sapien
tacccctatcatcactgggccaaag

SEQ ID NO: 4472727 - DNA, 25 bp, Homo sapien
aaggccagtaggtgacagcgcctcc

SEQ ID NO: 4472728 - DNA, 25 bp, Homo sapien
ctgttaccaggcctcactcaaagct

SEQ ID NO: 4472729 - DNA, 25 bp, Homo sapien
tcactcaaagctctaacatggcctg

SEQ ID NO: 4472730 - DNA, 25 bp, Homo sapien
gcaaggccagtaggtgacagcgcct

SEQ ID NO: 4472731 - DNA, 25 bp, Homo sapien
gggtatctggtctatgctaaacagc

SEQ ID NO: 4472732 - DNA, 25 bp, Homo sapien
ctggggtatctggtctatgctaaac

SEQ ID NO: 4472733 - DNA, 25 bp, Homo sapien
tggggtatctggtctatgctaaaca

SEQ ID NO: 4472734 - DNA, 25 bp, Homo sapien
ggtatctggtctatgctaaacagcc

SEQ ID NO: 4472735 - DNA, 25 bp, Homo sapien
cccagccctgcctagtttctgagat

SEQ ID NO: 4472736 - DNA, 25 bp, Homo sapien
gatcaggcaagataggtgtgttcag

SEQ ID NO: 4472737 - DNA, 25 bp, Homo sapien
gagatcaggcaagataggtgtgttc

SEQ ID NO: 4472738 - DNA, 25 bp, Homo sapien
caggcaagataggtgtgttcagggt

SEQ ID NO: 4472739 - DNA, 25 bp, Homo sapien
tgctgtctgtctgagctggcaagcc

SEQ ID NO: 4472740 - DNA, 25 bp, Homo sapien
gatgcccccggtgccaggatatatt

SEQ ID NO: 4472741 - DNA, 25 bp, Homo sapien
caaggtgcttcataaagggcttttg

SEQ ID NO: 4472742 - DNA, 25 bp, Homo sapien
gtctgagctggcaagccctgcatgt

SEQ ID NO: 4472743 - DNA, 25 bp, Homo sapien
agaagggcagcaagtgagtccaaat

SEQ ID NO: 4472744 - DNA, 25 bp, Homo sapien
ggcagaactctgtggatggcggtag

SEQ ID NO: 4472745 - DNA, 25 bp, Homo sapien
atggcggtagccgaacaggatgcct

SEQ ID NO: 4472746 - DNA, 25 bp, Homo sapien
gccgaacaggatgccttgctcatgg

SEQ ID NO: 4472747 - DNA, 25 bp, Homo sapien
acaggccggtcgagggggccagaag

SEQ ID NO: 4472748 - DNA, 25 bp, Homo sapien
agacaggccggtcgagggggccaga

SEQ ID NO: 4472749 - DNA, 25 bp, Homo sapien
caggccggtcgagggggccagaagg

SEQ ID NO: 4472750 - DNA, 25 bp, Homo sapien
ggagacaggccggtcgagggggcca

SEQ ID NO: 4472751 - DNA, 25 bp, Homo sapien
ccggagatgaaggtaaatgctatca

SEQ ID NO: 4472752 - DNA, 25 bp, Homo sapien
cttaccccagtccatgccttaaagg

SEQ ID NO: 4472753 - DNA, 25 bp, Homo sapien
tggaaagtctccaagaccggagatg

SEQ ID NO: 4472754 - DNA, 25 bp, Homo sapien
atcatatcaggcaccggagcaggga

SEQ ID NO: 4472755 - DNA, 25 bp, Homo sapien
tcctccatgtagtttgtctatgtcc

SEQ ID NO: 4472756 - DNA, 25 bp, Homo sapien
tgtggcgttaccaccatccccgtgg

SEQ ID NO: 4472757 - DNA, 25 bp, Homo sapien
cttcagccattcctcgcaggatcta

SEQ ID NO: 4472758 - DNA, 25 bp, Homo sapien
ggatctaaatgtggcgttaccacca

SEQ ID NO: 4472759 - DNA, 25 bp, Homo sapien
gaatctatctccatttgattggcct

SEQ ID NO: 4472760 - DNA, 25 bp, Homo sapien
ctccatttgattggccttagttccc

SEQ ID NO: 4472761 - DNA, 25 bp, Homo sapien
tctgtcctcctggaatctatctcca

SEQ ID NO: 4472762 - DNA, 25 bp, Homo sapien
gattggccttagttccctccaccag

SEQ ID NO: 4472763 - DNA, 25 bp, Homo sapien
acgatgaacacagagggccagtcac

SEQ ID NO: 4472764 - DNA, 25 bp, Homo sapien
tccacgatgaacacagagggccagt

SEQ ID NO: 4472765 - DNA, 25 bp, Homo sapien
cacgatgaacacagagggccagtca

SEQ ID NO: 4472766 - DNA, 25 bp, Homo sapien
gatgaacacagagggccagtcaccc

SEQ ID NO: 4472767 - DNA, 25 bp, Homo sapien
gcacagaggcccactcaccctccac

SEQ ID NO: 4472768 - DNA, 25 bp, Homo sapien
acagaggcccactcaccctccacca

SEQ ID NO: 4472769 - DNA, 25 bp, Homo sapien
cagaggcccactcaccctccaccat

SEQ ID NO: 4472770 - DNA, 25 bp, Homo sapien
gagcacagaggcccactcaccctcc

SEQ ID NO: 4472771 - DNA, 25 bp, Homo sapien
ccacgatgaacacagagggccactc

SEQ ID NO: 4472772 - DNA, 25 bp, Homo sapien
cacgatgaacacagagggccactca

SEQ ID NO: 4472773 - DNA, 25 bp, Homo sapien
tccacgatgaacacagagggccact

SEQ ID NO: 4472774 - DNA, 25 bp, Homo sapien
accctccaccacgaacacagaggcc

SEQ ID NO: 4472775 - DNA, 25 bp, Homo sapien
cctccaccacgaacacagaggccca

SEQ ID NO: 4472776 - DNA, 25 bp, Homo sapien
cactcaccctccaccacgaacacag

SEQ ID NO: 4472777 - DNA, 25 bp, Homo sapien
ggcccactcaccctccaccacgaac

SEQ ID NO: 4472778 - DNA, 25 bp, Homo sapien
ccaccatgaacacggagggcccgct

SEQ ID NO: 4472779 - DNA, 25 bp, Homo sapien
ttccaccatgaacacggagggcccg

SEQ ID NO: 4472780 - DNA, 25 bp, Homo sapien
cttccaccatgaacacggagggccc

SEQ ID NO: 4472781 - DNA, 25 bp, Homo sapien
accatgaacacggagggcccgctca

SEQ ID NO: 4472782 - DNA, 25 bp, Homo sapien
catgtacacaagcatgggccaggag

SEQ ID NO: 4472783 - DNA, 25 bp, Homo sapien
ggttgacggcaccatagtccaggaa

SEQ ID NO: 4472784 - DNA, 25 bp, Homo sapien
tgaaggtgtgcgcacagctggacac

SEQ ID NO: 4472785 - DNA, 25 bp, Homo sapien
gccgggcattcttggacatagagct

SEQ ID NO: 4472786 - DNA, 25 bp, Homo sapien
aaagtggtgcacatgagcgcatccg

SEQ ID NO: 4472787 - DNA, 25 bp, Homo sapien
cgtgtatgcagagtaggcaatggct

SEQ ID NO: 4472788 - DNA, 25 bp, Homo sapien
gatggtgttcagtacagccagggcc

SEQ ID NO: 4472789 - DNA, 25 bp, Homo sapien
cagccagggccacgtagtagtcatg

SEQ ID NO: 4472790 - DNA, 25 bp, Homo sapien
cagactttcactcccatggaaggca

SEQ ID NO: 4472791 - DNA, 25 bp, Homo sapien
ctaaatttcaaacgccagagccaca

SEQ ID NO: 4472792 - DNA, 25 bp, Homo sapien
caaggaccaggtccaagagtgtcca

SEQ ID NO: 4472793 - DNA, 25 bp, Homo sapien
gcagggactcctagaaacagacttt

SEQ ID NO: 4472794 - DNA, 25 bp, Homo sapien
tctaagaatttgaattatgagctca

SEQ ID NO: 4472795 - DNA, 25 bp, Homo sapien
gttctaagaatttgaattatgagct

SEQ ID NO: 4472796 - DNA, 25 bp, Homo sapien
agaatttgaattatgagctcatggg

SEQ ID NO: 4472797 - DNA, 25 bp, Homo sapien
taagaatttgaattatgagctcatg

SEQ ID NO: 4472798 - DNA, 25 bp, Homo sapien
aagcaaaggcgaggacacgaatcac

SEQ ID NO: 4472799 - DNA, 25 bp, Homo sapien
acacgaatcaccttacagagtctgg

SEQ ID NO: 4472800 - DNA, 25 bp, Homo sapien
caggtgtacggataagcaaaggcga

SEQ ID NO: 4472801 - DNA, 25 bp, Homo sapien
ggagtcccaggtgtacggataagca

SEQ ID NO: 4472802 - DNA, 25 bp, Homo sapien
tgtgcagagtacaagaaagaggcca

SEQ ID NO: 4472803 - DNA, 25 bp, Homo sapien
tcatgtgcttctggtggtacgaggt

SEQ ID NO: 4472804 - DNA, 25 bp, Homo sapien
tagtcaaagcgtccaggggctaggc

SEQ ID NO: 4472805 - DNA, 25 bp, Homo sapien
gcgttctggcagatgtgcagagtac

SEQ ID NO: 4472806 - DNA, 25 bp, Homo sapien
tcagagtcttgtccagaagtatggc

SEQ ID NO: 4472807 - DNA, 25 bp, Homo sapien
gatgatgcacagaagtatggctcca

SEQ ID NO: 4472808 - DNA, 25 bp, Homo sapien
gtggccaggatcacacacacgtgaa

SEQ ID NO: 4472809 - DNA, 25 bp, Homo sapien
tgggaatccgatacagagcagctga

SEQ ID NO: 4472810 - DNA, 25 bp, Homo sapien
catgataagctgtaaccacctccgg

SEQ ID NO: 4472811 - DNA, 25 bp, Homo sapien
cattctccgaaagtggttgacaggc

SEQ ID NO: 4472812 - DNA, 25 bp, Homo sapien
gttgacaggccactacgagagctct

SEQ ID NO: 4472813 - DNA, 25 bp, Homo sapien
ggaatgttttgccagtccccaaggc

SEQ ID NO: 4472814 - DNA, 25 bp, Homo sapien
cactccagtgaggtcttcagctgac

SEQ ID NO: 4472815 - DNA, 25 bp, Homo sapien
gaggtacatcccattaggaatgtgc

SEQ ID NO: 4472816 - DNA, 25 bp, Homo sapien
aatgccatggtgagcaattgttacc

SEQ ID NO: 4472817 - DNA, 25 bp, Homo sapien
gaaccccttctcattttgcatagga

SEQ ID NO: 4472818 - DNA, 25 bp, Homo sapien
gcgaacaatcaattgagctaactca

SEQ ID NO: 4472819 - DNA, 25 bp, Homo sapien
aggagcttgatctataactgactgc

SEQ ID NO: 4472820 - DNA, 25 bp, Homo sapien
agcttgatctataactgactgcgaa

SEQ ID NO: 4472821 - DNA, 25 bp, Homo sapien
agtagaacaaggagcttgatctata

SEQ ID NO: 4472822 - DNA, 25 bp, Homo sapien
tcattcattcgttctttctttgttt

SEQ ID NO: 4472823 - DNA, 25 bp, Homo sapien
gcatccagccacagattcattcatt

SEQ ID NO: 4472824 - DNA, 25 bp, Homo sapien
caccacaaccagctagttttaactt

SEQ ID NO: 4472825 - DNA, 25 bp, Homo sapien
agactggtcctgaattcttgggccc

SEQ ID NO: 4472826 - DNA, 25 bp, Homo sapien
ttgttgactagaaaatcagaggccg

SEQ ID NO: 4472827 - DNA, 25 bp, Homo sapien
gaagtgttgttgtaccgtgttaata

SEQ ID NO: 4472828 - DNA, 25 bp, Homo sapien
gaaaaccagacattagtgtaagttg

SEQ ID NO: 4472829 - DNA, 25 bp, Homo sapien
cagaggccgaaattcaaataatatg

SEQ ID NO: 4472830 - DNA, 25 bp, Homo sapien
ctagaacttcgcggctaaggcgcgg

SEQ ID NO: 4472831 - DNA, 25 bp, Homo sapien
aagccggcggcgacgctaagagccc

SEQ ID NO: 4472832 - DNA, 25 bp, Homo sapien
ctaaggcgcggtgctctgcgaagcc

SEQ ID NO: 4472833 - DNA, 25 bp, Homo sapien
cgcctggcgcatttcaaacgggcca

SEQ ID NO: 4472834 - DNA, 25 bp, Homo sapien
cccaaacgcgcatgcgggacggctg

SEQ ID NO: 4472835 - DNA, 25 bp, Homo sapien
gggacgttaggaccggcagcaagaa

SEQ ID NO: 4472836 - DNA, 25 bp, Homo sapien
ggacggctggctggcgaagactgcg

SEQ ID NO: 4472837 - DNA, 25 bp, Homo sapien
acgccgcccaaacgcgcatgcggga

SEQ ID NO: 4472838 - DNA, 25 bp, Homo sapien
gcggcctgagtggagacgcctgccc

SEQ ID NO: 4472839 - DNA, 25 bp, Homo sapien
ccgcgtacggccgcggcctgagtgg

SEQ ID NO: 4472840 - DNA, 25 bp, Homo sapien
ggccgcggcctgagtggagacgcct

SEQ ID NO: 4472841 - DNA, 25 bp, Homo sapien
tacggccgcggcctgagtggagacg

SEQ ID NO: 4472842 - DNA, 25 bp, Homo sapien
aggaaagcccagtgggcgcacccta

SEQ ID NO: 4472843 - DNA, 25 bp, Homo sapien
tgtagccctcaggagtatgaagctg

SEQ ID NO: 4472844 - DNA, 25 bp, Homo sapien
gcaacactcttgatcaggaaagccc

SEQ ID NO: 4472845 - DNA, 25 bp, Homo sapien
tccatttcggttgagtctgtagccc

SEQ ID NO: 4472846 - DNA, 25 bp, Homo sapien
catttttgccatgaatgaggtcatt

SEQ ID NO: 4472847 - DNA, 25 bp, Homo sapien
tgaccaagggattagccacaacatc

SEQ ID NO: 4472848 - DNA, 25 bp, Homo sapien
tgggtggtgtgagtgccaaatactt

SEQ ID NO: 4472849 - DNA, 25 bp, Homo sapien
catcaaagagttccttctgggtggt

SEQ ID NO: 4472850 - DNA, 25 bp, Homo sapien
taaagatcatgtccaaacaacgagg

SEQ ID NO: 4472851 - DNA, 25 bp, Homo sapien
tatcgtttagcttgaaatgacccta

SEQ ID NO: 4472852 - DNA, 25 bp, Homo sapien
tttccacttcccgtcacaccatatg

SEQ ID NO: 4472853 - DNA, 25 bp, Homo sapien
cctggagaaccagtcattgtgtgag

SEQ ID NO: 4472854 - DNA, 25 bp, Homo sapien
tttggattgggcatagcttctcttt

SEQ ID NO: 4472855 - DNA, 25 bp, Homo sapien
ttttctgacgttctaataaggcatc

SEQ ID NO: 4472856 - DNA, 25 bp, Homo sapien
aaggcatcaacctcacactgtatat

SEQ ID NO: 4472857 - DNA, 25 bp, Homo sapien
tattcctatcattagatttgaaaac

SEQ ID NO: 4472858 - DNA, 25 bp, Homo sapien
ttcaattgtatacgttataagtcca

SEQ ID NO: 4472859 - DNA, 25 bp, Homo sapien
attgtatacgttataagtccatttt

SEQ ID NO: 4472860 - DNA, 25 bp, Homo sapien
agttcaattgtatacgttataagtc

SEQ ID NO: 4472861 - DNA, 25 bp, Homo sapien
tgtatacgttataagtccattttaa

SEQ ID NO: 4472862 - DNA, 25 bp, Homo sapien
tgcaaactctggatctacttgtcgt

SEQ ID NO: 4472863 - DNA, 25 bp, Homo sapien
gcagaattcttgtacagttatcata

SEQ ID NO: 4472864 - DNA, 25 bp, Homo sapien
ttatgggatcaaacggcacctcttc

SEQ ID NO: 4472865 - DNA, 25 bp, Homo sapien
gacaaatacaccatagacactatct

SEQ ID NO: 4472866 - DNA, 25 bp, Homo sapien
tcatgggtgtgctgcaactgttcca

SEQ ID NO: 4472867 - DNA, 25 bp, Homo sapien
acaaaatctgtgttcctcatgggtg

SEQ ID NO: 4472868 - DNA, 25 bp, Homo sapien
aaaatctgtgttcctcatgggtgtg

SEQ ID NO: 4472869 - DNA, 25 bp, Homo sapien
tgttcctcatgggtgtgctgcaact

SEQ ID NO: 4472870 - DNA, 25 bp, Homo sapien
taacgtataatactccagagaaata

SEQ ID NO: 4472871 - DNA, 25 bp, Homo sapien
ggtatcttcatttaagactaggact

SEQ ID NO: 4472872 - DNA, 25 bp, Homo sapien
tcctaaattatgagatgctggtatc

SEQ ID NO: 4472873 - DNA, 25 bp, Homo sapien
gactaggactaaaacgccaagtgac

SEQ ID NO: 4472874 - DNA, 25 bp, Homo sapien
tcaacttctgtacatcctgcaacat

SEQ ID NO: 4472875 - DNA, 25 bp, Homo sapien
tatggttcttatcttcacgaagcaa

SEQ ID NO: 4472876 - DNA, 25 bp, Homo sapien
cacgaagcaatttagattgtggagg

SEQ ID NO: 4472877 - DNA, 25 bp, Homo sapien
gcctcctcagtagatttcacttcaa

SEQ ID NO: 4472878 - DNA, 25 bp, Homo sapien
tagcaactctaggtgatattcatca

SEQ ID NO: 4472879 - DNA, 25 bp, Homo sapien
aaaaattgccatcaaacttagtagc

SEQ ID NO: 4472880 - DNA, 25 bp, Homo sapien
tatacatgctttctaataagtcaaa

SEQ ID NO: 4472881 - DNA, 25 bp, Homo sapien
caaacttagtagcaactctaggtga

SEQ ID NO: 4472882 - DNA, 25 bp, Homo sapien
caaatgggtattagcaatacgtctc

SEQ ID NO: 4472883 - DNA, 25 bp, Homo sapien
taatgttgaacacgctatgggaacg

SEQ ID NO: 4472884 - DNA, 25 bp, Homo sapien
ggctggactcacgattcaaatgggt

SEQ ID NO: 4472885 - DNA, 25 bp, Homo sapien
ccaagggagcctgaactaatttaat

SEQ ID NO: 4472886 - DNA, 25 bp, Homo sapien
atggaaggctgacttataaccattt

SEQ ID NO: 4472887 - DNA, 25 bp, Homo sapien
tatggaaggctgacttataaccatt

SEQ ID NO: 4472888 - DNA, 25 bp, Homo sapien
tggaaggctgacttataaccatttt

SEQ ID NO: 4472889 - DNA, 25 bp, Homo sapien
agtctcgctctacctcccggctgga

SEQ ID NO: 4472890 - DNA, 25 bp, Homo sapien
ctcgctctacctcccggctggattg

SEQ ID NO: 4472891 - DNA, 25 bp, Homo sapien
tctcgctctacctcccggctggatt

SEQ ID NO: 4472892 - DNA, 25 bp, Homo sapien
gctctacctcccggctggattgcag

SEQ ID NO: 4472893 - DNA, 25 bp, Homo sapien
gctctggtccggttagttctttcac

SEQ ID NO: 4472894 - DNA, 25 bp, Homo sapien
ttcacttccagcaagatctaccaag

SEQ ID NO: 4472895 - DNA, 25 bp, Homo sapien
caactgacttatagtgatttgttct

SEQ ID NO: 4472896 - DNA, 25 bp, Homo sapien
gcttcacgtaatctgttcccttctg

SEQ ID NO: 4472897 - DNA, 25 bp, Homo sapien
acagaaaaaaatacatagacgccat

SEQ ID NO: 4472898 - DNA, 25 bp, Homo sapien
tgacagaaaaaaatacatagacgcc

SEQ ID NO: 4472899 - DNA, 25 bp, Homo sapien
ctgacagaaaaaaatacatagacgc

SEQ ID NO: 4472900 - DNA, 25 bp, Homo sapien
gacagaaaaaaatacatagacgcca

SEQ ID NO: 4472901 - DNA, 25 bp, Homo sapien
taactttgaatctcgatatggaacc

SEQ ID NO: 4472902 - DNA, 25 bp, Homo sapien
ccttccccatcaaagtagttcttga

SEQ ID NO: 4472903 - DNA, 25 bp, Homo sapien
gggttcacacacacgatcatccgca

SEQ ID NO: 4472904 - DNA, 25 bp, Homo sapien
ttcttgaacagatgggttaactttg

SEQ ID NO: 4472905 - DNA, 25 bp, Homo sapien
tcacttccgcaaatctcatgacttg

SEQ ID NO: 4472906 - DNA, 25 bp, Homo sapien
tattgccttgtctacaggtcttgct

SEQ ID NO: 4472907 - DNA, 25 bp, Homo sapien
tcccaggcgttaaaccacatattgc

SEQ ID NO: 4472908 - DNA, 25 bp, Homo sapien
catttccaactggacctcgaggctg

SEQ ID NO: 4472909 - DNA, 25 bp, Homo sapien
tgcaaaaccacgtcagtaaccaatg

SEQ ID NO: 4472910 - DNA, 25 bp, Homo sapien
ctgcaaaaccacgtcagtaaccaat

SEQ ID NO: 4472911 - DNA, 25 bp, Homo sapien
caaaaccacgtcagtaaccaatggt

SEQ ID NO: 4472912 - DNA, 25 bp, Homo sapien
gcaaaaccacgtcagtaaccaatgg

SEQ ID NO: 4472913 - DNA, 25 bp, Homo sapien
gaagtgtctgctcatcgttgatatc

SEQ ID NO: 4472914 - DNA, 25 bp, Homo sapien
ccaaaatttcgcatgatggcaaagg

SEQ ID NO: 4472915 - DNA, 25 bp, Homo sapien
gcttcaatcagccttggaagtgtct

SEQ ID NO: 4472916 - DNA, 25 bp, Homo sapien
tatgtcgtttctctaaggcttcaat

SEQ ID NO: 4472917 - DNA, 25 bp, Homo sapien
ttgtaacaaagctttaaaagcatta

SEQ ID NO: 4472918 - DNA, 25 bp, Homo sapien
cttgtaacaaagctttaaaagcatt

SEQ ID NO: 4472919 - DNA, 25 bp, Homo sapien
tgtaacaaagctttaaaagcattag

SEQ ID NO: 4472920 - DNA, 25 bp, Homo sapien
agtttcccttgcatgtggttttctt

SEQ ID NO: 4472921 - DNA, 25 bp, Homo sapien
gctaaaacaccagcacatacatcta

SEQ ID NO: 4472922 - DNA, 25 bp, Homo sapien
aggccgttggagcacaatatctccc

SEQ ID NO: 4472923 - DNA, 25 bp, Homo sapien
catacatctatcataataatgtcaa

SEQ ID NO: 4472924 - DNA, 25 bp, Homo sapien
tatctccctcagagaacagtgctaa

SEQ ID NO: 4472925 - DNA, 25 bp, Homo sapien
ggtagaccactatgttcaatatttg

SEQ ID NO: 4472926 - DNA, 25 bp, Homo sapien
ctaggaaggtagaccactatgttca

SEQ ID NO: 4472927 - DNA, 25 bp, Homo sapien
catttcatgtcgctataaaatagtc

SEQ ID NO: 4472928 - DNA, 25 bp, Homo sapien
taatttgcttatgcaagcatatttg

SEQ ID NO: 4472929 - DNA, 25 bp, Homo sapien
cacttcattgtcgtttctgtcacca

SEQ ID NO: 4472930 - DNA, 25 bp, Homo sapien
ttcctgttgcaaattgcgtttatct

SEQ ID NO: 4472931 - DNA, 25 bp, Homo sapien
cctggcttctaatctgcgtttgtca

SEQ ID NO: 4472932 - DNA, 25 bp, Homo sapien
tatcttcctcatagatagtagttgt

SEQ ID NO: 4472933 - DNA, 25 bp, Homo sapien
ccagagtttattctgcatctccagc

SEQ ID NO: 4472934 - DNA, 25 bp, Homo sapien
tccagctgtttggctgccactctac

SEQ ID NO: 4472935 - DNA, 25 bp, Homo sapien
agctgtttggctgccactctacgct

SEQ ID NO: 4472936 - DNA, 25 bp, Homo sapien
atctccagctgtttggctgccactc

SEQ ID NO: 4472937 - DNA, 25 bp, Homo sapien
gagtaactttttctcgatctcgctc

SEQ ID NO: 4472938 - DNA, 25 bp, Homo sapien
tctcgctcccgagagggtctctctg

SEQ ID NO: 4472939 - DNA, 25 bp, Homo sapien
caatagccttcagttgtttcagctt

SEQ ID NO: 4472940 - DNA, 25 bp, Homo sapien
taggttcggtaacaatagccttcag

SEQ ID NO: 4472941 - DNA, 25 bp, Homo sapien
tttctgaatgtaggaaccacctccc

SEQ ID NO: 4472942 - DNA, 25 bp, Homo sapien
tagagcgcctatgtagctgtggctg

SEQ ID NO: 4472943 - DNA, 25 bp, Homo sapien
tgctgcctacgccttgcaatagatg

SEQ ID NO: 4472944 - DNA, 25 bp, Homo sapien
tgctgctgcaagagttagagcgcct

SEQ ID NO: 4472945 - DNA, 25 bp, Homo sapien
tgatttcctttcacaaggcttaggg

SEQ ID NO: 4472946 - DNA, 25 bp, Homo sapien
tatctatatcaagtaacaattggta

SEQ ID NO: 4472947 - DNA, 25 bp, Homo sapien
aagacattaccatactattctttct

SEQ ID NO: 4472948 - DNA, 25 bp, Homo sapien
acatatctatatcaagtaacaattg

SEQ ID NO: 4472949 - DNA, 25 bp, Homo sapien
tctggtaatgctgcaagtctttcct

SEQ ID NO: 4472950 - DNA, 25 bp, Homo sapien
gagaggtaatctattatgtccacaa

SEQ ID NO: 4472951 - DNA, 25 bp, Homo sapien
tttctaggcttctaaacaaaacaga

SEQ ID NO: 4472952 - DNA, 25 bp, Homo sapien
aatatttatccctgctattgagagg

SEQ ID NO: 4472953 - DNA, 25 bp, Homo sapien
aaacaagcataacccagaattaatt

SEQ ID NO: 4472954 - DNA, 25 bp, Homo sapien
gaaacaagcataacccagaattaat

SEQ ID NO: 4472955 - DNA, 25 bp, Homo sapien
agaaacaagcataacccagaattaa

SEQ ID NO: 4472956 - DNA, 25 bp, Homo sapien
acaagcataacccagaattaattta

SEQ ID NO: 4472957 - DNA, 25 bp, Homo sapien
caacagatactgtgatggcatgagg

SEQ ID NO: 4472958 - DNA, 25 bp, Homo sapien
tagtttcaatctccccatcggaggc

SEQ ID NO: 4472959 - DNA, 25 bp, Homo sapien
tagaggcgggcttatgatctaccca

SEQ ID NO: 4472960 - DNA, 25 bp, Homo sapien
tgtctcctgcagagcgtgatcgtct

SEQ ID NO: 4472961 - DNA, 25 bp, Homo sapien
tattcactgaccctatgatcaaagg

SEQ ID NO: 4472962 - DNA, 25 bp, Homo sapien
caaaggagtagcaggacaaatggac

SEQ ID NO: 4472963 - DNA, 25 bp, Homo sapien
tcttgaactgatggagagcaatagg

SEQ ID NO: 4472964 - DNA, 25 bp, Homo sapien
tctggaaaacggctttaggcagctc

SEQ ID NO: 4472965 - DNA, 25 bp, Homo sapien
ctttaaagtctcaatatcagtaaac

SEQ ID NO: 4472966 - DNA, 25 bp, Homo sapien
cagattgtccaccaccccttgtttt

SEQ ID NO: 4472967 - DNA, 25 bp, Homo sapien
aaactgaacagattgtccaccaccc

SEQ ID NO: 4472968 - DNA, 25 bp, Homo sapien
tgaacagattgtccaccaccccttg

SEQ ID NO: 4472969 - DNA, 25 bp, Homo sapien
gagcagctaagaaaatgaccaactt

SEQ ID NO: 4472970 - DNA, 25 bp, Homo sapien
gaatactatctacatccctttggag

SEQ ID NO: 4472971 - DNA, 25 bp, Homo sapien
tttcacaggctattctgttcctcca

SEQ ID NO: 4472972 - DNA, 25 bp, Homo sapien
gtaggggaatactatctacatccct

SEQ ID NO: 4472973 - DNA, 25 bp, Homo sapien
aaggggaaacatgatgcaacaatta

SEQ ID NO: 4472974 - DNA, 25 bp, Homo sapien
aggggaaacatgatgcaacaattat

SEQ ID NO: 4472975 - DNA, 25 bp, Homo sapien
aaaggggaaacatgatgcaacaatt

SEQ ID NO: 4472976 - DNA, 25 bp, Homo sapien
ccttgtttctacatcggtccattca

SEQ ID NO: 4472977 - DNA, 25 bp, Homo sapien
ctacatcggtccattcagactctgc

SEQ ID NO: 4472978 - DNA, 25 bp, Homo sapien
ggtgctactgtggaagatcttcgtt

SEQ ID NO: 4472979 - DNA, 25 bp, Homo sapien
tactgtggaagatcttcgttttcga

SEQ ID NO: 4472980 - DNA, 25 bp, Homo sapien
taggcagacaaatatttaatttttc

SEQ ID NO: 4472981 - DNA, 25 bp, Homo sapien
acaaatgttgtgagccagaaaggtc

SEQ ID NO: 4472982 - DNA, 25 bp, Homo sapien
gaaaggtctttaggtcatccaggta

SEQ ID NO: 4472983 - DNA, 25 bp, Homo sapien
gaaaaagatcagctcctctcaatag

SEQ ID NO: 4472984 - DNA, 25 bp, Homo sapien
tatttagcaggctccacacctaggt

SEQ ID NO: 4472985 - DNA, 25 bp, Homo sapien
ttgggttgtgcgtgatgctgatatc

SEQ ID NO: 4472986 - DNA, 25 bp, Homo sapien
gggttgtgcgtgatgctgatatcca

SEQ ID NO: 4472987 - DNA, 25 bp, Homo sapien
tgggttgtgcgtgatgctgatatcc

SEQ ID NO: 4472988 - DNA, 25 bp, Homo sapien
tgtagctgaggtccgtgattttcaa

SEQ ID NO: 4472989 - DNA, 25 bp, Homo sapien
gaatactagttgtctttggaaccat

SEQ ID NO: 4472990 - DNA, 25 bp, Homo sapien
gactgcttctggcatggctttcgag

SEQ ID NO: 4472991 - DNA, 25 bp, Homo sapien
ggaaccatagggaaagctttgctct

SEQ ID NO: 4472992 - DNA, 25 bp, Homo sapien
tcttttggcatatctaaatgtcaga

SEQ ID NO: 4472993 - DNA, 25 bp, Homo sapien
attcttttggcatatctaaatgtca

SEQ ID NO: 4472994 - DNA, 25 bp, Homo sapien
taattcttttggcatatctaaatgt

SEQ ID NO: 4472995 - DNA, 25 bp, Homo sapien
ttttaattcttttggcatatctaaa

SEQ ID NO: 4472996 - DNA, 25 bp, Homo sapien
ctcaccccaacgcagccttagcttc

SEQ ID NO: 4472997 - DNA, 25 bp, Homo sapien
gcggcagctgaggaaaggggctctc

SEQ ID NO: 4472998 - DNA, 25 bp, Homo sapien
gcttcctcggaaggaccgagcacct

SEQ ID NO: 4472999 - DNA, 25 bp, Homo sapien
tcgccggatgaagtgagggcctcac

SEQ ID NO: 4473000 - DNA, 25 bp, Homo sapien
cgcgggcgagtgtagggctggcgct

SEQ ID NO: 4473001 - DNA, 25 bp, Homo sapien
gtagggctggcgctgccggacgcgg

SEQ ID NO: 4473002 - DNA, 25 bp, Homo sapien
agggctggcgctgccggacgcggtg

SEQ ID NO: 4473003 - DNA, 25 bp, Homo sapien
ggcgcgggcgagtgtagggctggcg

SEQ ID NO: 4473004 - DNA, 25 bp, Homo sapien
tgcaggcgagctcggagacagaggc

SEQ ID NO: 4473005 - DNA, 25 bp, Homo sapien
tgactgtcacctcatcgtcgtgcag

SEQ ID NO: 4473006 - DNA, 25 bp, Homo sapien
cgtgactgtcacctcatcgtcgtgc

SEQ ID NO: 4473007 - DNA, 25 bp, Homo sapien
actgtcacctcatcgtcgtgcagaa

SEQ ID NO: 4473008 - DNA, 25 bp, Homo sapien
caacaaataaaaacgtcaatccatc

SEQ ID NO: 4473009 - DNA, 25 bp, Homo sapien
aacaaataaaaacgtcaatccatca

SEQ ID NO: 4473010 - DNA, 25 bp, Homo sapien
acaacaaataaaaacgtcaatccat

SEQ ID NO: 4473011 - DNA, 25 bp, Homo sapien
tacaacaaataaaaacgtcaatcca

SEQ ID NO: 4473012 - DNA, 25 bp, Homo sapien
ccaaaaaggctcaacatttacaccg

SEQ ID NO: 4473013 - DNA, 25 bp, Homo sapien
caagccaggccaaaaaggctcaaca

SEQ ID NO: 4473014 - DNA, 25 bp, Homo sapien
caggccaaaaaggctcaacatttac

SEQ ID NO: 4473015 - DNA, 25 bp, Homo sapien
caaaaaggctcaacatttacaccgg

SEQ ID NO: 4473016 - DNA, 25 bp, Homo sapien
tgcgtagtacctatctcccgagtga

SEQ ID NO: 4473017 - DNA, 25 bp, Homo sapien
cacctaggagatccagcggcatgtg

SEQ ID NO: 4473018 - DNA, 25 bp, Homo sapien
tgaagtccgctaaacccaaatgtcc

SEQ ID NO: 4473019 - DNA, 25 bp, Homo sapien
gctcctagagatatacatgcaacga

SEQ ID NO: 4473020 - DNA, 25 bp, Homo sapien
gttctgtccttgttaagcactcacg

SEQ ID NO: 4473021 - DNA, 25 bp, Homo sapien
taggttacagggcaacgcactactg

SEQ ID NO: 4473022 - DNA, 25 bp, Homo sapien
tgtgcatgcataggtaaacgcccag

SEQ ID NO: 4473023 - DNA, 25 bp, Homo sapien
cacgcagccaaaaacgaaaagtatc

SEQ ID NO: 4473024 - DNA, 25 bp, Homo sapien
caccggcccctacattgcagatgag

SEQ ID NO: 4473025 - DNA, 25 bp, Homo sapien
tgaggctcccaatgttgacgttggc

SEQ ID NO: 4473026 - DNA, 25 bp, Homo sapien
ctcccaatgttgacgttggccaggg

SEQ ID NO: 4473027 - DNA, 25 bp, Homo sapien
aggctcccaatgttgacgttggcca

SEQ ID NO: 4473028 - DNA, 25 bp, Homo sapien
ctcctgctggtgcagcaccagctgc

SEQ ID NO: 4473029 - DNA, 25 bp, Homo sapien
tggtgcagcaccagctgctggagca

SEQ ID NO: 4473030 - DNA, 25 bp, Homo sapien
tgcagcaccagctgctggagcaggt

SEQ ID NO: 4473031 - DNA, 25 bp, Homo sapien
gcagcaccagctgctggagcaggtc

SEQ ID NO: 4473032 - DNA, 25 bp, Homo sapien
gcagcagcagtggagggggcaggac

SEQ ID NO: 4473033 - DNA, 25 bp, Homo sapien
gagcagcagcagtggagggggcagg

SEQ ID NO: 4473034 - DNA, 25 bp, Homo sapien
ctggagcagcagcagtggagggggc

SEQ ID NO: 4473035 - DNA, 25 bp, Homo sapien
tggagcagcagcagtggagggggca

SEQ ID NO: 4473036 - DNA, 25 bp, Homo sapien
caatcaggtgttaggatttccatac

SEQ ID NO: 4473037 - DNA, 25 bp, Homo sapien
ttaggatttccatacttcatatact

SEQ ID NO: 4473038 - DNA, 25 bp, Homo sapien
aaaaagtcaatcaggtgttaggatt

SEQ ID NO: 4473039 - DNA, 25 bp, Homo sapien
agtcaatcaggtgttaggatttcca

SEQ ID NO: 4473040 - DNA, 25 bp, Homo sapien
catcagactcctcggattcttcttt

SEQ ID NO: 4473041 - DNA, 25 bp, Homo sapien
atcatcagactcctcggattcttct

SEQ ID NO: 4473042 - DNA, 25 bp, Homo sapien
gactcctcggattcttctttctttg

SEQ ID NO: 4473043 - DNA, 25 bp, Homo sapien
cagactcctcggattcttctttctt

SEQ ID NO: 4473044 - DNA, 25 bp, Homo sapien
taaagctggtctgtattaccctcca

SEQ ID NO: 4473045 - DNA, 25 bp, Homo sapien
gattgtctaaatctcacatccggca

SEQ ID NO: 4473046 - DNA, 25 bp, Homo sapien
caaccttgggatgtagcagtcaaca

SEQ ID NO: 4473047 - DNA, 25 bp, Homo sapien
tggtggcagggaaaatccagcctgt

SEQ ID NO: 4473048 - DNA, 25 bp, Homo sapien
catagctagaggaagcatctagttc

SEQ ID NO: 4473049 - DNA, 25 bp, Homo sapien
tcatagctagaggaagcatctagtt

SEQ ID NO: 4473050 - DNA, 25 bp, Homo sapien
caaaacagaaaggatggccctttct

SEQ ID NO: 4473051 - DNA, 25 bp, Homo sapien
aacagaaaggatggccctttctgga

SEQ ID NO: 4473052 - DNA, 25 bp, Homo sapien
agaaaggatggccctttctggagct

SEQ ID NO: 4473053 - DNA, 25 bp, Homo sapien
gaaaggatggccctttctggagctc

SEQ ID NO: 4473054 - DNA, 25 bp, Homo sapien
cttagggatgagaagactgacaacc

SEQ ID NO: 4473055 - DNA, 25 bp, Homo sapien
tgactgtcccaagatcacagaacca

SEQ ID NO: 4473056 - DNA, 25 bp, Homo sapien
gaagcggccggcacagacgtagtct

SEQ ID NO: 4473057 - DNA, 25 bp, Homo sapien
agtctcatcgagaattaacacaggg

SEQ ID NO: 4473058 - DNA, 25 bp, Homo sapien
caggaggatgcacttccaaaaaggc

SEQ ID NO: 4473059 - DNA, 25 bp, Homo sapien
aaagccagtcgctaagtgtggccca

SEQ ID NO: 4473060 - DNA, 25 bp, Homo sapien
gatgaggaattctggcaccacgtgg

SEQ ID NO: 4473061 - DNA, 25 bp, Homo sapien
ggaaatgggctccacctttggaagc

SEQ ID NO: 4473062 - DNA, 25 bp, Homo sapien
gaagcattgtgtctccagaaggcct

SEQ ID NO: 4473063 - DNA, 25 bp, Homo sapien
gctgagaaacatgaaccccttgaga

SEQ ID NO: 4473064 - DNA, 25 bp, Homo sapien
ggatcacgtatctccccaaggctga

SEQ ID NO: 4473065 - DNA, 25 bp, Homo sapien
gataggatgccgtttgtgaaccacc

SEQ ID NO: 4473066 - DNA, 25 bp, Homo sapien
caggatgattctatgttcaatgagg

SEQ ID NO: 4473067 - DNA, 25 bp, Homo sapien
atattcgctcgtatggatagaccat

SEQ ID NO: 4473068 - DNA, 25 bp, Homo sapien
ctgaggaatatgtgaggcacatgga

SEQ ID NO: 4473069 - DNA, 25 bp, Homo sapien
tccaccgacggacactcgggctgtt

SEQ ID NO: 4473070 - DNA, 25 bp, Homo sapien
aatcctgcactggagtgtgtactgg

SEQ ID NO: 4473071 - DNA, 25 bp, Homo sapien
ccaaatcctgcactggagtgtgtac

SEQ ID NO: 4473072 - DNA, 25 bp, Homo sapien
tcctgcactggagtgtgtactggtg

SEQ ID NO: 4473073 - DNA, 25 bp, Homo sapien
caaatcctgcactggagtgtgtact

SEQ ID NO: 4473074 - DNA, 25 bp, Homo sapien
gagatgagtccagacttgacagcca

SEQ ID NO: 4473075 - DNA, 25 bp, Homo sapien
tccttaaaacaactgtccgtgtgta

SEQ ID NO: 4473076 - DNA, 25 bp, Homo sapien
tgcccaatctgcaagtccaaccagg

SEQ ID NO: 4473077 - DNA, 25 bp, Homo sapien
tgtagtatacgtccagggctgtgcc

SEQ ID NO: 4473078 - DNA, 25 bp, Homo sapien
cccagagattgttgggtcagaggtt

SEQ ID NO: 4473079 - DNA, 25 bp, Homo sapien
gatggagctgataacagcaagaccc

SEQ ID NO: 4473080 - DNA, 25 bp, Homo sapien
atcaggagacggcttcagagattta

SEQ ID NO: 4473081 - DNA, 25 bp, Homo sapien
cagagatttaggctgtcgatcacct

SEQ ID NO: 4473082 - DNA, 25 bp, Homo sapien
tcataaaatgaaagagcattgcggg

SEQ ID NO: 4473083 - DNA, 25 bp, Homo sapien
tgaggttgagggataatttcagctc

SEQ ID NO: 4473084 - DNA, 25 bp, Homo sapien
cagagagggtctctatagcaaaaaa

SEQ ID NO: 4473085 - DNA, 25 bp, Homo sapien
tcaaaaatgttcacccagagagggt

SEQ ID NO: 4473086 - DNA, 25 bp, Homo sapien
taccttatgagtaggtctggccctg

SEQ ID NO: 4473087 - DNA, 25 bp, Homo sapien
aataccttatgagtaggtctggccc

SEQ ID NO: 4473088 - DNA, 25 bp, Homo sapien
tggccctgtcctctaagctaacccc

SEQ ID NO: 4473089 - DNA, 25 bp, Homo sapien
cttatgagtaggtctggccctgtcc

SEQ ID NO: 4473090 - DNA, 25 bp, Homo sapien
gagtaagagtgggtgccccagacat

SEQ ID NO: 4473091 - DNA, 25 bp, Homo sapien
agagaatatgctgggccactctgca

SEQ ID NO: 4473092 - DNA, 25 bp, Homo sapien
ttggaccaagcattccacaggtaga

SEQ ID NO: 4473093 - DNA, 25 bp, Homo sapien
caagaagagaatatgctgggccact

SEQ ID NO: 4473094 - DNA, 25 bp, Homo sapien
tggatatcacccctggtccacaatt

SEQ ID NO: 4473095 - DNA, 25 bp, Homo sapien
ccccagggtattacttggcactgca

SEQ ID NO: 4473096 - DNA, 25 bp, Homo sapien
tcttcaactagaggccatagcagtg

SEQ ID NO: 4473097 - DNA, 25 bp, Homo sapien
tagcagtgtgagtaaccccagggta

SEQ ID NO: 4473098 - DNA, 25 bp, Homo sapien
caggtaatcgctgtgcatttcagta

SEQ ID NO: 4473099 - DNA, 25 bp, Homo sapien
tcagtaaattacctctcataaaggg

SEQ ID NO: 4473100 - DNA, 25 bp, Homo sapien
gagcccctagcctgccatttttaat

SEQ ID NO: 4473101 - DNA, 25 bp, Homo sapien
tcaggagttgagttcacgggcttca

SEQ ID NO: 4473102 - DNA, 25 bp, Homo sapien
cagtgctgccactagctacgtgaca

SEQ ID NO: 4473103 - DNA, 25 bp, Homo sapien
tacaacacgagaatgcttacccctg

SEQ ID NO: 4473104 - DNA, 25 bp, Homo sapien
agaaaagcccgtacccactgaacat

SEQ ID NO: 4473105 - DNA, 25 bp, Homo sapien
tactctgagccaaaccctgagttag

SEQ ID NO: 4473106 - DNA, 25 bp, Homo sapien
gctcgtgccgcgctctcagactctt

SEQ ID NO: 4473107 - DNA, 25 bp, Homo sapien
tttccgtagcctctggctcgtgccg

SEQ ID NO: 4473108 - DNA, 25 bp, Homo sapien
agggcagtgttttccgtagcctctg

SEQ ID NO: 4473109 - DNA, 25 bp, Homo sapien
ccacacgagcccaatgaggtaggcc

SEQ ID NO: 4473110 - DNA, 25 bp, Homo sapien
tcagcaagtgtttacacattgggcc

SEQ ID NO: 4473111 - DNA, 25 bp, Homo sapien
tctgttctgagaccggggccatagg

SEQ ID NO: 4473112 - DNA, 25 bp, Homo sapien
tcatcgttttggaacacagagccat

SEQ ID NO: 4473113 - DNA, 25 bp, Homo sapien
ttcttcatcgttttggaacacagag

SEQ ID NO: 4473114 - DNA, 25 bp, Homo sapien
gcaagacactgcaagttattccaag

SEQ ID NO: 4473115 - DNA, 25 bp, Homo sapien
caagacactgcaagttattccaagt

SEQ ID NO: 4473116 - DNA, 25 bp, Homo sapien
agacactgcaagttattccaagttc

SEQ ID NO: 4473117 - DNA, 25 bp, Homo sapien
ctgcaagacactgcaagttattcca

SEQ ID NO: 4473118 - DNA, 25 bp, Homo sapien
gcttttcgttgttgagcgtcactta

SEQ ID NO: 4473119 - DNA, 25 bp, Homo sapien
catttcatgttggtacaggtactcc

SEQ ID NO: 4473120 - DNA, 25 bp, Homo sapien
aatgaataacaacagcgtaggtgcg

SEQ ID NO: 4473121 - DNA, 25 bp, Homo sapien
ggctatgtccggtggcatttcttca

SEQ ID NO: 4473122 - DNA, 25 bp, Homo sapien
gcaagggccacggtatctgttcctc

SEQ ID NO: 4473123 - DNA, 25 bp, Homo sapien
tctgcctcagggtagagaaccacca

SEQ ID NO: 4473124 - DNA, 25 bp, Homo sapien
caagtgtggactgggttctctcatc

SEQ ID NO: 4473125 - DNA, 25 bp, Homo sapien
tattaagcacttaactctggatggg

SEQ ID NO: 4473126 - DNA, 25 bp, Homo sapien
cattattggcatggaacagggtgtc

SEQ ID NO: 4473127 - DNA, 25 bp, Homo sapien
taaaatatattactcggtccaggct

SEQ ID NO: 4473128 - DNA, 25 bp, Homo sapien
cagcacgtcaaagcaccatattggg

SEQ ID NO: 4473129 - DNA, 25 bp, Homo sapien
ggagttgaacccctcagaacgtgag

SEQ ID NO: 4473130 - DNA, 25 bp, Homo sapien
caaattcatttaatgtgcataagca

SEQ ID NO: 4473131 - DNA, 25 bp, Homo sapien
caggaattgcaagaacatgatgacc

SEQ ID NO: 4473132 - DNA, 25 bp, Homo sapien
aaacccaatgaggtccagatgctca

SEQ ID NO: 4473133 - DNA, 25 bp, Homo sapien
gaaaatgaatttacaataggcagat

SEQ ID NO: 4473134 - DNA, 25 bp, Homo sapien
cttctgctgcgtccaaggagtgttg

SEQ ID NO: 4473135 - DNA, 25 bp, Homo sapien
ggtcttctgcgcccaaagactcagc

SEQ ID NO: 4473136 - DNA, 25 bp, Homo sapien
gcgtccaaggagtgttgacaaaaaa

SEQ ID NO: 4473137 - DNA, 25 bp, Homo sapien
cccgggtcttctgcgcccaaagact

SEQ ID NO: 4473138 - DNA, 25 bp, Homo sapien
ttcatgtgcccacctggtacatggg

SEQ ID NO: 4473139 - DNA, 25 bp, Homo sapien
tggcatactccacgcaaggtgacgt

SEQ ID NO: 4473140 - DNA, 25 bp, Homo sapien
cacccgtagtatggtgggtaacctg

SEQ ID NO: 4473141 - DNA, 25 bp, Homo sapien
taatgtcatagaccggagtcctgag

SEQ ID NO: 4473142 - DNA, 25 bp, Homo sapien
tgcatgcaggtgtgtatatagacag

SEQ ID NO: 4473143 - DNA, 25 bp, Homo sapien
tgcaggtgtgtatatagacagagag

SEQ ID NO: 4473144 - DNA, 25 bp, Homo sapien
gcaatacgagattagatataaatat

SEQ ID NO: 4473145 - DNA, 25 bp, Homo sapien
aaacagaaccaataagcaatacgag

SEQ ID NO: 4473146 - DNA, 25 bp, Homo sapien
gcaatactgatgccaccaaccccca

SEQ ID NO: 4473147 - DNA, 25 bp, Homo sapien
agcaatactgatgccaccaaccccc

SEQ ID NO: 4473148 - DNA, 25 bp, Homo sapien
cagcaatactgatgccaccaacccc

SEQ ID NO: 4473149 - DNA, 25 bp, Homo sapien
accgtgaattggcaggcctcgggca

SEQ ID NO: 4473150 - DNA, 25 bp, Homo sapien
ctcaaacatcgcctcctctgagaag

SEQ ID NO: 4473151 - DNA, 25 bp, Homo sapien
aatgttcccatacgagccagtgcag

SEQ ID NO: 4473152 - DNA, 25 bp, Homo sapien
tccaattcagctcaaacatcgcctc

SEQ ID NO: 4473153 - DNA, 25 bp, Homo sapien
gcatgtaggtgtttccctcagactg

SEQ ID NO: 4473154 - DNA, 25 bp, Homo sapien
gactgatgtgccctttccagaaagt

SEQ ID NO: 4473155 - DNA, 25 bp, Homo sapien
taggtgtttccctcagactgatgtg

SEQ ID NO: 4473156 - DNA, 25 bp, Homo sapien
cctcagactgatgtgccctttccag

SEQ ID NO: 4473157 - DNA, 25 bp, Homo sapien
tctccacccgcattgcttttccata

SEQ ID NO: 4473158 - DNA, 25 bp, Homo sapien
tccatacattggctcactagctctc

SEQ ID NO: 4473159 - DNA, 25 bp, Homo sapien
tggctcactagctctcatatggggg

SEQ ID NO: 4473160 - DNA, 25 bp, Homo sapien
ttctccacccgcattgcttttccat

SEQ ID NO: 4473161 - DNA, 25 bp, Homo sapien
cctgggatattccactgctgggcca

SEQ ID NO: 4473162 - DNA, 25 bp, Homo sapien
agggtcagacatggccttgaatcca

SEQ ID NO: 4473163 - DNA, 25 bp, Homo sapien
gccttgaatccacctgggatattcc

SEQ ID NO: 4473164 - DNA, 25 bp, Homo sapien
tggacatcatcagggtcagacatgg

SEQ ID NO: 4473165 - DNA, 25 bp, Homo sapien
tgcccacctttaggtctaactggac

SEQ ID NO: 4473166 - DNA, 25 bp, Homo sapien
cccagtgattagcagatgagtgagc

SEQ ID NO: 4473167 - DNA, 25 bp, Homo sapien
gtaataataaccagcagtgtgcccc

SEQ ID NO: 4473168 - DNA, 25 bp, Homo sapien
tgtgtaacctagacaccatgttcca

SEQ ID NO: 4473169 - DNA, 25 bp, Homo sapien
ctcttgtctgtcttcccggttgatg

SEQ ID NO: 4473170 - DNA, 25 bp, Homo sapien
tcttcccggttgatgcatgcccaag

SEQ ID NO: 4473171 - DNA, 25 bp, Homo sapien
ccggttgatgcatgcccaagatact

SEQ ID NO: 4473172 - DNA, 25 bp, Homo sapien
tctgtcttcccggttgatgcatgcc

SEQ ID NO: 4473173 - DNA, 25 bp, Homo sapien
taggcctgccagataggtgctcaaa

SEQ ID NO: 4473174 - DNA, 25 bp, Homo sapien
tccttcccagagactagagcagaca

SEQ ID NO: 4473175 - DNA, 25 bp, Homo sapien
ccaggaaacggtggcatgctgaacc

SEQ ID NO: 4473176 - DNA, 25 bp, Homo sapien
caatccaggaatggtgaatacccgc

SEQ ID NO: 4473177 - DNA, 25 bp, Homo sapien
tcccctggccctgtactcccaactg

SEQ ID NO: 4473178 - DNA, 25 bp, Homo sapien
cctgtactcccaactggcatcccat

SEQ ID NO: 4473179 - DNA, 25 bp, Homo sapien
ctggccctgtactcccaactggcat

SEQ ID NO: 4473180 - DNA, 25 bp, Homo sapien
gccctgtactcccaactggcatccc

SEQ ID NO: 4473181 - DNA, 25 bp, Homo sapien
ttattgttctcgatgacgtctgaaa

SEQ ID NO: 4473182 - DNA, 25 bp, Homo sapien
tgacgtctgaaaagtcaaggcagct

SEQ ID NO: 4473183 - DNA, 25 bp, Homo sapien
cgatgacgtctgaaaagtcaaggca

SEQ ID NO: 4473184 - DNA, 25 bp, Homo sapien
tgttctcgatgacgtctgaaaagtc

SEQ ID NO: 4473185 - DNA, 25 bp, Homo sapien
ctgactcgctgtcaagtgtactggc

SEQ ID NO: 4473186 - DNA, 25 bp, Homo sapien
tctgactcgctgtcaagtgtactgg

SEQ ID NO: 4473187 - DNA, 25 bp, Homo sapien
ggcatcacattcctgagcaaacttt

SEQ ID NO: 4473188 - DNA, 25 bp, Homo sapien
tgctgagccgcaaaatggacaggca

SEQ ID NO: 4473189 - DNA, 25 bp, Homo sapien
gtctgtactgctgagccgcaaaatg

SEQ ID NO: 4473190 - DNA, 25 bp, Homo sapien
caaaggtggcatggtgtattcttgg

SEQ ID NO: 4473191 - DNA, 25 bp, Homo sapien
agtatcattcgaggtccccacagga

SEQ ID NO: 4473192 - DNA, 25 bp, Homo sapien
tggctgccagcgtaggtcctcaata

SEQ ID NO: 4473193 - DNA, 25 bp, Homo sapien
gactcctggactagaacagctgaca

SEQ ID NO: 4473194 - DNA, 25 bp, Homo sapien
caagccgggtgaatggtggaccctc

SEQ ID NO: 4473195 - DNA, 25 bp, Homo sapien
gggcttccgatcattcagaaggtat

SEQ ID NO: 4473196 - DNA, 25 bp, Homo sapien
ggcttctgtcatcatagatccagtt

SEQ ID NO: 4473197 - DNA, 25 bp, Homo sapien
tcatagatccagtttagcagatggc

SEQ ID NO: 4473198 - DNA, 25 bp, Homo sapien
tctagatgaacctcacattcctcgg

SEQ ID NO: 4473199 - DNA, 25 bp, Homo sapien
tagctggagtgtccttattaagccc

SEQ ID NO: 4473200 - DNA, 25 bp, Homo sapien
tgatgcatccttacttagcaccgtc

SEQ ID NO: 4473201 - DNA, 25 bp, Homo sapien
tctgctccggcactgtataattcat

SEQ ID NO: 4473202 - DNA, 25 bp, Homo sapien
tattaagcccagcttgtgatgcatc

SEQ ID NO: 4473203 - DNA, 25 bp, Homo sapien
aatcaagtcacatgccgatgcctga

SEQ ID NO: 4473204 - DNA, 25 bp, Homo sapien
gaccaaatcaagtcacatgccgatg

SEQ ID NO: 4473205 - DNA, 25 bp, Homo sapien
agtcacatgccgatgcctgaattca

SEQ ID NO: 4473206 - DNA, 25 bp, Homo sapien
tcattgaccaaatcaagtcacatgc

SEQ ID NO: 4473207 - DNA, 25 bp, Homo sapien
gactctggaatctctagagactgaa

SEQ ID NO: 4473208 - DNA, 25 bp, Homo sapien
ggctgtggcaaaaccatgcctccct

SEQ ID NO: 4473209 - DNA, 25 bp, Homo sapien
cacacgactgatcaaggcccagatg

SEQ ID NO: 4473210 - DNA, 25 bp, Homo sapien
agcacttgagcacgcgcaggagaat

SEQ ID NO: 4473211 - DNA, 25 bp, Homo sapien
tctgctctctcacagaaaactgcgc

SEQ ID NO: 4473212 - DNA, 25 bp, Homo sapien
gcttcacatctcagcttgatggcat

SEQ ID NO: 4473213 - DNA, 25 bp, Homo sapien
ctctgcctcacttccgcttcacatc

SEQ ID NO: 4473214 - DNA, 25 bp, Homo sapien
cagaaaactgcgccaaacaaaagga

SEQ ID NO: 4473215 - DNA, 25 bp, Homo sapien
tcaacaaggctggagcttggatgca

SEQ ID NO: 4473216 - DNA, 25 bp, Homo sapien
cttcaacaaggctggagcttggatg

SEQ ID NO: 4473217 - DNA, 25 bp, Homo sapien
caacaaggctggagcttggatgcag

SEQ ID NO: 4473218 - DNA, 25 bp, Homo sapien
aacaaggctggagcttggatgcaga

SEQ ID NO: 4473219 - DNA, 25 bp, Homo sapien
aaatgtcgtgttggcatagctagtg

SEQ ID NO: 4473220 - DNA, 25 bp, Homo sapien
ctggaaatgtcgtgttggcatagct

SEQ ID NO: 4473221 - DNA, 25 bp, Homo sapien
tggcatagctagtggggacccgttt

SEQ ID NO: 4473222 - DNA, 25 bp, Homo sapien
ggaaatgtcgtgttggcatagctag

SEQ ID NO: 4473223 - DNA, 25 bp, Homo sapien
tctattaaaattgggcaacacctgt

SEQ ID NO: 4473224 - DNA, 25 bp, Homo sapien
caacacctgtatgttgattagctgt

SEQ ID NO: 4473225 - DNA, 25 bp, Homo sapien
gccccttagaaatggagcctctcca

SEQ ID NO: 4473226 - DNA, 25 bp, Homo sapien
ttagctgtttgccaattgttcttcc

SEQ ID NO: 4473227 - DNA, 25 bp, Homo sapien
cagatcccatgcaagcagagcggtg

SEQ ID NO: 4473228 - DNA, 25 bp, Homo sapien
aatctccttctgtgcatggcctgcc

SEQ ID NO: 4473229 - DNA, 25 bp, Homo sapien
gcaagcagagcggtgtgctcatctg

SEQ ID NO: 4473230 - DNA, 25 bp, Homo sapien
ccatgcaagcagagcggtgtgctca

SEQ ID NO: 4473231 - DNA, 25 bp, Homo sapien
tacattgcaagactgagaccaaggt

SEQ ID NO: 4473232 - DNA, 25 bp, Homo sapien
cactggaactcagagtggttaagca

SEQ ID NO: 4473233 - DNA, 25 bp, Homo sapien
gatgaggacataacatccaaccctt

SEQ ID NO: 4473234 - DNA, 25 bp, Homo sapien
tgctaagtaagttccagtgcgcaca

SEQ ID NO: 4473235 - DNA, 25 bp, Homo sapien
agcagtatggagagtggccgtcggg

SEQ ID NO: 4473236 - DNA, 25 bp, Homo sapien
ggttcttctggcagcagtatggaga

SEQ ID NO: 4473237 - DNA, 25 bp, Homo sapien
taaaaagagcgatatttcaaggttc

SEQ ID NO: 4473238 - DNA, 25 bp, Homo sapien
tcttctggcagcagtatggagagtg

SEQ ID NO: 4473239 - DNA, 25 bp, Homo sapien
tgagggctgtctgtccaacttgtcc

SEQ ID NO: 4473240 - DNA, 25 bp, Homo sapien
gacagcaagcagttacatgaaggca

SEQ ID NO: 4473241 - DNA, 25 bp, Homo sapien
ttgaacagtttgacagagcagcacc

SEQ ID NO: 4473242 - DNA, 25 bp, Homo sapien
cagtccctgggatgcatatggtgcc

SEQ ID NO: 4473243 - DNA, 25 bp, Homo sapien
gcttgggaaccagacctagccatct

SEQ ID NO: 4473244 - DNA, 25 bp, Homo sapien
gctttgattgctcgggactcacaca

SEQ ID NO: 4473245 - DNA, 25 bp, Homo sapien
taccagcaacgatttataggaagca

SEQ ID NO: 4473246 - DNA, 25 bp, Homo sapien
gcaacaagccccatagcttcaggag

SEQ ID NO: 4473247 - DNA, 25 bp, Homo sapien
aaaaggtgttgcaggcctccgcgtt

SEQ ID NO: 4473248 - DNA, 25 bp, Homo sapien
cataagctgcttacaaaatgcctgc

SEQ ID NO: 4473249 - DNA, 25 bp, Homo sapien
aatattttcacaggctactgcacgg

SEQ ID NO: 4473250 - DNA, 25 bp, Homo sapien
aacaaacatcggttgacagcagaca

SEQ ID NO: 4473251 - DNA, 25 bp, Homo sapien
cccctgatgctatgaaggaggagca

SEQ ID NO: 4473252 - DNA, 25 bp, Homo sapien
gagctcccctgatgctatgaaggag

SEQ ID NO: 4473253 - DNA, 25 bp, Homo sapien
gctcccctgatgctatgaaggagga

SEQ ID NO: 4473254 - DNA, 25 bp, Homo sapien
tcccctgatgctatgaaggaggagc

SEQ ID NO: 4473255 - DNA, 25 bp, Homo sapien
cccacagcatgggcgtgtgtctgag

SEQ ID NO: 4473256 - DNA, 25 bp, Homo sapien
agacctgctgccgagacatatccat

SEQ ID NO: 4473257 - DNA, 25 bp, Homo sapien
gcatgggcgtgtgtctgaggtcaga

SEQ ID NO: 4473258 - DNA, 25 bp, Homo sapien
cagagacctgctgccgagacatatc

SEQ ID NO: 4473259 - DNA, 25 bp, Homo sapien
tcaacgagagaaatcggtggtccct

SEQ ID NO: 4473260 - DNA, 25 bp, Homo sapien
tctgacattgagaacttcaaagccc

SEQ ID NO: 4473261 - DNA, 25 bp, Homo sapien
tcggtggtccctgaggatcaagacc

SEQ ID NO: 4473262 - DNA, 25 bp, Homo sapien
ctggaactgcctcaacgagagaaat

SEQ ID NO: 4473263 - DNA, 25 bp, Homo sapien
ccctgtgtccgtgccaggagtggct

SEQ ID NO: 4473264 - DNA, 25 bp, Homo sapien
tgtaaggtgggtgacttctaactcc

SEQ ID NO: 4473265 - DNA, 25 bp, Homo sapien
cacgtttgtccctgtgtccgtgcca

SEQ ID NO: 4473266 - DNA, 25 bp, Homo sapien
gcttggacgaggacacaagatacct

SEQ ID NO: 4473267 - DNA, 25 bp, Homo sapien
tcagatatcaaacacttcagacaat

SEQ ID NO: 4473268 - DNA, 25 bp, Homo sapien
cagctggttcactgtggtccgaccc

SEQ ID NO: 4473269 - DNA, 25 bp, Homo sapien
gacccagacctatcctatgttctcg

SEQ ID NO: 4473270 - DNA, 25 bp, Homo sapien
cctatgttctcgtatagaggtaaca

SEQ ID NO: 4473271 - DNA, 25 bp, Homo sapien
ggtgcattgcacataccctctggct

SEQ ID NO: 4473272 - DNA, 25 bp, Homo sapien
gtattgtgcgtatatgcataggaca

SEQ ID NO: 4473273 - DNA, 25 bp, Homo sapien
ttttacagaatcacaagttagcaag

SEQ ID NO: 4473274 - DNA, 25 bp, Homo sapien
tacatgtgcacatacagtattgtgc

SEQ ID NO: 4473275 - DNA, 25 bp, Homo sapien
tatgttcagcaggaatcaatgtggc

SEQ ID NO: 4473276 - DNA, 25 bp, Homo sapien
gttgaagtgcttttaggaaggtcca

SEQ ID NO: 4473277 - DNA, 25 bp, Homo sapien
cagacttgcactggcatcacaagtt

SEQ ID NO: 4473278 - DNA, 25 bp, Homo sapien
tcaatgtggccagacttgcactggc

SEQ ID NO: 4473279 - DNA, 25 bp, Homo sapien
cagctcttatttttctccccacctt

SEQ ID NO: 4473280 - DNA, 25 bp, Homo sapien
tttccagctcttatttttctcccca

SEQ ID NO: 4473281 - DNA, 25 bp, Homo sapien
ctgtttagggccatgtgttttccag

SEQ ID NO: 4473282 - DNA, 25 bp, Homo sapien
gtttagggccatgtgttttccagct

SEQ ID NO: 4473283 - DNA, 25 bp, Homo sapien
tttttgccatatcccttgacagcac

SEQ ID NO: 4473284 - DNA, 25 bp, Homo sapien
tgacaagaatggtcttgcacatttt

SEQ ID NO: 4473285 - DNA, 25 bp, Homo sapien
tgacagcaccaggacacttctcatt

SEQ ID NO: 4473286 - DNA, 25 bp, Homo sapien
agctcatcaaagataccctccctgt

SEQ ID NO: 4473287 - DNA, 25 bp, Homo sapien
tgttcactccttcacctctcttgga

SEQ ID NO: 4473288 - DNA, 25 bp, Homo sapien
ctgctgccagctcatcaaagatacc

SEQ ID NO: 4473289 - DNA, 25 bp, Homo sapien
atcaaagataccctccctgttcact

SEQ ID NO: 4473290 - DNA, 25 bp, Homo sapien
aggcacctccgacctccacaacttc

SEQ ID NO: 4473291 - DNA, 25 bp, Homo sapien
ccaggcacctccgacctccacaact

SEQ ID NO: 4473292 - DNA, 25 bp, Homo sapien
gcacctccgacctccacaacttccc

SEQ ID NO: 4473293 - DNA, 25 bp, Homo sapien
caggcacctccgacctccacaactt

SEQ ID NO: 4473294 - DNA, 25 bp, Homo sapien
gcagtcgccagtgcctgcggaaagc

SEQ ID NO: 4473295 - DNA, 25 bp, Homo sapien
aagtgccaggcaagctgttgtgatg

SEQ ID NO: 4473296 - DNA, 25 bp, Homo sapien
caggcaagctgttgtgatgtgacat

SEQ ID NO: 4473297 - DNA, 25 bp, Homo sapien
gggcagtcgccagtgcctgcggaaa

SEQ ID NO: 4473298 - DNA, 25 bp, Homo sapien
tactgtggatactcactgagcatct

SEQ ID NO: 4473299 - DNA, 25 bp, Homo sapien
tcaagccccgatggtctgacctggt

SEQ ID NO: 4473300 - DNA, 25 bp, Homo sapien
gcatctgcccaaggcttatgaggta

SEQ ID NO: 4473301 - DNA, 25 bp, Homo sapien
gaatcatttttcgtccatactgtgg

SEQ ID NO: 4473302 - DNA, 25 bp, Homo sapien
ctccgattgaaagttcatctgctgc

SEQ ID NO: 4473303 - DNA, 25 bp, Homo sapien
gttcatctgctgccgggcacgcagt

SEQ ID NO: 4473304 - DNA, 25 bp, Homo sapien
cattgctccgattgaaagttcatct

SEQ ID NO: 4473305 - DNA, 25 bp, Homo sapien
atctgctgccgggcacgcagtggct

SEQ ID NO: 4473306 - DNA, 25 bp, Homo sapien
taagcctccacggattccttcaagg

SEQ ID NO: 4473307 - DNA, 25 bp, Homo sapien
ctagggtattgagggccttggatcc

SEQ ID NO: 4473308 - DNA, 25 bp, Homo sapien
tccttcaaggctagggtattgaggg

SEQ ID NO: 4473309 - DNA, 25 bp, Homo sapien
tcatacagaccggtaagcctccacg

SEQ ID NO: 4473310 - DNA, 25 bp, Homo sapien
tccctccaggagtgcttgactgtga

SEQ ID NO: 4473311 - DNA, 25 bp, Homo sapien
tacccctaggtcacagaaagcctca

SEQ ID NO: 4473312 - DNA, 25 bp, Homo sapien
gagagaacagcttccctaagtgtgc

SEQ ID NO: 4473313 - DNA, 25 bp, Homo sapien
aagtgtgcggcttattgcatcaagg

SEQ ID NO: 4473314 - DNA, 25 bp, Homo sapien
tccccaaggagagcagtagttgcga

SEQ ID NO: 4473315 - DNA, 25 bp, Homo sapien
catcggcatctatgtggtgcagcca

SEQ ID NO: 4473316 - DNA, 25 bp, Homo sapien
tctctgccatgggtttcgaaagctg

SEQ ID NO: 4473317 - DNA, 25 bp, Homo sapien
tgaagcaagtgccacaacacctgtg

SEQ ID NO: 4473318 - DNA, 25 bp, Homo sapien
aggctggtgagcccttttaaccgca

SEQ ID NO: 4473319 - DNA, 25 bp, Homo sapien
ctggtgagcccttttaaccgcagcc

SEQ ID NO: 4473320 - DNA, 25 bp, Homo sapien
ggctggtgagcccttttaaccgcag

SEQ ID NO: 4473321 - DNA, 25 bp, Homo sapien
gctggtgagcccttttaaccgcagc

SEQ ID NO: 4473322 - DNA, 25 bp, Homo sapien
cagctcttcagtcctctccagctcc

SEQ ID NO: 4473323 - DNA, 25 bp, Homo sapien
agctcttcagtcctctccagctccc

SEQ ID NO: 4473324 - DNA, 25 bp, Homo sapien
gattatactcggtgctctgttcaca

SEQ ID NO: 4473325 - DNA, 25 bp, Homo sapien
cagggattatactcggtgctctgtt

SEQ ID NO: 4473326 - DNA, 25 bp, Homo sapien
cacattgttattcaatctgtacaac

SEQ ID NO: 4473327 - DNA, 25 bp, Homo sapien
caaccagcttgtgaggcattatcat

SEQ ID NO: 4473328 - DNA, 25 bp, Homo sapien
ggcctgcgcgagcgctggctgccat

SEQ ID NO: 4473329 - DNA, 25 bp, Homo sapien
ctggcctgcgcgagcgctggctgcc

SEQ ID NO: 4473330 - DNA, 25 bp, Homo sapien
tggcctgcgcgagcgctggctgcca

SEQ ID NO: 4473331 - DNA, 25 bp, Homo sapien
aagattcattgttggtgccgccgta

SEQ ID NO: 4473332 - DNA, 25 bp, Homo sapien
gattcattgttggtgccgccgtaaa

SEQ ID NO: 4473333 - DNA, 25 bp, Homo sapien
taaagattcattgttggtgccgccg

SEQ ID NO: 4473334 - DNA, 25 bp, Homo sapien
ttcattgttggtgccgccgtaaagt

SEQ ID NO: 4473335 - DNA, 25 bp, Homo sapien
tcccagagcaatttggtcggagcgt

SEQ ID NO: 4473336 - DNA, 25 bp, Homo sapien
gctgctgggtcaggatccaataatt

SEQ ID NO: 4473337 - DNA, 25 bp, Homo sapien
ttccattcatgccagccagacggga

SEQ ID NO: 4473338 - DNA, 25 bp, Homo sapien
cagacgggacctctggtttgctgtt

SEQ ID NO: 4473339 - DNA, 25 bp, Homo sapien
ctgagatagggcgtctccaacccag

SEQ ID NO: 4473340 - DNA, 25 bp, Homo sapien
ggagctcctctgagatagggcgtct

SEQ ID NO: 4473341 - DNA, 25 bp, Homo sapien
agttgcagagggcaagaaaaggcct

SEQ ID NO: 4473342 - DNA, 25 bp, Homo sapien
aaggccttgagcaggtttggagctc

SEQ ID NO: 4473343 - DNA, 25 bp, Homo sapien
gacataattcaacccctaacagaag

SEQ ID NO: 4473344 - DNA, 25 bp, Homo sapien
caactctgacactgaaggtaaagaa

SEQ ID NO: 4473345 - DNA, 25 bp, Homo sapien
ggcaacggcaatctggacaggcttt

SEQ ID NO: 4473346 - DNA, 25 bp, Homo sapien
tcctactccccacaatacaggctgg

SEQ ID NO: 4473347 - DNA, 25 bp, Homo sapien
gtgcgtgtccgtgttccaatttcct

SEQ ID NO: 4473348 - DNA, 25 bp, Homo sapien
cctctgtgcgtgtccgtgttccaat

SEQ ID NO: 4473349 - DNA, 25 bp, Homo sapien
ctgtgcgtgtccgtgttccaatttc

SEQ ID NO: 4473350 - DNA, 25 bp, Homo sapien
tttcctctgtgcgtgtccgtgttcc

SEQ ID NO: 4473351 - DNA, 25 bp, Homo sapien
cagctcttgactctacgttgggccc

SEQ ID NO: 4473352 - DNA, 25 bp, Homo sapien
gagcacctgaaagcacaccggtaga

SEQ ID NO: 4473353 - DNA, 25 bp, Homo sapien
tgacaacatgtcacagaccgggagg

SEQ ID NO: 4473354 - DNA, 25 bp, Homo sapien
aggtccctgcctatagaagccatgg

SEQ ID NO: 4473355 - DNA, 25 bp, Homo sapien
acagcttagtatgaatttgggtacc

SEQ ID NO: 4473356 - DNA, 25 bp, Homo sapien
caatatgtcatgacgttgcaccatc

SEQ ID NO: 4473357 - DNA, 25 bp, Homo sapien
ggagggtgcacttaagcaacctaga

SEQ ID NO: 4473358 - DNA, 25 bp, Homo sapien
caccttagttcatagactacgtagg

SEQ ID NO: 4473359 - DNA, 25 bp, Homo sapien
agtataacaaatgccctcattaccg

SEQ ID NO: 4473360 - DNA, 25 bp, Homo sapien
aatgccctcattaccgtgtttgccg

SEQ ID NO: 4473361 - DNA, 25 bp, Homo sapien
tccttacagtataacaaatgccctc

SEQ ID NO: 4473362 - DNA, 25 bp, Homo sapien
aacctccttacagtataacaaatgc

SEQ ID NO: 4473363 - DNA, 25 bp, Homo sapien
cataatcgccatgttggtaatttcc

SEQ ID NO: 4473364 - DNA, 25 bp, Homo sapien
cgagttcacaatcataatcgccatg

SEQ ID NO: 4473365 - DNA, 25 bp, Homo sapien
taatcgccatgttggtaatttccat

SEQ ID NO: 4473366 - DNA, 25 bp, Homo sapien
cacaatcataatcgccatgttggta

SEQ ID NO: 4473367 - DNA, 25 bp, Homo sapien
ggggcataacgaaaagtgccatcat

SEQ ID NO: 4473368 - DNA, 25 bp, Homo sapien
gatgcaaagtacaggggcataacga

SEQ ID NO: 4473369 - DNA, 25 bp, Homo sapien
agtacaggggcataacgaaaagtgc

SEQ ID NO: 4473370 - DNA, 25 bp, Homo sapien
ccagtcctgatgcaaagtacagggg

SEQ ID NO: 4473371 - DNA, 25 bp, Homo sapien
taaggggtccataggatccatgggt

SEQ ID NO: 4473372 - DNA, 25 bp, Homo sapien
tggcggtaaggggtccataggatcc

SEQ ID NO: 4473373 - DNA, 25 bp, Homo sapien
cggtaaggggtccataggatccatg

SEQ ID NO: 4473374 - DNA, 25 bp, Homo sapien
gggtccataggatccatgggtaaaa

SEQ ID NO: 4473375 - DNA, 25 bp, Homo sapien
cagaaatgggcctggtatattgtcc

SEQ ID NO: 4473376 - DNA, 25 bp, Homo sapien
ccatcctcaatgccagaaatgggcc

SEQ ID NO: 4473377 - DNA, 25 bp, Homo sapien
gaaatgggcctggtatattgtccca

SEQ ID NO: 4473378 - DNA, 25 bp, Homo sapien
atctgccccggttccatcctcaatg

SEQ ID NO: 4473379 - DNA, 25 bp, Homo sapien
tcaaggactgctcctgggcagcatg

SEQ ID NO: 4473380 - DNA, 25 bp, Homo sapien
tcagattggttctcagccacgggcc

SEQ ID NO: 4473381 - DNA, 25 bp, Homo sapien
catccagtcccaagctgttctgtgg

SEQ ID NO: 4473382 - DNA, 25 bp, Homo sapien
gatctgcacttctaatggacatggg

SEQ ID NO: 4473383 - DNA, 25 bp, Homo sapien
cattcacactctgggtcaatgataa

SEQ ID NO: 4473384 - DNA, 25 bp, Homo sapien
tcattcacactctgggtcaatgata

SEQ ID NO: 4473385 - DNA, 25 bp, Homo sapien
tcacactctgggtcaatgataaaaa

SEQ ID NO: 4473386 - DNA, 25 bp, Homo sapien
ttcacactctgggtcaatgataaaa

SEQ ID NO: 4473387 - DNA, 25 bp, Homo sapien
ttcataatcgcctcagcatcaacag

SEQ ID NO: 4473388 - DNA, 25 bp, Homo sapien
tacaagagctctcagctcttgattg

SEQ ID NO: 4473389 - DNA, 25 bp, Homo sapien
tccctgctgcttggtcccaagacca

SEQ ID NO: 4473390 - DNA, 25 bp, Homo sapien
tgcacatcccctacaagagctctca

SEQ ID NO: 4473391 - DNA, 25 bp, Homo sapien
ttgattgaagtcagtcattgtcagg

SEQ ID NO: 4473392 - DNA, 25 bp, Homo sapien
tcctttttatcctgttgagtcagct

SEQ ID NO: 4473393 - DNA, 25 bp, Homo sapien
caccctgggttgacctgagtctcca

SEQ ID NO: 4473394 - DNA, 25 bp, Homo sapien
agctcttctgactgcctcttccacc

SEQ ID NO: 4473395 - DNA, 25 bp, Homo sapien
cttccaccctgggttgacctgagtc

SEQ ID NO: 4473396 - DNA, 25 bp, Homo sapien
ttattgcgagtaaacacagctaaat

SEQ ID NO: 4473397 - DNA, 25 bp, Homo sapien
gcagggagtcacttgggcccaagca

SEQ ID NO: 4473398 - DNA, 25 bp, Homo sapien
ggagaatccgattcccttatcatcc

SEQ ID NO: 4473399 - DNA, 25 bp, Homo sapien
caggagctgtgttcgttcttttcca

SEQ ID NO: 4473400 - DNA, 25 bp, Homo sapien
gatacaaagcacacccaatgacagg

SEQ ID NO: 4473401 - DNA, 25 bp, Homo sapien
ttccagattccgcttcccgggagga

SEQ ID NO: 4473402 - DNA, 25 bp, Homo sapien
aattaaaatggcgaagcgttgaggc

SEQ ID NO: 4473403 - DNA, 25 bp, Homo sapien
agggacaaaccagagcccctgtctc

SEQ ID NO: 4473404 - DNA, 25 bp, Homo sapien
gagacatggacttttcctggctggc

SEQ ID NO: 4473405 - DNA, 25 bp, Homo sapien
catggacttttcctggctggcagca

SEQ ID NO: 4473406 - DNA, 25 bp, Homo sapien
ctggcctgagacatggacttttcct

SEQ ID NO: 4473407 - DNA, 25 bp, Homo sapien
cctgagacatggacttttcctggct

SEQ ID NO: 4473408 - DNA, 25 bp, Homo sapien
caattggatgactggaaggaggtag

SEQ ID NO: 4473409 - DNA, 25 bp, Homo sapien
gcttctccctttggtgcatttgcat

SEQ ID NO: 4473410 - DNA, 25 bp, Homo sapien
tgttccaagtctgttggatccttgt

SEQ ID NO: 4473411 - DNA, 25 bp, Homo sapien
gttggatccttgtccaggcttttcc

SEQ ID NO: 4473412 - DNA, 25 bp, Homo sapien
cctgcctgggtgactaggttgctca

SEQ ID NO: 4473413 - DNA, 25 bp, Homo sapien
tccagggtcacacaatagtcaagaa

SEQ ID NO: 4473414 - DNA, 25 bp, Homo sapien
tggaaaacatcaggtggcctgcctg

SEQ ID NO: 4473415 - DNA, 25 bp, Homo sapien
agaaccttgtgctgaaggcctgaca

SEQ ID NO: 4473416 - DNA, 25 bp, Homo sapien
tgctgctgacacaagagaggatggg

SEQ ID NO: 4473417 - DNA, 25 bp, Homo sapien
cctgtgcccaccccaagagccccat

SEQ ID NO: 4473418 - DNA, 25 bp, Homo sapien
catgctgctgacacaagagaggatg

SEQ ID NO: 4473419 - DNA, 25 bp, Homo sapien
gatggggagagtgggggcctgtgcc

SEQ ID NO: 4473420 - DNA, 25 bp, Homo sapien
taagtgtctcatattgagcttggtt

SEQ ID NO: 4473421 - DNA, 25 bp, Homo sapien
gactctaagtgtctcatattgagct

SEQ ID NO: 4473422 - DNA, 25 bp, Homo sapien
tcattctgactctaagtgtctcata

SEQ ID NO: 4473423 - DNA, 25 bp, Homo sapien
tgctgtgcatcccctctgttccggg

SEQ ID NO: 4473424 - DNA, 25 bp, Homo sapien
acctaaagcagatgttcttaatcca

SEQ ID NO: 4473425 - DNA, 25 bp, Homo sapien
taattccaagaaagatctaaaccta

SEQ ID NO: 4473426 - DNA, 25 bp, Homo sapien
tgtgggtacagtcaatgtgctcaaa

SEQ ID NO: 4473427 - DNA, 25 bp, Homo sapien
ccaggtccatggaaggtctgagtgt

SEQ ID NO: 4473428 - DNA, 25 bp, Homo sapien
cagggatatgagctgcttggcttgt

SEQ ID NO: 4473429 - DNA, 25 bp, Homo sapien
cagtggtccagggatatgagctgct

SEQ ID NO: 4473430 - DNA, 25 bp, Homo sapien
caagagctgcccagtggtccaggga

SEQ ID NO: 4473431 - DNA, 25 bp, Homo sapien
tgcccagtggtccagggatatgagc

SEQ ID NO: 4473432 - DNA, 25 bp, Homo sapien
ggagggctcccagggatcctcttac

SEQ ID NO: 4473433 - DNA, 25 bp, Homo sapien
agggctcccagggatcctcttactg

SEQ ID NO: 4473434 - DNA, 25 bp, Homo sapien
caggagggctcccagggatcctctt

SEQ ID NO: 4473435 - DNA, 25 bp, Homo sapien
ggctcccagggatcctcttactgac

SEQ ID NO: 4473436 - DNA, 25 bp, Homo sapien
agctgtgcacatatggatacccaaa

SEQ ID NO: 4473437 - DNA, 25 bp, Homo sapien
cgttgccgtttttgatgagctgtgc

SEQ ID NO: 4473438 - DNA, 25 bp, Homo sapien
ggccagccctggcgagccaatcagg

SEQ ID NO: 4473439 - DNA, 25 bp, Homo sapien
tacccaaacatctggagtggccatg

SEQ ID NO: 4473440 - DNA, 25 bp, Homo sapien
cggacactttcttgactaatgtgaa

SEQ ID NO: 4473441 - DNA, 25 bp, Homo sapien
gaagtactcggacactttcttgact

SEQ ID NO: 4473442 - DNA, 25 bp, Homo sapien
tactcggacactttcttgactaatg

SEQ ID NO: 4473443 - DNA, 25 bp, Homo sapien
atgtgaagtactcggacactttctt

SEQ ID NO: 4473444 - DNA, 25 bp, Homo sapien
aaccgggccacgaaccacactgtgg

SEQ ID NO: 4473445 - DNA, 25 bp, Homo sapien
tcctcttgcccacagtttagagtct

SEQ ID NO: 4473446 - DNA, 25 bp, Homo sapien
gcccacagtttagagtctgcccagc

SEQ ID NO: 4473447 - DNA, 25 bp, Homo sapien
accgggccacgaaccacactgtggg

SEQ ID NO: 4473448 - DNA, 25 bp, Homo sapien
tcatctgtttgactattatttttag

SEQ ID NO: 4473449 - DNA, 25 bp, Homo sapien
tgactattatttttagcacccagat

SEQ ID NO: 4473450 - DNA, 25 bp, Homo sapien
tgtttgactattatttttagcaccc

SEQ ID NO: 4473451 - DNA, 25 bp, Homo sapien
ctattatttttagcacccagattac

SEQ ID NO: 4473452 - DNA, 25 bp, Homo sapien
atgacaggcattgtgaaggagcatg

SEQ ID NO: 4473453 - DNA, 25 bp, Homo sapien
caggcattgtgaaggagcatgcaga

SEQ ID NO: 4473454 - DNA, 25 bp, Homo sapien
ggtggttccatgcccaccagacaaa

SEQ ID NO: 4473455 - DNA, 25 bp, Homo sapien
ggacggttggctggtcacctgattc

SEQ ID NO: 4473456 - DNA, 25 bp, Homo sapien
tcatgcattcatgtcctgttttccc

SEQ ID NO: 4473457 - DNA, 25 bp, Homo sapien
cctgttttcccaggtggtcacagct

SEQ ID NO: 4473458 - DNA, 25 bp, Homo sapien
catgcattcatgtcctgttttccca

SEQ ID NO: 4473459 - DNA, 25 bp, Homo sapien
tgtcctgttttcccaggtggtcaca

SEQ ID NO: 4473460 - DNA, 25 bp, Homo sapien
catttctgtacatgatgcaccattt

SEQ ID NO: 4473461 - DNA, 25 bp, Homo sapien
atttctgtacatgatgcaccatttg

SEQ ID NO: 4473462 - DNA, 25 bp, Homo sapien
tggcagagcgcaggctgatccgtgt

SEQ ID NO: 4473463 - DNA, 25 bp, Homo sapien
aggctgatccgtgtgctgcgtgggc

SEQ ID NO: 4473464 - DNA, 25 bp, Homo sapien
gctgatccgtgtgctgcgtgggctc

SEQ ID NO: 4473465 - DNA, 25 bp, Homo sapien
tgtcagggatggcagagcgcaggct

SEQ ID NO: 4473466 - DNA, 25 bp, Homo sapien
ctgtgatgccggtgacggtaggcag

SEQ ID NO: 4473467 - DNA, 25 bp, Homo sapien
cttcctgtgatgccggtgacggtag

SEQ ID NO: 4473468 - DNA, 25 bp, Homo sapien
tcctgtgatgccggtgacggtaggc

SEQ ID NO: 4473469 - DNA, 25 bp, Homo sapien
ctctcggtcttcctgtgatgccggt

SEQ ID NO: 4473470 - DNA, 25 bp, Homo sapien
ctccttctgctgccccgaagtccat

SEQ ID NO: 4473471 - DNA, 25 bp, Homo sapien
gcccacgataagtaaatccagatca

SEQ ID NO: 4473472 - DNA, 25 bp, Homo sapien
tagccccattcccagggactcatgg

SEQ ID NO: 4473473 - DNA, 25 bp, Homo sapien
catggctggccccattggggtaaac

SEQ ID NO: 4473474 - DNA, 25 bp, Homo sapien
gatcaaccctggtgcctagcagttc

SEQ ID NO: 4473475 - DNA, 25 bp, Homo sapien
ctatttcctccatagaagggagccc

SEQ ID NO: 4473476 - DNA, 25 bp, Homo sapien
ctccatagaagggagcccggccatg

SEQ ID NO: 4473477 - DNA, 25 bp, Homo sapien
gcccttcctcatggagctatttcct

SEQ ID NO: 4473478 - DNA, 25 bp, Homo sapien
ttcctccatagaagggagcccggcc

SEQ ID NO: 4473479 - DNA, 25 bp, Homo sapien
ccatgtctccacatggcaagactta

SEQ ID NO: 4473480 - DNA, 25 bp, Homo sapien
catggcaagacttaaagcagtccgg

SEQ ID NO: 4473481 - DNA, 25 bp, Homo sapien
acatccatgtctccacatggcaaga

SEQ ID NO: 4473482 - DNA, 25 bp, Homo sapien
gacttaaagcagtccggggacacca

SEQ ID NO: 4473483 - DNA, 25 bp, Homo sapien
tctcatgctggcatagcctgtatgc

SEQ ID NO: 4473484 - DNA, 25 bp, Homo sapien
ctcatgctggcatagcctgtatgca

SEQ ID NO: 4473485 - DNA, 25 bp, Homo sapien
atgctggcatagcctgtatgcatga

SEQ ID NO: 4473486 - DNA, 25 bp, Homo sapien
tcatgctggcatagcctgtatgcat

SEQ ID NO: 4473487 - DNA, 25 bp, Homo sapien
gcacaagccattgtgttccagggaa

SEQ ID NO: 4473488 - DNA, 25 bp, Homo sapien
tcacaaaccccgagcccttcaagca

SEQ ID NO: 4473489 - DNA, 25 bp, Homo sapien
gaatcacaaaccccgagcccttcaa

SEQ ID NO: 4473490 - DNA, 25 bp, Homo sapien
ccagacaaagggcattttagcttct

SEQ ID NO: 4473491 - DNA, 25 bp, Homo sapien
gaaaaacagcgcacacacaagctct

SEQ ID NO: 4473492 - DNA, 25 bp, Homo sapien
caagctctaactaatcattgtgaaa

SEQ ID NO: 4473493 - DNA, 25 bp, Homo sapien
ggagacaggcgggtggtaagaagaa

SEQ ID NO: 4473494 - DNA, 25 bp, Homo sapien
aatgcgactaaaaataaccgtggat

SEQ ID NO: 4473495 - DNA, 25 bp, Homo sapien
ctgctgtggagcacatgaacccggg

SEQ ID NO: 4473496 - DNA, 25 bp, Homo sapien
aattgtcccggagatagctggctgg

SEQ ID NO: 4473497 - DNA, 25 bp, Homo sapien
gacgcattcggctttcctttggtaa

SEQ ID NO: 4473498 - DNA, 25 bp, Homo sapien
tgaacactatagaggaattgtcccg

SEQ ID NO: 4473499 - DNA, 25 bp, Homo sapien
tacacagcagccagcatcctgtctg

SEQ ID NO: 4473500 - DNA, 25 bp, Homo sapien
ctacacagcagccagcatcctgtct

SEQ ID NO: 4473501 - DNA, 25 bp, Homo sapien
cacagcagccagcatcctgtctgag

SEQ ID NO: 4473502 - DNA, 25 bp, Homo sapien
acagcagccagcatcctgtctgagc

SEQ ID NO: 4473503 - DNA, 25 bp, Homo sapien
tggtttgctcttcgggctgtggctc

SEQ ID NO: 4473504 - DNA, 25 bp, Homo sapien
agagcacagctggtttgctcttcgg

SEQ ID NO: 4473505 - DNA, 25 bp, Homo sapien
gcacagctggtttgctcttcgggct

SEQ ID NO: 4473506 - DNA, 25 bp, Homo sapien
ctcagagagcacagctggtttgctc

SEQ ID NO: 4473507 - DNA, 25 bp, Homo sapien
cagattgcagtctcttgtggcccaa

SEQ ID NO: 4473508 - DNA, 25 bp, Homo sapien
ccagcatcgcagcagggatttcaca

SEQ ID NO: 4473509 - DNA, 25 bp, Homo sapien
cggacacccgcagaaatggagcttt

SEQ ID NO: 4473510 - DNA, 25 bp, Homo sapien
ttgtgagtctgaaaagaggatcccc

SEQ ID NO: 4473511 - DNA, 25 bp, Homo sapien
tgtctcacagactcggaagggttct

SEQ ID NO: 4473512 - DNA, 25 bp, Homo sapien
caagaaggccacagtttatgaggtc

SEQ ID NO: 4473513 - DNA, 25 bp, Homo sapien
tcaaactctgggagaaaccgactcg

SEQ ID NO: 4473514 - DNA, 25 bp, Homo sapien
aaccgactcggctctgacagggaga

SEQ ID NO: 4473515 - DNA, 25 bp, Homo sapien
acgccccgggtcagcccggcacact

SEQ ID NO: 4473516 - DNA, 25 bp, Homo sapien
cactcccctcctgaaaatgggctgg

SEQ ID NO: 4473517 - DNA, 25 bp, Homo sapien
tggacaaggcccgtagcctgaaaaa

SEQ ID NO: 4473518 - DNA, 25 bp, Homo sapien
tcggtggcctcttccagtagcacac

SEQ ID NO: 4473519 - DNA, 25 bp, Homo sapien
atctggtggtggatgtttccaatga

SEQ ID NO: 4473520 - DNA, 25 bp, Homo sapien
tctggtggtggatgtttccaatgag

SEQ ID NO: 4473521 - DNA, 25 bp, Homo sapien
agtgatggagacaagagtgatgatc

SEQ ID NO: 4473522 - DNA, 25 bp, Homo sapien
atggagacaagagtgatgatctggt

SEQ ID NO: 4473523 - DNA, 25 bp, Homo sapien
taactctgtgtcaccctcggaaagc

SEQ ID NO: 4473524 - DNA, 25 bp, Homo sapien
tacagcatggaagccaagaagcgga

SEQ ID NO: 4473525 - DNA, 25 bp, Homo sapien
ctcggaaagcctccgggccagtgag

SEQ ID NO: 4473526 - DNA, 25 bp, Homo sapien
gggctctgcggactacagcatggaa

SEQ ID NO: 4473527 - DNA, 25 bp, Homo sapien
gaagaaccaccatgaactcgatcac

SEQ ID NO: 4473528 - DNA, 25 bp, Homo sapien
agttgccaccccacccgtcaggtct

SEQ ID NO: 4473529 - DNA, 25 bp, Homo sapien
aggcgcagcacctctcccatgccac

SEQ ID NO: 4473530 - DNA, 25 bp, Homo sapien
ccaggcccatctgacggtgaaggat

SEQ ID NO: 4473531 - DNA, 25 bp, Homo sapien
ctctcttgctcattggatttgaaag

SEQ ID NO: 4473532 - DNA, 25 bp, Homo sapien
tgccctaattgtttagtggctctct

SEQ ID NO: 4473533 - DNA, 25 bp, Homo sapien
cttggcagctttcagtggctacccc

SEQ ID NO: 4473534 - DNA, 25 bp, Homo sapien
gcatcctggtcttggacttagagga

SEQ ID NO: 4473535 - DNA, 25 bp, Homo sapien
aaggataacggggtgcagagccatg

SEQ ID NO: 4473536 - DNA, 25 bp, Homo sapien
gagccatgggctgagcaaaagggca

SEQ ID NO: 4473537 - DNA, 25 bp, Homo sapien
gtgcagagccatgggctgagcaaaa

SEQ ID NO: 4473538 - DNA, 25 bp, Homo sapien
caaggtgaagaaggataacggggtg

SEQ ID NO: 4473539 - DNA, 25 bp, Homo sapien
gcagctcgaggcagacattggaatt

SEQ ID NO: 4473540 - DNA, 25 bp, Homo sapien
gaaggagtccgctaatctagtcagg

SEQ ID NO: 4473541 - DNA, 25 bp, Homo sapien
gaattacggacagccgagtcgtgct

SEQ ID NO: 4473542 - DNA, 25 bp, Homo sapien
ctgtcattaagcaggcagccgtcta

SEQ ID NO: 4473543 - DNA, 25 bp, Homo sapien
gacggagctgaacgccatcatcggg

SEQ ID NO: 4473544 - DNA, 25 bp, Homo sapien
agtggagcgcgccaagcaggtcacc

SEQ ID NO: 4473545 - DNA, 25 bp, Homo sapien
aagcaggtcaccatgacggagctga

SEQ ID NO: 4473546 - DNA, 25 bp, Homo sapien
gcaggtggcgcaggcagtggagcgc

SEQ ID NO: 4473547 - DNA, 25 bp, Homo sapien
agattgcgaagagactgaacacaat

SEQ ID NO: 4473548 - DNA, 25 bp, Homo sapien
acacaattttagcacagatcatgcc

SEQ ID NO: 4473549 - DNA, 25 bp, Homo sapien
gactgaacacaattttagcacagat

SEQ ID NO: 4473550 - DNA, 25 bp, Homo sapien
gcgaagagactgaacacaattttag

SEQ ID NO: 4473551 - DNA, 25 bp, Homo sapien
gctattaatgatagcagccagcaaa

SEQ ID NO: 4473552 - DNA, 25 bp, Homo sapien
cataattgtgtaccagagtgagaac

SEQ ID NO: 4473553 - DNA, 25 bp, Homo sapien
tgctagacagctgaaagcacccata

SEQ ID NO: 4473554 - DNA, 25 bp, Homo sapien
gacagtctggtttaagagagcactt

SEQ ID NO: 4473555 - DNA, 25 bp, Homo sapien
tggcttgaacattgaaatgcacaag

SEQ ID NO: 4473556 - DNA, 25 bp, Homo sapien
gatgtcctatggcttgaacattgaa

SEQ ID NO: 4473557 - DNA, 25 bp, Homo sapien
tcctatggcttgaacattgaaatgc

SEQ ID NO: 4473558 - DNA, 25 bp, Homo sapien
tactatgagatgtcctatggcttga

SEQ ID NO: 4473559 - DNA, 25 bp, Homo sapien
caaacgagaagacggagatgcagcg

SEQ ID NO: 4473560 - DNA, 25 bp, Homo sapien
gacaagctggcaaacgagaagacgg

SEQ ID NO: 4473561 - DNA, 25 bp, Homo sapien
gacggagatgcagcgccattatgtg

SEQ ID NO: 4473562 - DNA, 25 bp, Homo sapien
cctcaaagtggagtacgacaagctg

SEQ ID NO: 4473563 - DNA, 25 bp, Homo sapien
tgtgacaggatcaaagacgaattcc

SEQ ID NO: 4473564 - DNA, 25 bp, Homo sapien
cgggatttaaattcacggtggctga

SEQ ID NO: 4473565 - DNA, 25 bp, Homo sapien
catcaacccgggcagccgggattta

SEQ ID NO: 4473566 - DNA, 25 bp, Homo sapien
tcacggtggctgagtcttgtgacag

SEQ ID NO: 4473567 - DNA, 25 bp, Homo sapien
ggcagtttatctggcacctccattt

SEQ ID NO: 4473568 - DNA, 25 bp, Homo sapien
ccccgtcggagagctgagaaacttg

SEQ ID NO: 4473569 - DNA, 25 bp, Homo sapien
cgccgttgagagaggaggttaattc

SEQ ID NO: 4473570 - DNA, 25 bp, Homo sapien
tctatcatggcagggtaaacgaggc

SEQ ID NO: 4473571 - DNA, 25 bp, Homo sapien
tgctccgcggctctttgtctccact

SEQ ID NO: 4473572 - DNA, 25 bp, Homo sapien
cgggcgcccgactctgggatttcgc

SEQ ID NO: 4473573 - DNA, 25 bp, Homo sapien
gatttcgctgcgagaacgagctggg

SEQ ID NO: 4473574 - DNA, 25 bp, Homo sapien
gcttccacgctctcggaatcacgac

SEQ ID NO: 4473575 - DNA, 25 bp, Homo sapien
tttgcacctactgagcccggagttc

SEQ ID NO: 4473576 - DNA, 25 bp, Homo sapien
cagcgagaaccctttgcggaggctt

SEQ ID NO: 4473577 - DNA, 25 bp, Homo sapien
cgtgcccgctggacttaggatgcca

SEQ ID NO: 4473578 - DNA, 25 bp, Homo sapien
gatgccagggcgtttgatttgcacc

SEQ ID NO: 4473579 - DNA, 25 bp, Homo sapien
tatttggaactgctctcgcggcagt

SEQ ID NO: 4473580 - DNA, 25 bp, Homo sapien
gccggacgaagctgccacattattt

SEQ ID NO: 4473581 - DNA, 25 bp, Homo sapien
caagagggcattgtgacgtcgcgcc

SEQ ID NO: 4473582 - DNA, 25 bp, Homo sapien
taattcctgatctgaggagcgctgt

SEQ ID NO: 4473583 - DNA, 25 bp, Homo sapien
ggactccaggaaccctttgatgaac

SEQ ID NO: 4473584 - DNA, 25 bp, Homo sapien
tcttgttcagtctgtgtctggcctc

SEQ ID NO: 4473585 - DNA, 25 bp, Homo sapien
gatcttctgaagatccattctgaag

SEQ ID NO: 4473586 - DNA, 25 bp, Homo sapien
ccagccctatagacacagtcgtggg

SEQ ID NO: 4473587 - DNA, 25 bp, Homo sapien
ttctgcggaccccaaccaatagtat

SEQ ID NO: 4473588 - DNA, 25 bp, Homo sapien
ccttggagggagtgtgggctttagc

SEQ ID NO: 4473589 - DNA, 25 bp, Homo sapien
tgggctttagccaacaaggggcatg

SEQ ID NO: 4473590 - DNA, 25 bp, Homo sapien
ggcatgtgttgattgtgaccacagg

SEQ ID NO: 4473591 - DNA, 25 bp, Homo sapien
caaggggcatgtgttgattgtgacc

SEQ ID NO: 4473592 - DNA, 25 bp, Homo sapien
ttcacggcgtacagcagggagacag

SEQ ID NO: 4473593 - DNA, 25 bp, Homo sapien
ccccttcacggcgtacagcagggag

SEQ ID NO: 4473594 - DNA, 25 bp, Homo sapien
gaaccccttcacggcgtacagcagg

SEQ ID NO: 4473595 - DNA, 25 bp, Homo sapien
cttcacggcgtacagcagggagaca

SEQ ID NO: 4473596 - DNA, 25 bp, Homo sapien
ggcaactcatcgatggggttctcca

SEQ ID NO: 4473597 - DNA, 25 bp, Homo sapien
tggcaactcatcgatggggttctcc

SEQ ID NO: 4473598 - DNA, 25 bp, Homo sapien
ctggcaactcatcgatggggttctc

SEQ ID NO: 4473599 - DNA, 25 bp, Homo sapien
gggcccagggcaggcttgctggagg

SEQ ID NO: 4473600 - DNA, 25 bp, Homo sapien
tcaggaaccaggggggcccagggca

SEQ ID NO: 4473601 - DNA, 25 bp, Homo sapien
ctggaggaggtggcagaaccgggct

SEQ ID NO: 4473602 - DNA, 25 bp, Homo sapien
caggggggcccagggcaggcttgct

SEQ ID NO: 4473603 - DNA, 25 bp, Homo sapien
tacttggaccagtagtggagctgag

SEQ ID NO: 4473604 - DNA, 25 bp, Homo sapien
caccacgggtcctgctttcacaggt

SEQ ID NO: 4473605 - DNA, 25 bp, Homo sapien
tcacatcgggtacttggaccagtag

SEQ ID NO: 4473606 - DNA, 25 bp, Homo sapien
tggtcccctgttcccctgaatagat

SEQ ID NO: 4473607 - DNA, 25 bp, Homo sapien
tgggcttctgggtaagatcgccttc

SEQ ID NO: 4473608 - DNA, 25 bp, Homo sapien
gggtaagatcgccttcgatagaaga

SEQ ID NO: 4473609 - DNA, 25 bp, Homo sapien
gaagagctatcaaagatagaggaca

SEQ ID NO: 4473610 - DNA, 25 bp, Homo sapien
tcgccttcgatagaagagctatcaa

SEQ ID NO: 4473611 - DNA, 25 bp, Homo sapien
cagttggcgataatggagctgggag

SEQ ID NO: 4473612 - DNA, 25 bp, Homo sapien
tgtgtgccctcaatattgtttcagg

SEQ ID NO: 4473613 - DNA, 25 bp, Homo sapien
cagcagggcagttggcgataatgga

SEQ ID NO: 4473614 - DNA, 25 bp, Homo sapien
gagctgggagagccattgtgtgccc

SEQ ID NO: 4473615 - DNA, 25 bp, Homo sapien
tggtgccataagcagggtcctgtcc

SEQ ID NO: 4473616 - DNA, 25 bp, Homo sapien
taggacgtgcggtgtagcaggagga

SEQ ID NO: 4473617 - DNA, 25 bp, Homo sapien
tcctgtccctcagactctctgtggg

SEQ ID NO: 4473618 - DNA, 25 bp, Homo sapien
tgggacttcttggtgccataagcag

SEQ ID NO: 4473619 - DNA, 25 bp, Homo sapien
gctgcgtcgctcaggagggcttttc

SEQ ID NO: 4473620 - DNA, 25 bp, Homo sapien
ctgcgtcgctcaggagggcttttcc

SEQ ID NO: 4473621 - DNA, 25 bp, Homo sapien
cgctgcgtcgctcaggagggctttt

SEQ ID NO: 4473622 - DNA, 25 bp, Homo sapien
tcagtgttatttacccagtgagggc

SEQ ID NO: 4473623 - DNA, 25 bp, Homo sapien
gaccccagtaggatagtagagcccc

SEQ ID NO: 4473624 - DNA, 25 bp, Homo sapien
tgatgtagtaacagggatcccacct

SEQ ID NO: 4473625 - DNA, 25 bp, Homo sapien
ccatagtaacgagggtgggccagac

SEQ ID NO: 4473626 - DNA, 25 bp, Homo sapien
aattatgatcgcttgccagagagct

SEQ ID NO: 4473627 - DNA, 25 bp, Homo sapien
gagtgtcaccccaggcagatacacg

SEQ ID NO: 4473628 - DNA, 25 bp, Homo sapien
gggcctgagtgcagaccttgtctga

SEQ ID NO: 4473629 - DNA, 25 bp, Homo sapien
taatgaattccttaatggctgggcc

SEQ ID NO: 4473630 - DNA, 25 bp, Homo sapien
caaggttctcatctgttgagacatg

SEQ ID NO: 4473631 - DNA, 25 bp, Homo sapien
catctgttgagacatggacaagatt

SEQ ID NO: 4473632 - DNA, 25 bp, Homo sapien
ctgggcggaggccttcaaggttctc

SEQ ID NO: 4473633 - DNA, 25 bp, Homo sapien
ccagaaatccatcctattagaccaa

SEQ ID NO: 4473634 - DNA, 25 bp, Homo sapien
acaggcaattctggcttcaggagca

SEQ ID NO: 4473635 - DNA, 25 bp, Homo sapien
tcaggagcacgccacagcacatgga

SEQ ID NO: 4473636 - DNA, 25 bp, Homo sapien
catggatcggaaaccaccttggctg

SEQ ID NO: 4473637 - DNA, 25 bp, Homo sapien
aggacagctggcttgacttggctgt

SEQ ID NO: 4473638 - DNA, 25 bp, Homo sapien
tggcactggtagacgaagattctgg

SEQ ID NO: 4473639 - DNA, 25 bp, Homo sapien
cagagtggtttggagatcaaagaca

SEQ ID NO: 4473640 - DNA, 25 bp, Homo sapien
ttctggtcgcggaggcagagtggtt

SEQ ID NO: 4473641 - DNA, 25 bp, Homo sapien
cgtggagagggtcagcgtcaggacg

SEQ ID NO: 4473642 - DNA, 25 bp, Homo sapien
tgttccagttttttagtctgtgtgc

SEQ ID NO: 4473643 - DNA, 25 bp, Homo sapien
tcatgagttttgtcatccttgcaca

SEQ ID NO: 4473644 - DNA, 25 bp, Homo sapien
ggaacacttcatgagttttgtcatc

SEQ ID NO: 4473645 - DNA, 25 bp, Homo sapien
tctgtgtgctgctgatgcgagcact

SEQ ID NO: 4473646 - DNA, 25 bp, Homo sapien
tgcctttgcgctttcttcccacgtg

SEQ ID NO: 4473647 - DNA, 25 bp, Homo sapien
ttgcgctttcttcccacgtgcacgg

SEQ ID NO: 4473648 - DNA, 25 bp, Homo sapien
tgaaactgcctttgcgctttcttcc

SEQ ID NO: 4473649 - DNA, 25 bp, Homo sapien
actgcctttgcgctttcttcccacg

SEQ ID NO: 4473650 - DNA, 25 bp, Homo sapien
tatgcatcagttcagcagggcgagg

SEQ ID NO: 4473651 - DNA, 25 bp, Homo sapien
gctgtttgcctggttggagctcccc

SEQ ID NO: 4473652 - DNA, 25 bp, Homo sapien
cccagaagccggcaagaggcaaata

SEQ ID NO: 4473653 - DNA, 25 bp, Homo sapien
tccaatgtcctgtctgaagggctgt

SEQ ID NO: 4473654 - DNA, 25 bp, Homo sapien
acccagatccgtagagcttgtccag

SEQ ID NO: 4473655 - DNA, 25 bp, Homo sapien
tgggccccacacaaagtctgcccct

SEQ ID NO: 4473656 - DNA, 25 bp, Homo sapien
actcctgacccagatccgtagagct

SEQ ID NO: 4473657 - DNA, 25 bp, Homo sapien
tcctgacccagatccgtagagcttg

SEQ ID NO: 4473658 - DNA, 25 bp, Homo sapien
cagaaggctgccgtaattgcactag

SEQ ID NO: 4473659 - DNA, 25 bp, Homo sapien
gaaggctgccgtaattgcactagtg

SEQ ID NO: 4473660 - DNA, 25 bp, Homo sapien
tcagaaggctgccgtaattgcacta

SEQ ID NO: 4473661 - DNA, 25 bp, Homo sapien
agaaggctgccgtaattgcactagt

SEQ ID NO: 4473662 - DNA, 25 bp, Homo sapien
catcccggccggtgtaaaagatatt

SEQ ID NO: 4473663 - DNA, 25 bp, Homo sapien
gactgacagcccatgtaatttagca

SEQ ID NO: 4473664 - DNA, 25 bp, Homo sapien
aaaagatattgtgcggagtcttccg

SEQ ID NO: 4473665 - DNA, 25 bp, Homo sapien
aaaatatctcccacagttgactgac

SEQ ID NO: 4473666 - DNA, 25 bp, Homo sapien
gctggttggctcatcagtgtcgcag

SEQ ID NO: 4473667 - DNA, 25 bp, Homo sapien
tactgtgggcacataaacaaacacg

SEQ ID NO: 4473668 - DNA, 25 bp, Homo sapien
tccttctagtaatgccaagctgcct

SEQ ID NO: 4473669 - DNA, 25 bp, Homo sapien
agtgcagcccataggaagaccaggg

SEQ ID NO: 4473670 - DNA, 25 bp, Homo sapien
caggtgtgacaccaaagatgagttg

SEQ ID NO: 4473671 - DNA, 25 bp, Homo sapien
aaagcttgggcccaggtgtgacacc

SEQ ID NO: 4473672 - DNA, 25 bp, Homo sapien
ggcccaggtgtgacaccaaagatga

SEQ ID NO: 4473673 - DNA, 25 bp, Homo sapien
gcttgggcccaggtgtgacaccaaa

SEQ ID NO: 4473674 - DNA, 25 bp, Homo sapien
gggcaaaagcttggccctctggaag

SEQ ID NO: 4473675 - DNA, 25 bp, Homo sapien
ttccccagtaggtctgactgctcca

SEQ ID NO: 4473676 - DNA, 25 bp, Homo sapien
ccagtaggtctgactgctccaggcc

SEQ ID NO: 4473677 - DNA, 25 bp, Homo sapien
cccctgctgcaactacttgggcaaa

SEQ ID NO: 4473678 - DNA, 25 bp, Homo sapien
tagactgtgctgatacccttctcag

SEQ ID NO: 4473679 - DNA, 25 bp, Homo sapien
gacccatcatctcggaaccatgact

SEQ ID NO: 4473680 - DNA, 25 bp, Homo sapien
tcttcatagacccatcatctcggaa

SEQ ID NO: 4473681 - DNA, 25 bp, Homo sapien
gctacctgttttccgtccctgatgt

SEQ ID NO: 4473682 - DNA, 25 bp, Homo sapien
gggaggcagcagttggtacaggaag

SEQ ID NO: 4473683 - DNA, 25 bp, Homo sapien
aaatggggaggcagcagttggtaca

SEQ ID NO: 4473684 - DNA, 25 bp, Homo sapien
aggcagcagttggtacaggaagaac

SEQ ID NO: 4473685 - DNA, 25 bp, Homo sapien
gcagcagttggtacaggaagaacat

SEQ ID NO: 4473686 - DNA, 25 bp, Homo sapien
aaaggagttggtcatccagaggagg

SEQ ID NO: 4473687 - DNA, 25 bp, Homo sapien
gcctgggcataaaggagttggtcat

SEQ ID NO: 4473688 - DNA, 25 bp, Homo sapien
cacaggcctgggcataaaggagttg

SEQ ID NO: 4473689 - DNA, 25 bp, Homo sapien
tgggcataaaggagttggtcatcca

SEQ ID NO: 4473690 - DNA, 25 bp, Homo sapien
ctgtgaaagcccctaggacctgaga

SEQ ID NO: 4473691 - DNA, 25 bp, Homo sapien
caagtgccaggcagcctgattgttg

SEQ ID NO: 4473692 - DNA, 25 bp, Homo sapien
ccttgctgagtattgatgatgagtt

SEQ ID NO: 4473693 - DNA, 25 bp, Homo sapien
caggcagcctgattgttgctctggg

SEQ ID NO: 4473694 - DNA, 25 bp, Homo sapien
tctctcagcaccttgaatgaccttg

SEQ ID NO: 4473695 - DNA, 25 bp, Homo sapien
tgccttggttatctggttctggatc

SEQ ID NO: 4473696 - DNA, 25 bp, Homo sapien
agagccagacgcaagctctgtcttt

SEQ ID NO: 4473697 - DNA, 25 bp, Homo sapien
cttggaatcagagccagacgcaagc

SEQ ID NO: 4473698 - DNA, 25 bp, Homo sapien
tggttatctggttctggatcaagga

SEQ ID NO: 4473699 - DNA, 25 bp, Homo sapien
ttgctcagaggcagcagtctcccac

SEQ ID NO: 4473700 - DNA, 25 bp, Homo sapien
cttgctcagaggcagcagtctccca

SEQ ID NO: 4473701 - DNA, 25 bp, Homo sapien
taatagaaagctgctccttcgattg

SEQ ID NO: 4473702 - DNA, 25 bp, Homo sapien
tagaaagctgctccttcgattgagc

SEQ ID NO: 4473703 - DNA, 25 bp, Homo sapien
gcttgtaatagaaagctgctccttc

SEQ ID NO: 4473704 - DNA, 25 bp, Homo sapien
ctgcttgtaatagaaagctgctcct

SEQ ID NO: 4473705 - DNA, 25 bp, Homo sapien
tgcattaccggttccaaagctcttt

SEQ ID NO: 4473706 - DNA, 25 bp, Homo sapien
gctgaccgtttgctaacctctgcca

SEQ ID NO: 4473707 - DNA, 25 bp, Homo sapien
tgttctggccctcaggctgaccgtt

SEQ ID NO: 4473708 - DNA, 25 bp, Homo sapien
gagagtcctgatgtgtccgatgtaa

SEQ ID NO: 4473709 - DNA, 25 bp, Homo sapien
tcactccccttctactcccaaagac

SEQ ID NO: 4473710 - DNA, 25 bp, Homo sapien
ctccccttctactcccaaagactct

SEQ ID NO: 4473711 - DNA, 25 bp, Homo sapien
ccttctactcccaaagactctttct

SEQ ID NO: 4473712 - DNA, 25 bp, Homo sapien
ttctactcccaaagactctttctcc

SEQ ID NO: 4473713 - DNA, 25 bp, Homo sapien
gccacctatagctgtctggatctct

SEQ ID NO: 4473714 - DNA, 25 bp, Homo sapien
ggccagagctgtggtggatctgctg

SEQ ID NO: 4473715 - DNA, 25 bp, Homo sapien
ctgctggtagccacctatagctgtc

SEQ ID NO: 4473716 - DNA, 25 bp, Homo sapien
tggtagccacctatagctgtctgga

SEQ ID NO: 4473717 - DNA, 25 bp, Homo sapien
ggctgctcattgattctgactgctg

SEQ ID NO: 4473718 - DNA, 25 bp, Homo sapien
ctgctcattgattctgactgctggg

SEQ ID NO: 4473719 - DNA, 25 bp, Homo sapien
gtggcccgagggacactttatccat

SEQ ID NO: 4473720 - DNA, 25 bp, Homo sapien
cgaggtggcccgagggacactttat

SEQ ID NO: 4473721 - DNA, 25 bp, Homo sapien
ggcttggcaggcaggtctgagttgg

SEQ ID NO: 4473722 - DNA, 25 bp, Homo sapien
tggcaggcaggtctgagttggaggc

SEQ ID NO: 4473723 - DNA, 25 bp, Homo sapien
caggcaggtctgagttggaggcact

SEQ ID NO: 4473724 - DNA, 25 bp, Homo sapien
cttggcaggcaggtctgagttggag

SEQ ID NO: 4473725 - DNA, 25 bp, Homo sapien
tccaccaaattcacatcccaaattt

SEQ ID NO: 4473726 - DNA, 25 bp, Homo sapien
ccaagatcaggccaaagtgaaattc

SEQ ID NO: 4473727 - DNA, 25 bp, Homo sapien
caaagtgaaattcgttgggtgcagc

SEQ ID NO: 4473728 - DNA, 25 bp, Homo sapien
caaatttctgttgctcagtggatcc

SEQ ID NO: 4473729 - DNA, 25 bp, Homo sapien
ctggccccttgaatccagacttcct

SEQ ID NO: 4473730 - DNA, 25 bp, Homo sapien
gctggccccttgaatccagacttcc

SEQ ID NO: 4473731 - DNA, 25 bp, Homo sapien
cacagtggtatcctgctgcttatag

SEQ ID NO: 4473732 - DNA, 25 bp, Homo sapien
cttatagggcctcatgtgtttgtgt

SEQ ID NO: 4473733 - DNA, 25 bp, Homo sapien
cggggctggctattttgacatgcat

SEQ ID NO: 4473734 - DNA, 25 bp, Homo sapien
tgccacaacacctcgggccctggtc

SEQ ID NO: 4473735 - DNA, 25 bp, Homo sapien
catggcggggctggctattttgaca

SEQ ID NO: 4473736 - DNA, 25 bp, Homo sapien
acacctcgggccctggtctgtccct

SEQ ID NO: 4473737 - DNA, 25 bp, Homo sapien
aagtggtaaggtccacagagatgcc

SEQ ID NO: 4473738 - DNA, 25 bp, Homo sapien
tctgagttgggcaatcgtgggcact

SEQ ID NO: 4473739 - DNA, 25 bp, Homo sapien
aattggctgaagattggctccatgg

SEQ ID NO: 4473740 - DNA, 25 bp, Homo sapien
tggtcctgaagtggtaaggtccaca

SEQ ID NO: 4473741 - DNA, 25 bp, Homo sapien
gggctgtaggggctgtttcctcatc

SEQ ID NO: 4473742 - DNA, 25 bp, Homo sapien
tttgcggcgctgatcttgctgagag

SEQ ID NO: 4473743 - DNA, 25 bp, Homo sapien
ctgtaggggctgtttcctcatccat

SEQ ID NO: 4473744 - DNA, 25 bp, Homo sapien
ctttgcggcgctgatcttgctgaga

SEQ ID NO: 4473745 - DNA, 25 bp, Homo sapien
gactccataggtggccagcccttgc

SEQ ID NO: 4473746 - DNA, 25 bp, Homo sapien
tgactccataggtggccagcccttg

SEQ ID NO: 4473747 - DNA, 25 bp, Homo sapien
gctgactccataggtggccagccct

SEQ ID NO: 4473748 - DNA, 25 bp, Homo sapien
ttggctgactccataggtggccagc

SEQ ID NO: 4473749 - DNA, 25 bp, Homo sapien
ggagtcttcccagctaaatgtacag

SEQ ID NO: 4473750 - DNA, 25 bp, Homo sapien
gatataagctgtggagtcttcccag

SEQ ID NO: 4473751 - DNA, 25 bp, Homo sapien
tgacgatctgatataagctgtggag

SEQ ID NO: 4473752 - DNA, 25 bp, Homo sapien
ggcttgggactctgtgacgatctga

SEQ ID NO: 4473753 - DNA, 25 bp, Homo sapien
gagttcccagttggggagagaccca

SEQ ID NO: 4473754 - DNA, 25 bp, Homo sapien
gcaggagttcccagttggggagaga

SEQ ID NO: 4473755 - DNA, 25 bp, Homo sapien
gttcccagttggggagagacccaca

SEQ ID NO: 4473756 - DNA, 25 bp, Homo sapien
caggagttcccagttggggagagac

SEQ ID NO: 4473757 - DNA, 25 bp, Homo sapien
agaaagcctaacgtagataggtgag

SEQ ID NO: 4473758 - DNA, 25 bp, Homo sapien
tccagctggtaggagtcggtgtgaa

SEQ ID NO: 4473759 - DNA, 25 bp, Homo sapien
agcctaacgtagataggtgagggcc

SEQ ID NO: 4473760 - DNA, 25 bp, Homo sapien
aacgtagataggtgagggccctcca

SEQ ID NO: 4473761 - DNA, 25 bp, Homo sapien
cactgtacaatcacaggaacctttg

SEQ ID NO: 4473762 - DNA, 25 bp, Homo sapien
tcactgtacaatcacaggaaccttt

SEQ ID NO: 4473763 - DNA, 25 bp, Homo sapien
actgtacaatcacaggaacctttgc

SEQ ID NO: 4473764 - DNA, 25 bp, Homo sapien
tagttgactaaatcctgattctgag

SEQ ID NO: 4473765 - DNA, 25 bp, Homo sapien
cagataaaccttgtgtccctggaaa

SEQ ID NO: 4473766 - DNA, 25 bp, Homo sapien
cagctgtccggccaactagtttagt

SEQ ID NO: 4473767 - DNA, 25 bp, Homo sapien
tttttatgcaaagataccatctccc

SEQ ID NO: 4473768 - DNA, 25 bp, Homo sapien
gtatgggacctcaacgctgcaggca

SEQ ID NO: 4473769 - DNA, 25 bp, Homo sapien
cagagagaaccgctttcaaatggat

SEQ ID NO: 4473770 - DNA, 25 bp, Homo sapien
acgggtgcacgtgtcttctgggagg

SEQ ID NO: 4473771 - DNA, 25 bp, Homo sapien
tgcttctgcgggcacgggtgcacgt

SEQ ID NO: 4473772 - DNA, 25 bp, Homo sapien
ggctgtcagcagctacgttcgtttt

SEQ ID NO: 4473773 - DNA, 25 bp, Homo sapien
gataccttatgaaaatcttggtccc

SEQ ID NO: 4473774 - DNA, 25 bp, Homo sapien
aaaccatacagggaactctatcaga

SEQ ID NO: 4473775 - DNA, 25 bp, Homo sapien
gcagccctgattctgggttgttact

SEQ ID NO: 4473776 - DNA, 25 bp, Homo sapien
cttggctgggctggattagttgaat

SEQ ID NO: 4473777 - DNA, 25 bp, Homo sapien
ttgaatccagatgacgcaggccagt

SEQ ID NO: 4473778 - DNA, 25 bp, Homo sapien
cagagggcatgggtcatcatcacac

SEQ ID NO: 4473779 - DNA, 25 bp, Homo sapien
cctgctgacataagggtgcttggct

SEQ ID NO: 4473780 - DNA, 25 bp, Homo sapien
gtaaaacggatgagaatccagggcc

SEQ ID NO: 4473781 - DNA, 25 bp, Homo sapien
ttacacaaggtgatgcatggcagag

SEQ ID NO: 4473782 - DNA, 25 bp, Homo sapien
caatgattaacagacgcctaagcgg

SEQ ID NO: 4473783 - DNA, 25 bp, Homo sapien
tccagggcctccaacagtaattaca

SEQ ID NO: 4473784 - DNA, 25 bp, Homo sapien
ctgctgactgcaagtggtagaggca

SEQ ID NO: 4473785 - DNA, 25 bp, Homo sapien
tgccctgaggtgttccggtagaaga

SEQ ID NO: 4473786 - DNA, 25 bp, Homo sapien
ggtcagtgatttgaacagctccatt

SEQ ID NO: 4473787 - DNA, 25 bp, Homo sapien
catagatgcaaaactggaggctcag

SEQ ID NO: 4473788 - DNA, 25 bp, Homo sapien
cacgaggcaatacactaaagatggt

SEQ ID NO: 4473789 - DNA, 25 bp, Homo sapien
tagactttcttccatacgctgattg

SEQ ID NO: 4473790 - DNA, 25 bp, Homo sapien
gcagccatattaaaccacgaggcaa

SEQ ID NO: 4473791 - DNA, 25 bp, Homo sapien
tctggagtctcaggacatttcatgt

SEQ ID NO: 4473792 - DNA, 25 bp, Homo sapien
tctggggagtgagtcgacgggcccc

SEQ ID NO: 4473793 - DNA, 25 bp, Homo sapien
cctcgaggagccagcgctgaaccga

SEQ ID NO: 4473794 - DNA, 25 bp, Homo sapien
ccccgaggcggcatgacactggcca

SEQ ID NO: 4473795 - DNA, 25 bp, Homo sapien
cagcgctgaaccgaagccggaggca

SEQ ID NO: 4473796 - DNA, 25 bp, Homo sapien
agcagcaaggatggctccatcattt

SEQ ID NO: 4473797 - DNA, 25 bp, Homo sapien
tgaagggcctggctgtaactgtcca

SEQ ID NO: 4473798 - DNA, 25 bp, Homo sapien
tgtgagtgaaccagagcatcgatgg

SEQ ID NO: 4473799 - DNA, 25 bp, Homo sapien
ctttgtgagtgaaccagagcatcga

SEQ ID NO: 4473800 - DNA, 25 bp, Homo sapien
tcctggtctctctcagatgggatga

SEQ ID NO: 4473801 - DNA, 25 bp, Homo sapien
tggtctctctcagatgggatgatgt

SEQ ID NO: 4473802 - DNA, 25 bp, Homo sapien
cagtcctggtctctctcagatggga

SEQ ID NO: 4473803 - DNA, 25 bp, Homo sapien
tcagtcctggtctctctcagatggg

SEQ ID NO: 4473804 - DNA, 25 bp, Homo sapien
tcccagctatcgagtgcaggcggtg

SEQ ID NO: 4473805 - DNA, 25 bp, Homo sapien
tgagatttctaaagccccattccag

SEQ ID NO: 4473806 - DNA, 25 bp, Homo sapien
ggcaccagggcgctcgtaattggta

SEQ ID NO: 4473807 - DNA, 25 bp, Homo sapien
tgctgggaatgcattggaagctgac

SEQ ID NO: 4473808 - DNA, 25 bp, Homo sapien
tcatcttcctggcttctctttgcct

SEQ ID NO: 4473809 - DNA, 25 bp, Homo sapien
ggctcatcttcctggcttctctttg

SEQ ID NO: 4473810 - DNA, 25 bp, Homo sapien
cttcctggcttctctttgccttggc

SEQ ID NO: 4473811 - DNA, 25 bp, Homo sapien
atcttcctggcttctctttgccttg

SEQ ID NO: 4473812 - DNA, 25 bp, Homo sapien
tatgtggggcacacagctcgaaata

SEQ ID NO: 4473813 - DNA, 25 bp, Homo sapien
atgtggggcacacagctcgaaatac

SEQ ID NO: 4473814 - DNA, 25 bp, Homo sapien
ttatgtggggcacacagctcgaaat

SEQ ID NO: 4473815 - DNA, 25 bp, Homo sapien
ggccatctctgtctgccagggccct

SEQ ID NO: 4473816 - DNA, 25 bp, Homo sapien
catctctgtctgccagggcccttgg

SEQ ID NO: 4473817 - DNA, 25 bp, Homo sapien
ctggatgactggggccatctctgtc

SEQ ID NO: 4473818 - DNA, 25 bp, Homo sapien
atctctgtctgccagggcccttggt

SEQ ID NO: 4473819 - DNA, 25 bp, Homo sapien
tttcttttcgatgtattcccacagc

SEQ ID NO: 4473820 - DNA, 25 bp, Homo sapien
ggaagcattcttgaaggcataattg

SEQ ID NO: 4473821 - DNA, 25 bp, Homo sapien
gcaaacgtgccctttctgttgtact

SEQ ID NO: 4473822 - DNA, 25 bp, Homo sapien
ctgttgtactttgcggccttttggg

SEQ ID NO: 4473823 - DNA, 25 bp, Homo sapien
taaatggaagacacttctccaaaag

SEQ ID NO: 4473824 - DNA, 25 bp, Homo sapien
ggatgatgttgccaacaaacatccc

SEQ ID NO: 4473825 - DNA, 25 bp, Homo sapien
caaagcagtgaccaatagttgtgtc

SEQ ID NO: 4473826 - DNA, 25 bp, Homo sapien
ggcagcagctgtagatgtctatcgt

SEQ ID NO: 4473827 - DNA, 25 bp, Homo sapien
ccgggcatcatccttgtgctgtcca

SEQ ID NO: 4473828 - DNA, 25 bp, Homo sapien
ctccctcccgggcatcatccttgtg

SEQ ID NO: 4473829 - DNA, 25 bp, Homo sapien
ctcccgggcatcatccttgtgctgt

SEQ ID NO: 4473830 - DNA, 25 bp, Homo sapien
gggcatcatccttgtgctgtccacc

SEQ ID NO: 4473831 - DNA, 25 bp, Homo sapien
agggtctgtaaccttctggtgtatt

SEQ ID NO: 4473832 - DNA, 25 bp, Homo sapien
ccctctaggtatggggtccaatcca

SEQ ID NO: 4473833 - DNA, 25 bp, Homo sapien
ggtatggggtccaatccacttcaca

SEQ ID NO: 4473834 - DNA, 25 bp, Homo sapien
gaagggtctgtaaccttctggtgta

SEQ ID NO: 4473835 - DNA, 25 bp, Homo sapien
ctgtgtctttgcagcgtggctttga

SEQ ID NO: 4473836 - DNA, 25 bp, Homo sapien
cttgggtgggccgtcgggcagaggc

SEQ ID NO: 4473837 - DNA, 25 bp, Homo sapien
tctttgcagcgtggctttgatgctc

SEQ ID NO: 4473838 - DNA, 25 bp, Homo sapien
cctggctgtgtctttgcagcgtggc

SEQ ID NO: 4473839 - DNA, 25 bp, Homo sapien
tgtagggggcctcccctgtcatttg

SEQ ID NO: 4473840 - DNA, 25 bp, Homo sapien
ctgtctttgtagggggcctcccctg

SEQ ID NO: 4473841 - DNA, 25 bp, Homo sapien
ggcctcccctgtcatttgcttctct

SEQ ID NO: 4473842 - DNA, 25 bp, Homo sapien
gggggcctcccctgtcatttgcttc

SEQ ID NO: 4473843 - DNA, 25 bp, Homo sapien
tcagaagaagcccatcttgaagcca

SEQ ID NO: 4473844 - DNA, 25 bp, Homo sapien
cagaagaagcccatcttgaagccag

SEQ ID NO: 4473845 - DNA, 25 bp, Homo sapien
gaagaagcccatcttgaagccagtt

SEQ ID NO: 4473846 - DNA, 25 bp, Homo sapien
agaagcccatcttgaagccagttct

SEQ ID NO: 4473847 - DNA, 25 bp, Homo sapien
aagaggaaagatgtcagggcggctg

SEQ ID NO: 4473848 - DNA, 25 bp, Homo sapien
gctggcactgggtgggattcacaga

SEQ ID NO: 4473849 - DNA, 25 bp, Homo sapien
gaaagatgtcagggcggctggcact

SEQ ID NO: 4473850 - DNA, 25 bp, Homo sapien
gcactgggtgggattcacagatctc

SEQ ID NO: 4473851 - DNA, 25 bp, Homo sapien
ggtgcaatcctgtactcctgaaagt

SEQ ID NO: 4473852 - DNA, 25 bp, Homo sapien
tctaggaatgcaatcggttgtgggc

SEQ ID NO: 4473853 - DNA, 25 bp, Homo sapien
tcctgaaagtcatggtgcttactga

SEQ ID NO: 4473854 - DNA, 25 bp, Homo sapien
gaggacagctatggaaatatccctt

SEQ ID NO: 4473855 - DNA, 25 bp, Homo sapien
gactttttctgcatggttgaggagt

SEQ ID NO: 4473856 - DNA, 25 bp, Homo sapien
ggtgacaccagcctgcacagtgctg

SEQ ID NO: 4473857 - DNA, 25 bp, Homo sapien
gagggaggacagtgctccctgttgg

SEQ ID NO: 4473858 - DNA, 25 bp, Homo sapien
cctgttggggtgcttggaaccagct

SEQ ID NO: 4473859 - DNA, 25 bp, Homo sapien
accagctggagcgagcgttgaaccg

SEQ ID NO: 4473860 - DNA, 25 bp, Homo sapien
cagctggagcgagcgttgaaccggg

SEQ ID NO: 4473861 - DNA, 25 bp, Homo sapien
tgaccagctggagcgagcgttgaac

SEQ ID NO: 4473862 - DNA, 25 bp, Homo sapien
cgccccggtgaggacgtgaccagct

SEQ ID NO: 4473863 - DNA, 25 bp, Homo sapien
tccggccccggcgaggcaagggctg

SEQ ID NO: 4473864 - DNA, 25 bp, Homo sapien
ttgttgattttggacgggctccggc

SEQ ID NO: 4473865 - DNA, 25 bp, Homo sapien
ctgtaattatacagcgtccaaagga

SEQ ID NO: 4473866 - DNA, 25 bp, Homo sapien
attatacagcgtccaaaggagaggc

SEQ ID NO: 4473867 - DNA, 25 bp, Homo sapien
catgagccaactggagctgtggttc

SEQ ID NO: 4473868 - DNA, 25 bp, Homo sapien
gctgtgcaccgccaatacatgtttg

SEQ ID NO: 4473869 - DNA, 25 bp, Homo sapien
caagcgcatttgagatccttcaaca

SEQ ID NO: 4473870 - DNA, 25 bp, Homo sapien
tggttcctcgaattgctctccaaga

SEQ ID NO: 4473871 - DNA, 25 bp, Homo sapien
ccctcctgggactggtcgatgttct

SEQ ID NO: 4473872 - DNA, 25 bp, Homo sapien
gagtaatcaaatcccagtcgctgca

SEQ ID NO: 4473873 - DNA, 25 bp, Homo sapien
ggccgggtactcctgtctggagcca

SEQ ID NO: 4473874 - DNA, 25 bp, Homo sapien
aaatcatcttgtcctagccatcggg

SEQ ID NO: 4473875 - DNA, 25 bp, Homo sapien
ctgcatttgtgctccacatgtggca

SEQ ID NO: 4473876 - DNA, 25 bp, Homo sapien
ggtggcatctacatagaggctattt

SEQ ID NO: 4473877 - DNA, 25 bp, Homo sapien
ctcactgcatttgtgctccacatgt

SEQ ID NO: 4473878 - DNA, 25 bp, Homo sapien
acagaggtggcatctacatagaggc

SEQ ID NO: 4473879 - DNA, 25 bp, Homo sapien
gaacccctgtctccggtcatacacc

SEQ ID NO: 4473880 - DNA, 25 bp, Homo sapien
tgtctccggtcatacaccaggagga

SEQ ID NO: 4473881 - DNA, 25 bp, Homo sapien
cctactgccctcctccgaacccctg

SEQ ID NO: 4473882 - DNA, 25 bp, Homo sapien
accagaacccctatgttccctactg

SEQ ID NO: 4473883 - DNA, 25 bp, Homo sapien
atggtcacgaccacatccctctcac

SEQ ID NO: 4473884 - DNA, 25 bp, Homo sapien
gtaatggtcacgaccacatccctct

SEQ ID NO: 4473885 - DNA, 25 bp, Homo sapien
tagtaatggtcacgaccacatccct

SEQ ID NO: 4473886 - DNA, 25 bp, Homo sapien
cacatccctctcaccgttcccatca

SEQ ID NO: 4473887 - DNA, 25 bp, Homo sapien
catagtgtccttggagatacctcct

SEQ ID NO: 4473888 - DNA, 25 bp, Homo sapien
tgagcgcaggccactctcactgttc

SEQ ID NO: 4473889 - DNA, 25 bp, Homo sapien
tcactgttgccgatgagctgcaccg

SEQ ID NO: 4473890 - DNA, 25 bp, Homo sapien
agcccgggccaccactggctttgct

SEQ ID NO: 4473891 - DNA, 25 bp, Homo sapien
aggctggctggtggagggtgcccac

SEQ ID NO: 4473892 - DNA, 25 bp, Homo sapien
taggctggctggtggagggtgccca

SEQ ID NO: 4473893 - DNA, 25 bp, Homo sapien
ctaggctggctggtggagggtgccc

SEQ ID NO: 4473894 - DNA, 25 bp, Homo sapien
cagcctggtttactctccacctgta

SEQ ID NO: 4473895 - DNA, 25 bp, Homo sapien
gggccaccacattaggtccaatgac

SEQ ID NO: 4473896 - DNA, 25 bp, Homo sapien
tctctccccgagaagcttccagttt

SEQ ID NO: 4473897 - DNA, 25 bp, Homo sapien
agcaggtttggcgtggcccagcctg

SEQ ID NO: 4473898 - DNA, 25 bp, Homo sapien
gctgggacatttcatgggctttctg

SEQ ID NO: 4473899 - DNA, 25 bp, Homo sapien
gccaggaggcttatgctgggacatt

SEQ ID NO: 4473900 - DNA, 25 bp, Homo sapien
caagcccatcttggtatctgcacag

SEQ ID NO: 4473901 - DNA, 25 bp, Homo sapien
gaggccaattgatgacccaagatgc

SEQ ID NO: 4473902 - DNA, 25 bp, Homo sapien
gcaaatccatcactttctgggtcca

SEQ ID NO: 4473903 - DNA, 25 bp, Homo sapien
caaatccatcactttctgggtccat

SEQ ID NO: 4473904 - DNA, 25 bp, Homo sapien
agaagagatgcaaatccatcacttt

SEQ ID NO: 4473905 - DNA, 25 bp, Homo sapien
ctggagaagagatgcaaatccatca

SEQ ID NO: 4473906 - DNA, 25 bp, Homo sapien
gaaagtgccacgtggagtccctgac

SEQ ID NO: 4473907 - DNA, 25 bp, Homo sapien
ctggagggccgattgtttggttctt

SEQ ID NO: 4473908 - DNA, 25 bp, Homo sapien
tgtacattgctatacaacagtgaac

SEQ ID NO: 4473909 - DNA, 25 bp, Homo sapien
cttgttcgttgcatgtacattgcta

SEQ ID NO: 4473910 - DNA, 25 bp, Homo sapien
gcctgcagcttcacgtgggaggaat

SEQ ID NO: 4473911 - DNA, 25 bp, Homo sapien
gaggaatgtgcaaataggacagtgt

SEQ ID NO: 4473912 - DNA, 25 bp, Homo sapien
cttcacgtgggaggaatgtgcaaat

SEQ ID NO: 4473913 - DNA, 25 bp, Homo sapien
aatgtgcaaataggacagtgtggca

SEQ ID NO: 4473914 - DNA, 25 bp, Homo sapien
ggcattagcaatgggatctgcaggc

SEQ ID NO: 4473915 - DNA, 25 bp, Homo sapien
tgttccaagacccacataagcttcc

SEQ ID NO: 4473916 - DNA, 25 bp, Homo sapien
ttcacattgttgatccccgttgttc

SEQ ID NO: 4473917 - DNA, 25 bp, Homo sapien
aatgggatctgcaggcacaatagac

SEQ ID NO: 4473918 - DNA, 25 bp, Homo sapien
aagccgtagtcaccgggaagcagct

SEQ ID NO: 4473919 - DNA, 25 bp, Homo sapien
ccttgtgtgaggcccttgtcctaag

SEQ ID NO: 4473920 - DNA, 25 bp, Homo sapien
tcaaagggcactttgagccttgtgt

SEQ ID NO: 4473921 - DNA, 25 bp, Homo sapien
cacgggcccttgaaataagccgtag

SEQ ID NO: 4473922 - DNA, 25 bp, Homo sapien
tatttcctcttcacatccaccgagg

SEQ ID NO: 4473923 - DNA, 25 bp, Homo sapien
tcacatccaccgagggagaagggcc

SEQ ID NO: 4473924 - DNA, 25 bp, Homo sapien
ttctcttgatgacgcagagggctga

SEQ ID NO: 4473925 - DNA, 25 bp, Homo sapien
gaagggccatttctcttgatgacgc

SEQ ID NO: 4473926 - DNA, 25 bp, Homo sapien
cagaatgttccccggcatcttgcat

SEQ ID NO: 4473927 - DNA, 25 bp, Homo sapien
acacagaatgttccccggcatcttg

SEQ ID NO: 4473928 - DNA, 25 bp, Homo sapien
gtgtacacagaatgttccccggcat

SEQ ID NO: 4473929 - DNA, 25 bp, Homo sapien
gtacacagaatgttccccggcatct

SEQ ID NO: 4473930 - DNA, 25 bp, Homo sapien
gctcaggctctgaccattcccgtaa

SEQ ID NO: 4473931 - DNA, 25 bp, Homo sapien
tctgggcacataagttactgcgttc

SEQ ID NO: 4473932 - DNA, 25 bp, Homo sapien
tactgcgttcccaggacaactgtag

SEQ ID NO: 4473933 - DNA, 25 bp, Homo sapien
gatttctctgggcacataagttact

SEQ ID NO: 4473934 - DNA, 25 bp, Homo sapien
agcctccgtgctgcctaaaatgcat

SEQ ID NO: 4473935 - DNA, 25 bp, Homo sapien
agccagcatgtgtaaatccacagaa

SEQ ID NO: 4473936 - DNA, 25 bp, Homo sapien
aagccagcatgtgtaaatccacaga

SEQ ID NO: 4473937 - DNA, 25 bp, Homo sapien
gaagccagcatgtgtaaatccacag

SEQ ID NO: 4473938 - DNA, 25 bp, Homo sapien
gccagcatgtgtaaatccacagaaa

SEQ ID NO: 4473939 - DNA, 25 bp, Homo sapien
agtcctccaccatgccggaatccac

SEQ ID NO: 4473940 - DNA, 25 bp, Homo sapien
cagtcctccaccatgccggaatcca

SEQ ID NO: 4473941 - DNA, 25 bp, Homo sapien
caagaaggttgtttacgctcaaggt

SEQ ID NO: 4473942 - DNA, 25 bp, Homo sapien
ccgtggttgtacaggtcagagttca

SEQ ID NO: 4473943 - DNA, 25 bp, Homo sapien
gttgtacaggtcagagttcagggga

SEQ ID NO: 4473944 - DNA, 25 bp, Homo sapien
tggttgtacaggtcagagttcaggg

SEQ ID NO: 4473945 - DNA, 25 bp, Homo sapien
tgtacaggtcagagttcaggggagg

SEQ ID NO: 4473946 - DNA, 25 bp, Homo sapien
tctggaagtaaaaggttgaagacac

SEQ ID NO: 4473947 - DNA, 25 bp, Homo sapien
ggccaaagagccattactcatacag

SEQ ID NO: 4473948 - DNA, 25 bp, Homo sapien
gacacaatgccttactctaaaagaa

SEQ ID NO: 4473949 - DNA, 25 bp, Homo sapien
cagtttagccagtgtttaagagctc

SEQ ID NO: 4473950 - DNA, 25 bp, Homo sapien
tgaggcacagaattgacagcatgac

SEQ ID NO: 4473951 - DNA, 25 bp, Homo sapien
tctgagagtttcctgcgggcagcag

SEQ ID NO: 4473952 - DNA, 25 bp, Homo sapien
tccttggttagacgggactgaggca

SEQ ID NO: 4473953 - DNA, 25 bp, Homo sapien
gaggacacaaacagcacgttcaggg

SEQ ID NO: 4473954 - DNA, 25 bp, Homo sapien
gttattattggagccaaggtttggc

SEQ ID NO: 4473955 - DNA, 25 bp, Homo sapien
ctttgttattattggagccaaggtt

SEQ ID NO: 4473956 - DNA, 25 bp, Homo sapien
ttgttattattggagccaaggtttg

SEQ ID NO: 4473957 - DNA, 25 bp, Homo sapien
tctttgttattattggagccaaggt

SEQ ID NO: 4473958 - DNA, 25 bp, Homo sapien
agagctgctcgtgtgcggcgctcct

SEQ ID NO: 4473959 - DNA, 25 bp, Homo sapien
tgccagttgctgtgaccacaaaagc

SEQ ID NO: 4473960 - DNA, 25 bp, Homo sapien
tgtgaccacaaaagccagagctgct

SEQ ID NO: 4473961 - DNA, 25 bp, Homo sapien
tcctcacttgccctcagtatcctca

SEQ ID NO: 4473962 - DNA, 25 bp, Homo sapien
ttctaattcattcgagcactgtact

SEQ ID NO: 4473963 - DNA, 25 bp, Homo sapien
tttctaattcattcgagcactgtac

SEQ ID NO: 4473964 - DNA, 25 bp, Homo sapien
tcacatggatttaggtttgtcctgc

SEQ ID NO: 4473965 - DNA, 25 bp, Homo sapien
catggatttaggtttgtcctgcttt

SEQ ID NO: 4473966 - DNA, 25 bp, Homo sapien
tatggatataagagctcccctcctg

SEQ ID NO: 4473967 - DNA, 25 bp, Homo sapien
tacagtagtgactggaggacgagcc

SEQ ID NO: 4473968 - DNA, 25 bp, Homo sapien
tagcagagtgacattacaagcagac

SEQ ID NO: 4473969 - DNA, 25 bp, Homo sapien
tacatgcatgtattgaactcctcac

SEQ ID NO: 4473970 - DNA, 25 bp, Homo sapien
ctgaactgttactgctttccttaga

SEQ ID NO: 4473971 - DNA, 25 bp, Homo sapien
gaattatgctcaaccccttcacagt

SEQ ID NO: 4473972 - DNA, 25 bp, Homo sapien
ctgaattatgctcaaccccttcaca

SEQ ID NO: 4473973 - DNA, 25 bp, Homo sapien
tctccctgaactgttactgctttcc

SEQ ID NO: 4473974 - DNA, 25 bp, Homo sapien
ggttctgtgcaccaaagtaatggta

SEQ ID NO: 4473975 - DNA, 25 bp, Homo sapien
caaaatacgggttgaaagagaatgc

SEQ ID NO: 4473976 - DNA, 25 bp, Homo sapien
catcactggattctgcaaccttgcg

SEQ ID NO: 4473977 - DNA, 25 bp, Homo sapien
taatggtagctcctctggcaccaaa

SEQ ID NO: 4473978 - DNA, 25 bp, Homo sapien
cattgggagtaggaaacgatggact

SEQ ID NO: 4473979 - DNA, 25 bp, Homo sapien
tactgtctgtgagagcattgggagt

SEQ ID NO: 4473980 - DNA, 25 bp, Homo sapien
caccttttgatatcgaaggcagaaa

SEQ ID NO: 4473981 - DNA, 25 bp, Homo sapien
aaggcagaaattgcgtttacaacac

SEQ ID NO: 4473982 - DNA, 25 bp, Homo sapien
ttccattggaacaggttgaggctct

SEQ ID NO: 4473983 - DNA, 25 bp, Homo sapien
ccaaacttcagtcggaggttcagaa

SEQ ID NO: 4473984 - DNA, 25 bp, Homo sapien
caaaagaactcttctgtacccctgg

SEQ ID NO: 4473985 - DNA, 25 bp, Homo sapien
caaaggtgttacgagaaagagcagc

SEQ ID NO: 4473986 - DNA, 25 bp, Homo sapien
catgtagcctagtttaagagtcctc

SEQ ID NO: 4473987 - DNA, 25 bp, Homo sapien
ctgttgttcagtagattgtaggtac

SEQ ID NO: 4473988 - DNA, 25 bp, Homo sapien
gattctgctgagagagagcatagaa

SEQ ID NO: 4473989 - DNA, 25 bp, Homo sapien
gaagatatgcttcttaaacaaggtc

SEQ ID NO: 4473990 - DNA, 25 bp, Homo sapien
ttctcagttaatcaagcccgtgtag

SEQ ID NO: 4473991 - DNA, 25 bp, Homo sapien
gattagggccgtgagcattcagttt

SEQ ID NO: 4473992 - DNA, 25 bp, Homo sapien
aagagatagcctcctgattagggcc

SEQ ID NO: 4473993 - DNA, 25 bp, Homo sapien
gcttggcagatcatagacagtttcc

SEQ ID NO: 4473994 - DNA, 25 bp, Homo sapien
tataaagccagtttgtaagaccgag

SEQ ID NO: 4473995 - DNA, 25 bp, Homo sapien
gaggtgccatgggtattgctgcaca

SEQ ID NO: 4473996 - DNA, 25 bp, Homo sapien
tacaatgtgcaggacaacctcttca

SEQ ID NO: 4473997 - DNA, 25 bp, Homo sapien
gagagtggcctaggaattgtcaata

SEQ ID NO: 4473998 - DNA, 25 bp, Homo sapien
cacattttggcttattgcctggcct

SEQ ID NO: 4473999 - DNA, 25 bp, Homo sapien
cttatatattttgtaccgtaggcac

SEQ ID NO: 4474000 - DNA, 25 bp, Homo sapien
gcctggccttgacagtgagtccctc

SEQ ID NO: 4474001 - DNA, 25 bp, Homo sapien
tgctgttaagtgcagttcctgctgg

SEQ ID NO: 4474002 - DNA, 25 bp, Homo sapien
gcttctgtaataatagtccgggtat

SEQ ID NO: 4474003 - DNA, 25 bp, Homo sapien
caacaagaactaaatgactggagat

SEQ ID NO: 4474004 - DNA, 25 bp, Homo sapien
tccgggtatgaggtaattttggctc

SEQ ID NO: 4474005 - DNA, 25 bp, Homo sapien
tagggttaacacagtctttgaatgc

SEQ ID NO: 4474006 - DNA, 25 bp, Homo sapien
gagggcacttggaagggacatacac

SEQ ID NO: 4474007 - DNA, 25 bp, Homo sapien
cagcacccacagagaatagtacagt

SEQ ID NO: 4474008 - DNA, 25 bp, Homo sapien
gaatatattgcatacagtacaggct

SEQ ID NO: 4474009 - DNA, 25 bp, Homo sapien
ccagttacttgatcagggaaggttc

SEQ ID NO: 4474010 - DNA, 25 bp, Homo sapien
tcatcatctgagttatcagtgagca

SEQ ID NO: 4474011 - DNA, 25 bp, Homo sapien
gtcatcgtttttgccgttatcatca

SEQ ID NO: 4474012 - DNA, 25 bp, Homo sapien
tcttctgagaaatcatatttgtcat

SEQ ID NO: 4474013 - DNA, 25 bp, Homo sapien
gttatcatcatctgagttatcagtg

SEQ ID NO: 4474014 - DNA, 25 bp, Homo sapien
aagtccctcagagccagacgagctg

SEQ ID NO: 4474015 - DNA, 25 bp, Homo sapien
tcatcaaactggtccaagacaaact

SEQ ID NO: 4474016 - DNA, 25 bp, Homo sapien
cctcagagccagacgagctgtcggg

SEQ ID NO: 4474017 - DNA, 25 bp, Homo sapien
tccaagtccctcagagccagacgag

SEQ ID NO: 4474018 - DNA, 25 bp, Homo sapien
caactccccccgagagttgatttag

SEQ ID NO: 4474019 - DNA, 25 bp, Homo sapien
ccccgagagttgatttagccaagtc

SEQ ID NO: 4474020 - DNA, 25 bp, Homo sapien
ctccccccgagagttgatttagcca

SEQ ID NO: 4474021 - DNA, 25 bp, Homo sapien
ccgagagttgatttagccaagtctt

SEQ ID NO: 4474022 - DNA, 25 bp, Homo sapien
caaacattggtgactactctactag

SEQ ID NO: 4474023 - DNA, 25 bp, Homo sapien
tctcttagcatgaggactgcagcca

SEQ ID NO: 4474024 - DNA, 25 bp, Homo sapien
gcatgtcccgcgaagtgcttttcat

SEQ ID NO: 4474025 - DNA, 25 bp, Homo sapien
tcctcttggtaatgggcaaacatct

SEQ ID NO: 4474026 - DNA, 25 bp, Homo sapien
ccatcatatccacgtaccatatttt

SEQ ID NO: 4474027 - DNA, 25 bp, Homo sapien
aatatctaggagttggaatggctgg

SEQ ID NO: 4474028 - DNA, 25 bp, Homo sapien
taaatatctaggagttggaatggct

SEQ ID NO: 4474029 - DNA, 25 bp, Homo sapien
atatctaggagttggaatggctgga

SEQ ID NO: 4474030 - DNA, 25 bp, Homo sapien
ccagctctggaatataccttggggt

SEQ ID NO: 4474031 - DNA, 25 bp, Homo sapien
atataccttggggtagctgtaggtc

SEQ ID NO: 4474032 - DNA, 25 bp, Homo sapien
ggaatataccttggggtagctgtag

SEQ ID NO: 4474033 - DNA, 25 bp, Homo sapien
gctctggaatataccttggggtagc

SEQ ID NO: 4474034 - DNA, 25 bp, Homo sapien
tgactgagctgtcctcgataggcca

SEQ ID NO: 4474035 - DNA, 25 bp, Homo sapien
aatcggtacgccatggtttgaagac

SEQ ID NO: 4474036 - DNA, 25 bp, Homo sapien
gaagaccaccttctagttcaggact

SEQ ID NO: 4474037 - DNA, 25 bp, Homo sapien
gataggccatgcaagggcttcctga

SEQ ID NO: 4474038 - DNA, 25 bp, Homo sapien
taccttccttattggtgtccaccat

SEQ ID NO: 4474039 - DNA, 25 bp, Homo sapien
cttccttattggtgtccaccatttt

SEQ ID NO: 4474040 - DNA, 25 bp, Homo sapien
ccttccttattggtgtccaccattt

SEQ ID NO: 4474041 - DNA, 25 bp, Homo sapien
accttccttattggtgtccaccatt

SEQ ID NO: 4474042 - DNA, 25 bp, Homo sapien
tttgagacggatagaggacttgctg

SEQ ID NO: 4474043 - DNA, 25 bp, Homo sapien
tgcgctcagtctttaggtggtagca

SEQ ID NO: 4474044 - DNA, 25 bp, Homo sapien
tgggatttcaaggtaatttgagacg

SEQ ID NO: 4474045 - DNA, 25 bp, Homo sapien
aggccaggtacagcggacacttgct

SEQ ID NO: 4474046 - DNA, 25 bp, Homo sapien
gcagtcccgcgagccatggcccagt

SEQ ID NO: 4474047 - DNA, 25 bp, Homo sapien
ggccttgcggcgtgaggaccccggc

SEQ ID NO: 4474048 - DNA, 25 bp, Homo sapien
cggcggtgcagatccgcgtcgccat

SEQ ID NO: 4474049 - DNA, 25 bp, Homo sapien
gtcgcagtcgctgccgaccggctgg

SEQ ID NO: 4474050 - DNA, 25 bp, Homo sapien
tgacattctttctagatccaaaatt

SEQ ID NO: 4474051 - DNA, 25 bp, Homo sapien
gcagctccgagctggatgatgtctg

SEQ ID NO: 4474052 - DNA, 25 bp, Homo sapien
aggagcagctccgagctggatgatg

SEQ ID NO: 4474053 - DNA, 25 bp, Homo sapien
agctccgagctggatgatgtctgac

SEQ ID NO: 4474054 - DNA, 25 bp, Homo sapien
caagtgttcctagatgaaggctccc

SEQ ID NO: 4474055 - DNA, 25 bp, Homo sapien
cattgcaaacgtgatcgagttggac

SEQ ID NO: 4474056 - DNA, 25 bp, Homo sapien
tgaaatacccctagtgcaaatgagg

SEQ ID NO: 4474057 - DNA, 25 bp, Homo sapien
caaaatcgggtgcaacaaagtggaa

SEQ ID NO: 4474058 - DNA, 25 bp, Homo sapien
aagtgagcgtgtttccattataccc

SEQ ID NO: 4474059 - DNA, 25 bp, Homo sapien
tagtcagcttcaaagcatccttggg

SEQ ID NO: 4474060 - DNA, 25 bp, Homo sapien
tacactgagtgtctaatctgggcca

SEQ ID NO: 4474061 - DNA, 25 bp, Homo sapien
ggaacgctgcatcataatctactag

SEQ ID NO: 4474062 - DNA, 25 bp, Homo sapien
tgtaggagcagctgctgaaggcccg

SEQ ID NO: 4474063 - DNA, 25 bp, Homo sapien
gcccgggggccagaggtggacatct

SEQ ID NO: 4474064 - DNA, 25 bp, Homo sapien
cgggggccagaggtggacatcttgt

SEQ ID NO: 4474065 - DNA, 25 bp, Homo sapien
ttgtgtaggagcagctgctgaaggc

SEQ ID NO: 4474066 - DNA, 25 bp, Homo sapien
ctgctccttctttgggtgtgtagag

SEQ ID NO: 4474067 - DNA, 25 bp, Homo sapien
tgctccttctttgggtgtgtagagc

SEQ ID NO: 4474068 - DNA, 25 bp, Homo sapien
gatgctgaccgtgtccaggaagtag

SEQ ID NO: 4474069 - DNA, 25 bp, Homo sapien
gctgaccgtgtccaggaagtagctg

SEQ ID NO: 4474070 - DNA, 25 bp, Homo sapien
tgctgaccgtgtccaggaagtagct

SEQ ID NO: 4474071 - DNA, 25 bp, Homo sapien
ctgaccgtgtccaggaagtagctgt

SEQ ID NO: 4474072 - DNA, 25 bp, Homo sapien
gctgcggttggcaatctcctcctac

SEQ ID NO: 4474073 - DNA, 25 bp, Homo sapien
tggctgcggttggcaatctcctcct

SEQ ID NO: 4474074 - DNA, 25 bp, Homo sapien
ctggctgcggttggcaatctcctcc

SEQ ID NO: 4474075 - DNA, 25 bp, Homo sapien
ggctgcggttggcaatctcctccta

SEQ ID NO: 4474076 - DNA, 25 bp, Homo sapien
tataggctgcaggtcatgcccaagc

SEQ ID NO: 4474077 - DNA, 25 bp, Homo sapien
tgctccacatctgcgatggtggcct

SEQ ID NO: 4474078 - DNA, 25 bp, Homo sapien
agtctttataggctgcaggtcatgc

SEQ ID NO: 4474079 - DNA, 25 bp, Homo sapien
ggctgcaggtcatgcccaagcttcc

SEQ ID NO: 4474080 - DNA, 25 bp, Homo sapien
tcctgtaggtggcagttttgatgcc

SEQ ID NO: 4474081 - DNA, 25 bp, Homo sapien
tggcagttttgatgcccaaggccag

SEQ ID NO: 4474082 - DNA, 25 bp, Homo sapien
gcagctgccacaccatatcctgcct

SEQ ID NO: 4474083 - DNA, 25 bp, Homo sapien
cacaccatatcctgcctggcccatt

SEQ ID NO: 4474084 - DNA, 25 bp, Homo sapien
ggtcttcgtatggattgtcatgttc

SEQ ID NO: 4474085 - DNA, 25 bp, Homo sapien
tcttcgtatggattgtcatgttctg

SEQ ID NO: 4474086 - DNA, 25 bp, Homo sapien
gtggtcttcgtatggattgtcatgt

SEQ ID NO: 4474087 - DNA, 25 bp, Homo sapien
ggtggtcttcgtatggattgtcatg

SEQ ID NO: 4474088 - DNA, 25 bp, Homo sapien
gtctcaatcttcttcaaccacagcc

SEQ ID NO: 4474089 - DNA, 25 bp, Homo sapien
aggcaggatgtcagaggacttggac

SEQ ID NO: 4474090 - DNA, 25 bp, Homo sapien
gggtctcaatcttcttcaaccacag

SEQ ID NO: 4474091 - DNA, 25 bp, Homo sapien
acttaggcaggatgtcagaggactt

SEQ ID NO: 4474092 - DNA, 25 bp, Homo sapien
tggcaatccatctttaaaagttatg

SEQ ID NO: 4474093 - DNA, 25 bp, Homo sapien
ttaaaagttatgtcaagttggctgg

SEQ ID NO: 4474094 - DNA, 25 bp, Homo sapien
ctcagcttggcaatccatctttaaa

SEQ ID NO: 4474095 - DNA, 25 bp, Homo sapien
ccatctttaaaagttatgtcaagtt

SEQ ID NO: 4474096 - DNA, 25 bp, Homo sapien
gatctgccttccaggtgacgctaca

SEQ ID NO: 4474097 - DNA, 25 bp, Homo sapien
tgtattcgtgagagcccagtgcgtc

SEQ ID NO: 4474098 - DNA, 25 bp, Homo sapien
gctacagcggagattcaaagagacc

SEQ ID NO: 4474099 - DNA, 25 bp, Homo sapien
gatagagccacacagtcgttgcagc

SEQ ID NO: 4474100 - DNA, 25 bp, Homo sapien
gttgttcgcagcccggccagaaaca

SEQ ID NO: 4474101 - DNA, 25 bp, Homo sapien
gcccggccagaaacagagcgatatt

SEQ ID NO: 4474102 - DNA, 25 bp, Homo sapien
gccagaaacagagcgatatttcccg

SEQ ID NO: 4474103 - DNA, 25 bp, Homo sapien
cagagcgatatttcccgggaatcat

SEQ ID NO: 4474104 - DNA, 25 bp, Homo sapien
ctagttagtacctcaggctttcgac

SEQ ID NO: 4474105 - DNA, 25 bp, Homo sapien
taaacatctcaatgagacaggtgaa

SEQ ID NO: 4474106 - DNA, 25 bp, Homo sapien
catctcaatgagacaggtgaaggag

SEQ ID NO: 4474107 - DNA, 25 bp, Homo sapien
tcaggctttcgacatttgccattca

SEQ ID NO: 4474108 - DNA, 25 bp, Homo sapien
gtttttttcaggaagcgatgatgtt

SEQ ID NO: 4474109 - DNA, 25 bp, Homo sapien
gcgatgatgtttgaataaccagatg

SEQ ID NO: 4474110 - DNA, 25 bp, Homo sapien
gaataaccagatgaagcccgcagtt

SEQ ID NO: 4474111 - DNA, 25 bp, Homo sapien
taaccagatgaagcccgcagttcac

SEQ ID NO: 4474112 - DNA, 25 bp, Homo sapien
tgatggttagaggtttccaacttgg

SEQ ID NO: 4474113 - DNA, 25 bp, Homo sapien
gtgatggttagaggtttccaacttg

SEQ ID NO: 4474114 - DNA, 25 bp, Homo sapien
gtcttgagacatagtgtgtagaaag

SEQ ID NO: 4474115 - DNA, 25 bp, Homo sapien
atcatgttgtgtcttgagacatagt

SEQ ID NO: 4474116 - DNA, 25 bp, Homo sapien
ggcatttgcattatatccttaggaa

SEQ ID NO: 4474117 - DNA, 25 bp, Homo sapien
gatacttctaatgtatccatactat

SEQ ID NO: 4474118 - DNA, 25 bp, Homo sapien
tatgattagccacaaaaaaccccaa

SEQ ID NO: 4474119 - DNA, 25 bp, Homo sapien
cacttgatctaaaactgatctaaaa

SEQ ID NO: 4474120 - DNA, 25 bp, Homo sapien
ccatagagatggaaagcatatttgt

SEQ ID NO: 4474121 - DNA, 25 bp, Homo sapien
caaaataccacattggcaaatccat

SEQ ID NO: 4474122 - DNA, 25 bp, Homo sapien
gagatggaaagcatatttgtggctt

SEQ ID NO: 4474123 - DNA, 25 bp, Homo sapien
acaaaataccacattggcaaatcca

SEQ ID NO: 4474124 - DNA, 25 bp, Homo sapien
aaacatcatgccaagtgaaagaaaa

SEQ ID NO: 4474125 - DNA, 25 bp, Homo sapien
tcatgccaagtgaaagaaaactgac

SEQ ID NO: 4474126 - DNA, 25 bp, Homo sapien
catcatgccaagtgaaagaaaactg

SEQ ID NO: 4474127 - DNA, 25 bp, Homo sapien
acatcatgccaagtgaaagaaaact

SEQ ID NO: 4474128 - DNA, 25 bp, Homo sapien
ctaccggggaatgacgatgtgtctt

SEQ ID NO: 4474129 - DNA, 25 bp, Homo sapien
tctaccggggaatgacgatgtgtct

SEQ ID NO: 4474130 - DNA, 25 bp, Homo sapien
ttacattctttatattcttggtaaa

SEQ ID NO: 4474131 - DNA, 25 bp, Homo sapien
acattctttatattcttggtaaaat

SEQ ID NO: 4474132 - DNA, 25 bp, Homo sapien
tttacattctttatattcttggtaa

SEQ ID NO: 4474133 - DNA, 25 bp, Homo sapien
tacattctttatattcttggtaaaa

SEQ ID NO: 4474134 - DNA, 25 bp, Homo sapien
tcttcccaaataaatctacaagctc

SEQ ID NO: 4474135 - DNA, 25 bp, Homo sapien
tgtcttcccaaataaatctacaagc

SEQ ID NO: 4474136 - DNA, 25 bp, Homo sapien
cttgtcttcccaaataaatctacaa

SEQ ID NO: 4474137 - DNA, 25 bp, Homo sapien
gatatgtagcccttgtcttcccaaa

SEQ ID NO: 4474138 - DNA, 25 bp, Homo sapien
ccctctaaggtttataggctgtttg

SEQ ID NO: 4474139 - DNA, 25 bp, Homo sapien
cattatgtagctttcaatctagcag

SEQ ID NO: 4474140 - DNA, 25 bp, Homo sapien
tgacacccctctaaggtttataggc

SEQ ID NO: 4474141 - DNA, 25 bp, Homo sapien
ttgttagatggtgtccttgccatta

SEQ ID NO: 4474142 - DNA, 25 bp, Homo sapien
ttgttgtggatgagatgcataggaa

SEQ ID NO: 4474143 - DNA, 25 bp, Homo sapien
agatgtaaacctcgcatcatctctt

SEQ ID NO: 4474144 - DNA, 25 bp, Homo sapien
tgtaaacctcgcatcatctctttct

SEQ ID NO: 4474145 - DNA, 25 bp, Homo sapien
ctgtcacatttgttgtggatgagat

SEQ ID NO: 4474146 - DNA, 25 bp, Homo sapien
gaagaatctccaaatgctgataagg

SEQ ID NO: 4474147 - DNA, 25 bp, Homo sapien
ggtgtcttaatggaagaatctccaa

SEQ ID NO: 4474148 - DNA, 25 bp, Homo sapien
tatttgggccagcactatgacagcc

SEQ ID NO: 4474149 - DNA, 25 bp, Homo sapien
cagttttcatttccagcccatatag

SEQ ID NO: 4474150 - DNA, 25 bp, Homo sapien
tttctaggctcaacctgtctgagta

SEQ ID NO: 4474151 - DNA, 25 bp, Homo sapien
tgatgacaatgatgagctcaccaaa

SEQ ID NO: 4474152 - DNA, 25 bp, Homo sapien
ttttctcttcagaagaacgttgaag

SEQ ID NO: 4474153 - DNA, 25 bp, Homo sapien
tgaagaataggaaatgatgacaatg

SEQ ID NO: 4474154 - DNA, 25 bp, Homo sapien
attattagtagtatctttgtgctcc

SEQ ID NO: 4474155 - DNA, 25 bp, Homo sapien
ctcttcttacaaatattattagtag

SEQ ID NO: 4474156 - DNA, 25 bp, Homo sapien
ttagtagtatctttgtgctcccatt

SEQ ID NO: 4474157 - DNA, 25 bp, Homo sapien
tattagtagtatctttgtgctccca

SEQ ID NO: 4474158 - DNA, 25 bp, Homo sapien
tccccattgatgataggacatacgg

SEQ ID NO: 4474159 - DNA, 25 bp, Homo sapien
gacatctcagagtcgaaagcccact

SEQ ID NO: 4474160 - DNA, 25 bp, Homo sapien
aatccaacgatattaacttctgtag

SEQ ID NO: 4474161 - DNA, 25 bp, Homo sapien
acagaaggacacgaagacatctcag

SEQ ID NO: 4474162 - DNA, 25 bp, Homo sapien
gccaatggtaataaggtttgtgact

SEQ ID NO: 4474163 - DNA, 25 bp, Homo sapien
ggtaataaggtttgtgacttctcca

SEQ ID NO: 4474164 - DNA, 25 bp, Homo sapien
cagagccaatggtaataaggtttgt

SEQ ID NO: 4474165 - DNA, 25 bp, Homo sapien
gaatcacagagccaatggtaataag

SEQ ID NO: 4474166 - DNA, 25 bp, Homo sapien
tccaagacatctaagctttttagat

SEQ ID NO: 4474167 - DNA, 25 bp, Homo sapien
gatccaagacatctaagctttttag

SEQ ID NO: 4474168 - DNA, 25 bp, Homo sapien
aagatccaagacatctaagcttttt

SEQ ID NO: 4474169 - DNA, 25 bp, Homo sapien
agatccaagacatctaagcttttta

SEQ ID NO: 4474170 - DNA, 25 bp, Homo sapien
cagctgtgaaagatcttgttcatca

SEQ ID NO: 4474171 - DNA, 25 bp, Homo sapien
gtgaaagatcttgttcatcaacagg

SEQ ID NO: 4474172 - DNA, 25 bp, Homo sapien
agcagctgtgaaagatcttgttcat

SEQ ID NO: 4474173 - DNA, 25 bp, Homo sapien
gctgtgaaagatcttgttcatcaac

SEQ ID NO: 4474174 - DNA, 25 bp, Homo sapien
agggtagctcctctgtactaggaaa

SEQ ID NO: 4474175 - DNA, 25 bp, Homo sapien
ttagccttgccattctggggtccca

SEQ ID NO: 4474176 - DNA, 25 bp, Homo sapien
gctcctctgtactaggaaagtcatc

SEQ ID NO: 4474177 - DNA, 25 bp, Homo sapien
tctggggtcccaaattctgtgggtc

SEQ ID NO: 4474178 - DNA, 25 bp, Homo sapien
caactcacacaaatgattaatattt

SEQ ID NO: 4474179 - DNA, 25 bp, Homo sapien
taagttcagttagtgaatccagccc

SEQ ID NO: 4474180 - DNA, 25 bp, Homo sapien
tgatttgattgtgtcgcaagttaag

SEQ ID NO: 4474181 - DNA, 25 bp, Homo sapien
tccagcccattaagattatcaacat

SEQ ID NO: 4474182 - DNA, 25 bp, Homo sapien
cagaacaagctgcaccactcgcaag

SEQ ID NO: 4474183 - DNA, 25 bp, Homo sapien
tacatccgcagaacaagctgcacca

SEQ ID NO: 4474184 - DNA, 25 bp, Homo sapien
tcagtacatccgcagaacaagctgc

SEQ ID NO: 4474185 - DNA, 25 bp, Homo sapien
gcagaacaagctgcaccactcgcaa

SEQ ID NO: 4474186 - DNA, 25 bp, Homo sapien
tggacagtgagctccactctcctcc

SEQ ID NO: 4474187 - DNA, 25 bp, Homo sapien
gcaaaacttaatcagatgaaagaaa

SEQ ID NO: 4474188 - DNA, 25 bp, Homo sapien
ttctatttactgcaacattgctaca

SEQ ID NO: 4474189 - DNA, 25 bp, Homo sapien
gctacatcactgatttctactggac

SEQ ID NO: 4474190 - DNA, 25 bp, Homo sapien
ctagatatattgttaaagctgagaa

SEQ ID NO: 4474191 - DNA, 25 bp, Homo sapien
gctgagaaagagatgttggaggcag

SEQ ID NO: 4474192 - DNA, 25 bp, Homo sapien
tatattgttaaagctgagaaagaga

SEQ ID NO: 4474193 - DNA, 25 bp, Homo sapien
tggaggcagggcaaattatccacat

SEQ ID NO: 4474194 - DNA, 25 bp, Homo sapien
gaagaagagtcagcaaggcaggaaa

SEQ ID NO: 4474195 - DNA, 25 bp, Homo sapien
gctgcatcatattctgaaggacagt

SEQ ID NO: 4474196 - DNA, 25 bp, Homo sapien
catcaaaggtgatgtccgagaggga

SEQ ID NO: 4474197 - DNA, 25 bp, Homo sapien
tcatatctagctggcgcagctgcat

SEQ ID NO: 4474198 - DNA, 25 bp, Homo sapien
taaagcaaaataggagttgaggcca

SEQ ID NO: 4474199 - DNA, 25 bp, Homo sapien
caatgcttagccatgttgaactcct

SEQ ID NO: 4474200 - DNA, 25 bp, Homo sapien
tatgatataaaatgccctagtcctt

SEQ ID NO: 4474201 - DNA, 25 bp, Homo sapien
cgatctatcttcaaggctgaaccca

SEQ ID NO: 4474202 - DNA, 25 bp, Homo sapien
ccttctgatggggagatacctccca

SEQ ID NO: 4474203 - DNA, 25 bp, Homo sapien
gccccactcagagcttatagataaa

SEQ ID NO: 4474204 - DNA, 25 bp, Homo sapien
acatcaagttgactgtcacaatttg

SEQ ID NO: 4474205 - DNA, 25 bp, Homo sapien
gactgtcacaatttgtggaatttat

SEQ ID NO: 4474206 - DNA, 25 bp, Homo sapien
aacagatgccatacgcctttcttct

SEQ ID NO: 4474207 - DNA, 25 bp, Homo sapien
gtttatgactttcccgcttcttctc

SEQ ID NO: 4474208 - DNA, 25 bp, Homo sapien
cctcttttttggctaaaacagatgc

SEQ ID NO: 4474209 - DNA, 25 bp, Homo sapien
aagattgtttatgactttcccgctt

SEQ ID NO: 4474210 - DNA, 25 bp, Homo sapien
gcaagtcccactgtcgagctacgtt

SEQ ID NO: 4474211 - DNA, 25 bp, Homo sapien
tggctactcgttgttgttgcaagtc

SEQ ID NO: 4474212 - DNA, 25 bp, Homo sapien
catttgtagcaatattggctactcg

SEQ ID NO: 4474213 - DNA, 25 bp, Homo sapien
ttccatcaatctgacaggggtcctg

SEQ ID NO: 4474214 - DNA, 25 bp, Homo sapien
gaaaagctcttcacaattttatatt

SEQ ID NO: 4474215 - DNA, 25 bp, Homo sapien
agaaaagctcttcacaattttatat

SEQ ID NO: 4474216 - DNA, 25 bp, Homo sapien
tcagaaaagctcttcacaattttat

SEQ ID NO: 4474217 - DNA, 25 bp, Homo sapien
cagaaaagctcttcacaattttata

SEQ ID NO: 4474218 - DNA, 25 bp, Homo sapien
tgtatccccgtccacttcaacaagg

SEQ ID NO: 4474219 - DNA, 25 bp, Homo sapien
taggaagcacttggacgatttcatc

SEQ ID NO: 4474220 - DNA, 25 bp, Homo sapien
tgctcctgagccatatagggaaagt

SEQ ID NO: 4474221 - DNA, 25 bp, Homo sapien
caacaaggtatgtgtctatgacaga

SEQ ID NO: 4474222 - DNA, 25 bp, Homo sapien
ttcatccaatgcaccattgatggaa

SEQ ID NO: 4474223 - DNA, 25 bp, Homo sapien
aattcatccaatgcaccattgatgg

SEQ ID NO: 4474224 - DNA, 25 bp, Homo sapien
catccaatgcaccattgatggaatc

SEQ ID NO: 4474225 - DNA, 25 bp, Homo sapien
atccaatgcaccattgatggaatcc

SEQ ID NO: 4474226 - DNA, 25 bp, Homo sapien
tctgcatactgaaatggcttagcct

SEQ ID NO: 4474227 - DNA, 25 bp, Homo sapien
caatacgacggagttgggctagtgc

SEQ ID NO: 4474228 - DNA, 25 bp, Homo sapien
gctagtgcgttaaattgctgcagca

SEQ ID NO: 4474229 - DNA, 25 bp, Homo sapien
ggcttagcctaaacagtacatagta

SEQ ID NO: 4474230 - DNA, 25 bp, Homo sapien
catcacccagaatggaaatcagacg

SEQ ID NO: 4474231 - DNA, 25 bp, Homo sapien
gagcctttcagccattatcatatca

SEQ ID NO: 4474232 - DNA, 25 bp, Homo sapien
agaatggaaatcagacgatactggg

SEQ ID NO: 4474233 - DNA, 25 bp, Homo sapien
ctcagaagatgctacatgtgctagg

SEQ ID NO: 4474234 - DNA, 25 bp, Homo sapien
cagatgtatctcttgtaaacaacat

SEQ ID NO: 4474235 - DNA, 25 bp, Homo sapien
agagccatcagccatgattcgtcct

SEQ ID NO: 4474236 - DNA, 25 bp, Homo sapien
ttcattataaaagtctcttgtagta

SEQ ID NO: 4474237 - DNA, 25 bp, Homo sapien
attattttcttcgttgataatacca

SEQ ID NO: 4474238 - DNA, 25 bp, Homo sapien
atgtagcacgatttgtgttttctcc

SEQ ID NO: 4474239 - DNA, 25 bp, Homo sapien
gattctagtagataccgaaattgct

SEQ ID NO: 4474240 - DNA, 25 bp, Homo sapien
cgttgccttctaaagaaacaggtct

SEQ ID NO: 4474241 - DNA, 25 bp, Homo sapien
gttgccttctaaagaaacaggtctc

SEQ ID NO: 4474242 - DNA, 25 bp, Homo sapien
caggacgttgccttctaaagaaaca

SEQ ID NO: 4474243 - DNA, 25 bp, Homo sapien
aggacgttgccttctaaagaaacag

SEQ ID NO: 4474244 - DNA, 25 bp, Homo sapien
tggtctgttatctgctgtaggcaga

SEQ ID NO: 4474245 - DNA, 25 bp, Homo sapien
tgactgcatccctaacaagctcaat

SEQ ID NO: 4474246 - DNA, 25 bp, Homo sapien
ttttattgcgaatttctatgactgc

SEQ ID NO: 4474247 - DNA, 25 bp, Homo sapien
ggcagagcttcatataggaattttt

SEQ ID NO: 4474248 - DNA, 25 bp, Homo sapien
tagcagggcaccaatcaaagcaaga

SEQ ID NO: 4474249 - DNA, 25 bp, Homo sapien
caagaaccaaggatgcagtgccacg

SEQ ID NO: 4474250 - DNA, 25 bp, Homo sapien
tgtttggtcctcacatacaggcaat

SEQ ID NO: 4474251 - DNA, 25 bp, Homo sapien
taaaagtaggtagatgcagctcatg

SEQ ID NO: 4474252 - DNA, 25 bp, Homo sapien
cttccttaaatattaggttgcaatc

SEQ ID NO: 4474253 - DNA, 25 bp, Homo sapien
ccttaaatattaggttgcaatccaa

SEQ ID NO: 4474254 - DNA, 25 bp, Homo sapien
tcttccttaaatattaggttgcaat

SEQ ID NO: 4474255 - DNA, 25 bp, Homo sapien
ttccttaaatattaggttgcaatcc

SEQ ID NO: 4474256 - DNA, 25 bp, Homo sapien
agctcatgggagctgttctggccca

SEQ ID NO: 4474257 - DNA, 25 bp, Homo sapien
cttccagctcatgggagctgttctg

SEQ ID NO: 4474258 - DNA, 25 bp, Homo sapien
tccctgctcttgatattgatactag

SEQ ID NO: 4474259 - DNA, 25 bp, Homo sapien
tactagtacttgtcacatcttccag

SEQ ID NO: 4474260 - DNA, 25 bp, Homo sapien
ttggccttctatgggggctgtcaga

SEQ ID NO: 4474261 - DNA, 25 bp, Homo sapien
gcttgtcctgagccaaagctgggct

SEQ ID NO: 4474262 - DNA, 25 bp, Homo sapien
gggtggcttgtcctgagccaaagct

SEQ ID NO: 4474263 - DNA, 25 bp, Homo sapien
ggtggcttgtcctgagccaaagctg

SEQ ID NO: 4474264 - DNA, 25 bp, Homo sapien
ttgtcctgagccaaagctgggctgg

SEQ ID NO: 4474265 - DNA, 25 bp, Homo sapien
ggatcaaggagcaagcccatatttc

SEQ ID NO: 4474266 - DNA, 25 bp, Homo sapien
tctgggactccctcttgagactgat

SEQ ID NO: 4474267 - DNA, 25 bp, Homo sapien
tcctcttgattctgggactccctct

SEQ ID NO: 4474268 - DNA, 25 bp, Homo sapien
tccagagtgtacaggagacaggtca

SEQ ID NO: 4474269 - DNA, 25 bp, Homo sapien
tcatagaactacaactttggttaaa

SEQ ID NO: 4474270 - DNA, 25 bp, Homo sapien
gaggtaccaggatccatcacgatgc

SEQ ID NO: 4474271 - DNA, 25 bp, Homo sapien
taagcactgagattgcctgagaggg

SEQ ID NO: 4474272 - DNA, 25 bp, Homo sapien
aagtgtcagggagtcttcaggccac

SEQ ID NO: 4474273 - DNA, 25 bp, Homo sapien
tcagagaattgtgtcccagcaggaa

SEQ ID NO: 4474274 - DNA, 25 bp, Homo sapien
caggtcatgacgagctcccagccca

SEQ ID NO: 4474275 - DNA, 25 bp, Homo sapien
aggtcatgacgagctcccagcccat

SEQ ID NO: 4474276 - DNA, 25 bp, Homo sapien
gcaggtcatgacgagctcccagccc

SEQ ID NO: 4474277 - DNA, 25 bp, Homo sapien
agcaggtcatgacgagctcccagcc

SEQ ID NO: 4474278 - DNA, 25 bp, Homo sapien
ggtgtgaggttgtgctctgccccat

SEQ ID NO: 4474279 - DNA, 25 bp, Homo sapien
gggtgtgaggttgtgctctgcccca

SEQ ID NO: 4474280 - DNA, 25 bp, Homo sapien
cccctgccaggcaagatgtagggtg

SEQ ID NO: 4474281 - DNA, 25 bp, Homo sapien
ccaggcaagatgtagggtgtgaggt

SEQ ID NO: 4474282 - DNA, 25 bp, Homo sapien
tgttcccgatgacagaaaggtcttc

SEQ ID NO: 4474283 - DNA, 25 bp, Homo sapien
tttccatgcaggattgtgctgcctg

SEQ ID NO: 4474284 - DNA, 25 bp, Homo sapien
cattcaaactcaggtgggggctttc

SEQ ID NO: 4474285 - DNA, 25 bp, Homo sapien
gcctgtctgaggcaccactgcgcag

SEQ ID NO: 4474286 - DNA, 25 bp, Homo sapien
atatccaaactcagctgcagaactc

SEQ ID NO: 4474287 - DNA, 25 bp, Homo sapien
tgttcctgtcatatccaaactcagc

SEQ ID NO: 4474288 - DNA, 25 bp, Homo sapien
ctttttgttcctgtcatatccaaac

SEQ ID NO: 4474289 - DNA, 25 bp, Homo sapien
acctcacagaggctgtcctttttgt

SEQ ID NO: 4474290 - DNA, 25 bp, Homo sapien
ccagaagtattcagggacgctgacc

SEQ ID NO: 4474291 - DNA, 25 bp, Homo sapien
aaggcgctaagccactgcagatgca

SEQ ID NO: 4474292 - DNA, 25 bp, Homo sapien
ctctggtggcggtcatcaatcgtca

SEQ ID NO: 4474293 - DNA, 25 bp, Homo sapien
tcaatcgtcacagccctttcaggaa

SEQ ID NO: 4474294 - DNA, 25 bp, Homo sapien
caagggctcttcagagacgttgcca

SEQ ID NO: 4474295 - DNA, 25 bp, Homo sapien
cagagacgttgccaattttctgcaa

SEQ ID NO: 4474296 - DNA, 25 bp, Homo sapien
caggcaaaagcaagggctcttcaga

SEQ ID NO: 4474297 - DNA, 25 bp, Homo sapien
aaccatgatgctgggggtccaggca

SEQ ID NO: 4474298 - DNA, 25 bp, Homo sapien
caaagacctctcacgcttcaagtaa

SEQ ID NO: 4474299 - DNA, 25 bp, Homo sapien
tgtgtgtgcttctcatctaccactt

SEQ ID NO: 4474300 - DNA, 25 bp, Homo sapien
gattttcttggcagctaattcctaa

SEQ ID NO: 4474301 - DNA, 25 bp, Homo sapien
gatactcttgcgatgttaatgccca

SEQ ID NO: 4474302 - DNA, 25 bp, Homo sapien
tgtgggcagacgaactggaatccaa

SEQ ID NO: 4474303 - DNA, 25 bp, Homo sapien
gctgtgggcagacgaactggaatcc

SEQ ID NO: 4474304 - DNA, 25 bp, Homo sapien
tgggcagacgaactggaatccaagc

SEQ ID NO: 4474305 - DNA, 25 bp, Homo sapien
agggctgtgggcagacgaactggaa

SEQ ID NO: 4474306 - DNA, 25 bp, Homo sapien
cagaacaaagttcagggcagtgacc

SEQ ID NO: 4474307 - DNA, 25 bp, Homo sapien
agaagaaaacctctggatggccatg

SEQ ID NO: 4474308 - DNA, 25 bp, Homo sapien
accacagtggccctagccccttggg

SEQ ID NO: 4474309 - DNA, 25 bp, Homo sapien
ccctagccccttgggcagagaagaa

SEQ ID NO: 4474310 - DNA, 25 bp, Homo sapien
tagccactaaccttgcttggtacag

SEQ ID NO: 4474311 - DNA, 25 bp, Homo sapien
tatagttaacacactaccgaatgtg

SEQ ID NO: 4474312 - DNA, 25 bp, Homo sapien
aaactgaaatgtaaggctgtgtaag

SEQ ID NO: 4474313 - DNA, 25 bp, Homo sapien
tgtacacaactcactccttttaaag

SEQ ID NO: 4474314 - DNA, 25 bp, Homo sapien
atgatgatgatgaataagttggttc

SEQ ID NO: 4474315 - DNA, 25 bp, Homo sapien
tgatgatgaataagttggttctagc

SEQ ID NO: 4474316 - DNA, 25 bp, Homo sapien
gatgaataagttggttctagcgcag

SEQ ID NO: 4474317 - DNA, 25 bp, Homo sapien
gaataagttggttctagcgcagttt

SEQ ID NO: 4474318 - DNA, 25 bp, Homo sapien
tgaaaagaaggctgcgaagctgaag

SEQ ID NO: 4474319 - DNA, 25 bp, Homo sapien
gcaaaggtggacaaggcccattatg

SEQ ID NO: 4474320 - DNA, 25 bp, Homo sapien
gaaatgaaaacctacatccctccca

SEQ ID NO: 4474321 - DNA, 25 bp, Homo sapien
aggtggaagaccatttctgctaaag

SEQ ID NO: 4474322 - DNA, 25 bp, Homo sapien
gagccttgtgtccaatgcctggaaa

SEQ ID NO: 4474323 - DNA, 25 bp, Homo sapien
cactgcctttggatgtaagtttctc

SEQ ID NO: 4474324 - DNA, 25 bp, Homo sapien
ctcagagagaatgagccttgtgtcc

SEQ ID NO: 4474325 - DNA, 25 bp, Homo sapien
cacagccacggtcctttcaaagtca

SEQ ID NO: 4474326 - DNA, 25 bp, Homo sapien
tgcagctacgcgagcaggccgacca

SEQ ID NO: 4474327 - DNA, 25 bp, Homo sapien
tgcagtggcaccgacgtgcgcaccg

SEQ ID NO: 4474328 - DNA, 25 bp, Homo sapien
gccgacaccacgtggtccgcgaagg

SEQ ID NO: 4474329 - DNA, 25 bp, Homo sapien
ctggcgtctcgtcgcggctccggtg

SEQ ID NO: 4474330 - DNA, 25 bp, Homo sapien
ccagtgacttcgaggccctggggct

SEQ ID NO: 4474331 - DNA, 25 bp, Homo sapien
cagtgacttcgaggccctggggctg

SEQ ID NO: 4474332 - DNA, 25 bp, Homo sapien
tccccagtgacttcgaggccctggg

SEQ ID NO: 4474333 - DNA, 25 bp, Homo sapien
cccagtgacttcgaggccctggggc

SEQ ID NO: 4474334 - DNA, 25 bp, Homo sapien
aggcagcccacctgataagctcagg

SEQ ID NO: 4474335 - DNA, 25 bp, Homo sapien
catgcagcaagtggccaccgtggca

SEQ ID NO: 4474336 - DNA, 25 bp, Homo sapien
ctgaactgtgagtgggcaagggggc

SEQ ID NO: 4474337 - DNA, 25 bp, Homo sapien
catcactgagctaagacagactctc

SEQ ID NO: 4474338 - DNA, 25 bp, Homo sapien
agattgattttgcagaacggattct

SEQ ID NO: 4474339 - DNA, 25 bp, Homo sapien
gattgattttgcagaacggattctt

SEQ ID NO: 4474340 - DNA, 25 bp, Homo sapien
aagattgattttgcagaacggattc

SEQ ID NO: 4474341 - DNA, 25 bp, Homo sapien
agtgaaagatgacttggttgagtgc

SEQ ID NO: 4474342 - DNA, 25 bp, Homo sapien
ctggagtgaaagatgacttggttga

SEQ ID NO: 4474343 - DNA, 25 bp, Homo sapien
aaagatgacttggttgagtgccatt

SEQ ID NO: 4474344 - DNA, 25 bp, Homo sapien
gacttggttgagtgccattatggaa

SEQ ID NO: 4474345 - DNA, 25 bp, Homo sapien
caggactcacctaaacacctttctt

SEQ ID NO: 4474346 - DNA, 25 bp, Homo sapien
ttcacaagtgtgagttgctacaatg

SEQ ID NO: 4474347 - DNA, 25 bp, Homo sapien
tgcggcatgctttgcaggactcacc

SEQ ID NO: 4474348 - DNA, 25 bp, Homo sapien
tgtgagttgctacaatgcggcatgc

SEQ ID NO: 4474349 - DNA, 25 bp, Homo sapien
agcacagccgacagcttgcttcctt

SEQ ID NO: 4474350 - DNA, 25 bp, Homo sapien
gcttgaagcacagccgacagcttgc

SEQ ID NO: 4474351 - DNA, 25 bp, Homo sapien
aaggtggccaacagcttgaagcaca

SEQ ID NO: 4474352 - DNA, 25 bp, Homo sapien
ccaacagcttgaagcacagccgaca

SEQ ID NO: 4474353 - DNA, 25 bp, Homo sapien
ctcagtaggccaagggactttattc

SEQ ID NO: 4474354 - DNA, 25 bp, Homo sapien
cacccacaccacttgtacctcctca

SEQ ID NO: 4474355 - DNA, 25 bp, Homo sapien
cctcagtaggccaagggactttatt

SEQ ID NO: 4474356 - DNA, 25 bp, Homo sapien
taatcctgacgggtctgaatggcct

SEQ ID NO: 4474357 - DNA, 25 bp, Homo sapien
taagtacagatgtggcgaggcgatc

SEQ ID NO: 4474358 - DNA, 25 bp, Homo sapien
agtagttcggcttagtctccccaga

SEQ ID NO: 4474359 - DNA, 25 bp, Homo sapien
caggagaatcatgtggtaggcgccc

SEQ ID NO: 4474360 - DNA, 25 bp, Homo sapien
gaagaacctgctgttggctgatgac

SEQ ID NO: 4474361 - DNA, 25 bp, Homo sapien
gataggccccgatgcatgagattgc

SEQ ID NO: 4474362 - DNA, 25 bp, Homo sapien
gaagctctgagttgccccatgggtc

SEQ ID NO: 4474363 - DNA, 25 bp, Homo sapien
cacagcttgtactgccgataggccc

SEQ ID NO: 4474364 - DNA, 25 bp, Homo sapien
tggtgaactgtagccatgcctagca

SEQ ID NO: 4474365 - DNA, 25 bp, Homo sapien
gtcttcatcatgcttagtgccaaat

SEQ ID NO: 4474366 - DNA, 25 bp, Homo sapien
cccggtatgggttgtgtgtactcac

SEQ ID NO: 4474367 - DNA, 25 bp, Homo sapien
ttaacatggcccagacaccatatcc

SEQ ID NO: 4474368 - DNA, 25 bp, Homo sapien
gacagaaaaacgaggggcagctgtt

SEQ ID NO: 4474369 - DNA, 25 bp, Homo sapien
tcaaaagccagtcctaccccaggga

SEQ ID NO: 4474370 - DNA, 25 bp, Homo sapien
ttcactggagagtcattgataccag

SEQ ID NO: 4474371 - DNA, 25 bp, Homo sapien
tgataccagtactcatcatgtccat

SEQ ID NO: 4474372 - DNA, 25 bp, Homo sapien
ggataaatccattgtcaaaagccag

SEQ ID NO: 4474373 - DNA, 25 bp, Homo sapien
tctgcaaatggttcccactcataaa

SEQ ID NO: 4474374 - DNA, 25 bp, Homo sapien
tgtaggatgcacactgtacctcccg

SEQ ID NO: 4474375 - DNA, 25 bp, Homo sapien
ccatgaatggcttgttgttgtagga

SEQ ID NO: 4474376 - DNA, 25 bp, Homo sapien
gtacctcccggatacttctactgct

SEQ ID NO: 4474377 - DNA, 25 bp, Homo sapien
taaagtaacttctatggacagggct

SEQ ID NO: 4474378 - DNA, 25 bp, Homo sapien
aaacttctcagtccgcaagccatgt

SEQ ID NO: 4474379 - DNA, 25 bp, Homo sapien
tgtgagcatagaacccccacaaatt

SEQ ID NO: 4474380 - DNA, 25 bp, Homo sapien
ttaaaacttctcagtccgcaagcca

SEQ ID NO: 4474381 - DNA, 25 bp, Homo sapien
ctcagtccgcaagccatgttatcat

SEQ ID NO: 4474382 - DNA, 25 bp, Homo sapien
cctgcacattgtgcagtgctccata

SEQ ID NO: 4474383 - DNA, 25 bp, Homo sapien
agtgctccatactctgggtcttggc

SEQ ID NO: 4474384 - DNA, 25 bp, Homo sapien
cagtgctccatactctgggtcttgg

SEQ ID NO: 4474385 - DNA, 25 bp, Homo sapien
attgtgcagtgctccatactctggg

SEQ ID NO: 4474386 - DNA, 25 bp, Homo sapien
ggatccaaatcaggataccacctta

SEQ ID NO: 4474387 - DNA, 25 bp, Homo sapien
aaactaagacattaacgctggtaca

SEQ ID NO: 4474388 - DNA, 25 bp, Homo sapien
gaaaaaggtcagaaccaagctctat

SEQ ID NO: 4474389 - DNA, 25 bp, Homo sapien
tgttccccacccgttgtatgtgcac

SEQ ID NO: 4474390 - DNA, 25 bp, Homo sapien
tgagcgcagctgtttccctaagtag

SEQ ID NO: 4474391 - DNA, 25 bp, Homo sapien
tggcattgcactgaatgagcgcagc

SEQ ID NO: 4474392 - DNA, 25 bp, Homo sapien
gagcccgatgcaaaatccagccgta

SEQ ID NO: 4474393 - DNA, 25 bp, Homo sapien
ccctaagtaggcacatgtgaatagc

SEQ ID NO: 4474394 - DNA, 25 bp, Homo sapien
gctcagggctctgtggatatcagac

SEQ ID NO: 4474395 - DNA, 25 bp, Homo sapien
cgcaaggggtagatcttgactgaag

SEQ ID NO: 4474396 - DNA, 25 bp, Homo sapien
cagactgctggattggtggaggagt

SEQ ID NO: 4474397 - DNA, 25 bp, Homo sapien
ccatcatgccccaccatggcgtctg

SEQ ID NO: 4474398 - DNA, 25 bp, Homo sapien
tcaactttaaaataggtccgatgtg

SEQ ID NO: 4474399 - DNA, 25 bp, Homo sapien
taaaataggtccgatgtggtgctga

SEQ ID NO: 4474400 - DNA, 25 bp, Homo sapien
ctttaaaataggtccgatgtggtgc

SEQ ID NO: 4474401 - DNA, 25 bp, Homo sapien
aaaataggtccgatgtggtgctgag

SEQ ID NO: 4474402 - DNA, 25 bp, Homo sapien
taaatctgtactcccttgctacaag

SEQ ID NO: 4474403 - DNA, 25 bp, Homo sapien
gttcagcagtgttgaccacctctcc

SEQ ID NO: 4474404 - DNA, 25 bp, Homo sapien
gagatggctacctgaccactctaat

SEQ ID NO: 4474405 - DNA, 25 bp, Homo sapien
gctacaagctacatcctcacatcta

SEQ ID NO: 4474406 - DNA, 25 bp, Homo sapien
gtaggtaataaccatttgccccatc

SEQ ID NO: 4474407 - DNA, 25 bp, Homo sapien
taggtaataaccatttgccccatcc

SEQ ID NO: 4474408 - DNA, 25 bp, Homo sapien
gtaataaccatttgccccatcctgc

SEQ ID NO: 4474409 - DNA, 25 bp, Homo sapien
ggtaataaccatttgccccatcctg

SEQ ID NO: 4474410 - DNA, 25 bp, Homo sapien
gcctcagaaaacttagaatcatcgc

SEQ ID NO: 4474411 - DNA, 25 bp, Homo sapien
aaaacttagaatcatcgcagaaggg

SEQ ID NO: 4474412 - DNA, 25 bp, Homo sapien
ctcagaaaacttagaatcatcgcag

SEQ ID NO: 4474413 - DNA, 25 bp, Homo sapien
aggcctcagaaaacttagaatcatc

SEQ ID NO: 4474414 - DNA, 25 bp, Homo sapien
caatttcacccatcctaaggtcatc

SEQ ID NO: 4474415 - DNA, 25 bp, Homo sapien
tagacaatgtacgataacctgttca

SEQ ID NO: 4474416 - DNA, 25 bp, Homo sapien
tattattctgcagtggatacggcct

SEQ ID NO: 4474417 - DNA, 25 bp, Homo sapien
gatacggcctcagatgcagacagga

SEQ ID NO: 4474418 - DNA, 25 bp, Homo sapien
caactgggtgtaggaccaggcatca

SEQ ID NO: 4474419 - DNA, 25 bp, Homo sapien
tatctacaggctcactggacacggg

SEQ ID NO: 4474420 - DNA, 25 bp, Homo sapien
ggacacgggccaaagctattacact

SEQ ID NO: 4474421 - DNA, 25 bp, Homo sapien
tatttatacaacctccaaagccggc

SEQ ID NO: 4474422 - DNA, 25 bp, Homo sapien
agaaggaggctgataaccaccaaag

SEQ ID NO: 4474423 - DNA, 25 bp, Homo sapien
tgtcaatggatccagttctactcct

SEQ ID NO: 4474424 - DNA, 25 bp, Homo sapien
gatgtcaatggatccagttctactc

SEQ ID NO: 4474425 - DNA, 25 bp, Homo sapien
aaggaggctgataaccaccaaagat

SEQ ID NO: 4474426 - DNA, 25 bp, Homo sapien
tttccacgaggcaggatactccact

SEQ ID NO: 4474427 - DNA, 25 bp, Homo sapien
aagccagggcggtacggatgcccca

SEQ ID NO: 4474428 - DNA, 25 bp, Homo sapien
ctcgaattcgcttgtccagtcctga

SEQ ID NO: 4474429 - DNA, 25 bp, Homo sapien
tccattctgtgtgaactcgaattcg

SEQ ID NO: 4474430 - DNA, 25 bp, Homo sapien
gctcggtttagacacacctccaaaa

SEQ ID NO: 4474431 - DNA, 25 bp, Homo sapien
tgtagtccattcacagcgggtatgc

SEQ ID NO: 4474432 - DNA, 25 bp, Homo sapien
tcagtaatgtagtccattcacagcg

SEQ ID NO: 4474433 - DNA, 25 bp, Homo sapien
gactgtcctggaactcgcagtccct

SEQ ID NO: 4474434 - DNA, 25 bp, Homo sapien
gaatcacatttctatggagagccat

SEQ ID NO: 4474435 - DNA, 25 bp, Homo sapien
aagaatgtttatagaggctcccagc

SEQ ID NO: 4474436 - DNA, 25 bp, Homo sapien
tagacttctcggattcatacctcag

SEQ ID NO: 4474437 - DNA, 25 bp, Homo sapien
aaatgttgctctcacctgatggctg

SEQ ID NO: 4474438 - DNA, 25 bp, Homo sapien
tctgggtaaatgaacagcactggca

SEQ ID NO: 4474439 - DNA, 25 bp, Homo sapien
gaaaatgcgcaatagtccacagaga

SEQ ID NO: 4474440 - DNA, 25 bp, Homo sapien
taggatatgtcggaaccaaggcagc

SEQ ID NO: 4474441 - DNA, 25 bp, Homo sapien
tggacaagcaatggctacccctaga

SEQ ID NO: 4474442 - DNA, 25 bp, Homo sapien
gccacctttagcatgtgatgacaag

SEQ ID NO: 4474443 - DNA, 25 bp, Homo sapien
tccagttaccttacaagaagtcaag

SEQ ID NO: 4474444 - DNA, 25 bp, Homo sapien
tataggagtgctcaatccagttacc

SEQ ID NO: 4474445 - DNA, 25 bp, Homo sapien
taaaagcaatgcaagcaatccgttg

SEQ ID NO: 4474446 - DNA, 25 bp, Homo sapien
caagtaagagggaactcctcctgcc

SEQ ID NO: 4474447 - DNA, 25 bp, Homo sapien
tggctgggtctcaagacttcaggct

SEQ ID NO: 4474448 - DNA, 25 bp, Homo sapien
tggaacacaacatcgactctcctgg

SEQ ID NO: 4474449 - DNA, 25 bp, Homo sapien
tgggtctccaacttgccaaatgtag

SEQ ID NO: 4474450 - DNA, 25 bp, Homo sapien
gaatgtcaacatggcagagggcgaa

SEQ ID NO: 4474451 - DNA, 25 bp, Homo sapien
tgaaaatgtaactccaagcagcagc

SEQ ID NO: 4474452 - DNA, 25 bp, Homo sapien
tgaacgctggtatcccctgaacgga

SEQ ID NO: 4474453 - DNA, 25 bp, Homo sapien
gactgtttcatgtgcacctcccagg

SEQ ID NO: 4474454 - DNA, 25 bp, Homo sapien
gagatgacctgatgaaattaaccaa

SEQ ID NO: 4474455 - DNA, 25 bp, Homo sapien
tgagttcatacagagccagattgcc

SEQ ID NO: 4474456 - DNA, 25 bp, Homo sapien
gaaatggaacgctaggagatgacct

SEQ ID NO: 4474457 - DNA, 25 bp, Homo sapien
gggactgccaatctcaatgagtcag

SEQ ID NO: 4474458 - DNA, 25 bp, Homo sapien
tacatgcagacctcgtatcgggtgg

SEQ ID NO: 4474459 - DNA, 25 bp, Homo sapien
tgcaggctgccatttctagggacca

SEQ ID NO: 4474460 - DNA, 25 bp, Homo sapien
taaagggctcgctcaaaaggcatcc

SEQ ID NO: 4474461 - DNA, 25 bp, Homo sapien
catcaggcagtggagttcagtcccc

SEQ ID NO: 4474462 - DNA, 25 bp, Homo sapien
gacagccctgagcaaaggcccagct

SEQ ID NO: 4474463 - DNA, 25 bp, Homo sapien
agacagccctgagcaaaggcccagc

SEQ ID NO: 4474464 - DNA, 25 bp, Homo sapien
acagccctgagcaaaggcccagctg

SEQ ID NO: 4474465 - DNA, 25 bp, Homo sapien
taaagcaaacggactcagagaggta

SEQ ID NO: 4474466 - DNA, 25 bp, Homo sapien
ggcaggccccttggttagtgacaca

SEQ ID NO: 4474467 - DNA, 25 bp, Homo sapien
catcagctctgggttacagggaaac

SEQ ID NO: 4474468 - DNA, 25 bp, Homo sapien
catccttacagagtagatcgcaggg

SEQ ID NO: 4474469 - DNA, 25 bp, Homo sapien
aattgatgccagtaatgataccagc

SEQ ID NO: 4474470 - DNA, 25 bp, Homo sapien
gtaatgataccagcaatggcatgaa

SEQ ID NO: 4474471 - DNA, 25 bp, Homo sapien
ctaacaggaacaattgatgccagta

SEQ ID NO: 4474472 - DNA, 25 bp, Homo sapien
atgaaagctacggagagcccccagt

SEQ ID NO: 4474473 - DNA, 25 bp, Homo sapien
gaaaacaataggtattggcgtggat

SEQ ID NO: 4474474 - DNA, 25 bp, Homo sapien
gcaatcctaccaaggggtatctacc

SEQ ID NO: 4474475 - DNA, 25 bp, Homo sapien
aacaataggtattggcgtggatgtg

SEQ ID NO: 4474476 - DNA, 25 bp, Homo sapien
tcagaaaacaataggtattggcgtg

SEQ ID NO: 4474477 - DNA, 25 bp, Homo sapien
tgtgggtcactcaaaggtctggcaa

SEQ ID NO: 4474478 - DNA, 25 bp, Homo sapien
tcatggcgacacatcacaacggagg

SEQ ID NO: 4474479 - DNA, 25 bp, Homo sapien
tttcaagtccgtgagattccagccg

SEQ ID NO: 4474480 - DNA, 25 bp, Homo sapien
gatggagatccccaagtggccacta

SEQ ID NO: 4474481 - DNA, 25 bp, Homo sapien
tcgggaatgtccagcatactgcctg

SEQ ID NO: 4474482 - DNA, 25 bp, Homo sapien
tcacaggggacaacatcgactccgt

SEQ ID NO: 4474483 - DNA, 25 bp, Homo sapien
ctgagcagagctggcgtctcgggaa

SEQ ID NO: 4474484 - DNA, 25 bp, Homo sapien
agcatactgcctgagacatgacatc

SEQ ID NO: 4474485 - DNA, 25 bp, Homo sapien
aatttcacgatgagtaattcgaggc

SEQ ID NO: 4474486 - DNA, 25 bp, Homo sapien
aattcgaggcttacaagggcagggc

SEQ ID NO: 4474487 - DNA, 25 bp, Homo sapien
acagccctgtctgtgagtgagtggc

SEQ ID NO: 4474488 - DNA, 25 bp, Homo sapien
gcccagcccatagcaataatggaac

SEQ ID NO: 4474489 - DNA, 25 bp, Homo sapien
tcgctctcttactcttggcaaccaa

SEQ ID NO: 4474490 - DNA, 25 bp, Homo sapien
tcttggcaaccaacagagcgatgga

SEQ ID NO: 4474491 - DNA, 25 bp, Homo sapien
tagtcgctctcttactcttggcaac

SEQ ID NO: 4474492 - DNA, 25 bp, Homo sapien
caacctagtcgctctcttactcttg

SEQ ID NO: 4474493 - DNA, 25 bp, Homo sapien
aattttcttggcctatcccagttgg

SEQ ID NO: 4474494 - DNA, 25 bp, Homo sapien
aagaagtacgaggaagggcagccgc

SEQ ID NO: 4474495 - DNA, 25 bp, Homo sapien
actccatctgtacctaggtggctgg

SEQ ID NO: 4474496 - DNA, 25 bp, Homo sapien
tcaggaaaactaatcaacactgtcc

SEQ ID NO: 4474497 - DNA, 25 bp, Homo sapien
aacttatggcacgggagtaaattca

SEQ ID NO: 4474498 - DNA, 25 bp, Homo sapien
tatggcacgggagtaaattcagcat

SEQ ID NO: 4474499 - DNA, 25 bp, Homo sapien
tggcacgggagtaaattcagcatta

SEQ ID NO: 4474500 - DNA, 25 bp, Homo sapien
cttatggcacgggagtaaattcagc

SEQ ID NO: 4474501 - DNA, 25 bp, Homo sapien
tcacgatctggacctgagacacaga

SEQ ID NO: 4474502 - DNA, 25 bp, Homo sapien
gcaggcaaaggccacatttgttgag

SEQ ID NO: 4474503 - DNA, 25 bp, Homo sapien
gagtagaccttgtacatccgtggaa

SEQ ID NO: 4474504 - DNA, 25 bp, Homo sapien
gcacaagaaatctttgtgaatgctc

SEQ ID NO: 4474505 - DNA, 25 bp, Homo sapien
cataaaccgatttgcattacgttaa

SEQ ID NO: 4474506 - DNA, 25 bp, Homo sapien
cccagctgggcaaggatacactata

SEQ ID NO: 4474507 - DNA, 25 bp, Homo sapien
caaggatacactataaatgtgctag

SEQ ID NO: 4474508 - DNA, 25 bp, Homo sapien
ctttttaaataacggcatgtcagca

SEQ ID NO: 4474509 - DNA, 25 bp, Homo sapien
tgggtcctgctgattcaaacgcagt

SEQ ID NO: 4474510 - DNA, 25 bp, Homo sapien
catccattaattgagctctccacag

SEQ ID NO: 4474511 - DNA, 25 bp, Homo sapien
agcagcacgctctttgggccccttg

SEQ ID NO: 4474512 - DNA, 25 bp, Homo sapien
tgattcaaacgcagtcaagccagca

SEQ ID NO: 4474513 - DNA, 25 bp, Homo sapien
tcataaccgagtttagagtccctgc

SEQ ID NO: 4474514 - DNA, 25 bp, Homo sapien
cagtgcagatgtcctacagtaggct

SEQ ID NO: 4474515 - DNA, 25 bp, Homo sapien
agagcagggaatgacaccctctcat

SEQ ID NO: 4474516 - DNA, 25 bp, Homo sapien
ggctccttgtccatgcagtggccac

SEQ ID NO: 4474517 - DNA, 25 bp, Homo sapien
tcctctgccagaaaggactccggtt

SEQ ID NO: 4474518 - DNA, 25 bp, Homo sapien
gtgatcctgatgtgcactccccttc

SEQ ID NO: 4474519 - DNA, 25 bp, Homo sapien
tctgcccaagacacttaatccaggc

SEQ ID NO: 4474520 - DNA, 25 bp, Homo sapien
tctgtccccgtatctggaatgtgat

SEQ ID NO: 4474521 - DNA, 25 bp, Homo sapien
actaatccaggagcagtcagagcca

SEQ ID NO: 4474522 - DNA, 25 bp, Homo sapien
gaattgcagcctagtaaacacagct

SEQ ID NO: 4474523 - DNA, 25 bp, Homo sapien
tttatgacaaagtatccgcctgccc

SEQ ID NO: 4474524 - DNA, 25 bp, Homo sapien
ggtgacagggtgcttacccaacaga

SEQ ID NO: 4474525 - DNA, 25 bp, Homo sapien
aaaccgggacaactatctctaagag

SEQ ID NO: 4474526 - DNA, 25 bp, Homo sapien
tcattgtaatgacttagccgaccca

SEQ ID NO: 4474527 - DNA, 25 bp, Homo sapien
tacgcagcattacggagtctccaaa

SEQ ID NO: 4474528 - DNA, 25 bp, Homo sapien
tttccagaatggttatcagtgcctc

SEQ ID NO: 4474529 - DNA, 25 bp, Homo sapien
caggagactcttctctaagcagatt

SEQ ID NO: 4474530 - DNA, 25 bp, Homo sapien
tgcagggaaagtgggaaaacacaag

SEQ ID NO: 4474531 - DNA, 25 bp, Homo sapien
gcatcacctgcgtacttgctgaaaa

SEQ ID NO: 4474532 - DNA, 25 bp, Homo sapien
ggaacatttcacctagcatcctgtc

SEQ ID NO: 4474533 - DNA, 25 bp, Homo sapien
gacacacagatggccgtgccgttct

SEQ ID NO: 4474534 - DNA, 25 bp, Homo sapien
gggtgccatcgatgactttctcagc

SEQ ID NO: 4474535 - DNA, 25 bp, Homo sapien
tgccgtacatagaagcggtagccca

SEQ ID NO: 4474536 - DNA, 25 bp, Homo sapien
tcaactcacatttgcgattgccttt

SEQ ID NO: 4474537 - DNA, 25 bp, Homo sapien
agtcagggctgaccaagcagcccca

SEQ ID NO: 4474538 - DNA, 25 bp, Homo sapien
ggtgacgcccaaagatcaaaagcac

SEQ ID NO: 4474539 - DNA, 25 bp, Homo sapien
ccagagcgcatggttgagtggccct

SEQ ID NO: 4474540 - DNA, 25 bp, Homo sapien
cactcctcccagagcgcatggttga

SEQ ID NO: 4474541 - DNA, 25 bp, Homo sapien
tcaacataaatcacttaataatggg

SEQ ID NO: 4474542 - DNA, 25 bp, Homo sapien
aataatgggaatgctagagtgggac

SEQ ID NO: 4474543 - DNA, 25 bp, Homo sapien
taataatgggaatgctagagtggga

SEQ ID NO: 4474544 - DNA, 25 bp, Homo sapien
cataaatcacttaataatgggaatg

SEQ ID NO: 4474545 - DNA, 25 bp, Homo sapien
ctgcaccaagggagtagacatcaac

SEQ ID NO: 4474546 - DNA, 25 bp, Homo sapien
ccaagggagtagacatcaaccccaa

SEQ ID NO: 4474547 - DNA, 25 bp, Homo sapien
caccaagggagtagacatcaacccc

SEQ ID NO: 4474548 - DNA, 25 bp, Homo sapien
agggagtagacatcaaccccaattt

SEQ ID NO: 4474549 - DNA, 25 bp, Homo sapien
cccttcgaggcctttcaatatgcag

SEQ ID NO: 4474550 - DNA, 25 bp, Homo sapien
agactggccagatattcgtttttga

SEQ ID NO: 4474551 - DNA, 25 bp, Homo sapien
tatgcagtaattagcccgaagccga

SEQ ID NO: 4474552 - DNA, 25 bp, Homo sapien
aagccgacatttagactccttccag

SEQ ID NO: 4474553 - DNA, 25 bp, Homo sapien
tgcagtgttagggactgacacattc

SEQ ID NO: 4474554 - DNA, 25 bp, Homo sapien
taggcctgcagtgttagggactgac

SEQ ID NO: 4474555 - DNA, 25 bp, Homo sapien
gggcagacgatgaagggttgggact

SEQ ID NO: 4474556 - DNA, 25 bp, Homo sapien
tgaagggttgggactttattccata

SEQ ID NO: 4474557 - DNA, 25 bp, Homo sapien
ggcactccagactgacgggacagca

SEQ ID NO: 4474558 - DNA, 25 bp, Homo sapien
gcactccagactgacgggacagcac

SEQ ID NO: 4474559 - DNA, 25 bp, Homo sapien
gtatctcgtatgtgctgggtcctgg

SEQ ID NO: 4474560 - DNA, 25 bp, Homo sapien
cagattaactcagggcagagagcag

SEQ ID NO: 4474561 - DNA, 25 bp, Homo sapien
ggagggtttcccattactgaagcca

SEQ ID NO: 4474562 - DNA, 25 bp, Homo sapien
ggcaccaccagaagtagaccagatt

SEQ ID NO: 4474563 - DNA, 25 bp, Homo sapien
cagacgtagtctgagggcaagtcaa

SEQ ID NO: 4474564 - DNA, 25 bp, Homo sapien
tatgcaagtaatcaggccaagttaa

SEQ ID NO: 4474565 - DNA, 25 bp, Homo sapien
tgtcggccaggctcaaaaagagaga

SEQ ID NO: 4474566 - DNA, 25 bp, Homo sapien
tgttagattctagccctgttcattg

SEQ ID NO: 4474567 - DNA, 25 bp, Homo sapien
gaacggaggctgacattatgaagcc

SEQ ID NO: 4474568 - DNA, 25 bp, Homo sapien
caattgggtatagttttgtgaacaa

SEQ ID NO: 4474569 - DNA, 25 bp, Homo sapien
tatgaccagacagctttacagaacg

SEQ ID NO: 4474570 - DNA, 25 bp, Homo sapien
aagtttacagcaattgggtatagtt

SEQ ID NO: 4474571 - DNA, 25 bp, Homo sapien
tgcattcagaatcacctgatagatg

SEQ ID NO: 4474572 - DNA, 25 bp, Homo sapien
gtcagctagattcccttttctcaaa

SEQ ID NO: 4474573 - DNA, 25 bp, Homo sapien
cataagaactttttagtcagctaga

SEQ ID NO: 4474574 - DNA, 25 bp, Homo sapien
gcacctctttagagatgaatcatac

SEQ ID NO: 4474575 - DNA, 25 bp, Homo sapien
tcagtcgatagaagccaagttgggt

SEQ ID NO: 4474576 - DNA, 25 bp, Homo sapien
cagtcgatagaagccaagttgggta

SEQ ID NO: 4474577 - DNA, 25 bp, Homo sapien
gtcgatagaagccaagttgggtaaa

SEQ ID NO: 4474578 - DNA, 25 bp, Homo sapien
tcgatagaagccaagttgggtaaaa

SEQ ID NO: 4474579 - DNA, 25 bp, Homo sapien
gcttttcaaaaagcgcaacgtggaa

SEQ ID NO: 4474580 - DNA, 25 bp, Homo sapien
tggaaattttttaacgagtgatctg

SEQ ID NO: 4474581 - DNA, 25 bp, Homo sapien
gatctgggatgctgcggttctgcaa

SEQ ID NO: 4474582 - DNA, 25 bp, Homo sapien
gctttgaacatgcaccttttatgct

SEQ ID NO: 4474583 - DNA, 25 bp, Homo sapien
caacatgggaagattaactgggatc

SEQ ID NO: 4474584 - DNA, 25 bp, Homo sapien
ggaggttgatcccagtccagacaat

SEQ ID NO: 4474585 - DNA, 25 bp, Homo sapien
cctaaagacggatcctgcaaaacaa

SEQ ID NO: 4474586 - DNA, 25 bp, Homo sapien
aattgtcatgaatctgctccctggg

SEQ ID NO: 4474587 - DNA, 25 bp, Homo sapien
gagatgcagcgctgtggcaagtcca

SEQ ID NO: 4474588 - DNA, 25 bp, Homo sapien
gggagccacaatttcagccatgaca

SEQ ID NO: 4474589 - DNA, 25 bp, Homo sapien
cacaaagccagtatgtggctacagg

SEQ ID NO: 4474590 - DNA, 25 bp, Homo sapien
cacggagggactaaagtttccagtg

SEQ ID NO: 4474591 - DNA, 25 bp, Homo sapien
gatcccagttaaggtagtcaaagcc

SEQ ID NO: 4474592 - DNA, 25 bp, Homo sapien
aaaggtcagtgggtcaaacaaggct

SEQ ID NO: 4474593 - DNA, 25 bp, Homo sapien
cactctttggatgcttaacgggaca

SEQ ID NO: 4474594 - DNA, 25 bp, Homo sapien
gagcttgacccctgactttcggaca

SEQ ID NO: 4474595 - DNA, 25 bp, Homo sapien
tcaatgagacaaagttcacaagtca

SEQ ID NO: 4474596 - DNA, 25 bp, Homo sapien
gacaaagttcacaagttctctcaat

SEQ ID NO: 4474597 - DNA, 25 bp, Homo sapien
tggacagaattctgcataccctggg

SEQ ID NO: 4474598 - DNA, 25 bp, Homo sapien
cacatcttggcttctttattggaca

SEQ ID NO: 4474599 - DNA, 25 bp, Homo sapien
cacattaagcttcccggagcctcag

SEQ ID NO: 4474600 - DNA, 25 bp, Homo sapien
ttcacactgaggtctatggaggtct

SEQ ID NO: 4474601 - DNA, 25 bp, Homo sapien
tatggcccacagcaacacattaagc

SEQ ID NO: 4474602 - DNA, 25 bp, Homo sapien
tcagagtaaagctaacgccccacat

SEQ ID NO: 4474603 - DNA, 25 bp, Homo sapien
tgctgtagtgcgacgttggctcact

SEQ ID NO: 4474604 - DNA, 25 bp, Homo sapien
tggtatgctgtagtgcgacgttggc

SEQ ID NO: 4474605 - DNA, 25 bp, Homo sapien
ccaggctggtatgctgtagtgcgac

SEQ ID NO: 4474606 - DNA, 25 bp, Homo sapien
gtatgctgtagtgcgacgttggctc

SEQ ID NO: 4474607 - DNA, 25 bp, Homo sapien
tccccttgacccttacagcaaaaca

SEQ ID NO: 4474608 - DNA, 25 bp, Homo sapien
tctgctgaagacagaagccacattt

SEQ ID NO: 4474609 - DNA, 25 bp, Homo sapien
catcaccaaacataagctcagccat

SEQ ID NO: 4474610 - DNA, 25 bp, Homo sapien
ctttatcttgctctgtactcagact

SEQ ID NO: 4474611 - DNA, 25 bp, Homo sapien
atcttcttcaacactactcatcagc

SEQ ID NO: 4474612 - DNA, 25 bp, Homo sapien
tcttcaacactactcatcagctgtg

SEQ ID NO: 4474613 - DNA, 25 bp, Homo sapien
aagtggtgtgtggatgtctggtctc

SEQ ID NO: 4474614 - DNA, 25 bp, Homo sapien
ttggaaagcctctagaagtggtgtg

SEQ ID NO: 4474615 - DNA, 25 bp, Homo sapien
agctgctgtgcctcgttcttcctca

SEQ ID NO: 4474616 - DNA, 25 bp, Homo sapien
cccactttccggcaatgggaaccat

SEQ ID NO: 4474617 - DNA, 25 bp, Homo sapien
taacacccactttccggcaatggga

SEQ ID NO: 4474618 - DNA, 25 bp, Homo sapien
gattttgccagaatgtgccctgaaa

SEQ ID NO: 4474619 - DNA, 25 bp, Homo sapien
aaaaagatgccaggattttgccaga

SEQ ID NO: 4474620 - DNA, 25 bp, Homo sapien
tgctgtggtcgttccttatttcccc

SEQ ID NO: 4474621 - DNA, 25 bp, Homo sapien
gaccacaccaaaatttatcaccaag

SEQ ID NO: 4474622 - DNA, 25 bp, Homo sapien
gctcctgctgtggtcgttccttatt

SEQ ID NO: 4474623 - DNA, 25 bp, Homo sapien
actgaccacaccaaaatttatcacc

SEQ ID NO: 4474624 - DNA, 25 bp, Homo sapien
tctggaagccggctgcaagtttgaa

SEQ ID NO: 4474625 - DNA, 25 bp, Homo sapien
gtctggaagccggctgcaagtttga

SEQ ID NO: 4474626 - DNA, 25 bp, Homo sapien
gagtctggaagccggctgcaagttt

SEQ ID NO: 4474627 - DNA, 25 bp, Homo sapien
tggaagccggctgcaagtttgaaga

SEQ ID NO: 4474628 - DNA, 25 bp, Homo sapien
gactgctgctaacctcaacttgctg

SEQ ID NO: 4474629 - DNA, 25 bp, Homo sapien
tcggctggtagtcttcttggctgga

SEQ ID NO: 4474630 - DNA, 25 bp, Homo sapien
agccccaatcttggcactgagtgtg

SEQ ID NO: 4474631 - DNA, 25 bp, Homo sapien
ccagcttgcatacagaactcgttca

SEQ ID NO: 4474632 - DNA, 25 bp, Homo sapien
ctggctggatcagcacttgtaacta

SEQ ID NO: 4474633 - DNA, 25 bp, Homo sapien
gccatgcagttaggctgagcacctt

SEQ ID NO: 4474634 - DNA, 25 bp, Homo sapien
ggcagccatgcagttaggctgagca

SEQ ID NO: 4474635 - DNA, 25 bp, Homo sapien
atcagcacttgtaactatcagggca

SEQ ID NO: 4474636 - DNA, 25 bp, Homo sapien
gcgcttcgagctcagcctctgttct

SEQ ID NO: 4474637 - DNA, 25 bp, Homo sapien
tgtactgcccggcgcttcgagctca

SEQ ID NO: 4474638 - DNA, 25 bp, Homo sapien
gtactgcccggcgcttcgagctcag

SEQ ID NO: 4474639 - DNA, 25 bp, Homo sapien
gcccggcgcttcgagctcagcctct

SEQ ID NO: 4474640 - DNA, 25 bp, Homo sapien
caaagttagaactaccctagaggag

SEQ ID NO: 4474641 - DNA, 25 bp, Homo sapien
tgccaagtgctaacagctagcagat

SEQ ID NO: 4474642 - DNA, 25 bp, Homo sapien
tagcagatgcacttgtgtctcggga

SEQ ID NO: 4474643 - DNA, 25 bp, Homo sapien
gaggagaactccgtctgccaagtgc

SEQ ID NO: 4474644 - DNA, 25 bp, Homo sapien
ttgaacgtggagcaatgttaatatc

SEQ ID NO: 4474645 - DNA, 25 bp, Homo sapien
tgttaatatcaggtagctgacaaac

SEQ ID NO: 4474646 - DNA, 25 bp, Homo sapien
tgctaacactgctgtttgaacgtgg

SEQ ID NO: 4474647 - DNA, 25 bp, Homo sapien
ccccaggtcttgctaacactgctgt

SEQ ID NO: 4474648 - DNA, 25 bp, Homo sapien
ggcacacagattccggcgtggcctt

SEQ ID NO: 4474649 - DNA, 25 bp, Homo sapien
cactctgcatgtgacacaaggctag

SEQ ID NO: 4474650 - DNA, 25 bp, Homo sapien
gtggccttccccacgagtcagctgt

SEQ ID NO: 4474651 - DNA, 25 bp, Homo sapien
caggtaactaaagcctgccctttgc

SEQ ID NO: 4474652 - DNA, 25 bp, Homo sapien
tgtgccccttttagagtataagctc

SEQ ID NO: 4474653 - DNA, 25 bp, Homo sapien
tcagcacagggttaatacacttggt

SEQ ID NO: 4474654 - DNA, 25 bp, Homo sapien
gagagacccttattgcatgatcatt

SEQ ID NO: 4474655 - DNA, 25 bp, Homo sapien
aaaaacctcgggagcttccatctcg

SEQ ID NO: 4474656 - DNA, 25 bp, Homo sapien
aaactatcaaaaccctggtctagca

SEQ ID NO: 4474657 - DNA, 25 bp, Homo sapien
aagaatgcaaagacagtccgacatt

SEQ ID NO: 4474658 - DNA, 25 bp, Homo sapien
aagatagttaattccaagaatgcaa

SEQ ID NO: 4474659 - DNA, 25 bp, Homo sapien
taaaatacagccgagagccaataac

SEQ ID NO: 4474660 - DNA, 25 bp, Homo sapien
ttactatccgagatttccagagtgg

SEQ ID NO: 4474661 - DNA, 25 bp, Homo sapien
taagcggccttcagggtactaacag

SEQ ID NO: 4474662 - DNA, 25 bp, Homo sapien
gaagatacggttccaagtaagcggc

SEQ ID NO: 4474663 - DNA, 25 bp, Homo sapien
gctagtgggtcctccagcaagactc

SEQ ID NO: 4474664 - DNA, 25 bp, Homo sapien
ctatttcaaaagtagtttgcatttt

SEQ ID NO: 4474665 - DNA, 25 bp, Homo sapien
ttatagctatttcaaaagtagtttg

SEQ ID NO: 4474666 - DNA, 25 bp, Homo sapien
tagctatttcaaaagtagtttgcat

SEQ ID NO: 4474667 - DNA, 25 bp, Homo sapien
tatagctatttcaaaagtagtttgc

SEQ ID NO: 4474668 - DNA, 25 bp, Homo sapien
tcttgggatttgctaaacatttctg

SEQ ID NO: 4474669 - DNA, 25 bp, Homo sapien
tcgaaaagcataccagacatctggg

SEQ ID NO: 4474670 - DNA, 25 bp, Homo sapien
gcgaccttgccttaatgcagtggga

SEQ ID NO: 4474671 - DNA, 25 bp, Homo sapien
aaatacaggcatttttcgaaaagca

SEQ ID NO: 4474672 - DNA, 25 bp, Homo sapien
tcggtatagcaatgctcttgctgtg

SEQ ID NO: 4474673 - DNA, 25 bp, Homo sapien
gagtcagccaagaggatcggtatag

SEQ ID NO: 4474674 - DNA, 25 bp, Homo sapien
gctcctctaccttgcagatgggagt

SEQ ID NO: 4474675 - DNA, 25 bp, Homo sapien
gagcatgtcacatgtgtgacaggga

SEQ ID NO: 4474676 - DNA, 25 bp, Homo sapien
tgcagaaggttacactgggcctcat

SEQ ID NO: 4474677 - DNA, 25 bp, Homo sapien
cttgaactctccctttcagtgtcat

SEQ ID NO: 4474678 - DNA, 25 bp, Homo sapien
aaaatctggccgcagtctgaacatc

SEQ ID NO: 4474679 - DNA, 25 bp, Homo sapien
tctgaacatctctcccacaaatagg

SEQ ID NO: 4474680 - DNA, 25 bp, Homo sapien
gctgtgcacacgctcagatggctct

SEQ ID NO: 4474681 - DNA, 25 bp, Homo sapien
agggcattcacctcaacaactgtca

SEQ ID NO: 4474682 - DNA, 25 bp, Homo sapien
gaacctcaaatggtttccctgccaa

SEQ ID NO: 4474683 - DNA, 25 bp, Homo sapien
tctacagacaagtaacagctcaatt

SEQ ID NO: 4474684 - DNA, 25 bp, Homo sapien
tgccgggcaaacagcttctcctagc

SEQ ID NO: 4474685 - DNA, 25 bp, Homo sapien
atgccgggcaaacagcttctcctag

SEQ ID NO: 4474686 - DNA, 25 bp, Homo sapien
ccgggcaaacagcttctcctagcac

SEQ ID NO: 4474687 - DNA, 25 bp, Homo sapien
catgccgggcaaacagcttctccta

SEQ ID NO: 4474688 - DNA, 25 bp, Homo sapien
tagcagatgctgaaacggtcaccag

SEQ ID NO: 4474689 - DNA, 25 bp, Homo sapien
cagtagctaccgtctttaaatggag

SEQ ID NO: 4474690 - DNA, 25 bp, Homo sapien
tgtcactttcgcagaccttgggcaa

SEQ ID NO: 4474691 - DNA, 25 bp, Homo sapien
cggtcaccagcgaaaaactgtgcta

SEQ ID NO: 4474692 - DNA, 25 bp, Homo sapien
gattccgggtagcaccaaggaaggc

SEQ ID NO: 4474693 - DNA, 25 bp, Homo sapien
ttgcctacttgagacaggagattcc

SEQ ID NO: 4474694 - DNA, 25 bp, Homo sapien
gagtccaattgtcagtttcagccag

SEQ ID NO: 4474695 - DNA, 25 bp, Homo sapien
aggagattccgggtagcaccaagga

SEQ ID NO: 4474696 - DNA, 25 bp, Homo sapien
cctggccgagaccatttttcaaaat

SEQ ID NO: 4474697 - DNA, 25 bp, Homo sapien
aacccaacatttaagatccagctga

SEQ ID NO: 4474698 - DNA, 25 bp, Homo sapien
ggctccttcagtgtctcaagtacaa

SEQ ID NO: 4474699 - DNA, 25 bp, Homo sapien
gaggactataataagttgctaacag

SEQ ID NO: 4474700 - DNA, 25 bp, Homo sapien
tcttcagagtattccactcatgcat

SEQ ID NO: 4474701 - DNA, 25 bp, Homo sapien
tgagcttttggtttctccaaaatct

SEQ ID NO: 4474702 - DNA, 25 bp, Homo sapien
acttctgttggagcattgctgagct

SEQ ID NO: 4474703 - DNA, 25 bp, Homo sapien
ttttcctaccaatacacttctgttg

SEQ ID NO: 4474704 - DNA, 25 bp, Homo sapien
tttaagcagctgcatatccctcttg

SEQ ID NO: 4474705 - DNA, 25 bp, Homo sapien
cagcacggaacccatccctttcatg

SEQ ID NO: 4474706 - DNA, 25 bp, Homo sapien
tgcatatccctcttgtctccatcaa

SEQ ID NO: 4474707 - DNA, 25 bp, Homo sapien
ttcatgggtgtcagcccagaaaaca

SEQ ID NO: 4474708 - DNA, 25 bp, Homo sapien
caggtactaaagtggctgagctagg

SEQ ID NO: 4474709 - DNA, 25 bp, Homo sapien
cattacaacttgcagaacatcctat

SEQ ID NO: 4474710 - DNA, 25 bp, Homo sapien
tcttaggactctcaaaggcctttaa

SEQ ID NO: 4474711 - DNA, 25 bp, Homo sapien
ggcctttaaaccacacatcattaca

SEQ ID NO: 4474712 - DNA, 25 bp, Homo sapien
ctgcttccggccgattctctgatta

SEQ ID NO: 4474713 - DNA, 25 bp, Homo sapien
cactgcttccggccgattctctgat

SEQ ID NO: 4474714 - DNA, 25 bp, Homo sapien
gcttccggccgattctctgattaga

SEQ ID NO: 4474715 - DNA, 25 bp, Homo sapien
ttccggccgattctctgattagatt

SEQ ID NO: 4474716 - DNA, 25 bp, Homo sapien
aagaagtaggttctggccatagggc

SEQ ID NO: 4474717 - DNA, 25 bp, Homo sapien
gctttcagcctgttggttgcaaaca

SEQ ID NO: 4474718 - DNA, 25 bp, Homo sapien
ggttctggccatagggcttttggct

SEQ ID NO: 4474719 - DNA, 25 bp, Homo sapien
tcaagagttacatgacccggtaaca

SEQ ID NO: 4474720 - DNA, 25 bp, Homo sapien
tatccaaatgacctccagacttctg

SEQ ID NO: 4474721 - DNA, 25 bp, Homo sapien
ggaaatataacccagagaatcctgt

SEQ ID NO: 4474722 - DNA, 25 bp, Homo sapien
tgtctacactatgtgctatcagctc

SEQ ID NO: 4474723 - DNA, 25 bp, Homo sapien
aagccaagggcccacaaatatccaa

SEQ ID NO: 4474724 - DNA, 25 bp, Homo sapien
cctgcaggacatctataggacattt

SEQ ID NO: 4474725 - DNA, 25 bp, Homo sapien
tgcaggacatctataggacatttca

SEQ ID NO: 4474726 - DNA, 25 bp, Homo sapien
gcaggacatctataggacatttcat

SEQ ID NO: 4474727 - DNA, 25 bp, Homo sapien
gacctgcaggacatctataggacat

SEQ ID NO: 4474728 - DNA, 25 bp, Homo sapien
gaacccagacccttgtggagtggaa

SEQ ID NO: 4474729 - DNA, 25 bp, Homo sapien
tggtggagcttccaacaacctgggt

SEQ ID NO: 4474730 - DNA, 25 bp, Homo sapien
ccataatgagcagggtccttgctga

SEQ ID NO: 4474731 - DNA, 25 bp, Homo sapien
ccttctgaagttaggtctggccatg

SEQ ID NO: 4474732 - DNA, 25 bp, Homo sapien
agagatgaaccacatggtaggtgga

SEQ ID NO: 4474733 - DNA, 25 bp, Homo sapien
agataaacaagagatgaaccacatg

SEQ ID NO: 4474734 - DNA, 25 bp, Homo sapien
taagggataaactgggcagtaacag

SEQ ID NO: 4474735 - DNA, 25 bp, Homo sapien
gaattaagggataaactgggcagta

SEQ ID NO: 4474736 - DNA, 25 bp, Homo sapien
gcatatgttacatccctgctctcaa

SEQ ID NO: 4474737 - DNA, 25 bp, Homo sapien
tatgttacatccctgctctcaatgg

SEQ ID NO: 4474738 - DNA, 25 bp, Homo sapien
gttacatccctgctctcaatgggct

SEQ ID NO: 4474739 - DNA, 25 bp, Homo sapien
ggcatatgttacatccctgctctca

SEQ ID NO: 4474740 - DNA, 25 bp, Homo sapien
tgggaggaagtgagctcttcaccac

SEQ ID NO: 4474741 - DNA, 25 bp, Homo sapien
tcttcaccaccggagtcattcaggg

SEQ ID NO: 4474742 - DNA, 25 bp, Homo sapien
taaacatcgaccgtgtgcctagcac

SEQ ID NO: 4474743 - DNA, 25 bp, Homo sapien
gaaagatctaaatcatcaggtgact

SEQ ID NO: 4474744 - DNA, 25 bp, Homo sapien
gaaagtgacataagggattctaaac

SEQ ID NO: 4474745 - DNA, 25 bp, Homo sapien
gaaactctgtctttggaatcacacc

SEQ ID NO: 4474746 - DNA, 25 bp, Homo sapien
tctgttggccatacactagctgtgt

SEQ ID NO: 4474747 - DNA, 25 bp, Homo sapien
tgacctcaggcaagacgcataacct

SEQ ID NO: 4474748 - DNA, 25 bp, Homo sapien
ctagtctgacattactgctatgttg

SEQ ID NO: 4474749 - DNA, 25 bp, Homo sapien
gtgcaagtagccttgtgccttggga

SEQ ID NO: 4474750 - DNA, 25 bp, Homo sapien
attactgctatgttgtacccggatg

SEQ ID NO: 4474751 - DNA, 25 bp, Homo sapien
tctgacattactgctatgttgtacc

SEQ ID NO: 4474752 - DNA, 25 bp, Homo sapien
caaagaccagtggataaccatcaga

SEQ ID NO: 4474753 - DNA, 25 bp, Homo sapien
ctgttacaaagaccagtggataacc

SEQ ID NO: 4474754 - DNA, 25 bp, Homo sapien
ccagtggataaccatcagatgtcct

SEQ ID NO: 4474755 - DNA, 25 bp, Homo sapien
ggataaccatcagatgtcctttgta

SEQ ID NO: 4474756 - DNA, 25 bp, Homo sapien
cgtgtactgctgttcagaatagata

SEQ ID NO: 4474757 - DNA, 25 bp, Homo sapien
tgctgttcagaatagatatttcttg

SEQ ID NO: 4474758 - DNA, 25 bp, Homo sapien
tgtactgctgttcagaatagatatt

SEQ ID NO: 4474759 - DNA, 25 bp, Homo sapien
actgctgttcagaatagatatttct

SEQ ID NO: 4474760 - DNA, 25 bp, Homo sapien
ctactctctgatctacctttatttt

SEQ ID NO: 4474761 - DNA, 25 bp, Homo sapien
aagaacatctactctctgatctacc

SEQ ID NO: 4474762 - DNA, 25 bp, Homo sapien
ctgtcgaaaaaggccagaaagaaca

SEQ ID NO: 4474763 - DNA, 25 bp, Homo sapien
aaaggccagaaagaacatctactct

SEQ ID NO: 4474764 - DNA, 25 bp, Homo sapien
aaaagacagaaaacaaaagactcat

SEQ ID NO: 4474765 - DNA, 25 bp, Homo sapien
ctgcaaaaagacagaaaacaaaaga

SEQ ID NO: 4474766 - DNA, 25 bp, Homo sapien
tgcaaaaagacagaaaacaaaagac

SEQ ID NO: 4474767 - DNA, 25 bp, Homo sapien
tcgggaatctccacgacgcggtggt

SEQ ID NO: 4474768 - DNA, 25 bp, Homo sapien
tgttgattttcgtggctccctcggg

SEQ ID NO: 4474769 - DNA, 25 bp, Homo sapien
tcggagcctaagtagtcatcacagc

SEQ ID NO: 4474770 - DNA, 25 bp, Homo sapien
tgagggcatgcttaaacacgcccga

SEQ ID NO: 4474771 - DNA, 25 bp, Homo sapien
cagttctgaaggaatacatcatctg

SEQ ID NO: 4474772 - DNA, 25 bp, Homo sapien
aaggaatacatcatctggcagggac

SEQ ID NO: 4474773 - DNA, 25 bp, Homo sapien
atctggcagggacagacggttttct

SEQ ID NO: 4474774 - DNA, 25 bp, Homo sapien
ctggcagggacagacggttttctct

SEQ ID NO: 4474775 - DNA, 25 bp, Homo sapien
tgcatttgactagatggggatggaa

SEQ ID NO: 4474776 - DNA, 25 bp, Homo sapien
ttggctgcatttgactagatgggga

SEQ ID NO: 4474777 - DNA, 25 bp, Homo sapien
agtcccatctgccatcccttcctcc

SEQ ID NO: 4474778 - DNA, 25 bp, Homo sapien
gagtcccatctgccatcccttcctc

SEQ ID NO: 4474779 - DNA, 25 bp, Homo sapien
cagagcaggaatagtgggtttggta

SEQ ID NO: 4474780 - DNA, 25 bp, Homo sapien
acagagcaggaatagtgggtttggt

SEQ ID NO: 4474781 - DNA, 25 bp, Homo sapien
agcaggaatagtgggtttggtaaag

SEQ ID NO: 4474782 - DNA, 25 bp, Homo sapien
gagcaggaatagtgggtttggtaaa

SEQ ID NO: 4474783 - DNA, 25 bp, Homo sapien
tacagttttcatagccagaactcac

SEQ ID NO: 4474784 - DNA, 25 bp, Homo sapien
gagaattatggagaaacctaccaca

SEQ ID NO: 4474785 - DNA, 25 bp, Homo sapien
taaaaaatagccgtcgaagagttca

SEQ ID NO: 4474786 - DNA, 25 bp, Homo sapien
cagaaccctcattgttacctagaga

SEQ ID NO: 4474787 - DNA, 25 bp, Homo sapien
tatgtctgatttcttaactgttgca

SEQ ID NO: 4474788 - DNA, 25 bp, Homo sapien
gaactgactgaactatgccaaactt

SEQ ID NO: 4474789 - DNA, 25 bp, Homo sapien
tgactgaactatgccaaactttgat

SEQ ID NO: 4474790 - DNA, 25 bp, Homo sapien
gatttcttaactgttgcataatgac

SEQ ID NO: 4474791 - DNA, 25 bp, Homo sapien
accatcatctgtcccttcactaagg

SEQ ID NO: 4474792 - DNA, 25 bp, Homo sapien
tctgtagtggtcaccatcatctgtc

SEQ ID NO: 4474793 - DNA, 25 bp, Homo sapien
ctgtcccttcactaagggagaatgg

SEQ ID NO: 4474794 - DNA, 25 bp, Homo sapien
tgtagtggtcaccatcatctgtccc

SEQ ID NO: 4474795 - DNA, 25 bp, Homo sapien
tgcccttcagtggattaggattatc

SEQ ID NO: 4474796 - DNA, 25 bp, Homo sapien
tccttgactgcccttcagtggatta

SEQ ID NO: 4474797 - DNA, 25 bp, Homo sapien
cagtggattaggattatcttcattc

SEQ ID NO: 4474798 - DNA, 25 bp, Homo sapien
tgactgcccttcagtggattaggat

SEQ ID NO: 4474799 - DNA, 25 bp, Homo sapien
ctgagagtgttggtctataaggggc

SEQ ID NO: 4474800 - DNA, 25 bp, Homo sapien
tataaggggctctaaaacacctcca

SEQ ID NO: 4474801 - DNA, 25 bp, Homo sapien
tgttggtctataaggggctctaaaa

SEQ ID NO: 4474802 - DNA, 25 bp, Homo sapien
tctataaggggctctaaaacacctc

SEQ ID NO: 4474803 - DNA, 25 bp, Homo sapien
cctgacacagggctggaatagcttg

SEQ ID NO: 4474804 - DNA, 25 bp, Homo sapien
gactgaatgactgcaaaatcttccc

SEQ ID NO: 4474805 - DNA, 25 bp, Homo sapien
tatatgaactgccacaaactcttgg

SEQ ID NO: 4474806 - DNA, 25 bp, Homo sapien
tctccttgtatgtagtaggtgacca

SEQ ID NO: 4474807 - DNA, 25 bp, Homo sapien
actgcacagtccacggtagtccagg

SEQ ID NO: 4474808 - DNA, 25 bp, Homo sapien
tcacagcagggaaacctcggcttag

SEQ ID NO: 4474809 - DNA, 25 bp, Homo sapien
gtagtccagggacgggacctcacag

SEQ ID NO: 4474810 - DNA, 25 bp, Homo sapien
tcggcttagcgctgcttcgtgtggc

SEQ ID NO: 4474811 - DNA, 25 bp, Homo sapien
tgaggcactgggtcaaccacattct

SEQ ID NO: 4474812 - DNA, 25 bp, Homo sapien
aattccaggaggctaattttgtcaa

SEQ ID NO: 4474813 - DNA, 25 bp, Homo sapien
gaattccaggaggctaattttgtca

SEQ ID NO: 4474814 - DNA, 25 bp, Homo sapien
gagctgtccacttgctacgagcagg

SEQ ID NO: 4474815 - DNA, 25 bp, Homo sapien
cagcccatggacagaaccagccctg

SEQ ID NO: 4474816 - DNA, 25 bp, Homo sapien
tcaggctgagctgtccacttgctac

SEQ ID NO: 4474817 - DNA, 25 bp, Homo sapien
cacttgctacgagcagggaaggact

SEQ ID NO: 4474818 - DNA, 25 bp, Homo sapien
tgttaaagaagcatatggctgggca

SEQ ID NO: 4474819 - DNA, 25 bp, Homo sapien
cacccataatagtatgcaggactgt

SEQ ID NO: 4474820 - DNA, 25 bp, Homo sapien
ggactgtgactctatcaccaacgga

SEQ ID NO: 4474821 - DNA, 25 bp, Homo sapien
catgggactttacagaagttactga

SEQ ID NO: 4474822 - DNA, 25 bp, Homo sapien
tttaatgggaatatcgtagaagagg

SEQ ID NO: 4474823 - DNA, 25 bp, Homo sapien
taggttctggccacgattttattgc

SEQ ID NO: 4474824 - DNA, 25 bp, Homo sapien
ggaatatcgtagaagaggttatcat

SEQ ID NO: 4474825 - DNA, 25 bp, Homo sapien
aaaaatgcagaattgaggtaggttc

SEQ ID NO: 4474826 - DNA, 25 bp, Homo sapien
ggctgggtcttgaattcttaagctc

SEQ ID NO: 4474827 - DNA, 25 bp, Homo sapien
ggccctattcattctttagatgtca

SEQ ID NO: 4474828 - DNA, 25 bp, Homo sapien
cctggccctattcattctttagatg

SEQ ID NO: 4474829 - DNA, 25 bp, Homo sapien
aggctgggtcttgaattcttaagct

SEQ ID NO: 4474830 - DNA, 25 bp, Homo sapien
tccgccctcgtattttcctggtcga

SEQ ID NO: 4474831 - DNA, 25 bp, Homo sapien
gagcgtccagaacgacttctcaggg

SEQ ID NO: 4474832 - DNA, 25 bp, Homo sapien
cctggtcgatcaattgcccagttcc

SEQ ID NO: 4474833 - DNA, 25 bp, Homo sapien
cccattgatgatggagcgtccagaa

SEQ ID NO: 4474834 - DNA, 25 bp, Homo sapien
agatctcgttggtgggaccttccgc

SEQ ID NO: 4474835 - DNA, 25 bp, Homo sapien
gcagtgctcgaaatctcatttggac

SEQ ID NO: 4474836 - DNA, 25 bp, Homo sapien
aaaaaggactctccggcagtgctcg

SEQ ID NO: 4474837 - DNA, 25 bp, Homo sapien
tcatttggacgcttgtaggtgaaca

SEQ ID NO: 4474838 - DNA, 25 bp, Homo sapien
taatttcgagtctactaggcccaag

SEQ ID NO: 4474839 - DNA, 25 bp, Homo sapien
cagaaacgtggtgggcactgaatcc

SEQ ID NO: 4474840 - DNA, 25 bp, Homo sapien
gtagaagcgacccaactcttgctgg

SEQ ID NO: 4474841 - DNA, 25 bp, Homo sapien
taaatatgagccgtgcaaggagaca

SEQ ID NO: 4474842 - DNA, 25 bp, Homo sapien
tcagtgttaccgcacttggcacgta

SEQ ID NO: 4474843 - DNA, 25 bp, Homo sapien
aatggcatttgcagaactactgaga

SEQ ID NO: 4474844 - DNA, 25 bp, Homo sapien
taccgcacttggcacgtatgcacac

SEQ ID NO: 4474845 - DNA, 25 bp, Homo sapien
tgacacaaaaatcagtgttaccgca

SEQ ID NO: 4474846 - DNA, 25 bp, Homo sapien
tactcgtagtgcacgcctgggtttg

SEQ ID NO: 4474847 - DNA, 25 bp, Homo sapien
ggtccccatgatcacgtactcgtag

SEQ ID NO: 4474848 - DNA, 25 bp, Homo sapien
ggctgatggcgttggtccccatgat

SEQ ID NO: 4474849 - DNA, 25 bp, Homo sapien
tgatcacgtactcgtagtgcacgcc

SEQ ID NO: 4474850 - DNA, 25 bp, Homo sapien
ggttatcccgtccaaagttcagaga

SEQ ID NO: 4474851 - DNA, 25 bp, Homo sapien
gagatttgaaagtgccaccctgctg

SEQ ID NO: 4474852 - DNA, 25 bp, Homo sapien
ggtgaagcctgctccaatgtcaagg

SEQ ID NO: 4474853 - DNA, 25 bp, Homo sapien
tacaaggaaatgaccagagtccccg

SEQ ID NO: 4474854 - DNA, 25 bp, Homo sapien
cataaaaattctctgttgtgctgag

SEQ ID NO: 4474855 - DNA, 25 bp, Homo sapien
ttggagtttggacaacacacccacc

SEQ ID NO: 4474856 - DNA, 25 bp, Homo sapien
tgacttggagtttggacaacacacc

SEQ ID NO: 4474857 - DNA, 25 bp, Homo sapien
acttggagtttggacaacacaccca

SEQ ID NO: 4474858 - DNA, 25 bp, Homo sapien
tctgggctctatgctaggatggaca

SEQ ID NO: 4474859 - DNA, 25 bp, Homo sapien
taactgatgaccctacacggacatg

SEQ ID NO: 4474860 - DNA, 25 bp, Homo sapien
cagtgacatgcatccgccagtgtaa

SEQ ID NO: 4474861 - DNA, 25 bp, Homo sapien
tcatagtccatacgagggttcacac

SEQ ID NO: 4474862 - DNA, 25 bp, Homo sapien
agccctaacctgaaggccccatgag

SEQ ID NO: 4474863 - DNA, 25 bp, Homo sapien
tcccggtggcacctcagcggaatta

SEQ ID NO: 4474864 - DNA, 25 bp, Homo sapien
ggtctagccaatgttttggcttgtc

SEQ ID NO: 4474865 - DNA, 25 bp, Homo sapien
gaattagtgtggacagaccaccagg

SEQ ID NO: 4474866 - DNA, 25 bp, Homo sapien
aaggtctgtgccgattctgaggtga

SEQ ID NO: 4474867 - DNA, 25 bp, Homo sapien
gccttctgtcaccatctggccattg

SEQ ID NO: 4474868 - DNA, 25 bp, Homo sapien
ggtggcaccaagttgtccggtcgat

SEQ ID NO: 4474869 - DNA, 25 bp, Homo sapien
gaacattctgttgtcccaagctgct

SEQ ID NO: 4474870 - DNA, 25 bp, Homo sapien
cctgcatgtctggtgccatcaccgc

SEQ ID NO: 4474871 - DNA, 25 bp, Homo sapien
ctgcaacaacaggagaatgtctgaa

SEQ ID NO: 4474872 - DNA, 25 bp, Homo sapien
gcaacaacaggagaatgtctgaagg

SEQ ID NO: 4474873 - DNA, 25 bp, Homo sapien
tggaaagctgggctatgggtggaga

SEQ ID NO: 4474874 - DNA, 25 bp, Homo sapien
gctgggctatgggtggagatgcaca

SEQ ID NO: 4474875 - DNA, 25 bp, Homo sapien
cctcttcatgagtgcttctgtgcac

SEQ ID NO: 4474876 - DNA, 25 bp, Homo sapien
tcctcctcgggggtcggcttcatgc

SEQ ID NO: 4474877 - DNA, 25 bp, Homo sapien
tgcacacagcggaaaatagggtact

SEQ ID NO: 4474878 - DNA, 25 bp, Homo sapien
catgctggagtcacagtaactctca

SEQ ID NO: 4474879 - DNA, 25 bp, Homo sapien
gcactcagaccactccccgatgtcc

SEQ ID NO: 4474880 - DNA, 25 bp, Homo sapien
ctcagaccactccccgatgtcccag

SEQ ID NO: 4474881 - DNA, 25 bp, Homo sapien
ctgcactcagaccactccccgatgt

SEQ ID NO: 4474882 - DNA, 25 bp, Homo sapien
actcagaccactccccgatgtccca

SEQ ID NO: 4474883 - DNA, 25 bp, Homo sapien
ttggcgtacacctggcggcacagaa

SEQ ID NO: 4474884 - DNA, 25 bp, Homo sapien
agtcggtccggatctgccactcgct

SEQ ID NO: 4474885 - DNA, 25 bp, Homo sapien
tagggctgcaccgtcaggctgcggt

SEQ ID NO: 4474886 - DNA, 25 bp, Homo sapien
actcgctgcagatcttgagttggca

SEQ ID NO: 4474887 - DNA, 25 bp, Homo sapien
tggtttgcaaaaacagccgtccaga

SEQ ID NO: 4474888 - DNA, 25 bp, Homo sapien
tattgaactattggtacatcctgtg

SEQ ID NO: 4474889 - DNA, 25 bp, Homo sapien
ggttacccatctcaggtcttggtgg

SEQ ID NO: 4474890 - DNA, 25 bp, Homo sapien
ctgtggaactcagggttacccatct

SEQ ID NO: 4474891 - DNA, 25 bp, Homo sapien
ggtcctctgtcccacgccgcagggc

SEQ ID NO: 4474892 - DNA, 25 bp, Homo sapien
tcacatcacgggtcctctgtcccac

SEQ ID NO: 4474893 - DNA, 25 bp, Homo sapien
atcacgggtcctctgtcccacgccg

SEQ ID NO: 4474894 - DNA, 25 bp, Homo sapien
acgggtcctctgtcccacgccgcag

SEQ ID NO: 4474895 - DNA, 25 bp, Homo sapien
attcctcatcgtcaaccacatcccc

SEQ ID NO: 4474896 - DNA, 25 bp, Homo sapien
tgcattcctcatcgtcaaccacatc

SEQ ID NO: 4474897 - DNA, 25 bp, Homo sapien
cggagcttcatgttgcattcctcat

SEQ ID NO: 4474898 - DNA, 25 bp, Homo sapien
ctcaatgtcattcggccggagcttc

SEQ ID NO: 4474899 - DNA, 25 bp, Homo sapien
ggtgaggaaccagctcttggcacag

SEQ ID NO: 4474900 - DNA, 25 bp, Homo sapien
ctccactcggtgaggaaccagctct

SEQ ID NO: 4474901 - DNA, 25 bp, Homo sapien
ctcggtgaggaaccagctcttggca

SEQ ID NO: 4474902 - DNA, 25 bp, Homo sapien
cctttcgctccactcggtgaggaac

SEQ ID NO: 4474903 - DNA, 25 bp, Homo sapien
tctgagctagtgactcatctttgtg

SEQ ID NO: 4474904 - DNA, 25 bp, Homo sapien
tgggattctgagctagtgactcatc

SEQ ID NO: 4474905 - DNA, 25 bp, Homo sapien
taaggatagaaagcctacgataatt

SEQ ID NO: 4474906 - DNA, 25 bp, Homo sapien
cctacgataattcctctctgggcct

SEQ ID NO: 4474907 - DNA, 25 bp, Homo sapien
caaactgcgtgaaagggtccttctt

SEQ ID NO: 4474908 - DNA, 25 bp, Homo sapien
gtctgagatactatggttgttgttc

SEQ ID NO: 4474909 - DNA, 25 bp, Homo sapien
gggcatgtctgctgatatccccaaa

SEQ ID NO: 4474910 - DNA, 25 bp, Homo sapien
tggagtcagccaatgtggccgtatg

SEQ ID NO: 4474911 - DNA, 25 bp, Homo sapien
gatggccaaattagtgtctgctcct

SEQ ID NO: 4474912 - DNA, 25 bp, Homo sapien
tcttggaagctcagtatttgcacca

SEQ ID NO: 4474913 - DNA, 25 bp, Homo sapien
ctcccagatggccaaattagtgtct

SEQ ID NO: 4474914 - DNA, 25 bp, Homo sapien
gaagctcagtatttgcaccaagggc

SEQ ID NO: 4474915 - DNA, 25 bp, Homo sapien
tttctaagaccaactggtggcccaa

SEQ ID NO: 4474916 - DNA, 25 bp, Homo sapien
tctaagaccaactggtggcccaaag

SEQ ID NO: 4474917 - DNA, 25 bp, Homo sapien
ttttctaagaccaactggtggccca

SEQ ID NO: 4474918 - DNA, 25 bp, Homo sapien
taagaccaactggtggcccaaaggc

SEQ ID NO: 4474919 - DNA, 25 bp, Homo sapien
cagtttactttcttaccctggactg

SEQ ID NO: 4474920 - DNA, 25 bp, Homo sapien
caccgagcgtgtccgcactccggcc

SEQ ID NO: 4474921 - DNA, 25 bp, Homo sapien
cgagcgtgtccgcactccggcccca

SEQ ID NO: 4474922 - DNA, 25 bp, Homo sapien
accgagcgtgtccgcactccggccc

SEQ ID NO: 4474923 - DNA, 25 bp, Homo sapien
ccgagcgtgtccgcactccggcccc

SEQ ID NO: 4474924 - DNA, 25 bp, Homo sapien
caccttgcccgtgcagggtccgttg

SEQ ID NO: 4474925 - DNA, 25 bp, Homo sapien
ctctgccggccggttgttcccacag

SEQ ID NO: 4474926 - DNA, 25 bp, Homo sapien
cccgtgcagggtccgttgtcacatg

SEQ ID NO: 4474927 - DNA, 25 bp, Homo sapien
gctcccggcaaaccactccaccttg

SEQ ID NO: 4474928 - DNA, 25 bp, Homo sapien
tttctttggggataatgtcaaattc

SEQ ID NO: 4474929 - DNA, 25 bp, Homo sapien
ctggaggatgctagtcactaagatc

SEQ ID NO: 4474930 - DNA, 25 bp, Homo sapien
gaggatgctagtcactaagatcttg

SEQ ID NO: 4474931 - DNA, 25 bp, Homo sapien
gatgctagtcactaagatcttgttg

SEQ ID NO: 4474932 - DNA, 25 bp, Homo sapien
gctagtcactaagatcttgttgtct

SEQ ID NO: 4474933 - DNA, 25 bp, Homo sapien
tgctccattcggtgctaaaccattt

SEQ ID NO: 4474934 - DNA, 25 bp, Homo sapien
gggtccaacacttcaaaggtgtctg

SEQ ID NO: 4474935 - DNA, 25 bp, Homo sapien
aaagaacattcagaggggtccaaca

SEQ ID NO: 4474936 - DNA, 25 bp, Homo sapien
catttggctccgcaaggcttgaggt

SEQ ID NO: 4474937 - DNA, 25 bp, Homo sapien
aacttggcctggtgagcatggctct

SEQ ID NO: 4474938 - DNA, 25 bp, Homo sapien
caacttggcctggtgagcatggctc

SEQ ID NO: 4474939 - DNA, 25 bp, Homo sapien
tcaacttggcctggtgagcatggct

SEQ ID NO: 4474940 - DNA, 25 bp, Homo sapien
cttggcctggtgagcatggctcttt

SEQ ID NO: 4474941 - DNA, 25 bp, Homo sapien
tacagttgtgtatctcctaccgcaa

SEQ ID NO: 4474942 - DNA, 25 bp, Homo sapien
gatggactcatacaacacgtagttt

SEQ ID NO: 4474943 - DNA, 25 bp, Homo sapien
tctacggtcagattgcacagatgtg

SEQ ID NO: 4474944 - DNA, 25 bp, Homo sapien
tggtttgtccgttcacctgctgacg

SEQ ID NO: 4474945 - DNA, 25 bp, Homo sapien
gttggttccctaacatcctatgatg

SEQ ID NO: 4474946 - DNA, 25 bp, Homo sapien
tcccgagattggtcactgattctag

SEQ ID NO: 4474947 - DNA, 25 bp, Homo sapien
tacccagtggtatgtcgtttaagaa

SEQ ID NO: 4474948 - DNA, 25 bp, Homo sapien
taacttacatatatgctgccccaga

SEQ ID NO: 4474949 - DNA, 25 bp, Homo sapien
cacagctggcctgggaaagtccatt

SEQ ID NO: 4474950 - DNA, 25 bp, Homo sapien
tttattcatacacatgctggaatta

SEQ ID NO: 4474951 - DNA, 25 bp, Homo sapien
aaggacatatcatatttattcatac

SEQ ID NO: 4474952 - DNA, 25 bp, Homo sapien
ggaattattggtgcagacatttaaa

SEQ ID NO: 4474953 - DNA, 25 bp, Homo sapien
ggacacagtcctgagggttacaaga

SEQ ID NO: 4474954 - DNA, 25 bp, Homo sapien
gtcatgtcatcagacagacaccgca

SEQ ID NO: 4474955 - DNA, 25 bp, Homo sapien
tcctgagggttacaagattctctct

SEQ ID NO: 4474956 - DNA, 25 bp, Homo sapien
gagggtcacagaggttacttagagt

SEQ ID NO: 4474957 - DNA, 25 bp, Homo sapien
gtagctactgggaatggtcatcccc

SEQ ID NO: 4474958 - DNA, 25 bp, Homo sapien
aatatatggcacatacggctcccct

SEQ ID NO: 4474959 - DNA, 25 bp, Homo sapien
ttttaaagggatcttcagtgtggtc

SEQ ID NO: 4474960 - DNA, 25 bp, Homo sapien
cagtgtggtctcaatacaatggaag

SEQ ID NO: 4474961 - DNA, 25 bp, Homo sapien
tgctctccaaagtcggtataactgt

SEQ ID NO: 4474962 - DNA, 25 bp, Homo sapien
gctagatacagtcagtttgctctcc

SEQ ID NO: 4474963 - DNA, 25 bp, Homo sapien
tttatgttcctgtcagtgaaacaga

SEQ ID NO: 4474964 - DNA, 25 bp, Homo sapien
gtatatccaactttgctagatacag

SEQ ID NO: 4474965 - DNA, 25 bp, Homo sapien
ggaggcacagcaggcggtcttgtag

SEQ ID NO: 4474966 - DNA, 25 bp, Homo sapien
ggaccaccacgttgcagttgtagta

SEQ ID NO: 4474967 - DNA, 25 bp, Homo sapien
acagcaggcggtcttgtagtagttg

SEQ ID NO: 4474968 - DNA, 25 bp, Homo sapien
gttgtagtacttgtccttgcagttt

SEQ ID NO: 4474969 - DNA, 25 bp, Homo sapien
ggaagcccgtctgcctgttggccac

SEQ ID NO: 4474970 - DNA, 25 bp, Homo sapien
gatgcacgcgtgtcagcaaggctta

SEQ ID NO: 4474971 - DNA, 25 bp, Homo sapien
gtttagaaagaccagtagcaccagg

SEQ ID NO: 4474972 - DNA, 25 bp, Homo sapien
tgactaagttggttggcagcgcctg

SEQ ID NO: 4474973 - DNA, 25 bp, Homo sapien
tgatgcttaaaggactgactgtggc

SEQ ID NO: 4474974 - DNA, 25 bp, Homo sapien
tttcagagggtccacctttcaatat

SEQ ID NO: 4474975 - DNA, 25 bp, Homo sapien
tccacagctccttgtcgcaggccaa

SEQ ID NO: 4474976 - DNA, 25 bp, Homo sapien
caactgcattaatgcagagcttggt

SEQ ID NO: 4474977 - DNA, 25 bp, Homo sapien
tgttttcagagggtccacctttcaa

SEQ ID NO: 4474978 - DNA, 25 bp, Homo sapien
gagagaaccgcaagtcatcgtgagg

SEQ ID NO: 4474979 - DNA, 25 bp, Homo sapien
gaacaactctcctcgtgacaagcag

SEQ ID NO: 4474980 - DNA, 25 bp, Homo sapien
caattgcacagttggcaggctggcc

SEQ ID NO: 4474981 - DNA, 25 bp, Homo sapien
taggtaaccttcagcagccataggg

SEQ ID NO: 4474982 - DNA, 25 bp, Homo sapien
tacctttacggaactgaactgactc

SEQ ID NO: 4474983 - DNA, 25 bp, Homo sapien
cagcgggcactgagcatacctttac

SEQ ID NO: 4474984 - DNA, 25 bp, Homo sapien
taaggtaaagggacaggtaggcaca

SEQ ID NO: 4474985 - DNA, 25 bp, Homo sapien
gatttctctgccacataacttgatg

SEQ ID NO: 4474986 - DNA, 25 bp, Homo sapien
tttttggatccagcacgtgtcaccc

SEQ ID NO: 4474987 - DNA, 25 bp, Homo sapien
catacattttgtgaggaagccatcg

SEQ ID NO: 4474988 - DNA, 25 bp, Homo sapien
tcagggtttcagtcccacagtgggc

SEQ ID NO: 4474989 - DNA, 25 bp, Homo sapien
atcgtacagcgacattccaggaggc

SEQ ID NO: 4474990 - DNA, 25 bp, Homo sapien
taacaacggggacaaagcaaagaga

SEQ ID NO: 4474991 - DNA, 25 bp, Homo sapien
gagcaactgacgctgccagtctaac

SEQ ID NO: 4474992 - DNA, 25 bp, Homo sapien
aaagggataacagacaccctcccat

SEQ ID NO: 4474993 - DNA, 25 bp, Homo sapien
ctgacgctgccagtctaacaacggg

SEQ ID NO: 4474994 - DNA, 25 bp, Homo sapien
ccccagcagggacagtggaagtgtc

SEQ ID NO: 4474995 - DNA, 25 bp, Homo sapien
gccttctacctttcacctgcttatg

SEQ ID NO: 4474996 - DNA, 25 bp, Homo sapien
acatggaggtgacggagtatttagt

SEQ ID NO: 4474997 - DNA, 25 bp, Homo sapien
tactcacataattcgccttctacct

SEQ ID NO: 4474998 - DNA, 25 bp, Homo sapien
acagaacgcgaataaggccagagaa

SEQ ID NO: 4474999 - DNA, 25 bp, Homo sapien
cagaacgcgaataaggccagagaaa

SEQ ID NO: 4475000 - DNA, 25 bp, Homo sapien
ttttagagggcgctatttgcaggag

SEQ ID NO: 4475001 - DNA, 25 bp, Homo sapien
ctgactcttctttttagagggcgct

SEQ ID NO: 4475002 - DNA, 25 bp, Homo sapien
tttagagggcgctatttgcaggaga

SEQ ID NO: 4475003 - DNA, 25 bp, Homo sapien
cttctttttagagggcgctatttgc

SEQ ID NO: 4475004 - DNA, 25 bp, Homo sapien
tcggcatcaagttccagcacactgg

SEQ ID NO: 4475005 - DNA, 25 bp, Homo sapien
gaagccgccacttctgctgtcaggg

SEQ ID NO: 4475006 - DNA, 25 bp, Homo sapien
ttcctgggcctagaagagatttttg

SEQ ID NO: 4475007 - DNA, 25 bp, Homo sapien
tagaagtagaggtggctcctgaagc

SEQ ID NO: 4475008 - DNA, 25 bp, Homo sapien
attcttctgtgccactctactgcat

SEQ ID NO: 4475009 - DNA, 25 bp, Homo sapien
tgcaattaaagcaatactacttaac

SEQ ID NO: 4475010 - DNA, 25 bp, Homo sapien
tgcattcttcccacattagctcagc

SEQ ID NO: 4475011 - DNA, 25 bp, Homo sapien
ttcccacattagctcagcttgttgc

SEQ ID NO: 4475012 - DNA, 25 bp, Homo sapien
cataaatgaactgaacattcctgaa

SEQ ID NO: 4475013 - DNA, 25 bp, Homo sapien
ataaatgaactgaacattcctgaat

SEQ ID NO: 4475014 - DNA, 25 bp, Homo sapien
ggctcatgtgcgtcagagctcctga

SEQ ID NO: 4475015 - DNA, 25 bp, Homo sapien
accccattgtgtcctgatacactgg

SEQ ID NO: 4475016 - DNA, 25 bp, Homo sapien
gagctcctgacatatcgcaaacacc

SEQ ID NO: 4475017 - DNA, 25 bp, Homo sapien
cctgggagtatcaccccattgtgtc

SEQ ID NO: 4475018 - DNA, 25 bp, Homo sapien
ggaagctatttgaaaaccagtatag

SEQ ID NO: 4475019 - DNA, 25 bp, Homo sapien
gcaggaagctatttgaaaaccagta

SEQ ID NO: 4475020 - DNA, 25 bp, Homo sapien
tatttgaaaaccagtatagaactat

SEQ ID NO: 4475021 - DNA, 25 bp, Homo sapien
tggggcaggaagctatttgaaaacc

SEQ ID NO: 4475022 - DNA, 25 bp, Homo sapien
tgtaaaccctttagttgctgggcca

SEQ ID NO: 4475023 - DNA, 25 bp, Homo sapien
agtgcagaggccgcccgtccacctg

SEQ ID NO: 4475024 - DNA, 25 bp, Homo sapien
gctgctctggcctgagcctccgctg

SEQ ID NO: 4475025 - DNA, 25 bp, Homo sapien
ctgcaccaggtgtaaaccctttagt

SEQ ID NO: 4475026 - DNA, 25 bp, Homo sapien
tgtattacagctctaacctggataa

SEQ ID NO: 4475027 - DNA, 25 bp, Homo sapien
aatttgaaatcaatattacctatac

SEQ ID NO: 4475028 - DNA, 25 bp, Homo sapien
tctaacctggataaaatacagttct

SEQ ID NO: 4475029 - DNA, 25 bp, Homo sapien
tattacctatactaataatgatagg

SEQ ID NO: 4475030 - DNA, 25 bp, Homo sapien
agagctgtcaccagaggccaccgca

SEQ ID NO: 4475031 - DNA, 25 bp, Homo sapien
ttgactcccaagcaccatgcgaggt

SEQ ID NO: 4475032 - DNA, 25 bp, Homo sapien
tcctctgtacccgagatgactgaca

SEQ ID NO: 4475033 - DNA, 25 bp, Homo sapien
gaaagacctccaggttagcttggct

SEQ ID NO: 4475034 - DNA, 25 bp, Homo sapien
gggattataggcgcccgccactatg

SEQ ID NO: 4475035 - DNA, 25 bp, Homo sapien
gattataggcgcccgccactatgcc

SEQ ID NO: 4475036 - DNA, 25 bp, Homo sapien
ggctggaagtgcagtggggtgatct

SEQ ID NO: 4475037 - DNA, 25 bp, Homo sapien
ttataggcgcccgccactatgcccg

SEQ ID NO: 4475038 - DNA, 25 bp, Homo sapien
cgggtgcagatcttgtccttacatt

SEQ ID NO: 4475039 - DNA, 25 bp, Homo sapien
tgttttgactcctcaggccgcctgt

SEQ ID NO: 4475040 - DNA, 25 bp, Homo sapien
ccgagagagagcttctccgggtgca

SEQ ID NO: 4475041 - DNA, 25 bp, Homo sapien
ggccgcctgtgctctccgagagaga

SEQ ID NO: 4475042 - DNA, 25 bp, Homo sapien
catcaccggccagccatgtgtccct

SEQ ID NO: 4475043 - DNA, 25 bp, Homo sapien
cggccagccatgtgtccctgagaaa

SEQ ID NO: 4475044 - DNA, 25 bp, Homo sapien
accggccagccatgtgtccctgaga

SEQ ID NO: 4475045 - DNA, 25 bp, Homo sapien
ccggccagccatgtgtccctgagaa

SEQ ID NO: 4475046 - DNA, 25 bp, Homo sapien
gacacagccaccttgagcctggcca

SEQ ID NO: 4475047 - DNA, 25 bp, Homo sapien
cccgtagggtctgaggctggcctgg

SEQ ID NO: 4475048 - DNA, 25 bp, Homo sapien
ccgtcccccgtagggtctgaggctg

SEQ ID NO: 4475049 - DNA, 25 bp, Homo sapien
ggacacagccaccttgagcctggcc

SEQ ID NO: 4475050 - DNA, 25 bp, Homo sapien
ggctctggcttgaggagatttctcc

SEQ ID NO: 4475051 - DNA, 25 bp, Homo sapien
gagctgccccaaggtcccgaagccc

SEQ ID NO: 4475052 - DNA, 25 bp, Homo sapien
ctggcttgaggagatttctcccggg

SEQ ID NO: 4475053 - DNA, 25 bp, Homo sapien
ctctggcttgaggagatttctcccg

SEQ ID NO: 4475054 - DNA, 25 bp, Homo sapien
cagccactgtggagctcatcagagc

SEQ ID NO: 4475055 - DNA, 25 bp, Homo sapien
gccactgtggagctcatcagagctg

SEQ ID NO: 4475056 - DNA, 25 bp, Homo sapien
tcatcagagctgttggtctggtctc

SEQ ID NO: 4475057 - DNA, 25 bp, Homo sapien
cactgtggagctcatcagagctgtt

SEQ ID NO: 4475058 - DNA, 25 bp, Homo sapien
gtctgagttgttctggctccttcca

SEQ ID NO: 4475059 - DNA, 25 bp, Homo sapien
tacccacaggctaccccacccttgc

SEQ ID NO: 4475060 - DNA, 25 bp, Homo sapien
ttctaggattctgggtttacccaca

SEQ ID NO: 4475061 - DNA, 25 bp, Homo sapien
ttccatggtccctgcgaacctctgg

SEQ ID NO: 4475062 - DNA, 25 bp, Homo sapien
gccctaagggcgcttctctgttctt

SEQ ID NO: 4475063 - DNA, 25 bp, Homo sapien
tctttccttccccatcggctaggct

SEQ ID NO: 4475064 - DNA, 25 bp, Homo sapien
ttccccatcggctaggctgtcctgt

SEQ ID NO: 4475065 - DNA, 25 bp, Homo sapien
ctgttaagccctaagggcgcttctc

SEQ ID NO: 4475066 - DNA, 25 bp, Homo sapien
tccactttcccagctcccatccctt

SEQ ID NO: 4475067 - DNA, 25 bp, Homo sapien
tttcccagctcccatcccttctctg

SEQ ID NO: 4475068 - DNA, 25 bp, Homo sapien
agctcccatcccttctctgtgggtg

SEQ ID NO: 4475069 - DNA, 25 bp, Homo sapien
ccttctctgtgggtggcttcaggct

SEQ ID NO: 4475070 - DNA, 25 bp, Homo sapien
ccgcatttgaacgaacccacgcgtg

SEQ ID NO: 4475071 - DNA, 25 bp, Homo sapien
tcaggccccgctcacccgcatttga

SEQ ID NO: 4475072 - DNA, 25 bp, Homo sapien
tgaacgaacccacgcgtgactcttc

SEQ ID NO: 4475073 - DNA, 25 bp, Homo sapien
ccacgcgtgactcttccatctggag

SEQ ID NO: 4475074 - DNA, 25 bp, Homo sapien
tgtctccgcacacgcggcactggag

SEQ ID NO: 4475075 - DNA, 25 bp, Homo sapien
gccgctgcagccgttgcaggcatag

SEQ ID NO: 4475076 - DNA, 25 bp, Homo sapien
tgtagatgagcctccgccgtacgct

SEQ ID NO: 4475077 - DNA, 25 bp, Homo sapien
atgccatagtgcttcccgctgctgc

SEQ ID NO: 4475078 - DNA, 25 bp, Homo sapien
atgggcttggacatttttgcccaag

SEQ ID NO: 4475079 - DNA, 25 bp, Homo sapien
agacgcccagcagggcccaccgcac

SEQ ID NO: 4475080 - DNA, 25 bp, Homo sapien
cccctcaggggcagacgcccagcag

SEQ ID NO: 4475081 - DNA, 25 bp, Homo sapien
gggcagacgcccagcagggcccacc

SEQ ID NO: 4475082 - DNA, 25 bp, Homo sapien
ctggttcatccccgcctgcaggcac

SEQ ID NO: 4475083 - DNA, 25 bp, Homo sapien
caggcctggcactggttgcggtggg

SEQ ID NO: 4475084 - DNA, 25 bp, Homo sapien
gtcctggttcatccccgcctgcagg

SEQ ID NO: 4475085 - DNA, 25 bp, Homo sapien
tgcaggcacttcttcagccggcagg

SEQ ID NO: 4475086 - DNA, 25 bp, Homo sapien
gaagggtcaggacgacacgccagtc

SEQ ID NO: 4475087 - DNA, 25 bp, Homo sapien
caggaagggtcaggacgacacgcca

SEQ ID NO: 4475088 - DNA, 25 bp, Homo sapien
gggtcaggacgacacgccagtcccg

SEQ ID NO: 4475089 - DNA, 25 bp, Homo sapien
gcaggaagggtcaggacgacacgcc

SEQ ID NO: 4475090 - DNA, 25 bp, Homo sapien
tccggccgggactcagtgttggact

SEQ ID NO: 4475091 - DNA, 25 bp, Homo sapien
ctccagcttagcacaggtttcagct

SEQ ID NO: 4475092 - DNA, 25 bp, Homo sapien
tgtgcttcgcggctggcgctcgttc

SEQ ID NO: 4475093 - DNA, 25 bp, Homo sapien
ggtggacctgggctgtgcttcgcgg

SEQ ID NO: 4475094 - DNA, 25 bp, Homo sapien
aggttcttggcccacttgacggcca

SEQ ID NO: 4475095 - DNA, 25 bp, Homo sapien
gctggtgacatcaatattctcatca

SEQ ID NO: 4475096 - DNA, 25 bp, Homo sapien
aagagtaggcgagccgaggtctcat

SEQ ID NO: 4475097 - DNA, 25 bp, Homo sapien
ttggcccacttgacggccatgaaga

SEQ ID NO: 4475098 - DNA, 25 bp, Homo sapien
aagagttcactccacgcctcttcca

SEQ ID NO: 4475099 - DNA, 25 bp, Homo sapien
agagttcactccacgcctcttccag

SEQ ID NO: 4475100 - DNA, 25 bp, Homo sapien
ctggatggccccgaggagaaagagt

SEQ ID NO: 4475101 - DNA, 25 bp, Homo sapien
ggatggccccgaggagaaagagttc

SEQ ID NO: 4475102 - DNA, 25 bp, Homo sapien
tagtttcctgcaggacacgcgtctc

SEQ ID NO: 4475103 - DNA, 25 bp, Homo sapien
aggacacgcgtctccatgctggcca

SEQ ID NO: 4475104 - DNA, 25 bp, Homo sapien
cgccaatgcccggaaccgagagata

SEQ ID NO: 4475105 - DNA, 25 bp, Homo sapien
gaaccgagagatagtttcctgcagg

SEQ ID NO: 4475106 - DNA, 25 bp, Homo sapien
aggccttcatgcaggcaaactccgt

SEQ ID NO: 4475107 - DNA, 25 bp, Homo sapien
gaagaggaccaaggccttcatgcag

SEQ ID NO: 4475108 - DNA, 25 bp, Homo sapien
ttgaagaggaccaaggccttcatgc

SEQ ID NO: 4475109 - DNA, 25 bp, Homo sapien
ccttcatgcaggcaaactccgtggg

SEQ ID NO: 4475110 - DNA, 25 bp, Homo sapien
aggatagaggcctacacacatctgc

SEQ ID NO: 4475111 - DNA, 25 bp, Homo sapien
gatagaggcctacacacatctgcac

SEQ ID NO: 4475112 - DNA, 25 bp, Homo sapien
agaattcccactcaaggtttgggca

SEQ ID NO: 4475113 - DNA, 25 bp, Homo sapien
gaggcagatggaagtcaccagaatt

SEQ ID NO: 4475114 - DNA, 25 bp, Homo sapien
ctcccagcctgccctgtcccctcac

SEQ ID NO: 4475115 - DNA, 25 bp, Homo sapien
tcccagcctgccctgtcccctcaca

SEQ ID NO: 4475116 - DNA, 25 bp, Homo sapien
caggtttacggctgttataaggctg

SEQ ID NO: 4475117 - DNA, 25 bp, Homo sapien
tggtgggccttgctgtgctggctca

SEQ ID NO: 4475118 - DNA, 25 bp, Homo sapien
ctctacgtgctcaggatccttcagg

SEQ ID NO: 4475119 - DNA, 25 bp, Homo sapien
tcctgcaaggcctctacgtgctcag

SEQ ID NO: 4475120 - DNA, 25 bp, Homo sapien
gcatcacttgggactggtcctgcaa

SEQ ID NO: 4475121 - DNA, 25 bp, Homo sapien
ggtcactgccggttgtctctagaag

SEQ ID NO: 4475122 - DNA, 25 bp, Homo sapien
tgctcggaaacctgcagtagctgcc

SEQ ID NO: 4475123 - DNA, 25 bp, Homo sapien
gccgggagccccaaagattgcagat

SEQ ID NO: 4475124 - DNA, 25 bp, Homo sapien
caaagtcctgaacgggctggtccta

SEQ ID NO: 4475125 - DNA, 25 bp, Homo sapien
tgctcaattcccttgtagtaggcaa

SEQ ID NO: 4475126 - DNA, 25 bp, Homo sapien
tcatgctcaattcccttgtagtagg

SEQ ID NO: 4475127 - DNA, 25 bp, Homo sapien
ttcccttgtagtaggcaatgaaccg

SEQ ID NO: 4475128 - DNA, 25 bp, Homo sapien
tatcttcatgctcaattcccttgta

SEQ ID NO: 4475129 - DNA, 25 bp, Homo sapien
tattgcctcacctagtgggtctgaa

SEQ ID NO: 4475130 - DNA, 25 bp, Homo sapien
tatgctggattagagaaccccaaac

SEQ ID NO: 4475131 - DNA, 25 bp, Homo sapien
agctaagggtaggaattacttcgtg

SEQ ID NO: 4475132 - DNA, 25 bp, Homo sapien
ggaacttcgctttggtgtctgtgtg

SEQ ID NO: 4475133 - DNA, 25 bp, Homo sapien
tgagcaagtcgtatacccctcccat

SEQ ID NO: 4475134 - DNA, 25 bp, Homo sapien
gagcagcactgagcaagtcgtatac

SEQ ID NO: 4475135 - DNA, 25 bp, Homo sapien
ttccccaccactcagtgatctgctg

SEQ ID NO: 4475136 - DNA, 25 bp, Homo sapien
tctcttgctagtgccaagtgagcag

SEQ ID NO: 4475137 - DNA, 25 bp, Homo sapien
gaaaagccgcattaaccagaggagt

SEQ ID NO: 4475138 - DNA, 25 bp, Homo sapien
caggagtccgcaacacaaaagacgg

SEQ ID NO: 4475139 - DNA, 25 bp, Homo sapien
tcaaggaggctactccacattgggc

SEQ ID NO: 4475140 - DNA, 25 bp, Homo sapien
cttccctgggtaggtctgatggcca

SEQ ID NO: 4475141 - DNA, 25 bp, Homo sapien
ggagtattccctatggtcttgcgga

SEQ ID NO: 4475142 - DNA, 25 bp, Homo sapien
taaacctcaaagacgggaggagcag

SEQ ID NO: 4475143 - DNA, 25 bp, Homo sapien
tgcgttccgcagtgataaacctcaa

SEQ ID NO: 4475144 - DNA, 25 bp, Homo sapien
tcttgcggaaaaagaggagctcgat

SEQ ID NO: 4475145 - DNA, 25 bp, Homo sapien
gtaggcaaatgtttcgtttcagtag

SEQ ID NO: 4475146 - DNA, 25 bp, Homo sapien
tgctgggtacacacacctacgagga

SEQ ID NO: 4475147 - DNA, 25 bp, Homo sapien
aatatctttcggtgggcatttctgc

SEQ ID NO: 4475148 - DNA, 25 bp, Homo sapien
ggtacacacacctacgaggaattgc

SEQ ID NO: 4475149 - DNA, 25 bp, Homo sapien
ttctggtacaccagagggctcccat

SEQ ID NO: 4475150 - DNA, 25 bp, Homo sapien
tctgtgaagtttacctgtgttgcca

SEQ ID NO: 4475151 - DNA, 25 bp, Homo sapien
taaatggaacttcggcctggcttct

SEQ ID NO: 4475152 - DNA, 25 bp, Homo sapien
tgtgttgccacatgtatccgtaatt

SEQ ID NO: 4475153 - DNA, 25 bp, Homo sapien
ctgtagctgccttatgttgagttgg

SEQ ID NO: 4475154 - DNA, 25 bp, Homo sapien
gctgccttatgttgagttggaaggt

SEQ ID NO: 4475155 - DNA, 25 bp, Homo sapien
ttctttacttaggaaggagatgagg

SEQ ID NO: 4475156 - DNA, 25 bp, Homo sapien
gataggagataaaggttgagagatg

SEQ ID NO: 4475157 - DNA, 25 bp, Homo sapien
taaattggccacttgaagaagttgc

SEQ ID NO: 4475158 - DNA, 25 bp, Homo sapien
tagaggttgccaatagagggcccaa

SEQ ID NO: 4475159 - DNA, 25 bp, Homo sapien
gcaacacattgcaataggaacagaa

SEQ ID NO: 4475160 - DNA, 25 bp, Homo sapien
gagggcccaaggattctcactgaaa

SEQ ID NO: 4475161 - DNA, 25 bp, Homo sapien
tacattccggatgcaatcaataggc

SEQ ID NO: 4475162 - DNA, 25 bp, Homo sapien
tgatttatctcacccacggaactga

SEQ ID NO: 4475163 - DNA, 25 bp, Homo sapien
gatgaacaaatcaccccatggctca

SEQ ID NO: 4475164 - DNA, 25 bp, Homo sapien
caaaatatgcactgtatggctacac

SEQ ID NO: 4475165 - DNA, 25 bp, Homo sapien
ttttcttcttggtgggaagctggat

SEQ ID NO: 4475166 - DNA, 25 bp, Homo sapien
tcactccatggctttcctcatcctc

SEQ ID NO: 4475167 - DNA, 25 bp, Homo sapien
cttttttcttcttggtgggaagctg

SEQ ID NO: 4475168 - DNA, 25 bp, Homo sapien
cctcatcctcctctcttttttcttc

SEQ ID NO: 4475169 - DNA, 25 bp, Homo sapien
tctccatcaaaaacagagggtcaca

SEQ ID NO: 4475170 - DNA, 25 bp, Homo sapien
agaaatgtgctgaaaagatgtggtc

SEQ ID NO: 4475171 - DNA, 25 bp, Homo sapien
gctggaagattaatgaagactccat

SEQ ID NO: 4475172 - DNA, 25 bp, Homo sapien
cctgctggaagattaatgaagactc

SEQ ID NO: 4475173 - DNA, 25 bp, Homo sapien
gagcctttaccatctataacctgta

SEQ ID NO: 4475174 - DNA, 25 bp, Homo sapien
ccccagaggttagacttggagcata

SEQ ID NO: 4475175 - DNA, 25 bp, Homo sapien
cctactttgggttcagaattgagcc

SEQ ID NO: 4475176 - DNA, 25 bp, Homo sapien
cactgcctcagtggttattggccag

SEQ ID NO: 4475177 - DNA, 25 bp, Homo sapien
ctacatagagaaatggatggtgagc

SEQ ID NO: 4475178 - DNA, 25 bp, Homo sapien
atagtaagtcatcctggaccctctg

SEQ ID NO: 4475179 - DNA, 25 bp, Homo sapien
gatggtgagctcttactgtgactgt

SEQ ID NO: 4475180 - DNA, 25 bp, Homo sapien
gaatcttatcccacccaatttcatg

SEQ ID NO: 4475181 - DNA, 25 bp, Homo sapien
agtgactgttctaggcctccgctga

SEQ ID NO: 4475182 - DNA, 25 bp, Homo sapien
tagtgactgttctaggcctccgctg

SEQ ID NO: 4475183 - DNA, 25 bp, Homo sapien
gatggcatagtcaaacaccagattt

SEQ ID NO: 4475184 - DNA, 25 bp, Homo sapien
caatatatgttgtcttactgaccca

SEQ ID NO: 4475185 - DNA, 25 bp, Homo sapien
actgtgaggtgggactatatacata

SEQ ID NO: 4475186 - DNA, 25 bp, Homo sapien
ttaactgggtggcatgtctcaggga

SEQ ID NO: 4475187 - DNA, 25 bp, Homo sapien
cagagaaaagccaataatcacaata

SEQ ID NO: 4475188 - DNA, 25 bp, Homo sapien
ttcatcgtttggcatacaggtagtg

SEQ ID NO: 4475189 - DNA, 25 bp, Homo sapien
gccttcatcgtttggcatacaggta

SEQ ID NO: 4475190 - DNA, 25 bp, Homo sapien
tttagccttcatcgtttggcataca

SEQ ID NO: 4475191 - DNA, 25 bp, Homo sapien
catcgtttggcatacaggtagtgac

SEQ ID NO: 4475192 - DNA, 25 bp, Homo sapien
tatcctaggcctcgcagagtgtttc

SEQ ID NO: 4475193 - DNA, 25 bp, Homo sapien
gagaccttgactagtgaggcagcca

SEQ ID NO: 4475194 - DNA, 25 bp, Homo sapien
cagcagcaagcagctatgcagcagg

SEQ ID NO: 4475195 - DNA, 25 bp, Homo sapien
tattcgtcgaggaaactatccaggt

SEQ ID NO: 4475196 - DNA, 25 bp, Homo sapien
tcagtgccttctagcatatgttgag

SEQ ID NO: 4475197 - DNA, 25 bp, Homo sapien
tgtttagagtcacagccacttctga

SEQ ID NO: 4475198 - DNA, 25 bp, Homo sapien
tgctgtagcatgtcaaaagctctgt

SEQ ID NO: 4475199 - DNA, 25 bp, Homo sapien
cactaaatgctggactagtgtctcc

SEQ ID NO: 4475200 - DNA, 25 bp, Homo sapien
tttgtcctgcctgatatatgttcct

SEQ ID NO: 4475201 - DNA, 25 bp, Homo sapien
taacaatcaagcttggcagttactt

SEQ ID NO: 4475202 - DNA, 25 bp, Homo sapien
tgaggtatccctctttatcacaggt

SEQ ID NO: 4475203 - DNA, 25 bp, Homo sapien
gagattctcctcttagtctgtctga

SEQ ID NO: 4475204 - DNA, 25 bp, Homo sapien
taacggtcagataaattatttcaac

SEQ ID NO: 4475205 - DNA, 25 bp, Homo sapien
tagacagagcttacatgggttttta

SEQ ID NO: 4475206 - DNA, 25 bp, Homo sapien
tcctctttgaccatggtttgtttta

SEQ ID NO: 4475207 - DNA, 25 bp, Homo sapien
taactttaaagtagacagagcttac

SEQ ID NO: 4475208 - DNA, 25 bp, Homo sapien
gatatgacacattacactgagtcca

SEQ ID NO: 4475209 - DNA, 25 bp, Homo sapien
tactgcatgtattgaggttttatca

SEQ ID NO: 4475210 - DNA, 25 bp, Homo sapien
tgtgtttatgagtaaagttaaccca

SEQ ID NO: 4475211 - DNA, 25 bp, Homo sapien
tacttgattccgttgtagttaggat

SEQ ID NO: 4475212 - DNA, 25 bp, Homo sapien
ccttcttcagtggtgttttgactat

SEQ ID NO: 4475213 - DNA, 25 bp, Homo sapien
gactatctttgtaccaacaccacca

SEQ ID NO: 4475214 - DNA, 25 bp, Homo sapien
aattgggagccttcttatgtgtggg

SEQ ID NO: 4475215 - DNA, 25 bp, Homo sapien
tctaggtgctctgttttgactatct

SEQ ID NO: 4475216 - DNA, 25 bp, Homo sapien
tatgtatccctgagcactgtagttt

SEQ ID NO: 4475217 - DNA, 25 bp, Homo sapien
tcagtcaaccttatgtgtgtaagac

SEQ ID NO: 4475218 - DNA, 25 bp, Homo sapien
cctccaaaggtaagcagtaacctga

SEQ ID NO: 4475219 - DNA, 25 bp, Homo sapien
tgtttgctaccaaaatatgtatccc

SEQ ID NO: 4475220 - DNA, 25 bp, Homo sapien
catagacaaaccctagtaacgtgta

SEQ ID NO: 4475221 - DNA, 25 bp, Homo sapien
tctttgtgcccatcaatcatgcctt

SEQ ID NO: 4475222 - DNA, 25 bp, Homo sapien
gactttctgcatgagggtaatatat

SEQ ID NO: 4475223 - DNA, 25 bp, Homo sapien
tcgctatcgtgagccttacagaatt

SEQ ID NO: 4475224 - DNA, 25 bp, Homo sapien
accattagtatgtgacagagttgct

SEQ ID NO: 4475225 - DNA, 25 bp, Homo sapien
gaattgcactaatactctttcttga

SEQ ID NO: 4475226 - DNA, 25 bp, Homo sapien
taatttacacctcttgttcaatgac

SEQ ID NO: 4475227 - DNA, 25 bp, Homo sapien
tccagttaatcatacagaaagttga

SEQ ID NO: 4475228 - DNA, 25 bp, Homo sapien
tccggctcattgtcagtaggctaag

SEQ ID NO: 4475229 - DNA, 25 bp, Homo sapien
gcttaacttgttgggatgctaatac

SEQ ID NO: 4475230 - DNA, 25 bp, Homo sapien
tcctcccagggcagactagaccttt

SEQ ID NO: 4475231 - DNA, 25 bp, Homo sapien
taagtagtagctccagtttaccctg

SEQ ID NO: 4475232 - DNA, 25 bp, Homo sapien
gaataagtgcttaacaaaggtctgt

SEQ ID NO: 4475233 - DNA, 25 bp, Homo sapien
gaagagccttttgctataaacctac

SEQ ID NO: 4475234 - DNA, 25 bp, Homo sapien
tgcgcttttttccagtgctgcagaa

SEQ ID NO: 4475235 - DNA, 25 bp, Homo sapien
caatttagtggtggctatccaggca

SEQ ID NO: 4475236 - DNA, 25 bp, Homo sapien
tgagatcagaagagatcgggcgcat

SEQ ID NO: 4475237 - DNA, 25 bp, Homo sapien
cagaagagatcgggcgcattcaggg

SEQ ID NO: 4475238 - DNA, 25 bp, Homo sapien
aagagatcgggcgcattcagggtag

SEQ ID NO: 4475239 - DNA, 25 bp, Homo sapien
gggcgcattcagggtagtatggcca

SEQ ID NO: 4475240 - DNA, 25 bp, Homo sapien
ccttccaggtttaagtgcttgtcct

SEQ ID NO: 4475241 - DNA, 25 bp, Homo sapien
ttccaggtttaagtgcttgtcctgc

SEQ ID NO: 4475242 - DNA, 25 bp, Homo sapien
gccttccaggtttaagtgcttgtcc

SEQ ID NO: 4475243 - DNA, 25 bp, Homo sapien
ccgccttccaggtttaagtgcttgt

SEQ ID NO: 4475244 - DNA, 25 bp, Homo sapien
gctgtaattgtctcactgtcctgga

SEQ ID NO: 4475245 - DNA, 25 bp, Homo sapien
tagatagattgtcacatgcccagat

SEQ ID NO: 4475246 - DNA, 25 bp, Homo sapien
gacaagagagcccataatgttaggc

SEQ ID NO: 4475247 - DNA, 25 bp, Homo sapien
tcccatcttagcttgcaggacagaa

SEQ ID NO: 4475248 - DNA, 25 bp, Homo sapien
tgctgtccattgagtgaatccacac

SEQ ID NO: 4475249 - DNA, 25 bp, Homo sapien
tcaagatcgagttatggaccaaggc

SEQ ID NO: 4475250 - DNA, 25 bp, Homo sapien
tccccacagctactgagagacaaca

SEQ ID NO: 4475251 - DNA, 25 bp, Homo sapien
gggttgctggaactaattccccaca

SEQ ID NO: 4475252 - DNA, 25 bp, Homo sapien
tttttaaactagaggtagtcatgag

SEQ ID NO: 4475253 - DNA, 25 bp, Homo sapien
gcacccagccgtaagtagaatttct

SEQ ID NO: 4475254 - DNA, 25 bp, Homo sapien
tggagaatgtcatcattgaaatgaa

SEQ ID NO: 4475255 - DNA, 25 bp, Homo sapien
tcttttggttcttatggagaatgtc

SEQ ID NO: 4475256 - DNA, 25 bp, Homo sapien
gaaaaggctacataccataagattc

SEQ ID NO: 4475257 - DNA, 25 bp, Homo sapien
cttggaaacagtcaagatgtccttc

SEQ ID NO: 4475258 - DNA, 25 bp, Homo sapien
aattgctaaaacttggaaacagtca

SEQ ID NO: 4475259 - DNA, 25 bp, Homo sapien
tcaagccatgaaaaggcttgcagga

SEQ ID NO: 4475260 - DNA, 25 bp, Homo sapien
tctattcagtacttctgtgagagca

SEQ ID NO: 4475261 - DNA, 25 bp, Homo sapien
gaaattgttgtaagtagctatctcc

SEQ ID NO: 4475262 - DNA, 25 bp, Homo sapien
taattaccatattcgtcgtctcaaa

SEQ ID NO: 4475263 - DNA, 25 bp, Homo sapien
cttcattgtgcaatagaggaccaca

SEQ ID NO: 4475264 - DNA, 25 bp, Homo sapien
taccaggcaaatatgaatgatagca

SEQ ID NO: 4475265 - DNA, 25 bp, Homo sapien
tagtttaagtgatagctacatgatt

SEQ ID NO: 4475266 - DNA, 25 bp, Homo sapien
tctgaacagatgctcacctatatag

SEQ ID NO: 4475267 - DNA, 25 bp, Homo sapien
tttaaggtagcataagagaccttat

SEQ ID NO: 4475268 - DNA, 25 bp, Homo sapien
caaatatagaagatactggcatgca

SEQ ID NO: 4475269 - DNA, 25 bp, Homo sapien
tatgaagcctgatacaagttacaag

SEQ ID NO: 4475270 - DNA, 25 bp, Homo sapien
gatggtatacagagacaaatataga

SEQ ID NO: 4475271 - DNA, 25 bp, Homo sapien
gaattactgcttgcagatggtatac

SEQ ID NO: 4475272 - DNA, 25 bp, Homo sapien
tgtctttcaagtagccaagtgatgg

SEQ ID NO: 4475273 - DNA, 25 bp, Homo sapien
gattgtatgggcaacatggcctcca

SEQ ID NO: 4475274 - DNA, 25 bp, Homo sapien
taagttttgacgtatgtaggcaccc

SEQ ID NO: 4475275 - DNA, 25 bp, Homo sapien
tgtcatagccctttctaaatctgga

SEQ ID NO: 4475276 - DNA, 25 bp, Homo sapien
gctagagggtcaggtatagagctaa

SEQ ID NO: 4475277 - DNA, 25 bp, Homo sapien
atctcaagacactggaactacaggc

SEQ ID NO: 4475278 - DNA, 25 bp, Homo sapien
tgcttcagcatctcaagacactgga

SEQ ID NO: 4475279 - DNA, 25 bp, Homo sapien
agtgtttgcctagggctagagggtc

SEQ ID NO: 4475280 - DNA, 25 bp, Homo sapien
tgaagttcagagtctaaatagccta

SEQ ID NO: 4475281 - DNA, 25 bp, Homo sapien
cagggctttcctttatacttgaata

SEQ ID NO: 4475282 - DNA, 25 bp, Homo sapien
tagctcatgttgttacctttccagg

SEQ ID NO: 4475283 - DNA, 25 bp, Homo sapien
taggtgttacccttgcttgctcttc

SEQ ID NO: 4475284 - DNA, 25 bp, Homo sapien
gaaggagtagagagtctccatgtcc

SEQ ID NO: 4475285 - DNA, 25 bp, Homo sapien
catgtccttcctgggcactctacct

SEQ ID NO: 4475286 - DNA, 25 bp, Homo sapien
gagtagagagtctccatgtccttcc

SEQ ID NO: 4475287 - DNA, 25 bp, Homo sapien
ttcctgggcactctaccttccagga

SEQ ID NO: 4475288 - DNA, 25 bp, Homo sapien
gagccagggcctttttagcaaatct

SEQ ID NO: 4475289 - DNA, 25 bp, Homo sapien
tatggcttcataccttgggtgacca

SEQ ID NO: 4475290 - DNA, 25 bp, Homo sapien
taataaccgagcatagcagctatgg

SEQ ID NO: 4475291 - DNA, 25 bp, Homo sapien
acatctgtgaccaaacgtttgtggg

SEQ ID NO: 4475292 - DNA, 25 bp, Homo sapien
tttaggtgttagagtcagaagtcca

SEQ ID NO: 4475293 - DNA, 25 bp, Homo sapien
ccgtgttgagaaccgttgtggttga

SEQ ID NO: 4475294 - DNA, 25 bp, Homo sapien
tggaggacctgagagtcaaacctgt

SEQ ID NO: 4475295 - DNA, 25 bp, Homo sapien
gaagtccaggacttgtatcccattt

SEQ ID NO: 4475296 - DNA, 25 bp, Homo sapien
taggcagacacaggtttcatcaaac

SEQ ID NO: 4475297 - DNA, 25 bp, Homo sapien
tgaaaattattagtgcaaagggagg

SEQ ID NO: 4475298 - DNA, 25 bp, Homo sapien
gaatcacctgaatgtgggcggcgta

SEQ ID NO: 4475299 - DNA, 25 bp, Homo sapien
tgtaccccagaatttgtgtatgagg

SEQ ID NO: 4475300 - DNA, 25 bp, Homo sapien
gatacaaacctgcatatacagaggg

SEQ ID NO: 4475301 - DNA, 25 bp, Homo sapien
tcagtcagtcctccttatctttggg

SEQ ID NO: 4475302 - DNA, 25 bp, Homo sapien
ctaggatgagatagaggagcttaac

SEQ ID NO: 4475303 - DNA, 25 bp, Homo sapien
caaagaaactaggtatggagagacc

SEQ ID NO: 4475304 - DNA, 25 bp, Homo sapien
tatgcaggtattagagccaaatcca

SEQ ID NO: 4475305 - DNA, 25 bp, Homo sapien
ggactagtccaccttgtcagactga

SEQ ID NO: 4475306 - DNA, 25 bp, Homo sapien
tctgggcagccttcatggactagtc

SEQ ID NO: 4475307 - DNA, 25 bp, Homo sapien
gcccgttgtatctcttagcaccagt

SEQ ID NO: 4475308 - DNA, 25 bp, Homo sapien
ggtgattcatctgctttggtctccc

SEQ ID NO: 4475309 - DNA, 25 bp, Homo sapien
cctcaggtgattcatctgctttggt

SEQ ID NO: 4475310 - DNA, 25 bp, Homo sapien
tcaggtgattcatctgctttggtct

SEQ ID NO: 4475311 - DNA, 25 bp, Homo sapien
aggtgattcatctgctttggtctcc

SEQ ID NO: 4475312 - DNA, 25 bp, Homo sapien
cttggaaagcttagagtgaggaaaa

SEQ ID NO: 4475313 - DNA, 25 bp, Homo sapien
cataatgagggaattgttgctgtct

SEQ ID NO: 4475314 - DNA, 25 bp, Homo sapien
taagagggtgattaggattccacag

SEQ ID NO: 4475315 - DNA, 25 bp, Homo sapien
gtgacaagccgaagacaactaccaa

SEQ ID NO: 4475316 - DNA, 25 bp, Homo sapien
ccacatttcttcttatgtcatatta

SEQ ID NO: 4475317 - DNA, 25 bp, Homo sapien
tttcttcttatgtcatattatagtc

SEQ ID NO: 4475318 - DNA, 25 bp, Homo sapien
tatttttggtcaagacaggatttcc

SEQ ID NO: 4475319 - DNA, 25 bp, Homo sapien
tttttggtcaagacaggatttccca

SEQ ID NO: 4475320 - DNA, 25 bp, Homo sapien
tggtcaagacaggatttcccatgtt

SEQ ID NO: 4475321 - DNA, 25 bp, Homo sapien
tttggtcaagacaggatttcccatg

SEQ ID NO: 4475322 - DNA, 25 bp, Homo sapien
gcggaggttgcagtgaccttagatc

SEQ ID NO: 4475323 - DNA, 25 bp, Homo sapien
actccagcctgggtaacagagcgag

SEQ ID NO: 4475324 - DNA, 25 bp, Homo sapien
cagtgaccttagatcgtgccactac

SEQ ID NO: 4475325 - DNA, 25 bp, Homo sapien
gaggtgggaggcttgaaccccagag

SEQ ID NO: 4475326 - DNA, 25 bp, Homo sapien
taacggagggtccatatgaagttgt

SEQ ID NO: 4475327 - DNA, 25 bp, Homo sapien
tagtttttgattggagggcacatac

SEQ ID NO: 4475328 - DNA, 25 bp, Homo sapien
tatactgttcttagctacatggagg

SEQ ID NO: 4475329 - DNA, 25 bp, Homo sapien
catggaggtacttggtaacctaagg

SEQ ID NO: 4475330 - DNA, 25 bp, Homo sapien
gatttgagacatgactttgagcgcc

SEQ ID NO: 4475331 - DNA, 25 bp, Homo sapien
taaatgcaggaatttatggtgcccc

SEQ ID NO: 4475332 - DNA, 25 bp, Homo sapien
taagcaggattgcttcacggtggaa

SEQ ID NO: 4475333 - DNA, 25 bp, Homo sapien
ttcttcccaagacacgaagacagtg

SEQ ID NO: 4475334 - DNA, 25 bp, Homo sapien
catggtaggactagctgggtagttc

SEQ ID NO: 4475335 - DNA, 25 bp, Homo sapien
gagatggtgtcatgcgtgttgccca

SEQ ID NO: 4475336 - DNA, 25 bp, Homo sapien
ggcatgtgtgactattcacaactag

SEQ ID NO: 4475337 - DNA, 25 bp, Homo sapien
catagggtaggcacttgttaaatat

SEQ ID NO: 4475338 - DNA, 25 bp, Homo sapien
gaagtctcatacacatacgtctttg

SEQ ID NO: 4475339 - DNA, 25 bp, Homo sapien
gaggcaagatgtaatgtctacggaa

SEQ ID NO: 4475340 - DNA, 25 bp, Homo sapien
caaacctaggaatggattagctagc

SEQ ID NO: 4475341 - DNA, 25 bp, Homo sapien
acaaatttaggtgatgcagttctca

SEQ ID NO: 4475342 - DNA, 25 bp, Homo sapien
aagagaattttcagaggtcctaact

SEQ ID NO: 4475343 - DNA, 25 bp, Homo sapien
gcaagctttcgattagtttccacag

SEQ ID NO: 4475344 - DNA, 25 bp, Homo sapien
tgaagatgagagatcagcattccat

SEQ ID NO: 4475345 - DNA, 25 bp, Homo sapien
gcattccatcttaagcaaccagagg

SEQ ID NO: 4475346 - DNA, 25 bp, Homo sapien
caccgtgcctgccataggagtcttt

SEQ ID NO: 4475347 - DNA, 25 bp, Homo sapien
ccttagacgagagtcaattgacctg

SEQ ID NO: 4475348 - DNA, 25 bp, Homo sapien
tctatttggtgagatagcgttctca

SEQ ID NO: 4475349 - DNA, 25 bp, Homo sapien
taagcgtgagctgccttaaactcct

SEQ ID NO: 4475350 - DNA, 25 bp, Homo sapien
aatgtaacagtcacacatactctta

SEQ ID NO: 4475351 - DNA, 25 bp, Homo sapien
ttcattcccagacattggtgtcagc

SEQ ID NO: 4475352 - DNA, 25 bp, Homo sapien
aattgttttcaaggccaagcatggt

SEQ ID NO: 4475353 - DNA, 25 bp, Homo sapien
cctagatttgattgttgtcaatgtg

SEQ ID NO: 4475354 - DNA, 25 bp, Homo sapien
aaaaaaccccatcattgtaggatgt

SEQ ID NO: 4475355 - DNA, 25 bp, Homo sapien
tcattgtaggatgttggtttttctc

SEQ ID NO: 4475356 - DNA, 25 bp, Homo sapien
cagggaaatgccagataagtcaaat

SEQ ID NO: 4475357 - DNA, 25 bp, Homo sapien
ttggatgagttccatccctgttctg

SEQ ID NO: 4475358 - DNA, 25 bp, Homo sapien
agtgtgaagaggctgttttaagcaa

SEQ ID NO: 4475359 - DNA, 25 bp, Homo sapien
ttttgacaagcacacatagtgatgg

SEQ ID NO: 4475360 - DNA, 25 bp, Homo sapien
aagaaagtccttatgacaccactgc

SEQ ID NO: 4475361 - DNA, 25 bp, Homo sapien
taagcagttatagtgtttaaacaat

SEQ ID NO: 4475362 - DNA, 25 bp, Homo sapien
tctacgggctcccagcaaaagtggc

SEQ ID NO: 4475363 - DNA, 25 bp, Homo sapien
aattttaactgcctcctgctgacgg

SEQ ID NO: 4475364 - DNA, 25 bp, Homo sapien
tgctgcaggttcagggttatttccc

SEQ ID NO: 4475365 - DNA, 25 bp, Homo sapien
gatcttcctagaggcctatctacgg

SEQ ID NO: 4475366 - DNA, 25 bp, Homo sapien
aaaattgtctttggatagaagacat

SEQ ID NO: 4475367 - DNA, 25 bp, Homo sapien
aaattgtctttggatagaagacatt

SEQ ID NO: 4475368 - DNA, 25 bp, Homo sapien
aattgtctttggatagaagacattt

SEQ ID NO: 4475369 - DNA, 25 bp, Homo sapien
tggagtagatcaagcaagatactgt

SEQ ID NO: 4475370 - DNA, 25 bp, Homo sapien
tgtgtggagtagatcaagcaagata

SEQ ID NO: 4475371 - DNA, 25 bp, Homo sapien
tgtggagtagatcaagcaagatact

SEQ ID NO: 4475372 - DNA, 25 bp, Homo sapien
gatgtgtggagtagatcaagcaaga

SEQ ID NO: 4475373 - DNA, 25 bp, Homo sapien
tcgcttaagtggagaggactaccgc

SEQ ID NO: 4475374 - DNA, 25 bp, Homo sapien
tcatggctacgggtaacagaagaac

SEQ ID NO: 4475375 - DNA, 25 bp, Homo sapien
caacagattgtccagttcagcgaat

SEQ ID NO: 4475376 - DNA, 25 bp, Homo sapien
gaagaacgtcgcaggatgatggaac

SEQ ID NO: 4475377 - DNA, 25 bp, Homo sapien
tagtctgtgcatatggtggcttgta

SEQ ID NO: 4475378 - DNA, 25 bp, Homo sapien
ctgtggttgaggtctagtaataaat

SEQ ID NO: 4475379 - DNA, 25 bp, Homo sapien
taccaccaatactgcagccaaaatg

SEQ ID NO: 4475380 - DNA, 25 bp, Homo sapien
tggcttgtagcatgtaggttttttc

SEQ ID NO: 4475381 - DNA, 25 bp, Homo sapien
ttttgattataagtatccaacagta

SEQ ID NO: 4475382 - DNA, 25 bp, Homo sapien
tattaatacaaagtgcatgactaca

SEQ ID NO: 4475383 - DNA, 25 bp, Homo sapien
agtgcatgactacatacagtacatc

SEQ ID NO: 4475384 - DNA, 25 bp, Homo sapien
gattataagtatccaacagtataaa

SEQ ID NO: 4475385 - DNA, 25 bp, Homo sapien
gtttgggctgccctagctggtgtct

SEQ ID NO: 4475386 - DNA, 25 bp, Homo sapien
tgggtcatgtgcacctcaagtccac

SEQ ID NO: 4475387 - DNA, 25 bp, Homo sapien
ggactgggtctttcctttcatagca

SEQ ID NO: 4475388 - DNA, 25 bp, Homo sapien
aagtgcacacaacaccaagacttgc

SEQ ID NO: 4475389 - DNA, 25 bp, Homo sapien
gtcaatcaggcaggaatatggataa

SEQ ID NO: 4475390 - DNA, 25 bp, Homo sapien
gaccaaatctatgacacccgactca

SEQ ID NO: 4475391 - DNA, 25 bp, Homo sapien
gaaataagacagtcaatcaggcagg

SEQ ID NO: 4475392 - DNA, 25 bp, Homo sapien
tacgggattatgtagagaccaaatc

SEQ ID NO: 4475393 - DNA, 25 bp, Homo sapien
catgccctcctgttcattctcttga

SEQ ID NO: 4475394 - DNA, 25 bp, Homo sapien
gggaattgccctccgcttcactctg

SEQ ID NO: 4475395 - DNA, 25 bp, Homo sapien
gtttgttgggcttctgtaatgctga

SEQ ID NO: 4475396 - DNA, 25 bp, Homo sapien
tccagtctgtcactgccttgtacat

SEQ ID NO: 4475397 - DNA, 25 bp, Homo sapien
cttgattaatggcaccactctttcc

SEQ ID NO: 4475398 - DNA, 25 bp, Homo sapien
ttgattaatggcaccactctttcct

SEQ ID NO: 4475399 - DNA, 25 bp, Homo sapien
ctgcggtggccaccgcggcggagcc

SEQ ID NO: 4475400 - DNA, 25 bp, Homo sapien
aaggcagcttccgtcgaagaggagg

SEQ ID NO: 4475401 - DNA, 25 bp, Homo sapien
tggaaggcagcttccgtcgaagagg

SEQ ID NO: 4475402 - DNA, 25 bp, Homo sapien
tctgccatctccggtcctaccctgg

SEQ ID NO: 4475403 - DNA, 25 bp, Homo sapien
cttctgccatctccggtcctaccct

SEQ ID NO: 4475404 - DNA, 25 bp, Homo sapien
gtctctctgacagggcgggggatgc

SEQ ID NO: 4475405 - DNA, 25 bp, Homo sapien
cccggaccctgaggctgctgggccc

SEQ ID NO: 4475406 - DNA, 25 bp, Homo sapien
cggcgggggatgtgcctgctcaggc

SEQ ID NO: 4475407 - DNA, 25 bp, Homo sapien
cctgctcaggccgggcggagtctct

SEQ ID NO: 4475408 - DNA, 25 bp, Homo sapien
agccttcaggcacctctgtgttggc

SEQ ID NO: 4475409 - DNA, 25 bp, Homo sapien
cagaggtttcgtccccaaccttgcg

SEQ ID NO: 4475410 - DNA, 25 bp, Homo sapien
tgtgttggccggaaagcgacagcta

SEQ ID NO: 4475411 - DNA, 25 bp, Homo sapien
gacagctacggtcgcaaactcagag

SEQ ID NO: 4475412 - DNA, 25 bp, Homo sapien
cgcctctgacattctggaacccaag

SEQ ID NO: 4475413 - DNA, 25 bp, Homo sapien
gacaccacttaattcgcctctgaca

SEQ ID NO: 4475414 - DNA, 25 bp, Homo sapien
actgcggattctctcacggtctcct

SEQ ID NO: 4475415 - DNA, 25 bp, Homo sapien
tctcacggtctcctatacaaaagca

SEQ ID NO: 4475416 - DNA, 25 bp, Homo sapien
ctcgaagaggccacttctcggtttc

SEQ ID NO: 4475417 - DNA, 25 bp, Homo sapien
cgaagaggccacttctcggtttcat

SEQ ID NO: 4475418 - DNA, 25 bp, Homo sapien
cctcgaagaggccacttctcggttt

SEQ ID NO: 4475419 - DNA, 25 bp, Homo sapien
tcgaagaggccacttctcggtttca

SEQ ID NO: 4475420 - DNA, 25 bp, Homo sapien
aactctactgctataaattccactt

SEQ ID NO: 4475421 - DNA, 25 bp, Homo sapien
gcttggtaactctactgctataaat

SEQ ID NO: 4475422 - DNA, 25 bp, Homo sapien
atgatgatgcttggtaactctactg

SEQ ID NO: 4475423 - DNA, 25 bp, Homo sapien
gatgcttggtaactctactgctata

SEQ ID NO: 4475424 - DNA, 25 bp, Homo sapien
catatattggatacctctcctcttt

SEQ ID NO: 4475425 - DNA, 25 bp, Homo sapien
caactccatgttttttccaaggcct

SEQ ID NO: 4475426 - DNA, 25 bp, Homo sapien
tgttttttccaaggcctagagaaca

SEQ ID NO: 4475427 - DNA, 25 bp, Homo sapien
aacatatattggatacctctcctct

SEQ ID NO: 4475428 - DNA, 25 bp, Homo sapien
acatcatgctgggtatcactgtaaa

SEQ ID NO: 4475429 - DNA, 25 bp, Homo sapien
tcatgctgggtatcactgtaaactc

SEQ ID NO: 4475430 - DNA, 25 bp, Homo sapien
catcatgctgggtatcactgtaaac

SEQ ID NO: 4475431 - DNA, 25 bp, Homo sapien
aacatcatgctgggtatcactgtaa

SEQ ID NO: 4475432 - DNA, 25 bp, Homo sapien
cttggcaagaatctggcccttgttt

SEQ ID NO: 4475433 - DNA, 25 bp, Homo sapien
tctcttggcaagaatctggcccttg

SEQ ID NO: 4475434 - DNA, 25 bp, Homo sapien
ttctcttggcaagaatctggccctt

SEQ ID NO: 4475435 - DNA, 25 bp, Homo sapien
ggcaagaatctggcccttgtttgct

SEQ ID NO: 4475436 - DNA, 25 bp, Homo sapien
tgtattaattggctatgttattgtt

SEQ ID NO: 4475437 - DNA, 25 bp, Homo sapien
ttattggtaaggctatgttattggt

SEQ ID NO: 4475438 - DNA, 25 bp, Homo sapien
attggctatgttattggtagtaaag

SEQ ID NO: 4475439 - DNA, 25 bp, Homo sapien
ttattggtaaggtatatattatgca

SEQ ID NO: 4475440 - DNA, 25 bp, Homo sapien
ttgtactgacgagggctgctcagaa

SEQ ID NO: 4475441 - DNA, 25 bp, Homo sapien
tgtactgacgagggctgctcagaaa

SEQ ID NO: 4475442 - DNA, 25 bp, Homo sapien
cttgtactgacgagggctgctcaga

SEQ ID NO: 4475443 - DNA, 25 bp, Homo sapien
gaggtagaccaataaactccagtgg

SEQ ID NO: 4475444 - DNA, 25 bp, Homo sapien
tgctacctgctttgcgtgaactgag

SEQ ID NO: 4475445 - DNA, 25 bp, Homo sapien
tctgattgccgcagtagactgtcca

SEQ ID NO: 4475446 - DNA, 25 bp, Homo sapien
cagggctgatgaaactgacgtgatc

SEQ ID NO: 4475447 - DNA, 25 bp, Homo sapien
tagcaagtgtggtaatgagatcttt

SEQ ID NO: 4475448 - DNA, 25 bp, Homo sapien
tgtaggctgtgcaacaagtttttgg

SEQ ID NO: 4475449 - DNA, 25 bp, Homo sapien
gaaagaggagccttcaaaagtcgca

SEQ ID NO: 4475450 - DNA, 25 bp, Homo sapien
tggaaaagcctgtgcatggtgaatg

SEQ ID NO: 4475451 - DNA, 25 bp, Homo sapien
agaacatattgctccccagtcaggg

SEQ ID NO: 4475452 - DNA, 25 bp, Homo sapien
ggcctgccccatgtaactgagaaat

SEQ ID NO: 4475453 - DNA, 25 bp, Homo sapien
tctgaattccatattgagacacggg

SEQ ID NO: 4475454 - DNA, 25 bp, Homo sapien
gaccagcgcttgtgaacttcaacat

SEQ ID NO: 4475455 - DNA, 25 bp, Homo sapien
tacttaccgggcaatacaacaggat

SEQ ID NO: 4475456 - DNA, 25 bp, Homo sapien
ttatttagagagcacgggctgggcc

SEQ ID NO: 4475457 - DNA, 25 bp, Homo sapien
taagcctctgaaatgatattctaga

SEQ ID NO: 4475458 - DNA, 25 bp, Homo sapien
tgctgccttcgtgctggcagggctc

SEQ ID NO: 4475459 - DNA, 25 bp, Homo sapien
aacctgagttcatccgcctgcgtgc

SEQ ID NO: 4475460 - DNA, 25 bp, Homo sapien
tgagtttgattcaaccacccttggg

SEQ ID NO: 4475461 - DNA, 25 bp, Homo sapien
gcaagagccatgctgcagcgtaggt

SEQ ID NO: 4475462 - DNA, 25 bp, Homo sapien
cacccttgggttgttttgctatggc

SEQ ID NO: 4475463 - DNA, 25 bp, Homo sapien
gaacttggtcttcagctatacccag

SEQ ID NO: 4475464 - DNA, 25 bp, Homo sapien
gcttggtccccactatttccggtga

SEQ ID NO: 4475465 - DNA, 25 bp, Homo sapien
cgtatttctcggctagagcagcagt

SEQ ID NO: 4475466 - DNA, 25 bp, Homo sapien
tattgccgctttcttcaggatctgc

SEQ ID NO: 4475467 - DNA, 25 bp, Homo sapien
gctccttgagttgggatgacccagt

SEQ ID NO: 4475468 - DNA, 25 bp, Homo sapien
gaactgaagatcgttttgagagcgc

SEQ ID NO: 4475469 - DNA, 25 bp, Homo sapien
ttgagagcgcggcaggtttactcat

SEQ ID NO: 4475470 - DNA, 25 bp, Homo sapien
tggtgagtgctcagtgaccagtctg

SEQ ID NO: 4475471 - DNA, 25 bp, Homo sapien
tcaggtggcactactcccatttctt

SEQ ID NO: 4475472 - DNA, 25 bp, Homo sapien
cagcatctgggaaaaggattgtggc

SEQ ID NO: 4475473 - DNA, 25 bp, Homo sapien
cttgcgtggtgtagtgggaatgaga

SEQ ID NO: 4475474 - DNA, 25 bp, Homo sapien
cacagccggaggcagttttggtcag

SEQ ID NO: 4475475 - DNA, 25 bp, Homo sapien
gagagaggcagtgtgtacccgcaca

SEQ ID NO: 4475476 - DNA, 25 bp, Homo sapien
gagtgccttgaggtaccgaaccaga

SEQ ID NO: 4475477 - DNA, 25 bp, Homo sapien
gagttcctctttgatcagtcagcca

SEQ ID NO: 4475478 - DNA, 25 bp, Homo sapien
tttgatcagtcagccaccctgggct

SEQ ID NO: 4475479 - DNA, 25 bp, Homo sapien
gaggtaccgaaccagagctcctgga

SEQ ID NO: 4475480 - DNA, 25 bp, Homo sapien
cagggtccacaagaagtcagcttgg

SEQ ID NO: 4475481 - DNA, 25 bp, Homo sapien
tcagcttgggagagtgcggtcacct

SEQ ID NO: 4475482 - DNA, 25 bp, Homo sapien
aggcccggctgagatttgtgcttca

SEQ ID NO: 4475483 - DNA, 25 bp, Homo sapien
tattgagccccagtttgcgaagttt

SEQ ID NO: 4475484 - DNA, 25 bp, Homo sapien
aagttgggtcgtgcctccgagccca

SEQ ID NO: 4475485 - DNA, 25 bp, Homo sapien
tgaagttgggtcgtgcctccgagcc

SEQ ID NO: 4475486 - DNA, 25 bp, Homo sapien
ctgaagttgggtcgtgcctccgagc

SEQ ID NO: 4475487 - DNA, 25 bp, Homo sapien
agctgaagttgggtcgtgcctccga

SEQ ID NO: 4475488 - DNA, 25 bp, Homo sapien
atctccgtggtcttttcccgcgagg

SEQ ID NO: 4475489 - DNA, 25 bp, Homo sapien
tatctatccgttcccagtatctccg

SEQ ID NO: 4475490 - DNA, 25 bp, Homo sapien
ccagtatctccgtggtcttttcccg

SEQ ID NO: 4475491 - DNA, 25 bp, Homo sapien
cgttcccagtatctccgtggtcttt

SEQ ID NO: 4475492 - DNA, 25 bp, Homo sapien
tcattcgttgcccgcggtatcgact

SEQ ID NO: 4475493 - DNA, 25 bp, Homo sapien
tctcgccgccgaatccgtattgtag

SEQ ID NO: 4475494 - DNA, 25 bp, Homo sapien
agctgtctcagcacgacgcggcctc

SEQ ID NO: 4475495 - DNA, 25 bp, Homo sapien
ggtatcgactcccagtcctaattgc

SEQ ID NO: 4475496 - DNA, 25 bp, Homo sapien
tgttgttccattgaagccgactctg

SEQ ID NO: 4475497 - DNA, 25 bp, Homo sapien
gacaccagggaagaagatcaacgcc

SEQ ID NO: 4475498 - DNA, 25 bp, Homo sapien
ccttagggcactgggctgttgttcc

SEQ ID NO: 4475499 - DNA, 25 bp, Homo sapien
gatcaacgcctcactgaaacatggc

SEQ ID NO: 4475500 - DNA, 25 bp, Homo sapien
ctcttactctagaccaaaaagtcgg

SEQ ID NO: 4475501 - DNA, 25 bp, Homo sapien
gaggagtcgtggaggctctttccct

SEQ ID NO: 4475502 - DNA, 25 bp, Homo sapien
cctgcactggagtctgttgccttca

SEQ ID NO: 4475503 - DNA, 25 bp, Homo sapien
ccttcattggacaccacacagttta

SEQ ID NO: 4475504 - DNA, 25 bp, Homo sapien
ctgctgtgtcggagaaggacatcca

SEQ ID NO: 4475505 - DNA, 25 bp, Homo sapien
cctgctgtgtcggagaaggacatcc

SEQ ID NO: 4475506 - DNA, 25 bp, Homo sapien
cttgcctgctgtgtcggagaaggac

SEQ ID NO: 4475507 - DNA, 25 bp, Homo sapien
tgcctgctgtgtcggagaaggacat

SEQ ID NO: 4475508 - DNA, 25 bp, Homo sapien
tagttattcaaacactgcctggaag

SEQ ID NO: 4475509 - DNA, 25 bp, Homo sapien
tggccgaagcatttaggctcaagcg

SEQ ID NO: 4475510 - DNA, 25 bp, Homo sapien
gacgtgtagcaagcttctggttcac

SEQ ID NO: 4475511 - DNA, 25 bp, Homo sapien
tgtctctaatcagctaactaacagg

SEQ ID NO: 4475512 - DNA, 25 bp, Homo sapien
catctcgtggacttggaggcagccc

SEQ ID NO: 4475513 - DNA, 25 bp, Homo sapien
ggacacatgagatctggagtctgga

SEQ ID NO: 4475514 - DNA, 25 bp, Homo sapien
cctgggcatgagatatgaggtctct

SEQ ID NO: 4475515 - DNA, 25 bp, Homo sapien
gactgctaatgcgtaaatccactat

SEQ ID NO: 4475516 - DNA, 25 bp, Homo sapien
gagttgtggatcgaaacgccttcat

SEQ ID NO: 4475517 - DNA, 25 bp, Homo sapien
cagactttctaacggatgcaggtgt

SEQ ID NO: 4475518 - DNA, 25 bp, Homo sapien
gaacacaatcttgggtacctactgg

SEQ ID NO: 4475519 - DNA, 25 bp, Homo sapien
gaatgccagcgtatcatgatgcaga

SEQ ID NO: 4475520 - DNA, 25 bp, Homo sapien
tttgagggaagtaggcccatttagc

SEQ ID NO: 4475521 - DNA, 25 bp, Homo sapien
cctcggcatctgaggacattgaggg

SEQ ID NO: 4475522 - DNA, 25 bp, Homo sapien
taggcccatttagcatcagctgctc

SEQ ID NO: 4475523 - DNA, 25 bp, Homo sapien
cacctgaagttgagtggtctttgag

SEQ ID NO: 4475524 - DNA, 25 bp, Homo sapien
tagaaagtaaagagggccgggcaca

SEQ ID NO: 4475525 - DNA, 25 bp, Homo sapien
gggatggagaaaaaatgaactgtat

SEQ ID NO: 4475526 - DNA, 25 bp, Homo sapien
gcttggggatggagaaaaaatgaac

SEQ ID NO: 4475527 - DNA, 25 bp, Homo sapien
gcaacatcgcaagattcccatctct

SEQ ID NO: 4475528 - DNA, 25 bp, Homo sapien
tcagtcagggcacataagacacact

SEQ ID NO: 4475529 - DNA, 25 bp, Homo sapien
aaacaaatgtcaccgatgggcaaac

SEQ ID NO: 4475530 - DNA, 25 bp, Homo sapien
gatatctcccttggccatgaacgaa

SEQ ID NO: 4475531 - DNA, 25 bp, Homo sapien
tgtgtccaccatgccatttcagagg

SEQ ID NO: 4475532 - DNA, 25 bp, Homo sapien
gttccttccagatcaggcgggtccg

SEQ ID NO: 4475533 - DNA, 25 bp, Homo sapien
aaattattcacatggccccaaccgg

SEQ ID NO: 4475534 - DNA, 25 bp, Homo sapien
tccgcggtcctaacacaatgaatgg

SEQ ID NO: 4475535 - DNA, 25 bp, Homo sapien
tgaatctgtgtccttccgccgcaga

SEQ ID NO: 4475536 - DNA, 25 bp, Homo sapien
gaacctaagagaacggtcttcacat

SEQ ID NO: 4475537 - DNA, 25 bp, Homo sapien
gaatgaaggcctgtgattcagctgc

SEQ ID NO: 4475538 - DNA, 25 bp, Homo sapien
cagcgggtatgcctgagcaggtcac

SEQ ID NO: 4475539 - DNA, 25 bp, Homo sapien
tcccagcttatctgagctaacagga

SEQ ID NO: 4475540 - DNA, 25 bp, Homo sapien
tcaggaccccaagatacagaaggaa

SEQ ID NO: 4475541 - DNA, 25 bp, Homo sapien
caagaactactccacattcggatgg

SEQ ID NO: 4475542 - DNA, 25 bp, Homo sapien
tcatgcgtgtgatcggaactcaggt

SEQ ID NO: 4475543 - DNA, 25 bp, Homo sapien
ggcgatgccaacattaatactcagg

SEQ ID NO: 4475544 - DNA, 25 bp, Homo sapien
gtgtgccctgtgtccgaccatgtct

SEQ ID NO: 4475545 - DNA, 25 bp, Homo sapien
tgccctgtgtccgaccatgtctgca

SEQ ID NO: 4475546 - DNA, 25 bp, Homo sapien
ctgtgtccgaccatgtctgcacaag

SEQ ID NO: 4475547 - DNA, 25 bp, Homo sapien
ccctgtgtccgaccatgtctgcaca

SEQ ID NO: 4475548 - DNA, 25 bp, Homo sapien
ctaatgaggcaggacctttccctgg

SEQ ID NO: 4475549 - DNA, 25 bp, Homo sapien
ttaggctaggctagttgccctcctc

SEQ ID NO: 4475550 - DNA, 25 bp, Homo sapien
ggctcacaccatgctctataatctg

SEQ ID NO: 4475551 - DNA, 25 bp, Homo sapien
gcttgtaatttccagcagactaaat

SEQ ID NO: 4475552 - DNA, 25 bp, Homo sapien
tatgtggctattcattcaaggagta

SEQ ID NO: 4475553 - DNA, 25 bp, Homo sapien
gctgattgtagccactgtgatgaat

SEQ ID NO: 4475554 - DNA, 25 bp, Homo sapien
gactccagggagtgtgtattggccc

SEQ ID NO: 4475555 - DNA, 25 bp, Homo sapien
cctgtaagcaggaatatggaattgc

SEQ ID NO: 4475556 - DNA, 25 bp, Homo sapien
gaaaaagccggtaatctctgaactg

SEQ ID NO: 4475557 - DNA, 25 bp, Homo sapien
tgcagcaacaaagaccgtgaaaagt

SEQ ID NO: 4475558 - DNA, 25 bp, Homo sapien
aaaagttggcacttctggcctaacg

SEQ ID NO: 4475559 - DNA, 25 bp, Homo sapien
gatcatccagatcagcacttgactg

SEQ ID NO: 4475560 - DNA, 25 bp, Homo sapien
tcaccttttaaatccactttccatc

SEQ ID NO: 4475561 - DNA, 25 bp, Homo sapien
ttaaatccactttccatctctccag

SEQ ID NO: 4475562 - DNA, 25 bp, Homo sapien
tccaactcttcaccttttaaatcca

SEQ ID NO: 4475563 - DNA, 25 bp, Homo sapien
tccatctctccagaggaaagggcat

SEQ ID NO: 4475564 - DNA, 25 bp, Homo sapien
cctctgtaggtctaagtattctgtg

SEQ ID NO: 4475565 - DNA, 25 bp, Homo sapien
tgaattaggccacgtttccggctaa

SEQ ID NO: 4475566 - DNA, 25 bp, Homo sapien
tgtgatcctgtgaattccataaccc

SEQ ID NO: 4475567 - DNA, 25 bp, Homo sapien
taagcaaattggtcgacctctgtag

SEQ ID NO: 4475568 - DNA, 25 bp, Homo sapien
gagatagcgctaacctgcgggagtc

SEQ ID NO: 4475569 - DNA, 25 bp, Homo sapien
agtgattcttcctagtagtctttgt

SEQ ID NO: 4475570 - DNA, 25 bp, Homo sapien
tttagtggcctactcctgagaaggg

SEQ ID NO: 4475571 - DNA, 25 bp, Homo sapien
ggagtcgcccctcagtgattcttcc

SEQ ID NO: 4475572 - DNA, 25 bp, Homo sapien
gacaggcttcactcaggcccggcgg

SEQ ID NO: 4475573 - DNA, 25 bp, Homo sapien
cacgggtgccagagagtgttttcgc

SEQ ID NO: 4475574 - DNA, 25 bp, Homo sapien
ggcatagatcgggcccagagcgtct

SEQ ID NO: 4475575 - DNA, 25 bp, Homo sapien
aggtgtaactgcttccccgggagag

SEQ ID NO: 4475576 - DNA, 25 bp, Homo sapien
gccgtgagtactcgccaggctggcc

SEQ ID NO: 4475577 - DNA, 25 bp, Homo sapien
tgtggccgccaccacgggcacaggg

SEQ ID NO: 4475578 - DNA, 25 bp, Homo sapien
accacgggcacagggcggtgcggcc

SEQ ID NO: 4475579 - DNA, 25 bp, Homo sapien
tggacgaagtgagaggcttggaccg

SEQ ID NO: 4475580 - DNA, 25 bp, Homo sapien
tctctttatgccttggccccattct

SEQ ID NO: 4475581 - DNA, 25 bp, Homo sapien
aacaatgtcatcaggtctctctcat

SEQ ID NO: 4475582 - DNA, 25 bp, Homo sapien
gctctgcttctctttatgccttggc

SEQ ID NO: 4475583 - DNA, 25 bp, Homo sapien
cagcttcaatctcatatcctcttag

SEQ ID NO: 4475584 - DNA, 25 bp, Homo sapien
ctgtcttcgactcatttttggaggg

SEQ ID NO: 4475585 - DNA, 25 bp, Homo sapien
aatgaaacatagatctggcagtaat

SEQ ID NO: 4475586 - DNA, 25 bp, Homo sapien
ccgagggaagaaccagagggtgtat

SEQ ID NO: 4475587 - DNA, 25 bp, Homo sapien
tatgtgcaccagcacaatgctgaca

SEQ ID NO: 4475588 - DNA, 25 bp, Homo sapien
atataaagctgatcaatggtggtgc

SEQ ID NO: 4475589 - DNA, 25 bp, Homo sapien
tctcacatgtgcttaaccgaggtgc

SEQ ID NO: 4475590 - DNA, 25 bp, Homo sapien
tatacagtgggtgccatataaagct

SEQ ID NO: 4475591 - DNA, 25 bp, Homo sapien
ctttcctatgcaagagtgtctcaca

SEQ ID NO: 4475592 - DNA, 25 bp, Homo sapien
ggtttgctactgtatatactgccat

SEQ ID NO: 4475593 - DNA, 25 bp, Homo sapien
tagtctaagtttgcccacctgtaaa

SEQ ID NO: 4475594 - DNA, 25 bp, Homo sapien
ttgcccacctgtaaagtagattcag

SEQ ID NO: 4475595 - DNA, 25 bp, Homo sapien
tagaagcttcagaattagaggtccc

SEQ ID NO: 4475596 - DNA, 25 bp, Homo sapien
gaacgttatggaagcagtgaaccca

SEQ ID NO: 4475597 - DNA, 25 bp, Homo sapien
taaatatccctaggagacagggtga

SEQ ID NO: 4475598 - DNA, 25 bp, Homo sapien
cctagccagcaagagtgggattgcc

SEQ ID NO: 4475599 - DNA, 25 bp, Homo sapien
gtatagagtctcataaaagctgcct

SEQ ID NO: 4475600 - DNA, 25 bp, Homo sapien
gagagagatcattcctgttttgcca

SEQ ID NO: 4475601 - DNA, 25 bp, Homo sapien
taagaatcaggtgggggttattctc

SEQ ID NO: 4475602 - DNA, 25 bp, Homo sapien
catggaactttcagggtttcgttgt

SEQ ID NO: 4475603 - DNA, 25 bp, Homo sapien
atcaggtgggggttattctccttct

SEQ ID NO: 4475604 - DNA, 25 bp, Homo sapien
tgtgttggtccgatgtctttcagat

SEQ ID NO: 4475605 - DNA, 25 bp, Homo sapien
tcgtccgatccaagtgaagccagct

SEQ ID NO: 4475606 - DNA, 25 bp, Homo sapien
caggcagtcacgctgaatgggtgtg

SEQ ID NO: 4475607 - DNA, 25 bp, Homo sapien
gaggaggtaacttccctgtctgacc

SEQ ID NO: 4475608 - DNA, 25 bp, Homo sapien
caaagcctttaagtaagtccagaag

SEQ ID NO: 4475609 - DNA, 25 bp, Homo sapien
tctcatctaaatgacacatagcgtg

SEQ ID NO: 4475610 - DNA, 25 bp, Homo sapien
tttagccgcttcattccaccttgtg

SEQ ID NO: 4475611 - DNA, 25 bp, Homo sapien
gactagagttgagggcagatagcac

SEQ ID NO: 4475612 - DNA, 25 bp, Homo sapien
gacgaagctgcttcccctcacgcgg

SEQ ID NO: 4475613 - DNA, 25 bp, Homo sapien
atggcgagcaggagcgcgtgagccc

SEQ ID NO: 4475614 - DNA, 25 bp, Homo sapien
acacagggcattcgagggtccggtt

SEQ ID NO: 4475615 - DNA, 25 bp, Homo sapien
agtcaactcccactctgattggcgg

SEQ ID NO: 4475616 - DNA, 25 bp, Homo sapien
aacgcaccagcgtttggaggtgtgt

SEQ ID NO: 4475617 - DNA, 25 bp, Homo sapien
ttggctccgagggactggctcgata

SEQ ID NO: 4475618 - DNA, 25 bp, Homo sapien
tagagaagaggaatccccatccacc

SEQ ID NO: 4475619 - DNA, 25 bp, Homo sapien
aagtggttaaagacaccgaagacag

SEQ ID NO: 4475620 - DNA, 25 bp, Homo sapien
ctggagatattggagtggtctgaac

SEQ ID NO: 4475621 - DNA, 25 bp, Homo sapien
gctggcagtagaatccaaatagaac

SEQ ID NO: 4475622 - DNA, 25 bp, Homo sapien
tccagatagaagtaggtggcgtagt

SEQ ID NO: 4475623 - DNA, 25 bp, Homo sapien
ctgaactttatgagatcttgagact

SEQ ID NO: 4475624 - DNA, 25 bp, Homo sapien
tacaggtgtggcgagaggatattcc

SEQ ID NO: 4475625 - DNA, 25 bp, Homo sapien
gaatacagggcccaatctggcacat

SEQ ID NO: 4475626 - DNA, 25 bp, Homo sapien
gatttctacatagtggaacccctgg

SEQ ID NO: 4475627 - DNA, 25 bp, Homo sapien
tgaaccgtatatcctatggccctga

SEQ ID NO: 4475628 - DNA, 25 bp, Homo sapien
cctgtgacggaaccaaaggaggcca

SEQ ID NO: 4475629 - DNA, 25 bp, Homo sapien
cactttggacaatggaggctgcttc

SEQ ID NO: 4475630 - DNA, 25 bp, Homo sapien
ggtcattgaatacgcacggctccgg

SEQ ID NO: 4475631 - DNA, 25 bp, Homo sapien
taagaggctactaagttcccaggag

SEQ ID NO: 4475632 - DNA, 25 bp, Homo sapien
gccctgcagattctgccttgagtgt

SEQ ID NO: 4475633 - DNA, 25 bp, Homo sapien
cccttgctcctaggttaagtcctca

SEQ ID NO: 4475634 - DNA, 25 bp, Homo sapien
gaattctccacacaatgatattggg

SEQ ID NO: 4475635 - DNA, 25 bp, Homo sapien
gacttcggctgtcttttggatggct

SEQ ID NO: 4475636 - DNA, 25 bp, Homo sapien
tagaattccatgtccagaggtgacc

SEQ ID NO: 4475637 - DNA, 25 bp, Homo sapien
gacctgtctgtgatgaataaggcaa

SEQ ID NO: 4475638 - DNA, 25 bp, Homo sapien
gaagcaagaatgagagaagactgag

SEQ ID NO: 4475639 - DNA, 25 bp, Homo sapien
gagcgtccttgttattagaattcca

SEQ ID NO: 4475640 - DNA, 25 bp, Homo sapien
ggcgagctgcatcacaacattcaag

SEQ ID NO: 4475641 - DNA, 25 bp, Homo sapien
gagtcgggtgagctgtctagttcca

SEQ ID NO: 4475642 - DNA, 25 bp, Homo sapien
ggttatttactgctctactgggccc

SEQ ID NO: 4475643 - DNA, 25 bp, Homo sapien
tactgggcccgtgaacagtctggcg

SEQ ID NO: 4475644 - DNA, 25 bp, Homo sapien
tgctttcagtaaatacacaccgggc

SEQ ID NO: 4475645 - DNA, 25 bp, Homo sapien
aagggaagagctcatattggaggca

SEQ ID NO: 4475646 - DNA, 25 bp, Homo sapien
gactttctacgtaaggccctgcagg

SEQ ID NO: 4475647 - DNA, 25 bp, Homo sapien
aggcccctgtcattatctctgagca

SEQ ID NO: 4475648 - DNA, 25 bp, Homo sapien
gaatatccataaaagggtgccttgg

SEQ ID NO: 4475649 - DNA, 25 bp, Homo sapien
caaattattgatcctgtgggcctga

SEQ ID NO: 4475650 - DNA, 25 bp, Homo sapien
gccttggcatgtgctcagtcctgaa

SEQ ID NO: 4475651 - DNA, 25 bp, Homo sapien
tggtgaacaaggaagacagggtctc

SEQ ID NO: 4475652 - DNA, 25 bp, Homo sapien
tctttataacgccagagagaaatct

SEQ ID NO: 4475653 - DNA, 25 bp, Homo sapien
tgtgcccaactgatgcctactcaat

SEQ ID NO: 4475654 - DNA, 25 bp, Homo sapien
ggacagccagttgcagtgactcatg

SEQ ID NO: 4475655 - DNA, 25 bp, Homo sapien
gaggcaccggttgcatatatgtgct

SEQ ID NO: 4475656 - DNA, 25 bp, Homo sapien
aggttaaatgttcccttcgctccat

SEQ ID NO: 4475657 - DNA, 25 bp, Homo sapien
ttgggaacctcaggactgtggaaag

SEQ ID NO: 4475658 - DNA, 25 bp, Homo sapien
tcaaggttaaatgttcccttcgctc

SEQ ID NO: 4475659 - DNA, 25 bp, Homo sapien
gactgtggaaagtcaaggttaaatg

SEQ ID NO: 4475660 - DNA, 25 bp, Homo sapien
catctgactttcaattagatacctc

SEQ ID NO: 4475661 - DNA, 25 bp, Homo sapien
gactttcaattagatacctcctcac

SEQ ID NO: 4475662 - DNA, 25 bp, Homo sapien
tagccctgcctttaagtaagttctc

SEQ ID NO: 4475663 - DNA, 25 bp, Homo sapien
tgtgtagccctgcctttaagtaagt

SEQ ID NO: 4475664 - DNA, 25 bp, Homo sapien
tttggcatgacatcgaggcacttgg

SEQ ID NO: 4475665 - DNA, 25 bp, Homo sapien
gacatggcgatcagcattaggaggc

SEQ ID NO: 4475666 - DNA, 25 bp, Homo sapien
cacttggatgtttcttggcagggac

SEQ ID NO: 4475667 - DNA, 25 bp, Homo sapien
gagtcctgcgtagagctcaaggcca

SEQ ID NO: 4475668 - DNA, 25 bp, Homo sapien
gccagtaagtatggtaaagacagag

SEQ ID NO: 4475669 - DNA, 25 bp, Homo sapien
gaaggccctggaatattggagataa

SEQ ID NO: 4475670 - DNA, 25 bp, Homo sapien
ttaaggatccaagagctgaagagcc

SEQ ID NO: 4475671 - DNA, 25 bp, Homo sapien
tccaagagctgaagagccagccaag

SEQ ID NO: 4475672 - DNA, 25 bp, Homo sapien
ctgagatgaagctgagcatggatac

SEQ ID NO: 4475673 - DNA, 25 bp, Homo sapien
cacaaacaggttgaggcagaggagc

SEQ ID NO: 4475674 - DNA, 25 bp, Homo sapien
acaaacaggttgaggcagaggagca

SEQ ID NO: 4475675 - DNA, 25 bp, Homo sapien
taggtccataggagatctgactcca

SEQ ID NO: 4475676 - DNA, 25 bp, Homo sapien
tggcatccctagtatgccagtgaac

SEQ ID NO: 4475677 - DNA, 25 bp, Homo sapien
tgcaccagttaagataataggtcca

SEQ ID NO: 4475678 - DNA, 25 bp, Homo sapien
tgtcactgcaccagttaagataata

SEQ ID NO: 4475679 - DNA, 25 bp, Homo sapien
taatttgaggtgaggttcaataggc

SEQ ID NO: 4475680 - DNA, 25 bp, Homo sapien
ggaataatttgaggtgaggttcaat

SEQ ID NO: 4475681 - DNA, 25 bp, Homo sapien
gggaataatttgaggtgaggttcaa

SEQ ID NO: 4475682 - DNA, 25 bp, Homo sapien
aataatttgaggtgaggttcaatag

SEQ ID NO: 4475683 - DNA, 25 bp, Homo sapien
tgatactgtagtcaccggaccaacc

SEQ ID NO: 4475684 - DNA, 25 bp, Homo sapien
tcacagtgacgttttcatcacaggc

SEQ ID NO: 4475685 - DNA, 25 bp, Homo sapien
caggcgatctggaagttaagtagtt

SEQ ID NO: 4475686 - DNA, 25 bp, Homo sapien
ggcccttcatctttagcaggtgata

SEQ ID NO: 4475687 - DNA, 25 bp, Homo sapien
ctctctcacacttagagattccatc

SEQ ID NO: 4475688 - DNA, 25 bp, Homo sapien
tttctctctcacacttagagattcc

SEQ ID NO: 4475689 - DNA, 25 bp, Homo sapien
aatttttctctctcacacttagaga

SEQ ID NO: 4475690 - DNA, 25 bp, Homo sapien
ctctcacacttagagattccatctc

SEQ ID NO: 4475691 - DNA, 25 bp, Homo sapien
gcttttaagacaagctatagttagg

SEQ ID NO: 4475692 - DNA, 25 bp, Homo sapien
taggttttcctatcaccaccacagt

SEQ ID NO: 4475693 - DNA, 25 bp, Homo sapien
aatatggacatgatattaggagagt

SEQ ID NO: 4475694 - DNA, 25 bp, Homo sapien
tttatgtgaccattcccaactcagc

SEQ ID NO: 4475695 - DNA, 25 bp, Homo sapien
gaggtctctggtctacacactgcat

SEQ ID NO: 4475696 - DNA, 25 bp, Homo sapien
caagtgctttccatcctgagtatac

SEQ ID NO: 4475697 - DNA, 25 bp, Homo sapien
taattaacattcttctccacgggcc

SEQ ID NO: 4475698 - DNA, 25 bp, Homo sapien
tgagatccctgatacccaaagaggt

SEQ ID NO: 4475699 - DNA, 25 bp, Homo sapien
tcaaccaatacagcagtagtggcag

SEQ ID NO: 4475700 - DNA, 25 bp, Homo sapien
caaccaatacagcagtagtggcagc

SEQ ID NO: 4475701 - DNA, 25 bp, Homo sapien
accaatacagcagtagtggcagcaa

SEQ ID NO: 4475702 - DNA, 25 bp, Homo sapien
aaccaatacagcagtagtggcagca

SEQ ID NO: 4475703 - DNA, 25 bp, Homo sapien
gtaattctgccataacgaaactcac

SEQ ID NO: 4475704 - DNA, 25 bp, Homo sapien
tgaagagcctctgaactaaggccac

SEQ ID NO: 4475705 - DNA, 25 bp, Homo sapien
ctgaactaaggccacttgaagcaag

SEQ ID NO: 4475706 - DNA, 25 bp, Homo sapien
aagtaattctgccataacgaaactc

SEQ ID NO: 4475707 - DNA, 25 bp, Homo sapien
gccagtgaaggtccctaaagtttgc

SEQ ID NO: 4475708 - DNA, 25 bp, Homo sapien
ggtggacagtccatagttccctcat

SEQ ID NO: 4475709 - DNA, 25 bp, Homo sapien
gataagtcatcttcacatcaggtaa

SEQ ID NO: 4475710 - DNA, 25 bp, Homo sapien
tacatcagccccattaggtggacag

SEQ ID NO: 4475711 - DNA, 25 bp, Homo sapien
taaagaggcagaatctactacttgc

SEQ ID NO: 4475712 - DNA, 25 bp, Homo sapien
catgtacttgaatctttgtctagga

SEQ ID NO: 4475713 - DNA, 25 bp, Homo sapien
actacttgctcaaaactgttgtggt

SEQ ID NO: 4475714 - DNA, 25 bp, Homo sapien
gattgttctgaacattggacaccca

SEQ ID NO: 4475715 - DNA, 25 bp, Homo sapien
ctcctgcaacaaggcagagttcacc

SEQ ID NO: 4475716 - DNA, 25 bp, Homo sapien
aggatgcgcagtggggtattgacat

SEQ ID NO: 4475717 - DNA, 25 bp, Homo sapien
gctggtgaagatgcaaggaagctgg

SEQ ID NO: 4475718 - DNA, 25 bp, Homo sapien
cacctgcttaaggatgtctgtagtg

SEQ ID NO: 4475719 - DNA, 25 bp, Homo sapien
acctgcttaaggatgtctgtagtga

SEQ ID NO: 4475720 - DNA, 25 bp, Homo sapien
cctgcttaaggatgtctgtagtgat

SEQ ID NO: 4475721 - DNA, 25 bp, Homo sapien
aaggtcagatgtgtcgaggaggtgt

SEQ ID NO: 4475722 - DNA, 25 bp, Homo sapien
agatgtgtcgaggaggtgtcatcca

SEQ ID NO: 4475723 - DNA, 25 bp, Homo sapien
tcagatgtgtcgaggaggtgtcatc

SEQ ID NO: 4475724 - DNA, 25 bp, Homo sapien
ggtcagatgtgtcgaggaggtgtca

SEQ ID NO: 4475725 - DNA, 25 bp, Homo sapien
tcaggagcataagagctggcacgtg

SEQ ID NO: 4475726 - DNA, 25 bp, Homo sapien
gtcgccctcagcagatatcatggtt

SEQ ID NO: 4475727 - DNA, 25 bp, Homo sapien
ggccagtgaggtggcggtcagctcc

SEQ ID NO: 4475728 - DNA, 25 bp, Homo sapien
cataagagctggcacgtggtatccc

SEQ ID NO: 4475729 - DNA, 25 bp, Homo sapien
tgttggtaatttggcactcccattg

SEQ ID NO: 4475730 - DNA, 25 bp, Homo sapien
ctttttggtgccgagataatcattg

SEQ ID NO: 4475731 - DNA, 25 bp, Homo sapien
taatcattgttggtaatttggcact

SEQ ID NO: 4475732 - DNA, 25 bp, Homo sapien
gccgagataatcattgttggtaatt

SEQ ID NO: 4475733 - DNA, 25 bp, Homo sapien
gctccggcctccgagagaaaacagt

SEQ ID NO: 4475734 - DNA, 25 bp, Homo sapien
ccaggagcggcggttggcgtttgac

SEQ ID NO: 4475735 - DNA, 25 bp, Homo sapien
tccggctgatgtccggacgcaggcc

SEQ ID NO: 4475736 - DNA, 25 bp, Homo sapien
ggcgtttgacggctggtggcggcgg

SEQ ID NO: 4475737 - DNA, 25 bp, Homo sapien
gtagttgtagccctcgtccgagtcc

SEQ ID NO: 4475738 - DNA, 25 bp, Homo sapien
tcgtagttgtagccctcgtccgagt

SEQ ID NO: 4475739 - DNA, 25 bp, Homo sapien
ctcgtagttgtagccctcgtccgag

SEQ ID NO: 4475740 - DNA, 25 bp, Homo sapien
agttgtagccctcgtccgagtccat

SEQ ID NO: 4475741 - DNA, 25 bp, Homo sapien
tccagggtatcatcgtccggctcgt

SEQ ID NO: 4475742 - DNA, 25 bp, Homo sapien
tccccgcacagcagtccgtcccgct

SEQ ID NO: 4475743 - DNA, 25 bp, Homo sapien
agggtatcatcgtccggctcgtcgt

SEQ ID NO: 4475744 - DNA, 25 bp, Homo sapien
cccagatccagggtatcatcgtccg

SEQ ID NO: 4475745 - DNA, 25 bp, Homo sapien
ttgtagaatctgctcggccgtgagc

SEQ ID NO: 4475746 - DNA, 25 bp, Homo sapien
atctgctcggccgtgagcacctcgt

SEQ ID NO: 4475747 - DNA, 25 bp, Homo sapien
cgtgagcacctcgtagcggtaatcc

SEQ ID NO: 4475748 - DNA, 25 bp, Homo sapien
gagcacctcgtagcggtaatcctcc

SEQ ID NO: 4475749 - DNA, 25 bp, Homo sapien
gacctcgttgacctcccggatacat

SEQ ID NO: 4475750 - DNA, 25 bp, Homo sapien
ggatgacctcgttgacctcccggat

SEQ ID NO: 4475751 - DNA, 25 bp, Homo sapien
ctggatgacctcgttgacctcccgg

SEQ ID NO: 4475752 - DNA, 25 bp, Homo sapien
atgacctcgttgacctcccggatac

SEQ ID NO: 4475753 - DNA, 25 bp, Homo sapien
gcctgaatccgctcccccgtcgggc

SEQ ID NO: 4475754 - DNA, 25 bp, Homo sapien
aggcctgtccctcgggaccgcgcgt

SEQ ID NO: 4475755 - DNA, 25 bp, Homo sapien
gtcgggcccggtccagctggcgcgg

SEQ ID NO: 4475756 - DNA, 25 bp, Homo sapien
gcgcgtgccgcctgaatccgctccc

SEQ ID NO: 4475757 - DNA, 25 bp, Homo sapien
gaacctctgctttcgacaccctcta

SEQ ID NO: 4475758 - DNA, 25 bp, Homo sapien
ggccgggaggcaccgggctaggctg

SEQ ID NO: 4475759 - DNA, 25 bp, Homo sapien
gacaccctctatccccagcagaggc

SEQ ID NO: 4475760 - DNA, 25 bp, Homo sapien
gaggcagcggagaagacaaggccgg

SEQ ID NO: 4475761 - DNA, 25 bp, Homo sapien
tgcaaaatctgacgcacatggttaa

SEQ ID NO: 4475762 - DNA, 25 bp, Homo sapien
caaggaagggtatgcaatatgcagt

SEQ ID NO: 4475763 - DNA, 25 bp, Homo sapien
gaagcctcaccatctgaaaagaagg

SEQ ID NO: 4475764 - DNA, 25 bp, Homo sapien
tagaaaaagtagcaattaggtccca

SEQ ID NO: 4475765 - DNA, 25 bp, Homo sapien
tcttacatgtgcatcttctacaggc

SEQ ID NO: 4475766 - DNA, 25 bp, Homo sapien
tacgtctctgggtggcaggcttgtt

SEQ ID NO: 4475767 - DNA, 25 bp, Homo sapien
cagttcgcattttgttgtacgtctc

SEQ ID NO: 4475768 - DNA, 25 bp, Homo sapien
tattaatggctatccaaaggtctag

SEQ ID NO: 4475769 - DNA, 25 bp, Homo sapien
tatgattagcctagtaaacgttgcc

SEQ ID NO: 4475770 - DNA, 25 bp, Homo sapien
catgaaggatagcatctacgatgac

SEQ ID NO: 4475771 - DNA, 25 bp, Homo sapien
catctttgacaacacctacagaggt

SEQ ID NO: 4475772 - DNA, 25 bp, Homo sapien
caccttagctgaaggatagcatagc

SEQ ID NO: 4475773 - DNA, 25 bp, Homo sapien
atctcccaggttctacattattatc

SEQ ID NO: 4475774 - DNA, 25 bp, Homo sapien
tctcccaggttctacattattatcc

SEQ ID NO: 4475775 - DNA, 25 bp, Homo sapien
ctcccaggttctacattattatcca

SEQ ID NO: 4475776 - DNA, 25 bp, Homo sapien
gagagaactgctaccaagccgtcac

SEQ ID NO: 4475777 - DNA, 25 bp, Homo sapien
tgtcagccactttatggagaggccc

SEQ ID NO: 4475778 - DNA, 25 bp, Homo sapien
taatcccctccgattgagtatgggc

SEQ ID NO: 4475779 - DNA, 25 bp, Homo sapien
tcaagccttgaggactgctacccag

SEQ ID NO: 4475780 - DNA, 25 bp, Homo sapien
cttggatatagggatagctatatca

SEQ ID NO: 4475781 - DNA, 25 bp, Homo sapien
catatatagctagaggcttggatat

SEQ ID NO: 4475782 - DNA, 25 bp, Homo sapien
tcaaaaccctcatatatagctagag

SEQ ID NO: 4475783 - DNA, 25 bp, Homo sapien
tatagggatagctatatcataacct

SEQ ID NO: 4475784 - DNA, 25 bp, Homo sapien
gcaaagctttccgtaacccacagag

SEQ ID NO: 4475785 - DNA, 25 bp, Homo sapien
gaaagcaagcatttactaggcaagg

SEQ ID NO: 4475786 - DNA, 25 bp, Homo sapien
ccagcgccagggaactatacgcaaa

SEQ ID NO: 4475787 - DNA, 25 bp, Homo sapien
ttgggacgaccaccatacttcagta

SEQ ID NO: 4475788 - DNA, 25 bp, Homo sapien
tcctaagggtgactagaatacttct

SEQ ID NO: 4475789 - DNA, 25 bp, Homo sapien
tgacaagtaatttgaggcccactcc

SEQ ID NO: 4475790 - DNA, 25 bp, Homo sapien
ctttatagctgggtggaatgcaaca

SEQ ID NO: 4475791 - DNA, 25 bp, Homo sapien
tctacaggaccacttaccagggagg

SEQ ID NO: 4475792 - DNA, 25 bp, Homo sapien
tcctatagtaccaacagagtggcct

SEQ ID NO: 4475793 - DNA, 25 bp, Homo sapien
ttctactatgaaacaaagcgtcgca

SEQ ID NO: 4475794 - DNA, 25 bp, Homo sapien
gaattaagtccatctcaacagcact

SEQ ID NO: 4475795 - DNA, 25 bp, Homo sapien
tatttagggacccactaacctcaga

SEQ ID NO: 4475796 - DNA, 25 bp, Homo sapien
gctgcagcccgcctgtcctttgcat

SEQ ID NO: 4475797 - DNA, 25 bp, Homo sapien
tttgctgctgcagcccgcctgtcct

SEQ ID NO: 4475798 - DNA, 25 bp, Homo sapien
cgcctgtcctttgcatcactgaatt

SEQ ID NO: 4475799 - DNA, 25 bp, Homo sapien
cagcccgcctgtcctttgcatcact

SEQ ID NO: 4475800 - DNA, 25 bp, Homo sapien
cacttttcagccaatactagaatga

SEQ ID NO: 4475801 - DNA, 25 bp, Homo sapien
catccctatagcactcacttttcag

SEQ ID NO: 4475802 - DNA, 25 bp, Homo sapien
aatgctattgcccttccatcctaac

SEQ ID NO: 4475803 - DNA, 25 bp, Homo sapien
caagtgtttgcaacgtatgattaag

SEQ ID NO: 4475804 - DNA, 25 bp, Homo sapien
ccaacaataggaaaactgataaatt

SEQ ID NO: 4475805 - DNA, 25 bp, Homo sapien
gagtgaattagatgtccaacaatag

SEQ ID NO: 4475806 - DNA, 25 bp, Homo sapien
taaatctatagtgtactgctaaagg

SEQ ID NO: 4475807 - DNA, 25 bp, Homo sapien
tagcaacttgcagaataaggtagaa

SEQ ID NO: 4475808 - DNA, 25 bp, Homo sapien
tatcagcaagggtatacagaaaatg

SEQ ID NO: 4475809 - DNA, 25 bp, Homo sapien
tatacagaaaatggtagttcacaca

SEQ ID NO: 4475810 - DNA, 25 bp, Homo sapien
caccacgccagaccaagattcttaa

SEQ ID NO: 4475811 - DNA, 25 bp, Homo sapien
gattcttaatagttatcagcaaggg

SEQ ID NO: 4475812 - DNA, 25 bp, Homo sapien
ttatacattaaataccattactggc

SEQ ID NO: 4475813 - DNA, 25 bp, Homo sapien
aataccattactggctgggctcagt

SEQ ID NO: 4475814 - DNA, 25 bp, Homo sapien
taaataccattactggctgggctca

SEQ ID NO: 4475815 - DNA, 25 bp, Homo sapien
cattaaataccattactggctgggc

SEQ ID NO: 4475816 - DNA, 25 bp, Homo sapien
tttgccctcactagtggagggcggc

SEQ ID NO: 4475817 - DNA, 25 bp, Homo sapien
aggcaaggagcctactgagctggta

SEQ ID NO: 4475818 - DNA, 25 bp, Homo sapien
taaataaaggctatcacactggccc

SEQ ID NO: 4475819 - DNA, 25 bp, Homo sapien
gtaacacaccgctgtccacagacgg

SEQ ID NO: 4475820 - DNA, 25 bp, Homo sapien
gaacagaccctcaagtgttcctgag

SEQ ID NO: 4475821 - DNA, 25 bp, Homo sapien
tgaggagcactgatataagctacag

SEQ ID NO: 4475822 - DNA, 25 bp, Homo sapien
tacaggaagtaatgctcttgagagc

SEQ ID NO: 4475823 - DNA, 25 bp, Homo sapien
tgagaaatgtagaatcccaggtccc

SEQ ID NO: 4475824 - DNA, 25 bp, Homo sapien
gctactgagtagtgcacaatattcc

SEQ ID NO: 4475825 - DNA, 25 bp, Homo sapien
gaaatacccattataggaacctgct

SEQ ID NO: 4475826 - DNA, 25 bp, Homo sapien
tgagatggcaactttggtcaaacct

SEQ ID NO: 4475827 - DNA, 25 bp, Homo sapien
caacggcaagagaaacaggtcataa

SEQ ID NO: 4475828 - DNA, 25 bp, Homo sapien
gaattaaacaggttagaggcaccac

SEQ ID NO: 4475829 - DNA, 25 bp, Homo sapien
caaatgagctgcttatgggtccaaa

SEQ ID NO: 4475830 - DNA, 25 bp, Homo sapien
catgggctcatgtttgcataaaatc

SEQ ID NO: 4475831 - DNA, 25 bp, Homo sapien
gattttcctacagaagcatgggctc

SEQ ID NO: 4475832 - DNA, 25 bp, Homo sapien
ggctccgaaaaagtacatctgtaga

SEQ ID NO: 4475833 - DNA, 25 bp, Homo sapien
ggtccccagatgatcctaacatgca

SEQ ID NO: 4475834 - DNA, 25 bp, Homo sapien
tatgtcaactgtcctagctgaagct

SEQ ID NO: 4475835 - DNA, 25 bp, Homo sapien
ggctacatataagaatctcctgagg

SEQ ID NO: 4475836 - DNA, 25 bp, Homo sapien
gacccaaatgtaaatcagactgtaa

SEQ ID NO: 4475837 - DNA, 25 bp, Homo sapien
tagtactggaataattaagatgtac

SEQ ID NO: 4475838 - DNA, 25 bp, Homo sapien
aaaattaataatggatcagacccaa

SEQ ID NO: 4475839 - DNA, 25 bp, Homo sapien
attaataatggatcagacccaaatg

SEQ ID NO: 4475840 - DNA, 25 bp, Homo sapien
ttactatagtaaatccggcgctgtc

SEQ ID NO: 4475841 - DNA, 25 bp, Homo sapien
atccggcgctgtcttaattgcaaaa

SEQ ID NO: 4475842 - DNA, 25 bp, Homo sapien
cacccaaatttccatccctagagtt

SEQ ID NO: 4475843 - DNA, 25 bp, Homo sapien
ggacatttagtgaactcctaggttg

SEQ ID NO: 4475844 - DNA, 25 bp, Homo sapien
cccaattgaagtggctaaggagtat

SEQ ID NO: 4475845 - DNA, 25 bp, Homo sapien
ttctctttatcccaattgaagtggc

SEQ ID NO: 4475846 - DNA, 25 bp, Homo sapien
gagtattcttgtgatagttgctgga

SEQ ID NO: 4475847 - DNA, 25 bp, Homo sapien
aagtggctaaggagtattcttgtga

SEQ ID NO: 4475848 - DNA, 25 bp, Homo sapien
cactaagactgaactccctaacatt

SEQ ID NO: 4475849 - DNA, 25 bp, Homo sapien
gtcactagttgcacactgggttgtc

SEQ ID NO: 4475850 - DNA, 25 bp, Homo sapien
cttgtaaattcggttcaataggctt

SEQ ID NO: 4475851 - DNA, 25 bp, Homo sapien
tgttacttctaagtacaaagctgac

SEQ ID NO: 4475852 - DNA, 25 bp, Homo sapien
ccaaaaatatgaattgtcagactta

SEQ ID NO: 4475853 - DNA, 25 bp, Homo sapien
tattaagagtttctattataggact

SEQ ID NO: 4475854 - DNA, 25 bp, Homo sapien
taggacttaaagtttgtcacatgtg

SEQ ID NO: 4475855 - DNA, 25 bp, Homo sapien
tagaagacatggaaagagatcccca

SEQ ID NO: 4475856 - DNA, 25 bp, Homo sapien
tacgactataaagcagaatggatgc

SEQ ID NO: 4475857 - DNA, 25 bp, Homo sapien
caaagatgagtacagtcactggcac

SEQ ID NO: 4475858 - DNA, 25 bp, Homo sapien
ccatggtgcgcagcccagtttttta

SEQ ID NO: 4475859 - DNA, 25 bp, Homo sapien
taagactgtaaattgccctggacct

SEQ ID NO: 4475860 - DNA, 25 bp, Homo sapien
gaaaacctataaatggctggattta

SEQ ID NO: 4475861 - DNA, 25 bp, Homo sapien
gatttacattcatgtcataacttca

SEQ ID NO: 4475862 - DNA, 25 bp, Homo sapien
aaaagtagctccattgttgatgctg

SEQ ID NO: 4475863 - DNA, 25 bp, Homo sapien
tactaccatactatcaactgaaatg

SEQ ID NO: 4475864 - DNA, 25 bp, Homo sapien
tgatcttaacagaagttgacatgga

SEQ ID NO: 4475865 - DNA, 25 bp, Homo sapien
gagacctctaagcttattacttgag

SEQ ID NO: 4475866 - DNA, 25 bp, Homo sapien
catcaaagtgtcaacgttatcagtc

SEQ ID NO: 4475867 - DNA, 25 bp, Homo sapien
aaaatcttacggcttcttgatccct

SEQ ID NO: 4475868 - DNA, 25 bp, Homo sapien
ggattaaggaactaaccacagtgaa

SEQ ID NO: 4475869 - DNA, 25 bp, Homo sapien
taagataactctttctaggctcgaa

SEQ ID NO: 4475870 - DNA, 25 bp, Homo sapien
taatactacttccaagtggcagcac

SEQ ID NO: 4475871 - DNA, 25 bp, Homo sapien
ggctcgaattcgcaaaaccataaca

SEQ ID NO: 4475872 - DNA, 25 bp, Homo sapien
taaactatcagagctcaatcctcct

SEQ ID NO: 4475873 - DNA, 25 bp, Homo sapien
gcagtttatgggtatcggattgcaa

SEQ ID NO: 4475874 - DNA, 25 bp, Homo sapien
gctataagcctgagagggagtaaaa

SEQ ID NO: 4475875 - DNA, 25 bp, Homo sapien
tgttttaacactcacatatggcagt

SEQ ID NO: 4475876 - DNA, 25 bp, Homo sapien
gctaatgcttcttcttgaatcctga

SEQ ID NO: 4475877 - DNA, 25 bp, Homo sapien
gaccaacaactattggagaagtact

SEQ ID NO: 4475878 - DNA, 25 bp, Homo sapien
ggcatcactgccattcgaatattta

SEQ ID NO: 4475879 - DNA, 25 bp, Homo sapien
gaatcctgagtgactgtggcatcac

SEQ ID NO: 4475880 - DNA, 25 bp, Homo sapien
agtttgctggcttctatgtaaatca

SEQ ID NO: 4475881 - DNA, 25 bp, Homo sapien
ctgggcactatctggaagttccttc

SEQ ID NO: 4475882 - DNA, 25 bp, Homo sapien
gcactatctggaagttccttcagtt

SEQ ID NO: 4475883 - DNA, 25 bp, Homo sapien
tcagtttgctggcttctatgtaaat

SEQ ID NO: 4475884 - DNA, 25 bp, Homo sapien
ttaccagttgctacttacttctttg

SEQ ID NO: 4475885 - DNA, 25 bp, Homo sapien
gaatatgtttggtttgcatccagtc

SEQ ID NO: 4475886 - DNA, 25 bp, Homo sapien
tcaacatggtttgaagttctacaaa

SEQ ID NO: 4475887 - DNA, 25 bp, Homo sapien
cctcaagatcctttagttgttaaga

SEQ ID NO: 4475888 - DNA, 25 bp, Homo sapien
agatcctctcgcctcaccttcttga

SEQ ID NO: 4475889 - DNA, 25 bp, Homo sapien
gtataggtgggactatacgtgcaca

SEQ ID NO: 4475890 - DNA, 25 bp, Homo sapien
tcgcctcaccttcttgagtataggt

SEQ ID NO: 4475891 - DNA, 25 bp, Homo sapien
caccttcttgagtataggtgggact

SEQ ID NO: 4475892 - DNA, 25 bp, Homo sapien
catgcctgctagactgctggctcct

SEQ ID NO: 4475893 - DNA, 25 bp, Homo sapien
cttgcatgcctgctagactgctggc

SEQ ID NO: 4475894 - DNA, 25 bp, Homo sapien
gggcttgcatgcctgctagactgct

SEQ ID NO: 4475895 - DNA, 25 bp, Homo sapien
gcatgcctgctagactgctggctcc

SEQ ID NO: 4475896 - DNA, 25 bp, Homo sapien
taactgaatcttgggaaattaagct

SEQ ID NO: 4475897 - DNA, 25 bp, Homo sapien
gctattagtattttaacagtactgc

SEQ ID NO: 4475898 - DNA, 25 bp, Homo sapien
ttaacagtactgcaactaaaactta

SEQ ID NO: 4475899 - DNA, 25 bp, Homo sapien
tgtgctgttgctggggtacctatga

SEQ ID NO: 4475900 - DNA, 25 bp, Homo sapien
gacaaggcatatcctgtgctgatga

SEQ ID NO: 4475901 - DNA, 25 bp, Homo sapien
gaccttgtattcatctggcgtgttc

SEQ ID NO: 4475902 - DNA, 25 bp, Homo sapien
tcaagtagcagatctgacaaggcat

SEQ ID NO: 4475903 - DNA, 25 bp, Homo sapien
tggattaattacatgacactcagca

SEQ ID NO: 4475904 - DNA, 25 bp, Homo sapien
tccgatcaagagagtacacgaaaaa

SEQ ID NO: 4475905 - DNA, 25 bp, Homo sapien
tcacaaatacatccgatcaagagag

SEQ ID NO: 4475906 - DNA, 25 bp, Homo sapien
aatacatccgatcaagagagtacac

SEQ ID NO: 4475907 - DNA, 25 bp, Homo sapien
tcaagagagtacacgaaaaatacat

SEQ ID NO: 4475908 - DNA, 25 bp, Homo sapien
ccatgccttcttccattattttggt

SEQ ID NO: 4475909 - DNA, 25 bp, Homo sapien
tgccttcttccattattttggtagt

SEQ ID NO: 4475910 - DNA, 25 bp, Homo sapien
ttttggtagttaaatattcactcca

SEQ ID NO: 4475911 - DNA, 25 bp, Homo sapien
ttggtagttaaatattcactccagc

SEQ ID NO: 4475912 - DNA, 25 bp, Homo sapien
cactaagatatcacaaccatgagca

SEQ ID NO: 4475913 - DNA, 25 bp, Homo sapien
gtcatccactaagatatcacaacca

SEQ ID NO: 4475914 - DNA, 25 bp, Homo sapien
ctaagatatcacaaccatgagcagg

SEQ ID NO: 4475915 - DNA, 25 bp, Homo sapien
tccactaagatatcacaaccatgag

SEQ ID NO: 4475916 - DNA, 25 bp, Homo sapien
tagaataggctaatccacaaagaca

SEQ ID NO: 4475917 - DNA, 25 bp, Homo sapien
ggaaatgtccatataatggaaccat

SEQ ID NO: 4475918 - DNA, 25 bp, Homo sapien
aaaggcaacatattacatgattccc

SEQ ID NO: 4475919 - DNA, 25 bp, Homo sapien
acatagcattaccacaagacccagg

SEQ ID NO: 4475920 - DNA, 25 bp, Homo sapien
aaatgctgatactttaatttaactt

SEQ ID NO: 4475921 - DNA, 25 bp, Homo sapien
aacttttgaatctgtgatcaggcgc

SEQ ID NO: 4475922 - DNA, 25 bp, Homo sapien
aatgctgatactttaatttaacttt

SEQ ID NO: 4475923 - DNA, 25 bp, Homo sapien
tgctgatactttaatttaacttttg

SEQ ID NO: 4475924 - DNA, 25 bp, Homo sapien
gggctgaaaaactcctctgtaacaa

SEQ ID NO: 4475925 - DNA, 25 bp, Homo sapien
gctacagaatagttcaagataggct

SEQ ID NO: 4475926 - DNA, 25 bp, Homo sapien
gaccaagttactgatgttgtcatac

SEQ ID NO: 4475927 - DNA, 25 bp, Homo sapien
tcaaggaaggtgtttagaagctaca

SEQ ID NO: 4475928 - DNA, 25 bp, Homo sapien
gcaggacaccactttaacagtcgat

SEQ ID NO: 4475929 - DNA, 25 bp, Homo sapien
tggggcaggacaccactttaacagt

SEQ ID NO: 4475930 - DNA, 25 bp, Homo sapien
gggcaggacaccactttaacagtcg

SEQ ID NO: 4475931 - DNA, 25 bp, Homo sapien
gacaccactttaacagtcgattgca

SEQ ID NO: 4475932 - DNA, 25 bp, Homo sapien
aaaattggcgcccacatttgcagcg

SEQ ID NO: 4475933 - DNA, 25 bp, Homo sapien
catttgcagcgaacaggtttagcat

SEQ ID NO: 4475934 - DNA, 25 bp, Homo sapien
ggcgcccacatttgcagcgaacagg

SEQ ID NO: 4475935 - DNA, 25 bp, Homo sapien
gcccacatttgcagcgaacaggttt

SEQ ID NO: 4475936 - DNA, 25 bp, Homo sapien
tttaacaggatcatgccaattttct

SEQ ID NO: 4475937 - DNA, 25 bp, Homo sapien
atttaacaggatcatgccaattttc

SEQ ID NO: 4475938 - DNA, 25 bp, Homo sapien
ctgcaatccaattggaggtttcact

SEQ ID NO: 4475939 - DNA, 25 bp, Homo sapien
tccaattggaggtttcactgtcatc

SEQ ID NO: 4475940 - DNA, 25 bp, Homo sapien
aattggaggtttcactgtcatcatc

SEQ ID NO: 4475941 - DNA, 25 bp, Homo sapien
caatccaattggaggtttcactgtc

SEQ ID NO: 4475942 - DNA, 25 bp, Homo sapien
gcctgtaagtaggtcacctcattgc

SEQ ID NO: 4475943 - DNA, 25 bp, Homo sapien
agagaactgtggatgctgtactaca

SEQ ID NO: 4475944 - DNA, 25 bp, Homo sapien
taacaggcaaacattctgggaaaaa

SEQ ID NO: 4475945 - DNA, 25 bp, Homo sapien
aaggaaataacaggcaaacattctg

SEQ ID NO: 4475946 - DNA, 25 bp, Homo sapien
tcccaaggagggatcacccactata

SEQ ID NO: 4475947 - DNA, 25 bp, Homo sapien
cctccaaaatgttaggatatcactg

SEQ ID NO: 4475948 - DNA, 25 bp, Homo sapien
ctttgtgaaattgactatgctgccc

SEQ ID NO: 4475949 - DNA, 25 bp, Homo sapien
tatgcatatctgtttagggagctaa

SEQ ID NO: 4475950 - DNA, 25 bp, Homo sapien
tggtgtcaatgctacactaggttgc

SEQ ID NO: 4475951 - DNA, 25 bp, Homo sapien
tattcagaggcccaatcataggtca

SEQ ID NO: 4475952 - DNA, 25 bp, Homo sapien
tataaagaagctagtccaaggtcac

SEQ ID NO: 4475953 - DNA, 25 bp, Homo sapien
taacaagtatgctacagagatcgtg

SEQ ID NO: 4475954 - DNA, 25 bp, Homo sapien
tgctttacaattctggttacgacag

SEQ ID NO: 4475955 - DNA, 25 bp, Homo sapien
tccttctcaattgtgacatggcatt

SEQ ID NO: 4475956 - DNA, 25 bp, Homo sapien
tgtgattacaaccaccatccttctc

SEQ ID NO: 4475957 - DNA, 25 bp, Homo sapien
tctggttacgacagaccatgtgatt

SEQ ID NO: 4475958 - DNA, 25 bp, Homo sapien
atgaggtagaaatgttattcataat

SEQ ID NO: 4475959 - DNA, 25 bp, Homo sapien
cataatacatggcacatacttatgt

SEQ ID NO: 4475960 - DNA, 25 bp, Homo sapien
tcataatacatggcacatacttatg

SEQ ID NO: 4475961 - DNA, 25 bp, Homo sapien
tatgaggtagaaatgttattcataa

SEQ ID NO: 4475962 - DNA, 25 bp, Homo sapien
cctttgcatcatcctcattatagcg

SEQ ID NO: 4475963 - DNA, 25 bp, Homo sapien
tgtgcatctcttgctgcctttgcat

SEQ ID NO: 4475964 - DNA, 25 bp, Homo sapien
gcatcatcctcattatagcggttac

SEQ ID NO: 4475965 - DNA, 25 bp, Homo sapien
ctcattatagcggttacagttgtac

SEQ ID NO: 4475966 - DNA, 25 bp, Homo sapien
tcagaaagggattctaccggcatcc

SEQ ID NO: 4475967 - DNA, 25 bp, Homo sapien
gcatccaaataaagaccaggtgagg

SEQ ID NO: 4475968 - DNA, 25 bp, Homo sapien
ccaggtgaggtcaaggataaaccac

SEQ ID NO: 4475969 - DNA, 25 bp, Homo sapien
taaatgctaggccaagagcttggga

SEQ ID NO: 4475970 - DNA, 25 bp, Homo sapien
cctagtctagaggacaagaagattc

SEQ ID NO: 4475971 - DNA, 25 bp, Homo sapien
cagaggcagagttgagccgtcacaa

SEQ ID NO: 4475972 - DNA, 25 bp, Homo sapien
tcacaacagagattatgtagtacgc

SEQ ID NO: 4475973 - DNA, 25 bp, Homo sapien
aaatatccacaactgtcggcactgt

SEQ ID NO: 4475974 - DNA, 25 bp, Homo sapien
gggtatacaaactctggcctgcatg

SEQ ID NO: 4475975 - DNA, 25 bp, Homo sapien
caaatgccagaatctggaatgagaa

SEQ ID NO: 4475976 - DNA, 25 bp, Homo sapien
agccactgagcctgatcaagacaaa

SEQ ID NO: 4475977 - DNA, 25 bp, Homo sapien
gaaatgtaatcagcgacctgaaagc

SEQ ID NO: 4475978 - DNA, 25 bp, Homo sapien
tcaagagtcaggtaagtatcaaacc

SEQ ID NO: 4475979 - DNA, 25 bp, Homo sapien
cacagccatgttatttcaagagtca

SEQ ID NO: 4475980 - DNA, 25 bp, Homo sapien
agttccagctaatgcagaggttgag

SEQ ID NO: 4475981 - DNA, 25 bp, Homo sapien
caaaccaatgcttatgaacaggaaa

SEQ ID NO: 4475982 - DNA, 25 bp, Homo sapien
tgtggattttccattgcggaggtag

SEQ ID NO: 4475983 - DNA, 25 bp, Homo sapien
cataaatctctagagggaatggact

SEQ ID NO: 4475984 - DNA, 25 bp, Homo sapien
tcagtaggctattaaaacaggtaag

SEQ ID NO: 4475985 - DNA, 25 bp, Homo sapien
tatgaggcctctaccattataccat

SEQ ID NO: 4475986 - DNA, 25 bp, Homo sapien
tgcatctcctgaatcccattcgact

SEQ ID NO: 4475987 - DNA, 25 bp, Homo sapien
cctgagatatagcaaaaccaagccc

SEQ ID NO: 4475988 - DNA, 25 bp, Homo sapien
tcccattcgacttcctctacctctg

SEQ ID NO: 4475989 - DNA, 25 bp, Homo sapien
atgaaaatgcaaaacggttcgtaag

SEQ ID NO: 4475990 - DNA, 25 bp, Homo sapien
agttcctcatcgctcaatagtcaca

SEQ ID NO: 4475991 - DNA, 25 bp, Homo sapien
cagtactgtgatctaggctaaaatc

SEQ ID NO: 4475992 - DNA, 25 bp, Homo sapien
ggcactgttctacagtatgccacaa

SEQ ID NO: 4475993 - DNA, 25 bp, Homo sapien
gaaaactacagtggcaactacatac

SEQ ID NO: 4475994 - DNA, 25 bp, Homo sapien
cacacacgagtactcagcctcaaaa

SEQ ID NO: 4475995 - DNA, 25 bp, Homo sapien
ggagactcttgatacactgttgatg

SEQ ID NO: 4475996 - DNA, 25 bp, Homo sapien
cagtatgtcaaaggtatctctgtac

SEQ ID NO: 4475997 - DNA, 25 bp, Homo sapien
aagaaaacgtcatgtatgtacacac

SEQ ID NO: 4475998 - DNA, 25 bp, Homo sapien
aaattgggtgatataattataacac

SEQ ID NO: 4475999 - DNA, 25 bp, Homo sapien
aaaattgggtgatataattataaca

SEQ ID NO: 4476000 - DNA, 25 bp, Homo sapien
cgacactggcagaggacatcaactg

SEQ ID NO: 4476001 - DNA, 25 bp, Homo sapien
tatagtttgtgctcaaagcgcaggc

SEQ ID NO: 4476002 - DNA, 25 bp, Homo sapien
tacagtagaacaggtacctctgcag

SEQ ID NO: 4476003 - DNA, 25 bp, Homo sapien
taagtgtacatgagtgtggcacgac

SEQ ID NO: 4476004 - DNA, 25 bp, Homo sapien
ggaatcttctcgttctgagagctgc

SEQ ID NO: 4476005 - DNA, 25 bp, Homo sapien
ttaactgcacctgtaaagctctatg

SEQ ID NO: 4476006 - DNA, 25 bp, Homo sapien
tgttacccaactgaagtcccatctg

SEQ ID NO: 4476007 - DNA, 25 bp, Homo sapien
gttttgttgactacagactgctctc

SEQ ID NO: 4476008 - DNA, 25 bp, Homo sapien
tttatatcctgcagagaatcttggg

SEQ ID NO: 4476009 - DNA, 25 bp, Homo sapien
gaatcttgggaaatatctcgttcaa

SEQ ID NO: 4476010 - DNA, 25 bp, Homo sapien
ggcattctctagatctgcttggtta

SEQ ID NO: 4476011 - DNA, 25 bp, Homo sapien
tcaaggtagcccgagagcacctctg

SEQ ID NO: 4476012 - DNA, 25 bp, Homo sapien
acaaaacccttcgtcgactctcaca

SEQ ID NO: 4476013 - DNA, 25 bp, Homo sapien
aaaacccttcgtcgactctcacagt

SEQ ID NO: 4476014 - DNA, 25 bp, Homo sapien
taacaaaacccttcgtcgactctca

SEQ ID NO: 4476015 - DNA, 25 bp, Homo sapien
aacccttcgtcgactctcacagtat

SEQ ID NO: 4476016 - DNA, 25 bp, Homo sapien
tcaatgtactcccacagatcttttt

SEQ ID NO: 4476017 - DNA, 25 bp, Homo sapien
cctcaatgtactcccacagatcttt

SEQ ID NO: 4476018 - DNA, 25 bp, Homo sapien
aatgtactcccacagatctttttca

SEQ ID NO: 4476019 - DNA, 25 bp, Homo sapien
ctttttcatagccttcatgcacatg

SEQ ID NO: 4476020 - DNA, 25 bp, Homo sapien
attgcatgagcactctagatggtaa

SEQ ID NO: 4476021 - DNA, 25 bp, Homo sapien
tttaattgcatgagcactctagatg

SEQ ID NO: 4476022 - DNA, 25 bp, Homo sapien
taattgcatgagcactctagatggt

SEQ ID NO: 4476023 - DNA, 25 bp, Homo sapien
ttgttttaattgcatgagcactcta

SEQ ID NO: 4476024 - DNA, 25 bp, Homo sapien
agtggtgtcagaataggcttagtgc

SEQ ID NO: 4476025 - DNA, 25 bp, Homo sapien
gaataggcttagtgcctccttgttt

SEQ ID NO: 4476026 - DNA, 25 bp, Homo sapien
tggtactacagaccagtggtgtcag

SEQ ID NO: 4476027 - DNA, 25 bp, Homo sapien
caaaacaattctggtactacagacc

SEQ ID NO: 4476028 - DNA, 25 bp, Homo sapien
taggtcttccagaggtgctaaaccg

SEQ ID NO: 4476029 - DNA, 25 bp, Homo sapien
tacagctgtgtgcataacatgggca

SEQ ID NO: 4476030 - DNA, 25 bp, Homo sapien
tcatggcttgcctatcccagctggg

SEQ ID NO: 4476031 - DNA, 25 bp, Homo sapien
tgagctgtagcaacaaaactccctg

SEQ ID NO: 4476032 - DNA, 25 bp, Homo sapien
tcttctactaaatttcagttcctaa

SEQ ID NO: 4476033 - DNA, 25 bp, Homo sapien
cagcatagggtgctctatgcacaaa

SEQ ID NO: 4476034 - DNA, 25 bp, Homo sapien
ttacagggttaggagcatttaatca

SEQ ID NO: 4476035 - DNA, 25 bp, Homo sapien
tctgggcaacctgaacagtccagtt

SEQ ID NO: 4476036 - DNA, 25 bp, Homo sapien
ggacttggccagagtatcaatgaca

SEQ ID NO: 4476037 - DNA, 25 bp, Homo sapien
ccttccctggtacagaatactaggt

SEQ ID NO: 4476038 - DNA, 25 bp, Homo sapien
caaacgatcttcaactttgggacct

SEQ ID NO: 4476039 - DNA, 25 bp, Homo sapien
cacataatacgggtggctattagcc

SEQ ID NO: 4476040 - DNA, 25 bp, Homo sapien
cagtgaggccctattctgagccagt

SEQ ID NO: 4476041 - DNA, 25 bp, Homo sapien
tcctggattacttgagacccctgaa

SEQ ID NO: 4476042 - DNA, 25 bp, Homo sapien
gcattgttgcaagccaagactagta

SEQ ID NO: 4476043 - DNA, 25 bp, Homo sapien
taactggctcctaccctgaaaatag

SEQ ID NO: 4476044 - DNA, 25 bp, Homo sapien
tgtgcagacttgacgcaactagctt

SEQ ID NO: 4476045 - DNA, 25 bp, Homo sapien
ccccttggtaagagaatgtactgcc

SEQ ID NO: 4476046 - DNA, 25 bp, Homo sapien
taagtgctcgtggaattgtgcagac

SEQ ID NO: 4476047 - DNA, 25 bp, Homo sapien
tagggctgcttggaagatacagaca

SEQ ID NO: 4476048 - DNA, 25 bp, Homo sapien
tgaggtcaccaacgaaagaggcatc

SEQ ID NO: 4476049 - DNA, 25 bp, Homo sapien
agtacacatagcaaggaagtctccc

SEQ ID NO: 4476050 - DNA, 25 bp, Homo sapien
cactgaactggcttatagggcacta

SEQ ID NO: 4476051 - DNA, 25 bp, Homo sapien
taaggcactggcttgtacatggact

SEQ ID NO: 4476052 - DNA, 25 bp, Homo sapien
catacagtatgcgtgtctttaaagc

SEQ ID NO: 4476053 - DNA, 25 bp, Homo sapien
tgtgtaagaatatcgatagcatcct

SEQ ID NO: 4476054 - DNA, 25 bp, Homo sapien
taaatgttgacagacatgtgaagca

SEQ ID NO: 4476055 - DNA, 25 bp, Homo sapien
caagacaagtgaagatgtatatcca

SEQ ID NO: 4476056 - DNA, 25 bp, Homo sapien
taatcagggaaatgtaatgtaaatt

SEQ ID NO: 4476057 - DNA, 25 bp, Homo sapien
gacatgaaagacacttcttgaaaga

SEQ ID NO: 4476058 - DNA, 25 bp, Homo sapien
aagacacttcttgaaagatatacaa

SEQ ID NO: 4476059 - DNA, 25 bp, Homo sapien
aaagtgctcaactcattaatcaggg

SEQ ID NO: 4476060 - DNA, 25 bp, Homo sapien
tgaacacagctaacccagcacatct

SEQ ID NO: 4476061 - DNA, 25 bp, Homo sapien
tttatgacaatccaaagaatcgaca

SEQ ID NO: 4476062 - DNA, 25 bp, Homo sapien
gacaataaccaaagcgatcttgaaa

SEQ ID NO: 4476063 - DNA, 25 bp, Homo sapien
tttaaccaagctaccaagtcaatct

SEQ ID NO: 4476064 - DNA, 25 bp, Homo sapien
gagcctagcagttccagatcaatct

SEQ ID NO: 4476065 - DNA, 25 bp, Homo sapien
tctttgggctggtctgtgaaaaact

SEQ ID NO: 4476066 - DNA, 25 bp, Homo sapien
acaacaaaactgtccatgggctgga

SEQ ID NO: 4476067 - DNA, 25 bp, Homo sapien
gctaaaaacgcatctcacaaaattt

SEQ ID NO: 4476068 - DNA, 25 bp, Homo sapien
aaaaactgcagtagggccaggcgta

SEQ ID NO: 4476069 - DNA, 25 bp, Homo sapien
tactacgcctagtgacctgtaatcc

SEQ ID NO: 4476070 - DNA, 25 bp, Homo sapien
gaacaaccacacattacggaaagga

SEQ ID NO: 4476071 - DNA, 25 bp, Homo sapien
ccagaaacaaatgaggcctgagtac

SEQ ID NO: 4476072 - DNA, 25 bp, Homo sapien
aataaactcctacttctgaaattca

SEQ ID NO: 4476073 - DNA, 25 bp, Homo sapien
cactagtgatatgaacaaagtcaca

SEQ ID NO: 4476074 - DNA, 25 bp, Homo sapien
ataaactcctacttctgaaattcac

SEQ ID NO: 4476075 - DNA, 25 bp, Homo sapien
aggaagagatattgacacattttag

SEQ ID NO: 4476076 - DNA, 25 bp, Homo sapien
gaaaacacaaccaactggtaagata

SEQ ID NO: 4476077 - DNA, 25 bp, Homo sapien
ttaagatgggaaggtgttgcttttc

SEQ ID NO: 4476078 - DNA, 25 bp, Homo sapien
taactttgtattatccatgtacttt

SEQ ID NO: 4476079 - DNA, 25 bp, Homo sapien
gatgagtggtacagccaattactga

SEQ ID NO: 4476080 - DNA, 25 bp, Homo sapien
tcacttggactagtgtgatggcaaa

SEQ ID NO: 4476081 - DNA, 25 bp, Homo sapien
tgtaccagggcctttttcaataaga

SEQ ID NO: 4476082 - DNA, 25 bp, Homo sapien
taggttggatactatggttcacacc

SEQ ID NO: 4476083 - DNA, 25 bp, Homo sapien
catacaaaggtattcaatgcagcat

SEQ ID NO: 4476084 - DNA, 25 bp, Homo sapien
aacttccattgagagcagtttggca

SEQ ID NO: 4476085 - DNA, 25 bp, Homo sapien
tatatggcgcatgaaaaagaaagag

SEQ ID NO: 4476086 - DNA, 25 bp, Homo sapien
tgcctaaaaccaacctagatagagg

SEQ ID NO: 4476087 - DNA, 25 bp, Homo sapien
tccgatcccctgcgagtatgtcttt

SEQ ID NO: 4476088 - DNA, 25 bp, Homo sapien
cccctgcgagtatgtctttcccacc

SEQ ID NO: 4476089 - DNA, 25 bp, Homo sapien
atcccctgcgagtatgtctttccca

SEQ ID NO: 4476090 - DNA, 25 bp, Homo sapien
cgatcccctgcgagtatgtctttcc

SEQ ID NO: 4476091 - DNA, 25 bp, Homo sapien
aggtagctgtgcaactgagtcagag

SEQ ID NO: 4476092 - DNA, 25 bp, Homo sapien
agtcagaggagggataaccagggcc

SEQ ID NO: 4476093 - DNA, 25 bp, Homo sapien
gagtcagaggagggataaccagggc

SEQ ID NO: 4476094 - DNA, 25 bp, Homo sapien
ccaggtagctgtgcaactgagtcag

SEQ ID NO: 4476095 - DNA, 25 bp, Homo sapien
gtggtagagctccagacctccactt

SEQ ID NO: 4476096 - DNA, 25 bp, Homo sapien
acatgggcgatgaatgtggtagagc

SEQ ID NO: 4476097 - DNA, 25 bp, Homo sapien
gaatgtggtagagctccagacctcc

SEQ ID NO: 4476098 - DNA, 25 bp, Homo sapien
caggacatgggcgatgaatgtggta

SEQ ID NO: 4476099 - DNA, 25 bp, Homo sapien
ggagtagttaaggttggacaccagc

SEQ ID NO: 4476100 - DNA, 25 bp, Homo sapien
acaccagcaccttcggaatgtcctg

SEQ ID NO: 4476101 - DNA, 25 bp, Homo sapien
ccattggagtagttaaggttggaca

SEQ ID NO: 4476102 - DNA, 25 bp, Homo sapien
ttggagtagttaaggttggacacca

SEQ ID NO: 4476103 - DNA, 25 bp, Homo sapien
ttccacttgtccagtcgaggagtgc

SEQ ID NO: 4476104 - DNA, 25 bp, Homo sapien
tccacttgtccagtcgaggagtgct

SEQ ID NO: 4476105 - DNA, 25 bp, Homo sapien
ccacttgtccagtcgaggagtgcta

SEQ ID NO: 4476106 - DNA, 25 bp, Homo sapien
cacttgtccagtcgaggagtgctac

SEQ ID NO: 4476107 - DNA, 25 bp, Homo sapien
gcagatgatgcaggggtaataaaaa

SEQ ID NO: 4476108 - DNA, 25 bp, Homo sapien
gaggtagagagaacaatcattaggg

SEQ ID NO: 4476109 - DNA, 25 bp, Homo sapien
ctgcagggagaggtagagagaacaa

SEQ ID NO: 4476110 - DNA, 25 bp, Homo sapien
ggagaggtagagagaacaatcatta

SEQ ID NO: 4476111 - DNA, 25 bp, Homo sapien
tgcagggagaggtagagagaacaat

SEQ ID NO: 4476112 - DNA, 25 bp, Homo sapien
ttgactgattgttgcagagctcaag

SEQ ID NO: 4476113 - DNA, 25 bp, Homo sapien
gactgattgttgcagagctcaagtc

SEQ ID NO: 4476114 - DNA, 25 bp, Homo sapien
agttgactgattgttgcagagctca

SEQ ID NO: 4476115 - DNA, 25 bp, Homo sapien
gagttgactgattgttgcagagctc

SEQ ID NO: 4476116 - DNA, 25 bp, Homo sapien
cccaaacccagcatttatgtcgtga

SEQ ID NO: 4476117 - DNA, 25 bp, Homo sapien
catttatgtcgtgagcaaagaaaga

SEQ ID NO: 4476118 - DNA, 25 bp, Homo sapien
ccagcatttatgtcgtgagcaaaga

SEQ ID NO: 4476119 - DNA, 25 bp, Homo sapien
aacccagcatttatgtcgtgagcaa

SEQ ID NO: 4476120 - DNA, 25 bp, Homo sapien
gaatgccaccaatgccccaggacag

SEQ ID NO: 4476121 - DNA, 25 bp, Homo sapien
agaatgccaccaatgccccaggaca

SEQ ID NO: 4476122 - DNA, 25 bp, Homo sapien
aatgccaccaatgccccaggacagg

SEQ ID NO: 4476123 - DNA, 25 bp, Homo sapien
cagaatgccaccaatgccccaggac

SEQ ID NO: 4476124 - DNA, 25 bp, Homo sapien
gctttgtgtatttcattgttggttt

SEQ ID NO: 4476125 - DNA, 25 bp, Homo sapien
aactgctccatttgtgctttgtgta

SEQ ID NO: 4476126 - DNA, 25 bp, Homo sapien
gtgctttgtgtatttcattgttggt

SEQ ID NO: 4476127 - DNA, 25 bp, Homo sapien
tctaactgctccatttgtgctttgt

SEQ ID NO: 4476128 - DNA, 25 bp, Homo sapien
cgggcagcacgtttagtatggtaaa

SEQ ID NO: 4476129 - DNA, 25 bp, Homo sapien
cagcacgtttagtatggtaaagggt

SEQ ID NO: 4476130 - DNA, 25 bp, Homo sapien
tagtatggtaaagggtggtcttcaa

SEQ ID NO: 4476131 - DNA, 25 bp, Homo sapien
ttagtatggtaaagggtggtcttca

SEQ ID NO: 4476132 - DNA, 25 bp, Homo sapien
ggatgatggggtgcccagattccca

SEQ ID NO: 4476133 - DNA, 25 bp, Homo sapien
gttgaaggatgatggggtgcccaga

SEQ ID NO: 4476134 - DNA, 25 bp, Homo sapien
caaagtgccaggttgaaggatgatg

SEQ ID NO: 4476135 - DNA, 25 bp, Homo sapien
tcaaagtgccaggttgaaggatgat

SEQ ID NO: 4476136 - DNA, 25 bp, Homo sapien
ctgcaaggaatattgcaggtggctg

SEQ ID NO: 4476137 - DNA, 25 bp, Homo sapien
gagcccactccaactctccaataca

SEQ ID NO: 4476138 - DNA, 25 bp, Homo sapien
gagagcccactccaactctccaata

SEQ ID NO: 4476139 - DNA, 25 bp, Homo sapien
gctgctgcatggagacacagcacag

SEQ ID NO: 4476140 - DNA, 25 bp, Homo sapien
tcctgctgctgcatggagacacagc

SEQ ID NO: 4476141 - DNA, 25 bp, Homo sapien
gatggtggtgcagtcattccgcatg

SEQ ID NO: 4476142 - DNA, 25 bp, Homo sapien
gctgatggtggtgcagtcattccgc

SEQ ID NO: 4476143 - DNA, 25 bp, Homo sapien
ggtgcagtcattccgcatggtttgc

SEQ ID NO: 4476144 - DNA, 25 bp, Homo sapien
gtcattccgcatggtttgcatgtgt

SEQ ID NO: 4476145 - DNA, 25 bp, Homo sapien
gctcctggaagtcgtactgtggctc

SEQ ID NO: 4476146 - DNA, 25 bp, Homo sapien
tcgtactgtggctcgcccagctgct

SEQ ID NO: 4476147 - DNA, 25 bp, Homo sapien
aagtcgtactgtggctcgcccagct

SEQ ID NO: 4476148 - DNA, 25 bp, Homo sapien
tggaagtcgtactgtggctcgccca

SEQ ID NO: 4476149 - DNA, 25 bp, Homo sapien
gcagtgcgcccttgctctctttgtt

SEQ ID NO: 4476150 - DNA, 25 bp, Homo sapien
aactgcagtgcgcccttgctctctt

SEQ ID NO: 4476151 - DNA, 25 bp, Homo sapien
caactgcagtgcgcccttgctctct

SEQ ID NO: 4476152 - DNA, 25 bp, Homo sapien
ctgcagtgcgcccttgctctctttg

SEQ ID NO: 4476153 - DNA, 25 bp, Homo sapien
ctcccctgagtctcctgcagttttt

SEQ ID NO: 4476154 - DNA, 25 bp, Homo sapien
ccctcccctgagtctcctgcagttt

SEQ ID NO: 4476155 - DNA, 25 bp, Homo sapien
cctcccctgagtctcctgcagtttt

SEQ ID NO: 4476156 - DNA, 25 bp, Homo sapien
actgggcctctagctgctgtttctg

SEQ ID NO: 4476157 - DNA, 25 bp, Homo sapien
gaggctcaactgggcctctagctgc

SEQ ID NO: 4476158 - DNA, 25 bp, Homo sapien
gctggctggcagcttctaggcactc

SEQ ID NO: 4476159 - DNA, 25 bp, Homo sapien
ctgctggctggcagcttctaggcac

SEQ ID NO: 4476160 - DNA, 25 bp, Homo sapien
cactaccagtcagtgtgggagttct

SEQ ID NO: 4476161 - DNA, 25 bp, Homo sapien
gtcccactaccagtcagtgtgggag

SEQ ID NO: 4476162 - DNA, 25 bp, Homo sapien
cagacacccggtcggcataatgact

SEQ ID NO: 4476163 - DNA, 25 bp, Homo sapien
cacagtcccactaccagtcagtgtg

SEQ ID NO: 4476164 - DNA, 25 bp, Homo sapien
agcgtccccgggctacagctggaca

SEQ ID NO: 4476165 - DNA, 25 bp, Homo sapien
cagcgtccccgggctacagctggac

SEQ ID NO: 4476166 - DNA, 25 bp, Homo sapien
gcgtccccgggctacagctggacaa

SEQ ID NO: 4476167 - DNA, 25 bp, Homo sapien
gagttgatctactgcctgcttgaaa

SEQ ID NO: 4476168 - DNA, 25 bp, Homo sapien
gccactggaagatgtgctgcaacac

SEQ ID NO: 4476169 - DNA, 25 bp, Homo sapien
ttcccaacccaaagaaggccagagc

SEQ ID NO: 4476170 - DNA, 25 bp, Homo sapien
ttagagcattacatccagccaaact

SEQ ID NO: 4476171 - DNA, 25 bp, Homo sapien
gaggctggatcaagagggctctcct

SEQ ID NO: 4476172 - DNA, 25 bp, Homo sapien
catccattaggaaagtggcccttag

SEQ ID NO: 4476173 - DNA, 25 bp, Homo sapien
gcttggcgccctatgtgtgtacttg

SEQ ID NO: 4476174 - DNA, 25 bp, Homo sapien
gctgtagctactgggtcaatctgca

SEQ ID NO: 4476175 - DNA, 25 bp, Homo sapien
gtagcagtaacttcatgtgattccc

SEQ ID NO: 4476176 - DNA, 25 bp, Homo sapien
tgagcagcagtctccgtttcctcca

SEQ ID NO: 4476177 - DNA, 25 bp, Homo sapien
cagcaacctctataagatttctggg

SEQ ID NO: 4476178 - DNA, 25 bp, Homo sapien
cacacacattttagcagccctgagc

SEQ ID NO: 4476179 - DNA, 25 bp, Homo sapien
gccaggacttctcacgccacgcagc

SEQ ID NO: 4476180 - DNA, 25 bp, Homo sapien
taccctggtggattccaaggatgag

SEQ ID NO: 4476181 - DNA, 25 bp, Homo sapien
acttctcacgccacgcagcagctgg

SEQ ID NO: 4476182 - DNA, 25 bp, Homo sapien
ctgggggtaccaggataccctggtg

SEQ ID NO: 4476183 - DNA, 25 bp, Homo sapien
tatcattcgatgcagagacagcttc

SEQ ID NO: 4476184 - DNA, 25 bp, Homo sapien
ttccacctatcattcgatgcagaga

SEQ ID NO: 4476185 - DNA, 25 bp, Homo sapien
caccgggtatagaccaggctctcca

SEQ ID NO: 4476186 - DNA, 25 bp, Homo sapien
tgtagcagagcaccgggtatagacc

SEQ ID NO: 4476187 - DNA, 25 bp, Homo sapien
cctgatgtttgcccgcaccagtcaa

SEQ ID NO: 4476188 - DNA, 25 bp, Homo sapien
ctcctgatgtttgcccgcaccagtc

SEQ ID NO: 4476189 - DNA, 25 bp, Homo sapien
gatgtttgcccgcaccagtcaagtt

SEQ ID NO: 4476190 - DNA, 25 bp, Homo sapien
tttgcccgcaccagtcaagttccat

SEQ ID NO: 4476191 - DNA, 25 bp, Homo sapien
gcccagcatgggtgtggctgcccat

SEQ ID NO: 4476192 - DNA, 25 bp, Homo sapien
gggacacttgttttgcaatccagtc

SEQ ID NO: 4476193 - DNA, 25 bp, Homo sapien
gctgcccattggtcctctgaagaac

SEQ ID NO: 4476194 - DNA, 25 bp, Homo sapien
caggtgtatgtctgggcttggaagt

SEQ ID NO: 4476195 - DNA, 25 bp, Homo sapien
ataacgtgcggtcattgagagagag

SEQ ID NO: 4476196 - DNA, 25 bp, Homo sapien
aacgtgtaagaatggccacataata

SEQ ID NO: 4476197 - DNA, 25 bp, Homo sapien
cctcaggtctatacagaaacgtgta

SEQ ID NO: 4476198 - DNA, 25 bp, Homo sapien
tgagagagaggagcccatcagaaca

SEQ ID NO: 4476199 - DNA, 25 bp, Homo sapien
cacagggggcatgcaaagcatttcc

SEQ ID NO: 4476200 - DNA, 25 bp, Homo sapien
gtgttttctgagtactcggataaag

SEQ ID NO: 4476201 - DNA, 25 bp, Homo sapien
ggggcatgcaaagcatttccgtgtg

SEQ ID NO: 4476202 - DNA, 25 bp, Homo sapien
ttttctgagtactcggataaagacc

SEQ ID NO: 4476203 - DNA, 25 bp, Homo sapien
aatcctgccctggaaaaaaccagcg

SEQ ID NO: 4476204 - DNA, 25 bp, Homo sapien
gaatcctgccctggaaaaaaccagc

SEQ ID NO: 4476205 - DNA, 25 bp, Homo sapien
agaatcctgccctggaaaaaaccag

SEQ ID NO: 4476206 - DNA, 25 bp, Homo sapien
cggccagtgcagacaacctcaaccc

SEQ ID NO: 4476207 - DNA, 25 bp, Homo sapien
tgtgtttgcggagcggccagtgcag

SEQ ID NO: 4476208 - DNA, 25 bp, Homo sapien
gagagggatggcggtggacttttct

SEQ ID NO: 4476209 - DNA, 25 bp, Homo sapien
ttttctctaccagacctgctgccct

SEQ ID NO: 4476210 - DNA, 25 bp, Homo sapien
gctgatctctgccaggacccggtca

SEQ ID NO: 4476211 - DNA, 25 bp, Homo sapien
ctgatctctgccaggacccggtcag

SEQ ID NO: 4476212 - DNA, 25 bp, Homo sapien
tccacccagtgtagaccctgtgcac

SEQ ID NO: 4476213 - DNA, 25 bp, Homo sapien
acccagtgtagaccctgtgcactca

SEQ ID NO: 4476214 - DNA, 25 bp, Homo sapien
cacccagtgtagaccctgtgcactc

SEQ ID NO: 4476215 - DNA, 25 bp, Homo sapien
tcctccacccagtgtagaccctgtg

SEQ ID NO: 4476216 - DNA, 25 bp, Homo sapien
cagagcagctgcaacttcacagagg

SEQ ID NO: 4476217 - DNA, 25 bp, Homo sapien
agagcagctgcaacttcacagagga

SEQ ID NO: 4476218 - DNA, 25 bp, Homo sapien
tgcagagcagctgcaacttcacaga

SEQ ID NO: 4476219 - DNA, 25 bp, Homo sapien
gctgcagagcagctgcaacttcaca

SEQ ID NO: 4476220 - DNA, 25 bp, Homo sapien
ttccctgtcccagcagctcctttag

SEQ ID NO: 4476221 - DNA, 25 bp, Homo sapien
aattccctgtcccagcagctccttt

SEQ ID NO: 4476222 - DNA, 25 bp, Homo sapien
tccctgtcccagcagctcctttagt

SEQ ID NO: 4476223 - DNA, 25 bp, Homo sapien
atcaattccctgtcccagcagctcc

SEQ ID NO: 4476224 - DNA, 25 bp, Homo sapien
gggcctagtgcagagtttcagggca

SEQ ID NO: 4476225 - DNA, 25 bp, Homo sapien
aatggggtgctggatcttgtactca

SEQ ID NO: 4476226 - DNA, 25 bp, Homo sapien
gacaatggggtgctggatcttgtac

SEQ ID NO: 4476227 - DNA, 25 bp, Homo sapien
cctagtgcagagtttcagggcagtg

SEQ ID NO: 4476228 - DNA, 25 bp, Homo sapien
agcctggatcctgcaataaggaaca

SEQ ID NO: 4476229 - DNA, 25 bp, Homo sapien
gatcctgcaataaggaacagacagg

SEQ ID NO: 4476230 - DNA, 25 bp, Homo sapien
tggatcctgcaataaggaacagaca

SEQ ID NO: 4476231 - DNA, 25 bp, Homo sapien
cctggatcctgcaataaggaacaga

SEQ ID NO: 4476232 - DNA, 25 bp, Homo sapien
caaacttggcatcagctgtgagttt

SEQ ID NO: 4476233 - DNA, 25 bp, Homo sapien
ctgtgagtttcaggatcttcttata

SEQ ID NO: 4476234 - DNA, 25 bp, Homo sapien
aaacttggcatcagctgtgagtttc

SEQ ID NO: 4476235 - DNA, 25 bp, Homo sapien
cagctgtgagtttcaggatcttctt

SEQ ID NO: 4476236 - DNA, 25 bp, Homo sapien
aggcaccaggccgaggtcccagggt

SEQ ID NO: 4476237 - DNA, 25 bp, Homo sapien
cctgtgaactcagcggggtgctcac

SEQ ID NO: 4476238 - DNA, 25 bp, Homo sapien
caccaggccgaggtcccagggttgc

SEQ ID NO: 4476239 - DNA, 25 bp, Homo sapien
gttgcctggggcctgtgaactcagc

SEQ ID NO: 4476240 - DNA, 25 bp, Homo sapien
tccctgttgccctattaacttcagc

SEQ ID NO: 4476241 - DNA, 25 bp, Homo sapien
gaaggtgggactgtcaatgtctttc

SEQ ID NO: 4476242 - DNA, 25 bp, Homo sapien
tggagccataggcactgctactgct

SEQ ID NO: 4476243 - DNA, 25 bp, Homo sapien
gccctattaacttcagctcaaagcc

SEQ ID NO: 4476244 - DNA, 25 bp, Homo sapien
actgtggccttcacatcgcctgact

SEQ ID NO: 4476245 - DNA, 25 bp, Homo sapien
gctgcagacccgcaagtgcttctgc

SEQ ID NO: 4476246 - DNA, 25 bp, Homo sapien
agacccgcaagtgcttctgcaaggg

SEQ ID NO: 4476247 - DNA, 25 bp, Homo sapien
gtaggctgcagacccgcaagtgctt

SEQ ID NO: 4476248 - DNA, 25 bp, Homo sapien
tgcgtaggctgcagacccgcaagtg

SEQ ID NO: 4476249 - DNA, 25 bp, Homo sapien
cacacacggctagaccacacagagg

SEQ ID NO: 4476250 - DNA, 25 bp, Homo sapien
tgtcccttctgccactcgtgctgcc

SEQ ID NO: 4476251 - DNA, 25 bp, Homo sapien
gccactcgtgctgccagggaccacg

SEQ ID NO: 4476252 - DNA, 25 bp, Homo sapien
acggctagaccacacagaggtctta

SEQ ID NO: 4476253 - DNA, 25 bp, Homo sapien
tggcgccagcccaggccgtcatgtg

SEQ ID NO: 4476254 - DNA, 25 bp, Homo sapien
caggccgtcatgtggcactgtgcac

SEQ ID NO: 4476255 - DNA, 25 bp, Homo sapien
cttcttcagggtggcgccagcccag

SEQ ID NO: 4476256 - DNA, 25 bp, Homo sapien
tgtggcactgtgcacgccagggcct

SEQ ID NO: 4476257 - DNA, 25 bp, Homo sapien
cctgaagtctgtgataatcctctca

SEQ ID NO: 4476258 - DNA, 25 bp, Homo sapien
tctgtgataatcctctcagcaggct

SEQ ID NO: 4476259 - DNA, 25 bp, Homo sapien
gaagtctgtgataatcctctcagca

SEQ ID NO: 4476260 - DNA, 25 bp, Homo sapien
tgataatcctctcagcaggctggac

SEQ ID NO: 4476261 - DNA, 25 bp, Homo sapien
tctaattctaaggtctctgagttcc

SEQ ID NO: 4476262 - DNA, 25 bp, Homo sapien
gccagatgtggcctctaattctaag

SEQ ID NO: 4476263 - DNA, 25 bp, Homo sapien
tgggcagaccatgctggtccaccct

SEQ ID NO: 4476264 - DNA, 25 bp, Homo sapien
tctaaggtctctgagttccaggcca

SEQ ID NO: 4476265 - DNA, 25 bp, Homo sapien
agtccctgggattgcaaaggtgagg

SEQ ID NO: 4476266 - DNA, 25 bp, Homo sapien
ctgggattgcaaaggtgagggacag

SEQ ID NO: 4476267 - DNA, 25 bp, Homo sapien
gagtccctgggattgcaaaggtgag

SEQ ID NO: 4476268 - DNA, 25 bp, Homo sapien
ggattgcaaaggtgagggacagctt

SEQ ID NO: 4476269 - DNA, 25 bp, Homo sapien
tccggcaagctgctttctttgcctg

SEQ ID NO: 4476270 - DNA, 25 bp, Homo sapien
cggcaagctgctttctttgcctggg

SEQ ID NO: 4476271 - DNA, 25 bp, Homo sapien
ctccggcaagctgctttctttgcct

SEQ ID NO: 4476272 - DNA, 25 bp, Homo sapien
ggcaagctgctttctttgcctgggg

SEQ ID NO: 4476273 - DNA, 25 bp, Homo sapien
atgggcaagaacatcatgctcagcc

SEQ ID NO: 4476274 - DNA, 25 bp, Homo sapien
cagatgtgatgtccccaagtggttc

SEQ ID NO: 4476275 - DNA, 25 bp, Homo sapien
gaaatgggcaagaacatcatgctca

SEQ ID NO: 4476276 - DNA, 25 bp, Homo sapien
caagtggttctataaaccttttgag

SEQ ID NO: 4476277 - DNA, 25 bp, Homo sapien
ggagaggggttcggcctccgatgca

SEQ ID NO: 4476278 - DNA, 25 bp, Homo sapien
gagaggggttcggcctccgatgcac

SEQ ID NO: 4476279 - DNA, 25 bp, Homo sapien
accaagctggatggccaccgccaga

SEQ ID NO: 4476280 - DNA, 25 bp, Homo sapien
aggagtggatcagccagatggccac

SEQ ID NO: 4476281 - DNA, 25 bp, Homo sapien
cacatgaggacagagggtccacctg

SEQ ID NO: 4476282 - DNA, 25 bp, Homo sapien
gtccacctggaggagtggatcagcc

SEQ ID NO: 4476283 - DNA, 25 bp, Homo sapien
ctgtctggaggtggcacaatgggac

SEQ ID NO: 4476284 - DNA, 25 bp, Homo sapien
catggcctgtctggaggtggcacaa

SEQ ID NO: 4476285 - DNA, 25 bp, Homo sapien
ccctggggctagcatggcctgtctg

SEQ ID NO: 4476286 - DNA, 25 bp, Homo sapien
ggaacggaggccctggggctagcat

SEQ ID NO: 4476287 - DNA, 25 bp, Homo sapien
tatccctgaagtgcccctgccccta

SEQ ID NO: 4476288 - DNA, 25 bp, Homo sapien
tccttcctatccctgaagtgcccct

SEQ ID NO: 4476289 - DNA, 25 bp, Homo sapien
ttcctatccctgaagtgcccctgcc

SEQ ID NO: 4476290 - DNA, 25 bp, Homo sapien
ctggaacacacaggcccctccttcc

SEQ ID NO: 4476291 - DNA, 25 bp, Homo sapien
ggtagaaagatcatcacataggggt

SEQ ID NO: 4476292 - DNA, 25 bp, Homo sapien
gggtagaaagatcatcacatagggg

SEQ ID NO: 4476293 - DNA, 25 bp, Homo sapien
gtagaaagatcatcacataggggtt

SEQ ID NO: 4476294 - DNA, 25 bp, Homo sapien
ggcccagtgagtggaccccaggagc

SEQ ID NO: 4476295 - DNA, 25 bp, Homo sapien
tgaccatcgagacaccattgaggct

SEQ ID NO: 4476296 - DNA, 25 bp, Homo sapien
agttcctgtgaccatcgagacacca

SEQ ID NO: 4476297 - DNA, 25 bp, Homo sapien
tcctgtgaccatcgagacaccattg

SEQ ID NO: 4476298 - DNA, 25 bp, Homo sapien
gcagggaggaacaccgggataggca

SEQ ID NO: 4476299 - DNA, 25 bp, Homo sapien
agttttactgtattacttcttgctt

SEQ ID NO: 4476300 - DNA, 25 bp, Homo sapien
gaaaagtggaatcactggctgtatt

SEQ ID NO: 4476301 - DNA, 25 bp, Homo sapien
aaaagtggaatcactggctgtattt

SEQ ID NO: 4476302 - DNA, 25 bp, Homo sapien
aaagtggaatcactggctgtatttt

SEQ ID NO: 4476303 - DNA, 25 bp, Homo sapien
agaaaagtggaatcactggctgtat

SEQ ID NO: 4476304 - DNA, 25 bp, Homo sapien
gtcttcacaatgtaagtctcgggca

SEQ ID NO: 4476305 - DNA, 25 bp, Homo sapien
tttaaaaagtgtcttcacaatgtaa

SEQ ID NO: 4476306 - DNA, 25 bp, Homo sapien
aagtgtcttcacaatgtaagtctcg

SEQ ID NO: 4476307 - DNA, 25 bp, Homo sapien
taaaaagtgtcttcacaatgtaagt

SEQ ID NO: 4476308 - DNA, 25 bp, Homo sapien
acctccagtcacctacaaggctgct

SEQ ID NO: 4476309 - DNA, 25 bp, Homo sapien
agtcacctacaaggctgctgtgtga

SEQ ID NO: 4476310 - DNA, 25 bp, Homo sapien
agcgaacacctccagtcacctacaa

SEQ ID NO: 4476311 - DNA, 25 bp, Homo sapien
tccagtcacctacaaggctgctgtg

SEQ ID NO: 4476312 - DNA, 25 bp, Homo sapien
gtcgagattcttctaacatcatggg

SEQ ID NO: 4476313 - DNA, 25 bp, Homo sapien
ttattctgtcgagattcttctaaca

SEQ ID NO: 4476314 - DNA, 25 bp, Homo sapien
gctgccaatttattctgtcgagatt

SEQ ID NO: 4476315 - DNA, 25 bp, Homo sapien
ctgctgccaatttattctgtcgaga

SEQ ID NO: 4476316 - DNA, 25 bp, Homo sapien
tgagtggccaccaccggaagtggtt

SEQ ID NO: 4476317 - DNA, 25 bp, Homo sapien
ggaataccagggctcttcctttgct

SEQ ID NO: 4476318 - DNA, 25 bp, Homo sapien
gtctttgctcctgctggaataccag

SEQ ID NO: 4476319 - DNA, 25 bp, Homo sapien
gtggttgtctcagggctactgtcag

SEQ ID NO: 4476320 - DNA, 25 bp, Homo sapien
gagtggttaaggttggacacccgca

SEQ ID NO: 4476321 - DNA, 25 bp, Homo sapien
ccattggagtggttaaggttggaca

SEQ ID NO: 4476322 - DNA, 25 bp, Homo sapien
cattggagtggttaaggttggacac

SEQ ID NO: 4476323 - DNA, 25 bp, Homo sapien
cttccacttgtccaatgggggagca

SEQ ID NO: 4476324 - DNA, 25 bp, Homo sapien
cacttgtccaatgggggagcactac

SEQ ID NO: 4476325 - DNA, 25 bp, Homo sapien
ttccacttgtccaatgggggagcac

SEQ ID NO: 4476326 - DNA, 25 bp, Homo sapien
ccacttgtccaatgggggagcacta

SEQ ID NO: 4476327 - DNA, 25 bp, Homo sapien
tgtgtgtgggctgtctcagctggca

SEQ ID NO: 4476328 - DNA, 25 bp, Homo sapien
ggtgtgtgtgggctgtctcagctgg

SEQ ID NO: 4476329 - DNA, 25 bp, Homo sapien
ctggcagagggtcacccagccccca

SEQ ID NO: 4476330 - DNA, 25 bp, Homo sapien
tcagctggcagagggtcacccagcc

SEQ ID NO: 4476331 - DNA, 25 bp, Homo sapien
agttggaagaggattgtggggagag

SEQ ID NO: 4476332 - DNA, 25 bp, Homo sapien
tggaagaggattgtggggagaggta

SEQ ID NO: 4476333 - DNA, 25 bp, Homo sapien
aggagttggaagaggattgtgggga

SEQ ID NO: 4476334 - DNA, 25 bp, Homo sapien
ggaagaggattgtggggagaggtag

SEQ ID NO: 4476335 - DNA, 25 bp, Homo sapien
ttgtcactgagcttgactccagggc

SEQ ID NO: 4476336 - DNA, 25 bp, Homo sapien
ttcattgagttgactgattgtcact

SEQ ID NO: 4476337 - DNA, 25 bp, Homo sapien
gactgattgtcactgagcttgactc

SEQ ID NO: 4476338 - DNA, 25 bp, Homo sapien
cattgagttgactgattgtcactga

SEQ ID NO: 4476339 - DNA, 25 bp, Homo sapien
attccccagacctggaagcggtagg

SEQ ID NO: 4476340 - DNA, 25 bp, Homo sapien
acaaactggtcaaccctcttcaagc

SEQ ID NO: 4476341 - DNA, 25 bp, Homo sapien
gaactcgaagtctgaatctggattc

SEQ ID NO: 4476342 - DNA, 25 bp, Homo sapien
cattctcagaaccaatggcaacaca

SEQ ID NO: 4476343 - DNA, 25 bp, Homo sapien
tgttccacttgtttcttctgctgtt

SEQ ID NO: 4476344 - DNA, 25 bp, Homo sapien
ttccagctgatgttccacttgtttc

SEQ ID NO: 4476345 - DNA, 25 bp, Homo sapien
ttcttccagctgatgttccacttgt

SEQ ID NO: 4476346 - DNA, 25 bp, Homo sapien
gttccacttgtttcttctgctgttt

SEQ ID NO: 4476347 - DNA, 25 bp, Homo sapien
agaatgccaccaatgccccaggaca

SEQ ID NO: 4476348 - DNA, 25 bp, Homo sapien
aatgccaccaatgccccaggacagg

SEQ ID NO: 4476349 - DNA, 25 bp, Homo sapien
cagaatgccaccaatgccccaggac

SEQ ID NO: 4476350 - DNA, 25 bp, Homo sapien
gaatgccaccaatgccccaggacag

SEQ ID NO: 4476351 - DNA, 25 bp, Homo sapien
gctttgtgtatttcattgtttgttt

SEQ ID NO: 4476352 - DNA, 25 bp, Homo sapien
ctctaaccgctccatttgtgctttg

SEQ ID NO: 4476353 - DNA, 25 bp, Homo sapien
ctaaccgctccatttgtgctttgtg

SEQ ID NO: 4476354 - DNA, 25 bp, Homo sapien
aaccgctccatttgtgctttgtgta

SEQ ID NO: 4476355 - DNA, 25 bp, Homo sapien
cagcacgtttagtatggtaaagggt

SEQ ID NO: 4476356 - DNA, 25 bp, Homo sapien
ttagtatggtaaagggtggtcttca

SEQ ID NO: 4476357 - DNA, 25 bp, Homo sapien
cgggcagcacgtttagtatggtaaa

SEQ ID NO: 4476358 - DNA, 25 bp, Homo sapien
tagtatggtaaagggtggtcttcaa

SEQ ID NO: 4476359 - DNA, 25 bp, Homo sapien
gagagcccgctccaattcttgaata

SEQ ID NO: 4476360 - DNA, 25 bp, Homo sapien
ccaattcttgaatacgctgtaagga

SEQ ID NO: 4476361 - DNA, 25 bp, Homo sapien
ctgtaaggagtattgcaggcggcca

SEQ ID NO: 4476362 - DNA, 25 bp, Homo sapien
gaatacgctgtaaggagtattgcag

SEQ ID NO: 4476363 - DNA, 25 bp, Homo sapien
gaagttttgatctggggagctcagg

SEQ ID NO: 4476364 - DNA, 25 bp, Homo sapien
agtgagaagttttgatctggggagc

SEQ ID NO: 4476365 - DNA, 25 bp, Homo sapien
ttttgatctggggagctcaggcagt

SEQ ID NO: 4476366 - DNA, 25 bp, Homo sapien
gagaagttttgatctggggagctca

SEQ ID NO: 4476367 - DNA, 25 bp, Homo sapien
tgtcacgtgtgcgttcagcagcgcc

SEQ ID NO: 4476368 - DNA, 25 bp, Homo sapien
gcagcgcccgctcctttatggtctg

SEQ ID NO: 4476369 - DNA, 25 bp, Homo sapien
ctttatggtctgctgtaaccgccgg

SEQ ID NO: 4476370 - DNA, 25 bp, Homo sapien
ggtggaggaccgcttctctgcagct

SEQ ID NO: 4476371 - DNA, 25 bp, Homo sapien
tagctggacttgttttagtgactct

SEQ ID NO: 4476372 - DNA, 25 bp, Homo sapien
tagcatattcgtctcgctctagctg

SEQ ID NO: 4476373 - DNA, 25 bp, Homo sapien
tgtgtttagcatattcgtctcgctc

SEQ ID NO: 4476374 - DNA, 25 bp, Homo sapien
tttagcatattcgtctcgctctagc

SEQ ID NO: 4476375 - DNA, 25 bp, Homo sapien
tatccgatgtatgtcacgcttcttc

SEQ ID NO: 4476376 - DNA, 25 bp, Homo sapien
cgatgtatgtcacgcttcttctctt

SEQ ID NO: 4476377 - DNA, 25 bp, Homo sapien
cagctcctgtatccgatgtatgtca

SEQ ID NO: 4476378 - DNA, 25 bp, Homo sapien
cctgtatccgatgtatgtcacgctt

SEQ ID NO: 4476379 - DNA, 25 bp, Homo sapien
tcccgaagcctctcgttttgttcac

SEQ ID NO: 4476380 - DNA, 25 bp, Homo sapien
ctcccgaagcctctcgttttgttca

SEQ ID NO: 4476381 - DNA, 25 bp, Homo sapien
gccagctgcttgtcgagcttgtggt

SEQ ID NO: 4476382 - DNA, 25 bp, Homo sapien
ggccagctgcttgtcgagcttgtgg

SEQ ID NO: 4476383 - DNA, 25 bp, Homo sapien
aactgcagtgcgctctttttctcgt

SEQ ID NO: 4476384 - DNA, 25 bp, Homo sapien
gcagtgcgctctttttctcgttgtt

SEQ ID NO: 4476385 - DNA, 25 bp, Homo sapien
caactgcagtgcgctctttttctcg

SEQ ID NO: 4476386 - DNA, 25 bp, Homo sapien
ctgcagtgcgctctttttctcgttg

SEQ ID NO: 4476387 - DNA, 25 bp, Homo sapien
cccagcccttcttggatggggtgga

SEQ ID NO: 4476388 - DNA, 25 bp, Homo sapien
cccagctggagctgcctttggcctg

SEQ ID NO: 4476389 - DNA, 25 bp, Homo sapien
gcctcccagctggagctgcctttgg

SEQ ID NO: 4476390 - DNA, 25 bp, Homo sapien
tcccagctggagctgcctttggcct

SEQ ID NO: 4476391 - DNA, 25 bp, Homo sapien
ctggtccacgagctgggtctgcagc

SEQ ID NO: 4476392 - DNA, 25 bp, Homo sapien
tgcagcagtaactgcctgtgcagcg

SEQ ID NO: 4476393 - DNA, 25 bp, Homo sapien
tgcagctggtccacgagctgggtct

SEQ ID NO: 4476394 - DNA, 25 bp, Homo sapien
agcagtaactgcctgtgcagcgcct

SEQ ID NO: 4476395 - DNA, 25 bp, Homo sapien
cacgaggcttagctgggtctctagc

SEQ ID NO: 4476396 - DNA, 25 bp, Homo sapien
ccacgaggcttagctgggtctctag

SEQ ID NO: 4476397 - DNA, 25 bp, Homo sapien
cctttctgatctggtccagttcatt

SEQ ID NO: 4476398 - DNA, 25 bp, Homo sapien
tgatctggtccagttcattcatcct

SEQ ID NO: 4476399 - DNA, 25 bp, Homo sapien
ttctgatctggtccagttcattcat

SEQ ID NO: 4476400 - DNA, 25 bp, Homo sapien
tgcggacacccggttggcataacga

SEQ ID NO: 4476401 - DNA, 25 bp, Homo sapien
cactgtccagatgttgtcctccatc

SEQ ID NO: 4476402 - DNA, 25 bp, Homo sapien
gggatgtttggcgtgggccgaggcg

SEQ ID NO: 4476403 - DNA, 25 bp, Homo sapien
ctgggatgtttggcgtgggccgagg

SEQ ID NO: 4476404 - DNA, 25 bp, Homo sapien
gatgtttggcgtgggccgaggcgcc

SEQ ID NO: 4476405 - DNA, 25 bp, Homo sapien
gtggcctcccggctctccaggtcct

SEQ ID NO: 4476406 - DNA, 25 bp, Homo sapien
cgtggcctcccggctctccaggtcc

SEQ ID NO: 4476407 - DNA, 25 bp, Homo sapien
tccctttcagcttcaccatggcctc

SEQ ID NO: 4476408 - DNA, 25 bp, Homo sapien
acacacaaactcacccccactccct

SEQ ID NO: 4476409 - DNA, 25 bp, Homo sapien
catggcctccttcagggcccggtag

SEQ ID NO: 4476410 - DNA, 25 bp, Homo sapien
tggcctccttcagggcccggtagct

SEQ ID NO: 4476411 - DNA, 25 bp, Homo sapien
ggacgaatccaagctctcgtctctc

SEQ ID NO: 4476412 - DNA, 25 bp, Homo sapien
tccagaaggctggacgaatccaagc

SEQ ID NO: 4476413 - DNA, 25 bp, Homo sapien
aaggctggacgaatccaagctctcg

SEQ ID NO: 4476414 - DNA, 25 bp, Homo sapien
gctggacgaatccaagctctcgtct

SEQ ID NO: 4476415 - DNA, 25 bp, Homo sapien
ctggctttcatatacggtgaaggac

SEQ ID NO: 4476416 - DNA, 25 bp, Homo sapien
ctttcatatacggtgaaggactctc

SEQ ID NO: 4476417 - DNA, 25 bp, Homo sapien
ggctttcatatacggtgaaggactc

SEQ ID NO: 4476418 - DNA, 25 bp, Homo sapien
ccctggctttcatatacggtgaagg

SEQ ID NO: 4476419 - DNA, 25 bp, Homo sapien
atgcccctcatggttgcccacaagg

SEQ ID NO: 4476420 - DNA, 25 bp, Homo sapien
ggcaacaccaactcttgcagctcca

SEQ ID NO: 4476421 - DNA, 25 bp, Homo sapien
gggttctgggcagcgatgaggaatt

SEQ ID NO: 4476422 - DNA, 25 bp, Homo sapien
ggcagcgatgaggaatttgccatgc

SEQ ID NO: 4476423 - DNA, 25 bp, Homo sapien
gaatggcacgcagggtttgctgggc

SEQ ID NO: 4476424 - DNA, 25 bp, Homo sapien
cacgcagggtttgctgggcaagcct

SEQ ID NO: 4476425 - DNA, 25 bp, Homo sapien
tgcctggtagaagaatggcacgcag

SEQ ID NO: 4476426 - DNA, 25 bp, Homo sapien
ctgcctggtagaagaatggcacgca

SEQ ID NO: 4476427 - DNA, 25 bp, Homo sapien
caatacacagaaaatagggaaaagg

SEQ ID NO: 4476428 - DNA, 25 bp, Homo sapien
acagtgctcaattgagggcaaacca

SEQ ID NO: 4476429 - DNA, 25 bp, Homo sapien
aggattcgatcaaacgtcatagcag

SEQ ID NO: 4476430 - DNA, 25 bp, Homo sapien
gtgctcaattgagggcaaaccacat

SEQ ID NO: 4476431 - DNA, 25 bp, Homo sapien
ggcaacagtgtttcagtatttctat

SEQ ID NO: 4476432 - DNA, 25 bp, Homo sapien
agatagcagttacacttatgaatag

SEQ ID NO: 4476433 - DNA, 25 bp, Homo sapien
aataaagccttgcattggaattggc

SEQ ID NO: 4476434 - DNA, 25 bp, Homo sapien
tctggaaaacccatcaggttaaaca

SEQ ID NO: 4476435 - DNA, 25 bp, Homo sapien
catttattccaaaatgaaaggcaaa

SEQ ID NO: 4476436 - DNA, 25 bp, Homo sapien
ggcaaaataaacaggagtcgcatca

SEQ ID NO: 4476437 - DNA, 25 bp, Homo sapien
aggagtcgcatcaccagggagccac

SEQ ID NO: 4476438 - DNA, 25 bp, Homo sapien
ggctgagcagtatggctaaatccat

SEQ ID NO: 4476439 - DNA, 25 bp, Homo sapien
aactcagcctcgaggagcctgcagg

SEQ ID NO: 4476440 - DNA, 25 bp, Homo sapien
actcagcctcgaggagcctgcaggg

SEQ ID NO: 4476441 - DNA, 25 bp, Homo sapien
actcttgtttactccagagtttgca

SEQ ID NO: 4476442 - DNA, 25 bp, Homo sapien
tcttgtttactccagagtttgcaaa

SEQ ID NO: 4476443 - DNA, 25 bp, Homo sapien
ccactcttgtttactccagagtttg

SEQ ID NO: 4476444 - DNA, 25 bp, Homo sapien
ttatcagcttcccactcttgtttac

SEQ ID NO: 4476445 - DNA, 25 bp, Homo sapien
tgtacctccggccgcgctggctggt

SEQ ID NO: 4476446 - DNA, 25 bp, Homo sapien
ggtctgtacctccggccgcgctggc

SEQ ID NO: 4476447 - DNA, 25 bp, Homo sapien
gtctgtacctccggccgcgctggct

SEQ ID NO: 4476448 - DNA, 25 bp, Homo sapien
tctgtacctccggccgcgctggctg

SEQ ID NO: 4476449 - DNA, 25 bp, Homo sapien
tgcctttatcccgagaagcccctaa

SEQ ID NO: 4476450 - DNA, 25 bp, Homo sapien
ggaatgcgcagccactcgctgcctt

SEQ ID NO: 4476451 - DNA, 25 bp, Homo sapien
cctaacacccctcgccgtggtctgt

SEQ ID NO: 4476452 - DNA, 25 bp, Homo sapien
acacccctcgccgtggtctgtacat

SEQ ID NO: 4476453 - DNA, 25 bp, Homo sapien
ctgtgaggaagcgggggaaggaagt

SEQ ID NO: 4476454 - DNA, 25 bp, Homo sapien
ggaaggaagtaaatcgccgagtgac

SEQ ID NO: 4476455 - DNA, 25 bp, Homo sapien
tgtgaggaagcgggggaaggaagta

SEQ ID NO: 4476456 - DNA, 25 bp, Homo sapien
gctgcgcggccggaagtcggcggtt

SEQ ID NO: 4476457 - DNA, 25 bp, Homo sapien
agtcggcggtttcccagacgacgag

SEQ ID NO: 4476458 - DNA, 25 bp, Homo sapien
cagacgacgaggcaagcggaagtcg

SEQ ID NO: 4476459 - DNA, 25 bp, Homo sapien
caagcggaagtcgtagggctgtgga

SEQ ID NO: 4476460 - DNA, 25 bp, Homo sapien
gggacaaaagccacccgccagcttg

SEQ ID NO: 4476461 - DNA, 25 bp, Homo sapien
gaaccgctgcatgggacaaaagcca

SEQ ID NO: 4476462 - DNA, 25 bp, Homo sapien
cctgcggccgggcaactaaagagaa

SEQ ID NO: 4476463 - DNA, 25 bp, Homo sapien
aactaaagagaatctcggcgctcac

SEQ ID NO: 4476464 - DNA, 25 bp, Homo sapien
gggactacagtcctagaacaggacc

SEQ ID NO: 4476465 - DNA, 25 bp, Homo sapien
ggacctgtgctgctaagtatccaga

SEQ ID NO: 4476466 - DNA, 25 bp, Homo sapien
aaaaagatggcactacggtaagagc

SEQ ID NO: 4476467 - DNA, 25 bp, Homo sapien
tgaaaagtctcccttctccgtccag

SEQ ID NO: 4476468 - DNA, 25 bp, Homo sapien
ttttgagactcagtagatacaggaa

SEQ ID NO: 4476469 - DNA, 25 bp, Homo sapien
agactcagtagatacaggaaattga

SEQ ID NO: 4476470 - DNA, 25 bp, Homo sapien
ttgagactcagtagatacaggaaat

SEQ ID NO: 4476471 - DNA, 25 bp, Homo sapien
gagactcagtagatacaggaaattg

SEQ ID NO: 4476472 - DNA, 25 bp, Homo sapien
tcaaaatcacgtctgagaaccaaat

SEQ ID NO: 4476473 - DNA, 25 bp, Homo sapien
ctcagaggtgaggataccaagacaa

SEQ ID NO: 4476474 - DNA, 25 bp, Homo sapien
caatagacaaatagactcagaggtg

SEQ ID NO: 4476475 - DNA, 25 bp, Homo sapien
catttaatcagtggagcggtggagc

SEQ ID NO: 4476476 - DNA, 25 bp, Homo sapien
gaaaaattagccgggcatggtggca

SEQ ID NO: 4476477 - DNA, 25 bp, Homo sapien
tgaaatcccgtctctactaaaaata

SEQ ID NO: 4476478 - DNA, 25 bp, Homo sapien
gaccagcctggctaatatggtgaaa

SEQ ID NO: 4476479 - DNA, 25 bp, Homo sapien
ggcggatcatgaggtaaggaattca

SEQ ID NO: 4476480 - DNA, 25 bp, Homo sapien
gtgaagcatttcttgagtattttca

SEQ ID NO: 4476481 - DNA, 25 bp, Homo sapien
gaagcatttcttgagtattttcaag

SEQ ID NO: 4476482 - DNA, 25 bp, Homo sapien
catttcttgagtattttcaaggaat

SEQ ID NO: 4476483 - DNA, 25 bp, Homo sapien
aagcatttcttgagtattttcaagg

SEQ ID NO: 4476484 - DNA, 25 bp, Homo sapien
tgtaaatatataagttgaatttctg

SEQ ID NO: 4476485 - DNA, 25 bp, Homo sapien
ctgtaaatatataagttgaatttct

SEQ ID NO: 4476486 - DNA, 25 bp, Homo sapien
gagtcgagttctgtcataaaggccg

SEQ ID NO: 4476487 - DNA, 25 bp, Homo sapien
gagttctgtcataaaggccggagtg

SEQ ID NO: 4476488 - DNA, 25 bp, Homo sapien
atggagtcgagttctgtcataaagg

SEQ ID NO: 4476489 - DNA, 25 bp, Homo sapien
tcgagttctgtcataaaggccggag

SEQ ID NO: 4476490 - DNA, 25 bp, Homo sapien
tgctcattgctatccaagaataggg

SEQ ID NO: 4476491 - DNA, 25 bp, Homo sapien
cagagttaatgttgcctgaacacaa

SEQ ID NO: 4476492 - DNA, 25 bp, Homo sapien
taaaaggtacaaccagacacactgg

SEQ ID NO: 4476493 - DNA, 25 bp, Homo sapien
agcaggaccctcatttcaacaaaaa

SEQ ID NO: 4476494 - DNA, 25 bp, Homo sapien
aagatgaatcaaccagttctgcttc

SEQ ID NO: 4476495 - DNA, 25 bp, Homo sapien
cttgcaggcttcataatctttccgg

SEQ ID NO: 4476496 - DNA, 25 bp, Homo sapien
tgaatcaaccagttctgcttctcca

SEQ ID NO: 4476497 - DNA, 25 bp, Homo sapien
aatctttccggatataatgaagatg

SEQ ID NO: 4476498 - DNA, 25 bp, Homo sapien
gaaaaatgcttctgagcagtggtta

SEQ ID NO: 4476499 - DNA, 25 bp, Homo sapien
gcagtggttaagtttcttcaggtgt

SEQ ID NO: 4476500 - DNA, 25 bp, Homo sapien
gggagaaaaatgcttctgagcagtg

SEQ ID NO: 4476501 - DNA, 25 bp, Homo sapien
tgaaagagggagaaaaatgcttctg

SEQ ID NO: 4476502 - DNA, 25 bp, Homo sapien
agatagcatattcacacaatccctg

SEQ ID NO: 4476503 - DNA, 25 bp, Homo sapien
tggacatagatagcatattcacaca

SEQ ID NO: 4476504 - DNA, 25 bp, Homo sapien
cttggacatagatagcatattcaca

SEQ ID NO: 4476505 - DNA, 25 bp, Homo sapien
catagatagcatattcacacaatcc

SEQ ID NO: 4476506 - DNA, 25 bp, Homo sapien
tatttccttctaggcgaaatatcaa

SEQ ID NO: 4476507 - DNA, 25 bp, Homo sapien
gcttgaggttatcagcactctgagg

SEQ ID NO: 4476508 - DNA, 25 bp, Homo sapien
ctgcttgaggttatcagcactctga

SEQ ID NO: 4476509 - DNA, 25 bp, Homo sapien
ttggatatttccttctaggcgaaat

SEQ ID NO: 4476510 - DNA, 25 bp, Homo sapien
ctttctggttgagtttagctgcttc

SEQ ID NO: 4476511 - DNA, 25 bp, Homo sapien
tttctggttgagtttagctgcttca

SEQ ID NO: 4476512 - DNA, 25 bp, Homo sapien
tctttctggttgagtttagctgctt

SEQ ID NO: 4476513 - DNA, 25 bp, Homo sapien
aatggaaccattagcaagtttacta

SEQ ID NO: 4476514 - DNA, 25 bp, Homo sapien
gaaccattagcaagtttactaataa

SEQ ID NO: 4476515 - DNA, 25 bp, Homo sapien
taagtatgaggttaaaatcaagaca

SEQ ID NO: 4476516 - DNA, 25 bp, Homo sapien
tggaaccattagcaagtttactaat

SEQ ID NO: 4476517 - DNA, 25 bp, Homo sapien
gactgctcgtcagcaaactgctaga

SEQ ID NO: 4476518 - DNA, 25 bp, Homo sapien
tcctcaattgacacaaagagaaggg

SEQ ID NO: 4476519 - DNA, 25 bp, Homo sapien
gacatgaaacacaactagatgccta

SEQ ID NO: 4476520 - DNA, 25 bp, Homo sapien
aatcagactggtaagagactgctcg

SEQ ID NO: 4476521 - DNA, 25 bp, Homo sapien
caatcatacgtaagtgcagacagaa

SEQ ID NO: 4476522 - DNA, 25 bp, Homo sapien
cagcccaacgttttatccacaaatg

SEQ ID NO: 4476523 - DNA, 25 bp, Homo sapien
caacttttgtaagcaaataacagcc

SEQ ID NO: 4476524 - DNA, 25 bp, Homo sapien
caattatctcacaaatgccgcacat

SEQ ID NO: 4476525 - DNA, 25 bp, Homo sapien
aaactcctaggttatggctgatctc

SEQ ID NO: 4476526 - DNA, 25 bp, Homo sapien
gcaaactcctaggttatggctgatc

SEQ ID NO: 4476527 - DNA, 25 bp, Homo sapien
atgtagcaaactcctaggttatggc

SEQ ID NO: 4476528 - DNA, 25 bp, Homo sapien
tagcaaactcctaggttatggctga

SEQ ID NO: 4476529 - DNA, 25 bp, Homo sapien
tctgcaacaagtgcaccctcagtga

SEQ ID NO: 4476530 - DNA, 25 bp, Homo sapien
cactagggataataccaaatgagca

SEQ ID NO: 4476531 - DNA, 25 bp, Homo sapien
aaaaacctctgcaagcactagggat

SEQ ID NO: 4476532 - DNA, 25 bp, Homo sapien
aaatgagcaatgtaacaacttctgc

SEQ ID NO: 4476533 - DNA, 25 bp, Homo sapien
tatataagtcagatcgtgcctatta

SEQ ID NO: 4476534 - DNA, 25 bp, Homo sapien
cagatcgtgcctattaagattcagg

SEQ ID NO: 4476535 - DNA, 25 bp, Homo sapien
cgtgcctattaagattcagggcatt

SEQ ID NO: 4476536 - DNA, 25 bp, Homo sapien
taagtcagatcgtgcctattaagat

SEQ ID NO: 4476537 - DNA, 25 bp, Homo sapien
caagtctccctccagcaagtggatc

SEQ ID NO: 4476538 - DNA, 25 bp, Homo sapien
ttcaatggccttgtccaagtctccc

SEQ ID NO: 4476539 - DNA, 25 bp, Homo sapien
ctgctttcttgtagacttcaatggc

SEQ ID NO: 4476540 - DNA, 25 bp, Homo sapien
gtctccctccagcaagtggatcttc

SEQ ID NO: 4476541 - DNA, 25 bp, Homo sapien
aatgtaagcaggaacgatgtgtgca

SEQ ID NO: 4476542 - DNA, 25 bp, Homo sapien
tcttcttgagtgcatgtctgcccac

SEQ ID NO: 4476543 - DNA, 25 bp, Homo sapien
tagttttgaaccatggaatgtaagc

SEQ ID NO: 4476544 - DNA, 25 bp, Homo sapien
gactgtcggccaactcttaaatctg

SEQ ID NO: 4476545 - DNA, 25 bp, Homo sapien
taaagttgtaagaagctctgtattt

SEQ ID NO: 4476546 - DNA, 25 bp, Homo sapien
taagtagagtaatcctaaagttgta

SEQ ID NO: 4476547 - DNA, 25 bp, Homo sapien
ctaaagttgtaagaagctctgtatt

SEQ ID NO: 4476548 - DNA, 25 bp, Homo sapien
ctgtaagtagagtaatcctaaagtt

SEQ ID NO: 4476549 - DNA, 25 bp, Homo sapien
gctttgccccaaagccctaagtgct

SEQ ID NO: 4476550 - DNA, 25 bp, Homo sapien
tggctttgccccaaagccctaagtg

SEQ ID NO: 4476551 - DNA, 25 bp, Homo sapien
cccaaagccctaagtgctcacttgt

SEQ ID NO: 4476552 - DNA, 25 bp, Homo sapien
gccctaagtgctcacttgtatctgt

SEQ ID NO: 4476553 - DNA, 25 bp, Homo sapien
gccaagatgttcaaatgccttctgg

SEQ ID NO: 4476554 - DNA, 25 bp, Homo sapien
ggtagggtcataagtcagtgcattg

SEQ ID NO: 4476555 - DNA, 25 bp, Homo sapien
ggtcataagtcagtgcattgccaag

SEQ ID NO: 4476556 - DNA, 25 bp, Homo sapien
agtgcattgccaagatgttcaaatg

SEQ ID NO: 4476557 - DNA, 25 bp, Homo sapien
ggcaacatcaaagtccccgtgggtc

SEQ ID NO: 4476558 - DNA, 25 bp, Homo sapien
agtccccgtgggtctgcatcatgct

SEQ ID NO: 4476559 - DNA, 25 bp, Homo sapien
tggaacagcacaagccacaactctg

SEQ ID NO: 4476560 - DNA, 25 bp, Homo sapien
cttcttgccaaagaaacacattcca

SEQ ID NO: 4476561 - DNA, 25 bp, Homo sapien
gttgatggccgcactgagaaaatga

SEQ ID NO: 4476562 - DNA, 25 bp, Homo sapien
tggtcaaatggacaaggcccaaatt

SEQ ID NO: 4476563 - DNA, 25 bp, Homo sapien
caagtagttggctcgtttcaggcag

SEQ ID NO: 4476564 - DNA, 25 bp, Homo sapien
cagaatcttccaatcaaagggtgcc

SEQ ID NO: 4476565 - DNA, 25 bp, Homo sapien
aaagaaagcactgcagctggagagc

SEQ ID NO: 4476566 - DNA, 25 bp, Homo sapien
ctgcaacaaagaaagcactgcagct

SEQ ID NO: 4476567 - DNA, 25 bp, Homo sapien
gaaagcactgcagctggagagctca

SEQ ID NO: 4476568 - DNA, 25 bp, Homo sapien
aaagcactgcagctggagagctcag

SEQ ID NO: 4476569 - DNA, 25 bp, Homo sapien
ggtggactgcttctgcgtaggctct

SEQ ID NO: 4476570 - DNA, 25 bp, Homo sapien
tctatatcttccagattggtcagag

SEQ ID NO: 4476571 - DNA, 25 bp, Homo sapien
gcgtaggctctcttggcattttcta

SEQ ID NO: 4476572 - DNA, 25 bp, Homo sapien
tgcttctgcgtaggctctcttggca

SEQ ID NO: 4476573 - DNA, 25 bp, Homo sapien
caaaactggttaagtagagatttct

SEQ ID NO: 4476574 - DNA, 25 bp, Homo sapien
gggctctgcaacaaatggtcattta

SEQ ID NO: 4476575 - DNA, 25 bp, Homo sapien
cagacagagattctatggagctggg

SEQ ID NO: 4476576 - DNA, 25 bp, Homo sapien
taggtacatacgtgctaagcagacc

SEQ ID NO: 4476577 - DNA, 25 bp, Homo sapien
ggttgtacagcagcacagcatagtt

SEQ ID NO: 4476578 - DNA, 25 bp, Homo sapien
tctcctgatattgggccagggcgtt

SEQ ID NO: 4476579 - DNA, 25 bp, Homo sapien
ccttgagtaggctgactttcttctc

SEQ ID NO: 4476580 - DNA, 25 bp, Homo sapien
tccagagagctattgtccttgagta

SEQ ID NO: 4476581 - DNA, 25 bp, Homo sapien
tagagcttgattagagcccagaggc

SEQ ID NO: 4476582 - DNA, 25 bp, Homo sapien
tggtctggtgctttgatttgggatc

SEQ ID NO: 4476583 - DNA, 25 bp, Homo sapien
gagcgtcctgtatgcagctgctgaa

SEQ ID NO: 4476584 - DNA, 25 bp, Homo sapien
gagagcagctcccaacttctgagcc

SEQ ID NO: 4476585 - DNA, 25 bp, Homo sapien
caggtcttcatggagctctgtatgg

SEQ ID NO: 4476586 - DNA, 25 bp, Homo sapien
ttcatggagctctgtatggtcctac

SEQ ID NO: 4476587 - DNA, 25 bp, Homo sapien
ggtcttcatggagctctgtatggtc

SEQ ID NO: 4476588 - DNA, 25 bp, Homo sapien
tcttcatggagctctgtatggtcct

SEQ ID NO: 4476589 - DNA, 25 bp, Homo sapien
tggacttgattccaccgcaggctct

SEQ ID NO: 4476590 - DNA, 25 bp, Homo sapien
gtgaactgggatgttcctccagcac

SEQ ID NO: 4476591 - DNA, 25 bp, Homo sapien
tgatgtttcagttggacttgattcc

SEQ ID NO: 4476592 - DNA, 25 bp, Homo sapien
gttctgatgtttcagttggacttga

SEQ ID NO: 4476593 - DNA, 25 bp, Homo sapien
tgcaatactcagcaggcttggcctc

SEQ ID NO: 4476594 - DNA, 25 bp, Homo sapien
aaaccaaggctttgtcatcacagag

SEQ ID NO: 4476595 - DNA, 25 bp, Homo sapien
taaaatcgttggtgctgatccagac

SEQ ID NO: 4476596 - DNA, 25 bp, Homo sapien
gggtttccgacctcaaatgccaata

SEQ ID NO: 4476597 - DNA, 25 bp, Homo sapien
cttgtttttatacctgaataacaat

SEQ ID NO: 4476598 - DNA, 25 bp, Homo sapien
gctctggctaggaccatgttcagct

SEQ ID NO: 4476599 - DNA, 25 bp, Homo sapien
tttatgtatgttcagcctcacatac

SEQ ID NO: 4476600 - DNA, 25 bp, Homo sapien
tattaaaaccttgcaaccatatatg

SEQ ID NO: 4476601 - DNA, 25 bp, Homo sapien
ttaattttgtgtcccactacataaa

SEQ ID NO: 4476602 - DNA, 25 bp, Homo sapien
tcttaggggcaaagtagtcaatatt

SEQ ID NO: 4476603 - DNA, 25 bp, Homo sapien
ttcttcctttctagtctttatgcct

SEQ ID NO: 4476604 - DNA, 25 bp, Homo sapien
tggccagaactctagtccagtataa

SEQ ID NO: 4476605 - DNA, 25 bp, Homo sapien
agtagtcaatatttcactaaatatg

SEQ ID NO: 4476606 - DNA, 25 bp, Homo sapien
tctcaaatttaggacagagccgcta

SEQ ID NO: 4476607 - DNA, 25 bp, Homo sapien
gaagtacaccctcactattaggaag

SEQ ID NO: 4476608 - DNA, 25 bp, Homo sapien
caaatccccagtttatgcagcgcca

SEQ ID NO: 4476609 - DNA, 25 bp, Homo sapien
taaagagtttgacctcagagctcca

SEQ ID NO: 4476610 - DNA, 25 bp, Homo sapien
ccttaagtgtggttctctggttcta

SEQ ID NO: 4476611 - DNA, 25 bp, Homo sapien
ggaaagctgctattgctccaacaaa

SEQ ID NO: 4476612 - DNA, 25 bp, Homo sapien
ggatattgtggttccccatcagaca

SEQ ID NO: 4476613 - DNA, 25 bp, Homo sapien
cacgggcacctgtttggtaatcttt

SEQ ID NO: 4476614 - DNA, 25 bp, Homo sapien
tctgtgctggattctgccctaggcc

SEQ ID NO: 4476615 - DNA, 25 bp, Homo sapien
tcccaggtctacaagcagaattgct

SEQ ID NO: 4476616 - DNA, 25 bp, Homo sapien
tcaggtcataggaaagcaagcatct

SEQ ID NO: 4476617 - DNA, 25 bp, Homo sapien
tgctccgaacccaagataaatcagg

SEQ ID NO: 4476618 - DNA, 25 bp, Homo sapien
attaagaggtatgttgacgtctcca

SEQ ID NO: 4476619 - DNA, 25 bp, Homo sapien
tcctttatcattactagggataaat

SEQ ID NO: 4476620 - DNA, 25 bp, Homo sapien
tgtttaggattgttacatcccttta

SEQ ID NO: 4476621 - DNA, 25 bp, Homo sapien
caactgtaattttggatacttgtct

SEQ ID NO: 4476622 - DNA, 25 bp, Homo sapien
caatagagggaaatgatcgctggac

SEQ ID NO: 4476623 - DNA, 25 bp, Homo sapien
gaaacgccgtgtagtctagaaacca

SEQ ID NO: 4476624 - DNA, 25 bp, Homo sapien
cccttggcgagaagtgtcggacgtc

SEQ ID NO: 4476625 - DNA, 25 bp, Homo sapien
tttcgctgccaagtccaaaggtcag

SEQ ID NO: 4476626 - DNA, 25 bp, Homo sapien
tgattttgttaagatgtactgcctc

SEQ ID NO: 4476627 - DNA, 25 bp, Homo sapien
gggcacacagatagcaggtgacaga

SEQ ID NO: 4476628 - DNA, 25 bp, Homo sapien
gaagtatgaactgttgattgcagca

SEQ ID NO: 4476629 - DNA, 25 bp, Homo sapien
ttgattgcagcaaccattcaccacc

SEQ ID NO: 4476630 - DNA, 25 bp, Homo sapien
gcttcttagggttgcctggctatca

SEQ ID NO: 4476631 - DNA, 25 bp, Homo sapien
tgtcagtggtcagctactaatcagc

SEQ ID NO: 4476632 - DNA, 25 bp, Homo sapien
tcatctagcaggctatcccaggctt

SEQ ID NO: 4476633 - DNA, 25 bp, Homo sapien
gaaatggaacgatgtcacttctgcc

SEQ ID NO: 4476634 - DNA, 25 bp, Homo sapien
aaaaataatcatttagtggcacgtg

SEQ ID NO: 4476635 - DNA, 25 bp, Homo sapien
aaataatcatttagtggcacgtgcc

SEQ ID NO: 4476636 - DNA, 25 bp, Homo sapien
aataatcatttagtggcacgtgcct

SEQ ID NO: 4476637 - DNA, 25 bp, Homo sapien
aaaataatcatttagtggcacgtgc

SEQ ID NO: 4476638 - DNA, 25 bp, Homo sapien
ctggagtataacagaactgaaggac

SEQ ID NO: 4476639 - DNA, 25 bp, Homo sapien
tggagtataacagaactgaaggaca

SEQ ID NO: 4476640 - DNA, 25 bp, Homo sapien
ctgtgtcaatataggcacaaagaca

SEQ ID NO: 4476641 - DNA, 25 bp, Homo sapien
actagtcatggagggaactgttgga

SEQ ID NO: 4476642 - DNA, 25 bp, Homo sapien
catagaaagattactagtcatggag

SEQ ID NO: 4476643 - DNA, 25 bp, Homo sapien
tgctcagctgtgtcaatataggcac

SEQ ID NO: 4476644 - DNA, 25 bp, Homo sapien
agttggggcattcgcaaggttattg

SEQ ID NO: 4476645 - DNA, 25 bp, Homo sapien
tcagagaggtttaggtttgatggca

SEQ ID NO: 4476646 - DNA, 25 bp, Homo sapien
tggcaggaagttggggcattcgcaa

SEQ ID NO: 4476647 - DNA, 25 bp, Homo sapien
gggaatggtggggttggagtctgag

SEQ ID NO: 4476648 - DNA, 25 bp, Homo sapien
cagggcagctgttgtacccattggc

SEQ ID NO: 4476649 - DNA, 25 bp, Homo sapien
acccattggctttacagtcgtgttc

SEQ ID NO: 4476650 - DNA, 25 bp, Homo sapien
cttgcagccacatagttgcagggca

SEQ ID NO: 4476651 - DNA, 25 bp, Homo sapien
gcagccacatagttgcagggcagct

SEQ ID NO: 4476652 - DNA, 25 bp, Homo sapien
ttgcgtgcaaacacacatgaacttg

SEQ ID NO: 4476653 - DNA, 25 bp, Homo sapien
gattttgcgtgcaaacacacatgaa

SEQ ID NO: 4476654 - DNA, 25 bp, Homo sapien
cagagggattttgcgtgcaaacaca

SEQ ID NO: 4476655 - DNA, 25 bp, Homo sapien
tgcaaacacacatgaacttgcgcat

SEQ ID NO: 4476656 - DNA, 25 bp, Homo sapien
attaactcacatagcctcaggatct

SEQ ID NO: 4476657 - DNA, 25 bp, Homo sapien
ttttggagtccctctcttcaactgg

SEQ ID NO: 4476658 - DNA, 25 bp, Homo sapien
tcacatagcctcaggatcttcagtc

SEQ ID NO: 4476659 - DNA, 25 bp, Homo sapien
ctctcttcaactggccgattataca

SEQ ID NO: 4476660 - DNA, 25 bp, Homo sapien
tgaccagagtcgtacagcaggaact

SEQ ID NO: 4476661 - DNA, 25 bp, Homo sapien
gacccagttttgatcaggtgctgat

SEQ ID NO: 4476662 - DNA, 25 bp, Homo sapien
gaagatgtcttaattgattgaccca

SEQ ID NO: 4476663 - DNA, 25 bp, Homo sapien
aggtgctgatccattcaacagtggg

SEQ ID NO: 4476664 - DNA, 25 bp, Homo sapien
gaaggctgtatagtttcaaggtcat

SEQ ID NO: 4476665 - DNA, 25 bp, Homo sapien
ccatgctgaggcgatagcttcactt

SEQ ID NO: 4476666 - DNA, 25 bp, Homo sapien
cttaggagatgtcggataagtactt

SEQ ID NO: 4476667 - DNA, 25 bp, Homo sapien
gggtgcctgttgatggaaatttcca

SEQ ID NO: 4476668 - DNA, 25 bp, Homo sapien
agcttcactttagcgctagtcttca

SEQ ID NO: 4476669 - DNA, 25 bp, Homo sapien
cccgggcacgaagcatctcaaagag

SEQ ID NO: 4476670 - DNA, 25 bp, Homo sapien
tgaactctgggaaacaaaccgccca

SEQ ID NO: 4476671 - DNA, 25 bp, Homo sapien
tcccacactgttgcaatttactaca

SEQ ID NO: 4476672 - DNA, 25 bp, Homo sapien
atttactacaagtcttagcacgagc

SEQ ID NO: 4476673 - DNA, 25 bp, Homo sapien
caatatctgtgaagttaacttccat

SEQ ID NO: 4476674 - DNA, 25 bp, Homo sapien
gcccagtgaccttttgtctgaaaca

SEQ ID NO: 4476675 - DNA, 25 bp, Homo sapien
tgtctgaaacaagacaatatctgtg

SEQ ID NO: 4476676 - DNA, 25 bp, Homo sapien
gtctctcagtgacagcccagtgacc

SEQ ID NO: 4476677 - DNA, 25 bp, Homo sapien
agcccctggaaataacgctttcgca

SEQ ID NO: 4476678 - DNA, 25 bp, Homo sapien
cgcattacgatagaatttctgcaca

SEQ ID NO: 4476679 - DNA, 25 bp, Homo sapien
tttctgcacactaaagatgttccgc

SEQ ID NO: 4476680 - DNA, 25 bp, Homo sapien
aaagatgttccgctcatcccaaaca

SEQ ID NO: 4476681 - DNA, 25 bp, Homo sapien
ctctggtaggcctttctcttaaata

SEQ ID NO: 4476682 - DNA, 25 bp, Homo sapien
tagatctatgaaaggtaaggcctgg

SEQ ID NO: 4476683 - DNA, 25 bp, Homo sapien
ttctcttaaataaattggcagcttt

SEQ ID NO: 4476684 - DNA, 25 bp, Homo sapien
cagaatgcacagctcatatctctgg

SEQ ID NO: 4476685 - DNA, 25 bp, Homo sapien
gggcttgtctagagagatttgactt

SEQ ID NO: 4476686 - DNA, 25 bp, Homo sapien
ttttcacaattgtcaaaatgctttc

SEQ ID NO: 4476687 - DNA, 25 bp, Homo sapien
tgagcacatttctctgaaccacagt

SEQ ID NO: 4476688 - DNA, 25 bp, Homo sapien
ctcatcgtgggcttgtctagagaga

SEQ ID NO: 4476689 - DNA, 25 bp, Homo sapien
tactctgtacagaattgccttctcc

SEQ ID NO: 4476690 - DNA, 25 bp, Homo sapien
cgcaagaaacaaatccaccatagga

SEQ ID NO: 4476691 - DNA, 25 bp, Homo sapien
acaaatccaccataggactggttat

SEQ ID NO: 4476692 - DNA, 25 bp, Homo sapien
tctgtacagaattgccttctccagg

SEQ ID NO: 4476693 - DNA, 25 bp, Homo sapien
tgtccacatgcaacaaccgttcttt

SEQ ID NO: 4476694 - DNA, 25 bp, Homo sapien
gattgtccacatgcaacaaccgttc

SEQ ID NO: 4476695 - DNA, 25 bp, Homo sapien
ctgattgtccacatgcaacaaccgt

SEQ ID NO: 4476696 - DNA, 25 bp, Homo sapien
cacatgcaacaaccgttctttaagc

SEQ ID NO: 4476697 - DNA, 25 bp, Homo sapien
tctgacggtcttactggtttgatgg

SEQ ID NO: 4476698 - DNA, 25 bp, Homo sapien
tactgcttctgacggtcttactggt

SEQ ID NO: 4476699 - DNA, 25 bp, Homo sapien
gtcttactggtttgatggttgtcca

SEQ ID NO: 4476700 - DNA, 25 bp, Homo sapien
tgttgcatttactgcttctgacggt

SEQ ID NO: 4476701 - DNA, 25 bp, Homo sapien
tcagtaattaagatggaatttgctg

SEQ ID NO: 4476702 - DNA, 25 bp, Homo sapien
catcagtaattaagatggaatttgc

SEQ ID NO: 4476703 - DNA, 25 bp, Homo sapien
gcatcagtaattaagatggaatttg

SEQ ID NO: 4476704 - DNA, 25 bp, Homo sapien
aagcatcagtaattaagatggaatt

SEQ ID NO: 4476705 - DNA, 25 bp, Homo sapien
gagcagatggtgttgtttcactcca

SEQ ID NO: 4476706 - DNA, 25 bp, Homo sapien
cttgagaaggagttgacgtgcttct

SEQ ID NO: 4476707 - DNA, 25 bp, Homo sapien
tgtgaaatgagcagatggtgttgtt

SEQ ID NO: 4476708 - DNA, 25 bp, Homo sapien
caatttgttttgcatggactgagga

SEQ ID NO: 4476709 - DNA, 25 bp, Homo sapien
ctcaaagtacgtgtctgagcagcag

SEQ ID NO: 4476710 - DNA, 25 bp, Homo sapien
tacactttctcaaagtacgtgtctg

SEQ ID NO: 4476711 - DNA, 25 bp, Homo sapien
agaaagttagttttgtggcctctgg

SEQ ID NO: 4476712 - DNA, 25 bp, Homo sapien
ttcagggctgtcagcgtgtacattt

SEQ ID NO: 4476713 - DNA, 25 bp, Homo sapien
gcctggccacaaaatactatcttaa

SEQ ID NO: 4476714 - DNA, 25 bp, Homo sapien
gaaggaccctggcattttatgacag

SEQ ID NO: 4476715 - DNA, 25 bp, Homo sapien
aatggaactggagaatggagcacct

SEQ ID NO: 4476716 - DNA, 25 bp, Homo sapien
ctatcttaagcagaaataaagttta

SEQ ID NO: 4476717 - DNA, 25 bp, Homo sapien
ggctcccaagccgggccgccgtcgc

SEQ ID NO: 4476718 - DNA, 25 bp, Homo sapien
ggcgagaggcgctccgagctcaggc

SEQ ID NO: 4476719 - DNA, 25 bp, Homo sapien
gcgtgggcgcgcacctctgcacagt

SEQ ID NO: 4476720 - DNA, 25 bp, Homo sapien
tggagcctctatatagggcctcaga

SEQ ID NO: 4476721 - DNA, 25 bp, Homo sapien
aggcgctccgagctcaggctggtcc

SEQ ID NO: 4476722 - DNA, 25 bp, Homo sapien
ctccaggttccaggcgccgccaccc

SEQ ID NO: 4476723 - DNA, 25 bp, Homo sapien
ctcgctgcaagctcggctcccgcgg

SEQ ID NO: 4476724 - DNA, 25 bp, Homo sapien
tcccgcgcgcctcagccggtccctc

SEQ ID NO: 4476725 - DNA, 25 bp, Homo sapien
gaggagagcgaagaaggggagtcag

SEQ ID NO: 4476726 - DNA, 25 bp, Homo sapien
gggtgctgaggagtcgccgggctcc

SEQ ID NO: 4476727 - DNA, 25 bp, Homo sapien
gactgcggcgcggagccgctcctgg

SEQ ID NO: 4476728 - DNA, 25 bp, Homo sapien
cagcaggcagtagagccagaaggag

SEQ ID NO: 4476729 - DNA, 25 bp, Homo sapien
tgcggcgcggagccgctcctggcgg

SEQ ID NO: 4476730 - DNA, 25 bp, Homo sapien
tctactggtgctagtgtgagcacaa

SEQ ID NO: 4476731 - DNA, 25 bp, Homo sapien
tagtggcctctactggtgctagtgt

SEQ ID NO: 4476732 - DNA, 25 bp, Homo sapien
tgctagtgtgagcacaagaatgtcc

SEQ ID NO: 4476733 - DNA, 25 bp, Homo sapien
tagtgtgagcacaagaatgtcccac

SEQ ID NO: 4476734 - DNA, 25 bp, Homo sapien
tcaactgctgagtgtatcctgctca

SEQ ID NO: 4476735 - DNA, 25 bp, Homo sapien
cgttggtccccttaataggaatgca

SEQ ID NO: 4476736 - DNA, 25 bp, Homo sapien
cctgctcaacaataccgtaaggtcc

SEQ ID NO: 4476737 - DNA, 25 bp, Homo sapien
aggtccttcccggaaggcttggcat

SEQ ID NO: 4476738 - DNA, 25 bp, Homo sapien
gagacagtaacttccgtttatggga

SEQ ID NO: 4476739 - DNA, 25 bp, Homo sapien
taataaacaggttaggccagtgcag

SEQ ID NO: 4476740 - DNA, 25 bp, Homo sapien
cacttctgatcagctatgggctcag

SEQ ID NO: 4476741 - DNA, 25 bp, Homo sapien
tgggactcggagaaatgcatttact

SEQ ID NO: 4476742 - DNA, 25 bp, Homo sapien
gatacctccaagaaaaaaggctggc

SEQ ID NO: 4476743 - DNA, 25 bp, Homo sapien
aaaggctggcaaagcatctggttca

SEQ ID NO: 4476744 - DNA, 25 bp, Homo sapien
ggctggcaaagcatctggttcagca

SEQ ID NO: 4476745 - DNA, 25 bp, Homo sapien
agaaaaaaggctggcaaagcatctg

SEQ ID NO: 4476746 - DNA, 25 bp, Homo sapien
ctccactggaaatcacagaatagcg

SEQ ID NO: 4476747 - DNA, 25 bp, Homo sapien
gacaagcatatgtggacggacccat

SEQ ID NO: 4476748 - DNA, 25 bp, Homo sapien
tcacagaatagcgacaagcatatgt

SEQ ID NO: 4476749 - DNA, 25 bp, Homo sapien
gaatagcgacaagcatatgtggacg

SEQ ID NO: 4476750 - DNA, 25 bp, Homo sapien
gggtgccagtatttcatatgcttgc

SEQ ID NO: 4476751 - DNA, 25 bp, Homo sapien
ccagtatttcatatgcttgcaaagc

SEQ ID NO: 4476752 - DNA, 25 bp, Homo sapien
cctggtcatagggtgccagtatttc

SEQ ID NO: 4476753 - DNA, 25 bp, Homo sapien
agcaaacagtgtcaaggagaggaag

SEQ ID NO: 4476754 - DNA, 25 bp, Homo sapien
tccacttctttcatactcctgaagc

SEQ ID NO: 4476755 - DNA, 25 bp, Homo sapien
cataacctaacttcagaaagctctc

SEQ ID NO: 4476756 - DNA, 25 bp, Homo sapien
tcctgaagcttattgccatcaatta

SEQ ID NO: 4476757 - DNA, 25 bp, Homo sapien
tcaattatttgtaggtctcccccag

SEQ ID NO: 4476758 - DNA, 25 bp, Homo sapien
ccaaaattgggctactgcactcaag

SEQ ID NO: 4476759 - DNA, 25 bp, Homo sapien
gggcccggagcagggagtgcggagg

SEQ ID NO: 4476760 - DNA, 25 bp, Homo sapien
ccggagcagggagtgcggaggttgc

SEQ ID NO: 4476761 - DNA, 25 bp, Homo sapien
gcccggagcagggagtgcggaggtt

SEQ ID NO: 4476762 - DNA, 25 bp, Homo sapien
tggagtgaacgttcgaatgctggct

SEQ ID NO: 4476763 - DNA, 25 bp, Homo sapien
gagaagctggcgtcgatcatctgat

SEQ ID NO: 4476764 - DNA, 25 bp, Homo sapien
tccaagactctcaacagtggccaca

SEQ ID NO: 4476765 - DNA, 25 bp, Homo sapien
taactgagagtgtatccaccggctc

SEQ ID NO: 4476766 - DNA, 25 bp, Homo sapien
catcactatactttggtggcccacc

SEQ ID NO: 4476767 - DNA, 25 bp, Homo sapien
ttcagttgcattgctgataaccagc

SEQ ID NO: 4476768 - DNA, 25 bp, Homo sapien
cacctcacaaatgggaccaaatctg

SEQ ID NO: 4476769 - DNA, 25 bp, Homo sapien
ccagcataaactgaggaaggttctg

SEQ ID NO: 4476770 - DNA, 25 bp, Homo sapien
tctaacagaacaatgtttacccatt

SEQ ID NO: 4476771 - DNA, 25 bp, Homo sapien
ctaacagaacaatgtttacccattc

SEQ ID NO: 4476772 - DNA, 25 bp, Homo sapien
gcaacacatggcaacactacatcct

SEQ ID NO: 4476773 - DNA, 25 bp, Homo sapien
ctgaagcaacacatggcaacactac

SEQ ID NO: 4476774 - DNA, 25 bp, Homo sapien
cctgaccaatgactctgactaaggg

SEQ ID NO: 4476775 - DNA, 25 bp, Homo sapien
aatgactctgactaagggagaaggc

SEQ ID NO: 4476776 - DNA, 25 bp, Homo sapien
tctgtgtcaagtgcctcctcatttt

SEQ ID NO: 4476777 - DNA, 25 bp, Homo sapien
catccatttaatggttggagtagga

SEQ ID NO: 4476778 - DNA, 25 bp, Homo sapien
catttttcatccatttaatggttgg

SEQ ID NO: 4476779 - DNA, 25 bp, Homo sapien
ctttctgtgtcaagtgcctcctcat

SEQ ID NO: 4476780 - DNA, 25 bp, Homo sapien
aggcttttaggcagacaacacttac

SEQ ID NO: 4476781 - DNA, 25 bp, Homo sapien
ctgccagcaataccaatctttcaga

SEQ ID NO: 4476782 - DNA, 25 bp, Homo sapien
tgccagcaataccaatctttcagag

SEQ ID NO: 4476783 - DNA, 25 bp, Homo sapien
gcatcatcctcagtaacatcactga

SEQ ID NO: 4476784 - DNA, 25 bp, Homo sapien
tctgcttgagcttcaattgtctcat

SEQ ID NO: 4476785 - DNA, 25 bp, Homo sapien
tacaaaaataagtcccagcatcatc

SEQ ID NO: 4476786 - DNA, 25 bp, Homo sapien
ctctgcttgagcttcaattgtctca

SEQ ID NO: 4476787 - DNA, 25 bp, Homo sapien
tattttctgacgtctgaatcaaaga

SEQ ID NO: 4476788 - DNA, 25 bp, Homo sapien
ttattttctgacgtctgaatcaaag

SEQ ID NO: 4476789 - DNA, 25 bp, Homo sapien
ttttctgacgtctgaatcaaagaac

SEQ ID NO: 4476790 - DNA, 25 bp, Homo sapien
attttctgacgtctgaatcaaagaa

SEQ ID NO: 4476791 - DNA, 25 bp, Homo sapien
gagagaccaggttagaactagagaa

SEQ ID NO: 4476792 - DNA, 25 bp, Homo sapien
aatataggtaagagatgacttggac

SEQ ID NO: 4476793 - DNA, 25 bp, Homo sapien
gccactctgtgaagaatggatttga

SEQ ID NO: 4476794 - DNA, 25 bp, Homo sapien
tagcacaggtaaaaaggtaggcagt

SEQ ID NO: 4476795 - DNA, 25 bp, Homo sapien
gagacaagaataagctccactgaag

SEQ ID NO: 4476796 - DNA, 25 bp, Homo sapien
tctgtatgagacactccagccaaaa

SEQ ID NO: 4476797 - DNA, 25 bp, Homo sapien
ggagacaagaataagctccactgaa

SEQ ID NO: 4476798 - DNA, 25 bp, Homo sapien
actgaagaaatctgtatgagacact

SEQ ID NO: 4476799 - DNA, 25 bp, Homo sapien
tagagtcgtgggatgtttggttccc

SEQ ID NO: 4476800 - DNA, 25 bp, Homo sapien
cacaacatctaacatccattcattc

SEQ ID NO: 4476801 - DNA, 25 bp, Homo sapien
tcatcatcgtacacttgggttgttt

SEQ ID NO: 4476802 - DNA, 25 bp, Homo sapien
cagctgtgaatgtgggtgtagaaat

SEQ ID NO: 4476803 - DNA, 25 bp, Homo sapien
cgtgccaaagttgcatatcaccaaa

SEQ ID NO: 4476804 - DNA, 25 bp, Homo sapien
aaactaactgttctgcctgcccagt

SEQ ID NO: 4476805 - DNA, 25 bp, Homo sapien
caaaatgcagtcactcgtgccaaag

SEQ ID NO: 4476806 - DNA, 25 bp, Homo sapien
tgttcctgctcaagtttccctacaa

SEQ ID NO: 4476807 - DNA, 25 bp, Homo sapien
tttcctgtgccccagctttggccca

SEQ ID NO: 4476808 - DNA, 25 bp, Homo sapien
ttcctgtgccccagctttggcccat

SEQ ID NO: 4476809 - DNA, 25 bp, Homo sapien
agcatatatattagtaggctgcttc

SEQ ID NO: 4476810 - DNA, 25 bp, Homo sapien
tatattagtaggctgcttcaggaat

SEQ ID NO: 4476811 - DNA, 25 bp, Homo sapien
tatatattagtaggctgcttcagga

SEQ ID NO: 4476812 - DNA, 25 bp, Homo sapien
attagtaggctgcttcaggaattca

SEQ ID NO: 4476813 - DNA, 25 bp, Homo sapien
cccacttcacagttggagttggttt

SEQ ID NO: 4476814 - DNA, 25 bp, Homo sapien
atttttgacccacttcacagttgga

SEQ ID NO: 4476815 - DNA, 25 bp, Homo sapien
taaaataatcacttgggataaccat

SEQ ID NO: 4476816 - DNA, 25 bp, Homo sapien
tcacttgggataaccatatccccat

SEQ ID NO: 4476817 - DNA, 25 bp, Homo sapien
caaggattatcagttgggctccagc

SEQ ID NO: 4476818 - DNA, 25 bp, Homo sapien
ggctccagcttgtgcatttccaaca

SEQ ID NO: 4476819 - DNA, 25 bp, Homo sapien
cccaaaacttgaagattatgttcct

SEQ ID NO: 4476820 - DNA, 25 bp, Homo sapien
gcaatgcactgatagaacccttcat

SEQ ID NO: 4476821 - DNA, 25 bp, Homo sapien
tctagtgtactaccctggcagcctc

SEQ ID NO: 4476822 - DNA, 25 bp, Homo sapien
cagggtctggatctcatccgtaaaa

SEQ ID NO: 4476823 - DNA, 25 bp, Homo sapien
tccactgggtggttttgtagcagaa

SEQ ID NO: 4476824 - DNA, 25 bp, Homo sapien
tgctcaaattacagtgtgggttccc

SEQ ID NO: 4476825 - DNA, 25 bp, Homo sapien
taggaacttcctggcatacttaacc

SEQ ID NO: 4476826 - DNA, 25 bp, Homo sapien
tacatgcccaataacgtcactaaaa

SEQ ID NO: 4476827 - DNA, 25 bp, Homo sapien
tttcagaggaaagcccaattaggat

SEQ ID NO: 4476828 - DNA, 25 bp, Homo sapien
tcagctcataaaacgctattctcaa

SEQ ID NO: 4476829 - DNA, 25 bp, Homo sapien
gagtactctgtggagccccaaggaa

SEQ ID NO: 4476830 - DNA, 25 bp, Homo sapien
gccatagttggccttgcagttaaag

SEQ ID NO: 4476831 - DNA, 25 bp, Homo sapien
cccactggtttgaggcttaaaggag

SEQ ID NO: 4476832 - DNA, 25 bp, Homo sapien
tgtaaactcccattctgtctgaggc

SEQ ID NO: 4476833 - DNA, 25 bp, Homo sapien
catcaaggagcacaactgctaaatt

SEQ ID NO: 4476834 - DNA, 25 bp, Homo sapien
aactatcttcgaaaatggctgtacc

SEQ ID NO: 4476835 - DNA, 25 bp, Homo sapien
ctggcaaaaagtctgctgcaattct

SEQ ID NO: 4476836 - DNA, 25 bp, Homo sapien
tgttatagcctctgatattgtccca

SEQ ID NO: 4476837 - DNA, 25 bp, Homo sapien
caaacttataatagcagaggtgagc

SEQ ID NO: 4476838 - DNA, 25 bp, Homo sapien
gagaccaaatgtcaggtaaagcctg

SEQ ID NO: 4476839 - DNA, 25 bp, Homo sapien
catgatacgtatctttcagccgtga

SEQ ID NO: 4476840 - DNA, 25 bp, Homo sapien
tgtgccctagtcactccaaaaagga

SEQ ID NO: 4476841 - DNA, 25 bp, Homo sapien
gagattcgcaaactgtgcccacagg

SEQ ID NO: 4476842 - DNA, 25 bp, Homo sapien
aatctgttggactgtggagcatcct

SEQ ID NO: 4476843 - DNA, 25 bp, Homo sapien
cacaggagaattgggttatcttgca

SEQ ID NO: 4476844 - DNA, 25 bp, Homo sapien
gaaaagccaccagatataacattga

SEQ ID NO: 4476845 - DNA, 25 bp, Homo sapien
aatagttggctaatgtgtgattagg

SEQ ID NO: 4476846 - DNA, 25 bp, Homo sapien
ggaaagaatcagagatttggacaaa

SEQ ID NO: 4476847 - DNA, 25 bp, Homo sapien
gattaggtttgtatcctttcttcac

SEQ ID NO: 4476848 - DNA, 25 bp, Homo sapien
tactgactcgaaccattaattgttc

SEQ ID NO: 4476849 - DNA, 25 bp, Homo sapien
atttcgcaatctatttttaaattca

SEQ ID NO: 4476850 - DNA, 25 bp, Homo sapien
ataatttcgcaatctatttttaaat

SEQ ID NO: 4476851 - DNA, 25 bp, Homo sapien
atgataatttcgcaatctattttta

SEQ ID NO: 4476852 - DNA, 25 bp, Homo sapien
tttcgcaatctatttttaaattcaa

SEQ ID NO: 4476853 - DNA, 25 bp, Homo sapien
ccttctggtgttttagcactgcata

SEQ ID NO: 4476854 - DNA, 25 bp, Homo sapien
gtctcttaagcatgcatcaattggg

SEQ ID NO: 4476855 - DNA, 25 bp, Homo sapien
cacacagacgcagcatggaaactat

SEQ ID NO: 4476856 - DNA, 25 bp, Homo sapien
tatgaaagctagtctataagcagcc

SEQ ID NO: 4476857 - DNA, 25 bp, Homo sapien
ccttggcaataggagatttacactc

SEQ ID NO: 4476858 - DNA, 25 bp, Homo sapien
ttggcaataggagatttacactcag

SEQ ID NO: 4476859 - DNA, 25 bp, Homo sapien
ggcaataggagatttacactcagga

SEQ ID NO: 4476860 - DNA, 25 bp, Homo sapien
tggcaataggagatttacactcagg

SEQ ID NO: 4476861 - DNA, 25 bp, Homo sapien
taagtagcagaaattgaattgttcc

SEQ ID NO: 4476862 - DNA, 25 bp, Homo sapien
acactggcccagtcgctgaaaccta

SEQ ID NO: 4476863 - DNA, 25 bp, Homo sapien
gcagaaattgaattgttccgtggaa

SEQ ID NO: 4476864 - DNA, 25 bp, Homo sapien
ggcctgcacagggttgtaagtagca

SEQ ID NO: 4476865 - DNA, 25 bp, Homo sapien
ggaggtaatgttgggatggcaacat

SEQ ID NO: 4476866 - DNA, 25 bp, Homo sapien
tgggaggtaatgttgggatggcaac

SEQ ID NO: 4476867 - DNA, 25 bp, Homo sapien
aagtgggaggtaatgttgggatggc

SEQ ID NO: 4476868 - DNA, 25 bp, Homo sapien
agtgaagtgggaggtaatgttggga

SEQ ID NO: 4476869 - DNA, 25 bp, Homo sapien
ctgaaggcagtggtcccgttgtggc

SEQ ID NO: 4476870 - DNA, 25 bp, Homo sapien
tgaaggcagtggtcccgttgtggct

SEQ ID NO: 4476871 - DNA, 25 bp, Homo sapien
ggcagtggtcccgttgtggctggtg

SEQ ID NO: 4476872 - DNA, 25 bp, Homo sapien
aaggcagtggtcccgttgtggctgg

SEQ ID NO: 4476873 - DNA, 25 bp, Homo sapien
caatttgatgaagcgggtagagacc

SEQ ID NO: 4476874 - DNA, 25 bp, Homo sapien
gttgtctccgtgaggatctgatgca

SEQ ID NO: 4476875 - DNA, 25 bp, Homo sapien
aatcccttccttggtgtagaacaca

SEQ ID NO: 4476876 - DNA, 25 bp, Homo sapien
cagggaggccacgacatcccgagga

SEQ ID NO: 4476877 - DNA, 25 bp, Homo sapien
ctcctgggtgactggtattctcaac

SEQ ID NO: 4476878 - DNA, 25 bp, Homo sapien
tcctgggtgactggtattctcaaca

SEQ ID NO: 4476879 - DNA, 25 bp, Homo sapien
taactctaaagatgtacacggtcgc

SEQ ID NO: 4476880 - DNA, 25 bp, Homo sapien
cctcaggttgtgtttctactcgcag

SEQ ID NO: 4476881 - DNA, 25 bp, Homo sapien
tactcgcagtggagctgaactctct

SEQ ID NO: 4476882 - DNA, 25 bp, Homo sapien
cgctggcattaggttttgaatggtt

SEQ ID NO: 4476883 - DNA, 25 bp, Homo sapien
gcatatgcacgaaggttaggtgctg

SEQ ID NO: 4476884 - DNA, 25 bp, Homo sapien
tgcatatgcacgaaggttaggtgct

SEQ ID NO: 4476885 - DNA, 25 bp, Homo sapien
ctgcatatgcacgaaggttaggtgc

SEQ ID NO: 4476886 - DNA, 25 bp, Homo sapien
catatgcacgaaggttaggtgctgg

SEQ ID NO: 4476887 - DNA, 25 bp, Homo sapien
cccttttccatgtagtacaatttat

SEQ ID NO: 4476888 - DNA, 25 bp, Homo sapien
gaatttccccattgccagacactgg

SEQ ID NO: 4476889 - DNA, 25 bp, Homo sapien
taattctgaatttccccattgccag

SEQ ID NO: 4476890 - DNA, 25 bp, Homo sapien
tttcccacgtaacagtgatggaggt

SEQ ID NO: 4476891 - DNA, 25 bp, Homo sapien
catgtttattgtaggccaccactcg

SEQ ID NO: 4476892 - DNA, 25 bp, Homo sapien
gcaacatctggtgtggaaactccag

SEQ ID NO: 4476893 - DNA, 25 bp, Homo sapien
catctgacaatgttcgaacagcaac

SEQ ID NO: 4476894 - DNA, 25 bp, Homo sapien
ggtgtaagagtgacttgaaacatca

SEQ ID NO: 4476895 - DNA, 25 bp, Homo sapien
tccaaggacagattctgaggagcag

SEQ ID NO: 4476896 - DNA, 25 bp, Homo sapien
tctcacttccaaggacagattctga

SEQ ID NO: 4476897 - DNA, 25 bp, Homo sapien
tgaatttctcacttccaaggacaga

SEQ ID NO: 4476898 - DNA, 25 bp, Homo sapien
tttgaatttctcacttccaaggaca

SEQ ID NO: 4476899 - DNA, 25 bp, Homo sapien
aggtggctgccagtgaatcataata

SEQ ID NO: 4476900 - DNA, 25 bp, Homo sapien
gtggctgccagtgaatcataatact

SEQ ID NO: 4476901 - DNA, 25 bp, Homo sapien
tggagcaggtggctgccagtgaatc

SEQ ID NO: 4476902 - DNA, 25 bp, Homo sapien
gagcaggtggctgccagtgaatcat

SEQ ID NO: 4476903 - DNA, 25 bp, Homo sapien
gacatcactctttcgggaggccttt

SEQ ID NO: 4476904 - DNA, 25 bp, Homo sapien
cggtagcgaatcttgtagccagtaa

SEQ ID NO: 4476905 - DNA, 25 bp, Homo sapien
agtgacatcactctttcgggaggcc

SEQ ID NO: 4476906 - DNA, 25 bp, Homo sapien
tcgggaggcctttcggtagcgaatc

SEQ ID NO: 4476907 - DNA, 25 bp, Homo sapien
cttcaatcagctgagacagctgtgt

SEQ ID NO: 4476908 - DNA, 25 bp, Homo sapien
gctgagacagctgtgtcccgcttac

SEQ ID NO: 4476909 - DNA, 25 bp, Homo sapien
cagctgagacagctgtgtcccgctt

SEQ ID NO: 4476910 - DNA, 25 bp, Homo sapien
atcagctgagacagctgtgtcccgc

SEQ ID NO: 4476911 - DNA, 25 bp, Homo sapien
tgaggcaatactccaacaggcccag

SEQ ID NO: 4476912 - DNA, 25 bp, Homo sapien
aaactaagccgatgcagctgaggca

SEQ ID NO: 4476913 - DNA, 25 bp, Homo sapien
tgcaaaacagatgggctctattgag

SEQ ID NO: 4476914 - DNA, 25 bp, Homo sapien
aaattcatctgtttgcttgcaaaac

SEQ ID NO: 4476915 - DNA, 25 bp, Homo sapien
cctattctgaaggaagtcaatccca

SEQ ID NO: 4476916 - DNA, 25 bp, Homo sapien
tatggactgcagctaagagatgtgg

SEQ ID NO: 4476917 - DNA, 25 bp, Homo sapien
tgcccctggagacaaacattcacct

SEQ ID NO: 4476918 - DNA, 25 bp, Homo sapien
tggaagactgaaagacatgcccctg

SEQ ID NO: 4476919 - DNA, 25 bp, Homo sapien
ttatctgaatgtagagtaaaatatg

SEQ ID NO: 4476920 - DNA, 25 bp, Homo sapien
cccacacaatgaaccagaaagtact

SEQ ID NO: 4476921 - DNA, 25 bp, Homo sapien
ttggccaggacatgagaaaagccct

SEQ ID NO: 4476922 - DNA, 25 bp, Homo sapien
aaagtctattctacaaaccagggca

SEQ ID NO: 4476923 - DNA, 25 bp, Homo sapien
tagctaatcctgtcccgtggtaggg

SEQ ID NO: 4476924 - DNA, 25 bp, Homo sapien
attatactcagtcccccgatcaaga

SEQ ID NO: 4476925 - DNA, 25 bp, Homo sapien
cagccagtcagttgccgggcctgta

SEQ ID NO: 4476926 - DNA, 25 bp, Homo sapien
gcagccactcggaaattatactcag

SEQ ID NO: 4476927 - DNA, 25 bp, Homo sapien
taccattgattgttagagcagccac

SEQ ID NO: 4476928 - DNA, 25 bp, Homo sapien
gagccatatccaccccaagtctgtg

SEQ ID NO: 4476929 - DNA, 25 bp, Homo sapien
tatctattgtgttccagtcttgcca

SEQ ID NO: 4476930 - DNA, 25 bp, Homo sapien
tgcaatacaggaacaacagcagcgt

SEQ ID NO: 4476931 - DNA, 25 bp, Homo sapien
gctctagttctgcttgaaaggacag

SEQ ID NO: 4476932 - DNA, 25 bp, Homo sapien
tatagtccactttgatggtctgggc

SEQ ID NO: 4476933 - DNA, 25 bp, Homo sapien
catgagggctgccaatgccataacc

SEQ ID NO: 4476934 - DNA, 25 bp, Homo sapien
cgatgctagtaacgagcgggcgtac

SEQ ID NO: 4476935 - DNA, 25 bp, Homo sapien
cgtacgtgaagagagctaggcactt

SEQ ID NO: 4476936 - DNA, 25 bp, Homo sapien
taacatgcagaaattacttgtacta

SEQ ID NO: 4476937 - DNA, 25 bp, Homo sapien
gggaattcaggtgaataacatgcag

SEQ ID NO: 4476938 - DNA, 25 bp, Homo sapien
tacttgtactattttcgcaattttc

SEQ ID NO: 4476939 - DNA, 25 bp, Homo sapien
aagaaaggaatctcccacacaatta

SEQ ID NO: 4476940 - DNA, 25 bp, Homo sapien
atgctttcagggtaatcacatagtg

SEQ ID NO: 4476941 - DNA, 25 bp, Homo sapien
gccttcacccacgttattaaatgct

SEQ ID NO: 4476942 - DNA, 25 bp, Homo sapien
atacagggggatgccttcacccacg

SEQ ID NO: 4476943 - DNA, 25 bp, Homo sapien
cactctcatacagggggatgccttc

SEQ ID NO: 4476944 - DNA, 25 bp, Homo sapien
cactattcatgtaagggtccaacac

SEQ ID NO: 4476945 - DNA, 25 bp, Homo sapien
caaaaggaactcaagggtgtactct

SEQ ID NO: 4476946 - DNA, 25 bp, Homo sapien
tcctgatgtcctgggtctaatggca

SEQ ID NO: 4476947 - DNA, 25 bp, Homo sapien
tcagccatgggtattgacggtatct

SEQ ID NO: 4476948 - DNA, 25 bp, Homo sapien
tggagtgtatggagcattaataaca

SEQ ID NO: 4476949 - DNA, 25 bp, Homo sapien
gagtgtatggagcattaataacaaa

SEQ ID NO: 4476950 - DNA, 25 bp, Homo sapien
gtgtatggagcattaataacaaata

SEQ ID NO: 4476951 - DNA, 25 bp, Homo sapien
tgtatggagcattaataacaaataa

SEQ ID NO: 4476952 - DNA, 25 bp, Homo sapien
tgactcagaatggaagcctgaactc

SEQ ID NO: 4476953 - DNA, 25 bp, Homo sapien
tcgggagtctgtaatcttctggtgc

SEQ ID NO: 4476954 - DNA, 25 bp, Homo sapien
gcagcgagttgtctgcccacgtaat

SEQ ID NO: 4476955 - DNA, 25 bp, Homo sapien
ttccatcggacggtgtagtatcggg

SEQ ID NO: 4476956 - DNA, 25 bp, Homo sapien
gatcttcgacctttggtcaccatca

SEQ ID NO: 4476957 - DNA, 25 bp, Homo sapien
gggctgtcatactccatgtacttga

SEQ ID NO: 4476958 - DNA, 25 bp, Homo sapien
tgtattcggctttaaaccagtcacc

SEQ ID NO: 4476959 - DNA, 25 bp, Homo sapien
cagagaattcatagagtgtattcgg

SEQ ID NO: 4476960 - DNA, 25 bp, Homo sapien
ctgctttatggatcaggacaccaaa

SEQ ID NO: 4476961 - DNA, 25 bp, Homo sapien
tactgccaactattgaggttacagc

SEQ ID NO: 4476962 - DNA, 25 bp, Homo sapien
ttatgcaacaggacaatacgtttcc

SEQ ID NO: 4476963 - DNA, 25 bp, Homo sapien
tcaagtggcatttgtaccaagtacc

SEQ ID NO: 4476964 - DNA, 25 bp, Homo sapien
ggctgccaattcacaattatggtct

SEQ ID NO: 4476965 - DNA, 25 bp, Homo sapien
ttcggagggaggctgccaattcaca

SEQ ID NO: 4476966 - DNA, 25 bp, Homo sapien
aattttgccattggcttcggaggga

SEQ ID NO: 4476967 - DNA, 25 bp, Homo sapien
tctttactcacaacagtcacatcct

SEQ ID NO: 4476968 - DNA, 25 bp, Homo sapien
caaagtcccactatagccaaaggct

SEQ ID NO: 4476969 - DNA, 25 bp, Homo sapien
tgaagctgtccatctaggcggagac

SEQ ID NO: 4476970 - DNA, 25 bp, Homo sapien
cattttatgccgctatgggcgacca

SEQ ID NO: 4476971 - DNA, 25 bp, Homo sapien
tattactctacagaaccagggaggg

SEQ ID NO: 4476972 - DNA, 25 bp, Homo sapien
taggtgttctgaattggacagcttc

SEQ ID NO: 4476973 - DNA, 25 bp, Homo sapien
gccctttgagttccgtgcctggatt

SEQ ID NO: 4476974 - DNA, 25 bp, Homo sapien
caggctcaataacccagtcatgtat

SEQ ID NO: 4476975 - DNA, 25 bp, Homo sapien
tgagtcagtctgtttcccacaacag

SEQ ID NO: 4476976 - DNA, 25 bp, Homo sapien
ttaggcattttatcagaggagtccg

SEQ ID NO: 4476977 - DNA, 25 bp, Homo sapien
tgtgtatgcagttcatctaacagaa

SEQ ID NO: 4476978 - DNA, 25 bp, Homo sapien
tccagtgactaaaacaatgctatgc

SEQ ID NO: 4476979 - DNA, 25 bp, Homo sapien
gagttcctggatatccaaaagggca

SEQ ID NO: 4476980 - DNA, 25 bp, Homo sapien
ttagagctaatgtcaagtacttcca

SEQ ID NO: 4476981 - DNA, 25 bp, Homo sapien
ttggaggtttgtagtcggatcctag

SEQ ID NO: 4476982 - DNA, 25 bp, Homo sapien
ggtttgtagtcggatcctaggtctg

SEQ ID NO: 4476983 - DNA, 25 bp, Homo sapien
ggatcctaggtctggcagccggctt

SEQ ID NO: 4476984 - DNA, 25 bp, Homo sapien
tcctaggtctggcagccggcttcct

SEQ ID NO: 4476985 - DNA, 25 bp, Homo sapien
gcgataatcacaaccaccacgatgg

SEQ ID NO: 4476986 - DNA, 25 bp, Homo sapien
gcagcatattactgtccagaggaga

SEQ ID NO: 4476987 - DNA, 25 bp, Homo sapien
tacgacgggtacaaaagacagcgat

SEQ ID NO: 4476988 - DNA, 25 bp, Homo sapien
tatgaccagcagcatattactgtcc

SEQ ID NO: 4476989 - DNA, 25 bp, Homo sapien
cacagcctgtaagaatgtccacaga

SEQ ID NO: 4476990 - DNA, 25 bp, Homo sapien
tatctgcacttagaccattagccac

SEQ ID NO: 4476991 - DNA, 25 bp, Homo sapien
tcaaaatcccagaggagttcaaggc

SEQ ID NO: 4476992 - DNA, 25 bp, Homo sapien
gatttagaatgacaggcctatggtc

SEQ ID NO: 4476993 - DNA, 25 bp, Homo sapien
cattcactgatttgcaggcagctcg

SEQ ID NO: 4476994 - DNA, 25 bp, Homo sapien
gatctggaggtttcacatctttgga

SEQ ID NO: 4476995 - DNA, 25 bp, Homo sapien
aattccctttgtacttatgagagcc

SEQ ID NO: 4476996 - DNA, 25 bp, Homo sapien
tggagacttatcaatgggtttcagc

SEQ ID NO: 4476997 - DNA, 25 bp, Homo sapien
taaacgtggaggttagttaccagca

SEQ ID NO: 4476998 - DNA, 25 bp, Homo sapien
tggaggttagttaccagcatgtgcc

SEQ ID NO: 4476999 - DNA, 25 bp, Homo sapien
gaggttagttaccagcatgtgccct

SEQ ID NO: 4477000 - DNA, 25 bp, Homo sapien
ctagatgttaaacgtggaggttagt

SEQ ID NO: 4477001 - DNA, 25 bp, Homo sapien
tttggtctcattcctcgccttccag

SEQ ID NO: 4477002 - DNA, 25 bp, Homo sapien
ttggtctcattcctcgccttccagc

SEQ ID NO: 4477003 - DNA, 25 bp, Homo sapien
catttttggtctcattcctcgcctt

SEQ ID NO: 4477004 - DNA, 25 bp, Homo sapien
tttttggtctcattcctcgccttcc

SEQ ID NO: 4477005 - DNA, 25 bp, Homo sapien
ctttttcgagtacattcctaattca

SEQ ID NO: 4477006 - DNA, 25 bp, Homo sapien
tgtttaatcggctttcatgtcttaa

SEQ ID NO: 4477007 - DNA, 25 bp, Homo sapien
tctgatggtcccatctagtactaaa

SEQ ID NO: 4477008 - DNA, 25 bp, Homo sapien
agtagctgtttaatcggctttcatg

SEQ ID NO: 4477009 - DNA, 25 bp, Homo sapien
caattagccattgatttttacgttg

SEQ ID NO: 4477010 - DNA, 25 bp, Homo sapien
taacagttattatcttgcagggaag

SEQ ID NO: 4477011 - DNA, 25 bp, Homo sapien
aaatgaagatactcttttgcatatg

SEQ ID NO: 4477012 - DNA, 25 bp, Homo sapien
cttcccacctcccatacaatccaaa

SEQ ID NO: 4477013 - DNA, 25 bp, Homo sapien
gcttaacatgcttgcacaaacacac

SEQ ID NO: 4477014 - DNA, 25 bp, Homo sapien
cagagaaatgcttaacatgcttgca

SEQ ID NO: 4477015 - DNA, 25 bp, Homo sapien
caagacagagaaatgcttaacatgc

SEQ ID NO: 4477016 - DNA, 25 bp, Homo sapien
aatgaacacaagacagagaaatgct

SEQ ID NO: 4477017 - DNA, 25 bp, Homo sapien
aaatgatggtgagggttatcgaggg

SEQ ID NO: 4477018 - DNA, 25 bp, Homo sapien
gggttatcgagggaatggatgggat

SEQ ID NO: 4477019 - DNA, 25 bp, Homo sapien
aatggatgggatgggcactaatcac

SEQ ID NO: 4477020 - DNA, 25 bp, Homo sapien
gaatggatgggatgggcactaatca

SEQ ID NO: 4477021 - DNA, 25 bp, Homo sapien
tggtagagatgactgcgagctggag

SEQ ID NO: 4477022 - DNA, 25 bp, Homo sapien
tggccctgtctgaaagggacatgga

SEQ ID NO: 4477023 - DNA, 25 bp, Homo sapien
ggacatggatgtgccaatgggccat

SEQ ID NO: 4477024 - DNA, 25 bp, Homo sapien
ctgtggaattggccctgtctgaaag

SEQ ID NO: 4477025 - DNA, 25 bp, Homo sapien
gctgacaaggcctggcggtcactgc

SEQ ID NO: 4477026 - DNA, 25 bp, Homo sapien
tggcggtcactgcaggagaggccaa

SEQ ID NO: 4477027 - DNA, 25 bp, Homo sapien
ggccttcgtgcctccagggactgtg

SEQ ID NO: 4477028 - DNA, 25 bp, Homo sapien
aatgccacaggccttcgtgcctcca

SEQ ID NO: 4477029 - DNA, 25 bp, Homo sapien
tcagtgctgggggtatttcgaacgg

SEQ ID NO: 4477030 - DNA, 25 bp, Homo sapien
tgtcagtgctgggggtatttcgaac

SEQ ID NO: 4477031 - DNA, 25 bp, Homo sapien
gtgtcagtgctgggggtatttcgaa

SEQ ID NO: 4477032 - DNA, 25 bp, Homo sapien
agtgctgggggtatttcgaacggat

SEQ ID NO: 4477033 - DNA, 25 bp, Homo sapien
cagcatgtttgagacgaagaggctg

SEQ ID NO: 4477034 - DNA, 25 bp, Homo sapien
tgcagcatgtttgagacgaagaggc

SEQ ID NO: 4477035 - DNA, 25 bp, Homo sapien
catgtttgagacgaagaggctggca

SEQ ID NO: 4477036 - DNA, 25 bp, Homo sapien
cagtgcagcatgtttgagacgaaga

SEQ ID NO: 4477037 - DNA, 25 bp, Homo sapien
taagaggagctggtagcaccttcag

SEQ ID NO: 4477038 - DNA, 25 bp, Homo sapien
ctggccaagtaagaggagctggtag

SEQ ID NO: 4477039 - DNA, 25 bp, Homo sapien
aagaggagctggtagcaccttcagg

SEQ ID NO: 4477040 - DNA, 25 bp, Homo sapien
aggagctggtagcaccttcagggtc

SEQ ID NO: 4477041 - DNA, 25 bp, Homo sapien
caatgcaggatcataggtgggaggt

SEQ ID NO: 4477042 - DNA, 25 bp, Homo sapien
tgctggcacggcgaagctcttcaat

SEQ ID NO: 4477043 - DNA, 25 bp, Homo sapien
ctgggacagtaatggtgtgcttggc

SEQ ID NO: 4477044 - DNA, 25 bp, Homo sapien
tcttcaatgggtgggaagggcgaac

SEQ ID NO: 4477045 - DNA, 25 bp, Homo sapien
tcggagtcttccaacatccttgtgg

SEQ ID NO: 4477046 - DNA, 25 bp, Homo sapien
tcctagagtcccgatggaggctgtc

SEQ ID NO: 4477047 - DNA, 25 bp, Homo sapien
ctgggaacaaccactggcataggag

SEQ ID NO: 4477048 - DNA, 25 bp, Homo sapien
taggaggccggctccttcctagagt

SEQ ID NO: 4477049 - DNA, 25 bp, Homo sapien
cttcattagtccttccaggtgggcc

SEQ ID NO: 4477050 - DNA, 25 bp, Homo sapien
tagcgtttaggtccttcattagtcc

SEQ ID NO: 4477051 - DNA, 25 bp, Homo sapien
tcatgctgttgtgatagcgtttagg

SEQ ID NO: 4477052 - DNA, 25 bp, Homo sapien
tgttgtgatagcgtttaggtccttc

SEQ ID NO: 4477053 - DNA, 25 bp, Homo sapien
ccctcagagtgatggattaacagct

SEQ ID NO: 4477054 - DNA, 25 bp, Homo sapien
caaccacttgtggagaacaccaagg

SEQ ID NO: 4477055 - DNA, 25 bp, Homo sapien
gacacggcctgaccacaaagtgaaa

SEQ ID NO: 4477056 - DNA, 25 bp, Homo sapien
ttttggcccatggtgcccagtcctg

SEQ ID NO: 4477057 - DNA, 25 bp, Homo sapien
ccaaacaagtgtgtacagacgccag

SEQ ID NO: 4477058 - DNA, 25 bp, Homo sapien
tatgaccaagacatcagggccgcta

SEQ ID NO: 4477059 - DNA, 25 bp, Homo sapien
tagtgacaataaggatggacatgcc

SEQ ID NO: 4477060 - DNA, 25 bp, Homo sapien
caattctgtggcagtatccaggtac

SEQ ID NO: 4477061 - DNA, 25 bp, Homo sapien
ataactctttgaccagaccagagtt

SEQ ID NO: 4477062 - DNA, 25 bp, Homo sapien
aaataactctttgaccagaccagag

SEQ ID NO: 4477063 - DNA, 25 bp, Homo sapien
ggaaaataactctttgaccagacca

SEQ ID NO: 4477064 - DNA, 25 bp, Homo sapien
gaaaataactctttgaccagaccag

SEQ ID NO: 4477065 - DNA, 25 bp, Homo sapien
cctcatagactactggctttacagt

SEQ ID NO: 4477066 - DNA, 25 bp, Homo sapien
gctttacagttgtgaaggcaaccgt

SEQ ID NO: 4477067 - DNA, 25 bp, Homo sapien
aaccgtgaagtcagttagaggctgg

SEQ ID NO: 4477068 - DNA, 25 bp, Homo sapien
tgaaggcaaccgtgaagtcagttag

SEQ ID NO: 4477069 - DNA, 25 bp, Homo sapien
tgtcctcttagcagggtgtgacctc

SEQ ID NO: 4477070 - DNA, 25 bp, Homo sapien
gatgaattcacctgcccacattgtg

SEQ ID NO: 4477071 - DNA, 25 bp, Homo sapien
ccacattgtgaaatccagggcctcc

SEQ ID NO: 4477072 - DNA, 25 bp, Homo sapien
gaaagatgcgtaagatccctacctg

SEQ ID NO: 4477073 - DNA, 25 bp, Homo sapien
tcttaggtaaagactagacgccgcc

SEQ ID NO: 4477074 - DNA, 25 bp, Homo sapien
ggttttgccttgagctatcctggga

SEQ ID NO: 4477075 - DNA, 25 bp, Homo sapien
cctgggatgtgagacaaaccgattt

SEQ ID NO: 4477076 - DNA, 25 bp, Homo sapien
tccccttaaggaaggcagctctgag

SEQ ID NO: 4477077 - DNA, 25 bp, Homo sapien
tcagcactcagccatgtgcctcggg

SEQ ID NO: 4477078 - DNA, 25 bp, Homo sapien
ctcagcactcagccatgtgcctcgg

SEQ ID NO: 4477079 - DNA, 25 bp, Homo sapien
agcactcagccatgtgcctcgggga

SEQ ID NO: 4477080 - DNA, 25 bp, Homo sapien
cactcagccatgtgcctcggggagg

SEQ ID NO: 4477081 - DNA, 25 bp, Homo sapien
gttctcatttcaagtctggccctcc

SEQ ID NO: 4477082 - DNA, 25 bp, Homo sapien
tggctgttcgcaggagtggcatgga

SEQ ID NO: 4477083 - DNA, 25 bp, Homo sapien
tctggtgtggttttgtaagagttct

SEQ ID NO: 4477084 - DNA, 25 bp, Homo sapien
cctccagggcattacgatggtgcct

SEQ ID NO: 4477085 - DNA, 25 bp, Homo sapien
tccccaccaagttgtcttagtaaca

SEQ ID NO: 4477086 - DNA, 25 bp, Homo sapien
ctcagaaactgtaaagggatcctag

SEQ ID NO: 4477087 - DNA, 25 bp, Homo sapien
cagaaactgtaaagggatcctaggg

SEQ ID NO: 4477088 - DNA, 25 bp, Homo sapien
gttggagtcttgtgctcagaaactg

SEQ ID NO: 4477089 - DNA, 25 bp, Homo sapien
ggagtcttgtgctcagaaactgtaa

SEQ ID NO: 4477090 - DNA, 25 bp, Homo sapien
tcatattggtgaggcctcttgaagg

SEQ ID NO: 4477091 - DNA, 25 bp, Homo sapien
gggtcttcctggcacgttgtgtcat

SEQ ID NO: 4477092 - DNA, 25 bp, Homo sapien
gaggctttgtcggcccttgtcctgg

SEQ ID NO: 4477093 - DNA, 25 bp, Homo sapien
gccctccctccattaggtcatggcc

SEQ ID NO: 4477094 - DNA, 25 bp, Homo sapien
cctggagcccagaagtaattaccct

SEQ ID NO: 4477095 - DNA, 25 bp, Homo sapien
ttccccgttggaggctagagcagcc

SEQ ID NO: 4477096 - DNA, 25 bp, Homo sapien
caataatgtcactgagcgtgtggcc

SEQ ID NO: 4477097 - DNA, 25 bp, Homo sapien
tgttgcctgcaataatgtcactgag

SEQ ID NO: 4477098 - DNA, 25 bp, Homo sapien
cgcagggagtactgtgactgctgca

SEQ ID NO: 4477099 - DNA, 25 bp, Homo sapien
cctcctaccctgaaaggcattagct

SEQ ID NO: 4477100 - DNA, 25 bp, Homo sapien
ttctcccatccaaagggccagaggg

SEQ ID NO: 4477101 - DNA, 25 bp, Homo sapien
gggctgggcttgcttgtcacttctc

SEQ ID NO: 4477102 - DNA, 25 bp, Homo sapien
ctcaggacatagctccccgggctcc

SEQ ID NO: 4477103 - DNA, 25 bp, Homo sapien
gctcttgggtcctggatgggtcctt

SEQ ID NO: 4477104 - DNA, 25 bp, Homo sapien
cagcccctcaggacatagctccccg

SEQ ID NO: 4477105 - DNA, 25 bp, Homo sapien
cttccacacaagctgtgtcctggag

SEQ ID NO: 4477106 - DNA, 25 bp, Homo sapien
ccacgccggcggcaaaggacgcgtc

SEQ ID NO: 4477107 - DNA, 25 bp, Homo sapien
ggacgcgtccccacgggcggactga

SEQ ID NO: 4477108 - DNA, 25 bp, Homo sapien
ctgcccaagcatgggcgcctgaggc

SEQ ID NO: 4477109 - DNA, 25 bp, Homo sapien
gcctgcccaagcatgggcgcctgag

SEQ ID NO: 4477110 - DNA, 25 bp, Homo sapien
ctgcactccggagcggttccctgag

SEQ ID NO: 4477111 - DNA, 25 bp, Homo sapien
cgtgcgctctgcactccggagcggt

SEQ ID NO: 4477112 - DNA, 25 bp, Homo sapien
ccgcgcgggccgtgcgctctgcact

SEQ ID NO: 4477113 - DNA, 25 bp, Homo sapien
cggccggcgcccattgttccccgcg

SEQ ID NO: 4477114 - DNA, 25 bp, Homo sapien
tgtcatagattatgtggcagtctcc

SEQ ID NO: 4477115 - DNA, 25 bp, Homo sapien
gggcacagctctcattacacagtgg

SEQ ID NO: 4477116 - DNA, 25 bp, Homo sapien
tctcattacacagtggagtgtctct

SEQ ID NO: 4477117 - DNA, 25 bp, Homo sapien
tagattatgtggcagtctccattgc

SEQ ID NO: 4477118 - DNA, 25 bp, Homo sapien
cataaccggaatcacagctgtagcc

SEQ ID NO: 4477119 - DNA, 25 bp, Homo sapien
cgcggtgaccttgacaggcacataa

SEQ ID NO: 4477120 - DNA, 25 bp, Homo sapien
aaccacagttttgtgcagcgcggtg

SEQ ID NO: 4477121 - DNA, 25 bp, Homo sapien
cacagttttgtgcagcgcggtgacc

SEQ ID NO: 4477122 - DNA, 25 bp, Homo sapien
cgatagaggcgtggtgctgtgtcca

SEQ ID NO: 4477123 - DNA, 25 bp, Homo sapien
gtgagcagagaagcacatggcccca

SEQ ID NO: 4477124 - DNA, 25 bp, Homo sapien
ctcagcagctcctaaatagggcagt

SEQ ID NO: 4477125 - DNA, 25 bp, Homo sapien
agcacatggccccagttggctctgg

SEQ ID NO: 4477126 - DNA, 25 bp, Homo sapien
gttcttggtgggctactgatttacc

SEQ ID NO: 4477127 - DNA, 25 bp, Homo sapien
ggtgggctactgatttacccatcac

SEQ ID NO: 4477128 - DNA, 25 bp, Homo sapien
ttggtgggctactgatttacccatc

SEQ ID NO: 4477129 - DNA, 25 bp, Homo sapien
tcttggtgggctactgatttaccca

SEQ ID NO: 4477130 - DNA, 25 bp, Homo sapien
aacactgctgatagcctgatggtca

SEQ ID NO: 4477131 - DNA, 25 bp, Homo sapien
tccactgtgatgaggaagagccatg

SEQ ID NO: 4477132 - DNA, 25 bp, Homo sapien
agatggtcacgggaggaacactgct

SEQ ID NO: 4477133 - DNA, 25 bp, Homo sapien
gccatgggccacaaaatagcttcac

SEQ ID NO: 4477134 - DNA, 25 bp, Homo sapien
ccaagctttttctcagtaattactg

SEQ ID NO: 4477135 - DNA, 25 bp, Homo sapien
tagttccaggaaaacacattacaca

SEQ ID NO: 4477136 - DNA, 25 bp, Homo sapien
tacacagcatattaattacattggt

SEQ ID NO: 4477137 - DNA, 25 bp, Homo sapien
taccttgagcataatcatagttcca

SEQ ID NO: 4477138 - DNA, 25 bp, Homo sapien
cagggaccccatacatccgttttgc

SEQ ID NO: 4477139 - DNA, 25 bp, Homo sapien
ccatacatccgttttgcccaggata

SEQ ID NO: 4477140 - DNA, 25 bp, Homo sapien
tttgcccaggatattgagtcagcaa

SEQ ID NO: 4477141 - DNA, 25 bp, Homo sapien
ccaggatattgagtcagcaaaggaa

SEQ ID NO: 4477142 - DNA, 25 bp, Homo sapien
agtgcacctgtgctcgagcttctgg

SEQ ID NO: 4477143 - DNA, 25 bp, Homo sapien
tggtgctcacagttgggaccctgtc

SEQ ID NO: 4477144 - DNA, 25 bp, Homo sapien
tgcaagctcccttcctagacagtgc

SEQ ID NO: 4477145 - DNA, 25 bp, Homo sapien
tactgtcagacacccttcacaggag

SEQ ID NO: 4477146 - DNA, 25 bp, Homo sapien
tcgaaccaatcagtaagcggagcgc

SEQ ID NO: 4477147 - DNA, 25 bp, Homo sapien
caggctccgaagattcccgcttagg

SEQ ID NO: 4477148 - DNA, 25 bp, Homo sapien
cgcttagggcatttccgggcttcgg

SEQ ID NO: 4477149 - DNA, 25 bp, Homo sapien
tcggtgtctctcttgaccttgggca

SEQ ID NO: 4477150 - DNA, 25 bp, Homo sapien
agcccgaggctcaagggcacttttc

SEQ ID NO: 4477151 - DNA, 25 bp, Homo sapien
tccggtaagcccgaggctcaagggc

SEQ ID NO: 4477152 - DNA, 25 bp, Homo sapien
ggcgtaccgctgcagaggccactct

SEQ ID NO: 4477153 - DNA, 25 bp, Homo sapien
tgggtctctggtgtttgagggtatg

SEQ ID NO: 4477154 - DNA, 25 bp, Homo sapien
cttccatgtggggcagggggctgtc

SEQ ID NO: 4477155 - DNA, 25 bp, Homo sapien
tccatgtggggcagggggctgtccc

SEQ ID NO: 4477156 - DNA, 25 bp, Homo sapien
ccatgtggggcagggggctgtccca

SEQ ID NO: 4477157 - DNA, 25 bp, Homo sapien
catgtggggcagggggctgtcccag

SEQ ID NO: 4477158 - DNA, 25 bp, Homo sapien
gttttctcccatactgtagattgcc

SEQ ID NO: 4477159 - DNA, 25 bp, Homo sapien
aggtcttcttctagggttttcatcg

SEQ ID NO: 4477160 - DNA, 25 bp, Homo sapien
aagttttctcccatactgtagattg

SEQ ID NO: 4477161 - DNA, 25 bp, Homo sapien
tcatcgttttaggtcttatatttaa

SEQ ID NO: 4477162 - DNA, 25 bp, Homo sapien
tttctcagatacagtgctgtcattt

SEQ ID NO: 4477163 - DNA, 25 bp, Homo sapien
ttggtatcttcataggcatgctctt

SEQ ID NO: 4477164 - DNA, 25 bp, Homo sapien
ctttggtatcttcataggcatgctc

SEQ ID NO: 4477165 - DNA, 25 bp, Homo sapien
tttggtatcttcataggcatgctct

SEQ ID NO: 4477166 - DNA, 25 bp, Homo sapien
taactatggtgagaacaagatatcc

SEQ ID NO: 4477167 - DNA, 25 bp, Homo sapien
gagaacaagatatccagattcttca

SEQ ID NO: 4477168 - DNA, 25 bp, Homo sapien
ctgatataactatggtgagaacaag

SEQ ID NO: 4477169 - DNA, 25 bp, Homo sapien
tggtgagaacaagatatccagattc

SEQ ID NO: 4477170 - DNA, 25 bp, Homo sapien
gtagtgtctgtccttggaaaatgaa

SEQ ID NO: 4477171 - DNA, 25 bp, Homo sapien
cagtagtgtctgtccttggaaaatg

SEQ ID NO: 4477172 - DNA, 25 bp, Homo sapien
tagtgtctgtccttggaaaatgaag

SEQ ID NO: 4477173 - DNA, 25 bp, Homo sapien
gtgtctgtccttggaaaatgaagaa

SEQ ID NO: 4477174 - DNA, 25 bp, Homo sapien
ttcatctccatacaactgttcctct

SEQ ID NO: 4477175 - DNA, 25 bp, Homo sapien
ttagcattcaacagatcctccaaat

SEQ ID NO: 4477176 - DNA, 25 bp, Homo sapien
tagcattcaacagatcctccaaata

SEQ ID NO: 4477177 - DNA, 25 bp, Homo sapien
agcattcaacagatcctccaaatac

SEQ ID NO: 4477178 - DNA, 25 bp, Homo sapien
tggtacctaccctaaaggattcaca

SEQ ID NO: 4477179 - DNA, 25 bp, Homo sapien
caggatggtcaaggtgctaaagaga

SEQ ID NO: 4477180 - DNA, 25 bp, Homo sapien
tactctaaagttgggtgatggatgc

SEQ ID NO: 4477181 - DNA, 25 bp, Homo sapien
tatgctaggcatagagaacaggtga

SEQ ID NO: 4477182 - DNA, 25 bp, Homo sapien
tctgctaagactttctttatactct

SEQ ID NO: 4477183 - DNA, 25 bp, Homo sapien
agactttctttatactctggcccat

SEQ ID NO: 4477184 - DNA, 25 bp, Homo sapien
ctaagactttctttatactctggcc

SEQ ID NO: 4477185 - DNA, 25 bp, Homo sapien
ctctgctaagactttctttatactc

SEQ ID NO: 4477186 - DNA, 25 bp, Homo sapien
ctcaaaaagcggtagatcaagaagc

SEQ ID NO: 4477187 - DNA, 25 bp, Homo sapien
gattgtacagactcctgcacctact

SEQ ID NO: 4477188 - DNA, 25 bp, Homo sapien
gaaaccaggccattagtcctctaga

SEQ ID NO: 4477189 - DNA, 25 bp, Homo sapien
caatgggccagatgtgtcccacgca

SEQ ID NO: 4477190 - DNA, 25 bp, Homo sapien
tcctggagctcagtttgtgaggatc

SEQ ID NO: 4477191 - DNA, 25 bp, Homo sapien
cctggagctcagtttgtgaggatca

SEQ ID NO: 4477192 - DNA, 25 bp, Homo sapien
tggagctcagtttgtgaggatcaaa

SEQ ID NO: 4477193 - DNA, 25 bp, Homo sapien
tatcctggagctcagtttgtgagga

SEQ ID NO: 4477194 - DNA, 25 bp, Homo sapien
tgctaccaatgagtgaaaacccttc

SEQ ID NO: 4477195 - DNA, 25 bp, Homo sapien
ccagtccttgctaccaatgagtgaa

SEQ ID NO: 4477196 - DNA, 25 bp, Homo sapien
ttcaaccagtccttgctaccaatga

SEQ ID NO: 4477197 - DNA, 25 bp, Homo sapien
ccttgctaccaatgagtgaaaaccc

SEQ ID NO: 4477198 - DNA, 25 bp, Homo sapien
ttatcgttgttccaaacaacagaca

SEQ ID NO: 4477199 - DNA, 25 bp, Homo sapien
acaacagacaatccacgcgtcttac

SEQ ID NO: 4477200 - DNA, 25 bp, Homo sapien
ctttatcgttgttccaaacaacaga

SEQ ID NO: 4477201 - DNA, 25 bp, Homo sapien
caaacaacagacaatccacgcgtct

SEQ ID NO: 4477202 - DNA, 25 bp, Homo sapien
gtgtgatcattagcttaaatcttgc

SEQ ID NO: 4477203 - DNA, 25 bp, Homo sapien
aagagtgtgatcattagcttaaatc

SEQ ID NO: 4477204 - DNA, 25 bp, Homo sapien
agtgtgatcattagcttaaatcttg

SEQ ID NO: 4477205 - DNA, 25 bp, Homo sapien
gagtgtgatcattagcttaaatctt

SEQ ID NO: 4477206 - DNA, 25 bp, Homo sapien
tgggccaggaatcagctgaagctcc

SEQ ID NO: 4477207 - DNA, 25 bp, Homo sapien
aggctgccgtgggacactctttgca

SEQ ID NO: 4477208 - DNA, 25 bp, Homo sapien
ggatgtttccatcaggcacctgcac

SEQ ID NO: 4477209 - DNA, 25 bp, Homo sapien
cacggttatgtattgtgccagcttc

SEQ ID NO: 4477210 - DNA, 25 bp, Homo sapien
cttttagcctatcttacacttttga

SEQ ID NO: 4477211 - DNA, 25 bp, Homo sapien
taattttgtggcattcaggcatcgg

SEQ ID NO: 4477212 - DNA, 25 bp, Homo sapien
gaatagctctttatccacgtataat

SEQ ID NO: 4477213 - DNA, 25 bp, Homo sapien
caataaacttgttatactgttatat

SEQ ID NO: 4477214 - DNA, 25 bp, Homo sapien
gagcagcaaaatgaccagaaccttg

SEQ ID NO: 4477215 - DNA, 25 bp, Homo sapien
ctgaatgtaagagagcagcaaaatg

SEQ ID NO: 4477216 - DNA, 25 bp, Homo sapien
tgaatgtaagagagcagcaaaatga

SEQ ID NO: 4477217 - DNA, 25 bp, Homo sapien
gcaaaatgaccagaaccttggccat

SEQ ID NO: 4477218 - DNA, 25 bp, Homo sapien
tatacctcctacgtactagacactg

SEQ ID NO: 4477219 - DNA, 25 bp, Homo sapien
gggataggagcgacaaagaacaaga

SEQ ID NO: 4477220 - DNA, 25 bp, Homo sapien
aattatcttgcaactcaggaagtgc

SEQ ID NO: 4477221 - DNA, 25 bp, Homo sapien
agaacaagatagtcctgccctctgg

SEQ ID NO: 4477222 - DNA, 25 bp, Homo sapien
ctgtgcccgctgttacacacacttg

SEQ ID NO: 4477223 - DNA, 25 bp, Homo sapien
gcccgctgttacacacacttgctgt

SEQ ID NO: 4477224 - DNA, 25 bp, Homo sapien
gtccttccgtctggagcgcctgtgc

SEQ ID NO: 4477225 - DNA, 25 bp, Homo sapien
tgagctaactgcgtcagtgaggtcc

SEQ ID NO: 4477226 - DNA, 25 bp, Homo sapien
gcaccccatgcagattgttcataga

SEQ ID NO: 4477227 - DNA, 25 bp, Homo sapien
gcagctcctccgatgccagaagagt

SEQ ID NO: 4477228 - DNA, 25 bp, Homo sapien
tgttcatagacatggggcagctcct

SEQ ID NO: 4477229 - DNA, 25 bp, Homo sapien
tctgatccataaggcacaaacgtag

SEQ ID NO: 4477230 - DNA, 25 bp, Homo sapien
gccagctttttcagttccttttcta

SEQ ID NO: 4477231 - DNA, 25 bp, Homo sapien
cgccagctttttcagttccttttct

SEQ ID NO: 4477232 - DNA, 25 bp, Homo sapien
tatatagagcattaatttctcaaac

SEQ ID NO: 4477233 - DNA, 25 bp, Homo sapien
tatgtatatagagcattaatttctc

SEQ ID NO: 4477234 - DNA, 25 bp, Homo sapien
tgtatatagagcattaatttctcaa

SEQ ID NO: 4477235 - DNA, 25 bp, Homo sapien
tatatgtatatagagcattaatttc

SEQ ID NO: 4477236 - DNA, 25 bp, Homo sapien
tcttctttaattttaggaggaagca

SEQ ID NO: 4477237 - DNA, 25 bp, Homo sapien
catgcggtgcgtaattgtagatgca

SEQ ID NO: 4477238 - DNA, 25 bp, Homo sapien
taacctgtgactttaataagctgga

SEQ ID NO: 4477239 - DNA, 25 bp, Homo sapien
taacctaacggttctcatgcggtgc

SEQ ID NO: 4477240 - DNA, 25 bp, Homo sapien
ggcaaagctctaaaatgcactgctg

SEQ ID NO: 4477241 - DNA, 25 bp, Homo sapien
gtgagcaacaccacaatgactgtct

SEQ ID NO: 4477242 - DNA, 25 bp, Homo sapien
ggtgatctagccaggtacattttaa

SEQ ID NO: 4477243 - DNA, 25 bp, Homo sapien
gaagtgaaaaggtcctctgaggatc

SEQ ID NO: 4477244 - DNA, 25 bp, Homo sapien
gaggatcagatcatgcatgcgccat

SEQ ID NO: 4477245 - DNA, 25 bp, Homo sapien
gataacagagtgacatccagcctgc

SEQ ID NO: 4477246 - DNA, 25 bp, Homo sapien
cagattactgtaacccggctgggcg

SEQ ID NO: 4477247 - DNA, 25 bp, Homo sapien
caaaggtggaacatgagattagccc

SEQ ID NO: 4477248 - DNA, 25 bp, Homo sapien
acactgggaggtagacaaggacacg

SEQ ID NO: 4477249 - DNA, 25 bp, Homo sapien
tcttgtctgtcctaaagtaacttaa

SEQ ID NO: 4477250 - DNA, 25 bp, Homo sapien
ggagatccgtcataccaaatgctta

SEQ ID NO: 4477251 - DNA, 25 bp, Homo sapien
gagtagtttacagaactcttacaca

SEQ ID NO: 4477252 - DNA, 25 bp, Homo sapien
gatctaggtagatcatgcttgttta

SEQ ID NO: 4477253 - DNA, 25 bp, Homo sapien
cttttaaactcataggcccacatag

SEQ ID NO: 4477254 - DNA, 25 bp, Homo sapien
ttttgtataggtaattcagatcggg

SEQ ID NO: 4477255 - DNA, 25 bp, Homo sapien
gaaagtgtagtgataaaggcctgaa

SEQ ID NO: 4477256 - DNA, 25 bp, Homo sapien
aaatcggtctttgttagtaatgcca

SEQ ID NO: 4477257 - DNA, 25 bp, Homo sapien
ggaattatgttgatagtgactgcat

SEQ ID NO: 4477258 - DNA, 25 bp, Homo sapien
gaattatgttgatagtgactgcatt

SEQ ID NO: 4477259 - DNA, 25 bp, Homo sapien
attgtcaccaaagggaattatgttg

SEQ ID NO: 4477260 - DNA, 25 bp, Homo sapien
gggaattatgttgatagtgactgca

SEQ ID NO: 4477261 - DNA, 25 bp, Homo sapien
cattctgcaacactatctgtttgtc

SEQ ID NO: 4477262 - DNA, 25 bp, Homo sapien
ccactggaaaaacttgacaggccca

SEQ ID NO: 4477263 - DNA, 25 bp, Homo sapien
taaagaattgtgtcaagtcttgaac

SEQ ID NO: 4477264 - DNA, 25 bp, Homo sapien
cccagtagtaggtgagcctgaggta

SEQ ID NO: 4477265 - DNA, 25 bp, Homo sapien
gctccacgtcgtggggctcgtcgtg

SEQ ID NO: 4477266 - DNA, 25 bp, Homo sapien
tgccgggtcggcgaggggacacgga

SEQ ID NO: 4477267 - DNA, 25 bp, Homo sapien
gctcgtcgtgccgggtcggcgaggg

SEQ ID NO: 4477268 - DNA, 25 bp, Homo sapien
gacacggaggaagccgacgtgggga

SEQ ID NO: 4477269 - DNA, 25 bp, Homo sapien
cgtccggggtgagcccgaggtgttg

SEQ ID NO: 4477270 - DNA, 25 bp, Homo sapien
cggaggctcctatccgagcggcggg

SEQ ID NO: 4477271 - DNA, 25 bp, Homo sapien
tccggggtgagcccgaggtgttgcc

SEQ ID NO: 4477272 - DNA, 25 bp, Homo sapien
ggggtgagcccgaggtgttgcccac

SEQ ID NO: 4477273 - DNA, 25 bp, Homo sapien
gaaggacggagccgagccgcggctg

SEQ ID NO: 4477274 - DNA, 25 bp, Homo sapien
ggaaggacggagccgagccgcggct

SEQ ID NO: 4477275 - DNA, 25 bp, Homo sapien
aaggacggagccgagccgcggctgc

SEQ ID NO: 4477276 - DNA, 25 bp, Homo sapien
gggaaggacggagccgagccgcggc

SEQ ID NO: 4477277 - DNA, 25 bp, Homo sapien
ccggagcgaaggtctcgcgaggcct

SEQ ID NO: 4477278 - DNA, 25 bp, Homo sapien
gacccggagcgaaggtctcgcgagg

SEQ ID NO: 4477279 - DNA, 25 bp, Homo sapien
gagcgaaggtctcgcgaggcctggg

SEQ ID NO: 4477280 - DNA, 25 bp, Homo sapien
ggagcgaaggtctcgcgaggcctgg

SEQ ID NO: 4477281 - DNA, 25 bp, Homo sapien
ctcttctcgcgatccttgcggcggt

SEQ ID NO: 4477282 - DNA, 25 bp, Homo sapien
gcgctaggccaatcagcctctgcag

SEQ ID NO: 4477283 - DNA, 25 bp, Homo sapien
tctcgcgatccttgcggcggtcgct

SEQ ID NO: 4477284 - DNA, 25 bp, Homo sapien
gggagtctccgtcggagccgcctct

SEQ ID NO: 4477285 - DNA, 25 bp, Homo sapien
gattgcgagggtctccttcttccag

SEQ ID NO: 4477286 - DNA, 25 bp, Homo sapien
caacaacatgccatagtggtcctgg

SEQ ID NO: 4477287 - DNA, 25 bp, Homo sapien
agaaattttggtctggaaccaccag

SEQ ID NO: 4477288 - DNA, 25 bp, Homo sapien
cactttagcttgatagagattgcga

SEQ ID NO: 4477289 - DNA, 25 bp, Homo sapien
ttaaaacatcatgtaggccaatgct

SEQ ID NO: 4477290 - DNA, 25 bp, Homo sapien
aaaacatcatgtaggccaatgctac

SEQ ID NO: 4477291 - DNA, 25 bp, Homo sapien
taaaacatcatgtaggccaatgcta

SEQ ID NO: 4477292 - DNA, 25 bp, Homo sapien
aacatcatgtaggccaatgctactg

SEQ ID NO: 4477293 - DNA, 25 bp, Homo sapien
ccactgtgcagagtaagtgaaggaa

SEQ ID NO: 4477294 - DNA, 25 bp, Homo sapien
gatgagaagtagaagtgggcccact

SEQ ID NO: 4477295 - DNA, 25 bp, Homo sapien
accaaaaagagacgttctgagattt

SEQ ID NO: 4477296 - DNA, 25 bp, Homo sapien
aaagagacgttctgagatttgcaga

SEQ ID NO: 4477297 - DNA, 25 bp, Homo sapien
gtcaaagaacgacattccgtccacc

SEQ ID NO: 4477298 - DNA, 25 bp, Homo sapien
aggagtcaaagaacgacattccgtc

SEQ ID NO: 4477299 - DNA, 25 bp, Homo sapien
gagtcaaagaacgacattccgtcca

SEQ ID NO: 4477300 - DNA, 25 bp, Homo sapien
aaaggagtcaaagaacgacattccg

SEQ ID NO: 4477301 - DNA, 25 bp, Homo sapien
cagtgggcgtgtacccaggagaaac

SEQ ID NO: 4477302 - DNA, 25 bp, Homo sapien
tagaagaggagatttacagcagtcc

SEQ ID NO: 4477303 - DNA, 25 bp, Homo sapien
taaggtttgtttgtgcagatccatc

SEQ ID NO: 4477304 - DNA, 25 bp, Homo sapien
agtttattagcatgtacagtgggcg

SEQ ID NO: 4477305 - DNA, 25 bp, Homo sapien
tgccttgcggtggtgacgctggtcc

SEQ ID NO: 4477306 - DNA, 25 bp, Homo sapien
tgccttgtgccttgcggtggtgacg

SEQ ID NO: 4477307 - DNA, 25 bp, Homo sapien
tcccttcacaaagagtcagtcctgt

SEQ ID NO: 4477308 - DNA, 25 bp, Homo sapien
tttataatctggcatgactcagcca

SEQ ID NO: 4477309 - DNA, 25 bp, Homo sapien
cagcctggctcagtcgccgccgcag

SEQ ID NO: 4477310 - DNA, 25 bp, Homo sapien
gcgccgcgccgactctgggactcag

SEQ ID NO: 4477311 - DNA, 25 bp, Homo sapien
gccgcgccggagaatccgcctgagg

SEQ ID NO: 4477312 - DNA, 25 bp, Homo sapien
ctggctcagtcgccgccgcagcgag

SEQ ID NO: 4477313 - DNA, 25 bp, Homo sapien
taagctccctatgcctagagaaggt

SEQ ID NO: 4477314 - DNA, 25 bp, Homo sapien
ccaatggcataaggtgtgtggagca

SEQ ID NO: 4477315 - DNA, 25 bp, Homo sapien
acttcccgcagattaagctccctat

SEQ ID NO: 4477316 - DNA, 25 bp, Homo sapien
gaaggtcagattcccaatggcataa

SEQ ID NO: 4477317 - DNA, 25 bp, Homo sapien
acataatgggttctcaatgcacgat

SEQ ID NO: 4477318 - DNA, 25 bp, Homo sapien
tgctgtgaccatatcgcatgttggg

SEQ ID NO: 4477319 - DNA, 25 bp, Homo sapien
cagagatatcctggactttagacca

SEQ ID NO: 4477320 - DNA, 25 bp, Homo sapien
cagaataagggtgagagtttgctac

SEQ ID NO: 4477321 - DNA, 25 bp, Homo sapien
cttcaatagttaatcatagggctgt

SEQ ID NO: 4477322 - DNA, 25 bp, Homo sapien
cctggataactataaaagcctcttc

SEQ ID NO: 4477323 - DNA, 25 bp, Homo sapien
gaaggactcctcaaatatgtctgct

SEQ ID NO: 4477324 - DNA, 25 bp, Homo sapien
tccttgtgataagatcgcagctcct

SEQ ID NO: 4477325 - DNA, 25 bp, Homo sapien
agacgcttccggcctcaaagcctta

SEQ ID NO: 4477326 - DNA, 25 bp, Homo sapien
taaccccagacagaaccaaggcctg

SEQ ID NO: 4477327 - DNA, 25 bp, Homo sapien
taaggatgaacgaacgcccagattc

SEQ ID NO: 4477328 - DNA, 25 bp, Homo sapien
cggctccattcataaagcacctttg

SEQ ID NO: 4477329 - DNA, 25 bp, Homo sapien
ctgtgaggcggctgacagctgggct

SEQ ID NO: 4477330 - DNA, 25 bp, Homo sapien
tcctgtgaggcggctgacagctggg

SEQ ID NO: 4477331 - DNA, 25 bp, Homo sapien
ttcctgtgaggcggctgacagctgg

SEQ ID NO: 4477332 - DNA, 25 bp, Homo sapien
cctgtgaggcggctgacagctgggc

SEQ ID NO: 4477333 - DNA, 25 bp, Homo sapien
tgccagggctgccccgccgacgcag

SEQ ID NO: 4477334 - DNA, 25 bp, Homo sapien
atgccagggctgccccgccgacgca

SEQ ID NO: 4477335 - DNA, 25 bp, Homo sapien
cagggctgccccgccgacgcagcat

SEQ ID NO: 4477336 - DNA, 25 bp, Homo sapien
ccatgccagggctgccccgccgacg

SEQ ID NO: 4477337 - DNA, 25 bp, Homo sapien
tgaggcagaaccacagtgctcccag

SEQ ID NO: 4477338 - DNA, 25 bp, Homo sapien
tggcataggcgctgccctggtcctg

SEQ ID NO: 4477339 - DNA, 25 bp, Homo sapien
ctgtgcaccagctgtttggtatctg

SEQ ID NO: 4477340 - DNA, 25 bp, Homo sapien
ttggcataggcgctgccctggtcct

SEQ ID NO: 4477341 - DNA, 25 bp, Homo sapien
ccctggccgcaggtccttgttgggc

SEQ ID NO: 4477342 - DNA, 25 bp, Homo sapien
ggtagctggagcacgtgatggtcac

SEQ ID NO: 4477343 - DNA, 25 bp, Homo sapien
tgcgacgtggtcacgttgccagtca

SEQ ID NO: 4477344 - DNA, 25 bp, Homo sapien
cgacgtggtcacgttgccagtcagg

SEQ ID NO: 4477345 - DNA, 25 bp, Homo sapien
ctgcgacgtggtcacgttgccagtc

SEQ ID NO: 4477346 - DNA, 25 bp, Homo sapien
gcgacgtggtcacgttgccagtcag

SEQ ID NO: 4477347 - DNA, 25 bp, Homo sapien
tcaaacaagccctgctcgttggcca

SEQ ID NO: 4477348 - DNA, 25 bp, Homo sapien
atcaaacaagccctgctcgttggcc

SEQ ID NO: 4477349 - DNA, 25 bp, Homo sapien
caaacaagccctgctcgttggccat

SEQ ID NO: 4477350 - DNA, 25 bp, Homo sapien
gcagctgtaggtgccatttgcaccc

SEQ ID NO: 4477351 - DNA, 25 bp, Homo sapien
cagctgtaggtgccatttgcaccca

SEQ ID NO: 4477352 - DNA, 25 bp, Homo sapien
gctgtgcgcatcctgctgcagcacg

SEQ ID NO: 4477353 - DNA, 25 bp, Homo sapien
tgtgcgcatcctgctgcagcacggg

SEQ ID NO: 4477354 - DNA, 25 bp, Homo sapien
atggtgacagagctgtgcgcatcct

SEQ ID NO: 4477355 - DNA, 25 bp, Homo sapien
tgacagagctgtgcgcatcctgctg

SEQ ID NO: 4477356 - DNA, 25 bp, Homo sapien
gaaggagcagcgcagggtggcatcg

SEQ ID NO: 4477357 - DNA, 25 bp, Homo sapien
atcggtgcccactagggccaccacc

SEQ ID NO: 4477358 - DNA, 25 bp, Homo sapien
tcagggacctggacctccacggctc

SEQ ID NO: 4477359 - DNA, 25 bp, Homo sapien
ctagggccaccaccgggtcctcagg

SEQ ID NO: 4477360 - DNA, 25 bp, Homo sapien
cccggccttcggtgaaactgtgcac

SEQ ID NO: 4477361 - DNA, 25 bp, Homo sapien
tggcataggcgctgccctggtcccg

SEQ ID NO: 4477362 - DNA, 25 bp, Homo sapien
ttggcataggcgctgccctggtccc

SEQ ID NO: 4477363 - DNA, 25 bp, Homo sapien
ctggtcccggccttcggtgaaactg

SEQ ID NO: 4477364 - DNA, 25 bp, Homo sapien
tcaaacaagccctgctcgttggcca

SEQ ID NO: 4477365 - DNA, 25 bp, Homo sapien
ccctggccgcaggtccttgttgggc

SEQ ID NO: 4477366 - DNA, 25 bp, Homo sapien
tcgttggccatctgcgacgtggtca

SEQ ID NO: 4477367 - DNA, 25 bp, Homo sapien
tagctggagcacgtgatggtcaccg

SEQ ID NO: 4477368 - DNA, 25 bp, Homo sapien
gatctttctccagcacacgaaagcc

SEQ ID NO: 4477369 - DNA, 25 bp, Homo sapien
ctttctccagcacacgaaagccagg

SEQ ID NO: 4477370 - DNA, 25 bp, Homo sapien
ttctccagcacacgaaagccagggc

SEQ ID NO: 4477371 - DNA, 25 bp, Homo sapien
ctcacagctctgtttgatctttctc

SEQ ID NO: 4477372 - DNA, 25 bp, Homo sapien
gaaagtgacactctattgacatcaa

SEQ ID NO: 4477373 - DNA, 25 bp, Homo sapien
cacataagtgtgcatgcgcacgcac

SEQ ID NO: 4477374 - DNA, 25 bp, Homo sapien
gacaggctcacgcttgttcacacac

SEQ ID NO: 4477375 - DNA, 25 bp, Homo sapien
gacgtagactcaaggtcacacacag

SEQ ID NO: 4477376 - DNA, 25 bp, Homo sapien
gagagtgcaggaagctggtgaacag

SEQ ID NO: 4477377 - DNA, 25 bp, Homo sapien
tgagagtgcaggaagctggtgaaca

SEQ ID NO: 4477378 - DNA, 25 bp, Homo sapien
gcaggaagctggtgaacagggcctg

SEQ ID NO: 4477379 - DNA, 25 bp, Homo sapien
agctggtgaacagggcctgagtggg

SEQ ID NO: 4477380 - DNA, 25 bp, Homo sapien
aaaatcttttgcaagcccattttca

SEQ ID NO: 4477381 - DNA, 25 bp, Homo sapien
ctgcaaaggcaagaactcagaataa

SEQ ID NO: 4477382 - DNA, 25 bp, Homo sapien
aaacaaaaatcttttgcaagcccat

SEQ ID NO: 4477383 - DNA, 25 bp, Homo sapien
tttgcaagcccattttcatgccagc

SEQ ID NO: 4477384 - DNA, 25 bp, Homo sapien
ctgtcttggagccttctccctcccc

SEQ ID NO: 4477385 - DNA, 25 bp, Homo sapien
ttctccctccccatcctggtcctca

SEQ ID NO: 4477386 - DNA, 25 bp, Homo sapien
tccctccccatcctggtcctcagct

SEQ ID NO: 4477387 - DNA, 25 bp, Homo sapien
ccctccccatcctggtcctcagctc

SEQ ID NO: 4477388 - DNA, 25 bp, Homo sapien
ctttgctgtcagagtgtttcagagg

SEQ ID NO: 4477389 - DNA, 25 bp, Homo sapien
tctttgctgtcagagtgtttcagag

SEQ ID NO: 4477390 - DNA, 25 bp, Homo sapien
tgaaaggatgatgcctacccaccct

SEQ ID NO: 4477391 - DNA, 25 bp, Homo sapien
taagcctctgtcgtatttgggtccc

SEQ ID NO: 4477392 - DNA, 25 bp, Homo sapien
tcttagacctaggagtgaaagcttg

SEQ ID NO: 4477393 - DNA, 25 bp, Homo sapien
gcgtgggagcacaaacagcctctta

SEQ ID NO: 4477394 - DNA, 25 bp, Homo sapien
gtaggagctgtagggaggggtagca

SEQ ID NO: 4477395 - DNA, 25 bp, Homo sapien
gggtagcagctccctggtcctcatg

SEQ ID NO: 4477396 - DNA, 25 bp, Homo sapien
cagccccattgcagccagagggtag

SEQ ID NO: 4477397 - DNA, 25 bp, Homo sapien
ctgtcagagcaggatgcatctgttg

SEQ ID NO: 4477398 - DNA, 25 bp, Homo sapien
aaatgtatgtactgtgaaataaggc

SEQ ID NO: 4477399 - DNA, 25 bp, Homo sapien
gcaggcaggatgacttagagaacta

SEQ ID NO: 4477400 - DNA, 25 bp, Homo sapien
cacagtggtctgtgtatcgcatcct

SEQ ID NO: 4477401 - DNA, 25 bp, Homo sapien
tccattggagaaataaggctgcaca

SEQ ID NO: 4477402 - DNA, 25 bp, Homo sapien
agggtggtgatgtggtcagtgtact

SEQ ID NO: 4477403 - DNA, 25 bp, Homo sapien
gtgatgtggtcagtgtactgtgtcc

SEQ ID NO: 4477404 - DNA, 25 bp, Homo sapien
aagaagagggtggtgatgtggtcag

SEQ ID NO: 4477405 - DNA, 25 bp, Homo sapien
ggtggtgatgtggtcagtgtactgt

SEQ ID NO: 4477406 - DNA, 25 bp, Homo sapien
tcagtctgaatattgcatcttttgg

SEQ ID NO: 4477407 - DNA, 25 bp, Homo sapien
aggcagccagatggtccacgcagca

SEQ ID NO: 4477408 - DNA, 25 bp, Homo sapien
agtctgaatattgcatcttttggag

SEQ ID NO: 4477409 - DNA, 25 bp, Homo sapien
aaaaggcagccagatggtccacgca

SEQ ID NO: 4477410 - DNA, 25 bp, Homo sapien
tgtatcacggccattggagaaacaa

SEQ ID NO: 4477411 - DNA, 25 bp, Homo sapien
ctagtgtatcacggccattggagaa

SEQ ID NO: 4477412 - DNA, 25 bp, Homo sapien
ggtgactatgcatcgtgtctttggt

SEQ ID NO: 4477413 - DNA, 25 bp, Homo sapien
tcgtgtctttggtgaaataaggcag

SEQ ID NO: 4477414 - DNA, 25 bp, Homo sapien
agatgttgaggccgcactgtccctg

SEQ ID NO: 4477415 - DNA, 25 bp, Homo sapien
caggagatgttgaggccgcactgtc

SEQ ID NO: 4477416 - DNA, 25 bp, Homo sapien
gaaaagattctatgcaggtggaagc

SEQ ID NO: 4477417 - DNA, 25 bp, Homo sapien
agaaaagattctatgcaggtggaag

SEQ ID NO: 4477418 - DNA, 25 bp, Homo sapien
ggaaaaggccagtattaaggctaga

SEQ ID NO: 4477419 - DNA, 25 bp, Homo sapien
aaaggccagtattaaggctagagca

SEQ ID NO: 4477420 - DNA, 25 bp, Homo sapien
ggccagtattaaggctagagcaaga

SEQ ID NO: 4477421 - DNA, 25 bp, Homo sapien
ccagtattaaggctagagcaagagg

SEQ ID NO: 4477422 - DNA, 25 bp, Homo sapien
tgcacctgcaggtctccatgcacag

SEQ ID NO: 4477423 - DNA, 25 bp, Homo sapien
cagctgtgcatgtggtgggcgcaga

SEQ ID NO: 4477424 - DNA, 25 bp, Homo sapien
tgcaggtctccatgcacagctgtgc

SEQ ID NO: 4477425 - DNA, 25 bp, Homo sapien
acgtgttccagcacgtgcacctgca

SEQ ID NO: 4477426 - DNA, 25 bp, Homo sapien
agaaccagtgtgaccagcacatgct

SEQ ID NO: 4477427 - DNA, 25 bp, Homo sapien
tggagaaccagtgtgaccagcacat

SEQ ID NO: 4477428 - DNA, 25 bp, Homo sapien
gagaaccagtgtgaccagcacatgc

SEQ ID NO: 4477429 - DNA, 25 bp, Homo sapien
ggagaaccagtgtgaccagcacatg

SEQ ID NO: 4477430 - DNA, 25 bp, Homo sapien
aaaggaacaaagaggtgagaaggca

SEQ ID NO: 4477431 - DNA, 25 bp, Homo sapien
agagggacagaagctgacccccagg

SEQ ID NO: 4477432 - DNA, 25 bp, Homo sapien
tggatacatgaaaagaaaggaacaa

SEQ ID NO: 4477433 - DNA, 25 bp, Homo sapien
gcagagggacagaagctgaccccca

SEQ ID NO: 4477434 - DNA, 25 bp, Homo sapien
caccagattctctagccgtggcgag

SEQ ID NO: 4477435 - DNA, 25 bp, Homo sapien
gcacctaacacagtgctgacatctg

SEQ ID NO: 4477436 - DNA, 25 bp, Homo sapien
ctgctatgaaaggtccagagggcct

SEQ ID NO: 4477437 - DNA, 25 bp, Homo sapien
caaaccgcagggtgcagtgtagtta

SEQ ID NO: 4477438 - DNA, 25 bp, Homo sapien
cagccccagaatagcaccatggtgg

SEQ ID NO: 4477439 - DNA, 25 bp, Homo sapien
tcggtgtccccaaagcattcctggc

SEQ ID NO: 4477440 - DNA, 25 bp, Homo sapien
catccggaaggcatcagaacgtctg

SEQ ID NO: 4477441 - DNA, 25 bp, Homo sapien
gaagtctcactctaccagaggccag

SEQ ID NO: 4477442 - DNA, 25 bp, Homo sapien
ctatgaaacacggagttgcagagat

SEQ ID NO: 4477443 - DNA, 25 bp, Homo sapien
tgaatgagcaagtgcttcatcgtag

SEQ ID NO: 4477444 - DNA, 25 bp, Homo sapien
gcttcatcgtagctatgaaacacgg

SEQ ID NO: 4477445 - DNA, 25 bp, Homo sapien
gagatgagttcccagagtgcaatga

SEQ ID NO: 4477446 - DNA, 25 bp, Homo sapien
acacacattggaccaggagcagccg

SEQ ID NO: 4477447 - DNA, 25 bp, Homo sapien
ccacacacattggaccaggagcagc

SEQ ID NO: 4477448 - DNA, 25 bp, Homo sapien
acattggaccaggagcagccgcggt

SEQ ID NO: 4477449 - DNA, 25 bp, Homo sapien
ggccacacacattggaccaggagca

SEQ ID NO: 4477450 - DNA, 25 bp, Homo sapien
aacccatggcgctcatcacctcctt

SEQ ID NO: 4477451 - DNA, 25 bp, Homo sapien
cacagaaggcattgccattgtgtcc

SEQ ID NO: 4477452 - DNA, 25 bp, Homo sapien
ctagaaacccatggcgctcatcacc

SEQ ID NO: 4477453 - DNA, 25 bp, Homo sapien
gcagctaaactcagctaccaactgt

SEQ ID NO: 4477454 - DNA, 25 bp, Homo sapien
attaaaatgcttcctgtcaaattca

SEQ ID NO: 4477455 - DNA, 25 bp, Homo sapien
tcctgtcaaattcaagcctgacacg

SEQ ID NO: 4477456 - DNA, 25 bp, Homo sapien
attcaagcctgacacgtaattagag

SEQ ID NO: 4477457 - DNA, 25 bp, Homo sapien
gcctgacacgtaattagagcagctc

SEQ ID NO: 4477458 - DNA, 25 bp, Homo sapien
gtgggaggtgcagatcctgggccgt

SEQ ID NO: 4477459 - DNA, 25 bp, Homo sapien
ggtgcagatcctgggccgtggcagg

SEQ ID NO: 4477460 - DNA, 25 bp, Homo sapien
gagtgggaggtgcagatcctgggcc

SEQ ID NO: 4477461 - DNA, 25 bp, Homo sapien
aggtgcagatcctgggccgtggcag

SEQ ID NO: 4477462 - DNA, 25 bp, Homo sapien
tgacacagcacaatcttcagcccca

SEQ ID NO: 4477463 - DNA, 25 bp, Homo sapien
gcagcagctagacccatgtgacaca

SEQ ID NO: 4477464 - DNA, 25 bp, Homo sapien
gctagacccatgtgacacagcacaa

SEQ ID NO: 4477465 - DNA, 25 bp, Homo sapien
gacccatgtgacacagcacaatctt

SEQ ID NO: 4477466 - DNA, 25 bp, Homo sapien
cagtcagctcagtgtgttcccatgg

SEQ ID NO: 4477467 - DNA, 25 bp, Homo sapien
cagaattggagctcagtctatgacc

SEQ ID NO: 4477468 - DNA, 25 bp, Homo sapien
ccagggttggagctaagtgtgtctc

SEQ ID NO: 4477469 - DNA, 25 bp, Homo sapien
tgagcccatcacagcgtcagggttc

SEQ ID NO: 4477470 - DNA, 25 bp, Homo sapien
tggagaggaatggcccaagtgacct

SEQ ID NO: 4477471 - DNA, 25 bp, Homo sapien
tttgcttggcggtgtggagaggaat

SEQ ID NO: 4477472 - DNA, 25 bp, Homo sapien
ttagtggaaatttgcttggcggtgt

SEQ ID NO: 4477473 - DNA, 25 bp, Homo sapien
ttaattagtggaaatttgcttggcg

SEQ ID NO: 4477474 - DNA, 25 bp, Homo sapien
catgggacctaactccctctccaga

SEQ ID NO: 4477475 - DNA, 25 bp, Homo sapien
aaacacacgtcttgcctttgcttgg

SEQ ID NO: 4477476 - DNA, 25 bp, Homo sapien
tctccagattcagagttggagggtc

SEQ ID NO: 4477477 - DNA, 25 bp, Homo sapien
cagtgaatgtacattgaataaacac

SEQ ID NO: 4477478 - DNA, 25 bp, Homo sapien
gggggcggtgggcacatagagctat

SEQ ID NO: 4477479 - DNA, 25 bp, Homo sapien
ggggcggtgggcacatagagctata

SEQ ID NO: 4477480 - DNA, 25 bp, Homo sapien
gactttggctcacgcgctgggacct

SEQ ID NO: 4477481 - DNA, 25 bp, Homo sapien
agcggaacacggacccggccgatct

SEQ ID NO: 4477482 - DNA, 25 bp, Homo sapien
agatgtctccggtcacggctcggag

SEQ ID NO: 4477483 - DNA, 25 bp, Homo sapien
cctggagaggcttgagaaagatttt

SEQ ID NO: 4477484 - DNA, 25 bp, Homo sapien
cgtgcctggccctgaggacttaact

SEQ ID NO: 4477485 - DNA, 25 bp, Homo sapien
gagaaagaagatgaacacctgaagc

SEQ ID NO: 4477486 - DNA, 25 bp, Homo sapien
agaagatgaacacctgaagccaact

SEQ ID NO: 4477487 - DNA, 25 bp, Homo sapien
tgcctggccctgaggacttaacttt

SEQ ID NO: 4477488 - DNA, 25 bp, Homo sapien
ggcaagtgggggagtgctgtttcgt

SEQ ID NO: 4477489 - DNA, 25 bp, Homo sapien
agaggcaagtgggggagtgctgttt

SEQ ID NO: 4477490 - DNA, 25 bp, Homo sapien
acaaaggagaggcaagtgggggagt

SEQ ID NO: 4477491 - DNA, 25 bp, Homo sapien
cacaaaggagaggcaagtgggggag

SEQ ID NO: 4477492 - DNA, 25 bp, Homo sapien
ccattgtccataccctcatcaatat

SEQ ID NO: 4477493 - DNA, 25 bp, Homo sapien
tgtccataccctcatcaatatcaca

SEQ ID NO: 4477494 - DNA, 25 bp, Homo sapien
cactgttaacctgttactaccattg

SEQ ID NO: 4477495 - DNA, 25 bp, Homo sapien
ctgttaacctgttactaccattgtc

SEQ ID NO: 4477496 - DNA, 25 bp, Homo sapien
gaattgccctcccacaggtactctg

SEQ ID NO: 4477497 - DNA, 25 bp, Homo sapien
ggaattaccggatcactgcttccta

SEQ ID NO: 4477498 - DNA, 25 bp, Homo sapien
tggtgcctggaattaccggatcact

SEQ ID NO: 4477499 - DNA, 25 bp, Homo sapien
tcctaccttggggtcagaattgccc

SEQ ID NO: 4477500 - DNA, 25 bp, Homo sapien
tcacatgatgaacaatctctgggat

SEQ ID NO: 4477501 - DNA, 25 bp, Homo sapien
tggtgtgagtatggcatgaaatgca

SEQ ID NO: 4477502 - DNA, 25 bp, Homo sapien
tccatccatggtgtgagtatggcat

SEQ ID NO: 4477503 - DNA, 25 bp, Homo sapien
gaaatgcatgcacggctcctctcac

SEQ ID NO: 4477504 - DNA, 25 bp, Homo sapien
gcacaggcactagatgcagtgcccc

SEQ ID NO: 4477505 - DNA, 25 bp, Homo sapien
tgcacaggcactagatgcagtgccc

SEQ ID NO: 4477506 - DNA, 25 bp, Homo sapien
gcactagatgcagtgcccccagggc

SEQ ID NO: 4477507 - DNA, 25 bp, Homo sapien
caggcactagatgcagtgcccccag

SEQ ID NO: 4477508 - DNA, 25 bp, Homo sapien
gattcccctggaggcatccggcagg

SEQ ID NO: 4477509 - DNA, 25 bp, Homo sapien
ggtggcatgattcccctggaggcat

SEQ ID NO: 4477510 - DNA, 25 bp, Homo sapien
tttgagctccattctgatgtcaggg

SEQ ID NO: 4477511 - DNA, 25 bp, Homo sapien
ctttgagctccattctgatgtcagg

SEQ ID NO: 4477512 - DNA, 25 bp, Homo sapien
agaagctgtccacggcagagtcaca

SEQ ID NO: 4477513 - DNA, 25 bp, Homo sapien
gtccacggcagagtcacacccagcc

SEQ ID NO: 4477514 - DNA, 25 bp, Homo sapien
agagaagctgtccacggcagagtca

SEQ ID NO: 4477515 - DNA, 25 bp, Homo sapien
gagaagctgtccacggcagagtcac

SEQ ID NO: 4477516 - DNA, 25 bp, Homo sapien
gaccctgatggagaactgtcatcca

SEQ ID NO: 4477517 - DNA, 25 bp, Homo sapien
agtccagggtagaggactgcagacc

SEQ ID NO: 4477518 - DNA, 25 bp, Homo sapien
ccaggatgcagcaagtccagggtag

SEQ ID NO: 4477519 - DNA, 25 bp, Homo sapien
tgcagcaagtccagggtagaggact

SEQ ID NO: 4477520 - DNA, 25 bp, Homo sapien
agcagctcaggccaatgggatgcag

SEQ ID NO: 4477521 - DNA, 25 bp, Homo sapien
agacagcagctcaggccaatgggat

SEQ ID NO: 4477522 - DNA, 25 bp, Homo sapien
tcaggccaatgggatgcaggcagtt

SEQ ID NO: 4477523 - DNA, 25 bp, Homo sapien
tgcaggcagttctgagagccggtac

SEQ ID NO: 4477524 - DNA, 25 bp, Homo sapien
tactcaaggttgcagaacaagccca

SEQ ID NO: 4477525 - DNA, 25 bp, Homo sapien
gggaatatccaaccctgtgggcctg

SEQ ID NO: 4477526 - DNA, 25 bp, Homo sapien
taataagagactatgagcgaggtca

SEQ ID NO: 4477527 - DNA, 25 bp, Homo sapien
tcaaaggtctcctgttagggcccag

SEQ ID NO: 4477528 - DNA, 25 bp, Homo sapien
tggtaagtagcaatgacgcagtaac

SEQ ID NO: 4477529 - DNA, 25 bp, Homo sapien
atgacgcagtaactgagctttgtgg

SEQ ID NO: 4477530 - DNA, 25 bp, Homo sapien
gtaagtagcaatgacgcagtaactg

SEQ ID NO: 4477531 - DNA, 25 bp, Homo sapien
gtagcaatgacgcagtaactgagct

SEQ ID NO: 4477532 - DNA, 25 bp, Homo sapien
tctcccctggggcccggatgctgtg

SEQ ID NO: 4477533 - DNA, 25 bp, Homo sapien
gggcccggatgctgtgctaagtcgt

SEQ ID NO: 4477534 - DNA, 25 bp, Homo sapien
ccggatgctgtgctaagtcgttgtt

SEQ ID NO: 4477535 - DNA, 25 bp, Homo sapien
gcccggatgctgtgctaagtcgttg

SEQ ID NO: 4477536 - DNA, 25 bp, Homo sapien
cccgaatcatccggtccctcctggg

SEQ ID NO: 4477537 - DNA, 25 bp, Homo sapien
aatcatccggtccctcctgggccca

SEQ ID NO: 4477538 - DNA, 25 bp, Homo sapien
ccgaatcatccggtccctcctgggc

SEQ ID NO: 4477539 - DNA, 25 bp, Homo sapien
gaatcatccggtccctcctgggccc

SEQ ID NO: 4477540 - DNA, 25 bp, Homo sapien
cccggagggatctgacaacagatgg

SEQ ID NO: 4477541 - DNA, 25 bp, Homo sapien
ttcccggagggatctgacaacagat

SEQ ID NO: 4477542 - DNA, 25 bp, Homo sapien
ctttcccggagggatctgacaacag

SEQ ID NO: 4477543 - DNA, 25 bp, Homo sapien
cggagggatctgacaacagatgggt

SEQ ID NO: 4477544 - DNA, 25 bp, Homo sapien
aaatccaggatgacagtgttggggg

SEQ ID NO: 4477545 - DNA, 25 bp, Homo sapien
aaaaatccaggatgacagtgttggg

SEQ ID NO: 4477546 - DNA, 25 bp, Homo sapien
tgaaaaatccaggatgacagtgttg

SEQ ID NO: 4477547 - DNA, 25 bp, Homo sapien
gaaaaatccaggatgacagtgttgg

SEQ ID NO: 4477548 - DNA, 25 bp, Homo sapien
ctggagctgagcacacggatggata

SEQ ID NO: 4477549 - DNA, 25 bp, Homo sapien
gacggtaggcaaaatgaatcaggag

SEQ ID NO: 4477550 - DNA, 25 bp, Homo sapien
taactgctcgataaaacttgcccac

SEQ ID NO: 4477551 - DNA, 25 bp, Homo sapien
tacggaactgatgctgacggtaggc

SEQ ID NO: 4477552 - DNA, 25 bp, Homo sapien
tcagtctgcggcataaattagcgga

SEQ ID NO: 4477553 - DNA, 25 bp, Homo sapien
ctccagtcatgagaccagcagtggc

SEQ ID NO: 4477554 - DNA, 25 bp, Homo sapien
ccaaactcaatcttcagcaagggag

SEQ ID NO: 4477555 - DNA, 25 bp, Homo sapien
cggaagccagagtgtaaaaatatga

SEQ ID NO: 4477556 - DNA, 25 bp, Homo sapien
cacctcggaggaaaatcggcaaaat

SEQ ID NO: 4477557 - DNA, 25 bp, Homo sapien
aatgagcactgaattaagaaaccat

SEQ ID NO: 4477558 - DNA, 25 bp, Homo sapien
gcactgaattaagaaaccattaact

SEQ ID NO: 4477559 - DNA, 25 bp, Homo sapien
aattttctatcacaccatgagcacc

SEQ ID NO: 4477560 - DNA, 25 bp, Homo sapien
gacaaagcctcatgctgagcaccgg

SEQ ID NO: 4477561 - DNA, 25 bp, Homo sapien
gactcgacatggttgctgtcctcaa

SEQ ID NO: 4477562 - DNA, 25 bp, Homo sapien
gaagccactcttccgaaacatagca

SEQ ID NO: 4477563 - DNA, 25 bp, Homo sapien
aacatagcaaactttttcatctcca

SEQ ID NO: 4477564 - DNA, 25 bp, Homo sapien
caaaatgaacgagggcttggagtag

SEQ ID NO: 4477565 - DNA, 25 bp, Homo sapien
aagcaaaatgaacgagggcttggag

SEQ ID NO: 4477566 - DNA, 25 bp, Homo sapien
gcttggagtagaggctctgggctac

SEQ ID NO: 4477567 - DNA, 25 bp, Homo sapien
taaagcaaaatgaacgagggcttgg

SEQ ID NO: 4477568 - DNA, 25 bp, Homo sapien
ggttctgtccacttggggacagtaa

SEQ ID NO: 4477569 - DNA, 25 bp, Homo sapien
ctgctgatggttctgtccacttggg

SEQ ID NO: 4477570 - DNA, 25 bp, Homo sapien
tgtccacttggggacagtaagtcat

SEQ ID NO: 4477571 - DNA, 25 bp, Homo sapien
ctcctgctgatggttctgtccactt

SEQ ID NO: 4477572 - DNA, 25 bp, Homo sapien
tggcaaggaaggaccacacgatcag

SEQ ID NO: 4477573 - DNA, 25 bp, Homo sapien
aggaaggaccacacgatcagcctca

SEQ ID NO: 4477574 - DNA, 25 bp, Homo sapien
ccatggcaaggaaggaccacacgat

SEQ ID NO: 4477575 - DNA, 25 bp, Homo sapien
aaggaccacacgatcagcctcagag

SEQ ID NO: 4477576 - DNA, 25 bp, Homo sapien
ccagcttgaatgtaagtgcctattt

SEQ ID NO: 4477577 - DNA, 25 bp, Homo sapien
tgtaagtgcctattttcaggaagaa

SEQ ID NO: 4477578 - DNA, 25 bp, Homo sapien
caggtcttccagcttgaatgtaagt

SEQ ID NO: 4477579 - DNA, 25 bp, Homo sapien
tcttccagcttgaatgtaagtgcct

SEQ ID NO: 4477580 - DNA, 25 bp, Homo sapien
ccaggtatagaggtggcctgcttgg

SEQ ID NO: 4477581 - DNA, 25 bp, Homo sapien
aggtatagaggtggcctgcttgggc

SEQ ID NO: 4477582 - DNA, 25 bp, Homo sapien
aagaagggctgattctgctttctta

SEQ ID NO: 4477583 - DNA, 25 bp, Homo sapien
agggctgattctgctttcttatggg

SEQ ID NO: 4477584 - DNA, 25 bp, Homo sapien
ccacagatgccacagtgagggagca

SEQ ID NO: 4477585 - DNA, 25 bp, Homo sapien
ccaggccacagatgccacagtgagg

SEQ ID NO: 4477586 - DNA, 25 bp, Homo sapien
aggccacagatgccacagtgaggga

SEQ ID NO: 4477587 - DNA, 25 bp, Homo sapien
acagatgccacagtgagggagcagc

SEQ ID NO: 4477588 - DNA, 25 bp, Homo sapien
ggcctctgggacattctagagccgt

SEQ ID NO: 4477589 - DNA, 25 bp, Homo sapien
cctctgggacattctagagccgttg

SEQ ID NO: 4477590 - DNA, 25 bp, Homo sapien
gggacattctagagccgttgctgcc

SEQ ID NO: 4477591 - DNA, 25 bp, Homo sapien
tctgggacattctagagccgttgct

SEQ ID NO: 4477592 - DNA, 25 bp, Homo sapien
taccatggtgggagagcttggtccc

SEQ ID NO: 4477593 - DNA, 25 bp, Homo sapien
tgagtacaggatagtgtaccagggc

SEQ ID NO: 4477594 - DNA, 25 bp, Homo sapien
aaggacctcggagagtttgcaggca

SEQ ID NO: 4477595 - DNA, 25 bp, Homo sapien
tccacactcagtgtcaaagagcaca

SEQ ID NO: 4477596 - DNA, 25 bp, Homo sapien
agctggccggggaacatgaggcggg

SEQ ID NO: 4477597 - DNA, 25 bp, Homo sapien
tggccggggaacatgaggcggggag

SEQ ID NO: 4477598 - DNA, 25 bp, Homo sapien
cagctggccggggaacatgaggcgg

SEQ ID NO: 4477599 - DNA, 25 bp, Homo sapien
cggggaacatgaggcggggaggaga

SEQ ID NO: 4477600 - DNA, 25 bp, Homo sapien
ctctccacctgaaatccatgggtag

SEQ ID NO: 4477601 - DNA, 25 bp, Homo sapien
tcatcgacaggatgcttccttccac

SEQ ID NO: 4477602 - DNA, 25 bp, Homo sapien
tccacctgaaatccatgggtagtat

SEQ ID NO: 4477603 - DNA, 25 bp, Homo sapien
cacctgaaatccatgggtagtatag

SEQ ID NO: 4477604 - DNA, 25 bp, Homo sapien
ttgatgagttgcttccccagcgtcc

SEQ ID NO: 4477605 - DNA, 25 bp, Homo sapien
tgatgagttgcttccccagcgtcct

SEQ ID NO: 4477606 - DNA, 25 bp, Homo sapien
gatgagttgcttccccagcgtcctc

SEQ ID NO: 4477607 - DNA, 25 bp, Homo sapien
cttgatgagttgcttccccagcgtc

SEQ ID NO: 4477608 - DNA, 25 bp, Homo sapien
ctggagatggctgcacgtcatgtgt

SEQ ID NO: 4477609 - DNA, 25 bp, Homo sapien
ggagatggctgcacgtcatgtgtca

SEQ ID NO: 4477610 - DNA, 25 bp, Homo sapien
aggctttctgccctcaactccatgg

SEQ ID NO: 4477611 - DNA, 25 bp, Homo sapien
ggctttctgccctcaactccatgga

SEQ ID NO: 4477612 - DNA, 25 bp, Homo sapien
tgttctgcttaagcttgtgcgtcat

SEQ ID NO: 4477613 - DNA, 25 bp, Homo sapien
cagcgtgtactctttgttctgctta

SEQ ID NO: 4477614 - DNA, 25 bp, Homo sapien
tcagactcagcgtgtactctttgtt

SEQ ID NO: 4477615 - DNA, 25 bp, Homo sapien
tcctgtttcagactcagcgtgtact

SEQ ID NO: 4477616 - DNA, 25 bp, Homo sapien
actgaggattcactgcaattgttcc

SEQ ID NO: 4477617 - DNA, 25 bp, Homo sapien
cttccacattaaccacgtaggcaac

SEQ ID NO: 4477618 - DNA, 25 bp, Homo sapien
gattcactgcaattgttccttgaga

SEQ ID NO: 4477619 - DNA, 25 bp, Homo sapien
accacgtaggcaactgaggattcac

SEQ ID NO: 4477620 - DNA, 25 bp, Homo sapien
tcacttggagccctagtgatgctta

SEQ ID NO: 4477621 - DNA, 25 bp, Homo sapien
gaacagcctctgatcagaactcact

SEQ ID NO: 4477622 - DNA, 25 bp, Homo sapien
taatccttttcggagatgggttgca

SEQ ID NO: 4477623 - DNA, 25 bp, Homo sapien
ttccgaacagcctctgatcagaact

SEQ ID NO: 4477624 - DNA, 25 bp, Homo sapien
ctgttttcaggagagagggtggtca

SEQ ID NO: 4477625 - DNA, 25 bp, Homo sapien
tgttttcaggagagagggtggtcat

SEQ ID NO: 4477626 - DNA, 25 bp, Homo sapien
gaaggaggctgactgtctggcagag

SEQ ID NO: 4477627 - DNA, 25 bp, Homo sapien
ggatgaaggaggctgactgtctggc

SEQ ID NO: 4477628 - DNA, 25 bp, Homo sapien
aggaggctgactgtctggcagagag

SEQ ID NO: 4477629 - DNA, 25 bp, Homo sapien
caggatgaaggaggctgactgtctg

SEQ ID NO: 4477630 - DNA, 25 bp, Homo sapien
catcaaagaagctgtcccattctgt

SEQ ID NO: 4477631 - DNA, 25 bp, Homo sapien
gttaacacaaatgaagtcccgtgat

SEQ ID NO: 4477632 - DNA, 25 bp, Homo sapien
aatgaagtcccgtgatttggccaag

SEQ ID NO: 4477633 - DNA, 25 bp, Homo sapien
tgtcttgtcaatgggtggttttctc

SEQ ID NO: 4477634 - DNA, 25 bp, Homo sapien
ggcttcatccaacgccacacctgcc

SEQ ID NO: 4477635 - DNA, 25 bp, Homo sapien
aaagggcttcatccaacgccacacc

SEQ ID NO: 4477636 - DNA, 25 bp, Homo sapien
caaaagggcttcatccaacgccaca

SEQ ID NO: 4477637 - DNA, 25 bp, Homo sapien
cttcatccaacgccacacctgcccc

SEQ ID NO: 4477638 - DNA, 25 bp, Homo sapien
ggtcatgggctctatcgatgcctac

SEQ ID NO: 4477639 - DNA, 25 bp, Homo sapien
aggtcatgggctctatcgatgccta

SEQ ID NO: 4477640 - DNA, 25 bp, Homo sapien
gaggtcatgggctctatcgatgcct

SEQ ID NO: 4477641 - DNA, 25 bp, Homo sapien
tctgccatgagaagtagcccgtgag

SEQ ID NO: 4477642 - DNA, 25 bp, Homo sapien
atgctgtccaccgtgagccgctcat

SEQ ID NO: 4477643 - DNA, 25 bp, Homo sapien
tcatgctgtccaccgtgagccgctc

SEQ ID NO: 4477644 - DNA, 25 bp, Homo sapien
ctgtccaccgtgagccgctcatcct

SEQ ID NO: 4477645 - DNA, 25 bp, Homo sapien
catttggcataaggccttgtagttc

SEQ ID NO: 4477646 - DNA, 25 bp, Homo sapien
gtgaagttccggtgcaggttttcca

SEQ ID NO: 4477647 - DNA, 25 bp, Homo sapien
tctctgtgaagttccggtgcaggtt

SEQ ID NO: 4477648 - DNA, 25 bp, Homo sapien
ttggcataaggccttgtagttcttc

SEQ ID NO: 4477649 - DNA, 25 bp, Homo sapien
cagacgtaactcaggagcaggatct

SEQ ID NO: 4477650 - DNA, 25 bp, Homo sapien
gggatctttgtcatagattttctga

SEQ ID NO: 4477651 - DNA, 25 bp, Homo sapien
tcttgtcgatgaggacgttgcccag

SEQ ID NO: 4477652 - DNA, 25 bp, Homo sapien
ctgcctgcgtgttgcagacgtaact

SEQ ID NO: 4477653 - DNA, 25 bp, Homo sapien
gtctcgtggtcgtgctccaccatca

SEQ ID NO: 4477654 - DNA, 25 bp, Homo sapien
aggtctcgtggtcgtgctccaccat

SEQ ID NO: 4477655 - DNA, 25 bp, Homo sapien
ggtctcgtggtcgtgctccaccatc

SEQ ID NO: 4477656 - DNA, 25 bp, Homo sapien
ggccacgccaatgttgatgacacag

SEQ ID NO: 4477657 - DNA, 25 bp, Homo sapien
catgtctaggttcttggccacgcca

SEQ ID NO: 4477658 - DNA, 25 bp, Homo sapien
aggtgatcagggtgctgagcatgtc

SEQ ID NO: 4477659 - DNA, 25 bp, Homo sapien
tgctgagcatgtctaggttcttggc

SEQ ID NO: 4477660 - DNA, 25 bp, Homo sapien
cagagcctccagacatcatcgaagg

SEQ ID NO: 4477661 - DNA, 25 bp, Homo sapien
tgaaggcacgctggaagcagaagca

SEQ ID NO: 4477662 - DNA, 25 bp, Homo sapien
cgaaggacttgaaggcacgctggaa

SEQ ID NO: 4477663 - DNA, 25 bp, Homo sapien
ccagacatcatcgaaggacttgaag

SEQ ID NO: 4477664 - DNA, 25 bp, Homo sapien
ttcctgcagggcttccccgtcagca

SEQ ID NO: 4477665 - DNA, 25 bp, Homo sapien
cacctgctcccgcaccatctgcagc

SEQ ID NO: 4477666 - DNA, 25 bp, Homo sapien
aagttcctgcagggcttccccgtca

SEQ ID NO: 4477667 - DNA, 25 bp, Homo sapien
ggaggatgtcatccccgcccatgct

SEQ ID NO: 4477668 - DNA, 25 bp, Homo sapien
cgcaggcggcagagatcagctcatc

SEQ ID NO: 4477669 - DNA, 25 bp, Homo sapien
catcaaggtcgatgaggttgttgca

SEQ ID NO: 4477670 - DNA, 25 bp, Homo sapien
caggcggcagagatcagctcatcag

SEQ ID NO: 4477671 - DNA, 25 bp, Homo sapien
tcatcagcatcaaggtcgatgaggt

SEQ ID NO: 4477672 - DNA, 25 bp, Homo sapien
gaggaagaaatcctttaatgtctga

SEQ ID NO: 4477673 - DNA, 25 bp, Homo sapien
aggaagaaatcctttaatgtctgag

SEQ ID NO: 4477674 - DNA, 25 bp, Homo sapien
cagaggactgtttatattgcagctg

SEQ ID NO: 4477675 - DNA, 25 bp, Homo sapien
tcatcctgcccatcgaaggcatcag

SEQ ID NO: 4477676 - DNA, 25 bp, Homo sapien
catcagtccactgcgggctttggtg

SEQ ID NO: 4477677 - DNA, 25 bp, Homo sapien
tgttttatctactccctcactccag

SEQ ID NO: 4477678 - DNA, 25 bp, Homo sapien
gccctccccactgcaatccccttca

SEQ ID NO: 4477679 - DNA, 25 bp, Homo sapien
ctgcaatccccttcagtcccttcct

SEQ ID NO: 4477680 - DNA, 25 bp, Homo sapien
tccccactgcaatccccttcagtcc

SEQ ID NO: 4477681 - DNA, 25 bp, Homo sapien
cactgcaatccccttcagtcccttc

SEQ ID NO: 4477682 - DNA, 25 bp, Homo sapien
tggaccatctcggcccatcggtggg

SEQ ID NO: 4477683 - DNA, 25 bp, Homo sapien
ccctgtcatccagccctggaccatc

SEQ ID NO: 4477684 - DNA, 25 bp, Homo sapien
agagagggacgagggaagtaggaca

SEQ ID NO: 4477685 - DNA, 25 bp, Homo sapien
gacagagcttcctgcacacaccacc

SEQ ID NO: 4477686 - DNA, 25 bp, Homo sapien
ccctgcagactgacttcctgcaacc

SEQ ID NO: 4477687 - DNA, 25 bp, Homo sapien
cagactgacttcctgcaaccccaga

SEQ ID NO: 4477688 - DNA, 25 bp, Homo sapien
tgcagactgacttcctgcaacccca

SEQ ID NO: 4477689 - DNA, 25 bp, Homo sapien
cctgcagactgacttcctgcaaccc

SEQ ID NO: 4477690 - DNA, 25 bp, Homo sapien
actgtgaggacttccttgaactccc

SEQ ID NO: 4477691 - DNA, 25 bp, Homo sapien
tctggtccgtaatcactcactgtga

SEQ ID NO: 4477692 - DNA, 25 bp, Homo sapien
agagtaacaggagatcgactgcgga

SEQ ID NO: 4477693 - DNA, 25 bp, Homo sapien
gactgcggagacaagctctgctcct

SEQ ID NO: 4477694 - DNA, 25 bp, Homo sapien
acatcctggacttcctgatctattg

SEQ ID NO: 4477695 - DNA, 25 bp, Homo sapien
cctgatctattgaggaattctgcaa

SEQ ID NO: 4477696 - DNA, 25 bp, Homo sapien
tctgtgggcctggtagttcgacaac

SEQ ID NO: 4477697 - DNA, 25 bp, Homo sapien
gtggaaggtgcatctctctgaatct

SEQ ID NO: 4477698 - DNA, 25 bp, Homo sapien
ttcaagatggcagcacaaagggtca

SEQ ID NO: 4477699 - DNA, 25 bp, Homo sapien
cttcccacggcctcgaggacaggaa

SEQ ID NO: 4477700 - DNA, 25 bp, Homo sapien
aggaccgcctgtgggccttacatgg

SEQ ID NO: 4477701 - DNA, 25 bp, Homo sapien
tgccccagctctagctttgtccatg

SEQ ID NO: 4477702 - DNA, 25 bp, Homo sapien
tggctggccgctcggctggcgcttt

SEQ ID NO: 4477703 - DNA, 25 bp, Homo sapien
accagcacgcacaggcaggcgcccc

SEQ ID NO: 4477704 - DNA, 25 bp, Homo sapien
cagcgggcggggtccgagccctgcc

SEQ ID NO: 4477705 - DNA, 25 bp, Homo sapien
gttgttctcccactggatcagctgc

SEQ ID NO: 4477706 - DNA, 25 bp, Homo sapien
ctgcccgttgttctcccactggatc

SEQ ID NO: 4477707 - DNA, 25 bp, Homo sapien
tgccgccagcgggcggggtccgagc

SEQ ID NO: 4477708 - DNA, 25 bp, Homo sapien
ctgagcccgagttgagcaagctgta

SEQ ID NO: 4477709 - DNA, 25 bp, Homo sapien
agcccgagttgagcaagctgtacac

SEQ ID NO: 4477710 - DNA, 25 bp, Homo sapien
tgagcccgagttgagcaagctgtac

SEQ ID NO: 4477711 - DNA, 25 bp, Homo sapien
gagcccgagttgagcaagctgtaca

SEQ ID NO: 4477712 - DNA, 25 bp, Homo sapien
ccccgtgccgttgctgggagacgga

SEQ ID NO: 4477713 - DNA, 25 bp, Homo sapien
ccaaagccgaatgggtgccgcgcct

SEQ ID NO: 4477714 - DNA, 25 bp, Homo sapien
ccagttgtcgggcacctggccaaag

SEQ ID NO: 4477715 - DNA, 25 bp, Homo sapien
gtaggtgctggcgaaggccgaagcc

SEQ ID NO: 4477716 - DNA, 25 bp, Homo sapien
cctggtcgtaggtccgcgacgcggg

SEQ ID NO: 4477717 - DNA, 25 bp, Homo sapien
gcgacgcggggtcgtagttctcgta

SEQ ID NO: 4477718 - DNA, 25 bp, Homo sapien
accctggtcgtaggtccgcgacgcg

SEQ ID NO: 4477719 - DNA, 25 bp, Homo sapien
tccgcgacgcggggtcgtagttctc

SEQ ID NO: 4477720 - DNA, 25 bp, Homo sapien
cgcgcccacgccgccgcccgcgggc

SEQ ID NO: 4477721 - DNA, 25 bp, Homo sapien
cacgccgccgcccgcgggccggtag

SEQ ID NO: 4477722 - DNA, 25 bp, Homo sapien
cgaggccacggccgccgcccccgcg

SEQ ID NO: 4477723 - DNA, 25 bp, Homo sapien
ccccgcgcccacgccgccgcccgcg

SEQ ID NO: 4477724 - DNA, 25 bp, Homo sapien
cgccgccgccgtactcctcgtagcg

SEQ ID NO: 4477725 - DNA, 25 bp, Homo sapien
ttcgccgccgccgtactcctcgtag

SEQ ID NO: 4477726 - DNA, 25 bp, Homo sapien
tcttcgccgccgccgtactcctcgt

SEQ ID NO: 4477727 - DNA, 25 bp, Homo sapien
cgccgccgtactcctcgtagcgcgc

SEQ ID NO: 4477728 - DNA, 25 bp, Homo sapien
tgcgagtagcggcggtccaggccgt

SEQ ID NO: 4477729 - DNA, 25 bp, Homo sapien
gcggcacgtagggcctctcgggggc

SEQ ID NO: 4477730 - DNA, 25 bp, Homo sapien
agtagcggcggtccaggccgtcggg

SEQ ID NO: 4477731 - DNA, 25 bp, Homo sapien
ctgtgcgagtagcggcggtccaggc

SEQ ID NO: 4477732 - DNA, 25 bp, Homo sapien
taggcctgctcgaagccgggggtgc

SEQ ID NO: 4477733 - DNA, 25 bp, Homo sapien
caggcgtgggtctccgccatgggcc

SEQ ID NO: 4477734 - DNA, 25 bp, Homo sapien
gcgtagggcgggtaccagcccaggc

SEQ ID NO: 4477735 - DNA, 25 bp, Homo sapien
caggtagggcggctccagcgcgcgc

SEQ ID NO: 4477736 - DNA, 25 bp, Homo sapien
gcgggggcgtgtcggagctgcgcac

SEQ ID NO: 4477737 - DNA, 25 bp, Homo sapien
ctggttgggccggtacacgctgccc

SEQ ID NO: 4477738 - DNA, 25 bp, Homo sapien
tgcccacgctgaggcggccctgctg

SEQ ID NO: 4477739 - DNA, 25 bp, Homo sapien
cgttctggttgggccggtacacgct

SEQ ID NO: 4477740 - DNA, 25 bp, Homo sapien
gttgggccggtacacgctgcccacg

SEQ ID NO: 4477741 - DNA, 25 bp, Homo sapien
tttggtagcccctgaaattctgcac

SEQ ID NO: 4477742 - DNA, 25 bp, Homo sapien
tattactcatctcaactactgtgtt

SEQ ID NO: 4477743 - DNA, 25 bp, Homo sapien
tgatttttcagttagcctcaggctc

SEQ ID NO: 4477744 - DNA, 25 bp, Homo sapien
tatggctcggcataccactattact

SEQ ID NO: 4477745 - DNA, 25 bp, Homo sapien
tataatgcgcccttctgcagggatg

SEQ ID NO: 4477746 - DNA, 25 bp, Homo sapien
gctgatgcatggctataatgcgccc

SEQ ID NO: 4477747 - DNA, 25 bp, Homo sapien
catggctataatgcgcccttctgca

SEQ ID NO: 4477748 - DNA, 25 bp, Homo sapien
aatgcgcccttctgcagggatgctg

SEQ ID NO: 4477749 - DNA, 25 bp, Homo sapien
ctctggaagcttgttgggtgaagcc

SEQ ID NO: 4477750 - DNA, 25 bp, Homo sapien
ctaactctggaagcttgttgggtga

SEQ ID NO: 4477751 - DNA, 25 bp, Homo sapien
aactctggaagcttgttgggtgaag

SEQ ID NO: 4477752 - DNA, 25 bp, Homo sapien
tctggaagcttgttgggtgaagcct

SEQ ID NO: 4477753 - DNA, 25 bp, Homo sapien
cacgggacaaataacagtacctggc

SEQ ID NO: 4477754 - DNA, 25 bp, Homo sapien
tgcacattgaagtcagtaagcccag

SEQ ID NO: 4477755 - DNA, 25 bp, Homo sapien
tgcccgcaggctgaacatgatatcc

SEQ ID NO: 4477756 - DNA, 25 bp, Homo sapien
taaaagtcagcaagtgagctcgtca

SEQ ID NO: 4477757 - DNA, 25 bp, Homo sapien
agaaggtgccttgcaagtggctgat

SEQ ID NO: 4477758 - DNA, 25 bp, Homo sapien
gtgccttgcaagtggctgataagag

SEQ ID NO: 4477759 - DNA, 25 bp, Homo sapien
taggactccacttgtttgttcagac

SEQ ID NO: 4477760 - DNA, 25 bp, Homo sapien
cctggaatgaggctgcttaggactc

SEQ ID NO: 4477761 - DNA, 25 bp, Homo sapien
cctgtcctcctgctcaatgctgggt

SEQ ID NO: 4477762 - DNA, 25 bp, Homo sapien
gtctggagttgctgacggctcccgt

SEQ ID NO: 4477763 - DNA, 25 bp, Homo sapien
gctcaatgctgggtctggagttgct

SEQ ID NO: 4477764 - DNA, 25 bp, Homo sapien
ctggagttgctgacggctcccgtgc

SEQ ID NO: 4477765 - DNA, 25 bp, Homo sapien
gaggtcccagggaatagcagacccc

SEQ ID NO: 4477766 - DNA, 25 bp, Homo sapien
gaccccctcccatagctggtatgtt

SEQ ID NO: 4477767 - DNA, 25 bp, Homo sapien
tttttccaggaaggaacaatggctc

SEQ ID NO: 4477768 - DNA, 25 bp, Homo sapien
ggggacatttcgtcagcagccaggc

SEQ ID NO: 4477769 - DNA, 25 bp, Homo sapien
agagcccggggcctgtccgtcctgt

SEQ ID NO: 4477770 - DNA, 25 bp, Homo sapien
aagtctggagactgcccccgtcctt

SEQ ID NO: 4477771 - DNA, 25 bp, Homo sapien
gggcctgtccgtcctgttcctgccc

SEQ ID NO: 4477772 - DNA, 25 bp, Homo sapien
cccaggggaagtctggagactgccc

SEQ ID NO: 4477773 - DNA, 25 bp, Homo sapien
aggtgggctctctgcacataagtgg

SEQ ID NO: 4477774 - DNA, 25 bp, Homo sapien
cttgcacatagttggggtctgggac

SEQ ID NO: 4477775 - DNA, 25 bp, Homo sapien
ggtgggctctctgcacataagtgga

SEQ ID NO: 4477776 - DNA, 25 bp, Homo sapien
catagttggggtctgggaccaagtc

SEQ ID NO: 4477777 - DNA, 25 bp, Homo sapien
caaggctcactgatgaaacggtcag

SEQ ID NO: 4477778 - DNA, 25 bp, Homo sapien
gagttccttgtatagtgaggtacag

SEQ ID NO: 4477779 - DNA, 25 bp, Homo sapien
gcagacagcctagctggcagccaca

SEQ ID NO: 4477780 - DNA, 25 bp, Homo sapien
tgccacagtaaaagtggagttcctt

SEQ ID NO: 4477781 - DNA, 25 bp, Homo sapien
agcgcagtagcacccgcacatcgta

SEQ ID NO: 4477782 - DNA, 25 bp, Homo sapien
gtgccctggttcttcacgcgctggg

SEQ ID NO: 4477783 - DNA, 25 bp, Homo sapien
actcccaggtgtgccgtggccggtt

SEQ ID NO: 4477784 - DNA, 25 bp, Homo sapien
gcacatcgtagtcggtggcctcagg

SEQ ID NO: 4477785 - DNA, 25 bp, Homo sapien
cctgtggctgcatccagtaggtcgt

SEQ ID NO: 4477786 - DNA, 25 bp, Homo sapien
catagcgcttgaggttgccgaagtc

SEQ ID NO: 4477787 - DNA, 25 bp, Homo sapien
tcgtagtggctgaactcgtccatgc

SEQ ID NO: 4477788 - DNA, 25 bp, Homo sapien
tatgagaggtgcatgcatagcgctt

SEQ ID NO: 4477789 - DNA, 25 bp, Homo sapien
ggcctcagcgggcctcgctctttgc

SEQ ID NO: 4477790 - DNA, 25 bp, Homo sapien
tcagcgggcctcgctctttgcctcc

SEQ ID NO: 4477791 - DNA, 25 bp, Homo sapien
cctcagcgggcctcgctctttgcct

SEQ ID NO: 4477792 - DNA, 25 bp, Homo sapien
ctcagcgggcctcgctctttgcctc

SEQ ID NO: 4477793 - DNA, 25 bp, Homo sapien
taaagccactggctagatggaccag

SEQ ID NO: 4477794 - DNA, 25 bp, Homo sapien
ggcaactgctcagggtgggtccaca

SEQ ID NO: 4477795 - DNA, 25 bp, Homo sapien
taggacgtgttgctctccagactgt

SEQ ID NO: 4477796 - DNA, 25 bp, Homo sapien
gacagatatctaatagccaggtggg

SEQ ID NO: 4477797 - DNA, 25 bp, Homo sapien
ctggcagtcgatgtccgcattgtag

SEQ ID NO: 4477798 - DNA, 25 bp, Homo sapien
caggctgcacgtcggttatgtcgat

SEQ ID NO: 4477799 - DNA, 25 bp, Homo sapien
cggttatgtcgatccactggcagtc

SEQ ID NO: 4477800 - DNA, 25 bp, Homo sapien
cgcattgtaggtgtcatagcagcct

SEQ ID NO: 4477801 - DNA, 25 bp, Homo sapien
gtgtagtgaatgttgcatctcacca

SEQ ID NO: 4477802 - DNA, 25 bp, Homo sapien
gttgcatctcaccacgttgttggtg

SEQ ID NO: 4477803 - DNA, 25 bp, Homo sapien
caccacgttgttggtgaagtcagac

SEQ ID NO: 4477804 - DNA, 25 bp, Homo sapien
tgcatctcaccacgttgttggtgaa

SEQ ID NO: 4477805 - DNA, 25 bp, Homo sapien
cagtttgttgcagaaacgtagcgac

SEQ ID NO: 4477806 - DNA, 25 bp, Homo sapien
tgcagtttgttgcagaaacgtagcg

SEQ ID NO: 4477807 - DNA, 25 bp, Homo sapien
caattttgcagtttgttgcagaaac

SEQ ID NO: 4477808 - DNA, 25 bp, Homo sapien
tggacaattttgcagtttgttgcag

SEQ ID NO: 4477809 - DNA, 25 bp, Homo sapien
tttctgggaacgctctgtccagctt

SEQ ID NO: 4477810 - DNA, 25 bp, Homo sapien
cagcttcctgtgcacgctggcccag

SEQ ID NO: 4477811 - DNA, 25 bp, Homo sapien
ccgtggcctttctgggaacgctctg

SEQ ID NO: 4477812 - DNA, 25 bp, Homo sapien
aaacccacaggcgtcagtcccgtgg

SEQ ID NO: 4477813 - DNA, 25 bp, Homo sapien
ttgttttattcagcccagacctggg

SEQ ID NO: 4477814 - DNA, 25 bp, Homo sapien
agacctgggcaatctagctctgtgg

SEQ ID NO: 4477815 - DNA, 25 bp, Homo sapien
gctctgtggtatggccaaagtataa

SEQ ID NO: 4477816 - DNA, 25 bp, Homo sapien
tttcatccacgttcgctccctgagg

SEQ ID NO: 4477817 - DNA, 25 bp, Homo sapien
gagacttgagttcgggagcctgcaa

SEQ ID NO: 4477818 - DNA, 25 bp, Homo sapien
tgtggtcccattcccatgcgacagg

SEQ ID NO: 4477819 - DNA, 25 bp, Homo sapien
tccctgtggttatgcgctccctgag

SEQ ID NO: 4477820 - DNA, 25 bp, Homo sapien
tccctgagggcagaagctacgatgc

SEQ ID NO: 4477821 - DNA, 25 bp, Homo sapien
gtcagcagagttaaatcccagccag

SEQ ID NO: 4477822 - DNA, 25 bp, Homo sapien
cagcagagttaaatcccagccagac

SEQ ID NO: 4477823 - DNA, 25 bp, Homo sapien
cctgtcagcagagttaaatcccagc

SEQ ID NO: 4477824 - DNA, 25 bp, Homo sapien
tgtcagcagagttaaatcccagcca

SEQ ID NO: 4477825 - DNA, 25 bp, Homo sapien
tgaggaaaccctgccccctgaggtg

SEQ ID NO: 4477826 - DNA, 25 bp, Homo sapien
tggtccctgcgcgtcacggctgtct

SEQ ID NO: 4477827 - DNA, 25 bp, Homo sapien
ctgggcagtgccgtgaagctgcact

SEQ ID NO: 4477828 - DNA, 25 bp, Homo sapien
actgatagggccctgacaggtcagc

SEQ ID NO: 4477829 - DNA, 25 bp, Homo sapien
gccagcgtggggtgcgcggagtcag

SEQ ID NO: 4477830 - DNA, 25 bp, Homo sapien
agcagcctcagggggcatcagaagg

SEQ ID NO: 4477831 - DNA, 25 bp, Homo sapien
gatattgtggttaactatgttgcca

SEQ ID NO: 4477832 - DNA, 25 bp, Homo sapien
cagcagtaatccaagctgtagcctt

SEQ ID NO: 4477833 - DNA, 25 bp, Homo sapien
catatttgcaagctttggacacctg

SEQ ID NO: 4477834 - DNA, 25 bp, Homo sapien
tgccagtcaacagcagtaatccaag

SEQ ID NO: 4477835 - DNA, 25 bp, Homo sapien
cagggatttagggttgtaggtggtg

SEQ ID NO: 4477836 - DNA, 25 bp, Homo sapien
ctgtttgggaactaattttggccat

SEQ ID NO: 4477837 - DNA, 25 bp, Homo sapien
tgcaaaagcctgtttgggaactaat

SEQ ID NO: 4477838 - DNA, 25 bp, Homo sapien
gaaacagaaaagatagctcttgcaa

SEQ ID NO: 4477839 - DNA, 25 bp, Homo sapien
atcttggagtgcgtgaagagaagct

SEQ ID NO: 4477840 - DNA, 25 bp, Homo sapien
ggaccccagcttagtttcgattctc

SEQ ID NO: 4477841 - DNA, 25 bp, Homo sapien
ttagatcttggagtgcgtgaagaga

SEQ ID NO: 4477842 - DNA, 25 bp, Homo sapien
ttcgattctcggtttagatcttgga

SEQ ID NO: 4477843 - DNA, 25 bp, Homo sapien
gctggggcctcggagatcgggcggg

SEQ ID NO: 4477844 - DNA, 25 bp, Homo sapien
tggggcctcggagatcgggcgggtg

SEQ ID NO: 4477845 - DNA, 25 bp, Homo sapien
ggcctcggagatcgggcgggtgcag

SEQ ID NO: 4477846 - DNA, 25 bp, Homo sapien
ctgctggggcctcggagatcgggcg

SEQ ID NO: 4477847 - DNA, 25 bp, Homo sapien
tggcggccttcagagggggtctcgg

SEQ ID NO: 4477848 - DNA, 25 bp, Homo sapien
tcattaaagaggtaagcatggaaca

SEQ ID NO: 4477849 - DNA, 25 bp, Homo sapien
tcgaaaggaaaaccgcaactctcca

SEQ ID NO: 4477850 - DNA, 25 bp, Homo sapien
gcatggaacaacaatatgacccaga

SEQ ID NO: 4477851 - DNA, 25 bp, Homo sapien
gtaggatacattctgccttcaagga

SEQ ID NO: 4477852 - DNA, 25 bp, Homo sapien
cctggagtaggacctcatattccat

SEQ ID NO: 4477853 - DNA, 25 bp, Homo sapien
actcctcctccgaagcgggggctcg

SEQ ID NO: 4477854 - DNA, 25 bp, Homo sapien
ctggaactcctcctccgaagcgggg

SEQ ID NO: 4477855 - DNA, 25 bp, Homo sapien
agcagcttcgggcacttggcttccg

SEQ ID NO: 4477856 - DNA, 25 bp, Homo sapien
aaggcagcagcttcgggcacttggc

SEQ ID NO: 4477857 - DNA, 25 bp, Homo sapien
caaggcagcagcttcgggcacttgg

SEQ ID NO: 4477858 - DNA, 25 bp, Homo sapien
gcttcgggcacttggcttccgcctg

SEQ ID NO: 4477859 - DNA, 25 bp, Homo sapien
ctcgaaaaagacgttatccagggcg

SEQ ID NO: 4477860 - DNA, 25 bp, Homo sapien
ggaaccactggtgtgcctcgaagca

SEQ ID NO: 4477861 - DNA, 25 bp, Homo sapien
gaagtcggccgactctttgcagcgg

SEQ ID NO: 4477862 - DNA, 25 bp, Homo sapien
tgctcgcactcaaagcaccagaagt

SEQ ID NO: 4477863 - DNA, 25 bp, Homo sapien
gaaacttactatccacctgcgtggg

SEQ ID NO: 4477864 - DNA, 25 bp, Homo sapien
tacctggtacttggatgcaccaccc

SEQ ID NO: 4477865 - DNA, 25 bp, Homo sapien
gatcctagaatccagccttactgag

SEQ ID NO: 4477866 - DNA, 25 bp, Homo sapien
tgtggtcatcaacacggacactgca

SEQ ID NO: 4477867 - DNA, 25 bp, Homo sapien
catgagtaaaacctacctgcagcct

SEQ ID NO: 4477868 - DNA, 25 bp, Homo sapien
ccatgagtaaaacctacctgcagcc

SEQ ID NO: 4477869 - DNA, 25 bp, Homo sapien
atccatagtgggcagtgttcccctg

SEQ ID NO: 4477870 - DNA, 25 bp, Homo sapien
ctggtgtatccatagtgggcagtgt

SEQ ID NO: 4477871 - DNA, 25 bp, Homo sapien
agtgggcagtgttcccctggatcat

SEQ ID NO: 4477872 - DNA, 25 bp, Homo sapien
ggcatatggctggtgtatccatagt

SEQ ID NO: 4477873 - DNA, 25 bp, Homo sapien
caggggagcatgctacttctgctgt

SEQ ID NO: 4477874 - DNA, 25 bp, Homo sapien
gggagcatgctacttctgctgttct

SEQ ID NO: 4477875 - DNA, 25 bp, Homo sapien
ggggagcatgctacttctgctgttc

SEQ ID NO: 4477876 - DNA, 25 bp, Homo sapien
ggagcatgctacttctgctgttcta

SEQ ID NO: 4477877 - DNA, 25 bp, Homo sapien
gagcctactagccagccagactgat

SEQ ID NO: 4477878 - DNA, 25 bp, Homo sapien
caacttgttctggaaccaccaacag

SEQ ID NO: 4477879 - DNA, 25 bp, Homo sapien
ctgggactacactgagatcaacttg

SEQ ID NO: 4477880 - DNA, 25 bp, Homo sapien
caacagagagcctactagccagcca

SEQ ID NO: 4477881 - DNA, 25 bp, Homo sapien
gcggcttggaacatcctcggcagta

SEQ ID NO: 4477882 - DNA, 25 bp, Homo sapien
tttcccctgggtgatgcaagagctg

SEQ ID NO: 4477883 - DNA, 25 bp, Homo sapien
tgaactcgtcgaagccatcggtgcg

SEQ ID NO: 4477884 - DNA, 25 bp, Homo sapien
tggtccgaggcgtagcacttcatcc

SEQ ID NO: 4477885 - DNA, 25 bp, Homo sapien
ccccaaagactgaataaacacccag

SEQ ID NO: 4477886 - DNA, 25 bp, Homo sapien
cccaaagactgaataaacacccagt

SEQ ID NO: 4477887 - DNA, 25 bp, Homo sapien
caaagactgaataaacacccagttt

SEQ ID NO: 4477888 - DNA, 25 bp, Homo sapien
agactgaataaacacccagttttct

SEQ ID NO: 4477889 - DNA, 25 bp, Homo sapien
tcaacgtcaatagggtccctgggag

SEQ ID NO: 4477890 - DNA, 25 bp, Homo sapien
caggtcaacgtcaatagggtccctg

SEQ ID NO: 4477891 - DNA, 25 bp, Homo sapien
cgtcaatagggtccctgggagtgct

SEQ ID NO: 4477892 - DNA, 25 bp, Homo sapien
ctggctttcttggatacagctgcat

SEQ ID NO: 4477893 - DNA, 25 bp, Homo sapien
ctggaatcacaccagcagaacccgg

SEQ ID NO: 4477894 - DNA, 25 bp, Homo sapien
actgggatcgaaatctgactcctgg

SEQ ID NO: 4477895 - DNA, 25 bp, Homo sapien
cagaacccgggcaactgggatcgaa

SEQ ID NO: 4477896 - DNA, 25 bp, Homo sapien
cttgaaccctgagacagtctgcttt

SEQ ID NO: 4477897 - DNA, 25 bp, Homo sapien
gaccagatgccaagtccaggaagaa

SEQ ID NO: 4477898 - DNA, 25 bp, Homo sapien
taggctaggcgcatgcaaacctgag

SEQ ID NO: 4477899 - DNA, 25 bp, Homo sapien
tcatgccatggcaaaagctaggccc

SEQ ID NO: 4477900 - DNA, 25 bp, Homo sapien
gggtcttagcttcgtcctctgtgaa

SEQ ID NO: 4477901 - DNA, 25 bp, Homo sapien
actatgtgattgtattatgcacaca

SEQ ID NO: 4477902 - DNA, 25 bp, Homo sapien
ggcataagaactgggggctaaagtg

SEQ ID NO: 4477903 - DNA, 25 bp, Homo sapien
aaaagatagttatatgggcataaga

SEQ ID NO: 4477904 - DNA, 25 bp, Homo sapien
ttttatttctgactatgtgattgta

SEQ ID NO: 4477905 - DNA, 25 bp, Homo sapien
tcctagctgatagtgagaggccacg

SEQ ID NO: 4477906 - DNA, 25 bp, Homo sapien
gagggaaaatatctgagctgctgcc

SEQ ID NO: 4477907 - DNA, 25 bp, Homo sapien
cagaaacacggacccaagagctgct

SEQ ID NO: 4477908 - DNA, 25 bp, Homo sapien
gatgagtgctggagctagatgccca

SEQ ID NO: 4477909 - DNA, 25 bp, Homo sapien
gctggtatgtaaaagaccctctttc

SEQ ID NO: 4477910 - DNA, 25 bp, Homo sapien
tgtctggctctgcaaactgctggta

SEQ ID NO: 4477911 - DNA, 25 bp, Homo sapien
ggtcctgctctatcgttctgtgtct

SEQ ID NO: 4477912 - DNA, 25 bp, Homo sapien
ggaacacaccagagggctcagtaga

SEQ ID NO: 4477913 - DNA, 25 bp, Homo sapien
gtcagaaatgactaggcagcagccc

SEQ ID NO: 4477914 - DNA, 25 bp, Homo sapien
ggcctcaccaagtcacaggtccagg

SEQ ID NO: 4477915 - DNA, 25 bp, Homo sapien
cctggggcctcaccaagtcacaggt

SEQ ID NO: 4477916 - DNA, 25 bp, Homo sapien
caggtaccccagacctgtggttggc

SEQ ID NO: 4477917 - DNA, 25 bp, Homo sapien
tctccataggaagggcctttgatgg

SEQ ID NO: 4477918 - DNA, 25 bp, Homo sapien
actggcacggggtgtgccccgggca

SEQ ID NO: 4477919 - DNA, 25 bp, Homo sapien
tttgatggagaaggcgtacactggc

SEQ ID NO: 4477920 - DNA, 25 bp, Homo sapien
taccacagccataggctgggcttca

SEQ ID NO: 4477921 - DNA, 25 bp, Homo sapien
cacagagaaggcgttgagcaaacac

SEQ ID NO: 4477922 - DNA, 25 bp, Homo sapien
cagattacgtctctcttcagacagg

SEQ ID NO: 4477923 - DNA, 25 bp, Homo sapien
atgggaagctccctgaccatgcagc

SEQ ID NO: 4477924 - DNA, 25 bp, Homo sapien
ccaagctggtactatctgctgtcca

SEQ ID NO: 4477925 - DNA, 25 bp, Homo sapien
gggctgtcgttgtattggagacatc

SEQ ID NO: 4477926 - DNA, 25 bp, Homo sapien
tcttctgggctgtcgttgtattgga

SEQ ID NO: 4477927 - DNA, 25 bp, Homo sapien
cctcttctgggctgtcgttgtattg

SEQ ID NO: 4477928 - DNA, 25 bp, Homo sapien
tctgggctgtcgttgtattggagac

SEQ ID NO: 4477929 - DNA, 25 bp, Homo sapien
gagactgccttggaggtgctgggcc

SEQ ID NO: 4477930 - DNA, 25 bp, Homo sapien
cactggccacgtggttgctgttggg

SEQ ID NO: 4477931 - DNA, 25 bp, Homo sapien
ggaagacctcacttcctatgacggg

SEQ ID NO: 4477932 - DNA, 25 bp, Homo sapien
ctcagactccatcttgatgaccttc

SEQ ID NO: 4477933 - DNA, 25 bp, Homo sapien
ttttcggcatctgagtcttccgagc

SEQ ID NO: 4477934 - DNA, 25 bp, Homo sapien
gcatctgagtcttccgagctgctga

SEQ ID NO: 4477935 - DNA, 25 bp, Homo sapien
tcggcatctgagtcttccgagctgc

SEQ ID NO: 4477936 - DNA, 25 bp, Homo sapien
cgagttttcggcatctgagtcttcc

SEQ ID NO: 4477937 - DNA, 25 bp, Homo sapien
aggagtcctgggctgaacttctggg

SEQ ID NO: 4477938 - DNA, 25 bp, Homo sapien
ctgaaatggggggaggcaggagtcc

SEQ ID NO: 4477939 - DNA, 25 bp, Homo sapien
ggcaggagtcctgggctgaacttct

SEQ ID NO: 4477940 - DNA, 25 bp, Homo sapien
tgggctgaacttctgggccactcac

SEQ ID NO: 4477941 - DNA, 25 bp, Homo sapien
ctgctgtggctgtgccccctgggac

SEQ ID NO: 4477942 - DNA, 25 bp, Homo sapien
aattccccaggcgcaaggcaagtct

SEQ ID NO: 4477943 - DNA, 25 bp, Homo sapien
tccccaggcgcaaggcaagtctgag

SEQ ID NO: 4477944 - DNA, 25 bp, Homo sapien
ggaaaattccccaggcgcaaggcaa

SEQ ID NO: 4477945 - DNA, 25 bp, Homo sapien
gaaaattccccaggcgcaaggcaag

SEQ ID NO: 4477946 - DNA, 25 bp, Homo sapien
gggctctggacacatgctatcagca

SEQ ID NO: 4477947 - DNA, 25 bp, Homo sapien
ctagggacagaagggtcactaccca

SEQ ID NO: 4477948 - DNA, 25 bp, Homo sapien
caaggaatggattcttgtccagccc

SEQ ID NO: 4477949 - DNA, 25 bp, Homo sapien
gacaggtgatagtccagcctctagt

SEQ ID NO: 4477950 - DNA, 25 bp, Homo sapien
ctttccaatacagaacctcagactg

SEQ ID NO: 4477951 - DNA, 25 bp, Homo sapien
tccaatacagaacctcagactgagg

SEQ ID NO: 4477952 - DNA, 25 bp, Homo sapien
ccaatacagaacctcagactgaggg

SEQ ID NO: 4477953 - DNA, 25 bp, Homo sapien
ttccaatacagaacctcagactgag

SEQ ID NO: 4477954 - DNA, 25 bp, Homo sapien
ctggcgaggactgtggctcggcggt

SEQ ID NO: 4477955 - DNA, 25 bp, Homo sapien
tggcgaggactgtggctcggcggtc

SEQ ID NO: 4477956 - DNA, 25 bp, Homo sapien
ggcgaggactgtggctcggcggtct

SEQ ID NO: 4477957 - DNA, 25 bp, Homo sapien
gctcggcggtctccatgggctccat

SEQ ID NO: 4477958 - DNA, 25 bp, Homo sapien
ctggcgaggagtgggctggcgagga

SEQ ID NO: 4477959 - DNA, 25 bp, Homo sapien
cccgatgcaattgagggtgcaagcg

SEQ ID NO: 4477960 - DNA, 25 bp, Homo sapien
tctgtacaacaggtagcggatccca

SEQ ID NO: 4477961 - DNA, 25 bp, Homo sapien
cactgggataaatgggaggagcccc

SEQ ID NO: 4477962 - DNA, 25 bp, Homo sapien
tcctggtgatcaggaggctcgctgt

SEQ ID NO: 4477963 - DNA, 25 bp, Homo sapien
cttccagaggcacttggacttgaga

SEQ ID NO: 4477964 - DNA, 25 bp, Homo sapien
gagtccccagggggaacacctgctc

SEQ ID NO: 4477965 - DNA, 25 bp, Homo sapien
tcagaggcctgcttgacgggcgcct

SEQ ID NO: 4477966 - DNA, 25 bp, Homo sapien
aggcttccagaggcacttggacttg

SEQ ID NO: 4477967 - DNA, 25 bp, Homo sapien
ttggctgcaaggttacaagagaagg

SEQ ID NO: 4477968 - DNA, 25 bp, Homo sapien
caaggttacaagagaagggtagcac

SEQ ID NO: 4477969 - DNA, 25 bp, Homo sapien
aggttacaagagaagggtagcactc

SEQ ID NO: 4477970 - DNA, 25 bp, Homo sapien
gctgcaaggttacaagagaagggta

SEQ ID NO: 4477971 - DNA, 25 bp, Homo sapien
atgagtgctactctgtgcagggcct

SEQ ID NO: 4477972 - DNA, 25 bp, Homo sapien
ttaatgagtgctactctgtgcaggg

SEQ ID NO: 4477973 - DNA, 25 bp, Homo sapien
cagggcctgtaagagcatgggctgg

SEQ ID NO: 4477974 - DNA, 25 bp, Homo sapien
cctgtaagagcatgggctggaggag

SEQ ID NO: 4477975 - DNA, 25 bp, Homo sapien
tagatcctggcagaggcctagtgga

SEQ ID NO: 4477976 - DNA, 25 bp, Homo sapien
ccaggtcttgggatagccagtccct

SEQ ID NO: 4477977 - DNA, 25 bp, Homo sapien
gcccagaggtccatgcatagccatt

SEQ ID NO: 4477978 - DNA, 25 bp, Homo sapien
tgtgctattggccagggactcagaa

SEQ ID NO: 4477979 - DNA, 25 bp, Homo sapien
tcaacaagtgtttattgagcagcca

SEQ ID NO: 4477980 - DNA, 25 bp, Homo sapien
tgagctggggagcatggggcccacc

SEQ ID NO: 4477981 - DNA, 25 bp, Homo sapien
gtctgccctcaatgagggtgggcag

SEQ ID NO: 4477982 - DNA, 25 bp, Homo sapien
ccctcaatgagggtgggcaggtggg

SEQ ID NO: 4477983 - DNA, 25 bp, Homo sapien
tctgggatgagctggggagcatggg

SEQ ID NO: 4477984 - DNA, 25 bp, Homo sapien
tgggtgaaaacacctatcttttcca

SEQ ID NO: 4477985 - DNA, 25 bp, Homo sapien
tgctgccaccaaggcaccggagcca

SEQ ID NO: 4477986 - DNA, 25 bp, Homo sapien
cttggccccctcctgttgctgctgc

SEQ ID NO: 4477987 - DNA, 25 bp, Homo sapien
gccaccaaggcaccggagccagtaa

SEQ ID NO: 4477988 - DNA, 25 bp, Homo sapien
ctgccaccaaggcaccggagccagt

SEQ ID NO: 4477989 - DNA, 25 bp, Homo sapien
gtgccacggcccctcccctggatca

SEQ ID NO: 4477990 - DNA, 25 bp, Homo sapien
cagtgccacggcccctcccctggat

SEQ ID NO: 4477991 - DNA, 25 bp, Homo sapien
acggcccctcccctggatcagccat

SEQ ID NO: 4477992 - DNA, 25 bp, Homo sapien
ccacggcccctcccctggatcagcc

SEQ ID NO: 4477993 - DNA, 25 bp, Homo sapien
cttggccttattccgcaaattagga

SEQ ID NO: 4477994 - DNA, 25 bp, Homo sapien
caaattaggataactgggtgtcggg

SEQ ID NO: 4477995 - DNA, 25 bp, Homo sapien
ggagcatagagagggacagtcactg

SEQ ID NO: 4477996 - DNA, 25 bp, Homo sapien
tattccgcaaattaggataactggg

SEQ ID NO: 4477997 - DNA, 25 bp, Homo sapien
ccatcagacatagtggcctggtgca

SEQ ID NO: 4477998 - DNA, 25 bp, Homo sapien
gccacccatggagctggtctcactg

SEQ ID NO: 4477999 - DNA, 25 bp, Homo sapien
gcagggtcatttatggcagccacta

SEQ ID NO: 4478000 - DNA, 25 bp, Homo sapien
gaaagactcaggtttgccagcaggg

SEQ ID NO: 4478001 - DNA, 25 bp, Homo sapien
caaagctcggggcaatgtcctcggc

SEQ ID NO: 4478002 - DNA, 25 bp, Homo sapien
cctgagtgcctccacaaagctcggg

SEQ ID NO: 4478003 - DNA, 25 bp, Homo sapien
aaatgcccctttgtgttcctgagtg

SEQ ID NO: 4478004 - DNA, 25 bp, Homo sapien
ttagaaccagtcttcccgccttcag

SEQ ID NO: 4478005 - DNA, 25 bp, Homo sapien
aaggcgtcttcctagcttgtagctg

SEQ ID NO: 4478006 - DNA, 25 bp, Homo sapien
tgatttcacacgtcttgctccgggt

SEQ ID NO: 4478007 - DNA, 25 bp, Homo sapien
tctagtcagagagtctgcccagcgc

SEQ ID NO: 4478008 - DNA, 25 bp, Homo sapien
tgtaaggagccttctacaaggcgtc

SEQ ID NO: 4478009 - DNA, 25 bp, Homo sapien
caatcttgaggtcaaagaaaaccag

SEQ ID NO: 4478010 - DNA, 25 bp, Homo sapien
gtcagcaaggttctcgtccaggacc

SEQ ID NO: 4478011 - DNA, 25 bp, Homo sapien
cttgggggtcagcaaggttctcgtc

SEQ ID NO: 4478012 - DNA, 25 bp, Homo sapien
tttcattgtcaatcttgaggtcaaa

SEQ ID NO: 4478013 - DNA, 25 bp, Homo sapien
aaggcggacatctttattcaagcca

SEQ ID NO: 4478014 - DNA, 25 bp, Homo sapien
ccaggtgagccggagtgctctgccc

SEQ ID NO: 4478015 - DNA, 25 bp, Homo sapien
cagcaaatgacacgccaggagccca

SEQ ID NO: 4478016 - DNA, 25 bp, Homo sapien
tctgcctgcacttctttttgggact

SEQ ID NO: 4478017 - DNA, 25 bp, Homo sapien
tgcacttgtggaggcatctgcctct

SEQ ID NO: 4478018 - DNA, 25 bp, Homo sapien
tgagagaagaactggtcagaggtgc

SEQ ID NO: 4478019 - DNA, 25 bp, Homo sapien
ggtgcacttgtggaggcatctgcct

SEQ ID NO: 4478020 - DNA, 25 bp, Homo sapien
gaggtgcacttgtggaggcatctgc

SEQ ID NO: 4478021 - DNA, 25 bp, Homo sapien
ttacttggatgacagggctcacggc

SEQ ID NO: 4478022 - DNA, 25 bp, Homo sapien
tactcagaaacgtgtagcacagcca

SEQ ID NO: 4478023 - DNA, 25 bp, Homo sapien
ggctcacggcaatgagctcacgcat

SEQ ID NO: 4478024 - DNA, 25 bp, Homo sapien
ggctagccccaatgttgagtccatg

SEQ ID NO: 4478025 - DNA, 25 bp, Homo sapien
catctagagacctcaccttggggtc

SEQ ID NO: 4478026 - DNA, 25 bp, Homo sapien
gagacctcaccttggggtctgctgg

SEQ ID NO: 4478027 - DNA, 25 bp, Homo sapien
tctagagacctcaccttggggtctg

SEQ ID NO: 4478028 - DNA, 25 bp, Homo sapien
tagagacctcaccttggggtctgct

SEQ ID NO: 4478029 - DNA, 25 bp, Homo sapien
ccacagcttgtagcaggccaagata

SEQ ID NO: 4478030 - DNA, 25 bp, Homo sapien
catgaagctcacgttgtgtagggcc

SEQ ID NO: 4478031 - DNA, 25 bp, Homo sapien
tcgctcatgtttctcgccaggtagg

SEQ ID NO: 4478032 - DNA, 25 bp, Homo sapien
caaagcactgcaggctactgaaggg

SEQ ID NO: 4478033 - DNA, 25 bp, Homo sapien
ctgcaggcttagatagcggctgtac

SEQ ID NO: 4478034 - DNA, 25 bp, Homo sapien
tctgcaggcttagatagcggctgta

SEQ ID NO: 4478035 - DNA, 25 bp, Homo sapien
ccttctgcccgtgccagcgccggac

SEQ ID NO: 4478036 - DNA, 25 bp, Homo sapien
gtctgcaggcttagatagcggctgt

SEQ ID NO: 4478037 - DNA, 25 bp, Homo sapien
gagctgtaaggacacccaaggtagt

SEQ ID NO: 4478038 - DNA, 25 bp, Homo sapien
gatagggacgggactttctctgctg

SEQ ID NO: 4478039 - DNA, 25 bp, Homo sapien
gacactagagcttaggaagggacct

SEQ ID NO: 4478040 - DNA, 25 bp, Homo sapien
tacatgctgagtagtgctgggcact

SEQ ID NO: 4478041 - DNA, 25 bp, Homo sapien
tagttgacacgtaaacacctgagat

SEQ ID NO: 4478042 - DNA, 25 bp, Homo sapien
caaggagggaggttaatgtgccaaa

SEQ ID NO: 4478043 - DNA, 25 bp, Homo sapien
caaagagggccacagactactaagt

SEQ ID NO: 4478044 - DNA, 25 bp, Homo sapien
ccttgaagtcaaaaggagccgcatt

SEQ ID NO: 4478045 - DNA, 25 bp, Homo sapien
tcctgcttcagagcttcccgaatag

SEQ ID NO: 4478046 - DNA, 25 bp, Homo sapien
ttctcctgcttcagagcttcccgaa

SEQ ID NO: 4478047 - DNA, 25 bp, Homo sapien
cctgcttcagagcttcccgaatagc

SEQ ID NO: 4478048 - DNA, 25 bp, Homo sapien
tgggattgcaggcacgggccaccac

SEQ ID NO: 4478049 - DNA, 25 bp, Homo sapien
tgtcctaagtggatctttaaagaat

SEQ ID NO: 4478050 - DNA, 25 bp, Homo sapien
tatttgtcctaagtggatctttaaa

SEQ ID NO: 4478051 - DNA, 25 bp, Homo sapien
taagtggatctttaaagaattccac

SEQ ID NO: 4478052 - DNA, 25 bp, Homo sapien
ctaagtggatctttaaagaattcca

SEQ ID NO: 4478053 - DNA, 25 bp, Homo sapien
ctgtgtcccttccgagtgtggagtt

SEQ ID NO: 4478054 - DNA, 25 bp, Homo sapien
tgtcccttccgagtgtggagttact

SEQ ID NO: 4478055 - DNA, 25 bp, Homo sapien
gtgtcccttccgagtgtggagttac

SEQ ID NO: 4478056 - DNA, 25 bp, Homo sapien
tgtgtcccttccgagtgtggagtta

SEQ ID NO: 4478057 - DNA, 25 bp, Homo sapien
tcctgggcaggattgcccactcctc

SEQ ID NO: 4478058 - DNA, 25 bp, Homo sapien
ccaatccgattggtgtacattgacc

SEQ ID NO: 4478059 - DNA, 25 bp, Homo sapien
cagtccctccaatccgattggtgta

SEQ ID NO: 4478060 - DNA, 25 bp, Homo sapien
cattgaccttgttggagttgtgagc

SEQ ID NO: 4478061 - DNA, 25 bp, Homo sapien
gccacaaacgcgcacatactgaatg

SEQ ID NO: 4478062 - DNA, 25 bp, Homo sapien
tcacaggattctgttgaatgaaaga

SEQ ID NO: 4478063 - DNA, 25 bp, Homo sapien
cagtacccaaaacgtggctaaatct

SEQ ID NO: 4478064 - DNA, 25 bp, Homo sapien
cctggttaactgtgaggggacagca

SEQ ID NO: 4478065 - DNA, 25 bp, Homo sapien
caacacacagcgctctgctcaggga

SEQ ID NO: 4478066 - DNA, 25 bp, Homo sapien
aaaggatgtgggtgttgtgatctca

SEQ ID NO: 4478067 - DNA, 25 bp, Homo sapien
cagtggagtgctgttgttacacaag

SEQ ID NO: 4478068 - DNA, 25 bp, Homo sapien
catggtgcaaatcttccatggctga

SEQ ID NO: 4478069 - DNA, 25 bp, Homo sapien
ccaggatctcagtccctccaagggt

SEQ ID NO: 4478070 - DNA, 25 bp, Homo sapien
ccccaggatctcagtccctccaagg

SEQ ID NO: 4478071 - DNA, 25 bp, Homo sapien
caggatctcagtccctccaagggta

SEQ ID NO: 4478072 - DNA, 25 bp, Homo sapien
aggatctcagtccctccaagggtac

SEQ ID NO: 4478073 - DNA, 25 bp, Homo sapien
ctgccatggagagcacgagggcatc

SEQ ID NO: 4478074 - DNA, 25 bp, Homo sapien
ggcggccaggccatgcagccaggct

SEQ ID NO: 4478075 - DNA, 25 bp, Homo sapien
catcagggcggccaggccatgcagc

SEQ ID NO: 4478076 - DNA, 25 bp, Homo sapien
tgccatggagagcacgagggcatca

SEQ ID NO: 4478077 - DNA, 25 bp, Homo sapien
gctctgagtggtctccatttgctgc

SEQ ID NO: 4478078 - DNA, 25 bp, Homo sapien
ttgacaatggtcacataggagtcca

SEQ ID NO: 4478079 - DNA, 25 bp, Homo sapien
tcttgttgacaatggtcacatagga

SEQ ID NO: 4478080 - DNA, 25 bp, Homo sapien
aggctctgagtggtctccatttgct

SEQ ID NO: 4478081 - DNA, 25 bp, Homo sapien
tgcatgatggtcttgggcgtgagac

SEQ ID NO: 4478082 - DNA, 25 bp, Homo sapien
gtgcatgatggtcttgggcgtgaga

SEQ ID NO: 4478083 - DNA, 25 bp, Homo sapien
catgatggtcttgggcgtgagacca

SEQ ID NO: 4478084 - DNA, 25 bp, Homo sapien
tgatggtcttgggcgtgagaccaac

SEQ ID NO: 4478085 - DNA, 25 bp, Homo sapien
ggccaacacggccacctgtgtcccc

SEQ ID NO: 4478086 - DNA, 25 bp, Homo sapien
tgtgtccccagtgctacaggagccc

SEQ ID NO: 4478087 - DNA, 25 bp, Homo sapien
tgtcatctctgccaggccaacacgg

SEQ ID NO: 4478088 - DNA, 25 bp, Homo sapien
tcccatagggctggttgtcatctct

SEQ ID NO: 4478089 - DNA, 25 bp, Homo sapien
gagccccgggtatggcttttcagat

SEQ ID NO: 4478090 - DNA, 25 bp, Homo sapien
tacactgcttagactcgaagaccca

SEQ ID NO: 4478091 - DNA, 25 bp, Homo sapien
ctggccacgccgccaggtcctgctg

SEQ ID NO: 4478092 - DNA, 25 bp, Homo sapien
cctgctggggctgtacgctggactt

SEQ ID NO: 4478093 - DNA, 25 bp, Homo sapien
tgctgattgtgttcatgaccgctgt

SEQ ID NO: 4478094 - DNA, 25 bp, Homo sapien
cgtgctgattgtgttcatgaccgct

SEQ ID NO: 4478095 - DNA, 25 bp, Homo sapien
ctgattgtgttcatgaccgctgtgc

SEQ ID NO: 4478096 - DNA, 25 bp, Homo sapien
gcgtgctgattgtgttcatgaccgc

SEQ ID NO: 4478097 - DNA, 25 bp, Homo sapien
tcacacgctagcagctatggtggta

SEQ ID NO: 4478098 - DNA, 25 bp, Homo sapien
cacacgctagcagctatggtggtac

SEQ ID NO: 4478099 - DNA, 25 bp, Homo sapien
tgtggtctccttggctgaatagcac

SEQ ID NO: 4478100 - DNA, 25 bp, Homo sapien
ggccagcagggactgtggtctcctt

SEQ ID NO: 4478101 - DNA, 25 bp, Homo sapien
gccagcagggactgtggtctccttg

SEQ ID NO: 4478102 - DNA, 25 bp, Homo sapien
gggactgtggtctccttggctgaat

SEQ ID NO: 4478103 - DNA, 25 bp, Homo sapien
actgtggtgttaaaggtattgagac

SEQ ID NO: 4478104 - DNA, 25 bp, Homo sapien
tgggataaaaaaggttgtgggatga

SEQ ID NO: 4478105 - DNA, 25 bp, Homo sapien
ttttaatgtaaccatgaagtgtgtt

SEQ ID NO: 4478106 - DNA, 25 bp, Homo sapien
gactgtgcaaatgctgggcacgctt

SEQ ID NO: 4478107 - DNA, 25 bp, Homo sapien
ttaacataaacaggagcaggacaga

SEQ ID NO: 4478108 - DNA, 25 bp, Homo sapien
tgcctattttctggccaagctccca

SEQ ID NO: 4478109 - DNA, 25 bp, Homo sapien
gcaggacagactgtaattatctaga

SEQ ID NO: 4478110 - DNA, 25 bp, Homo sapien
cacagcgtcgtactcctgagctgaa

SEQ ID NO: 4478111 - DNA, 25 bp, Homo sapien
tggaattcctccaccaccgcttggt

SEQ ID NO: 4478112 - DNA, 25 bp, Homo sapien
attcctccaccaccgcttggtcaaa

SEQ ID NO: 4478113 - DNA, 25 bp, Homo sapien
cctccaccaccgcttggtcaaagtt

SEQ ID NO: 4478114 - DNA, 25 bp, Homo sapien
gaattcctccaccaccgcttggtca

SEQ ID NO: 4478115 - DNA, 25 bp, Homo sapien
gaactgctgacctaaaaccctctgg

SEQ ID NO: 4478116 - DNA, 25 bp, Homo sapien
tctggagctgtttgcgcctcgcagg

SEQ ID NO: 4478117 - DNA, 25 bp, Homo sapien
gacctcctagctagactgccattgg

SEQ ID NO: 4478118 - DNA, 25 bp, Homo sapien
tcctgaccttaatgggaatacctct

SEQ ID NO: 4478119 - DNA, 25 bp, Homo sapien
gggccacataacatcctgtaacttc

SEQ ID NO: 4478120 - DNA, 25 bp, Homo sapien
tcaacgggccacataacatcctgta

SEQ ID NO: 4478121 - DNA, 25 bp, Homo sapien
catctttcaacgggccacataacat

SEQ ID NO: 4478122 - DNA, 25 bp, Homo sapien
ctttcaacgggccacataacatcct

SEQ ID NO: 4478123 - DNA, 25 bp, Homo sapien
gactcagtgacttgggctgaccccg

SEQ ID NO: 4478124 - DNA, 25 bp, Homo sapien
gggatgcagcctcagttaactctag

SEQ ID NO: 4478125 - DNA, 25 bp, Homo sapien
gaaccctcccttatggactcagtga

SEQ ID NO: 4478126 - DNA, 25 bp, Homo sapien
ggagagcctgatccatacccagtgc

SEQ ID NO: 4478127 - DNA, 25 bp, Homo sapien
tgtggcctcctgcagaccgcaggag

SEQ ID NO: 4478128 - DNA, 25 bp, Homo sapien
gcctcctgcagaccgcaggagggct

SEQ ID NO: 4478129 - DNA, 25 bp, Homo sapien
ggcctcctgcagaccgcaggagggc

SEQ ID NO: 4478130 - DNA, 25 bp, Homo sapien
tggcctcctgcagaccgcaggaggg

SEQ ID NO: 4478131 - DNA, 25 bp, Homo sapien
gcagcgggagctgagtccggtccgg

SEQ ID NO: 4478132 - DNA, 25 bp, Homo sapien
gcgggagctgagtccggtccggcat

SEQ ID NO: 4478133 - DNA, 25 bp, Homo sapien
tcttgggcagttgtccgggtgttgg

SEQ ID NO: 4478134 - DNA, 25 bp, Homo sapien
gggagcggcgtcttgggcagttgtc

SEQ ID NO: 4478135 - DNA, 25 bp, Homo sapien
aggtgtcttcgaaaatggtcgaggg

SEQ ID NO: 4478136 - DNA, 25 bp, Homo sapien
cgacccatggggagggcgcaaggcg

SEQ ID NO: 4478137 - DNA, 25 bp, Homo sapien
gggtgagagcactgtgacccgtccc

SEQ ID NO: 4478138 - DNA, 25 bp, Homo sapien
tgagagcactgtgacccgtccctgc

SEQ ID NO: 4478139 - DNA, 25 bp, Homo sapien
gggtctctcgatggcgagggtttgg

SEQ ID NO: 4478140 - DNA, 25 bp, Homo sapien
tcaggctccgggagacacgcagaat

SEQ ID NO: 4478141 - DNA, 25 bp, Homo sapien
cgcagaatccccacccattctgtag

SEQ ID NO: 4478142 - DNA, 25 bp, Homo sapien
ggcttccgtggagatcaataccccg

SEQ ID NO: 4478143 - DNA, 25 bp, Homo sapien
gactgtcgctccctagctctgatga

SEQ ID NO: 4478144 - DNA, 25 bp, Homo sapien
gatggtggcaaaacgtccgctactc

SEQ ID NO: 4478145 - DNA, 25 bp, Homo sapien
gacatttctttcagcgacgaggagg

SEQ ID NO: 4478146 - DNA, 25 bp, Homo sapien
cgttagccctggagacagctaccgg

SEQ ID NO: 4478147 - DNA, 25 bp, Homo sapien
tgagacaaaccatctttgaggaatt

SEQ ID NO: 4478148 - DNA, 25 bp, Homo sapien
aattgaatgcaagccgcttttacgc

SEQ ID NO: 4478149 - DNA, 25 bp, Homo sapien
cgagcttcgctgctaattgaatgca

SEQ ID NO: 4478150 - DNA, 25 bp, Homo sapien
agcgcccgcgagcttcgctgctaat

SEQ ID NO: 4478151 - DNA, 25 bp, Homo sapien
gcttcgctgctaattgaatgcaagc

SEQ ID NO: 4478152 - DNA, 25 bp, Homo sapien
aagcaagatacacgcatgtgttgtg

SEQ ID NO: 4478153 - DNA, 25 bp, Homo sapien
gatagcccaagcaagatacacgcat

SEQ ID NO: 4478154 - DNA, 25 bp, Homo sapien
tattcgccgactctcagtaaatgtc

SEQ ID NO: 4478155 - DNA, 25 bp, Homo sapien
cttctccagacccggcgtggcagag

SEQ ID NO: 4478156 - DNA, 25 bp, Homo sapien
gaagcaataggaggacctgcactgc

SEQ ID NO: 4478157 - DNA, 25 bp, Homo sapien
tccactgtgaccgaaacccagcaga

SEQ ID NO: 4478158 - DNA, 25 bp, Homo sapien
tgtgtgtgcatacagccctccactg

SEQ ID NO: 4478159 - DNA, 25 bp, Homo sapien
cccagcagagaagcaataggaggac

SEQ ID NO: 4478160 - DNA, 25 bp, Homo sapien
tgttcgcggacagactaagcgtcgt

SEQ ID NO: 4478161 - DNA, 25 bp, Homo sapien
taagcgtcgtcacgttggcaggcag

SEQ ID NO: 4478162 - DNA, 25 bp, Homo sapien
aactctttgtaagcgcagtccgcga

SEQ ID NO: 4478163 - DNA, 25 bp, Homo sapien
gaactggtgagcgtacttgtccacg

SEQ ID NO: 4478164 - DNA, 25 bp, Homo sapien
tctgaagttgccattgcaggcgagg

SEQ ID NO: 4478165 - DNA, 25 bp, Homo sapien
tgcaagtgtgacagcgcgctaagcg

SEQ ID NO: 4478166 - DNA, 25 bp, Homo sapien
agtgtaacacgaacgccagtcctgc

SEQ ID NO: 4478167 - DNA, 25 bp, Homo sapien
ggccgtcggcgatgcagtgtaacac

SEQ ID NO: 4478168 - DNA, 25 bp, Homo sapien
cggtggctctaagactacggtgcca

SEQ ID NO: 4478169 - DNA, 25 bp, Homo sapien
ggtggctctaagactacggtgccac

SEQ ID NO: 4478170 - DNA, 25 bp, Homo sapien
gcgtcagcaaatccccatctccttc

SEQ ID NO: 4478171 - DNA, 25 bp, Homo sapien
ttctccctctccttcctccgcccca

SEQ ID NO: 4478172 - DNA, 25 bp, Homo sapien
ctgcgtcagcaaatccccatctcct

SEQ ID NO: 4478173 - DNA, 25 bp, Homo sapien
caaccccgtcgtcctccccgctcag

SEQ ID NO: 4478174 - DNA, 25 bp, Homo sapien
gtgctggagtcggcgtttgggcttg

SEQ ID NO: 4478175 - DNA, 25 bp, Homo sapien
gcgccggccaagcgggtgctggagt

SEQ ID NO: 4478176 - DNA, 25 bp, Homo sapien
ccggccaagcgggtgctggagtcgg

SEQ ID NO: 4478177 - DNA, 25 bp, Homo sapien
ctggagtcggcgtttgggcttgggt

SEQ ID NO: 4478178 - DNA, 25 bp, Homo sapien
cgtattgacgtagagttggcgccca

SEQ ID NO: 4478179 - DNA, 25 bp, Homo sapien
aacagggagccatttgcgagggcca

SEQ ID NO: 4478180 - DNA, 25 bp, Homo sapien
tgtgcacggcaagtgtagacgcccg

SEQ ID NO: 4478181 - DNA, 25 bp, Homo sapien
ccttggctgtggacttgcgctcaga

SEQ ID NO: 4478182 - DNA, 25 bp, Homo sapien
cccagctcgaagacgtgcggcttga

SEQ ID NO: 4478183 - DNA, 25 bp, Homo sapien
ccgggtccgcgaggatctggtcttc

SEQ ID NO: 4478184 - DNA, 25 bp, Homo sapien
cgcgtggttagaaacgtaccgagag

SEQ ID NO: 4478185 - DNA, 25 bp, Homo sapien
tctgcgctctggttgaacgcgtggt

SEQ ID NO: 4478186 - DNA, 25 bp, Homo sapien
gcgcgcagccagcggagtcagctgc

SEQ ID NO: 4478187 - DNA, 25 bp, Homo sapien
ctggacacagatagagtaggcgcag

SEQ ID NO: 4478188 - DNA, 25 bp, Homo sapien
agagtaggcgcaggggtcgccgccc

SEQ ID NO: 4478189 - DNA, 25 bp, Homo sapien
gatagagtaggcgcaggggtcgccg

SEQ ID NO: 4478190 - DNA, 25 bp, Homo sapien
tgcccgggtgtttagccagcagatg

SEQ ID NO: 4478191 - DNA, 25 bp, Homo sapien
gatgcgcttctccatagggtcaggg

SEQ ID NO: 4478192 - DNA, 25 bp, Homo sapien
tctcggactcgaggtacgaagcacg

SEQ ID NO: 4478193 - DNA, 25 bp, Homo sapien
tagttgccattaatctcctgggcga

SEQ ID NO: 4478194 - DNA, 25 bp, Homo sapien
cctaggtggaggtcgggaatgggcg

SEQ ID NO: 4478195 - DNA, 25 bp, Homo sapien
caccctaggtggaggtcgggaatgg

SEQ ID NO: 4478196 - DNA, 25 bp, Homo sapien
tgctcccaggcaccctaggtggagg

SEQ ID NO: 4478197 - DNA, 25 bp, Homo sapien
ccaggcaccctaggtggaggtcggg

SEQ ID NO: 4478198 - DNA, 25 bp, Homo sapien
catggggtaagataaacactgtgct

SEQ ID NO: 4478199 - DNA, 25 bp, Homo sapien
aatggcagccgtgggtagcagggac

SEQ ID NO: 4478200 - DNA, 25 bp, Homo sapien
tagcagggactggtgaaatcggccc

SEQ ID NO: 4478201 - DNA, 25 bp, Homo sapien
tccctaatagaagtccctggtagtc

SEQ ID NO: 4478202 - DNA, 25 bp, Homo sapien
ttcgcagataatcgcgacgggaatg

SEQ ID NO: 4478203 - DNA, 25 bp, Homo sapien
ggacatagatatcgcccaccgtctg

SEQ ID NO: 4478204 - DNA, 25 bp, Homo sapien
ccgcgaggtttccaaagtcttcgct

SEQ ID NO: 4478205 - DNA, 25 bp, Homo sapien
aaagtcttcgctcgtttcctctggc

SEQ ID NO: 4478206 - DNA, 25 bp, Homo sapien
tacagggcacgcttgtcagggacta

SEQ ID NO: 4478207 - DNA, 25 bp, Homo sapien
tcgcacagtcacgagcaggctttgt

SEQ ID NO: 4478208 - DNA, 25 bp, Homo sapien
caggaaaatctgagcgcggagctga

SEQ ID NO: 4478209 - DNA, 25 bp, Homo sapien
tgttagcaccagacccgaaatgtcg

SEQ ID NO: 4478210 - DNA, 25 bp, Homo sapien
tactccgtcccaggcccgcgcttgt

SEQ ID NO: 4478211 - DNA, 25 bp, Homo sapien
gcttcgcggagagggctgatcccga

SEQ ID NO: 4478212 - DNA, 25 bp, Homo sapien
gctgatcccgaggactgaaactccc

SEQ ID NO: 4478213 - DNA, 25 bp, Homo sapien
ccgcgcttgtgctgcgcttcgcgga

SEQ ID NO: 4478214 - DNA, 25 bp, Homo sapien
catacagacgcgtttagaaaagggc

SEQ ID NO: 4478215 - DNA, 25 bp, Homo sapien
ttgttttattgactgcatacagacg

SEQ ID NO: 4478216 - DNA, 25 bp, Homo sapien
cagacgcgtttagaaaagggcacgg

SEQ ID NO: 4478217 - DNA, 25 bp, Homo sapien
tattgactgcatacagacgcgttta

SEQ ID NO: 4478218 - DNA, 25 bp, Homo sapien
ctaggaacaaacaggtgctctgtca

SEQ ID NO: 4478219 - DNA, 25 bp, Homo sapien
taggaacaaacaggtgctctgtcaa

SEQ ID NO: 4478220 - DNA, 25 bp, Homo sapien
aggaacaaacaggtgctctgtcaaa

SEQ ID NO: 4478221 - DNA, 25 bp, Homo sapien
gaaggacagtgctccattcggcacc

SEQ ID NO: 4478222 - DNA, 25 bp, Homo sapien
tttgtcatcagttatccaggagaag

SEQ ID NO: 4478223 - DNA, 25 bp, Homo sapien
tcatcgggtgcaaccggcattcatg

SEQ ID NO: 4478224 - DNA, 25 bp, Homo sapien
tgcgtgtgcaggttggatgcatctt

SEQ ID NO: 4478225 - DNA, 25 bp, Homo sapien
ctactcttagtcaagcggagcctct

SEQ ID NO: 4478226 - DNA, 25 bp, Homo sapien
caccttcgatgtgcaggcctgtgcc

SEQ ID NO: 4478227 - DNA, 25 bp, Homo sapien
caaaaagcaacagaggaccttagcc

SEQ ID NO: 4478228 - DNA, 25 bp, Homo sapien
tggaaccatccactgagaggaggcg

SEQ ID NO: 4478229 - DNA, 25 bp, Homo sapien
tgaagacgggatggaagaggacccc

SEQ ID NO: 4478230 - DNA, 25 bp, Homo sapien
tccctgcctcggcctgttcctagct

SEQ ID NO: 4478231 - DNA, 25 bp, Homo sapien
tcctcctccgagtggagagttctcc

SEQ ID NO: 4478232 - DNA, 25 bp, Homo sapien
tcctccgagtggagagttctccctg

SEQ ID NO: 4478233 - DNA, 25 bp, Homo sapien
gtgtagtcacattggccgggaagcc

SEQ ID NO: 4478234 - DNA, 25 bp, Homo sapien
gtgcaggtcgctccaggcaaagtca

SEQ ID NO: 4478235 - DNA, 25 bp, Homo sapien
cacggattctaggtcgcggtaggca

SEQ ID NO: 4478236 - DNA, 25 bp, Homo sapien
cacagtcggcgatctggaagccata

SEQ ID NO: 4478237 - DNA, 25 bp, Homo sapien
ctagtcactagtttggagcaggtct

SEQ ID NO: 4478238 - DNA, 25 bp, Homo sapien
cagcaatgagcaccgcagacagtga

SEQ ID NO: 4478239 - DNA, 25 bp, Homo sapien
tcccagttggattaggacgtcgccc

SEQ ID NO: 4478240 - DNA, 25 bp, Homo sapien
tggatccccacatttcagtctcaga

SEQ ID NO: 4478241 - DNA, 25 bp, Homo sapien
tcttgatacatgctgctggtgacat

SEQ ID NO: 4478242 - DNA, 25 bp, Homo sapien
gagtcattcttgatacatgctgctg

SEQ ID NO: 4478243 - DNA, 25 bp, Homo sapien
caggagctgcaagttgatgagggga

SEQ ID NO: 4478244 - DNA, 25 bp, Homo sapien
gcaagttgatgaggggagagtgggc

SEQ ID NO: 4478245 - DNA, 25 bp, Homo sapien
aatgctggtctcctgtctgtgtgcg

SEQ ID NO: 4478246 - DNA, 25 bp, Homo sapien
tgcggcactgcagatgtggcgggca

SEQ ID NO: 4478247 - DNA, 25 bp, Homo sapien
ggttgttgctgtaatgctggtctcc

SEQ ID NO: 4478248 - DNA, 25 bp, Homo sapien
tcggttgttgctgtaatgctggtct

SEQ ID NO: 4478249 - DNA, 25 bp, Homo sapien
agccctgaagccctgtgatgactcc

SEQ ID NO: 4478250 - DNA, 25 bp, Homo sapien
ccggttattaagagccgagctggtg

SEQ ID NO: 4478251 - DNA, 25 bp, Homo sapien
cagcaggatgcagatccggttatta

SEQ ID NO: 4478252 - DNA, 25 bp, Homo sapien
gactccccttagctgtggtcagggc

SEQ ID NO: 4478253 - DNA, 25 bp, Homo sapien
ttcatgtgcccagttgcttggctgc

SEQ ID NO: 4478254 - DNA, 25 bp, Homo sapien
gactctgcggatcccgagaccagcg

SEQ ID NO: 4478255 - DNA, 25 bp, Homo sapien
cttcatgtgcccagttgcttggctg

SEQ ID NO: 4478256 - DNA, 25 bp, Homo sapien
gggccctgtagactctgcggatccc

SEQ ID NO: 4478257 - DNA, 25 bp, Homo sapien
tctataacccgccttgaggaggagg

SEQ ID NO: 4478258 - DNA, 25 bp, Homo sapien
taactgtgatcctgtctgccacgcc

SEQ ID NO: 4478259 - DNA, 25 bp, Homo sapien
gatggcactccgttcctctcttggc

SEQ ID NO: 4478260 - DNA, 25 bp, Homo sapien
gctttctgccatgagtagtaactgt

SEQ ID NO: 4478261 - DNA, 25 bp, Homo sapien
caatgatcgaatgtgaatagacgga

SEQ ID NO: 4478262 - DNA, 25 bp, Homo sapien
gtttcaaggacacatggacagctgt

SEQ ID NO: 4478263 - DNA, 25 bp, Homo sapien
ggactttctggaatggaggtctgac

SEQ ID NO: 4478264 - DNA, 25 bp, Homo sapien
caaaaagggcaatgatcgaatgtga

SEQ ID NO: 4478265 - DNA, 25 bp, Homo sapien
ctgctgacagtctcagggcgtatct

SEQ ID NO: 4478266 - DNA, 25 bp, Homo sapien
ggtccccatcattcacttgcaactg

SEQ ID NO: 4478267 - DNA, 25 bp, Homo sapien
aaaacttcgaactccagatccagcg

SEQ ID NO: 4478268 - DNA, 25 bp, Homo sapien
ctcaatgacatcagtgatagcagag

SEQ ID NO: 4478269 - DNA, 25 bp, Homo sapien
cagctgagcatcatgctgcccgtca

SEQ ID NO: 4478270 - DNA, 25 bp, Homo sapien
ggttgccacagtagcggtacaggtc

SEQ ID NO: 4478271 - DNA, 25 bp, Homo sapien
tcctcgtgatcctgagcctttgggt

SEQ ID NO: 4478272 - DNA, 25 bp, Homo sapien
tggaaggccacactgtaggccaggc

SEQ ID NO: 4478273 - DNA, 25 bp, Homo sapien
tggcttatcacggaggctgggtctt

SEQ ID NO: 4478274 - DNA, 25 bp, Homo sapien
ggtagcctggcttatcacggaggct

SEQ ID NO: 4478275 - DNA, 25 bp, Homo sapien
ctgggtcttgtacccggtgagccca

SEQ ID NO: 4478276 - DNA, 25 bp, Homo sapien
ttgtacccggtgagcccagaacctg

SEQ ID NO: 4478277 - DNA, 25 bp, Homo sapien
cagggtggatgctagatgggcttga

SEQ ID NO: 4478278 - DNA, 25 bp, Homo sapien
tggtcactcggggcctcccacaaaa

SEQ ID NO: 4478279 - DNA, 25 bp, Homo sapien
ctgggttggggttgagcccctcctg

SEQ ID NO: 4478280 - DNA, 25 bp, Homo sapien
ggcttctgtcccctggtcactcggg

SEQ ID NO: 4478281 - DNA, 25 bp, Homo sapien
tccaggactagggaatgctgtgacc

SEQ ID NO: 4478282 - DNA, 25 bp, Homo sapien
gaagtttgctgagctctgaccctgg

SEQ ID NO: 4478283 - DNA, 25 bp, Homo sapien
gattctgattcaaagccagtcgtgg

SEQ ID NO: 4478284 - DNA, 25 bp, Homo sapien
gattgttttagttcccgagtctcca

SEQ ID NO: 4478285 - DNA, 25 bp, Homo sapien
aacgccatgacagtgcctttgttcc

SEQ ID NO: 4478286 - DNA, 25 bp, Homo sapien
tccctgcgtgggtgacagcattctc

SEQ ID NO: 4478287 - DNA, 25 bp, Homo sapien
gacagcattctctgagaacgccatg

SEQ ID NO: 4478288 - DNA, 25 bp, Homo sapien
gccatggtgccggtctgcacccctc

SEQ ID NO: 4478289 - DNA, 25 bp, Homo sapien
cagggtgatcacgatgtatttagcc

SEQ ID NO: 4478290 - DNA, 25 bp, Homo sapien
gctgcctgcagggtgatcacgatgt

SEQ ID NO: 4478291 - DNA, 25 bp, Homo sapien
gcctgcagggtgatcacgatgtatt

SEQ ID NO: 4478292 - DNA, 25 bp, Homo sapien
gatcacgatgtatttagcccctggc

SEQ ID NO: 4478293 - DNA, 25 bp, Homo sapien
gaaccagggagacgcaggagatcca

SEQ ID NO: 4478294 - DNA, 25 bp, Homo sapien
ggttgttgtacagagatggaaccag

SEQ ID NO: 4478295 - DNA, 25 bp, Homo sapien
atccagggaggtgcgagtctgtgtg

SEQ ID NO: 4478296 - DNA, 25 bp, Homo sapien
tgtgcgcttcccaggcatgtccatt

SEQ ID NO: 4478297 - DNA, 25 bp, Homo sapien
gcagccacgcccctgccatcttcct

SEQ ID NO: 4478298 - DNA, 25 bp, Homo sapien
gctaccctccttggcatctgagctt

SEQ ID NO: 4478299 - DNA, 25 bp, Homo sapien
ccagctaccctccttggcatctgag

SEQ ID NO: 4478300 - DNA, 25 bp, Homo sapien
accctccttggcatctgagctttct

SEQ ID NO: 4478301 - DNA, 25 bp, Homo sapien
gctggacagggtcagcaatgaggca

SEQ ID NO: 4478302 - DNA, 25 bp, Homo sapien
tcttggcacacctaggacggtggag

SEQ ID NO: 4478303 - DNA, 25 bp, Homo sapien
gcaattgactcttggcacacctagg

SEQ ID NO: 4478304 - DNA, 25 bp, Homo sapien
gcaatgaggcaattgactcttggca

SEQ ID NO: 4478305 - DNA, 25 bp, Homo sapien
tcctggatctctcagcagcgagatg

SEQ ID NO: 4478306 - DNA, 25 bp, Homo sapien
gagcaggtcctggatctctcagcag

SEQ ID NO: 4478307 - DNA, 25 bp, Homo sapien
caggtcctggatctctcagcagcga

SEQ ID NO: 4478308 - DNA, 25 bp, Homo sapien
ggagcaggtcctggatctctcagca

SEQ ID NO: 4478309 - DNA, 25 bp, Homo sapien
ccttatgggtagtagacagtatgga

SEQ ID NO: 4478310 - DNA, 25 bp, Homo sapien
ctggcctgggcgtcttggagtcctt

SEQ ID NO: 4478311 - DNA, 25 bp, Homo sapien
tctggccttgtttaacaatcttggg

SEQ ID NO: 4478312 - DNA, 25 bp, Homo sapien
tacttggtatcagtgggtgatcagg

SEQ ID NO: 4478313 - DNA, 25 bp, Homo sapien
tccagctgatatgaggggccataga

SEQ ID NO: 4478314 - DNA, 25 bp, Homo sapien
ttgtccctccagctgatatgagggg

SEQ ID NO: 4478315 - DNA, 25 bp, Homo sapien
ccatagaggggcactcctggctctg

SEQ ID NO: 4478316 - DNA, 25 bp, Homo sapien
ctgggagaggagcaatggacctcct

SEQ ID NO: 4478317 - DNA, 25 bp, Homo sapien
caggtgaccgatctcaggttccgtg

SEQ ID NO: 4478318 - DNA, 25 bp, Homo sapien
agacaggtgaccgatctcaggttcc

SEQ ID NO: 4478319 - DNA, 25 bp, Homo sapien
gaccgatctcaggttccgtgctctg

SEQ ID NO: 4478320 - DNA, 25 bp, Homo sapien
tctcaggttccgtgctctgggaggc

SEQ ID NO: 4478321 - DNA, 25 bp, Homo sapien
accacatagggccacggctcggagc

SEQ ID NO: 4478322 - DNA, 25 bp, Homo sapien
atagggccacggctcggagccatcc

SEQ ID NO: 4478323 - DNA, 25 bp, Homo sapien
caggcaggcaggttggtagccccat

SEQ ID NO: 4478324 - DNA, 25 bp, Homo sapien
agggccacggctcggagccatcctt

SEQ ID NO: 4478325 - DNA, 25 bp, Homo sapien
ggctagtccctaggccccactcctc

SEQ ID NO: 4478326 - DNA, 25 bp, Homo sapien
cacagtccccggctagtccctaggc

SEQ ID NO: 4478327 - DNA, 25 bp, Homo sapien
cgctgggaagtcgacaggagaggga

SEQ ID NO: 4478328 - DNA, 25 bp, Homo sapien
ccgcaggagcacaccgctgggaagt

SEQ ID NO: 4478329 - DNA, 25 bp, Homo sapien
agcccctttgccgtggcgtgatttt

SEQ ID NO: 4478330 - DNA, 25 bp, Homo sapien
ggcccctggagctggaaacctggag

SEQ ID NO: 4478331 - DNA, 25 bp, Homo sapien
tcctgctgccttctgagatgcctgc

SEQ ID NO: 4478332 - DNA, 25 bp, Homo sapien
gcccctggagctggaaacctggagc

SEQ ID NO: 4478333 - DNA, 25 bp, Homo sapien
gctgccttctgagatgcctgctgtg

SEQ ID NO: 4478334 - DNA, 25 bp, Homo sapien
cttggatctccacattcaccgtgtc

SEQ ID NO: 4478335 - DNA, 25 bp, Homo sapien
tgtccccccagataggggctctggt

SEQ ID NO: 4478336 - DNA, 25 bp, Homo sapien
gccttggagctctgattgttctttt

SEQ ID NO: 4478337 - DNA, 25 bp, Homo sapien
actgccttggagctctgattgttct

SEQ ID NO: 4478338 - DNA, 25 bp, Homo sapien
taagtgcttttaactgagcccaagg

SEQ ID NO: 4478339 - DNA, 25 bp, Homo sapien
taagtccttggctgtgttcacaccc

SEQ ID NO: 4478340 - DNA, 25 bp, Homo sapien
caaggaggtgttcaggtggctacca

SEQ ID NO: 4478341 - DNA, 25 bp, Homo sapien
caactcatttttcgagcaggatggg

SEQ ID NO: 4478342 - DNA, 25 bp, Homo sapien
cttgatggggattttgtaggacaac

SEQ ID NO: 4478343 - DNA, 25 bp, Homo sapien
tcaccagctcaaagtggtaggggtg

SEQ ID NO: 4478344 - DNA, 25 bp, Homo sapien
taggacaacaactcctgtttctttc

SEQ ID NO: 4478345 - DNA, 25 bp, Homo sapien
gttgtccaccaccttgaggatcaca

SEQ ID NO: 4478346 - DNA, 25 bp, Homo sapien
cttcatcggctttcccagactcagt

SEQ ID NO: 4478347 - DNA, 25 bp, Homo sapien
tcatcggctttcccagactcagtgg

SEQ ID NO: 4478348 - DNA, 25 bp, Homo sapien
catcggctttcccagactcagtggg

SEQ ID NO: 4478349 - DNA, 25 bp, Homo sapien
ttcatcggctttcccagactcagtg

SEQ ID NO: 4478350 - DNA, 25 bp, Homo sapien
tccagagccatgtggttgcagccga

SEQ ID NO: 4478351 - DNA, 25 bp, Homo sapien
gaagctgctcttccgaacgactgtt

SEQ ID NO: 4478352 - DNA, 25 bp, Homo sapien
ccatgtggttgcagccgatgtagcg

SEQ ID NO: 4478353 - DNA, 25 bp, Homo sapien
ctgttgcgtacaactgggtcttggc

SEQ ID NO: 4478354 - DNA, 25 bp, Homo sapien
caccaccccagagggccccagccct

SEQ ID NO: 4478355 - DNA, 25 bp, Homo sapien
accaccccagagggccccagccctg

SEQ ID NO: 4478356 - DNA, 25 bp, Homo sapien
caccccagagggccccagccctggt

SEQ ID NO: 4478357 - DNA, 25 bp, Homo sapien
ccaccccagagggccccagccctgg

SEQ ID NO: 4478358 - DNA, 25 bp, Homo sapien
gcaggcagctgctctgtggccatac

SEQ ID NO: 4478359 - DNA, 25 bp, Homo sapien
ggagcaggcagctgctctgtggcca

SEQ ID NO: 4478360 - DNA, 25 bp, Homo sapien
catcaggagcaggcagctgctctgt

SEQ ID NO: 4478361 - DNA, 25 bp, Homo sapien
atcaggagcaggcagctgctctgtg

SEQ ID NO: 4478362 - DNA, 25 bp, Homo sapien
caggggctcgttgactccccggaga

SEQ ID NO: 4478363 - DNA, 25 bp, Homo sapien
ggctcgttgactccccggagaaaga

SEQ ID NO: 4478364 - DNA, 25 bp, Homo sapien
caatcaccactatggggttggggtt

SEQ ID NO: 4478365 - DNA, 25 bp, Homo sapien
tagttgggaacgacccgggcaatca

SEQ ID NO: 4478366 - DNA, 25 bp, Homo sapien
tgagggcatccgttctggctgacgc

SEQ ID NO: 4478367 - DNA, 25 bp, Homo sapien
tctggctgacgcgaggcacgtcaaa

SEQ ID NO: 4478368 - DNA, 25 bp, Homo sapien
aagttcatcatggacgggataggga

SEQ ID NO: 4478369 - DNA, 25 bp, Homo sapien
cagaggccaggtccctgttagcctg

SEQ ID NO: 4478370 - DNA, 25 bp, Homo sapien
aagaggaaggactgattccacaggg

SEQ ID NO: 4478371 - DNA, 25 bp, Homo sapien
ttgaagttgaggagtagtactccag

SEQ ID NO: 4478372 - DNA, 25 bp, Homo sapien
aggagtagtactccagcaccagggc

SEQ ID NO: 4478373 - DNA, 25 bp, Homo sapien
ccatctcggccttggaagaggaagg

SEQ ID NO: 4478374 - DNA, 25 bp, Homo sapien
gctggttgagggtccacggctggct

SEQ ID NO: 4478375 - DNA, 25 bp, Homo sapien
tcttctggtacaaacggctctttag

SEQ ID NO: 4478376 - DNA, 25 bp, Homo sapien
tctttagcggcaacacagagatgcc

SEQ ID NO: 4478377 - DNA, 25 bp, Homo sapien
gggagccgctccacgtgaagcccgt

SEQ ID NO: 4478378 - DNA, 25 bp, Homo sapien
gcctcatcattgatagttttcaggc

SEQ ID NO: 4478379 - DNA, 25 bp, Homo sapien
ggcctcatcattgatagttttcagg

SEQ ID NO: 4478380 - DNA, 25 bp, Homo sapien
gggcctcatcattgatagttttcag

SEQ ID NO: 4478381 - DNA, 25 bp, Homo sapien
gggggcctcatcattgatagttttc

SEQ ID NO: 4478382 - DNA, 25 bp, Homo sapien
ctcatccctgatgagttcagcatgt

SEQ ID NO: 4478383 - DNA, 25 bp, Homo sapien
gcgggcaccgagtgatgggttcgca

SEQ ID NO: 4478384 - DNA, 25 bp, Homo sapien
tgtcctcatccctgatgagttcagc

SEQ ID NO: 4478385 - DNA, 25 bp, Homo sapien
gatgggttcgcagggctccaccaac

SEQ ID NO: 4478386 - DNA, 25 bp, Homo sapien
ttatggatgcgaagctggtggagca

SEQ ID NO: 4478387 - DNA, 25 bp, Homo sapien
caaatgtggtgctggcgatgtttat

SEQ ID NO: 4478388 - DNA, 25 bp, Homo sapien
tcagaaaattgcagcgagaccaaat

SEQ ID NO: 4478389 - DNA, 25 bp, Homo sapien
cagcgagaccaaatgtggtgctggc

SEQ ID NO: 4478390 - DNA, 25 bp, Homo sapien
ggtgctggcgatgtttatcttcagc

SEQ ID NO: 4478391 - DNA, 25 bp, Homo sapien
gcattcagctcactgctccctgtgt

SEQ ID NO: 4478392 - DNA, 25 bp, Homo sapien
tagctcagacccagcattcagctca

SEQ ID NO: 4478393 - DNA, 25 bp, Homo sapien
cctgtgttgttgcagctgcccacac

SEQ ID NO: 4478394 - DNA, 25 bp, Homo sapien
tgcccacaccacatgtgagtgccat

SEQ ID NO: 4478395 - DNA, 25 bp, Homo sapien
tggccctggccaggatctgctccca

SEQ ID NO: 4478396 - DNA, 25 bp, Homo sapien
gccaggatctgctcccatggctgct

SEQ ID NO: 4478397 - DNA, 25 bp, Homo sapien
ggatctgctcccatggctgctccat

SEQ ID NO: 4478398 - DNA, 25 bp, Homo sapien
cctggccaggatctgctcccatggc

SEQ ID NO: 4478399 - DNA, 25 bp, Homo sapien
taatgaaatcaagggagaggtctcc

SEQ ID NO: 4478400 - DNA, 25 bp, Homo sapien
gcagggacaattgcaaaggagttcc

SEQ ID NO: 4478401 - DNA, 25 bp, Homo sapien
caccagatgggtcaatgcaataacc

SEQ ID NO: 4478402 - DNA, 25 bp, Homo sapien
tatgccctggatttcatagactgcc

SEQ ID NO: 4478403 - DNA, 25 bp, Homo sapien
tcaaagaatcatgcagtcctagggt

SEQ ID NO: 4478404 - DNA, 25 bp, Homo sapien
taaatagagcaatgggcacactgcc

SEQ ID NO: 4478405 - DNA, 25 bp, Homo sapien
tcagagttagaggtgcccaggtgtt

SEQ ID NO: 4478406 - DNA, 25 bp, Homo sapien
tgccaaccagtacagatgcgctcag

SEQ ID NO: 4478407 - DNA, 25 bp, Homo sapien
gtgtcatgggacatctcaggcacca

SEQ ID NO: 4478408 - DNA, 25 bp, Homo sapien
tcaagtccattgtggagctcactgt

SEQ ID NO: 4478409 - DNA, 25 bp, Homo sapien
gcttctcgtggagtggacgtgctca

SEQ ID NO: 4478410 - DNA, 25 bp, Homo sapien
ggactcttggatggttctcagcttc

SEQ ID NO: 4478411 - DNA, 25 bp, Homo sapien
ttccagagcagcgttccccatggga

SEQ ID NO: 4478412 - DNA, 25 bp, Homo sapien
gatggcttggacttccctgtggact

SEQ ID NO: 4478413 - DNA, 25 bp, Homo sapien
ctattcgtctgatgggacatgttcc

SEQ ID NO: 4478414 - DNA, 25 bp, Homo sapien
gggccttttctcaagatcttccaga

SEQ ID NO: 4478415 - DNA, 25 bp, Homo sapien
aaacaaggacgtagtcaagagtcag

SEQ ID NO: 4478416 - DNA, 25 bp, Homo sapien
cagaggtgagaggataaacaaggac

SEQ ID NO: 4478417 - DNA, 25 bp, Homo sapien
aacaaggagggatggcgtgcctgga

SEQ ID NO: 4478418 - DNA, 25 bp, Homo sapien
cctggatactctatgagtctctggg

SEQ ID NO: 4478419 - DNA, 25 bp, Homo sapien
atgttcaatttcctattaagctgaa

SEQ ID NO: 4478420 - DNA, 25 bp, Homo sapien
aatttcctattaagctgaagtcgga

SEQ ID NO: 4478421 - DNA, 25 bp, Homo sapien
cacagagaggcatagacctcctctt

SEQ ID NO: 4478422 - DNA, 25 bp, Homo sapien
tcaatttcctattaagctgaagtcg

SEQ ID NO: 4478423 - DNA, 25 bp, Homo sapien
ggagtggaggccgggtctgactgct

SEQ ID NO: 4478424 - DNA, 25 bp, Homo sapien
gagtggaggccgggtctgactgctc

SEQ ID NO: 4478425 - DNA, 25 bp, Homo sapien
gtggaggccgggtctgactgctctg

SEQ ID NO: 4478426 - DNA, 25 bp, Homo sapien
agtggaggccgggtctgactgctct

SEQ ID NO: 4478427 - DNA, 25 bp, Homo sapien
tattctccgccttgatcgcagggcc

SEQ ID NO: 4478428 - DNA, 25 bp, Homo sapien
tattaagtctcctgcaaagtggaca

SEQ ID NO: 4478429 - DNA, 25 bp, Homo sapien
gccgtaaatatctgctgcatcccag

SEQ ID NO: 4478430 - DNA, 25 bp, Homo sapien
tccccatagtctcaagaggtggaca

SEQ ID NO: 4478431 - DNA, 25 bp, Homo sapien
ggaagacaggcccaccggactggct

SEQ ID NO: 4478432 - DNA, 25 bp, Homo sapien
acaggcccaccggactggctcatag

SEQ ID NO: 4478433 - DNA, 25 bp, Homo sapien
ggcccaccggactggctcatagctt

SEQ ID NO: 4478434 - DNA, 25 bp, Homo sapien
caccggactggctcatagctttgcc

SEQ ID NO: 4478435 - DNA, 25 bp, Homo sapien
aacaaacaggttcagtgcatccggc

SEQ ID NO: 4478436 - DNA, 25 bp, Homo sapien
taacaagagctcaccataggctggg

SEQ ID NO: 4478437 - DNA, 25 bp, Homo sapien
tctgaatttctagagcctgcaccag

SEQ ID NO: 4478438 - DNA, 25 bp, Homo sapien
tgggcactgttctaactaccttaaa

SEQ ID NO: 4478439 - DNA, 25 bp, Homo sapien
ctattagttcttatttgagtgggcc

SEQ ID NO: 4478440 - DNA, 25 bp, Homo sapien
ggagtggcacaagacaatccccata

SEQ ID NO: 4478441 - DNA, 25 bp, Homo sapien
gatagtgggctctgttactaagcag

SEQ ID NO: 4478442 - DNA, 25 bp, Homo sapien
cttcctctgaacaatagggacaagt

SEQ ID NO: 4478443 - DNA, 25 bp, Homo sapien
ctttactgctagcagtcctgttccc

SEQ ID NO: 4478444 - DNA, 25 bp, Homo sapien
cagggactgttgctacaacaagtgc

SEQ ID NO: 4478445 - DNA, 25 bp, Homo sapien
ctagcagtcctgttccccaggatgg

SEQ ID NO: 4478446 - DNA, 25 bp, Homo sapien
aagtgcctgcctggtgaccaagccc

SEQ ID NO: 4478447 - DNA, 25 bp, Homo sapien
agagaagctgtcaatgaggcctggg

SEQ ID NO: 4478448 - DNA, 25 bp, Homo sapien
gagaagctgtcaatgaggcctgggg

SEQ ID NO: 4478449 - DNA, 25 bp, Homo sapien
tgagagcctcattggctgggtggga

SEQ ID NO: 4478450 - DNA, 25 bp, Homo sapien
agggaggactgagagcctcattggc

SEQ ID NO: 4478451 - DNA, 25 bp, Homo sapien
gctgggtgggatatcgaagcggcaa

SEQ ID NO: 4478452 - DNA, 25 bp, Homo sapien
atcgaagcggcaagggcatagccca

SEQ ID NO: 4478453 - DNA, 25 bp, Homo sapien
tgggcggccacccaatctcagggtt

SEQ ID NO: 4478454 - DNA, 25 bp, Homo sapien
ccaggccatctgcatgtggtttgcc

SEQ ID NO: 4478455 - DNA, 25 bp, Homo sapien
gcccaggccatctgcatgtggtttg

SEQ ID NO: 4478456 - DNA, 25 bp, Homo sapien
gatccccaggatccatcgctggcag

SEQ ID NO: 4478457 - DNA, 25 bp, Homo sapien
ctgatggtgatcaagcctggagtga

SEQ ID NO: 4478458 - DNA, 25 bp, Homo sapien
agtggctgatggtgatcaagcctgg

SEQ ID NO: 4478459 - DNA, 25 bp, Homo sapien
gtggctgatggtgatcaagcctgga

SEQ ID NO: 4478460 - DNA, 25 bp, Homo sapien
gatggtgatcaagcctggagtgaat

SEQ ID NO: 4478461 - DNA, 25 bp, Homo sapien
ttgtatagaaactgaggaccagttc

SEQ ID NO: 4478462 - DNA, 25 bp, Homo sapien
ggaggaatggcgattgtctttgttt

SEQ ID NO: 4478463 - DNA, 25 bp, Homo sapien
ggcagtgggcacagaagatatgatg

SEQ ID NO: 4478464 - DNA, 25 bp, Homo sapien
aggaccagttcccacgaaggaggag

SEQ ID NO: 4478465 - DNA, 25 bp, Homo sapien
ccaggaagcagagctcggcccccag

SEQ ID NO: 4478466 - DNA, 25 bp, Homo sapien
gctcggcccccagcaaccacctggg

SEQ ID NO: 4478467 - DNA, 25 bp, Homo sapien
ctccaggaagcagagctcggccccc

SEQ ID NO: 4478468 - DNA, 25 bp, Homo sapien
cccccagcaaccacctgggcctcat

SEQ ID NO: 4478469 - DNA, 25 bp, Homo sapien
gtgagggcagccacactaatgttct

SEQ ID NO: 4478470 - DNA, 25 bp, Homo sapien
cacatcacgtcctgtgataccaact

SEQ ID NO: 4478471 - DNA, 25 bp, Homo sapien
atcacgtcctgtgataccaactcag

SEQ ID NO: 4478472 - DNA, 25 bp, Homo sapien
gggcagccacactaatgttctctcc

SEQ ID NO: 4478473 - DNA, 25 bp, Homo sapien
aggatgctggcctgtctccgcagag

SEQ ID NO: 4478474 - DNA, 25 bp, Homo sapien
ctcagtatgcggttctctccttcca

SEQ ID NO: 4478475 - DNA, 25 bp, Homo sapien
tgggccaggcggctcctcagtatgc

SEQ ID NO: 4478476 - DNA, 25 bp, Homo sapien
catcttctgcatggcccgccggtag

SEQ ID NO: 4478477 - DNA, 25 bp, Homo sapien
aatgctgcaccctgtccctcagttt

SEQ ID NO: 4478478 - DNA, 25 bp, Homo sapien
gcaaatgctgcaccctgtccctcag

SEQ ID NO: 4478479 - DNA, 25 bp, Homo sapien
ctgcaaatgctgcaccctgtccctc

SEQ ID NO: 4478480 - DNA, 25 bp, Homo sapien
cttcatatccagctcactcagcagc

SEQ ID NO: 4478481 - DNA, 25 bp, Homo sapien
ccctggtactgcttcagcagagcgg

SEQ ID NO: 4478482 - DNA, 25 bp, Homo sapien
ctgcagcttgccctggtactgcttc

SEQ ID NO: 4478483 - DNA, 25 bp, Homo sapien
cttgccctggtactgcttcagcaga

SEQ ID NO: 4478484 - DNA, 25 bp, Homo sapien
agcttgccctggtactgcttcagca

SEQ ID NO: 4478485 - DNA, 25 bp, Homo sapien
ctttccctgctgcctgttcagagga

SEQ ID NO: 4478486 - DNA, 25 bp, Homo sapien
ctgttcagaggagggggcttgctcc

SEQ ID NO: 4478487 - DNA, 25 bp, Homo sapien
cagaggagggggcttgctcctgtcc

SEQ ID NO: 4478488 - DNA, 25 bp, Homo sapien
ctgcctgttcagaggagggggcttg

SEQ ID NO: 4478489 - DNA, 25 bp, Homo sapien
aaccggcaggttctctcccatagaa

SEQ ID NO: 4478490 - DNA, 25 bp, Homo sapien
cagcagcaccgagtaaagttcaacc

SEQ ID NO: 4478491 - DNA, 25 bp, Homo sapien
tgctggtggcggttcttatccagct

SEQ ID NO: 4478492 - DNA, 25 bp, Homo sapien
cagcttcgcgttttctgccagcagc

SEQ ID NO: 4478493 - DNA, 25 bp, Homo sapien
tctcttgtagcctctctgtcaagtc

SEQ ID NO: 4478494 - DNA, 25 bp, Homo sapien
tctctgtgcactctgagtggcctgg

SEQ ID NO: 4478495 - DNA, 25 bp, Homo sapien
tgcgggcagggtctctgtgcactct

SEQ ID NO: 4478496 - DNA, 25 bp, Homo sapien
ggcctgggccatgcgtctcttgtag

SEQ ID NO: 4478497 - DNA, 25 bp, Homo sapien
caggatccggctctgagcgtgttcc

SEQ ID NO: 4478498 - DNA, 25 bp, Homo sapien
tctgagcgtgttccagcttggccag

SEQ ID NO: 4478499 - DNA, 25 bp, Homo sapien
ccggctctgagcgtgttccagcttg

SEQ ID NO: 4478500 - DNA, 25 bp, Homo sapien
gatccggctctgagcgtgttccagc

SEQ ID NO: 4478501 - DNA, 25 bp, Homo sapien
tgtgtggtgagcctgatccagcctc

SEQ ID NO: 4478502 - DNA, 25 bp, Homo sapien
gtcatagattgagcctagactctgc

SEQ ID NO: 4478503 - DNA, 25 bp, Homo sapien
cactaagccttgatcctggtcatag

SEQ ID NO: 4478504 - DNA, 25 bp, Homo sapien
accctggttgcacactgaaccccga

SEQ ID NO: 4478505 - DNA, 25 bp, Homo sapien
tctcgtccccagcgtcgagctgagt

SEQ ID NO: 4478506 - DNA, 25 bp, Homo sapien
tcctgcagccgtgtggccagatcct

SEQ ID NO: 4478507 - DNA, 25 bp, Homo sapien
tgatgatggagttcgaggggtgcct

SEQ ID NO: 4478508 - DNA, 25 bp, Homo sapien
tgcttctctcgtccccagcgtcgag

SEQ ID NO: 4478509 - DNA, 25 bp, Homo sapien
tatccagaatccagtgggccatgac

SEQ ID NO: 4478510 - DNA, 25 bp, Homo sapien
tgacctgctcaagggcatattgcct

SEQ ID NO: 4478511 - DNA, 25 bp, Homo sapien
cgagccttcggttggtaatggagca

SEQ ID NO: 4478512 - DNA, 25 bp, Homo sapien
caaagtggagcctacatcgtggcca

SEQ ID NO: 4478513 - DNA, 25 bp, Homo sapien
gctcaggtctgctgagagttagcgg

SEQ ID NO: 4478514 - DNA, 25 bp, Homo sapien
gagcttagagtctgagctgggcagc

SEQ ID NO: 4478515 - DNA, 25 bp, Homo sapien
cacagagctacaacatttaataacg

SEQ ID NO: 4478516 - DNA, 25 bp, Homo sapien
gggctgcttgaggtccatggagtgg

SEQ ID NO: 4478517 - DNA, 25 bp, Homo sapien
cccaggcccagagtgaggtctagga

SEQ ID NO: 4478518 - DNA, 25 bp, Homo sapien
gagtgaggtctaggaggaggaagca

SEQ ID NO: 4478519 - DNA, 25 bp, Homo sapien
caggcccagagtgaggtctaggagg

SEQ ID NO: 4478520 - DNA, 25 bp, Homo sapien
cccagagtgaggtctaggaggagga

SEQ ID NO: 4478521 - DNA, 25 bp, Homo sapien
tatttcccaacagagctggtctctg

SEQ ID NO: 4478522 - DNA, 25 bp, Homo sapien
gatgaaaaggacaagcctccctcgt

SEQ ID NO: 4478523 - DNA, 25 bp, Homo sapien
gaatatcagacatgatagatgtttt

SEQ ID NO: 4478524 - DNA, 25 bp, Homo sapien
tccctcgtatttcccaacagagctg

SEQ ID NO: 4478525 - DNA, 25 bp, Homo sapien
caggcagggtcctaagctgtttaca

SEQ ID NO: 4478526 - DNA, 25 bp, Homo sapien
caaagaaacgattactgtgaggtca

SEQ ID NO: 4478527 - DNA, 25 bp, Homo sapien
aagcacatactatatggcaggcagg

SEQ ID NO: 4478528 - DNA, 25 bp, Homo sapien
gattagagtcttgcagagggagcac

SEQ ID NO: 4478529 - DNA, 25 bp, Homo sapien
ggctggccaaaatacatgttaccgg

SEQ ID NO: 4478530 - DNA, 25 bp, Homo sapien
gctggccaaaatacatgttaccggt

SEQ ID NO: 4478531 - DNA, 25 bp, Homo sapien
ccaaaatacatgttaccggtggagg

SEQ ID NO: 4478532 - DNA, 25 bp, Homo sapien
tggccaaaatacatgttaccggtgg

SEQ ID NO: 4478533 - DNA, 25 bp, Homo sapien
catggcaccaaatttcatgcgtgtc

SEQ ID NO: 4478534 - DNA, 25 bp, Homo sapien
atggcaccaaatttcatgcgtgtcc

SEQ ID NO: 4478535 - DNA, 25 bp, Homo sapien
ggtcccctgatccgagtcatggcac

SEQ ID NO: 4478536 - DNA, 25 bp, Homo sapien
gggaggtcccctgatccgagtcatg

SEQ ID NO: 4478537 - DNA, 25 bp, Homo sapien
gtgagttggacagtccagtttccag

SEQ ID NO: 4478538 - DNA, 25 bp, Homo sapien
ctgtgatgatccaggaagcttctga

SEQ ID NO: 4478539 - DNA, 25 bp, Homo sapien
acctaaagcatctgtgatgatccag

SEQ ID NO: 4478540 - DNA, 25 bp, Homo sapien
ggaagcttctgaggcgattgggcag

SEQ ID NO: 4478541 - DNA, 25 bp, Homo sapien
atagtacagggctcctggtggcagt

SEQ ID NO: 4478542 - DNA, 25 bp, Homo sapien
tacagggctcctggtggcagtgacg

SEQ ID NO: 4478543 - DNA, 25 bp, Homo sapien
agggctcctggtggcagtgacggca

SEQ ID NO: 4478544 - DNA, 25 bp, Homo sapien
tagtacagggctcctggtggcagtg

SEQ ID NO: 4478545 - DNA, 25 bp, Homo sapien
tgtcaaagaacacggtggggttgac

SEQ ID NO: 4478546 - DNA, 25 bp, Homo sapien
gcgatgtcaaagaacacggtggggt

SEQ ID NO: 4478547 - DNA, 25 bp, Homo sapien
cgatgtcaaagaacacggtggggtt

SEQ ID NO: 4478548 - DNA, 25 bp, Homo sapien
caaagaacacggtggggttgaccat

SEQ ID NO: 4478549 - DNA, 25 bp, Homo sapien
tgcaaacagctcaaaggagacgtga

SEQ ID NO: 4478550 - DNA, 25 bp, Homo sapien
gcaaacagctcaaaggagacgtgac

SEQ ID NO: 4478551 - DNA, 25 bp, Homo sapien
ctgggaaccgtttgtattggatcca

SEQ ID NO: 4478552 - DNA, 25 bp, Homo sapien
accgtttgtattggatccagcattt

SEQ ID NO: 4478553 - DNA, 25 bp, Homo sapien
ggaaccgtttgtattggatccagca

SEQ ID NO: 4478554 - DNA, 25 bp, Homo sapien
gaaccgtttgtattggatccagcat

SEQ ID NO: 4478555 - DNA, 25 bp, Homo sapien
ctggacccaaagcgctccgtggcct

SEQ ID NO: 4478556 - DNA, 25 bp, Homo sapien
gacccaaagcgctccgtggcctcca

SEQ ID NO: 4478557 - DNA, 25 bp, Homo sapien
tcctggacccaaagcgctccgtggc

SEQ ID NO: 4478558 - DNA, 25 bp, Homo sapien
ggacccaaagcgctccgtggcctcc

SEQ ID NO: 4478559 - DNA, 25 bp, Homo sapien
tagatacagtttactcacggctggg

SEQ ID NO: 4478560 - DNA, 25 bp, Homo sapien
tatctagtggaggaagggtagcttc

SEQ ID NO: 4478561 - DNA, 25 bp, Homo sapien
gcatacagctcgtcagggagaccat

SEQ ID NO: 4478562 - DNA, 25 bp, Homo sapien
ttaccttaagcattccagtgggtgc

SEQ ID NO: 4478563 - DNA, 25 bp, Homo sapien
agtattcctagttcccaggcctgag

SEQ ID NO: 4478564 - DNA, 25 bp, Homo sapien
agagaggtggttagagaacaagccc

SEQ ID NO: 4478565 - DNA, 25 bp, Homo sapien
tactaaatgcctccctacatccgtt

SEQ ID NO: 4478566 - DNA, 25 bp, Homo sapien
ccctttgaaactctcggagagaggt

SEQ ID NO: 4478567 - DNA, 25 bp, Homo sapien
acagtggcgcgctaaggtgacgtcc

SEQ ID NO: 4478568 - DNA, 25 bp, Homo sapien
gactccgtgcgctttgaggtgttac

SEQ ID NO: 4478569 - DNA, 25 bp, Homo sapien
tggagcactggcttcgctggccctg

SEQ ID NO: 4478570 - DNA, 25 bp, Homo sapien
gggagcgacccggtatgcgtttctc

SEQ ID NO: 4478571 - DNA, 25 bp, Homo sapien
cacagagtgaaaaggtcgcagcgtg

SEQ ID NO: 4478572 - DNA, 25 bp, Homo sapien
tcgcagcgtggtcaagtttggcgct

SEQ ID NO: 4478573 - DNA, 25 bp, Homo sapien
tggcgctagcgacagacccagcatt

SEQ ID NO: 4478574 - DNA, 25 bp, Homo sapien
ccgggccgcgctattccgaaattgg

SEQ ID NO: 4478575 - DNA, 25 bp, Homo sapien
aaaccccaggtctggccaggcatgg

SEQ ID NO: 4478576 - DNA, 25 bp, Homo sapien
tggctcacacccataatcccagcac

SEQ ID NO: 4478577 - DNA, 25 bp, Homo sapien
agaatggcttgaaccggagaggcag

SEQ ID NO: 4478578 - DNA, 25 bp, Homo sapien
tttgggaggccgaggtgggcggatc

SEQ ID NO: 4478579 - DNA, 25 bp, Homo sapien
ctttggagaacctcacgctgcagaa

SEQ ID NO: 4478580 - DNA, 25 bp, Homo sapien
ccaaacacaggttgtctgcagtctt

SEQ ID NO: 4478581 - DNA, 25 bp, Homo sapien
gcagtcttgaccaatggctgccagg

SEQ ID NO: 4478582 - DNA, 25 bp, Homo sapien
caagctggcaagatagctctgacct

SEQ ID NO: 4478583 - DNA, 25 bp, Homo sapien
tgggctgacacatacaacagaagag

SEQ ID NO: 4478584 - DNA, 25 bp, Homo sapien
gccaaggtcttagagtgtgtccaga

SEQ ID NO: 4478585 - DNA, 25 bp, Homo sapien
tgacatcctgagttccatggcaacc

SEQ ID NO: 4478586 - DNA, 25 bp, Homo sapien
tgaccacagacctcagctcaaggga

SEQ ID NO: 4478587 - DNA, 25 bp, Homo sapien
tgtgatgtgaccatggccattggag

SEQ ID NO: 4478588 - DNA, 25 bp, Homo sapien
catcgattagggctccttctgaggg

SEQ ID NO: 4478589 - DNA, 25 bp, Homo sapien
caaactgaatcgctggcctatgctg

SEQ ID NO: 4478590 - DNA, 25 bp, Homo sapien
gatgaggcaataacctccagcccgg

SEQ ID NO: 4478591 - DNA, 25 bp, Homo sapien
gagtgatgaggatttagaggagcag

SEQ ID NO: 4478592 - DNA, 25 bp, Homo sapien
agattagggctcaggttccagttca

SEQ ID NO: 4478593 - DNA, 25 bp, Homo sapien
ctgggtagctaagattagggctcag

SEQ ID NO: 4478594 - DNA, 25 bp, Homo sapien
tagctaagattagggctcaggttcc

SEQ ID NO: 4478595 - DNA, 25 bp, Homo sapien
gtctccatggtccagccacgatggg

SEQ ID NO: 4478596 - DNA, 25 bp, Homo sapien
tccagccacgatgggtgtttttcct

SEQ ID NO: 4478597 - DNA, 25 bp, Homo sapien
ggactctgtctccatggtccagcca

SEQ ID NO: 4478598 - DNA, 25 bp, Homo sapien
ggaactggactctgtctccatggtc

SEQ ID NO: 4478599 - DNA, 25 bp, Homo sapien
ctccttcctgcacgcgggcggctgg

SEQ ID NO: 4478600 - DNA, 25 bp, Homo sapien
gcacgcgggcggctgggtgtccgag

SEQ ID NO: 4478601 - DNA, 25 bp, Homo sapien
gcgggcggctgggtgtccgagcccg

SEQ ID NO: 4478602 - DNA, 25 bp, Homo sapien
gcggctgggtgtccgagcccggcgc

SEQ ID NO: 4478603 - DNA, 25 bp, Homo sapien
cacgggcaggggatacatcccggaa

SEQ ID NO: 4478604 - DNA, 25 bp, Homo sapien
gatacatcccggaagcggtgcaggg

SEQ ID NO: 4478605 - DNA, 25 bp, Homo sapien
cctccccacgggcaggggatacatc

SEQ ID NO: 4478606 - DNA, 25 bp, Homo sapien
gggatacatcccggaagcggtgcag

SEQ ID NO: 4478607 - DNA, 25 bp, Homo sapien
ggaccctggagcttggtctgtcgca

SEQ ID NO: 4478608 - DNA, 25 bp, Homo sapien
ctgcgggcaacacggccgatggcca

SEQ ID NO: 4478609 - DNA, 25 bp, Homo sapien
cttggtctgtcgcagcacacctgtg

SEQ ID NO: 4478610 - DNA, 25 bp, Homo sapien
tgtgtctgcgggcaacacggccgat

SEQ ID NO: 4478611 - DNA, 25 bp, Homo sapien
tggaccttgcgagaagcgaaaggac

SEQ ID NO: 4478612 - DNA, 25 bp, Homo sapien
gctcccatggaccttgcgagaagcg

SEQ ID NO: 4478613 - DNA, 25 bp, Homo sapien
gcgagaagcgaaaggacaaccacag

SEQ ID NO: 4478614 - DNA, 25 bp, Homo sapien
gggccacatgttgtcccagcctggt

SEQ ID NO: 4478615 - DNA, 25 bp, Homo sapien
tcccaagcggaatgcacctgtggtt

SEQ ID NO: 4478616 - DNA, 25 bp, Homo sapien
actacagtgaaagggcaacaagggc

SEQ ID NO: 4478617 - DNA, 25 bp, Homo sapien
tggaagcagcactttactacagtga

SEQ ID NO: 4478618 - DNA, 25 bp, Homo sapien
tgtgtccggagaggtaatttcttgc

SEQ ID NO: 4478619 - DNA, 25 bp, Homo sapien
gctgccctctagtggagcccggctg

SEQ ID NO: 4478620 - DNA, 25 bp, Homo sapien
ttttctctcgagcatctccatcttt

SEQ ID NO: 4478621 - DNA, 25 bp, Homo sapien
cctccacggatggtgagaactaact

SEQ ID NO: 4478622 - DNA, 25 bp, Homo sapien
tggtgagaactaacttaagtctcct

SEQ ID NO: 4478623 - DNA, 25 bp, Homo sapien
catccccttgatccttgttggactc

SEQ ID NO: 4478624 - DNA, 25 bp, Homo sapien
atccccttgatccttgttggactcc

SEQ ID NO: 4478625 - DNA, 25 bp, Homo sapien
gcatccccttgatccttgttggact

SEQ ID NO: 4478626 - DNA, 25 bp, Homo sapien
agcatccccttgatccttgttggac

SEQ ID NO: 4478627 - DNA, 25 bp, Homo sapien
tttccgtccatccagccctgtctgg

SEQ ID NO: 4478628 - DNA, 25 bp, Homo sapien
tccgtccatccagccctgtctggtg

SEQ ID NO: 4478629 - DNA, 25 bp, Homo sapien
gtttccgtccatccagccctgtctg

SEQ ID NO: 4478630 - DNA, 25 bp, Homo sapien
atgtttccgtccatccagccctgtc

SEQ ID NO: 4478631 - DNA, 25 bp, Homo sapien
tccttgttgcccttgagccccccac

SEQ ID NO: 4478632 - DNA, 25 bp, Homo sapien
gctctgccctttgcacctgctgagc

SEQ ID NO: 4478633 - DNA, 25 bp, Homo sapien
tgagccccccacagcacccttctcc

SEQ ID NO: 4478634 - DNA, 25 bp, Homo sapien
ctctgccctttgcacctgctgagcc

SEQ ID NO: 4478635 - DNA, 25 bp, Homo sapien
gctggccgccacctcaggaacgact

SEQ ID NO: 4478636 - DNA, 25 bp, Homo sapien
ggttcttgctgtgtcagcatcggca

SEQ ID NO: 4478637 - DNA, 25 bp, Homo sapien
catgtttctttgttcacggctggcc

SEQ ID NO: 4478638 - DNA, 25 bp, Homo sapien
aggaacgactcctgcagacgtggcc

SEQ ID NO: 4478639 - DNA, 25 bp, Homo sapien
ggagaggccgtcctgtgcctcctca

SEQ ID NO: 4478640 - DNA, 25 bp, Homo sapien
agggagaggccgtcctgtgcctcct

SEQ ID NO: 4478641 - DNA, 25 bp, Homo sapien
gaggccgtcctgtgcctcctcagcc

SEQ ID NO: 4478642 - DNA, 25 bp, Homo sapien
tcagggagaggccgtcctgtgcctc

SEQ ID NO: 4478643 - DNA, 25 bp, Homo sapien
ggcccatgacggttccacattctga

SEQ ID NO: 4478644 - DNA, 25 bp, Homo sapien
cagaacctgagatacggggcttggg

SEQ ID NO: 4478645 - DNA, 25 bp, Homo sapien
actgctggcccatgacggttccaca

SEQ ID NO: 4478646 - DNA, 25 bp, Homo sapien
tgctggcccatgacggttccacatt

SEQ ID NO: 4478647 - DNA, 25 bp, Homo sapien
ctaaatctggctcggaaacactttt

SEQ ID NO: 4478648 - DNA, 25 bp, Homo sapien
caatattggttaactctgggaggaa

SEQ ID NO: 4478649 - DNA, 25 bp, Homo sapien
cttttatctcaatattggttaactc

SEQ ID NO: 4478650 - DNA, 25 bp, Homo sapien
aatctggctcggaaacacttttatc

SEQ ID NO: 4478651 - DNA, 25 bp, Homo sapien
gacaagctaatgtgtcctgcctgct

SEQ ID NO: 4478652 - DNA, 25 bp, Homo sapien
gaccttggcatgtctcccagggtac

SEQ ID NO: 4478653 - DNA, 25 bp, Homo sapien
agaggtgaagaatgctcacttccgg

SEQ ID NO: 4478654 - DNA, 25 bp, Homo sapien
gagaactgatactgcagcctgggac

SEQ ID NO: 4478655 - DNA, 25 bp, Homo sapien
tgcaattcctagaccagggtgcccc

SEQ ID NO: 4478656 - DNA, 25 bp, Homo sapien
tgctctccaggacccagtcatgtct

SEQ ID NO: 4478657 - DNA, 25 bp, Homo sapien
tgtggtgtggctgtctgacccctca

SEQ ID NO: 4478658 - DNA, 25 bp, Homo sapien
cctcagatgtattcccagggtaggg

SEQ ID NO: 4478659 - DNA, 25 bp, Homo sapien
tccacacttgtctttgacccttaga

SEQ ID NO: 4478660 - DNA, 25 bp, Homo sapien
ctccacacttgtctttgacccttag

SEQ ID NO: 4478661 - DNA, 25 bp, Homo sapien
cacacttgtctttgacccttagagc

SEQ ID NO: 4478662 - DNA, 25 bp, Homo sapien
ccacacttgtctttgacccttagag

SEQ ID NO: 4478663 - DNA, 25 bp, Homo sapien
ccacttttcgaagctcccagcacag

SEQ ID NO: 4478664 - DNA, 25 bp, Homo sapien
cacttttcgaagctcccagcacagc

SEQ ID NO: 4478665 - DNA, 25 bp, Homo sapien
gttgtcaccagaaatcggctccagc

SEQ ID NO: 4478666 - DNA, 25 bp, Homo sapien
ccttgcccgcacgtggcagttgtca

SEQ ID NO: 4478667 - DNA, 25 bp, Homo sapien
tgcctcagcaatgccgggaccggcc

SEQ ID NO: 4478668 - DNA, 25 bp, Homo sapien
accagaaatcggctccagcgttggg

SEQ ID NO: 4478669 - DNA, 25 bp, Homo sapien
tgagtttggattttctgagcgtaca

SEQ ID NO: 4478670 - DNA, 25 bp, Homo sapien
atgagtttggattttctgagcgtac

SEQ ID NO: 4478671 - DNA, 25 bp, Homo sapien
taagtacttactgagctgggtggat

SEQ ID NO: 4478672 - DNA, 25 bp, Homo sapien
tgtctgcagtgcgtgaatcgtgtct

SEQ ID NO: 4478673 - DNA, 25 bp, Homo sapien
tcagtgcagctagacatccagtaaa

SEQ ID NO: 4478674 - DNA, 25 bp, Homo sapien
gaaggttggatgttcacctctactc

SEQ ID NO: 4478675 - DNA, 25 bp, Homo sapien
cttcctggcctgctggggtgcctca

SEQ ID NO: 4478676 - DNA, 25 bp, Homo sapien
cctggcctgctggggtgcctcagga

SEQ ID NO: 4478677 - DNA, 25 bp, Homo sapien
ttcctggcctgctggggtgcctcag

SEQ ID NO: 4478678 - DNA, 25 bp, Homo sapien
tggcctgctggggtgcctcaggact

SEQ ID NO: 4478679 - DNA, 25 bp, Homo sapien
gatagaaagcagagatgtaggcatg

SEQ ID NO: 4478680 - DNA, 25 bp, Homo sapien
gagaagttctccattcacagtgggc

SEQ ID NO: 4478681 - DNA, 25 bp, Homo sapien
atgctgctgggagcacgaccctcag

SEQ ID NO: 4478682 - DNA, 25 bp, Homo sapien
cagataaaaatgcacgtagaatgat

SEQ ID NO: 4478683 - DNA, 25 bp, Homo sapien
aatatgtagagatgggtgagttttc

SEQ ID NO: 4478684 - DNA, 25 bp, Homo sapien
atagaatatgcaaatatgtagagat

SEQ ID NO: 4478685 - DNA, 25 bp, Homo sapien
gatccgttctcctgatataactcaa

SEQ ID NO: 4478686 - DNA, 25 bp, Homo sapien
gagttttctaacagatccgttctcc

SEQ ID NO: 4478687 - DNA, 25 bp, Homo sapien
cctatcccattatgctgcagaacat

SEQ ID NO: 4478688 - DNA, 25 bp, Homo sapien
cagaacagagccgtccccacggttt

SEQ ID NO: 4478689 - DNA, 25 bp, Homo sapien
tgcagaacatttgggtcaccctgcc

SEQ ID NO: 4478690 - DNA, 25 bp, Homo sapien
tgcccatgatacagcctgcccagag

SEQ ID NO: 4478691 - DNA, 25 bp, Homo sapien
gatctgatctactgtggtcggaagc

SEQ ID NO: 4478692 - DNA, 25 bp, Homo sapien
ctgtggtcggaagctaaaagatgac

SEQ ID NO: 4478693 - DNA, 25 bp, Homo sapien
ctactgtggtcggaagctaaaagat

SEQ ID NO: 4478694 - DNA, 25 bp, Homo sapien
gatctactgtggtcggaagctaaaa

SEQ ID NO: 4478695 - DNA, 25 bp, Homo sapien
acctggcggtgaagctggctgacca

SEQ ID NO: 4478696 - DNA, 25 bp, Homo sapien
tcttcggttgccagagacagaactg

SEQ ID NO: 4478697 - DNA, 25 bp, Homo sapien
gacagaactgggagaatactcgcta

SEQ ID NO: 4478698 - DNA, 25 bp, Homo sapien
aaactccaggagtctgttccagacc

SEQ ID NO: 4478699 - DNA, 25 bp, Homo sapien
gacgtacttcatatgctcctcaggg

SEQ ID NO: 4478700 - DNA, 25 bp, Homo sapien
cagttttcatcgtgagggccgtcgg

SEQ ID NO: 4478701 - DNA, 25 bp, Homo sapien
cggcaaccgcttggatgtgtctaaa

SEQ ID NO: 4478702 - DNA, 25 bp, Homo sapien
acatttcaaagagcgcggaagccac

SEQ ID NO: 4478703 - DNA, 25 bp, Homo sapien
gttagataagcttcaccactgcatg

SEQ ID NO: 4478704 - DNA, 25 bp, Homo sapien
taccaggaacccaagttagtagctc

SEQ ID NO: 4478705 - DNA, 25 bp, Homo sapien
tctggttcctggtatgcctccacag

SEQ ID NO: 4478706 - DNA, 25 bp, Homo sapien
ccactgcatgtagagggtgtaccag

SEQ ID NO: 4478707 - DNA, 25 bp, Homo sapien
tgtgggaattcagcgtttacattta

SEQ ID NO: 4478708 - DNA, 25 bp, Homo sapien
aatgtgggaattcagcgtttacatt

SEQ ID NO: 4478709 - DNA, 25 bp, Homo sapien
ccaggtcgcacattggaatgtggga

SEQ ID NO: 4478710 - DNA, 25 bp, Homo sapien
ctgccttaatcccaggtcgcacatt

SEQ ID NO: 4478711 - DNA, 25 bp, Homo sapien
taaacacacctagcatccaaacttg

SEQ ID NO: 4478712 - DNA, 25 bp, Homo sapien
aatggcagagagatgatcagcctcc

SEQ ID NO: 4478713 - DNA, 25 bp, Homo sapien
tgtggctgtgacatagaatatatcc

SEQ ID NO: 4478714 - DNA, 25 bp, Homo sapien
gcctccacccaactggaatggttga

SEQ ID NO: 4478715 - DNA, 25 bp, Homo sapien
ccaagattgcaccaatgtacttcag

SEQ ID NO: 4478716 - DNA, 25 bp, Homo sapien
gagccaagattgcaccaatgtactt

SEQ ID NO: 4478717 - DNA, 25 bp, Homo sapien
acctggggtggagatgcagtgagcc

SEQ ID NO: 4478718 - DNA, 25 bp, Homo sapien
ttgaacctggggtggagatgcagtg

SEQ ID NO: 4478719 - DNA, 25 bp, Homo sapien
accgcgagggcccatggcgtcattc

SEQ ID NO: 4478720 - DNA, 25 bp, Homo sapien
attccggacacagtatgattccatt

SEQ ID NO: 4478721 - DNA, 25 bp, Homo sapien
gcgagggcccatggcgtcattcttg

SEQ ID NO: 4478722 - DNA, 25 bp, Homo sapien
cactcaccgcgagggcccatggcgt

SEQ ID NO: 4478723 - DNA, 25 bp, Homo sapien
tcctcagagccctcgcttgctctcg

SEQ ID NO: 4478724 - DNA, 25 bp, Homo sapien
gagccctcgcttgctctcggcacct

SEQ ID NO: 4478725 - DNA, 25 bp, Homo sapien
gtcctcagagccctcgcttgctctc

SEQ ID NO: 4478726 - DNA, 25 bp, Homo sapien
tcagagccctcgcttgctctcggca

SEQ ID NO: 4478727 - DNA, 25 bp, Homo sapien
tctaggctctacttcttggaacgca

SEQ ID NO: 4478728 - DNA, 25 bp, Homo sapien
taattataggccaccactctaggct

SEQ ID NO: 4478729 - DNA, 25 bp, Homo sapien
tatcatggtccgaagaatacaggat

SEQ ID NO: 4478730 - DNA, 25 bp, Homo sapien
gcaaaaactaccgagagtctggaat

SEQ ID NO: 4478731 - DNA, 25 bp, Homo sapien
atttattggtggtcttgctgtggtg

SEQ ID NO: 4478732 - DNA, 25 bp, Homo sapien
attggtggtcttgctgtggtgtcca

SEQ ID NO: 4478733 - DNA, 25 bp, Homo sapien
ttattggtggtcttgctgtggtgtc

SEQ ID NO: 4478734 - DNA, 25 bp, Homo sapien
ttatttattggtggtcttgctgtgg

SEQ ID NO: 4478735 - DNA, 25 bp, Homo sapien
tgagagaccccaacataaacccttg

SEQ ID NO: 4478736 - DNA, 25 bp, Homo sapien
ctggatgcctgtgctaacgcagaga

SEQ ID NO: 4478737 - DNA, 25 bp, Homo sapien
ccctccataagaagactggatgcct

SEQ ID NO: 4478738 - DNA, 25 bp, Homo sapien
tccacgggcagcaccaatgggcaga

SEQ ID NO: 4478739 - DNA, 25 bp, Homo sapien
ttcctgcgtttccttgtcctctgcc

SEQ ID NO: 4478740 - DNA, 25 bp, Homo sapien
tagtttcctgcgtttccttgtcctc

SEQ ID NO: 4478741 - DNA, 25 bp, Homo sapien
gtttcctgcgtttccttgtcctctg

SEQ ID NO: 4478742 - DNA, 25 bp, Homo sapien
ctagtttcctgcgtttccttgtcct

SEQ ID NO: 4478743 - DNA, 25 bp, Homo sapien
acttttctagtgaggcttctcgtgg

SEQ ID NO: 4478744 - DNA, 25 bp, Homo sapien
tacttttctagtgaggcttctcgtg

SEQ ID NO: 4478745 - DNA, 25 bp, Homo sapien
ggcaacatggggaaatcttcatctc

SEQ ID NO: 4478746 - DNA, 25 bp, Homo sapien
acaggtttgctgaatgtgactggga

SEQ ID NO: 4478747 - DNA, 25 bp, Homo sapien
gcatcaaccagtgcatgaatgtagc

SEQ ID NO: 4478748 - DNA, 25 bp, Homo sapien
aagggtgtttttagaccaggcgcag

SEQ ID NO: 4478749 - DNA, 25 bp, Homo sapien
tcgagacaagtctaagaaacatagc

SEQ ID NO: 4478750 - DNA, 25 bp, Homo sapien
tccatcaacctcccctgtacactta

SEQ ID NO: 4478751 - DNA, 25 bp, Homo sapien
ccatcaacctcccctgtacacttac

SEQ ID NO: 4478752 - DNA, 25 bp, Homo sapien
tgtttccaggaccctcctatctctc

SEQ ID NO: 4478753 - DNA, 25 bp, Homo sapien
ctccatcaacctcccctgtacactt

SEQ ID NO: 4478754 - DNA, 25 bp, Homo sapien
gaaggtcatacaatgcctgctcatt

SEQ ID NO: 4478755 - DNA, 25 bp, Homo sapien
gatcctggggattcaactgggaaca

SEQ ID NO: 4478756 - DNA, 25 bp, Homo sapien
ttatatatatttgtagagttgtcct

SEQ ID NO: 4478757 - DNA, 25 bp, Homo sapien
tgtagagttgtcctttttgtgatag

SEQ ID NO: 4478758 - DNA, 25 bp, Homo sapien
cagattgagtcacgaagagatgtat

SEQ ID NO: 4478759 - DNA, 25 bp, Homo sapien
cacgaagagatgtataccatctgtc

SEQ ID NO: 4478760 - DNA, 25 bp, Homo sapien
gcatcgttcagcagattgagtcacg

SEQ ID NO: 4478761 - DNA, 25 bp, Homo sapien
tgttggatactgtgacagttgcatc

SEQ ID NO: 4478762 - DNA, 25 bp, Homo sapien
ttggaagcctgaggtaggaagatcg

SEQ ID NO: 4478763 - DNA, 25 bp, Homo sapien
ggaagcctgaggtaggaagatcgct

SEQ ID NO: 4478764 - DNA, 25 bp, Homo sapien
ctgtcccaactacttggaagcctga

SEQ ID NO: 4478765 - DNA, 25 bp, Homo sapien
tacttggaagcctgaggtaggaaga

SEQ ID NO: 4478766 - DNA, 25 bp, Homo sapien
caggatggatcctagaagcatggaa

SEQ ID NO: 4478767 - DNA, 25 bp, Homo sapien
caagatttaacatcctggcaaggac

SEQ ID NO: 4478768 - DNA, 25 bp, Homo sapien
gaaagcttacatgccggaattgcta

SEQ ID NO: 4478769 - DNA, 25 bp, Homo sapien
gaaaaagtgatgacctatgccaaag

SEQ ID NO: 4478770 - DNA, 25 bp, Homo sapien
tgaatccgggaggcaaaggttatag

SEQ ID NO: 4478771 - DNA, 25 bp, Homo sapien
aatccgggaggcaaaggttatagtg

SEQ ID NO: 4478772 - DNA, 25 bp, Homo sapien
agccaagatcgtgccactgcacttc

SEQ ID NO: 4478773 - DNA, 25 bp, Homo sapien
tcagcctgggcaacagagtaagatc

SEQ ID NO: 4478774 - DNA, 25 bp, Homo sapien
caagctccatggatgtgctacagga

SEQ ID NO: 4478775 - DNA, 25 bp, Homo sapien
ggatcaccacccatctgatgatgag

SEQ ID NO: 4478776 - DNA, 25 bp, Homo sapien
gaattggtggctattgccaagctcc

SEQ ID NO: 4478777 - DNA, 25 bp, Homo sapien
tggatactctaagggcacaatgtgc

SEQ ID NO: 4478778 - DNA, 25 bp, Homo sapien
gcaagatgcagcggaatattagtcg

SEQ ID NO: 4478779 - DNA, 25 bp, Homo sapien
aagatgcagcggaatattagtcggc

SEQ ID NO: 4478780 - DNA, 25 bp, Homo sapien
cagcaagatgcagcggaatattagt

SEQ ID NO: 4478781 - DNA, 25 bp, Homo sapien
caagatgcagcggaatattagtcgg

SEQ ID NO: 4478782 - DNA, 25 bp, Homo sapien
aatttcatcctgtttgcaatttatt

SEQ ID NO: 4478783 - DNA, 25 bp, Homo sapien
tttcatcctgtttgcaatttattct

SEQ ID NO: 4478784 - DNA, 25 bp, Homo sapien
atttcatcctgtttgcaatttattc

SEQ ID NO: 4478785 - DNA, 25 bp, Homo sapien
caatttcatcctgtttgcaatttat

SEQ ID NO: 4478786 - DNA, 25 bp, Homo sapien
tcttgaacaggatccaaggcaatgc

SEQ ID NO: 4478787 - DNA, 25 bp, Homo sapien
atccaaggcaatgcttctccagagc

SEQ ID NO: 4478788 - DNA, 25 bp, Homo sapien
gctttcttgaacaggatccaaggca

SEQ ID NO: 4478789 - DNA, 25 bp, Homo sapien
tttccaggcagctttcttgaacagg

SEQ ID NO: 4478790 - DNA, 25 bp, Homo sapien
aggtttctatctgtcatcacttgag

SEQ ID NO: 4478791 - DNA, 25 bp, Homo sapien
tatctgtcatcacttgagcccttgt

SEQ ID NO: 4478792 - DNA, 25 bp, Homo sapien
gtcatcacttgagcccttgtcatca

SEQ ID NO: 4478793 - DNA, 25 bp, Homo sapien
agacccaggtttctatctgtcatca

SEQ ID NO: 4478794 - DNA, 25 bp, Homo sapien
cagaaaattttccttctcaattggt

SEQ ID NO: 4478795 - DNA, 25 bp, Homo sapien
aataccatggaaagaaacagaaaat

SEQ ID NO: 4478796 - DNA, 25 bp, Homo sapien
aacagaaaattttccttctcaattg

SEQ ID NO: 4478797 - DNA, 25 bp, Homo sapien
acagaaaattttccttctcaattgg

SEQ ID NO: 4478798 - DNA, 25 bp, Homo sapien
tgtccacagatacctacacaggtgt

SEQ ID NO: 4478799 - DNA, 25 bp, Homo sapien
gagttgcagggccaaccgattctca

SEQ ID NO: 4478800 - DNA, 25 bp, Homo sapien
actaagaggagaaggtacacaagcc

SEQ ID NO: 4478801 - DNA, 25 bp, Homo sapien
ggagcaggaggcaattcaagccatc

SEQ ID NO: 4478802 - DNA, 25 bp, Homo sapien
ctgtagtggccccagcgctcagtag

SEQ ID NO: 4478803 - DNA, 25 bp, Homo sapien
gtagtggccccagcgctcagtagtc

SEQ ID NO: 4478804 - DNA, 25 bp, Homo sapien
catccaatttctgtagtggccccag

SEQ ID NO: 4478805 - DNA, 25 bp, Homo sapien
tttgcaaagcatcatccaatttctg

SEQ ID NO: 4478806 - DNA, 25 bp, Homo sapien
agctgcgtctcggactcctccgcag

SEQ ID NO: 4478807 - DNA, 25 bp, Homo sapien
tgcgtctcggactcctccgcagccg

SEQ ID NO: 4478808 - DNA, 25 bp, Homo sapien
cgtctcggactcctccgcagccggg

SEQ ID NO: 4478809 - DNA, 25 bp, Homo sapien
gcagctgcgtctcggactcctccgc

SEQ ID NO: 4478810 - DNA, 25 bp, Homo sapien
cagagtggcatgactctgaacctgg

SEQ ID NO: 4478811 - DNA, 25 bp, Homo sapien
tggcatgactctgaacctgggcaca

SEQ ID NO: 4478812 - DNA, 25 bp, Homo sapien
cccacagagtggcatgactctgaac

SEQ ID NO: 4478813 - DNA, 25 bp, Homo sapien
atgactctgaacctgggcacagccc

SEQ ID NO: 4478814 - DNA, 25 bp, Homo sapien
tgctgctgctgctgaagtggctcca

SEQ ID NO: 4478815 - DNA, 25 bp, Homo sapien
gctgctgctgctgaagtggctccat

SEQ ID NO: 4478816 - DNA, 25 bp, Homo sapien
ctgctgctgctgctgaagtggctcc

SEQ ID NO: 4478817 - DNA, 25 bp, Homo sapien
aagaactgggcttctctcatctgct

SEQ ID NO: 4478818 - DNA, 25 bp, Homo sapien
tttgggcatacaagaactgggcttc

SEQ ID NO: 4478819 - DNA, 25 bp, Homo sapien
gcatacaagaactgggcttctctca

SEQ ID NO: 4478820 - DNA, 25 bp, Homo sapien
gtgaccagcttttgggcatacaaga

SEQ ID NO: 4478821 - DNA, 25 bp, Homo sapien
gtggaactctggctaagggacctaa

SEQ ID NO: 4478822 - DNA, 25 bp, Homo sapien
taagggagtgctgccagaaggtctc

SEQ ID NO: 4478823 - DNA, 25 bp, Homo sapien
ttgccccgttcaaacacttgggcca

SEQ ID NO: 4478824 - DNA, 25 bp, Homo sapien
ccgttcaaacacttgggccactgct

SEQ ID NO: 4478825 - DNA, 25 bp, Homo sapien
attggacatgggtgccactctggga

SEQ ID NO: 4478826 - DNA, 25 bp, Homo sapien
tggcgagctactttctgcacatgaa

SEQ ID NO: 4478827 - DNA, 25 bp, Homo sapien
ccctggtgctggaagtagattggac

SEQ ID NO: 4478828 - DNA, 25 bp, Homo sapien
gaagcatctttggtatggtcttctt

SEQ ID NO: 4478829 - DNA, 25 bp, Homo sapien
tatgagctgactcagcggccggtat

SEQ ID NO: 4478830 - DNA, 25 bp, Homo sapien
tgaactttcccagcgctgtcagggc

SEQ ID NO: 4478831 - DNA, 25 bp, Homo sapien
gggcagccggcaactcacagatgtt

SEQ ID NO: 4478832 - DNA, 25 bp, Homo sapien
ggtatggaactctgccaaccacaca

SEQ ID NO: 4478833 - DNA, 25 bp, Homo sapien
tctggagctccacttgttcctcgca

SEQ ID NO: 4478834 - DNA, 25 bp, Homo sapien
actttctaggaacgaccgcacacac

SEQ ID NO: 4478835 - DNA, 25 bp, Homo sapien
catgcggctgcactttctaggaacg

SEQ ID NO: 4478836 - DNA, 25 bp, Homo sapien
acttgttcctcgcatgcggctgcac

SEQ ID NO: 4478837 - DNA, 25 bp, Homo sapien
cacaaaacaaaatcttgtaaaacat

SEQ ID NO: 4478838 - DNA, 25 bp, Homo sapien
acaaaacaaaatcttgtaaaacatg

SEQ ID NO: 4478839 - DNA, 25 bp, Homo sapien
tcacaaaacaaaatcttgtaaaaca

SEQ ID NO: 4478840 - DNA, 25 bp, Homo sapien
taggtaacaagtctgccaagtattt

SEQ ID NO: 4478841 - DNA, 25 bp, Homo sapien
aaaccaatgctgatttaataattaa

SEQ ID NO: 4478842 - DNA, 25 bp, Homo sapien
ggaagtagggtcttaatccacatcc

SEQ ID NO: 4478843 - DNA, 25 bp, Homo sapien
taaatctgttactaggtaacaagtc

SEQ ID NO: 4478844 - DNA, 25 bp, Homo sapien
aggattggttgagactgggagttcc

SEQ ID NO: 4478845 - DNA, 25 bp, Homo sapien
attggttgagactgggagttccagg

SEQ ID NO: 4478846 - DNA, 25 bp, Homo sapien
acaccactgcattccccccgggaga

SEQ ID NO: 4478847 - DNA, 25 bp, Homo sapien
caccactgcattccccccgggagac

SEQ ID NO: 4478848 - DNA, 25 bp, Homo sapien
taaatcaaatagattatgaatccca

SEQ ID NO: 4478849 - DNA, 25 bp, Homo sapien
cagtaatgtgtctattctctataaa

SEQ ID NO: 4478850 - DNA, 25 bp, Homo sapien
tttaagcaaactcctaggacctgaa

SEQ ID NO: 4478851 - DNA, 25 bp, Homo sapien
tagattatgaatcccaaggtcaagg

SEQ ID NO: 4478852 - DNA, 25 bp, Homo sapien
tcagcctctcctacttgagaactgt

SEQ ID NO: 4478853 - DNA, 25 bp, Homo sapien
gacagggctttccacagaaggacag

SEQ ID NO: 4478854 - DNA, 25 bp, Homo sapien
tgaaaacaagcacgctagtgtgacc

SEQ ID NO: 4478855 - DNA, 25 bp, Homo sapien
cacacatggagaatgccttggcagg

SEQ ID NO: 4478856 - DNA, 25 bp, Homo sapien
aataaacacccaagtgtgagcgctc

SEQ ID NO: 4478857 - DNA, 25 bp, Homo sapien
tccgatagcagcaatctggcacaca

SEQ ID NO: 4478858 - DNA, 25 bp, Homo sapien
gagatgaagacccactttccgatag

SEQ ID NO: 4478859 - DNA, 25 bp, Homo sapien
tggcacacagtgacataagtataac

SEQ ID NO: 4478860 - DNA, 25 bp, Homo sapien
ccatgtcaacgaaataaaagcttgg

SEQ ID NO: 4478861 - DNA, 25 bp, Homo sapien
attgcctggcacaccaattaagcac

SEQ ID NO: 4478862 - DNA, 25 bp, Homo sapien
tacttgggaagtatctgtcatcctc

SEQ ID NO: 4478863 - DNA, 25 bp, Homo sapien
cagtaactcttattcctccaatcag

SEQ ID NO: 4478864 - DNA, 25 bp, Homo sapien
gagggtatgaactctcacagtataa

SEQ ID NO: 4478865 - DNA, 25 bp, Homo sapien
gacacaaaggcccacgttgcttaga

SEQ ID NO: 4478866 - DNA, 25 bp, Homo sapien
cctgcagactgggaagacaccttgc

SEQ ID NO: 4478867 - DNA, 25 bp, Homo sapien
tctgtgccactagggcgagagttca

SEQ ID NO: 4478868 - DNA, 25 bp, Homo sapien
tgataagggtcaaagcgagcaggac

SEQ ID NO: 4478869 - DNA, 25 bp, Homo sapien
ggtggaagaatcatctccatttgtt

SEQ ID NO: 4478870 - DNA, 25 bp, Homo sapien
tgtcgtgggtgtcatttatacttga

SEQ ID NO: 4478871 - DNA, 25 bp, Homo sapien
gggaatcgggtggaagaatcatctc

SEQ ID NO: 4478872 - DNA, 25 bp, Homo sapien
agaagggtaggtgtcgtgggtgtca

SEQ ID NO: 4478873 - DNA, 25 bp, Homo sapien
gcaaaatctcgagagatctctcttc

SEQ ID NO: 4478874 - DNA, 25 bp, Homo sapien
tggcaaaatctcgagagatctctct

SEQ ID NO: 4478875 - DNA, 25 bp, Homo sapien
ttggcaaaatctcgagagatctctc

SEQ ID NO: 4478876 - DNA, 25 bp, Homo sapien
cttggcaaaatctcgagagatctct

SEQ ID NO: 4478877 - DNA, 25 bp, Homo sapien
tggtccttatttcttgggaatcagc

SEQ ID NO: 4478878 - DNA, 25 bp, Homo sapien
gtccttatttcttgggaatcagctg

SEQ ID NO: 4478879 - DNA, 25 bp, Homo sapien
tttcttgggaatcagctgtaacaag

SEQ ID NO: 4478880 - DNA, 25 bp, Homo sapien
tcttgggaatcagctgtaacaagcc

SEQ ID NO: 4478881 - DNA, 25 bp, Homo sapien
caggatcaccgtccagttcatacag

SEQ ID NO: 4478882 - DNA, 25 bp, Homo sapien
caggaactctttcctttcaggatca

SEQ ID NO: 4478883 - DNA, 25 bp, Homo sapien
tgcataaagacgaagaggtcatcca

SEQ ID NO: 4478884 - DNA, 25 bp, Homo sapien
cataaagacgaagaggtcatccagg

SEQ ID NO: 4478885 - DNA, 25 bp, Homo sapien
cagtaggcactctatcagtattccc

SEQ ID NO: 4478886 - DNA, 25 bp, Homo sapien
taggcactctatcagtattccctga

SEQ ID NO: 4478887 - DNA, 25 bp, Homo sapien
gaatgatgagtagatgcacactcac

SEQ ID NO: 4478888 - DNA, 25 bp, Homo sapien
cctgaattggaatgatgagtagatg

SEQ ID NO: 4478889 - DNA, 25 bp, Homo sapien
tgcaggaatgttctaaccaagccag

SEQ ID NO: 4478890 - DNA, 25 bp, Homo sapien
caaagccaggaagttgagtcactca

SEQ ID NO: 4478891 - DNA, 25 bp, Homo sapien
tgttgacacaggcaccaagggatgc

SEQ ID NO: 4478892 - DNA, 25 bp, Homo sapien
cattataaagcagatgccggctggg

SEQ ID NO: 4478893 - DNA, 25 bp, Homo sapien
tcgattgccttttttacgcaaacca

SEQ ID NO: 4478894 - DNA, 25 bp, Homo sapien
caggcaggctacaccaagaaggcaa

SEQ ID NO: 4478895 - DNA, 25 bp, Homo sapien
ggcaggctacaccaagaaggcaata

SEQ ID NO: 4478896 - DNA, 25 bp, Homo sapien
gcaaaccaacagtaacaggcaggct

SEQ ID NO: 4478897 - DNA, 25 bp, Homo sapien
ctaattaaggctgctcagattgctt

SEQ ID NO: 4478898 - DNA, 25 bp, Homo sapien
cgcccagcctcaggattatattgtt

SEQ ID NO: 4478899 - DNA, 25 bp, Homo sapien
aaactaattaaggctgctcagattg

SEQ ID NO: 4478900 - DNA, 25 bp, Homo sapien
gcccagcctcaggattatattgttt

SEQ ID NO: 4478901 - DNA, 25 bp, Homo sapien
ttcacaatcggcttggctgatctca

SEQ ID NO: 4478902 - DNA, 25 bp, Homo sapien
ctgatcttcacaatcggcttggctg

SEQ ID NO: 4478903 - DNA, 25 bp, Homo sapien
atcggcttggctgatctcacttcca

SEQ ID NO: 4478904 - DNA, 25 bp, Homo sapien
tgatcttcacaatcggcttggctga

SEQ ID NO: 4478905 - DNA, 25 bp, Homo sapien
tttccatgccagagggtctcaacgg

SEQ ID NO: 4478906 - DNA, 25 bp, Homo sapien
tgccagagggtctcaacgggacaat

SEQ ID NO: 4478907 - DNA, 25 bp, Homo sapien
tcagctaagagtttttcttgcagag

SEQ ID NO: 4478908 - DNA, 25 bp, Homo sapien
tcttgcagaggatattttacatctt

SEQ ID NO: 4478909 - DNA, 25 bp, Homo sapien
tcatattagctatggaggccaagtc

SEQ ID NO: 4478910 - DNA, 25 bp, Homo sapien
gactcctgtgatatctactgcttac

SEQ ID NO: 4478911 - DNA, 25 bp, Homo sapien
aactagcaagatctgcctcctgtgt

SEQ ID NO: 4478912 - DNA, 25 bp, Homo sapien
gttgtccaggctaactcaggctatt

SEQ ID NO: 4478913 - DNA, 25 bp, Homo sapien
ctgcagctgcggtcattcggggcgg

SEQ ID NO: 4478914 - DNA, 25 bp, Homo sapien
cagctgcggtcattcggggcggcct

SEQ ID NO: 4478915 - DNA, 25 bp, Homo sapien
gctgcggtcattcggggcggcctgc

SEQ ID NO: 4478916 - DNA, 25 bp, Homo sapien
cattcggggcggcctgctgtgtgct

SEQ ID NO: 4478917 - DNA, 25 bp, Homo sapien
caggcttctttatgcgcaggttgct

SEQ ID NO: 4478918 - DNA, 25 bp, Homo sapien
tcaggagaacgaagggatgttagcc

SEQ ID NO: 4478919 - DNA, 25 bp, Homo sapien
gaaaggcccatctgttgcagtcaat

SEQ ID NO: 4478920 - DNA, 25 bp, Homo sapien
cacaaagcagcagttatggcccgtc

SEQ ID NO: 4478921 - DNA, 25 bp, Homo sapien
catgcctctttccaatcaatatcca

SEQ ID NO: 4478922 - DNA, 25 bp, Homo sapien
cagctgcgtaaagcagtagttcaca

SEQ ID NO: 4478923 - DNA, 25 bp, Homo sapien
cacagaacatttacagcacccctag

SEQ ID NO: 4478924 - DNA, 25 bp, Homo sapien
atatcaggtctgagagtcatcccag

SEQ ID NO: 4478925 - DNA, 25 bp, Homo sapien
agggccttatctgcaccccaagaag

SEQ ID NO: 4478926 - DNA, 25 bp, Homo sapien
aagaggccccttatcagatttcagc

SEQ ID NO: 4478927 - DNA, 25 bp, Homo sapien
tccagttccctcctcaataaaggag

SEQ ID NO: 4478928 - DNA, 25 bp, Homo sapien
ggagactgacagttgcaacaaagag

SEQ ID NO: 4478929 - DNA, 25 bp, Homo sapien
gctgtattctatcttcctctaagga

SEQ ID NO: 4478930 - DNA, 25 bp, Homo sapien
tgggctgtattctatcttcctctaa

SEQ ID NO: 4478931 - DNA, 25 bp, Homo sapien
gctctctgggctgtattctatcttc

SEQ ID NO: 4478932 - DNA, 25 bp, Homo sapien
tattctatcttcctctaaggaagct

SEQ ID NO: 4478933 - DNA, 25 bp, Homo sapien
ctggtagccatttctcttgtccaaa

SEQ ID NO: 4478934 - DNA, 25 bp, Homo sapien
ggtagccatttctcttgtccaaagt

SEQ ID NO: 4478935 - DNA, 25 bp, Homo sapien
tagccatttctcttgtccaaagtag

SEQ ID NO: 4478936 - DNA, 25 bp, Homo sapien
gccatttctcttgtccaaagtagat

SEQ ID NO: 4478937 - DNA, 25 bp, Homo sapien
tggttgtccaacgagagaaagagac

SEQ ID NO: 4478938 - DNA, 25 bp, Homo sapien
gttgtccaacgagagaaagagacag

SEQ ID NO: 4478939 - DNA, 25 bp, Homo sapien
gtggttgtccaacgagagaaagaga

SEQ ID NO: 4478940 - DNA, 25 bp, Homo sapien
ctgtggttgtccaacgagagaaaga

SEQ ID NO: 4478941 - DNA, 25 bp, Homo sapien
gatggggattcggttgatgggggtc

SEQ ID NO: 4478942 - DNA, 25 bp, Homo sapien
ttaggcctttggtgatctccctcca

SEQ ID NO: 4478943 - DNA, 25 bp, Homo sapien
taggcctttggtgatctccctccag

SEQ ID NO: 4478944 - DNA, 25 bp, Homo sapien
gtttaggcctttggtgatctccctc

SEQ ID NO: 4478945 - DNA, 25 bp, Homo sapien
gatcttcttgttgatgatctccacc

SEQ ID NO: 4478946 - DNA, 25 bp, Homo sapien
gatgggaaagcggatcttgggtggg

SEQ ID NO: 4478947 - DNA, 25 bp, Homo sapien
ggttgccatcaattgctgcctggag

SEQ ID NO: 4478948 - DNA, 25 bp, Homo sapien
tggagccaagcccaaggatgggaaa

SEQ ID NO: 4478949 - DNA, 25 bp, Homo sapien
agtagccgcagcaggtgagtagcca

SEQ ID NO: 4478950 - DNA, 25 bp, Homo sapien
gaccaatccacaattgaccctcttg

SEQ ID NO: 4478951 - DNA, 25 bp, Homo sapien
aactggagctggaccaatccacaat

SEQ ID NO: 4478952 - DNA, 25 bp, Homo sapien
aacacagggaactggcatcccttcc

SEQ ID NO: 4478953 - DNA, 25 bp, Homo sapien
ctcttgccccaaaaccccagtcttg

SEQ ID NO: 4478954 - DNA, 25 bp, Homo sapien
aaaaagttgcgctggaaggcctgct

SEQ ID NO: 4478955 - DNA, 25 bp, Homo sapien
gggagctgccgtgccatgctgaaaa

SEQ ID NO: 4478956 - DNA, 25 bp, Homo sapien
tgctggcttgccaaggtcacgggca

SEQ ID NO: 4478957 - DNA, 25 bp, Homo sapien
ggcacagccagacgatttggcacag

SEQ ID NO: 4478958 - DNA, 25 bp, Homo sapien
gctttgagatagcatcaggaccaga

SEQ ID NO: 4478959 - DNA, 25 bp, Homo sapien
tttgtggaagcctgcaagtgctggc

SEQ ID NO: 4478960 - DNA, 25 bp, Homo sapien
atcacagtaggcaaggaggccggct

SEQ ID NO: 4478961 - DNA, 25 bp, Homo sapien
ccaggcccaggaaatcagagatcaa

SEQ ID NO: 4478962 - DNA, 25 bp, Homo sapien
gctcccaatgctactcgtggtcagg

SEQ ID NO: 4478963 - DNA, 25 bp, Homo sapien
aggttcagtgctgcagccgaggcct

SEQ ID NO: 4478964 - DNA, 25 bp, Homo sapien
ggtgccatcgatgtccacagacatg

SEQ ID NO: 4478965 - DNA, 25 bp, Homo sapien
taggtggtgccatcgatgtccacag

SEQ ID NO: 4478966 - DNA, 25 bp, Homo sapien
ccccgggatgaggtaggacttggtg

SEQ ID NO: 4478967 - DNA, 25 bp, Homo sapien
gtgccccgggatgaggtaggacttg

SEQ ID NO: 4478968 - DNA, 25 bp, Homo sapien
tgccccgggatgaggtaggacttgg

SEQ ID NO: 4478969 - DNA, 25 bp, Homo sapien
ggtggaccacaggcttctgggcaaa

SEQ ID NO: 4478970 - DNA, 25 bp, Homo sapien
cctgcgtcggctgacagattgtcga

SEQ ID NO: 4478971 - DNA, 25 bp, Homo sapien
tgaacctgacatcggcacgtgtggg

SEQ ID NO: 4478972 - DNA, 25 bp, Homo sapien
gattgtcgatacactgtgccctgag

SEQ ID NO: 4478973 - DNA, 25 bp, Homo sapien
gatggccccataagaaatagaagag

SEQ ID NO: 4478974 - DNA, 25 bp, Homo sapien
catactggccaaatgtctgagacac

SEQ ID NO: 4478975 - DNA, 25 bp, Homo sapien
cacagtggtggtgttctgctgaaca

SEQ ID NO: 4478976 - DNA, 25 bp, Homo sapien
caatgaccggaaagacacagtgtgc

SEQ ID NO: 4478977 - DNA, 25 bp, Homo sapien
caaacccctgagaaagacatactgg

SEQ ID NO: 4478978 - DNA, 25 bp, Homo sapien
gaggacatctgaggtatttactcac

SEQ ID NO: 4478979 - DNA, 25 bp, Homo sapien
ttactcactgcctaggctacccatg

SEQ ID NO: 4478980 - DNA, 25 bp, Homo sapien
aacatatagacacttgctgcaggag

SEQ ID NO: 4478981 - DNA, 25 bp, Homo sapien
cattcgagaacatgtaagatagaaa

SEQ ID NO: 4478982 - DNA, 25 bp, Homo sapien
gactggcttcggttacttcgcacaa

SEQ ID NO: 4478983 - DNA, 25 bp, Homo sapien
tgagattttagttcagccgccggcg

SEQ ID NO: 4478984 - DNA, 25 bp, Homo sapien
gaattcgtacccagctgcgttcgtg

SEQ ID NO: 4478985 - DNA, 25 bp, Homo sapien
tactgagccgtactggaccagtggg

SEQ ID NO: 4478986 - DNA, 25 bp, Homo sapien
ctgcgccacacacaaggcctatttt

SEQ ID NO: 4478987 - DNA, 25 bp, Homo sapien
actgcgccacacacaaggcctattt

SEQ ID NO: 4478988 - DNA, 25 bp, Homo sapien
ccactgcgccacacacaaggcctat

SEQ ID NO: 4478989 - DNA, 25 bp, Homo sapien
tgcgccacacacaaggcctatttta

SEQ ID NO: 4478990 - DNA, 25 bp, Homo sapien
gggacagtgcttatgttctccgtcc

SEQ ID NO: 4478991 - DNA, 25 bp, Homo sapien
gctgcatacgggctttagtcccaaa

SEQ ID NO: 4478992 - DNA, 25 bp, Homo sapien
tcataaaaccacgtatatgtgccca

SEQ ID NO: 4478993 - DNA, 25 bp, Homo sapien
ggtccagttaggctgagtcagtacc

SEQ ID NO: 4478994 - DNA, 25 bp, Homo sapien
gaaacaagtgcgttggggagcgagg

SEQ ID NO: 4478995 - DNA, 25 bp, Homo sapien
ttgaagtgatgaaacaagtgcgttg

SEQ ID NO: 4478996 - DNA, 25 bp, Homo sapien
tgtgcaggcaaactgtgcagggacc

SEQ ID NO: 4478997 - DNA, 25 bp, Homo sapien
gggagcgaggctttgcgggcccagc

SEQ ID NO: 4478998 - DNA, 25 bp, Homo sapien
taacaaagtgctgaagacggtagct

SEQ ID NO: 4478999 - DNA, 25 bp, Homo sapien
gagggtctgttctaggccttgtccc

SEQ ID NO: 4479000 - DNA, 25 bp, Homo sapien
ccttggatgaaagcccagcctattg

SEQ ID NO: 4479001 - DNA, 25 bp, Homo sapien
gcttttcccatcatgtaaccgcagg

SEQ ID NO: 4479002 - DNA, 25 bp, Homo sapien
cctctctgggtgtctacctcagtct

SEQ ID NO: 4479003 - DNA, 25 bp, Homo sapien
caaagccatattgcatcaacgtccg

SEQ ID NO: 4479004 - DNA, 25 bp, Homo sapien
tgcatcaacgtccggctggccaggg

SEQ ID NO: 4479005 - DNA, 25 bp, Homo sapien
ccagggggttcacgggctcagcacc

SEQ ID NO: 4479006 - DNA, 25 bp, Homo sapien
gcctaaaatgcagaccctgggtcct

SEQ ID NO: 4479007 - DNA, 25 bp, Homo sapien
ctctgggcctatccagcaaggatgg

SEQ ID NO: 4479008 - DNA, 25 bp, Homo sapien
ggatggcctaaaatgcagaccctgg

SEQ ID NO: 4479009 - DNA, 25 bp, Homo sapien
tggcctaaaatgcagaccctgggtc

SEQ ID NO: 4479010 - DNA, 25 bp, Homo sapien
tatctcaaatgggtacacaactgtg

SEQ ID NO: 4479011 - DNA, 25 bp, Homo sapien
aatagcccctgatccacttgagaag

SEQ ID NO: 4479012 - DNA, 25 bp, Homo sapien
tacagacaccaacgaggtgcctggg

SEQ ID NO: 4479013 - DNA, 25 bp, Homo sapien
ggtgagccggatgcacttaacctgc

SEQ ID NO: 4479014 - DNA, 25 bp, Homo sapien
ggcttcatgaggagatggctgaata

SEQ ID NO: 4479015 - DNA, 25 bp, Homo sapien
atattggaaggcacgctggcaccgg

SEQ ID NO: 4479016 - DNA, 25 bp, Homo sapien
tcttccagtacactccaggtcctgg

SEQ ID NO: 4479017 - DNA, 25 bp, Homo sapien
gctgaatattggaaggcacgctggc

SEQ ID NO: 4479018 - DNA, 25 bp, Homo sapien
tgcagggagccatgaaagaggcatc

SEQ ID NO: 4479019 - DNA, 25 bp, Homo sapien
gcttcaagaagtcctgtctcgccta

SEQ ID NO: 4479020 - DNA, 25 bp, Homo sapien
ccttgggagtagaagtgcccagtac

SEQ ID NO: 4479021 - DNA, 25 bp, Homo sapien
gacaataatcactgaaagggagtgg

SEQ ID NO: 4479022 - DNA, 25 bp, Homo sapien
gaatctgggcattagctgatccagg

SEQ ID NO: 4479023 - DNA, 25 bp, Homo sapien
tcaggacacagtccgtctgcaggag

SEQ ID NO: 4479024 - DNA, 25 bp, Homo sapien
caggagcttcgggacccagagtctc

SEQ ID NO: 4479025 - DNA, 25 bp, Homo sapien
gatactcactgaggttggtcaagac

SEQ ID NO: 4479026 - DNA, 25 bp, Homo sapien
tgcgtggcctctcagttaagactcc

SEQ ID NO: 4479027 - DNA, 25 bp, Homo sapien
agggcgtggcgcctaattgtcccca

SEQ ID NO: 4479028 - DNA, 25 bp, Homo sapien
gataccctagagctactctggcggg

SEQ ID NO: 4479029 - DNA, 25 bp, Homo sapien
ttttgaaagccgtggtggcgctccc

SEQ ID NO: 4479030 - DNA, 25 bp, Homo sapien
ttccgcttccggctgcgacctccgc

SEQ ID NO: 4479031 - DNA, 25 bp, Homo sapien
cgctccgagcgcctcttccgcttcc

SEQ ID NO: 4479032 - DNA, 25 bp, Homo sapien
ggctcgacccggctcggaggcctgg

SEQ ID NO: 4479033 - DNA, 25 bp, Homo sapien
gcagccgtcgccagcctcggctcga

SEQ ID NO: 4479034 - DNA, 25 bp, Homo sapien
cgccgccgctgtcgccgccgcggac

SEQ ID NO: 4479035 - DNA, 25 bp, Homo sapien
taaaggccacaattatgctttggga

SEQ ID NO: 4479036 - DNA, 25 bp, Homo sapien
ctaaaggccacaattatgctttggg

SEQ ID NO: 4479037 - DNA, 25 bp, Homo sapien
gagctctggcagaaaactaaactaa

SEQ ID NO: 4479038 - DNA, 25 bp, Homo sapien
cttgcaacaagggaatagtaatctc

SEQ ID NO: 4479039 - DNA, 25 bp, Homo sapien
tgtgcccacagaggtactagtggca

SEQ ID NO: 4479040 - DNA, 25 bp, Homo sapien
ttattacactactctgaccgtcagc

SEQ ID NO: 4479041 - DNA, 25 bp, Homo sapien
cagtgaggcctatgtgaccaaaccc

SEQ ID NO: 4479042 - DNA, 25 bp, Homo sapien
catctggcaggtaaaagagccccac

SEQ ID NO: 4479043 - DNA, 25 bp, Homo sapien
tcccaggatagccagagggttagcc

SEQ ID NO: 4479044 - DNA, 25 bp, Homo sapien
gaggcccatttagcacccttttaga

SEQ ID NO: 4479045 - DNA, 25 bp, Homo sapien
cacgaggaacagagagccctgctaa

SEQ ID NO: 4479046 - DNA, 25 bp, Homo sapien
gccacgaggaacagagagccctgct

SEQ ID NO: 4479047 - DNA, 25 bp, Homo sapien
aggccacgaggaacagagagccctg

SEQ ID NO: 4479048 - DNA, 25 bp, Homo sapien
ctaggccacgaggaacagagagccc

SEQ ID NO: 4479049 - DNA, 25 bp, Homo sapien
gagcggtatcgcttacagtgatgca

SEQ ID NO: 4479050 - DNA, 25 bp, Homo sapien
gctcccttcgggacgggtatcgcag

SEQ ID NO: 4479051 - DNA, 25 bp, Homo sapien
ggtatcgcagtctcccttcatgttc

SEQ ID NO: 4479052 - DNA, 25 bp, Homo sapien
tcttccatcggtagctcaggtacgg

SEQ ID NO: 4479053 - DNA, 25 bp, Homo sapien
tggtaaggccactgtaaagggctaa

SEQ ID NO: 4479054 - DNA, 25 bp, Homo sapien
gagacctgtggtaaggccactgtaa

SEQ ID NO: 4479055 - DNA, 25 bp, Homo sapien
ctgttagcaagcaagagacctgtgg

SEQ ID NO: 4479056 - DNA, 25 bp, Homo sapien
gcaagagacctgtggtaaggccact

SEQ ID NO: 4479057 - DNA, 25 bp, Homo sapien
aaagggggatggggacgctggtcag

SEQ ID NO: 4479058 - DNA, 25 bp, Homo sapien
aagggggatggggacgctggtcagc

SEQ ID NO: 4479059 - DNA, 25 bp, Homo sapien
gggggatggggacgctggtcagctg

SEQ ID NO: 4479060 - DNA, 25 bp, Homo sapien
agggggatggggacgctggtcagct

SEQ ID NO: 4479061 - DNA, 25 bp, Homo sapien
acaccggtatgtatcgctgtcacgg

SEQ ID NO: 4479062 - DNA, 25 bp, Homo sapien
aggcgctgctacaagacctggtgcg

SEQ ID NO: 4479063 - DNA, 25 bp, Homo sapien
gatcgccgacgatgacgagaacgtg

SEQ ID NO: 4479064 - DNA, 25 bp, Homo sapien
gaaggtccatagtagtcctctccaa

SEQ ID NO: 4479065 - DNA, 25 bp, Homo sapien
gccagcacactctggctaccactca

SEQ ID NO: 4479066 - DNA, 25 bp, Homo sapien
cagccagcacactctggctaccact

SEQ ID NO: 4479067 - DNA, 25 bp, Homo sapien
ggaagagatgaggcctttaagcccc

SEQ ID NO: 4479068 - DNA, 25 bp, Homo sapien
agatgaggcctttaagccccagcca

SEQ ID NO: 4479069 - DNA, 25 bp, Homo sapien
ccggaccagccagcctgagagaagg

SEQ ID NO: 4479070 - DNA, 25 bp, Homo sapien
tcagttacacgaggaggcagtctct

SEQ ID NO: 4479071 - DNA, 25 bp, Homo sapien
gaagtgtcctaagaagtgtccccag

SEQ ID NO: 4479072 - DNA, 25 bp, Homo sapien
tactaggatccctaagaagtgtcct

SEQ ID NO: 4479073 - DNA, 25 bp, Homo sapien
gaaggaccaggccatatagctgcag

SEQ ID NO: 4479074 - DNA, 25 bp, Homo sapien
cccagtctgagctggctgacaggca

SEQ ID NO: 4479075 - DNA, 25 bp, Homo sapien
gcaaatcctccggtcctgtgaggca

SEQ ID NO: 4479076 - DNA, 25 bp, Homo sapien
gactgcccctcgtaaagaggctcgg

SEQ ID NO: 4479077 - DNA, 25 bp, Homo sapien
cgcgactgcccctcgtaaagaggct

SEQ ID NO: 4479078 - DNA, 25 bp, Homo sapien
catgtggcctgcaactggacgaggc

SEQ ID NO: 4479079 - DNA, 25 bp, Homo sapien
tagggatattgcaagggacacgtca

SEQ ID NO: 4479080 - DNA, 25 bp, Homo sapien
cattatctttaagaggagcgccaca

SEQ ID NO: 4479081 - DNA, 25 bp, Homo sapien
tcacgacgatcgatagagggcacca

SEQ ID NO: 4479082 - DNA, 25 bp, Homo sapien
ggttggttggattttccagatccca

SEQ ID NO: 4479083 - DNA, 25 bp, Homo sapien
aaacgccatccgaccaatcgcatgg

SEQ ID NO: 4479084 - DNA, 25 bp, Homo sapien
caatcgcatggtaggcggttccgat

SEQ ID NO: 4479085 - DNA, 25 bp, Homo sapien
cagattgaggtgtcagtcaaaggca

SEQ ID NO: 4479086 - DNA, 25 bp, Homo sapien
cttggagccaatcgccgatccggca

SEQ ID NO: 4479087 - DNA, 25 bp, Homo sapien
ccaatcgccgatccggcacaccagg

SEQ ID NO: 4479088 - DNA, 25 bp, Homo sapien
atcttccacactccggctgctgcgc

SEQ ID NO: 4479089 - DNA, 25 bp, Homo sapien
cggctgctgcgcttactgctctgtt

SEQ ID NO: 4479090 - DNA, 25 bp, Homo sapien
ggcaggagaggtctcgtctaacaag

SEQ ID NO: 4479091 - DNA, 25 bp, Homo sapien
caggcaggagaggtctcgtctaaca

SEQ ID NO: 4479092 - DNA, 25 bp, Homo sapien
tccaggcaggagaggtctcgtctaa

SEQ ID NO: 4479093 - DNA, 25 bp, Homo sapien
caggagaggtctcgtctaacaaggg

SEQ ID NO: 4479094 - DNA, 25 bp, Homo sapien
agtgtctgtgtcattcaggcaatta

SEQ ID NO: 4479095 - DNA, 25 bp, Homo sapien
aatggaagttgctagtgtctgtgtc

SEQ ID NO: 4479096 - DNA, 25 bp, Homo sapien
ggcaattactggtggccccgctaag

SEQ ID NO: 4479097 - DNA, 25 bp, Homo sapien
gctcctgcaagttcacagcattcaa

SEQ ID NO: 4479098 - DNA, 25 bp, Homo sapien
gagagaaaagaaattgggcatgaga

SEQ ID NO: 4479099 - DNA, 25 bp, Homo sapien
taggagagaaaagaaattgggcatg

SEQ ID NO: 4479100 - DNA, 25 bp, Homo sapien
gagaaaagaaattgggcatgagaat

SEQ ID NO: 4479101 - DNA, 25 bp, Homo sapien
ctaggagagaaaagaaattgggcat

SEQ ID NO: 4479102 - DNA, 25 bp, Homo sapien
ctggcatggtccaagcactccacca

SEQ ID NO: 4479103 - DNA, 25 bp, Homo sapien
tagggatgccacataactgcaggac

SEQ ID NO: 4479104 - DNA, 25 bp, Homo sapien
cagcctgcttggtgagaaagcccag

SEQ ID NO: 4479105 - DNA, 25 bp, Homo sapien
tcagcaaaaccccaacatggacagg

SEQ ID NO: 4479106 - DNA, 25 bp, Homo sapien
ggtcggaaccctactttgatgccac

SEQ ID NO: 4479107 - DNA, 25 bp, Homo sapien
gaacgagacagtcctagcctggaag

SEQ ID NO: 4479108 - DNA, 25 bp, Homo sapien
gaaggttttaacagtccctgctctg

SEQ ID NO: 4479109 - DNA, 25 bp, Homo sapien
agctagaattcagatgcccagtggg

SEQ ID NO: 4479110 - DNA, 25 bp, Homo sapien
gaataagaccctgcctttcgctgag

SEQ ID NO: 4479111 - DNA, 25 bp, Homo sapien
gccagtccaagagctcacacagtga

SEQ ID NO: 4479112 - DNA, 25 bp, Homo sapien
tgtctgcaagtctgagcaaacaggg

SEQ ID NO: 4479113 - DNA, 25 bp, Homo sapien
cagcaagggtacctctcactgtgag

SEQ ID NO: 4479114 - DNA, 25 bp, Homo sapien
gaggccaatcctgcttaaccagtgc

SEQ ID NO: 4479115 - DNA, 25 bp, Homo sapien
agcctcccggtacttgcccacgttg

SEQ ID NO: 4479116 - DNA, 25 bp, Homo sapien
ccggtacttgcccacgttgcggatg

SEQ ID NO: 4479117 - DNA, 25 bp, Homo sapien
tacttgcccacgttgcggatgatct

SEQ ID NO: 4479118 - DNA, 25 bp, Homo sapien
ggtacttgcccacgttgcggatgat

SEQ ID NO: 4479119 - DNA, 25 bp, Homo sapien
ccttgatttttttgagcacgttgat

SEQ ID NO: 4479120 - DNA, 25 bp, Homo sapien
cttgatttttttgagcacgttgatt

SEQ ID NO: 4479121 - DNA, 25 bp, Homo sapien
ctccttgatttttttgagcacgttg

SEQ ID NO: 4479122 - DNA, 25 bp, Homo sapien
ttctccttgatttttttgagcacgt

SEQ ID NO: 4479123 - DNA, 25 bp, Homo sapien
cacatgtgaccgtggaagttgaacc

SEQ ID NO: 4479124 - DNA, 25 bp, Homo sapien
gagctcaaaggcgatgcacatgtga

SEQ ID NO: 4479125 - DNA, 25 bp, Homo sapien
ggaagttgaaccagtcagacatcaa

SEQ ID NO: 4479126 - DNA, 25 bp, Homo sapien
taggccatgtgccggacatgtggta

SEQ ID NO: 4479127 - DNA, 25 bp, Homo sapien
agctgttccccttgcttggaatcct

SEQ ID NO: 4479128 - DNA, 25 bp, Homo sapien
gctgttccccttgcttggaatcctt

SEQ ID NO: 4479129 - DNA, 25 bp, Homo sapien
tgttccccttgcttggaatccttgt

SEQ ID NO: 4479130 - DNA, 25 bp, Homo sapien
ctgttccccttgcttggaatccttg

SEQ ID NO: 4479131 - DNA, 25 bp, Homo sapien
cagagctacagcaacagcctcgagg

SEQ ID NO: 4479132 - DNA, 25 bp, Homo sapien
tacagcaacagcctcgaggtggttc

SEQ ID NO: 4479133 - DNA, 25 bp, Homo sapien
tctctcagcagagctacagcaacag

SEQ ID NO: 4479134 - DNA, 25 bp, Homo sapien
gtctctcagcagagctacagcaaca

SEQ ID NO: 4479135 - DNA, 25 bp, Homo sapien
ggtttcaagtctgtatgggtcagct

SEQ ID NO: 4479136 - DNA, 25 bp, Homo sapien
tgggtcagctgattctcatgcagaa

SEQ ID NO: 4479137 - DNA, 25 bp, Homo sapien
tcattgtagagggtttcaaactcag

SEQ ID NO: 4479138 - DNA, 25 bp, Homo sapien
aactcagaattcacaaacaggatgt

SEQ ID NO: 4479139 - DNA, 25 bp, Homo sapien
gatagtgacgggtggccacaatggt

SEQ ID NO: 4479140 - DNA, 25 bp, Homo sapien
ggtggccacaatggtggtgtggtgc

SEQ ID NO: 4479141 - DNA, 25 bp, Homo sapien
tcagccactcggatgctggtgttct

SEQ ID NO: 4479142 - DNA, 25 bp, Homo sapien
gatcacctcaggcgggcgatagtga

SEQ ID NO: 4479143 - DNA, 25 bp, Homo sapien
cccggtagtactcaaagagaatgca

SEQ ID NO: 4479144 - DNA, 25 bp, Homo sapien
agagaatgcagccaatgctccagac

SEQ ID NO: 4479145 - DNA, 25 bp, Homo sapien
gccaatgctccagacgtcacagggc

SEQ ID NO: 4479146 - DNA, 25 bp, Homo sapien
ctggaagagtgtgaagccccggtag

SEQ ID NO: 4479147 - DNA, 25 bp, Homo sapien
caggacatgcaaacctaccaatgaa

SEQ ID NO: 4479148 - DNA, 25 bp, Homo sapien
aagatgggcaagtgccctcactgcc

SEQ ID NO: 4479149 - DNA, 25 bp, Homo sapien
cagcctgtgcctaggctcctcagcc

SEQ ID NO: 4479150 - DNA, 25 bp, Homo sapien
tgcaagggggtcagtactagctctg

SEQ ID NO: 4479151 - DNA, 25 bp, Homo sapien
ggatgggccctaggatcttctccat

SEQ ID NO: 4479152 - DNA, 25 bp, Homo sapien
ctggtacggtggatcatgtgtgatg

SEQ ID NO: 4479153 - DNA, 25 bp, Homo sapien
atgtgtgatgggatgggccctagga

SEQ ID NO: 4479154 - DNA, 25 bp, Homo sapien
accaggtgctctcggttttcgtggg

SEQ ID NO: 4479155 - DNA, 25 bp, Homo sapien
ctccttcacataccggccgtcagag

SEQ ID NO: 4479156 - DNA, 25 bp, Homo sapien
tctccttcacataccggccgtcaga

SEQ ID NO: 4479157 - DNA, 25 bp, Homo sapien
ttcacataccggccgtcagagctgt

SEQ ID NO: 4479158 - DNA, 25 bp, Homo sapien
cataccggccgtcagagctgttctc

SEQ ID NO: 4479159 - DNA, 25 bp, Homo sapien
caaggaggcagcctttagcggcctg

SEQ ID NO: 4479160 - DNA, 25 bp, Homo sapien
ccatagagctggatcaaggaggcag

SEQ ID NO: 4479161 - DNA, 25 bp, Homo sapien
agtttgcaagaagccccattgccag

SEQ ID NO: 4479162 - DNA, 25 bp, Homo sapien
cttgggtgccgcctcccatagagct

SEQ ID NO: 4479163 - DNA, 25 bp, Homo sapien
cccaaaatttcgaggagagagaggg

SEQ ID NO: 4479164 - DNA, 25 bp, Homo sapien
ttcttcccaaaatttcgaggagaga

SEQ ID NO: 4479165 - DNA, 25 bp, Homo sapien
tctggtgttccccaattacattcat

SEQ ID NO: 4479166 - DNA, 25 bp, Homo sapien
gttccccaattacattcatagccac

SEQ ID NO: 4479167 - DNA, 25 bp, Homo sapien
ctgggacgccttgctggactggatc

SEQ ID NO: 4479168 - DNA, 25 bp, Homo sapien
gcgaaattcacttgtccgagcacca

SEQ ID NO: 4479169 - DNA, 25 bp, Homo sapien
acttgccaggctactaggtgtcttg

SEQ ID NO: 4479170 - DNA, 25 bp, Homo sapien
cctgacaggtgggtagagatcacct

SEQ ID NO: 4479171 - DNA, 25 bp, Homo sapien
tcatctgcttgggttgcggctggtg

SEQ ID NO: 4479172 - DNA, 25 bp, Homo sapien
cgctgggcagggtcaaattctaaca

SEQ ID NO: 4479173 - DNA, 25 bp, Homo sapien
tcatcaggtcaaacagctgcacgtg

SEQ ID NO: 4479174 - DNA, 25 bp, Homo sapien
tggtgtggaaggaccgctcctcagg

SEQ ID NO: 4479175 - DNA, 25 bp, Homo sapien
ggtcaaatctgtgctttctggcagc

SEQ ID NO: 4479176 - DNA, 25 bp, Homo sapien
tcacattgcactgttcattgggtgg

SEQ ID NO: 4479177 - DNA, 25 bp, Homo sapien
gccttccttcacattgcactgttca

SEQ ID NO: 4479178 - DNA, 25 bp, Homo sapien
tccatctcctcatgcggtggcctgt

SEQ ID NO: 4479179 - DNA, 25 bp, Homo sapien
gcctggagatggacacactggtacc

SEQ ID NO: 4479180 - DNA, 25 bp, Homo sapien
cctggagatggacacactggtacca

SEQ ID NO: 4479181 - DNA, 25 bp, Homo sapien
tccagggatgatagccttgcagggc

SEQ ID NO: 4479182 - DNA, 25 bp, Homo sapien
ggtgaagcctagcactcatgcagct

SEQ ID NO: 4479183 - DNA, 25 bp, Homo sapien
ccccagaggtattaaagagaagtat

SEQ ID NO: 4479184 - DNA, 25 bp, Homo sapien
gagaaacaagctagaacaaccctgg

SEQ ID NO: 4479185 - DNA, 25 bp, Homo sapien
ccaggtgggcctttgtttacagccg

SEQ ID NO: 4479186 - DNA, 25 bp, Homo sapien
tcccctagccccacaagttgatttg

SEQ ID NO: 4479187 - DNA, 25 bp, Homo sapien
tgtcacttgctcttagccagggaag

SEQ ID NO: 4479188 - DNA, 25 bp, Homo sapien
tttacagccgtaggcagctctcaag

SEQ ID NO: 4479189 - DNA, 25 bp, Homo sapien
tcttcctgatgctagggatatggca

SEQ ID NO: 4479190 - DNA, 25 bp, Homo sapien
tgctagggatatggcaacagatttt

SEQ ID NO: 4479191 - DNA, 25 bp, Homo sapien
caggcactcttcctgatgctaggga

SEQ ID NO: 4479192 - DNA, 25 bp, Homo sapien
caaatattcgttgaacaggcactct

SEQ ID NO: 4479193 - DNA, 25 bp, Homo sapien
cctcaaaggtgagcacttaggcagg

SEQ ID NO: 4479194 - DNA, 25 bp, Homo sapien
cctccttagcagtttgatggtctcg

SEQ ID NO: 4479195 - DNA, 25 bp, Homo sapien
aaggatggtgcttcgcctctaagga

SEQ ID NO: 4479196 - DNA, 25 bp, Homo sapien
gacccaaggccaacaagtgtctagc

SEQ ID NO: 4479197 - DNA, 25 bp, Homo sapien
agtgtctgaactatccaaaggtcca

SEQ ID NO: 4479198 - DNA, 25 bp, Homo sapien
tgaaagagcatcaggcccgtgtgtc

SEQ ID NO: 4479199 - DNA, 25 bp, Homo sapien
tgttgagaaatcagacccgtggtta

SEQ ID NO: 4479200 - DNA, 25 bp, Homo sapien
agatccttgggctctcctgtgccag

SEQ ID NO: 4479201 - DNA, 25 bp, Homo sapien
cattcactgtgataggaaacatggg

SEQ ID NO: 4479202 - DNA, 25 bp, Homo sapien
gaatacctgtgagatatccaaatag

SEQ ID NO: 4479203 - DNA, 25 bp, Homo sapien
acttcaagttttctagcctggacat

SEQ ID NO: 4479204 - DNA, 25 bp, Homo sapien
ggtaaattcagcagggcaaggtaat

SEQ ID NO: 4479205 - DNA, 25 bp, Homo sapien
ctcttggcctcaggtaatctgcgtg

SEQ ID NO: 4479206 - DNA, 25 bp, Homo sapien
cttccacctcctgagcttgagcaat

SEQ ID NO: 4479207 - DNA, 25 bp, Homo sapien
ttggcctcaggtaatctgcgtgcct

SEQ ID NO: 4479208 - DNA, 25 bp, Homo sapien
ggcctcaggtaatctgcgtgcctct

SEQ ID NO: 4479209 - DNA, 25 bp, Homo sapien
tctggcaagctgccttttgactctc

SEQ ID NO: 4479210 - DNA, 25 bp, Homo sapien
catacacacatacgagttcattagg

SEQ ID NO: 4479211 - DNA, 25 bp, Homo sapien
tacgagttcattaggcagtttctgc

SEQ ID NO: 4479212 - DNA, 25 bp, Homo sapien
atgtggagtaaggatgctctgcctg

SEQ ID NO: 4479213 - DNA, 25 bp, Homo sapien
cttggttcaccagtcactacttgag

SEQ ID NO: 4479214 - DNA, 25 bp, Homo sapien
catgtgcctgataggttgctgttac

SEQ ID NO: 4479215 - DNA, 25 bp, Homo sapien
ggagcttaagtttgtccccactctg

SEQ ID NO: 4479216 - DNA, 25 bp, Homo sapien
gagcgtgccttagtcccggaagatg

SEQ ID NO: 4479217 - DNA, 25 bp, Homo sapien
gagatttctcccgacaggaccagtg

SEQ ID NO: 4479218 - DNA, 25 bp, Homo sapien
tgatttgtggagtagcaggcccaag

SEQ ID NO: 4479219 - DNA, 25 bp, Homo sapien
aaaaggtacctgatctagctggaca

SEQ ID NO: 4479220 - DNA, 25 bp, Homo sapien
gagtgaaagctctgccttgcgtgac

SEQ ID NO: 4479221 - DNA, 25 bp, Homo sapien
tgatattagtgaagaatctaggcca

SEQ ID NO: 4479222 - DNA, 25 bp, Homo sapien
taggccaattgatttgcagaatgtc

SEQ ID NO: 4479223 - DNA, 25 bp, Homo sapien
cacactacaagattgctctcagcaa

SEQ ID NO: 4479224 - DNA, 25 bp, Homo sapien
tatacccttcatttagattcaccag

SEQ ID NO: 4479225 - DNA, 25 bp, Homo sapien
gattcacgttttcagggtagtcaga

SEQ ID NO: 4479226 - DNA, 25 bp, Homo sapien
gatagaggttcagtctggcatacca

SEQ ID NO: 4479227 - DNA, 25 bp, Homo sapien
tacaggatcagttcagtatggaccc

SEQ ID NO: 4479228 - DNA, 25 bp, Homo sapien
cattagtgtggcctctacaggatca

SEQ ID NO: 4479229 - DNA, 25 bp, Homo sapien
gctggtcacaaactgctgatctcaa

SEQ ID NO: 4479230 - DNA, 25 bp, Homo sapien
ggtcacaaactgctgatctcaagtg

SEQ ID NO: 4479231 - DNA, 25 bp, Homo sapien
cttctgcctcagcctcttgagtagc

SEQ ID NO: 4479232 - DNA, 25 bp, Homo sapien
acctccccatttcaagcgattcttc

SEQ ID NO: 4479233 - DNA, 25 bp, Homo sapien
ttttcaagaagtctagttgaccagc

SEQ ID NO: 4479234 - DNA, 25 bp, Homo sapien
ccagagtagctgtactattcaatat

SEQ ID NO: 4479235 - DNA, 25 bp, Homo sapien
caatatttggactagcaatgtatga

SEQ ID NO: 4479236 - DNA, 25 bp, Homo sapien
gccattttgaaaggtgtatatttcc

SEQ ID NO: 4479237 - DNA, 25 bp, Homo sapien
ctgatagcttgaggacggagatgaa

SEQ ID NO: 4479238 - DNA, 25 bp, Homo sapien
ccatgactgatagcttgaggacgga

SEQ ID NO: 4479239 - DNA, 25 bp, Homo sapien
tggcagagaagaacgccagtgccac

SEQ ID NO: 4479240 - DNA, 25 bp, Homo sapien
cataatgagatacggtggcagagaa

SEQ ID NO: 4479241 - DNA, 25 bp, Homo sapien
tcggcttggtgtggtgtgcggagga

SEQ ID NO: 4479242 - DNA, 25 bp, Homo sapien
ccgtcggcgcggaggtgggagcgaa

SEQ ID NO: 4479243 - DNA, 25 bp, Homo sapien
gaggctactggtttgtggacggtcg

SEQ ID NO: 4479244 - DNA, 25 bp, Homo sapien
gggttgctttaggcttcagagttcc

SEQ ID NO: 4479245 - DNA, 25 bp, Homo sapien
gattccaaggtgtcgcgccggaagt

SEQ ID NO: 4479246 - DNA, 25 bp, Homo sapien
caattgacggccctggattccaagg

SEQ ID NO: 4479247 - DNA, 25 bp, Homo sapien
tacccaagcgcaattctgtaaggcc

SEQ ID NO: 4479248 - DNA, 25 bp, Homo sapien
cacaggacataagtaagcgtggagg

SEQ ID NO: 4479249 - DNA, 25 bp, Homo sapien
gcgattggcgctggggtaacaggag

SEQ ID NO: 4479250 - DNA, 25 bp, Homo sapien
ggcctccctgaaagtcctccgctcc

SEQ ID NO: 4479251 - DNA, 25 bp, Homo sapien
ctccagctctgcgattggcgctggg

SEQ ID NO: 4479252 - DNA, 25 bp, Homo sapien
gggaagcgggtgcttttcatcgagc

SEQ ID NO: 4479253 - DNA, 25 bp, Homo sapien
tattaagtcccacagctgcagttta

SEQ ID NO: 4479254 - DNA, 25 bp, Homo sapien
gggttgtcgcacttattaagtccca

SEQ ID NO: 4479255 - DNA, 25 bp, Homo sapien
cacagctgcagtttagcacggaggg

SEQ ID NO: 4479256 - DNA, 25 bp, Homo sapien
tttaatccatcagggggttgtcgca

SEQ ID NO: 4479257 - DNA, 25 bp, Homo sapien
gagtgcacatatccaggcaccagga

SEQ ID NO: 4479258 - DNA, 25 bp, Homo sapien
gatcagagcgcacagggagtgcaca

SEQ ID NO: 4479259 - DNA, 25 bp, Homo sapien
cctgcattgagcttgcatgcttgca

SEQ ID NO: 4479260 - DNA, 25 bp, Homo sapien
catgcttgcataagagcttaagaac

SEQ ID NO: 4479261 - DNA, 25 bp, Homo sapien
cagtacctagctggctctgtgaggg

SEQ ID NO: 4479262 - DNA, 25 bp, Homo sapien
cctgctagggttaggaggtccttag

SEQ ID NO: 4479263 - DNA, 25 bp, Homo sapien
caagttagaactagccaaaccagga

SEQ ID NO: 4479264 - DNA, 25 bp, Homo sapien
tctgtgagggtgctgactggcttca

SEQ ID NO: 4479265 - DNA, 25 bp, Homo sapien
cagcaggctggcctatgtggtctaa

SEQ ID NO: 4479266 - DNA, 25 bp, Homo sapien
tgtggtctaaggttcagcctgaaac

SEQ ID NO: 4479267 - DNA, 25 bp, Homo sapien
gcctgaaactcatagacactgatct

SEQ ID NO: 4479268 - DNA, 25 bp, Homo sapien
tgtgggcaagcctaagggatcctgc

SEQ ID NO: 4479269 - DNA, 25 bp, Homo sapien
ctccccagctttctctgggcagcat

SEQ ID NO: 4479270 - DNA, 25 bp, Homo sapien
tgctccccagctttctctgggcagc

SEQ ID NO: 4479271 - DNA, 25 bp, Homo sapien
gctccccagctttctctgggcagca

SEQ ID NO: 4479272 - DNA, 25 bp, Homo sapien
ctgctccccagctttctctgggcag

SEQ ID NO: 4479273 - DNA, 25 bp, Homo sapien
atatggacccagatctcagtcagat

SEQ ID NO: 4479274 - DNA, 25 bp, Homo sapien
ttaatatggacccagatctcagtca

SEQ ID NO: 4479275 - DNA, 25 bp, Homo sapien
tttaatatggacccagatctcagtc

SEQ ID NO: 4479276 - DNA, 25 bp, Homo sapien
ttgagattggcagggttgtaatggc

SEQ ID NO: 4479277 - DNA, 25 bp, Homo sapien
gagattggcagggttgtaatggctg

SEQ ID NO: 4479278 - DNA, 25 bp, Homo sapien
tggcagggttgtaatggctggtgtg

SEQ ID NO: 4479279 - DNA, 25 bp, Homo sapien
gcagggttgtaatggctggtgtgga

SEQ ID NO: 4479280 - DNA, 25 bp, Homo sapien
ttgagcacccagaataccaggcaga

SEQ ID NO: 4479281 - DNA, 25 bp, Homo sapien
tgtccgaagcacatggcaccaatga

SEQ ID NO: 4479282 - DNA, 25 bp, Homo sapien
gaaggtcaagctctggccatcagtg

SEQ ID NO: 4479283 - DNA, 25 bp, Homo sapien
gaggcagtctccacgaactcatgag

SEQ ID NO: 4479284 - DNA, 25 bp, Homo sapien
cacccgtgatgtcccggacactgtt

SEQ ID NO: 4479285 - DNA, 25 bp, Homo sapien
ttgaacagggcacccgtgatgtccc

SEQ ID NO: 4479286 - DNA, 25 bp, Homo sapien
tgaggttgccgctggctctaggccc

SEQ ID NO: 4479287 - DNA, 25 bp, Homo sapien
tgctgtgcttgaacagggcacccgt

SEQ ID NO: 4479288 - DNA, 25 bp, Homo sapien
agatggctgtggtgactgtgtcaaa

SEQ ID NO: 4479289 - DNA, 25 bp, Homo sapien
ccttctggatcttcctctgtatctc

SEQ ID NO: 4479290 - DNA, 25 bp, Homo sapien
cttggtcacaaggtacatgaggctc

SEQ ID NO: 4479291 - DNA, 25 bp, Homo sapien
tcctctgtatctcaggcttggtcac

SEQ ID NO: 4479292 - DNA, 25 bp, Homo sapien
gagtgtcggaaggtctccaggatga

SEQ ID NO: 4479293 - DNA, 25 bp, Homo sapien
aagccattcagcgttgtgtcccttg

SEQ ID NO: 4479294 - DNA, 25 bp, Homo sapien
ccattcagcgttgtgtcccttgttg

SEQ ID NO: 4479295 - DNA, 25 bp, Homo sapien
cactggtttacgaagacacagcatt

SEQ ID NO: 4479296 - DNA, 25 bp, Homo sapien
tttacgaagacacagcatttcttgg

SEQ ID NO: 4479297 - DNA, 25 bp, Homo sapien
tttttgagacaccctccggctccta

SEQ ID NO: 4479298 - DNA, 25 bp, Homo sapien
acaccctccggctcctatcacccag

SEQ ID NO: 4479299 - DNA, 25 bp, Homo sapien
gacaccctccggctcctatcaccca

SEQ ID NO: 4479300 - DNA, 25 bp, Homo sapien
ttgagacaccctccggctcctatca

SEQ ID NO: 4479301 - DNA, 25 bp, Homo sapien
ttgagaacacaagtgtgagggcact

SEQ ID NO: 4479302 - DNA, 25 bp, Homo sapien
tgagaacacaagtgtgagggcactt

SEQ ID NO: 4479303 - DNA, 25 bp, Homo sapien
gttgagaacacaagtgtgagggcac

SEQ ID NO: 4479304 - DNA, 25 bp, Homo sapien
tggacatgttcacagcgggcgtgct

SEQ ID NO: 4479305 - DNA, 25 bp, Homo sapien
gcgtgcttcatggtcagcccgtaga

SEQ ID NO: 4479306 - DNA, 25 bp, Homo sapien
ggcggcacgctgaactccagttgct

SEQ ID NO: 4479307 - DNA, 25 bp, Homo sapien
caagggcttgttaatggcagtgcca

SEQ ID NO: 4479308 - DNA, 25 bp, Homo sapien
aagagcttactgacgcacaccacaa

SEQ ID NO: 4479309 - DNA, 25 bp, Homo sapien
agaaacaagggctgagtccccgtgg

SEQ ID NO: 4479310 - DNA, 25 bp, Homo sapien
gaggtgcctatcaacgacttaagag

SEQ ID NO: 4479311 - DNA, 25 bp, Homo sapien
tctcaggactcaagcaccaagagct

SEQ ID NO: 4479312 - DNA, 25 bp, Homo sapien
agctgcacatgccacacgtgtgtcg

SEQ ID NO: 4479313 - DNA, 25 bp, Homo sapien
tgccacacgtgtgtcgggggtccat

SEQ ID NO: 4479314 - DNA, 25 bp, Homo sapien
tggtgtgtgcacagctgcacatgcc

SEQ ID NO: 4479315 - DNA, 25 bp, Homo sapien
ggtgtgtgcacagctgcacatgcca

SEQ ID NO: 4479316 - DNA, 25 bp, Homo sapien
ttcagccaggccccccaactcttca

SEQ ID NO: 4479317 - DNA, 25 bp, Homo sapien
ccaccccaggtcagcaaggcccagg

SEQ ID NO: 4479318 - DNA, 25 bp, Homo sapien
cccagggcagggtcagtttcagcca

SEQ ID NO: 4479319 - DNA, 25 bp, Homo sapien
tggcactttcagctgggccacccca

SEQ ID NO: 4479320 - DNA, 25 bp, Homo sapien
gaagcactaatctggggactttgag

SEQ ID NO: 4479321 - DNA, 25 bp, Homo sapien
taatctggggactttgagattccat

SEQ ID NO: 4479322 - DNA, 25 bp, Homo sapien
cttggaggaagcactaatctgggga

SEQ ID NO: 4479323 - DNA, 25 bp, Homo sapien
ggaggaagcactaatctggggactt

SEQ ID NO: 4479324 - DNA, 25 bp, Homo sapien
tctcccagccctcagatgtaaccat

SEQ ID NO: 4479325 - DNA, 25 bp, Homo sapien
cagtccaggtctcccagccctcaga

SEQ ID NO: 4479326 - DNA, 25 bp, Homo sapien
tccaggtctcccagccctcagatgt

SEQ ID NO: 4479327 - DNA, 25 bp, Homo sapien
aggtctcccagccctcagatgtaac

SEQ ID NO: 4479328 - DNA, 25 bp, Homo sapien
ccctggggatcctggattggcctca

SEQ ID NO: 4479329 - DNA, 25 bp, Homo sapien
gcccctggggatcctggattggcct

SEQ ID NO: 4479330 - DNA, 25 bp, Homo sapien
gctgctccctgatttgaaggccacc

SEQ ID NO: 4479331 - DNA, 25 bp, Homo sapien
gatttgaaggccaccaccacgctgg

SEQ ID NO: 4479332 - DNA, 25 bp, Homo sapien
gagctgactgttcccgattgcgagc

SEQ ID NO: 4479333 - DNA, 25 bp, Homo sapien
agccagagctgactgttcccgattg

SEQ ID NO: 4479334 - DNA, 25 bp, Homo sapien
gactgttcccgattgcgagcatcac

SEQ ID NO: 4479335 - DNA, 25 bp, Homo sapien
tcccgattgcgagcatcacagggca

SEQ ID NO: 4479336 - DNA, 25 bp, Homo sapien
gagccagccccttgcgtggggcctg

SEQ ID NO: 4479337 - DNA, 25 bp, Homo sapien
gcctggcgcgggtgctgacacccac

SEQ ID NO: 4479338 - DNA, 25 bp, Homo sapien
ttgcgtggggcctggcgcgggtgct

SEQ ID NO: 4479339 - DNA, 25 bp, Homo sapien
agccccttgcgtggggcctggcgcg

SEQ ID NO: 4479340 - DNA, 25 bp, Homo sapien
cgaaagcaggaaaagaggccctggg

SEQ ID NO: 4479341 - DNA, 25 bp, Homo sapien
ctttgggcgaaagcaggaaaagagg

SEQ ID NO: 4479342 - DNA, 25 bp, Homo sapien
ttgggcgaaagcaggaaaagaggcc

SEQ ID NO: 4479343 - DNA, 25 bp, Homo sapien
ggcgaaagcaggaaaagaggccctg

SEQ ID NO: 4479344 - DNA, 25 bp, Homo sapien
acttttgtgctgaacccaatagtcc

SEQ ID NO: 4479345 - DNA, 25 bp, Homo sapien
caggctgacatatctccctcaatgc

SEQ ID NO: 4479346 - DNA, 25 bp, Homo sapien
tgctgactggaagccgcagttggca

SEQ ID NO: 4479347 - DNA, 25 bp, Homo sapien
catatctccctcaatgctgtcaggg

SEQ ID NO: 4479348 - DNA, 25 bp, Homo sapien
gtgctggtagctagcaatcttccca

SEQ ID NO: 4479349 - DNA, 25 bp, Homo sapien
gctggtagctagcaatcttcccatc

SEQ ID NO: 4479350 - DNA, 25 bp, Homo sapien
tgtgctggtagctagcaatcttccc

SEQ ID NO: 4479351 - DNA, 25 bp, Homo sapien
gtgtgtgctggtagctagcaatctt

SEQ ID NO: 4479352 - DNA, 25 bp, Homo sapien
ccgctctggcattcaaccattcttc

SEQ ID NO: 4479353 - DNA, 25 bp, Homo sapien
caccacaacctcccgctctggcatt

SEQ ID NO: 4479354 - DNA, 25 bp, Homo sapien
aacctcccgctctggcattcaacca

SEQ ID NO: 4479355 - DNA, 25 bp, Homo sapien
tcccgctctggcattcaaccattct

SEQ ID NO: 4479356 - DNA, 25 bp, Homo sapien
tataatggcaccgacttcttaagtt

SEQ ID NO: 4479357 - DNA, 25 bp, Homo sapien
ttggagtttatgttcagcctggagg

SEQ ID NO: 4479358 - DNA, 25 bp, Homo sapien
tccccatttggtaaaataggtgata

SEQ ID NO: 4479359 - DNA, 25 bp, Homo sapien
ggagtttatgttcagcctggaggca

SEQ ID NO: 4479360 - DNA, 25 bp, Homo sapien
agctttcccgctgcagaagcgctgg

SEQ ID NO: 4479361 - DNA, 25 bp, Homo sapien
tttcactaccgtcaaggcgttctcg

SEQ ID NO: 4479362 - DNA, 25 bp, Homo sapien
gagtgggcctgattcgcagcagaaa

SEQ ID NO: 4479363 - DNA, 25 bp, Homo sapien
atttcctggcgctgacatcgtggcg

SEQ ID NO: 4479364 - DNA, 25 bp, Homo sapien
agggctccgctgggaggaagctcgc

SEQ ID NO: 4479365 - DNA, 25 bp, Homo sapien
gggctccgctgggaggaagctcgca

SEQ ID NO: 4479366 - DNA, 25 bp, Homo sapien
gcggcgcagccgggcggtcgcccgg

SEQ ID NO: 4479367 - DNA, 25 bp, Homo sapien
gcagaagcccccgggcaaggcgcgg

SEQ ID NO: 4479368 - DNA, 25 bp, Homo sapien
gttacggccccgacggcggcgcagc

SEQ ID NO: 4479369 - DNA, 25 bp, Homo sapien
ccggcagaagcccccgggcaaggcg

SEQ ID NO: 4479370 - DNA, 25 bp, Homo sapien
gattttggaacgtcgcgctggctgc

SEQ ID NO: 4479371 - DNA, 25 bp, Homo sapien
gccccggcagagttccgcttccgag

SEQ ID NO: 4479372 - DNA, 25 bp, Homo sapien
aggaaacaatgtagccggcgcggcc

SEQ ID NO: 4479373 - DNA, 25 bp, Homo sapien
cgagcgccgccactgaggttcgatt

SEQ ID NO: 4479374 - DNA, 25 bp, Homo sapien
ctgcgggacggtccatgcggtcagg

SEQ ID NO: 4479375 - DNA, 25 bp, Homo sapien
tgcgggacggtccatgcggtcaggg

SEQ ID NO: 4479376 - DNA, 25 bp, Homo sapien
cagggggtgcggtacaaagaggtat

SEQ ID NO: 4479377 - DNA, 25 bp, Homo sapien
acaaagaggtatgggtgcaaggaga

SEQ ID NO: 4479378 - DNA, 25 bp, Homo sapien
gggcactgcggtccgggccacctcg

SEQ ID NO: 4479379 - DNA, 25 bp, Homo sapien
ctcttggggcactgcggtccgggcc

SEQ ID NO: 4479380 - DNA, 25 bp, Homo sapien
ctgcggtccgggccacctcgccgcg

SEQ ID NO: 4479381 - DNA, 25 bp, Homo sapien
ctctcttggggcactgcggtccggg

SEQ ID NO: 4479382 - DNA, 25 bp, Homo sapien
gatgacccgagaagacgagtccgtg

SEQ ID NO: 4479383 - DNA, 25 bp, Homo sapien
tctaactgctcacccgaggtggctg

SEQ ID NO: 4479384 - DNA, 25 bp, Homo sapien
tggtgctaatgctccgttacctccc

SEQ ID NO: 4479385 - DNA, 25 bp, Homo sapien
ggacctggcccatacggatcctctt

SEQ ID NO: 4479386 - DNA, 25 bp, Homo sapien
gaccctggatcacaccttcacagct

SEQ ID NO: 4479387 - DNA, 25 bp, Homo sapien
ccctggatcacaccttcacagctca

SEQ ID NO: 4479388 - DNA, 25 bp, Homo sapien
ccctgcacacgtgccagccagaagc

SEQ ID NO: 4479389 - DNA, 25 bp, Homo sapien
cagccagaagccagactcctttctt

SEQ ID NO: 4479390 - DNA, 25 bp, Homo sapien
ttccttgtgcaggacagacgacacc

SEQ ID NO: 4479391 - DNA, 25 bp, Homo sapien
tttccttgtgcaggacagacgacac

SEQ ID NO: 4479392 - DNA, 25 bp, Homo sapien
ctttccttgtgcaggacagacgaca

SEQ ID NO: 4479393 - DNA, 25 bp, Homo sapien
agtttggcagcaataaaatcagctc

SEQ ID NO: 4479394 - DNA, 25 bp, Homo sapien
ttgggcaagtttggcagcaataaaa

SEQ ID NO: 4479395 - DNA, 25 bp, Homo sapien
agcagttgggcaagtttggcagcaa

SEQ ID NO: 4479396 - DNA, 25 bp, Homo sapien
ggcaagtttggcagcaataaaatca

SEQ ID NO: 4479397 - DNA, 25 bp, Homo sapien
ccagtgagaacctcactggttgtgg

SEQ ID NO: 4479398 - DNA, 25 bp, Homo sapien
cctctcacacatccccgtgctccag

SEQ ID NO: 4479399 - DNA, 25 bp, Homo sapien
ccaaggcctctcacacatccccgtg

SEQ ID NO: 4479400 - DNA, 25 bp, Homo sapien
agtgagaacctcactggttgtggcc

SEQ ID NO: 4479401 - DNA, 25 bp, Homo sapien
ccatctgtgcaatggactggtgata

SEQ ID NO: 4479402 - DNA, 25 bp, Homo sapien
tctgtgcaatggactggtgatactc

SEQ ID NO: 4479403 - DNA, 25 bp, Homo sapien
tgctaactctcttggacggctcctc

SEQ ID NO: 4479404 - DNA, 25 bp, Homo sapien
ttgcaagtgggagctgctaactctc

SEQ ID NO: 4479405 - DNA, 25 bp, Homo sapien
gtgcgccaacacagcagaccaattt

SEQ ID NO: 4479406 - DNA, 25 bp, Homo sapien
ggaggaggttgatgccctcaacccc

SEQ ID NO: 4479407 - DNA, 25 bp, Homo sapien
tatatgattttttgactgcagggag

SEQ ID NO: 4479408 - DNA, 25 bp, Homo sapien
tatctacaaggctttctgacaacaa

SEQ ID NO: 4479409 - DNA, 25 bp, Homo sapien
gcatgaacaggtgccaagagtgtcc

SEQ ID NO: 4479410 - DNA, 25 bp, Homo sapien
gaaagtcccttatgctctgtgggtc

SEQ ID NO: 4479411 - DNA, 25 bp, Homo sapien
cctgcgctgggatttgacacatggg

SEQ ID NO: 4479412 - DNA, 25 bp, Homo sapien
ggcctggttccagctactgttctgt

SEQ ID NO: 4479413 - DNA, 25 bp, Homo sapien
ccccgagtcacagtaaagccaacct

SEQ ID NO: 4479414 - DNA, 25 bp, Homo sapien
gagctctggcgtccccgagtcacag

SEQ ID NO: 4479415 - DNA, 25 bp, Homo sapien
tctcaggagctctggcgtccccgag

SEQ ID NO: 4479416 - DNA, 25 bp, Homo sapien
gtaaagccaacctgtcacttggtac

SEQ ID NO: 4479417 - DNA, 25 bp, Homo sapien
ggaatgcttgcatgtcccagaccct

SEQ ID NO: 4479418 - DNA, 25 bp, Homo sapien
aatgcttgcatgtcccagaccctca

SEQ ID NO: 4479419 - DNA, 25 bp, Homo sapien
tggtgggaatgcttgcatgtcccag

SEQ ID NO: 4479420 - DNA, 25 bp, Homo sapien
tgggaatgcttgcatgtcccagacc

SEQ ID NO: 4479421 - DNA, 25 bp, Homo sapien
tcggcagtgccgtggaagttgtact

SEQ ID NO: 4479422 - DNA, 25 bp, Homo sapien
ggtgagcacgtctcctttgcagaag

SEQ ID NO: 4479423 - DNA, 25 bp, Homo sapien
cttggtgacggccacaatggtgagc

SEQ ID NO: 4479424 - DNA, 25 bp, Homo sapien
atacattctgtaccggatggccagg

SEQ ID NO: 4479425 - DNA, 25 bp, Homo sapien
ctgagtttggtacccgccttcacgc

SEQ ID NO: 4479426 - DNA, 25 bp, Homo sapien
tagttggctgggatgatgccctcac

SEQ ID NO: 4479427 - DNA, 25 bp, Homo sapien
tgaggctgagtttggtacccgcctt

SEQ ID NO: 4479428 - DNA, 25 bp, Homo sapien
gccctcccgcttctggacgtagttg

SEQ ID NO: 4479429 - DNA, 25 bp, Homo sapien
catggtggcccaaaggtactgaccc

SEQ ID NO: 4479430 - DNA, 25 bp, Homo sapien
tggtggcccaaaggtactgaccctg

SEQ ID NO: 4479431 - DNA, 25 bp, Homo sapien
gtggcccaaaggtactgaccctggc

SEQ ID NO: 4479432 - DNA, 25 bp, Homo sapien
gtcatggtggcccaaaggtactgac

SEQ ID NO: 4479433 - DNA, 25 bp, Homo sapien
tcaaagtacacctcctcgtcgatgc

SEQ ID NO: 4479434 - DNA, 25 bp, Homo sapien
ccgtgtgatcttgccgtggaaccaa

SEQ ID NO: 4479435 - DNA, 25 bp, Homo sapien
tacatgatgcggtagtgctccacct

SEQ ID NO: 4479436 - DNA, 25 bp, Homo sapien
tcacgcacagcgtgtagtctccggg

SEQ ID NO: 4479437 - DNA, 25 bp, Homo sapien
tgaggcgcgtacagagtccatctgc

SEQ ID NO: 4479438 - DNA, 25 bp, Homo sapien
gcgtacagagtccatctgcgtctga

SEQ ID NO: 4479439 - DNA, 25 bp, Homo sapien
ttaatgaggcgcgtacagagtccat

SEQ ID NO: 4479440 - DNA, 25 bp, Homo sapien
tttggtttaatgaggcgcgtacaga

SEQ ID NO: 4479441 - DNA, 25 bp, Homo sapien
ctggatggggcagtgccaggaagcc

SEQ ID NO: 4479442 - DNA, 25 bp, Homo sapien
ggttctctggaggttcctggatggg

SEQ ID NO: 4479443 - DNA, 25 bp, Homo sapien
gaggttcctggatggggcagtgcca

SEQ ID NO: 4479444 - DNA, 25 bp, Homo sapien
gccaggaagcctgcgtgggaggagg

SEQ ID NO: 4479445 - DNA, 25 bp, Homo sapien
cccccttcccgatggtctgcagcag

SEQ ID NO: 4479446 - DNA, 25 bp, Homo sapien
tcccaagttcggagtccctcagaac

SEQ ID NO: 4479447 - DNA, 25 bp, Homo sapien
tggtcttgttcccaagttcggagtc

SEQ ID NO: 4479448 - DNA, 25 bp, Homo sapien
tgttcccaagttcggagtccctcag

SEQ ID NO: 4479449 - DNA, 25 bp, Homo sapien
ttgttcccaagttcggagtccctca

SEQ ID NO: 4479450 - DNA, 25 bp, Homo sapien
tttgttccctcggtaatcgcccagc

SEQ ID NO: 4479451 - DNA, 25 bp, Homo sapien
tggcgtcgttcttaatgcacttgac

SEQ ID NO: 4479452 - DNA, 25 bp, Homo sapien
gcacttgacggcgactttgttccct

SEQ ID NO: 4479453 - DNA, 25 bp, Homo sapien
ctgggcagtggcgtcgttcttaatg

SEQ ID NO: 4479454 - DNA, 25 bp, Homo sapien
ttctcctccacgatcacgcccagga

SEQ ID NO: 4479455 - DNA, 25 bp, Homo sapien
caccaggttgctatgccgcagttgc

SEQ ID NO: 4479456 - DNA, 25 bp, Homo sapien
catgtactcagtgacgatgtagagc

SEQ ID NO: 4479457 - DNA, 25 bp, Homo sapien
gtgacgatgtagagcccgcccttct

SEQ ID NO: 4479458 - DNA, 25 bp, Homo sapien
agaccgcaggtagtccacaaggctc

SEQ ID NO: 4479459 - DNA, 25 bp, Homo sapien
ccctagaccgcaggtagtccacaag

SEQ ID NO: 4479460 - DNA, 25 bp, Homo sapien
acccctagaccgcaggtagtccaca

SEQ ID NO: 4479461 - DNA, 25 bp, Homo sapien
ctagaccgcaggtagtccacaaggc

SEQ ID NO: 4479462 - DNA, 25 bp, Homo sapien
agcgagaacttgaggagacagtctc

SEQ ID NO: 4479463 - DNA, 25 bp, Homo sapien
cgagaacttgaggagacagtctccg

SEQ ID NO: 4479464 - DNA, 25 bp, Homo sapien
gaggagacagtctccgcccagcact

SEQ ID NO: 4479465 - DNA, 25 bp, Homo sapien
ggagacagtctccgcccagcactga

SEQ ID NO: 4479466 - DNA, 25 bp, Homo sapien
accctacccatccaagaggctgctt

SEQ ID NO: 4479467 - DNA, 25 bp, Homo sapien
ccctcaaaccctacccatccaagag

SEQ ID NO: 4479468 - DNA, 25 bp, Homo sapien
aaaccctacccatccaagaggctgc

SEQ ID NO: 4479469 - DNA, 25 bp, Homo sapien
tcaaaccctacccatccaagaggct

SEQ ID NO: 4479470 - DNA, 25 bp, Homo sapien
cagccaggtctcgatgcacgaaatt

SEQ ID NO: 4479471 - DNA, 25 bp, Homo sapien
gtcctgggtgctggacgcctccttg

SEQ ID NO: 4479472 - DNA, 25 bp, Homo sapien
caggtctcgatgcacgaaattgttg

SEQ ID NO: 4479473 - DNA, 25 bp, Homo sapien
cacgaaattgttgccctccaggtat

SEQ ID NO: 4479474 - DNA, 25 bp, Homo sapien
ttctctctcagggcctcaggggctg

SEQ ID NO: 4479475 - DNA, 25 bp, Homo sapien
cttctctctcagggcctcaggggct

SEQ ID NO: 4479476 - DNA, 25 bp, Homo sapien
tctctctcagggcctcaggggctgt

SEQ ID NO: 4479477 - DNA, 25 bp, Homo sapien
catgtggatggaagaagcagcgtca

SEQ ID NO: 4479478 - DNA, 25 bp, Homo sapien
gccatgtggatggaagaagcagcgt

SEQ ID NO: 4479479 - DNA, 25 bp, Homo sapien
cccacctctgtaggccccaggggag

SEQ ID NO: 4479480 - DNA, 25 bp, Homo sapien
ctgccatgtggatggaagaagcagc

SEQ ID NO: 4479481 - DNA, 25 bp, Homo sapien
ggataaggcactcgcccaaaggagt

SEQ ID NO: 4479482 - DNA, 25 bp, Homo sapien
tagatttcccagagaaggattccga

SEQ ID NO: 4479483 - DNA, 25 bp, Homo sapien
aattcttggataaggcactcgccca

SEQ ID NO: 4479484 - DNA, 25 bp, Homo sapien
cagagaaggattccgaaactccaca

SEQ ID NO: 4479485 - DNA, 25 bp, Homo sapien
ccgtcgggggcatccatcttgtagc

SEQ ID NO: 4479486 - DNA, 25 bp, Homo sapien
cacccgagggacgacgtccttcagg

SEQ ID NO: 4479487 - DNA, 25 bp, Homo sapien
tgacttcatagactgcgggcgggca

SEQ ID NO: 4479488 - DNA, 25 bp, Homo sapien
cagctcgtgggttttgatgtgctca

SEQ ID NO: 4479489 - DNA, 25 bp, Homo sapien
attacaattccatctcacaaggcgg

SEQ ID NO: 4479490 - DNA, 25 bp, Homo sapien
gcaacatggtcaagcgcaaacacgg

SEQ ID NO: 4479491 - DNA, 25 bp, Homo sapien
aatccaagcccctgacagacgtctg

SEQ ID NO: 4479492 - DNA, 25 bp, Homo sapien
taaaactctaagaaggcgagtggcg

SEQ ID NO: 4479493 - DNA, 25 bp, Homo sapien
tgaaggcgcctgaagtctgggcccc

SEQ ID NO: 4479494 - DNA, 25 bp, Homo sapien
cgtgaaggcgcctgaagtctgggcc

SEQ ID NO: 4479495 - DNA, 25 bp, Homo sapien
aggcgcctgaagtctgggccccggg

SEQ ID NO: 4479496 - DNA, 25 bp, Homo sapien
gaaggcgcctgaagtctgggccccg

SEQ ID NO: 4479497 - DNA, 25 bp, Homo sapien
gaaggcagaataagggacctggacc

SEQ ID NO: 4479498 - DNA, 25 bp, Homo sapien
aggacaccccgtctcagggctgtgg

SEQ ID NO: 4479499 - DNA, 25 bp, Homo sapien
ctgcgtagaggaggacaccccgtct

SEQ ID NO: 4479500 - DNA, 25 bp, Homo sapien
gaataagggacctggaccactgacc

SEQ ID NO: 4479501 - DNA, 25 bp, Homo sapien
ccagaagggtattccagccccaggc

SEQ ID NO: 4479502 - DNA, 25 bp, Homo sapien
tccagaagggtattccagccccagg

SEQ ID NO: 4479503 - DNA, 25 bp, Homo sapien
gctccagaagggtattccagcccca

SEQ ID NO: 4479504 - DNA, 25 bp, Homo sapien
cccaggcaatgccagccttgggcct

SEQ ID NO: 4479505 - DNA, 25 bp, Homo sapien
acagcccctccagcactttgaggga

SEQ ID NO: 4479506 - DNA, 25 bp, Homo sapien
ggatggctgtgacagacccactccc

SEQ ID NO: 4479507 - DNA, 25 bp, Homo sapien
ggaccctgggcatagctggtcccca

SEQ ID NO: 4479508 - DNA, 25 bp, Homo sapien
accctggacagaggatggctgtgac

SEQ ID NO: 4479509 - DNA, 25 bp, Homo sapien
gatggagccgggagagtggaggttt

SEQ ID NO: 4479510 - DNA, 25 bp, Homo sapien
ggagccgggagagtggaggtttgtg

SEQ ID NO: 4479511 - DNA, 25 bp, Homo sapien
atggagccgggagagtggaggtttg

SEQ ID NO: 4479512 - DNA, 25 bp, Homo sapien
tggagccgggagagtggaggtttgt

SEQ ID NO: 4479513 - DNA, 25 bp, Homo sapien
ggtagcccccagttctcatggccag

SEQ ID NO: 4479514 - DNA, 25 bp, Homo sapien
ccaggtagcccccagttctcatggc

SEQ ID NO: 4479515 - DNA, 25 bp, Homo sapien
tgaggatgcttccctccaggtagcc

SEQ ID NO: 4479516 - DNA, 25 bp, Homo sapien
gaggatgcttccctccaggtagccc

SEQ ID NO: 4479517 - DNA, 25 bp, Homo sapien
cacgagagagatttgtgtctaaccc

SEQ ID NO: 4479518 - DNA, 25 bp, Homo sapien
cacaggactgcgatgaaagaatgca

SEQ ID NO: 4479519 - DNA, 25 bp, Homo sapien
aagatgtgaaggtgagaaccggccc

SEQ ID NO: 4479520 - DNA, 25 bp, Homo sapien
caagaaggcccaagactctaggctg

SEQ ID NO: 4479521 - DNA, 25 bp, Homo sapien
ctcatggatggcgtcagccgcactt

SEQ ID NO: 4479522 - DNA, 25 bp, Homo sapien
tcaccctcatctgcacctctacttc

SEQ ID NO: 4479523 - DNA, 25 bp, Homo sapien
aggccctgctccacacggcgccact

SEQ ID NO: 4479524 - DNA, 25 bp, Homo sapien
ggcgccactccggttcctcatggat

SEQ ID NO: 4479525 - DNA, 25 bp, Homo sapien
gtcaaagaagatcccgatgccgtcc

SEQ ID NO: 4479526 - DNA, 25 bp, Homo sapien
aaggacagagcctacatggcccctg

SEQ ID NO: 4479527 - DNA, 25 bp, Homo sapien
ctgagtatcctctgccggagagtca

SEQ ID NO: 4479528 - DNA, 25 bp, Homo sapien
tctgccggagagtcaaagaagatcc

SEQ ID NO: 4479529 - DNA, 25 bp, Homo sapien
ggatgtgcccgtcgctggccagcac

SEQ ID NO: 4479530 - DNA, 25 bp, Homo sapien
tcgctggccagcacacggatggcag

SEQ ID NO: 4479531 - DNA, 25 bp, Homo sapien
tcagaggggatgtgcccgtcgctgg

SEQ ID NO: 4479532 - DNA, 25 bp, Homo sapien
ccgtcgctggccagcacacggatgg

SEQ ID NO: 4479533 - DNA, 25 bp, Homo sapien
ccagtaggtgatccgtgctctgaag

SEQ ID NO: 4479534 - DNA, 25 bp, Homo sapien
ctctgcccccagtaggtgatccgtg

SEQ ID NO: 4479535 - DNA, 25 bp, Homo sapien
ccccagtaggtgatccgtgctctga

SEQ ID NO: 4479536 - DNA, 25 bp, Homo sapien
gcccccagtaggtgatccgtgctct

SEQ ID NO: 4479537 - DNA, 25 bp, Homo sapien
tggatcactgggagtgaggccactg

SEQ ID NO: 4479538 - DNA, 25 bp, Homo sapien
ctggatcactgggagtgaggccact

SEQ ID NO: 4479539 - DNA, 25 bp, Homo sapien
cagaagcccaggtcatgtggtgaag

SEQ ID NO: 4479540 - DNA, 25 bp, Homo sapien
gacttgcaagtctcaaggcagacat

SEQ ID NO: 4479541 - DNA, 25 bp, Homo sapien
tttgggccaccgtctgatgcttgtc

SEQ ID NO: 4479542 - DNA, 25 bp, Homo sapien
tggtagtagcaactgcacagtggcc

SEQ ID NO: 4479543 - DNA, 25 bp, Homo sapien
cactcaggctgaaggtcaggaagga

SEQ ID NO: 4479544 - DNA, 25 bp, Homo sapien
ctctgggctgggctcactcaggctg

SEQ ID NO: 4479545 - DNA, 25 bp, Homo sapien
gctcactcaggctgaaggtcaggaa

SEQ ID NO: 4479546 - DNA, 25 bp, Homo sapien
gctgggctcactcaggctgaaggtc

SEQ ID NO: 4479547 - DNA, 25 bp, Homo sapien
tggcactgatcgctctgaactgtaa

SEQ ID NO: 4479548 - DNA, 25 bp, Homo sapien
caaacccatgggagatccagaagca

SEQ ID NO: 4479549 - DNA, 25 bp, Homo sapien
gaactgtaatgtcacagcctgagcc

SEQ ID NO: 4479550 - DNA, 25 bp, Homo sapien
tgccctgcacaaggtctggcctgag

SEQ ID NO: 4479551 - DNA, 25 bp, Homo sapien
cagctgcctcgccaggcggagctgc

SEQ ID NO: 4479552 - DNA, 25 bp, Homo sapien
tttggagttacatcctccctggtgc

SEQ ID NO: 4479553 - DNA, 25 bp, Homo sapien
tggagttacatcctccctggtgccc

SEQ ID NO: 4479554 - DNA, 25 bp, Homo sapien
ttttggagttacatcctccctggtg

SEQ ID NO: 4479555 - DNA, 25 bp, Homo sapien
gattttggagttacatcctccctgg

SEQ ID NO: 4479556 - DNA, 25 bp, Homo sapien
tctcctccaggtcaaagagcctttc

SEQ ID NO: 4479557 - DNA, 25 bp, Homo sapien
agcctccgtcaggcctggcttggcc

SEQ ID NO: 4479558 - DNA, 25 bp, Homo sapien
atccggcggtgtctgcccagcgtct

SEQ ID NO: 4479559 - DNA, 25 bp, Homo sapien
caggatccggcggtgtctgcccagc

SEQ ID NO: 4479560 - DNA, 25 bp, Homo sapien
gctgactacagtgcttgctcctctt

SEQ ID NO: 4479561 - DNA, 25 bp, Homo sapien
tttcaggcccgcaggtggagccttg

SEQ ID NO: 4479562 - DNA, 25 bp, Homo sapien
tgctcctctttcaggcccgcaggtg

SEQ ID NO: 4479563 - DNA, 25 bp, Homo sapien
ctagttgctgactacagtgcttgct

SEQ ID NO: 4479564 - DNA, 25 bp, Homo sapien
cttattgagtgacatggagaggtgg

SEQ ID NO: 4479565 - DNA, 25 bp, Homo sapien
gatggaatctggcaggaagcatcca

SEQ ID NO: 4479566 - DNA, 25 bp, Homo sapien
ttgagtgacatggagaggtggccac

SEQ ID NO: 4479567 - DNA, 25 bp, Homo sapien
ggtggatggaatctggcaggaagca

SEQ ID NO: 4479568 - DNA, 25 bp, Homo sapien
gtgatctgcccgatggtgtcagtct

SEQ ID NO: 4479569 - DNA, 25 bp, Homo sapien
tgatctgcccgatggtgtcagtctt

SEQ ID NO: 4479570 - DNA, 25 bp, Homo sapien
ttgtgatctgcccgatggtgtcagt

SEQ ID NO: 4479571 - DNA, 25 bp, Homo sapien
tgtgatctgcccgatggtgtcagtc

SEQ ID NO: 4479572 - DNA, 25 bp, Homo sapien
agcagagtccactgtccatggagca

SEQ ID NO: 4479573 - DNA, 25 bp, Homo sapien
ggcttctgcagccatgcggacagct

SEQ ID NO: 4479574 - DNA, 25 bp, Homo sapien
ctcaatgcccacaggcaggtaggag

SEQ ID NO: 4479575 - DNA, 25 bp, Homo sapien
gctctaagaaatgatgctcaatgcc

SEQ ID NO: 4479576 - DNA, 25 bp, Homo sapien
tgcagccatgcggacagctgcatcc

SEQ ID NO: 4479577 - DNA, 25 bp, Homo sapien
gaaaagatgagatgtgtggtggcac

SEQ ID NO: 4479578 - DNA, 25 bp, Homo sapien
cacagatgtgcttgccagcagtcct

SEQ ID NO: 4479579 - DNA, 25 bp, Homo sapien
cacagacactgacgcaggcacagat

SEQ ID NO: 4479580 - DNA, 25 bp, Homo sapien
tggtggcacgtatgcacggacacac

SEQ ID NO: 4479581 - DNA, 25 bp, Homo sapien
ccctctggtcattggatattggatc

SEQ ID NO: 4479582 - DNA, 25 bp, Homo sapien
cctctggtcattggatattggatcg

SEQ ID NO: 4479583 - DNA, 25 bp, Homo sapien
tcccctctggtcattggatattgga

SEQ ID NO: 4479584 - DNA, 25 bp, Homo sapien
ctggtcattggatattggatcgagg

SEQ ID NO: 4479585 - DNA, 25 bp, Homo sapien
ggacctggaatctaggccatgtgca

SEQ ID NO: 4479586 - DNA, 25 bp, Homo sapien
cactggactcagtgatcttggacac

SEQ ID NO: 4479587 - DNA, 25 bp, Homo sapien
catgtgcatgctccgtttcctttcc

SEQ ID NO: 4479588 - DNA, 25 bp, Homo sapien
tagcttcttacccagaaggagtggg

SEQ ID NO: 4479589 - DNA, 25 bp, Homo sapien
cccttgggggctggccaggtgggcg

SEQ ID NO: 4479590 - DNA, 25 bp, Homo sapien
caggtgggcggggggccttggctgc

SEQ ID NO: 4479591 - DNA, 25 bp, Homo sapien
ggcggggggccttggctgctgcctt

SEQ ID NO: 4479592 - DNA, 25 bp, Homo sapien
ctgcaggcacgaggaggcccttggg

SEQ ID NO: 4479593 - DNA, 25 bp, Homo sapien
tgcacgtagccgaagaagcctacag

SEQ ID NO: 4479594 - DNA, 25 bp, Homo sapien
tgaagtgcacgtagccgaagaagcc

SEQ ID NO: 4479595 - DNA, 25 bp, Homo sapien
gccgaagaagcctacagtctgaatg

SEQ ID NO: 4479596 - DNA, 25 bp, Homo sapien
tacagtctgaatgaggaggtagaac

SEQ ID NO: 4479597 - DNA, 25 bp, Homo sapien
taaggtctgtcctagtggctccagg

SEQ ID NO: 4479598 - DNA, 25 bp, Homo sapien
catcatggcattgacgacacagggt

SEQ ID NO: 4479599 - DNA, 25 bp, Homo sapien
ttatagctgagaaccaagagatgcc

SEQ ID NO: 4479600 - DNA, 25 bp, Homo sapien
gttagacctgtgtgagtgagctccg

SEQ ID NO: 4479601 - DNA, 25 bp, Homo sapien
cagggagaggctgcctcctcagaat

SEQ ID NO: 4479602 - DNA, 25 bp, Homo sapien
gaagaccagcatatcacagcatggg

SEQ ID NO: 4479603 - DNA, 25 bp, Homo sapien
acctttaacgaggtgggagcatgcc

SEQ ID NO: 4479604 - DNA, 25 bp, Homo sapien
ggcacccagacggagaggatactga

SEQ ID NO: 4479605 - DNA, 25 bp, Homo sapien
catgccgaaagctcaggtgtgcgtg

SEQ ID NO: 4479606 - DNA, 25 bp, Homo sapien
catagtcgagggttcaaagcccgtg

SEQ ID NO: 4479607 - DNA, 25 bp, Homo sapien
cactgctctctgttatgggtgagtt

SEQ ID NO: 4479608 - DNA, 25 bp, Homo sapien
cttttggaggttaagccaggccttg

SEQ ID NO: 4479609 - DNA, 25 bp, Homo sapien
ttggagcgcactcccagccaggtac

SEQ ID NO: 4479610 - DNA, 25 bp, Homo sapien
gaatcccagttatggttccacgagt

SEQ ID NO: 4479611 - DNA, 25 bp, Homo sapien
ctctcctgggccactaataactagg

SEQ ID NO: 4479612 - DNA, 25 bp, Homo sapien
gggttgagctcatacactcccggaa

SEQ ID NO: 4479613 - DNA, 25 bp, Homo sapien
cacgagttggcctctcagggttgct

SEQ ID NO: 4479614 - DNA, 25 bp, Homo sapien
tcagcactaggtttcgcggacagct

SEQ ID NO: 4479615 - DNA, 25 bp, Homo sapien
cagcactaggtttcgcggacagctc

SEQ ID NO: 4479616 - DNA, 25 bp, Homo sapien
cactaggtttcgcggacagctcccg

SEQ ID NO: 4479617 - DNA, 25 bp, Homo sapien
agcactaggtttcgcggacagctcc

SEQ ID NO: 4479618 - DNA, 25 bp, Homo sapien
acgcgccaggcaccgggcacgtccg

SEQ ID NO: 4479619 - DNA, 25 bp, Homo sapien
ccacgcgccaggcaccgggcacgtc

SEQ ID NO: 4479620 - DNA, 25 bp, Homo sapien
cgcgccaggcaccgggcacgtccgc

SEQ ID NO: 4479621 - DNA, 25 bp, Homo sapien
cgccaggcaccgggcacgtccgcgc

SEQ ID NO: 4479622 - DNA, 25 bp, Homo sapien
gagttgcttctgatactcctcgtac

SEQ ID NO: 4479623 - DNA, 25 bp, Homo sapien
cgcccaccatggtcttcaccatgaa

SEQ ID NO: 4479624 - DNA, 25 bp, Homo sapien
agtgaggttcttcagctggccgccc

SEQ ID NO: 4479625 - DNA, 25 bp, Homo sapien
tgccctgagcttcggctgccgactt

SEQ ID NO: 4479626 - DNA, 25 bp, Homo sapien
gccggtatttgtctcggaagtggct

SEQ ID NO: 4479627 - DNA, 25 bp, Homo sapien
tggctccgcagtgtggcccgctctg

SEQ ID NO: 4479628 - DNA, 25 bp, Homo sapien
tcggaagtggctccgcagtgtggcc

SEQ ID NO: 4479629 - DNA, 25 bp, Homo sapien
tgccttcctctgtgtgaactgtgca

SEQ ID NO: 4479630 - DNA, 25 bp, Homo sapien
aagggtgtaaccaaaaatagtgatg

SEQ ID NO: 4479631 - DNA, 25 bp, Homo sapien
actcttgttatgcttaagggtgtaa

SEQ ID NO: 4479632 - DNA, 25 bp, Homo sapien
tgatgggtaccatttatcaaacatc

SEQ ID NO: 4479633 - DNA, 25 bp, Homo sapien
tattacatggcagacgttgagctgg

SEQ ID NO: 4479634 - DNA, 25 bp, Homo sapien
attgcttgagatcccccagtgtggc

SEQ ID NO: 4479635 - DNA, 25 bp, Homo sapien
acctgccatctggatctggctctca

SEQ ID NO: 4479636 - DNA, 25 bp, Homo sapien
gtgacacttctcagctgattgcttg

SEQ ID NO: 4479637 - DNA, 25 bp, Homo sapien
cttgtccttgagtgagcccaggttc

SEQ ID NO: 4479638 - DNA, 25 bp, Homo sapien
tactcccagcggagaggaagaaacc

SEQ ID NO: 4479639 - DNA, 25 bp, Homo sapien
ttgacacactcttagccctcatggg

SEQ ID NO: 4479640 - DNA, 25 bp, Homo sapien
tattcctacaatcttgggaggcctc

SEQ ID NO: 4479641 - DNA, 25 bp, Homo sapien
tatgggtccctggaagttgacacac

SEQ ID NO: 4479642 - DNA, 25 bp, Homo sapien
tgccagcttcatccttggcactctg

SEQ ID NO: 4479643 - DNA, 25 bp, Homo sapien
cctctcacacagcatcgctccggct

SEQ ID NO: 4479644 - DNA, 25 bp, Homo sapien
cagtgccagcttcatccttggcact

SEQ ID NO: 4479645 - DNA, 25 bp, Homo sapien
acacagcatcgctccggctcccaga

SEQ ID NO: 4479646 - DNA, 25 bp, Homo sapien
ctgagctaagagaggagattccagc

SEQ ID NO: 4479647 - DNA, 25 bp, Homo sapien
tggaatccagagagcgttctacagg

SEQ ID NO: 4479648 - DNA, 25 bp, Homo sapien
taagagaggagattccagctatgga

SEQ ID NO: 4479649 - DNA, 25 bp, Homo sapien
cagctatggaatccagagagcgttc

SEQ ID NO: 4479650 - DNA, 25 bp, Homo sapien
ttttgcacatcttccgtctctaggg

SEQ ID NO: 4479651 - DNA, 25 bp, Homo sapien
gagctggagacacttctactcctag

SEQ ID NO: 4479652 - DNA, 25 bp, Homo sapien
cagacctatttcataagccccagac

SEQ ID NO: 4479653 - DNA, 25 bp, Homo sapien
catcttccccacataatgaggctgc

SEQ ID NO: 4479654 - DNA, 25 bp, Homo sapien
ctgatgctgcggaggcagcccatga

SEQ ID NO: 4479655 - DNA, 25 bp, Homo sapien
gcagcccatgacccccctacccggc

SEQ ID NO: 4479656 - DNA, 25 bp, Homo sapien
gatgctgcggaggcagcccatgacc

SEQ ID NO: 4479657 - DNA, 25 bp, Homo sapien
cagcccatgacccccctacccggct

SEQ ID NO: 4479658 - DNA, 25 bp, Homo sapien
cagaagagctccagttgggccaagt

SEQ ID NO: 4479659 - DNA, 25 bp, Homo sapien
gagtagtagttgatgtattcagggc

SEQ ID NO: 4479660 - DNA, 25 bp, Homo sapien
tagttgatgtattcagggctcgagg

SEQ ID NO: 4479661 - DNA, 25 bp, Homo sapien
aacagcttgggaagagagtagtagt

SEQ ID NO: 4479662 - DNA, 25 bp, Homo sapien
gagcactcaggagggttccttggtc

SEQ ID NO: 4479663 - DNA, 25 bp, Homo sapien
ccacagcatgggcacttatgaggac

SEQ ID NO: 4479664 - DNA, 25 bp, Homo sapien
taatccctcaagcatgaaagctgga

SEQ ID NO: 4479665 - DNA, 25 bp, Homo sapien
ttggagacagtctgacccagtgccc

SEQ ID NO: 4479666 - DNA, 25 bp, Homo sapien
taggagtccacccttaaaaccagca

SEQ ID NO: 4479667 - DNA, 25 bp, Homo sapien
cactgtgatgggacacgtaggagtc

SEQ ID NO: 4479668 - DNA, 25 bp, Homo sapien
acaaaactagcctccggctctgggc

SEQ ID NO: 4479669 - DNA, 25 bp, Homo sapien
actgaatgatactggcagcggctgg

SEQ ID NO: 4479670 - DNA, 25 bp, Homo sapien
tgggaataagcctctcacaggttct

SEQ ID NO: 4479671 - DNA, 25 bp, Homo sapien
gaagttctcttcgtcctgtgcacac

SEQ ID NO: 4479672 - DNA, 25 bp, Homo sapien
cctgagaaacggattaatagccctt

SEQ ID NO: 4479673 - DNA, 25 bp, Homo sapien
tagcgtccagcgtcttctaggaggg

SEQ ID NO: 4479674 - DNA, 25 bp, Homo sapien
agacaggttggcctctctaaggtgg

SEQ ID NO: 4479675 - DNA, 25 bp, Homo sapien
ggactccttgatggctgtccctgcc

SEQ ID NO: 4479676 - DNA, 25 bp, Homo sapien
tctggtacctaagacactctgtggg

SEQ ID NO: 4479677 - DNA, 25 bp, Homo sapien
ttctctccaggccgtggtgtctgca

SEQ ID NO: 4479678 - DNA, 25 bp, Homo sapien
gcttagtggcgttgtgggccttcaa

SEQ ID NO: 4479679 - DNA, 25 bp, Homo sapien
tcaggtatcaggtcagagagcacca

SEQ ID NO: 4479680 - DNA, 25 bp, Homo sapien
gagagcaccaaggtcaattgtggct

SEQ ID NO: 4479681 - DNA, 25 bp, Homo sapien
gatgcgtaccaaaacatacctgtgg

SEQ ID NO: 4479682 - DNA, 25 bp, Homo sapien
accaggattaagcacgtatgccttt

SEQ ID NO: 4479683 - DNA, 25 bp, Homo sapien
gctcgccccctgcaccaggattaag

SEQ ID NO: 4479684 - DNA, 25 bp, Homo sapien
caggattaagcacgtatgcctttcc

SEQ ID NO: 4479685 - DNA, 25 bp, Homo sapien
gattaagcacgtatgcctttcccgg

SEQ ID NO: 4479686 - DNA, 25 bp, Homo sapien
catctttccgcggaatgccaggagc

SEQ ID NO: 4479687 - DNA, 25 bp, Homo sapien
ggagcggactcaacctggccgataa

SEQ ID NO: 4479688 - DNA, 25 bp, Homo sapien
tttccgcggaatgccaggagcggac

SEQ ID NO: 4479689 - DNA, 25 bp, Homo sapien
ataatgccgggagtcgtccccagga

SEQ ID NO: 4479690 - DNA, 25 bp, Homo sapien
tcccgggaaaccaggcaagagctgg

SEQ ID NO: 4479691 - DNA, 25 bp, Homo sapien
ggagcagaaggtacctatcccacgg

SEQ ID NO: 4479692 - DNA, 25 bp, Homo sapien
tgcaggcctcgatgttcccaactgt

SEQ ID NO: 4479693 - DNA, 25 bp, Homo sapien
tcagatgggcagcagtaaggacctt

SEQ ID NO: 4479694 - DNA, 25 bp, Homo sapien
ctgcaccgcacaggaaagtgggaat

SEQ ID NO: 4479695 - DNA, 25 bp, Homo sapien
tgcaccgcacaggaaagtgggaata

SEQ ID NO: 4479696 - DNA, 25 bp, Homo sapien
tgtcctctgcgatctgggccagtgg

SEQ ID NO: 4479697 - DNA, 25 bp, Homo sapien
gcgccacttcgctgttggaacccat

SEQ ID NO: 4479698 - DNA, 25 bp, Homo sapien
ggccagtggatcactgctggccaac

SEQ ID NO: 4479699 - DNA, 25 bp, Homo sapien
gcataaggcttgtcctctgcgatct

SEQ ID NO: 4479700 - DNA, 25 bp, Homo sapien
agtgggctgaaatacagcccggggc

SEQ ID NO: 4479701 - DNA, 25 bp, Homo sapien
ctgcgggtaaagtgggctgaaatac

SEQ ID NO: 4479702 - DNA, 25 bp, Homo sapien
tgcgggtaaagtgggctgaaataca

SEQ ID NO: 4479703 - DNA, 25 bp, Homo sapien
gggctgaaatacagcccggggctca

SEQ ID NO: 4479704 - DNA, 25 bp, Homo sapien
gactcggcctctagccatctatgaa

SEQ ID NO: 4479705 - DNA, 25 bp, Homo sapien
tgaagacttggactagttatttccc

SEQ ID NO: 4479706 - DNA, 25 bp, Homo sapien
tccaaagaggagaatgacatctgca

SEQ ID NO: 4479707 - DNA, 25 bp, Homo sapien
gacatctgcactgtcaaggtagcag

SEQ ID NO: 4479708 - DNA, 25 bp, Homo sapien
gggcaggttgccattaaaggtgtcc

SEQ ID NO: 4479709 - DNA, 25 bp, Homo sapien
gatgcggttgtcaaggatcttggca

SEQ ID NO: 4479710 - DNA, 25 bp, Homo sapien
tgagagcactttgaagaggaagggc

SEQ ID NO: 4479711 - DNA, 25 bp, Homo sapien
ttgagcccaagctgtcctggttctc

SEQ ID NO: 4479712 - DNA, 25 bp, Homo sapien
catctctggcttgtggttggcatcg

SEQ ID NO: 4479713 - DNA, 25 bp, Homo sapien
tctttagaaaggttacaatctcctc

SEQ ID NO: 4479714 - DNA, 25 bp, Homo sapien
tcggggtagtgctgcggagcctgga

SEQ ID NO: 4479715 - DNA, 25 bp, Homo sapien
aactggccggaagccacacaagccc

SEQ ID NO: 4479716 - DNA, 25 bp, Homo sapien
ccacagcctgggagtcatggctcat

SEQ ID NO: 4479717 - DNA, 25 bp, Homo sapien
aacaggttgagctgttccaccacca

SEQ ID NO: 4479718 - DNA, 25 bp, Homo sapien
agtcatggctcatggtctgcttcag

SEQ ID NO: 4479719 - DNA, 25 bp, Homo sapien
tcactcttcatcaggtgggagaaac

SEQ ID NO: 4479720 - DNA, 25 bp, Homo sapien
tgggaagcagcactcaactaagaag

SEQ ID NO: 4479721 - DNA, 25 bp, Homo sapien
tagcacaaggttgggcacacagaag

SEQ ID NO: 4479722 - DNA, 25 bp, Homo sapien
taagagtcctctatgccagtctgcc

SEQ ID NO: 4479723 - DNA, 25 bp, Homo sapien
tacaagtccatccatggagggcagc

SEQ ID NO: 4479724 - DNA, 25 bp, Homo sapien
gagcatgaggcagaatgcgctgagg

SEQ ID NO: 4479725 - DNA, 25 bp, Homo sapien
ctatgtctcagagaatctctctcgg

SEQ ID NO: 4479726 - DNA, 25 bp, Homo sapien
cagaatgcgctgagggccaaaatgt

SEQ ID NO: 4479727 - DNA, 25 bp, Homo sapien
atctctctcggtctgctccagagag

SEQ ID NO: 4479728 - DNA, 25 bp, Homo sapien
ggtcacttagggggatactcagtgc

SEQ ID NO: 4479729 - DNA, 25 bp, Homo sapien
tcacttagggggatactcagtgctg

SEQ ID NO: 4479730 - DNA, 25 bp, Homo sapien
aaggtcacttagggggatactcagt

SEQ ID NO: 4479731 - DNA, 25 bp, Homo sapien
caaggtcacttagggggatactcag

SEQ ID NO: 4479732 - DNA, 25 bp, Homo sapien
gcagctgtagcaaaagctccccaaa

SEQ ID NO: 4479733 - DNA, 25 bp, Homo sapien
ctttcaggtaggcatggggtacgtt

SEQ ID NO: 4479734 - DNA, 25 bp, Homo sapien
ggcaaagcagccgatatcacctggg

SEQ ID NO: 4479735 - DNA, 25 bp, Homo sapien
catggggtacgttggcctccagaaa

SEQ ID NO: 4479736 - DNA, 25 bp, Homo sapien
tccctggtaggtaggacagacatac

SEQ ID NO: 4479737 - DNA, 25 bp, Homo sapien
ccagaatcctgtgcatgaggcatgt

SEQ ID NO: 4479738 - DNA, 25 bp, Homo sapien
aaatcagagtagcatggcatcacag

SEQ ID NO: 4479739 - DNA, 25 bp, Homo sapien
tgtgtggataagcagccaacagtcg

SEQ ID NO: 4479740 - DNA, 25 bp, Homo sapien
acagggttggcacatcaatgaactt

SEQ ID NO: 4479741 - DNA, 25 bp, Homo sapien
tgggtgtcaggccagcacgaactgt

SEQ ID NO: 4479742 - DNA, 25 bp, Homo sapien
tgttgtctgaacacgccatgcactc

SEQ ID NO: 4479743 - DNA, 25 bp, Homo sapien
gggttggcacatcaatgaacttggg

SEQ ID NO: 4479744 - DNA, 25 bp, Homo sapien
ctcatcagctcatgggcccaggaca

SEQ ID NO: 4479745 - DNA, 25 bp, Homo sapien
tcgcacaacccaggctcagtcagca

SEQ ID NO: 4479746 - DNA, 25 bp, Homo sapien
ggtgtcctccacatcgtgacccttg

SEQ ID NO: 4479747 - DNA, 25 bp, Homo sapien
cctccgccaagtgggcttgacagga

SEQ ID NO: 4479748 - DNA, 25 bp, Homo sapien
ttacagcagacagcaggcacggaat

SEQ ID NO: 4479749 - DNA, 25 bp, Homo sapien
ggtccttcggctcagtaagcttcag

SEQ ID NO: 4479750 - DNA, 25 bp, Homo sapien
cacgccaccacgttgcagagggatt

SEQ ID NO: 4479751 - DNA, 25 bp, Homo sapien
gtgtgctggctattactgtcccctg

SEQ ID NO: 4479752 - DNA, 25 bp, Homo sapien
ccataggctggaacagagttggcaa

SEQ ID NO: 4479753 - DNA, 25 bp, Homo sapien
gcagctgaggaaatgggcagtccca

SEQ ID NO: 4479754 - DNA, 25 bp, Homo sapien
gaagacaaagggagtatcagacccc

SEQ ID NO: 4479755 - DNA, 25 bp, Homo sapien
taaacagcgttagtctacaggccta

SEQ ID NO: 4479756 - DNA, 25 bp, Homo sapien
gttttgcaggccgtacagtctagtg

SEQ ID NO: 4479757 - DNA, 25 bp, Homo sapien
cagttgaaaaacaggagccgggcca

SEQ ID NO: 4479758 - DNA, 25 bp, Homo sapien
aaaaacaggagcgaagagtcttgca

SEQ ID NO: 4479759 - DNA, 25 bp, Homo sapien
cataccggtgttctggagtgtagcc

SEQ ID NO: 4479760 - DNA, 25 bp, Homo sapien
gcaacacaggtagagggacccagtg

SEQ ID NO: 4479761 - DNA, 25 bp, Homo sapien
gaactcttggcttgcacttctacag

SEQ ID NO: 4479762 - DNA, 25 bp, Homo sapien
tcccagcaggagtggtaccatatgg

SEQ ID NO: 4479763 - DNA, 25 bp, Homo sapien
aaaataccaccaatgtgcccagggc

SEQ ID NO: 4479764 - DNA, 25 bp, Homo sapien
cagtcctcccacatggtgagctttg

SEQ ID NO: 4479765 - DNA, 25 bp, Homo sapien
gcttaactcagaaccatggtgagcg

SEQ ID NO: 4479766 - DNA, 25 bp, Homo sapien
taggttctacatgggaaagtatcca

SEQ ID NO: 4479767 - DNA, 25 bp, Homo sapien
gacagggttcccagcccaatagtcg

SEQ ID NO: 4479768 - DNA, 25 bp, Homo sapien
ctaagatggtttgcaggcttgacct

SEQ ID NO: 4479769 - DNA, 25 bp, Homo sapien
tggtttgcccttccctagttagaga

SEQ ID NO: 4479770 - DNA, 25 bp, Homo sapien
aatcagtccaccagtgtagagggcc

SEQ ID NO: 4479771 - DNA, 25 bp, Homo sapien
cttaatgatacagcaggatcctggc

SEQ ID NO: 4479772 - DNA, 25 bp, Homo sapien
tgttccatctatgaaaactcaggct

SEQ ID NO: 4479773 - DNA, 25 bp, Homo sapien
gaatggttccattggtccttgacct

SEQ ID NO: 4479774 - DNA, 25 bp, Homo sapien
ggaacccttttgatagatcccagct

SEQ ID NO: 4479775 - DNA, 25 bp, Homo sapien
taattgggtactgaccacctccaag

SEQ ID NO: 4479776 - DNA, 25 bp, Homo sapien
tttaaggccgagctagcgattcccc

SEQ ID NO: 4479777 - DNA, 25 bp, Homo sapien
taacttccagagaagcaccgggacc

SEQ ID NO: 4479778 - DNA, 25 bp, Homo sapien
tggccaaggccgttctgcggagaaa

SEQ ID NO: 4479779 - DNA, 25 bp, Homo sapien
tcaaaatccgttcggaaagagcggc

SEQ ID NO: 4479780 - DNA, 25 bp, Homo sapien
caatcaggcatttctcggttagcga

SEQ ID NO: 4479781 - DNA, 25 bp, Homo sapien
aaggtgacattgagcctccgggcac

SEQ ID NO: 4479782 - DNA, 25 bp, Homo sapien
ggtccgaggacacaatatacttccg

SEQ ID NO: 4479783 - DNA, 25 bp, Homo sapien
tatacttccgtatgggacacacgat

SEQ ID NO: 4479784 - DNA, 25 bp, Homo sapien
gtcctcagcccgcgcgccgccatcg

SEQ ID NO: 4479785 - DNA, 25 bp, Homo sapien
ctctgtcctcagcccgcgcgccgcc

SEQ ID NO: 4479786 - DNA, 25 bp, Homo sapien
tcagcccgcgcgccgccatcgccgt

SEQ ID NO: 4479787 - DNA, 25 bp, Homo sapien
ctgtcctcagcccgcgcgccgccat

SEQ ID NO: 4479788 - DNA, 25 bp, Homo sapien
acatagagaaacaccgtgtctgcta

SEQ ID NO: 4479789 - DNA, 25 bp, Homo sapien
ttgtggtgaaccgaggtcgagtcat

SEQ ID NO: 4479790 - DNA, 25 bp, Homo sapien
ggtgaaccgaggtcgagtcattgca

SEQ ID NO: 4479791 - DNA, 25 bp, Homo sapien
catagagaaacaccgtgtctgctac

SEQ ID NO: 4479792 - DNA, 25 bp, Homo sapien
gttatgtagccacatttacagtggt

SEQ ID NO: 4479793 - DNA, 25 bp, Homo sapien
cagcctgggttggtgtcgcaacctg

SEQ ID NO: 4479794 - DNA, 25 bp, Homo sapien
acactgttaaataactgccacagcc

SEQ ID NO: 4479795 - DNA, 25 bp, Homo sapien
aatggtttgaacatgtttctggaga

SEQ ID NO: 4479796 - DNA, 25 bp, Homo sapien
tcagcgtacttaagaacgtgcccgg

SEQ ID NO: 4479797 - DNA, 25 bp, Homo sapien
taaagccacccagcattcacgaaga

SEQ ID NO: 4479798 - DNA, 25 bp, Homo sapien
taattgctgcttatgcccgtgttgc

SEQ ID NO: 4479799 - DNA, 25 bp, Homo sapien
tcagacggcctgaaactccggactg

SEQ ID NO: 4479800 - DNA, 25 bp, Homo sapien
aagatccggaacctgatggccttcg

SEQ ID NO: 4479801 - DNA, 25 bp, Homo sapien
taaggtgcgctccgaagaggcgcca

SEQ ID NO: 4479802 - DNA, 25 bp, Homo sapien
ggcgcggtgcacatgcgggtcaagg

SEQ ID NO: 4479803 - DNA, 25 bp, Homo sapien
catggagaacttccgtaaggtgcgc

SEQ ID NO: 4479804 - DNA, 25 bp, Homo sapien
tgaagcagtgtttgcacggcaagcg

SEQ ID NO: 4479805 - DNA, 25 bp, Homo sapien
ctcggataccggatttgaagcagtg

SEQ ID NO: 4479806 - DNA, 25 bp, Homo sapien
cagactcgccaggaaaggctagtga

SEQ ID NO: 4479807 - DNA, 25 bp, Homo sapien
tgcaaatgggaagggctcggatacc

SEQ ID NO: 4479808 - DNA, 25 bp, Homo sapien
gccaatgttgcctgagcgaattccg

SEQ ID NO: 4479809 - DNA, 25 bp, Homo sapien
ttaaaacctgcgttcacctagcctc

SEQ ID NO: 4479810 - DNA, 25 bp, Homo sapien
ccacgttggcaaggcatcgtgcctg

SEQ ID NO: 4479811 - DNA, 25 bp, Homo sapien
ctaaagcgcgcagctctaagggtgg

SEQ ID NO: 4479812 - DNA, 25 bp, Homo sapien
tctcagtcctgactgcgtagggcgg

SEQ ID NO: 4479813 - DNA, 25 bp, Homo sapien
gtcccctggctaggaccagatctgc

SEQ ID NO: 4479814 - DNA, 25 bp, Homo sapien
ccagcaatccaaggcactgtcatgc

SEQ ID NO: 4479815 - DNA, 25 bp, Homo sapien
ttttgaacagcagggactgagagct

SEQ ID NO: 4479816 - DNA, 25 bp, Homo sapien
ttcagctgtaattagcgaccccgcg

SEQ ID NO: 4479817 - DNA, 25 bp, Homo sapien
acattgcggtgccaaggtccagtcg

SEQ ID NO: 4479818 - DNA, 25 bp, Homo sapien
gaatgcgagtcttctacatccgaca

SEQ ID NO: 4479819 - DNA, 25 bp, Homo sapien
gggtcagccattcacacattgcggt

SEQ ID NO: 4479820 - DNA, 25 bp, Homo sapien
cagggtcagtagctcatttatgcaa

SEQ ID NO: 4479821 - DNA, 25 bp, Homo sapien
aacttcatgcggtaacaagaggtca

SEQ ID NO: 4479822 - DNA, 25 bp, Homo sapien
cactctgtgaggtagattactataa

SEQ ID NO: 4479823 - DNA, 25 bp, Homo sapien
taatagaagctgaagcttcagggtc

SEQ ID NO: 4479824 - DNA, 25 bp, Homo sapien
atttcctgagaacttagcagccaag

SEQ ID NO: 4479825 - DNA, 25 bp, Homo sapien
catttcctgagaacttagcagccaa

SEQ ID NO: 4479826 - DNA, 25 bp, Homo sapien
gagagctctgatacccataatccca

SEQ ID NO: 4479827 - DNA, 25 bp, Homo sapien
caatggtaagtctcctgggtcctgt

SEQ ID NO: 4479828 - DNA, 25 bp, Homo sapien
cagggcctgggactcagtctgacag

SEQ ID NO: 4479829 - DNA, 25 bp, Homo sapien
gcaatacctagagctgagccatggt

SEQ ID NO: 4479830 - DNA, 25 bp, Homo sapien
gacacctgcaggctgaaagagccat

SEQ ID NO: 4479831 - DNA, 25 bp, Homo sapien
ggctgacacctgcaggctgaaagag

SEQ ID NO: 4479832 - DNA, 25 bp, Homo sapien
gggctgacacctgcaggctgaaaga

SEQ ID NO: 4479833 - DNA, 25 bp, Homo sapien
ctgacacctgcaggctgaaagagcc

SEQ ID NO: 4479834 - DNA, 25 bp, Homo sapien
cacataaacattttttgatgttatc

SEQ ID NO: 4479835 - DNA, 25 bp, Homo sapien
gggttgatgaagattccacataaac

SEQ ID NO: 4479836 - DNA, 25 bp, Homo sapien
taaacattttttgatgttatcctca

SEQ ID NO: 4479837 - DNA, 25 bp, Homo sapien
cataaacattttttgatgttatcct

SEQ ID NO: 4479838 - DNA, 25 bp, Homo sapien
ctgtgtccatatttctatggtttag

SEQ ID NO: 4479839 - DNA, 25 bp, Homo sapien
gagaaggtgggatcccagaataaaa

SEQ ID NO: 4479840 - DNA, 25 bp, Homo sapien
tagaaataacaactcactttccttc

SEQ ID NO: 4479841 - DNA, 25 bp, Homo sapien
tctaaagcagtctacttggttttca

SEQ ID NO: 4479842 - DNA, 25 bp, Homo sapien
ttaaaaatgatatgtgagtccgagg

SEQ ID NO: 4479843 - DNA, 25 bp, Homo sapien
aaaatgatatgtgagtccgaggcag

SEQ ID NO: 4479844 - DNA, 25 bp, Homo sapien
tgatatgtgagtccgaggcaggcgg

SEQ ID NO: 4479845 - DNA, 25 bp, Homo sapien
atatgtgagtccgaggcaggcggat

SEQ ID NO: 4479846 - DNA, 25 bp, Homo sapien
aatcctgttaatcacgttatcatcc

SEQ ID NO: 4479847 - DNA, 25 bp, Homo sapien
gataatcctgttaatcacgttatca

SEQ ID NO: 4479848 - DNA, 25 bp, Homo sapien
taatcctgttaatcacgttatcatc

SEQ ID NO: 4479849 - DNA, 25 bp, Homo sapien
ataatcctgttaatcacgttatcat

SEQ ID NO: 4479850 - DNA, 25 bp, Homo sapien
ctgggggcggggagcgcgcgcgcgc

SEQ ID NO: 4479851 - DNA, 25 bp, Homo sapien
cgcgcgcgcgcgcgcccgaggccgt

SEQ ID NO: 4479852 - DNA, 25 bp, Homo sapien
ggggcggggagcgcgcgcgcgcgcg

SEQ ID NO: 4479853 - DNA, 25 bp, Homo sapien
gcgcgcgcgcgcgcccgaggccgtc

SEQ ID NO: 4479854 - DNA, 25 bp, Homo sapien
ctgagctgcgctgcacccgagcgat

SEQ ID NO: 4479855 - DNA, 25 bp, Homo sapien
agctgcgctgcacccgagcgatgcg

SEQ ID NO: 4479856 - DNA, 25 bp, Homo sapien
tgccgcggccgttcggctgccgaaa

SEQ ID NO: 4479857 - DNA, 25 bp, Homo sapien
tcggctgccgaaaggccgcagcgct

SEQ ID NO: 4479858 - DNA, 25 bp, Homo sapien
gtgtaggaggaacaaagctgcagcc

SEQ ID NO: 4479859 - DNA, 25 bp, Homo sapien
catccaaaggtgaagtgtaggagga

SEQ ID NO: 4479860 - DNA, 25 bp, Homo sapien
tgaagtgtaggaggaacaaagctgc

SEQ ID NO: 4479861 - DNA, 25 bp, Homo sapien
gaggaacaaagctgcagccagcgac

SEQ ID NO: 4479862 - DNA, 25 bp, Homo sapien
tgacctccggccagcgttgaaatga

SEQ ID NO: 4479863 - DNA, 25 bp, Homo sapien
ttgaaatgagccaaatccggcgccc

SEQ ID NO: 4479864 - DNA, 25 bp, Homo sapien
cacctgcaggcgctagttggaagga

SEQ ID NO: 4479865 - DNA, 25 bp, Homo sapien
ctgaggtccgccatccaaaggtcgg

SEQ ID NO: 4479866 - DNA, 25 bp, Homo sapien
tgatctccccatcgggaagctggga

SEQ ID NO: 4479867 - DNA, 25 bp, Homo sapien
gaacaaggagcatcctcaagggagg

SEQ ID NO: 4479868 - DNA, 25 bp, Homo sapien
tcagctctagagactttgccctaag

SEQ ID NO: 4479869 - DNA, 25 bp, Homo sapien
gaggacaaggatcggttcacaaaca

SEQ ID NO: 4479870 - DNA, 25 bp, Homo sapien
ctgctgtatcacacttcctccagga

SEQ ID NO: 4479871 - DNA, 25 bp, Homo sapien
ctagggtcacagaaatggaaggctc

SEQ ID NO: 4479872 - DNA, 25 bp, Homo sapien
gatgtaggcctagggaaacacctta

SEQ ID NO: 4479873 - DNA, 25 bp, Homo sapien
tattgtgaagctaggacagaagccc

SEQ ID NO: 4479874 - DNA, 25 bp, Homo sapien
cagttccagagaagtcagtgcagca

SEQ ID NO: 4479875 - DNA, 25 bp, Homo sapien
gatagacaaagcccgtgaagaggga

SEQ ID NO: 4479876 - DNA, 25 bp, Homo sapien
atagacaaagcccgtgaagagggag

SEQ ID NO: 4479877 - DNA, 25 bp, Homo sapien
tgatagacaaagcccgtgaagaggg

SEQ ID NO: 4479878 - DNA, 25 bp, Homo sapien
ctgatagacaaagcccgtgaagagg

SEQ ID NO: 4479879 - DNA, 25 bp, Homo sapien
gattacaggcccggatcttggattt

SEQ ID NO: 4479880 - DNA, 25 bp, Homo sapien
attacaggcccggatcttggatttt

SEQ ID NO: 4479881 - DNA, 25 bp, Homo sapien
ggattacaggcccggatcttggatt

SEQ ID NO: 4479882 - DNA, 25 bp, Homo sapien
ccggcatctgttcttggtcggggtt

SEQ ID NO: 4479883 - DNA, 25 bp, Homo sapien
cttgatggggcagcgactgggggcc

SEQ ID NO: 4479884 - DNA, 25 bp, Homo sapien
gggcccggcatctgttcttggtcgg

SEQ ID NO: 4479885 - DNA, 25 bp, Homo sapien
gactgggggcccggcatctgttctt

SEQ ID NO: 4479886 - DNA, 25 bp, Homo sapien
taaccccgagtggatggtggagacc

SEQ ID NO: 4479887 - DNA, 25 bp, Homo sapien
gagcaattggaagactccctgccca

SEQ ID NO: 4479888 - DNA, 25 bp, Homo sapien
tctggagggtacaaacatgctctgc

SEQ ID NO: 4479889 - DNA, 25 bp, Homo sapien
tggagacccatcatgacaagcctgt

SEQ ID NO: 4479890 - DNA, 25 bp, Homo sapien
gatgttaccagctggcccagtggcc

SEQ ID NO: 4479891 - DNA, 25 bp, Homo sapien
ggcctgcccacacctctttgtcctg

SEQ ID NO: 4479892 - DNA, 25 bp, Homo sapien
gcctgcccacacctctttgtcctga

SEQ ID NO: 4479893 - DNA, 25 bp, Homo sapien
gctggcccagtggcctgcccacacc

SEQ ID NO: 4479894 - DNA, 25 bp, Homo sapien
gaagtcttggtagaaacatggcttc

SEQ ID NO: 4479895 - DNA, 25 bp, Homo sapien
cttcagcgggatgaatttgggcaat

SEQ ID NO: 4479896 - DNA, 25 bp, Homo sapien
aggaatatctgcctcgaagtcttgg

SEQ ID NO: 4479897 - DNA, 25 bp, Homo sapien
catccagaggtagtagaggcgcttg

SEQ ID NO: 4479898 - DNA, 25 bp, Homo sapien
tcaaatgaaccttgtgtgtggccca

SEQ ID NO: 4479899 - DNA, 25 bp, Homo sapien
tatccgtcgacaaacatggcctcgt

SEQ ID NO: 4479900 - DNA, 25 bp, Homo sapien
tgaaactgagtctgtctgccccatc

SEQ ID NO: 4479901 - DNA, 25 bp, Homo sapien
tacattgcgggtatcttgggatcct

SEQ ID NO: 4479902 - DNA, 25 bp, Homo sapien
cagacacagtgacctacaagcctgg

SEQ ID NO: 4479903 - DNA, 25 bp, Homo sapien
cctagtgaggacttaaggagatatt

SEQ ID NO: 4479904 - DNA, 25 bp, Homo sapien
cctgcgggtgcctagtgaggactta

SEQ ID NO: 4479905 - DNA, 25 bp, Homo sapien
cctggaggcttggtgttaaaactga

SEQ ID NO: 4479906 - DNA, 25 bp, Homo sapien
cagcagggacctcaaagatttacag

SEQ ID NO: 4479907 - DNA, 25 bp, Homo sapien
gatgctggtactaacacacatgcgg

SEQ ID NO: 4479908 - DNA, 25 bp, Homo sapien
tgaccttctacagacctgggctgct

SEQ ID NO: 4479909 - DNA, 25 bp, Homo sapien
aaggttccccagatataaatcccag

SEQ ID NO: 4479910 - DNA, 25 bp, Homo sapien
agacagcccaccaggttcacggcca

SEQ ID NO: 4479911 - DNA, 25 bp, Homo sapien
ccagagaaaggcgaggccaaagttg

SEQ ID NO: 4479912 - DNA, 25 bp, Homo sapien
tgtaaatgggccgaaaccagcagac

SEQ ID NO: 4479913 - DNA, 25 bp, Homo sapien
aaaccagcagacgtaggagcagggt

SEQ ID NO: 4479914 - DNA, 25 bp, Homo sapien
taaaggccttaattgagaggtcaga

SEQ ID NO: 4479915 - DNA, 25 bp, Homo sapien
ctttgcaagtttccacgtggtagac

SEQ ID NO: 4479916 - DNA, 25 bp, Homo sapien
agttctacccatacatctttgcaag

SEQ ID NO: 4479917 - DNA, 25 bp, Homo sapien
ccaagtttaagtgcataatggacag

SEQ ID NO: 4479918 - DNA, 25 bp, Homo sapien
accaactgagccatgaaggtaaaga

SEQ ID NO: 4479919 - DNA, 25 bp, Homo sapien
caactgagccatgaaggtaaagaag

SEQ ID NO: 4479920 - DNA, 25 bp, Homo sapien
gaccaactgagccatgaaggtaaag

SEQ ID NO: 4479921 - DNA, 25 bp, Homo sapien
ccaactgagccatgaaggtaaagaa

SEQ ID NO: 4479922 - DNA, 25 bp, Homo sapien
agacgccccagcctgggatgcccac

SEQ ID NO: 4479923 - DNA, 25 bp, Homo sapien
cagacgccccagcctgggatgccca

SEQ ID NO: 4479924 - DNA, 25 bp, Homo sapien
cgagccaatgttcgttccgaagaag

SEQ ID NO: 4479925 - DNA, 25 bp, Homo sapien
gcgatgaaggaaaagacggccatca

SEQ ID NO: 4479926 - DNA, 25 bp, Homo sapien
catcactgtgaacatgacagtggga

SEQ ID NO: 4479927 - DNA, 25 bp, Homo sapien
gaaggagatggtagcaatccagccg

SEQ ID NO: 4479928 - DNA, 25 bp, Homo sapien
tcacatctcattggagtacgtgtaa

SEQ ID NO: 4479929 - DNA, 25 bp, Homo sapien
ctgagctttgctgaaactcccccca

SEQ ID NO: 4479930 - DNA, 25 bp, Homo sapien
catggctgcgttctgggctgcctgc

SEQ ID NO: 4479931 - DNA, 25 bp, Homo sapien
tgaggctgattcatggcaccctggg

SEQ ID NO: 4479932 - DNA, 25 bp, Homo sapien
tcacactgcttggaacagaacagcc

SEQ ID NO: 4479933 - DNA, 25 bp, Homo sapien
caaatgacgatgtggcttgagcccc

SEQ ID NO: 4479934 - DNA, 25 bp, Homo sapien
tccactgcacactatttcacgaggg

SEQ ID NO: 4479935 - DNA, 25 bp, Homo sapien
tcagggtagcagaatcaagccacag

SEQ ID NO: 4479936 - DNA, 25 bp, Homo sapien
gactgtgaccattgctcccaagaga

SEQ ID NO: 4479937 - DNA, 25 bp, Homo sapien
tattgggttccaagctgaagccagg

SEQ ID NO: 4479938 - DNA, 25 bp, Homo sapien
tctccccgggaaagtgcatagttgc

SEQ ID NO: 4479939 - DNA, 25 bp, Homo sapien
cagatgctctttgggcgagaaccca

SEQ ID NO: 4479940 - DNA, 25 bp, Homo sapien
ttattatggttcactcagttaccaa

SEQ ID NO: 4479941 - DNA, 25 bp, Homo sapien
ggttcactcagttaccaaagacaga

SEQ ID NO: 4479942 - DNA, 25 bp, Homo sapien
atgttcccctttattatggttcact

SEQ ID NO: 4479943 - DNA, 25 bp, Homo sapien
tcccctttattatggttcactcagt

SEQ ID NO: 4479944 - DNA, 25 bp, Homo sapien
tcacatgcatgttgtagcctgctat

SEQ ID NO: 4479945 - DNA, 25 bp, Homo sapien
gcttcatcacatgcatgttgtagcc

SEQ ID NO: 4479946 - DNA, 25 bp, Homo sapien
gatgcagatacctctcactgagcgc

SEQ ID NO: 4479947 - DNA, 25 bp, Homo sapien
tgagcgcttcaaatcagcttcatca

SEQ ID NO: 4479948 - DNA, 25 bp, Homo sapien
tatgttaatacttcaatgatttcct

SEQ ID NO: 4479949 - DNA, 25 bp, Homo sapien
tgccaaagtccaaaaacatcagcat

SEQ ID NO: 4479950 - DNA, 25 bp, Homo sapien
acatcagcatttccttaatgtcagg

SEQ ID NO: 4479951 - DNA, 25 bp, Homo sapien
gacctcaggaacatgattatctctc

SEQ ID NO: 4479952 - DNA, 25 bp, Homo sapien
ttgaaattcatccccactgttggct

SEQ ID NO: 4479953 - DNA, 25 bp, Homo sapien
aaattcatccccactgttggctgag

SEQ ID NO: 4479954 - DNA, 25 bp, Homo sapien
gcgttttgaaattcatccccactgt

SEQ ID NO: 4479955 - DNA, 25 bp, Homo sapien
ttttgaaattcatccccactgttgg

SEQ ID NO: 4479956 - DNA, 25 bp, Homo sapien
gggccgctcccaaatatcgcggtat

SEQ ID NO: 4479957 - DNA, 25 bp, Homo sapien
gccgctcccaaatatcgcggtatct

SEQ ID NO: 4479958 - DNA, 25 bp, Homo sapien
gctcccaaatatcgcggtatctctg

SEQ ID NO: 4479959 - DNA, 25 bp, Homo sapien
cggggccgctcccaaatatcgcggt

SEQ ID NO: 4479960 - DNA, 25 bp, Homo sapien
ggctctgctgaattcacaggaactc

SEQ ID NO: 4479961 - DNA, 25 bp, Homo sapien
acttccccgggctctgctgaattca

SEQ ID NO: 4479962 - DNA, 25 bp, Homo sapien
gacttccccgggctctgctgaattc

SEQ ID NO: 4479963 - DNA, 25 bp, Homo sapien
cccgggctctgctgaattcacagga

SEQ ID NO: 4479964 - DNA, 25 bp, Homo sapien
ttcattcatacagtcgaccagaatg

SEQ ID NO: 4479965 - DNA, 25 bp, Homo sapien
cccttcattcatacagtcgaccaga

SEQ ID NO: 4479966 - DNA, 25 bp, Homo sapien
ttcatacagtcgaccagaatgtatg

SEQ ID NO: 4479967 - DNA, 25 bp, Homo sapien
cattcatacagtcgaccagaatgta

SEQ ID NO: 4479968 - DNA, 25 bp, Homo sapien
ggctctataaagctgtcgggattta

SEQ ID NO: 4479969 - DNA, 25 bp, Homo sapien
caggcctgggctctataaagctgtc

SEQ ID NO: 4479970 - DNA, 25 bp, Homo sapien
ctataaagctgtcgggatttaggat

SEQ ID NO: 4479971 - DNA, 25 bp, Homo sapien
cctgggctctataaagctgtcggga

SEQ ID NO: 4479972 - DNA, 25 bp, Homo sapien
cccgtgacacccacaagaacatgga

SEQ ID NO: 4479973 - DNA, 25 bp, Homo sapien
ttcagggctgcgacactccccgtga

SEQ ID NO: 4479974 - DNA, 25 bp, Homo sapien
cccaggaatgtccaaaagctttgac

SEQ ID NO: 4479975 - DNA, 25 bp, Homo sapien
acaagaacatggaattttctctcca

SEQ ID NO: 4479976 - DNA, 25 bp, Homo sapien
acgatctaaactcagtggctcacgc

SEQ ID NO: 4479977 - DNA, 25 bp, Homo sapien
cttggatattgtttaatccatcaat

SEQ ID NO: 4479978 - DNA, 25 bp, Homo sapien
taagacagcataggtaaatcctaat

SEQ ID NO: 4479979 - DNA, 25 bp, Homo sapien
ccatcaatatcttgtataaaaagat

SEQ ID NO: 4479980 - DNA, 25 bp, Homo sapien
ggcacagcgcctaggaacaaagcta

SEQ ID NO: 4479981 - DNA, 25 bp, Homo sapien
gtaggacgtgcccatgccaattcca

SEQ ID NO: 4479982 - DNA, 25 bp, Homo sapien
gcttcctgcatattgtacagggcag

SEQ ID NO: 4479983 - DNA, 25 bp, Homo sapien
agagcgacgtggtgccctaaggcct

SEQ ID NO: 4479984 - DNA, 25 bp, Homo sapien
ccaaggaggctcataggtcctgagt

SEQ ID NO: 4479985 - DNA, 25 bp, Homo sapien
caaggaggctcataggtcctgagtt

SEQ ID NO: 4479986 - DNA, 25 bp, Homo sapien
aaggaggctcataggtcctgagttc

SEQ ID NO: 4479987 - DNA, 25 bp, Homo sapien
ggaggctcataggtcctgagttctg

SEQ ID NO: 4479988 - DNA, 25 bp, Homo sapien
gagaggacttccctccttagctgca

SEQ ID NO: 4479989 - DNA, 25 bp, Homo sapien
ttcacaggctggcttgagagaggac

SEQ ID NO: 4479990 - DNA, 25 bp, Homo sapien
cacaggctggcttgagagaggactt

SEQ ID NO: 4479991 - DNA, 25 bp, Homo sapien
aggctggcttgagagaggacttccc

SEQ ID NO: 4479992 - DNA, 25 bp, Homo sapien
ctgtcaccaagaagaagggggtggc

SEQ ID NO: 4479993 - DNA, 25 bp, Homo sapien
tgtcaccaagaagaagggggtggcg

SEQ ID NO: 4479994 - DNA, 25 bp, Homo sapien
ctgtagaaatgtttggctctctcag

SEQ ID NO: 4479995 - DNA, 25 bp, Homo sapien
gtagaaatgtttggctctctcagtt

SEQ ID NO: 4479996 - DNA, 25 bp, Homo sapien
tagaaatgtttggctctctcagttg

SEQ ID NO: 4479997 - DNA, 25 bp, Homo sapien
cattcatcagcgtcgctgtagaggg

SEQ ID NO: 4479998 - DNA, 25 bp, Homo sapien
tcatcagcgtcgctgtagagggtga

SEQ ID NO: 4479999 - DNA, 25 bp, Homo sapien
ctcccattcatcagcgtcgctgtag

SEQ ID NO: 4480000 - DNA, 25 bp, Homo sapien
atcagcgtcgctgtagagggtgaca

SEQ ID NO: 4480001 - DNA, 25 bp, Homo sapien
acctccgcaggtcaatgtgcagaac

SEQ ID NO: 4480002 - DNA, 25 bp, Homo sapien
cacctccgcaggtcaatgtgcagaa

SEQ ID NO: 4480003 - DNA, 25 bp, Homo sapien
ccacctccgcaggtcaatgtgcaga

SEQ ID NO: 4480004 - DNA, 25 bp, Homo sapien
gtgtgaggcccagggacggacgagg

SEQ ID NO: 4480005 - DNA, 25 bp, Homo sapien
ctgcagctcagcaaactgggtgtga

SEQ ID NO: 4480006 - DNA, 25 bp, Homo sapien
cagcaggtctccttgtacaaggatg

SEQ ID NO: 4480007 - DNA, 25 bp, Homo sapien
acgagggcaccaggacatcactcac

SEQ ID NO: 4480008 - DNA, 25 bp, Homo sapien
cggagcacgatctccctgggcagac

SEQ ID NO: 4480009 - DNA, 25 bp, Homo sapien
aatggcggagcacgatctccctggg

SEQ ID NO: 4480010 - DNA, 25 bp, Homo sapien
tggcggagcacgatctccctgggca

SEQ ID NO: 4480011 - DNA, 25 bp, Homo sapien
gggaatggcggagcacgatctccct

SEQ ID NO: 4480012 - DNA, 25 bp, Homo sapien
ggcagcccacgaggagggacaaaga

SEQ ID NO: 4480013 - DNA, 25 bp, Homo sapien
cccagatctgcggagaaggcagagc

SEQ ID NO: 4480014 - DNA, 25 bp, Homo sapien
ccagatctgcggagaaggcagagct

SEQ ID NO: 4480015 - DNA, 25 bp, Homo sapien
tcttgatgacattgcacccaggctc

SEQ ID NO: 4480016 - DNA, 25 bp, Homo sapien
gaacagaccccagtacagtacgtgg

SEQ ID NO: 4480017 - DNA, 25 bp, Homo sapien
cagtacgtggtaggcgaaagctcaa

SEQ ID NO: 4480018 - DNA, 25 bp, Homo sapien
gaggagtgccttaagagcccattga

SEQ ID NO: 4480019 - DNA, 25 bp, Homo sapien
gggatctcgacatagccaaaggcct

SEQ ID NO: 4480020 - DNA, 25 bp, Homo sapien
ggccttgagctggtctacctgctgc

SEQ ID NO: 4480021 - DNA, 25 bp, Homo sapien
tcgggtgctcccacatggcggtgtt

SEQ ID NO: 4480022 - DNA, 25 bp, Homo sapien
cctgctgcgctgtgatcgggtgctc

SEQ ID NO: 4480023 - DNA, 25 bp, Homo sapien
gctggaagaggacttctttcacttt

SEQ ID NO: 4480024 - DNA, 25 bp, Homo sapien
ctttcactttgtccacgatggtccc

SEQ ID NO: 4480025 - DNA, 25 bp, Homo sapien
acgatggtccccacttcagccatgg

SEQ ID NO: 4480026 - DNA, 25 bp, Homo sapien
ttgtccacgatggtccccacttcag

SEQ ID NO: 4480027 - DNA, 25 bp, Homo sapien
cagcggcctctcctggttgaaagaa

SEQ ID NO: 4480028 - DNA, 25 bp, Homo sapien
cattcagcaaatgagggtatcctcc

SEQ ID NO: 4480029 - DNA, 25 bp, Homo sapien
cattctgagtacagagggacaccca

SEQ ID NO: 4480030 - DNA, 25 bp, Homo sapien
cctcccgtgaggacaacactgcttg

SEQ ID NO: 4480031 - DNA, 25 bp, Homo sapien
caggactctccagctgtggtgtttc

SEQ ID NO: 4480032 - DNA, 25 bp, Homo sapien
gagtcctgccaactcgcaggcttcg

SEQ ID NO: 4480033 - DNA, 25 bp, Homo sapien
aggcttcgctgatcgcatggcacct

SEQ ID NO: 4480034 - DNA, 25 bp, Homo sapien
caatctcatggcatggtctgcagga

SEQ ID NO: 4480035 - DNA, 25 bp, Homo sapien
tgattccagccagtaggcttcctgg

SEQ ID NO: 4480036 - DNA, 25 bp, Homo sapien
gaaggctaagtcctgaaccaaactg

SEQ ID NO: 4480037 - DNA, 25 bp, Homo sapien
tgccggtgagttgtgaacccagacc

SEQ ID NO: 4480038 - DNA, 25 bp, Homo sapien
caaactgccactgctagtaagcggc

SEQ ID NO: 4480039 - DNA, 25 bp, Homo sapien
tagtgggaagcaccatggcaacctg

SEQ ID NO: 4480040 - DNA, 25 bp, Homo sapien
caaaggaggtagcacccaggtacat

SEQ ID NO: 4480041 - DNA, 25 bp, Homo sapien
ggcaagagaatacggagcccttcag

SEQ ID NO: 4480042 - DNA, 25 bp, Homo sapien
cagtcttatcccagtaaaagcagca

SEQ ID NO: 4480043 - DNA, 25 bp, Homo sapien
tgaagttgccatcaatttacgctcc

SEQ ID NO: 4480044 - DNA, 25 bp, Homo sapien
gatactccgagattgttctccagtg

SEQ ID NO: 4480045 - DNA, 25 bp, Homo sapien
ccaccagtctaacaggcaaaagttt

SEQ ID NO: 4480046 - DNA, 25 bp, Homo sapien
aatgcatgagggcaccaattcccca

SEQ ID NO: 4480047 - DNA, 25 bp, Homo sapien
aagtgcagtggtgcaatcttggctc

SEQ ID NO: 4480048 - DNA, 25 bp, Homo sapien
tctttctctgtcacctaggttgaag

SEQ ID NO: 4480049 - DNA, 25 bp, Homo sapien
ctttctctgtcacctaggttgaagt

SEQ ID NO: 4480050 - DNA, 25 bp, Homo sapien
agtctttctctgtcacctaggttga

SEQ ID NO: 4480051 - DNA, 25 bp, Homo sapien
cagttagttcccctgccaagagaaa

SEQ ID NO: 4480052 - DNA, 25 bp, Homo sapien
caatctcctggctgttagatagtga

SEQ ID NO: 4480053 - DNA, 25 bp, Homo sapien
tgtgtagagttccagtgtatgaagg

SEQ ID NO: 4480054 - DNA, 25 bp, Homo sapien
tctgcacaagcatgcatgtgacatt

SEQ ID NO: 4480055 - DNA, 25 bp, Homo sapien
tccaggttggagtgcaatggcacga

SEQ ID NO: 4480056 - DNA, 25 bp, Homo sapien
gtcttgctcttgtcatccaggttgg

SEQ ID NO: 4480057 - DNA, 25 bp, Homo sapien
tctcggttcactgtaacctctgcct

SEQ ID NO: 4480058 - DNA, 25 bp, Homo sapien
tgcctcccaggttcaagtgattctc

SEQ ID NO: 4480059 - DNA, 25 bp, Homo sapien
tcgactgtcaagacttcttgcctgg

SEQ ID NO: 4480060 - DNA, 25 bp, Homo sapien
tgtcctaggagtgggctccttgacc

SEQ ID NO: 4480061 - DNA, 25 bp, Homo sapien
gctgggtcctatgaatttgtccagt

SEQ ID NO: 4480062 - DNA, 25 bp, Homo sapien
gctccttgacccctttaactatcag

SEQ ID NO: 4480063 - DNA, 25 bp, Homo sapien
tctgcatcactgacccgatttaaag

SEQ ID NO: 4480064 - DNA, 25 bp, Homo sapien
tacgtctttttcaacagtgatgcca

SEQ ID NO: 4480065 - DNA, 25 bp, Homo sapien
ggaaaagtcccaattggccatgttg

SEQ ID NO: 4480066 - DNA, 25 bp, Homo sapien
tatattagtgcaggactcttcgtag

SEQ ID NO: 4480067 - DNA, 25 bp, Homo sapien
gaatactataaacacttctatgcaa

SEQ ID NO: 4480068 - DNA, 25 bp, Homo sapien
ggatgaattcctggacacatacacc

SEQ ID NO: 4480069 - DNA, 25 bp, Homo sapien
ataaactagaaaatctagaagaaat

SEQ ID NO: 4480070 - DNA, 25 bp, Homo sapien
gaccaatatctctgatgaacatcga

SEQ ID NO: 4480071 - DNA, 25 bp, Homo sapien
tggagacctgcaggctagcgcatag

SEQ ID NO: 4480072 - DNA, 25 bp, Homo sapien
tccaagacaactgggctggacaggt

SEQ ID NO: 4480073 - DNA, 25 bp, Homo sapien
cagcggccccagagggttaagacaa

SEQ ID NO: 4480074 - DNA, 25 bp, Homo sapien
aagagtccctgtgcagaaggcaaag

SEQ ID NO: 4480075 - DNA, 25 bp, Homo sapien
tcacaggactccaagagtaggacct

SEQ ID NO: 4480076 - DNA, 25 bp, Homo sapien
ctagggattcaagacaacagggtgt

SEQ ID NO: 4480077 - DNA, 25 bp, Homo sapien
tttggttgccagatcagcaggtccc

SEQ ID NO: 4480078 - DNA, 25 bp, Homo sapien
tattatcagtaagggagacaggccc

SEQ ID NO: 4480079 - DNA, 25 bp, Homo sapien
gacgtccctgtgaatcatcctagag

SEQ ID NO: 4480080 - DNA, 25 bp, Homo sapien
gactgtgatatgaaatgagacccca

SEQ ID NO: 4480081 - DNA, 25 bp, Homo sapien
aattccccgaggaggacttagctga

SEQ ID NO: 4480082 - DNA, 25 bp, Homo sapien
caagtgaagacgatattgaggaccc

SEQ ID NO: 4480083 - DNA, 25 bp, Homo sapien
caggttggagtacagtggtgcagtc

SEQ ID NO: 4480084 - DNA, 25 bp, Homo sapien
tttgagacagtctcactctgttgcc

SEQ ID NO: 4480085 - DNA, 25 bp, Homo sapien
agccacctcgcctgggctttaattt

SEQ ID NO: 4480086 - DNA, 25 bp, Homo sapien
cacgcctagctcattttttgtcttt

SEQ ID NO: 4480087 - DNA, 25 bp, Homo sapien
agattggacgctcccacggtgttcc

SEQ ID NO: 4480088 - DNA, 25 bp, Homo sapien
tagagccgcgagtaacagccagatt

SEQ ID NO: 4480089 - DNA, 25 bp, Homo sapien
cacatcgtgtgactgcagatggaca

SEQ ID NO: 4480090 - DNA, 25 bp, Homo sapien
gacactgtagtgcatttcgagcagc

SEQ ID NO: 4480091 - DNA, 25 bp, Homo sapien
gttgtggaggtttcagccagtgttg

SEQ ID NO: 4480092 - DNA, 25 bp, Homo sapien
ttgtggaggtttcagccagtgttga

SEQ ID NO: 4480093 - DNA, 25 bp, Homo sapien
cagagtatggtccagtcatccaggt

SEQ ID NO: 4480094 - DNA, 25 bp, Homo sapien
gtcatccaggtgactaccttcacct

SEQ ID NO: 4480095 - DNA, 25 bp, Homo sapien
cccgttacagagtatggtccagtca

SEQ ID NO: 4480096 - DNA, 25 bp, Homo sapien
ccagtagggcccgttacagagtatg

SEQ ID NO: 4480097 - DNA, 25 bp, Homo sapien
cagacagcggttcctcaatggaaga

SEQ ID NO: 4480098 - DNA, 25 bp, Homo sapien
cagcggttcctcaatggaagaatgt

SEQ ID NO: 4480099 - DNA, 25 bp, Homo sapien
ctgtgacagacagcggttcctcaat

SEQ ID NO: 4480100 - DNA, 25 bp, Homo sapien
agaatgtttgaaccacccctcacca

SEQ ID NO: 4480101 - DNA, 25 bp, Homo sapien
cactgatgggtccaccatatcgttc

SEQ ID NO: 4480102 - DNA, 25 bp, Homo sapien
ctgatgggtccaccatatcgttctc

SEQ ID NO: 4480103 - DNA, 25 bp, Homo sapien
catgcgtctctttttgcccactgat

SEQ ID NO: 4480104 - DNA, 25 bp, Homo sapien
gcgtctctttttgcccactgatggg

SEQ ID NO: 4480105 - DNA, 25 bp, Homo sapien
gctttccagtcgttgctcggcttgg

SEQ ID NO: 4480106 - DNA, 25 bp, Homo sapien
cgttgctcggcttggctaggccaga

SEQ ID NO: 4480107 - DNA, 25 bp, Homo sapien
tccagtcgttgctcggcttggctag

SEQ ID NO: 4480108 - DNA, 25 bp, Homo sapien
ccatggctttccagtcgttgctcgg

SEQ ID NO: 4480109 - DNA, 25 bp, Homo sapien
atggtggcctcctgccttcaacaac

SEQ ID NO: 4480110 - DNA, 25 bp, Homo sapien
tctgcatggtggcctcctgccttca

SEQ ID NO: 4480111 - DNA, 25 bp, Homo sapien
cctctgcatggtggcctcctgcctt

SEQ ID NO: 4480112 - DNA, 25 bp, Homo sapien
tgcatggtggcctcctgccttcaac

SEQ ID NO: 4480113 - DNA, 25 bp, Homo sapien
aggctaaaggcaatggtactacgaa

SEQ ID NO: 4480114 - DNA, 25 bp, Homo sapien
ggcaatggtactacgaaggccccag

SEQ ID NO: 4480115 - DNA, 25 bp, Homo sapien
taaaggcaatggtactacgaaggcc

SEQ ID NO: 4480116 - DNA, 25 bp, Homo sapien
aatggtactacgaaggccccaggca

SEQ ID NO: 4480117 - DNA, 25 bp, Homo sapien
agcagtgcaactcccgtccacagta

SEQ ID NO: 4480118 - DNA, 25 bp, Homo sapien
agactgagagggtagcggagtgagg

SEQ ID NO: 4480119 - DNA, 25 bp, Homo sapien
gccgtggggactttagcagtgcaac

SEQ ID NO: 4480120 - DNA, 25 bp, Homo sapien
tagcggagtgagggcagacatctct

SEQ ID NO: 4480121 - DNA, 25 bp, Homo sapien
aaaaatctcgcctttggctggtgga

SEQ ID NO: 4480122 - DNA, 25 bp, Homo sapien
tttgaagacttacagagctacatgg

SEQ ID NO: 4480123 - DNA, 25 bp, Homo sapien
caggaggtaggctgactcccagttt

SEQ ID NO: 4480124 - DNA, 25 bp, Homo sapien
gattgcttgaaggtcagtgatggca

SEQ ID NO: 4480125 - DNA, 25 bp, Homo sapien
gaaaagcgcttgtgtgattgtctga

SEQ ID NO: 4480126 - DNA, 25 bp, Homo sapien
tctgagttgtcagccaaactagctg

SEQ ID NO: 4480127 - DNA, 25 bp, Homo sapien
tattccgactggtatttagcagaca

SEQ ID NO: 4480128 - DNA, 25 bp, Homo sapien
tgctgcttaccaaaggatgatgggc

SEQ ID NO: 4480129 - DNA, 25 bp, Homo sapien
cataacaagaccctccacagggaag

SEQ ID NO: 4480130 - DNA, 25 bp, Homo sapien
agggaaaggtgccttcagcataaca

SEQ ID NO: 4480131 - DNA, 25 bp, Homo sapien
ataacaagaccctccacagggaagg

SEQ ID NO: 4480132 - DNA, 25 bp, Homo sapien
aaggtgccttcagcataacaagacc

SEQ ID NO: 4480133 - DNA, 25 bp, Homo sapien
cccagcagggagataacagaagaca

SEQ ID NO: 4480134 - DNA, 25 bp, Homo sapien
cagctaggcagctggatacctccag

SEQ ID NO: 4480135 - DNA, 25 bp, Homo sapien
caaagtctccctgataactcgccag

SEQ ID NO: 4480136 - DNA, 25 bp, Homo sapien
catagataacaagcggactgcctct

SEQ ID NO: 4480137 - DNA, 25 bp, Homo sapien
taccagtctgggtggtatcagttga

SEQ ID NO: 4480138 - DNA, 25 bp, Homo sapien
cagatcagtcttcccaagcatatgg

SEQ ID NO: 4480139 - DNA, 25 bp, Homo sapien
caagcgctgatctaggttttacaat

SEQ ID NO: 4480140 - DNA, 25 bp, Homo sapien
gatttaagtgatgttttcttgctgt

SEQ ID NO: 4480141 - DNA, 25 bp, Homo sapien
tgtgccataacacctagaataattt

SEQ ID NO: 4480142 - DNA, 25 bp, Homo sapien
tgccataacacctagaataattttt

SEQ ID NO: 4480143 - DNA, 25 bp, Homo sapien
gcatgtgccataacacctagaataa

SEQ ID NO: 4480144 - DNA, 25 bp, Homo sapien
catgtgccataacacctagaataat

SEQ ID NO: 4480145 - DNA, 25 bp, Homo sapien
gcctttggctatcgatcaggagagt

SEQ ID NO: 4480146 - DNA, 25 bp, Homo sapien
gattttagcctttggctatcgatca

SEQ ID NO: 4480147 - DNA, 25 bp, Homo sapien
tttagcctttggctatcgatcagga

SEQ ID NO: 4480148 - DNA, 25 bp, Homo sapien
tgggttgattttagcctttggctat

SEQ ID NO: 4480149 - DNA, 25 bp, Homo sapien
gactgcagctctagaaagcagacct

SEQ ID NO: 4480150 - DNA, 25 bp, Homo sapien
tacatggtagatttggcagaactag

SEQ ID NO: 4480151 - DNA, 25 bp, Homo sapien
tgaccagccaagcactgatcatctg

SEQ ID NO: 4480152 - DNA, 25 bp, Homo sapien
cagaagtcagtttgcccaggcctgg

SEQ ID NO: 4480153 - DNA, 25 bp, Homo sapien
ttttgccctaggcaccttgcttgcc

SEQ ID NO: 4480154 - DNA, 25 bp, Homo sapien
aggaggcacctaagggcccacaatt

SEQ ID NO: 4480155 - DNA, 25 bp, Homo sapien
cagggccattcaggtgcacctggga

SEQ ID NO: 4480156 - DNA, 25 bp, Homo sapien
taaaattttgccctaggcaccttgc

SEQ ID NO: 4480157 - DNA, 25 bp, Homo sapien
gaatgctaggatacaaggtcgtcct

SEQ ID NO: 4480158 - DNA, 25 bp, Homo sapien
acaggagaatgctaggatacaaggt

SEQ ID NO: 4480159 - DNA, 25 bp, Homo sapien
taggatacaaggtcgtccttgctgt

SEQ ID NO: 4480160 - DNA, 25 bp, Homo sapien
tacaaggtcgtccttgctgtgcctt

SEQ ID NO: 4480161 - DNA, 25 bp, Homo sapien
acagaactccctccttgagttctca

SEQ ID NO: 4480162 - DNA, 25 bp, Homo sapien
acacagaactccctccttgagttct

SEQ ID NO: 4480163 - DNA, 25 bp, Homo sapien
cagaactccctccttgagttctcag

SEQ ID NO: 4480164 - DNA, 25 bp, Homo sapien
cacagaactccctccttgagttctc

SEQ ID NO: 4480165 - DNA, 25 bp, Homo sapien
tctgctgcgcagctgggttgaacgc

SEQ ID NO: 4480166 - DNA, 25 bp, Homo sapien
gagctatgggcaggtcagagtttca

SEQ ID NO: 4480167 - DNA, 25 bp, Homo sapien
ggttgaacgccagtcctgccttctg

SEQ ID NO: 4480168 - DNA, 25 bp, Homo sapien
ggccctaggagtgatgcaaactcac

SEQ ID NO: 4480169 - DNA, 25 bp, Homo sapien
tgctacagggctccagtgacttcac

SEQ ID NO: 4480170 - DNA, 25 bp, Homo sapien
gaacctaaggccaactggtgctgga

SEQ ID NO: 4480171 - DNA, 25 bp, Homo sapien
tacagggacatgacttgctacaggg

SEQ ID NO: 4480172 - DNA, 25 bp, Homo sapien
tcagctcactcatcgttacagggac

SEQ ID NO: 4480173 - DNA, 25 bp, Homo sapien
agcaaccctcctagctgccgttcgc

SEQ ID NO: 4480174 - DNA, 25 bp, Homo sapien
gcaaccctcctagctgccgttcgcg

SEQ ID NO: 4480175 - DNA, 25 bp, Homo sapien
accaagcccggagcaaccctcctag

SEQ ID NO: 4480176 - DNA, 25 bp, Homo sapien
accctcctagctgccgttcgcgccg

SEQ ID NO: 4480177 - DNA, 25 bp, Homo sapien
tccagcgtctctcaggccgcgggtc

SEQ ID NO: 4480178 - DNA, 25 bp, Homo sapien
cgcgtccgcatcctccagcgtctct

SEQ ID NO: 4480179 - DNA, 25 bp, Homo sapien
ctgcagagcgccaggactcccgccg

SEQ ID NO: 4480180 - DNA, 25 bp, Homo sapien
tcaggccgcgggtcctagtccgacc

SEQ ID NO: 4480181 - DNA, 25 bp, Homo sapien
acacgccattccagaactgcgctct

SEQ ID NO: 4480182 - DNA, 25 bp, Homo sapien
gcatacgtgtgcacgcaggcaggcc

SEQ ID NO: 4480183 - DNA, 25 bp, Homo sapien
gcggcccggcgacagggtccgggca

SEQ ID NO: 4480184 - DNA, 25 bp, Homo sapien
gaactgcgctctcccctcgctcggg

SEQ ID NO: 4480185 - DNA, 25 bp, Homo sapien
acaggccgccgccacgcatgcaaac

SEQ ID NO: 4480186 - DNA, 25 bp, Homo sapien
gcaaacccgtgcctgcacgtacgtg

SEQ ID NO: 4480187 - DNA, 25 bp, Homo sapien
cgccgccacgcatgcaaacccgtgc

SEQ ID NO: 4480188 - DNA, 25 bp, Homo sapien
ccgtgcctgcacgtacgtgcatggc

SEQ ID NO: 4480189 - DNA, 25 bp, Homo sapien
gtgcctagggcccacagccgatttc

SEQ ID NO: 4480190 - DNA, 25 bp, Homo sapien
atttcgcttagaggctgccgccgca

SEQ ID NO: 4480191 - DNA, 25 bp, Homo sapien
cgccctgaacataactcgggtgcct

SEQ ID NO: 4480192 - DNA, 25 bp, Homo sapien
ctgaacataactcgggtgcctaggg

SEQ ID NO: 4480193 - DNA, 25 bp, Homo sapien
cgctgtgaaggcttcgagccctcct

SEQ ID NO: 4480194 - DNA, 25 bp, Homo sapien
tgtgaaggcttcgagccctcctagg

SEQ ID NO: 4480195 - DNA, 25 bp, Homo sapien
gtgaaggcttcgagccctcctaggc

SEQ ID NO: 4480196 - DNA, 25 bp, Homo sapien
gctgtgaaggcttcgagccctccta

SEQ ID NO: 4480197 - DNA, 25 bp, Homo sapien
gggcagcttgccatacatcacaggc

SEQ ID NO: 4480198 - DNA, 25 bp, Homo sapien
caactgctcagactcggccttagga

SEQ ID NO: 4480199 - DNA, 25 bp, Homo sapien
ggcaggagaagtaggaccccttgta

SEQ ID NO: 4480200 - DNA, 25 bp, Homo sapien
tgctcgagcccggagtctgtctcta

SEQ ID NO: 4480201 - DNA, 25 bp, Homo sapien
gcctgaagtgggggtcctgccatac

SEQ ID NO: 4480202 - DNA, 25 bp, Homo sapien
tgcctgaagtgggggtcctgccata

SEQ ID NO: 4480203 - DNA, 25 bp, Homo sapien
ctgcctgaagtgggggtcctgccat

SEQ ID NO: 4480204 - DNA, 25 bp, Homo sapien
tagaacaggcagttggtcagcaggt

SEQ ID NO: 4480205 - DNA, 25 bp, Homo sapien
ccatagcacagagggttgcggtaga

SEQ ID NO: 4480206 - DNA, 25 bp, Homo sapien
agacaagttgagagcccatagcaca

SEQ ID NO: 4480207 - DNA, 25 bp, Homo sapien
ccttctgctggcgagcggtagaaca

SEQ ID NO: 4480208 - DNA, 25 bp, Homo sapien
ccgtgctgtggatggtctgatattt

SEQ ID NO: 4480209 - DNA, 25 bp, Homo sapien
cctgaggagtctttactggacccct

SEQ ID NO: 4480210 - DNA, 25 bp, Homo sapien
tgtggatggtctgatatttctccag

SEQ ID NO: 4480211 - DNA, 25 bp, Homo sapien
gcccagtcgccagagtccagtcaac

SEQ ID NO: 4480212 - DNA, 25 bp, Homo sapien
tgcttgcttggagttcctagggtaa

SEQ ID NO: 4480213 - DNA, 25 bp, Homo sapien
gcttgcttggagttcctagggtaag

SEQ ID NO: 4480214 - DNA, 25 bp, Homo sapien
ttgcttggagttcctagggtaagga

SEQ ID NO: 4480215 - DNA, 25 bp, Homo sapien
cttgcttggagttcctagggtaagg

SEQ ID NO: 4480216 - DNA, 25 bp, Homo sapien
agctgggtccaaggacttgagggcc

SEQ ID NO: 4480217 - DNA, 25 bp, Homo sapien
ggtccaaggacttgagggcccctca

SEQ ID NO: 4480218 - DNA, 25 bp, Homo sapien
ccaaggacttgagggcccctcagac

SEQ ID NO: 4480219 - DNA, 25 bp, Homo sapien
gctgggtccaaggacttgagggccc

SEQ ID NO: 4480220 - DNA, 25 bp, Homo sapien
tagtgggtgggcccggtgtcctgac

SEQ ID NO: 4480221 - DNA, 25 bp, Homo sapien
gtagtgggtgggcccggtgtcctga

SEQ ID NO: 4480222 - DNA, 25 bp, Homo sapien
cagcctggtacccggtccccttgtg

SEQ ID NO: 4480223 - DNA, 25 bp, Homo sapien
tgggggaatgtaaggtgcctgggct

SEQ ID NO: 4480224 - DNA, 25 bp, Homo sapien
cccagtgggggaatgtaaggtgcct

SEQ ID NO: 4480225 - DNA, 25 bp, Homo sapien
tccagccccagtgggggaatgtaag

SEQ ID NO: 4480226 - DNA, 25 bp, Homo sapien
taggggtaagcgtccagccccagtg

SEQ ID NO: 4480227 - DNA, 25 bp, Homo sapien
gcaaagtccaatgggcaccgtggag

SEQ ID NO: 4480228 - DNA, 25 bp, Homo sapien
cagcccgcacattgttctgggaagg

SEQ ID NO: 4480229 - DNA, 25 bp, Homo sapien
tgggaaggtggtgtccctccaagcc

SEQ ID NO: 4480230 - DNA, 25 bp, Homo sapien
tccatagagagagaggtcatcccgg

SEQ ID NO: 4480231 - DNA, 25 bp, Homo sapien
cacagaacgggaagccttgacaggg

SEQ ID NO: 4480232 - DNA, 25 bp, Homo sapien
tggcacatccatggctgcagtaggc

SEQ ID NO: 4480233 - DNA, 25 bp, Homo sapien
tgtggtcactggcaccccaggcaag

SEQ ID NO: 4480234 - DNA, 25 bp, Homo sapien
gcttggcatgctccacagaacggga

SEQ ID NO: 4480235 - DNA, 25 bp, Homo sapien
aggatcttgaactttcggaacatga

SEQ ID NO: 4480236 - DNA, 25 bp, Homo sapien
ctgtggaagttggtccttggcatgg

SEQ ID NO: 4480237 - DNA, 25 bp, Homo sapien
cttgaactttcggaacatgaaggcc

SEQ ID NO: 4480238 - DNA, 25 bp, Homo sapien
tggaagttggtccttggcatggcat

SEQ ID NO: 4480239 - DNA, 25 bp, Homo sapien
cacggctgcaggcaaaggtgccgga

SEQ ID NO: 4480240 - DNA, 25 bp, Homo sapien
acggctgcaggcaaaggtgccggac

SEQ ID NO: 4480241 - DNA, 25 bp, Homo sapien
caagggctgttgagcgagaatccgc

SEQ ID NO: 4480242 - DNA, 25 bp, Homo sapien
tccgcagtccaatgggcccagatgt

SEQ ID NO: 4480243 - DNA, 25 bp, Homo sapien
gaagcaggtcacagacaagggctgt

SEQ ID NO: 4480244 - DNA, 25 bp, Homo sapien
agcgagaatccgcagtccaatgggc

SEQ ID NO: 4480245 - DNA, 25 bp, Homo sapien
gagctcgagccggagcaggggatgg

SEQ ID NO: 4480246 - DNA, 25 bp, Homo sapien
agctggatcccgggctgaagctgga

SEQ ID NO: 4480247 - DNA, 25 bp, Homo sapien
agcctgagctcgagccggagcaggg

SEQ ID NO: 4480248 - DNA, 25 bp, Homo sapien
cctgagctcgagccggagcagggga

SEQ ID NO: 4480249 - DNA, 25 bp, Homo sapien
tgggcgacggagccagaaatagcat

SEQ ID NO: 4480250 - DNA, 25 bp, Homo sapien
gagtgggcgacggagccagaaatag

SEQ ID NO: 4480251 - DNA, 25 bp, Homo sapien
ggagagtgggcgacggagccagaaa

SEQ ID NO: 4480252 - DNA, 25 bp, Homo sapien
gggcgacggagccagaaatagcatc

SEQ ID NO: 4480253 - DNA, 25 bp, Homo sapien
gccgtctctagccactcgcgaagct

SEQ ID NO: 4480254 - DNA, 25 bp, Homo sapien
cagccgtctctagccactcgcgaag

SEQ ID NO: 4480255 - DNA, 25 bp, Homo sapien
gtctctagccactcgcgaagcttct

SEQ ID NO: 4480256 - DNA, 25 bp, Homo sapien
ggcccagccgtctctagccactcgc

SEQ ID NO: 4480257 - DNA, 25 bp, Homo sapien
acttcagcatgcgtgaggtgcagcc

SEQ ID NO: 4480258 - DNA, 25 bp, Homo sapien
cagcacatggtccacagaagcgggt

SEQ ID NO: 4480259 - DNA, 25 bp, Homo sapien
aatgggcacgaagatggcgccagct

SEQ ID NO: 4480260 - DNA, 25 bp, Homo sapien
ggcgcagcgccagtaacttcagcat

SEQ ID NO: 4480261 - DNA, 25 bp, Homo sapien
agctccggtggccactggggctgcc

SEQ ID NO: 4480262 - DNA, 25 bp, Homo sapien
ccggtggccactggggctgccccat

SEQ ID NO: 4480263 - DNA, 25 bp, Homo sapien
gtcacttgctcacacagctccggtg

SEQ ID NO: 4480264 - DNA, 25 bp, Homo sapien
ctgtcacttgctcacacagctccgg

SEQ ID NO: 4480265 - DNA, 25 bp, Homo sapien
gccggaaacactgcaccaaagatgg

SEQ ID NO: 4480266 - DNA, 25 bp, Homo sapien
gaaaacagggcctaaccagagtgcc

SEQ ID NO: 4480267 - DNA, 25 bp, Homo sapien
gggaggactgcaaaactacacgttc

SEQ ID NO: 4480268 - DNA, 25 bp, Homo sapien
cacttctgtgtatgtaagggccggg

SEQ ID NO: 4480269 - DNA, 25 bp, Homo sapien
gcaaaaaagatgtgcttctccccag

SEQ ID NO: 4480270 - DNA, 25 bp, Homo sapien
gcttccaaagccatccaaacagtgc

SEQ ID NO: 4480271 - DNA, 25 bp, Homo sapien
ggaaaacgaacacatagtcagcctg

SEQ ID NO: 4480272 - DNA, 25 bp, Homo sapien
gtcaggctggcatcacaactcttcc

SEQ ID NO: 4480273 - DNA, 25 bp, Homo sapien
gaggaggacacagctccagcctcag

SEQ ID NO: 4480274 - DNA, 25 bp, Homo sapien
cacagctccagcctcagtgtcaaag

SEQ ID NO: 4480275 - DNA, 25 bp, Homo sapien
cagctccagcctcagtgtcaaagtc

SEQ ID NO: 4480276 - DNA, 25 bp, Homo sapien
acagtgggctctgaggaggacacag

SEQ ID NO: 4480277 - DNA, 25 bp, Homo sapien
tctgagccagggctaggctctctgg

SEQ ID NO: 4480278 - DNA, 25 bp, Homo sapien
tgagccagggctaggctctctggct

SEQ ID NO: 4480279 - DNA, 25 bp, Homo sapien
ttctgagccagggctaggctctctg

SEQ ID NO: 4480280 - DNA, 25 bp, Homo sapien
gccagggctaggctctctggctcac

SEQ ID NO: 4480281 - DNA, 25 bp, Homo sapien
gggtaggggaggcaccacaggactc

SEQ ID NO: 4480282 - DNA, 25 bp, Homo sapien
taggggaggcaccacaggactcttc

SEQ ID NO: 4480283 - DNA, 25 bp, Homo sapien
aggggaggcaccacaggactcttcc

SEQ ID NO: 4480284 - DNA, 25 bp, Homo sapien
gtaggggaggcaccacaggactctt

SEQ ID NO: 4480285 - DNA, 25 bp, Homo sapien
agcagactgcggaagcgggccttca

SEQ ID NO: 4480286 - DNA, 25 bp, Homo sapien
aggcggtctccagcagactgcggaa

SEQ ID NO: 4480287 - DNA, 25 bp, Homo sapien
tctccagcagactgcggaagcgggc

SEQ ID NO: 4480288 - DNA, 25 bp, Homo sapien
cggtctccagcagactgcggaagcg

SEQ ID NO: 4480289 - DNA, 25 bp, Homo sapien
tctggtcttgaggacttgtggcccc

SEQ ID NO: 4480290 - DNA, 25 bp, Homo sapien
tggtcttgaggacttgtggccccag

SEQ ID NO: 4480291 - DNA, 25 bp, Homo sapien
ctggtcttgaggacttgtggcccca

SEQ ID NO: 4480292 - DNA, 25 bp, Homo sapien
ggtcttgaggacttgtggccccagg

SEQ ID NO: 4480293 - DNA, 25 bp, Homo sapien
gagagtgactgctatacacacagca

SEQ ID NO: 4480294 - DNA, 25 bp, Homo sapien
atacacacagcactggcaaccagtg

SEQ ID NO: 4480295 - DNA, 25 bp, Homo sapien
gagtgactgctatacacacagcact

SEQ ID NO: 4480296 - DNA, 25 bp, Homo sapien
ggagagtgactgctatacacacagc

SEQ ID NO: 4480297 - DNA, 25 bp, Homo sapien
tgcagcaagaacacgagccgggatt

SEQ ID NO: 4480298 - DNA, 25 bp, Homo sapien
aaagaccctcacgttaaaagctcag

SEQ ID NO: 4480299 - DNA, 25 bp, Homo sapien
ctaggcaagaaatagggagtagtcc

SEQ ID NO: 4480300 - DNA, 25 bp, Homo sapien
ggagtagtcctatccaataaagacc

SEQ ID NO: 4480301 - DNA, 25 bp, Homo sapien
ttggttgagctcagcactccacagg

SEQ ID NO: 4480302 - DNA, 25 bp, Homo sapien
gatcttcagagaccttctaggactg

SEQ ID NO: 4480303 - DNA, 25 bp, Homo sapien
aaggtaccactctacgatagccaag

SEQ ID NO: 4480304 - DNA, 25 bp, Homo sapien
ctgtgaggtaggttgcgttgtccca

SEQ ID NO: 4480305 - DNA, 25 bp, Homo sapien
cctccagggcccatcggctcatcag

SEQ ID NO: 4480306 - DNA, 25 bp, Homo sapien
agatgctttaatgggctgcctccag

SEQ ID NO: 4480307 - DNA, 25 bp, Homo sapien
ccagatgctttaatgggctgcctcc

SEQ ID NO: 4480308 - DNA, 25 bp, Homo sapien
gcccatcggctcatcagaatccctt

SEQ ID NO: 4480309 - DNA, 25 bp, Homo sapien
cacctcagcgggtttggttccgcct

SEQ ID NO: 4480310 - DNA, 25 bp, Homo sapien
tcacgctgctgcgataacatcctcc

SEQ ID NO: 4480311 - DNA, 25 bp, Homo sapien
gctgcgataacatcctccccatcag

SEQ ID NO: 4480312 - DNA, 25 bp, Homo sapien
tcctccccatcagagaggccgtggg

SEQ ID NO: 4480313 - DNA, 25 bp, Homo sapien
caggtagtctgcctcgttcagcggg

SEQ ID NO: 4480314 - DNA, 25 bp, Homo sapien
gctgaagcaccgaggccttgaatgc

SEQ ID NO: 4480315 - DNA, 25 bp, Homo sapien
gatgggactgtgagcacttcctggt

SEQ ID NO: 4480316 - DNA, 25 bp, Homo sapien
tttgcagacgatgtgcagggtccca

SEQ ID NO: 4480317 - DNA, 25 bp, Homo sapien
aaaagtggaatcactggctgtattt

SEQ ID NO: 4480318 - DNA, 25 bp, Homo sapien
gaaaagtggaatcactggctgtatt

SEQ ID NO: 4480319 - DNA, 25 bp, Homo sapien
agaaaagtggaatcactggctgtat

SEQ ID NO: 4480320 - DNA, 25 bp, Homo sapien
aaagtggaatcactggctgtatttt

SEQ ID NO: 4480321 - DNA, 25 bp, Homo sapien
gtcgagattcttctaacatcatggg

SEQ ID NO: 4480322 - DNA, 25 bp, Homo sapien
ctgctgccaatttattctgtcgaga

SEQ ID NO: 4480323 - DNA, 25 bp, Homo sapien
ttattctgtcgagattcttctaaca

SEQ ID NO: 4480324 - DNA, 25 bp, Homo sapien
gctgccaatttattctgtcgagatt

SEQ ID NO: 4480325 - DNA, 25 bp, Homo sapien
gggctcttcctttgctgatattctt

SEQ ID NO: 4480326 - DNA, 25 bp, Homo sapien
tcttcctttgctgatattcttttag

SEQ ID NO: 4480327 - DNA, 25 bp, Homo sapien
gctcttcctttgctgatattctttt

SEQ ID NO: 4480328 - DNA, 25 bp, Homo sapien
cagggctcttcctttgctgatattc

SEQ ID NO: 4480329 - DNA, 25 bp, Homo sapien
tgagtggccaccaccggaagtggtt

SEQ ID NO: 4480330 - DNA, 25 bp, Homo sapien
gttgtctcagggctactgtcagttt

SEQ ID NO: 4480331 - DNA, 25 bp, Homo sapien
cccaggtgagtggccaccaccggaa

SEQ ID NO: 4480332 - DNA, 25 bp, Homo sapien
gtggttgtctcagggctactgtcag

SEQ ID NO: 4480333 - DNA, 25 bp, Homo sapien
gagtggttaaggttggacacccgca

SEQ ID NO: 4480334 - DNA, 25 bp, Homo sapien
ccattggagtggttaaggttggaca

SEQ ID NO: 4480335 - DNA, 25 bp, Homo sapien
cattggagtggttaaggttggacac

SEQ ID NO: 4480336 - DNA, 25 bp, Homo sapien
cttccacttgtccaatgggggagca

SEQ ID NO: 4480337 - DNA, 25 bp, Homo sapien
cacttgtccaatgggggagcactac

SEQ ID NO: 4480338 - DNA, 25 bp, Homo sapien
ttccacttgtccaatgggggagcac

SEQ ID NO: 4480339 - DNA, 25 bp, Homo sapien
ccacttgtccaatgggggagcacta

SEQ ID NO: 4480340 - DNA, 25 bp, Homo sapien
tgtgtgtgggctgtctcagctggca

SEQ ID NO: 4480341 - DNA, 25 bp, Homo sapien
ctggcagagggtcacccagccccca

SEQ ID NO: 4480342 - DNA, 25 bp, Homo sapien
ggtgtgtgtgggctgtctcagctgg

SEQ ID NO: 4480343 - DNA, 25 bp, Homo sapien
tcagctggcagagggtcacccagcc

SEQ ID NO: 4480344 - DNA, 25 bp, Homo sapien
agttggaagaggattgtggggagag

SEQ ID NO: 4480345 - DNA, 25 bp, Homo sapien
aggagttggaagaggattgtgggga

SEQ ID NO: 4480346 - DNA, 25 bp, Homo sapien
ggaagaggattgtggggagaggtag

SEQ ID NO: 4480347 - DNA, 25 bp, Homo sapien
tggaagaggattgtggggagaggta

SEQ ID NO: 4480348 - DNA, 25 bp, Homo sapien
tgattctatgttttcattgagctga

SEQ ID NO: 4480349 - DNA, 25 bp, Homo sapien
ttgtcactgagcttgactccagggc

SEQ ID NO: 4480350 - DNA, 25 bp, Homo sapien
tttcattgagctgattgattgtcac

SEQ ID NO: 4480351 - DNA, 25 bp, Homo sapien
tgattgattgtcactgagcttgact

SEQ ID NO: 4480352 - DNA, 25 bp, Homo sapien
tgttccacttgtttcttctgctgtt

SEQ ID NO: 4480353 - DNA, 25 bp, Homo sapien
gttccacttgtttcttctgctgttt

SEQ ID NO: 4480354 - DNA, 25 bp, Homo sapien
ttcttccagctgatgttccacttgt

SEQ ID NO: 4480355 - DNA, 25 bp, Homo sapien
ttccagctgatgttccacttgtttc

SEQ ID NO: 4480356 - DNA, 25 bp, Homo sapien
ctaactgctccatttgtgctttgtg

SEQ ID NO: 4480357 - DNA, 25 bp, Homo sapien
ctctaactgctccatttgtgctttg

SEQ ID NO: 4480358 - DNA, 25 bp, Homo sapien
taactgctccatttgtgctttgtgt

SEQ ID NO: 4480359 - DNA, 25 bp, Homo sapien
actgctccatttgtgctttgtgtat

SEQ ID NO: 4480360 - DNA, 25 bp, Homo sapien
cagcacgtttagtatggtaaagggt

SEQ ID NO: 4480361 - DNA, 25 bp, Homo sapien
tgtcgggcagcacgtttagtatggt

SEQ ID NO: 4480362 - DNA, 25 bp, Homo sapien
cttcgaagtgtcgggcagcacgttt

SEQ ID NO: 4480363 - DNA, 25 bp, Homo sapien
tagtatggtaaagggtggtcttcaa

SEQ ID NO: 4480364 - DNA, 25 bp, Homo sapien
gctccaattcttgaatacgctgtaa

SEQ ID NO: 4480365 - DNA, 25 bp, Homo sapien
ctgtaaggagtattgcaggcggcca

SEQ ID NO: 4480366 - DNA, 25 bp, Homo sapien
gagagagcccgctccaattcttgaa

SEQ ID NO: 4480367 - DNA, 25 bp, Homo sapien
cctgctgctgtgtagacacagcaga

SEQ ID NO: 4480368 - DNA, 25 bp, Homo sapien
taccactgtttgaaccgttatggag

SEQ ID NO: 4480369 - DNA, 25 bp, Homo sapien
gaggcccagagagatcagataatat

SEQ ID NO: 4480370 - DNA, 25 bp, Homo sapien
cgttatggagtgcttcaccaggttc

SEQ ID NO: 4480371 - DNA, 25 bp, Homo sapien
caggttccatgctagcaatcccatt

SEQ ID NO: 4480372 - DNA, 25 bp, Homo sapien
agttttgatctggggagcccgggca

SEQ ID NO: 4480373 - DNA, 25 bp, Homo sapien
ttgatctggggagcccgggcagtgc

SEQ ID NO: 4480374 - DNA, 25 bp, Homo sapien
tgagaagttttgatctggggagccc

SEQ ID NO: 4480375 - DNA, 25 bp, Homo sapien
ttttgatctggggagcccgggcagt

SEQ ID NO: 4480376 - DNA, 25 bp, Homo sapien
tgtcacgtgtgcgttcagcagcgcc

SEQ ID NO: 4480377 - DNA, 25 bp, Homo sapien
tggtctgctgtaaccgccgctggag

SEQ ID NO: 4480378 - DNA, 25 bp, Homo sapien
gcagcgcccgctcctttatggtctg

SEQ ID NO: 4480379 - DNA, 25 bp, Homo sapien
aggaccgcttctctgcagctcgagg

SEQ ID NO: 4480380 - DNA, 25 bp, Homo sapien
tgtgtttagcatattcgtcccgctc

SEQ ID NO: 4480381 - DNA, 25 bp, Homo sapien
tatgtgtttagcatattcgtcccgc

SEQ ID NO: 4480382 - DNA, 25 bp, Homo sapien
tgtttagcatattcgtcccgctcta

SEQ ID NO: 4480383 - DNA, 25 bp, Homo sapien
tttatgtgtttagcatattcgtccc

SEQ ID NO: 4480384 - DNA, 25 bp, Homo sapien
tatccgatgtatgtcacgcttcttc

SEQ ID NO: 4480385 - DNA, 25 bp, Homo sapien
cgatgtatgtcacgcttcttctctt

SEQ ID NO: 4480386 - DNA, 25 bp, Homo sapien
cagctcctgtatccgatgtatgtca

SEQ ID NO: 4480387 - DNA, 25 bp, Homo sapien
cctgtatccgatgtatgtcacgctt

SEQ ID NO: 4480388 - DNA, 25 bp, Homo sapien
ctgggggtgccagggatgggggctc

SEQ ID NO: 4480389 - DNA, 25 bp, Homo sapien
gggggtgccagggatgggggctcag

SEQ ID NO: 4480390 - DNA, 25 bp, Homo sapien
tgggggtgccagggatgggggctca

SEQ ID NO: 4480391 - DNA, 25 bp, Homo sapien
tcccgaagcctctcgttttgttcac

SEQ ID NO: 4480392 - DNA, 25 bp, Homo sapien
ctcccgaagcctctcgttttgttca

SEQ ID NO: 4480393 - DNA, 25 bp, Homo sapien
aactgcagtgcgctctttttctcgt

SEQ ID NO: 4480394 - DNA, 25 bp, Homo sapien
ctgcagtgcgctctttttctcgttg

SEQ ID NO: 4480395 - DNA, 25 bp, Homo sapien
gcagtgcgctctttttctcgttgtt

SEQ ID NO: 4480396 - DNA, 25 bp, Homo sapien
caactgcagtgcgctctttttctcg

SEQ ID NO: 4480397 - DNA, 25 bp, Homo sapien
tcgctgctgctgcagactctgagac

SEQ ID NO: 4480398 - DNA, 25 bp, Homo sapien
tgctgctgcagactctgagactctt

SEQ ID NO: 4480399 - DNA, 25 bp, Homo sapien
ctgctgcagactctgagactcttgg

SEQ ID NO: 4480400 - DNA, 25 bp, Homo sapien
gctgctgctgcagactctgagactc

SEQ ID NO: 4480401 - DNA, 25 bp, Homo sapien
tggtccacgaactgggtctgcagca

SEQ ID NO: 4480402 - DNA, 25 bp, Homo sapien
tgcagcagtaactgcctgtgcagcg

SEQ ID NO: 4480403 - DNA, 25 bp, Homo sapien
tgcagctggtccacgaactgggtct

SEQ ID NO: 4480404 - DNA, 25 bp, Homo sapien
agcagtaactgcctgtgcagcgcct

SEQ ID NO: 4480405 - DNA, 25 bp, Homo sapien
cacgaggcttagctgggtctctagc

SEQ ID NO: 4480406 - DNA, 25 bp, Homo sapien
ccacgaggcttagctgggtctctag

SEQ ID NO: 4480407 - DNA, 25 bp, Homo sapien
ccctttctgatctggtccagttcat

SEQ ID NO: 4480408 - DNA, 25 bp, Homo sapien
tgatctggtccagttcattcatcct

SEQ ID NO: 4480409 - DNA, 25 bp, Homo sapien
ttctgatctggtccagttcattcat

SEQ ID NO: 4480410 - DNA, 25 bp, Homo sapien
tgcggacacccggttggcataacga

SEQ ID NO: 4480411 - DNA, 25 bp, Homo sapien
cactgtccagatgttgtcctccatc

SEQ ID NO: 4480412 - DNA, 25 bp, Homo sapien
gggatgtttggcgtgggccgaggcg

SEQ ID NO: 4480413 - DNA, 25 bp, Homo sapien
ctgggatgtttggcgtgggccgagg

SEQ ID NO: 4480414 - DNA, 25 bp, Homo sapien
gatgtttggcgtgggccgaggcgcc

SEQ ID NO: 4480415 - DNA, 25 bp, Homo sapien
gtggcctcccggctctccaggtcct

SEQ ID NO: 4480416 - DNA, 25 bp, Homo sapien
cgtggcctcccggctctccaggtcc

SEQ ID NO: 4480417 - DNA, 25 bp, Homo sapien
ctgcccacatagccgtgcctgctcc

SEQ ID NO: 4480418 - DNA, 25 bp, Homo sapien
cctgctcctcctgggaactggctcc

SEQ ID NO: 4480419 - DNA, 25 bp, Homo sapien
gcccacatagccgtgcctgctcctc

SEQ ID NO: 4480420 - DNA, 25 bp, Homo sapien
gaactggctccagcggagttgaaaa

SEQ ID NO: 4480421 - DNA, 25 bp, Homo sapien
ggcggcacagccttcgcaccttccg

SEQ ID NO: 4480422 - DNA, 25 bp, Homo sapien
cagatgagccaggtgcaggcggcac

SEQ ID NO: 4480423 - DNA, 25 bp, Homo sapien
aggccaccagatgagccaggtgcag

SEQ ID NO: 4480424 - DNA, 25 bp, Homo sapien
ccaccagatgagccaggtgcaggcg

SEQ ID NO: 4480425 - DNA, 25 bp, Homo sapien
acacacaaactcatctccagtcctc

SEQ ID NO: 4480426 - DNA, 25 bp, Homo sapien
cacacaaactcatctccagtcctcc

SEQ ID NO: 4480427 - DNA, 25 bp, Homo sapien
acacaaactcatctccagtcctccc

SEQ ID NO: 4480428 - DNA, 25 bp, Homo sapien
cacaaactcatctccagtcctccct

SEQ ID NO: 4480429 - DNA, 25 bp, Homo sapien
aaggctggacgaatccaagctctcg

SEQ ID NO: 4480430 - DNA, 25 bp, Homo sapien
ggacgaatccaagctctcgtctctc

SEQ ID NO: 4480431 - DNA, 25 bp, Homo sapien
tccagaaggctggacgaatccaagc

SEQ ID NO: 4480432 - DNA, 25 bp, Homo sapien
gctggacgaatccaagctctcgtct

SEQ ID NO: 4480433 - DNA, 25 bp, Homo sapien
ctggctttcatatacggtgaaggac

SEQ ID NO: 4480434 - DNA, 25 bp, Homo sapien
ggctttcatatacggtgaaggactc

SEQ ID NO: 4480435 - DNA, 25 bp, Homo sapien
ccctggctttcatatacggtgaagg

SEQ ID NO: 4480436 - DNA, 25 bp, Homo sapien
ctttcatatacggtgaaggactctc

SEQ ID NO: 4480437 - DNA, 25 bp, Homo sapien
atgcccctcatggttgcccacaagg

SEQ ID NO: 4480438 - DNA, 25 bp, Homo sapien
ggcaacaccaactcttgcagctcca

SEQ ID NO: 4480439 - DNA, 25 bp, Homo sapien
gggttctgggcagcgatgaggaatt

SEQ ID NO: 4480440 - DNA, 25 bp, Homo sapien
ggcagcgatgaggaatttgccatgc

SEQ ID NO: 4480441 - DNA, 25 bp, Homo sapien
agacagctgcacgatctgctgtacc

SEQ ID NO: 4480442 - DNA, 25 bp, Homo sapien
tgcaggctccacgttgttgtccagg

SEQ ID NO: 4480443 - DNA, 25 bp, Homo sapien
taggtgtcctgcatgacaggagaca

SEQ ID NO: 4480444 - DNA, 25 bp, Homo sapien
cgatctgctgtaccggggggttgtc

SEQ ID NO: 4480445 - DNA, 25 bp, Homo sapien
gaatggcacgcagggtttgctgggc

SEQ ID NO: 4480446 - DNA, 25 bp, Homo sapien
cacgcagggtttgctgggcaagcct

SEQ ID NO: 4480447 - DNA, 25 bp, Homo sapien
tgcctggtagaagaatggcacgcag

SEQ ID NO: 4480448 - DNA, 25 bp, Homo sapien
ctgcctggtagaagaatggcacgca

SEQ ID NO: 4480449 - DNA, 25 bp, Homo sapien
tgtgtgtttgaattcccaccaccta

SEQ ID NO: 4480450 - DNA, 25 bp, Homo sapien
aagggcaaactcgatatgcatacta

SEQ ID NO: 4480451 - DNA, 25 bp, Homo sapien
caaactcgatatgcatactaatgac

SEQ ID NO: 4480452 - DNA, 25 bp, Homo sapien
cacctaagggcaaactcgatatgca

SEQ ID NO: 4480453 - DNA, 25 bp, Homo sapien
ccctgcatcctaatactgtgacgta

SEQ ID NO: 4480454 - DNA, 25 bp, Homo sapien
tgcatcctaatactgtgacgtattt

SEQ ID NO: 4480455 - DNA, 25 bp, Homo sapien
cccagggagcgcacacacatctctc

SEQ ID NO: 4480456 - DNA, 25 bp, Homo sapien
ctccctgcatcctaatactgtgacg

SEQ ID NO: 4480457 - DNA, 25 bp, Homo sapien
ttaaactctacccttctaatgttgc

SEQ ID NO: 4480458 - DNA, 25 bp, Homo sapien
tttctgattaaactctacccttcta

SEQ ID NO: 4480459 - DNA, 25 bp, Homo sapien
ttctgattaaactctacccttctaa

SEQ ID NO: 4480460 - DNA, 25 bp, Homo sapien
tgattaaactctacccttctaatgt

SEQ ID NO: 4480461 - DNA, 25 bp, Homo sapien
ggcaacagtgtttcagtatttctat

SEQ ID NO: 4480462 - DNA, 25 bp, Homo sapien
taaagccttgcattggaattggcat

SEQ ID NO: 4480463 - DNA, 25 bp, Homo sapien
ttggcaaataaagccttgcattgga

SEQ ID NO: 4480464 - DNA, 25 bp, Homo sapien
taggcaacagtgtttcagtatttct

SEQ ID NO: 4480465 - DNA, 25 bp, Homo sapien
caggccgcctccaaacaaaccgact

SEQ ID NO: 4480466 - DNA, 25 bp, Homo sapien
gccgcctccaaacaaaccgactcca

SEQ ID NO: 4480467 - DNA, 25 bp, Homo sapien
tcaggccgcctccaaacaaaccgac

SEQ ID NO: 4480468 - DNA, 25 bp, Homo sapien
aaagcaaaataaacgggagtcgcat

SEQ ID NO: 4480469 - DNA, 25 bp, Homo sapien
caggctgagcagtatggctaaatcc

SEQ ID NO: 4480470 - DNA, 25 bp, Homo sapien
ggctgagcagtatggctaaatccat

SEQ ID NO: 4480471 - DNA, 25 bp, Homo sapien
caaaataaacgggagtcgcatcacc

SEQ ID NO: 4480472 - DNA, 25 bp, Homo sapien
aggcccggcccaaggcagtcatgtc

SEQ ID NO: 4480473 - DNA, 25 bp, Homo sapien
caggcccggcccaaggcagtcatgt

SEQ ID NO: 4480474 - DNA, 25 bp, Homo sapien
ggcccggcccaaggcagtcatgtct

SEQ ID NO: 4480475 - DNA, 25 bp, Homo sapien
cccggcccaaggcagtcatgtctct

SEQ ID NO: 4480476 - DNA, 25 bp, Homo sapien
gagaggggttcggcctccgatgcac

SEQ ID NO: 4480477 - DNA, 25 bp, Homo sapien
ggagaggggttcggcctccgatgca

SEQ ID NO: 4480478 - DNA, 25 bp, Homo sapien
accaagctggatggccaccgccaga

SEQ ID NO: 4480479 - DNA, 25 bp, Homo sapien
aggagtggatcagccagatggccac

SEQ ID NO: 4480480 - DNA, 25 bp, Homo sapien
cacatgaggacagagggtccacctg

SEQ ID NO: 4480481 - DNA, 25 bp, Homo sapien
gtccacctggaggagtggatcagcc

SEQ ID NO: 4480482 - DNA, 25 bp, Homo sapien
tatccctgaagtgcccctgccccta

SEQ ID NO: 4480483 - DNA, 25 bp, Homo sapien
ttcctatccctgaagtgcccctgcc

SEQ ID NO: 4480484 - DNA, 25 bp, Homo sapien
tccttcctatccctgaagtgcccct

SEQ ID NO: 4480485 - DNA, 25 bp, Homo sapien
ctggaacacacaggcccctccttcc

SEQ ID NO: 4480486 - DNA, 25 bp, Homo sapien
ggtagaaagatcatcacataggggt

SEQ ID NO: 4480487 - DNA, 25 bp, Homo sapien
gtagaaagatcatcacataggggtt

SEQ ID NO: 4480488 - DNA, 25 bp, Homo sapien
gggtagaaagatcatcacatagggg

SEQ ID NO: 4480489 - DNA, 25 bp, Homo sapien
gaaggggagccaaggatagtcctgg

SEQ ID NO: 4480490 - DNA, 25 bp, Homo sapien
ggtggaacccaggaatggtctttga

SEQ ID NO: 4480491 - DNA, 25 bp, Homo sapien
aaaagtggaatcactggctgtattt

SEQ ID NO: 4480492 - DNA, 25 bp, Homo sapien
agaaaagtggaatcactggctgtat

SEQ ID NO: 4480493 - DNA, 25 bp, Homo sapien
gaaaagtggaatcactggctgtatt

SEQ ID NO: 4480494 - DNA, 25 bp, Homo sapien
aaagtggaatcactggctgtatttt

SEQ ID NO: 4480495 - DNA, 25 bp, Homo sapien
gtcttcacaatgtaagtctcgggca

SEQ ID NO: 4480496 - DNA, 25 bp, Homo sapien
tttaaaaagtgtcttcacaatgtaa

SEQ ID NO: 4480497 - DNA, 25 bp, Homo sapien
aagtgtcttcacaatgtaagtctcg

SEQ ID NO: 4480498 - DNA, 25 bp, Homo sapien
taaaaagtgtcttcacaatgtaagt

SEQ ID NO: 4480499 - DNA, 25 bp, Homo sapien
gtcgagattcttctaacatcatggg

SEQ ID NO: 4480500 - DNA, 25 bp, Homo sapien
ttattctgtcgagattcttctaaca

SEQ ID NO: 4480501 - DNA, 25 bp, Homo sapien
gctgccaatttattctgtcgagatt

SEQ ID NO: 4480502 - DNA, 25 bp, Homo sapien
ctgctgccaatttattctgtcgaga

SEQ ID NO: 4480503 - DNA, 25 bp, Homo sapien
gctcttcctttgctgatattctttt

SEQ ID NO: 4480504 - DNA, 25 bp, Homo sapien
tcttcctttgctgatattcttttag

SEQ ID NO: 4480505 - DNA, 25 bp, Homo sapien
cagggctcttcctttgctgatattc

SEQ ID NO: 4480506 - DNA, 25 bp, Homo sapien
gggctcttcctttgctgatattctt

SEQ ID NO: 4480507 - DNA, 25 bp, Homo sapien
tgagtggccaccaccggaagtggtt

SEQ ID NO: 4480508 - DNA, 25 bp, Homo sapien
cccaggtgagtggccaccaccggaa

SEQ ID NO: 4480509 - DNA, 25 bp, Homo sapien
gttgtctcagggctactgtcagttt

SEQ ID NO: 4480510 - DNA, 25 bp, Homo sapien
gtggttgtctcagggctactgtcag

SEQ ID NO: 4480511 - DNA, 25 bp, Homo sapien
gagtggttaaggttggacacccgca

SEQ ID NO: 4480512 - DNA, 25 bp, Homo sapien
ccattggagtggttaaggttggaca

SEQ ID NO: 4480513 - DNA, 25 bp, Homo sapien
cattggagtggttaaggttggacac

SEQ ID NO: 4480514 - DNA, 25 bp, Homo sapien
ttccacttgtccaatgggggagcac

SEQ ID NO: 4480515 - DNA, 25 bp, Homo sapien
cttccacttgtccaatgggggagca

SEQ ID NO: 4480516 - DNA, 25 bp, Homo sapien
cacttgtccaatgggggagcactac

SEQ ID NO: 4480517 - DNA, 25 bp, Homo sapien
ccacttgtccaatgggggagcacta

SEQ ID NO: 4480518 - DNA, 25 bp, Homo sapien
agttggaagaggattgtggggagag

SEQ ID NO: 4480519 - DNA, 25 bp, Homo sapien
aggagttggaagaggattgtgggga

SEQ ID NO: 4480520 - DNA, 25 bp, Homo sapien
ggaagaggattgtggggagaggtag

SEQ ID NO: 4480521 - DNA, 25 bp, Homo sapien
tggaagaggattgtggggagaggta

SEQ ID NO: 4480522 - DNA, 25 bp, Homo sapien
tgattgattgtcactgagcttgact

SEQ ID NO: 4480523 - DNA, 25 bp, Homo sapien
ttgtcactgagcttgactccagggc

SEQ ID NO: 4480524 - DNA, 25 bp, Homo sapien
tttcattgagctgattgattgtcac

SEQ ID NO: 4480525 - DNA, 25 bp, Homo sapien
tgattctatgttttcattgagctga

SEQ ID NO: 4480526 - DNA, 25 bp, Homo sapien
ttccagctgatgttccacttgtttc

SEQ ID NO: 4480527 - DNA, 25 bp, Homo sapien
tgttccacttgtttcttctgctgtt

SEQ ID NO: 4480528 - DNA, 25 bp, Homo sapien
gttccacttgtttcttctgctgttt

SEQ ID NO: 4480529 - DNA, 25 bp, Homo sapien
ttcttccagctgatgttccacttgt

SEQ ID NO: 4480530 - DNA, 25 bp, Homo sapien
ctaactgctccatttgtgctttgtg

SEQ ID NO: 4480531 - DNA, 25 bp, Homo sapien
ctctaactgctccatttgtgctttg

SEQ ID NO: 4480532 - DNA, 25 bp, Homo sapien
taactgctccatttgtgctttgtgt

SEQ ID NO: 4480533 - DNA, 25 bp, Homo sapien
actgctccatttgtgctttgtgtat

SEQ ID NO: 4480534 - DNA, 25 bp, Homo sapien
cttcgaagtgtcgggcagcacgttt

SEQ ID NO: 4480535 - DNA, 25 bp, Homo sapien
cagcacgtttagtatggtaaagggt

SEQ ID NO: 4480536 - DNA, 25 bp, Homo sapien
tagtatggtaaagggtggtcttcaa

SEQ ID NO: 4480537 - DNA, 25 bp, Homo sapien
tgtcgggcagcacgtttagtatggt

SEQ ID NO: 4480538 - DNA, 25 bp, Homo sapien
agagcccgctccaattcttgaatat

SEQ ID NO: 4480539 - DNA, 25 bp, Homo sapien
gagcccgctccaattcttgaatatg

SEQ ID NO: 4480540 - DNA, 25 bp, Homo sapien
tcttgaatatgctgtaaggagtatt

SEQ ID NO: 4480541 - DNA, 25 bp, Homo sapien
tatgctgtaaggagtattgcaggcg

SEQ ID NO: 4480542 - DNA, 25 bp, Homo sapien
aagttttgatctggggagctcgggc

SEQ ID NO: 4480543 - DNA, 25 bp, Homo sapien
ttgatctggggagctcgggcagtgc

SEQ ID NO: 4480544 - DNA, 25 bp, Homo sapien
gtgagaagttttgatctggggagct

SEQ ID NO: 4480545 - DNA, 25 bp, Homo sapien
gatctggggagctcgggcagtgccc

SEQ ID NO: 4480546 - DNA, 25 bp, Homo sapien
tggtctgctgtaaccgccgctggag

SEQ ID NO: 4480547 - DNA, 25 bp, Homo sapien
gcagcgcccgctcctttatggtctg

SEQ ID NO: 4480548 - DNA, 25 bp, Homo sapien
tgtcacgtgtgcgttcagcagcgcc

SEQ ID NO: 4480549 - DNA, 25 bp, Homo sapien
aggaccgcttctctgcagctcgagg

SEQ ID NO: 4480550 - DNA, 25 bp, Homo sapien
tatgtgtttagcatattcgtctcgc

SEQ ID NO: 4480551 - DNA, 25 bp, Homo sapien
tttatgtgtttagcatattcgtctc

SEQ ID NO: 4480552 - DNA, 25 bp, Homo sapien
tgtgtttagcatattcgtctcgctc

SEQ ID NO: 4480553 - DNA, 25 bp, Homo sapien
tgtttagcatattcgtctcgctcta

SEQ ID NO: 4480554 - DNA, 25 bp, Homo sapien
cgatgtatgtcacgcttcttctctt

SEQ ID NO: 4480555 - DNA, 25 bp, Homo sapien
tatccgatgtatgtcacgcttcttc

SEQ ID NO: 4480556 - DNA, 25 bp, Homo sapien
cagctcctgtatccgatgtatgtca

SEQ ID NO: 4480557 - DNA, 25 bp, Homo sapien
cctgtatccgatgtatgtcacgctt

SEQ ID NO: 4480558 - DNA, 25 bp, Homo sapien
ctgggggtgccagggatgggggctc

SEQ ID NO: 4480559 - DNA, 25 bp, Homo sapien
gggggtgccagggatgggggctcag

SEQ ID NO: 4480560 - DNA, 25 bp, Homo sapien
tgggggtgccagggatgggggctca

SEQ ID NO: 4480561 - DNA, 25 bp, Homo sapien
tcccgaagcctctcgttttgttcac

SEQ ID NO: 4480562 - DNA, 25 bp, Homo sapien
ctcccgaagcctctcgttttgttca

SEQ ID NO: 4480563 - DNA, 25 bp, Homo sapien
tcacctcgtctagcttctcctgcag

SEQ ID NO: 4480564 - DNA, 25 bp, Homo sapien
cttcacctcgtctagcttctcctgc

SEQ ID NO: 4480565 - DNA, 25 bp, Homo sapien
catctccttcacctcgtctagcttc

SEQ ID NO: 4480566 - DNA, 25 bp, Homo sapien
tgcagtgcgctctttttctcgttgt

SEQ ID NO: 4480567 - DNA, 25 bp, Homo sapien
tcgctgctgctgcagactctgagac

SEQ ID NO: 4480568 - DNA, 25 bp, Homo sapien
tgctgctgcagactctgagactctt

SEQ ID NO: 4480569 - DNA, 25 bp, Homo sapien
gctgctgctgcagactctgagactc

SEQ ID NO: 4480570 - DNA, 25 bp, Homo sapien
ctgctgcagactctgagactcttgg

SEQ ID NO: 4480571 - DNA, 25 bp, Homo sapien
tggtccacgaactgggtctgcagca

SEQ ID NO: 4480572 - DNA, 25 bp, Homo sapien
tgcagctggtccacgaactgggtct

SEQ ID NO: 4480573 - DNA, 25 bp, Homo sapien
tgcagcagtaactgcctgtgcagcg

SEQ ID NO: 4480574 - DNA, 25 bp, Homo sapien
agcagtaactgcctgtgcagcgcct

SEQ ID NO: 4480575 - DNA, 25 bp, Homo sapien
cacgaggcttagctgggtctctagc

SEQ ID NO: 4480576 - DNA, 25 bp, Homo sapien
ccacgaggcttagctgggtctctag

SEQ ID NO: 4480577 - DNA, 25 bp, Homo sapien
ccctttctgatctggtccagttcat

SEQ ID NO: 4480578 - DNA, 25 bp, Homo sapien
tgatctggtccagttcattcatcct

SEQ ID NO: 4480579 - DNA, 25 bp, Homo sapien
ttctgatctggtccagttcattcat

SEQ ID NO: 4480580 - DNA, 25 bp, Homo sapien
tgcggacacccggttggcataacga

SEQ ID NO: 4480581 - DNA, 25 bp, Homo sapien
cactgtccagatgttgtcctccatc

SEQ ID NO: 4480582 - DNA, 25 bp, Homo sapien
ctgggatgtttggcgtgggccgagg

SEQ ID NO: 4480583 - DNA, 25 bp, Homo sapien
gggatgtttggcgtgggccgaggcg

SEQ ID NO: 4480584 - DNA, 25 bp, Homo sapien
gatgtttggcgtgggccgaggcgcc

SEQ ID NO: 4480585 - DNA, 25 bp, Homo sapien
gtggcctcccggctctccaggtcct

SEQ ID NO: 4480586 - DNA, 25 bp, Homo sapien
cgtggcctcccggctctccaggtcc

SEQ ID NO: 4480587 - DNA, 25 bp, Homo sapien
acacacaaactcatctccagtcctc

SEQ ID NO: 4480588 - DNA, 25 bp, Homo sapien
acacaaactcatctccagtcctccc

SEQ ID NO: 4480589 - DNA, 25 bp, Homo sapien
cacacaaactcatctccagtcctcc

SEQ ID NO: 4480590 - DNA, 25 bp, Homo sapien
cacaaactcatctccagtcctccct

SEQ ID NO: 4480591 - DNA, 25 bp, Homo sapien
tccagaaggctggacgaatccaagc

SEQ ID NO: 4480592 - DNA, 25 bp, Homo sapien
ggacgaatccaagctctcgtctctc

SEQ ID NO: 4480593 - DNA, 25 bp, Homo sapien
aaggctggacgaatccaagctctcg

SEQ ID NO: 4480594 - DNA, 25 bp, Homo sapien
gctggacgaatccaagctctcgtct

SEQ ID NO: 4480595 - DNA, 25 bp, Homo sapien
ggctttcatatacggtgaaggactc

SEQ ID NO: 4480596 - DNA, 25 bp, Homo sapien
ctggctttcatatacggtgaaggac

SEQ ID NO: 4480597 - DNA, 25 bp, Homo sapien
ccctggctttcatatacggtgaagg

SEQ ID NO: 4480598 - DNA, 25 bp, Homo sapien
ctttcatatacggtgaaggactctc

SEQ ID NO: 4480599 - DNA, 25 bp, Homo sapien
atgcccctcatggttgcccacaagg

SEQ ID NO: 4480600 - DNA, 25 bp, Homo sapien
ggcaacaccaactcttgcagctcca

SEQ ID NO: 4480601 - DNA, 25 bp, Homo sapien
gggttctgggcagcgatgaggaatt

SEQ ID NO: 4480602 - DNA, 25 bp, Homo sapien
ggcagcgatgaggaatttgccatgc

SEQ ID NO: 4480603 - DNA, 25 bp, Homo sapien
gacagctgcacgatctgctgtacag

SEQ ID NO: 4480604 - DNA, 25 bp, Homo sapien
ttgtccaggctcacttcataaaaaa

SEQ ID NO: 4480605 - DNA, 25 bp, Homo sapien
tgcaggctccacgttgttgtccagg

SEQ ID NO: 4480606 - DNA, 25 bp, Homo sapien
taggtgtcctgcatgacaggagaca

SEQ ID NO: 4480607 - DNA, 25 bp, Homo sapien
tgtgtgtttgaattcccaccaccta

SEQ ID NO: 4480608 - DNA, 25 bp, Homo sapien
aagggcaaactcgatatgcatacta

SEQ ID NO: 4480609 - DNA, 25 bp, Homo sapien
caaactcgatatgcatactaatgac

SEQ ID NO: 4480610 - DNA, 25 bp, Homo sapien
cacctaagggcaaactcgatatgca

SEQ ID NO: 4480611 - DNA, 25 bp, Homo sapien
tctcataatacttggacactcacaa

SEQ ID NO: 4480612 - DNA, 25 bp, Homo sapien
ggaaacataagtctgtcattgtata

SEQ ID NO: 4480613 - DNA, 25 bp, Homo sapien
ctttgtgaggaaacataagtctgtc

SEQ ID NO: 4480614 - DNA, 25 bp, Homo sapien
ttctcataatacttggacactcaca

SEQ ID NO: 4480615 - DNA, 25 bp, Homo sapien
tgttgtcatacgatttacatgctat

SEQ ID NO: 4480616 - DNA, 25 bp, Homo sapien
taagttgttgtcatacgatttacat

SEQ ID NO: 4480617 - DNA, 25 bp, Homo sapien
agttgttgtcatacgatttacatgc

SEQ ID NO: 4480618 - DNA, 25 bp, Homo sapien
cttaagttgttgtcatacgatttac

SEQ ID NO: 4480619 - DNA, 25 bp, Homo sapien
tgattagaacctcctcctcatatgc

SEQ ID NO: 4480620 - DNA, 25 bp, Homo sapien
atgattagaacctcctcctcatatg

SEQ ID NO: 4480621 - DNA, 25 bp, Homo sapien
gatactatatgtacactgcggaagg

SEQ ID NO: 4480622 - DNA, 25 bp, Homo sapien
tctgccaacaataggccgtggctgg

SEQ ID NO: 4480623 - DNA, 25 bp, Homo sapien
caacaataggccgtggctggatcag

SEQ ID NO: 4480624 - DNA, 25 bp, Homo sapien
atctgccaacaataggccgtggctg

SEQ ID NO: 4480625 - DNA, 25 bp, Homo sapien
taggccgtggctggatcaggcttca

SEQ ID NO: 4480626 - DNA, 25 bp, Homo sapien
cctgatgtttgcccgcaccagtcaa

SEQ ID NO: 4480627 - DNA, 25 bp, Homo sapien
ctcctgatgtttgcccgcaccagtc

SEQ ID NO: 4480628 - DNA, 25 bp, Homo sapien
gatgtttgcccgcaccagtcaagtt

SEQ ID NO: 4480629 - DNA, 25 bp, Homo sapien
tttgcccgcaccagtcaagttccat

SEQ ID NO: 4480630 - DNA, 25 bp, Homo sapien
gcccagcgtgggtatggctgcccat

SEQ ID NO: 4480631 - DNA, 25 bp, Homo sapien
tgcccattggtcctctgaagagccc

SEQ ID NO: 4480632 - DNA, 25 bp, Homo sapien
tagcagctggtgtatgtctgggctt

SEQ ID NO: 4480633 - DNA, 25 bp, Homo sapien
agccccaggggcttgtagcagctgg

SEQ ID NO: 4480634 - DNA, 25 bp, Homo sapien
tgcagatttctagggggccttctac

SEQ ID NO: 4480635 - DNA, 25 bp, Homo sapien
gctgcagatttctagggggccttct

SEQ ID NO: 4480636 - DNA, 25 bp, Homo sapien
gcagatttctagggggccttctact

SEQ ID NO: 4480637 - DNA, 25 bp, Homo sapien
agatttctagggggccttctactgg

SEQ ID NO: 4480638 - DNA, 25 bp, Homo sapien
tgtccaggcctttgtttaggatatt

SEQ ID NO: 4480639 - DNA, 25 bp, Homo sapien
tggactgtgcattttgatgggcagg

SEQ ID NO: 4480640 - DNA, 25 bp, Homo sapien
ctggactgtgcattttgatgggcag

SEQ ID NO: 4480641 - DNA, 25 bp, Homo sapien
agggcggggcctgctcgagtgaggc

SEQ ID NO: 4480642 - DNA, 25 bp, Homo sapien
agtgaggccgggagcggaccgcagc

SEQ ID NO: 4480643 - DNA, 25 bp, Homo sapien
gggcctgctcgagtgaggccgggag

SEQ ID NO: 4480644 - DNA, 25 bp, Homo sapien
ctgctcgagtgaggccgggagcgga

SEQ ID NO: 4480645 - DNA, 25 bp, Homo sapien
gatcacgtgacttggactaactgcc

SEQ ID NO: 4480646 - DNA, 25 bp, Homo sapien
ggtcccgcagggtcagctgagtcga

SEQ ID NO: 4480647 - DNA, 25 bp, Homo sapien
cagggtcagctgagtcgacgatcac

SEQ ID NO: 4480648 - DNA, 25 bp, Homo sapien
gggtcagctgagtcgacgatcacgt

SEQ ID NO: 4480649 - DNA, 25 bp, Homo sapien
tcgcgccaagaagccagggcccggg

SEQ ID NO: 4480650 - DNA, 25 bp, Homo sapien
cgccaagaagccagggcccgggaat

SEQ ID NO: 4480651 - DNA, 25 bp, Homo sapien
catcgcgccaagaagccagggcccg

SEQ ID NO: 4480652 - DNA, 25 bp, Homo sapien
gcgccaagaagccagggcccgggaa

SEQ ID NO: 4480653 - DNA, 25 bp, Homo sapien
caagcctcgcttcgcccctagtgcc

SEQ ID NO: 4480654 - DNA, 25 bp, Homo sapien
gcccaagcctcgcttcgcccctagt

SEQ ID NO: 4480655 - DNA, 25 bp, Homo sapien
cctcgcttcgcccctagtgcctcac

SEQ ID NO: 4480656 - DNA, 25 bp, Homo sapien
agcctcgcttcgcccctagtgcctc

SEQ ID NO: 4480657 - DNA, 25 bp, Homo sapien
gacatagatggataccctctggcct

SEQ ID NO: 4480658 - DNA, 25 bp, Homo sapien
tagaccaggcgcttagaacgtacgg

SEQ ID NO: 4480659 - DNA, 25 bp, Homo sapien
cagatgatactctcccagctatggg

SEQ ID NO: 4480660 - DNA, 25 bp, Homo sapien
catgggataaaacaaagtcctgggc

SEQ ID NO: 4480661 - DNA, 25 bp, Homo sapien
cagtcgggacagtccagatcaccac

SEQ ID NO: 4480662 - DNA, 25 bp, Homo sapien
agtccagatcaccacagaaccggaa

SEQ ID NO: 4480663 - DNA, 25 bp, Homo sapien
atttctgccaggacccagtcgggac

SEQ ID NO: 4480664 - DNA, 25 bp, Homo sapien
tcttggccagcgtgctgatttctgc

SEQ ID NO: 4480665 - DNA, 25 bp, Homo sapien
acccagactagaccctgtgcactca

SEQ ID NO: 4480666 - DNA, 25 bp, Homo sapien
cctcctccacccagactagaccctg

SEQ ID NO: 4480667 - DNA, 25 bp, Homo sapien
ccagactagaccctgtgcactcaac

SEQ ID NO: 4480668 - DNA, 25 bp, Homo sapien
tcctccacccagactagaccctgtg

SEQ ID NO: 4480669 - DNA, 25 bp, Homo sapien
catcctctacacccacaatccccac

SEQ ID NO: 4480670 - DNA, 25 bp, Homo sapien
gagcaggccagccactgatcaaggt

SEQ ID NO: 4480671 - DNA, 25 bp, Homo sapien
caaagcatggtagcacaggctgaga

SEQ ID NO: 4480672 - DNA, 25 bp, Homo sapien
acaggctgagagcactgaggcccta

SEQ ID NO: 4480673 - DNA, 25 bp, Homo sapien
ctggaagggaagtccttacatcagc

SEQ ID NO: 4480674 - DNA, 25 bp, Homo sapien
tgcagagcagccgcaacttcacaga

SEQ ID NO: 4480675 - DNA, 25 bp, Homo sapien
ctggctgcagagcagccgcaacttc

SEQ ID NO: 4480676 - DNA, 25 bp, Homo sapien
ggctgcagagcagccgcaacttcac

SEQ ID NO: 4480677 - DNA, 25 bp, Homo sapien
cagagcagccgcaacttcacagagg

SEQ ID NO: 4480678 - DNA, 25 bp, Homo sapien
ccctgtcccagcagctcctttagta

SEQ ID NO: 4480679 - DNA, 25 bp, Homo sapien
atcccctgtcccagcagctccttta

SEQ ID NO: 4480680 - DNA, 25 bp, Homo sapien
cctgtcccagcagctcctttagtac

SEQ ID NO: 4480681 - DNA, 25 bp, Homo sapien
atcaatcccctgtcccagcagctcc

SEQ ID NO: 4480682 - DNA, 25 bp, Homo sapien
gggcctagtgcagagtttcagggca

SEQ ID NO: 4480683 - DNA, 25 bp, Homo sapien
aatggggtgctggatcttgtactca

SEQ ID NO: 4480684 - DNA, 25 bp, Homo sapien
gacaatggggtgctggatcttgtac

SEQ ID NO: 4480685 - DNA, 25 bp, Homo sapien
cctagtgcagagtttcagggcagtg

SEQ ID NO: 4480686 - DNA, 25 bp, Homo sapien
gggaggtgcccagagaggttgagag

SEQ ID NO: 4480687 - DNA, 25 bp, Homo sapien
ggaggtgcccagagaggttgagagg

SEQ ID NO: 4480688 - DNA, 25 bp, Homo sapien
cccagcctggatcctgcgataagga

SEQ ID NO: 4480689 - DNA, 25 bp, Homo sapien
ccccagcctggatcctgcgataagg

SEQ ID NO: 4480690 - DNA, 25 bp, Homo sapien
gatcctgcgataaggaacagacagg

SEQ ID NO: 4480691 - DNA, 25 bp, Homo sapien
cctggatcctgcgataaggaacaga

SEQ ID NO: 4480692 - DNA, 25 bp, Homo sapien
aaggagaccttcagggggtgccagg

SEQ ID NO: 4480693 - DNA, 25 bp, Homo sapien
caggcccctgctcaccagcccctca

SEQ ID NO: 4480694 - DNA, 25 bp, Homo sapien
ctatggggaaaggagaccttcaggg

SEQ ID NO: 4480695 - DNA, 25 bp, Homo sapien
ccaggcccctgctcaccagcccctc

SEQ ID NO: 4480696 - DNA, 25 bp, Homo sapien
caaacttggcgtcagccgtgagctt

SEQ ID NO: 4480697 - DNA, 25 bp, Homo sapien
aaacttggcgtcagccgtgagcttc

SEQ ID NO: 4480698 - DNA, 25 bp, Homo sapien
cttggcgtcagccgtgagcttcagg

SEQ ID NO: 4480699 - DNA, 25 bp, Homo sapien
ggcgtcagccgtgagcttcaggatc

SEQ ID NO: 4480700 - DNA, 25 bp, Homo sapien
cctatagactcagcgggatactcac

SEQ ID NO: 4480701 - DNA, 25 bp, Homo sapien
gttgcctggggcctatagactcagc

SEQ ID NO: 4480702 - DNA, 25 bp, Homo sapien
gggcctatagactcagcgggatact

SEQ ID NO: 4480703 - DNA, 25 bp, Homo sapien
cctggggcctatagactcagcggga

SEQ ID NO: 4480704 - DNA, 25 bp, Homo sapien
ctagggaaggtaagttaaggatgct

SEQ ID NO: 4480705 - DNA, 25 bp, Homo sapien
ctcatgctcctccactagggaaggt

SEQ ID NO: 4480706 - DNA, 25 bp, Homo sapien
ggaaggtaagttaaggatgctgctg

SEQ ID NO: 4480707 - DNA, 25 bp, Homo sapien
cagggggtgtcactgtgggtccagc

SEQ ID NO: 4480708 - DNA, 25 bp, Homo sapien
actgtggccttcacatcgcctgact

SEQ ID NO: 4480709 - DNA, 25 bp, Homo sapien
acaaggattcgccatcgacactgtg

SEQ ID NO: 4480710 - DNA, 25 bp, Homo sapien
tgctgcagttcactggacaaggatt

SEQ ID NO: 4480711 - DNA, 25 bp, Homo sapien
tcgccatcgacactgtgcttggccg

SEQ ID NO: 4480712 - DNA, 25 bp, Homo sapien
ttcactggacaaggattcgccatcg

SEQ ID NO: 4480713 - DNA, 25 bp, Homo sapien
ggtagaatggagtagctctggaggt

SEQ ID NO: 4480714 - DNA, 25 bp, Homo sapien
cccagacagggcaggtacacctcag

SEQ ID NO: 4480715 - DNA, 25 bp, Homo sapien
gggcaggtacacctcagggtcacag

SEQ ID NO: 4480716 - DNA, 25 bp, Homo sapien
ccttctctagcagcccttggcccac

SEQ ID NO: 4480717 - DNA, 25 bp, Homo sapien
agacccgcaagtgcttctgcaaggg

SEQ ID NO: 4480718 - DNA, 25 bp, Homo sapien
tgcgtaggctgcagacccgcaagtg

SEQ ID NO: 4480719 - DNA, 25 bp, Homo sapien
gtaggctgcagacccgcaagtgctt

SEQ ID NO: 4480720 - DNA, 25 bp, Homo sapien
gctgcagacccgcaagtgcttctgc

SEQ ID NO: 4480721 - DNA, 25 bp, Homo sapien
tgtgaccgtggttaagtcgtctccc

SEQ ID NO: 4480722 - DNA, 25 bp, Homo sapien
gggcaggtgcccgataatcagttct

SEQ ID NO: 4480723 - DNA, 25 bp, Homo sapien
accttctagaatgagcccggaccct

SEQ ID NO: 4480724 - DNA, 25 bp, Homo sapien
ggctgctagtaaccatgtgaccgtg

SEQ ID NO: 4480725 - DNA, 25 bp, Homo sapien
tgggctcttccacggattgcagcag

SEQ ID NO: 4480726 - DNA, 25 bp, Homo sapien
caggtgcaccatgggctcttccacg

SEQ ID NO: 4480727 - DNA, 25 bp, Homo sapien
caggaggacctggaacttgtctgct

SEQ ID NO: 4480728 - DNA, 25 bp, Homo sapien
tggaacttgtctgctgagagggaca

SEQ ID NO: 4480729 - DNA, 25 bp, Homo sapien
ccgtcgaggaatagctgagcctcac

SEQ ID NO: 4480730 - DNA, 25 bp, Homo sapien
agtcaggcggatctgggagagcctc

SEQ ID NO: 4480731 - DNA, 25 bp, Homo sapien
aggcagtcaggcggatctgggagag

SEQ ID NO: 4480732 - DNA, 25 bp, Homo sapien
gggaggcagtcaggcggatctggga

SEQ ID NO: 4480733 - DNA, 25 bp, Homo sapien
gcagtcaggcggatctgggagagcc

SEQ ID NO: 4480734 - DNA, 25 bp, Homo sapien
gctcatcagggtctgggcctgcttc

SEQ ID NO: 4480735 - DNA, 25 bp, Homo sapien
atcagggtctgggcctgcttcagtt

SEQ ID NO: 4480736 - DNA, 25 bp, Homo sapien
tcagcccagggagctcatcagggtc

SEQ ID NO: 4480737 - DNA, 25 bp, Homo sapien
tcatcagggtctgggcctgcttcag

SEQ ID NO: 4480738 - DNA, 25 bp, Homo sapien
ggcagggcggctccacacaggcctg

SEQ ID NO: 4480739 - DNA, 25 bp, Homo sapien
gcagggcggctccacacaggcctgg

SEQ ID NO: 4480740 - DNA, 25 bp, Homo sapien
cgaagagcagttcagagggcgtgac

SEQ ID NO: 4480741 - DNA, 25 bp, Homo sapien
ccctgagccaagttctcaagagaga

SEQ ID NO: 4480742 - DNA, 25 bp, Homo sapien
ggcctcagcatcctagaaccagggc

SEQ ID NO: 4480743 - DNA, 25 bp, Homo sapien
cagggcctcagcatcctagaaccag

SEQ ID NO: 4480744 - DNA, 25 bp, Homo sapien
atttttcctgcttatgaaaacagcc

SEQ ID NO: 4480745 - DNA, 25 bp, Homo sapien
ttcctgcttatgaaaacagccaaca

SEQ ID NO: 4480746 - DNA, 25 bp, Homo sapien
gcttatgaaaacagccaacaattgc

SEQ ID NO: 4480747 - DNA, 25 bp, Homo sapien
cctgcttatgaaaacagccaacaat

SEQ ID NO: 4480748 - DNA, 25 bp, Homo sapien
gaccaagaaggcctgtatgtcactt

SEQ ID NO: 4480749 - DNA, 25 bp, Homo sapien
tccctcaatcagcaattgagaaaag

SEQ ID NO: 4480750 - DNA, 25 bp, Homo sapien
cacaaaaacccttgatctgaaccca

SEQ ID NO: 4480751 - DNA, 25 bp, Homo sapien
tggccttacctatgacctccctcaa

SEQ ID NO: 4480752 - DNA, 25 bp, Homo sapien
tctcgagctgctataacaatgccac

SEQ ID NO: 4480753 - DNA, 25 bp, Homo sapien
gcagacgcagttcctgttgacagcc

SEQ ID NO: 4480754 - DNA, 25 bp, Homo sapien
gttccttaagatactccaggcgagt

SEQ ID NO: 4480755 - DNA, 25 bp, Homo sapien
tttgtgtaacctgactgggccatgg

SEQ ID NO: 4480756 - DNA, 25 bp, Homo sapien
tggaatgatcaaatcggctgggcac

SEQ ID NO: 4480757 - DNA, 25 bp, Homo sapien
tgttgcggagagtctctgaaatcag

SEQ ID NO: 4480758 - DNA, 25 bp, Homo sapien
tctgttgcggagagtctctgaaatc

SEQ ID NO: 4480759 - DNA, 25 bp, Homo sapien
agatggttctgttgcggagagtctc

SEQ ID NO: 4480760 - DNA, 25 bp, Homo sapien
ggttctgttgcggagagtctctgaa

SEQ ID NO: 4480761 - DNA, 25 bp, Homo sapien
ataaacaaacatcatcacggcctgc

SEQ ID NO: 4480762 - DNA, 25 bp, Homo sapien
gaagcgcagccaagcaacaacaaca

SEQ ID NO: 4480763 - DNA, 25 bp, Homo sapien
ctgtcagaagcgcagccaagcaaca

SEQ ID NO: 4480764 - DNA, 25 bp, Homo sapien
tcatcacggcctgccctgtcagaag

SEQ ID NO: 4480765 - DNA, 25 bp, Homo sapien
atcttaagcaccaacgaacagtcag

SEQ ID NO: 4480766 - DNA, 25 bp, Homo sapien
tcttaagcaccaacgaacagtcaga

SEQ ID NO: 4480767 - DNA, 25 bp, Homo sapien
cttaagcaccaacgaacagtcagac

SEQ ID NO: 4480768 - DNA, 25 bp, Homo sapien
cgcaggacgtgcacaggtgcgcggt

SEQ ID NO: 4480769 - DNA, 25 bp, Homo sapien
acgtgcacaggtgcgcggtacgcac

SEQ ID NO: 4480770 - DNA, 25 bp, Homo sapien
ctgcgcgcaggacgtgcacaggtgc

SEQ ID NO: 4480771 - DNA, 25 bp, Homo sapien
cacaggtgcgcggtacgcacaggcc

SEQ ID NO: 4480772 - DNA, 25 bp, Homo sapien
gaggtggcggaagaacctgacttcc

SEQ ID NO: 4480773 - DNA, 25 bp, Homo sapien
caggaaacagcagcgacgagccaga

SEQ ID NO: 4480774 - DNA, 25 bp, Homo sapien
gaagaacctgacttcccactgcctg

SEQ ID NO: 4480775 - DNA, 25 bp, Homo sapien
cacccagctagcgtgggacagggtc

SEQ ID NO: 4480776 - DNA, 25 bp, Homo sapien
cacagggctcgttttgcgggagaac

SEQ ID NO: 4480777 - DNA, 25 bp, Homo sapien
gagaacgtgaggctccaaatcctag

SEQ ID NO: 4480778 - DNA, 25 bp, Homo sapien
agccgctgggaggtgtagtccctca

SEQ ID NO: 4480779 - DNA, 25 bp, Homo sapien
gccactgcagccactaaagggttaa

SEQ ID NO: 4480780 - DNA, 25 bp, Homo sapien
cggttcggaatcggaggcgaaggtg

SEQ ID NO: 4480781 - DNA, 25 bp, Homo sapien
ttcggaatcggaggcgaaggtgtgc

SEQ ID NO: 4480782 - DNA, 25 bp, Homo sapien
gttcggaatcggaggcgaaggtgtg

SEQ ID NO: 4480783 - DNA, 25 bp, Homo sapien
ctccgccctccctgctttgccactt

SEQ ID NO: 4480784 - DNA, 25 bp, Homo sapien
ccgccctccctgctttgccacttgc

SEQ ID NO: 4480785 - DNA, 25 bp, Homo sapien
tccgccctccctgctttgccacttg

SEQ ID NO: 4480786 - DNA, 25 bp, Homo sapien
ggagggaaagggcccgcggcagcgc

SEQ ID NO: 4480787 - DNA, 25 bp, Homo sapien
tggggtggggggtatcgactcctca

SEQ ID NO: 4480788 - DNA, 25 bp, Homo sapien
gagggaaagggcccgcggcagcgcc

SEQ ID NO: 4480789 - DNA, 25 bp, Homo sapien
gctgccgccatgcgctggagccgct

SEQ ID NO: 4480790 - DNA, 25 bp, Homo sapien
ggctgccgccatgcgctggagccgc

SEQ ID NO: 4480791 - DNA, 25 bp, Homo sapien
gaaagagcgaagctcggcctggcgc

SEQ ID NO: 4480792 - DNA, 25 bp, Homo sapien
gcgggagcggccgaatcggccgctt

SEQ ID NO: 4480793 - DNA, 25 bp, Homo sapien
aatcggccgcttggccgcagcgaga

SEQ ID NO: 4480794 - DNA, 25 bp, Homo sapien
caccgagggaaagagcgaagctcgg

SEQ ID NO: 4480795 - DNA, 25 bp, Homo sapien
agacgaaagtcccaatccttgcggg

SEQ ID NO: 4480796 - DNA, 25 bp, Homo sapien
ccatgggcttccaccgcgtttagac

SEQ ID NO: 4480797 - DNA, 25 bp, Homo sapien
actcacggatctcatctccgccttg

SEQ ID NO: 4480798 - DNA, 25 bp, Homo sapien
tttagacgaaagtcccaatccttgc

SEQ ID NO: 4480799 - DNA, 25 bp, Homo sapien
agcaggactctgccttgctgctaac

SEQ ID NO: 4480800 - DNA, 25 bp, Homo sapien
agagggagcaggactctgccttgct

SEQ ID NO: 4480801 - DNA, 25 bp, Homo sapien
ggaaagcccagggcgctgggagctg

SEQ ID NO: 4480802 - DNA, 25 bp, Homo sapien
ccggacaggtgcctggaaagcccag

SEQ ID NO: 4480803 - DNA, 25 bp, Homo sapien
agagggctcagtatcaggcgcagct

SEQ ID NO: 4480804 - DNA, 25 bp, Homo sapien
gctctcaaagggcacctcagggttg

SEQ ID NO: 4480805 - DNA, 25 bp, Homo sapien
ctgaagctgagatgcggtaggcact

SEQ ID NO: 4480806 - DNA, 25 bp, Homo sapien
ttgcggctgacagaggacttctcca

SEQ ID NO: 4480807 - DNA, 25 bp, Homo sapien
aagagccggacatgccgaagcggaa

SEQ ID NO: 4480808 - DNA, 25 bp, Homo sapien
accagctgaaaagagccggacatgc

SEQ ID NO: 4480809 - DNA, 25 bp, Homo sapien
tgaaaagagccggacatgccgaagc

SEQ ID NO: 4480810 - DNA, 25 bp, Homo sapien
cggacatgccgaagcggaagaccag

SEQ ID NO: 4480811 - DNA, 25 bp, Homo sapien
tcccagcggccgaaccggcggatgt

SEQ ID NO: 4480812 - DNA, 25 bp, Homo sapien
tggtactcctgcaagacacagggcc

SEQ ID NO: 4480813 - DNA, 25 bp, Homo sapien
tgtaaaagcgcaggtgggcatggcg

SEQ ID NO: 4480814 - DNA, 25 bp, Homo sapien
tgtccacgaaacatagggcgagccg

SEQ ID NO: 4480815 - DNA, 25 bp, Homo sapien
caatgagctgtgatggcgccactgt

SEQ ID NO: 4480816 - DNA, 25 bp, Homo sapien
ctagcctaggcaacagagcgagacc

SEQ ID NO: 4480817 - DNA, 25 bp, Homo sapien
aatgagctgtgatggcgccactgta

SEQ ID NO: 4480818 - DNA, 25 bp, Homo sapien
actctagcctaggcaacagagcgag

SEQ ID NO: 4480819 - DNA, 25 bp, Homo sapien
ctgggtgcaaggggaaggaaactgg

SEQ ID NO: 4480820 - DNA, 25 bp, Homo sapien
actgggagttacagttcctcttctc

SEQ ID NO: 4480821 - DNA, 25 bp, Homo sapien
aactgggagttacagttcctcttct

SEQ ID NO: 4480822 - DNA, 25 bp, Homo sapien
ggaacacggtctgggtgcgtaagac

SEQ ID NO: 4480823 - DNA, 25 bp, Homo sapien
tctgggtgcgtaagacccatcccca

SEQ ID NO: 4480824 - DNA, 25 bp, Homo sapien
tggaggaacacggtctgggtgcgta

SEQ ID NO: 4480825 - DNA, 25 bp, Homo sapien
cacggtctgggtgcgtaagacccat

SEQ ID NO: 4480826 - DNA, 25 bp, Homo sapien
tccgctaggtttcgtagcacattct

SEQ ID NO: 4480827 - DNA, 25 bp, Homo sapien
tgcccgcagatagttgccaatgcca

SEQ ID NO: 4480828 - DNA, 25 bp, Homo sapien
gccaatgccattgaagaacctctgg

SEQ ID NO: 4480829 - DNA, 25 bp, Homo sapien
cggtcaaaggccttatccgctaggt

SEQ ID NO: 4480830 - DNA, 25 bp, Homo sapien
cttctcaaagggggggatcttcagc

SEQ ID NO: 4480831 - DNA, 25 bp, Homo sapien
aggaccgagcgggccttctcaaagg

SEQ ID NO: 4480832 - DNA, 25 bp, Homo sapien
gcagggcctccaggaccgagcgggc

SEQ ID NO: 4480833 - DNA, 25 bp, Homo sapien
ccaggaccgagcgggccttctcaaa

SEQ ID NO: 4480834 - DNA, 25 bp, Homo sapien
ggcactgagtgacatagctccagca

SEQ ID NO: 4480835 - DNA, 25 bp, Homo sapien
gcactgagtgacatagctccagcag

SEQ ID NO: 4480836 - DNA, 25 bp, Homo sapien
ctggaccacttccttgggcactgag

SEQ ID NO: 4480837 - DNA, 25 bp, Homo sapien
gggcactgagtgacatagctccagc

SEQ ID NO: 4480838 - DNA, 25 bp, Homo sapien
gggctacaaacttccaaatcggtga

SEQ ID NO: 4480839 - DNA, 25 bp, Homo sapien
tattgacaagtgaggaggcctagtc

SEQ ID NO: 4480840 - DNA, 25 bp, Homo sapien
tagtccattgagtatcagctagggc

SEQ ID NO: 4480841 - DNA, 25 bp, Homo sapien
tgccccagggttacacaatcatttg

SEQ ID NO: 4480842 - DNA, 25 bp, Homo sapien
tggcatgccatagcagcgcagccag

SEQ ID NO: 4480843 - DNA, 25 bp, Homo sapien
gggagctcatgcctggcatgccata

SEQ ID NO: 4480844 - DNA, 25 bp, Homo sapien
cagccaggctcgaaaggcagcaaag

SEQ ID NO: 4480845 - DNA, 25 bp, Homo sapien
tggaaccagatggtacggccatgcc

SEQ ID NO: 4480846 - DNA, 25 bp, Homo sapien
ggtccttggagggtctagacagacc

SEQ ID NO: 4480847 - DNA, 25 bp, Homo sapien
tctagacagaccctgagcatcacca

SEQ ID NO: 4480848 - DNA, 25 bp, Homo sapien
tgtgaccctcaggaacagtgtggtc

SEQ ID NO: 4480849 - DNA, 25 bp, Homo sapien
cagttattgtgaccccacgtttcca

SEQ ID NO: 4480850 - DNA, 25 bp, Homo sapien
ccttgggctacttccactagctgca

SEQ ID NO: 4480851 - DNA, 25 bp, Homo sapien
ttcacttgggctacctgccttgggc

SEQ ID NO: 4480852 - DNA, 25 bp, Homo sapien
cagtgtagcttctcccttaggaagc

SEQ ID NO: 4480853 - DNA, 25 bp, Homo sapien
cacacacccatccagatcagtgtag

SEQ ID NO: 4480854 - DNA, 25 bp, Homo sapien
tttgggtgccaacggtccaggatcc

SEQ ID NO: 4480855 - DNA, 25 bp, Homo sapien
ctttgggtgccaacggtccaggatc

SEQ ID NO: 4480856 - DNA, 25 bp, Homo sapien
ttgggtgccaacggtccaggatccc

SEQ ID NO: 4480857 - DNA, 25 bp, Homo sapien
gagttggagggtcctatcctgccca

SEQ ID NO: 4480858 - DNA, 25 bp, Homo sapien
tcctttctgctctcttagcctatta

SEQ ID NO: 4480859 - DNA, 25 bp, Homo sapien
cccttgcaggcgtgaagtcctttct

SEQ ID NO: 4480860 - DNA, 25 bp, Homo sapien
gcctattacattaggagtagcttac

SEQ ID NO: 4480861 - DNA, 25 bp, Homo sapien
ggatttctttttgcgggacttgcgc

SEQ ID NO: 4480862 - DNA, 25 bp, Homo sapien
cttggatttctttttgcgggacttg

SEQ ID NO: 4480863 - DNA, 25 bp, Homo sapien
cactctgtcctcaggactcagctgt

SEQ ID NO: 4480864 - DNA, 25 bp, Homo sapien
tgtgtggccttggatttctttttgc

SEQ ID NO: 4480865 - DNA, 25 bp, Homo sapien
aggaggcgggagcaggcagccatac

SEQ ID NO: 4480866 - DNA, 25 bp, Homo sapien
gcagccagggctgcagagtgcaggg

SEQ ID NO: 4480867 - DNA, 25 bp, Homo sapien
gaggaggcgggagcaggcagccata

SEQ ID NO: 4480868 - DNA, 25 bp, Homo sapien
gctgcagagtgcaggggaggaggcg

SEQ ID NO: 4480869 - DNA, 25 bp, Homo sapien
cagttcagaggttggttagggccca

SEQ ID NO: 4480870 - DNA, 25 bp, Homo sapien
cagaggttggttagggcccaccact

SEQ ID NO: 4480871 - DNA, 25 bp, Homo sapien
gaaagcagttcagaggttggttagg

SEQ ID NO: 4480872 - DNA, 25 bp, Homo sapien
ttcagaggttggttagggcccacca

SEQ ID NO: 4480873 - DNA, 25 bp, Homo sapien
tgggttgcagtcctcttaggaaggt

SEQ ID NO: 4480874 - DNA, 25 bp, Homo sapien
tgcagtcctcttaggaaggtctctc

SEQ ID NO: 4480875 - DNA, 25 bp, Homo sapien
ggctggtcccctcaggccgctgggt

SEQ ID NO: 4480876 - DNA, 25 bp, Homo sapien
tggaggctggtcccctcaggccgct

SEQ ID NO: 4480877 - DNA, 25 bp, Homo sapien
ggcaagatggtcagctaagactcca

SEQ ID NO: 4480878 - DNA, 25 bp, Homo sapien
aagatggtcagctaagactccaggg

SEQ ID NO: 4480879 - DNA, 25 bp, Homo sapien
ggaagaacaggcaagatggtcagct

SEQ ID NO: 4480880 - DNA, 25 bp, Homo sapien
gaacaggcaagatggtcagctaaga

SEQ ID NO: 4480881 - DNA, 25 bp, Homo sapien
ttgaccttccggggtctgcagtggc

SEQ ID NO: 4480882 - DNA, 25 bp, Homo sapien
tcccctctggttccaaggatgggat

SEQ ID NO: 4480883 - DNA, 25 bp, Homo sapien
cctctggttccaaggatgggatgtc

SEQ ID NO: 4480884 - DNA, 25 bp, Homo sapien
tggttccaaggatgggatgtcagcc

SEQ ID NO: 4480885 - DNA, 25 bp, Homo sapien
ggcctgtttgcaccttcagatattg

SEQ ID NO: 4480886 - DNA, 25 bp, Homo sapien
ttgcctgctcccaaaaattcagacc

SEQ ID NO: 4480887 - DNA, 25 bp, Homo sapien
ccagatgcagggcaagacaataaga

SEQ ID NO: 4480888 - DNA, 25 bp, Homo sapien
catgagagttgtgcagggaacagcc

SEQ ID NO: 4480889 - DNA, 25 bp, Homo sapien
gattacagagacagattcagcaggc

SEQ ID NO: 4480890 - DNA, 25 bp, Homo sapien
gaggtacttactccagctgggttgg

SEQ ID NO: 4480891 - DNA, 25 bp, Homo sapien
gcagagttggtgtcacaatggtggg

SEQ ID NO: 4480892 - DNA, 25 bp, Homo sapien
gggcccatgctagatattgagggta

SEQ ID NO: 4480893 - DNA, 25 bp, Homo sapien
cttccggaaagaggagcgagagccc

SEQ ID NO: 4480894 - DNA, 25 bp, Homo sapien
taacttgggcgtaaagctctaccac

SEQ ID NO: 4480895 - DNA, 25 bp, Homo sapien
tgttcaccgacagctagagccagag

SEQ ID NO: 4480896 - DNA, 25 bp, Homo sapien
gagccgccggtgttccaagaaaagc

SEQ ID NO: 4480897 - DNA, 25 bp, Homo sapien
gagccaaagtgtagggtgccaaaaa

SEQ ID NO: 4480898 - DNA, 25 bp, Homo sapien
acttggcggtggtcatgtgtactga

SEQ ID NO: 4480899 - DNA, 25 bp, Homo sapien
ggtcatgttgacctggaaccatagg

SEQ ID NO: 4480900 - DNA, 25 bp, Homo sapien
tgtctcgctttatgacccacactgg

SEQ ID NO: 4480901 - DNA, 25 bp, Homo sapien
cgtggaactgttttgtatctgcctc

SEQ ID NO: 4480902 - DNA, 25 bp, Homo sapien
tttgacttcagttccttatccaggg

SEQ ID NO: 4480903 - DNA, 25 bp, Homo sapien
tgatgtgctagcataactgctctag

SEQ ID NO: 4480904 - DNA, 25 bp, Homo sapien
tagtctaccttagtgccatccacca

SEQ ID NO: 4480905 - DNA, 25 bp, Homo sapien
gctgttcacactttgactggatgga

SEQ ID NO: 4480906 - DNA, 25 bp, Homo sapien
ctttcaatgagggaaccggatgctg

SEQ ID NO: 4480907 - DNA, 25 bp, Homo sapien
gacatgcagtttgcttgcacacacc

SEQ ID NO: 4480908 - DNA, 25 bp, Homo sapien
caagtgggctacctgttaggaacat

SEQ ID NO: 4480909 - DNA, 25 bp, Homo sapien
agtatcgtgtcaaatacggcacagt

SEQ ID NO: 4480910 - DNA, 25 bp, Homo sapien
gcaaagccagagcagataacttggg

SEQ ID NO: 4480911 - DNA, 25 bp, Homo sapien
tacggcacagtattcaaagcccctt

SEQ ID NO: 4480912 - DNA, 25 bp, Homo sapien
aaagccccttaactgcaaagccaga

SEQ ID NO: 4480913 - DNA, 25 bp, Homo sapien
atgttaagtcataagcaagagaaga

SEQ ID NO: 4480914 - DNA, 25 bp, Homo sapien
tggttgtggctcatcataaagggtc

SEQ ID NO: 4480915 - DNA, 25 bp, Homo sapien
aagtggttgtggctcatcataaagg

SEQ ID NO: 4480916 - DNA, 25 bp, Homo sapien
tgttaagtcataagcaagagaagat

SEQ ID NO: 4480917 - DNA, 25 bp, Homo sapien
gctaaggatgctgtgacaaagtacc

SEQ ID NO: 4480918 - DNA, 25 bp, Homo sapien
gactatatgtatcggaggaccgccc

SEQ ID NO: 4480919 - DNA, 25 bp, Homo sapien
caaaagttgtggagactagaagtcc

SEQ ID NO: 4480920 - DNA, 25 bp, Homo sapien
tcaagctgaattcctacaagatggt

SEQ ID NO: 4480921 - DNA, 25 bp, Homo sapien
ctggtcagactacgtggagcgatac

SEQ ID NO: 4480922 - DNA, 25 bp, Homo sapien
tgtcacaacatgagcttacctggag

SEQ ID NO: 4480923 - DNA, 25 bp, Homo sapien
catggttcgatggaagaggactcac

SEQ ID NO: 4480924 - DNA, 25 bp, Homo sapien
tacctggagcatgtgtcaaagcatc

SEQ ID NO: 4480925 - DNA, 25 bp, Homo sapien
ccttaactcttctaagctgaagccc

SEQ ID NO: 4480926 - DNA, 25 bp, Homo sapien
ttctaagctgaagcccctgccagct

SEQ ID NO: 4480927 - DNA, 25 bp, Homo sapien
cccctgccagcttgtactttggtgt

SEQ ID NO: 4480928 - DNA, 25 bp, Homo sapien
gcttgtactttggtgtggtacctca

SEQ ID NO: 4480929 - DNA, 25 bp, Homo sapien
cctgccagtgtcagcattttccttt

SEQ ID NO: 4480930 - DNA, 25 bp, Homo sapien
aggttattcccctccctgccagtgt

SEQ ID NO: 4480931 - DNA, 25 bp, Homo sapien
tccctttgggtacctcctctctctc

SEQ ID NO: 4480932 - DNA, 25 bp, Homo sapien
ccctccctgccagtgtcagcatttt

SEQ ID NO: 4480933 - DNA, 25 bp, Homo sapien
aaagcggccatttgtctcaatccat

SEQ ID NO: 4480934 - DNA, 25 bp, Homo sapien
tctgggggctgggaaatctaaaatc

SEQ ID NO: 4480935 - DNA, 25 bp, Homo sapien
gtctcaatccattagtgctgctata

SEQ ID NO: 4480936 - DNA, 25 bp, Homo sapien
cctgagactgtataatctaaataat

SEQ ID NO: 4480937 - DNA, 25 bp, Homo sapien
tcctcttgtaggagcgtgcgtggct

SEQ ID NO: 4480938 - DNA, 25 bp, Homo sapien
gctttgctccatgcagcgtgtctgg

SEQ ID NO: 4480939 - DNA, 25 bp, Homo sapien
cgggtttccgcctccttggcaatga

SEQ ID NO: 4480940 - DNA, 25 bp, Homo sapien
tctcccgcgtgtagattcagggcgc

SEQ ID NO: 4480941 - DNA, 25 bp, Homo sapien
ccaggggtagccttccaatgcgatg

SEQ ID NO: 4480942 - DNA, 25 bp, Homo sapien
ttactggggcggtgggagagccagg

SEQ ID NO: 4480943 - DNA, 25 bp, Homo sapien
gagccaggggtagccttccaatgcg

SEQ ID NO: 4480944 - DNA, 25 bp, Homo sapien
cttactggggcggtgggagagccag

SEQ ID NO: 4480945 - DNA, 25 bp, Homo sapien
gaattagctccttcctagacgggcg

SEQ ID NO: 4480946 - DNA, 25 bp, Homo sapien
aaatcctaggatgtggagtctccgc

SEQ ID NO: 4480947 - DNA, 25 bp, Homo sapien
taactggacggaaggatgagttctc

SEQ ID NO: 4480948 - DNA, 25 bp, Homo sapien
tccacccgggagatcgtgagtacct

SEQ ID NO: 4480949 - DNA, 25 bp, Homo sapien
cactggctaggcgagactccctttt

SEQ ID NO: 4480950 - DNA, 25 bp, Homo sapien
ttcttgcggatgacgtgaggcgcaa

SEQ ID NO: 4480951 - DNA, 25 bp, Homo sapien
tgtttactatctactccgccggcgg

SEQ ID NO: 4480952 - DNA, 25 bp, Homo sapien
ttggatgacattctcccgagctccg

SEQ ID NO: 4480953 - DNA, 25 bp, Homo sapien
ggtgatccgccttcaggtgatcctg

SEQ ID NO: 4480954 - DNA, 25 bp, Homo sapien
tcctgctgaacacatagtccttatc

SEQ ID NO: 4480955 - DNA, 25 bp, Homo sapien
cctagggaggatgaacctcaaactc

SEQ ID NO: 4480956 - DNA, 25 bp, Homo sapien
tggtcctcaccctagggaggatgaa

SEQ ID NO: 4480957 - DNA, 25 bp, Homo sapien
cctggactagcttgggttggtgatc

SEQ ID NO: 4480958 - DNA, 25 bp, Homo sapien
tagagatcgtcctgagtgccaagca

SEQ ID NO: 4480959 - DNA, 25 bp, Homo sapien
tgacactgggttagctcagcatgga

SEQ ID NO: 4480960 - DNA, 25 bp, Homo sapien
cagagccaaatgcaatcggtacgaa

SEQ ID NO: 4480961 - DNA, 25 bp, Homo sapien
gctcgttttgcatggatgagcttca

SEQ ID NO: 4480962 - DNA, 25 bp, Homo sapien
ccttaattacattgagatccttggc

SEQ ID NO: 4480963 - DNA, 25 bp, Homo sapien
agctgcatggttacaaaagcagaca

SEQ ID NO: 4480964 - DNA, 25 bp, Homo sapien
caaacttggatatgagtgtaggtca

SEQ ID NO: 4480965 - DNA, 25 bp, Homo sapien
ttctgtagcccccatgtgtttgaat

SEQ ID NO: 4480966 - DNA, 25 bp, Homo sapien
taatgatagccttttagaggttact

SEQ ID NO: 4480967 - DNA, 25 bp, Homo sapien
ggatattaatgatagccttttagag

SEQ ID NO: 4480968 - DNA, 25 bp, Homo sapien
tctgtagcccccatgtgtttgaatt

SEQ ID NO: 4480969 - DNA, 25 bp, Homo sapien
gctcatggtcttgatagggaacaca

SEQ ID NO: 4480970 - DNA, 25 bp, Homo sapien
gagatacacataggaggactttggc

SEQ ID NO: 4480971 - DNA, 25 bp, Homo sapien
gactttggctctgcaggaacgcaga

SEQ ID NO: 4480972 - DNA, 25 bp, Homo sapien
gaacgcagaggagcatatggcctca

SEQ ID NO: 4480973 - DNA, 25 bp, Homo sapien
tcctgttgatccgttcccagtggga

SEQ ID NO: 4480974 - DNA, 25 bp, Homo sapien
tcttgggttcttgcataatgcttga

SEQ ID NO: 4480975 - DNA, 25 bp, Homo sapien
tcattaggcagatgggtgttaggcc

SEQ ID NO: 4480976 - DNA, 25 bp, Homo sapien
tagatggaagagtcccatggtttca

SEQ ID NO: 4480977 - DNA, 25 bp, Homo sapien
tcgcgagcgagttttgtccgcccgg

SEQ ID NO: 4480978 - DNA, 25 bp, Homo sapien
cgaggcttaccagcctcagacggtg

SEQ ID NO: 4480979 - DNA, 25 bp, Homo sapien
ggccttcttcccgagatttgcagaa

SEQ ID NO: 4480980 - DNA, 25 bp, Homo sapien
acatggcgccggagctgaccccgga

SEQ ID NO: 4480981 - DNA, 25 bp, Homo sapien
gttcataaagtaccacatcattcct

SEQ ID NO: 4480982 - DNA, 25 bp, Homo sapien
tctcgagataaaagaccattgtgct

SEQ ID NO: 4480983 - DNA, 25 bp, Homo sapien
catcattcctttttcgtggtgctag

SEQ ID NO: 4480984 - DNA, 25 bp, Homo sapien
tattccgtggaatggatacttcata

SEQ ID NO: 4480985 - DNA, 25 bp, Homo sapien
tggagctctgcgacttcgtcacggc

SEQ ID NO: 4480986 - DNA, 25 bp, Homo sapien
gcatggcgcagcaccttcaggctgc

SEQ ID NO: 4480987 - DNA, 25 bp, Homo sapien
gctgtatgctctcggcttggtgccc

SEQ ID NO: 4480988 - DNA, 25 bp, Homo sapien
ccacgcgcggttcgctggagctctg

SEQ ID NO: 4480989 - DNA, 25 bp, Homo sapien
tatttcatgggttcggtgccaccta

SEQ ID NO: 4480990 - DNA, 25 bp, Homo sapien
gattgccgcagaaagggatacagtc

SEQ ID NO: 4480991 - DNA, 25 bp, Homo sapien
gagatcgctctgcatgccaggtgaa

SEQ ID NO: 4480992 - DNA, 25 bp, Homo sapien
tcttggctactaaaaaccgcgcgga

SEQ ID NO: 4480993 - DNA, 25 bp, Homo sapien
tctcaggaaactgcactaacccttg

SEQ ID NO: 4480994 - DNA, 25 bp, Homo sapien
tcaggagccacccttatttccaggt

SEQ ID NO: 4480995 - DNA, 25 bp, Homo sapien
tactcccacatgtgttctagacggg

SEQ ID NO: 4480996 - DNA, 25 bp, Homo sapien
ggatttctgttcacccaatagggtc

SEQ ID NO: 4480997 - DNA, 25 bp, Homo sapien
ctcctgccttttccgtgacgcaaat

SEQ ID NO: 4480998 - DNA, 25 bp, Homo sapien
actccgaaagtttgcaaagcgtggg

SEQ ID NO: 4480999 - DNA, 25 bp, Homo sapien
ctgccgctgcctcgcttcctggact

SEQ ID NO: 4481000 - DNA, 25 bp, Homo sapien
ccgtgacgcaaatggagtaaaactc

SEQ ID NO: 4481001 - DNA, 25 bp, Homo sapien
tccaagaatgcactcgcagctgaat

SEQ ID NO: 4481002 - DNA, 25 bp, Homo sapien
cagaccggggatgctcacaaggcag

SEQ ID NO: 4481003 - DNA, 25 bp, Homo sapien
gctcacaaggcagtccaagaatgca

SEQ ID NO: 4481004 - DNA, 25 bp, Homo sapien
aaggcagtccaagaatgcactcgca

SEQ ID NO: 4481005 - DNA, 25 bp, Homo sapien
gaagccttcgtactgggagagcaca

SEQ ID NO: 4481006 - DNA, 25 bp, Homo sapien
gaacggacgatctccacataagagg

SEQ ID NO: 4481007 - DNA, 25 bp, Homo sapien
tgaaggccttgaaagtgtccacgcg

SEQ ID NO: 4481008 - DNA, 25 bp, Homo sapien
gagtatgtctcagcgatcttggcca

SEQ ID NO: 4481009 - DNA, 25 bp, Homo sapien
ctcagagcaaaagggggggtccatc

SEQ ID NO: 4481010 - DNA, 25 bp, Homo sapien
tcagcaaacatctccccgatggctt

SEQ ID NO: 4481011 - DNA, 25 bp, Homo sapien
gatggcttcataggtacggcccgtg

SEQ ID NO: 4481012 - DNA, 25 bp, Homo sapien
cccgtgtgagaaatggcactgttga

SEQ ID NO: 4481013 - DNA, 25 bp, Homo sapien
tttgtagatggatgatgtcagggaa

SEQ ID NO: 4481014 - DNA, 25 bp, Homo sapien
ggaagtggttcatctcggcctgcag

SEQ ID NO: 4481015 - DNA, 25 bp, Homo sapien
cagaggttgtcatacatgcgcaggg

SEQ ID NO: 4481016 - DNA, 25 bp, Homo sapien
tgcttgaagtcgagctcacggcgct

SEQ ID NO: 4481017 - DNA, 25 bp, Homo sapien
cacccgctggtagaagaggatctgc

SEQ ID NO: 4481018 - DNA, 25 bp, Homo sapien
cagtcactgctggtatagggaggtc

SEQ ID NO: 4481019 - DNA, 25 bp, Homo sapien
ggccagaatccccatggaaagcgta

SEQ ID NO: 4481020 - DNA, 25 bp, Homo sapien
ggaatccctcgcatggctgggcaag

SEQ ID NO: 4481021 - DNA, 25 bp, Homo sapien
ttaattgtcctagggcacagcgtcc

SEQ ID NO: 4481022 - DNA, 25 bp, Homo sapien
cagccagtggtgcagccacggcaca

SEQ ID NO: 4481023 - DNA, 25 bp, Homo sapien
tgagtctgtgagtgtgtagacacgt

SEQ ID NO: 4481024 - DNA, 25 bp, Homo sapien
gactgagcgattacattcgtgagtc

SEQ ID NO: 4481025 - DNA, 25 bp, Homo sapien
cacgtggaagacatatggctctgtc

SEQ ID NO: 4481026 - DNA, 25 bp, Homo sapien
tatgacacctttgctctgtgcaagc

SEQ ID NO: 4481027 - DNA, 25 bp, Homo sapien
ggccaggaaacagagtctgcccaga

SEQ ID NO: 4481028 - DNA, 25 bp, Homo sapien
ccctgccctgctgggtgataaggcc

SEQ ID NO: 4481029 - DNA, 25 bp, Homo sapien
tggtggtatccagtcatcccaattg

SEQ ID NO: 4481030 - DNA, 25 bp, Homo sapien
taaggtcttcaaatgtgccatcccc

SEQ ID NO: 4481031 - DNA, 25 bp, Homo sapien
gttgcgaaagggaataaatgctgcc

SEQ ID NO: 4481032 - DNA, 25 bp, Homo sapien
cctttggccctaaatgagttcatca

SEQ ID NO: 4481033 - DNA, 25 bp, Homo sapien
cacatttcagccgttgggttcacca

SEQ ID NO: 4481034 - DNA, 25 bp, Homo sapien
taagtatctacaagacaggacacaa

SEQ ID NO: 4481035 - DNA, 25 bp, Homo sapien
ttaagtatctacaagacaggacaca

SEQ ID NO: 4481036 - DNA, 25 bp, Homo sapien
attaagtatctacaagacaggacac

SEQ ID NO: 4481037 - DNA, 25 bp, Homo sapien
catttgatggactaacaaggctgtg

SEQ ID NO: 4481038 - DNA, 25 bp, Homo sapien
tgactatagataccaagcgccagcg

SEQ ID NO: 4481039 - DNA, 25 bp, Homo sapien
catacacgcaggtaggtacaggtgc

SEQ ID NO: 4481040 - DNA, 25 bp, Homo sapien
tagaccattaaggagcaggagaggc

SEQ ID NO: 4481041 - DNA, 25 bp, Homo sapien
cataggtaacgccatccctgtggag

SEQ ID NO: 4481042 - DNA, 25 bp, Homo sapien
ttaaatcgcccagttgccaagaagg

SEQ ID NO: 4481043 - DNA, 25 bp, Homo sapien
tgggaccaaggtagagaaccagacc

SEQ ID NO: 4481044 - DNA, 25 bp, Homo sapien
gagccgcaggcataccattgaataa

SEQ ID NO: 4481045 - DNA, 25 bp, Homo sapien
gaagattccagatctcaaagaggtg

SEQ ID NO: 4481046 - DNA, 25 bp, Homo sapien
cctggccgtaagatgtcgggaagcc

SEQ ID NO: 4481047 - DNA, 25 bp, Homo sapien
ctcccctgaccaatgagaactgcca

SEQ ID NO: 4481048 - DNA, 25 bp, Homo sapien
tctcccattcctggccgtaagatgt

SEQ ID NO: 4481049 - DNA, 25 bp, Homo sapien
tggctgtggacatcctaccatccgc

SEQ ID NO: 4481050 - DNA, 25 bp, Homo sapien
tggaccccaccgtcctagatgctgg

SEQ ID NO: 4481051 - DNA, 25 bp, Homo sapien
gggtgtcaatgcatcagccgtagtg

SEQ ID NO: 4481052 - DNA, 25 bp, Homo sapien
tccagggaccccagtatgggcatct

SEQ ID NO: 4481053 - DNA, 25 bp, Homo sapien
ggatggcttccactttcgtgcccac

SEQ ID NO: 4481054 - DNA, 25 bp, Homo sapien
gcaggatggcttccactttcgtgcc

SEQ ID NO: 4481055 - DNA, 25 bp, Homo sapien
aggatggcttccactttcgtgccca

SEQ ID NO: 4481056 - DNA, 25 bp, Homo sapien
cagcaggatggcttccactttcgtg

SEQ ID NO: 4481057 - DNA, 25 bp, Homo sapien
cacagacgtgtttatttggcctaca

SEQ ID NO: 4481058 - DNA, 25 bp, Homo sapien
tggcctgagcccttgaaaacggagc

SEQ ID NO: 4481059 - DNA, 25 bp, Homo sapien
tgcactatgtgagccaaagagcccc

SEQ ID NO: 4481060 - DNA, 25 bp, Homo sapien
gaaccccagagtgaagtatcccaga

SEQ ID NO: 4481061 - DNA, 25 bp, Homo sapien
aggctggcagtgccacccaggaaag

SEQ ID NO: 4481062 - DNA, 25 bp, Homo sapien
ctggcagtgccacccaggaaagcag

SEQ ID NO: 4481063 - DNA, 25 bp, Homo sapien
ccagggggtcaggctggcagtgcca

SEQ ID NO: 4481064 - DNA, 25 bp, Homo sapien
cagggggtcaggctggcagtgccac

SEQ ID NO: 4481065 - DNA, 25 bp, Homo sapien
catacacacctatgaggggagacag

SEQ ID NO: 4481066 - DNA, 25 bp, Homo sapien
ctggcccgtccatgctctcacagag

SEQ ID NO: 4481067 - DNA, 25 bp, Homo sapien
gagccggcattcagcccccaggtgg

SEQ ID NO: 4481068 - DNA, 25 bp, Homo sapien
tgctctcacagagccggcattcagc

SEQ ID NO: 4481069 - DNA, 25 bp, Homo sapien
ctgaggtctagagggccaggtgacc

SEQ ID NO: 4481070 - DNA, 25 bp, Homo sapien
cactgggataaagcagtgtctcctg

SEQ ID NO: 4481071 - DNA, 25 bp, Homo sapien
catttcggtagctcacgggacagga

SEQ ID NO: 4481072 - DNA, 25 bp, Homo sapien
catgggatttggaactaacctactg

SEQ ID NO: 4481073 - DNA, 25 bp, Homo sapien
taacctactgttgtccgcatttcgg

SEQ ID NO: 4481074 - DNA, 25 bp, Homo sapien
gatatggaagacgagtgcctgctcc

SEQ ID NO: 4481075 - DNA, 25 bp, Homo sapien
ggatcaggaccactcctaacagagg

SEQ ID NO: 4481076 - DNA, 25 bp, Homo sapien
ttagaaacagcactaccccagagga

SEQ ID NO: 4481077 - DNA, 25 bp, Homo sapien
gaaagcaaaggctccaagagggtcc

SEQ ID NO: 4481078 - DNA, 25 bp, Homo sapien
gcagggtctaaacagcagtcaaggg

SEQ ID NO: 4481079 - DNA, 25 bp, Homo sapien
ctagagtatccctgcctgagacccc

SEQ ID NO: 4481080 - DNA, 25 bp, Homo sapien
tggagatgacgtcacggcagagctt

SEQ ID NO: 4481081 - DNA, 25 bp, Homo sapien
ccagcttgagcagctaaggctgtct

SEQ ID NO: 4481082 - DNA, 25 bp, Homo sapien
ccttttctgggtgctgtgcaaagta

SEQ ID NO: 4481083 - DNA, 25 bp, Homo sapien
gacctcctgccttgagggcaatggc

SEQ ID NO: 4481084 - DNA, 25 bp, Homo sapien
gatgacaggggtctgcttgacctcc

SEQ ID NO: 4481085 - DNA, 25 bp, Homo sapien
tgccttgagggcaatggctcctttt

SEQ ID NO: 4481086 - DNA, 25 bp, Homo sapien
tctgagtgccggctatgcagggtat

SEQ ID NO: 4481087 - DNA, 25 bp, Homo sapien
cccgtgcaggatggccggaggtact

SEQ ID NO: 4481088 - DNA, 25 bp, Homo sapien
tcatgatctatgtagcccgtgcagg

SEQ ID NO: 4481089 - DNA, 25 bp, Homo sapien
ctatgcagggtataagctggtgcct

SEQ ID NO: 4481090 - DNA, 25 bp, Homo sapien
ccaaccccagccggatgactggggt

SEQ ID NO: 4481091 - DNA, 25 bp, Homo sapien
tccaaccccagccggatgactgggg

SEQ ID NO: 4481092 - DNA, 25 bp, Homo sapien
accccagccggatgactggggtggc

SEQ ID NO: 4481093 - DNA, 25 bp, Homo sapien
caaccccagccggatgactggggtg

SEQ ID NO: 4481094 - DNA, 25 bp, Homo sapien
tgcgggcagctggacattccaaacc

SEQ ID NO: 4481095 - DNA, 25 bp, Homo sapien
gcaggttggagatgcgctcctccat

SEQ ID NO: 4481096 - DNA, 25 bp, Homo sapien
gctggacattccaaaccgagttatt

SEQ ID NO: 4481097 - DNA, 25 bp, Homo sapien
ttattttgggatccaagagatagca

SEQ ID NO: 4481098 - DNA, 25 bp, Homo sapien
ggcaggatgcgagggtggggttcag

SEQ ID NO: 4481099 - DNA, 25 bp, Homo sapien
caggatgcgagggtggggttcaggc

SEQ ID NO: 4481100 - DNA, 25 bp, Homo sapien
ctcaaagtagtactggcaggatgcg

SEQ ID NO: 4481101 - DNA, 25 bp, Homo sapien
caaagtagtactggcaggatgcgag

SEQ ID NO: 4481102 - DNA, 25 bp, Homo sapien
atcactctgtatgggcgccggtagc

SEQ ID NO: 4481103 - DNA, 25 bp, Homo sapien
cacgaatgtcgatgaccagtgggca

SEQ ID NO: 4481104 - DNA, 25 bp, Homo sapien
catgctgtaagtagggctgcggttc

SEQ ID NO: 4481105 - DNA, 25 bp, Homo sapien
ggcgaagcgcttggccatgctgtaa

SEQ ID NO: 4481106 - DNA, 25 bp, Homo sapien
catgaaaatgtatctctaatgtctt

SEQ ID NO: 4481107 - DNA, 25 bp, Homo sapien
tgtcttctgtgtgccggacactcag

SEQ ID NO: 4481108 - DNA, 25 bp, Homo sapien
gctctgctactagaaatcttggtca

SEQ ID NO: 4481109 - DNA, 25 bp, Homo sapien
actcagcaggtaccggctctgctac

SEQ ID NO: 4481110 - DNA, 25 bp, Homo sapien
gctgaatatgacaggagaggccgcc

SEQ ID NO: 4481111 - DNA, 25 bp, Homo sapien
caaaggagcactgagtcccggaagt

SEQ ID NO: 4481112 - DNA, 25 bp, Homo sapien
tcggtgacatcaagacgaccatcgt

SEQ ID NO: 4481113 - DNA, 25 bp, Homo sapien
ctggattctagagcgtcggacctgg

SEQ ID NO: 4481114 - DNA, 25 bp, Homo sapien
gccatcgacggcgatgtcaaaaaac

SEQ ID NO: 4481115 - DNA, 25 bp, Homo sapien
ctcgccatcgacggcgatgtcaaaa

SEQ ID NO: 4481116 - DNA, 25 bp, Homo sapien
gatgtcaaaaaacacagtggggtta

SEQ ID NO: 4481117 - DNA, 25 bp, Homo sapien
tcgacggcgatgtcaaaaaacacag

SEQ ID NO: 4481118 - DNA, 25 bp, Homo sapien
accagtgccattatggcatgtgaag

SEQ ID NO: 4481119 - DNA, 25 bp, Homo sapien
tccccatagatggacttgccaccag

SEQ ID NO: 4481120 - DNA, 25 bp, Homo sapien
aagtcaccaccctgacacataaact

SEQ ID NO: 4481121 - DNA, 25 bp, Homo sapien
ccccatagatggacttgccaccagt

SEQ ID NO: 4481122 - DNA, 25 bp, Homo sapien
tgggaaccatttatattggatccag

SEQ ID NO: 4481123 - DNA, 25 bp, Homo sapien
gaaccatttatattggatccagcat

SEQ ID NO: 4481124 - DNA, 25 bp, Homo sapien
aactgggaaccatttatattggatc

SEQ ID NO: 4481125 - DNA, 25 bp, Homo sapien
ggaaccatttatattggatccagca

SEQ ID NO: 4481126 - DNA, 25 bp, Homo sapien
ttcctggactcaaagcgctccgtgg

SEQ ID NO: 4481127 - DNA, 25 bp, Homo sapien
cattcctggactcaaagcgctccgt

SEQ ID NO: 4481128 - DNA, 25 bp, Homo sapien
ggactcaaagcgctccgtggcctcc

SEQ ID NO: 4481129 - DNA, 25 bp, Homo sapien
ctcaaagcgctccgtggcctccaca

SEQ ID NO: 4481130 - DNA, 25 bp, Homo sapien
agcagcactgccaaccccagacctg

SEQ ID NO: 4481131 - DNA, 25 bp, Homo sapien
agacctgccataagccctgtatcca

SEQ ID NO: 4481132 - DNA, 25 bp, Homo sapien
tgggggattccaaagacgagccctc

SEQ ID NO: 4481133 - DNA, 25 bp, Homo sapien
ttccaaagacgagccctcctacagg

SEQ ID NO: 4481134 - DNA, 25 bp, Homo sapien
gaagtagaggatgtcccccagccac

SEQ ID NO: 4481135 - DNA, 25 bp, Homo sapien
tgtccattggtcctctaaagagcct

SEQ ID NO: 4481136 - DNA, 25 bp, Homo sapien
tgtggcagctggtgtatgtctgggc

SEQ ID NO: 4481137 - DNA, 25 bp, Homo sapien
cagggcaggggacacttgttttgaa

SEQ ID NO: 4481138 - DNA, 25 bp, Homo sapien
tgtccaggcctttgtttaggatatt

SEQ ID NO: 4481139 - DNA, 25 bp, Homo sapien
ggtggcgccaggtcaacagattcga

SEQ ID NO: 4481140 - DNA, 25 bp, Homo sapien
ggtcaacagattcgacgatcacgtg

SEQ ID NO: 4481141 - DNA, 25 bp, Homo sapien
gccaggtcaacagattcgacgatca

SEQ ID NO: 4481142 - DNA, 25 bp, Homo sapien
tttttccggtggcgccaggtcaaca

SEQ ID NO: 4481143 - DNA, 25 bp, Homo sapien
caaacttcatacagcaccagctctg

SEQ ID NO: 4481144 - DNA, 25 bp, Homo sapien
ccatcttgtcggttgcccctgaagt

SEQ ID NO: 4481145 - DNA, 25 bp, Homo sapien
gtcggttgcccctgaagtgcccaga

SEQ ID NO: 4481146 - DNA, 25 bp, Homo sapien
ttctcccctagagcgacaggggtgg

SEQ ID NO: 4481147 - DNA, 25 bp, Homo sapien
cactctgacggtcagtgggtccagc

SEQ ID NO: 4481148 - DNA, 25 bp, Homo sapien
cccactctgacggtcagtgggtcca

SEQ ID NO: 4481149 - DNA, 25 bp, Homo sapien
tctgagatgaccgtgtctaccaaga

SEQ ID NO: 4481150 - DNA, 25 bp, Homo sapien
cgaggtctgagatgaccgtgtctac

SEQ ID NO: 4481151 - DNA, 25 bp, Homo sapien
aggacaagggtgaatgtgacgagca

SEQ ID NO: 4481152 - DNA, 25 bp, Homo sapien
caggacaagggtgaatgtgacgagc

SEQ ID NO: 4481153 - DNA, 25 bp, Homo sapien
acaagggtgaatgtgacgagcagga

SEQ ID NO: 4481154 - DNA, 25 bp, Homo sapien
caagggtgaatgtgacgagcaggag

SEQ ID NO: 4481155 - DNA, 25 bp, Homo sapien
tgtctggagagggtcctctgtacca

SEQ ID NO: 4481156 - DNA, 25 bp, Homo sapien
taccacactgtgtgcttctacacac

SEQ ID NO: 4481157 - DNA, 25 bp, Homo sapien
gtcctctgtaccacactgtgtgctt

SEQ ID NO: 4481158 - DNA, 25 bp, Homo sapien
acccaggctgaacaccccatgggag

SEQ ID NO: 4481159 - DNA, 25 bp, Homo sapien
gctcccagcatcatttctagggttg

SEQ ID NO: 4481160 - DNA, 25 bp, Homo sapien
tcagctcccagcatcatttctaggg

SEQ ID NO: 4481161 - DNA, 25 bp, Homo sapien
cccagcatcatttctagggttggtg

SEQ ID NO: 4481162 - DNA, 25 bp, Homo sapien
tcccagcatcatttctagggttggt

SEQ ID NO: 4481163 - DNA, 25 bp, Homo sapien
ggagaggagaggtttgcagtttggg

SEQ ID NO: 4481164 - DNA, 25 bp, Homo sapien
gagggagcagcagcatgaggggtca

SEQ ID NO: 4481165 - DNA, 25 bp, Homo sapien
tttgcagtttgggtttcagcagagg

SEQ ID NO: 4481166 - DNA, 25 bp, Homo sapien
ctgtggaagccgtggggcaaggtga

SEQ ID NO: 4481167 - DNA, 25 bp, Homo sapien
tcattcctcggggttgaggcactgt

SEQ ID NO: 4481168 - DNA, 25 bp, Homo sapien
gttggaacttcggattcattcctcg

SEQ ID NO: 4481169 - DNA, 25 bp, Homo sapien
tggaacttcggattcattcctcggg

SEQ ID NO: 4481170 - DNA, 25 bp, Homo sapien
tggtgttggaacttcggattcattc

SEQ ID NO: 4481171 - DNA, 25 bp, Homo sapien
ggctccccacgtgggttgacaaggc

SEQ ID NO: 4481172 - DNA, 25 bp, Homo sapien
gggttgacaaggcattgctttcccc

SEQ ID NO: 4481173 - DNA, 25 bp, Homo sapien
tgtgtcctcgagctggtccttggcc

SEQ ID NO: 4481174 - DNA, 25 bp, Homo sapien
ctggctgtgtgtcctcgagctggtc

SEQ ID NO: 4481175 - DNA, 25 bp, Homo sapien
ttactctgttgagtttcttctaaca

SEQ ID NO: 4481176 - DNA, 25 bp, Homo sapien
ctgctgccaatttactctgttgagt

SEQ ID NO: 4481177 - DNA, 25 bp, Homo sapien
tactctgttgagtttcttctaacat

SEQ ID NO: 4481178 - DNA, 25 bp, Homo sapien
cttggctgctgccaatttactctgt

SEQ ID NO: 4481179 - DNA, 25 bp, Homo sapien
gtctcagggctactgccagtgtttt

SEQ ID NO: 4481180 - DNA, 25 bp, Homo sapien
aacaccagggctgttcctctgctga

SEQ ID NO: 4481181 - DNA, 25 bp, Homo sapien
ctttttcatcttcactcctgctgga

SEQ ID NO: 4481182 - DNA, 25 bp, Homo sapien
caccagggctgttcctctgctgata

SEQ ID NO: 4481183 - DNA, 25 bp, Homo sapien
ggaatggttaagattggacaccagc

SEQ ID NO: 4481184 - DNA, 25 bp, Homo sapien
cccattggaatggttaagattggac

SEQ ID NO: 4481185 - DNA, 25 bp, Homo sapien
attggaatggttaagattggacacc

SEQ ID NO: 4481186 - DNA, 25 bp, Homo sapien
cattggaatggttaagattggacac

SEQ ID NO: 4481187 - DNA, 25 bp, Homo sapien
cacttatccaatgggggagtgctac

SEQ ID NO: 4481188 - DNA, 25 bp, Homo sapien
tccacttatccaatgggggagtgct

SEQ ID NO: 4481189 - DNA, 25 bp, Homo sapien
ccacttatccaatgggggagtgcta

SEQ ID NO: 4481190 - DNA, 25 bp, Homo sapien
ctggcagaggggcacctagcccctg

SEQ ID NO: 4481191 - DNA, 25 bp, Homo sapien
gaggaggattgtggggagaggtgga

SEQ ID NO: 4481192 - DNA, 25 bp, Homo sapien
ggagttggaggaggattgtggggag

SEQ ID NO: 4481193 - DNA, 25 bp, Homo sapien
tggaggaggattgtggggagaggtg

SEQ ID NO: 4481194 - DNA, 25 bp, Homo sapien
ttgagtccagggctaattccagttc

SEQ ID NO: 4481195 - DNA, 25 bp, Homo sapien
gcggagcttgagtccagggctaatt

SEQ ID NO: 4481196 - DNA, 25 bp, Homo sapien
ctaattccagttcttggtaccgact

SEQ ID NO: 4481197 - DNA, 25 bp, Homo sapien
ggctaattccagttcttggtaccga

SEQ ID NO: 4481198 - DNA, 25 bp, Homo sapien
cttccagctgatgttccacttgttt

SEQ ID NO: 4481199 - DNA, 25 bp, Homo sapien
ttcttccagctgatgttccacttgt

SEQ ID NO: 4481200 - DNA, 25 bp, Homo sapien
ttccagctgatgttccacttgtttc

SEQ ID NO: 4481201 - DNA, 25 bp, Homo sapien
tcttccagctgatgttccacttgtt

SEQ ID NO: 4481202 - DNA, 25 bp, Homo sapien
ccatctgtgctttgtgtatttcact

SEQ ID NO: 4481203 - DNA, 25 bp, Homo sapien
actgctccatctgtgctttgtgtat

SEQ ID NO: 4481204 - DNA, 25 bp, Homo sapien
tgtgtatttcactgttggttttctt

SEQ ID NO: 4481205 - DNA, 25 bp, Homo sapien
gctttgtgtatttcactgttggttt

SEQ ID NO: 4481206 - DNA, 25 bp, Homo sapien
ctggaattgaatgtttgggagaaaa

SEQ ID NO: 4481207 - DNA, 25 bp, Homo sapien
gtttgggagaaaagccaagcaaatg

SEQ ID NO: 4481208 - DNA, 25 bp, Homo sapien
gaattgaatgtttgggagaaaagcc

SEQ ID NO: 4481209 - DNA, 25 bp, Homo sapien
tgtttgggagaaaagccaagcaaat

SEQ ID NO: 4481210 - DNA, 25 bp, Homo sapien
cttcgaagtgtcgggcagcacgttt

SEQ ID NO: 4481211 - DNA, 25 bp, Homo sapien
cagcacgtttagtatggtaaagggt

SEQ ID NO: 4481212 - DNA, 25 bp, Homo sapien
tagtatggtaaagggtggtcttcaa

SEQ ID NO: 4481213 - DNA, 25 bp, Homo sapien
tgtcgggcagcacgtttagtatggt

SEQ ID NO: 4481214 - DNA, 25 bp, Homo sapien
ctgtaaggagtattgcaggcggcca

SEQ ID NO: 4481215 - DNA, 25 bp, Homo sapien
cctgctgctgtgtagacacagcaga

SEQ ID NO: 4481216 - DNA, 25 bp, Homo sapien
caattcttgaatacgctgtaaggag

SEQ ID NO: 4481217 - DNA, 25 bp, Homo sapien
gagagagcccgctccaattcttgaa

SEQ ID NO: 4481218 - DNA, 25 bp, Homo sapien
gccatacacaaaagtagcgagaaat

SEQ ID NO: 4481219 - DNA, 25 bp, Homo sapien
catacacaaaagtagcgagaaatga

SEQ ID NO: 4481220 - DNA, 25 bp, Homo sapien
acaaaagtagcgagaaatgaccatg

SEQ ID NO: 4481221 - DNA, 25 bp, Homo sapien
tacacaaaagtagcgagaaatgacc

SEQ ID NO: 4481222 - DNA, 25 bp, Homo sapien
tatatcatcatagtacacgcacaca

SEQ ID NO: 4481223 - DNA, 25 bp, Homo sapien
ttcgcatagtccaaaactcagaaga

SEQ ID NO: 4481224 - DNA, 25 bp, Homo sapien
gagttttttatgaacccttgcagac

SEQ ID NO: 4481225 - DNA, 25 bp, Homo sapien
tgatacattcgcatagtccaaaact

SEQ ID NO: 4481226 - DNA, 25 bp, Homo sapien
ctctattgtgtagatgaaaaacatc

SEQ ID NO: 4481227 - DNA, 25 bp, Homo sapien
tgtgtagatgaaaaacatcgagtgt

SEQ ID NO: 4481228 - DNA, 25 bp, Homo sapien
tattgtgtagatgaaaaacatcgag

SEQ ID NO: 4481229 - DNA, 25 bp, Homo sapien
tctattgtgtagatgaaaaacatcg

SEQ ID NO: 4481230 - DNA, 25 bp, Homo sapien
agaagttttgatctggggatcccgg

SEQ ID NO: 4481231 - DNA, 25 bp, Homo sapien
ttttgatctggggatcccgggcagt

SEQ ID NO: 4481232 - DNA, 25 bp, Homo sapien
agttttgatctggggatcccgggca

SEQ ID NO: 4481233 - DNA, 25 bp, Homo sapien
tgagaagttttgatctggggatccc

SEQ ID NO: 4481234 - DNA, 25 bp, Homo sapien
tcacgtgtgcgttcagcagtgcctg

SEQ ID NO: 4481235 - DNA, 25 bp, Homo sapien
tgtaaccgccactggaggaccgctt

SEQ ID NO: 4481236 - DNA, 25 bp, Homo sapien
gtgcctgctcctttatggtctgctg

SEQ ID NO: 4481237 - DNA, 25 bp, Homo sapien
actggaggaccgcttctctgcagct

SEQ ID NO: 4481238 - DNA, 25 bp, Homo sapien
tgctcctggccacctggggtcatct

SEQ ID NO: 4481239 - DNA, 25 bp, Homo sapien
acctggggtcatcttccttccacat

SEQ ID NO: 4481240 - DNA, 25 bp, Homo sapien
catccctccctctgcaaagcatcac

SEQ ID NO: 4481241 - DNA, 25 bp, Homo sapien
acatccctccctctgcaaagcatca

SEQ ID NO: 4481242 - DNA, 25 bp, Homo sapien
gccctctcttcttttatatgttgag

SEQ ID NO: 4481243 - DNA, 25 bp, Homo sapien
ttatatgttgagcatattcatctct

SEQ ID NO: 4481244 - DNA, 25 bp, Homo sapien
tatatgttgagcatattcatctctc

SEQ ID NO: 4481245 - DNA, 25 bp, Homo sapien
ctcttcttttatatgttgagcatat

SEQ ID NO: 4481246 - DNA, 25 bp, Homo sapien
gccagctgcttgtcgagcttgtggt

SEQ ID NO: 4481247 - DNA, 25 bp, Homo sapien
ggccagctgcttgtcgagcttgtgg

SEQ ID NO: 4481248 - DNA, 25 bp, Homo sapien
aactgcagtgcgctcttgttctcgt

SEQ ID NO: 4481249 - DNA, 25 bp, Homo sapien
tgtctccttctcgcccagcctctcc

SEQ ID NO: 4481250 - DNA, 25 bp, Homo sapien
gcagtgcgctcttgttctcgttatt

SEQ ID NO: 4481251 - DNA, 25 bp, Homo sapien
gtctccttctcgcccagcctctcct

SEQ ID NO: 4481252 - DNA, 25 bp, Homo sapien
cagcccttcttggatggggcagagg

SEQ ID NO: 4481253 - DNA, 25 bp, Homo sapien
ccttcttggatggggcagaggttac

SEQ ID NO: 4481254 - DNA, 25 bp, Homo sapien
gcccttcttggatggggcagaggtt

SEQ ID NO: 4481255 - DNA, 25 bp, Homo sapien
ctcccagcccttcttggatggggca

SEQ ID NO: 4481256 - DNA, 25 bp, Homo sapien
cacgaggcttagctgggtctctagc

SEQ ID NO: 4481257 - DNA, 25 bp, Homo sapien
ccacgaggcttagctgggtctctag

SEQ ID NO: 4481258 - DNA, 25 bp, Homo sapien
attactggtcagtgcaggagttctg

SEQ ID NO: 4481259 - DNA, 25 bp, Homo sapien
ttactggtcagtgcaggagttctga

SEQ ID NO: 4481260 - DNA, 25 bp, Homo sapien
cagtcccattactggtcagtgcagg

SEQ ID NO: 4481261 - DNA, 25 bp, Homo sapien
aggcacagtcccattactggtcagt

SEQ ID NO: 4481262 - DNA, 25 bp, Homo sapien
cactgtccagatgttgtcctccatc

SEQ ID NO: 4481263 - DNA, 25 bp, Homo sapien
ctgggatgtttggcgtgggccgagg

SEQ ID NO: 4481264 - DNA, 25 bp, Homo sapien
gggatgtttggcgtgggccgaggcg

SEQ ID NO: 4481265 - DNA, 25 bp, Homo sapien
gatgtttggcgtgggccgaggcgcc

SEQ ID NO: 4481266 - DNA, 25 bp, Homo sapien
gtggcctcccggctctccaggtcct

SEQ ID NO: 4481267 - DNA, 25 bp, Homo sapien
cgtggcctcccggctctccaggtcc

SEQ ID NO: 4481268 - DNA, 25 bp, Homo sapien
ctgcccacatagccgtgcctgctcc

SEQ ID NO: 4481269 - DNA, 25 bp, Homo sapien
aactggctccagcagagttgaaaaa

SEQ ID NO: 4481270 - DNA, 25 bp, Homo sapien
tgctcctcctgggaactggctccag

SEQ ID NO: 4481271 - DNA, 25 bp, Homo sapien
gcccacatagccgtgcctgctcctc

SEQ ID NO: 4481272 - DNA, 25 bp, Homo sapien
gcaggtggcacagccttcgcacctt

SEQ ID NO: 4481273 - DNA, 25 bp, Homo sapien
aggccaccagatgagccaggtgcag

SEQ ID NO: 4481274 - DNA, 25 bp, Homo sapien
ccaccagatgagccaggtgcaggtg

SEQ ID NO: 4481275 - DNA, 25 bp, Homo sapien
gtgcaggtggcacagccttcgcacc

SEQ ID NO: 4481276 - DNA, 25 bp, Homo sapien
cacacaaagtcacccccagtccctg

SEQ ID NO: 4481277 - DNA, 25 bp, Homo sapien
cccacacacaaagtcacccccagtc

SEQ ID NO: 4481278 - DNA, 25 bp, Homo sapien
ctccccacacacaaagtcaccccca

SEQ ID NO: 4481279 - DNA, 25 bp, Homo sapien
acacacaaagtcacccccagtccct

SEQ ID NO: 4481280 - DNA, 25 bp, Homo sapien
accttctccatagcctccttgaggg

SEQ ID NO: 4481281 - DNA, 25 bp, Homo sapien
tcaccttctccatagcctccttgag

SEQ ID NO: 4481282 - DNA, 25 bp, Homo sapien
ccttctccatagcctccttgagggc

SEQ ID NO: 4481283 - DNA, 25 bp, Homo sapien
cttcaccttctccatagcctccttg

SEQ ID NO: 4481284 - DNA, 25 bp, Homo sapien
agctggatgaatccaagctctagtt

SEQ ID NO: 4481285 - DNA, 25 bp, Homo sapien
gagagctggatgaatccaagctcta

SEQ ID NO: 4481286 - DNA, 25 bp, Homo sapien
ccagagagctggatgaatccaagct

SEQ ID NO: 4481287 - DNA, 25 bp, Homo sapien
tcatgccgtctgtcgctccagagag

SEQ ID NO: 4481288 - DNA, 25 bp, Homo sapien
cccctggctctcatattcagtgatg

SEQ ID NO: 4481289 - DNA, 25 bp, Homo sapien
ctctcatattcagtgatgtactctc

SEQ ID NO: 4481290 - DNA, 25 bp, Homo sapien
tggctctcatattcagtgatgtact

SEQ ID NO: 4481291 - DNA, 25 bp, Homo sapien
cagcctgatgatgtcttccttctcc

SEQ ID NO: 4481292 - DNA, 25 bp, Homo sapien
tcgtggtcgcccacaaggggcaaca

SEQ ID NO: 4481293 - DNA, 25 bp, Homo sapien
ccctgctcatcggcagccccaagtt

SEQ ID NO: 4481294 - DNA, 25 bp, Homo sapien
ggcccctggagcgggctcatcggca

SEQ ID NO: 4481295 - DNA, 25 bp, Homo sapien
tctgggcagcggtgaggaatttgcc

SEQ ID NO: 4481296 - DNA, 25 bp, Homo sapien
tcctcgctatcgtccaggctcactt

SEQ ID NO: 4481297 - DNA, 25 bp, Homo sapien
cacacaggggttgccgggcaagcct

SEQ ID NO: 4481298 - DNA, 25 bp, Homo sapien
gtgcaggctcctcgctatcgtccag

SEQ ID NO: 4481299 - DNA, 25 bp, Homo sapien
tcccggtgcaggctcctcgctatcg

SEQ ID NO: 4481300 - DNA, 25 bp, Homo sapien
ggtgttgtcacaagcagtcaaaaag

SEQ ID NO: 4481301 - DNA, 25 bp, Homo sapien
cagatcagtgtacattcccagcagc

SEQ ID NO: 4481302 - DNA, 25 bp, Homo sapien
ctgggaggagtgtgaatattcaacc

SEQ ID NO: 4481303 - DNA, 25 bp, Homo sapien
tgagatggagccgaactgttttcca

SEQ ID NO: 4481304 - DNA, 25 bp, Homo sapien
aaagtcaggcaaaggaagtggcgtc

SEQ ID NO: 4481305 - DNA, 25 bp, Homo sapien
gagacgagaaacataaaaccccaga

SEQ ID NO: 4481306 - DNA, 25 bp, Homo sapien
agatcctaagggactgccggcagct

SEQ ID NO: 4481307 - DNA, 25 bp, Homo sapien
tcccctgattcctgagacgagaagg

SEQ ID NO: 4481308 - DNA, 25 bp, Homo sapien
cgcgggcccgtccagttttggaatg

SEQ ID NO: 4481309 - DNA, 25 bp, Homo sapien
ggcagaaatactttgcctcaattga

SEQ ID NO: 4481310 - DNA, 25 bp, Homo sapien
tactttgcctcaattgaagaactga

SEQ ID NO: 4481311 - DNA, 25 bp, Homo sapien
ttagtttccctctagatttccagga

SEQ ID NO: 4481312 - DNA, 25 bp, Homo sapien
cgtccccctcaccctggcgcgccct

SEQ ID NO: 4481313 - DNA, 25 bp, Homo sapien
gcgcgccctgcgcgctccggtttca

SEQ ID NO: 4481314 - DNA, 25 bp, Homo sapien
ctggcgcgccctgcgcgctccggtt

SEQ ID NO: 4481315 - DNA, 25 bp, Homo sapien
gtccccctcaccctggcgcgccctg

SEQ ID NO: 4481316 - DNA, 25 bp, Homo sapien
cgcggcttaaaagggcaacagcgac

SEQ ID NO: 4481317 - DNA, 25 bp, Homo sapien
cccgcggcttaaaagggcaacagcg

SEQ ID NO: 4481318 - DNA, 25 bp, Homo sapien
gcttaaaagggcaacagcgacgccg

SEQ ID NO: 4481319 - DNA, 25 bp, Homo sapien
taaaagggcaacagcgacgccgccc

SEQ ID NO: 4481320 - DNA, 25 bp, Homo sapien
tcgtcgagcgctgctggaaaatggc

SEQ ID NO: 4481321 - DNA, 25 bp, Homo sapien
ggaagcctcggcgtgtggcggcctg

SEQ ID NO: 4481322 - DNA, 25 bp, Homo sapien
ccgcctcgtcgagcgctgctggaaa

SEQ ID NO: 4481323 - DNA, 25 bp, Homo sapien
gcctgggccgcgctctcgcggctcc

SEQ ID NO: 4481324 - DNA, 25 bp, Homo sapien
aggaactggcagtgcagctcgtcca

SEQ ID NO: 4481325 - DNA, 25 bp, Homo sapien
ccaactgacgatgcggaatcgctcg

SEQ ID NO: 4481326 - DNA, 25 bp, Homo sapien
gaatcgctcgtggttcttgtcgaag

SEQ ID NO: 4481327 - DNA, 25 bp, Homo sapien
gaagatggacgccaggaacttcagc

SEQ ID NO: 4481328 - DNA, 25 bp, Homo sapien
gcagcgagtgcgggctgccctgctg

SEQ ID NO: 4481329 - DNA, 25 bp, Homo sapien
cagcgagtgcgggctgccctgctgc

SEQ ID NO: 4481330 - DNA, 25 bp, Homo sapien
ggcagcgagtgcgggctgccctgct

SEQ ID NO: 4481331 - DNA, 25 bp, Homo sapien
cggcagcgagtgcgggctgccctgc

SEQ ID NO: 4481332 - DNA, 25 bp, Homo sapien
tccgactgaaaaatgaggcgttaaa

SEQ ID NO: 4481333 - DNA, 25 bp, Homo sapien
ggcggccatggaccccacaagggct

SEQ ID NO: 4481334 - DNA, 25 bp, Homo sapien
tgaacaagcgggaagaaggaaaatc

SEQ ID NO: 4481335 - DNA, 25 bp, Homo sapien
tgagggcggccatggaccccacaag

SEQ ID NO: 4481336 - DNA, 25 bp, Homo sapien
caacgacggtactatgctcctttcc

SEQ ID NO: 4481337 - DNA, 25 bp, Homo sapien
gtcaacgagtccattctcattgtca

SEQ ID NO: 4481338 - DNA, 25 bp, Homo sapien
ctgccgcaacgacggtactatgctc

SEQ ID NO: 4481339 - DNA, 25 bp, Homo sapien
ctccgtcaacgagtccattctcatt

SEQ ID NO: 4481340 - DNA, 25 bp, Homo sapien
gtcttcagaatccacaaaccatatc

SEQ ID NO: 4481341 - DNA, 25 bp, Homo sapien
gtcagatttgggtcttcagaatcca

SEQ ID NO: 4481342 - DNA, 25 bp, Homo sapien
gggtcttcagaatccacaaaccata

SEQ ID NO: 4481343 - DNA, 25 bp, Homo sapien
gatttgggtcttcagaatccacaaa

SEQ ID NO: 4481344 - DNA, 25 bp, Homo sapien
ggtagtggttgatctagcatctcaa

SEQ ID NO: 4481345 - DNA, 25 bp, Homo sapien
tgatctagcatctcaacatccaggt

SEQ ID NO: 4481346 - DNA, 25 bp, Homo sapien
cagagttcacatatcaaccacttca

SEQ ID NO: 4481347 - DNA, 25 bp, Homo sapien
tagtggttgatctagcatctcaaca

SEQ ID NO: 4481348 - DNA, 25 bp, Homo sapien
atatcagaagataaaagcgtaaaga

SEQ ID NO: 4481349 - DNA, 25 bp, Homo sapien
gactcaattatgaacttagaattct

SEQ ID NO: 4481350 - DNA, 25 bp, Homo sapien
catttgtaacaaatatcagaagata

SEQ ID NO: 4481351 - DNA, 25 bp, Homo sapien
gagaaaatcataccaactaccagaa

SEQ ID NO: 4481352 - DNA, 25 bp, Homo sapien
aagtcacttcttctgttgtcccatt

SEQ ID NO: 4481353 - DNA, 25 bp, Homo sapien
tcttctgaagtcacttcttctgttg

SEQ ID NO: 4481354 - DNA, 25 bp, Homo sapien
ctgaagtcacttcttctgttgtccc

SEQ ID NO: 4481355 - DNA, 25 bp, Homo sapien
ttctgaagtcacttcttctgttgtc

SEQ ID NO: 4481356 - DNA, 25 bp, Homo sapien
ttcccactaataggctcttcttcct

SEQ ID NO: 4481357 - DNA, 25 bp, Homo sapien
ttcttccttcatctcatagtgatct

SEQ ID NO: 4481358 - DNA, 25 bp, Homo sapien
ctgactttttcccactaataggctc

SEQ ID NO: 4481359 - DNA, 25 bp, Homo sapien
tttttcaattccttcatcctctgac

SEQ ID NO: 4481360 - DNA, 25 bp, Homo sapien
tgtccctgagctctttcataagtct

SEQ ID NO: 4481361 - DNA, 25 bp, Homo sapien
tatatgtccctgagctctttcataa

SEQ ID NO: 4481362 - DNA, 25 bp, Homo sapien
gagctctttcataagtctatctgaa

SEQ ID NO: 4481363 - DNA, 25 bp, Homo sapien
gatctgtatatgtccctgagctctt

SEQ ID NO: 4481364 - DNA, 25 bp, Homo sapien
gaccactgagtagctcggatcacca

SEQ ID NO: 4481365 - DNA, 25 bp, Homo sapien
ctcagaccactgagtagctcggatc

SEQ ID NO: 4481366 - DNA, 25 bp, Homo sapien
ctgagtagctcggatcaccaggcgt

SEQ ID NO: 4481367 - DNA, 25 bp, Homo sapien
gtagctcggatcaccaggcgtgcgc

SEQ ID NO: 4481368 - DNA, 25 bp, Homo sapien
taacatgccagtcatataaactgtc

SEQ ID NO: 4481369 - DNA, 25 bp, Homo sapien
aacatgccagtcatataaactgtca

SEQ ID NO: 4481370 - DNA, 25 bp, Homo sapien
tcaaatataaactggttatcacagt

SEQ ID NO: 4481371 - DNA, 25 bp, Homo sapien
gtctcatgaagttattaaatacact

SEQ ID NO: 4481372 - DNA, 25 bp, Homo sapien
aaactggttatcacagtctcatgaa

SEQ ID NO: 4481373 - DNA, 25 bp, Homo sapien
tatcacagtctcatgaagttattaa

SEQ ID NO: 4481374 - DNA, 25 bp, Homo sapien
cactgtgcaaaggactatcagggtc

SEQ ID NO: 4481375 - DNA, 25 bp, Homo sapien
gaagatcactgtgcaaaggactatc

SEQ ID NO: 4481376 - DNA, 25 bp, Homo sapien
taaaagagaagttaagcaaaatata

SEQ ID NO: 4481377 - DNA, 25 bp, Homo sapien
gtgcaaaggactatcagggtcaacc

SEQ ID NO: 4481378 - DNA, 25 bp, Homo sapien
aatggaggatcaaatggaaagttat

SEQ ID NO: 4481379 - DNA, 25 bp, Homo sapien
aaatggaggatcaaatggaaagtta

SEQ ID NO: 4481380 - DNA, 25 bp, Homo sapien
atggaggatcaaatggaaagttatc

SEQ ID NO: 4481381 - DNA, 25 bp, Homo sapien
acctctaacatctgctcacgaagga

SEQ ID NO: 4481382 - DNA, 25 bp, Homo sapien
tctaacatctgctcacgaaggaatc

SEQ ID NO: 4481383 - DNA, 25 bp, Homo sapien
ctctaacatctgctcacgaaggaat

SEQ ID NO: 4481384 - DNA, 25 bp, Homo sapien
cctctaacatctgctcacgaaggaa

SEQ ID NO: 4481385 - DNA, 25 bp, Homo sapien
taagctttaccctgattgagatggc

SEQ ID NO: 4481386 - DNA, 25 bp, Homo sapien
gaatagccagggtgatagtctactt

SEQ ID NO: 4481387 - DNA, 25 bp, Homo sapien
gattgagatggcaagcttttacttc

SEQ ID NO: 4481388 - DNA, 25 bp, Homo sapien
gccagggtgatagtctacttagcag

SEQ ID NO: 4481389 - DNA, 25 bp, Homo sapien
acataatgctcctccacccaataca

SEQ ID NO: 4481390 - DNA, 25 bp, Homo sapien
ataatgctcctccacccaatacata

SEQ ID NO: 4481391 - DNA, 25 bp, Homo sapien
cataatgctcctccacccaatacat

SEQ ID NO: 4481392 - DNA, 25 bp, Homo sapien
taatgctcctccacccaatacatac

SEQ ID NO: 4481393 - DNA, 25 bp, Homo sapien
ggtggcatttatttgcatgatgacc

SEQ ID NO: 4481394 - DNA, 25 bp, Homo sapien
tgcatgatgaccgattctattgagt

SEQ ID NO: 4481395 - DNA, 25 bp, Homo sapien
tttatttgcatgatgaccgattcta

SEQ ID NO: 4481396 - DNA, 25 bp, Homo sapien
tgatgaccgattctattgagtaggc

SEQ ID NO: 4481397 - DNA, 25 bp, Homo sapien
ttttattgtcctttctaacaatcag

SEQ ID NO: 4481398 - DNA, 25 bp, Homo sapien
aaatccctgtttgacctaaaggctg

SEQ ID NO: 4481399 - DNA, 25 bp, Homo sapien
gctattctctagatattctgcagtt

SEQ ID NO: 4481400 - DNA, 25 bp, Homo sapien
ggcacaaggatttggcaatgaacat

SEQ ID NO: 4481401 - DNA, 25 bp, Homo sapien
attgttgggctcttgctagattata

SEQ ID NO: 4481402 - DNA, 25 bp, Homo sapien
ggaattataggattgttgggctctt

SEQ ID NO: 4481403 - DNA, 25 bp, Homo sapien
gggctcttgctagattatattgatt

SEQ ID NO: 4481404 - DNA, 25 bp, Homo sapien
tacaatggaattataggattgttgg

SEQ ID NO: 4481405 - DNA, 25 bp, Homo sapien
tatcggagccataacgtcatttcac

SEQ ID NO: 4481406 - DNA, 25 bp, Homo sapien
caaggaacttggactgttatcggag

SEQ ID NO: 4481407 - DNA, 25 bp, Homo sapien
gaagccatcgcagcaggtgcaatga

SEQ ID NO: 4481408 - DNA, 25 bp, Homo sapien
taaaatcagagttagtagcaggcca

SEQ ID NO: 4481409 - DNA, 25 bp, Homo sapien
agccatcttcctttggaggggtgta

SEQ ID NO: 4481410 - DNA, 25 bp, Homo sapien
gccatcttcctttggaggggtgtac

SEQ ID NO: 4481411 - DNA, 25 bp, Homo sapien
tagccatcttcctttggaggggtgt

SEQ ID NO: 4481412 - DNA, 25 bp, Homo sapien
ttagccatcttcctttggaggggtg

SEQ ID NO: 4481413 - DNA, 25 bp, Homo sapien
taaagcctcaacttcagtagcctga

SEQ ID NO: 4481414 - DNA, 25 bp, Homo sapien
taacccatgggctcaatataggaaa

SEQ ID NO: 4481415 - DNA, 25 bp, Homo sapien
tattgcaaatccttgtaacccatgg

SEQ ID NO: 4481416 - DNA, 25 bp, Homo sapien
catcttcggtactgctgtaataggg

SEQ ID NO: 4481417 - DNA, 25 bp, Homo sapien
ataacttgaagctctgtactgtggc

SEQ ID NO: 4481418 - DNA, 25 bp, Homo sapien
tcaaggagtctttgtgccaatcact

SEQ ID NO: 4481419 - DNA, 25 bp, Homo sapien
caagactctgatgccccagtggaaa

SEQ ID NO: 4481420 - DNA, 25 bp, Homo sapien
cagtctgcttgccatcaggatatta

SEQ ID NO: 4481421 - DNA, 25 bp, Homo sapien
ttacgccagcatagggttgcccggc

SEQ ID NO: 4481422 - DNA, 25 bp, Homo sapien
gaaccagtcctacggcggctcggag

SEQ ID NO: 4481423 - DNA, 25 bp, Homo sapien
tcggaggaacccgattacgccagca

SEQ ID NO: 4481424 - DNA, 25 bp, Homo sapien
ggcgcgcactgagcaggcgtccgcg

SEQ ID NO: 4481425 - DNA, 25 bp, Homo sapien
cggcactcgccgcagcagcctaccg

SEQ ID NO: 4481426 - DNA, 25 bp, Homo sapien
cgccgcagcagcctaccggctccat

SEQ ID NO: 4481427 - DNA, 25 bp, Homo sapien
actcgccgcagcagcctaccggctc

SEQ ID NO: 4481428 - DNA, 25 bp, Homo sapien
ggcactcgccgcagcagcctaccgg

SEQ ID NO: 4481429 - DNA, 25 bp, Homo sapien
ggaaggtgagcacacgctccaccac

SEQ ID NO: 4481430 - DNA, 25 bp, Homo sapien
cagcaacgccttggcgggcaggaag

SEQ ID NO: 4481431 - DNA, 25 bp, Homo sapien
ctcaacacgaaggtgctccgcgggt

SEQ ID NO: 4481432 - DNA, 25 bp, Homo sapien
tccgccaggttactcaacacgaagg

SEQ ID NO: 4481433 - DNA, 25 bp, Homo sapien
ccgctggcgcagcagcaggagatcc

SEQ ID NO: 4481434 - DNA, 25 bp, Homo sapien
gcctgcggagatccaggttacgctc

SEQ ID NO: 4481435 - DNA, 25 bp, Homo sapien
gggtccgcaatactctgcgcacaca

SEQ ID NO: 4481436 - DNA, 25 bp, Homo sapien
tgcgcacacactccctccataagcg

SEQ ID NO: 4481437 - DNA, 25 bp, Homo sapien
gttacgctccgatgggtccgcaata

SEQ ID NO: 4481438 - DNA, 25 bp, Homo sapien
tgccatgaagaaccttactgggaca

SEQ ID NO: 4481439 - DNA, 25 bp, Homo sapien
attgcaattgggaacagatcttttt

SEQ ID NO: 4481440 - DNA, 25 bp, Homo sapien
caaattgcaattgggaacagatctt

SEQ ID NO: 4481441 - DNA, 25 bp, Homo sapien
aattgcaattgggaacagatctttt

SEQ ID NO: 4481442 - DNA, 25 bp, Homo sapien
tggcattctgagtcaatctacttct

SEQ ID NO: 4481443 - DNA, 25 bp, Homo sapien
tcaatgttggcattctgagtcaatc

SEQ ID NO: 4481444 - DNA, 25 bp, Homo sapien
gcattctgagtcaatctacttctca

SEQ ID NO: 4481445 - DNA, 25 bp, Homo sapien
tgttggcattctgagtcaatctact

SEQ ID NO: 4481446 - DNA, 25 bp, Homo sapien
tcacactgtttgtaggagtgcaaat

SEQ ID NO: 4481447 - DNA, 25 bp, Homo sapien
actttcacactgtttgtaggagtgc

SEQ ID NO: 4481448 - DNA, 25 bp, Homo sapien
ttcacactgtttgtaggagtgcaaa

SEQ ID NO: 4481449 - DNA, 25 bp, Homo sapien
aactgtatgtggtaagatgcgaaca

SEQ ID NO: 4481450 - DNA, 25 bp, Homo sapien
gaactgtatgtggtaagatgcgaac

SEQ ID NO: 4481451 - DNA, 25 bp, Homo sapien
ctgtatgtggtaagatgcgaacatt

SEQ ID NO: 4481452 - DNA, 25 bp, Homo sapien
aaagaactgtatgtggtaagatgcg

SEQ ID NO: 4481453 - DNA, 25 bp, Homo sapien
gccacgacactcttccagactaatg

SEQ ID NO: 4481454 - DNA, 25 bp, Homo sapien
ccagactaatgaaagtttctgaatc

SEQ ID NO: 4481455 - DNA, 25 bp, Homo sapien
ctaatgaaagtttctgaatcagcca

SEQ ID NO: 4481456 - DNA, 25 bp, Homo sapien
tcttatggccacgacactcttccag

SEQ ID NO: 4481457 - DNA, 25 bp, Homo sapien
taactttagtaaatgggacctcatg

SEQ ID NO: 4481458 - DNA, 25 bp, Homo sapien
aatacagtaaaaggcctgaatagcc

SEQ ID NO: 4481459 - DNA, 25 bp, Homo sapien
cagtcacctggatcaaattagacaa

SEQ ID NO: 4481460 - DNA, 25 bp, Homo sapien
tctaacttgggacctgagtgtgcgc

SEQ ID NO: 4481461 - DNA, 25 bp, Homo sapien
aatcccaaggacttggcattgtttg

SEQ ID NO: 4481462 - DNA, 25 bp, Homo sapien
agcttctcaagggcaagtgctgttt

SEQ ID NO: 4481463 - DNA, 25 bp, Homo sapien
aagtgctgtttccatactagttctt

SEQ ID NO: 4481464 - DNA, 25 bp, Homo sapien
gcattgtttggggaatagcttctca

SEQ ID NO: 4481465 - DNA, 25 bp, Homo sapien
tcatcaagttgctaatttatctcac

SEQ ID NO: 4481466 - DNA, 25 bp, Homo sapien
taatataaggcaaatataatgccat

SEQ ID NO: 4481467 - DNA, 25 bp, Homo sapien
caggtaaccttgagatgagaagtac

SEQ ID NO: 4481468 - DNA, 25 bp, Homo sapien
caaaggaccccacattaatgcaagg

SEQ ID NO: 4481469 - DNA, 25 bp, Homo sapien
ccctccaaggaaggtactactgtca

SEQ ID NO: 4481470 - DNA, 25 bp, Homo sapien
gtacagccggcattcgaatccaggt

SEQ ID NO: 4481471 - DNA, 25 bp, Homo sapien
tacagatactaagcggtacagccgg

SEQ ID NO: 4481472 - DNA, 25 bp, Homo sapien
cagtgaagccccatgaagttaggta

SEQ ID NO: 4481473 - DNA, 25 bp, Homo sapien
ggtagccctagtagactaacacagt

SEQ ID NO: 4481474 - DNA, 25 bp, Homo sapien
gaagagacaccaagcatgcttatgt

SEQ ID NO: 4481475 - DNA, 25 bp, Homo sapien
taactctgtggtgcttaaaggtgct

SEQ ID NO: 4481476 - DNA, 25 bp, Homo sapien
taggaccctaatccaacaggactag

SEQ ID NO: 4481477 - DNA, 25 bp, Homo sapien
ctatttcctgaggtcgattgctacc

SEQ ID NO: 4481478 - DNA, 25 bp, Homo sapien
ccttcaatttgagggaataataaag

SEQ ID NO: 4481479 - DNA, 25 bp, Homo sapien
cgattgctacctgatcccattggag

SEQ ID NO: 4481480 - DNA, 25 bp, Homo sapien
tctaatgttaaattctttggatcct

SEQ ID NO: 4481481 - DNA, 25 bp, Homo sapien
caaggccttcaatgacacttgatgc

SEQ ID NO: 4481482 - DNA, 25 bp, Homo sapien
gccctggactggcttactccaaggc

SEQ ID NO: 4481483 - DNA, 25 bp, Homo sapien
acatcaacacattgatcatcttctt

SEQ ID NO: 4481484 - DNA, 25 bp, Homo sapien
gatagtcatctcgtcaacatcaaca

SEQ ID NO: 4481485 - DNA, 25 bp, Homo sapien
caatcccttgagcttcagcactgat

SEQ ID NO: 4481486 - DNA, 25 bp, Homo sapien
tgggcaacttcgaaggcagaacaag

SEQ ID NO: 4481487 - DNA, 25 bp, Homo sapien
cactagtacagagcaccgttctaag

SEQ ID NO: 4481488 - DNA, 25 bp, Homo sapien
tctgctttctcaagggctgggcaac

SEQ ID NO: 4481489 - DNA, 25 bp, Homo sapien
tagactagcccacgaaattttaaga

SEQ ID NO: 4481490 - DNA, 25 bp, Homo sapien
gccagcattaccaaacgggtgcttt

SEQ ID NO: 4481491 - DNA, 25 bp, Homo sapien
tttacaaacaaggactgccaatgcc

SEQ ID NO: 4481492 - DNA, 25 bp, Homo sapien
tctgcctagtatgggatacgatctc

SEQ ID NO: 4481493 - DNA, 25 bp, Homo sapien
ccctctttgcgtcgatgtattctca

SEQ ID NO: 4481494 - DNA, 25 bp, Homo sapien
tctttgcgtcgatgtattctcatca

SEQ ID NO: 4481495 - DNA, 25 bp, Homo sapien
tgtgcccctctttgcgtcgatgtat

SEQ ID NO: 4481496 - DNA, 25 bp, Homo sapien
ctgttgtgcccctctttgcgtcgat

SEQ ID NO: 4481497 - DNA, 25 bp, Homo sapien
tcatctggtctatccacgtgggctc

SEQ ID NO: 4481498 - DNA, 25 bp, Homo sapien
gaaaaagaacagactctcccctaca

SEQ ID NO: 4481499 - DNA, 25 bp, Homo sapien
gcctaagaaactactacatcactga

SEQ ID NO: 4481500 - DNA, 25 bp, Homo sapien
taaaagctgctaccgctaggaggtg

SEQ ID NO: 4481501 - DNA, 25 bp, Homo sapien
tgatgacaggttgtccacctggcct

SEQ ID NO: 4481502 - DNA, 25 bp, Homo sapien
gaaagtgctgactacttgctgcaga

SEQ ID NO: 4481503 - DNA, 25 bp, Homo sapien
taattactggctcccaccttacagc

SEQ ID NO: 4481504 - DNA, 25 bp, Homo sapien
cacacgaagttcagggttatctaaa

SEQ ID NO: 4481505 - DNA, 25 bp, Homo sapien
tcacagacgaaatcagaagcacaca

SEQ ID NO: 4481506 - DNA, 25 bp, Homo sapien
cagacgaaatcagaagcacacaaga

SEQ ID NO: 4481507 - DNA, 25 bp, Homo sapien
cacagacgaaatcagaagcacacaa

SEQ ID NO: 4481508 - DNA, 25 bp, Homo sapien
agacgaaatcagaagcacacaagac

SEQ ID NO: 4481509 - DNA, 25 bp, Homo sapien
tacgacttgcaagacattctgtgga

SEQ ID NO: 4481510 - DNA, 25 bp, Homo sapien
gaattatgttcagtaagccccttag

SEQ ID NO: 4481511 - DNA, 25 bp, Homo sapien
gatggaaaggaagtaatggctccca

SEQ ID NO: 4481512 - DNA, 25 bp, Homo sapien
gaagctctgagaagttttgccataa

SEQ ID NO: 4481513 - DNA, 25 bp, Homo sapien
ccactaggggataaacaagtattgt

SEQ ID NO: 4481514 - DNA, 25 bp, Homo sapien
tgtatcatgcttccaacatctgaat

SEQ ID NO: 4481515 - DNA, 25 bp, Homo sapien
gagtctagagttcagcttaatttga

SEQ ID NO: 4481516 - DNA, 25 bp, Homo sapien
ttaatttgatggtaaaaactcatgc

SEQ ID NO: 4481517 - DNA, 25 bp, Homo sapien
catttccaaagaagccgaataaggg

SEQ ID NO: 4481518 - DNA, 25 bp, Homo sapien
gcactctggattcggtgtccactaa

SEQ ID NO: 4481519 - DNA, 25 bp, Homo sapien
taaagttcccagtgactatccgatc

SEQ ID NO: 4481520 - DNA, 25 bp, Homo sapien
aatgttggccgctttgaggcgctgc

SEQ ID NO: 4481521 - DNA, 25 bp, Homo sapien
gagtgccattattgttgtatagcta

SEQ ID NO: 4481522 - DNA, 25 bp, Homo sapien
tttagatgaccccagatgtatgagt

SEQ ID NO: 4481523 - DNA, 25 bp, Homo sapien
gatgaccccagatgtatgagtgcca

SEQ ID NO: 4481524 - DNA, 25 bp, Homo sapien
gaccccagatgtatgagtgccatta

SEQ ID NO: 4481525 - DNA, 25 bp, Homo sapien
catggcccaagtttccattttctga

SEQ ID NO: 4481526 - DNA, 25 bp, Homo sapien
cattttctgaaaaaggcagaaccca

SEQ ID NO: 4481527 - DNA, 25 bp, Homo sapien
tccattttctgaaaaaggcagaacc

SEQ ID NO: 4481528 - DNA, 25 bp, Homo sapien
gtttgaaatacacatggcccaagtt

SEQ ID NO: 4481529 - DNA, 25 bp, Homo sapien
gatcttagagcatcaatcaaagcta

SEQ ID NO: 4481530 - DNA, 25 bp, Homo sapien
gtcagtgttatgtccaaagttgtcc

SEQ ID NO: 4481531 - DNA, 25 bp, Homo sapien
gctacatgatctggtgcaacacaac

SEQ ID NO: 4481532 - DNA, 25 bp, Homo sapien
tctgcctgatgcaaaagctctcaac

SEQ ID NO: 4481533 - DNA, 25 bp, Homo sapien
tctggtctaccagttagttagctat

SEQ ID NO: 4481534 - DNA, 25 bp, Homo sapien
ttgaaggaaaattggtgctctctgc

SEQ ID NO: 4481535 - DNA, 25 bp, Homo sapien
tagctgacataccaactattctggg

SEQ ID NO: 4481536 - DNA, 25 bp, Homo sapien
cattctactgggaatatgacaggaa

SEQ ID NO: 4481537 - DNA, 25 bp, Homo sapien
tattctaggaggcatacccacttga

SEQ ID NO: 4481538 - DNA, 25 bp, Homo sapien
caagatggctcactaccagatccac

SEQ ID NO: 4481539 - DNA, 25 bp, Homo sapien
ggtagatagtccacgccacttatgg

SEQ ID NO: 4481540 - DNA, 25 bp, Homo sapien
tcttcaatgaggtcgtacagggacc

SEQ ID NO: 4481541 - DNA, 25 bp, Homo sapien
tctcttgtaaaacagtctggaggta

SEQ ID NO: 4481542 - DNA, 25 bp, Homo sapien
gatcgtcagctcagtatgtaggcta

SEQ ID NO: 4481543 - DNA, 25 bp, Homo sapien
actgttcataacaagctccaaaggc

SEQ ID NO: 4481544 - DNA, 25 bp, Homo sapien
ttatacaaaggaaactagccccaga

SEQ ID NO: 4481545 - DNA, 25 bp, Homo sapien
gcaagggtggatctatttctaggtc

SEQ ID NO: 4481546 - DNA, 25 bp, Homo sapien
caatcttccctgtttttactggcta

SEQ ID NO: 4481547 - DNA, 25 bp, Homo sapien
caaaagcttgcagcttcctagtcca

SEQ ID NO: 4481548 - DNA, 25 bp, Homo sapien
ggtctcaaaattctcctcaatctga

SEQ ID NO: 4481549 - DNA, 25 bp, Homo sapien
tacaagaccttgaatagagtatgtt

SEQ ID NO: 4481550 - DNA, 25 bp, Homo sapien
gctgctgaacccctgtagtgaaaat

SEQ ID NO: 4481551 - DNA, 25 bp, Homo sapien
gcttttgtaagcagtgcccacccta

SEQ ID NO: 4481552 - DNA, 25 bp, Homo sapien
ctttaagactgccacaatgtaggga

SEQ ID NO: 4481553 - DNA, 25 bp, Homo sapien
taataagagctatcccagtgggtat

SEQ ID NO: 4481554 - DNA, 25 bp, Homo sapien
tgtatacagtagtttcaccacccta

SEQ ID NO: 4481555 - DNA, 25 bp, Homo sapien
tgtcatccaggctagctgaagcctg

SEQ ID NO: 4481556 - DNA, 25 bp, Homo sapien
tacatgaagggtcctctttttgttg

SEQ ID NO: 4481557 - DNA, 25 bp, Homo sapien
tagtatagagttcccctatgcttcc

SEQ ID NO: 4481558 - DNA, 25 bp, Homo sapien
tgagaagctgcaagtactgatgaaa

SEQ ID NO: 4481559 - DNA, 25 bp, Homo sapien
cacacctagagagaaaccctaaggg

SEQ ID NO: 4481560 - DNA, 25 bp, Homo sapien
tctccccagaaagctgatgtgctga

SEQ ID NO: 4481561 - DNA, 25 bp, Homo sapien
tgtaatgtgcatcagtccatcggca

SEQ ID NO: 4481562 - DNA, 25 bp, Homo sapien
tatatctagggaataaatagcccca

SEQ ID NO: 4481563 - DNA, 25 bp, Homo sapien
tagccccaatgagtactgtgtgacc

SEQ ID NO: 4481564 - DNA, 25 bp, Homo sapien
cgaatgatctaagcaagtcactagt

SEQ ID NO: 4481565 - DNA, 25 bp, Homo sapien
gaccatggtattatcacaatctgag

SEQ ID NO: 4481566 - DNA, 25 bp, Homo sapien
tgtctcatcgttcatgtaaaattcc

SEQ ID NO: 4481567 - DNA, 25 bp, Homo sapien
gtctcatcgttcatgtaaaattcca

SEQ ID NO: 4481568 - DNA, 25 bp, Homo sapien
tcatcgttcatgtaaaattccatgt

SEQ ID NO: 4481569 - DNA, 25 bp, Homo sapien
tctcatcgttcatgtaaaattccat

SEQ ID NO: 4481570 - DNA, 25 bp, Homo sapien
taagaatacttaatgcagcaagccc

SEQ ID NO: 4481571 - DNA, 25 bp, Homo sapien
gatacaataccatggactcagtagg

SEQ ID NO: 4481572 - DNA, 25 bp, Homo sapien
ccttgaatggcataccaagagtggg

SEQ ID NO: 4481573 - DNA, 25 bp, Homo sapien
tagtaactagcgacattcatgtgca

SEQ ID NO: 4481574 - DNA, 25 bp, Homo sapien
tgctgcccgggctcgggattcgctc

SEQ ID NO: 4481575 - DNA, 25 bp, Homo sapien
tcgggattcgctcggctctgcagcg

SEQ ID NO: 4481576 - DNA, 25 bp, Homo sapien
gggctcgggattcgctcggctctgc

SEQ ID NO: 4481577 - DNA, 25 bp, Homo sapien
ctgctgcccgggctcgggattcgct

SEQ ID NO: 4481578 - DNA, 25 bp, Homo sapien
ttggctaaagtattgggttctttca

SEQ ID NO: 4481579 - DNA, 25 bp, Homo sapien
tggctaaagtattgggttctttcaa

SEQ ID NO: 4481580 - DNA, 25 bp, Homo sapien
tgtaagtcgcatggaatcaaagcaa

SEQ ID NO: 4481581 - DNA, 25 bp, Homo sapien
tgctctgtgactgtaagtcgcatgg

SEQ ID NO: 4481582 - DNA, 25 bp, Homo sapien
cgcatggaatcaaagcaaagaggca

SEQ ID NO: 4481583 - DNA, 25 bp, Homo sapien
aatcaaagcaaagaggcagggcacc

SEQ ID NO: 4481584 - DNA, 25 bp, Homo sapien
ttgtccatagtcaatagcatgggag

SEQ ID NO: 4481585 - DNA, 25 bp, Homo sapien
gatgagggcaatgacttgtccatag

SEQ ID NO: 4481586 - DNA, 25 bp, Homo sapien
gagaaaagtaacacggagacttgcc

SEQ ID NO: 4481587 - DNA, 25 bp, Homo sapien
gccttcttgtgaccttttgaactcg

SEQ ID NO: 4481588 - DNA, 25 bp, Homo sapien
aacaataactcgacccttccagttg

SEQ ID NO: 4481589 - DNA, 25 bp, Homo sapien
tccaaacttgtggatccaactcccg

SEQ ID NO: 4481590 - DNA, 25 bp, Homo sapien
cacttagatgtctagtctgccccac

SEQ ID NO: 4481591 - DNA, 25 bp, Homo sapien
tgtggatccaactcccgccagacat

SEQ ID NO: 4481592 - DNA, 25 bp, Homo sapien
tcttgaactctattctattttaagg

SEQ ID NO: 4481593 - DNA, 25 bp, Homo sapien
ggacaggttgtgaacctgacctcgt

SEQ ID NO: 4481594 - DNA, 25 bp, Homo sapien
tctattttaaggacaggttgtgaac

SEQ ID NO: 4481595 - DNA, 25 bp, Homo sapien
gaactctattctattttaaggacag

SEQ ID NO: 4481596 - DNA, 25 bp, Homo sapien
gatcttctcaggtgacccggtccca

SEQ ID NO: 4481597 - DNA, 25 bp, Homo sapien
cggtcccaggtaatgtgctttccac

SEQ ID NO: 4481598 - DNA, 25 bp, Homo sapien
tgaggtctttctggttccaacttgg

SEQ ID NO: 4481599 - DNA, 25 bp, Homo sapien
tctgctacctgctgaggtctttctg

SEQ ID NO: 4481600 - DNA, 25 bp, Homo sapien
ttcagaaggtcaaataggtggaatc

SEQ ID NO: 4481601 - DNA, 25 bp, Homo sapien
cagaaggtcaaataggtggaatcat

SEQ ID NO: 4481602 - DNA, 25 bp, Homo sapien
tcagaaggtcaaataggtggaatca

SEQ ID NO: 4481603 - DNA, 25 bp, Homo sapien
agaaggtcaaataggtggaatcata

SEQ ID NO: 4481604 - DNA, 25 bp, Homo sapien
aactgccctgaagtagcctcctgat

SEQ ID NO: 4481605 - DNA, 25 bp, Homo sapien
gactcttctgaagcgcagtgtgatc

SEQ ID NO: 4481606 - DNA, 25 bp, Homo sapien
tcataggagtgggtaggagtctcac

SEQ ID NO: 4481607 - DNA, 25 bp, Homo sapien
gactcaaaggacagctctcgacaag

SEQ ID NO: 4481608 - DNA, 25 bp, Homo sapien
atcacctcttacttgagtgacagcc

SEQ ID NO: 4481609 - DNA, 25 bp, Homo sapien
aggaccccaggtctgttcatcacct

SEQ ID NO: 4481610 - DNA, 25 bp, Homo sapien
gacagccccatggcacacatgacct

SEQ ID NO: 4481611 - DNA, 25 bp, Homo sapien
cacctcttacttgagtgacagcccc

SEQ ID NO: 4481612 - DNA, 25 bp, Homo sapien
tccctgaaaaagtggcagcagtttc

SEQ ID NO: 4481613 - DNA, 25 bp, Homo sapien
tcagcatgggttgagcggaggagca

SEQ ID NO: 4481614 - DNA, 25 bp, Homo sapien
cagattccctgaaaaagtggcagca

SEQ ID NO: 4481615 - DNA, 25 bp, Homo sapien
gagcggaggagcagattccctgaaa

SEQ ID NO: 4481616 - DNA, 25 bp, Homo sapien
gtcagcatttccaagcgtgggttct

SEQ ID NO: 4481617 - DNA, 25 bp, Homo sapien
agcgtgggttctacaagacacatac

SEQ ID NO: 4481618 - DNA, 25 bp, Homo sapien
tcttggtgtttagtggggctcagct

SEQ ID NO: 4481619 - DNA, 25 bp, Homo sapien
tccaagcgtgggttctacaagacac

SEQ ID NO: 4481620 - DNA, 25 bp, Homo sapien
tggtcatgttgaaagatggagccac

SEQ ID NO: 4481621 - DNA, 25 bp, Homo sapien
tggattggtcatgttgaaagatgga

SEQ ID NO: 4481622 - DNA, 25 bp, Homo sapien
tgttgaaagatggagccacagccat

SEQ ID NO: 4481623 - DNA, 25 bp, Homo sapien
tcatgttgaaagatggagccacagc

SEQ ID NO: 4481624 - DNA, 25 bp, Homo sapien
gggcaagtcccgataggcaaagttc

SEQ ID NO: 4481625 - DNA, 25 bp, Homo sapien
gtaatcttcgtccagatttgacagg

SEQ ID NO: 4481626 - DNA, 25 bp, Homo sapien
cttctctttggtaatcttcgtccag

SEQ ID NO: 4481627 - DNA, 25 bp, Homo sapien
tggtttcttcgtctacttgttggga

SEQ ID NO: 4481628 - DNA, 25 bp, Homo sapien
agcagcgaggcagatcccttcctcg

SEQ ID NO: 4481629 - DNA, 25 bp, Homo sapien
ttcctcgggctgcttcctatttacc

SEQ ID NO: 4481630 - DNA, 25 bp, Homo sapien
aatcggcgcccccagctgagagctc

SEQ ID NO: 4481631 - DNA, 25 bp, Homo sapien
agcgaggcagatcccttcctcgggc

SEQ ID NO: 4481632 - DNA, 25 bp, Homo sapien
aggctcccagaagcctaaagctgct

SEQ ID NO: 4481633 - DNA, 25 bp, Homo sapien
tccatccattaacgagcctttgcat

SEQ ID NO: 4481634 - DNA, 25 bp, Homo sapien
gcagcagtgccagcggcacagcgct

SEQ ID NO: 4481635 - DNA, 25 bp, Homo sapien
ggcacagcgcttccatccattaacg

SEQ ID NO: 4481636 - DNA, 25 bp, Homo sapien
ttcccacagcacggcttcagccagt

SEQ ID NO: 4481637 - DNA, 25 bp, Homo sapien
cacagcacggcttcagccagttaga

SEQ ID NO: 4481638 - DNA, 25 bp, Homo sapien
cccacagcacggcttcagccagtta

SEQ ID NO: 4481639 - DNA, 25 bp, Homo sapien
acagcacggcttcagccagttagac

SEQ ID NO: 4481640 - DNA, 25 bp, Homo sapien
tacacaggctaccaggaaactgttg

SEQ ID NO: 4481641 - DNA, 25 bp, Homo sapien
gaatcaccaccaatattacacaggc

SEQ ID NO: 4481642 - DNA, 25 bp, Homo sapien
aggagaatcaccaccaatattacac

SEQ ID NO: 4481643 - DNA, 25 bp, Homo sapien
caccaatattacacaggctaccagg

SEQ ID NO: 4481644 - DNA, 25 bp, Homo sapien
gggcccgcctgcatgaacgtttaga

SEQ ID NO: 4481645 - DNA, 25 bp, Homo sapien
agtgaggaattaggtgcgttgctat

SEQ ID NO: 4481646 - DNA, 25 bp, Homo sapien
gctatgggggcttcgcagcatccgt

SEQ ID NO: 4481647 - DNA, 25 bp, Homo sapien
ctgcaatggacacgataaggaccaa

SEQ ID NO: 4481648 - DNA, 25 bp, Homo sapien
aggctgatccagtgaatcacgccag

SEQ ID NO: 4481649 - DNA, 25 bp, Homo sapien
tctgagaagaacacggacagaatga

SEQ ID NO: 4481650 - DNA, 25 bp, Homo sapien
tcacgccagcaaactggaatgcgct

SEQ ID NO: 4481651 - DNA, 25 bp, Homo sapien
agaagaacacggacagaatgaccag

SEQ ID NO: 4481652 - DNA, 25 bp, Homo sapien
cttgatttctgtgaagggatgggaa

SEQ ID NO: 4481653 - DNA, 25 bp, Homo sapien
aaaggcttggctggtaaaatccagc

SEQ ID NO: 4481654 - DNA, 25 bp, Homo sapien
ctctttctcgtgaaggacaatcttg

SEQ ID NO: 4481655 - DNA, 25 bp, Homo sapien
ggtgaatgcttgtgggggacagtca

SEQ ID NO: 4481656 - DNA, 25 bp, Homo sapien
acagtagccaccaggcgattatgca

SEQ ID NO: 4481657 - DNA, 25 bp, Homo sapien
tacagtagccaccaggcgattatgc

SEQ ID NO: 4481658 - DNA, 25 bp, Homo sapien
gttttcgatgtaatcccagatccca

SEQ ID NO: 4481659 - DNA, 25 bp, Homo sapien
caagcaccacaatccgtagaacagt

SEQ ID NO: 4481660 - DNA, 25 bp, Homo sapien
tctattttgttttcgatgtaatccc

SEQ ID NO: 4481661 - DNA, 25 bp, Homo sapien
tttgttttcgatgtaatcccagatc

SEQ ID NO: 4481662 - DNA, 25 bp, Homo sapien
cggagccaaagataggatgatcaca

SEQ ID NO: 4481663 - DNA, 25 bp, Homo sapien
ggagccaaagataggatgatcacag

SEQ ID NO: 4481664 - DNA, 25 bp, Homo sapien
ggatgatcacagccccgtcaaacac

SEQ ID NO: 4481665 - DNA, 25 bp, Homo sapien
ataggatgatcacagccccgtcaaa

SEQ ID NO: 4481666 - DNA, 25 bp, Homo sapien
caccctccagatccggagcatgatg

SEQ ID NO: 4481667 - DNA, 25 bp, Homo sapien
ccctccagatccggagcatgatgat

SEQ ID NO: 4481668 - DNA, 25 bp, Homo sapien
ttcaccctccagatccggagcatga

SEQ ID NO: 4481669 - DNA, 25 bp, Homo sapien
ctccagatccggagcatgatgatga

SEQ ID NO: 4481670 - DNA, 25 bp, Homo sapien
atgaccttggccttctcgtactgct

SEQ ID NO: 4481671 - DNA, 25 bp, Homo sapien
ccttctcgtactgctggataaccat

SEQ ID NO: 4481672 - DNA, 25 bp, Homo sapien
ccagctgctcgtcttggatgacctt

SEQ ID NO: 4481673 - DNA, 25 bp, Homo sapien
tactgctggataaccatctccatct

SEQ ID NO: 4481674 - DNA, 25 bp, Homo sapien
agagccgaaagtggcagtgcattac

SEQ ID NO: 4481675 - DNA, 25 bp, Homo sapien
catgggctggaagacagcccgtgaa

SEQ ID NO: 4481676 - DNA, 25 bp, Homo sapien
ggcattcctccactttcactggcag

SEQ ID NO: 4481677 - DNA, 25 bp, Homo sapien
gtgcccacatcaatatgcggccacg

SEQ ID NO: 4481678 - DNA, 25 bp, Homo sapien
tcaatatgcggccacgggcattcct

SEQ ID NO: 4481679 - DNA, 25 bp, Homo sapien
catcagaaatgcctacagcttgcag

SEQ ID NO: 4481680 - DNA, 25 bp, Homo sapien
ggagggggggcgtgacagcttcctc

SEQ ID NO: 4481681 - DNA, 25 bp, Homo sapien
cctccacgtgaaagacagcgaaggg

SEQ ID NO: 4481682 - DNA, 25 bp, Homo sapien
gggatggagggggggcgtgacagct

SEQ ID NO: 4481683 - DNA, 25 bp, Homo sapien
ttaatggtccggttgtggagtccaa

SEQ ID NO: 4481684 - DNA, 25 bp, Homo sapien
tggagtccaattgacacgggccttg

SEQ ID NO: 4481685 - DNA, 25 bp, Homo sapien
aatgcacactttggccagaagctcg

SEQ ID NO: 4481686 - DNA, 25 bp, Homo sapien
gtaaagctgagatcgaccttggccc

SEQ ID NO: 4481687 - DNA, 25 bp, Homo sapien
ccagagggtgtggggtgactggaag

SEQ ID NO: 4481688 - DNA, 25 bp, Homo sapien
gggtgtggggtgactggaagctgtc

SEQ ID NO: 4481689 - DNA, 25 bp, Homo sapien
cagagggtgtggggtgactggaagc

SEQ ID NO: 4481690 - DNA, 25 bp, Homo sapien
tgtggggtgactggaagctgtccat

SEQ ID NO: 4481691 - DNA, 25 bp, Homo sapien
taaatatttgtgatcatgcttgata

SEQ ID NO: 4481692 - DNA, 25 bp, Homo sapien
tgaatcttgggggtggttactccca

SEQ ID NO: 4481693 - DNA, 25 bp, Homo sapien
tatttgtgatcatgcttgatatggt

SEQ ID NO: 4481694 - DNA, 25 bp, Homo sapien
ggtggttactcccatgctttctcat

SEQ ID NO: 4481695 - DNA, 25 bp, Homo sapien
ggagccctgggtgcaaattcagttc

SEQ ID NO: 4481696 - DNA, 25 bp, Homo sapien
catcgcggttcgcaagagcttctta

SEQ ID NO: 4481697 - DNA, 25 bp, Homo sapien
ttaggaatctcccagcatcgcggtt

SEQ ID NO: 4481698 - DNA, 25 bp, Homo sapien
ggtgctcgacaacatgaaagcctct

SEQ ID NO: 4481699 - DNA, 25 bp, Homo sapien
cggcctccaacactttgaagcggct

SEQ ID NO: 4481700 - DNA, 25 bp, Homo sapien
tggagcgccgcttcgcgctcggcag

SEQ ID NO: 4481701 - DNA, 25 bp, Homo sapien
gtctcctcgtcccacgtgccggcct

SEQ ID NO: 4481702 - DNA, 25 bp, Homo sapien
caacactttgaagcggctgcgcggc

SEQ ID NO: 4481703 - DNA, 25 bp, Homo sapien
agagcagctgtaccgggagtgctta

SEQ ID NO: 4481704 - DNA, 25 bp, Homo sapien
cagggtcttataggtcattggctga

SEQ ID NO: 4481705 - DNA, 25 bp, Homo sapien
gaggtgctgcggagagcagctgtac

SEQ ID NO: 4481706 - DNA, 25 bp, Homo sapien
tcaaatgtggcatctggcgttcagg

SEQ ID NO: 4481707 - DNA, 25 bp, Homo sapien
ctcctcctggaagttgcccactatg

SEQ ID NO: 4481708 - DNA, 25 bp, Homo sapien
tcctcctcctggaagttgcccacta

SEQ ID NO: 4481709 - DNA, 25 bp, Homo sapien
ctcctcctcctggaagttgcccact

SEQ ID NO: 4481710 - DNA, 25 bp, Homo sapien
cctcctggaagttgcccactatggg

SEQ ID NO: 4481711 - DNA, 25 bp, Homo sapien
ggccctgtgaccagtcctagattgg

SEQ ID NO: 4481712 - DNA, 25 bp, Homo sapien
acaactttgacttccaccaagtctg

SEQ ID NO: 4481713 - DNA, 25 bp, Homo sapien
tgaccagtcctagattggacttcat

SEQ ID NO: 4481714 - DNA, 25 bp, Homo sapien
gtgaccagttgagggacccctggcc

SEQ ID NO: 4481715 - DNA, 25 bp, Homo sapien
tgtagctgttcatgtcgtccttcat

SEQ ID NO: 4481716 - DNA, 25 bp, Homo sapien
ccattgtaatactgactgatgtagc

SEQ ID NO: 4481717 - DNA, 25 bp, Homo sapien
taatactgactgatgtagctgttca

SEQ ID NO: 4481718 - DNA, 25 bp, Homo sapien
gctgggcccattgtaatactgactg

SEQ ID NO: 4481719 - DNA, 25 bp, Homo sapien
tctattgcggccgtggtgaccatac

SEQ ID NO: 4481720 - DNA, 25 bp, Homo sapien
actgagctgcgggaggcactctccg

SEQ ID NO: 4481721 - DNA, 25 bp, Homo sapien
ctgctgtcactctgggcccgggtga

SEQ ID NO: 4481722 - DNA, 25 bp, Homo sapien
gctggtgccattaccgccgagtttg

SEQ ID NO: 4481723 - DNA, 25 bp, Homo sapien
ctggaagtggatgacaggcctgatc

SEQ ID NO: 4481724 - DNA, 25 bp, Homo sapien
ggaagtggatgacaggcctgatctg

SEQ ID NO: 4481725 - DNA, 25 bp, Homo sapien
tggaagtggatgacaggcctgatct

SEQ ID NO: 4481726 - DNA, 25 bp, Homo sapien
tcacagtgctgttccctagagtcca

SEQ ID NO: 4481727 - DNA, 25 bp, Homo sapien
tgttggactccacccaggattcctg

SEQ ID NO: 4481728 - DNA, 25 bp, Homo sapien
acgaaggcaacgcaagaggctgagc

SEQ ID NO: 4481729 - DNA, 25 bp, Homo sapien
cataggctcagatggtggtctccgt

SEQ ID NO: 4481730 - DNA, 25 bp, Homo sapien
aagccaaaaggtagcagtgtgtgca

SEQ ID NO: 4481731 - DNA, 25 bp, Homo sapien
cactgcattagcacacaaggtcttg

SEQ ID NO: 4481732 - DNA, 25 bp, Homo sapien
cactgcactgccacgactaagggtt

SEQ ID NO: 4481733 - DNA, 25 bp, Homo sapien
taaaatgggagccaactcaggccat

SEQ ID NO: 4481734 - DNA, 25 bp, Homo sapien
tattgggtcatgaagattcacccct

SEQ ID NO: 4481735 - DNA, 25 bp, Homo sapien
cagcaccatctatctgttcaaagag

SEQ ID NO: 4481736 - DNA, 25 bp, Homo sapien
aatccattgccaaatattgggtcat

SEQ ID NO: 4481737 - DNA, 25 bp, Homo sapien
tcccattgaatgaacttggcaaact

SEQ ID NO: 4481738 - DNA, 25 bp, Homo sapien
cataaggacttaaagctgtttaacg

SEQ ID NO: 4481739 - DNA, 25 bp, Homo sapien
gatactttagctttcatattgttag

SEQ ID NO: 4481740 - DNA, 25 bp, Homo sapien
tactaacaggctgacaagatacttt

SEQ ID NO: 4481741 - DNA, 25 bp, Homo sapien
tctatttgctatgtacataaggact

SEQ ID NO: 4481742 - DNA, 25 bp, Homo sapien
gactctctatattggctactcttgt

SEQ ID NO: 4481743 - DNA, 25 bp, Homo sapien
ttttggttcacgttcccattgagca

SEQ ID NO: 4481744 - DNA, 25 bp, Homo sapien
aatgttgctgcctctaatgctaatc

SEQ ID NO: 4481745 - DNA, 25 bp, Homo sapien
ggccacaccacctgaaatttgatag

SEQ ID NO: 4481746 - DNA, 25 bp, Homo sapien
tgcagcatggagtacctgagctctc

SEQ ID NO: 4481747 - DNA, 25 bp, Homo sapien
tcatggtggacattgcctgcagcat

SEQ ID NO: 4481748 - DNA, 25 bp, Homo sapien
tgagctctcggaacttcatccaccg

SEQ ID NO: 4481749 - DNA, 25 bp, Homo sapien
gagacctggccgctcggaactgcat

SEQ ID NO: 4481750 - DNA, 25 bp, Homo sapien
taaggcaatatgtgccaacttctcc

SEQ ID NO: 4481751 - DNA, 25 bp, Homo sapien
tgtgaagattaccagacagctgttt

SEQ ID NO: 4481752 - DNA, 25 bp, Homo sapien
tgatacctcatcctatcagatggta

SEQ ID NO: 4481753 - DNA, 25 bp, Homo sapien
tcatgagggaattgtgaagattacc

SEQ ID NO: 4481754 - DNA, 25 bp, Homo sapien
gacattgctcctgtactcagtatca

SEQ ID NO: 4481755 - DNA, 25 bp, Homo sapien
caaggtaccatgttggtgctagcaa

SEQ ID NO: 4481756 - DNA, 25 bp, Homo sapien
taatgaaggcaattacaaggtacca

SEQ ID NO: 4481757 - DNA, 25 bp, Homo sapien
tagcaaagctaactagtccgagacg

SEQ ID NO: 4481758 - DNA, 25 bp, Homo sapien
gttttgcgtttaacagagtgtcata

SEQ ID NO: 4481759 - DNA, 25 bp, Homo sapien
aaaacctctatgctttgttctccta

SEQ ID NO: 4481760 - DNA, 25 bp, Homo sapien
gacaggtatctaccattattatatc

SEQ ID NO: 4481761 - DNA, 25 bp, Homo sapien
tgttctcctaatccctggcagtcac

SEQ ID NO: 4481762 - DNA, 25 bp, Homo sapien
gagcgtggcgtcagaactgtcatga

SEQ ID NO: 4481763 - DNA, 25 bp, Homo sapien
ctgcgagtcagtaaccatgagcgtg

SEQ ID NO: 4481764 - DNA, 25 bp, Homo sapien
tggcgtcagaactgtcatgactcat

SEQ ID NO: 4481765 - DNA, 25 bp, Homo sapien
tcagtaaccatgagcgtggcgtcag

SEQ ID NO: 4481766 - DNA, 25 bp, Homo sapien
tcaggtttttcgctgtgctccaatg

SEQ ID NO: 4481767 - DNA, 25 bp, Homo sapien
caggtttttcgctgtgctccaatgc

SEQ ID NO: 4481768 - DNA, 25 bp, Homo sapien
ttctcctcttgccgagatccaggtc

SEQ ID NO: 4481769 - DNA, 25 bp, Homo sapien
acttctcctcttgccgagatccagg

SEQ ID NO: 4481770 - DNA, 25 bp, Homo sapien
cttctcctcttgccgagatccaggt

SEQ ID NO: 4481771 - DNA, 25 bp, Homo sapien
ttggacgtgaccgtcatcgtccagc

SEQ ID NO: 4481772 - DNA, 25 bp, Homo sapien
ggatccgtttggacgtgaccgtcat

SEQ ID NO: 4481773 - DNA, 25 bp, Homo sapien
tctcaggacgagagagccgaggaca

SEQ ID NO: 4481774 - DNA, 25 bp, Homo sapien
tgaccgtcatcgtccagctggtcac

SEQ ID NO: 4481775 - DNA, 25 bp, Homo sapien
gatggggatccaggggctgatgggc

SEQ ID NO: 4481776 - DNA, 25 bp, Homo sapien
ttccccagaactgccggggatgcgg

SEQ ID NO: 4481777 - DNA, 25 bp, Homo sapien
ctgtggcgtcacgaagcttccccag

SEQ ID NO: 4481778 - DNA, 25 bp, Homo sapien
gaagcttccccagaactgccgggga

SEQ ID NO: 4481779 - DNA, 25 bp, Homo sapien
caacacgcactagccccgggccgga

SEQ ID NO: 4481780 - DNA, 25 bp, Homo sapien
gcagcatgacgtcaacacgcactag

SEQ ID NO: 4481781 - DNA, 25 bp, Homo sapien
gtcaacacgcactagccccgggccg

SEQ ID NO: 4481782 - DNA, 25 bp, Homo sapien
agcatgacgtcaacacgcactagcc

SEQ ID NO: 4481783 - DNA, 25 bp, Homo sapien
cccgcggagttgaaggagcgattcc

SEQ ID NO: 4481784 - DNA, 25 bp, Homo sapien
tcctactgccccgcggagttgaagg

SEQ ID NO: 4481785 - DNA, 25 bp, Homo sapien
tactgccccgcggagttgaaggagc

SEQ ID NO: 4481786 - DNA, 25 bp, Homo sapien
agttgaaggagcgattccgcaccgg

SEQ ID NO: 4481787 - DNA, 25 bp, Homo sapien
gcagaaggacgagggtcgcgcgccc

SEQ ID NO: 4481788 - DNA, 25 bp, Homo sapien
gggcagaaggacgagggtcgcgcgc

SEQ ID NO: 4481789 - DNA, 25 bp, Homo sapien
gaaaaagagatgtgcgcaaagtgtg

SEQ ID NO: 4481790 - DNA, 25 bp, Homo sapien
gatgtgcgcaaagtgtgcggccagg

SEQ ID NO: 4481791 - DNA, 25 bp, Homo sapien
gatcacccatagcacccagaaaagg

SEQ ID NO: 4481792 - DNA, 25 bp, Homo sapien
cagggcattggaaacgaaaaaccag

SEQ ID NO: 4481793 - DNA, 25 bp, Homo sapien
cgcaaacacgaaactaagaagagag

SEQ ID NO: 4481794 - DNA, 25 bp, Homo sapien
tgtcgacgtgtcttgaaactaaacg

SEQ ID NO: 4481795 - DNA, 25 bp, Homo sapien
tcaagacttgcgaccataaggaaag

SEQ ID NO: 4481796 - DNA, 25 bp, Homo sapien
ggcgacacccgcaggataaactggt

SEQ ID NO: 4481797 - DNA, 25 bp, Homo sapien
taaactggtcgtggatctgactccc

SEQ ID NO: 4481798 - DNA, 25 bp, Homo sapien
tgcacgtctcgtccaggtactggct

SEQ ID NO: 4481799 - DNA, 25 bp, Homo sapien
gtactggctgcactcggcacacttg

SEQ ID NO: 4481800 - DNA, 25 bp, Homo sapien
cgggcccgggggagcgctgcggcac

SEQ ID NO: 4481801 - DNA, 25 bp, Homo sapien
tgcggcacccgtgcgggatgcggat

SEQ ID NO: 4481802 - DNA, 25 bp, Homo sapien
cgggggagcgctgcggcacccgtgc

SEQ ID NO: 4481803 - DNA, 25 bp, Homo sapien
agcgctgcggcacccgtgcgggatg

SEQ ID NO: 4481804 - DNA, 25 bp, Homo sapien
ccggcgcgcgcccaggacactttgt

SEQ ID NO: 4481805 - DNA, 25 bp, Homo sapien
ggcccaaggtgcggcggtgtcagcg

SEQ ID NO: 4481806 - DNA, 25 bp, Homo sapien
atctccctggctgctacggctccgg

SEQ ID NO: 4481807 - DNA, 25 bp, Homo sapien
gtgcggcggtgtcagcgctgggcct

SEQ ID NO: 4481808 - DNA, 25 bp, Homo sapien
cctggcacttggcgcacttgatgcc

SEQ ID NO: 4481809 - DNA, 25 bp, Homo sapien
cacctggcacttggcgcacttgatg

SEQ ID NO: 4481810 - DNA, 25 bp, Homo sapien
acctggcacttggcgcacttgatgc

SEQ ID NO: 4481811 - DNA, 25 bp, Homo sapien
gcactcgatgtggtacacgctgtcc

SEQ ID NO: 4481812 - DNA, 25 bp, Homo sapien
gcggaagcactcgatgtggtacacg

SEQ ID NO: 4481813 - DNA, 25 bp, Homo sapien
gaagcactcgatgtggtacacgctg

SEQ ID NO: 4481814 - DNA, 25 bp, Homo sapien
tcgatgtggtacacgctgtcccgcg

SEQ ID NO: 4481815 - DNA, 25 bp, Homo sapien
ccgcggcgcgctcgagcaggaggcc

SEQ ID NO: 4481816 - DNA, 25 bp, Homo sapien
gccgcggcgcgctcgagcaggaggc

SEQ ID NO: 4481817 - DNA, 25 bp, Homo sapien
ggccgcggcgcgctcgagcaggagg

SEQ ID NO: 4481818 - DNA, 25 bp, Homo sapien
ctgagcagccgctggcactctcctc

SEQ ID NO: 4481819 - DNA, 25 bp, Homo sapien
catcccggggaaacagtgactgatt

SEQ ID NO: 4481820 - DNA, 25 bp, Homo sapien
actctcctcgcttggccccaggttc

SEQ ID NO: 4481821 - DNA, 25 bp, Homo sapien
ctccatcccggggaaacagtgactg

SEQ ID NO: 4481822 - DNA, 25 bp, Homo sapien
tccggaagaagtcggagtttcagag

SEQ ID NO: 4481823 - DNA, 25 bp, Homo sapien
tccttcagagcccatttggacaggg

SEQ ID NO: 4481824 - DNA, 25 bp, Homo sapien
gccacatgtgtagaagactcatcca

SEQ ID NO: 4481825 - DNA, 25 bp, Homo sapien
atccacggttatggacgggcctcca

SEQ ID NO: 4481826 - DNA, 25 bp, Homo sapien
agtggctgctcagggatgtgcctcc

SEQ ID NO: 4481827 - DNA, 25 bp, Homo sapien
catctgttcgccttactcggagaga

SEQ ID NO: 4481828 - DNA, 25 bp, Homo sapien
gcaggaccctcggaacgagcgaagc

SEQ ID NO: 4481829 - DNA, 25 bp, Homo sapien
gtttaattgttcgtcttcctctcca

SEQ ID NO: 4481830 - DNA, 25 bp, Homo sapien
tccttcatgagagcgtcgggccgcg

SEQ ID NO: 4481831 - DNA, 25 bp, Homo sapien
agctgctccttcatgagagcgtcgg

SEQ ID NO: 4481832 - DNA, 25 bp, Homo sapien
tgacccgcgggctcaggccggtcat

SEQ ID NO: 4481833 - DNA, 25 bp, Homo sapien
tgttctggaaccagacgcggatgac

SEQ ID NO: 4481834 - DNA, 25 bp, Homo sapien
cggaacccgcaacgcggggctgcca

SEQ ID NO: 4481835 - DNA, 25 bp, Homo sapien
ttctgcagctgccgacggagtgcac

SEQ ID NO: 4481836 - DNA, 25 bp, Homo sapien
agctgccgacggagtgcacaaccca

SEQ ID NO: 4481837 - DNA, 25 bp, Homo sapien
tgcagctgccgacggagtgcacaac

SEQ ID NO: 4481838 - DNA, 25 bp, Homo sapien
tttagggtctgcattgctttgcggg

SEQ ID NO: 4481839 - DNA, 25 bp, Homo sapien
gggaggcgcacactcgatcgcatcg

SEQ ID NO: 4481840 - DNA, 25 bp, Homo sapien
ggcagtaggtgctcgagttaggtct

SEQ ID NO: 4481841 - DNA, 25 bp, Homo sapien
ccaggccttgagtgatttagggtct

SEQ ID NO: 4481842 - DNA, 25 bp, Homo sapien
tggaaggcgggttggtccaggtcgc

SEQ ID NO: 4481843 - DNA, 25 bp, Homo sapien
gggcaaactcgctgagcgccttcca

SEQ ID NO: 4481844 - DNA, 25 bp, Homo sapien
cttccacggcggctggtacgtctgc

SEQ ID NO: 4481845 - DNA, 25 bp, Homo sapien
ttctcatggcggatgggactgcccg

SEQ ID NO: 4481846 - DNA, 25 bp, Homo sapien
gctccgagtcggaaagtgtcccttg

SEQ ID NO: 4481847 - DNA, 25 bp, Homo sapien
gaaacaccgggaagaggcaggtgaa

SEQ ID NO: 4481848 - DNA, 25 bp, Homo sapien
ccgcgtgctccgagtcggaaagtgt

SEQ ID NO: 4481849 - DNA, 25 bp, Homo sapien
aagaggcacgcgagctggtgctcca

SEQ ID NO: 4481850 - DNA, 25 bp, Homo sapien
cgggactcggcaccatactgttggg

SEQ ID NO: 4481851 - DNA, 25 bp, Homo sapien
tactgttgggggtgtccgggagctg

SEQ ID NO: 4481852 - DNA, 25 bp, Homo sapien
acgtcgctgccggaggagttgccta

SEQ ID NO: 4481853 - DNA, 25 bp, Homo sapien
cagggaggtcacgtcgctgccggag

SEQ ID NO: 4481854 - DNA, 25 bp, Homo sapien
cttgggctgtccagaccgtgtctct

SEQ ID NO: 4481855 - DNA, 25 bp, Homo sapien
ttgaaaaactaagagtcctcggagc

SEQ ID NO: 4481856 - DNA, 25 bp, Homo sapien
tgaaagcaggttgcatcctggcgcc

SEQ ID NO: 4481857 - DNA, 25 bp, Homo sapien
gaataattacgaaggcgagagagct

SEQ ID NO: 4481858 - DNA, 25 bp, Homo sapien
cgtggagagacagagcggcggccac

SEQ ID NO: 4481859 - DNA, 25 bp, Homo sapien
gtggggcgtggagagacagagcggc

SEQ ID NO: 4481860 - DNA, 25 bp, Homo sapien
gggtccgcgtgggcgagctccgggc

SEQ ID NO: 4481861 - DNA, 25 bp, Homo sapien
gggcgtggagagacagagcggcggc

SEQ ID NO: 4481862 - DNA, 25 bp, Homo sapien
tctgtcctccgtcgaataacttaaa

SEQ ID NO: 4481863 - DNA, 25 bp, Homo sapien
tactgtttcccagcaatcatgcgct

SEQ ID NO: 4481864 - DNA, 25 bp, Homo sapien
tgtttgttcggcaaaggctcacata

SEQ ID NO: 4481865 - DNA, 25 bp, Homo sapien
caagtcccactatgaactggctgtt

SEQ ID NO: 4481866 - DNA, 25 bp, Homo sapien
aagtgacctgggcacggcatatcca

SEQ ID NO: 4481867 - DNA, 25 bp, Homo sapien
gatgccaaacgcagataagcagccg

SEQ ID NO: 4481868 - DNA, 25 bp, Homo sapien
taaaccaaggacacgccagactggt

SEQ ID NO: 4481869 - DNA, 25 bp, Homo sapien
taaatgccgcggattgatcacgtcg

SEQ ID NO: 4481870 - DNA, 25 bp, Homo sapien
ggcacttgagaggtaaagctggtcc

SEQ ID NO: 4481871 - DNA, 25 bp, Homo sapien
ggaattctgctaaaagcgctgctga

SEQ ID NO: 4481872 - DNA, 25 bp, Homo sapien
ttctatctgaagactacagggcccc

SEQ ID NO: 4481873 - DNA, 25 bp, Homo sapien
cctaagctaagatggcaactatccc

SEQ ID NO: 4481874 - DNA, 25 bp, Homo sapien
ttgccacgttctggaaagtcttgag

SEQ ID NO: 4481875 - DNA, 25 bp, Homo sapien
gccacgttctggaaagtcttgagtc

SEQ ID NO: 4481876 - DNA, 25 bp, Homo sapien
cacgttctggaaagtcttgagtctc

SEQ ID NO: 4481877 - DNA, 25 bp, Homo sapien
acgttctggaaagtcttgagtctcg

SEQ ID NO: 4481878 - DNA, 25 bp, Homo sapien
cccagactcgcaactgtacgtcgga

SEQ ID NO: 4481879 - DNA, 25 bp, Homo sapien
aactgtacgtcggagccgcagcttc

SEQ ID NO: 4481880 - DNA, 25 bp, Homo sapien
tccagacgccagcagttgcgaggct

SEQ ID NO: 4481881 - DNA, 25 bp, Homo sapien
tcctgaccgcggcgttcctgggaca

SEQ ID NO: 4481882 - DNA, 25 bp, Homo sapien
ccgggctttgcagcccagaatttgg

SEQ ID NO: 4481883 - DNA, 25 bp, Homo sapien
cagcctatgaagttgacggtgcgac

SEQ ID NO: 4481884 - DNA, 25 bp, Homo sapien
ccgggagcagcgacgtttgaacact

SEQ ID NO: 4481885 - DNA, 25 bp, Homo sapien
tgaaagcgacaacttcgcccgggct

SEQ ID NO: 4481886 - DNA, 25 bp, Homo sapien
gatccggttggggaaaaagatctga

SEQ ID NO: 4481887 - DNA, 25 bp, Homo sapien
tcagtagtaatttctgtcagatact

SEQ ID NO: 4481888 - DNA, 25 bp, Homo sapien
ctgtcagatactgatcaaacattac

SEQ ID NO: 4481889 - DNA, 25 bp, Homo sapien
gatctgaaaatgtattcgactcgac

SEQ ID NO: 4481890 - DNA, 25 bp, Homo sapien
ccttgtcggtaccatttgtctgagc

SEQ ID NO: 4481891 - DNA, 25 bp, Homo sapien
gggtgttaccttggactctttcaca

SEQ ID NO: 4481892 - DNA, 25 bp, Homo sapien
gatgaatgagaacctaatccagatc

SEQ ID NO: 4481893 - DNA, 25 bp, Homo sapien
catttagaggtacactcccagcagg

SEQ ID NO: 4481894 - DNA, 25 bp, Homo sapien
tcagcgtttatatttgggccccaaa

SEQ ID NO: 4481895 - DNA, 25 bp, Homo sapien
gactccaggtcaagcggaaaaccag

SEQ ID NO: 4481896 - DNA, 25 bp, Homo sapien
tgtaatttccaaagtaggcagcaag

SEQ ID NO: 4481897 - DNA, 25 bp, Homo sapien
gcagcaagttgtcccctggtgataa

SEQ ID NO: 4481898 - DNA, 25 bp, Homo sapien
aagggtagttcaaagtgccgcatgc

SEQ ID NO: 4481899 - DNA, 25 bp, Homo sapien
tcaggagtgtgcacgaacctcagtt

SEQ ID NO: 4481900 - DNA, 25 bp, Homo sapien
ctggctgacataagaacggagaaat

SEQ ID NO: 4481901 - DNA, 25 bp, Homo sapien
ccaggacgtcaactgaggtaggcag

SEQ ID NO: 4481902 - DNA, 25 bp, Homo sapien
cagaaataaggagtggtttcctaga

SEQ ID NO: 4481903 - DNA, 25 bp, Homo sapien
cgcacagaaataaggagtggtttcc

SEQ ID NO: 4481904 - DNA, 25 bp, Homo sapien
cgggtgtttccccacgcacagaaat

SEQ ID NO: 4481905 - DNA, 25 bp, Homo sapien
tccccacgcacagaaataaggagtg

SEQ ID NO: 4481906 - DNA, 25 bp, Homo sapien
tacatgcactaaaggctgtgctccc

SEQ ID NO: 4481907 - DNA, 25 bp, Homo sapien
gatttacatgcactaaaggctgtgc

SEQ ID NO: 4481908 - DNA, 25 bp, Homo sapien
tgcactaaaggctgtgctccccagc

SEQ ID NO: 4481909 - DNA, 25 bp, Homo sapien
gtgctccccagctcatggctgtact

SEQ ID NO: 4481910 - DNA, 25 bp, Homo sapien
tcagtttacatctggggcagttgct

SEQ ID NO: 4481911 - DNA, 25 bp, Homo sapien
tctggggcagttgctgaaatgcaac

SEQ ID NO: 4481912 - DNA, 25 bp, Homo sapien
cagtttacatctggggcagttgctg

SEQ ID NO: 4481913 - DNA, 25 bp, Homo sapien
ggggcagttgctgaaatgcaacaat

SEQ ID NO: 4481914 - DNA, 25 bp, Homo sapien
ggtgccctgggtgccttagaaccta

SEQ ID NO: 4481915 - DNA, 25 bp, Homo sapien
cacatgattgaaagacagttgccca

SEQ ID NO: 4481916 - DNA, 25 bp, Homo sapien
tatatgtatagccaagtgactgcca

SEQ ID NO: 4481917 - DNA, 25 bp, Homo sapien
tttgtgccacagaatcctagcaggg

SEQ ID NO: 4481918 - DNA, 25 bp, Homo sapien
taatgactataggaagggatgagaa

SEQ ID NO: 4481919 - DNA, 25 bp, Homo sapien
tgttatcagaactacaacgtagctc

SEQ ID NO: 4481920 - DNA, 25 bp, Homo sapien
ggaagaagtttaattcgatcatacc

SEQ ID NO: 4481921 - DNA, 25 bp, Homo sapien
cgtagctcagacaacctagtagagt

SEQ ID NO: 4481922 - DNA, 25 bp, Homo sapien
gcagttaaggtttgagaaatagtcc

SEQ ID NO: 4481923 - DNA, 25 bp, Homo sapien
cctcctgatacaccagttgacggta

SEQ ID NO: 4481924 - DNA, 25 bp, Homo sapien
gattaccttcttaatggacctcctg

SEQ ID NO: 4481925 - DNA, 25 bp, Homo sapien
gaaatagtccctgtggagaaaacta

SEQ ID NO: 4481926 - DNA, 25 bp, Homo sapien
tccagtttctccttatgggtgctct

SEQ ID NO: 4481927 - DNA, 25 bp, Homo sapien
ctccagtttctccttatgggtgctc

SEQ ID NO: 4481928 - DNA, 25 bp, Homo sapien
ccagtttctccttatgggtgctctc

SEQ ID NO: 4481929 - DNA, 25 bp, Homo sapien
agctttttcttgggcatggcagtga

SEQ ID NO: 4481930 - DNA, 25 bp, Homo sapien
cttcaccttggctctattgcctgta

SEQ ID NO: 4481931 - DNA, 25 bp, Homo sapien
ctttttcttgggcatggcagtgatg

SEQ ID NO: 4481932 - DNA, 25 bp, Homo sapien
ggctctattgcctgtagcatcccct

SEQ ID NO: 4481933 - DNA, 25 bp, Homo sapien
tctctctcctttgcaggggactttt

SEQ ID NO: 4481934 - DNA, 25 bp, Homo sapien
cctgccagtgtcagcattttccttt

SEQ ID NO: 4481935 - DNA, 25 bp, Homo sapien
tctttttgggtacctcctctctctc

SEQ ID NO: 4481936 - DNA, 25 bp, Homo sapien
ccctccctgccagtgtcagcatttt

SEQ ID NO: 4481937 - DNA, 25 bp, Homo sapien
cattttatgccctgaacagggagag

SEQ ID NO: 4481938 - DNA, 25 bp, Homo sapien
tcaatggactagcaaaatcggaaag

SEQ ID NO: 4481939 - DNA, 25 bp, Homo sapien
tactggagggtcagggcccaacaga

SEQ ID NO: 4481940 - DNA, 25 bp, Homo sapien
aacccagtgaggtcttcattttatg

SEQ ID NO: 4481941 - DNA, 25 bp, Homo sapien
cactgtaaattgttttgtgaaccat

SEQ ID NO: 4481942 - DNA, 25 bp, Homo sapien
cctcagcactgtaaattgttttgtg

SEQ ID NO: 4481943 - DNA, 25 bp, Homo sapien
cttcctcagcactgtaaattgtttt

SEQ ID NO: 4481944 - DNA, 25 bp, Homo sapien
cagcactgtaaattgttttgtgaac

SEQ ID NO: 4481945 - DNA, 25 bp, Homo sapien
tcttccatgggccagtaagcgttga

SEQ ID NO: 4481946 - DNA, 25 bp, Homo sapien
cagtaagcgttgagatgatcaacac

SEQ ID NO: 4481947 - DNA, 25 bp, Homo sapien
gggttcttccatgggccagtaagcg

SEQ ID NO: 4481948 - DNA, 25 bp, Homo sapien
catgggccagtaagcgttgagatga

SEQ ID NO: 4481949 - DNA, 25 bp, Homo sapien
tctagcccatatttgattggaaggt

SEQ ID NO: 4481950 - DNA, 25 bp, Homo sapien
ttggatgtgactctagcccatattt

SEQ ID NO: 4481951 - DNA, 25 bp, Homo sapien
ttgattggaaggtaaaagaagtatg

SEQ ID NO: 4481952 - DNA, 25 bp, Homo sapien
gtgactctagcccatatttgattgg

SEQ ID NO: 4481953 - DNA, 25 bp, Homo sapien
aacctgaagttccagatcgtggaag

SEQ ID NO: 4481954 - DNA, 25 bp, Homo sapien
ggattgctcctacgatccactggga

SEQ ID NO: 4481955 - DNA, 25 bp, Homo sapien
ggagacttgcactgttgaacttttg

SEQ ID NO: 4481956 - DNA, 25 bp, Homo sapien
agtcacactcgaaaatggcagatag

SEQ ID NO: 4481957 - DNA, 25 bp, Homo sapien
atattccttgatcaaagaccagtcc

SEQ ID NO: 4481958 - DNA, 25 bp, Homo sapien
tcatattccttgatcaaagaccagt

SEQ ID NO: 4481959 - DNA, 25 bp, Homo sapien
catattccttgatcaaagaccagtc

SEQ ID NO: 4481960 - DNA, 25 bp, Homo sapien
ctcatattccttgatcaaagaccag

SEQ ID NO: 4481961 - DNA, 25 bp, Homo sapien
tactgagtcagtcttttgagtggct

SEQ ID NO: 4481962 - DNA, 25 bp, Homo sapien
tgtttccttagctcacgaatcacct

SEQ ID NO: 4481963 - DNA, 25 bp, Homo sapien
tacactatctgttctgtaccatgca

SEQ ID NO: 4481964 - DNA, 25 bp, Homo sapien
tagtcctcccttaattgcagttttg

SEQ ID NO: 4481965 - DNA, 25 bp, Homo sapien
ttttagttaagctatcagtcaggtc

SEQ ID NO: 4481966 - DNA, 25 bp, Homo sapien
agtatacctttctacagcccaagtg

SEQ ID NO: 4481967 - DNA, 25 bp, Homo sapien
cagtcaggtcatagtcatctgggtc

SEQ ID NO: 4481968 - DNA, 25 bp, Homo sapien
catgacatggccagtgatttctcca

SEQ ID NO: 4481969 - DNA, 25 bp, Homo sapien
gcagtccacttcagattattcatga

SEQ ID NO: 4481970 - DNA, 25 bp, Homo sapien
gacaattgactgtaggcaagacttc

SEQ ID NO: 4481971 - DNA, 25 bp, Homo sapien
catatcacagtttcgtttaaagcag

SEQ ID NO: 4481972 - DNA, 25 bp, Homo sapien
cctagttgaggtgaaataatagatc

SEQ ID NO: 4481973 - DNA, 25 bp, Homo sapien
gaaaattccactgtacacgtttgta

SEQ ID NO: 4481974 - DNA, 25 bp, Homo sapien
ttctctcctttgaaaattccactgt

SEQ ID NO: 4481975 - DNA, 25 bp, Homo sapien
ttgaaaattccactgtacacgtttg

SEQ ID NO: 4481976 - DNA, 25 bp, Homo sapien
tcctttgaaaattccactgtacacg

SEQ ID NO: 4481977 - DNA, 25 bp, Homo sapien
ggctgctatggtttctgatgggaaa

SEQ ID NO: 4481978 - DNA, 25 bp, Homo sapien
ggctctctgagattatcatacttgg

SEQ ID NO: 4481979 - DNA, 25 bp, Homo sapien
ttgccattgtctctttaatcaggag

SEQ ID NO: 4481980 - DNA, 25 bp, Homo sapien
ttctagtcctttactggagtcttca

SEQ ID NO: 4481981 - DNA, 25 bp, Homo sapien
cagcatgcattggaatgattgtgtg

SEQ ID NO: 4481982 - DNA, 25 bp, Homo sapien
ccttctatgcccagtagttgagggt

SEQ ID NO: 4481983 - DNA, 25 bp, Homo sapien
taacagtggtgaaagcaggtatcct

SEQ ID NO: 4481984 - DNA, 25 bp, Homo sapien
gttcatcaaagatagtggcctgtat

SEQ ID NO: 4481985 - DNA, 25 bp, Homo sapien
agccgcggtcgcctggggagggctc

SEQ ID NO: 4481986 - DNA, 25 bp, Homo sapien
gagcggggcagggatcgttgctggg

SEQ ID NO: 4481987 - DNA, 25 bp, Homo sapien
gagggctcggaggtcggcctcggag

SEQ ID NO: 4481988 - DNA, 25 bp, Homo sapien
ggggtgagccgcgtccgggccctgc

SEQ ID NO: 4481989 - DNA, 25 bp, Homo sapien
ctaagtccttaatctgtggattgac

SEQ ID NO: 4481990 - DNA, 25 bp, Homo sapien
gaagagattgagtacgagaaagacc

SEQ ID NO: 4481991 - DNA, 25 bp, Homo sapien
taatctgtggattgactgtggtgat

SEQ ID NO: 4481992 - DNA, 25 bp, Homo sapien
aaagacctgtgtggccaaaagcggc

SEQ ID NO: 4481993 - DNA, 25 bp, Homo sapien
tgtagctgccaatgaggttatcacc

SEQ ID NO: 4481994 - DNA, 25 bp, Homo sapien
ggatgtagctgccaatgaggttatc

SEQ ID NO: 4481995 - DNA, 25 bp, Homo sapien
cagagattctgtacaaactggatgt

SEQ ID NO: 4481996 - DNA, 25 bp, Homo sapien
gattctgtacaaactggatgtagct

SEQ ID NO: 4481997 - DNA, 25 bp, Homo sapien
gaagaacactatgtcctcacgtggc

SEQ ID NO: 4481998 - DNA, 25 bp, Homo sapien
cctggatccatctgaactctgggaa

SEQ ID NO: 4481999 - DNA, 25 bp, Homo sapien
gggcaaaaacggctaactctctctg

SEQ ID NO: 4482000 - DNA, 25 bp, Homo sapien
catagcaggcagatacaccttttgc

SEQ ID NO: 4482001 - DNA, 25 bp, Homo sapien
taccgtccatcaatgagagaggctg

SEQ ID NO: 4482002 - DNA, 25 bp, Homo sapien
gtaggacgtacaaactcaggaagtg

SEQ ID NO: 4482003 - DNA, 25 bp, Homo sapien
ggaatcggccaacagtattctttct

SEQ ID NO: 4482004 - DNA, 25 bp, Homo sapien
aaaattattgcctgaggaatcggcc

SEQ ID NO: 4482005 - DNA, 25 bp, Homo sapien
gccggtccaccaatgcggtgcggag

SEQ ID NO: 4482006 - DNA, 25 bp, Homo sapien
ccacaacgcccatggacgggctggg

SEQ ID NO: 4482007 - DNA, 25 bp, Homo sapien
ggaggcggaacctgcggtggcggcc

SEQ ID NO: 4482008 - DNA, 25 bp, Homo sapien
ggaggcctatatggccggcgcggag

SEQ ID NO: 4482009 - DNA, 25 bp, Homo sapien
ggcccgggccggctgcgatgctccg

SEQ ID NO: 4482010 - DNA, 25 bp, Homo sapien
cggctacagagaggcggtgcgacgt

SEQ ID NO: 4482011 - DNA, 25 bp, Homo sapien
gcggctacagagaggcggtgcgacg

SEQ ID NO: 4482012 - DNA, 25 bp, Homo sapien
gccggctgcgatgctccgcgggcgg

SEQ ID NO: 4482013 - DNA, 25 bp, Homo sapien
ccaacgccgcggtcctcgggcccag

SEQ ID NO: 4482014 - DNA, 25 bp, Homo sapien
gcagcagccccaacgccgcggtcct

SEQ ID NO: 4482015 - DNA, 25 bp, Homo sapien
cagccccaacgccgcggtcctcggg

SEQ ID NO: 4482016 - DNA, 25 bp, Homo sapien
caacgccgcggtcctcgggcccagc

SEQ ID NO: 4482017 - DNA, 25 bp, Homo sapien
cggcgctcgcccagcgggtagtgca

SEQ ID NO: 4482018 - DNA, 25 bp, Homo sapien
cgctcgcccagcgggtagtgcagct

SEQ ID NO: 4482019 - DNA, 25 bp, Homo sapien
gctcgcccagcgggtagtgcagctc

SEQ ID NO: 4482020 - DNA, 25 bp, Homo sapien
tcgcccagcgggtagtgcagctcct

SEQ ID NO: 4482021 - DNA, 25 bp, Homo sapien
attttctttatgatcgcctgcagtc

SEQ ID NO: 4482022 - DNA, 25 bp, Homo sapien
tgatcgcctgcagtcttttttgctg

SEQ ID NO: 4482023 - DNA, 25 bp, Homo sapien
aaagccatctgagtccaagtcgatt

SEQ ID NO: 4482024 - DNA, 25 bp, Homo sapien
ctcttcgtggccgagtttaacatat

SEQ ID NO: 4482025 - DNA, 25 bp, Homo sapien
gttagtcgtgtagggcagtccttac

SEQ ID NO: 4482026 - DNA, 25 bp, Homo sapien
gcagacaccgctgcttaacatattt

SEQ ID NO: 4482027 - DNA, 25 bp, Homo sapien
cagcagacaccgctgcttaacatat

SEQ ID NO: 4482028 - DNA, 25 bp, Homo sapien
gtttgtctccattgttagtcgtgta

SEQ ID NO: 4482029 - DNA, 25 bp, Homo sapien
taaacgtaattcacaggcaacaggt

SEQ ID NO: 4482030 - DNA, 25 bp, Homo sapien
tccacatagagtacagggtcaatga

SEQ ID NO: 4482031 - DNA, 25 bp, Homo sapien
tttgtagaaggcacttatccctgtg

SEQ ID NO: 4482032 - DNA, 25 bp, Homo sapien
tatataactggagaaagcaccgagt

SEQ ID NO: 4482033 - DNA, 25 bp, Homo sapien
aaaggcaaaatctttgatgtttgca

SEQ ID NO: 4482034 - DNA, 25 bp, Homo sapien
gatgtttgcaaatactgagaattgg

SEQ ID NO: 4482035 - DNA, 25 bp, Homo sapien
aaatctttgatgtttgcaaatactg

SEQ ID NO: 4482036 - DNA, 25 bp, Homo sapien
tctttgatgtttgcaaatactgaga

SEQ ID NO: 4482037 - DNA, 25 bp, Homo sapien
cagaacacaacgcatgtgacgttaa

SEQ ID NO: 4482038 - DNA, 25 bp, Homo sapien
cgcatgtgacgttaattctgatact

SEQ ID NO: 4482039 - DNA, 25 bp, Homo sapien
cacaacgcatgtgacgttaattctg

SEQ ID NO: 4482040 - DNA, 25 bp, Homo sapien
atttcccagaacacaacgcatgtga

SEQ ID NO: 4482041 - DNA, 25 bp, Homo sapien
gtcaatcacacgatcatacatctga

SEQ ID NO: 4482042 - DNA, 25 bp, Homo sapien
atctgaatccatgaactgagttcac

SEQ ID NO: 4482043 - DNA, 25 bp, Homo sapien
gtgttctcatcaaagtcaatcacac

SEQ ID NO: 4482044 - DNA, 25 bp, Homo sapien
tctgaatgttatattcatcccaagt

SEQ ID NO: 4482045 - DNA, 25 bp, Homo sapien
gccataatggccttcttaataaaga

SEQ ID NO: 4482046 - DNA, 25 bp, Homo sapien
atgggaatgggccataatggccttc

SEQ ID NO: 4482047 - DNA, 25 bp, Homo sapien
ttacgattctcagttgtttgaatcc

SEQ ID NO: 4482048 - DNA, 25 bp, Homo sapien
tacttacgattctcagttgtttgaa

SEQ ID NO: 4482049 - DNA, 25 bp, Homo sapien
agaattaccgtatgatctagcagta

SEQ ID NO: 4482050 - DNA, 25 bp, Homo sapien
aagggtgtactcactatgaaaaatg

SEQ ID NO: 4482051 - DNA, 25 bp, Homo sapien
tttaaagggtgtactcactatgaaa

SEQ ID NO: 4482052 - DNA, 25 bp, Homo sapien
tgatctagcagtatcacttccaggt

SEQ ID NO: 4482053 - DNA, 25 bp, Homo sapien
caagcacccttgactaatattttgg

SEQ ID NO: 4482054 - DNA, 25 bp, Homo sapien
aaaaaattcttggtgatcctctaat

SEQ ID NO: 4482055 - DNA, 25 bp, Homo sapien
tattttgggacagtttgcaacagca

SEQ ID NO: 4482056 - DNA, 25 bp, Homo sapien
tcacatgtactctgtaagtatgtat

SEQ ID NO: 4482057 - DNA, 25 bp, Homo sapien
ctgtagttattagcagagaattaac

SEQ ID NO: 4482058 - DNA, 25 bp, Homo sapien
taaccaacttagagttagtggtggc

SEQ ID NO: 4482059 - DNA, 25 bp, Homo sapien
gcttacagagttcaagcggccaata

SEQ ID NO: 4482060 - DNA, 25 bp, Homo sapien
caagcggccaatatgattctaaata

SEQ ID NO: 4482061 - DNA, 25 bp, Homo sapien
tgctggagctaaatgtgaagctaag

SEQ ID NO: 4482062 - DNA, 25 bp, Homo sapien
agttacacaaccgtgaagtgctgga

SEQ ID NO: 4482063 - DNA, 25 bp, Homo sapien
ccaaagttacacaaccgtgaagtgc

SEQ ID NO: 4482064 - DNA, 25 bp, Homo sapien
tgaagctaagcagactggctctgag

SEQ ID NO: 4482065 - DNA, 25 bp, Homo sapien
gatacttaatagacagatgatccca

SEQ ID NO: 4482066 - DNA, 25 bp, Homo sapien
cactttagtccactgtagaatgaag

SEQ ID NO: 4482067 - DNA, 25 bp, Homo sapien
tctaaagctgatagttaacaaatgc

SEQ ID NO: 4482068 - DNA, 25 bp, Homo sapien
tcctaggaagggaaaccacaccaca

SEQ ID NO: 4482069 - DNA, 25 bp, Homo sapien
tagtctataactttgagattgattc

SEQ ID NO: 4482070 - DNA, 25 bp, Homo sapien
gagattgattcattcctcatccgtt

SEQ ID NO: 4482071 - DNA, 25 bp, Homo sapien
tgaagttcagatattaagctgactt

SEQ ID NO: 4482072 - DNA, 25 bp, Homo sapien
gactttcgtcagttataacagactt

SEQ ID NO: 4482073 - DNA, 25 bp, Homo sapien
attaaatcgaagaagccaaaaacag

SEQ ID NO: 4482074 - DNA, 25 bp, Homo sapien
ggaagtctagtcttagcaggctctt

SEQ ID NO: 4482075 - DNA, 25 bp, Homo sapien
tgctcagcctggaagtctagtctta

SEQ ID NO: 4482076 - DNA, 25 bp, Homo sapien
ttagcaggctctttatagtgttaat

SEQ ID NO: 4482077 - DNA, 25 bp, Homo sapien
cctggaagtctagtcttagcaggct

SEQ ID NO: 4482078 - DNA, 25 bp, Homo sapien
ttgatagaaaagcagattgaatgat

SEQ ID NO: 4482079 - DNA, 25 bp, Homo sapien
aactactgaacttggatcctcccta

SEQ ID NO: 4482080 - DNA, 25 bp, Homo sapien
gccagccttcacaccatagcaagac

SEQ ID NO: 4482081 - DNA, 25 bp, Homo sapien
tggatcctccctattctttctacag

SEQ ID NO: 4482082 - DNA, 25 bp, Homo sapien
ggcaggatagactcacaagctctag

SEQ ID NO: 4482083 - DNA, 25 bp, Homo sapien
gtggtgtcagcgcaaactgcttaac

SEQ ID NO: 4482084 - DNA, 25 bp, Homo sapien
tagagtcatatagacccagacctga

SEQ ID NO: 4482085 - DNA, 25 bp, Homo sapien
tcacatcgtccctttgaaggtaagc

SEQ ID NO: 4482086 - DNA, 25 bp, Homo sapien
tagctttttcaaatcgcttcttgtc

SEQ ID NO: 4482087 - DNA, 25 bp, Homo sapien
caggatgctcaaaagcaataaattc

SEQ ID NO: 4482088 - DNA, 25 bp, Homo sapien
gactcaaaccgggacctgaatcctg

SEQ ID NO: 4482089 - DNA, 25 bp, Homo sapien
tcttcaagactcaaaccgggacctg

SEQ ID NO: 4482090 - DNA, 25 bp, Homo sapien
taaactgggtcatgtattctgtgcc

SEQ ID NO: 4482091 - DNA, 25 bp, Homo sapien
taatgacagtgtcttaccactgagc

SEQ ID NO: 4482092 - DNA, 25 bp, Homo sapien
ggaaccaagccacgtagctggaggc

SEQ ID NO: 4482093 - DNA, 25 bp, Homo sapien
tatgcaaggcagcagggtctaccat

SEQ ID NO: 4482094 - DNA, 25 bp, Homo sapien
caataatagtggcatcataggctcc

SEQ ID NO: 4482095 - DNA, 25 bp, Homo sapien
aataatagtggcatcataggctcca

SEQ ID NO: 4482096 - DNA, 25 bp, Homo sapien
aattcttccaaactaacaaatccat

SEQ ID NO: 4482097 - DNA, 25 bp, Homo sapien
acagcgttctcagataagctataaa

SEQ ID NO: 4482098 - DNA, 25 bp, Homo sapien
gaaaaatgtttgactctagacacgg

SEQ ID NO: 4482099 - DNA, 25 bp, Homo sapien
agtaaaagtaagcaagacagcgttc

SEQ ID NO: 4482100 - DNA, 25 bp, Homo sapien
cgaaacaagtaggatcagacacaga

SEQ ID NO: 4482101 - DNA, 25 bp, Homo sapien
ggacctaacttcaagaaaactctag

SEQ ID NO: 4482102 - DNA, 25 bp, Homo sapien
ctagagttttcttgaagttaggtcc

SEQ ID NO: 4482103 - DNA, 25 bp, Homo sapien
tcacgaatctgtctttctcaacaag

SEQ ID NO: 4482104 - DNA, 25 bp, Homo sapien
gggatcaagcctgccatcgttatct

SEQ ID NO: 4482105 - DNA, 25 bp, Homo sapien
tgtgcaatgccctgattattaggta

SEQ ID NO: 4482106 - DNA, 25 bp, Homo sapien
caacaagtatccattctggatcttc

SEQ ID NO: 4482107 - DNA, 25 bp, Homo sapien
gaaacagttgttctgtaacacttac

SEQ ID NO: 4482108 - DNA, 25 bp, Homo sapien
tggagagaaacagttgttctgtaac

SEQ ID NO: 4482109 - DNA, 25 bp, Homo sapien
gagaaacagttgttctgtaacactt

SEQ ID NO: 4482110 - DNA, 25 bp, Homo sapien
gagagaaacagttgttctgtaacac

SEQ ID NO: 4482111 - DNA, 25 bp, Homo sapien
tctccctgacaatctaaacagttcg

SEQ ID NO: 4482112 - DNA, 25 bp, Homo sapien
tttgagtccctgtaggtaaatacaa

SEQ ID NO: 4482113 - DNA, 25 bp, Homo sapien
tacacgttgtaaccaggtccgtcta

SEQ ID NO: 4482114 - DNA, 25 bp, Homo sapien
caatccaggatatatcaaggcaatg

SEQ ID NO: 4482115 - DNA, 25 bp, Homo sapien
tcactggtgagaaacaagtccgggt

SEQ ID NO: 4482116 - DNA, 25 bp, Homo sapien
ggagctgtctgccataatctgtggc

SEQ ID NO: 4482117 - DNA, 25 bp, Homo sapien
cagagagctttttgtcaccattcaa

SEQ ID NO: 4482118 - DNA, 25 bp, Homo sapien
tgatagaaatagtcatcatggagct

SEQ ID NO: 4482119 - DNA, 25 bp, Homo sapien
ctgtggttaagacttaagagtgtaa

SEQ ID NO: 4482120 - DNA, 25 bp, Homo sapien
tacattaagataattctgactgtgg

SEQ ID NO: 4482121 - DNA, 25 bp, Homo sapien
cagtactctactgagacaggctcag

SEQ ID NO: 4482122 - DNA, 25 bp, Homo sapien
tataaaaggagccagtactctactg

SEQ ID NO: 4482123 - DNA, 25 bp, Homo sapien
cattaatatgtgaggtctaagtcct

SEQ ID NO: 4482124 - DNA, 25 bp, Homo sapien
gaaagactttgttgtcatatggcac

SEQ ID NO: 4482125 - DNA, 25 bp, Homo sapien
cacaatacagtactaaacagatgga

SEQ ID NO: 4482126 - DNA, 25 bp, Homo sapien
caaaaatttatagctcggtcacata

SEQ ID NO: 4482127 - DNA, 25 bp, Homo sapien
taattccaacctgcgttactcaaga

SEQ ID NO: 4482128 - DNA, 25 bp, Homo sapien
tgggaactatccacataaaggaatg

SEQ ID NO: 4482129 - DNA, 25 bp, Homo sapien
gatactgagctctactgttgataac

SEQ ID NO: 4482130 - DNA, 25 bp, Homo sapien
gaggcaagataatgtacaataccac

SEQ ID NO: 4482131 - DNA, 25 bp, Homo sapien
gacaccacatccaaggaagtgtgtg

SEQ ID NO: 4482132 - DNA, 25 bp, Homo sapien
tggctgcagcagtgcacacactcac

SEQ ID NO: 4482133 - DNA, 25 bp, Homo sapien
gcagcagtgcacacactcacgtctt

SEQ ID NO: 4482134 - DNA, 25 bp, Homo sapien
cccataaacatcaccaccttggtga

SEQ ID NO: 4482135 - DNA, 25 bp, Homo sapien
tggcatctgccgtgcttgcagtttt

SEQ ID NO: 4482136 - DNA, 25 bp, Homo sapien
actgaaacgtctgtatcagtcttat

SEQ ID NO: 4482137 - DNA, 25 bp, Homo sapien
gcatctgccgtgcttgcagttttcc

SEQ ID NO: 4482138 - DNA, 25 bp, Homo sapien
gaaacgtctgtatcagtcttatgac

SEQ ID NO: 4482139 - DNA, 25 bp, Homo sapien
tttccagcgagtccttcggagttgc

SEQ ID NO: 4482140 - DNA, 25 bp, Homo sapien
caagcttggtgtgcaggactttcca

SEQ ID NO: 4482141 - DNA, 25 bp, Homo sapien
ggctccttagctgtaaccttcctac

SEQ ID NO: 4482142 - DNA, 25 bp, Homo sapien
tggaccgcttaactggacctcgaga

SEQ ID NO: 4482143 - DNA, 25 bp, Homo sapien
cagagaagtcgtggttgtgtctttc

SEQ ID NO: 4482144 - DNA, 25 bp, Homo sapien
gaagtcgtggttgtgtctttctgag

SEQ ID NO: 4482145 - DNA, 25 bp, Homo sapien
ttatacagagaagtcgtggttgtgt

SEQ ID NO: 4482146 - DNA, 25 bp, Homo sapien
tgagatagggccatcctgggggcca

SEQ ID NO: 4482147 - DNA, 25 bp, Homo sapien
tctcttcttctgtaactcccatatc

SEQ ID NO: 4482148 - DNA, 25 bp, Homo sapien
ttcttctgtaactcccatatctcca

SEQ ID NO: 4482149 - DNA, 25 bp, Homo sapien
catatctccacacagctgcaaggac

SEQ ID NO: 4482150 - DNA, 25 bp, Homo sapien
tctccacacagctgcaaggacgagg

SEQ ID NO: 4482151 - DNA, 25 bp, Homo sapien
tgggaggaagcagcccagctcatca

SEQ ID NO: 4482152 - DNA, 25 bp, Homo sapien
cagcccagctcatcaggcacttcat

SEQ ID NO: 4482153 - DNA, 25 bp, Homo sapien
aagcagcccagctcatcaggcactt

SEQ ID NO: 4482154 - DNA, 25 bp, Homo sapien
ctgggaggaagcagcccagctcatc

SEQ ID NO: 4482155 - DNA, 25 bp, Homo sapien
ctccaggaaatatccttgccccaga

SEQ ID NO: 4482156 - DNA, 25 bp, Homo sapien
ccttcaggatgtgatacagtttgtt

SEQ ID NO: 4482157 - DNA, 25 bp, Homo sapien
ggaaatatccttgccccagagtcct

SEQ ID NO: 4482158 - DNA, 25 bp, Homo sapien
ggccttcaggatgtgatacagtttg

SEQ ID NO: 4482159 - DNA, 25 bp, Homo sapien
agggcagccccggatggagggccat

SEQ ID NO: 4482160 - DNA, 25 bp, Homo sapien
cagggcagccccggatggagggcca

SEQ ID NO: 4482161 - DNA, 25 bp, Homo sapien
tccagccagggcagccccggatgga

SEQ ID NO: 4482162 - DNA, 25 bp, Homo sapien
agccagggcagccccggatggaggg

SEQ ID NO: 4482163 - DNA, 25 bp, Homo sapien
cagtgatgggagggcgggccctggt

SEQ ID NO: 4482164 - DNA, 25 bp, Homo sapien
ttgtttggggctagaatcagcagca

SEQ ID NO: 4482165 - DNA, 25 bp, Homo sapien
gttttgtttggggctagaatcagca

SEQ ID NO: 4482166 - DNA, 25 bp, Homo sapien
tcagtgatgggagggcgggccctgg

SEQ ID NO: 4482167 - DNA, 25 bp, Homo sapien
cgtctgccgcggcaaagctcactct

SEQ ID NO: 4482168 - DNA, 25 bp, Homo sapien
ctcaggcgtctgccgcggcaaagct

SEQ ID NO: 4482169 - DNA, 25 bp, Homo sapien
ggcgccgtctgcaacactcagaagg

SEQ ID NO: 4482170 - DNA, 25 bp, Homo sapien
gcagccacgagccagagaggagctt

SEQ ID NO: 4482171 - DNA, 25 bp, Homo sapien
ccaaaaggcatctttgaactgcagc

SEQ ID NO: 4482172 - DNA, 25 bp, Homo sapien
catctttgaactgcagctggggcat

SEQ ID NO: 4482173 - DNA, 25 bp, Homo sapien
ctttgaactgcagctggggcatcat

SEQ ID NO: 4482174 - DNA, 25 bp, Homo sapien
gcatctttgaactgcagctggggca

SEQ ID NO: 4482175 - DNA, 25 bp, Homo sapien
gctgcctccttgaaggacccctaag

SEQ ID NO: 4482176 - DNA, 25 bp, Homo sapien
ggctgcctccttgaaggacccctaa

SEQ ID NO: 4482177 - DNA, 25 bp, Homo sapien
ctgcctccttgaaggacccctaagg

SEQ ID NO: 4482178 - DNA, 25 bp, Homo sapien
ctggctgcctccttgaaggacccct

SEQ ID NO: 4482179 - DNA, 25 bp, Homo sapien
ctgtgagtgaccagccaggggcacc

SEQ ID NO: 4482180 - DNA, 25 bp, Homo sapien
caggaggggtccaggcgtcttcaca

SEQ ID NO: 4482181 - DNA, 25 bp, Homo sapien
gagcacggctccttgccgaatggac

SEQ ID NO: 4482182 - DNA, 25 bp, Homo sapien
tcacaggaagagcacggctccttgc

SEQ ID NO: 4482183 - DNA, 25 bp, Homo sapien
gaagagcacggctccttgccgaatg

SEQ ID NO: 4482184 - DNA, 25 bp, Homo sapien
atgtgggacccagccctcgccgtcc

SEQ ID NO: 4482185 - DNA, 25 bp, Homo sapien
agatgtgggacccagccctcgccgt

SEQ ID NO: 4482186 - DNA, 25 bp, Homo sapien
gtgggacccagccctcgccgtccat

SEQ ID NO: 4482187 - DNA, 25 bp, Homo sapien
ttgagccagatgtgggacccagccc

SEQ ID NO: 4482188 - DNA, 25 bp, Homo sapien
gccctgcaggctgtgaccgccgtgc

SEQ ID NO: 4482189 - DNA, 25 bp, Homo sapien
gtcccccgctcagagctttgggctg

SEQ ID NO: 4482190 - DNA, 25 bp, Homo sapien
gtgaccgccgtgctcaagtccccag

SEQ ID NO: 4482191 - DNA, 25 bp, Homo sapien
aggctccaggatcccgcccagtccc

SEQ ID NO: 4482192 - DNA, 25 bp, Homo sapien
ctgtgacacaggacagaaggacaca

SEQ ID NO: 4482193 - DNA, 25 bp, Homo sapien
acacaggacagaaggacacatgagg

SEQ ID NO: 4482194 - DNA, 25 bp, Homo sapien
tgacacaggacagaaggacacatga

SEQ ID NO: 4482195 - DNA, 25 bp, Homo sapien
gtgacacaggacagaaggacacatg

SEQ ID NO: 4482196 - DNA, 25 bp, Homo sapien
agcacctcgtagcccgtgtgggctg

SEQ ID NO: 4482197 - DNA, 25 bp, Homo sapien
tcgtagcccgtgtgggctgtgaagt

SEQ ID NO: 4482198 - DNA, 25 bp, Homo sapien
cctcgtagcccgtgtgggctgtgaa

SEQ ID NO: 4482199 - DNA, 25 bp, Homo sapien
cacctcgtagcccgtgtgggctgtg

SEQ ID NO: 4482200 - DNA, 25 bp, Homo sapien
ttccgtgcgatctgcaccagctcct

SEQ ID NO: 4482201 - DNA, 25 bp, Homo sapien
cacctgccttccgtgcgatctgcac

SEQ ID NO: 4482202 - DNA, 25 bp, Homo sapien
gatctccgtctggccacctgccttc

SEQ ID NO: 4482203 - DNA, 25 bp, Homo sapien
gccttccgtgcgatctgcaccagct

SEQ ID NO: 4482204 - DNA, 25 bp, Homo sapien
acggctcatgccacatctaagcctt

SEQ ID NO: 4482205 - DNA, 25 bp, Homo sapien
tgccacatctaagccttcctgtgat

SEQ ID NO: 4482206 - DNA, 25 bp, Homo sapien
ccacatctaagccttcctgtgatct

SEQ ID NO: 4482207 - DNA, 25 bp, Homo sapien
tcatgccacatctaagccttcctgt

SEQ ID NO: 4482208 - DNA, 25 bp, Homo sapien
tctcccgccaatatcctcagcaatg

SEQ ID NO: 4482209 - DNA, 25 bp, Homo sapien
tgcccacgatgagccagcgtcaggg

SEQ ID NO: 4482210 - DNA, 25 bp, Homo sapien
gctgacaggagtagccctctcggct

SEQ ID NO: 4482211 - DNA, 25 bp, Homo sapien
tgaggctgtgcccacgatgagccag

SEQ ID NO: 4482212 - DNA, 25 bp, Homo sapien
gggggcttctcctctcagtagacac

SEQ ID NO: 4482213 - DNA, 25 bp, Homo sapien
caaggagtcaaaggaggccctcagg

SEQ ID NO: 4482214 - DNA, 25 bp, Homo sapien
cttcaaggagtcaaaggaggccctc

SEQ ID NO: 4482215 - DNA, 25 bp, Homo sapien
tgcttcaaggagtcaaaggaggccc

SEQ ID NO: 4482216 - DNA, 25 bp, Homo sapien
tcaaggagtcaaaggaggccctcag

SEQ ID NO: 4482217 - DNA, 25 bp, Homo sapien
cagctggatgtgtgagctgcccaca

SEQ ID NO: 4482218 - DNA, 25 bp, Homo sapien
gatgtgtgagctgcccacattctcc

SEQ ID NO: 4482219 - DNA, 25 bp, Homo sapien
gaaactcctcgagactccgcagctc

SEQ ID NO: 4482220 - DNA, 25 bp, Homo sapien
ctgcctctcacgaaactcctcgaga

SEQ ID NO: 4482221 - DNA, 25 bp, Homo sapien
cgaggttctgagccgagggccgcgg

SEQ ID NO: 4482222 - DNA, 25 bp, Homo sapien
acgaggttctgagccgagggccgcg

SEQ ID NO: 4482223 - DNA, 25 bp, Homo sapien
gaggttctgagccgagggccgcggc

SEQ ID NO: 4482224 - DNA, 25 bp, Homo sapien
ggacccggtccatgacggcctcata

SEQ ID NO: 4482225 - DNA, 25 bp, Homo sapien
tgtagagcgacagcttgctcttctg

SEQ ID NO: 4482226 - DNA, 25 bp, Homo sapien
tgctcttctggacccggtccatgac

SEQ ID NO: 4482227 - DNA, 25 bp, Homo sapien
ccatggccttcttgtagagcgacag

SEQ ID NO: 4482228 - DNA, 25 bp, Homo sapien
acctgcgctgctcctcgagggaagg

SEQ ID NO: 4482229 - DNA, 25 bp, Homo sapien
agacctgcgctgctcctcgagggaa

SEQ ID NO: 4482230 - DNA, 25 bp, Homo sapien
ctgcgctgctcctcgagggaaggcc

SEQ ID NO: 4482231 - DNA, 25 bp, Homo sapien
ctgagacctgcgctgctcctcgagg

SEQ ID NO: 4482232 - DNA, 25 bp, Homo sapien
gcgtcccggcacttctgctcgtatg

SEQ ID NO: 4482233 - DNA, 25 bp, Homo sapien
cttctggtggccgttggcgctaatg

SEQ ID NO: 4482234 - DNA, 25 bp, Homo sapien
acttctgctcgtatgtcttcttgga

SEQ ID NO: 4482235 - DNA, 25 bp, Homo sapien
aatgcgctcgaaggcctgctccgcg

SEQ ID NO: 4482236 - DNA, 25 bp, Homo sapien
gtggccgagtccttgcactgcctgg

SEQ ID NO: 4482237 - DNA, 25 bp, Homo sapien
tcggtggccgagtccttgcactgcc

SEQ ID NO: 4482238 - DNA, 25 bp, Homo sapien
gcctcggtggccgagtccttgcact

SEQ ID NO: 4482239 - DNA, 25 bp, Homo sapien
ggccgagtccttgcactgcctggct

SEQ ID NO: 4482240 - DNA, 25 bp, Homo sapien
cgcgcccatgattgtgcagccaggg

SEQ ID NO: 4482241 - DNA, 25 bp, Homo sapien
tgtgtggggagtaccgcccaggcct

SEQ ID NO: 4482242 - DNA, 25 bp, Homo sapien
gagcgccgcgcccatgattgtgcag

SEQ ID NO: 4482243 - DNA, 25 bp, Homo sapien
tatctggaatgagagcgccgcgccc

SEQ ID NO: 4482244 - DNA, 25 bp, Homo sapien
aacacatgaagcgccaagaagggct

SEQ ID NO: 4482245 - DNA, 25 bp, Homo sapien
catgaagcgccaagaagggctggcg

SEQ ID NO: 4482246 - DNA, 25 bp, Homo sapien
tgaacacatgaagcgccaagaaggg

SEQ ID NO: 4482247 - DNA, 25 bp, Homo sapien
ctgaacacatgaagcgccaagaagg

SEQ ID NO: 4482248 - DNA, 25 bp, Homo sapien
cagccgagggagtagctgagtccca

SEQ ID NO: 4482249 - DNA, 25 bp, Homo sapien
ttcgggcatcaagtgaaggacagag

SEQ ID NO: 4482250 - DNA, 25 bp, Homo sapien
caagtactggaccttttagtgcctc

SEQ ID NO: 4482251 - DNA, 25 bp, Homo sapien
cccagagaaggctatgtgcacaagt

SEQ ID NO: 4482252 - DNA, 25 bp, Homo sapien
agggagggccctgacacgagctcct

SEQ ID NO: 4482253 - DNA, 25 bp, Homo sapien
tcatctgaatgcccgtcagggccac

SEQ ID NO: 4482254 - DNA, 25 bp, Homo sapien
agggctggagtggagcctcatatat

SEQ ID NO: 4482255 - DNA, 25 bp, Homo sapien
gagcctcatatatgcaagtccagag

SEQ ID NO: 4482256 - DNA, 25 bp, Homo sapien
gcaatgctctgcctgtatacccgct

SEQ ID NO: 4482257 - DNA, 25 bp, Homo sapien
tccagctgcgcaatgctctgcctgt

SEQ ID NO: 4482258 - DNA, 25 bp, Homo sapien
gctgcgcaatgctctgcctgtatac

SEQ ID NO: 4482259 - DNA, 25 bp, Homo sapien
tgctcccactcagcccggaccttct

SEQ ID NO: 4482260 - DNA, 25 bp, Homo sapien
gccggtcaaactcttgcagctgaaa

SEQ ID NO: 4482261 - DNA, 25 bp, Homo sapien
cacccacagggcgttgcggagaatg

SEQ ID NO: 4482262 - DNA, 25 bp, Homo sapien
tccttgacacactgcatggagagct

SEQ ID NO: 4482263 - DNA, 25 bp, Homo sapien
tgcggagaatggtcagccggtcaaa

SEQ ID NO: 4482264 - DNA, 25 bp, Homo sapien
ccacaccaaggccctcagcccccac

SEQ ID NO: 4482265 - DNA, 25 bp, Homo sapien
cccacaccaaggccctcagccccca

SEQ ID NO: 4482266 - DNA, 25 bp, Homo sapien
gagcagagcagccacggtcctccag

SEQ ID NO: 4482267 - DNA, 25 bp, Homo sapien
tccagcttctgccaacctctgacag

SEQ ID NO: 4482268 - DNA, 25 bp, Homo sapien
agcttctgccaacctctgacagctg

SEQ ID NO: 4482269 - DNA, 25 bp, Homo sapien
tgacagctgtgtccacctcccctcc

SEQ ID NO: 4482270 - DNA, 25 bp, Homo sapien
gctcttggcctggatgaaactgtcg

SEQ ID NO: 4482271 - DNA, 25 bp, Homo sapien
gaaactgtcgatgtcggcgtctatg

SEQ ID NO: 4482272 - DNA, 25 bp, Homo sapien
gctctgtgcccgtgctcttggcctg

SEQ ID NO: 4482273 - DNA, 25 bp, Homo sapien
tatgctgcagccttccagcgtcagc

SEQ ID NO: 4482274 - DNA, 25 bp, Homo sapien
gatccagtggaaccaaacaggcggg

SEQ ID NO: 4482275 - DNA, 25 bp, Homo sapien
taggtaccatcaagacctaatattc

SEQ ID NO: 4482276 - DNA, 25 bp, Homo sapien
atgagagaccccaccgtaggtacca

SEQ ID NO: 4482277 - DNA, 25 bp, Homo sapien
taatattctggacccgtgatccagt

SEQ ID NO: 4482278 - DNA, 25 bp, Homo sapien
ggtgacctcccgatcgtaatagttc

SEQ ID NO: 4482279 - DNA, 25 bp, Homo sapien
tttatcatgccgcaggacggctgta

SEQ ID NO: 4482280 - DNA, 25 bp, Homo sapien
catgccgcaggacggctgtatgcca

SEQ ID NO: 4482281 - DNA, 25 bp, Homo sapien
taatagttctggtagggcaccggag

SEQ ID NO: 4482282 - DNA, 25 bp, Homo sapien
gaactgagcctatcttgtctccaca

SEQ ID NO: 4482283 - DNA, 25 bp, Homo sapien
taaactgggcaccagatacagacac

SEQ ID NO: 4482284 - DNA, 25 bp, Homo sapien
gagcacctcccctagtgaataattg

SEQ ID NO: 4482285 - DNA, 25 bp, Homo sapien
tgattattctagtgtctgggtccct

SEQ ID NO: 4482286 - DNA, 25 bp, Homo sapien
gacttccgtgcagcagtccagagaa

SEQ ID NO: 4482287 - DNA, 25 bp, Homo sapien
aagtggtcttgggacttccgtgcag

SEQ ID NO: 4482288 - DNA, 25 bp, Homo sapien
ggtcttgggacttccgtgcagcagt

SEQ ID NO: 4482289 - DNA, 25 bp, Homo sapien
tgccaacgaagtggtcttgggactt

SEQ ID NO: 4482290 - DNA, 25 bp, Homo sapien
cacacttgctgttgggggacacaca

SEQ ID NO: 4482291 - DNA, 25 bp, Homo sapien
tgtgccatgtgggagacctctcctc

SEQ ID NO: 4482292 - DNA, 25 bp, Homo sapien
tcccccccaggatcagtgtgtttgg

SEQ ID NO: 4482293 - DNA, 25 bp, Homo sapien
gcccctggaagtcctactagaatgg

SEQ ID NO: 4482294 - DNA, 25 bp, Homo sapien
tccctgtatctcctgcactgcgatg

SEQ ID NO: 4482295 - DNA, 25 bp, Homo sapien
cactgcgatggctgtgtagacaccc

SEQ ID NO: 4482296 - DNA, 25 bp, Homo sapien
tataatcgtagagcgcccggtactc

SEQ ID NO: 4482297 - DNA, 25 bp, Homo sapien
tggtgaggccgggtttccctgtatc

SEQ ID NO: 4482298 - DNA, 25 bp, Homo sapien
tagtgtggacacactcgggcacacg

SEQ ID NO: 4482299 - DNA, 25 bp, Homo sapien
atgagtgaaaccatgaggagagatg

SEQ ID NO: 4482300 - DNA, 25 bp, Homo sapien
tgtggacacactcgggcacacgtgc

SEQ ID NO: 4482301 - DNA, 25 bp, Homo sapien
gaggatgctcgaagatgagtgaaac

SEQ ID NO: 4482302 - DNA, 25 bp, Homo sapien
agattgaaagcgcatgacgttggaa

SEQ ID NO: 4482303 - DNA, 25 bp, Homo sapien
caagagattgaaagcgcatgacgtt

SEQ ID NO: 4482304 - DNA, 25 bp, Homo sapien
ctggccaagagattgaaagcgcatg

SEQ ID NO: 4482305 - DNA, 25 bp, Homo sapien
attgaaagcgcatgacgttggaagg

SEQ ID NO: 4482306 - DNA, 25 bp, Homo sapien
gaaccagggacgaagccacgctgcc

SEQ ID NO: 4482307 - DNA, 25 bp, Homo sapien
ctccaggatgtctcccgcggacagg

SEQ ID NO: 4482308 - DNA, 25 bp, Homo sapien
tccaggatgtctcccgcggacaggt

SEQ ID NO: 4482309 - DNA, 25 bp, Homo sapien
gtaggaaccagggacgaagccacgc

SEQ ID NO: 4482310 - DNA, 25 bp, Homo sapien
tgggagacgacaggctccctctcgg

SEQ ID NO: 4482311 - DNA, 25 bp, Homo sapien
aacgcactcctttattccctgggag

SEQ ID NO: 4482312 - DNA, 25 bp, Homo sapien
agggcaggtccgaaggggctcctgg

SEQ ID NO: 4482313 - DNA, 25 bp, Homo sapien
tggttctgggccctagcaaggtggg

SEQ ID NO: 4482314 - DNA, 25 bp, Homo sapien
gtatgtaataccacagaaccgtgga

SEQ ID NO: 4482315 - DNA, 25 bp, Homo sapien
tattccaatatgctaccacagaagg

SEQ ID NO: 4482316 - DNA, 25 bp, Homo sapien
cagaatttgttttctaccatagggc

SEQ ID NO: 4482317 - DNA, 25 bp, Homo sapien
aatgatgacggaagagtgacctttc

SEQ ID NO: 4482318 - DNA, 25 bp, Homo sapien
gagaaatagagtaaacacagtccct

SEQ ID NO: 4482319 - DNA, 25 bp, Homo sapien
gagagagggtagacttttcatcgaa

SEQ ID NO: 4482320 - DNA, 25 bp, Homo sapien
agtttgtacttagaccagacgggtg

SEQ ID NO: 4482321 - DNA, 25 bp, Homo sapien
cagacgggtgtactaagaatcattc

SEQ ID NO: 4482322 - DNA, 25 bp, Homo sapien
gattgggtcgtgctttatgttggca

SEQ ID NO: 4482323 - DNA, 25 bp, Homo sapien
caggctgtaggctgtaaggcaaaaa

SEQ ID NO: 4482324 - DNA, 25 bp, Homo sapien
ttgctgacttgggtgatttggaaga

SEQ ID NO: 4482325 - DNA, 25 bp, Homo sapien
tgctatgttcaaattactaagaggt

SEQ ID NO: 4482326 - DNA, 25 bp, Homo sapien
agcctccgcagaggcgattggctga

SEQ ID NO: 4482327 - DNA, 25 bp, Homo sapien
cattgccgctctctcggtgagcgca

SEQ ID NO: 4482328 - DNA, 25 bp, Homo sapien
attggctgaagctaccggccgcgtg

SEQ ID NO: 4482329 - DNA, 25 bp, Homo sapien
cgcaggccgtgcagttcctagcgag

SEQ ID NO: 4482330 - DNA, 25 bp, Homo sapien
gaactactggacttggagttgtaca

SEQ ID NO: 4482331 - DNA, 25 bp, Homo sapien
gaaggaatggatctcacccagaact

SEQ ID NO: 4482332 - DNA, 25 bp, Homo sapien
cataacactgacgtctgcttctggg

SEQ ID NO: 4482333 - DNA, 25 bp, Homo sapien
cagaatattgagacaggagtgggac

SEQ ID NO: 4482334 - DNA, 25 bp, Homo sapien
gctagaagctttccccacctaggtg

SEQ ID NO: 4482335 - DNA, 25 bp, Homo sapien
gaaggtacaaggtgctatacagccg

SEQ ID NO: 4482336 - DNA, 25 bp, Homo sapien
ttcagggaatcaaaagaggtcggac

SEQ ID NO: 4482337 - DNA, 25 bp, Homo sapien
gatttttgcatcaaccactgctaga

SEQ ID NO: 4482338 - DNA, 25 bp, Homo sapien
tccgtgcttacagcagtgccaaaag

SEQ ID NO: 4482339 - DNA, 25 bp, Homo sapien
aaacggtgccataagggaagccaga

SEQ ID NO: 4482340 - DNA, 25 bp, Homo sapien
ggaagccagaagagttgcagtgcaa

SEQ ID NO: 4482341 - DNA, 25 bp, Homo sapien
gattccatggaccaaaaacggtgcc

SEQ ID NO: 4482342 - DNA, 25 bp, Homo sapien
tagggttttcgctagatttgactgc

SEQ ID NO: 4482343 - DNA, 25 bp, Homo sapien
tctttgggtcctactaagcgtctca

SEQ ID NO: 4482344 - DNA, 25 bp, Homo sapien
aagtacaggctagtcacagaaatag

SEQ ID NO: 4482345 - DNA, 25 bp, Homo sapien
tcttctagattttaccagcagtgat

SEQ ID NO: 4482346 - DNA, 25 bp, Homo sapien
gtcttcactttaactctatggtata

SEQ ID NO: 4482347 - DNA, 25 bp, Homo sapien
taaaccaagcacctcttcatatcag

SEQ ID NO: 4482348 - DNA, 25 bp, Homo sapien
ccattatcttacagcactggtaaac

SEQ ID NO: 4482349 - DNA, 25 bp, Homo sapien
tccactaccattatcttacagcact

SEQ ID NO: 4482350 - DNA, 25 bp, Homo sapien
gagcttagcatccaagaacactgtg

SEQ ID NO: 4482351 - DNA, 25 bp, Homo sapien
gaacactgtgagaacaaacctgtca

SEQ ID NO: 4482352 - DNA, 25 bp, Homo sapien
gcatcaggaacacgggcaatttccg

SEQ ID NO: 4482353 - DNA, 25 bp, Homo sapien
cattcttagaagagctgctgtaaca

SEQ ID NO: 4482354 - DNA, 25 bp, Homo sapien
tctggtacagattccccctctatga

SEQ ID NO: 4482355 - DNA, 25 bp, Homo sapien
ggtgcttgctaaaggtgtttgcctg

SEQ ID NO: 4482356 - DNA, 25 bp, Homo sapien
ccctctatgagactgttgtaggtta

SEQ ID NO: 4482357 - DNA, 25 bp, Homo sapien
tttgtggcttagacagcagctccat

SEQ ID NO: 4482358 - DNA, 25 bp, Homo sapien
cagctggttgaggtgtcaggtcagc

SEQ ID NO: 4482359 - DNA, 25 bp, Homo sapien
ctggttgaggtgtcaggtcagcatt

SEQ ID NO: 4482360 - DNA, 25 bp, Homo sapien
agctggttgaggtgtcaggtcagca

SEQ ID NO: 4482361 - DNA, 25 bp, Homo sapien
ggttgaggtgtcaggtcagcatttt

SEQ ID NO: 4482362 - DNA, 25 bp, Homo sapien
ctatcaagcatcttcacatgttcat

SEQ ID NO: 4482363 - DNA, 25 bp, Homo sapien
atcaagtactggctatcaagcatct

SEQ ID NO: 4482364 - DNA, 25 bp, Homo sapien
caagcatcttcacatgttcataagc

SEQ ID NO: 4482365 - DNA, 25 bp, Homo sapien
gctatcaagtactggctatcaagca

SEQ ID NO: 4482366 - DNA, 25 bp, Homo sapien
gaacctgtactacccagaatttcat

SEQ ID NO: 4482367 - DNA, 25 bp, Homo sapien
ctgtactacccagaatttcatccat

SEQ ID NO: 4482368 - DNA, 25 bp, Homo sapien
acctgtactacccagaatttcatcc

SEQ ID NO: 4482369 - DNA, 25 bp, Homo sapien
tagaacctgtactacccagaatttc

SEQ ID NO: 4482370 - DNA, 25 bp, Homo sapien
atcaaaacagtctggtattgacaaa

SEQ ID NO: 4482371 - DNA, 25 bp, Homo sapien
tatgggaagatagcctaaaatagct

SEQ ID NO: 4482372 - DNA, 25 bp, Homo sapien
taaagttggaagacaaattacttga

SEQ ID NO: 4482373 - DNA, 25 bp, Homo sapien
tactgcagttttaatcagaattgca

SEQ ID NO: 4482374 - DNA, 25 bp, Homo sapien
accatactggtaaagccgtgtttca

SEQ ID NO: 4482375 - DNA, 25 bp, Homo sapien
gacatctcatactcaagtgatcctt

SEQ ID NO: 4482376 - DNA, 25 bp, Homo sapien
tcctaggatcaaatgatccgcttca

SEQ ID NO: 4482377 - DNA, 25 bp, Homo sapien
ctttaagaccatactggtaaagccg

SEQ ID NO: 4482378 - DNA, 25 bp, Homo sapien
cagagcctttgattcggcccaaaat

SEQ ID NO: 4482379 - DNA, 25 bp, Homo sapien
ggcagagcctttgattcggcccaaa

SEQ ID NO: 4482380 - DNA, 25 bp, Homo sapien
tcaggcagagcctttgattcggccc

SEQ ID NO: 4482381 - DNA, 25 bp, Homo sapien
gagcctttgattcggcccaaaattc

SEQ ID NO: 4482382 - DNA, 25 bp, Homo sapien
cctttgtcaccagaatgaatgaagt

SEQ ID NO: 4482383 - DNA, 25 bp, Homo sapien
ggaatgttttgctagctgctaaaac

SEQ ID NO: 4482384 - DNA, 25 bp, Homo sapien
aaccacctttgtcaccagaatgaat

SEQ ID NO: 4482385 - DNA, 25 bp, Homo sapien
tgctagctgctaaaaccacctttgt

SEQ ID NO: 4482386 - DNA, 25 bp, Homo sapien
tatactgaagttggacattgtggcc

SEQ ID NO: 4482387 - DNA, 25 bp, Homo sapien
tcggtgctctttcggttcttgtaag

SEQ ID NO: 4482388 - DNA, 25 bp, Homo sapien
cattgtggcccttagaatcatattt

SEQ ID NO: 4482389 - DNA, 25 bp, Homo sapien
tactggttctttggtatgccatggg

SEQ ID NO: 4482390 - DNA, 25 bp, Homo sapien
tggtttgtccctcactttggcttta

SEQ ID NO: 4482391 - DNA, 25 bp, Homo sapien
tttgtccctcactttggctttatct

SEQ ID NO: 4482392 - DNA, 25 bp, Homo sapien
tcccatttctcctttgagtaccttc

SEQ ID NO: 4482393 - DNA, 25 bp, Homo sapien
tctgtggtttgtccctcactttggc

SEQ ID NO: 4482394 - DNA, 25 bp, Homo sapien
cacttggcatctccagcaccctcac

SEQ ID NO: 4482395 - DNA, 25 bp, Homo sapien
tcacttggcatctccagcaccctca

SEQ ID NO: 4482396 - DNA, 25 bp, Homo sapien
gcacattgacgtatcatttcttgct

SEQ ID NO: 4482397 - DNA, 25 bp, Homo sapien
atattcactgttgaagctttagctg

SEQ ID NO: 4482398 - DNA, 25 bp, Homo sapien
tcagcacattgacgtatcatttctt

SEQ ID NO: 4482399 - DNA, 25 bp, Homo sapien
cagcacattgacgtatcatttcttg

SEQ ID NO: 4482400 - DNA, 25 bp, Homo sapien
tttcatgttctgaaattcttgccat

SEQ ID NO: 4482401 - DNA, 25 bp, Homo sapien
ctttcatgttctgaaattcttgcca

SEQ ID NO: 4482402 - DNA, 25 bp, Homo sapien
tctgtgaggtaatgttggcaatagc

SEQ ID NO: 4482403 - DNA, 25 bp, Homo sapien
tgggaaaagcatcaagttatggaga

SEQ ID NO: 4482404 - DNA, 25 bp, Homo sapien
taataaaaagccttattctgtgagg

SEQ ID NO: 4482405 - DNA, 25 bp, Homo sapien
gcacttgtaagctcagatttattca

SEQ ID NO: 4482406 - DNA, 25 bp, Homo sapien
catgattcaactcatttgtgctgct

SEQ ID NO: 4482407 - DNA, 25 bp, Homo sapien
catgctcatgattcaactcatttgt

SEQ ID NO: 4482408 - DNA, 25 bp, Homo sapien
tgctcatgattcaactcatttgtgc

SEQ ID NO: 4482409 - DNA, 25 bp, Homo sapien
acacatgctcatgattcaactcatt

SEQ ID NO: 4482410 - DNA, 25 bp, Homo sapien
agggtgtaagagttgaggaatttat

SEQ ID NO: 4482411 - DNA, 25 bp, Homo sapien
tcttgggagggtgtaagagttgagg

SEQ ID NO: 4482412 - DNA, 25 bp, Homo sapien
tgggagggtgtaagagttgaggaat

SEQ ID NO: 4482413 - DNA, 25 bp, Homo sapien
gggtgtaagagttgaggaatttatc

SEQ ID NO: 4482414 - DNA, 25 bp, Homo sapien
tatataaaagcgcttgacagctgag

SEQ ID NO: 4482415 - DNA, 25 bp, Homo sapien
cctctctatataaaagcgcttgaca

SEQ ID NO: 4482416 - DNA, 25 bp, Homo sapien
tctctatataaaagcgcttgacagc

SEQ ID NO: 4482417 - DNA, 25 bp, Homo sapien
aaaagcgcttgacagctgagttcca

SEQ ID NO: 4482418 - DNA, 25 bp, Homo sapien
tcatcactaatgcagaataactcag

SEQ ID NO: 4482419 - DNA, 25 bp, Homo sapien
caatatagttcaacagaatggtcat

SEQ ID NO: 4482420 - DNA, 25 bp, Homo sapien
gaaaaactgtgcaatatagttcaac

SEQ ID NO: 4482421 - DNA, 25 bp, Homo sapien
cactaatgcagaataactcagtgat

SEQ ID NO: 4482422 - DNA, 25 bp, Homo sapien
aacccagaataatctttgttaggca

SEQ ID NO: 4482423 - DNA, 25 bp, Homo sapien
aataatctttgttaggcagcattgc

SEQ ID NO: 4482424 - DNA, 25 bp, Homo sapien
taatctttgttaggcagcattgctt

SEQ ID NO: 4482425 - DNA, 25 bp, Homo sapien
cagaataatctttgttaggcagcat

SEQ ID NO: 4482426 - DNA, 25 bp, Homo sapien
gcctatgtaataacccctcaataaa

SEQ ID NO: 4482427 - DNA, 25 bp, Homo sapien
cagcctgacctggtgggagtaggag

SEQ ID NO: 4482428 - DNA, 25 bp, Homo sapien
cagtcgtgtggctaatgatttgaac

SEQ ID NO: 4482429 - DNA, 25 bp, Homo sapien
tgtgaacaccaaagctcagtggagc

SEQ ID NO: 4482430 - DNA, 25 bp, Homo sapien
tcttagaagacagacaagcaacata

SEQ ID NO: 4482431 - DNA, 25 bp, Homo sapien
caggctgttccctattcagtgatag

SEQ ID NO: 4482432 - DNA, 25 bp, Homo sapien
cagtgatagtccttgctgagcacaa

SEQ ID NO: 4482433 - DNA, 25 bp, Homo sapien
gttaatttgatgatactctctggcc

SEQ ID NO: 4482434 - DNA, 25 bp, Homo sapien
tggaacttatgctgtagacatttct

SEQ ID NO: 4482435 - DNA, 25 bp, Homo sapien
caaactggaacttatgctgtagaca

SEQ ID NO: 4482436 - DNA, 25 bp, Homo sapien
atgctgtagacatttctttgtggtt

SEQ ID NO: 4482437 - DNA, 25 bp, Homo sapien
gtatctgcccaaactggaacttatg

SEQ ID NO: 4482438 - DNA, 25 bp, Homo sapien
ttttaaatgattagttatcaataca

SEQ ID NO: 4482439 - DNA, 25 bp, Homo sapien
tttaaatgattagttatcaatacat

SEQ ID NO: 4482440 - DNA, 25 bp, Homo sapien
ctggctcgatgtgttggatttttat

SEQ ID NO: 4482441 - DNA, 25 bp, Homo sapien
ctgatcagcacattaaatctgtggg

SEQ ID NO: 4482442 - DNA, 25 bp, Homo sapien
tcaaaattatgggtaggcaagggac

SEQ ID NO: 4482443 - DNA, 25 bp, Homo sapien
cacttggttagaggcaaatctaggg

SEQ ID NO: 4482444 - DNA, 25 bp, Homo sapien
tgcagtaaattgctggcctgtcaga

SEQ ID NO: 4482445 - DNA, 25 bp, Homo sapien
tggagggctacaaattcaaatgtgc

SEQ ID NO: 4482446 - DNA, 25 bp, Homo sapien
tcaggagcaagtatgtggacccctt

SEQ ID NO: 4482447 - DNA, 25 bp, Homo sapien
gcagcttttgtatccagattgtcag

SEQ ID NO: 4482448 - DNA, 25 bp, Homo sapien
tattagttctgccaagaggtgttca

SEQ ID NO: 4482449 - DNA, 25 bp, Homo sapien
gtgtgtaccagttcaatattagttc

SEQ ID NO: 4482450 - DNA, 25 bp, Homo sapien
gtacttaagtatgacccttcaggct

SEQ ID NO: 4482451 - DNA, 25 bp, Homo sapien
agttctgccaagaggtgttcagtca

SEQ ID NO: 4482452 - DNA, 25 bp, Homo sapien
tgggttgtagtggtggtggggagac

SEQ ID NO: 4482453 - DNA, 25 bp, Homo sapien
tgctgggttgtagtggtggtgggga

SEQ ID NO: 4482454 - DNA, 25 bp, Homo sapien
gttgtagtggtggtggggagactgg

SEQ ID NO: 4482455 - DNA, 25 bp, Homo sapien
ctgctgggttgtagtggtggtgggg

SEQ ID NO: 4482456 - DNA, 25 bp, Homo sapien
tgatttttgttcagccacagcgtct

SEQ ID NO: 4482457 - DNA, 25 bp, Homo sapien
ccccgataaatgaagtgatgtagtg

SEQ ID NO: 4482458 - DNA, 25 bp, Homo sapien
tttgttcagccacagcgtctttttt

SEQ ID NO: 4482459 - DNA, 25 bp, Homo sapien
gatgtagtgatgtgtatagtcagag

SEQ ID NO: 4482460 - DNA, 25 bp, Homo sapien
ccagggttgccgcgggttgagggcg

SEQ ID NO: 4482461 - DNA, 25 bp, Homo sapien
tgggaccagggttgccgcgggttga

SEQ ID NO: 4482462 - DNA, 25 bp, Homo sapien
gacggacggtgatggtggtcgccgc

SEQ ID NO: 4482463 - DNA, 25 bp, Homo sapien
cggctgtccgcgtccgctcggttgt

SEQ ID NO: 4482464 - DNA, 25 bp, Homo sapien
cggttgtcttctactcacgcgccgt

SEQ ID NO: 4482465 - DNA, 25 bp, Homo sapien
cctcaggtaacagcggcccggctgt

SEQ ID NO: 4482466 - DNA, 25 bp, Homo sapien
gcatttacaattgctccggtgagaa

SEQ ID NO: 4482467 - DNA, 25 bp, Homo sapien
gcactcgtcgtctcacagctggaca

SEQ ID NO: 4482468 - DNA, 25 bp, Homo sapien
gccaaaagaaagtcccttccacaga

SEQ ID NO: 4482469 - DNA, 25 bp, Homo sapien
ggtaactcctcttaccgcatagcat

SEQ ID NO: 4482470 - DNA, 25 bp, Homo sapien
ttgatggaaccaatgaataactgcc

SEQ ID NO: 4482471 - DNA, 25 bp, Homo sapien
tgctgtgagcagtgtatccaatgac

SEQ ID NO: 4482472 - DNA, 25 bp, Homo sapien
gaatccagaattgtgacctacggtt

SEQ ID NO: 4482473 - DNA, 25 bp, Homo sapien
taatttcagtcagatggaatccaga

SEQ ID NO: 4482474 - DNA, 25 bp, Homo sapien
gaatactcccactctttaaactcag

SEQ ID NO: 4482475 - DNA, 25 bp, Homo sapien
tcagctgaccgtaacacagaaacca

SEQ ID NO: 4482476 - DNA, 25 bp, Homo sapien
tagaatactcccactctttaaactc

SEQ ID NO: 4482477 - DNA, 25 bp, Homo sapien
ctttaaactcagctgaccgtaacac

SEQ ID NO: 4482478 - DNA, 25 bp, Homo sapien
tgctagacaattggatcactgtata

SEQ ID NO: 4482479 - DNA, 25 bp, Homo sapien
gatcatcaaaagagactggcacagt

SEQ ID NO: 4482480 - DNA, 25 bp, Homo sapien
tagaaacttaaatcagatatcttct

SEQ ID NO: 4482481 - DNA, 25 bp, Homo sapien
taaaaaccacagaagtactagatca

SEQ ID NO: 4482482 - DNA, 25 bp, Homo sapien
tgtaaccaagatggtgtatggtgtc

SEQ ID NO: 4482483 - DNA, 25 bp, Homo sapien
tgtcaagtgatgtgtagctttgctt

SEQ ID NO: 4482484 - DNA, 25 bp, Homo sapien
tgctttatagaattttacagtccgt

SEQ ID NO: 4482485 - DNA, 25 bp, Homo sapien
ttacagtccgttatcttccttgtag

SEQ ID NO: 4482486 - DNA, 25 bp, Homo sapien
aatccaggctccatctaatgcaaat

SEQ ID NO: 4482487 - DNA, 25 bp, Homo sapien
taatgcaaatgcctagagagtttat

SEQ ID NO: 4482488 - DNA, 25 bp, Homo sapien
tccaggctccatctaatgcaaatgc

SEQ ID NO: 4482489 - DNA, 25 bp, Homo sapien
caaatgcctagagagtttatatttc

SEQ ID NO: 4482490 - DNA, 25 bp, Homo sapien
gatgctactgtactgcttaccccga

SEQ ID NO: 4482491 - DNA, 25 bp, Homo sapien
catgggacttcacgtaatgggtcac

SEQ ID NO: 4482492 - DNA, 25 bp, Homo sapien
ttgttgttaacagctggcacaggtg

SEQ ID NO: 4482493 - DNA, 25 bp, Homo sapien
tcacagactgtacatgtgggtggct

SEQ ID NO: 4482494 - DNA, 25 bp, Homo sapien
gggtggagctagtcatcaagttttc

SEQ ID NO: 4482495 - DNA, 25 bp, Homo sapien
gtagggtggagctagtcatcaagtt

SEQ ID NO: 4482496 - DNA, 25 bp, Homo sapien
ggcggtagggtggagctagtcatca

SEQ ID NO: 4482497 - DNA, 25 bp, Homo sapien
tggagctagtcatcaagttttccat

SEQ ID NO: 4482498 - DNA, 25 bp, Homo sapien
ctctccttggaaccgtcttcatctg

SEQ ID NO: 4482499 - DNA, 25 bp, Homo sapien
attactctccttggaaccgtcttca

SEQ ID NO: 4482500 - DNA, 25 bp, Homo sapien
cagatcattactctccttggaaccg

SEQ ID NO: 4482501 - DNA, 25 bp, Homo sapien
gtagccagatcattactctccttgg

SEQ ID NO: 4482502 - DNA, 25 bp, Homo sapien
cagtctcacggctttgaatgttata

SEQ ID NO: 4482503 - DNA, 25 bp, Homo sapien
aaacttcccctaatagcagaacctg

SEQ ID NO: 4482504 - DNA, 25 bp, Homo sapien
gcagaacctgatatcaaagtgccta

SEQ ID NO: 4482505 - DNA, 25 bp, Homo sapien
taaatgatggagtatcccagaggtc

SEQ ID NO: 4482506 - DNA, 25 bp, Homo sapien
tgatgtggcgccactactgtatgga

SEQ ID NO: 4482507 - DNA, 25 bp, Homo sapien
tactgtatggaacctctgggtgatt

SEQ ID NO: 4482508 - DNA, 25 bp, Homo sapien
caaattctggattgttggtggatga

SEQ ID NO: 4482509 - DNA, 25 bp, Homo sapien
tggtggatgatgtggcgccactact

SEQ ID NO: 4482510 - DNA, 25 bp, Homo sapien
ttcatgcctctgttcattgccttct

SEQ ID NO: 4482511 - DNA, 25 bp, Homo sapien
tcatgcctctgttcattgccttctg

SEQ ID NO: 4482512 - DNA, 25 bp, Homo sapien
catgcctctgttcattgccttctgc

SEQ ID NO: 4482513 - DNA, 25 bp, Homo sapien
aacaaaattttgcaggtatcagcct

SEQ ID NO: 4482514 - DNA, 25 bp, Homo sapien
gagcaagggcatgtacacttctcat

SEQ ID NO: 4482515 - DNA, 25 bp, Homo sapien
aatcctttgggcacatagggctcca

SEQ ID NO: 4482516 - DNA, 25 bp, Homo sapien
gaaacactgaaagtccaacaagggc

SEQ ID NO: 4482517 - DNA, 25 bp, Homo sapien
cattaaagctactgtgggctggcac

SEQ ID NO: 4482518 - DNA, 25 bp, Homo sapien
aaatggtataattcaccactgggca

SEQ ID NO: 4482519 - DNA, 25 bp, Homo sapien
aattttacaaatacagccgtatcag

SEQ ID NO: 4482520 - DNA, 25 bp, Homo sapien
tgaaaaggactgaggtaccactgat

SEQ ID NO: 4482521 - DNA, 25 bp, Homo sapien
aaagattgaatcacctctgaaaaaa

SEQ ID NO: 4482522 - DNA, 25 bp, Homo sapien
aaaagattgaatcacctctgaaaaa

SEQ ID NO: 4482523 - DNA, 25 bp, Homo sapien
gtcagaggtctttatatgttgagtt

SEQ ID NO: 4482524 - DNA, 25 bp, Homo sapien
agtcagaggtctttatatgttgagt

SEQ ID NO: 4482525 - DNA, 25 bp, Homo sapien
tagtcagaggtctttatatgttgag

SEQ ID NO: 4482526 - DNA, 25 bp, Homo sapien
ggtgcattgctgtctcgaagaggtt

SEQ ID NO: 4482527 - DNA, 25 bp, Homo sapien
ggatttgggtgcattgctgtctcga

SEQ ID NO: 4482528 - DNA, 25 bp, Homo sapien
cattgctgtctcgaagaggtttctt

SEQ ID NO: 4482529 - DNA, 25 bp, Homo sapien
gctgtctcgaagaggtttcttcctc

SEQ ID NO: 4482530 - DNA, 25 bp, Homo sapien
aagttgttctcgacgctcattcatg

SEQ ID NO: 4482531 - DNA, 25 bp, Homo sapien
gacgctcattcatgaaccgaacata

SEQ ID NO: 4482532 - DNA, 25 bp, Homo sapien
tgctcgaagttgttctcgacgctca

SEQ ID NO: 4482533 - DNA, 25 bp, Homo sapien
ggtctctttgctcgaagttgttctc

SEQ ID NO: 4482534 - DNA, 25 bp, Homo sapien
ctcaggaggcagtttactccattca

SEQ ID NO: 4482535 - DNA, 25 bp, Homo sapien
gcagtttactccattcattgcctaa

SEQ ID NO: 4482536 - DNA, 25 bp, Homo sapien
gtttactccattcattgcctaacat

SEQ ID NO: 4482537 - DNA, 25 bp, Homo sapien
aggaggcagtttactccattcattg

SEQ ID NO: 4482538 - DNA, 25 bp, Homo sapien
tactgaagaccttgtaggcctctgt

SEQ ID NO: 4482539 - DNA, 25 bp, Homo sapien
tgttccagttccttcatgtaacgct

SEQ ID NO: 4482540 - DNA, 25 bp, Homo sapien
gatttgcctttctgacggtcctggg

SEQ ID NO: 4482541 - DNA, 25 bp, Homo sapien
cagttccttcatgtaacgctcctta

SEQ ID NO: 4482542 - DNA, 25 bp, Homo sapien
atcatgagtggcctgccgggctgca

SEQ ID NO: 4482543 - DNA, 25 bp, Homo sapien
tcatgagtggcctgccgggctgcat

SEQ ID NO: 4482544 - DNA, 25 bp, Homo sapien
ctcatgatcatgagtggcctgccgg

SEQ ID NO: 4482545 - DNA, 25 bp, Homo sapien
atgatcatgagtggcctgccgggct

SEQ ID NO: 4482546 - DNA, 25 bp, Homo sapien
tcctctgtaaatatagggatgtcaa

SEQ ID NO: 4482547 - DNA, 25 bp, Homo sapien
attcctctgtaaatatagggatgtc

SEQ ID NO: 4482548 - DNA, 25 bp, Homo sapien
agaattcctctgtaaatatagggat

SEQ ID NO: 4482549 - DNA, 25 bp, Homo sapien
gaattcctctgtaaatatagggatg

SEQ ID NO: 4482550 - DNA, 25 bp, Homo sapien
cacatgcagcactagaaggagtctc

SEQ ID NO: 4482551 - DNA, 25 bp, Homo sapien
ttaccacaatgggatcagacttgct

SEQ ID NO: 4482552 - DNA, 25 bp, Homo sapien
taaattgtacaatcagaagcctgag

SEQ ID NO: 4482553 - DNA, 25 bp, Homo sapien
caagcacagctgtaggtacccatct

SEQ ID NO: 4482554 - DNA, 25 bp, Homo sapien
tgtaagactgtgttgcggctccgct

SEQ ID NO: 4482555 - DNA, 25 bp, Homo sapien
gcttctccactgctgtgcgcatgct

SEQ ID NO: 4482556 - DNA, 25 bp, Homo sapien
tgtgcgcatgctctccacgtgcttt

SEQ ID NO: 4482557 - DNA, 25 bp, Homo sapien
ccatgttggatttgcgaagctggcg

SEQ ID NO: 4482558 - DNA, 25 bp, Homo sapien
taacgatcgagtctgttcacaactt

SEQ ID NO: 4482559 - DNA, 25 bp, Homo sapien
tctcgaactgtagctatgaagtttt

SEQ ID NO: 4482560 - DNA, 25 bp, Homo sapien
catatatgagtcaatggtgtccact

SEQ ID NO: 4482561 - DNA, 25 bp, Homo sapien
aaataatactgtgcagtctgttcat

SEQ ID NO: 4482562 - DNA, 25 bp, Homo sapien
caaagctagaaatgaggtcaagcca

SEQ ID NO: 4482563 - DNA, 25 bp, Homo sapien
cctggctagaatacactagtgtgac

SEQ ID NO: 4482564 - DNA, 25 bp, Homo sapien
tagtgtgaccctagcttactgaaac

SEQ ID NO: 4482565 - DNA, 25 bp, Homo sapien
tacctgtttgtatggtgagtccaca

SEQ ID NO: 4482566 - DNA, 25 bp, Homo sapien
catctggctactccctagaaggata

SEQ ID NO: 4482567 - DNA, 25 bp, Homo sapien
gatgatgagctcctgaatatcccag

SEQ ID NO: 4482568 - DNA, 25 bp, Homo sapien
tatcccaggcctagatttacaagct

SEQ ID NO: 4482569 - DNA, 25 bp, Homo sapien
tgtacagttaccatccaagggcatc

SEQ ID NO: 4482570 - DNA, 25 bp, Homo sapien
cataagcgttaaagtgagtgcaggg

SEQ ID NO: 4482571 - DNA, 25 bp, Homo sapien
cagacaggtagggtaattcttccac

SEQ ID NO: 4482572 - DNA, 25 bp, Homo sapien
gaaacatggccctgttccagttcag

SEQ ID NO: 4482573 - DNA, 25 bp, Homo sapien
tcataaagctgtaagcaggcaacct

SEQ ID NO: 4482574 - DNA, 25 bp, Homo sapien
cgggagagtggctgtacaccttcaa

SEQ ID NO: 4482575 - DNA, 25 bp, Homo sapien
gcatccgggtcacctagtaagctga

SEQ ID NO: 4482576 - DNA, 25 bp, Homo sapien
ttcacaagcaaagggatctgcactc

SEQ ID NO: 4482577 - DNA, 25 bp, Homo sapien
gatatgcagatccactttaacagaa

SEQ ID NO: 4482578 - DNA, 25 bp, Homo sapien
ccagaaactgctaggcgtgatgctt

SEQ ID NO: 4482579 - DNA, 25 bp, Homo sapien
gaagactgggcctgtccaatgcaag

SEQ ID NO: 4482580 - DNA, 25 bp, Homo sapien
taggtaagaaaactggagctccact

SEQ ID NO: 4482581 - DNA, 25 bp, Homo sapien
tgagcaaccagttagtccagaggtc

SEQ ID NO: 4482582 - DNA, 25 bp, Homo sapien
tctacaggtgtactgggaaacatga

SEQ ID NO: 4482583 - DNA, 25 bp, Homo sapien
gtcaagtgtcccatctagagtcaga

SEQ ID NO: 4482584 - DNA, 25 bp, Homo sapien
gatgatcctggaccatgttatggcc

SEQ ID NO: 4482585 - DNA, 25 bp, Homo sapien
gacaggtagttctgccctatgccct

SEQ ID NO: 4482586 - DNA, 25 bp, Homo sapien
tagagccacgaaacacaaagagagc

SEQ ID NO: 4482587 - DNA, 25 bp, Homo sapien
cagctagaaggagggaatccagccc

SEQ ID NO: 4482588 - DNA, 25 bp, Homo sapien
gggttttattgtaaatcctcatgat

SEQ ID NO: 4482589 - DNA, 25 bp, Homo sapien
catgatttctggctcatttagagcc

SEQ ID NO: 4482590 - DNA, 25 bp, Homo sapien
cacgtccacacggaaaggctcttgg

SEQ ID NO: 4482591 - DNA, 25 bp, Homo sapien
tgatggcccatgacatatgtccagg

SEQ ID NO: 4482592 - DNA, 25 bp, Homo sapien
tggaacaatcaatgactgagccctg

SEQ ID NO: 4482593 - DNA, 25 bp, Homo sapien
gacacatggaaacgtggccacactg

SEQ ID NO: 4482594 - DNA, 25 bp, Homo sapien
gaacttttccagagggctcgccatg

SEQ ID NO: 4482595 - DNA, 25 bp, Homo sapien
gactgaattgtcacaccctgggacg

SEQ ID NO: 4482596 - DNA, 25 bp, Homo sapien
gataattattactgccctgggtgct

SEQ ID NO: 4482597 - DNA, 25 bp, Homo sapien
gaaagtggacccgtggacaagatca

SEQ ID NO: 4482598 - DNA, 25 bp, Homo sapien
tcttgtctctctacagtccctggct

SEQ ID NO: 4482599 - DNA, 25 bp, Homo sapien
tctgggacatcgctggggtgcccaa

SEQ ID NO: 4482600 - DNA, 25 bp, Homo sapien
cctcaaacagctctaatggggagaa

SEQ ID NO: 4482601 - DNA, 25 bp, Homo sapien
gtgcccaagactgcagtagtcagtc

SEQ ID NO: 4482602 - DNA, 25 bp, Homo sapien
tggcagacgagaaccaaagcttcgg

SEQ ID NO: 4482603 - DNA, 25 bp, Homo sapien
tgggtagccccgataagtgtcctca

SEQ ID NO: 4482604 - DNA, 25 bp, Homo sapien
tctggcggatccgatgggaaagtcc

SEQ ID NO: 4482605 - DNA, 25 bp, Homo sapien
gggaaagtccggtctggctgccatc

SEQ ID NO: 4482606 - DNA, 25 bp, Homo sapien
agctggggcctttcttcatggagct

SEQ ID NO: 4482607 - DNA, 25 bp, Homo sapien
atcgagctggggcctttcttcatgg

SEQ ID NO: 4482608 - DNA, 25 bp, Homo sapien
cgagctggggcctttcttcatggag

SEQ ID NO: 4482609 - DNA, 25 bp, Homo sapien
cttcatcgagctggggcctttcttc

SEQ ID NO: 4482610 - DNA, 25 bp, Homo sapien
ggcaaacaaaggctggcctaattct

SEQ ID NO: 4482611 - DNA, 25 bp, Homo sapien
aggcaaacaaaggctggcctaattc

SEQ ID NO: 4482612 - DNA, 25 bp, Homo sapien
ggagtagatgggtgggagttcctta

SEQ ID NO: 4482613 - DNA, 25 bp, Homo sapien
tactgggagtagatgggtgggagtt

SEQ ID NO: 4482614 - DNA, 25 bp, Homo sapien
gagtagatgggtgggagttccttaa

SEQ ID NO: 4482615 - DNA, 25 bp, Homo sapien
agtagatgggtgggagttccttaag

SEQ ID NO: 4482616 - DNA, 25 bp, Homo sapien
cccagcacagtggtttcaattccag

SEQ ID NO: 4482617 - DNA, 25 bp, Homo sapien
cgaaaagcagggttacagagtagga

SEQ ID NO: 4482618 - DNA, 25 bp, Homo sapien
aaggacacacaggaaacgaaaagca

SEQ ID NO: 4482619 - DNA, 25 bp, Homo sapien
caggaaacgaaaagcagggttacag

SEQ ID NO: 4482620 - DNA, 25 bp, Homo sapien
ctgaaaggacacacaggaaacgaaa

SEQ ID NO: 4482621 - DNA, 25 bp, Homo sapien
agtcacttggccatccattcagaag

SEQ ID NO: 4482622 - DNA, 25 bp, Homo sapien
agccctcacacagcgcggaagctcc

SEQ ID NO: 4482623 - DNA, 25 bp, Homo sapien
ctgggttcgagggtgaacagggaca

SEQ ID NO: 4482624 - DNA, 25 bp, Homo sapien
cagaagctgcccgtatttgtatttg

SEQ ID NO: 4482625 - DNA, 25 bp, Homo sapien
ccacggaaaaacggctgcttcccag

SEQ ID NO: 4482626 - DNA, 25 bp, Homo sapien
tctccggccgtggcccccttagatc

SEQ ID NO: 4482627 - DNA, 25 bp, Homo sapien
cggaaaaacggctgcttcccagaat

SEQ ID NO: 4482628 - DNA, 25 bp, Homo sapien
gaaaaacggctgcttcccagaatag

SEQ ID NO: 4482629 - DNA, 25 bp, Homo sapien
aagctcccctcagaccaatgtggtt

SEQ ID NO: 4482630 - DNA, 25 bp, Homo sapien
gagggtgcccatcgtggacgtccca

SEQ ID NO: 4482631 - DNA, 25 bp, Homo sapien
tatccaccctcggatcctcaaaatt

SEQ ID NO: 4482632 - DNA, 25 bp, Homo sapien
cagtggtgccatatccaccctcgga

SEQ ID NO: 4482633 - DNA, 25 bp, Homo sapien
tcagggtagaggtgtggtctgaacc

SEQ ID NO: 4482634 - DNA, 25 bp, Homo sapien
agaggtgtggtctgaaccatcttct

SEQ ID NO: 4482635 - DNA, 25 bp, Homo sapien
ctgagtcagggtagaggtgtggtct

SEQ ID NO: 4482636 - DNA, 25 bp, Homo sapien
agtcagggtagaggtgtggtctgaa

SEQ ID NO: 4482637 - DNA, 25 bp, Homo sapien
ttgcagcccctgacggtacagctgt

SEQ ID NO: 4482638 - DNA, 25 bp, Homo sapien
cagcccctgacggtacagctgtgtg

SEQ ID NO: 4482639 - DNA, 25 bp, Homo sapien
agtacaaggggagtccagccgcagc

SEQ ID NO: 4482640 - DNA, 25 bp, Homo sapien
gagagatgttggtttgcagcccctg

SEQ ID NO: 4482641 - DNA, 25 bp, Homo sapien
ctgttcttctgtcccccagaaccca

SEQ ID NO: 4482642 - DNA, 25 bp, Homo sapien
tcttctgtcccccagaacccaggga

SEQ ID NO: 4482643 - DNA, 25 bp, Homo sapien
cctccaggagccccgacctgggcct

SEQ ID NO: 4482644 - DNA, 25 bp, Homo sapien
caggagccccgacctgggcctccag

SEQ ID NO: 4482645 - DNA, 25 bp, Homo sapien
tggacagctgttccagtgccagatc

SEQ ID NO: 4482646 - DNA, 25 bp, Homo sapien
cagcaccgagcggttgcccactggg

SEQ ID NO: 4482647 - DNA, 25 bp, Homo sapien
ctccaccggaatatttccctgtggt

SEQ ID NO: 4482648 - DNA, 25 bp, Homo sapien
cactgggggcccaagcagatctggg

SEQ ID NO: 4482649 - DNA, 25 bp, Homo sapien
caccggaatatttccctgtggtggg

SEQ ID NO: 4482650 - DNA, 25 bp, Homo sapien
aggccacattcactaatactcaagg

SEQ ID NO: 4482651 - DNA, 25 bp, Homo sapien
cagtgtccaaatcctatggcttggc

SEQ ID NO: 4482652 - DNA, 25 bp, Homo sapien
tggcttggcctggaatttatctacc

SEQ ID NO: 4482653 - DNA, 25 bp, Homo sapien
tggcgtcagggcacaagtttcagaa

SEQ ID NO: 4482654 - DNA, 25 bp, Homo sapien
ttcctactccgccttgggccccaga

SEQ ID NO: 4482655 - DNA, 25 bp, Homo sapien
catgatcacaataggcaaacatgca

SEQ ID NO: 4482656 - DNA, 25 bp, Homo sapien
gcatgatcacaataggcaaacatgc

SEQ ID NO: 4482657 - DNA, 25 bp, Homo sapien
ctgcatgatcacaataggcaaacat

SEQ ID NO: 4482658 - DNA, 25 bp, Homo sapien
tgcatgatcacaataggcaaacatg

SEQ ID NO: 4482659 - DNA, 25 bp, Homo sapien
agttcacaggcaactccactcggca

SEQ ID NO: 4482660 - DNA, 25 bp, Homo sapien
ccccttggagggttgcatggagacc

SEQ ID NO: 4482661 - DNA, 25 bp, Homo sapien
agggttgcatggagaccagtgtcac

SEQ ID NO: 4482662 - DNA, 25 bp, Homo sapien
aatctccttcatgatggccccttgg

SEQ ID NO: 4482663 - DNA, 25 bp, Homo sapien
tactctggtaccactgttcatgcat

SEQ ID NO: 4482664 - DNA, 25 bp, Homo sapien
ctggtcctctgagggagtacagttc

SEQ ID NO: 4482665 - DNA, 25 bp, Homo sapien
gcctctccttgcaccagtagtgcca

SEQ ID NO: 4482666 - DNA, 25 bp, Homo sapien
ggtcctctgagggagtacagttcct

SEQ ID NO: 4482667 - DNA, 25 bp, Homo sapien
tcctctgagggagtacagttcctcc

SEQ ID NO: 4482668 - DNA, 25 bp, Homo sapien
tgtttccacgattcacgtcttttcc

SEQ ID NO: 4482669 - DNA, 25 bp, Homo sapien
aaaggagagtggcaccaacgctcca

SEQ ID NO: 4482670 - DNA, 25 bp, Homo sapien
cagaaagggcttttcgctgaaattg

SEQ ID NO: 4482671 - DNA, 25 bp, Homo sapien
taatcacagcaagcgccaaattgtt

SEQ ID NO: 4482672 - DNA, 25 bp, Homo sapien
tagcagatgccgcaccgagacttgg

SEQ ID NO: 4482673 - DNA, 25 bp, Homo sapien
agcagatgccgcaccgagacttggg

SEQ ID NO: 4482674 - DNA, 25 bp, Homo sapien
cagatgccgcaccgagacttggggg

SEQ ID NO: 4482675 - DNA, 25 bp, Homo sapien
atgccgcaccgagacttgggggtct

SEQ ID NO: 4482676 - DNA, 25 bp, Homo sapien
tgcacttactgctgtaggcattggg

SEQ ID NO: 4482677 - DNA, 25 bp, Homo sapien
ggcccatgggctctacccaatgttc

SEQ ID NO: 4482678 - DNA, 25 bp, Homo sapien
caaaaggcagccatgcaaggtttgg

SEQ ID NO: 4482679 - DNA, 25 bp, Homo sapien
tgttcaactgtgtggcagggctcac

SEQ ID NO: 4482680 - DNA, 25 bp, Homo sapien
cagcctatgcctcctgggttcaagc

SEQ ID NO: 4482681 - DNA, 25 bp, Homo sapien
cttccttttttctctctggcccatg

SEQ ID NO: 4482682 - DNA, 25 bp, Homo sapien
cccttaggctagagtgccatgggat

SEQ ID NO: 4482683 - DNA, 25 bp, Homo sapien
gccatgggatgatctcggctcactg

SEQ ID NO: 4482684 - DNA, 25 bp, Homo sapien
acagaggcgcagacacgctcgcatg

SEQ ID NO: 4482685 - DNA, 25 bp, Homo sapien
acacagaggcgcagacacgctcgca

SEQ ID NO: 4482686 - DNA, 25 bp, Homo sapien
agaggcgcagacacgctcgcatgcc

SEQ ID NO: 4482687 - DNA, 25 bp, Homo sapien
gacacgctcgcatgcccgtctccat

SEQ ID NO: 4482688 - DNA, 25 bp, Homo sapien
atgcatagacccacagagcagcccc

SEQ ID NO: 4482689 - DNA, 25 bp, Homo sapien
gcatagacccacagagcagcccctc

SEQ ID NO: 4482690 - DNA, 25 bp, Homo sapien
gaatgcatagacccacagagcagcc

SEQ ID NO: 4482691 - DNA, 25 bp, Homo sapien
aatgcatagacccacagagcagccc

SEQ ID NO: 4482692 - DNA, 25 bp, Homo sapien
gcgacactctcgcccttgcattcac

SEQ ID NO: 4482693 - DNA, 25 bp, Homo sapien
cgacactctcgcccttgcattcaca

SEQ ID NO: 4482694 - DNA, 25 bp, Homo sapien
gacactctcgcccttgcattcacac

SEQ ID NO: 4482695 - DNA, 25 bp, Homo sapien
acgcgacactctcgcccttgcattc

SEQ ID NO: 4482696 - DNA, 25 bp, Homo sapien
atgttccggaggaacagaggaggag

SEQ ID NO: 4482697 - DNA, 25 bp, Homo sapien
gggtggcaggatgttccggaggaac

SEQ ID NO: 4482698 - DNA, 25 bp, Homo sapien
gccacgtagacagccaatcctgtgg

SEQ ID NO: 4482699 - DNA, 25 bp, Homo sapien
caggatgttccggaggaacagagga

SEQ ID NO: 4482700 - DNA, 25 bp, Homo sapien
tcagcactccaagatgacataaatg

SEQ ID NO: 4482701 - DNA, 25 bp, Homo sapien
aatggaagctcccaggtctctcaag

SEQ ID NO: 4482702 - DNA, 25 bp, Homo sapien
cacattggctgcattctattggcca

SEQ ID NO: 4482703 - DNA, 25 bp, Homo sapien
gccgaggccaggcagacgcatagca

SEQ ID NO: 4482704 - DNA, 25 bp, Homo sapien
tgctgctaaaagcactgctggattt

SEQ ID NO: 4482705 - DNA, 25 bp, Homo sapien
ggatttaaagggcatcgtctgggaa

SEQ ID NO: 4482706 - DNA, 25 bp, Homo sapien
taaagggcatcgtctgggaagccag

SEQ ID NO: 4482707 - DNA, 25 bp, Homo sapien
actgctgctaaaagcactgctggat

SEQ ID NO: 4482708 - DNA, 25 bp, Homo sapien
tttgacgtcctgattgctccagggc

SEQ ID NO: 4482709 - DNA, 25 bp, Homo sapien
tatttcctatagctagtcggaatgc

SEQ ID NO: 4482710 - DNA, 25 bp, Homo sapien
cagctccgggctggctttttgcagg

SEQ ID NO: 4482711 - DNA, 25 bp, Homo sapien
tatagctagtcggaatgcaaacttt

SEQ ID NO: 4482712 - DNA, 25 bp, Homo sapien
tcactggaggttggcgacaatgacc

SEQ ID NO: 4482713 - DNA, 25 bp, Homo sapien
tggacatcagcgagaacaagatcgt

SEQ ID NO: 4482714 - DNA, 25 bp, Homo sapien
gtttcaggacctgtacaacctcaag

SEQ ID NO: 4482715 - DNA, 25 bp, Homo sapien
taggcgtcttcactggcctcagcaa

SEQ ID NO: 4482716 - DNA, 25 bp, Homo sapien
gctgtgccaccgcaagcgctttgtg

SEQ ID NO: 4482717 - DNA, 25 bp, Homo sapien
ctttgtggcagtccccgagggcatc

SEQ ID NO: 4482718 - DNA, 25 bp, Homo sapien
gagacgcgcctgctggacctaggca

SEQ ID NO: 4482719 - DNA, 25 bp, Homo sapien
gtgctgtcaggctcggccacgggct

SEQ ID NO: 4482720 - DNA, 25 bp, Homo sapien
cccagccttcgtggggcagacgcct

SEQ ID NO: 4482721 - DNA, 25 bp, Homo sapien
ggctgagcacccagaggaccctggg

SEQ ID NO: 4482722 - DNA, 25 bp, Homo sapien
cgtttccccgtgaggaactgccctg

SEQ ID NO: 4482723 - DNA, 25 bp, Homo sapien
gccttcgtggggcagacgcctccat

SEQ ID NO: 4482724 - DNA, 25 bp, Homo sapien
cacgttggtttttctgtccccatgg

SEQ ID NO: 4482725 - DNA, 25 bp, Homo sapien
ccacgttggtttttctgtccccatg

SEQ ID NO: 4482726 - DNA, 25 bp, Homo sapien
catgcgattggtgaccgagccgagc

SEQ ID NO: 4482727 - DNA, 25 bp, Homo sapien
ggtcgggccggctggagagacatgc

SEQ ID NO: 4482728 - DNA, 25 bp, Homo sapien
ctggagagacatgcgattggtgacc

SEQ ID NO: 4482729 - DNA, 25 bp, Homo sapien
cgagccgagcggaccgaaggcgcgc

SEQ ID NO: 4482730 - DNA, 25 bp, Homo sapien
cgctccggcccctctcccgacgcgg

SEQ ID NO: 4482731 - DNA, 25 bp, Homo sapien
agaagcaggctcgcgcagcccctgt

SEQ ID NO: 4482732 - DNA, 25 bp, Homo sapien
gagcgcgcccggcctcgaccccggc

SEQ ID NO: 4482733 - DNA, 25 bp, Homo sapien
acgcggggcgccgagcagcatgcgc

SEQ ID NO: 4482734 - DNA, 25 bp, Homo sapien
agctgctatctgaacccacagtgct

SEQ ID NO: 4482735 - DNA, 25 bp, Homo sapien
caggtttgtccagctgctatctgaa

SEQ ID NO: 4482736 - DNA, 25 bp, Homo sapien
agaccactccgccaacaggtggctt

SEQ ID NO: 4482737 - DNA, 25 bp, Homo sapien
ggacctctgacatcctctgtcgcag

SEQ ID NO: 4482738 - DNA, 25 bp, Homo sapien
ctttgctatgagtcacaccagtgtc

SEQ ID NO: 4482739 - DNA, 25 bp, Homo sapien
cctagccgtcttgatcaccatgaca

SEQ ID NO: 4482740 - DNA, 25 bp, Homo sapien
tagccgtcttgatcaccatgacaga

SEQ ID NO: 4482741 - DNA, 25 bp, Homo sapien
tcttactttgctatgagtcacacca

SEQ ID NO: 4482742 - DNA, 25 bp, Homo sapien
gaatgtgcaacgtagccagaaaaat

SEQ ID NO: 4482743 - DNA, 25 bp, Homo sapien
gggaatgtgcaacgtagccagaaaa

SEQ ID NO: 4482744 - DNA, 25 bp, Homo sapien
gtccatccatcagttagcaatggtg

SEQ ID NO: 4482745 - DNA, 25 bp, Homo sapien
tcagttagcaatggtggcaccaatt

SEQ ID NO: 4482746 - DNA, 25 bp, Homo sapien
tatccacacctgataccaaagtcct

SEQ ID NO: 4482747 - DNA, 25 bp, Homo sapien
tttccggatgtctcaggacaaagcc

SEQ ID NO: 4482748 - DNA, 25 bp, Homo sapien
ctttcctttccggatgtctcaggac

SEQ ID NO: 4482749 - DNA, 25 bp, Homo sapien
tgagggccccagctatccacacctg

SEQ ID NO: 4482750 - DNA, 25 bp, Homo sapien
cagcagtcaacatgggagtagagcc

SEQ ID NO: 4482751 - DNA, 25 bp, Homo sapien
catgtgtgagtcagtacggtcccgg

SEQ ID NO: 4482752 - DNA, 25 bp, Homo sapien
gcagccggtgctccttcaatggtaa

SEQ ID NO: 4482753 - DNA, 25 bp, Homo sapien
gatgtgtctgaaaggcacttcccta

SEQ ID NO: 4482754 - DNA, 25 bp, Homo sapien
acaggcttacacaccacgccgtaaa

SEQ ID NO: 4482755 - DNA, 25 bp, Homo sapien
gaaagcctcgagtcttaaacacaaa

SEQ ID NO: 4482756 - DNA, 25 bp, Homo sapien
cacgccgtaaacatcaaatcggcca

SEQ ID NO: 4482757 - DNA, 25 bp, Homo sapien
catgcatgtacatgccgtgcacagg

SEQ ID NO: 4482758 - DNA, 25 bp, Homo sapien
taactctgcggtctattcgtgcctg

SEQ ID NO: 4482759 - DNA, 25 bp, Homo sapien
gccctgtgaggcatagtctatccca

SEQ ID NO: 4482760 - DNA, 25 bp, Homo sapien
ccttgggccttcgtagggagacatc

SEQ ID NO: 4482761 - DNA, 25 bp, Homo sapien
catcttattcgatccctagggtggc

SEQ ID NO: 4482762 - DNA, 25 bp, Homo sapien
ccaaagcagaactggccccgtggaa

SEQ ID NO: 4482763 - DNA, 25 bp, Homo sapien
tgtgtctggggcaaccagccctcct

SEQ ID NO: 4482764 - DNA, 25 bp, Homo sapien
gaactggccccgtggaatctctagc

SEQ ID NO: 4482765 - DNA, 25 bp, Homo sapien
ctggaacttcacctgctgtgtctgg

SEQ ID NO: 4482766 - DNA, 25 bp, Homo sapien
cgtgtctatgtttggggaggtggca

SEQ ID NO: 4482767 - DNA, 25 bp, Homo sapien
cttgagcagaggtgtggcggtagga

SEQ ID NO: 4482768 - DNA, 25 bp, Homo sapien
gcggtaggacccagcgtgtctatgt

SEQ ID NO: 4482769 - DNA, 25 bp, Homo sapien
gaggtgtggcggtaggacccagcgt

SEQ ID NO: 4482770 - DNA, 25 bp, Homo sapien
attggtatggtcacccaggtcacgg

SEQ ID NO: 4482771 - DNA, 25 bp, Homo sapien
tcacccaggtcacggttgccggcat

SEQ ID NO: 4482772 - DNA, 25 bp, Homo sapien
aatggcagctgctattggtatggtc

SEQ ID NO: 4482773 - DNA, 25 bp, Homo sapien
cagctgctattggtatggtcaccca

SEQ ID NO: 4482774 - DNA, 25 bp, Homo sapien
gacttcctgggctttagtagcttgg

SEQ ID NO: 4482775 - DNA, 25 bp, Homo sapien
gctttagtagcttggcagtggaact

SEQ ID NO: 4482776 - DNA, 25 bp, Homo sapien
agtggaactccacgtgaccggggca

SEQ ID NO: 4482777 - DNA, 25 bp, Homo sapien
aactccacgtgaccggggcagaagt

SEQ ID NO: 4482778 - DNA, 25 bp, Homo sapien
aaccctatagagtgagtggagctgg

SEQ ID NO: 4482779 - DNA, 25 bp, Homo sapien
tgggacaaggatccccattttgccg

SEQ ID NO: 4482780 - DNA, 25 bp, Homo sapien
catgagcctcaaacgaaccctatag

SEQ ID NO: 4482781 - DNA, 25 bp, Homo sapien
ccattttgccggcagggagatcgag

SEQ ID NO: 4482782 - DNA, 25 bp, Homo sapien
agcactgtgatgagcaggcagccag

SEQ ID NO: 4482783 - DNA, 25 bp, Homo sapien
ggctcaggcacagccgcagccctcc

SEQ ID NO: 4482784 - DNA, 25 bp, Homo sapien
tgcagtgcccagcactgtgatgagc

SEQ ID NO: 4482785 - DNA, 25 bp, Homo sapien
tgcccagcactgtgatgagcaggca

SEQ ID NO: 4482786 - DNA, 25 bp, Homo sapien
aggtcatggaagctcccgttgaggg

SEQ ID NO: 4482787 - DNA, 25 bp, Homo sapien
cagaggtcatggaagctcccgttga

SEQ ID NO: 4482788 - DNA, 25 bp, Homo sapien
ttgccccatccagaggtcatggaag

SEQ ID NO: 4482789 - DNA, 25 bp, Homo sapien
cgttgaggggagtcgggcagggtgg

SEQ ID NO: 4482790 - DNA, 25 bp, Homo sapien
ccagcatggcgactaagccagctag

SEQ ID NO: 4482791 - DNA, 25 bp, Homo sapien
ggcgggtggaattcccagcatggcg

SEQ ID NO: 4482792 - DNA, 25 bp, Homo sapien
gaattcccagcatggcgactaagcc

SEQ ID NO: 4482793 - DNA, 25 bp, Homo sapien
gggtggaattcccagcatggcgact

SEQ ID NO: 4482794 - DNA, 25 bp, Homo sapien
cagagaattcttgggtcagtatcct

SEQ ID NO: 4482795 - DNA, 25 bp, Homo sapien
agagaattcttgggtcagtatcctc

SEQ ID NO: 4482796 - DNA, 25 bp, Homo sapien
catgcagtcacttggtgaaccaggg

SEQ ID NO: 4482797 - DNA, 25 bp, Homo sapien
gagatgaccctagggcgcttttcat

SEQ ID NO: 4482798 - DNA, 25 bp, Homo sapien
tgggccctcagtggagagaactctg

SEQ ID NO: 4482799 - DNA, 25 bp, Homo sapien
tttcatgaatgaatccagctggagg

SEQ ID NO: 4482800 - DNA, 25 bp, Homo sapien
tctgcagcaaggggttttgaaccat

SEQ ID NO: 4482801 - DNA, 25 bp, Homo sapien
catctgcagcaaggggttttgaacc

SEQ ID NO: 4482802 - DNA, 25 bp, Homo sapien
gcatctgcagcaaggggttttgaac

SEQ ID NO: 4482803 - DNA, 25 bp, Homo sapien
atctgcagcaaggggttttgaacca

SEQ ID NO: 4482804 - DNA, 25 bp, Homo sapien
tcagggtatgaccagggtccgagcc

SEQ ID NO: 4482805 - DNA, 25 bp, Homo sapien
cagagtcgggactcagtgtctgacc

SEQ ID NO: 4482806 - DNA, 25 bp, Homo sapien
ggttcagtatgtgaccagcgtcggg

SEQ ID NO: 4482807 - DNA, 25 bp, Homo sapien
ggttcaatctgtgatcagggtcggg

SEQ ID NO: 4482808 - DNA, 25 bp, Homo sapien
ttccaggacgttgaaccacagttga

SEQ ID NO: 4482809 - DNA, 25 bp, Homo sapien
ccaggacgttgaaccacagttgaat

SEQ ID NO: 4482810 - DNA, 25 bp, Homo sapien
ctttcagtctggaacagccgggtgc

SEQ ID NO: 4482811 - DNA, 25 bp, Homo sapien
ttcagtctggaacagccgggtgcag

SEQ ID NO: 4482812 - DNA, 25 bp, Homo sapien
gctggcaagcttggccatgctcctg

SEQ ID NO: 4482813 - DNA, 25 bp, Homo sapien
caatgcaggcagacacgtgaagggt

SEQ ID NO: 4482814 - DNA, 25 bp, Homo sapien
taaccagcatttagagctgggccgc

SEQ ID NO: 4482815 - DNA, 25 bp, Homo sapien
ctgcttcatttggtgtcggagctga

SEQ ID NO: 4482816 - DNA, 25 bp, Homo sapien
tctccaccattcgctccctgcccat

SEQ ID NO: 4482817 - DNA, 25 bp, Homo sapien
agtctccaccattcgctccctgccc

SEQ ID NO: 4482818 - DNA, 25 bp, Homo sapien
tgagtctccaccattcgctccctgc

SEQ ID NO: 4482819 - DNA, 25 bp, Homo sapien
gagtctccaccattcgctccctgcc

SEQ ID NO: 4482820 - DNA, 25 bp, Homo sapien
tccactgcccagatgagctgatgat

SEQ ID NO: 4482821 - DNA, 25 bp, Homo sapien
gcccagatgagctgatgatggagca

SEQ ID NO: 4482822 - DNA, 25 bp, Homo sapien
tgcttcatgactccactgcccagat

SEQ ID NO: 4482823 - DNA, 25 bp, Homo sapien
ttgggcccctctgaggtccagcctg

SEQ ID NO: 4482824 - DNA, 25 bp, Homo sapien
cctgtgtaggtctgcgtgtgaagct

SEQ ID NO: 4482825 - DNA, 25 bp, Homo sapien
tcttcctgtgtaggtctgcgtgtga

SEQ ID NO: 4482826 - DNA, 25 bp, Homo sapien
agggccacggcaagacccctccgtg

SEQ ID NO: 4482827 - DNA, 25 bp, Homo sapien
gtgtcttcctgtgtaggtctgcgtg

SEQ ID NO: 4482828 - DNA, 25 bp, Homo sapien
ccccggtagcccacagagtacatgg

SEQ ID NO: 4482829 - DNA, 25 bp, Homo sapien
cacagagtacatggaccaagagggt

SEQ ID NO: 4482830 - DNA, 25 bp, Homo sapien
ggaggccccggtagcccacagagta

SEQ ID NO: 4482831 - DNA, 25 bp, Homo sapien
cagagtacatggaccaagagggtcg

SEQ ID NO: 4482832 - DNA, 25 bp, Homo sapien
gaggcgtttgggtttcgtggcactg

SEQ ID NO: 4482833 - DNA, 25 bp, Homo sapien
tggctctctgttgttcccctgtatc

SEQ ID NO: 4482834 - DNA, 25 bp, Homo sapien
tctgggagggacagtccttcagccg

SEQ ID NO: 4482835 - DNA, 25 bp, Homo sapien
gaccatggtattggtcaggctgccc

SEQ ID NO: 4482836 - DNA, 25 bp, Homo sapien
tccaggcctgctgacccaggagagt

SEQ ID NO: 4482837 - DNA, 25 bp, Homo sapien
gcagttgctgatacttgccctgggc

SEQ ID NO: 4482838 - DNA, 25 bp, Homo sapien
ggctttttcttgaaggtctgccaag

SEQ ID NO: 4482839 - DNA, 25 bp, Homo sapien
gggaagcagttgctgatacttgccc

SEQ ID NO: 4482840 - DNA, 25 bp, Homo sapien
gtgtgggtgatttggctgtgggctt

SEQ ID NO: 4482841 - DNA, 25 bp, Homo sapien
ccaaagggtcaacactggacactgg

SEQ ID NO: 4482842 - DNA, 25 bp, Homo sapien
cggagacacaggtgctcagttcact

SEQ ID NO: 4482843 - DNA, 25 bp, Homo sapien
tgtagagtcaacagcccaaagggtc

SEQ ID NO: 4482844 - DNA, 25 bp, Homo sapien
tcaggaggacttgtgtagagtcaac

SEQ ID NO: 4482845 - DNA, 25 bp, Homo sapien
ggcaggatcgatcaccgccagacct

SEQ ID NO: 4482846 - DNA, 25 bp, Homo sapien
gcacctgggcaggatcgatcaccgc

SEQ ID NO: 4482847 - DNA, 25 bp, Homo sapien
ctgggcaggatcgatcaccgccaga

SEQ ID NO: 4482848 - DNA, 25 bp, Homo sapien
caggatcgatcaccgccagacctgg

SEQ ID NO: 4482849 - DNA, 25 bp, Homo sapien
tggttccctaaaggctcaggcttgg

SEQ ID NO: 4482850 - DNA, 25 bp, Homo sapien
ggccagaagcctagaaggcaaagaa

SEQ ID NO: 4482851 - DNA, 25 bp, Homo sapien
caaaggcagagggtagaaaacctga

SEQ ID NO: 4482852 - DNA, 25 bp, Homo sapien
tgctgactcgtgttcccaggagctc

SEQ ID NO: 4482853 - DNA, 25 bp, Homo sapien
acccgtgcaccaccgtgggttctgt

SEQ ID NO: 4482854 - DNA, 25 bp, Homo sapien
gggccctgtgcacccgtgcaccacc

SEQ ID NO: 4482855 - DNA, 25 bp, Homo sapien
agaaggtgaggttgggcgtcgggct

SEQ ID NO: 4482856 - DNA, 25 bp, Homo sapien
gtgcacccgtgcaccaccgtgggtt

SEQ ID NO: 4482857 - DNA, 25 bp, Homo sapien
gatgctgtcccctcaagaatctgtg

SEQ ID NO: 4482858 - DNA, 25 bp, Homo sapien
tgcccctggagaacgctgggtgctt

SEQ ID NO: 4482859 - DNA, 25 bp, Homo sapien
tagtcccttgactccctgtaatggg

SEQ ID NO: 4482860 - DNA, 25 bp, Homo sapien
ctttaaggtagggtacagggcacag

SEQ ID NO: 4482861 - DNA, 25 bp, Homo sapien
cctgaatggtgccatccatcatgtt

SEQ ID NO: 4482862 - DNA, 25 bp, Homo sapien
gaatggtgccatccatcatgttagc

SEQ ID NO: 4482863 - DNA, 25 bp, Homo sapien
tttgctgccaatggcgcggctggct

SEQ ID NO: 4482864 - DNA, 25 bp, Homo sapien
tggcacatgagcctctggatttatt

SEQ ID NO: 4482865 - DNA, 25 bp, Homo sapien
ctgaaggcaggggcctcagagtagc

SEQ ID NO: 4482866 - DNA, 25 bp, Homo sapien
gggcccacctggggaatggcattgg

SEQ ID NO: 4482867 - DNA, 25 bp, Homo sapien
attgggcttgttttctgacagtgct

SEQ ID NO: 4482868 - DNA, 25 bp, Homo sapien
gttttctgacagtgcttcctgtggc

SEQ ID NO: 4482869 - DNA, 25 bp, Homo sapien
gggcttgttttctgacagtgcttcc

SEQ ID NO: 4482870 - DNA, 25 bp, Homo sapien
gacttcttccccttatttgaggata

SEQ ID NO: 4482871 - DNA, 25 bp, Homo sapien
tgactaactctatggccaataactg

SEQ ID NO: 4482872 - DNA, 25 bp, Homo sapien
taaccccttaggagagctggagggc

SEQ ID NO: 4482873 - DNA, 25 bp, Homo sapien
gcagcagggagcagtccacgcagca

SEQ ID NO: 4482874 - DNA, 25 bp, Homo sapien
cctgagtgggtttgccggacaccat

SEQ ID NO: 4482875 - DNA, 25 bp, Homo sapien
tgctgcccatcgatttgtgttgctt

SEQ ID NO: 4482876 - DNA, 25 bp, Homo sapien
ctgggccggagaaggcctcttgctg

SEQ ID NO: 4482877 - DNA, 25 bp, Homo sapien
cctcttgctgcccatcgatttgtgt

SEQ ID NO: 4482878 - DNA, 25 bp, Homo sapien
tacatgcaaatcagagtgattgtta

SEQ ID NO: 4482879 - DNA, 25 bp, Homo sapien
acatgcaaatcagagtgattgttat

SEQ ID NO: 4482880 - DNA, 25 bp, Homo sapien
catgcaaatcagagtgattgttatt

SEQ ID NO: 4482881 - DNA, 25 bp, Homo sapien
aatacatgcaaatcagagtgattgt

SEQ ID NO: 4482882 - DNA, 25 bp, Homo sapien
ggagccattgaagggtcctgggcag

SEQ ID NO: 4482883 - DNA, 25 bp, Homo sapien
aattgtccctgacagcagtgggagc

SEQ ID NO: 4482884 - DNA, 25 bp, Homo sapien
gggagccattgaagggtcctgggca

SEQ ID NO: 4482885 - DNA, 25 bp, Homo sapien
caggacccataaattgtccctgaca

SEQ ID NO: 4482886 - DNA, 25 bp, Homo sapien
tggatgggggcggcgtccttttggc

SEQ ID NO: 4482887 - DNA, 25 bp, Homo sapien
tgcgctctggatgggggcggcgtcc

SEQ ID NO: 4482888 - DNA, 25 bp, Homo sapien
cgtgcgctctggatgggggcggcgt

SEQ ID NO: 4482889 - DNA, 25 bp, Homo sapien
gtgcgctctggatgggggcggcgtc

SEQ ID NO: 4482890 - DNA, 25 bp, Homo sapien
tccacgtctcgggaggttggcagct

SEQ ID NO: 4482891 - DNA, 25 bp, Homo sapien
tagcctttgcatttagtctgcaggt

SEQ ID NO: 4482892 - DNA, 25 bp, Homo sapien
tctatgcggtggcacgaggctgcct

SEQ ID NO: 4482893 - DNA, 25 bp, Homo sapien
tggcacgaggctgcctctcctgtct

SEQ ID NO: 4482894 - DNA, 25 bp, Homo sapien
gcttagagccgtgtctggcacatag

SEQ ID NO: 4482895 - DNA, 25 bp, Homo sapien
gataaatatgagtggcccatccagg

SEQ ID NO: 4482896 - DNA, 25 bp, Homo sapien
taggttgaggcatgtaaagggctta

SEQ ID NO: 4482897 - DNA, 25 bp, Homo sapien
tctgagaacccgacaaacatggtgg

SEQ ID NO: 4482898 - DNA, 25 bp, Homo sapien
cgcatcagtggtgtgaatttagaca

SEQ ID NO: 4482899 - DNA, 25 bp, Homo sapien
tcagctgcatgctagactctgtgct

SEQ ID NO: 4482900 - DNA, 25 bp, Homo sapien
tcgtcagccaactgggaataatgag

SEQ ID NO: 4482901 - DNA, 25 bp, Homo sapien
gaagttatgaccactctggagccag

SEQ ID NO: 4482902 - DNA, 25 bp, Homo sapien
cagtggcatcgctgtttgcaatgag

SEQ ID NO: 4482903 - DNA, 25 bp, Homo sapien
aggactgatttctccgggatggact

SEQ ID NO: 4482904 - DNA, 25 bp, Homo sapien
tccgggatggactcacagtccatag

SEQ ID NO: 4482905 - DNA, 25 bp, Homo sapien
tttgcaatgaggcttcggcggctgc

SEQ ID NO: 4482906 - DNA, 25 bp, Homo sapien
gtagatctgaaaacagtcccctggg

SEQ ID NO: 4482907 - DNA, 25 bp, Homo sapien
ctgacccctaggtagatctgaaaac

SEQ ID NO: 4482908 - DNA, 25 bp, Homo sapien
tgggcagaacaggatgcccatcccc

SEQ ID NO: 4482909 - DNA, 25 bp, Homo sapien
atgtaggtcaagctcgccccaggga

SEQ ID NO: 4482910 - DNA, 25 bp, Homo sapien
gagaggcactccagttcttccctgg

SEQ ID NO: 4482911 - DNA, 25 bp, Homo sapien
gcctgtgctgtggggagaggcactc

SEQ ID NO: 4482912 - DNA, 25 bp, Homo sapien
gaggcactccagttcttccctggac

SEQ ID NO: 4482913 - DNA, 25 bp, Homo sapien
gtggggagaggcactccagttcttc

SEQ ID NO: 4482914 - DNA, 25 bp, Homo sapien
tgagttctctgcactgctgctgtgg

SEQ ID NO: 4482915 - DNA, 25 bp, Homo sapien
agttctctgcactgctgctgtggtc

SEQ ID NO: 4482916 - DNA, 25 bp, Homo sapien
tttgagttctctgcactgctgctgt

SEQ ID NO: 4482917 - DNA, 25 bp, Homo sapien
ctttcgttttgagttctctgcactg

SEQ ID NO: 4482918 - DNA, 25 bp, Homo sapien
ctggattttgaacaggggagaattg

SEQ ID NO: 4482919 - DNA, 25 bp, Homo sapien
ctgaggtttacagaatggatctctg

SEQ ID NO: 4482920 - DNA, 25 bp, Homo sapien
aggtttacagaatggatctctggtg

SEQ ID NO: 4482921 - DNA, 25 bp, Homo sapien
tttgaacaggggagaattgtgtcca

SEQ ID NO: 4482922 - DNA, 25 bp, Homo sapien
cctccagtgccagcctgcagtggtg

SEQ ID NO: 4482923 - DNA, 25 bp, Homo sapien
cccgggctgtgcaggcctccagtgc

SEQ ID NO: 4482924 - DNA, 25 bp, Homo sapien
aggggcccgggctgtgcaggcctcc

SEQ ID NO: 4482925 - DNA, 25 bp, Homo sapien
ccagtgccagcctgcagtggtggat

SEQ ID NO: 4482926 - DNA, 25 bp, Homo sapien
cttctcagaggacagtcagggcagt

SEQ ID NO: 4482927 - DNA, 25 bp, Homo sapien
tatgctcctgtatctgggcaaaggc

SEQ ID NO: 4482928 - DNA, 25 bp, Homo sapien
ttgcggcgaaactgaccgtggcttc

SEQ ID NO: 4482929 - DNA, 25 bp, Homo sapien
ggcctttgccccgatacaggaatgc

SEQ ID NO: 4482930 - DNA, 25 bp, Homo sapien
catggctggctgtaggttggtcctt

SEQ ID NO: 4482931 - DNA, 25 bp, Homo sapien
tggctggctgtaggttggtccttca

SEQ ID NO: 4482932 - DNA, 25 bp, Homo sapien
gctggctgtaggttggtccttcacc

SEQ ID NO: 4482933 - DNA, 25 bp, Homo sapien
tcatggctggctgtaggttggtcct

SEQ ID NO: 4482934 - DNA, 25 bp, Homo sapien
tagatatgggtgcagaagtgggtct

SEQ ID NO: 4482935 - DNA, 25 bp, Homo sapien
cttccagctccggacagcaggggga

SEQ ID NO: 4482936 - DNA, 25 bp, Homo sapien
tgctgcgtctggctgtagatatggg

SEQ ID NO: 4482937 - DNA, 25 bp, Homo sapien
cagggggaggctgtgctgcgtctgg

SEQ ID NO: 4482938 - DNA, 25 bp, Homo sapien
gagcaggcaacagccatgagctcat

SEQ ID NO: 4482939 - DNA, 25 bp, Homo sapien
atgcccactgcctcctcgaattcca

SEQ ID NO: 4482940 - DNA, 25 bp, Homo sapien
ctctcagtctctcggctggacctgg

SEQ ID NO: 4482941 - DNA, 25 bp, Homo sapien
ctcctcgaattccatgtgggccact

SEQ ID NO: 4482942 - DNA, 25 bp, Homo sapien
actctcagtctctcggctggacctg

SEQ ID NO: 4482943 - DNA, 25 bp, Homo sapien
tattccttgggctcgtaagccactg

SEQ ID NO: 4482944 - DNA, 25 bp, Homo sapien
tccagggtcaaaggctcggaatagg

SEQ ID NO: 4482945 - DNA, 25 bp, Homo sapien
tcaaaggctcggaataggcagatat

SEQ ID NO: 4482946 - DNA, 25 bp, Homo sapien
gccactggagtgtctgcaaggctgt

SEQ ID NO: 4482947 - DNA, 25 bp, Homo sapien
gcccagggagccagacggacaggtt

SEQ ID NO: 4482948 - DNA, 25 bp, Homo sapien
cccagggagccagacggacaggttc

SEQ ID NO: 4482949 - DNA, 25 bp, Homo sapien
ccagggagccagacggacaggttct

SEQ ID NO: 4482950 - DNA, 25 bp, Homo sapien
cagggagccagacggacaggttctc

SEQ ID NO: 4482951 - DNA, 25 bp, Homo sapien
gttgtgccttggggggtgactgctt

SEQ ID NO: 4482952 - DNA, 25 bp, Homo sapien
ctgggtgcccgactccctgccaagc

SEQ ID NO: 4482953 - DNA, 25 bp, Homo sapien
ggcagtgtgctgggtgcccgactcc

SEQ ID NO: 4482954 - DNA, 25 bp, Homo sapien
agtgtgctgggtgcccgactccctg

SEQ ID NO: 4482955 - DNA, 25 bp, Homo sapien
ggagaccaggtaggctttggctggt

SEQ ID NO: 4482956 - DNA, 25 bp, Homo sapien
gggagaccaggtaggctttggctgg

SEQ ID NO: 4482957 - DNA, 25 bp, Homo sapien
gagaccaggtaggctttggctggtt

SEQ ID NO: 4482958 - DNA, 25 bp, Homo sapien
ggtcacacgtgtggacacgctctgt

SEQ ID NO: 4482959 - DNA, 25 bp, Homo sapien
cctggaggtcacacgtgtggacacg

SEQ ID NO: 4482960 - DNA, 25 bp, Homo sapien
tggaggtcacacgtgtggacacgct

SEQ ID NO: 4482961 - DNA, 25 bp, Homo sapien
ggttggctccaccaaccccacagcg

SEQ ID NO: 4482962 - DNA, 25 bp, Homo sapien
ttgtttgctttttctcatccggagc

SEQ ID NO: 4482963 - DNA, 25 bp, Homo sapien
ttgctttttctcatccggagccttc

SEQ ID NO: 4482964 - DNA, 25 bp, Homo sapien
gtttgctttttctcatccggagcct

SEQ ID NO: 4482965 - DNA, 25 bp, Homo sapien
gctttttctcatccggagccttcat

SEQ ID NO: 4482966 - DNA, 25 bp, Homo sapien
ggtgagggctgtggcgtggactgca

SEQ ID NO: 4482967 - DNA, 25 bp, Homo sapien
gccaacatagccagggtcaaagcca

SEQ ID NO: 4482968 - DNA, 25 bp, Homo sapien
tcatccacggatgcaagtctggcca

SEQ ID NO: 4482969 - DNA, 25 bp, Homo sapien
tccacggatgcaagtctggccaaca

SEQ ID NO: 4482970 - DNA, 25 bp, Homo sapien
gagagtggccgtgtgcaagtgtgtg

SEQ ID NO: 4482971 - DNA, 25 bp, Homo sapien
ctcgcaagcgccactggcccagatc

SEQ ID NO: 4482972 - DNA, 25 bp, Homo sapien
ttccttcctcgcaagcgccactggc

SEQ ID NO: 4482973 - DNA, 25 bp, Homo sapien
atgctcgtccaggtctgtgagagtg

SEQ ID NO: 4482974 - DNA, 25 bp, Homo sapien
cagggccccagggctcagaggcagg

SEQ ID NO: 4482975 - DNA, 25 bp, Homo sapien
ctccaggctcctttccaggcctctt

SEQ ID NO: 4482976 - DNA, 25 bp, Homo sapien
caggcctcttctgctctccagggcc

SEQ ID NO: 4482977 - DNA, 25 bp, Homo sapien
agggccccagggctcagaggcaggg

SEQ ID NO: 4482978 - DNA, 25 bp, Homo sapien
tgggactcttctgtcagggccgggt

SEQ ID NO: 4482979 - DNA, 25 bp, Homo sapien
ggatgactaggtccagaagccagtg

SEQ ID NO: 4482980 - DNA, 25 bp, Homo sapien
tctccttgggcggtttggcagcccc

SEQ ID NO: 4482981 - DNA, 25 bp, Homo sapien
gaagccagtgataagtgccagccct

SEQ ID NO: 4482982 - DNA, 25 bp, Homo sapien
ccccaggcccagcaggctcctggga

SEQ ID NO: 4482983 - DNA, 25 bp, Homo sapien
ccaggcccagcaggctcctgggagg

SEQ ID NO: 4482984 - DNA, 25 bp, Homo sapien
ttggtgctgcccagccccccaggcc

SEQ ID NO: 4482985 - DNA, 25 bp, Homo sapien
aggcccagcaggctcctgggaggca

SEQ ID NO: 4482986 - DNA, 25 bp, Homo sapien
ttcctggccctagcggacctgggac

SEQ ID NO: 4482987 - DNA, 25 bp, Homo sapien
actttcctggccctagcggacctgg

SEQ ID NO: 4482988 - DNA, 25 bp, Homo sapien
ccctagcggacctgggaccctcact

SEQ ID NO: 4482989 - DNA, 25 bp, Homo sapien
gccctagcggacctgggaccctcac

SEQ ID NO: 4482990 - DNA, 25 bp, Homo sapien
gtcggtcagagccgaccgaccaggt

SEQ ID NO: 4482991 - DNA, 25 bp, Homo sapien
tgtcggtcagagccgaccgaccagg

SEQ ID NO: 4482992 - DNA, 25 bp, Homo sapien
gtcagagccgaccgaccaggtggtt

SEQ ID NO: 4482993 - DNA, 25 bp, Homo sapien
ccaggagaaggagggcttcgggctg

SEQ ID NO: 4482994 - DNA, 25 bp, Homo sapien
gagggcttcgggctgggacgtggag

SEQ ID NO: 4482995 - DNA, 25 bp, Homo sapien
gggcttcgggctgggacgtggagaa

SEQ ID NO: 4482996 - DNA, 25 bp, Homo sapien
agaaggagggcttcgggctgggacg

SEQ ID NO: 4482997 - DNA, 25 bp, Homo sapien
ctgcaggcgtccagagtagagctgc

SEQ ID NO: 4482998 - DNA, 25 bp, Homo sapien
gcagcaggaggtggtcagctgggcc

SEQ ID NO: 4482999 - DNA, 25 bp, Homo sapien
agcaggaggtggtcagctgggcctg

SEQ ID NO: 4483000 - DNA, 25 bp, Homo sapien
caggcgtccagagtagagctgcagc

SEQ ID NO: 4483001 - DNA, 25 bp, Homo sapien
ggcacaaatttggaataagaccctg

SEQ ID NO: 4483002 - DNA, 25 bp, Homo sapien
gcacaaatttggaataagaccctgg

SEQ ID NO: 4483003 - DNA, 25 bp, Homo sapien
cagtcagcaccacagtgtgggggac

SEQ ID NO: 4483004 - DNA, 25 bp, Homo sapien
gacggagtcactcagcagcatctct

SEQ ID NO: 4483005 - DNA, 25 bp, Homo sapien
ccagccctctacgacagtcagcacc

SEQ ID NO: 4483006 - DNA, 25 bp, Homo sapien
cctcctggcttaggacaagtctgac

SEQ ID NO: 4483007 - DNA, 25 bp, Homo sapien
ggcgttcagaaacccatcaactgac

SEQ ID NO: 4483008 - DNA, 25 bp, Homo sapien
aggaggcgttcagaaacccatcaac

SEQ ID NO: 4483009 - DNA, 25 bp, Homo sapien
cctgggactgcagaggaggcgttca

SEQ ID NO: 4483010 - DNA, 25 bp, Homo sapien
gctcctgggactgcagaggaggcgt

SEQ ID NO: 4483011 - DNA, 25 bp, Homo sapien
actcacgcacgtcgggagtcagagg

SEQ ID NO: 4483012 - DNA, 25 bp, Homo sapien
gcacagcactcacgcacgtcgggag

SEQ ID NO: 4483013 - DNA, 25 bp, Homo sapien
tcagcacagcactcacgcacgtcgg

SEQ ID NO: 4483014 - DNA, 25 bp, Homo sapien
cttcagcacagcactcacgcacgtc

SEQ ID NO: 4483015 - DNA, 25 bp, Homo sapien
ggggctacatcatcactggcagaaa

SEQ ID NO: 4483016 - DNA, 25 bp, Homo sapien
gaagcccggggctacatcatcactg

SEQ ID NO: 4483017 - DNA, 25 bp, Homo sapien
tagggttccttcgtcctgagcgccc

SEQ ID NO: 4483018 - DNA, 25 bp, Homo sapien
actctagggttccttcgtcctgagc

SEQ ID NO: 4483019 - DNA, 25 bp, Homo sapien
tctagctcgagctcgccgtggtgtg

SEQ ID NO: 4483020 - DNA, 25 bp, Homo sapien
tgtctagctcgagctcgccgtggtg

SEQ ID NO: 4483021 - DNA, 25 bp, Homo sapien
ctagctcgagctcgccgtggtgtgc

SEQ ID NO: 4483022 - DNA, 25 bp, Homo sapien
atgtctagctcgagctcgccgtggt

SEQ ID NO: 4483023 - DNA, 25 bp, Homo sapien
tggtcggaggtgtcctcagagccat

SEQ ID NO: 4483024 - DNA, 25 bp, Homo sapien
ggatgaagcgggccttgcggttcac

SEQ ID NO: 4483025 - DNA, 25 bp, Homo sapien
ctcagagccatcgtggatgaagcgg

SEQ ID NO: 4483026 - DNA, 25 bp, Homo sapien
tgtcctcagagccatcgtggatgaa

SEQ ID NO: 4483027 - DNA, 25 bp, Homo sapien
ggggtgggtcattgacagggttgac

SEQ ID NO: 4483028 - DNA, 25 bp, Homo sapien
ttcagggctccagtaacgcggaaca

SEQ ID NO: 4483029 - DNA, 25 bp, Homo sapien
tccatggtgtcgtcagtgtggtgct

SEQ ID NO: 4483030 - DNA, 25 bp, Homo sapien
aggctctccatggtgtcgtcagtgt

SEQ ID NO: 4483031 - DNA, 25 bp, Homo sapien
ttcagctccccgaacttcagggctc

SEQ ID NO: 4483032 - DNA, 25 bp, Homo sapien
ctcataatggaaggttgggaggctt

SEQ ID NO: 4483033 - DNA, 25 bp, Homo sapien
cctcctgatgggtgttctgagtgtg

SEQ ID NO: 4483034 - DNA, 25 bp, Homo sapien
tctgagtgtgcagtggctccagctg

SEQ ID NO: 4483035 - DNA, 25 bp, Homo sapien
gaggcttgggcctgcctcctccagg

SEQ ID NO: 4483036 - DNA, 25 bp, Homo sapien
tgactgcctccgaggcacgtgccat

SEQ ID NO: 4483037 - DNA, 25 bp, Homo sapien
ttgactgcctccgaggcacgtgcca

SEQ ID NO: 4483038 - DNA, 25 bp, Homo sapien
cttgactgcctccgaggcacgtgcc

SEQ ID NO: 4483039 - DNA, 25 bp, Homo sapien
gactgcctccgaggcacgtgccatg

SEQ ID NO: 4483040 - DNA, 25 bp, Homo sapien
atgtggatggagagggtacagagca

SEQ ID NO: 4483041 - DNA, 25 bp, Homo sapien
ctgggtcatcaccaatgtggatgga

SEQ ID NO: 4483042 - DNA, 25 bp, Homo sapien
caccaatgtggatggagagggtaca

SEQ ID NO: 4483043 - DNA, 25 bp, Homo sapien
catcaccaatgtggatggagagggt

SEQ ID NO: 4483044 - DNA, 25 bp, Homo sapien
cttgacaaagaggtaggcagcagag

SEQ ID NO: 4483045 - DNA, 25 bp, Homo sapien
aggcagcagagaggacactctcacc

SEQ ID NO: 4483046 - DNA, 25 bp, Homo sapien
ttgacaaagaggtaggcagcagaga

SEQ ID NO: 4483047 - DNA, 25 bp, Homo sapien
gaggtaggcagcagagaggacactc

SEQ ID NO: 4483048 - DNA, 25 bp, Homo sapien
tcgccctggcgggtagcaacaaatg

SEQ ID NO: 4483049 - DNA, 25 bp, Homo sapien
gggtagcaacaaatgggatatcatc

SEQ ID NO: 4483050 - DNA, 25 bp, Homo sapien
cctggcgggtagcaacaaatgggat

SEQ ID NO: 4483051 - DNA, 25 bp, Homo sapien
actgctctcgccctggcgggtagca

SEQ ID NO: 4483052 - DNA, 25 bp, Homo sapien
ggccacatggaagatccggctgatg

SEQ ID NO: 4483053 - DNA, 25 bp, Homo sapien
gggccacatggaagatccggctgat

SEQ ID NO: 4483054 - DNA, 25 bp, Homo sapien
aagggaggtccttgcgggtgagcac

SEQ ID NO: 4483055 - DNA, 25 bp, Homo sapien
caaagggaggtccttgcgggtgagc

SEQ ID NO: 4483056 - DNA, 25 bp, Homo sapien
gccaaagggaggtccttgcgggtga

SEQ ID NO: 4483057 - DNA, 25 bp, Homo sapien
tgccaaagggaggtccttgcgggtg

SEQ ID NO: 4483058 - DNA, 25 bp, Homo sapien
tcatctccattgcggatgtcgaggc

SEQ ID NO: 4483059 - DNA, 25 bp, Homo sapien
atctccattgcggatgtcgaggctg

SEQ ID NO: 4483060 - DNA, 25 bp, Homo sapien
tccattgcggatgtcgaggctggtg

SEQ ID NO: 4483061 - DNA, 25 bp, Homo sapien
tctccattgcggatgtcgaggctgg

SEQ ID NO: 4483062 - DNA, 25 bp, Homo sapien
ttgcacctccggtgggatgacagtg

SEQ ID NO: 4483063 - DNA, 25 bp, Homo sapien
ctccggtgggatgacagtgggcagc

SEQ ID NO: 4483064 - DNA, 25 bp, Homo sapien
ctgaagttttgcacctccggtggga

SEQ ID NO: 4483065 - DNA, 25 bp, Homo sapien
agttttgcacctccggtgggatgac

SEQ ID NO: 4483066 - DNA, 25 bp, Homo sapien
gaaggtgcttgaggtccatcctcct

SEQ ID NO: 4483067 - DNA, 25 bp, Homo sapien
gagaaggtgcttgaggtccatcctc

SEQ ID NO: 4483068 - DNA, 25 bp, Homo sapien
aggagaaggtgcttgaggtccatcc

SEQ ID NO: 4483069 - DNA, 25 bp, Homo sapien
aaggtgcttgaggtccatcctcctt

SEQ ID NO: 4483070 - DNA, 25 bp, Homo sapien
gggttggtcattgacaggcaggaca

SEQ ID NO: 4483071 - DNA, 25 bp, Homo sapien
acagagccttctggcattcctgggc

SEQ ID NO: 4483072 - DNA, 25 bp, Homo sapien
aaacagagccttctggcattcctgg

SEQ ID NO: 4483073 - DNA, 25 bp, Homo sapien
ggaaaacagagccttctggcattcc

SEQ ID NO: 4483074 - DNA, 25 bp, Homo sapien
gaaaacagagccttctggcattcct

SEQ ID NO: 4483075 - DNA, 25 bp, Homo sapien
gtggcatcgaggctggcgccactct

SEQ ID NO: 4483076 - DNA, 25 bp, Homo sapien
tcgggtggcatcgaggctggcgcca

SEQ ID NO: 4483077 - DNA, 25 bp, Homo sapien
aggccctcgggtggcatcgaggctg

SEQ ID NO: 4483078 - DNA, 25 bp, Homo sapien
cctcgggtggcatcgaggctggcgc

SEQ ID NO: 4483079 - DNA, 25 bp, Homo sapien
ccgttgctgggctgctcgatggtgt

SEQ ID NO: 4483080 - DNA, 25 bp, Homo sapien
ctcagacccagagtcgccgtccgtg

SEQ ID NO: 4483081 - DNA, 25 bp, Homo sapien
tcgatggtgtagaccagatcctcag

SEQ ID NO: 4483082 - DNA, 25 bp, Homo sapien
gagtcgccgtccgtgctcctcagag

SEQ ID NO: 4483083 - DNA, 25 bp, Homo sapien
ccggaggaagtgtgcttgtcatcag

SEQ ID NO: 4483084 - DNA, 25 bp, Homo sapien
agtgtccggaggaagtgtgcttgtc

SEQ ID NO: 4483085 - DNA, 25 bp, Homo sapien
tccggaggaagtgtgcttgtcatca

SEQ ID NO: 4483086 - DNA, 25 bp, Homo sapien
tgtccggaggaagtgtgcttgtcat

SEQ ID NO: 4483087 - DNA, 25 bp, Homo sapien
ggggtcggtgcctgcgctggagctg

SEQ ID NO: 4483088 - DNA, 25 bp, Homo sapien
agctgggggtcggtgcctgcgctgg

SEQ ID NO: 4483089 - DNA, 25 bp, Homo sapien
tcggtgcctgcgctggagctggctc

SEQ ID NO: 4483090 - DNA, 25 bp, Homo sapien
gggtcggtgcctgcgctggagctgg

SEQ ID NO: 4483091 - DNA, 25 bp, Homo sapien
tgtcaagacaatacccagtcctgcc

SEQ ID NO: 4483092 - DNA, 25 bp, Homo sapien
atggagacggccaattctggtggcc

SEQ ID NO: 4483093 - DNA, 25 bp, Homo sapien
ggtgcccattcaatctagtccttca

SEQ ID NO: 4483094 - DNA, 25 bp, Homo sapien
tgcccagttcagtgttgtgggacag

SEQ ID NO: 4483095 - DNA, 25 bp, Homo sapien
ctcgtgcctggcgtgctcagaggac

SEQ ID NO: 4483096 - DNA, 25 bp, Homo sapien
tcgtgcctggcgtgctcagaggacc

SEQ ID NO: 4483097 - DNA, 25 bp, Homo sapien
gtgcctggcgtgctcagaggaccac

SEQ ID NO: 4483098 - DNA, 25 bp, Homo sapien
tgcctggcgtgctcagaggaccacc

SEQ ID NO: 4483099 - DNA, 25 bp, Homo sapien
agcaggcggtgaggcatgtacctac

SEQ ID NO: 4483100 - DNA, 25 bp, Homo sapien
caccgttcatgcagcaggcggtgag

SEQ ID NO: 4483101 - DNA, 25 bp, Homo sapien
acaccgttcatgcagcaggcggtga

SEQ ID NO: 4483102 - DNA, 25 bp, Homo sapien
tgcagcaggcggtgaggcatgtacc

SEQ ID NO: 4483103 - DNA, 25 bp, Homo sapien
taatgtaactatgcaagtgtgttta

SEQ ID NO: 4483104 - DNA, 25 bp, Homo sapien
tggagtctccatccctaccatgttc

SEQ ID NO: 4483105 - DNA, 25 bp, Homo sapien
gcaggtctctgtcagcataagccca

SEQ ID NO: 4483106 - DNA, 25 bp, Homo sapien
attgtaatgtaactatgcaagtgtg

SEQ ID NO: 4483107 - DNA, 25 bp, Homo sapien
ttccttgttgggttgtctgaggacc

SEQ ID NO: 4483108 - DNA, 25 bp, Homo sapien
cacctccccacaggagatggaggag

SEQ ID NO: 4483109 - DNA, 25 bp, Homo sapien
ggccacctccccacaggagatggag

SEQ ID NO: 4483110 - DNA, 25 bp, Homo sapien
ggaggagaacatctggacagtgagg

SEQ ID NO: 4483111 - DNA, 25 bp, Homo sapien
atctcggcctccctgtggcaagagc

SEQ ID NO: 4483112 - DNA, 25 bp, Homo sapien
gcattctgggggcgtgcctcctgct

SEQ ID NO: 4483113 - DNA, 25 bp, Homo sapien
cattctgggggcgtgcctcctgctg

SEQ ID NO: 4483114 - DNA, 25 bp, Homo sapien
cggcctccctgtggcaagagctctg

SEQ ID NO: 4483115 - DNA, 25 bp, Homo sapien
ttttcttctctagtaagtttggaca

SEQ ID NO: 4483116 - DNA, 25 bp, Homo sapien
tttcttctctagtaagtttggacat

SEQ ID NO: 4483117 - DNA, 25 bp, Homo sapien
atttcctgttgaatgcaatttgaaa

SEQ ID NO: 4483118 - DNA, 25 bp, Homo sapien
gcaatttgaaaatacagccagtgat

SEQ ID NO: 4483119 - DNA, 25 bp, Homo sapien
caccaccacttggtcaaagttctgc

SEQ ID NO: 4483120 - DNA, 25 bp, Homo sapien
cacagcatagctggagataaaggca

SEQ ID NO: 4483121 - DNA, 25 bp, Homo sapien
cctaatgccttaattcggtcctcag

SEQ ID NO: 4483122 - DNA, 25 bp, Homo sapien
taatgctattcgcttaacagtggaa

SEQ ID NO: 4483123 - DNA, 25 bp, Homo sapien
tcagttaaactgacggtggatgctg

SEQ ID NO: 4483124 - DNA, 25 bp, Homo sapien
aaaatgtcttttgccacagtccgca

SEQ ID NO: 4483125 - DNA, 25 bp, Homo sapien
tggggtcccggaaccaatatcctga

SEQ ID NO: 4483126 - DNA, 25 bp, Homo sapien
ccaatatcctgaagttactaaggga

SEQ ID NO: 4483127 - DNA, 25 bp, Homo sapien
ctggggtcccggaaccaatatcctg

SEQ ID NO: 4483128 - DNA, 25 bp, Homo sapien
atcctgaagttactaagggatgact

SEQ ID NO: 4483129 - DNA, 25 bp, Homo sapien
gcgtaggcccacaacctggagttca

SEQ ID NO: 4483130 - DNA, 25 bp, Homo sapien
aactggttacagctgggtcacatgc

SEQ ID NO: 4483131 - DNA, 25 bp, Homo sapien
gactatggagcagatccgtgccgac

SEQ ID NO: 4483132 - DNA, 25 bp, Homo sapien
ttgggaaagccagacacagtacatt

SEQ ID NO: 4483133 - DNA, 25 bp, Homo sapien
gacttgtttggattggccacctggt

SEQ ID NO: 4483134 - DNA, 25 bp, Homo sapien
cttgtttggattggccacctggtcc

SEQ ID NO: 4483135 - DNA, 25 bp, Homo sapien
acttgtttggattggccacctggtc

SEQ ID NO: 4483136 - DNA, 25 bp, Homo sapien
ggacttgtttggattggccacctgg

SEQ ID NO: 4483137 - DNA, 25 bp, Homo sapien
caaagcgaagttcaaggttgctccc

SEQ ID NO: 4483138 - DNA, 25 bp, Homo sapien
tactggagagtcctagagaagccat

SEQ ID NO: 4483139 - DNA, 25 bp, Homo sapien
gggacttcgccccaaggaatgctaa

SEQ ID NO: 4483140 - DNA, 25 bp, Homo sapien
catgacctctggtggtgctacaacc

SEQ ID NO: 4483141 - DNA, 25 bp, Homo sapien
gtgtggcgaagacaaggctgcccag

SEQ ID NO: 4483142 - DNA, 25 bp, Homo sapien
agccccaacaccacgaggcagtgag

SEQ ID NO: 4483143 - DNA, 25 bp, Homo sapien
gcggtgtggcgaagacaaggctgcc

SEQ ID NO: 4483144 - DNA, 25 bp, Homo sapien
ccaacaccacgaggcagtgagcatg

SEQ ID NO: 4483145 - DNA, 25 bp, Homo sapien
ggtgccatctgtatccaccacatac

SEQ ID NO: 4483146 - DNA, 25 bp, Homo sapien
aggtgccatctgtatccaccacata

SEQ ID NO: 4483147 - DNA, 25 bp, Homo sapien
gcagcgatggcggggaaactggcag

SEQ ID NO: 4483148 - DNA, 25 bp, Homo sapien
agcgatggcggggaaactggcagac

SEQ ID NO: 4483149 - DNA, 25 bp, Homo sapien
cggaaggaccgccaagccgtcatgt

SEQ ID NO: 4483150 - DNA, 25 bp, Homo sapien
aaggaccgccaagccgtcatgtggc

SEQ ID NO: 4483151 - DNA, 25 bp, Homo sapien
ccaggcctctgcacacgttgtcagg

SEQ ID NO: 4483152 - DNA, 25 bp, Homo sapien
actccagctggctaaacaaccccaa

SEQ ID NO: 4483153 - DNA, 25 bp, Homo sapien
ctagagatgggatgggaggatgcag

SEQ ID NO: 4483154 - DNA, 25 bp, Homo sapien
tagagatgggatgggaggatgcagg

SEQ ID NO: 4483155 - DNA, 25 bp, Homo sapien
gatgggaggatgcagggggcgcagc

SEQ ID NO: 4483156 - DNA, 25 bp, Homo sapien
tgggatgggaggatgcagggggcgc

SEQ ID NO: 4483157 - DNA, 25 bp, Homo sapien
gctcacagcataggggatgccaggc

SEQ ID NO: 4483158 - DNA, 25 bp, Homo sapien
cagcaccaaggggaagtcgatgatg

SEQ ID NO: 4483159 - DNA, 25 bp, Homo sapien
actggtggctcacagcataggggat

SEQ ID NO: 4483160 - DNA, 25 bp, Homo sapien
gcagcaccaaggggaagtcgatgat

SEQ ID NO: 4483161 - DNA, 25 bp, Homo sapien
ccgctcggcgctctgtacgcccatg

SEQ ID NO: 4483162 - DNA, 25 bp, Homo sapien
cggcgctctgtacgcccatgccaca

SEQ ID NO: 4483163 - DNA, 25 bp, Homo sapien
gctcggcgctctgtacgcccatgcc

SEQ ID NO: 4483164 - DNA, 25 bp, Homo sapien
ctcggcgctctgtacgcccatgcca

SEQ ID NO: 4483165 - DNA, 25 bp, Homo sapien
tcaaagtggctgcactggacgtggc

SEQ ID NO: 4483166 - DNA, 25 bp, Homo sapien
gtagagcatagcgtcaaagtggctg

SEQ ID NO: 4483167 - DNA, 25 bp, Homo sapien
gagcatagcgtcaaagtggctgcac

SEQ ID NO: 4483168 - DNA, 25 bp, Homo sapien
tagcgtcaaagtggctgcactggac

SEQ ID NO: 4483169 - DNA, 25 bp, Homo sapien
gctccggctgggctgatagctatct

SEQ ID NO: 4483170 - DNA, 25 bp, Homo sapien
gctgatagctatctgcaaggctgca

SEQ ID NO: 4483171 - DNA, 25 bp, Homo sapien
tcccaagtagcaccaacatgctgga

SEQ ID NO: 4483172 - DNA, 25 bp, Homo sapien
ggctcccaagtagcaccaacatgct

SEQ ID NO: 4483173 - DNA, 25 bp, Homo sapien
ctgcaacacacgaggaggggagggc

SEQ ID NO: 4483174 - DNA, 25 bp, Homo sapien
agggccctggtgctggcggccagcc

SEQ ID NO: 4483175 - DNA, 25 bp, Homo sapien
caacacacgaggaggggagggccct

SEQ ID NO: 4483176 - DNA, 25 bp, Homo sapien
ggccctggtgctggcggccagccct

SEQ ID NO: 4483177 - DNA, 25 bp, Homo sapien
caatctcgaagtcacagcccacgtt

SEQ ID NO: 4483178 - DNA, 25 bp, Homo sapien
accggagtcaatctcgaagtcacag

SEQ ID NO: 4483179 - DNA, 25 bp, Homo sapien
tagcaccggagtcaatctcgaagtc

SEQ ID NO: 4483180 - DNA, 25 bp, Homo sapien
tcctccatagcaccggagtcaatct

SEQ ID NO: 4483181 - DNA, 25 bp, Homo sapien
tcccagttgcccctgcgtgcgtatg

SEQ ID NO: 4483182 - DNA, 25 bp, Homo sapien
aggttctcccagttgcccctgcgtg

SEQ ID NO: 4483183 - DNA, 25 bp, Homo sapien
ccagttgcccctgcgtgcgtatgtg

SEQ ID NO: 4483184 - DNA, 25 bp, Homo sapien
tctcccagttgcccctgcgtgcgta

SEQ ID NO: 4483185 - DNA, 25 bp, Homo sapien
tggtgtgctcgtagtgtaccccggg

SEQ ID NO: 4483186 - DNA, 25 bp, Homo sapien
gatggtgtgctcgtagtgtaccccg

SEQ ID NO: 4483187 - DNA, 25 bp, Homo sapien
tgctcgtagtgtaccccggggttgc

SEQ ID NO: 4483188 - DNA, 25 bp, Homo sapien
atggtgtgctcgtagtgtaccccgg

SEQ ID NO: 4483189 - DNA, 25 bp, Homo sapien
gacaaagaacccctgtctgttccag

SEQ ID NO: 4483190 - DNA, 25 bp, Homo sapien
cccactgacgctcccttgcaactag

SEQ ID NO: 4483191 - DNA, 25 bp, Homo sapien
ctggggactttgcacagccacgctc

SEQ ID NO: 4483192 - DNA, 25 bp, Homo sapien
cctggggactttgcacagccacgct

SEQ ID NO: 4483193 - DNA, 25 bp, Homo sapien
ggggactttgcacagccacgctcct

SEQ ID NO: 4483194 - DNA, 25 bp, Homo sapien
cacgctcctcaccttggacactcac

SEQ ID NO: 4483195 - DNA, 25 bp, Homo sapien
tatgtagcctcccctctggctgtgc

SEQ ID NO: 4483196 - DNA, 25 bp, Homo sapien
ctggttctcatacacccccttttct

SEQ ID NO: 4483197 - DNA, 25 bp, Homo sapien
catacacccccttttctcctatgta

SEQ ID NO: 4483198 - DNA, 25 bp, Homo sapien
cttttctcctatgtagcctcccctc

SEQ ID NO: 4483199 - DNA, 25 bp, Homo sapien
acaggtcctgcctgccgctctgagc

SEQ ID NO: 4483200 - DNA, 25 bp, Homo sapien
aggtcctgcctgccgctctgagcag

SEQ ID NO: 4483201 - DNA, 25 bp, Homo sapien
ccacaggtcctgcctgccgctctga

SEQ ID NO: 4483202 - DNA, 25 bp, Homo sapien
gtccacaggtcctgcctgccgctct

SEQ ID NO: 4483203 - DNA, 25 bp, Homo sapien
aggggcctgtggcagacccaggaca

SEQ ID NO: 4483204 - DNA, 25 bp, Homo sapien
ccggggtctccagggacccagatgt

SEQ ID NO: 4483205 - DNA, 25 bp, Homo sapien
ggttagggcttcagccttgggaaga

SEQ ID NO: 4483206 - DNA, 25 bp, Homo sapien
gggaagagaatgaaagcccagctcc

SEQ ID NO: 4483207 - DNA, 25 bp, Homo sapien
gaggacatttcggcgctgagtgccc

SEQ ID NO: 4483208 - DNA, 25 bp, Homo sapien
gagtgccctccccacatgtcactga

SEQ ID NO: 4483209 - DNA, 25 bp, Homo sapien
gacatttcggcgctgagtgccctcc

SEQ ID NO: 4483210 - DNA, 25 bp, Homo sapien
agtgccctccccacatgtcactgag

SEQ ID NO: 4483211 - DNA, 25 bp, Homo sapien
ttgctagctggctgctgggcctcgt

SEQ ID NO: 4483212 - DNA, 25 bp, Homo sapien
tttgctagctggctgctgggcctcg

SEQ ID NO: 4483213 - DNA, 25 bp, Homo sapien
tgctagctggctgctgggcctcgtc

SEQ ID NO: 4483214 - DNA, 25 bp, Homo sapien
ctagctggctgctgggcctcgtcac

SEQ ID NO: 4483215 - DNA, 25 bp, Homo sapien
gcgggatgaagtcagcctcattgaa

SEQ ID NO: 4483216 - DNA, 25 bp, Homo sapien
gtcagcctcattgaagagctcgtgg

SEQ ID NO: 4483217 - DNA, 25 bp, Homo sapien
gatgaagtcagcctcattgaagagc

SEQ ID NO: 4483218 - DNA, 25 bp, Homo sapien
tggcgcgggatgaagtcagcctcat

SEQ ID NO: 4483219 - DNA, 25 bp, Homo sapien
ctcctcctcaatggcgttgcccatg

SEQ ID NO: 4483220 - DNA, 25 bp, Homo sapien
tcctcctcaatggcgttgcccatgg

SEQ ID NO: 4483221 - DNA, 25 bp, Homo sapien
tgtctgcaggccatcggtagaaacc

SEQ ID NO: 4483222 - DNA, 25 bp, Homo sapien
gcaagtgtctgcaggccatcggtag

SEQ ID NO: 4483223 - DNA, 25 bp, Homo sapien
gggatgggaagcagccggcctggct

SEQ ID NO: 4483224 - DNA, 25 bp, Homo sapien
tcattttggctatcaggggcagcaa

SEQ ID NO: 4483225 - DNA, 25 bp, Homo sapien
ggtgctccacggccctcgggttcat

SEQ ID NO: 4483226 - DNA, 25 bp, Homo sapien
ggccctcgggttcatcatccttgaa

SEQ ID NO: 4483227 - DNA, 25 bp, Homo sapien
tgggtgctgccgacaggacaaaggg

SEQ ID NO: 4483228 - DNA, 25 bp, Homo sapien
ggagtgggtgctgccgacaggacaa

SEQ ID NO: 4483229 - DNA, 25 bp, Homo sapien
cagtttcccgcttgccagctggcgt

SEQ ID NO: 4483230 - DNA, 25 bp, Homo sapien
cgcttgccagctggcgttcctgaca

SEQ ID NO: 4483231 - DNA, 25 bp, Homo sapien
gctcccaggccactatccctcctgt

SEQ ID NO: 4483232 - DNA, 25 bp, Homo sapien
tccagggaactgtccctgaccttca

SEQ ID NO: 4483233 - DNA, 25 bp, Homo sapien
gggaacagacccgtgaaagccaggc

SEQ ID NO: 4483234 - DNA, 25 bp, Homo sapien
aacagacccgtgaaagccaggcaga

SEQ ID NO: 4483235 - DNA, 25 bp, Homo sapien
tgcggggaacagacccgtgaaagcc

SEQ ID NO: 4483236 - DNA, 25 bp, Homo sapien
gcggggaacagacccgtgaaagcca

SEQ ID NO: 4483237 - DNA, 25 bp, Homo sapien
agaccacacccaggccgcaggtggt

SEQ ID NO: 4483238 - DNA, 25 bp, Homo sapien
gcaccggcctccagaccacacccag

SEQ ID NO: 4483239 - DNA, 25 bp, Homo sapien
gccagagctacagcgcaccggcctc

SEQ ID NO: 4483240 - DNA, 25 bp, Homo sapien
acacccaggccgcaggtggtagagc

SEQ ID NO: 4483241 - DNA, 25 bp, Homo sapien
tccagttgcctgagtgccaggtggc

SEQ ID NO: 4483242 - DNA, 25 bp, Homo sapien
ccagttgcctgagtgccaggtggca

SEQ ID NO: 4483243 - DNA, 25 bp, Homo sapien
cagttgcctgagtgccaggtggcac

SEQ ID NO: 4483244 - DNA, 25 bp, Homo sapien
agttgcctgagtgccaggtggcaca

SEQ ID NO: 4483245 - DNA, 25 bp, Homo sapien
cacgtgcaggcccacgggtgtgacc

SEQ ID NO: 4483246 - DNA, 25 bp, Homo sapien
ccacgtgcaggcccacgggtgtgac

SEQ ID NO: 4483247 - DNA, 25 bp, Homo sapien
ctggggaccaagacacccacgtgca

SEQ ID NO: 4483248 - DNA, 25 bp, Homo sapien
gggaccaagacacccacgtgcaggc

SEQ ID NO: 4483249 - DNA, 25 bp, Homo sapien
cagtgtccagaggtcccgtgtatcc

SEQ ID NO: 4483250 - DNA, 25 bp, Homo sapien
gtgtccagaggtcccgtgtatccac

SEQ ID NO: 4483251 - DNA, 25 bp, Homo sapien
gcagtgtccagaggtcccgtgtatc

SEQ ID NO: 4483252 - DNA, 25 bp, Homo sapien
gtccagaggtcccgtgtatccacac

SEQ ID NO: 4483253 - DNA, 25 bp, Homo sapien
tccgggcaagtcaccagatgctgct

SEQ ID NO: 4483254 - DNA, 25 bp, Homo sapien
ccgggcaagtcaccagatgctgctg

SEQ ID NO: 4483255 - DNA, 25 bp, Homo sapien
acacggccgggagctctcaggccag

SEQ ID NO: 4483256 - DNA, 25 bp, Homo sapien
gttgacacacttgactaggcgccgc

SEQ ID NO: 4483257 - DNA, 25 bp, Homo sapien
gccgctggacgccactgccacaggg

SEQ ID NO: 4483258 - DNA, 25 bp, Homo sapien
gactaggcgccgctggacgccactg

SEQ ID NO: 4483259 - DNA, 25 bp, Homo sapien
cagggagcctggggtcaggggactc

SEQ ID NO: 4483260 - DNA, 25 bp, Homo sapien
ctcacttcagcagggagcctggggt

SEQ ID NO: 4483261 - DNA, 25 bp, Homo sapien
gggagcctggggtcaggggactcac

SEQ ID NO: 4483262 - DNA, 25 bp, Homo sapien
agcagggagcctggggtcaggggac

SEQ ID NO: 4483263 - DNA, 25 bp, Homo sapien
gaaggacaggtggtcccgcttatag

SEQ ID NO: 4483264 - DNA, 25 bp, Homo sapien
aaggacaggtggtcccgcttatagc

SEQ ID NO: 4483265 - DNA, 25 bp, Homo sapien
agcccactaggtgcagcgtctcgca

SEQ ID NO: 4483266 - DNA, 25 bp, Homo sapien
agcagcccactaggtgcagcgtctc

SEQ ID NO: 4483267 - DNA, 25 bp, Homo sapien
cagcagcccactaggtgcagcgtct

SEQ ID NO: 4483268 - DNA, 25 bp, Homo sapien
gcagcccactaggtgcagcgtctcg

SEQ ID NO: 4483269 - DNA, 25 bp, Homo sapien
gagtcaacagatacaacaggcccag

SEQ ID NO: 4483270 - DNA, 25 bp, Homo sapien
aggctgccctctctgtgcaaagctg

SEQ ID NO: 4483271 - DNA, 25 bp, Homo sapien
tgggccagttacttcctctcagagc

SEQ ID NO: 4483272 - DNA, 25 bp, Homo sapien
gacgccatgctctcacggacttgtt

SEQ ID NO: 4483273 - DNA, 25 bp, Homo sapien
caccaagtacgatgggatgggattc

SEQ ID NO: 4483274 - DNA, 25 bp, Homo sapien
cagtggaccgtcatattgcaaagca

SEQ ID NO: 4483275 - DNA, 25 bp, Homo sapien
tgaacgctcttggacagctgaaaac

SEQ ID NO: 4483276 - DNA, 25 bp, Homo sapien
gacacagcagtttctgggaactcag

SEQ ID NO: 4483277 - DNA, 25 bp, Homo sapien
aatgagtcctgggacacagacgtcc

SEQ ID NO: 4483278 - DNA, 25 bp, Homo sapien
tgggtctgacagtcatcgccaggac

SEQ ID NO: 4483279 - DNA, 25 bp, Homo sapien
ttgaaaattggagccttgacctggg

SEQ ID NO: 4483280 - DNA, 25 bp, Homo sapien
gacacttgtcacattgccaactggg

SEQ ID NO: 4483281 - DNA, 25 bp, Homo sapien
attctttaccttagccgggcacagt

SEQ ID NO: 4483282 - DNA, 25 bp, Homo sapien
gtggaggcccctccctagtcttcta

SEQ ID NO: 4483283 - DNA, 25 bp, Homo sapien
tgcttgaacttgcaagactaccagg

SEQ ID NO: 4483284 - DNA, 25 bp, Homo sapien
tagagaaagtacaggcccttagata

SEQ ID NO: 4483285 - DNA, 25 bp, Homo sapien
aatgtgacctgaattaaacctgcgg

SEQ ID NO: 4483286 - DNA, 25 bp, Homo sapien
actggtgtgttagctcaggctctca

SEQ ID NO: 4483287 - DNA, 25 bp, Homo sapien
cgtcctgcaggcctaacattgtgtt

SEQ ID NO: 4483288 - DNA, 25 bp, Homo sapien
caggctctcaagaagcaatgtcagg

SEQ ID NO: 4483289 - DNA, 25 bp, Homo sapien
gaatgataggcatgctagggaccct

SEQ ID NO: 4483290 - DNA, 25 bp, Homo sapien
cacccattggatatgtgaggcccag

SEQ ID NO: 4483291 - DNA, 25 bp, Homo sapien
gctggaatatgtacatggtccccat

SEQ ID NO: 4483292 - DNA, 25 bp, Homo sapien
cctttcaggcgatgcattgagtgag

SEQ ID NO: 4483293 - DNA, 25 bp, Homo sapien
taaaacagaataccataggctgagt

SEQ ID NO: 4483294 - DNA, 25 bp, Homo sapien
gagagcctttgttttgtatagtccc

SEQ ID NO: 4483295 - DNA, 25 bp, Homo sapien
gcaccaccacgcatatttagtagag

SEQ ID NO: 4483296 - DNA, 25 bp, Homo sapien
taagaaggggaatctagttatgctt

SEQ ID NO: 4483297 - DNA, 25 bp, Homo sapien
ctgaaagttctacagtaagaatatt

SEQ ID NO: 4483298 - DNA, 25 bp, Homo sapien
attgtttcttagatgtttggtttct

SEQ ID NO: 4483299 - DNA, 25 bp, Homo sapien
tttcctgtcccggagccgtaatgtg

SEQ ID NO: 4483300 - DNA, 25 bp, Homo sapien
agcaggcacccggatgtttggtgaa

SEQ ID NO: 4483301 - DNA, 25 bp, Homo sapien
tcccggagccgtaatgtggtacttg

SEQ ID NO: 4483302 - DNA, 25 bp, Homo sapien
tcagccccagttcgtagcagagggc

SEQ ID NO: 4483303 - DNA, 25 bp, Homo sapien
gacttgttaaccagattttgcccat

SEQ ID NO: 4483304 - DNA, 25 bp, Homo sapien
tggctcccgagcataaatagaaaca

SEQ ID NO: 4483305 - DNA, 25 bp, Homo sapien
tatgccctagtgagtatgtgccagc

SEQ ID NO: 4483306 - DNA, 25 bp, Homo sapien
aaggctcccagggtgcttagctcac

SEQ ID NO: 4483307 - DNA, 25 bp, Homo sapien
accgcagccgctggttcgtgttcga

SEQ ID NO: 4483308 - DNA, 25 bp, Homo sapien
gcgcgccgctgctacctttactatt

SEQ ID NO: 4483309 - DNA, 25 bp, Homo sapien
tatctgcagaagctgtcgggcaagg

SEQ ID NO: 4483310 - DNA, 25 bp, Homo sapien
ttggacatcgcggacgcctgcttca

SEQ ID NO: 4483311 - DNA, 25 bp, Homo sapien
tccagagaagtcaccaatgttatcg

SEQ ID NO: 4483312 - DNA, 25 bp, Homo sapien
tttggtccctcaaggccactgagtg

SEQ ID NO: 4483313 - DNA, 25 bp, Homo sapien
cattctcgaaagtggaatcgctgaa

SEQ ID NO: 4483314 - DNA, 25 bp, Homo sapien
aaaaaccagcggagagggctatggc

SEQ ID NO: 4483315 - DNA, 25 bp, Homo sapien
caggctgagctgctttaggctgtcc

SEQ ID NO: 4483316 - DNA, 25 bp, Homo sapien
ctgagctgctttaggctgtcctcca

SEQ ID NO: 4483317 - DNA, 25 bp, Homo sapien
tcaggatctctccccaggctgagct

SEQ ID NO: 4483318 - DNA, 25 bp, Homo sapien
ggctgagctgctttaggctgtcctc

SEQ ID NO: 4483319 - DNA, 25 bp, Homo sapien
aggcagggcaccgttctgcagaatg

SEQ ID NO: 4483320 - DNA, 25 bp, Homo sapien
agggcaccgttctgcagaatgaagg

SEQ ID NO: 4483321 - DNA, 25 bp, Homo sapien
ggtgatgaatccatgaaaccaggga

SEQ ID NO: 4483322 - DNA, 25 bp, Homo sapien
gggtgatgaatccatgaaaccaggg

SEQ ID NO: 4483323 - DNA, 25 bp, Homo sapien
tttgtccctgagtagctgctccgtc

SEQ ID NO: 4483324 - DNA, 25 bp, Homo sapien
ctgaggcggataaggaaggaaccaa

SEQ ID NO: 4483325 - DNA, 25 bp, Homo sapien
gtccctgagtagctgctccgtctgc

SEQ ID NO: 4483326 - DNA, 25 bp, Homo sapien
taaggaaggaaccaagagctttgtc

SEQ ID NO: 4483327 - DNA, 25 bp, Homo sapien
taggacaagatgtagccagtggctc

SEQ ID NO: 4483328 - DNA, 25 bp, Homo sapien
ctgtaggacaagatgtagccagtgg

SEQ ID NO: 4483329 - DNA, 25 bp, Homo sapien
aggacaagatgtagccagtggctcg

SEQ ID NO: 4483330 - DNA, 25 bp, Homo sapien
caagatgtagccagtggctcggtca

SEQ ID NO: 4483331 - DNA, 25 bp, Homo sapien
taacgccggtttcgaagctggttga

SEQ ID NO: 4483332 - DNA, 25 bp, Homo sapien
aaaatgtcggcagcgatcactgccc

SEQ ID NO: 4483333 - DNA, 25 bp, Homo sapien
tctcctgagatgatgtaacgccggt

SEQ ID NO: 4483334 - DNA, 25 bp, Homo sapien
tctttgaagggctcgagctgtgcct

SEQ ID NO: 4483335 - DNA, 25 bp, Homo sapien
gatacggcaggtatgtggtcacaca

SEQ ID NO: 4483336 - DNA, 25 bp, Homo sapien
caatagggatcatgaccccacacca

SEQ ID NO: 4483337 - DNA, 25 bp, Homo sapien
attgccacagtctccctttttccaa

SEQ ID NO: 4483338 - DNA, 25 bp, Homo sapien
tgcctgcctgagactgctggtaaga

SEQ ID NO: 4483339 - DNA, 25 bp, Homo sapien
ggcatcatacagatcattgtcctct

SEQ ID NO: 4483340 - DNA, 25 bp, Homo sapien
gaccactgtgaggaatgccgtggca

SEQ ID NO: 4483341 - DNA, 25 bp, Homo sapien
ggttccggggactcacatccaggct

SEQ ID NO: 4483342 - DNA, 25 bp, Homo sapien
gaggccccgggtgatggcatcatac

SEQ ID NO: 4483343 - DNA, 25 bp, Homo sapien
tgcccaagcctagccgtgcctggtt

SEQ ID NO: 4483344 - DNA, 25 bp, Homo sapien
cagggatcccatggcatcagaacat

SEQ ID NO: 4483345 - DNA, 25 bp, Homo sapien
tgagagtctcctttgggcctccctg

SEQ ID NO: 4483346 - DNA, 25 bp, Homo sapien
ggtctgcatagatgatgtcactggg

SEQ ID NO: 4483347 - DNA, 25 bp, Homo sapien
ccagcaagctgggatctgctcatag

SEQ ID NO: 4483348 - DNA, 25 bp, Homo sapien
catgggctatatgtgggactggccc

SEQ ID NO: 4483349 - DNA, 25 bp, Homo sapien
gatcctcttgtagccatggacccat

SEQ ID NO: 4483350 - DNA, 25 bp, Homo sapien
tgttcataggtgttcccaggctctg

SEQ ID NO: 4483351 - DNA, 25 bp, Homo sapien
cagagagtgaggatctcaaaggctg

SEQ ID NO: 4483352 - DNA, 25 bp, Homo sapien
gggcagccgcagggaaagagcagac

SEQ ID NO: 4483353 - DNA, 25 bp, Homo sapien
gtggggtgaagctgtacccaggccc

SEQ ID NO: 4483354 - DNA, 25 bp, Homo sapien
ggcctcaggatgcactggtgtccga

SEQ ID NO: 4483355 - DNA, 25 bp, Homo sapien
caatttcagatgcagggttcaccct

SEQ ID NO: 4483356 - DNA, 25 bp, Homo sapien
tttcagatgcagggttcaccctctt

SEQ ID NO: 4483357 - DNA, 25 bp, Homo sapien
aatttcagatgcagggttcaccctc

SEQ ID NO: 4483358 - DNA, 25 bp, Homo sapien
ctttagctccccaatttcagatgca

SEQ ID NO: 4483359 - DNA, 25 bp, Homo sapien
aaggaaggaggagatactggggcct

SEQ ID NO: 4483360 - DNA, 25 bp, Homo sapien
gcaaggaaggaggagatactggggc

SEQ ID NO: 4483361 - DNA, 25 bp, Homo sapien
ggaaggaggagatactggggcctgg

SEQ ID NO: 4483362 - DNA, 25 bp, Homo sapien
ctgcaaggaaggaggagatactggg

SEQ ID NO: 4483363 - DNA, 25 bp, Homo sapien
gtgaagaagagcctccgaagcttgt

SEQ ID NO: 4483364 - DNA, 25 bp, Homo sapien
tttgtgcttcctgtacgtgaagaag

SEQ ID NO: 4483365 - DNA, 25 bp, Homo sapien
gtacgtgaagaagagcctccgaagc

SEQ ID NO: 4483366 - DNA, 25 bp, Homo sapien
agaagagcctccgaagcttgtcagg

SEQ ID NO: 4483367 - DNA, 25 bp, Homo sapien
gaaagcaggacatagccaggagctg

SEQ ID NO: 4483368 - DNA, 25 bp, Homo sapien
tcacttggccagttagaaaggtgtc

SEQ ID NO: 4483369 - DNA, 25 bp, Homo sapien
tgagctgaggcctttgcgataaccc

SEQ ID NO: 4483370 - DNA, 25 bp, Homo sapien
tgagtctcaagatccaaagggtgcc

SEQ ID NO: 4483371 - DNA, 25 bp, Homo sapien
ggaatcctcactggtgtgctgtcca

SEQ ID NO: 4483372 - DNA, 25 bp, Homo sapien
tctgggtcatgagtaccaccctgcc

SEQ ID NO: 4483373 - DNA, 25 bp, Homo sapien
cccaacaccgtggaatcctcactgg

SEQ ID NO: 4483374 - DNA, 25 bp, Homo sapien
cagggttttaacgagctatgcaatc

SEQ ID NO: 4483375 - DNA, 25 bp, Homo sapien
tttccacatccggatctgaggacac

SEQ ID NO: 4483376 - DNA, 25 bp, Homo sapien
tctgaggacactgccgaggctgtag

SEQ ID NO: 4483377 - DNA, 25 bp, Homo sapien
gccctgcagtcacatgggtgtggcc

SEQ ID NO: 4483378 - DNA, 25 bp, Homo sapien
ctgccctgcagtcacatgggtgtgg

SEQ ID NO: 4483379 - DNA, 25 bp, Homo sapien
tggcccggctcactaagtcagagct

SEQ ID NO: 4483380 - DNA, 25 bp, Homo sapien
gacggtgacggcaagctgggctttg

SEQ ID NO: 4483381 - DNA, 25 bp, Homo sapien
ttgtgtgcgacaaggtcattgagga

SEQ ID NO: 4483382 - DNA, 25 bp, Homo sapien
tgctgacttcgaggacatgattgcc

SEQ ID NO: 4483383 - DNA, 25 bp, Homo sapien
tctggagccagcctagaaataagga

SEQ ID NO: 4483384 - DNA, 25 bp, Homo sapien
tgttacaagcagacaagacttaagg

SEQ ID NO: 4483385 - DNA, 25 bp, Homo sapien
ggaaaggcaggatccagaccacatg

SEQ ID NO: 4483386 - DNA, 25 bp, Homo sapien
tgcacctatcatggcaagcagtttg

SEQ ID NO: 4483387 - DNA, 25 bp, Homo sapien
ctccaaaatggtgatcgagtcttgt

SEQ ID NO: 4483388 - DNA, 25 bp, Homo sapien
taagatcacacaaaaaggagtttat

SEQ ID NO: 4483389 - DNA, 25 bp, Homo sapien
aactgaacatatgttaagatcacac

SEQ ID NO: 4483390 - DNA, 25 bp, Homo sapien
tcaatcacaagtcacgttgccatct

SEQ ID NO: 4483391 - DNA, 25 bp, Homo sapien
gcctgccccgtcatatgtcattaaa

SEQ ID NO: 4483392 - DNA, 25 bp, Homo sapien
cagaattgcacccttccctagagga

SEQ ID NO: 4483393 - DNA, 25 bp, Homo sapien
catacgttcgtcagttgatggccat

SEQ ID NO: 4483394 - DNA, 25 bp, Homo sapien
tacctcaactttctagcagcacatg

SEQ ID NO: 4483395 - DNA, 25 bp, Homo sapien
tgtccatcacaaactcctgagttcc

SEQ ID NO: 4483396 - DNA, 25 bp, Homo sapien
agttcctgctgatggccaggcctct

SEQ ID NO: 4483397 - DNA, 25 bp, Homo sapien
gttcctgctgatggccaggcctcta

SEQ ID NO: 4483398 - DNA, 25 bp, Homo sapien
gtcctctccctgtccatcacaaact

SEQ ID NO: 4483399 - DNA, 25 bp, Homo sapien
gccgcagcggcagtgcgcaagcgcc

SEQ ID NO: 4483400 - DNA, 25 bp, Homo sapien
cagcggcagtgcgcaagcgcccacc

SEQ ID NO: 4483401 - DNA, 25 bp, Homo sapien
cgcagcggcagtgcgcaagcgccca

SEQ ID NO: 4483402 - DNA, 25 bp, Homo sapien
ccgcagcggcagtgcgcaagcgccc

SEQ ID NO: 4483403 - DNA, 25 bp, Homo sapien
tagagatccacgcgggcccagccat

SEQ ID NO: 4483404 - DNA, 25 bp, Homo sapien
cttagagatccacgcgggcccagcc

SEQ ID NO: 4483405 - DNA, 25 bp, Homo sapien
ttagagatccacgcgggcccagcca

SEQ ID NO: 4483406 - DNA, 25 bp, Homo sapien
ctgtctggcccacgcgcccgcccac

SEQ ID NO: 4483407 - DNA, 25 bp, Homo sapien
gcccacacccggcacgcgaccggct

SEQ ID NO: 4483408 - DNA, 25 bp, Homo sapien
cacacgccggcctgccagcgctcac

SEQ ID NO: 4483409 - DNA, 25 bp, Homo sapien
gcacgcgaccggctctcctgccagc

SEQ ID NO: 4483410 - DNA, 25 bp, Homo sapien
acggagcgcggggcacgggcgacca

SEQ ID NO: 4483411 - DNA, 25 bp, Homo sapien
ctgcgagccggccacggagcgcggg

SEQ ID NO: 4483412 - DNA, 25 bp, Homo sapien
gagcgcggggcacgggcgaccagga

SEQ ID NO: 4483413 - DNA, 25 bp, Homo sapien
gggcacgggcgaccaggaccggctc

SEQ ID NO: 4483414 - DNA, 25 bp, Homo sapien
gccgcgcagacagcggatgagaggt

SEQ ID NO: 4483415 - DNA, 25 bp, Homo sapien
tgctgaggggatcagtcccgcagca

SEQ ID NO: 4483416 - DNA, 25 bp, Homo sapien
ggaagcggcccggatggcggagccg

SEQ ID NO: 4483417 - DNA, 25 bp, Homo sapien
gggacagaggctcccgtgaccttcc

SEQ ID NO: 4483418 - DNA, 25 bp, Homo sapien
tcttcaggcacaggttagttccact

SEQ ID NO: 4483419 - DNA, 25 bp, Homo sapien
gagctaaagcgctccagattgcagg

SEQ ID NO: 4483420 - DNA, 25 bp, Homo sapien
ggtaattccgaggtgtaagatgccc

SEQ ID NO: 4483421 - DNA, 25 bp, Homo sapien
cactgagaagctacggaactgcata

SEQ ID NO: 4483422 - DNA, 25 bp, Homo sapien
aaggactgagttcagttttcacagt

SEQ ID NO: 4483423 - DNA, 25 bp, Homo sapien
ttacttttaggagcaaatgtgacat

SEQ ID NO: 4483424 - DNA, 25 bp, Homo sapien
ttatcatcacaagcaaatctgggtc

SEQ ID NO: 4483425 - DNA, 25 bp, Homo sapien
aatgtaagttcagagattaaaggac

SEQ ID NO: 4483426 - DNA, 25 bp, Homo sapien
gaggaactgtcctgattgaaaccgg

SEQ ID NO: 4483427 - DNA, 25 bp, Homo sapien
actttctgaatacctactatgaggg

SEQ ID NO: 4483428 - DNA, 25 bp, Homo sapien
tccaatccctaaagtgagaagctgg

SEQ ID NO: 4483429 - DNA, 25 bp, Homo sapien
ggagtgcatgtcagagaacctcatc

SEQ ID NO: 4483430 - DNA, 25 bp, Homo sapien
gaagagtttccaagccaacaagtag

SEQ ID NO: 4483431 - DNA, 25 bp, Homo sapien
tgtctagaacagtccctggctcata

SEQ ID NO: 4483432 - DNA, 25 bp, Homo sapien
tgtaaacccatcctacctgcatatg

SEQ ID NO: 4483433 - DNA, 25 bp, Homo sapien
gcagcaatgtaaacccaggagtgta

SEQ ID NO: 4483434 - DNA, 25 bp, Homo sapien
aagaaactgggtacatagaccaaag

SEQ ID NO: 4483435 - DNA, 25 bp, Homo sapien
ctggtacaaagtcatactacattat

SEQ ID NO: 4483436 - DNA, 25 bp, Homo sapien
agaactggtacaaagtcatactaca

SEQ ID NO: 4483437 - DNA, 25 bp, Homo sapien
ctgggtacatagaccaaaggtatta

SEQ ID NO: 4483438 - DNA, 25 bp, Homo sapien
ttgggttgtggaatgcccccagcag

SEQ ID NO: 4483439 - DNA, 25 bp, Homo sapien
tgggttgtggaatgcccccagcagc

SEQ ID NO: 4483440 - DNA, 25 bp, Homo sapien
tttgggttgtggaatgcccccagca

SEQ ID NO: 4483441 - DNA, 25 bp, Homo sapien
ttttgggttgtggaatgcccccagc

SEQ ID NO: 4483442 - DNA, 25 bp, Homo sapien
tcaatctactgggtttagggaagcc

SEQ ID NO: 4483443 - DNA, 25 bp, Homo sapien
tgtgacaaacttacatagccagctg

SEQ ID NO: 4483444 - DNA, 25 bp, Homo sapien
taagcagagccaaaagaacgctttg

SEQ ID NO: 4483445 - DNA, 25 bp, Homo sapien
caaggcttatagatgttcgaggcat

SEQ ID NO: 4483446 - DNA, 25 bp, Homo sapien
tctaagagtaatctacataagcttg

SEQ ID NO: 4483447 - DNA, 25 bp, Homo sapien
gatcctggaaagcttctcatgcaac

SEQ ID NO: 4483448 - DNA, 25 bp, Homo sapien
ttggtactcagggaaaatcagactt

SEQ ID NO: 4483449 - DNA, 25 bp, Homo sapien
tagacggtttctcatgaaggcaagt

SEQ ID NO: 4483450 - DNA, 25 bp, Homo sapien
cagaggagagactctgcaatcctac

SEQ ID NO: 4483451 - DNA, 25 bp, Homo sapien
gagactctgcaatcctactctttac

SEQ ID NO: 4483452 - DNA, 25 bp, Homo sapien
aactaccaagtagatttcctaattg

SEQ ID NO: 4483453 - DNA, 25 bp, Homo sapien
tctttacctgagttcagaggtttta

SEQ ID NO: 4483454 - DNA, 25 bp, Homo sapien
aatccactttatgagatgtctcagg

SEQ ID NO: 4483455 - DNA, 25 bp, Homo sapien
cagagaaatccactttatgagatgt

SEQ ID NO: 4483456 - DNA, 25 bp, Homo sapien
atgagatgtctcaggaagattcaaa

SEQ ID NO: 4483457 - DNA, 25 bp, Homo sapien
cactttatgagatgtctcaggaaga

SEQ ID NO: 4483458 - DNA, 25 bp, Homo sapien
ctggaattaaagttactgtctgaac

SEQ ID NO: 4483459 - DNA, 25 bp, Homo sapien
cagctgaaatttctgggccaatacc

SEQ ID NO: 4483460 - DNA, 25 bp, Homo sapien
gctgaaatttctgggccaataccat

SEQ ID NO: 4483461 - DNA, 25 bp, Homo sapien
gcagctgaaatttctgggccaatac

SEQ ID NO: 4483462 - DNA, 25 bp, Homo sapien
actgcagctgaaatttctgggccaa

SEQ ID NO: 4483463 - DNA, 25 bp, Homo sapien
tttcaacttcgtttttgagatagag

SEQ ID NO: 4483464 - DNA, 25 bp, Homo sapien
agtgagctggagagacttaaaggaa

SEQ ID NO: 4483465 - DNA, 25 bp, Homo sapien
gagacttaaaggaaactggcattca

SEQ ID NO: 4483466 - DNA, 25 bp, Homo sapien
tactgcaatgatgaacaaacttttt

SEQ ID NO: 4483467 - DNA, 25 bp, Homo sapien
caggtccttgaatggcagtgacgtt

SEQ ID NO: 4483468 - DNA, 25 bp, Homo sapien
cttatccatggactctttagcctct

SEQ ID NO: 4483469 - DNA, 25 bp, Homo sapien
tctgaagggatcatccactttcctc

SEQ ID NO: 4483470 - DNA, 25 bp, Homo sapien
tgaatggcagtgacgttccgctcct

SEQ ID NO: 4483471 - DNA, 25 bp, Homo sapien
aaagaatggcgttaccttcacagat

SEQ ID NO: 4483472 - DNA, 25 bp, Homo sapien
gtaacccctgtagcggaaatctgta

SEQ ID NO: 4483473 - DNA, 25 bp, Homo sapien
gagtagttacttcataaaagaatgg

SEQ ID NO: 4483474 - DNA, 25 bp, Homo sapien
gatggccaggccttattcagtttaa

SEQ ID NO: 4483475 - DNA, 25 bp, Homo sapien
catggtcggacattcgcgtaaaggt

SEQ ID NO: 4483476 - DNA, 25 bp, Homo sapien
ttcatagatgggtgaccggctgcta

SEQ ID NO: 4483477 - DNA, 25 bp, Homo sapien
aaaggtcaaatgttttgcgcagcag

SEQ ID NO: 4483478 - DNA, 25 bp, Homo sapien
tagccttcgatagagacacatggtc

SEQ ID NO: 4483479 - DNA, 25 bp, Homo sapien
cgtgacgttgctccggtggttgttc

SEQ ID NO: 4483480 - DNA, 25 bp, Homo sapien
ttggctttgtgcaccgccgtgacgt

SEQ ID NO: 4483481 - DNA, 25 bp, Homo sapien
gttgttccgggcatactcaaaggca

SEQ ID NO: 4483482 - DNA, 25 bp, Homo sapien
gatgagcttgatactctgcacgact

SEQ ID NO: 4483483 - DNA, 25 bp, Homo sapien
gatgccgtatctttggattgttaca

SEQ ID NO: 4483484 - DNA, 25 bp, Homo sapien
tttcaaagatattaggaatcaagga

SEQ ID NO: 4483485 - DNA, 25 bp, Homo sapien
gaggcgcagtaaacaggagactcca

SEQ ID NO: 4483486 - DNA, 25 bp, Homo sapien
ggagactccgacagaagagagatgc

SEQ ID NO: 4483487 - DNA, 25 bp, Homo sapien
tgtagaaaaagcccatctgacatcc

SEQ ID NO: 4483488 - DNA, 25 bp, Homo sapien
tttgtagaaaaagcccatctgacat

SEQ ID NO: 4483489 - DNA, 25 bp, Homo sapien
tagaaaaagcccatctgacatccgc

SEQ ID NO: 4483490 - DNA, 25 bp, Homo sapien
ttttgtagaaaaagcccatctgaca

SEQ ID NO: 4483491 - DNA, 25 bp, Homo sapien
tatcaaggtacatctcattaaattt

SEQ ID NO: 4483492 - DNA, 25 bp, Homo sapien
atactgtatcaaggtacatctcatt

SEQ ID NO: 4483493 - DNA, 25 bp, Homo sapien
tactgtatcaaggtacatctcatta

SEQ ID NO: 4483494 - DNA, 25 bp, Homo sapien
ctgtatcaaggtacatctcattaaa

SEQ ID NO: 4483495 - DNA, 25 bp, Homo sapien
gaacatcaaattgggaaggatcttg

SEQ ID NO: 4483496 - DNA, 25 bp, Homo sapien
tgtctccatacaaatttggcataac

SEQ ID NO: 4483497 - DNA, 25 bp, Homo sapien
aagaacatcaaattgggaaggatct

SEQ ID NO: 4483498 - DNA, 25 bp, Homo sapien
ggatgtctccatacaaatttggcat

SEQ ID NO: 4483499 - DNA, 25 bp, Homo sapien
tccgatcaatcctgcacacaagtca

SEQ ID NO: 4483500 - DNA, 25 bp, Homo sapien
tgttgccacttggtgtcacaccgag

SEQ ID NO: 4483501 - DNA, 25 bp, Homo sapien
cattggctccaatgttgccacttgg

SEQ ID NO: 4483502 - DNA, 25 bp, Homo sapien
tgtcacaccgagacctccgatcaat

SEQ ID NO: 4483503 - DNA, 25 bp, Homo sapien
tatatgggtgtatataaaaacaaac

SEQ ID NO: 4483504 - DNA, 25 bp, Homo sapien
tataaaaacaaacataggctgggtg

SEQ ID NO: 4483505 - DNA, 25 bp, Homo sapien
tgaagagataaaccaaacatatata

SEQ ID NO: 4483506 - DNA, 25 bp, Homo sapien
gggaaatgaagagataaaccaaaca

SEQ ID NO: 4483507 - DNA, 25 bp, Homo sapien
taattgtagcaaaacacgcagcctc

SEQ ID NO: 4483508 - DNA, 25 bp, Homo sapien
gcaatgtctggagccgtcccatgaa

SEQ ID NO: 4483509 - DNA, 25 bp, Homo sapien
tcttgcagcatggtcaaaaagtccc

SEQ ID NO: 4483510 - DNA, 25 bp, Homo sapien
aaaagtcccatgtggcgcagcatca

SEQ ID NO: 4483511 - DNA, 25 bp, Homo sapien
ccagcacaagtaaatcaagattcct

SEQ ID NO: 4483512 - DNA, 25 bp, Homo sapien
gacccacgttaagaatccttgttca

SEQ ID NO: 4483513 - DNA, 25 bp, Homo sapien
gcttgggcccgcctgagaactatta

SEQ ID NO: 4483514 - DNA, 25 bp, Homo sapien
gataaaacacatggaagcaatgcat

SEQ ID NO: 4483515 - DNA, 25 bp, Homo sapien
tactgggctgtagattataacttcc

SEQ ID NO: 4483516 - DNA, 25 bp, Homo sapien
taattcaggcacctctctactgggc

SEQ ID NO: 4483517 - DNA, 25 bp, Homo sapien
tatgacctccaatgtgactatcagg

SEQ ID NO: 4483518 - DNA, 25 bp, Homo sapien
gaaagcctcccatacaactgatctg

SEQ ID NO: 4483519 - DNA, 25 bp, Homo sapien
taatctaaatcttttactcggcgac

SEQ ID NO: 4483520 - DNA, 25 bp, Homo sapien
gcattgcctcccaaatcttttgtca

SEQ ID NO: 4483521 - DNA, 25 bp, Homo sapien
cttttactcggcgacagatttcctc

SEQ ID NO: 4483522 - DNA, 25 bp, Homo sapien
tactcggcgacagatttcctctgtg

SEQ ID NO: 4483523 - DNA, 25 bp, Homo sapien
tctaaacagaggttcatgtggtgtc

SEQ ID NO: 4483524 - DNA, 25 bp, Homo sapien
tagagtgactgatgtaaatgccagt

SEQ ID NO: 4483525 - DNA, 25 bp, Homo sapien
ttcatgtggtgtccatttagagtga

SEQ ID NO: 4483526 - DNA, 25 bp, Homo sapien
gtgactgatgtaaatgccagttgta

SEQ ID NO: 4483527 - DNA, 25 bp, Homo sapien
tagcaaatgatacagtccactcaga

SEQ ID NO: 4483528 - DNA, 25 bp, Homo sapien
aaatgtactgtcaagaaacaagcaa

SEQ ID NO: 4483529 - DNA, 25 bp, Homo sapien
ctgtatcctgttatttacagctgaa

SEQ ID NO: 4483530 - DNA, 25 bp, Homo sapien
aacagacctagggacatccacctgc

SEQ ID NO: 4483531 - DNA, 25 bp, Homo sapien
gcccatttagttttagaagagtgtc

SEQ ID NO: 4483532 - DNA, 25 bp, Homo sapien
ccaggaaaattctcttgtgcccatt

SEQ ID NO: 4483533 - DNA, 25 bp, Homo sapien
agaaatataccacattcactctttt

SEQ ID NO: 4483534 - DNA, 25 bp, Homo sapien
tctattttccatatcatttagaaat

SEQ ID NO: 4483535 - DNA, 25 bp, Homo sapien
ggtcaaaagctgagcccaagcctaa

SEQ ID NO: 4483536 - DNA, 25 bp, Homo sapien
catcttatactggtactgctgaggc

SEQ ID NO: 4483537 - DNA, 25 bp, Homo sapien
cccagacagggatatcattgctaaa

SEQ ID NO: 4483538 - DNA, 25 bp, Homo sapien
aatacatgtgttcgggcctttcggc

SEQ ID NO: 4483539 - DNA, 25 bp, Homo sapien
tctttattactttgaacccaagagc

SEQ ID NO: 4483540 - DNA, 25 bp, Homo sapien
agtgggcatttaactcacaggactg

SEQ ID NO: 4483541 - DNA, 25 bp, Homo sapien
cgggcatgcgagtgaccattagtgc

SEQ ID NO: 4483542 - DNA, 25 bp, Homo sapien
aggactgtgcacagcgggcatgcga

SEQ ID NO: 4483543 - DNA, 25 bp, Homo sapien
accagtgcagagagtagtgggcatt

SEQ ID NO: 4483544 - DNA, 25 bp, Homo sapien
ctctccttccagaacgaaagggctg

SEQ ID NO: 4483545 - DNA, 25 bp, Homo sapien
tagctcacatacaggacagccagca

SEQ ID NO: 4483546 - DNA, 25 bp, Homo sapien
gttcaggtgacaaatgagatcagct

SEQ ID NO: 4483547 - DNA, 25 bp, Homo sapien
tagattaaaaagctgctagctcaca

SEQ ID NO: 4483548 - DNA, 25 bp, Homo sapien
caagccatatgaataccaggagcga

SEQ ID NO: 4483549 - DNA, 25 bp, Homo sapien
gaggctggctactgacggtcctgat

SEQ ID NO: 4483550 - DNA, 25 bp, Homo sapien
tattctcagaggtgacataccaacc

SEQ ID NO: 4483551 - DNA, 25 bp, Homo sapien
taggtcccacgatgaaactgaaacg

SEQ ID NO: 4483552 - DNA, 25 bp, Homo sapien
aagttggtgtcatgcccgcagcatc

SEQ ID NO: 4483553 - DNA, 25 bp, Homo sapien
caggacccaactgatggccatggag

SEQ ID NO: 4483554 - DNA, 25 bp, Homo sapien
acatcatgcaggcagtgtgcgacca

SEQ ID NO: 4483555 - DNA, 25 bp, Homo sapien
aacaggtgactgcttggatgtgcca

SEQ ID NO: 4483556 - DNA, 25 bp, Homo sapien
gattgttttgtctatgctaggtgca

SEQ ID NO: 4483557 - DNA, 25 bp, Homo sapien
cagcctctaagatattgctcagtga

SEQ ID NO: 4483558 - DNA, 25 bp, Homo sapien
tggcccactactacagccttatact

SEQ ID NO: 4483559 - DNA, 25 bp, Homo sapien
gctaggtgcagtatgcagcctctaa

SEQ ID NO: 4483560 - DNA, 25 bp, Homo sapien
tgtgaatttcccatctctttatggc

SEQ ID NO: 4483561 - DNA, 25 bp, Homo sapien
ggaatgaatacatggtcttagaggg

SEQ ID NO: 4483562 - DNA, 25 bp, Homo sapien
agaaaaaggccttgtcctgtgtgaa

SEQ ID NO: 4483563 - DNA, 25 bp, Homo sapien
ggagtgtggccctgcgcacatcttc

SEQ ID NO: 4483564 - DNA, 25 bp, Homo sapien
agagggtgtgccgggcctttttgct

SEQ ID NO: 4483565 - DNA, 25 bp, Homo sapien
tttgcttttggttccttgaagccat

SEQ ID NO: 4483566 - DNA, 25 bp, Homo sapien
ttttgcttttggttccttgaagcca

SEQ ID NO: 4483567 - DNA, 25 bp, Homo sapien
ctggcgagagggtgtgccgggcctt

SEQ ID NO: 4483568 - DNA, 25 bp, Homo sapien
ctgttgccagcccaccaactttctc

SEQ ID NO: 4483569 - DNA, 25 bp, Homo sapien
tgttgatatattgcctttgtcctgg

SEQ ID NO: 4483570 - DNA, 25 bp, Homo sapien
gcagccacctgaccctcagttcact

SEQ ID NO: 4483571 - DNA, 25 bp, Homo sapien
agaatgaccttgttcctatcagcct

SEQ ID NO: 4483572 - DNA, 25 bp, Homo sapien
gatggaggcagtggcgcaagatccc

SEQ ID NO: 4483573 - DNA, 25 bp, Homo sapien
tggagcacaagggtctcccagccgg

SEQ ID NO: 4483574 - DNA, 25 bp, Homo sapien
ccactcgatgtagacagggccagag

SEQ ID NO: 4483575 - DNA, 25 bp, Homo sapien
cgcaagatcccagtcctgtggagac

SEQ ID NO: 4483576 - DNA, 25 bp, Homo sapien
tcctacacacccaggaaccagaggg

SEQ ID NO: 4483577 - DNA, 25 bp, Homo sapien
aagaaacagtcaatcctcctacaca

SEQ ID NO: 4483578 - DNA, 25 bp, Homo sapien
agaaacagtcaatcctcctacacac

SEQ ID NO: 4483579 - DNA, 25 bp, Homo sapien
gtcaatcctcctacacacccaggaa

SEQ ID NO: 4483580 - DNA, 25 bp, Homo sapien
ctggagagtaggcggcctggagggc

SEQ ID NO: 4483581 - DNA, 25 bp, Homo sapien
ggagagtaggcggcctggagggctg

SEQ ID NO: 4483582 - DNA, 25 bp, Homo sapien
ctggagggctgtgttggccggagcc

SEQ ID NO: 4483583 - DNA, 25 bp, Homo sapien
gcctggagggctgtgttggccggag

SEQ ID NO: 4483584 - DNA, 25 bp, Homo sapien
cttgcccttccgtgggtccgtggag

SEQ ID NO: 4483585 - DNA, 25 bp, Homo sapien
ttgcccttccgtgggtccgtggagc

SEQ ID NO: 4483586 - DNA, 25 bp, Homo sapien
tggagggcgccctccgacaactgtc

SEQ ID NO: 4483587 - DNA, 25 bp, Homo sapien
cgacaactgtcccgccgccccgagg

SEQ ID NO: 4483588 - DNA, 25 bp, Homo sapien
tgattccccggagctccagctctga

SEQ ID NO: 4483589 - DNA, 25 bp, Homo sapien
gcttctcgggcgtctgctcctttgg

SEQ ID NO: 4483590 - DNA, 25 bp, Homo sapien
ctgcccgtctgattccccggagctc

SEQ ID NO: 4483591 - DNA, 25 bp, Homo sapien
cttctcgggcgtctgctcctttggc

SEQ ID NO: 4483592 - DNA, 25 bp, Homo sapien
gggcgaggccggtcagagcgccccg

SEQ ID NO: 4483593 - DNA, 25 bp, Homo sapien
tcgcgcgtcacggtcacggtcgccg

SEQ ID NO: 4483594 - DNA, 25 bp, Homo sapien
gcccgctcgcgcgtcacggtcacgg

SEQ ID NO: 4483595 - DNA, 25 bp, Homo sapien
cgccgccgcttgtagctcccgcccg

SEQ ID NO: 4483596 - DNA, 25 bp, Homo sapien
gacgcgctgggcttcacgcccagga

SEQ ID NO: 4483597 - DNA, 25 bp, Homo sapien
cacgcccaggatgtcatagtactgg

SEQ ID NO: 4483598 - DNA, 25 bp, Homo sapien
ttctcgccctcatccgggttcttgt

SEQ ID NO: 4483599 - DNA, 25 bp, Homo sapien
cttgtccgggtggtacttgagcgcc

SEQ ID NO: 4483600 - DNA, 25 bp, Homo sapien
tcaaacgtggcccaagtgacactgc

SEQ ID NO: 4483601 - DNA, 25 bp, Homo sapien
tgtcaccgaaaacccagaatatgag

SEQ ID NO: 4483602 - DNA, 25 bp, Homo sapien
tgattccagcgtcgtttccacaggt

SEQ ID NO: 4483603 - DNA, 25 bp, Homo sapien
caactgtgtgtcacttgtcaccgaa

SEQ ID NO: 4483604 - DNA, 25 bp, Homo sapien
tgctgaaatgtgaaattagaagcct

SEQ ID NO: 4483605 - DNA, 25 bp, Homo sapien
cttgtgagtgctgagatttgacctg

SEQ ID NO: 4483606 - DNA, 25 bp, Homo sapien
tgtgaaattagaagcctacaagctc

SEQ ID NO: 4483607 - DNA, 25 bp, Homo sapien
ttgtgagtgctgagatttgacctga

SEQ ID NO: 4483608 - DNA, 25 bp, Homo sapien
aagagaaacacgcagcacttagggc

SEQ ID NO: 4483609 - DNA, 25 bp, Homo sapien
caaggatgtccttgtgcccaagaga

SEQ ID NO: 4483610 - DNA, 25 bp, Homo sapien
tctatgccagtttcagcaggctccc

SEQ ID NO: 4483611 - DNA, 25 bp, Homo sapien
ccactaattgggtcgatcctctgct

SEQ ID NO: 4483612 - DNA, 25 bp, Homo sapien
aaagtttctcactaatccggctgca

SEQ ID NO: 4483613 - DNA, 25 bp, Homo sapien
caggactctgggcattaccactggc

SEQ ID NO: 4483614 - DNA, 25 bp, Homo sapien
gaagtcgagaccagctaggatacca

SEQ ID NO: 4483615 - DNA, 25 bp, Homo sapien
tgtgagcatctaaccacgtgccaga

SEQ ID NO: 4483616 - DNA, 25 bp, Homo sapien
gctctccgccttggtcataaacatc

SEQ ID NO: 4483617 - DNA, 25 bp, Homo sapien
tctctctctagccatccgtccacca

SEQ ID NO: 4483618 - DNA, 25 bp, Homo sapien
tgagcctccttctttaattgcctgc

SEQ ID NO: 4483619 - DNA, 25 bp, Homo sapien
aattgcctgctctccgccttggtca

SEQ ID NO: 4483620 - DNA, 25 bp, Homo sapien
cacgtataattgtggaaaccataca

SEQ ID NO: 4483621 - DNA, 25 bp, Homo sapien
gtggaaaccatacaacttatttatg

SEQ ID NO: 4483622 - DNA, 25 bp, Homo sapien
gcgcctggcccaatcatatcctttt

SEQ ID NO: 4483623 - DNA, 25 bp, Homo sapien
tcctgattccaacaacacgtataat

SEQ ID NO: 4483624 - DNA, 25 bp, Homo sapien
tcttcgtgactccattatatagatc

SEQ ID NO: 4483625 - DNA, 25 bp, Homo sapien
gataactggtgtacaacattcttgc

SEQ ID NO: 4483626 - DNA, 25 bp, Homo sapien
caagagttacagataactggtgtac

SEQ ID NO: 4483627 - DNA, 25 bp, Homo sapien
gagggccaatttcttcgtgactcca

SEQ ID NO: 4483628 - DNA, 25 bp, Homo sapien
cccgccccttgcacagcgggcactt

SEQ ID NO: 4483629 - DNA, 25 bp, Homo sapien
gccccttgcacagcgggcacttctc

SEQ ID NO: 4483630 - DNA, 25 bp, Homo sapien
cacttctccaccgatcccttcttcc

SEQ ID NO: 4483631 - DNA, 25 bp, Homo sapien
ttgcacagcgggcacttctccaccg

SEQ ID NO: 4483632 - DNA, 25 bp, Homo sapien
atgcccggcccgatctgctggatgt

SEQ ID NO: 4483633 - DNA, 25 bp, Homo sapien
tcgatgcacacggtctggatctgct

SEQ ID NO: 4483634 - DNA, 25 bp, Homo sapien
tgcagctctcgcagcggtccttggg

SEQ ID NO: 4483635 - DNA, 25 bp, Homo sapien
aatcttcttctcacggatcaccttg

SEQ ID NO: 4483636 - DNA, 25 bp, Homo sapien
gaatgtcaggagatggcaactaacc

SEQ ID NO: 4483637 - DNA, 25 bp, Homo sapien
gaacactttggcaggtgacatggaa

SEQ ID NO: 4483638 - DNA, 25 bp, Homo sapien
tgatctcaaggaagtaaacctcagc

SEQ ID NO: 4483639 - DNA, 25 bp, Homo sapien
tatctcacgattagcacccagacag

SEQ ID NO: 4483640 - DNA, 25 bp, Homo sapien
gccaatgagcatcagaagcgaccag

SEQ ID NO: 4483641 - DNA, 25 bp, Homo sapien
atcagaagcgaccaggaagacactc

SEQ ID NO: 4483642 - DNA, 25 bp, Homo sapien
acaagcccttatggccaatgagcat

SEQ ID NO: 4483643 - DNA, 25 bp, Homo sapien
atgagcatcagaagcgaccaggaag

SEQ ID NO: 4483644 - DNA, 25 bp, Homo sapien
tcatcggaatacttggaggacagct

SEQ ID NO: 4483645 - DNA, 25 bp, Homo sapien
tggccaatgacagaagaggtcccgc

SEQ ID NO: 4483646 - DNA, 25 bp, Homo sapien
tgtgatgccacaccaccagcatagg

SEQ ID NO: 4483647 - DNA, 25 bp, Homo sapien
gaatgcggctctacatcccaggttt

SEQ ID NO: 4483648 - DNA, 25 bp, Homo sapien
gtctctgaaagacactatgatcctt

SEQ ID NO: 4483649 - DNA, 25 bp, Homo sapien
ttcatgatcaagtcatggcctcgtc

SEQ ID NO: 4483650 - DNA, 25 bp, Homo sapien
taacaagaattcgattgtccaatgt

SEQ ID NO: 4483651 - DNA, 25 bp, Homo sapien
tgtttttatcgtcttcttgaagcca

SEQ ID NO: 4483652 - DNA, 25 bp, Homo sapien
gactacagcaacactgcaaatggct

SEQ ID NO: 4483653 - DNA, 25 bp, Homo sapien
gcaggcttattggtggttacctccc

SEQ ID NO: 4483654 - DNA, 25 bp, Homo sapien
gagatgagtgccctggtgtctacag

SEQ ID NO: 4483655 - DNA, 25 bp, Homo sapien
tcaggaaccctttcggcctagaggc

SEQ ID NO: 4483656 - DNA, 25 bp, Homo sapien
gaagcctcaatagagtccaaccagt

SEQ ID NO: 4483657 - DNA, 25 bp, Homo sapien
aaggcatcagaggagttcagacccc

SEQ ID NO: 4483658 - DNA, 25 bp, Homo sapien
tacagctacgtgactttggaaggca

SEQ ID NO: 4483659 - DNA, 25 bp, Homo sapien
tcagaccccaagaactctaaggcgt

SEQ ID NO: 4483660 - DNA, 25 bp, Homo sapien
cctgcctctttgtggggtgacaggt

SEQ ID NO: 4483661 - DNA, 25 bp, Homo sapien
gcagctgccatcacaggtaggttta

SEQ ID NO: 4483662 - DNA, 25 bp, Homo sapien
cagtgggcaaaggaaacgtggcatc

SEQ ID NO: 4483663 - DNA, 25 bp, Homo sapien
gaagtcatgacacccaagtctgcct

SEQ ID NO: 4483664 - DNA, 25 bp, Homo sapien
gaaagctggccccaatcccaggtat

SEQ ID NO: 4483665 - DNA, 25 bp, Homo sapien
caggtccccgtgctttatcacctca

SEQ ID NO: 4483666 - DNA, 25 bp, Homo sapien
tctcaggtccccgtgctttatcacc

SEQ ID NO: 4483667 - DNA, 25 bp, Homo sapien
tccttcatcgcgcacgcatctcagg

SEQ ID NO: 4483668 - DNA, 25 bp, Homo sapien
ccaggggtgctttgtagatgggcat

SEQ ID NO: 4483669 - DNA, 25 bp, Homo sapien
cactttctgtcgaggagggagtaaa

SEQ ID NO: 4483670 - DNA, 25 bp, Homo sapien
taatcctcactttctgtcgaggagg

SEQ ID NO: 4483671 - DNA, 25 bp, Homo sapien
tccctgtgctgacgccagttctgct

SEQ ID NO: 4483672 - DNA, 25 bp, Homo sapien
gctcattgggacaaaactccttcag

SEQ ID NO: 4483673 - DNA, 25 bp, Homo sapien
tcatgccgtctggcactgcactcca

SEQ ID NO: 4483674 - DNA, 25 bp, Homo sapien
catgccgtctggcactgcactccag

SEQ ID NO: 4483675 - DNA, 25 bp, Homo sapien
atgccgtctggcactgcactccagc

SEQ ID NO: 4483676 - DNA, 25 bp, Homo sapien
cacaaggccattaaagcgatgtcat

SEQ ID NO: 4483677 - DNA, 25 bp, Homo sapien
cattcatcatgtgctagtccggtgg

SEQ ID NO: 4483678 - DNA, 25 bp, Homo sapien
attaagaatgctgaacacatacaca

SEQ ID NO: 4483679 - DNA, 25 bp, Homo sapien
tttcattgtgccaactttacattca

SEQ ID NO: 4483680 - DNA, 25 bp, Homo sapien
gaaatgttatcttagcagccctgag

SEQ ID NO: 4483681 - DNA, 25 bp, Homo sapien
tgacactgaattatggcaaagccac

SEQ ID NO: 4483682 - DNA, 25 bp, Homo sapien
gattccatatgcagactagaggtga

SEQ ID NO: 4483683 - DNA, 25 bp, Homo sapien
taagttggccctgttaagcaggcac

SEQ ID NO: 4483684 - DNA, 25 bp, Homo sapien
gatctgcactttgaccctcctaagg

SEQ ID NO: 4483685 - DNA, 25 bp, Homo sapien
gctgtgcaatgagaggaacgatcct

SEQ ID NO: 4483686 - DNA, 25 bp, Homo sapien
tcaccccggattactggtcagagaa

SEQ ID NO: 4483687 - DNA, 25 bp, Homo sapien
gatccctggtctgagtgaaactctc

SEQ ID NO: 4483688 - DNA, 25 bp, Homo sapien
tgagcaaattatgcctcactagctg

SEQ ID NO: 4483689 - DNA, 25 bp, Homo sapien
ttatgcctcactagctggcaatgtt

SEQ ID NO: 4483690 - DNA, 25 bp, Homo sapien
caaattatgcctcactagctggcaa

SEQ ID NO: 4483691 - DNA, 25 bp, Homo sapien
ctttgagcaaattatgcctcactag

SEQ ID NO: 4483692 - DNA, 25 bp, Homo sapien
tatcctcaccaatggtcaaagtggg

SEQ ID NO: 4483693 - DNA, 25 bp, Homo sapien
aacgacaccccagagttgtggtcca

SEQ ID NO: 4483694 - DNA, 25 bp, Homo sapien
cttttatatgacaagaaggagctga

SEQ ID NO: 4483695 - DNA, 25 bp, Homo sapien
tcacctaggcttcgttggaagaagt

SEQ ID NO: 4483696 - DNA, 25 bp, Homo sapien
ttgttgaacagtatctcggcttcat

SEQ ID NO: 4483697 - DNA, 25 bp, Homo sapien
tcggcttcattaagtcgtatgcaag

SEQ ID NO: 4483698 - DNA, 25 bp, Homo sapien
tgaacagtatctcggcttcattaag

SEQ ID NO: 4483699 - DNA, 25 bp, Homo sapien
cagtatctcggcttcattaagtcgt

SEQ ID NO: 4483700 - DNA, 25 bp, Homo sapien
tagttgagtccctaggttcagagga

SEQ ID NO: 4483701 - DNA, 25 bp, Homo sapien
cataccacctggtagggagtgcgaa

SEQ ID NO: 4483702 - DNA, 25 bp, Homo sapien
cagggactgatccatagaagggtgt

SEQ ID NO: 4483703 - DNA, 25 bp, Homo sapien
gaaaccatgggatagaattagctgt

SEQ ID NO: 4483704 - DNA, 25 bp, Homo sapien
aacctctaaacctgcagttgccgga

SEQ ID NO: 4483705 - DNA, 25 bp, Homo sapien
gctttagtccaatctcaaaagtaca

SEQ ID NO: 4483706 - DNA, 25 bp, Homo sapien
agctaaacgtctgcgcttccggaag

SEQ ID NO: 4483707 - DNA, 25 bp, Homo sapien
tatttcagcaacagaagttattagc

SEQ ID NO: 4483708 - DNA, 25 bp, Homo sapien
ctgagacaaagaccccaagcaggga

SEQ ID NO: 4483709 - DNA, 25 bp, Homo sapien
tgaagggcctgtgtcaagcatctca

SEQ ID NO: 4483710 - DNA, 25 bp, Homo sapien
caatcatgggtgcttggaaactgtc

SEQ ID NO: 4483711 - DNA, 25 bp, Homo sapien
aagcatctcagaactgtccctcagg

SEQ ID NO: 4483712 - DNA, 25 bp, Homo sapien
acacctgccagagggtgctgcagcc

SEQ ID NO: 4483713 - DNA, 25 bp, Homo sapien
gggagactgccacacctgccagagg

SEQ ID NO: 4483714 - DNA, 25 bp, Homo sapien
taaggacagggatcagactttgggc

SEQ ID NO: 4483715 - DNA, 25 bp, Homo sapien
tacctgggcttcagagtagagcact

SEQ ID NO: 4483716 - DNA, 25 bp, Homo sapien
aaggagacttgactggcactggcca

SEQ ID NO: 4483717 - DNA, 25 bp, Homo sapien
tctgtggtacatggtctgggagctt

SEQ ID NO: 4483718 - DNA, 25 bp, Homo sapien
cctggaagtcctgtgagggcgaacg

SEQ ID NO: 4483719 - DNA, 25 bp, Homo sapien
tcctgtgagggcgaacgattggtgc

SEQ ID NO: 4483720 - DNA, 25 bp, Homo sapien
gcagggagaaaatggaggaactcaa

SEQ ID NO: 4483721 - DNA, 25 bp, Homo sapien
aatggaggaactcaaaggcctggaa

SEQ ID NO: 4483722 - DNA, 25 bp, Homo sapien
ctctgagctcgcaaggcggagactg

SEQ ID NO: 4483723 - DNA, 25 bp, Homo sapien
ggcacactctgagctcgcaaggcgg

SEQ ID NO: 4483724 - DNA, 25 bp, Homo sapien
ggcaggtacggacagcggcggcgca

SEQ ID NO: 4483725 - DNA, 25 bp, Homo sapien
cggcgcagcgggcacactctgagct

SEQ ID NO: 4483726 - DNA, 25 bp, Homo sapien
tcgaaattctcgctgctgcgcatct

SEQ ID NO: 4483727 - DNA, 25 bp, Homo sapien
tgagcagctcgtcgaaattctcgct

SEQ ID NO: 4483728 - DNA, 25 bp, Homo sapien
ccagtgccttgagcagctcgtcgaa

SEQ ID NO: 4483729 - DNA, 25 bp, Homo sapien
tccaggtgccggcgaagttgggcat

SEQ ID NO: 4483730 - DNA, 25 bp, Homo sapien
tccccgtcggggcgcgccctctgca

SEQ ID NO: 4483731 - DNA, 25 bp, Homo sapien
tctccccgtcggggcgcgccctctg

SEQ ID NO: 4483732 - DNA, 25 bp, Homo sapien
atctccccgtcggggcgcgccctct

SEQ ID NO: 4483733 - DNA, 25 bp, Homo sapien
ctccccgtcggggcgcgccctctgc

SEQ ID NO: 4483734 - DNA, 25 bp, Homo sapien
ttgatgtagaactgatccccgtcct

SEQ ID NO: 4483735 - DNA, 25 bp, Homo sapien
gttgatctcagtggtgcgcaccgtg

SEQ ID NO: 4483736 - DNA, 25 bp, Homo sapien
gcggatctccacgtgcggcttggac

SEQ ID NO: 4483737 - DNA, 25 bp, Homo sapien
gcaccgtggtggatgtcttgatgta

SEQ ID NO: 4483738 - DNA, 25 bp, Homo sapien
aggaaggcgcgccacaggctgcaaa

SEQ ID NO: 4483739 - DNA, 25 bp, Homo sapien
cgagcggggacacggggacgctgta

SEQ ID NO: 4483740 - DNA, 25 bp, Homo sapien
gctgcaaagggagacacaggttcct

SEQ ID NO: 4483741 - DNA, 25 bp, Homo sapien
cctgcaaggaaggcgcgccacaggc

SEQ ID NO: 4483742 - DNA, 25 bp, Homo sapien
ttggcgctgcaaaccgctgcaaaag

SEQ ID NO: 4483743 - DNA, 25 bp, Homo sapien
cccagagcccgctctttaagcgcgg

SEQ ID NO: 4483744 - DNA, 25 bp, Homo sapien
cttggcgctgcaaaccgctgcaaaa

SEQ ID NO: 4483745 - DNA, 25 bp, Homo sapien
cactgctgggaacgcggcgcaaccc

SEQ ID NO: 4483746 - DNA, 25 bp, Homo sapien
agctcacgggtccagtaggttttgg

SEQ ID NO: 4483747 - DNA, 25 bp, Homo sapien
cgtgcagtggatcttgttctcattc

SEQ ID NO: 4483748 - DNA, 25 bp, Homo sapien
gccgtccccttcaagaagagtttgc

SEQ ID NO: 4483749 - DNA, 25 bp, Homo sapien
caagaagagtttgcgtgcagtggat

SEQ ID NO: 4483750 - DNA, 25 bp, Homo sapien
catatcactaataaggccacttatt

SEQ ID NO: 4483751 - DNA, 25 bp, Homo sapien
gacataaattctggtgcagaccacg

SEQ ID NO: 4483752 - DNA, 25 bp, Homo sapien
cataaattctggtgcagaccacgtc

SEQ ID NO: 4483753 - DNA, 25 bp, Homo sapien
ctggtgcagaccacgtcatcggcgc

SEQ ID NO: 4483754 - DNA, 25 bp, Homo sapien
agaccacgtcatcggcgccaaacgt

SEQ ID NO: 4483755 - DNA, 25 bp, Homo sapien
taatgacttcgaaaccgtgcaaatg

SEQ ID NO: 4483756 - DNA, 25 bp, Homo sapien
aaacgggatcacctaatattggtag

SEQ ID NO: 4483757 - DNA, 25 bp, Homo sapien
cagaactatgacatattcctcaggg

SEQ ID NO: 4483758 - DNA, 25 bp, Homo sapien
gcactagggatacaagaggcaccaa

SEQ ID NO: 4483759 - DNA, 25 bp, Homo sapien
gttccacggaacactgcggtctcat

SEQ ID NO: 4483760 - DNA, 25 bp, Homo sapien
tccatgaggtaatgagaaatactgt

SEQ ID NO: 4483761 - DNA, 25 bp, Homo sapien
tcaaactgggttccacggaacactg

SEQ ID NO: 4483762 - DNA, 25 bp, Homo sapien
ctgcggtctcattggaggtgttcca

SEQ ID NO: 4483763 - DNA, 25 bp, Homo sapien
gatggcacattgtctagttccatgg

SEQ ID NO: 4483764 - DNA, 25 bp, Homo sapien
ttttgagcaagatggcacattgtct

SEQ ID NO: 4483765 - DNA, 25 bp, Homo sapien
gagcaagatggcacattgtctagtt

SEQ ID NO: 4483766 - DNA, 25 bp, Homo sapien
gcacattgtctagttccatggcact

SEQ ID NO: 4483767 - DNA, 25 bp, Homo sapien
ctgtgcatctgtggatccttctgcc

SEQ ID NO: 4483768 - DNA, 25 bp, Homo sapien
ggctgtgcatctgtggatccttctg

SEQ ID NO: 4483769 - DNA, 25 bp, Homo sapien
gctgtgcatctgtggatccttctgc

SEQ ID NO: 4483770 - DNA, 25 bp, Homo sapien
atgcttttcacaagtgtcctcttca

SEQ ID NO: 4483771 - DNA, 25 bp, Homo sapien
cgactgcttctgcttccacagtgca

SEQ ID NO: 4483772 - DNA, 25 bp, Homo sapien
cacgactgcttctgcttccacagtg

SEQ ID NO: 4483773 - DNA, 25 bp, Homo sapien
tcagcacgactgcttctgcttccac

SEQ ID NO: 4483774 - DNA, 25 bp, Homo sapien
agcacgactgcttctgcttccacag

SEQ ID NO: 4483775 - DNA, 25 bp, Homo sapien
cagatagagcaagtggaggttttgc

SEQ ID NO: 4483776 - DNA, 25 bp, Homo sapien
tcagatagagcaagtggaggttttg

SEQ ID NO: 4483777 - DNA, 25 bp, Homo sapien
agatagagcaagtggaggttttgca

SEQ ID NO: 4483778 - DNA, 25 bp, Homo sapien
atcagatagagcaagtggaggtttt

SEQ ID NO: 4483779 - DNA, 25 bp, Homo sapien
attataacaggaataccatagaata

SEQ ID NO: 4483780 - DNA, 25 bp, Homo sapien
tataacaggaataccatagaataat

SEQ ID NO: 4483781 - DNA, 25 bp, Homo sapien
ttataacaggaataccatagaataa

SEQ ID NO: 4483782 - DNA, 25 bp, Homo sapien
tggatctgtttcaagtagctgtttc

SEQ ID NO: 4483783 - DNA, 25 bp, Homo sapien
tctgtttcaagtagctgtttcccac

SEQ ID NO: 4483784 - DNA, 25 bp, Homo sapien
caagatttggatctgtttcaagtag

SEQ ID NO: 4483785 - DNA, 25 bp, Homo sapien
gatttggatctgtttcaagtagctg

SEQ ID NO: 4483786 - DNA, 25 bp, Homo sapien
tcaatcccccggctccaggtcatcc

SEQ ID NO: 4483787 - DNA, 25 bp, Homo sapien
tttcctggaacaaagactcaattac

SEQ ID NO: 4483788 - DNA, 25 bp, Homo sapien
ggtcatccatttcctggaacaaaga

SEQ ID NO: 4483789 - DNA, 25 bp, Homo sapien
gctccaggtcatccatttcctggaa

SEQ ID NO: 4483790 - DNA, 25 bp, Homo sapien
cttcacagacaggtgtctctcagct

SEQ ID NO: 4483791 - DNA, 25 bp, Homo sapien
ttctctcaccagcagtacatctgtg

SEQ ID NO: 4483792 - DNA, 25 bp, Homo sapien
tgctcacgttctctcaccagcagta

SEQ ID NO: 4483793 - DNA, 25 bp, Homo sapien
tcagctaccactgcatagctccagt

SEQ ID NO: 4483794 - DNA, 25 bp, Homo sapien
cccagaagtgatggccgcggtcatt

SEQ ID NO: 4483795 - DNA, 25 bp, Homo sapien
gccgcggtcattactgacaaagatg

SEQ ID NO: 4483796 - DNA, 25 bp, Homo sapien
gtgatggccgcggtcattactgaca

SEQ ID NO: 4483797 - DNA, 25 bp, Homo sapien
ttactgacaaagatgtacccatgtt

SEQ ID NO: 4483798 - DNA, 25 bp, Homo sapien
cagtcgtcaatgttgcccactggtt

SEQ ID NO: 4483799 - DNA, 25 bp, Homo sapien
tcagtcgtcaatgttgcccactggt

SEQ ID NO: 4483800 - DNA, 25 bp, Homo sapien
gattgcaccctagacctggatcctg

SEQ ID NO: 4483801 - DNA, 25 bp, Homo sapien
tagcaataaggattgcaccctagac

SEQ ID NO: 4483802 - DNA, 25 bp, Homo sapien
tttcccactcttgacagtgctcaag

SEQ ID NO: 4483803 - DNA, 25 bp, Homo sapien
cactcttgacagtgctcaaggcaca

SEQ ID NO: 4483804 - DNA, 25 bp, Homo sapien
aaaggtgccactccatattgaccac

SEQ ID NO: 4483805 - DNA, 25 bp, Homo sapien
agctgtgctgggtcgagcctggtgg

SEQ ID NO: 4483806 - DNA, 25 bp, Homo sapien
gagctgtgctgggtcgagcctggtg

SEQ ID NO: 4483807 - DNA, 25 bp, Homo sapien
gctgtgctgggtcgagcctggtggt

SEQ ID NO: 4483808 - DNA, 25 bp, Homo sapien
tgctgtgagacagtgagaaaatccc

SEQ ID NO: 4483809 - DNA, 25 bp, Homo sapien
cagaggcaatgctgggtttagaccc

SEQ ID NO: 4483810 - DNA, 25 bp, Homo sapien
gaggagacacaagtaagccagaggc

SEQ ID NO: 4483811 - DNA, 25 bp, Homo sapien
gaattggaatcagaccaccaagacg

SEQ ID NO: 4483812 - DNA, 25 bp, Homo sapien
gggaacaataagggattgaagttca

SEQ ID NO: 4483813 - DNA, 25 bp, Homo sapien
ggaacaataagggattgaagttcac

SEQ ID NO: 4483814 - DNA, 25 bp, Homo sapien
gcagcgtctgaccttgacatccgta

SEQ ID NO: 4483815 - DNA, 25 bp, Homo sapien
tgtcccttccagtgatgtaaagaga

SEQ ID NO: 4483816 - DNA, 25 bp, Homo sapien
tgagctgctgttaggcctagtggcc

SEQ ID NO: 4483817 - DNA, 25 bp, Homo sapien
cttgacatccgtagttaataaaaca

SEQ ID NO: 4483818 - DNA, 25 bp, Homo sapien
gattgccgacttcttcccagtggca

SEQ ID NO: 4483819 - DNA, 25 bp, Homo sapien
cctccggtagcttccgtgattgccg

SEQ ID NO: 4483820 - DNA, 25 bp, Homo sapien
tcccagtggcagttaacacatgctt

SEQ ID NO: 4483821 - DNA, 25 bp, Homo sapien
gttaacacatgcttaagcctctcca

SEQ ID NO: 4483822 - DNA, 25 bp, Homo sapien
cgccggagaccatattatccctccg

SEQ ID NO: 4483823 - DNA, 25 bp, Homo sapien
aggggtgcgggtcaaggccagcggt

SEQ ID NO: 4483824 - DNA, 25 bp, Homo sapien
ggtgcgggtcaaggccagcggtggg

SEQ ID NO: 4483825 - DNA, 25 bp, Homo sapien
gagagagaggggtgcgggtcaaggc

SEQ ID NO: 4483826 - DNA, 25 bp, Homo sapien
agaggggtgcgggtcaaggccagcg

SEQ ID NO: 4483827 - DNA, 25 bp, Homo sapien
gagacagcggtgcaataaatggtcg

SEQ ID NO: 4483828 - DNA, 25 bp, Homo sapien
ggccttaggctggaccgtggaatca

SEQ ID NO: 4483829 - DNA, 25 bp, Homo sapien
cgtggaatcaacatctagctgcgtg

SEQ ID NO: 4483830 - DNA, 25 bp, Homo sapien
taaatggtcggagaactgactgacc

SEQ ID NO: 4483831 - DNA, 25 bp, Homo sapien
taccagggcttagtactgaaaataa

SEQ ID NO: 4483832 - DNA, 25 bp, Homo sapien
cctgaaatgtgataagaatacctgg

SEQ ID NO: 4483833 - DNA, 25 bp, Homo sapien
tctcagttaagtccttaccagggct

SEQ ID NO: 4483834 - DNA, 25 bp, Homo sapien
ccacaattaacattagagggactga

SEQ ID NO: 4483835 - DNA, 25 bp, Homo sapien
catacttggtgccaagtttagatac

SEQ ID NO: 4483836 - DNA, 25 bp, Homo sapien
tacttggtgccaagtttagatacat

SEQ ID NO: 4483837 - DNA, 25 bp, Homo sapien
ggtgccaagtttagatacatcgaag

SEQ ID NO: 4483838 - DNA, 25 bp, Homo sapien
cttggtgccaagtttagatacatcg

SEQ ID NO: 4483839 - DNA, 25 bp, Homo sapien
acccaagaaaatgtaaagcaacatt

SEQ ID NO: 4483840 - DNA, 25 bp, Homo sapien
ccaagaaaatgtaaagcaacattac

SEQ ID NO: 4483841 - DNA, 25 bp, Homo sapien
aacccaagaaaatgtaaagcaacat

SEQ ID NO: 4483842 - DNA, 25 bp, Homo sapien
cccaagaaaatgtaaagcaacatta

SEQ ID NO: 4483843 - DNA, 25 bp, Homo sapien
tcttgaagctaagagtggccactga

SEQ ID NO: 4483844 - DNA, 25 bp, Homo sapien
tctccggtgtctactgagggtcttg

SEQ ID NO: 4483845 - DNA, 25 bp, Homo sapien
tggtagtacccatagtctccggtgt

SEQ ID NO: 4483846 - DNA, 25 bp, Homo sapien
aaagaggcaaaagcccctggagagg

SEQ ID NO: 4483847 - DNA, 25 bp, Homo sapien
cattcatacaggcaatattgtgcag

SEQ ID NO: 4483848 - DNA, 25 bp, Homo sapien
gggatacctgtattcaatgacatgg

SEQ ID NO: 4483849 - DNA, 25 bp, Homo sapien
tgcagctattagaagccacagagaa

SEQ ID NO: 4483850 - DNA, 25 bp, Homo sapien
cacagagaagtacaggtatcccttt

SEQ ID NO: 4483851 - DNA, 25 bp, Homo sapien
ccaatcccctggtaggctgatgacc

SEQ ID NO: 4483852 - DNA, 25 bp, Homo sapien
ccctggtaggctgatgaccaaaagt

SEQ ID NO: 4483853 - DNA, 25 bp, Homo sapien
gacgcaaaagccaatcccctggtag

SEQ ID NO: 4483854 - DNA, 25 bp, Homo sapien
ccttggctacagcagcgacgcaaaa

SEQ ID NO: 4483855 - DNA, 25 bp, Homo sapien
aaaatgcactggattacgtctgcct

SEQ ID NO: 4483856 - DNA, 25 bp, Homo sapien
tgggtattctcccttagccctacag

SEQ ID NO: 4483857 - DNA, 25 bp, Homo sapien
cacctattccagtgagttctgaacc

SEQ ID NO: 4483858 - DNA, 25 bp, Homo sapien
cacaccactagttcctgatcatcag

SEQ ID NO: 4483859 - DNA, 25 bp, Homo sapien
gacactatgtccagccttggtttgc

SEQ ID NO: 4483860 - DNA, 25 bp, Homo sapien
aaggcaggagacactatgtccagcc

SEQ ID NO: 4483861 - DNA, 25 bp, Homo sapien
attctacgtccccactttcaaacag

SEQ ID NO: 4483862 - DNA, 25 bp, Homo sapien
aggtataaagttcaggaaggcccat

SEQ ID NO: 4483863 - DNA, 25 bp, Homo sapien
gcagcttccaacaagacccgtattg

SEQ ID NO: 4483864 - DNA, 25 bp, Homo sapien
tcacaatttcgtacagcagcttcca

SEQ ID NO: 4483865 - DNA, 25 bp, Homo sapien
ggaaaaagggcacttcaacattgct

SEQ ID NO: 4483866 - DNA, 25 bp, Homo sapien
gacccgtattgagtaaggcagaaca

SEQ ID NO: 4483867 - DNA, 25 bp, Homo sapien
tggtcaactgtaagatctgtcggac

SEQ ID NO: 4483868 - DNA, 25 bp, Homo sapien
gcagcaaaatccaccattgctggta

SEQ ID NO: 4483869 - DNA, 25 bp, Homo sapien
gcaggatggactttctcaggatcac

SEQ ID NO: 4483870 - DNA, 25 bp, Homo sapien
tctgtcggacaagcaggatggactt

SEQ ID NO: 4483871 - DNA, 25 bp, Homo sapien
tgcatggctgtctataaatatctgc

SEQ ID NO: 4483872 - DNA, 25 bp, Homo sapien
ttgcatggctgtctataaatatctg

SEQ ID NO: 4483873 - DNA, 25 bp, Homo sapien
tacatgacacatttccagccaatta

SEQ ID NO: 4483874 - DNA, 25 bp, Homo sapien
acatgacacatttccagccaattaa

SEQ ID NO: 4483875 - DNA, 25 bp, Homo sapien
ctacatgacacatttccagccaatt

SEQ ID NO: 4483876 - DNA, 25 bp, Homo sapien
catgacacatttccagccaattaac

SEQ ID NO: 4483877 - DNA, 25 bp, Homo sapien
aaaatgttcctgagtttcggcctag

SEQ ID NO: 4483878 - DNA, 25 bp, Homo sapien
ggaagcttcttaggctgcactttaa

SEQ ID NO: 4483879 - DNA, 25 bp, Homo sapien
cagaatcacaagatcctcggcaggt

SEQ ID NO: 4483880 - DNA, 25 bp, Homo sapien
gacacaggatgggtgtattctcaat

SEQ ID NO: 4483881 - DNA, 25 bp, Homo sapien
gggaccacaggggcgcgacaccaca

SEQ ID NO: 4483882 - DNA, 25 bp, Homo sapien
caggggcgcgacaccacacccgggt

SEQ ID NO: 4483883 - DNA, 25 bp, Homo sapien
cacaggggcgcgacaccacacccgg

SEQ ID NO: 4483884 - DNA, 25 bp, Homo sapien
accacaggggcgcgacaccacaccc

SEQ ID NO: 4483885 - DNA, 25 bp, Homo sapien
caaccaggacaactaggcaacagga

SEQ ID NO: 4483886 - DNA, 25 bp, Homo sapien
gaagtgccaaaggttatgctctcat

SEQ ID NO: 4483887 - DNA, 25 bp, Homo sapien
tggaagatccagtcagggacaaagg

SEQ ID NO: 4483888 - DNA, 25 bp, Homo sapien
gagcacacgaggtcactataacctg

SEQ ID NO: 4483889 - DNA, 25 bp, Homo sapien
tcgatttctgccgaattctacttct

SEQ ID NO: 4483890 - DNA, 25 bp, Homo sapien
aaaaaactgaagcctctctcgattt

SEQ ID NO: 4483891 - DNA, 25 bp, Homo sapien
aaactgaagcctctctcgatttctg

SEQ ID NO: 4483892 - DNA, 25 bp, Homo sapien
tctcgatttctgccgaattctactt

SEQ ID NO: 4483893 - DNA, 25 bp, Homo sapien
ggtggaggctgcagtaagctgagat

SEQ ID NO: 4483894 - DNA, 25 bp, Homo sapien
gcaggagaactgcttgaacccagga

SEQ ID NO: 4483895 - DNA, 25 bp, Homo sapien
agccaggcgtgctggtgtgcgcctg

SEQ ID NO: 4483896 - DNA, 25 bp, Homo sapien
aatcccagctactcgggaggctgag

SEQ ID NO: 4483897 - DNA, 25 bp, Homo sapien
ccgactacactgtctgggaagagga

SEQ ID NO: 4483898 - DNA, 25 bp, Homo sapien
tatgtgtgaatctgtgccgactaca

SEQ ID NO: 4483899 - DNA, 25 bp, Homo sapien
tttatttgatgagccattccagttc

SEQ ID NO: 4483900 - DNA, 25 bp, Homo sapien
aaaccattcaccatcgttatgtgtg

SEQ ID NO: 4483901 - DNA, 25 bp, Homo sapien
gacagcccacgtaagtaaagaaatg

SEQ ID NO: 4483902 - DNA, 25 bp, Homo sapien
aaagagacagcccacgtaagtaaag

SEQ ID NO: 4483903 - DNA, 25 bp, Homo sapien
tataaaagagcatagctagctgggc

SEQ ID NO: 4483904 - DNA, 25 bp, Homo sapien
agagcatagctagctgggctcagtg

SEQ ID NO: 4483905 - DNA, 25 bp, Homo sapien
gaaactggcagaccaagcataactg

SEQ ID NO: 4483906 - DNA, 25 bp, Homo sapien
taccaagaacaacatctatggatgt

SEQ ID NO: 4483907 - DNA, 25 bp, Homo sapien
ctctggtaaagtaagagaaactggc

SEQ ID NO: 4483908 - DNA, 25 bp, Homo sapien
ggtttgatgacccagttaactcaca

SEQ ID NO: 4483909 - DNA, 25 bp, Homo sapien
tactcaggccttcgaccctttggta

SEQ ID NO: 4483910 - DNA, 25 bp, Homo sapien
gacctgaggatgcagtaatgaaccc

SEQ ID NO: 4483911 - DNA, 25 bp, Homo sapien
tggctaacgtcaagagacctgagga

SEQ ID NO: 4483912 - DNA, 25 bp, Homo sapien
gacaatggactcaagaatctgactg

SEQ ID NO: 4483913 - DNA, 25 bp, Homo sapien
tagcaaaggccagacatttaggaag

SEQ ID NO: 4483914 - DNA, 25 bp, Homo sapien
tgttcactaggaaatccgtgagcct

SEQ ID NO: 4483915 - DNA, 25 bp, Homo sapien
tacactggagtatccggaaagcctt

SEQ ID NO: 4483916 - DNA, 25 bp, Homo sapien
tcaggaaaaaacagctagagaaggc

SEQ ID NO: 4483917 - DNA, 25 bp, Homo sapien
tcacaaatggaacaggatctcaaaa

SEQ ID NO: 4483918 - DNA, 25 bp, Homo sapien
ttcctataaggatcacaaatggaac

SEQ ID NO: 4483919 - DNA, 25 bp, Homo sapien
ttattcctataaggatcacaaatgg

SEQ ID NO: 4483920 - DNA, 25 bp, Homo sapien
aatggaacaggatctcaaaaaagaa

SEQ ID NO: 4483921 - DNA, 25 bp, Homo sapien
tttacagcatctttaatcacaggca

SEQ ID NO: 4483922 - DNA, 25 bp, Homo sapien
agtgccagggatcacttaatccaaa

SEQ ID NO: 4483923 - DNA, 25 bp, Homo sapien
gaggcgactaagaatgaaactatcc

SEQ ID NO: 4483924 - DNA, 25 bp, Homo sapien
ctcagattggtataggaagagtgac

SEQ ID NO: 4483925 - DNA, 25 bp, Homo sapien
gtttgctattgtagttcgatcaact

SEQ ID NO: 4483926 - DNA, 25 bp, Homo sapien
aaactttccagccactcctacttgc

SEQ ID NO: 4483927 - DNA, 25 bp, Homo sapien
tgaaactccacttccaaaaaactca

SEQ ID NO: 4483928 - DNA, 25 bp, Homo sapien
tagttcgatcaactatagataattg

SEQ ID NO: 4483929 - DNA, 25 bp, Homo sapien
gctgaggatagcaccatattccgga

SEQ ID NO: 4483930 - DNA, 25 bp, Homo sapien
aatgtcacattgtcaacagggaaaa

SEQ ID NO: 4483931 - DNA, 25 bp, Homo sapien
ggatagcaccatattccggacacat

SEQ ID NO: 4483932 - DNA, 25 bp, Homo sapien
gggaaaaagctgaggatagcaccat

SEQ ID NO: 4483933 - DNA, 25 bp, Homo sapien
cagctttaaggtatgtttccattga

SEQ ID NO: 4483934 - DNA, 25 bp, Homo sapien
tgattcgagtttggctttgctaaaa

SEQ ID NO: 4483935 - DNA, 25 bp, Homo sapien
caatttcacagctttaaggtatgtt

SEQ ID NO: 4483936 - DNA, 25 bp, Homo sapien
atgtttccattgattcgagtttggc

SEQ ID NO: 4483937 - DNA, 25 bp, Homo sapien
tgtcacagcaactctatcctgaggt

SEQ ID NO: 4483938 - DNA, 25 bp, Homo sapien
gaccactaacagatggaactattga

SEQ ID NO: 4483939 - DNA, 25 bp, Homo sapien
taagcaagcctggaaatcgcttttc

SEQ ID NO: 4483940 - DNA, 25 bp, Homo sapien
tgaggtctttttggaccactaacag

SEQ ID NO: 4483941 - DNA, 25 bp, Homo sapien
tgaccactgatccatgagacagctt

SEQ ID NO: 4483942 - DNA, 25 bp, Homo sapien
cagctgcaatttggaagcctttaaa

SEQ ID NO: 4483943 - DNA, 25 bp, Homo sapien
tgataactgcagcaatgaccactga

SEQ ID NO: 4483944 - DNA, 25 bp, Homo sapien
gagacagcttatattcacttccttc

SEQ ID NO: 4483945 - DNA, 25 bp, Homo sapien
tacttagatatggtaatactccact

SEQ ID NO: 4483946 - DNA, 25 bp, Homo sapien
tataaggtttaacacgcagaccagc

SEQ ID NO: 4483947 - DNA, 25 bp, Homo sapien
tgaggtaatgtgtaaccatcccact

SEQ ID NO: 4483948 - DNA, 25 bp, Homo sapien
ccactgcctggagataaacttgttc

SEQ ID NO: 4483949 - DNA, 25 bp, Homo sapien
ggtgctgtatttcccacacaaattg

SEQ ID NO: 4483950 - DNA, 25 bp, Homo sapien
taaaactgcgtctgataagggtgct

SEQ ID NO: 4483951 - DNA, 25 bp, Homo sapien
acatccatagccaacgatttcaaat

SEQ ID NO: 4483952 - DNA, 25 bp, Homo sapien
ttactgcatttaaaactgcgtctga

SEQ ID NO: 4483953 - DNA, 25 bp, Homo sapien
tggcacgaacacaatcacaaagacg

SEQ ID NO: 4483954 - DNA, 25 bp, Homo sapien
tcactgtgcctgctatggcataagc

SEQ ID NO: 4483955 - DNA, 25 bp, Homo sapien
tggcataagctaccactaagggtgg

SEQ ID NO: 4483956 - DNA, 25 bp, Homo sapien
cagataaaattccacaggtaaccaa

SEQ ID NO: 4483957 - DNA, 25 bp, Homo sapien
tacattatcatacgtcttcctgaaa

SEQ ID NO: 4483958 - DNA, 25 bp, Homo sapien
taagcggctggaagaactaattacc

SEQ ID NO: 4483959 - DNA, 25 bp, Homo sapien
tcaaagacatatcatggaaatcaag

SEQ ID NO: 4483960 - DNA, 25 bp, Homo sapien
gattcaacagggtgcttcaggctta

SEQ ID NO: 4483961 - DNA, 25 bp, Homo sapien
gatgaacttcttctcgactaggcca

SEQ ID NO: 4483962 - DNA, 25 bp, Homo sapien
ccaaatatcatgcaggtaaatgttc

SEQ ID NO: 4483963 - DNA, 25 bp, Homo sapien
gtaaatgttcttgccggtggggtca

SEQ ID NO: 4483964 - DNA, 25 bp, Homo sapien
gctttaaacatggatagtataacat

SEQ ID NO: 4483965 - DNA, 25 bp, Homo sapien
ttctctttacagcttatttgcctct

SEQ ID NO: 4483966 - DNA, 25 bp, Homo sapien
gcctctccccaggagaattttgtgt

SEQ ID NO: 4483967 - DNA, 25 bp, Homo sapien
gatgtattctgaacacctaatcaat

SEQ ID NO: 4483968 - DNA, 25 bp, Homo sapien
tgcacagatcatccaatcaacacta

SEQ ID NO: 4483969 - DNA, 25 bp, Homo sapien
tgaatccggtgcttctaaggaattc

SEQ ID NO: 4483970 - DNA, 25 bp, Homo sapien
tgcttctaaggaattccaccgttta

SEQ ID NO: 4483971 - DNA, 25 bp, Homo sapien
aaactgaatccggtgcttctaagga

SEQ ID NO: 4483972 - DNA, 25 bp, Homo sapien
tccggtgcttctaaggaattccacc

SEQ ID NO: 4483973 - DNA, 25 bp, Homo sapien
tacttcctgcaggtgatatatgatc

SEQ ID NO: 4483974 - DNA, 25 bp, Homo sapien
gcattttcaatagcctggagtgcaa

SEQ ID NO: 4483975 - DNA, 25 bp, Homo sapien
tagcggcagcactattcctagcgat

SEQ ID NO: 4483976 - DNA, 25 bp, Homo sapien
tttgtcaaatacttagcggcagcac

SEQ ID NO: 4483977 - DNA, 25 bp, Homo sapien
ttgtcattacagcatcattacctct

SEQ ID NO: 4483978 - DNA, 25 bp, Homo sapien
ttgcaaaagtgcctcttgtcattac

SEQ ID NO: 4483979 - DNA, 25 bp, Homo sapien
cttattaaaaagcttgatatttgca

SEQ ID NO: 4483980 - DNA, 25 bp, Homo sapien
cctcttcgagctccgtaagagttga

SEQ ID NO: 4483981 - DNA, 25 bp, Homo sapien
gtaaatacggtcctttggcagccca

SEQ ID NO: 4483982 - DNA, 25 bp, Homo sapien
cagtaaatacggtcctttggcagcc

SEQ ID NO: 4483983 - DNA, 25 bp, Homo sapien
agtgggataccttctttctggtaca

SEQ ID NO: 4483984 - DNA, 25 bp, Homo sapien
cctgctaaaataatcagtgggatac

SEQ ID NO: 4483985 - DNA, 25 bp, Homo sapien
ggagctatgccaattccaatcaaat

SEQ ID NO: 4483986 - DNA, 25 bp, Homo sapien
tttcggccaaaacagctttcacacc

SEQ ID NO: 4483987 - DNA, 25 bp, Homo sapien
aactgaagtggagctatgccaattc

SEQ ID NO: 4483988 - DNA, 25 bp, Homo sapien
tttcataactttcggccaaaacagc

SEQ ID NO: 4483989 - DNA, 25 bp, Homo sapien
tattcaatgtaattccaggagacag

SEQ ID NO: 4483990 - DNA, 25 bp, Homo sapien
ttcaatgtaattccaggagacagtt

SEQ ID NO: 4483991 - DNA, 25 bp, Homo sapien
tgtaattccaggagacagttcttca

SEQ ID NO: 4483992 - DNA, 25 bp, Homo sapien
caatgtaattccaggagacagttct

SEQ ID NO: 4483993 - DNA, 25 bp, Homo sapien
tatgagaattttcgtgccacaaagt

SEQ ID NO: 4483994 - DNA, 25 bp, Homo sapien
aataatcctccatgtttgtataatg

SEQ ID NO: 4483995 - DNA, 25 bp, Homo sapien
tgtataatgttatttccacatcatc

SEQ ID NO: 4483996 - DNA, 25 bp, Homo sapien
gaagcaatcacgctgaatacttttc

SEQ ID NO: 4483997 - DNA, 25 bp, Homo sapien
cacacttcacacgttgattttagca

SEQ ID NO: 4483998 - DNA, 25 bp, Homo sapien
aaatggtctgataaaatatcgcccc

SEQ ID NO: 4483999 - DNA, 25 bp, Homo sapien
gactatctgctgctccatggtaagg

SEQ ID NO: 4484000 - DNA, 25 bp, Homo sapien
aagtgagtatactgggactatctgc

SEQ ID NO: 4484001 - DNA, 25 bp, Homo sapien
tagtacacagttttattggtgcaaa

SEQ ID NO: 4484002 - DNA, 25 bp, Homo sapien
gtagtacacagttttattggtgcaa

SEQ ID NO: 4484003 - DNA, 25 bp, Homo sapien
taatagaatcatgcatcgcaggtga

SEQ ID NO: 4484004 - DNA, 25 bp, Homo sapien
ggttccatcccttgcagttagacta

SEQ ID NO: 4484005 - DNA, 25 bp, Homo sapien
catcttcatatgtggagggaacctt

SEQ ID NO: 4484006 - DNA, 25 bp, Homo sapien
tgtgtccagctcaattctgaagagg

SEQ ID NO: 4484007 - DNA, 25 bp, Homo sapien
cccgagtgggcaggctttcggctct

SEQ ID NO: 4484008 - DNA, 25 bp, Homo sapien
tcgtggcggtaacactgacagctcc

SEQ ID NO: 4484009 - DNA, 25 bp, Homo sapien
tgagtggcacctccgagtttcgcag

SEQ ID NO: 4484010 - DNA, 25 bp, Homo sapien
gagtttcgcagggtccacgttgtcg

SEQ ID NO: 4484011 - DNA, 25 bp, Homo sapien
ctttcccgcagacaggtagtgcggc

SEQ ID NO: 4484012 - DNA, 25 bp, Homo sapien
gtggatcccgctttcccgcagacag

SEQ ID NO: 4484013 - DNA, 25 bp, Homo sapien
cgacgtcctggggtggatcccgctt

SEQ ID NO: 4484014 - DNA, 25 bp, Homo sapien
cccgcagacaggtagtgcggcctcg

SEQ ID NO: 4484015 - DNA, 25 bp, Homo sapien
agcctgaggcataggactcccggct

SEQ ID NO: 4484016 - DNA, 25 bp, Homo sapien
ggctggcctcgacagcttctcgggt

SEQ ID NO: 4484017 - DNA, 25 bp, Homo sapien
tcgggtgccacgctttcattctggg

SEQ ID NO: 4484018 - DNA, 25 bp, Homo sapien
catcacgcacgcagcgagctgagga

SEQ ID NO: 4484019 - DNA, 25 bp, Homo sapien
cattactaggtgcttttaagggtct

SEQ ID NO: 4484020 - DNA, 25 bp, Homo sapien
tgcattactaggtgcttttaagggt

SEQ ID NO: 4484021 - DNA, 25 bp, Homo sapien
gcattactaggtgcttttaagggtc

SEQ ID NO: 4484022 - DNA, 25 bp, Homo sapien
tgcgtccttccaagggattataccc

SEQ ID NO: 4484023 - DNA, 25 bp, Homo sapien
aatggtgaaccaagggtgaccttca

SEQ ID NO: 4484024 - DNA, 25 bp, Homo sapien
tacattcccttttgctgcgtccttc

SEQ ID NO: 4484025 - DNA, 25 bp, Homo sapien
tcactcccaacgtgtaacaaagtct

SEQ ID NO: 4484026 - DNA, 25 bp, Homo sapien
actgctgatagtttccacttgacat

SEQ ID NO: 4484027 - DNA, 25 bp, Homo sapien
agtgggtttgctaagagcctctgac

SEQ ID NO: 4484028 - DNA, 25 bp, Homo sapien
gaaagtgggtttgctaagagcctct

SEQ ID NO: 4484029 - DNA, 25 bp, Homo sapien
tgggtttgctaagagcctctgactg

SEQ ID NO: 4484030 - DNA, 25 bp, Homo sapien
acacgagagaagctgtgttgtctcc

SEQ ID NO: 4484031 - DNA, 25 bp, Homo sapien
tgttggaaatccagcggctttcaga

SEQ ID NO: 4484032 - DNA, 25 bp, Homo sapien
ttgaggacatattcagttgggccat

SEQ ID NO: 4484033 - DNA, 25 bp, Homo sapien
aacactgactccactaacgcagagg

SEQ ID NO: 4484034 - DNA, 25 bp, Homo sapien
cctcaccaagtagcttttgatttca

SEQ ID NO: 4484035 - DNA, 25 bp, Homo sapien
agcctcaccaagtagcttttgattt

SEQ ID NO: 4484036 - DNA, 25 bp, Homo sapien
ggaggtaagtcagcagcctcaccaa

SEQ ID NO: 4484037 - DNA, 25 bp, Homo sapien
ctgggaggtaagtcagcagcctcac

SEQ ID NO: 4484038 - DNA, 25 bp, Homo sapien
tcatacaatagctgggggctgacgg

SEQ ID NO: 4484039 - DNA, 25 bp, Homo sapien
ctgcagtgtcttatccaatttggca

SEQ ID NO: 4484040 - DNA, 25 bp, Homo sapien
tccaatttcatacaatagctggggg

SEQ ID NO: 4484041 - DNA, 25 bp, Homo sapien
tccaatttggcagctagttttccaa

SEQ ID NO: 4484042 - DNA, 25 bp, Homo sapien
ggttttgccatgtgggccaggctag

SEQ ID NO: 4484043 - DNA, 25 bp, Homo sapien
cagtctccaaagcagctgggattat

SEQ ID NO: 4484044 - DNA, 25 bp, Homo sapien
tgcaccaccatgcccagctaatttt

SEQ ID NO: 4484045 - DNA, 25 bp, Homo sapien
ggcgtgcaccaccatgcccagctaa

SEQ ID NO: 4484046 - DNA, 25 bp, Homo sapien
cgcccggcctggtcttcagtttttg

SEQ ID NO: 4484047 - DNA, 25 bp, Homo sapien
ctggcccagggcatacaggtatttc

SEQ ID NO: 4484048 - DNA, 25 bp, Homo sapien
tctcggtttcgattctggcccaggg

SEQ ID NO: 4484049 - DNA, 25 bp, Homo sapien
gatgaatgacatgctcaacaatctc

SEQ ID NO: 4484050 - DNA, 25 bp, Homo sapien
gattccagatgaagttctcccgatg

SEQ ID NO: 4484051 - DNA, 25 bp, Homo sapien
tatagcctagagaaacacctgtctg

SEQ ID NO: 4484052 - DNA, 25 bp, Homo sapien
tcctgtactagagggttcattgcag

SEQ ID NO: 4484053 - DNA, 25 bp, Homo sapien
tggatcaatctgcaaaacatgctga

SEQ ID NO: 4484054 - DNA, 25 bp, Homo sapien
catgtaaagtttagaggaggcttca

SEQ ID NO: 4484055 - DNA, 25 bp, Homo sapien
tttcaaaccctgcaaggacatggcc

SEQ ID NO: 4484056 - DNA, 25 bp, Homo sapien
ggacatggcctcctacttgtatagg

SEQ ID NO: 4484057 - DNA, 25 bp, Homo sapien
atttgctgtaagtgtttccacccgg

SEQ ID NO: 4484058 - DNA, 25 bp, Homo sapien
tagccatagctcatgtcaccaaagt

SEQ ID NO: 4484059 - DNA, 25 bp, Homo sapien
tctgtggtagtgaagagcatggtct

SEQ ID NO: 4484060 - DNA, 25 bp, Homo sapien
tcaattcagaggatcaacactggtc

SEQ ID NO: 4484061 - DNA, 25 bp, Homo sapien
catgtaaacatctaaacagtggtca

SEQ ID NO: 4484062 - DNA, 25 bp, Homo sapien
gaggtcaacctagataaaaaccaca

SEQ ID NO: 4484063 - DNA, 25 bp, Homo sapien
ctggagtttgaaggccaagaacctg

SEQ ID NO: 4484064 - DNA, 25 bp, Homo sapien
tgtaagctgaagaaccagtgaagcc

SEQ ID NO: 4484065 - DNA, 25 bp, Homo sapien
tagggtcttccagagaaaccgaatc

SEQ ID NO: 4484066 - DNA, 25 bp, Homo sapien
tctgaggctgaggacctaagaacct

SEQ ID NO: 4484067 - DNA, 25 bp, Homo sapien
acagatctttactgggtcttctagg

SEQ ID NO: 4484068 - DNA, 25 bp, Homo sapien
ttcaacagatctttactgggtcttc

SEQ ID NO: 4484069 - DNA, 25 bp, Homo sapien
attcaacagatctttactgggtctt

SEQ ID NO: 4484070 - DNA, 25 bp, Homo sapien
gatggttcccactgagaggttctgt

SEQ ID NO: 4484071 - DNA, 25 bp, Homo sapien
gaatctgggtgagcctgtgactaca

SEQ ID NO: 4484072 - DNA, 25 bp, Homo sapien
tagtacccagttgtaaccaggcagc

SEQ ID NO: 4484073 - DNA, 25 bp, Homo sapien
gccaacagcctagatgaagtcccag

SEQ ID NO: 4484074 - DNA, 25 bp, Homo sapien
catttgaggcctaagtgtagagtgc

SEQ ID NO: 4484075 - DNA, 25 bp, Homo sapien
ggtagaatttctcaggtcaagagag

SEQ ID NO: 4484076 - DNA, 25 bp, Homo sapien
gagggattccttgagaaaaagggca

SEQ ID NO: 4484077 - DNA, 25 bp, Homo sapien
gactgagtagttcggtctgatctga

SEQ ID NO: 4484078 - DNA, 25 bp, Homo sapien
tcagcatatactcgcaccattttat

SEQ ID NO: 4484079 - DNA, 25 bp, Homo sapien
cgtcagcatatactcgcaccatttt

SEQ ID NO: 4484080 - DNA, 25 bp, Homo sapien
ttttatcttctttactgaaattgtc

SEQ ID NO: 4484081 - DNA, 25 bp, Homo sapien
gcatatactcgcaccattttatctt

SEQ ID NO: 4484082 - DNA, 25 bp, Homo sapien
cagcacagttaaagcaataccctac

SEQ ID NO: 4484083 - DNA, 25 bp, Homo sapien
gagctagaacccgtgcccctcgtgg

SEQ ID NO: 4484084 - DNA, 25 bp, Homo sapien
tgcagcttaggctagggtcctcagc

SEQ ID NO: 4484085 - DNA, 25 bp, Homo sapien
cgaggacgcggaagtccttcttgcg

SEQ ID NO: 4484086 - DNA, 25 bp, Homo sapien
aacccgtgcccctcgtgggagctgg

SEQ ID NO: 4484087 - DNA, 25 bp, Homo sapien
gaataaccgctgctaatatggcccc

SEQ ID NO: 4484088 - DNA, 25 bp, Homo sapien
tggcccccgcgcatgcgcagaaccg

SEQ ID NO: 4484089 - DNA, 25 bp, Homo sapien
cgaataaccgctgctaatatggccc

SEQ ID NO: 4484090 - DNA, 25 bp, Homo sapien
aatatggcccccgcgcatgcgcaga

SEQ ID NO: 4484091 - DNA, 25 bp, Homo sapien
tgaagacctgagatgtccacggagc

SEQ ID NO: 4484092 - DNA, 25 bp, Homo sapien
cctgagatgtccacggagcccttaa

SEQ ID NO: 4484093 - DNA, 25 bp, Homo sapien
gagcccttaactccacggaagaata

SEQ ID NO: 4484094 - DNA, 25 bp, Homo sapien
accctgaagacctgagatgtccacg

SEQ ID NO: 4484095 - DNA, 25 bp, Homo sapien
ggaccgactgtcttgacgttcacga

SEQ ID NO: 4484096 - DNA, 25 bp, Homo sapien
aggcggtgcagagtcatcgtgccca

SEQ ID NO: 4484097 - DNA, 25 bp, Homo sapien
gcccaatgggaaagcggccaagctt

SEQ ID NO: 4484098 - DNA, 25 bp, Homo sapien
attcccggcggtcggtccgtcacag

SEQ ID NO: 4484099 - DNA, 25 bp, Homo sapien
catcagtaccattcgtgcaaaaggc

SEQ ID NO: 4484100 - DNA, 25 bp, Homo sapien
tattttgagttcaccggcacctccg

SEQ ID NO: 4484101 - DNA, 25 bp, Homo sapien
gacgccgggcacagcactattttga

SEQ ID NO: 4484102 - DNA, 25 bp, Homo sapien
gagtatccaaatcacgcagagcctt

SEQ ID NO: 4484103 - DNA, 25 bp, Homo sapien
aaaagcatttgctgactttacaaat

SEQ ID NO: 4484104 - DNA, 25 bp, Homo sapien
ctttattcagctaagtgtcaggcat

SEQ ID NO: 4484105 - DNA, 25 bp, Homo sapien
gcatttgctgactttacaaatctgt

SEQ ID NO: 4484106 - DNA, 25 bp, Homo sapien
tatttactccctttattcagctaag

SEQ ID NO: 4484107 - DNA, 25 bp, Homo sapien
tgaaagtaggccaactcctgcaagc

SEQ ID NO: 4484108 - DNA, 25 bp, Homo sapien
gcaatactgtttatcaggcaaccgt

SEQ ID NO: 4484109 - DNA, 25 bp, Homo sapien
caaagttcaataggtgagaggaaac

SEQ ID NO: 4484110 - DNA, 25 bp, Homo sapien
cacatgagtgattcctacccactga

SEQ ID NO: 4484111 - DNA, 25 bp, Homo sapien
ttctggagaaaatatagtggtcctg

SEQ ID NO: 4484112 - DNA, 25 bp, Homo sapien
agaaaatatagtggtcctggagtca

SEQ ID NO: 4484113 - DNA, 25 bp, Homo sapien
gagaaaatatagtggtcctggagtc

SEQ ID NO: 4484114 - DNA, 25 bp, Homo sapien
tggagaaaatatagtggtcctggag

SEQ ID NO: 4484115 - DNA, 25 bp, Homo sapien
tcactcttctatggtataatcaacc

SEQ ID NO: 4484116 - DNA, 25 bp, Homo sapien
aaaggatgaactttgcaactaccaa

SEQ ID NO: 4484117 - DNA, 25 bp, Homo sapien
tgcttcaaagtacaaaaaggatgaa

SEQ ID NO: 4484118 - DNA, 25 bp, Homo sapien
caacctggtgatgataattgcttca

SEQ ID NO: 4484119 - DNA, 25 bp, Homo sapien
ggcatattcaacttggtataagcga

SEQ ID NO: 4484120 - DNA, 25 bp, Homo sapien
gcatattcaacttggtataagcgac

SEQ ID NO: 4484121 - DNA, 25 bp, Homo sapien
aggtgcctgcatgtccaatagcttc

SEQ ID NO: 4484122 - DNA, 25 bp, Homo sapien
ggtgcctgcatgtccaatagcttcc

SEQ ID NO: 4484123 - DNA, 25 bp, Homo sapien
tcaagaagcttgtggatgttgcgtc

SEQ ID NO: 4484124 - DNA, 25 bp, Homo sapien
agacttcatcaagaagcttgtggat

SEQ ID NO: 4484125 - DNA, 25 bp, Homo sapien
agcttgtggatgttgcgtctctctg

SEQ ID NO: 4484126 - DNA, 25 bp, Homo sapien
tcatcaagaagcttgtggatgttgc

SEQ ID NO: 4484127 - DNA, 25 bp, Homo sapien
gagccttagttcattagtcagaaca

SEQ ID NO: 4484128 - DNA, 25 bp, Homo sapien
cattagcatcagaagttatgcctgc

SEQ ID NO: 4484129 - DNA, 25 bp, Homo sapien
tcattagtcagaacattagcatcag

SEQ ID NO: 4484130 - DNA, 25 bp, Homo sapien
atcagaagttatgcctgccacactg

SEQ ID NO: 4484131 - DNA, 25 bp, Homo sapien
gggaacaagtcaacatctgaatatt

SEQ ID NO: 4484132 - DNA, 25 bp, Homo sapien
gatgggcacattagtagttttctct

SEQ ID NO: 4484133 - DNA, 25 bp, Homo sapien
taacccggtgtggtggtcagctact

SEQ ID NO: 4484134 - DNA, 25 bp, Homo sapien
taatctttgcaaaagtgagctctcc

SEQ ID NO: 4484135 - DNA, 25 bp, Homo sapien
tatcacacagcgctgtaaccaactg

SEQ ID NO: 4484136 - DNA, 25 bp, Homo sapien
tattggctcctgatactgtaataaa

SEQ ID NO: 4484137 - DNA, 25 bp, Homo sapien
aaccaactgctcacaaggtattggc

SEQ ID NO: 4484138 - DNA, 25 bp, Homo sapien
tgtttgatatcacacagcgctgtaa

SEQ ID NO: 4484139 - DNA, 25 bp, Homo sapien
cgtaatttccactagggtcactctg

SEQ ID NO: 4484140 - DNA, 25 bp, Homo sapien
tcactctgatagagctgaaagccat

SEQ ID NO: 4484141 - DNA, 25 bp, Homo sapien
gaaagccatagtgcttatcccagcc

SEQ ID NO: 4484142 - DNA, 25 bp, Homo sapien
tgtacagcaatgaaacaccaaaggg

SEQ ID NO: 4484143 - DNA, 25 bp, Homo sapien
tatagtcttgtttcaacattgacac

SEQ ID NO: 4484144 - DNA, 25 bp, Homo sapien
gctgacttcaaggtcatttctcctt

SEQ ID NO: 4484145 - DNA, 25 bp, Homo sapien
ttatagtcttgtttcaacattgaca

SEQ ID NO: 4484146 - DNA, 25 bp, Homo sapien
agtgctgacttcaaggtcatttctc

SEQ ID NO: 4484147 - DNA, 25 bp, Homo sapien
ttttgatcaactgctccacttcttt

SEQ ID NO: 4484148 - DNA, 25 bp, Homo sapien
tttttgatcaactgctccacttctt

SEQ ID NO: 4484149 - DNA, 25 bp, Homo sapien
tgatcaactgctccacttctttttg

SEQ ID NO: 4484150 - DNA, 25 bp, Homo sapien
tttgatcaactgctccacttctttt

SEQ ID NO: 4484151 - DNA, 25 bp, Homo sapien
ttctgttctttttctttcttctcac

SEQ ID NO: 4484152 - DNA, 25 bp, Homo sapien
ctatttatccttttctttctgttct

SEQ ID NO: 4484153 - DNA, 25 bp, Homo sapien
tttctgttctttttctttcttctca

SEQ ID NO: 4484154 - DNA, 25 bp, Homo sapien
cctagtgtggaagagtaggactgct

SEQ ID NO: 4484155 - DNA, 25 bp, Homo sapien
taagacgtccatgaagggtaaccat

SEQ ID NO: 4484156 - DNA, 25 bp, Homo sapien
cagaaatgacaaggacccaattcag

SEQ ID NO: 4484157 - DNA, 25 bp, Homo sapien
gcttttacactgaaatggtgcccca

SEQ ID NO: 4484158 - DNA, 25 bp, Homo sapien
tatttaacaattactgctacagaga

SEQ ID NO: 4484159 - DNA, 25 bp, Homo sapien
atttaacaattactgctacagagaa

SEQ ID NO: 4484160 - DNA, 25 bp, Homo sapien
tatatttaacaattactgctacaga

SEQ ID NO: 4484161 - DNA, 25 bp, Homo sapien
ttgtatatttaacaattactgctac

SEQ ID NO: 4484162 - DNA, 25 bp, Homo sapien
ggaaaccacctgtcctgcaactcag

SEQ ID NO: 4484163 - DNA, 25 bp, Homo sapien
tttgggatgcatcaggcaacactct

SEQ ID NO: 4484164 - DNA, 25 bp, Homo sapien
ttcagatgtgtattgctaaggcagc

SEQ ID NO: 4484165 - DNA, 25 bp, Homo sapien
gcttgctattagtgatgggcccctg

SEQ ID NO: 4484166 - DNA, 25 bp, Homo sapien
tccagggggatacgccaattactca

SEQ ID NO: 4484167 - DNA, 25 bp, Homo sapien
ccagggggatacgccaattactcat

SEQ ID NO: 4484168 - DNA, 25 bp, Homo sapien
ttccagggggatacgccaattactc

SEQ ID NO: 4484169 - DNA, 25 bp, Homo sapien
gtgagacaaaacgagggcagacgca

SEQ ID NO: 4484170 - DNA, 25 bp, Homo sapien
caaaacgagggcagacgcagcagag

SEQ ID NO: 4484171 - DNA, 25 bp, Homo sapien
gagtgtgagtcgtgagacaaaacga

SEQ ID NO: 4484172 - DNA, 25 bp, Homo sapien
cgccgcgcggggaacgcgaactctt

SEQ ID NO: 4484173 - DNA, 25 bp, Homo sapien
gccgcgcccgctagaccgcagcgcc

SEQ ID NO: 4484174 - DNA, 25 bp, Homo sapien
cgccccgcgaccagctggaccaaga

SEQ ID NO: 4484175 - DNA, 25 bp, Homo sapien
ccgccgcgcccgctagaccgcagcg

SEQ ID NO: 4484176 - DNA, 25 bp, Homo sapien
gcagcgccccgcgaccagctggacc

SEQ ID NO: 4484177 - DNA, 25 bp, Homo sapien
tgttccacaggacgaacccatcttt

SEQ ID NO: 4484178 - DNA, 25 bp, Homo sapien
gttttgcaatagaagaaggttcaga

SEQ ID NO: 4484179 - DNA, 25 bp, Homo sapien
gtagtcttgaaataaatccttaagc

SEQ ID NO: 4484180 - DNA, 25 bp, Homo sapien
ccaattgagatattgcaagtccaaa

SEQ ID NO: 4484181 - DNA, 25 bp, Homo sapien
accactcctgtatgccagggctccc

SEQ ID NO: 4484182 - DNA, 25 bp, Homo sapien
tcagaccactcctgtatgccagggc

SEQ ID NO: 4484183 - DNA, 25 bp, Homo sapien
cagaccactcctgtatgccagggct

SEQ ID NO: 4484184 - DNA, 25 bp, Homo sapien
agaccactcctgtatgccagggctc

SEQ ID NO: 4484185 - DNA, 25 bp, Homo sapien
ccagacgtttgttgtcattaactga

SEQ ID NO: 4484186 - DNA, 25 bp, Homo sapien
cagacgtttgttgtcattaactgat

SEQ ID NO: 4484187 - DNA, 25 bp, Homo sapien
aaccagacgtttgttgtcattaact

SEQ ID NO: 4484188 - DNA, 25 bp, Homo sapien
gacgtttgttgtcattaactgattt

SEQ ID NO: 4484189 - DNA, 25 bp, Homo sapien
aacaaaacgatgtctggtgtccaga

SEQ ID NO: 4484190 - DNA, 25 bp, Homo sapien
gatgtctggtgtccagacagagtct

SEQ ID NO: 4484191 - DNA, 25 bp, Homo sapien
tccatcttaattttacatctatcca

SEQ ID NO: 4484192 - DNA, 25 bp, Homo sapien
ttatcaaacaaaacgatgtctggtg

SEQ ID NO: 4484193 - DNA, 25 bp, Homo sapien
tactggtcccttcaaaacgtccatc

SEQ ID NO: 4484194 - DNA, 25 bp, Homo sapien
tgtgatccatcataagtccaagaac

SEQ ID NO: 4484195 - DNA, 25 bp, Homo sapien
aacgtgacatctatggtacaggaac

SEQ ID NO: 4484196 - DNA, 25 bp, Homo sapien
tgatgactgttttcgtactggtccc

SEQ ID NO: 4484197 - DNA, 25 bp, Homo sapien
ggcaggcgcttgattacaaatgagt

SEQ ID NO: 4484198 - DNA, 25 bp, Homo sapien
agaggcaggcgcttgattacaaatg

SEQ ID NO: 4484199 - DNA, 25 bp, Homo sapien
aaatgagtaagtgacatacggatac

SEQ ID NO: 4484200 - DNA, 25 bp, Homo sapien
aacaaggtataaaagagaggcaggc

SEQ ID NO: 4484201 - DNA, 25 bp, Homo sapien
gaagtgcagagacaaatcttttcac

SEQ ID NO: 4484202 - DNA, 25 bp, Homo sapien
tgaagtgcagagacaaatcttttca

SEQ ID NO: 4484203 - DNA, 25 bp, Homo sapien
ctgaagtgcagagacaaatcttttc

SEQ ID NO: 4484204 - DNA, 25 bp, Homo sapien
tcatggtaaataccagatactctcc

SEQ ID NO: 4484205 - DNA, 25 bp, Homo sapien
aatgttgatagcgaagacggttacc

SEQ ID NO: 4484206 - DNA, 25 bp, Homo sapien
cggttaccataattgacagtgtcac

SEQ ID NO: 4484207 - DNA, 25 bp, Homo sapien
gatactctccaattagaggtatgac

SEQ ID NO: 4484208 - DNA, 25 bp, Homo sapien
gcgtgtgaagaaatatcttgcggac

SEQ ID NO: 4484209 - DNA, 25 bp, Homo sapien
aagcgtgtgaagaaatatcttgcgg

SEQ ID NO: 4484210 - DNA, 25 bp, Homo sapien
agcgtgtgaagaaatatcttgcgga

SEQ ID NO: 4484211 - DNA, 25 bp, Homo sapien
tctagaagattttggtccactacca

SEQ ID NO: 4484212 - DNA, 25 bp, Homo sapien
agaatcgagcgcagcttccaatgtg

SEQ ID NO: 4484213 - DNA, 25 bp, Homo sapien
tcttgtaatgtagcgaatagaatcg

SEQ ID NO: 4484214 - DNA, 25 bp, Homo sapien
gattttggtccactaccactctcag

SEQ ID NO: 4484215 - DNA, 25 bp, Homo sapien
taaaatggaagaagatctgcatttg

SEQ ID NO: 4484216 - DNA, 25 bp, Homo sapien
aaaatggaagaagatctgcatttgt

SEQ ID NO: 4484217 - DNA, 25 bp, Homo sapien
ttaaaatggaagaagatctgcattt

SEQ ID NO: 4484218 - DNA, 25 bp, Homo sapien
aacaattcatcaggtcagagccaag

SEQ ID NO: 4484219 - DNA, 25 bp, Homo sapien
tagaagaaataacagtgacaagact

SEQ ID NO: 4484220 - DNA, 25 bp, Homo sapien
gttataatggagttctgcctacaga

SEQ ID NO: 4484221 - DNA, 25 bp, Homo sapien
tagagttatccaagatgctgatggg

SEQ ID NO: 4484222 - DNA, 25 bp, Homo sapien
taagtgaccctatactcagctcagg

SEQ ID NO: 4484223 - DNA, 25 bp, Homo sapien
tattttgagagactctagcctgaga

SEQ ID NO: 4484224 - DNA, 25 bp, Homo sapien
tggccctgaacctctatgaaggatg

SEQ ID NO: 4484225 - DNA, 25 bp, Homo sapien
cccattgctgcctctaaacggtaag

SEQ ID NO: 4484226 - DNA, 25 bp, Homo sapien
aagtccacagaaacatccgatcaag

SEQ ID NO: 4484227 - DNA, 25 bp, Homo sapien
gaacctgggctatgaatttccaatc

SEQ ID NO: 4484228 - DNA, 25 bp, Homo sapien
aagagatccaacaattgaaacgaaa

SEQ ID NO: 4484229 - DNA, 25 bp, Homo sapien
tgaactggtattaatatatttgccc

SEQ ID NO: 4484230 - DNA, 25 bp, Homo sapien
actcagtgagtacaggaaagtttac

SEQ ID NO: 4484231 - DNA, 25 bp, Homo sapien
tcataattttataggtgccatcaga

SEQ ID NO: 4484232 - DNA, 25 bp, Homo sapien
gcccggccacattaagtaattatta

SEQ ID NO: 4484233 - DNA, 25 bp, Homo sapien
caacttagtctgttaaagcttgcac

SEQ ID NO: 4484234 - DNA, 25 bp, Homo sapien
ttctatctaagacaatcacgctggg

SEQ ID NO: 4484235 - DNA, 25 bp, Homo sapien
tcacgctgggaataggtttcaacat

SEQ ID NO: 4484236 - DNA, 25 bp, Homo sapien
gaccacagcatgaacctttagaaca

SEQ ID NO: 4484237 - DNA, 25 bp, Homo sapien
catgactgaagggactagctatctc

SEQ ID NO: 4484238 - DNA, 25 bp, Homo sapien
atgaccaggccaacaagcaacgagg

SEQ ID NO: 4484239 - DNA, 25 bp, Homo sapien
tacggtgccgagctctcaaatctga

SEQ ID NO: 4484240 - DNA, 25 bp, Homo sapien
cacacaatgccctcatgggtgaaga

SEQ ID NO: 4484241 - DNA, 25 bp, Homo sapien
ttcagccgcgcagagtccaaaggct

SEQ ID NO: 4484242 - DNA, 25 bp, Homo sapien
tctctggcggagacatattggagcc

SEQ ID NO: 4484243 - DNA, 25 bp, Homo sapien
tgcattttaaccaggtccccaggag

SEQ ID NO: 4484244 - DNA, 25 bp, Homo sapien
gcatcgcctgcgagcttatcggaaa

SEQ ID NO: 4484245 - DNA, 25 bp, Homo sapien
tctcaaggagaagcgctggcattcc

SEQ ID NO: 4484246 - DNA, 25 bp, Homo sapien
tggaccttggtaacaacatcacccg

SEQ ID NO: 4484247 - DNA, 25 bp, Homo sapien
tgagccaaggtcaaagcggtgcatc

SEQ ID NO: 4484248 - DNA, 25 bp, Homo sapien
tccctgccgggaagcacaagttcct

SEQ ID NO: 4484249 - DNA, 25 bp, Homo sapien
tatgcgctcccctcaacaatgtggg

SEQ ID NO: 4484250 - DNA, 25 bp, Homo sapien
cagctcgatgaggactccttctggg

SEQ ID NO: 4484251 - DNA, 25 bp, Homo sapien
tgggctacagctcgatgaggactcc

SEQ ID NO: 4484252 - DNA, 25 bp, Homo sapien
ccctgggctacagctcgatgaggac

SEQ ID NO: 4484253 - DNA, 25 bp, Homo sapien
tcaacagtttttgaagccaaagctg

SEQ ID NO: 4484254 - DNA, 25 bp, Homo sapien
cttgccatcacccccacaaagacac

SEQ ID NO: 4484255 - DNA, 25 bp, Homo sapien
ccatcacccccacaaagacactcca

SEQ ID NO: 4484256 - DNA, 25 bp, Homo sapien
tgccatcacccccacaaagacactc

SEQ ID NO: 4484257 - DNA, 25 bp, Homo sapien
catcacccccacaaagacactccat

SEQ ID NO: 4484258 - DNA, 25 bp, Homo sapien
ctgtggccagtttcctctgttgagt

SEQ ID NO: 4484259 - DNA, 25 bp, Homo sapien
ttttttcttggctgtggccagtttc

SEQ ID NO: 4484260 - DNA, 25 bp, Homo sapien
tttcttggctgtggccagtttcctc

SEQ ID NO: 4484261 - DNA, 25 bp, Homo sapien
tcctctgttgagtttcttctaacat

SEQ ID NO: 4484262 - DNA, 25 bp, Homo sapien
aacaccagggctgttcctctgctga

SEQ ID NO: 4484263 - DNA, 25 bp, Homo sapien
caccagggctgttcctctgctgata

SEQ ID NO: 4484264 - DNA, 25 bp, Homo sapien
ttgtctcagggctactgccagtttt

SEQ ID NO: 4484265 - DNA, 25 bp, Homo sapien
gtctcagggctactgccagtttttt

SEQ ID NO: 4484266 - DNA, 25 bp, Homo sapien
gagtggttaaggttggacacccgca

SEQ ID NO: 4484267 - DNA, 25 bp, Homo sapien
ccattggagtggttaaggttggaca

SEQ ID NO: 4484268 - DNA, 25 bp, Homo sapien
cattggagtggttaaggttggacac

SEQ ID NO: 4484269 - DNA, 25 bp, Homo sapien
cttccacttgtccaatgggggagca

SEQ ID NO: 4484270 - DNA, 25 bp, Homo sapien
cacttgtccaatgggggagcactac

SEQ ID NO: 4484271 - DNA, 25 bp, Homo sapien
ttccacttgtccaatgggggagcac

SEQ ID NO: 4484272 - DNA, 25 bp, Homo sapien
ccacttgtccaatgggggagcacta

SEQ ID NO: 4484273 - DNA, 25 bp, Homo sapien
gaggaggattgtggggagaggtgga

SEQ ID NO: 4484274 - DNA, 25 bp, Homo sapien
aggagttggaggaggattgtgggga

SEQ ID NO: 4484275 - DNA, 25 bp, Homo sapien
tggaggaggattgtggggagaggtg

SEQ ID NO: 4484276 - DNA, 25 bp, Homo sapien
gagttggaggaggattgtggggaga

SEQ ID NO: 4484277 - DNA, 25 bp, Homo sapien
tttagttgattgattattgcggagc

SEQ ID NO: 4484278 - DNA, 25 bp, Homo sapien
gcggagcttgagttcagggctactt

SEQ ID NO: 4484279 - DNA, 25 bp, Homo sapien
catttagttgattgattattgcgga

SEQ ID NO: 4484280 - DNA, 25 bp, Homo sapien
tcagggctacttccagttcttggta

SEQ ID NO: 4484281 - DNA, 25 bp, Homo sapien
ccattccccagaccaggaagtggta

SEQ ID NO: 4484282 - DNA, 25 bp, Homo sapien
tcaggtgactgagggtggccccctc

SEQ ID NO: 4484283 - DNA, 25 bp, Homo sapien
cccagaccaggaagtggtaagcagt

SEQ ID NO: 4484284 - DNA, 25 bp, Homo sapien
tccccagaccaggaagtggtaagca

SEQ ID NO: 4484285 - DNA, 25 bp, Homo sapien
tgttccacttgtttcttctgctgtt

SEQ ID NO: 4484286 - DNA, 25 bp, Homo sapien
gttccacttgtttcttctgctgttt

SEQ ID NO: 4484287 - DNA, 25 bp, Homo sapien
ttccagctgatgttccacttgtttc

SEQ ID NO: 4484288 - DNA, 25 bp, Homo sapien
ttcttccagctgatgttccacttgt

SEQ ID NO: 4484289 - DNA, 25 bp, Homo sapien
gacgagattggcgcctctacatctg

SEQ ID NO: 4484290 - DNA, 25 bp, Homo sapien
gtgagacgagattggcgcctctaca

SEQ ID NO: 4484291 - DNA, 25 bp, Homo sapien
gagacgagattggcgcctctacatc

SEQ ID NO: 4484292 - DNA, 25 bp, Homo sapien
cgagattggcgcctctacatctgag

SEQ ID NO: 4484293 - DNA, 25 bp, Homo sapien
agaatgccaccaatgccccaggaca

SEQ ID NO: 4484294 - DNA, 25 bp, Homo sapien
cagaatgccaccaatgccccaggac

SEQ ID NO: 4484295 - DNA, 25 bp, Homo sapien
aatgccaccaatgccccaggacagg

SEQ ID NO: 4484296 - DNA, 25 bp, Homo sapien
gaatgccaccaatgccccaggacag

SEQ ID NO: 4484297 - DNA, 25 bp, Homo sapien
aggaagaggaagacagggctcttac

SEQ ID NO: 4484298 - DNA, 25 bp, Homo sapien
tataggaagaggaagacagggctct

SEQ ID NO: 4484299 - DNA, 25 bp, Homo sapien
ctataggaagaggaagacagggctc

SEQ ID NO: 4484300 - DNA, 25 bp, Homo sapien
taggaagaggaagacagggctctta

SEQ ID NO: 4484301 - DNA, 25 bp, Homo sapien
tgctttgtgtatttccttatttgct

SEQ ID NO: 4484302 - DNA, 25 bp, Homo sapien
ctctaactgctccgtttgtgctttg

SEQ ID NO: 4484303 - DNA, 25 bp, Homo sapien
ctaactgctccgtttgtgctttgtg

SEQ ID NO: 4484304 - DNA, 25 bp, Homo sapien
actgctccgtttgtgctttgtgtat

SEQ ID NO: 4484305 - DNA, 25 bp, Homo sapien
aacattctccggaggacaggagaaa

SEQ ID NO: 4484306 - DNA, 25 bp, Homo sapien
gaaagaaacattctccggaggacag

SEQ ID NO: 4484307 - DNA, 25 bp, Homo sapien
aagaaacattctccggaggacagga

SEQ ID NO: 4484308 - DNA, 25 bp, Homo sapien
gaaacattctccggaggacaggaga

SEQ ID NO: 4484309 - DNA, 25 bp, Homo sapien
gtttgggagaaaagccaagcaagtg

SEQ ID NO: 4484310 - DNA, 25 bp, Homo sapien
tgtttgggagaaaagccaagcaagt

SEQ ID NO: 4484311 - DNA, 25 bp, Homo sapien
gaattgaatgtttgggagaaaagcc

SEQ ID NO: 4484312 - DNA, 25 bp, Homo sapien
ctggaattgaatgtttgggagaaaa

SEQ ID NO: 4484313 - DNA, 25 bp, Homo sapien
cagcacgtttagtatggtaaagggt

SEQ ID NO: 4484314 - DNA, 25 bp, Homo sapien
cttcgaagtgtcgggcagcacgttt

SEQ ID NO: 4484315 - DNA, 25 bp, Homo sapien
tgtcgggcagcacgtttagtatggt

SEQ ID NO: 4484316 - DNA, 25 bp, Homo sapien
tagtatggtaaagggtggtcttcaa

SEQ ID NO: 4484317 - DNA, 25 bp, Homo sapien
aaagacctgtcaaagtgccaggttg

SEQ ID NO: 4484318 - DNA, 25 bp, Homo sapien
gttgaaggatgacgggatgcccaga

SEQ ID NO: 4484319 - DNA, 25 bp, Homo sapien
cctaaagacctgtcaaagtgccagg

SEQ ID NO: 4484320 - DNA, 25 bp, Homo sapien
aggatgacgggatgcccagattccc

SEQ ID NO: 4484321 - DNA, 25 bp, Homo sapien
gagcccgctccgattcttgaatatg

SEQ ID NO: 4484322 - DNA, 25 bp, Homo sapien
tatgctgtaaggagtattgcaggca

SEQ ID NO: 4484323 - DNA, 25 bp, Homo sapien
tcttgaatatgctgtaaggagtatt

SEQ ID NO: 4484324 - DNA, 25 bp, Homo sapien
taaggagtattgcaggcagccagcc

SEQ ID NO: 4484325 - DNA, 25 bp, Homo sapien
agtttcgatctggggagcccgggca

SEQ ID NO: 4484326 - DNA, 25 bp, Homo sapien
ttcgatctggggagcccgggcagtg

SEQ ID NO: 4484327 - DNA, 25 bp, Homo sapien
tgaagagtgagaagtttcgatctgg

SEQ ID NO: 4484328 - DNA, 25 bp, Homo sapien
tgagaagtttcgatctggggagccc

SEQ ID NO: 4484329 - DNA, 25 bp, Homo sapien
tcacgtgtgcgttcagcagtgcctg

SEQ ID NO: 4484330 - DNA, 25 bp, Homo sapien
gtgcctgctcctttatggtctgctg

SEQ ID NO: 4484331 - DNA, 25 bp, Homo sapien
atggtctgctgtaaccgccgctgga

SEQ ID NO: 4484332 - DNA, 25 bp, Homo sapien
ctggaggaccgcttcactgcagctc

SEQ ID NO: 4484333 - DNA, 25 bp, Homo sapien
gcatattcgtcctgctctagctgga

SEQ ID NO: 4484334 - DNA, 25 bp, Homo sapien
attcgtcctgctctagctggacttg

SEQ ID NO: 4484335 - DNA, 25 bp, Homo sapien
gtttagcatattcgtcctgctctag

SEQ ID NO: 4484336 - DNA, 25 bp, Homo sapien
tgtgtttagcatattcgtcctgctc

SEQ ID NO: 4484337 - DNA, 25 bp, Homo sapien
tatccgatgtatgtcacgcttcttc

SEQ ID NO: 4484338 - DNA, 25 bp, Homo sapien
cgatgtatgtcacgcttcttctctt

SEQ ID NO: 4484339 - DNA, 25 bp, Homo sapien
cagctcctgtatccgatgtatgtca

SEQ ID NO: 4484340 - DNA, 25 bp, Homo sapien
cctgtatccgatgtatgtcacgctt

SEQ ID NO: 4484341 - DNA, 25 bp, Homo sapien
tccctccagtccctccacttccttc

SEQ ID NO: 4484342 - DNA, 25 bp, Homo sapien
gctgtttggcctcatcttgtagctg

SEQ ID NO: 4484343 - DNA, 25 bp, Homo sapien
tgtagctgctccaactcagaggtcc

SEQ ID NO: 4484344 - DNA, 25 bp, Homo sapien
ctgggattggagctttccctccagt

SEQ ID NO: 4484345 - DNA, 25 bp, Homo sapien
tgggagagtgtgagcctctcctcct

SEQ ID NO: 4484346 - DNA, 25 bp, Homo sapien
gggagagtgtgagcctctcctcctg

SEQ ID NO: 4484347 - DNA, 25 bp, Homo sapien
ctgggagagtgtgagcctctcctcc

SEQ ID NO: 4484348 - DNA, 25 bp, Homo sapien
gccagctgcttgtcgagcttgtggt

SEQ ID NO: 4484349 - DNA, 25 bp, Homo sapien
ggccagctgcttgtcgagcttgtgg

SEQ ID NO: 4484350 - DNA, 25 bp, Homo sapien
gcgggagacccctgaacttggtgtc

SEQ ID NO: 4484351 - DNA, 25 bp, Homo sapien
gtggccatccactgcagcgggagac

SEQ ID NO: 4484352 - DNA, 25 bp, Homo sapien
ggacagaaacaatcagtggccatcc

SEQ ID NO: 4484353 - DNA, 25 bp, Homo sapien
ctggacagaaacaatcagtggccat

SEQ ID NO: 4484354 - DNA, 25 bp, Homo sapien
ctcgcctggcttctccttcagctcc

SEQ ID NO: 4484355 - DNA, 25 bp, Homo sapien
tgcttctccaactgcagtgtgctct

SEQ ID NO: 4484356 - DNA, 25 bp, Homo sapien
ttctccaactgcagtgtgctcttgt

SEQ ID NO: 4484357 - DNA, 25 bp, Homo sapien
cttgcttctccaactgcagtgtgct

SEQ ID NO: 4484358 - DNA, 25 bp, Homo sapien
acagagactaagagatgaacagtag

SEQ ID NO: 4484359 - DNA, 25 bp, Homo sapien
tgctaacttccttttgaagttacag

SEQ ID NO: 4484360 - DNA, 25 bp, Homo sapien
aatggtgaccagtggaaccgaggtc

SEQ ID NO: 4484361 - DNA, 25 bp, Homo sapien
ggtcggaatccagtttgaatctaag

SEQ ID NO: 4484362 - DNA, 25 bp, Homo sapien
acccaggtactagtctcactgctgc

SEQ ID NO: 4484363 - DNA, 25 bp, Homo sapien
gacccaggtactagtctcactgctg

SEQ ID NO: 4484364 - DNA, 25 bp, Homo sapien
tgcagctggtccacgagctgggtct

SEQ ID NO: 4484365 - DNA, 25 bp, Homo sapien
tgcagcagtaactgcctgtgcagcg

SEQ ID NO: 4484366 - DNA, 25 bp, Homo sapien
agcagtaactgcctgtgcagcgcct

SEQ ID NO: 4484367 - DNA, 25 bp, Homo sapien
ctggtccacgagctgggtctgcagc

SEQ ID NO: 4484368 - DNA, 25 bp, Homo sapien
aaaggtttggacttgaattggcatc

SEQ ID NO: 4484369 - DNA, 25 bp, Homo sapien
aaggtttggacttgaattggcatct

SEQ ID NO: 4484370 - DNA, 25 bp, Homo sapien
ccccagcattttcacagtctcaata

SEQ ID NO: 4484371 - DNA, 25 bp, Homo sapien
cagcattttcacagtctcaatactc

SEQ ID NO: 4484372 - DNA, 25 bp, Homo sapien
cagtctcaatactcttaatactata

SEQ ID NO: 4484373 - DNA, 25 bp, Homo sapien
ccagcattttcacagtctcaatact

SEQ ID NO: 4484374 - DNA, 25 bp, Homo sapien
ctctcaggtgggtcagactctctga

SEQ ID NO: 4484375 - DNA, 25 bp, Homo sapien
gggctcaatgctgcaggccataggg

SEQ ID NO: 4484376 - DNA, 25 bp, Homo sapien
gggcatagggtggaagaccttcaaa

SEQ ID NO: 4484377 - DNA, 25 bp, Homo sapien
gaccttcaaagtccgaagagtttga

SEQ ID NO: 4484378 - DNA, 25 bp, Homo sapien
cctgtgaaacgtggaactggttcca

SEQ ID NO: 4484379 - DNA, 25 bp, Homo sapien
cgtggaactggttccacctgggcca

SEQ ID NO: 4484380 - DNA, 25 bp, Homo sapien
tggctttcctgtgaaacgtggaact

SEQ ID NO: 4484381 - DNA, 25 bp, Homo sapien
gtggaactggttccacctgggccag

SEQ ID NO: 4484382 - DNA, 25 bp, Homo sapien
gcccagcatgggtgtggctgcccat

SEQ ID NO: 4484383 - DNA, 25 bp, Homo sapien
aggtgtatgtctgggcttggaagca

SEQ ID NO: 4484384 - DNA, 25 bp, Homo sapien
aggatgtcccgcagccagaaggcag

SEQ ID NO: 4484385 - DNA, 25 bp, Homo sapien
tgcccattggtcctctgaagagcct

SEQ ID NO: 4484386 - DNA, 25 bp, Homo sapien
cctcgttagtggtgactgaggcctg

SEQ ID NO: 4484387 - DNA, 25 bp, Homo sapien
gcagcacctcgttagtggtgactga

SEQ ID NO: 4484388 - DNA, 25 bp, Homo sapien
tggaagtcggggaccttggtgacca

SEQ ID NO: 4484389 - DNA, 25 bp, Homo sapien
gcacctcgttagtggtgactgaggc

SEQ ID NO: 4484390 - DNA, 25 bp, Homo sapien
gctttttgggcactcggataaagac

SEQ ID NO: 4484391 - DNA, 25 bp, Homo sapien
tgctttttgggcactcggataaaga

SEQ ID NO: 4484392 - DNA, 25 bp, Homo sapien
gggcggcgagatgctgcgcaagcgc

SEQ ID NO: 4484393 - DNA, 25 bp, Homo sapien
gcaacatcggtgaacatcaacacga

SEQ ID NO: 4484394 - DNA, 25 bp, Homo sapien
tgctgacggaggcacccagcaacat

SEQ ID NO: 4484395 - DNA, 25 bp, Homo sapien
tgcgcaagcgccacgtgctgacgga

SEQ ID NO: 4484396 - DNA, 25 bp, Homo sapien
aacaggcaatgaccgtgtggccagg

SEQ ID NO: 4484397 - DNA, 25 bp, Homo sapien
agctcccattgtccaaatcggctct

SEQ ID NO: 4484398 - DNA, 25 bp, Homo sapien
gtccaaatcggctctcagggtcaga

SEQ ID NO: 4484399 - DNA, 25 bp, Homo sapien
caacagctgcggtccaggggatata

SEQ ID NO: 4484400 - DNA, 25 bp, Homo sapien
tgcctcaggcctggaaggttcctct

SEQ ID NO: 4484401 - DNA, 25 bp, Homo sapien
cctctgggagatgagaaggtgtccc

SEQ ID NO: 4484402 - DNA, 25 bp, Homo sapien
ctctgcctcaggcctggaaggttcc

SEQ ID NO: 4484403 - DNA, 25 bp, Homo sapien
cctggaaggttcctctgggagatga

SEQ ID NO: 4484404 - DNA, 25 bp, Homo sapien
ttatgtttcaaaacacccactacta

SEQ ID NO: 4484405 - DNA, 25 bp, Homo sapien
tatgtttcaaaacacccactactac

SEQ ID NO: 4484406 - DNA, 25 bp, Homo sapien
tgaaacagaaatgccccgaaggact

SEQ ID NO: 4484407 - DNA, 25 bp, Homo sapien
cccaggaaaagctgtgatgaaacag

SEQ ID NO: 4484408 - DNA, 25 bp, Homo sapien
ccaggaaaagctgtgatgaaacaga

SEQ ID NO: 4484409 - DNA, 25 bp, Homo sapien
atgaaacagaaatgccccgaaggac

SEQ ID NO: 4484410 - DNA, 25 bp, Homo sapien
tggggatcacaaaataggccagttc

SEQ ID NO: 4484411 - DNA, 25 bp, Homo sapien
gggatcacaaaataggccagttcct

SEQ ID NO: 4484412 - DNA, 25 bp, Homo sapien
tggtctctggggatcacaaaatagg

SEQ ID NO: 4484413 - DNA, 25 bp, Homo sapien
gatcacaaaataggccagttcctcc

SEQ ID NO: 4484414 - DNA, 25 bp, Homo sapien
ggtccccaaaggagatactgatcag

SEQ ID NO: 4484415 - DNA, 25 bp, Homo sapien
gccggactttctccaagtggtaggc

SEQ ID NO: 4484416 - DNA, 25 bp, Homo sapien
agctccagccggactttctccaagt

SEQ ID NO: 4484417 - DNA, 25 bp, Homo sapien
tccccaaaggagatactgatcagct

SEQ ID NO: 4484418 - DNA, 25 bp, Homo sapien
aggtatcctcctcctcgtcactgac

SEQ ID NO: 4484419 - DNA, 25 bp, Homo sapien
caggtatcctcctcctcgtcactga

SEQ ID NO: 4484420 - DNA, 25 bp, Homo sapien
tcaggtatcctcctcctcgtcactg

SEQ ID NO: 4484421 - DNA, 25 bp, Homo sapien
ccctttgggcacactttggttgtga

SEQ ID NO: 4484422 - DNA, 25 bp, Homo sapien
tttgggcacactttggttgtgaagg

SEQ ID NO: 4484423 - DNA, 25 bp, Homo sapien
actttcaccctttgggcacactttg

SEQ ID NO: 4484424 - DNA, 25 bp, Homo sapien
tcaccctttgggcacactttggttg

SEQ ID NO: 4484425 - DNA, 25 bp, Homo sapien
gacagagcagctctttcctcagtga

SEQ ID NO: 4484426 - DNA, 25 bp, Homo sapien
cctggaaggaggagttggctccgtc

SEQ ID NO: 4484427 - DNA, 25 bp, Homo sapien
tgttagcgcaaaagagtggggccca

SEQ ID NO: 4484428 - DNA, 25 bp, Homo sapien
gaacctctgagaaagtgtccccagt

SEQ ID NO: 4484429 - DNA, 25 bp, Homo sapien
tcttggcggctactgtacagctgtc

SEQ ID NO: 4484430 - DNA, 25 bp, Homo sapien
tacagctgtcagcatgactacaggc

SEQ ID NO: 4484431 - DNA, 25 bp, Homo sapien
ttccgatatcaatataccgtagttg

SEQ ID NO: 4484432 - DNA, 25 bp, Homo sapien
cccgaggctatctggggtaagaagt

SEQ ID NO: 4484433 - DNA, 25 bp, Homo sapien
gaggctgaacccctcggcgatgagc

SEQ ID NO: 4484434 - DNA, 25 bp, Homo sapien
ggctgaacccctcggcgatgagcgt

SEQ ID NO: 4484435 - DNA, 25 bp, Homo sapien
gaacccctcggcgatgagcgtctgt

SEQ ID NO: 4484436 - DNA, 25 bp, Homo sapien
cctcggcgatgagcgtctgtcccag

SEQ ID NO: 4484437 - DNA, 25 bp, Homo sapien
cttccccaagtgtgaagacgccggg

SEQ ID NO: 4484438 - DNA, 25 bp, Homo sapien
tgtgcctggagttggtcgcgtcttc

SEQ ID NO: 4484439 - DNA, 25 bp, Homo sapien
tggaataagccccttccgctcttcg

SEQ ID NO: 4484440 - DNA, 25 bp, Homo sapien
ggagcgcggtttacccactgaggat

SEQ ID NO: 4484441 - DNA, 25 bp, Homo sapien
ctgaagctgcagaggcagctgtggc

SEQ ID NO: 4484442 - DNA, 25 bp, Homo sapien
tgaagctgcagaggcagctgtggcc

SEQ ID NO: 4484443 - DNA, 25 bp, Homo sapien
tctgaagctgcagaggcagctgtgg

SEQ ID NO: 4484444 - DNA, 25 bp, Homo sapien
aagctgcagaggcagctgtggccat

SEQ ID NO: 4484445 - DNA, 25 bp, Homo sapien
gcaagtatccctgatcttcttccca

SEQ ID NO: 4484446 - DNA, 25 bp, Homo sapien
caaggtcagccgcactgcttacaac

SEQ ID NO: 4484447 - DNA, 25 bp, Homo sapien
cttacaactgggctgaagacggaga

SEQ ID NO: 4484448 - DNA, 25 bp, Homo sapien
ctgctctgcaagtatccctgatctt

SEQ ID NO: 4484449 - DNA, 25 bp, Homo sapien
gacagctcgggcgattcgaccctgc

SEQ ID NO: 4484450 - DNA, 25 bp, Homo sapien
cgattcgaccctgcctctggcggat

SEQ ID NO: 4484451 - DNA, 25 bp, Homo sapien
agggaagcacggcccagacagctcg

SEQ ID NO: 4484452 - DNA, 25 bp, Homo sapien
cacggcccagacagctcgggcgatt

SEQ ID NO: 4484453 - DNA, 25 bp, Homo sapien
cgggccgggctagtgttctctgatc

SEQ ID NO: 4484454 - DNA, 25 bp, Homo sapien
ccgtccaggccatgcaggctgcggg

SEQ ID NO: 4484455 - DNA, 25 bp, Homo sapien
gttctctgatccgttgcccagggag

SEQ ID NO: 4484456 - DNA, 25 bp, Homo sapien
agtaggcgcccgcaatcagagcccg

SEQ ID NO: 4484457 - DNA, 25 bp, Homo sapien
cggactagcaccagccgttgcccac

SEQ ID NO: 4484458 - DNA, 25 bp, Homo sapien
aagcaattgagcagccagtggcggc

SEQ ID NO: 4484459 - DNA, 25 bp, Homo sapien
cagtggcggcgccactgctgggacc

SEQ ID NO: 4484460 - DNA, 25 bp, Homo sapien
tgctgggacctcacccggactagca

SEQ ID NO: 4484461 - DNA, 25 bp, Homo sapien
gaaggctactgcgatcttctgcagg

SEQ ID NO: 4484462 - DNA, 25 bp, Homo sapien
tacatgttgagcacggtgagcgtca

SEQ ID NO: 4484463 - DNA, 25 bp, Homo sapien
cccaaaagggcagcgttagcacaaa

SEQ ID NO: 4484464 - DNA, 25 bp, Homo sapien
gcagcgcgccagtcacaatgcaata

SEQ ID NO: 4484465 - DNA, 25 bp, Homo sapien
tcagagtgtgaacgcttggctgggc

SEQ ID NO: 4484466 - DNA, 25 bp, Homo sapien
cgcaggccagcgcacaggtgactcg

SEQ ID NO: 4484467 - DNA, 25 bp, Homo sapien
actcgggaacgcagtcggcgcctga

SEQ ID NO: 4484468 - DNA, 25 bp, Homo sapien
acgaaggccagtagcacgcaggcca

SEQ ID NO: 4484469 - DNA, 25 bp, Homo sapien
cagtgcgtcaggcagatggagaccg

SEQ ID NO: 4484470 - DNA, 25 bp, Homo sapien
agcaggcagtaaagcagcggattga

SEQ ID NO: 4484471 - DNA, 25 bp, Homo sapien
ttgttgcagtgcgtcaggcagatgg

SEQ ID NO: 4484472 - DNA, 25 bp, Homo sapien
aagtggcgccgcagcaggcagtaaa

SEQ ID NO: 4484473 - DNA, 25 bp, Homo sapien
tgcccttgatactgacgcagcgaca

SEQ ID NO: 4484474 - DNA, 25 bp, Homo sapien
tgatactgacgcagcgacaagcggc

SEQ ID NO: 4484475 - DNA, 25 bp, Homo sapien
cgacaagcggccctcattggaagag

SEQ ID NO: 4484476 - DNA, 25 bp, Homo sapien
gcggccctcattggaagagtgcagc

SEQ ID NO: 4484477 - DNA, 25 bp, Homo sapien
aaaatggcccagacctctccctggg

SEQ ID NO: 4484478 - DNA, 25 bp, Homo sapien
cctgatgttcctccattgtaggttt

SEQ ID NO: 4484479 - DNA, 25 bp, Homo sapien
ccattgagggctgtctttgagcctg

SEQ ID NO: 4484480 - DNA, 25 bp, Homo sapien
tccattgtaggtttccaaaaatggc

SEQ ID NO: 4484481 - DNA, 25 bp, Homo sapien
cttgaggatgggggaaggggatcat

SEQ ID NO: 4484482 - DNA, 25 bp, Homo sapien
tcagactggggctctccacagtgct

SEQ ID NO: 4484483 - DNA, 25 bp, Homo sapien
tggggctctccacagtgctactcag

SEQ ID NO: 4484484 - DNA, 25 bp, Homo sapien
ggatatagttggagtatcttccaag

SEQ ID NO: 4484485 - DNA, 25 bp, Homo sapien
atatagttggagtatcttccaagag

SEQ ID NO: 4484486 - DNA, 25 bp, Homo sapien
tttcagatcaatatccattccccag

SEQ ID NO: 4484487 - DNA, 25 bp, Homo sapien
tcaggcctctttcagatcaatatcc

SEQ ID NO: 4484488 - DNA, 25 bp, Homo sapien
ttcagatcaatatccattccccagc

SEQ ID NO: 4484489 - DNA, 25 bp, Homo sapien
ctctttcagatcaatatccattccc

SEQ ID NO: 4484490 - DNA, 25 bp, Homo sapien
ctctaccgactgagctagccgggca

SEQ ID NO: 4484491 - DNA, 25 bp, Homo sapien
cacgaccctgggattaagagtccca

SEQ ID NO: 4484492 - DNA, 25 bp, Homo sapien
gggattaagagtcccatgctctacc

SEQ ID NO: 4484493 - DNA, 25 bp, Homo sapien
gctcgaacccacgaccctgggatta

SEQ ID NO: 4484494 - DNA, 25 bp, Homo sapien
gtacctgggttcaacagaagcacca

SEQ ID NO: 4484495 - DNA, 25 bp, Homo sapien
ccagttgcgacgtcccttgggcaaa

SEQ ID NO: 4484496 - DNA, 25 bp, Homo sapien
gagaatagggctggctcggaaacct

SEQ ID NO: 4484497 - DNA, 25 bp, Homo sapien
agtgataatagaatgggaaaggccc

SEQ ID NO: 4484498 - DNA, 25 bp, Homo sapien
gttgtttagcaaccccactgcggag

SEQ ID NO: 4484499 - DNA, 25 bp, Homo sapien
tcacagcaccgcgacccgcgcagcc

SEQ ID NO: 4484500 - DNA, 25 bp, Homo sapien
ctacatcctgggccggatttgccag

SEQ ID NO: 4484501 - DNA, 25 bp, Homo sapien
atcctgggccggatttgccagcgcc

SEQ ID NO: 4484502 - DNA, 25 bp, Homo sapien
ggccggatttgccagcgcccgcaga

SEQ ID NO: 4484503 - DNA, 25 bp, Homo sapien
accccacccaactccgcgtcagacg

SEQ ID NO: 4484504 - DNA, 25 bp, Homo sapien
aactccgcgtcagacgcgccgtcag

SEQ ID NO: 4484505 - DNA, 25 bp, Homo sapien
ctccgcgtcagacgcgccgtcaggc

SEQ ID NO: 4484506 - DNA, 25 bp, Homo sapien
acccaactccgcgtcagacgcgccg

SEQ ID NO: 4484507 - DNA, 25 bp, Homo sapien
aatttaggcttcgggtcctgcttcg

SEQ ID NO: 4484508 - DNA, 25 bp, Homo sapien
gcttcgggtcctgcttcggcgccat

SEQ ID NO: 4484509 - DNA, 25 bp, Homo sapien
aggcttcgggtcctgcttcggcgcc

SEQ ID NO: 4484510 - DNA, 25 bp, Homo sapien
ttaggcttcgggtcctgcttcggcg

SEQ ID NO: 4484511 - DNA, 25 bp, Homo sapien
atctcctgcgccgttaggtgccttt

SEQ ID NO: 4484512 - DNA, 25 bp, Homo sapien
gcctctatctcctgcgccgttaggt

SEQ ID NO: 4484513 - DNA, 25 bp, Homo sapien
ctcctgcgccgttaggtgccttttt

SEQ ID NO: 4484514 - DNA, 25 bp, Homo sapien
ctcgagcccgcctctatctcctgcg

SEQ ID NO: 4484515 - DNA, 25 bp, Homo sapien
cggaattgccatccgcaatgcgctt

SEQ ID NO: 4484516 - DNA, 25 bp, Homo sapien
acaaagcactgaccgccgccttctc

SEQ ID NO: 4484517 - DNA, 25 bp, Homo sapien
ctttccccgcacaaagcactgaccg

SEQ ID NO: 4484518 - DNA, 25 bp, Homo sapien
gcaatgcgctttccccgcacaaagc

SEQ ID NO: 4484519 - DNA, 25 bp, Homo sapien
tcgcctccctacaataggctgctct

SEQ ID NO: 4484520 - DNA, 25 bp, Homo sapien
cgtcgcctccctacaataggctgct

SEQ ID NO: 4484521 - DNA, 25 bp, Homo sapien
tcccgtcgcctccctacaataggct

SEQ ID NO: 4484522 - DNA, 25 bp, Homo sapien
cccgtcgcctccctacaataggctg

SEQ ID NO: 4484523 - DNA, 25 bp, Homo sapien
cactctgtggtatgcggagggcccc

SEQ ID NO: 4484524 - DNA, 25 bp, Homo sapien
cggcaaccttctggtcgtcgtggaa

SEQ ID NO: 4484525 - DNA, 25 bp, Homo sapien
tgcatctgcccgtaagctgtgcctc

SEQ ID NO: 4484526 - DNA, 25 bp, Homo sapien
gcaacggccattttacaacgcactt

SEQ ID NO: 4484527 - DNA, 25 bp, Homo sapien
gatctcggcactgcgcccaagaata

SEQ ID NO: 4484528 - DNA, 25 bp, Homo sapien
aaagcggaggaaaacgctcatctca

SEQ ID NO: 4484529 - DNA, 25 bp, Homo sapien
tgcctccaggcaacacaaagcggag

SEQ ID NO: 4484530 - DNA, 25 bp, Homo sapien
attaccataggatctcggcactgcg

SEQ ID NO: 4484531 - DNA, 25 bp, Homo sapien
ttatttactttttacgagcaactgc

SEQ ID NO: 4484532 - DNA, 25 bp, Homo sapien
ttactttttacgagcaactgcaaag

SEQ ID NO: 4484533 - DNA, 25 bp, Homo sapien
actttttacgagcaactgcaaagcg

SEQ ID NO: 4484534 - DNA, 25 bp, Homo sapien
aatgcaaacggcgtcaacactgcat

SEQ ID NO: 4484535 - DNA, 25 bp, Homo sapien
tcccacagcagcgattaactttttg

SEQ ID NO: 4484536 - DNA, 25 bp, Homo sapien
taaacacaagtacaaaacacacctg

SEQ ID NO: 4484537 - DNA, 25 bp, Homo sapien
aacggcacaaggaaatctctgctgc

SEQ ID NO: 4484538 - DNA, 25 bp, Homo sapien
tagcaaccctctagaactaaagcgc

SEQ ID NO: 4484539 - DNA, 25 bp, Homo sapien
tacaggagcctaacaccacgccctg

SEQ ID NO: 4484540 - DNA, 25 bp, Homo sapien
aggagcctaacaccacgccctgcta

SEQ ID NO: 4484541 - DNA, 25 bp, Homo sapien
ttacaggagcctaacaccacgccct

SEQ ID NO: 4484542 - DNA, 25 bp, Homo sapien
gactgggtttcaccaggctcaccag

SEQ ID NO: 4484543 - DNA, 25 bp, Homo sapien
aaaagtgcactgaaaccgaggccct

SEQ ID NO: 4484544 - DNA, 25 bp, Homo sapien
cactgaaaccgaggccctgtgacct

SEQ ID NO: 4484545 - DNA, 25 bp, Homo sapien
ccccttggctgctactgccggaaaa

SEQ ID NO: 4484546 - DNA, 25 bp, Homo sapien
ttggctgctactgccggaaaaaaaa

SEQ ID NO: 4484547 - DNA, 25 bp, Homo sapien
ggcccatgaaagcacagcactcgct

SEQ ID NO: 4484548 - DNA, 25 bp, Homo sapien
agaagaggcccatgaaagcacagca

SEQ ID NO: 4484549 - DNA, 25 bp, Homo sapien
ctttgcttcataaagaagaggccca

SEQ ID NO: 4484550 - DNA, 25 bp, Homo sapien
tttgcttcataaagaagaggcccat

SEQ ID NO: 4484551 - DNA, 25 bp, Homo sapien
attacaggcttgtacgtcacagccc

SEQ ID NO: 4484552 - DNA, 25 bp, Homo sapien
tcattaagatgtatgtacgtataca

SEQ ID NO: 4484553 - DNA, 25 bp, Homo sapien
cccctggccatgagtcgtaatttag

SEQ ID NO: 4484554 - DNA, 25 bp, Homo sapien
tacttagaaattcctgaccatctcc

SEQ ID NO: 4484555 - DNA, 25 bp, Homo sapien
tttattccaaccactgtaatgtatg

SEQ ID NO: 4484556 - DNA, 25 bp, Homo sapien
tgtttgtcctttatggcaaccttta

SEQ ID NO: 4484557 - DNA, 25 bp, Homo sapien
cactgtaatgtatgaagtatttcac

SEQ ID NO: 4484558 - DNA, 25 bp, Homo sapien
tccaaccactgtaatgtatgaagta

SEQ ID NO: 4484559 - DNA, 25 bp, Homo sapien
ctcctaacactctcaactttatctg

SEQ ID NO: 4484560 - DNA, 25 bp, Homo sapien
gaatccatttagtactaaaagcaca

SEQ ID NO: 4484561 - DNA, 25 bp, Homo sapien
tatctttcctgtagagaaatgaaat

SEQ ID NO: 4484562 - DNA, 25 bp, Homo sapien
gctatgagatacactaggagtcact

SEQ ID NO: 4484563 - DNA, 25 bp, Homo sapien
gtgaccaggtgcagaattgagcctc

SEQ ID NO: 4484564 - DNA, 25 bp, Homo sapien
agtgtgtgtcaacaaattccaatga

SEQ ID NO: 4484565 - DNA, 25 bp, Homo sapien
caaatggagtatttaagtgtgtgtc

SEQ ID NO: 4484566 - DNA, 25 bp, Homo sapien
agagaattccaatttagggattaag

SEQ ID NO: 4484567 - DNA, 25 bp, Homo sapien
gggtggtgtactgagggagctcctt

SEQ ID NO: 4484568 - DNA, 25 bp, Homo sapien
gctacaatatcctcatgtgtcttca

SEQ ID NO: 4484569 - DNA, 25 bp, Homo sapien
aagggctacaatatcctcatgtgtc

SEQ ID NO: 4484570 - DNA, 25 bp, Homo sapien
aaaaagggctacaatatcctcatgt

SEQ ID NO: 4484571 - DNA, 25 bp, Homo sapien
tgaagttctcgctgtttctgcaaat

SEQ ID NO: 4484572 - DNA, 25 bp, Homo sapien
aagttctcgctgtttctgcaaattg

SEQ ID NO: 4484573 - DNA, 25 bp, Homo sapien
ttaatctacaggcatttctccttaa

SEQ ID NO: 4484574 - DNA, 25 bp, Homo sapien
ctacaggcatttctccttaatattc

SEQ ID NO: 4484575 - DNA, 25 bp, Homo sapien
ccattgttcattccatgtccagaat

SEQ ID NO: 4484576 - DNA, 25 bp, Homo sapien
cagctgaaaggtaccaggaatcatt

SEQ ID NO: 4484577 - DNA, 25 bp, Homo sapien
caacatttttctgttgcagaccaga

SEQ ID NO: 4484578 - DNA, 25 bp, Homo sapien
catcttcccctctgcatactgctcc

SEQ ID NO: 4484579 - DNA, 25 bp, Homo sapien
tttttctgttgcagaccagatgtct

SEQ ID NO: 4484580 - DNA, 25 bp, Homo sapien
catttttctgttgcagaccagatgt

SEQ ID NO: 4484581 - DNA, 25 bp, Homo sapien
cttcacatatagtatgcaaaatcaa

SEQ ID NO: 4484582 - DNA, 25 bp, Homo sapien
ttcacatatagtatgcaaaatcaaa

SEQ ID NO: 4484583 - DNA, 25 bp, Homo sapien
tgtatgcatgcacatgactttctca

SEQ ID NO: 4484584 - DNA, 25 bp, Homo sapien
tatttttctgtagaaccagaggctc

SEQ ID NO: 4484585 - DNA, 25 bp, Homo sapien
agtaatggttttgtgccaggagcag

SEQ ID NO: 4484586 - DNA, 25 bp, Homo sapien
cactctaggcttcttatcagatgtt

SEQ ID NO: 4484587 - DNA, 25 bp, Homo sapien
gactcagaagccagtttgaagaggc

SEQ ID NO: 4484588 - DNA, 25 bp, Homo sapien
gaatctgaaacgcttctggtccgaa

SEQ ID NO: 4484589 - DNA, 25 bp, Homo sapien
cacgtgtcaatatgtggagaccaag

SEQ ID NO: 4484590 - DNA, 25 bp, Homo sapien
catgcttcaaacgtctagactgagg

SEQ ID NO: 4484591 - DNA, 25 bp, Homo sapien
ggtaaatatgtgtcctactcagaca

SEQ ID NO: 4484592 - DNA, 25 bp, Homo sapien
taaaactgcctctgtttcaactccc

SEQ ID NO: 4484593 - DNA, 25 bp, Homo sapien
tagttggttaaattcccatctctct

SEQ ID NO: 4484594 - DNA, 25 bp, Homo sapien
ctaacttggataaaggatcaggtgg

SEQ ID NO: 4484595 - DNA, 25 bp, Homo sapien
cgtcaatgtcatagaggtaacataa

SEQ ID NO: 4484596 - DNA, 25 bp, Homo sapien
tcatagaggtaacataaattaacgt

SEQ ID NO: 4484597 - DNA, 25 bp, Homo sapien
ataaaaacgtcaatgtcatagaggt

SEQ ID NO: 4484598 - DNA, 25 bp, Homo sapien
aaaacgtcaatgtcatagaggtaac

SEQ ID NO: 4484599 - DNA, 25 bp, Homo sapien
ggcccttttcttccgaggaggctga

SEQ ID NO: 4484600 - DNA, 25 bp, Homo sapien
ctgaggggtctcactggtactgcca

SEQ ID NO: 4484601 - DNA, 25 bp, Homo sapien
ttcttccgaggaggctgaggggtct

SEQ ID NO: 4484602 - DNA, 25 bp, Homo sapien
tgaggggtctcactggtactgccac

SEQ ID NO: 4484603 - DNA, 25 bp, Homo sapien
agctcttcaggaatctttactttaa

SEQ ID NO: 4484604 - DNA, 25 bp, Homo sapien
agtcatcaacaagccacggttttag

SEQ ID NO: 4484605 - DNA, 25 bp, Homo sapien
aacaagccacggttttagctcttca

SEQ ID NO: 4484606 - DNA, 25 bp, Homo sapien
cacggttttagctcttcaggaatct

SEQ ID NO: 4484607 - DNA, 25 bp, Homo sapien
taacagacacgaatgtgcctttgtg

SEQ ID NO: 4484608 - DNA, 25 bp, Homo sapien
caactctctgctgggtttattgcga

SEQ ID NO: 4484609 - DNA, 25 bp, Homo sapien
tatttaaacagccaaatgagactct

SEQ ID NO: 4484610 - DNA, 25 bp, Homo sapien
tgagactctactagacagaacagca

SEQ ID NO: 4484611 - DNA, 25 bp, Homo sapien
tcttcttggcaggaagataaaagag

SEQ ID NO: 4484612 - DNA, 25 bp, Homo sapien
ttatctgtgtttccacgagatttct

SEQ ID NO: 4484613 - DNA, 25 bp, Homo sapien
ttgtaatttgcataatcctcaagaa

SEQ ID NO: 4484614 - DNA, 25 bp, Homo sapien
taatttgcataatcctcaagaatgg

SEQ ID NO: 4484615 - DNA, 25 bp, Homo sapien
tgcatcgggatgatctgcaagaatt

SEQ ID NO: 4484616 - DNA, 25 bp, Homo sapien
ctgggacatgggtgcatcgggatga

SEQ ID NO: 4484617 - DNA, 25 bp, Homo sapien
caaatttatagagtagctgggtacc

SEQ ID NO: 4484618 - DNA, 25 bp, Homo sapien
ttatagagtagctgggtacccaaca

SEQ ID NO: 4484619 - DNA, 25 bp, Homo sapien
caaataatctcaggagatgtggcgc

SEQ ID NO: 4484620 - DNA, 25 bp, Homo sapien
taatctcaggagatgtggcgctcca

SEQ ID NO: 4484621 - DNA, 25 bp, Homo sapien
ctcaggagatgtggcgctccataca

SEQ ID NO: 4484622 - DNA, 25 bp, Homo sapien
tctcaggagatgtggcgctccatac

SEQ ID NO: 4484623 - DNA, 25 bp, Homo sapien
ttaggaaatcgtgaagataattgag

SEQ ID NO: 4484624 - DNA, 25 bp, Homo sapien
ttgagtaataaagcaaggctcttct

SEQ ID NO: 4484625 - DNA, 25 bp, Homo sapien
taattgagtaataaagcaaggctct

SEQ ID NO: 4484626 - DNA, 25 bp, Homo sapien
agataattgagtaataaagcaaggc

SEQ ID NO: 4484627 - DNA, 25 bp, Homo sapien
tggaaagccagatcttatgcaaaga

SEQ ID NO: 4484628 - DNA, 25 bp, Homo sapien
aacgtgaaatgtcaagtagtagagc

SEQ ID NO: 4484629 - DNA, 25 bp, Homo sapien
ctcaagtccacgttgcagttttaaa

SEQ ID NO: 4484630 - DNA, 25 bp, Homo sapien
ccacgcccaagaaataacccagtat

SEQ ID NO: 4484631 - DNA, 25 bp, Homo sapien
tcataatcgctggcactgaacaaag

SEQ ID NO: 4484632 - DNA, 25 bp, Homo sapien
agttgcagaattctttgccaggtac

SEQ ID NO: 4484633 - DNA, 25 bp, Homo sapien
tcgctggcactgaacaaagttgcag

SEQ ID NO: 4484634 - DNA, 25 bp, Homo sapien
gctggcactgaacaaagttgcagaa

SEQ ID NO: 4484635 - DNA, 25 bp, Homo sapien
tcacacagctttccgatggtactca

SEQ ID NO: 4484636 - DNA, 25 bp, Homo sapien
acagctttccgatggtactcaggag

SEQ ID NO: 4484637 - DNA, 25 bp, Homo sapien
ttccgatggtactcaggaggagcca

SEQ ID NO: 4484638 - DNA, 25 bp, Homo sapien
ccgatggtactcaggaggagccact

SEQ ID NO: 4484639 - DNA, 25 bp, Homo sapien
aaaacaaacatcaattgttatacac

SEQ ID NO: 4484640 - DNA, 25 bp, Homo sapien
tgtacaagagatagactaagaacaa

SEQ ID NO: 4484641 - DNA, 25 bp, Homo sapien
tttgtacaagagatagactaagaac

SEQ ID NO: 4484642 - DNA, 25 bp, Homo sapien
aacaaacatcaattgttatacacta

SEQ ID NO: 4484643 - DNA, 25 bp, Homo sapien
cttgcaaaggatgggctctttactt

SEQ ID NO: 4484644 - DNA, 25 bp, Homo sapien
gcaaaggatgggctctttactttaa

SEQ ID NO: 4484645 - DNA, 25 bp, Homo sapien
aaggatgggctctttactttaagca

SEQ ID NO: 4484646 - DNA, 25 bp, Homo sapien
ggatgggctctttactttaagcacc

SEQ ID NO: 4484647 - DNA, 25 bp, Homo sapien
gacttttccagaaaactagctacac

SEQ ID NO: 4484648 - DNA, 25 bp, Homo sapien
tgaaaaacaattcctaaaagattga

SEQ ID NO: 4484649 - DNA, 25 bp, Homo sapien
attcctaaaagattgacttttccag

SEQ ID NO: 4484650 - DNA, 25 bp, Homo sapien
tgaagatctgaaaaacaattcctaa

SEQ ID NO: 4484651 - DNA, 25 bp, Homo sapien
aaatgcccttaattaatgctcagag

SEQ ID NO: 4484652 - DNA, 25 bp, Homo sapien
gctacgtaccaaagctaaagcgtct

SEQ ID NO: 4484653 - DNA, 25 bp, Homo sapien
taaagcgtctcattccataaaggcc

SEQ ID NO: 4484654 - DNA, 25 bp, Homo sapien
tacccaagtacagaccactttagtg

SEQ ID NO: 4484655 - DNA, 25 bp, Homo sapien
gataaacaagaactttcaacagctg

SEQ ID NO: 4484656 - DNA, 25 bp, Homo sapien
caactatgggtagaagcagttccct

SEQ ID NO: 4484657 - DNA, 25 bp, Homo sapien
gagaacaagtaagccgaatgaagga

SEQ ID NO: 4484658 - DNA, 25 bp, Homo sapien
cccctgtgccaagaatgacacgtaa

SEQ ID NO: 4484659 - DNA, 25 bp, Homo sapien
agcatgggcaacagtgcaagactgt

SEQ ID NO: 4484660 - DNA, 25 bp, Homo sapien
cagcatgggcaacagtgcaagactg

SEQ ID NO: 4484661 - DNA, 25 bp, Homo sapien
tcaatctcgattattgccccattcg

SEQ ID NO: 4484662 - DNA, 25 bp, Homo sapien
gattacactaattaagctgcagtgc

SEQ ID NO: 4484663 - DNA, 25 bp, Homo sapien
gccccattcgctcctgcaataatta

SEQ ID NO: 4484664 - DNA, 25 bp, Homo sapien
gctgcagtgcctagtcttaatatct

SEQ ID NO: 4484665 - DNA, 25 bp, Homo sapien
tcttcttacacgagatgacacatgg

SEQ ID NO: 4484666 - DNA, 25 bp, Homo sapien
cgtaattaacctgtcaccaagtggc

SEQ ID NO: 4484667 - DNA, 25 bp, Homo sapien
tttggcaatcgcaatggcaagtagc

SEQ ID NO: 4484668 - DNA, 25 bp, Homo sapien
aaggctcactcacgtctggcaatga

SEQ ID NO: 4484669 - DNA, 25 bp, Homo sapien
gcagtcacttaattcagttacgggt

SEQ ID NO: 4484670 - DNA, 25 bp, Homo sapien
ggtttttcccctagcaacatcaaga

SEQ ID NO: 4484671 - DNA, 25 bp, Homo sapien
tacgggttttgaactcaggatgaaa

SEQ ID NO: 4484672 - DNA, 25 bp, Homo sapien
tcctgttacaacacaactcctgagg

SEQ ID NO: 4484673 - DNA, 25 bp, Homo sapien
gctcacagactttcttaatgataaa

SEQ ID NO: 4484674 - DNA, 25 bp, Homo sapien
cagctctttgtcctatggctcacag

SEQ ID NO: 4484675 - DNA, 25 bp, Homo sapien
tctctgtttagagggcggccatgaa

SEQ ID NO: 4484676 - DNA, 25 bp, Homo sapien
tctgggatgtctgtagaacaagctg

SEQ ID NO: 4484677 - DNA, 25 bp, Homo sapien
ggtgctggcggtattatccaccaga

SEQ ID NO: 4484678 - DNA, 25 bp, Homo sapien
tgagatcttgactatttgtcccaaa

SEQ ID NO: 4484679 - DNA, 25 bp, Homo sapien
tgggccatgactcaaaccaggtctg

SEQ ID NO: 4484680 - DNA, 25 bp, Homo sapien
cccagatggagcatgctggtcctgg

SEQ ID NO: 4484681 - DNA, 25 bp, Homo sapien
tgagacttcgggtccataacctgta

SEQ ID NO: 4484682 - DNA, 25 bp, Homo sapien
gcagcacatccctttgacgagttca

SEQ ID NO: 4484683 - DNA, 25 bp, Homo sapien
ttccaacctggaaaggccatcggct

SEQ ID NO: 4484684 - DNA, 25 bp, Homo sapien
catgctgtcggatagccagtgggcc

SEQ ID NO: 4484685 - DNA, 25 bp, Homo sapien
tcgagtatatcctgtacaacaaggg

SEQ ID NO: 4484686 - DNA, 25 bp, Homo sapien
ttcttggcgtacagcatgcctagct

SEQ ID NO: 4484687 - DNA, 25 bp, Homo sapien
caaggggatcatgggtgaagacacc

SEQ ID NO: 4484688 - DNA, 25 bp, Homo sapien
taccagggcaaggtaactccaacag

SEQ ID NO: 4484689 - DNA, 25 bp, Homo sapien
tagcacttgggaccagtagacagga

SEQ ID NO: 4484690 - DNA, 25 bp, Homo sapien
cctttggaataaatttggagcctgc

SEQ ID NO: 4484691 - DNA, 25 bp, Homo sapien
tgtctaccctatcctaatgctctgg

SEQ ID NO: 4484692 - DNA, 25 bp, Homo sapien
cagaagagtcagctctcagcagttc

SEQ ID NO: 4484693 - DNA, 25 bp, Homo sapien
tcccagatttgagacaatgaaaaag

SEQ ID NO: 4484694 - DNA, 25 bp, Homo sapien
agaagttgaactggccaaacactgg

SEQ ID NO: 4484695 - DNA, 25 bp, Homo sapien
cttccaaatagtggtcccaagtgat

SEQ ID NO: 4484696 - DNA, 25 bp, Homo sapien
tcatggatgtctaaggtcagtgccc

SEQ ID NO: 4484697 - DNA, 25 bp, Homo sapien
caagagtagcgaggtggcagtccat

SEQ ID NO: 4484698 - DNA, 25 bp, Homo sapien
caaagagcggtgttgcatgaatact

SEQ ID NO: 4484699 - DNA, 25 bp, Homo sapien
cctgtgggcccgtgtaagtgtctct

SEQ ID NO: 4484700 - DNA, 25 bp, Homo sapien
tgttggtctgcagcccattcatacg

SEQ ID NO: 4484701 - DNA, 25 bp, Homo sapien
tgcattcaccaacttgtccgtccgt

SEQ ID NO: 4484702 - DNA, 25 bp, Homo sapien
catttggtctgtcctttgccagctc

SEQ ID NO: 4484703 - DNA, 25 bp, Homo sapien
agatgttgcacccatctgtgctgtc

SEQ ID NO: 4484704 - DNA, 25 bp, Homo sapien
tcgccttgaccatctccactttgtt

SEQ ID NO: 4484705 - DNA, 25 bp, Homo sapien
tacccccagaccctgaggatggggc

SEQ ID NO: 4484706 - DNA, 25 bp, Homo sapien
atgatcacggctgacgcagggaaca

SEQ ID NO: 4484707 - DNA, 25 bp, Homo sapien
gatcacggctgacgcagggaacacc

SEQ ID NO: 4484708 - DNA, 25 bp, Homo sapien
gacagtggctttgacagactgctca

SEQ ID NO: 4484709 - DNA, 25 bp, Homo sapien
tacctgtgagatgctaatggcaccc

SEQ ID NO: 4484710 - DNA, 25 bp, Homo sapien
ttgtcaaggtttgccctgggctcca

SEQ ID NO: 4484711 - DNA, 25 bp, Homo sapien
tggctactcgccagaccttggagag

SEQ ID NO: 4484712 - DNA, 25 bp, Homo sapien
aagagctagtgtctggtccaaggcc

SEQ ID NO: 4484713 - DNA, 25 bp, Homo sapien
tcttccggctcaaaaagacgtggct

SEQ ID NO: 4484714 - DNA, 25 bp, Homo sapien
gcaatgaggacatcaacgccagggt

SEQ ID NO: 4484715 - DNA, 25 bp, Homo sapien
tacaatgccgtactggagatcacct

SEQ ID NO: 4484716 - DNA, 25 bp, Homo sapien
tagcaggcccacagatatggcagtg

SEQ ID NO: 4484717 - DNA, 25 bp, Homo sapien
gcctccgttggtactcaccagctgt

SEQ ID NO: 4484718 - DNA, 25 bp, Homo sapien
gactttgaggctctaccctcattcc

SEQ ID NO: 4484719 - DNA, 25 bp, Homo sapien
cactgtgagcgtgcggcactttggc

SEQ ID NO: 4484720 - DNA, 25 bp, Homo sapien
catcctgtcatccatgtgctcgcag

SEQ ID NO: 4484721 - DNA, 25 bp, Homo sapien
atgtcacccttcagcaaggccacgc

SEQ ID NO: 4484722 - DNA, 25 bp, Homo sapien
tgtactcggccatgtcacccttcag

SEQ ID NO: 4484723 - DNA, 25 bp, Homo sapien
tcggccatgtcacccttcagcaagg

SEQ ID NO: 4484724 - DNA, 25 bp, Homo sapien
agcatgtactcggccatgtcaccct

SEQ ID NO: 4484725 - DNA, 25 bp, Homo sapien
gcgcgccacccgcaagttctcctcg

SEQ ID NO: 4484726 - DNA, 25 bp, Homo sapien
ggaagctctccctgaacatccccat

SEQ ID NO: 4484727 - DNA, 25 bp, Homo sapien
catcaccaagacatcgtcaccgagc

SEQ ID NO: 4484728 - DNA, 25 bp, Homo sapien
tctcctcgccgccacctctgtccat

SEQ ID NO: 4484729 - DNA, 25 bp, Homo sapien
ctgtccacgccacctttctctcctg

SEQ ID NO: 4484730 - DNA, 25 bp, Homo sapien
gcacagtgcttaacgcaccccagct

SEQ ID NO: 4484731 - DNA, 25 bp, Homo sapien
gcagggcaagctgactgtgggcctg

SEQ ID NO: 4484732 - DNA, 25 bp, Homo sapien
gccagcagccgacaatgctgggtgc

SEQ ID NO: 4484733 - DNA, 25 bp, Homo sapien
gctgcccttagaaagagccatgggc

SEQ ID NO: 4484734 - DNA, 25 bp, Homo sapien
tccagtccagttaagggaagagccc

SEQ ID NO: 4484735 - DNA, 25 bp, Homo sapien
ggctccagtccagttaagggaagag

SEQ ID NO: 4484736 - DNA, 25 bp, Homo sapien
gaaccagctgcccttagaaagagcc

SEQ ID NO: 4484737 - DNA, 25 bp, Homo sapien
ctggggccaggtatgcgctggagct

SEQ ID NO: 4484738 - DNA, 25 bp, Homo sapien
gtatgcgctggagctcaggcaccgc

SEQ ID NO: 4484739 - DNA, 25 bp, Homo sapien
cgctggagctcaggcaccgccaggt

SEQ ID NO: 4484740 - DNA, 25 bp, Homo sapien
caggtatgcgctggagctcaggcac

SEQ ID NO: 4484741 - DNA, 25 bp, Homo sapien
gaaggacatactggacaggaagggc

SEQ ID NO: 4484742 - DNA, 25 bp, Homo sapien
gggccaggaaggacatactggacag

SEQ ID NO: 4484743 - DNA, 25 bp, Homo sapien
cccagttggacaggagaggcatact

SEQ ID NO: 4484744 - DNA, 25 bp, Homo sapien
ggccattttgcagcccagttggaca

SEQ ID NO: 4484745 - DNA, 25 bp, Homo sapien
cagatgggtgaaccctggtgcatgt

SEQ ID NO: 4484746 - DNA, 25 bp, Homo sapien
tcagatgggtgaaccctggtgcatg

SEQ ID NO: 4484747 - DNA, 25 bp, Homo sapien
agatgggtgaaccctggtgcatgtc

SEQ ID NO: 4484748 - DNA, 25 bp, Homo sapien
ccaggacccgtttcatctgtagcca

SEQ ID NO: 4484749 - DNA, 25 bp, Homo sapien
gccaagtgtaacagccaccaggacc

SEQ ID NO: 4484750 - DNA, 25 bp, Homo sapien
tcacagatcgaaagatgtttgtgca

SEQ ID NO: 4484751 - DNA, 25 bp, Homo sapien
tcattcagcaagtatgagaaaaggg

SEQ ID NO: 4484752 - DNA, 25 bp, Homo sapien
cagagagagccacctttaagcttgg

SEQ ID NO: 4484753 - DNA, 25 bp, Homo sapien
gagagagaaattcacttgcccagcg

SEQ ID NO: 4484754 - DNA, 25 bp, Homo sapien
caaagattcccaaggaccgctctga

SEQ ID NO: 4484755 - DNA, 25 bp, Homo sapien
tcatgcaagttgttgaggccgtccc

SEQ ID NO: 4484756 - DNA, 25 bp, Homo sapien
gcaatgactgacgacaggaagccct

SEQ ID NO: 4484757 - DNA, 25 bp, Homo sapien
ccagccatattttccaaagggttga

SEQ ID NO: 4484758 - DNA, 25 bp, Homo sapien
gctatatgcccagcacttggcctag

SEQ ID NO: 4484759 - DNA, 25 bp, Homo sapien
caaataccaagccaagtagggtcct

SEQ ID NO: 4484760 - DNA, 25 bp, Homo sapien
gttgagaatttcagtggcatcagtg

SEQ ID NO: 4484761 - DNA, 25 bp, Homo sapien
tgagaatttcagtggcatcagtggg

SEQ ID NO: 4484762 - DNA, 25 bp, Homo sapien
ttgagaatttcagtggcatcagtgg

SEQ ID NO: 4484763 - DNA, 25 bp, Homo sapien
ttgttgagaatttcagtggcatcag

SEQ ID NO: 4484764 - DNA, 25 bp, Homo sapien
tggacacaacgttcgttctgcacaa

SEQ ID NO: 4484765 - DNA, 25 bp, Homo sapien
ggatgggcctgatgaggaagacctt

SEQ ID NO: 4484766 - DNA, 25 bp, Homo sapien
gttgaaaaggagcatggttttggcc

SEQ ID NO: 4484767 - DNA, 25 bp, Homo sapien
gatgaggaagaccttgtaacaccat

SEQ ID NO: 4484768 - DNA, 25 bp, Homo sapien
ggtaacctgagagctcctgaagatg

SEQ ID NO: 4484769 - DNA, 25 bp, Homo sapien
tggccacgatcatccgacaggagct

SEQ ID NO: 4484770 - DNA, 25 bp, Homo sapien
tagtgcccacactattagaaccagg

SEQ ID NO: 4484771 - DNA, 25 bp, Homo sapien
agatggccacgatcatccgacagga

SEQ ID NO: 4484772 - DNA, 25 bp, Homo sapien
tctccgagcttgagagcaactgcct

SEQ ID NO: 4484773 - DNA, 25 bp, Homo sapien
ctgtagcggccatcccctctgacat

SEQ ID NO: 4484774 - DNA, 25 bp, Homo sapien
ctgacatctccgagcttgagagcaa

SEQ ID NO: 4484775 - DNA, 25 bp, Homo sapien
tccgagcttgagagcaactgccttt

SEQ ID NO: 4484776 - DNA, 25 bp, Homo sapien
ccattcaaattcaaagcactgctca

SEQ ID NO: 4484777 - DNA, 25 bp, Homo sapien
ctgctccattcaaattcaaagcact

SEQ ID NO: 4484778 - DNA, 25 bp, Homo sapien
gctccattcaaattcaaagcactgc

SEQ ID NO: 4484779 - DNA, 25 bp, Homo sapien
tccattcaaattcaaagcactgctc

SEQ ID NO: 4484780 - DNA, 25 bp, Homo sapien
tgagatgttcaaacctacagagtgt

SEQ ID NO: 4484781 - DNA, 25 bp, Homo sapien
gtgggaaaagtactctgagatgttc

SEQ ID NO: 4484782 - DNA, 25 bp, Homo sapien
aaaagtactctgagatgttcaaacc

SEQ ID NO: 4484783 - DNA, 25 bp, Homo sapien
caaacctacagagtgtctgtcctcc

SEQ ID NO: 4484784 - DNA, 25 bp, Homo sapien
atcaggaccaagagcttatgcagct

SEQ ID NO: 4484785 - DNA, 25 bp, Homo sapien
aatcaggaccaagagcttatgcagc

SEQ ID NO: 4484786 - DNA, 25 bp, Homo sapien
tggaaaagtgataaggggacgtgac

SEQ ID NO: 4484787 - DNA, 25 bp, Homo sapien
gttctccgtccaacacttacagtca

SEQ ID NO: 4484788 - DNA, 25 bp, Homo sapien
tacccttatcagttctccgtccaac

SEQ ID NO: 4484789 - DNA, 25 bp, Homo sapien
tcaatcacctacccttatcagttct

SEQ ID NO: 4484790 - DNA, 25 bp, Homo sapien
tgtcctcgggcacccagagcgggaa

SEQ ID NO: 4484791 - DNA, 25 bp, Homo sapien
ccaggttttccccatcacgcaagtg

SEQ ID NO: 4484792 - DNA, 25 bp, Homo sapien
ttccccatcacgcaagtgcaggcgg

SEQ ID NO: 4484793 - DNA, 25 bp, Homo sapien
gaacgccaggttttccccatcacgc

SEQ ID NO: 4484794 - DNA, 25 bp, Homo sapien
tcttttcatgggcaatcaggcagta

SEQ ID NO: 4484795 - DNA, 25 bp, Homo sapien
ttttcatgggcaatcaggcagtagc

SEQ ID NO: 4484796 - DNA, 25 bp, Homo sapien
cgtttccagccagaggtaagccttc

SEQ ID NO: 4484797 - DNA, 25 bp, Homo sapien
accaaaatccgctgcctcaggcgtt

SEQ ID NO: 4484798 - DNA, 25 bp, Homo sapien
tgctattcctagtgcccaggcattc

SEQ ID NO: 4484799 - DNA, 25 bp, Homo sapien
tagtgctattcctagtgcccaggca

SEQ ID NO: 4484800 - DNA, 25 bp, Homo sapien
ctccaccctagtgctattcctagtg

SEQ ID NO: 4484801 - DNA, 25 bp, Homo sapien
accctagtgctattcctagtgccca

SEQ ID NO: 4484802 - DNA, 25 bp, Homo sapien
tcaatgagatgtacaaacaatggct

SEQ ID NO: 4484803 - DNA, 25 bp, Homo sapien
gaaaatgaatagtccctcctcgagt

SEQ ID NO: 4484804 - DNA, 25 bp, Homo sapien
cctagaagtgggctagctgcatcaa

SEQ ID NO: 4484805 - DNA, 25 bp, Homo sapien
taattctgttggtctaaaacctgac

SEQ ID NO: 4484806 - DNA, 25 bp, Homo sapien
ggaaagaatgttggaaagcacttgg

SEQ ID NO: 4484807 - DNA, 25 bp, Homo sapien
tcacctagccccttaaatgttccaa

SEQ ID NO: 4484808 - DNA, 25 bp, Homo sapien
gtataaaattctggcataggcttag

SEQ ID NO: 4484809 - DNA, 25 bp, Homo sapien
ccagtttacctttatgtgcaaggca

SEQ ID NO: 4484810 - DNA, 25 bp, Homo sapien
gattcgggaggctcccttagcaggc

SEQ ID NO: 4484811 - DNA, 25 bp, Homo sapien
catctggacgctgcgggatatctga

SEQ ID NO: 4484812 - DNA, 25 bp, Homo sapien
tccccgcatctggacgctgcgggat

SEQ ID NO: 4484813 - DNA, 25 bp, Homo sapien
gagaaaaacactccttactcagggc

SEQ ID NO: 4484814 - DNA, 25 bp, Homo sapien
tttgtaaaagtcttgagagcagctc

SEQ ID NO: 4484815 - DNA, 25 bp, Homo sapien
gtctacccgttgtgccactcagatc

SEQ ID NO: 4484816 - DNA, 25 bp, Homo sapien
tacagtctacccgttgtgccactca

SEQ ID NO: 4484817 - DNA, 25 bp, Homo sapien
tgtaaaagtcttgagagcagctcct

SEQ ID NO: 4484818 - DNA, 25 bp, Homo sapien
ggagcaaggatttgtcttgttggta

SEQ ID NO: 4484819 - DNA, 25 bp, Homo sapien
atgggagttcatggagcaaggattt

SEQ ID NO: 4484820 - DNA, 25 bp, Homo sapien
gaacacatgggagttcatggagcaa

SEQ ID NO: 4484821 - DNA, 25 bp, Homo sapien
cacatgggagttcatggagcaagga

SEQ ID NO: 4484822 - DNA, 25 bp, Homo sapien
aacagcacagcccattttgccatac

SEQ ID NO: 4484823 - DNA, 25 bp, Homo sapien
gcatttctctcactaaaatattgaa

SEQ ID NO: 4484824 - DNA, 25 bp, Homo sapien
atttctctcactaaaatattgaaca

SEQ ID NO: 4484825 - DNA, 25 bp, Homo sapien
gaacagcacagcccattttgccata

SEQ ID NO: 4484826 - DNA, 25 bp, Homo sapien
tgtcatcataatcaccttgatagtc

SEQ ID NO: 4484827 - DNA, 25 bp, Homo sapien
cgtgctgagtaactgtacatcgtgt

SEQ ID NO: 4484828 - DNA, 25 bp, Homo sapien
tgtacatcgtgtcatcataatcacc

SEQ ID NO: 4484829 - DNA, 25 bp, Homo sapien
gagtaactgtacatcgtgtcatcat

SEQ ID NO: 4484830 - DNA, 25 bp, Homo sapien
cttagaattgaggccacttttgccc

SEQ ID NO: 4484831 - DNA, 25 bp, Homo sapien
tcctctcaactttccagacttggaa

SEQ ID NO: 4484832 - DNA, 25 bp, Homo sapien
gacttggaagatccctgctgtccac

SEQ ID NO: 4484833 - DNA, 25 bp, Homo sapien
atggcctgaaggtcatctcctctca

SEQ ID NO: 4484834 - DNA, 25 bp, Homo sapien
tgaaggtcatctcctctcaactttc

SEQ ID NO: 4484835 - DNA, 25 bp, Homo sapien
tctttttcacggagctgctgctctg

SEQ ID NO: 4484836 - DNA, 25 bp, Homo sapien
tcattcctcatctctactgcgtgtt

SEQ ID NO: 4484837 - DNA, 25 bp, Homo sapien
ttatcattcctcatctctactgcgt

SEQ ID NO: 4484838 - DNA, 25 bp, Homo sapien
cctcttctgacttatcattcctcat

SEQ ID NO: 4484839 - DNA, 25 bp, Homo sapien
aaagatactaggtgagaggctctgg

SEQ ID NO: 4484840 - DNA, 25 bp, Homo sapien
gcatgtgccaaagatactaggtgag

SEQ ID NO: 4484841 - DNA, 25 bp, Homo sapien
tgagcatgtgccaaagatactaggt

SEQ ID NO: 4484842 - DNA, 25 bp, Homo sapien
tgccaaagatactaggtgagaggct

SEQ ID NO: 4484843 - DNA, 25 bp, Homo sapien
acaagacccactgcttctgaaccat

SEQ ID NO: 4484844 - DNA, 25 bp, Homo sapien
tccccgtgggatccaaacacaagac

SEQ ID NO: 4484845 - DNA, 25 bp, Homo sapien
tagagactgatgtagccttgggcca

SEQ ID NO: 4484846 - DNA, 25 bp, Homo sapien
cacatatggcttcactgaacagtaa

SEQ ID NO: 4484847 - DNA, 25 bp, Homo sapien
gaccaggtcgagcatggaggcacca

SEQ ID NO: 4484848 - DNA, 25 bp, Homo sapien
cacaggaccaggtcgagcatggagg

SEQ ID NO: 4484849 - DNA, 25 bp, Homo sapien
aggaccaggtcgagcatggaggcac

SEQ ID NO: 4484850 - DNA, 25 bp, Homo sapien
ccaggtcgagcatggaggcaccaaa

SEQ ID NO: 4484851 - DNA, 25 bp, Homo sapien
cttcctggcccagctggctgcgcat

SEQ ID NO: 4484852 - DNA, 25 bp, Homo sapien
ctggctgacgacgcgctgctgcccg

SEQ ID NO: 4484853 - DNA, 25 bp, Homo sapien
ctctccagccgcgacgggcgagggt

SEQ ID NO: 4484854 - DNA, 25 bp, Homo sapien
cgcgacgggcgagggttgtgtgggt

SEQ ID NO: 4484855 - DNA, 25 bp, Homo sapien
tgctgcccgctggcgccgagagcag

SEQ ID NO: 4484856 - DNA, 25 bp, Homo sapien
tgttgagtcacttgcccagaacttc

SEQ ID NO: 4484857 - DNA, 25 bp, Homo sapien
agttccttcaaatcggtccaccgct

SEQ ID NO: 4484858 - DNA, 25 bp, Homo sapien
gccagagggcactgccagactgaac

SEQ ID NO: 4484859 - DNA, 25 bp, Homo sapien
ctgggtccaggctataggtagtgtc

SEQ ID NO: 4484860 - DNA, 25 bp, Homo sapien
gccgggctgttccacgctcactgtg

SEQ ID NO: 4484861 - DNA, 25 bp, Homo sapien
ggcagagtgtgccagcgtccattat

SEQ ID NO: 4484862 - DNA, 25 bp, Homo sapien
cctgaactgagagcagcgttggccg

SEQ ID NO: 4484863 - DNA, 25 bp, Homo sapien
tagggagccgggctgttccacgctc

SEQ ID NO: 4484864 - DNA, 25 bp, Homo sapien
ctacagtttagaggacctgagccac

SEQ ID NO: 4484865 - DNA, 25 bp, Homo sapien
tacagtttagaggacctgagccaca

SEQ ID NO: 4484866 - DNA, 25 bp, Homo sapien
gtttagaggacctgagccacagtag

SEQ ID NO: 4484867 - DNA, 25 bp, Homo sapien
cagtttagaggacctgagccacagt

SEQ ID NO: 4484868 - DNA, 25 bp, Homo sapien
tccacatgtttggtgatgcacgcca

SEQ ID NO: 4484869 - DNA, 25 bp, Homo sapien
gctatcaggccccaaggttcagact

SEQ ID NO: 4484870 - DNA, 25 bp, Homo sapien
catgggtctcatcctgacgcgtcga

SEQ ID NO: 4484871 - DNA, 25 bp, Homo sapien
tcttggtcaacagggagagttcctc

SEQ ID NO: 4484872 - DNA, 25 bp, Homo sapien
tctctttggtgaacttggagcaaca

SEQ ID NO: 4484873 - DNA, 25 bp, Homo sapien
caggcctagtgtgagaaatgcgatc

SEQ ID NO: 4484874 - DNA, 25 bp, Homo sapien
tttaagccactagcaagagagcaag

SEQ ID NO: 4484875 - DNA, 25 bp, Homo sapien
tctaatatctggaataggcgggttc

SEQ ID NO: 4484876 - DNA, 25 bp, Homo sapien
gaatgccttctgaggagcttctttt

SEQ ID NO: 4484877 - DNA, 25 bp, Homo sapien
catttgttcaatttgcatagaatgc

SEQ ID NO: 4484878 - DNA, 25 bp, Homo sapien
taggtcatgatttcttcaaaatcag

SEQ ID NO: 4484879 - DNA, 25 bp, Homo sapien
aaatcagacagctgtttcatttgtt

SEQ ID NO: 4484880 - DNA, 25 bp, Homo sapien
gacacccagatttagtcactgaggg

SEQ ID NO: 4484881 - DNA, 25 bp, Homo sapien
tgaacgagttcaaccacaccatgat

SEQ ID NO: 4484882 - DNA, 25 bp, Homo sapien
gaaatgacagtttgcatcccctaaa

SEQ ID NO: 4484883 - DNA, 25 bp, Homo sapien
tttacagtgccctgacagagtcaga

SEQ ID NO: 4484884 - DNA, 25 bp, Homo sapien
gacatctggccacgtctagagacat

SEQ ID NO: 4484885 - DNA, 25 bp, Homo sapien
tcctgaaggcccaacactagtattg

SEQ ID NO: 4484886 - DNA, 25 bp, Homo sapien
tataccaaatgtgctaagtctctgc

SEQ ID NO: 4484887 - DNA, 25 bp, Homo sapien
caggagggcatagctgtccagtcag

SEQ ID NO: 4484888 - DNA, 25 bp, Homo sapien
catgatacatctgaggcaccaacac

SEQ ID NO: 4484889 - DNA, 25 bp, Homo sapien
catttgtgcaatggaccggctatcc

SEQ ID NO: 4484890 - DNA, 25 bp, Homo sapien
gcctgggatcacttctacttggtaa

SEQ ID NO: 4484891 - DNA, 25 bp, Homo sapien
gcttgagactaggaaggaacactgt

SEQ ID NO: 4484892 - DNA, 25 bp, Homo sapien
ctcggtcccgtctcgagggccgcgg

SEQ ID NO: 4484893 - DNA, 25 bp, Homo sapien
gcgggctggggcgacgactaccgac

SEQ ID NO: 4484894 - DNA, 25 bp, Homo sapien
atgtaaggggatagacgtggcacca

SEQ ID NO: 4484895 - DNA, 25 bp, Homo sapien
cgaccgggtcctaggaggatgtaag

SEQ ID NO: 4484896 - DNA, 25 bp, Homo sapien
agctcgaaggtgagctcggccccgc

SEQ ID NO: 4484897 - DNA, 25 bp, Homo sapien
cgttgtccggcagctcgaaggtgag

SEQ ID NO: 4484898 - DNA, 25 bp, Homo sapien
gcggagcgcgggacagtgctgccca

SEQ ID NO: 4484899 - DNA, 25 bp, Homo sapien
agcacggaggcggagcgcgggacag

SEQ ID NO: 4484900 - DNA, 25 bp, Homo sapien
tgctgttatcaaaggagcaaccacc

SEQ ID NO: 4484901 - DNA, 25 bp, Homo sapien
aaattgctgttatcaaaggagcaac

SEQ ID NO: 4484902 - DNA, 25 bp, Homo sapien
caaccaccacttaccaaatgccaac

SEQ ID NO: 4484903 - DNA, 25 bp, Homo sapien
gttatcaaaggagcaaccaccactt

SEQ ID NO: 4484904 - DNA, 25 bp, Homo sapien
gagaatgggaggctcatcgcccact

SEQ ID NO: 4484905 - DNA, 25 bp, Homo sapien
tagcagtcaacatcgtagtggcctc

SEQ ID NO: 4484906 - DNA, 25 bp, Homo sapien
ataaacgcccttgacttcagcccgg

SEQ ID NO: 4484907 - DNA, 25 bp, Homo sapien
tcagcccggtacgtgaagctgtcgt

SEQ ID NO: 4484908 - DNA, 25 bp, Homo sapien
aagtagatgggcttttctcattctc

SEQ ID NO: 4484909 - DNA, 25 bp, Homo sapien
ccatgggacatgagcaggtgatacg

SEQ ID NO: 4484910 - DNA, 25 bp, Homo sapien
gtgatacgtattcccactgggcctg

SEQ ID NO: 4484911 - DNA, 25 bp, Homo sapien
catgagcaggtgatacgtattccca

SEQ ID NO: 4484912 - DNA, 25 bp, Homo sapien
cacctagaaggccaagcttctacat

SEQ ID NO: 4484913 - DNA, 25 bp, Homo sapien
cctagaaggccaagcttctacattt

SEQ ID NO: 4484914 - DNA, 25 bp, Homo sapien
ttcacctagaaggccaagcttctac

SEQ ID NO: 4484915 - DNA, 25 bp, Homo sapien
cttcacctagaaggccaagcttcta

SEQ ID NO: 4484916 - DNA, 25 bp, Homo sapien
tttcttgccagaaaccatggcctct

SEQ ID NO: 4484917 - DNA, 25 bp, Homo sapien
tcaagacagttctgaagcatgagaa

SEQ ID NO: 4484918 - DNA, 25 bp, Homo sapien
cgttaatatgacacagctgacctga

SEQ ID NO: 4484919 - DNA, 25 bp, Homo sapien
tctccagctagttgcagaagaagtc

SEQ ID NO: 4484920 - DNA, 25 bp, Homo sapien
ggaggttattcaggcctgatcccat

SEQ ID NO: 4484921 - DNA, 25 bp, Homo sapien
ggcaggaagagaaaagcagtcacac

SEQ ID NO: 4484922 - DNA, 25 bp, Homo sapien
ctgggcaggaagagaaaagcagtca

SEQ ID NO: 4484923 - DNA, 25 bp, Homo sapien
caggaagagaaaagcagtcacactg

SEQ ID NO: 4484924 - DNA, 25 bp, Homo sapien
tgggcaggaagagaaaagcagtcac

SEQ ID NO: 4484925 - DNA, 25 bp, Homo sapien
actgaagctgaccacgaacagggca

SEQ ID NO: 4484926 - DNA, 25 bp, Homo sapien
caacagaccagtaagagactcggct

SEQ ID NO: 4484927 - DNA, 25 bp, Homo sapien
taatgcgtctgggagtcaatcaccg

SEQ ID NO: 4484928 - DNA, 25 bp, Homo sapien
cagagcctcatggatggtcacgcag

SEQ ID NO: 4484929 - DNA, 25 bp, Homo sapien
cagcaggctgtgacctaggagagct

SEQ ID NO: 4484930 - DNA, 25 bp, Homo sapien
ggacacccaagacaaatgacccatg

SEQ ID NO: 4484931 - DNA, 25 bp, Homo sapien
gcatgaaaggcaaagggctaccaca

SEQ ID NO: 4484932 - DNA, 25 bp, Homo sapien
tcaccgagggtgagcagatctgcaa

SEQ ID NO: 4484933 - DNA, 25 bp, Homo sapien
tgtcagacggtgcaggatttcagat

SEQ ID NO: 4484934 - DNA, 25 bp, Homo sapien
gataggtttccttcagcggagacac

SEQ ID NO: 4484935 - DNA, 25 bp, Homo sapien
gcatgcagatatccgggagaaggta

SEQ ID NO: 4484936 - DNA, 25 bp, Homo sapien
tacaatgcattaacgcctgtcagac

SEQ ID NO: 4484937 - DNA, 25 bp, Homo sapien
gcagcttccagatgtctgtccacca

SEQ ID NO: 4484938 - DNA, 25 bp, Homo sapien
caatgcaaacccagcccattttggg

SEQ ID NO: 4484939 - DNA, 25 bp, Homo sapien
ccagatgtctgtccaccaggtgcaa

SEQ ID NO: 4484940 - DNA, 25 bp, Homo sapien
tgtccaccaggtgcaatgcaaaccc

SEQ ID NO: 4484941 - DNA, 25 bp, Homo sapien
gaagtgttggcttcatgagtaaaag

SEQ ID NO: 4484942 - DNA, 25 bp, Homo sapien
tcctcccaatgaaggttctcagcat

SEQ ID NO: 4484943 - DNA, 25 bp, Homo sapien
cagttcactgtgttatggtttgggt

SEQ ID NO: 4484944 - DNA, 25 bp, Homo sapien
tatttgtatcaatgtgagaatgtac

SEQ ID NO: 4484945 - DNA, 25 bp, Homo sapien
ggtatctacctgctctatcattccc

SEQ ID NO: 4484946 - DNA, 25 bp, Homo sapien
tccattgatgatggcggtatctacc

SEQ ID NO: 4484947 - DNA, 25 bp, Homo sapien
tctattttgtcagatgctacggcta

SEQ ID NO: 4484948 - DNA, 25 bp, Homo sapien
tcctgttcagtacgatagtttgcct

SEQ ID NO: 4484949 - DNA, 25 bp, Homo sapien
gatgttctagattatggctcctgga

SEQ ID NO: 4484950 - DNA, 25 bp, Homo sapien
gaatactgggaactttgcatcaggc

SEQ ID NO: 4484951 - DNA, 25 bp, Homo sapien
cacagggagtctgaacttaggcaca

SEQ ID NO: 4484952 - DNA, 25 bp, Homo sapien
tgaggctcactgtacttaaggaaac

SEQ ID NO: 4484953 - DNA, 25 bp, Homo sapien
aatgccaggattatacacacgagcc

SEQ ID NO: 4484954 - DNA, 25 bp, Homo sapien
taaaatatgaaagagtataacatag

SEQ ID NO: 4484955 - DNA, 25 bp, Homo sapien
catgcactgccatgcttggcaattt

SEQ ID NO: 4484956 - DNA, 25 bp, Homo sapien
gcccagccgtgtgcttgttttttta

SEQ ID NO: 4484957 - DNA, 25 bp, Homo sapien
tcttggcatcgcatatgaagccctt

SEQ ID NO: 4484958 - DNA, 25 bp, Homo sapien
tacttgtggcatttacacgtctact

SEQ ID NO: 4484959 - DNA, 25 bp, Homo sapien
cacctacttgagtatacacatggta

SEQ ID NO: 4484960 - DNA, 25 bp, Homo sapien
caccagctatactgccagggaatca

SEQ ID NO: 4484961 - DNA, 25 bp, Homo sapien
caatgatcaactcgtcccaggatgt

SEQ ID NO: 4484962 - DNA, 25 bp, Homo sapien
tgcagtttgggaaacccttcagtcc

SEQ ID NO: 4484963 - DNA, 25 bp, Homo sapien
tggctgtcagtggacctcacggaga

SEQ ID NO: 4484964 - DNA, 25 bp, Homo sapien
cattacaggccggataaaggacaca

SEQ ID NO: 4484965 - DNA, 25 bp, Homo sapien
tagggttaaagtctgccatgggagc

SEQ ID NO: 4484966 - DNA, 25 bp, Homo sapien
tgcctccccgctgaaaatctgttag

SEQ ID NO: 4484967 - DNA, 25 bp, Homo sapien
tagtcccagtgcatggtagctctgt

SEQ ID NO: 4484968 - DNA, 25 bp, Homo sapien
tctgttaggagggtgccagtcgtcc

SEQ ID NO: 4484969 - DNA, 25 bp, Homo sapien
gcccagcggaaactgcagtagagga

SEQ ID NO: 4484970 - DNA, 25 bp, Homo sapien
ttgggggggatggccatgggcccag

SEQ ID NO: 4484971 - DNA, 25 bp, Homo sapien
gctggtgcatgtccataggggctgc

SEQ ID NO: 4484972 - DNA, 25 bp, Homo sapien
tgcatgtccataggggctgctgtgc

SEQ ID NO: 4484973 - DNA, 25 bp, Homo sapien
gctttgaagggagcttgggtccaca

SEQ ID NO: 4484974 - DNA, 25 bp, Homo sapien
catacagctgtctgcgttgcaaacg

SEQ ID NO: 4484975 - DNA, 25 bp, Homo sapien
aaatttcagggagccaaagctaggc

SEQ ID NO: 4484976 - DNA, 25 bp, Homo sapien
aacttcgcatgctgtcccgctggta

SEQ ID NO: 4484977 - DNA, 25 bp, Homo sapien
gaaagagatcacattgctggcaagc

SEQ ID NO: 4484978 - DNA, 25 bp, Homo sapien
tgaagatctctacactaccatgaag

SEQ ID NO: 4484979 - DNA, 25 bp, Homo sapien
tgagacttacgacccctggaaagag

SEQ ID NO: 4484980 - DNA, 25 bp, Homo sapien
cataatgggcagtggatcctggctg

SEQ ID NO: 4484981 - DNA, 25 bp, Homo sapien
tatatctgaagtcccagtagggtcg

SEQ ID NO: 4484982 - DNA, 25 bp, Homo sapien
gaagatgaaggaatcacccctgcag

SEQ ID NO: 4484983 - DNA, 25 bp, Homo sapien
tagctaagaagggtagcctatggcc

SEQ ID NO: 4484984 - DNA, 25 bp, Homo sapien
gggactgcgaaaccatgctaatgcc

SEQ ID NO: 4484985 - DNA, 25 bp, Homo sapien
cacaaggtcatatgaggtgagacac

SEQ ID NO: 4484986 - DNA, 25 bp, Homo sapien
tcttctgtggtctggccaaacttcc

SEQ ID NO: 4484987 - DNA, 25 bp, Homo sapien
gcctggcctgcatatctgaagcctt

SEQ ID NO: 4484988 - DNA, 25 bp, Homo sapien
tagttatatacaagtggcagcttca

SEQ ID NO: 4484989 - DNA, 25 bp, Homo sapien
gctgtggcggcttttccctggccag

SEQ ID NO: 4484990 - DNA, 25 bp, Homo sapien
ctgtggcggcttttccctggccagc

SEQ ID NO: 4484991 - DNA, 25 bp, Homo sapien
ggctgtggcggcttttccctggcca

SEQ ID NO: 4484992 - DNA, 25 bp, Homo sapien
ggggctgtggcggcttttccctggc

SEQ ID NO: 4484993 - DNA, 25 bp, Homo sapien
cgcccggggcgctcaagctggcggg

SEQ ID NO: 4484994 - DNA, 25 bp, Homo sapien
cgggcagcaactgagcgcaccctgg

SEQ ID NO: 4484995 - DNA, 25 bp, Homo sapien
gggcgcacgggcagcaactgagcgc

SEQ ID NO: 4484996 - DNA, 25 bp, Homo sapien
gcgcacgggcagcaactgagcgcac

SEQ ID NO: 4484997 - DNA, 25 bp, Homo sapien
tttgtgtctcggtcggcgtcgccac

SEQ ID NO: 4484998 - DNA, 25 bp, Homo sapien
cctggcggtctcagcctcggtcttt

SEQ ID NO: 4484999 - DNA, 25 bp, Homo sapien
cgtcgccacgtcatgggcttgcagg

SEQ ID NO: 4485000 - DNA, 25 bp, Homo sapien
tcggtctttgtgtctcggtcggcgt

SEQ ID NO: 4485001 - DNA, 25 bp, Homo sapien
gcggctgaagggggcgctcggactc

SEQ ID NO: 4485002 - DNA, 25 bp, Homo sapien
gcgcgcagccgggacagtctcgcat

SEQ ID NO: 4485003 - DNA, 25 bp, Homo sapien
gcggcgcgcagccgggacagtctcg

SEQ ID NO: 4485004 - DNA, 25 bp, Homo sapien
ctgaagggggcgctcggactcctct

SEQ ID NO: 4485005 - DNA, 25 bp, Homo sapien
ggattccgcgcccagggttgcaccc

SEQ ID NO: 4485006 - DNA, 25 bp, Homo sapien
cccagggttgcaccccgcggatgga

SEQ ID NO: 4485007 - DNA, 25 bp, Homo sapien
gatggagcgactttcgcctccgccg

SEQ ID NO: 4485008 - DNA, 25 bp, Homo sapien
accccgcggatggagcgactttcgc

SEQ ID NO: 4485009 - DNA, 25 bp, Homo sapien
agggcccgcccttctctgcgggtct

SEQ ID NO: 4485010 - DNA, 25 bp, Homo sapien
ccagcggctgttcggcagtggtccg

SEQ ID NO: 4485011 - DNA, 25 bp, Homo sapien
gcgcctccggtaggctccagagtca

SEQ ID NO: 4485012 - DNA, 25 bp, Homo sapien
gtccgcacggcctccgatgccgcgc

SEQ ID NO: 4485013 - DNA, 25 bp, Homo sapien
tttgcctgagttggaccgcgtgtga

SEQ ID NO: 4485014 - DNA, 25 bp, Homo sapien
tactctgatggattcggtagcccaa

SEQ ID NO: 4485015 - DNA, 25 bp, Homo sapien
ttctgacaggtgaagttgagcatcc

SEQ ID NO: 4485016 - DNA, 25 bp, Homo sapien
tgagcatccttatcaaaccctcggg

SEQ ID NO: 4485017 - DNA, 25 bp, Homo sapien
acctgcagggcgggcccagtaatgc

SEQ ID NO: 4485018 - DNA, 25 bp, Homo sapien
gcagtgagctagcttccacctgcag

SEQ ID NO: 4485019 - DNA, 25 bp, Homo sapien
acagcagtgagctagcttccacctg

SEQ ID NO: 4485020 - DNA, 25 bp, Homo sapien
cctgcagggcgggcccagtaatgct

SEQ ID NO: 4485021 - DNA, 25 bp, Homo sapien
aattctggactagacacaccttggg

SEQ ID NO: 4485022 - DNA, 25 bp, Homo sapien
tgacggctaactgggaaattctgga

SEQ ID NO: 4485023 - DNA, 25 bp, Homo sapien
cttatgcgggaaactcacaacagcc

SEQ ID NO: 4485024 - DNA, 25 bp, Homo sapien
ggctaccaggtgcagtctcttgact

SEQ ID NO: 4485025 - DNA, 25 bp, Homo sapien
tttatgaccaaccaaacatgccagt

SEQ ID NO: 4485026 - DNA, 25 bp, Homo sapien
tgatggcttctaagacagggaacac

SEQ ID NO: 4485027 - DNA, 25 bp, Homo sapien
taaacaagatggtcagaggaggcgc

SEQ ID NO: 4485028 - DNA, 25 bp, Homo sapien
ggaggcaatggagcaaaccacgtgc

SEQ ID NO: 4485029 - DNA, 25 bp, Homo sapien
tctctgactacactgaaacttcagg

SEQ ID NO: 4485030 - DNA, 25 bp, Homo sapien
tttattacttgaagagctctctgac

SEQ ID NO: 4485031 - DNA, 25 bp, Homo sapien
gactacactgaaacttcaggtcagt

SEQ ID NO: 4485032 - DNA, 25 bp, Homo sapien
gagctctctgactacactgaaactt

SEQ ID NO: 4485033 - DNA, 25 bp, Homo sapien
atttcatcacggacacccgacaggg

SEQ ID NO: 4485034 - DNA, 25 bp, Homo sapien
ggacgactgtatcactcccgtggag

SEQ ID NO: 4485035 - DNA, 25 bp, Homo sapien
tcagtttggcaagctgcgacaggtc

SEQ ID NO: 4485036 - DNA, 25 bp, Homo sapien
tctagtttgggtccgtgggagccac

SEQ ID NO: 4485037 - DNA, 25 bp, Homo sapien
gtcagccgcatgtctgtgtacaggg

SEQ ID NO: 4485038 - DNA, 25 bp, Homo sapien
cagggctgtcagcttgcccttgtcg

SEQ ID NO: 4485039 - DNA, 25 bp, Homo sapien
ttgtcgcccgcattccgtgcatact

SEQ ID NO: 4485040 - DNA, 25 bp, Homo sapien
tcaatggtccaagaaggttggcccc

SEQ ID NO: 4485041 - DNA, 25 bp, Homo sapien
tgaaatcaggtcaaagacgtcccga

SEQ ID NO: 4485042 - DNA, 25 bp, Homo sapien
gagactgtattgcataacactgccc

SEQ ID NO: 4485043 - DNA, 25 bp, Homo sapien
catatcacagattgcataggcccct

SEQ ID NO: 4485044 - DNA, 25 bp, Homo sapien
ttcaagggcatgcaaccaaggaggg

SEQ ID NO: 4485045 - DNA, 25 bp, Homo sapien
cagatgggcacgacaataacgagga

SEQ ID NO: 4485046 - DNA, 25 bp, Homo sapien
gtgcatgccgcagcagcgatcagag

SEQ ID NO: 4485047 - DNA, 25 bp, Homo sapien
gagcagctatcttgcagaccttggc

SEQ ID NO: 4485048 - DNA, 25 bp, Homo sapien
gaccttggctcgtctgaattcggct

SEQ ID NO: 4485049 - DNA, 25 bp, Homo sapien
cccagtacagtagagaggccagtcc

SEQ ID NO: 4485050 - DNA, 25 bp, Homo sapien
ttcccaaggtagctaggcacatgcc

SEQ ID NO: 4485051 - DNA, 25 bp, Homo sapien
caatgcccagagtggtaacctagta

SEQ ID NO: 4485052 - DNA, 25 bp, Homo sapien
aacaggagatcctttggagtggcca

SEQ ID NO: 4485053 - DNA, 25 bp, Homo sapien
caaactccctggcaatagaagttgt

SEQ ID NO: 4485054 - DNA, 25 bp, Homo sapien
gcacccacatctcattgtgctataa

SEQ ID NO: 4485055 - DNA, 25 bp, Homo sapien
aaatagatatgccatctcgtctctg

SEQ ID NO: 4485056 - DNA, 25 bp, Homo sapien
tcagaattaacaagaggtgctcagt

SEQ ID NO: 4485057 - DNA, 25 bp, Homo sapien
ctggcatatggttggttattatcca

SEQ ID NO: 4485058 - DNA, 25 bp, Homo sapien
gattctggcatatggttggttatta

SEQ ID NO: 4485059 - DNA, 25 bp, Homo sapien
tgatggtgcagccatgatcactccc

SEQ ID NO: 4485060 - DNA, 25 bp, Homo sapien
ccctgttgatggtgcagccatgatc

SEQ ID NO: 4485061 - DNA, 25 bp, Homo sapien
cgaatcatttaaaaaggccatagaa

SEQ ID NO: 4485062 - DNA, 25 bp, Homo sapien
ttcgaatcatttaaaaaggccatag

SEQ ID NO: 4485063 - DNA, 25 bp, Homo sapien
aatcatttaaaaaggccatagaatt

SEQ ID NO: 4485064 - DNA, 25 bp, Homo sapien
cttcgaatcatttaaaaaggccata

SEQ ID NO: 4485065 - DNA, 25 bp, Homo sapien
gaggggtgcacaatacaatgtcaag

SEQ ID NO: 4485066 - DNA, 25 bp, Homo sapien
ttgttccatggatgtgtcacgcaca

SEQ ID NO: 4485067 - DNA, 25 bp, Homo sapien
catggatgtgtcacgcacatagagg

SEQ ID NO: 4485068 - DNA, 25 bp, Homo sapien
cacatagaggggtgcacaatacaat

SEQ ID NO: 4485069 - DNA, 25 bp, Homo sapien
gagcataaaggatcaagcatgtgcc

SEQ ID NO: 4485070 - DNA, 25 bp, Homo sapien
aaaatctgtgctaaagtcagcaaga

SEQ ID NO: 4485071 - DNA, 25 bp, Homo sapien
gcaagatacactagagcataaagga

SEQ ID NO: 4485072 - DNA, 25 bp, Homo sapien
taaagtcagcaagatacactagagc

SEQ ID NO: 4485073 - DNA, 25 bp, Homo sapien
tgtgggcctttgtcctgatcgtttt

SEQ ID NO: 4485074 - DNA, 25 bp, Homo sapien
gagaacactttgatcgttgtgggcc

SEQ ID NO: 4485075 - DNA, 25 bp, Homo sapien
cttcagaccatcttggtgggcaaat

SEQ ID NO: 4485076 - DNA, 25 bp, Homo sapien
gtcctgatcgttttgttgcatcttc

SEQ ID NO: 4485077 - DNA, 25 bp, Homo sapien
gcttgtccaggattctggtggcctc

SEQ ID NO: 4485078 - DNA, 25 bp, Homo sapien
ccaggattctggtggcctctcttgc

SEQ ID NO: 4485079 - DNA, 25 bp, Homo sapien
ttctggtggcctctcttgctcagaa

SEQ ID NO: 4485080 - DNA, 25 bp, Homo sapien
ctggtggcctctcttgctcagaaac

SEQ ID NO: 4485081 - DNA, 25 bp, Homo sapien
ctttacatagcttgggacaggccac

SEQ ID NO: 4485082 - DNA, 25 bp, Homo sapien
aatacttgggtctgtaatagcctga

SEQ ID NO: 4485083 - DNA, 25 bp, Homo sapien
gcagatcttatggacaacttaacac

SEQ ID NO: 4485084 - DNA, 25 bp, Homo sapien
tatgctgtccagaattaatcctgct

SEQ ID NO: 4485085 - DNA, 25 bp, Homo sapien
cacagtagcgtgtaggatgttattt

SEQ ID NO: 4485086 - DNA, 25 bp, Homo sapien
tgtagtccctgcattctactgcctt

SEQ ID NO: 4485087 - DNA, 25 bp, Homo sapien
cacctgacctgagatatagggcttg

SEQ ID NO: 4485088 - DNA, 25 bp, Homo sapien
ctctcgtgttttacacacagtagcg

SEQ ID NO: 4485089 - DNA, 25 bp, Homo sapien
gcaggttccacgtctaacggcacga

SEQ ID NO: 4485090 - DNA, 25 bp, Homo sapien
aggttccacgtctaacggcacgagg

SEQ ID NO: 4485091 - DNA, 25 bp, Homo sapien
caggttccacgtctaacggcacgag

SEQ ID NO: 4485092 - DNA, 25 bp, Homo sapien
gcatgcgtgcttacaaacttcctgg

SEQ ID NO: 4485093 - DNA, 25 bp, Homo sapien
tcctggcttctaaaggattgggcca

SEQ ID NO: 4485094 - DNA, 25 bp, Homo sapien
tatctgggtgttctgagctactggc

SEQ ID NO: 4485095 - DNA, 25 bp, Homo sapien
caatcattgagctgagggatggccg

SEQ ID NO: 4485096 - DNA, 25 bp, Homo sapien
taacgatgacaaggttttgatgacc

SEQ ID NO: 4485097 - DNA, 25 bp, Homo sapien
caagtgcctagtagcctgtgaggct

SEQ ID NO: 4485098 - DNA, 25 bp, Homo sapien
tgttcaatatacaagctaactcccg

SEQ ID NO: 4485099 - DNA, 25 bp, Homo sapien
tgatgtaacaacttaggatggagca

SEQ ID NO: 4485100 - DNA, 25 bp, Homo sapien
tcttcaaagggcttatacataaatg

SEQ ID NO: 4485101 - DNA, 25 bp, Homo sapien
tatgacaccttaaagcttctgaatg

SEQ ID NO: 4485102 - DNA, 25 bp, Homo sapien
accactgattaagtaacaatggtag

SEQ ID NO: 4485103 - DNA, 25 bp, Homo sapien
taacaatggtagcaacaattatgac

SEQ ID NO: 4485104 - DNA, 25 bp, Homo sapien
tcagtctcacagtctgactcatgtg

SEQ ID NO: 4485105 - DNA, 25 bp, Homo sapien
tgatcattaatatagagcttcggtc

SEQ ID NO: 4485106 - DNA, 25 bp, Homo sapien
gagcttcggtcttgttcagtctcac

SEQ ID NO: 4485107 - DNA, 25 bp, Homo sapien
tgggtacccctgatggatagtgatc

SEQ ID NO: 4485108 - DNA, 25 bp, Homo sapien
gggacctccaaagtacgaagatgtg

SEQ ID NO: 4485109 - DNA, 25 bp, Homo sapien
tctttgattgctaaagggacctcca

SEQ ID NO: 4485110 - DNA, 25 bp, Homo sapien
ggaagaaggcactggcacgcatttt

SEQ ID NO: 4485111 - DNA, 25 bp, Homo sapien
gatggattatctcagagcaaccaag

SEQ ID NO: 4485112 - DNA, 25 bp, Homo sapien
gaaaaggtcaaccatcaaggaccca

SEQ ID NO: 4485113 - DNA, 25 bp, Homo sapien
gggtacgaggttgacccgcaagcac

SEQ ID NO: 4485114 - DNA, 25 bp, Homo sapien
cccgcaagcacagaagagtgtgggc

SEQ ID NO: 4485115 - DNA, 25 bp, Homo sapien
cagtaccccctataggagtatggaa

SEQ ID NO: 4485116 - DNA, 25 bp, Homo sapien
ctttagctcatgaggaaggtaggga

SEQ ID NO: 4485117 - DNA, 25 bp, Homo sapien
tttgtggctggtagtgccctttagc

SEQ ID NO: 4485118 - DNA, 25 bp, Homo sapien
ttgtactcttgaaattccttctcat

SEQ ID NO: 4485119 - DNA, 25 bp, Homo sapien
tccctatcgtccaaagacccagggc

SEQ ID NO: 4485120 - DNA, 25 bp, Homo sapien
tacagggactggagtaagaggcatc

SEQ ID NO: 4485121 - DNA, 25 bp, Homo sapien
cagaaccaagagagggatccagctt

SEQ ID NO: 4485122 - DNA, 25 bp, Homo sapien
gaccaatgaaagtcatacagggact

SEQ ID NO: 4485123 - DNA, 25 bp, Homo sapien
gggagactggcaacaccatgaccaa

SEQ ID NO: 4485124 - DNA, 25 bp, Homo sapien
ccttgaatagaagcaggtagcccat

SEQ ID NO: 4485125 - DNA, 25 bp, Homo sapien
gacgaagcttattctgtgtgtggct

SEQ ID NO: 4485126 - DNA, 25 bp, Homo sapien
caaagttaatgatgtctgtaaatgg

SEQ ID NO: 4485127 - DNA, 25 bp, Homo sapien
ggtagcccatattacatgaaagacg

SEQ ID NO: 4485128 - DNA, 25 bp, Homo sapien
tgagggagaacacgaggtttctgca

SEQ ID NO: 4485129 - DNA, 25 bp, Homo sapien
ttgtatgcagaacagggatcctgca

SEQ ID NO: 4485130 - DNA, 25 bp, Homo sapien
ctgcatgagggagaacacgaggttt

SEQ ID NO: 4485131 - DNA, 25 bp, Homo sapien
taagagtgatttctgttgtatgcag

SEQ ID NO: 4485132 - DNA, 25 bp, Homo sapien
tgagctctcccatcatggtaaggag

SEQ ID NO: 4485133 - DNA, 25 bp, Homo sapien
tctgtatcaatcagtggccctctgt

SEQ ID NO: 4485134 - DNA, 25 bp, Homo sapien
gatatagttaacaaaatgcagccca

SEQ ID NO: 4485135 - DNA, 25 bp, Homo sapien
tccctttaaaggtgacacattgaca

SEQ ID NO: 4485136 - DNA, 25 bp, Homo sapien
gctgagctccaacccttgtcacaca

SEQ ID NO: 4485137 - DNA, 25 bp, Homo sapien
gagcccttgtgatcttgctctaagg

SEQ ID NO: 4485138 - DNA, 25 bp, Homo sapien
tggtcataatcacaggctgagctcc

SEQ ID NO: 4485139 - DNA, 25 bp, Homo sapien
aaggccctgaaaacattagcttatg

SEQ ID NO: 4485140 - DNA, 25 bp, Homo sapien
ggacaaggccatgtcccatttggca

SEQ ID NO: 4485141 - DNA, 25 bp, Homo sapien
tttacacgattaaagtcagttatgc

SEQ ID NO: 4485142 - DNA, 25 bp, Homo sapien
tatgctacagttgggctgattgagg

SEQ ID NO: 4485143 - DNA, 25 bp, Homo sapien
aaggccatgtcccatttggcaggaa

SEQ ID NO: 4485144 - DNA, 25 bp, Homo sapien
ctgctccagggggaataccccccat

SEQ ID NO: 4485145 - DNA, 25 bp, Homo sapien
accacttccaatgttcagggctcta

SEQ ID NO: 4485146 - DNA, 25 bp, Homo sapien
gttcagggctctaaacaaattccac

SEQ ID NO: 4485147 - DNA, 25 bp, Homo sapien
tttaggagctttattgggaaggaga

SEQ ID NO: 4485148 - DNA, 25 bp, Homo sapien
acagtgtcccgtggtatgggtttag

SEQ ID NO: 4485149 - DNA, 25 bp, Homo sapien
gaaagccacctgatcatttattctt

SEQ ID NO: 4485150 - DNA, 25 bp, Homo sapien
gctgtgttgacttttagacacgaaa

SEQ ID NO: 4485151 - DNA, 25 bp, Homo sapien
gacttttagacacgaaagccacctg

SEQ ID NO: 4485152 - DNA, 25 bp, Homo sapien
gaggatattggtgcctttggcagac

SEQ ID NO: 4485153 - DNA, 25 bp, Homo sapien
ttggatgcaaactcatatctgcatc

SEQ ID NO: 4485154 - DNA, 25 bp, Homo sapien
caaactcatatctgcatccagccat

SEQ ID NO: 4485155 - DNA, 25 bp, Homo sapien
tgcaaactcatatctgcatccagcc

SEQ ID NO: 4485156 - DNA, 25 bp, Homo sapien
gatgcaaactcatatctgcatccag

SEQ ID NO: 4485157 - DNA, 25 bp, Homo sapien
gggtggcgccagatgctgtcaacaa

SEQ ID NO: 4485158 - DNA, 25 bp, Homo sapien
ccagtgccccatgtctgaacggact

SEQ ID NO: 4485159 - DNA, 25 bp, Homo sapien
atgtctgaacggactcagagcaggg

SEQ ID NO: 4485160 - DNA, 25 bp, Homo sapien
cccagtgccccatgtctgaacagac

SEQ ID NO: 4485161 - DNA, 25 bp, Homo sapien
tgataatgtcagcaagagccgaaag

SEQ ID NO: 4485162 - DNA, 25 bp, Homo sapien
tcagcaagagccgaaagctgtcgcc

SEQ ID NO: 4485163 - DNA, 25 bp, Homo sapien
tagttggatagggagccgcatgaaa

SEQ ID NO: 4485164 - DNA, 25 bp, Homo sapien
agctgtcgcccatctgtgatagttg

SEQ ID NO: 4485165 - DNA, 25 bp, Homo sapien
ggttttgagcctgcatagccacaag

SEQ ID NO: 4485166 - DNA, 25 bp, Homo sapien
gctaatgggagtccagccttgagac

SEQ ID NO: 4485167 - DNA, 25 bp, Homo sapien
caagtcagacctacattttggcagt

SEQ ID NO: 4485168 - DNA, 25 bp, Homo sapien
cagttcactgtaatggatgcttccc

SEQ ID NO: 4485169 - DNA, 25 bp, Homo sapien
agatttttgggactgcagaaccaca

SEQ ID NO: 4485170 - DNA, 25 bp, Homo sapien
agtctcccagaggtgacgatcttct

SEQ ID NO: 4485171 - DNA, 25 bp, Homo sapien
tactctgtattcttttgagggggac

SEQ ID NO: 4485172 - DNA, 25 bp, Homo sapien
agtacatgaatttccaaagaccctg

SEQ ID NO: 4485173 - DNA, 25 bp, Homo sapien
tgctgtttatgagggcacactgggc

SEQ ID NO: 4485174 - DNA, 25 bp, Homo sapien
tagggttttctcttgcccaatgata

SEQ ID NO: 4485175 - DNA, 25 bp, Homo sapien
cctgaccggataaagcccatgctgt

SEQ ID NO: 4485176 - DNA, 25 bp, Homo sapien
tggaagctcctcaccctgaccggat

SEQ ID NO: 4485177 - DNA, 25 bp, Homo sapien
atttggctctgaacaatatcgtggt

SEQ ID NO: 4485178 - DNA, 25 bp, Homo sapien
acaatatcgtggtgtcagatggggt

SEQ ID NO: 4485179 - DNA, 25 bp, Homo sapien
catttggctctgaacaatatcgtgg

SEQ ID NO: 4485180 - DNA, 25 bp, Homo sapien
tctttcatcatagggtgttctgtgt

SEQ ID NO: 4485181 - DNA, 25 bp, Homo sapien
taaagactgaattgtgaagagattg

SEQ ID NO: 4485182 - DNA, 25 bp, Homo sapien
ggtataggtccataactcttccttc

SEQ ID NO: 4485183 - DNA, 25 bp, Homo sapien
ttaggtgcagcctcaaaggcattta

SEQ ID NO: 4485184 - DNA, 25 bp, Homo sapien
cattatgatgctcttccacaccggc

SEQ ID NO: 4485185 - DNA, 25 bp, Homo sapien
cacacatgtggttgtagcaatatcc

SEQ ID NO: 4485186 - DNA, 25 bp, Homo sapien
caatcctgaggacataggaaaacct

SEQ ID NO: 4485187 - DNA, 25 bp, Homo sapien
tgcaggccagcaacagaatgagtgc

SEQ ID NO: 4485188 - DNA, 25 bp, Homo sapien
gagtctcattggctccagctggacc

SEQ ID NO: 4485189 - DNA, 25 bp, Homo sapien
cagatggatagctggcatgtcctcc

SEQ ID NO: 4485190 - DNA, 25 bp, Homo sapien
ggattagataaatcagatggatagc

SEQ ID NO: 4485191 - DNA, 25 bp, Homo sapien
cagaagctgagtgagtcgagcatga

SEQ ID NO: 4485192 - DNA, 25 bp, Homo sapien
gccagaagctgagtgagtcgagcat

SEQ ID NO: 4485193 - DNA, 25 bp, Homo sapien
ggaataattgtatgaagaccgtgaa

SEQ ID NO: 4485194 - DNA, 25 bp, Homo sapien
gagaaatgagaaaactctcaccctg

SEQ ID NO: 4485195 - DNA, 25 bp, Homo sapien
accgtgaatggtttgtgctgggaca

SEQ ID NO: 4485196 - DNA, 25 bp, Homo sapien
ctctgagctgaagaaccaagggctg

SEQ ID NO: 4485197 - DNA, 25 bp, Homo sapien
cccattgaccggtttcagatcggta

SEQ ID NO: 4485198 - DNA, 25 bp, Homo sapien
ctctccaaagatggacgtgctccaa

SEQ ID NO: 4485199 - DNA, 25 bp, Homo sapien
tattgtagttgtcatgaccagtcac

SEQ ID NO: 4485200 - DNA, 25 bp, Homo sapien
caacagagggctagggtgttcccgc

SEQ ID NO: 4485201 - DNA, 25 bp, Homo sapien
cagtcaaatgctctacccactgagc

SEQ ID NO: 4485202 - DNA, 25 bp, Homo sapien
ctctacccactgagctataccccct

SEQ ID NO: 4485203 - DNA, 25 bp, Homo sapien
gtcaaatgctctacccactgagcta

SEQ ID NO: 4485204 - DNA, 25 bp, Homo sapien
atctgcagtcaaatgctctacccac

SEQ ID NO: 4485205 - DNA, 25 bp, Homo sapien
tcagcaaatcttggactaacaatac

SEQ ID NO: 4485206 - DNA, 25 bp, Homo sapien
tctcagcaaatcttggactaacaat

SEQ ID NO: 4485207 - DNA, 25 bp, Homo sapien
cagcaaatcttggactaacaatact

SEQ ID NO: 4485208 - DNA, 25 bp, Homo sapien
cgtctcagcaaatcttggactaaca

SEQ ID NO: 4485209 - DNA, 25 bp, Homo sapien
cccataaggtcagttccaaatttct

SEQ ID NO: 4485210 - DNA, 25 bp, Homo sapien
tgtgtatctttaaggaagtccttgc

SEQ ID NO: 4485211 - DNA, 25 bp, Homo sapien
tcctgtgaagtggatcccatacccc

SEQ ID NO: 4485212 - DNA, 25 bp, Homo sapien
aagtccttgcttttttcggcctctg

SEQ ID NO: 4485213 - DNA, 25 bp, Homo sapien
tgatgatgaggttagaatagggcat

SEQ ID NO: 4485214 - DNA, 25 bp, Homo sapien
ctgatgatgaggttagaatagggca

SEQ ID NO: 4485215 - DNA, 25 bp, Homo sapien
tcagagtcccacacgaagagggcaa

SEQ ID NO: 4485216 - DNA, 25 bp, Homo sapien
cactccttggggacttcagagtccc

SEQ ID NO: 4485217 - DNA, 25 bp, Homo sapien
gggacttcagagtcccacacgaaga

SEQ ID NO: 4485218 - DNA, 25 bp, Homo sapien
gagtcccacacgaagagggcaaggc

SEQ ID NO: 4485219 - DNA, 25 bp, Homo sapien
atccatcttgagtttgttcttgaat

SEQ ID NO: 4485220 - DNA, 25 bp, Homo sapien
tccatcttgagtttgttcttgaata

SEQ ID NO: 4485221 - DNA, 25 bp, Homo sapien
ttgttcttgaatatggtgcaaggaa

SEQ ID NO: 4485222 - DNA, 25 bp, Homo sapien
ttcttgaatatggtgcaaggaaggg

SEQ ID NO: 4485223 - DNA, 25 bp, Homo sapien
tcatgatcatagtagtaaccaacat

SEQ ID NO: 4485224 - DNA, 25 bp, Homo sapien
gaaacatcatttgtgtaaattgctg

SEQ ID NO: 4485225 - DNA, 25 bp, Homo sapien
cataggacagcttatgaaacatcat

SEQ ID NO: 4485226 - DNA, 25 bp, Homo sapien
ttttctcataggacagcttatgaaa

SEQ ID NO: 4485227 - DNA, 25 bp, Homo sapien
tgtttgtcttgatacaaacccttaa

SEQ ID NO: 4485228 - DNA, 25 bp, Homo sapien
aaattacatagtagaactaataggc

SEQ ID NO: 4485229 - DNA, 25 bp, Homo sapien
aattatgtttgtcttgatacaaacc

SEQ ID NO: 4485230 - DNA, 25 bp, Homo sapien
tacatagtagaactaataggccctt

SEQ ID NO: 4485231 - DNA, 25 bp, Homo sapien
gaaacgtggctctgcagtgtcaatg

SEQ ID NO: 4485232 - DNA, 25 bp, Homo sapien
tcttggtcagcactgtatctgcagc

SEQ ID NO: 4485233 - DNA, 25 bp, Homo sapien
gccctcaggtcttggattcagcagg

SEQ ID NO: 4485234 - DNA, 25 bp, Homo sapien
tatctgcagcacttagtacaaggtt

SEQ ID NO: 4485235 - DNA, 25 bp, Homo sapien
agtgagacccttgcaaggaccttct

SEQ ID NO: 4485236 - DNA, 25 bp, Homo sapien
gtgagacccttgcaaggaccttctc

SEQ ID NO: 4485237 - DNA, 25 bp, Homo sapien
caccctggcgttggctttcaaagaa

SEQ ID NO: 4485238 - DNA, 25 bp, Homo sapien
tgcctatctgaagcgctgtttgcag

SEQ ID NO: 4485239 - DNA, 25 bp, Homo sapien
gggacttgatctcatcttcatgcca

SEQ ID NO: 4485240 - DNA, 25 bp, Homo sapien
ggtcccagtgaatgaaaacgacatg

SEQ ID NO: 4485241 - DNA, 25 bp, Homo sapien
agttagccgtcttggccaacccaag

SEQ ID NO: 4485242 - DNA, 25 bp, Homo sapien
tatacagataggatcggagttcaca

SEQ ID NO: 4485243 - DNA, 25 bp, Homo sapien
tgtgcaagctgccaaatatttgaga

SEQ ID NO: 4485244 - DNA, 25 bp, Homo sapien
tgtgaccactgttaacatacttgtg

SEQ ID NO: 4485245 - DNA, 25 bp, Homo sapien
ctttttcctaaattatatcttgcag

SEQ ID NO: 4485246 - DNA, 25 bp, Homo sapien
gaagtttccgacttagatatggcat

SEQ ID NO: 4485247 - DNA, 25 bp, Homo sapien
tacctcgaagtttccgacttagata

SEQ ID NO: 4485248 - DNA, 25 bp, Homo sapien
cttgcagaaatacctcgaagtttcc

SEQ ID NO: 4485249 - DNA, 25 bp, Homo sapien
atggccatacccacattttgcctag

SEQ ID NO: 4485250 - DNA, 25 bp, Homo sapien
tcagcatagcccagtatttgcaggg

SEQ ID NO: 4485251 - DNA, 25 bp, Homo sapien
acatggagcctttgttaggattcat

SEQ ID NO: 4485252 - DNA, 25 bp, Homo sapien
gttaggattcatggccatacccaca

SEQ ID NO: 4485253 - DNA, 25 bp, Homo sapien
tcccgacctcgtgatccatgcctcg

SEQ ID NO: 4485254 - DNA, 25 bp, Homo sapien
tctcccgacctcgtgatccatgcct

SEQ ID NO: 4485255 - DNA, 25 bp, Homo sapien
atctcccgacctcgtgatccatgcc

SEQ ID NO: 4485256 - DNA, 25 bp, Homo sapien
aatctcccgacctcgtgatccatgc

SEQ ID NO: 4485257 - DNA, 25 bp, Homo sapien
tgggttaaagcagtcaaatccactg

SEQ ID NO: 4485258 - DNA, 25 bp, Homo sapien
taaataaacaagcagaggccgggcg

SEQ ID NO: 4485259 - DNA, 25 bp, Homo sapien
cacagtgccctgatgaatctgaggt

SEQ ID NO: 4485260 - DNA, 25 bp, Homo sapien
tactgttggatgaagtaggcagcaa

SEQ ID NO: 4485261 - DNA, 25 bp, Homo sapien
ctcggtaccggttccagagcaatca

SEQ ID NO: 4485262 - DNA, 25 bp, Homo sapien
atcctggaatatccctcagcctggt

SEQ ID NO: 4485263 - DNA, 25 bp, Homo sapien
tccaacgaggcaaaatctgcttcat

SEQ ID NO: 4485264 - DNA, 25 bp, Homo sapien
tgttcgggaggaggccttgtccaca

SEQ ID NO: 4485265 - DNA, 25 bp, Homo sapien
ctctttttgtcctcttccacattta

SEQ ID NO: 4485266 - DNA, 25 bp, Homo sapien
ttcctgccttcttttgtttgtggct

SEQ ID NO: 4485267 - DNA, 25 bp, Homo sapien
ttttgtcctcttccacatttaccat

SEQ ID NO: 4485268 - DNA, 25 bp, Homo sapien
ttgtttgtggcttctcatctctctt

SEQ ID NO: 4485269 - DNA, 25 bp, Homo sapien
cgctgacctgaagaggtggaactca

SEQ ID NO: 4485270 - DNA, 25 bp, Homo sapien
gcaagcaatagggactcgctgtaaa

SEQ ID NO: 4485271 - DNA, 25 bp, Homo sapien
ggacacttggtgtaaggcattttat

SEQ ID NO: 4485272 - DNA, 25 bp, Homo sapien
aagctttgcttacttgcctagctac

SEQ ID NO: 4485273 - DNA, 25 bp, Homo sapien
gctgcataagggataaaaattgctt

SEQ ID NO: 4485274 - DNA, 25 bp, Homo sapien
taagttgttagccagtcaggtttaa

SEQ ID NO: 4485275 - DNA, 25 bp, Homo sapien
tctgttgcctttccctatttaggaa

SEQ ID NO: 4485276 - DNA, 25 bp, Homo sapien
taatttaaattgtgaggtccagctc

SEQ ID NO: 4485277 - DNA, 25 bp, Homo sapien
ttccttgcagtacctaggagcaagc

SEQ ID NO: 4485278 - DNA, 25 bp, Homo sapien
cctcctttgttcgggtgtgctgtca

SEQ ID NO: 4485279 - DNA, 25 bp, Homo sapien
gtttttccttgcagtacctaggagc

SEQ ID NO: 4485280 - DNA, 25 bp, Homo sapien
ttgcagtacctaggagcaagcattc

SEQ ID NO: 4485281 - DNA, 25 bp, Homo sapien
gcacccagccgacaaacctttatta

SEQ ID NO: 4485282 - DNA, 25 bp, Homo sapien
cgcacccagccgacaaacctttatt

SEQ ID NO: 4485283 - DNA, 25 bp, Homo sapien
tctcggcgggtactcgtggtcttgc

SEQ ID NO: 4485284 - DNA, 25 bp, Homo sapien
ccttctctggattgtggaccctctg

SEQ ID NO: 4485285 - DNA, 25 bp, Homo sapien
cagctttcggatgctggtctgggca

SEQ ID NO: 4485286 - DNA, 25 bp, Homo sapien
ctttgtataggagaccagctttcgg

SEQ ID NO: 4485287 - DNA, 25 bp, Homo sapien
tagacgacctggagcgtctgtcagg

SEQ ID NO: 4485288 - DNA, 25 bp, Homo sapien
gaggagctgcgagacgccaccttct

SEQ ID NO: 4485289 - DNA, 25 bp, Homo sapien
gaataacgaggagctgcgagacgcc

SEQ ID NO: 4485290 - DNA, 25 bp, Homo sapien
gggagggcggcttgctagacgacct

SEQ ID NO: 4485291 - DNA, 25 bp, Homo sapien
ccttgggtctcagcgcaaagtcggg

SEQ ID NO: 4485292 - DNA, 25 bp, Homo sapien
gaatcccattgagcgcctactcgag

SEQ ID NO: 4485293 - DNA, 25 bp, Homo sapien
cagagaccggatattggcgctgcct

SEQ ID NO: 4485294 - DNA, 25 bp, Homo sapien
tcaaagtgattagcacgaccgggcg

SEQ ID NO: 4485295 - DNA, 25 bp, Homo sapien
tcctgaatgaatgagcgagtacggg

SEQ ID NO: 4485296 - DNA, 25 bp, Homo sapien
cctaaggcccggcaagaaatggagc

SEQ ID NO: 4485297 - DNA, 25 bp, Homo sapien
gcaaatcagtcgtggcatgagtcca

SEQ ID NO: 4485298 - DNA, 25 bp, Homo sapien
gaaaactatggctcgggtaatgcta

SEQ ID NO: 4485299 - DNA, 25 bp, Homo sapien
tggaacgctactagcaccgtcaaac

SEQ ID NO: 4485300 - DNA, 25 bp, Homo sapien
aatagcatctcctatctctgagtgc

SEQ ID NO: 4485301 - DNA, 25 bp, Homo sapien
acatctgatttctggtccccattca

SEQ ID NO: 4485302 - DNA, 25 bp, Homo sapien
gctcctggaacgctactagcaccgt

SEQ ID NO: 4485303 - DNA, 25 bp, Homo sapien
tatcagcatcctgtttccttggttc

SEQ ID NO: 4485304 - DNA, 25 bp, Homo sapien
atcagcatcctgtttccttggttcc

SEQ ID NO: 4485305 - DNA, 25 bp, Homo sapien
tcagcatcctgtttccttggttcca

SEQ ID NO: 4485306 - DNA, 25 bp, Homo sapien
cagcatcctgtttccttggttccac

SEQ ID NO: 4485307 - DNA, 25 bp, Homo sapien
tgcccatcttctgataacagcagat

SEQ ID NO: 4485308 - DNA, 25 bp, Homo sapien
atgcccatcttctgataacagcaga

SEQ ID NO: 4485309 - DNA, 25 bp, Homo sapien
gaaggatagcataattgatggcatc

SEQ ID NO: 4485310 - DNA, 25 bp, Homo sapien
ttccagaaggatagcataattgatg

SEQ ID NO: 4485311 - DNA, 25 bp, Homo sapien
cagaaggatagcataattgatggca

SEQ ID NO: 4485312 - DNA, 25 bp, Homo sapien
cttccagaaggatagcataattgat

SEQ ID NO: 4485313 - DNA, 25 bp, Homo sapien
tctgccaaaatccacattgtcctag

SEQ ID NO: 4485314 - DNA, 25 bp, Homo sapien
aaaatccacattgtcctaggggctg

SEQ ID NO: 4485315 - DNA, 25 bp, Homo sapien
tgccaaaatccacattgtcctaggg

SEQ ID NO: 4485316 - DNA, 25 bp, Homo sapien
aatccacattgtcctaggggctgtg

SEQ ID NO: 4485317 - DNA, 25 bp, Homo sapien
aggtagaaagagtagaaagctatct

SEQ ID NO: 4485318 - DNA, 25 bp, Homo sapien
gaaagctatcttgtacttgacaata

SEQ ID NO: 4485319 - DNA, 25 bp, Homo sapien
gctatcttgtacttgacaatagatt

SEQ ID NO: 4485320 - DNA, 25 bp, Homo sapien
gaaagagtagaaagctatcttgtac

SEQ ID NO: 4485321 - DNA, 25 bp, Homo sapien
attcctaccatgtacatggctgcag

SEQ ID NO: 4485322 - DNA, 25 bp, Homo sapien
gattcctaccatgtacatggctgca

SEQ ID NO: 4485323 - DNA, 25 bp, Homo sapien
catcgattcctaccatgtacatggc

SEQ ID NO: 4485324 - DNA, 25 bp, Homo sapien
tcgattcctaccatgtacatggctg

SEQ ID NO: 4485325 - DNA, 25 bp, Homo sapien
ctaagcattggcgtgctgcttctca

SEQ ID NO: 4485326 - DNA, 25 bp, Homo sapien
taagcattggcgtgctgcttctcac

SEQ ID NO: 4485327 - DNA, 25 bp, Homo sapien
ctgaatttgaaaaaactctcgatct

SEQ ID NO: 4485328 - DNA, 25 bp, Homo sapien
tttgaaaaaactctcgatctccagt

SEQ ID NO: 4485329 - DNA, 25 bp, Homo sapien
aaaaactctcgatctccagtaggat

SEQ ID NO: 4485330 - DNA, 25 bp, Homo sapien
gaaaaaactctcgatctccagtagg

SEQ ID NO: 4485331 - DNA, 25 bp, Homo sapien
tgcgggtcacagtggggtccccaaa

SEQ ID NO: 4485332 - DNA, 25 bp, Homo sapien
tcacagtggggtccccaaagaggtc

SEQ ID NO: 4485333 - DNA, 25 bp, Homo sapien
tttgcgggtcacagtggggtcccca

SEQ ID NO: 4485334 - DNA, 25 bp, Homo sapien
cagtggggtccccaaagaggtcaag

SEQ ID NO: 4485335 - DNA, 25 bp, Homo sapien
gatctggtactgttccagagtggat

SEQ ID NO: 4485336 - DNA, 25 bp, Homo sapien
agcaggggcgctgcgtactgttcag

SEQ ID NO: 4485337 - DNA, 25 bp, Homo sapien
cagagtggatcgttgcagacactga

SEQ ID NO: 4485338 - DNA, 25 bp, Homo sapien
cctcatacagtgccttcacctggac

SEQ ID NO: 4485339 - DNA, 25 bp, Homo sapien
aggacactccatattgtgaaaccgg

SEQ ID NO: 4485340 - DNA, 25 bp, Homo sapien
cagagttatggaaattttgtcccca

SEQ ID NO: 4485341 - DNA, 25 bp, Homo sapien
gactgatatggaaacgattgccaac

SEQ ID NO: 4485342 - DNA, 25 bp, Homo sapien
tgccaacacatacttctacttttaa

SEQ ID NO: 4485343 - DNA, 25 bp, Homo sapien
ggagcacagctgcagttttcgctcg

SEQ ID NO: 4485344 - DNA, 25 bp, Homo sapien
ttcgctcgtcttccatgcagttcat

SEQ ID NO: 4485345 - DNA, 25 bp, Homo sapien
caattggaaacatggagcacagctg

SEQ ID NO: 4485346 - DNA, 25 bp, Homo sapien
gtcatggtattcaattggaaacatg

SEQ ID NO: 4485347 - DNA, 25 bp, Homo sapien
agcaggaatatcttccctgatgtag

SEQ ID NO: 4485348 - DNA, 25 bp, Homo sapien
caagcaggaatatcttccctgatgt

SEQ ID NO: 4485349 - DNA, 25 bp, Homo sapien
ctaccaagcaggaatatcttccctg

SEQ ID NO: 4485350 - DNA, 25 bp, Homo sapien
taccaagcaggaatatcttccctga

SEQ ID NO: 4485351 - DNA, 25 bp, Homo sapien
ggagactgctaagcccttgtaaaga

SEQ ID NO: 4485352 - DNA, 25 bp, Homo sapien
gcctgggctagagaccaagcctaga

SEQ ID NO: 4485353 - DNA, 25 bp, Homo sapien
aaacccagagaggaagatgcacact

SEQ ID NO: 4485354 - DNA, 25 bp, Homo sapien
cagtggctgactcgtccagcttcag

SEQ ID NO: 4485355 - DNA, 25 bp, Homo sapien
tttactttgtacgtacgacaggtca

SEQ ID NO: 4485356 - DNA, 25 bp, Homo sapien
ttattaaacgggatggatgcctccc

SEQ ID NO: 4485357 - DNA, 25 bp, Homo sapien
caaactgtctgttgtggaagatgga

SEQ ID NO: 4485358 - DNA, 25 bp, Homo sapien
gagtggtgcggctgttcaaactgtc

SEQ ID NO: 4485359 - DNA, 25 bp, Homo sapien
gatcttagagtgtgcatatcaccaa

SEQ ID NO: 4485360 - DNA, 25 bp, Homo sapien
gccgtatacgagagaagcagctact

SEQ ID NO: 4485361 - DNA, 25 bp, Homo sapien
tctgctaggtacaaacctgagatgg

SEQ ID NO: 4485362 - DNA, 25 bp, Homo sapien
tgtctcctgcactatacatgcatgt

SEQ ID NO: 4485363 - DNA, 25 bp, Homo sapien
gtttttcctgcgactccgagctctt

SEQ ID NO: 4485364 - DNA, 25 bp, Homo sapien
ttgttagttgtgctcgcagcggcca

SEQ ID NO: 4485365 - DNA, 25 bp, Homo sapien
acttgctttgctgagaaacctattg

SEQ ID NO: 4485366 - DNA, 25 bp, Homo sapien
tgagcggcagccttctgtagaagta

SEQ ID NO: 4485367 - DNA, 25 bp, Homo sapien
gaacacgccttgtgctgtagcagag

SEQ ID NO: 4485368 - DNA, 25 bp, Homo sapien
tgtagcagagggaccactcctatcc

SEQ ID NO: 4485369 - DNA, 25 bp, Homo sapien
gaatcgcacgtttaccctaattgga

SEQ ID NO: 4485370 - DNA, 25 bp, Homo sapien
tgtttctagcctgtgagcagccctc

SEQ ID NO: 4485371 - DNA, 25 bp, Homo sapien
cagttccataaactgtaattcacac

SEQ ID NO: 4485372 - DNA, 25 bp, Homo sapien
tgttatcaaacataaactcacagtt

SEQ ID NO: 4485373 - DNA, 25 bp, Homo sapien
gttccataaactgtaattcacactc

SEQ ID NO: 4485374 - DNA, 25 bp, Homo sapien
tatcaaacataaactcacagttcca

SEQ ID NO: 4485375 - DNA, 25 bp, Homo sapien
ttctgaggggcctttatagaagttc

SEQ ID NO: 4485376 - DNA, 25 bp, Homo sapien
ctactcactccttgtaggttgaggg

SEQ ID NO: 4485377 - DNA, 25 bp, Homo sapien
tttatagaagttccccatcccacta

SEQ ID NO: 4485378 - DNA, 25 bp, Homo sapien
atcccactactcactccttgtaggt

SEQ ID NO: 4485379 - DNA, 25 bp, Homo sapien
catttggatatgcagttgtagagct

SEQ ID NO: 4485380 - DNA, 25 bp, Homo sapien
tgttgcttgcaactagacacttggt

SEQ ID NO: 4485381 - DNA, 25 bp, Homo sapien
ccatgggagtggatacgactgctct

SEQ ID NO: 4485382 - DNA, 25 bp, Homo sapien
cacttggtctcatataggcgaagta

SEQ ID NO: 4485383 - DNA, 25 bp, Homo sapien
tgccagacccgaggctgtgggcggt

SEQ ID NO: 4485384 - DNA, 25 bp, Homo sapien
ggagcagccaacatgccggagatct

SEQ ID NO: 4485385 - DNA, 25 bp, Homo sapien
aactccagcacatgggaagtctggc

SEQ ID NO: 4485386 - DNA, 25 bp, Homo sapien
acatgccggagatctgcccaggaaa

SEQ ID NO: 4485387 - DNA, 25 bp, Homo sapien
aatcttcaatccatcaagaaactgt

SEQ ID NO: 4485388 - DNA, 25 bp, Homo sapien
atcttcaatccatcaagaaactgta

SEQ ID NO: 4485389 - DNA, 25 bp, Homo sapien
caatcttcaatccatcaagaaactg

SEQ ID NO: 4485390 - DNA, 25 bp, Homo sapien
aaccaatgtcagcaatgacctggag

SEQ ID NO: 4485391 - DNA, 25 bp, Homo sapien
caaccaatgtcagcaatgacctgga

SEQ ID NO: 4485392 - DNA, 25 bp, Homo sapien
ccgccggtgaatgggtacaggtaat

SEQ ID NO: 4485393 - DNA, 25 bp, Homo sapien
tgtttggttgttcggcctatgacgc

SEQ ID NO: 4485394 - DNA, 25 bp, Homo sapien
gttgttcggcctatgacgcgaccgc

SEQ ID NO: 4485395 - DNA, 25 bp, Homo sapien
ggtaatgccgccgaacccctgcttg

SEQ ID NO: 4485396 - DNA, 25 bp, Homo sapien
ctggcggcgggtctctccgcctgac

SEQ ID NO: 4485397 - DNA, 25 bp, Homo sapien
gcggcgggtctctccgcctgacacg

SEQ ID NO: 4485398 - DNA, 25 bp, Homo sapien
tggcggcgggtctctccgcctgaca

SEQ ID NO: 4485399 - DNA, 25 bp, Homo sapien
ggcggcgggtctctccgcctgacac

SEQ ID NO: 4485400 - DNA, 25 bp, Homo sapien
ctgctgcgccggccggccgccctcc

SEQ ID NO: 4485401 - DNA, 25 bp, Homo sapien
gctgcctccggctggtttctgaaaa

SEQ ID NO: 4485402 - DNA, 25 bp, Homo sapien
ttcccggtgccagtcaggagttgga

SEQ ID NO: 4485403 - DNA, 25 bp, Homo sapien
tcatagcgtcccaactgtgtaggat

SEQ ID NO: 4485404 - DNA, 25 bp, Homo sapien
taagcaagctaaacccaagcaggaa

SEQ ID NO: 4485405 - DNA, 25 bp, Homo sapien
tatgctcagaggaacattcaatagg

SEQ ID NO: 4485406 - DNA, 25 bp, Homo sapien
ctcagcacttggcagaatgtctaga

SEQ ID NO: 4485407 - DNA, 25 bp, Homo sapien
aaagaaactcccatacacaccttgg

SEQ ID NO: 4485408 - DNA, 25 bp, Homo sapien
ggtaccaccaatcaacttaaacatg

SEQ ID NO: 4485409 - DNA, 25 bp, Homo sapien
ggaagcagccctaccatttggaaat

SEQ ID NO: 4485410 - DNA, 25 bp, Homo sapien
gaaacaaagcttgtcccactgtcct

SEQ ID NO: 4485411 - DNA, 25 bp, Homo sapien
aatcaaaactccataggaaggcagg

SEQ ID NO: 4485412 - DNA, 25 bp, Homo sapien
gacctaacctattttgtggcatcaa

SEQ ID NO: 4485413 - DNA, 25 bp, Homo sapien
ttaagtggacaaattgaaagagcca

SEQ ID NO: 4485414 - DNA, 25 bp, Homo sapien
aacagctgcataatctattatgccc

SEQ ID NO: 4485415 - DNA, 25 bp, Homo sapien
cctttgcaaggattcactgttttga

SEQ ID NO: 4485416 - DNA, 25 bp, Homo sapien
tcacaggggtctactcccaagatcc

SEQ ID NO: 4485417 - DNA, 25 bp, Homo sapien
aaacctgaataccaagctccacctt

SEQ ID NO: 4485418 - DNA, 25 bp, Homo sapien
aaccaaacctgaataccaagctcca

SEQ ID NO: 4485419 - DNA, 25 bp, Homo sapien
actccaaagcaaccaaacctgaata

SEQ ID NO: 4485420 - DNA, 25 bp, Homo sapien
aaagcaaccaaacctgaataccaag

SEQ ID NO: 4485421 - DNA, 25 bp, Homo sapien
ctccacaattttctgtttgcttcac

SEQ ID NO: 4485422 - DNA, 25 bp, Homo sapien
caacaaaacctccacaattttctgt

SEQ ID NO: 4485423 - DNA, 25 bp, Homo sapien
caaaacctccacaattttctgtttg

SEQ ID NO: 4485424 - DNA, 25 bp, Homo sapien
aacctccacaattttctgtttgctt

SEQ ID NO: 4485425 - DNA, 25 bp, Homo sapien
ttaaatttctctcttctatcccaaa

SEQ ID NO: 4485426 - DNA, 25 bp, Homo sapien
aaatttctctcttctatcccaaatg

SEQ ID NO: 4485427 - DNA, 25 bp, Homo sapien
tcccaaatgttcaacaccaaagtat

SEQ ID NO: 4485428 - DNA, 25 bp, Homo sapien
ttctatcccaaatgttcaacaccaa

SEQ ID NO: 4485429 - DNA, 25 bp, Homo sapien
tacacccggatgcagaatgagcaca

SEQ ID NO: 4485430 - DNA, 25 bp, Homo sapien
tttagacaggcagcaagttttcact

SEQ ID NO: 4485431 - DNA, 25 bp, Homo sapien
tgacttttgttcacaggcaggtgct

SEQ ID NO: 4485432 - DNA, 25 bp, Homo sapien
tattaaacgtgaggaattcaacagc

SEQ ID NO: 4485433 - DNA, 25 bp, Homo sapien
catatccagaatctattactccctc

SEQ ID NO: 4485434 - DNA, 25 bp, Homo sapien
ggcatatccagaatctattactccc

SEQ ID NO: 4485435 - DNA, 25 bp, Homo sapien
taaaccagcaaaattttggttggca

SEQ ID NO: 4485436 - DNA, 25 bp, Homo sapien
ctgctaaaccagcaaaattttggtt

SEQ ID NO: 4485437 - DNA, 25 bp, Homo sapien
tcaatcagcctatggtaagcagcta

SEQ ID NO: 4485438 - DNA, 25 bp, Homo sapien
tgctaggtcaagagaacacaaaggc

SEQ ID NO: 4485439 - DNA, 25 bp, Homo sapien
catccagacagcagtcaaggtccag

SEQ ID NO: 4485440 - DNA, 25 bp, Homo sapien
tccagggctcaagtaggctaaaacg

SEQ ID NO: 4485441 - DNA, 25 bp, Homo sapien
caaggataccgatggcaaactggca

SEQ ID NO: 4485442 - DNA, 25 bp, Homo sapien
aaactggcaatcttcagtgttactt

SEQ ID NO: 4485443 - DNA, 25 bp, Homo sapien
cattttatctaaacggaactctgcg

SEQ ID NO: 4485444 - DNA, 25 bp, Homo sapien
ggaactctgcgaaagcaaatgaacg

SEQ ID NO: 4485445 - DNA, 25 bp, Homo sapien
aaatatatggattggccaggtacgg

SEQ ID NO: 4485446 - DNA, 25 bp, Homo sapien
ttaacattaacagtcaaagtgagat

SEQ ID NO: 4485447 - DNA, 25 bp, Homo sapien
ccagttaacagttgttttgcagata

SEQ ID NO: 4485448 - DNA, 25 bp, Homo sapien
actatccattgcaagtgggacagat

SEQ ID NO: 4485449 - DNA, 25 bp, Homo sapien
tcaagtatacatgtcatagcaccgg

SEQ ID NO: 4485450 - DNA, 25 bp, Homo sapien
cacatttaacatgaaacagagttga

SEQ ID NO: 4485451 - DNA, 25 bp, Homo sapien
catgaaacagagttgagacatataa

SEQ ID NO: 4485452 - DNA, 25 bp, Homo sapien
gagttgagacatataaaatttacgt

SEQ ID NO: 4485453 - DNA, 25 bp, Homo sapien
gagacatataaaatttacgtaccac

SEQ ID NO: 4485454 - DNA, 25 bp, Homo sapien
tctgtgttttactgcagcagacttc

SEQ ID NO: 4485455 - DNA, 25 bp, Homo sapien
ctattctcataagcagctacttaaa

SEQ ID NO: 4485456 - DNA, 25 bp, Homo sapien
tatcttgagacagacattagctttc

SEQ ID NO: 4485457 - DNA, 25 bp, Homo sapien
ttgatgagcaaacagctgtcctgta

SEQ ID NO: 4485458 - DNA, 25 bp, Homo sapien
taaaccctccagacaaggtgattag

SEQ ID NO: 4485459 - DNA, 25 bp, Homo sapien
ttagacctggatgaacactgacccg

SEQ ID NO: 4485460 - DNA, 25 bp, Homo sapien
cgatgaacctatctaaagtcatgga

SEQ ID NO: 4485461 - DNA, 25 bp, Homo sapien
tagcttgttcctatcctttggtatc

SEQ ID NO: 4485462 - DNA, 25 bp, Homo sapien
taggagatctgtgaataggcctcac

SEQ ID NO: 4485463 - DNA, 25 bp, Homo sapien
gagacttctgtgtgcctagactaca

SEQ ID NO: 4485464 - DNA, 25 bp, Homo sapien
aaagcaagtatgtggtctaccaggg

SEQ ID NO: 4485465 - DNA, 25 bp, Homo sapien
tagtagctgcagtcataaatccaag

SEQ ID NO: 4485466 - DNA, 25 bp, Homo sapien
tccccttctggtaagcagctaagtc

SEQ ID NO: 4485467 - DNA, 25 bp, Homo sapien
gttccccttctggtaagcagctaag

SEQ ID NO: 4485468 - DNA, 25 bp, Homo sapien
ccccttctggtaagcagctaagtca

SEQ ID NO: 4485469 - DNA, 25 bp, Homo sapien
ttccccttctggtaagcagctaagt

SEQ ID NO: 4485470 - DNA, 25 bp, Homo sapien
gccatttgtacgagggtttccataa

SEQ ID NO: 4485471 - DNA, 25 bp, Homo sapien
tgccatttgtacgagggtttccata

SEQ ID NO: 4485472 - DNA, 25 bp, Homo sapien
tcaattatgaatatagacgggtttc

SEQ ID NO: 4485473 - DNA, 25 bp, Homo sapien
gatgatactcattcctaactcctca

SEQ ID NO: 4485474 - DNA, 25 bp, Homo sapien
tttccaagacacttgaggtgtcccc

SEQ ID NO: 4485475 - DNA, 25 bp, Homo sapien
gggtataccgaaatatccacttgta

SEQ ID NO: 4485476 - DNA, 25 bp, Homo sapien
aagattcagacagactactgacaga

SEQ ID NO: 4485477 - DNA, 25 bp, Homo sapien
ggtaaagattcagacagactactga

SEQ ID NO: 4485478 - DNA, 25 bp, Homo sapien
gattcagacagactactgacagagg

SEQ ID NO: 4485479 - DNA, 25 bp, Homo sapien
tcagacagactactgacagaggttg

SEQ ID NO: 4485480 - DNA, 25 bp, Homo sapien
gatgaagatgtagagtctaatgctg

SEQ ID NO: 4485481 - DNA, 25 bp, Homo sapien
tgtagagtctaatgctgactgggct

SEQ ID NO: 4485482 - DNA, 25 bp, Homo sapien
agatgtagagtctaatgctgactgg

SEQ ID NO: 4485483 - DNA, 25 bp, Homo sapien
tgaagatgtagagtctaatgctgac

SEQ ID NO: 4485484 - DNA, 25 bp, Homo sapien
cacagatgtactgtccaattgagaa

SEQ ID NO: 4485485 - DNA, 25 bp, Homo sapien
ccacagatgtactgtccaattgaga

SEQ ID NO: 4485486 - DNA, 25 bp, Homo sapien
cagatgtactgtccaattgagaaga

SEQ ID NO: 4485487 - DNA, 25 bp, Homo sapien
acagatgtactgtccaattgagaag

SEQ ID NO: 4485488 - DNA, 25 bp, Homo sapien
ttttatacatgcacctaggatagtg

SEQ ID NO: 4485489 - DNA, 25 bp, Homo sapien
catgtaagtgtgaaatggctcccca

SEQ ID NO: 4485490 - DNA, 25 bp, Homo sapien
tctggcctataatactcaaataaca

SEQ ID NO: 4485491 - DNA, 25 bp, Homo sapien
attttgaatttgcaacatttatgct

SEQ ID NO: 4485492 - DNA, 25 bp, Homo sapien
tactatgacccaagatctgagggac

SEQ ID NO: 4485493 - DNA, 25 bp, Homo sapien
tcagtgaagttaagcaggcatacca

SEQ ID NO: 4485494 - DNA, 25 bp, Homo sapien
catcattcgagtgttggaaagcttc

SEQ ID NO: 4485495 - DNA, 25 bp, Homo sapien
taaagtcagaaaccctcagagtagg

SEQ ID NO: 4485496 - DNA, 25 bp, Homo sapien
gcatatggtatgacataggagtcca

SEQ ID NO: 4485497 - DNA, 25 bp, Homo sapien
gcacccggccctgttgagcatcttt

SEQ ID NO: 4485498 - DNA, 25 bp, Homo sapien
cattgttgaaagtcaatggcccata

SEQ ID NO: 4485499 - DNA, 25 bp, Homo sapien
tgactatcctcatgccggtacaaca

SEQ ID NO: 4485500 - DNA, 25 bp, Homo sapien
tattaccactatctactttcagaac

SEQ ID NO: 4485501 - DNA, 25 bp, Homo sapien
gaacatttaagtcacattaagggaa

SEQ ID NO: 4485502 - DNA, 25 bp, Homo sapien
ggtggggagatttcacataccataa

SEQ ID NO: 4485503 - DNA, 25 bp, Homo sapien
cacttcccacggtttctggcaacca

SEQ ID NO: 4485504 - DNA, 25 bp, Homo sapien
ctgtatgcgtttgcactcacaagtc

SEQ ID NO: 4485505 - DNA, 25 bp, Homo sapien
gtatgcgtttgcactcacaagtcat

SEQ ID NO: 4485506 - DNA, 25 bp, Homo sapien
tgtatgcgtttgcactcacaagtca

SEQ ID NO: 4485507 - DNA, 25 bp, Homo sapien
atataactgcctgaactgatcactt

SEQ ID NO: 4485508 - DNA, 25 bp, Homo sapien
taactgcctgaactgatcacttcag

SEQ ID NO: 4485509 - DNA, 25 bp, Homo sapien
actgcctgaactgatcacttcagca

SEQ ID NO: 4485510 - DNA, 25 bp, Homo sapien
tctagctttagtttcaacatataac

SEQ ID NO: 4485511 - DNA, 25 bp, Homo sapien
taagggagtgtgcaagacaatagcc

SEQ ID NO: 4485512 - DNA, 25 bp, Homo sapien
tatcagtgcctatcccagtgtctcc

SEQ ID NO: 4485513 - DNA, 25 bp, Homo sapien
gaatatgccatgtacctttgctcac

SEQ ID NO: 4485514 - DNA, 25 bp, Homo sapien
caactacaccgtaaggccattgaga

SEQ ID NO: 4485515 - DNA, 25 bp, Homo sapien
agacttgctttgctcttcagatggc

SEQ ID NO: 4485516 - DNA, 25 bp, Homo sapien
gacttgctttgctcttcagatggct

SEQ ID NO: 4485517 - DNA, 25 bp, Homo sapien
cttgctttgctcttcagatggctgc

SEQ ID NO: 4485518 - DNA, 25 bp, Homo sapien
acttgctttgctcttcagatggctg

SEQ ID NO: 4485519 - DNA, 25 bp, Homo sapien
catcattttaattttaaacatttga

SEQ ID NO: 4485520 - DNA, 25 bp, Homo sapien
ggaacaatcttaattgaagtcaaca

SEQ ID NO: 4485521 - DNA, 25 bp, Homo sapien
tcagaaggtgaagtatatccaatat

SEQ ID NO: 4485522 - DNA, 25 bp, Homo sapien
tatatccaatattaactctcaaggg

SEQ ID NO: 4485523 - DNA, 25 bp, Homo sapien
actctcaagggaacaggaacaatct

SEQ ID NO: 4485524 - DNA, 25 bp, Homo sapien
cagaggtgatcagtgccgattaaaa

SEQ ID NO: 4485525 - DNA, 25 bp, Homo sapien
taagtggatacttgcagcacctgaa

SEQ ID NO: 4485526 - DNA, 25 bp, Homo sapien
tattcctgttggactgcagtacaca

SEQ ID NO: 4485527 - DNA, 25 bp, Homo sapien
gaattcccagagcaatctgactgca

SEQ ID NO: 4485528 - DNA, 25 bp, Homo sapien
aaaaacttgttcaggcagatactct

SEQ ID NO: 4485529 - DNA, 25 bp, Homo sapien
taaagttagacgatctcctcctgcc

SEQ ID NO: 4485530 - DNA, 25 bp, Homo sapien
tgggaacctactgcctcttttctgg

SEQ ID NO: 4485531 - DNA, 25 bp, Homo sapien
tggcggttccactctataatcccag

SEQ ID NO: 4485532 - DNA, 25 bp, Homo sapien
gcatttatcacttcgacgccttcag

SEQ ID NO: 4485533 - DNA, 25 bp, Homo sapien
caaaacaactttaggccaggagctg

SEQ ID NO: 4485534 - DNA, 25 bp, Homo sapien
tctttacgacccctgacctagaggc

SEQ ID NO: 4485535 - DNA, 25 bp, Homo sapien
caaacggtccacgttgcaaacgaag

SEQ ID NO: 4485536 - DNA, 25 bp, Homo sapien
taaatgtacatgtgctaaggtatgg

SEQ ID NO: 4485537 - DNA, 25 bp, Homo sapien
ctgggccatgtttgtattctttaaa

SEQ ID NO: 4485538 - DNA, 25 bp, Homo sapien
aaggtatgggcaaatctgaaacatc

SEQ ID NO: 4485539 - DNA, 25 bp, Homo sapien
tgcccagccctagaaaggctatctt

SEQ ID NO: 4485540 - DNA, 25 bp, Homo sapien
tgaagagcacgggatctagagcctg

SEQ ID NO: 4485541 - DNA, 25 bp, Homo sapien
catggagatgtgaactgtactgcag

SEQ ID NO: 4485542 - DNA, 25 bp, Homo sapien
actgcagttgagaggtgaagagcac

SEQ ID NO: 4485543 - DNA, 25 bp, Homo sapien
caattgttagaaatggagcacagga

SEQ ID NO: 4485544 - DNA, 25 bp, Homo sapien
tcttcacctgtgatatggcaacaat

SEQ ID NO: 4485545 - DNA, 25 bp, Homo sapien
caaacgcaggtttgccctagagaaa

SEQ ID NO: 4485546 - DNA, 25 bp, Homo sapien
tcaaatccaaacactacgatgtgag

SEQ ID NO: 4485547 - DNA, 25 bp, Homo sapien
tgagaataagcctactgtcagaagg

SEQ ID NO: 4485548 - DNA, 25 bp, Homo sapien
agcatcggctttgtaattgtaagag

SEQ ID NO: 4485549 - DNA, 25 bp, Homo sapien
cagcagcatcggctttgtaattgta

SEQ ID NO: 4485550 - DNA, 25 bp, Homo sapien
gcagcatcggctttgtaattgtaag

SEQ ID NO: 4485551 - DNA, 25 bp, Homo sapien
ctcagcagcatcggctttgtaattg

SEQ ID NO: 4485552 - DNA, 25 bp, Homo sapien
cagagaaaagcgatatatacataca

SEQ ID NO: 4485553 - DNA, 25 bp, Homo sapien
gcagagaaaagcgatatatacatac

SEQ ID NO: 4485554 - DNA, 25 bp, Homo sapien
gggtctttctactccgcaattctac

SEQ ID NO: 4485555 - DNA, 25 bp, Homo sapien
cgtttggctaccagacacatttgaa

SEQ ID NO: 4485556 - DNA, 25 bp, Homo sapien
tccaatcctacaagaaaaagcttct

SEQ ID NO: 4485557 - DNA, 25 bp, Homo sapien
aattctacaattgccctgcagtttg

SEQ ID NO: 4485558 - DNA, 25 bp, Homo sapien
attgttgttgtcagatgtgttccac

SEQ ID NO: 4485559 - DNA, 25 bp, Homo sapien
ttgttgttgtcagatgtgttccaca

SEQ ID NO: 4485560 - DNA, 25 bp, Homo sapien
tgattgttgttgtcagatgtgttcc

SEQ ID NO: 4485561 - DNA, 25 bp, Homo sapien
gattgttgttgtcagatgtgttcca

SEQ ID NO: 4485562 - DNA, 25 bp, Homo sapien
aggtcctccacagtctcgcccgccc

SEQ ID NO: 4485563 - DNA, 25 bp, Homo sapien
gctccaggtcctccacagtctcgcc

SEQ ID NO: 4485564 - DNA, 25 bp, Homo sapien
tccaggtcctccacagtctcgcccg

SEQ ID NO: 4485565 - DNA, 25 bp, Homo sapien
agctccaggtcctccacagtctcgc

SEQ ID NO: 4485566 - DNA, 25 bp, Homo sapien
gacttttggtctcaccgtgaacacc

SEQ ID NO: 4485567 - DNA, 25 bp, Homo sapien
ctgacttttggtctcaccgtgaaca

SEQ ID NO: 4485568 - DNA, 25 bp, Homo sapien
tggtctcaccgtgaacaccccgccc

SEQ ID NO: 4485569 - DNA, 25 bp, Homo sapien
tttggtctcaccgtgaacaccccgc

SEQ ID NO: 4485570 - DNA, 25 bp, Homo sapien
cacggcctgtccgggtgacacagca

SEQ ID NO: 4485571 - DNA, 25 bp, Homo sapien
acggcctgtccgggtgacacagcag

SEQ ID NO: 4485572 - DNA, 25 bp, Homo sapien
ctaaggtggcgtgcggagagcagga

SEQ ID NO: 4485573 - DNA, 25 bp, Homo sapien
gaagagcacccggcacggctgcggg

SEQ ID NO: 4485574 - DNA, 25 bp, Homo sapien
aagagcacccggcacggctgcgggc

SEQ ID NO: 4485575 - DNA, 25 bp, Homo sapien
acgccgtagggcaggttgtggatgg

SEQ ID NO: 4485576 - DNA, 25 bp, Homo sapien
atggggaagtcggaatcctcggcca

SEQ ID NO: 4485577 - DNA, 25 bp, Homo sapien
gtcgcctctggtcgagaagacgccg

SEQ ID NO: 4485578 - DNA, 25 bp, Homo sapien
cctctggtcgagaagacgccgtagg

SEQ ID NO: 4485579 - DNA, 25 bp, Homo sapien
cacctcggagtaggcagcatgcctg

SEQ ID NO: 4485580 - DNA, 25 bp, Homo sapien
tgcagcttccggtaacagaatcctg

SEQ ID NO: 4485581 - DNA, 25 bp, Homo sapien
tcttgggcgagagaaacacaccgca

SEQ ID NO: 4485582 - DNA, 25 bp, Homo sapien
ctctgcttgtctgggagagtgacac

SEQ ID NO: 4485583 - DNA, 25 bp, Homo sapien
aggaaggcgtctcctgtgtctttga

SEQ ID NO: 4485584 - DNA, 25 bp, Homo sapien
gaaggaaggcgtctcctgtgtcttt

SEQ ID NO: 4485585 - DNA, 25 bp, Homo sapien
tcctgtgtctttgatgccaactcgg

SEQ ID NO: 4485586 - DNA, 25 bp, Homo sapien
ggaaggaaggcgtctcctgtgtctt

SEQ ID NO: 4485587 - DNA, 25 bp, Homo sapien
acagagagcacccctgtacacctta

SEQ ID NO: 4485588 - DNA, 25 bp, Homo sapien
cagagagcacccctgtacaccttac

SEQ ID NO: 4485589 - DNA, 25 bp, Homo sapien
tcacagagagcacccctgtacacct

SEQ ID NO: 4485590 - DNA, 25 bp, Homo sapien
cttcacagagagcacccctgtacac

SEQ ID NO: 4485591 - DNA, 25 bp, Homo sapien
aacaaactaaggagggagaccgcat

SEQ ID NO: 4485592 - DNA, 25 bp, Homo sapien
tcgtcaacaagaacccgagggcatg

SEQ ID NO: 4485593 - DNA, 25 bp, Homo sapien
tgcagagcggactgaagaaccatgt

SEQ ID NO: 4485594 - DNA, 25 bp, Homo sapien
gaggagcttaccaccttaccaggat

SEQ ID NO: 4485595 - DNA, 25 bp, Homo sapien
ggatctggtcgccaatggccacacc

SEQ ID NO: 4485596 - DNA, 25 bp, Homo sapien
gacatcctggtgtttggagaggaca

SEQ ID NO: 4485597 - DNA, 25 bp, Homo sapien
tggccacacctatcctcggtcttgg

SEQ ID NO: 4485598 - DNA, 25 bp, Homo sapien
caggaccagtaaagaggtgcttgat

SEQ ID NO: 4485599 - DNA, 25 bp, Homo sapien
agttcggtgtcatctctgagcctgg

SEQ ID NO: 4485600 - DNA, 25 bp, Homo sapien
cacttccgaagttcggtgtcatctc

SEQ ID NO: 4485601 - DNA, 25 bp, Homo sapien
agttctgcaagaacactctcgcctc

SEQ ID NO: 4485602 - DNA, 25 bp, Homo sapien
agcaagttctgcaagaacactctcg

SEQ ID NO: 4485603 - DNA, 25 bp, Homo sapien
gatgatgctaatgaggacagcctga

SEQ ID NO: 4485604 - DNA, 25 bp, Homo sapien
gactagacaagtggaaactctttcc

SEQ ID NO: 4485605 - DNA, 25 bp, Homo sapien
tagaaaccagatgaggtcacagatg

SEQ ID NO: 4485606 - DNA, 25 bp, Homo sapien
taccctaggaaatgggactagacaa

SEQ ID NO: 4485607 - DNA, 25 bp, Homo sapien
ggcccacgaagctgctccgttctta

SEQ ID NO: 4485608 - DNA, 25 bp, Homo sapien
cttatcttggtgaagagactgcact

SEQ ID NO: 4485609 - DNA, 25 bp, Homo sapien
agctgctccgttcttatcttggtga

SEQ ID NO: 4485610 - DNA, 25 bp, Homo sapien
tcttggcccacgaagctgctccgtt

SEQ ID NO: 4485611 - DNA, 25 bp, Homo sapien
catgctgccgagaggaatagaagtc

SEQ ID NO: 4485612 - DNA, 25 bp, Homo sapien
tccttgtccctgaacatgattccga

SEQ ID NO: 4485613 - DNA, 25 bp, Homo sapien
ttccgacgttggtagcatgctgccg

SEQ ID NO: 4485614 - DNA, 25 bp, Homo sapien
ttggcatcaacgcattctccttgtc

SEQ ID NO: 4485615 - DNA, 25 bp, Homo sapien
tggcatagcctactggagacactca

SEQ ID NO: 4485616 - DNA, 25 bp, Homo sapien
gagtgtatgcctgccactgagtcca

SEQ ID NO: 4485617 - DNA, 25 bp, Homo sapien
tatttgcgcatctcacgtggaagcc

SEQ ID NO: 4485618 - DNA, 25 bp, Homo sapien
cactgggcacatttgaggattctca

SEQ ID NO: 4485619 - DNA, 25 bp, Homo sapien
gggtgccagacaccacgacagagga

SEQ ID NO: 4485620 - DNA, 25 bp, Homo sapien
atggtagcccactggtaagtgcagc

SEQ ID NO: 4485621 - DNA, 25 bp, Homo sapien
cttcggattggggtgccagacacca

SEQ ID NO: 4485622 - DNA, 25 bp, Homo sapien
agacaccacgacagaggaggcacgg

SEQ ID NO: 4485623 - DNA, 25 bp, Homo sapien
agagcttgcaggcaccatatacggg

SEQ ID NO: 4485624 - DNA, 25 bp, Homo sapien
caggcaccatatacgggaggcttag

SEQ ID NO: 4485625 - DNA, 25 bp, Homo sapien
gcttgcaggcaccatatacgggagg

SEQ ID NO: 4485626 - DNA, 25 bp, Homo sapien
catgtccaagagcttgcaggcacca

SEQ ID NO: 4485627 - DNA, 25 bp, Homo sapien
taaaaattttcattgctcaattccc

SEQ ID NO: 4485628 - DNA, 25 bp, Homo sapien
aaaattttcattgctcaattcccac

SEQ ID NO: 4485629 - DNA, 25 bp, Homo sapien
aataaaaattttcattgctcaattc

SEQ ID NO: 4485630 - DNA, 25 bp, Homo sapien
caaggctgcagcaggccgagatcac

SEQ ID NO: 4485631 - DNA, 25 bp, Homo sapien
ctccagtcgttcataaggaccattc

SEQ ID NO: 4485632 - DNA, 25 bp, Homo sapien
cttggaaatggggatcggctctccc

SEQ ID NO: 4485633 - DNA, 25 bp, Homo sapien
tccaaaaatgtgctcatgggccttg

SEQ ID NO: 4485634 - DNA, 25 bp, Homo sapien
ggggatcggctctcccaatctgttt

SEQ ID NO: 4485635 - DNA, 25 bp, Homo sapien
aaggaatggcccgagagggacatac

SEQ ID NO: 4485636 - DNA, 25 bp, Homo sapien
ctgcttcgggttgggcacagcaaag

SEQ ID NO: 4485637 - DNA, 25 bp, Homo sapien
ggagagacagtggtcccaaaactct

SEQ ID NO: 4485638 - DNA, 25 bp, Homo sapien
aaagggcatgagagcatccatgggc

SEQ ID NO: 4485639 - DNA, 25 bp, Homo sapien
tcctgatggtctgcatgcctggcat

SEQ ID NO: 4485640 - DNA, 25 bp, Homo sapien
gacactgactatcgggtcacaggtg

SEQ ID NO: 4485641 - DNA, 25 bp, Homo sapien
gtcaaggcctagacccagtggtaga

SEQ ID NO: 4485642 - DNA, 25 bp, Homo sapien
ggctgcctggaagtaatcgtggcca

SEQ ID NO: 4485643 - DNA, 25 bp, Homo sapien
ggaaggcaggcaaaaccctgtgatg

SEQ ID NO: 4485644 - DNA, 25 bp, Homo sapien
aaggcaggcaaaaccctgtgatgac

SEQ ID NO: 4485645 - DNA, 25 bp, Homo sapien
gaccgacccggaagaaggcagatga

SEQ ID NO: 4485646 - DNA, 25 bp, Homo sapien
accctgtgatgaccgacccggaaga

SEQ ID NO: 4485647 - DNA, 25 bp, Homo sapien
cctgctcccctaggcagagggtctg

SEQ ID NO: 4485648 - DNA, 25 bp, Homo sapien
agcactgtgtccctggatagcagta

SEQ ID NO: 4485649 - DNA, 25 bp, Homo sapien
agtaggggggatcatactgtgggtc

SEQ ID NO: 4485650 - DNA, 25 bp, Homo sapien
agcaggagcattccctctccaggga

SEQ ID NO: 4485651 - DNA, 25 bp, Homo sapien
tgtgtagggctcgtcatggcacaga

SEQ ID NO: 4485652 - DNA, 25 bp, Homo sapien
aggttgatgtcaaatgtgtagggct

SEQ ID NO: 4485653 - DNA, 25 bp, Homo sapien
tcgtcatggcacagatacggcaggg

SEQ ID NO: 4485654 - DNA, 25 bp, Homo sapien
agagaggttgatgtcaaatgtgtag

SEQ ID NO: 4485655 - DNA, 25 bp, Homo sapien
aattccatgcatcagggaggaaaat

SEQ ID NO: 4485656 - DNA, 25 bp, Homo sapien
ttaattccatgcatcagggaggaaa

SEQ ID NO: 4485657 - DNA, 25 bp, Homo sapien
taattccatgcatcagggaggaaaa

SEQ ID NO: 4485658 - DNA, 25 bp, Homo sapien
cttaattccatgcatcagggaggaa

SEQ ID NO: 4485659 - DNA, 25 bp, Homo sapien
cttaaaattggacttgcatatggta

SEQ ID NO: 4485660 - DNA, 25 bp, Homo sapien
aattggacttgcatatggtagccgc

SEQ ID NO: 4485661 - DNA, 25 bp, Homo sapien
gacttgcatatggtagccgcctggc

SEQ ID NO: 4485662 - DNA, 25 bp, Homo sapien
tatggtagccgcctggctcattcct

SEQ ID NO: 4485663 - DNA, 25 bp, Homo sapien
acagcagaggcttctcgtgagcaaa

SEQ ID NO: 4485664 - DNA, 25 bp, Homo sapien
ttcaaacacgatgtcagggcaggcc

SEQ ID NO: 4485665 - DNA, 25 bp, Homo sapien
tggacactgggcaatggagctgaac

SEQ ID NO: 4485666 - DNA, 25 bp, Homo sapien
catgccgggccttgggatggacact

SEQ ID NO: 4485667 - DNA, 25 bp, Homo sapien
tgcaggcaatggacgcgaggtggaa

SEQ ID NO: 4485668 - DNA, 25 bp, Homo sapien
ggcaatggacgcgaggtggaatgag

SEQ ID NO: 4485669 - DNA, 25 bp, Homo sapien
gtggaatgagcagcggcaggcttag

SEQ ID NO: 4485670 - DNA, 25 bp, Homo sapien
caatggacgcgaggtggaatgagca

SEQ ID NO: 4485671 - DNA, 25 bp, Homo sapien
cccgctgatggtcccagaagccagg

SEQ ID NO: 4485672 - DNA, 25 bp, Homo sapien
cggccgcaggttgcagccgttgaca

SEQ ID NO: 4485673 - DNA, 25 bp, Homo sapien
agctgctgcagcatcgtccagtaca

SEQ ID NO: 4485674 - DNA, 25 bp, Homo sapien
gctgcagcatcgtccagtacatgta

SEQ ID NO: 4485675 - DNA, 25 bp, Homo sapien
cctgaaatctcttctcgaggctgag

SEQ ID NO: 4485676 - DNA, 25 bp, Homo sapien
ctcgggcctgaaatctcttctcgag

SEQ ID NO: 4485677 - DNA, 25 bp, Homo sapien
ggcctgaaatctcttctcgaggctg

SEQ ID NO: 4485678 - DNA, 25 bp, Homo sapien
tgaaatctcttctcgaggctgagct

SEQ ID NO: 4485679 - DNA, 25 bp, Homo sapien
cagaaacttcctggtctgaccattc

SEQ ID NO: 4485680 - DNA, 25 bp, Homo sapien
ttcatccccgtccagcagaaacttc

SEQ ID NO: 4485681 - DNA, 25 bp, Homo sapien
ggtctatgggcttcgttcccttcca

SEQ ID NO: 4485682 - DNA, 25 bp, Homo sapien
caacatggagccgaagttttctggc

SEQ ID NO: 4485683 - DNA, 25 bp, Homo sapien
tcagccttgcgcaggaattctgtgc

SEQ ID NO: 4485684 - DNA, 25 bp, Homo sapien
actgcttctacaccctgggacccct

SEQ ID NO: 4485685 - DNA, 25 bp, Homo sapien
tgggacccctggtcagccttgcgca

SEQ ID NO: 4485686 - DNA, 25 bp, Homo sapien
ctggtcagccttgcgcaggaattct

SEQ ID NO: 4485687 - DNA, 25 bp, Homo sapien
ggtgccatcagaatcacacacacat

SEQ ID NO: 4485688 - DNA, 25 bp, Homo sapien
gaggcactgcaaggctcaacagctt

SEQ ID NO: 4485689 - DNA, 25 bp, Homo sapien
gaataaccctccacggaagctgggc

SEQ ID NO: 4485690 - DNA, 25 bp, Homo sapien
aaagttgctgggctcaccggaacca

SEQ ID NO: 4485691 - DNA, 25 bp, Homo sapien
ttccagcacactggccaaagccgat

SEQ ID NO: 4485692 - DNA, 25 bp, Homo sapien
gccaaagccgatgcggtaaccatcc

SEQ ID NO: 4485693 - DNA, 25 bp, Homo sapien
tgcggtaaccatccccctggcagta

SEQ ID NO: 4485694 - DNA, 25 bp, Homo sapien
cacactggccaaagccgatgcggta

SEQ ID NO: 4485695 - DNA, 25 bp, Homo sapien
tgaatggcggaccaggcctacagcc

SEQ ID NO: 4485696 - DNA, 25 bp, Homo sapien
gctttatttgtcactgaatggcgga

SEQ ID NO: 4485697 - DNA, 25 bp, Homo sapien
accaggcctacagcccgagggagga

SEQ ID NO: 4485698 - DNA, 25 bp, Homo sapien
gcccgagggaggaccccagtcacag

SEQ ID NO: 4485699 - DNA, 25 bp, Homo sapien
taatttggctagactaaggtaccca

SEQ ID NO: 4485700 - DNA, 25 bp, Homo sapien
aaattccatggaataccaggaggcc

SEQ ID NO: 4485701 - DNA, 25 bp, Homo sapien
gaggaaattttgacagcagactgct

SEQ ID NO: 4485702 - DNA, 25 bp, Homo sapien
tatctggcagggaggctttacacac

SEQ ID NO: 4485703 - DNA, 25 bp, Homo sapien
gcaaagcactggagaatatggccct

SEQ ID NO: 4485704 - DNA, 25 bp, Homo sapien
taagtgacctttgcctgtgacccag

SEQ ID NO: 4485705 - DNA, 25 bp, Homo sapien
taaaccaatgtgtgtgagaggcctc

SEQ ID NO: 4485706 - DNA, 25 bp, Homo sapien
taattgccaagtaaagcccaggctg

SEQ ID NO: 4485707 - DNA, 25 bp, Homo sapien
gagtgttgtcctagatgctgaaagc

SEQ ID NO: 4485708 - DNA, 25 bp, Homo sapien
gagggcccagcttataacagatacg

SEQ ID NO: 4485709 - DNA, 25 bp, Homo sapien
aagatgcatagagcacagccctgcc

SEQ ID NO: 4485710 - DNA, 25 bp, Homo sapien
tccacaggccgaaatcaaagtccac

SEQ ID NO: 4485711 - DNA, 25 bp, Homo sapien
cctctctggagatgaactagatggc

SEQ ID NO: 4485712 - DNA, 25 bp, Homo sapien
gaggcaaccttctatgtactgacat

SEQ ID NO: 4485713 - DNA, 25 bp, Homo sapien
taaagacctgacaacagtagcttcc

SEQ ID NO: 4485714 - DNA, 25 bp, Homo sapien
tgcaaaatgacatcgctacaaggac

SEQ ID NO: 4485715 - DNA, 25 bp, Homo sapien
gaagcaaactcacagatgacctaga

SEQ ID NO: 4485716 - DNA, 25 bp, Homo sapien
tacaataagtgaaccccacctgaag

SEQ ID NO: 4485717 - DNA, 25 bp, Homo sapien
gggcttagccccttattgaatggag

SEQ ID NO: 4485718 - DNA, 25 bp, Homo sapien
gcttcacaatagttgcttaccagag

SEQ ID NO: 4485719 - DNA, 25 bp, Homo sapien
aggaaaggtcttgtgggcacacagt

SEQ ID NO: 4485720 - DNA, 25 bp, Homo sapien
ctaggaaaggtcttgtgggcacaca

SEQ ID NO: 4485721 - DNA, 25 bp, Homo sapien
gaaaggtcttgtgggcacacagtga

SEQ ID NO: 4485722 - DNA, 25 bp, Homo sapien
aaggtcttgtgggcacacagtgaga

SEQ ID NO: 4485723 - DNA, 25 bp, Homo sapien
tagacacactgcagcgtcacattgc

SEQ ID NO: 4485724 - DNA, 25 bp, Homo sapien
cagcaagcaccacgtatgactcaca

SEQ ID NO: 4485725 - DNA, 25 bp, Homo sapien
tggatgcccacacatgaacccttgt

SEQ ID NO: 4485726 - DNA, 25 bp, Homo sapien
tttgcctggtcagcactcagcaagc

SEQ ID NO: 4485727 - DNA, 25 bp, Homo sapien
gatgcttatcctgtcaccctagttg

SEQ ID NO: 4485728 - DNA, 25 bp, Homo sapien
tcttaccttacttcaacacagggcc

SEQ ID NO: 4485729 - DNA, 25 bp, Homo sapien
caaagcacgctataccaggactgca

SEQ ID NO: 4485730 - DNA, 25 bp, Homo sapien
tctgaacatgaccaggagtcctgct

SEQ ID NO: 4485731 - DNA, 25 bp, Homo sapien
gaaggacaggagcatcttgtattcc

SEQ ID NO: 4485732 - DNA, 25 bp, Homo sapien
tgatgtctcctcattagaggaaacc

SEQ ID NO: 4485733 - DNA, 25 bp, Homo sapien
tgtgatgtctcctcattagaggaaa

SEQ ID NO: 4485734 - DNA, 25 bp, Homo sapien
aaccaggggctattttctgtggaag

SEQ ID NO: 4485735 - DNA, 25 bp, Homo sapien
gagattaatcactccgcgagacagc

SEQ ID NO: 4485736 - DNA, 25 bp, Homo sapien
gaggaatcctgcaattcagatgcgc

SEQ ID NO: 4485737 - DNA, 25 bp, Homo sapien
aaagtcagtcgcttgcaggttgcct

SEQ ID NO: 4485738 - DNA, 25 bp, Homo sapien
taaatgtcttcacgcatgcagagga

SEQ ID NO: 4485739 - DNA, 25 bp, Homo sapien
tcagcagagcctgactgcttgttgc

SEQ ID NO: 4485740 - DNA, 25 bp, Homo sapien
gcccagagcatcatactcctccaac

SEQ ID NO: 4485741 - DNA, 25 bp, Homo sapien
tggcccagagcatcatactcctcca

SEQ ID NO: 4485742 - DNA, 25 bp, Homo sapien
ttcagcagagcctgactgcttgttg

SEQ ID NO: 4485743 - DNA, 25 bp, Homo sapien
ggaagctcctacacgtggaatgttg

SEQ ID NO: 4485744 - DNA, 25 bp, Homo sapien
gaggaagctcctacacgtggaatgt

SEQ ID NO: 4485745 - DNA, 25 bp, Homo sapien
ttgaggaagctcctacacgtggaat

SEQ ID NO: 4485746 - DNA, 25 bp, Homo sapien
ggatgagggacaatttgaggaagct

SEQ ID NO: 4485747 - DNA, 25 bp, Homo sapien
ttctcgtcacgttcagtgcctaaaa

SEQ ID NO: 4485748 - DNA, 25 bp, Homo sapien
aaagtccttctcgtcacgttcagtg

SEQ ID NO: 4485749 - DNA, 25 bp, Homo sapien
ccttctcgtcacgttcagtgcctaa

SEQ ID NO: 4485750 - DNA, 25 bp, Homo sapien
agttagaaagtccttctcgtcacgt

SEQ ID NO: 4485751 - DNA, 25 bp, Homo sapien
ctccccattcggggatcctcggcct

SEQ ID NO: 4485752 - DNA, 25 bp, Homo sapien
ccccattcggggatcctcggcctct

SEQ ID NO: 4485753 - DNA, 25 bp, Homo sapien
tccccattcggggatcctcggcctc

SEQ ID NO: 4485754 - DNA, 25 bp, Homo sapien
gctcggggctcagaaaccgggagag

SEQ ID NO: 4485755 - DNA, 25 bp, Homo sapien
gcagcggcccgagttccactgcggg

SEQ ID NO: 4485756 - DNA, 25 bp, Homo sapien
gcaccctcgctgttctgagcctcac

SEQ ID NO: 4485757 - DNA, 25 bp, Homo sapien
ctcggtgggagccgcacgggagccg

SEQ ID NO: 4485758 - DNA, 25 bp, Homo sapien
gcgaggagacccgcgtggacactgg

SEQ ID NO: 4485759 - DNA, 25 bp, Homo sapien
ggcgaggagacccgcgtggacactg

SEQ ID NO: 4485760 - DNA, 25 bp, Homo sapien
tggacactgggaccgatcccctcct

SEQ ID NO: 4485761 - DNA, 25 bp, Homo sapien
gggaccgatcccctcctcggcggca

SEQ ID NO: 4485762 - DNA, 25 bp, Homo sapien
taaggaccgcgggagcatcccggga

SEQ ID NO: 4485763 - DNA, 25 bp, Homo sapien
ggaaacgccgtagccggcgatccgc

SEQ ID NO: 4485764 - DNA, 25 bp, Homo sapien
aggatctgctcgctgaagtcgggcc

SEQ ID NO: 4485765 - DNA, 25 bp, Homo sapien
agcacagcattgtcggtgccgccgg

SEQ ID NO: 4485766 - DNA, 25 bp, Homo sapien
tctgggtacaagctcatgacaaagg

SEQ ID NO: 4485767 - DNA, 25 bp, Homo sapien
gaatgtatcaggatcccacagataa

SEQ ID NO: 4485768 - DNA, 25 bp, Homo sapien
ggtatctctgggtacaagctcatga

SEQ ID NO: 4485769 - DNA, 25 bp, Homo sapien
aaggtgccaatacctatgaatgtat

SEQ ID NO: 4485770 - DNA, 25 bp, Homo sapien
gctccttaaagcaaacagccagcat

SEQ ID NO: 4485771 - DNA, 25 bp, Homo sapien
agctccttaaagcaaacagccagca

SEQ ID NO: 4485772 - DNA, 25 bp, Homo sapien
ctgctcttggcccaccagacctcca

SEQ ID NO: 4485773 - DNA, 25 bp, Homo sapien
aggctctgcgttcctactcctgctc

SEQ ID NO: 4485774 - DNA, 25 bp, Homo sapien
ctctgcgttcctactcctgctcttg

SEQ ID NO: 4485775 - DNA, 25 bp, Homo sapien
gaggacacttctctgccacaaggct

SEQ ID NO: 4485776 - DNA, 25 bp, Homo sapien
tagcctggggtcaccctcattcagc

SEQ ID NO: 4485777 - DNA, 25 bp, Homo sapien
aaatggaatttgaaccacacggctt

SEQ ID NO: 4485778 - DNA, 25 bp, Homo sapien
gaaccacacggctttcagatccctt

SEQ ID NO: 4485779 - DNA, 25 bp, Homo sapien
gccaccaactgggacgataagaaat

SEQ ID NO: 4485780 - DNA, 25 bp, Homo sapien
taacctgtcagagtcatagcctgct

SEQ ID NO: 4485781 - DNA, 25 bp, Homo sapien
catagcctgtgagaaaatggcaacc

SEQ ID NO: 4485782 - DNA, 25 bp, Homo sapien
caacccctggagttgtggaacacca

SEQ ID NO: 4485783 - DNA, 25 bp, Homo sapien
gagtagtctgcaggcttcaacaagc

SEQ ID NO: 4485784 - DNA, 25 bp, Homo sapien
agtcctgggtgtccacagttccatg

SEQ ID NO: 4485785 - DNA, 25 bp, Homo sapien
catgggcccagaacagtgaggagca

SEQ ID NO: 4485786 - DNA, 25 bp, Homo sapien
gagtcctgggtgtccacagttccat

SEQ ID NO: 4485787 - DNA, 25 bp, Homo sapien
tctccggtgtaagacatggcagctg

SEQ ID NO: 4485788 - DNA, 25 bp, Homo sapien
tgtcacttctctagcatctccggtg

SEQ ID NO: 4485789 - DNA, 25 bp, Homo sapien
tttgggcctctaagacactgaaaga

SEQ ID NO: 4485790 - DNA, 25 bp, Homo sapien
tataacaaccatttggagatgctgg

SEQ ID NO: 4485791 - DNA, 25 bp, Homo sapien
cattcatgaaccatgtctccttgtc

SEQ ID NO: 4485792 - DNA, 25 bp, Homo sapien
ctgctccattcatgaaccatgtctc

SEQ ID NO: 4485793 - DNA, 25 bp, Homo sapien
ctccagtaacttgatggggacaacc

SEQ ID NO: 4485794 - DNA, 25 bp, Homo sapien
tggtgtctccagtaacttgatgggg

SEQ ID NO: 4485795 - DNA, 25 bp, Homo sapien
ccctgtgttgctaattcatctaata

SEQ ID NO: 4485796 - DNA, 25 bp, Homo sapien
agaagtagttctagctatggctgca

SEQ ID NO: 4485797 - DNA, 25 bp, Homo sapien
tacttgcactggaaaccaactttct

SEQ ID NO: 4485798 - DNA, 25 bp, Homo sapien
taattcatctaatacttgcactgga

SEQ ID NO: 4485799 - DNA, 25 bp, Homo sapien
ggcgggcggcgctccctccgctctc

SEQ ID NO: 4485800 - DNA, 25 bp, Homo sapien
ccacacaaaggacggcgcgggcggg

SEQ ID NO: 4485801 - DNA, 25 bp, Homo sapien
cttgctcggagaggataggcgcccg

SEQ ID NO: 4485802 - DNA, 25 bp, Homo sapien
gacccggtcaggcccaggcgccgcc

SEQ ID NO: 4485803 - DNA, 25 bp, Homo sapien
cttccaaataccatggaaattccct

SEQ ID NO: 4485804 - DNA, 25 bp, Homo sapien
tccaaataccatggaaattccctaa

SEQ ID NO: 4485805 - DNA, 25 bp, Homo sapien
atcttccaaataccatggaaattcc

SEQ ID NO: 4485806 - DNA, 25 bp, Homo sapien
ccaaataccatggaaattccctaag

SEQ ID NO: 4485807 - DNA, 25 bp, Homo sapien
tatatagttttttagccgtcactcc

SEQ ID NO: 4485808 - DNA, 25 bp, Homo sapien
tagtgtacttgttgcccaagtagtg

SEQ ID NO: 4485809 - DNA, 25 bp, Homo sapien
atgcccctgcacatccatagcttag

SEQ ID NO: 4485810 - DNA, 25 bp, Homo sapien
attatactaccctgtatgcccctgc

SEQ ID NO: 4485811 - DNA, 25 bp, Homo sapien
ctgtgaaggtgcgagagattaaatc

SEQ ID NO: 4485812 - DNA, 25 bp, Homo sapien
cttgcgagcgcctccatgtgttcac

SEQ ID NO: 4485813 - DNA, 25 bp, Homo sapien
gatgatttgctatatcagctcccag

SEQ ID NO: 4485814 - DNA, 25 bp, Homo sapien
tctcaccaaccgaatataaattggg

SEQ ID NO: 4485815 - DNA, 25 bp, Homo sapien
catgtaagtacctgagcggtgtcca

SEQ ID NO: 4485816 - DNA, 25 bp, Homo sapien
tgtggcctcccgaagaaaatgtaag

SEQ ID NO: 4485817 - DNA, 25 bp, Homo sapien
cagggcaagatcataggttagtcca

SEQ ID NO: 4485818 - DNA, 25 bp, Homo sapien
tgaagataggcagactgacagctgg

SEQ ID NO: 4485819 - DNA, 25 bp, Homo sapien
gacagcagcatcaattctccgtgga

SEQ ID NO: 4485820 - DNA, 25 bp, Homo sapien
aggcccttaatctttgcagctgagc

SEQ ID NO: 4485821 - DNA, 25 bp, Homo sapien
gtcagttccattgggccatttaggc

SEQ ID NO: 4485822 - DNA, 25 bp, Homo sapien
gagaaaaactttcacaaggatcatg

SEQ ID NO: 4485823 - DNA, 25 bp, Homo sapien
ctgggaatgaatgaaggtcacagca

SEQ ID NO: 4485824 - DNA, 25 bp, Homo sapien
cttctcctgggaatgaatgaaggtc

SEQ ID NO: 4485825 - DNA, 25 bp, Homo sapien
gaatgaatgaaggtcacagcagtcc

SEQ ID NO: 4485826 - DNA, 25 bp, Homo sapien
atgaatgaaggtcacagcagtccag

SEQ ID NO: 4485827 - DNA, 25 bp, Homo sapien
tgactcaagtcgaagcaagcaaagt

SEQ ID NO: 4485828 - DNA, 25 bp, Homo sapien
gacaaggcctggtatcaatagagca

SEQ ID NO: 4485829 - DNA, 25 bp, Homo sapien
caaagttggctaaaccttcagatga

SEQ ID NO: 4485830 - DNA, 25 bp, Homo sapien
cctgcaagccagttgatgatgtgct

SEQ ID NO: 4485831 - DNA, 25 bp, Homo sapien
gggggcaacgggcaacgtcacagat

SEQ ID NO: 4485832 - DNA, 25 bp, Homo sapien
gcaacgtcacagatccaggtatgtc

SEQ ID NO: 4485833 - DNA, 25 bp, Homo sapien
ccccgccatcctcacctgtccggtg

SEQ ID NO: 4485834 - DNA, 25 bp, Homo sapien
cgctttcctccacgggcaggcatgg

SEQ ID NO: 4485835 - DNA, 25 bp, Homo sapien
tcctcacctgtccggtggccgccat

SEQ ID NO: 4485836 - DNA, 25 bp, Homo sapien
ggaacgccgctttcctccacgggca

SEQ ID NO: 4485837 - DNA, 25 bp, Homo sapien
tcgcgaaggtaagcaccaaaaatgc

SEQ ID NO: 4485838 - DNA, 25 bp, Homo sapien
ctctgcaaggtagtttgggaaacca

SEQ ID NO: 4485839 - DNA, 25 bp, Homo sapien
caccgggcagcagctttagagttgc

SEQ ID NO: 4485840 - DNA, 25 bp, Homo sapien
tagagttgccgatgttgtggacaag

SEQ ID NO: 4485841 - DNA, 25 bp, Homo sapien
gccttcaccatcttcatcatcgaag

SEQ ID NO: 4485842 - DNA, 25 bp, Homo sapien
tgaaaatttactggggccttcacca

SEQ ID NO: 4485843 - DNA, 25 bp, Homo sapien
accatcttcatcatcgaagtccatt

SEQ ID NO: 4485844 - DNA, 25 bp, Homo sapien
ttcaccatcttcatcatcgaagtcc

SEQ ID NO: 4485845 - DNA, 25 bp, Homo sapien
ccccagctgccggtatgagaaggtg

SEQ ID NO: 4485846 - DNA, 25 bp, Homo sapien
ggatgttagtaatgccccttatgaa

SEQ ID NO: 4485847 - DNA, 25 bp, Homo sapien
gtaaggcacacgatgagcacggtgt

SEQ ID NO: 4485848 - DNA, 25 bp, Homo sapien
tgagcacggtgtataattttgactc

SEQ ID NO: 4485849 - DNA, 25 bp, Homo sapien
aacagatacgagaactccttggaag

SEQ ID NO: 4485850 - DNA, 25 bp, Homo sapien
cacagcaacagatacgagaactcct

SEQ ID NO: 4485851 - DNA, 25 bp, Homo sapien
aatccacagcaacagatacgagaac

SEQ ID NO: 4485852 - DNA, 25 bp, Homo sapien
gcaacagatacgagaactccttgga

SEQ ID NO: 4485853 - DNA, 25 bp, Homo sapien
agcagccaatggggtcacttgcagc

SEQ ID NO: 4485854 - DNA, 25 bp, Homo sapien
cagccaatggggtcacttgcagcca

SEQ ID NO: 4485855 - DNA, 25 bp, Homo sapien
ccaatggggtcacttgcagccattt

SEQ ID NO: 4485856 - DNA, 25 bp, Homo sapien
gccaatggggtcacttgcagccatt

SEQ ID NO: 4485857 - DNA, 25 bp, Homo sapien
cagaaaaactgaagcgggtagcata

SEQ ID NO: 4485858 - DNA, 25 bp, Homo sapien
tcaaatcagggttaatctctccagc

SEQ ID NO: 4485859 - DNA, 25 bp, Homo sapien
catttcaaatcagggttaatctctc

SEQ ID NO: 4485860 - DNA, 25 bp, Homo sapien
aatcagggttaatctctccagcaga

SEQ ID NO: 4485861 - DNA, 25 bp, Homo sapien
ccatgaaggccagaagaaagccatt

SEQ ID NO: 4485862 - DNA, 25 bp, Homo sapien
catgaaggccagaagaaagccattt

SEQ ID NO: 4485863 - DNA, 25 bp, Homo sapien
cagggcattgtaagagccatgaagg

SEQ ID NO: 4485864 - DNA, 25 bp, Homo sapien
ctgcagggcattgtaagagccatga

SEQ ID NO: 4485865 - DNA, 25 bp, Homo sapien
aacatccttcatggccagtcgctcc

SEQ ID NO: 4485866 - DNA, 25 bp, Homo sapien
ttcatggccagtcgctcccaggcat

SEQ ID NO: 4485867 - DNA, 25 bp, Homo sapien
ggaacatccttcatggccagtcgct

SEQ ID NO: 4485868 - DNA, 25 bp, Homo sapien
caggaacatccttcatggccagtcg

SEQ ID NO: 4485869 - DNA, 25 bp, Homo sapien
gtgacactcgggaaggaagactgta
